United States Patent Application Publication US 2007/0042381 A1 - sequence listing, part 72

SEQ ID NO: 3280183 - RNA, 11 nt, Vaccinia virus
aucauacuuac

SEQ ID NO: 3280184 - RNA, 23 nt, Vaccinia virus
caaaacgaggauaguugauuuau

SEQ ID NO: 3280185 - RNA, 21 nt, Vaccinia virus
ccaacauggugaauucuugca

SEQ ID NO: 3280186 - RNA, 19 nt, Vaccinia virus
ucauuucuccaaagaauau

SEQ ID NO: 3280187 - RNA, 22 nt, Vaccinia virus
uauuaauccacuauauauucua

SEQ ID NO: 3280188 - RNA, 15 nt, Vaccinia virus
uaguaauuugugcau

SEQ ID NO: 3280189 - RNA, 14 nt, Vaccinia virus
guuuaauucuucau

SEQ ID NO: 3280190 - RNA, 16 nt, Vaccinia virus
uaccgaagaauuaaau

SEQ ID NO: 3280191 - RNA, 16 nt, Vaccinia virus
ucaaaugguacaaaaa

SEQ ID NO: 3280192 - RNA, 21 nt, Vaccinia virus
uaaguauuuauaaaacucaua

SEQ ID NO: 3280193 - RNA, 16 nt, Vaccinia virus
gucaaaugucuauucu

SEQ ID NO: 3280194 - RNA, 23 nt, Vaccinia virus
guguaaacgaaaacuauauacua

SEQ ID NO: 3280195 - RNA, 23 nt, Vaccinia virus
caucuaucaucuccacacaguca

SEQ ID NO: 3280196 - RNA, 14 nt, Vaccinia virus
uaagaugucauaau

SEQ ID NO: 3280197 - RNA, 14 nt, Vaccinia virus
gcuauaaugaugau

SEQ ID NO: 3280198 - RNA, 16 nt, Vaccinia virus
auagugaaacaaaaua

SEQ ID NO: 3280199 - RNA, 21 nt, Vaccinia virus
uaaaauacuaaugcaucuauu

SEQ ID NO: 3280200 - RNA, 19 nt, Vaccinia virus
caguuaacgaaagcaaaga

SEQ ID NO: 3280201 - RNA, 19 nt, Vaccinia virus
cgaguugaguuuauccuua

SEQ ID NO: 3280202 - RNA, 13 nt, Vaccinia virus
auauguuuguaaa

SEQ ID NO: 3280203 - RNA, 21 nt, Vaccinia virus
aaaugaacuuuuacagaucua

SEQ ID NO: 3280204 - RNA, 15 nt, Vaccinia virus
ucugauaauuuagau

SEQ ID NO: 3280205 - RNA, 17 nt, Vaccinia virus
uguagaugguucuuuaa

SEQ ID NO: 3280206 - RNA, 22 nt, Vaccinia virus
guaaguaucuuauguauauguu

SEQ ID NO: 3280207 - RNA, 18 nt, Vaccinia virus
guuacauuuauacuucuu

SEQ ID NO: 3280208 - RNA, 18 nt, Vaccinia virus
ccucagaggauauguuug

SEQ ID NO: 3280209 - RNA, 17 nt, Vaccinia virus
aucaaaugguugauaau

SEQ ID NO: 3280210 - RNA, 17 nt, Vaccinia virus
uagaaacuauacgaaau

SEQ ID NO: 3280211 - RNA, 15 nt, Vaccinia virus
uagcgaagaaugcuu

SEQ ID NO: 3280212 - RNA, 13 nt, Vaccinia virus
uaaguucuuuaua

SEQ ID NO: 3280213 - RNA, 20 nt, Vaccinia virus
ugacauuuucacaaauacua

SEQ ID NO: 3280214 - RNA, 17 nt, Vaccinia virus
cuugauacuuuuucuag

SEQ ID NO: 3280215 - RNA, 15 nt, Vaccinia virus
aacuaucuaaaugua

SEQ ID NO: 3280216 - RNA, 20 nt, Vaccinia virus
agaaaaugcagaaaugauuu

SEQ ID NO: 3280217 - RNA, 15 nt, Vaccinia virus
ucaauaauauaucuu

SEQ ID NO: 3280218 - RNA, 16 nt, Vaccinia virus
ucaagaagauaucaga

SEQ ID NO: 3280219 - RNA, 12 nt, Vaccinia virus
agggaauuauug

SEQ ID NO: 3280220 - RNA, 13 nt, Vaccinia virus
ucuccuuucucuu

SEQ ID NO: 3280221 - RNA, 16 nt, Vaccinia virus
uguuuaauuuuuucua

SEQ ID NO: 3280222 - RNA, 19 nt, Vaccinia virus
auauuggagcaaaauccua

SEQ ID NO: 3280223 - RNA, 17 nt, Vaccinia virus
uccuucaguuugagaaa

SEQ ID NO: 3280224 - RNA, 17 nt, Vaccinia virus
agacuaugggaauauau

SEQ ID NO: 3280225 - RNA, 17 nt, Vaccinia virus
gauauaauuuuauuaau

SEQ ID NO: 3280226 - RNA, 19 nt, Vaccinia virus
aacuuauuuuauacagacu

SEQ ID NO: 3280227 - RNA, 20 nt, Vaccinia virus
guuaucaucguauaaauuaa

SEQ ID NO: 3280228 - RNA, 16 nt, Vaccinia virus
auuuagacaacaggau

SEQ ID NO: 3280229 - RNA, 14 nt, Vaccinia virus
acaucccuuuucca

SEQ ID NO: 3280230 - RNA, 14 nt, Vaccinia virus
cuucgauagauauu

SEQ ID NO: 3280231 - RNA, 13 nt, Vaccinia virus
cuuaacaauaaau

SEQ ID NO: 3280232 - RNA, 18 nt, Vaccinia virus
cuaccgcaucaucaucgu

SEQ ID NO: 3280233 - RNA, 12 nt, Vaccinia virus
uuaaaauuauua

SEQ ID NO: 3280234 - RNA, 20 nt, Vaccinia virus
gccauacucagaauuaugau

SEQ ID NO: 3280235 - RNA, 22 nt, Vaccinia virus
auaaaugguuucgaagaucuuc

SEQ ID NO: 3280236 - RNA, 20 nt, Vaccinia virus
uuucuguaaauucaugauug

SEQ ID NO: 3280237 - RNA, 21 nt, Vaccinia virus
ugcuguguguaugaaaugcuu

SEQ ID NO: 3280238 - RNA, 20 nt, Vaccinia virus
auuuacuuuuucaucuuuac

SEQ ID NO: 3280239 - RNA, 20 nt, Vaccinia virus
auuguacgucucaauagcug

SEQ ID NO: 3280240 - RNA, 14 nt, Vaccinia virus
uuucgcuauuucua

SEQ ID NO: 3280241 - RNA, 13 nt, Vaccinia virus
uuaauaauuguua

SEQ ID NO: 3280242 - RNA, 19 nt, Vaccinia virus
ucuguacuucuguacaaaa

SEQ ID NO: 3280243 - RNA, 17 nt, Vaccinia virus
auuucuauuucuguaua

SEQ ID NO: 3280244 - RNA, 15 nt, Vaccinia virus
uugcggcauauauaa

SEQ ID NO: 3280245 - RNA, 17 nt, Vaccinia virus
cguacaaggauuucaag

SEQ ID NO: 3280246 - RNA, 14 nt, Vaccinia virus
agggguauacuucu

SEQ ID NO: 3280247 - RNA, 18 nt, Vaccinia virus
gcauuaauacuguuuucu

SEQ ID NO: 3280248 - RNA, 13 nt, Vaccinia virus
guauaaaaauuaa

SEQ ID NO: 3280249 - RNA, 22 nt, Vaccinia virus
cuuuucauccaguugaauggau

SEQ ID NO: 3280250 - RNA, 14 nt, Vaccinia virus
auauuguagaauac

SEQ ID NO: 3280251 - RNA, 13 nt, Vaccinia virus
cauaauauauaca

SEQ ID NO: 3280252 - RNA, 18 nt, Vaccinia virus
auuuuaucgauucuaaug

SEQ ID NO: 3280253 - RNA, 19 nt, Vaccinia virus
uuaacucagaagauuauua

SEQ ID NO: 3280254 - RNA, 15 nt, Vaccinia virus
cuacaucuuuaagau

SEQ ID NO: 3280255 - RNA, 15 nt, Vaccinia virus
accgguaaucuuguc

SEQ ID NO: 3280256 - RNA, 15 nt, Vaccinia virus
uagaugauauuguaa

SEQ ID NO: 3280257 - RNA, 15 nt, Vaccinia virus
cauggacauacuaau

SEQ ID NO: 3280258 - RNA, 15 nt, Vaccinia virus
aguucauaacagaua

SEQ ID NO: 3280259 - RNA, 19 nt, Vaccinia virus
aauuuaaaguguaaauaua

SEQ ID NO: 3280260 - RNA, 15 nt, Vaccinia virus
aaaacgauuaaacaa

SEQ ID NO: 3280261 - RNA, 17 nt, Vaccinia virus
uaaaaaaguuaaaacuu

SEQ ID NO: 3280262 - RNA, 19 nt, Vaccinia virus
gauaguacagcguaguaca

SEQ ID NO: 3280263 - RNA, 22 nt, Vaccinia virus
auugauugcuguuauuaaugga

SEQ ID NO: 3280264 - RNA, 13 nt, Vaccinia virus
gugauaguuuaua

SEQ ID NO: 3280265 - RNA, 18 nt, Vaccinia virus
acgaugcugaguauuuca

SEQ ID NO: 3280266 - RNA, 19 nt, Vaccinia virus
ucaaguuaucgucuguauu

SEQ ID NO: 3280267 - RNA, 15 nt, Vaccinia virus
ugaguguagaugcug

SEQ ID NO: 3280268 - RNA, 16 nt, Vaccinia virus
caaaacucaaauguua

SEQ ID NO: 3280269 - RNA, 13 nt, Vaccinia virus
cgucuacaaaaaa

SEQ ID NO: 3280270 - RNA, 18 nt, Vaccinia virus
agauguuugagaauauau

SEQ ID NO: 3280271 - RNA, 19 nt, Vaccinia virus
aaaaagauuucagaaucua

SEQ ID NO: 3280272 - RNA, 14 nt, Vaccinia virus
uaggagaauuauuu

SEQ ID NO: 3280273 - RNA, 20 nt, Vaccinia virus
uaaauaccauacaauuuaug

SEQ ID NO: 3280274 - RNA, 18 nt, Vaccinia virus
aggaauaucugaugaugu

SEQ ID NO: 3280275 - RNA, 21 nt, Vaccinia virus
aucacccgcgugugagagaag

SEQ ID NO: 3280276 - RNA, 13 nt, Vaccinia virus
uaacaugaacgau

SEQ ID NO: 3280277 - RNA, 17 nt, Vaccinia virus
aaacugcaaauguagua

SEQ ID NO: 3280278 - RNA, 17 nt, Vaccinia virus
accuaagcaagaaagau

SEQ ID NO: 3280279 - RNA, 22 nt, Vaccinia virus
uacuccauuauauauuccuuga

SEQ ID NO: 3280280 - RNA, 11 nt, Vaccinia virus
uacuuaaugaa

SEQ ID NO: 3280281 - RNA, 14 nt, Vaccinia virus
acuuaaaaauggau

SEQ ID NO: 3280282 - RNA, 22 nt, Vaccinia virus
uggaagaugcuauaucaaaaua

SEQ ID NO: 3280283 - RNA, 14 nt, Vaccinia virus
ucaauaucaacaag

SEQ ID NO: 3280284 - RNA, 20 nt, Vaccinia virus
uacucuaaucuuuaauagau

SEQ ID NO: 3280285 - RNA, 19 nt, Vaccinia virus
augauaaaggagaauagcg

SEQ ID NO: 3280286 - RNA, 22 nt, Vaccinia virus
gaagaacguguauuaaauagaa

SEQ ID NO: 3280287 - RNA, 22 nt, Vaccinia virus
cagauuaauaguuuuauuugaa

SEQ ID NO: 3280288 - RNA, 20 nt, Vaccinia virus
aucuugguuauauuauuaga

SEQ ID NO: 3280289 - RNA, 14 nt, Vaccinia virus
uagaauaaauuagc

SEQ ID NO: 3280290 - RNA, 13 nt, Vaccinia virus
aacucuaaucaaa

SEQ ID NO: 3280291 - RNA, 20 nt, Vaccinia virus
ccaucagaauguuucccuga

SEQ ID NO: 3280292 - RNA, 21 nt, Vaccinia virus
auacaauaucuucgguaucuu

SEQ ID NO: 3280293 - RNA, 15 nt, Vaccinia virus
caugguauauggaua

SEQ ID NO: 3280294 - RNA, 18 nt, Vaccinia virus
uacaacauuccaaagauc

SEQ ID NO: 3280295 - RNA, 18 nt, Vaccinia virus
augaauuuuuaaaaucau

SEQ ID NO: 3280296 - RNA, 17 nt, Vaccinia virus
ucauguguucaaaguau

SEQ ID NO: 3280297 - RNA, 21 nt, Vaccinia virus
augcaaagauguuuaaugaua

SEQ ID NO: 3280298 - RNA, 15 nt, Vaccinia virus
cauaauuaauacaau

SEQ ID NO: 3280299 - RNA, 13 nt, Vaccinia virus
auacauguuuuau

SEQ ID NO: 3280300 - RNA, 15 nt, Vaccinia virus
uccaauaaauuauuu

SEQ ID NO: 3280301 - RNA, 20 nt, Vaccinia virus
aguuaaacugugaaugucaa

SEQ ID NO: 3280302 - RNA, 13 nt, Vaccinia virus
ugguuuucuaaau

SEQ ID NO: 3280303 - RNA, 17 nt, Vaccinia virus
ucgauaacacauuuuca

SEQ ID NO: 3280304 - RNA, 21 nt, Vaccinia virus
auuuucugacgaaacgaugaa

SEQ ID NO: 3280305 - RNA, 14 nt, Vaccinia virus
gaugcauaaguaca

SEQ ID NO: 3280306 - RNA, 21 nt, Vaccinia virus
auacucugcccuuuauuacau

SEQ ID NO: 3280307 - RNA, 23 nt, Vaccinia virus
auacgauaguuuguuucuggaau

SEQ ID NO: 3280308 - RNA, 15 nt, Vaccinia virus
agauuuccaaagaua

SEQ ID NO: 3280309 - RNA, 18 nt, Vaccinia virus
uaaaugaaaaaaaacuag

SEQ ID NO: 3280310 - RNA, 21 nt, Vaccinia virus
acuuucaaugagauaaauaug

SEQ ID NO: 3280311 - RNA, 20 nt, Vaccinia virus
gauaagauauguuuauucau

SEQ ID NO: 3280312 - RNA, 20 nt, Vaccinia virus
aaauaaguaguaauaaugau

SEQ ID NO: 3280313 - RNA, 19 nt, Vaccinia virus
gaauauacuucauaaaaga

SEQ ID NO: 3280314 - RNA, 20 nt, Vaccinia virus
cugccauuaauaucucuauu

SEQ ID NO: 3280315 - RNA, 21 nt, Vaccinia virus
uuaaauaucaaccgcaaauca

SEQ ID NO: 3280316 - RNA, 18 nt, Vaccinia virus
caccuaucuugugcauuu

SEQ ID NO: 3280317 - RNA, 16 nt, Vaccinia virus
cccacugaugagaugu

SEQ ID NO: 3280318 - RNA, 15 nt, Vaccinia virus
acaaaaucuaaacaa

SEQ ID NO: 3280319 - RNA, 17 nt, Vaccinia virus
aguaaguuuaugauggu

SEQ ID NO: 3280320 - RNA, 18 nt, Vaccinia virus
gaacuauaaaaacagaua

SEQ ID NO: 3280321 - RNA, 19 nt, Vaccinia virus
aaauguuaccggauuuaug

SEQ ID NO: 3280322 - RNA, 23 nt, Vaccinia virus
gaaaguauuuuuguguuaaaaca

SEQ ID NO: 3280323 - RNA, 19 nt, Vaccinia virus
agaaaucauauaugauauu

SEQ ID NO: 3280324 - RNA, 23 nt, Vaccinia virus
agaugcuauguauauauauuucu

SEQ ID NO: 3280325 - RNA, 20 nt, Vaccinia virus
auacaaaauuugcaucuaca

SEQ ID NO: 3280326 - RNA, 23 nt, Vaccinia virus
uaauuagagacuuuauaacagau

SEQ ID NO: 3280327 - RNA, 16 nt, Vaccinia virus
uauagauguucacauu

SEQ ID NO: 3280328 - RNA, 23 nt, Vaccinia virus
uacuaugaauaucuucuaugaaa

SEQ ID NO: 3280329 - RNA, 18 nt, Vaccinia virus
uuaucaucauccauuaau

SEQ ID NO: 3280330 - RNA, 15 nt, Vaccinia virus
uaauaucuucuggaa

SEQ ID NO: 3280331 - RNA, 14 nt, Vaccinia virus
uaggauuuaaacaa

SEQ ID NO: 3280332 - RNA, 14 nt, Vaccinia virus
uaauaugaguaaaa

SEQ ID NO: 3280333 - RNA, 16 nt, Vaccinia virus
guuauaagauuacuua

SEQ ID NO: 3280334 - RNA, 17 nt, Vaccinia virus
cagaaucaguauauauu

SEQ ID NO: 3280335 - RNA, 20 nt, Vaccinia virus
ucuuuaguaaacauaucaua

SEQ ID NO: 3280336 - RNA, 14 nt, Vaccinia virus
auucuaauggauga

SEQ ID NO: 3280337 - RNA, 22 nt, Vaccinia virus
auauuuaagugauauaaaacua

SEQ ID NO: 3280338 - RNA, 16 nt, Vaccinia virus
uaaauuuuacaaaucu

SEQ ID NO: 3280339 - RNA, 15 nt, Vaccinia virus
aaaagaccaauaaua

SEQ ID NO: 3280340 - RNA, 14 nt, Vaccinia virus
gcuacuaucuugua

SEQ ID NO: 3280341 - RNA, 14 nt, Vaccinia virus
agauacagauguua

SEQ ID NO: 3280342 - RNA, 21 nt, Vaccinia virus
aaauuuuaaagaguacacaau

SEQ ID NO: 3280343 - RNA, 13 nt, Vaccinia virus
uuguguuagauga

SEQ ID NO: 3280344 - RNA, 12 nt, Vaccinia virus
ucaaagaaauaa

SEQ ID NO: 3280345 - RNA, 17 nt, Vaccinia virus
aaugcgaggaaauguau

SEQ ID NO: 3280346 - RNA, 21 nt, Vaccinia virus
aaaccaaggacuuuguagaaa

SEQ ID NO: 3280347 - RNA, 23 nt, Vaccinia virus
uacuacuggucuuucucaaccau

SEQ ID NO: 3280348 - RNA, 22 nt, Vaccinia virus
gcauuugugccgcauacagauc

SEQ ID NO: 3280349 - RNA, 20 nt, Vaccinia virus
cuaauguauuaguuaaauau

SEQ ID NO: 3280350 - RNA, 18 nt, Vaccinia virus
auauaaaucuaaaauuga

SEQ ID NO: 3280351 - RNA, 14 nt, Vaccinia virus
gaggagguauauau

SEQ ID NO: 3280352 - RNA, 13 nt, Vaccinia virus
aaugauaaugaua

SEQ ID NO: 3280353 - RNA, 14 nt, Vaccinia virus
aaucaaucauauua

SEQ ID NO: 3280354 - RNA, 22 nt, Vaccinia virus
acaaucuaguuuugagaacauc

SEQ ID NO: 3280355 - RNA, 22 nt, Vaccinia virus
uauuacaagacgucauucuaaa

SEQ ID NO: 3280356 - RNA, 15 nt, Vaccinia virus
uauaauuauacuauu

SEQ ID NO: 3280357 - RNA, 20 nt, Vaccinia virus
gauucaaauccuucauucau

SEQ ID NO: 3280358 - RNA, 19 nt, Vaccinia virus
ugaacacacgaugaaaaug

SEQ ID NO: 3280359 - RNA, 12 nt, Vaccinia virus
acgaaacaaugu

SEQ ID NO: 3280360 - RNA, 14 nt, Vaccinia virus
ucaagucaauuauc

SEQ ID NO: 3280361 - RNA, 17 nt, Vaccinia virus
guucguugaugaggaau

SEQ ID NO: 3280362 - RNA, 23 nt, Vaccinia virus
uaaaaaaaugauugaagaaggag

SEQ ID NO: 3280363 - RNA, 23 nt, Vaccinia virus
agaauaguauuugagaaauaugu

SEQ ID NO: 3280364 - RNA, 16 nt, Vaccinia virus
ucugucauauuuagau

SEQ ID NO: 3280365 - RNA, 13 nt, Vaccinia virus
agaaacagaacua

SEQ ID NO: 3280366 - RNA, 12 nt, Vaccinia virus
gcauagaaauac

SEQ ID NO: 3280367 - RNA, 18 nt, Vaccinia virus
ugaagaucuauuuccaga

SEQ ID NO: 3280368 - RNA, 13 nt, Vaccinia virus
cuguaaugaugga

SEQ ID NO: 3280369 - RNA, 16 nt, Vaccinia virus
auauaaaauaacuaca

SEQ ID NO: 3280370 - RNA, 21 nt, Vaccinia virus
aaauauaaaacuugucuguau

SEQ ID NO: 3280371 - RNA, 20 nt, Vaccinia virus
gauaucgccuuuauuuccac

SEQ ID NO: 3280372 - RNA, 22 nt, Vaccinia virus
ugucagagcacaagauuuccaa

SEQ ID NO: 3280373 - RNA, 18 nt, Vaccinia virus
acugaguuuuuaggaaau

SEQ ID NO: 3280374 - RNA, 13 nt, Vaccinia virus
uuaauauguauga

SEQ ID NO: 3280375 - RNA, 12 nt, Vaccinia virus
ucgcaaauuccg

SEQ ID NO: 3280376 - RNA, 21 nt, Vaccinia virus
ucuucaaaguuucugaaauaa

SEQ ID NO: 3280377 - RNA, 14 nt, Vaccinia virus
acacuaucugaucu

SEQ ID NO: 3280378 - RNA, 19 nt, Vaccinia virus
aauuacgcucuacaaaaug

SEQ ID NO: 3280379 - RNA, 12 nt, Vaccinia virus
acggaauuauug

SEQ ID NO: 3280380 - RNA, 15 nt, Vaccinia virus
cuucgacaaaucguu

SEQ ID NO: 3280381 - RNA, 12 nt, Vaccinia virus
cuaaaguauuug

SEQ ID NO: 3280382 - RNA, 21 nt, Vaccinia virus
aguaucaugaacucuaaucaa

SEQ ID NO: 3280383 - RNA, 23 nt, Vaccinia virus
aauacuaauuuguuuuacucuau

SEQ ID NO: 3280384 - RNA, 15 nt, Vaccinia virus
acacgauauucaugg

SEQ ID NO: 3280385 - RNA, 15 nt, Vaccinia virus
aaggacuuuguagaa

SEQ ID NO: 3280386 - RNA, 17 nt, Vaccinia virus
aguuugagguuuuagau

SEQ ID NO: 3280387 - RNA, 15 nt, Vaccinia virus
uuagcaucugauuuu

SEQ ID NO: 3280388 - RNA, 21 nt, Vaccinia virus
cauuauacuuuuuuuuggaaa

SEQ ID NO: 3280389 - RNA, 17 nt, Vaccinia virus
gaauuaacgagauauau

SEQ ID NO: 3280390 - RNA, 19 nt, Vaccinia virus
aauuagucauacguaauga

SEQ ID NO: 3280391 - RNA, 13 nt, Vaccinia virus
auauuucuggaau

SEQ ID NO: 3280392 - RNA, 15 nt, Vaccinia virus
auguagaaaauggau

SEQ ID NO: 3280393 - RNA, 15 nt, Vaccinia virus
aauggaaucuagauc

SEQ ID NO: 3280394 - RNA, 13 nt, Vaccinia virus
uuccuccauaauu

SEQ ID NO: 3280395 - RNA, 14 nt, Vaccinia virus
ugagaauauguucc

SEQ ID NO: 3280396 - RNA, 19 nt, Vaccinia virus
auaaggaacuagaaucgua

SEQ ID NO: 3280397 - RNA, 16 nt, Vaccinia virus
auuucaaaaaaugauc

SEQ ID NO: 3280398 - RNA, 21 nt, Vaccinia virus
uguaauacuagcgugaacaac

SEQ ID NO: 3280399 - RNA, 22 nt, Vaccinia virus
aauaauuauaucacaacaucua

SEQ ID NO: 3280400 - RNA, 20 nt, Vaccinia virus
auuccucuaacgaacucaag

SEQ ID NO: 3280401 - RNA, 17 nt, Vaccinia virus
uaguguuggauaucuuc

SEQ ID NO: 3280402 - RNA, 17 nt, Vaccinia virus
aaccgcguuaauguuug

SEQ ID NO: 3280403 - RNA, 13 nt, Vaccinia virus
aaaaaggaaucua

SEQ ID NO: 3280404 - RNA, 17 nt, Vaccinia virus
uuaaaauauuauuuaga

SEQ ID NO: 3280405 - RNA, 12 nt, Vaccinia virus
ucagaguucagu

SEQ ID NO: 3280406 - RNA, 21 nt, Vaccinia virus
aggauacacucucaauauacu

SEQ ID NO: 3280407 - RNA, 21 nt, Vaccinia virus
gaaaauguacuucgaugagau

SEQ ID NO: 3280408 - RNA, 13 nt, Vaccinia virus
uggaguugaagau

SEQ ID NO: 3280409 - RNA, 15 nt, Vaccinia virus
gauuguuaacuauag

SEQ ID NO: 3280410 - RNA, 15 nt, Vaccinia virus
acuauuuucaguaau

SEQ ID NO: 3280411 - RNA, 16 nt, Vaccinia virus
aucguuaaauuuuaca

SEQ ID NO: 3280412 - RNA, 10 nt, Vaccinia virus
caaugauaua

SEQ ID NO: 3280413 - RNA, 15 nt, Vaccinia virus
uguaauuuagaugug

SEQ ID NO: 3280414 - RNA, 19 nt, Vaccinia virus
gacuacaaagaauguucua

SEQ ID NO: 3280415 - RNA, 20 nt, Vaccinia virus
uuuauaaacaugaaaccacu

SEQ ID NO: 3280416 - RNA, 12 nt, Vaccinia virus
uaaaauggauua

SEQ ID NO: 3280417 - RNA, 20 nt, Vaccinia virus
auagauagcguauaucucua

SEQ ID NO: 3280418 - RNA, 15 nt, Vaccinia virus
ucuuguaucauauau

SEQ ID NO: 3280419 - RNA, 12 nt, Vaccinia virus
aacuuucuagaa

SEQ ID NO: 3280420 - RNA, 19 nt, Vaccinia virus
cauuuuaggauaugcuuuc

SEQ ID NO: 3280421 - RNA, 12 nt, Vaccinia virus
gauaguuucauu

SEQ ID NO: 3280422 - RNA, 23 nt, Vaccinia virus
guucuaacgccgaucucugaaug

SEQ ID NO: 3280423 - RNA, 19 nt, Vaccinia virus
aacaucuagccucgguaau

SEQ ID NO: 3280424 - RNA, 17 nt, Vaccinia virus
auuuaggacuuugcaau

SEQ ID NO: 3280425 - RNA, 15 nt, Vaccinia virus
cuucaauaaaaugag

SEQ ID NO: 3280426 - RNA, 22 nt, Vaccinia virus
agacaaguauccguuugauauu

SEQ ID NO: 3280427 - RNA, 16 nt, Vaccinia virus
aacagucuaaacaaua

SEQ ID NO: 3280428 - RNA, 12 nt, Vaccinia virus
agaaauacuuag

SEQ ID NO: 3280429 - RNA, 14 nt, Vaccinia virus
aguauuuaacaaga

SEQ ID NO: 3280430 - RNA, 22 nt, Vaccinia virus
agaugaaucaaauguaacuauu

SEQ ID NO: 3280431 - RNA, 22 nt, Vaccinia virus
gucgagaacguuaaaauaaucg

SEQ ID NO: 3280432 - RNA, 18 nt, Vaccinia virus
uaucagaguuacaucaaa

SEQ ID NO: 3280433 - RNA, 15 nt, Vaccinia virus
aggaaauuaugagaa

SEQ ID NO: 3280434 - RNA, 17 nt, Vaccinia virus
gcuauguuuaauacuua

SEQ ID NO: 3280435 - RNA, 14 nt, Vaccinia virus
aggugaacaagaga

SEQ ID NO: 3280436 - RNA, 12 nt, Vaccinia virus
aauauuuucuau

SEQ ID NO: 3280437 - RNA, 20 nt, Vaccinia virus
aauaaggaagguguuaaaau

SEQ ID NO: 3280438 - RNA, 18 nt, Vaccinia virus
uguaaaaagauaaacuuu

SEQ ID NO: 3280439 - RNA, 12 nt, Vaccinia virus
uucauucguaaa

SEQ ID NO: 3280440 - RNA, 18 nt, Vaccinia virus
gauauagaacacauaacc

SEQ ID NO: 3280441 - RNA, 13 nt, Vaccinia virus
auauuucaaucau

SEQ ID NO: 3280442 - RNA, 21 nt, Vaccinia virus
auugguagaguuuuauaacga

SEQ ID NO: 3280443 - RNA, 14 nt, Vaccinia virus
uaguaaacauauca

SEQ ID NO: 3280444 - RNA, 20 nt, Vaccinia virus
auguuaaaacuacaaaaaug

SEQ ID NO: 3280445 - RNA, 14 nt, Vaccinia virus
uuguauaugauguu

SEQ ID NO: 3280446 - RNA, 19 nt, Vaccinia virus
ucaaauuuauauccuauau

SEQ ID NO: 3280447 - RNA, 19 nt, Vaccinia virus
acgucugauauucgaaaau

SEQ ID NO: 3280448 - RNA, 14 nt, Vaccinia virus
guuguauauuucuu

SEQ ID NO: 3280449 - RNA, 18 nt, Vaccinia virus
auuugugaguuuuccuua

SEQ ID NO: 3280450 - RNA, 23 nt, Vaccinia virus
uuaccucuucugauaucauuaau

SEQ ID NO: 3280451 - RNA, 22 nt, Vaccinia virus
caugauccuauucuaaauggau

SEQ ID NO: 3280452 - RNA, 17 nt, Vaccinia virus
uauauaccgauuucaca

SEQ ID NO: 3280453 - RNA, 22 nt, Vaccinia virus
uuaaaauaaaaaguaauauuca

SEQ ID NO: 3280454 - RNA, 16 nt, Vaccinia virus
uaauaaauugguaaau

SEQ ID NO: 3280455 - RNA, 22 nt, Vaccinia virus
auuuguauuauccaauacagaa

SEQ ID NO: 3280456 - RNA, 17 nt, Vaccinia virus
uaguuuauuccaaucau

SEQ ID NO: 3280457 - RNA, 17 nt, Vaccinia virus
aucauagauucauauag

SEQ ID NO: 3280458 - RNA, 21 nt, Vaccinia virus
caguaucgaaaaaugcugaag

SEQ ID NO: 3280459 - RNA, 22 nt, Vaccinia virus
ucaaauuugguaauucuauuaa

SEQ ID NO: 3280460 - RNA, 12 nt, Vaccinia virus
guuccauggcag

SEQ ID NO: 3280461 - RNA, 11 nt, Vaccinia virus
aacaauguuug

SEQ ID NO: 3280462 - RNA, 17 nt, Vaccinia virus
auuuuacccucaaucau

SEQ ID NO: 3280463 - RNA, 17 nt, Vaccinia virus
ggaaaguucaaaaaguc

SEQ ID NO: 3280464 - RNA, 17 nt, Vaccinia virus
aaacgauuaaacaauau

SEQ ID NO: 3280465 - RNA, 13 nt, Vaccinia virus
gaacuaagagaaa

SEQ ID NO: 3280466 - RNA, 16 nt, Vaccinia virus
auaaugauagaauaga

SEQ ID NO: 3280467 - RNA, 20 nt, Vaccinia virus
aauaauggaucagauguaga

SEQ ID NO: 3280468 - RNA, 13 nt, Vaccinia virus
acuuuguuaauga

SEQ ID NO: 3280469 - RNA, 16 nt, Vaccinia virus
acacgauuuaauccau

SEQ ID NO: 3280470 - RNA, 15 nt, Vaccinia virus
gauaaguaauaacua

SEQ ID NO: 3280471 - RNA, 15 nt, Vaccinia virus
auaacuauguuuuaa

SEQ ID NO: 3280472 - RNA, 21 nt, Vaccinia virus
cuuuuagaagugauucuuuga

SEQ ID NO: 3280473 - RNA, 19 nt, Vaccinia virus
guggaagcugaacacauua

SEQ ID NO: 3280474 - RNA, 20 nt, Vaccinia virus
uuuaauccaaauauaaugau

SEQ ID NO: 3280475 - RNA, 18 nt, Vaccinia virus
acaugagagaaacaauau

SEQ ID NO: 3280476 - RNA, 14 nt, Vaccinia virus
augugacuguuuuc

SEQ ID NO: 3280477 - RNA, 17 nt, Vaccinia virus
uucauuaauuucugaua

SEQ ID NO: 3280478 - RNA, 15 nt, Vaccinia virus
auauacacauaauua

SEQ ID NO: 3280479 - RNA, 15 nt, Vaccinia virus
aaagaaaaacacauu

SEQ ID NO: 3280480 - RNA, 15 nt, Vaccinia virus
cuguaaguauguuua

SEQ ID NO: 3280481 - RNA, 20 nt, Vaccinia virus
cucaaaguagauaaacccuc

SEQ ID NO: 3280482 - RNA, 21 nt, Vaccinia virus
agauagguauuuuaucucuau

SEQ ID NO: 3280483 - RNA, 16 nt, Vaccinia virus
acuuagauuaaauucu

SEQ ID NO: 3280484 - RNA, 23 nt, Vaccinia virus
augaaucacguguuaaacaaugg

SEQ ID NO: 3280485 - RNA, 14 nt, Vaccinia virus
cugguuuagauauu

SEQ ID NO: 3280486 - RNA, 18 nt, Vaccinia virus
uuuacacaugguuauuuu

SEQ ID NO: 3280487 - RNA, 19 nt, Vaccinia virus
agucauaaaaggauacuaa

SEQ ID NO: 3280488 - RNA, 15 nt, Vaccinia virus
auugcauuugaucag

SEQ ID NO: 3280489 - RNA, 17 nt, Vaccinia virus
aaagucaucucuuguau

SEQ ID NO: 3280490 - RNA, 20 nt, Vaccinia virus
gauuauaaaguggaagagua

SEQ ID NO: 3280491 - RNA, 23 nt, Vaccinia virus
guuaauguuugcuccauaaucua

SEQ ID NO: 3280492 - RNA, 15 nt, Vaccinia virus
aggggaaaaauuaua

SEQ ID NO: 3280493 - RNA, 13 nt, Vaccinia virus
cacguuugaacag

SEQ ID NO: 3280494 - RNA, 16 nt, Vaccinia virus
gaaguggauauacaua

SEQ ID NO: 3280495 - RNA, 19 nt, Vaccinia virus
agauccaaagaagauguuc

SEQ ID NO: 3280496 - RNA, 18 nt, Vaccinia virus
uaucgauuucuacauaua

SEQ ID NO: 3280497 - RNA, 14 nt, Vaccinia virus
uaauaauccagaau

SEQ ID NO: 3280498 - RNA, 18 nt, Vaccinia virus
auguucuuuuugugugaa

SEQ ID NO: 3280499 - RNA, 14 nt, Vaccinia virus
uagaacguggauau

SEQ ID NO: 3280500 - RNA, 14 nt, Vaccinia virus
auucuuaaaaucua

SEQ ID NO: 3280501 - RNA, 17 nt, Vaccinia virus
uauuagauuuuguauua

SEQ ID NO: 3280502 - RNA, 19 nt, Vaccinia virus
aaaucguuaguagauguuu

SEQ ID NO: 3280503 - RNA, 23 nt, Vaccinia virus
cgaaauaaaaaacauaauuuuaa

SEQ ID NO: 3280504 - RNA, 14 nt, Vaccinia virus
ucguauccacaaau

SEQ ID NO: 3280505 - RNA, 14 nt, Vaccinia virus
cucaauaagaugac

SEQ ID NO: 3280506 - RNA, 18 nt, Vaccinia virus
auaaucguauuuguguga

SEQ ID NO: 3280507 - RNA, 12 nt, Vaccinia virus
aaucuauaugac

SEQ ID NO: 3280508 - RNA, 14 nt, Vaccinia virus
ugcacucaugauuc

SEQ ID NO: 3280509 - RNA, 14 nt, Vaccinia virus
uuuuucgacauauu

SEQ ID NO: 3280510 - RNA, 12 nt, Vaccinia virus
gaugguauuauc

SEQ ID NO: 3280511 - RNA, 14 nt, Vaccinia virus
ugauauauuuucca

SEQ ID NO: 3280512 - RNA, 14 nt, Vaccinia virus
acgaucuauuagaa

SEQ ID NO: 3280513 - RNA, 17 nt, Vaccinia virus
ugauaguauuauucauu

SEQ ID NO: 3280514 - RNA, 21 nt, Vaccinia virus
aucuucuuauuuagaucuugu

SEQ ID NO: 3280515 - RNA, 18 nt, Vaccinia virus
uauaccgccucaaacucu

SEQ ID NO: 3280516 - RNA, 16 nt, Vaccinia virus
aguauguuuaauauga

SEQ ID NO: 3280517 - RNA, 20 nt, Vaccinia virus
cuccuaauauaacaguaucu

SEQ ID NO: 3280518 - RNA, 14 nt, Vaccinia virus
ugcauuucuacaaa

SEQ ID NO: 3280519 - RNA, 20 nt, Vaccinia virus
ugaaguuggugcauaucuuu

SEQ ID NO: 3280520 - RNA, 18 nt, Vaccinia virus
cuagcguuauaacaaaau

SEQ ID NO: 3280521 - RNA, 13 nt, Vaccinia virus
cauuaauuucuga

SEQ ID NO: 3280522 - RNA, 16 nt, Vaccinia virus
uuacuuuguggaugau

SEQ ID NO: 3280523 - RNA, 16 nt, Vaccinia virus
uagaucugaauuaaau

SEQ ID NO: 3280524 - RNA, 13 nt, Vaccinia virus
aucuaaaauccau

SEQ ID NO: 3280525 - RNA, 15 nt, Vaccinia virus
cauauuuuaaugaac

SEQ ID NO: 3280526 - RNA, 19 nt, Vaccinia virus
agaaaucaacgaucuaaua

SEQ ID NO: 3280527 - RNA, 14 nt, Vaccinia virus
uaaauuuuaaacau

SEQ ID NO: 3280528 - RNA, 23 nt, Vaccinia virus
guccuaaugccuaugauguguuu

SEQ ID NO: 3280529 - RNA, 21 nt, Vaccinia virus
agcuguucaagaauauacaag

SEQ ID NO: 3280530 - RNA, 19 nt, Vaccinia virus
acuagaaagggaaaaauua

SEQ ID NO: 3280531 - RNA, 18 nt, Vaccinia virus
aauaauugcgaauguuuu

SEQ ID NO: 3280532 - RNA, 19 nt, Vaccinia virus
aaauaauauaucaaacaug

SEQ ID NO: 3280533 - RNA, 17 nt, Vaccinia virus
uuaaugacaaacauuuu

SEQ ID NO: 3280534 - RNA, 14 nt, Vaccinia virus
gaacaauaaaagag

SEQ ID NO: 3280535 - RNA, 20 nt, Vaccinia virus
agagguucccaauuccaaag

SEQ ID NO: 3280536 - RNA, 14 nt, Vaccinia virus
ccgcauuaaaugau

SEQ ID NO: 3280537 - RNA, 13 nt, Vaccinia virus
guaaaacaaacuu

SEQ ID NO: 3280538 - RNA, 20 nt, Vaccinia virus
aacaucuuggggaaauaugg

SEQ ID NO: 3280539 - RNA, 18 nt, Vaccinia virus
uaaauauguguauuauca

SEQ ID NO: 3280540 - RNA, 12 nt, Vaccinia virus
aaauuauauucu

SEQ ID NO: 3280541 - RNA, 17 nt, Vaccinia virus
uccauuuuuaauuuaug

SEQ ID NO: 3280542 - RNA, 16 nt, Vaccinia virus
cagcgaacuugauauu

SEQ ID NO: 3280543 - RNA, 17 nt, Vaccinia virus
cuauaaaugaauucuca

SEQ ID NO: 3280544 - RNA, 20 nt, Vaccinia virus
ugaaagcgagaaauaaucau

SEQ ID NO: 3280545 - RNA, 16 nt, Vaccinia virus
auagcaaaauaaaguu

SEQ ID NO: 3280546 - RNA, 18 nt, Vaccinia virus
auaacaggggaaugaaca

SEQ ID NO: 3280547 - RNA, 18 nt, Vaccinia virus
uccuacaggaauaucuuu

SEQ ID NO: 3280548 - RNA, 22 nt, Vaccinia virus
augcuuaacuugacuaaauauu

SEQ ID NO: 3280549 - RNA, 13 nt, Vaccinia virus
guucgauagaaac

SEQ ID NO: 3280550 - RNA, 15 nt, Vaccinia virus
aucuacuauacuuua

SEQ ID NO: 3280551 - RNA, 11 nt, Vaccinia virus
uauauguuucu

SEQ ID NO: 3280552 - RNA, 14 nt, Vaccinia virus
aauaguuuacagau

SEQ ID NO: 3280553 - RNA, 21 nt, Vaccinia virus
uguuaauacaucaauggaaga

SEQ ID NO: 3280554 - RNA, 14 nt, Vaccinia virus
guucaaaauaaucc

SEQ ID NO: 3280555 - RNA, 20 nt, Vaccinia virus
uaaccaaaaugaaaauacuu

SEQ ID NO: 3280556 - RNA, 15 nt, Vaccinia virus
caacugaaaaaguua

SEQ ID NO: 3280557 - RNA, 17 nt, Vaccinia virus
acugcauccuucuaaga

SEQ ID NO: 3280558 - RNA, 15 nt, Vaccinia virus
gacacaaauuauggc

SEQ ID NO: 3280559 - RNA, 10 nt, Vaccinia virus
uucaacaaug

SEQ ID NO: 3280560 - RNA, 14 nt, Vaccinia virus
cugaucauuaauau

SEQ ID NO: 3280561 - RNA, 15 nt, Vaccinia virus
uuaaaagauauuaau

SEQ ID NO: 3280562 - RNA, 14 nt, Vaccinia virus
cuauagauuuugaa

SEQ ID NO: 3280563 - RNA, 15 nt, Vaccinia virus
aaauggauguuaaug

SEQ ID NO: 3280564 - RNA, 17 nt, Vaccinia virus
gauagacuagaagaaag

SEQ ID NO: 3280565 - RNA, 18 nt, Vaccinia virus
auuaucaaaagacaugau

SEQ ID NO: 3280566 - RNA, 18 nt, Vaccinia virus
cuaggaguaucuauuuua

SEQ ID NO: 3280567 - RNA, 14 nt, Vaccinia virus
uuaaaaaguuaucu

SEQ ID NO: 3280568 - RNA, 16 nt, Vaccinia virus
uacgauguuguaaagu

SEQ ID NO: 3280569 - RNA, 21 nt, Vaccinia virus
uaacuuccacauuaauacagc

SEQ ID NO: 3280570 - RNA, 14 nt, Vaccinia virus
ucuuagaacaacau

SEQ ID NO: 3280571 - RNA, 19 nt, Vaccinia virus
agucuagguucacaaugaa

SEQ ID NO: 3280572 - RNA, 18 nt, Vaccinia virus
auuaaugggcuuaguaaa

SEQ ID NO: 3280573 - RNA, 14 nt, Vaccinia virus
uauuucguacauuu

SEQ ID NO: 3280574 - RNA, 23 nt, Vaccinia virus
ucagaauauacaccuaacguuuu

SEQ ID NO: 3280575 - RNA, 17 nt, Vaccinia virus
uggcaauaaaguuuuua

SEQ ID NO: 3280576 - RNA, 15 nt, Vaccinia virus
gacucuagaugaaau

SEQ ID NO: 3280577 - RNA, 17 nt, Vaccinia virus
aauucuaggcucaguau

SEQ ID NO: 3280578 - RNA, 22 nt, Vaccinia virus
uuagaaagaaacgauuauuucu

SEQ ID NO: 3280579 - RNA, 22 nt, Vaccinia virus
uacuucuuccacuguccaaaau

SEQ ID NO: 3280580 - RNA, 18 nt, Vaccinia virus
aucaauuaaauaauuaau

SEQ ID NO: 3280581 - RNA, 17 nt, Vaccinia virus
auguaacuauagagaac

SEQ ID NO: 3280582 - RNA, 13 nt, Vaccinia virus
auaacuaaagaaa

SEQ ID NO: 3280583 - RNA, 21 nt, Vaccinia virus
agacacauaugcgaucagaua

SEQ ID NO: 3280584 - RNA, 17 nt, Vaccinia virus
uaacacuauacucauau

SEQ ID NO: 3280585 - RNA, 18 nt, Vaccinia virus
aacuaugucaaaaauugu

SEQ ID NO: 3280586 - RNA, 16 nt, Vaccinia virus
uaaaauaaauaucauu

SEQ ID NO: 3280587 - RNA, 13 nt, Vaccinia virus
caauuuacuucua

SEQ ID NO: 3280588 - RNA, 21 nt, Vaccinia virus
aaacaauggucgauuauagaa

SEQ ID NO: 3280589 - RNA, 16 nt, Vaccinia virus
aauguguuaaaaagaa

SEQ ID NO: 3280590 - RNA, 12 nt, Vaccinia virus
agcuaaaaaugc

SEQ ID NO: 3280591 - RNA, 16 nt, Vaccinia virus
ugacagcacagggagc

SEQ ID NO: 3280592 - RNA, 18 nt, Vaccinia virus
aauggauuaucggaaaua

SEQ ID NO: 3280593 - RNA, 19 nt, Vaccinia virus
uagagacagauuaaguucu

SEQ ID NO: 3280594 - RNA, 17 nt, Vaccinia virus
agauacagauacagaua

SEQ ID NO: 3280595 - RNA, 22 nt, Vaccinia virus
caaucacgcauaaaaauaucuu

SEQ ID NO: 3280596 - RNA, 14 nt, Vaccinia virus
aacuauuuagcaaa

SEQ ID NO: 3280597 - RNA, 15 nt, Vaccinia virus
auauauuuauuuuca

SEQ ID NO: 3280598 - RNA, 18 nt, Vaccinia virus
cuuaauacagauugcacu

SEQ ID NO: 3280599 - RNA, 22 nt, Vaccinia virus
uaaacaguuuccacuuugguaa

SEQ ID NO: 3280600 - RNA, 13 nt, Vaccinia virus
aguaccuggaaug

SEQ ID NO: 3280601 - RNA, 18 nt, Vaccinia virus
aacaagguaucgaaucua

SEQ ID NO: 3280602 - RNA, 20 nt, Vaccinia virus
uaugucgucuacuggaugaa

SEQ ID NO: 3280603 - RNA, 15 nt, Vaccinia virus
guaaauaaauacuuu

SEQ ID NO: 3280604 - RNA, 16 nt, Vaccinia virus
auucucgaaucuaaag

SEQ ID NO: 3280605 - RNA, 17 nt, Vaccinia virus
cuauguuccucguuucc

SEQ ID NO: 3280606 - RNA, 14 nt, Vaccinia virus
uaucacuccaugau

SEQ ID NO: 3280607 - RNA, 14 nt, Vaccinia virus
uuguuuauauuaaa

SEQ ID NO: 3280608 - RNA, 19 nt, Vaccinia virus
auucauacuuaacaaauug

SEQ ID NO: 3280609 - RNA, 18 nt, Vaccinia virus
caucaacagucacauaau

SEQ ID NO: 3280610 - RNA, 17 nt, Vaccinia virus
uuacuggaauuagacaa

SEQ ID NO: 3280611 - RNA, 18 nt, Vaccinia virus
cgauccacaaucaaagaa

SEQ ID NO: 3280612 - RNA, 18 nt, Vaccinia virus
acaaaucuauuuggauuu

SEQ ID NO: 3280613 - RNA, 19 nt, Vaccinia virus
aaacgcuauaaaaaacaua

SEQ ID NO: 3280614 - RNA, 16 nt, Vaccinia virus
ugauucgauaaauaga

SEQ ID NO: 3280615 - RNA, 19 nt, Vaccinia virus
uacccaaaucugaaaauaa

SEQ ID NO: 3280616 - RNA, 12 nt, Vaccinia virus
agaauaugagaa

SEQ ID NO: 3280617 - RNA, 15 nt, Vaccinia virus
ucaauugauaagaca

SEQ ID NO: 3280618 - RNA, 20 nt, Vaccinia virus
uauuauaaagccuuuaucua

SEQ ID NO: 3280619 - RNA, 22 nt, Vaccinia virus
cagaguccucuaauugaucaag

SEQ ID NO: 3280620 - RNA, 23 nt, Vaccinia virus
agauauacccgaagauauacaca

SEQ ID NO: 3280621 - RNA, 15 nt, Vaccinia virus
auuuuaucaaacaug

SEQ ID NO: 3280622 - RNA, 13 nt, Vaccinia virus
guuuaaaauuagc

SEQ ID NO: 3280623 - RNA, 13 nt, Vaccinia virus
cuguuuauacaag

SEQ ID NO: 3280624 - RNA, 19 nt, Vaccinia virus
uaaauuuagugagaauaau

SEQ ID NO: 3280625 - RNA, 17 nt, Vaccinia virus
auauggauauucauaga

SEQ ID NO: 3280626 - RNA, 16 nt, Vaccinia virus
gucauagaugaaauac

SEQ ID NO: 3280627 - RNA, 21 nt, Vaccinia virus
cauaaaacugaugagauauau

SEQ ID NO: 3280628 - RNA, 17 nt, Vaccinia virus
accauuacguuaacaga

SEQ ID NO: 3280629 - RNA, 12 nt, Vaccinia virus
cguauaaauuuu

SEQ ID NO: 3280630 - RNA, 14 nt, Vaccinia virus
uuauuaaguauaau

SEQ ID NO: 3280631 - RNA, 14 nt, Vaccinia virus
auuauaagaaauau

SEQ ID NO: 3280632 - RNA, 13 nt, Vaccinia virus
cugcaucacugac

SEQ ID NO: 3280633 - RNA, 15 nt, Vaccinia virus
guaauaaauaugauu

SEQ ID NO: 3280634 - RNA, 18 nt, Vaccinia virus
aaugcucaguaaauguau

SEQ ID NO: 3280635 - RNA, 21 nt, Vaccinia virus
aacgaguacuuuaaagaagua

SEQ ID NO: 3280636 - RNA, 18 nt, Vaccinia virus
cauguuugcucucugaau

SEQ ID NO: 3280637 - RNA, 15 nt, Vaccinia virus
cuaaucaauagcuua

SEQ ID NO: 3280638 - RNA, 14 nt, Vaccinia virus
ucccaauuccaaag

SEQ ID NO: 3280639 - RNA, 21 nt, Vaccinia virus
gaaauaauaggagguaaugau

SEQ ID NO: 3280640 - RNA, 21 nt, Vaccinia virus
gcuguagaaccagcugcucca

SEQ ID NO: 3280641 - RNA, 15 nt, Vaccinia virus
uucauuacuaucuuu

SEQ ID NO: 3280642 - RNA, 17 nt, Vaccinia virus
cauauauggauaaugcu

SEQ ID NO: 3280643 - RNA, 14 nt, Vaccinia virus
auaucuuguucuau

SEQ ID NO: 3280644 - RNA, 14 nt, Vaccinia virus
aagacuuaaaacuu

SEQ ID NO: 3280645 - RNA, 17 nt, Vaccinia virus
gacacugaaucaauuga

SEQ ID NO: 3280646 - RNA, 12 nt, Vaccinia virus
gaauguauauac

SEQ ID NO: 3280647 - RNA, 19 nt, Vaccinia virus
uuccauuggccucauuaac

SEQ ID NO: 3280648 - RNA, 14 nt, Vaccinia virus
auugcgacacuauu

SEQ ID NO: 3280649 - RNA, 15 nt, Vaccinia virus
agaauacgaugauau

SEQ ID NO: 3280650 - RNA, 18 nt, Vaccinia virus
uccauugauaaagaaguu

SEQ ID NO: 3280651 - RNA, 19 nt, Vaccinia virus
acaguaauguccaaaucua

SEQ ID NO: 3280652 - RNA, 11 nt, Vaccinia virus
gaauaagaaca

SEQ ID NO: 3280653 - RNA, 16 nt, Vaccinia virus
ucaugaaaugaugaua

SEQ ID NO: 3280654 - RNA, 23 nt, Vaccinia virus
aauaugucucuuaacuauuuccg

SEQ ID NO: 3280655 - RNA, 16 nt, Vaccinia virus
gacaaugaauugcaua

SEQ ID NO: 3280656 - RNA, 21 nt, Vaccinia virus
auaauaggagguaaugauaug

SEQ ID NO: 3280657 - RNA, 18 nt, Vaccinia virus
caauuaguuaauaaugau

SEQ ID NO: 3280658 - RNA, 15 nt, Vaccinia virus
gguccuauugcuucc

SEQ ID NO: 3280659 - RNA, 21 nt, Vaccinia virus
uuuaacgaggacuuauucaga

SEQ ID NO: 3280660 - RNA, 23 nt, Vaccinia virus
auguauaauauaaaaaaacauua

SEQ ID NO: 3280661 - RNA, 22 nt, Vaccinia virus
cuuauaaaacuauauuuggaau

SEQ ID NO: 3280662 - RNA, 15 nt, Vaccinia virus
ucacucaucgauuca

SEQ ID NO: 3280663 - RNA, 19 nt, Vaccinia virus
auaaauuagucauacguaa

SEQ ID NO: 3280664 - RNA, 12 nt, Vaccinia virus
gcacgaacaaaa

SEQ ID NO: 3280665 - RNA, 18 nt, Vaccinia virus
agucagacuguaguucua

SEQ ID NO: 3280666 - RNA, 15 nt, Vaccinia virus
aucccuuaaaaauua

SEQ ID NO: 3280667 - RNA, 20 nt, Vaccinia virus
aacauuuugcagaaaaaagu

SEQ ID NO: 3280668 - RNA, 18 nt, Vaccinia virus
aaguucauaaaaauaaua

SEQ ID NO: 3280669 - RNA, 22 nt, Vaccinia virus
ucgaauaaguuugcagacaaac

SEQ ID NO: 3280670 - RNA, 21 nt, Vaccinia virus
gaucuuaacuccucuauuaau

SEQ ID NO: 3280671 - RNA, 15 nt, Vaccinia virus
cggcuacuaaaagau

SEQ ID NO: 3280672 - RNA, 18 nt, Vaccinia virus
auacacuguuuaaaauua

SEQ ID NO: 3280673 - RNA, 21 nt, Vaccinia virus
ucaacaauuuuguauuauucu

SEQ ID NO: 3280674 - RNA, 19 nt, Vaccinia virus
auuuaacaagagaagagau

SEQ ID NO: 3280675 - RNA, 19 nt, Vaccinia virus
auggauuaucggaaauacu

SEQ ID NO: 3280676 - RNA, 13 nt, Vaccinia virus
gaaaggaauuaau

SEQ ID NO: 3280677 - RNA, 12 nt, Vaccinia virus
uaaaaugagcau

SEQ ID NO: 3280678 - RNA, 13 nt, Vaccinia virus
uaauuucuagaac

SEQ ID NO: 3280679 - RNA, 13 nt, Vaccinia virus
uguuuucauacau

SEQ ID NO: 3280680 - RNA, 20 nt, Vaccinia virus
augacuuaguucuuaaucca

SEQ ID NO: 3280681 - RNA, 14 nt, Vaccinia virus
caaacgugggaaga

SEQ ID NO: 3280682 - RNA, 16 nt, Vaccinia virus
auguagacaaaaugaa

SEQ ID NO: 3280683 - RNA, 16 nt, Vaccinia virus
auaagaagagaaaggu

SEQ ID NO: 3280684 - RNA, 15 nt, Vaccinia virus
ugauuagaauucauc

SEQ ID NO: 3280685 - RNA, 21 nt, Vaccinia virus
auggaugucaucaauguagaa

SEQ ID NO: 3280686 - RNA, 19 nt, Vaccinia virus
cagauguuggaggaugaag

SEQ ID NO: 3280687 - RNA, 14 nt, Vaccinia virus
ucuaccauuucauu

SEQ ID NO: 3280688 - RNA, 20 nt, Vaccinia virus
aauacucaauccuucagaau

SEQ ID NO: 3280689 - RNA, 19 nt, Vaccinia virus
augaacuuucaaggacuug

SEQ ID NO: 3280690 - RNA, 15 nt, Vaccinia virus
agauaucuauacuua

SEQ ID NO: 3280691 - RNA, 13 nt, Vaccinia virus
uuauuauuucagg

SEQ ID NO: 3280692 - RNA, 19 nt, Vaccinia virus
gcucuauauuacaaacuau

SEQ ID NO: 3280693 - RNA, 15 nt, Vaccinia virus
auaaacaugucuauu

SEQ ID NO: 3280694 - RNA, 14 nt, Vaccinia virus
agaauggaaauaua

SEQ ID NO: 3280695 - RNA, 17 nt, Vaccinia virus
uauugucucgucaaugu

SEQ ID NO: 3280696 - RNA, 17 nt, Vaccinia virus
uccaugauaaauuauuu

SEQ ID NO: 3280697 - RNA, 18 nt, Vaccinia virus
caguagcgagaaagcauc

SEQ ID NO: 3280698 - RNA, 23 nt, Vaccinia virus
uuauuauagugguggaauucagu

SEQ ID NO: 3280699 - RNA, 16 nt, Vaccinia virus
aaucacacaagccauu

SEQ ID NO: 3280700 - RNA, 19 nt, Vaccinia virus
uacauauaugcaauucgcu

SEQ ID NO: 3280701 - RNA, 13 nt, Vaccinia virus
ugagauaagaaca

SEQ ID NO: 3280702 - RNA, 23 nt, Vaccinia virus
aggauugauuacuauaaauggag

SEQ ID NO: 3280703 - RNA, 18 nt, Vaccinia virus
agcauuuguaauaauccu

SEQ ID NO: 3280704 - RNA, 19 nt, Vaccinia virus
aaauuauccuaucauguau

SEQ ID NO: 3280705 - RNA, 11 nt, Vaccinia virus
cacaaugaaug

SEQ ID NO: 3280706 - RNA, 21 nt, Vaccinia virus
uauagagcacuauuucuaaau

SEQ ID NO: 3280707 - RNA, 23 nt, Vaccinia virus
gagacuuguuaguuaaaaugaua

SEQ ID NO: 3280708 - RNA, 14 nt, Vaccinia virus
caauucguauaaau

SEQ ID NO: 3280709 - RNA, 20 nt, Vaccinia virus
acaaacaagcaucaugaaua

SEQ ID NO: 3280710 - RNA, 19 nt, Vaccinia virus
aguuuuggccauuauuaga

SEQ ID NO: 3280711 - RNA, 13 nt, Vaccinia virus
uacgcugauaaau

SEQ ID NO: 3280712 - RNA, 21 nt, Vaccinia virus
aauacuuuuuuuauuaaauga

SEQ ID NO: 3280713 - RNA, 20 nt, Vaccinia virus
auucagaauuucuacauaau

SEQ ID NO: 3280714 - RNA, 18 nt, Vaccinia virus
acaauguuucuuacauau

SEQ ID NO: 3280715 - RNA, 15 nt, Vaccinia virus
uaaacuacuggaaua

SEQ ID NO: 3280716 - RNA, 16 nt, Vaccinia virus
gaauagugccaucaga

SEQ ID NO: 3280717 - RNA, 14 nt, Vaccinia virus
agacguguuauuac

SEQ ID NO: 3280718 - RNA, 17 nt, Vaccinia virus
cugcuauaauuaagaua

SEQ ID NO: 3280719 - RNA, 14 nt, Vaccinia virus
ucucaagauuuuaa

SEQ ID NO: 3280720 - RNA, 15 nt, Vaccinia virus
uaauagcgucuacau

SEQ ID NO: 3280721 - RNA, 15 nt, Vaccinia virus
auauagguuacuaga

SEQ ID NO: 3280722 - RNA, 20 nt, Vaccinia virus
ucuuuuggguaauuguacaa

SEQ ID NO: 3280723 - RNA, 21 nt, Vaccinia virus
cgacuuauuuaacucuuuagu

SEQ ID NO: 3280724 - RNA, 16 nt, Vaccinia virus
guuuaucaacauggcu

SEQ ID NO: 3280725 - RNA, 21 nt, Vaccinia virus
auguaucauuagguaaaguag

SEQ ID NO: 3280726 - RNA, 18 nt, Vaccinia virus
uucucaugagaauggaaa

SEQ ID NO: 3280727 - RNA, 13 nt, Vaccinia virus
agaacaaauaaua

SEQ ID NO: 3280728 - RNA, 18 nt, Vaccinia virus
guuaaaagaauaauccua

SEQ ID NO: 3280729 - RNA, 20 nt, Vaccinia virus
uuguccagauugaacauaca

SEQ ID NO: 3280730 - RNA, 17 nt, Vaccinia virus
uuuaaaagucaacaucu

SEQ ID NO: 3280731 - RNA, 18 nt, Vaccinia virus
aauaagagacuuaaacaa

SEQ ID NO: 3280732 - RNA, 19 nt, Vaccinia virus
ccgauaaacuccaauaaaa

SEQ ID NO: 3280733 - RNA, 19 nt, Vaccinia virus
aaacaauguauacaaaugu

SEQ ID NO: 3280734 - RNA, 16 nt, Vaccinia virus
ugggcucaaugucuua

SEQ ID NO: 3280735 - RNA, 20 nt, Vaccinia virus
uccggauccuuuucuucaga

SEQ ID NO: 3280736 - RNA, 17 nt, Vaccinia virus
uugauccaguggaugau

SEQ ID NO: 3280737 - RNA, 21 nt, Vaccinia virus
guuaucaucguauaaauuaaa

SEQ ID NO: 3280738 - RNA, 20 nt, Vaccinia virus
uucagaaagacgaauacaua

SEQ ID NO: 3280739 - RNA, 15 nt, Vaccinia virus
uggauuuuuuguaca

SEQ ID NO: 3280740 - RNA, 22 nt, Vaccinia virus
cuucacagauagaucauuuuga

SEQ ID NO: 3280741 - RNA, 17 nt, Vaccinia virus
gaauucgaggaagaugu

SEQ ID NO: 3280742 - RNA, 17 nt, Vaccinia virus
uauaaugucuacauucu

SEQ ID NO: 3280743 - RNA, 21 nt, Vaccinia virus
caaguucuauaguuucuggau

SEQ ID NO: 3280744 - RNA, 21 nt, Vaccinia virus
uauguacaacagugauaugug

SEQ ID NO: 3280745 - RNA, 23 nt, Vaccinia virus
ucaacaauguuugucauauguau

SEQ ID NO: 3280746 - RNA, 19 nt, Vaccinia virus
uuuccaaauuaguuagccg

SEQ ID NO: 3280747 - RNA, 15 nt, Vaccinia virus
ccuuguauguuuuua

SEQ ID NO: 3280748 - RNA, 22 nt, Vaccinia virus
auaaagaaaugucuacauaaau

SEQ ID NO: 3280749 - RNA, 22 nt, Vaccinia virus
auugugauuuaguguaguauau

SEQ ID NO: 3280750 - RNA, 13 nt, Vaccinia virus
cggaaaguauuuu

SEQ ID NO: 3280751 - RNA, 19 nt, Vaccinia virus
auucucgaauccgaaauua

SEQ ID NO: 3280752 - RNA, 12 nt, Vaccinia virus
ccaaaaaaauuc

SEQ ID NO: 3280753 - RNA, 15 nt, Vaccinia virus
acaacuguuguaaau

SEQ ID NO: 3280754 - RNA, 15 nt, Vaccinia virus
auagacaaauuauuc

SEQ ID NO: 3280755 - RNA, 14 nt, Vaccinia virus
auacucucaaccau

SEQ ID NO: 3280756 - RNA, 16 nt, Vaccinia virus
uauacucuuauuauca

SEQ ID NO: 3280757 - RNA, 19 nt, Vaccinia virus
uguaaucuuauuaacuguu

SEQ ID NO: 3280758 - RNA, 15 nt, Vaccinia virus
aauuucuauucauga

SEQ ID NO: 3280759 - RNA, 15 nt, Vaccinia virus
uuuuuacuaaucaua

SEQ ID NO: 3280760 - RNA, 19 nt, Vaccinia virus
aucuuauguauauguuugu

SEQ ID NO: 3280761 - RNA, 11 nt, Vaccinia virus
cgccauaauac

SEQ ID NO: 3280762 - RNA, 15 nt, Vaccinia virus
aucacuguuguacau

SEQ ID NO: 3280763 - RNA, 13 nt, Vaccinia virus
uagauuaaaucca

SEQ ID NO: 3280764 - RNA, 19 nt, Vaccinia virus
aucuacgccuuuaaauccu

SEQ ID NO: 3280765 - RNA, 22 nt, Vaccinia virus
auuacauuuuuuauaaauagau

SEQ ID NO: 3280766 - RNA, 16 nt, Vaccinia virus
agaagcguguuauugu

SEQ ID NO: 3280767 - RNA, 13 nt, Vaccinia virus
gauuuugauuuug

SEQ ID NO: 3280768 - RNA, 16 nt, Vaccinia virus
agacgucaucuguucu

SEQ ID NO: 3280769 - RNA, 18 nt, Vaccinia virus
aaauacugacacaaacaa

SEQ ID NO: 3280770 - RNA, 19 nt, Vaccinia virus
guacagaauuaauuagacg

SEQ ID NO: 3280771 - RNA, 14 nt, Vaccinia virus
acagacuucaaagu

SEQ ID NO: 3280772 - RNA, 14 nt, Vaccinia virus
uucacaauucauuc

SEQ ID NO: 3280773 - RNA, 21 nt, Vaccinia virus
agauuccuucuacugcagcaa

SEQ ID NO: 3280774 - RNA, 17 nt, Vaccinia virus
gagcacuauuucuaaau

SEQ ID NO: 3280775 - RNA, 22 nt, Vaccinia virus
cauaccuauaggaauagucucu

SEQ ID NO: 3280776 - RNA, 15 nt, Vaccinia virus
agugaaauaagcuuu

SEQ ID NO: 3280777 - RNA, 16 nt, Vaccinia virus
uagaauauauguaugu

SEQ ID NO: 3280778 - RNA, 16 nt, Vaccinia virus
uaaauucgauaucuuu

SEQ ID NO: 3280779 - RNA, 18 nt, Vaccinia virus
aggaaugccacaaaugaa

SEQ ID NO: 3280780 - RNA, 16 nt, Vaccinia virus
gauucuaggaacaguu

SEQ ID NO: 3280781 - RNA, 11 nt, Vaccinia virus
aaacaaacauc

SEQ ID NO: 3280782 - RNA, 17 nt, Vaccinia virus
gaaacaguaugauuuua

SEQ ID NO: 3280783 - RNA, 15 nt, Vaccinia virus
uggccaauugucuuu

SEQ ID NO: 3280784 - RNA, 14 nt, Vaccinia virus
gauugccauaauaa

SEQ ID NO: 3280785 - RNA, 21 nt, Vaccinia virus
aacaaguaugacauuguaaaa

SEQ ID NO: 3280786 - RNA, 19 nt, Vaccinia virus
uauccuuuaccaccaaaua

SEQ ID NO: 3280787 - RNA, 17 nt, Vaccinia virus
ugacaauaauuauguag

SEQ ID NO: 3280788 - RNA, 21 nt, Vaccinia virus
ucgacuaucaacaauuuugua

SEQ ID NO: 3280789 - RNA, 18 nt, Vaccinia virus
ucauuuuuuuaaaacugu

SEQ ID NO: 3280790 - RNA, 22 nt, Vaccinia virus
auauaauguacuagaugauauu

SEQ ID NO: 3280791 - RNA, 18 nt, Vaccinia virus
cacauuguauauaguuua

SEQ ID NO: 3280792 - RNA, 19 nt, Vaccinia virus
aauaacuacaguuugaaaa

SEQ ID NO: 3280793 - RNA, 15 nt, Vaccinia virus
cucuggagaaaagau

SEQ ID NO: 3280794 - RNA, 23 nt, Vaccinia virus
auagauucauucguuauagaaug

SEQ ID NO: 3280795 - RNA, 22 nt, Vaccinia virus
cgaauaucguucucuaaauguc

SEQ ID NO: 3280796 - RNA, 16 nt, Vaccinia virus
cuacugcaucacugac

SEQ ID NO: 3280797 - RNA, 23 nt, Vaccinia virus
uaguguaauguuaacaaaaaugu

SEQ ID NO: 3280798 - RNA, 22 nt, Vaccinia virus
aaguaugaagaaaaauguugug

SEQ ID NO: 3280799 - RNA, 15 nt, Vaccinia virus
gaggcaauagaaaag

SEQ ID NO: 3280800 - RNA, 15 nt, Vaccinia virus
acccagcauacuuga

SEQ ID NO: 3280801 - RNA, 16 nt, Vaccinia virus
auaaaaacgaggauau

SEQ ID NO: 3280802 - RNA, 16 nt, Vaccinia virus
acaacgagauaucuug

SEQ ID NO: 3280803 - RNA, 15 nt, Vaccinia virus
guaauuaaauguuug

SEQ ID NO: 3280804 - RNA, 16 nt, Vaccinia virus
auuuaacguuaaagau

SEQ ID NO: 3280805 - RNA, 12 nt, Vaccinia virus
aaaugucaugau

SEQ ID NO: 3280806 - RNA, 16 nt, Vaccinia virus
aaucaagauucauuuu

SEQ ID NO: 3280807 - RNA, 22 nt, Vaccinia virus
auuucaucugugguauucuugu

SEQ ID NO: 3280808 - RNA, 17 nt, Vaccinia virus
gcuauauggauauucau

SEQ ID NO: 3280809 - RNA, 17 nt, Vaccinia virus
gugauaaguaauaacua

SEQ ID NO: 3280810 - RNA, 13 nt, Vaccinia virus
aauuuguuaaaaa

SEQ ID NO: 3280811 - RNA, 21 nt, Vaccinia virus
aagauuaacuccauaaugucu

SEQ ID NO: 3280812 - RNA, 13 nt, Vaccinia virus
uuaaauuauuuag

SEQ ID NO: 3280813 - RNA, 13 nt, Vaccinia virus
ugauauagaucuu

SEQ ID NO: 3280814 - RNA, 14 nt, Vaccinia virus
aaauucguaauaau

SEQ ID NO: 3280815 - RNA, 20 nt, Vaccinia virus
aauaugauuagaaguuauau

SEQ ID NO: 3280816 - RNA, 17 nt, Vaccinia virus
cugaaaauaaagauaaa

SEQ ID NO: 3280817 - RNA, 23 nt, Vaccinia virus
auccaaggauguaauuaaauguu

SEQ ID NO: 3280818 - RNA, 22 nt, Vaccinia virus
aaaacgaggagcggauaaugau

SEQ ID NO: 3280819 - RNA, 18 nt, Vaccinia virus
uuaacguaucgcauuaau

SEQ ID NO: 3280820 - RNA, 15 nt, Vaccinia virus
agugcaaugaauauc

SEQ ID NO: 3280821 - RNA, 14 nt, Vaccinia virus
uauaaaauauauug

SEQ ID NO: 3280822 - RNA, 14 nt, Vaccinia virus
uaacgcaacuauau

SEQ ID NO: 3280823 - RNA, 22 nt, Vaccinia virus
uccgggaacauacgcuuccaga

SEQ ID NO: 3280824 - RNA, 20 nt, Vaccinia virus
ucaagacguggcaaacaaug

SEQ ID NO: 3280825 - RNA, 16 nt, Vaccinia virus
uaauuaugauuuugau

SEQ ID NO: 3280826 - RNA, 14 nt, Vaccinia virus
cauaaaauuuaaga

SEQ ID NO: 3280827 - RNA, 16 nt, Vaccinia virus
uucacagaaacacuag

SEQ ID NO: 3280828 - RNA, 13 nt, Vaccinia virus
ugaauaauguacu

SEQ ID NO: 3280829 - RNA, 22 nt, Vaccinia virus
auuuaauuuggucauuauuaau

SEQ ID NO: 3280830 - RNA, 20 nt, Vaccinia virus
aauauucuaugacugaaugu

SEQ ID NO: 3280831 - RNA, 22 nt, Vaccinia virus
uacauacaucuccaaaacuauc

SEQ ID NO: 3280832 - RNA, 14 nt, Vaccinia virus
gaggaagaagaugg

SEQ ID NO: 3280833 - RNA, 13 nt, Vaccinia virus
uguauuccaaauu

SEQ ID NO: 3280834 - RNA, 16 nt, Vaccinia virus
aaagggauaacauguu

SEQ ID NO: 3280835 - RNA, 18 nt, Vaccinia virus
auaaagauaguguagcgu

SEQ ID NO: 3280836 - RNA, 19 nt, Vaccinia virus
uaauauuaaagauaaagcg

SEQ ID NO: 3280837 - RNA, 23 nt, Vaccinia virus
cauuaaguucacuagaauaucca

SEQ ID NO: 3280838 - RNA, 19 nt, Vaccinia virus
cuccaaacgaguuaaguuu

SEQ ID NO: 3280839 - RNA, 18 nt, Vaccinia virus
agcacguggaaaaaaagu

SEQ ID NO: 3280840 - RNA, 17 nt, Vaccinia virus
aucauguagaagaauuc

SEQ ID NO: 3280841 - RNA, 14 nt, Vaccinia virus
cauaugauguuugu

SEQ ID NO: 3280842 - RNA, 20 nt, Vaccinia virus
uucaucauccaccuguuuua

SEQ ID NO: 3280843 - RNA, 18 nt, Vaccinia virus
auuacaaguauuauugau

SEQ ID NO: 3280844 - RNA, 15 nt, Vaccinia virus
acagauguaaauaua

SEQ ID NO: 3280845 - RNA, 18 nt, Vaccinia virus
auaaauggagaucuaaau

SEQ ID NO: 3280846 - RNA, 17 nt, Vaccinia virus
aauauuacuaauugaua

SEQ ID NO: 3280847 - RNA, 14 nt, Vaccinia virus
aguuuucuaaagau

SEQ ID NO: 3280848 - RNA, 15 nt, Vaccinia virus
cauguuuagaaagaa

SEQ ID NO: 3280849 - RNA, 21 nt, Vaccinia virus
ucuagauagaguauuaaauau

SEQ ID NO: 3280850 - RNA, 23 nt, Vaccinia virus
uguuuucaauggccaucugaaau

SEQ ID NO: 3280851 - RNA, 17 nt, Vaccinia virus
cgaaauacaaaauguua

SEQ ID NO: 3280852 - RNA, 13 nt, Vaccinia virus
gaacuauauuaag

SEQ ID NO: 3280853 - RNA, 22 nt, Vaccinia virus
guuauguauuucauuguucauc

SEQ ID NO: 3280854 - RNA, 14 nt, Vaccinia virus
uaaaaaauauccuu

SEQ ID NO: 3280855 - RNA, 21 nt, Vaccinia virus
uucaaauccgaaauugucuga

SEQ ID NO: 3280856 - RNA, 13 nt, Vaccinia virus
acugacuuuagac

SEQ ID NO: 3280857 - RNA, 14 nt, Vaccinia virus
agagguaaugaugu

SEQ ID NO: 3280858 - RNA, 18 nt, Vaccinia virus
uaauugcuacacccacua

SEQ ID NO: 3280859 - RNA, 21 nt, Vaccinia virus
guucagauugggaucuuuuca

SEQ ID NO: 3280860 - RNA, 19 nt, Vaccinia virus
ucaauagcugagucuauau

SEQ ID NO: 3280861 - RNA, 19 nt, Vaccinia virus
uugaguuuuccguuagaaa

SEQ ID NO: 3280862 - RNA, 13 nt, Vaccinia virus
agaauauauguuu

SEQ ID NO: 3280863 - RNA, 19 nt, Vaccinia virus
accgcuagaucuguaauug

SEQ ID NO: 3280864 - RNA, 19 nt, Vaccinia virus
uacauaugacaaacauugu

SEQ ID NO: 3280865 - RNA, 15 nt, Vaccinia virus
guccaauaugaucau

SEQ ID NO: 3280866 - RNA, 13 nt, Vaccinia virus
ucauauaaauguu

SEQ ID NO: 3280867 - RNA, 14 nt, Vaccinia virus
aagaaaacaaacau

SEQ ID NO: 3280868 - RNA, 13 nt, Vaccinia virus
uccaaucauauag

SEQ ID NO: 3280869 - RNA, 18 nt, Vaccinia virus
uuaacauuauuauauucu

SEQ ID NO: 3280870 - RNA, 14 nt, Vaccinia virus
agaguguuuaucca

SEQ ID NO: 3280871 - RNA, 22 nt, Vaccinia virus
uaacuucgugaauaauguuucu

SEQ ID NO: 3280872 - RNA, 21 nt, Vaccinia virus
aaugcagauuuauugaaaaug

SEQ ID NO: 3280873 - RNA, 15 nt, Vaccinia virus
aauggagaaauacuu

SEQ ID NO: 3280874 - RNA, 23 nt, Vaccinia virus
ugauuuugaugauaauguuacca

SEQ ID NO: 3280875 - RNA, 18 nt, Vaccinia virus
cuuuaauagugucauuag

SEQ ID NO: 3280876 - RNA, 19 nt, Vaccinia virus
auaaagucugucaaaucau

SEQ ID NO: 3280877 - RNA, 15 nt, Vaccinia virus
aaagaaaauauggaa

SEQ ID NO: 3280878 - RNA, 14 nt, Vaccinia virus
auguuuauagaugu

SEQ ID NO: 3280879 - RNA, 16 nt, Vaccinia virus
gacuuuguagaaauau

SEQ ID NO: 3280880 - RNA, 19 nt, Vaccinia virus
uaguuuucaucagauaaga

SEQ ID NO: 3280881 - RNA, 20 nt, Vaccinia virus
cguauauaacauuguuuaug

SEQ ID NO: 3280882 - RNA, 15 nt, Vaccinia virus
auccauuuacaacuc

SEQ ID NO: 3280883 - RNA, 14 nt, Vaccinia virus
agguaaauguaaau

SEQ ID NO: 3280884 - RNA, 17 nt, Vaccinia virus
aaaaacuacuaugcucu

SEQ ID NO: 3280885 - RNA, 18 nt, Vaccinia virus
ucagaaaauaccauccaa

SEQ ID NO: 3280886 - RNA, 15 nt, Vaccinia virus
auccuuaaauguuuu

SEQ ID NO: 3280887 - RNA, 20 nt, Vaccinia virus
caaacuuaaucuuauuagaa

SEQ ID NO: 3280888 - RNA, 14 nt, Vaccinia virus
ugaaucaaauguaa

SEQ ID NO: 3280889 - RNA, 20 nt, Vaccinia virus
gaaagcuguaaugguuuaua

SEQ ID NO: 3280890 - RNA, 17 nt, Vaccinia virus
aucaugacguaaaugua

SEQ ID NO: 3280891 - RNA, 14 nt, Vaccinia virus
auaauauuaauauu

SEQ ID NO: 3280892 - RNA, 20 nt, Vaccinia virus
cuaggauacauaaaauuuaa

SEQ ID NO: 3280893 - RNA, 23 nt, Vaccinia virus
uauauagccgucgccaauugugu

SEQ ID NO: 3280894 - RNA, 23 nt, Vaccinia virus
ucuagcaaaaauucuaugucuaa

SEQ ID NO: 3280895 - RNA, 17 nt, Vaccinia virus
ugagaguagauaucauu

SEQ ID NO: 3280896 - RNA, 12 nt, Vaccinia virus
uccuucgucucu

SEQ ID NO: 3280897 - RNA, 12 nt, Vaccinia virus
aagaauuacuua

SEQ ID NO: 3280898 - RNA, 16 nt, Vaccinia virus
agacagugguuucaug

SEQ ID NO: 3280899 - RNA, 22 nt, Vaccinia virus
uaauaaucaauaauauaucuua

SEQ ID NO: 3280900 - RNA, 18 nt, Vaccinia virus
aucaucgaucuaauagau

SEQ ID NO: 3280901 - RNA, 22 nt, Vaccinia virus
auccauaguuuguaucaauaau

SEQ ID NO: 3280902 - RNA, 18 nt, Vaccinia virus
cuuuucuauaaucaucuu

SEQ ID NO: 3280903 - RNA, 17 nt, Vaccinia virus
auauuuuuuuuuaaaga

SEQ ID NO: 3280904 - RNA, 17 nt, Vaccinia virus
aaauccaaguuucuauu

SEQ ID NO: 3280905 - RNA, 13 nt, Vaccinia virus
cuauguaaaugau

SEQ ID NO: 3280906 - RNA, 22 nt, Vaccinia virus
auugagacgaauggcucuuccu

SEQ ID NO: 3280907 - RNA, 17 nt, Vaccinia virus
accaacacuuaucaauu

SEQ ID NO: 3280908 - RNA, 21 nt, Vaccinia virus
auucuaccuuacccauaaaca

SEQ ID NO: 3280909 - RNA, 23 nt, Vaccinia virus
cgguucgguaacgucuguggaug

SEQ ID NO: 3280910 - RNA, 21 nt, Vaccinia virus
uagauagacgaggaaacaaug

SEQ ID NO: 3280911 - RNA, 22 nt, Vaccinia virus
agaaaucaacgaucuaauacaa

SEQ ID NO: 3280912 - RNA, 20 nt, Vaccinia virus
uucacaacuuuacuguuuuu

SEQ ID NO: 3280913 - RNA, 20 nt, Vaccinia virus
uauuucaaaauuauuuacca

SEQ ID NO: 3280914 - RNA, 21 nt, Vaccinia virus
cauuaauuucugauauggaau

SEQ ID NO: 3280915 - RNA, 21 nt, Vaccinia virus
uauucgucgucgacuaucaac

SEQ ID NO: 3280916 - RNA, 23 nt, Vaccinia virus
aauucuauauauguuuucaucau

SEQ ID NO: 3280917 - RNA, 15 nt, Vaccinia virus
aucuuuuuaggaaug

SEQ ID NO: 3280918 - RNA, 15 nt, Vaccinia virus
ucaaaguuucugaaa

SEQ ID NO: 3280919 - RNA, 20 nt, Vaccinia virus
auauugauaucuuuuugaau

SEQ ID NO: 3280920 - RNA, 21 nt, Vaccinia virus
uaccguaguauauugagagug

SEQ ID NO: 3280921 - RNA, 12 nt, Vaccinia virus
uauauguagcaa

SEQ ID NO: 3280922 - RNA, 13 nt, Vaccinia virus
acaguuaaaacua

SEQ ID NO: 3280923 - RNA, 19 nt, Vaccinia virus
aauauuaauauuagaguua

SEQ ID NO: 3280924 - RNA, 17 nt, Vaccinia virus
caguuucucaucuuuua

SEQ ID NO: 3280925 - RNA, 14 nt, Vaccinia virus
cucuauucaucuga

SEQ ID NO: 3280926 - RNA, 23 nt, Vaccinia virus
auauagucuuggaucaaauagau

SEQ ID NO: 3280927 - RNA, 13 nt, Vaccinia virus
auuuuuuaucaua

SEQ ID NO: 3280928 - RNA, 17 nt, Vaccinia virus
guuuucccauacuaauu

SEQ ID NO: 3280929 - RNA, 13 nt, Vaccinia virus
accacuagcaaaa

SEQ ID NO: 3280930 - RNA, 14 nt, Vaccinia virus
agauacaaauaugu

SEQ ID NO: 3280931 - RNA, 14 nt, Vaccinia virus
gacucauuaaaacu

SEQ ID NO: 3280932 - RNA, 20 nt, Vaccinia virus
cauauuuaucaauucuucua

SEQ ID NO: 3280933 - RNA, 17 nt, Vaccinia virus
uuaauaaaguaugaaca

SEQ ID NO: 3280934 - RNA, 17 nt, Vaccinia virus
gagacgaucuacuauca

SEQ ID NO: 3280935 - RNA, 21 nt, Vaccinia virus
gcuaauaaugacuguagauau

SEQ ID NO: 3280936 - RNA, 13 nt, Vaccinia virus
aucacuucaauaa

SEQ ID NO: 3280937 - RNA, 16 nt, Vaccinia virus
uuacauuauaagaaau

SEQ ID NO: 3280938 - RNA, 23 nt, Vaccinia virus
uacaccaucaauagauaaaacga

SEQ ID NO: 3280939 - RNA, 14 nt, Vaccinia virus
auuaucaaauggau

SEQ ID NO: 3280940 - RNA, 14 nt, Vaccinia virus
uagaugguucuuua

SEQ ID NO: 3280941 - RNA, 23 nt, Vaccinia virus
uagugaugaauugaaaauuauuu

SEQ ID NO: 3280942 - RNA, 21 nt, Vaccinia virus
cuguaggaaauggaagauauu

SEQ ID NO: 3280943 - RNA, 12 nt, Vaccinia virus
aaggacaaaaug

SEQ ID NO: 3280944 - RNA, 18 nt, Vaccinia virus
auuaucaaaauuuggaaa

SEQ ID NO: 3280945 - RNA, 16 nt, Vaccinia virus
uuacuauagcauuaau

SEQ ID NO: 3280946 - RNA, 15 nt, Vaccinia virus
aacgccuuuagaaaa

SEQ ID NO: 3280947 - RNA, 13 nt, Vaccinia virus
aaagaauaauccu

SEQ ID NO: 3280948 - RNA, 17 nt, Vaccinia virus
caguacacgaaugauuu

SEQ ID NO: 3280949 - RNA, 16 nt, Vaccinia virus
aaugcccguaaagaua

SEQ ID NO: 3280950 - RNA, 18 nt, Vaccinia virus
auagaauuuauaacauga

SEQ ID NO: 3280951 - RNA, 18 nt, Vaccinia virus
cgacugugauaauaauac

SEQ ID NO: 3280952 - RNA, 23 nt, Vaccinia virus
uuagacauaaaaacuaauauuag

SEQ ID NO: 3280953 - RNA, 16 nt, Vaccinia virus
acauuuuuuguuuugg

SEQ ID NO: 3280954 - RNA, 12 nt, Vaccinia virus
cagaacuauuag

SEQ ID NO: 3280955 - RNA, 22 nt, Vaccinia virus
aauaaacuccguagagaaauau

SEQ ID NO: 3280956 - RNA, 19 nt, Vaccinia virus
uucgguauaaaaauuauug

SEQ ID NO: 3280957 - RNA, 14 nt, Vaccinia virus
agcaucuaacuuga

SEQ ID NO: 3280958 - RNA, 12 nt, Vaccinia virus
auaaauagagaa

SEQ ID NO: 3280959 - RNA, 16 nt, Vaccinia virus
gauccuuuucuucaga

SEQ ID NO: 3280960 - RNA, 23 nt, Vaccinia virus
caacgaauacaaacgccauaauu

SEQ ID NO: 3280961 - RNA, 15 nt, Vaccinia virus
uuguacauguaauga

SEQ ID NO: 3280962 - RNA, 19 nt, Vaccinia virus
gacaucuggauuucagaua

SEQ ID NO: 3280963 - RNA, 21 nt, Vaccinia virus
guaacucuaguaaaauaauca

SEQ ID NO: 3280964 - RNA, 13 nt, Vaccinia virus
auaauuugaucca

SEQ ID NO: 3280965 - RNA, 17 nt, Vaccinia virus
ucauaucacauaguguu

SEQ ID NO: 3280966 - RNA, 20 nt, Vaccinia virus
auguucuuaaucaauguaca

SEQ ID NO: 3280967 - RNA, 17 nt, Vaccinia virus
uagauacaauggaugau

SEQ ID NO: 3280968 - RNA, 18 nt, Vaccinia virus
acauggaauaaauuauua

SEQ ID NO: 3280969 - RNA, 16 nt, Vaccinia virus
auaccaguuauguuua

SEQ ID NO: 3280970 - RNA, 14 nt, Vaccinia virus
cccaaauaucuuua

SEQ ID NO: 3280971 - RNA, 21 nt, Vaccinia virus
aaaugaggucgcaaaaaaacu

SEQ ID NO: 3280972 - RNA, 18 nt, Vaccinia virus
aggccaagcgaauuauuu

SEQ ID NO: 3280973 - RNA, 15 nt, Vaccinia virus
ucauguuauaguguu

SEQ ID NO: 3280974 - RNA, 18 nt, Vaccinia virus
caucuucgucuauuucua

SEQ ID NO: 3280975 - RNA, 14 nt, Vaccinia virus
cuccaaucaugugu

SEQ ID NO: 3280976 - RNA, 14 nt, Vaccinia virus
aauuuaaaaugaua

SEQ ID NO: 3280977 - RNA, 18 nt, Vaccinia virus
uaucuuaaauaacucauu

SEQ ID NO: 3280978 - RNA, 19 nt, Vaccinia virus
gaaguuuuaaaaauacuua

SEQ ID NO: 3280979 - RNA, 20 nt, Vaccinia virus
agaguuaucaagagaaaauu

SEQ ID NO: 3280980 - RNA, 22 nt, Vaccinia virus
aucaaaaccauuucuaagagaa

SEQ ID NO: 3280981 - RNA, 20 nt, Vaccinia virus
gauccacaaaacguauauag

SEQ ID NO: 3280982 - RNA, 19 nt, Vaccinia virus
ccuguauucuuuuuaagau

SEQ ID NO: 3280983 - RNA, 16 nt, Vaccinia virus
cugcuauauggauauu

SEQ ID NO: 3280984 - RNA, 16 nt, Vaccinia virus
aacguacaaauggaua

SEQ ID NO: 3280985 - RNA, 16 nt, Vaccinia virus
aaacauacaucuguuu

SEQ ID NO: 3280986 - RNA, 23 nt, Vaccinia virus
auaaauuugucauuuaugauaua

SEQ ID NO: 3280987 - RNA, 13 nt, Vaccinia virus
uaacaaagaaaga

SEQ ID NO: 3280988 - RNA, 17 nt, Vaccinia virus
uguuuuagugauaucaa

SEQ ID NO: 3280989 - RNA, 17 nt, Vaccinia virus
uaucaauuaaauaauua

SEQ ID NO: 3280990 - RNA, 17 nt, Vaccinia virus
ccucaaacucuauuuua

SEQ ID NO: 3280991 - RNA, 15 nt, Vaccinia virus
auauaguauauagau

SEQ ID NO: 3280992 - RNA, 21 nt, Vaccinia virus
acgaaccagaaagugcaaaug

SEQ ID NO: 3280993 - RNA, 13 nt, Vaccinia virus
augguaaauacug

SEQ ID NO: 3280994 - RNA, 15 nt, Vaccinia virus
uuccauuuuuaauuu

SEQ ID NO: 3280995 - RNA, 17 nt, Vaccinia virus
uaucucaauaguuucau

SEQ ID NO: 3280996 - RNA, 19 nt, Vaccinia virus
uaauuguuauuauuucauu

SEQ ID NO: 3280997 - RNA, 16 nt, Vaccinia virus
auaaauaguucaacau

SEQ ID NO: 3280998 - RNA, 16 nt, Vaccinia virus
uuauauucucuggaau

SEQ ID NO: 3280999 - RNA, 14 nt, Vaccinia virus
aaacaaagaauugu

SEQ ID NO: 3281000 - RNA, 22 nt, Vaccinia virus
uucaauaauucuauucuaguau

SEQ ID NO: 3281001 - RNA, 19 nt, Vaccinia virus
uauaucugaguaugaugau

SEQ ID NO: 3281002 - RNA, 14 nt, Vaccinia virus
uauauaguuuuuua

SEQ ID NO: 3281003 - RNA, 16 nt, Vaccinia virus
agguauauuuauucca

SEQ ID NO: 3281004 - RNA, 16 nt, Vaccinia virus
auuuuuaauagcugcu

SEQ ID NO: 3281005 - RNA, 23 nt, Vaccinia virus
acuccuuauuuuuagacauuaga

SEQ ID NO: 3281006 - RNA, 15 nt, Vaccinia virus
ucauggcaucauaga

SEQ ID NO: 3281007 - RNA, 20 nt, Vaccinia virus
uugaaauuguuuuuuauuuu

SEQ ID NO: 3281008 - RNA, 16 nt, Vaccinia virus
augauugauuagaaaa

SEQ ID NO: 3281009 - RNA, 23 nt, Vaccinia virus
gauucaggaaucguuuauucgau

SEQ ID NO: 3281010 - RNA, 19 nt, Vaccinia virus
aucacuauauguuccagua

SEQ ID NO: 3281011 - RNA, 17 nt, Vaccinia virus
caaauagagcaauuacu

SEQ ID NO: 3281012 - RNA, 20 nt, Vaccinia virus
ugauagcaauucauguacca

SEQ ID NO: 3281013 - RNA, 22 nt, Vaccinia virus
cauuacuaucuuuaacauaagu

SEQ ID NO: 3281014 - RNA, 19 nt, Vaccinia virus
cuuugauggcugauagugu

SEQ ID NO: 3281015 - RNA, 12 nt, Vaccinia virus
cuuuaaauacuu

SEQ ID NO: 3281016 - RNA, 20 nt, Vaccinia virus
gacaacuuaaucugaugaau

SEQ ID NO: 3281017 - RNA, 20 nt, Vaccinia virus
gagcuaaacacauuagauau

SEQ ID NO: 3281018 - RNA, 15 nt, Vaccinia virus
ucucgaugaaaauaa

SEQ ID NO: 3281019 - RNA, 18 nt, Vaccinia virus
auucauauucuuaaaagg

SEQ ID NO: 3281020 - RNA, 19 nt, Vaccinia virus
auaacuucuaaucuuguaa

SEQ ID NO: 3281021 - RNA, 16 nt, Vaccinia virus
uagaguaucguugaga

SEQ ID NO: 3281022 - RNA, 20 nt, Vaccinia virus
accaacguauagagguauau

SEQ ID NO: 3281023 - RNA, 16 nt, Vaccinia virus
uacuuucgguuucaua

SEQ ID NO: 3281024 - RNA, 14 nt, Vaccinia virus
uuauacacugguua

SEQ ID NO: 3281025 - RNA, 21 nt, Vaccinia virus
uauaaaauacuaaugcaucua

SEQ ID NO: 3281026 - RNA, 21 nt, Vaccinia virus
gauuuauuugauaaucauguu

SEQ ID NO: 3281027 - RNA, 18 nt, Vaccinia virus
uaucgcuaaaauuuucau

SEQ ID NO: 3281028 - RNA, 22 nt, Vaccinia virus
uaacuaucuguaaaagcauaug

SEQ ID NO: 3281029 - RNA, 22 nt, Vaccinia virus
gauacguacugucuauaaugac

SEQ ID NO: 3281030 - RNA, 16 nt, Vaccinia virus
uucaaucugagauucu

SEQ ID NO: 3281031 - RNA, 21 nt, Vaccinia virus
cuuaggcggauucaguacaau

SEQ ID NO: 3281032 - RNA, 13 nt, Vaccinia virus
ggauuuucuagau

SEQ ID NO: 3281033 - RNA, 19 nt, Vaccinia virus
ugaaaucaguggaguagua

SEQ ID NO: 3281034 - RNA, 23 nt, Vaccinia virus
auuucuggaaugacgaauccugu

SEQ ID NO: 3281035 - RNA, 14 nt, Vaccinia virus
guaucgcacgcucu

SEQ ID NO: 3281036 - RNA, 15 nt, Vaccinia virus
auuaucaagaugugu

SEQ ID NO: 3281037 - RNA, 13 nt, Vaccinia virus
auuaauacauuua

SEQ ID NO: 3281038 - RNA, 21 nt, Vaccinia virus
gucuacaauuugggacaauga

SEQ ID NO: 3281039 - RNA, 14 nt, Vaccinia virus
guauuaauaauauc

SEQ ID NO: 3281040 - RNA, 22 nt, Vaccinia virus
guaacuaguuuuauacacaucu

SEQ ID NO: 3281041 - RNA, 22 nt, Vaccinia virus
auucuaaagagauuuagacaac

SEQ ID NO: 3281042 - RNA, 18 nt, Vaccinia virus
acuaaucguaauauucua

SEQ ID NO: 3281043 - RNA, 13 nt, Vaccinia virus
uacaaaaucgauu

SEQ ID NO: 3281044 - RNA, 14 nt, Vaccinia virus
ugagauauauacac

SEQ ID NO: 3281045 - RNA, 20 nt, Vaccinia virus
cuuuauaucguguucauuaa

SEQ ID NO: 3281046 - RNA, 15 nt, Vaccinia virus
aagaucauacagaca

SEQ ID NO: 3281047 - RNA, 15 nt, Vaccinia virus
acauuuuuauaaaca

SEQ ID NO: 3281048 - RNA, 22 nt, Vaccinia virus
ucauaacuccggauagagaaau

SEQ ID NO: 3281049 - RNA, 18 nt, Vaccinia virus
cauuacaaagaagaacug

SEQ ID NO: 3281050 - RNA, 16 nt, Vaccinia virus
aaagauuaauuauccg

SEQ ID NO: 3281051 - RNA, 22 nt, Vaccinia virus
gaggacuguuuuccugaaggaa

SEQ ID NO: 3281052 - RNA, 17 nt, Vaccinia virus
aauugggguauuaauaa

SEQ ID NO: 3281053 - RNA, 17 nt, Vaccinia virus
cuaccacacuucuagau

SEQ ID NO: 3281054 - RNA, 20 nt, Vaccinia virus
cacuaauaucgauauacaaa

SEQ ID NO: 3281055 - RNA, 16 nt, Vaccinia virus
acuaggagaauuauuu

SEQ ID NO: 3281056 - RNA, 18 nt, Vaccinia virus
uagcuccccuguuuucau

SEQ ID NO: 3281057 - RNA, 16 nt, Vaccinia virus
acauuucucaaaugaa

SEQ ID NO: 3281058 - RNA, 13 nt, Vaccinia virus
gcaauaucaucua

SEQ ID NO: 3281059 - RNA, 16 nt, Vaccinia virus
ucaaaauauguagaaa

SEQ ID NO: 3281060 - RNA, 14 nt, Vaccinia virus
auaaauaacaaugg

SEQ ID NO: 3281061 - RNA, 14 nt, Vaccinia virus
ucagaaucguauau

SEQ ID NO: 3281062 - RNA, 21 nt, Vaccinia virus
auuucaaauaggucuucgucu

SEQ ID NO: 3281063 - RNA, 18 nt, Vaccinia virus
uuuuaaacaacuaaacag

SEQ ID NO: 3281064 - RNA, 18 nt, Vaccinia virus
uaacugacuuaauaguag

SEQ ID NO: 3281065 - RNA, 16 nt, Vaccinia virus
uuuaagaaauggugua

SEQ ID NO: 3281066 - RNA, 14 nt, Vaccinia virus
uucaacauguuuaa

SEQ ID NO: 3281067 - RNA, 15 nt, Vaccinia virus
uaaugaaauuauuca

SEQ ID NO: 3281068 - RNA, 14 nt, Vaccinia virus
acaguuaacgaaag

SEQ ID NO: 3281069 - RNA, 18 nt, Vaccinia virus
uaacaaaaauuaugaaau

SEQ ID NO: 3281070 - RNA, 13 nt, Vaccinia virus
gacaaauacucua

SEQ ID NO: 3281071 - RNA, 19 nt, Vaccinia virus
uagguauuuuaucucuauu

SEQ ID NO: 3281072 - RNA, 23 nt, Vaccinia virus
aauuuuuugguagguuuuagaga

SEQ ID NO: 3281073 - RNA, 20 nt, Vaccinia virus
ucaacgaucuaauacaaaau

SEQ ID NO: 3281074 - RNA, 14 nt, Vaccinia virus
uaccaaucauuuau

SEQ ID NO: 3281075 - RNA, 16 nt, Vaccinia virus
uccggauccuuuucuu

SEQ ID NO: 3281076 - RNA, 14 nt, Vaccinia virus
uuacuccuuaaaaa

SEQ ID NO: 3281077 - RNA, 22 nt, Vaccinia virus
cuuuuagagguucccaauucca

SEQ ID NO: 3281078 - RNA, 13 nt, Vaccinia virus
aaaaaauuauacu

SEQ ID NO: 3281079 - RNA, 22 nt, Vaccinia virus
ucuccaugauuaaauauuuuaa

SEQ ID NO: 3281080 - RNA, 16 nt, Vaccinia virus
ucauacaugauauuca

SEQ ID NO: 3281081 - RNA, 19 nt, Vaccinia virus
gccaguccuccuacagauu

SEQ ID NO: 3281082 - RNA, 19 nt, Vaccinia virus
aacaaauucugcaauaucu

SEQ ID NO: 3281083 - RNA, 16 nt, Vaccinia virus
gaacagauaguuuauc

SEQ ID NO: 3281084 - RNA, 20 nt, Vaccinia virus
cuuuuaguaacguaugugaa

SEQ ID NO: 3281085 - RNA, 21 nt, Vaccinia virus
uggaauucaguuggaauauug

SEQ ID NO: 3281086 - RNA, 17 nt, Vaccinia virus
agcauuguuauguauuu

SEQ ID NO: 3281087 - RNA, 16 nt, Vaccinia virus
aaccugaucuggaaaa

SEQ ID NO: 3281088 - RNA, 14 nt, Vaccinia virus
uauaugauaucuuu

SEQ ID NO: 3281089 - RNA, 16 nt, Vaccinia virus
guuuaauuuucacaag

SEQ ID NO: 3281090 - RNA, 12 nt, Vaccinia virus
acacucucaaua

SEQ ID NO: 3281091 - RNA, 22 nt, Vaccinia virus
uagagccugugaaugcaaucaa

SEQ ID NO: 3281092 - RNA, 18 nt, Vaccinia virus
ucuaccguuguuaaauac

SEQ ID NO: 3281093 - RNA, 16 nt, Vaccinia virus
uuauuauuucauuaau

SEQ ID NO: 3281094 - RNA, 21 nt, Vaccinia virus
cuugauuaccuuacucaugau

SEQ ID NO: 3281095 - RNA, 18 nt, Vaccinia virus
caaacuuuuucacagagc

SEQ ID NO: 3281096 - RNA, 15 nt, Vaccinia virus
aaugucaaguuuauu

SEQ ID NO: 3281097 - RNA, 17 nt, Vaccinia virus
ucauaauugcuuuucua

SEQ ID NO: 3281098 - RNA, 14 nt, Vaccinia virus
uauuauuacguguu

SEQ ID NO: 3281099 - RNA, 15 nt, Vaccinia virus
cagauauuuuaguuu

SEQ ID NO: 3281100 - RNA, 13 nt, Vaccinia virus
cacauauugaugu

SEQ ID NO: 3281101 - RNA, 15 nt, Vaccinia virus
cgucuguuuuuguuu

SEQ ID NO: 3281102 - RNA, 21 nt, Vaccinia virus
cuauacauuguugcaucgugu

SEQ ID NO: 3281103 - RNA, 14 nt, Vaccinia virus
cuauacuaugaugu

SEQ ID NO: 3281104 - RNA, 22 nt, Vaccinia virus
cuauaguccugucuuucgaugu

SEQ ID NO: 3281105 - RNA, 12 nt, Vaccinia virus
cuauaucgaugu

SEQ ID NO: 3281106 - RNA, 20 nt, Vaccinia virus
cuauauuacgcggucgaugu

SEQ ID NO: 3281107 - RNA, 16 nt, Vaccinia virus
cuaguaucuuuuguuc

SEQ ID NO: 3281108 - RNA, 20 nt, Vaccinia virus
gauucaacaaaacucaaagc

SEQ ID NO: 3281109 - RNA, 14 nt, Vaccinia virus
aucuacaucuaugu

SEQ ID NO: 3281110 - RNA, 20 nt, Vaccinia virus
caucuuggacggaaucgauu

SEQ ID NO: 3281111 - RNA, 13 nt, Vaccinia virus
caugauaucaugu

SEQ ID NO: 3281112 - RNA, 20 nt, Vaccinia virus
caugauuucauuaucggugu

SEQ ID NO: 3281113 - RNA, 13 nt, Vaccinia virus
caucuaucgaugg

SEQ ID NO: 3281114 - RNA, 18 nt, Vaccinia virus
caucuauuaaguuuuuuu

SEQ ID NO: 3281115 - RNA, 22 nt, Vaccinia virus
caucuauuucaucguuuuguau

SEQ ID NO: 3281116 - RNA, 17 nt, Vaccinia virus
cauacagcucaucgauu

SEQ ID NO: 3281117 - RNA, 19 nt, Vaccinia virus
cauaaggaaacuuuuguuu

SEQ ID NO: 3281118 - RNA, 15 nt, Vaccinia virus
augcauaaucgauau

SEQ ID NO: 3281119 - RNA, 21 nt, Vaccinia virus
augauacuucacucaucgauu

SEQ ID NO: 3281120 - RNA, 18 nt, Vaccinia virus
aucugaaggugcaaccga

SEQ ID NO: 3281121 - RNA, 13 nt, Vaccinia virus
aucuauuuuuguu

SEQ ID NO: 3281122 - RNA, 13 nt, Vaccinia virus
aucuuaaucgagu

SEQ ID NO: 3281123 - RNA, 13 nt, Vaccinia virus
cgacuuuuuguuu

SEQ ID NO: 3281124 - RNA, 21 nt, Vaccinia virus
cgacuaucaacaauuuuguau

SEQ ID NO: 3281125 - RNA, 21 nt, Vaccinia virus
cgacaugauuaaguauuguuu

SEQ ID NO: 3281126 - RNA, 19 nt, Vaccinia virus
cgauguuuaacuuuuguuc

SEQ ID NO: 3281127 - RNA, 18 nt, Vaccinia virus
cgauauuucuuuucguuu

SEQ ID NO: 3281128 - RNA, 14 nt, Vaccinia virus
cgauagaucgaugg

SEQ ID NO: 3281129 - RNA, 16 nt, Vaccinia virus
cuuauauugaugaugu

SEQ ID NO: 3281130 - RNA, 19 nt, Vaccinia virus
cuucagaaauuaucgaugu

SEQ ID NO: 3281131 - RNA, 18 nt, Vaccinia virus
gucgacguuucucaaagu

SEQ ID NO: 3281132 - RNA, 18 nt, Vaccinia virus
aacucuuugauuuuguau

SEQ ID NO: 3281133 - RNA, 18 nt, Vaccinia virus
aacuauguucauuuuuuu

SEQ ID NO: 3281134 - RNA, 20 nt, Vaccinia virus
aacuauuaacuauuuugucu

SEQ ID NO: 3281135 - RNA, 15 nt, Vaccinia virus
aacuauuguuuuguu

SEQ ID NO: 3281136 - RNA, 12 nt, Vaccinia virus
aacuauuuuuuu

SEQ ID NO: 3281137 - RNA, 18 nt, Vaccinia virus
aacucucucauuuucuuu

SEQ ID NO: 3281138 - RNA, 16 nt, Vaccinia virus
aacguauauuuuauuu

SEQ ID NO: 3281139 - RNA, 19 nt, Vaccinia virus
aacuugguauuuuuugguu

SEQ ID NO: 3281140 - RNA, 23 nt, Vaccinia virus
aacuuugaaauuguuuuuuauuu

SEQ ID NO: 3281141 - RNA, 21 nt, Vaccinia virus
aacuuauaauccuuuuuauuu

SEQ ID NO: 3281142 - RNA, 20 nt, Vaccinia virus
caacaaagaaauuuuugguu

SEQ ID NO: 3281143 - RNA, 15 nt, Vaccinia virus
caacaauuuuuuguu

SEQ ID NO: 3281144 - RNA, 16 nt, Vaccinia virus
caaaucuauauuguuu

SEQ ID NO: 3281145 - RNA, 21 nt, Vaccinia virus
caaauaucggcauuuauguuu

SEQ ID NO: 3281146 - RNA, 16 nt, Vaccinia virus
caaaaguccaugauca

SEQ ID NO: 3281147 - RNA, 21 nt, Vaccinia virus
caaaaugauagauauuuuuuu

SEQ ID NO: 3281148 - RNA, 18 nt, Vaccinia virus
cauuuauaucauuuguuu

SEQ ID NO: 3281149 - RNA, 15 nt, Vaccinia virus
cauuauacuuuuuuu

SEQ ID NO: 3281150 - RNA, 14 nt, Vaccinia virus
cauuaucuuuguuu

SEQ ID NO: 3281151 - RNA, 14 nt, Vaccinia virus
cauucuaaugaugu

SEQ ID NO: 3281152 - RNA, 21 nt, Vaccinia virus
cgcuauugcacaauuuuguuu

SEQ ID NO: 3281153 - RNA, 15 nt, Vaccinia virus
aaaauccuccuauca

SEQ ID NO: 3281154 - RNA, 16 nt, Vaccinia virus
aaaaauuauccuauca

SEQ ID NO: 3281155 - RNA, 14 nt, Vaccinia virus
ccuaaauuuuguug

SEQ ID NO: 3281156 - RNA, 18 nt, Vaccinia virus
ccuauuccacauuuuguu

SEQ ID NO: 3281157 - RNA, 19 nt, Vaccinia virus
ccuauuccacauuuuguuu

SEQ ID NO: 3281158 - RNA, 22 nt, Vaccinia virus
ccuauugaucuucauuucguuu

SEQ ID NO: 3281159 - RNA, 17 nt, Vaccinia virus
cguuuauccuuuuguug

SEQ ID NO: 3281160 - RNA, 17 nt, Vaccinia virus
cuacaucaguuuuguau

SEQ ID NO: 3281161 - RNA, 15 nt, Vaccinia virus
cuaaaauaucgaugu

SEQ ID NO: 3281162 - RNA, 20 nt, Vaccinia virus
cagaaucuagauuccaauca

SEQ ID NO: 3281163 - RNA, 13 nt, Vaccinia virus
acuuguuuuguuc

SEQ ID NO: 3281164 - RNA, 18 nt, Vaccinia virus
caccuaccuuaaucaugu

SEQ ID NO: 3281165 - RNA, 16 nt, Vaccinia virus
cacgauuaauuuuuuu

SEQ ID NO: 3281166 - RNA, 21 nt, Vaccinia virus
cacuaaauaguuuuuuuguuu

SEQ ID NO: 3281167 - RNA, 18 nt, Vaccinia virus
cacugcuggcaucgaugu

SEQ ID NO: 3281168 - RNA, 17 nt, Vaccinia virus
auuauaaauauugaugu

SEQ ID NO: 3281169 - RNA, 14 nt, Vaccinia virus
auuauacaucgagu

SEQ ID NO: 3281170 - RNA, 17 nt, Vaccinia virus
auaauagccaaucgauu

SEQ ID NO: 3281171 - RNA, 20 nt, Vaccinia virus
auaauagguuugaucguugu

SEQ ID NO: 3281172 - RNA, 15 nt, Vaccinia virus
auaauaacaucgauu

SEQ ID NO: 3281173 - RNA, 19 nt, Vaccinia virus
auaauaaucucgucgaugu

SEQ ID NO: 3281174 - RNA, 16 nt, Vaccinia virus
auuguacuaucgaugu

SEQ ID NO: 3281175 - RNA, 20 nt, Vaccinia virus
cauaguagugagaucgacgu

SEQ ID NO: 3281176 - RNA, 22 nt, Vaccinia virus
cauauaauuauacuaucgauga

SEQ ID NO: 3281177 - RNA, 18 nt, Vaccinia virus
cauauagauauuuucuuu

SEQ ID NO: 3281178 - RNA, 20 nt, Vaccinia virus
cauauucuaccuuuuuauuu

SEQ ID NO: 3281179 - RNA, 14 nt, Vaccinia virus
cauauugacgaugu

SEQ ID NO: 3281180 - RNA, 20 nt, Vaccinia virus
cauaucgucuagauuuuguu

SEQ ID NO: 3281181 - RNA, 16 nt, Vaccinia virus
cauaugauguuuguuu

SEQ ID NO: 3281182 - RNA, 18 nt, Vaccinia virus
cauauuacaaaaucgauu

SEQ ID NO: 3281183 - RNA, 15 nt, Vaccinia virus
auuuggauuuuguug

SEQ ID NO: 3281184 - RNA, 15 nt, Vaccinia virus
cauacuaauagaugu

SEQ ID NO: 3281185 - RNA, 17 nt, Vaccinia virus
cauacuauguuuuguau

SEQ ID NO: 3281186 - RNA, 19 nt, Vaccinia virus
cauccauuuuaugcgaugu

SEQ ID NO: 3281187 - RNA, 22 nt, Vaccinia virus
caucaucgaagagcauuuuguu

SEQ ID NO: 3281188 - RNA, 20 nt, Vaccinia virus
caucauaugggaaucgaugu

SEQ ID NO: 3281189 - RNA, 18 nt, Vaccinia virus
caucgcauuguacgaugu

SEQ ID NO: 3281190 - RNA, 13 nt, Vaccinia virus
agaugccauauca

SEQ ID NO: 3281191 - RNA, 19 nt, Vaccinia virus
auaaacuuuauccauaucu

SEQ ID NO: 3281192 - RNA, 20 nt, Vaccinia virus
aauuauuuaguuuuuucuuu

SEQ ID NO: 3281193 - RNA, 15 nt, Vaccinia virus
aauuucauuuuguuu

SEQ ID NO: 3281194 - RNA, 13 nt, Vaccinia virus
aauguuuuuguuu

SEQ ID NO: 3281195 - RNA, 16 nt, Vaccinia virus
aauguaauuuuuguuu

SEQ ID NO: 3281196 - RNA, 13 nt, Vaccinia virus
aacauuuuuguug

SEQ ID NO: 3281197 - RNA, 14 nt, Vaccinia virus
aacauuuuuuguuu

SEQ ID NO: 3281198 - RNA, 19 nt, Vaccinia virus
gauacuaucggcucaaaga

SEQ ID NO: 3281199 - RNA, 20 nt, Vaccinia virus
cucauguucuuaaucaaugu

SEQ ID NO: 3281200 - RNA, 19 nt, Vaccinia virus
cucaguaaauguaucgugu

SEQ ID NO: 3281201 - RNA, 15 nt, Vaccinia virus
cucauaguaucgauu

SEQ ID NO: 3281202 - RNA, 23 nt, Vaccinia virus
cucauauggaucuccaucgauga

SEQ ID NO: 3281203 - RNA, 20 nt, Vaccinia virus
uucguugucuuuacacuuuc

SEQ ID NO: 3281204 - RNA, 20 nt, Vaccinia virus
cuuuagaauguuaucgauga

SEQ ID NO: 3281205 - RNA, 17 nt, Vaccinia virus
cuucuaccguuuuguuc

SEQ ID NO: 3281206 - RNA, 16 nt, Vaccinia virus
cuucuuccuuuuguuc

SEQ ID NO: 3281207 - RNA, 20 nt, Vaccinia virus
gaagcguauguucccggaca

SEQ ID NO: 3281208 - RNA, 22 nt, Vaccinia virus
cugauacaaucucuuaucaugu

SEQ ID NO: 3281209 - RNA, 18 nt, Vaccinia virus
auauagauuuuaucgauu

SEQ ID NO: 3281210 - RNA, 17 nt, Vaccinia virus
auauaguauauagaugu

SEQ ID NO: 3281211 - RNA, 16 nt, Vaccinia virus
auagauguaucgauga

SEQ ID NO: 3281212 - RNA, 16 nt, Vaccinia virus
aucagaugaucgauga

SEQ ID NO: 3281213 - RNA, 22 nt, Vaccinia virus
aucaaagaucuuguuaucgauu

SEQ ID NO: 3281214 - RNA, 23 nt, Vaccinia virus
aucaaguuggccauuaucgauau

SEQ ID NO: 3281215 - RNA, 16 nt, Vaccinia virus
aucauaagcaucaugu

SEQ ID NO: 3281216 - RNA, 22 nt, Vaccinia virus
aucauaucuauaucauccaugu

SEQ ID NO: 3281217 - RNA, 23 nt, Vaccinia virus
caaccagguaggcaguuuuauuu

SEQ ID NO: 3281218 - RNA, 16 nt, Vaccinia virus
caacauacuauuguuu

SEQ ID NO: 3281219 - RNA, 23 nt, Vaccinia virus
caacgauaaaaauaauauuguuu

SEQ ID NO: 3281220 - RNA, 17 nt, Vaccinia virus
caacgaucuuguuguuu

SEQ ID NO: 3281221 - RNA, 20 nt, Vaccinia virus
caacuaguuuucaucaaugu

SEQ ID NO: 3281222 - RNA, 19 nt, Vaccinia virus
caacuauccucguuuuguu

SEQ ID NO: 3281223 - RNA, 18 nt, Vaccinia virus
caacucuauaguuuguuu

SEQ ID NO: 3281224 - RNA, 14 nt, Vaccinia virus
caauauauuuuuuu

SEQ ID NO: 3281225 - RNA, 20 nt, Vaccinia virus
caauaucaauaaauuuuuuu

SEQ ID NO: 3281226 - RNA, 13 nt, Vaccinia virus
caauauuuaguuu

SEQ ID NO: 3281227 - RNA, 15 nt, Vaccinia virus
caauauuuuucguuu

SEQ ID NO: 3281228 - RNA, 23 nt, Vaccinia virus
caauaaaggagucuuauagaugu

SEQ ID NO: 3281229 - RNA, 15 nt, Vaccinia virus
caauaaauccgaugu

SEQ ID NO: 3281230 - RNA, 20 nt, Vaccinia virus
caauaagucuauaucgaugu

SEQ ID NO: 3281231 - RNA, 19 nt, Vaccinia virus
caaucuccauuauuuuuuu

SEQ ID NO: 3281232 - RNA, 17 nt, Vaccinia virus
caauguuuaauuuuuuu

SEQ ID NO: 3281233 - RNA, 17 nt, Vaccinia virus
caauuaucauuuugauu

SEQ ID NO: 3281234 - RNA, 15 nt, Vaccinia virus
caauuuauuuuguau

SEQ ID NO: 3281235 - RNA, 17 nt, Vaccinia virus
aauauuggcuuuucuuu

SEQ ID NO: 3281236 - RNA, 15 nt, Vaccinia virus
aauauuguauuguuu

SEQ ID NO: 3281237 - RNA, 14 nt, Vaccinia virus
aauagguuuuguuc

SEQ ID NO: 3281238 - RNA, 16 nt, Vaccinia virus
aauauccauuuuguuc

SEQ ID NO: 3281239 - RNA, 14 nt, Vaccinia virus
aauauuuuuaguuu

SEQ ID NO: 3281240 - RNA, 13 nt, Vaccinia virus
aauauuuuuauuu

SEQ ID NO: 3281241 - RNA, 23 nt, Variola virus
uuauuauagugguggaauucagu

SEQ ID NO: 3281242 - RNA, 19 nt, Variola virus
aauaaacuaaacaaaacug

SEQ ID NO: 3281243 - RNA, 17 nt, Variola virus
guauauacuuagauaua

SEQ ID NO: 3281244 - RNA, 17 nt, Variola virus
cauucuaauguucauaa

SEQ ID NO: 3281245 - RNA, 21 nt, Variola virus
uuccaucgguauaaaaaucau

SEQ ID NO: 3281246 - RNA, 21 nt, Variola virus
cuauauaaagguccuauucca

SEQ ID NO: 3281247 - RNA, 19 nt, Variola virus
auauauuuucacuuuaucu

SEQ ID NO: 3281248 - RNA, 11 nt, Variola virus
cuagauacauu

SEQ ID NO: 3281249 - RNA, 14 nt, Variola virus
gaggacguauauaa

SEQ ID NO: 3281250 - RNA, 17 nt, Variola virus
cugcuauaauuaagaua

SEQ ID NO: 3281251 - RNA, 19 nt, Variola virus
uuaguaucuagcucuguaa

SEQ ID NO: 3281252 - RNA, 14 nt, Variola virus
auaauauuaauauu

SEQ ID NO: 3281253 - RNA, 14 nt, Variola virus
gaggaagaagaugg

SEQ ID NO: 3281254 - RNA, 15 nt, Variola virus
ucucgaugaaaauaa

SEQ ID NO: 3281255 - RNA, 22 nt, Variola virus
acaguaaguacaucaucugaaa

SEQ ID NO: 3281256 - RNA, 20 nt, Variola virus
agaucgcguuaaucauguac

SEQ ID NO: 3281257 - RNA, 22 nt, Variola virus
uuaacguaucgcauuaauacug

SEQ ID NO: 3281258 - RNA, 17 nt, Variola virus
auuaaaccuaaauaauu

SEQ ID NO: 3281259 - RNA, 18 nt, Variola virus
caaauaagaagguacaau

SEQ ID NO: 3281260 - RNA, 15 nt, Variola virus
auugaguggaaaguu

SEQ ID NO: 3281261 - RNA, 13 nt, Variola virus
aaguuagaaucuc

SEQ ID NO: 3281262 - RNA, 24 nt, Variola virus
aauuguuuugaauuucuuagucau

SEQ ID NO: 3281263 - RNA, 19 nt, Variola virus
uaauucaaauuguuaaauu

SEQ ID NO: 3281264 - RNA, 12 nt, Variola virus
gaauuucccaaa

SEQ ID NO: 3281265 - RNA, 18 nt, Variola virus
auuuuggugccuauuuua

SEQ ID NO: 3281266 - RNA, 20 nt, Variola virus
gaaaacgagccaguaaucuu

SEQ ID NO: 3281267 - RNA, 20 nt, Variola virus
aguggauuaucucaaagaau

SEQ ID NO: 3281268 - RNA, 20 nt, Variola virus
uuacuuaauaggugaaaaga

SEQ ID NO: 3281269 - RNA, 23 nt, Variola virus
aauuucaaggacaaaaugaccag

SEQ ID NO: 3281270 - RNA, 14 nt, Variola virus
uauuuuuuaugaua

SEQ ID NO: 3281271 - RNA, 16 nt, Variola virus
ugaucucguguguaca

SEQ ID NO: 3281272 - RNA, 17 nt, Variola virus
gcuaauuauuucaucca

SEQ ID NO: 3281273 - RNA, 13 nt, Variola virus
acacaucaaaaua

SEQ ID NO: 3281274 - RNA, 14 nt, Variola virus
auuuaucuauuuua

SEQ ID NO: 3281275 - RNA, 22 nt, Variola virus
agcaugugaauauaauaauaca

SEQ ID NO: 3281276 - RNA, 20 nt, Variola virus
gcgacacgguauauuagaug

SEQ ID NO: 3281277 - RNA, 15 nt, Variola virus
uaauucuccugaaaa

SEQ ID NO: 3281278 - RNA, 17 nt, Variola virus
uuaauucuccuauuaca

SEQ ID NO: 3281279 - RNA, 16 nt, Variola virus
gaaaaauuuguagauu

SEQ ID NO: 3281280 - RNA, 12 nt, Variola virus
auaaaaucucca

SEQ ID NO: 3281281 - RNA, 15 nt, Variola virus
aucaugaaacaauau

SEQ ID NO: 3281282 - RNA, 15 nt, Variola virus
cguaucuaaaguauu

SEQ ID NO: 3281283 - RNA, 18 nt, Variola virus
uaauuucuuuauuaucua

SEQ ID NO: 3281284 - RNA, 15 nt, Variola virus
uaaguucauaaucau

SEQ ID NO: 3281285 - RNA, 17 nt, Variola virus
auuugguauaaaaauua

SEQ ID NO: 3281286 - RNA, 16 nt, Variola virus
cugauguuuguuuucg

SEQ ID NO: 3281287 - RNA, 22 nt, Variola virus
aggauauucucauggaaauauu

SEQ ID NO: 3281288 - RNA, 21 nt, Variola virus
ucacaaaaauaaauccacauu

SEQ ID NO: 3281289 - RNA, 23 nt, Variola virus
aaauaaaauauaaaauauuggaa

SEQ ID NO: 3281290 - RNA, 14 nt, Variola virus
ugucauuuguauuu

SEQ ID NO: 3281291 - RNA, 18 nt, Variola virus
aaagaagaucauacaguc

SEQ ID NO: 3281292 - RNA, 15 nt, Variola virus
cuuugaagagauauu

SEQ ID NO: 3281293 - RNA, 22 nt, Variola virus
cuauuauaccagaauuaauagg

SEQ ID NO: 3281294 - RNA, 20 nt, Variola virus
acaaugaugccaucauagau

SEQ ID NO: 3281295 - RNA, 13 nt, Variola virus
cuaagccaacaaa

SEQ ID NO: 3281296 - RNA, 13 nt, Variola virus
aguaguucauuau

SEQ ID NO: 3281297 - RNA, 21 nt, Variola virus
guguacuagucauaauaucuu

SEQ ID NO: 3281298 - RNA, 19 nt, Variola virus
gaauaaauuaucaacgaau

SEQ ID NO: 3281299 - RNA, 20 nt, Variola virus
uuaauaagacuuugaacauu

SEQ ID NO: 3281300 - RNA, 18 nt, Variola virus
gaagcugguaaaguaaau

SEQ ID NO: 3281301 - RNA, 20 nt, Variola virus
agauuauugucuuauauucu

SEQ ID NO: 3281302 - RNA, 22 nt, Variola virus
cuuauaaaacuauauuuggaau

SEQ ID NO: 3281303 - RNA, 16 nt, Variola virus
ucuaaaaaauccuuaa

SEQ ID NO: 3281304 - RNA, 21 nt, Variola virus
uuauauacacauaauuauucu

SEQ ID NO: 3281305 - RNA, 15 nt, Variola virus
uagaucaacgucauc

SEQ ID NO: 3281306 - RNA, 16 nt, Variola virus
acauuguauuaugaug

SEQ ID NO: 3281307 - RNA, 16 nt, Variola virus
aaguauauaaauacuu

SEQ ID NO: 3281308 - RNA, 17 nt, Variola virus
uuaaaggauauuaugca

SEQ ID NO: 3281309 - RNA, 21 nt, Variola virus
gguuuauauaacauagaaaaa

SEQ ID NO: 3281310 - RNA, 16 nt, Variola virus
uauuuucuucuacaua

SEQ ID NO: 3281311 - RNA, 18 nt, Variola virus
aacuacuuuaucaguaaa

SEQ ID NO: 3281312 - RNA, 14 nt, Variola virus
aauuuuagugaaau

SEQ ID NO: 3281313 - RNA, 17 nt, Variola virus
auuuaauaagacuuuga

SEQ ID NO: 3281314 - RNA, 22 nt, Variola virus
gaaaaagaauuuuuauaaauuu

SEQ ID NO: 3281315 - RNA, 16 nt, Variola virus
gguagacauagauauu

SEQ ID NO: 3281316 - RNA, 19 nt, Variola virus
gauaauauuagacauauga

SEQ ID NO: 3281317 - RNA, 16 nt, Variola virus
accaaagcaaccagaa

SEQ ID NO: 3281318 - RNA, 23 nt, Variola virus
aaauuaaaaaauaacuuaauuua

SEQ ID NO: 3281319 - RNA, 14 nt, Variola virus
aaacaacauauaca

SEQ ID NO: 3281320 - RNA, 15 nt, Variola virus
gaggauguuaaacaa

SEQ ID NO: 3281321 - RNA, 20 nt, Variola virus
gucuguaacucugauaaucu

SEQ ID NO: 3281322 - RNA, 13 nt, Variola virus
uucuauaaucauu

SEQ ID NO: 3281323 - RNA, 18 nt, Variola virus
auucuaacgauaauagau

SEQ ID NO: 3281324 - RNA, 18 nt, Variola virus
uacugaggggaaaaucaa

SEQ ID NO: 3281325 - RNA, 22 nt, Variola virus
auguuaauugggguauuaauaa

SEQ ID NO: 3281326 - RNA, 18 nt, Variola virus
gugcucaagcuaaacaag

SEQ ID NO: 3281327 - RNA, 18 nt, Variola virus
cuauagaaauuauuuuua

SEQ ID NO: 3281328 - RNA, 19 nt, Variola virus
cuuguauucaacaugcuuu

SEQ ID NO: 3281329 - RNA, 22 nt, Variola virus
ugccaucacucucauaauguaa

SEQ ID NO: 3281330 - RNA, 23 nt, Variola virus
aucuacaaguagucaauaaaaga

SEQ ID NO: 3281331 - RNA, 13 nt, Variola virus
uauuaaaaaaugu

SEQ ID NO: 3281332 - RNA, 17 nt, Variola virus
aaauuuccauuagauua

SEQ ID NO: 3281333 - RNA, 22 nt, Variola virus
acauccuacacggacucauuaa

SEQ ID NO: 3281334 - RNA, 12 nt, Variola virus
aaauagauguua

SEQ ID NO: 3281335 - RNA, 15 nt, Variola virus
agaaaaaauaucuug

SEQ ID NO: 3281336 - RNA, 18 nt, Variola virus
aauuuacaaauaaaaguc

SEQ ID NO: 3281337 - RNA, 22 nt, Variola virus
gaauauuuugauaaugaacgaa

SEQ ID NO: 3281338 - RNA, 22 nt, Variola virus
gccgcuuggaccauuauuuuua

SEQ ID NO: 3281339 - RNA, 20 nt, Variola virus
auuaacagauuaguaugaag

SEQ ID NO: 3281340 - RNA, 11 nt, Variola virus
cacaaugaaua

SEQ ID NO: 3281341 - RNA, 13 nt, Variola virus
guuuauuugaccu

SEQ ID NO: 3281342 - RNA, 16 nt, Variola virus
uaucaucuauuagaga

SEQ ID NO: 3281343 - RNA, 15 nt, Variola virus
aaggacagaaauaua

SEQ ID NO: 3281344 - RNA, 18 nt, Variola virus
ugaugcgaauagcagaua

SEQ ID NO: 3281345 - RNA, 23 nt, Variola virus
aucgauuguuuauuguauauacu

SEQ ID NO: 3281346 - RNA, 16 nt, Variola virus
acacuauuauaugauu

SEQ ID NO: 3281347 - RNA, 23 nt, Variola virus
aacagauauuacaaccaguguua

SEQ ID NO: 3281348 - RNA, 22 nt, Variola virus
aucaaacaaaaaagcucaauaa

SEQ ID NO: 3281349 - RNA, 12 nt, Variola virus
uuauauguaguu

SEQ ID NO: 3281350 - RNA, 20 nt, Variola virus
acaaaauccaucaaaaaugu

SEQ ID NO: 3281351 - RNA, 14 nt, Variola virus
gauauauuaaacaa

SEQ ID NO: 3281352 - RNA, 14 nt, Variola virus
aaaauuuugaucau

SEQ ID NO: 3281353 - RNA, 19 nt, Variola virus
agauauuccgacaaaggau

SEQ ID NO: 3281354 - RNA, 17 nt, Variola virus
aucaauagaauaaacca

SEQ ID NO: 3281355 - RNA, 17 nt, Variola virus
ugacguuagacauaaaa

SEQ ID NO: 3281356 - RNA, 23 nt, Variola virus
acuugauauuggauauaucacaa

SEQ ID NO: 3281357 - RNA, 16 nt, Variola virus
cuaaggaguaaaauag

SEQ ID NO: 3281358 - RNA, 14 nt, Variola virus
aagaaauauaugug

SEQ ID NO: 3281359 - RNA, 21 nt, Variola virus
acaugauaggaaauuuugugc

SEQ ID NO: 3281360 - RNA, 17 nt, Variola virus
ucaaccgcguuaacaua

SEQ ID NO: 3281361 - RNA, 21 nt, Variola virus
acucuguuucuguaucuauca

SEQ ID NO: 3281362 - RNA, 23 nt, Variola virus
uggcugaaauuagagcucaucua

SEQ ID NO: 3281363 - RNA, 14 nt, Variola virus
cugaucauuaauau

SEQ ID NO: 3281364 - RNA, 17 nt, Variola virus
cuagauucgaaaaucaa

SEQ ID NO: 3281365 - RNA, 14 nt, Variola virus
auaucguguucauu

SEQ ID NO: 3281366 - RNA, 14 nt, Variola virus
aauuuauuucuaaa

SEQ ID NO: 3281367 - RNA, 13 nt, Variola virus
aacuaucaaacaa

SEQ ID NO: 3281368 - RNA, 17 nt, Variola virus
acagaaauauaugagau

SEQ ID NO: 3281369 - RNA, 11 nt, Variola virus
ccacaauucau

SEQ ID NO: 3281370 - RNA, 22 nt, Variola virus
gaaagauuaaaucauuaaauga

SEQ ID NO: 3281371 - RNA, 15 nt, Variola virus
ucguugguagauauu

SEQ ID NO: 3281372 - RNA, 15 nt, Variola virus
aucuagacucuauau

SEQ ID NO: 3281373 - RNA, 16 nt, Variola virus
auauugucacaugucu

SEQ ID NO: 3281374 - RNA, 16 nt, Variola virus
cuauaguuuguuuuca

SEQ ID NO: 3281375 - RNA, 20 nt, Variola virus
cuauugaucaaguauacaau

SEQ ID NO: 3281376 - RNA, 18 nt, Variola virus
uucggaucguaaaucugu

SEQ ID NO: 3281377 - RNA, 11 nt, Variola virus
uuaaaacauuc

SEQ ID NO: 3281378 - RNA, 17 nt, Variola virus
cuauuagaauuuacaaa

SEQ ID NO: 3281379 - RNA, 23 nt, Variola virus
uaacuuuuuaccucauaugaacu

SEQ ID NO: 3281380 - RNA, 16 nt, Variola virus
agaguaguauauuguc

SEQ ID NO: 3281381 - RNA, 22 nt, Variola virus
aacaccuugugcauuauguaaa

SEQ ID NO: 3281382 - RNA, 14 nt, Variola virus
aaacuuuuuagaaa

SEQ ID NO: 3281383 - RNA, 13 nt, Variola virus
aaauauucaguau

SEQ ID NO: 3281384 - RNA, 16 nt, Variola virus
cagacuauaccuagug

SEQ ID NO: 3281385 - RNA, 19 nt, Variola virus
cauuaguaaggcuuuagaa

SEQ ID NO: 3281386 - RNA, 16 nt, Variola virus
acuacaguaaguacau

SEQ ID NO: 3281387 - RNA, 17 nt, Variola virus
uaacacaccuaaaugug

SEQ ID NO: 3281388 - RNA, 20 nt, Variola virus
uagaaaaaauagaacuuauc

SEQ ID NO: 3281389 - RNA, 21 nt, Variola virus
aucucaaaauagguacucugu

SEQ ID NO: 3281390 - RNA, 14 nt, Variola virus
ucauuuguauacac

SEQ ID NO: 3281391 - RNA, 13 nt, Variola virus
gguaagaaaguaa

SEQ ID NO: 3281392 - RNA, 18 nt, Variola virus
auuauacuuugguaaaug

SEQ ID NO: 3281393 - RNA, 18 nt, Variola virus
uuuggaaucguucaaaac

SEQ ID NO: 3281394 - RNA, 21 nt, Variola virus
auauuccgacaugcaaaaaug

SEQ ID NO: 3281395 - RNA, 15 nt, Variola virus
aaauguaaauccaau

SEQ ID NO: 3281396 - RNA, 16 nt, Variola virus
caaagauggcugaaau

SEQ ID NO: 3281397 - RNA, 14 nt, Variola virus
agguacuaggaaaa

SEQ ID NO: 3281398 - RNA, 18 nt, Variola virus
aguagguuuaagaaguug

SEQ ID NO: 3281399 - RNA, 16 nt, Variola virus
acucugaaaagaaagu

SEQ ID NO: 3281400 - RNA, 15 nt, Variola virus
ugcaucuacaucauc

SEQ ID NO: 3281401 - RNA, 19 nt, Variola virus
auuuuacaaauaauggcug

SEQ ID NO: 3281402 - RNA, 15 nt, Variola virus
aucggguucugcuuc

SEQ ID NO: 3281403 - RNA, 12 nt, Variola virus
uauugcuguauu

SEQ ID NO: 3281404 - RNA, 14 nt, Variola virus
cucgaauacaaauu

SEQ ID NO: 3281405 - RNA, 17 nt, Variola virus
ucaauagauugguaaau

SEQ ID NO: 3281406 - RNA, 16 nt, Variola virus
uuuaaauuuuguauuu

SEQ ID NO: 3281407 - RNA, 22 nt, Variola virus
uaaacaguuuccacuuugguaa

SEQ ID NO: 3281408 - RNA, 20 nt, Variola virus
uacuaaacgaucaaccaaaa

SEQ ID NO: 3281409 - RNA, 21 nt, Variola virus
gcuaauuuuuguaaauaacua

SEQ ID NO: 3281410 - RNA, 19 nt, Variola virus
cauuaggaaucuauccaau

SEQ ID NO: 3281411 - RNA, 15 nt, Variola virus
auagauaucaaaaua

SEQ ID NO: 3281412 - RNA, 14 nt, Variola virus
cuauagauaaugac

SEQ ID NO: 3281413 - RNA, 16 nt, Variola virus
uggaauaguaaaaucu

SEQ ID NO: 3281414 - RNA, 19 nt, Variola virus
auuagauuauaucauaaau

SEQ ID NO: 3281415 - RNA, 13 nt, Variola virus
ugaaacuaucuuu

SEQ ID NO: 3281416 - RNA, 13 nt, Variola virus
agaauaugugcau

SEQ ID NO: 3281417 - RNA, 19 nt, Variola virus
aggauggaauuaucaucaa

SEQ ID NO: 3281418 - RNA, 13 nt, Variola virus
uauaaaaugacau

SEQ ID NO: 3281419 - RNA, 18 nt, Variola virus
aaaauuuaagaaaaugau

SEQ ID NO: 3281420 - RNA, 14 nt, Variola virus
guucuuuuuccaau

SEQ ID NO: 3281421 - RNA, 20 nt, Variola virus
gaaacuuuucagaauaucua

SEQ ID NO: 3281422 - RNA, 24 nt, Variola virus
cuaaagcaaauugcgccacagaau

SEQ ID NO: 3281423 - RNA, 14 nt, Variola virus
acugacuuaauagu

SEQ ID NO: 3281424 - RNA, 14 nt, Variola virus
cucuuuuguagaac

SEQ ID NO: 3281425 - RNA, 20 nt, Variola virus
uaacaccuauaagauuauca

SEQ ID NO: 3281426 - RNA, 21 nt, Variola virus
uuccuuuacgugauaaaucau

SEQ ID NO: 3281427 - RNA, 17 nt, Variola virus
uccagaauguuucaaag

SEQ ID NO: 3281428 - RNA, 12 nt, Variola virus
auuuaacuagau

SEQ ID NO: 3281429 - RNA, 16 nt, Variola virus
uccaucaaaaaugucg

SEQ ID NO: 3281430 - RNA, 17 nt, Variola virus
caauucuaaucacuuua

SEQ ID NO: 3281431 - RNA, 19 nt, Variola virus
uuagaugagaaauuauucc

SEQ ID NO: 3281432 - RNA, 17 nt, Variola virus
gcauaagucauaacugu

SEQ ID NO: 3281433 - RNA, 20 nt, Variola virus
ccaagaaaauagaaauuugu

SEQ ID NO: 3281434 - RNA, 21 nt, Variola virus
uaauguugugaaccauguacu

SEQ ID NO: 3281435 - RNA, 17 nt, Variola virus
uuccaacuuaucauuau

SEQ ID NO: 3281436 - RNA, 15 nt, Variola virus
auaauaucagaaugc

SEQ ID NO: 3281437 - RNA, 16 nt, Variola virus
aauugauuaauguuuu

SEQ ID NO: 3281438 - RNA, 19 nt, Variola virus
uuguaagucggucgauucu

SEQ ID NO: 3281439 - RNA, 23 nt, Variola virus
gauacuauccaucagaauguuuc

SEQ ID NO: 3281440 - RNA, 17 nt, Variola virus
aauauuucauuagaugu

SEQ ID NO: 3281441 - RNA, 11 nt, Variola virus
uagacauagau

SEQ ID NO: 3281442 - RNA, 19 nt, Variola virus
aaucuaguacucgaaauaa

SEQ ID NO: 3281443 - RNA, 13 nt, Variola virus
ugccuccacauau

SEQ ID NO: 3281444 - RNA, 19 nt, Variola virus
uauaauaacaaguaugaca

SEQ ID NO: 3281445 - RNA, 19 nt, Variola virus
uuacuaucggcucaaagag

SEQ ID NO: 3281446 - RNA, 14 nt, Variola virus
cuuacauaaaugaa

SEQ ID NO: 3281447 - RNA, 14 nt, Variola virus
cauggaagaacuac

SEQ ID NO: 3281448 - RNA, 18 nt, Variola virus
auacugcaauaaaacauu

SEQ ID NO: 3281449 - RNA, 21 nt, Variola virus
uaucauaaauaaaaauaguag

SEQ ID NO: 3281450 - RNA, 20 nt, Variola virus
auauuguacgguagaauuga

SEQ ID NO: 3281451 - RNA, 20 nt, Variola virus
uucuuacauaaaugaaaaga

SEQ ID NO: 3281452 - RNA, 14 nt, Variola virus
auauucuguucuau

SEQ ID NO: 3281453 - RNA, 20 nt, Variola virus
cuggcgaauauuaaaacuau

SEQ ID NO: 3281454 - RNA, 23 nt, Variola virus
auuuuagaagaacgauaaugaau

SEQ ID NO: 3281455 - RNA, 23 nt, Variola virus
cugucgaaaaaguaggaauuaau

SEQ ID NO: 3281456 - RNA, 14 nt, Variola virus
gaauuaauaauauc

SEQ ID NO: 3281457 - RNA, 15 nt, Variola virus
auauaguauuaauga

SEQ ID NO: 3281458 - RNA, 21 nt, Variola virus
cuaagacguuguaucucuuuu

SEQ ID NO: 3281459 - RNA, 18 nt, Variola virus
agaucgucuauauaugaa

SEQ ID NO: 3281460 - RNA, 15 nt, Variola virus
uaauaaaauuauuca

SEQ ID NO: 3281461 - RNA, 13 nt, Variola virus
uuaucuguagacg

SEQ ID NO: 3281462 - RNA, 15 nt, Variola virus
acgucaucaaaaaua

SEQ ID NO: 3281463 - RNA, 15 nt, Variola virus
aauaagcuauauaau

SEQ ID NO: 3281464 - RNA, 14 nt, Variola virus
gaauauacaaguau

SEQ ID NO: 3281465 - RNA, 21 nt, Variola virus
auuucgaauacgauacuuaua

SEQ ID NO: 3281466 - RNA, 16 nt, Variola virus
auccgacuagaauuag

SEQ ID NO: 3281467 - RNA, 16 nt, Variola virus
uaauuugaguaagaau

SEQ ID NO: 3281468 - RNA, 14 nt, Variola virus
auaacauuguuuau

SEQ ID NO: 3281469 - RNA, 22 nt, Variola virus
agaaaucauauaugauauuccu

SEQ ID NO: 3281470 - RNA, 17 nt, Variola virus
gcucguggauacuuaug

SEQ ID NO: 3281471 - RNA, 20 nt, Variola virus
aaucuauaucauguagaaaa

SEQ ID NO: 3281472 - RNA, 14 nt, Variola virus
auaucaucaaaaua

SEQ ID NO: 3281473 - RNA, 17 nt, Variola virus
uaauguuguauuucauu

SEQ ID NO: 3281474 - RNA, 18 nt, Variola virus
ucaguguagauaguaaau

SEQ ID NO: 3281475 - RNA, 13 nt, Variola virus
guccaauauuaau

SEQ ID NO: 3281476 - RNA, 19 nt, Variola virus
auagauguucaucauauaa

SEQ ID NO: 3281477 - RNA, 16 nt, Variola virus
aaauagguacucuguu

SEQ ID NO: 3281478 - RNA, 19 nt, Variola virus
aaacuuuacgauagacuuu

SEQ ID NO: 3281479 - RNA, 19 nt, Variola virus
uuauauuuuuucauuauua

SEQ ID NO: 3281480 - RNA, 14 nt, Variola virus
uauuaauaagacuu

SEQ ID NO: 3281481 - RNA, 13 nt, Variola virus
aaugacaaacauu

SEQ ID NO: 3281482 - RNA, 14 nt, Variola virus
aaaaucaauccacu

SEQ ID NO: 3281483 - RNA, 16 nt, Variola virus
guucuuugaacaucuu

SEQ ID NO: 3281484 - RNA, 15 nt, Variola virus
aauuaagaacuauag

SEQ ID NO: 3281485 - RNA, 13 nt, Variola virus
aauuuuuuaaaaa

SEQ ID NO: 3281486 - RNA, 22 nt, Variola virus
uugaaucucuguggaaauuaga

SEQ ID NO: 3281487 - RNA, 22 nt, Variola virus
uguugguggcauugucuaaaac

SEQ ID NO: 3281488 - RNA, 21 nt, Variola virus
augaacacacgaugaaaaugu

SEQ ID NO: 3281489 - RNA, 16 nt, Variola virus
uccaacaauagcuuua

SEQ ID NO: 3281490 - RNA, 15 nt, Variola virus
aaucucagaaagaua

SEQ ID NO: 3281491 - RNA, 17 nt, Variola virus
uguauucuuuuuaagau

SEQ ID NO: 3281492 - RNA, 21 nt, Variola virus
aacauauagaacauaaccauu

SEQ ID NO: 3281493 - RNA, 13 nt, Variola virus
uagauaaacuauc

SEQ ID NO: 3281494 - RNA, 20 nt, Variola virus
uaaauaacaaugagauguau

SEQ ID NO: 3281495 - RNA, 15 nt, Variola virus
aauauccagaauguu

SEQ ID NO: 3281496 - RNA, 17 nt, Variola virus
cuuagaaaucaacaauc

SEQ ID NO: 3281497 - RNA, 12 nt, Variola virus
agaauauacucu

SEQ ID NO: 3281498 - RNA, 13 nt, Variola virus
gaagagguuauau

SEQ ID NO: 3281499 - RNA, 18 nt, Variola virus
uauguggaucugaagaag

SEQ ID NO: 3281500 - RNA, 15 nt, Variola virus
aaaaucgauaaacug

SEQ ID NO: 3281501 - RNA, 16 nt, Variola virus
auuuuuauaaauagau

SEQ ID NO: 3281502 - RNA, 16 nt, Variola virus
caaaaauguucuuaau

SEQ ID NO: 3281503 - RNA, 20 nt, Variola virus
uucgucaacaaguuggauga

SEQ ID NO: 3281504 - RNA, 19 nt, Variola virus
agcaucagcaaaacaguua

SEQ ID NO: 3281505 - RNA, 23 nt, Variola virus
uuuauuauauucaguaaccaaau

SEQ ID NO: 3281506 - RNA, 23 nt, Variola virus
cggcauuucuuuuuaaugauaua

SEQ ID NO: 3281507 - RNA, 19 nt, Variola virus
agugguuaaucuuagaaau

SEQ ID NO: 3281508 - RNA, 16 nt, Variola virus
aucguuuagaauacua

SEQ ID NO: 3281509 - RNA, 14 nt, Variola virus
uuaaaaauacgguu

SEQ ID NO: 3281510 - RNA, 14 nt, Variola virus
guuuuguaauaucu

SEQ ID NO: 3281511 - RNA, 16 nt, Variola virus
agaugaucaaaaagac

SEQ ID NO: 3281512 - RNA, 17 nt, Variola virus
agaucauuugaaauuau

SEQ ID NO: 3281513 - RNA, 20 nt, Variola virus
acaacuuaaucugaugaaua

SEQ ID NO: 3281514 - RNA, 17 nt, Variola virus
aauuuaagaaaaugauu

SEQ ID NO: 3281515 - RNA, 23 nt, Variola virus
uauuucuauggacuuaucuacau

SEQ ID NO: 3281516 - RNA, 21 nt, Variola virus
aauauuuguuaucaugaugac

SEQ ID NO: 3281517 - RNA, 14 nt, Variola virus
gaacgauaaugaau

SEQ ID NO: 3281518 - RNA, 16 nt, Variola virus
uauuacgguaucaaaa

SEQ ID NO: 3281519 - RNA, 12 nt, Variola virus
ucauauguagug

SEQ ID NO: 3281520 - RNA, 15 nt, Variola virus
ugacauucaaagauu

SEQ ID NO: 3281521 - RNA, 13 nt, Variola virus
gaaaaacacauuu

SEQ ID NO: 3281522 - RNA, 19 nt, Variola virus
auaguuacagaauuuguau

SEQ ID NO: 3281523 - RNA, 19 nt, Variola virus
agaauccaucgguuguuaa

SEQ ID NO: 3281524 - RNA, 14 nt, Variola virus
caauuaaugauauu

SEQ ID NO: 3281525 - RNA, 16 nt, Variola virus
cucucuuaauuucaga

SEQ ID NO: 3281526 - RNA, 15 nt, Variola virus
uaauggaucuucuag

SEQ ID NO: 3281527 - RNA, 21 nt, Variola virus
uaagaauucguuuuucaacau

SEQ ID NO: 3281528 - RNA, 21 nt, Variola virus
agaugaagucauuaacaauau

SEQ ID NO: 3281529 - RNA, 23 nt, Variola virus
aacacacacugagaaacagcaua

SEQ ID NO: 3281530 - RNA, 18 nt, Variola virus
ucaaguccaauguuuuua

SEQ ID NO: 3281531 - RNA, 15 nt, Variola virus
ucacguaaauacaaa

SEQ ID NO: 3281532 - RNA, 14 nt, Variola virus
gaaaauauauucua

SEQ ID NO: 3281533 - RNA, 14 nt, Variola virus
uauuaucucagugc

SEQ ID NO: 3281534 - RNA, 16 nt, Variola virus
ucuauauaauuauuuu

SEQ ID NO: 3281535 - RNA, 18 nt, Variola virus
uuuacuuuuucaucuuua

SEQ ID NO: 3281536 - RNA, 18 nt, Variola virus
aaugauaaaaucaaacuu

SEQ ID NO: 3281537 - RNA, 22 nt, Variola virus
guaucaaucaagaggauggaau

SEQ ID NO: 3281538 - RNA, 20 nt, Variola virus
aauuuguagauuuuguuaua

SEQ ID NO: 3281539 - RNA, 14 nt, Variola virus
aggcgucaaagaua

SEQ ID NO: 3281540 - RNA, 22 nt, Variola virus
uagguuguuuauugauauacua

SEQ ID NO: 3281541 - RNA, 15 nt, Variola virus
uggauccaaaugcug

SEQ ID NO: 3281542 - RNA, 22 nt, Variola virus
acguauuuggcagaguuaucca

SEQ ID NO: 3281543 - RNA, 15 nt, Variola virus
ccuuguauguuuuua

SEQ ID NO: 3281544 - RNA, 19 nt, Variola virus
uaauaauuuuuuaaauccu

SEQ ID NO: 3281545 - RNA, 17 nt, Variola virus
ugcuaauacgaauauua

SEQ ID NO: 3281546 - RNA, 20 nt, Variola virus
gaaauauauuuguaguacaa

SEQ ID NO: 3281547 - RNA, 13 nt, Variola virus
cucguccuugguu

SEQ ID NO: 3281548 - RNA, 22 nt, Variola virus
agaauuaauaauaucucuaaua

SEQ ID NO: 3281549 - RNA, 17 nt, Variola virus
ugaagauauagaugagg

SEQ ID NO: 3281550 - RNA, 15 nt, Variola virus
auuuacuacugaugu

SEQ ID NO: 3281551 - RNA, 14 nt, Variola virus
auuuauaaaaaugc

SEQ ID NO: 3281552 - RNA, 22 nt, Variola virus
cuaagacguuguaucucuuuuu

SEQ ID NO: 3281553 - RNA, 19 nt, Variola virus
aauacgaugauauuaaaau

SEQ ID NO: 3281554 - RNA, 18 nt, Variola virus
uggaucugugauguaugc

SEQ ID NO: 3281555 - RNA, 14 nt, Variola virus
uuuguauacacaua

SEQ ID NO: 3281556 - RNA, 23 nt, Variola virus
uuauccaaaauauuaauaacauu

SEQ ID NO: 3281557 - RNA, 15 nt, Variola virus
ucacauacuuuguaa

SEQ ID NO: 3281558 - RNA, 18 nt, Variola virus
aacgauaacgucauuaau

SEQ ID NO: 3281559 - RNA, 19 nt, Variola virus
aauuuguccacguucuuua

SEQ ID NO: 3281560 - RNA, 20 nt, Variola virus
aauaggguaucuaauuuccu

SEQ ID NO: 3281561 - RNA, 15 nt, Variola virus
ugcguuuagcaucua

SEQ ID NO: 3281562 - RNA, 14 nt, Variola virus
auauuagauuuacu

SEQ ID NO: 3281563 - RNA, 16 nt, Variola virus
gugauauuaucuucau

SEQ ID NO: 3281564 - RNA, 19 nt, Variola virus
caaauuauuucuucugaau

SEQ ID NO: 3281565 - RNA, 13 nt, Variola virus
aaaauuauucucc

SEQ ID NO: 3281566 - RNA, 14 nt, Variola virus
gauacgaugaugac

SEQ ID NO: 3281567 - RNA, 18 nt, Variola virus
auaacauucuaggaaugu

SEQ ID NO: 3281568 - RNA, 19 nt, Variola virus
gucaaauuuaucuauuuua

SEQ ID NO: 3281569 - RNA, 22 nt, Variola virus
uacuuuaacauguguauuacau

SEQ ID NO: 3281570 - RNA, 19 nt, Variola virus
aauugggaggauauacaaa

SEQ ID NO: 3281571 - RNA, 19 nt, Variola virus
aaugcauucguauucuaua

SEQ ID NO: 3281572 - RNA, 21 nt, Variola virus
ccaaacuuagaaccaaaugau

SEQ ID NO: 3281573 - RNA, 19 nt, Variola virus
uuuacccacuauaaaauaa

SEQ ID NO: 3281574 - RNA, 15 nt, Variola virus
aaaugguacaaucag

SEQ ID NO: 3281575 - RNA, 20 nt, Variola virus
caucuauauugcuacauaau

SEQ ID NO: 3281576 - RNA, 18 nt, Variola virus
auuauaauaguuuaucau

SEQ ID NO: 3281577 - RNA, 22 nt, Variola virus
acauuauaucguuaucauuaau

SEQ ID NO: 3281578 - RNA, 16 nt, Variola virus
auguagcaaacaugau

SEQ ID NO: 3281579 - RNA, 16 nt, Variola virus
aaauaauaauggaagu

SEQ ID NO: 3281580 - RNA, 15 nt, Variola virus
auccuucuagaauua

SEQ ID NO: 3281581 - RNA, 21 nt, Variola virus
ccagaguauuuguacacaucu

SEQ ID NO: 3281582 - RNA, 16 nt, Variola virus
cuuacaaauauucaca

SEQ ID NO: 3281583 - RNA, 14 nt, Variola virus
caguauaaugauuu

SEQ ID NO: 3281584 - RNA, 16 nt, Variola virus
ccuuggcuaauugucu

SEQ ID NO: 3281585 - RNA, 16 nt, Variola virus
aaagagaauuauauau

SEQ ID NO: 3281586 - RNA, 18 nt, Variola virus
acaauguuucuuacauau

SEQ ID NO: 3281587 - RNA, 13 nt, Variola virus
aucaaauacuuca

SEQ ID NO: 3281588 - RNA, 17 nt, Variola virus
agucuccagaaaucugu

SEQ ID NO: 3281589 - RNA, 15 nt, Variola virus
acuagcauauuugua

SEQ ID NO: 3281590 - RNA, 15 nt, Variola virus
auacuaaaacugaag

SEQ ID NO: 3281591 - RNA, 23 nt, Variola virus
aaauauuguauccauacauacau

SEQ ID NO: 3281592 - RNA, 18 nt, Variola virus
cuugaucucaucauucca

SEQ ID NO: 3281593 - RNA, 23 nt, Variola virus
uacucacggcuacggcauuagau

SEQ ID NO: 3281594 - RNA, 18 nt, Variola virus
uaacucaaagacaucaua

SEQ ID NO: 3281595 - RNA, 13 nt, Variola virus
cauacuauguuuu

SEQ ID NO: 3281596 - RNA, 17 nt, Variola virus
cugacauucagaaagag

SEQ ID NO: 3281597 - RNA, 20 nt, Variola virus
caucuuuugccaacacagag

SEQ ID NO: 3281598 - RNA, 17 nt, Variola virus
gcauauauuagaaauac

SEQ ID NO: 3281599 - RNA, 21 nt, Variola virus
gaauaaaguuaaacaacuauu

SEQ ID NO: 3281600 - RNA, 17 nt, Variola virus
aacuuaguguaaaacua

SEQ ID NO: 3281601 - RNA, 21 nt, Variola virus
cgaugugucugcguuaagauc

SEQ ID NO: 3281602 - RNA, 22 nt, Variola virus
ucaauuacacuauuugucuuaa

SEQ ID NO: 3281603 - RNA, 21 nt, Variola virus
aucaauucuauccaagauacu

SEQ ID NO: 3281604 - RNA, 23 nt, Variola virus
uaaccuuggcugucucauucaau

SEQ ID NO: 3281605 - RNA, 19 nt, Variola virus
caaguuuggagaaauggag

SEQ ID NO: 3281606 - RNA, 23 nt, Variola virus
agggaaaucaaagaagaaguuaa

SEQ ID NO: 3281607 - RNA, 23 nt, Variola virus
uacaccauuaauagauaaaacga

SEQ ID NO: 3281608 - RNA, 22 nt, Variola virus
auacucuuuaaaguuucugaaa

SEQ ID NO: 3281609 - RNA, 21 nt, Variola virus
auaaccuuauuauuauaguac

SEQ ID NO: 3281610 - RNA, 12 nt, Variola virus
auuauccuaauc

SEQ ID NO: 3281611 - RNA, 21 nt, Variola virus
cacugucuggcaauaaaugau

SEQ ID NO: 3281612 - RNA, 21 nt, Variola virus
aguacuuugaugauuuuucca

SEQ ID NO: 3281613 - RNA, 15 nt, Variola virus
auuguuuaagaucac

SEQ ID NO: 3281614 - RNA, 21 nt, Variola virus
caaguaugaagaaaaauguug

SEQ ID NO: 3281615 - RNA, 23 nt, Variola virus
cuucagauaaucugaaaaugaaa

SEQ ID NO: 3281616 - RNA, 20 nt, Variola virus
gugaauagauagguauuuua

SEQ ID NO: 3281617 - RNA, 18 nt, Variola virus
uguauucacuuaacaauu

SEQ ID NO: 3281618 - RNA, 19 nt, Variola virus
agaacauacauuuguaaaa

SEQ ID NO: 3281619 - RNA, 19 nt, Variola virus
uaugaugauuuacaaaugg

SEQ ID NO: 3281620 - RNA, 15 nt, Variola virus
uacaacacuuuucua

SEQ ID NO: 3281621 - RNA, 21 nt, Variola virus
acgucaucgcuucaucuauca

SEQ ID NO: 3281622 - RNA, 22 nt, Variola virus
auaaauaggaguuagaauaaua

SEQ ID NO: 3281623 - RNA, 11 nt, Variola virus
gauuaucauga

SEQ ID NO: 3281624 - RNA, 21 nt, Variola virus
aaguauauaugagauacacgu

SEQ ID NO: 3281625 - RNA, 22 nt, Variola virus
uacuagacugacuucuaacaaa

SEQ ID NO: 3281626 - RNA, 13 nt, Variola virus
aaagucaucucuu

SEQ ID NO: 3281627 - RNA, 17 nt, Variola virus
auacaagcgagugcuuc

SEQ ID NO: 3281628 - RNA, 17 nt, Variola virus
uaucucaauaguuucau

SEQ ID NO: 3281629 - RNA, 22 nt, Variola virus
auucauaauaagauaaauccau

SEQ ID NO: 3281630 - RNA, 21 nt, Variola virus
aaaagacgcuuguuaauaagu

SEQ ID NO: 3281631 - RNA, 13 nt, Variola virus
uuucccauacuaa

SEQ ID NO: 3281632 - RNA, 11 nt, Variola virus
uucauuagaau

SEQ ID NO: 3281633 - RNA, 17 nt, Variola virus
aauucuuuuaugaauau

SEQ ID NO: 3281634 - RNA, 16 nt, Variola virus
gaacgguuuauuucua

SEQ ID NO: 3281635 - RNA, 15 nt, Variola virus
uaagaaacuauaaag

SEQ ID NO: 3281636 - RNA, 15 nt, Variola virus
auauuuguaugagug

SEQ ID NO: 3281637 - RNA, 23 nt, Variola virus
uacaugaaauagaagauagauau

SEQ ID NO: 3281638 - RNA, 17 nt, Variola virus
uacucaaucaauagcaa

SEQ ID NO: 3281639 - RNA, 16 nt, Variola virus
aguaaucucaauaauu

SEQ ID NO: 3281640 - RNA, 17 nt, Variola virus
uuaaaauaaauauucuu

SEQ ID NO: 3281641 - RNA, 14 nt, Variola virus
accaaaaucaauau

SEQ ID NO: 3281642 - RNA, 18 nt, Variola virus
ucaaggaaaaagaugcua

SEQ ID NO: 3281643 - RNA, 17 nt, Variola virus
cuaacauuaaaaugucu

SEQ ID NO: 3281644 - RNA, 20 nt, Variola virus
caucugggaauaaaauacua

SEQ ID NO: 3281645 - RNA, 21 nt, Variola virus
gaaaauuuuuaauuauaauau

SEQ ID NO: 3281646 - RNA, 13 nt, Variola virus
cucuauuaaauac

SEQ ID NO: 3281647 - RNA, 19 nt, Variola virus
uuagguagcauuuucuuaa

SEQ ID NO: 3281648 - RNA, 16 nt, Variola virus
cuccaguagcaugugg

SEQ ID NO: 3281649 - RNA, 16 nt, Variola virus
agauccucucuucaac

SEQ ID NO: 3281650 - RNA, 14 nt, Variola virus
uagaacucuuuuca

SEQ ID NO: 3281651 - RNA, 19 nt, Variola virus
uaucuuuuucucaacgucg

SEQ ID NO: 3281652 - RNA, 16 nt, Variola virus
agaacgggucauuuau

SEQ ID NO: 3281653 - RNA, 17 nt, Variola virus
gauaaaauuaaugagau

SEQ ID NO: 3281654 - RNA, 15 nt, Variola virus
aaguauuuguuguau

SEQ ID NO: 3281655 - RNA, 22 nt, Variola virus
cuagauauguauuuaauaucaa

SEQ ID NO: 3281656 - RNA, 19 nt, Variola virus
aagaccaaacgaugauaca

SEQ ID NO: 3281657 - RNA, 13 nt, Variola virus
cauguguauuaca

SEQ ID NO: 3281658 - RNA, 22 nt, Variola virus
guaaauagaauaguauaauguc

SEQ ID NO: 3281659 - RNA, 15 nt, Variola virus
guauccauaaacaau

SEQ ID NO: 3281660 - RNA, 16 nt, Variola virus
uauacuucauaaaaga

SEQ ID NO: 3281661 - RNA, 15 nt, Variola virus
aacuauuuuaccguu

SEQ ID NO: 3281662 - RNA, 21 nt, Variola virus
aaacauugacggauaaaacaa

SEQ ID NO: 3281663 - RNA, 16 nt, Variola virus
uuacuguuucuucacu

SEQ ID NO: 3281664 - RNA, 13 nt, Variola virus
aguauaaaaauua

SEQ ID NO: 3281665 - RNA, 14 nt, Variola virus
auuauuacauagau

SEQ ID NO: 3281666 - RNA, 15 nt, Variola virus
uagauuuuguugaga

SEQ ID NO: 3281667 - RNA, 23 nt, Variola virus
gaauagcggauauagauauuaaa

SEQ ID NO: 3281668 - RNA, 15 nt, Variola virus
aaggcuuuaaaagua

SEQ ID NO: 3281669 - RNA, 17 nt, Variola virus
aggauauauuaaagucu

SEQ ID NO: 3281670 - RNA, 16 nt, Variola virus
uuacaucuaguucuuu

SEQ ID NO: 3281671 - RNA, 15 nt, Variola virus
caagucauaaaucau

SEQ ID NO: 3281672 - RNA, 16 nt, Variola virus
ggacaaauucuuuuga

SEQ ID NO: 3281673 - RNA, 14 nt, Variola virus
uccguuucuaaaaa

SEQ ID NO: 3281674 - RNA, 16 nt, Variola virus
aauguagaaaaucaua

SEQ ID NO: 3281675 - RNA, 12 nt, Variola virus
gaaaaaauagcu

SEQ ID NO: 3281676 - RNA, 21 nt, Variola virus
aauuuuaagauuuuaaaugua

SEQ ID NO: 3281677 - RNA, 22 nt, Variola virus
ucagaaauuaguuuagagucaa

SEQ ID NO: 3281678 - RNA, 15 nt, Variola virus
ucgauacauuuugca

SEQ ID NO: 3281679 - RNA, 11 nt, Variola virus
aaaauuauucu

SEQ ID NO: 3281680 - RNA, 12 nt, Variola virus
auauugugaaug

SEQ ID NO: 3281681 - RNA, 22 nt, Variola virus
gaaaaaaauugguguaaaagau

SEQ ID NO: 3281682 - RNA, 17 nt, Variola virus
auaugcuaguuaauagu

SEQ ID NO: 3281683 - RNA, 15 nt, Variola virus
gaacuguuuaagaga

SEQ ID NO: 3281684 - RNA, 21 nt, Variola virus
uagggagaguauaaaacauua

SEQ ID NO: 3281685 - RNA, 20 nt, Variola virus
acauuuuggcaaauugauua

SEQ ID NO: 3281686 - RNA, 18 nt, Variola virus
cacauuguauauaguuua

SEQ ID NO: 3281687 - RNA, 15 nt, Variola virus
uacuaucuuuaacau

SEQ ID NO: 3281688 - RNA, 20 nt, Variola virus
gcggagauaauaucagaaag

SEQ ID NO: 3281689 - RNA, 21 nt, Variola virus
aaaucaaacacaagaucuucu

SEQ ID NO: 3281690 - RNA, 18 nt, Variola virus
aucaacuuuauuagauaa

SEQ ID NO: 3281691 - RNA, 13 nt, Variola virus
caaaaaauacaau

SEQ ID NO: 3281692 - RNA, 16 nt, Variola virus
ccucuaacaucaucau

SEQ ID NO: 3281693 - RNA, 16 nt, Variola virus
auuuggucauaauaga

SEQ ID NO: 3281694 - RNA, 16 nt, Variola virus
uuacauuauaagaaau

SEQ ID NO: 3281695 - RNA, 16 nt, Variola virus
cugaauauauugauuu

SEQ ID NO: 3281696 - RNA, 19 nt, Variola virus
aaugauauacaaugcucag

SEQ ID NO: 3281697 - RNA, 20 nt, Variola virus
gauucacaaaacguauauag

SEQ ID NO: 3281698 - RNA, 17 nt, Variola virus
aauauuguauuguuaua

SEQ ID NO: 3281699 - RNA, 21 nt, Variola virus
uuuaacgaggauuuauucaga

SEQ ID NO: 3281700 - RNA, 14 nt, Variola virus
uuuuaguuuaucaa

SEQ ID NO: 3281701 - RNA, 20 nt, Variola virus
aauuaucaacguuuuacugg

SEQ ID NO: 3281702 - RNA, 16 nt, Variola virus
uauuuguauuuaucua

SEQ ID NO: 3281703 - RNA, 16 nt, Variola virus
gauguuaaacaaauaa

SEQ ID NO: 3281704 - RNA, 15 nt, Variola virus
acaaacuccauauau

SEQ ID NO: 3281705 - RNA, 13 nt, Variola virus
uauuaucuauaaa

SEQ ID NO: 3281706 - RNA, 18 nt, Variola virus
gacuccgggaccaauuac

SEQ ID NO: 3281707 - RNA, 16 nt, Variola virus
cgguguguagaaagug

SEQ ID NO: 3281708 - RNA, 18 nt, Variola virus
ugacaucuaucuuugcau

SEQ ID NO: 3281709 - RNA, 18 nt, Variola virus
auauauugcuuacuagau

SEQ ID NO: 3281710 - RNA, 14 nt, Variola virus
uaaauuuuaauauu

SEQ ID NO: 3281711 - RNA, 20 nt, Variola virus
acuuacauggacacauucuu

SEQ ID NO: 3281712 - RNA, 19 nt, Variola virus
uuucuugagagacaugauu

SEQ ID NO: 3281713 - RNA, 12 nt, Variola virus
auagcuaucaag

SEQ ID NO: 3281714 - RNA, 13 nt, Variola virus
aaucucuauuugu

SEQ ID NO: 3281715 - RNA, 17 nt, Variola virus
gcuuacauguauuaaag

SEQ ID NO: 3281716 - RNA, 15 nt, Variola virus
uuuauuccaaucauu

SEQ ID NO: 3281717 - RNA, 16 nt, Variola virus
aauaaacuauuucuaa

SEQ ID NO: 3281718 - RNA, 23 nt, Variola virus
auauaguauaaauaguuauuaga

SEQ ID NO: 3281719 - RNA, 18 nt, Variola virus
uucagaaagcuguggaug

SEQ ID NO: 3281720 - RNA, 20 nt, Variola virus
gaaagaaucaaaagaaugau

SEQ ID NO: 3281721 - RNA, 19 nt, Variola virus
auaucuacaaauuggagau

SEQ ID NO: 3281722 - RNA, 11 nt, Variola virus
uauacuuguca

SEQ ID NO: 3281723 - RNA, 17 nt, Variola virus
ucuauaauaauguagua

SEQ ID NO: 3281724 - RNA, 15 nt, Variola virus
gugcaguauuagaau

SEQ ID NO: 3281725 - RNA, 15 nt, Variola virus
uauagaaauuuugau

SEQ ID NO: 3281726 - RNA, 13 nt, Variola virus
uuauuucuaaaau

SEQ ID NO: 3281727 - RNA, 14 nt, Variola virus
guuagucauauuac

SEQ ID NO: 3281728 - RNA, 16 nt, Variola virus
aauagcgcugaaaaua

SEQ ID NO: 3281729 - RNA, 19 nt, Variola virus
gcaaccaugaauuuacaga

SEQ ID NO: 3281730 - RNA, 17 nt, Variola virus
ucaaaaaauaaauuaga

SEQ ID NO: 3281731 - RNA, 13 nt, Variola virus
uguaugagugaua

SEQ ID NO: 3281732 - RNA, 21 nt, Variola virus
ucagaaagaguucccacaugu

SEQ ID NO: 3281733 - RNA, 16 nt, Variola virus
caucaaaauauguuuc

SEQ ID NO: 3281734 - RNA, 17 nt, Variola virus
uacacggacucauuaaa

SEQ ID NO: 3281735 - RNA, 18 nt, Variola virus
ucaaaauaacaaauacua

SEQ ID NO: 3281736 - RNA, 23 nt, Variola virus
acauagagagcuucaucaauaga

SEQ ID NO: 3281737 - RNA, 22 nt, Variola virus
agaugaguccaugacuugguau

SEQ ID NO: 3281738 - RNA, 14 nt, Variola virus
cuugaaugucucaa

SEQ ID NO: 3281739 - RNA, 11 nt, Variola virus
uaccuguuuuu

SEQ ID NO: 3281740 - RNA, 19 nt, Variola virus
ugagauaaauaucaucaau

SEQ ID NO: 3281741 - RNA, 19 nt, Variola virus
aaagcaagaccaaacaccg

SEQ ID NO: 3281742 - RNA, 22 nt, Variola virus
uucaguauuuuuggaaucauaa

SEQ ID NO: 3281743 - RNA, 21 nt, Variola virus
cgugcacuuuuuuauaaagau

SEQ ID NO: 3281744 - RNA, 12 nt, Variola virus
guuuacauaaau

SEQ ID NO: 3281745 - RNA, 20 nt, Variola virus
aaagauucuauaauaaugaa

SEQ ID NO: 3281746 - RNA, 12 nt, Variola virus
uuucaucuucuu

SEQ ID NO: 3281747 - RNA, 22 nt, Variola virus
aauacacuuagguuuuuagaaa

SEQ ID NO: 3281748 - RNA, 19 nt, Variola virus
ucauuuauuauauauaaug

SEQ ID NO: 3281749 - RNA, 20 nt, Variola virus
gucacauaucgcuacaaaac

SEQ ID NO: 3281750 - RNA, 14 nt, Variola virus
auaguguauacaau

SEQ ID NO: 3281751 - RNA, 17 nt, Variola virus
aaguauaacacaaaaua

SEQ ID NO: 3281752 - RNA, 19 nt, Variola virus
ccgucaagagaguuaucug

SEQ ID NO: 3281753 - RNA, 14 nt, Variola virus
uuaguagacauuuu

SEQ ID NO: 3281754 - RNA, 12 nt, Variola virus
ucuauuugcuaa

SEQ ID NO: 3281755 - RNA, 21 nt, Variola virus
ucgacuaucaacaauuuugua

SEQ ID NO: 3281756 - RNA, 13 nt, Variola virus
gcagccauuuaac

SEQ ID NO: 3281757 - RNA, 20 nt, Variola virus
acuuuuaacacaccuaaaug

SEQ ID NO: 3281758 - RNA, 18 nt, Variola virus
gagaaggaauagaaauaa

SEQ ID NO: 3281759 - RNA, 14 nt, Variola virus
ucuauaaacugaau

SEQ ID NO: 3281760 - RNA, 17 nt, Variola virus
auauacagaauuuguaa

SEQ ID NO: 3281761 - RNA, 14 nt, Variola virus
aauuguuucuuuua

SEQ ID NO: 3281762 - RNA, 16 nt, Variola virus
caaaauacaaaauguu

SEQ ID NO: 3281763 - RNA, 22 nt, Variola virus
uaguuuguaucaauaauaguaa

SEQ ID NO: 3281764 - RNA, 17 nt, Variola virus
acuaaauacauuaucau

SEQ ID NO: 3281765 - RNA, 15 nt, Variola virus
uauaacauuaauauu

SEQ ID NO: 3281766 - RNA, 20 nt, Variola virus
cuggugauuggguagaagua

SEQ ID NO: 3281767 - RNA, 22 nt, Variola virus
auuaaaauaaauauucuucaua

SEQ ID NO: 3281768 - RNA, 15 nt, Variola virus
auuuaguauuaaaug

SEQ ID NO: 3281769 - RNA, 14 nt, Variola virus
agauuuagaaaugu

SEQ ID NO: 3281770 - RNA, 21 nt, Variola virus
aaaacgacuuacaauauguac

SEQ ID NO: 3281771 - RNA, 13 nt, Variola virus
ccuaauauaacag

SEQ ID NO: 3281772 - RNA, 23 nt, Variola virus
uaccaucuucuuugauuaaugau

SEQ ID NO: 3281773 - RNA, 15 nt, Variola virus
acgcaauaucucaau

SEQ ID NO: 3281774 - RNA, 18 nt, Variola virus
auaaggaacuagaauugu

SEQ ID NO: 3281775 - RNA, 18 nt, Variola virus
acuccauccguaaaaaug

SEQ ID NO: 3281776 - RNA, 12 nt, Variola virus
agugacaaguag

SEQ ID NO: 3281777 - RNA, 18 nt, Variola virus
aaacgcucuacgaauauc

SEQ ID NO: 3281778 - RNA, 18 nt, Variola virus
aaucuuacugaguuuauc

SEQ ID NO: 3281779 - RNA, 19 nt, Variola virus
auuuuacucauuuuuuaua

SEQ ID NO: 3281780 - RNA, 14 nt, Variola virus
auauccuuuuguau

SEQ ID NO: 3281781 - RNA, 22 nt, Variola virus
auuuuuuguucuauaaacugaa

SEQ ID NO: 3281782 - RNA, 20 nt, Variola virus
agacacuaacucuguuuuau

SEQ ID NO: 3281783 - RNA, 17 nt, Variola virus
auucaagauuuuauuau

SEQ ID NO: 3281784 - RNA, 15 nt, Variola virus
uuuuuacuaaucaua

SEQ ID NO: 3281785 - RNA, 13 nt, Variola virus
auaaagauauaca

SEQ ID NO: 3281786 - RNA, 15 nt, Variola virus
auaucauuaauacag

SEQ ID NO: 3281787 - RNA, 14 nt, Variola virus
caaacuuuacucuu

SEQ ID NO: 3281788 - RNA, 14 nt, Variola virus
uuucauggauguag

SEQ ID NO: 3281789 - RNA, 19 nt, Variola virus
uacuguugaguaaaucagu

SEQ ID NO: 3281790 - RNA, 15 nt, Variola virus
cauagggcuaaaugu

SEQ ID NO: 3281791 - RNA, 16 nt, Variola virus
acuccggauagagaaa

SEQ ID NO: 3281792 - RNA, 18 nt, Variola virus
acauacaaaaaaguggau

SEQ ID NO: 3281793 - RNA, 16 nt, Variola virus
caaacaggauaucuau

SEQ ID NO: 3281794 - RNA, 22 nt, Variola virus
ccaauuguuuuuguacauaaua

SEQ ID NO: 3281795 - RNA, 13 nt, Variola virus
augcugugcuaua

SEQ ID NO: 3281796 - RNA, 13 nt, Variola virus
acguacauggaaa

SEQ ID NO: 3281797 - RNA, 12 nt, Variola virus
aauacugaauuc

SEQ ID NO: 3281798 - RNA, 12 nt, Variola virus
aagucaauaaua

SEQ ID NO: 3281799 - RNA, 16 nt, Variola virus
uugaaaaugaaaucac

SEQ ID NO: 3281800 - RNA, 15 nt, Variola virus
gauaaagauaaaaga

SEQ ID NO: 3281801 - RNA, 14 nt, Variola virus
ucuuagcgaaugau

SEQ ID NO: 3281802 - RNA, 16 nt, Variola virus
aucaacagauagcuug

SEQ ID NO: 3281803 - RNA, 19 nt, Variola virus
agauauuuagcaauugcau

SEQ ID NO: 3281804 - RNA, 18 nt, Variola virus
gauagauaugauaaacaa

SEQ ID NO: 3281805 - RNA, 15 nt, Variola virus
auauaugacauaaua

SEQ ID NO: 3281806 - RNA, 22 nt, Variola virus
caauuuucaguaccauuaucuu

SEQ ID NO: 3281807 - RNA, 14 nt, Variola virus
auguaaucauauaa

SEQ ID NO: 3281808 - RNA, 19 nt, Variola virus
uaacaacugucaaugaauu

SEQ ID NO: 3281809 - RNA, 16 nt, Variola virus
ucuguuuuauuaaccg

SEQ ID NO: 3281810 - RNA, 14 nt, Variola virus
aauucauuagcaaa

SEQ ID NO: 3281811 - RNA, 22 nt, Variola virus
auuagaaauacacuuacagaaa

SEQ ID NO: 3281812 - RNA, 16 nt, Variola virus
aacaaaucuauuugga

SEQ ID NO: 3281813 - RNA, 18 nt, Variola virus
gucagaucguauaaucua

SEQ ID NO: 3281814 - RNA, 19 nt, Variola virus
uauuuauccguaaaaaugu

SEQ ID NO: 3281815 - RNA, 21 nt, Variola virus
agauuuaagaaaccagaauga

SEQ ID NO: 3281816 - RNA, 19 nt, Variola virus
uauuuccaguuuuauuaua

SEQ ID NO: 3281817 - RNA, 20 nt, Variola virus
ucuaggagcaccagaaguau

SEQ ID NO: 3281818 - RNA, 20 nt, Variola virus
uacauuauuacauagaugua

SEQ ID NO: 3281819 - RNA, 19 nt, Variola virus
acgagauugugaacauugu

SEQ ID NO: 3281820 - RNA, 19 nt, Variola virus
agagacuuuauaacagaua

SEQ ID NO: 3281821 - RNA, 13 nt, Variola virus
gaugaauuauuau

SEQ ID NO: 3281822 - RNA, 19 nt, Variola virus
guagacuuacuaaagucaa

SEQ ID NO: 3281823 - RNA, 18 nt, Variola virus
aacuccguagagaaauau

SEQ ID NO: 3281824 - RNA, 15 nt, Variola virus
uaucauaauuaaauu

SEQ ID NO: 3281825 - RNA, 13 nt, Variola virus
uaggauaucuauu

SEQ ID NO: 3281826 - RNA, 15 nt, Variola virus
auuauaccaauagau

SEQ ID NO: 3281827 - RNA, 16 nt, Variola virus
uauguuucuaaauuuu

SEQ ID NO: 3281828 - RNA, 20 nt, Variola virus
caucuaguccuuuaauucca

SEQ ID NO: 3281829 - RNA, 14 nt, Variola virus
auaauuacagaauu

SEQ ID NO: 3281830 - RNA, 15 nt, Variola virus
gguucuuuaaaagaa

SEQ ID NO: 3281831 - RNA, 20 nt, Variola virus
cuacgauuuuauuucuuucg

SEQ ID NO: 3281832 - RNA, 17 nt, Variola virus
uauugaaauuaaucaua

SEQ ID NO: 3281833 - RNA, 19 nt, Variola virus
acuaccaaccuacacuauu

SEQ ID NO: 3281834 - RNA, 20 nt, Variola virus
uauaaugcguauaauauguu

SEQ ID NO: 3281835 - RNA, 17 nt, Variola virus
agagaagucgucaagca

SEQ ID NO: 3281836 - RNA, 12 nt, Variola virus
uaugugauuuug

SEQ ID NO: 3281837 - RNA, 14 nt, Variola virus
uaaaauuacaaaca

SEQ ID NO: 3281838 - RNA, 23 nt, Variola virus
uucaucguuuagaauaaaaugau

SEQ ID NO: 3281839 - RNA, 19 nt, Variola virus
cuauuauuauuaauuuuag

SEQ ID NO: 3281840 - RNA, 14 nt, Variola virus
aucguaaaucuguu

SEQ ID NO: 3281841 - RNA, 13 nt, Variola virus
ucguuuacaaaau

SEQ ID NO: 3281842 - RNA, 15 nt, Variola virus
acagauguauuggau

SEQ ID NO: 3281843 - RNA, 20 nt, Variola virus
caaggaacuaaauagauuua

SEQ ID NO: 3281844 - RNA, 18 nt, Variola virus
accccauugaugacuuua

SEQ ID NO: 3281845 - RNA, 18 nt, Variola virus
uagguuuaguaucucaau

SEQ ID NO: 3281846 - RNA, 16 nt, Variola virus
aaugcgaggaaaugua

SEQ ID NO: 3281847 - RNA, 14 nt, Variola virus
aucucgccaaaaua

SEQ ID NO: 3281848 - RNA, 17 nt, Variola virus
acaaucuuauaucuucu

SEQ ID NO: 3281849 - RNA, 13 nt, Variola virus
caaaaaauguaua

SEQ ID NO: 3281850 - RNA, 14 nt, Variola virus
gcaaaauauaaugu

SEQ ID NO: 3281851 - RNA, 16 nt, Variola virus
accauuaucuuuguuu

SEQ ID NO: 3281852 - RNA, 22 nt, Variola virus
aucuaauaaguugcgaugaaau

SEQ ID NO: 3281853 - RNA, 17 nt, Variola virus
aaaugauagaaauauau

SEQ ID NO: 3281854 - RNA, 22 nt, Variola virus
aauuuaucaaaugguucauaau

SEQ ID NO: 3281855 - RNA, 18 nt, Variola virus
aauuaguagaguuuuaua

SEQ ID NO: 3281856 - RNA, 17 nt, Variola virus
aacuucucuaaaugagu

SEQ ID NO: 3281857 - RNA, 13 nt, Variola virus
cauaguuaaauaa

SEQ ID NO: 3281858 - RNA, 23 nt, Variola virus
auaccuuugguucuuuaaaagaa

SEQ ID NO: 3281859 - RNA, 20 nt, Variola virus
ccagucaugaaucaauuagu

SEQ ID NO: 3281860 - RNA, 20 nt, Variola virus
cuaauugucuuucucuuuua

SEQ ID NO: 3281861 - RNA, 13 nt, Variola virus
uuguuuuauucaa

SEQ ID NO: 3281862 - RNA, 18 nt, Variola virus
auaaauaguaucaucuau

SEQ ID NO: 3281863 - RNA, 16 nt, Variola virus
gcuacagaaacauaua

SEQ ID NO: 3281864 - RNA, 17 nt, Variola virus
agauauuggaugaugau

SEQ ID NO: 3281865 - RNA, 15 nt, Variola virus
aauguucucaagaac

SEQ ID NO: 3281866 - RNA, 15 nt, Variola virus
uauauucuguuuuaa

SEQ ID NO: 3281867 - RNA, 19 nt, Variola virus
caauaaaaaaguuaagaau

SEQ ID NO: 3281868 - RNA, 14 nt, Variola virus
acuuuacucuucua

SEQ ID NO: 3281869 - RNA, 17 nt, Variola virus
uugcuaauuaauagcau

SEQ ID NO: 3281870 - RNA, 19 nt, Variola virus
aauauucauuaauucuaua

SEQ ID NO: 3281871 - RNA, 14 nt, Variola virus
aaucguuuaauagu

SEQ ID NO: 3281872 - RNA, 16 nt, Variola virus
cuauaaaaaacauaau

SEQ ID NO: 3281873 - RNA, 17 nt, Variola virus
ccaauuuggauauagca

SEQ ID NO: 3281874 - RNA, 11 nt, Variola virus
aucaugucuaa

SEQ ID NO: 3281875 - RNA, 13 nt, Variola virus
ucuucucaaaaga

SEQ ID NO: 3281876 - RNA, 15 nt, Variola virus
caucuauaucaucua

SEQ ID NO: 3281877 - RNA, 13 nt, Variola virus
caaaaauaaugac

SEQ ID NO: 3281878 - RNA, 12 nt, Variola virus
aguauacucuac

SEQ ID NO: 3281879 - RNA, 17 nt, Variola virus
gauccaaacaauguuuc

SEQ ID NO: 3281880 - RNA, 14 nt, Variola virus
agauauaauacuug

SEQ ID NO: 3281881 - RNA, 18 nt, Variola virus
uuuccaaguagugugcuc

SEQ ID NO: 3281882 - RNA, 22 nt, Variola virus
ugaaguuaaugauacacacuau

SEQ ID NO: 3281883 - RNA, 19 nt, Variola virus
uccagaauuguaacaacaa

SEQ ID NO: 3281884 - RNA, 12 nt, Variola virus
ugucgguaaacg

SEQ ID NO: 3281885 - RNA, 17 nt, Variola virus
ucaagccggcuauauau

SEQ ID NO: 3281886 - RNA, 14 nt, Variola virus
uuauucauaauaag

SEQ ID NO: 3281887 - RNA, 14 nt, Variola virus
auuuacauuaaaug

SEQ ID NO: 3281888 - RNA, 16 nt, Variola virus
aauaaaugguuucgaa

SEQ ID NO: 3281889 - RNA, 13 nt, Variola virus
uuagcuauuucgg

SEQ ID NO: 3281890 - RNA, 16 nt, Variola virus
uagaugcaucuaaaag

SEQ ID NO: 3281891 - RNA, 21 nt, Variola virus
ucuucugauaucauuaaugau

SEQ ID NO: 3281892 - RNA, 23 nt, Variola virus
uaauugcucaaauaauacuauau

SEQ ID NO: 3281893 - RNA, 19 nt, Variola virus
aucuccacuuuugcuuuac

SEQ ID NO: 3281894 - RNA, 17 nt, Variola virus
ccuuuuccuuaucuuca

SEQ ID NO: 3281895 - RNA, 21 nt, Variola virus
aauucuaccagucuaggaaua

SEQ ID NO: 3281896 - RNA, 17 nt, Variola virus
auguaguagaaauaaua

SEQ ID NO: 3281897 - RNA, 14 nt, Variola virus
ucuuaucaauaaca

SEQ ID NO: 3281898 - RNA, 22 nt, Variola virus
caaaauuaucguuccugguaua

SEQ ID NO: 3281899 - RNA, 16 nt, Variola virus
ugcaagauacaugcua

SEQ ID NO: 3281900 - RNA, 13 nt, Variola virus
caauagaaucugu

SEQ ID NO: 3281901 - RNA, 20 nt, Variola virus
auuauugaguuaaaaucagu

SEQ ID NO: 3281902 - RNA, 14 nt, Variola virus
auuuauuugaugaa

SEQ ID NO: 3281903 - RNA, 16 nt, Variola virus
agcauccaguaugaau

SEQ ID NO: 3281904 - RNA, 21 nt, Variola virus
uucuacuacuucauuaaucuu

SEQ ID NO: 3281905 - RNA, 15 nt, Variola virus
uuucgaauacuuauu

SEQ ID NO: 3281906 - RNA, 16 nt, Variola virus
aggauccauuuauagu

SEQ ID NO: 3281907 - RNA, 21 nt, Variola virus
gaaaauaccauccaagucaau

SEQ ID NO: 3281908 - RNA, 15 nt, Variola virus
gaacuuguuaaagaa

SEQ ID NO: 3281909 - RNA, 22 nt, Variola virus
uauuacaauuaauaaguauaaa

SEQ ID NO: 3281910 - RNA, 18 nt, Variola virus
aaguucauaaaaauaaua

SEQ ID NO: 3281911 - RNA, 17 nt, Variola virus
gaauacacauguuuuaa

SEQ ID NO: 3281912 - RNA, 19 nt, Variola virus
uaagaacuggacuguauau

SEQ ID NO: 3281913 - RNA, 19 nt, Variola virus
uaaguucauuaucugaaau

SEQ ID NO: 3281914 - RNA, 15 nt, Variola virus
aaguuucguacaaau

SEQ ID NO: 3281915 - RNA, 17 nt, Variola virus
uuaccggucauauuaau

SEQ ID NO: 3281916 - RNA, 19 nt, Variola virus
aagucacgcgauuuacugg

SEQ ID NO: 3281917 - RNA, 19 nt, Variola virus
uaauaaauugguaaauccu

SEQ ID NO: 3281918 - RNA, 16 nt, Variola virus
ugguccuauugcuucc

SEQ ID NO: 3281919 - RNA, 19 nt, Variola virus
guaacauccucgugauuua

SEQ ID NO: 3281920 - RNA, 15 nt, Variola virus
uuagauuauucuuaa

SEQ ID NO: 3281921 - RNA, 21 nt, Variola virus
ugaacagacauuguauuauga

SEQ ID NO: 3281922 - RNA, 15 nt, Variola virus
agugauuuugaagau

SEQ ID NO: 3281923 - RNA, 19 nt, Variola virus
uauuacugacuuuaauauu

SEQ ID NO: 3281924 - RNA, 13 nt, Variola virus
gucuguacaaaag

SEQ ID NO: 3281925 - RNA, 16 nt, Variola virus
augcagacaaaaugaa

SEQ ID NO: 3281926 - RNA, 16 nt, Variola virus
ggaaacuuucuagaac

SEQ ID NO: 3281927 - RNA, 23 nt, Variola virus
gacaguaauuucuuuauuaucua

SEQ ID NO: 3281928 - RNA, 23 nt, Variola virus
agggucaaacuuaauaaaggaua

SEQ ID NO: 3281929 - RNA, 18 nt, Variola virus
guuauauuauuagauauc

SEQ ID NO: 3281930 - RNA, 17 nt, Variola virus
uauguugauuuauuaua

SEQ ID NO: 3281931 - RNA, 13 nt, Variola virus
guugauaaucauc

SEQ ID NO: 3281932 - RNA, 19 nt, Variola virus
acguccaucagcauuguuu

SEQ ID NO: 3281933 - RNA, 18 nt, Variola virus
ccaccuccgucaucaucu

SEQ ID NO: 3281934 - RNA, 20 nt, Variola virus
gaacaucaguacuauuguug

SEQ ID NO: 3281935 - RNA, 16 nt, Variola virus
ucucucaauacagauu

SEQ ID NO: 3281936 - RNA, 15 nt, Variola virus
aggacguaacuauaa

SEQ ID NO: 3281937 - RNA, 20 nt, Variola virus
auaaagucuuuaguaugaca

SEQ ID NO: 3281938 - RNA, 19 nt, Variola virus
uucccaaauaaucauucau

SEQ ID NO: 3281939 - RNA, 23 nt, Variola virus
aacgauugguauuuguacaggua

SEQ ID NO: 3281940 - RNA, 18 nt, Variola virus
aacuccauauauguuuuc

SEQ ID NO: 3281941 - RNA, 14 nt, Variola virus
cgauacauaauguu

SEQ ID NO: 3281942 - RNA, 16 nt, Variola virus
uagauauaccagaacu

SEQ ID NO: 3281943 - RNA, 15 nt, Variola virus
aaaggagagaaugua

SEQ ID NO: 3281944 - RNA, 19 nt, Variola virus
ugauauuuauuuugcuauc

SEQ ID NO: 3281945 - RNA, 20 nt, Variola virus
caaacuuagaaccaaaugau

SEQ ID NO: 3281946 - RNA, 14 nt, Variola virus
acaucuaaaaaugu

SEQ ID NO: 3281947 - RNA, 22 nt, Variola virus
augugcuaaaaucacugaacau

SEQ ID NO: 3281948 - RNA, 22 nt, Variola virus
uaauucuuaucaauaacauauu

SEQ ID NO: 3281949 - RNA, 15 nt, Variola virus
uauuaaaucaugaag

SEQ ID NO: 3281950 - RNA, 14 nt, Variola virus
auaauauacauaag

SEQ ID NO: 3281951 - RNA, 15 nt, Variola virus
aauguaacguuuaua

SEQ ID NO: 3281952 - RNA, 18 nt, Variola virus
aaguacagauuuuaaaaa

SEQ ID NO: 3281953 - RNA, 13 nt, Variola virus
uuacuuuuggaau

SEQ ID NO: 3281954 - RNA, 17 nt, Variola virus
uguguaguuuucacaau

SEQ ID NO: 3281955 - RNA, 23 nt, Variola virus
uccaaucuaagaaauuuaaaauu

SEQ ID NO: 3281956 - RNA, 16 nt, Variola virus
gucuacuuaaauguau

SEQ ID NO: 3281957 - RNA, 13 nt, Variola virus
aauuuaaauacuu

SEQ ID NO: 3281958 - RNA, 20 nt, Variola virus
uuuaucuaauucgauacaaa

SEQ ID NO: 3281959 - RNA, 18 nt, Variola virus
ucagaaaauaccauccaa

SEQ ID NO: 3281960 - RNA, 19 nt, Variola virus
aaucuagccauuauaaagu

SEQ ID NO: 3281961 - RNA, 14 nt, Variola virus
auuaauuauacuau

SEQ ID NO: 3281962 - RNA, 17 nt, Variola virus
guaucauaucuucgaaa

SEQ ID NO: 3281963 - RNA, 19 nt, Variola virus
cuccagauacauauggauc

SEQ ID NO: 3281964 - RNA, 13 nt, Variola virus
ugucuccuuuuca

SEQ ID NO: 3281965 - RNA, 21 nt, Variola virus
aucaauaccuuuucuggcuaa

SEQ ID NO: 3281966 - RNA, 23 nt, Variola virus
uuaucgauacacguuuucaaaau

SEQ ID NO: 3281967 - RNA, 20 nt, Variola virus
uccaucaugaucugguuuug

SEQ ID NO: 3281968 - RNA, 10 nt, Variola virus
aauuaaauau

SEQ ID NO: 3281969 - RNA, 15 nt, Variola virus
aauccaaaaaaugaa

SEQ ID NO: 3281970 - RNA, 14 nt, Variola virus
aucgcaauauccuu

SEQ ID NO: 3281971 - RNA, 12 nt, Variola virus
auauaaugaauu

SEQ ID NO: 3281972 - RNA, 21 nt, Variola virus
uuauaucuuuagcuaaaucgu

SEQ ID NO: 3281973 - RNA, 13 nt, Variola virus
agaaauaaaaauu

SEQ ID NO: 3281974 - RNA, 17 nt, Variola virus
aauaguuuauaacauua

SEQ ID NO: 3281975 - RNA, 20 nt, Variola virus
gacauuauguuguuaaaaua

SEQ ID NO: 3281976 - RNA, 20 nt, Variola virus
aagaguuaauaaauaucauu

SEQ ID NO: 3281977 - RNA, 21 nt, Variola virus
aauugguuuauaauguauaau

SEQ ID NO: 3281978 - RNA, 13 nt, Variola virus
uuuuauguaucca

SEQ ID NO: 3281979 - RNA, 19 nt, Variola virus
caauaagcauuaugauuug

SEQ ID NO: 3281980 - RNA, 21 nt, Variola virus
aaaugcucugcaauaacuaau

SEQ ID NO: 3281981 - RNA, 21 nt, Variola virus
auaaauuuuuccaagaaacua

SEQ ID NO: 3281982 - RNA, 23 nt, Variola virus
acugaauacauuaucaaaaagaa

SEQ ID NO: 3281983 - RNA, 21 nt, Variola virus
uggaaucagaagaugauucca

SEQ ID NO: 3281984 - RNA, 18 nt, Variola virus
auguguaaaaaguuuuaa

SEQ ID NO: 3281985 - RNA, 21 nt, Variola virus
gaacaucuugauuauaauaua

SEQ ID NO: 3281986 - RNA, 15 nt, Variola virus
aaaauuccuaaauua

SEQ ID NO: 3281987 - RNA, 15 nt, Variola virus
auacuuuuucuagaa

SEQ ID NO: 3281988 - RNA, 15 nt, Variola virus
ucuauagauggagua

SEQ ID NO: 3281989 - RNA, 22 nt, Variola virus
acaaauguuaaacauuaauuga

SEQ ID NO: 3281990 - RNA, 21 nt, Variola virus
agaugauagcuauuuaacuaa

SEQ ID NO: 3281991 - RNA, 22 nt, Variola virus
auauuaaugcagggugcauauu

SEQ ID NO: 3281992 - RNA, 22 nt, Variola virus
gaugucugaaacguauucucuu

SEQ ID NO: 3281993 - RNA, 19 nt, Variola virus
aaaagacaugauaauauua

SEQ ID NO: 3281994 - RNA, 14 nt, Variola virus
cucgauaauuauua

SEQ ID NO: 3281995 - RNA, 18 nt, Variola virus
ucuuauauagauuucgaa

SEQ ID NO: 3281996 - RNA, 15 nt, Variola virus
ccuuugcuauuucua

SEQ ID NO: 3281997 - RNA, 11 nt, Variola virus
uauccuuaucc

SEQ ID NO: 3281998 - RNA, 19 nt, Variola virus
uaguugcaauauacauaaa

SEQ ID NO: 3281999 - RNA, 22 nt, Variola virus
uaaaguauaugggcgauauucu

SEQ ID NO: 3282000 - RNA, 16 nt, Variola virus
auuugagagucuuaua

SEQ ID NO: 3282001 - RNA, 12 nt, Variola virus
ucuaaauuauuc

SEQ ID NO: 3282002 - RNA, 16 nt, Variola virus
acauacaucuaugaau

SEQ ID NO: 3282003 - RNA, 22 nt, Variola virus
auauuaucaucccauuguaaag

SEQ ID NO: 3282004 - RNA, 17 nt, Variola virus
uccagaugucaugauau

SEQ ID NO: 3282005 - RNA, 20 nt, Variola virus
auauuuuccauuauuaauaa

SEQ ID NO: 3282006 - RNA, 16 nt, Variola virus
auauuuaccaaagcaa

SEQ ID NO: 3282007 - RNA, 14 nt, Variola virus
agaugacuggaaau

SEQ ID NO: 3282008 - RNA, 12 nt, Variola virus
uuaacauuauua

SEQ ID NO: 3282009 - RNA, 19 nt, Variola virus
ucacuucuucaacuaccaa

SEQ ID NO: 3282010 - RNA, 15 nt, Variola virus
ucgcuaauuaugaaa

SEQ ID NO: 3282011 - RNA, 14 nt, Variola virus
uauucaucaucaaa

SEQ ID NO: 3282012 - RNA, 13 nt, Variola virus
uucuacauuuuca

SEQ ID NO: 3282013 - RNA, 16 nt, Variola virus
auugucuuaacuauaa

SEQ ID NO: 3282014 - RNA, 13 nt, Variola virus
uugcgacacuauu

SEQ ID NO: 3282015 - RNA, 22 nt, Variola virus
aaaguuaaggugcgaguauuaa

SEQ ID NO: 3282016 - RNA, 14 nt, Variola virus
cuuugauaaaaguu

SEQ ID NO: 3282017 - RNA, 18 nt, Variola virus
aagacaucauauauagaa

SEQ ID NO: 3282018 - RNA, 16 nt, Variola virus
cauuuaucacaaaaaa

SEQ ID NO: 3282019 - RNA, 22 nt, Variola virus
gaaugcuaaugucaaguuuauu

SEQ ID NO: 3282020 - RNA, 19 nt, Variola virus
aauggaugaggaagugaua

SEQ ID NO: 3282021 - RNA, 16 nt, Variola virus
uauuacgaauuacauu

SEQ ID NO: 3282022 - RNA, 16 nt, Variola virus
cuaucgcauguggaug

SEQ ID NO: 3282023 - RNA, 19 nt, Variola virus
aauuagucauacguaauga

SEQ ID NO: 3282024 - RNA, 17 nt, Variola virus
cuaguucucucucauaa

SEQ ID NO: 3282025 - RNA, 16 nt, Variola virus
auguaaucauuaucca

SEQ ID NO: 3282026 - RNA, 23 nt, Variola virus
auugauaacucugauuucuugaa

SEQ ID NO: 3282027 - RNA, 16 nt, Variola virus
auaacauuuuuuguaa

SEQ ID NO: 3282028 - RNA, 14 nt, Variola virus
cuauuuuuaauaua

SEQ ID NO: 3282029 - RNA, 16 nt, Variola virus
ucaucguuauuuuuaa

SEQ ID NO: 3282030 - RNA, 15 nt, Variola virus
cuuguuauaaacaca

SEQ ID NO: 3282031 - RNA, 15 nt, Variola virus
acuacuauuauugaa

SEQ ID NO: 3282032 - RNA, 17 nt, Variola virus
ugaucuaugacaucaug

SEQ ID NO: 3282033 - RNA, 15 nt, Variola virus
cuaaacaagcuaucu

SEQ ID NO: 3282034 - RNA, 14 nt, Variola virus
ucggucaacuuauu

SEQ ID NO: 3282035 - RNA, 12 nt, Variola virus
auuugacuagau

SEQ ID NO: 3282036 - RNA, 14 nt, Variola virus
agaccaauaauaaa

SEQ ID NO: 3282037 - RNA, 17 nt, Variola virus
agaaugcauaaauuugu

SEQ ID NO: 3282038 - RNA, 13 nt, Variola virus
ucuacaucuucaa

SEQ ID NO: 3282039 - RNA, 19 nt, Variola virus
aaugccuuccaaaguuuaa

SEQ ID NO: 3282040 - RNA, 16 nt, Variola virus
aucuaaucagaaucuu

SEQ ID NO: 3282041 - RNA, 16 nt, Variola virus
auuaaaaguuaaugag

SEQ ID NO: 3282042 - RNA, 18 nt, Variola virus
uucuaauacauaauucuu

SEQ ID NO: 3282043 - RNA, 13 nt, Variola virus
cguauuuaucuaa

SEQ ID NO: 3282044 - RNA, 16 nt, Variola virus
gugauuguucaaucaa

SEQ ID NO: 3282045 - RNA, 23 nt, Variola virus
aucgucauuuuuuucucuagauc

SEQ ID NO: 3282046 - RNA, 16 nt, Variola virus
ugaguucugugcagau

SEQ ID NO: 3282047 - RNA, 22 nt, Variola virus
caauacagauuguacuauacau

SEQ ID NO: 3282048 - RNA, 18 nt, Variola virus
accauggacauaaagaua

SEQ ID NO: 3282049 - RNA, 13 nt, Variola virus
augguaaaaagac

SEQ ID NO: 3282050 - RNA, 17 nt, Variola virus
aauuuuucuacagauau

SEQ ID NO: 3282051 - RNA, 15 nt, Variola virus
auucuuuuaugaaua

SEQ ID NO: 3282052 - RNA, 14 nt, Variola virus
aaauuauccuauca

SEQ ID NO: 3282053 - RNA, 12 nt, Variola virus
cauuuuuaggau

SEQ ID NO: 3282054 - RNA, 23 nt, Variola virus
uaauuuuauuaacgguaauacau

SEQ ID NO: 3282055 - RNA, 14 nt, Variola virus
caguauccuuuuug

SEQ ID NO: 3282056 - RNA, 13 nt, Variola virus
agggaaauuuaau

SEQ ID NO: 3282057 - RNA, 14 nt, Variola virus
auaaaauuuaagaa

SEQ ID NO: 3282058 - RNA, 17 nt, Variola virus
agacaauugacaaaauu

SEQ ID NO: 3282059 - RNA, 12 nt, Variola virus
ccagucaugaau

SEQ ID NO: 3282060 - RNA, 15 nt, Variola virus
auuaugauagaaauu

SEQ ID NO: 3282061 - RNA, 15 nt, Variola virus
augaauguuuucaau

SEQ ID NO: 3282062 - RNA, 22 nt, Variola virus
agaauuuuuucggguuccaaac

SEQ ID NO: 3282063 - RNA, 19 nt, Variola virus
acaaugcucaguaaaugua

SEQ ID NO: 3282064 - RNA, 14 nt, Variola virus
ugacaaaaauugug

SEQ ID NO: 3282065 - RNA, 14 nt, Variola virus
uuccacaauacgag

SEQ ID NO: 3282066 - RNA, 20 nt, Variola virus
ccucugccuuuuuauacaua

SEQ ID NO: 3282067 - RNA, 19 nt, Variola virus
gugaucacggguuuguaaa

SEQ ID NO: 3282068 - RNA, 17 nt, Variola virus
agaauacuauuugguaa

SEQ ID NO: 3282069 - RNA, 20 nt, Variola virus
gaaucugaaccaucaucugu

SEQ ID NO: 3282070 - RNA, 21 nt, Variola virus
cuguacacaugguguuacaaa

SEQ ID NO: 3282071 - RNA, 20 nt, Variola virus
gaggaguuauugauauuaac

SEQ ID NO: 3282072 - RNA, 18 nt, Variola virus
aauuuccugauucagaua

SEQ ID NO: 3282073 - RNA, 16 nt, Variola virus
aguagcaaauuuccua

SEQ ID NO: 3282074 - RNA, 15 nt, Variola virus
ccaucauccaagaaa

SEQ ID NO: 3282075 - RNA, 21 nt, Variola virus
uagcuauuuguagcaaaacua

SEQ ID NO: 3282076 - RNA, 15 nt, Variola virus
uccaaucuuaaacau

SEQ ID NO: 3282077 - RNA, 21 nt, Variola virus
acguccugcaggguauuguuu

SEQ ID NO: 3282078 - RNA, 20 nt, Variola virus
cugaaaaagauaucagagaa

SEQ ID NO: 3282079 - RNA, 23 nt, Variola virus
aauaguucucccuuuuuaaaggu

SEQ ID NO: 3282080 - RNA, 16 nt, Variola virus
ugaugcugguucugga

SEQ ID NO: 3282081 - RNA, 21 nt, Variola virus
augucuaacggcgaacauguu

SEQ ID NO: 3282082 - RNA, 17 nt, Variola virus
gguauacuaguagguaa

SEQ ID NO: 3282083 - RNA, 16 nt, Variola virus
ugauagaauuauacca

SEQ ID NO: 3282084 - RNA, 21 nt, Variola virus
aauguauccggccaauugaua

SEQ ID NO: 3282085 - RNA, 15 nt, Variola virus
auaucuauaggaaag

SEQ ID NO: 3282086 - RNA, 19 nt, Variola virus
aguaacgcguggaaaaagc

SEQ ID NO: 3282087 - RNA, 17 nt, Variola virus
aguaucuucuuuaucua

SEQ ID NO: 3282088 - RNA, 19 nt, Variola virus
aguauaguuuuaaacuaau

SEQ ID NO: 3282089 - RNA, 22 nt, Variola virus
uaguugauagaacaaaauacau

SEQ ID NO: 3282090 - RNA, 14 nt, Variola virus
uuaacaucacuaau

SEQ ID NO: 3282091 - RNA, 17 nt, Variola virus
aucacauauuaaaauuc

SEQ ID NO: 3282092 - RNA, 11 nt, Variola virus
cacaugaugau

SEQ ID NO: 3282093 - RNA, 12 nt, Variola virus
cuuaaaauguaa

SEQ ID NO: 3282094 - RNA, 15 nt, Variola virus
acaaacauauuacca

SEQ ID NO: 3282095 - RNA, 22 nt, Variola virus
auuaacgaguucaaauaugaaa

SEQ ID NO: 3282096 - RNA, 17 nt, Variola virus
auuauccaucuaacaaa

SEQ ID NO: 3282097 - RNA, 16 nt, Variola virus
uaaagaacaaauguug

SEQ ID NO: 3282098 - RNA, 18 nt, Variola virus
cuuuuguggacauuuucu

SEQ ID NO: 3282099 - RNA, 16 nt, Variola virus
uaaaaaccaaaucuug

SEQ ID NO: 3282100 - RNA, 16 nt, Variola virus
aauaggugaugaugca

SEQ ID NO: 3282101 - RNA, 23 nt, Variola virus
aaugaauuaauuaaaauauuguu

SEQ ID NO: 3282102 - RNA, 23 nt, Variola virus
uauuguagaaauuguuuuucaua

SEQ ID NO: 3282103 - RNA, 16 nt, Variola virus
aucaacaauuuuguau

SEQ ID NO: 3282104 - RNA, 22 nt, Variola virus
uuauaaagaccgaauacauaac

SEQ ID NO: 3282105 - RNA, 22 nt, Variola virus
ucucuauaaacgaugguuuaau

SEQ ID NO: 3282106 - RNA, 20 nt, Variola virus
uuugguacguugauuucuag

SEQ ID NO: 3282107 - RNA, 23 nt, Variola virus
acuauacauucuucuguuaauuu

SEQ ID NO: 3282108 - RNA, 15 nt, Variola virus
caggcucuauuuuca

SEQ ID NO: 3282109 - RNA, 16 nt, Variola virus
guuauugucaaaaucu

SEQ ID NO: 3282110 - RNA, 20 nt, Variola virus
gaccuuuuccuuaucuucau

SEQ ID NO: 3282111 - RNA, 14 nt, Variola virus
auaaaguguucauc

SEQ ID NO: 3282112 - RNA, 16 nt, Variola virus
uguuuaucuucuucca

SEQ ID NO: 3282113 - RNA, 23 nt, Variola virus
gcuauagcauuguuauguauuuc

SEQ ID NO: 3282114 - RNA, 13 nt, Variola virus
uugauuacucuuu

SEQ ID NO: 3282115 - RNA, 20 nt, Variola virus
auuguuuugaagaaaugaua

SEQ ID NO: 3282116 - RNA, 17 nt, Variola virus
uguacuuaacaugauua

SEQ ID NO: 3282117 - RNA, 22 nt, Variola virus
aacacuauuccaucuguggaaa

SEQ ID NO: 3282118 - RNA, 15 nt, Variola virus
aacuauagacaaaau

SEQ ID NO: 3282119 - RNA, 18 nt, Variola virus
uuauaucguuaucauuaa

SEQ ID NO: 3282120 - RNA, 14 nt, Variola virus
acugucuaaaugua

SEQ ID NO: 3282121 - RNA, 15 nt, Variola virus
auuagauaugccaaa

SEQ ID NO: 3282122 - RNA, 16 nt, Variola virus
guuaagagaaauuaga

SEQ ID NO: 3282123 - RNA, 17 nt, Variola virus
gacauuccuaugaugau

SEQ ID NO: 3282124 - RNA, 13 nt, Variola virus
uucaacaaacuaa

SEQ ID NO: 3282125 - RNA, 13 nt, Variola virus
cauaaaacauaau

SEQ ID NO: 3282126 - RNA, 14 nt, Variola virus
aguuuuuaacuagu

SEQ ID NO: 3282127 - RNA, 20 nt, Variola virus
aacgauuuuccaaaucagua

SEQ ID NO: 3282128 - RNA, 15 nt, Variola virus
guuauaguagauauc

SEQ ID NO: 3282129 - RNA, 14 nt, Variola virus
guuccaacaucaua

SEQ ID NO: 3282130 - RNA, 13 nt, Variola virus
ugaccaauuuauu

SEQ ID NO: 3282131 - RNA, 21 nt, Variola virus
guauuacgaagaagacaauga

SEQ ID NO: 3282132 - RNA, 12 nt, Variola virus
uguauacuguau

SEQ ID NO: 3282133 - RNA, 23 nt, Variola virus
uaacaugauaacugguguagaga

SEQ ID NO: 3282134 - RNA, 22 nt, Variola virus
auagcuacaguaaaaauaacua

SEQ ID NO: 3282135 - RNA, 16 nt, Variola virus
aguaaguauuuauaca

SEQ ID NO: 3282136 - RNA, 20 nt, Variola virus
augaugaaacacaagaucaa

SEQ ID NO: 3282137 - RNA, 20 nt, Variola virus
gaaaugucuacauaaaucua

SEQ ID NO: 3282138 - RNA, 22 nt, Variola virus
gaaaauaaauccaaaauaacua

SEQ ID NO: 3282139 - RNA, 20 nt, Variola virus
uggauuaagcaauagugaua

SEQ ID NO: 3282140 - RNA, 21 nt, Variola virus
ucuuuuccauuuuuaucagua

SEQ ID NO: 3282141 - RNA, 13 nt, Variola virus
ccggcgaaaagau

SEQ ID NO: 3282142 - RNA, 19 nt, Variola virus
auucacagacucucaagau

SEQ ID NO: 3282143 - RNA, 14 nt, Variola virus
auauaccucauuaa

SEQ ID NO: 3282144 - RNA, 17 nt, Variola virus
uauauauagauggagua

SEQ ID NO: 3282145 - RNA, 16 nt, Variola virus
aguauguuugacuuua

SEQ ID NO: 3282146 - RNA, 13 nt, Variola virus
auaugauccaugc

SEQ ID NO: 3282147 - RNA, 12 nt, Variola virus
uuacaaugacuc

SEQ ID NO: 3282148 - RNA, 20 nt, Variola virus
uaccagauauuauacaaaau

SEQ ID NO: 3282149 - RNA, 19 nt, Variola virus
ccucauuuaucauguuguc

SEQ ID NO: 3282150 - RNA, 20 nt, Variola virus
aaacuagaaaaacuuaguac

SEQ ID NO: 3282151 - RNA, 12 nt, Variola virus
uucaucuagaau

SEQ ID NO: 3282152 - RNA, 21 nt, Variola virus
auacuuugcccuuuaauacau

SEQ ID NO: 3282153 - RNA, 16 nt, Variola virus
ucuaucuuuagaguau

SEQ ID NO: 3282154 - RNA, 19 nt, Variola virus
auuaucgcuaauugacaca

SEQ ID NO: 3282155 - RNA, 18 nt, Variola virus
aaacgauauucuugaaau

SEQ ID NO: 3282156 - RNA, 19 nt, Variola virus
uguauaacaugacauuuau

SEQ ID NO: 3282157 - RNA, 24 nt, Variola virus
gaaaguaauuauuacaagucaaag

SEQ ID NO: 3282158 - RNA, 13 nt, Variola virus
ugucauucucaug

SEQ ID NO: 3282159 - RNA, 18 nt, Variola virus
cgucuucccaaaauguua

SEQ ID NO: 3282160 - RNA, 16 nt, Variola virus
cuacaauauauucuca

SEQ ID NO: 3282161 - RNA, 17 nt, Variola virus
uagccaucguuaauuau

SEQ ID NO: 3282162 - RNA, 17 nt, Variola virus
aucauuauaauaugaug

SEQ ID NO: 3282163 - RNA, 21 nt, Variola virus
aucaggauccaagcuuucuaa

SEQ ID NO: 3282164 - RNA, 18 nt, Variola virus
acuaugcgaugucuugga

SEQ ID NO: 3282165 - RNA, 17 nt, Variola virus
uauagucuggaacacua

SEQ ID NO: 3282166 - RNA, 17 nt, Variola virus
caguacucauuaucaua

SEQ ID NO: 3282167 - RNA, 23 nt, Variola virus
cuaaugacaauaauuauguagua

SEQ ID NO: 3282168 - RNA, 17 nt, Variola virus
uucagaggaauacagac

SEQ ID NO: 3282169 - RNA, 19 nt, Variola virus
augucaagaucuuuuguau

SEQ ID NO: 3282170 - RNA, 23 nt, Variola virus
uacuuuuucuuuaccuuaagaau

SEQ ID NO: 3282171 - RNA, 13 nt, Variola virus
aaagagacuacaa

SEQ ID NO: 3282172 - RNA, 14 nt, Variola virus
cuugauaaauugua

SEQ ID NO: 3282173 - RNA, 14 nt, Variola virus
gaaauauauacaua

SEQ ID NO: 3282174 - RNA, 15 nt, Variola virus
uuccaaauuauucuu

SEQ ID NO: 3282175 - RNA, 21 nt, Variola virus
aauucuagucuuaaccaagaa

SEQ ID NO: 3282176 - RNA, 18 nt, Variola virus
ccaugauggucauguuua

SEQ ID NO: 3282177 - RNA, 16 nt, Variola virus
gucugucaaaucaucu

SEQ ID NO: 3282178 - RNA, 16 nt, Variola virus
uaguauauggacaaac

SEQ ID NO: 3282179 - RNA, 18 nt, Variola virus
caauugauaguaaauaau

SEQ ID NO: 3282180 - RNA, 15 nt, Variola virus
ccagaacuauuuuua

SEQ ID NO: 3282181 - RNA, 22 nt, Variola virus
auacuguauauacuauuauaga

SEQ ID NO: 3282182 - RNA, 15 nt, Variola virus
cuaucuaucuguauu

SEQ ID NO: 3282183 - RNA, 19 nt, Variola virus
aguucauuguuuucaauau

SEQ ID NO: 3282184 - RNA, 12 nt, Variola virus
uuauaauuauua

SEQ ID NO: 3282185 - RNA, 12 nt, Variola virus
uuaaaauuauuu

SEQ ID NO: 3282186 - RNA, 14 nt, Variola virus
acaauacuaccaac

SEQ ID NO: 3282187 - RNA, 17 nt, Variola virus
cuauauuguaccaaauu

SEQ ID NO: 3282188 - RNA, 15 nt, Variola virus
auuuucuuucuaaua

SEQ ID NO: 3282189 - RNA, 19 nt, Variola virus
agaaugcuguuauauacau

SEQ ID NO: 3282190 - RNA, 22 nt, Variola virus
acgauauagacaacguagaauu

SEQ ID NO: 3282191 - RNA, 17 nt, Variola virus
aaucuuaauaucuucgu

SEQ ID NO: 3282192 - RNA, 19 nt, Variola virus
guucuucgcagaugaugau

SEQ ID NO: 3282193 - RNA, 18 nt, Variola virus
aagauggaguauaaucuu

SEQ ID NO: 3282194 - RNA, 21 nt, Variola virus
aauauuguuuuacugucucaa

SEQ ID NO: 3282195 - RNA, 22 nt, Variola virus
cgucaauguacuuaacaugauu

SEQ ID NO: 3282196 - RNA, 18 nt, Variola virus
aauacuuaccuaaugccu

SEQ ID NO: 3282197 - RNA, 23 nt, Variola virus
caacugauuaauaagaucuucua

SEQ ID NO: 3282198 - RNA, 14 nt, Variola virus
guauuccuacuuuu

SEQ ID NO: 3282199 - RNA, 14 nt, Variola virus
caaaaucuuaauau

SEQ ID NO: 3282200 - RNA, 23 nt, Variola virus
ugaguaagacuugacuaaaucgu

SEQ ID NO: 3282201 - RNA, 19 nt, Variola virus
uauggaagaagaaauaaag

SEQ ID NO: 3282202 - RNA, 15 nt, Variola virus
cuauuguauuuugug

SEQ ID NO: 3282203 - RNA, 17 nt, Variola virus
uuucgcgggauacauca

SEQ ID NO: 3282204 - RNA, 21 nt, Variola virus
uuugacaaagauggucugaaa

SEQ ID NO: 3282205 - RNA, 18 nt, Variola virus
acuuguuuaaugaugaau

SEQ ID NO: 3282206 - RNA, 22 nt, Variola virus
agcgacucuauuggauauggau

SEQ ID NO: 3282207 - RNA, 18 nt, Variola virus
aaacuaucugauguagga

SEQ ID NO: 3282208 - RNA, 19 nt, Variola virus
acguuaauugucuauaaau

SEQ ID NO: 3282209 - RNA, 22 nt, Variola virus
augauuuuaccgcaauauguau

SEQ ID NO: 3282210 - RNA, 14 nt, Variola virus
augaauugcauaca

SEQ ID NO: 3282211 - RNA, 13 nt, Variola virus
auauucauagagg

SEQ ID NO: 3282212 - RNA, 16 nt, Variola virus
acgaaaguaauuauua

SEQ ID NO: 3282213 - RNA, 18 nt, Variola virus
agcgaaaaauaauuauuc

SEQ ID NO: 3282214 - RNA, 20 nt, Variola virus
aggaaaguuuaucaaaaaua

SEQ ID NO: 3282215 - RNA, 20 nt, Variola virus
cguuagauuuucuacagaua

SEQ ID NO: 3282216 - RNA, 16 nt, Variola virus
caauaauauacuaauu

SEQ ID NO: 3282217 - RNA, 14 nt, Variola virus
guuuacauaaauga

SEQ ID NO: 3282218 - RNA, 15 nt, Variola virus
uauaauucuuuggua

SEQ ID NO: 3282219 - RNA, 22 nt, Variola virus
ccuuauagaggauguuaaacaa

SEQ ID NO: 3282220 - RNA, 16 nt, Variola virus
ucuaauaauuuggaua

SEQ ID NO: 3282221 - RNA, 15 nt, Variola virus
aaauuauauacugaa

SEQ ID NO: 3282222 - RNA, 16 nt, Variola virus
cgcauuaacaaaaucu

SEQ ID NO: 3282223 - RNA, 14 nt, Variola virus
uguuucgauuucaa

SEQ ID NO: 3282224 - RNA, 24 nt, Variola virus
uaauaguuuccaccaaaagacuau

SEQ ID NO: 3282225 - RNA, 13 nt, Variola virus
aacauuaaaaugu

SEQ ID NO: 3282226 - RNA, 15 nt, Variola virus
uuguuccuguagaua

SEQ ID NO: 3282227 - RNA, 13 nt, Variola virus
uuauccaauacag

SEQ ID NO: 3282228 - RNA, 15 nt, Variola virus
ugaagaaaaauguug

SEQ ID NO: 3282229 - RNA, 16 nt, Variola virus
cauaauauuaaacacu

SEQ ID NO: 3282230 - RNA, 17 nt, Variola virus
uucuuaaacuuauucuu

SEQ ID NO: 3282231 - RNA, 16 nt, Variola virus
cucguugguauuugaa

SEQ ID NO: 3282232 - RNA, 14 nt, Variola virus
auauauuuggauuu

SEQ ID NO: 3282233 - RNA, 13 nt, Variola virus
caacagaaaauau

SEQ ID NO: 3282234 - RNA, 19 nt, Variola virus
ugaugaacgacuggauguu

SEQ ID NO: 3282235 - RNA, 15 nt, Variola virus
uuucaaaacaaacag

SEQ ID NO: 3282236 - RNA, 13 nt, Variola virus
ucguacauccagg

SEQ ID NO: 3282237 - RNA, 17 nt, Variola virus
aauaacaggcuaaaaug

SEQ ID NO: 3282238 - RNA, 17 nt, Variola virus
auauccguuaugucuuc

SEQ ID NO: 3282239 - RNA, 16 nt, Variola virus
agaauaauauacuucu

SEQ ID NO: 3282240 - RNA, 19 nt, Variola virus
uucuauuauuauuaauuuu

SEQ ID NO: 3282241 - RNA, 22 nt, Variola virus
auuccaaauuuguggcaaugaa

SEQ ID NO: 3282242 - RNA, 19 nt, Variola virus
aucuccuuauuuuuaaaaa

SEQ ID NO: 3282243 - RNA, 17 nt, Variola virus
cagcaucuugaauagaa

SEQ ID NO: 3282244 - RNA, 23 nt, Variola virus
ucuaggcgguggauauuucugaa

SEQ ID NO: 3282245 - RNA, 19 nt, Variola virus
cuccguuuccauuaccauc

SEQ ID NO: 3282246 - RNA, 18 nt, Variola virus
uacaucuaguucuuugaa

SEQ ID NO: 3282247 - RNA, 19 nt, Variola virus
aguccuaguuguauacuga

SEQ ID NO: 3282248 - RNA, 20 nt, Variola virus
aacuucuggaaguuccaaac

SEQ ID NO: 3282249 - RNA, 20 nt, Variola virus
uauuccgacaaaggauugau

SEQ ID NO: 3282250 - RNA, 13 nt, Variola virus
ucaaagauaauag

SEQ ID NO: 3282251 - RNA, 21 nt, Variola virus
ugaauaagcaguguuaucuau

SEQ ID NO: 3282252 - RNA, 21 nt, Variola virus
caugaguagcauuaaauuccu

SEQ ID NO: 3282253 - RNA, 14 nt, Variola virus
uauaaaauaaacau

SEQ ID NO: 3282254 - RNA, 18 nt, Variola virus
acauguguacuuguacac

SEQ ID NO: 3282255 - RNA, 15 nt, Variola virus
cgguguauuguauuu

SEQ ID NO: 3282256 - RNA, 14 nt, Variola virus
caaucuuauaucuu

SEQ ID NO: 3282257 - RNA, 15 nt, Variola virus
aaugucuuucauguu

SEQ ID NO: 3282258 - RNA, 18 nt, Variola virus
aguuaaugcaucuaaaac

SEQ ID NO: 3282259 - RNA, 16 nt, Variola virus
cucuuucggacuuaua

SEQ ID NO: 3282260 - RNA, 13 nt, Variola virus
auaauuugaucca

SEQ ID NO: 3282261 - RNA, 15 nt, Variola virus
auucaguaguguuua

SEQ ID NO: 3282262 - RNA, 14 nt, Variola virus
aaacuaaacuuauu

SEQ ID NO: 3282263 - RNA, 18 nt, Variola virus
aacagaaaacaaagucua

SEQ ID NO: 3282264 - RNA, 17 nt, Variola virus
auuuauaccaugucaaa

SEQ ID NO: 3282265 - RNA, 16 nt, Variola virus
caauagcacaauuguu

SEQ ID NO: 3282266 - RNA, 21 nt, Variola virus
uauaaagucugucaaaucauc

SEQ ID NO: 3282267 - RNA, 14 nt, Variola virus
auuucuuacauaaa

SEQ ID NO: 3282268 - RNA, 19 nt, Variola virus
guugcugcucguauaaucu

SEQ ID NO: 3282269 - RNA, 19 nt, Variola virus
guaguucuguucuaucauc

SEQ ID NO: 3282270 - RNA, 22 nt, Variola virus
cuuuuagaagugauucuuugau

SEQ ID NO: 3282271 - RNA, 16 nt, Variola virus
uuguauuauucugaau

SEQ ID NO: 3282272 - RNA, 17 nt, Variola virus
ucagaaagcuguggaug

SEQ ID NO: 3282273 - RNA, 14 nt, Variola virus
uaagacgucucauu

SEQ ID NO: 3282274 - RNA, 12 nt, Variola virus
uuauauauguaa

SEQ ID NO: 3282275 - RNA, 18 nt, Variola virus
auguagauaaaaaagaua

SEQ ID NO: 3282276 - RNA, 19 nt, Variola virus
cucuauuggauauggauuu

SEQ ID NO: 3282277 - RNA, 14 nt, Variola virus
auaaaguauaugua

SEQ ID NO: 3282278 - RNA, 17 nt, Variola virus
cuggaaccucaacaauc

SEQ ID NO: 3282279 - RNA, 14 nt, Variola virus
auuaacuaucugua

SEQ ID NO: 3282280 - RNA, 22 nt, Variola virus
auuauacuuuuuuuuggaaaug

SEQ ID NO: 3282281 - RNA, 14 nt, Variola virus
auuuauuucuucuu

SEQ ID NO: 3282282 - RNA, 13 nt, Variola virus
uaaucugaugaau

SEQ ID NO: 3282283 - RNA, 15 nt, Variola virus
auccuuaaauguuuu

SEQ ID NO: 3282284 - RNA, 22 nt, Variola virus
agugguaggucauacuccauca

SEQ ID NO: 3282285 - RNA, 16 nt, Variola virus
uucaaaauagcuaucu

SEQ ID NO: 3282286 - RNA, 23 nt, Variola virus
cuagauauguauuuaauaucaaa

SEQ ID NO: 3282287 - RNA, 21 nt, Variola virus
aucacaacaucuauaaaagua

SEQ ID NO: 3282288 - RNA, 17 nt, Variola virus
uuagacuauaugugucu

SEQ ID NO: 3282289 - RNA, 20 nt, Variola virus
gauagaagauuuaucuuucu

SEQ ID NO: 3282290 - RNA, 13 nt, Variola virus
gcucuacgaauau

SEQ ID NO: 3282291 - RNA, 15 nt, Variola virus
gauaaguaauaacua

SEQ ID NO: 3282292 - RNA, 20 nt, Variola virus
aaaagacuauacauuuccga

SEQ ID NO: 3282293 - RNA, 23 nt, Variola virus
aauaucaaagagaugguuuccuu

SEQ ID NO: 3282294 - RNA, 14 nt, Variola virus
cucaucaucuguuu

SEQ ID NO: 3282295 - RNA, 15 nt, Variola virus
acgcuauuaaucuuu

SEQ ID NO: 3282296 - RNA, 22 nt, Variola virus
auuaaucaaaugguaaauacug

SEQ ID NO: 3282297 - RNA, 15 nt, Variola virus
acaaacauacucuaa

SEQ ID NO: 3282298 - RNA, 16 nt, Variola virus
guauacuugucaucau

SEQ ID NO: 3282299 - RNA, 22 nt, Variola virus
cauuaaacccucgaucaugaau

SEQ ID NO: 3282300 - RNA, 23 nt, Variola virus
augcaaacuuacagaaacaauga

SEQ ID NO: 3282301 - RNA, 13 nt, Variola virus
acaaauaauaggu

SEQ ID NO: 3282302 - RNA, 15 nt, Variola virus
gcuccaaauauacau

SEQ ID NO: 3282303 - RNA, 18 nt, Variola virus
uaauuuuauauuccucua

SEQ ID NO: 3282304 - RNA, 15 nt, Variola virus
auugacgaugucaau

SEQ ID NO: 3282305 - RNA, 23 nt, Variola virus
gucaucaaguaguagugauuuug

SEQ ID NO: 3282306 - RNA, 12 nt, Variola virus
ucguuaaauuuu

SEQ ID NO: 3282307 - RNA, 13 nt, Variola virus
uacugaauuauua

SEQ ID NO: 3282308 - RNA, 12 nt, Variola virus
uaauacuaaaua

SEQ ID NO: 3282309 - RNA, 19 nt, Variola virus
acuauuagaauuaaguaga

SEQ ID NO: 3282310 - RNA, 21 nt, Variola virus
auuacaacauggccaaaauuu

SEQ ID NO: 3282311 - RNA, 13 nt, Variola virus
gauguagaagaag

SEQ ID NO: 3282312 - RNA, 16 nt, Variola virus
aaagacuaugcaaaga

SEQ ID NO: 3282313 - RNA, 21 nt, Variola virus
cgauuauuauaaaauaacaau

SEQ ID NO: 3282314 - RNA, 14 nt, Variola virus
ugucauuaaaucuu

SEQ ID NO: 3282315 - RNA, 13 nt, Variola virus
acuaucuguaaaa

SEQ ID NO: 3282316 - RNA, 13 nt, Variola virus
acauuuuuaaaga

SEQ ID NO: 3282317 - RNA, 17 nt, Variola virus
cauacauacuaucuuua

SEQ ID NO: 3282318 - RNA, 17 nt, Variola virus
guaugaauaaucuucau

SEQ ID NO: 3282319 - RNA, 21 nt, Variola virus
acuuacagauggauaaaacuu

SEQ ID NO: 3282320 - RNA, 13 nt, Variola virus
gauguuagauaua

SEQ ID NO: 3282321 - RNA, 20 nt, Variola virus
auuuccagauauauaucuuu

SEQ ID NO: 3282322 - RNA, 18 nt, Variola virus
ugauuucagauacuauau

SEQ ID NO: 3282323 - RNA, 22 nt, Variola virus
guaacguauacauuuaaugaau

SEQ ID NO: 3282324 - RNA, 13 nt, Variola virus
ucauaauaaauuu

SEQ ID NO: 3282325 - RNA, 12 nt, Variola virus
cuaauauuagua

SEQ ID NO: 3282326 - RNA, 16 nt, Variola virus
augauaccugcauaug

SEQ ID NO: 3282327 - RNA, 19 nt, Variola virus
auauuuguucauuggauug

SEQ ID NO: 3282328 - RNA, 14 nt, Variola virus
acuuguuaaagaag

SEQ ID NO: 3282329 - RNA, 18 nt, Variola virus
uaguguaaagaacaaaug

SEQ ID NO: 3282330 - RNA, 15 nt, Variola virus
uaauuacagaauuau

SEQ ID NO: 3282331 - RNA, 19 nt, Variola virus
cguauuuacauuaaaugua

SEQ ID NO: 3282332 - RNA, 23 nt, Variola virus
cacgaagagaccgauacaugauu

SEQ ID NO: 3282333 - RNA, 21 nt, Variola virus
aucaauuuugaaaauacuuag

SEQ ID NO: 3282334 - RNA, 17 nt, Variola virus
ucaaguaaagauuucaa

SEQ ID NO: 3282335 - RNA, 17 nt, Variola virus
aacuccacccauuacau

SEQ ID NO: 3282336 - RNA, 12 nt, Variola virus
ucagaguucagu

SEQ ID NO: 3282337 - RNA, 22 nt, Variola virus
gaucugcucccgguacacauau

SEQ ID NO: 3282338 - RNA, 13 nt, Variola virus
gauucacaaauau

SEQ ID NO: 3282339 - RNA, 15 nt, Variola virus
uucuuggauaaaagc

SEQ ID NO: 3282340 - RNA, 17 nt, Variola virus
caauagucuuguaaaga

SEQ ID NO: 3282341 - RNA, 20 nt, Variola virus
gauauuuucguguuuuaguu

SEQ ID NO: 3282342 - RNA, 12 nt, Variola virus
uauauagaugua

SEQ ID NO: 3282343 - RNA, 22 nt, Variola virus
uugaaagcgagaaauaaucaua

SEQ ID NO: 3282344 - RNA, 23 nt, Variola virus
ugguguaauaaaaaaaauuauuu

SEQ ID NO: 3282345 - RNA, 17 nt, Variola virus
acccaugauaaugaaua

SEQ ID NO: 3282346 - RNA, 12 nt, Variola virus
uaagaauugucu

SEQ ID NO: 3282347 - RNA, 12 nt, Variola virus
caucugcauuau

SEQ ID NO: 3282348 - RNA, 15 nt, Variola virus
augaaucuaaaagaa

SEQ ID NO: 3282349 - RNA, 23 nt, Variola virus
auaaacuacucgaacagauaguu

SEQ ID NO: 3282350 - RNA, 18 nt, Variola virus
aguauaagaaauuuacca

SEQ ID NO: 3282351 - RNA, 18 nt, Variola virus
cuaucauuaccucaugaa

SEQ ID NO: 3282352 - RNA, 14 nt, Variola virus
agacauucuaaauc

SEQ ID NO: 3282353 - RNA, 14 nt, Variola virus
auaacguuaucauu

SEQ ID NO: 3282354 - RNA, 21 nt, Variola virus
aucauacaaugaauuaauuaa

SEQ ID NO: 3282355 - RNA, 19 nt, Variola virus
agauaaacuaggauuuaaa

SEQ ID NO: 3282356 - RNA, 15 nt, Variola virus
cgauuaaacuuuaau

SEQ ID NO: 3282357 - RNA, 15 nt, Variola virus
gcaacuaguaauaaa

SEQ ID NO: 3282358 - RNA, 13 nt, Variola virus
cgcgggauacauc

SEQ ID NO: 3282359 - RNA, 16 nt, Variola virus
aucuaaacaauaccuc

SEQ ID NO: 3282360 - RNA, 21 nt, Variola virus
ucuauucgaaaacucuaagaa

SEQ ID NO: 3282361 - RNA, 14 nt, Variola virus
aauucggaaaugua

SEQ ID NO: 3282362 - RNA, 19 nt, Variola virus
aacaaccuuggcauauuga

SEQ ID NO: 3282363 - RNA, 16 nt, Variola virus
auuuuucauuaacuaa

SEQ ID NO: 3282364 - RNA, 13 nt, Variola virus
gauaauaaacaaa

SEQ ID NO: 3282365 - RNA, 15 nt, Variola virus
cagugcaucaacuuc

SEQ ID NO: 3282366 - RNA, 23 nt, Variola virus
gcugguaauaguuuacagauauu

SEQ ID NO: 3282367 - RNA, 19 nt, Variola virus
aaugauacacuaaguauau

SEQ ID NO: 3282368 - RNA, 13 nt, Variola virus
auaccauguguau

SEQ ID NO: 3282369 - RNA, 14 nt, Variola virus
augugguaaaagaa

SEQ ID NO: 3282370 - RNA, 15 nt, Variola virus
auagguaucaaagau

SEQ ID NO: 3282371 - RNA, 16 nt, Variola virus
cauacacuacaguaag

SEQ ID NO: 3282372 - RNA, 16 nt, Variola virus
uuaauauuacauauuu

SEQ ID NO: 3282373 - RNA, 14 nt, Variola virus
aauaauuaaugccc

SEQ ID NO: 3282374 - RNA, 13 nt, Variola virus
ccgucuguaucau

SEQ ID NO: 3282375 - RNA, 13 nt, Variola virus
acgaguauagcau

SEQ ID NO: 3282376 - RNA, 14 nt, Variola virus
cuugacaaaaauua

SEQ ID NO: 3282377 - RNA, 20 nt, Variola virus
uucaaugucuccuuuucaga

SEQ ID NO: 3282378 - RNA, 19 nt, Variola virus
agaaaucauauaugauauu

SEQ ID NO: 3282379 - RNA, 17 nt, Variola virus
gaucuaaagauaaucuu

SEQ ID NO: 3282380 - RNA, 19 nt, Variola virus
gugcaaaugagguagcaaa

SEQ ID NO: 3282381 - RNA, 13 nt, Variola virus
ucaauuacuacaa

SEQ ID NO: 3282382 - RNA, 23 nt, Variola virus
cauuaguuaaugaaaauaacucu

SEQ ID NO: 3282383 - RNA, 15 nt, Variola virus
aaguuaaauagaaug

SEQ ID NO: 3282384 - RNA, 20 nt, Variola virus
ccaauauauaucaugaucuu

SEQ ID NO: 3282385 - RNA, 18 nt, Variola virus
uaucauuaauuaauacaa

SEQ ID NO: 3282386 - RNA, 14 nt, Variola virus
auguaaagaaggag

SEQ ID NO: 3282387 - RNA, 14 nt, Variola virus
cugaaaauaaagau

SEQ ID NO: 3282388 - RNA, 19 nt, Variola virus
uuuccuaguauuugucaaa

SEQ ID NO: 3282389 - RNA, 13 nt, Variola virus
auauaauacuuaa

SEQ ID NO: 3282390 - RNA, 15 nt, Variola virus
uaugaagauaaacac

SEQ ID NO: 3282391 - RNA, 12 nt, Variola virus
aaauuauauucu

SEQ ID NO: 3282392 - RNA, 13 nt, Variola virus
uuauuauuucagg

SEQ ID NO: 3282393 - RNA, 18 nt, Variola virus
acaaacacuacaacagau

SEQ ID NO: 3282394 - RNA, 16 nt, Variola virus
gcagggugcauauuau

SEQ ID NO: 3282395 - RNA, 22 nt, Variola virus
aaugacaucgaagauuguccaa

SEQ ID NO: 3282396 - RNA, 23 nt, Variola virus
cuggauuauuuuuauuauauuca

SEQ ID NO: 3282397 - RNA, 16 nt, Variola virus
uacuauuacagaaguu

SEQ ID NO: 3282398 - RNA, 19 nt, Variola virus
gcagucauuccaucauuua

SEQ ID NO: 3282399 - RNA, 21 nt, Variola virus
ccaugucaaaacuuguucaau

SEQ ID NO: 3282400 - RNA, 17 nt, Variola virus
uaaagaagaucauacag

SEQ ID NO: 3282401 - RNA, 11 nt, Variola virus
uuuaaaaucau

SEQ ID NO: 3282402 - RNA, 17 nt, Variola virus
acugcauccuucuaaga

SEQ ID NO: 3282403 - RNA, 16 nt, Variola virus
auggaaaaauauuaca

SEQ ID NO: 3282404 - RNA, 21 nt, Variola virus
aacaaauucuuuguugaacgu

SEQ ID NO: 3282405 - RNA, 12 nt, Variola virus
cuguaaacauuu

SEQ ID NO: 3282406 - RNA, 23 nt, Variola virus
ucaucgacuguacgauacauaau

SEQ ID NO: 3282407 - RNA, 19 nt, Variola virus
aaguuuucccauacuaacu

SEQ ID NO: 3282408 - RNA, 22 nt, Variola virus
uccauauguuuggagcaaauau

SEQ ID NO: 3282409 - RNA, 11 nt, Variola virus
gaaauauuaaa

SEQ ID NO: 3282410 - RNA, 12 nt, Variola virus
caauuuacaaau

SEQ ID NO: 3282411 - RNA, 14 nt, Variola virus
aggaagaauaucau

SEQ ID NO: 3282412 - RNA, 15 nt, Variola virus
aauaguuuauaacau

SEQ ID NO: 3282413 - RNA, 14 nt, Variola virus
acuuaaaaauggau

SEQ ID NO: 3282414 - RNA, 19 nt, Variola virus
auguuuaaacaucaaacau

SEQ ID NO: 3282415 - RNA, 21 nt, Variola virus
aucuuuauacgagcuacgaau

SEQ ID NO: 3282416 - RNA, 21 nt, Variola virus
acaauguuugacugaauauau

SEQ ID NO: 3282417 - RNA, 18 nt, Variola virus
uguuguaaggauccuggu

SEQ ID NO: 3282418 - RNA, 13 nt, Variola virus
uacuuacaucauu

SEQ ID NO: 3282419 - RNA, 10 nt, Variola virus
acaucaucua

SEQ ID NO: 3282420 - RNA, 17 nt, Variola virus
uauagaucuuagacauu

SEQ ID NO: 3282421 - RNA, 20 nt, Variola virus
aucacucuucgaaaagaaac

SEQ ID NO: 3282422 - RNA, 17 nt, Variola virus
augucgccgacaugaau

SEQ ID NO: 3282423 - RNA, 14 nt, Variola virus
guuuucaucuuuua

SEQ ID NO: 3282424 - RNA, 19 nt, Variola virus
uaucaccgucgcuagauaa

SEQ ID NO: 3282425 - RNA, 23 nt, Variola virus
auaguagguauggaucuggaaaa

SEQ ID NO: 3282426 - RNA, 21 nt, Variola virus
guacagcguaguacauggcau

SEQ ID NO: 3282427 - RNA, 13 nt, Variola virus
uauuccuagcauc

SEQ ID NO: 3282428 - RNA, 14 nt, Variola virus
uaguuaguagacau

SEQ ID NO: 3282429 - RNA, 15 nt, Variola virus
uuauuacuuuuggaa

SEQ ID NO: 3282430 - RNA, 14 nt, Variola virus
uaucuuucuuugaa

SEQ ID NO: 3282431 - RNA, 21 nt, Variola virus
aauugaauugcgauuauaaga

SEQ ID NO: 3282432 - RNA, 13 nt, Variola virus
auaguaucaaacu

SEQ ID NO: 3282433 - RNA, 14 nt, Variola virus
gaccacauccuuca

SEQ ID NO: 3282434 - RNA, 14 nt, Variola virus
aucuucguuaaaaa

SEQ ID NO: 3282435 - RNA, 15 nt, Variola virus
auucguucaaaaaua

SEQ ID NO: 3282436 - RNA, 20 nt, Variola virus
uauuuucuggaaguggauau

SEQ ID NO: 3282437 - RNA, 13 nt, Variola virus
aacgaaacaaugu

SEQ ID NO: 3282438 - RNA, 15 nt, Variola virus
uaauagaauuuauau

SEQ ID NO: 3282439 - RNA, 19 nt, Variola virus
uaagaguuaugacgcauua

SEQ ID NO: 3282440 - RNA, 18 nt, Variola virus
augucaaaaauuguagaa

SEQ ID NO: 3282441 - RNA, 22 nt, Variola virus
caucuuuaguaaacauaucaua

SEQ ID NO: 3282442 - RNA, 19 nt, Variola virus
auauucauacaccugcaua

SEQ ID NO: 3282443 - RNA, 16 nt, Variola virus
aauuuguaaucaucuu

SEQ ID NO: 3282444 - RNA, 14 nt, Variola virus
auauuauuaugaag

SEQ ID NO: 3282445 - RNA, 18 nt, Variola virus
auuaaccgauaaaaagac

SEQ ID NO: 3282446 - RNA, 10 nt, Variola virus
cuaguauaaa

SEQ ID NO: 3282447 - RNA, 22 nt, Variola virus
ugaacaggcauugcuaaaacuu

SEQ ID NO: 3282448 - RNA, 13 nt, Variola virus
guauucuuggaua

SEQ ID NO: 3282449 - RNA, 13 nt, Variola virus
uaacuauuugcau

SEQ ID NO: 3282450 - RNA, 16 nt, Variola virus
agcaguuuauuaucca

SEQ ID NO: 3282451 - RNA, 14 nt, Variola virus
uaaaauucacacau

SEQ ID NO: 3282452 - RNA, 17 nt, Variola virus
gaagguuggguagaugg

SEQ ID NO: 3282453 - RNA, 21 nt, Variola virus
auagaaaauaacagauauuac

SEQ ID NO: 3282454 - RNA, 20 nt, Variola virus
auuccagcuaucagauuaug

SEQ ID NO: 3282455 - RNA, 23 nt, Variola virus
gagaaguuuuauccaauaauuua

SEQ ID NO: 3282456 - RNA, 16 nt, Variola virus
ugaaugaauacagauc

SEQ ID NO: 3282457 - RNA, 18 nt, Variola virus
uauuucguuucuuaaaua

SEQ ID NO: 3282458 - RNA, 21 nt, Variola virus
ccaagucauaucuagaaugaa

SEQ ID NO: 3282459 - RNA, 16 nt, Variola virus
ucauauuauaaagaug

SEQ ID NO: 3282460 - RNA, 15 nt, Variola virus
auucauguugaacau

SEQ ID NO: 3282461 - RNA, 17 nt, Variola virus
cgauuuuaaaucaucuu

SEQ ID NO: 3282462 - RNA, 19 nt, Variola virus
guguuuuauuaaucaauca

SEQ ID NO: 3282463 - RNA, 18 nt, Variola virus
acuauccaauaaacaguc

SEQ ID NO: 3282464 - RNA, 18 nt, Variola virus
agaaauuuaccaacgaua

SEQ ID NO: 3282465 - RNA, 14 nt, Variola virus
aucugaauuaaaua

SEQ ID NO: 3282466 - RNA, 23 nt, Variola virus
caagauccucucuuaaaugaauc

SEQ ID NO: 3282467 - RNA, 13 nt, Variola virus
gaauauaguuaua

SEQ ID NO: 3282468 - RNA, 20 nt, Variola virus
agccaucuguauuaaagaua

SEQ ID NO: 3282469 - RNA, 18 nt, Variola virus
augauuuuuaaucaagau

SEQ ID NO: 3282470 - RNA, 13 nt, Variola virus
aucuagccauuau

SEQ ID NO: 3282471 - RNA, 21 nt, Variola virus
gaauaucuccucaaggaauac

SEQ ID NO: 3282472 - RNA, 17 nt, Variola virus
uaacgccuauucgaaau

SEQ ID NO: 3282473 - RNA, 16 nt, Variola virus
acuuuaaacagaaaua

SEQ ID NO: 3282474 - RNA, 14 nt, Variola virus
agguauuacucuag

SEQ ID NO: 3282475 - RNA, 21 nt, Variola virus
uauuccguguggcuuuccauu

SEQ ID NO: 3282476 - RNA, 16 nt, Variola virus
cuugaaauacauguaa

SEQ ID NO: 3282477 - RNA, 15 nt, Variola virus
ucuagccauaucuaa

SEQ ID NO: 3282478 - RNA, 12 nt, Variola virus
aacgauauuaac

SEQ ID NO: 3282479 - RNA, 14 nt, Variola virus
aagauauaaaugac

SEQ ID NO: 3282480 - RNA, 15 nt, Variola virus
agaaugacauaacua

SEQ ID NO: 3282481 - RNA, 18 nt, Variola virus
acaugcuacaaaauaugu

SEQ ID NO: 3282482 - RNA, 17 nt, Variola virus
aaaggacagaaauauau

SEQ ID NO: 3282483 - RNA, 20 nt, Variola virus
aaauccauguaaaaaaaugu

SEQ ID NO: 3282484 - RNA, 18 nt, Variola virus
cgauaauaacuuaguuua

SEQ ID NO: 3282485 - RNA, 22 nt, Variola virus
ccaaucuuuuguuuagaaugau

SEQ ID NO: 3282486 - RNA, 16 nt, Variola virus
caaaaccaauuccuuu

SEQ ID NO: 3282487 - RNA, 22 nt, Variola virus
augucauaaacuguaaaugauu

SEQ ID NO: 3282488 - RNA, 11 nt, Variola virus
auauaugggag

SEQ ID NO: 3282489 - RNA, 16 nt, Variola virus
agucauaucuagaaug

SEQ ID NO: 3282490 - RNA, 19 nt, Variola virus
ucguuuauaucacauugua

SEQ ID NO: 3282491 - RNA, 18 nt, Variola virus
cugcauuaucaauaaaua

SEQ ID NO: 3282492 - RNA, 18 nt, Variola virus
gucggaaaucuuaaccaa

SEQ ID NO: 3282493 - RNA, 15 nt, Variola virus
acuucucuaucaaug

SEQ ID NO: 3282494 - RNA, 15 nt, Variola virus
uuuuaaagguaucua

SEQ ID NO: 3282495 - RNA, 15 nt, Variola virus
uauccaugaugguca

SEQ ID NO: 3282496 - RNA, 15 nt, Variola virus
acuaucuuuaauaga

SEQ ID NO: 3282497 - RNA, 18 nt, Variola virus
auaauuuuuuuauugcau

SEQ ID NO: 3282498 - RNA, 17 nt, Variola virus
gaagauuaccucuaguu

SEQ ID NO: 3282499 - RNA, 19 nt, Variola virus
aguuuuggccauuauuaga

SEQ ID NO: 3282500 - RNA, 17 nt, Variola virus
agagacggaaaaauagu

SEQ ID NO: 3282501 - RNA, 19 nt, Variola virus
aaacgacuuaauuacagag

SEQ ID NO: 3282502 - RNA, 14 nt, Variola virus
ucgcuauauguucc

SEQ ID NO: 3282503 - RNA, 21 nt, Variola virus
aucaguacguucuucauuuau

SEQ ID NO: 3282504 - RNA, 22 nt, Variola virus
ucauaacuugagagcauccagu

SEQ ID NO: 3282505 - RNA, 14 nt, Variola virus
gcaauaaauaugau

SEQ ID NO: 3282506 - RNA, 15 nt, Variola virus
acgaaccaaaaugaa

SEQ ID NO: 3282507 - RNA, 18 nt, Variola virus
acgagccacuacuccucg

SEQ ID NO: 3282508 - RNA, 15 nt, Variola virus
uccauuuucccaaau

SEQ ID NO: 3282509 - RNA, 15 nt, Variola virus
uaugauaucauguaa

SEQ ID NO: 3282510 - RNA, 23 nt, Variola virus
uuuuuagccggaauaacaucauc

SEQ ID NO: 3282511 - RNA, 17 nt, Variola virus
ucuuucuaauacuauau

SEQ ID NO: 3282512 - RNA, 20 nt, Variola virus
uuacuuugacaaauguagua

SEQ ID NO: 3282513 - RNA, 13 nt, Variola virus
caaaagaacauga

SEQ ID NO: 3282514 - RNA, 19 nt, Variola virus
uauaaaacuacuacaauga

SEQ ID NO: 3282515 - RNA, 22 nt, Variola virus
uaguuuucucuuuuuauccuca

SEQ ID NO: 3282516 - RNA, 19 nt, Variola virus
acuuuuauuuuuagaaagu

SEQ ID NO: 3282517 - RNA, 18 nt, Variola virus
auucugauuggucaaugu

SEQ ID NO: 3282518 - RNA, 14 nt, Variola virus
guauaugaguaaau

SEQ ID NO: 3282519 - RNA, 14 nt, Variola virus
aauuuagaaauaua

SEQ ID NO: 3282520 - RNA, 22 nt, Variola virus
guuucaagauaaauaaucaaaa

SEQ ID NO: 3282521 - RNA, 17 nt, Variola virus
gaauuacauuucuuguu

SEQ ID NO: 3282522 - RNA, 19 nt, Variola virus
auuauauaauguauaaaug

SEQ ID NO: 3282523 - RNA, 13 nt, Variola virus
uuaaauguaucua

SEQ ID NO: 3282524 - RNA, 13 nt, Variola virus
ucauaaaaaccau

SEQ ID NO: 3282525 - RNA, 17 nt, Variola virus
cgguguaauagaauuua

SEQ ID NO: 3282526 - RNA, 22 nt, Variola virus
cagcauuugacuauuauguuua

SEQ ID NO: 3282527 - RNA, 15 nt, Variola virus
auuggcaaauuauuu

SEQ ID NO: 3282528 - RNA, 16 nt, Variola virus
uauuggauauaucaaa

SEQ ID NO: 3282529 - RNA, 19 nt, Variola virus
aguuuaagacugcuaaaug

SEQ ID NO: 3282530 - RNA, 21 nt, Variola virus
uagauauagcuuuuauuucca

SEQ ID NO: 3282531 - RNA, 17 nt, Variola virus
guaaguuuaaaaaagac

SEQ ID NO: 3282532 - RNA, 14 nt, Variola virus
aauuuccaucucua

SEQ ID NO: 3282533 - RNA, 12 nt, Variola virus
uuauaaaaauua

SEQ ID NO: 3282534 - RNA, 22 nt, Variola virus
cacuuagaacagauuuaacaau

SEQ ID NO: 3282535 - RNA, 13 nt, Variola virus
gacuauaaaugua

SEQ ID NO: 3282536 - RNA, 16 nt, Variola virus
ugauaauagauggaua

SEQ ID NO: 3282537 - RNA, 14 nt, Variola virus
gauaaauuguacaa

SEQ ID NO: 3282538 - RNA, 16 nt, Variola virus
uaaauaggacuauugu

SEQ ID NO: 3282539 - RNA, 14 nt, Variola virus
cuccuauauuuccc

SEQ ID NO: 3282540 - RNA, 19 nt, Variola virus
auuuuugauaacacuguau

SEQ ID NO: 3282541 - RNA, 16 nt, Variola virus
aaaguuuuauauguag

SEQ ID NO: 3282542 - RNA, 14 nt, Variola virus
ugcuuugaauaauu

SEQ ID NO: 3282543 - RNA, 17 nt, Variola virus
uauaaacucucaacauu

SEQ ID NO: 3282544 - RNA, 15 nt, Variola virus
uaacuuuugauuuua

SEQ ID NO: 3282545 - RNA, 20 nt, Variola virus
uagauacauuggccguaaua

SEQ ID NO: 3282546 - RNA, 19 nt, Variola virus
aaauuauccuaucauguau

SEQ ID NO: 3282547 - RNA, 16 nt, Variola virus
aaauaaguaaaaagug

SEQ ID NO: 3282548 - RNA, 22 nt, Variola virus
uuaguagaagaacucuguuucu

SEQ ID NO: 3282549 - RNA, 14 nt, Variola virus
agaauaaauuauau

SEQ ID NO: 3282550 - RNA, 17 nt, Variola virus
auuauuaaucagaauac

SEQ ID NO: 3282551 - RNA, 16 nt, Variola virus
uuaaaauacaacaaug

SEQ ID NO: 3282552 - RNA, 17 nt, Variola virus
uaauucauuaauuuuca

SEQ ID NO: 3282553 - RNA, 18 nt, Variola virus
cuguaaauguaguauuua

SEQ ID NO: 3282554 - RNA, 21 nt, Variola virus
auuaaaacuaccaauaagaag

SEQ ID NO: 3282555 - RNA, 14 nt, Variola virus
aauaguaaugauuc

SEQ ID NO: 3282556 - RNA, 12 nt, Variola virus
uuuccauaauaa

SEQ ID NO: 3282557 - RNA, 17 nt, Variola virus
aauauucuuuucuaaga

SEQ ID NO: 3282558 - RNA, 17 nt, Variola virus
aagauuccauuaucuaa

SEQ ID NO: 3282559 - RNA, 19 nt, Variola virus
aauauuaauauuagaguua

SEQ ID NO: 3282560 - RNA, 12 nt, Variola virus
ucuauucaagau

SEQ ID NO: 3282561 - RNA, 13 nt, Variola virus
uacauaaaugucu

SEQ ID NO: 3282562 - RNA, 17 nt, Variola virus
gcagacaaaaugaagau

SEQ ID NO: 3282563 - RNA, 17 nt, Variola virus
aaaauauauaaugaaua

SEQ ID NO: 3282564 - RNA, 16 nt, Variola virus
acccauguuuaagaua

SEQ ID NO: 3282565 - RNA, 19 nt, Variola virus
uauuuuaaaguuaaucaua

SEQ ID NO: 3282566 - RNA, 15 nt, Variola virus
aguaaagaaaagaua

SEQ ID NO: 3282567 - RNA, 11 nt, Variola virus
auauaguuuuu

SEQ ID NO: 3282568 - RNA, 16 nt, Variola virus
aaugauguuaggaaau

SEQ ID NO: 3282569 - RNA, 13 nt, Variola virus
guuauuaaauguu

SEQ ID NO: 3282570 - RNA, 15 nt, Variola virus
ugaagauaaugugaa

SEQ ID NO: 3282571 - RNA, 12 nt, Variola virus
guuacuauuauu

SEQ ID NO: 3282572 - RNA, 22 nt, Variola virus
uguuauacacggucuagagcau

SEQ ID NO: 3282573 - RNA, 20 nt, Variola virus
uuaacacguugucuuucaag

SEQ ID NO: 3282574 - RNA, 16 nt, Variola virus
uaucauuaauacagua

SEQ ID NO: 3282575 - RNA, 14 nt, Variola virus
uagaggaugaauuu

SEQ ID NO: 3282576 - RNA, 17 nt, Variola virus
uuuuguucuauaaacug

SEQ ID NO: 3282577 - RNA, 16 nt, Variola virus
ucuuauagcaugaauu

SEQ ID NO: 3282578 - RNA, 12 nt, Variola virus
uagaacaaaaua

SEQ ID NO: 3282579 - RNA, 14 nt, Variola virus
aguauauaauaaag

SEQ ID NO: 3282580 - RNA, 21 nt, Variola virus
aacaggucgcuauauccacca

SEQ ID NO: 3282581 - RNA, 20 nt, Variola virus
auccuuauaaagaaugaaug

SEQ ID NO: 3282582 - RNA, 20 nt, Variola virus
uucaauucucggauagucuu

SEQ ID NO: 3282583 - RNA, 16 nt, Variola virus
agugucuacuuaaaug

SEQ ID NO: 3282584 - RNA, 20 nt, Variola virus
caacuuauccauuuauacau

SEQ ID NO: 3282585 - RNA, 13 nt, Variola virus
uuaauuuguacau

SEQ ID NO: 3282586 - RNA, 23 nt, Variola virus
auggaauauaauaaucuauuuua

SEQ ID NO: 3282587 - RNA, 19 nt, Variola virus
acuagaaagggaaaaauua

SEQ ID NO: 3282588 - RNA, 16 nt, Variola virus
acuauguuaauacuua

SEQ ID NO: 3282589 - RNA, 18 nt, Variola virus
auaauauuaucaugaauu

SEQ ID NO: 3282590 - RNA, 16 nt, Variola virus
ccaagugcuuaaauau

SEQ ID NO: 3282591 - RNA, 14 nt, Variola virus
cucuaacagauauu

SEQ ID NO: 3282592 - RNA, 20 nt, Variola virus
auguauaaaacaacaaaauu

SEQ ID NO: 3282593 - RNA, 22 nt, Variola virus
cagauguaaauauaucuacaau

SEQ ID NO: 3282594 - RNA, 15 nt, Variola virus
gaucaaccucuggag

SEQ ID NO: 3282595 - RNA, 12 nt, Variola virus
auuuuuuguaaa

SEQ ID NO: 3282596 - RNA, 16 nt, Variola virus
ugauagcgguagaugu

SEQ ID NO: 3282597 - RNA, 15 nt, Variola virus
agaugaaauagcguu

SEQ ID NO: 3282598 - RNA, 14 nt, Variola virus
cuaacucuguuuua

SEQ ID NO: 3282599 - RNA, 18 nt, Variola virus
auacuacuauuugucuaa

SEQ ID NO: 3282600 - RNA, 17 nt, Variola virus
ucuucaaauuccaccau

SEQ ID NO: 3282601 - RNA, 18 nt, Variola virus
auuaucucagugcaaaga

SEQ ID NO: 3282602 - RNA, 17 nt, Variola virus
uaaucuuacugaguuua

SEQ ID NO: 3282603 - RNA, 23 nt, Variola virus
ccaauaacggaaaucccaaaugu

SEQ ID NO: 3282604 - RNA, 14 nt, Variola virus
auaucucaauaaug

SEQ ID NO: 3282605 - RNA, 23 nt, Variola virus
acuucuagcgcugauuuaacuaa

SEQ ID NO: 3282606 - RNA, 21 nt, Variola virus
aucaauaccaaagaaggaaga

SEQ ID NO: 3282607 - RNA, 15 nt, Variola virus
cauuaauacaguaag

SEQ ID NO: 3282608 - RNA, 23 nt, Variola virus
uuaaacaauaucacgaaaguaga

SEQ ID NO: 3282609 - RNA, 17 nt, Variola virus
guugcaauaauaaaagu

SEQ ID NO: 3282610 - RNA, 20 nt, Variola virus
auaucaaacaauccaaaaaa

SEQ ID NO: 3282611 - RNA, 14 nt, Variola virus
uaugucacguuuau

SEQ ID NO: 3282612 - RNA, 22 nt, Variola virus
aagauauccagaguuuagauua

SEQ ID NO: 3282613 - RNA, 18 nt, Variola virus
gucaauuggaguaucauc

SEQ ID NO: 3282614 - RNA, 13 nt, Variola virus
auaguaugucuua

SEQ ID NO: 3282615 - RNA, 20 nt, Variola virus
caauuguuuuuguacauaau

SEQ ID NO: 3282616 - RNA, 19 nt, Variola virus
auuuugcaauuucuucaua

SEQ ID NO: 3282617 - RNA, 11 nt, Variola virus
uauuguuuuca

SEQ ID NO: 3282618 - RNA, 17 nt, Variola virus
uaaauacaugucuaaug

SEQ ID NO: 3282619 - RNA, 14 nt, Variola virus
aagcuaacaaaauu

SEQ ID NO: 3282620 - RNA, 20 nt, Variola virus
aagucacaaagcaagaccaa

SEQ ID NO: 3282621 - RNA, 15 nt, Variola virus
auuacuuaucauuua

SEQ ID NO: 3282622 - RNA, 13 nt, Variola virus
aauuugauaaaga

SEQ ID NO: 3282623 - RNA, 20 nt, Variola virus
uguuuuauuaaucaaucauu

SEQ ID NO: 3282624 - RNA, 21 nt, Variola virus
ucacagcuccaucaguuuuau

SEQ ID NO: 3282625 - RNA, 15 nt, Variola virus
ugcucugcaauaacu

SEQ ID NO: 3282626 - RNA, 15 nt, Variola virus
agacgucacuauuac

SEQ ID NO: 3282627 - RNA, 13 nt, Variola virus
auuuaauauagau

SEQ ID NO: 3282628 - RNA, 15 nt, Variola virus
cagucauuccaucau

SEQ ID NO: 3282629 - RNA, 20 nt, Variola virus
cucuagauuaucuuagugaa

SEQ ID NO: 3282630 - RNA, 22 nt, Variola virus
uguaucaaucgguguguagaaa

SEQ ID NO: 3282631 - RNA, 16 nt, Variola virus
uugcguuuacaacacu

SEQ ID NO: 3282632 - RNA, 13 nt, Variola virus
acuauuauugaag

SEQ ID NO: 3282633 - RNA, 22 nt, Variola virus
uaaaauuaucuacacaaauaga

SEQ ID NO: 3282634 - RNA, 17 nt, Variola virus
uuuuauucacauaaaag

SEQ ID NO: 3282635 - RNA, 17 nt, Variola virus
caaaagauuaaggagau

SEQ ID NO: 3282636 - RNA, 15 nt, Variola virus
auuuucucuuaaaaa

SEQ ID NO: 3282637 - RNA, 16 nt, Variola virus
uaaaguuucugaaaua

SEQ ID NO: 3282638 - RNA, 23 nt, Variola virus
acuaauaucauuaguauacucua

SEQ ID NO: 3282639 - RNA, 14 nt, Variola virus
acuuuucucuaaau

SEQ ID NO: 3282640 - RNA, 24 nt, Variola virus
guauaaugugauuguauguuguua

SEQ ID NO: 3282641 - RNA, 22 nt, Variola virus
ucgauucuggcuauuucaaaau

SEQ ID NO: 3282642 - RNA, 11 nt, Variola virus
augaguauuuu

SEQ ID NO: 3282643 - RNA, 17 nt, Variola virus
uaacacauaccuuuuuc

SEQ ID NO: 3282644 - RNA, 15 nt, Variola virus
augucauaaauucuu

SEQ ID NO: 3282645 - RNA, 21 nt, Variola virus
agaucuuuucucaaagauguu

SEQ ID NO: 3282646 - RNA, 14 nt, Variola virus
uacuuuuuacuaau

SEQ ID NO: 3282647 - RNA, 22 nt, Variola virus
ucuggauauguuuuuaauaaag

SEQ ID NO: 3282648 - RNA, 21 nt, Variola virus
cuaguauagcagaaguuuaua

SEQ ID NO: 3282649 - RNA, 14 nt, Variola virus
uauuaaaauuauuu

SEQ ID NO: 3282650 - RNA, 22 nt, Variola virus
cacgaccaaaucgauuacuaug

SEQ ID NO: 3282651 - RNA, 22 nt, Variola virus
uauuaucauacugucaacuaua

SEQ ID NO: 3282652 - RNA, 20 nt, Variola virus
cggaauugccaacucucaaa

SEQ ID NO: 3282653 - RNA, 15 nt, Variola virus
acuccuugguuucaa

SEQ ID NO: 3282654 - RNA, 17 nt, Variola virus
aauauaucccuuaaaaa

SEQ ID NO: 3282655 - RNA, 13 nt, Variola virus
cuuaauaaauguu

SEQ ID NO: 3282656 - RNA, 18 nt, Variola virus
cuauaauauccauuuugu

SEQ ID NO: 3282657 - RNA, 19 nt, Variola virus
uguuaagaaugauuacuaa

SEQ ID NO: 3282658 - RNA, 19 nt, Variola virus
guuuauuuagauacagaug

SEQ ID NO: 3282659 - RNA, 15 nt, Variola virus
uagguuuacuaaaau

SEQ ID NO: 3282660 - RNA, 16 nt, Variola virus
uaugcaaagaauuugg

SEQ ID NO: 3282661 - RNA, 16 nt, Variola virus
auauaaaauaacuaca

SEQ ID NO: 3282662 - RNA, 18 nt, Variola virus
uguuaaaaacaguuauuu

SEQ ID NO: 3282663 - RNA, 17 nt, Variola virus
uacguuauugucaaaau

SEQ ID NO: 3282664 - RNA, 12 nt, Variola virus
ucuuacaauguu

SEQ ID NO: 3282665 - RNA, 22 nt, Variola virus
auucauuacucuugauaaauug

SEQ ID NO: 3282666 - RNA, 17 nt, Variola virus
gauagacuagaagaaag

SEQ ID NO: 3282667 - RNA, 13 nt, Variola virus
augauugcauauu

SEQ ID NO: 3282668 - RNA, 12 nt, Variola virus
aaucauugauau

SEQ ID NO: 3282669 - RNA, 22 nt, Variola virus
auuucaucuguaguauucuugu

SEQ ID NO: 3282670 - RNA, 23 nt, Variola virus
aaugccacgaauaaaaaauacuu

SEQ ID NO: 3282671 - RNA, 19 nt, Variola virus
aagaagugucuauaaaugu

SEQ ID NO: 3282672 - RNA, 20 nt, Variola virus
auuaguaaggcuuuagaaac

SEQ ID NO: 3282673 - RNA, 12 nt, Variola virus
ugguuucaauuc

SEQ ID NO: 3282674 - RNA, 14 nt, Variola virus
gauaaaauaucaua

SEQ ID NO: 3282675 - RNA, 19 nt, Variola virus
aaacuuguaagaaguaaau

SEQ ID NO: 3282676 - RNA, 15 nt, Variola virus
cuuguucguugacau

SEQ ID NO: 3282677 - RNA, 22 nt, Variola virus
cgaauaucguucucuaaauguc

SEQ ID NO: 3282678 - RNA, 18 nt, Variola virus
uucuucaauaaaaugaaa

SEQ ID NO: 3282679 - RNA, 15 nt, Variola virus
aauuguucaaaacug

SEQ ID NO: 3282680 - RNA, 14 nt, Variola virus
uuauuuaacucuuu

SEQ ID NO: 3282681 - RNA, 18 nt, Variola virus
aaucggguaauuauaaga

SEQ ID NO: 3282682 - RNA, 20 nt, Variola virus
auuugguuauuaaacaguau

SEQ ID NO: 3282683 - RNA, 20 nt, Variola virus
aucuuagacauuuuuagaga

SEQ ID NO: 3282684 - RNA, 16 nt, Variola virus
cagaggaugaaauaga

SEQ ID NO: 3282685 - RNA, 21 nt, Variola virus
ucuaauauaaucuuuaguauu

SEQ ID NO: 3282686 - RNA, 19 nt, Variola virus
uuaucucagugcaaagauu

SEQ ID NO: 3282687 - RNA, 17 nt, Variola virus
uauguaaguauuuacga

SEQ ID NO: 3282688 - RNA, 21 nt, Variola virus
auuuaauacguucauuaaaaa

SEQ ID NO: 3282689 - RNA, 16 nt, Variola virus
agauguguauaauucu

SEQ ID NO: 3282690 - RNA, 18 nt, Variola virus
auaugauucuaaccuaga

SEQ ID NO: 3282691 - RNA, 12 nt, Variola virus
auacuaaauaua

SEQ ID NO: 3282692 - RNA, 22 nt, Variola virus
cuuauauaccgccucaaacucu

SEQ ID NO: 3282693 - RNA, 16 nt, Variola virus
uaucgcauauuuauau

SEQ ID NO: 3282694 - RNA, 23 nt, Variola virus
uaaacgccuuuagaaaaacuuua

SEQ ID NO: 3282695 - RNA, 13 nt, Variola virus
uaauaacaaguau

SEQ ID NO: 3282696 - RNA, 13 nt, Variola virus
gcagacugugcau

SEQ ID NO: 3282697 - RNA, 23 nt, Variola virus
acccuuccuuaaacgugaaugau

SEQ ID NO: 3282698 - RNA, 12 nt, Variola virus
cuauuuuaauga

SEQ ID NO: 3282699 - RNA, 19 nt, Variola virus
aucaauguguguaacucca

SEQ ID NO: 3282700 - RNA, 16 nt, Variola virus
uacgucuauacagaua

SEQ ID NO: 3282701 - RNA, 13 nt, Variola virus
cacuaucauaauu

SEQ ID NO: 3282702 - RNA, 14 nt, Variola virus
uuauuuuuggaaga

SEQ ID NO: 3282703 - RNA, 22 nt, Variola virus
aguauaccaugaccuucuucau

SEQ ID NO: 3282704 - RNA, 14 nt, Variola virus
guguugauaauauc

SEQ ID NO: 3282705 - RNA, 21 nt, Variola virus
guuaaggucuuccauuuaaau

SEQ ID NO: 3282706 - RNA, 21 nt, Variola virus
auuugucuuccuuaacuauau

SEQ ID NO: 3282707 - RNA, 15 nt, Variola virus
auacauuucucaaau

SEQ ID NO: 3282708 - RNA, 14 nt, Variola virus
uacgauaugauuca

SEQ ID NO: 3282709 - RNA, 24 nt, Variola virus
agaucgcuuucugguaacaugaua

SEQ ID NO: 3282710 - RNA, 20 nt, Variola virus
uuaguguauaauuuugucau

SEQ ID NO: 3282711 - RNA, 19 nt, Variola virus
aauaggagugauagaacug

SEQ ID NO: 3282712 - RNA, 17 nt, Variola virus
uuacgauagaaauagau

SEQ ID NO: 3282713 - RNA, 19 nt, Variola virus
acuaaugcaucuauuucau

SEQ ID NO: 3282714 - RNA, 22 nt, Variola virus
ucuucgcccucaauuucccaaa

SEQ ID NO: 3282715 - RNA, 16 nt, Variola virus
gacauuuucacaaaua

SEQ ID NO: 3282716 - RNA, 22 nt, Variola virus
gaugaaagauaaacuagauaua

SEQ ID NO: 3282717 - RNA, 16 nt, Variola virus
aucugugauguaugca

SEQ ID NO: 3282718 - RNA, 22 nt, Variola virus
uucucucauaaauacagagaug

SEQ ID NO: 3282719 - RNA, 21 nt, Variola virus
cuucagaaaagucaaauauug

SEQ ID NO: 3282720 - RNA, 23 nt, Variola virus
agucuauaugaucaaaaagagau

SEQ ID NO: 3282721 - RNA, 18 nt, Variola virus
caguccgguucuuaauau

SEQ ID NO: 3282722 - RNA, 23 nt, Variola virus
cucaucguuccauaguuuuucua

SEQ ID NO: 3282723 - RNA, 17 nt, Variola virus
uauacgaaaaaauagca

SEQ ID NO: 3282724 - RNA, 15 nt, Variola virus
gaagaagaaaacaaa

SEQ ID NO: 3282725 - RNA, 20 nt, Variola virus
gaugugacagacugaccagu

SEQ ID NO: 3282726 - RNA, 22 nt, Variola virus
auuuaagagaucaaagcaucaa

SEQ ID NO: 3282727 - RNA, 21 nt, Variola virus
ccaacuguagacguaguucua

SEQ ID NO: 3282728 - RNA, 18 nt, Variola virus
ucaacuaaagggauuuua

SEQ ID NO: 3282729 - RNA, 14 nt, Variola virus
uguguacuuguaca

SEQ ID NO: 3282730 - RNA, 20 nt, Variola virus
uacuucucccauaauacuuu

SEQ ID NO: 3282731 - RNA, 14 nt, Variola virus
uaucuguuaccaua

SEQ ID NO: 3282732 - RNA, 23 nt, Variola virus
ucuauacagcgaauaaauucaga

SEQ ID NO: 3282733 - RNA, 21 nt, Variola virus
aaauauuuuuggacaguguuu

SEQ ID NO: 3282734 - RNA, 18 nt, Variola virus
guuuaacuagucuucucu

SEQ ID NO: 3282735 - RNA, 19 nt, Variola virus
guacauugcucguaaaaga

SEQ ID NO: 3282736 - RNA, 15 nt, Variola virus
caguauuuuuggaau

SEQ ID NO: 3282737 - RNA, 21 nt, Variola virus
agauccuuuucuucagaauaa

SEQ ID NO: 3282738 - RNA, 14 nt, Variola virus
aaucgcuuaauaga

SEQ ID NO: 3282739 - RNA, 17 nt, Variola virus
cuagaucaagaaacauu

SEQ ID NO: 3282740 - RNA, 22 nt, Variola virus
auagguuacuagauuaaaaaug

SEQ ID NO: 3282741 - RNA, 17 nt, Variola virus
augaugaauacauuuau

SEQ ID NO: 3282742 - RNA, 15 nt, Variola virus
ugcuuaauguuucca

SEQ ID NO: 3282743 - RNA, 12 nt, Variola virus
aggaauccaugu

SEQ ID NO: 3282744 - RNA, 23 nt, Variola virus
aauaccaaucauuuauugauaau

SEQ ID NO: 3282745 - RNA, 15 nt, Variola virus
cggauggaugauaua

SEQ ID NO: 3282746 - RNA, 17 nt, Variola virus
auaaggaacuagaauug

SEQ ID NO: 3282747 - RNA, 16 nt, Variola virus
acaauggaauacuuca

SEQ ID NO: 3282748 - RNA, 22 nt, Variola virus
ucuuuacuagagagaaagcuuu

SEQ ID NO: 3282749 - RNA, 19 nt, Variola virus
auaaucauaaccauuucua

SEQ ID NO: 3282750 - RNA, 22 nt, Variola virus
cuucacagauagaucauuuuga

SEQ ID NO: 3282751 - RNA, 14 nt, Variola virus
aacaagaaaguuau

SEQ ID NO: 3282752 - RNA, 18 nt, Variola virus
cuguuuuagcaucuuuuu

SEQ ID NO: 3282753 - RNA, 14 nt, Variola virus
uaagaaugugauaa

SEQ ID NO: 3282754 - RNA, 20 nt, Variola virus
aacuuggggauaaugauaca

SEQ ID NO: 3282755 - RNA, 22 nt, Variola virus
agcuuuuguucacaaaaauaca

SEQ ID NO: 3282756 - RNA, 22 nt, Variola virus
aaucuaguuaccuugaaaauaa

SEQ ID NO: 3282757 - RNA, 23 nt, Variola virus
auaacauaggauuaaaaauaaag

SEQ ID NO: 3282758 - RNA, 20 nt, Variola virus
aucaguauguauaucuauau

SEQ ID NO: 3282759 - RNA, 14 nt, Variola virus
aauguaguaaauau

SEQ ID NO: 3282760 - RNA, 23 nt, Variola virus
uuauaucguuaucauuaauaaag

SEQ ID NO: 3282761 - RNA, 16 nt, Variola virus
gaagagaaaagucaau

SEQ ID NO: 3282762 - RNA, 20 nt, Variola virus
auuaugcauucguuuaaaga

SEQ ID NO: 3282763 - RNA, 17 nt, Variola virus
agaucauguaacaauau

SEQ ID NO: 3282764 - RNA, 22 nt, Variola virus
guucgaggauaucauccaaaac

SEQ ID NO: 3282765 - RNA, 10 nt, Variola virus
uaacugaaga

SEQ ID NO: 3282766 - RNA, 15 nt, Variola virus
uaauaugaguaacau

SEQ ID NO: 3282767 - RNA, 17 nt, Variola virus
uuacucuauaaaauacu

SEQ ID NO: 3282768 - RNA, 19 nt, Variola virus
auguauuacgaagaagaca

SEQ ID NO: 3282769 - RNA, 14 nt, Variola virus
cgucucaaucuuua

SEQ ID NO: 3282770 - RNA, 20 nt, Variola virus
aaaaauugaauugaugauau

SEQ ID NO: 3282771 - RNA, 22 nt, Variola virus
auauuuaagugauauaaaacau

SEQ ID NO: 3282772 - RNA, 15 nt, Variola virus
aaccuaacacaaauu

SEQ ID NO: 3282773 - RNA, 19 nt, Variola virus
uuaaacuucgcaauauuca

SEQ ID NO: 3282774 - RNA, 23 nt, Variola virus
uaucaauaacacaaucaugauuu

SEQ ID NO: 3282775 - RNA, 23 nt, Variola virus
uucauuaggauuaucaaaucuuu

SEQ ID NO: 3282776 - RNA, 16 nt, Variola virus
acuauuauuuguuaua

SEQ ID NO: 3282777 - RNA, 22 nt, Variola virus
uguagaacucaugaaucuaaaa

SEQ ID NO: 3282778 - RNA, 16 nt, Variola virus
uguacaauacauguac

SEQ ID NO: 3282779 - RNA, 23 nt, Variola virus
auacuuaaaaauggauguugugu

SEQ ID NO: 3282780 - RNA, 20 nt, Variola virus
uaacuacgcgauuauuuuca

SEQ ID NO: 3282781 - RNA, 18 nt, Variola virus
auuuguauauacauagau

SEQ ID NO: 3282782 - RNA, 17 nt, Variola virus
aauaggugaugaugcaa

SEQ ID NO: 3282783 - RNA, 14 nt, Variola virus
aaauauaaacaguc

SEQ ID NO: 3282784 - RNA, 13 nt, Variola virus
uaugugauagcaa

SEQ ID NO: 3282785 - RNA, 18 nt, Variola virus
auauuaaaauucacacau

SEQ ID NO: 3282786 - RNA, 23 nt, Variola virus
aauaccaguuauguucaacuuug

SEQ ID NO: 3282787 - RNA, 23 nt, Variola virus
agauauacccgaagauauacaca

SEQ ID NO: 3282788 - RNA, 12 nt, Variola virus
aaaaaagaauca

SEQ ID NO: 3282789 - RNA, 20 nt, Variola virus
caagaaauauggauccucua

SEQ ID NO: 3282790 - RNA, 14 nt, Variola virus
aacauuaacauuuu

SEQ ID NO: 3282791 - RNA, 22 nt, Variola virus
gcaaaaauaauaugauuagaag

SEQ ID NO: 3282792 - RNA, 23 nt, Variola virus
auaaacucacauuucaaauauau

SEQ ID NO: 3282793 - RNA, 20 nt, Variola virus
aucgauggagcguaaaagua

SEQ ID NO: 3282794 - RNA, 14 nt, Variola virus
agauacauauggau

SEQ ID NO: 3282795 - RNA, 12 nt, Variola virus
uuaucaugaauu

SEQ ID NO: 3282796 - RNA, 15 nt, Variola virus
ucuugauuacaaaac

SEQ ID NO: 3282797 - RNA, 20 nt, Variola virus
gaaucugaaaauguauaaau

SEQ ID NO: 3282798 - RNA, 17 nt, Variola virus
aauaaauaguucaacau

SEQ ID NO: 3282799 - RNA, 15 nt, Variola virus
aauuauauaaaacau

SEQ ID NO: 3282800 - RNA, 18 nt, Variola virus
aacaaagauauuaccagu

SEQ ID NO: 3282801 - RNA, 12 nt, Variola virus
cgucucuguauu

SEQ ID NO: 3282802 - RNA, 17 nt, Variola virus
auaauuuguauauacau

SEQ ID NO: 3282803 - RNA, 17 nt, Variola virus
aucaauuuaucauauau

SEQ ID NO: 3282804 - RNA, 18 nt, Variola virus
acuacuuuccuaucccuc

SEQ ID NO: 3282805 - RNA, 16 nt, Variola virus
uccaaauuuaauucuu

SEQ ID NO: 3282806 - RNA, 20 nt, Variola virus
uguaaagaacaaauguugua

SEQ ID NO: 3282807 - RNA, 20 nt, Variola virus
gaaacacuuauuaaguucuu

SEQ ID NO: 3282808 - RNA, 23 nt, Variola virus
augcggugccauucaugaaaaug

SEQ ID NO: 3282809 - RNA, 16 nt, Variola virus
gauggcugaaauuaga

SEQ ID NO: 3282810 - RNA, 12 nt, Variola virus
aauuucaaaaua

SEQ ID NO: 3282811 - RNA, 13 nt, Variola virus
gagauuuucuauu

SEQ ID NO: 3282812 - RNA, 19 nt, Variola virus
uuagaguaguaucauuaaa

SEQ ID NO: 3282813 - RNA, 23 nt, Variola virus
auaauuacgagucucguguguaa

SEQ ID NO: 3282814 - RNA, 17 nt, Variola virus
gaauucauuugauguau

SEQ ID NO: 3282815 - RNA, 21 nt, Variola virus
aguccuauauauuugaaaauc

SEQ ID NO: 3282816 - RNA, 14 nt, Variola virus
auauaauccaucaa

SEQ ID NO: 3282817 - RNA, 14 nt, Variola virus
uuacaauacauaga

SEQ ID NO: 3282818 - RNA, 21 nt, Variola virus
uaaguuguggguaguaucauc

SEQ ID NO: 3282819 - RNA, 20 nt, Variola virus
cuaaagccgguguaacauuc

SEQ ID NO: 3282820 - RNA, 14 nt, Variola virus
cucucuaucucuua

SEQ ID NO: 3282821 - RNA, 22 nt, Variola virus
uuaaaggauggcgaaauuauug

SEQ ID NO: 3282822 - RNA, 14 nt, Variola virus
uacauaagaaucaa

SEQ ID NO: 3282823 - RNA, 21 nt, Variola virus
aaauugguacucuaucauaau

SEQ ID NO: 3282824 - RNA, 15 nt, Variola virus
auaauuuaacauuuu

SEQ ID NO: 3282825 - RNA, 21 nt, Variola virus
ccaagaaaucguauauaacua

SEQ ID NO: 3282826 - RNA, 14 nt, Variola virus
caaacucuauuuua

SEQ ID NO: 3282827 - RNA, 14 nt, Variola virus
acuuuaacaaucuc

SEQ ID NO: 3282828 - RNA, 12 nt, Variola virus
uuauaacuaaac

SEQ ID NO: 3282829 - RNA, 17 nt, Variola virus
ccauaacauaauuuucu

SEQ ID NO: 3282830 - RNA, 14 nt, Variola virus
acgcauccauccaa

SEQ ID NO: 3282831 - RNA, 17 nt, Variola virus
aaauuuauuaaaaaugu

SEQ ID NO: 3282832 - RNA, 20 nt, Variola virus
cauacuaggagccaucauuu

SEQ ID NO: 3282833 - RNA, 23 nt, Variola virus
agauuuugacuuacauaaauguc

SEQ ID NO: 3282834 - RNA, 21 nt, Variola virus
uaaaauuuaaaaaguauuuac

SEQ ID NO: 3282835 - RNA, 20 nt, Variola virus
acucuguugguuuucuuaua

SEQ ID NO: 3282836 - RNA, 14 nt, Variola virus
caaauaaaaaguau

SEQ ID NO: 3282837 - RNA, 18 nt, Variola virus
acaaucugucgaaaaagu

SEQ ID NO: 3282838 - RNA, 22 nt, Variola virus
uugcuguugaagaggcaaaaga

SEQ ID NO: 3282839 - RNA, 13 nt, Variola virus
aaagcuguuguau

SEQ ID NO: 3282840 - RNA, 15 nt, Variola virus
aaugcagaaaugauu

SEQ ID NO: 3282841 - RNA, 15 nt, Variola virus
uaaaaagauaaacuu

SEQ ID NO: 3282842 - RNA, 22 nt, Variola virus
aucuugcaaguuaaauagaaug

SEQ ID NO: 3282843 - RNA, 17 nt, Variola virus
gguguaggaguacauac

SEQ ID NO: 3282844 - RNA, 14 nt, Variola virus
uguaaacacagaua

SEQ ID NO: 3282845 - RNA, 21 nt, Variola virus
ucagccgcuacagaaacauau

SEQ ID NO: 3282846 - RNA, 21 nt, Variola virus
uaccccucauaguauuaauau

SEQ ID NO: 3282847 - RNA, 12 nt, Variola virus
caccuaaaugug

SEQ ID NO: 3282848 - RNA, 13 nt, Variola virus
uauaguaucuauu

SEQ ID NO: 3282849 - RNA, 17 nt, Variola virus
cauugaucuauuauuua

SEQ ID NO: 3282850 - RNA, 14 nt, Variola virus
guuauaauagagau

SEQ ID NO: 3282851 - RNA, 19 nt, Variola virus
aucuugucugcuuaauaca

SEQ ID NO: 3282852 - RNA, 21 nt, Variola virus
ccaucacuucuaucuuguuua

SEQ ID NO: 3282853 - RNA, 13 nt, Variola virus
uuuucaucuuuua

SEQ ID NO: 3282854 - RNA, 14 nt, Variola virus
uuauagagauagau

SEQ ID NO: 3282855 - RNA, 16 nt, Variola virus
aagaauuuuagacacu

SEQ ID NO: 3282856 - RNA, 22 nt, Variola virus
ucguuccaagucauaucuagaa

SEQ ID NO: 3282857 - RNA, 18 nt, Variola virus
uuaacgcaccuauaaaga

SEQ ID NO: 3282858 - RNA, 14 nt, Variola virus
guaaauaauaauau

SEQ ID NO: 3282859 - RNA, 16 nt, Variola virus
ucgcgcuaauuucuaa

SEQ ID NO: 3282860 - RNA, 21 nt, Variola virus
uccuuccaagaagaagacuua

SEQ ID NO: 3282861 - RNA, 12 nt, Variola virus
aaauauuguuaa

SEQ ID NO: 3282862 - RNA, 18 nt, Variola virus
aauucauagccaauggau

SEQ ID NO: 3282863 - RNA, 17 nt, Variola virus
uauucaagcaaaaacaa

SEQ ID NO: 3282864 - RNA, 17 nt, Variola virus
uuaauacguucauuaaa

SEQ ID NO: 3282865 - RNA, 23 nt, Variola virus
agaaaaaugaugcugguuauuac

SEQ ID NO: 3282866 - RNA, 23 nt, Variola virus
gaguaauauccucuauuauacau

SEQ ID NO: 3282867 - RNA, 16 nt, Variola virus
ucuuuuauuuuaucua

SEQ ID NO: 3282868 - RNA, 15 nt, Variola virus
ucgaauacaaauuuu

SEQ ID NO: 3282869 - RNA, 21 nt, Variola virus
aacacccauuuauuguacaaa

SEQ ID NO: 3282870 - RNA, 16 nt, Variola virus
auuaacuuuguucauu

SEQ ID NO: 3282871 - RNA, 12 nt, Variola virus
acuauuugucua

SEQ ID NO: 3282872 - RNA, 18 nt, Variola virus
uuuucauuagcaugaauc

SEQ ID NO: 3282873 - RNA, 12 nt, Variola virus
aaauauucauua

SEQ ID NO: 3282874 - RNA, 16 nt, Variola virus
cuaacgaguacauucu

SEQ ID NO: 3282875 - RNA, 19 nt, Variola virus
auaaaauucuuaguuauau

SEQ ID NO: 3282876 - RNA, 18 nt, Variola virus
uagauuuuuaguuacaga

SEQ ID NO: 3282877 - RNA, 23 nt, Variola virus
cucaauauuuaucuagagugagu

SEQ ID NO: 3282878 - RNA, 14 nt, Variola virus
uucacuuaacaauu

SEQ ID NO: 3282879 - RNA, 20 nt, Variola virus
uaaacgauuuuccaaaucag

SEQ ID NO: 3282880 - RNA, 18 nt, Variola virus
ucuauacagcgaauaaau

SEQ ID NO: 3282881 - RNA, 14 nt, Variola virus
auaagcucuauugu

SEQ ID NO: 3282882 - RNA, 20 nt, Variola virus
cguagugacaauacuauuag

SEQ ID NO: 3282883 - RNA, 13 nt, Variola virus
auauacacauaau

SEQ ID NO: 3282884 - RNA, 22 nt, Variola virus
acaaugcuaauauauucuuaca

SEQ ID NO: 3282885 - RNA, 13 nt, Variola virus
auuuaaaaugaua

SEQ ID NO: 3282886 - RNA, 14 nt, Variola virus
cauaacauuguuua

SEQ ID NO: 3282887 - RNA, 17 nt, Variola virus
aucaaaauaguaaagua

SEQ ID NO: 3282888 - RNA, 14 nt, Variola virus
aacuauuuagcaaa

SEQ ID NO: 3282889 - RNA, 11 nt, Variola virus
cauuuaaacau

SEQ ID NO: 3282890 - RNA, 16 nt, Variola virus
ccauuaaagaauucuu

SEQ ID NO: 3282891 - RNA, 17 nt, Variola virus
agacauaugauaaaacg

SEQ ID NO: 3282892 - RNA, 19 nt, Variola virus
guuccuguagauaauaacu

SEQ ID NO: 3282893 - RNA, 18 nt, Variola virus
ugucucagaaucaaauau

SEQ ID NO: 3282894 - RNA, 14 nt, Variola virus
aaaugaauuauuua

SEQ ID NO: 3282895 - RNA, 17 nt, Variola virus
cauauauuagaaauaca

SEQ ID NO: 3282896 - RNA, 17 nt, Variola virus
aagauauuuuucuaagc

SEQ ID NO: 3282897 - RNA, 20 nt, Variola virus
uauuaucucccauuaucuug

SEQ ID NO: 3282898 - RNA, 17 nt, Variola virus
aacauauaauuauaaga

SEQ ID NO: 3282899 - RNA, 23 nt, Variola virus
aauaucuuuaaagagguaauggc

SEQ ID NO: 3282900 - RNA, 14 nt, Variola virus
uauucauugggaag

SEQ ID NO: 3282901 - RNA, 16 nt, Variola virus
aggcuacacaauagua

SEQ ID NO: 3282902 - RNA, 13 nt, Variola virus
acaaaauaaugua

SEQ ID NO: 3282903 - RNA, 17 nt, Variola virus
uaguuucugguuuucua

SEQ ID NO: 3282904 - RNA, 16 nt, Variola virus
uuaacuuuucauuaau

SEQ ID NO: 3282905 - RNA, 12 nt, Variola virus
aauaaaauggau

SEQ ID NO: 3282906 - RNA, 12 nt, Variola virus
agaaaaaugauu

SEQ ID NO: 3282907 - RNA, 19 nt, Variola virus
agaauauagacaaaaauau

SEQ ID NO: 3282908 - RNA, 12 nt, Variola virus
auuaaguucuuu

SEQ ID NO: 3282909 - RNA, 16 nt, Variola virus
gacauugucagaaauu

SEQ ID NO: 3282910 - RNA, 16 nt, Variola virus
uuucaucuauaucauu

SEQ ID NO: 3282911 - RNA, 22 nt, Variola virus
gucuuauaugaagucuauacag

SEQ ID NO: 3282912 - RNA, 17 nt, Variola virus
augcugguuauuacaca

SEQ ID NO: 3282913 - RNA, 16 nt, Variola virus
auuaauauuuaugauu

SEQ ID NO: 3282914 - RNA, 20 nt, Variola virus
aacaagagaagagauuucaa

SEQ ID NO: 3282915 - RNA, 20 nt, Variola virus
ucauuucaaccagagaaguu

SEQ ID NO: 3282916 - RNA, 17 nt, Variola virus
cuauuaguuguuccaau

SEQ ID NO: 3282917 - RNA, 22 nt, Variola virus
ugcucuacaugcgguaaagaua

SEQ ID NO: 3282918 - RNA, 16 nt, Variola virus
uuaucuauuucaaaaa

SEQ ID NO: 3282919 - RNA, 20 nt, Variola virus
gaggaguugcugaugaugaa

SEQ ID NO: 3282920 - RNA, 22 nt, Variola virus
aaauccuuguuugauaaaugua

SEQ ID NO: 3282921 - RNA, 19 nt, Variola virus
auguauauauccaggaauu

SEQ ID NO: 3282922 - RNA, 12 nt, Variola virus
augaaauguuug

SEQ ID NO: 3282923 - RNA, 14 nt, Variola virus
uucuucauuauuuu

SEQ ID NO: 3282924 - RNA, 19 nt, Variola virus
augaauaaagagaaugcag

SEQ ID NO: 3282925 - RNA, 16 nt, Variola virus
uuaucguuuacauaag

SEQ ID NO: 3282926 - RNA, 17 nt, Variola virus
agguaacauaaaaacug

SEQ ID NO: 3282927 - RNA, 15 nt, Variola virus
ccauaauuuucucuc

SEQ ID NO: 3282928 - RNA, 15 nt, Variola virus
auccauucuaaugau

SEQ ID NO: 3282929 - RNA, 18 nt, Variola virus
caaaaggacguagacaau

SEQ ID NO: 3282930 - RNA, 21 nt, Variola virus
cuauuuagaucauuaacucua

SEQ ID NO: 3282931 - RNA, 15 nt, Variola virus
gaaacgauaccaucu

SEQ ID NO: 3282932 - RNA, 18 nt, Variola virus
ccuuguuugauaaaugua

SEQ ID NO: 3282933 - RNA, 20 nt, Variola virus
cauaaauuucuccaacgauu

SEQ ID NO: 3282934 - RNA, 18 nt, Variola virus
cuaagacgucucauuucu

SEQ ID NO: 3282935 - RNA, 21 nt, Variola virus
ugaagauucccaaauaaucau

SEQ ID NO: 3282936 - RNA, 22 nt, Variola virus
auaguuguaauaaaaagggaaa

SEQ ID NO: 3282937 - RNA, 12 nt, Variola virus
cuucuacauaaa

SEQ ID NO: 3282938 - RNA, 18 nt, Variola virus
uauccagucaacacuaug

SEQ ID NO: 3282939 - RNA, 20 nt, Variola virus
ucauaaaacgauuggaaucu

SEQ ID NO: 3282940 - RNA, 18 nt, Variola virus
acaaucuaguacucgaaa

SEQ ID NO: 3282941 - RNA, 14 nt, Variola virus
aauuuugaagcauu

SEQ ID NO: 3282942 - RNA, 21 nt, Variola virus
aauaaagaugccauuuagaga

SEQ ID NO: 3282943 - RNA, 13 nt, Variola virus
aauuuauacucau

SEQ ID NO: 3282944 - RNA, 19 nt, Variola virus
aucuuuucacguuaaauga

SEQ ID NO: 3282945 - RNA, 18 nt, Variola virus
agauuaaaucauuaaaug

SEQ ID NO: 3282946 - RNA, 15 nt, Variola virus
augagugaaggagac

SEQ ID NO: 3282947 - RNA, 22 nt, Variola virus
acaaacuguuguuaaggaauau

SEQ ID NO: 3282948 - RNA, 13 nt, Variola virus
agaagaauaugau

SEQ ID NO: 3282949 - RNA, 22 nt, Variola virus
auaacaaccucuuuaauagccg

SEQ ID NO: 3282950 - RNA, 19 nt, Variola virus
cuccugauugugucucaaa

SEQ ID NO: 3282951 - RNA, 14 nt, Variola virus
aauaaaaauguuuu

SEQ ID NO: 3282952 - RNA, 16 nt, Variola virus
ucagaaucacauagau

SEQ ID NO: 3282953 - RNA, 13 nt, Variola virus
uucaaaauuauuu

SEQ ID NO: 3282954 - RNA, 16 nt, Variola virus
acaaaaauuaugaaau

SEQ ID NO: 3282955 - RNA, 14 nt, Variola virus
aucacaaaccacca

SEQ ID NO: 3282956 - RNA, 16 nt, Variola virus
ccaaacaauguuucua

SEQ ID NO: 3282957 - RNA, 24 nt, Variola virus
uggacaacauuaauacaaacgaua

SEQ ID NO: 3282958 - RNA, 15 nt, Variola virus
uuaacuacauuauca

SEQ ID NO: 3282959 - RNA, 14 nt, Variola virus
caaaucaaaacaaa

SEQ ID NO: 3282960 - RNA, 17 nt, Variola virus
uuucccauagaacauaa

SEQ ID NO: 3282961 - RNA, 16 nt, Variola virus
agcuaagcaacuaaga

SEQ ID NO: 3282962 - RNA, 21 nt, Variola virus
ugaauguuuccuucuuuacca

SEQ ID NO: 3282963 - RNA, 22 nt, Variola virus
cuucauaggauuaacaacaaug

SEQ ID NO: 3282964 - RNA, 17 nt, Variola virus
auaccuuuccuggaaua

SEQ ID NO: 3282965 - RNA, 22 nt, Variola virus
uaaagaaugcuguuauauacau

SEQ ID NO: 3282966 - RNA, 19 nt, Variola virus
gaagaauggaacuaaaaaa

SEQ ID NO: 3282967 - RNA, 22 nt, Variola virus
aauuggagaaucguauaccauu

SEQ ID NO: 3282968 - RNA, 15 nt, Variola virus
agaauacaacuacau

SEQ ID NO: 3282969 - RNA, 16 nt, Variola virus
gaauauaaaauaacua

SEQ ID NO: 3282970 - RNA, 16 nt, Variola virus
agaguuuccucauuau

SEQ ID NO: 3282971 - RNA, 20 nt, Variola virus
acauuaacaucuugaaccau

SEQ ID NO: 3282972 - RNA, 15 nt, Variola virus
uccaauuuuauucua

SEQ ID NO: 3282973 - RNA, 18 nt, Variola virus
acauuagauacaauggau

SEQ ID NO: 3282974 - RNA, 15 nt, Variola virus
cuauuauaucuuuuu

SEQ ID NO: 3282975 - RNA, 16 nt, Variola virus
cacuagguacaucauu

SEQ ID NO: 3282976 - RNA, 14 nt, Variola virus
auauaauuguugua

SEQ ID NO: 3282977 - RNA, 21 nt, Variola virus
cuguagauaaacuaggauuua

SEQ ID NO: 3282978 - RNA, 16 nt, Variola virus
aguaugaauaaucuuc

SEQ ID NO: 3282979 - RNA, 15 nt, Variola virus
aauuacuuaaagaua

SEQ ID NO: 3282980 - RNA, 22 nt, Variola virus
auagaaguuaaacugugaaugu

SEQ ID NO: 3282981 - RNA, 14 nt, Variola virus
agagaugaaaaauu

SEQ ID NO: 3282982 - RNA, 17 nt, Variola virus
aaauaugucuuuguuaa

SEQ ID NO: 3282983 - RNA, 19 nt, Variola virus
aucaaucgguguguagaaa

SEQ ID NO: 3282984 - RNA, 17 nt, Variola virus
gauuuaucauauuucuc

SEQ ID NO: 3282985 - RNA, 23 nt, Variola virus
uuaauagggauuugauguacgua

SEQ ID NO: 3282986 - RNA, 21 nt, Variola virus
agacauuguacaauauguguu

SEQ ID NO: 3282987 - RNA, 13 nt, Variola virus
aaaaucaaugggu

SEQ ID NO: 3282988 - RNA, 15 nt, Variola virus
cagacaaaaugaaga

SEQ ID NO: 3282989 - RNA, 15 nt, Variola virus
acaauuacacuacau

SEQ ID NO: 3282990 - RNA, 14 nt, Variola virus
aaaagaauauguau

SEQ ID NO: 3282991 - RNA, 18 nt, Variola virus
auaaauguucaaugaauu

SEQ ID NO: 3282992 - RNA, 23 nt, Variola virus
uuauagcuucuggauauaauuca

SEQ ID NO: 3282993 - RNA, 16 nt, Variola virus
cuucagacaacaucuc

SEQ ID NO: 3282994 - RNA, 18 nt, Variola virus
aauguauuaguaggaaau

SEQ ID NO: 3282995 - RNA, 13 nt, Variola virus
cauuaaauuguga

SEQ ID NO: 3282996 - RNA, 15 nt, Variola virus
acccaagaacaaugu

SEQ ID NO: 3282997 - RNA, 15 nt, Variola virus
gauuacaagaaauau

SEQ ID NO: 3282998 - RNA, 20 nt, Variola virus
gauuuuccaaaucaguaacu

SEQ ID NO: 3282999 - RNA, 22 nt, Variola virus
guuggaagaugcgcauuaacaa

SEQ ID NO: 3283000 - RNA, 22 nt, Variola virus
augacaucaacuacaaaugaua

SEQ ID NO: 3283001 - RNA, 13 nt, Variola virus
cucaaacauccuc

SEQ ID NO: 3283002 - RNA, 20 nt, Variola virus
uacgucagcugcaucuaaau

SEQ ID NO: 3283003 - RNA, 21 nt, Variola virus
gccacgaauaaaaaauacuua

SEQ ID NO: 3283004 - RNA, 19 nt, Variola virus
cacuuaauggcauaaugau

SEQ ID NO: 3283005 - RNA, 19 nt, Variola virus
ccauuauuucuauauuuga

SEQ ID NO: 3283006 - RNA, 16 nt, Variola virus
aguuacaggaacuuaa

SEQ ID NO: 3283007 - RNA, 20 nt, Variola virus
ugacuaucuuuugaaaauau

SEQ ID NO: 3283008 - RNA, 14 nt, Variola virus
uggauuucauauaa

SEQ ID NO: 3283009 - RNA, 22 nt, Variola virus
acgggaaaggaauuaauuauuc

SEQ ID NO: 3283010 - RNA, 13 nt, Variola virus
aauauguauauau

SEQ ID NO: 3283011 - RNA, 13 nt, Variola virus
aauaaguauauaa

SEQ ID NO: 3283012 - RNA, 18 nt, Variola virus
auagcauuguuauuagca

SEQ ID NO: 3283013 - RNA, 22 nt, Variola virus
acguauauagaugucaaugaag

SEQ ID NO: 3283014 - RNA, 20 nt, Variola virus
uuccaccuagagauagucaa

SEQ ID NO: 3283015 - RNA, 22 nt, Variola virus
uagagcccacguuuaaacauuc

SEQ ID NO: 3283016 - RNA, 16 nt, Variola virus
uuucguacauuuuuaa

SEQ ID NO: 3283017 - RNA, 22 nt, Variola virus
uaauauccuuauccgacuuuau

SEQ ID NO: 3283018 - RNA, 22 nt, Variola virus
aauaucauuauguauaaucauu

SEQ ID NO: 3283019 - RNA, 16 nt, Variola virus
ucuccuuuuguagaua

SEQ ID NO: 3283020 - RNA, 14 nt, Variola virus
uaucauaauuaaau

SEQ ID NO: 3283021 - RNA, 14 nt, Variola virus
uaacuuaauuuauu

SEQ ID NO: 3283022 - RNA, 17 nt, Variola virus
acaaccgcuacauaauc

SEQ ID NO: 3283023 - RNA, 18 nt, Variola virus
auauguagcaaacaugau

SEQ ID NO: 3283024 - RNA, 23 nt, Variola virus
gccaaaaaauccuguaauacuuu

SEQ ID NO: 3283025 - RNA, 21 nt, Variola virus
uguuucaucuaucauagauuu

SEQ ID NO: 3283026 - RNA, 14 nt, Variola virus
gauacauuuugcau

SEQ ID NO: 3283027 - RNA, 16 nt, Variola virus
aaucuauaguauuauc

SEQ ID NO: 3283028 - RNA, 20 nt, Variola virus
ccauccuugggaguaguuua

SEQ ID NO: 3283029 - RNA, 12 nt, Variola virus
aaucaaaacaaa

SEQ ID NO: 3283030 - RNA, 16 nt, Variola virus
gaagaauggaugauau

SEQ ID NO: 3283031 - RNA, 13 nt, Variola virus
auuuaacacuaua

SEQ ID NO: 3283032 - RNA, 16 nt, Variola virus
augaacaaagaaaugg

SEQ ID NO: 3283033 - RNA, 21 nt, Variola virus
cccuaccugaugaaucagaca

SEQ ID NO: 3283034 - RNA, 15 nt, Variola virus
auagaaacuauagau

SEQ ID NO: 3283035 - RNA, 22 nt, Variola virus
agcaguugcgaacaacaacaaa

SEQ ID NO: 3283036 - RNA, 21 nt, Variola virus
ugauaugaugucguuaaauuu

SEQ ID NO: 3283037 - RNA, 20 nt, Variola virus
aguguaaagaacaaauguug

SEQ ID NO: 3283038 - RNA, 17 nt, Variola virus
aaauuuuacuacauagu

SEQ ID NO: 3283039 - RNA, 17 nt, Variola virus
auaaugauagacaagau

SEQ ID NO: 3283040 - RNA, 17 nt, Variola virus
caguccagaaauauuua

SEQ ID NO: 3283041 - RNA, 19 nt, Variola virus
ucgucaaaauauuuacuaa

SEQ ID NO: 3283042 - RNA, 20 nt, Variola virus
uauucaguaguguuuacaua

SEQ ID NO: 3283043 - RNA, 19 nt, Variola virus
auauuucuccacuacauau

SEQ ID NO: 3283044 - RNA, 20 nt, Variola virus
aucaacgaguuaaaaaagac

SEQ ID NO: 3283045 - RNA, 21 nt, Variola virus
acuacucuuccacuauugcca

SEQ ID NO: 3283046 - RNA, 23 nt, Variola virus
uagauaguuuuuuugagccauau

SEQ ID NO: 3283047 - RNA, 15 nt, Variola virus
uccagaugaaugggu

SEQ ID NO: 3283048 - RNA, 23 nt, Variola virus
augggcgccgaccagucugaaca

SEQ ID NO: 3283049 - RNA, 22 nt, Variola virus
aggaaauaucaucacaacuuaa

SEQ ID NO: 3283050 - RNA, 15 nt, Variola virus
ccaaugaguaaaauc

SEQ ID NO: 3283051 - RNA, 17 nt, Variola virus
aacaauaucguuauuau

SEQ ID NO: 3283052 - RNA, 15 nt, Variola virus
gauauggauuuccag

SEQ ID NO: 3283053 - RNA, 19 nt, Variola virus
uaaaauaguuuauaacauu

SEQ ID NO: 3283054 - RNA, 21 nt, Variola virus
agaugccauaucauacaugau

SEQ ID NO: 3283055 - RNA, 13 nt, Variola virus
agucauaucuaga

SEQ ID NO: 3283056 - RNA, 20 nt, Variola virus
auuuuuaucauaacacuacu

SEQ ID NO: 3283057 - RNA, 13 nt, Variola virus
auuuuacauuauu

SEQ ID NO: 3283058 - RNA, 19 nt, Variola virus
auugguuuauaauguauaa

SEQ ID NO: 3283059 - RNA, 17 nt, Variola virus
gaacaaacgcuacuaua

SEQ ID NO: 3283060 - RNA, 16 nt, Variola virus
auuacuaauaaagaag

SEQ ID NO: 3283061 - RNA, 13 nt, Variola virus
accacuagcaaaa

SEQ ID NO: 3283062 - RNA, 14 nt, Variola virus
uguuugagaauuaa

SEQ ID NO: 3283063 - RNA, 16 nt, Variola virus
gaaauaauuuuuaguu

SEQ ID NO: 3283064 - RNA, 14 nt, Variola virus
auacuauuguacau

SEQ ID NO: 3283065 - RNA, 15 nt, Variola virus
aauuagaaagugaua

SEQ ID NO: 3283066 - RNA, 14 nt, Variola virus
aucaacuacauaau

SEQ ID NO: 3283067 - RNA, 15 nt, Variola virus
cacgagaacuauuaa

SEQ ID NO: 3283068 - RNA, 21 nt, Variola virus
acuucagguuucuuagcuugu

SEQ ID NO: 3283069 - RNA, 19 nt, Variola virus
auuucucucauaaauacag

SEQ ID NO: 3283070 - RNA, 21 nt, Variola virus
gauuaauaguuuuauuugaag

SEQ ID NO: 3283071 - RNA, 16 nt, Variola virus
aacuugauuucaaaau

SEQ ID NO: 3283072 - RNA, 14 nt, Variola virus
aaaucgucaguagu

SEQ ID NO: 3283073 - RNA, 19 nt, Variola virus
uuaguuuuuuguuacugac

SEQ ID NO: 3283074 - RNA, 16 nt, Variola virus
uaucaugucuaaugau

SEQ ID NO: 3283075 - RNA, 12 nt, Variola virus
auuuuguaacug

SEQ ID NO: 3283076 - RNA, 21 nt, Variola virus
uauaccuuugguucuuuaaaa

SEQ ID NO: 3283077 - RNA, 23 nt, Variola virus
caguauugggacaacuuaaucug

SEQ ID NO: 3283078 - RNA, 22 nt, Variola virus
gcgguuaaaauaguuuauaaca

SEQ ID NO: 3283079 - RNA, 15 nt, Variola virus
auuacaagucaaaga

SEQ ID NO: 3283080 - RNA, 14 nt, Variola virus
uugauaauaaauca

SEQ ID NO: 3283081 - RNA, 14 nt, Variola virus
cuuuagaaaaacuu

SEQ ID NO: 3283082 - RNA, 15 nt, Variola virus
auacuagaacuauaa

SEQ ID NO: 3283083 - RNA, 14 nt, Variola virus
augaaauauauuaa

SEQ ID NO: 3283084 - RNA, 16 nt, Variola virus
gaaaauuauaaugaau

SEQ ID NO: 3283085 - RNA, 23 nt, Variola virus
aauuaucgacauagguauagaau

SEQ ID NO: 3283086 - RNA, 21 nt, Variola virus
uagaaaccacggaucguaaua

SEQ ID NO: 3283087 - RNA, 15 nt, Variola virus
acgucauucuaaaag

SEQ ID NO: 3283088 - RNA, 22 nt, Variola virus
uacuaaagacuaugucaaagua

SEQ ID NO: 3283089 - RNA, 23 nt, Variola virus
uaaauccuuguuugauaaaugua

SEQ ID NO: 3283090 - RNA, 23 nt, Variola virus
ccucucaccagaagaggagcuac

SEQ ID NO: 3283091 - RNA, 16 nt, Variola virus
ugcuuuuuugacauau

SEQ ID NO: 3283092 - RNA, 16 nt, Variola virus
acugucaaaaaaauag

SEQ ID NO: 3283093 - RNA, 14 nt, Variola virus
uuuaguuuaucaaa

SEQ ID NO: 3283094 - RNA, 14 nt, Variola virus
uggaggaauuuaua

SEQ ID NO: 3283095 - RNA, 17 nt, Variola virus
acgacuauuaaaauaaa

SEQ ID NO: 3283096 - RNA, 18 nt, Variola virus
uccgaggauaguaaaaua

SEQ ID NO: 3283097 - RNA, 19 nt, Variola virus
aauccaaauaaaauggaua

SEQ ID NO: 3283098 - RNA, 17 nt, Variola virus
aauagcugaugauagaa

SEQ ID NO: 3283099 - RNA, 13 nt, Variola virus
guuaauacuuauu

SEQ ID NO: 3283100 - RNA, 20 nt, Variola virus
auuuagcgauuaugaaaauu

SEQ ID NO: 3283101 - RNA, 21 nt, Variola virus
auuucaaauaggucuucgucu

SEQ ID NO: 3283102 - RNA, 15 nt, Variola virus
aguaugugaauagau

SEQ ID NO: 3283103 - RNA, 17 nt, Variola virus
auuuccgcauucuuccu

SEQ ID NO: 3283104 - RNA, 17 nt, Variola virus
gacaacauuaauacaaa

SEQ ID NO: 3283105 - RNA, 14 nt, Variola virus
uaaaucauggauuu

SEQ ID NO: 3283106 - RNA, 15 nt, Variola virus
aucagguaaaacaau

SEQ ID NO: 3283107 - RNA, 15 nt, Variola virus
aaucuuauuagaaua

SEQ ID NO: 3283108 - RNA, 14 nt, Variola virus
aauguaauucuaaa

SEQ ID NO: 3283109 - RNA, 19 nt, Variola virus
aaugaguuauuaagaaaua

SEQ ID NO: 3283110 - RNA, 15 nt, Variola virus
ugaucugguuuugag

SEQ ID NO: 3283111 - RNA, 17 nt, Variola virus
auauuaaacacuaguau

SEQ ID NO: 3283112 - RNA, 22 nt, Variola virus
caacaucuuaagcguagaaguu

SEQ ID NO: 3283113 - RNA, 13 nt, Variola virus
aaacaauacagug

SEQ ID NO: 3283114 - RNA, 13 nt, Variola virus
uaacaaauuaaag

SEQ ID NO: 3283115 - RNA, 21 nt, Variola virus
agaauagaaugcuaaugucaa

SEQ ID NO: 3283116 - RNA, 20 nt, Variola virus
aaaauaaacacauagaaaua

SEQ ID NO: 3283117 - RNA, 17 nt, Variola virus
uuaagcauauucuuaau

SEQ ID NO: 3283118 - RNA, 21 nt, Variola virus
uaaugauugcccauagaguau

SEQ ID NO: 3283119 - RNA, 23 nt, Variola virus
cauuguuuacggugauguuuauc

SEQ ID NO: 3283120 - RNA, 17 nt, Variola virus
auaucaucaucugaaau

SEQ ID NO: 3283121 - RNA, 20 nt, Variola virus
uaucuuuagcuucugaaaua

SEQ ID NO: 3283122 - RNA, 14 nt, Variola virus
uuauacaaaguuuu

SEQ ID NO: 3283123 - RNA, 18 nt, Variola virus
cauccuuuuuuauaucca

SEQ ID NO: 3283124 - RNA, 17 nt, Variola virus
uaucaacagauagcuug

SEQ ID NO: 3283125 - RNA, 18 nt, Variola virus
ucuauaaagucugucaaa

SEQ ID NO: 3283126 - RNA, 20 nt, Variola virus
aacacuuuauacuucuccaa

SEQ ID NO: 3283127 - RNA, 16 nt, Variola virus
auggagagauuuaacu

SEQ ID NO: 3283128 - RNA, 21 nt, Variola virus
cauuaauuucugauauggaau

SEQ ID NO: 3283129 - RNA, 18 nt, Variola virus
accgauaauaaaauuacu

SEQ ID NO: 3283130 - RNA, 18 nt, Variola virus
aaaacgauauuagaauuu

SEQ ID NO: 3283131 - RNA, 16 nt, Variola virus
agcucgcguuuaagag

SEQ ID NO: 3283132 - RNA, 17 nt, Variola virus
auaucguucuuaauaga

SEQ ID NO: 3283133 - RNA, 15 nt, Variola virus
gcuuuucucuuuuaa

SEQ ID NO: 3283134 - RNA, 17 nt, Variola virus
cauuaucauuuuguaau

SEQ ID NO: 3283135 - RNA, 15 nt, Variola virus
uagagauaauuuauc

SEQ ID NO: 3283136 - RNA, 18 nt, Variola virus
uaauuucaggaacaggau

SEQ ID NO: 3283137 - RNA, 16 nt, Variola virus
uaacaguaacuuguau

SEQ ID NO: 3283138 - RNA, 14 nt, Variola virus
ucuucgcagaugau

SEQ ID NO: 3283139 - RNA, 15 nt, Variola virus
acacaccuaaaugug

SEQ ID NO: 3283140 - RNA, 14 nt, Variola virus
uuccaaucauugau

SEQ ID NO: 3283141 - RNA, 14 nt, Variola virus
auauguucguguau

SEQ ID NO: 3283142 - RNA, 16 nt, Variola virus
ucaaauuguccuauau

SEQ ID NO: 3283143 - RNA, 21 nt, Variola virus
aauaacugccggauaaaagug

SEQ ID NO: 3283144 - RNA, 14 nt, Variola virus
auuauucuuuggau

SEQ ID NO: 3283145 - RNA, 19 nt, Variola virus
aacaggugguauauuauau

SEQ ID NO: 3283146 - RNA, 16 nt, Variola virus
aauguuagugaugaau

SEQ ID NO: 3283147 - RNA, 21 nt, Variola virus
augaagggaucguuaaugaac

SEQ ID NO: 3283148 - RNA, 20 nt, Variola virus
agaauucacaccuagagaca

SEQ ID NO: 3283149 - RNA, 18 nt, Variola virus
acugagaugacuggaaau

SEQ ID NO: 3283150 - RNA, 22 nt, Variola virus
uuucaccauauagaucaaucau

SEQ ID NO: 3283151 - RNA, 14 nt, Variola virus
auaaguaauaacua

SEQ ID NO: 3283152 - RNA, 14 nt, Variola virus
auauuaaaaauaca

SEQ ID NO: 3283153 - RNA, 15 nt, Variola virus
gaacauaaacaaauu

SEQ ID NO: 3283154 - RNA, 20 nt, Variola virus
agaaagauauauuaagaaua

SEQ ID NO: 3283155 - RNA, 14 nt, Variola virus
aguggauucuucua

SEQ ID NO: 3283156 - RNA, 21 nt, Variola virus
uuuucaacacucgacugaaua

SEQ ID NO: 3283157 - RNA, 15 nt, Variola virus
cagaaagcuguggau

SEQ ID NO: 3283158 - RNA, 14 nt, Variola virus
uggauuucauauag

SEQ ID NO: 3283159 - RNA, 20 nt, Variola virus
aaauagcguucgucaacaua

SEQ ID NO: 3283160 - RNA, 17 nt, Variola virus
gauacccugauauuaau

SEQ ID NO: 3283161 - RNA, 17 nt, Variola virus
gcuauguuaucaugaaa

SEQ ID NO: 3283162 - RNA, 15 nt, Variola virus
auaguuucuauuuuu

SEQ ID NO: 3283163 - RNA, 12 nt, Variola virus
agccuguaacug

SEQ ID NO: 3283164 - RNA, 17 nt, Variola virus
aaugugaguauuuuacu

SEQ ID NO: 3283165 - RNA, 16 nt, Variola virus
aucuaacaucuugauu

SEQ ID NO: 3283166 - RNA, 14 nt, Variola virus
aauauauugaucau

SEQ ID NO: 3283167 - RNA, 23 nt, Variola virus
aauccuucuagaauuagaauuac

SEQ ID NO: 3283168 - RNA, 13 nt, Variola virus
gauguguauacau

SEQ ID NO: 3283169 - RNA, 12 nt, Variola virus
aauguuagaauu

SEQ ID NO: 3283170 - RNA, 21 nt, Variola virus
guacauuagccggacaaauau

SEQ ID NO: 3283171 - RNA, 20 nt, Variola virus
gaacauaugguauuauucua

SEQ ID NO: 3283172 - RNA, 21 nt, Variola virus
auacuuuaaagcaaaaugguu

SEQ ID NO: 3283173 - RNA, 16 nt, Variola virus
aaaauauguauaacgu

SEQ ID NO: 3283174 - RNA, 19 nt, Variola virus
gaaauaaccgcaugauuau

SEQ ID NO: 3283175 - RNA, 17 nt, Variola virus
ucagaacuaucauagau

SEQ ID NO: 3283176 - RNA, 21 nt, Variola virus
guugcguacauugcucguaaa

SEQ ID NO: 3283177 - RNA, 16 nt, Variola virus
cuccuuuaaaauuaau

SEQ ID NO: 3283178 - RNA, 18 nt, Variola virus
uaguucguguacuaguca

SEQ ID NO: 3283179 - RNA, 14 nt, Variola virus
ucuagauacaaaau

SEQ ID NO: 3283180 - RNA, 14 nt, Variola virus
cacugcugaacagu

SEQ ID NO: 3283181 - RNA, 20 nt, Variola virus
auuaacgaguucaaauauga

SEQ ID NO: 3283182 - RNA, 16 nt, Variola virus
auauuagacaauacua

SEQ ID NO: 3283183 - RNA, 18 nt, Variola virus
aaacaacaaaauuauacu

SEQ ID NO: 3283184 - RNA, 16 nt, Variola virus
cuacugccucacugac

SEQ ID NO: 3283185 - RNA, 11 nt, Variola virus
uuaacaucuug

SEQ ID NO: 3283186 - RNA, 15 nt, Variola virus
auaguaaaaagacua

SEQ ID NO: 3283187 - RNA, 17 nt, Variola virus
uaguuuguuucuagaau

SEQ ID NO: 3283188 - RNA, 14 nt, Variola virus
gccauuuguuuugu

SEQ ID NO: 3283189 - RNA, 18 nt, Variola virus
auaacccaaguauugaaa

SEQ ID NO: 3283190 - RNA, 15 nt, Variola virus
auauacucuauuuca

SEQ ID NO: 3283191 - RNA, 14 nt, Variola virus
aguacuuauuaaaa

SEQ ID NO: 3283192 - RNA, 15 nt, Variola virus
ucugcggauuuauaa

SEQ ID NO: 3283193 - RNA, 15 nt, Variola virus
uauaauuuuaccauu

SEQ ID NO: 3283194 - RNA, 14 nt, Variola virus
gaucauucuuuuag

SEQ ID NO: 3283195 - RNA, 18 nt, Variola virus
uagaaugcucuuaaauaa

SEQ ID NO: 3283196 - RNA, 20 nt, Variola virus
aauauuuuuuauaaacauga

SEQ ID NO: 3283197 - RNA, 19 nt, Variola virus
aaucauauaaaaaaugauu

SEQ ID NO: 3283198 - RNA, 17 nt, Variola virus
acuaaacacacauuauu

SEQ ID NO: 3283199 - RNA, 12 nt, Variola virus
guacauaauaga

SEQ ID NO: 3283200 - RNA, 17 nt, Variola virus
uuauagauuuguaucuc

SEQ ID NO: 3283201 - RNA, 15 nt, Variola virus
agacgaacaaaauca

SEQ ID NO: 3283202 - RNA, 22 nt, Variola virus
uugccuccggagucauaaaagg

SEQ ID NO: 3283203 - RNA, 12 nt, Variola virus
uauuacuuuagu

SEQ ID NO: 3283204 - RNA, 19 nt, Variola virus
gaaauugguuuauaaugua

SEQ ID NO: 3283205 - RNA, 22 nt, Variola virus
augauuuugaaccguauuacuc

SEQ ID NO: 3283206 - RNA, 19 nt, Variola virus
auucuaugaauuuauaaaa

SEQ ID NO: 3283207 - RNA, 14 nt, Variola virus
uuauuaaguauaau

SEQ ID NO: 3283208 - RNA, 13 nt, Variola virus
auuaaucauauac

SEQ ID NO: 3283209 - RNA, 18 nt, Variola virus
auuaauaauuguuuugaa

SEQ ID NO: 3283210 - RNA, 15 nt, Variola virus
uaacgaugucuauau

SEQ ID NO: 3283211 - RNA, 22 nt, Variola virus
auuuuaauucuccuauuacaua

SEQ ID NO: 3283212 - RNA, 20 nt, Variola virus
uuuuaacaugauguaaucuc

SEQ ID NO: 3283213 - RNA, 14 nt, Variola virus
uuuccuuuaucauu

SEQ ID NO: 3283214 - RNA, 17 nt, Variola virus
auaugucuguacaaaug

SEQ ID NO: 3283215 - RNA, 18 nt, Variola virus
aauacucuuuaaaguuuc

SEQ ID NO: 3283216 - RNA, 16 nt, Variola virus
aaaguuaguacagaag

SEQ ID NO: 3283217 - RNA, 15 nt, Variola virus
aauaguguuagauaa

SEQ ID NO: 3283218 - RNA, 19 nt, Variola virus
auuaccacagccguauuuu

SEQ ID NO: 3283219 - RNA, 21 nt, Variola virus
aaaaucguguuuguguaguuu

SEQ ID NO: 3283220 - RNA, 15 nt, Variola virus
gauaaaaucaaacuu

SEQ ID NO: 3283221 - RNA, 15 nt, Variola virus
gcaauuauauaaugu

SEQ ID NO: 3283222 - RNA, 22 nt, Variola virus
guuccugguauauagauaaaga

SEQ ID NO: 3283223 - RNA, 12 nt, Variola virus
aauauuuaacuc

SEQ ID NO: 3283224 - RNA, 16 nt, Variola virus
auuaguaauuaaauau

SEQ ID NO: 3283225 - RNA, 16 nt, Variola virus
uacaucuucaauagau

SEQ ID NO: 3283226 - RNA, 14 nt, Variola virus
cugauuaacaaaug

SEQ ID NO: 3283227 - RNA, 17 nt, Variola virus
uuagaugguuucuuuuu

SEQ ID NO: 3283228 - RNA, 15 nt, Variola virus
uggaugaauucuaug

SEQ ID NO: 3283229 - RNA, 15 nt, Variola virus
caagugacuauuauc

SEQ ID NO: 3283230 - RNA, 23 nt, Variola virus
ucaaaaagggugcgguacuacag

SEQ ID NO: 3283231 - RNA, 14 nt, Variola virus
ugcaaugaauaucu

SEQ ID NO: 3283232 - RNA, 22 nt, Variola virus
cauuagcgcauguacauauuug

SEQ ID NO: 3283233 - RNA, 15 nt, Variola virus
cgauuauuauaaaau

SEQ ID NO: 3283234 - RNA, 14 nt, Variola virus
gaugcauaaguaca

SEQ ID NO: 3283235 - RNA, 22 nt, Variola virus
aagaugcaaacauuauguagua

SEQ ID NO: 3283236 - RNA, 18 nt, Variola virus
agcacauggaaaaaaagu

SEQ ID NO: 3283237 - RNA, 15 nt, Variola virus
augaccaaugaaugg

SEQ ID NO: 3283238 - RNA, 12 nt, Variola virus
uaucauagaugc

SEQ ID NO: 3283239 - RNA, 15 nt, Variola virus
gauaacaaauuaaag

SEQ ID NO: 3283240 - RNA, 15 nt, Variola virus
auaggaccauacauu

SEQ ID NO: 3283241 - RNA, 20 nt, Variola virus
cuauuacaccgccuccuaua

SEQ ID NO: 3283242 - RNA, 15 nt, Variola virus
cauagauuuccgaag

SEQ ID NO: 3283243 - RNA, 16 nt, Variola virus
caaguuugagauuuca

SEQ ID NO: 3283244 - RNA, 18 nt, Variola virus
caaaacuucacagaugau

SEQ ID NO: 3283245 - RNA, 14 nt, Variola virus
uuaaucauuaacuu

SEQ ID NO: 3283246 - RNA, 20 nt, Variola virus
auugucuagauaaaauacug

SEQ ID NO: 3283247 - RNA, 14 nt, Variola virus
cacuagaaaccacg

SEQ ID NO: 3283248 - RNA, 20 nt, Variola virus
aacaaucguuaauaaaucug

SEQ ID NO: 3283249 - RNA, 16 nt, Variola virus
aacuauuaauauuaac

SEQ ID NO: 3283250 - RNA, 15 nt, Variola virus
cuacaguaaugucca

SEQ ID NO: 3283251 - RNA, 17 nt, Variola virus
uuaacaaaaucuuuaau

SEQ ID NO: 3283252 - RNA, 17 nt, Variola virus
uaacaacaucuauucca

SEQ ID NO: 3283253 - RNA, 15 nt, Variola virus
aguauucaagucaaa

SEQ ID NO: 3283254 - RNA, 21 nt, Variola virus
cauuuuauggaaacuauaauu

SEQ ID NO: 3283255 - RNA, 15 nt, Variola virus
ucugucagaaaauac

SEQ ID NO: 3283256 - RNA, 16 nt, Variola virus
aaaugucccucauaau

SEQ ID NO: 3283257 - RNA, 20 nt, Variola virus
ugaauaucuacaaauuggag

SEQ ID NO: 3283258 - RNA, 14 nt, Variola virus
uaacucuguuuuau

SEQ ID NO: 3283259 - RNA, 18 nt, Variola virus
ugauuuucguaacagaua

SEQ ID NO: 3283260 - RNA, 23 nt, Variola virus
ugcagcaacuucuguacuagugg

SEQ ID NO: 3283261 - RNA, 24 nt, Variola virus
gcuagagauaaucagauuagcuuu

SEQ ID NO: 3283262 - RNA, 16 nt, Variola virus
aauuauaagaaauaua

SEQ ID NO: 3283263 - RNA, 21 nt, Variola virus
uauuuucgaaacucguaaaaa

SEQ ID NO: 3283264 - RNA, 23 nt, Variola virus
uuaaaaaaauuauccuaucaugu

SEQ ID NO: 3283265 - RNA, 21 nt, Variola virus
caaagaauuuuagacacuaac

SEQ ID NO: 3283266 - RNA, 20 nt, Variola virus
auacaccauuccauuuguau

SEQ ID NO: 3283267 - RNA, 14 nt, Variola virus
cauuuauagcauuu

SEQ ID NO: 3283268 - RNA, 23 nt, Variola virus
auguuugcugaagucaaauacga

SEQ ID NO: 3283269 - RNA, 14 nt, Variola virus
uagaaaucauauau

SEQ ID NO: 3283270 - RNA, 16 nt, Variola virus
agaauccauaaaacaa

SEQ ID NO: 3283271 - RNA, 17 nt, Variola virus
auuaauagauauaucuc

SEQ ID NO: 3283272 - RNA, 17 nt, Variola virus
cagacacagacgauauu

SEQ ID NO: 3283273 - RNA, 14 nt, Variola virus
auuacaauuaauaa

SEQ ID NO: 3283274 - RNA, 22 nt, Variola virus
uagcagcugauacgucauuaac

SEQ ID NO: 3283275 - RNA, 21 nt, Variola virus
uaacaucacuaauaucaauau

SEQ ID NO: 3283276 - RNA, 12 nt, Variola virus
gacaucaugaac

SEQ ID NO: 3283277 - RNA, 17 nt, Variola virus
aauaaauauccuuggaa

SEQ ID NO: 3283278 - RNA, 15 nt, Variola virus
cguguguuucaggau

SEQ ID NO: 3283279 - RNA, 17 nt, Variola virus
acaacaucuaacuauau

SEQ ID NO: 3283280 - RNA, 18 nt, Variola virus
auagauauaccagaacua

SEQ ID NO: 3283281 - RNA, 13 nt, Variola virus
aaaagagaauaua

SEQ ID NO: 3283282 - RNA, 12 nt, Variola virus
aguauacauguu

SEQ ID NO: 3283283 - RNA, 14 nt, Variola virus
uuaucuaucuuaaa

SEQ ID NO: 3283284 - RNA, 16 nt, Variola virus
auauccauuuuacauu

SEQ ID NO: 3283285 - RNA, 14 nt, Variola virus
auguuagaaaaaug

SEQ ID NO: 3283286 - RNA, 15 nt, Variola virus
acucacaaucacugu

SEQ ID NO: 3283287 - RNA, 19 nt, Variola virus
augugagagagaaauacuu

SEQ ID NO: 3283288 - RNA, 16 nt, Variola virus
auaccuuguaauuaaa

SEQ ID NO: 3283289 - RNA, 12 nt, Variola virus
ugccaauaauga

SEQ ID NO: 3283290 - RNA, 19 nt, Variola virus
agcauacaaauuacaauaa

SEQ ID NO: 3283291 - RNA, 22 nt, Variola virus
gucauccuucacucguuucaua

SEQ ID NO: 3283292 - RNA, 19 nt, Variola virus
acagaaauauaugagaugu

SEQ ID NO: 3283293 - RNA, 23 nt, Variola virus
aguuauggacauaguaauacaua

SEQ ID NO: 3283294 - RNA, 14 nt, Variola virus
uuuucaucauuuca

SEQ ID NO: 3283295 - RNA, 20 nt, Variola virus
gaauuguugucgguaaacga

SEQ ID NO: 3283296 - RNA, 17 nt, Variola virus
cauuuucacaaauacua

SEQ ID NO: 3283297 - RNA, 21 nt, Variola virus
gaucuagcaaaggaaauugug

SEQ ID NO: 3283298 - RNA, 18 nt, Variola virus
gaaacaucucuucuaguu

SEQ ID NO: 3283299 - RNA, 17 nt, Variola virus
aauuaacgaugagugca

SEQ ID NO: 3283300 - RNA, 17 nt, Variola virus
guaaauugguacauaga

SEQ ID NO: 3283301 - RNA, 17 nt, Variola virus
aagauacuguuuagaga

SEQ ID NO: 3283302 - RNA, 20 nt, Variola virus
uaacucauucuauauaugcu

SEQ ID NO: 3283303 - RNA, 15 nt, Variola virus
ugguaucaacagaua

SEQ ID NO: 3283304 - RNA, 16 nt, Variola virus
gcaucaaaaaauguaa

SEQ ID NO: 3283305 - RNA, 22 nt, Variola virus
uuuggcuaaauuauauaauucu

SEQ ID NO: 3283306 - RNA, 16 nt, Variola virus
cauguugucuauuuuc

SEQ ID NO: 3283307 - RNA, 15 nt, Variola virus
caauucaugcucuau

SEQ ID NO: 3283308 - RNA, 15 nt, Variola virus
uuaacuaucuguaaa

SEQ ID NO: 3283309 - RNA, 21 nt, Variola virus
aaaaauguaaaauauuuuucu

SEQ ID NO: 3283310 - RNA, 16 nt, Variola virus
guugauuacucuuuuu

SEQ ID NO: 3283311 - RNA, 11 nt, Variola virus
ugcgauacauu

SEQ ID NO: 3283312 - RNA, 12 nt, Variola virus
cuauucauguaa

SEQ ID NO: 3283313 - RNA, 19 nt, Variola virus
gcuauguuucguccaucau

SEQ ID NO: 3283314 - RNA, 19 nt, Variola virus
uuauaucguuaucauuaau

SEQ ID NO: 3283315 - RNA, 22 nt, Variola virus
gcucucguacaguagagauauu

SEQ ID NO: 3283316 - RNA, 15 nt, Variola virus
ccagaaguauuuuua

SEQ ID NO: 3283317 - RNA, 12 nt, Variola virus
auuuuuaucaua

SEQ ID NO: 3283318 - RNA, 15 nt, Variola virus
cuuauuauauuuccc

SEQ ID NO: 3283319 - RNA, 16 nt, Variola virus
uuagccguuguuugag

SEQ ID NO: 3283320 - RNA, 17 nt, Variola virus
augauucgauaaauaaa

SEQ ID NO: 3283321 - RNA, 12 nt, Variola virus
uuucgauuucaa

SEQ ID NO: 3283322 - RNA, 19 nt, Variola virus
ucuauaaucacuauucaga

SEQ ID NO: 3283323 - RNA, 15 nt, Variola virus
auuaacaucauacau

SEQ ID NO: 3283324 - RNA, 11 nt, Variola virus
aacaauguuuc

SEQ ID NO: 3283325 - RNA, 14 nt, Variola virus
uacucauuaucaua

SEQ ID NO: 3283326 - RNA, 16 nt, Variola virus
accagcggcuacuaaa

SEQ ID NO: 3283327 - RNA, 15 nt, Variola virus
aauguuauagaaaau

SEQ ID NO: 3283328 - RNA, 19 nt, Variola virus
auuacauccgaaaaaguug

SEQ ID NO: 3283329 - RNA, 18 nt, Variola virus
uaauauuucuauuucuau

SEQ ID NO: 3283330 - RNA, 13 nt, Variola virus
aucuauguagaau

SEQ ID NO: 3283331 - RNA, 12 nt, Variola virus
ucaauaaaugug

SEQ ID NO: 3283332 - RNA, 20 nt, Variola virus
aauacuuaccccuugaucgu

SEQ ID NO: 3283333 - RNA, 24 nt, Variola virus
cuagacgauuaguaauauaucuca

SEQ ID NO: 3283334 - RNA, 20 nt, Variola virus
acgaacauuuauaucauuug

SEQ ID NO: 3283335 - RNA, 16 nt, Variola virus
uacaguaauuaaugag

SEQ ID NO: 3283336 - RNA, 15 nt, Variola virus
gaucuaaaaauuaaa

SEQ ID NO: 3283337 - RNA, 23 nt, Variola virus
acgcagaaauugguauaaauguu

SEQ ID NO: 3283338 - RNA, 21 nt, Variola virus
gccaagauaucuauauaauua

SEQ ID NO: 3283339 - RNA, 19 nt, Variola virus
auaacuaaaguuaauacua

SEQ ID NO: 3283340 - RNA, 13 nt, Variola virus
gaacagaugauau

SEQ ID NO: 3283341 - RNA, 15 nt, Variola virus
auaaucguuaauauu

SEQ ID NO: 3283342 - RNA, 15 nt, Variola virus
aaguuuaaaaaagac

SEQ ID NO: 3283343 - RNA, 22 nt, Variola virus
auuuaggagugaucaucaaaug

SEQ ID NO: 3283344 - RNA, 18 nt, Variola virus
uucuaacaucauuauuuu

SEQ ID NO: 3283345 - RNA, 13 nt, Variola virus
cuaauggauguca

SEQ ID NO: 3283346 - RNA, 12 nt, Variola virus
uuaauauguaua

SEQ ID NO: 3283347 - RNA, 15 nt, Variola virus
aaaacgauuaaacaa

SEQ ID NO: 3283348 - RNA, 20 nt, Variola virus
aauccagucuuuaaugaauu

SEQ ID NO: 3283349 - RNA, 16 nt, Variola virus
auuaacaagucauuua

SEQ ID NO: 3283350 - RNA, 17 nt, Variola virus
agcacuguggaugugac

SEQ ID NO: 3283351 - RNA, 16 nt, Variola virus
caauaagcauuaugau

SEQ ID NO: 3283352 - RNA, 15 nt, Variola virus
uaauauuuuauuaca

SEQ ID NO: 3283353 - RNA, 16 nt, Variola virus
auaucgauguuaauaa

SEQ ID NO: 3283354 - RNA, 20 nt, Variola virus
gucuauccauuguuucacau

SEQ ID NO: 3283355 - RNA, 17 nt, Variola virus
gccaaucuauaauagau

SEQ ID NO: 3283356 - RNA, 13 nt, Variola virus
aacauuagaauua

SEQ ID NO: 3283357 - RNA, 21 nt, Variola virus
agacacauaugcgaucagaua

SEQ ID NO: 3283358 - RNA, 12 nt, Variola virus
uggaauauacau

SEQ ID NO: 3283359 - RNA, 23 nt, Variola virus
auguuuggaaugacgaauccugu

SEQ ID NO: 3283360 - RNA, 17 nt, Variola virus
aaaggugacacauguac

SEQ ID NO: 3283361 - RNA, 17 nt, Variola virus
auuuaagugaugcauuc

SEQ ID NO: 3283362 - RNA, 18 nt, Variola virus
caauuaguuaauaaugau

SEQ ID NO: 3283363 - RNA, 17 nt, Variola virus
auaauaaaaguuaucca

SEQ ID NO: 3283364 - RNA, 18 nt, Variola virus
aaagggauauauauugca

SEQ ID NO: 3283365 - RNA, 20 nt, Variola virus
uaagacacagaaauacugua

SEQ ID NO: 3283366 - RNA, 16 nt, Variola virus
auugugauaaauguuc

SEQ ID NO: 3283367 - RNA, 13 nt, Variola virus
acacuucuagaua

SEQ ID NO: 3283368 - RNA, 14 nt, Variola virus
cuucuacauuuuca

SEQ ID NO: 3283369 - RNA, 13 nt, Variola virus
auguuuucacaau

SEQ ID NO: 3283370 - RNA, 22 nt, Variola virus
gauaaguuucggcacauauuaa

SEQ ID NO: 3283371 - RNA, 21 nt, Variola virus
gaugaucuaguuacaacuauu

SEQ ID NO: 3283372 - RNA, 14 nt, Variola virus
auagagaacauaau

SEQ ID NO: 3283373 - RNA, 11 nt, Variola virus
ggaaacuauaa

SEQ ID NO: 3283374 - RNA, 18 nt, Variola virus
aagaagagaauuaaaaga

SEQ ID NO: 3283375 - RNA, 14 nt, Variola virus
caaacaauguuucu

SEQ ID NO: 3283376 - RNA, 13 nt, Variola virus
uaccuuaaucaug

SEQ ID NO: 3283377 - RNA, 19 nt, Variola virus
uacuaaauucaauaucuuu

SEQ ID NO: 3283378 - RNA, 18 nt, Variola virus
aauacauuaucaugcuug

SEQ ID NO: 3283379 - RNA, 20 nt, Variola virus
aaucugauagaaagaauaag

SEQ ID NO: 3283380 - RNA, 17 nt, Variola virus
guuucaaaaauauucau

SEQ ID NO: 3283381 - RNA, 15 nt, Variola virus
uagaugauauuguaa

SEQ ID NO: 3283382 - RNA, 14 nt, Variola virus
auaucuuguucuau

SEQ ID NO: 3283383 - RNA, 24 nt, Variola virus
guaucgcuggaagggacuauauga

SEQ ID NO: 3283384 - RNA, 22 nt, Variola virus
uccaggaucguuucuacaaaau

SEQ ID NO: 3283385 - RNA, 16 nt, Variola virus
gaauuguuucuuuuag

SEQ ID NO: 3283386 - RNA, 15 nt, Variola virus
auaaguaaaugaaaa

SEQ ID NO: 3283387 - RNA, 23 nt, Variola virus
augauucuaucuacaucuucaau

SEQ ID NO: 3283388 - RNA, 15 nt, Variola virus
cgauauuaguacaga

SEQ ID NO: 3283389 - RNA, 17 nt, Variola virus
caggauaaggaauugua

SEQ ID NO: 3283390 - RNA, 12 nt, Variola virus
acaaguuuucau

SEQ ID NO: 3283391 - RNA, 19 nt, Variola virus
aauaauuguuauuauuuca

SEQ ID NO: 3283392 - RNA, 14 nt, Variola virus
auacaaauuuuacu

SEQ ID NO: 3283393 - RNA, 15 nt, Variola virus
ugaauggauuuauca

SEQ ID NO: 3283394 - RNA, 23 nt, Variola virus
gucgcaacgggguaguucguaga

SEQ ID NO: 3283395 - RNA, 17 nt, Variola virus
ugaugacacuagaugau

SEQ ID NO: 3283396 - RNA, 16 nt, Variola virus
ucuuauccauuuauaa

SEQ ID NO: 3283397 - RNA, 15 nt, Variola virus
cuaauagacggcauu

SEQ ID NO: 3283398 - RNA, 16 nt, Variola virus
uagauacaacgucauc

SEQ ID NO: 3283399 - RNA, 19 nt, Variola virus
gcaaaucacucaauaucua

SEQ ID NO: 3283400 - RNA, 21 nt, Variola virus
ucuagugcuuguauguguuau

SEQ ID NO: 3283401 - RNA, 23 nt, Variola virus
auuaaagagauaguuuuuuucau

SEQ ID NO: 3283402 - RNA, 18 nt, Variola virus
auacuuuaaagcaaaaug

SEQ ID NO: 3283403 - RNA, 21 nt, Variola virus
aaacuauuacuaggagaauua

SEQ ID NO: 3283404 - RNA, 17 nt, Variola virus
aucuucauaauaaauaa

SEQ ID NO: 3283405 - RNA, 14 nt, Variola virus
caugaccuucuuca

SEQ ID NO: 3283406 - RNA, 22 nt, Variola virus
gaauaauaugacucaugaucua

SEQ ID NO: 3283407 - RNA, 22 nt, Variola virus
gucuacauucuugacuguuuua

SEQ ID NO: 3283408 - RNA, 21 nt, Variola virus
auccaaguuaaaggauauuau

SEQ ID NO: 3283409 - RNA, 17 nt, Variola virus
gaaugggugucaucuau

SEQ ID NO: 3283410 - RNA, 20 nt, Variola virus
guaacaacuaacgauaaaaa

SEQ ID NO: 3283411 - RNA, 22 nt, Variola virus
uagccaugggaacaguaaugau

SEQ ID NO: 3283412 - RNA, 13 nt, Variola virus
cuguuagaugagg

SEQ ID NO: 3283413 - RNA, 17 nt, Variola virus
gcuauaacuugcuucaa

SEQ ID NO: 3283414 - RNA, 18 nt, Variola virus
gcucaaagucgaauuaga

SEQ ID NO: 3283415 - RNA, 16 nt, Variola virus
auucagacacuucuua

SEQ ID NO: 3283416 - RNA, 15 nt, Variola virus
aaaguuucacaugaa

SEQ ID NO: 3283417 - RNA, 22 nt, Variola virus
aaagacuuucguuaauuugucu

SEQ ID NO: 3283418 - RNA, 19 nt, Variola virus
agauuuugacuuacauaaa

SEQ ID NO: 3283419 - RNA, 21 nt, Variola virus
uauuauguuaacggaaaguau

SEQ ID NO: 3283420 - RNA, 12 nt, Variola virus
aaauaauaauau

SEQ ID NO: 3283421 - RNA, 16 nt, Variola virus
uuagcaauuucugauu

SEQ ID NO: 3283422 - RNA, 16 nt, Variola virus
aucuuaccaucuucuu

SEQ ID NO: 3283423 - RNA, 13 nt, Variola virus
uagauuuaucuag

SEQ ID NO: 3283424 - RNA, 20 nt, Variola virus
guaauguucucgaugaugau

SEQ ID NO: 3283425 - RNA, 20 nt, Variola virus
auuaaacuaauucauuuuca

SEQ ID NO: 3283426 - RNA, 12 nt, Variola virus
cacuaucuucug

SEQ ID NO: 3283427 - RNA, 14 nt, Variola virus
aagggaaaaugcua

SEQ ID NO: 3283428 - RNA, 20 nt, Variola virus
uuaacauuuuggcaaauuga

SEQ ID NO: 3283429 - RNA, 19 nt, Variola virus
cugcuccagaauuaauaau

SEQ ID NO: 3283430 - RNA, 14 nt, Variola virus
aaaauucauuagaa

SEQ ID NO: 3283431 - RNA, 14 nt, Variola virus
augaguuagauuac

SEQ ID NO: 3283432 - RNA, 21 nt, Variola virus
uuauacgaaaaaaaucauuaa

SEQ ID NO: 3283433 - RNA, 13 nt, Variola virus
aucauuucucaau

SEQ ID NO: 3283434 - RNA, 16 nt, Variola virus
aguuccucaacgugau

SEQ ID NO: 3283435 - RNA, 22 nt, Variola virus
ugaaucaaauguaacuauucaa

SEQ ID NO: 3283436 - RNA, 22 nt, Variola virus
agaaugcagaaaugauuuugga

SEQ ID NO: 3283437 - RNA, 22 nt, Variola virus
aauuaauuuuuccuuacacaau

SEQ ID NO: 3283438 - RNA, 16 nt, Variola virus
uucuauaauaaacuuu

SEQ ID NO: 3283439 - RNA, 19 nt, Variola virus
agauuucaacagacuguuu

SEQ ID NO: 3283440 - RNA, 22 nt, Variola virus
aauaugcuaguuaauaguaaau

SEQ ID NO: 3283441 - RNA, 16 nt, Variola virus
cuaucuucaucauauu

SEQ ID NO: 3283442 - RNA, 20 nt, Variola virus
uaauacccugguagaagaau

SEQ ID NO: 3283443 - RNA, 21 nt, Variola virus
uuuacaaauugggaucaucca

SEQ ID NO: 3283444 - RNA, 11 nt, Variola virus
gacaugaugau

SEQ ID NO: 3283445 - RNA, 20 nt, Variola virus
aguauugucaucaucaugau

SEQ ID NO: 3283446 - RNA, 15 nt, Variola virus
ucauccaugguuuua

SEQ ID NO: 3283447 - RNA, 16 nt, Variola virus
aauugaaucuuaguaa

SEQ ID NO: 3283448 - RNA, 14 nt, Variola virus
aguggaguaauuua

SEQ ID NO: 3283449 - RNA, 14 nt, Variola virus
agaaugaauguuua

SEQ ID NO: 3283450 - RNA, 15 nt, Variola virus
gcugacuauaacaga

SEQ ID NO: 3283451 - RNA, 17 nt, Variola virus
augucaucgaaauggua

SEQ ID NO: 3283452 - RNA, 16 nt, Variola virus
aacucuugaagaugau

SEQ ID NO: 3283453 - RNA, 16 nt, Variola virus
cuuauucuuaaaaucu

SEQ ID NO: 3283454 - RNA, 16 nt, Variola virus
uauaacuucuaaucuu

SEQ ID NO: 3283455 - RNA, 12 nt, Variola virus
gcucuacaaaau

SEQ ID NO: 3283456 - RNA, 21 nt, Variola virus
gugauaccgauagugauuuug

SEQ ID NO: 3283457 - RNA, 15 nt, Variola virus
aauacuuaguuucca

SEQ ID NO: 3283458 - RNA, 15 nt, Variola virus
aaauauaaaauauau

SEQ ID NO: 3283459 - RNA, 19 nt, Variola virus
gccgguugccgcaaauaga

SEQ ID NO: 3283460 - RNA, 15 nt, Variola virus
aaaguuuuauaugua

SEQ ID NO: 3283461 - RNA, 18 nt, Variola virus
uuugauagggacaaagua

SEQ ID NO: 3283462 - RNA, 13 nt, Variola virus
uuacuauuacuag

SEQ ID NO: 3283463 - RNA, 21 nt, Variola virus
uuacugggauaagauuucuaa

SEQ ID NO: 3283464 - RNA, 14 nt, Variola virus
auauggauuuccag

SEQ ID NO: 3283465 - RNA, 18 nt, Variola virus
ccggaguaauugauuaua

SEQ ID NO: 3283466 - RNA, 15 nt, Variola virus
uuugcuuuuucuauu

SEQ ID NO: 3283467 - RNA, 20 nt, Variola virus
uauaagauuaucaaaaucuu

SEQ ID NO: 3283468 - RNA, 14 nt, Variola virus
ucaacaucuuuaau

SEQ ID NO: 3283469 - RNA, 21 nt, Variola virus
gauucucgauagagaugagau

SEQ ID NO: 3283470 - RNA, 17 nt, Variola virus
auaguuaucuaucuuaa

SEQ ID NO: 3283471 - RNA, 16 nt, Variola virus
gcacauguauaauaua

SEQ ID NO: 3283472 - RNA, 15 nt, Variola virus
uguuuguucauugga

SEQ ID NO: 3283473 - RNA, 19 nt, Variola virus
gaauaucacauaucauguu

SEQ ID NO: 3283474 - RNA, 18 nt, Variola virus
uauauauuagauacaguu

SEQ ID NO: 3283475 - RNA, 18 nt, Variola virus
gauuguuuaagaagagaa

SEQ ID NO: 3283476 - RNA, 21 nt, Variola virus
acaauuagaacagggaauuac

SEQ ID NO: 3283477 - RNA, 20 nt, Variola virus
aucauccaauauuauugaaa

SEQ ID NO: 3283478 - RNA, 15 nt, Variola virus
uuuaugcuucguaaa

SEQ ID NO: 3283479 - RNA, 17 nt, Variola virus
ucuuuaauagugucauu

SEQ ID NO: 3283480 - RNA, 18 nt, Variola virus
aaucauccuaagaugaua

SEQ ID NO: 3283481 - RNA, 20 nt, Variola virus
gaggaaguauaaaaauuaaa

SEQ ID NO: 3283482 - RNA, 17 nt, Variola virus
auuaaugcuacagauau

SEQ ID NO: 3283483 - RNA, 17 nt, Variola virus
gauucuaguaucuuuug

SEQ ID NO: 3283484 - RNA, 17 nt, Variola virus
uuaguaacucuaguaaa

SEQ ID NO: 3283485 - RNA, 15 nt, Variola virus
aucuauguuuaacuu

SEQ ID NO: 3283486 - RNA, 19 nt, Variola virus
uugacguaugcaguuacau

SEQ ID NO: 3283487 - RNA, 21 nt, Variola virus
gacucgcguuuagaggaguga

SEQ ID NO: 3283488 - RNA, 23 nt, Variola virus
agauaaauuuaucaauaaaugug

SEQ ID NO: 3283489 - RNA, 16 nt, Variola virus
acaaaagaguuaaguu

SEQ ID NO: 3283490 - RNA, 17 nt, Variola virus
auugauuacuauaaaug

SEQ ID NO: 3283491 - RNA, 17 nt, Variola virus
agcuugauaauuagaua

SEQ ID NO: 3283492 - RNA, 17 nt, Variola virus
acaugucucucucaaau

SEQ ID NO: 3283493 - RNA, 16 nt, Variola virus
acucaaacuaaauguc

SEQ ID NO: 3283494 - RNA, 15 nt, Variola virus
gaaucuaaugaugac

SEQ ID NO: 3283495 - RNA, 14 nt, Variola virus
aacgccuuuagaaa

SEQ ID NO: 3283496 - RNA, 16 nt, Variola virus
aaggagauauugaaac

SEQ ID NO: 3283497 - RNA, 14 nt, Variola virus
aaaugguguaacuc

SEQ ID NO: 3283498 - RNA, 23 nt, Variola virus
auaacucaauuaguuauugccaa

SEQ ID NO: 3283499 - RNA, 16 nt, Variola virus
aaccgacauuaccauc

SEQ ID NO: 3283500 - RNA, 17 nt, Variola virus
uaacuaucuuucaagau

SEQ ID NO: 3283501 - RNA, 22 nt, Variola virus
aguuucuugcguuuaauaaaca

SEQ ID NO: 3283502 - RNA, 21 nt, Variola virus
auacacaugauugacaaauua

SEQ ID NO: 3283503 - RNA, 16 nt, Variola virus
uugauguuacauuaua

SEQ ID NO: 3283504 - RNA, 15 nt, Variola virus
aauugcgguaucuau

SEQ ID NO: 3283505 - RNA, 17 nt, Variola virus
caauaauauuaugucua

SEQ ID NO: 3283506 - RNA, 20 nt, Variola virus
ggaucuccaucauccacaug

SEQ ID NO: 3283507 - RNA, 17 nt, Variola virus
cauuuaaauaucauaau

SEQ ID NO: 3283508 - RNA, 17 nt, Variola virus
uuuauaugguguuucua

SEQ ID NO: 3283509 - RNA, 22 nt, Variola virus
ugagaucccacaucauuucaac

SEQ ID NO: 3283510 - RNA, 18 nt, Variola virus
agcaagauuuuuaaacaa

SEQ ID NO: 3283511 - RNA, 17 nt, Variola virus
acagaucaaaaaauaua

SEQ ID NO: 3283512 - RNA, 12 nt, Variola virus
gacguaaaugug

SEQ ID NO: 3283513 - RNA, 14 nt, Variola virus
caacuuuuaaauac

SEQ ID NO: 3283514 - RNA, 23 nt, Variola virus
uuuucgguacucagauucaguuu

SEQ ID NO: 3283515 - RNA, 19 nt, Variola virus
auuguugccguaaauccug

SEQ ID NO: 3283516 - RNA, 19 nt, Variola virus
aaugaacaucggaaauaua

SEQ ID NO: 3283517 - RNA, 13 nt, Variola virus
aauuuuaaaugau

SEQ ID NO: 3283518 - RNA, 20 nt, Variola virus
cgaauaauguauagcauugc

SEQ ID NO: 3283519 - RNA, 16 nt, Variola virus
uauccaauacagaaug

SEQ ID NO: 3283520 - RNA, 22 nt, Variola virus
uuaauaaauccggaacuguaaa

SEQ ID NO: 3283521 - RNA, 14 nt, Variola virus
uacaugaaggacuu

SEQ ID NO: 3283522 - RNA, 17 nt, Variola virus
ucugauacaacaauaua

SEQ ID NO: 3283523 - RNA, 21 nt, Variola virus
agauaaagaguccuauauauu

SEQ ID NO: 3283524 - RNA, 13 nt, Variola virus
aucugaucuuguu

SEQ ID NO: 3283525 - RNA, 15 nt, Variola virus
ucucaauacaaccaa

SEQ ID NO: 3283526 - RNA, 13 nt, Variola virus
aguaucaaacucu

SEQ ID NO: 3283527 - RNA, 15 nt, Variola virus
aucugaugaauaauu

SEQ ID NO: 3283528 - RNA, 19 nt, Variola virus
augaacuagacaauaaugu

SEQ ID NO: 3283529 - RNA, 16 nt, Variola virus
uccuauccuuguacaa

SEQ ID NO: 3283530 - RNA, 14 nt, Variola virus
gauccuuuaagaga

SEQ ID NO: 3283531 - RNA, 16 nt, Variola virus
auacacauuuaauaaa

SEQ ID NO: 3283532 - RNA, 12 nt, Variola virus
ucuauguaucua

SEQ ID NO: 3283533 - RNA, 14 nt, Variola virus
ucccacaaauacug

SEQ ID NO: 3283534 - RNA, 20 nt, Variola virus
gaauccauuuucccaaauau

SEQ ID NO: 3283535 - RNA, 23 nt, Variola virus
gaaaguauuuuuguguuaaaaca

SEQ ID NO: 3283536 - RNA, 13 nt, Variola virus
cuuaguaacucua

SEQ ID NO: 3283537 - RNA, 14 nt, Variola virus
gauacuauaaugaa

SEQ ID NO: 3283538 - RNA, 13 nt, Variola virus
gaaucacaaacau

SEQ ID NO: 3283539 - RNA, 14 nt, Variola virus
cagaggaaauauca

SEQ ID NO: 3283540 - RNA, 12 nt, Variola virus
acaacaaaugau

SEQ ID NO: 3283541 - RNA, 15 nt, Variola virus
uuuuuggauuucaua

SEQ ID NO: 3283542 - RNA, 18 nt, Variola virus
aauggauauucgaacauu

SEQ ID NO: 3283543 - RNA, 18 nt, Variola virus
uuugauaaaucucuucuu

SEQ ID NO: 3283544 - RNA, 14 nt, Variola virus
ucucauguucuuaa

SEQ ID NO: 3283545 - RNA, 15 nt, Variola virus
ucucgucguccaaua

SEQ ID NO: 3283546 - RNA, 16 nt, Variola virus
aucuucauuaucugau

SEQ ID NO: 3283547 - RNA, 20 nt, Variola virus
caaaugauauaagacuaaca

SEQ ID NO: 3283548 - RNA, 21 nt, Variola virus
aauuauuccuaauuaagaaaa

SEQ ID NO: 3283549 - RNA, 19 nt, Variola virus
uaaauguuuaaacaucaaa

SEQ ID NO: 3283550 - RNA, 16 nt, Variola virus
uaaauuuuacaaaucu

SEQ ID NO: 3283551 - RNA, 20 nt, Variola virus
auucaaaaaggaauuuacca

SEQ ID NO: 3283552 - RNA, 11 nt, Variola virus
gguguauauaa

SEQ ID NO: 3283553 - RNA, 22 nt, Variola virus
uagaauguugagcuaauuuuug

SEQ ID NO: 3283554 - RNA, 23 nt, Variola virus
augauucauuuuuuaaguauuug

SEQ ID NO: 3283555 - RNA, 20 nt, Variola virus
agguaagauaucuacuagaa

SEQ ID NO: 3283556 - RNA, 12 nt, Variola virus
aacacagccaua

SEQ ID NO: 3283557 - RNA, 14 nt, Variola virus
ucguauaaauacug

SEQ ID NO: 3283558 - RNA, 23 nt, Variola virus
agaaaacucguuauuaacuaugu

SEQ ID NO: 3283559 - RNA, 14 nt, Variola virus
auauacagucuuaa

SEQ ID NO: 3283560 - RNA, 15 nt, Variola virus
uaauacgaguuauau

SEQ ID NO: 3283561 - RNA, 19 nt, Variola virus
aaugucuauuauaaagaua

SEQ ID NO: 3283562 - RNA, 15 nt, Variola virus
aauaaauaacaaugg

SEQ ID NO: 3283563 - RNA, 23 nt, Variola virus
aauacguccaucagcauuguuuc

SEQ ID NO: 3283564 - RNA, 14 nt, Variola virus
uuacucuucuaaau

SEQ ID NO: 3283565 - RNA, 16 nt, Variola virus
uugagcaguugaugca

SEQ ID NO: 3283566 - RNA, 20 nt, Variola virus
aguuaaauucauauaaagua

SEQ ID NO: 3283567 - RNA, 20 nt, Variola virus
aaucuagccauugucuuaua

SEQ ID NO: 3283568 - RNA, 20 nt, Variola virus
aaccucacuguuaaaaauau

SEQ ID NO: 3283569 - RNA, 19 nt, Variola virus
cuauaugacuguauuugga

SEQ ID NO: 3283570 - RNA, 16 nt, Variola virus
agaauuuauauaaauu

SEQ ID NO: 3283571 - RNA, 23 nt, Variola virus
ucaacaaugucugucauauguau

SEQ ID NO: 3283572 - RNA, 20 nt, Variola virus
uaguaauuaaauauaucaug

SEQ ID NO: 3283573 - RNA, 15 nt, Variola virus
augacucucaaauua

SEQ ID NO: 3283574 - RNA, 17 nt, Variola virus
cauuuuacuuuaacaau

SEQ ID NO: 3283575 - RNA, 20 nt, Variola virus
aacucaguuaacauacagga

SEQ ID NO: 3283576 - RNA, 17 nt, Variola virus
uagaaacuucaaagauu

SEQ ID NO: 3283577 - RNA, 16 nt, Variola virus
auauccuccuguagau

SEQ ID NO: 3283578 - RNA, 15 nt, Variola virus
uaacguuaaacauua

SEQ ID NO: 3283579 - RNA, 14 nt, Variola virus
uguaauaguuucca

SEQ ID NO: 3283580 - RNA, 18 nt, Variola virus
acugcuuuaggugcugaa

SEQ ID NO: 3283581 - RNA, 23 nt, Variola virus
ugauucuguagaugccauaucau

SEQ ID NO: 3283582 - RNA, 17 nt, Variola virus
gaugaggaagcauauuc

SEQ ID NO: 3283583 - RNA, 14 nt, Variola virus
agcuacucuagauu

SEQ ID NO: 3283584 - RNA, 21 nt, Variola virus
cuugcuagacaccuuuucaau

SEQ ID NO: 3283585 - RNA, 22 nt, Variola virus
guguuccggagaaucaguaaag

SEQ ID NO: 3283586 - RNA, 23 nt, Variola virus
uccauagacagcuucuagaaguu

SEQ ID NO: 3283587 - RNA, 15 nt, Variola virus
agaugaugcaaauaa

SEQ ID NO: 3283588 - RNA, 14 nt, Variola virus
gcuaauauauugau

SEQ ID NO: 3283589 - RNA, 17 nt, Variola virus
accaagaaaucguauau

SEQ ID NO: 3283590 - RNA, 19 nt, Variola virus
aguguauguggaaauguua

SEQ ID NO: 3283591 - RNA, 13 nt, Variola virus
uaacauguuaauu

SEQ ID NO: 3283592 - RNA, 18 nt, Variola virus
acguuguacguuaaagca

SEQ ID NO: 3283593 - RNA, 16 nt, Variola virus
agacacuaacucuguu

SEQ ID NO: 3283594 - RNA, 11 nt, Variola virus
aaccaaaucaa

SEQ ID NO: 3283595 - RNA, 18 nt, Variola virus
agccgcuggguuguaaac

SEQ ID NO: 3283596 - RNA, 14 nt, Variola virus
uugaaucuauuucu

SEQ ID NO: 3283597 - RNA, 21 nt, Variola virus
auguauuugagagucuuauau

SEQ ID NO: 3283598 - RNA, 19 nt, Variola virus
uauugugucuguuaauaga

SEQ ID NO: 3283599 - RNA, 20 nt, Variola virus
ucaucggacuuugugcauau

SEQ ID NO: 3283600 - RNA, 22 nt, Variola virus
auggagaagguuucgauuaucu

SEQ ID NO: 3283601 - RNA, 20 nt, Variola virus
aauauauacuucaauugaua

SEQ ID NO: 3283602 - RNA, 19 nt, Variola virus
auaaucggguucugcuuca

SEQ ID NO: 3283603 - RNA, 18 nt, Variola virus
auuuugacuuacauaaau

SEQ ID NO: 3283604 - RNA, 14 nt, Variola virus
aaguauauguagga

SEQ ID NO: 3283605 - RNA, 21 nt, Variola virus
uaguuuuuuuagaaaauucua

SEQ ID NO: 3283606 - RNA, 19 nt, Variola virus
acuuuaaagcaaaaugguu

SEQ ID NO: 3283607 - RNA, 14 nt, Variola virus
acuauagacauaau

SEQ ID NO: 3283608 - RNA, 16 nt, Variola virus
auuaauaaaaauaauu

SEQ ID NO: 3283609 - RNA, 18 nt, Variola virus
uaguauuuauacuacuaa

SEQ ID NO: 3283610 - RNA, 18 nt, Variola virus
uaaaucuauuauauuuua

SEQ ID NO: 3283611 - RNA, 19 nt, Variola virus
agauucauguuaacacucu

SEQ ID NO: 3283612 - RNA, 20 nt, Variola virus
uaguagucuaccgaucucuu

SEQ ID NO: 3283613 - RNA, 23 nt, Variola virus
gcguuccuugugcuuaauguuuc

SEQ ID NO: 3283614 - RNA, 17 nt, Variola virus
ugaauaccauuaaacaa

SEQ ID NO: 3283615 - RNA, 21 nt, Variola virus
guccgauaacguuagccacca

SEQ ID NO: 3283616 - RNA, 17 nt, Variola virus
uguuauuguauacuguc

SEQ ID NO: 3283617 - RNA, 14 nt, Variola virus
cgcagaaaauaucu

SEQ ID NO: 3283618 - RNA, 23 nt, Variola virus
guguauacaccaacuguaugaaa

SEQ ID NO: 3283619 - RNA, 18 nt, Variola virus
uaaauuauauauggauuu

SEQ ID NO: 3283620 - RNA, 15 nt, Variola virus
ugcgacacuauucau

SEQ ID NO: 3283621 - RNA, 15 nt, Variola virus
aaauauaauaaugau

SEQ ID NO: 3283622 - RNA, 20 nt, Variola virus
auugacuaauaaauuaaaua

SEQ ID NO: 3283623 - RNA, 16 nt, Variola virus
auuauaucguuaucau

SEQ ID NO: 3283624 - RNA, 22 nt, Variola virus
cauuggauuggauaauaauaca

SEQ ID NO: 3283625 - RNA, 13 nt, Variola virus
gaauaauguuucu

SEQ ID NO: 3283626 - RNA, 23 nt, Variola virus
ucugaaauaacguauuuaaacaa

SEQ ID NO: 3283627 - RNA, 18 nt, Variola virus
gauaaauaguaucaucua

SEQ ID NO: 3283628 - RNA, 15 nt, Variola virus
cagacuacuuuccua

SEQ ID NO: 3283629 - RNA, 17 nt, Variola virus
gcaaugcgcuggacagu

SEQ ID NO: 3283630 - RNA, 14 nt, Variola virus
uacugucuuuugug

SEQ ID NO: 3283631 - RNA, 12 nt, Variola virus
aaaaaaauaaua

SEQ ID NO: 3283632 - RNA, 17 nt, Variola virus
agauccacugagaugac

SEQ ID NO: 3283633 - RNA, 15 nt, Variola virus
gaauagauuacucau

SEQ ID NO: 3283634 - RNA, 19 nt, Variola virus
gacaucuggauuucagaua

SEQ ID NO: 3283635 - RNA, 17 nt, Variola virus
uaaaaucacugaacauu

SEQ ID NO: 3283636 - RNA, 16 nt, Variola virus
aaguaaagaaaagaua

SEQ ID NO: 3283637 - RNA, 16 nt, Variola virus
aggugcugauguaaau

SEQ ID NO: 3283638 - RNA, 13 nt, Variola virus
gaaacugauacaa

SEQ ID NO: 3283639 - RNA, 18 nt, Variola virus
gauaauauccugaacagc

SEQ ID NO: 3283640 - RNA, 16 nt, Variola virus
cagaugucaugauauu

SEQ ID NO: 3283641 - RNA, 14 nt, Variola virus
uuaaauaucauaau

SEQ ID NO: 3283642 - RNA, 15 nt, Variola virus
acaucuuuccuacau

SEQ ID NO: 3283643 - RNA, 14 nt, Variola virus
ccaucuuacaugau

SEQ ID NO: 3283644 - RNA, 11 nt, Variola virus
aauuaaugaaa

SEQ ID NO: 3283645 - RNA, 21 nt, Variola virus
uuacauuuguauaaucuuuaa

SEQ ID NO: 3283646 - RNA, 22 nt, Variola virus
auccuuauauuuguuaacuaca

SEQ ID NO: 3283647 - RNA, 13 nt, Variola virus
gaaucugugaaau

SEQ ID NO: 3283648 - RNA, 19 nt, Variola virus
augguuuuuauauguguuu

SEQ ID NO: 3283649 - RNA, 18 nt, Variola virus
auuaacuucguuauuuau

SEQ ID NO: 3283650 - RNA, 12 nt, Variola virus
uagacauaucug

SEQ ID NO: 3283651 - RNA, 19 nt, Variola virus
guugaucuucaaauuccac

SEQ ID NO: 3283652 - RNA, 13 nt, Variola virus
caucgucaucaag

SEQ ID NO: 3283653 - RNA, 14 nt, Variola virus
uucagaaauuauuc

SEQ ID NO: 3283654 - RNA, 18 nt, Variola virus
aacauaaauaauucuaga

SEQ ID NO: 3283655 - RNA, 12 nt, Variola virus
uaaauagaauau

SEQ ID NO: 3283656 - RNA, 15 nt, Variola virus
uaaugauagaauuau

SEQ ID NO: 3283657 - RNA, 20 nt, Variola virus
aaauuauaucuaguggauua

SEQ ID NO: 3283658 - RNA, 13 nt, Variola virus
ucuacauuuugcu

SEQ ID NO: 3283659 - RNA, 20 nt, Variola virus
cuaguguuccuaauaucaua

SEQ ID NO: 3283660 - RNA, 16 nt, Variola virus
acuacaacuagugaag

SEQ ID NO: 3283661 - RNA, 23 nt, Variola virus
uucaaccaugagugugaaacuaa

SEQ ID NO: 3283662 - RNA, 15 nt, Variola virus
aaaaaucgauuuuau

SEQ ID NO: 3283663 - RNA, 15 nt, Variola virus
uaaaggaugauacau

SEQ ID NO: 3283664 - RNA, 16 nt, Variola virus
uauuuugacauacuug

SEQ ID NO: 3283665 - RNA, 22 nt, Variola virus
aguacuguucauacaugaugag

SEQ ID NO: 3283666 - RNA, 14 nt, Variola virus
auaucucuaauaga

SEQ ID NO: 3283667 - RNA, 22 nt, Variola virus
gucuauacaagucgucuaaacg

SEQ ID NO: 3283668 - RNA, 15 nt, Variola virus
gaaaauauaaauuaa

SEQ ID NO: 3283669 - RNA, 18 nt, Variola virus
uguguacccaauaaaaug

SEQ ID NO: 3283670 - RNA, 21 nt, Variola virus
auacucuuuaaaguuucugaa

SEQ ID NO: 3283671 - RNA, 21 nt, Variola virus
agcugaggguguuaaaaauga

SEQ ID NO: 3283672 - RNA, 17 nt, Variola virus
agucauacguaaugaag

SEQ ID NO: 3283673 - RNA, 17 nt, Variola virus
cgauucaucuauacgau

SEQ ID NO: 3283674 - RNA, 23 nt, Variola virus
cuacgaaacugauacaaucucuu

SEQ ID NO: 3283675 - RNA, 18 nt, Variola virus
acaugucaucgaaauggu

SEQ ID NO: 3283676 - RNA, 13 nt, Variola virus
gcuaaugaugcag

SEQ ID NO: 3283677 - RNA, 21 nt, Variola virus
augguuuucuaaauagaauuc

SEQ ID NO: 3283678 - RNA, 22 nt, Variola virus
auguccaaaucuaguuguggaa

SEQ ID NO: 3283679 - RNA, 21 nt, Variola virus
ucaggacgaauaauucuaaua

SEQ ID NO: 3283680 - RNA, 21 nt, Variola virus
uauacuauauaguaauaccaa

SEQ ID NO: 3283681 - RNA, 14 nt, Variola virus
caguaauuaaugag

SEQ ID NO: 3283682 - RNA, 13 nt, Variola virus
auuggaauuauuu

SEQ ID NO: 3283683 - RNA, 15 nt, Variola virus
ucuuaauagacauau

SEQ ID NO: 3283684 - RNA, 19 nt, Variola virus
cuacaaaauguugauaauc

SEQ ID NO: 3283685 - RNA, 22 nt, Variola virus
acuacauaaucuucgucuggaa

SEQ ID NO: 3283686 - RNA, 17 nt, Variola virus
ucgaauacgauacuuau

SEQ ID NO: 3283687 - RNA, 18 nt, Variola virus
uuagacguaguucguaaa

SEQ ID NO: 3283688 - RNA, 19 nt, Variola virus
auuuuuacagcgacacuau

SEQ ID NO: 3283689 - RNA, 19 nt, Variola virus
uacccaaaucugaaaauaa

SEQ ID NO: 3283690 - RNA, 14 nt, Variola virus
aaugauuuagaaau

SEQ ID NO: 3283691 - RNA, 23 nt, Variola virus
caaauuuguuuuguuuauuaaca

SEQ ID NO: 3283692 - RNA, 18 nt, Variola virus
caauaaguuuuagauauu

SEQ ID NO: 3283693 - RNA, 23 nt, Variola virus
uacaaaauguugauaauccuuga

SEQ ID NO: 3283694 - RNA, 14 nt, Variola virus
aacuguuaaauguu

SEQ ID NO: 3283695 - RNA, 20 nt, Variola virus
caaauaauacuauauacaau

SEQ ID NO: 3283696 - RNA, 16 nt, Variola virus
uucuucagaauaauag

SEQ ID NO: 3283697 - RNA, 22 nt, Variola virus
caguggaucgguucagcauuua

SEQ ID NO: 3283698 - RNA, 17 nt, Variola virus
gagguagguauuacuuu

SEQ ID NO: 3283699 - RNA, 18 nt, Variola virus
uaucucauucaaauccau

SEQ ID NO: 3283700 - RNA, 13 nt, Variola virus
aaagguguguacu

SEQ ID NO: 3283701 - RNA, 12 nt, Variola virus
uaaucuauuuua

SEQ ID NO: 3283702 - RNA, 13 nt, Variola virus
caugaacauaauc

SEQ ID NO: 3283703 - RNA, 17 nt, Variola virus
aaaaugguaaacuuuug

SEQ ID NO: 3283704 - RNA, 21 nt, Variola virus
guuuaucuuuuuguuggaaaa

SEQ ID NO: 3283705 - RNA, 17 nt, Variola virus
auauucaacauguuuaa

SEQ ID NO: 3283706 - RNA, 14 nt, Variola virus
gaucagacaaauaa

SEQ ID NO: 3283707 - RNA, 16 nt, Variola virus
caacauuggaauaaua

SEQ ID NO: 3283708 - RNA, 15 nt, Variola virus
cuauaucuaacaucu

SEQ ID NO: 3283709 - RNA, 21 nt, Variola virus
uaacaacgacuuauaauuaau

SEQ ID NO: 3283710 - RNA, 20 nt, Variola virus
uuauggaucuauucaagaug

SEQ ID NO: 3283711 - RNA, 15 nt, Variola virus
augagcaaguagaaa

SEQ ID NO: 3283712 - RNA, 23 nt, Variola virus
cggaaaaucgucuucauaaagca

SEQ ID NO: 3283713 - RNA, 15 nt, Variola virus
uccuugcaaauuccg

SEQ ID NO: 3283714 - RNA, 15 nt, Variola virus
gaaucuaaacaaaau

SEQ ID NO: 3283715 - RNA, 15 nt, Variola virus
aacuuucaucuaaua

SEQ ID NO: 3283716 - RNA, 17 nt, Variola virus
uagaacagauuuaacaa

SEQ ID NO: 3283717 - RNA, 14 nt, Variola virus
uaugcucuagauac

SEQ ID NO: 3283718 - RNA, 19 nt, Variola virus
ucaaaguccggauguauua

SEQ ID NO: 3283719 - RNA, 12 nt, Variola virus
ggagaauguuuc

SEQ ID NO: 3283720 - RNA, 20 nt, Variola virus
acauaauuauucuaucaauu

SEQ ID NO: 3283721 - RNA, 13 nt, Variola virus
agguagcaaaaaa

SEQ ID NO: 3283722 - RNA, 21 nt, Variola virus
uuacauaaaaaaaauguaaua

SEQ ID NO: 3283723 - RNA, 16 nt, Variola virus
ucaucucuagauaugu

SEQ ID NO: 3283724 - RNA, 18 nt, Variola virus
auauaauuaucacauauu

SEQ ID NO: 3283725 - RNA, 20 nt, Variola virus
agccacuauagaguuucuaa

SEQ ID NO: 3283726 - RNA, 23 nt, Variola virus
aaaccuuugacuaguuguagaau

SEQ ID NO: 3283727 - RNA, 17 nt, Variola virus
uaugcacgaaauagcua

SEQ ID NO: 3283728 - RNA, 21 nt, Variola virus
acaaguuuaacaauaaaauua

SEQ ID NO: 3283729 - RNA, 23 nt, Variola virus
cauuguucgugauaguauguggu

SEQ ID NO: 3283730 - RNA, 17 nt, Variola virus
cacgaauauuacuaauu

SEQ ID NO: 3283731 - RNA, 16 nt, Variola virus
gaugaugcaacucuau

SEQ ID NO: 3283732 - RNA, 21 nt, Variola virus
aaauaguaaaugagagaucua

SEQ ID NO: 3283733 - RNA, 19 nt, Variola virus
aacuaaaugguauacacau

SEQ ID NO: 3283734 - RNA, 16 nt, Variola virus
auaguagguauggauc

SEQ ID NO: 3283735 - RNA, 22 nt, Variola virus
cuuccaaauaauauucucuuug

SEQ ID NO: 3283736 - RNA, 18 nt, Variola virus
aucagcacaugaagaaaa

SEQ ID NO: 3283737 - RNA, 16 nt, Variola virus
agaauacuauagacca

SEQ ID NO: 3283738 - RNA, 17 nt, Variola virus
aaaucuaacagauacaa

SEQ ID NO: 3283739 - RNA, 19 nt, Variola virus
uaauagacuauauaaaccg

SEQ ID NO: 3283740 - RNA, 15 nt, Variola virus
acuauuguacauuau

SEQ ID NO: 3283741 - RNA, 16 nt, Variola virus
uccaaaaacaauuuga

SEQ ID NO: 3283742 - RNA, 20 nt, Variola virus
ugauuccuaggucuacagaa

SEQ ID NO: 3283743 - RNA, 23 nt, Variola virus
auuucuuuaccacaggagaaugg

SEQ ID NO: 3283744 - RNA, 18 nt, Variola virus
auauguaaauauuaauaa

SEQ ID NO: 3283745 - RNA, 17 nt, Variola virus
aaugacuuagugauauc

SEQ ID NO: 3283746 - RNA, 11 nt, Variola virus
aauauucaugu

SEQ ID NO: 3283747 - RNA, 15 nt, Variola virus
caaaaguuaauaaca

SEQ ID NO: 3283748 - RNA, 17 nt, Variola virus
agaaucagcucuagcua

SEQ ID NO: 3283749 - RNA, 23 nt, Variola virus
cagauuguugccguaaauccugc

SEQ ID NO: 3283750 - RNA, 15 nt, Variola virus
cuugaaccaaacauu

SEQ ID NO: 3283751 - RNA, 18 nt, Variola virus
ccguuuuccccucucugu

SEQ ID NO: 3283752 - RNA, 16 nt, Variola virus
agaucccaaaucuucu

SEQ ID NO: 3283753 - RNA, 16 nt, Variola virus
cagguauacuguucag

SEQ ID NO: 3283754 - RNA, 21 nt, Variola virus
gacuaccuggcucauugauua

SEQ ID NO: 3283755 - RNA, 16 nt, Variola virus
acaaaauacuauauau

SEQ ID NO: 3283756 - RNA, 21 nt, Variola virus
aggaguucaguuuuauaugau

SEQ ID NO: 3283757 - RNA, 16 nt, Variola virus
aaaaguccuagaauua

SEQ ID NO: 3283758 - RNA, 18 nt, Variola virus
agacguaguucuaguaca

SEQ ID NO: 3283759 - RNA, 21 nt, Variola virus
augaauaccggaaucauagau

SEQ ID NO: 3283760 - RNA, 18 nt, Variola virus
uuuaagccaucuguauua

SEQ ID NO: 3283761 - RNA, 21 nt, Variola virus
uuaauaauuguuauuauuuca

SEQ ID NO: 3283762 - RNA, 16 nt, Variola virus
auugguagcugaaugu

SEQ ID NO: 3283763 - RNA, 13 nt, Variola virus
ucgauaauuauuu

SEQ ID NO: 3283764 - RNA, 15 nt, Variola virus
caugucuagaaagaa

SEQ ID NO: 3283765 - RNA, 14 nt, Variola virus
agaaaaaaugauuu

SEQ ID NO: 3283766 - RNA, 19 nt, Variola virus
acuucuguacuaguggcag

SEQ ID NO: 3283767 - RNA, 13 nt, Variola virus
cacugcagcauuu

SEQ ID NO: 3283768 - RNA, 22 nt, Variola virus
agaucugagaauggauaauucu

SEQ ID NO: 3283769 - RNA, 19 nt, Variola virus
auuaaaugauuguauuaac

SEQ ID NO: 3283770 - RNA, 18 nt, Variola virus
gaugaguuaauguauauu

SEQ ID NO: 3283771 - RNA, 19 nt, Variola virus
uauauggucuauauauaca

SEQ ID NO: 3283772 - RNA, 17 nt, Variola virus
auagaguauaagaaauu

SEQ ID NO: 3283773 - RNA, 17 nt, Variola virus
acuacguucauauucca

SEQ ID NO: 3283774 - RNA, 21 nt, Variola virus
auguaaccuacuagaaugaua

SEQ ID NO: 3283775 - RNA, 16 nt, Variola virus
auucacauaaaggaua

SEQ ID NO: 3283776 - RNA, 13 nt, Variola virus
agcggaugaaaaa

SEQ ID NO: 3283777 - RNA, 21 nt, Variola virus
caaaucugaaaauaaauaaug

SEQ ID NO: 3283778 - RNA, 13 nt, Variola virus
uuguacauuauua

SEQ ID NO: 3283779 - RNA, 17 nt, Variola virus
aguuagauacaaagaua

SEQ ID NO: 3283780 - RNA, 12 nt, Variola virus
auauaaagaaau

SEQ ID NO: 3283781 - RNA, 13 nt, Variola virus
cugcuuucuuuua

SEQ ID NO: 3283782 - RNA, 17 nt, Variola virus
aaucagaucugauaaua

SEQ ID NO: 3283783 - RNA, 15 nt, Variola virus
uucuauacauagaug

SEQ ID NO: 3283784 - RNA, 13 nt, Variola virus
caccaagaaagcu

SEQ ID NO: 3283785 - RNA, 20 nt, Variola virus
cauaucuccucuuccaucac

SEQ ID NO: 3283786 - RNA, 13 nt, Variola virus
auaguaaaaucua

SEQ ID NO: 3283787 - RNA, 17 nt, Variola virus
acgauauaaauugauua

SEQ ID NO: 3283788 - RNA, 14 nt, Variola virus
ugaauacauuauca

SEQ ID NO: 3283789 - RNA, 16 nt, Variola virus
ggaucuccuauuucuu

SEQ ID NO: 3283790 - RNA, 14 nt, Variola virus
ucuucuacauuauu

SEQ ID NO: 3283791 - RNA, 18 nt, Variola virus
auucuagcggcuagaaug

SEQ ID NO: 3283792 - RNA, 15 nt, Variola virus
acagcauuucuguca

SEQ ID NO: 3283793 - RNA, 21 nt, Variola virus
uagaucugauacaccuguaau

SEQ ID NO: 3283794 - RNA, 14 nt, Variola virus
uaaggaguugaaau

SEQ ID NO: 3283795 - RNA, 20 nt, Variola virus
uauuaauuaauuaauuaaac

SEQ ID NO: 3283796 - RNA, 14 nt, Variola virus
gaauaucuacaaua

SEQ ID NO: 3283797 - RNA, 18 nt, Variola virus
gucguguuuuauuaauca

SEQ ID NO: 3283798 - RNA, 21 nt, Variola virus
aucuauaauuugugaguuuuc

SEQ ID NO: 3283799 - RNA, 20 nt, Variola virus
aucuuauguuuuuaagagau

SEQ ID NO: 3283800 - RNA, 24 nt, Variola virus
cauccaugagauugaaugccauuu

SEQ ID NO: 3283801 - RNA, 15 nt, Variola virus
ccuauucccaacaau

SEQ ID NO: 3283802 - RNA, 13 nt, Variola virus
uucacaaauacua

SEQ ID NO: 3283803 - RNA, 12 nt, Variola virus
aucaaaaaauuu

SEQ ID NO: 3283804 - RNA, 12 nt, Variola virus
ucuauuuggauu

SEQ ID NO: 3283805 - RNA, 18 nt, Variola virus
auauucucuauuuuggug

SEQ ID NO: 3283806 - RNA, 20 nt, Variola virus
gacaagauauauauacucua

SEQ ID NO: 3283807 - RNA, 16 nt, Variola virus
cuaggugcuauggaug

SEQ ID NO: 3283808 - RNA, 15 nt, Variola virus
aucacaaaaaaaacu

SEQ ID NO: 3283809 - RNA, 15 nt, Variola virus
ucaaacucgauauau

SEQ ID NO: 3283810 - RNA, 15 nt, Variola virus
aucaaccacauaaua

SEQ ID NO: 3283811 - RNA, 21 nt, Variola virus
cuuuauaauuucaucuacaau

SEQ ID NO: 3283812 - RNA, 16 nt, Variola virus
uacaucuguuuccuau

SEQ ID NO: 3283813 - RNA, 22 nt, Variola virus
auuaguguauacaccaacugua

SEQ ID NO: 3283814 - RNA, 20 nt, Variola virus
gauaaugauacgauacuaua

SEQ ID NO: 3283815 - RNA, 17 nt, Variola virus
guaacucugauaaucuc

SEQ ID NO: 3283816 - RNA, 16 nt, Variola virus
agacguugccaaaaaa

SEQ ID NO: 3283817 - RNA, 16 nt, Variola virus
aagucugucaaaucau

SEQ ID NO: 3283818 - RNA, 12 nt, Variola virus
auuuaucuuucu

SEQ ID NO: 3283819 - RNA, 16 nt, Variola virus
uuccacuauugccauc

SEQ ID NO: 3283820 - RNA, 23 nt, Variola virus
ggucgucgauaacaaauuaaaga

SEQ ID NO: 3283821 - RNA, 18 nt, Variola virus
acaaaucaaaaguauuaa

SEQ ID NO: 3283822 - RNA, 17 nt, Variola virus
ucauucaauauuuacaa

SEQ ID NO: 3283823 - RNA, 15 nt, Variola virus
cauucauaaaaacca

SEQ ID NO: 3283824 - RNA, 15 nt, Variola virus
cuauauuaacaucua

SEQ ID NO: 3283825 - RNA, 16 nt, Variola virus
caagauuuuuaaacaa

SEQ ID NO: 3283826 - RNA, 14 nt, Variola virus
ugauauauuuucca

SEQ ID NO: 3283827 - RNA, 17 nt, Variola virus
aaaugacuaauuuugua

SEQ ID NO: 3283828 - RNA, 16 nt, Variola virus
uuaaugcuacagauau

SEQ ID NO: 3283829 - RNA, 22 nt, Variola virus
cuagauacccaaucucucucaa

SEQ ID NO: 3283830 - RNA, 21 nt, Variola virus
acaaacauguucaaugcaaua

SEQ ID NO: 3283831 - RNA, 14 nt, Variola virus
aaagugcaaaugag

SEQ ID NO: 3283832 - RNA, 16 nt, Variola virus
ggaucuaguauuauug

SEQ ID NO: 3283833 - RNA, 16 nt, Variola virus
auaugucauagaauuu

SEQ ID NO: 3283834 - RNA, 18 nt, Variola virus
aguauuuauacuacuaau

SEQ ID NO: 3283835 - RNA, 12 nt, Variola virus
agacucaguaau

SEQ ID NO: 3283836 - RNA, 20 nt, Variola virus
uucuacgaaaggagagaaug

SEQ ID NO: 3283837 - RNA, 17 nt, Variola virus
uauuguacaaaaagccc

SEQ ID NO: 3283838 - RNA, 13 nt, Variola virus
gaagacaaucaag

SEQ ID NO: 3283839 - RNA, 12 nt, Variola virus
aauaguaaauga

SEQ ID NO: 3283840 - RNA, 16 nt, Variola virus
uaaaugaauucucauu

SEQ ID NO: 3283841 - RNA, 19 nt, Variola virus
guguauuaaauagaauauu

SEQ ID NO: 3283842 - RNA, 16 nt, Variola virus
acuucugaagaaauug

SEQ ID NO: 3283843 - RNA, 23 nt, Variola virus
uaacagucuguucaaauuuauau

SEQ ID NO: 3283844 - RNA, 14 nt, Variola virus
uuaaagauggagua

SEQ ID NO: 3283845 - RNA, 21 nt, Variola virus
ugauaaucauccuaagaugau

SEQ ID NO: 3283846 - RNA, 19 nt, Variola virus
uauguuaacggaaaguauu

SEQ ID NO: 3283847 - RNA, 17 nt, Variola virus
auggaucugugauguau

SEQ ID NO: 3283848 - RNA, 16 nt, Variola virus
auaguauaucuacaca

SEQ ID NO: 3283849 - RNA, 15 nt, Variola virus
auucaugaaaaugua

SEQ ID NO: 3283850 - RNA, 12 nt, Variola virus
auaugacaugau

SEQ ID NO: 3283851 - RNA, 15 nt, Variola virus
acaaaaaauaaaaga

SEQ ID NO: 3283852 - RNA, 21 nt, Variola virus
augauacacuaaguauauaca

SEQ ID NO: 3283853 - RNA, 20 nt, Variola virus
auucaauuacuacaaaaauu

SEQ ID NO: 3283854 - RNA, 18 nt, Variola virus
acaaacgcuacuauauau

SEQ ID NO: 3283855 - RNA, 18 nt, Variola virus
aacaauagucuuguaaag

SEQ ID NO: 3283856 - RNA, 18 nt, Variola virus
cagauuuaacaauuucua

SEQ ID NO: 3283857 - RNA, 13 nt, Variola virus
agaauuaagauua

SEQ ID NO: 3283858 - RNA, 22 nt, Variola virus
uucaucaauagacauaagaaau

SEQ ID NO: 3283859 - RNA, 20 nt, Variola virus
aaaauuauuacuagaaucuc

SEQ ID NO: 3283860 - RNA, 18 nt, Variola virus
ucuuuuagcacauguaua

SEQ ID NO: 3283861 - RNA, 16 nt, Variola virus
gucucuauaaaaauga

SEQ ID NO: 3283862 - RNA, 17 nt, Variola virus
aguuagaaaaaaugauu

SEQ ID NO: 3283863 - RNA, 15 nt, Variola virus
aaaaaguuuuaacau

SEQ ID NO: 3283864 - RNA, 14 nt, Variola virus
acaauccaauaaua

SEQ ID NO: 3283865 - RNA, 13 nt, Variola virus
gauauaugaugaa

SEQ ID NO: 3283866 - RNA, 17 nt, Variola virus
acaacugucaaugaauu

SEQ ID NO: 3283867 - RNA, 12 nt, Variola virus
caaaaagagagu

SEQ ID NO: 3283868 - RNA, 17 nt, Variola virus
aguuaaucaauuuagau

SEQ ID NO: 3283869 - RNA, 23 nt, Variola virus
auuaauuucuaaaggagcaaaug

SEQ ID NO: 3283870 - RNA, 19 nt, Variola virus
aaucauucuaaaacuauaa

SEQ ID NO: 3283871 - RNA, 23 nt, Variola virus
uaaaacuaucguuauaucugucu

SEQ ID NO: 3283872 - RNA, 14 nt, Variola virus
uaaaacuuaaaauu

SEQ ID NO: 3283873 - RNA, 16 nt, Variola virus
acugauaauguagaaa

SEQ ID NO: 3283874 - RNA, 15 nt, Variola virus
aacaauaguuauuac

SEQ ID NO: 3283875 - RNA, 19 nt, Variola virus
uauaugcaugauagaagau

SEQ ID NO: 3283876 - RNA, 14 nt, Variola virus
cuucgauagauauu

SEQ ID NO: 3283877 - RNA, 16 nt, Variola virus
aguuuuaaacaaaaua

SEQ ID NO: 3283878 - RNA, 19 nt, Variola virus
cagugauagacuagaagaa

SEQ ID NO: 3283879 - RNA, 13 nt, Variola virus
uacuucuauacaa

SEQ ID NO: 3283880 - RNA, 23 nt, Variola virus
agaauaguauuugagaaauaugu

SEQ ID NO: 3283881 - RNA, 20 nt, Variola virus
aaugugauucucugaaaaug

SEQ ID NO: 3283882 - RNA, 21 nt, Variola virus
ucuggaacauuuaacucauug

SEQ ID NO: 3283883 - RNA, 14 nt, Variola virus
aggaaacgaaagac

SEQ ID NO: 3283884 - RNA, 17 nt, Variola virus
uacucccacaaauacug

SEQ ID NO: 3283885 - RNA, 19 nt, Variola virus
caauacaccaauagaugau

SEQ ID NO: 3283886 - RNA, 14 nt, Variola virus
guaguucuauaauc

SEQ ID NO: 3283887 - RNA, 17 nt, Variola virus
uugaucuuuauuaaauu

SEQ ID NO: 3283888 - RNA, 13 nt, Variola virus
ugcuaauauacaa

SEQ ID NO: 3283889 - RNA, 19 nt, Variola virus
acuaaacuaacuccuuggu

SEQ ID NO: 3283890 - RNA, 15 nt, Variola virus
ucguauaaauauccu

SEQ ID NO: 3283891 - RNA, 13 nt, Variola virus
aaauacauaaaga

SEQ ID NO: 3283892 - RNA, 17 nt, Variola virus
aauaacuaguauaaaau

SEQ ID NO: 3283893 - RNA, 14 nt, Variola virus
cuucuaaucuugua

SEQ ID NO: 3283894 - RNA, 13 nt, Variola virus
auaacuguaaaua

SEQ ID NO: 3283895 - RNA, 21 nt, Variola virus
uaggaaauuuugugcaacgaa

SEQ ID NO: 3283896 - RNA, 19 nt, Variola virus
uaacucgguaucuacuuua

SEQ ID NO: 3283897 - RNA, 15 nt, Variola virus
auggaauaguuuuua

SEQ ID NO: 3283898 - RNA, 16 nt, Variola virus
ugauaacacauauuca

SEQ ID NO: 3283899 - RNA, 12 nt, Variola virus
aacuuaaaauau

SEQ ID NO: 3283900 - RNA, 20 nt, Variola virus
aucuauaaaauuuuaauuaa

SEQ ID NO: 3283901 - RNA, 14 nt, Variola virus
auuacaacauaaua

SEQ ID NO: 3283902 - RNA, 17 nt, Variola virus
uuaauuuauuauacugu

SEQ ID NO: 3283903 - RNA, 15 nt, Variola virus
agaaaagauuaagau

SEQ ID NO: 3283904 - RNA, 20 nt, Variola virus
uuuuccauaggauacuuugu

SEQ ID NO: 3283905 - RNA, 17 nt, Variola virus
uuaaacauggcauuaau

SEQ ID NO: 3283906 - RNA, 20 nt, Variola virus
uaucaagauguaaaauacuu

SEQ ID NO: 3283907 - RNA, 15 nt, Variola virus
aacauaauuuucuaa

SEQ ID NO: 3283908 - RNA, 15 nt, Variola virus
aacauauuuuucuau

SEQ ID NO: 3283909 - RNA, 17 nt, Variola virus
acuauaauaguacuaga

SEQ ID NO: 3283910 - RNA, 13 nt, Variola virus
uaaauuuuguauu

SEQ ID NO: 3283911 - RNA, 21 nt, Variola virus
uaguaauaaugauucaacaau

SEQ ID NO: 3283912 - RNA, 19 nt, Variola virus
aagauauucuaaaauggua

SEQ ID NO: 3283913 - RNA, 21 nt, Variola virus
caauucauuccuauaaguuua

SEQ ID NO: 3283914 - RNA, 17 nt, Variola virus
auguuucgauuucaauu

SEQ ID NO: 3283915 - RNA, 13 nt, Variola virus
ucugaauaaacaa

SEQ ID NO: 3283916 - RNA, 11 nt, Variola virus
aauagaaucua

SEQ ID NO: 3283917 - RNA, 13 nt, Variola virus
uuauaacuaaaca

SEQ ID NO: 3283918 - RNA, 16 nt, Variola virus
uauuuuacauggauuu

SEQ ID NO: 3283919 - RNA, 16 nt, Variola virus
uauaacuauuaauauu

SEQ ID NO: 3283920 - RNA, 20 nt, Variola virus
guuaucaucguauaaauuaa

SEQ ID NO: 3283921 - RNA, 12 nt, Variola virus
uaauucuaaaac

SEQ ID NO: 3283922 - RNA, 19 nt, Variola virus
auaaggaagugugcaaaua

SEQ ID NO: 3283923 - RNA, 15 nt, Variola virus
aguguaaaacuauau

SEQ ID NO: 3283924 - RNA, 16 nt, Variola virus
uauuggcuuuucuuua

SEQ ID NO: 3283925 - RNA, 13 nt, Variola virus
uagcaaaauuaac

SEQ ID NO: 3283926 - RNA, 14 nt, Variola virus
aauucuaaaugaug

SEQ ID NO: 3283927 - RNA, 16 nt, Variola virus
gcagaauaauuagaaa

SEQ ID NO: 3283928 - RNA, 16 nt, Variola virus
aacaauuuugucagua

SEQ ID NO: 3283929 - RNA, 13 nt, Variola virus
agaaauaaauguc

SEQ ID NO: 3283930 - RNA, 21 nt, Variola virus
auuaaaauucuuaaaauaauu

SEQ ID NO: 3283931 - RNA, 20 nt, Variola virus
gaauauuagcacauucauug

SEQ ID NO: 3283932 - RNA, 22 nt, Variola virus
uuugacuagggaagauacauua

SEQ ID NO: 3283933 - RNA, 19 nt, Variola virus
auccacugcugaacaguua

SEQ ID NO: 3283934 - RNA, 16 nt, Variola virus
agauggaaauauuguu

SEQ ID NO: 3283935 - RNA, 20 nt, Variola virus
uagaauuuagcauaucucuu

SEQ ID NO: 3283936 - RNA, 22 nt, Variola virus
ugucaucuuguucagaaauaua

SEQ ID NO: 3283937 - RNA, 19 nt, Variola virus
cuaucuaugcuguagauag

SEQ ID NO: 3283938 - RNA, 17 nt, Variola virus
aaugauacugauaaagu

SEQ ID NO: 3283939 - RNA, 14 nt, Variola virus
uuucuauaaucauu

SEQ ID NO: 3283940 - RNA, 12 nt, Variola virus
ugacauggaaau

SEQ ID NO: 3283941 - RNA, 21 nt, Variola virus
auauaccgccucaaacucuau

SEQ ID NO: 3283942 - RNA, 16 nt, Variola virus
uaaaaaccaucgucug

SEQ ID NO: 3283943 - RNA, 14 nt, Variola virus
gcuauauaaaucau

SEQ ID NO: 3283944 - RNA, 17 nt, Variola virus
ugaucuauauguuuuau

SEQ ID NO: 3283945 - RNA, 13 nt, Variola virus
auccuaaucagga

SEQ ID NO: 3283946 - RNA, 20 nt, Variola virus
acacguuagguuucuuuauu

SEQ ID NO: 3283947 - RNA, 17 nt, Variola virus
aacaacucccggacuua

SEQ ID NO: 3283948 - RNA, 23 nt, Variola virus
uugucauugagugauaaacuugu

SEQ ID NO: 3283949 - RNA, 21 nt, Variola virus
auccagauccuuuucuucaga

SEQ ID NO: 3283950 - RNA, 14 nt, Variola virus
auuauacuuuguaa

SEQ ID NO: 3283951 - RNA, 17 nt, Variola virus
acuagauaaaucguuug

SEQ ID NO: 3283952 - RNA, 22 nt, Variola virus
acuaaacuaugcgaugucuugg

SEQ ID NO: 3283953 - RNA, 14 nt, Variola virus
uugauuuucguaac

SEQ ID NO: 3283954 - RNA, 12 nt, Variola virus
ugcucuuuacau

SEQ ID NO: 3283955 - RNA, 20 nt, Variola virus
uauagcauuguuauguauuu

SEQ ID NO: 3283956 - RNA, 23 nt, Variola virus
aucauucgauaagauagauucca

SEQ ID NO: 3283957 - RNA, 20 nt, Variola virus
auucauaaaacauaaucaag

SEQ ID NO: 3283958 - RNA, 15 nt, Variola virus
auaaagcgagacuau

SEQ ID NO: 3283959 - RNA, 19 nt, Variola virus
auuaacaaaagugaauaua

SEQ ID NO: 3283960 - RNA, 22 nt, Variola virus
cuuaacgaacgcggugugaaug

SEQ ID NO: 3283961 - RNA, 21 nt, Variola virus
auacucccuugcaucauauac

SEQ ID NO: 3283962 - RNA, 15 nt, Variola virus
acauuuccuacuacu

SEQ ID NO: 3283963 - RNA, 18 nt, Variola virus
acugauucagaaauggau

SEQ ID NO: 3283964 - RNA, 19 nt, Variola virus
auaauucuuuauaacugaa

SEQ ID NO: 3283965 - RNA, 19 nt, Variola virus
uucaguaguguuuacauaa

SEQ ID NO: 3283966 - RNA, 15 nt, Variola virus
agugaaauaagcuuu

SEQ ID NO: 3283967 - RNA, 13 nt, Variola virus
uagaggaucuauu

SEQ ID NO: 3283968 - RNA, 12 nt, Variola virus
auucauuucauu

SEQ ID NO: 3283969 - RNA, 21 nt, Variola virus
caacgugauuauucuccacca

SEQ ID NO: 3283970 - RNA, 18 nt, Variola virus
caaauucugcaauaucuu

SEQ ID NO: 3283971 - RNA, 20 nt, Variola virus
auauauuauuagagguauau

SEQ ID NO: 3283972 - RNA, 12 nt, Variola virus
uagauccaagga

SEQ ID NO: 3283973 - RNA, 18 nt, Variola virus
aaaaaugcauacuuguua

SEQ ID NO: 3283974 - RNA, 19 nt, Variola virus
uuccagaauggcauacaua

SEQ ID NO: 3283975 - RNA, 16 nt, Variola virus
agagacaaacuauuaa

SEQ ID NO: 3283976 - RNA, 15 nt, Variola virus
uaccucucuuaaaau

SEQ ID NO: 3283977 - RNA, 15 nt, Variola virus
ugccacgguuccaag

SEQ ID NO: 3283978 - RNA, 16 nt, Variola virus
cucaacauaaauaauu

SEQ ID NO: 3283979 - RNA, 14 nt, Variola virus
cuauacauuuccga

SEQ ID NO: 3283980 - RNA, 22 nt, Variola virus
uaucaaagagaaggccaaagaa

SEQ ID NO: 3283981 - RNA, 15 nt, Variola virus
caccguaguguauau

SEQ ID NO: 3283982 - RNA, 13 nt, Variola virus
cuguauagauaua

SEQ ID NO: 3283983 - RNA, 20 nt, Variola virus
aaauccacuugauacagcca

SEQ ID NO: 3283984 - RNA, 16 nt, Variola virus
aaaggccuuguaacuu

SEQ ID NO: 3283985 - RNA, 16 nt, Variola virus
cugaaauaauuagaac

SEQ ID NO: 3283986 - RNA, 20 nt, Variola virus
auuucagauacuauauuugu

SEQ ID NO: 3283987 - RNA, 22 nt, Variola virus
cugaagaagagguaagauaucu

SEQ ID NO: 3283988 - RNA, 22 nt, Variola virus
cugugagaacuuguuaaagaag

SEQ ID NO: 3283989 - RNA, 18 nt, Variola virus
cugauacguuauaaaggu

SEQ ID NO: 3283990 - RNA, 16 nt, Variola virus
caaacucuauuuuaaa

SEQ ID NO: 3283991 - RNA, 21 nt, Variola virus
uagacauaauagucaauagau

SEQ ID NO: 3283992 - RNA, 13 nt, Variola virus
uaucuacaucuuc

SEQ ID NO: 3283993 - RNA, 13 nt, Variola virus
ugcuagaacaacu

SEQ ID NO: 3283994 - RNA, 16 nt, Variola virus
aguaaugguauguauu

SEQ ID NO: 3283995 - RNA, 13 nt, Variola virus
ucacaacauuucu

SEQ ID NO: 3283996 - RNA, 17 nt, Variola virus
gauaacaauuuguuaau

SEQ ID NO: 3283997 - RNA, 13 nt, Variola virus
acaucaaacggau

SEQ ID NO: 3283998 - RNA, 18 nt, Variola virus
acuauaaacuaaaaauua

SEQ ID NO: 3283999 - RNA, 18 nt, Variola virus
uuuaccagugauuaucca

SEQ ID NO: 3284000 - RNA, 19 nt, Variola virus
agggaaaucaaagaagaag

SEQ ID NO: 3284001 - RNA, 16 nt, Variola virus
uuauguaaauaucuuu

SEQ ID NO: 3284002 - RNA, 22 nt, Variola virus
aaaacagggacguguuaauaaa

SEQ ID NO: 3284003 - RNA, 21 nt, Variola virus
gacuauggacgcaugauaaga

SEQ ID NO: 3284004 - RNA, 14 nt, Variola virus
aucuguuuaucauu

SEQ ID NO: 3284005 - RNA, 20 nt, Variola virus
acuggucauagaaaaugauu

SEQ ID NO: 3284006 - RNA, 18 nt, Variola virus
acucauaagaaagagaau

SEQ ID NO: 3284007 - RNA, 23 nt, Variola virus
gcaacuauauaguuuaaauuaag

SEQ ID NO: 3284008 - RNA, 17 nt, Variola virus
uuaucaaaauuuggaaa

SEQ ID NO: 3284009 - RNA, 18 nt, Variola virus
acucauugcuuucuagaa

SEQ ID NO: 3284010 - RNA, 13 nt, Variola virus
ugugucuguuaau

SEQ ID NO: 3284011 - RNA, 13 nt, Variola virus
aacuaauaaacau

SEQ ID NO: 3284012 - RNA, 19 nt, Variola virus
gccauugcuggauuacauc

SEQ ID NO: 3284013 - RNA, 18 nt, Variola virus
cgaaacacgucaaagguu

SEQ ID NO: 3284014 - RNA, 20 nt, Variola virus
acuaauguauacauuuucca

SEQ ID NO: 3284015 - RNA, 21 nt, Variola virus
uuuuaacguaucauagaugcc

SEQ ID NO: 3284016 - RNA, 15 nt, Variola virus
auacaagaacaauua

SEQ ID NO: 3284017 - RNA, 21 nt, Variola virus
auguacaaauucuuggauaua

SEQ ID NO: 3284018 - RNA, 18 nt, Variola virus
caaaaauuuaaaaugagu

SEQ ID NO: 3284019 - RNA, 17 nt, Variola virus
agacuccguuccagaua

SEQ ID NO: 3284020 - RNA, 16 nt, Variola virus
gaaauauauuguuaaa

SEQ ID NO: 3284021 - RNA, 21 nt, Variola virus
gauggaucugugauguaugca

SEQ ID NO: 3284022 - RNA, 15 nt, Variola virus
guguccauaauccuc

SEQ ID NO: 3284023 - RNA, 20 nt, Variola virus
auaauagguggaacguauau

SEQ ID NO: 3284024 - RNA, 18 nt, Variola virus
uaaggguccuacaaccau

SEQ ID NO: 3284025 - RNA, 15 nt, Variola virus
auagagaacauaaug

SEQ ID NO: 3284026 - RNA, 20 nt, Variola virus
guacgggcgcuguaauuaau

SEQ ID NO: 3284027 - RNA, 13 nt, Variola virus
auaucuggauaau

SEQ ID NO: 3284028 - RNA, 11 nt, Variola virus
uuucuagauac

SEQ ID NO: 3284029 - RNA, 14 nt, Variola virus
auauucuuucuugu

SEQ ID NO: 3284030 - RNA, 19 nt, Variola virus
gauaccucauuuaucaugu

SEQ ID NO: 3284031 - RNA, 16 nt, Variola virus
cuucauuaaucuuuuc

SEQ ID NO: 3284032 - RNA, 17 nt, Variola virus
ucaugacuucauugaua

SEQ ID NO: 3284033 - RNA, 23 nt, Variola virus
uauuuuuaauagcugcucuuugu

SEQ ID NO: 3284034 - RNA, 19 nt, Variola virus
aauauaucaauaagcauua

SEQ ID NO: 3284035 - RNA, 16 nt, Variola virus
uaauuuguauauacau

SEQ ID NO: 3284036 - RNA, 12 nt, Variola virus
acacacuuuucu

SEQ ID NO: 3284037 - RNA, 17 nt, Variola virus
uugacuauuguguguaa

SEQ ID NO: 3284038 - RNA, 12 nt, Variola virus
cauaaaaguugu

SEQ ID NO: 3284039 - RNA, 22 nt, Variola virus
uuaucaaaucuuuaaucuuauu

SEQ ID NO: 3284040 - RNA, 17 nt, Variola virus
aguauguauaucuauau

SEQ ID NO: 3284041 - RNA, 17 nt, Variola virus
guaugauagcuccacca

SEQ ID NO: 3284042 - RNA, 15 nt, Variola virus
acagauguaaauaua

SEQ ID NO: 3284043 - RNA, 12 nt, Variola virus
uuacaugugauu

SEQ ID NO: 3284044 - RNA, 20 nt, Variola virus
uaaauucagaauuucuacau

SEQ ID NO: 3284045 - RNA, 22 nt, Variola virus
uucuagcucccggauugaaaac

SEQ ID NO: 3284046 - RNA, 18 nt, Variola virus
caaaucuucuuauaagau

SEQ ID NO: 3284047 - RNA, 14 nt, Variola virus
cuccaaucaugugu

SEQ ID NO: 3284048 - RNA, 21 nt, Variola virus
ucuaauacuuuaacaugugua

SEQ ID NO: 3284049 - RNA, 17 nt, Variola virus
aagaauagaggcacuua

SEQ ID NO: 3284050 - RNA, 22 nt, Variola virus
uuaaucuuggcuccauacugua

SEQ ID NO: 3284051 - RNA, 18 nt, Variola virus
acaauuugaccaaaucua

SEQ ID NO: 3284052 - RNA, 22 nt, Variola virus
ugaauagcaaaauuuuuacuau

SEQ ID NO: 3284053 - RNA, 12 nt, Variola virus
gccaaaaugaua

SEQ ID NO: 3284054 - RNA, 20 nt, Variola virus
uguuaaauguacuguauaua

SEQ ID NO: 3284055 - RNA, 22 nt, Variola virus
uacaucugaaacauacaacaaa

SEQ ID NO: 3284056 - RNA, 19 nt, Variola virus
cauuuauaacggucaauau

SEQ ID NO: 3284057 - RNA, 15 nt, Variola virus
uuccaguauuuucca

SEQ ID NO: 3284058 - RNA, 16 nt, Variola virus
cuguaauuacauacuu

SEQ ID NO: 3284059 - RNA, 18 nt, Variola virus
agcugugguguaaucuua

SEQ ID NO: 3284060 - RNA, 19 nt, Variola virus
cacagcgaagaauucuaga

SEQ ID NO: 3284061 - RNA, 17 nt, Variola virus
ucuugaaacuuuucaga

SEQ ID NO: 3284062 - RNA, 22 nt, Variola virus
aaaaugguguauuggaccuggu

SEQ ID NO: 3284063 - RNA, 15 nt, Variola virus
auauuguuacagcca

SEQ ID NO: 3284064 - RNA, 20 nt, Variola virus
gacugaugaccauuuaaaaa

SEQ ID NO: 3284065 - RNA, 21 nt, Variola virus
augauucuaaccuagaauuac

SEQ ID NO: 3284066 - RNA, 18 nt, Variola virus
aaugaugauaaaauggau

SEQ ID NO: 3284067 - RNA, 23 nt, Variola virus
aguuuucccuaccaguuuauccc

SEQ ID NO: 3284068 - RNA, 17 nt, Variola virus
ucguaaaucuuuucacg

SEQ ID NO: 3284069 - RNA, 23 nt, Variola virus
aaugaugccucugccuuuuuaua

SEQ ID NO: 3284070 - RNA, 15 nt, Variola virus
aacuaugucaaaaau

SEQ ID NO: 3284071 - RNA, 22 nt, Variola virus
ugauaucuacaucguuuggauu

SEQ ID NO: 3284072 - RNA, 14 nt, Variola virus
uggagaucuaaaga

SEQ ID NO: 3284073 - RNA, 15 nt, Variola virus
aauuucauccauuua

SEQ ID NO: 3284074 - RNA, 18 nt, Variola virus
aaacaaguuuucauauca

SEQ ID NO: 3284075 - RNA, 21 nt, Variola virus
caauggaugaggaagugauau

SEQ ID NO: 3284076 - RNA, 13 nt, Variola virus
aauuagagaauua

SEQ ID NO: 3284077 - RNA, 16 nt, Variola virus
aguauauacacagaau

SEQ ID NO: 3284078 - RNA, 18 nt, Variola virus
auuaccgacgauugucca

SEQ ID NO: 3284079 - RNA, 22 nt, Variola virus
uauauuuucacuuuaucucauu

SEQ ID NO: 3284080 - RNA, 21 nt, Variola virus
ucuuugauuaaugauuuagaa

SEQ ID NO: 3284081 - RNA, 17 nt, Variola virus
uacuaauacuaauacua

SEQ ID NO: 3284082 - RNA, 12 nt, Variola virus
uagugaccauau

SEQ ID NO: 3284083 - RNA, 14 nt, Variola virus
ucauucauuccucc

SEQ ID NO: 3284084 - RNA, 23 nt, Variola virus
auacacguuagauuauucucaaa

SEQ ID NO: 3284085 - RNA, 18 nt, Variola virus
acucucuaucucuuaaug

SEQ ID NO: 3284086 - RNA, 16 nt, Variola virus
aucuugacugucuauc

SEQ ID NO: 3284087 - RNA, 23 nt, Variola virus
gucucaugucgcaauaaauauga

SEQ ID NO: 3284088 - RNA, 18 nt, Variola virus
cauuagguuaaaugauuu

SEQ ID NO: 3284089 - RNA, 17 nt, Variola virus
agauuaggaaauguuuc

SEQ ID NO: 3284090 - RNA, 12 nt, Variola virus
aauauaaaacua

SEQ ID NO: 3284091 - RNA, 15 nt, Variola virus
ucuauuagaugugua

SEQ ID NO: 3284092 - RNA, 14 nt, Variola virus
caauagauagucua

SEQ ID NO: 3284093 - RNA, 23 nt, Variola virus
uaccauggaaaaauauuacagau

SEQ ID NO: 3284094 - RNA, 16 nt, Variola virus
gaucuaauagaugaau

SEQ ID NO: 3284095 - RNA, 22 nt, Variola virus
ugauaugaacagacauuguauu

SEQ ID NO: 3284096 - RNA, 14 nt, Variola virus
cuaacuuuaaacaa

SEQ ID NO: 3284097 - RNA, 13 nt, Variola virus
gaagguauuucca

SEQ ID NO: 3284098 - RNA, 17 nt, Variola virus
aguuuuaccuucuaaug

SEQ ID NO: 3284099 - RNA, 22 nt, Variola virus
aacuuauaauccuuuuuauuua

SEQ ID NO: 3284100 - RNA, 23 nt, Variola virus
uucaaaacaaacagacuauucuu

SEQ ID NO: 3284101 - RNA, 17 nt, Variola virus
acaaaaguuaauaacaa

SEQ ID NO: 3284102 - RNA, 18 nt, Variola virus
aaccaaguacuacaaauu

SEQ ID NO: 3284103 - RNA, 20 nt, Variola virus
caagaaacaccaaguagaaa

SEQ ID NO: 3284104 - RNA, 19 nt, Variola virus
uagaauuuauauaucuauu

SEQ ID NO: 3284105 - RNA, 23 nt, Variola virus
aaucagacugggaggaucacugu

SEQ ID NO: 3284106 - RNA, 22 nt, Variola virus
agauuuauuugauaaucauguu

SEQ ID NO: 3284107 - RNA, 21 nt, Variola virus
gacauuuuuagagagaacuac

SEQ ID NO: 3284108 - RNA, 13 nt, Variola virus
agaaaucugaaga

SEQ ID NO: 3284109 - RNA, 21 nt, Variola virus
aaugauaucuaugauuuuacc

SEQ ID NO: 3284110 - RNA, 18 nt, Variola virus
ucauguguggaugcuacu

SEQ ID NO: 3284111 - RNA, 21 nt, Variola virus
uaaaauacuaaugcaucuauu

SEQ ID NO: 3284112 - RNA, 19 nt, Variola virus
acaucgaugccuuaacauc

SEQ ID NO: 3284113 - RNA, 20 nt, Variola virus
ugucacauacacuagugaua

SEQ ID NO: 3284114 - RNA, 14 nt, Variola virus
auaauccagauuuu

SEQ ID NO: 3284115 - RNA, 18 nt, Variola virus
aauuaaucuaguagaaaa

SEQ ID NO: 3284116 - RNA, 19 nt, Variola virus
auaauauauacgaagacag

SEQ ID NO: 3284117 - RNA, 18 nt, Variola virus
aggauggaaagauaucag

SEQ ID NO: 3284118 - RNA, 22 nt, Variola virus
ugaucuucaucuaccaaagaaa

SEQ ID NO: 3284119 - RNA, 22 nt, Variola virus
aauagaaaccaaaucaaaacaa

SEQ ID NO: 3284120 - RNA, 22 nt, Variola virus
aauuuaccagauauaggagaau

SEQ ID NO: 3284121 - RNA, 17 nt, Variola virus
uugaugucguuauucug

SEQ ID NO: 3284122 - RNA, 14 nt, Variola virus
gauguuuguucauu

SEQ ID NO: 3284123 - RNA, 20 nt, Variola virus
uaucuuccgucaaggaucau

SEQ ID NO: 3284124 - RNA, 19 nt, Variola virus
uuuaggagugaucaucaaa

SEQ ID NO: 3284125 - RNA, 23 nt, Variola virus
aucucuaaauaccucauaaaaca

SEQ ID NO: 3284126 - RNA, 20 nt, Variola virus
acauaaaggcgcccauuuca

SEQ ID NO: 3284127 - RNA, 12 nt, Variola virus
guguauuaucau

SEQ ID NO: 3284128 - RNA, 14 nt, Variola virus
aauauuauuaucca

SEQ ID NO: 3284129 - RNA, 15 nt, Variola virus
uaaugaauagauguc

SEQ ID NO: 3284130 - RNA, 16 nt, Variola virus
aacuaaaaaucaaacu

SEQ ID NO: 3284131 - RNA, 18 nt, Variola virus
uaaacagaaucccuuucc

SEQ ID NO: 3284132 - RNA, 15 nt, Variola virus
auaccgaaucuacau

SEQ ID NO: 3284133 - RNA, 14 nt, Variola virus
caaguauccaucau

SEQ ID NO: 3284134 - RNA, 11 nt, Variola virus
uuuccauccac

SEQ ID NO: 3284135 - RNA, 21 nt, Variola virus
auuccagauguuguaaaauua

SEQ ID NO: 3284136 - RNA, 14 nt, Variola virus
uuauauuuuucuua

SEQ ID NO: 3284137 - RNA, 19 nt, Variola virus
auguuucuuuaaaagucaa

SEQ ID NO: 3284138 - RNA, 15 nt, Variola virus
acaugauauucaugu

SEQ ID NO: 3284139 - RNA, 16 nt, Variola virus
uuaucauaucuguaau

SEQ ID NO: 3284140 - RNA, 21 nt, Variola virus
gauaauucgcacaccaacaau

SEQ ID NO: 3284141 - RNA, 22 nt, Variola virus
uucccauauccagacaacaauc

SEQ ID NO: 3284142 - RNA, 21 nt, Variola virus
augaugauacucucaaccauu

SEQ ID NO: 3284143 - RNA, 23 nt, Variola virus
ggacacgguguauuguauuucuc

SEQ ID NO: 3284144 - RNA, 17 nt, Variola virus
acaaucuaauacaaaau

SEQ ID NO: 3284145 - RNA, 19 nt, Variola virus
uacucuagauaaaaucacu

SEQ ID NO: 3284146 - RNA, 18 nt, Variola virus
uuauacuaugucauuaac

SEQ ID NO: 3284147 - RNA, 16 nt, Variola virus
uggauuaccauggaua

SEQ ID NO: 3284148 - RNA, 21 nt, Variola virus
aaauagcucuuaguaugggaa

SEQ ID NO: 3284149 - RNA, 17 nt, Variola virus
uaccauuuuaaaaucau

SEQ ID NO: 3284150 - RNA, 13 nt, Variola virus
aaaauuaugugaa

SEQ ID NO: 3284151 - RNA, 22 nt, Variola virus
uaagaucuucuauuuuaucauu

SEQ ID NO: 3284152 - RNA, 22 nt, Variola virus
uuaauacccguuuguuuaaauu

SEQ ID NO: 3284153 - RNA, 18 nt, Variola virus
cucaucggaucuguaaaa

SEQ ID NO: 3284154 - RNA, 18 nt, Variola virus
gauauacaguauaaugau

SEQ ID NO: 3284155 - RNA, 15 nt, Variola virus
caaaacugaaaauau

SEQ ID NO: 3284156 - RNA, 23 nt, Variola virus
uauuugcgugguuguuuaucaca

SEQ ID NO: 3284157 - RNA, 18 nt, Variola virus
uguugugcuguuguacau

SEQ ID NO: 3284158 - RNA, 12 nt, Variola virus
uagagaugaugc

SEQ ID NO: 3284159 - RNA, 18 nt, Variola virus
auaauuauuauaauacag

SEQ ID NO: 3284160 - RNA, 13 nt, Variola virus
aauucaaauagau

SEQ ID NO: 3284161 - RNA, 19 nt, Variola virus
aauaaaaguggaagucauu

SEQ ID NO: 3284162 - RNA, 20 nt, Variola virus
acacacugagaaacagcaua

SEQ ID NO: 3284163 - RNA, 16 nt, Variola virus
uaaaaagacuaaaucu

SEQ ID NO: 3284164 - RNA, 21 nt, Variola virus
uugauaguuguuccuagauau

SEQ ID NO: 3284165 - RNA, 19 nt, Variola virus
gcucccgccgauccuguau

SEQ ID NO: 3284166 - RNA, 15 nt, Variola virus
auuauagauuuucca

SEQ ID NO: 3284167 - RNA, 22 nt, Variola virus
ucaucugggaauaaaauacuac

SEQ ID NO: 3284168 - RNA, 20 nt, Variola virus
aaacuuccucauuaagauug

SEQ ID NO: 3284169 - RNA, 21 nt, Variola virus
aacagauauaguuuuucugga

SEQ ID NO: 3284170 - RNA, 15 nt, Variola virus
caauuaguuaauaau

SEQ ID NO: 3284171 - RNA, 21 nt, Variola virus
cgaaaaacuuuaauguagaua

SEQ ID NO: 3284172 - RNA, 21 nt, Variola virus
acaucguaaucaaaagaauug

SEQ ID NO: 3284173 - RNA, 15 nt, Variola virus
aacuuauccauuuau

SEQ ID NO: 3284174 - RNA, 14 nt, Variola virus
uucuuuuucaaaga

SEQ ID NO: 3284175 - RNA, 17 nt, Variola virus
ucaaaguauuugguauu

SEQ ID NO: 3284176 - RNA, 15 nt, Variola virus
aauaucagaaaggau

SEQ ID NO: 3284177 - RNA, 19 nt, Variola virus
cuaagagaaaucuuuagac

SEQ ID NO: 3284178 - RNA, 22 nt, Variola virus
uagagauaaaacaaguuuucau

SEQ ID NO: 3284179 - RNA, 19 nt, Variola virus
auauuaucucaacaaaauu

SEQ ID NO: 3284180 - RNA, 15 nt, Variola virus
uuuaguauuaaacag

SEQ ID NO: 3284181 - RNA, 14 nt, Variola virus
aaauuauucguuua

SEQ ID NO: 3284182 - RNA, 19 nt, Variola virus
uguauugauuacaguguau

SEQ ID NO: 3284183 - RNA, 13 nt, Variola virus
guaguauugauuc

SEQ ID NO: 3284184 - RNA, 20 nt, Variola virus
cguccaauguuagaguaucu

SEQ ID NO: 3284185 - RNA, 20 nt, Variola virus
auacauuauuacuaaacauu

SEQ ID NO: 3284186 - RNA, 16 nt, Variola virus
auagggaaucauauau

SEQ ID NO: 3284187 - RNA, 17 nt, Variola virus
auaugaaaaacaugucu

SEQ ID NO: 3284188 - RNA, 21 nt, Variola virus
auuuugucuuuaaguauauac

SEQ ID NO: 3284189 - RNA, 19 nt, Variola virus
uauucuuaaaagguuucau

SEQ ID NO: 3284190 - RNA, 22 nt, Variola virus
caaaagacuaugggaauauauu

SEQ ID NO: 3284191 - RNA, 15 nt, Variola virus
gaaaaaguaaaugau

SEQ ID NO: 3284192 - RNA, 15 nt, Variola virus
auuaacugaggauga

SEQ ID NO: 3284193 - RNA, 13 nt, Variola virus
auguaaguauuua

SEQ ID NO: 3284194 - RNA, 18 nt, Variola virus
uuacgaauauauaaaaga

SEQ ID NO: 3284195 - RNA, 22 nt, Variola virus
cauaugauccaaauucuggaau

SEQ ID NO: 3284196 - RNA, 20 nt, Variola virus
acaaugccaucuuacaugau

SEQ ID NO: 3284197 - RNA, 22 nt, Variola virus
auguagaauuuuuuaaaaaguu

SEQ ID NO: 3284198 - RNA, 13 nt, Variola virus
caccaaacauauu

SEQ ID NO: 3284199 - RNA, 14 nt, Variola virus
uaaaaauaugugcu

SEQ ID NO: 3284200 - RNA, 15 nt, Variola virus
aguaauaaaacuaau

SEQ ID NO: 3284201 - RNA, 22 nt, Variola virus
acaaugaaccguaauauaucua

SEQ ID NO: 3284202 - RNA, 21 nt, Variola virus
cucaguacauagauuauccaa

SEQ ID NO: 3284203 - RNA, 18 nt, Variola virus
cauaauauggauccucau

SEQ ID NO: 3284204 - RNA, 17 nt, Variola virus
aaguuauuguacuaucg

SEQ ID NO: 3284205 - RNA, 22 nt, Variola virus
ggcuaauugucuuucucuuuua

SEQ ID NO: 3284206 - RNA, 17 nt, Variola virus
uccggagauagauuucc

SEQ ID NO: 3284207 - RNA, 20 nt, Variola virus
aaguuuggacaguucccauu

SEQ ID NO: 3284208 - RNA, 14 nt, Variola virus
auacaauaaauguu

SEQ ID NO: 3284209 - RNA, 17 nt, Variola virus
aucacuaucuuugaaaa

SEQ ID NO: 3284210 - RNA, 12 nt, Variola virus
uggcaauguuuc

SEQ ID NO: 3284211 - RNA, 22 nt, Variola virus
uaauacuuauucauauuuuagu

SEQ ID NO: 3284212 - RNA, 18 nt, Variola virus
acuaaacaguuuauugau

SEQ ID NO: 3284213 - RNA, 15 nt, Variola virus
cauuauuaacaaauu

SEQ ID NO: 3284214 - RNA, 16 nt, Variola virus
uuacauguauuaaaga

SEQ ID NO: 3284215 - RNA, 22 nt, Variola virus
agaauugauaauauaaauauga

SEQ ID NO: 3284216 - RNA, 14 nt, Variola virus
auaauagcacuguu

SEQ ID NO: 3284217 - RNA, 17 nt, Variola virus
aacauuuuauuucuaga

SEQ ID NO: 3284218 - RNA, 18 nt, Variola virus
aucuauugacuauaacuc

SEQ ID NO: 3284219 - RNA, 20 nt, Variola virus
gcuaacauacgagacauguu

SEQ ID NO: 3284220 - RNA, 22 nt, Variola virus
cggaguaaguguugagcucccu

SEQ ID NO: 3284221 - RNA, 13 nt, Variola virus
aucaaaaaguaag

SEQ ID NO: 3284222 - RNA, 21 nt, Variola virus
aguauccacaaauaguaaaug

SEQ ID NO: 3284223 - RNA, 21 nt, Variola virus
ccauuauaaaacuuaugauua

SEQ ID NO: 3284224 - RNA, 19 nt, Variola virus
acaucguuuaauauuacau

SEQ ID NO: 3284225 - RNA, 21 nt, Variola virus
uaccacuuauuacuccauuau

SEQ ID NO: 3284226 - RNA, 14 nt, Variola virus
aaacaauacucuac

SEQ ID NO: 3284227 - RNA, 21 nt, Variola virus
uuuaucaaaaauaaaauacau

SEQ ID NO: 3284228 - RNA, 18 nt, Variola virus
ucauuuuuuuaggaguau

SEQ ID NO: 3284229 - RNA, 17 nt, Variola virus
auuaaauauuuuaaaau

SEQ ID NO: 3284230 - RNA, 14 nt, Variola virus
ucgugaauaauguu

SEQ ID NO: 3284231 - RNA, 12 nt, Variola virus
cguuuauggauc

SEQ ID NO: 3284232 - RNA, 13 nt, Variola virus
cuaauucuuuaau

SEQ ID NO: 3284233 - RNA, 22 nt, Variola virus
cuuuuagagguucccaauucca

SEQ ID NO: 3284234 - RNA, 14 nt, Variola virus
auacgaaaauagau

SEQ ID NO: 3284235 - RNA, 21 nt, Variola virus
aucaagaguaacuauugacuu

SEQ ID NO: 3284236 - RNA, 20 nt, Variola virus
aucucaugucuaagaauuac

SEQ ID NO: 3284237 - RNA, 15 nt, Variola virus
aacuaauauuaggaa

SEQ ID NO: 3284238 - RNA, 23 nt, Variola virus
uuuuuauucaugguaucauagaa

SEQ ID NO: 3284239 - RNA, 23 nt, Variola virus
agauaauagggagaaaugacauu

SEQ ID NO: 3284240 - RNA, 15 nt, Variola virus
aauuuagcauuucua

SEQ ID NO: 3284241 - RNA, 14 nt, Variola virus
uagaacauguguga

SEQ ID NO: 3284242 - RNA, 19 nt, Variola virus
agaucugaauuaaauaugu

SEQ ID NO: 3284243 - RNA, 13 nt, Variola virus
agaaaaaauaucu

SEQ ID NO: 3284244 - RNA, 17 nt, Variola virus
auaacauguaucaauau

SEQ ID NO: 3284245 - RNA, 17 nt, Variola virus
ugagagucaauaucauu

SEQ ID NO: 3284246 - RNA, 12 nt, Variola virus
aucgaguuuauc

SEQ ID NO: 3284247 - RNA, 16 nt, Variola virus
auaacucuucgucaaa

SEQ ID NO: 3284248 - RNA, 16 nt, Variola virus
acuaggagaauuauuu

SEQ ID NO: 3284249 - RNA, 15 nt, Variola virus
gaacaauuacagaca

SEQ ID NO: 3284250 - RNA, 15 nt, Variola virus
auaaaacucauauag

SEQ ID NO: 3284251 - RNA, 14 nt, Variola virus
augaucaaaaagac

SEQ ID NO: 3284252 - RNA, 16 nt, Variola virus
auggacgcaaaugauc

SEQ ID NO: 3284253 - RNA, 16 nt, Variola virus
aacuaaaauuaaacau

SEQ ID NO: 3284254 - RNA, 19 nt, Variola virus
cuugucauguugauacauc

SEQ ID NO: 3284255 - RNA, 14 nt, Variola virus
auguggguauuuau

SEQ ID NO: 3284256 - RNA, 23 nt, Variola virus
gaaaacgagaagcggauaaugau

SEQ ID NO: 3284257 - RNA, 19 nt, Variola virus
aaauccauguucuaccaac

SEQ ID NO: 3284258 - RNA, 18 nt, Variola virus
uagaaauaaaaauuauua

SEQ ID NO: 3284259 - RNA, 18 nt, Variola virus
auguuuucugucagaaaa

SEQ ID NO: 3284260 - RNA, 20 nt, Variola virus
gcauacgaaauaaauaauga

SEQ ID NO: 3284261 - RNA, 16 nt, Variola virus
auuccaacgauauuaa

SEQ ID NO: 3284262 - RNA, 14 nt, Variola virus
gaaauguuaaaacu

SEQ ID NO: 3284263 - RNA, 21 nt, Variola virus
aucuauaacaugcuaaaccuu

SEQ ID NO: 3284264 - RNA, 20 nt, Variola virus
uaccaaaaagugugauuaau

SEQ ID NO: 3284265 - RNA, 23 nt, Variola virus
agauguauuacagccucauauau

SEQ ID NO: 3284266 - RNA, 17 nt, Variola virus
aaucuuuuucaucuugu

SEQ ID NO: 3284267 - RNA, 12 nt, Variola virus
cauauaucacau

SEQ ID NO: 3284268 - RNA, 21 nt, Variola virus
uaaauaucaaccgcaaaucaa

SEQ ID NO: 3284269 - RNA, 14 nt, Variola virus
agcuauguuaucau

SEQ ID NO: 3284270 - RNA, 13 nt, Variola virus
cauuuucuucaac

SEQ ID NO: 3284271 - RNA, 15 nt, Variola virus
guccuuagcuauaau

SEQ ID NO: 3284272 - RNA, 14 nt, Variola virus
aauacaaaauaaua

SEQ ID NO: 3284273 - RNA, 16 nt, Variola virus
cugcuauauggauauu

SEQ ID NO: 3284274 - RNA, 22 nt, Variola virus
gauuaucguuuucaucuuuuau

SEQ ID NO: 3284275 - RNA, 13 nt, Variola virus
uucuuaauaaucg

SEQ ID NO: 3284276 - RNA, 17 nt, Variola virus
uagcuaaaaaaauagua

SEQ ID NO: 3284277 - RNA, 13 nt, Variola virus
gagaauaauagau

SEQ ID NO: 3284278 - RNA, 22 nt, Variola virus
uacaaccguuuccuccguuucc

SEQ ID NO: 3284279 - RNA, 13 nt, Variola virus
cucaacaauaaau

SEQ ID NO: 3284280 - RNA, 16 nt, Variola virus
uauuagcacuaucaua

SEQ ID NO: 3284281 - RNA, 12 nt, Variola virus
gauccaaucaaa

SEQ ID NO: 3284282 - RNA, 15 nt, Variola virus
uauucauucaacaac

SEQ ID NO: 3284283 - RNA, 14 nt, Variola virus
acauuguuaauuga

SEQ ID NO: 3284284 - RNA, 12 nt, Variola virus
auuccaaagauc

SEQ ID NO: 3284285 - RNA, 23 nt, Variola virus
agauaugguaaaauuaaauagua

SEQ ID NO: 3284286 - RNA, 12 nt, Variola virus
aacuuaaaagaa

SEQ ID NO: 3284287 - RNA, 14 nt, Variola virus
uuucaucuagauac

SEQ ID NO: 3284288 - RNA, 23 nt, Variola virus
agauacaaauuuuaagaaauggu

SEQ ID NO: 3284289 - RNA, 15 nt, Variola virus
accggucauauuaau

SEQ ID NO: 3284290 - RNA, 20 nt, Variola virus
uucuaccgcauacgaaauaa

SEQ ID NO: 3284291 - RNA, 20 nt, Variola virus
ugauacacuaaguauauaca

SEQ ID NO: 3284292 - RNA, 22 nt, Variola virus
aauuaaaacguccucuauacau

SEQ ID NO: 3284293 - RNA, 22 nt, Variola virus
uucgaagcaguuacaaugacuc

SEQ ID NO: 3284294 - RNA, 14 nt, Variola virus
uggcuucuuccaua

SEQ ID NO: 3284295 - RNA, 16 nt, Variola virus
agaacacacuuuucuc

SEQ ID NO: 3284296 - RNA, 17 nt, Variola virus
ugucuuugaacaacauu

SEQ ID NO: 3284297 - RNA, 19 nt, Variola virus
uaaagauacaaauaugucu

SEQ ID NO: 3284298 - RNA, 12 nt, Variola virus
aagauauaugau

SEQ ID NO: 3284299 - RNA, 14 nt, Variola virus
aaacauucauguac

SEQ ID NO: 3284300 - RNA, 18 nt, Variola virus
agauaaacuuuauguauu

SEQ ID NO: 3284301 - RNA, 13 nt, Variola virus
aagaauucuuaug

SEQ ID NO: 3284302 - RNA, 20 nt, Variola virus
ucaagaucuaauauucuaga

SEQ ID NO: 3284303 - RNA, 13 nt, Variola virus
cuaguucucuuuu

SEQ ID NO: 3284304 - RNA, 22 nt, Variola virus
ugaauugcauacacuacaugac

SEQ ID NO: 3284305 - RNA, 23 nt, Variola virus
uuuuacauggauuuaucauauca

SEQ ID NO: 3284306 - RNA, 18 nt, Variola virus
agaaccauuacaaauauu

SEQ ID NO: 3284307 - RNA, 15 nt, Variola virus
gauucacaauuuaua

SEQ ID NO: 3284308 - RNA, 16 nt, Variola virus
uucaucagauuauuua

SEQ ID NO: 3284309 - RNA, 16 nt, Variola virus
uucgucgaauaaugua

SEQ ID NO: 3284310 - RNA, 15 nt, Variola virus
aaaaugcuaauauua

SEQ ID NO: 3284311 - RNA, 17 nt, Variola virus
ucagcauccacucauau

SEQ ID NO: 3284312 - RNA, 13 nt, Variola virus
uaccuguuuuuau

SEQ ID NO: 3284313 - RNA, 19 nt, Variola virus
agaaaaaugcuaauauuaa

SEQ ID NO: 3284314 - RNA, 13 nt, Variola virus
ccaaacuuuuuua

SEQ ID NO: 3284315 - RNA, 13 nt, Variola virus
auuauagauguau

SEQ ID NO: 3284316 - RNA, 17 nt, Variola virus
uauuaacgaguuccauu

SEQ ID NO: 3284317 - RNA, 19 nt, Variola virus
ugaugucguuauucugaaa

SEQ ID NO: 3284318 - RNA, 18 nt, Variola virus
auguguuuuaauauauau

SEQ ID NO: 3284319 - RNA, 16 nt, Variola virus
acggacaaucuaaaaa

SEQ ID NO: 3284320 - RNA, 17 nt, Variola virus
aauaagacuuugaacau

SEQ ID NO: 3284321 - RNA, 19 nt, Variola virus
aauaaguuuuagauauuca

SEQ ID NO: 3284322 - RNA, 18 nt, Variola virus
ucgaaucagaagucauac

SEQ ID NO: 3284323 - RNA, 14 nt, Variola virus
uaacauaccaugga

SEQ ID NO: 3284324 - RNA, 19 nt, Variola virus
cacuuaacuaucuuucaag

SEQ ID NO: 3284325 - RNA, 21 nt, Variola virus
guggauaaucagaauauacac

SEQ ID NO: 3284326 - RNA, 20 nt, Variola virus
uuauagaugccaagauaucu

SEQ ID NO: 3284327 - RNA, 16 nt, Variola virus
uucuuaaacuuauucu

SEQ ID NO: 3284328 - RNA, 17 nt, Variola virus
guuaaacugugaauguc

SEQ ID NO: 3284329 - RNA, 13 nt, Variola virus
uaaccuuuuuagu

SEQ ID NO: 3284330 - RNA, 14 nt, Variola virus
guauugacaaauau

SEQ ID NO: 3284331 - RNA, 17 nt, Variola virus
uuuguaaauaacuaucu

SEQ ID NO: 3284332 - RNA, 16 nt, Variola virus
aaucacuauagaaaau

SEQ ID NO: 3284333 - RNA, 19 nt, Variola virus
uuugaauuaguuuauaauu

SEQ ID NO: 3284334 - RNA, 18 nt, Variola virus
aauacugcaauaauuuuc

SEQ ID NO: 3284335 - RNA, 21 nt, Variola virus
acuuucuucuauaaaauggau

SEQ ID NO: 3284336 - RNA, 17 nt, Variola virus
acaaacgccauaaucug

SEQ ID NO: 3284337 - RNA, 16 nt, Variola virus
uucuuaugaaacuugg

SEQ ID NO: 3284338 - RNA, 14 nt, Variola virus
auuugaaguauuug

SEQ ID NO: 3284339 - RNA, 15 nt, Variola virus
uuguuauuaacguga

SEQ ID NO: 3284340 - RNA, 14 nt, Variola virus
gagggaaaagucau

SEQ ID NO: 3284341 - RNA, 14 nt, Variola virus
auaaaaauaauauu

SEQ ID NO: 3284342 - RNA, 13 nt, Variola virus
auucaauaacuaa

SEQ ID NO: 3284343 - RNA, 13 nt, Variola virus
aucaucuuuauca

SEQ ID NO: 3284344 - RNA, 14 nt, Variola virus
ccaacaaacauauu

SEQ ID NO: 3284345 - RNA, 23 nt, Variola virus
caaguaauacgugagaauauacu

SEQ ID NO: 3284346 - RNA, 22 nt, Variola virus
uguaugugcauucuuuaugaca

SEQ ID NO: 3284347 - RNA, 18 nt, Variola virus
auuaacgaguucaaauau

SEQ ID NO: 3284348 - RNA, 17 nt, Variola virus
agaguaggaaguuuaau

SEQ ID NO: 3284349 - RNA, 14 nt, Variola virus
uagaugguucuuua

SEQ ID NO: 3284350 - RNA, 13 nt, Variola virus
cuuaacuuuuucu

SEQ ID NO: 3284351 - RNA, 13 nt, Variola virus
acaagauauauau

SEQ ID NO: 3284352 - RNA, 15 nt, Variola virus
aaagacaucauauau

SEQ ID NO: 3284353 - RNA, 20 nt, Variola virus
aacgucuccaauauaugaua

SEQ ID NO: 3284354 - RNA, 19 nt, Variola virus
uacagauguaaauauaucu

SEQ ID NO: 3284355 - RNA, 19 nt, Variola virus
gauauacgaagaauaaugu

SEQ ID NO: 3284356 - RNA, 16 nt, Variola virus
ucauagcugagaauau

SEQ ID NO: 3284357 - RNA, 23 nt, Variola virus
uaguugauagaacaaaauacaua

SEQ ID NO: 3284358 - RNA, 19 nt, Variola virus
cucgaucaugaauggauuu

SEQ ID NO: 3284359 - RNA, 14 nt, Variola virus
ucauaucuguaauu

SEQ ID NO: 3284360 - RNA, 14 nt, Variola virus
ccaugauaaugaau

SEQ ID NO: 3284361 - RNA, 13 nt, Variola virus
uacaaaaacauac

SEQ ID NO: 3284362 - RNA, 16 nt, Variola virus
cuaugucuuuauccaa

SEQ ID NO: 3284363 - RNA, 12 nt, Variola virus
uuuaaacugaaa

SEQ ID NO: 3284364 - RNA, 23 nt, Variola virus
cugcuggaaaauaaaucacugac

SEQ ID NO: 3284365 - RNA, 14 nt, Variola virus
ucuaauacauaauu

SEQ ID NO: 3284366 - RNA, 12 nt, Variola virus
aaaauauguaga

SEQ ID NO: 3284367 - RNA, 13 nt, Variola virus
accgaaauuauca

SEQ ID NO: 3284368 - RNA, 15 nt, Variola virus
augaauaucacauau

SEQ ID NO: 3284369 - RNA, 14 nt, Variola virus
acagauaaauggaa

SEQ ID NO: 3284370 - RNA, 14 nt, Variola virus
ugaacauuauuaau

SEQ ID NO: 3284371 - RNA, 19 nt, Variola virus
uauccguauuuccauaaua

SEQ ID NO: 3284372 - RNA, 16 nt, Variola virus
uaacaaauuaaagaua

SEQ ID NO: 3284373 - RNA, 22 nt, Variola virus
aaaauuauuaaacaauacucua

SEQ ID NO: 3284374 - RNA, 14 nt, Variola virus
uaacaauuaaugau

SEQ ID NO: 3284375 - RNA, 17 nt, Variola virus
agauauaguauauucca

SEQ ID NO: 3284376 - RNA, 14 nt, Variola virus
guuuuaaauuggua

SEQ ID NO: 3284377 - RNA, 23 nt, Variola virus
aaaugugguaugucuccauuaca

SEQ ID NO: 3284378 - RNA, 20 nt, Variola virus
ucaugguaaggucuuagaaa

SEQ ID NO: 3284379 - RNA, 12 nt, Variola virus
caucuaugaaug

SEQ ID NO: 3284380 - RNA, 15 nt, Variola virus
uuuacacguaaccau

SEQ ID NO: 3284381 - RNA, 20 nt, Variola virus
auucuaugaugguauugaag

SEQ ID NO: 3284382 - RNA, 21 nt, Variola virus
ucagaauauucuuuucuaaga

SEQ ID NO: 3284383 - RNA, 14 nt, Variola virus
guuuucucuauucu

SEQ ID NO: 3284384 - RNA, 14 nt, Variola virus
uccaauuuuucaga

SEQ ID NO: 3284385 - RNA, 20 nt, Variola virus
ucuagauucgagaucucuaa

SEQ ID NO: 3284386 - RNA, 18 nt, Variola virus
gauucucuacucuagaua

SEQ ID NO: 3284387 - RNA, 18 nt, Variola virus
auauuaaugacgaauuga

SEQ ID NO: 3284388 - RNA, 17 nt, Variola virus
aggaaacuuaaaauaua

SEQ ID NO: 3284389 - RNA, 14 nt, Variola virus
cagagaaguauuuu

SEQ ID NO: 3284390 - RNA, 18 nt, Variola virus
agacaaugcuuuaauaaa

SEQ ID NO: 3284391 - RNA, 22 nt, Variola virus
aaauaucuuaaggagaaugaaa

SEQ ID NO: 3284392 - RNA, 18 nt, Variola virus
uauacuccggucgaugau

SEQ ID NO: 3284393 - RNA, 14 nt, Variola virus
aauuauuuuuacua

SEQ ID NO: 3284394 - RNA, 15 nt, Variola virus
aacaccaaguagaaa

SEQ ID NO: 3284395 - RNA, 18 nt, Variola virus
gacaauaguguucugaau

SEQ ID NO: 3284396 - RNA, 23 nt, Variola virus
cuaacauacgagacauguuagua

SEQ ID NO: 3284397 - RNA, 19 nt, Variola virus
gaaaauagaaauuuguaaa

SEQ ID NO: 3284398 - RNA, 18 nt, Variola virus
aucuauggaauuaccacu

SEQ ID NO: 3284399 - RNA, 17 nt, Variola virus
uuagauaaaugcgguaa

SEQ ID NO: 3284400 - RNA, 18 nt, Variola virus
aauuaaguagaucaucug

SEQ ID NO: 3284401 - RNA, 18 nt, Variola virus
guuguaaauuuuaauauu

SEQ ID NO: 3284402 - RNA, 14 nt, Variola virus
uuauuaugaagacu

SEQ ID NO: 3284403 - RNA, 21 nt, Variola virus
aucuauacgaccgauaagaga

SEQ ID NO: 3284404 - RNA, 17 nt, Variola virus
uaaaguacguaaaucua

SEQ ID NO: 3284405 - RNA, 14 nt, Variola virus
gcaucuguaaaaga

SEQ ID NO: 3284406 - RNA, 18 nt, Variola virus
auauuaaaguaaaaucua

SEQ ID NO: 3284407 - RNA, 14 nt, Variola virus
agagauaucuaucu

SEQ ID NO: 3284408 - RNA, 14 nt, Variola virus
gauuauucuacuau

SEQ ID NO: 3284409 - RNA, 18 nt, Variola virus
gugcucaaacaaaaugug

SEQ ID NO: 3284410 - RNA, 16 nt, Variola virus
augauauuagaacuac

SEQ ID NO: 3284411 - RNA, 13 nt, Variola virus
uuaauacaucauc

SEQ ID NO: 3284412 - RNA, 14 nt, Variola virus
cuucuuauuuagau

SEQ ID NO: 3284413 - RNA, 16 nt, Variola virus
uccuuugauuaucauc

SEQ ID NO: 3284414 - RNA, 18 nt, Variola virus
gaaauuugaaagaacuac

SEQ ID NO: 3284415 - RNA, 13 nt, Variola virus
aaugaaaauggau

SEQ ID NO: 3284416 - RNA, 21 nt, Variola virus
ggcaauaauugcgaauguuuu

SEQ ID NO: 3284417 - RNA, 18 nt, Variola virus
agcaacggggaugaugau

SEQ ID NO: 3284418 - RNA, 15 nt, Variola virus
aguaugucuuaauaa

SEQ ID NO: 3284419 - RNA, 12 nt, Variola virus
gcucaaacaaaa

SEQ ID NO: 3284420 - RNA, 22 nt, Variola virus
auagaaacauauucuaugaauu

SEQ ID NO: 3284421 - RNA, 15 nt, Variola virus
auuauaauauuuccu

SEQ ID NO: 3284422 - RNA, 22 nt, Variola virus
aguuuucuuucaaaauagcuau

SEQ ID NO: 3284423 - RNA, 15 nt, Variola virus
uauuaauucuguaaa

SEQ ID NO: 3284424 - RNA, 12 nt, Variola virus
aaauuaaagucu

SEQ ID NO: 3284425 - RNA, 15 nt, Variola virus
aucauucgguaacuu

SEQ ID NO: 3284426 - RNA, 19 nt, Variola virus
acuuguguucuaaauggau

SEQ ID NO: 3284427 - RNA, 21 nt, Variola virus
caaaguaaugccuguaaaaau

SEQ ID NO: 3284428 - RNA, 21 nt, Variola virus
guuauaucacaugaugauuua

SEQ ID NO: 3284429 - RNA, 19 nt, Variola virus
uaagauuuccuccuccgcu

SEQ ID NO: 3284430 - RNA, 13 nt, Variola virus
cagaugucauuau

SEQ ID NO: 3284431 - RNA, 23 nt, Variola virus
aauaguaucgaaaacagaauauc

SEQ ID NO: 3284432 - RNA, 22 nt, Variola virus
uuaagagauccgauaaacauug

SEQ ID NO: 3284433 - RNA, 19 nt, Variola virus
auuacuaaaucuguauauc

SEQ ID NO: 3284434 - RNA, 15 nt, Variola virus
acuaauacaucugaa

SEQ ID NO: 3284435 - RNA, 18 nt, Variola virus
agaaagcguguaauacga

SEQ ID NO: 3284436 - RNA, 18 nt, Variola virus
gugacagauauacaaaac

SEQ ID NO: 3284437 - RNA, 19 nt, Variola virus
uccaccaucuaccauaauc

SEQ ID NO: 3284438 - RNA, 14 nt, Variola virus
ucgcaacugucuuu

SEQ ID NO: 3284439 - RNA, 19 nt, Variola virus
ucagauuauuaaguauaau

SEQ ID NO: 3284440 - RNA, 17 nt, Variola virus
uaaacaaaaauauaaag

SEQ ID NO: 3284441 - RNA, 22 nt, Variola virus
agaaagauauauuaagaauaau

SEQ ID NO: 3284442 - RNA, 19 nt, Variola virus
gaagauucccaaauaauca

SEQ ID NO: 3284443 - RNA, 13 nt, Variola virus
cgcgagucaauuc

SEQ ID NO: 3284444 - RNA, 17 nt, Variola virus
ucauguguucaaaguau

SEQ ID NO: 3284445 - RNA, 14 nt, Variola virus
guuuucuauuuuua

SEQ ID NO: 3284446 - RNA, 13 nt, Variola virus
aguauuuuucuaa

SEQ ID NO: 3284447 - RNA, 14 nt, Variola virus
uugugauuguauuu

SEQ ID NO: 3284448 - RNA, 20 nt, Variola virus
uaccugcaguggaguuauau

SEQ ID NO: 3284449 - RNA, 15 nt, Variola virus
acgcauccauccaaa

SEQ ID NO: 3284450 - RNA, 15 nt, Variola virus
auuaguaaaaaauuu

SEQ ID NO: 3284451 - RNA, 17 nt, Variola virus
uuauccgcuaaaaauuu

SEQ ID NO: 3284452 - RNA, 15 nt, Variola virus
uggacaaaucuggaa

SEQ ID NO: 3284453 - RNA, 13 nt, Variola virus
caauuuguuaaua

SEQ ID NO: 3284454 - RNA, 12 nt, Variola virus
uuucuacauaau

SEQ ID NO: 3284455 - RNA, 14 nt, Variola virus
gucaauauucuguu

SEQ ID NO: 3284456 - RNA, 19 nt, Variola virus
uaaacucagauaauagcaa

SEQ ID NO: 3284457 - RNA, 13 nt, Variola virus
ugguauuauucua

SEQ ID NO: 3284458 - RNA, 20 nt, Variola virus
uuuauuaucuugucuuggug

SEQ ID NO: 3284459 - RNA, 13 nt, Variola virus
uuaaaaauuauua

SEQ ID NO: 3284460 - RNA, 21 nt, Variola virus
uaauuccguuaauauuaaaaa

SEQ ID NO: 3284461 - RNA, 21 nt, Variola virus
caggauuccuauucauuuuga

SEQ ID NO: 3284462 - RNA, 15 nt, Variola virus
uuguccggcauauca

SEQ ID NO: 3284463 - RNA, 13 nt, Variola virus
uaacuccuugguu

SEQ ID NO: 3284464 - RNA, 19 nt, Variola virus
gauucuucacaagugaaau

SEQ ID NO: 3284465 - RNA, 14 nt, Variola virus
auguuauuaaaugu

SEQ ID NO: 3284466 - RNA, 17 nt, Variola virus
auaucauaaucuaaaau

SEQ ID NO: 3284467 - RNA, 14 nt, Variola virus
acugaaucauauau

SEQ ID NO: 3284468 - RNA, 14 nt, Variola virus
agagacaaacuauu

SEQ ID NO: 3284469 - RNA, 22 nt, Variola virus
uaauauuuaugauuuaauguau

SEQ ID NO: 3284470 - RNA, 21 nt, Variola virus
aauaauuguaaaacauacaau

SEQ ID NO: 3284471 - RNA, 18 nt, Variola virus
cauauguaguguuaauuu

SEQ ID NO: 3284472 - RNA, 15 nt, Variola virus
uaucuucuuuaucua

SEQ ID NO: 3284473 - RNA, 18 nt, Variola virus
uuacauaguugauaaaaa

SEQ ID NO: 3284474 - RNA, 21 nt, Variola virus
uauuuccuguuccguuaacau

SEQ ID NO: 3284475 - RNA, 18 nt, Variola virus
auggaccaaauuaucauc

SEQ ID NO: 3284476 - RNA, 23 nt, Variola virus
aauauccaaguauuuuaauucua

SEQ ID NO: 3284477 - RNA, 17 nt, Variola virus
gauccaaucaaaaaaua

SEQ ID NO: 3284478 - RNA, 16 nt, Variola virus
uaaauaccauuaauca

SEQ ID NO: 3284479 - RNA, 11 nt, Variola virus
guaaguuuauu

SEQ ID NO: 3284480 - RNA, 19 nt, Variola virus
cgauaugccuccagaaguu

SEQ ID NO: 3284481 - RNA, 12 nt, Variola virus
agguauaugcau

SEQ ID NO: 3284482 - RNA, 13 nt, Variola virus
ucuucauuaauaa

SEQ ID NO: 3284483 - RNA, 22 nt, Variola virus
caaauaucggcauuuauguuuc

SEQ ID NO: 3284484 - RNA, 13 nt, Variola virus
uuaaauccuuaau

SEQ ID NO: 3284485 - RNA, 18 nt, Variola virus
acuaggauuagagaagau

SEQ ID NO: 3284486 - RNA, 21 nt, Variola virus
gauauaauucguggauaauca

SEQ ID NO: 3284487 - RNA, 19 nt, Variola virus
auaaguaguaauaaugauu

SEQ ID NO: 3284488 - RNA, 19 nt, Variola virus
gauuaaaaauaaaguuauc

SEQ ID NO: 3284489 - RNA, 21 nt, Variola virus
aaaauuaauauuuaugauuua

SEQ ID NO: 3284490 - RNA, 16 nt, Variola virus
cguagaaaacuauuac

SEQ ID NO: 3284491 - RNA, 20 nt, Variola virus
cugaauaaucguuauuauca

SEQ ID NO: 3284492 - RNA, 22 nt, Variola virus
aguauuaaccaugaaagaaaga

SEQ ID NO: 3284493 - RNA, 15 nt, Variola virus
ucgaacauacaaaaa

SEQ ID NO: 3284494 - RNA, 23 nt, Variola virus
uuuuacuccucuccuuccguaaa

SEQ ID NO: 3284495 - RNA, 20 nt, Variola virus
aaauaaguaguaauaaugau

SEQ ID NO: 3284496 - RNA, 14 nt, Variola virus
uauucauucaauau

SEQ ID NO: 3284497 - RNA, 18 nt, Variola virus
cagaagaauaugaugauu

SEQ ID NO: 3284498 - RNA, 19 nt, Variola virus
caucaaacgaauaaacaau

SEQ ID NO: 3284499 - RNA, 19 nt, Variola virus
uuaaacgauggauuuucca

SEQ ID NO: 3284500 - RNA, 12 nt, Variola virus
cauuuaaaguua

SEQ ID NO: 3284501 - RNA, 18 nt, Variola virus
ugacaucauacuagauaa

SEQ ID NO: 3284502 - RNA, 20 nt, Variola virus
uuccacgaaaguaauuauua

SEQ ID NO: 3284503 - RNA, 18 nt, Variola virus
auuuugcauaacauguau

SEQ ID NO: 3284504 - RNA, 20 nt, Variola virus
cagucuuuaaguucuggaau

SEQ ID NO: 3284505 - RNA, 22 nt, Variola virus
ucuuuuuauccucauuaaacag

SEQ ID NO: 3284506 - RNA, 18 nt, Variola virus
uggauaagcguaugaaau

SEQ ID NO: 3284507 - RNA, 14 nt, Variola virus
agugcuuguaugug

SEQ ID NO: 3284508 - RNA, 23 nt, Variola virus
ucuaaauauuuuagaacacuguu

SEQ ID NO: 3284509 - RNA, 14 nt, Variola virus
acaaaguacucaau

SEQ ID NO: 3284510 - RNA, 13 nt, Variola virus
caauaaacaaaau

SEQ ID NO: 3284511 - RNA, 22 nt, Variola virus
agagucgacaaugaaaauggau

SEQ ID NO: 3284512 - RNA, 13 nt, Variola virus
uaauaaugauuca

SEQ ID NO: 3284513 - RNA, 20 nt, Variola virus
aguucaaauaugaaaugcua

SEQ ID NO: 3284514 - RNA, 19 nt, Variola virus
acuauugcaucaaaaggau

SEQ ID NO: 3284515 - RNA, 14 nt, Variola virus
auguuaauauguau

SEQ ID NO: 3284516 - RNA, 17 nt, Variola virus
uuaauacaguaaguaca

SEQ ID NO: 3284517 - RNA, 16 nt, Variola virus
gauauacuacuucucc

SEQ ID NO: 3284518 - RNA, 20 nt, Variola virus
gucauaaacuguaaaugauu

SEQ ID NO: 3284519 - RNA, 13 nt, Variola virus
aaauuguuuaguu

SEQ ID NO: 3284520 - RNA, 21 nt, Variola virus
acacacuuaccuucaacagua

SEQ ID NO: 3284521 - RNA, 18 nt, Variola virus
uuccaaucuauaauaucu

SEQ ID NO: 3284522 - RNA, 20 nt, Variola virus
aucuagucaccgagggaaaa

SEQ ID NO: 3284523 - RNA, 12 nt, Variola virus
guguauuuccau

SEQ ID NO: 3284524 - RNA, 22 nt, Variola virus
ucacucucauaauguaaagaua

SEQ ID NO: 3284525 - RNA, 17 nt, Variola virus
uucuuuagcgaaacagu

SEQ ID NO: 3284526 - RNA, 17 nt, Variola virus
acuagacugauuucucu

SEQ ID NO: 3284527 - RNA, 15 nt, Variola virus
auuuagauacuaaca

SEQ ID NO: 3284528 - RNA, 16 nt, Variola virus
guuauagucaaauuaa

SEQ ID NO: 3284529 - RNA, 14 nt, Variola virus
uucugauaauagau

SEQ ID NO: 3284530 - RNA, 16 nt, Variola virus
cauauagaucaaucau

SEQ ID NO: 3284531 - RNA, 21 nt, Variola virus
uuuacauggcucguaccaaca

SEQ ID NO: 3284532 - RNA, 16 nt, Variola virus
agaacaaaauaaacaa

SEQ ID NO: 3284533 - RNA, 12 nt, Variola virus
auaugugcauua

SEQ ID NO: 3284534 - RNA, 14 nt, Variola virus
acaagucuaauaau

SEQ ID NO: 3284535 - RNA, 15 nt, Variola virus
uaaaauauauuauca

SEQ ID NO: 3284536 - RNA, 22 nt, Variola virus
aacuacuuguaauauugaaauc

SEQ ID NO: 3284537 - RNA, 13 nt, Variola virus
agauaaugauaua

SEQ ID NO: 3284538 - RNA, 17 nt, Variola virus
auauaccgauauguaca

SEQ ID NO: 3284539 - RNA, 20 nt, Variola virus
uauuuacugaacaggcauuu

SEQ ID NO: 3284540 - RNA, 13 nt, Variola virus
aaacuugcaaaga

SEQ ID NO: 3284541 - RNA, 19 nt, Variola virus
acuaucguuggaaaaugau

SEQ ID NO: 3284542 - RNA, 17 nt, Variola virus
ucacugaguuuacagau

SEQ ID NO: 3284543 - RNA, 15 nt, Variola virus
uuuggauuuggaaaa

SEQ ID NO: 3284544 - RNA, 12 nt, Variola virus
uauauagauguc

SEQ ID NO: 3284545 - RNA, 21 nt, Variola virus
uuguaacaucgguacggguau

SEQ ID NO: 3284546 - RNA, 16 nt, Variola virus
agaaagucagaaucua

SEQ ID NO: 3284547 - RNA, 14 nt, Variola virus
gcaugauagaagau

SEQ ID NO: 3284548 - RNA, 15 nt, Variola virus
aucugaauaaaacau

SEQ ID NO: 3284549 - RNA, 18 nt, Variola virus
gcgauuguagauaaugaa

SEQ ID NO: 3284550 - RNA, 16 nt, Variola virus
uaguuuuacuaucaua

SEQ ID NO: 3284551 - RNA, 16 nt, Variola virus
cagauuauuuaacaau

SEQ ID NO: 3284552 - RNA, 19 nt, Variola virus
agcauauuguaauaucuua

SEQ ID NO: 3284553 - RNA, 21 nt, Variola virus
cuucgauagauauucuucaga

SEQ ID NO: 3284554 - RNA, 19 nt, Variola virus
aaacacuuggauauuguau

SEQ ID NO: 3284555 - RNA, 24 nt, Variola virus
uuuauaaagaaauacauaucgcac

SEQ ID NO: 3284556 - RNA, 17 nt, Variola virus
cucauaaaauaguucuc

SEQ ID NO: 3284557 - RNA, 23 nt, Variola virus
uauguauacauaauauuaucaug

SEQ ID NO: 3284558 - RNA, 23 nt, Variola virus
auacgaagacagacauacaguag

SEQ ID NO: 3284559 - RNA, 22 nt, Variola virus
ucucuguaauaguuuccaccaa

SEQ ID NO: 3284560 - RNA, 19 nt, Variola virus
uuauaucguguucauuaac

SEQ ID NO: 3284561 - RNA, 23 nt, Variola virus
ucaaauauagaucuuauuuagua

SEQ ID NO: 3284562 - RNA, 17 nt, Variola virus
gcgguaaacauucaugu

SEQ ID NO: 3284563 - RNA, 23 nt, Variola virus
ucgaucuuuggauauucuaacga

SEQ ID NO: 3284564 - RNA, 20 nt, Variola virus
uacgcucucuggaggauugu

SEQ ID NO: 3284565 - RNA, 19 nt, Variola virus
cgauugauuuggaauucuu

SEQ ID NO: 3284566 - RNA, 15 nt, Variola virus
aguauucuuauguau

SEQ ID NO: 3284567 - RNA, 23 nt, Variola virus
ucgacucauaagaaagagaauag

SEQ ID NO: 3284568 - RNA, 21 nt, Variola virus
aagaucguuggacauuggaua

SEQ ID NO: 3284569 - RNA, 21 nt, Variola virus
ggauucauccuuaaauguuuu

SEQ ID NO: 3284570 - RNA, 12 nt, Variola virus
acggagaagaau

SEQ ID NO: 3284571 - RNA, 13 nt, Variola virus
acuucuaucuugu

SEQ ID NO: 3284572 - RNA, 16 nt, Variola virus
uaaaaaaugaaaauaa

SEQ ID NO: 3284573 - RNA, 22 nt, Variola virus
uaaacgacuauaaaauuauuga

SEQ ID NO: 3284574 - RNA, 20 nt, Variola virus
auauacauuuucaaauaaua

SEQ ID NO: 3284575 - RNA, 15 nt, Variola virus
gcgaacuuuaaacag

SEQ ID NO: 3284576 - RNA, 12 nt, Variola virus
auuacuuaaaaa

SEQ ID NO: 3284577 - RNA, 15 nt, Variola virus
auacaacaaagaaaa

SEQ ID NO: 3284578 - RNA, 15 nt, Variola virus
aauucuucaaaugaa

SEQ ID NO: 3284579 - RNA, 17 nt, Variola virus
augaauuccucugaaaa

SEQ ID NO: 3284580 - RNA, 21 nt, Variola virus
aguaucugagcacuacaguca

SEQ ID NO: 3284581 - RNA, 13 nt, Variola virus
uuagaucauuaac

SEQ ID NO: 3284582 - RNA, 20 nt, Variola virus
cggcgauucuuuuucuuucg

SEQ ID NO: 3284583 - RNA, 12 nt, Variola virus
uacuaucaaaau

SEQ ID NO: 3284584 - RNA, 14 nt, Variola virus
caucugcucaacaa

SEQ ID NO: 3284585 - RNA, 18 nt, Variola virus
gauaguaaaacaaaauua

SEQ ID NO: 3284586 - RNA, 14 nt, Variola virus
auuaagacauauau

SEQ ID NO: 3284587 - RNA, 15 nt, Variola virus
caacugucuuucaag

SEQ ID NO: 3284588 - RNA, 22 nt, Variola virus
aaaguauccaucacuucuaucu

SEQ ID NO: 3284589 - RNA, 14 nt, Variola virus
auaaucauguugau

SEQ ID NO: 3284590 - RNA, 15 nt, Variola virus
agucucuccuuccaa

SEQ ID NO: 3284591 - RNA, 16 nt, Variola virus
acucuauucuucaaga

SEQ ID NO: 3284592 - RNA, 15 nt, Variola virus
uuaauagaacucuuu

SEQ ID NO: 3284593 - RNA, 20 nt, Variola virus
gauaagauauguuuauucau

SEQ ID NO: 3284594 - RNA, 23 nt, Variola virus
cuauuucaaaaguuuuuaagaga

SEQ ID NO: 3284595 - RNA, 17 nt, Variola virus
gauaaguccuucaaaau

SEQ ID NO: 3284596 - RNA, 12 nt, Variola virus
acuguuuaagag

SEQ ID NO: 3284597 - RNA, 13 nt, Variola virus
gauaauuauccau

SEQ ID NO: 3284598 - RNA, 14 nt, Variola virus
auaucauacaugau

SEQ ID NO: 3284599 - RNA, 22 nt, Variola virus
aauaguuuacagauauuuucca

SEQ ID NO: 3284600 - RNA, 21 nt, Variola virus
gcgccuuauauagcacuuuua

SEQ ID NO: 3284601 - RNA, 14 nt, Variola virus
aaauuuauuauuua

SEQ ID NO: 3284602 - RNA, 14 nt, Variola virus
gaagaagaaaacaa

SEQ ID NO: 3284603 - RNA, 17 nt, Variola virus
uauuccuaguuuggauu

SEQ ID NO: 3284604 - RNA, 18 nt, Variola virus
agaacaaaccaaauauau

SEQ ID NO: 3284605 - RNA, 13 nt, Variola virus
uuuuuuaugauuu

SEQ ID NO: 3284606 - RNA, 13 nt, Variola virus
gaauauauuuaua

SEQ ID NO: 3284607 - RNA, 21 nt, Variola virus
uagagcccacguuuaaacauu

SEQ ID NO: 3284608 - RNA, 17 nt, Variola virus
caagaguaacuauugac

SEQ ID NO: 3284609 - RNA, 23 nt, Variola virus
gauauauauggucuuaugaaaga

SEQ ID NO: 3284610 - RNA, 13 nt, Variola virus
agacuaaagaaac

SEQ ID NO: 3284611 - RNA, 22 nt, Variola virus
uuguagaacuuaacuuuuucuu

SEQ ID NO: 3284612 - RNA, 15 nt, Variola virus
ugcuguuguacauac

SEQ ID NO: 3284613 - RNA, 14 nt, Variola virus
acugaauauauuua

SEQ ID NO: 3284614 - RNA, 16 nt, Variola virus
uguagccgauaaacaa

SEQ ID NO: 3284615 - RNA, 22 nt, Variola virus
auugguaaauuccauagaauau

SEQ ID NO: 3284616 - RNA, 15 nt, Variola virus
cuuccaacucuguuu

SEQ ID NO: 3284617 - RNA, 20 nt, Variola virus
aguuaugacauucaucaaug

SEQ ID NO: 3284618 - RNA, 17 nt, Variola virus
cgaguuuaaaacuucua

SEQ ID NO: 3284619 - RNA, 22 nt, Variola virus
agcgacuaucaucuaaacagua

SEQ ID NO: 3284620 - RNA, 23 nt, Variola virus
ugugaaugguaaagaaugcuguu

SEQ ID NO: 3284621 - RNA, 17 nt, Variola virus
acuaaguucugcauuca

SEQ ID NO: 3284622 - RNA, 16 nt, Variola virus
ucaaauuagauuucga

SEQ ID NO: 3284623 - RNA, 21 nt, Variola virus
ccauauuaugggaucagguaa

SEQ ID NO: 3284624 - RNA, 20 nt, Variola virus
uauucauuaggauuaucaaa

SEQ ID NO: 3284625 - RNA, 15 nt, Variola virus
uucgauauauguucc

SEQ ID NO: 3284626 - RNA, 21 nt, Variola virus
aaaucaaaacaaaauucauua

SEQ ID NO: 3284627 - RNA, 14 nt, Variola virus
cggcacauauuaau

SEQ ID NO: 3284628 - RNA, 21 nt, Variola virus
cuaggacggcgauucuuuuuc

SEQ ID NO: 3284629 - RNA, 16 nt, Variola virus
aguaaucauguaaaug

SEQ ID NO: 3284630 - RNA, 14 nt, Variola virus
aaauaucucaaaga

SEQ ID NO: 3284631 - RNA, 20 nt, Variola virus
agacuuuauaauuucaucua

SEQ ID NO: 3284632 - RNA, 14 nt, Variola virus
aaaguaaaaaagaa

SEQ ID NO: 3284633 - RNA, 14 nt, Variola virus
auguaaaaauguua

SEQ ID NO: 3284634 - RNA, 13 nt, Variola virus
uauugaugauguc

SEQ ID NO: 3284635 - RNA, 22 nt, Variola virus
guaaacauugacggauaaaaca

SEQ ID NO: 3284636 - RNA, 19 nt, Variola virus
gucucauuucuaucuguuu

SEQ ID NO: 3284637 - RNA, 22 nt, Variola virus
gauuguccggcauaucauguag

SEQ ID NO: 3284638 - RNA, 16 nt, Variola virus
ucuaacaaacaucuca

SEQ ID NO: 3284639 - RNA, 18 nt, Variola virus
uauuuguguauucuucua

SEQ ID NO: 3284640 - RNA, 12 nt, Variola virus
caucuaucaucu

SEQ ID NO: 3284641 - RNA, 14 nt, Variola virus
ucuauuguuuggaa

SEQ ID NO: 3284642 - RNA, 23 nt, Variola virus
aaugaacaucggaaauauagaau

SEQ ID NO: 3284643 - RNA, 17 nt, Variola virus
guuaacauuuuauuauu

SEQ ID NO: 3284644 - RNA, 15 nt, Variola virus
agcuaagucuauuau

SEQ ID NO: 3284645 - RNA, 19 nt, Variola virus
ugacucgcaacaauuguaa

SEQ ID NO: 3284646 - RNA, 23 nt, Variola virus
ugagauuuguuuuguuaaacaau

SEQ ID NO: 3284647 - RNA, 18 nt, Variola virus
acuguucccgucaauaga

SEQ ID NO: 3284648 - RNA, 14 nt, Variola virus
ugguguuacaguua

SEQ ID NO: 3284649 - RNA, 14 nt, Variola virus
uucaccaauaaaaa

SEQ ID NO: 3284650 - RNA, 20 nt, Variola virus
agaugguggccacaauauau

SEQ ID NO: 3284651 - RNA, 18 nt, Variola virus
auuuuaccucuucugaua

SEQ ID NO: 3284652 - RNA, 21 nt, Variola virus
guauaaaacaacaaaauuaua

SEQ ID NO: 3284653 - RNA, 15 nt, Variola virus
acugauaccaugaaa

SEQ ID NO: 3284654 - RNA, 20 nt, Variola virus
aacauuuuauauacuuuucu

SEQ ID NO: 3284655 - RNA, 23 nt, Variola virus
uguaucgauugcguuguaacauu

SEQ ID NO: 3284656 - RNA, 20 nt, Variola virus
aaugaguauauguauuuucu

SEQ ID NO: 3284657 - RNA, 15 nt, Variola virus
acaacgugaaauacu

SEQ ID NO: 3284658 - RNA, 18 nt, Variola virus
auauaagacuaacaguau

SEQ ID NO: 3284659 - RNA, 22 nt, Variola virus
aauucuuuugauuugcuuugaa

SEQ ID NO: 3284660 - RNA, 23 nt, Variola virus
uguuuaucgcacgcguuuggauc

SEQ ID NO: 3284661 - RNA, 20 nt, Variola virus
uuagacugacagacagaaca

SEQ ID NO: 3284662 - RNA, 15 nt, Variola virus
gaccaauuacugaua

SEQ ID NO: 3284663 - RNA, 18 nt, Variola virus
uauaaucugaugaacaau

SEQ ID NO: 3284664 - RNA, 16 nt, Variola virus
cuuaauagacaaacug

SEQ ID NO: 3284665 - RNA, 20 nt, Variola virus
gaucuagcaaaggaaauugu

SEQ ID NO: 3284666 - RNA, 13 nt, Variola virus
agauaaacuuuau

SEQ ID NO: 3284667 - RNA, 22 nt, Variola virus
gucaucuuauguuuuuaagaga

SEQ ID NO: 3284668 - RNA, 21 nt, Variola virus
cucuaaaugagucuacugcua

SEQ ID NO: 3284669 - RNA, 17 nt, Variola virus
cuauucaguaguguuua

SEQ ID NO: 3284670 - RNA, 13 nt, Variola virus
ugucuauaucuuc

SEQ ID NO: 3284671 - RNA, 19 nt, Variola virus
auacauuauuacuaaacau

SEQ ID NO: 3284672 - RNA, 20 nt, Variola virus
aauaaaggcagaaauacaau

SEQ ID NO: 3284673 - RNA, 18 nt, Variola virus
uaguauauaauaaagaua

SEQ ID NO: 3284674 - RNA, 19 nt, Variola virus
ucuguaaaccacaauuugc

SEQ ID NO: 3284675 - RNA, 19 nt, Variola virus
uuaauauugaaaauacuaa

SEQ ID NO: 3284676 - RNA, 22 nt, Variola virus
aaaacugguuuagcuaauacua

SEQ ID NO: 3284677 - RNA, 18 nt, Variola virus
agaaagcuguggauguuu

SEQ ID NO: 3284678 - RNA, 17 nt, Variola virus
uuagaauagucucuuua

SEQ ID NO: 3284679 - RNA, 16 nt, Variola virus
uuggcuaauugucuuu

SEQ ID NO: 3284680 - RNA, 15 nt, Variola virus
ccauucagacuacca

SEQ ID NO: 3284681 - RNA, 19 nt, Variola virus
aagauagcugaaacaaaga

SEQ ID NO: 3284682 - RNA, 22 nt, Variola virus
agaauugggcaagcauaagaca

SEQ ID NO: 3284683 - RNA, 15 nt, Variola virus
uaaauagacaaacaa

SEQ ID NO: 3284684 - RNA, 19 nt, Variola virus
gaauaguuuguuuuggaaa

SEQ ID NO: 3284685 - RNA, 18 nt, Variola virus
cugguacaggaguucagu

SEQ ID NO: 3284686 - RNA, 17 nt, Variola virus
uccguauuauacuugua

SEQ ID NO: 3284687 - RNA, 18 nt, Variola virus
agcaucaugaauacagua

SEQ ID NO: 3284688 - RNA, 18 nt, Variola virus
cacaacaauuuauuucua

SEQ ID NO: 3284689 - RNA, 12 nt, Variola virus
agugaaacauuc

SEQ ID NO: 3284690 - RNA, 12 nt, Variola virus
aauaauuauucu

SEQ ID NO: 3284691 - RNA, 22 nt, Variola virus
gauaguuuucucuauucugaaa

SEQ ID NO: 3284692 - RNA, 16 nt, Variola virus
aaaaaggagaauacua

SEQ ID NO: 3284693 - RNA, 23 nt, Variola virus
acugaaaauuaaaauaacacuau

SEQ ID NO: 3284694 - RNA, 21 nt, Variola virus
aauucgaggaagauguaaaga

SEQ ID NO: 3284695 - RNA, 14 nt, Variola virus
aaccagucaugaau

SEQ ID NO: 3284696 - RNA, 19 nt, Variola virus
ucgguaucugaaguacuua

SEQ ID NO: 3284697 - RNA, 19 nt, Variola virus
aauuucuggacguucacca

SEQ ID NO: 3284698 - RNA, 15 nt, Variola virus
aauuuuaccagaaua

SEQ ID NO: 3284699 - RNA, 22 nt, Variola virus
uauauagcuauucuucuuuaaa

SEQ ID NO: 3284700 - RNA, 19 nt, Variola virus
aucgacuugggucuucuca

SEQ ID NO: 3284701 - RNA, 18 nt, Variola virus
auuuuagcagugaaauaa

SEQ ID NO: 3284702 - RNA, 22 nt, Variola virus
aguguauuagacgacucauguu

SEQ ID NO: 3284703 - RNA, 18 nt, Variola virus
aacgauaauuuauacgua

SEQ ID NO: 3284704 - RNA, 18 nt, Variola virus
uccuacaggaauaucuuu

SEQ ID NO: 3284705 - RNA, 15 nt, Variola virus
acuucauuaaucuuu

SEQ ID NO: 3284706 - RNA, 15 nt, Variola virus
uugcggcauauauaa

SEQ ID NO: 3284707 - RNA, 13 nt, Variola virus
agacauaauauaa

SEQ ID NO: 3284708 - RNA, 22 nt, Variola virus
ugugaaacagacuuguaauucu

SEQ ID NO: 3284709 - RNA, 23 nt, Variola virus
auaguauggcauucauugucuaa

SEQ ID NO: 3284710 - RNA, 21 nt, Variola virus
aauagcaucaucuuuaucauu

SEQ ID NO: 3284711 - RNA, 15 nt, Variola virus
uuccauuuuuaauuu

SEQ ID NO: 3284712 - RNA, 19 nt, Variola virus
gccaguccuccuacagauu

SEQ ID NO: 3284713 - RNA, 15 nt, Variola virus
aucacucuucgaaaa

SEQ ID NO: 3284714 - RNA, 20 nt, Variola virus
aaucaccgucuaagaugaua

SEQ ID NO: 3284715 - RNA, 9 nt, Variola virus
cuauuugga

SEQ ID NO: 3284716 - RNA, 22 nt, Variola virus
acuggauauucgauaacagcau

SEQ ID NO: 3284717 - RNA, 13 nt, Variola virus
guguccauuuuua

SEQ ID NO: 3284718 - RNA, 17 nt, Variola virus
acauaauuauucuauca

SEQ ID NO: 3284719 - RNA, 16 nt, Variola virus
cgcuauuguagaaauu

SEQ ID NO: 3284720 - RNA, 19 nt, Variola virus
auacgucuuuauuuucuau

SEQ ID NO: 3284721 - RNA, 14 nt, Variola virus
guuucuacuaacuu

SEQ ID NO: 3284722 - RNA, 18 nt, Variola virus
cuuaaccauauauccaau

SEQ ID NO: 3284723 - RNA, 18 nt, Variola virus
uacuaauuacaaaccugu

SEQ ID NO: 3284724 - RNA, 17 nt, Variola virus
agacaaacgcugauaga

SEQ ID NO: 3284725 - RNA, 20 nt, Variola virus
cuucuauuuuaucauuuucc

SEQ ID NO: 3284726 - RNA, 16 nt, Variola virus
uaauagauauaucucu

SEQ ID NO: 3284727 - RNA, 16 nt, Variola virus
auagauggaguaagua

SEQ ID NO: 3284728 - RNA, 17 nt, Variola virus
caauguauacaaaugua

SEQ ID NO: 3284729 - RNA, 16 nt, Variola virus
ugaaaugauaacuguu

SEQ ID NO: 3284730 - RNA, 18 nt, Variola virus
auccaaaauacaaaaugu

SEQ ID NO: 3284731 - RNA, 20 nt, Variola virus
uuucaaugaguuuaauaacu

SEQ ID NO: 3284732 - RNA, 19 nt, Variola virus
uaccuugaaaauaaauaca

SEQ ID NO: 3284733 - RNA, 23 nt, Variola virus
cuucuggaagguuuguauucuga

SEQ ID NO: 3284734 - RNA, 20 nt, Variola virus
gguuaauguuguauuucauu

SEQ ID NO: 3284735 - RNA, 20 nt, Variola virus
caaacggaguaaaauaaaua

SEQ ID NO: 3284736 - RNA, 16 nt, Variola virus
uaaaauuccuacucau

SEQ ID NO: 3284737 - RNA, 19 nt, Variola virus
acuauuuugguaucuucca

SEQ ID NO: 3284738 - RNA, 14 nt, Variola virus
uggcgaaauuauug

SEQ ID NO: 3284739 - RNA, 14 nt, Variola virus
ccagugcuauaucu

SEQ ID NO: 3284740 - RNA, 14 nt, Variola virus
aggcgucaaaauua

SEQ ID NO: 3284741 - RNA, 17 nt, Variola virus
uaacacuauacuuauau

SEQ ID NO: 3284742 - RNA, 22 nt, Variola virus
uuaauaaugaucaucuagauaa

SEQ ID NO: 3284743 - RNA, 20 nt, Variola virus
ggucaguuuaugauugauuu

SEQ ID NO: 3284744 - RNA, 13 nt, Variola virus
uccaauguauuua

SEQ ID NO: 3284745 - RNA, 17 nt, Variola virus
cacacacgauuaauuuu

SEQ ID NO: 3284746 - RNA, 12 nt, Variola virus
uucauuaaggag

SEQ ID NO: 3284747 - RNA, 22 nt, Variola virus
gauaacuacaauauuucaucau

SEQ ID NO: 3284748 - RNA, 23 nt, Variola virus
auuuauauccuauauacgaaaaa

SEQ ID NO: 3284749 - RNA, 21 nt, Variola virus
aacuucuugcgugucuuucug

SEQ ID NO: 3284750 - RNA, 23 nt, Variola virus
agucagcuggucuaaaauuucca

SEQ ID NO: 3284751 - RNA, 12 nt, Variola virus
uauaaauuaaag

SEQ ID NO: 3284752 - RNA, 22 nt, Variola virus
guucugggaauagaaaccaaau

SEQ ID NO: 3284753 - RNA, 18 nt, Variola virus
ugauuguuugacaaauca

SEQ ID NO: 3284754 - RNA, 21 nt, Variola virus
agacaaaauauuagaaaaagu

SEQ ID NO: 3284755 - RNA, 16 nt, Variola virus
cauaauaugaucacau

SEQ ID NO: 3284756 - RNA, 22 nt, Variola virus
auacuugauaagauaaaaucua

SEQ ID NO: 3284757 - RNA, 20 nt, Variola virus
uaauaauaaacggaagagau

SEQ ID NO: 3284758 - RNA, 16 nt, Variola virus
agcauuuaaauccgaa

SEQ ID NO: 3284759 - RNA, 15 nt, Variola virus
ucauauaacaacaaa

SEQ ID NO: 3284760 - RNA, 24 nt, Variola virus
aguugaauauauuaaaguuauuua

SEQ ID NO: 3284761 - RNA, 22 nt, Variola virus
aacgcguaauugguauauguau

SEQ ID NO: 3284762 - RNA, 22 nt, Variola virus
uccuaucgaaugugacucugau

SEQ ID NO: 3284763 - RNA, 13 nt, Variola virus
gaaaaaauaucua

SEQ ID NO: 3284764 - RNA, 16 nt, Variola virus
uuccuuuaucauuaau

SEQ ID NO: 3284765 - RNA, 20 nt, Variola virus
cacauagaccuccuccacca

SEQ ID NO: 3284766 - RNA, 21 nt, Variola virus
uucuacccccguuacauuugu

SEQ ID NO: 3284767 - RNA, 15 nt, Variola virus
cuuaguaaacagucc

SEQ ID NO: 3284768 - RNA, 22 nt, Variola virus
ucuagacuccgcaucaacacca

SEQ ID NO: 3284769 - RNA, 18 nt, Variola virus
uucacagaugauaauaga

SEQ ID NO: 3284770 - RNA, 15 nt, Variola virus
agacauaagaaauuu

SEQ ID NO: 3284771 - RNA, 23 nt, Variola virus
cuuaacgaaagaaguuguaucau

SEQ ID NO: 3284772 - RNA, 21 nt, Variola virus
gaguuuagauuaguuaauaca

SEQ ID NO: 3284773 - RNA, 12 nt, Variola virus
caaauuaaacau

SEQ ID NO: 3284774 - RNA, 17 nt, Variola virus
cuugauacgaucauuaa

SEQ ID NO: 3284775 - RNA, 18 nt, Variola virus
agaagugaguauacuugu

SEQ ID NO: 3284776 - RNA, 15 nt, Variola virus
agaugcaaacauuau

SEQ ID NO: 3284777 - RNA, 22 nt, Variola virus
ugaauuacuaaaauauacaaac

SEQ ID NO: 3284778 - RNA, 16 nt, Variola virus
gaacaauaaacaaaau

SEQ ID NO: 3284779 - RNA, 17 nt, Variola virus
acgaauucuaugaugaa

SEQ ID NO: 3284780 - RNA, 17 nt, Variola virus
uagaauauuguaacaau

SEQ ID NO: 3284781 - RNA, 14 nt, Variola virus
uccaauguguuuaa

SEQ ID NO: 3284782 - RNA, 24 nt, Variola virus
uugucuuuaaguauauacgauaag

SEQ ID NO: 3284783 - RNA, 14 nt, Variola virus
cuguucaucguuua

SEQ ID NO: 3284784 - RNA, 19 nt, Variola virus
ugauacucuuauagaugua

SEQ ID NO: 3284785 - RNA, 14 nt, Variola virus
ucaaaauauguaga

SEQ ID NO: 3284786 - RNA, 18 nt, Variola virus
acaguguauguaaaaaug

SEQ ID NO: 3284787 - RNA, 14 nt, Variola virus
auuguaacaauaug

SEQ ID NO: 3284788 - RNA, 21 nt, Variola virus
ucagaaucaaauauagaucuu

SEQ ID NO: 3284789 - RNA, 16 nt, Variola virus
ccauuucaaaauguua

SEQ ID NO: 3284790 - RNA, 20 nt, Variola virus
aauuacgacgagcauauuca

SEQ ID NO: 3284791 - RNA, 16 nt, Variola virus
cgauguggaaauuaca

SEQ ID NO: 3284792 - RNA, 14 nt, Variola virus
auggucauguuuau

SEQ ID NO: 3284793 - RNA, 22 nt, Variola virus
cgauacauuuugcauuagauuu

SEQ ID NO: 3284794 - RNA, 13 nt, Variola virus
aucaauaaaugug

SEQ ID NO: 3284795 - RNA, 22 nt, Variola virus
acuauuuuaacgucuaaaugua

SEQ ID NO: 3284796 - RNA, 16 nt, Variola virus
auaguacuaaagacua

SEQ ID NO: 3284797 - RNA, 20 nt, Variola virus
gccucuagauauagcuuuua

SEQ ID NO: 3284798 - RNA, 16 nt, Variola virus
aguauaucuacuauau

SEQ ID NO: 3284799 - RNA, 13 nt, Variola virus
acuaaacacauua

SEQ ID NO: 3284800 - RNA, 17 nt, Variola virus
cuaaaauuuugaucauc

SEQ ID NO: 3284801 - RNA, 18 nt, Variola virus
auaaaauuaauaauagaa

SEQ ID NO: 3284802 - RNA, 19 nt, Variola virus
gacaagauccguuaguuua

SEQ ID NO: 3284803 - RNA, 18 nt, Variola virus
gaugucuacucguauauu

SEQ ID NO: 3284804 - RNA, 11 nt, Variola virus
cagucuggaaa

SEQ ID NO: 3284805 - RNA, 16 nt, Variola virus
auaaaaucaaaauuac

SEQ ID NO: 3284806 - RNA, 22 nt, Variola virus
ucuccaugauuaaauauuuuaa

SEQ ID NO: 3284807 - RNA, 18 nt, Variola virus
acacuggaucuaugguuu

SEQ ID NO: 3284808 - RNA, 14 nt, Variola virus
uagaggagaaguaa

SEQ ID NO: 3284809 - RNA, 23 nt, Variola virus
uguggccucgaauacaaauuuua

SEQ ID NO: 3284810 - RNA, 15 nt, Variola virus
acuauccaucagaau

SEQ ID NO: 3284811 - RNA, 15 nt, Variola virus
cuuuaaccuauacau

SEQ ID NO: 3284812 - RNA, 17 nt, Variola virus
ucguaaaaagauucuug

SEQ ID NO: 3284813 - RNA, 16 nt, Variola virus
cuauuuguauaauaau

SEQ ID NO: 3284814 - RNA, 14 nt, Variola virus
uagcauaaaugcua

SEQ ID NO: 3284815 - RNA, 16 nt, Variola virus
guaugauacaaucaag

SEQ ID NO: 3284816 - RNA, 15 nt, Variola virus
uacuugaaauaaucg

SEQ ID NO: 3284817 - RNA, 13 nt, Variola virus
uggagaagguuuc

SEQ ID NO: 3284818 - RNA, 21 nt, Variola virus
acuaucuccucuauucauaau

SEQ ID NO: 3284819 - RNA, 14 nt, Variola virus
uaauugcuuuucua

SEQ ID NO: 3284820 - RNA, 16 nt, Variola virus
acaaauggucaaugau

SEQ ID NO: 3284821 - RNA, 17 nt, Variola virus
acaccucaaugucuuua

SEQ ID NO: 3284822 - RNA, 14 nt, Variola virus
aaguacaaaauaua

SEQ ID NO: 3284823 - RNA, 15 nt, Variola virus
aucauauauagaaug

SEQ ID NO: 3284824 - RNA, 23 nt, Variola virus
aagaucacuaauucuagucuuua

SEQ ID NO: 3284825 - RNA, 20 nt, Variola virus
cauuaauauaugcucuagau

SEQ ID NO: 3284826 - RNA, 16 nt, Variola virus
ugauaaggauuccucc

SEQ ID NO: 3284827 - RNA, 18 nt, Variola virus
cccguaguuuuaacugga

SEQ ID NO: 3284828 - RNA, 19 nt, Variola virus
ucguaauuagguucuaaug

SEQ ID NO: 3284829 - RNA, 23 nt, Variola virus
acgccauagacauugaaaaugaa

SEQ ID NO: 3284830 - RNA, 14 nt, Variola virus
auauuuuaguuuug

SEQ ID NO: 3284831 - RNA, 15 nt, Variola virus
acuuuaagcuaaaau

SEQ ID NO: 3284832 - RNA, 17 nt, Variola virus
uaucaauuaaauaauua

SEQ ID NO: 3284833 - RNA, 21 nt, Variola virus
uaacuuucuucggcaaacuua

SEQ ID NO: 3284834 - RNA, 14 nt, Variola virus
cucuacaaauaucu

SEQ ID NO: 3284835 - RNA, 18 nt, Variola virus
cuuuguagagaaaaauuc

SEQ ID NO: 3284836 - RNA, 11 nt, Variola virus
uaccauacuua

SEQ ID NO: 3284837 - RNA, 18 nt, Variola virus
auaguauuaaugauugcc

SEQ ID NO: 3284838 - RNA, 17 nt, Variola virus
cuuauuuuuaacaaaug

SEQ ID NO: 3284839 - RNA, 16 nt, Variola virus
cuguuucgaaacuuua

SEQ ID NO: 3284840 - RNA, 14 nt, Variola virus
auugaaaauacuaa

SEQ ID NO: 3284841 - RNA, 17 nt, Variola virus
uaauuuuauauuccucu

SEQ ID NO: 3284842 - RNA, 17 nt, Variola virus
gauagacgcaaauuaga

SEQ ID NO: 3284843 - RNA, 11 nt, Variola virus
uaucaaagaua

SEQ ID NO: 3284844 - RNA, 23 nt, Variola virus
cacuacaguaaguacaucaucug

SEQ ID NO: 3284845 - RNA, 16 nt, Variola virus
ugaugaugaaaugaua

SEQ ID NO: 3284846 - RNA, 16 nt, Variola virus
uuuauaaaaaacuuuu

SEQ ID NO: 3284847 - RNA, 23 nt, Variola virus
auacgggaaauuacaaaaggaag

SEQ ID NO: 3284848 - RNA, 14 nt, Variola virus
augauauuguugau

SEQ ID NO: 3284849 - RNA, 14 nt, Variola virus
cauuguccuauuuc

SEQ ID NO: 3284850 - RNA, 14 nt, Variola virus
auaacaaauguaua

SEQ ID NO: 3284851 - RNA, 22 nt, Variola virus
uuacauaggcaacaucagaaac

SEQ ID NO: 3284852 - RNA, 20 nt, Variola virus
uacagagauguacagcuucc

SEQ ID NO: 3284853 - RNA, 21 nt, Variola virus
gaaguuccgguugccauguau

SEQ ID NO: 3284854 - RNA, 14 nt, Variola virus
ugcuaaauuuucau

SEQ ID NO: 3284855 - RNA, 19 nt, Variola virus
uauuauugauccaaucaaa

SEQ ID NO: 3284856 - RNA, 22 nt, Variola virus
guaaaauggccaagaaaauaga

SEQ ID NO: 3284857 - RNA, 19 nt, Variola virus
auacgaauguaucaaacag

SEQ ID NO: 3284858 - RNA, 16 nt, Variola virus
cugaguaugaugauuu

SEQ ID NO: 3284859 - RNA, 22 nt, Variola virus
uuuuuaacgcaauggucuuaga

SEQ ID NO: 3284860 - RNA, 20 nt, Variola virus
agauuggguuaauaaauaca

SEQ ID NO: 3284861 - RNA, 23 nt, Variola virus
gucuauuguuaaucaugccacca

SEQ ID NO: 3284862 - RNA, 18 nt, Variola virus
cuuguaagaaguaaaugc

SEQ ID NO: 3284863 - RNA, 20 nt, Variola virus
gaaauucuaucucuaagacg

SEQ ID NO: 3284864 - RNA, 13 nt, Variola virus
uaauaaauuuauu

SEQ ID NO: 3284865 - RNA, 13 nt, Variola virus
auguguagaauua

SEQ ID NO: 3284866 - RNA, 22 nt, Variola virus
aauagaauauacucuauucuuc

SEQ ID NO: 3284867 - RNA, 14 nt, Variola virus
gauaauauuaucua

SEQ ID NO: 3284868 - RNA, 13 nt, Variola virus
aauucauuuccau

SEQ ID NO: 3284869 - RNA, 23 nt, Variola virus
aaauagaucucugguucuauguu

SEQ ID NO: 3284870 - RNA, 16 nt, Variola virus
auuuucauucacuauu

SEQ ID NO: 3284871 - RNA, 17 nt, Variola virus
uauguguagaauuaaau

SEQ ID NO: 3284872 - RNA, 14 nt, Variola virus
aacgguaucuucuu

SEQ ID NO: 3284873 - RNA, 20 nt, Variola virus
guuuucagaagauaauuauc

SEQ ID NO: 3284874 - RNA, 15 nt, Variola virus
cugccgaauuuagag

SEQ ID NO: 3284875 - RNA, 13 nt, Variola virus
aacacuauuagaa

SEQ ID NO: 3284876 - RNA, 20 nt, Variola virus
ugacuuuaucagaucaaaau

SEQ ID NO: 3284877 - RNA, 13 nt, Variola virus
uaaacuauucucg

SEQ ID NO: 3284878 - RNA, 21 nt, Variola virus
cuaugaauaccauuaaacaau

SEQ ID NO: 3284879 - RNA, 14 nt, Variola virus
aaaaaugaugaauu

SEQ ID NO: 3284880 - RNA, 23 nt, Variola virus
acagaucaaaaaauauaguucca

SEQ ID NO: 3284881 - RNA, 12 nt, Variola virus
uuuuauaaacag

SEQ ID NO: 3284882 - RNA, 23 nt, Variola virus
agucauuugacuagauaaacuau

SEQ ID NO: 3284883 - RNA, 14 nt, Variola virus
caaugaauggauua

SEQ ID NO: 3284884 - RNA, 18 nt, Variola virus
auauaauacuuaaaaaug

SEQ ID NO: 3284885 - RNA, 15 nt, Variola virus
cucuucucugcauuu

SEQ ID NO: 3284886 - RNA, 22 nt, Variola virus
uuagauuuauuuuuauaaaguu

SEQ ID NO: 3284887 - RNA, 15 nt, Variola virus
aaaugcguacauaac

SEQ ID NO: 3284888 - RNA, 15 nt, Variola virus
acaagcuguuuaucu

SEQ ID NO: 3284889 - RNA, 16 nt, Variola virus
uaauguuuaauuuauc

SEQ ID NO: 3284890 - RNA, 13 nt, Variola virus
ggauucaaaaaga

SEQ ID NO: 3284891 - RNA, 18 nt, Variola virus
uaucaaauagcucaauau

SEQ ID NO: 3284892 - RNA, 15 nt, Variola virus
auugcucaaauaaua

SEQ ID NO: 3284893 - RNA, 21 nt, Variola virus
auccagcuagugaauauauau

SEQ ID NO: 3284894 - RNA, 13 nt, Variola virus
uauacgaauauga

SEQ ID NO: 3284895 - RNA, 17 nt, Variola virus
uuuguuaagaauuuaga

SEQ ID NO: 3284896 - RNA, 19 nt, Variola virus
uauaugacuaacuuaucua

SEQ ID NO: 3284897 - RNA, 22 nt, Variola virus
auucugccguguuuaaaaauuc

SEQ ID NO: 3284898 - RNA, 19 nt, Variola virus
ucuuuguccauuauuucua

SEQ ID NO: 3284899 - RNA, 18 nt, Variola virus
uaaauguccacuauacau

SEQ ID NO: 3284900 - RNA, 14 nt, Variola virus
aacuaacuauugaa

SEQ ID NO: 3284901 - RNA, 23 nt, Variola virus
guucuagucgguauuucaucauu

SEQ ID NO: 3284902 - RNA, 15 nt, Variola virus
auauucauagauuga

SEQ ID NO: 3284903 - RNA, 14 nt, Variola virus
uguuaaaaaugauu

SEQ ID NO: 3284904 - RNA, 22 nt, Variola virus
cuguacaauaguuuuuaucuau

SEQ ID NO: 3284905 - RNA, 23 nt, Variola virus
uugacguaugcaguuacaucguu

SEQ ID NO: 3284906 - RNA, 13 nt, Variola virus
cucuaauagauuu

SEQ ID NO: 3284907 - RNA, 13 nt, Variola virus
uaaagaugcuauu

SEQ ID NO: 3284908 - RNA, 16 nt, Variola virus
ucuaauacuuuaacau

SEQ ID NO: 3284909 - RNA, 14 nt, Variola virus
cacaaucaugauuu

SEQ ID NO: 3284910 - RNA, 15 nt, Variola virus
aauuguuugagauau

SEQ ID NO: 3284911 - RNA, 15 nt, Variola virus
uagaucaucugaaaa

SEQ ID NO: 3284912 - RNA, 16 nt, Variola virus
agccaaguaucuuguc

SEQ ID NO: 3284913 - RNA, 15 nt, Variola virus
aacuacuugaaauuc

SEQ ID NO: 3284914 - RNA, 21 nt, Variola virus
cugauuuuuuaugauuuugug

SEQ ID NO: 3284915 - RNA, 18 nt, Variola virus
uuauaaagauauguaugu

SEQ ID NO: 3284916 - RNA, 20 nt, Variola virus
uuucaucuagauacacuaga

SEQ ID NO: 3284917 - RNA, 14 nt, Variola virus
gcauuaauaacauc

SEQ ID NO: 3284918 - RNA, 22 nt, Variola virus
auucacaccuagagacaaugaa

SEQ ID NO: 3284919 - RNA, 23 nt, Variola virus
auuucgauaauauacgguaaucu

SEQ ID NO: 3284920 - RNA, 19 nt, Variola virus
aggauauaaguagauguuc

SEQ ID NO: 3284921 - RNA, 17 nt, Variola virus
guacccacugaugagau

SEQ ID NO: 3284922 - RNA, 20 nt, Variola virus
cuuaagacaaguuuaacaau

SEQ ID NO: 3284923 - RNA, 13 nt, Variola virus
aacaaaaauugau

SEQ ID NO: 3284924 - RNA, 15 nt, Variola virus
uaccuggaauguaaa

SEQ ID NO: 3284925 - RNA, 13 nt, Variola virus
cuaccaucauguc

SEQ ID NO: 3284926 - RNA, 10 nt, Variola virus
auuaauuaaa

SEQ ID NO: 3284927 - RNA, 21 nt, Variola virus
aguuauauuuucgucuaucca

SEQ ID NO: 3284928 - RNA, 13 nt, Variola virus
ucuuauagaugug

SEQ ID NO: 3284929 - RNA, 12 nt, Variola virus
aaaaauggaugu

SEQ ID NO: 3284930 - RNA, 18 nt, Variola virus
gcauucgguucuaccaac

SEQ ID NO: 3284931 - RNA, 21 nt, Variola virus
gauaucuuuagauauauccac

SEQ ID NO: 3284932 - RNA, 16 nt, Variola virus
auuauacuguuaaaug

SEQ ID NO: 3284933 - RNA, 19 nt, Variola virus
uccauacauguuauuauca

SEQ ID NO: 3284934 - RNA, 19 nt, Variola virus
gcauuaacaaaaucuuuaa

SEQ ID NO: 3284935 - RNA, 20 nt, Variola virus
agacugugcaucaacaguua

SEQ ID NO: 3284936 - RNA, 15 nt, Variola virus
agaaaauaucauguu

SEQ ID NO: 3284937 - RNA, 13 nt, Variola virus
aaucccaauucag

SEQ ID NO: 3284938 - RNA, 23 nt, Variola virus
uauuaauaagaaugacuccuaua

SEQ ID NO: 3284939 - RNA, 22 nt, Variola virus
acaauaucauaaacaaacuaau

SEQ ID NO: 3284940 - RNA, 20 nt, Variola virus
uuaaauaguaguacacaaca

SEQ ID NO: 3284941 - RNA, 14 nt, Variola virus
caaacaauaaugac

SEQ ID NO: 3284942 - RNA, 23 nt, Variola virus
acgaauauaaaucauauuuagaa

SEQ ID NO: 3284943 - RNA, 22 nt, Variola virus
agaacuggacuguauaucucau

SEQ ID NO: 3284944 - RNA, 22 nt, Variola virus
auaugggauuuuacuuaauaua

SEQ ID NO: 3284945 - RNA, 23 nt, Variola virus
ugugucuacaaccgcuacauaau

SEQ ID NO: 3284946 - RNA, 15 nt, Variola virus
auaaauaaucaaaau

SEQ ID NO: 3284947 - RNA, 17 nt, Variola virus
auuuuauguacagaggu

SEQ ID NO: 3284948 - RNA, 16 nt, Variola virus
aucucauuugaaaaua

SEQ ID NO: 3284949 - RNA, 20 nt, Variola virus
auacaaauuuuaagaaaugg

SEQ ID NO: 3284950 - RNA, 19 nt, Variola virus
guaaauguuuaauguuuua

SEQ ID NO: 3284951 - RNA, 18 nt, Variola virus
uaaagauagaaaugaauu

SEQ ID NO: 3284952 - RNA, 14 nt, Variola virus
aauuauuucuaaua

SEQ ID NO: 3284953 - RNA, 21 nt, Variola virus
cagauuagcagaauagauauu

SEQ ID NO: 3284954 - RNA, 12 nt, Variola virus
cuaauucucaga

SEQ ID NO: 3284955 - RNA, 16 nt, Variola virus
aaaacauucaaauguu

SEQ ID NO: 3284956 - RNA, 15 nt, Variola virus
aggacgguauaugua

SEQ ID NO: 3284957 - RNA, 15 nt, Variola virus
ucacuaauaaauugg

SEQ ID NO: 3284958 - RNA, 16 nt, Variola virus
guuuauuccaauaaau

SEQ ID NO: 3284959 - RNA, 18 nt, Variola virus
ucauucuuaagacacauu

SEQ ID NO: 3284960 - RNA, 12 nt, Variola virus
gacauuagaccg

SEQ ID NO: 3284961 - RNA, 11 nt, Variola virus
aauaaaaauua

SEQ ID NO: 3284962 - RNA, 21 nt, Variola virus
auucgaagcaguuacaaugac

SEQ ID NO: 3284963 - RNA, 14 nt, Variola virus
ucuaacaucaucau

SEQ ID NO: 3284964 - RNA, 21 nt, Variola virus
uccuccaguagcaugugguuc

SEQ ID NO: 3284965 - RNA, 17 nt, Variola virus
ugucaucauuucuaaug

SEQ ID NO: 3284966 - RNA, 20 nt, Variola virus
uagagcccacguuuaaacau

SEQ ID NO: 3284967 - RNA, 17 nt, Variola virus
agauaagaacauaauaa

SEQ ID NO: 3284968 - RNA, 16 nt, Variola virus
auaaauguucaaugaa

SEQ ID NO: 3284969 - RNA, 15 nt, Variola virus
ucguucucugaaaau

SEQ ID NO: 3284970 - RNA, 21 nt, Variola virus
aucaagucuuuauacaaugac

SEQ ID NO: 3284971 - RNA, 17 nt, Variola virus
uagucauagaugaaaua

SEQ ID NO: 3284972 - RNA, 18 nt, Variola virus
uaccacuuauuacuccau

SEQ ID NO: 3284973 - RNA, 18 nt, Variola virus
caauaacacaaucaugau

SEQ ID NO: 3284974 - RNA, 15 nt, Variola virus
agauuucgucuaaua

SEQ ID NO: 3284975 - RNA, 18 nt, Variola virus
uacgguugauucaaaaau

SEQ ID NO: 3284976 - RNA, 21 nt, Variola virus
uaauuaaaaguuuuacuauau

SEQ ID NO: 3284977 - RNA, 19 nt, Variola virus
aagacucagaagaggauua

SEQ ID NO: 3284978 - RNA, 16 nt, Variola virus
acucauuuaacagaug

SEQ ID NO: 3284979 - RNA, 13 nt, Variola virus
ucuuaaauaacuc

SEQ ID NO: 3284980 - RNA, 19 nt, Variola virus
accguauuacucuacagua

SEQ ID NO: 3284981 - RNA, 11 nt, Variola virus
cauucaugaaa

SEQ ID NO: 3284982 - RNA, 23 nt, Variola virus
auuaaacuuaccacguaaaacuu

SEQ ID NO: 3284983 - RNA, 16 nt, Variola virus
acuaauguauauuuua

SEQ ID NO: 3284984 - RNA, 22 nt, Variola virus
aucauuucgacauuaauuccuu

SEQ ID NO: 3284985 - RNA, 19 nt, Variola virus
acaaaugcaccaaaguuau

SEQ ID NO: 3284986 - RNA, 19 nt, Variola virus
guaaucauguaaauguuua

SEQ ID NO: 3284987 - RNA, 21 nt, Variola virus
acuucuaaaacagcugugaau

SEQ ID NO: 3284988 - RNA, 15 nt, Variola virus
cuaucgauaauuguu

SEQ ID NO: 3284989 - RNA, 22 nt, Variola virus
ugagauauuacucaaaauacua

SEQ ID NO: 3284990 - RNA, 13 nt, Variola virus
aagaaaaaugauu

SEQ ID NO: 3284991 - RNA, 20 nt, Variola virus
ucuucaguucuaucuucuaa

SEQ ID NO: 3284992 - RNA, 21 nt, Variola virus
aauuuccccauugauagaaaa

SEQ ID NO: 3284993 - RNA, 17 nt, Variola virus
cuauguuccucguuucc

SEQ ID NO: 3284994 - RNA, 15 nt, Variola virus
aauagaguauuccaa

SEQ ID NO: 3284995 - RNA, 17 nt, Variola virus
cuaaaucgucaguagua

SEQ ID NO: 3284996 - RNA, 20 nt, Variola virus
acuguggaugugacagacug

SEQ ID NO: 3284997 - RNA, 18 nt, Variola virus
auccuuuaagaucaacau

SEQ ID NO: 3284998 - RNA, 13 nt, Variola virus
uuuguacauguaa

SEQ ID NO: 3284999 - RNA, 16 nt, Variola virus
ccagauagaaaauauc

SEQ ID NO: 3285000 - RNA, 23 nt, Variola virus
cuugcacguaaagucuacauugu

SEQ ID NO: 3285001 - RNA, 12 nt, Variola virus
gugauuuuggua

SEQ ID NO: 3285002 - RNA, 24 nt, Variola virus
gaaucuagaucgaugauaacuucu

SEQ ID NO: 3285003 - RNA, 23 nt, Variola virus
auacuauccaucagaauguuucc

SEQ ID NO: 3285004 - RNA, 18 nt, Variola virus
aucuucuuauaagauugu

SEQ ID NO: 3285005 - RNA, 12 nt, Variola virus
ugacuucaucau

SEQ ID NO: 3285006 - RNA, 20 nt, Variola virus
ccagggaaaucaaagaagaa

SEQ ID NO: 3285007 - RNA, 22 nt, Variola virus
cuaccauggacggagacaaauu

SEQ ID NO: 3285008 - RNA, 12 nt, Variola virus
gaugauauuaac

SEQ ID NO: 3285009 - RNA, 24 nt, Variola virus
auauauucuuacaguacauaguau

SEQ ID NO: 3285010 - RNA, 14 nt, Variola virus
cgaagaauaauguu

SEQ ID NO: 3285011 - RNA, 15 nt, Variola virus
ugacaucaacuacaa

SEQ ID NO: 3285012 - RNA, 22 nt, Variola virus
gacauauuucgacaaaaagaua

SEQ ID NO: 3285013 - RNA, 23 nt, Variola virus
caucgcuaaucaacacuauuuua

SEQ ID NO: 3285014 - RNA, 15 nt, Variola virus
gaugcuauuagaauu

SEQ ID NO: 3285015 - RNA, 20 nt, Variola virus
aucaguuauaaaaaauaaag

SEQ ID NO: 3285016 - RNA, 21 nt, Variola virus
cgguuaauguuguauuucauu

SEQ ID NO: 3285017 - RNA, 21 nt, Variola virus
auucugaauagugaaaaccuu

SEQ ID NO: 3285018 - RNA, 22 nt, Variola virus
uuaaaggauaaaauauuaucca

SEQ ID NO: 3285019 - RNA, 13 nt, Variola virus
cauagaaaaugau

SEQ ID NO: 3285020 - RNA, 20 nt, Variola virus
agaacaugugugaaaauauu

SEQ ID NO: 3285021 - RNA, 17 nt, Variola virus
acauuaacauuuugaaa

SEQ ID NO: 3285022 - RNA, 19 nt, Variola virus
ucaaauggauaauuuaaga

SEQ ID NO: 3285023 - RNA, 21 nt, Variola virus
uuaaacagauauaguuuuucu

SEQ ID NO: 3285024 - RNA, 13 nt, Variola virus
aacuugaucuuua

SEQ ID NO: 3285025 - RNA, 15 nt, Variola virus
caaauaauacuauau

SEQ ID NO: 3285026 - RNA, 22 nt, Variola virus
uuauuaaaguacguaaaucuag

SEQ ID NO: 3285027 - RNA, 14 nt, Variola virus
aguaauuauaagaa

SEQ ID NO: 3285028 - RNA, 18 nt, Variola virus
agacguggcaaacaaugu

SEQ ID NO: 3285029 - RNA, 21 nt, Variola virus
aucucugacaccaaccuguau

SEQ ID NO: 3285030 - RNA, 18 nt, Variola virus
ugauuuauaauguggaua

SEQ ID NO: 3285031 - RNA, 14 nt, Variola virus
augcuuaaaaugcu

SEQ ID NO: 3285032 - RNA, 15 nt, Variola virus
caaauaacaaaaucc

SEQ ID NO: 3285033 - RNA, 23 nt, Variola virus
ucuaaauaauaucuauuguuugg

SEQ ID NO: 3285034 - RNA, 18 nt, Variola virus
agaaguuuucccaaaaaa

SEQ ID NO: 3285035 - RNA, 22 nt, Variola virus
aaugcagaucuaauaaauggag

SEQ ID NO: 3285036 - RNA, 14 nt, Variola virus
uauuguuuuauaua

SEQ ID NO: 3285037 - RNA, 15 nt, Variola virus
uuaugacgauuucaa

SEQ ID NO: 3285038 - RNA, 13 nt, Variola virus
uauaagaaugauu

SEQ ID NO: 3285039 - RNA, 15 nt, Variola virus
ccaguuauguucaac

SEQ ID NO: 3285040 - RNA, 18 nt, Variola virus
caauuuuaucaucuucua

SEQ ID NO: 3285041 - RNA, 17 nt, Variola virus
acuuacgauagaaauag

SEQ ID NO: 3285042 - RNA, 15 nt, Variola virus
auaauucucauauau

SEQ ID NO: 3285043 - RNA, 21 nt, Variola virus
ucaaauucucauucauguaua

SEQ ID NO: 3285044 - RNA, 13 nt, Variola virus
aacauguuaaaau

SEQ ID NO: 3285045 - RNA, 21 nt, Variola virus
uauggcgccauuggcaucuug

SEQ ID NO: 3285046 - RNA, 14 nt, Variola virus
acaaucguuaauaa

SEQ ID NO: 3285047 - RNA, 19 nt, Variola virus
auuuguugacgacauauau

SEQ ID NO: 3285048 - RNA, 19 nt, Variola virus
aaucaccauccuuuaaaaa

SEQ ID NO: 3285049 - RNA, 21 nt, Variola virus
cuagauaaaauacugaaucaa

SEQ ID NO: 3285050 - RNA, 16 nt, Variola virus
uauuucuccacuacau

SEQ ID NO: 3285051 - RNA, 14 nt, Variola virus
uuuuaaggggaaaa

SEQ ID NO: 3285052 - RNA, 13 nt, Variola virus
cguaguaacucua

SEQ ID NO: 3285053 - RNA, 15 nt, Variola virus
uagacacgcguaaua

SEQ ID NO: 3285054 - RNA, 15 nt, Variola virus
gaucgguucagcauu

SEQ ID NO: 3285055 - RNA, 18 nt, Variola virus
aauguuugacugaauaua

SEQ ID NO: 3285056 - RNA, 17 nt, Variola virus
aucaauauaucaucuau

SEQ ID NO: 3285057 - RNA, 16 nt, Variola virus
uacaucaaucuuacag

SEQ ID NO: 3285058 - RNA, 20 nt, Variola virus
uagaggaacauuaaacaucg

SEQ ID NO: 3285059 - RNA, 21 nt, Variola virus
uuugucuuugaacaacauuuu

SEQ ID NO: 3285060 - RNA, 20 nt, Variola virus
auaccucauaaaacaaaaaa

SEQ ID NO: 3285061 - RNA, 18 nt, Variola virus
ucuguucaaaaauuuaga

SEQ ID NO: 3285062 - RNA, 21 nt, Variola virus
uaccuaucaaggaacaaauau

SEQ ID NO: 3285063 - RNA, 16 nt, Variola virus
ucucacugaauacgag

SEQ ID NO: 3285064 - RNA, 16 nt, Variola virus
cuauaucuaacaucuu

SEQ ID NO: 3285065 - RNA, 22 nt, Variola virus
ucuauacgucuuuauuuucuau

SEQ ID NO: 3285066 - RNA, 18 nt, Variola virus
gcaguaacauagauuauu

SEQ ID NO: 3285067 - RNA, 16 nt, Variola virus
aaagauuaauuauccg

SEQ ID NO: 3285068 - RNA, 14 nt, Variola virus
cucauaauccauuu

SEQ ID NO: 3285069 - RNA, 13 nt, Variola virus
uccuguaauaucu

SEQ ID NO: 3285070 - RNA, 17 nt, Variola virus
uguuauccaacauauca

SEQ ID NO: 3285071 - RNA, 16 nt, Variola virus
ugauuaggcaugucga

SEQ ID NO: 3285072 - RNA, 17 nt, Variola virus
caauauuaauauuucua

SEQ ID NO: 3285073 - RNA, 23 nt, Variola virus
acaauauuuuucguuuacaaaau

SEQ ID NO: 3285074 - RNA, 14 nt, Variola virus
accaucgauuguuu

SEQ ID NO: 3285075 - RNA, 19 nt, Variola virus
auuuauuuaguauuaaaug

SEQ ID NO: 3285076 - RNA, 19 nt, Variola virus
uauuacauaauauauacag

SEQ ID NO: 3285077 - RNA, 18 nt, Variola virus
auaaacuaacauuguuaa

SEQ ID NO: 3285078 - RNA, 17 nt, Variola virus
ucuuugaacuguuuaag

SEQ ID NO: 3285079 - RNA, 21 nt, Variola virus
auauaguuuuuacacauagau

SEQ ID NO: 3285080 - RNA, 11 nt, Variola virus
ggaaaaugaug

SEQ ID NO: 3285081 - RNA, 22 nt, Variola virus
auaauguuguccauuguaguau

SEQ ID NO: 3285082 - RNA, 14 nt, Variola virus
gagaauuaaaagag

SEQ ID NO: 3285083 - RNA, 19 nt, Variola virus
aaaaagaccaguucauuca

SEQ ID NO: 3285084 - RNA, 22 nt, Variola virus
uuaucgguaacaucuuuguaaa

SEQ ID NO: 3285085 - RNA, 23 nt, Variola virus
acaucuggccuguucauaaauaa

SEQ ID NO: 3285086 - RNA, 18 nt, Variola virus
cgauucuggcuauuucaa

SEQ ID NO: 3285087 - RNA, 18 nt, Variola virus
auaaacguucacguaaau

SEQ ID NO: 3285088 - RNA, 12 nt, Variola virus
agccaauacuuu

SEQ ID NO: 3285089 - RNA, 20 nt, Variola virus
auguggaaauuacacuguau

SEQ ID NO: 3285090 - RNA, 12 nt, Variola virus
aaggaacuagaa

SEQ ID NO: 3285091 - RNA, 14 nt, Variola virus
cgcauguggaugga

SEQ ID NO: 3285092 - RNA, 20 nt, Variola virus
uaggagucagacuuguauuc

SEQ ID NO: 3285093 - RNA, 13 nt, Variola virus
auucuaugauggu

SEQ ID NO: 3285094 - RNA, 18 nt, Variola virus
auuuagauacaucuauau

SEQ ID NO: 3285095 - RNA, 12 nt, Variola virus
cuaaaugaugau

SEQ ID NO: 3285096 - RNA, 23 nt, Variola virus
augugauuguucaaucaauauua

SEQ ID NO: 3285097 - RNA, 22 nt, Variola virus
aacggcgagaagacaauauuau

SEQ ID NO: 3285098 - RNA, 16 nt, Variola virus
guaucaagaauaucca

SEQ ID NO: 3285099 - RNA, 16 nt, Variola virus
aggauacugaucuucu

SEQ ID NO: 3285100 - RNA, 21 nt, Variola virus
uucggguuccaaacauuaaca

SEQ ID NO: 3285101 - RNA, 18 nt, Variola virus
gauaucucauuaaaauau

SEQ ID NO: 3285102 - RNA, 12 nt, Variola virus
agaaauacuucu

SEQ ID NO: 3285103 - RNA, 15 nt, Variola virus
guuaauuucuauuca

SEQ ID NO: 3285104 - RNA, 18 nt, Variola virus
auuuuuguacauuaauaa

SEQ ID NO: 3285105 - RNA, 14 nt, Variola virus
uuauccucauuaaa

SEQ ID NO: 3285106 - RNA, 11 nt, Variola virus
ugaagaaauga

SEQ ID NO: 3285107 - RNA, 14 nt, Variola virus
cuuuaagcagaucu

SEQ ID NO: 3285108 - RNA, 18 nt, Variola virus
ucccaccaaauuaaugaa

SEQ ID NO: 3285109 - RNA, 17 nt, Variola virus
caugcauccaaauggau

SEQ ID NO: 3285110 - RNA, 14 nt, Variola virus
uuuaucgauguaca

SEQ ID NO: 3285111 - RNA, 19 nt, Variola virus
cuacugcguccgcuuuagu

SEQ ID NO: 3285112 - RNA, 21 nt, Variola virus
uuauaaaaauuaaaaaaucac

SEQ ID NO: 3285113 - RNA, 14 nt, Variola virus
auauaguuuaaauu

SEQ ID NO: 3285114 - RNA, 19 nt, Variola virus
auuaaauuuuuuuauuaau

SEQ ID NO: 3285115 - RNA, 15 nt, Variola virus
uaucuaacucguaaa

SEQ ID NO: 3285116 - RNA, 12 nt, Variola virus
uuccaauguuua

SEQ ID NO: 3285117 - RNA, 21 nt, Variola virus
acucaacauaaauaauucuag

SEQ ID NO: 3285118 - RNA, 15 nt, Variola virus
caucauuccauaauu

SEQ ID NO: 3285119 - RNA, 15 nt, Variola virus
auaauuauuuuguaa

SEQ ID NO: 3285120 - RNA, 19 nt, Variola virus
auuguagcuauuuaaaugg

SEQ ID NO: 3285121 - RNA, 14 nt, Variola virus
aucaaauucauuau

SEQ ID NO: 3285122 - RNA, 11 nt, Variola virus
guauuuaagag

SEQ ID NO: 3285123 - RNA, 15 nt, Variola virus
uucugauuuauccuu

SEQ ID NO: 3285124 - RNA, 22 nt, Variola virus
aagauaugguaaaauuaaauag

SEQ ID NO: 3285125 - RNA, 14 nt, Variola virus
ugacgucuguggau

SEQ ID NO: 3285126 - RNA, 23 nt, Variola virus
cucuauuggauauggauuuccag

SEQ ID NO: 3285127 - RNA, 14 nt, Variola virus
aguauacuaccuau

SEQ ID NO: 3285128 - RNA, 23 nt, Variola virus
uauuugagaaauauguauacaua

SEQ ID NO: 3285129 - RNA, 15 nt, Variola virus
caaaucaaaaguauu

SEQ ID NO: 3285130 - RNA, 20 nt, Variola virus
auaaaacaauggaacaauua

SEQ ID NO: 3285131 - RNA, 15 nt, Variola virus
uucuuuuucauuaac

SEQ ID NO: 3285132 - RNA, 21 nt, Variola virus
uguaguuguugguaacgucug

SEQ ID NO: 3285133 - RNA, 22 nt, Variola virus
agaaaaugucccucauaauaaa

SEQ ID NO: 3285134 - RNA, 21 nt, Variola virus
aggaugacucucaaauuauua

SEQ ID NO: 3285135 - RNA, 14 nt, Variola virus
gcauaacucuauca

SEQ ID NO: 3285136 - RNA, 21 nt, Variola virus
gaauuguuucuuuuagaagug

SEQ ID NO: 3285137 - RNA, 14 nt, Variola virus
auaucuauguuuaa

SEQ ID NO: 3285138 - RNA, 18 nt, Variola virus
aaggauucauugacauau

SEQ ID NO: 3285139 - RNA, 21 nt, Variola virus
cguucaacaacguacauacua

SEQ ID NO: 3285140 - RNA, 22 nt, Variola virus
uugaugugaucaauuuccaaca

SEQ ID NO: 3285141 - RNA, 17 nt, Variola virus
uauaacauucauuagua

SEQ ID NO: 3285142 - RNA, 16 nt, Variola virus
caagagauauauugga

SEQ ID NO: 3285143 - RNA, 22 nt, Variola virus
cauauaguauucuuguauucua

SEQ ID NO: 3285144 - RNA, 15 nt, Variola virus
augaguucugugcag

SEQ ID NO: 3285145 - RNA, 19 nt, Variola virus
auuacaaacuauagaaauu

SEQ ID NO: 3285146 - RNA, 15 nt, Variola virus
accaaaaaaaauaac

SEQ ID NO: 3285147 - RNA, 12 nt, Variola virus
guacauacuaga

SEQ ID NO: 3285148 - RNA, 17 nt, Variola virus
ugaucgccauggauggu

SEQ ID NO: 3285149 - RNA, 21 nt, Variola virus
ugcacagcgaagaauucuaga

SEQ ID NO: 3285150 - RNA, 15 nt, Variola virus
auaguuauaucacau

SEQ ID NO: 3285151 - RNA, 11 nt, Variola virus
aaauacuagua

SEQ ID NO: 3285152 - RNA, 13 nt, Variola virus
guucguaaacgaa

SEQ ID NO: 3285153 - RNA, 22 nt, Variola virus
ccguuuauuaucuuguuccaua

SEQ ID NO: 3285154 - RNA, 16 nt, Variola virus
uauaggaaaaaaacaa

SEQ ID NO: 3285155 - RNA, 12 nt, Variola virus
uucuuacaauua

SEQ ID NO: 3285156 - RNA, 13 nt, Variola virus
agcuauucaagau

SEQ ID NO: 3285157 - RNA, 18 nt, Variola virus
aucuauuuucuugucaug

SEQ ID NO: 3285158 - RNA, 16 nt, Variola virus
uaaaauaaauaucauu

SEQ ID NO: 3285159 - RNA, 15 nt, Variola virus
ucuauaucauguaga

SEQ ID NO: 3285160 - RNA, 20 nt, Variola virus
gauauaauauauuagauauu

SEQ ID NO: 3285161 - RNA, 18 nt, Variola virus
uccaucuguggaaaauaa

SEQ ID NO: 3285162 - RNA, 16 nt, Variola virus
auaauagauuuaucua

SEQ ID NO: 3285163 - RNA, 16 nt, Variola virus
cuauuacguacauaac

SEQ ID NO: 3285164 - RNA, 11 nt, Variola virus
cucuagaaaaa

SEQ ID NO: 3285165 - RNA, 17 nt, Variola virus
auauucaagcgaauuac

SEQ ID NO: 3285166 - RNA, 20 nt, Variola virus
cugguguuaguuuauuccaa

SEQ ID NO: 3285167 - RNA, 20 nt, Variola virus
ucugaacccguuaauguaua

SEQ ID NO: 3285168 - RNA, 22 nt, Variola virus
augcugguuauuacacaugugu

SEQ ID NO: 3285169 - RNA, 19 nt, Variola virus
agaauauuccucuaacaga

SEQ ID NO: 3285170 - RNA, 13 nt, Variola virus
uauuauaaucauu

SEQ ID NO: 3285171 - RNA, 22 nt, Variola virus
auaaucuaaaauaguucuguaa

SEQ ID NO: 3285172 - RNA, 17 nt, Variola virus
aauguuugacugaauau

SEQ ID NO: 3285173 - RNA, 20 nt, Variola virus
auauucaguaaccaaauaca

SEQ ID NO: 3285174 - RNA, 14 nt, Variola virus
auuauuuuuggaag

SEQ ID NO: 3285175 - RNA, 14 nt, Variola virus
gaacauuuaagaga

SEQ ID NO: 3285176 - RNA, 17 nt, Variola virus
gaacaauaaaagagaau

SEQ ID NO: 3285177 - RNA, 13 nt, Variola virus
agacgcuuauuau

SEQ ID NO: 3285178 - RNA, 13 nt, Variola virus
uuaauaauuguua

SEQ ID NO: 3285179 - RNA, 16 nt, Variola virus
uccagauagaaaauau

SEQ ID NO: 3285180 - RNA, 14 nt, Variola virus
gauucuaaugauuu

SEQ ID NO: 3285181 - RNA, 14 nt, Variola virus
auauaguuaauagu

SEQ ID NO: 3285182 - RNA, 15 nt, Variola virus
uaaugaacaaauccu

SEQ ID NO: 3285183 - RNA, 22 nt, Variola virus
augggugacauaauuacauaua

SEQ ID NO: 3285184 - RNA, 22 nt, Variola virus
cagaagucauacuagaauaaag

SEQ ID NO: 3285185 - RNA, 13 nt, Variola virus
uuuaaucuaucua

SEQ ID NO: 3285186 - RNA, 14 nt, Variola virus
gcaaugaauaucua

SEQ ID NO: 3285187 - RNA, 22 nt, Variola virus
aaguuaaugagagcaaaauaua

SEQ ID NO: 3285188 - RNA, 19 nt, Variola virus
cauuggcuagguauaugca

SEQ ID NO: 3285189 - RNA, 17 nt, Variola virus
agaugaacugacauaua

SEQ ID NO: 3285190 - RNA, 18 nt, Variola virus
cugucuuucgauguucau

SEQ ID NO: 3285191 - RNA, 17 nt, Variola virus
cugaauagcaaaauuuu

SEQ ID NO: 3285192 - RNA, 17 nt, Variola virus
agaaugacauaacuaau

SEQ ID NO: 3285193 - RNA, 22 nt, Variola virus
uucaacguauggaauauaauaa

SEQ ID NO: 3285194 - RNA, 16 nt, Variola virus
uagguauuguuuucac

SEQ ID NO: 3285195 - RNA, 14 nt, Variola virus
uccagauaauaacc

SEQ ID NO: 3285196 - RNA, 17 nt, Variola virus
aaacaauacagugauug

SEQ ID NO: 3285197 - RNA, 20 nt, Variola virus
aaugauaacuguuuagaaau

SEQ ID NO: 3285198 - RNA, 13 nt, Variola virus
gcuauauccacca

SEQ ID NO: 3285199 - RNA, 19 nt, Variola virus
aaaguauccucuacucauu

SEQ ID NO: 3285200 - RNA, 20 nt, Variola virus
uuugaaugaaugaauacaga

SEQ ID NO: 3285201 - RNA, 22 nt, Variola virus
uuucuucauuuauuauauauaa

SEQ ID NO: 3285202 - RNA, 17 nt, Variola virus
acuaaucucuguaagau

SEQ ID NO: 3285203 - RNA, 20 nt, Variola virus
aaacaucguuaucagauaac

SEQ ID NO: 3285204 - RNA, 21 nt, Variola virus
cuguauugaugguaucuguua

SEQ ID NO: 3285205 - RNA, 19 nt, Variola virus
aaauauaaaaccaacuaau

SEQ ID NO: 3285206 - RNA, 17 nt, Variola virus
agguguguuuuuuacca

SEQ ID NO: 3285207 - RNA, 17 nt, Variola virus
gacauuuucacaaauac

SEQ ID NO: 3285208 - RNA, 14 nt, Variola virus
auaguccauagcaa

SEQ ID NO: 3285209 - RNA, 19 nt, Variola virus
acauguuacuauagcauua

SEQ ID NO: 3285210 - RNA, 20 nt, Variola virus
ucgaaaauugcuauuucaga

SEQ ID NO: 3285211 - RNA, 13 nt, Variola virus
caauuacaaaaac

SEQ ID NO: 3285212 - RNA, 22 nt, Variola virus
caaaaccccaugguguaacaac

SEQ ID NO: 3285213 - RNA, 14 nt, Variola virus
uaauauucuaaaac

SEQ ID NO: 3285214 - RNA, 18 nt, Variola virus
auaccaucgauuguuuau

SEQ ID NO: 3285215 - RNA, 19 nt, Variola virus
cuuggauuugacgaaauca

SEQ ID NO: 3285216 - RNA, 15 nt, Variola virus
cuuuuauaauucaua

SEQ ID NO: 3285217 - RNA, 23 nt, Variola virus
uagcaagauuuuuaaacaacaau

SEQ ID NO: 3285218 - RNA, 20 nt, Variola virus
uagaaacuauacgaaauaga

SEQ ID NO: 3285219 - RNA, 18 nt, Variola virus
aucacuuuuuauacuaau

SEQ ID NO: 3285220 - RNA, 18 nt, Variola virus
agauaauuguaacaauau

SEQ ID NO: 3285221 - RNA, 21 nt, Variola virus
auuauuaauaauuuguauaua

SEQ ID NO: 3285222 - RNA, 21 nt, Variola virus
uuuccaaaucaguaacuaugu

SEQ ID NO: 3285223 - RNA, 16 nt, Variola virus
aaacaacuaaacagua

SEQ ID NO: 3285224 - RNA, 18 nt, Variola virus
guucucaauauuacuuuu

SEQ ID NO: 3285225 - RNA, 16 nt, Variola virus
acucuuuuauuuucca

SEQ ID NO: 3285226 - RNA, 15 nt, Variola virus
uacuuaugacaaagu

SEQ ID NO: 3285227 - RNA, 18 nt, Variola virus
ucauuuucuauuuaaaau

SEQ ID NO: 3285228 - RNA, 22 nt, Variola virus
cgaauacgauacuuauaaggcu

SEQ ID NO: 3285229 - RNA, 23 nt, Variola virus
uuauccacaauaaauauaaacaa

SEQ ID NO: 3285230 - RNA, 15 nt, Variola virus
cuaucacuguagaaa

SEQ ID NO: 3285231 - RNA, 16 nt, Variola virus
uuucgaggaauaauaa

SEQ ID NO: 3285232 - RNA, 18 nt, Variola virus
aauuaauaguuuugauau

SEQ ID NO: 3285233 - RNA, 15 nt, Variola virus
gauauauaucuuuuc

SEQ ID NO: 3285234 - RNA, 14 nt, Variola virus
ccguucucugaaua

SEQ ID NO: 3285235 - RNA, 22 nt, Variola virus
aaauauuucuacuacuucauua

SEQ ID NO: 3285236 - RNA, 21 nt, Variola virus
agacaucaacacuuauauucu

SEQ ID NO: 3285237 - RNA, 16 nt, Variola virus
uagauagaaauuuaua

SEQ ID NO: 3285238 - RNA, 21 nt, Variola virus
uauuuacgaaacuaucaaaau

SEQ ID NO: 3285239 - RNA, 20 nt, Variola virus
uuguuuauuguauauacuua

SEQ ID NO: 3285240 - RNA, 22 nt, Variola virus
auacuauccaucagaauguuuc

SEQ ID NO: 3285241 - RNA, 22 nt, Variola virus
acaauuauuagcaaaaauauau

SEQ ID NO: 3285242 - RNA, 18 nt, Variola virus
uacuuuauaauuaaugaa

SEQ ID NO: 3285243 - RNA, 16 nt, Variola virus
accuguauuauuugcg

SEQ ID NO: 3285244 - RNA, 20 nt, Variola virus
uauuuguaauuuuucucaua

SEQ ID NO: 3285245 - RNA, 18 nt, Variola virus
uacauaggcaacaucaga

SEQ ID NO: 3285246 - RNA, 23 nt, Variola virus
ggugccgcggcaagcauacagac

SEQ ID NO: 3285247 - RNA, 19 nt, Variola virus
ucgaaauaauauuauccuu

SEQ ID NO: 3285248 - RNA, 12 nt, Variola virus
gcugucauguau

SEQ ID NO: 3285249 - RNA, 19 nt, Variola virus
cuauguuaauauguauaua

SEQ ID NO: 3285250 - RNA, 13 nt, Variola virus
aaucauccuaaga

SEQ ID NO: 3285251 - RNA, 21 nt, Variola virus
uuaauuuuuccuuacacaauc

SEQ ID NO: 3285252 - RNA, 19 nt, Variola virus
uaugccugagaguaaacau

SEQ ID NO: 3285253 - RNA, 14 nt, Variola virus
uauuucuaauaaca

SEQ ID NO: 3285254 - RNA, 20 nt, Variola virus
auauuuacggaacuucuaaa

SEQ ID NO: 3285255 - RNA, 16 nt, Variola virus
acuuucaucuaauaag

SEQ ID NO: 3285256 - RNA, 12 nt, Variola virus
acaauauuuccg

SEQ ID NO: 3285257 - RNA, 23 nt, Variola virus
uagcuuuguuagacuaaauacua

SEQ ID NO: 3285258 - RNA, 17 nt, Variola virus
auaguuccauuaucuaa

SEQ ID NO: 3285259 - RNA, 17 nt, Variola virus
acuagacauuuaccaug

SEQ ID NO: 3285260 - RNA, 16 nt, Variola virus
ggucauaacaaguuuc

SEQ ID NO: 3285261 - RNA, 17 nt, Variola virus
aaaauauaguagaauuu

SEQ ID NO: 3285262 - RNA, 22 nt, Variola virus
uaaaaauuuuuuagauguagua

SEQ ID NO: 3285263 - RNA, 12 nt, Variola virus
cgaauaaaagaa

SEQ ID NO: 3285264 - RNA, 20 nt, Variola virus
cauuaauugccauaauaauu

SEQ ID NO: 3285265 - RNA, 19 nt, Variola virus
agcuauugcauaauacaag

SEQ ID NO: 3285266 - RNA, 17 nt, Variola virus
acuauugacuuaauagg

SEQ ID NO: 3285267 - RNA, 18 nt, Variola virus
gaaacuauagauaaugau

SEQ ID NO: 3285268 - RNA, 13 nt, Variola virus
aauccaaauauga

SEQ ID NO: 3285269 - RNA, 13 nt, Variola virus
aucaugaugauuu

SEQ ID NO: 3285270 - RNA, 22 nt, Variola virus
acauuucuuauguuauuaauga

SEQ ID NO: 3285271 - RNA, 13 nt, Variola virus
caaaaaucuauca

SEQ ID NO: 3285272 - RNA, 17 nt, Variola virus
ucuuacuuuguucuauu

SEQ ID NO: 3285273 - RNA, 18 nt, Variola virus
gucaucuccagaggaaau

SEQ ID NO: 3285274 - RNA, 20 nt, Variola virus
uaaaucauggaguggaugua

SEQ ID NO: 3285275 - RNA, 18 nt, Variola virus
auauacucugagauaaaa

SEQ ID NO: 3285276 - RNA, 19 nt, Variola virus
cgaugccuuuuguaaauau

SEQ ID NO: 3285277 - RNA, 17 nt, Variola virus
auuaccugugguuaaaa

SEQ ID NO: 3285278 - RNA, 22 nt, Variola virus
guugaugaggcacauaauaucu

SEQ ID NO: 3285279 - RNA, 20 nt, Variola virus
aaaccaggcgaguguagaaa

SEQ ID NO: 3285280 - RNA, 12 nt, Variola virus
auaaaucauauu

SEQ ID NO: 3285281 - RNA, 17 nt, Variola virus
aauuguuaaauuaauaa

SEQ ID NO: 3285282 - RNA, 16 nt, Variola virus
auggaucuauucaaga

SEQ ID NO: 3285283 - RNA, 18 nt, Variola virus
ucguguauaacaucuuug

SEQ ID NO: 3285284 - RNA, 13 nt, Variola virus
gaaucuaaacaaa

SEQ ID NO: 3285285 - RNA, 16 nt, Variola virus
ucagcugaaaaacuau

SEQ ID NO: 3285286 - RNA, 20 nt, Variola virus
aaaauucuuaaaauaauuua

SEQ ID NO: 3285287 - RNA, 14 nt, Variola virus
cguuaaaucaucua

SEQ ID NO: 3285288 - RNA, 15 nt, Variola virus
auuucaaaauuauuu

SEQ ID NO: 3285289 - RNA, 21 nt, Variola virus
cacauccuuuauuuuaucuau

SEQ ID NO: 3285290 - RNA, 14 nt, Variola virus
uaagaugcaaacau

SEQ ID NO: 3285291 - RNA, 22 nt, Variola virus
uguuuugaauuucuuagucaua

SEQ ID NO: 3285292 - RNA, 15 nt, Variola virus
aguucauuaucugaa

SEQ ID NO: 3285293 - RNA, 15 nt, Variola virus
cacauaauuauucua

SEQ ID NO: 3285294 - RNA, 22 nt, Variola virus
cagacacugucacauacacuag

SEQ ID NO: 3285295 - RNA, 16 nt, Variola virus
aaucuauucccuugau

SEQ ID NO: 3285296 - RNA, 14 nt, Variola virus
auaagauuaucaaa

SEQ ID NO: 3285297 - RNA, 16 nt, Variola virus
agucgaaacauauucu

SEQ ID NO: 3285298 - RNA, 16 nt, Variola virus
gacacaccaaaaaaga

SEQ ID NO: 3285299 - RNA, 18 nt, Variola virus
uuugguaauggcaaugua

SEQ ID NO: 3285300 - RNA, 14 nt, Variola virus
uagauaaauuuauc

SEQ ID NO: 3285301 - RNA, 21 nt, Variola virus
uaccacaauaaaaaaaauuga

SEQ ID NO: 3285302 - RNA, 20 nt, Variola virus
uuagaaauuggucuguguua

SEQ ID NO: 3285303 - RNA, 21 nt, Variola virus
uagaacuuacugacaaaguua

SEQ ID NO: 3285304 - RNA, 23 nt, Variola virus
agacguccauaucugauuauuau

SEQ ID NO: 3285305 - RNA, 12 nt, Variola virus
gaauauaugauu

SEQ ID NO: 3285306 - RNA, 18 nt, Variola virus
uuggaaaggcguuaucua

SEQ ID NO: 3285307 - RNA, 15 nt, Variola virus
aacagaaaaaacaau

SEQ ID NO: 3285308 - RNA, 13 nt, Variola virus
uaccgguguauau

SEQ ID NO: 3285309 - RNA, 14 nt, Variola virus
gugaauaauguuuc

SEQ ID NO: 3285310 - RNA, 13 nt, Variola virus
uacaauauuuccg

SEQ ID NO: 3285311 - RNA, 22 nt, Variola virus
auagagcccacguuuaaacauu

SEQ ID NO: 3285312 - RNA, 14 nt, Variola virus
ucagcgugauuuuc

SEQ ID NO: 3285313 - RNA, 13 nt, Variola virus
uagcaaauauucu

SEQ ID NO: 3285314 - RNA, 14 nt, Variola virus
gaugccucuuuuag

SEQ ID NO: 3285315 - RNA, 21 nt, Variola virus
agcuauguuaucaugaaaugu

SEQ ID NO: 3285316 - RNA, 14 nt, Variola virus
uuaucuauacuauu

SEQ ID NO: 3285317 - RNA, 14 nt, Variola virus
uguuuucaucauuu

SEQ ID NO: 3285318 - RNA, 22 nt, Variola virus
aguauaaacgacauaauacuca

SEQ ID NO: 3285319 - RNA, 19 nt, Variola virus
uccagaacaucuuccauag

SEQ ID NO: 3285320 - RNA, 13 nt, Variola virus
agaauucuagauc

SEQ ID NO: 3285321 - RNA, 23 nt, Variola virus
uuuuguucacaaaaauacauaaa

SEQ ID NO: 3285322 - RNA, 13 nt, Variola virus
agaacaaaguaau

SEQ ID NO: 3285323 - RNA, 13 nt, Variola virus
gugauuguauguu

SEQ ID NO: 3285324 - RNA, 19 nt, Variola virus
aaaacuauaucuauguuga

SEQ ID NO: 3285325 - RNA, 19 nt, Variola virus
aagauguuccguuaccguu

SEQ ID NO: 3285326 - RNA, 18 nt, Variola virus
uuauaagacuuuacucuu

SEQ ID NO: 3285327 - RNA, 13 nt, Variola virus
cugauauucagaa

SEQ ID NO: 3285328 - RNA, 16 nt, Variola virus
uaauuaggaucuucua

SEQ ID NO: 3285329 - RNA, 14 nt, Variola virus
uagagagauucauu

SEQ ID NO: 3285330 - RNA, 14 nt, Variola virus
augagauugaucau

SEQ ID NO: 3285331 - RNA, 17 nt, Variola virus
agugcuacaaaacagaa

SEQ ID NO: 3285332 - RNA, 14 nt, Variola virus
uaauucauaagaau

SEQ ID NO: 3285333 - RNA, 22 nt, Variola virus
uaauuuucuauaacugaacgau

SEQ ID NO: 3285334 - RNA, 16 nt, Variola virus
ccacuaguuuccuuua

SEQ ID NO: 3285335 - RNA, 14 nt, Variola virus
ucccaaugaaucaa

SEQ ID NO: 3285336 - RNA, 13 nt, Variola virus
cagaacuauuuuu

SEQ ID NO: 3285337 - RNA, 18 nt, Variola virus
aaguuagaaaaaaugauu

SEQ ID NO: 3285338 - RNA, 17 nt, Variola virus
auuagucauguuaaaaa

SEQ ID NO: 3285339 - RNA, 20 nt, Variola virus
ugucaaaugaucggaucuaa

SEQ ID NO: 3285340 - RNA, 13 nt, Variola virus
uaguuuuucugga

SEQ ID NO: 3285341 - RNA, 22 nt, Variola virus
cagaaagaggaucguacaucca

SEQ ID NO: 3285342 - RNA, 18 nt, Variola virus
uaaauuuuaaacauaaag

SEQ ID NO: 3285343 - RNA, 22 nt, Variola virus
uggaauugauuucgucaaugua

SEQ ID NO: 3285344 - RNA, 18 nt, Variola virus
ucuauaaaaaauaaguau

SEQ ID NO: 3285345 - RNA, 18 nt, Variola virus
uuccacagauaauauuag

SEQ ID NO: 3285346 - RNA, 10 nt, Variola virus
cucaaaugua

SEQ ID NO: 3285347 - RNA, 13 nt, Variola virus
ucugcauucaauu

SEQ ID NO: 3285348 - RNA, 12 nt, Variola virus
caacuacaguag

SEQ ID NO: 3285349 - RNA, 20 nt, Variola virus
gaaauauagaauauacuuca

SEQ ID NO: 3285350 - RNA, 20 nt, Variola virus
agaacuaucauagaugagaa

SEQ ID NO: 3285351 - RNA, 16 nt, Variola virus
agacuuuaucuagauc

SEQ ID NO: 3285352 - RNA, 18 nt, Variola virus
accaaaaucaauauauca

SEQ ID NO: 3285353 - RNA, 14 nt, Variola virus
auaaucauuacugu

SEQ ID NO: 3285354 - RNA, 14 nt, Variola virus
uacacaaauaauua

SEQ ID NO: 3285355 - RNA, 16 nt, Variola virus
uucaagcgaauuacuc

SEQ ID NO: 3285356 - RNA, 13 nt, Variola virus
agagagaaauacu

SEQ ID NO: 3285357 - RNA, 20 nt, Variola virus
aacgaguucaaauaugaaau

SEQ ID NO: 3285358 - RNA, 17 nt, Variola virus
ccuggaguauggaauac

SEQ ID NO: 3285359 - RNA, 15 nt, Variola virus
aacaaucugucgaaa

SEQ ID NO: 3285360 - RNA, 15 nt, Variola virus
caaacauguucaaug

SEQ ID NO: 3285361 - RNA, 14 nt, Variola virus
uucuacaauaacua

SEQ ID NO: 3285362 - RNA, 19 nt, Variola virus
uuucauaguuagauacaua

SEQ ID NO: 3285363 - RNA, 12 nt, Variola virus
auauuauacaaa

SEQ ID NO: 3285364 - RNA, 19 nt, Variola virus
auuauugguucauuggaau

SEQ ID NO: 3285365 - RNA, 15 nt, Variola virus
guugucuauuuccaa

SEQ ID NO: 3285366 - RNA, 18 nt, Variola virus
aacuuaaaaaaaauaaua

SEQ ID NO: 3285367 - RNA, 18 nt, Variola virus
uccaugauacaacucugc

SEQ ID NO: 3285368 - RNA, 15 nt, Variola virus
aaauuuaaauacuuu

SEQ ID NO: 3285369 - RNA, 19 nt, Variola virus
auaaauaucauuaauauau

SEQ ID NO: 3285370 - RNA, 19 nt, Variola virus
agcaauagugauagauuuu

SEQ ID NO: 3285371 - RNA, 16 nt, Variola virus
uagauuuccaaagaua

SEQ ID NO: 3285372 - RNA, 18 nt, Variola virus
uaguauauggacaaacgu

SEQ ID NO: 3285373 - RNA, 14 nt, Variola virus
auuugaacuuaacu

SEQ ID NO: 3285374 - RNA, 22 nt, Variola virus
gcaauuuugugguugauaauca

SEQ ID NO: 3285375 - RNA, 17 nt, Variola virus
gcaacuguaaauuucuc

SEQ ID NO: 3285376 - RNA, 19 nt, Variola virus
auuaaauauagguauauuu

SEQ ID NO: 3285377 - RNA, 23 nt, Variola virus
uacuuuaugaauggauaccugua

SEQ ID NO: 3285378 - RNA, 21 nt, Variola virus
acagaguuagaaauagauaau

SEQ ID NO: 3285379 - RNA, 15 nt, Variola virus
acuaauuauacuuug

SEQ ID NO: 3285380 - RNA, 20 nt, Variola virus
uugaguggaaaguucaaaaa

SEQ ID NO: 3285381 - RNA, 23 nt, Variola virus
ucuauccuuuuccggaagcaaug

SEQ ID NO: 3285382 - RNA, 23 nt, Variola virus
auacaacggcguuaauuaucuaa

SEQ ID NO: 3285383 - RNA, 22 nt, Variola virus
uuaucacaaugaaauauuuugg

SEQ ID NO: 3285384 - RNA, 17 nt, Variola virus
agucauguuaaaaauga

SEQ ID NO: 3285385 - RNA, 22 nt, Variola virus
guacuaaauucaauaucuuuuu

SEQ ID NO: 3285386 - RNA, 14 nt, Variola virus
uuaaauucuuuaau

SEQ ID NO: 3285387 - RNA, 16 nt, Variola virus
aaaggaugauacauua

SEQ ID NO: 3285388 - RNA, 20 nt, Variola virus
uauacaaugaacuaauauga

SEQ ID NO: 3285389 - RNA, 19 nt, Variola virus
aauucacaccuagagacaa

SEQ ID NO: 3285390 - RNA, 14 nt, Variola virus
aaauagauccugaa

SEQ ID NO: 3285391 - RNA, 21 nt, Variola virus
aaauccuguaauacuuuuagu

SEQ ID NO: 3285392 - RNA, 16 nt, Variola virus
guauuucauuacccaa

SEQ ID NO: 3285393 - RNA, 18 nt, Variola virus
uaaaauaguucuguaaua

SEQ ID NO: 3285394 - RNA, 19 nt, Variola virus
auugauaucgcauagaaau

SEQ ID NO: 3285395 - RNA, 12 nt, Variola virus
cuauucucucuu

SEQ ID NO: 3285396 - RNA, 17 nt, Variola virus
uccauauauguuuucau

SEQ ID NO: 3285397 - RNA, 20 nt, Variola virus
gcgugaacaacuuacagaug

SEQ ID NO: 3285398 - RNA, 23 nt, Variola virus
gcacuacuguuaagaaugauuac

SEQ ID NO: 3285399 - RNA, 12 nt, Variola virus
ccuguguuuaua

SEQ ID NO: 3285400 - RNA, 21 nt, Variola virus
uagauguaguaauaucugauu

SEQ ID NO: 3285401 - RNA, 12 nt, Variola virus
auuucuaucugu

SEQ ID NO: 3285402 - RNA, 15 nt, Variola virus
auauguuauaauaga

SEQ ID NO: 3285403 - RNA, 22 nt, Variola virus
uauaauuuaccgcuauagcauu

SEQ ID NO: 3285404 - RNA, 20 nt, Variola virus
acaauauauguaaucauuau

SEQ ID NO: 3285405 - RNA, 14 nt, Variola virus
acuuugauaauaag

SEQ ID NO: 3285406 - RNA, 23 nt, Variola virus
aauagcaaccaauguuugaucau

SEQ ID NO: 3285407 - RNA, 11 nt, Variola virus
aggacauguaa

SEQ ID NO: 3285408 - RNA, 18 nt, Variola virus
agcauccucaaaaaauau

SEQ ID NO: 3285409 - RNA, 20 nt, Variola virus
caaugauuucaaggauguca

SEQ ID NO: 3285410 - RNA, 22 nt, Variola virus
aggagaugauagcuauuuaacu

SEQ ID NO: 3285411 - RNA, 16 nt, Variola virus
uaaacauaagacguau

SEQ ID NO: 3285412 - RNA, 20 nt, Variola virus
aaugacguuaauaacaaaaa

SEQ ID NO: 3285413 - RNA, 22 nt, Variola virus
guuucucaucuuuuacuugauu

SEQ ID NO: 3285414 - RNA, 15 nt, Variola virus
caugguauauggaua

SEQ ID NO: 3285415 - RNA, 18 nt, Variola virus
cuuaacaucuucuacauu

SEQ ID NO: 3285416 - RNA, 13 nt, Variola virus
ucaaauagauguu

SEQ ID NO: 3285417 - RNA, 20 nt, Variola virus
auuuguagcaaaacuauuuc

SEQ ID NO: 3285418 - RNA, 19 nt, Variola virus
aguuuaaacugaaaaugac

SEQ ID NO: 3285419 - RNA, 12 nt, Variola virus
cgcauuaaugag

SEQ ID NO: 3285420 - RNA, 14 nt, Variola virus
aaccaauacaaugu

SEQ ID NO: 3285421 - RNA, 17 nt, Variola virus
uauaucuauaucuacau

SEQ ID NO: 3285422 - RNA, 20 nt, Variola virus
gaaauggcguauuuaagagu

SEQ ID NO: 3285423 - RNA, 17 nt, Variola virus
uacuugacaucuaaaaa

SEQ ID NO: 3285424 - RNA, 12 nt, Variola virus
agaauuuucuaa

SEQ ID NO: 3285425 - RNA, 14 nt, Variola virus
acauuaauugauua

SEQ ID NO: 3285426 - RNA, 13 nt, Variola virus
guugguagauauu

SEQ ID NO: 3285427 - RNA, 17 nt, Variola virus
auucaugauaaacuuaa

SEQ ID NO: 3285428 - RNA, 23 nt, Variola virus
cagaaaugauuuuggaaaaauug

SEQ ID NO: 3285429 - RNA, 21 nt, Variola virus
auuacuauaaauggagaaugu

SEQ ID NO: 3285430 - RNA, 18 nt, Variola virus
aguaauucagacacuucu

SEQ ID NO: 3285431 - RNA, 16 nt, Variola virus
ucaaaaucaucauuau

SEQ ID NO: 3285432 - RNA, 14 nt, Variola virus
gaauaucaaaucua

SEQ ID NO: 3285433 - RNA, 19 nt, Variola virus
caauuuugauguauaacaa

SEQ ID NO: 3285434 - RNA, 15 nt, Variola virus
uauguucaacuuuga

SEQ ID NO: 3285435 - RNA, 17 nt, Variola virus
gucaucgcguuguuuua

SEQ ID NO: 3285436 - RNA, 12 nt, Variola virus
uguuauauacau

SEQ ID NO: 3285437 - RNA, 22 nt, Variola virus
acgauuacaucaccucuaacau

SEQ ID NO: 3285438 - RNA, 16 nt, Variola virus
aacguuccguaucugu

SEQ ID NO: 3285439 - RNA, 13 nt, Variola virus
cacuaauaucaau

SEQ ID NO: 3285440 - RNA, 20 nt, Variola virus
acacuauucuuaaaugucau

SEQ ID NO: 3285441 - RNA, 20 nt, Variola virus
aucaacgauucuagaacguc

SEQ ID NO: 3285442 - RNA, 12 nt, Variola virus
agucauacuaga

SEQ ID NO: 3285443 - RNA, 17 nt, Variola virus
acauauaauaaugaaua

SEQ ID NO: 3285444 - RNA, 16 nt, Variola virus
uaaacauaaacaacau

SEQ ID NO: 3285445 - RNA, 13 nt, Variola virus
aauuuaucaucug

SEQ ID NO: 3285446 - RNA, 14 nt, Variola virus
agaaaccugauuau

SEQ ID NO: 3285447 - RNA, 19 nt, Variola virus
gauguacugaagguauuau

SEQ ID NO: 3285448 - RNA, 14 nt, Variola virus
auaguaaaauauua

SEQ ID NO: 3285449 - RNA, 22 nt, Variola virus
gaaacaauguuucuuacauauu

SEQ ID NO: 3285450 - RNA, 13 nt, Variola virus
gguauuucaucau

SEQ ID NO: 3285451 - RNA, 12 nt, Variola virus
gaaaauauuaaa

SEQ ID NO: 3285452 - RNA, 12 nt, Variola virus
gaauauauuaau

SEQ ID NO: 3285453 - RNA, 21 nt, Variola virus
aggauauuucaaaaaauaaua

SEQ ID NO: 3285454 - RNA, 17 nt, Variola virus
aaguuuggagaaaugga

SEQ ID NO: 3285455 - RNA, 14 nt, Variola virus
ugaguuuaauaacu

SEQ ID NO: 3285456 - RNA, 12 nt, Variola virus
uuggaauuauuu

SEQ ID NO: 3285457 - RNA, 22 nt, Variola virus
guugacacguuuauuucguaua

SEQ ID NO: 3285458 - RNA, 22 nt, Variola virus
cuaaagcacaacgagagauauu

SEQ ID NO: 3285459 - RNA, 18 nt, Variola virus
auaguuugggaaaagaaa

SEQ ID NO: 3285460 - RNA, 14 nt, Variola virus
agauuaaaaauggu

SEQ ID NO: 3285461 - RNA, 20 nt, Variola virus
uaguuuccuuuuuauaaaau

SEQ ID NO: 3285462 - RNA, 11 nt, Variola virus
cuguggaauaa

SEQ ID NO: 3285463 - RNA, 12 nt, Variola virus
uauuucuuacau

SEQ ID NO: 3285464 - RNA, 20 nt, Variola virus
auuacuuuacauauaauauc

SEQ ID NO: 3285465 - RNA, 16 nt, Variola virus
gaauaucuuuauucau

SEQ ID NO: 3285466 - RNA, 20 nt, Variola virus
guuauuuuguuuuauucaaa

SEQ ID NO: 3285467 - RNA, 16 nt, Variola virus
caauugucuauacaag

SEQ ID NO: 3285468 - RNA, 20 nt, Variola virus
aacgucuuccaauaaauguc

SEQ ID NO: 3285469 - RNA, 21 nt, Variola virus
ucuaaaaauguuaauuuugaa

SEQ ID NO: 3285470 - RNA, 22 nt, Variola virus
auucagaauuucuacauaauua

SEQ ID NO: 3285471 - RNA, 20 nt, Variola virus
uaccuauauucuugauguag

SEQ ID NO: 3285472 - RNA, 14 nt, Variola virus
uuugaacauguaga

SEQ ID NO: 3285473 - RNA, 21 nt, Variola virus
guuaaacuuggggauaaugau

SEQ ID NO: 3285474 - RNA, 19 nt, Variola virus
auuaaauguauauuuucca

SEQ ID NO: 3285475 - RNA, 12 nt, Variola virus
cuuuuauuucca

SEQ ID NO: 3285476 - RNA, 19 nt, Variola virus
ucauauauuuauagaagau

SEQ ID NO: 3285477 - RNA, 18 nt, Variola virus
uacuuauuaguaaaacua

SEQ ID NO: 3285478 - RNA, 19 nt, Variola virus
caaucggauacagacacuc

SEQ ID NO: 3285479 - RNA, 19 nt, Variola virus
uguuauuuccuuguuuuua

SEQ ID NO: 3285480 - RNA, 19 nt, Variola virus
auauccuuaagauguuuga

SEQ ID NO: 3285481 - RNA, 23 nt, Variola virus
uucccauagcugguucaaaauua

SEQ ID NO: 3285482 - RNA, 17 nt, Variola virus
uuuuucuuucgaauuca

SEQ ID NO: 3285483 - RNA, 17 nt, Variola virus
acaaaauucagauucua

SEQ ID NO: 3285484 - RNA, 15 nt, Variola virus
ucuuccuucaaacag

SEQ ID NO: 3285485 - RNA, 17 nt, Variola virus
aguauagaucaaaagaa

SEQ ID NO: 3285486 - RNA, 16 nt, Variola virus
aucugaaaauaaauaa

SEQ ID NO: 3285487 - RNA, 22 nt, Variola virus
uguaagugaugauguaagucau

SEQ ID NO: 3285488 - RNA, 19 nt, Variola virus
ucucucaaucacuacaucu

SEQ ID NO: 3285489 - RNA, 14 nt, Variola virus
gaaauuaauaugau

SEQ ID NO: 3285490 - RNA, 14 nt, Variola virus
auaucuaguauuga

SEQ ID NO: 3285491 - RNA, 14 nt, Variola virus
auuaacauuuugaa

SEQ ID NO: 3285492 - RNA, 18 nt, Variola virus
augauaaacuuaaugaaa

SEQ ID NO: 3285493 - RNA, 14 nt, Variola virus
acuuuucuauuugu

SEQ ID NO: 3285494 - RNA, 19 nt, Variola virus
aauuacgcucuacaaaaug

SEQ ID NO: 3285495 - RNA, 14 nt, Variola virus
cagaguuauccauu

SEQ ID NO: 3285496 - RNA, 12 nt, Variola virus
aucaauauuaac

SEQ ID NO: 3285497 - RNA, 22 nt, Variola virus
gaaauguccguuauauaaucua

SEQ ID NO: 3285498 - RNA, 19 nt, Variola virus
agaaauugguauaaauguu

SEQ ID NO: 3285499 - RNA, 16 nt, Variola virus
aaguaaguaugucgaa

SEQ ID NO: 3285500 - RNA, 13 nt, Variola virus
aagaccaauaaua

SEQ ID NO: 3285501 - RNA, 18 nt, Variola virus
aaugaugaugaaaugaua

SEQ ID NO: 3285502 - RNA, 21 nt, Variola virus
uuguauaauaaguauaguuuu

SEQ ID NO: 3285503 - RNA, 15 nt, Variola virus
acaguuuuuuucuag

SEQ ID NO: 3285504 - RNA, 20 nt, Variola virus
gaauuugaucuauugcccua

SEQ ID NO: 3285505 - RNA, 14 nt, Variola virus
gaguauauauuaag

SEQ ID NO: 3285506 - RNA, 14 nt, Variola virus
gccauuacaagaua

SEQ ID NO: 3285507 - RNA, 12 nt, Variola virus
aaagaucauauu

SEQ ID NO: 3285508 - RNA, 17 nt, Variola virus
cuucucuguuuaaugaa

SEQ ID NO: 3285509 - RNA, 19 nt, Variola virus
cauuuuuuauaaaaaacuu

SEQ ID NO: 3285510 - RNA, 19 nt, Variola virus
ugaguucugugcagaucau

SEQ ID NO: 3285511 - RNA, 14 nt, Variola virus
aaugaauaucuaca

SEQ ID NO: 3285512 - RNA, 16 nt, Variola virus
cacuauguuagcauuu

SEQ ID NO: 3285513 - RNA, 13 nt, Variola virus
guauauagauaug

SEQ ID NO: 3285514 - RNA, 22 nt, Variola virus
gucgucgaaauaucuuuccaac

SEQ ID NO: 3285515 - RNA, 23 nt, Variola virus
cuaccgucgucgaaauaucuuuc

SEQ ID NO: 3285516 - RNA, 17 nt, Variola virus
aauuuauuucagaaauu

SEQ ID NO: 3285517 - RNA, 19 nt, Variola virus
caucguuguugaaucuauu

SEQ ID NO: 3285518 - RNA, 12 nt, Variola virus
acacuaauuaag

SEQ ID NO: 3285519 - RNA, 19 nt, Variola virus
agagugaucaaaucauuau

SEQ ID NO: 3285520 - RNA, 16 nt, Variola virus
auagugaaacaaaaua

SEQ ID NO: 3285521 - RNA, 18 nt, Variola virus
cucuucaacaucuuuaau

SEQ ID NO: 3285522 - RNA, 16 nt, Variola virus
auacacacaaaguaau

SEQ ID NO: 3285523 - RNA, 14 nt, Variola virus
uuuccccucucugu

SEQ ID NO: 3285524 - RNA, 21 nt, Variola virus
auacauaucgcacauuauacu

SEQ ID NO: 3285525 - RNA, 16 nt, Variola virus
gcuugugauuuuuucu

SEQ ID NO: 3285526 - RNA, 13 nt, Variola virus
uaguuucuguaac

SEQ ID NO: 3285527 - RNA, 21 nt, Variola virus
aaaaucgucuucauaaagcau

SEQ ID NO: 3285528 - RNA, 18 nt, Variola virus
aaaaacauaauagcuccc

SEQ ID NO: 3285529 - RNA, 13 nt, Variola virus
agacguuguacaa

SEQ ID NO: 3285530 - RNA, 15 nt, Variola virus
auauacauuguauaa

SEQ ID NO: 3285531 - RNA, 17 nt, Variola virus
agaagugugaauaugau

SEQ ID NO: 3285532 - RNA, 18 nt, Variola virus
aaucagaagaugauucca

SEQ ID NO: 3285533 - RNA, 23 nt, Variola virus
acucauuucauuauaauaguuua

SEQ ID NO: 3285534 - RNA, 16 nt, Variola virus
agauaaagaguucuaa

SEQ ID NO: 3285535 - RNA, 15 nt, Variola virus
cuauuaaagauggag

SEQ ID NO: 3285536 - RNA, 19 nt, Variola virus
caggugcugauguaaaugg

SEQ ID NO: 3285537 - RNA, 15 nt, Variola virus
gugguagauauauag

SEQ ID NO: 3285538 - RNA, 17 nt, Variola virus
uucaacuuugaaauugu

SEQ ID NO: 3285539 - RNA, 17 nt, Variola virus
uaaguauuuauacaaac

SEQ ID NO: 3285540 - RNA, 14 nt, Variola virus
cuuaaauguuuucu

SEQ ID NO: 3285541 - RNA, 21 nt, Variola virus
cuaaaauauuaucuaauguug

SEQ ID NO: 3285542 - RNA, 18 nt, Variola virus
aacucuuucgaauacuua

SEQ ID NO: 3285543 - RNA, 15 nt, Variola virus
uugaucauguagaaa

SEQ ID NO: 3285544 - RNA, 19 nt, Variola virus
auccggauuuccaaagaau

SEQ ID NO: 3285545 - RNA, 14 nt, Variola virus
cuuuaauagauaua

SEQ ID NO: 3285546 - RNA, 14 nt, Variola virus
ucucauaaaauagu

SEQ ID NO: 3285547 - RNA, 13 nt, Variola virus
gaauagaaaucuu

SEQ ID NO: 3285548 - RNA, 22 nt, Variola virus
ucauuaacucuagaaaucugaa

SEQ ID NO: 3285549 - RNA, 18 nt, Variola virus
uagauuuguaucucuuuu

SEQ ID NO: 3285550 - RNA, 19 nt, Variola virus
auaguuugggaaaagaaau

SEQ ID NO: 3285551 - RNA, 15 nt, Variola virus
guucaaaucuagauu

SEQ ID NO: 3285552 - RNA, 19 nt, Variola virus
agaaaaaaauaucgauauu

SEQ ID NO: 3285553 - RNA, 23 nt, Variola virus
uuuaauuuuguuauaguagauau

SEQ ID NO: 3285554 - RNA, 22 nt, Variola virus
ugaagaagugucuauaaaugua

SEQ ID NO: 3285555 - RNA, 16 nt, Variola virus
gaaugcccgcauauau

SEQ ID NO: 3285556 - RNA, 14 nt, Variola virus
aauccauugauaau

SEQ ID NO: 3285557 - RNA, 13 nt, Variola virus
gaugaauauauca

SEQ ID NO: 3285558 - RNA, 18 nt, Variola virus
auacuaauacuaauacua

SEQ ID NO: 3285559 - RNA, 19 nt, Variola virus
auaaaauuauucacuauau

SEQ ID NO: 3285560 - RNA, 15 nt, Variola virus
auaaauuaaaauaca

SEQ ID NO: 3285561 - RNA, 13 nt, Variola virus
caucgaauacuuu

SEQ ID NO: 3285562 - RNA, 14 nt, Variola virus
uaccaaucauuuau

SEQ ID NO: 3285563 - RNA, 12 nt, Variola virus
ucaaagaaauaa

SEQ ID NO: 3285564 - RNA, 17 nt, Variola virus
uaaagcuaaaauagucu

SEQ ID NO: 3285565 - RNA, 21 nt, Variola virus
ggauugguuucuaaauucaug

SEQ ID NO: 3285566 - RNA, 19 nt, Variola virus
acaucuaaagaaaaaugau

SEQ ID NO: 3285567 - RNA, 14 nt, Variola virus
aucugauagaaaga

SEQ ID NO: 3285568 - RNA, 23 nt, Variola virus
uaacuuuaaauaauuuacaaaaa

SEQ ID NO: 3285569 - RNA, 18 nt, Variola virus
ucucuaacgguaccauaa

SEQ ID NO: 3285570 - RNA, 19 nt, Variola virus
auccaugggugacauaauu

SEQ ID NO: 3285571 - RNA, 22 nt, Variola virus
ugaauauagaacaucauuucca

SEQ ID NO: 3285572 - RNA, 14 nt, Variola virus
aucaaaagaagaau

SEQ ID NO: 3285573 - RNA, 19 nt, Variola virus
gacuauagacauaauacua

SEQ ID NO: 3285574 - RNA, 16 nt, Variola virus
acuauuccaaaugaug

SEQ ID NO: 3285575 - RNA, 22 nt, Variola virus
uacuuauucuauuuuacaaaua

SEQ ID NO: 3285576 - RNA, 17 nt, Variola virus
ucauaaaaaaaaguuuu

SEQ ID NO: 3285577 - RNA, 19 nt, Variola virus
aauuuaccagauaucuucu

SEQ ID NO: 3285578 - RNA, 14 nt, Variola virus
cgugauagcucccg

SEQ ID NO: 3285579 - RNA, 15 nt, Variola virus
agugacaaaaugcua

SEQ ID NO: 3285580 - RNA, 16 nt, Variola virus
uguaauagaauuuaua

SEQ ID NO: 3285581 - RNA, 20 nt, Variola virus
uaguacuaaaauuuguauuu

SEQ ID NO: 3285582 - RNA, 17 nt, Variola virus
ugauuacauuuuugaua

SEQ ID NO: 3285583 - RNA, 19 nt, Variola virus
ucaaacggugcagacguau

SEQ ID NO: 3285584 - RNA, 17 nt, Variola virus
uguaucgaaaaacuuua

SEQ ID NO: 3285585 - RNA, 12 nt, Variola virus
gauaauuuccau

SEQ ID NO: 3285586 - RNA, 17 nt, Variola virus
cuguaucaguugcauuu

SEQ ID NO: 3285587 - RNA, 16 nt, Variola virus
uaacaggucauauucu

SEQ ID NO: 3285588 - RNA, 21 nt, Variola virus
caucaucaaaagacuuaugau

SEQ ID NO: 3285589 - RNA, 14 nt, Variola virus
cauauaauaaugaa

SEQ ID NO: 3285590 - RNA, 15 nt, Variola virus
uacuuaaaaaaugaa

SEQ ID NO: 3285591 - RNA, 15 nt, Variola virus
ccuuuuuauuuucua

SEQ ID NO: 3285592 - RNA, 18 nt, Variola virus
ucauuacuaauagaguau

SEQ ID NO: 3285593 - RNA, 16 nt, Variola virus
ugcgguacuacagaua

SEQ ID NO: 3285594 - RNA, 19 nt, Variola virus
aaaauguauagauaaacua

SEQ ID NO: 3285595 - RNA, 12 nt, Variola virus
uaucaucuuuuc

SEQ ID NO: 3285596 - RNA, 20 nt, Variola virus
cucaagauuuuaaaaaacug

SEQ ID NO: 3285597 - RNA, 23 nt, Variola virus
acuagaguaguauauugucacau

SEQ ID NO: 3285598 - RNA, 19 nt, Variola virus
aacuuuuaaauacaaauau

SEQ ID NO: 3285599 - RNA, 16 nt, Variola virus
guaucaugaacucuaa

SEQ ID NO: 3285600 - RNA, 19 nt, Variola virus
uagaaaauaauauagauuu

SEQ ID NO: 3285601 - RNA, 20 nt, Variola virus
auauacuauucuugugauaa

SEQ ID NO: 3285602 - RNA, 19 nt, Variola virus
ugguacagaaaauaucaug

SEQ ID NO: 3285603 - RNA, 16 nt, Variola virus
ugaauuuauaaaaugc

SEQ ID NO: 3285604 - RNA, 19 nt, Variola virus
acuucauaaaagaaaauac

SEQ ID NO: 3285605 - RNA, 23 nt, Variola virus
aaggaugcaaacuuacagaaaca

SEQ ID NO: 3285606 - RNA, 18 nt, Variola virus
ugcuaaacuuuauguacu

SEQ ID NO: 3285607 - RNA, 15 nt, Variola virus
uggucaaaaacugaa

SEQ ID NO: 3285608 - RNA, 14 nt, Variola virus
cuauaaaaaugaag

SEQ ID NO: 3285609 - RNA, 21 nt, Variola virus
uuauaauagguguaaaucuag

SEQ ID NO: 3285610 - RNA, 15 nt, Variola virus
agguacaauaccuuu

SEQ ID NO: 3285611 - RNA, 16 nt, Variola virus
acgaaaggagagaaug

SEQ ID NO: 3285612 - RNA, 20 nt, Variola virus
uacauguaaugauuuaaaau

SEQ ID NO: 3285613 - RNA, 17 nt, Variola virus
guuagaagucuuaaaaa

SEQ ID NO: 3285614 - RNA, 16 nt, Variola virus
auagcaugugaauaua

SEQ ID NO: 3285615 - RNA, 21 nt, Variola virus
acuaauagaacaugugugaaa

SEQ ID NO: 3285616 - RNA, 18 nt, Variola virus
aauccaauuguuugauau

SEQ ID NO: 3285617 - RNA, 20 nt, Variola virus
uauaacuggauauagaacug

SEQ ID NO: 3285618 - RNA, 16 nt, Variola virus
caguacuaauuuccaa

SEQ ID NO: 3285619 - RNA, 20 nt, Variola virus
auaauacacacguaauagau

SEQ ID NO: 3285620 - RNA, 13 nt, Variola virus
uaauuaaugucca

SEQ ID NO: 3285621 - RNA, 14 nt, Variola virus
uuugcaaauacagc

SEQ ID NO: 3285622 - RNA, 16 nt, Variola virus
auaacauuaauaucaa

SEQ ID NO: 3285623 - RNA, 22 nt, Variola virus
ugcuuaauacaccguuaacaau

SEQ ID NO: 3285624 - RNA, 20 nt, Variola virus
guucuaaugccgaucuuuga

SEQ ID NO: 3285625 - RNA, 16 nt, Variola virus
ucuauguuauuuguau

SEQ ID NO: 3285626 - RNA, 22 nt, Variola virus
uuuacuccucuccuuccguaaa

SEQ ID NO: 3285627 - RNA, 14 nt, Variola virus
auagugauaaguaa

SEQ ID NO: 3285628 - RNA, 14 nt, Variola virus
aacgucuaaaugua

SEQ ID NO: 3285629 - RNA, 14 nt, Variola virus
uacauaacaucuuu

SEQ ID NO: 3285630 - RNA, 18 nt, Variola virus
acuacaauauuucaucau

SEQ ID NO: 3285631 - RNA, 18 nt, Variola virus
cuguaucauccaguuugc

SEQ ID NO: 3285632 - RNA, 13 nt, Variola virus
acaagucuaauaa

SEQ ID NO: 3285633 - RNA, 21 nt, Variola virus
agagaauugcugcaauauauu

SEQ ID NO: 3285634 - RNA, 17 nt, Variola virus
uucuagacacaacacua

SEQ ID NO: 3285635 - RNA, 18 nt, Variola virus
aaacauuuuauuucuaga

SEQ ID NO: 3285636 - RNA, 18 nt, Variola virus
ucuaccguuguuaaauac

SEQ ID NO: 3285637 - RNA, 14 nt, Variola virus
auuucuaauguuuc

SEQ ID NO: 3285638 - RNA, 20 nt, Variola virus
auagugucuacuuaaaugua

SEQ ID NO: 3285639 - RNA, 14 nt, Variola virus
ucuaguucugaacg

SEQ ID NO: 3285640 - RNA, 21 nt, Variola virus
uuuaaauuuuucuacagauau

SEQ ID NO: 3285641 - RNA, 20 nt, Variola virus
uaaaaaguuuaaguuucuca

SEQ ID NO: 3285642 - RNA, 15 nt, Variola virus
auauucgaguucauu

SEQ ID NO: 3285643 - RNA, 20 nt, Variola virus
aguauuugagaaauauguau

SEQ ID NO: 3285644 - RNA, 22 nt, Variola virus
cgaacuccauaaauuucuccaa

SEQ ID NO: 3285645 - RNA, 12 nt, Variola virus
aaagauauuguu

SEQ ID NO: 3285646 - RNA, 13 nt, Variola virus
uugcaauugguaa

SEQ ID NO: 3285647 - RNA, 22 nt, Variola virus
caucuguaggauaucuauuuuc

SEQ ID NO: 3285648 - RNA, 16 nt, Variola virus
aguuagaaaaaaugau

SEQ ID NO: 3285649 - RNA, 22 nt, Variola virus
aaaugaagauccaagauuugua

SEQ ID NO: 3285650 - RNA, 12 nt, Variola virus
cauuugaugcac

SEQ ID NO: 3285651 - RNA, 16 nt, Variola virus
auaguuuaucuuuccc

SEQ ID NO: 3285652 - RNA, 22 nt, Variola virus
uacaagauugaaauuauauucu

SEQ ID NO: 3285653 - RNA, 21 nt, Variola virus
aaccauucauuaauuucugau

SEQ ID NO: 3285654 - RNA, 15 nt, Variola virus
caaugggucguugga

SEQ ID NO: 3285655 - RNA, 15 nt, Variola virus
auauaaguaauacau

SEQ ID NO: 3285656 - RNA, 16 nt, Variola virus
aguugcauagauguau

SEQ ID NO: 3285657 - RNA, 17 nt, Variola virus
augcgagagacaaaaug

SEQ ID NO: 3285658 - RNA, 17 nt, Variola virus
agugggcuuacauguau

SEQ ID NO: 3285659 - RNA, 20 nt, Variola virus
gucaucuuguucagaaauau

SEQ ID NO: 3285660 - RNA, 20 nt, Variola virus
uaaucgucgaacguucuagu

SEQ ID NO: 3285661 - RNA, 16 nt, Variola virus
uaguaucuaaaacuac

SEQ ID NO: 3285662 - RNA, 14 nt, Variola virus
cacaacuuaaugaa

SEQ ID NO: 3285663 - RNA, 22 nt, Variola virus
cucuaacaacgacgaaccaaaa

SEQ ID NO: 3285664 - RNA, 18 nt, Variola virus
acucaggaagauauuuua

SEQ ID NO: 3285665 - RNA, 15 nt, Variola virus
uuauaguagauauca

SEQ ID NO: 3285666 - RNA, 19 nt, Variola virus
gauccuagaacuagauaua

SEQ ID NO: 3285667 - RNA, 15 nt, Variola virus
uggaauaucaaaucu

SEQ ID NO: 3285668 - RNA, 14 nt, Variola virus
agcuucugaaauaa

SEQ ID NO: 3285669 - RNA, 18 nt, Variola virus
aagaagaugguuaaaaau

SEQ ID NO: 3285670 - RNA, 20 nt, Variola virus
uaaauguuuucucuguaaua

SEQ ID NO: 3285671 - RNA, 13 nt, Variola virus
acgugauagcucc

SEQ ID NO: 3285672 - RNA, 19 nt, Variola virus
cguacaugagucugaguuc

SEQ ID NO: 3285673 - RNA, 19 nt, Variola virus
aggaaguuuaauaauacaa

SEQ ID NO: 3285674 - RNA, 12 nt, Variola virus
ugauauuuguau

SEQ ID NO: 3285675 - RNA, 13 nt, Variola virus
uaucugaugauau

SEQ ID NO: 3285676 - RNA, 20 nt, Variola virus
gguacauacgucuauuucua

SEQ ID NO: 3285677 - RNA, 12 nt, Variola virus
ucucgauuucua

SEQ ID NO: 3285678 - RNA, 23 nt, Variola virus
aauaguuuguuuuggaaauagau

SEQ ID NO: 3285679 - RNA, 21 nt, Variola virus
gcaaauuauuucuucugaauu

SEQ ID NO: 3285680 - RNA, 14 nt, Variola virus
uuaacgauauuuug

SEQ ID NO: 3285681 - RNA, 18 nt, Variola virus
aggauucuccuaaauacg

SEQ ID NO: 3285682 - RNA, 22 nt, Variola virus
uauuuaaugauucauuaucaua

SEQ ID NO: 3285683 - RNA, 19 nt, Variola virus
uucuaguauacggaaacac

SEQ ID NO: 3285684 - RNA, 22 nt, Variola virus
caaaacguaauuauagaugaau

SEQ ID NO: 3285685 - RNA, 15 nt, Variola virus
auaaagaaaauaugg

SEQ ID NO: 3285686 - RNA, 18 nt, Variola virus
uaugaacgauaauaacuu

SEQ ID NO: 3285687 - RNA, 15 nt, Variola virus
gucugaagaauaucu

SEQ ID NO: 3285688 - RNA, 21 nt, Variola virus
ugucaaagauuguguagaaau

SEQ ID NO: 3285689 - RNA, 16 nt, Variola virus
gaaugcgauacauuga

SEQ ID NO: 3285690 - RNA, 20 nt, Variola virus
cauaauuaggaucuucuaau

SEQ ID NO: 3285691 - RNA, 20 nt, Variola virus
uaucagagcagucuuucuaa

SEQ ID NO: 3285692 - RNA, 21 nt, Variola virus
uagaauccauaaaacaaaauc

SEQ ID NO: 3285693 - RNA, 15 nt, Variola virus
acucucgaaaucaca

SEQ ID NO: 3285694 - RNA, 14 nt, Variola virus
aauugucuguaaac

SEQ ID NO: 3285695 - RNA, 16 nt, Variola virus
aaucguauaaauacug

SEQ ID NO: 3285696 - RNA, 17 nt, Variola virus
ucucagguacagauuuu

SEQ ID NO: 3285697 - RNA, 19 nt, Variola virus
uuaugucauaaacuguaaa

SEQ ID NO: 3285698 - RNA, 16 nt, Variola virus
gcugucacucauaaau

SEQ ID NO: 3285699 - RNA, 14 nt, Variola virus
uacuuuuaggaaau

SEQ ID NO: 3285700 - RNA, 23 nt, Variola virus
cuauucaguaguguuuacauaaa

SEQ ID NO: 3285701 - RNA, 17 nt, Variola virus
uaaacaucuugauacuu

SEQ ID NO: 3285702 - RNA, 13 nt, Variola virus
uauucgacacauc

SEQ ID NO: 3285703 - RNA, 23 nt, Variola virus
uuuauauaauuuuuggacaaaug

SEQ ID NO: 3285704 - RNA, 16 nt, Variola virus
uauacaccacccaaug

SEQ ID NO: 3285705 - RNA, 16 nt, Variola virus
augacauggaaauauc

SEQ ID NO: 3285706 - RNA, 23 nt, Variola virus
ucauuaaacagcauuucugucaa

SEQ ID NO: 3285707 - RNA, 22 nt, Variola virus
agauaugauaaaacuauuguuu

SEQ ID NO: 3285708 - RNA, 23 nt, Variola virus
gauccacaugcuguacaggccag

SEQ ID NO: 3285709 - RNA, 21 nt, Variola virus
ggauauuuguucauuggauug

SEQ ID NO: 3285710 - RNA, 22 nt, Variola virus
caaauaacucuugcaccaucag

SEQ ID NO: 3285711 - RNA, 13 nt, Variola virus
auucuuucaauuc

SEQ ID NO: 3285712 - RNA, 14 nt, Variola virus
ccaaaaugaugaua

SEQ ID NO: 3285713 - RNA, 22 nt, Variola virus
uugaaauuguuuuuuauuuucu

SEQ ID NO: 3285714 - RNA, 16 nt, Variola virus
accaacaacuguaaaa

SEQ ID NO: 3285715 - RNA, 17 nt, Variola virus
uaucaucgacacaaaug

SEQ ID NO: 3285716 - RNA, 18 nt, Variola virus
guuacauuuauacuucuu

SEQ ID NO: 3285717 - RNA, 22 nt, Variola virus
uauucuuaauucuuuaacaaaa

SEQ ID NO: 3285718 - RNA, 21 nt, Variola virus
uaaagucauuauauaggguug

SEQ ID NO: 3285719 - RNA, 23 nt, Variola virus
gcaauagucagacuguaguucua

SEQ ID NO: 3285720 - RNA, 15 nt, Variola virus
uauuaguguuuagau

SEQ ID NO: 3285721 - RNA, 15 nt, Variola virus
auauuguagcauuac

SEQ ID NO: 3285722 - RNA, 20 nt, Variola virus
cauaagcuugacuacauuug

SEQ ID NO: 3285723 - RNA, 14 nt, Variola virus
caauucuauccauu

SEQ ID NO: 3285724 - RNA, 12 nt, Variola virus
uuuauacaagau

SEQ ID NO: 3285725 - RNA, 12 nt, Variola virus
auuauacaugau

SEQ ID NO: 3285726 - RNA, 21 nt, Variola virus
uaacaagaucgauagacacug

SEQ ID NO: 3285727 - RNA, 14 nt, Variola virus
acuacaauauuuca

SEQ ID NO: 3285728 - RNA, 21 nt, Variola virus
uagauacucuaccauuucugc

SEQ ID NO: 3285729 - RNA, 22 nt, Variola virus
caaagagaugaucgauuauauu

SEQ ID NO: 3285730 - RNA, 17 nt, Variola virus
accauuuuaaaaucauu

SEQ ID NO: 3285731 - RNA, 13 nt, Variola virus
uguggguauacaa

SEQ ID NO: 3285732 - RNA, 18 nt, Variola virus
gaauaucacauaucaugu

SEQ ID NO: 3285733 - RNA, 15 nt, Variola virus
gcaaagaaugaugac

SEQ ID NO: 3285734 - RNA, 22 nt, Variola virus
gacauaguuucaaaacaaacag

SEQ ID NO: 3285735 - RNA, 15 nt, Variola virus
uaaaaaauucccauu

SEQ ID NO: 3285736 - RNA, 16 nt, Variola virus
cuauuggcaauuguag

SEQ ID NO: 3285737 - RNA, 19 nt, Variola virus
uuaagauuuuaaauguaua

SEQ ID NO: 3285738 - RNA, 12 nt, Variola virus
gugauagauaug

SEQ ID NO: 3285739 - RNA, 16 nt, Variola virus
ucauguuuauuucuag

SEQ ID NO: 3285740 - RNA, 19 nt, Variola virus
uuaaguagaucaucugaaa

SEQ ID NO: 3285741 - RNA, 13 nt, Variola virus
aauucuaaaugau

SEQ ID NO: 3285742 - RNA, 20 nt, Variola virus
uucugcuaguucuugagaca

SEQ ID NO: 3285743 - RNA, 12 nt, Variola virus
aagguucuuaua

SEQ ID NO: 3285744 - RNA, 23 nt, Variola virus
ggauuuuauucguagaaaguauc

SEQ ID NO: 3285745 - RNA, 21 nt, Variola virus
auaguggauacgaagauacua

SEQ ID NO: 3285746 - RNA, 17 nt, Variola virus
uuaucucauuugaaaau

SEQ ID NO: 3285747 - RNA, 14 nt, Variola virus
aagacggggauuuc

SEQ ID NO: 3285748 - RNA, 21 nt, Variola virus
auauuucuguaucaaaugcua

SEQ ID NO: 3285749 - RNA, 20 nt, Variola virus
acaaaauucauuagaauaua

SEQ ID NO: 3285750 - RNA, 21 nt, Variola virus
ucuuuaccauaacuguauaaa

SEQ ID NO: 3285751 - RNA, 22 nt, Variola virus
cuaugaucguuuuaauauugug

SEQ ID NO: 3285752 - RNA, 23 nt, Variola virus
uggaaugacgaauccuguuucua

SEQ ID NO: 3285753 - RNA, 15 nt, Variola virus
ugccuccacauaucg

SEQ ID NO: 3285754 - RNA, 15 nt, Variola virus
caaaauacaauuguu

SEQ ID NO: 3285755 - RNA, 15 nt, Variola virus
auauuaauaggagau

SEQ ID NO: 3285756 - RNA, 24 nt, Variola virus
uuacuaucuuuaacauauguauca

SEQ ID NO: 3285757 - RNA, 21 nt, Variola virus
aucauccaccuguuuuaacau

SEQ ID NO: 3285758 - RNA, 17 nt, Variola virus
aauuggcauuuaacaga

SEQ ID NO: 3285759 - RNA, 19 nt, Variola virus
guaauacgaucuauaaaaa

SEQ ID NO: 3285760 - RNA, 18 nt, Variola virus
aauaaauagauauaaaau

SEQ ID NO: 3285761 - RNA, 21 nt, Variola virus
uaugccacaccaucuucauaa

SEQ ID NO: 3285762 - RNA, 12 nt, Variola virus
cuuaaucaugug

SEQ ID NO: 3285763 - RNA, 22 nt, Variola virus
caauuauaacaauuauaacaau

SEQ ID NO: 3285764 - RNA, 17 nt, Variola virus
auauacguguacuguau

SEQ ID NO: 3285765 - RNA, 22 nt, Variola virus
ucaguugcauuuucaacacucg

SEQ ID NO: 3285766 - RNA, 14 nt, Variola virus
ugucaaaggaugaa

SEQ ID NO: 3285767 - RNA, 18 nt, Variola virus
acucucuauaacaaaugu

SEQ ID NO: 3285768 - RNA, 15 nt, Variola virus
cauuccuuauacaau

SEQ ID NO: 3285769 - RNA, 19 nt, Variola virus
ccuugaaaauaaauacagu

SEQ ID NO: 3285770 - RNA, 15 nt, Variola virus
ugaaauugagaagau

SEQ ID NO: 3285771 - RNA, 23 nt, Variola virus
uaaguaccggguaauauaucuuu

SEQ ID NO: 3285772 - RNA, 19 nt, Variola virus
uucacuauaucuaagaaac

SEQ ID NO: 3285773 - RNA, 13 nt, Variola virus
aucaacauauuaa

SEQ ID NO: 3285774 - RNA, 17 nt, Variola virus
aauaucacauaucaugu

SEQ ID NO: 3285775 - RNA, 19 nt, Variola virus
cauuuuccagaugauaugu

SEQ ID NO: 3285776 - RNA, 14 nt, Variola virus
acgaucuauuagaa

SEQ ID NO: 3285777 - RNA, 21 nt, Variola virus
auauuaacgaguuccauuuau

SEQ ID NO: 3285778 - RNA, 13 nt, Variola virus
auauauugucuaa

SEQ ID NO: 3285779 - RNA, 18 nt, Variola virus
ucugaaauuccaucuaga

SEQ ID NO: 3285780 - RNA, 16 nt, Variola virus
auauuuaaaauaucua

SEQ ID NO: 3285781 - RNA, 19 nt, Variola virus
caauuuauacggauuucua

SEQ ID NO: 3285782 - RNA, 22 nt, Variola virus
acaacgucaucgcuucaucuau

SEQ ID NO: 3285783 - RNA, 12 nt, Variola virus
uuaaaaugagua

SEQ ID NO: 3285784 - RNA, 19 nt, Variola virus
caaguuuucauaucaucuu

SEQ ID NO: 3285785 - RNA, 21 nt, Variola virus
uauucaauuuuuguauaucua

SEQ ID NO: 3285786 - RNA, 16 nt, Variola virus
auuuacauuaaaugua

SEQ ID NO: 3285787 - RNA, 19 nt, Variola virus
ugcaaauaaaauauacugu

SEQ ID NO: 3285788 - RNA, 16 nt, Variola virus
aguuuguuuucauuau

SEQ ID NO: 3285789 - RNA, 18 nt, Variola virus
acggagccccaggaucuc

SEQ ID NO: 3285790 - RNA, 18 nt, Variola virus
ucaaacaugacauuuucc

SEQ ID NO: 3285791 - RNA, 20 nt, Variola virus
caaucugggcguauaaugaa

SEQ ID NO: 3285792 - RNA, 20 nt, Variola virus
gacaacuuaaucugaugaau

SEQ ID NO: 3285793 - RNA, 13 nt, Variola virus
auaaaaaaaauua

SEQ ID NO: 3285794 - RNA, 15 nt, Variola virus
cagagaccauguauu

SEQ ID NO: 3285795 - RNA, 15 nt, Variola virus
uaacagccaauauga

SEQ ID NO: 3285796 - RNA, 18 nt, Variola virus
caacaaguuggaugauau

SEQ ID NO: 3285797 - RNA, 14 nt, Variola virus
auaaguaaaugaaa

SEQ ID NO: 3285798 - RNA, 13 nt, Variola virus
cugcaguaauauu

SEQ ID NO: 3285799 - RNA, 13 nt, Variola virus
caggaacuaugac

SEQ ID NO: 3285800 - RNA, 16 nt, Variola virus
auuaacgguaauacau

SEQ ID NO: 3285801 - RNA, 22 nt, Variola virus
aacacuaaaaaauaaacacaua

SEQ ID NO: 3285802 - RNA, 18 nt, Variola virus
aguuaagagaauaauaga

SEQ ID NO: 3285803 - RNA, 13 nt, Variola virus
uauaguuuggauu

SEQ ID NO: 3285804 - RNA, 20 nt, Variola virus
ugaagaauuuauauaaauua

SEQ ID NO: 3285805 - RNA, 17 nt, Variola virus
gaaaauacuaaaucaga

SEQ ID NO: 3285806 - RNA, 16 nt, Variola virus
ggacaaauauaugcaa

SEQ ID NO: 3285807 - RNA, 12 nt, Variola virus
uaaaauggauua

SEQ ID NO: 3285808 - RNA, 18 nt, Variola virus
aguaaguaucuuauguau

SEQ ID NO: 3285809 - RNA, 14 nt, Variola virus
aucugaagaaagua

SEQ ID NO: 3285810 - RNA, 11 nt, Variola virus
ucgaaaacuag

SEQ ID NO: 3285811 - RNA, 22 nt, Variola virus
uaaccgauaaaaagacuuuuau

SEQ ID NO: 3285812 - RNA, 18 nt, Variola virus
auuauuaaguauaauaga

SEQ ID NO: 3285813 - RNA, 20 nt, Variola virus
uuauugcacgcuauuaauca

SEQ ID NO: 3285814 - RNA, 18 nt, Variola virus
cacuuuuuuauaaagaug

SEQ ID NO: 3285815 - RNA, 15 nt, Variola virus
uuuauuaaguguauu

SEQ ID NO: 3285816 - RNA, 11 nt, Variola virus
aauauuuuacg

SEQ ID NO: 3285817 - RNA, 16 nt, Variola virus
auauauuuuucuagau

SEQ ID NO: 3285818 - RNA, 17 nt, Variola virus
uggaucaucgugugaua

SEQ ID NO: 3285819 - RNA, 17 nt, Variola virus
gaaaacugguuaaaaca

SEQ ID NO: 3285820 - RNA, 17 nt, Variola virus
uuuagacgguugagaaa

SEQ ID NO: 3285821 - RNA, 18 nt, Variola virus
uaauacccguuuguuuaa

SEQ ID NO: 3285822 - RNA, 17 nt, Variola virus
ugaugcuuaaaaugcuc

SEQ ID NO: 3285823 - RNA, 18 nt, Variola virus
uacccaaucucucucaaa

SEQ ID NO: 3285824 - RNA, 15 nt, Variola virus
uggaucguuuagaau

SEQ ID NO: 3285825 - RNA, 23 nt, Variola virus
cuaguaaacuucgcguauacagu

SEQ ID NO: 3285826 - RNA, 14 nt, Variola virus
uuaauacauuauua

SEQ ID NO: 3285827 - RNA, 13 nt, Variola virus
aucggcucaaaga

SEQ ID NO: 3285828 - RNA, 18 nt, Variola virus
uauugcuguauuuguaau

SEQ ID NO: 3285829 - RNA, 12 nt, Variola virus
auucuaaugaug

SEQ ID NO: 3285830 - RNA, 20 nt, Variola virus
augaguuauuaagaaauaca

SEQ ID NO: 3285831 - RNA, 19 nt, Variola virus
cacuaguuaagaacauguc

SEQ ID NO: 3285832 - RNA, 20 nt, Variola virus
aguaaucauguaaauguuua

SEQ ID NO: 3285833 - RNA, 20 nt, Variola virus
ggauuugguaagacuauuac

SEQ ID NO: 3285834 - RNA, 21 nt, Variola virus
uagauuauaauccuuauacau

SEQ ID NO: 3285835 - RNA, 20 nt, Variola virus
cuaucauccaucauguuaag

SEQ ID NO: 3285836 - RNA, 14 nt, Variola virus
auuagaucuuuuac

SEQ ID NO: 3285837 - RNA, 18 nt, Variola virus
uaacauuacauauuauau

SEQ ID NO: 3285838 - RNA, 14 nt, Variola virus
uauuauaaacucuc

SEQ ID NO: 3285839 - RNA, 21 nt, Variola virus
gaauucuuuuucgacuuuuug

SEQ ID NO: 3285840 - RNA, 14 nt, Variola virus
gaauauauaaaaga

SEQ ID NO: 3285841 - RNA, 16 nt, Variola virus
auuuugaggaaauuga

SEQ ID NO: 3285842 - RNA, 22 nt, Variola virus
guauuuggaucuuuuguacauc

SEQ ID NO: 3285843 - RNA, 13 nt, Variola virus
auuacaaaaacua

SEQ ID NO: 3285844 - RNA, 22 nt, Variola virus
uaaccggcgcugucauguaucc

SEQ ID NO: 3285845 - RNA, 13 nt, Variola virus
cuaauacucuggg

SEQ ID NO: 3285846 - RNA, 23 nt, Variola virus
aauuaguguauaauuuugucaua

SEQ ID NO: 3285847 - RNA, 13 nt, Variola virus
agagcaaacaucu

SEQ ID NO: 3285848 - RNA, 18 nt, Variola virus
aggauguuauuaugaauc

SEQ ID NO: 3285849 - RNA, 18 nt, Variola virus
uaugauagaaauuagcaa

SEQ ID NO: 3285850 - RNA, 14 nt, Variola virus
ccaguuccuuuucu

SEQ ID NO: 3285851 - RNA, 21 nt, Variola virus
aauuuaaaauuagaucuuuua

SEQ ID NO: 3285852 - RNA, 16 nt, Variola virus
ugauacuaaguauaau

SEQ ID NO: 3285853 - RNA, 15 nt, Variola virus
auauucuaaaauggu

SEQ ID NO: 3285854 - RNA, 23 nt, Variola virus
ugauuaacagaaaaaacaauguu

SEQ ID NO: 3285855 - RNA, 17 nt, Variola virus
gcagucggauuggaaca

SEQ ID NO: 3285856 - RNA, 21 nt, Variola virus
auauuaacaaaagugaauaua

SEQ ID NO: 3285857 - RNA, 17 nt, Variola virus
guuuucuagauggaaau

SEQ ID NO: 3285858 - RNA, 18 nt, Variola virus
gaaaauccagcuacuaua

SEQ ID NO: 3285859 - RNA, 19 nt, Variola virus
auaucuagacuuucuguua

SEQ ID NO: 3285860 - RNA, 15 nt, Variola virus
auaucaaauggauau

SEQ ID NO: 3285861 - RNA, 21 nt, Variola virus
auaucauugaaugagauacua

SEQ ID NO: 3285862 - RNA, 18 nt, Variola virus
aucugauaauauuaaaaa

SEQ ID NO: 3285863 - RNA, 18 nt, Variola virus
aagaacauugcagccauu

SEQ ID NO: 3285864 - RNA, 19 nt, Variola virus
acuaauuaguaacgacuau

SEQ ID NO: 3285865 - RNA, 14 nt, Variola virus
uuaaaaauaguuuu

SEQ ID NO: 3285866 - RNA, 15 nt, Variola virus
uuaccagaauacuau

SEQ ID NO: 3285867 - RNA, 12 nt, Variola virus
ugucuccauuac

SEQ ID NO: 3285868 - RNA, 16 nt, Variola virus
aauaucaggaaaugua

SEQ ID NO: 3285869 - RNA, 20 nt, Variola virus
aacauuuugcagaaaaaagu

SEQ ID NO: 3285870 - RNA, 19 nt, Variola virus
uaauaaauaaaucugaacc

SEQ ID NO: 3285871 - RNA, 22 nt, Variola virus
guacaacaucuaacuauaugau

SEQ ID NO: 3285872 - RNA, 18 nt, Variola virus
auucucucauuuaucaaa

SEQ ID NO: 3285873 - RNA, 16 nt, Variola virus
aagcuaggcuggaaac

SEQ ID NO: 3285874 - RNA, 12 nt, Variola virus
gaccguguuucu

SEQ ID NO: 3285875 - RNA, 18 nt, Variola virus
acuuggagguagguauua

SEQ ID NO: 3285876 - RNA, 13 nt, Variola virus
aagauauucuaaa

SEQ ID NO: 3285877 - RNA, 16 nt, Variola virus
aaauuauucacuauau

SEQ ID NO: 3285878 - RNA, 13 nt, Variola virus
uuuacccacuaua

SEQ ID NO: 3285879 - RNA, 21 nt, Variola virus
aaauucuuaguuauauauacu

SEQ ID NO: 3285880 - RNA, 16 nt, Variola virus
guuaaaaauaaucauc

SEQ ID NO: 3285881 - RNA, 22 nt, Variola virus
ucuuuaaguuuuccguuagaaa

SEQ ID NO: 3285882 - RNA, 17 nt, Variola virus
aucuggauuucagauau

SEQ ID NO: 3285883 - RNA, 19 nt, Variola virus
aauacaccaauagaugaua

SEQ ID NO: 3285884 - RNA, 19 nt, Variola virus
auuguauccauacauacau

SEQ ID NO: 3285885 - RNA, 21 nt, Variola virus
aaauacgcaaucgauguguca

SEQ ID NO: 3285886 - RNA, 17 nt, Variola virus
ccauuuguguaucuaua

SEQ ID NO: 3285887 - RNA, 15 nt, Variola virus
aguaaguaugucgaa

SEQ ID NO: 3285888 - RNA, 22 nt, Variola virus
gauaucaacauggaguauauca

SEQ ID NO: 3285889 - RNA, 16 nt, Variola virus
gacuaugggaauauau

SEQ ID NO: 3285890 - RNA, 15 nt, Variola virus
ccgucuuuaucucuu

SEQ ID NO: 3285891 - RNA, 19 nt, Variola virus
uauuuuucuaauacuauau

SEQ ID NO: 3285892 - RNA, 14 nt, Variola virus
uauggcuucuccag

SEQ ID NO: 3285893 - RNA, 22 nt, Variola virus
cguagaaaguaucuuauauaca

SEQ ID NO: 3285894 - RNA, 13 nt, Variola virus
ucuuaauaucaga

SEQ ID NO: 3285895 - RNA, 17 nt, Variola virus
gcucuuucgaugauaau

SEQ ID NO: 3285896 - RNA, 18 nt, Variola virus
ucuauuagauguguauaa

SEQ ID NO: 3285897 - RNA, 19 nt, Variola virus
aguugucuauauuaacucu

SEQ ID NO: 3285898 - RNA, 19 nt, Variola virus
cucuuugacauauuuugag

SEQ ID NO: 3285899 - RNA, 14 nt, Variola virus
uaggagaauuauuu

SEQ ID NO: 3285900 - RNA, 21 nt, Variola virus
auccguuaguuuaauauccuu

SEQ ID NO: 3285901 - RNA, 20 nt, Variola virus
ucgcugaucgucuagaugau

SEQ ID NO: 3285902 - RNA, 17 nt, Variola virus
auaauauuaucaugaau

SEQ ID NO: 3285903 - RNA, 20 nt, Variola virus
auuagccgaacauauagcug

SEQ ID NO: 3285904 - RNA, 16 nt, Variola virus
uauucagauuaucaug

SEQ ID NO: 3285905 - RNA, 14 nt, Variola virus
acuauguuagcauu

SEQ ID NO: 3285906 - RNA, 18 nt, Variola virus
uaauauauugaucauaau

SEQ ID NO: 3285907 - RNA, 12 nt, Variola virus
aaggcagaaaua

SEQ ID NO: 3285908 - RNA, 15 nt, Variola virus
cuaauuaaaaguuuu

SEQ ID NO: 3285909 - RNA, 16 nt, Variola virus
ucauacaugauauuca

SEQ ID NO: 3285910 - RNA, 14 nt, Variola virus
aggaacauaaacaa

SEQ ID NO: 3285911 - RNA, 20 nt, Variola virus
auuuauuaaugcuuuaguga

SEQ ID NO: 3285912 - RNA, 16 nt, Variola virus
guguaauguaaucaua

SEQ ID NO: 3285913 - RNA, 18 nt, Variola virus
gacauggcuucuuccaua

SEQ ID NO: 3285914 - RNA, 16 nt, Variola virus
uaaacaugaauuuauu

SEQ ID NO: 3285915 - RNA, 18 nt, Variola virus
uucccaucauuucucaau

SEQ ID NO: 3285916 - RNA, 13 nt, Variola virus
uauggaacucaug

SEQ ID NO: 3285917 - RNA, 14 nt, Variola virus
agauacaaauaugu

SEQ ID NO: 3285918 - RNA, 12 nt, Variola virus
cuaaauccucau

SEQ ID NO: 3285919 - RNA, 18 nt, Variola virus
ucuaguuaucauguagua

SEQ ID NO: 3285920 - RNA, 13 nt, Variola virus
gauauuugcuaau

SEQ ID NO: 3285921 - RNA, 13 nt, Variola virus
uacaguucuuggc

SEQ ID NO: 3285922 - RNA, 18 nt, Variola virus
uaacugacuuaauaguag

SEQ ID NO: 3285923 - RNA, 14 nt, Variola virus
uccauaaacugaua

SEQ ID NO: 3285924 - RNA, 14 nt, Variola virus
guacccaaguuauu

SEQ ID NO: 3285925 - RNA, 13 nt, Variola virus
aggauaaaguaaa

SEQ ID NO: 3285926 - RNA, 23 nt, Variola virus
aacucuacauaaucauaaccauu

SEQ ID NO: 3285927 - RNA, 23 nt, Variola virus
caaacaucacucuucgaaaagaa

SEQ ID NO: 3285928 - RNA, 23 nt, Variola virus
uuaacaaaugguucaaagacuag

SEQ ID NO: 3285929 - RNA, 16 nt, Variola virus
agauuauucuuaaaug

SEQ ID NO: 3285930 - RNA, 20 nt, Variola virus
gaucuauagaaaacuacagg

SEQ ID NO: 3285931 - RNA, 13 nt, Variola virus
gcuaaauuuucau

SEQ ID NO: 3285932 - RNA, 18 nt, Variola virus
augaaguaguugcauaga

SEQ ID NO: 3285933 - RNA, 20 nt, Variola virus
ugaucauuggcaaaauccua

SEQ ID NO: 3285934 - RNA, 20 nt, Variola virus
auaguauacgcagaaaagau

SEQ ID NO: 3285935 - RNA, 21 nt, Variola virus
uuccacaauacgagucauuau

SEQ ID NO: 3285936 - RNA, 17 nt, Variola virus
aucucauucaaauccau

SEQ ID NO: 3285937 - RNA, 21 nt, Variola virus
uccaucauuguccuauuucaa

SEQ ID NO: 3285938 - RNA, 19 nt, Variola virus
aauaacuauguuuuaaaaa

SEQ ID NO: 3285939 - RNA, 16 nt, Variola virus
aacguacaaauggaua

SEQ ID NO: 3285940 - RNA, 19 nt, Variola virus
gucaauggaccccaacauc

SEQ ID NO: 3285941 - RNA, 19 nt, Variola virus
guuagaguaucuacaucag

SEQ ID NO: 3285942 - RNA, 14 nt, Variola virus
aucuagacauagau

SEQ ID NO: 3285943 - RNA, 19 nt, Variola virus
augcaucuauauaaucuuu

SEQ ID NO: 3285944 - RNA, 12 nt, Variola virus
uaaacuuuaaug

SEQ ID NO: 3285945 - RNA, 22 nt, Variola virus
ucacaaguaugaagaaaaaugu

SEQ ID NO: 3285946 - RNA, 16 nt, Variola virus
uggauccuaacaauga

SEQ ID NO: 3285947 - RNA, 15 nt, Variola virus
cuaaguuucuuuccu

SEQ ID NO: 3285948 - RNA, 21 nt, Variola virus
cggaauaaguguuuucucaau

SEQ ID NO: 3285949 - RNA, 14 nt, Variola virus
ugcaugacgugaua

SEQ ID NO: 3285950 - RNA, 18 nt, Variola virus
uauacaaguguagaugau

SEQ ID NO: 3285951 - RNA, 15 nt, Variola virus
cucuguuucuguauc

SEQ ID NO: 3285952 - RNA, 17 nt, Variola virus
cuuaauucuagcaucuu

SEQ ID NO: 3285953 - RNA, 18 nt, Variola virus
uaaacaguuuaauagucu

SEQ ID NO: 3285954 - RNA, 12 nt, Variola virus
cuuacaauaaac

SEQ ID NO: 3285955 - RNA, 18 nt, Variola virus
gaauaucaggaaauguau

SEQ ID NO: 3285956 - RNA, 21 nt, Variola virus
aaaaagauuaccguaugauau

SEQ ID NO: 3285957 - RNA, 19 nt, Variola virus
acauuauuaaaucaugaag

SEQ ID NO: 3285958 - RNA, 16 nt, Variola virus
uugcaaaauaugcucu

SEQ ID NO: 3285959 - RNA, 17 nt, Variola virus
aaaaaugauagaaauau

SEQ ID NO: 3285960 - RNA, 17 nt, Variola virus
uaauucagauacuacag

SEQ ID NO: 3285961 - RNA, 21 nt, Variola virus
ucaaaugccacaucaaagaua

SEQ ID NO: 3285962 - RNA, 13 nt, Variola virus
auuuguucuugua

SEQ ID NO: 3285963 - RNA, 14 nt, Variola virus
uaauauuagaauau

SEQ ID NO: 3285964 - RNA, 14 nt, Variola virus
aaccuagaaaauau

SEQ ID NO: 3285965 - RNA, 15 nt, Variola virus
aaaaguuaagaauua

SEQ ID NO: 3285966 - RNA, 17 nt, Variola virus
acacgagccuuuauuau

SEQ ID NO: 3285967 - RNA, 17 nt, Variola virus
uauaauccgauauauga

SEQ ID NO: 3285968 - RNA, 17 nt, Variola virus
uauacguuauugucaaa

SEQ ID NO: 3285969 - RNA, 18 nt, Variola virus
auguagagguaaaaagac

SEQ ID NO: 3285970 - RNA, 15 nt, Variola virus
uaacuguuaucucuu

SEQ ID NO: 3285971 - RNA, 14 nt, Variola virus
uaugacuaaaucua

SEQ ID NO: 3285972 - RNA, 19 nt, Variola virus
ugauaucauuaauacagua

SEQ ID NO: 3285973 - RNA, 14 nt, Variola virus
gaauugacaaauaa

SEQ ID NO: 3285974 - RNA, 15 nt, Variola virus
cugauacgucauuaa

SEQ ID NO: 3285975 - RNA, 18 nt, Variola virus
uuaaaauucacacauuuu

SEQ ID NO: 3285976 - RNA, 20 nt, Variola virus
aguguuaauuuuaaaugaug

SEQ ID NO: 3285977 - RNA, 17 nt, Variola virus
ucuaccuauuucaucag

SEQ ID NO: 3285978 - RNA, 17 nt, Variola virus
gugcagaagcucuggcu

SEQ ID NO: 3285979 - RNA, 18 nt, Variola virus
aaaacauggauuugguaa

SEQ ID NO: 3285980 - RNA, 23 nt, Variola virus
uauuaacacuaaaaaauaaacac

SEQ ID NO: 3285981 - RNA, 14 nt, Variola virus
agggguauacuucu

SEQ ID NO: 3285982 - RNA, 15 nt, Variola virus
guucagaauauguua

SEQ ID NO: 3285983 - RNA, 19 nt, Variola virus
uguuaccauaauaccuuuu

SEQ ID NO: 3285984 - RNA, 13 nt, Variola virus
cuauuaaaacuaa

SEQ ID NO: 3285985 - RNA, 17 nt, Variola virus
cugguagccguuucaau

SEQ ID NO: 3285986 - RNA, 12 nt, Variola virus
aauucuagcauc

SEQ ID NO: 3285987 - RNA, 14 nt, Variola virus
auauaucaaaauua

SEQ ID NO: 3285988 - RNA, 15 nt, Variola virus
ucuauuuaauacuuu

SEQ ID NO: 3285989 - RNA, 21 nt, Variola virus
aaacuuucuagaacauacuga

SEQ ID NO: 3285990 - RNA, 17 nt, Variola virus
ucauccagaucauuaag

SEQ ID NO: 3285991 - RNA, 14 nt, Variola virus
ucugaaaauguaua

SEQ ID NO: 3285992 - RNA, 16 nt, Variola virus
ugggaggcuugaagug

SEQ ID NO: 3285993 - RNA, 14 nt, Variola virus
agaaaguaugauau

SEQ ID NO: 3285994 - RNA, 16 nt, Variola virus
acaucucgcaauaauc

SEQ ID NO: 3285995 - RNA, 20 nt, Variola virus
ucaaucauccuaaagaguau

SEQ ID NO: 3285996 - RNA, 19 nt, Variola virus
uguuugcugcguguauaac

SEQ ID NO: 3285997 - RNA, 19 nt, Variola virus
uuagucauacguaaugaag

SEQ ID NO: 3285998 - RNA, 19 nt, Variola virus
aucucguccuugguuuaca

SEQ ID NO: 3285999 - RNA, 17 nt, Variola virus
guaaucauguaaauguu

SEQ ID NO: 3286000 - RNA, 21 nt, Variola virus
uguauuuggaucuuuuguaca

SEQ ID NO: 3286001 - RNA, 23 nt, Variola virus
caucgauugugauuguauuuccu

SEQ ID NO: 3286002 - RNA, 17 nt, Variola virus
gcaggcaaauguuuaua

SEQ ID NO: 3286003 - RNA, 21 nt, Variola virus
auaagacuuuacucuucuaaa

SEQ ID NO: 3286004 - RNA, 16 nt, Variola virus
aaaacagauaaugaua

SEQ ID NO: 3286005 - RNA, 17 nt, Variola virus
cauuuauuauauauaau

SEQ ID NO: 3286006 - RNA, 20 nt, Variola virus
uugguauaaauguuguaauu

SEQ ID NO: 3286007 - RNA, 15 nt, Variola virus
cugcguuaaacauuc

SEQ ID NO: 3286008 - RNA, 23 nt, Variola virus
cugagauuuguuuuguuaaacaa

SEQ ID NO: 3286009 - RNA, 21 nt, Variola virus
agucuuauauguagcaaacau

SEQ ID NO: 3286010 - RNA, 16 nt, Variola virus
ccaacggaaaugguag

SEQ ID NO: 3286011 - RNA, 17 nt, Variola virus
auaugccuccagaaguu

SEQ ID NO: 3286012 - RNA, 21 nt, Variola virus
auuaauacaggaucuagcaaa

SEQ ID NO: 3286013 - RNA, 12 nt, Variola virus
uuuguacauuuu

SEQ ID NO: 3286014 - RNA, 23 nt, Variola virus
cacaugucacacaggauccauuu

SEQ ID NO: 3286015 - RNA, 21 nt, Variola virus
uaauauaaaaacuuauuacau

SEQ ID NO: 3286016 - RNA, 15 nt, Variola virus
acaaaccuaagacaa

SEQ ID NO: 3286017 - RNA, 15 nt, Variola virus
uguacauacaucacu

SEQ ID NO: 3286018 - RNA, 22 nt, Variola virus
auaaagacguggcaaacaaugu

SEQ ID NO: 3286019 - RNA, 14 nt, Variola virus
aacuuaaacaaaau

SEQ ID NO: 3286020 - RNA, 13 nt, Variola virus
aacauaugauauu

SEQ ID NO: 3286021 - RNA, 23 nt, Variola virus
uaaacggcaaaccaaaaacauuu

SEQ ID NO: 3286022 - RNA, 17 nt, Variola virus
aucucagugcaaagauu

SEQ ID NO: 3286023 - RNA, 21 nt, Variola virus
auucuggcuauuucaaaauaa

SEQ ID NO: 3286024 - RNA, 11 nt, Variola virus
uuuauuucuaa

SEQ ID NO: 3286025 - RNA, 19 nt, Variola virus
ugacuaguccaaagacuua

SEQ ID NO: 3286026 - RNA, 18 nt, Variola virus
auuccugacugauuaaca

SEQ ID NO: 3286027 - RNA, 22 nt, Variola virus
uaaauguuuaaacaucaaacau

SEQ ID NO: 3286028 - RNA, 11 nt, Variola virus
guuaaauuaau

SEQ ID NO: 3286029 - RNA, 20 nt, Variola virus
acuacauuaaaacuuaaaaa

SEQ ID NO: 3286030 - RNA, 15 nt, Variola virus
acaaaaucuaaacaa

SEQ ID NO: 3286031 - RNA, 18 nt, Variola virus
uguaaaaguaaaaaagaa

SEQ ID NO: 3286032 - RNA, 21 nt, Variola virus
ggaauuaaucuaguagaaaag

SEQ ID NO: 3286033 - RNA, 15 nt, Variola virus
uccuauacucugaaa

SEQ ID NO: 3286034 - RNA, 16 nt, Variola virus
aauauuucuauuucua

SEQ ID NO: 3286035 - RNA, 20 nt, Variola virus
ugauccaucugcucaacaau

SEQ ID NO: 3286036 - RNA, 14 nt, Variola virus
caugaugagauguu

SEQ ID NO: 3286037 - RNA, 14 nt, Variola virus
ccaaauguuggaaa

SEQ ID NO: 3286038 - RNA, 17 nt, Variola virus
acuguacgauacauaau

SEQ ID NO: 3286039 - RNA, 19 nt, Variola virus
gauguauauaggucagaua

SEQ ID NO: 3286040 - RNA, 12 nt, Variola virus
auugacaaaauu

SEQ ID NO: 3286041 - RNA, 23 nt, Variola virus
uaucucgcauccauauguuugga

SEQ ID NO: 3286042 - RNA, 14 nt, Variola virus
ugaaccaaacauuc

SEQ ID NO: 3286043 - RNA, 20 nt, Variola virus
aauaguuagauacaaagaua

SEQ ID NO: 3286044 - RNA, 16 nt, Variola virus
uaaaaaguuuaauuug

SEQ ID NO: 3286045 - RNA, 22 nt, Variola virus
gaguaguaaaugcguacauaac

SEQ ID NO: 3286046 - RNA, 22 nt, Variola virus
cauuuaucgcuaacaugcauuu

SEQ ID NO: 3286047 - RNA, 17 nt, Variola virus
gccauaucauacaugau

SEQ ID NO: 3286048 - RNA, 15 nt, Variola virus
ugccaucuuacauga

SEQ ID NO: 3286049 - RNA, 20 nt, Variola virus
gauucauccuuaaauguuuu

SEQ ID NO: 3286050 - RNA, 20 nt, Variola virus
aaauuauuccuaauuaagaa

SEQ ID NO: 3286051 - RNA, 14 nt, Variola virus
augguaaaggauaa

SEQ ID NO: 3286052 - RNA, 18 nt, Variola virus
acuccagaacaucuucca

SEQ ID NO: 3286053 - RNA, 22 nt, Variola virus
uacguuugauucguucaaaaau

SEQ ID NO: 3286054 - RNA, 13 nt, Variola virus
gaaaacauaucua

SEQ ID NO: 3286055 - RNA, 21 nt, Variola virus
ucauuaucgguguauuuucca

SEQ ID NO: 3286056 - RNA, 15 nt, Variola virus
cuaauuuuuguaaau

SEQ ID NO: 3286057 - RNA, 19 nt, Variola virus
acaauaacuacauauucua

SEQ ID NO: 3286058 - RNA, 16 nt, Variola virus
ucuuccauuuaaauau

SEQ ID NO: 3286059 - RNA, 14 nt, Variola virus
ucaaaauauuucaa

SEQ ID NO: 3286060 - RNA, 16 nt, Variola virus
auaagaagagaaaagu

SEQ ID NO: 3286061 - RNA, 16 nt, Variola virus
aucacauaugcaaaga

SEQ ID NO: 3286062 - RNA, 21 nt, Variola virus
cauaaaauaacucuguagacg

SEQ ID NO: 3286063 - RNA, 18 nt, Variola virus
uuagaucucauaugugcu

SEQ ID NO: 3286064 - RNA, 18 nt, Variola virus
aaauaguaucaucuauca

SEQ ID NO: 3286065 - RNA, 17 nt, Variola virus
auuuuaaguuuauugac

SEQ ID NO: 3286066 - RNA, 14 nt, Variola virus
uaaaaaaaugauug

SEQ ID NO: 3286067 - RNA, 20 nt, Variola virus
aauggacuccaauacgaaau

SEQ ID NO: 3286068 - RNA, 18 nt, Variola virus
ucgaaugccauagaauaa

SEQ ID NO: 3286069 - RNA, 19 nt, Variola virus
auauaggaccacuagcaaa

SEQ ID NO: 3286070 - RNA, 17 nt, Variola virus
aacaaauguuggagaaa

SEQ ID NO: 3286071 - RNA, 21 nt, Variola virus
ugaaauagcguucgucaacau

SEQ ID NO: 3286072 - RNA, 15 nt, Variola virus
uaaucaaaauugucu

SEQ ID NO: 3286073 - RNA, 22 nt, Variola virus
ucuggaaaaacaacacaaugua

SEQ ID NO: 3286074 - RNA, 17 nt, Variola virus
uaaucggagaauguuuc

SEQ ID NO: 3286075 - RNA, 15 nt, Variola virus
uacaaaauauguucg

SEQ ID NO: 3286076 - RNA, 15 nt, Variola virus
agucaagaugaugaa

SEQ ID NO: 3286077 - RNA, 18 nt, Variola virus
acgucauaaaaauguuua

SEQ ID NO: 3286078 - RNA, 17 nt, Variola virus
augaccaguuugcaaua

SEQ ID NO: 3286079 - RNA, 19 nt, Variola virus
uauauuucgugauauacau

SEQ ID NO: 3286080 - RNA, 12 nt, Variola virus
cuuugacaaaug

SEQ ID NO: 3286081 - RNA, 14 nt, Variola virus
auucuuaucaauaa

SEQ ID NO: 3286082 - RNA, 21 nt, Variola virus
cagauaauaaccuccugaaaa

SEQ ID NO: 3286083 - RNA, 23 nt, Variola virus
uucuuacaguacauaguauugac

SEQ ID NO: 3286084 - RNA, 18 nt, Variola virus
aaucacucaauaucuaga

SEQ ID NO: 3286085 - RNA, 19 nt, Variola virus
agauuucagaaucuagauu

SEQ ID NO: 3286086 - RNA, 16 nt, Variola virus
uguacuuaacaugauu

SEQ ID NO: 3286087 - RNA, 12 nt, Variola virus
aaagcauauucc

SEQ ID NO: 3286088 - RNA, 17 nt, Variola virus
uauauccuuauuaacuu

SEQ ID NO: 3286089 - RNA, 20 nt, Variola virus
uauaaccaccgauaaaucua

SEQ ID NO: 3286090 - RNA, 19 nt, Variola virus
aauacuauuacagaaguuu

SEQ ID NO: 3286091 - RNA, 16 nt, Variola virus
gcuguacuaaauucaa

SEQ ID NO: 3286092 - RNA, 17 nt, Variola virus
gaaagaaaguaugauau

SEQ ID NO: 3286093 - RNA, 17 nt, Variola virus
uucaguuucucaucuuu

SEQ ID NO: 3286094 - RNA, 15 nt, Variola virus
uuauaaucaaagauu

SEQ ID NO: 3286095 - RNA, 19 nt, Variola virus
ucuaauugaccgucucuaa

SEQ ID NO: 3286096 - RNA, 15 nt, Variola virus
uauaauaucuuugaa

SEQ ID NO: 3286097 - RNA, 14 nt, Variola virus
gaaucauacaauga

SEQ ID NO: 3286098 - RNA, 18 nt, Variola virus
guaauuuuuuuuuccaaa

SEQ ID NO: 3286099 - RNA, 18 nt, Variola virus
guagcuaaguauacgauc

SEQ ID NO: 3286100 - RNA, 18 nt, Variola virus
uuuaaguauauacgauaa

SEQ ID NO: 3286101 - RNA, 18 nt, Variola virus
uaaaggaccuaauccauu

SEQ ID NO: 3286102 - RNA, 16 nt, Variola virus
uacguugauuucuagc

SEQ ID NO: 3286103 - RNA, 16 nt, Variola virus
auaacaacucaaacau

SEQ ID NO: 3286104 - RNA, 12 nt, Variola virus
caaaauuacaau

SEQ ID NO: 3286105 - RNA, 15 nt, Variola virus
auggcacgaaauauc

SEQ ID NO: 3286106 - RNA, 16 nt, Variola virus
cauaguaaauucuguu

SEQ ID NO: 3286107 - RNA, 20 nt, Variola virus
uauuaucaaaauuuggaaac

SEQ ID NO: 3286108 - RNA, 21 nt, Variola virus
uugacuacauucaggaaacua

SEQ ID NO: 3286109 - RNA, 14 nt, Variola virus
acuuguauaauaag

SEQ ID NO: 3286110 - RNA, 15 nt, Variola virus
aacuuugauuauccu

SEQ ID NO: 3286111 - RNA, 21 nt, Variola virus
agacaaauggucaaugauaug

SEQ ID NO: 3286112 - RNA, 22 nt, Variola virus
auuuuauaacguuaguuaauaa

SEQ ID NO: 3286113 - RNA, 22 nt, Variola virus
cuaguccaaagacuuacaggaa

SEQ ID NO: 3286114 - RNA, 19 nt, Variola virus
ucguauuggauucugaaau

SEQ ID NO: 3286115 - RNA, 23 nt, Variola virus
gacauucccacaguguugccauu

SEQ ID NO: 3286116 - RNA, 22 nt, Variola virus
aaauguauguguugaacaucag

SEQ ID NO: 3286117 - RNA, 16 nt, Variola virus
aaauuuuuaauccaaa

SEQ ID NO: 3286118 - RNA, 18 nt, Variola virus
auuggaaaucauuaacgg

SEQ ID NO: 3286119 - RNA, 19 nt, Variola virus
gucggcauaggugccacca

SEQ ID NO: 3286120 - RNA, 14 nt, Variola virus
gcuugauauuaaag

SEQ ID NO: 3286121 - RNA, 15 nt, Variola virus
acaaaucuauuugga

SEQ ID NO: 3286122 - RNA, 13 nt, Variola virus
cacagucaucaag

SEQ ID NO: 3286123 - RNA, 13 nt, Variola virus
acugauucagaaa

SEQ ID NO: 3286124 - RNA, 15 nt, Variola virus
aacgaauaaacaauu

SEQ ID NO: 3286125 - RNA, 14 nt, Variola virus
acgacgagaaucuu

SEQ ID NO: 3286126 - RNA, 14 nt, Variola virus
auguauacauuuau

SEQ ID NO: 3286127 - RNA, 13 nt, Variola virus
acaauaaauggau

SEQ ID NO: 3286128 - RNA, 16 nt, Variola virus
aacucuuuaaacgaua

SEQ ID NO: 3286129 - RNA, 17 nt, Variola virus
uaguguuuacauaaaug

SEQ ID NO: 3286130 - RNA, 19 nt, Variola virus
acccaaagagaccaaugaa

SEQ ID NO: 3286131 - RNA, 17 nt, Variola virus
uccaucagaauguuucc

SEQ ID NO: 3286132 - RNA, 21 nt, Variola virus
gcuucaauuacaauagauauc

SEQ ID NO: 3286133 - RNA, 17 nt, Variola virus
uauauccuuuagaguau

SEQ ID NO: 3286134 - RNA, 13 nt, Variola virus
agauauguaugug

SEQ ID NO: 3286135 - RNA, 23 nt, Variola virus
auguaauaauugcucaaauaaua

SEQ ID NO: 3286136 - RNA, 15 nt, Variola virus
cuaaaaaaaauaacu

SEQ ID NO: 3286137 - RNA, 11 nt, Variola virus
ggaauugauuu

SEQ ID NO: 3286138 - RNA, 16 nt, Variola virus
cucagugcaaagauua

SEQ ID NO: 3286139 - RNA, 16 nt, Variola virus
cuuuuguauucauaga

SEQ ID NO: 3286140 - RNA, 14 nt, Variola virus
ucgaauaaugagua

SEQ ID NO: 3286141 - RNA, 20 nt, Variola virus
gacacauucuuuagaacuuc

SEQ ID NO: 3286142 - RNA, 19 nt, Variola virus
cuaauacaucucuggaaau

SEQ ID NO: 3286143 - RNA, 22 nt, Variola virus
gaacacgauuauuauaaaauaa

SEQ ID NO: 3286144 - RNA, 17 nt, Variola virus
cgaugugucuacauaaa

SEQ ID NO: 3286145 - RNA, 12 nt, Variola virus
uagcuaauauua

SEQ ID NO: 3286146 - RNA, 20 nt, Variola virus
ggaaguagaaucauaaagaa

SEQ ID NO: 3286147 - RNA, 17 nt, Variola virus
caaggaacuaaauagau

SEQ ID NO: 3286148 - RNA, 23 nt, Variola virus
uagcauuucuaccaaccaagaau

SEQ ID NO: 3286149 - RNA, 16 nt, Variola virus
cucauuaaacagcauu

SEQ ID NO: 3286150 - RNA, 18 nt, Variola virus
aaaauccaucaaaaaugu

SEQ ID NO: 3286151 - RNA, 16 nt, Variola virus
gaugucuugacuaccu

SEQ ID NO: 3286152 - RNA, 24 nt, Variola virus
aaauccaaauugcgacacuauuca

SEQ ID NO: 3286153 - RNA, 17 nt, Variola virus
ccaaacuguaaauguag

SEQ ID NO: 3286154 - RNA, 15 nt, Variola virus
gaauacauggaagaa

SEQ ID NO: 3286155 - RNA, 14 nt, Variola virus
uugcucguaaaaga

SEQ ID NO: 3286156 - RNA, 21 nt, Variola virus
accauccuuuaaaaaaaauga

SEQ ID NO: 3286157 - RNA, 17 nt, Variola virus
cgaucauauuauuuuua

SEQ ID NO: 3286158 - RNA, 16 nt, Variola virus
auacaaacuguuguua

SEQ ID NO: 3286159 - RNA, 22 nt, Variola virus
agacauuagaccguuuaauaga

SEQ ID NO: 3286160 - RNA, 22 nt, Variola virus
ccaugucugaaacgagacgcua

SEQ ID NO: 3286161 - RNA, 17 nt, Variola virus
uuccacagacucauuau

SEQ ID NO: 3286162 - RNA, 13 nt, Variola virus
auacuauaucuuc

SEQ ID NO: 3286163 - RNA, 21 nt, Variola virus
uagaaacgauaccaucuucug

SEQ ID NO: 3286164 - RNA, 13 nt, Variola virus
uguaauuaaauuu

SEQ ID NO: 3286165 - RNA, 14 nt, Variola virus
aagcguagaaguug

SEQ ID NO: 3286166 - RNA, 19 nt, Variola virus
ugaaccguaauauaucuag

SEQ ID NO: 3286167 - RNA, 11 nt, Variola virus
uuccaaacauu

SEQ ID NO: 3286168 - RNA, 13 nt, Variola virus
uaauaguaggaac

SEQ ID NO: 3286169 - RNA, 21 nt, Variola virus
aucuuuuuguuggaaaaauga

SEQ ID NO: 3286170 - RNA, 12 nt, Variola virus
caaaaauauauu

SEQ ID NO: 3286171 - RNA, 23 nt, Variola virus
uauuaauccuuuuuucuugagau

SEQ ID NO: 3286172 - RNA, 20 nt, Variola virus
aaacuaacauuguuaauuga

SEQ ID NO: 3286173 - RNA, 18 nt, Variola virus
uuacuaacgugauuauua

SEQ ID NO: 3286174 - RNA, 16 nt, Variola virus
gaaaaccgauaacgau

SEQ ID NO: 3286175 - RNA, 17 nt, Variola virus
ucaaucacuacaucuuu

SEQ ID NO: 3286176 - RNA, 21 nt, Variola virus
agacgauccacaaucaaaaaa

SEQ ID NO: 3286177 - RNA, 22 nt, Variola virus
cgggucaaacaauuuuaacaga

SEQ ID NO: 3286178 - RNA, 19 nt, Variola virus
auuuauucaucaucaaaag

SEQ ID NO: 3286179 - RNA, 17 nt, Variola virus
aggauacuuuaugaaug

SEQ ID NO: 3286180 - RNA, 13 nt, Variola virus
ccauauauguuuu

SEQ ID NO: 3286181 - RNA, 16 nt, Variola virus
uauuucuaauaacacu

SEQ ID NO: 3286182 - RNA, 13 nt, Variola virus
uuaccagauaucu

SEQ ID NO: 3286183 - RNA, 23 nt, Variola virus
augucuuaaaguuauuaauuaau

SEQ ID NO: 3286184 - RNA, 20 nt, Variola virus
aacaauaguuauuacuuuuc

SEQ ID NO: 3286185 - RNA, 20 nt, Variola virus
acugaagaacuaaaagugac

SEQ ID NO: 3286186 - RNA, 17 nt, Variola virus
uuaugauagaaauuagc

SEQ ID NO: 3286187 - RNA, 21 nt, Variola virus
gaaauauaugagauguaguua

SEQ ID NO: 3286188 - RNA, 16 nt, Variola virus
uuagucuguacaaaag

SEQ ID NO: 3286189 - RNA, 18 nt, Variola virus
aaucuagaaauuacauaa

SEQ ID NO: 3286190 - RNA, 17 nt, Variola virus
ggaaaguucaaaaaguc

SEQ ID NO: 3286191 - RNA, 17 nt, Variola virus
cagaugcuguaaauuau

SEQ ID NO: 3286192 - RNA, 12 nt, Variola virus
aucaaacaaacu

SEQ ID NO: 3286193 - RNA, 15 nt, Variola virus
cuagucauauguuua

SEQ ID NO: 3286194 - RNA, 15 nt, Variola virus
uuaauuuuuuaaauu

SEQ ID NO: 3286195 - RNA, 17 nt, Variola virus
aauauccauuuuacauu

SEQ ID NO: 3286196 - RNA, 20 nt, Variola virus
uuacaauauauguaaucauu

SEQ ID NO: 3286197 - RNA, 13 nt, Variola virus
ggaguuagaaaac

SEQ ID NO: 3286198 - RNA, 18 nt, Variola virus
guauuaccguuaacuaca

SEQ ID NO: 3286199 - RNA, 13 nt, Variola virus
acaugguuaaagu

SEQ ID NO: 3286200 - RNA, 21 nt, Variola virus
cauaaucaucacugucaucag

SEQ ID NO: 3286201 - RNA, 15 nt, Variola virus
uugacaucuauauau

SEQ ID NO: 3286202 - RNA, 14 nt, Variola virus
gguaaguucauuau

SEQ ID NO: 3286203 - RNA, 15 nt, Variola virus
guuaaugaacaaauc

SEQ ID NO: 3286204 - RNA, 19 nt, Variola virus
cauauaagaaacuauaaag

SEQ ID NO: 3286205 - RNA, 18 nt, Variola virus
agaucuaaggaugaugag

SEQ ID NO: 3286206 - RNA, 16 nt, Variola virus
uuaaaucguuguucua

SEQ ID NO: 3286207 - RNA, 13 nt, Variola virus
uuauaaauagaug

SEQ ID NO: 3286208 - RNA, 18 nt, Variola virus
acaaauggauguuaaugu

SEQ ID NO: 3286209 - RNA, 22 nt, Variola virus
auggauaucuucagggaaaucg

SEQ ID NO: 3286210 - RNA, 22 nt, Variola virus
auauuuggcuaaauuauauaau

SEQ ID NO: 3286211 - RNA, 18 nt, Variola virus
gcuaaaucguauauguua

SEQ ID NO: 3286212 - RNA, 24 nt, Variola virus
accuuuuccuuaucuucauaaaau

SEQ ID NO: 3286213 - RNA, 15 nt, Variola virus
uucccaaauaguuuu

SEQ ID NO: 3286214 - RNA, 15 nt, Variola virus
auauuacaaauacuu

SEQ ID NO: 3286215 - RNA, 18 nt, Variola virus
caucaaccgucacauaau

SEQ ID NO: 3286216 - RNA, 20 nt, Variola virus
cauaguuuguaucaauaaua

SEQ ID NO: 3286217 - RNA, 17 nt, Variola virus
aacauccauuucuagaa

SEQ ID NO: 3286218 - RNA, 17 nt, Variola virus
ucuaaaaacaauacagu

SEQ ID NO: 3286219 - RNA, 12 nt, Variola virus
gacaauaaucuc

SEQ ID NO: 3286220 - RNA, 14 nt, Variola virus
acuugauaaaaaug

SEQ ID NO: 3286221 - RNA, 21 nt, Variola virus
acuuauuaaguucuuuuucca

SEQ ID NO: 3286222 - RNA, 18 nt, Variola virus
auagugaaacaaaauaua

SEQ ID NO: 3286223 - RNA, 19 nt, Variola virus
ugauccaaauucuggaaua

SEQ ID NO: 3286224 - RNA, 19 nt, Variola virus
cuacuacacuucuagauau

SEQ ID NO: 3286225 - RNA, 13 nt, Variola virus
agauauuuauccu

SEQ ID NO: 3286226 - RNA, 19 nt, Variola virus
ccauggacucauaaucucu

SEQ ID NO: 3286227 - RNA, 23 nt, Variola virus
aucaacagaggaacgccauauau

SEQ ID NO: 3286228 - RNA, 17 nt, Variola virus
acauaucuaaaugaaua

SEQ ID NO: 3286229 - RNA, 15 nt, Variola virus
augaucauacauuau

SEQ ID NO: 3286230 - RNA, 22 nt, Variola virus
gauaucaaauggauauugccac

SEQ ID NO: 3286231 - RNA, 17 nt, Variola virus
augcaucgguaaauaua

SEQ ID NO: 3286232 - RNA, 21 nt, Variola virus
accuauaacauuaauaucaaa

SEQ ID NO: 3286233 - RNA, 17 nt, Variola virus
uguauuaguuaaauauu

SEQ ID NO: 3286234 - RNA, 14 nt, Variola virus
uaagaaauacauac

SEQ ID NO: 3286235 - RNA, 18 nt, Variola virus
aauuugaguaagaauaag

SEQ ID NO: 3286236 - RNA, 14 nt, Variola virus
ugauauaauacuua

SEQ ID NO: 3286237 - RNA, 17 nt, Variola virus
uguaugucuuauguaua

SEQ ID NO: 3286238 - RNA, 16 nt, Variola virus
uaagaugcaaacauua

SEQ ID NO: 3286239 - RNA, 15 nt, Variola virus
acucuacuaguucca

SEQ ID NO: 3286240 - RNA, 19 nt, Variola virus
cguucuacauaaaacauca

SEQ ID NO: 3286241 - RNA, 13 nt, Variola virus
uugccguaaaucc

SEQ ID NO: 3286242 - RNA, 23 nt, Variola virus
ucguuccaagucauaucuagaau

SEQ ID NO: 3286243 - RNA, 20 nt, Variola virus
ucuuuguugaacguuucaaa

SEQ ID NO: 3286244 - RNA, 16 nt, Variola virus
auaauauuaucuauau

SEQ ID NO: 3286245 - RNA, 19 nt, Variola virus
ucuauaugugagagaauau

SEQ ID NO: 3286246 - RNA, 19 nt, Variola virus
uauuaugucuagcaaugau

SEQ ID NO: 3286247 - RNA, 18 nt, Variola virus
gguucccaauuccaaaga

SEQ ID NO: 3286248 - RNA, 12 nt, Variola virus
gaauauaaucuu

SEQ ID NO: 3286249 - RNA, 21 nt, Variola virus
gaaguuuuguauuguauauac

SEQ ID NO: 3286250 - RNA, 23 nt, Variola virus
caaauaucuuuaugaauuacuuu

SEQ ID NO: 3286251 - RNA, 12 nt, Variola virus
ccauaauucuca

SEQ ID NO: 3286252 - RNA, 13 nt, Variola virus
aacggcuaucacu

SEQ ID NO: 3286253 - RNA, 15 nt, Variola virus
uuugauuucuuaucu

SEQ ID NO: 3286254 - RNA, 13 nt, Variola virus
cuauguaaaugau

SEQ ID NO: 3286255 - RNA, 13 nt, Variola virus
uuaaaaaaauuaa

SEQ ID NO: 3286256 - RNA, 13 nt, Variola virus
aguuaaaaugaua

SEQ ID NO: 3286257 - RNA, 21 nt, Variola virus
uacucagauucaguuucucau

SEQ ID NO: 3286258 - RNA, 14 nt, Variola virus
ucucuaaguuucuu

SEQ ID NO: 3286259 - RNA, 16 nt, Variola virus
gaauauaucuauaauu

SEQ ID NO: 3286260 - RNA, 22 nt, Variola virus
uaggcuuccaaaaauuuuucau

SEQ ID NO: 3286261 - RNA, 16 nt, Variola virus
auguuuccgagaaaua

SEQ ID NO: 3286262 - RNA, 12 nt, Variola virus
uauuaucaagau

SEQ ID NO: 3286263 - RNA, 19 nt, Variola virus
aaaccaauuaacaagaaua

SEQ ID NO: 3286264 - RNA, 14 nt, Variola virus
aguacagaauuuuc

SEQ ID NO: 3286265 - RNA, 19 nt, Variola virus
acguauacauuuaaugaau

SEQ ID NO: 3286266 - RNA, 20 nt, Variola virus
agaaugcucuuaaauaaugu

SEQ ID NO: 3286267 - RNA, 15 nt, Variola virus
acuccauauauguuu

SEQ ID NO: 3286268 - RNA, 21 nt, Variola virus
uucauuaaaaacaaacuuuuu

SEQ ID NO: 3286269 - RNA, 17 nt, Variola virus
cagagccaucuguaaaa

SEQ ID NO: 3286270 - RNA, 18 nt, Variola virus
aauauaaugauauacaau

SEQ ID NO: 3286271 - RNA, 22 nt, Variola virus
uaacaguaucauuuaaacauuu

SEQ ID NO: 3286272 - RNA, 15 nt, Variola virus
uugaaaacuauuucu

SEQ ID NO: 3286273 - RNA, 16 nt, Variola virus
uucuacuccuuucuua

SEQ ID NO: 3286274 - RNA, 17 nt, Variola virus
auugauuauuucaaaga

SEQ ID NO: 3286275 - RNA, 23 nt, Variola virus
acuagauaaacuaucaguaaguu

SEQ ID NO: 3286276 - RNA, 15 nt, Variola virus
agugaccaacucauc

SEQ ID NO: 3286277 - RNA, 15 nt, Variola virus
uggaagguauuucca

SEQ ID NO: 3286278 - RNA, 21 nt, Variola virus
gucuugauauuguuacagcca

SEQ ID NO: 3286279 - RNA, 13 nt, Variola virus
ucguagauuuuaa

SEQ ID NO: 3286280 - RNA, 14 nt, Variola virus
cuaggucuacagaa

SEQ ID NO: 3286281 - RNA, 17 nt, Variola virus
cuaucgaguuuaucaga

SEQ ID NO: 3286282 - RNA, 22 nt, Variola virus
aaauuaauuuaccaucguguau

SEQ ID NO: 3286283 - RNA, 17 nt, Variola virus
aucaaauagcucaauau

SEQ ID NO: 3286284 - RNA, 17 nt, Variola virus
gaaauuagaaaguaaug

SEQ ID NO: 3286285 - RNA, 23 nt, Variola virus
uaauuacgcucuacaaaauguca

SEQ ID NO: 3286286 - RNA, 21 nt, Variola virus
auaugaaaaacaugucucucu

SEQ ID NO: 3286287 - RNA, 19 nt, Variola virus
aagaauaauccagaaugua

SEQ ID NO: 3286288 - RNA, 23 nt, Variola virus
acauguaucgacgguaaauggaa

SEQ ID NO: 3286289 - RNA, 21 nt, Variola virus
aauauacuuuuaauugaacaa

SEQ ID NO: 3286290 - RNA, 13 nt, Variola virus
aaaucaguaacua

SEQ ID NO: 3286291 - RNA, 12 nt, Variola virus
uugcguauacau

SEQ ID NO: 3286292 - RNA, 17 nt, Variola virus
aucguuucuacaaaauc

SEQ ID NO: 3286293 - RNA, 13 nt, Variola virus
gaacgccauaaua

SEQ ID NO: 3286294 - RNA, 21 nt, Variola virus
uaguauccaguuccuuuucua

SEQ ID NO: 3286295 - RNA, 20 nt, Variola virus
acaacaucuauuccaaauau

SEQ ID NO: 3286296 - RNA, 15 nt, Variola virus
aucuguaaaaguugu

SEQ ID NO: 3286297 - RNA, 14 nt, Variola virus
auacuuuaugaaug

SEQ ID NO: 3286298 - RNA, 15 nt, Variola virus
agauaauauuagaca

SEQ ID NO: 3286299 - RNA, 23 nt, Variola virus
ccaaaaauuuuuaaaguauaucu

SEQ ID NO: 3286300 - RNA, 15 nt, Variola virus
ugauugauucuucca

SEQ ID NO: 3286301 - RNA, 14 nt, Variola virus
aaaaacgaugauau

SEQ ID NO: 3286302 - RNA, 14 nt, Variola virus
acccauuacauaua

SEQ ID NO: 3286303 - RNA, 20 nt, Variola virus
gacuaucaacaauuuuguau

SEQ ID NO: 3286304 - RNA, 22 nt, Variola virus
aacuucuagucuagaaauaaua

SEQ ID NO: 3286305 - RNA, 14 nt, Variola virus
auaauaaaguauau

SEQ ID NO: 3286306 - RNA, 22 nt, Variola virus
augauucuccggccacuauuau

SEQ ID NO: 3286307 - RNA, 14 nt, Variola virus
acagaaaagagaau

SEQ ID NO: 3286308 - RNA, 18 nt, Variola virus
agaaacuaauauaguuaa

SEQ ID NO: 3286309 - RNA, 21 nt, Variola virus
aauucuauccaagauacuuau

SEQ ID NO: 3286310 - RNA, 13 nt, Variola virus
auggaguauauau

SEQ ID NO: 3286311 - RNA, 18 nt, Variola virus
uuaucauuuuuuuauuca

SEQ ID NO: 3286312 - RNA, 18 nt, Variola virus
caagaucgauagacacug

SEQ ID NO: 3286313 - RNA, 22 nt, Variola virus
caacguguuagaucgucuauau

SEQ ID NO: 3286314 - RNA, 20 nt, Variola virus
aucuaucagagaccauguau

SEQ ID NO: 3286315 - RNA, 17 nt, Variola virus
auuauugauauucaugg

SEQ ID NO: 3286316 - RNA, 22 nt, Variola virus
auguugggauuauugcaugaua

SEQ ID NO: 3286317 - RNA, 23 nt, Variola virus
uauacugcauggaaucauagaug

SEQ ID NO: 3286318 - RNA, 13 nt, Variola virus
acaguaguuuaac

SEQ ID NO: 3286319 - RNA, 20 nt, Variola virus
ucaacaaucuaauacaaaau

SEQ ID NO: 3286320 - RNA, 22 nt, Variola virus
gaauacucuacagaguugauug

SEQ ID NO: 3286321 - RNA, 15 nt, Variola virus
uaaaauuacuuaaag

SEQ ID NO: 3286322 - RNA, 23 nt, Variola virus
uuacauacuuuguccguaaaaca

SEQ ID NO: 3286323 - RNA, 22 nt, Variola virus
acaaaagguauuacaagaauau

SEQ ID NO: 3286324 - RNA, 21 nt, Variola virus
ucuuuuauacaagaacaauua

SEQ ID NO: 3286325 - RNA, 17 nt, Variola virus
cauugaugacacuagau

SEQ ID NO: 3286326 - RNA, 22 nt, Variola virus
ucguaauuggaaaauuaguguu

SEQ ID NO: 3286327 - RNA, 20 nt, Variola virus
cauagauauaauuaucacau

SEQ ID NO: 3286328 - RNA, 16 nt, Variola virus
cauuaauuaauacaau

SEQ ID NO: 3286329 - RNA, 16 nt, Variola virus
uuuaucaguauguaua

SEQ ID NO: 3286330 - RNA, 14 nt, Variola virus
caauguuagaguau

SEQ ID NO: 3286331 - RNA, 16 nt, Variola virus
auaugaucaaaaagag

SEQ ID NO: 3286332 - RNA, 22 nt, Variola virus
ggauuauuuuuauuauauucag

SEQ ID NO: 3286333 - RNA, 15 nt, Variola virus
uguugacgacauaua

SEQ ID NO: 3286334 - RNA, 19 nt, Variola virus
uaauaaugauucaacaaug

SEQ ID NO: 3286335 - RNA, 21 nt, Variola virus
ucaauauacuauucuugugau

SEQ ID NO: 3286336 - RNA, 12 nt, Variola virus
agaauuuucuag

SEQ ID NO: 3286337 - RNA, 20 nt, Variola virus
gaaagcuguaaugguuuaua

SEQ ID NO: 3286338 - RNA, 13 nt, Variola virus
auugcugcauaug

SEQ ID NO: 3286339 - RNA, 18 nt, Variola virus
gcuaauuuuuguaaauaa

SEQ ID NO: 3286340 - RNA, 20 nt, Variola virus
auaucauuaggauuuaacuc

SEQ ID NO: 3286341 - RNA, 16 nt, Variola virus
auaucuuugguguaaa

SEQ ID NO: 3286342 - RNA, 16 nt, Variola virus
uguuuaccacaaugua

SEQ ID NO: 3286343 - RNA, 20 nt, Variola virus
agaugccaagauaucuauau

SEQ ID NO: 3286344 - RNA, 15 nt, Variola virus
auuagcauccuuaua

SEQ ID NO: 3286345 - RNA, 23 nt, Variola virus
uauaauuaucacauauuaaaauu

SEQ ID NO: 3286346 - RNA, 20 nt, Variola virus
agaauuuauauaaauuauuc

SEQ ID NO: 3286347 - RNA, 15 nt, Variola virus
uauacaauuaaugau

SEQ ID NO: 3286348 - RNA, 13 nt, Variola virus
ucuaucaauaacu

SEQ ID NO: 3286349 - RNA, 18 nt, Variola virus
auuucucucauaaauaca

SEQ ID NO: 3286350 - RNA, 15 nt, Variola virus
auuccaacaaacgaa

SEQ ID NO: 3286351 - RNA, 23 nt, Variola virus
gauuuuuuuaaaaaauagaaaaa

SEQ ID NO: 3286352 - RNA, 14 nt, Variola virus
aucauaaagaacag

SEQ ID NO: 3286353 - RNA, 22 nt, Variola virus
cuuauuaguaacugacuuaaua

SEQ ID NO: 3286354 - RNA, 13 nt, Variola virus
augagauguuauu

SEQ ID NO: 3286355 - RNA, 16 nt, Variola virus
auucuagauacaagau

SEQ ID NO: 3286356 - RNA, 20 nt, Variola virus
acucucuaucucuuaaugag

SEQ ID NO: 3286357 - RNA, 17 nt, Variola virus
uacuggagccauugucu

SEQ ID NO: 3286358 - RNA, 15 nt, Variola virus
ucugcuuucuuuuaa

SEQ ID NO: 3286359 - RNA, 16 nt, Variola virus
cguuaauaacaaaaau

SEQ ID NO: 3286360 - RNA, 23 nt, Variola virus
uuugauauaucaguuaaugcauc

SEQ ID NO: 3286361 - RNA, 13 nt, Variola virus
auaacaaagaaag

SEQ ID NO: 3286362 - RNA, 14 nt, Variola virus
cauuaaauguauuu

SEQ ID NO: 3286363 - RNA, 14 nt, Variola virus
guauacucuauucg

SEQ ID NO: 3286364 - RNA, 16 nt, Variola virus
cauauacguauccaug

SEQ ID NO: 3286365 - RNA, 21 nt, Variola virus
agcauauuccuaaauacaucu

SEQ ID NO: 3286366 - RNA, 21 nt, Variola virus
uggacaacggugagaaugacg

SEQ ID NO: 3286367 - RNA, 18 nt, Variola virus
uucuauaaagucugucaa

SEQ ID NO: 3286368 - RNA, 15 nt, Variola virus
cuaauacuaaauaca

SEQ ID NO: 3286369 - RNA, 15 nt, Variola virus
ugaagaaaguaauua

SEQ ID NO: 3286370 - RNA, 16 nt, Variola virus
ucacaaucacugugag

SEQ ID NO: 3286371 - RNA, 19 nt, Variola virus
aguauaugggcgauauucu

SEQ ID NO: 3286372 - RNA, 16 nt, Variola virus
gcucaaacaaaaugug

SEQ ID NO: 3286373 - RNA, 13 nt, Variola virus
augaauugauucu

SEQ ID NO: 3286374 - RNA, 13 nt, Variola virus
ucaacacuuauau

SEQ ID NO: 3286375 - RNA, 14 nt, Variola virus
auaguuuuggauca

SEQ ID NO: 3286376 - RNA, 19 nt, Variola virus
uacgcauucacucauacau

SEQ ID NO: 3286377 - RNA, 17 nt, Variola virus
agcauuauucuugaauu

SEQ ID NO: 3286378 - RNA, 19 nt, Variola virus
uuccauuguacaaacgaag

SEQ ID NO: 3286379 - RNA, 22 nt, Variola virus
cuugaggagaucuaaacgaucu

SEQ ID NO: 3286380 - RNA, 11 nt, Variola virus
aaacuuuaucu

SEQ ID NO: 3286381 - RNA, 12 nt, Variola virus
uacuaagaaagu

SEQ ID NO: 3286382 - RNA, 15 nt, Variola virus
aucauacaaugaauu

SEQ ID NO: 3286383 - RNA, 12 nt, Variola virus
uuuauucucaaa

SEQ ID NO: 3286384 - RNA, 15 nt, Variola virus
uagaugagaacagaa

SEQ ID NO: 3286385 - RNA, 17 nt, Variola virus
caauuaguuuauuggua

SEQ ID NO: 3286386 - RNA, 18 nt, Variola virus
uaucucagugcaaagauu

SEQ ID NO: 3286387 - RNA, 17 nt, Variola virus
gaaccagauaguuuaua

SEQ ID NO: 3286388 - RNA, 13 nt, Variola virus
aaaauauuuuacu

SEQ ID NO: 3286389 - RNA, 19 nt, Variola virus
uauuucauugacggaugau

SEQ ID NO: 3286390 - RNA, 22 nt, Variola virus
augcuaguuaauaguaaaugaa

SEQ ID NO: 3286391 - RNA, 20 nt, Variola virus
auuucaucuccguaaauaua

SEQ ID NO: 3286392 - RNA, 17 nt, Variola virus
cauuucucaaaugaaua

SEQ ID NO: 3286393 - RNA, 14 nt, Variola virus
uaucaucuauauga

SEQ ID NO: 3286394 - RNA, 18 nt, Variola virus
gucaaugauaugauuuuu

SEQ ID NO: 3286395 - RNA, 23 nt, Variola virus
cuuuuagagguucccaauuccaa

SEQ ID NO: 3286396 - RNA, 12 nt, Variola virus
uauauuuugcau

SEQ ID NO: 3286397 - RNA, 18 nt, Variola virus
cuagacuugauuauucua

SEQ ID NO: 3286398 - RNA, 16 nt, Variola virus
ucgcuaaaaucuucau

SEQ ID NO: 3286399 - RNA, 14 nt, Variola virus
caauuacugucucc

SEQ ID NO: 3286400 - RNA, 11 nt, Variola virus
aauuuagaaaa

SEQ ID NO: 3286401 - RNA, 15 nt, Variola virus
uccaauaaauuauuu

SEQ ID NO: 3286402 - RNA, 19 nt, Variola virus
aaugaugcgcacaaugaua

SEQ ID NO: 3286403 - RNA, 21 nt, Variola virus
cuauaaaauuguauauucaga

SEQ ID NO: 3286404 - RNA, 21 nt, Variola virus
agcauacgccaaauaucucaa

SEQ ID NO: 3286405 - RNA, 19 nt, Variola virus
caauaugccacaccaucuu

SEQ ID NO: 3286406 - RNA, 17 nt, Variola virus
uuaauaaauaucauuaa

SEQ ID NO: 3286407 - RNA, 23 nt, Variola virus
aaacacguuuauuuuauauguca

SEQ ID NO: 3286408 - RNA, 20 nt, Variola virus
cgaaagauuuuauuucacau

SEQ ID NO: 3286409 - RNA, 19 nt, Variola virus
cuuaacaauuccacaaauu

SEQ ID NO: 3286410 - RNA, 18 nt, Variola virus
uguaagacuugugggaaa

SEQ ID NO: 3286411 - RNA, 16 nt, Variola virus
uaacaguauuauuaau

SEQ ID NO: 3286412 - RNA, 21 nt, Variola virus
uaguuagcgucaacuuucaua

SEQ ID NO: 3286413 - RNA, 23 nt, Variola virus
augaaucacguguuuaacaaugg

SEQ ID NO: 3286414 - RNA, 22 nt, Variola virus
gauuaaggacuuuuauauccca

SEQ ID NO: 3286415 - RNA, 19 nt, Variola virus
uauuaugaugauuaugaua

SEQ ID NO: 3286416 - RNA, 13 nt, Variola virus
agaaauuaauaaa

SEQ ID NO: 3286417 - RNA, 19 nt, Variola virus
uagagaaucgcuagaugcu

SEQ ID NO: 3286418 - RNA, 12 nt, Variola virus
cuaaacuagugg

SEQ ID NO: 3286419 - RNA, 13 nt, Variola virus
ugauaauuuccag

SEQ ID NO: 3286420 - RNA, 13 nt, Variola virus
cguaccagcauuu

SEQ ID NO: 3286421 - RNA, 12 nt, Variola virus
uaugaauuuaua

SEQ ID NO: 3286422 - RNA, 18 nt, Variola virus
cugcgaacuuuaaacaga

SEQ ID NO: 3286423 - RNA, 13 nt, Variola virus
aacaguuacuauu

SEQ ID NO: 3286424 - RNA, 16 nt, Variola virus
auaaagaguccuauau

SEQ ID NO: 3286425 - RNA, 12 nt, Variola virus
ugaaaauuauuu

SEQ ID NO: 3286426 - RNA, 23 nt, Variola virus
auauuacgaauuacauuucuugu

SEQ ID NO: 3286427 - RNA, 16 nt, Variola virus
aaacacagauagugaa

SEQ ID NO: 3286428 - RNA, 22 nt, Variola virus
ugaacacuuuauacuucuccaa

SEQ ID NO: 3286429 - RNA, 18 nt, Variola virus
uguacccuguuuaacaug

SEQ ID NO: 3286430 - RNA, 19 nt, Variola virus
auagaagguuuauauaaca

SEQ ID NO: 3286431 - RNA, 19 nt, Variola virus
aucauauguagugguguaa

SEQ ID NO: 3286432 - RNA, 16 nt, Variola virus
uggauuaaacauacua

SEQ ID NO: 3286433 - RNA, 18 nt, Variola virus
ucaaaaucuuaauaucuu

SEQ ID NO: 3286434 - RNA, 11 nt, Variola virus
uccauuucuag

SEQ ID NO: 3286435 - RNA, 22 nt, Variola virus
guguucauccaaggaucuucua

SEQ ID NO: 3286436 - RNA, 20 nt, Variola virus
caagguaaccucuuaggaag

SEQ ID NO: 3286437 - RNA, 17 nt, Variola virus
uuauuagagauuucagc

SEQ ID NO: 3286438 - RNA, 19 nt, Variola virus
augagauguuaaaugaauu

SEQ ID NO: 3286439 - RNA, 13 nt, Variola virus
guauaaucuuuaa

SEQ ID NO: 3286440 - RNA, 15 nt, Variola virus
augucauauacucaa

SEQ ID NO: 3286441 - RNA, 17 nt, Variola virus
uauuauccguauuucca

SEQ ID NO: 3286442 - RNA, 17 nt, Variola virus
uauagcuaaaaauguca

SEQ ID NO: 3286443 - RNA, 14 nt, Variola virus
aucaucaaauggau

SEQ ID NO: 3286444 - RNA, 17 nt, Variola virus
cauaguccucguguggu

SEQ ID NO: 3286445 - RNA, 14 nt, Variola virus
caaaaugugauauu

SEQ ID NO: 3286446 - RNA, 14 nt, Variola virus
augacauuguaaaa

SEQ ID NO: 3286447 - RNA, 14 nt, Variola virus
uauaaucaaagauu

SEQ ID NO: 3286448 - RNA, 16 nt, Variola virus
aucaauaacuggcaca

SEQ ID NO: 3286449 - RNA, 16 nt, Variola virus
cgaugaugcugcuaua

SEQ ID NO: 3286450 - RNA, 23 nt, Variola virus
auccaauuguuugauauauaauu

SEQ ID NO: 3286451 - RNA, 23 nt, Variola virus
aauaacuucgugaauaauguuuc

SEQ ID NO: 3286452 - RNA, 11 nt, Variola virus
aaguaaauacu

SEQ ID NO: 3286453 - RNA, 16 nt, Variola virus
acucuacguaucucgu

SEQ ID NO: 3286454 - RNA, 15 nt, Variola virus
gucugucucagaauc

SEQ ID NO: 3286455 - RNA, 15 nt, Variola virus
uauuacgguaucaaa

SEQ ID NO: 3286456 - RNA, 12 nt, Variola virus
cgcuauacagua

SEQ ID NO: 3286457 - RNA, 14 nt, Variola virus
uacuauuaaucagu

SEQ ID NO: 3286458 - RNA, 20 nt, Variola virus
uucaauuucccguuuguauu

SEQ ID NO: 3286459 - RNA, 18 nt, Variola virus
gaaagauaccgaucacgu

SEQ ID NO: 3286460 - RNA, 21 nt, Variola virus
caauuuuucagauuuuugaau

SEQ ID NO: 3286461 - RNA, 15 nt, Variola virus
accuaugauaaagga

SEQ ID NO: 3286462 - RNA, 17 nt, Variola virus
uuuugccaacacagagg

SEQ ID NO: 3286463 - RNA, 21 nt, Variola virus
uguucauaauugcuuuucuaa

SEQ ID NO: 3286464 - RNA, 16 nt, Variola virus
aacguuacucaaacac

SEQ ID NO: 3286465 - RNA, 19 nt, Variola virus
cuauugcuuccaugcuacc

SEQ ID NO: 3286466 - RNA, 18 nt, Variola virus
uaaaaaauauauuguucu

SEQ ID NO: 3286467 - RNA, 15 nt, Variola virus
uuuuccaaaguuuua

SEQ ID NO: 3286468 - RNA, 23 nt, Variola virus
gaagaauggaaaccuuuaaucua

SEQ ID NO: 3286469 - RNA, 19 nt, Variola virus
gucacugaguuuacagaua

SEQ ID NO: 3286470 - RNA, 22 nt, Variola virus
agauacguauuagauaaaugga

SEQ ID NO: 3286471 - RNA, 18 nt, Variola virus
cuucaggagauccugcau

SEQ ID NO: 3286472 - RNA, 14 nt, Variola virus
aaaagauuauacaa

SEQ ID NO: 3286473 - RNA, 22 nt, Variola virus
augccacgaauaaaaaauacuu

SEQ ID NO: 3286474 - RNA, 15 nt, Variola virus
gacaaugaauugcau

SEQ ID NO: 3286475 - RNA, 13 nt, Variola virus
auauuaaaaaaug

SEQ ID NO: 3286476 - RNA, 15 nt, Variola virus
agacguggagaucua

SEQ ID NO: 3286477 - RNA, 19 nt, Variola virus
ugauaacucguuuuucuua

SEQ ID NO: 3286478 - RNA, 12 nt, Variola virus
uauuuuacacau

SEQ ID NO: 3286479 - RNA, 12 nt, Variola virus
auggaaauacuu

SEQ ID NO: 3286480 - RNA, 12 nt, Variola virus
ugaagaacacau

SEQ ID NO: 3286481 - RNA, 22 nt, Variola virus
gaaugcggugccauucaugaaa

SEQ ID NO: 3286482 - RNA, 18 nt, Variola virus
acugauaauguagaaaau

SEQ ID NO: 3286483 - RNA, 21 nt, Variola virus
uaacaagaaaauuagaaggau

SEQ ID NO: 3286484 - RNA, 20 nt, Variola virus
acaaaacagaaauaugugaa

SEQ ID NO: 3286485 - RNA, 14 nt, Variola virus
agcuaugaacuugu

SEQ ID NO: 3286486 - RNA, 14 nt, Variola virus
acauauuaaugcag

SEQ ID NO: 3286487 - RNA, 18 nt, Variola virus
aucaauuaaauaauuaau

SEQ ID NO: 3286488 - RNA, 15 nt, Variola virus
agaauggaugauauu

SEQ ID NO: 3286489 - RNA, 14 nt, Variola virus
auuagguacagaaa

SEQ ID NO: 3286490 - RNA, 12 nt, Variola virus
cuguuccaucaa

SEQ ID NO: 3286491 - RNA, 15 nt, Variola virus
aaucugauaaauaua

SEQ ID NO: 3286492 - RNA, 23 nt, Variola virus
uuaaaugaguguccauauuuugc

SEQ ID NO: 3286493 - RNA, 23 nt, Variola virus
gaagagcuguacaauaguuuuua

SEQ ID NO: 3286494 - RNA, 21 nt, Variola virus
gugauagauaugauaaacaaa

SEQ ID NO: 3286495 - RNA, 21 nt, Variola virus
uaaagguauaaaauacuuauu

SEQ ID NO: 3286496 - RNA, 19 nt, Variola virus
ucgcauuaauacuguuuuc

SEQ ID NO: 3286497 - RNA, 18 nt, Variola virus
uuccaaauauauuacuag

SEQ ID NO: 3286498 - RNA, 16 nt, Variola virus
aauauaaugaaagaua

SEQ ID NO: 3286499 - RNA, 18 nt, Variola virus
caaucaaaccuauaacau

SEQ ID NO: 3286500 - RNA, 17 nt, Variola virus
cuuuucuaguucugaac

SEQ ID NO: 3286501 - RNA, 15 nt, Variola virus
gaauccuauacucug

SEQ ID NO: 3286502 - RNA, 18 nt, Variola virus
aucaacagaaguuaauaa

SEQ ID NO: 3286503 - RNA, 17 nt, Variola virus
cgacaaaaagauauaaa

SEQ ID NO: 3286504 - RNA, 18 nt, Variola virus
aggaauucuuuuaugaau

SEQ ID NO: 3286505 - RNA, 16 nt, Variola virus
cuuugauuucuuaucu

SEQ ID NO: 3286506 - RNA, 16 nt, Variola virus
gcaucucuuaauccaa

SEQ ID NO: 3286507 - RNA, 16 nt, Variola virus
aagauucuacaaguaa

SEQ ID NO: 3286508 - RNA, 19 nt, Variola virus
uucuacgauuuuauuucuu

SEQ ID NO: 3286509 - RNA, 14 nt, Variola virus
gauaaaaaauuaua

SEQ ID NO: 3286510 - RNA, 19 nt, Variola virus
aucaaagucacaaagcaag

SEQ ID NO: 3286511 - RNA, 13 nt, Variola virus
gacauuuucuagu

SEQ ID NO: 3286512 - RNA, 19 nt, Variola virus
uaauauuaaagauaaagcg

SEQ ID NO: 3286513 - RNA, 20 nt, Variola virus
uuaucuucauaaaauacuaa

SEQ ID NO: 3286514 - RNA, 22 nt, Variola virus
uuccuguuccguuaacaucucu

SEQ ID NO: 3286515 - RNA, 18 nt, Variola virus
ucauccguggauauuuga

SEQ ID NO: 3286516 - RNA, 13 nt, Variola virus
aguauuugucaaa

SEQ ID NO: 3286517 - RNA, 20 nt, Variola virus
guuuuaccuauuuuaucauc

SEQ ID NO: 3286518 - RNA, 17 nt, Variola virus
uaguauuccaauaucug

SEQ ID NO: 3286519 - RNA, 19 nt, Variola virus
uauuggauauggauuucca

SEQ ID NO: 3286520 - RNA, 19 nt, Variola virus
acuccugguaauacugaug

SEQ ID NO: 3286521 - RNA, 20 nt, Variola virus
ucaauggaccccaacaucuu

SEQ ID NO: 3286522 - RNA, 23 nt, Variola virus
augauuuucugggacuauuggaa

SEQ ID NO: 3286523 - RNA, 14 nt, Variola virus
ccguagaaauacua

SEQ ID NO: 3286524 - RNA, 16 nt, Variola virus
aacacuggcuagaaaa

SEQ ID NO: 3286525 - RNA, 22 nt, Variola virus
agguguuauuuuguuuuauuca

SEQ ID NO: 3286526 - RNA, 21 nt, Variola virus
agaacuguuuuagaagucaag

SEQ ID NO: 3286527 - RNA, 18 nt, Variola virus
auuaaaugaugaaacuaa

SEQ ID NO: 3286528 - RNA, 16 nt, Variola virus
uuacucaaaauacuau

SEQ ID NO: 3286529 - RNA, 15 nt, Variola virus
uaguuuuauauacau

SEQ ID NO: 3286530 - RNA, 14 nt, Variola virus
aucagauaacaugu

SEQ ID NO: 3286531 - RNA, 23 nt, Variola virus
uauccauuauuugccuguuaauc

SEQ ID NO: 3286532 - RNA, 15 nt, Variola virus
uaacaacuuccguaa

SEQ ID NO: 3286533 - RNA, 15 nt, Variola virus
aauguaaagucuaua

SEQ ID NO: 3286534 - RNA, 17 nt, Variola virus
ugacuccuauauuuccc

SEQ ID NO: 3286535 - RNA, 16 nt, Variola virus
ucugacauaagaacag

SEQ ID NO: 3286536 - RNA, 15 nt, Variola virus
cugaaaaagauauca

SEQ ID NO: 3286537 - RNA, 16 nt, Variola virus
aucuaacauaguuuua

SEQ ID NO: 3286538 - RNA, 17 nt, Variola virus
augaggcguuuaucaua

SEQ ID NO: 3286539 - RNA, 14 nt, Variola virus
aauaacuagaucau

SEQ ID NO: 3286540 - RNA, 14 nt, Variola virus
uuaaaaaguuaucu

SEQ ID NO: 3286541 - RNA, 17 nt, Variola virus
ucuauaaauaaaagaca

SEQ ID NO: 3286542 - RNA, 15 nt, Variola virus
uuguauagaaauuuu

SEQ ID NO: 3286543 - RNA, 12 nt, Variola virus
uaauccaaauau

SEQ ID NO: 3286544 - RNA, 20 nt, Variola virus
caaaaaauaaaagaugauuu

SEQ ID NO: 3286545 - RNA, 17 nt, Variola virus
uuuggaaacuucaaaaa

SEQ ID NO: 3286546 - RNA, 15 nt, Variola virus
uuacagccaagaaac

SEQ ID NO: 3286547 - RNA, 14 nt, Variola virus
ucuauaaauguaga

SEQ ID NO: 3286548 - RNA, 15 nt, Variola virus
ugagguuuuuggaga

SEQ ID NO: 3286549 - RNA, 14 nt, Variola virus
cuauagauuuugaa

SEQ ID NO: 3286550 - RNA, 20 nt, Variola virus
aaguauagcuaaugaugcag

SEQ ID NO: 3286551 - RNA, 22 nt, Variola virus
uauauuacgguaucuacuagau

SEQ ID NO: 3286552 - RNA, 22 nt, Variola virus
gaaucuucauuaucugauauau

SEQ ID NO: 3286553 - RNA, 18 nt, Variola virus
acgacucuugagacuuua

SEQ ID NO: 3286554 - RNA, 13 nt, Variola virus
ucuuaaaaugguu

SEQ ID NO: 3286555 - RNA, 14 nt, Variola virus
cuugaagaugauuu

SEQ ID NO: 3286556 - RNA, 12 nt, Variola virus
uaacaucauuau

SEQ ID NO: 3286557 - RNA, 20 nt, Variola virus
cuggaacauuaaauguauuu

SEQ ID NO: 3286558 - RNA, 16 nt, Variola virus
acauauaauaaugaau

SEQ ID NO: 3286559 - RNA, 19 nt, Variola virus
aguaauuauaagaaauaua

SEQ ID NO: 3286560 - RNA, 22 nt, Variola virus
agacgaggagauuuagaaaugu

SEQ ID NO: 3286561 - RNA, 12 nt, Variola virus
uaacaaacaucu

SEQ ID NO: 3286562 - RNA, 19 nt, Variola virus
ugaauacaacuaaggagaa

SEQ ID NO: 3286563 - RNA, 18 nt, Variola virus
uaccauggaaaaauauua

SEQ ID NO: 3286564 - RNA, 17 nt, Variola virus
auacccuccuguauaug

SEQ ID NO: 3286565 - RNA, 17 nt, Variola virus
uaucaaacaauccaaaa

SEQ ID NO: 3286566 - RNA, 17 nt, Variola virus
aaacagucuuuaaguuc

SEQ ID NO: 3286567 - RNA, 12 nt, Variola virus
aauauacucuau

SEQ ID NO: 3286568 - RNA, 17 nt, Variola virus
augaacgagaugcagaa

SEQ ID NO: 3286569 - RNA, 18 nt, Variola virus
uggaauagcgaauguaug

SEQ ID NO: 3286570 - RNA, 21 nt, Variola virus
ugauuuuaacgacgacauauu

SEQ ID NO: 3286571 - RNA, 14 nt, Variola virus
auaccaaucauuua

SEQ ID NO: 3286572 - RNA, 16 nt, Variola virus
accauagaagauguua

SEQ ID NO: 3286573 - RNA, 14 nt, Variola virus
auaaucauucuuaa

SEQ ID NO: 3286574 - RNA, 15 nt, Variola virus
ucugaguauaguguu

SEQ ID NO: 3286575 - RNA, 23 nt, Variola virus
ggaaagcuagacuugauuauucu

SEQ ID NO: 3286576 - RNA, 22 nt, Variola virus
cauaccgucccaaaacauggau

SEQ ID NO: 3286577 - RNA, 17 nt, Variola virus
auaaacauuguuuguau

SEQ ID NO: 3286578 - RNA, 22 nt, Variola virus
auaccacuuaaugacaaaauca

SEQ ID NO: 3286579 - RNA, 18 nt, Variola virus
uuaauaaauaucauuaac

SEQ ID NO: 3286580 - RNA, 17 nt, Variola virus
uuuagcguggcuagaau

SEQ ID NO: 3286581 - RNA, 13 nt, Variola virus
ucauguaaauguu

SEQ ID NO: 3286582 - RNA, 15 nt, Variola virus
aagacuaugcaaaga

SEQ ID NO: 3286583 - RNA, 16 nt, Variola virus
auuguagauaaugaaa

SEQ ID NO: 3286584 - RNA, 15 nt, Variola virus
uaaaaugguaaacuu

SEQ ID NO: 3286585 - RNA, 13 nt, Variola virus
auauaguuauaga

SEQ ID NO: 3286586 - RNA, 15 nt, Variola virus
uagauuuauuugaua

SEQ ID NO: 3286587 - RNA, 15 nt, Variola virus
cagucggucaacuua

SEQ ID NO: 3286588 - RNA, 16 nt, Variola virus
uuaugaauugauucuu

SEQ ID NO: 3286589 - RNA, 19 nt, Variola virus
gagagucaauaucauuaau

SEQ ID NO: 3286590 - RNA, 13 nt, Variola virus
auuacugcauauu

SEQ ID NO: 3286591 - RNA, 18 nt, Variola virus
acaaaaguuaauaaucuc

SEQ ID NO: 3286592 - RNA, 20 nt, Variola virus
guaaaaaaaccuauaaugau

SEQ ID NO: 3286593 - RNA, 21 nt, Variola virus
guauauacuauuauagaucaa

SEQ ID NO: 3286594 - RNA, 23 nt, Variola virus
gcucuacaugcgguaaagauauu

SEQ ID NO: 3286595 - RNA, 20 nt, Variola virus
cuaauuccgcauuaaaugau

SEQ ID NO: 3286596 - RNA, 19 nt, Variola virus
auauccuccuuuaaaauua

SEQ ID NO: 3286597 - RNA, 15 nt, Variola virus
ugaauauauaugaca

SEQ ID NO: 3286598 - RNA, 12 nt, Variola virus
uaaguguuuaua

SEQ ID NO: 3286599 - RNA, 18 nt, Variola virus
caaaaucguuaagaaguu

SEQ ID NO: 3286600 - RNA, 13 nt, Variola virus
uaccaauaugucu

SEQ ID NO: 3286601 - RNA, 20 nt, Variola virus
acauuaguagggauagaaug

SEQ ID NO: 3286602 - RNA, 13 nt, Variola virus
uauaucaauauca

SEQ ID NO: 3286603 - RNA, 16 nt, Variola virus
uguucuauaaacugaa

SEQ ID NO: 3286604 - RNA, 20 nt, Variola virus
aauaaaguuaaacaacuauu

SEQ ID NO: 3286605 - RNA, 22 nt, Variola virus
uaaucaaauuugguguuguuaa

SEQ ID NO: 3286606 - RNA, 18 nt, Variola virus
ugucaucaguuauguacg

SEQ ID NO: 3286607 - RNA, 13 nt, Variola virus
auucuaaaugaug

SEQ ID NO: 3286608 - RNA, 16 nt, Variola virus
agucaaauauauuaaa

SEQ ID NO: 3286609 - RNA, 15 nt, Variola virus
aaauuaucaaauguu

SEQ ID NO: 3286610 - RNA, 15 nt, Variola virus
auucacaaauaugac

SEQ ID NO: 3286611 - RNA, 21 nt, Variola virus
uuuccggagauagauuuccaa

SEQ ID NO: 3286612 - RNA, 15 nt, Variola virus
ucucugguuugcuac

SEQ ID NO: 3286613 - RNA, 16 nt, Variola virus
uaaaauuuauaacauu

SEQ ID NO: 3286614 - RNA, 12 nt, Variola virus
ugugauggauuu

SEQ ID NO: 3286615 - RNA, 19 nt, Variola virus
gauuccauggaagaacuac

SEQ ID NO: 3286616 - RNA, 16 nt, Variola virus
gaaugagauacuaaca

SEQ ID NO: 3286617 - RNA, 16 nt, Variola virus
auuaacguuccuaauu

SEQ ID NO: 3286618 - RNA, 23 nt, Variola virus
agauaucucuggauauaucacaa

SEQ ID NO: 3286619 - RNA, 15 nt, Variola virus
uaaagacuaugucaa

SEQ ID NO: 3286620 - RNA, 19 nt, Variola virus
ggacaaccuuaauugguug

SEQ ID NO: 3286621 - RNA, 17 nt, Variola virus
aguaaaugaaaaaaaac

SEQ ID NO: 3286622 - RNA, 20 nt, Variola virus
cauuagcgcauguacauauu

SEQ ID NO: 3286623 - RNA, 21 nt, Variola virus
uggucuagauguaaaaaaugu

SEQ ID NO: 3286624 - RNA, 17 nt, Variola virus
caaugcucaguaaaugu

SEQ ID NO: 3286625 - RNA, 12 nt, Variola virus
cauguucauagg

SEQ ID NO: 3286626 - RNA, 22 nt, Variola virus
gacuaauaaauuaaauauuaau

SEQ ID NO: 3286627 - RNA, 22 nt, Variola virus
caaaugauaaucaaacacaucu

SEQ ID NO: 3286628 - RNA, 18 nt, Variola virus
uuuuagauguaguaucua

SEQ ID NO: 3286629 - RNA, 17 nt, Variola virus
cauauacuauuacuuau

SEQ ID NO: 3286630 - RNA, 13 nt, Variola virus
cggauacgacauc

SEQ ID NO: 3286631 - RNA, 16 nt, Variola virus
aacucucaaaaugcug

SEQ ID NO: 3286632 - RNA, 18 nt, Variola virus
aacucacauuucaaauau

SEQ ID NO: 3286633 - RNA, 15 nt, Variola virus
uccagauuucauaau

SEQ ID NO: 3286634 - RNA, 19 nt, Variola virus
gcuauugaaacugacggau

SEQ ID NO: 3286635 - RNA, 21 nt, Variola virus
aagauacucuaccagcuaaag

SEQ ID NO: 3286636 - RNA, 16 nt, Variola virus
auuuuuguccauuacu

SEQ ID NO: 3286637 - RNA, 24 nt, Variola virus
ucucauaauguaaagauauucuaa

SEQ ID NO: 3286638 - RNA, 19 nt, Variola virus
uuauaaaaaauuuuauuca

SEQ ID NO: 3286639 - RNA, 19 nt, Variola virus
uuaauaaaaauaauauuca

SEQ ID NO: 3286640 - RNA, 15 nt, Variola virus
ucuagauagaaguau

SEQ ID NO: 3286641 - RNA, 20 nt, Variola virus
ucuauuagaguauugcauuu

SEQ ID NO: 3286642 - RNA, 12 nt, Variola virus
caucaaauggau

SEQ ID NO: 3286643 - RNA, 11 nt, Variola virus
gaguauuucuc

SEQ ID NO: 3286644 - RNA, 15 nt, Variola virus
auaguaaaaaauaua

SEQ ID NO: 3286645 - RNA, 18 nt, Variola virus
ccaaaauacaaaauguua

SEQ ID NO: 3286646 - RNA, 17 nt, Variola virus
gacuauaaaauauucua

SEQ ID NO: 3286647 - RNA, 14 nt, Variola virus
uuuguaauugacau

SEQ ID NO: 3286648 - RNA, 15 nt, Variola virus
uaauaaucucaucau

SEQ ID NO: 3286649 - RNA, 21 nt, Variola virus
uuuaccaugugaugcuaauau

SEQ ID NO: 3286650 - RNA, 20 nt, Variola virus
cuauaaaaagauuauacaaa

SEQ ID NO: 3286651 - RNA, 15 nt, Variola virus
gauucaacauuuaua

SEQ ID NO: 3286652 - RNA, 17 nt, Variola virus
uuaguuuauuacuauua

SEQ ID NO: 3286653 - RNA, 13 nt, Variola virus
aacuuaucaaaga

SEQ ID NO: 3286654 - RNA, 15 nt, Variola virus
cucuggagaaaagau

SEQ ID NO: 3286655 - RNA, 20 nt, Variola virus
acucauguagcauagguaau

SEQ ID NO: 3286656 - RNA, 14 nt, Variola virus
aauuggacaaguau

SEQ ID NO: 3286657 - RNA, 21 nt, Variola virus
auaaacucacauuucaaauau

SEQ ID NO: 3286658 - RNA, 19 nt, Variola virus
ugacgucguucuacauaaa

SEQ ID NO: 3286659 - RNA, 14 nt, Variola virus
auaaacucagauaa

SEQ ID NO: 3286660 - RNA, 18 nt, Variola virus
uuaucaucccauuguaaa

SEQ ID NO: 3286661 - RNA, 22 nt, Variola virus
aauaguauacgcagaaaagaua

SEQ ID NO: 3286662 - RNA, 16 nt, Variola virus
aauucaucucuagaua

SEQ ID NO: 3286663 - RNA, 17 nt, Variola virus
auaggagcuagaagaac

SEQ ID NO: 3286664 - RNA, 23 nt, Variola virus
aauuuuuugguagguuuuagaga

SEQ ID NO: 3286665 - RNA, 13 nt, Variola virus
uagauuuacuaau

SEQ ID NO: 3286666 - RNA, 14 nt, Variola virus
cuaucauaaguuua

SEQ ID NO: 3286667 - RNA, 21 nt, Variola virus
agaugccaagauaucuauaua

SEQ ID NO: 3286668 - RNA, 21 nt, Variola virus
uuacuuugacaaauguaguaa

SEQ ID NO: 3286669 - RNA, 12 nt, Variola virus
aaaguuaaaagu

SEQ ID NO: 3286670 - RNA, 21 nt, Variola virus
guucuauaagauguuagaauu

SEQ ID NO: 3286671 - RNA, 18 nt, Variola virus
auauuuauaaaaaugcua

SEQ ID NO: 3286672 - RNA, 23 nt, Variola virus
guuaauauagacaauucuuuugu

SEQ ID NO: 3286673 - RNA, 19 nt, Variola virus
uacacaugguguuacaaaa

SEQ ID NO: 3286674 - RNA, 14 nt, Variola virus
acuaaauugaacac

SEQ ID NO: 3286675 - RNA, 20 nt, Variola virus
aguuguauacuaucggaauc

SEQ ID NO: 3286676 - RNA, 14 nt, Variola virus
cucuuggaauuaau

SEQ ID NO: 3286677 - RNA, 17 nt, Variola virus
aguucuuugaucucuuu

SEQ ID NO: 3286678 - RNA, 13 nt, Variola virus
uauucuuaauauu

SEQ ID NO: 3286679 - RNA, 20 nt, Variola virus
agaugguaaaauacaaaaua

SEQ ID NO: 3286680 - RNA, 21 nt, Variola virus
aauuaaaaccaaguacuacaa

SEQ ID NO: 3286681 - RNA, 20 nt, Variola virus
cauuauagauguguauacau

SEQ ID NO: 3286682 - RNA, 13 nt, Variola virus
ucauaagaacuau

SEQ ID NO: 3286683 - RNA, 13 nt, Variola virus
uaauaagaaauau

SEQ ID NO: 3286684 - RNA, 20 nt, Variola virus
gaauuagucgucgaauauau

SEQ ID NO: 3286685 - RNA, 21 nt, Variola virus
acuuuaacacguugucuuuca

SEQ ID NO: 3286686 - RNA, 17 nt, Variola virus
ucauauacucaauuagu

SEQ ID NO: 3286687 - RNA, 16 nt, Variola virus
uuauacaguguaugua

SEQ ID NO: 3286688 - RNA, 12 nt, Variola virus
ccaaaugaugau

SEQ ID NO: 3286689 - RNA, 16 nt, Variola virus
agcaaaagaaucauca

SEQ ID NO: 3286690 - RNA, 22 nt, Variola virus
gaaacauccaucgauacauaua

SEQ ID NO: 3286691 - RNA, 21 nt, Variola virus
auuauuguguuuguguaguuc

SEQ ID NO: 3286692 - RNA, 17 nt, Variola virus
cuauagaccaaacugua

SEQ ID NO: 3286693 - RNA, 17 nt, Variola virus
auccggauauucuucua

SEQ ID NO: 3286694 - RNA, 13 nt, Variola virus
uagaaaaaugcua

SEQ ID NO: 3286695 - RNA, 12 nt, Variola virus
gaauuguauauu

SEQ ID NO: 3286696 - RNA, 19 nt, Variola virus
auguaacccuuuuuaucga

SEQ ID NO: 3286697 - RNA, 12 nt, Variola virus
ucaauagaagau

SEQ ID NO: 3286698 - RNA, 24 nt, Variola virus
aauaauuacuuuacaaacgaugua

SEQ ID NO: 3286699 - RNA, 16 nt, Variola virus
aguugucggucuaaag

SEQ ID NO: 3286700 - RNA, 16 nt, Variola virus
cuuucucaacauuuca

SEQ ID NO: 3286701 - RNA, 14 nt, Variola virus
gucuguaaaccaca

SEQ ID NO: 3286702 - RNA, 23 nt, Variola virus
uuauuuuaaaccuaaagaugcua

SEQ ID NO: 3286703 - RNA, 14 nt, Variola virus
uuaaagaauguaua

SEQ ID NO: 3286704 - RNA, 13 nt, Variola virus
accaaauuuuaca

SEQ ID NO: 3286705 - RNA, 19 nt, Variola virus
uuuacaacacuuuucuauu

SEQ ID NO: 3286706 - RNA, 15 nt, Variola virus
uaccgauuuaucauc

SEQ ID NO: 3286707 - RNA, 14 nt, Variola virus
auguauauuuucca

SEQ ID NO: 3286708 - RNA, 16 nt, Variola virus
uguguaugaaaugcuu

SEQ ID NO: 3286709 - RNA, 15 nt, Variola virus
auucauaagaaucua

SEQ ID NO: 3286710 - RNA, 20 nt, Variola virus
caauauaaucgcuucaucau

SEQ ID NO: 3286711 - RNA, 16 nt, Variola virus
auuccacuuuaacauc

SEQ ID NO: 3286712 - RNA, 15 nt, Variola virus
augaguaaugggguu

SEQ ID NO: 3286713 - RNA, 19 nt, Variola virus
uagagauaccaaagacuuu

SEQ ID NO: 3286714 - RNA, 15 nt, Variola virus
uaccuuuaaaauaua

SEQ ID NO: 3286715 - RNA, 17 nt, Variola virus
auguuagaaaaaugaug

SEQ ID NO: 3286716 - RNA, 17 nt, Variola virus
caauuggaguaucaucu

SEQ ID NO: 3286717 - RNA, 18 nt, Variola virus
ugcacagcgaagaauucu

SEQ ID NO: 3286718 - RNA, 20 nt, Variola virus
acuguuuuccggaaggaaau

SEQ ID NO: 3286719 - RNA, 22 nt, Variola virus
gaaauauauacauauuuuaguu

SEQ ID NO: 3286720 - RNA, 23 nt, Variola virus
ucaucugaaauugucacuacuaa

SEQ ID NO: 3286721 - RNA, 14 nt, Variola virus
ccauauguuggaaa

SEQ ID NO: 3286722 - RNA, 20 nt, Variola virus
auguuaucaugaaauguuug

SEQ ID NO: 3286723 - RNA, 12 nt, Variola virus
caaugaguaaaa

SEQ ID NO: 3286724 - RNA, 15 nt, Variola virus
cauaacauguaucaa

SEQ ID NO: 3286725 - RNA, 19 nt, Variola virus
uuauuucagaaauuauucg

SEQ ID NO: 3286726 - RNA, 19 nt, Variola virus
aaaaacuguuuaacaaggu

SEQ ID NO: 3286727 - RNA, 17 nt, Variola virus
auaauauuuuaauagau

SEQ ID NO: 3286728 - RNA, 22 nt, Variola virus
cguaccaacucauuuaaauauc

SEQ ID NO: 3286729 - RNA, 11 nt, Variola virus
ggaaaaagcuc

SEQ ID NO: 3286730 - RNA, 23 nt, Variola virus
ggaccuaaaucuaacauugauuu

SEQ ID NO: 3286731 - RNA, 13 nt, Variola virus
aguuaauuuauca

SEQ ID NO: 3286732 - RNA, 21 nt, Variola virus
uuuacgcgcacacaauacaga

SEQ ID NO: 3286733 - RNA, 20 nt, Variola virus
acgaaauaucucaucaagaa

SEQ ID NO: 3286734 - RNA, 16 nt, Variola virus
uaauccagucuuuaau

SEQ ID NO: 3286735 - RNA, 12 nt, Variola virus
uagguaauaacu

SEQ ID NO: 3286736 - RNA, 12 nt, Variola virus
cuguuauauaca

SEQ ID NO: 3286737 - RNA, 22 nt, Variola virus
ccaagauccucucuuaaaugaa

SEQ ID NO: 3286738 - RNA, 23 nt, Variola virus
agaagucguuuauauaacaauga

SEQ ID NO: 3286739 - RNA, 14 nt, Variola virus
uaaauaaauucauu

SEQ ID NO: 3286740 - RNA, 13 nt, Variola virus
agaaucaaaggau

SEQ ID NO: 3286741 - RNA, 13 nt, Variola virus
aaauauguagaaa

SEQ ID NO: 3286742 - RNA, 20 nt, Variola virus
uguauaugugaucuaugaca

SEQ ID NO: 3286743 - RNA, 19 nt, Variola virus
ccauuaagaaacuaguuua

SEQ ID NO: 3286744 - RNA, 17 nt, Variola virus
uaacacauuucaacaau

SEQ ID NO: 3286745 - RNA, 17 nt, Variola virus
cguaucuauaaucaucu

SEQ ID NO: 3286746 - RNA, 14 nt, Variola virus
cuaaauaaguagua

SEQ ID NO: 3286747 - RNA, 15 nt, Variola virus
caacaacauauaauu

SEQ ID NO: 3286748 - RNA, 16 nt, Variola virus
ucaaauaggagauauu

SEQ ID NO: 3286749 - RNA, 14 nt, Variola virus
aauacguuagagaa

SEQ ID NO: 3286750 - RNA, 14 nt, Variola virus
ucuauaucuaaaau

SEQ ID NO: 3286751 - RNA, 15 nt, Variola virus
aucuuguucagaaau

SEQ ID NO: 3286752 - RNA, 14 nt, Variola virus
uugaaccaaacauu

SEQ ID NO: 3286753 - RNA, 15 nt, Variola virus
cauuucacaauucau

SEQ ID NO: 3286754 - RNA, 15 nt, Variola virus
aguuuggauuaauaa

SEQ ID NO: 3286755 - RNA, 16 nt, Variola virus
ugaacauauucaucgu

SEQ ID NO: 3286756 - RNA, 22 nt, Variola virus
uucuagaauuagaauuacaaaa

SEQ ID NO: 3286757 - RNA, 20 nt, Variola virus
uaauauccucuauuauacau

SEQ ID NO: 3286758 - RNA, 16 nt, Variola virus
auccuguaauacuuuu

SEQ ID NO: 3286759 - RNA, 19 nt, Variola virus
aauucuuggauauaugaua

SEQ ID NO: 3286760 - RNA, 19 nt, Variola virus
uaguaaaccgauaguguau

SEQ ID NO: 3286761 - RNA, 17 nt, Variola virus
augcauuuuuauauaca

SEQ ID NO: 3286762 - RNA, 18 nt, Variola virus
auucugcaauaucuucgu

SEQ ID NO: 3286763 - RNA, 20 nt, Variola virus
uuuacagauauauucauagu

SEQ ID NO: 3286764 - RNA, 15 nt, Variola virus
guuaguaaucaugua

SEQ ID NO: 3286765 - RNA, 21 nt, Variola virus
agcgucuagucuuaaauggag

SEQ ID NO: 3286766 - RNA, 12 nt, Variola virus
auuaauccaugg

SEQ ID NO: 3286767 - RNA, 18 nt, Variola virus
uuaauauauuuaaacuag

SEQ ID NO: 3286768 - RNA, 15 nt, Variola virus
aauccauccuauccu

SEQ ID NO: 3286769 - RNA, 17 nt, Variola virus
gacgaugauuucugaau

SEQ ID NO: 3286770 - RNA, 21 nt, Variola virus
aacuuaggcauggacauacua

SEQ ID NO: 3286771 - RNA, 15 nt, Variola virus
uuuguauauacauag

SEQ ID NO: 3286772 - RNA, 23 nt, Variola virus
aagcguguuauauauacaagucu

SEQ ID NO: 3286773 - RNA, 13 nt, Variola virus
auugauagauuac

SEQ ID NO: 3286774 - RNA, 17 nt, Variola virus
auaauccuuauacaucu

SEQ ID NO: 3286775 - RNA, 18 nt, Variola virus
aagaucuaauauucuaga

SEQ ID NO: 3286776 - RNA, 16 nt, Variola virus
auauuucuauuucuau

SEQ ID NO: 3286777 - RNA, 20 nt, Variola virus
guuuaauauccuuagucauc

SEQ ID NO: 3286778 - RNA, 20 nt, Variola virus
aaccaacgucauaaaaaugu

SEQ ID NO: 3286779 - RNA, 14 nt, Variola virus
aagaaauuaauaga

SEQ ID NO: 3286780 - RNA, 15 nt, Variola virus
uaguuuaucaaaaau

SEQ ID NO: 3286781 - RNA, 22 nt, Variola virus
cuauuguuacaaaaguuaauaa

SEQ ID NO: 3286782 - RNA, 17 nt, Variola virus
aaaaucuaaacaaauau

SEQ ID NO: 3286783 - RNA, 13 nt, Variola virus
gauucuaucuuua

SEQ ID NO: 3286784 - RNA, 15 nt, Variola virus
aagauuuaaauccua

SEQ ID NO: 3286785 - RNA, 19 nt, Variola virus
cuagaucggcaaucuuucu

SEQ ID NO: 3286786 - RNA, 14 nt, Variola virus
agaacucaacaaua

SEQ ID NO: 3286787 - RNA, 13 nt, Variola virus
aucagagaacuuc

SEQ ID NO: 3286788 - RNA, 21 nt, Variola virus
aucaucaccuaucuuguguau

SEQ ID NO: 3286789 - RNA, 14 nt, Variola virus
agauaaugugaauu

SEQ ID NO: 3286790 - RNA, 22 nt, Variola virus
acauaugcaucuauauaaucuu

SEQ ID NO: 3286791 - RNA, 17 nt, Variola virus
guaaucaugaaauuaag

SEQ ID NO: 3286792 - RNA, 15 nt, Variola virus
ucuauuauacauuua

SEQ ID NO: 3286793 - RNA, 21 nt, Variola virus
auaauguuauuacuuguggua

SEQ ID NO: 3286794 - RNA, 14 nt, Variola virus
uucaagauuaucuu

SEQ ID NO: 3286795 - RNA, 21 nt, Variola virus
uaccuuugguucuuuaaaaga

SEQ ID NO: 3286796 - RNA, 23 nt, Variola virus
ucuuaguaacucuaguaaaauaa

SEQ ID NO: 3286797 - RNA, 17 nt, Variola virus
gaaaacauuauauccuc

SEQ ID NO: 3286798 - RNA, 21 nt, Variola virus
uagguauuguuuucacgguau

SEQ ID NO: 3286799 - RNA, 14 nt, Variola virus
agauagaugaugau

SEQ ID NO: 3286800 - RNA, 19 nt, Variola virus
aacucauuuauauauuaaa

SEQ ID NO: 3286801 - RNA, 16 nt, Variola virus
acuguccaaaaugaug

SEQ ID NO: 3286802 - RNA, 20 nt, Variola virus
uagguaugaucguuaagaau

SEQ ID NO: 3286803 - RNA, 16 nt, Variola virus
auaaauggaauacuaa

SEQ ID NO: 3286804 - RNA, 17 nt, Variola virus
auucgaaauuagaaagu

SEQ ID NO: 3286805 - RNA, 16 nt, Variola virus
auuuaauuuuagauaa

SEQ ID NO: 3286806 - RNA, 19 nt, Variola virus
cuuguuaauaaguaaauga

SEQ ID NO: 3286807 - RNA, 21 nt, Variola virus
uuaaugcuacagauauuauca

SEQ ID NO: 3286808 - RNA, 13 nt, Variola virus
uccgguuaauuuu

SEQ ID NO: 3286809 - RNA, 17 nt, Variola virus
aaguuucguacaaauac

SEQ ID NO: 3286810 - RNA, 18 nt, Variola virus
caaagguacuauuucuac

SEQ ID NO: 3286811 - RNA, 16 nt, Variola virus
uaugaaguacgauguu

SEQ ID NO: 3286812 - RNA, 14 nt, Variola virus
auuauaauuauuau

SEQ ID NO: 3286813 - RNA, 12 nt, Variola virus
acguugucuuuc

SEQ ID NO: 3286814 - RNA, 22 nt, Variola virus
agaccuacagugauaugauguc

SEQ ID NO: 3286815 - RNA, 19 nt, Variola virus
aucuaugguuuccauaauu

SEQ ID NO: 3286816 - RNA, 17 nt, Variola virus
aauaaacaauuucacaa

SEQ ID NO: 3286817 - RNA, 23 nt, Variola virus
ugaauuuauuucagaaauuauuc

SEQ ID NO: 3286818 - RNA, 14 nt, Variola virus
uaguuuucuaaaau

SEQ ID NO: 3286819 - RNA, 14 nt, Variola virus
aucauauaucugaa

SEQ ID NO: 3286820 - RNA, 19 nt, Variola virus
acauugcuaugugaugaau

SEQ ID NO: 3286821 - RNA, 15 nt, Variola virus
aucaauaaaacagga

SEQ ID NO: 3286822 - RNA, 15 nt, Variola virus
augguucaaagacua

SEQ ID NO: 3286823 - RNA, 23 nt, Variola virus
gacauguucgugguguuaugaaa

SEQ ID NO: 3286824 - RNA, 13 nt, Variola virus
aucacuaauucca

SEQ ID NO: 3286825 - RNA, 15 nt, Variola virus
cgaaaauacacaaau

SEQ ID NO: 3286826 - RNA, 14 nt, Variola virus
caucuacuuuucca

SEQ ID NO: 3286827 - RNA, 18 nt, Variola virus
uacucauuuaacagaugu

SEQ ID NO: 3286828 - RNA, 20 nt, Variola virus
gagauuggguuaauaaauac

SEQ ID NO: 3286829 - RNA, 11 nt, Variola virus
aaccuuuguug

SEQ ID NO: 3286830 - RNA, 18 nt, Variola virus
auuuuaaauuuuaaacau

SEQ ID NO: 3286831 - RNA, 13 nt, Variola virus
gcuuccauaauau

SEQ ID NO: 3286832 - RNA, 16 nt, Variola virus
agcugaaaaacuaugu

SEQ ID NO: 3286833 - RNA, 15 nt, Variola virus
agcuaauaccaauuu

SEQ ID NO: 3286834 - RNA, 18 nt, Variola virus
cuuguagacgaacauaau

SEQ ID NO: 3286835 - RNA, 13 nt, Variola virus
uaauaaaauguca

SEQ ID NO: 3286836 - RNA, 15 nt, Variola virus
auuauacaaaaauuu

SEQ ID NO: 3286837 - RNA, 20 nt, Variola virus
uauguuaauacuuauucaua

SEQ ID NO: 3286838 - RNA, 12 nt, Variola virus
aggaaauacuug

SEQ ID NO: 3286839 - RNA, 19 nt, Variola virus
gaccguccauaguuuguau

SEQ ID NO: 3286840 - RNA, 16 nt, Variola virus
agaauacgaugauauu

SEQ ID NO: 3286841 - RNA, 18 nt, Variola virus
agccauauuccacagaua

SEQ ID NO: 3286842 - RNA, 21 nt, Variola virus
gcggguguuauucacaacauc

SEQ ID NO: 3286843 - RNA, 15 nt, Variola virus
aaaugauaacuagau

SEQ ID NO: 3286844 - RNA, 17 nt, Variola virus
augguaaaauuaaauag

SEQ ID NO: 3286845 - RNA, 13 nt, Variola virus
caaaaguauacau

SEQ ID NO: 3286846 - RNA, 20 nt, Variola virus
cuaccuuacccauaaacaau

SEQ ID NO: 3286847 - RNA, 19 nt, Variola virus
uaaccaccgauaaaucuag

SEQ ID NO: 3286848 - RNA, 20 nt, Variola virus
guacaagaaauacuuccauc

SEQ ID NO: 3286849 - RNA, 21 nt, Variola virus
caaacaaguuaaugagauauu

SEQ ID NO: 3286850 - RNA, 11 nt, Variola virus
gauacaaauau

SEQ ID NO: 3286851 - RNA, 20 nt, Variola virus
uuaccaucaaaagcauuaau

SEQ ID NO: 3286852 - RNA, 20 nt, Variola virus
auuacgaauauauaaaagac

SEQ ID NO: 3286853 - RNA, 15 nt, Variola virus
aaguauuuauacaaa

SEQ ID NO: 3286854 - RNA, 13 nt, Variola virus
agaggaaacuaau

SEQ ID NO: 3286855 - RNA, 16 nt, Variola virus
gauaauauaaauauga

SEQ ID NO: 3286856 - RNA, 20 nt, Variola virus
aguaauaagaaauaugaaau

SEQ ID NO: 3286857 - RNA, 24 nt, Variola virus
aacuuauucuuagcgucacagaau

SEQ ID NO: 3286858 - RNA, 17 nt, Variola virus
aaacuguaaauguagua

SEQ ID NO: 3286859 - RNA, 19 nt, Variola virus
agcauauuccauuaaugac

SEQ ID NO: 3286860 - RNA, 17 nt, Variola virus
agaaaauacuauauauu

SEQ ID NO: 3286861 - RNA, 21 nt, Variola virus
uauugccacguaccuuuaaaa

SEQ ID NO: 3286862 - RNA, 14 nt, Variola virus
agauucaacauuua

SEQ ID NO: 3286863 - RNA, 22 nt, Variola virus
ucagaauuuucauggauguaga

SEQ ID NO: 3286864 - RNA, 21 nt, Variola virus
aaugccacgguugacaauaac

SEQ ID NO: 3286865 - RNA, 13 nt, Variola virus
ccaagacacauau

SEQ ID NO: 3286866 - RNA, 14 nt, Variola virus
ugccauaauaauua

SEQ ID NO: 3286867 - RNA, 20 nt, Variola virus
agaucauagagagauucauu

SEQ ID NO: 3286868 - RNA, 18 nt, Variola virus
uacuaaugacaauaauua

SEQ ID NO: 3286869 - RNA, 16 nt, Variola virus
aacaauguauacaaau

SEQ ID NO: 3286870 - RNA, 15 nt, Variola virus
uuagcacuaucauaa

SEQ ID NO: 3286871 - RNA, 20 nt, Variola virus
ugauaucgcauagaaauaca

SEQ ID NO: 3286872 - RNA, 17 nt, Variola virus
aucauaaauaaaaauag

SEQ ID NO: 3286873 - RNA, 17 nt, Variola virus
uaaaaguaucaaaucuu

SEQ ID NO: 3286874 - RNA, 17 nt, Variola virus
aauuagucgguuaaugu

SEQ ID NO: 3286875 - RNA, 17 nt, Variola virus
auugcauauuuaucuuu

SEQ ID NO: 3286876 - RNA, 16 nt, Variola virus
acaucgaugccuuaac

SEQ ID NO: 3286877 - RNA, 18 nt, Variola virus
cauuaaaucuauuauauu

SEQ ID NO: 3286878 - RNA, 21 nt, Variola virus
uaacgccuauucgaaauuaga

SEQ ID NO: 3286879 - RNA, 23 nt, Variola virus
uauauucuuuaaauggaacagac

SEQ ID NO: 3286880 - RNA, 22 nt, Variola virus
auuuucggguuuaaauucuuua

SEQ ID NO: 3286881 - RNA, 16 nt, Variola virus
uauacucuuauuauca

SEQ ID NO: 3286882 - RNA, 19 nt, Variola virus
uuaaaaaaaaauacuuauu

SEQ ID NO: 3286883 - RNA, 20 nt, Variola virus
ccaacuucgccacccuugaa

SEQ ID NO: 3286884 - RNA, 18 nt, Variola virus
auaauuuuaccagaauac

SEQ ID NO: 3286885 - RNA, 20 nt, Variola virus
guauaaucaauucuaaucac

SEQ ID NO: 3286886 - RNA, 13 nt, Variola virus
uaugaaauuuaag

SEQ ID NO: 3286887 - RNA, 12 nt, Variola virus
augcaaacauua

SEQ ID NO: 3286888 - RNA, 19 nt, Variola virus
caaugauaaugaaccaucu

SEQ ID NO: 3286889 - RNA, 12 nt, Variola virus
aucuguauucuc

SEQ ID NO: 3286890 - RNA, 23 nt, Variola virus
uuaucuauuucaaaaaaugauca

SEQ ID NO: 3286891 - RNA, 17 nt, Variola virus
acgccaauacauguuuu

SEQ ID NO: 3286892 - RNA, 19 nt, Variola virus
uucgucuucccaaaauguu

SEQ ID NO: 3286893 - RNA, 17 nt, Variola virus
ucuauccaagauacuua

SEQ ID NO: 3286894 - RNA, 14 nt, Variola virus
gaacugaugccuau

SEQ ID NO: 3286895 - RNA, 23 nt, Variola virus
aauaugucucuuaacuauuuccg

SEQ ID NO: 3286896 - RNA, 16 nt, Variola virus
auaucaucgacaaaga

SEQ ID NO: 3286897 - RNA, 21 nt, Variola virus
uugacauauguaaauauuaau

SEQ ID NO: 3286898 - RNA, 18 nt, Variola virus
cugauuuugcauguagug

SEQ ID NO: 3286899 - RNA, 14 nt, Variola virus
cuauuauuaccaua

SEQ ID NO: 3286900 - RNA, 16 nt, Variola virus
auucaauuaguuuauu

SEQ ID NO: 3286901 - RNA, 14 nt, Variola virus
acuuacuuaauagg

SEQ ID NO: 3286902 - RNA, 22 nt, Variola virus
cgaauauuauaauaccaugacu

SEQ ID NO: 3286903 - RNA, 16 nt, Variola virus
uacgaggauucaaaaa

SEQ ID NO: 3286904 - RNA, 16 nt, Variola virus
gaaaguuuuauaugua

SEQ ID NO: 3286905 - RNA, 20 nt, Variola virus
uaaucguguauaacaucuuu

SEQ ID NO: 3286906 - RNA, 19 nt, Variola virus
uaacuaaaguuaauacuac

SEQ ID NO: 3286907 - RNA, 20 nt, Variola virus
accaaguaaugaucaucuau

SEQ ID NO: 3286908 - RNA, 14 nt, Variola virus
aucaaaagaaaucu

SEQ ID NO: 3286909 - RNA, 16 nt, Variola virus
gauguuuuuagaaaau

SEQ ID NO: 3286910 - RNA, 20 nt, Variola virus
aguuugccuuuuuuaguaga

SEQ ID NO: 3286911 - RNA, 20 nt, Variola virus
ggauguuguucgauugauuu

SEQ ID NO: 3286912 - RNA, 15 nt, Variola virus
agagauuuugaaaau

SEQ ID NO: 3286913 - RNA, 18 nt, Variola virus
acaucguaaucaaaagaa

SEQ ID NO: 3286914 - RNA, 16 nt, Variola virus
ucauguuauagaugug

SEQ ID NO: 3286915 - RNA, 19 nt, Variola virus
uuucuucuacauacauaag

SEQ ID NO: 3286916 - RNA, 21 nt, Variola virus
uaccgauuuaucaucauacac

SEQ ID NO: 3286917 - RNA, 16 nt, Variola virus
aucuaacagaaacguu

SEQ ID NO: 3286918 - RNA, 20 nt, Variola virus
aaauuuauuuaucaauuuua

SEQ ID NO: 3286919 - RNA, 15 nt, Variola virus
cauuaauaacauccu

SEQ ID NO: 3286920 - RNA, 17 nt, Variola virus
guuuauguacuaugcca

SEQ ID NO: 3286921 - RNA, 17 nt, Variola virus
auuuugugcaaauagau

SEQ ID NO: 3286922 - RNA, 21 nt, Variola virus
uucuauccaaggacaaggaug

SEQ ID NO: 3286923 - RNA, 16 nt, Variola virus
aucuuuaaagaacuaa

SEQ ID NO: 3286924 - RNA, 21 nt, Variola virus
ccauaucuaaagcuauguuua

SEQ ID NO: 3286925 - RNA, 18 nt, Variola virus
uuuccagacauuguugaa

SEQ ID NO: 3286926 - RNA, 14 nt, Variola virus
acaugcauuugaaa

SEQ ID NO: 3286927 - RNA, 17 nt, Variola virus
guaauuggaaaauuagu

SEQ ID NO: 3286928 - RNA, 20 nt, Variola virus
auuauugucauaaacauuau

SEQ ID NO: 3286929 - RNA, 18 nt, Variola virus
uauuuggcuagucaagau

SEQ ID NO: 3286930 - RNA, 15 nt, Variola virus
auuuauacuacuaau

SEQ ID NO: 3286931 - RNA, 16 nt, Variola virus
uggaguaucaucuauu

SEQ ID NO: 3286932 - RNA, 14 nt, Variola virus
uggaguacagaauu

SEQ ID NO: 3286933 - RNA, 14 nt, Variola virus
ucauauuuagauuu

SEQ ID NO: 3286934 - RNA, 17 nt, Variola virus
cuuuuuauccuuuagau

SEQ ID NO: 3286935 - RNA, 19 nt, Variola virus
cguucaacauuuuauggaa

SEQ ID NO: 3286936 - RNA, 23 nt, Variola virus
acaucgguacggguauucauuua

SEQ ID NO: 3286937 - RNA, 22 nt, Variola virus
agcaucauguccauuuaacuaa

SEQ ID NO: 3286938 - RNA, 22 nt, Variola virus
caugucuaauguguuaaaaaaa

SEQ ID NO: 3286939 - RNA, 16 nt, Variola virus
acuauuuggauagaca

SEQ ID NO: 3286940 - RNA, 12 nt, Variola virus
uauauacugaaa

SEQ ID NO: 3286941 - RNA, 18 nt, Variola virus
caacauaauauuaaacac

SEQ ID NO: 3286942 - RNA, 22 nt, Variola virus
cggauacuaguaguuucacaaa

SEQ ID NO: 3286943 - RNA, 19 nt, Variola virus
acaaugucaaaauaugagu

SEQ ID NO: 3286944 - RNA, 18 nt, Variola virus
uuugccaaccaauacaua

SEQ ID NO: 3286945 - RNA, 14 nt, Variola virus
aagucauaaaucau

SEQ ID NO: 3286946 - RNA, 20 nt, Variola virus
cucauagacccguaguuuua

SEQ ID NO: 3286947 - RNA, 16 nt, Variola virus
aauauuuuuuauaaaa

SEQ ID NO: 3286948 - RNA, 23 nt, Variola virus
cacggauccguaucuccaacaag

SEQ ID NO: 3286949 - RNA, 18 nt, Variola virus
ucccacaguguugccauu

SEQ ID NO: 3286950 - RNA, 12 nt, Variola virus
cauuaacagcuu

SEQ ID NO: 3286951 - RNA, 12 nt, Variola virus
cuuuaacuucug

SEQ ID NO: 3286952 - RNA, 19 nt, Variola virus
guauuguuaauagauauau

SEQ ID NO: 3286953 - RNA, 23 nt, Variola virus
ccaauaugucuguacaaauguua

SEQ ID NO: 3286954 - RNA, 20 nt, Variola virus
uuagacauaugauaaaacga

SEQ ID NO: 3286955 - RNA, 20 nt, Variola virus
acuugaaucaccauccuuua

SEQ ID NO: 3286956 - RNA, 17 nt, Variola virus
aucuauucauaaaacau

SEQ ID NO: 3286957 - RNA, 18 nt, Variola virus
uauccauaaacaauauua

SEQ ID NO: 3286958 - RNA, 16 nt, Variola virus
acaauaaugagaaugu

SEQ ID NO: 3286959 - RNA, 16 nt, Variola virus
guacuaucuagagauu

SEQ ID NO: 3286960 - RNA, 19 nt, Variola virus
uauguuuuuacagagacuu

SEQ ID NO: 3286961 - RNA, 23 nt, Variola virus
acagucuaucaucgacacaaaug

SEQ ID NO: 3286962 - RNA, 21 nt, Variola virus
cuagacugaugaccauuuaaa

SEQ ID NO: 3286963 - RNA, 15 nt, Variola virus
cagagguuguauuua

SEQ ID NO: 3286964 - RNA, 18 nt, Variola virus
auauauuguagauaagaa

SEQ ID NO: 3286965 - RNA, 20 nt, Variola virus
aaaaugcuacuuuagcuaag

SEQ ID NO: 3286966 - RNA, 21 nt, Variola virus
aauucauccguccuucagaca

SEQ ID NO: 3286967 - RNA, 22 nt, Variola virus
uaacacguuuuuuagaucucau

SEQ ID NO: 3286968 - RNA, 18 nt, Variola virus
guaaaccgauuaaacguc

SEQ ID NO: 3286969 - RNA, 13 nt, Variola virus
auucaaaaaagaa

SEQ ID NO: 3286970 - RNA, 20 nt, Variola virus
gaauauaaaauaacuacagu

SEQ ID NO: 3286971 - RNA, 13 nt, Variola virus
uaguaucuaaaac

SEQ ID NO: 3286972 - RNA, 21 nt, Variola virus
agauaaugacguuaauaacaa

SEQ ID NO: 3286973 - RNA, 14 nt, Variola virus
uucauauacugaua

SEQ ID NO: 3286974 - RNA, 13 nt, Variola virus
uuguauaugugau

SEQ ID NO: 3286975 - RNA, 19 nt, Variola virus
auuuuucuauguuaggaau

SEQ ID NO: 3286976 - RNA, 18 nt, Variola virus
aauauuaaagauaaagcg

SEQ ID NO: 3286977 - RNA, 23 nt, Variola virus
aaauaaaccuuuggaauuaguau

SEQ ID NO: 3286978 - RNA, 20 nt, Variola virus
aucuucacauuguaacuauu

SEQ ID NO: 3286979 - RNA, 14 nt, Variola virus
gauauauauugcac

SEQ ID NO: 3286980 - RNA, 22 nt, Variola virus
aaauaucauuauguauaaucau

SEQ ID NO: 3286981 - RNA, 20 nt, Variola virus
ucuccgcaauacauuucuca

SEQ ID NO: 3286982 - RNA, 13 nt, Variola virus
gacauucaucaau

SEQ ID NO: 3286983 - RNA, 16 nt, Variola virus
auuuaucuaacauagu

SEQ ID NO: 3286984 - RNA, 19 nt, Variola virus
caaaaauauuguacaguac

SEQ ID NO: 3286985 - RNA, 14 nt, Variola virus
ucaaauacuucaaa

SEQ ID NO: 3286986 - RNA, 19 nt, Variola virus
augcuagugcucaaacaaa

SEQ ID NO: 3286987 - RNA, 16 nt, Variola virus
cauguucgaaaaagug

SEQ ID NO: 3286988 - RNA, 18 nt, Variola virus
aaauaauccugaauauau

SEQ ID NO: 3286989 - RNA, 23 nt, Variola virus
agaaaguaugauauaauacuuac

SEQ ID NO: 3286990 - RNA, 18 nt, Variola virus
auuuuaacacuaauuaag

SEQ ID NO: 3286991 - RNA, 14 nt, Variola virus
auacuaguaugaug

SEQ ID NO: 3286992 - RNA, 19 nt, Variola virus
uguaaagacgaaacaaaau

SEQ ID NO: 3286993 - RNA, 14 nt, Variola virus
agauacuguauaua

SEQ ID NO: 3286994 - RNA, 16 nt, Variola virus
guaauaucuuaaauaa

SEQ ID NO: 3286995 - RNA, 22 nt, Variola virus
ugaagaaauuguuauaaugcua

SEQ ID NO: 3286996 - RNA, 15 nt, Variola virus
auucgguuaugaaug

SEQ ID NO: 3286997 - RNA, 13 nt, Variola virus
aaugcuaauguuc

SEQ ID NO: 3286998 - RNA, 18 nt, Variola virus
aaaaucuaaacaaauauu

SEQ ID NO: 3286999 - RNA, 18 nt, Variola virus
gaaaagcuuaaaauagcu

SEQ ID NO: 3287000 - RNA, 14 nt, Variola virus
gaacgauaaacaaa

SEQ ID NO: 3287001 - RNA, 19 nt, Variola virus
gauuguuuauuguauauac

SEQ ID NO: 3287002 - RNA, 14 nt, Variola virus
uauuacuaaacauu

SEQ ID NO: 3287003 - RNA, 13 nt, Variola virus
agaauaauuagaa

SEQ ID NO: 3287004 - RNA, 13 nt, Variola virus
accucgagaaugu

SEQ ID NO: 3287005 - RNA, 15 nt, Variola virus
gaauuccucugaaaa

SEQ ID NO: 3287006 - RNA, 14 nt, Variola virus
uggagaucuagaaa

SEQ ID NO: 3287007 - RNA, 16 nt, Variola virus
ugacacuaucuucugu

SEQ ID NO: 3287008 - RNA, 15 nt, Variola virus
agcuucguauacucu

SEQ ID NO: 3287009 - RNA, 18 nt, Variola virus
auuaucaaaauuuggaaa

SEQ ID NO: 3287010 - RNA, 18 nt, Variola virus
uauaaacgaguauagcau

SEQ ID NO: 3287011 - RNA, 16 nt, Variola virus
aaauagauagaacuac

SEQ ID NO: 3287012 - RNA, 13 nt, Variola virus
cacuagaugauuu

SEQ ID NO: 3287013 - RNA, 14 nt, Variola virus
aaugaaaauggaua

SEQ ID NO: 3287014 - RNA, 17 nt, Variola virus
uuaucaaagucacaaag

SEQ ID NO: 3287015 - RNA, 19 nt, Variola virus
gaauauacuucauaaaaga

SEQ ID NO: 3287016 - RNA, 23 nt, Variola virus
uauucggagcgcgcaauuuuuaa

SEQ ID NO: 3287017 - RNA, 23 nt, Variola virus
cuguucuaucaucuacaucacug

SEQ ID NO: 3287018 - RNA, 15 nt, Variola virus
auuuuaauauagcug

SEQ ID NO: 3287019 - RNA, 13 nt, Variola virus
cauaguuggauuu

SEQ ID NO: 3287020 - RNA, 17 nt, Variola virus
ucugaauagauccacca

SEQ ID NO: 3287021 - RNA, 21 nt, Variola virus
acgaugguuaaaauuaacaag

SEQ ID NO: 3287022 - RNA, 20 nt, Variola virus
uaguaucaauccaacaaaug

SEQ ID NO: 3287023 - RNA, 16 nt, Variola virus
ucacuucugucuacau

SEQ ID NO: 3287024 - RNA, 24 nt, Variola virus
ucacgcucucuacguagacuuucu

SEQ ID NO: 3287025 - RNA, 16 nt, Variola virus
caauuuagcugcauua

SEQ ID NO: 3287026 - RNA, 20 nt, Variola virus
auauuccgacaaaggauuga

SEQ ID NO: 3287027 - RNA, 13 nt, Variola virus
aaaacauaaucaa

SEQ ID NO: 3287028 - RNA, 17 nt, Variola virus
uaugaugucguuaaauu

SEQ ID NO: 3287029 - RNA, 20 nt, Variola virus
aauuucuuagucauagacaa

SEQ ID NO: 3287030 - RNA, 15 nt, Variola virus
cuauuccuauuuccu

SEQ ID NO: 3287031 - RNA, 20 nt, Variola virus
aauaauaucacuauuacaau

SEQ ID NO: 3287032 - RNA, 15 nt, Variola virus
uauauaguuaagauu

SEQ ID NO: 3287033 - RNA, 21 nt, Variola virus
aucuucuuauuuagaucuugu

SEQ ID NO: 3287034 - RNA, 12 nt, Variola virus
gcucuagauauu

SEQ ID NO: 3287035 - RNA, 20 nt, Variola virus
auuuaaggcuuuaaaauuga

SEQ ID NO: 3287036 - RNA, 17 nt, Variola virus
uguacaauacauguaca

SEQ ID NO: 3287037 - RNA, 15 nt, Variola virus
auccaaaauauuaau

SEQ ID NO: 3287038 - RNA, 23 nt, Variola virus
uugacaucuaaaaaauccuuaau

SEQ ID NO: 3287039 - RNA, 14 nt, Variola virus
auagaaaaugaauc

SEQ ID NO: 3287040 - RNA, 18 nt, Variola virus
uaaaguauccguguauag

SEQ ID NO: 3287041 - RNA, 14 nt, Variola virus
gaaauauaccgaua

SEQ ID NO: 3287042 - RNA, 17 nt, Variola virus
uucuauuuuuaauauag

SEQ ID NO: 3287043 - RNA, 16 nt, Variola virus
cagaaggaaacuucuu

SEQ ID NO: 3287044 - RNA, 16 nt, Variola virus
gguggccaaauuuauu

SEQ ID NO: 3287045 - RNA, 17 nt, Variola virus
uauuucacaucguauuu

SEQ ID NO: 3287046 - RNA, 15 nt, Variola virus
uaaauaauuauuuca

SEQ ID NO: 3287047 - RNA, 11 nt, Variola virus
ucguuaaugaa

SEQ ID NO: 3287048 - RNA, 19 nt, Variola virus
acagacguuaauauagaca

SEQ ID NO: 3287049 - RNA, 13 nt, Variola virus
cuaacaaaacuau

SEQ ID NO: 3287050 - RNA, 18 nt, Variola virus
uaaacaauuucacaaaug

SEQ ID NO: 3287051 - RNA, 19 nt, Variola virus
aauuacuaaaauauacaaa

SEQ ID NO: 3287052 - RNA, 21 nt, Variola virus
uuccgccguauccauaaacaa

SEQ ID NO: 3287053 - RNA, 18 nt, Variola virus
uggagacauccauugaua

SEQ ID NO: 3287054 - RNA, 16 nt, Variola virus
gacgcuuauuauuaau

SEQ ID NO: 3287055 - RNA, 21 nt, Variola virus
aacuaauucauuuucaauaau

SEQ ID NO: 3287056 - RNA, 22 nt, Variola virus
augacuccucuucauacagccu

SEQ ID NO: 3287057 - RNA, 16 nt, Variola virus
guccauuaucaguaau

SEQ ID NO: 3287058 - RNA, 16 nt, Variola virus
ucucuaagaggaugag

SEQ ID NO: 3287059 - RNA, 14 nt, Variola virus
aauacaaaauguua

SEQ ID NO: 3287060 - RNA, 17 nt, Variola virus
ugaugauauguuuggaa

SEQ ID NO: 3287061 - RNA, 21 nt, Variola virus
aaucauuacugucgcuaucau

SEQ ID NO: 3287062 - RNA, 22 nt, Variola virus
auaacuuuuuaccucauaugaa

SEQ ID NO: 3287063 - RNA, 23 nt, Variola virus
acaauauuuaguuuauucauaau

SEQ ID NO: 3287064 - RNA, 20 nt, Variola virus
acuuaacuaucuuucaagau

SEQ ID NO: 3287065 - RNA, 13 nt, Variola virus
cauguuaaaaaug

SEQ ID NO: 3287066 - RNA, 13 nt, Variola virus
ucauuaucugaaa

SEQ ID NO: 3287067 - RNA, 13 nt, Variola virus
cguauaauagaca

SEQ ID NO: 3287068 - RNA, 13 nt, Variola virus
uuuauuucuaauu

SEQ ID NO: 3287069 - RNA, 14 nt, Variola virus
uaacgcaacuauau

SEQ ID NO: 3287070 - RNA, 22 nt, Variola virus
uaaauacuuuuuauuuacggua

SEQ ID NO: 3287071 - RNA, 16 nt, Variola virus
agaauauaaauuauau

SEQ ID NO: 3287072 - RNA, 13 nt, Variola virus
uuucuuucgaauu

SEQ ID NO: 3287073 - RNA, 15 nt, Variola virus
agauaauacaaaauu

SEQ ID NO: 3287074 - RNA, 17 nt, Variola virus
uauauagauauuaucua

SEQ ID NO: 3287075 - RNA, 20 nt, Variola virus
aaguaauuauaguauaaugu

SEQ ID NO: 3287076 - RNA, 22 nt, Variola virus
cauaaauaguaaauacaauaau

SEQ ID NO: 3287077 - RNA, 14 nt, Variola virus
uaauaauuaaccaa

SEQ ID NO: 3287078 - RNA, 16 nt, Variola virus
auuuguacacaucuau

SEQ ID NO: 3287079 - RNA, 17 nt, Variola virus
guuggauuaucuauagu

SEQ ID NO: 3287080 - RNA, 21 nt, Variola virus
acaauauuacaauacauagau

SEQ ID NO: 3287081 - RNA, 16 nt, Variola virus
auuucaaaaaaugauc

SEQ ID NO: 3287082 - RNA, 16 nt, Variola virus
uaaaacgauuaaacaa

SEQ ID NO: 3287083 - RNA, 19 nt, Variola virus
cugugaauucguaaauaca

SEQ ID NO: 3287084 - RNA, 14 nt, Variola virus
auuauauauggauu

SEQ ID NO: 3287085 - RNA, 14 nt, Variola virus
ucacagucuguuuu

SEQ ID NO: 3287086 - RNA, 21 nt, Variola virus
gacugccacguuagaggauga

SEQ ID NO: 3287087 - RNA, 20 nt, Variola virus
auuuuaaaaucaaaaaggag

SEQ ID NO: 3287088 - RNA, 16 nt, Variola virus
auuagagguaaugaug

SEQ ID NO: 3287089 - RNA, 16 nt, Variola virus
ucauaaccauuucuau

SEQ ID NO: 3287090 - RNA, 21 nt, Variola virus
accugccauaaauaaaugcuu

SEQ ID NO: 3287091 - RNA, 17 nt, Variola virus
uacaauacgauaaacau

SEQ ID NO: 3287092 - RNA, 17 nt, Variola virus
gcggcuuaauaaauguu

SEQ ID NO: 3287093 - RNA, 11 nt, Variola virus
aaaauauugug

SEQ ID NO: 3287094 - RNA, 20 nt, Variola virus
agauccugcauagaaauauc

SEQ ID NO: 3287095 - RNA, 19 nt, Variola virus
uauuaaaguacguaaaucu

SEQ ID NO: 3287096 - RNA, 19 nt, Variola virus
uuugcaauuucuucauagg

SEQ ID NO: 3287097 - RNA, 16 nt, Variola virus
guuacaauuuuaucau

SEQ ID NO: 3287098 - RNA, 14 nt, Variola virus
caaagugaaacaau

SEQ ID NO: 3287099 - RNA, 16 nt, Variola virus
aaucuaauauuaagaa

SEQ ID NO: 3287100 - RNA, 16 nt, Variola virus
uaaaaguuuuacuaua

SEQ ID NO: 3287101 - RNA, 13 nt, Variola virus
acuuccauggaaa

SEQ ID NO: 3287102 - RNA, 15 nt, Variola virus
auaaacuagauauau

SEQ ID NO: 3287103 - RNA, 16 nt, Variola virus
gcaucuuaauccuucu

SEQ ID NO: 3287104 - RNA, 17 nt, Variola virus
cugaaaauaaagauaaa

SEQ ID NO: 3287105 - RNA, 17 nt, Variola virus
uuagaagagucauuaaa

SEQ ID NO: 3287106 - RNA, 13 nt, Variola virus
auagauauacaau

SEQ ID NO: 3287107 - RNA, 23 nt, Variola virus
agaaauuuuugguucuucucuaa

SEQ ID NO: 3287108 - RNA, 21 nt, Variola virus
ugacgaagugacgucauuaaa

SEQ ID NO: 3287109 - RNA, 16 nt, Variola virus
ggaaaaauaacaaauc

SEQ ID NO: 3287110 - RNA, 13 nt, Variola virus
acaaaccaaauau

SEQ ID NO: 3287111 - RNA, 18 nt, Variola virus
acguacauaacauuguuu

SEQ ID NO: 3287112 - RNA, 16 nt, Variola virus
cugaaaagaagugagu

SEQ ID NO: 3287113 - RNA, 18 nt, Variola virus
ucguagauuuuaauguau

SEQ ID NO: 3287114 - RNA, 18 nt, Variola virus
ggauaggagauuguauug

SEQ ID NO: 3287115 - RNA, 23 nt, Variola virus
auaugccgugggaugaugucaaa

SEQ ID NO: 3287116 - RNA, 20 nt, Variola virus
aauuuuuaacgauuuacugu

SEQ ID NO: 3287117 - RNA, 14 nt, Variola virus
gaaaugguacagaa

SEQ ID NO: 3287118 - RNA, 17 nt, Variola virus
uaaauagguuucuauaa

SEQ ID NO: 3287119 - RNA, 20 nt, Variola virus
gcaaucuuuuagaugaugau

SEQ ID NO: 3287120 - RNA, 16 nt, Variola virus
auacaacuaaggagaa

SEQ ID NO: 3287121 - RNA, 24 nt, Variola virus
agauuaucuagucagaacuaucau

SEQ ID NO: 3287122 - RNA, 24 nt, Variola virus
augcucuagauacugcaaaacuua

SEQ ID NO: 3287123 - RNA, 14 nt, Variola virus
acuuauuuuaagau

SEQ ID NO: 3287124 - RNA, 14 nt, Variola virus
uggauaauuuccau

SEQ ID NO: 3287125 - RNA, 21 nt, Variola virus
uuagaggaacauuaaacaucg

SEQ ID NO: 3287126 - RNA, 17 nt, Variola virus
uuccgccguauccauaa

SEQ ID NO: 3287127 - RNA, 23 nt, Variola virus
ugucuuaauaagaaguguaagag

SEQ ID NO: 3287128 - RNA, 14 nt, Variola virus
caucugauuccaua

SEQ ID NO: 3287129 - RNA, 16 nt, Variola virus
augaugucuauguaug

SEQ ID NO: 3287130 - RNA, 21 nt, Variola virus
cauuaacaucauacaucaauu

SEQ ID NO: 3287131 - RNA, 15 nt, Variola virus
uaguauauacguuau

SEQ ID NO: 3287132 - RNA, 15 nt, Variola virus
cugaacccguuaaug

SEQ ID NO: 3287133 - RNA, 18 nt, Variola virus
guaauuuuuguuucaguu

SEQ ID NO: 3287134 - RNA, 14 nt, Variola virus
acagccucauauau

SEQ ID NO: 3287135 - RNA, 20 nt, Variola virus
cuaaaggaucugacccuaau

SEQ ID NO: 3287136 - RNA, 17 nt, Variola virus
ugcaaugaauaucuaca

SEQ ID NO: 3287137 - RNA, 22 nt, Variola virus
acacaccaaaaaagaaaaggau

SEQ ID NO: 3287138 - RNA, 16 nt, Variola virus
ugguuuaaaaauacuc

SEQ ID NO: 3287139 - RNA, 22 nt, Variola virus
auaugcaaagucuaaauauuuu

SEQ ID NO: 3287140 - RNA, 23 nt, Variola virus
cuaaauaccucauaaaacaaaaa

SEQ ID NO: 3287141 - RNA, 16 nt, Variola virus
auguuguuaaaauaua

SEQ ID NO: 3287142 - RNA, 16 nt, Variola virus
aucugggaauaaaaua

SEQ ID NO: 3287143 - RNA, 18 nt, Variola virus
agagaaaagucaauuaug

SEQ ID NO: 3287144 - RNA, 14 nt, Variola virus
acagacugaaagua

SEQ ID NO: 3287145 - RNA, 16 nt, Variola virus
acuuuucauuaauagg

SEQ ID NO: 3287146 - RNA, 19 nt, Variola virus
auaucacaaccuuuguuaa

SEQ ID NO: 3287147 - RNA, 16 nt, Variola virus
gacuucuaacaaacau

SEQ ID NO: 3287148 - RNA, 14 nt, Variola virus
aggaagcauauucu

SEQ ID NO: 3287149 - RNA, 13 nt, Variola virus
uaucuuucaagau

SEQ ID NO: 3287150 - RNA, 20 nt, Variola virus
acgaauauugggcaaagaua

SEQ ID NO: 3287151 - RNA, 23 nt, Variola virus
uuaaacagaaauauaugagaugu

SEQ ID NO: 3287152 - RNA, 16 nt, Variola virus
aucuaguuagcaauuu

SEQ ID NO: 3287153 - RNA, 19 nt, Variola virus
acuaccgaguuuaaaacuu

SEQ ID NO: 3287154 - RNA, 14 nt, Variola virus
gacuagacauuuac

SEQ ID NO: 3287155 - RNA, 14 nt, Variola virus
uucaaaucuagauu

SEQ ID NO: 3287156 - RNA, 20 nt, Variola virus
gagacuugauagauauuaau

SEQ ID NO: 3287157 - RNA, 23 nt, Variola virus
augaagaugacgaugaaaaugau

SEQ ID NO: 3287158 - RNA, 18 nt, Variola virus
uuagucgugguaagaaag

SEQ ID NO: 3287159 - RNA, 19 nt, Variola virus
uucugaauagauccaccau

SEQ ID NO: 3287160 - RNA, 20 nt, Variola virus
aauaaaauguuaauacauca

SEQ ID NO: 3287161 - RNA, 16 nt, Variola virus
uaaagauauuguuaca

SEQ ID NO: 3287162 - RNA, 14 nt, Variola virus
ugauacauuuugaa

SEQ ID NO: 3287163 - RNA, 20 nt, Variola virus
uauaguaauaaaauuucuau

SEQ ID NO: 3287164 - RNA, 23 nt, Variola virus
augauugcauauuuaucuuucuu

SEQ ID NO: 3287165 - RNA, 23 nt, Variola virus
uaaacaacaaugccaucuuacau

SEQ ID NO: 3287166 - RNA, 13 nt, Variola virus
aauacaauacaua

SEQ ID NO: 3287167 - RNA, 13 nt, Variola virus
ucgaaauaucuuu

SEQ ID NO: 3287168 - RNA, 22 nt, Variola virus
gauaauaauguuguuauaucua

SEQ ID NO: 3287169 - RNA, 14 nt, Variola virus
auacguauccauga

SEQ ID NO: 3287170 - RNA, 22 nt, Variola virus
aacugacguauuggaugaugca

SEQ ID NO: 3287171 - RNA, 15 nt, Variola virus
uauuuuuuucuaaau

SEQ ID NO: 3287172 - RNA, 23 nt, Variola virus
cuaauuauacuuugguaaauguu

SEQ ID NO: 3287173 - RNA, 21 nt, Variola virus
guuucuuagcuugugauuuuu

SEQ ID NO: 3287174 - RNA, 16 nt, Variola virus
uaaacucagauaauag

SEQ ID NO: 3287175 - RNA, 16 nt, Variola virus
caucgaugaugcauuu

SEQ ID NO: 3287176 - RNA, 17 nt, Variola virus
cggaaauguaauucuaa

SEQ ID NO: 3287177 - RNA, 18 nt, Variola virus
uauuucuauauuugacuc

SEQ ID NO: 3287178 - RNA, 13 nt, Variola virus
cauuuuauuucua

SEQ ID NO: 3287179 - RNA, 19 nt, Variola virus
acuuuagcauugaaaauac

SEQ ID NO: 3287180 - RNA, 16 nt, Variola virus
ucgacauauguaugua

SEQ ID NO: 3287181 - RNA, 11 nt, Variola virus
uuuuuauucuu

SEQ ID NO: 3287182 - RNA, 14 nt, Variola virus
auuacuuuaauagu

SEQ ID NO: 3287183 - RNA, 21 nt, Variola virus
uuauaugauaucuuuacuaag

SEQ ID NO: 3287184 - RNA, 11 nt, Variola virus
gguaauaacua

SEQ ID NO: 3287185 - RNA, 22 nt, Variola virus
aaaccauguugugaaagaguuu

SEQ ID NO: 3287186 - RNA, 18 nt, Variola virus
aguagaaauuccauugga

SEQ ID NO: 3287187 - RNA, 14 nt, Variola virus
uuauauaauguaua

SEQ ID NO: 3287188 - RNA, 14 nt, Variola virus
aaaacaauacagug

SEQ ID NO: 3287189 - RNA, 22 nt, Variola virus
uauuuaugauauauauuauaua

SEQ ID NO: 3287190 - RNA, 20 nt, Variola virus
aacaauuaauuaauacagua

SEQ ID NO: 3287191 - RNA, 20 nt, Variola virus
cgucgucaaaauauuuacua

SEQ ID NO: 3287192 - RNA, 12 nt, Variola virus
uaaaauaucuua

SEQ ID NO: 3287193 - RNA, 14 nt, Variola virus
uucaauucuagaaa

SEQ ID NO: 3287194 - RNA, 21 nt, Variola virus
uucuaucuuuaguaguguuuc

SEQ ID NO: 3287195 - RNA, 13 nt, Variola virus
aaacuagauacaa

SEQ ID NO: 3287196 - RNA, 23 nt, Variola virus
uucucgauagagaugagaugcuu

SEQ ID NO: 3287197 - RNA, 18 nt, Variola virus
gaaaugccugauaaagau

SEQ ID NO: 3287198 - RNA, 15 nt, Variola virus
acucaauuaguauau

SEQ ID NO: 3287199 - RNA, 20 nt, Variola virus
uacucuaaucuuuaauagau

SEQ ID NO: 3287200 - RNA, 16 nt, Variola virus
acaaauauaaaaugau

SEQ ID NO: 3287201 - RNA, 18 nt, Variola virus
gacagaaccuugugucau

SEQ ID NO: 3287202 - RNA, 19 nt, Variola virus
uauggaaacuauaauuuug

SEQ ID NO: 3287203 - RNA, 22 nt, Variola virus
uggauauaauauauuagauauu

SEQ ID NO: 3287204 - RNA, 23 nt, Variola virus
uuaugaaacuuggaaacaucucu

SEQ ID NO: 3287205 - RNA, 15 nt, Variola virus
auuacgcucuacaaa

SEQ ID NO: 3287206 - RNA, 15 nt, Variola virus
aauuauuucuaacau

SEQ ID NO: 3287207 - RNA, 16 nt, Variola virus
uugacggccgucauca

SEQ ID NO: 3287208 - RNA, 17 nt, Variola virus
aucuauuauugaugcaa

SEQ ID NO: 3287209 - RNA, 14 nt, Variola virus
gauucgauuuugau

SEQ ID NO: 3287210 - RNA, 23 nt, Variola virus
auuaacacuccggaaaaauaauu

SEQ ID NO: 3287211 - RNA, 13 nt, Variola virus
acuuuguuaauga

SEQ ID NO: 3287212 - RNA, 13 nt, Variola virus
agaggauaaagua

SEQ ID NO: 3287213 - RNA, 13 nt, Variola virus
auuaguuaaauau

SEQ ID NO: 3287214 - RNA, 20 nt, Variola virus
aucugguuuaggaaagacag

SEQ ID NO: 3287215 - RNA, 22 nt, Variola virus
gcauaauaccuaucuauaagau

SEQ ID NO: 3287216 - RNA, 15 nt, Variola virus
agaacucaacucauc

SEQ ID NO: 3287217 - RNA, 21 nt, Variola virus
uauuuugauaggaucuauaau

SEQ ID NO: 3287218 - RNA, 15 nt, Variola virus
aaugauaaacaaaaa

SEQ ID NO: 3287219 - RNA, 23 nt, Variola virus
ucgacguaacuauauuccaaauu

SEQ ID NO: 3287220 - RNA, 20 nt, Variola virus
uacgaagggauugaaaauag

SEQ ID NO: 3287221 - RNA, 19 nt, Variola virus
aaauguguggauuuuggug

SEQ ID NO: 3287222 - RNA, 12 nt, Variola virus
cuaaauuagaac

SEQ ID NO: 3287223 - RNA, 20 nt, Variola virus
aaguagaucaucugaaaauc

SEQ ID NO: 3287224 - RNA, 14 nt, Variola virus
acggcgucauauag

SEQ ID NO: 3287225 - RNA, 21 nt, Variola virus
uuaugacgcaguaacauagau

SEQ ID NO: 3287226 - RNA, 12 nt, Variola virus
auuauuaaauau

SEQ ID NO: 3287227 - RNA, 20 nt, Variola virus
agauaugugauaaaaaucgu

SEQ ID NO: 3287228 - RNA, 16 nt, Variola virus
uacaauacacacaaua

SEQ ID NO: 3287229 - RNA, 18 nt, Variola virus
caaaaguaguauagcaau

SEQ ID NO: 3287230 - RNA, 20 nt, Variola virus
uagacuuuaauggauauaca

SEQ ID NO: 3287231 - RNA, 14 nt, Variola virus
cugauaagauaucu

SEQ ID NO: 3287232 - RNA, 14 nt, Variola virus
guuuaauacauuga

SEQ ID NO: 3287233 - RNA, 21 nt, Variola virus
gacugcgaauccuauauuaaa

SEQ ID NO: 3287234 - RNA, 17 nt, Variola virus
uuaaaauauuauuuaga

SEQ ID NO: 3287235 - RNA, 13 nt, Variola virus
gagucacaaauaa

SEQ ID NO: 3287236 - RNA, 21 nt, Variola virus
aaauacgaagguccuuuuacu

SEQ ID NO: 3287237 - RNA, 17 nt, Variola virus
aacauuuccuacauaua

SEQ ID NO: 3287238 - RNA, 17 nt, Variola virus
agcaaaacaguuacuau

SEQ ID NO: 3287239 - RNA, 20 nt, Variola virus
agaguauccacuaaacuauu

SEQ ID NO: 3287240 - RNA, 16 nt, Variola virus
uuguaacaacaauguu

SEQ ID NO: 3287241 - RNA, 21 nt, Variola virus
uuucuugauuagcccaucauu

SEQ ID NO: 3287242 - RNA, 23 nt, Variola virus
uguacucuuccaaaguugggaua

SEQ ID NO: 3287243 - RNA, 14 nt, Variola virus
cuugucaucuuguu

SEQ ID NO: 3287244 - RNA, 23 nt, Variola virus
auagaagauguuagaaaaaugau

SEQ ID NO: 3287245 - RNA, 15 nt, Variola virus
caugauguaaucucu

SEQ ID NO: 3287246 - RNA, 16 nt, Variola virus
cagucuaauauccauu

SEQ ID NO: 3287247 - RNA, 22 nt, Variola virus
aauugcuguuuauuuuagaaga

SEQ ID NO: 3287248 - RNA, 12 nt, Variola virus
cuaaaaaacuaa

SEQ ID NO: 3287249 - RNA, 14 nt, Variola virus
uauuuguucaagau

SEQ ID NO: 3287250 - RNA, 17 nt, Variola virus
aaucguuuuugaaggau

SEQ ID NO: 3287251 - RNA, 18 nt, Variola virus
aacaagagcagauaucua

SEQ ID NO: 3287252 - RNA, 22 nt, Variola virus
acuucgacagccaucuuaaaau

SEQ ID NO: 3287253 - RNA, 19 nt, Variola virus
auaagaugucuaugaauau

SEQ ID NO: 3287254 - RNA, 22 nt, Variola virus
caucaaaaauaaguaaaaagug

SEQ ID NO: 3287255 - RNA, 18 nt, Variola virus
auuuauuguaacaguauu

SEQ ID NO: 3287256 - RNA, 16 nt, Variola virus
cguuuaaagucauuau

SEQ ID NO: 3287257 - RNA, 17 nt, Variola virus
uaguggaucucaaugac

SEQ ID NO: 3287258 - RNA, 16 nt, Variola virus
uagaauuugaucuauu

SEQ ID NO: 3287259 - RNA, 13 nt, Variola virus
ucuacaauuauug

SEQ ID NO: 3287260 - RNA, 16 nt, Variola virus
cauuagcaaucuuuua

SEQ ID NO: 3287261 - RNA, 21 nt, Variola virus
uuauuccacacacucuacaau

SEQ ID NO: 3287262 - RNA, 16 nt, Variola virus
cauaauagaauguauu

SEQ ID NO: 3287263 - RNA, 16 nt, Variola virus
caaauaaaauucugau

SEQ ID NO: 3287264 - RNA, 13 nt, Variola virus
caacacuauguua

SEQ ID NO: 3287265 - RNA, 17 nt, Variola virus
ucaauagauuauacauc

SEQ ID NO: 3287266 - RNA, 20 nt, Variola virus
aacauugcagccauuuucua

SEQ ID NO: 3287267 - RNA, 14 nt, Variola virus
uaugacuuaauagc

SEQ ID NO: 3287268 - RNA, 15 nt, Variola virus
auuggauuggauaau

SEQ ID NO: 3287269 - RNA, 22 nt, Variola virus
aaacucuuuagcgguauaauua

SEQ ID NO: 3287270 - RNA, 15 nt, Variola virus
uacaucgcauacaaa

SEQ ID NO: 3287271 - RNA, 16 nt, Variola virus
cauuaaucuauuagaa

SEQ ID NO: 3287272 - RNA, 16 nt, Variola virus
uugauaaaaauuaaaa

SEQ ID NO: 3287273 - RNA, 20 nt, Variola virus
uguucaaugcaauagaugcc

SEQ ID NO: 3287274 - RNA, 15 nt, Variola virus
auuuuauuucaaaau

SEQ ID NO: 3287275 - RNA, 17 nt, Variola virus
uacauccaaaauacaaa

SEQ ID NO: 3287276 - RNA, 11 nt, Variola virus
uuuuuuggaau

SEQ ID NO: 3287277 - RNA, 16 nt, Variola virus
aauuauuauuaaauau

SEQ ID NO: 3287278 - RNA, 18 nt, Variola virus
cuaugucaaaaauuguag

SEQ ID NO: 3287279 - RNA, 17 nt, Variola virus
uuuaacuagucuucucu

SEQ ID NO: 3287280 - RNA, 17 nt, Variola virus
guaacuauguaaaugau

SEQ ID NO: 3287281 - RNA, 20 nt, Variola virus
aauauagaacaucauuucca

SEQ ID NO: 3287282 - RNA, 19 nt, Variola virus
cuuuaacauauguaucaau

SEQ ID NO: 3287283 - RNA, 14 nt, Variola virus
acagacauacagua

SEQ ID NO: 3287284 - RNA, 17 nt, Variola virus
uguagauggauguagca

SEQ ID NO: 3287285 - RNA, 21 nt, Variola virus
augaccauuuaaaaaaacacu

SEQ ID NO: 3287286 - RNA, 16 nt, Variola virus
ggucuucggaaaaaga

SEQ ID NO: 3287287 - RNA, 19 nt, Variola virus
gauacuaauuguagcuauu

SEQ ID NO: 3287288 - RNA, 22 nt, Variola virus
guauuuuuguuagaguauauaa

SEQ ID NO: 3287289 - RNA, 20 nt, Variola virus
uacaauaauuauaauuauua

SEQ ID NO: 3287290 - RNA, 14 nt, Variola virus
aaauuaauauuucu

SEQ ID NO: 3287291 - RNA, 14 nt, Variola virus
uuaucuauuauuua

SEQ ID NO: 3287292 - RNA, 21 nt, Variola virus
gaaaguaugauauaauacuua

SEQ ID NO: 3287293 - RNA, 15 nt, Variola virus
aaaaagcuauuauca

SEQ ID NO: 3287294 - RNA, 20 nt, Variola virus
auucaagcgaauuacucugu

SEQ ID NO: 3287295 - RNA, 22 nt, Variola virus
agauucucauuugauaaaaauu

SEQ ID NO: 3287296 - RNA, 17 nt, Variola virus
uccaguccaguguauaa

SEQ ID NO: 3287297 - RNA, 19 nt, Variola virus
cuauauucuugauguagua

SEQ ID NO: 3287298 - RNA, 13 nt, Variola virus
agcuauuuaaaug

SEQ ID NO: 3287299 - RNA, 17 nt, Variola virus
uaauccugguacauacg

SEQ ID NO: 3287300 - RNA, 23 nt, Variola virus
auuucuacauaauuauauauugu

SEQ ID NO: 3287301 - RNA, 21 nt, Variola virus
gacuuauuaaaaaacauauau

SEQ ID NO: 3287302 - RNA, 12 nt, Variola virus
aauuuuuagagg

SEQ ID NO: 3287303 - RNA, 21 nt, Variola virus
gacauuauaauuuuaccaaua

SEQ ID NO: 3287304 - RNA, 11 nt, Variola virus
ggaauauacaa

SEQ ID NO: 3287305 - RNA, 20 nt, Variola virus
ucauuaagguucuuauaauc

SEQ ID NO: 3287306 - RNA, 12 nt, Variola virus
gcauagaaauac

SEQ ID NO: 3287307 - RNA, 17 nt, Variola virus
cuuuaaguauauacgau

SEQ ID NO: 3287308 - RNA, 15 nt, Variola virus
aauuugauaaagaua

SEQ ID NO: 3287309 - RNA, 20 nt, Variola virus
auguuaaaacuacaaaaaug

SEQ ID NO: 3287310 - RNA, 19 nt, Variola virus
aaauaagaucaguaacagu

SEQ ID NO: 3287311 - RNA, 19 nt, Variola virus
gaaccauuacaaauauuau

SEQ ID NO: 3287312 - RNA, 18 nt, Variola virus
gaacaauaaacaaaauac

SEQ ID NO: 3287313 - RNA, 19 nt, Variola virus
auaugcuuuuauuuuugga

SEQ ID NO: 3287314 - RNA, 17 nt, Variola virus
aucaaaaaguaagauau

SEQ ID NO: 3287315 - RNA, 21 nt, Variola virus
guuuggagacuaauucuuuuu

SEQ ID NO: 3287316 - RNA, 13 nt, Variola virus
auaaaacauucuc

SEQ ID NO: 3287317 - RNA, 14 nt, Variola virus
acauccgaaaaagu

SEQ ID NO: 3287318 - RNA, 17 nt, Variola virus
uaauuuauacaaaguau

SEQ ID NO: 3287319 - RNA, 22 nt, Variola virus
uccacuucugcagaauaauuag

SEQ ID NO: 3287320 - RNA, 21 nt, Variola virus
acugaacgaugguuuucacau

SEQ ID NO: 3287321 - RNA, 18 nt, Variola virus
uuaauuccagauguugua

SEQ ID NO: 3287322 - RNA, 15 nt, Variola virus
gccaaaaugauagau

SEQ ID NO: 3287323 - RNA, 18 nt, Variola virus
auaguuauuacuuuucuc

SEQ ID NO: 3287324 - RNA, 13 nt, Variola virus
uauacuccauuaa

SEQ ID NO: 3287325 - RNA, 18 nt, Variola virus
ugguauuucuuacauaaa

SEQ ID NO: 3287326 - RNA, 14 nt, Variola virus
auccacaauuauug

SEQ ID NO: 3287327 - RNA, 17 nt, Variola virus
uacaaaauguugauaau

SEQ ID NO: 3287328 - RNA, 21 nt, Variola virus
cagaauauacuuuguguuuca

SEQ ID NO: 3287329 - RNA, 21 nt, Variola virus
uaaagauauucuaaaauggua

SEQ ID NO: 3287330 - RNA, 22 nt, Variola virus
gccccgcuucuauuuacucccg

SEQ ID NO: 3287331 - RNA, 19 nt, Variola virus
uuuaaaagacucagaagag

SEQ ID NO: 3287332 - RNA, 15 nt, Variola virus
uacuacuauuauuga

SEQ ID NO: 3287333 - RNA, 16 nt, Variola virus
aucucuuuuuaacuaa

SEQ ID NO: 3287334 - RNA, 21 nt, Variola virus
gcguugauuaaaaaagaucaa

SEQ ID NO: 3287335 - RNA, 19 nt, Variola virus
uauauaauccaucaacaau

SEQ ID NO: 3287336 - RNA, 12 nt, Variola virus
gaacaugaugau

SEQ ID NO: 3287337 - RNA, 23 nt, Variola virus
ccuuugauaaauaguaucaucua

SEQ ID NO: 3287338 - RNA, 19 nt, Variola virus
ccagaguguucgaaugcca

SEQ ID NO: 3287339 - RNA, 14 nt, Variola virus
agucauaaaucauu

SEQ ID NO: 3287340 - RNA, 21 nt, Variola virus
uauaucuagaguaauguuuaa

SEQ ID NO: 3287341 - RNA, 14 nt, Variola virus
uuucgucaacaagu

SEQ ID NO: 3287342 - RNA, 18 nt, Variola virus
auauauuugaaaaucguu

SEQ ID NO: 3287343 - RNA, 18 nt, Variola virus
uaguaaaaaauauacauc

SEQ ID NO: 3287344 - RNA, 16 nt, Variola virus
aaucuguacuucuaua

SEQ ID NO: 3287345 - RNA, 20 nt, Variola virus
cuuaucuucuauaucaucua

SEQ ID NO: 3287346 - RNA, 18 nt, Variola virus
agacauauuaauaagacu

SEQ ID NO: 3287347 - RNA, 14 nt, Variola virus
acauaccauggaaa

SEQ ID NO: 3287348 - RNA, 22 nt, Variola virus
acuuugcauucuaucucaaaau

SEQ ID NO: 3287349 - RNA, 14 nt, Variola virus
acaaccaucuuuga

SEQ ID NO: 3287350 - RNA, 19 nt, Variola virus
guaucuaauauagauuuua

SEQ ID NO: 3287351 - RNA, 18 nt, Variola virus
gcauaaacuauacuauga

SEQ ID NO: 3287352 - RNA, 20 nt, Variola virus
ucgaugaaauaucugauguu

SEQ ID NO: 3287353 - RNA, 13 nt, Variola virus
auuaucugaaaug

SEQ ID NO: 3287354 - RNA, 16 nt, Variola virus
auuagguuaaaugauu

SEQ ID NO: 3287355 - RNA, 12 nt, Variola virus
cuauagauggag

SEQ ID NO: 3287356 - RNA, 20 nt, Variola virus
uaauuuuagauaauauacca

SEQ ID NO: 3287357 - RNA, 13 nt, Variola virus
agauuaaaaaugg

SEQ ID NO: 3287358 - RNA, 20 nt, Variola virus
ugaauaucuaggaguaauua

SEQ ID NO: 3287359 - RNA, 20 nt, Variola virus
auaugacgcgcguucaacau

SEQ ID NO: 3287360 - RNA, 18 nt, Variola virus
ugaagauguagcauucca

SEQ ID NO: 3287361 - RNA, 16 nt, Variola virus
agaggaguuauuuacu

SEQ ID NO: 3287362 - RNA, 18 nt, Variola virus
acuuacuaaagucaauaa

SEQ ID NO: 3287363 - RNA, 18 nt, Variola virus
accgauaauagacuauca

SEQ ID NO: 3287364 - RNA, 17 nt, Variola virus
uaaaaugguauuucauu

SEQ ID NO: 3287365 - RNA, 17 nt, Variola virus
guauaauauuuaaacaa

SEQ ID NO: 3287366 - RNA, 14 nt, Variola virus
agauguauacuccu

SEQ ID NO: 3287367 - RNA, 21 nt, Variola virus
agaaccgucauucaucuagaa

SEQ ID NO: 3287368 - RNA, 19 nt, Variola virus
ugaacacacgaugaaaaug

SEQ ID NO: 3287369 - RNA, 14 nt, Variola virus
gaucucgaugaaaa

SEQ ID NO: 3287370 - RNA, 19 nt, Variola virus
agcugucguucaagaucag

SEQ ID NO: 3287371 - RNA, 13 nt, Variola virus
agaugaaaaaugg

SEQ ID NO: 3287372 - RNA, 14 nt, Variola virus
uuuugguucuucuc

SEQ ID NO: 3287373 - RNA, 18 nt, Variola virus
aacguacaaauggauaaa

SEQ ID NO: 3287374 - RNA, 17 nt, Variola virus
cauccuuuauuaaauca

SEQ ID NO: 3287375 - RNA, 18 nt, Variola virus
agcaucuccaauacguua

SEQ ID NO: 3287376 - RNA, 21 nt, Variola virus
aguauuuuucaaaaaauguau

SEQ ID NO: 3287377 - RNA, 23 nt, Variola virus
uaaucaguacguucuucauuuau

SEQ ID NO: 3287378 - RNA, 15 nt, Variola virus
aaugauauaucuugu

SEQ ID NO: 3287379 - RNA, 23 nt, Variola virus
auaaaucacuaaauaauauccca

SEQ ID NO: 3287380 - RNA, 17 nt, Variola virus
ucggauaauauguaaaa

SEQ ID NO: 3287381 - RNA, 17 nt, Variola virus
aauuuuuuaaauccugu

SEQ ID NO: 3287382 - RNA, 15 nt, Variola virus
uauagcaauaugugu

SEQ ID NO: 3287383 - RNA, 14 nt, Variola virus
agcaaaaaaugaua

SEQ ID NO: 3287384 - RNA, 21 nt, Variola virus
cugcggauauaaagucaucgu

SEQ ID NO: 3287385 - RNA, 16 nt, Variola virus
cgucauucuaaaagac

SEQ ID NO: 3287386 - RNA, 16 nt, Variola virus
uacuguucauacauga

SEQ ID NO: 3287387 - RNA, 23 nt, Variola virus
gauguaugcaaaucaguauauaa

SEQ ID NO: 3287388 - RNA, 16 nt, Variola virus
aggggaugaaucauug

SEQ ID NO: 3287389 - RNA, 19 nt, Variola virus
uucauguuuaaaaugaucu

SEQ ID NO: 3287390 - RNA, 22 nt, Variola virus
uaguuauggcacucuuauuaua

SEQ ID NO: 3287391 - RNA, 13 nt, Variola virus
auuuuagacacua

SEQ ID NO: 3287392 - RNA, 20 nt, Variola virus
auacauuuccgaaugaaugu

SEQ ID NO: 3287393 - RNA, 14 nt, Variola virus
guauuauauaugua

SEQ ID NO: 3287394 - RNA, 17 nt, Variola virus
aaagcgugugcguguau

SEQ ID NO: 3287395 - RNA, 16 nt, Variola virus
uggauacuaauuguag

SEQ ID NO: 3287396 - RNA, 22 nt, Variola virus
aaauuuguucgucugucaugau

SEQ ID NO: 3287397 - RNA, 16 nt, Variola virus
uuucgcuguauaauaa

SEQ ID NO: 3287398 - RNA, 17 nt, Variola virus
uagcccucuucaagaac

SEQ ID NO: 3287399 - RNA, 15 nt, Variola virus
gaucuaaaaaaaacu

SEQ ID NO: 3287400 - RNA, 16 nt, Variola virus
auuuuuaguuacagaa

SEQ ID NO: 3287401 - RNA, 17 nt, Variola virus
cuuuuaacaugauguaa

SEQ ID NO: 3287402 - RNA, 23 nt, Variola virus
gaauggaaaccuuuaaucuauau

SEQ ID NO: 3287403 - RNA, 20 nt, Variola virus
aaaauguucuuaauagucua

SEQ ID NO: 3287404 - RNA, 14 nt, Variola virus
uaaaauuagaucuu

SEQ ID NO: 3287405 - RNA, 15 nt, Variola virus
auauagcuuauucca

SEQ ID NO: 3287406 - RNA, 18 nt, Variola virus
auuuggagcuuuaauagu

SEQ ID NO: 3287407 - RNA, 20 nt, Variola virus
agugcagauaaucauuuaau

SEQ ID NO: 3287408 - RNA, 17 nt, Variola virus
ugacaaauguaguaaau

SEQ ID NO: 3287409 - RNA, 15 nt, Variola virus
uauacggauuucuau

SEQ ID NO: 3287410 - RNA, 20 nt, Variola virus
ucugguaccuauucuagaaa

SEQ ID NO: 3287411 - RNA, 16 nt, Variola virus
uugauaucuuuagaua

SEQ ID NO: 3287412 - RNA, 14 nt, Variola virus
ugacuuacauaaau

SEQ ID NO: 3287413 - RNA, 13 nt, Variola virus
auccuugacuauc

SEQ ID NO: 3287414 - RNA, 22 nt, Variola virus
auacuacauuaaaacuuaaaaa

SEQ ID NO: 3287415 - RNA, 21 nt, Variola virus
aucccaaaaccguuaaaaugu

SEQ ID NO: 3287416 - RNA, 19 nt, Variola virus
caaugacauggaaauaucu

SEQ ID NO: 3287417 - RNA, 22 nt, Variola virus
uaaaguccgcacuacuguuaag

SEQ ID NO: 3287418 - RNA, 15 nt, Variola virus
uuaugaaucauuaaa

SEQ ID NO: 3287419 - RNA, 19 nt, Variola virus
aauuaguagaaaauacaac

SEQ ID NO: 3287420 - RNA, 18 nt, Variola virus
gguuucggaacauauucu

SEQ ID NO: 3287421 - RNA, 18 nt, Variola virus
ugauauuuauuuugcuau

SEQ ID NO: 3287422 - RNA, 19 nt, Variola virus
cauauuuagaaaaaagauu

SEQ ID NO: 3287423 - RNA, 19 nt, Variola virus
uuagucgccgucucuauaa

SEQ ID NO: 3287424 - RNA, 13 nt, Variola virus
ugagaaugugauu

SEQ ID NO: 3287425 - RNA, 18 nt, Variola virus
ucugacaauauuuaguuu

SEQ ID NO: 3287426 - RNA, 20 nt, Variola virus
auuaaauaucauuuuuugaa

SEQ ID NO: 3287427 - RNA, 13 nt, Variola virus
aucacuaaaauaa

SEQ ID NO: 3287428 - RNA, 16 nt, Variola virus
aacauuccaaagauca

SEQ ID NO: 3287429 - RNA, 17 nt, Variola virus
uaauauagaaaauucau

SEQ ID NO: 3287430 - RNA, 23 nt, Variola virus
agcgcauguacauauuuguacau

SEQ ID NO: 3287431 - RNA, 14 nt, Variola virus
auaaacaugucuau

SEQ ID NO: 3287432 - RNA, 13 nt, Variola virus
uaauagacuauau

SEQ ID NO: 3287433 - RNA, 17 nt, Variola virus
auuuuaucuuuuagagg

SEQ ID NO: 3287434 - RNA, 13 nt, Variola virus
aaaaaggaaucua

SEQ ID NO: 3287435 - RNA, 19 nt, Variola virus
cugguauuuauaugugcau

SEQ ID NO: 3287436 - RNA, 24 nt, Variola virus
acuaauucuuuuucauuaacuaga

SEQ ID NO: 3287437 - RNA, 20 nt, Variola virus
uaauauaaaucaaauacuug

SEQ ID NO: 3287438 - RNA, 14 nt, Variola virus
uacauuuguaucua

SEQ ID NO: 3287439 - RNA, 17 nt, Variola virus
aauugaccguguaauau

SEQ ID NO: 3287440 - RNA, 18 nt, Variola virus
gauaacguauuaaauauu

SEQ ID NO: 3287441 - RNA, 14 nt, Variola virus
auacucuaaucuuu

SEQ ID NO: 3287442 - RNA, 21 nt, Variola virus
auauggucucaacgcaaacuu

SEQ ID NO: 3287443 - RNA, 21 nt, Variola virus
uuauuggcguuggaaaaauua

SEQ ID NO: 3287444 - RNA, 21 nt, Variola virus
auauauucgcauauauuccca

SEQ ID NO: 3287445 - RNA, 22 nt, Variola virus
cagauuaauaguuuuauuugaa

SEQ ID NO: 3287446 - RNA, 17 nt, Variola virus
aagacuaauuuguaaac

SEQ ID NO: 3287447 - RNA, 13 nt, Variola virus
uguucccaucauu

SEQ ID NO: 3287448 - RNA, 22 nt, Variola virus
guaugccauuuacuuaauauga

SEQ ID NO: 3287449 - RNA, 20 nt, Variola virus
uucagauauaaaaaucuguu

SEQ ID NO: 3287450 - RNA, 18 nt, Variola virus
uuagacaugaauguggua

SEQ ID NO: 3287451 - RNA, 20 nt, Variola virus
uuaaggaauacaauacauac

SEQ ID NO: 3287452 - RNA, 12 nt, Variola virus
aaacuauacgaa

SEQ ID NO: 3287453 - RNA, 23 nt, Variola virus
uucacagauagaucauuuugaac

SEQ ID NO: 3287454 - RNA, 14 nt, Variola virus
ucccaauuccaaag

SEQ ID NO: 3287455 - RNA, 19 nt, Variola virus
gcagacuagaaauaacagg

SEQ ID NO: 3287456 - RNA, 15 nt, Variola virus
gaauuaauguccuga

SEQ ID NO: 3287457 - RNA, 24 nt, Variola virus
auggauuuggucauaauagaaugu

SEQ ID NO: 3287458 - RNA, 21 nt, Variola virus
aaauuauuuaauuuaauacau

SEQ ID NO: 3287459 - RNA, 13 nt, Variola virus
auguuucaaucau

SEQ ID NO: 3287460 - RNA, 15 nt, Variola virus
agaaaguaugauaua

SEQ ID NO: 3287461 - RNA, 22 nt, Variola virus
uggcuaauugucuuucucuuuu

SEQ ID NO: 3287462 - RNA, 14 nt, Variola virus
aacgauauuaaccu

SEQ ID NO: 3287463 - RNA, 14 nt, Variola virus
aguaagcauuuccu

SEQ ID NO: 3287464 - RNA, 21 nt, Variola virus
ucaggaacauaaacaaauucu

SEQ ID NO: 3287465 - RNA, 21 nt, Variola virus
cagaaauugugucauugacau

SEQ ID NO: 3287466 - RNA, 18 nt, Variola virus
aucaugucuaaugaugaa

SEQ ID NO: 3287467 - RNA, 16 nt, Variola virus
uaagcugucuaucaag

SEQ ID NO: 3287468 - RNA, 13 nt, Variola virus
uagaucaaacuua

SEQ ID NO: 3287469 - RNA, 20 nt, Variola virus
aaaaagcuccauauuacaaa

SEQ ID NO: 3287470 - RNA, 15 nt, Variola virus
uguauuuugaggaaa

SEQ ID NO: 3287471 - RNA, 15 nt, Variola virus
aauccagauaauaac

SEQ ID NO: 3287472 - RNA, 14 nt, Variola virus
auuaaaucaugaag

SEQ ID NO: 3287473 - RNA, 15 nt, Variola virus
uuucaagauaaauaa

SEQ ID NO: 3287474 - RNA, 18 nt, Variola virus
auaaucucaauuagaaua

SEQ ID NO: 3287475 - RNA, 17 nt, Variola virus
gauuuaucuaguuuauc

SEQ ID NO: 3287476 - RNA, 23 nt, Variola virus
uuaugauauaaggaaacagcuuu

SEQ ID NO: 3287477 - RNA, 23 nt, Variola virus
uguaaacuugacaaaaauuguga

SEQ ID NO: 3287478 - RNA, 20 nt, Variola virus
agucuagcagccaauacuuu

SEQ ID NO: 3287479 - RNA, 12 nt, Variola virus
cuaaugaugcag

SEQ ID NO: 3287480 - RNA, 18 nt, Variola virus
aacucauuacuuacgaua

SEQ ID NO: 3287481 - RNA, 12 nt, Variola virus
uaagugaugcau

SEQ ID NO: 3287482 - RNA, 15 nt, Variola virus
cuaccgaucucuuua

SEQ ID NO: 3287483 - RNA, 17 nt, Variola virus
cuauaaugacaauaaaa

SEQ ID NO: 3287484 - RNA, 23 nt, Variola virus
ucagaaauuacaaacacuacaac

SEQ ID NO: 3287485 - RNA, 16 nt, Variola virus
cccacugaugagaugu

SEQ ID NO: 3287486 - RNA, 16 nt, Variola virus
guaaauccuaguucug

SEQ ID NO: 3287487 - RNA, 20 nt, Variola virus
ccuuuacaucucgcaauaau

SEQ ID NO: 3287488 - RNA, 14 nt, Variola virus
uagauuaaugcuua

SEQ ID NO: 3287489 - RNA, 20 nt, Variola virus
uaacacuuucuuugauuuaa

SEQ ID NO: 3287490 - RNA, 17 nt, Variola virus
aucucccauuaucuugg

SEQ ID NO: 3287491 - RNA, 18 nt, Variola virus
caaaacuauuccaauguu

SEQ ID NO: 3287492 - RNA, 19 nt, Variola virus
uucauaaaagaaaauacua

SEQ ID NO: 3287493 - RNA, 24 nt, Variola virus
aaacugguaauccacauaguugua

SEQ ID NO: 3287494 - RNA, 22 nt, Variola virus
acgacuuucucgcgucauauau

SEQ ID NO: 3287495 - RNA, 15 nt, Variola virus
augucuccaauuuuu

SEQ ID NO: 3287496 - RNA, 15 nt, Variola virus
agcuauauagaugac

SEQ ID NO: 3287497 - RNA, 18 nt, Variola virus
caagauuuguagaagcau

SEQ ID NO: 3287498 - RNA, 15 nt, Variola virus
agaaaauuuaauaaa

SEQ ID NO: 3287499 - RNA, 21 nt, Variola virus
acuaucauaauuaaauuauug

SEQ ID NO: 3287500 - RNA, 16 nt, Variola virus
uauucauauucuuaaa

SEQ ID NO: 3287501 - RNA, 17 nt, Variola virus
caaaauagguacucugu

SEQ ID NO: 3287502 - RNA, 21 nt, Variola virus
cuccuccguuguuuuuucccu

SEQ ID NO: 3287503 - RNA, 18 nt, Variola virus
cuaucuccucuauucaua

SEQ ID NO: 3287504 - RNA, 23 nt, Variola virus
aacaugguaucuauuuuaaauac

SEQ ID NO: 3287505 - RNA, 19 nt, Variola virus
gaacagcuuuuguauauac

SEQ ID NO: 3287506 - RNA, 22 nt, Variola virus
uguuucuacuaacuuuuuggua

SEQ ID NO: 3287507 - RNA, 15 nt, Variola virus
aauuacauuucuugu

SEQ ID NO: 3287508 - RNA, 15 nt, Variola virus
augauuguaaugaac

SEQ ID NO: 3287509 - RNA, 23 nt, Variola virus
acgaacgucuccaauauaugaua

SEQ ID NO: 3287510 - RNA, 21 nt, Variola virus
uugguaauauggauacuaauu

SEQ ID NO: 3287511 - RNA, 20 nt, Variola virus
uauaaacguauacuguagau

SEQ ID NO: 3287512 - RNA, 20 nt, Variola virus
gcuauagaggacaauaauau

SEQ ID NO: 3287513 - RNA, 21 nt, Variola virus
aauauuggcuuuucuuuauca

SEQ ID NO: 3287514 - RNA, 21 nt, Variola virus
uaugaccgguuuaauguuaua

SEQ ID NO: 3287515 - RNA, 20 nt, Variola virus
agauaaaccguuuauguauu

SEQ ID NO: 3287516 - RNA, 15 nt, Variola virus
uuucuggcuaagaag

SEQ ID NO: 3287517 - RNA, 23 nt, Variola virus
ggaaaagaauuuaccagauaucu

SEQ ID NO: 3287518 - RNA, 17 nt, Variola virus
cuaccguuguuaaauac

SEQ ID NO: 3287519 - RNA, 14 nt, Variola virus
aagauaaucuucuc

SEQ ID NO: 3287520 - RNA, 15 nt, Variola virus
auaaaacaaaaucua

SEQ ID NO: 3287521 - RNA, 18 nt, Variola virus
aguauacuaucgucauuu

SEQ ID NO: 3287522 - RNA, 15 nt, Variola virus
guauuggauaaagga

SEQ ID NO: 3287523 - RNA, 23 nt, Variola virus
auaagaugacuguagaacucaug

SEQ ID NO: 3287524 - RNA, 21 nt, Variola virus
aacaguucuaccaccaguaau

SEQ ID NO: 3287525 - RNA, 19 nt, Variola virus
aagauuaugauccaaugug

SEQ ID NO: 3287526 - RNA, 17 nt, Variola virus
auuauuaguugauguga

SEQ ID NO: 3287527 - RNA, 15 nt, Variola virus
uuuucuuuguuggaa

SEQ ID NO: 3287528 - RNA, 17 nt, Variola virus
caauagugguaacgcua

SEQ ID NO: 3287529 - RNA, 12 nt, Variola virus
caucuaauaauu

SEQ ID NO: 3287530 - RNA, 16 nt, Variola virus
aaaucuagagguagaa

SEQ ID NO: 3287531 - RNA, 14 nt, Variola virus
aucuacacaaauag

SEQ ID NO: 3287532 - RNA, 18 nt, Variola virus
aaaucaaaauccauauca

SEQ ID NO: 3287533 - RNA, 23 nt, Variola virus
gaacccauaaauacaccaaauau

SEQ ID NO: 3287534 - RNA, 13 nt, Variola virus
uugaugauagcaa

SEQ ID NO: 3287535 - RNA, 13 nt, Variola virus
cauggcaauaaua

SEQ ID NO: 3287536 - RNA, 23 nt, Variola virus
agugugaauaugaucuucaucua

SEQ ID NO: 3287537 - RNA, 14 nt, Variola virus
uacuaaaggaugag

SEQ ID NO: 3287538 - RNA, 19 nt, Variola virus
auaaccggcgcugucaugu

SEQ ID NO: 3287539 - RNA, 21 nt, Variola virus
acuuucaaugagauaaauaug

SEQ ID NO: 3287540 - RNA, 16 nt, Variola virus
agauauaugaacgaua

SEQ ID NO: 3287541 - RNA, 20 nt, Variola virus
uuacugaggggaaaaucaau

SEQ ID NO: 3287542 - RNA, 18 nt, Variola virus
uagcuccccuguuuucau

SEQ ID NO: 3287543 - RNA, 23 nt, Variola virus
uuuccuauaaucguuaaauuuua

SEQ ID NO: 3287544 - RNA, 13 nt, Variola virus
aggaugaauuuga

SEQ ID NO: 3287545 - RNA, 17 nt, Variola virus
agaggcagucggauugg

SEQ ID NO: 3287546 - RNA, 17 nt, Variola virus
aggauuguauaaauuac

SEQ ID NO: 3287547 - RNA, 13 nt, Variola virus
auaaauuauacuc

SEQ ID NO: 3287548 - RNA, 20 nt, Variola virus
uccuugugcuuaauguuucc

SEQ ID NO: 3287549 - RNA, 13 nt, Variola virus
acaaauacugaca

SEQ ID NO: 3287550 - RNA, 15 nt, Variola virus
auuaaaaauaaaguu

SEQ ID NO: 3287551 - RNA, 15 nt, Variola virus
caauagauuauacau

SEQ ID NO: 3287552 - RNA, 15 nt, Variola virus
cuacaauacacacaa

SEQ ID NO: 3287553 - RNA, 14 nt, Variola virus
ggaauuguauuuuc

SEQ ID NO: 3287554 - RNA, 16 nt, Variola virus
uguaauuuuuguuuca

SEQ ID NO: 3287555 - RNA, 13 nt, Variola virus
auaagaacuauau

SEQ ID NO: 3287556 - RNA, 17 nt, Variola virus
auuucuagaaaaaauua

SEQ ID NO: 3287557 - RNA, 22 nt, Variola virus
ucauuugcucggcaguaaucaa

SEQ ID NO: 3287558 - RNA, 17 nt, Variola virus
aguauaaacgacauaau

SEQ ID NO: 3287559 - RNA, 16 nt, Variola virus
aggauacuuuaugaau

SEQ ID NO: 3287560 - RNA, 24 nt, Variola virus
ugaacauauaguucgucauuuaau

SEQ ID NO: 3287561 - RNA, 11 nt, Variola virus
acuuuaaugau

SEQ ID NO: 3287562 - RNA, 21 nt, Variola virus
gauaccgaucacguucuaguu

SEQ ID NO: 3287563 - RNA, 13 nt, Variola virus
auaaaucauauaa

SEQ ID NO: 3287564 - RNA, 13 nt, Variola virus
aauauucauuaau

SEQ ID NO: 3287565 - RNA, 19 nt, Variola virus
uaauauuuuauuucaaaau

SEQ ID NO: 3287566 - RNA, 16 nt, Variola virus
cauuuuauuguggaau

SEQ ID NO: 3287567 - RNA, 14 nt, Variola virus
ugaaguagguuucu

SEQ ID NO: 3287568 - RNA, 18 nt, Variola virus
auaauguaaaaucaugau

SEQ ID NO: 3287569 - RNA, 13 nt, Variola virus
uaauagaacucuu

SEQ ID NO: 3287570 - RNA, 22 nt, Variola virus
cuauguauucagaauuaauaga

SEQ ID NO: 3287571 - RNA, 21 nt, Variola virus
aacucuuuuauagagaaaugu

SEQ ID NO: 3287572 - RNA, 20 nt, Variola virus
auucagacacuucuuaacga

SEQ ID NO: 3287573 - RNA, 16 nt, Variola virus
ugauuauaguuucuau

SEQ ID NO: 3287574 - RNA, 20 nt, Variola virus
aauauuguuaauuauuucua

SEQ ID NO: 3287575 - RNA, 13 nt, Variola virus
ucauuuccaaauc

SEQ ID NO: 3287576 - RNA, 14 nt, Variola virus
guaaaugauaacua

SEQ ID NO: 3287577 - RNA, 15 nt, Variola virus
aucccuuaaaaauua

SEQ ID NO: 3287578 - RNA, 15 nt, Variola virus
uaaauccgagaauau

SEQ ID NO: 3287579 - RNA, 14 nt, Variola virus
uacgauacuuauaa

SEQ ID NO: 3287580 - RNA, 16 nt, Variola virus
aacuagacaauaaugu

SEQ ID NO: 3287581 - RNA, 18 nt, Variola virus
caaauauauuacuagaca

SEQ ID NO: 3287582 - RNA, 22 nt, Variola virus
guuaauacuuauucauauuuua

SEQ ID NO: 3287583 - RNA, 16 nt, Variola virus
cguauuuuuuaugaau

SEQ ID NO: 3287584 - RNA, 14 nt, Variola virus
ucagaauaucucau

SEQ ID NO: 3287585 - RNA, 15 nt, Variola virus
uuacaagucaaagag

SEQ ID NO: 3287586 - RNA, 13 nt, Variola virus
aguuuuauuggga

SEQ ID NO: 3287587 - RNA, 17 nt, Variola virus
ucauuaaucauuucuaa

SEQ ID NO: 3287588 - RNA, 22 nt, Variola virus
uuguuggcgcgccucaaaugua

SEQ ID NO: 3287589 - RNA, 22 nt, Variola virus
ucggcaacauacuauuguacau

SEQ ID NO: 3287590 - RNA, 13 nt, Variola virus
acuuuuuacuaau

SEQ ID NO: 3287591 - RNA, 16 nt, Variola virus
ucauaauagaauguau

SEQ ID NO: 3287592 - RNA, 14 nt, Variola virus
aucucaucauucca

SEQ ID NO: 3287593 - RNA, 21 nt, Variola virus
cuaguuaagaacaugucuuca

SEQ ID NO: 3287594 - RNA, 15 nt, Variola virus
agaucgaaaaaagag

SEQ ID NO: 3287595 - RNA, 14 nt, Variola virus
aaggaugauacauu

SEQ ID NO: 3287596 - RNA, 19 nt, Variola virus
ucuauaucuagaaauaagu

SEQ ID NO: 3287597 - RNA, 15 nt, Variola virus
uuauaaaacauagau

SEQ ID NO: 3287598 - RNA, 21 nt, Variola virus
cugucaugauaaaaauuuaaa

SEQ ID NO: 3287599 - RNA, 19 nt, Variola virus
uguuucgaaacuuuaucaa

SEQ ID NO: 3287600 - RNA, 15 nt, Variola virus
ucuugguuaaacuca

SEQ ID NO: 3287601 - RNA, 19 nt, Variola virus
uuguaagguuguaaauuuu

SEQ ID NO: 3287602 - RNA, 22 nt, Variola virus
gccuaaacccgacuuaguuaua

SEQ ID NO: 3287603 - RNA, 21 nt, Variola virus
acgaugauauuaaaauuauuu

SEQ ID NO: 3287604 - RNA, 13 nt, Variola virus
agaauugucuauc

SEQ ID NO: 3287605 - RNA, 23 nt, Variola virus
uuuucagcuccccuacguaucua

SEQ ID NO: 3287606 - RNA, 16 nt, Variola virus
aaaacuuuaauaacaa

SEQ ID NO: 3287607 - RNA, 22 nt, Variola virus
caaguauuauuuuuggaagaca

SEQ ID NO: 3287608 - RNA, 18 nt, Variola virus
acuacugccauuaauauc

SEQ ID NO: 3287609 - RNA, 18 nt, Variola virus
uuaauccuuugauuauca

SEQ ID NO: 3287610 - RNA, 22 nt, Variola virus
auaucaucuuuucacuaaauaa

SEQ ID NO: 3287611 - RNA, 22 nt, Variola virus
caaucuuuuucuacgucaaauu

SEQ ID NO: 3287612 - RNA, 15 nt, Variola virus
cuaacacacaaugua

SEQ ID NO: 3287613 - RNA, 13 nt, Variola virus
auucagaaaugga

SEQ ID NO: 3287614 - RNA, 16 nt, Variola virus
cuaacgugauggauau

SEQ ID NO: 3287615 - RNA, 17 nt, Variola virus
aagaauugucuguaaac

SEQ ID NO: 3287616 - RNA, 21 nt, Variola virus
acaacuaauuaagcauauucu

SEQ ID NO: 3287617 - RNA, 21 nt, Variola virus
auagcauuguuauguauuuca

SEQ ID NO: 3287618 - RNA, 20 nt, Variola virus
uuuauaucacauuguauaua

SEQ ID NO: 3287619 - RNA, 20 nt, Variola virus
aaaguuuucuuucaaaauag

SEQ ID NO: 3287620 - RNA, 13 nt, Variola virus
gugcuaccaaagg

SEQ ID NO: 3287621 - RNA, 22 nt, Variola virus
auacaucggcuaccaaaguuau

SEQ ID NO: 3287622 - RNA, 19 nt, Variola virus
acuauuacagaaguuuuaa

SEQ ID NO: 3287623 - RNA, 13 nt, Variola virus
acaggcauauuag

SEQ ID NO: 3287624 - RNA, 17 nt, Variola virus
auaucccuuaaaaauua

SEQ ID NO: 3287625 - RNA, 17 nt, Variola virus
acucugggucauauuau

SEQ ID NO: 3287626 - RNA, 17 nt, Variola virus
auuuuuagacauuagau

SEQ ID NO: 3287627 - RNA, 20 nt, Variola virus
uuuuagccagagauaucaua

SEQ ID NO: 3287628 - RNA, 14 nt, Variola virus
gagaaauuauuccu

SEQ ID NO: 3287629 - RNA, 17 nt, Variola virus
ucgaauuucuacaaaag

SEQ ID NO: 3287630 - RNA, 13 nt, Variola virus
uauauuacgguau

SEQ ID NO: 3287631 - RNA, 15 nt, Variola virus
aucuguauaauaaga

SEQ ID NO: 3287632 - RNA, 16 nt, Variola virus
auaucuauucauaugc

SEQ ID NO: 3287633 - RNA, 18 nt, Variola virus
aucuaucuuaaagacuau

SEQ ID NO: 3287634 - RNA, 16 nt, Variola virus
auuacaauacauagau

SEQ ID NO: 3287635 - RNA, 13 nt, Variola virus
aucacaagaaguu

SEQ ID NO: 3287636 - RNA, 13 nt, Variola virus
aucauuaaaggau

SEQ ID NO: 3287637 - RNA, 20 nt, Variola virus
uccagcguuacuauacacaa

SEQ ID NO: 3287638 - RNA, 16 nt, Variola virus
guagaacguaaauuaa

SEQ ID NO: 3287639 - RNA, 14 nt, Variola virus
uaauccuuguaaug

SEQ ID NO: 3287640 - RNA, 20 nt, Variola virus
auaacaugaacgauaaacaa

SEQ ID NO: 3287641 - RNA, 22 nt, Variola virus
ucauuccaucauuuaagaaggc

SEQ ID NO: 3287642 - RNA, 19 nt, Variola virus
aguuucauaucguaacuga

SEQ ID NO: 3287643 - RNA, 14 nt, Variola virus
uauauucuaucaua

SEQ ID NO: 3287644 - RNA, 22 nt, Variola virus
auaaguauaguuuuaaacuaau

SEQ ID NO: 3287645 - RNA, 18 nt, Variola virus
uaugucuguacaaauguu

SEQ ID NO: 3287646 - RNA, 15 nt, Variola virus
auuuuuguugauaaa

SEQ ID NO: 3287647 - RNA, 22 nt, Variola virus
gauaguauaccaacuauauuac

SEQ ID NO: 3287648 - RNA, 15 nt, Variola virus
ucuauaauagauggu

SEQ ID NO: 3287649 - RNA, 19 nt, Variola virus
uguaacugucggaguagua

SEQ ID NO: 3287650 - RNA, 17 nt, Variola virus
uguagaugguucuuuaa

SEQ ID NO: 3287651 - RNA, 19 nt, Variola virus
ucaaauagauguucaucau

SEQ ID NO: 3287652 - RNA, 13 nt, Variola virus
gaaucaacauaua

SEQ ID NO: 3287653 - RNA, 17 nt, Variola virus
gaucacuguagugcuau

SEQ ID NO: 3287654 - RNA, 16 nt, Variola virus
gauuuccaaucuuuug

SEQ ID NO: 3287655 - RNA, 15 nt, Variola virus
guuuucauuauuauu

SEQ ID NO: 3287656 - RNA, 23 nt, Variola virus
agaauauauguauguaaaaauau

SEQ ID NO: 3287657 - RNA, 17 nt, Variola virus
uaaccaugaaagaaaga

SEQ ID NO: 3287658 - RNA, 17 nt, Variola virus
auccaaacccuugaucu

SEQ ID NO: 3287659 - RNA, 24 nt, Variola virus
uaucacuucaacgacaauagucaa

SEQ ID NO: 3287660 - RNA, 18 nt, Variola virus
caauaauaguaacauauu

SEQ ID NO: 3287661 - RNA, 15 nt, Variola virus
aagaacucuugaaga

SEQ ID NO: 3287662 - RNA, 23 nt, Variola virus
aucacuaccgaguuuaaaacuuc

SEQ ID NO: 3287663 - RNA, 16 nt, Variola virus
ucaucuuugauauuua

SEQ ID NO: 3287664 - RNA, 13 nt, Variola virus
aggaguauacaga

SEQ ID NO: 3287665 - RNA, 13 nt, Variola virus
ucggguuccaaac

SEQ ID NO: 3287666 - RNA, 19 nt, Variola virus
cuuuaucuaguuguuuaug

SEQ ID NO: 3287667 - RNA, 15 nt, Variola virus
ccuagaacaauguca

SEQ ID NO: 3287668 - RNA, 21 nt, Variola virus
auucuugcacacuauugacga

SEQ ID NO: 3287669 - RNA, 13 nt, Variola virus
uguagaacucaug

SEQ ID NO: 3287670 - RNA, 22 nt, Variola virus
gccccaggaucuccaacaaauu

SEQ ID NO: 3287671 - RNA, 16 nt, Variola virus
aaauaugauuuuguaa

SEQ ID NO: 3287672 - RNA, 20 nt, Variola virus
gacguuggcacaugaugaau

SEQ ID NO: 3287673 - RNA, 13 nt, Variola virus
ugaacaauacuac

SEQ ID NO: 3287674 - RNA, 14 nt, Variola virus
aaaucucguaguau

SEQ ID NO: 3287675 - RNA, 12 nt, Variola virus
cguuacuauuau

SEQ ID NO: 3287676 - RNA, 13 nt, Variola virus
auacuaaagaaac

SEQ ID NO: 3287677 - RNA, 15 nt, Variola virus
auaaucuguguuguu

SEQ ID NO: 3287678 - RNA, 19 nt, Variola virus
ucugcguguaaaaaguugu

SEQ ID NO: 3287679 - RNA, 17 nt, Variola virus
acuuguuuaacaaaguu

SEQ ID NO: 3287680 - RNA, 18 nt, Variola virus
uuccauaugaugaacuaa

SEQ ID NO: 3287681 - RNA, 18 nt, Variola virus
uagaacagauuuaacaau

SEQ ID NO: 3287682 - RNA, 19 nt, Variola virus
aauagcauagauauagaaa

SEQ ID NO: 3287683 - RNA, 17 nt, Variola virus
guucugggaauagaaac

SEQ ID NO: 3287684 - RNA, 14 nt, Variola virus
ugauaaauuguaca

SEQ ID NO: 3287685 - RNA, 16 nt, Variola virus
uacaacauuccaaaga

SEQ ID NO: 3287686 - RNA, 17 nt, Variola virus
gucuaauagaacaaaua

SEQ ID NO: 3287687 - RNA, 17 nt, Variola virus
ucaaggaugucauagau

SEQ ID NO: 3287688 - RNA, 16 nt, Variola virus
cuccgucauccuucac

SEQ ID NO: 3287689 - RNA, 21 nt, Variola virus
cauaaaauuaucgaggauauu

SEQ ID NO: 3287690 - RNA, 17 nt, Variola virus
aucuaugucuuuaucca

SEQ ID NO: 3287691 - RNA, 16 nt, Variola virus
uaauacccauguuuaa

SEQ ID NO: 3287692 - RNA, 22 nt, Variola virus
gauucugauaacauaaaaauau

SEQ ID NO: 3287693 - RNA, 17 nt, Variola virus
ucuauaauaucagaauu

SEQ ID NO: 3287694 - RNA, 13 nt, Variola virus
gucuaaugaugaa

SEQ ID NO: 3287695 - RNA, 17 nt, Variola virus
agauguugcuccuggau

SEQ ID NO: 3287696 - RNA, 12 nt, Variola virus
uauaugucuacc

SEQ ID NO: 3287697 - RNA, 14 nt, Variola virus
cacauuguaacuau

SEQ ID NO: 3287698 - RNA, 20 nt, Variola virus
agucuuaaccaagaaaucgu

SEQ ID NO: 3287699 - RNA, 16 nt, Variola virus
aaaguuaauauuuucu

SEQ ID NO: 3287700 - RNA, 16 nt, Variola virus
ucauuacuacuguaaa

SEQ ID NO: 3287701 - RNA, 14 nt, Variola virus
uuuguuagaguaua

SEQ ID NO: 3287702 - RNA, 21 nt, Variola virus
cuguaaauagaauaguauaau

SEQ ID NO: 3287703 - RNA, 21 nt, Variola virus
aacuguucaucguuuagaaua

SEQ ID NO: 3287704 - RNA, 17 nt, Variola virus
aauagaaaaaacaugug

SEQ ID NO: 3287705 - RNA, 19 nt, Variola virus
gaaucgguuuuauacuguu

SEQ ID NO: 3287706 - RNA, 17 nt, Variola virus
gaaauauaugagaugua

SEQ ID NO: 3287707 - RNA, 15 nt, Variola virus
cagucgaaacauauu

SEQ ID NO: 3287708 - RNA, 18 nt, Variola virus
gucauuccuuauacaauc

SEQ ID NO: 3287709 - RNA, 13 nt, Variola virus
gagagagaaauac

SEQ ID NO: 3287710 - RNA, 16 nt, Variola virus
uauccaucuaacaaaa

SEQ ID NO: 3287711 - RNA, 16 nt, Variola virus
gauacuaucaaaauau

SEQ ID NO: 3287712 - RNA, 18 nt, Variola virus
cuagagcaucaauguccu

SEQ ID NO: 3287713 - RNA, 15 nt, Variola virus
ggagaucuaaagaua

SEQ ID NO: 3287714 - RNA, 20 nt, Variola virus
ccugucuccuagcaauuagu

SEQ ID NO: 3287715 - RNA, 15 nt, Variola virus
caucuggauuucaga

SEQ ID NO: 3287716 - RNA, 22 nt, Variola virus
cagaaauuaguuuagagucaaa

SEQ ID NO: 3287717 - RNA, 22 nt, Variola virus
auuccuagagguacaacucauu

SEQ ID NO: 3287718 - RNA, 21 nt, Variola virus
gaauauuccucuaacagauau

SEQ ID NO: 3287719 - RNA, 16 nt, Variola virus
acuguggauacucugu

SEQ ID NO: 3287720 - RNA, 18 nt, Variola virus
aaucuuuguuaaauauug

SEQ ID NO: 3287721 - RNA, 21 nt, Variola virus
gucaucgaaaugguagauaua

SEQ ID NO: 3287722 - RNA, 15 nt, Variola virus
guauuauuaaaucau

SEQ ID NO: 3287723 - RNA, 22 nt, Variola virus
augauguguuauuuuuuaacug

SEQ ID NO: 3287724 - RNA, 22 nt, Variola virus
aauuauaccaauagauaauugu

SEQ ID NO: 3287725 - RNA, 16 nt, Variola virus
uuauguuggacauaag

SEQ ID NO: 3287726 - RNA, 15 nt, Variola virus
uguauucucuuacaa

SEQ ID NO: 3287727 - RNA, 15 nt, Variola virus
aucaaaagaaugauu

SEQ ID NO: 3287728 - RNA, 14 nt, Variola virus
uuauuguuugggua

SEQ ID NO: 3287729 - RNA, 22 nt, Variola virus
acaucguauaucgucuuuguua

SEQ ID NO: 3287730 - RNA, 13 nt, Variola virus
acaaacaucucac

SEQ ID NO: 3287731 - RNA, 12 nt, Variola virus
aauauuagaaaa

SEQ ID NO: 3287732 - RNA, 14 nt, Variola virus
ucuaccauuucauu

SEQ ID NO: 3287733 - RNA, 21 nt, Variola virus
uauccagugcguuucuacaaa

SEQ ID NO: 3287734 - RNA, 16 nt, Variola virus
caauggagaaauacuu

SEQ ID NO: 3287735 - RNA, 19 nt, Variola virus
caagugaaccuauaaugag

SEQ ID NO: 3287736 - RNA, 15 nt, Variola virus
uuaaacguauaaaaa

SEQ ID NO: 3287737 - RNA, 15 nt, Variola virus
auauauucgcauaua

SEQ ID NO: 3287738 - RNA, 15 nt, Variola virus
auaugacuaacuuau

SEQ ID NO: 3287739 - RNA, 17 nt, Variola virus
ugaacacacaacgcauc

SEQ ID NO: 3287740 - RNA, 20 nt, Variola virus
caucuucuuugauuaaugau

SEQ ID NO: 3287741 - RNA, 16 nt, Variola virus
acuauaaaauaaaaga

SEQ ID NO: 3287742 - RNA, 15 nt, Variola virus
acaaaaucaaauaau

SEQ ID NO: 3287743 - RNA, 20 nt, Variola virus
auacugcaauaauuuucaaa

SEQ ID NO: 3287744 - RNA, 20 nt, Variola virus
uucuuggauauagaauccaa

SEQ ID NO: 3287745 - RNA, 17 nt, Variola virus
gugaggaaauaaaucau

SEQ ID NO: 3287746 - RNA, 20 nt, Variola virus
ucaucaugauccuauucuaa

SEQ ID NO: 3287747 - RNA, 14 nt, Variola virus
agaauaucucuaac

SEQ ID NO: 3287748 - RNA, 16 nt, Variola virus
uuauugucuucuuaaa

SEQ ID NO: 3287749 - RNA, 16 nt, Variola virus
cuuaguaaacagucca

SEQ ID NO: 3287750 - RNA, 17 nt, Variola virus
cguauauagaugucaau

SEQ ID NO: 3287751 - RNA, 22 nt, Variola virus
gaacucuaaucaaaaucuuaau

SEQ ID NO: 3287752 - RNA, 15 nt, Variola virus
aggcgcccauuucaa

SEQ ID NO: 3287753 - RNA, 18 nt, Variola virus
ucuugauuacaaaaccaa

SEQ ID NO: 3287754 - RNA, 12 nt, Variola virus
cgagacuauuau

SEQ ID NO: 3287755 - RNA, 15 nt, Variola virus
auuccaucuacuaag

SEQ ID NO: 3287756 - RNA, 19 nt, Variola virus
aauuauuagcaaaaauaua

SEQ ID NO: 3287757 - RNA, 17 nt, Variola virus
augcauuauccaaaaua

SEQ ID NO: 3287758 - RNA, 21 nt, Variola virus
uuuacccuuugacauuaaaaa

SEQ ID NO: 3287759 - RNA, 16 nt, Variola virus
uacacaauauaaacac

SEQ ID NO: 3287760 - RNA, 19 nt, Variola virus
guuauacgucauuucaucu

SEQ ID NO: 3287761 - RNA, 23 nt, Variola virus
uaguguaccaauaugcgaaucau

SEQ ID NO: 3287762 - RNA, 14 nt, Variola virus
uagauaucaaaaua

SEQ ID NO: 3287763 - RNA, 13 nt, Variola virus
ucaaugaauuaug

SEQ ID NO: 3287764 - RNA, 21 nt, Variola virus
agcauuagcuaaaaaaauagu

SEQ ID NO: 3287765 - RNA, 13 nt, Variola virus
gccucuagauaua

SEQ ID NO: 3287766 - RNA, 14 nt, Variola virus
uacuguuaaaugua

SEQ ID NO: 3287767 - RNA, 22 nt, Variola virus
cguguauuaaauagaauauuua

SEQ ID NO: 3287768 - RNA, 19 nt, Variola virus
acuggaucguuuagaauac

SEQ ID NO: 3287769 - RNA, 19 nt, Variola virus
acuugaaagagauaauaga

SEQ ID NO: 3287770 - RNA, 18 nt, Variola virus
gcaaauugucuauaucua

SEQ ID NO: 3287771 - RNA, 11 nt, Variola virus
uacuuaaugaa

SEQ ID NO: 3287772 - RNA, 16 nt, Variola virus
gaucagguaaaacaau

SEQ ID NO: 3287773 - RNA, 13 nt, Variola virus
aagauuaggaaau

SEQ ID NO: 3287774 - RNA, 13 nt, Variola virus
guguuuagauauu

SEQ ID NO: 3287775 - RNA, 18 nt, Variola virus
acucgaacagauaguuua

SEQ ID NO: 3287776 - RNA, 23 nt, Variola virus
aauuucucucaucuguaggauau

SEQ ID NO: 3287777 - RNA, 12 nt, Variola virus
auaucugaugau

SEQ ID NO: 3287778 - RNA, 18 nt, Variola virus
ucaacguagaaaaaauag

SEQ ID NO: 3287779 - RNA, 17 nt, Variola virus
ccauuagguuaaaugau

SEQ ID NO: 3287780 - RNA, 13 nt, Variola virus
aacuguagaauuc

SEQ ID NO: 3287781 - RNA, 17 nt, Variola virus
aauccuuuuuuauaaaa

SEQ ID NO: 3287782 - RNA, 18 nt, Variola virus
auaaacggguguaaacaa

SEQ ID NO: 3287783 - RNA, 23 nt, Variola virus
acaucuaaaaaauccuuaaugau

SEQ ID NO: 3287784 - RNA, 12 nt, Variola virus
guuaauaaucuc

SEQ ID NO: 3287785 - RNA, 21 nt, Variola virus
uucuagugcuuguauguguua

SEQ ID NO: 3287786 - RNA, 11 nt, Variola virus
cuuuuuaggaa

SEQ ID NO: 3287787 - RNA, 18 nt, Variola virus
gacuguacgauacauaau

SEQ ID NO: 3287788 - RNA, 13 nt, Variola virus
uauauuaaaguca

SEQ ID NO: 3287789 - RNA, 14 nt, Variola virus
cagaggaacgccau

SEQ ID NO: 3287790 - RNA, 18 nt, Variola virus
auaacauuuuuuguaaau

SEQ ID NO: 3287791 - RNA, 14 nt, Variola virus
auaaagaaugaaug

SEQ ID NO: 3287792 - RNA, 21 nt, Variola virus
uacaauccuucguuaucucug

SEQ ID NO: 3287793 - RNA, 22 nt, Variola virus
caguugcgaacaacaacaaaau

SEQ ID NO: 3287794 - RNA, 21 nt, Variola virus
accaaguuaaauuuuacuuua

SEQ ID NO: 3287795 - RNA, 20 nt, Variola virus
gucgaauaacuguaauuuua

SEQ ID NO: 3287796 - RNA, 16 nt, Variola virus
gcauauuaguauauaa

SEQ ID NO: 3287797 - RNA, 13 nt, Variola virus
uguucgaggauau

SEQ ID NO: 3287798 - RNA, 11 nt, Variola virus
gaaaauacuua

SEQ ID NO: 3287799 - RNA, 21 nt, Variola virus
auaacagagccaucuguaaaa

SEQ ID NO: 3287800 - RNA, 12 nt, Variola virus
aauuuuucuuaa

SEQ ID NO: 3287801 - RNA, 21 nt, Variola virus
aacucauuuaaauaucauaau

SEQ ID NO: 3287802 - RNA, 15 nt, Variola virus
cauauuucauuucca

SEQ ID NO: 3287803 - RNA, 14 nt, Variola virus
ucaaagauuugaga

SEQ ID NO: 3287804 - RNA, 16 nt, Variola virus
agagaccgauaccuau

SEQ ID NO: 3287805 - RNA, 15 nt, Variola virus
ccgaaaauauugugu

SEQ ID NO: 3287806 - RNA, 17 nt, Variola virus
agaaccacgaaacuaau

SEQ ID NO: 3287807 - RNA, 22 nt, Variola virus
agaaucaagcuaggcuggaaac

SEQ ID NO: 3287808 - RNA, 21 nt, Variola virus
ugaaaacuaaaugguauacac

SEQ ID NO: 3287809 - RNA, 15 nt, Variola virus
cuuuugugaaaagau

SEQ ID NO: 3287810 - RNA, 16 nt, Variola virus
auaaaguuuauacaag

SEQ ID NO: 3287811 - RNA, 14 nt, Variola virus
aucauaaguuuaua

SEQ ID NO: 3287812 - RNA, 14 nt, Variola virus
auaugcucuagaua

SEQ ID NO: 3287813 - RNA, 18 nt, Variola virus
augcacagcgaagaauuc

SEQ ID NO: 3287814 - RNA, 16 nt, Variola virus
uauguuuuguauacau

SEQ ID NO: 3287815 - RNA, 22 nt, Variola virus
agucaccaaauuuuacaaaaaa

SEQ ID NO: 3287816 - RNA, 22 nt, Variola virus
agaugugauuuuaucaaacaug

SEQ ID NO: 3287817 - RNA, 19 nt, Variola virus
agauuaauuuugaauuugu

SEQ ID NO: 3287818 - RNA, 20 nt, Variola virus
gaaguuuucccaaaaaauau

SEQ ID NO: 3287819 - RNA, 12 nt, Variola virus
gucuacaucauc

SEQ ID NO: 3287820 - RNA, 18 nt, Variola virus
gcucgaaucauacaaaaa

SEQ ID NO: 3287821 - RNA, 15 nt, Variola virus
uaagauuaagugcua

SEQ ID NO: 3287822 - RNA, 16 nt, Variola virus
auuuucacaaauacua

SEQ ID NO: 3287823 - RNA, 21 nt, Variola virus
guagauuuuucaauuaugcau

SEQ ID NO: 3287824 - RNA, 19 nt, Variola virus
ugccgguauugguauacag

SEQ ID NO: 3287825 - RNA, 15 nt, Variola virus
auuuuauauacuuuu

SEQ ID NO: 3287826 - RNA, 21 nt, Variola virus
auguauuuuuuucuaaauaua

SEQ ID NO: 3287827 - RNA, 16 nt, Variola virus
uauugcauauaucucu

SEQ ID NO: 3287828 - RNA, 20 nt, Variola virus
ucauuuacuaaggaguaaaa

SEQ ID NO: 3287829 - RNA, 12 nt, Variola virus
uaaaaauauguu

SEQ ID NO: 3287830 - RNA, 20 nt, Variola virus
accgacaucacuucagaaau

SEQ ID NO: 3287831 - RNA, 15 nt, Variola virus
agucaaacauucaac

SEQ ID NO: 3287832 - RNA, 21 nt, Variola virus
uaacggaugaaaauaagaaaa

SEQ ID NO: 3287833 - RNA, 15 nt, Variola virus
ucaagucaaagaaau

SEQ ID NO: 3287834 - RNA, 19 nt, Variola virus
uguaucaaacaguuuggua

SEQ ID NO: 3287835 - RNA, 16 nt, Variola virus
gcacugguuuaguuca

SEQ ID NO: 3287836 - RNA, 23 nt, Variola virus
ugaugaaucuucauuaucugaua

SEQ ID NO: 3287837 - RNA, 13 nt, Variola virus
uaucuucuaaaaa

SEQ ID NO: 3287838 - RNA, 23 nt, Variola virus
cuacacuaaaaugauuaaacaau

SEQ ID NO: 3287839 - RNA, 19 nt, Variola virus
acacuuugauuucuuaucu

SEQ ID NO: 3287840 - RNA, 20 nt, Variola virus
uuauuaaauauuuuuggaca

SEQ ID NO: 3287841 - RNA, 16 nt, Variola virus
uuggaucagucucuaa

SEQ ID NO: 3287842 - RNA, 15 nt, Variola virus
guaaauaaauacuuu

SEQ ID NO: 3287843 - RNA, 17 nt, Variola virus
uguuuaucuauacuauu

SEQ ID NO: 3287844 - RNA, 15 nt, Variola virus
aaaaugauagaaaua

SEQ ID NO: 3287845 - RNA, 18 nt, Variola virus
acuacuuacauggacaca

SEQ ID NO: 3287846 - RNA, 19 nt, Variola virus
auaggauuaacaacaaugu

SEQ ID NO: 3287847 - RNA, 14 nt, Variola virus
cgcugauuuaacua

SEQ ID NO: 3287848 - RNA, 16 nt, Variola virus
guuaucugaugaaaga

SEQ ID NO: 3287849 - RNA, 14 nt, Variola virus
auucaguagcuaga

SEQ ID NO: 3287850 - RNA, 15 nt, Variola virus
aucuacaauauauau

SEQ ID NO: 3287851 - RNA, 16 nt, Variola virus
acuauguguuaaaaga

SEQ ID NO: 3287852 - RNA, 17 nt, Variola virus
guuagugaugaauaucu

SEQ ID NO: 3287853 - RNA, 17 nt, Variola virus
auacaaucguucaaacu

SEQ ID NO: 3287854 - RNA, 19 nt, Variola virus
agaucuauuccuauuuccu

SEQ ID NO: 3287855 - RNA, 15 nt, Variola virus
uaauugucuauaaau

SEQ ID NO: 3287856 - RNA, 13 nt, Variola virus
aaaauacauaaag

SEQ ID NO: 3287857 - RNA, 18 nt, Variola virus
auuaauauuuaguaauua

SEQ ID NO: 3287858 - RNA, 19 nt, Variola virus
uccaugauucuaucucuaa

SEQ ID NO: 3287859 - RNA, 20 nt, Variola virus
cugauuuauguuuuaaauau

SEQ ID NO: 3287860 - RNA, 15 nt, Variola virus
uccaacuccuuuucg

SEQ ID NO: 3287861 - RNA, 14 nt, Variola virus
caauaaauguccaa

SEQ ID NO: 3287862 - RNA, 17 nt, Variola virus
gaauagguuuuugaauu

SEQ ID NO: 3287863 - RNA, 15 nt, Variola virus
uaucauccaauauua

SEQ ID NO: 3287864 - RNA, 20 nt, Variola virus
ugauuaaugugugacacauu

SEQ ID NO: 3287865 - RNA, 23 nt, Variola virus
aucagugauagacuagaagaaag

SEQ ID NO: 3287866 - RNA, 13 nt, Variola virus
auuauugcauaua

SEQ ID NO: 3287867 - RNA, 16 nt, Variola virus
caauguaaaguaucua

SEQ ID NO: 3287868 - RNA, 17 nt, Variola virus
cccgcuucuauuuacuc

SEQ ID NO: 3287869 - RNA, 16 nt, Variola virus
uaaaucaacagaaguu

SEQ ID NO: 3287870 - RNA, 13 nt, Variola virus
cuagucagaacua

SEQ ID NO: 3287871 - RNA, 18 nt, Variola virus
agacgauuaguaauauau

SEQ ID NO: 3287872 - RNA, 22 nt, Variola virus
aaaguaucuuauauacacagua

SEQ ID NO: 3287873 - RNA, 20 nt, Variola virus
cuuuuaguaacguaugugaa

SEQ ID NO: 3287874 - RNA, 22 nt, Variola virus
uauaaaccgcuauugaaacuga

SEQ ID NO: 3287875 - RNA, 16 nt, Variola virus
uuugguagauucuauu

SEQ ID NO: 3287876 - RNA, 15 nt, Variola virus
ccaaacuguaaaugu

SEQ ID NO: 3287877 - RNA, 15 nt, Variola virus
uccaugaucaagaag

SEQ ID NO: 3287878 - RNA, 19 nt, Variola virus
gauuauaaauaucgauguu

SEQ ID NO: 3287879 - RNA, 13 nt, Variola virus
gaacuauauuaag

SEQ ID NO: 3287880 - RNA, 22 nt, Variola virus
auuaccaggguucuuguuauau

SEQ ID NO: 3287881 - RNA, 13 nt, Variola virus
uauauaacucauu

SEQ ID NO: 3287882 - RNA, 12 nt, Variola virus
gaaaaaguaaau

SEQ ID NO: 3287883 - RNA, 20 nt, Variola virus
aaauaucgauguuaauaaca

SEQ ID NO: 3287884 - RNA, 20 nt, Variola virus
uggaaagauaucagauaagu

SEQ ID NO: 3287885 - RNA, 21 nt, Variola virus
aucuuaauccuucuagaauua

SEQ ID NO: 3287886 - RNA, 18 nt, Variola virus
uauaaaaacauuauucua

SEQ ID NO: 3287887 - RNA, 14 nt, Variola virus
augagagucaauau

SEQ ID NO: 3287888 - RNA, 15 nt, Variola virus
ucucugacauucaga

SEQ ID NO: 3287889 - RNA, 13 nt, Variola virus
uguauaugugauc

SEQ ID NO: 3287890 - RNA, 15 nt, Variola virus
ucaucaauagacaua

SEQ ID NO: 3287891 - RNA, 17 nt, Variola virus
agauuuaucauauuucu

SEQ ID NO: 3287892 - RNA, 14 nt, Variola virus
uuaacuuacuuauu

SEQ ID NO: 3287893 - RNA, 20 nt, Variola virus
aucagcauccacucauauag

SEQ ID NO: 3287894 - RNA, 13 nt, Variola virus
uauuuccauaaua

SEQ ID NO: 3287895 - RNA, 18 nt, Variola virus
auuauuaucuuuagaaau

SEQ ID NO: 3287896 - RNA, 16 nt, Variola virus
uauauauccuuuugua

SEQ ID NO: 3287897 - RNA, 21 nt, Variola virus
aacuauauauuuguauagaua

SEQ ID NO: 3287898 - RNA, 14 nt, Variola virus
aacaucuuuaaucu

SEQ ID NO: 3287899 - RNA, 14 nt, Variola virus
uguaggaaaaagau

SEQ ID NO: 3287900 - RNA, 24 nt, Variola virus
uuucaagaucuaauauucuagauu

SEQ ID NO: 3287901 - RNA, 18 nt, Variola virus
caauagaugauagaauau

SEQ ID NO: 3287902 - RNA, 16 nt, Variola virus
cucccauaauacuuua

SEQ ID NO: 3287903 - RNA, 19 nt, Variola virus
gugcacuuuuuuauaaaga

SEQ ID NO: 3287904 - RNA, 13 nt, Variola virus
uucugaauuauug

SEQ ID NO: 3287905 - RNA, 19 nt, Variola virus
aagacaugauaauauuaaa

SEQ ID NO: 3287906 - RNA, 12 nt, Variola virus
guuaauuuuacu

SEQ ID NO: 3287907 - RNA, 17 nt, Variola virus
uaucuugguaauacuua

SEQ ID NO: 3287908 - RNA, 19 nt, Variola virus
uugcucaaauaauacuaua

SEQ ID NO: 3287909 - RNA, 12 nt, Variola virus
aagaaaugagug

SEQ ID NO: 3287910 - RNA, 17 nt, Variola virus
acaguaucauuuaaaca

SEQ ID NO: 3287911 - RNA, 12 nt, Variola virus
uaagauacugug

SEQ ID NO: 3287912 - RNA, 17 nt, Variola virus
agaaaacucguuauuaa

SEQ ID NO: 3287913 - RNA, 18 nt, Variola virus
auuuaaguagagaauguu

SEQ ID NO: 3287914 - RNA, 19 nt, Variola virus
ggcaauaacuaaaaaugua

SEQ ID NO: 3287915 - RNA, 19 nt, Variola virus
aguguaauaauuuauguau

SEQ ID NO: 3287916 - RNA, 13 nt, Variola virus
aacaacuguaaaa

SEQ ID NO: 3287917 - RNA, 14 nt, Variola virus
uucaucuuggauga

SEQ ID NO: 3287918 - RNA, 19 nt, Variola virus
uuuauaaacuuaacccauu

SEQ ID NO: 3287919 - RNA, 19 nt, Variola virus
aagccgucuuuucugaagu

SEQ ID NO: 3287920 - RNA, 21 nt, Variola virus
aaaacauuauucuauuucgaa

SEQ ID NO: 3287921 - RNA, 22 nt, Variola virus
ccacuagaagagaauacacaug

SEQ ID NO: 3287922 - RNA, 21 nt, Variola virus
uauaugguauagggagaguau

SEQ ID NO: 3287923 - RNA, 16 nt, Variola virus
ggacagcuauauucuc

SEQ ID NO: 3287924 - RNA, 23 nt, Variola virus
gagaacauacauuuguaaaagua

SEQ ID NO: 3287925 - RNA, 20 nt, Variola virus
cucaucuacaaaaacauacu

SEQ ID NO: 3287926 - RNA, 15 nt, Variola virus
guaaaaauaaaucac

SEQ ID NO: 3287927 - RNA, 14 nt, Variola virus
uaaaguguaugucu

SEQ ID NO: 3287928 - RNA, 20 nt, Variola virus
auaaauuaggagauaaucua

SEQ ID NO: 3287929 - RNA, 21 nt, Variola virus
auaucuaucgacuucagauga

SEQ ID NO: 3287930 - RNA, 16 nt, Variola virus
uaacauaaacauauca

SEQ ID NO: 3287931 - RNA, 15 nt, Variola virus
ccaacugauuaauaa

SEQ ID NO: 3287932 - RNA, 12 nt, Variola virus
auggaaaggaaa

SEQ ID NO: 3287933 - RNA, 13 nt, Variola virus
uaaaguuaucaug

SEQ ID NO: 3287934 - RNA, 22 nt, Variola virus
uaacguuccuaauucucucauu

SEQ ID NO: 3287935 - RNA, 17 nt, Variola virus
uaugacaaaguuuacau

SEQ ID NO: 3287936 - RNA, 23 nt, Variola virus
acaaaguacuguucauacaugau

SEQ ID NO: 3287937 - RNA, 12 nt, Variola virus
accaaugucucu

SEQ ID NO: 3287938 - RNA, 17 nt, Variola virus
agugggacaaagaaaau

SEQ ID NO: 3287939 - RNA, 22 nt, Variola virus
gcuuccagauacagugauuuug

SEQ ID NO: 3287940 - RNA, 22 nt, Variola virus
aacaucguaucuucaaaaaggu

SEQ ID NO: 3287941 - RNA, 17 nt, Variola virus
augaagaguacacagaa

SEQ ID NO: 3287942 - RNA, 21 nt, Variola virus
uaagaacuccuaauauguucg

SEQ ID NO: 3287943 - RNA, 19 nt, Variola virus
uauuuacaucuaauuuacu

SEQ ID NO: 3287944 - RNA, 15 nt, Variola virus
gauguuauuaugaau

SEQ ID NO: 3287945 - RNA, 22 nt, Variola virus
cucuauuuugucauuaacuuua

SEQ ID NO: 3287946 - RNA, 15 nt, Variola virus
acuaacacauuucaa

SEQ ID NO: 3287947 - RNA, 11 nt, Variola virus
guuaucuuuug

SEQ ID NO: 3287948 - RNA, 13 nt, Variola virus
acagacucauuau

SEQ ID NO: 3287949 - RNA, 15 nt, Variola virus
acgaugaaaaugaug

SEQ ID NO: 3287950 - RNA, 21 nt, Variola virus
acaaucaaaccuauaacauua

SEQ ID NO: 3287951 - RNA, 22 nt, Variola virus
ugaaccaguaccagaucuuaau

SEQ ID NO: 3287952 - RNA, 14 nt, Variola virus
acuacuucauuaau

SEQ ID NO: 3287953 - RNA, 23 nt, Variola virus
uguagauaauaacuaaaaaucaa

SEQ ID NO: 3287954 - RNA, 15 nt, Variola virus
agaaacuuuuucgaa

SEQ ID NO: 3287955 - RNA, 14 nt, Variola virus
acauuccuaugaug

SEQ ID NO: 3287956 - RNA, 17 nt, Variola virus
ccauauaucuguaucau

SEQ ID NO: 3287957 - RNA, 19 nt, Variola virus
auaacuuugacaaauauua

SEQ ID NO: 3287958 - RNA, 22 nt, Variola virus
caauagcaucgcaacuauucua

SEQ ID NO: 3287959 - RNA, 21 nt, Variola virus
ucaagcuaggcuggaaacuau

SEQ ID NO: 3287960 - RNA, 16 nt, Variola virus
gaaggagauacuauca

SEQ ID NO: 3287961 - RNA, 21 nt, Variola virus
ccaucguaauacccauguuua

SEQ ID NO: 3287962 - RNA, 20 nt, Variola virus
cauaauguaaagauauucua

SEQ ID NO: 3287963 - RNA, 13 nt, Variola virus
ugauguucauaua

SEQ ID NO: 3287964 - RNA, 17 nt, Variola virus
caaaaguagaugguauu

SEQ ID NO: 3287965 - RNA, 21 nt, Variola virus
caaaugauacugauaaaguag

SEQ ID NO: 3287966 - RNA, 15 nt, Variola virus
uacgcgcacacaaua

SEQ ID NO: 3287967 - RNA, 13 nt, Variola virus
cauuuauacauau

SEQ ID NO: 3287968 - RNA, 13 nt, Variola virus
uggaaauguuaua

SEQ ID NO: 3287969 - RNA, 23 nt, Variola virus
uaaaauuauuuaauuuaauacau

SEQ ID NO: 3287970 - RNA, 14 nt, Variola virus
uagacuuguuaaua

SEQ ID NO: 3287971 - RNA, 14 nt, Variola virus
auaagaaacuauaa

SEQ ID NO: 3287972 - RNA, 14 nt, Variola virus
uuaguaaggcuuua

SEQ ID NO: 3287973 - RNA, 21 nt, Variola virus
auuucauagacuuuaucuaga

SEQ ID NO: 3287974 - RNA, 22 nt, Variola virus
uggcggaguaaguguugagcuc

SEQ ID NO: 3287975 - RNA, 17 nt, Variola virus
auaacacuaauuuguaa

SEQ ID NO: 3287976 - RNA, 13 nt, Variola virus
aacuguucaaaau

SEQ ID NO: 3287977 - RNA, 18 nt, Variola virus
uuuucaucuuuacauacu

SEQ ID NO: 3287978 - RNA, 14 nt, Variola virus
uaaaauuaaacauu

SEQ ID NO: 3287979 - RNA, 18 nt, Variola virus
aaugguuucgaagaucuu

SEQ ID NO: 3287980 - RNA, 20 nt, Variola virus
ucuacuacacuucuagauau

SEQ ID NO: 3287981 - RNA, 17 nt, Variola virus
gucuuuucugaaguagg

SEQ ID NO: 3287982 - RNA, 14 nt, Variola virus
auaaugauauauau

SEQ ID NO: 3287983 - RNA, 18 nt, Variola virus
gauaaucagccauaauua

SEQ ID NO: 3287984 - RNA, 12 nt, Variola virus
ugauaauaacuu

SEQ ID NO: 3287985 - RNA, 14 nt, Variola virus
agagauaauauccu

SEQ ID NO: 3287986 - RNA, 21 nt, Variola virus
gcuccuacaggaauaucuuua

SEQ ID NO: 3287987 - RNA, 15 nt, Variola virus
caacugaaaaaguua

SEQ ID NO: 3287988 - RNA, 20 nt, Variola virus
uucuuaccagauauuauaca

SEQ ID NO: 3287989 - RNA, 11 nt, Variola virus
gauguauauau

SEQ ID NO: 3287990 - RNA, 14 nt, Variola virus
uuauauacaucuuc

SEQ ID NO: 3287991 - RNA, 17 nt, Variola virus
augaauaucaggaaaug

SEQ ID NO: 3287992 - RNA, 14 nt, Variola virus
uauauaagacguau

SEQ ID NO: 3287993 - RNA, 22 nt, Variola virus
uuucuagaauaaguuucaagau

SEQ ID NO: 3287994 - RNA, 13 nt, Variola virus
agcagaaaaagac

SEQ ID NO: 3287995 - RNA, 14 nt, Variola virus
uaaacgaacuauau

SEQ ID NO: 3287996 - RNA, 22 nt, Variola virus
ucgaauaaguuugcagacaaac

SEQ ID NO: 3287997 - RNA, 16 nt, Variola virus
cguccaucagcauugu

SEQ ID NO: 3287998 - RNA, 23 nt, Variola virus
ucaaacaaaaaagcucaauaaga

SEQ ID NO: 3287999 - RNA, 20 nt, Variola virus
acaugucgccgacaugaaug

SEQ ID NO: 3288000 - RNA, 22 nt, Variola virus
auaugcaucuauauaaucuuuu

SEQ ID NO: 3288001 - RNA, 13 nt, Variola virus
uuacuugugguaa

SEQ ID NO: 3288002 - RNA, 14 nt, Variola virus
ucauuauaaauucu

SEQ ID NO: 3288003 - RNA, 14 nt, Variola virus
acaugauuaauaca

SEQ ID NO: 3288004 - RNA, 12 nt, Variola virus
aggauaauacau

SEQ ID NO: 3288005 - RNA, 15 nt, Variola virus
aaugcauuaaauaau

SEQ ID NO: 3288006 - RNA, 15 nt, Variola virus
cucuauaaaauacua

SEQ ID NO: 3288007 - RNA, 20 nt, Variola virus
aucuauaucugacacaagau

SEQ ID NO: 3288008 - RNA, 20 nt, Variola virus
uuuuauauccaauguauuua

SEQ ID NO: 3288009 - RNA, 23 nt, Variola virus
acaaaaguaguauagcaauacaa

SEQ ID NO: 3288010 - RNA, 18 nt, Variola virus
gauccugcauagaaauau

SEQ ID NO: 3288011 - RNA, 18 nt, Variola virus
auaacagcauuuguguag

SEQ ID NO: 3288012 - RNA, 20 nt, Variola virus
uguacuacaaacaggcgaug

SEQ ID NO: 3288013 - RNA, 17 nt, Variola virus
guuauaauuaugaugau

SEQ ID NO: 3288014 - RNA, 16 nt, Variola virus
uagguuguaauacaua

SEQ ID NO: 3288015 - RNA, 14 nt, Variola virus
ucuuuauacaauga

SEQ ID NO: 3288016 - RNA, 19 nt, Variola virus
agagucauuaaaauaugcg

SEQ ID NO: 3288017 - RNA, 19 nt, Variola virus
accaucugugguacgaaug

SEQ ID NO: 3288018 - RNA, 12 nt, Variola virus
uagauaaaucaa

SEQ ID NO: 3288019 - RNA, 13 nt, Variola virus
uuuauucuagaau

SEQ ID NO: 3288020 - RNA, 14 nt, Variola virus
uucuaguuaucaug

SEQ ID NO: 3288021 - RNA, 21 nt, Variola virus
uaguaaguagaaauuaucaaa

SEQ ID NO: 3288022 - RNA, 20 nt, Variola virus
uuauccguauuuccauaaua

SEQ ID NO: 3288023 - RNA, 16 nt, Variola virus
gauaaugguacucuag

SEQ ID NO: 3288024 - RNA, 19 nt, Variola virus
ggaaugccacgaauaaaaa

SEQ ID NO: 3288025 - RNA, 12 nt, Variola virus
uccauaggaaag

SEQ ID NO: 3288026 - RNA, 19 nt, Variola virus
aaaauuguugaucauauag

SEQ ID NO: 3288027 - RNA, 14 nt, Variola virus
ucaauaauuucagg

SEQ ID NO: 3288028 - RNA, 24 nt, Variola virus
agucuagagucuuugcaaacauaa

SEQ ID NO: 3288029 - RNA, 13 nt, Variola virus
auuagaaauggau

SEQ ID NO: 3288030 - RNA, 20 nt, Variola virus
gaauucauccguccuucaga

SEQ ID NO: 3288031 - RNA, 15 nt, Variola virus
auaacuuacuuucca

SEQ ID NO: 3288032 - RNA, 12 nt, Variola virus
uaaaauaguucu

SEQ ID NO: 3288033 - RNA, 18 nt, Variola virus
uguauauaauaguuucua

SEQ ID NO: 3288034 - RNA, 13 nt, Variola virus
uauguaugugcau

SEQ ID NO: 3288035 - RNA, 15 nt, Variola virus
ucauauuauagauuu

SEQ ID NO: 3288036 - RNA, 15 nt, Variola virus
aguuaauauauuuaa

SEQ ID NO: 3288037 - RNA, 19 nt, Variola virus
guuugaugcgauucaaaaa

SEQ ID NO: 3288038 - RNA, 16 nt, Variola virus
gucaaucuaauauuaa

SEQ ID NO: 3288039 - RNA, 17 nt, Variola virus
accuaagcaagaaagau

SEQ ID NO: 3288040 - RNA, 17 nt, Variola virus
uaauauccaaucuuauu

SEQ ID NO: 3288041 - RNA, 18 nt, Variola virus
auuauuaaucauuaacuu

SEQ ID NO: 3288042 - RNA, 17 nt, Variola virus
gcuggaaaauaaaucac

SEQ ID NO: 3288043 - RNA, 16 nt, Variola virus
aacauucuuucaaaga

SEQ ID NO: 3288044 - RNA, 13 nt, Variola virus
aauuuuaacagau

SEQ ID NO: 3288045 - RNA, 15 nt, Variola virus
uuaaccgauaauaga

SEQ ID NO: 3288046 - RNA, 19 nt, Variola virus
gcaucugauacaacaauau

SEQ ID NO: 3288047 - RNA, 21 nt, Variola virus
auaucgguaccguuaaagaug

SEQ ID NO: 3288048 - RNA, 16 nt, Variola virus
uacuggauucauacau

SEQ ID NO: 3288049 - RNA, 16 nt, Variola virus
ucuucaaaugaaguag

SEQ ID NO: 3288050 - RNA, 19 nt, Variola virus
uuuuaucaaccauucaaaa

SEQ ID NO: 3288051 - RNA, 13 nt, Variola virus
aaaaguuaaaacu

SEQ ID NO: 3288052 - RNA, 15 nt, Variola virus
ucuucuacaugaaga

SEQ ID NO: 3288053 - RNA, 21 nt, Variola virus
ucaacauaaugucauaguuga

SEQ ID NO: 3288054 - RNA, 24 nt, Variola virus
aggaagaggaaauauucaguauau

SEQ ID NO: 3288055 - RNA, 14 nt, Variola virus
ucuacaugaaauag

SEQ ID NO: 3288056 - RNA, 15 nt, Variola virus
auuauacuuugguaa

SEQ ID NO: 3288057 - RNA, 14 nt, Variola virus
auuuagcaaaauuc

SEQ ID NO: 3288058 - RNA, 16 nt, Variola virus
agauacuaucaaaaua

SEQ ID NO: 3288059 - RNA, 22 nt, Variola virus
accggacgacauauuaaucuuu

SEQ ID NO: 3288060 - RNA, 16 nt, Variola virus
agagaagcaaaugaug

SEQ ID NO: 3288061 - RNA, 14 nt, Variola virus
gaauagauauuaau

SEQ ID NO: 3288062 - RNA, 17 nt, Variola virus
auuuugaagauauagau

SEQ ID NO: 3288063 - RNA, 19 nt, Variola virus
aguaguuuaacuagucuuc

SEQ ID NO: 3288064 - RNA, 19 nt, Variola virus
aucucuucaucuguaaguu

SEQ ID NO: 3288065 - RNA, 20 nt, Variola virus
uacagagacuuuaucuaaau

SEQ ID NO: 3288066 - RNA, 21 nt, Variola virus
auaaaccaaaagcuuucuagu

SEQ ID NO: 3288067 - RNA, 14 nt, Variola virus
aacaacuaaaaugu

SEQ ID NO: 3288068 - RNA, 13 nt, Variola virus
acuagaagaaagu

SEQ ID NO: 3288069 - RNA, 18 nt, Variola virus
uuuuuuagauguaguauc

SEQ ID NO: 3288070 - RNA, 16 nt, Variola virus
aauagcauaaaugcua

SEQ ID NO: 3288071 - RNA, 21 nt, Variola virus
uuauuuuuugguauaauucua

SEQ ID NO: 3288072 - RNA, 23 nt, Variola virus
caucguauacuuuuuaauucucu

SEQ ID NO: 3288073 - RNA, 19 nt, Variola virus
aggauuauaugauauaauu

SEQ ID NO: 3288074 - RNA, 16 nt, Variola virus
uuuguucuuguagaua

SEQ ID NO: 3288075 - RNA, 22 nt, Variola virus
auaacuuuaccccaaucagaua

SEQ ID NO: 3288076 - RNA, 22 nt, Variola virus
uuucuggaaguggauauacaua

SEQ ID NO: 3288077 - RNA, 20 nt, Variola virus
ugguauccuggcgaauauua

SEQ ID NO: 3288078 - RNA, 14 nt, Variola virus
guauuaugaugaau

SEQ ID NO: 3288079 - RNA, 14 nt, Variola virus
caacaaauuuggaa

SEQ ID NO: 3288080 - RNA, 17 nt, Variola virus
auaauaggaggaauuga

SEQ ID NO: 3288081 - RNA, 20 nt, Variola virus
uuagaaggauuggucuuaaa

SEQ ID NO: 3288082 - RNA, 17 nt, Variola virus
aagacuaugucaaagua

SEQ ID NO: 3288083 - RNA, 19 nt, Variola virus
caucaaccgaguuguuaau

SEQ ID NO: 3288084 - RNA, 14 nt, Variola virus
aagauuguguagaa

SEQ ID NO: 3288085 - RNA, 19 nt, Variola virus
auaucauauauauacugaa

SEQ ID NO: 3288086 - RNA, 15 nt, Variola virus
gcaucuucacaaauu

SEQ ID NO: 3288087 - RNA, 20 nt, Variola virus
aguuuuauauccuuuagagu

SEQ ID NO: 3288088 - RNA, 20 nt, Variola virus
guuaaauguugguauaucaa

SEQ ID NO: 3288089 - RNA, 15 nt, Variola virus
aauacacacaaagua

SEQ ID NO: 3288090 - RNA, 13 nt, Variola virus
cguuguuaagaua

SEQ ID NO: 3288091 - RNA, 15 nt, Variola virus
acagacaucacagac

SEQ ID NO: 3288092 - RNA, 14 nt, Variola virus
aaauauuuacuaau

SEQ ID NO: 3288093 - RNA, 17 nt, Variola virus
cauuccuaugaugaugu

SEQ ID NO: 3288094 - RNA, 14 nt, Variola virus
auaguaaaauaaag

SEQ ID NO: 3288095 - RNA, 18 nt, Variola virus
cagaaguuuuguauugua

SEQ ID NO: 3288096 - RNA, 17 nt, Variola virus
agaaauaauauaaauga

SEQ ID NO: 3288097 - RNA, 13 nt, Variola virus
aagauaaugugaa

SEQ ID NO: 3288098 - RNA, 14 nt, Variola virus
cguccgauuucaua

SEQ ID NO: 3288099 - RNA, 18 nt, Variola virus
cagauuuugauauucuau

SEQ ID NO: 3288100 - RNA, 13 nt, Variola virus
auagauguauaua

SEQ ID NO: 3288101 - RNA, 22 nt, Variola virus
guuacacgcauccuuauaaaga

SEQ ID NO: 3288102 - RNA, 20 nt, Variola virus
cagcaacuucuguacuagug

SEQ ID NO: 3288103 - RNA, 14 nt, Variola virus
ugcugcguguauaa

SEQ ID NO: 3288104 - RNA, 15 nt, Variola virus
ucaucaucuucuggu

SEQ ID NO: 3288105 - RNA, 19 nt, Variola virus
cauaguaaaaaauauacau

SEQ ID NO: 3288106 - RNA, 15 nt, Variola virus
auagaaauuuuggua

SEQ ID NO: 3288107 - RNA, 17 nt, Variola virus
caaauguugucaaauga

SEQ ID NO: 3288108 - RNA, 22 nt, Variola virus
uaaucauguacucauaaaacga

SEQ ID NO: 3288109 - RNA, 17 nt, Variola virus
uguuauuaugaaucauu

SEQ ID NO: 3288110 - RNA, 18 nt, Variola virus
uaaacaagcuaucucuug

SEQ ID NO: 3288111 - RNA, 23 nt, Variola virus
acgaaucauccauaaauuauacu

SEQ ID NO: 3288112 - RNA, 17 nt, Variola virus
uaaaacuuuauuaucca

SEQ ID NO: 3288113 - RNA, 20 nt, Variola virus
auuaucuuuguuuugauauc

SEQ ID NO: 3288114 - RNA, 20 nt, Variola virus
auguuuaauguuuuaaauuu

SEQ ID NO: 3288115 - RNA, 23 nt, Variola virus
aagaaacugacuugauaaaaaug

SEQ ID NO: 3288116 - RNA, 19 nt, Variola virus
auuuuuauucagcauuacu

SEQ ID NO: 3288117 - RNA, 16 nt, Variola virus
uuccuucuauugaucu

SEQ ID NO: 3288118 - RNA, 13 nt, Variola virus
cauaauaucuuua

SEQ ID NO: 3288119 - RNA, 12 nt, Variola virus
uuaaauauuucu

SEQ ID NO: 3288120 - RNA, 16 nt, Variola virus
ucuuauccauuucgaa

SEQ ID NO: 3288121 - RNA, 17 nt, Variola virus
auaaacaacuaaaaugu

SEQ ID NO: 3288122 - RNA, 14 nt, Variola virus
aucaaucaaaagac

SEQ ID NO: 3288123 - RNA, 17 nt, Variola virus
agcaucuucuucauuau

SEQ ID NO: 3288124 - RNA, 18 nt, Variola virus
caauuuuaacagauguau

SEQ ID NO: 3288125 - RNA, 17 nt, Variola virus
uaauagcauaaaugcua

SEQ ID NO: 3288126 - RNA, 14 nt, Variola virus
acuaaaauauuuua

SEQ ID NO: 3288127 - RNA, 23 nt, Variola virus
gaaagacgaauauuauaauacca

SEQ ID NO: 3288128 - RNA, 18 nt, Variola virus
ugauuguaaacacagaua

SEQ ID NO: 3288129 - RNA, 17 nt, Variola virus
augaaaaaaaacacuga

SEQ ID NO: 3288130 - RNA, 17 nt, Variola virus
uaauauugaaaauacua

SEQ ID NO: 3288131 - RNA, 13 nt, Variola virus
agacauaauacua

SEQ ID NO: 3288132 - RNA, 17 nt, Variola virus
uauuuauaccaugucaa

SEQ ID NO: 3288133 - RNA, 22 nt, Variola virus
ugacuuuccugccgaauuuaga

SEQ ID NO: 3288134 - RNA, 15 nt, Variola virus
auucgcauuucuaua

SEQ ID NO: 3288135 - RNA, 15 nt, Variola virus
uauuaagauuaucua

SEQ ID NO: 3288136 - RNA, 19 nt, Variola virus
uagauguauauauuucauu

SEQ ID NO: 3288137 - RNA, 15 nt, Variola virus
cauuaauccugucaa

SEQ ID NO: 3288138 - RNA, 16 nt, Variola virus
acuaaacuaacuccuu

SEQ ID NO: 3288139 - RNA, 14 nt, Variola virus
ggauagagaaauau

SEQ ID NO: 3288140 - RNA, 19 nt, Variola virus
gcuuuaauaucuaaauaug

SEQ ID NO: 3288141 - RNA, 16 nt, Variola virus
aauuacuaguaucaau

SEQ ID NO: 3288142 - RNA, 15 nt, Variola virus
auuggcuaguauuua

SEQ ID NO: 3288143 - RNA, 15 nt, Variola virus
acaaauucuuggaua

SEQ ID NO: 3288144 - RNA, 15 nt, Variola virus
cuaaacauauaacaa

SEQ ID NO: 3288145 - RNA, 19 nt, Variola virus
auuuugcauuagauuuacu

SEQ ID NO: 3288146 - RNA, 14 nt, Variola virus
aagauaaugugaau

SEQ ID NO: 3288147 - RNA, 11 nt, Variola virus
ucccagcauua

SEQ ID NO: 3288148 - RNA, 17 nt, Variola virus
aaaugaguucugugcag

SEQ ID NO: 3288149 - RNA, 14 nt, Variola virus
gaauaaauauccuu

SEQ ID NO: 3288150 - RNA, 16 nt, Variola virus
aguauugaaacuauau

SEQ ID NO: 3288151 - RNA, 22 nt, Variola virus
acauauuaguaacuguuuucca

SEQ ID NO: 3288152 - RNA, 23 nt, Variola virus
guaacuccagaacaucuuccaua

SEQ ID NO: 3288153 - RNA, 18 nt, Variola virus
cuuaauauugccauaauu

SEQ ID NO: 3288154 - RNA, 15 nt, Variola virus
aaaaagaauguauca

SEQ ID NO: 3288155 - RNA, 20 nt, Variola virus
cauauauguuuucaucauuu

SEQ ID NO: 3288156 - RNA, 20 nt, Variola virus
gacgcagauagcuauaugau

SEQ ID NO: 3288157 - RNA, 15 nt, Variola virus
gaaagauuaaaucau

SEQ ID NO: 3288158 - RNA, 14 nt, Variola virus
aauuuaaaauggua

SEQ ID NO: 3288159 - RNA, 14 nt, Variola virus
uuaacuaauaaaaa

SEQ ID NO: 3288160 - RNA, 17 nt, Variola virus
agacuacgaaacugaua

SEQ ID NO: 3288161 - RNA, 11 nt, Variola virus
uuuaacuuuuc

SEQ ID NO: 3288162 - RNA, 16 nt, Variola virus
auucaaaauauuaaac

SEQ ID NO: 3288163 - RNA, 12 nt, Variola virus
uuuccaaagaua

SEQ ID NO: 3288164 - RNA, 15 nt, Variola virus
uugaggauuuaaaac

SEQ ID NO: 3288165 - RNA, 22 nt, Variola virus
ucuccuuuucagaaauuaguuu

SEQ ID NO: 3288166 - RNA, 14 nt, Variola virus
cauucuaucucaaa

SEQ ID NO: 3288167 - RNA, 18 nt, Variola virus
guacaaacaggauaucua

SEQ ID NO: 3288168 - RNA, 18 nt, Variola virus
aaacugguuaaaacagua

SEQ ID NO: 3288169 - RNA, 18 nt, Variola virus
uagaaaaugauucacaau

SEQ ID NO: 3288170 - RNA, 14 nt, Variola virus
gcuccauauuacaa

SEQ ID NO: 3288171 - RNA, 14 nt, Variola virus
uauuuuuuauuaua

SEQ ID NO: 3288172 - RNA, 23 nt, Variola virus
acuaggaaauugguuuauaaugu

SEQ ID NO: 3288173 - RNA, 18 nt, Variola virus
uaucaucgacacaaauga

SEQ ID NO: 3288174 - RNA, 16 nt, Variola virus
uuaggauugacauagu

SEQ ID NO: 3288175 - RNA, 15 nt, Variola virus
uaacuuuucaaucau

SEQ ID NO: 3288176 - RNA, 20 nt, Variola virus
caucaacucucucauuuucu

SEQ ID NO: 3288177 - RNA, 19 nt, Variola virus
acgaaguauuuauacuuuu

SEQ ID NO: 3288178 - RNA, 16 nt, Variola virus
uacgcuuauuaucauc

SEQ ID NO: 3288179 - RNA, 19 nt, Variola virus
agacgcuauaucaaaauau

SEQ ID NO: 3288180 - RNA, 17 nt, Variola virus
ccuauaaacaugaauuu

SEQ ID NO: 3288181 - RNA, 19 nt, Variola virus
aaaucuucuuauaagauug

SEQ ID NO: 3288182 - RNA, 21 nt, Variola virus
ucaauggaccccaacaucuuu

SEQ ID NO: 3288183 - RNA, 18 nt, Variola virus
cauuuauaacguacaaau

SEQ ID NO: 3288184 - RNA, 13 nt, Variola virus
cuuugauuaauga

SEQ ID NO: 3288185 - RNA, 13 nt, Variola virus
aauugauucuuga

SEQ ID NO: 3288186 - RNA, 19 nt, Variola virus
aaccauucaaaaaaguaau

SEQ ID NO: 3288187 - RNA, 22 nt, Variola virus
uuuacgagcuauuaaacuguuu

SEQ ID NO: 3288188 - RNA, 22 nt, Variola virus
ugcuuuuaucaggauaaauaca

SEQ ID NO: 3288189 - RNA, 13 nt, Variola virus
aggagaaguaaua

SEQ ID NO: 3288190 - RNA, 17 nt, Variola virus
cugauuauucacuauaa

SEQ ID NO: 3288191 - RNA, 19 nt, Variola virus
caauguauauuuauacaga

SEQ ID NO: 3288192 - RNA, 20 nt, Variola virus
uguaaacaagaauauauguu

SEQ ID NO: 3288193 - RNA, 22 nt, Variola virus
ugcgaaccgauuaaacauaaau

SEQ ID NO: 3288194 - RNA, 17 nt, Variola virus
aaacuaguucugagaaa

SEQ ID NO: 3288195 - RNA, 18 nt, Variola virus
ucagaaauauauaacaau

SEQ ID NO: 3288196 - RNA, 14 nt, Variola virus
uaucgaauuucuac

SEQ ID NO: 3288197 - RNA, 19 nt, Variola virus
uaaccguuucaucaucauu

SEQ ID NO: 3288198 - RNA, 19 nt, Variola virus
aauacugaugcuuuuucca

SEQ ID NO: 3288199 - RNA, 16 nt, Variola virus
uuaacaaaguuauuca

SEQ ID NO: 3288200 - RNA, 22 nt, Variola virus
cuacaaaacagaaauaugugaa

SEQ ID NO: 3288201 - RNA, 14 nt, Variola virus
uauacaaaaaugca

SEQ ID NO: 3288202 - RNA, 14 nt, Variola virus
ccaacaauuguuua

SEQ ID NO: 3288203 - RNA, 20 nt, Variola virus
aguuucaucaauaaaggaua

SEQ ID NO: 3288204 - RNA, 11 nt, Variola virus
acuacauaucc

SEQ ID NO: 3288205 - RNA, 15 nt, Variola virus
uuguacauguaauga

SEQ ID NO: 3288206 - RNA, 21 nt, Variola virus
aacuuuuguuuuguuucugau

SEQ ID NO: 3288207 - RNA, 16 nt, Variola virus
aacuucuagucuagaa

SEQ ID NO: 3288208 - RNA, 20 nt, Variola virus
cauugauacacguucacuau

SEQ ID NO: 3288209 - RNA, 16 nt, Variola virus
aauaauucauggaaau

SEQ ID NO: 3288210 - RNA, 15 nt, Variola virus
agcaaccguaugaau

SEQ ID NO: 3288211 - RNA, 16 nt, Variola virus
augauugggaaccagu

SEQ ID NO: 3288212 - RNA, 21 nt, Variola virus
uaaacuugacaaaaauuguga

SEQ ID NO: 3288213 - RNA, 16 nt, Variola virus
cugaguuuuuaggaaa

SEQ ID NO: 3288214 - RNA, 22 nt, Variola virus
uuaacucggucgguuuaucuac

SEQ ID NO: 3288215 - RNA, 23 nt, Variola virus
uaacaucuggccuguucauaaau

SEQ ID NO: 3288216 - RNA, 19 nt, Variola virus
ucaucacuuagaacagauu

SEQ ID NO: 3288217 - RNA, 15 nt, Variola virus
gucaauugauucuua

SEQ ID NO: 3288218 - RNA, 12 nt, Variola virus
caaguuaaauag

SEQ ID NO: 3288219 - RNA, 19 nt, Variola virus
aaacuuagaaccaaaugau

SEQ ID NO: 3288220 - RNA, 18 nt, Variola virus
aucuauucauaugcaucu

SEQ ID NO: 3288221 - RNA, 14 nt, Variola virus
augauuauguuguu

SEQ ID NO: 3288222 - RNA, 16 nt, Variola virus
uuaacuagauuauaca

SEQ ID NO: 3288223 - RNA, 21 nt, Variola virus
aauuuauuucuaauucucaga

SEQ ID NO: 3288224 - RNA, 16 nt, Variola virus
gaguaggugcaacaau

SEQ ID NO: 3288225 - RNA, 18 nt, Variola virus
uaauggauauucugaaua

SEQ ID NO: 3288226 - RNA, 17 nt, Variola virus
acgcauaaaaaugccac

SEQ ID NO: 3288227 - RNA, 17 nt, Variola virus
gacgucucuucgugaau

SEQ ID NO: 3288228 - RNA, 16 nt, Variola virus
auaaauuaaauauuaa

SEQ ID NO: 3288229 - RNA, 18 nt, Variola virus
aacucaucuaccauuuca

SEQ ID NO: 3288230 - RNA, 22 nt, Variola virus
auuuccacauuagaugguaaau

SEQ ID NO: 3288231 - RNA, 18 nt, Variola virus
auaaccggcgcugucaug

SEQ ID NO: 3288232 - RNA, 14 nt, Variola virus
uagacauaauacua

SEQ ID NO: 3288233 - RNA, 16 nt, Variola virus
guuccggaucuauaga

SEQ ID NO: 3288234 - RNA, 13 nt, Variola virus
ucagaaauuauuc

SEQ ID NO: 3288235 - RNA, 22 nt, Variola virus
uauccaaggacaaggaugaaaa

SEQ ID NO: 3288236 - RNA, 21 nt, Variola virus
uauuuuaggaucauauuuaca

SEQ ID NO: 3288237 - RNA, 16 nt, Variola virus
ucauuuguguacccaa

SEQ ID NO: 3288238 - RNA, 21 nt, Variola virus
auuuaauuuuguaguuaauuu

SEQ ID NO: 3288239 - RNA, 19 nt, Variola virus
aggguauuggauauaucaa

SEQ ID NO: 3288240 - RNA, 16 nt, Variola virus
acuaguuguagaauuu

SEQ ID NO: 3288241 - RNA, 19 nt, Variola virus
auagauuucgaaaauacua

SEQ ID NO: 3288242 - RNA, 21 nt, Variola virus
guugaucagaaugaauguuua

SEQ ID NO: 3288243 - RNA, 20 nt, Variola virus
aggauacuuuaugaauggau

SEQ ID NO: 3288244 - RNA, 20 nt, Variola virus
acgauccaaacaauguuucu

SEQ ID NO: 3288245 - RNA, 13 nt, Variola virus
aauuauuuaccau

SEQ ID NO: 3288246 - RNA, 23 nt, Variola virus
gagcuaauuuuuguaaauaacua

SEQ ID NO: 3288247 - RNA, 20 nt, Variola virus
uguugugucaguuuauaaua

SEQ ID NO: 3288248 - RNA, 21 nt, Variola virus
acuaauucauuuucaauaaua

SEQ ID NO: 3288249 - RNA, 13 nt, Variola virus
uauaauaaaugua

SEQ ID NO: 3288250 - RNA, 18 nt, Variola virus
gugauguuacggauaucu

SEQ ID NO: 3288251 - RNA, 17 nt, Variola virus
uaucuuuauagaguaua

SEQ ID NO: 3288252 - RNA, 21 nt, Variola virus
gaaagauucuauaauaaugaa

SEQ ID NO: 3288253 - RNA, 14 nt, Variola virus
gacuauaacagaua

SEQ ID NO: 3288254 - RNA, 15 nt, Variola virus
ugcauuauccaaaau

SEQ ID NO: 3288255 - RNA, 14 nt, Variola virus
uauaaaaaacuuuu

SEQ ID NO: 3288256 - RNA, 23 nt, Variola virus
auuuucgaaacucguaaaaagau

SEQ ID NO: 3288257 - RNA, 16 nt, Variola virus
ucucaauauuuggauu

SEQ ID NO: 3288258 - RNA, 11 nt, Variola virus
auuaucaucug

SEQ ID NO: 3288259 - RNA, 13 nt, Variola virus
auauuuguaacuu

SEQ ID NO: 3288260 - RNA, 16 nt, Variola virus
acauccaaaauacaaa

SEQ ID NO: 3288261 - RNA, 16 nt, Variola virus
uuugauacccugauau

SEQ ID NO: 3288262 - RNA, 15 nt, Variola virus
aauucgagaaagaua

SEQ ID NO: 3288263 - RNA, 16 nt, Variola virus
uguuugauaauuacgc

SEQ ID NO: 3288264 - RNA, 20 nt, Variola virus
agaguaguaucauuaaaucu

SEQ ID NO: 3288265 - RNA, 21 nt, Variola virus
auacuuuguaaucuagacaua

SEQ ID NO: 3288266 - RNA, 22 nt, Variola virus
uguuuugaggcagcaaauacug

SEQ ID NO: 3288267 - RNA, 16 nt, Variola virus
aguuuuggaucaaaug

SEQ ID NO: 3288268 - RNA, 20 nt, Variola virus
uuggagacgucaucuguucu

SEQ ID NO: 3288269 - RNA, 21 nt, Variola virus
gucuauauaguauuuuucuga

SEQ ID NO: 3288270 - RNA, 22 nt, Variola virus
uauauaauuuuuggacaaaugu

SEQ ID NO: 3288271 - RNA, 22 nt, Variola virus
auauccgguguuaaaaaaauua

SEQ ID NO: 3288272 - RNA, 16 nt, Variola virus
cuacauuauuaaauca

SEQ ID NO: 3288273 - RNA, 22 nt, Variola virus
cuagauauagcuuuuauuucca

SEQ ID NO: 3288274 - RNA, 17 nt, Variola virus
aucuuuucacuaaauaa

SEQ ID NO: 3288275 - RNA, 16 nt, Variola virus
uagugaccaacucauc

SEQ ID NO: 3288276 - RNA, 14 nt, Variola virus
aacugcucuagauu

SEQ ID NO: 3288277 - RNA, 19 nt, Variola virus
auaugugguguuacaguua

SEQ ID NO: 3288278 - RNA, 23 nt, Variola virus
auucuucuuuaaacgauuuucca

SEQ ID NO: 3288279 - RNA, 15 nt, Variola virus
aucuauuuuaaauac

SEQ ID NO: 3288280 - RNA, 16 nt, Variola virus
auuugauuauuuugaa

SEQ ID NO: 3288281 - RNA, 13 nt, Variola virus
auucauaacgaga

SEQ ID NO: 3288282 - RNA, 15 nt, Variola virus
ucugacgacaaacag

SEQ ID NO: 3288283 - RNA, 18 nt, Variola virus
auauaucccuuaaaaauu

SEQ ID NO: 3288284 - RNA, 15 nt, Variola virus
aaagauauuccaaga

SEQ ID NO: 3288285 - RNA, 19 nt, Variola virus
auucugaauagauccacca

SEQ ID NO: 3288286 - RNA, 14 nt, Variola virus
uuuauuaauacagg

SEQ ID NO: 3288287 - RNA, 12 nt, Variola virus
aaauauauuguu

SEQ ID NO: 3288288 - RNA, 22 nt, Variola virus
uucaacauuuuauggaaacuau

SEQ ID NO: 3288289 - RNA, 18 nt, Variola virus
uauuauggaaaucaacau

SEQ ID NO: 3288290 - RNA, 19 nt, Variola virus
agauuuacuguuuaucuaa

SEQ ID NO: 3288291 - RNA, 13 nt, Variola virus
acugacuuuagac

SEQ ID NO: 3288292 - RNA, 21 nt, Variola virus
auuaaaggcuuuuuauaucau

SEQ ID NO: 3288293 - RNA, 21 nt, Variola virus
ucguguuuguguaguuuucac

SEQ ID NO: 3288294 - RNA, 18 nt, Variola virus
acuaauauuuuauuucaa

SEQ ID NO: 3288295 - RNA, 19 nt, Variola virus
aauauuauucuuugauucg

SEQ ID NO: 3288296 - RNA, 14 nt, Variola virus
auauuguuaaauaa

SEQ ID NO: 3288297 - RNA, 17 nt, Variola virus
cuuuagaugaauuauua

SEQ ID NO: 3288298 - RNA, 23 nt, Variola virus
uuagugaaacauuccacaucguu

SEQ ID NO: 3288299 - RNA, 13 nt, Variola virus
acaucaucugaaa

SEQ ID NO: 3288300 - RNA, 13 nt, Variola virus
aucauuaaaugau

SEQ ID NO: 3288301 - RNA, 23 nt, Variola virus
cuaagauauacuaccgauauaca

SEQ ID NO: 3288302 - RNA, 21 nt, Variola virus
cugauaagauaucuucucaaa

SEQ ID NO: 3288303 - RNA, 23 nt, Variola virus
aaacggcaaaccaaaaacauuug

SEQ ID NO: 3288304 - RNA, 14 nt, Variola virus
gaauauuucuaguu

SEQ ID NO: 3288305 - RNA, 19 nt, Variola virus
aauuugaccugauuacauu

SEQ ID NO: 3288306 - RNA, 18 nt, Variola virus
ugaaaaauggauuuugau

SEQ ID NO: 3288307 - RNA, 18 nt, Variola virus
aauaugauagaaaugaug

SEQ ID NO: 3288308 - RNA, 17 nt, Variola virus
cuguugugaauauuuua

SEQ ID NO: 3288309 - RNA, 22 nt, Variola virus
uuaauaaaaauaauuuaguguu

SEQ ID NO: 3288310 - RNA, 16 nt, Variola virus
uuccaaucuuuugcaa

SEQ ID NO: 3288311 - RNA, 23 nt, Variola virus
augauuaaugacgauagauuuac

SEQ ID NO: 3288312 - RNA, 21 nt, Variola virus
auauacaacucucuaauacga

SEQ ID NO: 3288313 - RNA, 12 nt, Variola virus
cacguuaaacaa

SEQ ID NO: 3288314 - RNA, 16 nt, Variola virus
auacuaugaugucuag

SEQ ID NO: 3288315 - RNA, 23 nt, Variola virus
aagaaucuucaagagugcauuga

SEQ ID NO: 3288316 - RNA, 13 nt, Variola virus
guauacuuuuuaa

SEQ ID NO: 3288317 - RNA, 12 nt, Variola virus
uagaauuuccaa

SEQ ID NO: 3288318 - RNA, 16 nt, Variola virus
aucggacgcagaaauu

SEQ ID NO: 3288319 - RNA, 21 nt, Variola virus
ucuauaaacgaugguuuaauu

SEQ ID NO: 3288320 - RNA, 16 nt, Variola virus
acuguauuaagaacag

SEQ ID NO: 3288321 - RNA, 17 nt, Variola virus
aucaauuaaauaauuaa

SEQ ID NO: 3288322 - RNA, 17 nt, Variola virus
gcaagagcugauuauuu

SEQ ID NO: 3288323 - RNA, 17 nt, Variola virus
auauuaaagucaaauaa

SEQ ID NO: 3288324 - RNA, 23 nt, Variola virus
gccacaauauauucuaugauggu

SEQ ID NO: 3288325 - RNA, 20 nt, Variola virus
uaauauucauucaauauuua

SEQ ID NO: 3288326 - RNA, 21 nt, Variola virus
aaucucgucaguauugacaau

SEQ ID NO: 3288327 - RNA, 20 nt, Variola virus
aggaauagaaaucuugaaua

SEQ ID NO: 3288328 - RNA, 22 nt, Variola virus
cgaacacuaacgcgcaugauuu

SEQ ID NO: 3288329 - RNA, 22 nt, Variola virus
gaugauaucaguauauuauuau

SEQ ID NO: 3288330 - RNA, 19 nt, Variola virus
ccuguauucuuuuuaagau

SEQ ID NO: 3288331 - RNA, 14 nt, Variola virus
uaugaaucauacag

SEQ ID NO: 3288332 - RNA, 13 nt, Variola virus
agaaauaauauaa

SEQ ID NO: 3288333 - RNA, 24 nt, Variola virus
cuagacauuguacaauauguguua

SEQ ID NO: 3288334 - RNA, 13 nt, Variola virus
uuuuauacauauu

SEQ ID NO: 3288335 - RNA, 20 nt, Variola virus
auccuucagauaaucugaaa

SEQ ID NO: 3288336 - RNA, 14 nt, Variola virus
caaacauccucuau

SEQ ID NO: 3288337 - RNA, 20 nt, Variola virus
auuuuaaaauuauuaaacaa

SEQ ID NO: 3288338 - RNA, 18 nt, Variola virus
uuacugaauuaauaauau

SEQ ID NO: 3288339 - RNA, 16 nt, Variola virus
aguaagaguuaugaau

SEQ ID NO: 3288340 - RNA, 14 nt, Variola virus
uuuucguuguuuaa

SEQ ID NO: 3288341 - RNA, 13 nt, Variola virus
agauaacaaccuu

SEQ ID NO: 3288342 - RNA, 14 nt, Variola virus
aauguuaaaacuac

SEQ ID NO: 3288343 - RNA, 14 nt, Variola virus
guauauaguuuaua

SEQ ID NO: 3288344 - RNA, 18 nt, Variola virus
aaacaguuauuuucugaa

SEQ ID NO: 3288345 - RNA, 16 nt, Variola virus
auuaaugacgauagau

SEQ ID NO: 3288346 - RNA, 21 nt, Variola virus
ugauaugauuaucguuuucau

SEQ ID NO: 3288347 - RNA, 15 nt, Variola virus
aagagcaaacaucug

SEQ ID NO: 3288348 - RNA, 15 nt, Variola virus
acauguuuaaauaau

SEQ ID NO: 3288349 - RNA, 23 nt, Variola virus
aaaaucaggguuaucaaaguguu

SEQ ID NO: 3288350 - RNA, 15 nt, Variola virus
aaauaauuagaacua

SEQ ID NO: 3288351 - RNA, 21 nt, Variola virus
gacaauaacagagugcagaua

SEQ ID NO: 3288352 - RNA, 12 nt, Variola virus
auuccaaaauug

SEQ ID NO: 3288353 - RNA, 14 nt, Variola virus
ugugauuguucaau

SEQ ID NO: 3288354 - RNA, 22 nt, Variola virus
uagaacacauaaccaauuuaua

SEQ ID NO: 3288355 - RNA, 15 nt, Variola virus
aucguuuaaaguaaa

SEQ ID NO: 3288356 - RNA, 23 nt, Variola virus
uuucagcaaucuaacauuuuuaa

SEQ ID NO: 3288357 - RNA, 15 nt, Variola virus
aaaagccccaauuua

SEQ ID NO: 3288358 - RNA, 20 nt, Variola virus
aauacuuuaacaucacuaau

SEQ ID NO: 3288359 - RNA, 17 nt, Variola virus
uuaucguuuucaucuuu

SEQ ID NO: 3288360 - RNA, 16 nt, Variola virus
aguauuccaauaucug

SEQ ID NO: 3288361 - RNA, 21 nt, Variola virus
gaucuaacgaggaagaaauuu

SEQ ID NO: 3288362 - RNA, 15 nt, Variola virus
ucaaggaacaaauau

SEQ ID NO: 3288363 - RNA, 17 nt, Variola virus
uaaucguuauuaucauc

SEQ ID NO: 3288364 - RNA, 13 nt, Variola virus
auuuguauauaca

SEQ ID NO: 3288365 - RNA, 17 nt, Variola virus
uuacauaucuacguucu

SEQ ID NO: 3288366 - RNA, 17 nt, Variola virus
agaacccuuaauaacaa

SEQ ID NO: 3288367 - RNA, 20 nt, Variola virus
aauacaaggcacuaugucca

SEQ ID NO: 3288368 - RNA, 17 nt, Variola virus
guguaaaucuagaaauu

SEQ ID NO: 3288369 - RNA, 17 nt, Variola virus
uaauccaucaacaaugu

SEQ ID NO: 3288370 - RNA, 14 nt, Variola virus
cauagugcgucuaa

SEQ ID NO: 3288371 - RNA, 16 nt, Variola virus
cugucuggcaauaaau

SEQ ID NO: 3288372 - RNA, 14 nt, Variola virus
aacacuaaaaauau

SEQ ID NO: 3288373 - RNA, 22 nt, Variola virus
agauuugguaaaaugaaauauc

SEQ ID NO: 3288374 - RNA, 13 nt, Variola virus
aaguuuuaccauu

SEQ ID NO: 3288375 - RNA, 12 nt, Variola virus
acgaauaaagcg

SEQ ID NO: 3288376 - RNA, 23 nt, Variola virus
aauaguuuguacugcaaaaauaa

SEQ ID NO: 3288377 - RNA, 17 nt, Variola virus
ucacauccuuuauuuua

SEQ ID NO: 3288378 - RNA, 18 nt, Variola virus
auuacgaguugacacauu

SEQ ID NO: 3288379 - RNA, 21 nt, Variola virus
uugaugacacuaguuaagaac

SEQ ID NO: 3288380 - RNA, 15 nt, Variola virus
cagaauguacacuau

SEQ ID NO: 3288381 - RNA, 19 nt, Variola virus
uaauaucccacauugucau

SEQ ID NO: 3288382 - RNA, 18 nt, Variola virus
uaaauauuaauaaaguau

SEQ ID NO: 3288383 - RNA, 13 nt, Variola virus
cuauauuguauuc

SEQ ID NO: 3288384 - RNA, 13 nt, Variola virus
ucuucaaauucca

SEQ ID NO: 3288385 - RNA, 22 nt, Variola virus
ugccauaauucucauauauuga

SEQ ID NO: 3288386 - RNA, 15 nt, Variola virus
uguagauaugugaua

SEQ ID NO: 3288387 - RNA, 20 nt, Variola virus
caucucguuuagauuuucca

SEQ ID NO: 3288388 - RNA, 15 nt, Variola virus
cgaaucuaugauauu

SEQ ID NO: 3288389 - RNA, 20 nt, Variola virus
ugcaucuuauuagaauauua

SEQ ID NO: 3288390 - RNA, 21 nt, Variola virus
aauaacuucacuauugaucaa

SEQ ID NO: 3288391 - RNA, 23 nt, Variola virus
gauaauggaagacgcuauaucaa

SEQ ID NO: 3288392 - RNA, 14 nt, Variola virus
aggaucuagcaaag

SEQ ID NO: 3288393 - RNA, 22 nt, Variola virus
uuuauucgguaagacgaucauu

SEQ ID NO: 3288394 - RNA, 16 nt, Variola virus
auuaaauuauugauau

SEQ ID NO: 3288395 - RNA, 23 nt, Variola virus
uauuccgcucaucacuaaucaua

SEQ ID NO: 3288396 - RNA, 17 nt, Variola virus
ugaacauaguaagaaau

SEQ ID NO: 3288397 - RNA, 22 nt, Variola virus
aaugucuauaguucucaucuuu

SEQ ID NO: 3288398 - RNA, 15 nt, Variola virus
ucuuauuauuaauaa

SEQ ID NO: 3288399 - RNA, 19 nt, Variola virus
ucgauuacuauggauaucu

SEQ ID NO: 3288400 - RNA, 21 nt, Variola virus
guaaauagaauaguauaaugu

SEQ ID NO: 3288401 - RNA, 14 nt, Variola virus
cguaauuuuuuaua

SEQ ID NO: 3288402 - RNA, 20 nt, Variola virus
uuaguaaaaaauuuauuucu

SEQ ID NO: 3288403 - RNA, 21 nt, Variola virus
aguguauuuaugaaaaauaua

SEQ ID NO: 3288404 - RNA, 18 nt, Variola virus
uccucuucaacacaaagu

SEQ ID NO: 3288405 - RNA, 20 nt, Variola virus
acuacaaagggaaaaugcua

SEQ ID NO: 3288406 - RNA, 19 nt, Variola virus
agggugaguuaauaugcau

SEQ ID NO: 3288407 - RNA, 14 nt, Variola virus
cauuccaucauuua

SEQ ID NO: 3288408 - RNA, 14 nt, Variola virus
uucaucauuucaca

SEQ ID NO: 3288409 - RNA, 20 nt, Variola virus
uaauuguuauuuuauucaua

SEQ ID NO: 3288410 - RNA, 17 nt, Variola virus
acguaucucgucuaaau

SEQ ID NO: 3288411 - RNA, 20 nt, Variola virus
ucaugaaccaauacaaugua

SEQ ID NO: 3288412 - RNA, 15 nt, Variola virus
caaauuaaauucugg

SEQ ID NO: 3288413 - RNA, 18 nt, Variola virus
uaaagacacuccacaugc

SEQ ID NO: 3288414 - RNA, 20 nt, Variola virus
uaauacagcauccaacuuga

SEQ ID NO: 3288415 - RNA, 15 nt, Variola virus
aacucgguuguguau

SEQ ID NO: 3288416 - RNA, 19 nt, Variola virus
caauguauuuauaucugau

SEQ ID NO: 3288417 - RNA, 19 nt, Variola virus
gguagaccguuaaugaaga

SEQ ID NO: 3288418 - RNA, 13 nt, Variola virus
uagauuuuggaua

SEQ ID NO: 3288419 - RNA, 12 nt, Variola virus
agaggaaauauc

SEQ ID NO: 3288420 - RNA, 17 nt, Variola virus
cauucaaccauucauaa

SEQ ID NO: 3288421 - RNA, 16 nt, Variola virus
caccaagaaagcugua

SEQ ID NO: 3288422 - RNA, 15 nt, Variola virus
auuuauaaaaugcuu

SEQ ID NO: 3288423 - RNA, 13 nt, Variola virus
guucgauagaaac

SEQ ID NO: 3288424 - RNA, 13 nt, Variola virus
acaauacagcagu

SEQ ID NO: 3288425 - RNA, 23 nt, Variola virus
gaauuacuuuacauauaauauca

SEQ ID NO: 3288426 - RNA, 19 nt, Variola virus
aacagucacgauaucucuu

SEQ ID NO: 3288427 - RNA, 19 nt, Variola virus
uguuugugaugcuuaaaau

SEQ ID NO: 3288428 - RNA, 18 nt, Variola virus
guaauauggaauaguguu

SEQ ID NO: 3288429 - RNA, 18 nt, Variola virus
uauauucuuacaguacau

SEQ ID NO: 3288430 - RNA, 23 nt, Variola virus
gaaauagcgcugaaaauaaagau

SEQ ID NO: 3288431 - RNA, 16 nt, Variola virus
auagaagauauuacau

SEQ ID NO: 3288432 - RNA, 19 nt, Variola virus
uauguugugauucuagaau

SEQ ID NO: 3288433 - RNA, 19 nt, Variola virus
guuaaugcaucuaaaacaa

SEQ ID NO: 3288434 - RNA, 19 nt, Variola virus
gugaguacggauuaaacau

SEQ ID NO: 3288435 - RNA, 18 nt, Variola virus
aauacccugaugaaaaug

SEQ ID NO: 3288436 - RNA, 18 nt, Variola virus
gaaguacuuauuaaaacc

SEQ ID NO: 3288437 - RNA, 18 nt, Variola virus
ucauaaaaucgucacaau

SEQ ID NO: 3288438 - RNA, 15 nt, Variola virus
uagugacaauacuau

SEQ ID NO: 3288439 - RNA, 22 nt, Variola virus
uuggaaaaaugaugaauuaaug

SEQ ID NO: 3288440 - RNA, 22 nt, Variola virus
gcuuauaucagguauaauagau

SEQ ID NO: 3288441 - RNA, 16 nt, Variola virus
gcaauaagucuuucuc

SEQ ID NO: 3288442 - RNA, 14 nt, Variola virus
uaaaugacaaguau

SEQ ID NO: 3288443 - RNA, 16 nt, Variola virus
uuaaaugccuuauucu

SEQ ID NO: 3288444 - RNA, 14 nt, Variola virus
auaagaugucuaug

SEQ ID NO: 3288445 - RNA, 22 nt, Variola virus
uuauccuuuagaugaauuauua

SEQ ID NO: 3288446 - RNA, 16 nt, Variola virus
acauaccugauuagaa

SEQ ID NO: 3288447 - RNA, 17 nt, Variola virus
aauacuuaaaaauggau

SEQ ID NO: 3288448 - RNA, 14 nt, Variola virus
uggucaaccuuugu

SEQ ID NO: 3288449 - RNA, 20 nt, Variola virus
ucaaauucucauucauguau

SEQ ID NO: 3288450 - RNA, 21 nt, Variola virus
uuagagauaauauccugaaca

SEQ ID NO: 3288451 - RNA, 20 nt, Variola virus
ugaacuccgccguaguuucc

SEQ ID NO: 3288452 - RNA, 19 nt, Variola virus
uuuuaugacaaacuuuacu

SEQ ID NO: 3288453 - RNA, 14 nt, Variola virus
uacggaaagaacca

SEQ ID NO: 3288454 - RNA, 14 nt, Variola virus
aauaaguaaaaagu

SEQ ID NO: 3288455 - RNA, 17 nt, Variola virus
uaaaucaucgauuuuca

SEQ ID NO: 3288456 - RNA, 16 nt, Variola virus
gauaacaaauuaaaga

SEQ ID NO: 3288457 - RNA, 14 nt, Variola virus
uucuucaaaugaag

SEQ ID NO: 3288458 - RNA, 20 nt, Variola virus
cuauaagauuaucaaaaucu

SEQ ID NO: 3288459 - RNA, 16 nt, Variola virus
acaaacuauagaaauu

SEQ ID NO: 3288460 - RNA, 13 nt, Variola virus
gaagauagauaua

SEQ ID NO: 3288461 - RNA, 16 nt, Variola virus
aauaucagaaaggaua

SEQ ID NO: 3288462 - RNA, 14 nt, Variola virus
ccaucaaaagcauu

SEQ ID NO: 3288463 - RNA, 14 nt, Variola virus
aguaugugaauaga

SEQ ID NO: 3288464 - RNA, 19 nt, Variola virus
aucauauaguuauguauau

SEQ ID NO: 3288465 - RNA, 20 nt, Variola virus
agacuuuaagcuaaaauauu

SEQ ID NO: 3288466 - RNA, 18 nt, Variola virus
acgauguaguuagauaga

SEQ ID NO: 3288467 - RNA, 16 nt, Variola virus
uacaaauauuauacau

SEQ ID NO: 3288468 - RNA, 13 nt, Variola virus
ggucaauagcgac

SEQ ID NO: 3288469 - RNA, 12 nt, Variola virus
aguuguaaaugu

SEQ ID NO: 3288470 - RNA, 18 nt, Variola virus
auacuuuguaauauaaug

SEQ ID NO: 3288471 - RNA, 14 nt, Variola virus
caauuuccaacaaa

SEQ ID NO: 3288472 - RNA, 14 nt, Variola virus
gaucuuuuguacau

SEQ ID NO: 3288473 - RNA, 14 nt, Variola virus
uacuagaguacuua

SEQ ID NO: 3288474 - RNA, 20 nt, Variola virus
auuaugucucugaacuauau

SEQ ID NO: 3288475 - RNA, 18 nt, Variola virus
cagaauuucuacauaauu

SEQ ID NO: 3288476 - RNA, 16 nt, Variola virus
caagaaguuuaucuac

SEQ ID NO: 3288477 - RNA, 21 nt, Variola virus
guauucuauaccaauauuauu

SEQ ID NO: 3288478 - RNA, 11 nt, Variola virus
cuguguucaag

SEQ ID NO: 3288479 - RNA, 18 nt, Variola virus
aauaaacuagaaaaacuu

SEQ ID NO: 3288480 - RNA, 13 nt, Variola virus
cuguuaaucuuua

SEQ ID NO: 3288481 - RNA, 17 nt, Variola virus
accaaaaacucauauaa

SEQ ID NO: 3288482 - RNA, 23 nt, Variola virus
agaagaauucaagucaggaacua

SEQ ID NO: 3288483 - RNA, 17 nt, Variola virus
gcacuagguacaucauu

SEQ ID NO: 3288484 - RNA, 21 nt, Variola virus
guaugugugugugguauagau

SEQ ID NO: 3288485 - RNA, 14 nt, Variola virus
cuauagaucaugua

SEQ ID NO: 3288486 - RNA, 13 nt, Variola virus
uugccaaguuauc

SEQ ID NO: 3288487 - RNA, 15 nt, Variola virus
cgucuuuauuuucua

SEQ ID NO: 3288488 - RNA, 24 nt, Variola virus
aaagagaacguauuuauuguuacu

SEQ ID NO: 3288489 - RNA, 18 nt, Variola virus
aaguuucguacaaauaca

SEQ ID NO: 3288490 - RNA, 15 nt, Variola virus
auagccaaaagacua

SEQ ID NO: 3288491 - RNA, 17 nt, Variola virus
augacgucaugucuauu

SEQ ID NO: 3288492 - RNA, 18 nt, Variola virus
uugagacgggucaaacaa

SEQ ID NO: 3288493 - RNA, 17 nt, Variola virus
uuuucaaagaaaaaggu

SEQ ID NO: 3288494 - RNA, 14 nt, Variola virus
cuauugccuuagau

SEQ ID NO: 3288495 - RNA, 17 nt, Variola virus
auuacuacguaaagaag

SEQ ID NO: 3288496 - RNA, 14 nt, Variola virus
gaaauccuauuuua

SEQ ID NO: 3288497 - RNA, 15 nt, Variola virus
augaacuaagagaaa

SEQ ID NO: 3288498 - RNA, 11 nt, Variola virus
gguaauacuua

SEQ ID NO: 3288499 - RNA, 12 nt, Variola virus
cuaauuaauuuu

SEQ ID NO: 3288500 - RNA, 15 nt, Variola virus
cauuuacaacucuau

SEQ ID NO: 3288501 - RNA, 15 nt, Variola virus
auauuuacaguuacu

SEQ ID NO: 3288502 - RNA, 21 nt, Variola virus
aacggagaauaucuauacaua

SEQ ID NO: 3288503 - RNA, 23 nt, Variola virus
auggauuaguuagacugaaugcu

SEQ ID NO: 3288504 - RNA, 18 nt, Variola virus
uuggcgcuagucaucuca

SEQ ID NO: 3288505 - RNA, 20 nt, Variola virus
auaauuucuacuuacuuaau

SEQ ID NO: 3288506 - RNA, 16 nt, Variola virus
auuaaaggauguacuc

SEQ ID NO: 3288507 - RNA, 20 nt, Variola virus
guaucauccacauauuuaua

SEQ ID NO: 3288508 - RNA, 21 nt, Variola virus
aucgauaauuguuucauaugu

SEQ ID NO: 3288509 - RNA, 12 nt, Variola virus
aaagugaaaauc

SEQ ID NO: 3288510 - RNA, 12 nt, Variola virus
aaacugaaaaug

SEQ ID NO: 3288511 - RNA, 21 nt, Variola virus
cugugcauaaauuaaaauaca

SEQ ID NO: 3288512 - RNA, 14 nt, Variola virus
agauacaucuauau

SEQ ID NO: 3288513 - RNA, 13 nt, Variola virus
auaaaucugaugu

SEQ ID NO: 3288514 - RNA, 13 nt, Variola virus
aaauagaacuuau

SEQ ID NO: 3288515 - RNA, 11 nt, Variola virus
ccuuguaacuu

SEQ ID NO: 3288516 - RNA, 15 nt, Variola virus
acaauaacuacauau

SEQ ID NO: 3288517 - RNA, 19 nt, Variola virus
uuuagaaaaaugcuaauau

SEQ ID NO: 3288518 - RNA, 22 nt, Variola virus
aguuacucuuggucuaauacug

SEQ ID NO: 3288519 - RNA, 18 nt, Variola virus
uucaaaaauauucauuaa

SEQ ID NO: 3288520 - RNA, 11 nt, Variola virus
aucuaauuaau

SEQ ID NO: 3288521 - RNA, 22 nt, Variola virus
gugauaaacuugugcuaaucuc

SEQ ID NO: 3288522 - RNA, 21 nt, Variola virus
uauaaaaauuuuuuauacauu

SEQ ID NO: 3288523 - RNA, 14 nt, Variola virus
acaucucuuuucca

SEQ ID NO: 3288524 - RNA, 20 nt, Variola virus
uuugucuccuccuccguaaa

SEQ ID NO: 3288525 - RNA, 21 nt, Variola virus
caaaaaacuuuacgauagacu

SEQ ID NO: 3288526 - RNA, 14 nt, Variola virus
agauuauaacuuau

SEQ ID NO: 3288527 - RNA, 23 nt, Variola virus
ucaaugugaauguauucacuuaa

SEQ ID NO: 3288528 - RNA, 18 nt, Variola virus
caccucuaccgaauagag

SEQ ID NO: 3288529 - RNA, 14 nt, Variola virus
cauuaauuauaacg

SEQ ID NO: 3288530 - RNA, 23 nt, Variola virus
cugauguaacccacguaacauua

SEQ ID NO: 3288531 - RNA, 16 nt, Variola virus
ucaaacacgauauuca

SEQ ID NO: 3288532 - RNA, 13 nt, Variola virus
uaucuucuaaaau

SEQ ID NO: 3288533 - RNA, 23 nt, Variola virus
aaguuuauuaguguuuagauaau

SEQ ID NO: 3288534 - RNA, 16 nt, Variola virus
uaucggaggaauuaag

SEQ ID NO: 3288535 - RNA, 16 nt, Variola virus
aaugacgaauugaaaa

SEQ ID NO: 3288536 - RNA, 12 nt, Variola virus
auuagaauguau

SEQ ID NO: 3288537 - RNA, 13 nt, Variola virus
agguauuuauuca

SEQ ID NO: 3288538 - RNA, 21 nt, Variola virus
cauuauggauaaucuauuuac

SEQ ID NO: 3288539 - RNA, 13 nt, Variola virus
aaauuuaccacua

SEQ ID NO: 3288540 - RNA, 16 nt, Variola virus
auauuauauaaacauu

SEQ ID NO: 3288541 - RNA, 13 nt, Variola virus
cggaaaugauaua

SEQ ID NO: 3288542 - RNA, 15 nt, Variola virus
aaagauguauuaccu

SEQ ID NO: 3288543 - RNA, 21 nt, Variola virus
uuaaacaaauaaguauuauca

SEQ ID NO: 3288544 - RNA, 22 nt, Variola virus
auguucucguuuccaaaaaaug

SEQ ID NO: 3288545 - RNA, 16 nt, Variola virus
ugaguuuuuaggaaau

SEQ ID NO: 3288546 - RNA, 16 nt, Variola virus
ugauacguauauacac

SEQ ID NO: 3288547 - RNA, 19 nt, Variola virus
auaaagucugucaaaucau

SEQ ID NO: 3288548 - RNA, 18 nt, Variola virus
acgaugucaauaaugccg

SEQ ID NO: 3288549 - RNA, 12 nt, Variola virus
aaaguuuaagaa

SEQ ID NO: 3288550 - RNA, 22 nt, Variola virus
ggaacaguucuaccaccaguaa

SEQ ID NO: 3288551 - RNA, 16 nt, Variola virus
auugccaacucucaaa

SEQ ID NO: 3288552 - RNA, 19 nt, Variola virus
agauaucuucuuuuuucca

SEQ ID NO: 3288553 - RNA, 16 nt, Variola virus
auuuaguauuaaauga

SEQ ID NO: 3288554 - RNA, 12 nt, Variola virus
aauauaacagua

SEQ ID NO: 3288555 - RNA, 16 nt, Variola virus
cuaaaagcuguuaaag

SEQ ID NO: 3288556 - RNA, 18 nt, Variola virus
ucuauuuuaucauuuucc

SEQ ID NO: 3288557 - RNA, 22 nt, Variola virus
acuuuuuaacgaaauuagaaaa

SEQ ID NO: 3288558 - RNA, 12 nt, Variola virus
aagauaauccaa

SEQ ID NO: 3288559 - RNA, 19 nt, Variola virus
guuauugaaauuaaucaua

SEQ ID NO: 3288560 - RNA, 15 nt, Variola virus
uuacauucucauuaa

SEQ ID NO: 3288561 - RNA, 18 nt, Variola virus
agugcuauuuugacauac

SEQ ID NO: 3288562 - RNA, 17 nt, Variola virus
accaggguuuauuucau

SEQ ID NO: 3288563 - RNA, 20 nt, Variola virus
acauuuuuuaaagcuaaaau

SEQ ID NO: 3288564 - RNA, 12 nt, Variola virus
aauuuauuucua

SEQ ID NO: 3288565 - RNA, 15 nt, Variola virus
auaucugauguuguu

SEQ ID NO: 3288566 - RNA, 19 nt, Variola virus
uaauauucccagaaaagau

SEQ ID NO: 3288567 - RNA, 18 nt, Variola virus
ucuucuuugauuaaugau

SEQ ID NO: 3288568 - RNA, 19 nt, Variola virus
uuaauuuguacauucuuaa

SEQ ID NO: 3288569 - RNA, 22 nt, Variola virus
augugacccaguaaugcauuua

SEQ ID NO: 3288570 - RNA, 19 nt, Variola virus
ccacuuuaauaauaucaua

SEQ ID NO: 3288571 - RNA, 15 nt, Variola virus
cuauguuuuuaauga

SEQ ID NO: 3288572 - RNA, 13 nt, Variola virus
acaaugaacuaau

SEQ ID NO: 3288573 - RNA, 19 nt, Variola virus
guuuaccacaauguauaau

SEQ ID NO: 3288574 - RNA, 11 nt, Variola virus
uaaauuagaag

SEQ ID NO: 3288575 - RNA, 21 nt, Variola virus
cuccgucaucaucuccuggag

SEQ ID NO: 3288576 - RNA, 21 nt, Variola virus
cuacauaguuaucuaucuuaa

SEQ ID NO: 3288577 - RNA, 17 nt, Variola virus
acauaucgguguuucca

SEQ ID NO: 3288578 - RNA, 16 nt, Variola virus
ucaaacgaauaaacaa

SEQ ID NO: 3288579 - RNA, 15 nt, Variola virus
ucuacauuuucaguc

SEQ ID NO: 3288580 - RNA, 18 nt, Variola virus
uuauuuaaguuuuugaua

SEQ ID NO: 3288581 - RNA, 23 nt, Variola virus
cauucacuauuccgucacuggcu

SEQ ID NO: 3288582 - RNA, 16 nt, Variola virus
aauuucuauuagauaa

SEQ ID NO: 3288583 - RNA, 21 nt, Variola virus
ugauaacguuggcaauacuaa

SEQ ID NO: 3288584 - RNA, 22 nt, Variola virus
uaaaaaccaauuuguauaugug

SEQ ID NO: 3288585 - RNA, 18 nt, Variola virus
uaagucaacguuuacauu

SEQ ID NO: 3288586 - RNA, 15 nt, Variola virus
auauauuagaaauac

SEQ ID NO: 3288587 - RNA, 23 nt, Variola virus
gucuaugucucuuauuagagauu

SEQ ID NO: 3288588 - RNA, 16 nt, Variola virus
caaaauuuauauauca

SEQ ID NO: 3288589 - RNA, 24 nt, Variola virus
aaaaugaaaacacuuuaguaauua

SEQ ID NO: 3288590 - RNA, 13 nt, Variola virus
auuacaacauaau

SEQ ID NO: 3288591 - RNA, 21 nt, Variola virus
acacucaacggaaaacauuuu

SEQ ID NO: 3288592 - RNA, 14 nt, Variola virus
gucauccuucacuc

SEQ ID NO: 3288593 - RNA, 20 nt, Variola virus
uauacagugaacacacaaua

SEQ ID NO: 3288594 - RNA, 20 nt, Variola virus
uuaugaaaaaguaaaugaug

SEQ ID NO: 3288595 - RNA, 21 nt, Variola virus
gaauauggggaaaauauucua

SEQ ID NO: 3288596 - RNA, 16 nt, Variola virus
guaauuaauuguuuua

SEQ ID NO: 3288597 - RNA, 22 nt, Variola virus
acauggauuuaucauaucaugg

SEQ ID NO: 3288598 - RNA, 18 nt, Variola virus
auuaccaucguuguugaa

SEQ ID NO: 3288599 - RNA, 20 nt, Variola virus
ugaugacacuagaugauuug

SEQ ID NO: 3288600 - RNA, 22 nt, Variola virus
uaugucuagcaaugaucuaaau

SEQ ID NO: 3288601 - RNA, 22 nt, Variola virus
aucuccacacagucaaauccgu

SEQ ID NO: 3288602 - RNA, 15 nt, Variola virus
caaaggaugaaagaa

SEQ ID NO: 3288603 - RNA, 19 nt, Variola virus
aucauauuauaaagaugau

SEQ ID NO: 3288604 - RNA, 13 nt, Variola virus
aauucuaauggau

SEQ ID NO: 3288605 - RNA, 22 nt, Variola virus
ucuucucgcuaguuuacuaugu

SEQ ID NO: 3288606 - RNA, 17 nt, Variola virus
aauucgacaaugaugcg

SEQ ID NO: 3288607 - RNA, 18 nt, Variola virus
cauuauucuauuucgaau

SEQ ID NO: 3288608 - RNA, 18 nt, Variola virus
auacacuguuuaaaauua

SEQ ID NO: 3288609 - RNA, 17 nt, Variola virus
aaguuaguuauuuuacg

SEQ ID NO: 3288610 - RNA, 12 nt, Variola virus
uucuuaagaaau

SEQ ID NO: 3288611 - RNA, 19 nt, Variola virus
uucaaugcugguugcaaga

SEQ ID NO: 3288612 - RNA, 23 nt, Variola virus
cuaguagaggcgguauuacugag

SEQ ID NO: 3288613 - RNA, 22 nt, Variola virus
aauguuugauaaaaauauguau

SEQ ID NO: 3288614 - RNA, 23 nt, Variola virus
cauauacuauuacuuaucacgau

SEQ ID NO: 3288615 - RNA, 12 nt, Variola virus
gauuaauguuuu

SEQ ID NO: 3288616 - RNA, 21 nt, Variola virus
uguucaaaaauuuagaaugau

SEQ ID NO: 3288617 - RNA, 16 nt, Variola virus
gcuaauugucuuucuc

SEQ ID NO: 3288618 - RNA, 13 nt, Variola virus
auauaaauuauuc

SEQ ID NO: 3288619 - RNA, 15 nt, Variola virus
cucaugucaaauugu

SEQ ID NO: 3288620 - RNA, 15 nt, Variola virus
acucgcguuuagagg

SEQ ID NO: 3288621 - RNA, 14 nt, Variola virus
aacucuuuuccauu

SEQ ID NO: 3288622 - RNA, 15 nt, Variola virus
aacauugauaacuac

SEQ ID NO: 3288623 - RNA, 18 nt, Variola virus
augugacucuaguaacuc

SEQ ID NO: 3288624 - RNA, 17 nt, Variola virus
aaauauauuuucauuua

SEQ ID NO: 3288625 - RNA, 21 nt, Variola virus
aauaugcggaaccucgagaau

SEQ ID NO: 3288626 - RNA, 21 nt, Variola virus
gugcauaauaaaguauaugua

SEQ ID NO: 3288627 - RNA, 20 nt, Variola virus
acucucuacccuaaacuuua

SEQ ID NO: 3288628 - RNA, 13 nt, Variola virus
cguuagacauaaa

SEQ ID NO: 3288629 - RNA, 15 nt, Variola virus
aauccauucuaauga

SEQ ID NO: 3288630 - RNA, 19 nt, Variola virus
cuagaaaacgaaaacaucc

SEQ ID NO: 3288631 - RNA, 15 nt, Variola virus
cagaggaguuauuua

SEQ ID NO: 3288632 - RNA, 19 nt, Variola virus
gauaguacagcguaguaca

SEQ ID NO: 3288633 - RNA, 22 nt, Variola virus
auuaguaaaacuaguauugugu

SEQ ID NO: 3288634 - RNA, 15 nt, Variola virus
uguuaauacaucaau

SEQ ID NO: 3288635 - RNA, 14 nt, Variola virus
auucugcaauauug

SEQ ID NO: 3288636 - RNA, 17 nt, Variola virus
ggaaacuuuuguuuugu

SEQ ID NO: 3288637 - RNA, 15 nt, Variola virus
aacuaucuuucaaga

SEQ ID NO: 3288638 - RNA, 20 nt, Variola virus
auuacauucucauuaauuaa

SEQ ID NO: 3288639 - RNA, 15 nt, Variola virus
auucuaauacauaau

SEQ ID NO: 3288640 - RNA, 14 nt, Variola virus
cuuuauaaugcauu

SEQ ID NO: 3288641 - RNA, 20 nt, Variola virus
auaaacauuuguguuuguau

SEQ ID NO: 3288642 - RNA, 15 nt, Variola virus
auguaauaacaaagg

SEQ ID NO: 3288643 - RNA, 15 nt, Variola virus
aauaauuauguagua

SEQ ID NO: 3288644 - RNA, 15 nt, Variola virus
ggucuaucaauaacu

SEQ ID NO: 3288645 - RNA, 13 nt, Variola virus
auucuaaauggau

SEQ ID NO: 3288646 - RNA, 20 nt, Variola virus
agaaaacucguuauuaacua

SEQ ID NO: 3288647 - RNA, 19 nt, Variola virus
auucuagacuccgcaucaa

SEQ ID NO: 3288648 - RNA, 19 nt, Variola virus
uaauauaaucuagacagau

SEQ ID NO: 3288649 - RNA, 16 nt, Variola virus
acauaacucuuuucca

SEQ ID NO: 3288650 - RNA, 13 nt, Variola virus
gacuauaaaauau

SEQ ID NO: 3288651 - RNA, 16 nt, Variola virus
cuuuuuuccaaacugc

SEQ ID NO: 3288652 - RNA, 19 nt, Variola virus
aggauaugauaaaaauaua

SEQ ID NO: 3288653 - RNA, 13 nt, Variola virus
guaccaaauuaau

SEQ ID NO: 3288654 - RNA, 23 nt, Variola virus
auggucuauauauacacuacaau

SEQ ID NO: 3288655 - RNA, 21 nt, Variola virus
ugucaucgaaaugguagauau

SEQ ID NO: 3288656 - RNA, 20 nt, Variola virus
augucugauggcgacauaau

SEQ ID NO: 3288657 - RNA, 13 nt, Variola virus
uauauauguagug

SEQ ID NO: 3288658 - RNA, 17 nt, Variola virus
uccauauuuuagaauau

SEQ ID NO: 3288659 - RNA, 15 nt, Variola virus
accagaugucauuau

SEQ ID NO: 3288660 - RNA, 22 nt, Variola virus
uaaauuauuccaucgauacauc

SEQ ID NO: 3288661 - RNA, 15 nt, Variola virus
auucgaauucaaaug

SEQ ID NO: 3288662 - RNA, 18 nt, Variola virus
ucucuuaguaaguuuauu

SEQ ID NO: 3288663 - RNA, 16 nt, Variola virus
aaaaucauugggauuu

SEQ ID NO: 3288664 - RNA, 22 nt, Variola virus
agaugaaucaaauguaacuauu

SEQ ID NO: 3288665 - RNA, 17 nt, Variola virus
uaaucucuccagaguau

SEQ ID NO: 3288666 - RNA, 12 nt, Variola virus
aacuuuuuggua

SEQ ID NO: 3288667 - RNA, 15 nt, Variola virus
auaccguuaaauaua

SEQ ID NO: 3288668 - RNA, 22 nt, Variola virus
ccaaguaggugcaucuggagca

SEQ ID NO: 3288669 - RNA, 22 nt, Variola virus
aaauuauucacuauaucaguau

SEQ ID NO: 3288670 - RNA, 14 nt, Variola virus
caucuauaucaucu

SEQ ID NO: 3288671 - RNA, 16 nt, Variola virus
uuaaaauaucuauuca

SEQ ID NO: 3288672 - RNA, 22 nt, Variola virus
uaaugccuguaaaaauaaacau

SEQ ID NO: 3288673 - RNA, 14 nt, Variola virus
aaauguguaauaau

SEQ ID NO: 3288674 - RNA, 14 nt, Variola virus
uaaaucuucacauu

SEQ ID NO: 3288675 - RNA, 11 nt, Variola virus
aaaauccacuu

SEQ ID NO: 3288676 - RNA, 12 nt, Variola virus
auauaaauacuu

SEQ ID NO: 3288677 - RNA, 15 nt, Variola virus
gaguuggauaucauc

SEQ ID NO: 3288678 - RNA, 16 nt, Variola virus
augucaucgaaauggu

SEQ ID NO: 3288679 - RNA, 22 nt, Variola virus
aucaccauggacauaaagauag

SEQ ID NO: 3288680 - RNA, 13 nt, Variola virus
uaauuucacgaau

SEQ ID NO: 3288681 - RNA, 17 nt, Variola virus
uaagauuuuaaauguau

SEQ ID NO: 3288682 - RNA, 15 nt, Variola virus
aucucguuuagaaaa

SEQ ID NO: 3288683 - RNA, 17 nt, Variola virus
gauacauggaaauguau

SEQ ID NO: 3288684 - RNA, 13 nt, Variola virus
uuuccuacauaac

SEQ ID NO: 3288685 - RNA, 16 nt, Variola virus
uuuacagauauauuca

SEQ ID NO: 3288686 - RNA, 16 nt, Variola virus
ucucggacauuucagc

SEQ ID NO: 3288687 - RNA, 23 nt, Variola virus
uguacuucuuucaguucuggaua

SEQ ID NO: 3288688 - RNA, 19 nt, Variola virus
auaucccacauugucaucu

SEQ ID NO: 3288689 - RNA, 15 nt, Variola virus
aauacaacaaccauu

SEQ ID NO: 3288690 - RNA, 17 nt, Variola virus
agguucauuguuaucca

SEQ ID NO: 3288691 - RNA, 16 nt, Variola virus
gaaaaucauacagaca

SEQ ID NO: 3288692 - RNA, 14 nt, Variola virus
uauacauuacugaa

SEQ ID NO: 3288693 - RNA, 14 nt, Variola virus
auauagacaaaaau

SEQ ID NO: 3288694 - RNA, 13 nt, Variola virus
uauuguuaucgua

SEQ ID NO: 3288695 - RNA, 16 nt, Variola virus
aacacuacaacagaua

SEQ ID NO: 3288696 - RNA, 19 nt, Variola virus
guaaagauaucuauacuua

SEQ ID NO: 3288697 - RNA, 11 nt, Variola virus
cuccuccacca

SEQ ID NO: 3288698 - RNA, 15 nt, Variola virus
ccaucaaauuguuua

SEQ ID NO: 3288699 - RNA, 15 nt, Variola virus
caacaaauauaaaau

SEQ ID NO: 3288700 - RNA, 16 nt, Variola virus
uuuagaguauuucuca

SEQ ID NO: 3288701 - RNA, 11 nt, Variola virus
aucauuaacga

SEQ ID NO: 3288702 - RNA, 22 nt, Variola virus
auuauacuguaacacaaugaag

SEQ ID NO: 3288703 - RNA, 15 nt, Variola virus
acauccauuucuaga

SEQ ID NO: 3288704 - RNA, 17 nt, Variola virus
aaaugauaucuuagaau

SEQ ID NO: 3288705 - RNA, 22 nt, Variola virus
cauguaaacuugacaaaaauug

SEQ ID NO: 3288706 - RNA, 19 nt, Variola virus
auuaaauagaauauuuaac

SEQ ID NO: 3288707 - RNA, 13 nt, Variola virus
gaacuaagagaaa

SEQ ID NO: 3288708 - RNA, 17 nt, Variola virus
gcaauucgcuaaacaau

SEQ ID NO: 3288709 - RNA, 16 nt, Variola virus
auugggagucaaugaa

SEQ ID NO: 3288710 - RNA, 17 nt, Variola virus
ucauuaauaauuucuag

SEQ ID NO: 3288711 - RNA, 14 nt, Variola virus
gcagaauagauauu

SEQ ID NO: 3288712 - RNA, 20 nt, Variola virus
uuuagaaggaguguuuucuu

SEQ ID NO: 3288713 - RNA, 23 nt, Variola virus
acauuggcgccguuuaauuuccu

SEQ ID NO: 3288714 - RNA, 21 nt, Variola virus
uguuuuugaacuguucaaaau

SEQ ID NO: 3288715 - RNA, 14 nt, Variola virus
uguaucuagugaua

SEQ ID NO: 3288716 - RNA, 14 nt, Variola virus
ucuucaacacaaag

SEQ ID NO: 3288717 - RNA, 22 nt, Variola virus
guaucucuaccuaugauuaaau

SEQ ID NO: 3288718 - RNA, 20 nt, Variola virus
cuuaguauuuuuagauauca

SEQ ID NO: 3288719 - RNA, 21 nt, Variola virus
agacucuaucgcgugucuaua

SEQ ID NO: 3288720 - RNA, 22 nt, Variola virus
aaauauuaauaacauuacauau

SEQ ID NO: 3288721 - RNA, 16 nt, Variola virus
auaauaggauaugauu

SEQ ID NO: 3288722 - RNA, 17 nt, Variola virus
uuucacuuuaucucauu

SEQ ID NO: 3288723 - RNA, 18 nt, Variola virus
aguuaaagaaaaauacuc

SEQ ID NO: 3288724 - RNA, 22 nt, Variola virus
aacaauacaguauauaacuauu

SEQ ID NO: 3288725 - RNA, 21 nt, Variola virus
acaaauauaugcaaaauaaua

SEQ ID NO: 3288726 - RNA, 13 nt, Variola virus
ccaauuuuucaga

SEQ ID NO: 3288727 - RNA, 15 nt, Variola virus
cuauacaagucgucu

SEQ ID NO: 3288728 - RNA, 16 nt, Variola virus
uaucuggcggugaaau

SEQ ID NO: 3288729 - RNA, 23 nt, Variola virus
uccauguucgagcauacuagcau

SEQ ID NO: 3288730 - RNA, 17 nt, Variola virus
caaccaaaaaggauaaa

SEQ ID NO: 3288731 - RNA, 17 nt, Variola virus
aucucuacauuguuuac

SEQ ID NO: 3288732 - RNA, 22 nt, Variola virus
cauuaccuccacgauacauuug

SEQ ID NO: 3288733 - RNA, 13 nt, Variola virus
uuaaauucuuuaa

SEQ ID NO: 3288734 - RNA, 22 nt, Variola virus
agucuuggacuaauuauacuuu

SEQ ID NO: 3288735 - RNA, 18 nt, Variola virus
accaauaauaguagaauu

SEQ ID NO: 3288736 - RNA, 21 nt, Variola virus
uaucgcauuuucuaacgugau

SEQ ID NO: 3288737 - RNA, 15 nt, Variola virus
uuaguacauucuuca

SEQ ID NO: 3288738 - RNA, 16 nt, Variola virus
uauagaccguuacauu

SEQ ID NO: 3288739 - RNA, 19 nt, Variola virus
auaucauacaugauauuca

SEQ ID NO: 3288740 - RNA, 18 nt, Variola virus
uacaacauuccaaagauc

SEQ ID NO: 3288741 - RNA, 15 nt, Variola virus
aauuuaauaagaaau

SEQ ID NO: 3288742 - RNA, 16 nt, Variola virus
auagauaauuguaaca

SEQ ID NO: 3288743 - RNA, 13 nt, Variola virus
uggagaugaaugc

SEQ ID NO: 3288744 - RNA, 21 nt, Variola virus
aaaugaacuuuuacagaucua

SEQ ID NO: 3288745 - RNA, 17 nt, Variola virus
auugauuagaaaauaua

SEQ ID NO: 3288746 - RNA, 17 nt, Variola virus
uaauuuaacuauuuuag

SEQ ID NO: 3288747 - RNA, 18 nt, Variola virus
auagaacaauauaaugua

SEQ ID NO: 3288748 - RNA, 12 nt, Variola virus
acuaagaaaguu

SEQ ID NO: 3288749 - RNA, 19 nt, Variola virus
uuauagaauugucuaucua

SEQ ID NO: 3288750 - RNA, 20 nt, Variola virus
caacuuaaacaaaauacaau

SEQ ID NO: 3288751 - RNA, 17 nt, Variola virus
gcgaaccgauuaaacau

SEQ ID NO: 3288752 - RNA, 18 nt, Variola virus
gaaucccuacauauuuua

SEQ ID NO: 3288753 - RNA, 17 nt, Variola virus
ucguauaccauuucuag

SEQ ID NO: 3288754 - RNA, 12 nt, Variola virus
cacuacaucuuu

SEQ ID NO: 3288755 - RNA, 17 nt, Variola virus
auauucuguaguuguau

SEQ ID NO: 3288756 - RNA, 19 nt, Variola virus
aaaacauauauaauaaaua

SEQ ID NO: 3288757 - RNA, 22 nt, Variola virus
uucuauaacuugagacuugaua

SEQ ID NO: 3288758 - RNA, 19 nt, Variola virus
auucagauaaucagccaua

SEQ ID NO: 3288759 - RNA, 14 nt, Variola virus
aauaauuuacaaaa

SEQ ID NO: 3288760 - RNA, 22 nt, Variola virus
gcguucauuggaaaauauacca

SEQ ID NO: 3288761 - RNA, 14 nt, Variola virus
auucuuaaaaucua

SEQ ID NO: 3288762 - RNA, 18 nt, Variola virus
guuauuuauguugcuaaa

SEQ ID NO: 3288763 - RNA, 14 nt, Variola virus
uggacauaaagaua

SEQ ID NO: 3288764 - RNA, 20 nt, Variola virus
guauagauccuccaguaaau

SEQ ID NO: 3288765 - RNA, 15 nt, Variola virus
uccaauuuuucuuaa

SEQ ID NO: 3288766 - RNA, 16 nt, Variola virus
auauauuuauuuccag

SEQ ID NO: 3288767 - RNA, 19 nt, Variola virus
gcgauaauagauagugcua

SEQ ID NO: 3288768 - RNA, 12 nt, Variola virus
uaugacaaaauu

SEQ ID NO: 3288769 - RNA, 14 nt, Variola virus
gugaucaucuucau

SEQ ID NO: 3288770 - RNA, 17 nt, Variola virus
auuuggcgcuuuucucu

SEQ ID NO: 3288771 - RNA, 14 nt, Variola virus
acaagucauuuaaa

SEQ ID NO: 3288772 - RNA, 17 nt, Variola virus
aggcucaguauguaaac

SEQ ID NO: 3288773 - RNA, 21 nt, Variola virus
uaauauaucuuauaucucguu

SEQ ID NO: 3288774 - RNA, 17 nt, Variola virus
gaaagauauauuaagaa

SEQ ID NO: 3288775 - RNA, 14 nt, Variola virus
guguagaagaucaa

SEQ ID NO: 3288776 - RNA, 19 nt, Variola virus
ucuaguugauauuccaacc

SEQ ID NO: 3288777 - RNA, 14 nt, Variola virus
uauuuaaaugacuu

SEQ ID NO: 3288778 - RNA, 20 nt, Variola virus
uuuuacagaucuaguauaau

SEQ ID NO: 3288779 - RNA, 20 nt, Variola virus
acucugggucauauuauaga

SEQ ID NO: 3288780 - RNA, 23 nt, Variola virus
uaaugagcaaguagaaaaccucu

SEQ ID NO: 3288781 - RNA, 14 nt, Variola virus
auucaucaaugaug

SEQ ID NO: 3288782 - RNA, 11 nt, Variola virus
caaaaagcaua

SEQ ID NO: 3288783 - RNA, 17 nt, Variola virus
aaacaccuauggagaag

SEQ ID NO: 3288784 - RNA, 16 nt, Variola virus
uccuuuaccaccaaau

SEQ ID NO: 3288785 - RNA, 16 nt, Variola virus
aaauagauagaaucua

SEQ ID NO: 3288786 - RNA, 15 nt, Variola virus
agacugcggacuuua

SEQ ID NO: 3288787 - RNA, 19 nt, Variola virus
uuagugauguaaguauaac

SEQ ID NO: 3288788 - RNA, 17 nt, Variola virus
gaaguaaaagauuuaua

SEQ ID NO: 3288789 - RNA, 21 nt, Variola virus
ucagugcaaagauuacuacac

SEQ ID NO: 3288790 - RNA, 15 nt, Variola virus
aaucuucuuauaaga

SEQ ID NO: 3288791 - RNA, 21 nt, Variola virus
acccaaguuugagauuucaua

SEQ ID NO: 3288792 - RNA, 14 nt, Variola virus
auuaucaaaagaca

SEQ ID NO: 3288793 - RNA, 11 nt, Variola virus
aacauccacug

SEQ ID NO: 3288794 - RNA, 18 nt, Variola virus
uaccaauaggaauacaag

SEQ ID NO: 3288795 - RNA, 15 nt, Variola virus
gaugagauguuuaua

SEQ ID NO: 3288796 - RNA, 21 nt, Variola virus
aaugagguagcaaaaaaacug

SEQ ID NO: 3288797 - RNA, 14 nt, Variola virus
auccuauacucuga

SEQ ID NO: 3288798 - RNA, 14 nt, Variola virus
uugaugacguguac

SEQ ID NO: 3288799 - RNA, 13 nt, Variola virus
auaagaaacaauu

SEQ ID NO: 3288800 - RNA, 15 nt, Variola virus
auauaucaugaugau

SEQ ID NO: 3288801 - RNA, 19 nt, Variola virus
aauaugcucaugaagauua

SEQ ID NO: 3288802 - RNA, 21 nt, Variola virus
agacauaucgguaaaaugcau

SEQ ID NO: 3288803 - RNA, 16 nt, Variola virus
aauuacauagaugaua

SEQ ID NO: 3288804 - RNA, 14 nt, Variola virus
uggucauagaaaau

SEQ ID NO: 3288805 - RNA, 18 nt, Variola virus
auauggauauucauagau

SEQ ID NO: 3288806 - RNA, 13 nt, Variola virus
guccguacuuauu

SEQ ID NO: 3288807 - RNA, 21 nt, Variola virus
uaauugaguaaauaaaugcuc

SEQ ID NO: 3288808 - RNA, 17 nt, Variola virus
cauagaugcccucuaua

SEQ ID NO: 3288809 - RNA, 14 nt, Variola virus
auauauucaaacaa

SEQ ID NO: 3288810 - RNA, 15 nt, Variola virus
auuauagauguguau

SEQ ID NO: 3288811 - RNA, 17 nt, Variola virus
uuggucaccaauucuag

SEQ ID NO: 3288812 - RNA, 21 nt, Variola virus
agaaaauaacagauauuacaa

SEQ ID NO: 3288813 - RNA, 21 nt, Variola virus
auagaagagcaaauaucucau

SEQ ID NO: 3288814 - RNA, 16 nt, Variola virus
uaauacauauuauuca

SEQ ID NO: 3288815 - RNA, 14 nt, Variola virus
aacuuuuaaauaca

SEQ ID NO: 3288816 - RNA, 13 nt, Variola virus
uauuccuuucauu

SEQ ID NO: 3288817 - RNA, 16 nt, Variola virus
cuuuugcuauuaccaa

SEQ ID NO: 3288818 - RNA, 20 nt, Variola virus
auuugauacggacaugguau

SEQ ID NO: 3288819 - RNA, 20 nt, Variola virus
auaucacaggggcaauguuu

SEQ ID NO: 3288820 - RNA, 18 nt, Variola virus
uacaaauauuauacauga

SEQ ID NO: 3288821 - RNA, 13 nt, Variola virus
gcucuaucuuuua

SEQ ID NO: 3288822 - RNA, 14 nt, Variola virus
uauuucguacauuu

SEQ ID NO: 3288823 - RNA, 16 nt, Variola virus
uaccucuucugauauc

SEQ ID NO: 3288824 - RNA, 14 nt, Variola virus
uuaaacuguaucga

SEQ ID NO: 3288825 - RNA, 21 nt, Variola virus
agaaguuguaaauaacaauga

SEQ ID NO: 3288826 - RNA, 23 nt, Variola virus
aggauauuagcgaauauaucaaa

SEQ ID NO: 3288827 - RNA, 21 nt, Variola virus
auuauucuuuggauccaaaug

SEQ ID NO: 3288828 - RNA, 13 nt, Variola virus
aguauuuaacaag

SEQ ID NO: 3288829 - RNA, 19 nt, Variola virus
cucauugauuauauucuca

SEQ ID NO: 3288830 - RNA, 22 nt, Variola virus
cacaaauggauguuaauguauu

SEQ ID NO: 3288831 - RNA, 20 nt, Variola virus
aguaaagauuucaaagaugu

SEQ ID NO: 3288832 - RNA, 15 nt, Variola virus
gucuaucaauaacug

SEQ ID NO: 3288833 - RNA, 17 nt, Variola virus
uaauacgaaaugucuga

SEQ ID NO: 3288834 - RNA, 13 nt, Variola virus
gcauuaauacagu

SEQ ID NO: 3288835 - RNA, 17 nt, Variola virus
gaauauaaauuauauau

SEQ ID NO: 3288836 - RNA, 16 nt, Variola virus
gaugcuauaguauauu

SEQ ID NO: 3288837 - RNA, 14 nt, Variola virus
aguaaaugcauaua

SEQ ID NO: 3288838 - RNA, 18 nt, Variola virus
uuguaaaguuaaaauugu

SEQ ID NO: 3288839 - RNA, 20 nt, Variola virus
uaauauuaucuauaugaugg

SEQ ID NO: 3288840 - RNA, 14 nt, Variola virus
ucuucuucuacauu

SEQ ID NO: 3288841 - RNA, 17 nt, Variola virus
guuuauggaucuauuca

SEQ ID NO: 3288842 - RNA, 16 nt, Variola virus
auaacguuagccacca

SEQ ID NO: 3288843 - RNA, 15 nt, Variola virus
ucaguaucuucuuua

SEQ ID NO: 3288844 - RNA, 23 nt, Variola virus
cuaucagagcuaccgaaggagau

SEQ ID NO: 3288845 - RNA, 18 nt, Variola virus
uguauggguaauaguguu

SEQ ID NO: 3288846 - RNA, 15 nt, Variola virus
uacaauauuuacauu

SEQ ID NO: 3288847 - RNA, 15 nt, Variola virus
aucaucuuuaucauu

SEQ ID NO: 3288848 - RNA, 21 nt, Variola virus
ucacaucaucgaacuucugau

SEQ ID NO: 3288849 - RNA, 16 nt, Variola virus
auguuugggagaauua

SEQ ID NO: 3288850 - RNA, 15 nt, Variola virus
ugucuauuauguaua

SEQ ID NO: 3288851 - RNA, 18 nt, Variola virus
auagucaaccaaauaaua

SEQ ID NO: 3288852 - RNA, 20 nt, Variola virus
ugacauggcuucuuccauag

SEQ ID NO: 3288853 - RNA, 21 nt, Variola virus
ugucaucaucaugauacacaa

SEQ ID NO: 3288854 - RNA, 16 nt, Variola virus
auaucuauauauguau

SEQ ID NO: 3288855 - RNA, 14 nt, Variola virus
auaucauuaaugau

SEQ ID NO: 3288856 - RNA, 19 nt, Variola virus
aggauuaacggguucucaa

SEQ ID NO: 3288857 - RNA, 22 nt, Variola virus
auuuucuuacaauuaacgagaa

SEQ ID NO: 3288858 - RNA, 13 nt, Variola virus
ugaauuaauguaa

SEQ ID NO: 3288859 - RNA, 16 nt, Variola virus
augaggugguugcaga

SEQ ID NO: 3288860 - RNA, 20 nt, Variola virus
uuauaaagaugguaaacugu

SEQ ID NO: 3288861 - RNA, 20 nt, Variola virus
agguaauguauauuuaucca

SEQ ID NO: 3288862 - RNA, 16 nt, Variola virus
agaaaucaaucuaucu

SEQ ID NO: 3288863 - RNA, 19 nt, Variola virus
guucagaggaugaaauaga

SEQ ID NO: 3288864 - RNA, 12 nt, Variola virus
aacaucagaaac

SEQ ID NO: 3288865 - RNA, 22 nt, Variola virus
auaauuuuuuaagcacaaaaua

SEQ ID NO: 3288866 - RNA, 15 nt, Variola virus
uauuccauuaaugac

SEQ ID NO: 3288867 - RNA, 16 nt, Variola virus
auauuuauaagaauga

SEQ ID NO: 3288868 - RNA, 18 nt, Variola virus
uuccacguagucaaugaa

SEQ ID NO: 3288869 - RNA, 23 nt, Variola virus
uaauagcagaaagcuauaacuug

SEQ ID NO: 3288870 - RNA, 17 nt, Variola virus
uaaaaaaucugaugagu

SEQ ID NO: 3288871 - RNA, 19 nt, Variola virus
ucuacagauauuuuaguuu

SEQ ID NO: 3288872 - RNA, 18 nt, Variola virus
uuaaacgauuuauaaaaa

SEQ ID NO: 3288873 - RNA, 17 nt, Variola virus
auacaaaauuuucaguu

SEQ ID NO: 3288874 - RNA, 20 nt, Variola virus
agagaggcugcugaaaauaa

SEQ ID NO: 3288875 - RNA, 16 nt, Variola virus
uuggcuucuuccaacu

SEQ ID NO: 3288876 - RNA, 18 nt, Variola virus
aguuccaaauuuaaauac

SEQ ID NO: 3288877 - RNA, 19 nt, Variola virus
uaucuggcucucucugcca

SEQ ID NO: 3288878 - RNA, 13 nt, Variola virus
ccaaauaucuuua

SEQ ID NO: 3288879 - RNA, 13 nt, Variola virus
auaauuauacuuu

SEQ ID NO: 3288880 - RNA, 18 nt, Variola virus
ugaugaauaauuuagaua

SEQ ID NO: 3288881 - RNA, 20 nt, Variola virus
uagacgagggguuagauggu

SEQ ID NO: 3288882 - RNA, 20 nt, Variola virus
uaacaugcgguucaaaauag

SEQ ID NO: 3288883 - RNA, 20 nt, Variola virus
caauuauaacaauuauaaca

SEQ ID NO: 3288884 - RNA, 15 nt, Variola virus
uaacuacuaauguau

SEQ ID NO: 3288885 - RNA, 21 nt, Variola virus
auacuuuuaauugaacaaaag

SEQ ID NO: 3288886 - RNA, 21 nt, Variola virus
accuagaaucgauaaaaccau

SEQ ID NO: 3288887 - RNA, 16 nt, Variola virus
aaauauaauguuguau

SEQ ID NO: 3288888 - RNA, 17 nt, Variola virus
uugauaucuuuagauau

SEQ ID NO: 3288889 - RNA, 14 nt, Variola virus
uuauauauguaaua

SEQ ID NO: 3288890 - RNA, 20 nt, Variola virus
gaaaccacugucuaaaugua

SEQ ID NO: 3288891 - RNA, 15 nt, Variola virus
gacaugcaaaaaugc

SEQ ID NO: 3288892 - RNA, 23 nt, Variola virus
auauuuaagugauauaaaacauu

SEQ ID NO: 3288893 - RNA, 18 nt, Variola virus
cgcuacacccacuagaaa

SEQ ID NO: 3288894 - RNA, 15 nt, Variola virus
ucuaacgguaguguu

SEQ ID NO: 3288895 - RNA, 15 nt, Variola virus
auauugaaaaugaca

SEQ ID NO: 3288896 - RNA, 16 nt, Variola virus
auaaacuauuguuaug

SEQ ID NO: 3288897 - RNA, 13 nt, Variola virus
uguuaauguauua

SEQ ID NO: 3288898 - RNA, 21 nt, Variola virus
cauaaauaaaugcuugauauu

SEQ ID NO: 3288899 - RNA, 22 nt, Variola virus
uguuauguauuucauuguucau

SEQ ID NO: 3288900 - RNA, 23 nt, Variola virus
aucaaucaaaagacuauacauuu

SEQ ID NO: 3288901 - RNA, 19 nt, Variola virus
cucuacaaaaugucaugau

SEQ ID NO: 3288902 - RNA, 12 nt, Variola virus
caacucucaaaa

SEQ ID NO: 3288903 - RNA, 11 nt, Variola virus
agaaaacauua

SEQ ID NO: 3288904 - RNA, 11 nt, Variola virus
caauuaaugau

SEQ ID NO: 3288905 - RNA, 15 nt, Variola virus
aauuaguuuuaccuu

SEQ ID NO: 3288906 - RNA, 16 nt, Variola virus
agaaccaguaacauau

SEQ ID NO: 3288907 - RNA, 14 nt, Variola virus
uauuacaauuaaau

SEQ ID NO: 3288908 - RNA, 16 nt, Variola virus
aguuaaggauaauaag

SEQ ID NO: 3288909 - RNA, 17 nt, Variola virus
uguucgucugucaugau

SEQ ID NO: 3288910 - RNA, 17 nt, Variola virus
uucaacaugauuauucu

SEQ ID NO: 3288911 - RNA, 14 nt, Variola virus
auuauuaugaugau

SEQ ID NO: 3288912 - RNA, 22 nt, Variola virus
uuaauagaugacguauuauaca

SEQ ID NO: 3288913 - RNA, 18 nt, Variola virus
uaauuccaaaaauagcau

SEQ ID NO: 3288914 - RNA, 14 nt, Variola virus
aacaaugucaaaau

SEQ ID NO: 3288915 - RNA, 19 nt, Variola virus
cugcuuuagaugauuuugg

SEQ ID NO: 3288916 - RNA, 18 nt, Variola virus
accaguaucaauuuauca

SEQ ID NO: 3288917 - RNA, 15 nt, Variola virus
agucuccacacuauu

SEQ ID NO: 3288918 - RNA, 16 nt, Variola virus
uucuaagguagaaucu

SEQ ID NO: 3288919 - RNA, 16 nt, Variola virus
uauuggaauuauaaua

SEQ ID NO: 3288920 - RNA, 22 nt, Variola virus
uucauaauuguuagcuguuuuc

SEQ ID NO: 3288921 - RNA, 18 nt, Variola virus
uaucuucauaaaauacua

SEQ ID NO: 3288922 - RNA, 18 nt, Variola virus
ucuaccagcuggaaaaag

SEQ ID NO: 3288923 - RNA, 18 nt, Variola virus
gaacuucugaucauuaau

SEQ ID NO: 3288924 - RNA, 18 nt, Variola virus
cauuuggucuauacaaau

SEQ ID NO: 3288925 - RNA, 18 nt, Variola virus
agaauugcugcaauauau

SEQ ID NO: 3288926 - RNA, 22 nt, Variola virus
uuccaaaguugggauaguauuu

SEQ ID NO: 3288927 - RNA, 17 nt, Variola virus
auugauuucgucaaugu

SEQ ID NO: 3288928 - RNA, 21 nt, Variola virus
agaauuucuacauaauuauau

SEQ ID NO: 3288929 - RNA, 14 nt, Variola virus
uuuuaauauaaacg

SEQ ID NO: 3288930 - RNA, 18 nt, Variola virus
uauaauaaauguauacau

SEQ ID NO: 3288931 - RNA, 14 nt, Variola virus
uaaugguguguuau

SEQ ID NO: 3288932 - RNA, 16 nt, Variola virus
aauaugcucaugaaga

SEQ ID NO: 3288933 - RNA, 14 nt, Variola virus
agcaauucauguac

SEQ ID NO: 3288934 - RNA, 14 nt, Variola virus
gcauccaaauggau

SEQ ID NO: 3288935 - RNA, 19 nt, Variola virus
aguagauaauauagaaaau

SEQ ID NO: 3288936 - RNA, 17 nt, Variola virus
uuacauaaaugaaaaga

SEQ ID NO: 3288937 - RNA, 17 nt, Variola virus
gcagauagcuauaugau

SEQ ID NO: 3288938 - RNA, 23 nt, Variola virus
aucaaacucuaaugaccacaucu

SEQ ID NO: 3288939 - RNA, 12 nt, Variola virus
uaaucauuauua

SEQ ID NO: 3288940 - RNA, 18 nt, Variola virus
cuguauuuggaucuuuug

SEQ ID NO: 3288941 - RNA, 21 nt, Variola virus
augauauccacuaguuuccuu

SEQ ID NO: 3288942 - RNA, 18 nt, Variola virus
uuagaugagaaauuauuc

SEQ ID NO: 3288943 - RNA, 12 nt, Variola virus
caaauauauuua

SEQ ID NO: 3288944 - RNA, 17 nt, Variola virus
cuaguuuuacuaucaua

SEQ ID NO: 3288945 - RNA, 13 nt, Variola virus
gaaucaguauaua

SEQ ID NO: 3288946 - RNA, 22 nt, Variola virus
aaacauuuuauauacuuuucua

SEQ ID NO: 3288947 - RNA, 13 nt, Variola virus
acauuauaugauu

SEQ ID NO: 3288948 - RNA, 22 nt, Variola virus
uuauccguauuuccauaauaag

SEQ ID NO: 3288949 - RNA, 14 nt, Variola virus
uuuaaaaugaucua

SEQ ID NO: 3288950 - RNA, 14 nt, Variola virus
ggaguuauaugaau

SEQ ID NO: 3288951 - RNA, 22 nt, Variola virus
gcaaguaggauuuuuccaaagu

SEQ ID NO: 3288952 - RNA, 17 nt, Variola virus
agaucaacagaaauauu

SEQ ID NO: 3288953 - RNA, 20 nt, Variola virus
cguccaacgaauaacauccg

SEQ ID NO: 3288954 - RNA, 19 nt, Variola virus
auauuuccccuauaaucuu

SEQ ID NO: 3288955 - RNA, 23 nt, Variola virus
cuaaaauaguucuguaauauguc

SEQ ID NO: 3288956 - RNA, 20 nt, Variola virus
ucgaaaaacuuuaauguaga

SEQ ID NO: 3288957 - RNA, 19 nt, Variola virus
acacuuuuguaaaauauua

SEQ ID NO: 3288958 - RNA, 19 nt, Variola virus
cucgagaauauuuaauuug

SEQ ID NO: 3288959 - RNA, 16 nt, Variola virus
uucuauuuuuaauuuu

SEQ ID NO: 3288960 - RNA, 16 nt, Variola virus
acucaauuauacucua

SEQ ID NO: 3288961 - RNA, 22 nt, Variola virus
uggccauuauuagaaauuuauc

SEQ ID NO: 3288962 - RNA, 14 nt, Variola virus
cgaaugaauguuuu

SEQ ID NO: 3288963 - RNA, 19 nt, Variola virus
aaugaacauaguaagaaau

SEQ ID NO: 3288964 - RNA, 19 nt, Variola virus
aauaauauaaaauucccaa

SEQ ID NO: 3288965 - RNA, 14 nt, Variola virus
uaucuaacaucuug

SEQ ID NO: 3288966 - RNA, 18 nt, Variola virus
gaggaaaaaggacacauu

SEQ ID NO: 3288967 - RNA, 23 nt, Variola virus
aauauccacuauugcaacuauaa

SEQ ID NO: 3288968 - RNA, 13 nt, Variola virus
uauaaccuuaaua

SEQ ID NO: 3288969 - RNA, 22 nt, Variola virus
uuaauucuagacuauuuggaca

SEQ ID NO: 3288970 - RNA, 19 nt, Variola virus
aucucguuuagaaaaaugc

SEQ ID NO: 3288971 - RNA, 22 nt, Variola virus
gaaauugucacuacuaaaucaa

SEQ ID NO: 3288972 - RNA, 16 nt, Variola virus
cugaaaaugaaauugu

SEQ ID NO: 3288973 - RNA, 23 nt, Variola virus
augaucaagaaggaaaucaaauc

SEQ ID NO: 3288974 - RNA, 15 nt, Variola virus
aaagaaguccauuua

SEQ ID NO: 3288975 - RNA, 14 nt, Variola virus
auuauucuauccaa

SEQ ID NO: 3288976 - RNA, 16 nt, Variola virus
ugguaaaguaaaucau

SEQ ID NO: 3288977 - RNA, 20 nt, Variola virus
auuacugcaacguucauaga

SEQ ID NO: 3288978 - RNA, 17 nt, Variola virus
gcauuuuuauauacauu

SEQ ID NO: 3288979 - RNA, 14 nt, Variola virus
acuccuugacuauc

SEQ ID NO: 3288980 - RNA, 18 nt, Variola virus
uuaauaucgcacaaagaa

SEQ ID NO: 3288981 - RNA, 21 nt, Variola virus
auccuuagucaucuugucuag

SEQ ID NO: 3288982 - RNA, 14 nt, Variola virus
uauaguuaacauuu

SEQ ID NO: 3288983 - RNA, 15 nt, Variola virus
uucauucguaaaucu

SEQ ID NO: 3288984 - RNA, 21 nt, Variola virus
gacgcuuguuaauaaguaaau

SEQ ID NO: 3288985 - RNA, 12 nt, Variola virus
cuugaucauuuc

SEQ ID NO: 3288986 - RNA, 15 nt, Variola virus
cuaggauuuaaacaa

SEQ ID NO: 3288987 - RNA, 20 nt, Variola virus
uacuuagucuguacaaaagu

SEQ ID NO: 3288988 - RNA, 21 nt, Variola virus
cauugucuaauagauauuuga

SEQ ID NO: 3288989 - RNA, 21 nt, Variola virus
cuagauuaucuagucagaacu

SEQ ID NO: 3288990 - RNA, 21 nt, Variola virus
uauaacagagccaucuguaaa

SEQ ID NO: 3288991 - RNA, 20 nt, Variola virus
ccacugagaugacuggaaau

SEQ ID NO: 3288992 - RNA, 15 nt, Variola virus
ccaaaggauguuuaa

SEQ ID NO: 3288993 - RNA, 14 nt, Variola virus
gacucauuaaaacu

SEQ ID NO: 3288994 - RNA, 18 nt, Variola virus
acuucuuggaaugauacu

SEQ ID NO: 3288995 - RNA, 16 nt, Variola virus
guuaacauuuuauuau

SEQ ID NO: 3288996 - RNA, 16 nt, Variola virus
ccauuaaaaauuguua

SEQ ID NO: 3288997 - RNA, 23 nt, Variola virus
uaaaauagcguucacauauccuc

SEQ ID NO: 3288998 - RNA, 20 nt, Variola virus
auaaaauagcguucacauau

SEQ ID NO: 3288999 - RNA, 21 nt, Variola virus
uacgaaaacgaaaucuguaau

SEQ ID NO: 3289000 - RNA, 23 nt, Variola virus
auuuaugucauaaacuguaaaug

SEQ ID NO: 3289001 - RNA, 19 nt, Variola virus
caauaaaugcauuaguuua

SEQ ID NO: 3289002 - RNA, 22 nt, Variola virus
agagcuaccgaaggagauacua

SEQ ID NO: 3289003 - RNA, 16 nt, Variola virus
uuuaaccuauacauga

SEQ ID NO: 3289004 - RNA, 15 nt, Variola virus
uuuaagauuguacac

SEQ ID NO: 3289005 - RNA, 19 nt, Variola virus
uccauggaagaacuaccaa

SEQ ID NO: 3289006 - RNA, 17 nt, Variola virus
uuucaauaauauacuaa

SEQ ID NO: 3289007 - RNA, 15 nt, Variola virus
auugagguuucugac

SEQ ID NO: 3289008 - RNA, 21 nt, Variola virus
uaacgaguucaaauaugaaau

SEQ ID NO: 3289009 - RNA, 17 nt, Variola virus
cuaugaauuuauaaaau

SEQ ID NO: 3289010 - RNA, 23 nt, Variola virus
aucuuuaacgauaccuauaccua

SEQ ID NO: 3289011 - RNA, 12 nt, Variola virus
uuaaaauaucua

SEQ ID NO: 3289012 - RNA, 17 nt, Variola virus
acccguaguuuuaacug

SEQ ID NO: 3289013 - RNA, 18 nt, Variola virus
ccacaugccgccacuacc

SEQ ID NO: 3289014 - RNA, 14 nt, Variola virus
uuacuauagcauua

SEQ ID NO: 3289015 - RNA, 15 nt, Variola virus
acaaaucuauaacau

SEQ ID NO: 3289016 - RNA, 22 nt, Variola virus
acuacauaguuaucuaucuuaa

SEQ ID NO: 3289017 - RNA, 19 nt, Variola virus
aaguauacauguuagagaa

SEQ ID NO: 3289018 - RNA, 21 nt, Variola virus
guugcaauaauaaaaguuauc

SEQ ID NO: 3289019 - RNA, 13 nt, Variola virus
auacuuuaacauc

SEQ ID NO: 3289020 - RNA, 17 nt, Variola virus
ccauuauuagaaauuua

SEQ ID NO: 3289021 - RNA, 18 nt, Variola virus
uaguaaaaaauaagucag

SEQ ID NO: 3289022 - RNA, 18 nt, Variola virus
uuaguuauugcaauauag

SEQ ID NO: 3289023 - RNA, 13 nt, Variola virus
ugagauucuccau

SEQ ID NO: 3289024 - RNA, 16 nt, Variola virus
ugaggauuuaaaacuc

SEQ ID NO: 3289025 - RNA, 14 nt, Variola virus
aaauacaaauauau

SEQ ID NO: 3289026 - RNA, 17 nt, Variola virus
aaacuuuucagaauauc

SEQ ID NO: 3289027 - RNA, 14 nt, Variola virus
ugaggauauacaaa

SEQ ID NO: 3289028 - RNA, 23 nt, Variola virus
gaucuuuauuuuuuguguauuuu

SEQ ID NO: 3289029 - RNA, 19 nt, Variola virus
cugauacccaaaaacaucc

SEQ ID NO: 3289030 - RNA, 20 nt, Variola virus
gauaaugauauauuaaacaa

SEQ ID NO: 3289031 - RNA, 18 nt, Variola virus
augauagaaaugaugaag

SEQ ID NO: 3289032 - RNA, 19 nt, Variola virus
aagucucguucguaaauaa

SEQ ID NO: 3289033 - RNA, 13 nt, Variola virus
cuaucuacaucuu

SEQ ID NO: 3289034 - RNA, 23 nt, Variola virus
uuacaacggcgccagauuuaaga

SEQ ID NO: 3289035 - RNA, 14 nt, Variola virus
auauucuaugacug

SEQ ID NO: 3289036 - RNA, 15 nt, Variola virus
auuuaagugaugcau

SEQ ID NO: 3289037 - RNA, 11 nt, Variola virus
uaaaauuauuc

SEQ ID NO: 3289038 - RNA, 12 nt, Variola virus
cauuccaaagau

SEQ ID NO: 3289039 - RNA, 15 nt, Variola virus
auuagcagaauagau

SEQ ID NO: 3289040 - RNA, 22 nt, Variola virus
auagcauagauauagaaacgga

SEQ ID NO: 3289041 - RNA, 20 nt, Variola virus
gucaauucccuccuguagua

SEQ ID NO: 3289042 - RNA, 21 nt, Variola virus
aaaaugaugcuauuagaauuu

SEQ ID NO: 3289043 - RNA, 16 nt, Variola virus
uagucauaauaucuuu

SEQ ID NO: 3289044 - RNA, 18 nt, Variola virus
aguauauggacaaacgug

SEQ ID NO: 3289045 - RNA, 22 nt, Variola virus
uuaagagauuuagaaaacauua

SEQ ID NO: 3289046 - RNA, 23 nt, Variola virus
agaacuuaggcauggacauacua

SEQ ID NO: 3289047 - RNA, 18 nt, Variola virus
uuaagacauauauuauua

SEQ ID NO: 3289048 - RNA, 23 nt, Variola virus
uaagacguuguaucucuuuuucc

SEQ ID NO: 3289049 - RNA, 16 nt, Variola virus
guacauuucacagaaa

SEQ ID NO: 3289050 - RNA, 17 nt, Variola virus
ucauuaaguucacuaga

SEQ ID NO: 3289051 - RNA, 16 nt, Variola virus
cugauuucucucauaa

SEQ ID NO: 3289052 - RNA, 21 nt, Variola virus
aucaacugcguugauuaaaaa

SEQ ID NO: 3289053 - RNA, 12 nt, Variola virus
auuaguuauuau

SEQ ID NO: 3289054 - RNA, 15 nt, Variola virus
uagugaaacaaaaua

SEQ ID NO: 3289055 - RNA, 23 nt, Variola virus
aaccuaacuaaaagacauaauau

SEQ ID NO: 3289056 - RNA, 18 nt, Variola virus
auggauugguaacauuau

SEQ ID NO: 3289057 - RNA, 14 nt, Variola virus
cuccgauauucaau

SEQ ID NO: 3289058 - RNA, 23 nt, Variola virus
auuaaggacuuuuauaucccaca

SEQ ID NO: 3289059 - RNA, 21 nt, Variola virus
uccuguaguauugauucuaga

SEQ ID NO: 3289060 - RNA, 17 nt, Variola virus
auagugguacaauacua

SEQ ID NO: 3289061 - RNA, 16 nt, Variola virus
uuauuagaauaagagu

SEQ ID NO: 3289062 - RNA, 11 nt, Variola virus
ucaaggauucu

SEQ ID NO: 3289063 - RNA, 14 nt, Variola virus
aaccauucauuaau

SEQ ID NO: 3289064 - RNA, 22 nt, Variola virus
gaucugcuauauggauauucau

SEQ ID NO: 3289065 - RNA, 14 nt, Variola virus
aguauaaacuauaa

SEQ ID NO: 3289066 - RNA, 18 nt, Variola virus
aaacuaauuuuagcagaa

SEQ ID NO: 3289067 - RNA, 13 nt, Variola virus
gucuuuacagauu

SEQ ID NO: 3289068 - RNA, 21 nt, Variola virus
gacauaugccuauuuauauau

SEQ ID NO: 3289069 - RNA, 23 nt, Variola virus
gcguauauuuuauacauuuuuua

SEQ ID NO: 3289070 - RNA, 18 nt, Variola virus
uuaucaugagauguguuu

SEQ ID NO: 3289071 - RNA, 20 nt, Variola virus
uacacguuagauuauucuca

SEQ ID NO: 3289072 - RNA, 22 nt, Variola virus
cuugauaaccuuggcugucuca

SEQ ID NO: 3289073 - RNA, 13 nt, Variola virus
aaacgaacuauau

SEQ ID NO: 3289074 - RNA, 22 nt, Variola virus
uuauaucauccaauauuauuga

SEQ ID NO: 3289075 - RNA, 15 nt, Variola virus
cagaauguuucaaag

SEQ ID NO: 3289076 - RNA, 22 nt, Variola virus
uaacuucgugaauaauguuucu

SEQ ID NO: 3289077 - RNA, 18 nt, Variola virus
uaguacaagaaauacuuc

SEQ ID NO: 3289078 - RNA, 17 nt, Variola virus
gacucauuuaguuuauu

SEQ ID NO: 3289079 - RNA, 21 nt, Variola virus
uauuaacgugaaacguaguau

SEQ ID NO: 3289080 - RNA, 13 nt, Variola virus
auguuacacuaua

SEQ ID NO: 3289081 - RNA, 20 nt, Variola virus
cagcuauaugcaacuauaaa

SEQ ID NO: 3289082 - RNA, 14 nt, Variola virus
acuacuuuagaaga

SEQ ID NO: 3289083 - RNA, 16 nt, Variola virus
gccacuauuauugaaa

SEQ ID NO: 3289084 - RNA, 21 nt, Variola virus
aagugacauuauaauuuuacc

SEQ ID NO: 3289085 - RNA, 12 nt, Variola virus
acuauuaaaacu

SEQ ID NO: 3289086 - RNA, 18 nt, Variola virus
aacgcuacuauauauuau

SEQ ID NO: 3289087 - RNA, 13 nt, Variola virus
auauuaaggagau

SEQ ID NO: 3289088 - RNA, 15 nt, Variola virus
aucuauauauguauu

SEQ ID NO: 3289089 - RNA, 23 nt, Variola virus
auaauggcuguuuguauaauaga

SEQ ID NO: 3289090 - RNA, 17 nt, Variola virus
caauaaacaaaauacuc

SEQ ID NO: 3289091 - RNA, 15 nt, Variola virus
uagguauguccucua

SEQ ID NO: 3289092 - RNA, 15 nt, Variola virus
aucuguaaacauuug

SEQ ID NO: 3289093 - RNA, 13 nt, Variola virus
cuagcaaaacuau

SEQ ID NO: 3289094 - RNA, 20 nt, Variola virus
guuuuugaacuguucaaaau

SEQ ID NO: 3289095 - RNA, 17 nt, Variola virus
uaauucuccuauuacau

SEQ ID NO: 3289096 - RNA, 18 nt, Variola virus
aauaaucguuauuaucau

SEQ ID NO: 3289097 - RNA, 18 nt, Variola virus
auuaaauagaauauuuaa

SEQ ID NO: 3289098 - RNA, 17 nt, Variola virus
uuucguaccaacucauu

SEQ ID NO: 3289099 - RNA, 23 nt, Variola virus
guuauauguaacauuaaguaaau

SEQ ID NO: 3289100 - RNA, 18 nt, Variola virus
aggccaagcgaauuauuu

SEQ ID NO: 3289101 - RNA, 18 nt, Variola virus
uccaugucaaauagaguu

SEQ ID NO: 3289102 - RNA, 20 nt, Variola virus
uggaauccaauuguuugaua

SEQ ID NO: 3289103 - RNA, 15 nt, Variola virus
aaugaagauccaaga

SEQ ID NO: 3289104 - RNA, 16 nt, Variola virus
auaucuucuccuguaa

SEQ ID NO: 3289105 - RNA, 20 nt, Variola virus
gaccguaccagugacagaua

SEQ ID NO: 3289106 - RNA, 16 nt, Variola virus
aggcaucaaaaaaugu

SEQ ID NO: 3289107 - RNA, 14 nt, Variola virus
gaauuauagacacu

SEQ ID NO: 3289108 - RNA, 21 nt, Variola virus
ugucuacaaccgcuacauaau

SEQ ID NO: 3289109 - RNA, 17 nt, Variola virus
agauugaucauguagaa

SEQ ID NO: 3289110 - RNA, 16 nt, Variola virus
ucuguaacuaugaauu

SEQ ID NO: 3289111 - RNA, 21 nt, Variola virus
uuaaugccgauuuaauacguu

SEQ ID NO: 3289112 - RNA, 22 nt, Variola virus
aauugauucuuauucacuauau

SEQ ID NO: 3289113 - RNA, 22 nt, Variola virus
uaguuucugguuuucuauaaau

SEQ ID NO: 3289114 - RNA, 18 nt, Variola virus
agcaaaaacaaaaaacuu

SEQ ID NO: 3289115 - RNA, 17 nt, Variola virus
auuauccuaucauguau

SEQ ID NO: 3289116 - RNA, 21 nt, Variola virus
acaguuacgguuguacauuau

SEQ ID NO: 3289117 - RNA, 23 nt, Variola virus
accaccuauagauuuugaauauu

SEQ ID NO: 3289118 - RNA, 15 nt, Variola virus
auaaugauuaauauu

SEQ ID NO: 3289119 - RNA, 22 nt, Variola virus
uacagauauauucauaguaguu

SEQ ID NO: 3289120 - RNA, 22 nt, Variola virus
guauuuuaacacuaauuaagau

SEQ ID NO: 3289121 - RNA, 22 nt, Variola virus
agcaauuagugccguauacuuu

SEQ ID NO: 3289122 - RNA, 16 nt, Variola virus
auaaucguauacuuca

SEQ ID NO: 3289123 - RNA, 16 nt, Variola virus
ucucuguaagauuucc

SEQ ID NO: 3289124 - RNA, 13 nt, Variola virus
guguuauaauauu

SEQ ID NO: 3289125 - RNA, 18 nt, Variola virus
agauuagcuuugauguuu

SEQ ID NO: 3289126 - RNA, 16 nt, Variola virus
gaacgauaaacaaauu

SEQ ID NO: 3289127 - RNA, 15 nt, Variola virus
aagaaaacaaacauu

SEQ ID NO: 3289128 - RNA, 11 nt, Variola virus
cagaugauauc

SEQ ID NO: 3289129 - RNA, 16 nt, Variola virus
guuuaaauuaagcauc

SEQ ID NO: 3289130 - RNA, 21 nt, Variola virus
agauaaauuuaccacuagaac

SEQ ID NO: 3289131 - RNA, 17 nt, Variola virus
uguuucuauguuuucua

SEQ ID NO: 3289132 - RNA, 18 nt, Variola virus
auacgugagaauauacua

SEQ ID NO: 3289133 - RNA, 19 nt, Variola virus
uagaugguauuucugaaag

SEQ ID NO: 3289134 - RNA, 13 nt, Variola virus
ucuggaauuaaaa

SEQ ID NO: 3289135 - RNA, 22 nt, Variola virus
gaaauauaaaaccaacuaauau

SEQ ID NO: 3289136 - RNA, 15 nt, Variola virus
ugguuuauaccuaac

SEQ ID NO: 3289137 - RNA, 19 nt, Variola virus
uuaauucguucgaugagua

SEQ ID NO: 3289138 - RNA, 22 nt, Variola virus
gaaaaaaaauugaauugaugau

SEQ ID NO: 3289139 - RNA, 19 nt, Variola virus
cauucuaauguucauaauu

SEQ ID NO: 3289140 - RNA, 20 nt, Variola virus
ccagugcuauaucucccugu

SEQ ID NO: 3289141 - RNA, 18 nt, Variola virus
ucagaacacacuuuucuc

SEQ ID NO: 3289142 - RNA, 16 nt, Variola virus
ucuguuuccuauaauc

SEQ ID NO: 3289143 - RNA, 16 nt, Variola virus
cauuaguaaggcuuua

SEQ ID NO: 3289144 - RNA, 15 nt, Variola virus
aaauaaaauaauaau

SEQ ID NO: 3289145 - RNA, 23 nt, Variola virus
aauagaaugcucuuaaauaaugu

SEQ ID NO: 3289146 - RNA, 14 nt, Variola virus
cuauaaaauggauu

SEQ ID NO: 3289147 - RNA, 22 nt, Variola virus
acuauaaaaaaaauaauaauua

SEQ ID NO: 3289148 - RNA, 21 nt, Variola virus
ucacuuaacaauuccacaaau

SEQ ID NO: 3289149 - RNA, 16 nt, Variola virus
aauuuuuuaaauccug

SEQ ID NO: 3289150 - RNA, 14 nt, Variola virus
ugaaucaaauguaa

SEQ ID NO: 3289151 - RNA, 16 nt, Variola virus
acuuaacuaucuuuca

SEQ ID NO: 3289152 - RNA, 17 nt, Variola virus
gaauuaauguaaucauu

SEQ ID NO: 3289153 - RNA, 12 nt, Variola virus
aucaauguacau

SEQ ID NO: 3289154 - RNA, 16 nt, Variola virus
uguuauauauugucua

SEQ ID NO: 3289155 - RNA, 18 nt, Variola virus
aauaagagacuuaaacaa

SEQ ID NO: 3289156 - RNA, 16 nt, Variola virus
aauauuaauaacauua

SEQ ID NO: 3289157 - RNA, 15 nt, Variola virus
guauuugauaaaaca

SEQ ID NO: 3289158 - RNA, 19 nt, Variola virus
agcaauuacuaaacauaaa

SEQ ID NO: 3289159 - RNA, 22 nt, Variola virus
uacuuggaaaguuuuauaugua

SEQ ID NO: 3289160 - RNA, 22 nt, Variola virus
aucuauauauguauuuuaauaa

SEQ ID NO: 3289161 - RNA, 15 nt, Variola virus
auauuccuagaauua

SEQ ID NO: 3289162 - RNA, 14 nt, Variola virus
aauagaaacauaua

SEQ ID NO: 3289163 - RNA, 16 nt, Variola virus
aaaagauacguacugu

SEQ ID NO: 3289164 - RNA, 23 nt, Variola virus
cuccaucaauuucaaaaagagcu

SEQ ID NO: 3289165 - RNA, 18 nt, Variola virus
aucaugcagagaaaaguu

SEQ ID NO: 3289166 - RNA, 15 nt, Variola virus
aaugucuaaauucca

SEQ ID NO: 3289167 - RNA, 17 nt, Variola virus
ccaaacauuaacagauu

SEQ ID NO: 3289168 - RNA, 17 nt, Variola virus
auguuacucacauuuau

SEQ ID NO: 3289169 - RNA, 15 nt, Variola virus
aaaaugauuaaauua

SEQ ID NO: 3289170 - RNA, 15 nt, Variola virus
uuaucguuauuauua

SEQ ID NO: 3289171 - RNA, 16 nt, Variola virus
gauaacacauuuucau

SEQ ID NO: 3289172 - RNA, 23 nt, Variola virus
aucaaguuuguaggaaaggacaa

SEQ ID NO: 3289173 - RNA, 22 nt, Variola virus
uacaaacgauuauuagaucuuu

SEQ ID NO: 3289174 - RNA, 16 nt, Variola virus
gguaugggauaaaaua

SEQ ID NO: 3289175 - RNA, 18 nt, Variola virus
gaugagcauaaacauaau

SEQ ID NO: 3289176 - RNA, 20 nt, Variola virus
gauuauaauccuuauacauc

SEQ ID NO: 3289177 - RNA, 13 nt, Variola virus
uaaaacaugguga

SEQ ID NO: 3289178 - RNA, 15 nt, Variola virus
aguuucuuaacuaca

SEQ ID NO: 3289179 - RNA, 14 nt, Variola virus
aacuacaauauuuc

SEQ ID NO: 3289180 - RNA, 15 nt, Variola virus
gaaucccuacauauu

SEQ ID NO: 3289181 - RNA, 17 nt, Variola virus
aucuguacuucuauaca

SEQ ID NO: 3289182 - RNA, 18 nt, Variola virus
ggaugaaucauuggcaac

SEQ ID NO: 3289183 - RNA, 21 nt, Variola virus
cagaagugugaauaugaucuu

SEQ ID NO: 3289184 - RNA, 22 nt, Variola virus
uugugaucggauaguauucaag

SEQ ID NO: 3289185 - RNA, 13 nt, Variola virus
uacaguucuucua

SEQ ID NO: 3289186 - RNA, 11 nt, Variola virus
gcuauaaugau

SEQ ID NO: 3289187 - RNA, 18 nt, Variola virus
uguuguacaaauuccucg

SEQ ID NO: 3289188 - RNA, 23 nt, Variola virus
cguaaaccauuuuucagaaagua

SEQ ID NO: 3289189 - RNA, 14 nt, Variola virus
uuagugaaacauuc

SEQ ID NO: 3289190 - RNA, 15 nt, Variola virus
auaacauuguuuaug

SEQ ID NO: 3289191 - RNA, 17 nt, Variola virus
ggaauaugacuauuuuc

SEQ ID NO: 3289192 - RNA, 13 nt, Variola virus
cuguuuauuuuag

SEQ ID NO: 3289193 - RNA, 16 nt, Variola virus
uaauugggugaagaau

SEQ ID NO: 3289194 - RNA, 17 nt, Variola virus
uagccuuaagaaaacua

SEQ ID NO: 3289195 - RNA, 13 nt, Variola virus
aaaaccaaaucuu

SEQ ID NO: 3289196 - RNA, 16 nt, Variola virus
aacaucacgaaaucua

SEQ ID NO: 3289197 - RNA, 13 nt, Variola virus
auuuaauaagacu

SEQ ID NO: 3289198 - RNA, 21 nt, Variola virus
uaggaaauugguuuauaaugu

SEQ ID NO: 3289199 - RNA, 11 nt, Variola virus
gauauaaugaa

SEQ ID NO: 3289200 - RNA, 21 nt, Variola virus
aauauagguauauuuauucca

SEQ ID NO: 3289201 - RNA, 16 nt, Variola virus
guagauauauaaauaa

SEQ ID NO: 3289202 - RNA, 16 nt, Variola virus
aaugaguucugugcag

SEQ ID NO: 3289203 - RNA, 21 nt, Variola virus
uaguaucaauaacacaaucau

SEQ ID NO: 3289204 - RNA, 22 nt, Variola virus
acucauuauuucccaaaauuug

SEQ ID NO: 3289205 - RNA, 13 nt, Variola virus
cuauccaauaaac

SEQ ID NO: 3289206 - RNA, 15 nt, Variola virus
aaauaucuauaugau

SEQ ID NO: 3289207 - RNA, 19 nt, Variola virus
uaucuuuccauuuaucaug

SEQ ID NO: 3289208 - RNA, 16 nt, Variola virus
augauugauuagaaaa

SEQ ID NO: 3289209 - RNA, 15 nt, Variola virus
aaguuucuuuacugu

SEQ ID NO: 3289210 - RNA, 23 nt, Variola virus
uagaacuguagagggucaacaau

SEQ ID NO: 3289211 - RNA, 16 nt, Variola virus
agaauaauuagaaauu

SEQ ID NO: 3289212 - RNA, 16 nt, Variola virus
uuagaagauaaugaau

SEQ ID NO: 3289213 - RNA, 22 nt, Variola virus
augccuauuaggacagauacua

SEQ ID NO: 3289214 - RNA, 21 nt, Variola virus
aguuucucaugucucuauaua

SEQ ID NO: 3289215 - RNA, 16 nt, Variola virus
aaugagagcaaaauau

SEQ ID NO: 3289216 - RNA, 16 nt, Variola virus
uuuuggugaaauccaa

SEQ ID NO: 3289217 - RNA, 17 nt, Variola virus
uaaucuauuuuaucauu

SEQ ID NO: 3289218 - RNA, 14 nt, Variola virus
uaaagcauuauucu

SEQ ID NO: 3289219 - RNA, 16 nt, Variola virus
ugaauggauacuaguu

SEQ ID NO: 3289220 - RNA, 23 nt, Variola virus
ggauaucuuagugcaaaaguaua

SEQ ID NO: 3289221 - RNA, 14 nt, Variola virus
uuacaucuugauau

SEQ ID NO: 3289222 - RNA, 16 nt, Variola virus
agauuguuuaauauau

SEQ ID NO: 3289223 - RNA, 18 nt, Variola virus
uauuuaucaauucuucua

SEQ ID NO: 3289224 - RNA, 15 nt, Variola virus
guaucauauauuaaa

SEQ ID NO: 3289225 - RNA, 23 nt, Variola virus
uauuuacacacauaauccauucu

SEQ ID NO: 3289226 - RNA, 15 nt, Variola virus
gaaacauaacaauga

SEQ ID NO: 3289227 - RNA, 18 nt, Variola virus
auaacuuccgacuacaua

SEQ ID NO: 3289228 - RNA, 15 nt, Variola virus
aaaaagugaaacaug

SEQ ID NO: 3289229 - RNA, 16 nt, Variola virus
acaguuacaaaugagu

SEQ ID NO: 3289230 - RNA, 17 nt, Variola virus
uugcuaucgucauuaau

SEQ ID NO: 3289231 - RNA, 17 nt, Variola virus
guaauuaaguuuggaug

SEQ ID NO: 3289232 - RNA, 15 nt, Variola virus
uagcuaaugaugcag

SEQ ID NO: 3289233 - RNA, 22 nt, Variola virus
ucauuaauugagaaaaaacuaa

SEQ ID NO: 3289234 - RNA, 12 nt, Variola virus
accaaaucagau

SEQ ID NO: 3289235 - RNA, 23 nt, Variola virus
caauuugcucccgccgauccugu

SEQ ID NO: 3289236 - RNA, 14 nt, Variola virus
aagaacuacuaucg

SEQ ID NO: 3289237 - RNA, 20 nt, Variola virus
acugcuaaauguaucuucca

SEQ ID NO: 3289238 - RNA, 14 nt, Variola virus
ucuuuguuauuaua

SEQ ID NO: 3289239 - RNA, 21 nt, Variola virus
uaauccaaauaugauauguga

SEQ ID NO: 3289240 - RNA, 18 nt, Variola virus
gacucauuauuucccaaa

SEQ ID NO: 3289241 - RNA, 19 nt, Variola virus
uaguaucuagcucuguaaa

SEQ ID NO: 3289242 - RNA, 18 nt, Variola virus
acuucuugcgugucuuuc

SEQ ID NO: 3289243 - RNA, 14 nt, Variola virus
aauaguucuguaau

SEQ ID NO: 3289244 - RNA, 19 nt, Variola virus
aaucaaaagaaugauucca

SEQ ID NO: 3289245 - RNA, 16 nt, Variola virus
uaauacaaaauuuuca

SEQ ID NO: 3289246 - RNA, 13 nt, Variola virus
auaaauguuguaa

SEQ ID NO: 3289247 - RNA, 15 nt, Variola virus
acuuauguaugugca

SEQ ID NO: 3289248 - RNA, 17 nt, Variola virus
caaacaauguauacaaa

SEQ ID NO: 3289249 - RNA, 12 nt, Variola virus
auaauauacaaa

SEQ ID NO: 3289250 - RNA, 13 nt, Variola virus
cgacaauauucua

SEQ ID NO: 3289251 - RNA, 22 nt, Variola virus
auuuuacccucaaucauguacu

SEQ ID NO: 3289252 - RNA, 18 nt, Variola virus
ucacuaauucuagucuuu

SEQ ID NO: 3289253 - RNA, 18 nt, Variola virus
gccgcaaccauuagauuu

SEQ ID NO: 3289254 - RNA, 20 nt, Variola virus
acaauuugggacaaugaauu

SEQ ID NO: 3289255 - RNA, 15 nt, Variola virus
cuuuaauccauguuu

SEQ ID NO: 3289256 - RNA, 21 nt, Variola virus
aauuuauagacgacucauuua

SEQ ID NO: 3289257 - RNA, 15 nt, Variola virus
aaaauacaacaaugu

SEQ ID NO: 3289258 - RNA, 21 nt, Variola virus
ugggacuauuggaauguguua

SEQ ID NO: 3289259 - RNA, 21 nt, Variola virus
uaacgagugaucaaauuauug

SEQ ID NO: 3289260 - RNA, 20 nt, Variola virus
cuguuuaucuauacuauuaa

SEQ ID NO: 3289261 - RNA, 18 nt, Variola virus
auagaaaauaucauaaau

SEQ ID NO: 3289262 - RNA, 21 nt, Variola virus
acugcuaccgaagagcagcua

SEQ ID NO: 3289263 - RNA, 22 nt, Variola virus
acaauauaauguacuagauaau

SEQ ID NO: 3289264 - RNA, 20 nt, Variola virus
auuguacuauacauuuugaa

SEQ ID NO: 3289265 - RNA, 19 nt, Variola virus
agcauaucacgaacuauau

SEQ ID NO: 3289266 - RNA, 12 nt, Variola virus
aguauuaaugau

SEQ ID NO: 3289267 - RNA, 14 nt, Variola virus
uccaauuacaaaaa

SEQ ID NO: 3289268 - RNA, 12 nt, Variola virus
ugauagcauugu

SEQ ID NO: 3289269 - RNA, 15 nt, Variola virus
auuggcuuuucuuua

SEQ ID NO: 3289270 - RNA, 13 nt, Variola virus
uauauaaauacuu

SEQ ID NO: 3289271 - RNA, 23 nt, Variola virus
augaagauccaagauuuguagaa

SEQ ID NO: 3289272 - RNA, 13 nt, Variola virus
cauuuguaauaau

SEQ ID NO: 3289273 - RNA, 17 nt, Variola virus
auguaauucuuucucca

SEQ ID NO: 3289274 - RNA, 14 nt, Variola virus
aaaucccaaauguu

SEQ ID NO: 3289275 - RNA, 18 nt, Variola virus
uauuccagaugucaugau

SEQ ID NO: 3289276 - RNA, 21 nt, Variola virus
gcacgccguauacucuauagu

SEQ ID NO: 3289277 - RNA, 18 nt, Variola virus
gauuccagccacuuggga

SEQ ID NO: 3289278 - RNA, 16 nt, Variola virus
gauaguuguugugaca

SEQ ID NO: 3289279 - RNA, 15 nt, Variola virus
gcguaucaaauguaa

SEQ ID NO: 3289280 - RNA, 20 nt, Variola virus
gcauauucuauagucagaau

SEQ ID NO: 3289281 - RNA, 13 nt, Variola virus
gauauauucaaac

SEQ ID NO: 3289282 - RNA, 22 nt, Variola virus
aguacuacugaagaacuaaaag

SEQ ID NO: 3289283 - RNA, 18 nt, Variola virus
caauacacacaauagaca

SEQ ID NO: 3289284 - RNA, 18 nt, Variola virus
acgauauuuguuggauuu

SEQ ID NO: 3289285 - RNA, 22 nt, Variola virus
uccaaguacgguaauagauuuu

SEQ ID NO: 3289286 - RNA, 17 nt, Variola virus
aguuuuccguuagaaaa

SEQ ID NO: 3289287 - RNA, 13 nt, Variola virus
aauaguaucaucu

SEQ ID NO: 3289288 - RNA, 18 nt, Variola virus
uuggcaguacucauuaau

SEQ ID NO: 3289289 - RNA, 20 nt, Variola virus
cguuuaaaguaaacuucgua

SEQ ID NO: 3289290 - RNA, 15 nt, Variola virus
aacaaaguuauucau

SEQ ID NO: 3289291 - RNA, 14 nt, Variola virus
aguagaauaauaga

SEQ ID NO: 3289292 - RNA, 22 nt, Variola virus
ucuaucccccguauuuacauua

SEQ ID NO: 3289293 - RNA, 14 nt, Variola virus
cguacccaacaaua

SEQ ID NO: 3289294 - RNA, 20 nt, Variola virus
ucguucaacugucuuucaag

SEQ ID NO: 3289295 - RNA, 22 nt, Variola virus
auaccauauccuccuguagaua

SEQ ID NO: 3289296 - RNA, 13 nt, Variola virus
cagauacauacua

SEQ ID NO: 3289297 - RNA, 20 nt, Variola virus
gauagaugaacugacauaua

SEQ ID NO: 3289298 - RNA, 19 nt, Variola virus
auugguuacucuugucauu

SEQ ID NO: 3289299 - RNA, 19 nt, Variola virus
gauaacaauagucuuguaa

SEQ ID NO: 3289300 - RNA, 18 nt, Variola virus
acaaugcucaguaaaugu

SEQ ID NO: 3289301 - RNA, 13 nt, Variola virus
uacccuuccaaau

SEQ ID NO: 3289302 - RNA, 16 nt, Variola virus
caguuagcuacucuag

SEQ ID NO: 3289303 - RNA, 16 nt, Variola virus
uuuauuccacaugagu

SEQ ID NO: 3289304 - RNA, 12 nt, Variola virus
uuagcauacaaa

SEQ ID NO: 3289305 - RNA, 20 nt, Variola virus
auaaugacauggacguagau

SEQ ID NO: 3289306 - RNA, 14 nt, Variola virus
aaagagaauuauau

SEQ ID NO: 3289307 - RNA, 21 nt, Variola virus
caucauacgaaaauagauucu

SEQ ID NO: 3289308 - RNA, 21 nt, Variola virus
ucacuaacugauaccaugaaa

SEQ ID NO: 3289309 - RNA, 15 nt, Variola virus
guuguuccaauaaau

SEQ ID NO: 3289310 - RNA, 13 nt, Variola virus
cacgauauggaug

SEQ ID NO: 3289311 - RNA, 11 nt, Variola virus
acauuaaacag

SEQ ID NO: 3289312 - RNA, 22 nt, Variola virus
acuauggacgcaugauaagaau

SEQ ID NO: 3289313 - RNA, 13 nt, Variola virus
ugguguaaaucua

SEQ ID NO: 3289314 - RNA, 18 nt, Variola virus
acugaguuuuuaggaaau

SEQ ID NO: 3289315 - RNA, 18 nt, Variola virus
aaauacaaaauaauagau

SEQ ID NO: 3289316 - RNA, 15 nt, Variola virus
uaauuuguucaaaau

SEQ ID NO: 3289317 - RNA, 13 nt, Variola virus
ucuaaauguauua

SEQ ID NO: 3289318 - RNA, 18 nt, Variola virus
acacuaccaguaucaauu

SEQ ID NO: 3289319 - RNA, 12 nt, Variola virus
uacacauaauga

SEQ ID NO: 3289320 - RNA, 23 nt, Variola virus
uuauuucagucgcugauuaauca

SEQ ID NO: 3289321 - RNA, 19 nt, Variola virus
gaugacuuuaguaaaucau

SEQ ID NO: 3289322 - RNA, 21 nt, Variola virus
aacuucaggauuuuuuacagg

SEQ ID NO: 3289323 - RNA, 14 nt, Variola virus
gauaucuccauuaa

SEQ ID NO: 3289324 - RNA, 17 nt, Variola virus
ccauucuaaucacauua

SEQ ID NO: 3289325 - RNA, 21 nt, Variola virus
guaaauccugcacuaugucca

SEQ ID NO: 3289326 - RNA, 21 nt, Variola virus
gcagguaugauagcuccacca

SEQ ID NO: 3289327 - RNA, 16 nt, Variola virus
aaucuacugauauugu

SEQ ID NO: 3289328 - RNA, 21 nt, Variola virus
aucauauaucugaagauauac

SEQ ID NO: 3289329 - RNA, 19 nt, Variola virus
caguaaccaaauacauauu

SEQ ID NO: 3289330 - RNA, 19 nt, Variola virus
cuuuaauaacaaagaaaga

SEQ ID NO: 3289331 - RNA, 15 nt, Variola virus
auuaaaaauuuccau

SEQ ID NO: 3289332 - RNA, 14 nt, Variola virus
auuuaaugauucau

SEQ ID NO: 3289333 - RNA, 21 nt, Variola virus
uaauauaaaagaauauguaua

SEQ ID NO: 3289334 - RNA, 16 nt, Variola virus
acucaugauuaaaccu

SEQ ID NO: 3289335 - RNA, 13 nt, Variola virus
guaaauaguuuua

SEQ ID NO: 3289336 - RNA, 21 nt, Variola virus
acuuacuuuccagauagaaaa

SEQ ID NO: 3289337 - RNA, 21 nt, Variola virus
auacuaauaugacacgauugu

SEQ ID NO: 3289338 - RNA, 14 nt, Variola virus
cauaaaacaucauu

SEQ ID NO: 3289339 - RNA, 16 nt, Variola virus
uucuggauauguuuuu

SEQ ID NO: 3289340 - RNA, 17 nt, Variola virus
acauugugauuaaacau

SEQ ID NO: 3289341 - RNA, 19 nt, Variola virus
agaacucuugaagaugauu

SEQ ID NO: 3289342 - RNA, 17 nt, Variola virus
uucccguaauaaauuuu

SEQ ID NO: 3289343 - RNA, 13 nt, Variola virus
uguguuacauaau

SEQ ID NO: 3289344 - RNA, 14 nt, Variola virus
guuuguuuuggaaa

SEQ ID NO: 3289345 - RNA, 23 nt, Variola virus
gaaaucuuuagacgguugagaaa

SEQ ID NO: 3289346 - RNA, 11 nt, Variola virus
cuucuauuuua

SEQ ID NO: 3289347 - RNA, 13 nt, Variola virus
uuugcaaacauaa

SEQ ID NO: 3289348 - RNA, 19 nt, Variola virus
auucuugguaauuaauaga

SEQ ID NO: 3289349 - RNA, 17 nt, Variola virus
uaugaauaaucuucauu

SEQ ID NO: 3289350 - RNA, 19 nt, Variola virus
ggaaaaucugaagaagaua

SEQ ID NO: 3289351 - RNA, 12 nt, Variola virus
auuaauacuuuu

SEQ ID NO: 3289352 - RNA, 22 nt, Variola virus
ccaaccaaacggaguaaaauaa

SEQ ID NO: 3289353 - RNA, 16 nt, Variola virus
uguuguguacauguag

SEQ ID NO: 3289354 - RNA, 17 nt, Variola virus
aauguugucaaaugauc

SEQ ID NO: 3289355 - RNA, 20 nt, Variola virus
acaauauauucucaugguau

SEQ ID NO: 3289356 - RNA, 20 nt, Variola virus
uuuuugagccauauuccaca

SEQ ID NO: 3289357 - RNA, 18 nt, Variola virus
aucuagaaauuacauaaa

SEQ ID NO: 3289358 - RNA, 18 nt, Variola virus
uaguuucagaauuuucua

SEQ ID NO: 3289359 - RNA, 23 nt, Variola virus
ccguuuuguucuuggauuucaua

SEQ ID NO: 3289360 - RNA, 14 nt, Variola virus
aauucguuuaaaaa

SEQ ID NO: 3289361 - RNA, 18 nt, Variola virus
caucugucauuacauaau

SEQ ID NO: 3289362 - RNA, 15 nt, Variola virus
uaaaaguuaggguuc

SEQ ID NO: 3289363 - RNA, 12 nt, Variola virus
aaauauaaugau

SEQ ID NO: 3289364 - RNA, 22 nt, Variola virus
auggucagugcauaauaaagua

SEQ ID NO: 3289365 - RNA, 14 nt, Variola virus
uauucauucaaugu

SEQ ID NO: 3289366 - RNA, 21 nt, Variola virus
uaauuuacaaaaauuuaaaau

SEQ ID NO: 3289367 - RNA, 19 nt, Variola virus
guauagaacacaugucuua

SEQ ID NO: 3289368 - RNA, 14 nt, Variola virus
gaaaucguauauaa

SEQ ID NO: 3289369 - RNA, 23 nt, Variola virus
ucuaaaauuuccaucucuaucua

SEQ ID NO: 3289370 - RNA, 17 nt, Variola virus
ugauauauaauuuaccg

SEQ ID NO: 3289371 - RNA, 20 nt, Variola virus
gcuaguuaauaguaaaugaa

SEQ ID NO: 3289372 - RNA, 21 nt, Variola virus
gauugggaaccagucaugaau

SEQ ID NO: 3289373 - RNA, 23 nt, Variola virus
gagaccauguauugcuguauuug

SEQ ID NO: 3289374 - RNA, 15 nt, Variola virus
ugucuuucucuuuua

SEQ ID NO: 3289375 - RNA, 15 nt, Variola virus
cuaugguacaaguug

SEQ ID NO: 3289376 - RNA, 18 nt, Variola virus
ugcuauguugauucuauu

SEQ ID NO: 3289377 - RNA, 17 nt, Variola virus
uugauaauuacgcguau

SEQ ID NO: 3289378 - RNA, 19 nt, Variola virus
agaaucauaaagaacagua

SEQ ID NO: 3289379 - RNA, 13 nt, Variola virus
cuggauauguuuu

SEQ ID NO: 3289380 - RNA, 16 nt, Variola virus
cugaaaagaaaguauc

SEQ ID NO: 3289381 - RNA, 14 nt, Variola virus
acgaaagcaaagaa

SEQ ID NO: 3289382 - RNA, 18 nt, Variola virus
caaaagacaugauaauau

SEQ ID NO: 3289383 - RNA, 21 nt, Variola virus
uaaaacagucacgauaucucu

SEQ ID NO: 3289384 - RNA, 17 nt, Variola virus
ucagaaaagucaaauau

SEQ ID NO: 3289385 - RNA, 13 nt, Variola virus
aaugaugcagaua

SEQ ID NO: 3289386 - RNA, 14 nt, Variola virus
ucacuagaaacuag

SEQ ID NO: 3289387 - RNA, 21 nt, Variola virus
ucuagccucgguaaucuguac

SEQ ID NO: 3289388 - RNA, 13 nt, Variola virus
auuaaaucaauau

SEQ ID NO: 3289389 - RNA, 13 nt, Variola virus
uauuaaucuuuuu

SEQ ID NO: 3289390 - RNA, 19 nt, Variola virus
cccggguacguggauauca

SEQ ID NO: 3289391 - RNA, 20 nt, Variola virus
augugauggaaaaaugacua

SEQ ID NO: 3289392 - RNA, 12 nt, Variola virus
cuugcuauuuuu

SEQ ID NO: 3289393 - RNA, 16 nt, Variola virus
cuaauaaauuaaauau

SEQ ID NO: 3289394 - RNA, 12 nt, Variola virus
uaugacaaacuu

SEQ ID NO: 3289395 - RNA, 16 nt, Variola virus
agccaauccuaacucu

SEQ ID NO: 3289396 - RNA, 17 nt, Variola virus
auaacuaaauuaacaau

SEQ ID NO: 3289397 - RNA, 14 nt, Variola virus
uaacauucauuagu

SEQ ID NO: 3289398 - RNA, 12 nt, Variola virus
auaauuuucuau

SEQ ID NO: 3289399 - RNA, 14 nt, Variola virus
ucauuggaaaauau

SEQ ID NO: 3289400 - RNA, 13 nt, Variola virus
cuauacuauguua

SEQ ID NO: 3289401 - RNA, 16 nt, Variola virus
uagcaauuucaaaaua

SEQ ID NO: 3289402 - RNA, 16 nt, Variola virus
aauacaaaaguuaaua

SEQ ID NO: 3289403 - RNA, 20 nt, Variola virus
caaucaacgaauuaaugaua

SEQ ID NO: 3289404 - RNA, 21 nt, Variola virus
ucuagacgauuaguaauauau

SEQ ID NO: 3289405 - RNA, 19 nt, Variola virus
aguauuuuucaaaaaaugu

SEQ ID NO: 3289406 - RNA, 16 nt, Variola virus
uaauuucaucuacaau

SEQ ID NO: 3289407 - RNA, 16 nt, Variola virus
aguauuuuuaccuaau

SEQ ID NO: 3289408 - RNA, 19 nt, Variola virus
aguauugguaauguacaaa

SEQ ID NO: 3289409 - RNA, 15 nt, Variola virus
gucaauauuguuuua

SEQ ID NO: 3289410 - RNA, 21 nt, Variola virus
auuauuuuugacgaugucaag

SEQ ID NO: 3289411 - RNA, 18 nt, Variola virus
ucuaucauggcaauaaua

SEQ ID NO: 3289412 - RNA, 14 nt, Variola virus
uagguuucuauaau

SEQ ID NO: 3289413 - RNA, 17 nt, Variola virus
aaguaucaaaucuucua

SEQ ID NO: 3289414 - RNA, 22 nt, Variola virus
gcaucuaaaacaauaaaugcau

SEQ ID NO: 3289415 - RNA, 14 nt, Variola virus
uaaacuuuaaugau

SEQ ID NO: 3289416 - RNA, 12 nt, Variola virus
aauuaguuuauu

SEQ ID NO: 3289417 - RNA, 15 nt, Variola virus
uuugagauuucauaa

SEQ ID NO: 3289418 - RNA, 22 nt, Variola virus
caaauaaaucacuaaauaauau

SEQ ID NO: 3289419 - RNA, 16 nt, Variola virus
uguuaauuauuucuaa

SEQ ID NO: 3289420 - RNA, 20 nt, Variola virus
cuaaagaacggagaauaucu

SEQ ID NO: 3289421 - RNA, 22 nt, Variola virus
uuaugaauaucacauaucaugu

SEQ ID NO: 3289422 - RNA, 22 nt, Variola virus
gcguaaaagucaaauuagauuu

SEQ ID NO: 3289423 - RNA, 15 nt, Variola virus
auauagguuacuaga

SEQ ID NO: 3289424 - RNA, 19 nt, Variola virus
agauuaucaaaaucuuguc

SEQ ID NO: 3289425 - RNA, 17 nt, Variola virus
ccaucuccuuauuuuua

SEQ ID NO: 3289426 - RNA, 15 nt, Variola virus
aacagugaguuuauc

SEQ ID NO: 3289427 - RNA, 13 nt, Variola virus
cagaaaaaacaau

SEQ ID NO: 3289428 - RNA, 22 nt, Variola virus
auuucugaacccguuaauguau

SEQ ID NO: 3289429 - RNA, 18 nt, Variola virus
auauugucccaauguuuc

SEQ ID NO: 3289430 - RNA, 19 nt, Variola virus
aacacaagucuaauaaugu

SEQ ID NO: 3289431 - RNA, 14 nt, Variola virus
ucuuuaaugugaaa

SEQ ID NO: 3289432 - RNA, 15 nt, Variola virus
acaccauuuacuuua

SEQ ID NO: 3289433 - RNA, 18 nt, Variola virus
aucagagucugaggauau

SEQ ID NO: 3289434 - RNA, 21 nt, Variola virus
cauggaaaagauaaaguuuua

SEQ ID NO: 3289435 - RNA, 12 nt, Variola virus
gaaaauacuaua

SEQ ID NO: 3289436 - RNA, 16 nt, Variola virus
aaaucuaguuguggaa

SEQ ID NO: 3289437 - RNA, 21 nt, Variola virus
auacgaaauaaauaaugaauu

SEQ ID NO: 3289438 - RNA, 19 nt, Variola virus
uagaaauuaucaaauguug

SEQ ID NO: 3289439 - RNA, 16 nt, Variola virus
uucgauagauauucuu

SEQ ID NO: 3289440 - RNA, 14 nt, Variola virus
aggagauuaaagga

SEQ ID NO: 3289441 - RNA, 20 nt, Variola virus
auagacagcuucuagaaguu

SEQ ID NO: 3289442 - RNA, 13 nt, Variola virus
ugccauuaugaua

SEQ ID NO: 3289443 - RNA, 13 nt, Variola virus
uucuauuauuaca

SEQ ID NO: 3289444 - RNA, 19 nt, Variola virus
cgauaaugugguuacucuu

SEQ ID NO: 3289445 - RNA, 18 nt, Variola virus
augucauuuuuuuauccg

SEQ ID NO: 3289446 - RNA, 15 nt, Variola virus
augauaaacuaacua

SEQ ID NO: 3289447 - RNA, 21 nt, Variola virus
uaugaauggauaccuguauua

SEQ ID NO: 3289448 - RNA, 18 nt, Variola virus
agaugacugauauucagg

SEQ ID NO: 3289449 - RNA, 18 nt, Variola virus
auauuaucaccuauugcc

SEQ ID NO: 3289450 - RNA, 17 nt, Variola virus
ucacaaguaugaagaaa

SEQ ID NO: 3289451 - RNA, 12 nt, Variola virus
uuauguacuaag

SEQ ID NO: 3289452 - RNA, 14 nt, Variola virus
uaggauuuaaacaa

SEQ ID NO: 3289453 - RNA, 21 nt, Variola virus
aauggauaagaauaaauuaua

SEQ ID NO: 3289454 - RNA, 21 nt, Variola virus
auacagauuguaguucuauaa

SEQ ID NO: 3289455 - RNA, 21 nt, Variola virus
auuucuauacuuguuggugaa

SEQ ID NO: 3289456 - RNA, 15 nt, Variola virus
acugaacaggcauuu

SEQ ID NO: 3289457 - RNA, 16 nt, Variola virus
caaacaauuuuaacag

SEQ ID NO: 3289458 - RNA, 11 nt, Variola virus
uuuucacuuua

SEQ ID NO: 3289459 - RNA, 18 nt, Variola virus
ggauuuggucauaauaga

SEQ ID NO: 3289460 - RNA, 17 nt, Variola virus
augaauuagagaauuac

SEQ ID NO: 3289461 - RNA, 20 nt, Variola virus
aaacacauauugaugugucu

SEQ ID NO: 3289462 - RNA, 19 nt, Variola virus
uuaucaauauacuauucuu

SEQ ID NO: 3289463 - RNA, 17 nt, Variola virus
guguauaaaauauacug

SEQ ID NO: 3289464 - RNA, 14 nt, Variola virus
aaugugagaaguuu

SEQ ID NO: 3289465 - RNA, 14 nt, Variola virus
cacuauuauaacaa

SEQ ID NO: 3289466 - RNA, 17 nt, Variola virus
aaaaauccuuaaugaua

SEQ ID NO: 3289467 - RNA, 18 nt, Variola virus
auuguauccauacauaca

SEQ ID NO: 3289468 - RNA, 22 nt, Variola virus
acguaaaugugugcgaaaauac

SEQ ID NO: 3289469 - RNA, 22 nt, Variola virus
cuauaucuucuaaaauuacaaa

SEQ ID NO: 3289470 - RNA, 16 nt, Variola virus
aaaauucauuagaaua

SEQ ID NO: 3289471 - RNA, 20 nt, Variola virus
auauugauaucuuuuugaau

SEQ ID NO: 3289472 - RNA, 15 nt, Variola virus
acugauuaacaaaug

SEQ ID NO: 3289473 - RNA, 15 nt, Variola virus
aaauacgaacuuuau

SEQ ID NO: 3289474 - RNA, 14 nt, Variola virus
acuaugcacauuau

SEQ ID NO: 3289475 - RNA, 17 nt, Variola virus
uauaucauuuguuuuaa

SEQ ID NO: 3289476 - RNA, 19 nt, Variola virus
agaaucaugguauauggau

SEQ ID NO: 3289477 - RNA, 23 nt, Variola virus
aauguuauaguuuucuaaaaugu

SEQ ID NO: 3289478 - RNA, 13 nt, Variola virus
agaauucuaaaug

SEQ ID NO: 3289479 - RNA, 17 nt, Variola virus
aucagaugauaucagua

SEQ ID NO: 3289480 - RNA, 14 nt, Variola virus
augugauuguucaa

SEQ ID NO: 3289481 - RNA, 21 nt, Variola virus
acuuucuugcaaguuacuaau

SEQ ID NO: 3289482 - RNA, 14 nt, Variola virus
ccaauaaaauuacu

SEQ ID NO: 3289483 - RNA, 17 nt, Variola virus
ucuaauucuacauaugg

SEQ ID NO: 3289484 - RNA, 14 nt, Variola virus
acaaacuaucugau

SEQ ID NO: 3289485 - RNA, 21 nt, Variola virus
aaaauuuguauuuuuaaucua

SEQ ID NO: 3289486 - RNA, 21 nt, Variola virus
gcaccauucauaauuacagaa

SEQ ID NO: 3289487 - RNA, 12 nt, Variola virus
gauuuucuggga

SEQ ID NO: 3289488 - RNA, 23 nt, Variola virus
cauauccagacaacaaucguuug

SEQ ID NO: 3289489 - RNA, 14 nt, Variola virus
uagaauauauguca

SEQ ID NO: 3289490 - RNA, 18 nt, Variola virus
uguuaauaaguaaaugaa

SEQ ID NO: 3289491 - RNA, 15 nt, Variola virus
cuugauuacauucuc

SEQ ID NO: 3289492 - RNA, 24 nt, Variola virus
cguuaacuaucaaacaaacugcug

SEQ ID NO: 3289493 - RNA, 15 nt, Variola virus
ggccguuuguuuccu

SEQ ID NO: 3289494 - RNA, 17 nt, Variola virus
aauauggucuuuaaaaa

SEQ ID NO: 3289495 - RNA, 19 nt, Variola virus
aauauuagaguuagguaau

SEQ ID NO: 3289496 - RNA, 21 nt, Variola virus
uguuaauacaucaauggaaga

SEQ ID NO: 3289497 - RNA, 23 nt, Variola virus
uuaaagagacuacaauauauucu

SEQ ID NO: 3289498 - RNA, 21 nt, Variola virus
ggguauuuaucaauaaacaau

SEQ ID NO: 3289499 - RNA, 12 nt, Variola virus
auuaucaucaaa

SEQ ID NO: 3289500 - RNA, 15 nt, Variola virus
auaauuauagaucag

SEQ ID NO: 3289501 - RNA, 15 nt, Variola virus
cagaucaauggauua

SEQ ID NO: 3289502 - RNA, 12 nt, Variola virus
acugaucuucuu

SEQ ID NO: 3289503 - RNA, 12 nt, Variola virus
uaauauuguuaa

SEQ ID NO: 3289504 - RNA, 23 nt, Variola virus
auuaucaggaacauuaucaauuu

SEQ ID NO: 3289505 - RNA, 18 nt, Variola virus
auaauuuuuggacaaaug

SEQ ID NO: 3289506 - RNA, 13 nt, Variola virus
aaauaauaugauu

SEQ ID NO: 3289507 - RNA, 19 nt, Variola virus
auacguaaacuuuaauagu

SEQ ID NO: 3289508 - RNA, 18 nt, Variola virus
uaacgaaacaauguuucu

SEQ ID NO: 3289509 - RNA, 18 nt, Variola virus
uuagacggcaacauagaa

SEQ ID NO: 3289510 - RNA, 21 nt, Variola virus
aauuauacuuugguaaauguu

SEQ ID NO: 3289511 - RNA, 22 nt, Variola virus
uaagaaaguaauucagacacuu

SEQ ID NO: 3289512 - RNA, 15 nt, Variola virus
gaauuugauacuguc

SEQ ID NO: 3289513 - RNA, 22 nt, Variola virus
uuagcgagguauuuauucauaa

SEQ ID NO: 3289514 - RNA, 23 nt, Variola virus
uaccaugacuccucuucauacag

SEQ ID NO: 3289515 - RNA, 13 nt, Variola virus
guuuggaauaacu

SEQ ID NO: 3289516 - RNA, 23 nt, Variola virus
aaguauaaaaauuaaacaaaacg

SEQ ID NO: 3289517 - RNA, 15 nt, Variola virus
uuaauauuagaguua

SEQ ID NO: 3289518 - RNA, 20 nt, Variola virus
auauuucuaaacccaaaaug

SEQ ID NO: 3289519 - RNA, 20 nt, Variola virus
caaugaacaagauuaaucuc

SEQ ID NO: 3289520 - RNA, 16 nt, Variola virus
cauaugccaacaugca

SEQ ID NO: 3289521 - RNA, 13 nt, Variola virus
auaucuuaaauaa

SEQ ID NO: 3289522 - RNA, 19 nt, Variola virus
caacauaaauaauucuaga

SEQ ID NO: 3289523 - RNA, 15 nt, Variola virus
ugcaaagaacaaaau

SEQ ID NO: 3289524 - RNA, 21 nt, Variola virus
gauaaaaaauuauauacugaa

SEQ ID NO: 3289525 - RNA, 22 nt, Variola virus
ccuacguaucuauaaucaucug

SEQ ID NO: 3289526 - RNA, 22 nt, Variola virus
aaccucacuguuaaaaauaugu

SEQ ID NO: 3289527 - RNA, 15 nt, Variola virus
aacucauucuauaua

SEQ ID NO: 3289528 - RNA, 20 nt, Variola virus
uucucucauuuaucaaaagu

SEQ ID NO: 3289529 - RNA, 18 nt, Variola virus
aaauauaugcucauauau

SEQ ID NO: 3289530 - RNA, 20 nt, Variola virus
gcuuagcuaauccugauauu

SEQ ID NO: 3289531 - RNA, 12 nt, Variola virus
acaaaagguauu

SEQ ID NO: 3289532 - RNA, 14 nt, Variola virus
auacgauaaacauu

SEQ ID NO: 3289533 - RNA, 18 nt, Variola virus
uaacaaaaauuaugaaau

SEQ ID NO: 3289534 - RNA, 17 nt, Variola virus
uucaaggacaaaaugac

SEQ ID NO: 3289535 - RNA, 12 nt, Variola virus
uaucguuuucau

SEQ ID NO: 3289536 - RNA, 20 nt, Variola virus
acggcaaaccaaaaacauuu

SEQ ID NO: 3289537 - RNA, 23 nt, Variola virus
uaaaaaaaugauugaagaaggag

SEQ ID NO: 3289538 - RNA, 17 nt, Variola virus
caguaccauuaucuuug

SEQ ID NO: 3289539 - RNA, 22 nt, Variola virus
aaccgucauucaucuagaaugg

SEQ ID NO: 3289540 - RNA, 11 nt, Variola virus
uuucaaagaug

SEQ ID NO: 3289541 - RNA, 14 nt, Variola virus
augacaauauaaca

SEQ ID NO: 3289542 - RNA, 21 nt, Variola virus
uuugagaaauauguauacaua

SEQ ID NO: 3289543 - RNA, 16 nt, Variola virus
ucuaagauuauuuuaa

SEQ ID NO: 3289544 - RNA, 14 nt, Variola virus
aaaacgaaauauau

SEQ ID NO: 3289545 - RNA, 17 nt, Variola virus
cugauaauauuaucuau

SEQ ID NO: 3289546 - RNA, 20 nt, Variola virus
caauaaaaauaaacuagaaa

SEQ ID NO: 3289547 - RNA, 23 nt, Variola virus
agaagacguggauaguuucuuaa

SEQ ID NO: 3289548 - RNA, 21 nt, Variola virus
aaaucauaauaugagauguuu

SEQ ID NO: 3289549 - RNA, 17 nt, Variola virus
uauaguagaauuucauu

SEQ ID NO: 3289550 - RNA, 15 nt, Variola virus
ccauaguuuuucuac

SEQ ID NO: 3289551 - RNA, 23 nt, Variola virus
ucauccguggauauuugauuuuu

SEQ ID NO: 3289552 - RNA, 15 nt, Variola virus
cuuuugucguaaaua

SEQ ID NO: 3289553 - RNA, 18 nt, Variola virus
uuuaaacacucuuucuga

SEQ ID NO: 3289554 - RNA, 15 nt, Variola virus
aaacaaaauuuuacu

SEQ ID NO: 3289555 - RNA, 16 nt, Variola virus
agaucuaauuuuucau

SEQ ID NO: 3289556 - RNA, 14 nt, Variola virus
auaguccagaaaug

SEQ ID NO: 3289557 - RNA, 13 nt, Variola virus
aucucuugcuucu

SEQ ID NO: 3289558 - RNA, 15 nt, Variola virus
aaauguugucauuau

SEQ ID NO: 3289559 - RNA, 22 nt, Variola virus
uaaauauuuuucuaccuuuuca

SEQ ID NO: 3289560 - RNA, 17 nt, Variola virus
aauuuggucauucuuaa

SEQ ID NO: 3289561 - RNA, 20 nt, Variola virus
cuauuaguuguuccaauaaa

SEQ ID NO: 3289562 - RNA, 21 nt, Variola virus
uucccugauuaguauuuucua

SEQ ID NO: 3289563 - RNA, 17 nt, Variola virus
ggaccuauaauugauua

SEQ ID NO: 3289564 - RNA, 22 nt, Variola virus
uauacaaugcucaguaaaugua

SEQ ID NO: 3289565 - RNA, 17 nt, Variola virus
ccaacucauuuaaauau

SEQ ID NO: 3289566 - RNA, 18 nt, Variola virus
acguucacuaauaaauug

SEQ ID NO: 3289567 - RNA, 16 nt, Variola virus
gucauguugauacauc

SEQ ID NO: 3289568 - RNA, 11 nt, Variola virus
aauauauguau

SEQ ID NO: 3289569 - RNA, 15 nt, Variola virus
ucugauaaucucuaa

SEQ ID NO: 3289570 - RNA, 21 nt, Variola virus
aauuaugagaaugugauucaa

SEQ ID NO: 3289571 - RNA, 14 nt, Variola virus
augaugaaauguau

SEQ ID NO: 3289572 - RNA, 17 nt, Variola virus
auacauggaagaauuag

SEQ ID NO: 3289573 - RNA, 17 nt, Variola virus
ucuuaaaauuggaucua

SEQ ID NO: 3289574 - RNA, 14 nt, Variola virus
uaugaaaaacaugu

SEQ ID NO: 3289575 - RNA, 17 nt, Variola virus
acgaugaaaaugugcuu

SEQ ID NO: 3289576 - RNA, 21 nt, Variola virus
ucgcuuucugguaacaugaua

SEQ ID NO: 3289577 - RNA, 14 nt, Variola virus
acaguuuaucacau

SEQ ID NO: 3289578 - RNA, 15 nt, Variola virus
auaaaugacaaguau

SEQ ID NO: 3289579 - RNA, 18 nt, Variola virus
caauuuguauuauccaau

SEQ ID NO: 3289580 - RNA, 17 nt, Variola virus
agaaagugcaaaugagg

SEQ ID NO: 3289581 - RNA, 22 nt, Variola virus
uacaacacaggauaaauuauuu

SEQ ID NO: 3289582 - RNA, 15 nt, Variola virus
auauauuauauagau

SEQ ID NO: 3289583 - RNA, 20 nt, Variola virus
agaaaaaucauuaaaaagau

SEQ ID NO: 3289584 - RNA, 15 nt, Variola virus
auuucuauucaugaa

SEQ ID NO: 3289585 - RNA, 13 nt, Variola virus
ugagauuuugcau

SEQ ID NO: 3289586 - RNA, 21 nt, Variola virus
auuauggggaaauaaagaaaa

SEQ ID NO: 3289587 - RNA, 16 nt, Variola virus
aaaaccguuaaaaugu

SEQ ID NO: 3289588 - RNA, 13 nt, Variola virus
uaucuuuccaacu

SEQ ID NO: 3289589 - RNA, 19 nt, Variola virus
uaacaaaauccaaacauua

SEQ ID NO: 3289590 - RNA, 15 nt, Variola virus
uacuauuguacauua

SEQ ID NO: 3289591 - RNA, 22 nt, Variola virus
aauagacggcauuaauuuccau

SEQ ID NO: 3289592 - RNA, 16 nt, Variola virus
auacauaaagaaaugu

SEQ ID NO: 3289593 - RNA, 18 nt, Variola virus
cgugauuauucuccacca

SEQ ID NO: 3289594 - RNA, 14 nt, Variola virus
auagaaacauauau

SEQ ID NO: 3289595 - RNA, 21 nt, Variola virus
auaauucuccagucgaaacau

SEQ ID NO: 3289596 - RNA, 17 nt, Variola virus
gauuauuagaucuuuuc

SEQ ID NO: 3289597 - RNA, 12 nt, Variola virus
uacaaauuauug

SEQ ID NO: 3289598 - RNA, 17 nt, Variola virus
uuaacauaugauauuca

SEQ ID NO: 3289599 - RNA, 16 nt, Variola virus
cgaauaccauggauug

SEQ ID NO: 3289600 - RNA, 18 nt, Variola virus
auacuacgacuuuguuaa

SEQ ID NO: 3289601 - RNA, 18 nt, Variola virus
gaauaaucguuauuauca

SEQ ID NO: 3289602 - RNA, 21 nt, Variola virus
uuaucuauuccuuucauuaac

SEQ ID NO: 3289603 - RNA, 22 nt, Variola virus
uccuaaaauacuauuauaucuu

SEQ ID NO: 3289604 - RNA, 16 nt, Variola virus
caaugagauguaucau

SEQ ID NO: 3289605 - RNA, 20 nt, Variola virus
caaauaaaauggauaauggu

SEQ ID NO: 3289606 - RNA, 19 nt, Variola virus
ucagacgauccacaaucaa

SEQ ID NO: 3289607 - RNA, 16 nt, Variola virus
acccaugauaaugaau

SEQ ID NO: 3289608 - RNA, 21 nt, Variola virus
cuaucgaaaauugcuauuuca

SEQ ID NO: 3289609 - RNA, 19 nt, Variola virus
caaaaccguuaaaauguau

SEQ ID NO: 3289610 - RNA, 15 nt, Variola virus
aaagguauacgaaug

SEQ ID NO: 3289611 - RNA, 20 nt, Variola virus
auaauuauuucaauauacua

SEQ ID NO: 3289612 - RNA, 18 nt, Variola virus
aaaaugcgauguuaauuu

SEQ ID NO: 3289613 - RNA, 15 nt, Variola virus
auccguucuuaacuu

SEQ ID NO: 3289614 - RNA, 14 nt, Variola virus
gaucuggaaaauaa

SEQ ID NO: 3289615 - RNA, 16 nt, Variola virus
uuucuacuaacuuuuu

SEQ ID NO: 3289616 - RNA, 16 nt, Variola virus
cguuagaucuauuuua

SEQ ID NO: 3289617 - RNA, 18 nt, Variola virus
gaaacaguuccauaugau

SEQ ID NO: 3289618 - RNA, 14 nt, Variola virus
augcagaaaugauu

SEQ ID NO: 3289619 - RNA, 15 nt, Variola virus
guauauucucuaguu

SEQ ID NO: 3289620 - RNA, 15 nt, Variola virus
gauauucuaugaauu

SEQ ID NO: 3289621 - RNA, 22 nt, Variola virus
gacaaaagacguaaauauucua

SEQ ID NO: 3289622 - RNA, 13 nt, Variola virus
acauguuaguaga

SEQ ID NO: 3289623 - RNA, 13 nt, Variola virus
aauuauuaccaua

SEQ ID NO: 3289624 - RNA, 18 nt, Variola virus
aucagaauaaaucaauau

SEQ ID NO: 3289625 - RNA, 15 nt, Variola virus
cgguacaacauucca

SEQ ID NO: 3289626 - RNA, 15 nt, Variola virus
uaaucgaguacgcca

SEQ ID NO: 3289627 - RNA, 14 nt, Variola virus
ucuucaucaaacag

SEQ ID NO: 3289628 - RNA, 14 nt, Variola virus
aaauagauuauuua

SEQ ID NO: 3289629 - RNA, 16 nt, Variola virus
gccauggacuaagaua

SEQ ID NO: 3289630 - RNA, 18 nt, Variola virus
ccucagaggauauguuug

SEQ ID NO: 3289631 - RNA, 12 nt, Variola virus
cuacauuguuua

SEQ ID NO: 3289632 - RNA, 14 nt, Variola virus
auggaugcagaaua

SEQ ID NO: 3289633 - RNA, 19 nt, Variola virus
auuuaucgauuagucuuaa

SEQ ID NO: 3289634 - RNA, 22 nt, Variola virus
uuuccauuagauuauaucauaa

SEQ ID NO: 3289635 - RNA, 20 nt, Variola virus
aucaauaaaugugagaaguu

SEQ ID NO: 3289636 - RNA, 18 nt, Variola virus
gugcauaaauuaaaauac

SEQ ID NO: 3289637 - RNA, 21 nt, Variola virus
uucacaaucggauuaauaucu

SEQ ID NO: 3289638 - RNA, 17 nt, Variola virus
auaaaguauauaugaga

SEQ ID NO: 3289639 - RNA, 19 nt, Variola virus
cauguauccacuuuugagc

SEQ ID NO: 3289640 - RNA, 19 nt, Variola virus
cauuauuacauagauguau

SEQ ID NO: 3289641 - RNA, 12 nt, Variola virus
cauuuaaacauu

SEQ ID NO: 3289642 - RNA, 18 nt, Variola virus
uaucaaaaucuugucugc

SEQ ID NO: 3289643 - RNA, 15 nt, Variola virus
ucaucuaagaaauag

SEQ ID NO: 3289644 - RNA, 14 nt, Variola virus
ugcuauuaagguua

SEQ ID NO: 3289645 - RNA, 15 nt, Variola virus
auguguuaaaaagaa

SEQ ID NO: 3289646 - RNA, 23 nt, Variola virus
uaacauuguuaauugaaaaggga

SEQ ID NO: 3289647 - RNA, 13 nt, Variola virus
gugauaguuuaua

SEQ ID NO: 3289648 - RNA, 17 nt, Variola virus
aacuauuccaauguuua

SEQ ID NO: 3289649 - RNA, 20 nt, Variola virus
aauauuuuucguuuacaaaa

SEQ ID NO: 3289650 - RNA, 16 nt, Variola virus
aacucaggaacuauaa

SEQ ID NO: 3289651 - RNA, 13 nt, Variola virus
gucaauugauucu

SEQ ID NO: 3289652 - RNA, 23 nt, Variola virus
auaucauuaggauuuaacuccuu

SEQ ID NO: 3289653 - RNA, 23 nt, Variola virus
aaauuuuguugauuacucuuuuu

SEQ ID NO: 3289654 - RNA, 17 nt, Variola virus
uacauuguauaaaaagc

SEQ ID NO: 3289655 - RNA, 14 nt, Variola virus
auuagacauuuaac

SEQ ID NO: 3289656 - RNA, 22 nt, Variola virus
accuacuuuagcauugaaaaua

SEQ ID NO: 3289657 - RNA, 15 nt, Variola virus
guucaucacauaugc

SEQ ID NO: 3289658 - RNA, 17 nt, Variola virus
gaagaauuaauaaacaa

SEQ ID NO: 3289659 - RNA, 14 nt, Variola virus
auugguacauagau

SEQ ID NO: 3289660 - RNA, 23 nt, Variola virus
uaagacuaaugcuugaaaaugga

SEQ ID NO: 3289661 - RNA, 23 nt, Variola virus
gcgauaucuccauuaauaaugau

SEQ ID NO: 3289662 - RNA, 16 nt, Variola virus
aagacgaucauuuacu

SEQ ID NO: 3289663 - RNA, 15 nt, Variola virus
uggguguaaggaaau

SEQ ID NO: 3289664 - RNA, 17 nt, Variola virus
aaagacuguagaagcua

SEQ ID NO: 3289665 - RNA, 22 nt, Variola virus
cuaauugaucaagaguaacuau

SEQ ID NO: 3289666 - RNA, 19 nt, Variola virus
auguuaaaacuacaaaaau

SEQ ID NO: 3289667 - RNA, 14 nt, Variola virus
aauauaucuuauau

SEQ ID NO: 3289668 - RNA, 17 nt, Variola virus
uuugucaacuuuguaaa

SEQ ID NO: 3289669 - RNA, 20 nt, Variola virus
cgcuacaauuauagaacgaa

SEQ ID NO: 3289670 - RNA, 17 nt, Variola virus
auauuuuucuuaacaag

SEQ ID NO: 3289671 - RNA, 13 nt, Variola virus
uaguuucuaagau

SEQ ID NO: 3289672 - RNA, 15 nt, Variola virus
gucaaaaacugaagu

SEQ ID NO: 3289673 - RNA, 16 nt, Variola virus
gaacccaauuacgaua

SEQ ID NO: 3289674 - RNA, 19 nt, Variola virus
gacuagauaaacuaucagu

SEQ ID NO: 3289675 - RNA, 11 nt, Variola virus
cuuucucucuu

SEQ ID NO: 3289676 - RNA, 11 nt, Variola virus
guuaauaaucu

SEQ ID NO: 3289677 - RNA, 19 nt, Variola virus
uaaaacauaaucaaggaua

SEQ ID NO: 3289678 - RNA, 17 nt, Variola virus
aauguuugaaaacauua

SEQ ID NO: 3289679 - RNA, 16 nt, Variola virus
aucaacuuauucuuaa

SEQ ID NO: 3289680 - RNA, 19 nt, Variola virus
ucuacuagacuauuaauaa

SEQ ID NO: 3289681 - RNA, 15 nt, Variola virus
uaaugauugcauauu

SEQ ID NO: 3289682 - RNA, 21 nt, Variola virus
uaaguuacagcgacacgguau

SEQ ID NO: 3289683 - RNA, 15 nt, Variola virus
uaauaguuuaucaua

SEQ ID NO: 3289684 - RNA, 13 nt, Variola virus
caaaaaauauauu

SEQ ID NO: 3289685 - RNA, 21 nt, Variola virus
ucuacauaugguggauuagua

SEQ ID NO: 3289686 - RNA, 20 nt, Variola virus
aucuucucuccuuucaaacu

SEQ ID NO: 3289687 - RNA, 15 nt, Variola virus
ccauaaacuauuuua

SEQ ID NO: 3289688 - RNA, 15 nt, Variola virus
agaauucaaaauauu

SEQ ID NO: 3289689 - RNA, 17 nt, Variola virus
auacuuugguaaauguu

SEQ ID NO: 3289690 - RNA, 13 nt, Variola virus
uauaauagaucuu

SEQ ID NO: 3289691 - RNA, 16 nt, Variola virus
uuugacauauuaacgu

SEQ ID NO: 3289692 - RNA, 15 nt, Variola virus
acauauuaaugaauu

SEQ ID NO: 3289693 - RNA, 23 nt, Variola virus
aacaacgaccgauaauaaaauua

SEQ ID NO: 3289694 - RNA, 17 nt, Variola virus
augaugaugaaaugaua

SEQ ID NO: 3289695 - RNA, 19 nt, Variola virus
uuaauuguuauuuuauuca

SEQ ID NO: 3289696 - RNA, 22 nt, Variola virus
ugucuaucaagauccaugauuc

SEQ ID NO: 3289697 - RNA, 17 nt, Variola virus
uauccaguuccuuuucu

SEQ ID NO: 3289698 - RNA, 14 nt, Variola virus
auaaauuauaucua

SEQ ID NO: 3289699 - RNA, 22 nt, Variola virus
ugccauugcuggauuacaucua

SEQ ID NO: 3289700 - RNA, 13 nt, Variola virus
aauuuuagauaau

SEQ ID NO: 3289701 - RNA, 19 nt, Variola virus
auaauauuuuaauagauua

SEQ ID NO: 3289702 - RNA, 17 nt, Variola virus
agaaaaacuuaguacua

SEQ ID NO: 3289703 - RNA, 19 nt, Variola virus
ucuaugaucugucuuuuaa

SEQ ID NO: 3289704 - RNA, 14 nt, Variola virus
gaaucaauauuaau

SEQ ID NO: 3289705 - RNA, 15 nt, Variola virus
cauuuuuuuaaaacu

SEQ ID NO: 3289706 - RNA, 22 nt, Variola virus
ugaaguauuuguuguauucauu

SEQ ID NO: 3289707 - RNA, 16 nt, Variola virus
gacauaccaucuauca

SEQ ID NO: 3289708 - RNA, 13 nt, Variola virus
aaauaauccugaa

SEQ ID NO: 3289709 - RNA, 12 nt, Variola virus
acugaauuauua

SEQ ID NO: 3289710 - RNA, 19 nt, Variola virus
ucuccggccacuauuauug

SEQ ID NO: 3289711 - RNA, 16 nt, Variola virus
aaaccaucgucugaau

SEQ ID NO: 3289712 - RNA, 12 nt, Variola virus
uuaacagcuuua

SEQ ID NO: 3289713 - RNA, 18 nt, Variola virus
gcauuaauacuguuuucu

SEQ ID NO: 3289714 - RNA, 13 nt, Variola virus
aaguauuuacauu

SEQ ID NO: 3289715 - RNA, 16 nt, Variola virus
guaauuauagaugaau

SEQ ID NO: 3289716 - RNA, 14 nt, Variola virus
uuuaaaaaguuauc

SEQ ID NO: 3289717 - RNA, 18 nt, Variola virus
gaucauuaauaaaaauac

SEQ ID NO: 3289718 - RNA, 16 nt, Variola virus
auguaacauuaaguaa

SEQ ID NO: 3289719 - RNA, 23 nt, Variola virus
ucaaaaaugucgaugaaauaucu

SEQ ID NO: 3289720 - RNA, 17 nt, Variola virus
cuccguauuccaaacua

SEQ ID NO: 3289721 - RNA, 14 nt, Variola virus
agauaugauaaaca

SEQ ID NO: 3289722 - RNA, 18 nt, Variola virus
agcgggguugaucuugug

SEQ ID NO: 3289723 - RNA, 19 nt, Variola virus
aaacauuguucaugauaua

SEQ ID NO: 3289724 - RNA, 15 nt, Variola virus
aauuauucuaucaau

SEQ ID NO: 3289725 - RNA, 21 nt, Variola virus
uuaguugaugugacaguuuuc

SEQ ID NO: 3289726 - RNA, 20 nt, Variola virus
gucaauuggaguaucaucua

SEQ ID NO: 3289727 - RNA, 22 nt, Variola virus
agucaaauaaagcgaaaaauaa

SEQ ID NO: 3289728 - RNA, 20 nt, Variola virus
caaugggaugcaaaacccca

SEQ ID NO: 3289729 - RNA, 14 nt, Variola virus
cuauuguuuggaau

SEQ ID NO: 3289730 - RNA, 22 nt, Variola virus
gacgucuagaguuuauaucaau

SEQ ID NO: 3289731 - RNA, 13 nt, Variola virus
auauaacauaggu

SEQ ID NO: 3289732 - RNA, 12 nt, Variola virus
augugaauguau

SEQ ID NO: 3289733 - RNA, 14 nt, Variola virus
acauuuuuuguaaa

SEQ ID NO: 3289734 - RNA, 17 nt, Variola virus
uauaugaaguaaaguau

SEQ ID NO: 3289735 - RNA, 14 nt, Variola virus
guauuaguaggaaa

SEQ ID NO: 3289736 - RNA, 18 nt, Variola virus
auucuucgcccucaauuu

SEQ ID NO: 3289737 - RNA, 16 nt, Variola virus
ugacugcuaaagaugc

SEQ ID NO: 3289738 - RNA, 22 nt, Variola virus
uauuuucgcuccaaauauacau

SEQ ID NO: 3289739 - RNA, 18 nt, Variola virus
ucaaacucgauauauuca

SEQ ID NO: 3289740 - RNA, 14 nt, Variola virus
acaccgaauacaaa

SEQ ID NO: 3289741 - RNA, 17 nt, Variola virus
agauguuagaaaaauga

SEQ ID NO: 3289742 - RNA, 19 nt, Variola virus
cauaauacuaucuauguua

SEQ ID NO: 3289743 - RNA, 22 nt, Variola virus
ccauuuaucauggaaaagaauu

SEQ ID NO: 3289744 - RNA, 22 nt, Variola virus
acaaaaacuugguuucaaugag

SEQ ID NO: 3289745 - RNA, 18 nt, Variola virus
agaauguuccuaauguau

SEQ ID NO: 3289746 - RNA, 17 nt, Variola virus
acuauuacaauuaauaa

SEQ ID NO: 3289747 - RNA, 15 nt, Variola virus
acuucucuaaaugag

SEQ ID NO: 3289748 - RNA, 21 nt, Variola virus
cauuuucaauaauauacuaau

SEQ ID NO: 3289749 - RNA, 14 nt, Variola virus
uaucauuuacuaga

SEQ ID NO: 3289750 - RNA, 19 nt, Variola virus
uaaacguuccguguguaau

SEQ ID NO: 3289751 - RNA, 17 nt, Variola virus
aucaggaauccaaagag

SEQ ID NO: 3289752 - RNA, 18 nt, Variola virus
uauugagaagcauuuagu

SEQ ID NO: 3289753 - RNA, 24 nt, Variola virus
cuugagauaccaaagucugauauu

SEQ ID NO: 3289754 - RNA, 23 nt, Variola virus
ugcuguacuaaauucaauaucuu

SEQ ID NO: 3289755 - RNA, 23 nt, Variola virus
gugucagagcacaggauuuccaa

SEQ ID NO: 3289756 - RNA, 15 nt, Variola virus
uucaaaaauuuagaa

SEQ ID NO: 3289757 - RNA, 22 nt, Variola virus
auguagaauaucuaccaaauua

SEQ ID NO: 3289758 - RNA, 15 nt, Variola virus
gcuaauugucuuucu

SEQ ID NO: 3289759 - RNA, 19 nt, Variola virus
cuagaauuagaauuacaaa

SEQ ID NO: 3289760 - RNA, 13 nt, Variola virus
auaaaaugucaca

SEQ ID NO: 3289761 - RNA, 16 nt, Variola virus
caaacguuuguuaaag

SEQ ID NO: 3289762 - RNA, 22 nt, Variola virus
ugaaccguauuacucuacagua

SEQ ID NO: 3289763 - RNA, 16 nt, Variola virus
uaaauagaacgucauc

SEQ ID NO: 3289764 - RNA, 13 nt, Variola virus
uuaauauuucuau

SEQ ID NO: 3289765 - RNA, 21 nt, Variola virus
caucgguacggguauucauuu

SEQ ID NO: 3289766 - RNA, 13 nt, Variola virus
cuauauagauauu

SEQ ID NO: 3289767 - RNA, 19 nt, Variola virus
caacgaaucccuacauauu

SEQ ID NO: 3289768 - RNA, 18 nt, Variola virus
aguagcuagacaaauggu

SEQ ID NO: 3289769 - RNA, 19 nt, Variola virus
auugacauggcuucuucca

SEQ ID NO: 3289770 - RNA, 13 nt, Variola virus
aucucuuaaugag

SEQ ID NO: 3289771 - RNA, 17 nt, Variola virus
agcuaucaagucuuuau

SEQ ID NO: 3289772 - RNA, 16 nt, Variola virus
auuaagcaacaugucu

SEQ ID NO: 3289773 - RNA, 11 nt, Variola virus
gcauaauacaa

SEQ ID NO: 3289774 - RNA, 19 nt, Variola virus
caggaucuccaacaaauuu

SEQ ID NO: 3289775 - RNA, 19 nt, Variola virus
aacgaugccuuuuguaaau

SEQ ID NO: 3289776 - RNA, 21 nt, Variola virus
ccaugucaaauagaguuuaua

SEQ ID NO: 3289777 - RNA, 16 nt, Variola virus
acaugucuaauguguu

SEQ ID NO: 3289778 - RNA, 18 nt, Variola virus
gaugaauugauuaauguu

SEQ ID NO: 3289779 - RNA, 12 nt, Variola virus
aucuaaaaaacu

SEQ ID NO: 3289780 - RNA, 16 nt, Variola virus
gaagugauauuugaaa

SEQ ID NO: 3289781 - RNA, 20 nt, Variola virus
cugauaucauuaaugauaua

SEQ ID NO: 3289782 - RNA, 12 nt, Variola virus
aauauuaggaau

SEQ ID NO: 3289783 - RNA, 18 nt, Variola virus
cgaaauauauuuguagua

SEQ ID NO: 3289784 - RNA, 22 nt, Variola virus
agaaacuauagauaaugauaua

SEQ ID NO: 3289785 - RNA, 13 nt, Variola virus
ucauacagacacu

SEQ ID NO: 3289786 - RNA, 23 nt, Variola virus
uguaaucgauaacacaauuuaug

SEQ ID NO: 3289787 - RNA, 17 nt, Variola virus
ugaguauaucagaucau

SEQ ID NO: 3289788 - RNA, 22 nt, Variola virus
auuaguuuccuuguuuagagau

SEQ ID NO: 3289789 - RNA, 13 nt, Variola virus
aguacauuucaca

SEQ ID NO: 3289790 - RNA, 21 nt, Variola virus
uugacauuaaucuauuagaau

SEQ ID NO: 3289791 - RNA, 13 nt, Variola virus
auacuaaacauug

SEQ ID NO: 3289792 - RNA, 15 nt, Variola virus
acuguucaaaauaua

SEQ ID NO: 3289793 - RNA, 14 nt, Variola virus
gaaaauaaauacaa

SEQ ID NO: 3289794 - RNA, 18 nt, Variola virus
uaauaccaguuauguuca

SEQ ID NO: 3289795 - RNA, 13 nt, Variola virus
aauuauuuaacuu

SEQ ID NO: 3289796 - RNA, 23 nt, Variola virus
ugugucaaagguuaaaccuuuau

SEQ ID NO: 3289797 - RNA, 12 nt, Variola virus
aaucugaaaaua

SEQ ID NO: 3289798 - RNA, 17 nt, Variola virus
auaucacauuguauaua

SEQ ID NO: 3289799 - RNA, 13 nt, Variola virus
uuaaauauguucu

SEQ ID NO: 3289800 - RNA, 22 nt, Variola virus
uauuagaauuggaauaccaaau

SEQ ID NO: 3289801 - RNA, 21 nt, Variola virus
aauguuaagcauauccugaau

SEQ ID NO: 3289802 - RNA, 19 nt, Variola virus
caaggacagaaaaauguua

SEQ ID NO: 3289803 - RNA, 23 nt, Variola virus
uaucucaauaaaaaauuaauauu

SEQ ID NO: 3289804 - RNA, 13 nt, Variola virus
ucuucaucaucca

SEQ ID NO: 3289805 - RNA, 21 nt, Variola virus
ugcgagagacaaaaugugaua

SEQ ID NO: 3289806 - RNA, 13 nt, Variola virus
uaauaagauaaau

SEQ ID NO: 3289807 - RNA, 20 nt, Variola virus
caugacuugguauuuggaaa

SEQ ID NO: 3289808 - RNA, 17 nt, Variola virus
auuaaaucuuucauuuc

SEQ ID NO: 3289809 - RNA, 11 nt, Variola virus
cauuauuggaa

SEQ ID NO: 3289810 - RNA, 18 nt, Variola virus
aaaucucaguuaacgauu

SEQ ID NO: 3289811 - RNA, 17 nt, Variola virus
aacuuuguuguuacauu

SEQ ID NO: 3289812 - RNA, 13 nt, Variola virus
gcggauacaaaac

SEQ ID NO: 3289813 - RNA, 20 nt, Variola virus
guaucaucgucuaguuuauc

SEQ ID NO: 3289814 - RNA, 15 nt, Variola virus
cugcuagaacaucca

SEQ ID NO: 3289815 - RNA, 21 nt, Variola virus
acaaacuguuguuaaggaaua

SEQ ID NO: 3289816 - RNA, 21 nt, Variola virus
guuguuacuccauuauauauu

SEQ ID NO: 3289817 - RNA, 18 nt, Variola virus
caucuaucaaacaaaauu

SEQ ID NO: 3289818 - RNA, 17 nt, Variola virus
uguauauuacacauuau

SEQ ID NO: 3289819 - RNA, 20 nt, Variola virus
auauagcggaugaaaaauuu

SEQ ID NO: 3289820 - RNA, 16 nt, Variola virus
aauagucaauagauua

SEQ ID NO: 3289821 - RNA, 12 nt, Variola virus
ucuuuuaaccag

SEQ ID NO: 3289822 - RNA, 20 nt, Variola virus
aauauucuaugacugaaugu

SEQ ID NO: 3289823 - RNA, 15 nt, Variola virus
gaccacauccuucag

SEQ ID NO: 3289824 - RNA, 15 nt, Variola virus
cuccauuacacaaau

SEQ ID NO: 3289825 - RNA, 16 nt, Variola virus
uacgccccuguaucuc

SEQ ID NO: 3289826 - RNA, 19 nt, Variola virus
acaaacaggauaucuauga

SEQ ID NO: 3289827 - RNA, 17 nt, Variola virus
aucaagucucucauauu

SEQ ID NO: 3289828 - RNA, 15 nt, Variola virus
aucaacauauuaaug

SEQ ID NO: 3289829 - RNA, 19 nt, Variola virus
aagaaugcuguuauauaca

SEQ ID NO: 3289830 - RNA, 14 nt, Variola virus
uauauuuuggaagc

SEQ ID NO: 3289831 - RNA, 17 nt, Variola virus
uccuuggaauugauaga

SEQ ID NO: 3289832 - RNA, 15 nt, Variola virus
guagcaaauuuccua

SEQ ID NO: 3289833 - RNA, 15 nt, Variola virus
caauauauauacagu

SEQ ID NO: 3289834 - RNA, 19 nt, Variola virus
acgaagauacuauccauca

SEQ ID NO: 3289835 - RNA, 15 nt, Variola virus
cuuuauuuuaucuau

SEQ ID NO: 3289836 - RNA, 17 nt, Variola virus
cuuaacaaguucucaau

SEQ ID NO: 3289837 - RNA, 18 nt, Variola virus
uaaaaugaucuauauguu

SEQ ID NO: 3289838 - RNA, 15 nt, Variola virus
gaaucauaaagaaca

SEQ ID NO: 3289839 - RNA, 22 nt, Variola virus
aagaagugucuauaaauguaga

SEQ ID NO: 3289840 - RNA, 16 nt, Variola virus
uuccguaucuguauuu

SEQ ID NO: 3289841 - RNA, 20 nt, Variola virus
guauauuuuagguacuuaug

SEQ ID NO: 3289842 - RNA, 16 nt, Variola virus
ucugucucagaaucaa

SEQ ID NO: 3289843 - RNA, 21 nt, Variola virus
caucuuaaugcggcuuaauaa

SEQ ID NO: 3289844 - RNA, 12 nt, Variola virus
uauuuuucuuua

SEQ ID NO: 3289845 - RNA, 16 nt, Variola virus
cuauugacugaacaau

SEQ ID NO: 3289846 - RNA, 14 nt, Variola virus
agacgcucaaaaua

SEQ ID NO: 3289847 - RNA, 14 nt, Variola virus
ucuguuauuucagu

SEQ ID NO: 3289848 - RNA, 13 nt, Variola virus
ucaucuucauagg

SEQ ID NO: 3289849 - RNA, 19 nt, Variola virus
uaaacucuccaccauuucc

SEQ ID NO: 3289850 - RNA, 17 nt, Variola virus
ugaacgcuauuaaacau

SEQ ID NO: 3289851 - RNA, 20 nt, Variola virus
augugucucucacucucucu

SEQ ID NO: 3289852 - RNA, 14 nt, Variola virus
uucaugacaaucaa

SEQ ID NO: 3289853 - RNA, 21 nt, Variola virus
gacucgcaaaaaauacaauau

SEQ ID NO: 3289854 - RNA, 23 nt, Variola virus
ucuucguaaaaagauucuugaaa

SEQ ID NO: 3289855 - RNA, 15 nt, Variola virus
auaggcguacaaaag

SEQ ID NO: 3289856 - RNA, 18 nt, Variola virus
auuaucaaaagacaugau

SEQ ID NO: 3289857 - RNA, 19 nt, Variola virus
uaacucuuucgaauacuua

SEQ ID NO: 3289858 - RNA, 17 nt, Variola virus
ugguuucauguuuucaa

SEQ ID NO: 3289859 - RNA, 22 nt, Variola virus
agauauuaucauuagucauguu

SEQ ID NO: 3289860 - RNA, 13 nt, Variola virus
auuucgacaaaaa

SEQ ID NO: 3289861 - RNA, 19 nt, Variola virus
ugcuugcuagacaccuuuu

SEQ ID NO: 3289862 - RNA, 17 nt, Variola virus
uuacaaauauucacaag

SEQ ID NO: 3289863 - RNA, 13 nt, Variola virus
gaaauuagaaaau

SEQ ID NO: 3289864 - RNA, 18 nt, Variola virus
gaaaaaguaaaugaugaa

SEQ ID NO: 3289865 - RNA, 18 nt, Variola virus
uauugauaaaauuaauga

SEQ ID NO: 3289866 - RNA, 16 nt, Variola virus
aggaaguauaucugag

SEQ ID NO: 3289867 - RNA, 17 nt, Variola virus
acauuaaugguacaaau

SEQ ID NO: 3289868 - RNA, 17 nt, Variola virus
aacaguuauuuucugaa

SEQ ID NO: 3289869 - RNA, 13 nt, Variola virus
aaaguaauucauu

SEQ ID NO: 3289870 - RNA, 13 nt, Variola virus
uaauaaauacaga

SEQ ID NO: 3289871 - RNA, 19 nt, Variola virus
acuuagucuguacaaaagu

SEQ ID NO: 3289872 - RNA, 14 nt, Variola virus
gauuucuauuuuua

SEQ ID NO: 3289873 - RNA, 16 nt, Variola virus
uuguauccuuaucuau

SEQ ID NO: 3289874 - RNA, 19 nt, Variola virus
uaugauccaauguguuuaa

SEQ ID NO: 3289875 - RNA, 18 nt, Variola virus
ugccauaaauaaaugcuu

SEQ ID NO: 3289876 - RNA, 17 nt, Variola virus
auauauuuucauuuaaa

SEQ ID NO: 3289877 - RNA, 15 nt, Variola virus
cauacacuacaguaa

SEQ ID NO: 3289878 - RNA, 11 nt, Variola virus
auuuacuaaca

SEQ ID NO: 3289879 - RNA, 15 nt, Variola virus
agcaucauaucuugu

SEQ ID NO: 3289880 - RNA, 17 nt, Variola virus
aaauuuuuugaaguaau

SEQ ID NO: 3289881 - RNA, 19 nt, Variola virus
uuucucguucccuaucaag

SEQ ID NO: 3289882 - RNA, 15 nt, Variola virus
agcaaaggaaauugu

SEQ ID NO: 3289883 - RNA, 17 nt, Variola virus
uaucuaaccauucaauu

SEQ ID NO: 3289884 - RNA, 19 nt, Variola virus
acuuaauauaauauugaag

SEQ ID NO: 3289885 - RNA, 23 nt, Variola virus
aggaaauuaauaucgaugauauu

SEQ ID NO: 3289886 - RNA, 18 nt, Variola virus
gacuuguauaugccaaag

SEQ ID NO: 3289887 - RNA, 18 nt, Variola virus
cuuuuguggaauuuccca

SEQ ID NO: 3289888 - RNA, 14 nt, Variola virus
aucgauaauuauuu

SEQ ID NO: 3289889 - RNA, 19 nt, Variola virus
uucaauaucuauacuaguu

SEQ ID NO: 3289890 - RNA, 20 nt, Variola virus
uucugcaauaucuucguaaa

SEQ ID NO: 3289891 - RNA, 13 nt, Variola virus
auaaugaacauau

SEQ ID NO: 3289892 - RNA, 15 nt, Variola virus
gagcaagugguggug

SEQ ID NO: 3289893 - RNA, 22 nt, Variola virus
acaagucuaauaauguuauuac

SEQ ID NO: 3289894 - RNA, 19 nt, Variola virus
agaauauaaaaaaaugauu

SEQ ID NO: 3289895 - RNA, 17 nt, Variola virus
auucuucauucugcaua

SEQ ID NO: 3289896 - RNA, 23 nt, Variola virus
uggcuaagaagucauauguggua

SEQ ID NO: 3289897 - RNA, 21 nt, Variola virus
cuuaagucuccaaucuuuugu

SEQ ID NO: 3289898 - RNA, 22 nt, Variola virus
cagaauagcggauauagauauu

SEQ ID NO: 3289899 - RNA, 19 nt, Variola virus
aauguuauauguaacauua

SEQ ID NO: 3289900 - RNA, 19 nt, Variola virus
guagugaugguuuucuaaa

SEQ ID NO: 3289901 - RNA, 15 nt, Variola virus
auuaaguaaauccuu

SEQ ID NO: 3289902 - RNA, 17 nt, Variola virus
uauaagacgauacuguu

SEQ ID NO: 3289903 - RNA, 17 nt, Variola virus
agcuuacaauaaacucc

SEQ ID NO: 3289904 - RNA, 16 nt, Variola virus
auagacauugaaaaug

SEQ ID NO: 3289905 - RNA, 14 nt, Variola virus
agaguauuguacag

SEQ ID NO: 3289906 - RNA, 15 nt, Variola virus
caacuacauaaucuu

SEQ ID NO: 3289907 - RNA, 16 nt, Variola virus
auacugucgaauuuga

SEQ ID NO: 3289908 - RNA, 13 nt, Variola virus
ugaacaggcauuu

SEQ ID NO: 3289909 - RNA, 19 nt, Variola virus
acuagaguuguuaaaguua

SEQ ID NO: 3289910 - RNA, 13 nt, Variola virus
ucugaaauaauca

SEQ ID NO: 3289911 - RNA, 12 nt, Variola virus
guucugauuuua

SEQ ID NO: 3289912 - RNA, 14 nt, Variola virus
uaaagauacaaaac

SEQ ID NO: 3289913 - RNA, 18 nt, Variola virus
caauuggaguaucaucua

SEQ ID NO: 3289914 - RNA, 14 nt, Variola virus
aacaaauauuggca

SEQ ID NO: 3289915 - RNA, 15 nt, Variola virus
uaucgauaauuauuu

SEQ ID NO: 3289916 - RNA, 12 nt, Variola virus
auucagacacuu

SEQ ID NO: 3289917 - RNA, 20 nt, Variola virus
augaauaucaggaaauguau

SEQ ID NO: 3289918 - RNA, 15 nt, Variola virus
gcauaccauacuuag

SEQ ID NO: 3289919 - RNA, 18 nt, Variola virus
uauuuuuaaaaauuacca

SEQ ID NO: 3289920 - RNA, 14 nt, Variola virus
uaaagaauaucuuu

SEQ ID NO: 3289921 - RNA, 22 nt, Variola virus
acuaucugauaagauaucuucu

SEQ ID NO: 3289922 - RNA, 16 nt, Variola virus
cucaaauaauacuaua

SEQ ID NO: 3289923 - RNA, 16 nt, Variola virus
auaaucggagaauguu

SEQ ID NO: 3289924 - RNA, 17 nt, Variola virus
gaucaggaauccaaaga

SEQ ID NO: 3289925 - RNA, 14 nt, Variola virus
aguaaaaucuauca

SEQ ID NO: 3289926 - RNA, 13 nt, Variola virus
augauaaaaugaa

SEQ ID NO: 3289927 - RNA, 16 nt, Variola virus
uacuacacauuauucc

SEQ ID NO: 3289928 - RNA, 15 nt, Variola virus
uaauuauagauguau

SEQ ID NO: 3289929 - RNA, 15 nt, Variola virus
ugcucaaacaaaaug

SEQ ID NO: 3289930 - RNA, 13 nt, Variola virus
ucuucuauuucua

SEQ ID NO: 3289931 - RNA, 15 nt, Variola virus
aacuagaauuguaua

SEQ ID NO: 3289932 - RNA, 15 nt, Variola virus
auaauacgaauauau

SEQ ID NO: 3289933 - RNA, 15 nt, Variola virus
uauaaucguuaaauu

SEQ ID NO: 3289934 - RNA, 16 nt, Variola virus
gucugcuuucuuuuaa

SEQ ID NO: 3289935 - RNA, 22 nt, Variola virus
uguuaccauaucguauaacuug

SEQ ID NO: 3289936 - RNA, 20 nt, Variola virus
gcuaguuaacuaauaaauaa

SEQ ID NO: 3289937 - RNA, 16 nt, Variola virus
caucggcaacauacua

SEQ ID NO: 3289938 - RNA, 21 nt, Variola virus
gaaccaguaccagaucuuaau

SEQ ID NO: 3289939 - RNA, 16 nt, Variola virus
ucuccaauauaugaua

SEQ ID NO: 3289940 - RNA, 18 nt, Variola virus
uaaaugcgugacuauaaa

SEQ ID NO: 3289941 - RNA, 18 nt, Variola virus
cauaaaacuaauauuuua

SEQ ID NO: 3289942 - RNA, 16 nt, Variola virus
uuauaagaaauauaga

SEQ ID NO: 3289943 - RNA, 15 nt, Variola virus
acaauacguguugau

SEQ ID NO: 3289944 - RNA, 22 nt, Variola virus
aaucaagauucauuuuuaaaau

SEQ ID NO: 3289945 - RNA, 15 nt, Variola virus
ccaguacaucuauca

SEQ ID NO: 3289946 - RNA, 14 nt, Variola virus
uuauaaacacagau

SEQ ID NO: 3289947 - RNA, 18 nt, Variola virus
aauccagauuuuaaaacu

SEQ ID NO: 3289948 - RNA, 19 nt, Variola virus
auugaauuggaaaaauaac

SEQ ID NO: 3289949 - RNA, 14 nt, Variola virus
aauaucuuaaauaa

SEQ ID NO: 3289950 - RNA, 17 nt, Variola virus
auuuacuaucuguaaug

SEQ ID NO: 3289951 - RNA, 21 nt, Variola virus
gacauagagagcuucaucaau

SEQ ID NO: 3289952 - RNA, 13 nt, Variola virus
aucgacuauuuua

SEQ ID NO: 3289953 - RNA, 15 nt, Variola virus
cgucuggagauaucc

SEQ ID NO: 3289954 - RNA, 13 nt, Variola virus
acaguuacaaaug

SEQ ID NO: 3289955 - RNA, 19 nt, Variola virus
aauauuauauaaacauuug

SEQ ID NO: 3289956 - RNA, 18 nt, Variola virus
uuucguacaaauacagaa

SEQ ID NO: 3289957 - RNA, 23 nt, Variola virus
guguacauccaaaauacaaaaug

SEQ ID NO: 3289958 - RNA, 16 nt, Variola virus
aguauuugauaaaaca

SEQ ID NO: 3289959 - RNA, 14 nt, Variola virus
aauacggauaugac

SEQ ID NO: 3289960 - RNA, 18 nt, Variola virus
cauguuccuauuaugaaa

SEQ ID NO: 3289961 - RNA, 21 nt, Variola virus
uuuuuauaaaaugacaucguu

SEQ ID NO: 3289962 - RNA, 22 nt, Variola virus
agaauauaaauuauauauggau

SEQ ID NO: 3289963 - RNA, 21 nt, Variola virus
acaaaagguauuacaagaaua

SEQ ID NO: 3289964 - RNA, 13 nt, Variola virus
uagacaaaacuau

SEQ ID NO: 3289965 - RNA, 17 nt, Variola virus
aaucucuguuauuuccu

SEQ ID NO: 3289966 - RNA, 18 nt, Variola virus
uauggaucuauucaagau

SEQ ID NO: 3289967 - RNA, 22 nt, Variola virus
guagauaagaaugugauaagau

SEQ ID NO: 3289968 - RNA, 16 nt, Variola virus
uuacuuagucuguaca

SEQ ID NO: 3289969 - RNA, 12 nt, Variola virus
uauuuauuucca

SEQ ID NO: 3289970 - RNA, 19 nt, Variola virus
uagggaugauaaauauuua

SEQ ID NO: 3289971 - RNA, 13 nt, Variola virus
ugacaaauuauuc

SEQ ID NO: 3289972 - RNA, 19 nt, Variola virus
cucucauaauccauuucca

SEQ ID NO: 3289973 - RNA, 16 nt, Variola virus
accauuaauaggaaaa

SEQ ID NO: 3289974 - RNA, 20 nt, Variola virus
aucuguauaauaagaugcaa

SEQ ID NO: 3289975 - RNA, 20 nt, Variola virus
auugaagaaggagaagauau

SEQ ID NO: 3289976 - RNA, 13 nt, Variola virus
ucuauuacuacaa

SEQ ID NO: 3289977 - RNA, 14 nt, Variola virus
auucauuaauucua

SEQ ID NO: 3289978 - RNA, 21 nt, Variola virus
ugauauauccagauuacuaac

SEQ ID NO: 3289979 - RNA, 22 nt, Variola virus
guugggacugacagauguguuc

SEQ ID NO: 3289980 - RNA, 19 nt, Variola virus
cuaauaugaggaaaaugau

SEQ ID NO: 3289981 - RNA, 12 nt, Variola virus
cauguauacaau

SEQ ID NO: 3289982 - RNA, 14 nt, Variola virus
guaucuuuacuaga

SEQ ID NO: 3289983 - RNA, 18 nt, Variola virus
ccaaucuuguuauaaaca

SEQ ID NO: 3289984 - RNA, 20 nt, Variola virus
aagaagugucuauaaaugua

SEQ ID NO: 3289985 - RNA, 20 nt, Variola virus
ggauauagauauuaaacaag

SEQ ID NO: 3289986 - RNA, 12 nt, Variola virus
uucuuucaaaau

SEQ ID NO: 3289987 - RNA, 23 nt, Variola virus
auaaauuuauuauuuaugauauu

SEQ ID NO: 3289988 - RNA, 22 nt, Variola virus
aacgauuuuccaaaucaguaac

SEQ ID NO: 3289989 - RNA, 17 nt, Variola virus
cagauacauuauaugau

SEQ ID NO: 3289990 - RNA, 18 nt, Variola virus
acucuggguaacaaacau

SEQ ID NO: 3289991 - RNA, 19 nt, Variola virus
gaggauguauauaucauga

SEQ ID NO: 3289992 - RNA, 20 nt, Variola virus
guacacaauaucauaaacaa

SEQ ID NO: 3289993 - RNA, 18 nt, Variola virus
uaacaugcgguucaaaau

SEQ ID NO: 3289994 - RNA, 20 nt, Variola virus
gauaauacauuuucuuacaa

SEQ ID NO: 3289995 - RNA, 14 nt, Variola virus
auuuagaaauguug

SEQ ID NO: 3289996 - RNA, 13 nt, Variola virus
aguucuucuagaa

SEQ ID NO: 3289997 - RNA, 16 nt, Variola virus
acugagaaacagcaua

SEQ ID NO: 3289998 - RNA, 20 nt, Variola virus
aacucucguauagucauaga

SEQ ID NO: 3289999 - RNA, 17 nt, Variola virus
ccauugcguugaaugau

SEQ ID NO: 3290000 - RNA, 18 nt, Variola virus
aaugauuucauuagaaua

SEQ ID NO: 3290001 - RNA, 12 nt, Variola virus
agaauacucuac

SEQ ID NO: 3290002 - RNA, 23 nt, Variola virus
uagcuaucucgucucucaacaaa

SEQ ID NO: 3290003 - RNA, 13 nt, Variola virus
auuauaauuauua

SEQ ID NO: 3290004 - RNA, 16 nt, Variola virus
aaacuguuuaagaaaa

SEQ ID NO: 3290005 - RNA, 13 nt, Variola virus
aucacuaacaaua

SEQ ID NO: 3290006 - RNA, 15 nt, Variola virus
acuugacaaaaauug

SEQ ID NO: 3290007 - RNA, 23 nt, Variola virus
aucaagucuuuauacaaugacau

SEQ ID NO: 3290008 - RNA, 11 nt, Variola virus
cgauagaaaaa

SEQ ID NO: 3290009 - RNA, 22 nt, Variola virus
aucuaccucuccaaaaagaaaa

SEQ ID NO: 3290010 - RNA, 21 nt, Variola virus
ucaauuggcacgaacaaaaau

SEQ ID NO: 3290011 - RNA, 23 nt, Variola virus
uacugagaauuaacgaaacaaug

SEQ ID NO: 3290012 - RNA, 17 nt, Variola virus
guuuaaugauaaacaaa

SEQ ID NO: 3290013 - RNA, 22 nt, Variola virus
uuaauuuccggaucuacauuuu

SEQ ID NO: 3290014 - RNA, 13 nt, Variola virus
acuaaaacugaag

SEQ ID NO: 3290015 - RNA, 13 nt, Variola virus
auuaucaaaauua

SEQ ID NO: 3290016 - RNA, 23 nt, Variola virus
agaaacugacuugauaaaaaugg

SEQ ID NO: 3290017 - RNA, 23 nt, Variola virus
uuuaaggaggcguccuuuucuaa

SEQ ID NO: 3290018 - RNA, 16 nt, Variola virus
auagucuccagaaauc

SEQ ID NO: 3290019 - RNA, 21 nt, Variola virus
acauuaauuccuuuuuaaauu

SEQ ID NO: 3290020 - RNA, 15 nt, Variola virus
acagacugaaaguau

SEQ ID NO: 3290021 - RNA, 22 nt, Variola virus
agacaugauaauauuaaagaua

SEQ ID NO: 3290022 - RNA, 20 nt, Variola virus
gaguauaaaacauuaaaugu

SEQ ID NO: 3290023 - RNA, 21 nt, Variola virus
cagauuagaugacaugacauu

SEQ ID NO: 3290024 - RNA, 19 nt, Variola virus
uccuuaaauguuuucucug

SEQ ID NO: 3290025 - RNA, 19 nt, Variola virus
aaagcaauugacuaauaaa

SEQ ID NO: 3290026 - RNA, 19 nt, Variola virus
gaugaaggugggacuauau

SEQ ID NO: 3290027 - RNA, 15 nt, Variola virus
auucuagaccaaaaa

SEQ ID NO: 3290028 - RNA, 14 nt, Variola virus
acgaugauauguau

SEQ ID NO: 3290029 - RNA, 19 nt, Variola virus
guuauagaggaauaucauc

SEQ ID NO: 3290030 - RNA, 20 nt, Variola virus
guaauauuguacgauguaau

SEQ ID NO: 3290031 - RNA, 17 nt, Variola virus
auaacaggcuaaaaugu

SEQ ID NO: 3290032 - RNA, 19 nt, Variola virus
aaaucagaugcuguaaauu

SEQ ID NO: 3290033 - RNA, 19 nt, Variola virus
aguuuaucguuuacauaag

SEQ ID NO: 3290034 - RNA, 16 nt, Variola virus
cuaaucucuucuuuaa

SEQ ID NO: 3290035 - RNA, 17 nt, Variola virus
auccuguuucuacuaac

SEQ ID NO: 3290036 - RNA, 15 nt, Variola virus
aucaaagaagaaguu

SEQ ID NO: 3290037 - RNA, 20 nt, Variola virus
uauauuaucaaaauuuggaa

SEQ ID NO: 3290038 - RNA, 22 nt, Variola virus
aauuaugaaaaaguaaaugaug

SEQ ID NO: 3290039 - RNA, 18 nt, Variola virus
cuguaacuaugaauucua

SEQ ID NO: 3290040 - RNA, 21 nt, Variola virus
cuuuucuauaaucauuuuuag

SEQ ID NO: 3290041 - RNA, 17 nt, Variola virus
ccacuuuaacaucucuu

SEQ ID NO: 3290042 - RNA, 17 nt, Variola virus
uaaaaagauaaacuuua

SEQ ID NO: 3290043 - RNA, 14 nt, Variola virus
ucuagacuccgcau

SEQ ID NO: 3290044 - RNA, 24 nt, Variola virus
aauguaaagagugaucaaaucauu

SEQ ID NO: 3290045 - RNA, 18 nt, Variola virus
auaacucguuuuucuuaa

SEQ ID NO: 3290046 - RNA, 16 nt, Variola virus
gaagacaauauuauca

SEQ ID NO: 3290047 - RNA, 18 nt, Variola virus
aaaugauaucuuagaaua

SEQ ID NO: 3290048 - RNA, 15 nt, Variola virus
uaaauuaauuuacca

SEQ ID NO: 3290049 - RNA, 21 nt, Variola virus
uaaguaucuauaaaacucaua

SEQ ID NO: 3290050 - RNA, 22 nt, Variola virus
agaguucgauccuaaagguaaa

SEQ ID NO: 3290051 - RNA, 17 nt, Variola virus
auuaaaaaauaacuuaa

SEQ ID NO: 3290052 - RNA, 13 nt, Variola virus
uauuucuuacaua

SEQ ID NO: 3290053 - RNA, 14 nt, Variola virus
uaaauacauuauca

SEQ ID NO: 3290054 - RNA, 14 nt, Variola virus
auaucacaaaaaua

SEQ ID NO: 3290055 - RNA, 15 nt, Variola virus
gaauauaaaccauau

SEQ ID NO: 3290056 - RNA, 17 nt, Variola virus
uucugaaauaacguauu

SEQ ID NO: 3290057 - RNA, 18 nt, Variola virus
auacucccacaaauacug

SEQ ID NO: 3290058 - RNA, 17 nt, Variola virus
ugaaauaauuagaacua

SEQ ID NO: 3290059 - RNA, 16 nt, Variola virus
auccuccaguaaauga

SEQ ID NO: 3290060 - RNA, 18 nt, Variola virus
accgucggcguuaauagu

SEQ ID NO: 3290061 - RNA, 15 nt, Variola virus
uucaaauaaaucacu

SEQ ID NO: 3290062 - RNA, 21 nt, Variola virus
agucguaugugguaugauaca

SEQ ID NO: 3290063 - RNA, 22 nt, Variola virus
aucauucuacguccuauggaug

SEQ ID NO: 3290064 - RNA, 16 nt, Variola virus
aguuucuauacugucu

SEQ ID NO: 3290065 - RNA, 21 nt, Variola virus
agcauauuccauauaaauaua

SEQ ID NO: 3290066 - RNA, 12 nt, Variola virus
uuauuguaacag

SEQ ID NO: 3290067 - RNA, 15 nt, Variola virus
uucuaaguucuaaug

SEQ ID NO: 3290068 - RNA, 12 nt, Variola virus
uucaucuguaag

SEQ ID NO: 3290069 - RNA, 17 nt, Variola virus
gauaccguuacauuuga

SEQ ID NO: 3290070 - RNA, 20 nt, Variola virus
uucuaucccccguauuuaca

SEQ ID NO: 3290071 - RNA, 17 nt, Variola virus
aguauuuuuuuucagua

SEQ ID NO: 3290072 - RNA, 14 nt, Variola virus
uaaaugaugauguu

SEQ ID NO: 3290073 - RNA, 15 nt, Variola virus
ucaucuacucuacaa

SEQ ID NO: 3290074 - RNA, 18 nt, Variola virus
cucguuuuucuuaagaaa

SEQ ID NO: 3290075 - RNA, 16 nt, Variola virus
ugguucgcucaagaau

SEQ ID NO: 3290076 - RNA, 17 nt, Variola virus
cauuuguauaaucuuua

SEQ ID NO: 3290077 - RNA, 19 nt, Variola virus
gaauaaagagaaugcagaa

SEQ ID NO: 3290078 - RNA, 22 nt, Variola virus
guaccuaucaaggaacaaauau

SEQ ID NO: 3290079 - RNA, 15 nt, Variola virus
caagucauuacuaau

SEQ ID NO: 3290080 - RNA, 23 nt, Variola virus
cccccguauuuacauuaaaugua

SEQ ID NO: 3290081 - RNA, 12 nt, Variola virus
agaaaugauauc

SEQ ID NO: 3290082 - RNA, 19 nt, Variola virus
uaauagaauuuauauaucu

SEQ ID NO: 3290083 - RNA, 19 nt, Variola virus
auacuauauaguaauacca

SEQ ID NO: 3290084 - RNA, 21 nt, Variola virus
auaacuuggaaaaaauaacua

SEQ ID NO: 3290085 - RNA, 17 nt, Variola virus
aaauguugauagcugaa

SEQ ID NO: 3290086 - RNA, 23 nt, Variola virus
aaacuaugucaaaaauuguagaa

SEQ ID NO: 3290087 - RNA, 22 nt, Variola virus
aacuauuuuaguuaacaacuau

SEQ ID NO: 3290088 - RNA, 18 nt, Variola virus
acuuuauaauuaaugaaa

SEQ ID NO: 3290089 - RNA, 13 nt, Variola virus
gcgcuauaguauu

SEQ ID NO: 3290090 - RNA, 18 nt, Variola virus
gaaauagaggaagacaca

SEQ ID NO: 3290091 - RNA, 16 nt, Variola virus
acguugaaaaaaauug

SEQ ID NO: 3290092 - RNA, 19 nt, Variola virus
uuuuagguacucaucuacu

SEQ ID NO: 3290093 - RNA, 23 nt, Variola virus
cuaaagggauuuuauaugauauc

SEQ ID NO: 3290094 - RNA, 11 nt, Variola virus
ucuauuucuau

SEQ ID NO: 3290095 - RNA, 13 nt, Variola virus
aguaauaucugau

SEQ ID NO: 3290096 - RNA, 19 nt, Variola virus
uacauauaugcaauucgcu

SEQ ID NO: 3290097 - RNA, 21 nt, Variola virus
guguacguauauuuagauguu

SEQ ID NO: 3290098 - RNA, 19 nt, Variola virus
ugaauaaucagauuuaccc

SEQ ID NO: 3290099 - RNA, 19 nt, Variola virus
aucggacuuugugcauaug

SEQ ID NO: 3290100 - RNA, 13 nt, Variola virus
agauugaaauuau

SEQ ID NO: 3290101 - RNA, 15 nt, Variola virus
auuggaaaauuagug

SEQ ID NO: 3290102 - RNA, 19 nt, Variola virus
uuuauccucucguuagccu

SEQ ID NO: 3290103 - RNA, 23 nt, Variola virus
cggauaguauucaagucaaagaa

SEQ ID NO: 3290104 - RNA, 14 nt, Variola virus
cuccaauacuaauu

SEQ ID NO: 3290105 - RNA, 14 nt, Variola virus
uaaacaccaagaaa

SEQ ID NO: 3290106 - RNA, 14 nt, Variola virus
aaauaguucauuuu

SEQ ID NO: 3290107 - RNA, 16 nt, Variola virus
gauaagagacguguua

SEQ ID NO: 3290108 - RNA, 14 nt, Variola virus
aaaagauauccaga

SEQ ID NO: 3290109 - RNA, 18 nt, Variola virus
aguuuuggaucaaaugga

SEQ ID NO: 3290110 - RNA, 15 nt, Variola virus
aucgauauugaaaau

SEQ ID NO: 3290111 - RNA, 12 nt, Variola virus
ugauuacuacau

SEQ ID NO: 3290112 - RNA, 16 nt, Variola virus
auaacuagauuuuagu

SEQ ID NO: 3290113 - RNA, 21 nt, Variola virus
gaaaauaauccugaauauauu

SEQ ID NO: 3290114 - RNA, 15 nt, Variola virus
aauccacauaugaua

SEQ ID NO: 3290115 - RNA, 20 nt, Variola virus
ucugauaauccagucuuuaa

SEQ ID NO: 3290116 - RNA, 19 nt, Variola virus
acauccucacuauucaugg

SEQ ID NO: 3290117 - RNA, 14 nt, Variola virus
uaauuaagaacuau

SEQ ID NO: 3290118 - RNA, 21 nt, Variola virus
agauacaguuaauaucuauau

SEQ ID NO: 3290119 - RNA, 18 nt, Variola virus
aguaauuaaauauaucau

SEQ ID NO: 3290120 - RNA, 14 nt, Variola virus
ccaaugaaauggua

SEQ ID NO: 3290121 - RNA, 23 nt, Variola virus
auaacaagagauuuauuguguau

SEQ ID NO: 3290122 - RNA, 14 nt, Variola virus
uaucgauguacaca

SEQ ID NO: 3290123 - RNA, 20 nt, Variola virus
uacaaucguucaaacucguc

SEQ ID NO: 3290124 - RNA, 12 nt, Variola virus
agaacaaauguu

SEQ ID NO: 3290125 - RNA, 16 nt, Variola virus
ucgauagaggaaguau

SEQ ID NO: 3290126 - RNA, 18 nt, Variola virus
auaauaagaugcaaacau

SEQ ID NO: 3290127 - RNA, 18 nt, Variola virus
agacuuacaggaauagau

SEQ ID NO: 3290128 - RNA, 20 nt, Variola virus
caaugggagauuaaacuacu

SEQ ID NO: 3290129 - RNA, 16 nt, Variola virus
uauuauccaauacaga

SEQ ID NO: 3290130 - RNA, 18 nt, Variola virus
uucuauauagcuauucuu

SEQ ID NO: 3290131 - RNA, 20 nt, Variola virus
uuccauacguuuauauucuu

SEQ ID NO: 3290132 - RNA, 15 nt, Variola virus
guuaagcauauccug

SEQ ID NO: 3290133 - RNA, 14 nt, Variola virus
ucaacuuucauagc

SEQ ID NO: 3290134 - RNA, 22 nt, Variola virus
cgcgaagcaauauauauacagu

SEQ ID NO: 3290135 - RNA, 17 nt, Variola virus
gauauuuugcaaaauag

SEQ ID NO: 3290136 - RNA, 16 nt, Variola virus
aucucuugacaaaaau

SEQ ID NO: 3290137 - RNA, 13 nt, Variola virus
uaaucauuaucca

SEQ ID NO: 3290138 - RNA, 16 nt, Variola virus
cuuuaacagaugaucu

SEQ ID NO: 3290139 - RNA, 14 nt, Variola virus
gaacaucuuccaua

SEQ ID NO: 3290140 - RNA, 12 nt, Variola virus
ucggauagaguu

SEQ ID NO: 3290141 - RNA, 18 nt, Variola virus
uaaagccgguguaacauu

SEQ ID NO: 3290142 - RNA, 11 nt, Variola virus
gcgcaugauuu

SEQ ID NO: 3290143 - RNA, 18 nt, Variola virus
uggguuaauaaauacaga

SEQ ID NO: 3290144 - RNA, 15 nt, Variola virus
auacuaguuuucuaa

SEQ ID NO: 3290145 - RNA, 12 nt, Variola virus
aaucauugacau

SEQ ID NO: 3290146 - RNA, 16 nt, Variola virus
agguauauuuauucca

SEQ ID NO: 3290147 - RNA, 10 nt, Variola virus
auaacaaagg

SEQ ID NO: 3290148 - RNA, 20 nt, Variola virus
ggauuagaauccauaaaaca

SEQ ID NO: 3290149 - RNA, 16 nt, Variola virus
auugucccaauguuuc

SEQ ID NO: 3290150 - RNA, 22 nt, Variola virus
acuuuaauccuguguuuauaga

SEQ ID NO: 3290151 - RNA, 23 nt, Variola virus
aacaaguuccucaacgugauuau

SEQ ID NO: 3290152 - RNA, 19 nt, Variola virus
aucugauguaggacaucaa

SEQ ID NO: 3290153 - RNA, 19 nt, Variola virus
uuauuaaguguauuaguca

SEQ ID NO: 3290154 - RNA, 17 nt, Variola virus
aaucucaucaucgaaga

SEQ ID NO: 3290155 - RNA, 20 nt, Variola virus
uuuagaaauguuauauauaa

SEQ ID NO: 3290156 - RNA, 21 nt, Variola virus
uuauauggcuacaauuucaua

SEQ ID NO: 3290157 - RNA, 23 nt, Variola virus
uauauagccgucgccaauugugu

SEQ ID NO: 3290158 - RNA, 21 nt, Variola virus
acgugauggauauauuaaagu

SEQ ID NO: 3290159 - RNA, 22 nt, Variola virus
ucagaauaggaugaauguagua

SEQ ID NO: 3290160 - RNA, 13 nt, Variola virus
agaaacauauucu

SEQ ID NO: 3290161 - RNA, 16 nt, Variola virus
guuucuuauguggauc

SEQ ID NO: 3290162 - RNA, 12 nt, Variola virus
uuacuaagaaag

SEQ ID NO: 3290163 - RNA, 21 nt, Variola virus
ugcuauuucggcugucagagu

SEQ ID NO: 3290164 - RNA, 18 nt, Variola virus
uagcaaaggaaauugugc

SEQ ID NO: 3290165 - RNA, 21 nt, Variola virus
auguauuucauuguucaucca

SEQ ID NO: 3290166 - RNA, 12 nt, Variola virus
ucucaauacuaa

SEQ ID NO: 3290167 - RNA, 17 nt, Variola virus
uuuaccucuucugauau

SEQ ID NO: 3290168 - RNA, 13 nt, Variola virus
aucaggaaaaaag

SEQ ID NO: 3290169 - RNA, 22 nt, Variola virus
guacacaacauguuauaacuaa

SEQ ID NO: 3290170 - RNA, 16 nt, Variola virus
auaaucuuuaguauua

SEQ ID NO: 3290171 - RNA, 14 nt, Variola virus
uauuuuucuaugau

SEQ ID NO: 3290172 - RNA, 17 nt, Variola virus
cagaaagcuguggaugu

SEQ ID NO: 3290173 - RNA, 23 nt, Variola virus
auacaucgaauauaaaauaacua

SEQ ID NO: 3290174 - RNA, 22 nt, Variola virus
ucaugaaucaauuaguagaguu

SEQ ID NO: 3290175 - RNA, 22 nt, Variola virus
aaacacuguuguuagagauuuu

SEQ ID NO: 3290176 - RNA, 15 nt, Variola virus
agaggauguuauuau

SEQ ID NO: 3290177 - RNA, 19 nt, Variola virus
aaaguaauauucauaugua

SEQ ID NO: 3290178 - RNA, 23 nt, Variola virus
agugguaggucauacuccaucaa

SEQ ID NO: 3290179 - RNA, 21 nt, Variola virus
agaaaugguguacaauuguuu

SEQ ID NO: 3290180 - RNA, 16 nt, Variola virus
acuuaaugaaaaaugu

SEQ ID NO: 3290181 - RNA, 16 nt, Variola virus
aaccgccaaugaugcg

SEQ ID NO: 3290182 - RNA, 17 nt, Variola virus
gaacaaugucaaaauau

SEQ ID NO: 3290183 - RNA, 10 nt, Variola virus
guuagaaaag

SEQ ID NO: 3290184 - RNA, 19 nt, Variola virus
uuaucagugucguaaauua

SEQ ID NO: 3290185 - RNA, 21 nt, Variola virus
cauuaacagcuuuaacagaug

SEQ ID NO: 3290186 - RNA, 22 nt, Variola virus
guugaaucaacauauagaaaag

SEQ ID NO: 3290187 - RNA, 23 nt, Variola virus
ucaauuaacauucuuauaacauc

SEQ ID NO: 3290188 - RNA, 21 nt, Variola virus
cacaggauuuccaaucuuuug

SEQ ID NO: 3290189 - RNA, 18 nt, Variola virus
caaugucugucauaugua

SEQ ID NO: 3290190 - RNA, 16 nt, Variola virus
guauaaucuuuaacaa

SEQ ID NO: 3290191 - RNA, 21 nt, Variola virus
uauuagauuugguaaaaugaa

SEQ ID NO: 3290192 - RNA, 13 nt, Variola virus
auuaauacauauu

SEQ ID NO: 3290193 - RNA, 18 nt, Variola virus
aucaggauauaaagaaaa

SEQ ID NO: 3290194 - RNA, 19 nt, Variola virus
uagagacagauuaaguucu

SEQ ID NO: 3290195 - RNA, 15 nt, Variola virus
uuauugauauguaua

SEQ ID NO: 3290196 - RNA, 16 nt, Variola virus
uuaacaucacuaauau

SEQ ID NO: 3290197 - RNA, 15 nt, Variola virus
aucucuuaaaugcua

SEQ ID NO: 3290198 - RNA, 16 nt, Variola virus
uauacaguauaaugau

SEQ ID NO: 3290199 - RNA, 20 nt, Variola virus
gauauaguauauuccaguuc

SEQ ID NO: 3290200 - RNA, 12 nt, Variola virus
acgucuguaguc

SEQ ID NO: 3290201 - RNA, 20 nt, Variola virus
acauccaucuucucuagaaa

SEQ ID NO: 3290202 - RNA, 17 nt, Variola virus
uaauccagucuuuaaug

SEQ ID NO: 3290203 - RNA, 21 nt, Variola virus
aaucuaguacucgaaauaaua

SEQ ID NO: 3290204 - RNA, 20 nt, Variola virus
agacuaugucaaaguauuug

SEQ ID NO: 3290205 - RNA, 23 nt, Variola virus
uacagaagcugccaauauagucu

SEQ ID NO: 3290206 - RNA, 18 nt, Variola virus
auacaauggaauacuuca

SEQ ID NO: 3290207 - RNA, 17 nt, Variola virus
guagcaaagaaauuaau

SEQ ID NO: 3290208 - RNA, 21 nt, Variola virus
cguuuccguuauauccaggga

SEQ ID NO: 3290209 - RNA, 19 nt, Variola virus
cauauaacguaaccagaau

SEQ ID NO: 3290210 - RNA, 23 nt, Variola virus
uaugauacugucuauaauagcaa

SEQ ID NO: 3290211 - RNA, 18 nt, Variola virus
acauuuuuauaaauagau

SEQ ID NO: 3290212 - RNA, 14 nt, Variola virus
uguauacacaugau

SEQ ID NO: 3290213 - RNA, 11 nt, Variola virus
guauaaacucc

SEQ ID NO: 3290214 - RNA, 20 nt, Variola virus
auacucaagauauuuguuaa

SEQ ID NO: 3290215 - RNA, 13 nt, Variola virus
uauaguuuaaauu

SEQ ID NO: 3290216 - RNA, 12 nt, Variola virus
uuggauguaugc

SEQ ID NO: 3290217 - RNA, 18 nt, Variola virus
cuuucaucaucugauacc

SEQ ID NO: 3290218 - RNA, 14 nt, Variola virus
gcauauauuagaaa

SEQ ID NO: 3290219 - RNA, 13 nt, Variola virus
agaauuguaacuu

SEQ ID NO: 3290220 - RNA, 20 nt, Variola virus
ucaauagaauaugucucuua

SEQ ID NO: 3290221 - RNA, 18 nt, Variola virus
acucucccuauaucuucu

SEQ ID NO: 3290222 - RNA, 17 nt, Variola virus
aacaaguuggaugauau

SEQ ID NO: 3290223 - RNA, 19 nt, Variola virus
cacuaaucauaauauucua

SEQ ID NO: 3290224 - RNA, 19 nt, Variola virus
uaucggcauuuauguuucu

SEQ ID NO: 3290225 - RNA, 15 nt, Variola virus
auacauuuucaaaua

SEQ ID NO: 3290226 - RNA, 23 nt, Variola virus
uaaaauaacucuguagacgauac

SEQ ID NO: 3290227 - RNA, 17 nt, Variola virus
guuacguuuauaaacga

SEQ ID NO: 3290228 - RNA, 21 nt, Variola virus
uuucaugaagucuaacguauu

SEQ ID NO: 3290229 - RNA, 17 nt, Variola virus
gcaacuauuuauuucua

SEQ ID NO: 3290230 - RNA, 12 nt, Variola virus
cguauacaguau

SEQ ID NO: 3290231 - RNA, 13 nt, Variola virus
uagacauuuacca

SEQ ID NO: 3290232 - RNA, 16 nt, Variola virus
uguuguuacauuucca

SEQ ID NO: 3290233 - RNA, 15 nt, Variola virus
uugaggauauacaaa

SEQ ID NO: 3290234 - RNA, 18 nt, Variola virus
uaguaccaaauucuucua

SEQ ID NO: 3290235 - RNA, 19 nt, Variola virus
guacagaaaauaucauguu

SEQ ID NO: 3290236 - RNA, 22 nt, Variola virus
agaaauuacauaaaaaaaaugu

SEQ ID NO: 3290237 - RNA, 13 nt, Variola virus
aucacaugaugau

SEQ ID NO: 3290238 - RNA, 15 nt, Variola virus
cauauauuuuuggau

SEQ ID NO: 3290239 - RNA, 22 nt, Variola virus
uuuuaaauuuccgucuaucauc

SEQ ID NO: 3290240 - RNA, 16 nt, Variola virus
uccgauauucaauuuu

SEQ ID NO: 3290241 - RNA, 18 nt, Variola virus
aguaaucauguaaauguu

SEQ ID NO: 3290242 - RNA, 13 nt, Variola virus
guaaguacaucau

SEQ ID NO: 3290243 - RNA, 16 nt, Variola virus
ucuauuauugaugcaa

SEQ ID NO: 3290244 - RNA, 14 nt, Variola virus
uaauagauuucuag

SEQ ID NO: 3290245 - RNA, 14 nt, Variola virus
uaaauuauuucauu

SEQ ID NO: 3290246 - RNA, 15 nt, Variola virus
aaacuacagguguga

SEQ ID NO: 3290247 - RNA, 23 nt, Variola virus
gaaauacuuuauuacuccauuaa

SEQ ID NO: 3290248 - RNA, 16 nt, Variola virus
agcucuuaguauggga

SEQ ID NO: 3290249 - RNA, 20 nt, Variola virus
gccauuaagaaacuaguuua

SEQ ID NO: 3290250 - RNA, 21 nt, Variola virus
auuuacgaaacuaucaaaaug

SEQ ID NO: 3290251 - RNA, 21 nt, Variola virus
ugauauacaaugcucaguaaa

SEQ ID NO: 3290252 - RNA, 22 nt, Variola virus
auacacaucucuucaucuguaa

SEQ ID NO: 3290253 - RNA, 16 nt, Variola virus
aguacuguuaagaaaa

SEQ ID NO: 3290254 - RNA, 19 nt, Variola virus
auuauauucucaucuauca

SEQ ID NO: 3290255 - RNA, 15 nt, Variola virus
uuucugguucuaauu

SEQ ID NO: 3290256 - RNA, 19 nt, Variola virus
aucuugacugucuaucucu

SEQ ID NO: 3290257 - RNA, 22 nt, Variola virus
augacacuaguuaagaacaugu

SEQ ID NO: 3290258 - RNA, 23 nt, Variola virus
acgauaaaccaaaagcuuucuag

SEQ ID NO: 3290259 - RNA, 20 nt, Variola virus
aaaugagguagcaaaaaaac

SEQ ID NO: 3290260 - RNA, 19 nt, Variola virus
acaauuauccuuuugauua

SEQ ID NO: 3290261 - RNA, 17 nt, Variola virus
uacuaggagaauuauuu

SEQ ID NO: 3290262 - RNA, 18 nt, Variola virus
aagauugauggauuagaa

SEQ ID NO: 3290263 - RNA, 20 nt, Variola virus
gucuaguaaguagaaauuau

SEQ ID NO: 3290264 - RNA, 18 nt, Variola virus
uauuuaucuuucuugcua

SEQ ID NO: 3290265 - RNA, 18 nt, Variola virus
aacucuuuagucgagaua

SEQ ID NO: 3290266 - RNA, 14 nt, Variola virus
caauaaacauagua

SEQ ID NO: 3290267 - RNA, 15 nt, Variola virus
uauaucguuaucauu

SEQ ID NO: 3290268 - RNA, 17 nt, Variola virus
uaacuccucuauuaaug

SEQ ID NO: 3290269 - RNA, 18 nt, Variola virus
acuguauccucaaacauc

SEQ ID NO: 3290270 - RNA, 17 nt, Variola virus
guacaaauguuaaacau

SEQ ID NO: 3290271 - RNA, 21 nt, Variola virus
uagaagaucaaccucuggagu

SEQ ID NO: 3290272 - RNA, 22 nt, Variola virus
ccggaagaucgcuauuguauuu

SEQ ID NO: 3290273 - RNA, 17 nt, Variola virus
ccauuucaacaguuucu

SEQ ID NO: 3290274 - RNA, 15 nt, Variola virus
uagcuguucaagaau

SEQ ID NO: 3290275 - RNA, 19 nt, Variola virus
aaaaguacucaaucuguac

SEQ ID NO: 3290276 - RNA, 15 nt, Variola virus
ugguauuugaaaucg

SEQ ID NO: 3290277 - RNA, 19 nt, Variola virus
acaaauagagauaaaacaa

SEQ ID NO: 3290278 - RNA, 17 nt, Variola virus
ugguaauaaaauuauuc

SEQ ID NO: 3290279 - RNA, 17 nt, Variola virus
uagagauacaauauuua

SEQ ID NO: 3290280 - RNA, 17 nt, Variola virus
acaugcaucuuauuaga

SEQ ID NO: 3290281 - RNA, 15 nt, Variola virus
aguaguucaacauaa

SEQ ID NO: 3290282 - RNA, 20 nt, Variola virus
ucucauaacugcucuagauu

SEQ ID NO: 3290283 - RNA, 16 nt, Variola virus
uuagcacuaucauaau

SEQ ID NO: 3290284 - RNA, 17 nt, Variola virus
ucaccauggacauaaag

SEQ ID NO: 3290285 - RNA, 23 nt, Variola virus
auuuauuuucggguuuaaauucu

SEQ ID NO: 3290286 - RNA, 17 nt, Variola virus
guuuagacgcuuauuau

SEQ ID NO: 3290287 - RNA, 12 nt, Variola virus
cguauauguuuc

SEQ ID NO: 3290288 - RNA, 20 nt, Variola virus
cuucauaaaagaaaauacua

SEQ ID NO: 3290289 - RNA, 17 nt, Variola virus
caaauaucuuuaugaau

SEQ ID NO: 3290290 - RNA, 19 nt, Variola virus
acaaucauccggauauucu

SEQ ID NO: 3290291 - RNA, 13 nt, Variola virus
uacgcguucucaa

SEQ ID NO: 3290292 - RNA, 22 nt, Variola virus
auuauaucauugucuaauagau

SEQ ID NO: 3290293 - RNA, 21 nt, Variola virus
acuaaacuaacuccuugguuu

SEQ ID NO: 3290294 - RNA, 19 nt, Variola virus
gaauugauaauauaaauau

SEQ ID NO: 3290295 - RNA, 14 nt, Variola virus
uguagauuuggaua

SEQ ID NO: 3290296 - RNA, 24 nt, Variola virus
uacauaccucuuaaauggacuagu

SEQ ID NO: 3290297 - RNA, 13 nt, Variola virus
auacauuuucaaa

SEQ ID NO: 3290298 - RNA, 15 nt, Variola virus
uaauuccuuugcuau

SEQ ID NO: 3290299 - RNA, 22 nt, Variola virus
aaaacggugcugaccuggaaaa

SEQ ID NO: 3290300 - RNA, 15 nt, Variola virus
guuucucaucuuuua

SEQ ID NO: 3290301 - RNA, 18 nt, Variola virus
acuuaaacaaaauacaau

SEQ ID NO: 3290302 - RNA, 14 nt, Variola virus
auaaaauuauucac

SEQ ID NO: 3290303 - RNA, 11 nt, Variola virus
auaaaacauua

SEQ ID NO: 3290304 - RNA, 19 nt, Variola virus
accaauuguuuuuguacau

SEQ ID NO: 3290305 - RNA, 15 nt, Variola virus
auguuauaaaaucua

SEQ ID NO: 3290306 - RNA, 23 nt, Variola virus
gcauccacucauauagaagaugc

SEQ ID NO: 3290307 - RNA, 14 nt, Variola virus
uguaucaaucaaaa

SEQ ID NO: 3290308 - RNA, 15 nt, Variola virus
gcgauaauagauagu

SEQ ID NO: 3290309 - RNA, 19 nt, Variola virus
gcuguuccucuguaaauaa

SEQ ID NO: 3290310 - RNA, 21 nt, Variola virus
uccccaaaaguaaaauaauca

SEQ ID NO: 3290311 - RNA, 12 nt, Variola virus
ucaccaauaaaa

SEQ ID NO: 3290312 - RNA, 16 nt, Variola virus
aacuaauacaucugaa

SEQ ID NO: 3290313 - RNA, 22 nt, Variola virus
cguuucauaaagagaucaggaa

SEQ ID NO: 3290314 - RNA, 17 nt, Variola virus
acuagauauauuaauaa

SEQ ID NO: 3290315 - RNA, 21 nt, Variola virus
aacuauugaagccauugaaaa

SEQ ID NO: 3290316 - RNA, 20 nt, Variola virus
cauaaaggcgcccauuucaa

SEQ ID NO: 3290317 - RNA, 13 nt, Variola virus
gguacuauuucua

SEQ ID NO: 3290318 - RNA, 16 nt, Variola virus
uaacgaggaagaaauu

SEQ ID NO: 3290319 - RNA, 17 nt, Variola virus
uuauacuaugucauuaa

SEQ ID NO: 3290320 - RNA, 12 nt, Variola virus
acaaaaugugau

SEQ ID NO: 3290321 - RNA, 13 nt, Variola virus
gaaauauucuguu

SEQ ID NO: 3290322 - RNA, 21 nt, Variola virus
aaguuaucucuaacaaaacua

SEQ ID NO: 3290323 - RNA, 22 nt, Variola virus
aaugugaauuuagcauauagua

SEQ ID NO: 3290324 - RNA, 16 nt, Variola virus
ucuagcuuucacuuaa

SEQ ID NO: 3290325 - RNA, 20 nt, Variola virus
auacauggggaucugauggu

SEQ ID NO: 3290326 - RNA, 15 nt, Variola virus
uaaagaccgaauaca

SEQ ID NO: 3290327 - RNA, 18 nt, Variola virus
aaaaguuccagaaaaugu

SEQ ID NO: 3290328 - RNA, 18 nt, Variola virus
uuuauacauauucuaaug

SEQ ID NO: 3290329 - RNA, 21 nt, Variola virus
cuccuagguuucucuauaaac

SEQ ID NO: 3290330 - RNA, 22 nt, Variola virus
gaagaugauuuugcuagagaua

SEQ ID NO: 3290331 - RNA, 17 nt, Variola virus
aggugucccgucaguau

SEQ ID NO: 3290332 - RNA, 15 nt, Variola virus
aucauuaaugauaua

SEQ ID NO: 3290333 - RNA, 17 nt, Variola virus
ucagcauuacuugauau

SEQ ID NO: 3290334 - RNA, 14 nt, Variola virus
cuugacaucuaaaa

SEQ ID NO: 3290335 - RNA, 20 nt, Variola virus
cauagaaagguugcgucuag

SEQ ID NO: 3290336 - RNA, 17 nt, Variola virus
uaauuuuaucaagacau

SEQ ID NO: 3290337 - RNA, 15 nt, Variola virus
uaacaauuucuauaa

SEQ ID NO: 3290338 - RNA, 15 nt, Variola virus
aaucuaauacaaaau

SEQ ID NO: 3290339 - RNA, 13 nt, Variola virus
aaauaucuuguau

SEQ ID NO: 3290340 - RNA, 14 nt, Variola virus
gucaagaugaugaa

SEQ ID NO: 3290341 - RNA, 15 nt, Variola virus
acaaaguacucaaua

SEQ ID NO: 3290342 - RNA, 16 nt, Variola virus
ucaauaugucaucuau

SEQ ID NO: 3290343 - RNA, 17 nt, Variola virus
ugcuauaccuaauacua

SEQ ID NO: 3290344 - RNA, 15 nt, Variola virus
uacgaggauucaaaa

SEQ ID NO: 3290345 - RNA, 19 nt, Variola virus
uagguauuuuaucucuauu

SEQ ID NO: 3290346 - RNA, 18 nt, Variola virus
cgaauauaucaaaacuac

SEQ ID NO: 3290347 - RNA, 17 nt, Variola virus
gaaucuguucaaaaauu

SEQ ID NO: 3290348 - RNA, 15 nt, Variola virus
ccagauauauaucuu

SEQ ID NO: 3290349 - RNA, 13 nt, Variola virus
cuacuuaaaugua

SEQ ID NO: 3290350 - RNA, 22 nt, Variola virus
caguuauguucaacuuugaaau

SEQ ID NO: 3290351 - RNA, 14 nt, Variola virus
uggauauguuuuua

SEQ ID NO: 3290352 - RNA, 12 nt, Variola virus
ucaggaaaugua

SEQ ID NO: 3290353 - RNA, 15 nt, Variola virus
aaacucagaacaaua

SEQ ID NO: 3290354 - RNA, 19 nt, Variola virus
ucauauaucugcucuuaaa

SEQ ID NO: 3290355 - RNA, 20 nt, Variola virus
guuauuuggcaguacucauu

SEQ ID NO: 3290356 - RNA, 16 nt, Variola virus
uaaaccguuuaauauu

SEQ ID NO: 3290357 - RNA, 16 nt, Variola virus
gucaaaaucuaaacaa

SEQ ID NO: 3290358 - RNA, 19 nt, Variola virus
caauuguggacucacuaua

SEQ ID NO: 3290359 - RNA, 21 nt, Variola virus
uauccucaauaacguuaucau

SEQ ID NO: 3290360 - RNA, 18 nt, Variola virus
cguuuaaaguaaacuucg

SEQ ID NO: 3290361 - RNA, 16 nt, Variola virus
gucguccaauauuuua

SEQ ID NO: 3290362 - RNA, 14 nt, Variola virus
caucuaacagaauu

SEQ ID NO: 3290363 - RNA, 21 nt, Variola virus
gaucauagaacaaaccaaaua

SEQ ID NO: 3290364 - RNA, 19 nt, Variola virus
uuucccguaauaaauuuua

SEQ ID NO: 3290365 - RNA, 15 nt, Variola virus
agcugcaucuaaauu

SEQ ID NO: 3290366 - RNA, 18 nt, Variola virus
uguaauuuagaauacguu

SEQ ID NO: 3290367 - RNA, 16 nt, Variola virus
uaucaucauuaucauu

SEQ ID NO: 3290368 - RNA, 17 nt, Variola virus
caggauacuaugcuauu

SEQ ID NO: 3290369 - RNA, 20 nt, Variola virus
aaaugucuagcgauauuucu

SEQ ID NO: 3290370 - RNA, 18 nt, Variola virus
aauacucaauacuuucca

SEQ ID NO: 3290371 - RNA, 17 nt, Variola virus
cggagaagaauugguaa

SEQ ID NO: 3290372 - RNA, 14 nt, Variola virus
acaucucgcaauaa

SEQ ID NO: 3290373 - RNA, 20 nt, Variola virus
cauggucuagauguaaaaaa

SEQ ID NO: 3290374 - RNA, 15 nt, Variola virus
uauaauaaauguaua

SEQ ID NO: 3290375 - RNA, 12 nt, Variola virus
auaaaauaugaa

SEQ ID NO: 3290376 - RNA, 13 nt, Variola virus
uuuagcauuucua

SEQ ID NO: 3290377 - RNA, 20 nt, Variola virus
aucauuugaugauauguuug

SEQ ID NO: 3290378 - RNA, 17 nt, Variola virus
ccuagucauauguuuaa

SEQ ID NO: 3290379 - RNA, 17 nt, Variola virus
ugaauguucucaagaac

SEQ ID NO: 3290380 - RNA, 16 nt, Variola virus
uacuuuuguuacuaau

SEQ ID NO: 3290381 - RNA, 13 nt, Variola virus
auuaauacauuua

SEQ ID NO: 3290382 - RNA, 20 nt, Variola virus
guauuuuugacguaaaugug

SEQ ID NO: 3290383 - RNA, 17 nt, Variola virus
aaaugguugauaccauu

SEQ ID NO: 3290384 - RNA, 19 nt, Variola virus
aaacggauuaauauauguc

SEQ ID NO: 3290385 - RNA, 13 nt, Variola virus
ucuaugucucuua

SEQ ID NO: 3290386 - RNA, 14 nt, Variola virus
agcauuacuugaua

SEQ ID NO: 3290387 - RNA, 17 nt, Variola virus
gucuuuaaguauauacg

SEQ ID NO: 3290388 - RNA, 17 nt, Variola virus
uucuauaucuauaucua

SEQ ID NO: 3290389 - RNA, 18 nt, Variola virus
ucacacuacugaaaaaag

SEQ ID NO: 3290390 - RNA, 16 nt, Variola virus
aaagaggaucguacau

SEQ ID NO: 3290391 - RNA, 17 nt, Variola virus
uaauaguuuaucauacu

SEQ ID NO: 3290392 - RNA, 23 nt, Variola virus
uuauuccgguacugguuuagaua

SEQ ID NO: 3290393 - RNA, 20 nt, Variola virus
auuguaccaucuuguuguaa

SEQ ID NO: 3290394 - RNA, 17 nt, Variola virus
aucuucauaaaauacua

SEQ ID NO: 3290395 - RNA, 14 nt, Variola virus
uacaucuguuuccu

SEQ ID NO: 3290396 - RNA, 16 nt, Variola virus
aaaacugaaaauauau

SEQ ID NO: 3290397 - RNA, 22 nt, Variola virus
aauaugaggaaaaugauuaaau

SEQ ID NO: 3290398 - RNA, 18 nt, Variola virus
guuauuacacauguguuu

SEQ ID NO: 3290399 - RNA, 15 nt, Variola virus
acuucacagaugaua

SEQ ID NO: 3290400 - RNA, 17 nt, Variola virus
guaaaagucaaauuaga

SEQ ID NO: 3290401 - RNA, 14 nt, Variola virus
aaugacuuauaaaa

SEQ ID NO: 3290402 - RNA, 20 nt, Variola virus
caaaaggcgguaauagaaua

SEQ ID NO: 3290403 - RNA, 15 nt, Variola virus
auuuagacgagagau

SEQ ID NO: 3290404 - RNA, 15 nt, Variola virus
cuacaucaucaucuu

SEQ ID NO: 3290405 - RNA, 20 nt, Variola virus
agaguuucaaaaauauucau

SEQ ID NO: 3290406 - RNA, 14 nt, Variola virus
aguaaaguaaacaa

SEQ ID NO: 3290407 - RNA, 23 nt, Variola virus
augugacuuuucucuaaaugaug

SEQ ID NO: 3290408 - RNA, 20 nt, Variola virus
auucucugacauucagaaag

SEQ ID NO: 3290409 - RNA, 20 nt, Variola virus
uuaagugauauaaaacauuc

SEQ ID NO: 3290410 - RNA, 23 nt, Variola virus
aguauauuuuaauucauuucauu

SEQ ID NO: 3290411 - RNA, 16 nt, Variola virus
uauauucgaauucaaa

SEQ ID NO: 3290412 - RNA, 13 nt, Variola virus
agaauauagacaa

SEQ ID NO: 3290413 - RNA, 20 nt, Variola virus
ucuauccauuguuucacauu

SEQ ID NO: 3290414 - RNA, 15 nt, Variola virus
uauauucuuacagua

SEQ ID NO: 3290415 - RNA, 15 nt, Variola virus
aucguauaaauacug

SEQ ID NO: 3290416 - RNA, 14 nt, Variola virus
gagugauucuaguu

SEQ ID NO: 3290417 - RNA, 18 nt, Variola virus
agauuuaguuguuuaauu

SEQ ID NO: 3290418 - RNA, 14 nt, Variola virus
auaauauuaaauau

SEQ ID NO: 3290419 - RNA, 21 nt, Variola virus
auaugcucauauauuuauaga

SEQ ID NO: 3290420 - RNA, 11 nt, Variola virus
uaaaauuauug

SEQ ID NO: 3290421 - RNA, 16 nt, Variola virus
uaaaaccaacuaauau

SEQ ID NO: 3290422 - RNA, 15 nt, Variola virus
aucaacauauagaac

SEQ ID NO: 3290423 - RNA, 15 nt, Variola virus
uagaaaaaauuuauu

SEQ ID NO: 3290424 - RNA, 16 nt, Variola virus
agauacuauccaucag

SEQ ID NO: 3290425 - RNA, 21 nt, Variola virus
guaaacuguugaugauaucua

SEQ ID NO: 3290426 - RNA, 22 nt, Variola virus
agacuuuuguccuaaaauacua

SEQ ID NO: 3290427 - RNA, 14 nt, Variola virus
uaguuuguuuucau

SEQ ID NO: 3290428 - RNA, 17 nt, Variola virus
guaauaacuauguuuua

SEQ ID NO: 3290429 - RNA, 17 nt, Variola virus
aagugucuauaaaugua

SEQ ID NO: 3290430 - RNA, 14 nt, Variola virus
acgauauuagaauu

SEQ ID NO: 3290431 - RNA, 17 nt, Variola virus
ugauuguuugacaaauc

SEQ ID NO: 3290432 - RNA, 20 nt, Variola virus
ucaaggacaguuaaaacuau

SEQ ID NO: 3290433 - RNA, 21 nt, Variola virus
aaucaugugauuaugaauauu

SEQ ID NO: 3290434 - RNA, 16 nt, Variola virus
agucauaacaaaugua

SEQ ID NO: 3290435 - RNA, 17 nt, Variola virus
acaaauaguaaaugaga

SEQ ID NO: 3290436 - RNA, 15 nt, Variola virus
ggugaauccaucucu

SEQ ID NO: 3290437 - RNA, 14 nt, Variola virus
ccacuauaaaauaa

SEQ ID NO: 3290438 - RNA, 17 nt, Variola virus
uuauuacuaaacauuuu

SEQ ID NO: 3290439 - RNA, 12 nt, Variola virus
acuauaaugaaa

SEQ ID NO: 3290440 - RNA, 16 nt, Variola virus
aaaagugugcugauuu

SEQ ID NO: 3290441 - RNA, 13 nt, Variola virus
aguuauaugaaua

SEQ ID NO: 3290442 - RNA, 14 nt, Variola virus
uuugcuaauaauaa

SEQ ID NO: 3290443 - RNA, 17 nt, Variola virus
ugagucuauaucccauu

SEQ ID NO: 3290444 - RNA, 15 nt, Variola virus
aacuuuguucauuua

SEQ ID NO: 3290445 - RNA, 13 nt, Variola virus
uaaaagaaaauac

SEQ ID NO: 3290446 - RNA, 16 nt, Variola virus
aagucauaugugguau

SEQ ID NO: 3290447 - RNA, 15 nt, Variola virus
agauauauauacucu

SEQ ID NO: 3290448 - RNA, 22 nt, Variola virus
auaucuaacguauucuagcaua

SEQ ID NO: 3290449 - RNA, 18 nt, Variola virus
caaacuuacagaaacaau

SEQ ID NO: 3290450 - RNA, 16 nt, Variola virus
auauucucauggaaau

SEQ ID NO: 3290451 - RNA, 16 nt, Variola virus
agauucuuauauaccg

SEQ ID NO: 3290452 - RNA, 12 nt, Variola virus
uuaauugccaua

SEQ ID NO: 3290453 - RNA, 24 nt, Variola virus
aagacgagaucugaauggugaguu

SEQ ID NO: 3290454 - RNA, 15 nt, Variola virus
aaagauuuuauuuca

SEQ ID NO: 3290455 - RNA, 12 nt, Variola virus
uaucuacaauua

SEQ ID NO: 3290456 - RNA, 16 nt, Variola virus
aucaauaauaguaaca

SEQ ID NO: 3290457 - RNA, 16 nt, Variola virus
uaucuauacuauuaaa

SEQ ID NO: 3290458 - RNA, 22 nt, Variola virus
cuuauacgauccgcgucuuuuu

SEQ ID NO: 3290459 - RNA, 23 nt, Variola virus
agaauacgaugauauuaaaauua

SEQ ID NO: 3290460 - RNA, 21 nt, Variola virus
uuuaggauucauuagacguag

SEQ ID NO: 3290461 - RNA, 23 nt, Variola virus
aagaucguuggacauuggauaau

SEQ ID NO: 3290462 - RNA, 22 nt, Variola virus
acauaaucguagauucauguua

SEQ ID NO: 3290463 - RNA, 14 nt, Variola virus
uauuguuacagaug

SEQ ID NO: 3290464 - RNA, 20 nt, Variola virus
uauauccaccaauagaaguu

SEQ ID NO: 3290465 - RNA, 19 nt, Variola virus
gucacuacguaauaaaagu

SEQ ID NO: 3290466 - RNA, 13 nt, Variola virus
aauggaauccaau

SEQ ID NO: 3290467 - RNA, 20 nt, Variola virus
aguuagcaauuucaaaauag

SEQ ID NO: 3290468 - RNA, 18 nt, Variola virus
agaaucuauuuuaaugag

SEQ ID NO: 3290469 - RNA, 17 nt, Variola virus
auaaucgcgaguauuaa

SEQ ID NO: 3290470 - RNA, 15 nt, Variola virus
aucucaacaaaauuc

SEQ ID NO: 3290471 - RNA, 22 nt, Variola virus
caaauaauaaacuaaacaaaac

SEQ ID NO: 3290472 - RNA, 15 nt, Variola virus
gaccgaauacauaac

SEQ ID NO: 3290473 - RNA, 13 nt, Variola virus
acauacuuuguaa

SEQ ID NO: 3290474 - RNA, 19 nt, Variola virus
uaauaucuuggaucuuauu

SEQ ID NO: 3290475 - RNA, 19 nt, Variola virus
ugaaacauacaacaaagaa

SEQ ID NO: 3290476 - RNA, 16 nt, Variola virus
ugguaucaagaaguau

SEQ ID NO: 3290477 - RNA, 19 nt, Variola virus
ugucccuauuauaaucauu

SEQ ID NO: 3290478 - RNA, 23 nt, Variola virus
cguaugugguaugauacaaucaa

SEQ ID NO: 3290479 - RNA, 17 nt, Variola virus
auaaggcuucucaauau

SEQ ID NO: 3290480 - RNA, 19 nt, Variola virus
auuuacauucuuuuugcug

SEQ ID NO: 3290481 - RNA, 14 nt, Variola virus
cuguuaauaucaau

SEQ ID NO: 3290482 - RNA, 18 nt, Variola virus
acucgucgacaaaguacu

SEQ ID NO: 3290483 - RNA, 22 nt, Variola virus
uuaucguuuaagaauaauacag

SEQ ID NO: 3290484 - RNA, 14 nt, Variola virus
gguucauuggaauc

SEQ ID NO: 3290485 - RNA, 13 nt, Variola virus
acauuaauacaaa

SEQ ID NO: 3290486 - RNA, 20 nt, Variola virus
cuggaauagaaucuauuuua

SEQ ID NO: 3290487 - RNA, 21 nt, Variola virus
uagagaggcugcugaaaauaa

SEQ ID NO: 3290488 - RNA, 12 nt, Variola virus
uuuaguuucuuc

SEQ ID NO: 3290489 - RNA, 12 nt, Variola virus
agauaaauaugg

SEQ ID NO: 3290490 - RNA, 18 nt, Variola virus
gaugccaucauagauaua

SEQ ID NO: 3290491 - RNA, 16 nt, Variola virus
ucuucuaaauucauaa

SEQ ID NO: 3290492 - RNA, 16 nt, Variola virus
caugaagaaaaacacc

SEQ ID NO: 3290493 - RNA, 21 nt, Variola virus
agauagguauuuuaucucuau

SEQ ID NO: 3290494 - RNA, 18 nt, Variola virus
acugauuaauaagaucuu

SEQ ID NO: 3290495 - RNA, 16 nt, Variola virus
gagauaaucuauauca

SEQ ID NO: 3290496 - RNA, 21 nt, Variola virus
ucuagcguugcuucuacauaa

SEQ ID NO: 3290497 - RNA, 23 nt, Variola virus
ucgagaugggcccguucucugaa

SEQ ID NO: 3290498 - RNA, 13 nt, Variola virus
uguagucuugguc

SEQ ID NO: 3290499 - RNA, 18 nt, Variola virus
aacaacaaauaaaaaggu

SEQ ID NO: 3290500 - RNA, 13 nt, Variola virus
cuauauaugaaua

SEQ ID NO: 3290501 - RNA, 13 nt, Variola virus
augucacuauuaa

SEQ ID NO: 3290502 - RNA, 14 nt, Variola virus
aguaucuaauggau

SEQ ID NO: 3290503 - RNA, 21 nt, Variola virus
aauagauuggaugguugacau

SEQ ID NO: 3290504 - RNA, 23 nt, Variola virus
caucgacuguacgauacauaaug

SEQ ID NO: 3290505 - RNA, 20 nt, Variola virus
aaacauuuuauauacuuuuc

SEQ ID NO: 3290506 - RNA, 14 nt, Variola virus
uauaacaaugacuu

SEQ ID NO: 3290507 - RNA, 19 nt, Variola virus
aaauauuaauaaaguauau

SEQ ID NO: 3290508 - RNA, 21 nt, Variola virus
aauuugguaauguuucuuaug

SEQ ID NO: 3290509 - RNA, 18 nt, Variola virus
uugaugaaguucgaugau

SEQ ID NO: 3290510 - RNA, 18 nt, Variola virus
acuaaaaaacgaaauaua

SEQ ID NO: 3290511 - RNA, 13 nt, Variola virus
cuacaacuaguga

SEQ ID NO: 3290512 - RNA, 17 nt, Variola virus
caguuucucaucuuuua

SEQ ID NO: 3290513 - RNA, 20 nt, Variola virus
auuaacucuuuuauuuucca

SEQ ID NO: 3290514 - RNA, 20 nt, Variola virus
auugaucuauuauuuaauga

SEQ ID NO: 3290515 - RNA, 16 nt, Variola virus
aaauguccaauauguc

SEQ ID NO: 3290516 - RNA, 21 nt, Variola virus
uguugcuucauccagaucauu

SEQ ID NO: 3290517 - RNA, 12 nt, Variola virus
gucauagauaua

SEQ ID NO: 3290518 - RNA, 16 nt, Variola virus
uuaauuacauauuguu

SEQ ID NO: 3290519 - RNA, 21 nt, Variola virus
uauuauuuaaugagaaacuua

SEQ ID NO: 3290520 - RNA, 18 nt, Variola virus
uguauuauccaauacaga

SEQ ID NO: 3290521 - RNA, 19 nt, Variola virus
auucuuuguauuuuggcau

SEQ ID NO: 3290522 - RNA, 15 nt, Variola virus
uucaagauuaucuuu

SEQ ID NO: 3290523 - RNA, 16 nt, Variola virus
aucauccguaucuucu

SEQ ID NO: 3290524 - RNA, 23 nt, Variola virus
gacucucaguaagaguuaugaau

SEQ ID NO: 3290525 - RNA, 17 nt, Variola virus
uaaauuccauagaauau

SEQ ID NO: 3290526 - RNA, 14 nt, Variola virus
ccaacaaaacaauu

SEQ ID NO: 3290527 - RNA, 21 nt, Variola virus
uucgaggaauaauaagaacaa

SEQ ID NO: 3290528 - RNA, 18 nt, Variola virus
cuuaugaaagaacgcauu

SEQ ID NO: 3290529 - RNA, 20 nt, Variola virus
auguuuaacuugacauuuau

SEQ ID NO: 3290530 - RNA, 20 nt, Variola virus
aucucuucuaguuucacuag

SEQ ID NO: 3290531 - RNA, 12 nt, Variola virus
gaucaaauggau

SEQ ID NO: 3290532 - RNA, 16 nt, Variola virus
uauaaaaguguauuua

SEQ ID NO: 3290533 - RNA, 12 nt, Variola virus
acucuaaaauau

SEQ ID NO: 3290534 - RNA, 20 nt, Variola virus
auuaugaaaaaaagauguau

SEQ ID NO: 3290535 - RNA, 17 nt, Variola virus
auuuauccaucgucaaa

SEQ ID NO: 3290536 - RNA, 18 nt, Variola virus
agaaagauacagguauag

SEQ ID NO: 3290537 - RNA, 20 nt, Variola virus
auuaggcaugucgauggcaa

SEQ ID NO: 3290538 - RNA, 20 nt, Variola virus
auaucuuguucugguuuaaa

SEQ ID NO: 3290539 - RNA, 13 nt, Variola virus
ucgucuacaucau

SEQ ID NO: 3290540 - RNA, 15 nt, Variola virus
guacccuuaaucaug

SEQ ID NO: 3290541 - RNA, 13 nt, Variola virus
acuucucuaaaug

SEQ ID NO: 3290542 - RNA, 20 nt, Variola virus
uuuucaauuaugcaucaaua

SEQ ID NO: 3290543 - RNA, 19 nt, Variola virus
acauaauuuucuauaacug

SEQ ID NO: 3290544 - RNA, 13 nt, Variola virus
gcauaucaugaaa

SEQ ID NO: 3290545 - RNA, 14 nt, Variola virus
uaucagcuauugca

SEQ ID NO: 3290546 - RNA, 17 nt, Variola virus
auuaugcaaauuugaau

SEQ ID NO: 3290547 - RNA, 19 nt, Variola virus
acguaaauacaaaacagaa

SEQ ID NO: 3290548 - RNA, 19 nt, Variola virus
uaaaauuggaucuacuaau

SEQ ID NO: 3290549 - RNA, 18 nt, Variola virus
uauuuucggguuuaaauu

SEQ ID NO: 3290550 - RNA, 21 nt, Variola virus
gacuccaucaucgaucuaaua

SEQ ID NO: 3290551 - RNA, 19 nt, Variola virus
uauaaccaccgauaaaucu

SEQ ID NO: 3290552 - RNA, 17 nt, Variola virus
acgaguugaucuucaaa

SEQ ID NO: 3290553 - RNA, 17 nt, Variola virus
uucaggaacauaaacaa

SEQ ID NO: 3290554 - RNA, 21 nt, Variola virus
aucauguagauaguuaccauc

SEQ ID NO: 3290555 - RNA, 12 nt, Variola virus
gaucuauaaaaa

SEQ ID NO: 3290556 - RNA, 11 nt, Variola virus
ugauugaagaa

SEQ ID NO: 3290557 - RNA, 19 nt, Variola virus
guuuaaaaugaucuauaug

SEQ ID NO: 3290558 - RNA, 19 nt, Variola virus
auaaaucuuuaucaagcac

SEQ ID NO: 3290559 - RNA, 12 nt, Variola virus
ucacuucagaaa

SEQ ID NO: 3290560 - RNA, 21 nt, Variola virus
uagaagagcaaauaucucauc

SEQ ID NO: 3290561 - RNA, 16 nt, Variola virus
uuacaaaauucaucaa

SEQ ID NO: 3290562 - RNA, 14 nt, Variola virus
gaauccuauacucu

SEQ ID NO: 3290563 - RNA, 21 nt, Variola virus
aauaaaauucugauuggucaa

SEQ ID NO: 3290564 - RNA, 13 nt, Variola virus
uaguuaaauauua

SEQ ID NO: 3290565 - RNA, 14 nt, Variola virus
uacacaccaaugga

SEQ ID NO: 3290566 - RNA, 22 nt, Variola virus
uccgcauacgcauuacaguuuu

SEQ ID NO: 3290567 - RNA, 14 nt, Variola virus
cgauauuauuguaa

SEQ ID NO: 3290568 - RNA, 14 nt, Variola virus
gucgauaacaaauu

SEQ ID NO: 3290569 - RNA, 14 nt, Variola virus
aaaaguaggaauua

SEQ ID NO: 3290570 - RNA, 20 nt, Variola virus
gaacauaucuauauaauuau

SEQ ID NO: 3290571 - RNA, 18 nt, Variola virus
ccaacguaguaucaucuu

SEQ ID NO: 3290572 - RNA, 15 nt, Variola virus
auuuaaacauuuaac

SEQ ID NO: 3290573 - RNA, 20 nt, Variola virus
ugggugugguuaaacgaaag

SEQ ID NO: 3290574 - RNA, 15 nt, Variola virus
auguuuuauuaauuu

SEQ ID NO: 3290575 - RNA, 18 nt, Variola virus
auagauuguuuucaguaa

SEQ ID NO: 3290576 - RNA, 14 nt, Variola virus
cuccccacauuuca

SEQ ID NO: 3290577 - RNA, 18 nt, Variola virus
ucaaaaguuaauuucuau

SEQ ID NO: 3290578 - RNA, 17 nt, Variola virus
gacuucguaagaaauaa

SEQ ID NO: 3290579 - RNA, 15 nt, Variola virus
agucucaaaauuaua

SEQ ID NO: 3290580 - RNA, 15 nt, Variola virus
gagauaauagaaaau

SEQ ID NO: 3290581 - RNA, 17 nt, Variola virus
uauauuaucauagaccu

SEQ ID NO: 3290582 - RNA, 13 nt, Variola virus
uacuccguuuuau

SEQ ID NO: 3290583 - RNA, 17 nt, Variola virus
agcacuauuucuaaauc

SEQ ID NO: 3290584 - RNA, 19 nt, Variola virus
gaaugccugccuguauuau

SEQ ID NO: 3290585 - RNA, 20 nt, Variola virus
uagaagaaauugaacuccuc

SEQ ID NO: 3290586 - RNA, 14 nt, Variola virus
acuaauaaacauuc

SEQ ID NO: 3290587 - RNA, 15 nt, Variola virus
cguagacuuucuugc

SEQ ID NO: 3290588 - RNA, 22 nt, Variola virus
aucggcauuuauguuucuuuaa

SEQ ID NO: 3290589 - RNA, 12 nt, Variola virus
aaaaguuauuau

SEQ ID NO: 3290590 - RNA, 22 nt, Variola virus
auuuagauuaaauccagaaguu

SEQ ID NO: 3290591 - RNA, 19 nt, Variola virus
uucagauauaaaaaucugu

SEQ ID NO: 3290592 - RNA, 15 nt, Variola virus
auacuguauauacua

SEQ ID NO: 3290593 - RNA, 12 nt, Variola virus
aaacuaauacau

SEQ ID NO: 3290594 - RNA, 17 nt, Variola virus
gaaauaauauaaaugau

SEQ ID NO: 3290595 - RNA, 14 nt, Variola virus
agaaaaaaauggaa

SEQ ID NO: 3290596 - RNA, 12 nt, Variola virus
uuauuuagugua

SEQ ID NO: 3290597 - RNA, 21 nt, Variola virus
guuccauaaauuuauaauguu

SEQ ID NO: 3290598 - RNA, 13 nt, Variola virus
acaucuaguucuu

SEQ ID NO: 3290599 - RNA, 17 nt, Variola virus
uaacagaaaaaacaaug

SEQ ID NO: 3290600 - RNA, 16 nt, Variola virus
ugaugaaucagacaau

SEQ ID NO: 3290601 - RNA, 20 nt, Variola virus
ggucauauuauagauuuaau

SEQ ID NO: 3290602 - RNA, 20 nt, Variola virus
ucuaaaauguauaacaaaug

SEQ ID NO: 3290603 - RNA, 21 nt, Variola virus
uguuuaacaaagauauuacca

SEQ ID NO: 3290604 - RNA, 20 nt, Variola virus
ucaaucggauacagacacuc

SEQ ID NO: 3290605 - RNA, 17 nt, Variola virus
uuuaaaaaaaaauacuu

SEQ ID NO: 3290606 - RNA, 19 nt, Variola virus
guuagauaacucugcucca

SEQ ID NO: 3290607 - RNA, 13 nt, Variola virus
cuuuauuaucuau

SEQ ID NO: 3290608 - RNA, 23 nt, Variola virus
guuaauaggacacauauaauaau

SEQ ID NO: 3290609 - RNA, 20 nt, Variola virus
uugaugauaucuacaucguu

SEQ ID NO: 3290610 - RNA, 22 nt, Variola virus
aacaauuuuguauuauucugaa

SEQ ID NO: 3290611 - RNA, 21 nt, Variola virus
aucuguauucucgauacagua

SEQ ID NO: 3290612 - RNA, 12 nt, Variola virus
ucuagaaugaag

SEQ ID NO: 3290613 - RNA, 17 nt, Variola virus
aacuacucgaacagaua

SEQ ID NO: 3290614 - RNA, 22 nt, Variola virus
uuggaauaaucucaauuagaau

SEQ ID NO: 3290615 - RNA, 16 nt, Variola virus
cuauaauaucuuugaa

SEQ ID NO: 3290616 - RNA, 15 nt, Variola virus
aaauguaucuuccac

SEQ ID NO: 3290617 - RNA, 13 nt, Variola virus
agaacaugaugau

SEQ ID NO: 3290618 - RNA, 13 nt, Variola virus
ugaaaauguaaua

SEQ ID NO: 3290619 - RNA, 21 nt, Variola virus
uaaaacuuccucauuaagauu

SEQ ID NO: 3290620 - RNA, 19 nt, Variola virus
aauacucccacaaauacug

SEQ ID NO: 3290621 - RNA, 14 nt, Variola virus
auucaguaaauaga

SEQ ID NO: 3290622 - RNA, 17 nt, Variola virus
augauuuacaaaugguu

SEQ ID NO: 3290623 - RNA, 20 nt, Variola virus
aguaaacauaucauaauauu

SEQ ID NO: 3290624 - RNA, 21 nt, Variola virus
uagaaaugugcuacuaagaua

SEQ ID NO: 3290625 - RNA, 17 nt, Variola virus
agcauuguuauguauuu

SEQ ID NO: 3290626 - RNA, 21 nt, Variola virus
gcacguaucuaaaguauuucu

SEQ ID NO: 3290627 - RNA, 15 nt, Variola virus
cuauuucuauuucua

SEQ ID NO: 3290628 - RNA, 17 nt, Variola virus
ccaaucauugauaucuu

SEQ ID NO: 3290629 - RNA, 21 nt, Variola virus
agucaugcuuauugauaaaga

SEQ ID NO: 3290630 - RNA, 15 nt, Variola virus
gccggcagucacauc

SEQ ID NO: 3290631 - RNA, 19 nt, Variola virus
auuccuaccaaacaaaauu

SEQ ID NO: 3290632 - RNA, 20 nt, Variola virus
gucuaaagaugacugauauu

SEQ ID NO: 3290633 - RNA, 20 nt, Variola virus
acaccaaccuguauacugua

SEQ ID NO: 3290634 - RNA, 20 nt, Variola virus
cuuaaucauauucuuaugaa

SEQ ID NO: 3290635 - RNA, 15 nt, Variola virus
augauaaaaacaaua

SEQ ID NO: 3290636 - RNA, 17 nt, Variola virus
augucugucauauguau

SEQ ID NO: 3290637 - RNA, 23 nt, Variola virus
acuuaggaguuagaauuuauaga

SEQ ID NO: 3290638 - RNA, 11 nt, Variola virus
cucuuaggaag

SEQ ID NO: 3290639 - RNA, 21 nt, Variola virus
ccauaaaacaaaaucuaacag

SEQ ID NO: 3290640 - RNA, 13 nt, Variola virus
uuaagagauaucu

SEQ ID NO: 3290641 - RNA, 22 nt, Variola virus
uuaaacgaauuaaaauuauuua

SEQ ID NO: 3290642 - RNA, 21 nt, Variola virus
auauguuuuaauauuuacaag

SEQ ID NO: 3290643 - RNA, 17 nt, Variola virus
uuuucaguuaucaucua

SEQ ID NO: 3290644 - RNA, 15 nt, Variola virus
accgaaauuaucacu

SEQ ID NO: 3290645 - RNA, 20 nt, Variola virus
uuaucagaagauggauggau

SEQ ID NO: 3290646 - RNA, 15 nt, Variola virus
aaucguauaaauacu

SEQ ID NO: 3290647 - RNA, 16 nt, Variola virus
aacuguugugaauauu

SEQ ID NO: 3290648 - RNA, 16 nt, Variola virus
aguuugagauuucaua

SEQ ID NO: 3290649 - RNA, 13 nt, Variola virus
augucauuuguau

SEQ ID NO: 3290650 - RNA, 18 nt, Variola virus
uaaauuuacgaauuaaga

SEQ ID NO: 3290651 - RNA, 16 nt, Variola virus
gaauacauuuauugca

SEQ ID NO: 3290652 - RNA, 16 nt, Variola virus
aaguacaucaucugaa

SEQ ID NO: 3290653 - RNA, 12 nt, Variola virus
gcuaacaucaua

SEQ ID NO: 3290654 - RNA, 12 nt, Variola virus
aguuucuagaua

SEQ ID NO: 3290655 - RNA, 15 nt, Variola virus
aucucgccaaaauau

SEQ ID NO: 3290656 - RNA, 15 nt, Variola virus
uacuaguuccaacau

SEQ ID NO: 3290657 - RNA, 17 nt, Variola virus
ugcacguuuacauaucu

SEQ ID NO: 3290658 - RNA, 17 nt, Variola virus
guaguugcguauuucuc

SEQ ID NO: 3290659 - RNA, 17 nt, Variola virus
ucgauaacacauuuuca

SEQ ID NO: 3290660 - RNA, 13 nt, Variola virus
uuucaaauaccag

SEQ ID NO: 3290661 - RNA, 23 nt, Variola virus
uaagaucuggguauuucuuuucu

SEQ ID NO: 3290662 - RNA, 15 nt, Variola virus
ugaauuuaccagaua

SEQ ID NO: 3290663 - RNA, 16 nt, Variola virus
uagauauaacuucugg

SEQ ID NO: 3290664 - RNA, 15 nt, Variola virus
auaaacgacauaaua

SEQ ID NO: 3290665 - RNA, 21 nt, Variola virus
auaacucauuuuuugaauaua

SEQ ID NO: 3290666 - RNA, 15 nt, Variola virus
aggaauuaauuauuc

SEQ ID NO: 3290667 - RNA, 21 nt, Variola virus
uggauaaugguacucuagaau

SEQ ID NO: 3290668 - RNA, 13 nt, Variola virus
aucuaauacaaaa

SEQ ID NO: 3290669 - RNA, 11 nt, Variola virus
aaaacauaaua

SEQ ID NO: 3290670 - RNA, 14 nt, Variola virus
ucuuuaucucuuag

SEQ ID NO: 3290671 - RNA, 16 nt, Variola virus
gauuguugccguaaau

SEQ ID NO: 3290672 - RNA, 22 nt, Variola virus
auauaaaauagaaaauaacaga

SEQ ID NO: 3290673 - RNA, 18 nt, Variola virus
aguuaaguuuuuuaagaa

SEQ ID NO: 3290674 - RNA, 16 nt, Variola virus
uaagauuuuaaaugua

SEQ ID NO: 3290675 - RNA, 18 nt, Variola virus
uauucuggacuagcgaua

SEQ ID NO: 3290676 - RNA, 17 nt, Variola virus
auauuucuaguuuguaa

SEQ ID NO: 3290677 - RNA, 19 nt, Variola virus
acgagaauacguaauaauu

SEQ ID NO: 3290678 - RNA, 14 nt, Variola virus
ucccaaauaucuuu

SEQ ID NO: 3290679 - RNA, 17 nt, Variola virus
uuagaauacuaaauuga

SEQ ID NO: 3290680 - RNA, 19 nt, Variola virus
acuaucuuuuuaggaaugu

SEQ ID NO: 3290681 - RNA, 20 nt, Variola virus
uucuauaccaauauuauucu

SEQ ID NO: 3290682 - RNA, 16 nt, Variola virus
aucagcugaaaaacua

SEQ ID NO: 3290683 - RNA, 19 nt, Variola virus
guaaacuucgcguauacag

SEQ ID NO: 3290684 - RNA, 13 nt, Variola virus
guguuuaaucuuc

SEQ ID NO: 3290685 - RNA, 16 nt, Variola virus
cgaauauauaaaagac

SEQ ID NO: 3290686 - RNA, 13 nt, Variola virus
uuaacuauuuuag

SEQ ID NO: 3290687 - RNA, 21 nt, Variola virus
aucuaacaucuugauuaauaa

SEQ ID NO: 3290688 - RNA, 21 nt, Variola virus
accaucguacucuacagcaua

SEQ ID NO: 3290689 - RNA, 18 nt, Variola virus
caauguacaccguguggu

SEQ ID NO: 3290690 - RNA, 17 nt, Variola virus
gauggauaaagauauau

SEQ ID NO: 3290691 - RNA, 18 nt, Variola virus
gaacuaauccacauauga

SEQ ID NO: 3290692 - RNA, 14 nt, Variola virus
guuugauaaaugua

SEQ ID NO: 3290693 - RNA, 14 nt, Variola virus
uuaucacauacuag

SEQ ID NO: 3290694 - RNA, 15 nt, Variola virus
uuugagaacaucgau

SEQ ID NO: 3290695 - RNA, 22 nt, Variola virus
acagugcaaccucuauuggaua

SEQ ID NO: 3290696 - RNA, 19 nt, Variola virus
aggauaaaauauuauccaa

SEQ ID NO: 3290697 - RNA, 22 nt, Variola virus
uuaaaagaauuacuuagucugu

SEQ ID NO: 3290698 - RNA, 18 nt, Variola virus
agaauauacuuuguguuu

SEQ ID NO: 3290699 - RNA, 21 nt, Variola virus
gacguauaagucuauuugaaa

SEQ ID NO: 3290700 - RNA, 12 nt, Variola virus
cucguccuuggu

SEQ ID NO: 3290701 - RNA, 15 nt, Variola virus
cagagcuugcucuau

SEQ ID NO: 3290702 - RNA, 13 nt, Variola virus
gcgccaaauugug

SEQ ID NO: 3290703 - RNA, 20 nt, Variola virus
cuucuaucuuguuuagauuu

SEQ ID NO: 3290704 - RNA, 20 nt, Variola virus
acuaucguuggaaaaugaug

SEQ ID NO: 3290705 - RNA, 14 nt, Variola virus
acaaaugauaauca

SEQ ID NO: 3290706 - RNA, 19 nt, Variola virus
ugacggauaaaacaaaaau

SEQ ID NO: 3290707 - RNA, 17 nt, Variola virus
gaccaauuuauuacuug

SEQ ID NO: 3290708 - RNA, 14 nt, Variola virus
gaccuuuuccuuau

SEQ ID NO: 3290709 - RNA, 18 nt, Variola virus
gcaaaucuaguaaaucaa

SEQ ID NO: 3290710 - RNA, 18 nt, Variola virus
uaauuguccuauaugucg

SEQ ID NO: 3290711 - RNA, 23 nt, Variola virus
gauagcugauacguuauaaaggu

SEQ ID NO: 3290712 - RNA, 20 nt, Variola virus
acuggagccauugucuuaac

SEQ ID NO: 3290713 - RNA, 21 nt, Variola virus
auaggauuaaaaauaaaguua

SEQ ID NO: 3290714 - RNA, 17 nt, Variola virus
uuucuguaucuaucaac

SEQ ID NO: 3290715 - RNA, 14 nt, Variola virus
uguguaaaaaguuu

SEQ ID NO: 3290716 - RNA, 15 nt, Variola virus
auuuuaauauugaaa

SEQ ID NO: 3290717 - RNA, 17 nt, Variola virus
uaguaacugacuuaaua

SEQ ID NO: 3290718 - RNA, 21 nt, Variola virus
uaacuuuuucuuucucagcau

SEQ ID NO: 3290719 - RNA, 22 nt, Variola virus
agcauacgccaaauaucucaaa

SEQ ID NO: 3290720 - RNA, 21 nt, Variola virus
caaauaaagcgaaaaauaauu

SEQ ID NO: 3290721 - RNA, 16 nt, Variola virus
aaucauauuuagaaaa

SEQ ID NO: 3290722 - RNA, 15 nt, Variola virus
cuugaauucuuuuau

SEQ ID NO: 3290723 - RNA, 18 nt, Variola virus
auucagaacacacuuuuc

SEQ ID NO: 3290724 - RNA, 23 nt, Variola virus
guauaacaugacauuuauucauc

SEQ ID NO: 3290725 - RNA, 20 nt, Variola virus
cauuuucccaaauaucuuua

SEQ ID NO: 3290726 - RNA, 15 nt, Variola virus
uauauccuuuuguau

SEQ ID NO: 3290727 - RNA, 18 nt, Variola virus
auaacguauuaaauauua

SEQ ID NO: 3290728 - RNA, 21 nt, Variola virus
accuguagaucuuaucuaucc

SEQ ID NO: 3290729 - RNA, 18 nt, Variola virus
auaacuucuagauguaga

SEQ ID NO: 3290730 - RNA, 19 nt, Variola virus
aauguuagagacggaaaua

SEQ ID NO: 3290731 - RNA, 16 nt, Variola virus
aaacucgcuuaauauc

SEQ ID NO: 3290732 - RNA, 15 nt, Variola virus
aaacuuuauuaucca

SEQ ID NO: 3290733 - RNA, 21 nt, Variola virus
gugaauguauucacuuaacaa

SEQ ID NO: 3290734 - RNA, 18 nt, Variola virus
aauguuacaacugacaau

SEQ ID NO: 3290735 - RNA, 20 nt, Variola virus
gaccaauuacugauaaugua

SEQ ID NO: 3290736 - RNA, 21 nt, Variola virus
caucuuggggaaauauggaag

SEQ ID NO: 3290737 - RNA, 16 nt, Variola virus
aucccauauaauacag

SEQ ID NO: 3290738 - RNA, 18 nt, Variola virus
ucaaaagacguuguacaa

SEQ ID NO: 3290739 - RNA, 16 nt, Variola virus
caagucccaaauggag

SEQ ID NO: 3290740 - RNA, 20 nt, Variola virus
auugguucuuuaccagaaaa

SEQ ID NO: 3290741 - RNA, 21 nt, Variola virus
cugaaauggugguaaaacuaa

SEQ ID NO: 3290742 - RNA, 23 nt, Variola virus
gauaccaauaaguuuuagauauu

SEQ ID NO: 3290743 - RNA, 22 nt, Variola virus
uucuacuaugcaauuaccaaaa

SEQ ID NO: 3290744 - RNA, 19 nt, Variola virus
ucuacgauuuuuacaaaag

SEQ ID NO: 3290745 - RNA, 13 nt, Variola virus
cauaauuacagaa

SEQ ID NO: 3290746 - RNA, 22 nt, Variola virus
uaccgcuaguacccuuaaucau

SEQ ID NO: 3290747 - RNA, 20 nt, Variola virus
aaacgacauacuauauguaa

SEQ ID NO: 3290748 - RNA, 14 nt, Variola virus
augcgauucaaaaa

SEQ ID NO: 3290749 - RNA, 14 nt, Variola virus
gucauuauauacuc

SEQ ID NO: 3290750 - RNA, 14 nt, Variola virus
uagaaaucaacaau

SEQ ID NO: 3290751 - RNA, 21 nt, Variola virus
ucaaaaaacaauuuauucaga

SEQ ID NO: 3290752 - RNA, 13 nt, Variola virus
guuuuuuauucau

SEQ ID NO: 3290753 - RNA, 21 nt, Variola virus
uggcguguggauuugguaaga

SEQ ID NO: 3290754 - RNA, 21 nt, Variola virus
uagauuaugaagaauacucua

SEQ ID NO: 3290755 - RNA, 23 nt, Variola virus
cauacaaaaauauauuauuuuua

SEQ ID NO: 3290756 - RNA, 17 nt, Variola virus
cauuauuuuuuuggaau

SEQ ID NO: 3290757 - RNA, 20 nt, Variola virus
auauagauuuuuuaaaggau

SEQ ID NO: 3290758 - RNA, 12 nt, Variola virus
uuaccuauucac

SEQ ID NO: 3290759 - RNA, 14 nt, Variola virus
uauacgaauacuau

SEQ ID NO: 3290760 - RNA, 12 nt, Variola virus
caauuaaaucaa

SEQ ID NO: 3290761 - RNA, 19 nt, Variola virus
uagauugguacgaaauaua

SEQ ID NO: 3290762 - RNA, 19 nt, Variola virus
cugauuaacccaucaucua

SEQ ID NO: 3290763 - RNA, 14 nt, Variola virus
cauacuacuauuau

SEQ ID NO: 3290764 - RNA, 16 nt, Variola virus
ggaguaucuauuuuaa

SEQ ID NO: 3290765 - RNA, 14 nt, Variola virus
cacugagaaacagc

SEQ ID NO: 3290766 - RNA, 22 nt, Variola virus
cuauucuaacucacguuaauaa

SEQ ID NO: 3290767 - RNA, 20 nt, Variola virus
uaagacguaucuccauaaag

SEQ ID NO: 3290768 - RNA, 19 nt, Variola virus
agauugaaugccauuuacg

SEQ ID NO: 3290769 - RNA, 12 nt, Variola virus
gcaauaauacaa

SEQ ID NO: 3290770 - RNA, 16 nt, Variola virus
guuuaauuuucacaag

SEQ ID NO: 3290771 - RNA, 18 nt, Variola virus
auuuuauaugucaaccau

SEQ ID NO: 3290772 - RNA, 15 nt, Variola virus
auuucacaaauggau

SEQ ID NO: 3290773 - RNA, 17 nt, Variola virus
uacgaagacagacauac

SEQ ID NO: 3290774 - RNA, 19 nt, Variola virus
uauuguggcgccuuauaua

SEQ ID NO: 3290775 - RNA, 13 nt, Variola virus
aaucugaaaaugu

SEQ ID NO: 3290776 - RNA, 14 nt, Variola virus
uaacaaaauuaaag

SEQ ID NO: 3290777 - RNA, 22 nt, Variola virus
uaaauguuucgauuucaauuua

SEQ ID NO: 3290778 - RNA, 21 nt, Variola virus
uagacaaugcuaauauauucu

SEQ ID NO: 3290779 - RNA, 17 nt, Variola virus
uaauuuguauauacaua

SEQ ID NO: 3290780 - RNA, 17 nt, Variola virus
auucagcugaaaugaga

SEQ ID NO: 3290781 - RNA, 16 nt, Variola virus
auacacaugauugaca

SEQ ID NO: 3290782 - RNA, 12 nt, Variola virus
uuagaguauaaa

SEQ ID NO: 3290783 - RNA, 20 nt, Variola virus
auaagaacauaauaauauau

SEQ ID NO: 3290784 - RNA, 16 nt, Variola virus
gguucgauauaaagga

SEQ ID NO: 3290785 - RNA, 14 nt, Variola virus
ccaaauuuaaauac

SEQ ID NO: 3290786 - RNA, 14 nt, Variola virus
cauccauauguuug

SEQ ID NO: 3290787 - RNA, 22 nt, Variola virus
ucaugucugguaauucauauag

SEQ ID NO: 3290788 - RNA, 17 nt, Variola virus
auaaugucugacaagau

SEQ ID NO: 3290789 - RNA, 13 nt, Variola virus
uuaaaucauuaaa

SEQ ID NO: 3290790 - RNA, 13 nt, Variola virus
uuauuagaucuuu

SEQ ID NO: 3290791 - RNA, 20 nt, Variola virus
auuaauaagauuuuuauuau

SEQ ID NO: 3290792 - RNA, 15 nt, Variola virus
auaauacuauauaca

SEQ ID NO: 3290793 - RNA, 15 nt, Variola virus
uuuagcuaauacuaa

SEQ ID NO: 3290794 - RNA, 19 nt, Variola virus
auggagaauguuccuaaug

SEQ ID NO: 3290795 - RNA, 21 nt, Variola virus
uaccuaauacuaaauacauua

SEQ ID NO: 3290796 - RNA, 20 nt, Variola virus
uguagcauuacgcucucugg

SEQ ID NO: 3290797 - RNA, 19 nt, Variola virus
gaaucaguuaauaaauuca

SEQ ID NO: 3290798 - RNA, 14 nt, Variola virus
cucuuucuuuugau

SEQ ID NO: 3290799 - RNA, 16 nt, Variola virus
ccuauacuauguuaua

SEQ ID NO: 3290800 - RNA, 15 nt, Variola virus
cauuuucuaucuuua

SEQ ID NO: 3290801 - RNA, 20 nt, Variola virus
uuauuaacaaauuuuuugaa

SEQ ID NO: 3290802 - RNA, 16 nt, Variola virus
uuuccuuuuauugcuu

SEQ ID NO: 3290803 - RNA, 13 nt, Variola virus
aucuaaaaaacua

SEQ ID NO: 3290804 - RNA, 15 nt, Variola virus
caaaacuauuucaga

SEQ ID NO: 3290805 - RNA, 14 nt, Variola virus
auauucuguugugu

SEQ ID NO: 3290806 - RNA, 17 nt, Variola virus
ugcagauaucguucuua

SEQ ID NO: 3290807 - RNA, 19 nt, Variola virus
uuaaccuuuuuaguaaaug

SEQ ID NO: 3290808 - RNA, 19 nt, Variola virus
gcguucaagauuaucuuua

SEQ ID NO: 3290809 - RNA, 17 nt, Variola virus
ucuuuuucauuaacuag

SEQ ID NO: 3290810 - RNA, 14 nt, Variola virus
agagauuauaugau

SEQ ID NO: 3290811 - RNA, 16 nt, Variola virus
uagaagccaauaucug

SEQ ID NO: 3290812 - RNA, 18 nt, Variola virus
uuuuaaaaaucauaacag

SEQ ID NO: 3290813 - RNA, 16 nt, Variola virus
aucaucuauaugacug

SEQ ID NO: 3290814 - RNA, 14 nt, Variola virus
caaccggauuuaaa

SEQ ID NO: 3290815 - RNA, 17 nt, Variola virus
aauguaaucauauaaau

SEQ ID NO: 3290816 - RNA, 15 nt, Variola virus
cacuuggauauugua

SEQ ID NO: 3290817 - RNA, 22 nt, Variola virus
ucaaucguuuaaaguaaacuuc

SEQ ID NO: 3290818 - RNA, 15 nt, Variola virus
uauacuuuaaagcaa

SEQ ID NO: 3290819 - RNA, 14 nt, Variola virus
ucaagucaauuauc

SEQ ID NO: 3290820 - RNA, 14 nt, Variola virus
uaaaauuuagcauu

SEQ ID NO: 3290821 - RNA, 19 nt, Variola virus
uacuaauuacuaaaucugu

SEQ ID NO: 3290822 - RNA, 14 nt, Variola virus
cauaaaauuuaaga

SEQ ID NO: 3290823 - RNA, 22 nt, Variola virus
acauaaauaauucuagaggaga

SEQ ID NO: 3290824 - RNA, 20 nt, Variola virus
acaauaguucagauaaugua

SEQ ID NO: 3290825 - RNA, 17 nt, Variola virus
agcacaugaagaaaaac

SEQ ID NO: 3290826 - RNA, 22 nt, Variola virus
uccauggaaaagauaaaguuuu

SEQ ID NO: 3290827 - RNA, 15 nt, Variola virus
cuacacuaaaaugau

SEQ ID NO: 3290828 - RNA, 16 nt, Variola virus
auacaccgaacaucca

SEQ ID NO: 3290829 - RNA, 16 nt, Variola virus
ccauugaugaauuccu

SEQ ID NO: 3290830 - RNA, 21 nt, Variola virus
uaauaaggaaggcgucaaaau

SEQ ID NO: 3290831 - RNA, 21 nt, Variola virus
gauacacuagacauuuuuuaa

SEQ ID NO: 3290832 - RNA, 21 nt, Variola virus
agaagagucauuaaaauaugc

SEQ ID NO: 3290833 - RNA, 14 nt, Variola virus
auuaaaaaaucacu

SEQ ID NO: 3290834 - RNA, 17 nt, Variola virus
uauccagauccuuuucu

SEQ ID NO: 3290835 - RNA, 11 nt, Variola virus
uuaaauuauug

SEQ ID NO: 3290836 - RNA, 12 nt, Variola virus
guacaaucagau

SEQ ID NO: 3290837 - RNA, 17 nt, Variola virus
ccugccauuuuagagau

SEQ ID NO: 3290838 - RNA, 16 nt, Variola virus
uguacauauuuguaca

SEQ ID NO: 3290839 - RNA, 19 nt, Variola virus
acaguacauaguauugaca

SEQ ID NO: 3290840 - RNA, 22 nt, Variola virus
gauucuguguauaaaaacagaa

SEQ ID NO: 3290841 - RNA, 19 nt, Variola virus
augauaaaaacacguuuau

SEQ ID NO: 3290842 - RNA, 16 nt, Variola virus
gaaguuaaacugugaa

SEQ ID NO: 3290843 - RNA, 14 nt, Variola virus
uauucuauuucgaa

SEQ ID NO: 3290844 - RNA, 19 nt, Variola virus
uuaguaaggcuuuagaaac

SEQ ID NO: 3290845 - RNA, 23 nt, Variola virus
acacaaguugauaaaauguugau

SEQ ID NO: 3290846 - RNA, 11 nt, Variola virus
aacaguuuauu

SEQ ID NO: 3290847 - RNA, 17 nt, Variola virus
aauauaaaaaaaugauu

SEQ ID NO: 3290848 - RNA, 12 nt, Variola virus
cuuugcuauuuc

SEQ ID NO: 3290849 - RNA, 22 nt, Variola virus
gcuuccaggcuaucaaauggau

SEQ ID NO: 3290850 - RNA, 18 nt, Variola virus
aaaauuauugauauguau

SEQ ID NO: 3290851 - RNA, 16 nt, Variola virus
acauaucuaaaugaau

SEQ ID NO: 3290852 - RNA, 16 nt, Variola virus
guagucaauaaaagag

SEQ ID NO: 3290853 - RNA, 18 nt, Variola virus
uacuugauaagauaaaau

SEQ ID NO: 3290854 - RNA, 22 nt, Variola virus
auuuggucauaauagaauguau

SEQ ID NO: 3290855 - RNA, 17 nt, Variola virus
auagauuuuccauccac

SEQ ID NO: 3290856 - RNA, 19 nt, Variola virus
aacauuaauacaaacgaua

SEQ ID NO: 3290857 - RNA, 17 nt, Variola virus
aacagcauuucugucaa

SEQ ID NO: 3290858 - RNA, 15 nt, Variola virus
aucagauuauuuaac

SEQ ID NO: 3290859 - RNA, 14 nt, Variola virus
auaccgauuuuaca

SEQ ID NO: 3290860 - RNA, 15 nt, Variola virus
uauucacuuaacaau

SEQ ID NO: 3290861 - RNA, 22 nt, Variola virus
auauuuuuuaucuaaaaaacua

SEQ ID NO: 3290862 - RNA, 17 nt, Variola virus
cuacuggugaaauguga

SEQ ID NO: 3290863 - RNA, 17 nt, Variola virus
acaauuuauucagagag

SEQ ID NO: 3290864 - RNA, 24 nt, Variola virus
uuuuguggauuaguguacucucuu

SEQ ID NO: 3290865 - RNA, 13 nt, Variola virus
cuguuauuuugaa

SEQ ID NO: 3290866 - RNA, 20 nt, Variola virus
acuaugccaagcguaugcug

SEQ ID NO: 3290867 - RNA, 19 nt, Variola virus
agacaaauggucaaugaua

SEQ ID NO: 3290868 - RNA, 17 nt, Variola virus
agaacacacuuuucuca

SEQ ID NO: 3290869 - RNA, 23 nt, Variola virus
auauuauugggugguaaacuaga

SEQ ID NO: 3290870 - RNA, 22 nt, Variola virus
aaacucuuuuauagagaaaugu

SEQ ID NO: 3290871 - RNA, 20 nt, Variola virus
uuuguccacguucuuuaauu

SEQ ID NO: 3290872 - RNA, 17 nt, Variola virus
gaguuauuaagaaauac

SEQ ID NO: 3290873 - RNA, 12 nt, Variola virus
auaaaacuauau

SEQ ID NO: 3290874 - RNA, 18 nt, Variola virus
caucuuggaaacauaaaa

SEQ ID NO: 3290875 - RNA, 22 nt, Variola virus
aucggaacacuugguaguugaa

SEQ ID NO: 3290876 - RNA, 14 nt, Variola virus
ugauauuguuacag

SEQ ID NO: 3290877 - RNA, 20 nt, Variola virus
uaucuuauauacacauaauu

SEQ ID NO: 3290878 - RNA, 18 nt, Variola virus
aauaguuauuacuuuucu

SEQ ID NO: 3290879 - RNA, 17 nt, Variola virus
acacucgacacaauauu

SEQ ID NO: 3290880 - RNA, 14 nt, Variola virus
auacuauguuauau

SEQ ID NO: 3290881 - RNA, 21 nt, Variola virus
uuuuaauauaauacuuaaaaa

SEQ ID NO: 3290882 - RNA, 16 nt, Variola virus
ggaaccucgagaaugu

SEQ ID NO: 3290883 - RNA, 14 nt, Variola virus
ucuagauguagaag

SEQ ID NO: 3290884 - RNA, 12 nt, Variola virus
gcacuauuucua

SEQ ID NO: 3290885 - RNA, 20 nt, Variola virus
caacaagucaaaacauaaua

SEQ ID NO: 3290886 - RNA, 23 nt, Variola virus
agguguuccggagaaucaguaaa

SEQ ID NO: 3290887 - RNA, 16 nt, Variola virus
ccauggaaaaauauua

SEQ ID NO: 3290888 - RNA, 22 nt, Variola virus
uggauauucgauaacagcauuu

SEQ ID NO: 3290889 - RNA, 21 nt, Variola virus
cuccgcaauacauuucucaaa

SEQ ID NO: 3290890 - RNA, 20 nt, Variola virus
augaauuacuaaaauauaca

SEQ ID NO: 3290891 - RNA, 20 nt, Variola virus
gagauccugcauagaaauau

SEQ ID NO: 3290892 - RNA, 16 nt, Variola virus
uaugauggguggauau

SEQ ID NO: 3290893 - RNA, 19 nt, Variola virus
auucagaguccucuaauug

SEQ ID NO: 3290894 - RNA, 19 nt, Variola virus
guaaaauuccuaaauuagu

SEQ ID NO: 3290895 - RNA, 19 nt, Variola virus
aucaauuuuaaagguauaa

SEQ ID NO: 3290896 - RNA, 12 nt, Variola virus
agaacaaaauaa

SEQ ID NO: 3290897 - RNA, 23 nt, Variola virus
acucuacaaggaauugaugaagu

SEQ ID NO: 3290898 - RNA, 13 nt, Variola virus
acaacaaucuaua

SEQ ID NO: 3290899 - RNA, 15 nt, Variola virus
uuauauaaaacauuu

SEQ ID NO: 3290900 - RNA, 13 nt, Variola virus
uacaauaaauguu

SEQ ID NO: 3290901 - RNA, 13 nt, Variola virus
cucuuaaaaauug

SEQ ID NO: 3290902 - RNA, 20 nt, Variola virus
cucuggguaacaaacauacu

SEQ ID NO: 3290903 - RNA, 20 nt, Variola virus
cuugagacuugauagauauu

SEQ ID NO: 3290904 - RNA, 21 nt, Variola virus
acuaucacuguagaaaaauuu

SEQ ID NO: 3290905 - RNA, 11 nt, Variola virus
auggucucaca

SEQ ID NO: 3290906 - RNA, 16 nt, Variola virus
acuuuuguccuaaaau

SEQ ID NO: 3290907 - RNA, 14 nt, Variola virus
agaugaccauagau

SEQ ID NO: 3290908 - RNA, 16 nt, Variola virus
uaaauggaacagacau

SEQ ID NO: 3290909 - RNA, 18 nt, Variola virus
ccuacaggaauaucuuua

SEQ ID NO: 3290910 - RNA, 18 nt, Variola virus
auuugaaauucuaucucu

SEQ ID NO: 3290911 - RNA, 16 nt, Variola virus
auucuucccaugaaug

SEQ ID NO: 3290912 - RNA, 20 nt, Variola virus
aaguaaaagauuuauaaugu

SEQ ID NO: 3290913 - RNA, 16 nt, Variola virus
auucuuagucaaugga

SEQ ID NO: 3290914 - RNA, 17 nt, Variola virus
uuuacuuuaucuauuca

SEQ ID NO: 3290915 - RNA, 16 nt, Variola virus
aaagauuguguagaaa

SEQ ID NO: 3290916 - RNA, 13 nt, Variola virus
gcaaagagaugau

SEQ ID NO: 3290917 - RNA, 19 nt, Variola virus
uaaagaaaaaugauugucu

SEQ ID NO: 3290918 - RNA, 22 nt, Variola virus
gauaacagcauuuguguaguuu

SEQ ID NO: 3290919 - RNA, 21 nt, Variola virus
uuccaucaacgauucuagaac

SEQ ID NO: 3290920 - RNA, 16 nt, Variola virus
agucugucuguagaua

SEQ ID NO: 3290921 - RNA, 17 nt, Variola virus
aaacuauaaaacagaua

SEQ ID NO: 3290922 - RNA, 12 nt, Variola virus
uugucagauuca

SEQ ID NO: 3290923 - RNA, 18 nt, Variola virus
uccuguauaugugaauau

SEQ ID NO: 3290924 - RNA, 18 nt, Variola virus
acuauuuagaaauugaaa

SEQ ID NO: 3290925 - RNA, 18 nt, Variola virus
uauauccguucuuaacuu

SEQ ID NO: 3290926 - RNA, 20 nt, Variola virus
auuuuaccuuauuuuuuaua

SEQ ID NO: 3290927 - RNA, 21 nt, Variola virus
uauagacgguaaugucaucau

SEQ ID NO: 3290928 - RNA, 20 nt, Variola virus
agaauauauagguaauacau

SEQ ID NO: 3290929 - RNA, 14 nt, Variola virus
auguuuaucuucuu

SEQ ID NO: 3290930 - RNA, 12 nt, Variola virus
auguucaagcag

SEQ ID NO: 3290931 - RNA, 14 nt, Variola virus
agcauugaaaauac

SEQ ID NO: 3290932 - RNA, 15 nt, Variola virus
uaaauccuuguuuga

SEQ ID NO: 3290933 - RNA, 13 nt, Variola virus
caucgaacuucug

SEQ ID NO: 3290934 - RNA, 20 nt, Variola virus
uauugcuuuccuuuaucauu

SEQ ID NO: 3290935 - RNA, 17 nt, Variola virus
uaccguugugucuacaa

SEQ ID NO: 3290936 - RNA, 22 nt, Variola virus
uuucuugagaucccacaucauu

SEQ ID NO: 3290937 - RNA, 14 nt, Variola virus
cacuucucuaucaa

SEQ ID NO: 3290938 - RNA, 12 nt, Variola virus
gugggaugaugu

SEQ ID NO: 3290939 - RNA, 18 nt, Variola virus
ggaauaaauuauuaucca

SEQ ID NO: 3290940 - RNA, 18 nt, Variola virus
uacuaauacuaauacuaa

SEQ ID NO: 3290941 - RNA, 21 nt, Variola virus
aauagcaaaauuuuuacuauu

SEQ ID NO: 3290942 - RNA, 22 nt, Variola virus
acuuuuucuagaaaaaaaauug

SEQ ID NO: 3290943 - RNA, 20 nt, Variola virus
gcacuacuguuaagaaugau

SEQ ID NO: 3290944 - RNA, 17 nt, Variola virus
cuuauacaggucauuac

SEQ ID NO: 3290945 - RNA, 20 nt, Variola virus
caaaauaguaaaguaacgau

SEQ ID NO: 3290946 - RNA, 16 nt, Variola virus
acaucauaaaaugagu

SEQ ID NO: 3290947 - RNA, 14 nt, Variola virus
auguuaaaaaugac

SEQ ID NO: 3290948 - RNA, 20 nt, Variola virus
guaauuucacgaauuugaua

SEQ ID NO: 3290949 - RNA, 17 nt, Variola virus
aaauuguccuauauaau

SEQ ID NO: 3290950 - RNA, 19 nt, Variola virus
agauagauuuccaaagaua

SEQ ID NO: 3290951 - RNA, 13 nt, Variola virus
uugaugcaucuua

SEQ ID NO: 3290952 - RNA, 16 nt, Variola virus
uaaauacauuaucaug

SEQ ID NO: 3290953 - RNA, 15 nt, Variola virus
acaccaauagaugau

SEQ ID NO: 3290954 - RNA, 14 nt, Variola virus
agugguuaaucuua

SEQ ID NO: 3290955 - RNA, 18 nt, Variola virus
ggcuagucaagaugauga

SEQ ID NO: 3290956 - RNA, 20 nt, Variola virus
cuuuaguaaaguugucuaua

SEQ ID NO: 3290957 - RNA, 20 nt, Variola virus
auagaacgaaguaaaaaguu

SEQ ID NO: 3290958 - RNA, 15 nt, Variola virus
ucauuuggagaguau

SEQ ID NO: 3290959 - RNA, 19 nt, Variola virus
acggagauacaucuucaau

SEQ ID NO: 3290960 - RNA, 15 nt, Variola virus
gcaacaaguauacaa

SEQ ID NO: 3290961 - RNA, 18 nt, Variola virus
auugcacaauccaaacuu

SEQ ID NO: 3290962 - RNA, 15 nt, Variola virus
gaauuuucuaacgaa

SEQ ID NO: 3290963 - RNA, 19 nt, Variola virus
uuaaaaaaauaaaaaugaa

SEQ ID NO: 3290964 - RNA, 21 nt, Variola virus
uuuaccgacaccuguuucaug

SEQ ID NO: 3290965 - RNA, 17 nt, Variola virus
uauucgagaugaacauu

SEQ ID NO: 3290966 - RNA, 18 nt, Variola virus
gaugaggugguugcagaa

SEQ ID NO: 3290967 - RNA, 20 nt, Variola virus
aaauaacauauagauuuuau

SEQ ID NO: 3290968 - RNA, 18 nt, Variola virus
aaugcauuuuauaccgaa

SEQ ID NO: 3290969 - RNA, 15 nt, Variola virus
acuaaaagacauaau

SEQ ID NO: 3290970 - RNA, 17 nt, Variola virus
uuauccaaaauauuaau

SEQ ID NO: 3290971 - RNA, 22 nt, Variola virus
gucuacaaauagagauaaaaca

SEQ ID NO: 3290972 - RNA, 16 nt, Variola virus
guguuaucuuagauau

SEQ ID NO: 3290973 - RNA, 17 nt, Variola virus
agcuauguuuacggcug

SEQ ID NO: 3290974 - RNA, 11 nt, Variola virus
agauuuaagaa

SEQ ID NO: 3290975 - RNA, 17 nt, Variola virus
aacgaaguauuuauacu

SEQ ID NO: 3290976 - RNA, 22 nt, Variola virus
auaugacuauuuucacauguac

SEQ ID NO: 3290977 - RNA, 22 nt, Variola virus
caaauuccuacuuacagaagau

SEQ ID NO: 3290978 - RNA, 18 nt, Variola virus
uuaaagucuucuauuucu

SEQ ID NO: 3290979 - RNA, 19 nt, Variola virus
ucuacuuacuggaaaauag

SEQ ID NO: 3290980 - RNA, 17 nt, Variola virus
uuuuacaauuucaucca

SEQ ID NO: 3290981 - RNA, 19 nt, Variola virus
auaguuaucuaucuuaaag

SEQ ID NO: 3290982 - RNA, 19 nt, Variola virus
uuaaugcccaauuuggaua

SEQ ID NO: 3290983 - RNA, 21 nt, Variola virus
ugaguaucggagcuacauuac

SEQ ID NO: 3290984 - RNA, 23 nt, Variola virus
gaucuccucuaucuguacuaucu

SEQ ID NO: 3290985 - RNA, 12 nt, Variola virus
uaaauucaagau

SEQ ID NO: 3290986 - RNA, 23 nt, Variola virus
gauuaaugcuacagauauuauca

SEQ ID NO: 3290987 - RNA, 23 nt, Variola virus
ccaugagauuguagaagcuuugg

SEQ ID NO: 3290988 - RNA, 20 nt, Variola virus
guguaguucuguucuaucau

SEQ ID NO: 3290989 - RNA, 14 nt, Variola virus
acacugauucagaa

SEQ ID NO: 3290990 - RNA, 13 nt, Variola virus
aagauuuguagaa

SEQ ID NO: 3290991 - RNA, 16 nt, Variola virus
gaaucggauaguuuaa

SEQ ID NO: 3290992 - RNA, 22 nt, Variola virus
agaagguuucgauuaucuguau

SEQ ID NO: 3290993 - RNA, 15 nt, Variola virus
uauaguggauccauu

SEQ ID NO: 3290994 - RNA, 17 nt, Variola virus
agaaauaagagacuuaa

SEQ ID NO: 3290995 - RNA, 17 nt, Variola virus
auuguauauacuuagau

SEQ ID NO: 3290996 - RNA, 18 nt, Variola virus
aucauuaauuaauacaau

SEQ ID NO: 3290997 - RNA, 16 nt, Variola virus
guauuauccaauacag

SEQ ID NO: 3290998 - RNA, 13 nt, Variola virus
aagucaaaugauu

SEQ ID NO: 3290999 - RNA, 15 nt, Variola virus
aaacaauguauacaa

SEQ ID NO: 3291000 - RNA, 14 nt, Variola virus
guguucuauacguc

SEQ ID NO: 3291001 - RNA, 16 nt, Variola virus
aaguuuggaugucuua

SEQ ID NO: 3291002 - RNA, 23 nt, Variola virus
aaaacagaauaugagaaugaaua

SEQ ID NO: 3291003 - RNA, 19 nt, Variola virus
auauuugagaguauuggua

SEQ ID NO: 3291004 - RNA, 20 nt, Variola virus
uauagauggcuuguauguca

SEQ ID NO: 3291005 - RNA, 14 nt, Variola virus
auauuuuacagcca

SEQ ID NO: 3291006 - RNA, 15 nt, Variola virus
acguuggcacaugau

SEQ ID NO: 3291007 - RNA, 20 nt, Variola virus
cauguguauuacaugcaucu

SEQ ID NO: 3291008 - RNA, 22 nt, Variola virus
gucucaugaccguguaugaaau

SEQ ID NO: 3291009 - RNA, 19 nt, Variola virus
uaguauuauucauuuucua

SEQ ID NO: 3291010 - RNA, 15 nt, Variola virus
guuccauuacaaaua

SEQ ID NO: 3291011 - RNA, 14 nt, Variola virus
augaguuaauguau

SEQ ID NO: 3291012 - RNA, 18 nt, Variola virus
uauaacaugcuaaaccuu

SEQ ID NO: 3291013 - RNA, 21 nt, Variola virus
aguacugcuuuuuucgaaaug

SEQ ID NO: 3291014 - RNA, 18 nt, Variola virus
caaauuaaauucuggaau

SEQ ID NO: 3291015 - RNA, 14 nt, Variola virus
auuguuuucaguaa

SEQ ID NO: 3291016 - RNA, 16 nt, Variola virus
guuauaaacgggugua

SEQ ID NO: 3291017 - RNA, 16 nt, Variola virus
acaauccaaaaaauga

SEQ ID NO: 3291018 - RNA, 13 nt, Variola virus
auuagauaaaguu

SEQ ID NO: 3291019 - RNA, 18 nt, Variola virus
cuaucaugucuauucucc

SEQ ID NO: 3291020 - RNA, 14 nt, Variola virus
ggagaauguuuccc

SEQ ID NO: 3291021 - RNA, 17 nt, Variola virus
aaaaguagaaaauauau

SEQ ID NO: 3291022 - RNA, 14 nt, Variola virus
augcaacauuuccu

SEQ ID NO: 3291023 - RNA, 17 nt, Variola virus
gaacuagauauauuaau

SEQ ID NO: 3291024 - RNA, 19 nt, Variola virus
caaagaauuuuagacacua

SEQ ID NO: 3291025 - RNA, 24 nt, Variola virus
gcuacacaaauaccaaucaaaaga

SEQ ID NO: 3291026 - RNA, 20 nt, Variola virus
ugugaauuuagcauauagua

SEQ ID NO: 3291027 - RNA, 19 nt, Variola virus
caacaaguuggaugauauu

SEQ ID NO: 3291028 - RNA, 15 nt, Variola virus
agauaucucuggaua

SEQ ID NO: 3291029 - RNA, 21 nt, Variola virus
gcaucaacaguuacaaaugag

SEQ ID NO: 3291030 - RNA, 16 nt, Variola virus
guuuggauuaauaauu

SEQ ID NO: 3291031 - RNA, 20 nt, Variola virus
ggaugucauagauucuuuaa

SEQ ID NO: 3291032 - RNA, 18 nt, Variola virus
uaacgaauuauauagucu

SEQ ID NO: 3291033 - RNA, 14 nt, Variola virus
uagauauagauguu

SEQ ID NO: 3291034 - RNA, 17 nt, Variola virus
ccacugucacuggaaag

SEQ ID NO: 3291035 - RNA, 21 nt, Variola virus
auuuucuaacgaaacgaugaa

SEQ ID NO: 3291036 - RNA, 15 nt, Variola virus
auauauuaacucaga

SEQ ID NO: 3291037 - RNA, 16 nt, Variola virus
agauaguaaauagaua

SEQ ID NO: 3291038 - RNA, 17 nt, Variola virus
agaguauucuuauguau

SEQ ID NO: 3291039 - RNA, 13 nt, Variola virus
uguugugggaaac

SEQ ID NO: 3291040 - RNA, 15 nt, Variola virus
agauacgucuauaca

SEQ ID NO: 3291041 - RNA, 17 nt, Variola virus
uauucaagucaaagaaa

SEQ ID NO: 3291042 - RNA, 23 nt, Variola virus
gauaguuuuuuucauuacuaucu

SEQ ID NO: 3291043 - RNA, 20 nt, Variola virus
guugagcuaauuuuuguaaa

SEQ ID NO: 3291044 - RNA, 15 nt, Variola virus
uguaaggaaauguuu

SEQ ID NO: 3291045 - RNA, 19 nt, Variola virus
aucuaaacgcguuagauaa

SEQ ID NO: 3291046 - RNA, 12 nt, Variola virus
caaaaaauaaua

SEQ ID NO: 3291047 - RNA, 13 nt, Variola virus
accguacaaguau

SEQ ID NO: 3291048 - RNA, 15 nt, Variola virus
uaauacuaucuggau

SEQ ID NO: 3291049 - RNA, 12 nt, Variola virus
gcgaauauuaaa

SEQ ID NO: 3291050 - RNA, 18 nt, Variola virus
aucauguccauggauaaa

SEQ ID NO: 3291051 - RNA, 14 nt, Variola virus
cagaauaucccaaa

SEQ ID NO: 3291052 - RNA, 17 nt, Variola virus
caugaaacgaacacuau

SEQ ID NO: 3291053 - RNA, 20 nt, Variola virus
uaaguucauuaucugaaaua

SEQ ID NO: 3291054 - RNA, 15 nt, Variola virus
gaaauauauacuuca

SEQ ID NO: 3291055 - RNA, 20 nt, Variola virus
auggauuuaucauaucaugg

SEQ ID NO: 3291056 - RNA, 15 nt, Variola virus
aauauaauaaauaua

SEQ ID NO: 3291057 - RNA, 23 nt, Variola virus
cuaauauucccaaacauacaucu

SEQ ID NO: 3291058 - RNA, 13 nt, Variola virus
agaaggagaagau

SEQ ID NO: 3291059 - RNA, 15 nt, Variola virus
aauaaauguauacau

SEQ ID NO: 3291060 - RNA, 20 nt, Variola virus
aauuacuuaaagauagaaau

SEQ ID NO: 3291061 - RNA, 15 nt, Variola virus
ucacaccuccauuaa

SEQ ID NO: 3291062 - RNA, 17 nt, Variola virus
ucucucauuuaucaaaa

SEQ ID NO: 3291063 - RNA, 16 nt, Variola virus
aauauuuuuuagagaa

SEQ ID NO: 3291064 - RNA, 14 nt, Variola virus
gucuuggaagcaau

SEQ ID NO: 3291065 - RNA, 12 nt, Variola virus
aaacaacucuuc

SEQ ID NO: 3291066 - RNA, 16 nt, Variola virus
agacguuucauaauaa

SEQ ID NO: 3291067 - RNA, 21 nt, Variola virus
cguuaaugaagaacacauauu

SEQ ID NO: 3291068 - RNA, 23 nt, Variola virus
ugccgaacuaaaaaaaauaacuu

SEQ ID NO: 3291069 - RNA, 17 nt, Variola virus
cgaauauaaaucauauu

SEQ ID NO: 3291070 - RNA, 22 nt, Variola virus
ucucuuuuguagaacuuaacuu

SEQ ID NO: 3291071 - RNA, 16 nt, Variola virus
acaccgccucuagaua

SEQ ID NO: 3291072 - RNA, 17 nt, Variola virus
agauuucaaagauguuu

SEQ ID NO: 3291073 - RNA, 22 nt, Variola virus
ugaaucuauuucugucauuaaa

SEQ ID NO: 3291074 - RNA, 22 nt, Variola virus
guauccaguuccuuuucuaguu

SEQ ID NO: 3291075 - RNA, 21 nt, Variola virus
auguaucuuccacaucaaacg

SEQ ID NO: 3291076 - RNA, 13 nt, Variola virus
auguaacgcguau

SEQ ID NO: 3291077 - RNA, 15 nt, Variola virus
uagucuauaugauca

SEQ ID NO: 3291078 - RNA, 11 nt, Variola virus
ugauacugaua

SEQ ID NO: 3291079 - RNA, 16 nt, Variola virus
aagcucuaaauccaaa

SEQ ID NO: 3291080 - RNA, 18 nt, Variola virus
aucaucgaucuaauagau

SEQ ID NO: 3291081 - RNA, 22 nt, Variola virus
aaaaauuauccuaucauguauu

SEQ ID NO: 3291082 - RNA, 17 nt, Variola virus
uuacaaugcucauuaaa

SEQ ID NO: 3291083 - RNA, 18 nt, Variola virus
gaacuggacuguauaucu

SEQ ID NO: 3291084 - RNA, 15 nt, Variola virus
uggaggcucaacaag

SEQ ID NO: 3291085 - RNA, 15 nt, Variola virus
uauuagaaucguguu

SEQ ID NO: 3291086 - RNA, 23 nt, Variola virus
aauguaacguuuauauauucaau

SEQ ID NO: 3291087 - RNA, 19 nt, Variola virus
auaaagaccgaauacauaa

SEQ ID NO: 3291088 - RNA, 23 nt, Variola virus
gucuuauucuuaaaaucuauucc

SEQ ID NO: 3291089 - RNA, 19 nt, Variola virus
uacaucgguaucuagaucu

SEQ ID NO: 3291090 - RNA, 15 nt, Variola virus
ggauuucauauaaga

SEQ ID NO: 3291091 - RNA, 16 nt, Variola virus
uagacuugauuauucu

SEQ ID NO: 3291092 - RNA, 19 nt, Variola virus
aucaggaauguuugcugaa

SEQ ID NO: 3291093 - RNA, 19 nt, Variola virus
auuucaaaauguuaaauca

SEQ ID NO: 3291094 - RNA, 22 nt, Variola virus
uauuacauugugauuaaacauu

SEQ ID NO: 3291095 - RNA, 13 nt, Variola virus
cugaaguuucaua

SEQ ID NO: 3291096 - RNA, 15 nt, Variola virus
uucuuaagacacauu

SEQ ID NO: 3291097 - RNA, 14 nt, Variola virus
ucuaucaaagcuuu

SEQ ID NO: 3291098 - RNA, 17 nt, Variola virus
gaaauagauagaaucua

SEQ ID NO: 3291099 - RNA, 21 nt, Variola virus
cuaaacccgacuuaguuauau

SEQ ID NO: 3291100 - RNA, 23 nt, Variola virus
aauauggagagguguauuuccau

SEQ ID NO: 3291101 - RNA, 18 nt, Variola virus
auucauaguaguugugac

SEQ ID NO: 3291102 - RNA, 17 nt, Variola virus
aucggauacagacacuc

SEQ ID NO: 3291103 - RNA, 18 nt, Variola virus
ucaauauauuaagaaguu

SEQ ID NO: 3291104 - RNA, 18 nt, Variola virus
gauaauuucguuaaaaca

SEQ ID NO: 3291105 - RNA, 14 nt, Variola virus
accauuaaaaauug

SEQ ID NO: 3291106 - RNA, 23 nt, Variola virus
ucagauaacauguuaauuuccga

SEQ ID NO: 3291107 - RNA, 19 nt, Variola virus
cuauaacauuaauaucaaa

SEQ ID NO: 3291108 - RNA, 14 nt, Variola virus
ucaaagaagaaguu

SEQ ID NO: 3291109 - RNA, 19 nt, Variola virus
aaauggaugcgguuauuag

SEQ ID NO: 3291110 - RNA, 16 nt, Variola virus
gucuggcaauaaauga

SEQ ID NO: 3291111 - RNA, 23 nt, Variola virus
auacuucauaaaagaaaauacua

SEQ ID NO: 3291112 - RNA, 23 nt, Variola virus
gaauagcagauagauaaagucuu

SEQ ID NO: 3291113 - RNA, 17 nt, Variola virus
gugauaaguaauaacua

SEQ ID NO: 3291114 - RNA, 13 nt, Variola virus
caacuuaaugaag

SEQ ID NO: 3291115 - RNA, 14 nt, Variola virus
cacacuaaacaguu

SEQ ID NO: 3291116 - RNA, 15 nt, Variola virus
cuuucaguucuggau

SEQ ID NO: 3291117 - RNA, 14 nt, Variola virus
acuuguuggugaaa

SEQ ID NO: 3291118 - RNA, 20 nt, Variola virus
cuaaaauauuuuuauucuca

SEQ ID NO: 3291119 - RNA, 14 nt, Variola virus
gacuaaauacuaca

SEQ ID NO: 3291120 - RNA, 13 nt, Variola virus
aagaagagaauua

SEQ ID NO: 3291121 - RNA, 16 nt, Variola virus
ucaucaaacaacugaa

SEQ ID NO: 3291122 - RNA, 19 nt, Variola virus
uaguuauagguaauacgcu

SEQ ID NO: 3291123 - RNA, 17 nt, Variola virus
aaugugauaauuuccag

SEQ ID NO: 3291124 - RNA, 22 nt, Variola virus
acauugaucuauuauuuaauga

SEQ ID NO: 3291125 - RNA, 20 nt, Variola virus
gaaacccccucauuuuuuaa

SEQ ID NO: 3291126 - RNA, 17 nt, Variola virus
accaaagacuuugaaau

SEQ ID NO: 3291127 - RNA, 17 nt, Variola virus
uacuuuuuaauucucua

SEQ ID NO: 3291128 - RNA, 14 nt, Variola virus
gaaucauuuuugca

SEQ ID NO: 3291129 - RNA, 22 nt, Variola virus
caugauccuauucuaaauggau

SEQ ID NO: 3291130 - RNA, 20 nt, Variola virus
auauuaacgaguuccauuua

SEQ ID NO: 3291131 - RNA, 22 nt, Variola virus
gcaacgaauaacaaaauacaag

SEQ ID NO: 3291132 - RNA, 14 nt, Variola virus
aucaagaaacauuu

SEQ ID NO: 3291133 - RNA, 18 nt, Variola virus
aacaagguaccgaaucua

SEQ ID NO: 3291134 - RNA, 13 nt, Variola virus
uaaauguauacau

SEQ ID NO: 3291135 - RNA, 22 nt, Variola virus
gauuggauaagaaaacauaucu

SEQ ID NO: 3291136 - RNA, 22 nt, Variola virus
gaaaaugugcuucuaugagauu

SEQ ID NO: 3291137 - RNA, 18 nt, Variola virus
agucugucaaaucaucuu

SEQ ID NO: 3291138 - RNA, 15 nt, Variola virus
aucuaaauuaaauau

SEQ ID NO: 3291139 - RNA, 21 nt, Variola virus
acaaaacaauuagagcagcag

SEQ ID NO: 3291140 - RNA, 19 nt, Variola virus
uguuuaaauaauucucuga

SEQ ID NO: 3291141 - RNA, 21 nt, Variola virus
guacuaacuuuugauuuuaac

SEQ ID NO: 3291142 - RNA, 22 nt, Variola virus
auaguuagcgucaacuuucaua

SEQ ID NO: 3291143 - RNA, 21 nt, Variola virus
uccaucgguauaaaaaucauu

SEQ ID NO: 3291144 - RNA, 18 nt, Variola virus
ucuuuaaaaauuuaaaau

SEQ ID NO: 3291145 - RNA, 14 nt, Variola virus
uuugagagggaaaa

SEQ ID NO: 3291146 - RNA, 19 nt, Variola virus
auuuaagagaucaaagcau

SEQ ID NO: 3291147 - RNA, 15 nt, Variola virus
aguaucauuaaaucu

SEQ ID NO: 3291148 - RNA, 16 nt, Variola virus
ucucuauaacaaaugu

SEQ ID NO: 3291149 - RNA, 19 nt, Variola virus
gguuaacucuuucuuuuga

SEQ ID NO: 3291150 - RNA, 20 nt, Variola virus
uagcaauuucugauucuaga

SEQ ID NO: 3291151 - RNA, 19 nt, Variola virus
aucaacucauguguaaauu

SEQ ID NO: 3291152 - RNA, 16 nt, Variola virus
gaaaaaacauguggua

SEQ ID NO: 3291153 - RNA, 14 nt, Variola virus
ugauuagaaaauau

SEQ ID NO: 3291154 - RNA, 15 nt, Variola virus
augccugagaguaaa

SEQ ID NO: 3291155 - RNA, 22 nt, Variola virus
aaaaauggauuuugaugauauu

SEQ ID NO: 3291156 - RNA, 12 nt, Variola virus
aagaaauuauuu

SEQ ID NO: 3291157 - RNA, 18 nt, Variola virus
auaaacuaucaguaaguu

SEQ ID NO: 3291158 - RNA, 13 nt, Variola virus
uacagaauuauug

SEQ ID NO: 3291159 - RNA, 18 nt, Variola virus
caacucaucguuccauag

SEQ ID NO: 3291160 - RNA, 16 nt, Variola virus
aaguaucaaaucgaua

SEQ ID NO: 3291161 - RNA, 23 nt, Variola virus
cccuaucaagcgauucuuucaau

SEQ ID NO: 3291162 - RNA, 18 nt, Variola virus
gauacaguaucguuuuaa

SEQ ID NO: 3291163 - RNA, 23 nt, Variola virus
aaguauccucuacucauuucauu

SEQ ID NO: 3291164 - RNA, 15 nt, Variola virus
auagaugaaauacuc

SEQ ID NO: 3291165 - RNA, 19 nt, Variola virus
aauuagaauuacaaaagaa

SEQ ID NO: 3291166 - RNA, 21 nt, Variola virus
gaauauaacgugguaucuucu

SEQ ID NO: 3291167 - RNA, 14 nt, Variola virus
acguucauuaaaaa

SEQ ID NO: 3291168 - RNA, 15 nt, Variola virus
caucgaugaugcauu

SEQ ID NO: 3291169 - RNA, 18 nt, Variola virus
acacaggauaaauuauuu

SEQ ID NO: 3291170 - RNA, 23 nt, Variola virus
uucauccccauacauuuuacauu

SEQ ID NO: 3291171 - RNA, 13 nt, Variola virus
gucuauuguuaau

SEQ ID NO: 3291172 - RNA, 18 nt, Variola virus
aaaaaauuacuccaugga

SEQ ID NO: 3291173 - RNA, 15 nt, Variola virus
guuaacccgaugguu

SEQ ID NO: 3291174 - RNA, 20 nt, Variola virus
ccguuaguuuaauauccuua

SEQ ID NO: 3291175 - RNA, 13 nt, Variola virus
gcucuuaaacgac

SEQ ID NO: 3291176 - RNA, 12 nt, Variola virus
ucaaagaaaaag

SEQ ID NO: 3291177 - RNA, 19 nt, Variola virus
uauuuggcuaaauuauaua

SEQ ID NO: 3291178 - RNA, 13 nt, Variola virus
uauauguaacauu

SEQ ID NO: 3291179 - RNA, 23 nt, Variola virus
aaguuuuucacccauaaauagua

SEQ ID NO: 3291180 - RNA, 18 nt, Variola virus
acagcuuuaacagaugau

SEQ ID NO: 3291181 - RNA, 19 nt, Variola virus
aguuuaauacuaauacuaa

SEQ ID NO: 3291182 - RNA, 11 nt, Variola virus
guuaauacagg

SEQ ID NO: 3291183 - RNA, 22 nt, Variola virus
acuauagucagcacucuuccau

SEQ ID NO: 3291184 - RNA, 14 nt, Variola virus
acauucuaggaaug

SEQ ID NO: 3291185 - RNA, 16 nt, Variola virus
aguauuucuuacucaa

SEQ ID NO: 3291186 - RNA, 16 nt, Variola virus
ccggaguuagaaagca

SEQ ID NO: 3291187 - RNA, 22 nt, Variola virus
uauaauguucaccauuuauaua

SEQ ID NO: 3291188 - RNA, 19 nt, Variola virus
uacaaacuuuuccuuuucc

SEQ ID NO: 3291189 - RNA, 19 nt, Variola virus
aucgucguacguuuacaca

SEQ ID NO: 3291190 - RNA, 18 nt, Variola virus
aagcagacuagaaauaac

SEQ ID NO: 3291191 - RNA, 17 nt, Variola virus
uacagcguuuacuauuc

SEQ ID NO: 3291192 - RNA, 17 nt, Variola virus
guauucaguuucaucaa

SEQ ID NO: 3291193 - RNA, 16 nt, Variola virus
guucagaggaugaaau

SEQ ID NO: 3291194 - RNA, 20 nt, Variola virus
auaacaguaguuuaacuagu

SEQ ID NO: 3291195 - RNA, 22 nt, Variola virus
auaauacucggccgacauaaug

SEQ ID NO: 3291196 - RNA, 17 nt, Variola virus
aacccguuuauacagug

SEQ ID NO: 3291197 - RNA, 15 nt, Variola virus
uacuaaaacugaaga

SEQ ID NO: 3291198 - RNA, 16 nt, Variola virus
uuaauccuucuagaau

SEQ ID NO: 3291199 - RNA, 20 nt, Variola virus
gaacacauaaccaauuuaua

SEQ ID NO: 3291200 - RNA, 21 nt, Variola virus
uacaugguuaaaguacaugua

SEQ ID NO: 3291201 - RNA, 14 nt, Variola virus
augacuaaacauuu

SEQ ID NO: 3291202 - RNA, 12 nt, Variola virus
uaucuauacaua

SEQ ID NO: 3291203 - RNA, 15 nt, Variola virus
acaaacguaaugaca

SEQ ID NO: 3291204 - RNA, 20 nt, Variola virus
uccuuaagauguuugagaau

SEQ ID NO: 3291205 - RNA, 22 nt, Variola virus
aaguacuguucauacaugauga

SEQ ID NO: 3291206 - RNA, 20 nt, Variola virus
aggcaauaagucuuucucca

SEQ ID NO: 3291207 - RNA, 14 nt, Variola virus
caaaucuauuugga

SEQ ID NO: 3291208 - RNA, 15 nt, Variola virus
uaagauuaucaaaau

SEQ ID NO: 3291209 - RNA, 15 nt, Variola virus
auaaauacauuuaca

SEQ ID NO: 3291210 - RNA, 24 nt, Variola virus
gaacuauauuaagauuaucuauca

SEQ ID NO: 3291211 - RNA, 13 nt, Variola virus
auuacugucucca

SEQ ID NO: 3291212 - RNA, 21 nt, Variola virus
auauauaagacacagaaauac

SEQ ID NO: 3291213 - RNA, 21 nt, Variola virus
ucaacaauuuuguauuauucu

SEQ ID NO: 3291214 - RNA, 16 nt, Variola virus
uuucagaauuuucuaa

SEQ ID NO: 3291215 - RNA, 22 nt, Variola virus
aauaguaguagaauaagaacua

SEQ ID NO: 3291216 - RNA, 19 nt, Variola virus
cucaguuugauauuacuaa

SEQ ID NO: 3291217 - RNA, 17 nt, Variola virus
aaacuucucuaaaugag

SEQ ID NO: 3291218 - RNA, 12 nt, Variola virus
aaacaauguuuc

SEQ ID NO: 3291219 - RNA, 23 nt, Variola virus
ugaaaacagaaacaucuuauuca

SEQ ID NO: 3291220 - RNA, 20 nt, Variola virus
aaaccuauaacauuaauauc

SEQ ID NO: 3291221 - RNA, 21 nt, Variola virus
caagagaaugaaauauauaca

SEQ ID NO: 3291222 - RNA, 19 nt, Variola virus
aguauagcuaaugaugcag

SEQ ID NO: 3291223 - RNA, 19 nt, Variola virus
auaaccucuccuauaugaa

SEQ ID NO: 3291224 - RNA, 22 nt, Variola virus
uuaguauuaaacagauccuuaa

SEQ ID NO: 3291225 - RNA, 14 nt, Variola virus
aaauagaaacauau

SEQ ID NO: 3291226 - RNA, 22 nt, Variola virus
aaacuucaaucuguuaagauua

SEQ ID NO: 3291227 - RNA, 20 nt, Variola virus
acuauuuuaaauagcauaga

SEQ ID NO: 3291228 - RNA, 18 nt, Variola virus
ugaaacuaugucaaaaau

SEQ ID NO: 3291229 - RNA, 20 nt, Variola virus
auuaucgaggauauuucaaa

SEQ ID NO: 3291230 - RNA, 23 nt, Variola virus
uauugagguuucugacaauuacu

SEQ ID NO: 3291231 - RNA, 17 nt, Variola virus
uuaaccuaacuaaaaga

SEQ ID NO: 3291232 - RNA, 22 nt, Variola virus
aguuaaggauaagaacuggacu

SEQ ID NO: 3291233 - RNA, 20 nt, Variola virus
uuaacccacgauuuaauauu

SEQ ID NO: 3291234 - RNA, 20 nt, Variola virus
aucauggauuuuacauagau

SEQ ID NO: 3291235 - RNA, 16 nt, Variola virus
ccuuuacagugaauaa

SEQ ID NO: 3291236 - RNA, 17 nt, Variola virus
aguguaccaauaugcga

SEQ ID NO: 3291237 - RNA, 21 nt, Variola virus
aauuaagcauauucuuaauau

SEQ ID NO: 3291238 - RNA, 19 nt, Variola virus
uuucuacccauaaguuauc

SEQ ID NO: 3291239 - RNA, 13 nt, Variola virus
uaaaagucaacau

SEQ ID NO: 3291240 - RNA, 13 nt, Variola virus
acaugucuucaau

SEQ ID NO: 3291241 - RNA, 17 nt, Variola virus
auuauuacacauagcau

SEQ ID NO: 3291242 - RNA, 17 nt, Variola virus
ucuagauccucucuuca

SEQ ID NO: 3291243 - RNA, 16 nt, Variola virus
caaagguuauagugua

SEQ ID NO: 3291244 - RNA, 16 nt, Variola virus
uuuuguauuguauaua

SEQ ID NO: 3291245 - RNA, 21 nt, Variola virus
cauugacggauaaaacaaaaa

SEQ ID NO: 3291246 - RNA, 13 nt, Variola virus
aguuaauaggaca

SEQ ID NO: 3291247 - RNA, 17 nt, Variola virus
cgacucuacuaguucca

SEQ ID NO: 3291248 - RNA, 16 nt, Variola virus
acguaaccaagaaguu

SEQ ID NO: 3291249 - RNA, 18 nt, Variola virus
uaucguaccuaucuuaaa

SEQ ID NO: 3291250 - RNA, 18 nt, Variola virus
uaaugugaauuuagcaua

SEQ ID NO: 3291251 - RNA, 17 nt, Variola virus
aauuauucguuuacuga

SEQ ID NO: 3291252 - RNA, 15 nt, Variola virus
aauagccguuucaug

SEQ ID NO: 3291253 - RNA, 17 nt, Variola virus
aaagggaccuaaaucua

SEQ ID NO: 3291254 - RNA, 12 nt, Variola virus
aguuuuuaagag

SEQ ID NO: 3291255 - RNA, 17 nt, Variola virus
ccaugcaacauuuccua

SEQ ID NO: 3291256 - RNA, 15 nt, Variola virus
caaaucuaacuucua

SEQ ID NO: 3291257 - RNA, 13 nt, Variola virus
ucaaaaacugaag

SEQ ID NO: 3291258 - RNA, 19 nt, Variola virus
auguauuuuaauaaaucau

SEQ ID NO: 3291259 - RNA, 22 nt, Variola virus
auuaacuccgaggcacauacau

SEQ ID NO: 3291260 - RNA, 22 nt, Variola virus
aacacgauuauuauaaaauaac

SEQ ID NO: 3291261 - RNA, 18 nt, Variola virus
ucauuuucuucaacaaau

SEQ ID NO: 3291262 - RNA, 16 nt, Variola virus
uuuuucaguuaucauc

SEQ ID NO: 3291263 - RNA, 17 nt, Variola virus
guuauacagauguauua

SEQ ID NO: 3291264 - RNA, 18 nt, Variola virus
gcucuguaaagcauauuc

SEQ ID NO: 3291265 - RNA, 14 nt, Variola virus
auggaagaaacaga

SEQ ID NO: 3291266 - RNA, 17 nt, Variola virus
guuauaagauuacuuau

SEQ ID NO: 3291267 - RNA, 15 nt, Variola virus
ucacucaauaucuag

SEQ ID NO: 3291268 - RNA, 24 nt, Variola virus
gaaaaugaacaucggaaauauaga

SEQ ID NO: 3291269 - RNA, 15 nt, Variola virus
auauacaauaucacu

SEQ ID NO: 3291270 - RNA, 23 nt, Variola virus
augacuuuaucagaucaaaauua

SEQ ID NO: 3291271 - RNA, 18 nt, Variola virus
gcuaaagauuugucacaa

SEQ ID NO: 3291272 - RNA, 14 nt, Variola virus
gaagguauuuccau

SEQ ID NO: 3291273 - RNA, 14 nt, Variola virus
aucaaguggauaaa

SEQ ID NO: 3291274 - RNA, 11 nt, Variola virus
auaauacuuug

SEQ ID NO: 3291275 - RNA, 11 nt, Variola virus
uccagauuuca

SEQ ID NO: 3291276 - RNA, 13 nt, Variola virus
guaauuacuuauc

SEQ ID NO: 3291277 - RNA, 12 nt, Variola virus
ucagaucaaagu

SEQ ID NO: 3291278 - RNA, 13 nt, Variola virus
aaauugcaaaaua

SEQ ID NO: 3291279 - RNA, 14 nt, Variola virus
augaauuaauuaaa

SEQ ID NO: 3291280 - RNA, 19 nt, Variola virus
uuaacaucucuucauuaau

SEQ ID NO: 3291281 - RNA, 22 nt, Variola virus
cucaaagagaauuauauauuua

SEQ ID NO: 3291282 - RNA, 16 nt, Variola virus
ugauguaaucucuaaa

SEQ ID NO: 3291283 - RNA, 14 nt, Variola virus
uuuacuggaauuag

SEQ ID NO: 3291284 - RNA, 18 nt, Variola virus
gaauguggaauuugcuau

SEQ ID NO: 3291285 - RNA, 16 nt, Variola virus
auuuuuaauagcugcu

SEQ ID NO: 3291286 - RNA, 21 nt, Variola virus
caucagaauaaaucaauaucu

SEQ ID NO: 3291287 - RNA, 22 nt, Variola virus
gucauacuccaucaauuucaaa

SEQ ID NO: 3291288 - RNA, 23 nt, Variola virus
caaauaaagcgaaaaauaauuau

SEQ ID NO: 3291289 - RNA, 20 nt, Variola virus
auaugcgccuagagaauugc

SEQ ID NO: 3291290 - RNA, 18 nt, Variola virus
aaucagugauagacuaga

SEQ ID NO: 3291291 - RNA, 22 nt, Variola virus
ccuaccaaaaucaauauaucau

SEQ ID NO: 3291292 - RNA, 18 nt, Variola virus
cguuacuaacgugauuau

SEQ ID NO: 3291293 - RNA, 13 nt, Variola virus
cuuaccccuugau

SEQ ID NO: 3291294 - RNA, 15 nt, Variola virus
ucaaauuagauuucg

SEQ ID NO: 3291295 - RNA, 17 nt, Variola virus
auuguuuuuguacauaa

SEQ ID NO: 3291296 - RNA, 21 nt, Variola virus
aauauucauucaauauuuaca

SEQ ID NO: 3291297 - RNA, 13 nt, Variola virus
uguucacauccuu

SEQ ID NO: 3291298 - RNA, 19 nt, Variola virus
acaaauuaaauucuggaau

SEQ ID NO: 3291299 - RNA, 23 nt, Variola virus
aacaaacagacuauucuuuauua

SEQ ID NO: 3291300 - RNA, 14 nt, Variola virus
accaaguagaaauu

SEQ ID NO: 3291301 - RNA, 21 nt, Variola virus
ucacuucucuucauuacuacu

SEQ ID NO: 3291302 - RNA, 20 nt, Variola virus
acauaaaccgaucacuaauu

SEQ ID NO: 3291303 - RNA, 16 nt, Variola virus
cacucuucgaaaagaa

SEQ ID NO: 3291304 - RNA, 19 nt, Variola virus
caaaauugucuaugauauc

SEQ ID NO: 3291305 - RNA, 20 nt, Variola virus
uaaauauauuuauaaaguau

SEQ ID NO: 3291306 - RNA, 20 nt, Variola virus
auaauccugugcauaaauua

SEQ ID NO: 3291307 - RNA, 17 nt, Variola virus
ccaauucguauaaauau

SEQ ID NO: 3291308 - RNA, 17 nt, Variola virus
ugacauaauuacauaua

SEQ ID NO: 3291309 - RNA, 20 nt, Variola virus
ugagaauaucuuuauucauu

SEQ ID NO: 3291310 - RNA, 22 nt, Variola virus
acugauaaaguagauuaugaag

SEQ ID NO: 3291311 - RNA, 19 nt, Variola virus
guucauccuuguucaucau

SEQ ID NO: 3291312 - RNA, 15 nt, Variola virus
uguaacaauauuaca

SEQ ID NO: 3291313 - RNA, 20 nt, Variola virus
cuugauuacauucucauuaa

SEQ ID NO: 3291314 - RNA, 19 nt, Variola virus
uagucgguuaauguuguau

SEQ ID NO: 3291315 - RNA, 17 nt, Variola virus
caguuuauuauccacua

SEQ ID NO: 3291316 - RNA, 15 nt, Variola virus
gauagaaacauaugc

SEQ ID NO: 3291317 - RNA, 12 nt, Variola virus
uucauucguaaa

SEQ ID NO: 3291318 - RNA, 17 nt, Variola virus
cuuauuacuuuuggaau

SEQ ID NO: 3291319 - RNA, 16 nt, Variola virus
acauucaaagauuuga

SEQ ID NO: 3291320 - RNA, 17 nt, Variola virus
cuuacguguuuaauuuu

SEQ ID NO: 3291321 - RNA, 17 nt, Variola virus
uacauguauuaaagaau

SEQ ID NO: 3291322 - RNA, 21 nt, Variola virus
uagcauuguuauguauuucau

SEQ ID NO: 3291323 - RNA, 17 nt, Variola virus
caugagauugaaugcca

SEQ ID NO: 3291324 - RNA, 22 nt, Variola virus
acuuaugcgaagccauguuaaa

SEQ ID NO: 3291325 - RNA, 17 nt, Variola virus
uuuuucaucuuuacaua

SEQ ID NO: 3291326 - RNA, 23 nt, Variola virus
cauauaacuaucaacugugaugu

SEQ ID NO: 3291327 - RNA, 18 nt, Variola virus
uaauaaauuuauuauuua

SEQ ID NO: 3291328 - RNA, 16 nt, Variola virus
acagaacuaauguaua

SEQ ID NO: 3291329 - RNA, 23 nt, Variola virus
cuauaaagucugucaaaucaucu

SEQ ID NO: 3291330 - RNA, 22 nt, Variola virus
uucuacuaugcacauuauucua

SEQ ID NO: 3291331 - RNA, 14 nt, Variola virus
aacaaacaucucac

SEQ ID NO: 3291332 - RNA, 15 nt, Variola virus
gaaagcgugauuuua

SEQ ID NO: 3291333 - RNA, 23 nt, Variola virus
uuuaauagcuaacucgguaucua

SEQ ID NO: 3291334 - RNA, 17 nt, Variola virus
uauaaaaacauuauucu

SEQ ID NO: 3291335 - RNA, 21 nt, Variola virus
uaugcaccuagagguucuauu

SEQ ID NO: 3291336 - RNA, 22 nt, Variola virus
uauccucaauaacguuaucauu

SEQ ID NO: 3291337 - RNA, 17 nt, Variola virus
gagcacuauuucuaaau

SEQ ID NO: 3291338 - RNA, 20 nt, Variola virus
acagguagaauuuauaaaca

SEQ ID NO: 3291339 - RNA, 14 nt, Variola virus
auagcacaaaugug

SEQ ID NO: 3291340 - RNA, 17 nt, Variola virus
ccaugaaacgaacacua

SEQ ID NO: 3291341 - RNA, 14 nt, Variola virus
agaauuucuguuca

SEQ ID NO: 3291342 - RNA, 23 nt, Variola virus
aucgucaccgaugucaaaaaaag

SEQ ID NO: 3291343 - RNA, 19 nt, Variola virus
cuauuauuugcgaggauga

SEQ ID NO: 3291344 - RNA, 18 nt, Variola virus
aaggcaucaaaaaaugua

SEQ ID NO: 3291345 - RNA, 17 nt, Variola virus
ucuuuagcuucugaaau

SEQ ID NO: 3291346 - RNA, 16 nt, Variola virus
cacuucuauaguaucu

SEQ ID NO: 3291347 - RNA, 23 nt, Variola virus
gaaguauaucugaguaugaugau

SEQ ID NO: 3291348 - RNA, 17 nt, Variola virus
uauugcauguuuucaua

SEQ ID NO: 3291349 - RNA, 14 nt, Variola virus
agacaaaaauaugg

SEQ ID NO: 3291350 - RNA, 18 nt, Variola virus
cuaauuaaucuaaaaucu

SEQ ID NO: 3291351 - RNA, 17 nt, Variola virus
acuaagcccaaaaccaa

SEQ ID NO: 3291352 - RNA, 20 nt, Variola virus
aaaauuuaaagaauguauaa

SEQ ID NO: 3291353 - RNA, 12 nt, Variola virus
gaauuaauacau

SEQ ID NO: 3291354 - RNA, 19 nt, Variola virus
uaacuaaaaauguaaaaua

SEQ ID NO: 3291355 - RNA, 22 nt, Variola virus
uauuggcuuuucuuuaucacua

SEQ ID NO: 3291356 - RNA, 21 nt, Variola virus
acgauaaugugguuacucuuc

SEQ ID NO: 3291357 - RNA, 22 nt, Variola virus
agagguucccaauuccaaagau

SEQ ID NO: 3291358 - RNA, 14 nt, Variola virus
uuucuuuuaacaug

SEQ ID NO: 3291359 - RNA, 18 nt, Variola virus
acacauccugaacaauaa

SEQ ID NO: 3291360 - RNA, 12 nt, Variola virus
gaaucaaaaagu

SEQ ID NO: 3291361 - RNA, 20 nt, Variola virus
aggauucguuuacucucaga

SEQ ID NO: 3291362 - RNA, 12 nt, Variola virus
uguauuaaauag

SEQ ID NO: 3291363 - RNA, 18 nt, Variola virus
uagaauuuauaaacauca

SEQ ID NO: 3291364 - RNA, 18 nt, Variola virus
uucagaauuucuacauaa

SEQ ID NO: 3291365 - RNA, 21 nt, Variola virus
acaucuauauugcuacauaau

SEQ ID NO: 3291366 - RNA, 16 nt, Variola virus
acaauuauuauauaau

SEQ ID NO: 3291367 - RNA, 15 nt, Variola virus
ucauuaauugagaaa

SEQ ID NO: 3291368 - RNA, 16 nt, Variola virus
agaaaacuagauacaa

SEQ ID NO: 3291369 - RNA, 14 nt, Variola virus
auguauauaucacu

SEQ ID NO: 3291370 - RNA, 18 nt, Variola virus
cguauaauagacauaaug

SEQ ID NO: 3291371 - RNA, 21 nt, Variola virus
uucuacuaugcacauuauucu

SEQ ID NO: 3291372 - RNA, 14 nt, Variola virus
acuaucuuuaacau

SEQ ID NO: 3291373 - RNA, 20 nt, Variola virus
guacuucucccauaauacuu

SEQ ID NO: 3291374 - RNA, 22 nt, Variola virus
uuuuaccgcaauauguaugcua

SEQ ID NO: 3291375 - RNA, 24 nt, Variola virus
uaguuuuguaauaucuauagcauc

SEQ ID NO: 3291376 - RNA, 14 nt, Variola virus
uuggcaaauuauuu

SEQ ID NO: 3291377 - RNA, 17 nt, Variola virus
aucaaugaguaagacuu

SEQ ID NO: 3291378 - RNA, 12 nt, Variola virus
uuacaaaucuag

SEQ ID NO: 3291379 - RNA, 15 nt, Variola virus
aagaagccauuuuau

SEQ ID NO: 3291380 - RNA, 23 nt, Variola virus
uaauauaaaauucccaaucuugu

SEQ ID NO: 3291381 - RNA, 22 nt, Variola virus
uacuguuaaauguacuguauau

SEQ ID NO: 3291382 - RNA, 18 nt, Variola virus
gucuuuuauaguauauac

SEQ ID NO: 3291383 - RNA, 15 nt, Variola virus
aaacauauauggucu

SEQ ID NO: 3291384 - RNA, 18 nt, Variola virus
ucagaauaucucauucaa

SEQ ID NO: 3291385 - RNA, 17 nt, Variola virus
ccauaguuuguaucaau

SEQ ID NO: 3291386 - RNA, 14 nt, Variola virus
uagaaauacaaaag

SEQ ID NO: 3291387 - RNA, 21 nt, Variola virus
uaaugaauuuagaaaugauug

SEQ ID NO: 3291388 - RNA, 16 nt, Variola virus
aucauuauuuacugaa

SEQ ID NO: 3291389 - RNA, 14 nt, Variola virus
aaaaguaaauacug

SEQ ID NO: 3291390 - RNA, 22 nt, Variola virus
acauguaaacuugacaaaaauu

SEQ ID NO: 3291391 - RNA, 22 nt, Variola virus
cauguauugcuguauuuguaau

SEQ ID NO: 3291392 - RNA, 13 nt, Variola virus
gauaacauaaaaa

SEQ ID NO: 3291393 - RNA, 15 nt, Variola virus
auuugucacaauaug

SEQ ID NO: 3291394 - RNA, 19 nt, Variola virus
uaauaaaaaaaauuauuua

SEQ ID NO: 3291395 - RNA, 18 nt, Variola virus
gguauuggcgauugauuu

SEQ ID NO: 3291396 - RNA, 18 nt, Variola virus
aucgagucuagauucgag

SEQ ID NO: 3291397 - RNA, 14 nt, Variola virus
ucgauuucuggaua

SEQ ID NO: 3291398 - RNA, 17 nt, Variola virus
gugcugaggucuuucaa

SEQ ID NO: 3291399 - RNA, 21 nt, Variola virus
aaaacucugauuauugucuaa

SEQ ID NO: 3291400 - RNA, 17 nt, Variola virus
cgagaauaugauagaaa

SEQ ID NO: 3291401 - RNA, 13 nt, Variola virus
gguaggagaaaga

SEQ ID NO: 3291402 - RNA, 14 nt, Variola virus
uagccaccauaaug

SEQ ID NO: 3291403 - RNA, 13 nt, Variola virus
ucaacuuauucuu

SEQ ID NO: 3291404 - RNA, 12 nt, Variola virus
aaccuaauucca

SEQ ID NO: 3291405 - RNA, 18 nt, Variola virus
uaaaucuguuucuaaaga

SEQ ID NO: 3291406 - RNA, 14 nt, Variola virus
uguaacaaaguuuc

SEQ ID NO: 3291407 - RNA, 22 nt, Variola virus
cgauugagauuuugcauacaau

SEQ ID NO: 3291408 - RNA, 20 nt, Variola virus
agauaccacgaguaucaauu

SEQ ID NO: 3291409 - RNA, 21 nt, Variola virus
gauuaaaaauaaaguuaucau

SEQ ID NO: 3291410 - RNA, 19 nt, Variola virus
guuuaaaaauauagauauu

SEQ ID NO: 3291411 - RNA, 17 nt, Variola virus
uagcaugugguucuuca

SEQ ID NO: 3291412 - RNA, 14 nt, Variola virus
aguauacaauauau

SEQ ID NO: 3291413 - RNA, 19 nt, Variola virus
auuuaccguuacuaauaag

SEQ ID NO: 3291414 - RNA, 12 nt, Variola virus
ucaucuguuuua

SEQ ID NO: 3291415 - RNA, 19 nt, Variola virus
ugaaauaaccgcaugauua

SEQ ID NO: 3291416 - RNA, 21 nt, Variola virus
auucuaggcucaguauguaaa

SEQ ID NO: 3291417 - RNA, 16 nt, Variola virus
aaguaaucaauuuuuc

SEQ ID NO: 3291418 - RNA, 22 nt, Variola virus
ucucacugaauacgaggaugau

SEQ ID NO: 3291419 - RNA, 13 nt, Variola virus
auauuuuaauagu

SEQ ID NO: 3291420 - RNA, 17 nt, Variola virus
ugcuaugaaguugucua

SEQ ID NO: 3291421 - RNA, 20 nt, Variola virus
uaucaccaguaagaacauaa

SEQ ID NO: 3291422 - RNA, 14 nt, Variola virus
cuuuuuccaauucu

SEQ ID NO: 3291423 - RNA, 15 nt, Variola virus
aauacaccaaauaua

SEQ ID NO: 3291424 - RNA, 17 nt, Variola virus
auaaauacaccaaauau

SEQ ID NO: 3291425 - RNA, 14 nt, Variola virus
aacauuaacagauu

SEQ ID NO: 3291426 - RNA, 13 nt, Variola virus
uguacauguaguu

SEQ ID NO: 3291427 - RNA, 12 nt, Variola virus
cagaacuauuag

SEQ ID NO: 3291428 - RNA, 17 nt, Variola virus
agcuccguauuccaaac

SEQ ID NO: 3291429 - RNA, 18 nt, Variola virus
acgagugaacguaauaga

SEQ ID NO: 3291430 - RNA, 16 nt, Variola virus
acuauacgaaauagau

SEQ ID NO: 3291431 - RNA, 15 nt, Variola virus
uagaaaaucauacag

SEQ ID NO: 3291432 - RNA, 22 nt, Variola virus
gcaacggggaugaugauaauga

SEQ ID NO: 3291433 - RNA, 12 nt, Variola virus
gaacuaauaaag

SEQ ID NO: 3291434 - RNA, 21 nt, Variola virus
gaaaaguucaacaugauuauu

SEQ ID NO: 3291435 - RNA, 12 nt, Variola virus
aauguauaacag

SEQ ID NO: 3291436 - RNA, 21 nt, Variola virus
aagauguuuucugucagaaaa

SEQ ID NO: 3291437 - RNA, 23 nt, Variola virus
agacgcuauggcacgaaauaucu

SEQ ID NO: 3291438 - RNA, 19 nt, Variola virus
acaaaauaaaaaacauaau

SEQ ID NO: 3291439 - RNA, 16 nt, Variola virus
cugaauuuauuucaga

SEQ ID NO: 3291440 - RNA, 16 nt, Variola virus
ucacuaacaauaacua

SEQ ID NO: 3291441 - RNA, 16 nt, Variola virus
gcaagaacauaaugau

SEQ ID NO: 3291442 - RNA, 23 nt, Variola virus
agaacuaagauuccauuaucuaa

SEQ ID NO: 3291443 - RNA, 15 nt, Variola virus
agaaccaaaugauua

SEQ ID NO: 3291444 - RNA, 14 nt, Variola virus
aaauauaauuuuau

SEQ ID NO: 3291445 - RNA, 18 nt, Variola virus
ccauguagaauaaauuau

SEQ ID NO: 3291446 - RNA, 20 nt, Variola virus
uacgguuccacagacucauu

SEQ ID NO: 3291447 - RNA, 15 nt, Variola virus
gaauuuauuaauaca

SEQ ID NO: 3291448 - RNA, 17 nt, Variola virus
acauacuaguauuuaca

SEQ ID NO: 3291449 - RNA, 18 nt, Variola virus
cauggaacaauaaaagag

SEQ ID NO: 3291450 - RNA, 19 nt, Variola virus
cauuccuaccaaacaaaau

SEQ ID NO: 3291451 - RNA, 20 nt, Variola virus
gaaauauguauacauaauau

SEQ ID NO: 3291452 - RNA, 21 nt, Variola virus
uauuacagauuuuauuaaacu

SEQ ID NO: 3291453 - RNA, 16 nt, Variola virus
uccacaaauaguaaau

SEQ ID NO: 3291454 - RNA, 20 nt, Variola virus
gaauuggaacuaguauuuau

SEQ ID NO: 3291455 - RNA, 21 nt, Variola virus
aacgagugcaaguagaacuua

SEQ ID NO: 3291456 - RNA, 22 nt, Variola virus
uauuaauacaggaucuagcaaa

SEQ ID NO: 3291457 - RNA, 15 nt, Variola virus
auaaguauuaucaaa

SEQ ID NO: 3291458 - RNA, 20 nt, Variola virus
cuuggaugaccauauauuua

SEQ ID NO: 3291459 - RNA, 21 nt, Variola virus
aaauguauuuuuuaugauaua

SEQ ID NO: 3291460 - RNA, 14 nt, Variola virus
ucuaucauguagua

SEQ ID NO: 3291461 - RNA, 14 nt, Variola virus
uaguaguguuuccc

SEQ ID NO: 3291462 - RNA, 13 nt, Variola virus
ccauuaaagaauu

SEQ ID NO: 3291463 - RNA, 13 nt, Variola virus
agauauuaucuau

SEQ ID NO: 3291464 - RNA, 22 nt, Variola virus
gacuauuggaauguguuaaaaa

SEQ ID NO: 3291465 - RNA, 14 nt, Variola virus
acaacuaaacagua

SEQ ID NO: 3291466 - RNA, 15 nt, Variola virus
auuuacgcgcacaca

SEQ ID NO: 3291467 - RNA, 22 nt, Variola virus
caggaagauuagucagaccauu

SEQ ID NO: 3291468 - RNA, 13 nt, Variola virus
cugcauuaucuac

SEQ ID NO: 3291469 - RNA, 15 nt, Variola virus
auauuugcuaauaau

SEQ ID NO: 3291470 - RNA, 24 nt, Variola virus
uacuauacacaauguuacucacau

SEQ ID NO: 3291471 - RNA, 21 nt, Variola virus
auaucauaaauaaaaauagua

SEQ ID NO: 3291472 - RNA, 14 nt, Variola virus
ucaucaauguagug

SEQ ID NO: 3291473 - RNA, 21 nt, Variola virus
uucuauaccaauauuauucuu

SEQ ID NO: 3291474 - RNA, 20 nt, Variola virus
ucaauguguguaacuccaga

SEQ ID NO: 3291475 - RNA, 16 nt, Variola virus
caugauaagaauaauu

SEQ ID NO: 3291476 - RNA, 17 nt, Variola virus
gacaucaauaugccaau

SEQ ID NO: 3291477 - RNA, 11 nt, Variola virus
aaauaaauguc

SEQ ID NO: 3291478 - RNA, 16 nt, Variola virus
cacuaacuguaucaau

SEQ ID NO: 3291479 - RNA, 15 nt, Variola virus
ucauaaauucuuuaa

SEQ ID NO: 3291480 - RNA, 18 nt, Variola virus
auuauguuguuaugagug

SEQ ID NO: 3291481 - RNA, 18 nt, Variola virus
agaaacagauagauaugu

SEQ ID NO: 3291482 - RNA, 13 nt, Variola virus
auuguuacaaaag

SEQ ID NO: 3291483 - RNA, 21 nt, Variola virus
uagaaagaaacgauuauuucu

SEQ ID NO: 3291484 - RNA, 18 nt, Variola virus
acaauuuauauguucauu

SEQ ID NO: 3291485 - RNA, 21 nt, Variola virus
acuagugauaucauuaauaca

SEQ ID NO: 3291486 - RNA, 15 nt, Variola virus
agucaauauauuaag

SEQ ID NO: 3291487 - RNA, 13 nt, Variola virus
augcaucaaacag

SEQ ID NO: 3291488 - RNA, 14 nt, Variola virus
cauaaacugauacg

SEQ ID NO: 3291489 - RNA, 12 nt, Variola virus
ucucaauacaga

SEQ ID NO: 3291490 - RNA, 19 nt, Variola virus
augauauacagucuuaaau

SEQ ID NO: 3291491 - RNA, 16 nt, Variola virus
caucagacaaugcuuu

SEQ ID NO: 3291492 - RNA, 12 nt, Variola virus
auauguuaauaa

SEQ ID NO: 3291493 - RNA, 12 nt, Variola virus
uauuguuauaua

SEQ ID NO: 3291494 - RNA, 17 nt, Variola virus
auaaacgcgucugcuaa

SEQ ID NO: 3291495 - RNA, 12 nt, Variola virus
gaucaaguaaag

SEQ ID NO: 3291496 - RNA, 17 nt, Variola virus
acugcaauaaaacauuu

SEQ ID NO: 3291497 - RNA, 19 nt, Variola virus
uucagugguaaagauaucu

SEQ ID NO: 3291498 - RNA, 15 nt, Variola virus
aucaugucacauagu

SEQ ID NO: 3291499 - RNA, 20 nt, Variola virus
uucagaauuaauagauauau

SEQ ID NO: 3291500 - RNA, 18 nt, Variola virus
acuuaacaugagacauaa

SEQ ID NO: 3291501 - RNA, 20 nt, Variola virus
acuuagucuguacaaaaguu

SEQ ID NO: 3291502 - RNA, 22 nt, Variola virus
caaguuuccuguaaauuuucua

SEQ ID NO: 3291503 - RNA, 13 nt, Variola virus
caucaauuuugaa

SEQ ID NO: 3291504 - RNA, 20 nt, Variola virus
uaaaugaaucccaaacauug

SEQ ID NO: 3291505 - RNA, 18 nt, Variola virus
guuuacauuuuuggauuu

SEQ ID NO: 3291506 - RNA, 20 nt, Variola virus
agagauacuaaauauagaca

SEQ ID NO: 3291507 - RNA, 23 nt, Variola virus
uucaacuuugaaauuguuuuuua

SEQ ID NO: 3291508 - RNA, 19 nt, Variola virus
ugaagaagaaaacaaacau

SEQ ID NO: 3291509 - RNA, 21 nt, Variola virus
acaagauuuuuagcguauuau

SEQ ID NO: 3291510 - RNA, 20 nt, Variola virus
ucaacauaaauaauucuaga

SEQ ID NO: 3291511 - RNA, 23 nt, Variola virus
uaucuaguguuccuaauaucaua

SEQ ID NO: 3291512 - RNA, 19 nt, Variola virus
uagcaucuuuuuauaucug

SEQ ID NO: 3291513 - RNA, 14 nt, Variola virus
aaauaaaacuauaa

SEQ ID NO: 3291514 - RNA, 17 nt, Variola virus
ugccauuuuuaacguag

SEQ ID NO: 3291515 - RNA, 13 nt, Variola virus
cuaguuguuuaug

SEQ ID NO: 3291516 - RNA, 14 nt, Variola virus
uucaucaucugaua

SEQ ID NO: 3291517 - RNA, 18 nt, Variola virus
uuauacaggucauuacau

SEQ ID NO: 3291518 - RNA, 15 nt, Variola virus
cuaauauuuuuagau

SEQ ID NO: 3291519 - RNA, 14 nt, Variola virus
uauugcuacauaau

SEQ ID NO: 3291520 - RNA, 20 nt, Variola virus
gugauucucugaaaauguaa

SEQ ID NO: 3291521 - RNA, 15 nt, Variola virus
caauaauauacuaau

SEQ ID NO: 3291522 - RNA, 16 nt, Variola virus
cugucauuaaaucuuu

SEQ ID NO: 3291523 - RNA, 16 nt, Variola virus
auuuucuauaacugaa

SEQ ID NO: 3291524 - RNA, 14 nt, Variola virus
aacuccuggauaac

SEQ ID NO: 3291525 - RNA, 12 nt, Variola virus
gaauauaaugaa

SEQ ID NO: 3291526 - RNA, 22 nt, Variola virus
agaucaauggugugauguugau

SEQ ID NO: 3291527 - RNA, 18 nt, Variola virus
uaacccauuauaaaacuu

SEQ ID NO: 3291528 - RNA, 23 nt, Variola virus
acaacuggauauucgauaacagc

SEQ ID NO: 3291529 - RNA, 21 nt, Variola virus
ccaucuccuuauuuuuaaaaa

SEQ ID NO: 3291530 - RNA, 14 nt, Variola virus
gaaaucuauaauau

SEQ ID NO: 3291531 - RNA, 18 nt, Variola virus
uucaaugugcucuuuaca

SEQ ID NO: 3291532 - RNA, 16 nt, Variola virus
ucaucugaaauuguca

SEQ ID NO: 3291533 - RNA, 16 nt, Variola virus
cauacaaugauuucaa

SEQ ID NO: 3291534 - RNA, 23 nt, Variola virus
acaaguugaccaauuuauuucua

SEQ ID NO: 3291535 - RNA, 21 nt, Variola virus
acauuaacaucauacaucaau

SEQ ID NO: 3291536 - RNA, 19 nt, Variola virus
cguuaucauuuucuacaau

SEQ ID NO: 3291537 - RNA, 13 nt, Variola virus
acaguuaaaacua

SEQ ID NO: 3291538 - RNA, 13 nt, Variola virus
uauuuuauacauu

SEQ ID NO: 3291539 - RNA, 21 nt, Variola virus
guucaaaugccacaucaaaga

SEQ ID NO: 3291540 - RNA, 14 nt, Variola virus
agacguguuauuac

SEQ ID NO: 3291541 - RNA, 14 nt, Variola virus
uaaacaaaauacuc

SEQ ID NO: 3291542 - RNA, 17 nt, Variola virus
ggauuacaagaaauaug

SEQ ID NO: 3291543 - RNA, 13 nt, Variola virus
uaguacaugaaug

SEQ ID NO: 3291544 - RNA, 14 nt, Variola virus
agauuuuacuaacu

SEQ ID NO: 3291545 - RNA, 17 nt, Variola virus
augaaauuuaaguaaca

SEQ ID NO: 3291546 - RNA, 13 nt, Variola virus
caaauaugauaug

SEQ ID NO: 3291547 - RNA, 20 nt, Variola virus
aauuacauaaaaaaaaugua

SEQ ID NO: 3291548 - RNA, 19 nt, Variola virus
auccaaacccuugaucucc

SEQ ID NO: 3291549 - RNA, 19 nt, Variola virus
aaauuaaaggagcauguau

SEQ ID NO: 3291550 - RNA, 21 nt, Variola virus
cauaaacgauugcugcuguuc

SEQ ID NO: 3291551 - RNA, 21 nt, Variola virus
caucauaugacauuucaugaa

SEQ ID NO: 3291552 - RNA, 22 nt, Variola virus
uuaguuucugguuuucuauaaa

SEQ ID NO: 3291553 - RNA, 13 nt, Variola virus
acaguuucuagug

SEQ ID NO: 3291554 - RNA, 21 nt, Variola virus
auuagcgagguauuuauucau

SEQ ID NO: 3291555 - RNA, 14 nt, Variola virus
aaaugauuuuggaa

SEQ ID NO: 3291556 - RNA, 15 nt, Variola virus
auauucccaaacaua

SEQ ID NO: 3291557 - RNA, 14 nt, Variola virus
ucucuaucaaugau

SEQ ID NO: 3291558 - RNA, 17 nt, Variola virus
augacauucucugacau

SEQ ID NO: 3291559 - RNA, 16 nt, Variola virus
uccaacuccuuuucga

SEQ ID NO: 3291560 - RNA, 23 nt, Variola virus
uucuucauuuauggguaucaaaa

SEQ ID NO: 3291561 - RNA, 21 nt, Variola virus
aauaauuuugaagcauuggaa

SEQ ID NO: 3291562 - RNA, 16 nt, Variola virus
cuuuuauuuuaucuaa

SEQ ID NO: 3291563 - RNA, 15 nt, Variola virus
auuuacucucuauaa

SEQ ID NO: 3291564 - RNA, 14 nt, Variola virus
uuuguggacauuuu

SEQ ID NO: 3291565 - RNA, 21 nt, Variola virus
ucaacggaugaguuaauguau

SEQ ID NO: 3291566 - RNA, 22 nt, Variola virus
uguuaucaugaaauguuugaua

SEQ ID NO: 3291567 - RNA, 21 nt, Variola virus
uuucuacaauaacuacauauu

SEQ ID NO: 3291568 - RNA, 21 nt, Variola virus
aggaugaauuaucguuauuau

SEQ ID NO: 3291569 - RNA, 12 nt, Variola virus
cuagauuuugac

SEQ ID NO: 3291570 - RNA, 12 nt, Variola virus
acuguauuugga

SEQ ID NO: 3291571 - RNA, 15 nt, Variola virus
cauaguugcucaaaa

SEQ ID NO: 3291572 - RNA, 15 nt, Variola virus
acuuggaaacaucuc

SEQ ID NO: 3291573 - RNA, 14 nt, Variola virus
cuaguagaaaagau

SEQ ID NO: 3291574 - RNA, 14 nt, Variola virus
gauaauauuauuau

SEQ ID NO: 3291575 - RNA, 16 nt, Variola virus
aauaugugcucugcag

SEQ ID NO: 3291576 - RNA, 18 nt, Variola virus
uauaggaccacuagcaaa

SEQ ID NO: 3291577 - RNA, 12 nt, Variola virus
cauaauccucua

SEQ ID NO: 3291578 - RNA, 16 nt, Variola virus
aacuucuaaucuugua

SEQ ID NO: 3291579 - RNA, 16 nt, Variola virus
aguacaaugaacgaua

SEQ ID NO: 3291580 - RNA, 23 nt, Variola virus
guuucccaaugaaaugguacaau

SEQ ID NO: 3291581 - RNA, 15 nt, Variola virus
acagcagaaaaagac

SEQ ID NO: 3291582 - RNA, 20 nt, Variola virus
ucuacaguaauguccaaauc

SEQ ID NO: 3291583 - RNA, 23 nt, Variola virus
uuaacuaucgugucucuguuuuu

SEQ ID NO: 3291584 - RNA, 18 nt, Variola virus
uaagguagaaucucuauu

SEQ ID NO: 3291585 - RNA, 20 nt, Variola virus
agguacuauaauauuaaaaa

SEQ ID NO: 3291586 - RNA, 14 nt, Variola virus
ucguuauuaucauc

SEQ ID NO: 3291587 - RNA, 20 nt, Variola virus
gauaccauuauuaacaaauu

SEQ ID NO: 3291588 - RNA, 20 nt, Variola virus
guagcugaauguuauaaaaa

SEQ ID NO: 3291589 - RNA, 21 nt, Variola virus
guauugacaauacuguauuau

SEQ ID NO: 3291590 - RNA, 19 nt, Variola virus
auuuuaacgucuaaaugua

SEQ ID NO: 3291591 - RNA, 14 nt, Variola virus
uuaucuaacucuuu

SEQ ID NO: 3291592 - RNA, 19 nt, Variola virus
gcguuuccuacauaacauc

SEQ ID NO: 3291593 - RNA, 13 nt, Variola virus
uuccuccauaauu

SEQ ID NO: 3291594 - RNA, 20 nt, Variola virus
guuauaaaggacagaaauau

SEQ ID NO: 3291595 - RNA, 15 nt, Variola virus
uuaaauaauguauca

SEQ ID NO: 3291596 - RNA, 23 nt, Variola virus
uuugacaggaucagguucuucua

SEQ ID NO: 3291597 - RNA, 20 nt, Variola virus
uauuaauacaugucuuagau

SEQ ID NO: 3291598 - RNA, 19 nt, Variola virus
aauaaaaugucacaaccuu

SEQ ID NO: 3291599 - RNA, 20 nt, Variola virus
gaaacuaugucaaaaauugu

SEQ ID NO: 3291600 - RNA, 17 nt, Variola virus
uaagaccgaaauuauca

SEQ ID NO: 3291601 - RNA, 19 nt, Variola virus
guuagcugucguucaagau

SEQ ID NO: 3291602 - RNA, 12 nt, Variola virus
aucauguagaaa

SEQ ID NO: 3291603 - RNA, 17 nt, Variola virus
aauauuuuaauagauua

SEQ ID NO: 3291604 - RNA, 17 nt, Variola virus
auuuuacccucaaucau

SEQ ID NO: 3291605 - RNA, 18 nt, Variola virus
aaaugucaugauuaguau

SEQ ID NO: 3291606 - RNA, 14 nt, Variola virus
ugugacaguuuucu

SEQ ID NO: 3291607 - RNA, 12 nt, Variola virus
auuuaaauccua

SEQ ID NO: 3291608 - RNA, 14 nt, Variola virus
cggaagacaaucaa

SEQ ID NO: 3291609 - RNA, 13 nt, Variola virus
aguuaaauauuaa

SEQ ID NO: 3291610 - RNA, 15 nt, Variola virus
agucaagauacagaa

SEQ ID NO: 3291611 - RNA, 18 nt, Variola virus
gcaaaacuauuauuuuaa

SEQ ID NO: 3291612 - RNA, 16 nt, Variola virus
uauuacacauaaacau

SEQ ID NO: 3291613 - RNA, 21 nt, Variola virus
agaaaucaacaaucuaauaca

SEQ ID NO: 3291614 - RNA, 14 nt, Variola virus
uaaaaauguuaauu

SEQ ID NO: 3291615 - RNA, 22 nt, Variola virus
ucuaaaugaugauauaccuguu

SEQ ID NO: 3291616 - RNA, 17 nt, Variola virus
cugaaauuagagcucau

SEQ ID NO: 3291617 - RNA, 20 nt, Variola virus
aauauuaauaaaguauauau

SEQ ID NO: 3291618 - RNA, 21 nt, Variola virus
agcuaugcgauuggauaagaa

SEQ ID NO: 3291619 - RNA, 15 nt, Variola virus
auacaucuuuaaucu

SEQ ID NO: 3291620 - RNA, 15 nt, Variola virus
ucuauaucuucuuuu

SEQ ID NO: 3291621 - RNA, 15 nt, Variola virus
aauaacauaggauua

SEQ ID NO: 3291622 - RNA, 15 nt, Variola virus
aauaucuaaauaugc

SEQ ID NO: 3291623 - RNA, 21 nt, Variola virus
cuaaaucuguauaucuuucca

SEQ ID NO: 3291624 - RNA, 22 nt, Variola virus
cuauaaacgaugguuuaauuug

SEQ ID NO: 3291625 - RNA, 19 nt, Variola virus
uaaucuauaggcaacgaug

SEQ ID NO: 3291626 - RNA, 16 nt, Variola virus
auagauaaugauauau

SEQ ID NO: 3291627 - RNA, 19 nt, Variola virus
uauacgaaauagauauuca

SEQ ID NO: 3291628 - RNA, 22 nt, Variola virus
augaaauagcguucgucaacau

SEQ ID NO: 3291629 - RNA, 23 nt, Variola virus
uucggacuuauauagcuuauucc

SEQ ID NO: 3291630 - RNA, 14 nt, Variola virus
aucuguuuguugag

SEQ ID NO: 3291631 - RNA, 16 nt, Variola virus
auaaaccauuguauaa

SEQ ID NO: 3291632 - RNA, 12 nt, Variola virus
uucuuuguguag

SEQ ID NO: 3291633 - RNA, 20 nt, Variola virus
ucauagccgcucuuagaguu

SEQ ID NO: 3291634 - RNA, 14 nt, Variola virus
agcaucuaguugau

SEQ ID NO: 3291635 - RNA, 14 nt, Variola virus
ccaaacaauaccau

SEQ ID NO: 3291636 - RNA, 13 nt, Variola virus
cgaggauuuugau

SEQ ID NO: 3291637 - RNA, 21 nt, Variola virus
uaucuuaaagccauacauuua

SEQ ID NO: 3291638 - RNA, 15 nt, Variola virus
uggacauacuaauau

SEQ ID NO: 3291639 - RNA, 15 nt, Variola virus
auaacauguuaauuu

SEQ ID NO: 3291640 - RNA, 15 nt, Variola virus
uuuacaagauuauua

SEQ ID NO: 3291641 - RNA, 19 nt, Variola virus
uaaacagauccuuaaccuu

SEQ ID NO: 3291642 - RNA, 19 nt, Variola virus
guuaaaggauauuaugcau

SEQ ID NO: 3291643 - RNA, 20 nt, Variola virus
agauguuagaaaaaugaugc

SEQ ID NO: 3291644 - RNA, 14 nt, Variola virus
cguuuauagauguu

SEQ ID NO: 3291645 - RNA, 17 nt, Variola virus
gaucuggaaaauaaucu

SEQ ID NO: 3291646 - RNA, 19 nt, Variola virus
guuagaacgguuauagcau

SEQ ID NO: 3291647 - RNA, 18 nt, Variola virus
aauggaagguauuuccau

SEQ ID NO: 3291648 - RNA, 15 nt, Variola virus
auuguaaacacagau

SEQ ID NO: 3291649 - RNA, 17 nt, Variola virus
auaauauaaaaacuuau

SEQ ID NO: 3291650 - RNA, 13 nt, Variola virus
uaugauaugugau

SEQ ID NO: 3291651 - RNA, 17 nt, Variola virus
aguucugcauucaauuc

SEQ ID NO: 3291652 - RNA, 15 nt, Variola virus
aaaaauuauaauauu

SEQ ID NO: 3291653 - RNA, 14 nt, Variola virus
aaaaacaugucucu

SEQ ID NO: 3291654 - RNA, 21 nt, Variola virus
auaaaaacgagaaugacauaa

SEQ ID NO: 3291655 - RNA, 17 nt, Variola virus
augaacuagacaauaau

SEQ ID NO: 3291656 - RNA, 19 nt, Variola virus
uaguucucuuuuguagaac

SEQ ID NO: 3291657 - RNA, 17 nt, Variola virus
caagagagcagaaauaa

SEQ ID NO: 3291658 - RNA, 18 nt, Variola virus
uuuaacaaaguuauucau

SEQ ID NO: 3291659 - RNA, 15 nt, Variola virus
gucuagucuuaaaug

SEQ ID NO: 3291660 - RNA, 16 nt, Variola virus
gucacguuuauacauc

SEQ ID NO: 3291661 - RNA, 18 nt, Variola virus
gauccuaggauccuucag

SEQ ID NO: 3291662 - RNA, 16 nt, Variola virus
guuaaaacuacaaaaa

SEQ ID NO: 3291663 - RNA, 19 nt, Variola virus
caaauuuuuuuuacaaaca

SEQ ID NO: 3291664 - RNA, 15 nt, Variola virus
cuguucuaucaucua

SEQ ID NO: 3291665 - RNA, 20 nt, Variola virus
acacaucgacggacaaucua

SEQ ID NO: 3291666 - RNA, 17 nt, Variola virus
agaucaucaaaauaugu

SEQ ID NO: 3291667 - RNA, 16 nt, Variola virus
uauuacaaugcucauu

SEQ ID NO: 3291668 - RNA, 23 nt, Variola virus
acaaaggaacuaaucaaugaaug

SEQ ID NO: 3291669 - RNA, 16 nt, Variola virus
cgaguuuaaaacuucu

SEQ ID NO: 3291670 - RNA, 23 nt, Variola virus
aaagaauuuguuguuucuauuua

SEQ ID NO: 3291671 - RNA, 14 nt, Variola virus
auguuaguaggaau

SEQ ID NO: 3291672 - RNA, 18 nt, Variola virus
gaauacgaggaugaugau

SEQ ID NO: 3291673 - RNA, 14 nt, Variola virus
augccaaaaucaua

SEQ ID NO: 3291674 - RNA, 16 nt, Variola virus
cauaauauaaaaacuu

SEQ ID NO: 3291675 - RNA, 21 nt, Variola virus
cuauuuauugacauuaaucua

SEQ ID NO: 3291676 - RNA, 13 nt, Variola virus
aucaaaugucuaa

SEQ ID NO: 3291677 - RNA, 20 nt, Variola virus
uagugguauaucuuguucua

SEQ ID NO: 3291678 - RNA, 18 nt, Variola virus
agaauauguauaucaauu

SEQ ID NO: 3291679 - RNA, 19 nt, Variola virus
cauuuuauaaauauauaau

SEQ ID NO: 3291680 - RNA, 18 nt, Variola virus
uaaacacccuuauauuca

SEQ ID NO: 3291681 - RNA, 13 nt, Variola virus
ccaaauuaaugag

SEQ ID NO: 3291682 - RNA, 21 nt, Variola virus
ugcuaauauacaauuauccuu

SEQ ID NO: 3291683 - RNA, 15 nt, Variola virus
auuaucauuuuguaa

SEQ ID NO: 3291684 - RNA, 23 nt, Variola virus
aauauuguuuuucacuuuuuaua

SEQ ID NO: 3291685 - RNA, 17 nt, Variola virus
acucauaaauaaaaaug

SEQ ID NO: 3291686 - RNA, 14 nt, Variola virus
uuauuuuuuuggaa

SEQ ID NO: 3291687 - RNA, 16 nt, Variola virus
uaaaaaaaaauacuua

SEQ ID NO: 3291688 - RNA, 19 nt, Variola virus
acauaagaugucuaugaau

SEQ ID NO: 3291689 - RNA, 16 nt, Variola virus
uuucuacuacuucauu

SEQ ID NO: 3291690 - RNA, 14 nt, Variola virus
auuuuacauuccuc

SEQ ID NO: 3291691 - RNA, 22 nt, Variola virus
cauuuaucgacuaaucaaaaaa

SEQ ID NO: 3291692 - RNA, 13 nt, Variola virus
agauaaucuauau

SEQ ID NO: 3291693 - RNA, 18 nt, Variola virus
cguaauacccauguuuaa

SEQ ID NO: 3291694 - RNA, 21 nt, Variola virus
uuaacauguguauuacaugca

SEQ ID NO: 3291695 - RNA, 19 nt, Variola virus
acuaaaggcaacaaagaaa

SEQ ID NO: 3291696 - RNA, 16 nt, Variola virus
acauuuuuuguuuugg

SEQ ID NO: 3291697 - RNA, 12 nt, Variola virus
ucaucaauaaag

SEQ ID NO: 3291698 - RNA, 12 nt, Variola virus
uccucaauaacg

SEQ ID NO: 3291699 - RNA, 18 nt, Variola virus
uugugucauugacaucuu

SEQ ID NO: 3291700 - RNA, 20 nt, Variola virus
uuaccaacgacgauaguucu

SEQ ID NO: 3291701 - RNA, 15 nt, Variola virus
aucuaauaacaaugu

SEQ ID NO: 3291702 - RNA, 13 nt, Variola virus
agaaaaaacuaau

SEQ ID NO: 3291703 - RNA, 12 nt, Variola virus
caaaauaaugac

SEQ ID NO: 3291704 - RNA, 16 nt, Variola virus
caagacuaacacacaa

SEQ ID NO: 3291705 - RNA, 21 nt, Variola virus
auagaugauggaagacaaguu

SEQ ID NO: 3291706 - RNA, 21 nt, Variola virus
aaacuuuaauaacaaagaaag

SEQ ID NO: 3291707 - RNA, 12 nt, Variola virus
agauauuucauc

SEQ ID NO: 3291708 - RNA, 17 nt, Variola virus
auauuuuuuuuuaaaga

SEQ ID NO: 3291709 - RNA, 14 nt, Variola virus
agaaauuauaacau

SEQ ID NO: 3291710 - RNA, 17 nt, Variola virus
aaugaaacagaauuaac

SEQ ID NO: 3291711 - RNA, 17 nt, Variola virus
auccucgcuuuguguau

SEQ ID NO: 3291712 - RNA, 16 nt, Variola virus
uguguaacaaaguauu

SEQ ID NO: 3291713 - RNA, 22 nt, Variola virus
aaacauucuuuauuaaguguuu

SEQ ID NO: 3291714 - RNA, 22 nt, Variola virus
aaauaucuuuaauacagaguuu

SEQ ID NO: 3291715 - RNA, 15 nt, Variola virus
augccuauaaaguaa

SEQ ID NO: 3291716 - RNA, 14 nt, Variola virus
cuacaaaaaugcgu

SEQ ID NO: 3291717 - RNA, 13 nt, Variola virus
ucccaauguuucg

SEQ ID NO: 3291718 - RNA, 13 nt, Variola virus
acgaauaaaagaa

SEQ ID NO: 3291719 - RNA, 14 nt, Variola virus
uaaaaauauguaua

SEQ ID NO: 3291720 - RNA, 16 nt, Variola virus
aauuagaauuacaaaa

SEQ ID NO: 3291721 - RNA, 18 nt, Variola virus
acauacuuuccuguagua

SEQ ID NO: 3291722 - RNA, 17 nt, Variola virus
caaaguguccuccuauu

SEQ ID NO: 3291723 - RNA, 23 nt, Variola virus
cuuuuaaauacaaauauaucaau

SEQ ID NO: 3291724 - RNA, 15 nt, Variola virus
agcaauacaacagaa

SEQ ID NO: 3291725 - RNA, 22 nt, Variola virus
agauuggccagaaucaugguau

SEQ ID NO: 3291726 - RNA, 11 nt, Variola virus
cuauaguucuc

SEQ ID NO: 3291727 - RNA, 18 nt, Variola virus
auuuauaucuaaaaauua

SEQ ID NO: 3291728 - RNA, 19 nt, Variola virus
aaaccaggcgaguguagaa

SEQ ID NO: 3291729 - RNA, 14 nt, Variola virus
aauuacaaacacua

SEQ ID NO: 3291730 - RNA, 20 nt, Variola virus
aguaaguaucuauaaaacuc

SEQ ID NO: 3291731 - RNA, 11 nt, Variola virus
cacaucaucug

SEQ ID NO: 3291732 - RNA, 23 nt, Variola virus
aaauuguuuaguuuucucuuuuu

SEQ ID NO: 3291733 - RNA, 11 nt, Variola virus
aucccuuauca

SEQ ID NO: 3291734 - RNA, 16 nt, Variola virus
cauuauuuuauuguga

SEQ ID NO: 3291735 - RNA, 17 nt, Variola virus
uaggagaugauagcuau

SEQ ID NO: 3291736 - RNA, 13 nt, Variola virus
uaugauucuaaua

SEQ ID NO: 3291737 - RNA, 19 nt, Variola virus
aucacaagaaguuagaaag

SEQ ID NO: 3291738 - RNA, 20 nt, Variola virus
auacagaagauuuaacuaga

SEQ ID NO: 3291739 - RNA, 14 nt, Variola virus
cauuucaacguaaa

SEQ ID NO: 3291740 - RNA, 14 nt, Variola virus
aaauauauaacaau

SEQ ID NO: 3291741 - RNA, 23 nt, Variola virus
ucaucgaacuucugaucauuaau

SEQ ID NO: 3291742 - RNA, 21 nt, Variola virus
aagauagaugaacugacauau

SEQ ID NO: 3291743 - RNA, 13 nt, Variola virus
accaugaaauaua

SEQ ID NO: 3291744 - RNA, 21 nt, Variola virus
acauuuuuugacgaugaugau

SEQ ID NO: 3291745 - RNA, 15 nt, Variola virus
acaagaucuuuguuu

SEQ ID NO: 3291746 - RNA, 22 nt, Variola virus
acucuaccaguuaagucaauaa

SEQ ID NO: 3291747 - RNA, 13 nt, Variola virus
acguuaauacaaa

SEQ ID NO: 3291748 - RNA, 19 nt, Variola virus
caaagauuuaaauccuaau

SEQ ID NO: 3291749 - RNA, 19 nt, Variola virus
cacuauguuagcauuucua

SEQ ID NO: 3291750 - RNA, 17 nt, Variola virus
gugaauaugaucuucau

SEQ ID NO: 3291751 - RNA, 17 nt, Variola virus
uaagaauaauccagaau

SEQ ID NO: 3291752 - RNA, 12 nt, Variola virus
uauuucuaaaau

SEQ ID NO: 3291753 - RNA, 23 nt, Variola virus
agaugaaaauaauccugaauaua

SEQ ID NO: 3291754 - RNA, 19 nt, Variola virus
uuaauuuggucauucuuaa

SEQ ID NO: 3291755 - RNA, 13 nt, Variola virus
auucauugacaua

SEQ ID NO: 3291756 - RNA, 18 nt, Variola virus
aucuaguccuuuaauucc

SEQ ID NO: 3291757 - RNA, 16 nt, Variola virus
ucauuauuuaaguuuu

SEQ ID NO: 3291758 - RNA, 17 nt, Variola virus
ucaugaaucaauuagua

SEQ ID NO: 3291759 - RNA, 16 nt, Variola virus
acagcuucuagaaguu

SEQ ID NO: 3291760 - RNA, 15 nt, Variola virus
acuguggaauuauuu

SEQ ID NO: 3291761 - RNA, 20 nt, Variola virus
aaguagaaauuaucaaaugu

SEQ ID NO: 3291762 - RNA, 22 nt, Variola virus
auauugauaauauuuuaauaga

SEQ ID NO: 3291763 - RNA, 18 nt, Variola virus
uacgacuaaguucaaguc

SEQ ID NO: 3291764 - RNA, 14 nt, Variola virus
ucgaauaauguaua

SEQ ID NO: 3291765 - RNA, 17 nt, Variola virus
cuucgccgcgacuuucu

SEQ ID NO: 3291766 - RNA, 23 nt, Variola virus
ucaaacgaauaaacaauuucaca

SEQ ID NO: 3291767 - RNA, 16 nt, Variola virus
uaagauaguuguucau

SEQ ID NO: 3291768 - RNA, 12 nt, Variola virus
uguucagaaaua

SEQ ID NO: 3291769 - RNA, 20 nt, Variola virus
gauugauccuagaacuagau

SEQ ID NO: 3291770 - RNA, 15 nt, Variola virus
gucuaugauauccuc

SEQ ID NO: 3291771 - RNA, 19 nt, Variola virus
aaaaucaauauaucaucua

SEQ ID NO: 3291772 - RNA, 18 nt, Variola virus
aaauaucauuaacgauau

SEQ ID NO: 3291773 - RNA, 22 nt, Variola virus
auguuauagaauauaaauuaua

SEQ ID NO: 3291774 - RNA, 22 nt, Variola virus
uuucaaagaaugagauacauaa

SEQ ID NO: 3291775 - RNA, 11 nt, Variola virus
uacuaggaaaa

SEQ ID NO: 3291776 - RNA, 15 nt, Variola virus
acucucaaauuauua

SEQ ID NO: 3291777 - RNA, 17 nt, Variola virus
caucuuacauauacaga

SEQ ID NO: 3291778 - RNA, 18 nt, Variola virus
aacacucgacugaauauu

SEQ ID NO: 3291779 - RNA, 18 nt, Variola virus
caaaauugucuaugauau

SEQ ID NO: 3291780 - RNA, 23 nt, Variola virus
gacaaaaucaacuacauaaucuu

SEQ ID NO: 3291781 - RNA, 22 nt, Variola virus
ucaacauccgucaaaaccaauu

SEQ ID NO: 3291782 - RNA, 23 nt, Variola virus
auuucuggauauguuuuuaauaa

SEQ ID NO: 3291783 - RNA, 15 nt, Variola virus
aucuuuaguaaacau

SEQ ID NO: 3291784 - RNA, 17 nt, Variola virus
aagaauucggaaaugua

SEQ ID NO: 3291785 - RNA, 16 nt, Variola virus
cauacgcguucucaag

SEQ ID NO: 3291786 - RNA, 22 nt, Variola virus
ggacuacuuauucuauuuuaca

SEQ ID NO: 3291787 - RNA, 10 nt, Variola virus
ggauuacuua

SEQ ID NO: 3291788 - RNA, 12 nt, Variola virus
auaugacauaau

SEQ ID NO: 3291789 - RNA, 17 nt, Variola virus
auaaugaugaccuauau

SEQ ID NO: 3291790 - RNA, 17 nt, Variola virus
ugacauauguaaauauu

SEQ ID NO: 3291791 - RNA, 21 nt, Variola virus
uaucuuauguauauguuugua

SEQ ID NO: 3291792 - RNA, 18 nt, Variola virus
cuuuuuauuuauccucuc

SEQ ID NO: 3291793 - RNA, 16 nt, Variola virus
uaacaacgacuuauaa

SEQ ID NO: 3291794 - RNA, 14 nt, Variola virus
cauacaugauauuc

SEQ ID NO: 3291795 - RNA, 13 nt, Variola virus
aauauucagaaaa

SEQ ID NO: 3291796 - RNA, 17 nt, Variola virus
ugagaucuguaaugcua

SEQ ID NO: 3291797 - RNA, 21 nt, Variola virus
auugucucgucaaugucuaua

SEQ ID NO: 3291798 - RNA, 20 nt, Variola virus
aaauuauuaaacaauacucu

SEQ ID NO: 3291799 - RNA, 14 nt, Variola virus
aagaauauagaaau

SEQ ID NO: 3291800 - RNA, 17 nt, Variola virus
uacuauaauaguacuag

SEQ ID NO: 3291801 - RNA, 18 nt, Variola virus
uaguuaaucuuauucaag

SEQ ID NO: 3291802 - RNA, 21 nt, Variola virus
uuaugagucacguuacacuuu

SEQ ID NO: 3291803 - RNA, 16 nt, Variola virus
uaaagaauaucuuugg

SEQ ID NO: 3291804 - RNA, 23 nt, Variola virus
aaaauaaauuagucauacguaau

SEQ ID NO: 3291805 - RNA, 22 nt, Variola virus
acaagccgaagaguauaaauuc

SEQ ID NO: 3291806 - RNA, 13 nt, Variola virus
gucuuggaagcaa

SEQ ID NO: 3291807 - RNA, 15 nt, Variola virus
uacuuugacaaaugu

SEQ ID NO: 3291808 - RNA, 20 nt, Variola virus
aauacauauuguuuagcaaa

SEQ ID NO: 3291809 - RNA, 19 nt, Variola virus
acuauguuagcauuucuau

SEQ ID NO: 3291810 - RNA, 16 nt, Variola virus
auuauuaauaugagug

SEQ ID NO: 3291811 - RNA, 18 nt, Variola virus
cucauauaacuucuagau

SEQ ID NO: 3291812 - RNA, 17 nt, Variola virus
uuaauaaacuuagugua

SEQ ID NO: 3291813 - RNA, 12 nt, Variola virus
gucaauaaaaga

SEQ ID NO: 3291814 - RNA, 13 nt, Variola virus
augaauuagagaa

SEQ ID NO: 3291815 - RNA, 13 nt, Variola virus
aucccaaacauug

SEQ ID NO: 3291816 - RNA, 13 nt, Variola virus
auguuuguaucau

SEQ ID NO: 3291817 - RNA, 15 nt, Variola virus
aauauaguuaauagu

SEQ ID NO: 3291818 - RNA, 15 nt, Variola virus
uaagaagucauaugu

SEQ ID NO: 3291819 - RNA, 15 nt, Variola virus
aacaggcuaaaaugu

SEQ ID NO: 3291820 - RNA, 13 nt, Variola virus
uaaagccauacau

SEQ ID NO: 3291821 - RNA, 21 nt, Variola virus
aacaaguaugacauuguaaaa

SEQ ID NO: 3291822 - RNA, 22 nt, Variola virus
uaguggaguaauuuacaaauug

SEQ ID NO: 3291823 - RNA, 13 nt, Variola virus
gauaauagucacg

SEQ ID NO: 3291824 - RNA, 18 nt, Variola virus
augauucgucgacauguu

SEQ ID NO: 3291825 - RNA, 21 nt, Variola virus
caagauccucucuuaaaugaa

SEQ ID NO: 3291826 - RNA, 21 nt, Variola virus
ugaacuccgccguaguuucca

SEQ ID NO: 3291827 - RNA, 18 nt, Variola virus
caaugcucaguaaaugua

SEQ ID NO: 3291828 - RNA, 20 nt, Variola virus
uuuuaggauaugcuuucaua

SEQ ID NO: 3291829 - RNA, 13 nt, Variola virus
gaauaaguuuauu

SEQ ID NO: 3291830 - RNA, 21 nt, Variola virus
aauguaugaacaucauggaau

SEQ ID NO: 3291831 - RNA, 12 nt, Variola virus
ucuguucaaaaa

SEQ ID NO: 3291832 - RNA, 14 nt, Variola virus
guucaaauauauga

SEQ ID NO: 3291833 - RNA, 15 nt, Variola virus
gacuggaguauauau

SEQ ID NO: 3291834 - RNA, 17 nt, Variola virus
aaucucuucuauuuuca

SEQ ID NO: 3291835 - RNA, 14 nt, Variola virus
cuggaaaaaguugu

SEQ ID NO: 3291836 - RNA, 16 nt, Variola virus
uuacuuguauaauaag

SEQ ID NO: 3291837 - RNA, 14 nt, Variola virus
aaggcaauaagucu

SEQ ID NO: 3291838 - RNA, 14 nt, Variola virus
auagaaauauauau

SEQ ID NO: 3291839 - RNA, 23 nt, Variola virus
uaauccuuuuuauuuauccucuc

SEQ ID NO: 3291840 - RNA, 23 nt, Variola virus
uguauucagaauuaauagauaua

SEQ ID NO: 3291841 - RNA, 20 nt, Variola virus
uauaaacauuuguguuugua

SEQ ID NO: 3291842 - RNA, 18 nt, Variola virus
cggauuaauaucucuauc

SEQ ID NO: 3291843 - RNA, 18 nt, Variola virus
agucauuaacgaacaaua

SEQ ID NO: 3291844 - RNA, 17 nt, Variola virus
cauguaacaauauuaca

SEQ ID NO: 3291845 - RNA, 21 nt, Variola virus
uggucucaacgcaaacuuuuu

SEQ ID NO: 3291846 - RNA, 23 nt, Variola virus
gucuguauaguaacuauguaaau

SEQ ID NO: 3291847 - RNA, 12 nt, Variola virus
ucuauaggaaag

SEQ ID NO: 3291848 - RNA, 20 nt, Variola virus
ucuuaaggagaaugaaacag

SEQ ID NO: 3291849 - RNA, 16 nt, Variola virus
agauaguuuucucuau

SEQ ID NO: 3291850 - RNA, 16 nt, Variola virus
gugaucaauuuccaac

SEQ ID NO: 3291851 - RNA, 20 nt, Variola virus
ucaacuaucguuggaaaaug

SEQ ID NO: 3291852 - RNA, 14 nt, Variola virus
auaaacauaauaaa

SEQ ID NO: 3291853 - RNA, 17 nt, Variola virus
ugcaaagucuaaauauu

SEQ ID NO: 3291854 - RNA, 17 nt, Variola virus
agaauauucuuuucuaa

SEQ ID NO: 3291855 - RNA, 18 nt, Variola virus
aauucuuuuaugaauauc

SEQ ID NO: 3291856 - RNA, 15 nt, Variola virus
gcuaccaaaguuauu

SEQ ID NO: 3291857 - RNA, 15 nt, Variola virus
ucacacaauguagug

SEQ ID NO: 3291858 - RNA, 14 nt, Variola virus
ucgauccaauaaau

SEQ ID NO: 3291859 - RNA, 19 nt, Variola virus
agcauugaaaauacguucu

SEQ ID NO: 3291860 - RNA, 20 nt, Variola virus
acaagcaagcaucaugaaua

SEQ ID NO: 3291861 - RNA, 15 nt, Variola virus
acaauuucacaaaug

SEQ ID NO: 3291862 - RNA, 16 nt, Variola virus
uuaguuuuuuuagaaa

SEQ ID NO: 3291863 - RNA, 13 nt, Variola virus
aauauuaaaacua

SEQ ID NO: 3291864 - RNA, 22 nt, Variola virus
uaaugacguuaauaacaaaaau

SEQ ID NO: 3291865 - RNA, 21 nt, Variola virus
acgauauuaucgacuaugaau

SEQ ID NO: 3291866 - RNA, 16 nt, Variola virus
cuauguuucaguuuaa

SEQ ID NO: 3291867 - RNA, 19 nt, Variola virus
auaugcaaagaacaaaaua

SEQ ID NO: 3291868 - RNA, 16 nt, Variola virus
caaucuagcauuucua

SEQ ID NO: 3291869 - RNA, 19 nt, Variola virus
uauagcacuuuuaacuauu

SEQ ID NO: 3291870 - RNA, 17 nt, Variola virus
uucucuuuuaauucagu

SEQ ID NO: 3291871 - RNA, 16 nt, Variola virus
gaggaugagagucaau

SEQ ID NO: 3291872 - RNA, 23 nt, Variola virus
cuuuuuuuagagaugaaaaauuu

SEQ ID NO: 3291873 - RNA, 13 nt, Variola virus
uagaaaaacuuua

SEQ ID NO: 3291874 - RNA, 22 nt, Variola virus
aauuauuauauaauucuucgcc

SEQ ID NO: 3291875 - RNA, 18 nt, Variola virus
cguguuaauaaaaacaug

SEQ ID NO: 3291876 - RNA, 22 nt, Variola virus
uuccaggaucuagauaauuaau

SEQ ID NO: 3291877 - RNA, 23 nt, Variola virus
uuaugaacgaugauauguaucca

SEQ ID NO: 3291878 - RNA, 15 nt, Variola virus
acaucauaaaaugag

SEQ ID NO: 3291879 - RNA, 18 nt, Variola virus
caaaggaugaaagaaagc

SEQ ID NO: 3291880 - RNA, 13 nt, Variola virus
agucucaaaauua

SEQ ID NO: 3291881 - RNA, 21 nt, Variola virus
cauuuccaaaucuaacuucua

SEQ ID NO: 3291882 - RNA, 23 nt, Variola virus
uuacuauuggcaauuguagauau

SEQ ID NO: 3291883 - RNA, 23 nt, Variola virus
ugauaucuauaauaggguaucua

SEQ ID NO: 3291884 - RNA, 22 nt, Variola virus
caggcaaauguuuauaguauua

SEQ ID NO: 3291885 - RNA, 14 nt, Variola virus
gauggaauuaucau

SEQ ID NO: 3291886 - RNA, 17 nt, Variola virus
acauucauugucuauua

SEQ ID NO: 3291887 - RNA, 15 nt, Variola virus
uagccuauguuagga

SEQ ID NO: 3291888 - RNA, 22 nt, Variola virus
agccaauagaaauaucauuaag

SEQ ID NO: 3291889 - RNA, 22 nt, Variola virus
uguguuaucagccgcuacagaa

SEQ ID NO: 3291890 - RNA, 21 nt, Variola virus
auuuacucugaaaagaaagua

SEQ ID NO: 3291891 - RNA, 16 nt, Variola virus
gcuguccguauuguau

SEQ ID NO: 3291892 - RNA, 22 nt, Variola virus
uugggcggaucuguaaacauuu

SEQ ID NO: 3291893 - RNA, 13 nt, Variola virus
aauauuauuuccc

SEQ ID NO: 3291894 - RNA, 13 nt, Variola virus
uuaauaaauacag

SEQ ID NO: 3291895 - RNA, 12 nt, Variola virus
aaguaaacuucg

SEQ ID NO: 3291896 - RNA, 15 nt, Variola virus
ccauuaagugacauu

SEQ ID NO: 3291897 - RNA, 21 nt, Variola virus
auuauuuugugcaaauagaug

SEQ ID NO: 3291898 - RNA, 22 nt, Variola virus
cuaauauucccaaacauacauc

SEQ ID NO: 3291899 - RNA, 21 nt, Variola virus
agucaauggagaaauacuuaa

SEQ ID NO: 3291900 - RNA, 22 nt, Variola virus
caaauccgugauuuugguaaug

SEQ ID NO: 3291901 - RNA, 21 nt, Variola virus
auuucauuauaauaguuuauc

SEQ ID NO: 3291902 - RNA, 12 nt, Variola virus
aaugaaaugaua

SEQ ID NO: 3291903 - RNA, 16 nt, Variola virus
cucauuaaaacuucua

SEQ ID NO: 3291904 - RNA, 20 nt, Variola virus
auaauaggcaggagauagau

SEQ ID NO: 3291905 - RNA, 22 nt, Variola virus
uucacuuuuuauaauuuuacca

SEQ ID NO: 3291906 - RNA, 16 nt, Variola virus
ucguuuaauauuacau

SEQ ID NO: 3291907 - RNA, 16 nt, Variola virus
acuacugaagaacuaa

SEQ ID NO: 3291908 - RNA, 17 nt, Variola virus
uacauauuuguacauua

SEQ ID NO: 3291909 - RNA, 16 nt, Variola virus
gaacacguuaaacaaa

SEQ ID NO: 3291910 - RNA, 22 nt, Variola virus
aaagaguaugguaaaugacucu

SEQ ID NO: 3291911 - RNA, 18 nt, Variola virus
uuccacgaacuucuaauu

SEQ ID NO: 3291912 - RNA, 23 nt, Variola virus
uguggaauaaaauaaaacaagga

SEQ ID NO: 3291913 - RNA, 16 nt, Variola virus
auuaaaaaacauauau

SEQ ID NO: 3291914 - RNA, 16 nt, Variola virus
auucgauaagauagau

SEQ ID NO: 3291915 - RNA, 20 nt, Variola virus
ucgucaacaaguuggaugau

SEQ ID NO: 3291916 - RNA, 22 nt, Variola virus
augacauuguaaaagaaauaua

SEQ ID NO: 3291917 - RNA, 22 nt, Variola virus
uggauucaguacaauguuauau

SEQ ID NO: 3291918 - RNA, 17 nt, Variola virus
aggauccagaaggaaga

SEQ ID NO: 3291919 - RNA, 12 nt, Variola virus
auuuguuaauga

SEQ ID NO: 3291920 - RNA, 11 nt, Variola virus
ucguuaaccaa

SEQ ID NO: 3291921 - RNA, 13 nt, Variola virus
ucaucuaugaaug

SEQ ID NO: 3291922 - RNA, 15 nt, Variola virus
gccagauuuaagaaa

SEQ ID NO: 3291923 - RNA, 21 nt, Variola virus
agaaauuacauaaaaaaaaug

SEQ ID NO: 3291924 - RNA, 14 nt, Variola virus
aguacuuucacaag

SEQ ID NO: 3291925 - RNA, 16 nt, Variola virus
auucauaaaacauaau

SEQ ID NO: 3291926 - RNA, 16 nt, Variola virus
ucucuaagagcuacgu

SEQ ID NO: 3291927 - RNA, 12 nt, Variola virus
agaaauacuucc

SEQ ID NO: 3291928 - RNA, 16 nt, Variola virus
uaaucaagucaauuau

SEQ ID NO: 3291929 - RNA, 22 nt, Variola virus
guaaacauuauaucguuaucau

SEQ ID NO: 3291930 - RNA, 15 nt, Variola virus
auauguauacauaau

SEQ ID NO: 3291931 - RNA, 13 nt, Variola virus
aaaaaauuauacu

SEQ ID NO: 3291932 - RNA, 17 nt, Variola virus
acauaagcaucuccaau

SEQ ID NO: 3291933 - RNA, 22 nt, Variola virus
cucuaagaacuuauuaaugaau

SEQ ID NO: 3291934 - RNA, 18 nt, Variola virus
gaaacaauucauaauuau

SEQ ID NO: 3291935 - RNA, 22 nt, Variola virus
auugucagaaauuacaaacacu

SEQ ID NO: 3291936 - RNA, 21 nt, Variola virus
ucuaacuggugaguuaauauu

SEQ ID NO: 3291937 - RNA, 23 nt, Variola virus
uccagauauauaucuuuucagcu

SEQ ID NO: 3291938 - RNA, 16 nt, Variola virus
gaauauuuuauguaca

SEQ ID NO: 3291939 - RNA, 15 nt, Variola virus
uuauguuucuuuaaa

SEQ ID NO: 3291940 - RNA, 19 nt, Variola virus
agaauuaauaggaacuauu

SEQ ID NO: 3291941 - RNA, 13 nt, Variola virus
gaacgaugauaug

SEQ ID NO: 3291942 - RNA, 24 nt, Variola virus
ugaacauuuaagagaucaaagcau

SEQ ID NO: 3291943 - RNA, 22 nt, Variola virus
acuauccaauaaacagucuuua

SEQ ID NO: 3291944 - RNA, 15 nt, Variola virus
guuauuaucaucauu

SEQ ID NO: 3291945 - RNA, 18 nt, Variola virus
aucgauuuucaaauccau

SEQ ID NO: 3291946 - RNA, 19 nt, Variola virus
aauuccagauguuguaaaa

SEQ ID NO: 3291947 - RNA, 15 nt, Variola virus
aaccgaaucuuccca

SEQ ID NO: 3291948 - RNA, 21 nt, Variola virus
aauccauugauaauuucuugu

SEQ ID NO: 3291949 - RNA, 19 nt, Variola virus
cuucuaggacggcgauucu

SEQ ID NO: 3291950 - RNA, 16 nt, Variola virus
uaguuaauaaaaucua

SEQ ID NO: 3291951 - RNA, 16 nt, Variola virus
augacuggaaaucacu

SEQ ID NO: 3291952 - RNA, 13 nt, Variola virus
ucaucauuucuaa

SEQ ID NO: 3291953 - RNA, 21 nt, Variola virus
uagacugaaugcuuucuugga

SEQ ID NO: 3291954 - RNA, 17 nt, Variola virus
uacauucuuuuugcugu

SEQ ID NO: 3291955 - RNA, 21 nt, Variola virus
ugaguuccuuguuuuugcuaa

SEQ ID NO: 3291956 - RNA, 14 nt, Variola virus
ucagaaucguauau

SEQ ID NO: 3291957 - RNA, 17 nt, Variola virus
gaauaguaguagcucua

SEQ ID NO: 3291958 - RNA, 22 nt, Variola virus
uauuaaacaacgacauuguaaa

SEQ ID NO: 3291959 - RNA, 17 nt, Variola virus
ucuuucuugggaaacuc

SEQ ID NO: 3291960 - RNA, 15 nt, Variola virus
acauauccuccauaa

SEQ ID NO: 3291961 - RNA, 20 nt, Variola virus
caauaacacaaucaugauuu

SEQ ID NO: 3291962 - RNA, 19 nt, Variola virus
cuuaauacccugguagaag

SEQ ID NO: 3291963 - RNA, 23 nt, Variola virus
uauucucuggagaaaagauauca

SEQ ID NO: 3291964 - RNA, 13 nt, Variola virus
aauugucuaauga

SEQ ID NO: 3291965 - RNA, 16 nt, Variola virus
cgauacuaauuacaaa

SEQ ID NO: 3291966 - RNA, 20 nt, Variola virus
cuuaaauguaucuuuacuag

SEQ ID NO: 3291967 - RNA, 21 nt, Variola virus
aguaucaugaacucuaaucaa

SEQ ID NO: 3291968 - RNA, 22 nt, Variola virus
uauaacacguauguauuaacuu

SEQ ID NO: 3291969 - RNA, 23 nt, Variola virus
aacaaaaucuaacagauacaaau

SEQ ID NO: 3291970 - RNA, 16 nt, Variola virus
uaguugcauagaugua

SEQ ID NO: 3291971 - RNA, 17 nt, Variola virus
ucugaugaaucugaacc

SEQ ID NO: 3291972 - RNA, 17 nt, Variola virus
ccauuuuguggugcaac

SEQ ID NO: 3291973 - RNA, 16 nt, Variola virus
acucauaaaauacaag

SEQ ID NO: 3291974 - RNA, 13 nt, Variola virus
caaggaucuucua

SEQ ID NO: 3291975 - RNA, 20 nt, Variola virus
acuacuuuaucauagucuaa

SEQ ID NO: 3291976 - RNA, 16 nt, Variola virus
aguauggcgacauuga

SEQ ID NO: 3291977 - RNA, 13 nt, Variola virus
agaaguucaugau

SEQ ID NO: 3291978 - RNA, 17 nt, Variola virus
cauaagucuaauagacu

SEQ ID NO: 3291979 - RNA, 13 nt, Variola virus
aaaagaucaacau

SEQ ID NO: 3291980 - RNA, 16 nt, Variola virus
auacauuugaguuacu

SEQ ID NO: 3291981 - RNA, 19 nt, Variola virus
gauauuaucgacuaugaau

SEQ ID NO: 3291982 - RNA, 14 nt, Variola virus
uuuaguguagauau

SEQ ID NO: 3291983 - RNA, 22 nt, Variola virus
guuauguauuucauuguucauc

SEQ ID NO: 3291984 - RNA, 12 nt, Variola virus
gaaucuauuuua

SEQ ID NO: 3291985 - RNA, 22 nt, Variola virus
aauaggaggaauugauauguau

SEQ ID NO: 3291986 - RNA, 16 nt, Variola virus
auaauauuaugucuag

SEQ ID NO: 3291987 - RNA, 16 nt, Variola virus
aaaaaguuaagaauua

SEQ ID NO: 3291988 - RNA, 16 nt, Variola virus
uagucagaauuuucau

SEQ ID NO: 3291989 - RNA, 21 nt, Variola virus
agguuacguauagucuauaug

SEQ ID NO: 3291990 - RNA, 14 nt, Variola virus
acagaaauauauau

SEQ ID NO: 3291991 - RNA, 20 nt, Variola virus
ccagauaguuuauauccgua

SEQ ID NO: 3291992 - RNA, 17 nt, Variola virus
uuugagaauauauacag

SEQ ID NO: 3291993 - RNA, 15 nt, Variola virus
aauguauuaagauua

SEQ ID NO: 3291994 - RNA, 18 nt, Variola virus
uuaaauuuuuuuauuaau

SEQ ID NO: 3291995 - RNA, 18 nt, Variola virus
acaaauuuauuuauuaac

SEQ ID NO: 3291996 - RNA, 18 nt, Variola virus
gauuuacgcaaacuauau

SEQ ID NO: 3291997 - RNA, 15 nt, Variola virus
aaaauguuagaauua

SEQ ID NO: 3291998 - RNA, 14 nt, Variola virus
auauuuuuaauagc

SEQ ID NO: 3291999 - RNA, 22 nt, Variola virus
accagaguuaucaagagaaaau

SEQ ID NO: 3292000 - RNA, 17 nt, Variola virus
cugauacaauuagauau

SEQ ID NO: 3292001 - RNA, 15 nt, Variola virus
gaguugauuguaaac

SEQ ID NO: 3292002 - RNA, 13 nt, Variola virus
uuucaaauaauaa

SEQ ID NO: 3292003 - RNA, 13 nt, Variola virus
aggauaaagaaaa

SEQ ID NO: 3292004 - RNA, 21 nt, Variola virus
acuuuacgcuauuaaucuuua

SEQ ID NO: 3292005 - RNA, 16 nt, Variola virus
uguaguaaagaugcua

SEQ ID NO: 3292006 - RNA, 16 nt, Variola virus
cagauucuuauauacc

SEQ ID NO: 3292007 - RNA, 22 nt, Variola virus
uauagaugaggugguugcagaa

SEQ ID NO: 3292008 - RNA, 17 nt, Variola virus
gcgaauaaauagauaua

SEQ ID NO: 3292009 - RNA, 17 nt, Variola virus
auuuuauuucaaaauua

SEQ ID NO: 3292010 - RNA, 23 nt, Variola virus
aguauacuaccuauuauauuucu

SEQ ID NO: 3292011 - RNA, 13 nt, Variola virus
cauauuuugcaau

SEQ ID NO: 3292012 - RNA, 16 nt, Variola virus
uauaugagauguaguu

SEQ ID NO: 3292013 - RNA, 16 nt, Variola virus
caaaaguuaauuucua

SEQ ID NO: 3292014 - RNA, 21 nt, Variola virus
uucuaccuuacccauaaacaa

SEQ ID NO: 3292015 - RNA, 15 nt, Variola virus
ucauggggcaaacau

SEQ ID NO: 3292016 - RNA, 20 nt, Variola virus
ucuaaugaugaacacaaaug

SEQ ID NO: 3292017 - RNA, 15 nt, Variola virus
ugaugcgauucaaaa

SEQ ID NO: 3292018 - RNA, 17 nt, Variola virus
ccuuuauuaauucucuc

SEQ ID NO: 3292019 - RNA, 13 nt, Variola virus
uguuuucaucauu

SEQ ID NO: 3292020 - RNA, 22 nt, Variola virus
agaaugcuucggaauuagaaca

SEQ ID NO: 3292021 - RNA, 14 nt, Variola virus
agcuauuuaaaugg

SEQ ID NO: 3292022 - RNA, 16 nt, Variola virus
aauacguguugauaau

SEQ ID NO: 3292023 - RNA, 17 nt, Variola virus
uguucuaaccuaucaac

SEQ ID NO: 3292024 - RNA, 13 nt, Variola virus
uaacaaagaaaga

SEQ ID NO: 3292025 - RNA, 14 nt, Variola virus
aauguuaaacauua

SEQ ID NO: 3292026 - RNA, 17 nt, Variola virus
aacaaccaaaaaaauau

SEQ ID NO: 3292027 - RNA, 17 nt, Variola virus
aucauccauuaauauaa

SEQ ID NO: 3292028 - RNA, 15 nt, Variola virus
agacaccgaauacaa

SEQ ID NO: 3292029 - RNA, 21 nt, Variola virus
uuagaucauuaacucuagaaa

SEQ ID NO: 3292030 - RNA, 17 nt, Variola virus
cugcauuaucaauaaau

SEQ ID NO: 3292031 - RNA, 19 nt, Variola virus
gaauguucucaagaacuac

SEQ ID NO: 3292032 - RNA, 18 nt, Variola virus
caucuauaggugaugcug

SEQ ID NO: 3292033 - RNA, 14 nt, Variola virus
ccaaauuaaugaau

SEQ ID NO: 3292034 - RNA, 13 nt, Variola virus
aauaccaauuuuu

SEQ ID NO: 3292035 - RNA, 13 nt, Variola virus
gcacaaugauaau

SEQ ID NO: 3292036 - RNA, 18 nt, Variola virus
caaauaucuuuaugaauu

SEQ ID NO: 3292037 - RNA, 19 nt, Variola virus
auuaucaaaagacaugaua

SEQ ID NO: 3292038 - RNA, 17 nt, Variola virus
auauggauauucauaga

SEQ ID NO: 3292039 - RNA, 13 nt, Variola virus
cuuaaugcauuuu

SEQ ID NO: 3292040 - RNA, 19 nt, Variola virus
auuuccaaacuguugacuu

SEQ ID NO: 3292041 - RNA, 21 nt, Variola virus
acauagaugaaccaaaugaua

SEQ ID NO: 3292042 - RNA, 17 nt, Variola virus
uguaugcguuaauauua

SEQ ID NO: 3292043 - RNA, 22 nt, Variola virus
auaauguuucuauguuuucuac

SEQ ID NO: 3292044 - RNA, 21 nt, Variola virus
uccauauaccaaacuuucaga

SEQ ID NO: 3292045 - RNA, 13 nt, Variola virus
ugauuuacucauu

SEQ ID NO: 3292046 - RNA, 23 nt, Variola virus
auaugguuuuuggccaaaaugau

SEQ ID NO: 3292047 - RNA, 22 nt, Variola virus
aauaaacuccguagagaaauau

SEQ ID NO: 3292048 - RNA, 20 nt, Variola virus
cacauuucagcaaucuaaca

SEQ ID NO: 3292049 - RNA, 22 nt, Variola virus
aaaacccuuacaacuacaguag

SEQ ID NO: 3292050 - RNA, 17 nt, Variola virus
acaaauauaaaaugaua

SEQ ID NO: 3292051 - RNA, 15 nt, Variola virus
gaaguuguauacuau

SEQ ID NO: 3292052 - RNA, 14 nt, Variola virus
cuaaguuucuuucc

SEQ ID NO: 3292053 - RNA, 22 nt, Variola virus
acauaguuugggaaaagaaauc

SEQ ID NO: 3292054 - RNA, 15 nt, Variola virus
cuuuucuuauccauu

SEQ ID NO: 3292055 - RNA, 13 nt, Variola virus
guaguaacucuaa

SEQ ID NO: 3292056 - RNA, 11 nt, Variola virus
aaggauaaaga

SEQ ID NO: 3292057 - RNA, 22 nt, Variola virus
uuuauauccagauccuuuucuu

SEQ ID NO: 3292058 - RNA, 14 nt, Variola virus
uuucgaauaaguuu

SEQ ID NO: 3292059 - RNA, 23 nt, Variola virus
gaguuaucacaugcaaggcauuu

SEQ ID NO: 3292060 - RNA, 22 nt, Variola virus
uuaaaaguaaucaugaaauuaa

SEQ ID NO: 3292061 - RNA, 16 nt, Variola virus
uaaaaauaauauuguu

SEQ ID NO: 3292062 - RNA, 10 nt, Variola virus
cuaaauuaau

SEQ ID NO: 3292063 - RNA, 19 nt, Variola virus
cgaagauauacacacuaau

SEQ ID NO: 3292064 - RNA, 16 nt, Variola virus
uucaaucauagaacug

SEQ ID NO: 3292065 - RNA, 15 nt, Variola virus
guaugucuuauguau

SEQ ID NO: 3292066 - RNA, 23 nt, Variola virus
aguaauaucgaauauuuuaucca

SEQ ID NO: 3292067 - RNA, 22 nt, Variola virus
acauugauuaaauuuuaauaua

SEQ ID NO: 3292068 - RNA, 16 nt, Variola virus
auacugauaaaguaga

SEQ ID NO: 3292069 - RNA, 14 nt, Variola virus
uauauagaugucaa

SEQ ID NO: 3292070 - RNA, 17 nt, Variola virus
caaauauuauacaugau

SEQ ID NO: 3292071 - RNA, 17 nt, Variola virus
auaaaccgcuauugaaa

SEQ ID NO: 3292072 - RNA, 13 nt, Variola virus
gcgauugauuuug

SEQ ID NO: 3292073 - RNA, 20 nt, Variola virus
caauacauguuuuauaaaau

SEQ ID NO: 3292074 - RNA, 17 nt, Variola virus
uauguuuuauguuuauu

SEQ ID NO: 3292075 - RNA, 22 nt, Variola virus
uaaugccuuacucgguguauau

SEQ ID NO: 3292076 - RNA, 14 nt, Variola virus
guuauuuuguuaaa

SEQ ID NO: 3292077 - RNA, 18 nt, Variola virus
acuaaagacuaugucaaa

SEQ ID NO: 3292078 - RNA, 19 nt, Variola virus
uugaaacuaggauacauaa

SEQ ID NO: 3292079 - RNA, 22 nt, Variola virus
augugucuacauaaauaugcaa

SEQ ID NO: 3292080 - RNA, 18 nt, Variola virus
aauauuaauaacauuaca

SEQ ID NO: 3292081 - RNA, 15 nt, Variola virus
uaauaauucauggaa

SEQ ID NO: 3292082 - RNA, 19 nt, Variola virus
aucuauauugcuacauaau

SEQ ID NO: 3292083 - RNA, 23 nt, Variola virus
guggaggauggucccgaugauga

SEQ ID NO: 3292084 - RNA, 21 nt, Variola virus
cucugaauauagaacaucauu

SEQ ID NO: 3292085 - RNA, 17 nt, Variola virus
aguacccuacuaccaac

SEQ ID NO: 3292086 - RNA, 16 nt, Variola virus
auauuuuuuaacuagu

SEQ ID NO: 3292087 - RNA, 17 nt, Variola virus
aacagacuguuuaugaa

SEQ ID NO: 3292088 - RNA, 20 nt, Variola virus
ccaaucaacgaauuaaugau

SEQ ID NO: 3292089 - RNA, 18 nt, Variola virus
ucauaugacauuucauga

SEQ ID NO: 3292090 - RNA, 14 nt, Variola virus
gcaccaaaguuaua

SEQ ID NO: 3292091 - RNA, 13 nt, Variola virus
auauucuaugaug

SEQ ID NO: 3292092 - RNA, 19 nt, Variola virus
aauaauuuauguauuucga

SEQ ID NO: 3292093 - RNA, 16 nt, Variola virus
aguuugaauaguuugu

SEQ ID NO: 3292094 - RNA, 15 nt, Variola virus
auuucgaaaauacua

SEQ ID NO: 3292095 - RNA, 20 nt, Variola virus
cucguuaaacgccuuuagaa

SEQ ID NO: 3292096 - RNA, 17 nt, Variola virus
aaagaaugagauacaua

SEQ ID NO: 3292097 - RNA, 15 nt, Variola virus
agaucaagaaacauu

SEQ ID NO: 3292098 - RNA, 23 nt, Variola virus
gccauuuaguuauugaaauuaau

SEQ ID NO: 3292099 - RNA, 17 nt, Variola virus
gcuauauggauauucau

SEQ ID NO: 3292100 - RNA, 13 nt, Variola virus
auccuauaacuuc

SEQ ID NO: 3292101 - RNA, 19 nt, Variola virus
aauucggaucguaaaucug

SEQ ID NO: 3292102 - RNA, 13 nt, Variola virus
cacaugaaugaaa

SEQ ID NO: 3292103 - RNA, 16 nt, Variola virus
aauaguacauuuucca

SEQ ID NO: 3292104 - RNA, 16 nt, Variola virus
uuuaguccuauuucaa

SEQ ID NO: 3292105 - RNA, 19 nt, Variola virus
auaucuuuagauauaucca

SEQ ID NO: 3292106 - RNA, 13 nt, Variola virus
guacuauaauauu

SEQ ID NO: 3292107 - RNA, 12 nt, Variola virus
cgucuauccauu

SEQ ID NO: 3292108 - RNA, 15 nt, Variola virus
uuuaguaugacauaa

SEQ ID NO: 3292109 - RNA, 13 nt, Variola virus
uuuacauuauuua

SEQ ID NO: 3292110 - RNA, 15 nt, Variola virus
aaguacucaauaaau

SEQ ID NO: 3292111 - RNA, 20 nt, Variola virus
agauucuggaggagauggau

SEQ ID NO: 3292112 - RNA, 15 nt, Variola virus
uaaaagaugauuuuc

SEQ ID NO: 3292113 - RNA, 14 nt, Variola virus
accucuacaaauau

SEQ ID NO: 3292114 - RNA, 13 nt, Variola virus
aauacaggaucua

SEQ ID NO: 3292115 - RNA, 13 nt, Variola virus
acugcauauuaag

SEQ ID NO: 3292116 - RNA, 21 nt, Variola virus
uauuaaugagugcacaacugu

SEQ ID NO: 3292117 - RNA, 17 nt, Variola virus
agaugugucauacuugu

SEQ ID NO: 3292118 - RNA, 16 nt, Variola virus
uagucuguguuacaua

SEQ ID NO: 3292119 - RNA, 16 nt, Variola virus
caaacauuauguagua

SEQ ID NO: 3292120 - RNA, 14 nt, Variola virus
augaguauauguau

SEQ ID NO: 3292121 - RNA, 14 nt, Variola virus
aagauuguuuaaga

SEQ ID NO: 3292122 - RNA, 18 nt, Variola virus
acuucuaacaaacaucuc

SEQ ID NO: 3292123 - RNA, 20 nt, Variola virus
uacuaguggauguacaugua

SEQ ID NO: 3292124 - RNA, 20 nt, Variola virus
ucacuauaagaaaucagaau

SEQ ID NO: 3292125 - RNA, 14 nt, Variola virus
aacuuugaaauugu

SEQ ID NO: 3292126 - RNA, 13 nt, Variola virus
aaaucauccacag

SEQ ID NO: 3292127 - RNA, 16 nt, Variola virus
gauaguugaucagaau

SEQ ID NO: 3292128 - RNA, 13 nt, Variola virus
agugaaacaaaau

SEQ ID NO: 3292129 - RNA, 16 nt, Variola virus
aaaguaucacagaauc

SEQ ID NO: 3292130 - RNA, 15 nt, Variola virus
uagaaaauauauucu

SEQ ID NO: 3292131 - RNA, 20 nt, Variola virus
aacauaccauggaaaaauau

SEQ ID NO: 3292132 - RNA, 15 nt, Variola virus
gauccaaaacauaga

SEQ ID NO: 3292133 - RNA, 18 nt, Variola virus
uaaaauaaauauucuuca

SEQ ID NO: 3292134 - RNA, 16 nt, Variola virus
gaaguuguauacuauc

SEQ ID NO: 3292135 - RNA, 12 nt, Variola virus
aauauuuucuau

SEQ ID NO: 3292136 - RNA, 16 nt, Variola virus
aaucaagauucauuuu

SEQ ID NO: 3292137 - RNA, 19 nt, Variola virus
ucuucucuaagagcuacgu

SEQ ID NO: 3292138 - RNA, 21 nt, Variola virus
uuugauuaccuuacucaugau

SEQ ID NO: 3292139 - RNA, 16 nt, Variola virus
agugacagauauacaa

SEQ ID NO: 3292140 - RNA, 16 nt, Variola virus
uauaauguauguuuaa

SEQ ID NO: 3292141 - RNA, 18 nt, Variola virus
auacuugucaucauuucu

SEQ ID NO: 3292142 - RNA, 18 nt, Variola virus
caaucaacggauaaucug

SEQ ID NO: 3292143 - RNA, 22 nt, Variola virus
auugucugacauaagaugucua

SEQ ID NO: 3292144 - RNA, 23 nt, Variola virus
aguaugucgaaucuaaacuagug

SEQ ID NO: 3292145 - RNA, 15 nt, Variola virus
uuaauagauuaacau

SEQ ID NO: 3292146 - RNA, 19 nt, Variola virus
auaacguaaccagaauugu

SEQ ID NO: 3292147 - RNA, 16 nt, Variola virus
agucuagguucacaau

SEQ ID NO: 3292148 - RNA, 19 nt, Variola virus
gucuauucaacacuacuau

SEQ ID NO: 3292149 - RNA, 14 nt, Variola virus
acuuacuuaauaga

SEQ ID NO: 3292150 - RNA, 24 nt, Variola virus
uagaggaagggacggauacugucu

SEQ ID NO: 3292151 - RNA, 15 nt, Variola virus
auucugaaacaguau

SEQ ID NO: 3292152 - RNA, 23 nt, Variola virus
acuccuuauuuuuagacauuaga

SEQ ID NO: 3292153 - RNA, 23 nt, Variola virus
agcauuaauaauuguuuugaauu

SEQ ID NO: 3292154 - RNA, 15 nt, Variola virus
guaauuaauagauug

SEQ ID NO: 3292155 - RNA, 19 nt, Variola virus
uauagcuauucuucuuuaa

SEQ ID NO: 3292156 - RNA, 15 nt, Variola virus
agaauuuucuagauc

SEQ ID NO: 3292157 - RNA, 18 nt, Variola virus
uaacuacggauaacaaaa

SEQ ID NO: 3292158 - RNA, 20 nt, Variola virus
ccuacacuauuauaugauua

SEQ ID NO: 3292159 - RNA, 23 nt, Variola virus
acuucuaaugagcaaguagaaaa

SEQ ID NO: 3292160 - RNA, 22 nt, Variola virus
cugaggauuuacuaaguaauua

SEQ ID NO: 3292161 - RNA, 15 nt, Variola virus
uuguaagguuguaaa

SEQ ID NO: 3292162 - RNA, 14 nt, Variola virus
caaaauccaaauuu

SEQ ID NO: 3292163 - RNA, 13 nt, Variola virus
aaauaagagacuu

SEQ ID NO: 3292164 - RNA, 22 nt, Variola virus
acuugguauuuggaaauuagug

SEQ ID NO: 3292165 - RNA, 14 nt, Variola virus
gucaacaaaaaugu

SEQ ID NO: 3292166 - RNA, 14 nt, Variola virus
caugcucuauuuug

SEQ ID NO: 3292167 - RNA, 18 nt, Variola virus
aauaauugcgaauguuuu

SEQ ID NO: 3292168 - RNA, 15 nt, Variola virus
auaauaucuuguucu

SEQ ID NO: 3292169 - RNA, 18 nt, Variola virus
uguauaaaaacagaaaua

SEQ ID NO: 3292170 - RNA, 17 nt, Variola virus
agcauagaggaugaauu

SEQ ID NO: 3292171 - RNA, 14 nt, Variola virus
auacuuuguaacua

SEQ ID NO: 3292172 - RNA, 13 nt, Variola virus
agaguucauuuau

SEQ ID NO: 3292173 - RNA, 14 nt, Variola virus
caaaaaauccugua

SEQ ID NO: 3292174 - RNA, 20 nt, Variola virus
caucuacgccuuuaaauccu

SEQ ID NO: 3292175 - RNA, 14 nt, Variola virus
ucucaagauuuuaa

SEQ ID NO: 3292176 - RNA, 21 nt, Variola virus
caauaucuucguaaaaagauu

SEQ ID NO: 3292177 - RNA, 23 nt, Variola virus
caaauuuuuucuuuaauauuuua

SEQ ID NO: 3292178 - RNA, 17 nt, Variola virus
uaagauuguagaaucag

SEQ ID NO: 3292179 - RNA, 21 nt, Variola virus
uuacaagauaucucuggauau

SEQ ID NO: 3292180 - RNA, 16 nt, Variola virus
uaauaauagaaaccau

SEQ ID NO: 3292181 - RNA, 15 nt, Variola virus
acauaugguauuauu

SEQ ID NO: 3292182 - RNA, 21 nt, Variola virus
uauagagcacuauuucuaaau

SEQ ID NO: 3292183 - RNA, 23 nt, Variola virus
cuuaaaaucgguagaaucauauu

SEQ ID NO: 3292184 - RNA, 21 nt, Variola virus
gauugcauauuauauuuuaua

SEQ ID NO: 3292185 - RNA, 15 nt, Variola virus
auccaucaaaaaaca

SEQ ID NO: 3292186 - RNA, 15 nt, Variola virus
uaauagcgucuacau

SEQ ID NO: 3292187 - RNA, 22 nt, Variola virus
uugauuucgaauacgauacuua

SEQ ID NO: 3292188 - RNA, 13 nt, Variola virus
gcgcuaucuuuua

SEQ ID NO: 3292189 - RNA, 20 nt, Variola virus
cuaauaaacauuccacauuc

SEQ ID NO: 3292190 - RNA, 14 nt, Variola virus
gaucugaguaauau

SEQ ID NO: 3292191 - RNA, 16 nt, Variola virus
gaagcauuggaagcaa

SEQ ID NO: 3292192 - RNA, 16 nt, Variola virus
acugacagauguguuc

SEQ ID NO: 3292193 - RNA, 12 nt, Variola virus
agagauuuuacu

SEQ ID NO: 3292194 - RNA, 22 nt, Variola virus
aggauaugauaaaaauauaauu

SEQ ID NO: 3292195 - RNA, 22 nt, Variola virus
auaacaauuaacaauuaucaaa

SEQ ID NO: 3292196 - RNA, 23 nt, Variola virus
acaaaucuauuuggauuuuuugc

SEQ ID NO: 3292197 - RNA, 11 nt, Variola virus
cucuaaaugag

SEQ ID NO: 3292198 - RNA, 16 nt, Variola virus
aacuauuuucaguaau

SEQ ID NO: 3292199 - RNA, 13 nt, Variola virus
aacaaucaagaag

SEQ ID NO: 3292200 - RNA, 12 nt, Variola virus
auuuuuaucaug

SEQ ID NO: 3292201 - RNA, 18 nt, Variola virus
uucugcauuacaaagaag

SEQ ID NO: 3292202 - RNA, 19 nt, Variola virus
uacuaugcacauuauucua

SEQ ID NO: 3292203 - RNA, 13 nt, Variola virus
cuaauaaacauuc

SEQ ID NO: 3292204 - RNA, 19 nt, Variola virus
gccuauaaaguaauaaucu

SEQ ID NO: 3292205 - RNA, 21 nt, Variola virus
auccaacuuaacaaaucuuaa

SEQ ID NO: 3292206 - RNA, 15 nt, Variola virus
accuauuuacuggug

SEQ ID NO: 3292207 - RNA, 14 nt, Variola virus
uucucuaaaugaug

SEQ ID NO: 3292208 - RNA, 22 nt, Variola virus
gugguaaguuauacacuaaaag

SEQ ID NO: 3292209 - RNA, 14 nt, Variola virus
cuguauuguuaaua

SEQ ID NO: 3292210 - RNA, 15 nt, Variola virus
uauaucguuaucauc

SEQ ID NO: 3292211 - RNA, 16 nt, Variola virus
aaggaauugaugaagu

SEQ ID NO: 3292212 - RNA, 14 nt, Variola virus
gaauuuaguaauau

SEQ ID NO: 3292213 - RNA, 15 nt, Variola virus
uuaacuuuauacuuu

SEQ ID NO: 3292214 - RNA, 14 nt, Variola virus
cagaaauaugugaa

SEQ ID NO: 3292215 - RNA, 22 nt, Variola virus
agguuuugcaacauguuaaaau

SEQ ID NO: 3292216 - RNA, 21 nt, Variola virus
aguaucuagccauaucuaaag

SEQ ID NO: 3292217 - RNA, 14 nt, Variola virus
aguagguuuaagaa

SEQ ID NO: 3292218 - RNA, 13 nt, Variola virus
gccucaaauguag

SEQ ID NO: 3292219 - RNA, 18 nt, Variola virus
augaaaucuaucuuauau

SEQ ID NO: 3292220 - RNA, 18 nt, Variola virus
uauuacguacauaacauu

SEQ ID NO: 3292221 - RNA, 19 nt, Variola virus
aguagaaaauaauauagau

SEQ ID NO: 3292222 - RNA, 21 nt, Variola virus
guuaauuauuucuaacauuga

SEQ ID NO: 3292223 - RNA, 15 nt, Variola virus
ucgcuuucauaguua

SEQ ID NO: 3292224 - RNA, 12 nt, Variola virus
aagaauaaauua

SEQ ID NO: 3292225 - RNA, 14 nt, Variola virus
uccuguaauacuuu

SEQ ID NO: 3292226 - RNA, 13 nt, Variola virus
caagaaugauauc

SEQ ID NO: 3292227 - RNA, 18 nt, Variola virus
auuacucuccuagguuuc

SEQ ID NO: 3292228 - RNA, 22 nt, Variola virus
acucagauaauagcaauauuag

SEQ ID NO: 3292229 - RNA, 21 nt, Variola virus
cauauauuucgugauauacau

SEQ ID NO: 3292230 - RNA, 21 nt, Variola virus
acugucacuggaaagaugaua

SEQ ID NO: 3292231 - RNA, 22 nt, Variola virus
uauaaucaguagcguguuuuaa

SEQ ID NO: 3292232 - RNA, 15 nt, Variola virus
gaaauugauaaugag

SEQ ID NO: 3292233 - RNA, 18 nt, Variola virus
acggaugcagaugucuuu

SEQ ID NO: 3292234 - RNA, 18 nt, Variola virus
aaaguacuguucauacau

SEQ ID NO: 3292235 - RNA, 21 nt, Variola virus
uccaugcaacauuuccuacau

SEQ ID NO: 3292236 - RNA, 17 nt, Variola virus
gauauauccacuucuuc

SEQ ID NO: 3292237 - RNA, 14 nt, Variola virus
gaauguguauucuc

SEQ ID NO: 3292238 - RNA, 19 nt, Variola virus
ucacaacaucuauaaaagu

SEQ ID NO: 3292239 - RNA, 21 nt, Variola virus
acacgaaagaaucaaaagaau

SEQ ID NO: 3292240 - RNA, 18 nt, Variola virus
cugauagcaauucaugua

SEQ ID NO: 3292241 - RNA, 18 nt, Variola virus
auaaaggauacguuguau

SEQ ID NO: 3292242 - RNA, 18 nt, Variola virus
ugagaugacuggaaauca

SEQ ID NO: 3292243 - RNA, 17 nt, Variola virus
gagacgaucuacuauca

SEQ ID NO: 3292244 - RNA, 14 nt, Variola virus
acuaaaucuucaca

SEQ ID NO: 3292245 - RNA, 18 nt, Variola virus
agacaaugcuaauauauu

SEQ ID NO: 3292246 - RNA, 10 nt, Variola virus
cgauauuaau

SEQ ID NO: 3292247 - RNA, 22 nt, Variola virus
gaauaacuuugauaauaaggau

SEQ ID NO: 3292248 - RNA, 21 nt, Variola virus
uucuuuaauuauauggcacug

SEQ ID NO: 3292249 - RNA, 15 nt, Variola virus
guuuguuuuggaaau

SEQ ID NO: 3292250 - RNA, 19 nt, Variola virus
aacaagaucgauagacacu

SEQ ID NO: 3292251 - RNA, 16 nt, Variola virus
uagaucugaauuaaau

SEQ ID NO: 3292252 - RNA, 18 nt, Variola virus
acucauauaguauugaac

SEQ ID NO: 3292253 - RNA, 17 nt, Variola virus
uaacguugguauuauau

SEQ ID NO: 3292254 - RNA, 19 nt, Variola virus
uaaguauucacaaacggga

SEQ ID NO: 3292255 - RNA, 15 nt, Variola virus
agaacacaugucuua

SEQ ID NO: 3292256 - RNA, 21 nt, Variola virus
gaaauaaccgcaugauuauuu

SEQ ID NO: 3292257 - RNA, 14 nt, Variola virus
aacccauaaauaca

SEQ ID NO: 3292258 - RNA, 22 nt, Variola virus
uaauauucauucaauauuuaca

SEQ ID NO: 3292259 - RNA, 22 nt, Variola virus
gugaguuugaauuuucuacauc

SEQ ID NO: 3292260 - RNA, 15 nt, Variola virus
auuuugacuuacaua

SEQ ID NO: 3292261 - RNA, 18 nt, Variola virus
uagcucuguauucuguau

SEQ ID NO: 3292262 - RNA, 20 nt, Variola virus
caaauuugacuacauucagg

SEQ ID NO: 3292263 - RNA, 13 nt, Variola virus
cagaaaagauauu

SEQ ID NO: 3292264 - RNA, 19 nt, Variola virus
aaacuugauaauuaauaau

SEQ ID NO: 3292265 - RNA, 21 nt, Variola virus
aucugugacagauaucaucuu

SEQ ID NO: 3292266 - RNA, 23 nt, Variola virus
aauucucggauagucuucuuauc

SEQ ID NO: 3292267 - RNA, 17 nt, Variola virus
ucaaagcaucaaaauag

SEQ ID NO: 3292268 - RNA, 20 nt, Variola virus
augcauuggcaucaaaagaa

SEQ ID NO: 3292269 - RNA, 18 nt, Variola virus
aacaucaacugaaaaagu

SEQ ID NO: 3292270 - RNA, 14 nt, Variola virus
uaguuuuaagaaag

SEQ ID NO: 3292271 - RNA, 22 nt, Variola virus
uuuguguuugacuguuuguacu

SEQ ID NO: 3292272 - RNA, 22 nt, Variola virus
uaacuuuuauuuuuagaaagua

SEQ ID NO: 3292273 - RNA, 18 nt, Variola virus
auucauuaauuuucaguc

SEQ ID NO: 3292274 - RNA, 19 nt, Variola virus
aaguauuugaacauguaga

SEQ ID NO: 3292275 - RNA, 15 nt, Variola virus
aaucuacucacauau

SEQ ID NO: 3292276 - RNA, 13 nt, Variola virus
acguauuaaauau

SEQ ID NO: 3292277 - RNA, 15 nt, Variola virus
aaugauaauaggaau

SEQ ID NO: 3292278 - RNA, 16 nt, Variola virus
acaaaucacugaaaau

SEQ ID NO: 3292279 - RNA, 16 nt, Variola virus
guugcaauauacauaa

SEQ ID NO: 3292280 - RNA, 16 nt, Variola virus
caguucguuuaacgau

SEQ ID NO: 3292281 - RNA, 15 nt, Variola virus
acauaacuuguacag

SEQ ID NO: 3292282 - RNA, 17 nt, Variola virus
uuauccauuuauacauu

SEQ ID NO: 3292283 - RNA, 17 nt, Variola virus
aauuauauaauucuauu

SEQ ID NO: 3292284 - RNA, 14 nt, Variola virus
uauccucaaacauc

SEQ ID NO: 3292285 - RNA, 13 nt, Variola virus
uguaaaaugacuc

SEQ ID NO: 3292286 - RNA, 19 nt, Variola virus
ucagacgaguguaaacacu

SEQ ID NO: 3292287 - RNA, 19 nt, Variola virus
aucaaaaucguauaaaguu

SEQ ID NO: 3292288 - RNA, 18 nt, Variola virus
aauuccggcggcgguacc

SEQ ID NO: 3292289 - RNA, 13 nt, Variola virus
uuuuguacauaau

SEQ ID NO: 3292290 - RNA, 14 nt, Variola virus
aauuccauuauucu

SEQ ID NO: 3292291 - RNA, 15 nt, Variola virus
acuauagaucuuuca

SEQ ID NO: 3292292 - RNA, 21 nt, Variola virus
agaacuuaugaccguaauaaa

SEQ ID NO: 3292293 - RNA, 17 nt, Variola virus
aaugaguaaguucuaua

SEQ ID NO: 3292294 - RNA, 18 nt, Variola virus
uaauucauuuucaauaau

SEQ ID NO: 3292295 - RNA, 13 nt, Variola virus
aaaauaaaguuau

SEQ ID NO: 3292296 - RNA, 21 nt, Variola virus
ugauauuggagcaaaauccua

SEQ ID NO: 3292297 - RNA, 16 nt, Variola virus
uaauaaauugguaaau

SEQ ID NO: 3292298 - RNA, 16 nt, Variola virus
caaugacgaugauaug

SEQ ID NO: 3292299 - RNA, 14 nt, Variola virus
uuggcaaaaacgga

SEQ ID NO: 3292300 - RNA, 20 nt, Variola virus
uauuggaaaggcguuaucua

SEQ ID NO: 3292301 - RNA, 13 nt, Variola virus
aaucauaaccauu

SEQ ID NO: 3292302 - RNA, 23 nt, Variola virus
aaugagguguacagcacaugaua

SEQ ID NO: 3292303 - RNA, 13 nt, Variola virus
uuuccuuaucauu

SEQ ID NO: 3292304 - RNA, 20 nt, Variola virus
guucucaagaacuacaaaag

SEQ ID NO: 3292305 - RNA, 14 nt, Variola virus
guacucuuaagaga

SEQ ID NO: 3292306 - RNA, 14 nt, Variola virus
aucuacaauuauug

SEQ ID NO: 3292307 - RNA, 18 nt, Variola virus
ucgacguugcucaaaguc

SEQ ID NO: 3292308 - RNA, 17 nt, Variola virus
auuuguucaagauagau

SEQ ID NO: 3292309 - RNA, 16 nt, Variola virus
cuaauggaugucaaug

SEQ ID NO: 3292310 - RNA, 19 nt, Variola virus
aaucaagggaaaaucugaa

SEQ ID NO: 3292311 - RNA, 17 nt, Variola virus
auuucguucucugaaaa

SEQ ID NO: 3292312 - RNA, 22 nt, Variola virus
agcauagauccgugagaaauac

SEQ ID NO: 3292313 - RNA, 23 nt, Variola virus
aaaugauucuaucuacaucuuca

SEQ ID NO: 3292314 - RNA, 13 nt, Variola virus
aauauuacuacau

SEQ ID NO: 3292315 - RNA, 14 nt, Variola virus
auugcgacacuauu

SEQ ID NO: 3292316 - RNA, 21 nt, Variola virus
gucuaaacguuguuuacucau

SEQ ID NO: 3292317 - RNA, 17 nt, Variola virus
augaaacgaacacuauu

SEQ ID NO: 3292318 - RNA, 18 nt, Variola virus
auuuuugcaucauuuacg

SEQ ID NO: 3292319 - RNA, 22 nt, Variola virus
cagugguuuuauuuuauccuug

SEQ ID NO: 3292320 - RNA, 20 nt, Variola virus
ucguucugcuaaauuuucau

SEQ ID NO: 3292321 - RNA, 16 nt, Variola virus
agaugaaucaaaugua

SEQ ID NO: 3292322 - RNA, 22 nt, Variola virus
auucuagugccgaacauuaaca

SEQ ID NO: 3292323 - RNA, 19 nt, Variola virus
uguaaauauuacugguaua

SEQ ID NO: 3292324 - RNA, 22 nt, Variola virus
acaauagugucuacuuaaaugu

SEQ ID NO: 3292325 - RNA, 21 nt, Variola virus
aagacagagauacuaaauaua

SEQ ID NO: 3292326 - RNA, 19 nt, Variola virus
uccgacaugcaaaaaugcu

SEQ ID NO: 3292327 - RNA, 17 nt, Variola virus
auuuaauacguucauua

SEQ ID NO: 3292328 - RNA, 17 nt, Variola virus
auaaccuccugaaaaug

SEQ ID NO: 3292329 - RNA, 19 nt, Variola virus
uaguaacggacuuaacaug

SEQ ID NO: 3292330 - RNA, 17 nt, Variola virus
aauaucuuuaauccaau

SEQ ID NO: 3292331 - RNA, 17 nt, Variola virus
uggucauaauagaaugu

SEQ ID NO: 3292332 - RNA, 15 nt, Variola virus
aauacuuuacgcuau

SEQ ID NO: 3292333 - RNA, 19 nt, Variola virus
uuuaaaauuagaucuuuua

SEQ ID NO: 3292334 - RNA, 22 nt, Variola virus
uguauucaacaugcuuuucuau

SEQ ID NO: 3292335 - RNA, 14 nt, Variola virus
auccaagucaauau

SEQ ID NO: 3292336 - RNA, 13 nt, Variola virus
uacauacuaauau

SEQ ID NO: 3292337 - RNA, 15 nt, Variola virus
uuaauuuauuauuga

SEQ ID NO: 3292338 - RNA, 22 nt, Variola virus
agaacuuaacuuuuucuuucuc

SEQ ID NO: 3292339 - RNA, 16 nt, Variola virus
cuggaggagauggauu

SEQ ID NO: 3292340 - RNA, 15 nt, Variola virus
agauauccagaguuu

SEQ ID NO: 3292341 - RNA, 22 nt, Variola virus
accuaaauaauuauacuuugua

SEQ ID NO: 3292342 - RNA, 12 nt, Variola virus
uaaagauauucu

SEQ ID NO: 3292343 - RNA, 21 nt, Variola virus
cuugagagacaugauucagaa

SEQ ID NO: 3292344 - RNA, 22 nt, Variola virus
guuucaaagcaauuguauuauu

SEQ ID NO: 3292345 - RNA, 18 nt, Variola virus
uuuagaugaauuauuauu

SEQ ID NO: 3292346 - RNA, 18 nt, Variola virus
auuucaaggacaaaauga

SEQ ID NO: 3292347 - RNA, 17 nt, Variola virus
uuuauccuauuauguaa

SEQ ID NO: 3292348 - RNA, 17 nt, Variola virus
uaaacauugauuaaauu

SEQ ID NO: 3292349 - RNA, 13 nt, Variola virus
ucggguacaaaag

SEQ ID NO: 3292350 - RNA, 19 nt, Variola virus
aaaacugguuaaaacagua

SEQ ID NO: 3292351 - RNA, 13 nt, Variola virus
cucagaaagauau

SEQ ID NO: 3292352 - RNA, 20 nt, Variola virus
ggauauaaacuaauauggau

SEQ ID NO: 3292353 - RNA, 13 nt, Variola virus
agaauauauguau

SEQ ID NO: 3292354 - RNA, 15 nt, Variola virus
aacuaguguagaaaa

SEQ ID NO: 3292355 - RNA, 23 nt, Variola virus
aauuucuaaaggagcaaauguua

SEQ ID NO: 3292356 - RNA, 17 nt, Variola virus
ugauuucugaauuauug

SEQ ID NO: 3292357 - RNA, 23 nt, Variola virus
augacuuauaaaaauacuaaaac

SEQ ID NO: 3292358 - RNA, 14 nt, Variola virus
auuaccacuuucca

SEQ ID NO: 3292359 - RNA, 17 nt, Variola virus
auuucguuaaaacauuc

SEQ ID NO: 3292360 - RNA, 16 nt, Variola virus
uugcauauuuaucuuu

SEQ ID NO: 3292361 - RNA, 18 nt, Variola virus
aggcacuaaugcaaauua

SEQ ID NO: 3292362 - RNA, 22 nt, Variola virus
guguauuacaugcaucuuauua

SEQ ID NO: 3292363 - RNA, 14 nt, Variola virus
uuuaacuuuucauu

SEQ ID NO: 3292364 - RNA, 12 nt, Variola virus
uuacagagacuu

SEQ ID NO: 3292365 - RNA, 23 nt, Variola virus
ucacuuauagauagauaguacau

SEQ ID NO: 3292366 - RNA, 12 nt, Variola virus
caauuaaaucau

SEQ ID NO: 3292367 - RNA, 22 nt, Variola virus
gacuuguuaaaucuauauacca

SEQ ID NO: 3292368 - RNA, 19 nt, Variola virus
aaauacuacagaaacuaau

SEQ ID NO: 3292369 - RNA, 15 nt, Variola virus
uaaucguuauuauca

SEQ ID NO: 3292370 - RNA, 13 nt, Variola virus
gauaauaauacac

SEQ ID NO: 3292371 - RNA, 13 nt, Variola virus
cgcuguaucacaa

SEQ ID NO: 3292372 - RNA, 16 nt, Variola virus
agucuuggucuauuau

SEQ ID NO: 3292373 - RNA, 22 nt, Variola virus
uaucuuuaacuaagucaauuau

SEQ ID NO: 3292374 - RNA, 17 nt, Variola virus
auuggaacuaguauuua

SEQ ID NO: 3292375 - RNA, 16 nt, Variola virus
ggugagaacaugagac

SEQ ID NO: 3292376 - RNA, 21 nt, Variola virus
cuaucaaccacauaauacaau

SEQ ID NO: 3292377 - RNA, 20 nt, Variola virus
cuguacuaucuagagauugu

SEQ ID NO: 3292378 - RNA, 19 nt, Variola virus
uauagagcacuauuucuaa

SEQ ID NO: 3292379 - RNA, 18 nt, Variola virus
auauuacuaauugauaga

SEQ ID NO: 3292380 - RNA, 20 nt, Variola virus
auugauuauuucaaagacua

SEQ ID NO: 3292381 - RNA, 22 nt, Variola virus
uaauaucaaacgguaacacauc

SEQ ID NO: 3292382 - RNA, 20 nt, Variola virus
uuagcauauaccucauuaac

SEQ ID NO: 3292383 - RNA, 15 nt, Variola virus
auuguauuaugauga

SEQ ID NO: 3292384 - RNA, 14 nt, Variola virus
cgauaauauauuua

SEQ ID NO: 3292385 - RNA, 18 nt, Variola virus
acuacauacgcgacugua

SEQ ID NO: 3292386 - RNA, 12 nt, Variola virus
uuuuauaaacau

SEQ ID NO: 3292387 - RNA, 20 nt, Variola virus
ucguggauaaucauucuuaa

SEQ ID NO: 3292388 - RNA, 17 nt, Variola virus
ucgauacaucaacucuc

SEQ ID NO: 3292389 - RNA, 15 nt, Variola virus
aauaaguauauaaau

SEQ ID NO: 3292390 - RNA, 12 nt, Variola virus
caaucuaucuau

SEQ ID NO: 3292391 - RNA, 16 nt, Variola virus
agauuucaaagauguu

SEQ ID NO: 3292392 - RNA, 19 nt, Variola virus
gacuguagaacucaugaau

SEQ ID NO: 3292393 - RNA, 22 nt, Variola virus
cgauaauuguuucauauguuuu

SEQ ID NO: 3292394 - RNA, 21 nt, Variola virus
gcguauggcaaacgaaggaaa

SEQ ID NO: 3292395 - RNA, 13 nt, Variola virus
auaauuuugugaa

SEQ ID NO: 3292396 - RNA, 16 nt, Variola virus
cuagaugguuauuuac

SEQ ID NO: 3292397 - RNA, 17 nt, Variola virus
uuaauauaugauuauca

SEQ ID NO: 3292398 - RNA, 17 nt, Variola virus
aagucuuaaaaauacuu

SEQ ID NO: 3292399 - RNA, 21 nt, Variola virus
auaaaugcucugcaauaacua

SEQ ID NO: 3292400 - RNA, 22 nt, Variola virus
guaauauccucuauuauacauu

SEQ ID NO: 3292401 - RNA, 13 nt, Variola virus
uuccaucauuaac

SEQ ID NO: 3292402 - RNA, 13 nt, Variola virus
aaguugaucucaa

SEQ ID NO: 3292403 - RNA, 22 nt, Variola virus
aauaucuccacgauucaggaau

SEQ ID NO: 3292404 - RNA, 16 nt, Variola virus
acauauuuauaauuua

SEQ ID NO: 3292405 - RNA, 14 nt, Variola virus
aauauaugauuauc

SEQ ID NO: 3292406 - RNA, 18 nt, Variola virus
uaaaugagaugagaagau

SEQ ID NO: 3292407 - RNA, 13 nt, Variola virus
auuaaugagauug

SEQ ID NO: 3292408 - RNA, 15 nt, Variola virus
gggaggcuugaagug

SEQ ID NO: 3292409 - RNA, 18 nt, Variola virus
aauagauagucuaccauu

SEQ ID NO: 3292410 - RNA, 17 nt, Variola virus
aaauauuguuaaauaau

SEQ ID NO: 3292411 - RNA, 13 nt, Variola virus
auaggaucuauau

SEQ ID NO: 3292412 - RNA, 18 nt, Variola virus
gauaaacacucauauuau

SEQ ID NO: 3292413 - RNA, 13 nt, Variola virus
uauucuuaaaugu

SEQ ID NO: 3292414 - RNA, 15 nt, Variola virus
aacuuaaacaaaaua

SEQ ID NO: 3292415 - RNA, 14 nt, Variola virus
aauacguaaaacuc

SEQ ID NO: 3292416 - RNA, 13 nt, Variola virus
caugcuaccuaau

SEQ ID NO: 3292417 - RNA, 23 nt, Variola virus
auuaucguuccugguauauagau

SEQ ID NO: 3292418 - RNA, 13 nt, Variola virus
ggcaaaagaauac

SEQ ID NO: 3292419 - RNA, 18 nt, Variola virus
uauaaucuagccaacaau

SEQ ID NO: 3292420 - RNA, 18 nt, Variola virus
auaaauuaucaaauacuu

SEQ ID NO: 3292421 - RNA, 15 nt, Variola virus
cuauuuuaucauuuu

SEQ ID NO: 3292422 - RNA, 20 nt, Variola virus
uaaacgcgucaaauuuuuca

SEQ ID NO: 3292423 - RNA, 22 nt, Variola virus
uuagagaacauacauuuguaaa

SEQ ID NO: 3292424 - RNA, 12 nt, Variola virus
uaucuucucaaa

SEQ ID NO: 3292425 - RNA, 21 nt, Variola virus
cgaaauaguuaauaauucugu

SEQ ID NO: 3292426 - RNA, 23 nt, Variola virus
ugucuagaacggcaauugucuua

SEQ ID NO: 3292427 - RNA, 12 nt, Variola virus
ucauuugaaaau

SEQ ID NO: 3292428 - RNA, 13 nt, Variola virus
uguaagauacuug

SEQ ID NO: 3292429 - RNA, 18 nt, Variola virus
acuuacauggacacauuc

SEQ ID NO: 3292430 - RNA, 14 nt, Variola virus
acacauaacugaag

SEQ ID NO: 3292431 - RNA, 20 nt, Variola virus
uauuuguacacaucuaucaa

SEQ ID NO: 3292432 - RNA, 18 nt, Variola virus
cgaauaaguuugcagaca

SEQ ID NO: 3292433 - RNA, 14 nt, Variola virus
guauuaauaauauc

SEQ ID NO: 3292434 - RNA, 17 nt, Variola virus
gcgaucugaauaaacaa

SEQ ID NO: 3292435 - RNA, 17 nt, Variola virus
guuucaucaauagaaga

SEQ ID NO: 3292436 - RNA, 19 nt, Variola virus
uaguugauagaacaaaaua

SEQ ID NO: 3292437 - RNA, 14 nt, Variola virus
cagaccucucuuaa

SEQ ID NO: 3292438 - RNA, 22 nt, Variola virus
auucuugaaacuuuucagaaua

SEQ ID NO: 3292439 - RNA, 17 nt, Variola virus
aucggagcuacauuacc

SEQ ID NO: 3292440 - RNA, 13 nt, Variola virus
aucagaucauauu

SEQ ID NO: 3292441 - RNA, 20 nt, Variola virus
guagcaaagaaauuaauaga

SEQ ID NO: 3292442 - RNA, 21 nt, Variola virus
auguuuauuagcguacacauu

SEQ ID NO: 3292443 - RNA, 13 nt, Variola virus
agaacccuuaaua

SEQ ID NO: 3292444 - RNA, 13 nt, Variola virus
acagauuaauagu

SEQ ID NO: 3292445 - RNA, 13 nt, Variola virus
acaguuuaauaga

SEQ ID NO: 3292446 - RNA, 14 nt, Variola virus
ugaauuguuucuuu

SEQ ID NO: 3292447 - RNA, 19 nt, Variola virus
caaugccaucuuacaugau

SEQ ID NO: 3292448 - RNA, 14 nt, Variola virus
ugaggauaaugcua

SEQ ID NO: 3292449 - RNA, 14 nt, Variola virus
auauuguagcauua

SEQ ID NO: 3292450 - RNA, 20 nt, Variola virus
uugcuuugguuuaauuauuu

SEQ ID NO: 3292451 - RNA, 14 nt, Variola virus
agacuaugggaaua

SEQ ID NO: 3292452 - RNA, 17 nt, Variola virus
uguuuucaccaugacuu

SEQ ID NO: 3292453 - RNA, 13 nt, Variola virus
uagugauuuugaa

SEQ ID NO: 3292454 - RNA, 21 nt, Variola virus
cuauauagcuauucuucuuua

SEQ ID NO: 3292455 - RNA, 18 nt, Variola virus
aauuuauuaauacaggau

SEQ ID NO: 3292456 - RNA, 16 nt, Variola virus
uugcauacaauacuag

SEQ ID NO: 3292457 - RNA, 16 nt, Variola virus
aauacacccaauaaua

SEQ ID NO: 3292458 - RNA, 17 nt, Variola virus
uaggcacagucaaacau

SEQ ID NO: 3292459 - RNA, 17 nt, Variola virus
gcuaugaaggaaagaca

SEQ ID NO: 3292460 - RNA, 15 nt, Variola virus
aaggcacuaugucca

SEQ ID NO: 3292461 - RNA, 23 nt, Variola virus
acaaauaauagguuguaauacau

SEQ ID NO: 3292462 - RNA, 15 nt, Variola virus
uuaauguuuuaaauu

SEQ ID NO: 3292463 - RNA, 16 nt, Variola virus
agauaugccaaaauca

SEQ ID NO: 3292464 - RNA, 16 nt, Variola virus
auacgaggaugaugau

SEQ ID NO: 3292465 - RNA, 22 nt, Variola virus
aacgccuauucgaaauuagaaa

SEQ ID NO: 3292466 - RNA, 18 nt, Variola virus
uacacaucagcaucuuga

SEQ ID NO: 3292467 - RNA, 14 nt, Variola virus
uuuagaauuuccaa

SEQ ID NO: 3292468 - RNA, 17 nt, Variola virus
gaauaucuacaauauau

SEQ ID NO: 3292469 - RNA, 16 nt, Variola virus
acuuacugacaaaguu

SEQ ID NO: 3292470 - RNA, 16 nt, Variola virus
auaauggugcuuguau

SEQ ID NO: 3292471 - RNA, 15 nt, Variola virus
agauccaucuacuuu

SEQ ID NO: 3292472 - RNA, 20 nt, Variola virus
uuuucuugagagacaugauu

SEQ ID NO: 3292473 - RNA, 14 nt, Variola virus
aaucuuaauaucuu

SEQ ID NO: 3292474 - RNA, 18 nt, Variola virus
aaauaggcguacaaaagg

SEQ ID NO: 3292475 - RNA, 14 nt, Variola virus
cgcuguauauggaa

SEQ ID NO: 3292476 - RNA, 18 nt, Variola virus
gagauguuauuaaauguu

SEQ ID NO: 3292477 - RNA, 19 nt, Variola virus
gaaaugggucauauuauca

SEQ ID NO: 3292478 - RNA, 17 nt, Variola virus
auaucuuagaauauugu

SEQ ID NO: 3292479 - RNA, 12 nt, Variola virus
cauucuauuuuu

SEQ ID NO: 3292480 - RNA, 14 nt, Variola virus
aaacuaauucuguc

SEQ ID NO: 3292481 - RNA, 16 nt, Variola virus
uacagaaacaaugauu

SEQ ID NO: 3292482 - RNA, 19 nt, Variola virus
caaaacaacauauacacau

SEQ ID NO: 3292483 - RNA, 19 nt, Variola virus
uguaaauagaacauacuuu

SEQ ID NO: 3292484 - RNA, 20 nt, Variola virus
caaaagacguaaauauucua

SEQ ID NO: 3292485 - RNA, 23 nt, Variola virus
agaauauaaauuauauauggauu

SEQ ID NO: 3292486 - RNA, 14 nt, Variola virus
uuuauauuuuucuu

SEQ ID NO: 3292487 - RNA, 13 nt, Variola virus
caaaaagacuaua

SEQ ID NO: 3292488 - RNA, 19 nt, Variola virus
aucuuguuauaaacacaca

SEQ ID NO: 3292489 - RNA, 20 nt, Variola virus
uuguacauuaauaaaugaaa

SEQ ID NO: 3292490 - RNA, 20 nt, Variola virus
gauacaauuagauauaucua

SEQ ID NO: 3292491 - RNA, 23 nt, Variola virus
uuuuucguuuacaaaaucaaaua

SEQ ID NO: 3292492 - RNA, 18 nt, Variola virus
aucauaucuucgaaaguu

SEQ ID NO: 3292493 - RNA, 17 nt, Variola virus
accauauagaucaauca

SEQ ID NO: 3292494 - RNA, 18 nt, Variola virus
ccaacauguauauuugga

SEQ ID NO: 3292495 - RNA, 12 nt, Variola virus
caucugucauau

SEQ ID NO: 3292496 - RNA, 14 nt, Variola virus
cauuauaaaaagug

SEQ ID NO: 3292497 - RNA, 16 nt, Variola virus
uaaaaauacaucuguu

SEQ ID NO: 3292498 - RNA, 17 nt, Variola virus
ucccccuuaucaguaga

SEQ ID NO: 3292499 - RNA, 14 nt, Variola virus
aaagauagaaauga

SEQ ID NO: 3292500 - RNA, 22 nt, Variola virus
cccauuuuuugcuuucuguauc

SEQ ID NO: 3292501 - RNA, 13 nt, Variola virus
auauaacauagaa

SEQ ID NO: 3292502 - RNA, 12 nt, Variola virus
auuaauauuaac

SEQ ID NO: 3292503 - RNA, 13 nt, Variola virus
ccauagaggaugu

SEQ ID NO: 3292504 - RNA, 15 nt, Variola virus
auucacgcuuccaaa

SEQ ID NO: 3292505 - RNA, 23 nt, Variola virus
acuuuaaaguuguuaaaaaauua

SEQ ID NO: 3292506 - RNA, 22 nt, Variola virus
aaguuuucuuucaaaauagcua

SEQ ID NO: 3292507 - RNA, 19 nt, Variola virus
auuacagcguaaaacacau

SEQ ID NO: 3292508 - RNA, 13 nt, Variola virus
uuaauauauguca

SEQ ID NO: 3292509 - RNA, 15 nt, Variola virus
aaugauuuuggaaaa

SEQ ID NO: 3292510 - RNA, 23 nt, Variola virus
uaccuaauauaaaucaaauacuu

SEQ ID NO: 3292511 - RNA, 16 nt, Variola virus
uuucagaaucuagauu

SEQ ID NO: 3292512 - RNA, 18 nt, Variola virus
aguugaacagaugauaua

SEQ ID NO: 3292513 - RNA, 13 nt, Variola virus
auauagcauagau

SEQ ID NO: 3292514 - RNA, 17 nt, Variola virus
augaucaagaaggaaau

SEQ ID NO: 3292515 - RNA, 12 nt, Variola virus
gucuagaaauaa

SEQ ID NO: 3292516 - RNA, 17 nt, Variola virus
uuacuacauucauuaau

SEQ ID NO: 3292517 - RNA, 19 nt, Variola virus
agauuccugacuacuaacg

SEQ ID NO: 3292518 - RNA, 23 nt, Variola virus
gaaagcuaucgaacguaaacgua

SEQ ID NO: 3292519 - RNA, 17 nt, Variola virus
auagauaauacaaaauu

SEQ ID NO: 3292520 - RNA, 16 nt, Variola virus
cuaugccaacacaaac

SEQ ID NO: 3292521 - RNA, 15 nt, Variola virus
uguuauaaguuuuua

SEQ ID NO: 3292522 - RNA, 18 nt, Variola virus
auucauaacgucauugau

SEQ ID NO: 3292523 - RNA, 22 nt, Variola virus
auaaauacccuuccaaauaaua

SEQ ID NO: 3292524 - RNA, 17 nt, Variola virus
uuauauaaaaacauuuu

SEQ ID NO: 3292525 - RNA, 18 nt, Variola virus
aucuucguaccucaaacu

SEQ ID NO: 3292526 - RNA, 13 nt, Variola virus
ugagauaagaaca

SEQ ID NO: 3292527 - RNA, 23 nt, Variola virus
acucucaagauuuuaaaaaacug

SEQ ID NO: 3292528 - RNA, 21 nt, Variola virus
cgagaauguugggauccagag

SEQ ID NO: 3292529 - RNA, 16 nt, Variola virus
augauccuauucuaaa

SEQ ID NO: 3292530 - RNA, 16 nt, Variola virus
auauuacuguuaauaa

SEQ ID NO: 3292531 - RNA, 17 nt, Variola virus
agucagguccaauauua

SEQ ID NO: 3292532 - RNA, 17 nt, Variola virus
auuuaaggcuuuaaaau

SEQ ID NO: 3292533 - RNA, 21 nt, Variola virus
augguacguaaccgaaucuuc

SEQ ID NO: 3292534 - RNA, 20 nt, Variola virus
gaugcuguaaauuaugaaaa

SEQ ID NO: 3292535 - RNA, 22 nt, Variola virus
aaucccuacauauuuuagaaca

SEQ ID NO: 3292536 - RNA, 19 nt, Variola virus
uauuuuuaacuuucaucua

SEQ ID NO: 3292537 - RNA, 14 nt, Variola virus
aaacggauaugucu

SEQ ID NO: 3292538 - RNA, 17 nt, Variola virus
uauaugauauuccugga

SEQ ID NO: 3292539 - RNA, 17 nt, Variola virus
gggcaugcggaagacaa

SEQ ID NO: 3292540 - RNA, 21 nt, Variola virus
uuauaacgauaacgucauuaa

SEQ ID NO: 3292541 - RNA, 17 nt, Variola virus
uacucguguccauaauc

SEQ ID NO: 3292542 - RNA, 15 nt, Variola virus
auaucuuuaugaauu

SEQ ID NO: 3292543 - RNA, 22 nt, Variola virus
acuucugcagaauaauuagaaa

SEQ ID NO: 3292544 - RNA, 14 nt, Variola virus
uaucauuaauacag

SEQ ID NO: 3292545 - RNA, 21 nt, Variola virus
ugauaucaaauggauauugcc

SEQ ID NO: 3292546 - RNA, 16 nt, Variola virus
uuuaauuuccuaguau

SEQ ID NO: 3292547 - RNA, 17 nt, Variola virus
uaucuaccucuccaaaa

SEQ ID NO: 3292548 - RNA, 23 nt, Variola virus
aaauuagagcucaucuaagaaau

SEQ ID NO: 3292549 - RNA, 16 nt, Variola virus
uucucgcaacugucuu

SEQ ID NO: 3292550 - RNA, 16 nt, Variola virus
agaaauuaucaaaugu

SEQ ID NO: 3292551 - RNA, 17 nt, Variola virus
auucuguuacuacuuua

SEQ ID NO: 3292552 - RNA, 12 nt, Variola virus
agaagaacauau

SEQ ID NO: 3292553 - RNA, 22 nt, Variola virus
uugaaucaucaucgguguagua

SEQ ID NO: 3292554 - RNA, 20 nt, Variola virus
ccacaaauugcauauuugga

SEQ ID NO: 3292555 - RNA, 18 nt, Variola virus
uaaauucaaccaugaauu

SEQ ID NO: 3292556 - RNA, 12 nt, Variola virus
cuucuauacaaa

SEQ ID NO: 3292557 - RNA, 20 nt, Variola virus
ugaauaauacauuuaaauuu

SEQ ID NO: 3292558 - RNA, 13 nt, Variola virus
ccaacuguagacg

SEQ ID NO: 3292559 - RNA, 16 nt, Variola virus
aguuaucaucuauaug

SEQ ID NO: 3292560 - RNA, 22 nt, Variola virus
gauuggauaaacuaaaauuaaa

SEQ ID NO: 3292561 - RNA, 15 nt, Variola virus
aacuaucacuuauac

SEQ ID NO: 3292562 - RNA, 23 nt, Variola virus
ggaguacccacugaugagauguu

SEQ ID NO: 3292563 - RNA, 12 nt, Variola virus
gugcuacaaaac

SEQ ID NO: 3292564 - RNA, 21 nt, Variola virus
uuaggacgcgaauaaauagau

SEQ ID NO: 3292565 - RNA, 14 nt, Variola virus
aaaguaauaaucuu

SEQ ID NO: 3292566 - RNA, 24 nt, Variola virus
cugcuagaaaucauauaugauauu

SEQ ID NO: 3292567 - RNA, 18 nt, Variola virus
guagacauagauauucua

SEQ ID NO: 3292568 - RNA, 22 nt, Variola virus
uaagaaauccaaauaaaaugga

SEQ ID NO: 3292569 - RNA, 21 nt, Variola virus
aaacgaacgucuccaauauau

SEQ ID NO: 3292570 - RNA, 18 nt, Variola virus
guuaaacaauagauggau

SEQ ID NO: 3292571 - RNA, 22 nt, Variola virus
ucacaaagauggcugaaauuag

SEQ ID NO: 3292572 - RNA, 14 nt, Variola virus
cagcguaaaacaca

SEQ ID NO: 3292573 - RNA, 23 nt, Variola virus
ucuauuuguucugacaauauuua

SEQ ID NO: 3292574 - RNA, 23 nt, Variola virus
aauaauaccuucuacuaugcaau

SEQ ID NO: 3292575 - RNA, 14 nt, Variola virus
uauaugugucucca

SEQ ID NO: 3292576 - RNA, 16 nt, Variola virus
auguugauagaaguua

SEQ ID NO: 3292577 - RNA, 14 nt, Variola virus
uuccuaaaucgagu

SEQ ID NO: 3292578 - RNA, 15 nt, Variola virus
caaagucguuuaaug

SEQ ID NO: 3292579 - RNA, 19 nt, Variola virus
agcaucuucuauaucuaga

SEQ ID NO: 3292580 - RNA, 23 nt, Variola virus
acuucuucaacuaccaaaaauug

SEQ ID NO: 3292581 - RNA, 18 nt, Variola virus
gaacauaguaagaaauuc

SEQ ID NO: 3292582 - RNA, 20 nt, Variola virus
auagaauaaauauccuugga

SEQ ID NO: 3292583 - RNA, 13 nt, Variola virus
acaguuugaaaaa

SEQ ID NO: 3292584 - RNA, 13 nt, Variola virus
cgaauaacaaaaa

SEQ ID NO: 3292585 - RNA, 17 nt, Variola virus
uaguguaucgacaucuu

SEQ ID NO: 3292586 - RNA, 14 nt, Variola virus
auuucauuaauagu

SEQ ID NO: 3292587 - RNA, 21 nt, Variola virus
auaugauuucagauacuauau

SEQ ID NO: 3292588 - RNA, 16 nt, Variola virus
uaaaauaucauacgau

SEQ ID NO: 3292589 - RNA, 19 nt, Variola virus
uaugauaaaaugaaguuuu

SEQ ID NO: 3292590 - RNA, 16 nt, Variola virus
cuucaucacuucacua

SEQ ID NO: 3292591 - RNA, 22 nt, Variola virus
aaguaucuaguuagcaauuuuc

SEQ ID NO: 3292592 - RNA, 15 nt, Variola virus
guaggauuuuuccaa

SEQ ID NO: 3292593 - RNA, 23 nt, Variola virus
auagagccaagacgaacaaaauc

SEQ ID NO: 3292594 - RNA, 13 nt, Variola virus
uucaucauauuca

SEQ ID NO: 3292595 - RNA, 17 nt, Variola virus
aaaucacgagaacuauu

SEQ ID NO: 3292596 - RNA, 17 nt, Variola virus
uauuagauaauaaacag

SEQ ID NO: 3292597 - RNA, 14 nt, Variola virus
uuagauacauagau

SEQ ID NO: 3292598 - RNA, 23 nt, Variola virus
gcgguugccauagaauauacguc

SEQ ID NO: 3292599 - RNA, 20 nt, Variola virus
auaauauccauuuuguuuau

SEQ ID NO: 3292600 - RNA, 14 nt, Variola virus
aaacugguaaucca

SEQ ID NO: 3292601 - RNA, 19 nt, Variola virus
uauucgagaugaacauuca

SEQ ID NO: 3292602 - RNA, 18 nt, Variola virus
uacaaacaacuaggaaau

SEQ ID NO: 3292603 - RNA, 18 nt, Variola virus
acgggcgcuguaauuaau

SEQ ID NO: 3292604 - RNA, 18 nt, Variola virus
caucugaucccaaauacg

SEQ ID NO: 3292605 - RNA, 23 nt, Variola virus
gaaacguaauauccucaauaacg

SEQ ID NO: 3292606 - RNA, 19 nt, Variola virus
auuccaaugaacaagauua

SEQ ID NO: 3292607 - RNA, 19 nt, Variola virus
ucaucuaccaacgguauau

SEQ ID NO: 3292608 - RNA, 15 nt, Variola virus
aauaaucguuauuau

SEQ ID NO: 3292609 - RNA, 23 nt, Variola virus
uauuucauugacggaugaucaua

SEQ ID NO: 3292610 - RNA, 17 nt, Variola virus
acgucaaagguuaacau

SEQ ID NO: 3292611 - RNA, 13 nt, Variola virus
cuguguuacauaa

SEQ ID NO: 3292612 - RNA, 14 nt, Variola virus
aaucauuaaaugau

SEQ ID NO: 3292613 - RNA, 14 nt, Variola virus
uaucuauauaugua

SEQ ID NO: 3292614 - RNA, 13 nt, Variola virus
auccuaacaauga

SEQ ID NO: 3292615 - RNA, 19 nt, Variola virus
uagaacuaccaauaugucu

SEQ ID NO: 3292616 - RNA, 20 nt, Variola virus
gugcuuguaucgaaaaacuu

SEQ ID NO: 3292617 - RNA, 23 nt, Variola virus
uaccaauaugucuguacaaaugu

SEQ ID NO: 3292618 - RNA, 18 nt, Variola virus
auuuuauucuagaauuga

SEQ ID NO: 3292619 - RNA, 17 nt, Variola virus
cggcauaguuucuguaa

SEQ ID NO: 3292620 - RNA, 23 nt, Variola virus
auucgugacagauccaugucuga

SEQ ID NO: 3292621 - RNA, 23 nt, Variola virus
aggauugauuacuauaaauggag

SEQ ID NO: 3292622 - RNA, 15 nt, Variola virus
uauaagauuaucaaa

SEQ ID NO: 3292623 - RNA, 20 nt, Variola virus
caccaucauaugacauuuca

SEQ ID NO: 3292624 - RNA, 12 nt, Variola virus
auaccaaacaua

SEQ ID NO: 3292625 - RNA, 12 nt, Variola virus
agcaaaaaauga

SEQ ID NO: 3292626 - RNA, 12 nt, Variola virus
agacaucugaca

SEQ ID NO: 3292627 - RNA, 20 nt, Variola virus
uuacucuuggucuaauacug

SEQ ID NO: 3292628 - RNA, 16 nt, Variola virus
ucgcuauauccaccaa

SEQ ID NO: 3292629 - RNA, 16 nt, Variola virus
uagauuauucuuaaau

SEQ ID NO: 3292630 - RNA, 15 nt, Variola virus
auagacgguuccaaa

SEQ ID NO: 3292631 - RNA, 14 nt, Variola virus
gacaauauuuaguu

SEQ ID NO: 3292632 - RNA, 16 nt, Variola virus
uugucaacuuuguaaa

SEQ ID NO: 3292633 - RNA, 19 nt, Variola virus
uuuguaauaaaauuuagca

SEQ ID NO: 3292634 - RNA, 17 nt, Variola virus
uacaauuucauaaugag

SEQ ID NO: 3292635 - RNA, 20 nt, Variola virus
uccauaugacuaaaaugcug

SEQ ID NO: 3292636 - RNA, 23 nt, Variola virus
aacuuuaaauaauuuacaaaaau

SEQ ID NO: 3292637 - RNA, 19 nt, Variola virus
guucacguaaauacaaaac

SEQ ID NO: 3292638 - RNA, 12 nt, Variola virus
ucgucuuuagag

SEQ ID NO: 3292639 - RNA, 18 nt, Variola virus
ucauguagauaguuacca

SEQ ID NO: 3292640 - RNA, 16 nt, Variola virus
uuaauaauucauggaa

SEQ ID NO: 3292641 - RNA, 14 nt, Variola virus
gaauuuagaaauau

SEQ ID NO: 3292642 - RNA, 19 nt, Variola virus
auuauugcaugauagaaug

SEQ ID NO: 3292643 - RNA, 18 nt, Variola virus
acaauacgauaaacauug

SEQ ID NO: 3292644 - RNA, 15 nt, Variola virus
ucgaaauauguaaua

SEQ ID NO: 3292645 - RNA, 19 nt, Variola virus
uaaaaaaguuuuugauuac

SEQ ID NO: 3292646 - RNA, 23 nt, Variola virus
auuaugacaaaauuaaaaaagau

SEQ ID NO: 3292647 - RNA, 23 nt, Variola virus
gguaacauuauagauucuuuuaa

SEQ ID NO: 3292648 - RNA, 14 nt, Variola virus
gcuaaaauauccuc

SEQ ID NO: 3292649 - RNA, 12 nt, Variola virus
uauuagaauuaa

SEQ ID NO: 3292650 - RNA, 13 nt, Variola virus
uagcuguuuucau

SEQ ID NO: 3292651 - RNA, 18 nt, Variola virus
aaugauacugauaaagua

SEQ ID NO: 3292652 - RNA, 21 nt, Variola virus
agaaaauaucauaaauauauu

SEQ ID NO: 3292653 - RNA, 18 nt, Variola virus
uacuauuauauuugguau

SEQ ID NO: 3292654 - RNA, 19 nt, Variola virus
aaugacaaguauaaugaua

SEQ ID NO: 3292655 - RNA, 17 nt, Variola virus
uauaguucuuaaucauu

SEQ ID NO: 3292656 - RNA, 18 nt, Variola virus
ccguguucguucaaaugc

SEQ ID NO: 3292657 - RNA, 17 nt, Variola virus
uggaucuaugguuucca

SEQ ID NO: 3292658 - RNA, 19 nt, Variola virus
aagaugaugaaucuucauu

SEQ ID NO: 3292659 - RNA, 20 nt, Variola virus
uuauacgcauaaauuguaaa

SEQ ID NO: 3292660 - RNA, 21 nt, Variola virus
uauauagagccaagacgaaca

SEQ ID NO: 3292661 - RNA, 14 nt, Variola virus
auugguaaauccua

SEQ ID NO: 3292662 - RNA, 17 nt, Variola virus
uagauauuaguaaauua

SEQ ID NO: 3292663 - RNA, 18 nt, Variola virus
aaaacuaucaaugauaug

SEQ ID NO: 3292664 - RNA, 15 nt, Variola virus
acaaugauaaugaac

SEQ ID NO: 3292665 - RNA, 22 nt, Variola virus
agaaaugguaaauaaauacuuu

SEQ ID NO: 3292666 - RNA, 17 nt, Variola virus
uagauuuauaauacuuu

SEQ ID NO: 3292667 - RNA, 17 nt, Variola virus
caaaauacaaaauguua

SEQ ID NO: 3292668 - RNA, 20 nt, Variola virus
uuauaucaauaccaaagaag

SEQ ID NO: 3292669 - RNA, 13 nt, Variola virus
aaaugauacugau

SEQ ID NO: 3292670 - RNA, 20 nt, Variola virus
auagaguuaaauucauauaa

SEQ ID NO: 3292671 - RNA, 21 nt, Variola virus
augggaacggaacagaaacua

SEQ ID NO: 3292672 - RNA, 15 nt, Variola virus
acacuauuagaauua

SEQ ID NO: 3292673 - RNA, 12 nt, Variola virus
gcauccauccaa

SEQ ID NO: 3292674 - RNA, 23 nt, Variola virus
auuacuaucuuuaacauauguau

SEQ ID NO: 3292675 - RNA, 19 nt, Variola virus
acuuuaaccuauacaugau

SEQ ID NO: 3292676 - RNA, 14 nt, Variola virus
auguauuagacaaa

SEQ ID NO: 3292677 - RNA, 12 nt, Variola virus
uuugacacuauc

SEQ ID NO: 3292678 - RNA, 23 nt, Variola virus
auucaugguaaggucuuagaaau

SEQ ID NO: 3292679 - RNA, 23 nt, Variola virus
auaaacaugaauuuauuucuaau

SEQ ID NO: 3292680 - RNA, 11 nt, Variola virus
uacaacagaua

SEQ ID NO: 3292681 - RNA, 20 nt, Variola virus
ggucaucugguuuaggaaag

SEQ ID NO: 3292682 - RNA, 14 nt, Variola virus
uccauaaauuuaua

SEQ ID NO: 3292683 - RNA, 17 nt, Variola virus
uaaucagauucuuauau

SEQ ID NO: 3292684 - RNA, 16 nt, Variola virus
uaacaucuuucaucau

SEQ ID NO: 3292685 - RNA, 12 nt, Variola virus
uugaaacuuuuc

SEQ ID NO: 3292686 - RNA, 23 nt, Variola virus
auaaagucccaaaccagaauugc

SEQ ID NO: 3292687 - RNA, 18 nt, Variola virus
aguaucgcccuaauauua

SEQ ID NO: 3292688 - RNA, 17 nt, Variola virus
uucuuaccaacaucuua

SEQ ID NO: 3292689 - RNA, 20 nt, Variola virus
cugauaaguucuuuauacag

SEQ ID NO: 3292690 - RNA, 14 nt, Variola virus
ggguuguaaacaac

SEQ ID NO: 3292691 - RNA, 24 nt, Variola virus
cuaucaauagcaguuuauuaucca

SEQ ID NO: 3292692 - RNA, 22 nt, Variola virus
acaaaauccaaacauuacaaau

SEQ ID NO: 3292693 - RNA, 17 nt, Variola virus
uuacgaauuacauuucu

SEQ ID NO: 3292694 - RNA, 21 nt, Variola virus
cuaauuccuuugcuauuucua

SEQ ID NO: 3292695 - RNA, 13 nt, Variola virus
ugacguaaaugug

SEQ ID NO: 3292696 - RNA, 14 nt, Variola virus
cugauauucagaaa

SEQ ID NO: 3292697 - RNA, 14 nt, Variola virus
uuaaaguguaaaua

SEQ ID NO: 3292698 - RNA, 15 nt, Variola virus
uuuccccacauagaa

SEQ ID NO: 3292699 - RNA, 22 nt, Variola virus
guaauaucugauuuauuuccua

SEQ ID NO: 3292700 - RNA, 21 nt, Variola virus
aaacuuagauuaaaugcugaa

SEQ ID NO: 3292701 - RNA, 13 nt, Variola virus
agccauuuucuau

SEQ ID NO: 3292702 - RNA, 20 nt, Variola virus
aaugcuaauauauucuuaca

SEQ ID NO: 3292703 - RNA, 16 nt, Variola virus
uacaaccaaauucuug

SEQ ID NO: 3292704 - RNA, 14 nt, Variola virus
acucccacaaauac

SEQ ID NO: 3292705 - RNA, 14 nt, Variola virus
aauaucauaaucua

SEQ ID NO: 3292706 - RNA, 16 nt, Variola virus
auaggauacuuuguaa

SEQ ID NO: 3292707 - RNA, 17 nt, Variola virus
uuuauuucuaaaauuuu

SEQ ID NO: 3292708 - RNA, 12 nt, Variola virus
uuauuucuaaau

SEQ ID NO: 3292709 - RNA, 18 nt, Variola virus
aagacugcuaaauguauc

SEQ ID NO: 3292710 - RNA, 21 nt, Variola virus
gaugacaauauuauuaugaag

SEQ ID NO: 3292711 - RNA, 13 nt, Variola virus
gaucaucuagaua

SEQ ID NO: 3292712 - RNA, 13 nt, Variola virus
gaucgucuagaug

SEQ ID NO: 3292713 - RNA, 16 nt, Variola virus
uuuaauggauauacac

SEQ ID NO: 3292714 - RNA, 23 nt, Variola virus
augugaucuaugacaucaugcau

SEQ ID NO: 3292715 - RNA, 23 nt, Variola virus
accuuugguucuuuaaaagaaac

SEQ ID NO: 3292716 - RNA, 14 nt, Variola virus
aauagcaucaucuu

SEQ ID NO: 3292717 - RNA, 21 nt, Variola virus
cccagaauaauauacuucugu

SEQ ID NO: 3292718 - RNA, 12 nt, Variola virus
auuguuguguac

SEQ ID NO: 3292719 - RNA, 18 nt, Variola virus
agcaaucaugaaacaaua

SEQ ID NO: 3292720 - RNA, 12 nt, Variola virus
ucguuacaaaag

SEQ ID NO: 3292721 - RNA, 19 nt, Variola virus
uaaucuauaaaacaaucau

SEQ ID NO: 3292722 - RNA, 17 nt, Variola virus
uacuucagguuucuuag

SEQ ID NO: 3292723 - RNA, 11 nt, Variola virus
uauauguuucu

SEQ ID NO: 3292724 - RNA, 15 nt, Variola virus
uaauauaaaaacuua

SEQ ID NO: 3292725 - RNA, 15 nt, Variola virus
uuauaaaaauacuaa

SEQ ID NO: 3292726 - RNA, 17 nt, Variola virus
uauuauacuuguauaua

SEQ ID NO: 3292727 - RNA, 17 nt, Variola virus
aauaacuuguuagauaa

SEQ ID NO: 3292728 - RNA, 14 nt, Variola virus
ucuuuuuuacacau

SEQ ID NO: 3292729 - RNA, 22 nt, Variola virus
uaacaugacauuuauucaucau

SEQ ID NO: 3292730 - RNA, 16 nt, Variola virus
ggcaauuguagauaua

SEQ ID NO: 3292731 - RNA, 14 nt, Variola virus
guuuggauuaaucu

SEQ ID NO: 3292732 - RNA, 13 nt, Variola virus
cccaccaaucaac

SEQ ID NO: 3292733 - RNA, 19 nt, Variola virus
uugaauggauacuaguuuu

SEQ ID NO: 3292734 - RNA, 17 nt, Variola virus
gauccuaauuuacaaua

SEQ ID NO: 3292735 - RNA, 12 nt, Variola virus
acauaauacaau

SEQ ID NO: 3292736 - RNA, 14 nt, Variola virus
uucguuuucuaauu

SEQ ID NO: 3292737 - RNA, 22 nt, Variola virus
cuuaugauauaaggaaacagcu

SEQ ID NO: 3292738 - RNA, 20 nt, Variola virus
cguuaucauuugaugauaug

SEQ ID NO: 3292739 - RNA, 13 nt, Variola virus
agauuaugauacu

SEQ ID NO: 3292740 - RNA, 17 nt, Variola virus
uagaaacuauacgaaau

SEQ ID NO: 3292741 - RNA, 15 nt, Variola virus
auaaugugauuguau

SEQ ID NO: 3292742 - RNA, 16 nt, Variola virus
gaagaacgauaaugaa

SEQ ID NO: 3292743 - RNA, 23 nt, Variola virus
aauaagagcagcacaaacucauu

SEQ ID NO: 3292744 - RNA, 11 nt, Variola virus
uuaaucucaca

SEQ ID NO: 3292745 - RNA, 19 nt, Variola virus
cuaauacuacuacuuguaa

SEQ ID NO: 3292746 - RNA, 21 nt, Variola virus
uguauaacaaucuuauaucuu

SEQ ID NO: 3292747 - RNA, 20 nt, Variola virus
aaguuccuccuuguauuugu

SEQ ID NO: 3292748 - RNA, 14 nt, Variola virus
aaggcgaacgcuau

SEQ ID NO: 3292749 - RNA, 20 nt, Variola virus
auacguuuauauucuuuuaa

SEQ ID NO: 3292750 - RNA, 18 nt, Variola virus
ucauauacaacucucuaa

SEQ ID NO: 3292751 - RNA, 12 nt, Variola virus
aaaaaauuucca

SEQ ID NO: 3292752 - RNA, 14 nt, Variola virus
aacuccucuagaug

SEQ ID NO: 3292753 - RNA, 12 nt, Variola virus
cuucauuucuaa

SEQ ID NO: 3292754 - RNA, 21 nt, Variola virus
uaucucguuuagaaaaaugcu

SEQ ID NO: 3292755 - RNA, 13 nt, Variola virus
caauugucauuag

SEQ ID NO: 3292756 - RNA, 19 nt, Variola virus
auaaucaaaauugucuaug

SEQ ID NO: 3292757 - RNA, 18 nt, Variola virus
aauaauacaacaaccauu

SEQ ID NO: 3292758 - RNA, 15 nt, Variola virus
aagguuaacaucuua

SEQ ID NO: 3292759 - RNA, 17 nt, Variola virus
auaucuucuuuuuucca

SEQ ID NO: 3292760 - RNA, 20 nt, Variola virus
auuaaaucauuaaaugauug

SEQ ID NO: 3292761 - RNA, 20 nt, Variola virus
agaucuaaagauaaucuucu

SEQ ID NO: 3292762 - RNA, 16 nt, Variola virus
cgucuuuugaucuuua

SEQ ID NO: 3292763 - RNA, 14 nt, Variola virus
uuuaaaguuucuga

SEQ ID NO: 3292764 - RNA, 17 nt, Variola virus
aguucauuauaaauucu

SEQ ID NO: 3292765 - RNA, 19 nt, Variola virus
auuugauuauuuugaagac

SEQ ID NO: 3292766 - RNA, 21 nt, Variola virus
aaaaugaagauccaagauuug

SEQ ID NO: 3292767 - RNA, 15 nt, Variola virus
aaaucuugauuacaa

SEQ ID NO: 3292768 - RNA, 11 nt, Variola virus
uaucuguaaaa

SEQ ID NO: 3292769 - RNA, 18 nt, Variola virus
gaugccuuaacaucauca

SEQ ID NO: 3292770 - RNA, 12 nt, Variola virus
uguuaauaacug

SEQ ID NO: 3292771 - RNA, 12 nt, Variola virus
aauaaaaacaag

SEQ ID NO: 3292772 - RNA, 20 nt, Variola virus
aaauauauaguauuaaugau

SEQ ID NO: 3292773 - RNA, 19 nt, Variola virus
agaauuauaccaauagaua

SEQ ID NO: 3292774 - RNA, 13 nt, Variola virus
acacaaucaugau

SEQ ID NO: 3292775 - RNA, 20 nt, Variola virus
auuccuuugcuauuucuaug

SEQ ID NO: 3292776 - RNA, 15 nt, Variola virus
aucucuagacaauuu

SEQ ID NO: 3292777 - RNA, 23 nt, Variola virus
aauaccgaugugucuacauaaau

SEQ ID NO: 3292778 - RNA, 21 nt, Variola virus
ccuguuucuacuaacuuuuug

SEQ ID NO: 3292779 - RNA, 14 nt, Variola virus
auuuuuuacaauuu

SEQ ID NO: 3292780 - RNA, 12 nt, Variola virus
gacuguacgaua

SEQ ID NO: 3292781 - RNA, 15 nt, Variola virus
aacaauaugcaaaua

SEQ ID NO: 3292782 - RNA, 21 nt, Variola virus
aaaaauacucaguuugauauu

SEQ ID NO: 3292783 - RNA, 11 nt, Variola virus
gcguuaaacau

SEQ ID NO: 3292784 - RNA, 19 nt, Variola virus
aauaaucggagaauguuuc

SEQ ID NO: 3292785 - RNA, 21 nt, Variola virus
auauagacaacguagaauugu

SEQ ID NO: 3292786 - RNA, 15 nt, Variola virus
auaaauuuauucucu

SEQ ID NO: 3292787 - RNA, 12 nt, Variola virus
uucuaauacuau

SEQ ID NO: 3292788 - RNA, 15 nt, Variola virus
agcgauuguuuaaga

SEQ ID NO: 3292789 - RNA, 16 nt, Variola virus
uuucagaggaauacag

SEQ ID NO: 3292790 - RNA, 14 nt, Variola virus
auguugauaaaaug

SEQ ID NO: 3292791 - RNA, 21 nt, Variola virus
aguaaacucgucgacaaagua

SEQ ID NO: 3292792 - RNA, 23 nt, Variola virus
augccuauaaaguaauaaucuuc

SEQ ID NO: 3292793 - RNA, 21 nt, Variola virus
caguguccgaugauuaaugac

SEQ ID NO: 3292794 - RNA, 21 nt, Variola virus
uacaaacuauagaaauuauuu

SEQ ID NO: 3292795 - RNA, 19 nt, Variola virus
auaucuacugauaaaacug

SEQ ID NO: 3292796 - RNA, 17 nt, Variola virus
acacauuaggauacaga

SEQ ID NO: 3292797 - RNA, 16 nt, Variola virus
gauuauucacuauaau

SEQ ID NO: 3292798 - RNA, 19 nt, Variola virus
uaguacgggcgcuguaauu

SEQ ID NO: 3292799 - RNA, 18 nt, Variola virus
cguauauuuuauacauuu

SEQ ID NO: 3292800 - RNA, 21 nt, Variola virus
gaaaaugugcuucuaugagau

SEQ ID NO: 3292801 - RNA, 19 nt, Variola virus
ugugauaccaauaaguuuu

SEQ ID NO: 3292802 - RNA, 12 nt, Variola virus
agcaaaaaaacu

SEQ ID NO: 3292803 - RNA, 21 nt, Variola virus
uacuuuaauaaccguuagaca

SEQ ID NO: 3292804 - RNA, 19 nt, Variola virus
caaccgcauacuacuauua

SEQ ID NO: 3292805 - RNA, 14 nt, Variola virus
uuaagaucuaauau

SEQ ID NO: 3292806 - RNA, 17 nt, Variola virus
uuaacaauuccuuuuuu

SEQ ID NO: 3292807 - RNA, 13 nt, Variola virus
aaaucuaacuucu

SEQ ID NO: 3292808 - RNA, 20 nt, Variola virus
ggauaauuuuaccagaauac

SEQ ID NO: 3292809 - RNA, 17 nt, Variola virus
caacaucuauaaaagua

SEQ ID NO: 3292810 - RNA, 17 nt, Variola virus
aauaaacguucacguaa

SEQ ID NO: 3292811 - RNA, 20 nt, Variola virus
auauuuguuaucaugaugac

SEQ ID NO: 3292812 - RNA, 16 nt, Variola virus
auaauaaauuuuucca

SEQ ID NO: 3292813 - RNA, 20 nt, Variola virus
ucaagaaggaaaucaaaucu

SEQ ID NO: 3292814 - RNA, 14 nt, Variola virus
uaaugugaauuuag

SEQ ID NO: 3292815 - RNA, 18 nt, Variola virus
uauaaaacuacuacaaug

SEQ ID NO: 3292816 - RNA, 19 nt, Variola virus
acuauaucgacauauuuca

SEQ ID NO: 3292817 - RNA, 19 nt, Variola virus
cuagagauacaggaauaca

SEQ ID NO: 3292818 - RNA, 17 nt, Variola virus
aguuaacacaugucaca

SEQ ID NO: 3292819 - RNA, 14 nt, Variola virus
auaaauaaggaagu

SEQ ID NO: 3292820 - RNA, 16 nt, Variola virus
caacuaguaucaucuc

SEQ ID NO: 3292821 - RNA, 18 nt, Variola virus
gagaaguaauaaaacgaa

SEQ ID NO: 3292822 - RNA, 23 nt, Variola virus
gaaugagauacauaaaacuuuau

SEQ ID NO: 3292823 - RNA, 22 nt, Variola virus
auucuaccuuuuuauuuucuaa

SEQ ID NO: 3292824 - RNA, 14 nt, Variola virus
uguauaaauaauua

SEQ ID NO: 3292825 - RNA, 22 nt, Variola virus
gacacucuauaucuagaaauaa

SEQ ID NO: 3292826 - RNA, 18 nt, Variola virus
aaaaagacuaaaucuuca

SEQ ID NO: 3292827 - RNA, 21 nt, Variola virus
aauaaauuuucucuuaaaaau

SEQ ID NO: 3292828 - RNA, 13 nt, Variola virus
ucauaaagaacag

SEQ ID NO: 3292829 - RNA, 19 nt, Variola virus
uuauguauauguuuguaaa

SEQ ID NO: 3292830 - RNA, 18 nt, Variola virus
acauauagacaauaacua

SEQ ID NO: 3292831 - RNA, 19 nt, Variola virus
auacgaaauaaauaaugaa

SEQ ID NO: 3292832 - RNA, 17 nt, Variola virus
aauagauccugaauauu

SEQ ID NO: 3292833 - RNA, 13 nt, Variola virus
guauauguuucua

SEQ ID NO: 3292834 - RNA, 14 nt, Variola virus
cacguuuaaacauu

SEQ ID NO: 3292835 - RNA, 16 nt, Variola virus
cuaaauaauuauacuu

SEQ ID NO: 3292836 - RNA, 17 nt, Variola virus
cuaauuuacuaucugua

SEQ ID NO: 3292837 - RNA, 22 nt, Variola virus
auaauaucggucuuauucuuaa

SEQ ID NO: 3292838 - RNA, 16 nt, Variola virus
gaaaagauauccagag

SEQ ID NO: 3292839 - RNA, 20 nt, Variola virus
uuagagaugaugcggaauca

SEQ ID NO: 3292840 - RNA, 21 nt, Variola virus
ugcuaauauucccaaacauac

SEQ ID NO: 3292841 - RNA, 10 nt, Variola virus
uacuuuucua

SEQ ID NO: 3292842 - RNA, 21 nt, Variola virus
cgaaugccauagaauaaauau

SEQ ID NO: 3292843 - RNA, 12 nt, Variola virus
cuucauuauuuu

SEQ ID NO: 3292844 - RNA, 22 nt, Variola virus
uacucuccgaguguaaauauua

SEQ ID NO: 3292845 - RNA, 14 nt, Variola virus
ucuccccaaacauu

SEQ ID NO: 3292846 - RNA, 20 nt, Variola virus
gaacuuguuuaaugaugaau

SEQ ID NO: 3292847 - RNA, 15 nt, Variola virus
aguaacgcaauacaa

SEQ ID NO: 3292848 - RNA, 19 nt, Variola virus
auaguaacuauguaaauga

SEQ ID NO: 3292849 - RNA, 18 nt, Variola virus
uucucuaguuacacuaug

SEQ ID NO: 3292850 - RNA, 16 nt, Variola virus
aauaaaacaucaaugu

SEQ ID NO: 3292851 - RNA, 22 nt, Variola virus
cuacaauauauauucauagagg

SEQ ID NO: 3292852 - RNA, 14 nt, Variola virus
guaaacauaucaua

SEQ ID NO: 3292853 - RNA, 23 nt, Variola virus
ccauccauuuuaugcgauguuua

SEQ ID NO: 3292854 - RNA, 14 nt, Variola virus
ucaugacaaucaau

SEQ ID NO: 3292855 - RNA, 17 nt, Variola virus
auaaucgcuuuguuguu

SEQ ID NO: 3292856 - RNA, 17 nt, Variola virus
aguucuuuuaugucaag

SEQ ID NO: 3292857 - RNA, 20 nt, Variola virus
caauagauaauuguaacaau

SEQ ID NO: 3292858 - RNA, 19 nt, Variola virus
agaaaauuuauaaacuauu

SEQ ID NO: 3292859 - RNA, 18 nt, Variola virus
cuuauuccauuaucugaa

SEQ ID NO: 3292860 - RNA, 22 nt, Variola virus
uaucguauauuaaguugggaga

SEQ ID NO: 3292861 - RNA, 22 nt, Variola virus
uagaucuuuuacacuguuaaag

SEQ ID NO: 3292862 - RNA, 17 nt, Variola virus
aucaaaugguucauaau

SEQ ID NO: 3292863 - RNA, 20 nt, Variola virus
cuugauacagccaaguaucu

SEQ ID NO: 3292864 - RNA, 15 nt, Variola virus
auuuauaaugucuac

SEQ ID NO: 3292865 - RNA, 20 nt, Variola virus
uccuuaauucuagcaucuuc

SEQ ID NO: 3292866 - RNA, 17 nt, Variola virus
auagagaguucauuuau

SEQ ID NO: 3292867 - RNA, 19 nt, Variola virus
auaagacacagaaauacug

SEQ ID NO: 3292868 - RNA, 14 nt, Variola virus
ucaaaagaaaucuu

SEQ ID NO: 3292869 - RNA, 22 nt, Variola virus
ucuuacauauuuuuuucuuauu

SEQ ID NO: 3292870 - RNA, 12 nt, Variola virus
aagacaauaaug

SEQ ID NO: 3292871 - RNA, 17 nt, Variola virus
uagcugagaauaucuuu

SEQ ID NO: 3292872 - RNA, 16 nt, Variola virus
gaaaagaugaaaugau

SEQ ID NO: 3292873 - RNA, 21 nt, Variola virus
accuaaucccgcauuuauaca

SEQ ID NO: 3292874 - RNA, 17 nt, Variola virus
auauagggaaucauaua

SEQ ID NO: 3292875 - RNA, 19 nt, Variola virus
uggaaauguuauagaaaau

SEQ ID NO: 3292876 - RNA, 19 nt, Variola virus
auuaguaacgacuauuaaa

SEQ ID NO: 3292877 - RNA, 14 nt, Variola virus
gacuagcauauuau

SEQ ID NO: 3292878 - RNA, 13 nt, Variola virus
auuuuccauuuau

SEQ ID NO: 3292879 - RNA, 13 nt, Variola virus
auaaauuuauuau

SEQ ID NO: 3292880 - RNA, 19 nt, Variola virus
acaagaaaauuagaaggau

SEQ ID NO: 3292881 - RNA, 16 nt, Variola virus
uggaucuaguuuucag

SEQ ID NO: 3292882 - RNA, 18 nt, Variola virus
aaauccauuaauacggaa

SEQ ID NO: 3292883 - RNA, 16 nt, Variola virus
uauaaucgcuuuccag

SEQ ID NO: 3292884 - RNA, 11 nt, Variola virus
auaaaaacaag

SEQ ID NO: 3292885 - RNA, 16 nt, Variola virus
aaacgaauagaauaua

SEQ ID NO: 3292886 - RNA, 16 nt, Variola virus
aaguauccaucacuuc

SEQ ID NO: 3292887 - RNA, 17 nt, Variola virus
uauucgauaacagcauu

SEQ ID NO: 3292888 - RNA, 20 nt, Variola virus
cuguauuguuaauagauaua

SEQ ID NO: 3292889 - RNA, 17 nt, Variola virus
guauauaucaugaugau

SEQ ID NO: 3292890 - RNA, 23 nt, Variola virus
aauacuccucauuacguuucauu

SEQ ID NO: 3292891 - RNA, 18 nt, Variola virus
uacucggccgacauaaug

SEQ ID NO: 3292892 - RNA, 20 nt, Variola virus
uauuuugggcaaaucuaaau

SEQ ID NO: 3292893 - RNA, 19 nt, Variola virus
gugauaucaaauggauauu

SEQ ID NO: 3292894 - RNA, 17 nt, Variola virus
ugauaucgagaacagau

SEQ ID NO: 3292895 - RNA, 21 nt, Variola virus
caauaacuaauggcaaaugua

SEQ ID NO: 3292896 - RNA, 19 nt, Variola virus
auucaauuaguuuauuaau

SEQ ID NO: 3292897 - RNA, 16 nt, Variola virus
aacacaacaaaugaua

SEQ ID NO: 3292898 - RNA, 16 nt, Variola virus
auaauuacagaauuau

SEQ ID NO: 3292899 - RNA, 20 nt, Variola virus
aauacgacgguuuaauacac

SEQ ID NO: 3292900 - RNA, 17 nt, Variola virus
ccaguaugaauaaucuu

SEQ ID NO: 3292901 - RNA, 23 nt, Variola virus
aaucauuaucgauacuaauuaca

SEQ ID NO: 3292902 - RNA, 12 nt, Variola virus
acacauguguuu

SEQ ID NO: 3292903 - RNA, 20 nt, Variola virus
ugauauuuucuauaauauca

SEQ ID NO: 3292904 - RNA, 19 nt, Variola virus
uauuuggcauuucuaaaau

SEQ ID NO: 3292905 - RNA, 12 nt, Variola virus
uuauacaucuua

SEQ ID NO: 3292906 - RNA, 12 nt, Variola virus
cguuagucauau

SEQ ID NO: 3292907 - RNA, 17 nt, Variola virus
gcauuugucgauaaaga

SEQ ID NO: 3292908 - RNA, 16 nt, Variola virus
cuagguuucucuauaa

SEQ ID NO: 3292909 - RNA, 14 nt, Variola virus
uauaaguagauguu

SEQ ID NO: 3292910 - RNA, 14 nt, Variola virus
caucuacaaaaaca

SEQ ID NO: 3292911 - RNA, 15 nt, Variola virus
acauugugccaauaa

SEQ ID NO: 3292912 - RNA, 17 nt, Variola virus
uaucaugaauuagauau

SEQ ID NO: 3292913 - RNA, 13 nt, Variola virus
uuccauaaacagu

SEQ ID NO: 3292914 - RNA, 22 nt, Variola virus
uacuauauuaacaucuaaacau

SEQ ID NO: 3292915 - RNA, 18 nt, Variola virus
gaucaucaauccuucaga

SEQ ID NO: 3292916 - RNA, 13 nt, Variola virus
uucaacugucuuu

SEQ ID NO: 3292917 - RNA, 14 nt, Variola virus
ugaaacgaacacua

SEQ ID NO: 3292918 - RNA, 19 nt, Variola virus
agaucuacuggugaaaugu

SEQ ID NO: 3292919 - RNA, 14 nt, Variola virus
auauuagaaauaca

SEQ ID NO: 3292920 - RNA, 21 nt, Variola virus
aguuguuccaauaaauuauuu

SEQ ID NO: 3292921 - RNA, 21 nt, Variola virus
auuggaauguguuaaaaagaa

SEQ ID NO: 3292922 - RNA, 16 nt, Variola virus
auaacuguuuagaaau

SEQ ID NO: 3292923 - RNA, 19 nt, Variola virus
ucauuucuccaaagaauau

SEQ ID NO: 3292924 - RNA, 13 nt, Variola virus
uuuagaauacuaa

SEQ ID NO: 3292925 - RNA, 17 nt, Variola virus
acuggauauauuuuaca

SEQ ID NO: 3292926 - RNA, 17 nt, Variola virus
uuagucgucucaaagag

SEQ ID NO: 3292927 - RNA, 18 nt, Variola virus
ucauacuuguuaguaguu

SEQ ID NO: 3292928 - RNA, 21 nt, Variola virus
uucacucgguggauacaauaa

SEQ ID NO: 3292929 - RNA, 17 nt, Variola virus
caaaauaacaaauacua

SEQ ID NO: 3292930 - RNA, 22 nt, Variola virus
gaccacucuccgucauccuuca

SEQ ID NO: 3292931 - RNA, 18 nt, Variola virus
ucuuauuggucagaaguu

SEQ ID NO: 3292932 - RNA, 16 nt, Variola virus
augcaaagucuaaaua

SEQ ID NO: 3292933 - RNA, 21 nt, Variola virus
uaauagcuccccuguuuucau

SEQ ID NO: 3292934 - RNA, 21 nt, Variola virus
uaaacaugucuauuguuaauc

SEQ ID NO: 3292935 - RNA, 17 nt, Variola virus
acaaagauggcugaaau

SEQ ID NO: 3292936 - RNA, 15 nt, Variola virus
acuauuuuauaccuu

SEQ ID NO: 3292937 - RNA, 16 nt, Variola virus
aguguaccaauaugcg

SEQ ID NO: 3292938 - RNA, 13 nt, Variola virus
auacugucuguaa

SEQ ID NO: 3292939 - RNA, 20 nt, Variola virus
caugcaaagcucuaaaucca

SEQ ID NO: 3292940 - RNA, 16 nt, Variola virus
gcugaaugaucuuuuu

SEQ ID NO: 3292941 - RNA, 21 nt, Variola virus
aggguauauccaucacuaaaa

SEQ ID NO: 3292942 - RNA, 15 nt, Variola virus
uuaauguauaucuuu

SEQ ID NO: 3292943 - RNA, 12 nt, Variola virus
gcgaacaucuuu

SEQ ID NO: 3292944 - RNA, 13 nt, Variola virus
ucaacauauuaau

SEQ ID NO: 3292945 - RNA, 22 nt, Variola virus
gaauuauuacuuaaguuguaaa

SEQ ID NO: 3292946 - RNA, 15 nt, Variola virus
uuuucggguuccaaa

SEQ ID NO: 3292947 - RNA, 13 nt, Variola virus
agaugcaccauau

SEQ ID NO: 3292948 - RNA, 17 nt, Variola virus
cuuuuauuuccacauua

SEQ ID NO: 3292949 - RNA, 15 nt, Variola virus
cuacucguuuggaau

SEQ ID NO: 3292950 - RNA, 22 nt, Variola virus
cgucugucaugauaaaaauuua

SEQ ID NO: 3292951 - RNA, 18 nt, Variola virus
cauugugauuaaacauua

SEQ ID NO: 3292952 - RNA, 15 nt, Variola virus
cauuacgcucucugg

SEQ ID NO: 3292953 - RNA, 18 nt, Variola virus
gaauauuauuaugaugau

SEQ ID NO: 3292954 - RNA, 18 nt, Variola virus
auauuguuacagccaaga

SEQ ID NO: 3292955 - RNA, 16 nt, Variola virus
guggaugguuaaaaag

SEQ ID NO: 3292956 - RNA, 17 nt, Variola virus
auuaacggguucucaau

SEQ ID NO: 3292957 - RNA, 16 nt, Variola virus
uuaggaucuucuaaug

SEQ ID NO: 3292958 - RNA, 14 nt, Variola virus
gcguauauagucua

SEQ ID NO: 3292959 - RNA, 15 nt, Variola virus
auauuauacaaaaua

SEQ ID NO: 3292960 - RNA, 18 nt, Variola virus
auacuacuucuccaacau

SEQ ID NO: 3292961 - RNA, 15 nt, Variola virus
acuacguugaagauc

SEQ ID NO: 3292962 - RNA, 13 nt, Variola virus
auauccaucacua

SEQ ID NO: 3292963 - RNA, 16 nt, Variola virus
aacauaaacacagaua

SEQ ID NO: 3292964 - RNA, 15 nt, Variola virus
guguauaacaucuuu

SEQ ID NO: 3292965 - RNA, 12 nt, Variola virus
uauuuuaucauc

SEQ ID NO: 3292966 - RNA, 17 nt, Variola virus
uucuuguugcacuguaa

SEQ ID NO: 3292967 - RNA, 22 nt, Variola virus
uaugaauaucaggaaauguaua

SEQ ID NO: 3292968 - RNA, 13 nt, Variola virus
ucaaaacaaacag

SEQ ID NO: 3292969 - RNA, 21 nt, Variola virus
agcaaucuuuuagaugaugau

SEQ ID NO: 3292970 - RNA, 20 nt, Variola virus
aagauaccgcaccauaugcu

SEQ ID NO: 3292971 - RNA, 20 nt, Variola virus
ucugacuggguuguaauguu

SEQ ID NO: 3292972 - RNA, 18 nt, Variola virus
aauugucuguaaaccaca

SEQ ID NO: 3292973 - RNA, 16 nt, Variola virus
acaauuucuauuuccu

SEQ ID NO: 3292974 - RNA, 22 nt, Variola virus
aaguauuucuuacucaaaugaa

SEQ ID NO: 3292975 - RNA, 22 nt, Variola virus
uuuccaaguggcgaauuccaaa

SEQ ID NO: 3292976 - RNA, 14 nt, Variola virus
auguauacauaaua

SEQ ID NO: 3292977 - RNA, 18 nt, Variola virus
cuaaacgaucaaccaaaa

SEQ ID NO: 3292978 - RNA, 15 nt, Variola virus
uaucaucuguaagau

SEQ ID NO: 3292979 - RNA, 18 nt, Variola virus
acgauaaugucucuauaa

SEQ ID NO: 3292980 - RNA, 21 nt, Variola virus
uguaauaccagcgugaacaac

SEQ ID NO: 3292981 - RNA, 17 nt, Variola virus
auaugauaaacaaagau

SEQ ID NO: 3292982 - RNA, 22 nt, Variola virus
cuguucaaaaauuuagaaugau

SEQ ID NO: 3292983 - RNA, 17 nt, Variola virus
aaaguuaauaaucucau

SEQ ID NO: 3292984 - RNA, 13 nt, Variola virus
auucuaugaugaa

SEQ ID NO: 3292985 - RNA, 16 nt, Variola virus
cuguucuccguguggu

SEQ ID NO: 3292986 - RNA, 23 nt, Variola virus
cgacuaguucccgcauuaaauaa

SEQ ID NO: 3292987 - RNA, 23 nt, Variola virus
uuauugggugguaaacuagauaa

SEQ ID NO: 3292988 - RNA, 19 nt, Variola virus
uauuacgcuuaccaucaaa

SEQ ID NO: 3292989 - RNA, 16 nt, Variola virus
aauaguuuuuaucaua

SEQ ID NO: 3292990 - RNA, 18 nt, Variola virus
gauggguucgauauuaau

SEQ ID NO: 3292991 - RNA, 14 nt, Variola virus
uaucaucuauauca

SEQ ID NO: 3292992 - RNA, 15 nt, Variola virus
gguacaacauuccaa

SEQ ID NO: 3292993 - RNA, 17 nt, Variola virus
ucucauuaauuaaccau

SEQ ID NO: 3292994 - RNA, 18 nt, Variola virus
uugauaaagauagaugau

SEQ ID NO: 3292995 - RNA, 16 nt, Variola virus
aauauacauucgaaaa

SEQ ID NO: 3292996 - RNA, 21 nt, Variola virus
uaucauacaucggcuaccaaa

SEQ ID NO: 3292997 - RNA, 17 nt, Variola virus
ccaauuacaaaaacuac

SEQ ID NO: 3292998 - RNA, 13 nt, Variola virus
agagucaauguuu

SEQ ID NO: 3292999 - RNA, 21 nt, Variola virus
caauuaacauucuuauaacau

SEQ ID NO: 3293000 - RNA, 14 nt, Variola virus
auuauccaauagau

SEQ ID NO: 3293001 - RNA, 23 nt, Variola virus
guaaaaguacagaauuaauuaga

SEQ ID NO: 3293002 - RNA, 13 nt, Variola virus
ucuuauucuuaaa

SEQ ID NO: 3293003 - RNA, 17 nt, Variola virus
gacacuaguuaagaaca

SEQ ID NO: 3293004 - RNA, 21 nt, Variola virus
uauuuguacagguaccuacau

SEQ ID NO: 3293005 - RNA, 22 nt, Variola virus
cagaagauagcaaagagaugau

SEQ ID NO: 3293006 - RNA, 22 nt, Variola virus
acaauuuugcaccauucauaau

SEQ ID NO: 3293007 - RNA, 22 nt, Variola virus
uguugaugauaucuacaucguu

SEQ ID NO: 3293008 - RNA, 22 nt, Variola virus
ugugauuaaugugugacacauu

SEQ ID NO: 3293009 - RNA, 15 nt, Variola virus
aauaucuaggacaau

SEQ ID NO: 3293010 - RNA, 17 nt, Variola virus
guagaauuuuuuaaaaa

SEQ ID NO: 3293011 - RNA, 19 nt, Variola virus
uuagauaguugaucagaau

SEQ ID NO: 3293012 - RNA, 13 nt, Variola virus
uucuuguguaauu

SEQ ID NO: 3293013 - RNA, 12 nt, Variola virus
gaagcaaaauau

SEQ ID NO: 3293014 - RNA, 18 nt, Variola virus
ucgagaacagauuugaua

SEQ ID NO: 3293015 - RNA, 20 nt, Variola virus
aucagcauugcuuucauuau

SEQ ID NO: 3293016 - RNA, 19 nt, Variola virus
auuaauacggaauauagau

SEQ ID NO: 3293017 - RNA, 19 nt, Variola virus
aucgaauauaaaauaacua

SEQ ID NO: 3293018 - RNA, 21 nt, Variola virus
agaucccuuaucacacuuaaa

SEQ ID NO: 3293019 - RNA, 17 nt, Variola virus
acgauuuauauucacca

SEQ ID NO: 3293020 - RNA, 17 nt, Variola virus
uaccaaccuacacuauu

SEQ ID NO: 3293021 - RNA, 17 nt, Variola virus
uaucaugcuuuaacauu

SEQ ID NO: 3293022 - RNA, 20 nt, Variola virus
guuuaaaguaaacuucguaa

SEQ ID NO: 3293023 - RNA, 19 nt, Variola virus
ugucucuuaacuauuuccg

SEQ ID NO: 3293024 - RNA, 19 nt, Variola virus
ucaacacuacuauuauuga

SEQ ID NO: 3293025 - RNA, 22 nt, Variola virus
agauacuacaggaccguauuag

SEQ ID NO: 3293026 - RNA, 13 nt, Variola virus
uauggaauuccau

SEQ ID NO: 3293027 - RNA, 14 nt, Variola virus
uauccauuggaaaa

SEQ ID NO: 3293028 - RNA, 21 nt, Variola virus
uaauauucacagguauuauua

SEQ ID NO: 3293029 - RNA, 19 nt, Variola virus
gaguuagauauuaauaaca

SEQ ID NO: 3293030 - RNA, 22 nt, Variola virus
uugaccguguguaaaaugacuc

SEQ ID NO: 3293031 - RNA, 21 nt, Variola virus
ugauguaaucucuaaauucau

SEQ ID NO: 3293032 - RNA, 23 nt, Variola virus
ucaacaaauucugcaauaucuuc

SEQ ID NO: 3293033 - RNA, 17 nt, Variola virus
gaugucaagaucuuuug

SEQ ID NO: 3293034 - RNA, 14 nt, Variola virus
gauuccauauacca

SEQ ID NO: 3293035 - RNA, 13 nt, Variola virus
uaucaauagcagu

SEQ ID NO: 3293036 - RNA, 14 nt, Variola virus
aauuacagaaguac

SEQ ID NO: 3293037 - RNA, 15 nt, Variola virus
augagaacauaguau

SEQ ID NO: 3293038 - RNA, 15 nt, Variola virus
gaaauagauaaugaa

SEQ ID NO: 3293039 - RNA, 22 nt, Variola virus
agccaacaaauauaaaaugaua

SEQ ID NO: 3293040 - RNA, 14 nt, Variola virus
aggaaaaaaacaac

SEQ ID NO: 3293041 - RNA, 22 nt, Variola virus
cucuuugauuuugugucacaug

SEQ ID NO: 3293042 - RNA, 20 nt, Variola virus
uguaacauuaaguaaauccu

SEQ ID NO: 3293043 - RNA, 13 nt, Variola virus
aaacgaaaaauac

SEQ ID NO: 3293044 - RNA, 21 nt, Variola virus
uccuauauauuugaaaaucgu

SEQ ID NO: 3293045 - RNA, 15 nt, Variola virus
auccaagaaaaaguc

SEQ ID NO: 3293046 - RNA, 18 nt, Variola virus
ugccacugaucaugauug

SEQ ID NO: 3293047 - RNA, 13 nt, Variola virus
uaccuaauacuaa

SEQ ID NO: 3293048 - RNA, 16 nt, Variola virus
gaacauaagauaucua

SEQ ID NO: 3293049 - RNA, 23 nt, Variola virus
ugaacgguaucuucuugauuucu

SEQ ID NO: 3293050 - RNA, 19 nt, Variola virus
auacguaaaacucauuacu

SEQ ID NO: 3293051 - RNA, 21 nt, Variola virus
uauauucgauaguuauggaca

SEQ ID NO: 3293052 - RNA, 15 nt, Variola virus
cgcacaccaacaauu

SEQ ID NO: 3293053 - RNA, 13 nt, Variola virus
aaauaucuauuca

SEQ ID NO: 3293054 - RNA, 17 nt, Variola virus
aaggacaguuaaaacua

SEQ ID NO: 3293055 - RNA, 18 nt, Variola virus
ucuugauaaauuguacaa

SEQ ID NO: 3293056 - RNA, 13 nt, Variola virus
uguaaauguagua

SEQ ID NO: 3293057 - RNA, 13 nt, Variola virus
gucgucaaaauau

SEQ ID NO: 3293058 - RNA, 15 nt, Variola virus
gaucaaauuauugau

SEQ ID NO: 3293059 - RNA, 22 nt, Variola virus
auccacuauuaucaauucugga

SEQ ID NO: 3293060 - RNA, 12 nt, Variola virus
uaugaaugacuc

SEQ ID NO: 3293061 - RNA, 21 nt, Variola virus
aucucuuaaugagcguuuaaa

SEQ ID NO: 3293062 - RNA, 19 nt, Variola virus
auugucuuuacaaaucaua

SEQ ID NO: 3293063 - RNA, 14 nt, Variola virus
aaagacucagaaga

SEQ ID NO: 3293064 - RNA, 17 nt, Variola virus
ucauauuccaauucacg

SEQ ID NO: 3293065 - RNA, 20 nt, Variola virus
auacaaaauuugcaucuaca

SEQ ID NO: 3293066 - RNA, 22 nt, Variola virus
aauuaucguuccugguauauag

SEQ ID NO: 3293067 - RNA, 21 nt, Variola virus
auuuaucuaaccauucaauua

SEQ ID NO: 3293068 - RNA, 21 nt, Variola virus
auucuaccuuuuuauuuucua

SEQ ID NO: 3293069 - RNA, 21 nt, Variola virus
guucauuaaaaacaaacuuuu

SEQ ID NO: 3293070 - RNA, 19 nt, Variola virus
uguuuacggagacaaaauu

SEQ ID NO: 3293071 - RNA, 18 nt, Variola virus
augguaaaauacaaaaua

SEQ ID NO: 3293072 - RNA, 18 nt, Variola virus
uaaaauuucauagacuuu

SEQ ID NO: 3293073 - RNA, 14 nt, Variola virus
caaaccuagaugca

SEQ ID NO: 3293074 - RNA, 19 nt, Variola virus
ucccgccgauccuguauua

SEQ ID NO: 3293075 - RNA, 18 nt, Variola virus
agugacuuuguagcucuc

SEQ ID NO: 3293076 - RNA, 22 nt, Variola virus
cacguguagugggaacuauugc

SEQ ID NO: 3293077 - RNA, 14 nt, Variola virus
ugcgaucaauaaau

SEQ ID NO: 3293078 - RNA, 12 nt, Variola virus
aauauuaaauau

SEQ ID NO: 3293079 - RNA, 17 nt, Variola virus
gaaauuguuauaaugcu

SEQ ID NO: 3293080 - RNA, 15 nt, Variola virus
agccggacaaauaua

SEQ ID NO: 3293081 - RNA, 19 nt, Variola virus
gacuuguuaaaucuauaua

SEQ ID NO: 3293082 - RNA, 19 nt, Variola virus
ucuuuaaaguuucugaaau

SEQ ID NO: 3293083 - RNA, 19 nt, Variola virus
ucucuaaguuaacacaugu

SEQ ID NO: 3293084 - RNA, 23 nt, Variola virus
cacugggguaaaguaaguaucua

SEQ ID NO: 3293085 - RNA, 13 nt, Variola virus
auuuauaaaaaug

SEQ ID NO: 3293086 - RNA, 14 nt, Variola virus
aagaugaaaugauu

SEQ ID NO: 3293087 - RNA, 13 nt, Variola virus
acgaucaaccaaa

SEQ ID NO: 3293088 - RNA, 14 nt, Variola virus
auucacauaaaaga

SEQ ID NO: 3293089 - RNA, 18 nt, Variola virus
auaauauauuagauauuu

SEQ ID NO: 3293090 - RNA, 23 nt, Variola virus
auaccaaaucugguaaaaguuaa

SEQ ID NO: 3293091 - RNA, 15 nt, Variola virus
agaauucaacuauau

SEQ ID NO: 3293092 - RNA, 20 nt, Variola virus
cuaucuuuagcuucugaaau

SEQ ID NO: 3293093 - RNA, 23 nt, Variola virus
acuugaaauaaucggagaauguu

SEQ ID NO: 3293094 - RNA, 21 nt, Variola virus
uacauuuuuaaacuguuugua

SEQ ID NO: 3293095 - RNA, 14 nt, Variola virus
aaaaagaaugagua

SEQ ID NO: 3293096 - RNA, 18 nt, Variola virus
gucaaacuuaauaaagga

SEQ ID NO: 3293097 - RNA, 15 nt, Variola virus
uacuuuguguuucau

SEQ ID NO: 3293098 - RNA, 15 nt, Variola virus
uacuucuauacaaaa

SEQ ID NO: 3293099 - RNA, 12 nt, Variola virus
aucaaauuauug

SEQ ID NO: 3293100 - RNA, 16 nt, Variola virus
aagaugagcauaaaca

SEQ ID NO: 3293101 - RNA, 16 nt, Variola virus
uaguauagcagaaguu

SEQ ID NO: 3293102 - RNA, 16 nt, Variola virus
acguuuauucucaaau

SEQ ID NO: 3293103 - RNA, 13 nt, Variola virus
agcauaaaugcua

SEQ ID NO: 3293104 - RNA, 14 nt, Variola virus
aaucugaaaaugua

SEQ ID NO: 3293105 - RNA, 19 nt, Variola virus
agaugugauggaaaaauga

SEQ ID NO: 3293106 - RNA, 14 nt, Variola virus
acaaaaauacauaa

SEQ ID NO: 3293107 - RNA, 13 nt, Variola virus
ugaacauucaucu

SEQ ID NO: 3293108 - RNA, 14 nt, Variola virus
ucuauaaaauacua

SEQ ID NO: 3293109 - RNA, 18 nt, Variola virus
caaacuuuuucacagagc

SEQ ID NO: 3293110 - RNA, 16 nt, Variola virus
uagcagccaauacuuu

SEQ ID NO: 3293111 - RNA, 18 nt, Variola virus
uuaacggcguuuuggaaa

SEQ ID NO: 3293112 - RNA, 20 nt, Variola virus
auuaauaucuauuaaacgaa

SEQ ID NO: 3293113 - RNA, 21 nt, Variola virus
ugaggauuuacuaaguaauua

SEQ ID NO: 3293114 - RNA, 17 nt, Variola virus
auuaugaugauacauuu

SEQ ID NO: 3293115 - RNA, 16 nt, Variola virus
ccacguuuaaacauuc

SEQ ID NO: 3293116 - RNA, 12 nt, Variola virus
aaucacaaacau

SEQ ID NO: 3293117 - RNA, 14 nt, Variola virus
acaauucauuucca

SEQ ID NO: 3293118 - RNA, 19 nt, Variola virus
guaucucgucuaaauuaga

SEQ ID NO: 3293119 - RNA, 22 nt, Variola virus
aaaccaaucaauuauguaaaua

SEQ ID NO: 3293120 - RNA, 23 nt, Variola virus
uucuagaaaacgaaaacauccua

SEQ ID NO: 3293121 - RNA, 19 nt, Variola virus
gucaauuacgaauaaagcg

SEQ ID NO: 3293122 - RNA, 19 nt, Variola virus
aucggccuucuuuuuuaca

SEQ ID NO: 3293123 - RNA, 21 nt, Variola virus
aaaccaaaucuugauuacaaa

SEQ ID NO: 3293124 - RNA, 22 nt, Variola virus
ucuuaauagacauaucugccau

SEQ ID NO: 3293125 - RNA, 14 nt, Variola virus
aauauauucuauga

SEQ ID NO: 3293126 - RNA, 17 nt, Variola virus
agauauuaguaaaagau

SEQ ID NO: 3293127 - RNA, 19 nt, Variola virus
aguucuggcaauguuucau

SEQ ID NO: 3293128 - RNA, 17 nt, Variola virus
acuaguaacagucugaa

SEQ ID NO: 3293129 - RNA, 21 nt, Variola virus
cgauaaaauccuccuaucaau

SEQ ID NO: 3293130 - RNA, 15 nt, Variola virus
augacauuuauucau

SEQ ID NO: 3293131 - RNA, 22 nt, Variola virus
accauccguuaucgaagaaugg

SEQ ID NO: 3293132 - RNA, 12 nt, Variola virus
cugcugaaaaua

SEQ ID NO: 3293133 - RNA, 15 nt, Variola virus
ugugaguauuuuacu

SEQ ID NO: 3293134 - RNA, 12 nt, Variola virus
ucacauacuuug

SEQ ID NO: 3293135 - RNA, 22 nt, Variola virus
aaaauguauaacaaaugcagaa

SEQ ID NO: 3293136 - RNA, 15 nt, Variola virus
uccgccguucuaaug

SEQ ID NO: 3293137 - RNA, 20 nt, Variola virus
ucaguguccaucauuucauu

SEQ ID NO: 3293138 - RNA, 21 nt, Variola virus
cgcauuaguaagugcuacaaa

SEQ ID NO: 3293139 - RNA, 14 nt, Variola virus
aggaucuccaucaa

SEQ ID NO: 3293140 - RNA, 14 nt, Variola virus
uucacaauucauuc

SEQ ID NO: 3293141 - RNA, 14 nt, Variola virus
acaucaucugaaau

SEQ ID NO: 3293142 - RNA, 20 nt, Variola virus
ugauuagaaaauauaaauua

SEQ ID NO: 3293143 - RNA, 14 nt, Variola virus
gcgaauuacucugu

SEQ ID NO: 3293144 - RNA, 19 nt, Variola virus
gaauccgcugcauauuauu

SEQ ID NO: 3293145 - RNA, 13 nt, Variola virus
augaucuguuuau

SEQ ID NO: 3293146 - RNA, 13 nt, Variola virus
uacuuuacauaua

SEQ ID NO: 3293147 - RNA, 22 nt, Variola virus
uagagacaaacuauuaacuauc

SEQ ID NO: 3293148 - RNA, 22 nt, Variola virus
uuccgggugccgccaacaaggg

SEQ ID NO: 3293149 - RNA, 21 nt, Variola virus
cagauauagggauagaaguag

SEQ ID NO: 3293150 - RNA, 19 nt, Variola virus
ggaaaaaguguugaagaua

SEQ ID NO: 3293151 - RNA, 21 nt, Variola virus
uaguugauagaacaaaauaca

SEQ ID NO: 3293152 - RNA, 16 nt, Variola virus
uaggugcaucuggagc

SEQ ID NO: 3293153 - RNA, 15 nt, Variola virus
auccaaauucuggaa

SEQ ID NO: 3293154 - RNA, 23 nt, Variola virus
acgugucaauggcaguauuggga

SEQ ID NO: 3293155 - RNA, 18 nt, Variola virus
aaauuaugaaaaaaagau

SEQ ID NO: 3293156 - RNA, 22 nt, Variola virus
auaauauacuaauuaguaacga

SEQ ID NO: 3293157 - RNA, 22 nt, Variola virus
uuuucaguaccauuaucuuugu

SEQ ID NO: 3293158 - RNA, 14 nt, Variola virus
auauguuccaguaa

SEQ ID NO: 3293159 - RNA, 20 nt, Variola virus
cauauaguauucuuguauuc

SEQ ID NO: 3293160 - RNA, 17 nt, Variola virus
aauuuuaauauugaaaa

SEQ ID NO: 3293161 - RNA, 22 nt, Variola virus
ugaugagauguuauuaaauguu

SEQ ID NO: 3293162 - RNA, 15 nt, Variola virus
cggucgauucuuucg

SEQ ID NO: 3293163 - RNA, 23 nt, Variola virus
caugaauuuauuucuaauucuca

SEQ ID NO: 3293164 - RNA, 17 nt, Variola virus
aaauaucuuuaauacag

SEQ ID NO: 3293165 - RNA, 15 nt, Variola virus
auaaagaaaaaucua

SEQ ID NO: 3293166 - RNA, 16 nt, Variola virus
acauacguauaaucug

SEQ ID NO: 3293167 - RNA, 22 nt, Variola virus
uauuaucuucaucgauuucuau

SEQ ID NO: 3293168 - RNA, 21 nt, Variola virus
guucuaauuccgcauuaaaug

SEQ ID NO: 3293169 - RNA, 20 nt, Variola virus
uguauuaaauagaauauuua

SEQ ID NO: 3293170 - RNA, 16 nt, Variola virus
ggauuuuguauuaccu

SEQ ID NO: 3293171 - RNA, 20 nt, Variola virus
acuagauacaaaauuugcau

SEQ ID NO: 3293172 - RNA, 22 nt, Variola virus
ucagguucaucgaucucuauaa

SEQ ID NO: 3293173 - RNA, 15 nt, Variola virus
ucauuacucuaaaau

SEQ ID NO: 3293174 - RNA, 16 nt, Variola virus
auuuaacgaugucuau

SEQ ID NO: 3293175 - RNA, 18 nt, Variola virus
gaaauauguaauaaucau

SEQ ID NO: 3293176 - RNA, 17 nt, Variola virus
uauaaaaucuguaucga

SEQ ID NO: 3293177 - RNA, 15 nt, Variola virus
uaacaucacuaauau

SEQ ID NO: 3293178 - RNA, 23 nt, Variola virus
agaaaagguucuaucaacaauau

SEQ ID NO: 3293179 - RNA, 16 nt, Variola virus
uucacuaaauaguuuu

SEQ ID NO: 3293180 - RNA, 23 nt, Variola virus
gucacuaacugauaccaugaaau

SEQ ID NO: 3293181 - RNA, 17 nt, Variola virus
ccagaauacuauuuggu

SEQ ID NO: 3293182 - RNA, 16 nt, Variola virus
aauauuguuuuacugu

SEQ ID NO: 3293183 - RNA, 17 nt, Variola virus
cuaaagaaaaaugauug

SEQ ID NO: 3293184 - RNA, 17 nt, Variola virus
acuaauuguuuaaauaa

SEQ ID NO: 3293185 - RNA, 17 nt, Variola virus
acuuauuguuuuaauaa

SEQ ID NO: 3293186 - RNA, 16 nt, Variola virus
agauacguauuagaua

SEQ ID NO: 3293187 - RNA, 21 nt, Variola virus
gaaugucauuuguauuuuaua

SEQ ID NO: 3293188 - RNA, 15 nt, Variola virus
cugugacagauauca

SEQ ID NO: 3293189 - RNA, 19 nt, Variola virus
uaaaaugguaaacuuuugc

SEQ ID NO: 3293190 - RNA, 13 nt, Variola virus
agauguuaaauga

SEQ ID NO: 3293191 - RNA, 22 nt, Variola virus
gcaguggaguuauaugaauagu

SEQ ID NO: 3293192 - RNA, 18 nt, Variola virus
auaacagccaauaugaga

SEQ ID NO: 3293193 - RNA, 17 nt, Variola virus
uaucgcgauugcauaga

SEQ ID NO: 3293194 - RNA, 13 nt, Variola virus
augaaaaaaagau

SEQ ID NO: 3293195 - RNA, 17 nt, Variola virus
aauauucauauccuugu

SEQ ID NO: 3293196 - RNA, 17 nt, Variola virus
ccacugaugagauguua

SEQ ID NO: 3293197 - RNA, 17 nt, Variola virus
uauggcauucauugucu

SEQ ID NO: 3293198 - RNA, 18 nt, Variola virus
uuguccuaaaauacuauu

SEQ ID NO: 3293199 - RNA, 21 nt, Variola virus
gauuagaaaauauaaauuaau

SEQ ID NO: 3293200 - RNA, 15 nt, Variola virus
aucaaugauaugauu

SEQ ID NO: 3293201 - RNA, 22 nt, Variola virus
aaguugcgaugaaauaggagau

SEQ ID NO: 3293202 - RNA, 15 nt, Variola virus
auuaucaagaugugu

SEQ ID NO: 3293203 - RNA, 23 nt, Variola virus
agaaauuacauaaaaaaaaugua

SEQ ID NO: 3293204 - RNA, 17 nt, Variola virus
uauuaccauauuucuaa

SEQ ID NO: 3293205 - RNA, 17 nt, Variola virus
guuaaauaaauccuuca

SEQ ID NO: 3293206 - RNA, 14 nt, Variola virus
aaauaauacuauau

SEQ ID NO: 3293207 - RNA, 16 nt, Variola virus
ccguuaacaucucuuc

SEQ ID NO: 3293208 - RNA, 12 nt, Variola virus
uacagaaaauau

SEQ ID NO: 3293209 - RNA, 19 nt, Variola virus
auguauuuuuuaugauaua

SEQ ID NO: 3293210 - RNA, 13 nt, Variola virus
cagccaacaaaua

SEQ ID NO: 3293211 - RNA, 21 nt, Variola virus
ucaaugaguuuaauaacuuga

SEQ ID NO: 3293212 - RNA, 13 nt, Variola virus
aaguaucaaaucu

SEQ ID NO: 3293213 - RNA, 20 nt, Variola virus
uagauguuaaaaaaacaucg

SEQ ID NO: 3293214 - RNA, 14 nt, Variola virus
cauuuccaugucaa

SEQ ID NO: 3293215 - RNA, 16 nt, Variola virus
acgaguauagcaucau

SEQ ID NO: 3293216 - RNA, 16 nt, Variola virus
gaaaauacuaaaucag

SEQ ID NO: 3293217 - RNA, 16 nt, Variola virus
uggucaaaaacugaag

SEQ ID NO: 3293218 - RNA, 15 nt, Variola virus
uucagaauauucuuu

SEQ ID NO: 3293219 - RNA, 20 nt, Variola virus
guuccaauagguaucaaaga

SEQ ID NO: 3293220 - RNA, 21 nt, Variola virus
uuuuucgcgggauacaucauc

SEQ ID NO: 3293221 - RNA, 18 nt, Variola virus
agucuacauugucauuau

SEQ ID NO: 3293222 - RNA, 16 nt, Variola virus
gaacgccgguauauag

SEQ ID NO: 3293223 - RNA, 13 nt, Variola virus
aaaauauuaucua

SEQ ID NO: 3293224 - RNA, 20 nt, Variola virus
auacgaagggauugaaaaua

SEQ ID NO: 3293225 - RNA, 15 nt, Variola virus
auucugaugcaucaa

SEQ ID NO: 3293226 - RNA, 21 nt, Variola virus
uauaauuuuuuuucuagauaa

SEQ ID NO: 3293227 - RNA, 17 nt, Variola virus
aauaucaaacaauccaa

SEQ ID NO: 3293228 - RNA, 17 nt, Variola virus
acauugacauauuucga

SEQ ID NO: 3293229 - RNA, 19 nt, Variola virus
accgaaggagauacuauca

SEQ ID NO: 3293230 - RNA, 18 nt, Variola virus
augacuuuaguaaaucau

SEQ ID NO: 3293231 - RNA, 18 nt, Variola virus
auucauggaguuagaaaa

SEQ ID NO: 3293232 - RNA, 18 nt, Variola virus
ucaccugccauaaauaaa

SEQ ID NO: 3293233 - RNA, 15 nt, Variola virus
uuccuggagauaucc

SEQ ID NO: 3293234 - RNA, 17 nt, Variola virus
aagugcuuaaauauuuc

SEQ ID NO: 3293235 - RNA, 16 nt, Variola virus
aacucgguaaaaaauu

SEQ ID NO: 3293236 - RNA, 15 nt, Variola virus
aacaaacaucucacc

SEQ ID NO: 3293237 - RNA, 14 nt, Variola virus
uaaacuaauucauu

SEQ ID NO: 3293238 - RNA, 14 nt, Variola virus
acuaacacacaaug

SEQ ID NO: 3293239 - RNA, 21 nt, Variola virus
aacucugauuauugucuaaua

SEQ ID NO: 3293240 - RNA, 19 nt, Variola virus
guucguacccaucuuaaug

SEQ ID NO: 3293241 - RNA, 21 nt, Variola virus
uacuguauugauuacagugua

SEQ ID NO: 3293242 - RNA, 19 nt, Variola virus
aaguuugagauuucauaau

SEQ ID NO: 3293243 - RNA, 13 nt, Variola virus
ucaugaacauaau

SEQ ID NO: 3293244 - RNA, 15 nt, Variola virus
uugaaugauguaguu

SEQ ID NO: 3293245 - RNA, 14 nt, Variola virus
ccaucgauuguuua

SEQ ID NO: 3293246 - RNA, 21 nt, Variola virus
caauugcauucccaucauuuc

SEQ ID NO: 3293247 - RNA, 15 nt, Variola virus
uauaugacuguauuu

SEQ ID NO: 3293248 - RNA, 23 nt, Variola virus
uuuaucagaagauggauggauga

SEQ ID NO: 3293249 - RNA, 15 nt, Variola virus
guucauaaauaaaaa

SEQ ID NO: 3293250 - RNA, 14 nt, Variola virus
ucaucuaucauaga

SEQ ID NO: 3293251 - RNA, 13 nt, Variola virus
auagucauagcau

SEQ ID NO: 3293252 - RNA, 19 nt, Variola virus
ccacagauaauauuagaca

SEQ ID NO: 3293253 - RNA, 21 nt, Variola virus
cauacaugaaaugaucucuau

SEQ ID NO: 3293254 - RNA, 14 nt, Variola virus
ucauccgucucauu

SEQ ID NO: 3293255 - RNA, 13 nt, Variola virus
gauaauaaaucau

SEQ ID NO: 3293256 - RNA, 13 nt, Variola virus
agucgucaagcau

SEQ ID NO: 3293257 - RNA, 21 nt, Variola virus
acaucaacuaccuaaggaaua

SEQ ID NO: 3293258 - RNA, 13 nt, Variola virus
agaucccacauca

SEQ ID NO: 3293259 - RNA, 23 nt, Variola virus
aaaucaguaacuauguucauuuu

SEQ ID NO: 3293260 - RNA, 15 nt, Variola virus
uuagugggcaucuuu

SEQ ID NO: 3293261 - RNA, 12 nt, Variola virus
ucccuuuccaaa

SEQ ID NO: 3293262 - RNA, 18 nt, Variola virus
aguauuagucauaaacuu

SEQ ID NO: 3293263 - RNA, 15 nt, Variola virus
uaacauuacauauua

SEQ ID NO: 3293264 - RNA, 12 nt, Variola virus
guuuaucuuuuu

SEQ ID NO: 3293265 - RNA, 22 nt, Variola virus
auuccaguuuuaaacaaaauac

SEQ ID NO: 3293266 - RNA, 17 nt, Variola virus
gauacaauggaugauau

SEQ ID NO: 3293267 - RNA, 22 nt, Variola virus
cuguagagggucaacaaucguu

SEQ ID NO: 3293268 - RNA, 20 nt, Variola virus
ucuuauuggucagaaguuuu

SEQ ID NO: 3293269 - RNA, 17 nt, Variola virus
acauaacagguagaauu

SEQ ID NO: 3293270 - RNA, 12 nt, Variola virus
ccaaaagacuau

SEQ ID NO: 3293271 - RNA, 16 nt, Variola virus
uauuauugauagcauu

SEQ ID NO: 3293272 - RNA, 19 nt, Variola virus
aucuugcaaguuaaauaga

SEQ ID NO: 3293273 - RNA, 18 nt, Variola virus
auaucaacucauguguaa

SEQ ID NO: 3293274 - RNA, 15 nt, Variola virus
uaauaaaguguauau

SEQ ID NO: 3293275 - RNA, 13 nt, Variola virus
uggaaagauauca

SEQ ID NO: 3293276 - RNA, 12 nt, Variola virus
acuaaagacuau

SEQ ID NO: 3293277 - RNA, 15 nt, Variola virus
caauuagaacacgua

SEQ ID NO: 3293278 - RNA, 20 nt, Variola virus
uaauacaggaauauaaucuu

SEQ ID NO: 3293279 - RNA, 23 nt, Variola virus
aaguaucuacgauuuuuacaaaa

SEQ ID NO: 3293280 - RNA, 14 nt, Variola virus
accuaagggauuuu

SEQ ID NO: 3293281 - RNA, 15 nt, Variola virus
aucaugaauggauuu

SEQ ID NO: 3293282 - RNA, 19 nt, Variola virus
agcgaaaaauaauuauucu

SEQ ID NO: 3293283 - RNA, 22 nt, Variola virus
gccaauucuuccauugauguua

SEQ ID NO: 3293284 - RNA, 19 nt, Variola virus
uuacaaaaaaaucaauuaa

SEQ ID NO: 3293285 - RNA, 22 nt, Variola virus
ucuugacugucuaucucuguaa

SEQ ID NO: 3293286 - RNA, 16 nt, Variola virus
agguaguaaaaaauaa

SEQ ID NO: 3293287 - RNA, 13 nt, Variola virus
caaaauuaucaau

SEQ ID NO: 3293288 - RNA, 20 nt, Variola virus
ugauacggugaugguuuuua

SEQ ID NO: 3293289 - RNA, 18 nt, Variola virus
uagaauuauaccaauaga

SEQ ID NO: 3293290 - RNA, 21 nt, Variola virus
uucaacuuugaaauuguuuuu

SEQ ID NO: 3293291 - RNA, 20 nt, Variola virus
ucuaaauuauauuuauuauu

SEQ ID NO: 3293292 - RNA, 20 nt, Variola virus
aaaguagaaaauauauucua

SEQ ID NO: 3293293 - RNA, 13 nt, Variola virus
ugaauuagauaua

SEQ ID NO: 3293294 - RNA, 15 nt, Variola virus
caaacaugacauuuu

SEQ ID NO: 3293295 - RNA, 14 nt, Variola virus
aguauaaugauauc

SEQ ID NO: 3293296 - RNA, 21 nt, Variola virus
uaccauggacggagacaaauu

SEQ ID NO: 3293297 - RNA, 23 nt, Variola virus
gacugauuauugaguuaaaauca

SEQ ID NO: 3293298 - RNA, 19 nt, Variola virus
caugaaauauauuaagaaa

SEQ ID NO: 3293299 - RNA, 23 nt, Variola virus
uaccaaacuuucagaagaaaugg

SEQ ID NO: 3293300 - RNA, 12 nt, Variola virus
uuacgaaacuau

SEQ ID NO: 3293301 - RNA, 14 nt, Variola virus
uaauguaaaaucau

SEQ ID NO: 3293302 - RNA, 14 nt, Variola virus
uuaaccgauaaaaa

SEQ ID NO: 3293303 - RNA, 19 nt, Variola virus
auucucuaguuacacuaug

SEQ ID NO: 3293304 - RNA, 20 nt, Variola virus
auguccucaaauaaauacuc

SEQ ID NO: 3293305 - RNA, 20 nt, Variola virus
auuacguauuauauauguaa

SEQ ID NO: 3293306 - RNA, 15 nt, Variola virus
gacauaucugccaua

SEQ ID NO: 3293307 - RNA, 18 nt, Variola virus
caauaugccaauaaugau

SEQ ID NO: 3293308 - RNA, 14 nt, Variola virus
ccaucguuaauuau

SEQ ID NO: 3293309 - RNA, 15 nt, Variola virus
uaaaauuagagguau

SEQ ID NO: 3293310 - RNA, 20 nt, Variola virus
cauuguaugguuuuaaauau

SEQ ID NO: 3293311 - RNA, 15 nt, Variola virus
aucccggauacuuuu

SEQ ID NO: 3293312 - RNA, 23 nt, Variola virus
ccagaucuauugacuauaacucc

SEQ ID NO: 3293313 - RNA, 23 nt, Variola virus
auauaguuuuggaucaaauggau

SEQ ID NO: 3293314 - RNA, 16 nt, Variola virus
ccaucugguuuaauau

SEQ ID NO: 3293315 - RNA, 18 nt, Variola virus
uuagacguagaaaacgga

SEQ ID NO: 3293316 - RNA, 14 nt, Variola virus
aacaauaaugagaa

SEQ ID NO: 3293317 - RNA, 19 nt, Variola virus
ucuuugaucacuaccgagu

SEQ ID NO: 3293318 - RNA, 19 nt, Variola virus
agagacaaacuauuaacua

SEQ ID NO: 3293319 - RNA, 21 nt, Variola virus
acugcauauugucccaauguu

SEQ ID NO: 3293320 - RNA, 19 nt, Variola virus
uacaacuaguuuucaucaa

SEQ ID NO: 3293321 - RNA, 23 nt, Variola virus
uuaaauuaauaauggauauagua

SEQ ID NO: 3293322 - RNA, 16 nt, Variola virus
uuaauuaguaacuguu

SEQ ID NO: 3293323 - RNA, 13 nt, Variola virus
uucauuaacuaga

SEQ ID NO: 3293324 - RNA, 14 nt, Variola virus
auaauacuuaaaaa

SEQ ID NO: 3293325 - RNA, 13 nt, Variola virus
uaaauauuucauu

SEQ ID NO: 3293326 - RNA, 15 nt, Variola virus
aucauccguaucuuc

SEQ ID NO: 3293327 - RNA, 15 nt, Variola virus
cuuaaauauuucuac

SEQ ID NO: 3293328 - RNA, 19 nt, Variola virus
uugucucaugaccguguau

SEQ ID NO: 3293329 - RNA, 16 nt, Variola virus
aaauauaaucguguau

SEQ ID NO: 3293330 - RNA, 16 nt, Variola virus
auaauccagaauguac

SEQ ID NO: 3293331 - RNA, 22 nt, Variola virus
guguauuaccccucauaguauu

SEQ ID NO: 3293332 - RNA, 17 nt, Variola virus
aaaaauuuaaagaaugu

SEQ ID NO: 3293333 - RNA, 17 nt, Variola virus
ugccauaucauacauga

SEQ ID NO: 3293334 - RNA, 20 nt, Variola virus
uaaaaugucuccaauuuuug

SEQ ID NO: 3293335 - RNA, 23 nt, Variola virus
uuaccucuucugauaucauuaau

SEQ ID NO: 3293336 - RNA, 23 nt, Variola virus
caauaaauaugauuuuguaaagu

SEQ ID NO: 3293337 - RNA, 13 nt, Variola virus
aguauguaacaga

SEQ ID NO: 3293338 - RNA, 17 nt, Variola virus
uaugucucuuaacuauu

SEQ ID NO: 3293339 - RNA, 12 nt, Variola virus
ucguagaaagua

SEQ ID NO: 3293340 - RNA, 14 nt, Variola virus
uauaugacuguauu

SEQ ID NO: 3293341 - RNA, 21 nt, Variola virus
agaugagcauaaacauaauaa

SEQ ID NO: 3293342 - RNA, 23 nt, Variola virus
cuuuuuugacaggaucagguucu

SEQ ID NO: 3293343 - RNA, 21 nt, Variola virus
uauucacagucgccauuuagu

SEQ ID NO: 3293344 - RNA, 14 nt, Variola virus
acaaacauacucua

SEQ ID NO: 3293345 - RNA, 18 nt, Variola virus
aauauuacgaauuacauu

SEQ ID NO: 3293346 - RNA, 18 nt, Variola virus
gacaaaauauuagaaaaa

SEQ ID NO: 3293347 - RNA, 22 nt, Variola virus
aauuuuguuuuuguacuuucua

SEQ ID NO: 3293348 - RNA, 14 nt, Variola virus
agaauuagaauuac

SEQ ID NO: 3293349 - RNA, 18 nt, Variola virus
aacguauuaaauauuaau

SEQ ID NO: 3293350 - RNA, 22 nt, Variola virus
ucuacaaauagagauaaaacaa

SEQ ID NO: 3293351 - RNA, 12 nt, Variola virus
cugucaacaaug

SEQ ID NO: 3293352 - RNA, 22 nt, Variola virus
uuucauuccaggaucuagauaa

SEQ ID NO: 3293353 - RNA, 18 nt, Variola virus
uaguuguaaaguuaaaau

SEQ ID NO: 3293354 - RNA, 16 nt, Variola virus
uuuaacauauguauca

SEQ ID NO: 3293355 - RNA, 19 nt, Variola virus
ugcccccauucuuaauaau

SEQ ID NO: 3293356 - RNA, 18 nt, Variola virus
auaauagauuuaucuagu

SEQ ID NO: 3293357 - RNA, 17 nt, Variola virus
gaaaaauaacaaaucua

SEQ ID NO: 3293358 - RNA, 21 nt, Variola virus
aaacgaacacuauuagaauua

SEQ ID NO: 3293359 - RNA, 22 nt, Variola virus
aauacuucucuguccuuaauaa

SEQ ID NO: 3293360 - RNA, 14 nt, Variola virus
uaauauaauacuaa

SEQ ID NO: 3293361 - RNA, 15 nt, Variola virus
aucauuaauacagua

SEQ ID NO: 3293362 - RNA, 12 nt, Variola virus
guuccauauuau

SEQ ID NO: 3293363 - RNA, 20 nt, Variola virus
gcuaaguauacgaucuuuua

SEQ ID NO: 3293364 - RNA, 19 nt, Variola virus
gugagaacuuguuaaagaa

SEQ ID NO: 3293365 - RNA, 17 nt, Variola virus
gcauuggcaucaaaaga

SEQ ID NO: 3293366 - RNA, 14 nt, Variola virus
cccaaauaucuuua

SEQ ID NO: 3293367 - RNA, 21 nt, Variola virus
acgacgacauauuaguaacug

SEQ ID NO: 3293368 - RNA, 18 nt, Variola virus
cacuaaguauauacacag

SEQ ID NO: 3293369 - RNA, 14 nt, Variola virus
augaagaaagaaaa

SEQ ID NO: 3293370 - RNA, 15 nt, Variola virus
cuaauaucauuagua

SEQ ID NO: 3293371 - RNA, 21 nt, Variola virus
acuaucaguaaguuuuauaga

SEQ ID NO: 3293372 - RNA, 12 nt, Variola virus
agaauaauacag

SEQ ID NO: 3293373 - RNA, 23 nt, Variola virus
gaagcagcugcagcaacuucugu

SEQ ID NO: 3293374 - RNA, 21 nt, Variola virus
auguguuuacacuaacuguau

SEQ ID NO: 3293375 - RNA, 19 nt, Variola virus
uauauaaguaauaccaaaa

SEQ ID NO: 3293376 - RNA, 14 nt, Variola virus
uaaaaguuaaacuu

SEQ ID NO: 3293377 - RNA, 22 nt, Variola virus
uuuuugugggaagugauucaaa

SEQ ID NO: 3293378 - RNA, 17 nt, Variola virus
auuuggaaaagaaaauu

SEQ ID NO: 3293379 - RNA, 13 nt, Variola virus
uccacuuaaauau

SEQ ID NO: 3293380 - RNA, 18 nt, Variola virus
auaagaaaucaagacuac

SEQ ID NO: 3293381 - RNA, 16 nt, Variola virus
uacaaaugauacugau

SEQ ID NO: 3293382 - RNA, 22 nt, Variola virus
uaauaaacauuccacauucaga

SEQ ID NO: 3293383 - RNA, 19 nt, Variola virus
caucuaacuauaugauauc

SEQ ID NO: 3293384 - RNA, 15 nt, Variola virus
aucguuaagaauugu

SEQ ID NO: 3293385 - RNA, 17 nt, Variola virus
auauaccgccucaaacu

SEQ ID NO: 3293386 - RNA, 11 nt, Variola virus
aaauggauaau

SEQ ID NO: 3293387 - RNA, 13 nt, Variola virus
ugcugucaaacaa

SEQ ID NO: 3293388 - RNA, 18 nt, Variola virus
gaaauauauuaagaaauc

SEQ ID NO: 3293389 - RNA, 13 nt, Variola virus
aaccaaauacaua

SEQ ID NO: 3293390 - RNA, 17 nt, Variola virus
agaugauaauuuauaca

SEQ ID NO: 3293391 - RNA, 21 nt, Variola virus
caauaugucuguacaaauguu

SEQ ID NO: 3293392 - RNA, 24 nt, Variola virus
uuaaaggauggcgaaauuauugca

SEQ ID NO: 3293393 - RNA, 18 nt, Variola virus
acaguaucagauaaucua

SEQ ID NO: 3293394 - RNA, 13 nt, Variola virus
agcacagaacaca

SEQ ID NO: 3293395 - RNA, 14 nt, Variola virus
aaaauuauaugacc

SEQ ID NO: 3293396 - RNA, 12 nt, Variola virus
ucauugauuuuu

SEQ ID NO: 3293397 - RNA, 22 nt, Variola virus
uuauugcauguuuucauauuca

SEQ ID NO: 3293398 - RNA, 13 nt, Variola virus
ugagaaauuauuc

SEQ ID NO: 3293399 - RNA, 19 nt, Variola virus
ucaaucucuucuauuuuca

SEQ ID NO: 3293400 - RNA, 17 nt, Variola virus
cagucuaauauccauuu

SEQ ID NO: 3293401 - RNA, 19 nt, Variola virus
agguacuauaauauuaaaa

SEQ ID NO: 3293402 - RNA, 11 nt, Variola virus
caaaucuucuu

SEQ ID NO: 3293403 - RNA, 12 nt, Variola virus
accaaauuauca

SEQ ID NO: 3293404 - RNA, 22 nt, Variola virus
uuuuauaaucuuuauggaucua

SEQ ID NO: 3293405 - RNA, 12 nt, Variola virus
acuauccaauaa

SEQ ID NO: 3293406 - RNA, 20 nt, Variola virus
uuagauaaauggaauacuaa

SEQ ID NO: 3293407 - RNA, 22 nt, Variola virus
aggucgccauacgucaaauuua

SEQ ID NO: 3293408 - RNA, 13 nt, Variola virus
cgcauuaaaugau

SEQ ID NO: 3293409 - RNA, 19 nt, Variola virus
guguccguauaccaacaug

SEQ ID NO: 3293410 - RNA, 23 nt, Variola virus
uaacccauuauaaaacuuaugau

SEQ ID NO: 3293411 - RNA, 17 nt, Variola virus
aacguuaucauuuucua

SEQ ID NO: 3293412 - RNA, 13 nt, Variola virus
aucaauaaauagu

SEQ ID NO: 3293413 - RNA, 20 nt, Variola virus
gcacaaaugugcuuaaacga

SEQ ID NO: 3293414 - RNA, 23 nt, Variola virus
uuacgacgagcauauucauaaau

SEQ ID NO: 3293415 - RNA, 23 nt, Variola virus
uggaaugcuguuuaauguuucca

SEQ ID NO: 3293416 - RNA, 20 nt, Variola virus
cauucuacguccuauggaug

SEQ ID NO: 3293417 - RNA, 22 nt, Variola virus
uguaaacuguugaugauaucua

SEQ ID NO: 3293418 - RNA, 19 nt, Variola virus
aauccuauacucugaaaga

SEQ ID NO: 3293419 - RNA, 14 nt, Variola virus
cuagaauaucccaa

SEQ ID NO: 3293420 - RNA, 16 nt, Variola virus
auggaguauaaucuuu

SEQ ID NO: 3293421 - RNA, 15 nt, Variola virus
gauacguauauuaau

SEQ ID NO: 3293422 - RNA, 23 nt, Variola virus
cauuaucuggauuaaacauacua

SEQ ID NO: 3293423 - RNA, 18 nt, Variola virus
aaaauggcauaugcuuua

SEQ ID NO: 3293424 - RNA, 22 nt, Variola virus
uuaacgauuggaaaucauuaac

SEQ ID NO: 3293425 - RNA, 23 nt, Variola virus
uaagauuuuugagauaucucauu

SEQ ID NO: 3293426 - RNA, 14 nt, Variola virus
ugccauuaagaaac

SEQ ID NO: 3293427 - RNA, 13 nt, Variola virus
aacaaguuuuuau

SEQ ID NO: 3293428 - RNA, 15 nt, Variola virus
uuagaaaaaacauca

SEQ ID NO: 3293429 - RNA, 21 nt, Variola virus
uauucaaacuaauacaucuga

SEQ ID NO: 3293430 - RNA, 13 nt, Variola virus
agauaaugugaau

SEQ ID NO: 3293431 - RNA, 15 nt, Variola virus
uagaagcuaacauac

SEQ ID NO: 3293432 - RNA, 15 nt, Variola virus
caaauguuaaacauu

SEQ ID NO: 3293433 - RNA, 17 nt, Variola virus
ugucaagaucuuuugua

SEQ ID NO: 3293434 - RNA, 13 nt, Variola virus
caacauuguagaa

SEQ ID NO: 3293435 - RNA, 18 nt, Variola virus
ucauccuuaaauguuuuc

SEQ ID NO: 3293436 - RNA, 17 nt, Variola virus
gauguaucacacgcucu

SEQ ID NO: 3293437 - RNA, 13 nt, Variola virus
cugcauucaauuc

SEQ ID NO: 3293438 - RNA, 15 nt, Variola virus
aucuauuacaaacau

SEQ ID NO: 3293439 - RNA, 19 nt, Variola virus
uccauaaauuuauaauguu

SEQ ID NO: 3293440 - RNA, 22 nt, Variola virus
aaaguaguucaacauaauauua

SEQ ID NO: 3293441 - RNA, 18 nt, Variola virus
aaugccacaucaaagaua

SEQ ID NO: 3293442 - RNA, 13 nt, Variola virus
uagaaaauggauu

SEQ ID NO: 3293443 - RNA, 19 nt, Variola virus
aaucucuaucgucacauau

SEQ ID NO: 3293444 - RNA, 20 nt, Variola virus
uuacaauuaauaaguauaaa

SEQ ID NO: 3293445 - RNA, 18 nt, Variola virus
uuacagaucuaguauaau

SEQ ID NO: 3293446 - RNA, 14 nt, Variola virus
uggaaguuccaaac

SEQ ID NO: 3293447 - RNA, 14 nt, Variola virus
uucgucaaacauua

SEQ ID NO: 3293448 - RNA, 18 nt, Variola virus
acauggaauaaauuauua

SEQ ID NO: 3293449 - RNA, 14 nt, Variola virus
aucguuacaaaaga

SEQ ID NO: 3293450 - RNA, 15 nt, Variola virus
gcgauucagaacaca

SEQ ID NO: 3293451 - RNA, 13 nt, Variola virus
ugcuuccauaaua

SEQ ID NO: 3293452 - RNA, 17 nt, Variola virus
uaguuauaucacaugau

SEQ ID NO: 3293453 - RNA, 15 nt, Variola virus
ucuuaaaacaguuuu

SEQ ID NO: 3293454 - RNA, 14 nt, Variola virus
auuacaaaagaaac

SEQ ID NO: 3293455 - RNA, 16 nt, Variola virus
aauuguauuauuuccc

SEQ ID NO: 3293456 - RNA, 13 nt, Variola virus
guccaaaaugaug

SEQ ID NO: 3293457 - RNA, 18 nt, Variola virus
aauccaaaaaaugaaauc

SEQ ID NO: 3293458 - RNA, 22 nt, Variola virus
uauuaaacucuacauaaucaua

SEQ ID NO: 3293459 - RNA, 24 nt, Variola virus
aaaggggugagaacguuccagagu

SEQ ID NO: 3293460 - RNA, 17 nt, Variola virus
auuuguaggaaaaagau

SEQ ID NO: 3293461 - RNA, 18 nt, Variola virus
agugcgaugauuguacac

SEQ ID NO: 3293462 - RNA, 18 nt, Variola virus
uuuuaaauuuuguauuua

SEQ ID NO: 3293463 - RNA, 17 nt, Variola virus
ugaauucucauuuugca

SEQ ID NO: 3293464 - RNA, 23 nt, Variola virus
guuaaucgucgaacguucuagua

SEQ ID NO: 3293465 - RNA, 15 nt, Variola virus
cucuuaauuauaacg

SEQ ID NO: 3293466 - RNA, 14 nt, Variola virus
auaugcuacaagau

SEQ ID NO: 3293467 - RNA, 19 nt, Variola virus
uagaauguauuuuaacacu

SEQ ID NO: 3293468 - RNA, 23 nt, Variola virus
cagggacacucaaacuaaauguc

SEQ ID NO: 3293469 - RNA, 20 nt, Variola virus
aguauuuacaauguagaaau

SEQ ID NO: 3293470 - RNA, 17 nt, Variola virus
gaaaucguauauaacua

SEQ ID NO: 3293471 - RNA, 20 nt, Variola virus
caauuaacauucuuauaaca

SEQ ID NO: 3293472 - RNA, 11 nt, Variola virus
agaaaauggau

SEQ ID NO: 3293473 - RNA, 19 nt, Variola virus
auuuaucuguuuuggugaa

SEQ ID NO: 3293474 - RNA, 15 nt, Variola virus
uuguaauuaaauuuu

SEQ ID NO: 3293475 - RNA, 16 nt, Variola virus
uauuacguauuauaua

SEQ ID NO: 3293476 - RNA, 19 nt, Variola virus
agcuagaggaaaugaaaga

SEQ ID NO: 3293477 - RNA, 12 nt, Variola virus
acauuaaaugua

SEQ ID NO: 3293478 - RNA, 19 nt, Variola virus
ccugccauaaauaaaugcu

SEQ ID NO: 3293479 - RNA, 15 nt, Variola virus
gacauaguaauacau

SEQ ID NO: 3293480 - RNA, 23 nt, Variola virus
caauagagaccgcgucuguuaua

SEQ ID NO: 3293481 - RNA, 12 nt, Variola virus
aacuuaaugaaa

SEQ ID NO: 3293482 - RNA, 23 nt, Variola virus
uaaacucuccaccauuuccgcau

SEQ ID NO: 3293483 - RNA, 17 nt, Variola virus
acccaacaauacauuua

SEQ ID NO: 3293484 - RNA, 22 nt, Variola virus
aucuaaaacuacguucgaugaa

SEQ ID NO: 3293485 - RNA, 19 nt, Variola virus
uaauauuaaaaauaagaau

SEQ ID NO: 3293486 - RNA, 23 nt, Variola virus
uuaguauauaacauuaauacuau

SEQ ID NO: 3293487 - RNA, 15 nt, Variola virus
auguauaacuuuacu

SEQ ID NO: 3293488 - RNA, 12 nt, Variola virus
uucuuguuaaug

SEQ ID NO: 3293489 - RNA, 20 nt, Variola virus
ugucuggagaucuaaagaua

SEQ ID NO: 3293490 - RNA, 14 nt, Variola virus
cagaggaaacuaau

SEQ ID NO: 3293491 - RNA, 22 nt, Variola virus
cuuaugaaacuuggaaacaucu

SEQ ID NO: 3293492 - RNA, 14 nt, Variola virus
uugguucucuagau

SEQ ID NO: 3293493 - RNA, 13 nt, Variola virus
uagacgaugauuu

SEQ ID NO: 3293494 - RNA, 21 nt, Variola virus
auggauaauccgucuauuuua

SEQ ID NO: 3293495 - RNA, 14 nt, Variola virus
uucauuaaggagau

SEQ ID NO: 3293496 - RNA, 15 nt, Variola virus
uugguacauuuuuca

SEQ ID NO: 3293497 - RNA, 17 nt, Variola virus
uuccaugauauccaaaa

SEQ ID NO: 3293498 - RNA, 12 nt, Variola virus
ucaaaagaagau

SEQ ID NO: 3293499 - RNA, 22 nt, Variola virus
aauaucaucaauauagagauua

SEQ ID NO: 3293500 - RNA, 16 nt, Variola virus
uaauuuuagaagcuau

SEQ ID NO: 3293501 - RNA, 20 nt, Variola virus
accacuucucuaucaaugau

SEQ ID NO: 3293502 - RNA, 21 nt, Variola virus
gaaagucuuagggaugaggaa

SEQ ID NO: 3293503 - RNA, 14 nt, Variola virus
caaugaauuaacuu

SEQ ID NO: 3293504 - RNA, 22 nt, Variola virus
gauuguacacccaucauggaau

SEQ ID NO: 3293505 - RNA, 15 nt, Variola virus
agaccaucuaacaga

SEQ ID NO: 3293506 - RNA, 15 nt, Variola virus
uaaguuacaggaacu

SEQ ID NO: 3293507 - RNA, 14 nt, Variola virus
uucccaaauaauca

SEQ ID NO: 3293508 - RNA, 22 nt, Variola virus
uuagacuaucucugacacuaca

SEQ ID NO: 3293509 - RNA, 15 nt, Variola virus
agauacagauguaaa

SEQ ID NO: 3293510 - RNA, 20 nt, Variola virus
aguacuaauaaggaacuaga

SEQ ID NO: 3293511 - RNA, 21 nt, Variola virus
aagaagcuggaugugggagau

SEQ ID NO: 3293512 - RNA, 15 nt, Variola virus
uaauaaaacaaugga

SEQ ID NO: 3293513 - RNA, 20 nt, Variola virus
auuguacacuucuauaguau

SEQ ID NO: 3293514 - RNA, 13 nt, Variola virus
gccagaaucaugg

SEQ ID NO: 3293515 - RNA, 22 nt, Variola virus
guucucgccuaagagauaaaaa

SEQ ID NO: 3293516 - RNA, 22 nt, Variola virus
agaaauggaaaucguaauacca

SEQ ID NO: 3293517 - RNA, 17 nt, Variola virus
cagaacaucuuccauag

SEQ ID NO: 3293518 - RNA, 16 nt, Variola virus
uuccacauuaauacag

SEQ ID NO: 3293519 - RNA, 16 nt, Variola virus
gaaauuuaaaauuaga

SEQ ID NO: 3293520 - RNA, 20 nt, Variola virus
aacuuaacaaaucuuaauau

SEQ ID NO: 3293521 - RNA, 19 nt, Variola virus
aucucauuaagcuaauaga

SEQ ID NO: 3293522 - RNA, 15 nt, Variola virus
ucauguuaacacucu

SEQ ID NO: 3293523 - RNA, 16 nt, Variola virus
aaacaguauguuguac

SEQ ID NO: 3293524 - RNA, 21 nt, Variola virus
acaauacagaagauagcaaag

SEQ ID NO: 3293525 - RNA, 19 nt, Variola virus
uuugaauauacuuuuaauu

SEQ ID NO: 3293526 - RNA, 19 nt, Variola virus
auagaaauaaaaauuauua

SEQ ID NO: 3293527 - RNA, 15 nt, Variola virus
aauuuauuuaucaau

SEQ ID NO: 3293528 - RNA, 21 nt, Variola virus
auaauacauuuaaauuuauca

SEQ ID NO: 3293529 - RNA, 14 nt, Variola virus
uauauaaauacuuu

SEQ ID NO: 3293530 - RNA, 22 nt, Variola virus
uagaaaacagagauaguaaaua

SEQ ID NO: 3293531 - RNA, 16 nt, Variola virus
gucgagguuuaaagaa

SEQ ID NO: 3293532 - RNA, 18 nt, Variola virus
aacuaugucaaaaauugu

SEQ ID NO: 3293533 - RNA, 13 nt, Variola virus
agauaaacuagau

SEQ ID NO: 3293534 - RNA, 12 nt, Variola virus
auuauaauguau

SEQ ID NO: 3293535 - RNA, 22 nt, Variola virus
gauauauauugcacgauaaugu

SEQ ID NO: 3293536 - RNA, 13 nt, Variola virus
gcaaaaauaauau

SEQ ID NO: 3293537 - RNA, 15 nt, Variola virus
gaucauguagaaaac

SEQ ID NO: 3293538 - RNA, 16 nt, Variola virus
gauaauuaauaauaua

SEQ ID NO: 3293539 - RNA, 12 nt, Variola virus
agaaauaaagua

SEQ ID NO: 3293540 - RNA, 20 nt, Variola virus
gaauauacaaaguuaguaca

SEQ ID NO: 3293541 - RNA, 13 nt, Variola virus
caaauuuaucuac

SEQ ID NO: 3293542 - RNA, 22 nt, Variola virus
caaaucuaaauucacaucuuca

SEQ ID NO: 3293543 - RNA, 19 nt, Variola virus
guaaaaugaaauaucuuaa

SEQ ID NO: 3293544 - RNA, 14 nt, Variola virus
acauauuuauaauu

SEQ ID NO: 3293545 - RNA, 13 nt, Variola virus
cgaauaaauagau

SEQ ID NO: 3293546 - RNA, 13 nt, Variola virus
uaauaguaaauga

SEQ ID NO: 3293547 - RNA, 21 nt, Variola virus
uguaucauauucaacauguuu

SEQ ID NO: 3293548 - RNA, 20 nt, Variola virus
cuaacaauaacuagaucauc

SEQ ID NO: 3293549 - RNA, 16 nt, Variola virus
agauuuauaauacuuu

SEQ ID NO: 3293550 - RNA, 13 nt, Variola virus
augguaaauacug

SEQ ID NO: 3293551 - RNA, 22 nt, Variola virus
auccaaaaguuccgagauaauu

SEQ ID NO: 3293552 - RNA, 19 nt, Variola virus
agauacuaucaaaauaucu

SEQ ID NO: 3293553 - RNA, 17 nt, Variola virus
caaagaguuacacuaag

SEQ ID NO: 3293554 - RNA, 20 nt, Variola virus
uccauaauacucccacaaau

SEQ ID NO: 3293555 - RNA, 22 nt, Variola virus
uagaauuuauagacgacucauu

SEQ ID NO: 3293556 - RNA, 15 nt, Variola virus
aaugugcuacuaaga

SEQ ID NO: 3293557 - RNA, 18 nt, Variola virus
auuaauacacauaaugaa

SEQ ID NO: 3293558 - RNA, 19 nt, Variola virus
uauaaaauucccaaucuug

SEQ ID NO: 3293559 - RNA, 22 nt, Variola virus
gauuaauaauucauggaaauuu

SEQ ID NO: 3293560 - RNA, 13 nt, Variola virus
uauucacauaucg

SEQ ID NO: 3293561 - RNA, 18 nt, Variola virus
auaugaaccugacaugau

SEQ ID NO: 3293562 - RNA, 22 nt, Variola virus
uuacuacguucauauuccaauu

SEQ ID NO: 3293563 - RNA, 20 nt, Variola virus
cuaauuuuguagcauuagua

SEQ ID NO: 3293564 - RNA, 16 nt, Variola virus
cuaacucuuauauacc

SEQ ID NO: 3293565 - RNA, 19 nt, Variola virus
uccauauuucuuaauguaa

SEQ ID NO: 3293566 - RNA, 21 nt, Variola virus
auauuaggcacagucaaacau

SEQ ID NO: 3293567 - RNA, 13 nt, Variola virus
uauccauuauucu

SEQ ID NO: 3293568 - RNA, 15 nt, Variola virus
acaauaauuauaauu

SEQ ID NO: 3293569 - RNA, 13 nt, Variola virus
uaacggaugaaaa

SEQ ID NO: 3293570 - RNA, 19 nt, Variola virus
uuacaauguagaaauuaga

SEQ ID NO: 3293571 - RNA, 11 nt, Variola virus
auauaggaaaa

SEQ ID NO: 3293572 - RNA, 16 nt, Variola virus
aucauuaaaaaaauua

SEQ ID NO: 3293573 - RNA, 23 nt, Variola virus
ugagauguuauuaaauguugaua

SEQ ID NO: 3293574 - RNA, 17 nt, Variola virus
ugauagccguagaucuu

SEQ ID NO: 3293575 - RNA, 17 nt, Variola virus
cacucucccuauaucuu

SEQ ID NO: 3293576 - RNA, 12 nt, Variola virus
agauaaaacaag

SEQ ID NO: 3293577 - RNA, 19 nt, Variola virus
uucuacugaugcauguauu

SEQ ID NO: 3293578 - RNA, 13 nt, Variola virus
guucauaaucauc

SEQ ID NO: 3293579 - RNA, 23 nt, Variola virus
auuucuccaaagaauauaucuaa

SEQ ID NO: 3293580 - RNA, 18 nt, Variola virus
agugugaauaugaucuuc

SEQ ID NO: 3293581 - RNA, 21 nt, Variola virus
agacaauuauauaaaacauuu

SEQ ID NO: 3293582 - RNA, 21 nt, Variola virus
ucaccaauaaaaauaaacuag

SEQ ID NO: 3293583 - RNA, 12 nt, Variola virus
gaugaaauaugu

SEQ ID NO: 3293584 - RNA, 9 nt, Variola virus
uuagaaaaa

SEQ ID NO: 3293585 - RNA, 14 nt, Variola virus
auguuuuuaauagc

SEQ ID NO: 3293586 - RNA, 13 nt, Variola virus
caauauuuacaau

SEQ ID NO: 3293587 - RNA, 18 nt, Variola virus
cguuggaccauuaauagg

SEQ ID NO: 3293588 - RNA, 17 nt, Variola virus
uauauuaaaaaauguca

SEQ ID NO: 3293589 - RNA, 22 nt, Variola virus
uuauuacuaaacuacgugaaca

SEQ ID NO: 3293590 - RNA, 14 nt, Variola virus
cagauaauaacaga

SEQ ID NO: 3293591 - RNA, 12 nt, Variola virus
cacauaaaagaa

SEQ ID NO: 3293592 - RNA, 21 nt, Variola virus
gaacucuguuucuguaucuau

SEQ ID NO: 3293593 - RNA, 18 nt, Variola virus
auuccauuaucugaaaug

SEQ ID NO: 3293594 - RNA, 20 nt, Variola virus
aaacucgcuuaauaucuucu

SEQ ID NO: 3293595 - RNA, 14 nt, Variola virus
uccuuacacaaaua

SEQ ID NO: 3293596 - RNA, 19 nt, Variola virus
auauuacuaaacacacauu

SEQ ID NO: 3293597 - RNA, 22 nt, Variola virus
guuguagauaaucguuaauauu

SEQ ID NO: 3293598 - RNA, 15 nt, Variola virus
auacaaaauaauaga

SEQ ID NO: 3293599 - RNA, 12 nt, Variola virus
gcaaaauuuaua

SEQ ID NO: 3293600 - RNA, 17 nt, Variola virus
agaaucaucuguuguau

SEQ ID NO: 3293601 - RNA, 17 nt, Variola virus
agaacauaauaauauau

SEQ ID NO: 3293602 - RNA, 21 nt, Variola virus
caguaauagcuccauaaacug

SEQ ID NO: 3293603 - RNA, 20 nt, Variola virus
ucaguuccggaucuauagaa

SEQ ID NO: 3293604 - RNA, 19 nt, Variola virus
agaaaucauccguuguuau

SEQ ID NO: 3293605 - RNA, 13 nt, Variola virus
uuauuaaaaugag

SEQ ID NO: 3293606 - RNA, 23 nt, Variola virus
uuaaaaacaaacuuuuuauccuu

SEQ ID NO: 3293607 - RNA, 22 nt, Variola virus
aguauuuauacuuuuaggaaau

SEQ ID NO: 3293608 - RNA, 19 nt, Variola virus
aaaaagauuucagaaucua

SEQ ID NO: 3293609 - RNA, 14 nt, Variola virus
acaauuuauuucua

SEQ ID NO: 3293610 - RNA, 12 nt, Variola virus
uuauuuauguca

SEQ ID NO: 3293611 - RNA, 19 nt, Variola virus
cuacauacauaagcaucuc

SEQ ID NO: 3293612 - RNA, 20 nt, Variola virus
uacaaauuacaauaaugcag

SEQ ID NO: 3293613 - RNA, 19 nt, Variola virus
aaacgaguacuuuaaagaa

SEQ ID NO: 3293614 - RNA, 15 nt, Variola virus
auuuugcuaucuuga

SEQ ID NO: 3293615 - RNA, 21 nt, Variola virus
uuuacaagauuauuaaauccu

SEQ ID NO: 3293616 - RNA, 22 nt, Variola virus
agaauuuuuauaaauuuuucca

SEQ ID NO: 3293617 - RNA, 22 nt, Variola virus
acaaacauuuuuguugguguaa

SEQ ID NO: 3293618 - RNA, 13 nt, Variola virus
auauuagaauuua

SEQ ID NO: 3293619 - RNA, 19 nt, Variola virus
agaacuuaugaccguaaua

SEQ ID NO: 3293620 - RNA, 12 nt, Variola virus
cuauccaauaaa

SEQ ID NO: 3293621 - RNA, 13 nt, Variola virus
uguuuucauacau

SEQ ID NO: 3293622 - RNA, 14 nt, Variola virus
agaauauacuacaa

SEQ ID NO: 3293623 - RNA, 23 nt, Variola virus
acuaauucauuuucaauaauaua

SEQ ID NO: 3293624 - RNA, 12 nt, Variola virus
cucuaaaugagu

SEQ ID NO: 3293625 - RNA, 21 nt, Variola virus
gaucuuacuguuucuucacuc

SEQ ID NO: 3293626 - RNA, 18 nt, Variola virus
agugcagauaaucauuua

SEQ ID NO: 3293627 - RNA, 23 nt, Variola virus
aauaagaacuauaaaaaaaauaa

SEQ ID NO: 3293628 - RNA, 19 nt, Variola virus
ucuaauuuccugauucaga

SEQ ID NO: 3293629 - RNA, 15 nt, Variola virus
uaauauugaaaauac

SEQ ID NO: 3293630 - RNA, 15 nt, Variola virus
uuuuucaaauucuca

SEQ ID NO: 3293631 - RNA, 13 nt, Variola virus
caugauaguuuua

SEQ ID NO: 3293632 - RNA, 12 nt, Variola virus
ucaucuagaaug

SEQ ID NO: 3293633 - RNA, 17 nt, Variola virus
ccaacguaauaaugaag

SEQ ID NO: 3293634 - RNA, 16 nt, Variola virus
uaugcgggaauuaaug

SEQ ID NO: 3293635 - RNA, 12 nt, Variola virus
cagacugugcau

SEQ ID NO: 3293636 - RNA, 22 nt, Variola virus
gcccaauuuugguguaaaucua

SEQ ID NO: 3293637 - RNA, 15 nt, Variola virus
guauccguauaaaaa

SEQ ID NO: 3293638 - RNA, 15 nt, Variola virus
auaauaguaacauau

SEQ ID NO: 3293639 - RNA, 15 nt, Variola virus
uuuuacgaauaaaag

SEQ ID NO: 3293640 - RNA, 15 nt, Variola virus
caauuucauaaugag

SEQ ID NO: 3293641 - RNA, 16 nt, Variola virus
cguuuggauuaaucug

SEQ ID NO: 3293642 - RNA, 22 nt, Variola virus
guaauagaauacgaugauauua

SEQ ID NO: 3293643 - RNA, 18 nt, Variola virus
aaacauuuugacugaaua

SEQ ID NO: 3293644 - RNA, 22 nt, Variola virus
aucgcaucaaauaaaauuauug

SEQ ID NO: 3293645 - RNA, 14 nt, Variola virus
uuacaaucaauaau

SEQ ID NO: 3293646 - RNA, 15 nt, Variola virus
aauucuaucucuaag

SEQ ID NO: 3293647 - RNA, 16 nt, Variola virus
uaaagauagaugauga

SEQ ID NO: 3293648 - RNA, 21 nt, Variola virus
guauaccuuuccaguauauga

SEQ ID NO: 3293649 - RNA, 21 nt, Variola virus
agagggagccgauaacuuuau

SEQ ID NO: 3293650 - RNA, 16 nt, Variola virus
uaacugcaguguguau

SEQ ID NO: 3293651 - RNA, 16 nt, Variola virus
aacgggauauaugaau

SEQ ID NO: 3293652 - RNA, 14 nt, Variola virus
gaacaauaaaagag

SEQ ID NO: 3293653 - RNA, 15 nt, Variola virus
acgcgucuuuaacuc

SEQ ID NO: 3293654 - RNA, 15 nt, Variola virus
caauauuguagaauu

SEQ ID NO: 3293655 - RNA, 21 nt, Variola virus
cauuuagauagucacauuuca

SEQ ID NO: 3293656 - RNA, 20 nt, Variola virus
cuuuauaucguguucauuaa

SEQ ID NO: 3293657 - RNA, 15 nt, Variola virus
cuuuauaacugaacu

SEQ ID NO: 3293658 - RNA, 21 nt, Variola virus
gcugagaauaucuuuauucau

SEQ ID NO: 3293659 - RNA, 17 nt, Variola virus
ucaucuugucuagaaug

SEQ ID NO: 3293660 - RNA, 22 nt, Variola virus
acuauauaguuuaaauuaagca

SEQ ID NO: 3293661 - RNA, 21 nt, Variola virus
aaugaugacuugauagaauau

SEQ ID NO: 3293662 - RNA, 21 nt, Variola virus
auaaaggagaaggaaaaugaa

SEQ ID NO: 3293663 - RNA, 22 nt, Variola virus
aaagucuuuacagauuucaucc

SEQ ID NO: 3293664 - RNA, 21 nt, Variola virus
cauaucugcgacggagcauuu

SEQ ID NO: 3293665 - RNA, 19 nt, Variola virus
aauguuugacugaauauau

SEQ ID NO: 3293666 - RNA, 17 nt, Variola virus
uuacaagaauauaaaaa

SEQ ID NO: 3293667 - RNA, 18 nt, Variola virus
aacaucggaaaaaaaucu

SEQ ID NO: 3293668 - RNA, 14 nt, Variola virus
uauaaaguguaugu

SEQ ID NO: 3293669 - RNA, 22 nt, Variola virus
gagagaucauuucuauaauuua

SEQ ID NO: 3293670 - RNA, 14 nt, Variola virus
aauacauguacaaa

SEQ ID NO: 3293671 - RNA, 22 nt, Variola virus
cauauaguuuggauuaauaauu

SEQ ID NO: 3293672 - RNA, 21 nt, Variola virus
auagcugaaacaaagaauugc

SEQ ID NO: 3293673 - RNA, 17 nt, Variola virus
uguuuaccucuacaaau

SEQ ID NO: 3293674 - RNA, 15 nt, Variola virus
ccaucucuauguuuc

SEQ ID NO: 3293675 - RNA, 22 nt, Variola virus
caauugguuaugauaucaugua

SEQ ID NO: 3293676 - RNA, 22 nt, Variola virus
cagauugaauaggaguuugaau

SEQ ID NO: 3293677 - RNA, 15 nt, Variola virus
uaaaaacauuauucu

SEQ ID NO: 3293678 - RNA, 20 nt, Variola virus
acacaguaaccaaaaugaaa

SEQ ID NO: 3293679 - RNA, 22 nt, Variola virus
ucauagaugaaauacucuuuaa

SEQ ID NO: 3293680 - RNA, 22 nt, Variola virus
acaaguuauacgucauuucauc

SEQ ID NO: 3293681 - RNA, 23 nt, Variola virus
agucuaaaaguucuuuauugcac

SEQ ID NO: 3293682 - RNA, 22 nt, Variola virus
cagacaauaagagcagcacaaa

SEQ ID NO: 3293683 - RNA, 20 nt, Variola virus
augcauuauccaaaauauua

SEQ ID NO: 3293684 - RNA, 18 nt, Variola virus
caguggaguaguaaaugc

SEQ ID NO: 3293685 - RNA, 15 nt, Variola virus
aauuacuaaaauaua

SEQ ID NO: 3293686 - RNA, 21 nt, Variola virus
ucaugcauuuguuaguuauuc

SEQ ID NO: 3293687 - RNA, 16 nt, Variola virus
agauuaauuuugaauu

SEQ ID NO: 3293688 - RNA, 19 nt, Variola virus
auuaacaaaaucuuuaauu

SEQ ID NO: 3293689 - RNA, 13 nt, Variola virus
gaugaacagguua

SEQ ID NO: 3293690 - RNA, 18 nt, Variola virus
ugauuucuggugauacgu

SEQ ID NO: 3293691 - RNA, 12 nt, Variola virus
uuucauacauau

SEQ ID NO: 3293692 - RNA, 22 nt, Variola virus
uauuaccaaaaaaaauaacauu

SEQ ID NO: 3293693 - RNA, 19 nt, Variola virus
agauuuuuagcguauuauc

SEQ ID NO: 3293694 - RNA, 20 nt, Variola virus
uguaaaggauauuauauguu

SEQ ID NO: 3293695 - RNA, 22 nt, Variola virus
auaauauccugaacagcauuga

SEQ ID NO: 3293696 - RNA, 13 nt, Variola virus
aauacaagcaucu

SEQ ID NO: 3293697 - RNA, 18 nt, Variola virus
aguaggauauauuaaagu

SEQ ID NO: 3293698 - RNA, 16 nt, Variola virus
aauuacagacaguaau

SEQ ID NO: 3293699 - RNA, 23 nt, Variola virus
cuucagaauauucuuuucuaaga

SEQ ID NO: 3293700 - RNA, 13 nt, Variola virus
acugaaacuauac

SEQ ID NO: 3293701 - RNA, 16 nt, Variola virus
aucuucgucuauuaca

SEQ ID NO: 3293702 - RNA, 22 nt, Variola virus
auccgugguuagcauauaccuc

SEQ ID NO: 3293703 - RNA, 23 nt, Variola virus
acgauauuuguuggauuucugau

SEQ ID NO: 3293704 - RNA, 19 nt, Variola virus
uuaauacaccguuaacaau

SEQ ID NO: 3293705 - RNA, 21 nt, Variola virus
uccauagugguacaauacuac

SEQ ID NO: 3293706 - RNA, 18 nt, Variola virus
gauacaugauuaauacau

SEQ ID NO: 3293707 - RNA, 22 nt, Variola virus
gaaaccagaaugaaaaacucug

SEQ ID NO: 3293708 - RNA, 23 nt, Variola virus
gcuuuuauuuuuggaauaaucuc

SEQ ID NO: 3293709 - RNA, 20 nt, Variola virus
aacauuauaucguuaucauu

SEQ ID NO: 3293710 - RNA, 14 nt, Variola virus
auuaaauuauugau

SEQ ID NO: 3293711 - RNA, 17 nt, Variola virus
agauuuuaguccugugu

SEQ ID NO: 3293712 - RNA, 14 nt, Variola virus
auguaacaauauua

SEQ ID NO: 3293713 - RNA, 19 nt, Variola virus
uaucuacauauuuaccaaa

SEQ ID NO: 3293714 - RNA, 17 nt, Variola virus
aauuaugauagaaauua

SEQ ID NO: 3293715 - RNA, 17 nt, Variola virus
guuaguacuacugaaga

SEQ ID NO: 3293716 - RNA, 23 nt, Variola virus
uggaaauguuauagaaaauuaaa

SEQ ID NO: 3293717 - RNA, 14 nt, Variola virus
caaauguugucaaa

SEQ ID NO: 3293718 - RNA, 14 nt, Variola virus
ucaccaacuacaua

SEQ ID NO: 3293719 - RNA, 14 nt, Variola virus
uguaucaaaugcua

SEQ ID NO: 3293720 - RNA, 23 nt, Variola virus
aauaaccguuagacauaaaauug

SEQ ID NO: 3293721 - RNA, 22 nt, Variola virus
agugcuacaaaacagaaauaug

SEQ ID NO: 3293722 - RNA, 12 nt, Variola virus
uuaucauuauua

SEQ ID NO: 3293723 - RNA, 19 nt, Variola virus
auagcuuucacucauauaa

SEQ ID NO: 3293724 - RNA, 14 nt, Variola virus
aaucaucauaucca

SEQ ID NO: 3293725 - RNA, 16 nt, Variola virus
aauggauaauuuccau

SEQ ID NO: 3293726 - RNA, 13 nt, Variola virus
uaugauauucauu

SEQ ID NO: 3293727 - RNA, 21 nt, Variola virus
uauggucagugcauaauaaag

SEQ ID NO: 3293728 - RNA, 11 nt, Variola virus
aauacagaaug

SEQ ID NO: 3293729 - RNA, 22 nt, Variola virus
uccugacgucuagaguuuauau

SEQ ID NO: 3293730 - RNA, 12 nt, Variola virus
uuucuaaauuca

SEQ ID NO: 3293731 - RNA, 17 nt, Variola virus
auagagcccguaaaugc

SEQ ID NO: 3293732 - RNA, 14 nt, Variola virus
cguaucuucugaaa

SEQ ID NO: 3293733 - RNA, 16 nt, Variola virus
acuauagaugcuauca

SEQ ID NO: 3293734 - RNA, 15 nt, Variola virus
ucauucaagauaagc

SEQ ID NO: 3293735 - RNA, 22 nt, Variola virus
cuaagguagaaucucuauuugu

SEQ ID NO: 3293736 - RNA, 18 nt, Variola virus
acuccggucgaugaugau

SEQ ID NO: 3293737 - RNA, 13 nt, Variola virus
aaucuuuaccaua

SEQ ID NO: 3293738 - RNA, 14 nt, Variola virus
ugaauguuuucaau

SEQ ID NO: 3293739 - RNA, 14 nt, Variola virus
cagcauuaacugau

SEQ ID NO: 3293740 - RNA, 22 nt, Variola virus
guaccagcauuuguaauaaucc

SEQ ID NO: 3293741 - RNA, 15 nt, Variola virus
acuguggauguaaua

SEQ ID NO: 3293742 - RNA, 21 nt, Variola virus
auuaguuuuuuguuacugacu

SEQ ID NO: 3293743 - RNA, 15 nt, Variola virus
auaauauucaugucu

SEQ ID NO: 3293744 - RNA, 23 nt, Variola virus
cuaauguuuccggagauagauuu

SEQ ID NO: 3293745 - RNA, 14 nt, Variola virus
augaacuuguuuaa

SEQ ID NO: 3293746 - RNA, 17 nt, Variola virus
agaauuuagaaauauau

SEQ ID NO: 3293747 - RNA, 19 nt, Variola virus
aaucaguggaguaguaaau

SEQ ID NO: 3293748 - RNA, 18 nt, Variola virus
acaaccgcuuagaaauaa

SEQ ID NO: 3293749 - RNA, 14 nt, Variola virus
ggauauguuuuuaa

SEQ ID NO: 3293750 - RNA, 22 nt, Variola virus
caaaaacacaacaaaugauaau

SEQ ID NO: 3293751 - RNA, 23 nt, Variola virus
agaaaauaucuucuccuguaaua

SEQ ID NO: 3293752 - RNA, 17 nt, Variola virus
gucaucuuauguuuuua

SEQ ID NO: 3293753 - RNA, 22 nt, Variola virus
guggaggaguugcugaugauga

SEQ ID NO: 3293754 - RNA, 20 nt, Variola virus
cauauuaucaccuauugcca

SEQ ID NO: 3293755 - RNA, 15 nt, Variola virus
auauuaaugucguau

SEQ ID NO: 3293756 - RNA, 15 nt, Variola virus
cucauuaaaacuucu

SEQ ID NO: 3293757 - RNA, 19 nt, Variola virus
agauagcggacagcuauau

SEQ ID NO: 3293758 - RNA, 20 nt, Variola virus
aggcacagucaaacauucaa

SEQ ID NO: 3293759 - RNA, 15 nt, Variola virus
aaccuaagacaaauu

SEQ ID NO: 3293760 - RNA, 13 nt, Variola virus
uuaucaaaucuag

SEQ ID NO: 3293761 - RNA, 15 nt, Variola virus
agucaacaucuaaag

SEQ ID NO: 3293762 - RNA, 17 nt, Variola virus
ucauauaguuauguaua

SEQ ID NO: 3293763 - RNA, 12 nt, Variola virus
uucuucuguauc

SEQ ID NO: 3293764 - RNA, 17 nt, Variola virus
cuuauuuuuaaaaauua

SEQ ID NO: 3293765 - RNA, 13 nt, Variola virus
uaugaaaauagca

SEQ ID NO: 3293766 - RNA, 14 nt, Variola virus
aguuaguuuuagau

SEQ ID NO: 3293767 - RNA, 20 nt, Variola virus
uaacuuaaaagaauuacuua

SEQ ID NO: 3293768 - RNA, 16 nt, Variola virus
auagaugccagauuac

SEQ ID NO: 3293769 - RNA, 21 nt, Variola virus
acauaauuuucuauaacugaa

SEQ ID NO: 3293770 - RNA, 15 nt, Variola virus
agguuuaguaucuca

SEQ ID NO: 3293771 - RNA, 23 nt, Variola virus
aucagucuuguauuccaaauuaa

SEQ ID NO: 3293772 - RNA, 12 nt, Variola virus
uacguaaagaag

SEQ ID NO: 3293773 - RNA, 23 nt, Variola virus
aaugccuuacucgguguauauaa

SEQ ID NO: 3293774 - RNA, 17 nt, Variola virus
uagaggacuuggauguu

SEQ ID NO: 3293775 - RNA, 17 nt, Variola virus
cuuugguuuaauuauuu

SEQ ID NO: 3293776 - RNA, 18 nt, Variola virus
agauuauaucauaaauaa

SEQ ID NO: 3293777 - RNA, 21 nt, Variola virus
cgaauuaugucuuuauucucu

SEQ ID NO: 3293778 - RNA, 23 nt, Variola virus
guuuccacauuaaccaaguaaug

SEQ ID NO: 3293779 - RNA, 14 nt, Variola virus
auaucucaaagaug

SEQ ID NO: 3293780 - RNA, 18 nt, Variola virus
ugcguuaagaucuaauau

SEQ ID NO: 3293781 - RNA, 19 nt, Variola virus
auuaaugucguauuugaac

SEQ ID NO: 3293782 - RNA, 16 nt, Variola virus
aacugucaaugaauua

SEQ ID NO: 3293783 - RNA, 19 nt, Variola virus
caggauuuccaaucuuuug

SEQ ID NO: 3293784 - RNA, 22 nt, Variola virus
gaucuaauagaugaauauauca

SEQ ID NO: 3293785 - RNA, 16 nt, Variola virus
aauuucguuagucaua

SEQ ID NO: 3293786 - RNA, 15 nt, Variola virus
cucaugacuucauug

SEQ ID NO: 3293787 - RNA, 20 nt, Variola virus
gaaguuuaauaauacaauau

SEQ ID NO: 3293788 - RNA, 18 nt, Variola virus
agaugccaagauaucuau

SEQ ID NO: 3293789 - RNA, 15 nt, Variola virus
aacgaaguaaaaagu

SEQ ID NO: 3293790 - RNA, 13 nt, Variola virus
acuagaagagaau

SEQ ID NO: 3293791 - RNA, 17 nt, Variola virus
cugccauuuuagagauu

SEQ ID NO: 3293792 - RNA, 15 nt, Variola virus
gaucauacauuauga

SEQ ID NO: 3293793 - RNA, 22 nt, Variola virus
guacacauauggaauauaucua

SEQ ID NO: 3293794 - RNA, 18 nt, Variola virus
caaagauucuguguauaa

SEQ ID NO: 3293795 - RNA, 22 nt, Variola virus
gaagaacguguauuaaauagaa

SEQ ID NO: 3293796 - RNA, 20 nt, Variola virus
cuucagaauauucuuuucua

SEQ ID NO: 3293797 - RNA, 19 nt, Variola virus
ucaaugcggguguuauuca

SEQ ID NO: 3293798 - RNA, 17 nt, Variola virus
ugacauuuauucaucau

SEQ ID NO: 3293799 - RNA, 19 nt, Variola virus
gagcucaucuaagaaauag

SEQ ID NO: 3293800 - RNA, 24 nt, Variola virus
aaugaggaaaucguauaaauacug

SEQ ID NO: 3293801 - RNA, 12 nt, Variola virus
aaaguggauaaa

SEQ ID NO: 3293802 - RNA, 15 nt, Variola virus
agaauacgaugauau

SEQ ID NO: 3293803 - RNA, 18 nt, Variola virus
uguaaaaaauuauacugu

SEQ ID NO: 3293804 - RNA, 13 nt, Variola virus
ccaaauucuggaa

SEQ ID NO: 3293805 - RNA, 24 nt, Variola virus
auauccuuugcauucuauuuacca

SEQ ID NO: 3293806 - RNA, 17 nt, Variola virus
uuagcagaauauauaag

SEQ ID NO: 3293807 - RNA, 18 nt, Variola virus
aauauagaaauaaugaua

SEQ ID NO: 3293808 - RNA, 22 nt, Variola virus
auuuucugacaaaguuagaaaa

SEQ ID NO: 3293809 - RNA, 22 nt, Variola virus
aaugagauuauuaaguauuuau

SEQ ID NO: 3293810 - RNA, 16 nt, Variola virus
acuuugguaaauguua

SEQ ID NO: 3293811 - RNA, 17 nt, Variola virus
uagcucuguuaguuucc

SEQ ID NO: 3293812 - RNA, 21 nt, Variola virus
gaauuaacgaaacaauguuuc

SEQ ID NO: 3293813 - RNA, 21 nt, Variola virus
cuacaauugucuaaugauauc

SEQ ID NO: 3293814 - RNA, 14 nt, Variola virus
cauguuuauuucua

SEQ ID NO: 3293815 - RNA, 16 nt, Variola virus
cuuuauaauuaaugaa

SEQ ID NO: 3293816 - RNA, 22 nt, Variola virus
gaauaucuguaggcuucuuguu

SEQ ID NO: 3293817 - RNA, 14 nt, Variola virus
auucuagucuuaac

SEQ ID NO: 3293818 - RNA, 18 nt, Variola virus
uaaagaacgauuguguaa

SEQ ID NO: 3293819 - RNA, 13 nt, Variola virus
gaugaguauauau

SEQ ID NO: 3293820 - RNA, 18 nt, Variola virus
agggagccacagaaggau

SEQ ID NO: 3293821 - RNA, 21 nt, Variola virus
gcugaaguaaucaauuuuucu

SEQ ID NO: 3293822 - RNA, 18 nt, Variola virus
acuuuccaacuuaucauu

SEQ ID NO: 3293823 - RNA, 23 nt, Variola virus
uuauuagucgccgucucuauaaa

SEQ ID NO: 3293824 - RNA, 12 nt, Variola virus
auuucuauuuuu

SEQ ID NO: 3293825 - RNA, 13 nt, Variola virus
caaaacuauuuca

SEQ ID NO: 3293826 - RNA, 14 nt, Variola virus
aucauaccuccauc

SEQ ID NO: 3293827 - RNA, 13 nt, Variola virus
uccauagauuucc

SEQ ID NO: 3293828 - RNA, 16 nt, Variola virus
gauaagauaaaaucua

SEQ ID NO: 3293829 - RNA, 20 nt, Variola virus
uaguacucgaaauaauauua

SEQ ID NO: 3293830 - RNA, 21 nt, Variola virus
auauuuuucguuuacaaaauc

SEQ ID NO: 3293831 - RNA, 14 nt, Variola virus
aauacaauuaaaaa

SEQ ID NO: 3293832 - RNA, 14 nt, Variola virus
ccaugguaaacucu

SEQ ID NO: 3293833 - RNA, 14 nt, Variola virus
aaaauauaaugaua

SEQ ID NO: 3293834 - RNA, 14 nt, Variola virus
cugcacuaugucca

SEQ ID NO: 3293835 - RNA, 18 nt, Variola virus
acauauggaucuuuaugu

SEQ ID NO: 3293836 - RNA, 15 nt, Variola virus
cuauaaacaugaauu

SEQ ID NO: 3293837 - RNA, 14 nt, Variola virus
uauauuuuuggauu

SEQ ID NO: 3293838 - RNA, 20 nt, Variola virus
auauuauuacacauaaacau

SEQ ID NO: 3293839 - RNA, 18 nt, Variola virus
auaaaaaauuuuauucaa

SEQ ID NO: 3293840 - RNA, 17 nt, Variola virus
cuggagaagacacacuu

SEQ ID NO: 3293841 - RNA, 18 nt, Variola virus
cgaagagacgauagauuu

SEQ ID NO: 3293842 - RNA, 13 nt, Variola virus
aacuacuuuauca

SEQ ID NO: 3293843 - RNA, 15 nt, Variola virus
acuugaagacauucc

SEQ ID NO: 3293844 - RNA, 14 nt, Variola virus
auaacuaaaaaugu

SEQ ID NO: 3293845 - RNA, 18 nt, Variola virus
uaccauuagauaaucuag

SEQ ID NO: 3293846 - RNA, 19 nt, Variola virus
cuacuauggaauuaauuuu

SEQ ID NO: 3293847 - RNA, 17 nt, Variola virus
aggcacauaauaucuuu

SEQ ID NO: 3293848 - RNA, 21 nt, Variola virus
aaaucaaucaaggaacuaaau

SEQ ID NO: 3293849 - RNA, 14 nt, Variola virus
aguaagaacauaau

SEQ ID NO: 3293850 - RNA, 16 nt, Variola virus
cuuaguguaaaacuau

SEQ ID NO: 3293851 - RNA, 14 nt, Variola virus
uccguauuccaaac

SEQ ID NO: 3293852 - RNA, 22 nt, Variola virus
agggacacucaaacuaaauguc

SEQ ID NO: 3293853 - RNA, 12 nt, Variola virus
aagcaaaugaug

SEQ ID NO: 3293854 - RNA, 23 nt, Variola virus
aaaucuuucauuucuuccuggua

SEQ ID NO: 3293855 - RNA, 14 nt, Variola virus
cauuaguaaacaau

SEQ ID NO: 3293856 - RNA, 16 nt, Variola virus
auauccagaauguuuc

SEQ ID NO: 3293857 - RNA, 17 nt, Variola virus
aauucuuuauaacugaa

SEQ ID NO: 3293858 - RNA, 18 nt, Variola virus
uuugagagaucauuucua

SEQ ID NO: 3293859 - RNA, 17 nt, Variola virus
uauaaucgcuucaucau

SEQ ID NO: 3293860 - RNA, 14 nt, Variola virus
aguauuuaacaaga

SEQ ID NO: 3293861 - RNA, 13 nt, Variola virus
uaguggacaacau

SEQ ID NO: 3293862 - RNA, 21 nt, Variola virus
aaaaauugaauugaugauaua

SEQ ID NO: 3293863 - RNA, 21 nt, Variola virus
uaacgauauuuugcaaaauag

SEQ ID NO: 3293864 - RNA, 23 nt, Variola virus
ugguacguaaccgaaucuuccca

SEQ ID NO: 3293865 - RNA, 21 nt, Variola virus
uaaaggauauuauauguugug

SEQ ID NO: 3293866 - RNA, 22 nt, Variola virus
ucuugaggguuguguuaaauug

SEQ ID NO: 3293867 - RNA, 16 nt, Variola virus
uauagguauauuugcg

SEQ ID NO: 3293868 - RNA, 17 nt, Variola virus
ucagacaacaucucaga

SEQ ID NO: 3293869 - RNA, 21 nt, Variola virus
auaauuuugauuguacaccca

SEQ ID NO: 3293870 - RNA, 19 nt, Variola virus
aacaggguuuguugauucg

SEQ ID NO: 3293871 - RNA, 13 nt, Variola virus
uguugaucauaua

SEQ ID NO: 3293872 - RNA, 14 nt, Variola virus
aauugauucuuauu

SEQ ID NO: 3293873 - RNA, 15 nt, Variola virus
auccugaauaguaaa

SEQ ID NO: 3293874 - RNA, 13 nt, Variola virus
aauagguauauaa

SEQ ID NO: 3293875 - RNA, 18 nt, Variola virus
guauaauauuuaaacaau

SEQ ID NO: 3293876 - RNA, 21 nt, Variola virus
aguaacuauguaaaugauaac

SEQ ID NO: 3293877 - RNA, 14 nt, Variola virus
uuuggcauuucuaa

SEQ ID NO: 3293878 - RNA, 20 nt, Variola virus
aagugaguauacuugucauc

SEQ ID NO: 3293879 - RNA, 22 nt, Variola virus
aaugcgacgaguuagaaagaua

SEQ ID NO: 3293880 - RNA, 21 nt, Variola virus
auguagaaugugauaauuucc

SEQ ID NO: 3293881 - RNA, 17 nt, Variola virus
aaagaacggagaauugu

SEQ ID NO: 3293882 - RNA, 14 nt, Variola virus
agaauuaaauggau

SEQ ID NO: 3293883 - RNA, 19 nt, Variola virus
gaacuuuaaacagaaauau

SEQ ID NO: 3293884 - RNA, 14 nt, Variola virus
acacaaaaagaaag

SEQ ID NO: 3293885 - RNA, 17 nt, Variola virus
cuauuuuaccagcauua

SEQ ID NO: 3293886 - RNA, 12 nt, Variola virus
acgaugaaaaug

SEQ ID NO: 3293887 - RNA, 19 nt, Variola virus
aguuaaaacuuguaagaag

SEQ ID NO: 3293888 - RNA, 17 nt, Variola virus
uuaucgauucaucuaau

SEQ ID NO: 3293889 - RNA, 13 nt, Variola virus
ucaguuacaaaac

SEQ ID NO: 3293890 - RNA, 13 nt, Variola virus
auauauaaugaau

SEQ ID NO: 3293891 - RNA, 23 nt, Variola virus
uauaaaaaugcuaaaugugaugu

SEQ ID NO: 3293892 - RNA, 19 nt, Variola virus
acaaaaucaacuacauaau

SEQ ID NO: 3293893 - RNA, 23 nt, Variola virus
aaaucggauggauugguaacauu

SEQ ID NO: 3293894 - RNA, 20 nt, Variola virus
guggcuuuccauuuuccaaa

SEQ ID NO: 3293895 - RNA, 19 nt, Variola virus
ucaauuuugaaaauacuua

SEQ ID NO: 3293896 - RNA, 17 nt, Variola virus
caacuuaacaaaucuua

SEQ ID NO: 3293897 - RNA, 22 nt, Variola virus
aguagagauucggguacuguau

SEQ ID NO: 3293898 - RNA, 18 nt, Variola virus
cauaagcgcuauauaaau

SEQ ID NO: 3293899 - RNA, 19 nt, Variola virus
aucacucucauaauguaaa

SEQ ID NO: 3293900 - RNA, 20 nt, Variola virus
aucuucucuccgguuaauaa

SEQ ID NO: 3293901 - RNA, 20 nt, Variola virus
auaacaauaguuagauacaa

SEQ ID NO: 3293902 - RNA, 15 nt, Variola virus
aaaaccuaugauauc

SEQ ID NO: 3293903 - RNA, 15 nt, Variola virus
aaugcuaauauuaaa

SEQ ID NO: 3293904 - RNA, 13 nt, Variola virus
auuacguauuaua

SEQ ID NO: 3293905 - RNA, 14 nt, Variola virus
auacaaaaguuaau

SEQ ID NO: 3293906 - RNA, 19 nt, Variola virus
aggauguauauaucaugau

SEQ ID NO: 3293907 - RNA, 23 nt, Variola virus
caaugaauuauggaauuguauau

SEQ ID NO: 3293908 - RNA, 23 nt, Variola virus
aacaucauacaucaauuaacauu

SEQ ID NO: 3293909 - RNA, 19 nt, Variola virus
ucguuuaacgaucauauua

SEQ ID NO: 3293910 - RNA, 19 nt, Variola virus
uaauaauuuguauauacau

SEQ ID NO: 3293911 - RNA, 14 nt, Variola virus
auguuuuacucugg

SEQ ID NO: 3293912 - RNA, 23 nt, Variola virus
auucucuuacaaauauucacaag

SEQ ID NO: 3293913 - RNA, 22 nt, Variola virus
caauuauacguuuuuauauaau

SEQ ID NO: 3293914 - RNA, 23 nt, Variola virus
gcaaacaauguauacaaauguac

SEQ ID NO: 3293915 - RNA, 18 nt, Variola virus
cacauuuuaaauaaaugu

SEQ ID NO: 3293916 - RNA, 12 nt, Variola virus
auuauuagaaau

SEQ ID NO: 3293917 - RNA, 22 nt, Variola virus
uauuaucaaagucacaaagcaa

SEQ ID NO: 3293918 - RNA, 15 nt, Variola virus
uuuagcaauuucuga

SEQ ID NO: 3293919 - RNA, 14 nt, Variola virus
auagaggaugaauu

SEQ ID NO: 3293920 - RNA, 23 nt, Variola virus
aauuguguccgaaacuuagaaga

SEQ ID NO: 3293921 - RNA, 15 nt, Variola virus
uaucaagacauaugc

SEQ ID NO: 3293922 - RNA, 23 nt, Variola virus
uuauccacggauaccucauuuau

SEQ ID NO: 3293923 - RNA, 14 nt, Variola virus
auaagaacaaagua

SEQ ID NO: 3293924 - RNA, 23 nt, Variola virus
cugaauacuaucgauugaugagu

SEQ ID NO: 3293925 - RNA, 13 nt, Variola virus
uaccaaauauuag

SEQ ID NO: 3293926 - RNA, 14 nt, Variola virus
aauaaucuucauua

SEQ ID NO: 3293927 - RNA, 14 nt, Variola virus
acaacauuaauaca

SEQ ID NO: 3293928 - RNA, 12 nt, Variola virus
ccaauaguucuc

SEQ ID NO: 3293929 - RNA, 14 nt, Variola virus
uucagaauauucuu

SEQ ID NO: 3293930 - RNA, 21 nt, Variola virus
guuaaauaaauccuucaucac

SEQ ID NO: 3293931 - RNA, 15 nt, Variola virus
uauauaucuauuaca

SEQ ID NO: 3293932 - RNA, 15 nt, Variola virus
uuacacuaacuguau

SEQ ID NO: 3293933 - RNA, 21 nt, Variola virus
caauuuuacccucaaucaugu

SEQ ID NO: 3293934 - RNA, 15 nt, Variola virus
uaucaucuacgauau

SEQ ID NO: 3293935 - RNA, 13 nt, Variola virus
ucuagcauuucua

SEQ ID NO: 3293936 - RNA, 14 nt, Variola virus
accuguauacugua

SEQ ID NO: 3293937 - RNA, 18 nt, Variola virus
uuuaaaucccaauucaga

SEQ ID NO: 3293938 - RNA, 13 nt, Variola virus
uuaagugaugcau

SEQ ID NO: 3293939 - RNA, 16 nt, Variola virus
aaugaucuaaauuaua

SEQ ID NO: 3293940 - RNA, 13 nt, Variola virus
aguaaucaacaau

SEQ ID NO: 3293941 - RNA, 21 nt, Variola virus
ucagaaacgacaucaugaaca

SEQ ID NO: 3293942 - RNA, 21 nt, Variola virus
aaaaauuauacuguaacacaa

SEQ ID NO: 3293943 - RNA, 17 nt, Variola virus
aaaauucuaagguagaa

SEQ ID NO: 3293944 - RNA, 12 nt, Variola virus
gucaauacugua

SEQ ID NO: 3293945 - RNA, 16 nt, Variola virus
aguaacuauguaaaug

SEQ ID NO: 3293946 - RNA, 18 nt, Variola virus
uaacaauuuauuuuguau

SEQ ID NO: 3293947 - RNA, 16 nt, Variola virus
ccuuugcaaauacagc

SEQ ID NO: 3293948 - RNA, 16 nt, Variola virus
auauuccucuacacca

SEQ ID NO: 3293949 - RNA, 20 nt, Variola virus
auuaucaaaauuuggaaacu

SEQ ID NO: 3293950 - RNA, 17 nt, Variola virus
acgcccuuguauguuuu

SEQ ID NO: 3293951 - RNA, 21 nt, Variola virus
uguaaauguaacguauuuaga

SEQ ID NO: 3293952 - RNA, 19 nt, Variola virus
aggucauauggaagauguu

SEQ ID NO: 3293953 - RNA, 23 nt, Variola virus
gcaacggggaugaugauaaugau

SEQ ID NO: 3293954 - RNA, 13 nt, Variola virus
acuaaauacauua

SEQ ID NO: 3293955 - RNA, 21 nt, Variola virus
ucaaauccaugaauaaaguau

SEQ ID NO: 3293956 - RNA, 13 nt, Variola virus
uauggaaaacuaa

SEQ ID NO: 3293957 - RNA, 17 nt, Variola virus
auaucaucaaaauacug

SEQ ID NO: 3293958 - RNA, 20 nt, Variola virus
gcauuagaugaaaaauggaa

SEQ ID NO: 3293959 - RNA, 19 nt, Variola virus
gacuacaaagaauguucua

SEQ ID NO: 3293960 - RNA, 23 nt, Variola virus
aauaauucauggaaauuuaacag

SEQ ID NO: 3293961 - RNA, 15 nt, Variola virus
gaaagucagaaucua

SEQ ID NO: 3293962 - RNA, 19 nt, Variola virus
ucuuggauaaaagcaucca

SEQ ID NO: 3293963 - RNA, 16 nt, Variola virus
uguucuuaaucaaugu

SEQ ID NO: 3293964 - RNA, 14 nt, Variola virus
auugaaaauuauuu

SEQ ID NO: 3293965 - RNA, 12 nt, Variola virus
ccggaacaaaaa

SEQ ID NO: 3293966 - RNA, 23 nt, Variola virus
uaacuuuaguaaaguugucuaua

SEQ ID NO: 3293967 - RNA, 18 nt, Variola virus
uagcaaaacuauuucaga

SEQ ID NO: 3293968 - RNA, 19 nt, Variola virus
caguuuggggcuauucauc

SEQ ID NO: 3293969 - RNA, 17 nt, Variola virus
gauucauugacauaugu

SEQ ID NO: 3293970 - RNA, 14 nt, Variola virus
aaucagaguuuuua

SEQ ID NO: 3293971 - RNA, 22 nt, Variola virus
acaccuguuucauggaacaaua

SEQ ID NO: 3293972 - RNA, 20 nt, Variola virus
auaaaaauguuuuuguuuaa

SEQ ID NO: 3293973 - RNA, 17 nt, Variola virus
ucaaagucacaaagcaa

SEQ ID NO: 3293974 - RNA, 19 nt, Variola virus
uaauggucgaaacacguca

SEQ ID NO: 3293975 - RNA, 23 nt, Variola virus
aacuucuaaaacagcugugaaua

SEQ ID NO: 3293976 - RNA, 23 nt, Variola virus
uuaacuacgguauucauaaaaua

SEQ ID NO: 3293977 - RNA, 22 nt, Variola virus
uuagcuccguauuccaaacuag

SEQ ID NO: 3293978 - RNA, 18 nt, Variola virus
uucagcauuacuugauau

SEQ ID NO: 3293979 - RNA, 13 nt, Variola virus
aggaaucuaucca

SEQ ID NO: 3293980 - RNA, 15 nt, Variola virus
auaaauaucauauau

SEQ ID NO: 3293981 - RNA, 12 nt, Variola virus
auauauguuuau

SEQ ID NO: 3293982 - RNA, 21 nt, Variola virus
uugcaauauagaccauacuuc

SEQ ID NO: 3293983 - RNA, 18 nt, Variola virus
gucucuggauuauuuuua

SEQ ID NO: 3293984 - RNA, 13 nt, Variola virus
uacacuauuauau

SEQ ID NO: 3293985 - RNA, 20 nt, Variola virus
agucaauggagaaauacuua

SEQ ID NO: 3293986 - RNA, 22 nt, Variola virus
agacguaucuccauaaagaaau

SEQ ID NO: 3293987 - RNA, 18 nt, Variola virus
gucuaguaaguagaaauu

SEQ ID NO: 3293988 - RNA, 19 nt, Variola virus
acguuuuucgaaaaaauua

SEQ ID NO: 3293989 - RNA, 14 nt, Variola virus
uauauauuaucaua

SEQ ID NO: 3293990 - RNA, 13 nt, Variola virus
aucauaucuguaa

SEQ ID NO: 3293991 - RNA, 13 nt, Variola virus
uauguugauuuau

SEQ ID NO: 3293992 - RNA, 18 nt, Variola virus
auuaguuuauauuacuga

SEQ ID NO: 3293993 - RNA, 17 nt, Variola virus
uauuacuuuucaaugcu

SEQ ID NO: 3293994 - RNA, 13 nt, Variola virus
guaugauauguau

SEQ ID NO: 3293995 - RNA, 22 nt, Variola virus
gaauauauguauguaaaaauau

SEQ ID NO: 3293996 - RNA, 17 nt, Variola virus
acuaaugacaauaauua

SEQ ID NO: 3293997 - RNA, 15 nt, Variola virus
caagauauauauacu

SEQ ID NO: 3293998 - RNA, 18 nt, Variola virus
uacugggauaagauuucu

SEQ ID NO: 3293999 - RNA, 22 nt, Variola virus
ugcauucuccguuaguguuuga

SEQ ID NO: 3294000 - RNA, 14 nt, Variola virus
uugacguaaaugug

SEQ ID NO: 3294001 - RNA, 22 nt, Variola virus
auaauaccuaucuauaagauua

SEQ ID NO: 3294002 - RNA, 22 nt, Variola virus
caagaacucuugaagaugauuu

SEQ ID NO: 3294003 - RNA, 19 nt, Variola virus
auaacauguuaauuuccga

SEQ ID NO: 3294004 - RNA, 20 nt, Variola virus
ucaaauaauaaacuaaacaa

SEQ ID NO: 3294005 - RNA, 16 nt, Variola virus
aucguuaaauuuuaca

SEQ ID NO: 3294006 - RNA, 17 nt, Variola virus
agaauuuuuuaaaaagu

SEQ ID NO: 3294007 - RNA, 17 nt, Variola virus
aguacaucaucuagaga

SEQ ID NO: 3294008 - RNA, 19 nt, Variola virus
cauguacauauuuguacau

SEQ ID NO: 3294009 - RNA, 17 nt, Variola virus
aacacugauucagaaau

SEQ ID NO: 3294010 - RNA, 21 nt, Variola virus
aucaacguagaaaaaauagaa

SEQ ID NO: 3294011 - RNA, 17 nt, Variola virus
uggauacaauaaauguu

SEQ ID NO: 3294012 - RNA, 19 nt, Variola virus
cauucuaauauauguauuu

SEQ ID NO: 3294013 - RNA, 16 nt, Variola virus
ugacuccauagagaua

SEQ ID NO: 3294014 - RNA, 18 nt, Variola virus
uaauggagauuuucuauu

SEQ ID NO: 3294015 - RNA, 15 nt, Variola virus
uuuuagaauuuccaa

SEQ ID NO: 3294016 - RNA, 22 nt, Variola virus
gcgucuaguagauaugcuuuua

SEQ ID NO: 3294017 - RNA, 15 nt, Variola virus
auucuaucucuaaga

SEQ ID NO: 3294018 - RNA, 16 nt, Variola virus
ccaagauagaaacuau

SEQ ID NO: 3294019 - RNA, 17 nt, Variola virus
gcugguucaaaauuaau

SEQ ID NO: 3294020 - RNA, 14 nt, Variola virus
ccauacuaacugau

SEQ ID NO: 3294021 - RNA, 18 nt, Variola virus
cacuaacgcgcaugauuu

SEQ ID NO: 3294022 - RNA, 16 nt, Variola virus
aaauaaaauacauuua

SEQ ID NO: 3294023 - RNA, 20 nt, Variola virus
cauuauuuauuuaugauaua

SEQ ID NO: 3294024 - RNA, 19 nt, Variola virus
agucauaucuagaaugaag

SEQ ID NO: 3294025 - RNA, 18 nt, Variola virus
uuauaucacaacaucuau

SEQ ID NO: 3294026 - RNA, 13 nt, Variola virus
uacucuucuaaau

SEQ ID NO: 3294027 - RNA, 21 nt, Variola virus
ucaugaugauuugguuguauu

SEQ ID NO: 3294028 - RNA, 15 nt, Variola virus
cucuuccaguuccaa

SEQ ID NO: 3294029 - RNA, 19 nt, Variola virus
aauacuuauuaauggcucu

SEQ ID NO: 3294030 - RNA, 12 nt, Variola virus
auacauauuuua

SEQ ID NO: 3294031 - RNA, 14 nt, Variola virus
cucuaaaugaugau

SEQ ID NO: 3294032 - RNA, 13 nt, Variola virus
ugcauguuuucau

SEQ ID NO: 3294033 - RNA, 16 nt, Variola virus
uccgugagaaauacgu

SEQ ID NO: 3294034 - RNA, 21 nt, Variola virus
auauuuguuccuguagauaau

SEQ ID NO: 3294035 - RNA, 16 nt, Variola virus
guucaaaaauaaacga

SEQ ID NO: 3294036 - RNA, 19 nt, Variola virus
acccgcauacuuuaacaaa

SEQ ID NO: 3294037 - RNA, 16 nt, Variola virus
uacuucucccauaaua

SEQ ID NO: 3294038 - RNA, 15 nt, Variola virus
gcaucgauugcaugg

SEQ ID NO: 3294039 - RNA, 18 nt, Variola virus
agauaucagagaacuucu

SEQ ID NO: 3294040 - RNA, 17 nt, Variola virus
cgacucauaagaaagag

SEQ ID NO: 3294041 - RNA, 13 nt, Variola virus
cgauuuaugugac

SEQ ID NO: 3294042 - RNA, 21 nt, Variola virus
gcuuuucuauaaucauuuuua

SEQ ID NO: 3294043 - RNA, 12 nt, Variola virus
agaccaaaaauu

SEQ ID NO: 3294044 - RNA, 13 nt, Variola virus
caaagauauggaa

SEQ ID NO: 3294045 - RNA, 16 nt, Variola virus
aauucauucucuagaa

SEQ ID NO: 3294046 - RNA, 18 nt, Variola virus
uguauagaaauuuuggua

SEQ ID NO: 3294047 - RNA, 14 nt, Variola virus
uaauauucauuaag

SEQ ID NO: 3294048 - RNA, 22 nt, Variola virus
aucuuaccauguccucaaauaa

SEQ ID NO: 3294049 - RNA, 14 nt, Variola virus
cuuaacuauuuccg

SEQ ID NO: 3294050 - RNA, 16 nt, Variola virus
uuauacuaauaugaca

SEQ ID NO: 3294051 - RNA, 13 nt, Variola virus
cacacucuacaau

SEQ ID NO: 3294052 - RNA, 16 nt, Variola virus
gaaaucaacauaaugu

SEQ ID NO: 3294053 - RNA, 16 nt, Variola virus
uaagaaaaauagagag

SEQ ID NO: 3294054 - RNA, 18 nt, Variola virus
aacuaaaaauuaaacaau

SEQ ID NO: 3294055 - RNA, 14 nt, Variola virus
acaauuuuguauua

SEQ ID NO: 3294056 - RNA, 15 nt, Variola virus
uauuuuauuucaaaa

SEQ ID NO: 3294057 - RNA, 11 nt, Variola virus
caaacauaaua

SEQ ID NO: 3294058 - RNA, 14 nt, Variola virus
auaaucauaaauua

SEQ ID NO: 3294059 - RNA, 12 nt, Variola virus
uuuuucagauuu

SEQ ID NO: 3294060 - RNA, 23 nt, Variola virus
acacuguucacauccuuccaaga

SEQ ID NO: 3294061 - RNA, 13 nt, Variola virus
ugacgcuguaaaa

SEQ ID NO: 3294062 - RNA, 13 nt, Variola virus
acuguuuaauagc

SEQ ID NO: 3294063 - RNA, 17 nt, Variola virus
agcauuaauaauuguuu

SEQ ID NO: 3294064 - RNA, 15 nt, Variola virus
gaugaguuagauauu

SEQ ID NO: 3294065 - RNA, 19 nt, Variola virus
ucuauguuaauauguauau

SEQ ID NO: 3294066 - RNA, 15 nt, Variola virus
ccaaguuaaauuuua

SEQ ID NO: 3294067 - RNA, 16 nt, Variola virus
cauaacagauaguuua

SEQ ID NO: 3294068 - RNA, 17 nt, Variola virus
aauauauugaucauaau

SEQ ID NO: 3294069 - RNA, 16 nt, Variola virus
aaugagcguuuaaagu

SEQ ID NO: 3294070 - RNA, 14 nt, Variola virus
ugguauaucaacau

SEQ ID NO: 3294071 - RNA, 17 nt, Variola virus
auucucuauuaaauacc

SEQ ID NO: 3294072 - RNA, 14 nt, Variola virus
caucaaauggaugc

SEQ ID NO: 3294073 - RNA, 19 nt, Variola virus
agcauguauuuuuuucuaa

SEQ ID NO: 3294074 - RNA, 21 nt, Variola virus
uggauuauaaauaucgauguu

SEQ ID NO: 3294075 - RNA, 20 nt, Variola virus
ugaugaaagauaaacuagau

SEQ ID NO: 3294076 - RNA, 23 nt, Variola virus
uuccuagauauuuaaaauaaucc

SEQ ID NO: 3294077 - RNA, 16 nt, Variola virus
uauguguugaacauca

SEQ ID NO: 3294078 - RNA, 16 nt, Variola virus
aaaauaauaucguucu

SEQ ID NO: 3294079 - RNA, 16 nt, Variola virus
aaaguuaaucauauag

SEQ ID NO: 3294080 - RNA, 15 nt, Variola virus
uuauaauauucaugu

SEQ ID NO: 3294081 - RNA, 16 nt, Variola virus
augauuucagauacua

SEQ ID NO: 3294082 - RNA, 20 nt, Variola virus
aagauaucuacuagaaagau

SEQ ID NO: 3294083 - RNA, 16 nt, Variola virus
aaacuccaacgagaua

SEQ ID NO: 3294084 - RNA, 14 nt, Variola virus
ucguauaaaguuau

SEQ ID NO: 3294085 - RNA, 19 nt, Variola virus
caugauggucauguuuauu

SEQ ID NO: 3294086 - RNA, 20 nt, Variola virus
uagaaauuuaucaauaucca

SEQ ID NO: 3294087 - RNA, 21 nt, Variola virus
ucacgauaccggaaaaugcga

SEQ ID NO: 3294088 - RNA, 19 nt, Variola virus
uuagauuaguuaauacagg

SEQ ID NO: 3294089 - RNA, 20 nt, Variola virus
guuuauuguauuuaugaccu

SEQ ID NO: 3294090 - RNA, 23 nt, Variola virus
aacucuaaucaaaaucuuaauau

SEQ ID NO: 3294091 - RNA, 23 nt, Variola virus
ucauguuaaaaaaucuugauaga

SEQ ID NO: 3294092 - RNA, 19 nt, Variola virus
agguacucaucuacucuac

SEQ ID NO: 3294093 - RNA, 21 nt, Variola virus
cagaaucgcaacgcuaaaaga

SEQ ID NO: 3294094 - RNA, 16 nt, Variola virus
aguuaucaaaauaugu

SEQ ID NO: 3294095 - RNA, 22 nt, Variola virus
auaagaguguaguaucauagau

SEQ ID NO: 3294096 - RNA, 23 nt, Variola virus
uuauacgaauaucguucucuaaa

SEQ ID NO: 3294097 - RNA, 15 nt, Variola virus
aaauaauuuaacaau

SEQ ID NO: 3294098 - RNA, 15 nt, Variola virus
agauaucaaaauauu

SEQ ID NO: 3294099 - RNA, 23 nt, Variola virus
uaauguagaaaaucauacagaca

SEQ ID NO: 3294100 - RNA, 15 nt, Variola virus
auuaccaucauauau

SEQ ID NO: 3294101 - RNA, 14 nt, Variola virus
aauuuaaagaaugu

SEQ ID NO: 3294102 - RNA, 17 nt, Variola virus
uagaucauuugaaauua

SEQ ID NO: 3294103 - RNA, 19 nt, Variola virus
uauuaaaaaaaaauacuuu

SEQ ID NO: 3294104 - RNA, 11 nt, Variola virus
auauagacaaa

SEQ ID NO: 3294105 - RNA, 21 nt, Variola virus
uauuaacgguaauacauuuau

SEQ ID NO: 3294106 - RNA, 11 nt, Variola virus
cauuuaauagg

SEQ ID NO: 3294107 - RNA, 14 nt, Variola virus
aauaaucucaauua

SEQ ID NO: 3294108 - RNA, 15 nt, Variola virus
ucguucaacugucuu

SEQ ID NO: 3294109 - RNA, 23 nt, Variola virus
gacguugccaaaaaauccuguaa

SEQ ID NO: 3294110 - RNA, 15 nt, Variola virus
auaaaucaaauacuu

SEQ ID NO: 3294111 - RNA, 22 nt, Variola virus
ucagcugcuuuagaugauuuug

SEQ ID NO: 3294112 - RNA, 16 nt, Variola virus
auuuaaaaaguauuua

SEQ ID NO: 3294113 - RNA, 20 nt, Variola virus
gaaauaauauaaaugauuau

SEQ ID NO: 3294114 - RNA, 16 nt, Variola virus
uaaauaaauccaaauu

SEQ ID NO: 3294115 - RNA, 15 nt, Variola virus
aauacuuaaaaugua

SEQ ID NO: 3294116 - RNA, 14 nt, Variola virus
cgaacuuuaaacag

SEQ ID NO: 3294117 - RNA, 19 nt, Variola virus
caaaggauguuuaacauuc

SEQ ID NO: 3294118 - RNA, 18 nt, Variola virus
uccaucagaauguuuccc

SEQ ID NO: 3294119 - RNA, 23 nt, Variola virus
auaucugcgacggagcauuuucu

SEQ ID NO: 3294120 - RNA, 14 nt, Variola virus
ugucaaaaauugua

SEQ ID NO: 3294121 - RNA, 18 nt, Variola virus
aagucugcuaucagugau

SEQ ID NO: 3294122 - RNA, 17 nt, Variola virus
aguuaauauuauugggu

SEQ ID NO: 3294123 - RNA, 15 nt, Variola virus
uauauuaauacacau

SEQ ID NO: 3294124 - RNA, 19 nt, Variola virus
aauaucccacauugucauc

SEQ ID NO: 3294125 - RNA, 21 nt, Variola virus
ugaauccaucucuauguuuca

SEQ ID NO: 3294126 - RNA, 19 nt, Variola virus
aucacuaucuucaucauau

SEQ ID NO: 3294127 - RNA, 15 nt, Variola virus
acaaugcuuuaauaa

SEQ ID NO: 3294128 - RNA, 19 nt, Variola virus
gggaaaaagcucaauauug

SEQ ID NO: 3294129 - RNA, 19 nt, Variola virus
auuaacaucuugaaccauu

SEQ ID NO: 3294130 - RNA, 18 nt, Variola virus
uucucaucuaucaucucc

SEQ ID NO: 3294131 - RNA, 18 nt, Variola virus
uaaaaacauuuuauuucu

SEQ ID NO: 3294132 - RNA, 19 nt, Variola virus
aucagagagauagaagaac

SEQ ID NO: 3294133 - RNA, 21 nt, Variola virus
ccaagagaugcaauacaaaag

SEQ ID NO: 3294134 - RNA, 21 nt, Variola virus
aacuagaucauccaacaaucu

SEQ ID NO: 3294135 - RNA, 23 nt, Variola virus
uaaauccucuauuuauugacauu

SEQ ID NO: 3294136 - RNA, 13 nt, Variola virus
auaauuuaacaau

SEQ ID NO: 3294137 - RNA, 20 nt, Variola virus
aucugaaauaacauauagau

SEQ ID NO: 3294138 - RNA, 12 nt, Variola virus
aggauucuuaau

SEQ ID NO: 3294139 - RNA, 21 nt, Variola virus
ucuaugaauauaauagaugua

SEQ ID NO: 3294140 - RNA, 16 nt, Variola virus
agauaaaaaauuauau

SEQ ID NO: 3294141 - RNA, 18 nt, Variola virus
caugauacuaaguauaau

SEQ ID NO: 3294142 - RNA, 20 nt, Variola virus
auuccacgaacuucuaauug

SEQ ID NO: 3294143 - RNA, 21 nt, Variola virus
uaauaacaugcgguucaaaau

SEQ ID NO: 3294144 - RNA, 19 nt, Variola virus
gugccaaaaugauauacag

SEQ ID NO: 3294145 - RNA, 21 nt, Variola virus
agcaagacuaacacacaaugu

SEQ ID NO: 3294146 - RNA, 22 nt, Variola virus
aauuauacuuugguaaauguua

SEQ ID NO: 3294147 - RNA, 13 nt, Variola virus
cuauuuucaguaa

SEQ ID NO: 3294148 - RNA, 17 nt, Variola virus
caacaaauucugcaaua

SEQ ID NO: 3294149 - RNA, 20 nt, Variola virus
uaccacguaaaacuuaaaau

SEQ ID NO: 3294150 - RNA, 17 nt, Variola virus
uuaaccaacugauuaau

SEQ ID NO: 3294151 - RNA, 13 nt, Variola virus
ucugacauucaga

SEQ ID NO: 3294152 - RNA, 22 nt, Variola virus
ugaucagggcuaacaauaauag

SEQ ID NO: 3294153 - RNA, 17 nt, Variola virus
ugauaguaauucucgga

SEQ ID NO: 3294154 - RNA, 19 nt, Variola virus
aauucccaaucuuguuaua

SEQ ID NO: 3294155 - RNA, 16 nt, Variola virus
uaaaaauguuaauuua

SEQ ID NO: 3294156 - RNA, 22 nt, Variola virus
auuaggcacagucaaacauuca

SEQ ID NO: 3294157 - RNA, 16 nt, Variola virus
agaucugagaauggau

SEQ ID NO: 3294158 - RNA, 14 nt, Variola virus
ugaugaauuuacca

SEQ ID NO: 3294159 - RNA, 23 nt, Variola virus
auguacgauccaaacaauguuuc

SEQ ID NO: 3294160 - RNA, 16 nt, Variola virus
auuuguaucuuaguau

SEQ ID NO: 3294161 - RNA, 19 nt, Variola virus
auauccucguucuaauugu

SEQ ID NO: 3294162 - RNA, 17 nt, Variola virus
ugauugcagauuugcca

SEQ ID NO: 3294163 - RNA, 17 nt, Variola virus
cacaaugauaacaucca

SEQ ID NO: 3294164 - RNA, 22 nt, Variola virus
gaauguuuauuggcguuggaaa

SEQ ID NO: 3294165 - RNA, 18 nt, Variola virus
uccacugucacuggaaag

SEQ ID NO: 3294166 - RNA, 12 nt, Variola virus
ugacuguauuug

SEQ ID NO: 3294167 - RNA, 13 nt, Variola virus
aauaucucaauga

SEQ ID NO: 3294168 - RNA, 15 nt, Variola virus
uguccuucacaucau

SEQ ID NO: 3294169 - RNA, 19 nt, Variola virus
uaaauccuuaauauauuca

SEQ ID NO: 3294170 - RNA, 14 nt, Variola virus
ugccagauacauac

SEQ ID NO: 3294171 - RNA, 15 nt, Variola virus
caguacuuauacaau

SEQ ID NO: 3294172 - RNA, 22 nt, Variola virus
aucugauguaggacaucaauau

SEQ ID NO: 3294173 - RNA, 13 nt, Variola virus
guauacauaauau

SEQ ID NO: 3294174 - RNA, 12 nt, Variola virus
uaauauugugaa

SEQ ID NO: 3294175 - RNA, 13 nt, Variola virus
augcauaaacgaa

SEQ ID NO: 3294176 - RNA, 15 nt, Variola virus
acguagaaaauggau

SEQ ID NO: 3294177 - RNA, 14 nt, Variola virus
guaaaugaugaaau

SEQ ID NO: 3294178 - RNA, 14 nt, Variola virus
aucccauuguaaag

SEQ ID NO: 3294179 - RNA, 15 nt, Variola virus
uauaaauauccuuaa

SEQ ID NO: 3294180 - RNA, 20 nt, Variola virus
agcaaugaucuaaauuauau

SEQ ID NO: 3294181 - RNA, 16 nt, Variola virus
aucaaauuauugauac

SEQ ID NO: 3294182 - RNA, 16 nt, Variola virus
gaaaauuuaggacuua

SEQ ID NO: 3294183 - RNA, 22 nt, Variola virus
uccguguaauccauaauccagu

SEQ ID NO: 3294184 - RNA, 14 nt, Variola virus
acuuauaaaaauac

SEQ ID NO: 3294185 - RNA, 19 nt, Variola virus
uaaucucuucuuuaacagu

SEQ ID NO: 3294186 - RNA, 14 nt, Variola virus
cgcgaacaucuuuc

SEQ ID NO: 3294187 - RNA, 22 nt, Variola virus
uuaaacuguuuguauaauaucu

SEQ ID NO: 3294188 - RNA, 18 nt, Variola virus
uauaauuucaucuacaau

SEQ ID NO: 3294189 - RNA, 15 nt, Variola virus
uaauagaaaaugaau

SEQ ID NO: 3294190 - RNA, 20 nt, Variola virus
caaauagcuacaguaaaaau

SEQ ID NO: 3294191 - RNA, 18 nt, Variola virus
ccaucuugaauauuuuua

SEQ ID NO: 3294192 - RNA, 17 nt, Variola virus
uaguacuacugaagaac

SEQ ID NO: 3294193 - RNA, 12 nt, Variola virus
gcauaaaaaugc

SEQ ID NO: 3294194 - RNA, 19 nt, Variola virus
agacggauaagaaauauau

SEQ ID NO: 3294195 - RNA, 13 nt, Variola virus
auaguagaaucua

SEQ ID NO: 3294196 - RNA, 18 nt, Variola virus
uaaaggauauuauauguu

SEQ ID NO: 3294197 - RNA, 14 nt, Variola virus
auuuugacaaagau

SEQ ID NO: 3294198 - RNA, 22 nt, Variola virus
gaacuauaaaaaaaauaauaau

SEQ ID NO: 3294199 - RNA, 22 nt, Variola virus
auaaacguucacguaaauacaa

SEQ ID NO: 3294200 - RNA, 22 nt, Variola virus
gauggauauauuaaagucaaau

SEQ ID NO: 3294201 - RNA, 12 nt, Variola virus
guacuuggaaag

SEQ ID NO: 3294202 - RNA, 19 nt, Variola virus
ucugguugaagaaauccaa

SEQ ID NO: 3294203 - RNA, 16 nt, Variola virus
ucagauauaaaaaucu

SEQ ID NO: 3294204 - RNA, 15 nt, Variola virus
auaaugauagaauua

SEQ ID NO: 3294205 - RNA, 16 nt, Variola virus
uacagaacgaauuaug

SEQ ID NO: 3294206 - RNA, 20 nt, Variola virus
acaauuuauuucuaaaucua

SEQ ID NO: 3294207 - RNA, 22 nt, Variola virus
aaaauucauuagaauauauguc

SEQ ID NO: 3294208 - RNA, 14 nt, Variola virus
auacgcguucucaa

SEQ ID NO: 3294209 - RNA, 13 nt, Variola virus
uacuuauguaugu

SEQ ID NO: 3294210 - RNA, 22 nt, Variola virus
agauacaauggaugauaugaag

SEQ ID NO: 3294211 - RNA, 22 nt, Variola virus
uuaaagauggaguauaaucuuu

SEQ ID NO: 3294212 - RNA, 15 nt, Variola virus
ucuaucgacuucaga

SEQ ID NO: 3294213 - RNA, 13 nt, Variola virus
auuuggaaaagaa

SEQ ID NO: 3294214 - RNA, 18 nt, Variola virus
agauuuguaucucuuuuc

SEQ ID NO: 3294215 - RNA, 14 nt, Variola virus
gcaaauuaaaucaa

SEQ ID NO: 3294216 - RNA, 16 nt, Variola virus
uuuuugaagauuccca

SEQ ID NO: 3294217 - RNA, 22 nt, Variola virus
auuauacacauuauaauaggug

SEQ ID NO: 3294218 - RNA, 15 nt, Variola virus
ggaugaaaauaagaa

SEQ ID NO: 3294219 - RNA, 20 nt, Variola virus
cgacgauaacgaaguauuua

SEQ ID NO: 3294220 - RNA, 13 nt, Variola virus
auucuugguuaaa

SEQ ID NO: 3294221 - RNA, 18 nt, Variola virus
aguauuguuuaguauuuu

SEQ ID NO: 3294222 - RNA, 17 nt, Variola virus
acaaugcuauaccuaau

SEQ ID NO: 3294223 - RNA, 15 nt, Variola virus
aauaugauuagaagu

SEQ ID NO: 3294224 - RNA, 15 nt, Variola virus
uaucuagcaaagauu

SEQ ID NO: 3294225 - RNA, 17 nt, Variola virus
caaauaaaacuauaaau

SEQ ID NO: 3294226 - RNA, 22 nt, Variola virus
cuaauaacguuuuuauuuguaa

SEQ ID NO: 3294227 - RNA, 19 nt, Variola virus
ugguaaguucauuaucuga

SEQ ID NO: 3294228 - RNA, 21 nt, Variola virus
auuuauuauuuucacggagau

SEQ ID NO: 3294229 - RNA, 16 nt, Variola virus
cuggaaaaauacuuuu

SEQ ID NO: 3294230 - RNA, 16 nt, Variola virus
caucaucgagauaauu

SEQ ID NO: 3294231 - RNA, 22 nt, Variola virus
uaucgcuaaaaucuucaucaaa

SEQ ID NO: 3294232 - RNA, 21 nt, Variola virus
uauaaaauacuaaugcaucua

SEQ ID NO: 3294233 - RNA, 22 nt, Variola virus
uaacauaaaaauaucauugaau

SEQ ID NO: 3294234 - RNA, 13 nt, Variola virus
auuuuuuaucaua

SEQ ID NO: 3294235 - RNA, 19 nt, Variola virus
ugauuuggccaaauguacc

SEQ ID NO: 3294236 - RNA, 19 nt, Variola virus
aaauuuacggugacuacua

SEQ ID NO: 3294237 - RNA, 21 nt, Variola virus
aagauuguuuaagaagagaau

SEQ ID NO: 3294238 - RNA, 19 nt, Variola virus
auaaaacucauauaguuaa

SEQ ID NO: 3294239 - RNA, 17 nt, Variola virus
cuauauaauuauacuau

SEQ ID NO: 3294240 - RNA, 18 nt, Variola virus
agagcuuuauuaacuucu

SEQ ID NO: 3294241 - RNA, 19 nt, Variola virus
augaacauaguaagaaauu

SEQ ID NO: 3294242 - RNA, 19 nt, Variola virus
auccuccggaguauuaaug

SEQ ID NO: 3294243 - RNA, 18 nt, Variola virus
cugccauuuauccagucu

SEQ ID NO: 3294244 - RNA, 13 nt, Variola virus
uugguauuagaau

SEQ ID NO: 3294245 - RNA, 21 nt, Variola virus
auaauuuaacauuuuggcaaa

SEQ ID NO: 3294246 - RNA, 14 nt, Variola virus
uuauuuuugaagau

SEQ ID NO: 3294247 - RNA, 16 nt, Variola virus
aaaaagaaagaauaua

SEQ ID NO: 3294248 - RNA, 15 nt, Variola virus
auuaucgacauaggu

SEQ ID NO: 3294249 - RNA, 18 nt, Variola virus
agaaucagaaucauacaa

SEQ ID NO: 3294250 - RNA, 22 nt, Variola virus
uacaaaauguugauaauccuug

SEQ ID NO: 3294251 - RNA, 13 nt, Variola virus
acuguucaagaau

SEQ ID NO: 3294252 - RNA, 15 nt, Variola virus
acacugagaaacagc

SEQ ID NO: 3294253 - RNA, 21 nt, Variola virus
gaaaauauuguguuuaaucuu

SEQ ID NO: 3294254 - RNA, 14 nt, Variola virus
aauacucuacagag

SEQ ID NO: 3294255 - RNA, 21 nt, Variola virus
uuaaagaugacaauauuauua

SEQ ID NO: 3294256 - RNA, 16 nt, Variola virus
uuccaaauucuggauu

SEQ ID NO: 3294257 - RNA, 19 nt, Variola virus
aaauucaguugcuggaauu

SEQ ID NO: 3294258 - RNA, 14 nt, Variola virus
cuaaaggaugagua

SEQ ID NO: 3294259 - RNA, 17 nt, Variola virus
uauaaauagacaaacaa

SEQ ID NO: 3294260 - RNA, 18 nt, Variola virus
cauaaaauacaagagaau

SEQ ID NO: 3294261 - RNA, 19 nt, Variola virus
auaagaaggaugacaauaa

SEQ ID NO: 3294262 - RNA, 18 nt, Variola virus
aauuuuauucuagaauug

SEQ ID NO: 3294263 - RNA, 12 nt, Variola virus
ucuuaaaugaau

SEQ ID NO: 3294264 - RNA, 20 nt, Variola virus
ugcucaaacaaaaugugaua

SEQ ID NO: 3294265 - RNA, 21 nt, Variola virus
ucaaaagaaggaauuaaacga

SEQ ID NO: 3294266 - RNA, 21 nt, Variola virus
aagacguuguacaauaugaac

SEQ ID NO: 3294267 - RNA, 18 nt, Variola virus
uaaauguauaaaaacuaa

SEQ ID NO: 3294268 - RNA, 12 nt, Variola virus
uagauacaaaau

SEQ ID NO: 3294269 - RNA, 13 nt, Variola virus
acuaacuauugaa

SEQ ID NO: 3294270 - RNA, 18 nt, Variola virus
aaaauauuuauuagaaca

SEQ ID NO: 3294271 - RNA, 22 nt, Variola virus
aauggauuuugaugauauuaaa

SEQ ID NO: 3294272 - RNA, 20 nt, Variola virus
aaauugguauaaauguugua

SEQ ID NO: 3294273 - RNA, 15 nt, Variola virus
ugacccuauaaacau

SEQ ID NO: 3294274 - RNA, 15 nt, Variola virus
guuuuauaacgaagu

SEQ ID NO: 3294275 - RNA, 15 nt, Variola virus
uuuagaaacuucaaa

SEQ ID NO: 3294276 - RNA, 23 nt, Variola virus
gacauaaugacuccauagagaua

SEQ ID NO: 3294277 - RNA, 14 nt, Variola virus
aucuaacauaaaca

SEQ ID NO: 3294278 - RNA, 22 nt, Variola virus
agaauucaagucaggaacuauu

SEQ ID NO: 3294279 - RNA, 15 nt, Variola virus
guaaaacauaaagga

SEQ ID NO: 3294280 - RNA, 15 nt, Variola virus
agagcuauucuugga

SEQ ID NO: 3294281 - RNA, 17 nt, Variola virus
aaaucaggaaaaaagau

SEQ ID NO: 3294282 - RNA, 15 nt, Variola virus
uucuauaaacugaau

SEQ ID NO: 3294283 - RNA, 15 nt, Variola virus
acgauacaucuguuu

SEQ ID NO: 3294284 - RNA, 23 nt, Variola virus
uagcuaugaacuuguuuaaugau

SEQ ID NO: 3294285 - RNA, 23 nt, Variola virus
uguuuccuauaaucguuaaauuu

SEQ ID NO: 3294286 - RNA, 22 nt, Variola virus
agaauuaguuaaucuuauucaa

SEQ ID NO: 3294287 - RNA, 21 nt, Variola virus
uaaucagucauaacaaaugua

SEQ ID NO: 3294288 - RNA, 16 nt, Variola virus
uagaaaaauucuugga

SEQ ID NO: 3294289 - RNA, 13 nt, Variola virus
aguuaauagcuuc

SEQ ID NO: 3294290 - RNA, 16 nt, Variola virus
ucauucucuagaagau

SEQ ID NO: 3294291 - RNA, 19 nt, Variola virus
uagauuauaucauaaauaa

SEQ ID NO: 3294292 - RNA, 19 nt, Variola virus
auauaacaauaacauaacu

SEQ ID NO: 3294293 - RNA, 13 nt, Variola virus
caacucucuuuuu

SEQ ID NO: 3294294 - RNA, 17 nt, Variola virus
agucuuaaaaauacuua

SEQ ID NO: 3294295 - RNA, 14 nt, Variola virus
aaauuccaccauuu

SEQ ID NO: 3294296 - RNA, 12 nt, Variola virus
agaacucuuuuc

SEQ ID NO: 3294297 - RNA, 17 nt, Variola virus
uacggauaucuaauaau

SEQ ID NO: 3294298 - RNA, 23 nt, Variola virus
aguaaguaucuauaaaacucaua

SEQ ID NO: 3294299 - RNA, 22 nt, Variola virus
ucaaugucuuaauaagaagugu

SEQ ID NO: 3294300 - RNA, 14 nt, Variola virus
aaccaacuacagaa

SEQ ID NO: 3294301 - RNA, 18 nt, Variola virus
uaucuauaucuacaucua

SEQ ID NO: 3294302 - RNA, 20 nt, Variola virus
aucaaugauuaguuucuuaa

SEQ ID NO: 3294303 - RNA, 21 nt, Variola virus
aggaccuuccaacuguggaua

SEQ ID NO: 3294304 - RNA, 12 nt, Variola virus
uguuauauguaa

SEQ ID NO: 3294305 - RNA, 18 nt, Variola virus
agaguuaauaaauaucau

SEQ ID NO: 3294306 - RNA, 14 nt, Variola virus
acacucaccaauaa

SEQ ID NO: 3294307 - RNA, 18 nt, Variola virus
agccgggaaaaagaagau

SEQ ID NO: 3294308 - RNA, 13 nt, Variola virus
acuauaucaguau

SEQ ID NO: 3294309 - RNA, 15 nt, Variola virus
acucauuaaaacuuc

SEQ ID NO: 3294310 - RNA, 21 nt, Variola virus
aaaacauaaaggaauauacaa

SEQ ID NO: 3294311 - RNA, 17 nt, Variola virus
guuuacaacacuuuucu

SEQ ID NO: 3294312 - RNA, 18 nt, Variola virus
augauuauaguuucuauu

SEQ ID NO: 3294313 - RNA, 15 nt, Variola virus
acaaucaauaauaua

SEQ ID NO: 3294314 - RNA, 22 nt, Variola virus
acaagugaaauguugucauuau

SEQ ID NO: 3294315 - RNA, 13 nt, Variola virus
ccuagcuuuguua

SEQ ID NO: 3294316 - RNA, 16 nt, Variola virus
ucaacggaaaacauuu

SEQ ID NO: 3294317 - RNA, 16 nt, Variola virus
uaucacgcuuuccauu

SEQ ID NO: 3294318 - RNA, 21 nt, Variola virus
uaaacaauacuucugaagaaa

SEQ ID NO: 3294319 - RNA, 11 nt, Variola virus
ucguuuggauu

SEQ ID NO: 3294320 - RNA, 15 nt, Variola virus
ucuguacaaaaguuu

SEQ ID NO: 3294321 - RNA, 23 nt, Variola virus
auucuacaaguaacaacaaaaaa

SEQ ID NO: 3294322 - RNA, 18 nt, Variola virus
accaacuuaaacaaaaua

SEQ ID NO: 3294323 - RNA, 15 nt, Variola virus
ucauagauucuuuaa

SEQ ID NO: 3294324 - RNA, 22 nt, Variola virus
aauguauuaguuaaauauuaaa

SEQ ID NO: 3294325 - RNA, 23 nt, Variola virus
agacuacguagacuagacuguuu

SEQ ID NO: 3294326 - RNA, 13 nt, Variola virus
gacauaagaacag

SEQ ID NO: 3294327 - RNA, 17 nt, Variola virus
auaaagguagaccuaau

SEQ ID NO: 3294328 - RNA, 16 nt, Variola virus
uacuuuaaagaaguag

SEQ ID NO: 3294329 - RNA, 23 nt, Variola virus
auuauugaacaggcauugcuaaa

SEQ ID NO: 3294330 - RNA, 15 nt, Variola virus
aaagcauuaauacag

SEQ ID NO: 3294331 - RNA, 20 nt, Variola virus
aacuaucuaugcuguagaua

SEQ ID NO: 3294332 - RNA, 14 nt, Variola virus
auaucuucucaaaa

SEQ ID NO: 3294333 - RNA, 18 nt, Variola virus
gacuuuaaccuauacaug

SEQ ID NO: 3294334 - RNA, 20 nt, Variola virus
aacacacuaaacaguuuauu

SEQ ID NO: 3294335 - RNA, 19 nt, Variola virus
gcugcuggaucuaaauauu

SEQ ID NO: 3294336 - RNA, 21 nt, Variola virus
agguaaguauaguacuaaaga

SEQ ID NO: 3294337 - RNA, 19 nt, Variola virus
aagauugucauguggauua

SEQ ID NO: 3294338 - RNA, 19 nt, Variola virus
agaugagcauaaacauaau

SEQ ID NO: 3294339 - RNA, 19 nt, Variola virus
auuuacaggcuguuagcug

SEQ ID NO: 3294340 - RNA, 20 nt, Variola virus
uaugacgcgcguucaacauu

SEQ ID NO: 3294341 - RNA, 17 nt, Variola virus
cuuaacuuuuucuuucu

SEQ ID NO: 3294342 - RNA, 16 nt, Variola virus
agagccaucuguaaaa

SEQ ID NO: 3294343 - RNA, 13 nt, Variola virus
gaagaaguuaaua

SEQ ID NO: 3294344 - RNA, 13 nt, Variola virus
uuaucuacaucuu

SEQ ID NO: 3294345 - RNA, 17 nt, Variola virus
acuaaaaauaaacauug

SEQ ID NO: 3294346 - RNA, 21 nt, Variola virus
ucaaucaaaagacuauacauu

SEQ ID NO: 3294347 - RNA, 22 nt, Variola virus
cagauuuuugaaugaaugaaua

SEQ ID NO: 3294348 - RNA, 22 nt, Variola virus
cauauauuuugcauaacaugua

SEQ ID NO: 3294349 - RNA, 14 nt, Variola virus
acauuuuccauuua

SEQ ID NO: 3294350 - RNA, 16 nt, Variola virus
aauauucaguauauag

SEQ ID NO: 3294351 - RNA, 18 nt, Variola virus
aauuaauucguuggaaaa

SEQ ID NO: 3294352 - RNA, 17 nt, Variola virus
aaauccuguaauacuuu

SEQ ID NO: 3294353 - RNA, 23 nt, Variola virus
uaaucuauuuuaccucuucugau

SEQ ID NO: 3294354 - RNA, 23 nt, Variola virus
agcuccuaauggagauuuucuau

SEQ ID NO: 3294355 - RNA, 13 nt, Variola virus
aaaauaauaucua

SEQ ID NO: 3294356 - RNA, 22 nt, Variola virus
agcaucuugaauagaaacgaua

SEQ ID NO: 3294357 - RNA, 20 nt, Variola virus
aggaauuaaucuaguagaaa

SEQ ID NO: 3294358 - RNA, 22 nt, Variola virus
agacgacggugaauacacucag

SEQ ID NO: 3294359 - RNA, 14 nt, Variola virus
acuuauuuaacucu

SEQ ID NO: 3294360 - RNA, 19 nt, Variola virus
auagauccgugagaaauac

SEQ ID NO: 3294361 - RNA, 14 nt, Variola virus
aaaugauugaagaa

SEQ ID NO: 3294362 - RNA, 14 nt, Variola virus
ugucucuguuuuua

SEQ ID NO: 3294363 - RNA, 15 nt, Variola virus
uucaauaaaugauuc

SEQ ID NO: 3294364 - RNA, 20 nt, Variola virus
acauuagcgcauguacauau

SEQ ID NO: 3294365 - RNA, 17 nt, Variola virus
uauuucuauuucuacua

SEQ ID NO: 3294366 - RNA, 19 nt, Variola virus
aaguuucaagauaaauaau

SEQ ID NO: 3294367 - RNA, 14 nt, Variola virus
uagaacagaaauac

SEQ ID NO: 3294368 - RNA, 16 nt, Variola virus
uuaauaaacuaacauu

SEQ ID NO: 3294369 - RNA, 16 nt, Variola virus
auuaaauauuaaugag

SEQ ID NO: 3294370 - RNA, 22 nt, Variola virus
auguauuuugaggaaauugaua

SEQ ID NO: 3294371 - RNA, 16 nt, Variola virus
ucaauagaauaaacca

SEQ ID NO: 3294372 - RNA, 23 nt, Variola virus
uaaucauauaggcauugauuuuu

SEQ ID NO: 3294373 - RNA, 20 nt, Variola virus
auugaaauuaaucauauaca

SEQ ID NO: 3294374 - RNA, 16 nt, Variola virus
agaauaagaacuauaa

SEQ ID NO: 3294375 - RNA, 19 nt, Variola virus
cucacuucucuucauuacu

SEQ ID NO: 3294376 - RNA, 22 nt, Variola virus
ucacgauaucucuuaaaugcua

SEQ ID NO: 3294377 - RNA, 12 nt, Variola virus
uauuuuacuaau

SEQ ID NO: 3294378 - RNA, 22 nt, Variola virus
acuuuuuguuuauauuaaauau

SEQ ID NO: 3294379 - RNA, 18 nt, Variola virus
caaucauugauaucuuua

SEQ ID NO: 3294380 - RNA, 15 nt, Variola virus
guuugaaucaucauc

SEQ ID NO: 3294381 - RNA, 14 nt, Variola virus
cagcaucagcauuu

SEQ ID NO: 3294382 - RNA, 14 nt, Variola virus
uacauuucucaaau

SEQ ID NO: 3294383 - RNA, 17 nt, Variola virus
ccuuaaauguaucuuua

SEQ ID NO: 3294384 - RNA, 18 nt, Variola virus
auagauuuacucugaaaa

SEQ ID NO: 3294385 - RNA, 15 nt, Variola virus
cauaguuuuaagaaa

SEQ ID NO: 3294386 - RNA, 17 nt, Variola virus
guaauaauuuauguauu

SEQ ID NO: 3294387 - RNA, 22 nt, Variola virus
cucucauuuucuucaacaaauu

SEQ ID NO: 3294388 - RNA, 14 nt, Variola virus
agaaggaaacuucu

SEQ ID NO: 3294389 - RNA, 20 nt, Variola virus
acuucuuucaguucuggaua

SEQ ID NO: 3294390 - RNA, 13 nt, Variola virus
agaguuauccauu

SEQ ID NO: 3294391 - RNA, 15 nt, Variola virus
cuauguuaauaugua

SEQ ID NO: 3294392 - RNA, 16 nt, Variola virus
uauacccauuauguaa

SEQ ID NO: 3294393 - RNA, 16 nt, Variola virus
ccacugucuaaaugua

SEQ ID NO: 3294394 - RNA, 14 nt, Variola virus
augaacuuuaucca

SEQ ID NO: 3294395 - RNA, 18 nt, Variola virus
acauuuuuggauuucaua

SEQ ID NO: 3294396 - RNA, 14 nt, Variola virus
aaccauucuaaaca

SEQ ID NO: 3294397 - RNA, 20 nt, Variola virus
ucuucccaaaauguuagaga

SEQ ID NO: 3294398 - RNA, 18 nt, Variola virus
acaaauuuggauauucua

SEQ ID NO: 3294399 - RNA, 21 nt, Variola virus
aucuacugauaaaacuggaag

SEQ ID NO: 3294400 - RNA, 15 nt, Variola virus
uuaaaauuauuaaac

SEQ ID NO: 3294401 - RNA, 23 nt, Variola virus
cuacaugacaaagauuuaucaga

SEQ ID NO: 3294402 - RNA, 23 nt, Variola virus
cucgguuguguauuaucaucugc

SEQ ID NO: 3294403 - RNA, 18 nt, Variola virus
auagcuuccuucaaucua

SEQ ID NO: 3294404 - RNA, 16 nt, Variola virus
aauggugguaaaacua

SEQ ID NO: 3294405 - RNA, 13 nt, Variola virus
uaauauaauauua

SEQ ID NO: 3294406 - RNA, 22 nt, Variola virus
aucacaaaaaaaacuucucuaa

SEQ ID NO: 3294407 - RNA, 14 nt, Variola virus
aaaacuuaaauguu

SEQ ID NO: 3294408 - RNA, 19 nt, Variola virus
uaaucauguaaauguuuaa

SEQ ID NO: 3294409 - RNA, 20 nt, Variola virus
aaucaaccgccaaugaugcg

SEQ ID NO: 3294410 - RNA, 23 nt, Variola virus
caugaacaaucacaagaauagag

SEQ ID NO: 3294411 - RNA, 18 nt, Variola virus
cguuaguaacgccauuau

SEQ ID NO: 3294412 - RNA, 13 nt, Variola virus
acaucuaaaaaug

SEQ ID NO: 3294413 - RNA, 14 nt, Variola virus
auugacgacuuugg

SEQ ID NO: 3294414 - RNA, 13 nt, Variola virus
uuacaauacauag

SEQ ID NO: 3294415 - RNA, 16 nt, Variola virus
cucuguaauaguuucc

SEQ ID NO: 3294416 - RNA, 11 nt, Variola virus
aaauggauaag

SEQ ID NO: 3294417 - RNA, 16 nt, Variola virus
auugaugacacuagau

SEQ ID NO: 3294418 - RNA, 17 nt, Variola virus
agagacaaaaugugaua

SEQ ID NO: 3294419 - RNA, 13 nt, Variola virus
augaauaucacau

SEQ ID NO: 3294420 - RNA, 14 nt, Variola virus
guauuaauacauca

SEQ ID NO: 3294421 - RNA, 20 nt, Variola virus
aagaauaauccagaauguac

SEQ ID NO: 3294422 - RNA, 22 nt, Variola virus
gacgauauuagaugauaauuua

SEQ ID NO: 3294423 - RNA, 22 nt, Variola virus
guaacguuuauauauucaauau

SEQ ID NO: 3294424 - RNA, 19 nt, Variola virus
caucuauagacgaugauuu

SEQ ID NO: 3294425 - RNA, 17 nt, Variola virus
auuaaguguuauaagau

SEQ ID NO: 3294426 - RNA, 14 nt, Variola virus
auuugauuaguaga

SEQ ID NO: 3294427 - RNA, 17 nt, Variola virus
uuauaaaggagacuugu

SEQ ID NO: 3294428 - RNA, 16 nt, Variola virus
cugcauagaaauaucu

SEQ ID NO: 3294429 - RNA, 15 nt, Variola virus
aaacuaauucauuuu

SEQ ID NO: 3294430 - RNA, 14 nt, Variola virus
auuuagcaaaauua

SEQ ID NO: 3294431 - RNA, 17 nt, Variola virus
auuucaucguuuuguau

SEQ ID NO: 3294432 - RNA, 18 nt, Variola virus
agaguauuccaagaguuu

SEQ ID NO: 3294433 - RNA, 12 nt, Variola virus
aguuaaaacuug

SEQ ID NO: 3294434 - RNA, 18 nt, Variola virus
agccaugaaacgaacacu

SEQ ID NO: 3294435 - RNA, 23 nt, Variola virus
cuguugccaaugauguuaggaaa

SEQ ID NO: 3294436 - RNA, 17 nt, Variola virus
uaaacacauagaaauaa

SEQ ID NO: 3294437 - RNA, 18 nt, Variola virus
guacuacugaagaacuaa

SEQ ID NO: 3294438 - RNA, 19 nt, Variola virus
ucaaaggaugaaagaaagc

SEQ ID NO: 3294439 - RNA, 14 nt, Variola virus
uaagcaagaaagau

SEQ ID NO: 3294440 - RNA, 16 nt, Variola virus
uaaacgaaaacuauau

SEQ ID NO: 3294441 - RNA, 17 nt, Variola virus
uuuucaaucauagaacu

SEQ ID NO: 3294442 - RNA, 18 nt, Variola virus
augcuagugcucaaacaa

SEQ ID NO: 3294443 - RNA, 14 nt, Variola virus
acaaaucaauaauu

SEQ ID NO: 3294444 - RNA, 13 nt, Variola virus
cugaaaauauauu

SEQ ID NO: 3294445 - RNA, 13 nt, Variola virus
ugguuuaggaaag

SEQ ID NO: 3294446 - RNA, 13 nt, Variola virus
agcacaaaucaaa

SEQ ID NO: 3294447 - RNA, 13 nt, Variola virus
uagcggaugaaaa

SEQ ID NO: 3294448 - RNA, 15 nt, Variola virus
ucaaucccuaagucu

SEQ ID NO: 3294449 - RNA, 13 nt, Variola virus
uaaagacuuuuau

SEQ ID NO: 3294450 - RNA, 17 nt, Variola virus
uaacguauuaaauauua

SEQ ID NO: 3294451 - RNA, 14 nt, Variola virus
augaucaaaaagag

SEQ ID NO: 3294452 - RNA, 23 nt, Variola virus
aauagguguaaaucuagaaauua

SEQ ID NO: 3294453 - RNA, 15 nt, Variola virus
cucaauuaguuuauu

SEQ ID NO: 3294454 - RNA, 14 nt, Variola virus
agaaaaaacaaugu

SEQ ID NO: 3294455 - RNA, 22 nt, Variola virus
uuaguaagugcuacaaaacaga

SEQ ID NO: 3294456 - RNA, 16 nt, Variola virus
auuuauauauuaaaaa

SEQ ID NO: 3294457 - RNA, 17 nt, Variola virus
guuaauuuuaaaugaug

SEQ ID NO: 3294458 - RNA, 20 nt, Variola virus
aaucaggacgaauaauucua

SEQ ID NO: 3294459 - RNA, 18 nt, Variola virus
acugaaugcuuucuugga

SEQ ID NO: 3294460 - RNA, 16 nt, Variola virus
auucacaaauaugacg

SEQ ID NO: 3294461 - RNA, 13 nt, Variola virus
cacaugaugauuu

SEQ ID NO: 3294462 - RNA, 18 nt, Variola virus
uagaucacccuaaucuua

SEQ ID NO: 3294463 - RNA, 20 nt, Variola virus
auaaacaugucuauuguuaa

SEQ ID NO: 3294464 - RNA, 13 nt, Variola virus
auauaaaaaauuu

SEQ ID NO: 3294465 - RNA, 13 nt, Variola virus
aauuuaaaauaua

SEQ ID NO: 3294466 - RNA, 15 nt, Variola virus
cucaaacuaaauguc

SEQ ID NO: 3294467 - RNA, 13 nt, Variola virus
cagauuuuaauau

SEQ ID NO: 3294468 - RNA, 14 nt, Variola virus
aucuauauauguau

SEQ ID NO: 3294469 - RNA, 22 nt, Variola virus
aaauauagaucuuauuuaguau

SEQ ID NO: 3294470 - RNA, 23 nt, Variola virus
uaaaaguagaggaugugauacau

SEQ ID NO: 3294471 - RNA, 21 nt, Variola virus
cgucuuuauuuucuauuuuua

SEQ ID NO: 3294472 - RNA, 21 nt, Variola virus
guagaaacuauacgaaauaga

SEQ ID NO: 3294473 - RNA, 15 nt, Variola virus
auaaaaaauauaaca

SEQ ID NO: 3294474 - RNA, 21 nt, Variola virus
gaaugcucucccggauauuau

SEQ ID NO: 3294475 - RNA, 21 nt, Variola virus
cuccaucggcuuuaacaauug

SEQ ID NO: 3294476 - RNA, 21 nt, Variola virus
gauaacuagaaucagaaucua

SEQ ID NO: 3294477 - RNA, 20 nt, Variola virus
auguuccauuuauaagaaau

SEQ ID NO: 3294478 - RNA, 17 nt, Variola virus
auugaugcgaauagcag

SEQ ID NO: 3294479 - RNA, 20 nt, Variola virus
uuaacaccuccacaguuuuu

SEQ ID NO: 3294480 - RNA, 12 nt, Variola virus
aguauuuucuau

SEQ ID NO: 3294481 - RNA, 18 nt, Variola virus
ucuuccaucaacuuauua

SEQ ID NO: 3294482 - RNA, 19 nt, Variola virus
gauuugauacggcuauucu

SEQ ID NO: 3294483 - RNA, 13 nt, Variola virus
aacagaaaaaaca

SEQ ID NO: 3294484 - RNA, 22 nt, Variola virus
aaacaguuugguauuagaauca

SEQ ID NO: 3294485 - RNA, 15 nt, Variola virus
aaguaaaaaagaaaa

SEQ ID NO: 3294486 - RNA, 18 nt, Variola virus
uaucacuaucuucaucau

SEQ ID NO: 3294487 - RNA, 16 nt, Variola virus
acuaauauaacuuauu

SEQ ID NO: 3294488 - RNA, 22 nt, Variola virus
aaaaugacaucguugcccggau

SEQ ID NO: 3294489 - RNA, 15 nt, Variola virus
uuguaauaucuuaaa

SEQ ID NO: 3294490 - RNA, 21 nt, Variola virus
gagauaucccguuagaaauau

SEQ ID NO: 3294491 - RNA, 23 nt, Variola virus
auguauaacaaaugcagaaauua

SEQ ID NO: 3294492 - RNA, 13 nt, Variola virus
acaacaaaugaua

SEQ ID NO: 3294493 - RNA, 16 nt, Variola virus
ccaauuauuugaacaa

SEQ ID NO: 3294494 - RNA, 15 nt, Variola virus
uaauuaaucuaaaau

SEQ ID NO: 3294495 - RNA, 17 nt, Variola virus
cgcuacaauaacucuau

SEQ ID NO: 3294496 - RNA, 17 nt, Variola virus
auucuggagcuauuuuc

SEQ ID NO: 3294497 - RNA, 22 nt, Variola virus
agaaaaaauuuauuuaucaauu

SEQ ID NO: 3294498 - RNA, 19 nt, Variola virus
auaacuggauauagaacug

SEQ ID NO: 3294499 - RNA, 15 nt, Variola virus
aauaucauaaauaua

SEQ ID NO: 3294500 - RNA, 14 nt, Variola virus
uguauuuuggcaua

SEQ ID NO: 3294501 - RNA, 13 nt, Variola virus
acaucuguuugag

SEQ ID NO: 3294502 - RNA, 20 nt, Variola virus
aucaguauauaaaaagaaug

SEQ ID NO: 3294503 - RNA, 15 nt, Variola virus
ucaauagauuauaca

SEQ ID NO: 3294504 - RNA, 19 nt, Variola virus
caaaaguaagcauuuccuu

SEQ ID NO: 3294505 - RNA, 17 nt, Variola virus
uuauuaauaauuguaaa

SEQ ID NO: 3294506 - RNA, 16 nt, Variola virus
uacuauuuuauaccuu

SEQ ID NO: 3294507 - RNA, 17 nt, Variola virus
auugcauugugaauaua

SEQ ID NO: 3294508 - RNA, 17 nt, Variola virus
ucuacuaaucucuguaa

SEQ ID NO: 3294509 - RNA, 18 nt, Variola virus
ucaaucaaggaacuaaau

SEQ ID NO: 3294510 - RNA, 14 nt, Variola virus
aggaguuuuauuca

SEQ ID NO: 3294511 - RNA, 13 nt, Variola virus
cgcauaucaugaa

SEQ ID NO: 3294512 - RNA, 17 nt, Variola virus
auaaaaagguaucugau

SEQ ID NO: 3294513 - RNA, 13 nt, Variola virus
aaauccuguaaua

SEQ ID NO: 3294514 - RNA, 23 nt, Variola virus
gcuuaaaggaagaauaucauauu

SEQ ID NO: 3294515 - RNA, 15 nt, Variola virus
auacaguaaguacau

SEQ ID NO: 3294516 - RNA, 17 nt, Variola virus
aacauaguaaaaaauau

SEQ ID NO: 3294517 - RNA, 20 nt, Variola virus
uauuuacaucgcauacaaaa

SEQ ID NO: 3294518 - RNA, 16 nt, Variola virus
aucuguuuccuauaau

SEQ ID NO: 3294519 - RNA, 18 nt, Variola virus
auaacaggggaaugaaca

SEQ ID NO: 3294520 - RNA, 21 nt, Variola virus
auggacauuauuuuuuuaaac

SEQ ID NO: 3294521 - RNA, 21 nt, Variola virus
auauucuuaaaagguuucaua

SEQ ID NO: 3294522 - RNA, 13 nt, Variola virus
uuccauuauuaau

SEQ ID NO: 3294523 - RNA, 16 nt, Variola virus
aucauugacugcuaaa

SEQ ID NO: 3294524 - RNA, 21 nt, Variola virus
aaggacagaaaaauguuagaa

SEQ ID NO: 3294525 - RNA, 16 nt, Variola virus
uuagucauaaccguaa

SEQ ID NO: 3294526 - RNA, 19 nt, Variola virus
auuugggccauuauaccuc

SEQ ID NO: 3294527 - RNA, 22 nt, Variola virus
auaagacuuuacucuucuaaau

SEQ ID NO: 3294528 - RNA, 14 nt, Variola virus
aaauauauacauau

SEQ ID NO: 3294529 - RNA, 16 nt, Variola virus
uugcaaguuacuaauu

SEQ ID NO: 3294530 - RNA, 15 nt, Variola virus
aauauuauaaagccu

SEQ ID NO: 3294531 - RNA, 15 nt, Variola virus
ccauaagcaaacuga

SEQ ID NO: 3294532 - RNA, 20 nt, Variola virus
aauucguuuuuauaugugac

SEQ ID NO: 3294533 - RNA, 23 nt, Variola virus
uaggaaaacccucacacauaaac

SEQ ID NO: 3294534 - RNA, 16 nt, Variola virus
uaacucauuuuuugaa

SEQ ID NO: 3294535 - RNA, 14 nt, Variola virus
aaucugaacuuuaa

SEQ ID NO: 3294536 - RNA, 14 nt, Variola virus
auuuguacauuauu

SEQ ID NO: 3294537 - RNA, 20 nt, Variola virus
gauguugauuaggucuuuua

SEQ ID NO: 3294538 - RNA, 20 nt, Variola virus
uguaacuucacuagguagua

SEQ ID NO: 3294539 - RNA, 19 nt, Variola virus
ucuuaccaucuucuuugau

SEQ ID NO: 3294540 - RNA, 15 nt, Variola virus
uuucuucaacaaauu

SEQ ID NO: 3294541 - RNA, 18 nt, Variola virus
aucuauuucugucauuaa

SEQ ID NO: 3294542 - RNA, 22 nt, Variola virus
augauaauuuauacaaaguaua

SEQ ID NO: 3294543 - RNA, 21 nt, Variola virus
gcaugugauuuacucauuuau

SEQ ID NO: 3294544 - RNA, 15 nt, Variola virus
aggaaauuaugagaa

SEQ ID NO: 3294545 - RNA, 20 nt, Variola virus
uaaauauuuuaaaauuuaua

SEQ ID NO: 3294546 - RNA, 17 nt, Variola virus
aaggauacuaaacauug

SEQ ID NO: 3294547 - RNA, 14 nt, Variola virus
ugguguuacaaaac

SEQ ID NO: 3294548 - RNA, 18 nt, Variola virus
uaugcaaccguaucaaaa

SEQ ID NO: 3294549 - RNA, 20 nt, Variola virus
uuccauaggauacuuuguaa

SEQ ID NO: 3294550 - RNA, 17 nt, Variola virus
uacaaucaauaauauag

SEQ ID NO: 3294551 - RNA, 12 nt, Variola virus
acauagaaauaa

SEQ ID NO: 3294552 - RNA, 18 nt, Variola virus
aaggacagaaaaauguua

SEQ ID NO: 3294553 - RNA, 21 nt, Variola virus
uagcuaucgguuuugucagau

SEQ ID NO: 3294554 - RNA, 12 nt, Variola virus
aaguacaaaaua

SEQ ID NO: 3294555 - RNA, 17 nt, Variola virus
agaaccaguaacauaua

SEQ ID NO: 3294556 - RNA, 17 nt, Variola virus
cucgcuuuguguaucau

SEQ ID NO: 3294557 - RNA, 18 nt, Variola virus
guauaucgcagaugaaac

SEQ ID NO: 3294558 - RNA, 21 nt, Variola virus
gauauucagaaagcuguggau

SEQ ID NO: 3294559 - RNA, 21 nt, Variola virus
uuucuugagaucccacaucau

SEQ ID NO: 3294560 - RNA, 18 nt, Variola virus
uuaucgauuagucuuaau

SEQ ID NO: 3294561 - RNA, 19 nt, Variola virus
cgauucuauauauacucuu

SEQ ID NO: 3294562 - RNA, 17 nt, Variola virus
cuagucucgauauccaa

SEQ ID NO: 3294563 - RNA, 19 nt, Variola virus
gucuauauaugaauaagca

SEQ ID NO: 3294564 - RNA, 12 nt, Variola virus
uuuguaauuuua

SEQ ID NO: 3294565 - RNA, 20 nt, Variola virus
auuaacgcaccuauaaagac

SEQ ID NO: 3294566 - RNA, 12 nt, Variola virus
caugucuucaau

SEQ ID NO: 3294567 - RNA, 15 nt, Variola virus
gucuguuaauagaca

SEQ ID NO: 3294568 - RNA, 20 nt, Variola virus
uguucccgucaauagagcaa

SEQ ID NO: 3294569 - RNA, 17 nt, Variola virus
ucagaaauacgguuuuu

SEQ ID NO: 3294570 - RNA, 13 nt, Variola virus
uuaaauguuuucu

SEQ ID NO: 3294571 - RNA, 22 nt, Variola virus
caaauguuaaacauuaauugau

SEQ ID NO: 3294572 - RNA, 16 nt, Variola virus
uaauuccguuaauauu

SEQ ID NO: 3294573 - RNA, 16 nt, Variola virus
caucuaucacaguuaa

SEQ ID NO: 3294574 - RNA, 15 nt, Variola virus
uaaaauaaauauucu

SEQ ID NO: 3294575 - RNA, 14 nt, Variola virus
aaagucuuuaguau

SEQ ID NO: 3294576 - RNA, 18 nt, Variola virus
agaaaucauauaugauau

SEQ ID NO: 3294577 - RNA, 12 nt, Variola virus
acagaauuauug

SEQ ID NO: 3294578 - RNA, 12 nt, Variola virus
cauaaaacauca

SEQ ID NO: 3294579 - RNA, 22 nt, Variola virus
augaaacaguaggguuauuaac

SEQ ID NO: 3294580 - RNA, 16 nt, Variola virus
ggaacaguaaugauug

SEQ ID NO: 3294581 - RNA, 15 nt, Variola virus
uauguaucaaucaaa

SEQ ID NO: 3294582 - RNA, 23 nt, Variola virus
guuucccuauuaaaauucuuaaa

SEQ ID NO: 3294583 - RNA, 18 nt, Variola virus
uacuaagccaacaaauau

SEQ ID NO: 3294584 - RNA, 23 nt, Variola virus
auuuccaucaggaauguuugcug

SEQ ID NO: 3294585 - RNA, 19 nt, Variola virus
aaagggcaauaguuugcgu

SEQ ID NO: 3294586 - RNA, 20 nt, Variola virus
agauauaaaauagaaaauaa

SEQ ID NO: 3294587 - RNA, 13 nt, Variola virus
ugaauguuuucaa

SEQ ID NO: 3294588 - RNA, 14 nt, Variola virus
gugcuuaauguuuc

SEQ ID NO: 3294589 - RNA, 19 nt, Variola virus
auuauagcuucuggauaua

SEQ ID NO: 3294590 - RNA, 20 nt, Variola virus
ucaaucaaaagacuauacau

SEQ ID NO: 3294591 - RNA, 19 nt, Variola virus
uguaugagugauauugaua

SEQ ID NO: 3294592 - RNA, 13 nt, Variola virus
uauauucuaugau

SEQ ID NO: 3294593 - RNA, 17 nt, Variola virus
uuaaaaauguuacugaa

SEQ ID NO: 3294594 - RNA, 19 nt, Variola virus
acaugaugauugccuuaag

SEQ ID NO: 3294595 - RNA, 21 nt, Variola virus
cuaacaaaaauuaugaaauaa

SEQ ID NO: 3294596 - RNA, 16 nt, Variola virus
agaacuuauuaaugaa

SEQ ID NO: 3294597 - RNA, 13 nt, Variola virus
ugccaaaaugaua

SEQ ID NO: 3294598 - RNA, 12 nt, Variola virus
auuaauuacaau

SEQ ID NO: 3294599 - RNA, 14 nt, Variola virus
gucuaugucucuua

SEQ ID NO: 3294600 - RNA, 19 nt, Variola virus
acagauagaucauuuugaa

SEQ ID NO: 3294601 - RNA, 16 nt, Variola virus
uccgaugauuaaugac

SEQ ID NO: 3294602 - RNA, 16 nt, Variola virus
uuaacuuauuagcguu

SEQ ID NO: 3294603 - RNA, 17 nt, Variola virus
auccaaucuaagaaauu

SEQ ID NO: 3294604 - RNA, 21 nt, Variola virus
auuaacaccggaacaaaaagc

SEQ ID NO: 3294605 - RNA, 15 nt, Variola virus
acauuaauugccaua

SEQ ID NO: 3294606 - RNA, 18 nt, Variola virus
guuaauaguuuuuaucau

SEQ ID NO: 3294607 - RNA, 12 nt, Variola virus
uugguuguauug

SEQ ID NO: 3294608 - RNA, 12 nt, Variola virus
acuaaauacuac

SEQ ID NO: 3294609 - RNA, 23 nt, Variola virus
uuaaugauacacacuauacuguc

SEQ ID NO: 3294610 - RNA, 15 nt, Variola virus
gccaccacuucucua

SEQ ID NO: 3294611 - RNA, 18 nt, Variola virus
caaaacauaauacucugu

SEQ ID NO: 3294612 - RNA, 22 nt, Variola virus
guaauauuguuaauuauuucua

SEQ ID NO: 3294613 - RNA, 14 nt, Variola virus
aacggaugaaaaua

SEQ ID NO: 3294614 - RNA, 20 nt, Variola virus
uuauaagaaugauuguuuga

SEQ ID NO: 3294615 - RNA, 16 nt, Variola virus
ugaaacgaacacuauu

SEQ ID NO: 3294616 - RNA, 16 nt, Variola virus
cgugcguaauauuguu

SEQ ID NO: 3294617 - RNA, 19 nt, Variola virus
uguauaugugaauaugaca

SEQ ID NO: 3294618 - RNA, 20 nt, Variola virus
uccggugcgcagucuaaaag

SEQ ID NO: 3294619 - RNA, 21 nt, Variola virus
aaugguacuucuuaccaacau

SEQ ID NO: 3294620 - RNA, 19 nt, Variola virus
uuuagaauauauguaugua

SEQ ID NO: 3294621 - RNA, 20 nt, Variola virus
auauuauuuuuauguuuuau

SEQ ID NO: 3294622 - RNA, 14 nt, Variola virus
ucauuuucuacaau

SEQ ID NO: 3294623 - RNA, 14 nt, Variola virus
uuauuaucuguaga

SEQ ID NO: 3294624 - RNA, 14 nt, Variola virus
aagauauuccaaga

SEQ ID NO: 3294625 - RNA, 19 nt, Variola virus
auacuauccaucagaaugu

SEQ ID NO: 3294626 - RNA, 19 nt, Variola virus
aauaacauaggauuaaaaa

SEQ ID NO: 3294627 - RNA, 15 nt, Variola virus
guuuucgauacuuuu

SEQ ID NO: 3294628 - RNA, 22 nt, Variola virus
auaaucagucauaacaaaugua

SEQ ID NO: 3294629 - RNA, 19 nt, Variola virus
ccccaggaucuccaacaaa

SEQ ID NO: 3294630 - RNA, 14 nt, Variola virus
uuagacuuguauuc

SEQ ID NO: 3294631 - RNA, 19 nt, Variola virus
uuagaauaagaguguagua

SEQ ID NO: 3294632 - RNA, 20 nt, Variola virus
cauacuccaucaauuucaaa

SEQ ID NO: 3294633 - RNA, 22 nt, Variola virus
aagcggaacaauaaacaaaaua

SEQ ID NO: 3294634 - RNA, 16 nt, Variola virus
uuuaaaaaguuaucuu

SEQ ID NO: 3294635 - RNA, 15 nt, Variola virus
gucagcaucagcauu

SEQ ID NO: 3294636 - RNA, 16 nt, Variola virus
gcguuuuaguuauuac

SEQ ID NO: 3294637 - RNA, 19 nt, Variola virus
auaaucugguggauacucu

SEQ ID NO: 3294638 - RNA, 19 nt, Variola virus
cuuaacaugagacauaaau

SEQ ID NO: 3294639 - RNA, 19 nt, Variola virus
aaauuugcaucuacaucau

SEQ ID NO: 3294640 - RNA, 15 nt, Variola virus
aggugacacauguac

SEQ ID NO: 3294641 - RNA, 21 nt, Variola virus
guuguaugaguuuaucguuua

SEQ ID NO: 3294642 - RNA, 15 nt, Variola virus
cuauuggaauguguu

SEQ ID NO: 3294643 - RNA, 19 nt, Variola virus
agaauagcgguaaguauau

SEQ ID NO: 3294644 - RNA, 18 nt, Variola virus
agaucuaauuuuucauua

SEQ ID NO: 3294645 - RNA, 21 nt, Variola virus
aucaaaaauaaaauacauuua

SEQ ID NO: 3294646 - RNA, 15 nt, Variola virus
acuaucauaauuaaa

SEQ ID NO: 3294647 - RNA, 17 nt, Variola virus
gcacuacuguuaagaau

SEQ ID NO: 3294648 - RNA, 16 nt, Variola virus
ucuaaacaacaaacaa

SEQ ID NO: 3294649 - RNA, 19 nt, Variola virus
uccaugaucuguuuaucau

SEQ ID NO: 3294650 - RNA, 15 nt, Variola virus
aauccaaauaugaua

SEQ ID NO: 3294651 - RNA, 15 nt, Variola virus
auaggagauauauau

SEQ ID NO: 3294652 - RNA, 16 nt, Variola virus
ucucccaauaccuguc

SEQ ID NO: 3294653 - RNA, 22 nt, Variola virus
auaaaucuacuuagauuauucu

SEQ ID NO: 3294654 - RNA, 19 nt, Variola virus
acaaaguuuccuuuaacuc

SEQ ID NO: 3294655 - RNA, 14 nt, Variola virus
gagacuuaaacaac

SEQ ID NO: 3294656 - RNA, 13 nt, Variola virus
auauuauuaauaa

SEQ ID NO: 3294657 - RNA, 19 nt, Variola virus
agaaacgauaccaucuucu

SEQ ID NO: 3294658 - RNA, 22 nt, Variola virus
uauaauuauuauugauagcauu

SEQ ID NO: 3294659 - RNA, 22 nt, Variola virus
gucuuaauuaauugucuuucuc

SEQ ID NO: 3294660 - RNA, 14 nt, Variola virus
auuaaacaauagau

SEQ ID NO: 3294661 - RNA, 20 nt, Variola virus
ccuuaugcauccaaaguauu

SEQ ID NO: 3294662 - RNA, 13 nt, Variola virus
agaccaucuaaca

SEQ ID NO: 3294663 - RNA, 22 nt, Variola virus
aauaguucaacaucuacuuuug

SEQ ID NO: 3294664 - RNA, 13 nt, Variola virus
guaacacuuuuaa

SEQ ID NO: 3294665 - RNA, 14 nt, Variola virus
ugauagcuccacca

SEQ ID NO: 3294666 - RNA, 19 nt, Variola virus
guauacucccuugcaucau

SEQ ID NO: 3294667 - RNA, 15 nt, Variola virus
agauauguuuauuca

SEQ ID NO: 3294668 - RNA, 18 nt, Variola virus
uauggccauagaggaugu

SEQ ID NO: 3294669 - RNA, 21 nt, Variola virus
caauuacguggauuauaacau

SEQ ID NO: 3294670 - RNA, 21 nt, Variola virus
auaguuccccauuucaaaaug

SEQ ID NO: 3294671 - RNA, 19 nt, Variola virus
uuuuuauaaaaaaaucauu

SEQ ID NO: 3294672 - RNA, 17 nt, Variola virus
agugaaucgacuauaga

SEQ ID NO: 3294673 - RNA, 13 nt, Variola virus
uagauacaaaauc

SEQ ID NO: 3294674 - RNA, 14 nt, Variola virus
auaugcucauauau

SEQ ID NO: 3294675 - RNA, 19 nt, Variola virus
uguaacccacguaacauua

SEQ ID NO: 3294676 - RNA, 22 nt, Variola virus
gacuaaaucagauuaugaggau

SEQ ID NO: 3294677 - RNA, 18 nt, Variola virus
ggaucuucuaauggauug

SEQ ID NO: 3294678 - RNA, 19 nt, Variola virus
caugccucagguucaucga

SEQ ID NO: 3294679 - RNA, 16 nt, Variola virus
agcauuguuauguauu

SEQ ID NO: 3294680 - RNA, 20 nt, Variola virus
uaucugaguauaguguucau

SEQ ID NO: 3294681 - RNA, 18 nt, Variola virus
acuaaacacauuauuaau

SEQ ID NO: 3294682 - RNA, 21 nt, Variola virus
aauuuacuacugaguauaaau

SEQ ID NO: 3294683 - RNA, 20 nt, Variola virus
auauacgaaauaaaauagac

SEQ ID NO: 3294684 - RNA, 19 nt, Variola virus
aacgaagaucuuuucucaa

SEQ ID NO: 3294685 - RNA, 20 nt, Variola virus
gcuucagaauauucuuuucu

SEQ ID NO: 3294686 - RNA, 16 nt, Variola virus
uccaguuccuuuucua

SEQ ID NO: 3294687 - RNA, 17 nt, Variola virus
cauagauaauauauacg

SEQ ID NO: 3294688 - RNA, 20 nt, Variola virus
guaacgcguggaaaaagcuc

SEQ ID NO: 3294689 - RNA, 12 nt, Variola virus
caaguacauaaa

SEQ ID NO: 3294690 - RNA, 13 nt, Variola virus
auaauguuucuau

SEQ ID NO: 3294691 - RNA, 18 nt, Variola virus
gagauauuggaugaugau

SEQ ID NO: 3294692 - RNA, 13 nt, Variola virus
accuaagaagaau

SEQ ID NO: 3294693 - RNA, 17 nt, Variola virus
uauauuccugagcauau

SEQ ID NO: 3294694 - RNA, 13 nt, Variola virus
aauaucuuguaua

SEQ ID NO: 3294695 - RNA, 21 nt, Variola virus
aucuucaagagugcauugacu

SEQ ID NO: 3294696 - RNA, 14 nt, Variola virus
auucaucuagaaug

SEQ ID NO: 3294697 - RNA, 16 nt, Variola virus
aaauugguacauagau

SEQ ID NO: 3294698 - RNA, 13 nt, Variola virus
uuauuuaacaauu

SEQ ID NO: 3294699 - RNA, 15 nt, Variola virus
ucuuuaccuuaagaa

SEQ ID NO: 3294700 - RNA, 21 nt, Variola virus
gauuacggauugguuucuaaa

SEQ ID NO: 3294701 - RNA, 21 nt, Variola virus
cagaaauugguauaaauguug

SEQ ID NO: 3294702 - RNA, 14 nt, Variola virus
acaauuaucaaauu

SEQ ID NO: 3294703 - RNA, 22 nt, Variola virus
cuucuaaaauuacaaacaacug

SEQ ID NO: 3294704 - RNA, 15 nt, Variola virus
aauuuagaaaugauu

SEQ ID NO: 3294705 - RNA, 22 nt, Variola virus
uaauaaauugaugacgucaugu

SEQ ID NO: 3294706 - RNA, 13 nt, Variola virus
ugguuuucuaaau

SEQ ID NO: 3294707 - RNA, 20 nt, Variola virus
uaucuagauaacaacgacuu

SEQ ID NO: 3294708 - RNA, 12 nt, Variola virus
cagaaaugauuu

SEQ ID NO: 3294709 - RNA, 17 nt, Variola virus
aagaugcaaacauuaug

SEQ ID NO: 3294710 - RNA, 19 nt, Variola virus
uguuucacauugacauauu

SEQ ID NO: 3294711 - RNA, 21 nt, Variola virus
ccaaaucaguaacuauguuca

SEQ ID NO: 3294712 - RNA, 22 nt, Variola virus
guauaauagaccacgauaauau

SEQ ID NO: 3294713 - RNA, 24 nt, Variola virus
aguguuuagcguggcuagaauagu

SEQ ID NO: 3294714 - RNA, 18 nt, Variola virus
uaaaugaaaaaaaacuag

SEQ ID NO: 3294715 - RNA, 15 nt, Variola virus
agagaucuacuggug

SEQ ID NO: 3294716 - RNA, 19 nt, Variola virus
agauggaagggucaaacuu

SEQ ID NO: 3294717 - RNA, 23 nt, Variola virus
caagucuucaguucuaucuucua

SEQ ID NO: 3294718 - RNA, 21 nt, Variola virus
aucugauagaaagaauaagaa

SEQ ID NO: 3294719 - RNA, 13 nt, Variola virus
aauuagaaauugg

SEQ ID NO: 3294720 - RNA, 16 nt, Variola virus
uaguaauaaaauuucu

SEQ ID NO: 3294721 - RNA, 18 nt, Variola virus
uuauaaaguuuagucucu

SEQ ID NO: 3294722 - RNA, 15 nt, Variola virus
cauauugaucauuug

SEQ ID NO: 3294723 - RNA, 21 nt, Variola virus
gcaaccaccgcaugauaauau

SEQ ID NO: 3294724 - RNA, 16 nt, Variola virus
auugguauaaauguug

SEQ ID NO: 3294725 - RNA, 14 nt, Variola virus
caaauguuaaacau

SEQ ID NO: 3294726 - RNA, 18 nt, Variola virus
gauaaaacaaguuuucau

SEQ ID NO: 3294727 - RNA, 13 nt, Variola virus
caucuaucaucuc

SEQ ID NO: 3294728 - RNA, 20 nt, Variola virus
uauauugccuccauagcauu

SEQ ID NO: 3294729 - RNA, 21 nt, Variola virus
cucuuuuauagagaaauguaa

SEQ ID NO: 3294730 - RNA, 18 nt, Variola virus
uauugguccgaauuacag

SEQ ID NO: 3294731 - RNA, 21 nt, Variola virus
gcuaauuccuaguuucaucau

SEQ ID NO: 3294732 - RNA, 14 nt, Variola virus
aacacaaaauauga

SEQ ID NO: 3294733 - RNA, 18 nt, Variola virus
aaucgcauccgauaaagc

SEQ ID NO: 3294734 - RNA, 16 nt, Variola virus
auuaucaaauguuguu

SEQ ID NO: 3294735 - RNA, 19 nt, Variola virus
uaauugccauaauaauuac

SEQ ID NO: 3294736 - RNA, 20 nt, Variola virus
gugcugucaaacaaaaacuu

SEQ ID NO: 3294737 - RNA, 17 nt, Variola virus
uaaauuuaucaauaaau

SEQ ID NO: 3294738 - RNA, 15 nt, Variola virus
uauauaaaaauauca

SEQ ID NO: 3294739 - RNA, 20 nt, Variola virus
ugaauaccauacaauuuaug

SEQ ID NO: 3294740 - RNA, 19 nt, Variola virus
uguaucgagacguggagau

SEQ ID NO: 3294741 - RNA, 20 nt, Variola virus
auucuuuggauccaaaugcu

SEQ ID NO: 3294742 - RNA, 14 nt, Variola virus
uauguauucagaau

SEQ ID NO: 3294743 - RNA, 12 nt, Variola virus
aacucuguuuua

SEQ ID NO: 3294744 - RNA, 15 nt, Variola virus
caaauaggagauauu

SEQ ID NO: 3294745 - RNA, 21 nt, Variola virus
ugaacaagagauauauuggag

SEQ ID NO: 3294746 - RNA, 16 nt, Variola virus
auaccaucuucuggaa

SEQ ID NO: 3294747 - RNA, 22 nt, Variola virus
uauuuaccuuucuacaugaaau

SEQ ID NO: 3294748 - RNA, 16 nt, Variola virus
gauaacgcgucuuuaa

SEQ ID NO: 3294749 - RNA, 22 nt, Variola virus
cuaaauuuuguugauuacucuu

SEQ ID NO: 3294750 - RNA, 16 nt, Variola virus
gaacauauaaauguag

SEQ ID NO: 3294751 - RNA, 18 nt, Variola virus
agaugucagcaucugaua

SEQ ID NO: 3294752 - RNA, 21 nt, Variola virus
augcaacucuaucauguagua

SEQ ID NO: 3294753 - RNA, 15 nt, Variola virus
uguucccuugucauu

SEQ ID NO: 3294754 - RNA, 16 nt, Variola virus
uacugcuggaaaauaa

SEQ ID NO: 3294755 - RNA, 15 nt, Variola virus
uaauacacacaaagu

SEQ ID NO: 3294756 - RNA, 23 nt, Variola virus
caguaccuugacuaaagucuuua

SEQ ID NO: 3294757 - RNA, 20 nt, Variola virus
ugagagucuuauauguagca

SEQ ID NO: 3294758 - RNA, 20 nt, Variola virus
aucuauauuuaucacagucu

SEQ ID NO: 3294759 - RNA, 16 nt, Variola virus
caaaaugauagauauu

SEQ ID NO: 3294760 - RNA, 15 nt, Variola virus
uauuuaacaauuugg

SEQ ID NO: 3294761 - RNA, 16 nt, Variola virus
uucucacuagugucua

SEQ ID NO: 3294762 - RNA, 15 nt, Variola virus
caaauuuaucuacua

SEQ ID NO: 3294763 - RNA, 20 nt, Variola virus
auaucauuaaguucacuaga

SEQ ID NO: 3294764 - RNA, 20 nt, Variola virus
cagaaauugguauaaauguu

SEQ ID NO: 3294765 - RNA, 19 nt, Variola virus
aacaaggugacuauaaagu

SEQ ID NO: 3294766 - RNA, 22 nt, Variola virus
uuacaucaccucuaacaucauc

SEQ ID NO: 3294767 - RNA, 17 nt, Variola virus
uaaauuaauucauacac

SEQ ID NO: 3294768 - RNA, 19 nt, Variola virus
auaacucggaucugcuaua

SEQ ID NO: 3294769 - RNA, 13 nt, Variola virus
uguauauacuguc

SEQ ID NO: 3294770 - RNA, 22 nt, Variola virus
agcuaugaacuuguuuaaugau

SEQ ID NO: 3294771 - RNA, 19 nt, Variola virus
aaccuuuguuguacaaauu

SEQ ID NO: 3294772 - RNA, 18 nt, Variola virus
aauagaugauagaauauc

SEQ ID NO: 3294773 - RNA, 21 nt, Variola virus
uucuccaccaaacauauucuu

SEQ ID NO: 3294774 - RNA, 14 nt, Variola virus
ccaaguagauaucu

SEQ ID NO: 3294775 - RNA, 16 nt, Variola virus
uaucuauguuaucauc

SEQ ID NO: 3294776 - RNA, 20 nt, Variola virus
aauaaucauaaauuauuuca

SEQ ID NO: 3294777 - RNA, 20 nt, Variola virus
aauugguaacucauucuaua

SEQ ID NO: 3294778 - RNA, 16 nt, Variola virus
acuucgauaaaauuac

SEQ ID NO: 3294779 - RNA, 20 nt, Variola virus
auucagaauuucuacauaau

SEQ ID NO: 3294780 - RNA, 15 nt, Variola virus
aaauagcgcugaaaa

SEQ ID NO: 3294781 - RNA, 17 nt, Variola virus
aguaacuuuuuuucuau

SEQ ID NO: 3294782 - RNA, 14 nt, Variola virus
auauuguacaguac

SEQ ID NO: 3294783 - RNA, 15 nt, Variola virus
acacaucaaaauaac

SEQ ID NO: 3294784 - RNA, 20 nt, Variola virus
aucucaccugccauaaauaa

SEQ ID NO: 3294785 - RNA, 12 nt, Variola virus
agaggagaagua

SEQ ID NO: 3294786 - RNA, 18 nt, Variola virus
auaucaaauacgcauaua

SEQ ID NO: 3294787 - RNA, 18 nt, Variola virus
ucuaaaccuucuuauuuu

SEQ ID NO: 3294788 - RNA, 13 nt, Variola virus
augcaaggcauuu

SEQ ID NO: 3294789 - RNA, 17 nt, Variola virus
auacgcuccuuaucaaa

SEQ ID NO: 3294790 - RNA, 17 nt, Variola virus
gcaauagguaauaacua

SEQ ID NO: 3294791 - RNA, 22 nt, Variola virus
aauugguauauguauuagaaua

SEQ ID NO: 3294792 - RNA, 17 nt, Variola virus
ucauuaaaaaaauuaac

SEQ ID NO: 3294793 - RNA, 14 nt, Variola virus
agaaaauacuauau

SEQ ID NO: 3294794 - RNA, 24 nt, Variola virus
uauuccaugaauaagugcgaugau

SEQ ID NO: 3294795 - RNA, 14 nt, Variola virus
auaugacuaaacau

SEQ ID NO: 3294796 - RNA, 12 nt, Variola virus
cucccuuuagau

SEQ ID NO: 3294797 - RNA, 14 nt, Variola virus
aauauaauauugaa

SEQ ID NO: 3294798 - RNA, 20 nt, Variola virus
agucuguugagcuugaucau

SEQ ID NO: 3294799 - RNA, 15 nt, Variola virus
uaaaaauuaauacau

SEQ ID NO: 3294800 - RNA, 14 nt, Variola virus
aggcguuaacuaga

SEQ ID NO: 3294801 - RNA, 14 nt, Variola virus
uccuuuuacuacaa

SEQ ID NO: 3294802 - RNA, 21 nt, Variola virus
auaucuuagugcaaaaguaua

SEQ ID NO: 3294803 - RNA, 14 nt, Variola virus
uaauuacauacuuu

SEQ ID NO: 3294804 - RNA, 20 nt, Variola virus
cauuaauaauuguuuugaau

SEQ ID NO: 3294805 - RNA, 13 nt, Variola virus
aauaacaggcuaa

SEQ ID NO: 3294806 - RNA, 18 nt, Variola virus
caaaucuauaacaugcua

SEQ ID NO: 3294807 - RNA, 23 nt, Variola virus
aaugcuucucuguuuaaugaauu

SEQ ID NO: 3294808 - RNA, 16 nt, Variola virus
cauuaauuucugauau

SEQ ID NO: 3294809 - RNA, 15 nt, Variola virus
ccagcauuaacugau

SEQ ID NO: 3294810 - RNA, 12 nt, Variola virus
aauuaucaaaug

SEQ ID NO: 3294811 - RNA, 22 nt, Variola virus
gauaaaagaugcauauauuaga

SEQ ID NO: 3294812 - RNA, 18 nt, Variola virus
uucgcaauauucauuaau

SEQ ID NO: 3294813 - RNA, 20 nt, Variola virus
augcggaaccucgagaaugu

SEQ ID NO: 3294814 - RNA, 17 nt, Variola virus
acgauugucaauacuuu

SEQ ID NO: 3294815 - RNA, 14 nt, Variola virus
gcccaucuacaccu

SEQ ID NO: 3294816 - RNA, 18 nt, Variola virus
auauauuccaacgcauuu

SEQ ID NO: 3294817 - RNA, 13 nt, Variola virus
ugguguagcauau

SEQ ID NO: 3294818 - RNA, 20 nt, Variola virus
caugugaauauaauaauaca

SEQ ID NO: 3294819 - RNA, 14 nt, Variola virus
uuugugaacucuuu

SEQ ID NO: 3294820 - RNA, 18 nt, Variola virus
aucagauuauuuaacaau

SEQ ID NO: 3294821 - RNA, 17 nt, Variola virus
uucacuuuaauagauau

SEQ ID NO: 3294822 - RNA, 22 nt, Variola virus
aaauucuggauuggaugucacu

SEQ ID NO: 3294823 - RNA, 14 nt, Variola virus
aauccauccauuau

SEQ ID NO: 3294824 - RNA, 23 nt, Variola virus
aguuaucgcugaucgucuagaug

SEQ ID NO: 3294825 - RNA, 20 nt, Variola virus
uaguuagggaucacaugaau

SEQ ID NO: 3294826 - RNA, 18 nt, Variola virus
cuauaguuuccacauuaa

SEQ ID NO: 3294827 - RNA, 15 nt, Variola virus
guaaagauauuucuc

SEQ ID NO: 3294828 - RNA, 17 nt, Variola virus
aacuuuuuugacaaauu

SEQ ID NO: 3294829 - RNA, 20 nt, Variola virus
auaaugauacgauacuauau

SEQ ID NO: 3294830 - RNA, 18 nt, Variola virus
gaugucguuauucugaaa

SEQ ID NO: 3294831 - RNA, 20 nt, Variola virus
uguaucauuuagcgauucaa

SEQ ID NO: 3294832 - RNA, 16 nt, Variola virus
uguacuaucuagagau

SEQ ID NO: 3294833 - RNA, 18 nt, Variola virus
auuauuuaauuuaauaca

SEQ ID NO: 3294834 - RNA, 20 nt, Variola virus
aucaucaaccgucacauaau

SEQ ID NO: 3294835 - RNA, 23 nt, Variola virus
caauuucauacgcuccucuuuug

SEQ ID NO: 3294836 - RNA, 18 nt, Variola virus
uacagucuaauauccauu

SEQ ID NO: 3294837 - RNA, 13 nt, Variola virus
uuaaauauugauc

SEQ ID NO: 3294838 - RNA, 18 nt, Variola virus
acucaacggaaaacauuu

SEQ ID NO: 3294839 - RNA, 23 nt, Variola virus
uuuuacacaaggcauugucucua

SEQ ID NO: 3294840 - RNA, 15 nt, Variola virus
cuacuuuagcauuga

SEQ ID NO: 3294841 - RNA, 17 nt, Variola virus
auaaagauaaaaacgau

SEQ ID NO: 3294842 - RNA, 22 nt, Variola virus
auuuuuagugaaacauuccaca

SEQ ID NO: 3294843 - RNA, 16 nt, Variola virus
auuaucuugucuuggu

SEQ ID NO: 3294844 - RNA, 15 nt, Variola virus
acauagauaauaaua

SEQ ID NO: 3294845 - RNA, 13 nt, Variola virus
gauaaucauuuaa

SEQ ID NO: 3294846 - RNA, 14 nt, Variola virus
cgcuauagcauugu

SEQ ID NO: 3294847 - RNA, 16 nt, Variola virus
aacgauuauuucuaaa

SEQ ID NO: 3294848 - RNA, 15 nt, Variola virus
gcauugugaauauau

SEQ ID NO: 3294849 - RNA, 16 nt, Variola virus
agucauuacuaauaga

SEQ ID NO: 3294850 - RNA, 15 nt, Variola virus
auuucaucuacaaug

SEQ ID NO: 3294851 - RNA, 21 nt, Variola virus
auccgaaacaaucucaaauau

SEQ ID NO: 3294852 - RNA, 21 nt, Variola virus
auacauaccugauuagaauuc

SEQ ID NO: 3294853 - RNA, 18 nt, Variola virus
auaucugagcuaucuaga

SEQ ID NO: 3294854 - RNA, 19 nt, Variola virus
uauugacuuaauaggcauc

SEQ ID NO: 3294855 - RNA, 17 nt, Variola virus
aacuaaacagucuauca

SEQ ID NO: 3294856 - RNA, 16 nt, Variola virus
guaucuacgauuuuua

SEQ ID NO: 3294857 - RNA, 21 nt, Variola virus
gaacgauauuugugaaaauau

SEQ ID NO: 3294858 - RNA, 18 nt, Variola virus
aggaucuagcaaaggaaa

SEQ ID NO: 3294859 - RNA, 17 nt, Variola virus
cuaacaugcauuugaaa

SEQ ID NO: 3294860 - RNA, 15 nt, Variola virus
uauaauguggauaau

SEQ ID NO: 3294861 - RNA, 12 nt, Variola virus
ucaaaauuauuu

SEQ ID NO: 3294862 - RNA, 21 nt, Variola virus
ucugaaauaacauauagauuu

SEQ ID NO: 3294863 - RNA, 19 nt, Variola virus
uagaaauaucuaggacaau

SEQ ID NO: 3294864 - RNA, 13 nt, Variola virus
gauugauuagaaa

SEQ ID NO: 3294865 - RNA, 17 nt, Variola virus
guaauuaguuucugguu

SEQ ID NO: 3294866 - RNA, 21 nt, Variola virus
aacucuaucauguaguagaaa

SEQ ID NO: 3294867 - RNA, 23 nt, Variola virus
gucauaacaaauguauacuaucu

SEQ ID NO: 3294868 - RNA, 15 nt, Variola virus
ugauauguaugucca

SEQ ID NO: 3294869 - RNA, 21 nt, Variola virus
aagccaucuguauuaaagaua

SEQ ID NO: 3294870 - RNA, 19 nt, Variola virus
aauaacuacaguuugaaaa

SEQ ID NO: 3294871 - RNA, 17 nt, Variola virus
aucaucaccuaucuugu

SEQ ID NO: 3294872 - RNA, 19 nt, Variola virus
auuaaucauucuaaaacua

SEQ ID NO: 3294873 - RNA, 23 nt, Variola virus
auuuuuuuaaaaaggaaauacuu

SEQ ID NO: 3294874 - RNA, 20 nt, Variola virus
cuuccaaauaauauucucuu

SEQ ID NO: 3294875 - RNA, 12 nt, Variola virus
auagaugaaugu

SEQ ID NO: 3294876 - RNA, 14 nt, Variola virus
acgcgaaaaaagau

SEQ ID NO: 3294877 - RNA, 15 nt, Variola virus
uuagcaucuauuuuu

SEQ ID NO: 3294878 - RNA, 18 nt, Variola virus
augucguuauucugaaac

SEQ ID NO: 3294879 - RNA, 19 nt, Variola virus
uuucagcauggauuucuca

SEQ ID NO: 3294880 - RNA, 18 nt, Variola virus
gcaguuacaagauuuuua

SEQ ID NO: 3294881 - RNA, 22 nt, Variola virus
ccuuuaucauuaauaauuucua

SEQ ID NO: 3294882 - RNA, 23 nt, Variola virus
aauaacucauuuauauauuaaaa

SEQ ID NO: 3294883 - RNA, 18 nt, Variola virus
acuuugcccuuuaauaca

SEQ ID NO: 3294884 - RNA, 13 nt, Variola virus
agaugauauguau

SEQ ID NO: 3294885 - RNA, 19 nt, Variola virus
uaacaacgacgaaccaaaa

SEQ ID NO: 3294886 - RNA, 17 nt, Variola virus
ccaaaucaaaacaaaau

SEQ ID NO: 3294887 - RNA, 21 nt, Variola virus
aucuacgauccaucaaaaaac

SEQ ID NO: 3294888 - RNA, 12 nt, Variola virus
agaauuagaauu

SEQ ID NO: 3294889 - RNA, 21 nt, Variola virus
uauguauuguaccaaagauuu

SEQ ID NO: 3294890 - RNA, 15 nt, Variola virus
acaaugacuuuauca

SEQ ID NO: 3294891 - RNA, 16 nt, Variola virus
uagauuucgaaaauac

SEQ ID NO: 3294892 - RNA, 16 nt, Variola virus
auauacaaaugcaaua

SEQ ID NO: 3294893 - RNA, 17 nt, Variola virus
caagcuaggcuggaaac

SEQ ID NO: 3294894 - RNA, 18 nt, Variola virus
uaagauguuugagaauau

SEQ ID NO: 3294895 - RNA, 15 nt, Variola virus
acuccuauauuuccc

SEQ ID NO: 3294896 - RNA, 14 nt, Variola virus
auauagaugucaau

SEQ ID NO: 3294897 - RNA, 15 nt, Variola virus
cauaauauuaucaaa

SEQ ID NO: 3294898 - RNA, 20 nt, Variola virus
guauucaguagccaauccua

SEQ ID NO: 3294899 - RNA, 12 nt, Variola virus
cgcauuaacaaa

SEQ ID NO: 3294900 - RNA, 12 nt, Variola virus
cguauacucuau

SEQ ID NO: 3294901 - RNA, 18 nt, Variola virus
uaacguucuaacaucauu

SEQ ID NO: 3294902 - RNA, 20 nt, Variola virus
acaucuagguuucaaaagac

SEQ ID NO: 3294903 - RNA, 14 nt, Variola virus
cauuaaggagauuc

SEQ ID NO: 3294904 - RNA, 16 nt, Variola virus
uuauauacaucuuuaa

SEQ ID NO: 3294905 - RNA, 19 nt, Variola virus
agucuccgccguucuaaug

SEQ ID NO: 3294906 - RNA, 19 nt, Variola virus
auaauugagauugauguaa

SEQ ID NO: 3294907 - RNA, 18 nt, Variola virus
aaacgauuauuucuaaau

SEQ ID NO: 3294908 - RNA, 23 nt, Variola virus
accauagauucauucuuuauaga

SEQ ID NO: 3294909 - RNA, 17 nt, Variola virus
gaaguaaacgaacgucu

SEQ ID NO: 3294910 - RNA, 16 nt, Variola virus
uauauuuucauuuaaa

SEQ ID NO: 3294911 - RNA, 19 nt, Variola virus
acagaaaagauauuuguua

SEQ ID NO: 3294912 - RNA, 19 nt, Variola virus
aagcgugucccuaucuugu

SEQ ID NO: 3294913 - RNA, 17 nt, Variola virus
cuacuacacuucuagau

SEQ ID NO: 3294914 - RNA, 13 nt, Variola virus
gcaauuuucagua

SEQ ID NO: 3294915 - RNA, 17 nt, Variola virus
ucaagaauauagucuug

SEQ ID NO: 3294916 - RNA, 20 nt, Variola virus
aaaaugugauauugguguag

SEQ ID NO: 3294917 - RNA, 15 nt, Variola virus
cuaugauauuguuga

SEQ ID NO: 3294918 - RNA, 20 nt, Variola virus
uucaucauccaccuguuuua

SEQ ID NO: 3294919 - RNA, 18 nt, Variola virus
ugauggauuuaaacaucg

SEQ ID NO: 3294920 - RNA, 18 nt, Variola virus
cuauuuugguaucuucca

SEQ ID NO: 3294921 - RNA, 20 nt, Variola virus
aguguauaacaaucuuauau

SEQ ID NO: 3294922 - RNA, 17 nt, Variola virus
uggaggauuauaugaua

SEQ ID NO: 3294923 - RNA, 15 nt, Variola virus
aauccuuugauuauc

SEQ ID NO: 3294924 - RNA, 17 nt, Variola virus
acauuuucaucuagaua

SEQ ID NO: 3294925 - RNA, 16 nt, Variola virus
ucuaucguuauaacuc

SEQ ID NO: 3294926 - RNA, 21 nt, Variola virus
uaauauguuggucuaucuauu

SEQ ID NO: 3294927 - RNA, 13 nt, Variola virus
guauuagauaaau

SEQ ID NO: 3294928 - RNA, 16 nt, Variola virus
aaagauggucugaaau

SEQ ID NO: 3294929 - RNA, 12 nt, Variola virus
aggaacuagaau

SEQ ID NO: 3294930 - RNA, 14 nt, Variola virus
gccaaaucuucuuc

SEQ ID NO: 3294931 - RNA, 21 nt, Variola virus
uacuauauaguaauaccaaug

SEQ ID NO: 3294932 - RNA, 20 nt, Variola virus
agaugaggauaguaaaauaa

SEQ ID NO: 3294933 - RNA, 18 nt, Variola virus
gauuugagaacauccucc

SEQ ID NO: 3294934 - RNA, 13 nt, Variola virus
auguauaaaccuu

SEQ ID NO: 3294935 - RNA, 14 nt, Variola virus
ugauaugcauacua

SEQ ID NO: 3294936 - RNA, 18 nt, Variola virus
agaucggcaaucuuucuc

SEQ ID NO: 3294937 - RNA, 16 nt, Variola virus
ggauaaccuagaaaau

SEQ ID NO: 3294938 - RNA, 18 nt, Variola virus
auaauaucucuaauagau

SEQ ID NO: 3294939 - RNA, 18 nt, Variola virus
uacaaaauaauagauaua

SEQ ID NO: 3294940 - RNA, 19 nt, Variola virus
uaaagcauauuccauuaau

SEQ ID NO: 3294941 - RNA, 23 nt, Variola virus
auguucuuaauagucuaggaaug

SEQ ID NO: 3294942 - RNA, 21 nt, Variola virus
uguuaaaacuacgauuaucua

SEQ ID NO: 3294943 - RNA, 15 nt, Variola virus
gauuaauuagauaua

SEQ ID NO: 3294944 - RNA, 20 nt, Variola virus
aagcaagaaagauacaggua

SEQ ID NO: 3294945 - RNA, 22 nt, Variola virus
uauaacauuaauaucaaacaau

SEQ ID NO: 3294946 - RNA, 15 nt, Variola virus
auuaucuauaugaug

SEQ ID NO: 3294947 - RNA, 21 nt, Variola virus
aaaaguuccagaaaauguaga

SEQ ID NO: 3294948 - RNA, 23 nt, Variola virus
auuagauauuuuaugggaaaacg

SEQ ID NO: 3294949 - RNA, 16 nt, Variola virus
aauaggaauggauaau

SEQ ID NO: 3294950 - RNA, 20 nt, Variola virus
augaugcuauuagaauuuac

SEQ ID NO: 3294951 - RNA, 13 nt, Variola virus
aagacauaugcac

SEQ ID NO: 3294952 - RNA, 21 nt, Variola virus
gucucauauaacaacaaauaa

SEQ ID NO: 3294953 - RNA, 20 nt, Variola virus
auaggucuucgucuacagua

SEQ ID NO: 3294954 - RNA, 22 nt, Variola virus
agauuggguguagaucuagaug

SEQ ID NO: 3294955 - RNA, 14 nt, Variola virus
auacauauuguuua

SEQ ID NO: 3294956 - RNA, 21 nt, Variola virus
aucuauaauguuauuaaccuc

SEQ ID NO: 3294957 - RNA, 15 nt, Variola virus
auuaauuuuauuaac

SEQ ID NO: 3294958 - RNA, 17 nt, Variola virus
cuggucuaaaauuucca

SEQ ID NO: 3294959 - RNA, 16 nt, Variola virus
uugccauucuuuguaa

SEQ ID NO: 3294960 - RNA, 19 nt, Variola virus
uggaaacaauucauaauua

SEQ ID NO: 3294961 - RNA, 19 nt, Variola virus
uugucuccuccuccguaaa

SEQ ID NO: 3294962 - RNA, 24 nt, Variola virus
uaaauagaauucucuucauaucau

SEQ ID NO: 3294963 - RNA, 22 nt, Variola virus
cuauaguacacggaauaaugau

SEQ ID NO: 3294964 - RNA, 14 nt, Variola virus
auccuaacaaugag

SEQ ID NO: 3294965 - RNA, 23 nt, Variola virus
aauuuauagaugauggaagacaa

SEQ ID NO: 3294966 - RNA, 18 nt, Variola virus
auguuuuuagaaaaucua

SEQ ID NO: 3294967 - RNA, 18 nt, Variola virus
auucuuuuucauuaacua

SEQ ID NO: 3294968 - RNA, 14 nt, Variola virus
aauaugauagaaau

SEQ ID NO: 3294969 - RNA, 19 nt, Variola virus
cuauuuguguauucuucua

SEQ ID NO: 3294970 - RNA, 21 nt, Variola virus
ucaguucaauaacuacacauc

SEQ ID NO: 3294971 - RNA, 14 nt, Variola virus
auacuuaaaaugua

SEQ ID NO: 3294972 - RNA, 19 nt, Variola virus
aguaacuauugacuuaaua

SEQ ID NO: 3294973 - RNA, 18 nt, Variola virus
uugauaacucguuuuucu

SEQ ID NO: 3294974 - RNA, 18 nt, Variola virus
uuuuacgaacuaguugua

SEQ ID NO: 3294975 - RNA, 15 nt, Variola virus
gcucaguaaauguau

SEQ ID NO: 3294976 - RNA, 21 nt, Variola virus
gcuaucguagaugugauuuuu

SEQ ID NO: 3294977 - RNA, 14 nt, Variola virus
aggaacauacgaca

SEQ ID NO: 3294978 - RNA, 15 nt, Variola virus
guucaucagauguuc

SEQ ID NO: 3294979 - RNA, 20 nt, Variola virus
ucgcuaauguauagauuguu

SEQ ID NO: 3294980 - RNA, 15 nt, Variola virus
ugucucgaaaucauu

SEQ ID NO: 3294981 - RNA, 23 nt, Variola virus
uaucuccacucucgauaaaucua

SEQ ID NO: 3294982 - RNA, 14 nt, Variola virus
aaauauguaauaau

SEQ ID NO: 3294983 - RNA, 14 nt, Variola virus
aacuaucuguaaaa

SEQ ID NO: 3294984 - RNA, 20 nt, Variola virus
ccggacgacauauuaaucuu

SEQ ID NO: 3294985 - RNA, 12 nt, Variola virus
uugaucuucaaa

SEQ ID NO: 3294986 - RNA, 18 nt, Variola virus
augauccuauucuaaaug

SEQ ID NO: 3294987 - RNA, 17 nt, Variola virus
gucuuaccuuacuaucu

SEQ ID NO: 3294988 - RNA, 18 nt, Variola virus
aaauagguuuuguucuau

SEQ ID NO: 3294989 - RNA, 16 nt, Variola virus
acaaaagguauuacaa

SEQ ID NO: 3294990 - RNA, 22 nt, Variola virus
aauaucuuguucugguuuaaaa

SEQ ID NO: 3294991 - RNA, 19 nt, Variola virus
acauuguccaauccaggac

SEQ ID NO: 3294992 - RNA, 17 nt, Variola virus
gacagcuauguuaucau

SEQ ID NO: 3294993 - RNA, 14 nt, Variola virus
ucuaagauguugua

SEQ ID NO: 3294994 - RNA, 23 nt, Variola virus
cauggauaucuuuaaagaacuaa

SEQ ID NO: 3294995 - RNA, 21 nt, Variola virus
aucaaauuugguguuguuaaa

SEQ ID NO: 3294996 - RNA, 23 nt, Variola virus
acuguuuucuagauggaaauauu

SEQ ID NO: 3294997 - RNA, 17 nt, Variola virus
aaugauaucuuagaaua

SEQ ID NO: 3294998 - RNA, 10 nt, Variola virus
ggauuucaua

SEQ ID NO: 3294999 - RNA, 19 nt, Variola virus
acacugauauuaugaugaa

SEQ ID NO: 3295000 - RNA, 17 nt, Variola virus
uaaaaaguuuuaacaug

SEQ ID NO: 3295001 - RNA, 18 nt, Variola virus
uucaucguaucuagauaa

SEQ ID NO: 3295002 - RNA, 23 nt, Variola virus
guaaacauugacggauaaaacaa

SEQ ID NO: 3295003 - RNA, 14 nt, Variola virus
auuagacauaugau

SEQ ID NO: 3295004 - RNA, 20 nt, Variola virus
uugaaauuguuuuuuauuuu

SEQ ID NO: 3295005 - RNA, 19 nt, Variola virus
cuggcuauuucaaaauaaa

SEQ ID NO: 3295006 - RNA, 15 nt, Variola virus
gaucuaauuuuucau

SEQ ID NO: 3295007 - RNA, 17 nt, Variola virus
uaauauuacuguuaaua

SEQ ID NO: 3295008 - RNA, 18 nt, Variola virus
ugugacaguuuucucauc

SEQ ID NO: 3295009 - RNA, 16 nt, Variola virus
agauauuuuaugggaa

SEQ ID NO: 3295010 - RNA, 22 nt, Variola virus
agucuauugccuuagauacuuu

SEQ ID NO: 3295011 - RNA, 16 nt, Variola virus
gaauaguaaaauuaga

SEQ ID NO: 3295012 - RNA, 21 nt, Variola virus
ccauccaagucaauaucuuua

SEQ ID NO: 3295013 - RNA, 20 nt, Variola virus
auauuguaccaaauuaauga

SEQ ID NO: 3295014 - RNA, 17 nt, Variola virus
aggcaaaagaugucaag

SEQ ID NO: 3295015 - RNA, 22 nt, Variola virus
aagaguuucaaaaauauucauu

SEQ ID NO: 3295016 - RNA, 12 nt, Variola virus
cauccaacaauc

SEQ ID NO: 3295017 - RNA, 17 nt, Variola virus
ccacggauauacaaaac

SEQ ID NO: 3295018 - RNA, 23 nt, Variola virus
uagugccaucagaauaggaugaa

SEQ ID NO: 3295019 - RNA, 23 nt, Variola virus
auuuccaucucuaucuaauacag

SEQ ID NO: 3295020 - RNA, 23 nt, Variola virus
auguuggauuaaucuuuaccaua

SEQ ID NO: 3295021 - RNA, 16 nt, Variola virus
auauuuguuaaugccu

SEQ ID NO: 3295022 - RNA, 22 nt, Variola virus
gaaaaugaaaaaguacuagaua

SEQ ID NO: 3295023 - RNA, 19 nt, Variola virus
augacuuauaaaaauacua

SEQ ID NO: 3295024 - RNA, 15 nt, Variola virus
aucaucuauaugacu

SEQ ID NO: 3295025 - RNA, 15 nt, Variola virus
aucaucuacaucacu

SEQ ID NO: 3295026 - RNA, 14 nt, Variola virus
uaauuaaauuauug

SEQ ID NO: 3295027 - RNA, 17 nt, Variola virus
uaguaccuagaacaaug

SEQ ID NO: 3295028 - RNA, 16 nt, Variola virus
auauuuauaaaguauu

SEQ ID NO: 3295029 - RNA, 21 nt, Variola virus
ccgguucuuaauauuguauug

SEQ ID NO: 3295030 - RNA, 17 nt, Variola virus
auaaauaguaaauacaa

SEQ ID NO: 3295031 - RNA, 19 nt, Variola virus
caauacguguugauaauau

SEQ ID NO: 3295032 - RNA, 14 nt, Variola virus
ugagugauaaacuu

SEQ ID NO: 3295033 - RNA, 23 nt, Variola virus
auaauggugacaggguuagcauu

SEQ ID NO: 3295034 - RNA, 17 nt, Variola virus
aauagugcgaaaucauu

SEQ ID NO: 3295035 - RNA, 16 nt, Variola virus
acuauggcaauaauug

SEQ ID NO: 3295036 - RNA, 14 nt, Variola virus
auaucuagacacaa

SEQ ID NO: 3295037 - RNA, 18 nt, Variola virus
auuuucuauuuuuaauuu

SEQ ID NO: 3295038 - RNA, 14 nt, Variola virus
aauauuuuauuuca

SEQ ID NO: 3295039 - RNA, 12 nt, Variola virus
ccaauacauguu

SEQ ID NO: 3295040 - RNA, 21 nt, Variola virus
gaguuaagccaauagaaauau

SEQ ID NO: 3295041 - RNA, 17 nt, Variola virus
auauuuacacacauaau

SEQ ID NO: 3295042 - RNA, 16 nt, Variola virus
uaucaagauccaugau

SEQ ID NO: 3295043 - RNA, 15 nt, Variola virus
acauaauacucaaua

SEQ ID NO: 3295044 - RNA, 15 nt, Variola virus
gugacgucuguggau

SEQ ID NO: 3295045 - RNA, 16 nt, Variola virus
uaucggacuacuuauu

SEQ ID NO: 3295046 - RNA, 11 nt, Variola virus
gauaacuguau

SEQ ID NO: 3295047 - RNA, 13 nt, Variola virus
aauuuuaagaaau

SEQ ID NO: 3295048 - RNA, 18 nt, Variola virus
gcuuuuuugacauauuaa

SEQ ID NO: 3295049 - RNA, 17 nt, Variola virus
cuuggauaaccuucaua

SEQ ID NO: 3295050 - RNA, 17 nt, Variola virus
gcuaaaaucuucaucaa

SEQ ID NO: 3295051 - RNA, 21 nt, Variola virus
gaaaaucagaucugauaauau

SEQ ID NO: 3295052 - RNA, 15 nt, Variola virus
gugaauuuagaaaau

SEQ ID NO: 3295053 - RNA, 15 nt, Variola virus
aaucacuauagaaaa

SEQ ID NO: 3295054 - RNA, 17 nt, Variola virus
auaguaaauacaauaau

SEQ ID NO: 3295055 - RNA, 23 nt, Variola virus
uuagacauaaaaacuaauauuag

SEQ ID NO: 3295056 - RNA, 19 nt, Variola virus
uauaccuuguaauuaaauu

SEQ ID NO: 3295057 - RNA, 18 nt, Variola virus
uucaucggcauauuauua

SEQ ID NO: 3295058 - RNA, 22 nt, Variola virus
aucuaucuuuagcuucugaaau

SEQ ID NO: 3295059 - RNA, 19 nt, Variola virus
ucauguuaacacucuacgu

SEQ ID NO: 3295060 - RNA, 12 nt, Variola virus
aaauaucucauc

SEQ ID NO: 3295061 - RNA, 22 nt, Variola virus
aucuguggaaaauaauacucug

SEQ ID NO: 3295062 - RNA, 22 nt, Variola virus
auaauaauuuaggacuuuguaa

SEQ ID NO: 3295063 - RNA, 22 nt, Variola virus
agccaguagauccaguuauuaa

SEQ ID NO: 3295064 - RNA, 16 nt, Variola virus
cuaaguccuauucucg

SEQ ID NO: 3295065 - RNA, 12 nt, Variola virus
cgauguuagaac

SEQ ID NO: 3295066 - RNA, 15 nt, Variola virus
auccauauuucuuaa

SEQ ID NO: 3295067 - RNA, 16 nt, Variola virus
aacaguauguaaaagu

SEQ ID NO: 3295068 - RNA, 15 nt, Variola virus
ucuuauauacacagu

SEQ ID NO: 3295069 - RNA, 14 nt, Variola virus
auauguaucauaau

SEQ ID NO: 3295070 - RNA, 21 nt, Variola virus
aacgaguacuuuaaagaagua

SEQ ID NO: 3295071 - RNA, 15 nt, Variola virus
gagcaaguagaaaac

SEQ ID NO: 3295072 - RNA, 18 nt, Variola virus
aaguucuggcaauguuuc

SEQ ID NO: 3295073 - RNA, 15 nt, Variola virus
acauguauuaccguu

SEQ ID NO: 3295074 - RNA, 22 nt, Variola virus
uuaguaaaaaauuuauuucuaa

SEQ ID NO: 3295075 - RNA, 16 nt, Variola virus
auuuggauuaauuaga

SEQ ID NO: 3295076 - RNA, 21 nt, Variola virus
aauaucuauguuuaacuuuug

SEQ ID NO: 3295077 - RNA, 15 nt, Variola virus
aaucauuaaaugauu

SEQ ID NO: 3295078 - RNA, 14 nt, Variola virus
gcuuguauguguua

SEQ ID NO: 3295079 - RNA, 13 nt, Variola virus
uaaauauaaacac

SEQ ID NO: 3295080 - RNA, 17 nt, Variola virus
aucgacuauuuuaaaua

SEQ ID NO: 3295081 - RNA, 20 nt, Variola virus
uagugcuauggaacaaaaua

SEQ ID NO: 3295082 - RNA, 14 nt, Variola virus
aaauugguucuuua

SEQ ID NO: 3295083 - RNA, 22 nt, Variola virus
uguaauauuguacgauguaaua

SEQ ID NO: 3295084 - RNA, 18 nt, Variola virus
auuauuagauuuaauagc

SEQ ID NO: 3295085 - RNA, 16 nt, Variola virus
ucaucggaucuguaaa

SEQ ID NO: 3295086 - RNA, 16 nt, Variola virus
cuaauuguuuaaauaa

SEQ ID NO: 3295087 - RNA, 14 nt, Variola virus
acuagaguauauaa

SEQ ID NO: 3295088 - RNA, 23 nt, Variola virus
aagucuuuagucacacaauacua

SEQ ID NO: 3295089 - RNA, 17 nt, Variola virus
aaugacggguuuucuau

SEQ ID NO: 3295090 - RNA, 14 nt, Variola virus
aguuccuuuucuag

SEQ ID NO: 3295091 - RNA, 19 nt, Variola virus
uuccauagaauauauuaau

SEQ ID NO: 3295092 - RNA, 14 nt, Variola virus
aacauaaaaacugu

SEQ ID NO: 3295093 - RNA, 16 nt, Variola virus
agauguuauuaaaugu

SEQ ID NO: 3295094 - RNA, 20 nt, Variola virus
aaugcuaguuuuagaauaac

SEQ ID NO: 3295095 - RNA, 14 nt, Variola virus
auuaucaaaaagaa

SEQ ID NO: 3295096 - RNA, 15 nt, Variola virus
auuagaugagaaauu

SEQ ID NO: 3295097 - RNA, 13 nt, Variola virus
aacucuaaucaaa

SEQ ID NO: 3295098 - RNA, 18 nt, Variola virus
guuggcuaugaucuugua

SEQ ID NO: 3295099 - RNA, 22 nt, Variola virus
gauuaauuguuauuuuauucau

SEQ ID NO: 3295100 - RNA, 23 nt, Variola virus
auauucuauaacuugagacuuga

SEQ ID NO: 3295101 - RNA, 17 nt, Variola virus
uuaacuccucuauuaau

SEQ ID NO: 3295102 - RNA, 21 nt, Variola virus
agauaccucagcguguuaaaa

SEQ ID NO: 3295103 - RNA, 11 nt, Variola virus
ugaauaugaca

SEQ ID NO: 3295104 - RNA, 19 nt, Variola virus
ugucaaugguauguaucua

SEQ ID NO: 3295105 - RNA, 14 nt, Variola virus
cucagaauaucuca

SEQ ID NO: 3295106 - RNA, 18 nt, Variola virus
gaauaucccuaaguucuu

SEQ ID NO: 3295107 - RNA, 16 nt, Variola virus
aaauugcauuugauua

SEQ ID NO: 3295108 - RNA, 15 nt, Variola virus
uguaaauguaguauu

SEQ ID NO: 3295109 - RNA, 18 nt, Variola virus
aguuuauuaucuuuacca

SEQ ID NO: 3295110 - RNA, 20 nt, Variola virus
uacaguguaugguacuaaau

SEQ ID NO: 3295111 - RNA, 22 nt, Variola virus
uaaucuuuauuucguuuucgau

SEQ ID NO: 3295112 - RNA, 13 nt, Variola virus
gaucguuaaugaa

SEQ ID NO: 3295113 - RNA, 19 nt, Variola virus
aaugaugguguauacagua

SEQ ID NO: 3295114 - RNA, 17 nt, Variola virus
cucaauaaaaaauuaau

SEQ ID NO: 3295115 - RNA, 16 nt, Variola virus
aaauuauugcaaacga

SEQ ID NO: 3295116 - RNA, 18 nt, Variola virus
cuacuaccgaugauguaa

SEQ ID NO: 3295117 - RNA, 17 nt, Variola virus
cgaugucuuggaagcaa

SEQ ID NO: 3295118 - RNA, 17 nt, Variola virus
aaauccuucaucacuuc

SEQ ID NO: 3295119 - RNA, 19 nt, Variola virus
auuaauaguuuuauuugaa

SEQ ID NO: 3295120 - RNA, 14 nt, Variola virus
auaaucagauuuac

SEQ ID NO: 3295121 - RNA, 17 nt, Variola virus
auuuuggcguuaucauu

SEQ ID NO: 3295122 - RNA, 16 nt, Variola virus
gcgaugucuuggaagc

SEQ ID NO: 3295123 - RNA, 20 nt, Variola virus
aaauuuuuuuuacaaacauu

SEQ ID NO: 3295124 - RNA, 14 nt, Variola virus
uuuguauaaucuuu

SEQ ID NO: 3295125 - RNA, 19 nt, Variola virus
cagcacggugguagauaua

SEQ ID NO: 3295126 - RNA, 15 nt, Variola virus
agaaaauaacagaua

SEQ ID NO: 3295127 - RNA, 12 nt, Variola virus
aacaauauuaag

SEQ ID NO: 3295128 - RNA, 14 nt, Variola virus
aucuaaaaacaaua

SEQ ID NO: 3295129 - RNA, 17 nt, Variola virus
aaugagagcaaaauaua

SEQ ID NO: 3295130 - RNA, 18 nt, Variola virus
ucgacauucagaaagacg

SEQ ID NO: 3295131 - RNA, 14 nt, Variola virus
uaaagguaaaugua

SEQ ID NO: 3295132 - RNA, 14 nt, Variola virus
gucaucauuaacaa

SEQ ID NO: 3295133 - RNA, 16 nt, Variola virus
aaugaaucccaaacau

SEQ ID NO: 3295134 - RNA, 15 nt, Variola virus
aagcccaaaaccaaa

SEQ ID NO: 3295135 - RNA, 18 nt, Variola virus
ucaauagcaaucaugaaa

SEQ ID NO: 3295136 - RNA, 18 nt, Variola virus
aaauguauauuuuccauu

SEQ ID NO: 3295137 - RNA, 20 nt, Variola virus
aaucaauagaauaaaccauu

SEQ ID NO: 3295138 - RNA, 19 nt, Variola virus
aaaaugcauguacagaauc

SEQ ID NO: 3295139 - RNA, 16 nt, Variola virus
aaucucucucaaauau

SEQ ID NO: 3295140 - RNA, 18 nt, Variola virus
acaucgaauauaaaauaa

SEQ ID NO: 3295141 - RNA, 20 nt, Variola virus
uuauagaacagugucaucua

SEQ ID NO: 3295142 - RNA, 21 nt, Variola virus
aguuauacgucauuucaucug

SEQ ID NO: 3295143 - RNA, 15 nt, Variola virus
uauuccaauguuuaa

SEQ ID NO: 3295144 - RNA, 23 nt, Variola virus
gaccguaccagugacagauauac

SEQ ID NO: 3295145 - RNA, 20 nt, Variola virus
gauauagaaaucggaaauuu

SEQ ID NO: 3295146 - RNA, 23 nt, Variola virus
aauuuguauguuugggagaauua

SEQ ID NO: 3295147 - RNA, 14 nt, Variola virus
ucaauaacuacaca

SEQ ID NO: 3295148 - RNA, 13 nt, Variola virus
gucucuaucuuua

SEQ ID NO: 3295149 - RNA, 18 nt, Variola virus
agagauuucaacagacug

SEQ ID NO: 3295150 - RNA, 15 nt, Variola virus
gaauauaauaaucua

SEQ ID NO: 3295151 - RNA, 14 nt, Variola virus
auucagcugaaaug

SEQ ID NO: 3295152 - RNA, 22 nt, Variola virus
aacagggaauuacuuuaauagu

SEQ ID NO: 3295153 - RNA, 13 nt, Variola virus
cuauauuaauagg

SEQ ID NO: 3295154 - RNA, 11 nt, Variola virus
cucuauuuugg

SEQ ID NO: 3295155 - RNA, 11 nt, Variola virus
aagguauauaa

SEQ ID NO: 3295156 - RNA, 14 nt, Variola virus
cgcccuuguauguu

SEQ ID NO: 3295157 - RNA, 20 nt, Variola virus
auacuaucuggaucuucaca

SEQ ID NO: 3295158 - RNA, 17 nt, Variola virus
aaacucaauuauacucu

SEQ ID NO: 3295159 - RNA, 22 nt, Variola virus
ugacaugauuaagauugcucuu

SEQ ID NO: 3295160 - RNA, 20 nt, Variola virus
gaacauacuuuccuguagua

SEQ ID NO: 3295161 - RNA, 21 nt, Variola virus
ccaucuuuaggcauaaacgau

SEQ ID NO: 3295162 - RNA, 23 nt, Variola virus
aauagauagugcuaaacgacuua

SEQ ID NO: 3295163 - RNA, 15 nt, Variola virus
agauuuuaaaaaacu

SEQ ID NO: 3295164 - RNA, 18 nt, Variola virus
uacuaauacuaauacuac

SEQ ID NO: 3295165 - RNA, 21 nt, Variola virus
cauagaugagguacuauuuua

SEQ ID NO: 3295166 - RNA, 20 nt, Variola virus
cauuucugcauuacaaagaa

SEQ ID NO: 3295167 - RNA, 14 nt, Variola virus
acuuauuaaugaau

SEQ ID NO: 3295168 - RNA, 19 nt, Variola virus
gaaauagcucguuucuauu

SEQ ID NO: 3295169 - RNA, 17 nt, Variola virus
cagugacgucuguggau

SEQ ID NO: 3295170 - RNA, 14 nt, Variola virus
caaaaaauaauaau

SEQ ID NO: 3295171 - RNA, 17 nt, Variola virus
uauaaacucgcuuaaua

SEQ ID NO: 3295172 - RNA, 16 nt, Variola virus
aggaaucguuuauccg

SEQ ID NO: 3295173 - RNA, 16 nt, Variola virus
ucuaaguuaacacaug

SEQ ID NO: 3295174 - RNA, 21 nt, Variola virus
uucuaaacccaaaauguaugu

SEQ ID NO: 3295175 - RNA, 14 nt, Variola virus
augguaaaagaaau

SEQ ID NO: 3295176 - RNA, 18 nt, Variola virus
aaucuguauaucuuucca

SEQ ID NO: 3295177 - RNA, 16 nt, Variola virus
ugauaauccagucuuu

SEQ ID NO: 3295178 - RNA, 23 nt, Variola virus
agacaaaacuauuccaauguuua

SEQ ID NO: 3295179 - RNA, 23 nt, Variola virus
uuuggagaaaggagaaacuguuu

SEQ ID NO: 3295180 - RNA, 18 nt, Variola virus
ucugcuccuuuuucuauu

SEQ ID NO: 3295181 - RNA, 22 nt, Variola virus
gauacacgaaagaaucaaaaga

SEQ ID NO: 3295182 - RNA, 15 nt, Variola virus
aucaucaucugaaau

SEQ ID NO: 3295183 - RNA, 17 nt, Variola virus
ugauaaucaaacacauc

SEQ ID NO: 3295184 - RNA, 19 nt, Variola virus
auguuuauauguuggcaua

SEQ ID NO: 3295185 - RNA, 18 nt, Variola virus
ugggguaaaguaaguauc

SEQ ID NO: 3295186 - RNA, 16 nt, Variola virus
auauauuaagaaguuc

SEQ ID NO: 3295187 - RNA, 17 nt, Variola virus
gacuuuauaauuucauc

SEQ ID NO: 3295188 - RNA, 14 nt, Variola virus
cuaauauauucuua

SEQ ID NO: 3295189 - RNA, 22 nt, Variola virus
uaaugauguauguuuaaacacu

SEQ ID NO: 3295190 - RNA, 19 nt, Variola virus
agaacaaaccaaauauauu

SEQ ID NO: 3295191 - RNA, 22 nt, Variola virus
cuuuugauuugcuuugaauaau

SEQ ID NO: 3295192 - RNA, 20 nt, Variola virus
auuuaacuagauuauacaau

SEQ ID NO: 3295193 - RNA, 21 nt, Variola virus
gcaucuuggaaacauaaaaua

SEQ ID NO: 3295194 - RNA, 22 nt, Variola virus
auaauuaucgcguucagauugu

SEQ ID NO: 3295195 - RNA, 16 nt, Variola virus
gcaauuucugauucua

SEQ ID NO: 3295196 - RNA, 14 nt, Variola virus
cuuauguaugugca

SEQ ID NO: 3295197 - RNA, 19 nt, Variola virus
ugagcauaaacauaauaaa

SEQ ID NO: 3295198 - RNA, 20 nt, Variola virus
guagugcgggcuuaaagcaa

SEQ ID NO: 3295199 - RNA, 16 nt, Variola virus
guaaaacucauuacuu

SEQ ID NO: 3295200 - RNA, 22 nt, Variola virus
aacuauuuggauagacacauau

SEQ ID NO: 3295201 - RNA, 21 nt, Variola virus
uacguuuaucgauguacacau

SEQ ID NO: 3295202 - RNA, 20 nt, Variola virus
uacucuuggucuaauacuga

SEQ ID NO: 3295203 - RNA, 11 nt, Variola virus
auaucauauau

SEQ ID NO: 3295204 - RNA, 20 nt, Variola virus
uguauauaucaugaugauuu

SEQ ID NO: 3295205 - RNA, 12 nt, Variola virus
auuaucaguaau

SEQ ID NO: 3295206 - RNA, 18 nt, Variola virus
ugggacuauauaauuuug

SEQ ID NO: 3295207 - RNA, 18 nt, Variola virus
augaucuauauguuuuau

SEQ ID NO: 3295208 - RNA, 23 nt, Variola virus
acaucggugagugauaugccuau

SEQ ID NO: 3295209 - RNA, 18 nt, Variola virus
aaguauccauuuagcaaa

SEQ ID NO: 3295210 - RNA, 20 nt, Variola virus
augaaauaucuuaaggagaa

SEQ ID NO: 3295211 - RNA, 14 nt, Variola virus
gaaauaauauuaaa

SEQ ID NO: 3295212 - RNA, 17 nt, Variola virus
aaucauguaaauguuua

SEQ ID NO: 3295213 - RNA, 23 nt, Variola virus
cuaucgaaaauugcuauuucaga

SEQ ID NO: 3295214 - RNA, 14 nt, Variola virus
uauuaccuuaauaa

SEQ ID NO: 3295215 - RNA, 21 nt, Variola virus
cuuuaucucuuaguaaguuua

SEQ ID NO: 3295216 - RNA, 18 nt, Variola virus
aguuuauaauaacaagua

SEQ ID NO: 3295217 - RNA, 18 nt, Variola virus
aguucccgcauuaaauaa

SEQ ID NO: 3295218 - RNA, 15 nt, Variola virus
auauuacguaauaga

SEQ ID NO: 3295219 - RNA, 15 nt, Variola virus
uuuaagaauagacag

SEQ ID NO: 3295220 - RNA, 21 nt, Variola virus
uauuuuugacgaugucaagau

SEQ ID NO: 3295221 - RNA, 14 nt, Variola virus
gauaaaguuaucau

SEQ ID NO: 3295222 - RNA, 16 nt, Variola virus
cuaagcgguaaauaau

SEQ ID NO: 3295223 - RNA, 22 nt, Variola virus
cuccagacuuuauaauuucauc

SEQ ID NO: 3295224 - RNA, 19 nt, Variola virus
aucaaggacaguuaaaacu

SEQ ID NO: 3295225 - RNA, 17 nt, Variola virus
uaguuuauuccaaucau

SEQ ID NO: 3295226 - RNA, 19 nt, Variola virus
cuauugaugacacuaguua

SEQ ID NO: 3295227 - RNA, 13 nt, Variola virus
auucacaaauaua

SEQ ID NO: 3295228 - RNA, 17 nt, Variola virus
gguugcagaauauagac

SEQ ID NO: 3295229 - RNA, 13 nt, Variola virus
aacauguuccauu

SEQ ID NO: 3295230 - RNA, 20 nt, Variola virus
ucguauuucauaaaaguuau

SEQ ID NO: 3295231 - RNA, 17 nt, Variola virus
uuaaaacuguuuaagaa

SEQ ID NO: 3295232 - RNA, 14 nt, Variola virus
uuuaguauaaacag

SEQ ID NO: 3295233 - RNA, 22 nt, Variola virus
agcuguuuaucuauacuauuaa

SEQ ID NO: 3295234 - RNA, 18 nt, Variola virus
aaagaccgaauacauaac

SEQ ID NO: 3295235 - RNA, 18 nt, Variola virus
cauaucauacaugauauu

SEQ ID NO: 3295236 - RNA, 17 nt, Variola virus
uuuuaaauccuguauca

SEQ ID NO: 3295237 - RNA, 14 nt, Variola virus
uauuguuacacaac

SEQ ID NO: 3295238 - RNA, 13 nt, Variola virus
gaauauuauaauu

SEQ ID NO: 3295239 - RNA, 19 nt, Variola virus
augaaauauguagucguga

SEQ ID NO: 3295240 - RNA, 24 nt, Variola virus
uauauaagacacagaaauacugua

SEQ ID NO: 3295241 - RNA, 19 nt, Variola virus
guacagaauuaauuagacg

SEQ ID NO: 3295242 - RNA, 20 nt, Variola virus
uaaaacauucucgacuuauu

SEQ ID NO: 3295243 - RNA, 19 nt, Variola virus
ugaggaaauaaaucauaua

SEQ ID NO: 3295244 - RNA, 12 nt, Variola virus
uacauaauauua

SEQ ID NO: 3295245 - RNA, 12 nt, Variola virus
caaaaugauaua

SEQ ID NO: 3295246 - RNA, 22 nt, Variola virus
guagaauuguuugagauauguu

SEQ ID NO: 3295247 - RNA, 15 nt, Variola virus
uuaacagauguagua

SEQ ID NO: 3295248 - RNA, 12 nt, Variola virus
aacaguguguaa

SEQ ID NO: 3295249 - RNA, 21 nt, Variola virus
guagacgagccuagaaaucaa

SEQ ID NO: 3295250 - RNA, 22 nt, Variola virus
ugagauacuaacacauuucaac

SEQ ID NO: 3295251 - RNA, 23 nt, Variola virus
uuaacgucuaccgaaacaucguu

SEQ ID NO: 3295252 - RNA, 17 nt, Variola virus
auuaaacucuacauaau

SEQ ID NO: 3295253 - RNA, 13 nt, Variola virus
cauaagcaucucc

SEQ ID NO: 3295254 - RNA, 18 nt, Variola virus
uacaauauucauauccuu

SEQ ID NO: 3295255 - RNA, 18 nt, Variola virus
cguaucuauaaucaucug

SEQ ID NO: 3295256 - RNA, 14 nt, Variola virus
auaccauuucuagu

SEQ ID NO: 3295257 - RNA, 16 nt, Variola virus
uccaucuacuuuucca

SEQ ID NO: 3295258 - RNA, 15 nt, Variola virus
uaaguauaacacaaa

SEQ ID NO: 3295259 - RNA, 12 nt, Variola virus
ugaaaauuggag

SEQ ID NO: 3295260 - RNA, 18 nt, Variola virus
acuauaaauggagaaugu

SEQ ID NO: 3295261 - RNA, 20 nt, Variola virus
gaagaucgcguuaaucaugu

SEQ ID NO: 3295262 - RNA, 22 nt, Variola virus
cauuagccacguucacuguaaa

SEQ ID NO: 3295263 - RNA, 21 nt, Variola virus
auuaacgaguucaaauaugaa

SEQ ID NO: 3295264 - RNA, 14 nt, Variola virus
cagaaucuagauuc

SEQ ID NO: 3295265 - RNA, 18 nt, Variola virus
agauaugauaaaacuauu

SEQ ID NO: 3295266 - RNA, 16 nt, Variola virus
aggcaguuaaggauaa

SEQ ID NO: 3295267 - RNA, 17 nt, Variola virus
aguaagugucauuuaac

SEQ ID NO: 3295268 - RNA, 17 nt, Variola virus
acauaacagauaguuua

SEQ ID NO: 3295269 - RNA, 21 nt, Variola virus
uguaaaggauauuauauguug

SEQ ID NO: 3295270 - RNA, 22 nt, Variola virus
auaucugauuuuucuucauuua

SEQ ID NO: 3295271 - RNA, 12 nt, Variola virus
aacgugucaucu

SEQ ID NO: 3295272 - RNA, 14 nt, Variola virus
auccugauauuaau

SEQ ID NO: 3295273 - RNA, 21 nt, Variola virus
aauugucuagauaaaauacug

SEQ ID NO: 3295274 - RNA, 20 nt, Variola virus
guuuuacguuauuaaucauc

SEQ ID NO: 3295275 - RNA, 14 nt, Variola virus
aaauauuaauaaca

SEQ ID NO: 3295276 - RNA, 15 nt, Variola virus
aucagaucaaaauua

SEQ ID NO: 3295277 - RNA, 20 nt, Variola virus
uaaauaucauaaucuaaaau

SEQ ID NO: 3295278 - RNA, 18 nt, Variola virus
auuaauauuacuguuaau

SEQ ID NO: 3295279 - RNA, 12 nt, Variola virus
aacuuucuagaa

SEQ ID NO: 3295280 - RNA, 13 nt, Variola virus
aucguuacaaaag

SEQ ID NO: 3295281 - RNA, 18 nt, Variola virus
cuaucccccguauuuaca

SEQ ID NO: 3295282 - RNA, 17 nt, Variola virus
uuuaaaguaaacuucgu

SEQ ID NO: 3295283 - RNA, 17 nt, Variola virus
agauguuaaaugaauua

SEQ ID NO: 3295284 - RNA, 19 nt, Variola virus
gguaauagauuuuucauau

SEQ ID NO: 3295285 - RNA, 13 nt, Variola virus
agcugaaaugaga

SEQ ID NO: 3295286 - RNA, 22 nt, Variola virus
guuuaacaauaaaauuaaucac

SEQ ID NO: 3295287 - RNA, 14 nt, Variola virus
uauaccauuaaaaa

SEQ ID NO: 3295288 - RNA, 14 nt, Variola virus
uaccacuagcaaaa

SEQ ID NO: 3295289 - RNA, 14 nt, Variola virus
cuacauuuggauuu

SEQ ID NO: 3295290 - RNA, 22 nt, Variola virus
guacaaauucuuggauauauga

SEQ ID NO: 3295291 - RNA, 13 nt, Variola virus
caauuccaaagau

SEQ ID NO: 3295292 - RNA, 23 nt, Variola virus
auuacaaaucuagagguagaacu

SEQ ID NO: 3295293 - RNA, 20 nt, Variola virus
uaaguuuauaaauuccacaa

SEQ ID NO: 3295294 - RNA, 14 nt, Variola virus
uugagaaaacauuu

SEQ ID NO: 3295295 - RNA, 23 nt, Variola virus
aaauaauguaagaaauaauauua

SEQ ID NO: 3295296 - RNA, 21 nt, Variola virus
uuugauaaagauagaugauga

SEQ ID NO: 3295297 - RNA, 18 nt, Variola virus
uguauacaccaacuguau

SEQ ID NO: 3295298 - RNA, 13 nt, Variola virus
uaccauucaauau

SEQ ID NO: 3295299 - RNA, 16 nt, Variola virus
uucuacaacauuauua

SEQ ID NO: 3295300 - RNA, 19 nt, Variola virus
ucauuuauugauaauaacu

SEQ ID NO: 3295301 - RNA, 15 nt, Variola virus
aaauagauagaacua

SEQ ID NO: 3295302 - RNA, 13 nt, Variola virus
aggaauauaacgu

SEQ ID NO: 3295303 - RNA, 16 nt, Variola virus
acgauuauuucuaaau

SEQ ID NO: 3295304 - RNA, 13 nt, Variola virus
auauaauucuuua

SEQ ID NO: 3295305 - RNA, 16 nt, Variola virus
uccauuaaauaaugua

SEQ ID NO: 3295306 - RNA, 19 nt, Variola virus
uauaacguuaugaaacgaa

SEQ ID NO: 3295307 - RNA, 12 nt, Variola virus
gaaaauaaugac

SEQ ID NO: 3295308 - RNA, 15 nt, Variola virus
aacccagauaauaac

SEQ ID NO: 3295309 - RNA, 21 nt, Variola virus
ugaaaauuaugugaaacagac

SEQ ID NO: 3295310 - RNA, 20 nt, Variola virus
auuuucaaaagauaguuuuc

SEQ ID NO: 3295311 - RNA, 16 nt, Variola virus
caaaaagauauaaaau

SEQ ID NO: 3295312 - RNA, 19 nt, Variola virus
uaauauucguauuuugcau

SEQ ID NO: 3295313 - RNA, 13 nt, Variola virus
cacagaaauacug

SEQ ID NO: 3295314 - RNA, 22 nt, Variola virus
ugcucuagauacugcaaaacuu

SEQ ID NO: 3295315 - RNA, 14 nt, Variola virus
uuucauguucgaaa

SEQ ID NO: 3295316 - RNA, 14 nt, Variola virus
caaauauuauacau

SEQ ID NO: 3295317 - RNA, 11 nt, Variola virus
aauuuguacau

SEQ ID NO: 3295318 - RNA, 15 nt, Variola virus
aacucguaaaaagau

SEQ ID NO: 3295319 - RNA, 13 nt, Variola virus
aucuaauauaauu

SEQ ID NO: 3295320 - RNA, 22 nt, Variola virus
uaaugcagggugcauauuauua

SEQ ID NO: 3295321 - RNA, 17 nt, Variola virus
uauuucaggaacaggau

SEQ ID NO: 3295322 - RNA, 13 nt, Variola virus
uauccauacauac

SEQ ID NO: 3295323 - RNA, 17 nt, Variola virus
uuagcaaaguuauuaau

SEQ ID NO: 3295324 - RNA, 16 nt, Variola virus
uuauaauauacauaag

SEQ ID NO: 3295325 - RNA, 20 nt, Variola virus
uauuucugucauuaaaucuu

SEQ ID NO: 3295326 - RNA, 18 nt, Variola virus
gacguguuaauaaaaaca

SEQ ID NO: 3295327 - RNA, 15 nt, Variola virus
ugaggugguugcaga

SEQ ID NO: 3295328 - RNA, 21 nt, Variola virus
auguauaauauaaaaacauua

SEQ ID NO: 3295329 - RNA, 14 nt, Variola virus
ugaauauuaaacac

SEQ ID NO: 3295330 - RNA, 17 nt, Variola virus
aacacacgaugaaaaug

SEQ ID NO: 3295331 - RNA, 18 nt, Variola virus
cuguauuggauguaugca

SEQ ID NO: 3295332 - RNA, 13 nt, Variola virus
cuucuagauaucc

SEQ ID NO: 3295333 - RNA, 19 nt, Variola virus
auugauccuagaacuagau

SEQ ID NO: 3295334 - RNA, 22 nt, Variola virus
uuucaauauauuacgguaucua

SEQ ID NO: 3295335 - RNA, 16 nt, Variola virus
auuacguucuaccaau

SEQ ID NO: 3295336 - RNA, 12 nt, Variola virus
aaucaaauacuu

SEQ ID NO: 3295337 - RNA, 14 nt, Variola virus
uuaauggaaacuau

SEQ ID NO: 3295338 - RNA, 19 nt, Variola virus
agauaguccagaaauggaa

SEQ ID NO: 3295339 - RNA, 13 nt, Variola virus
auccuucagaauc

SEQ ID NO: 3295340 - RNA, 20 nt, Variola virus
acucuuggucuaauacugau

SEQ ID NO: 3295341 - RNA, 13 nt, Variola virus
uacgaauaaaaga

SEQ ID NO: 3295342 - RNA, 21 nt, Variola virus
aaucaaaucucuaucgucaca

SEQ ID NO: 3295343 - RNA, 23 nt, Variola virus
auagguguaaaucuagaaauuac

SEQ ID NO: 3295344 - RNA, 20 nt, Variola virus
cuguaucaaccggauuuaaa

SEQ ID NO: 3295345 - RNA, 15 nt, Variola virus
agaauauaaaaaauu

SEQ ID NO: 3295346 - RNA, 19 nt, Variola virus
aucuuauauacacauaauu

SEQ ID NO: 3295347 - RNA, 17 nt, Variola virus
uauuaacccaagcagca

SEQ ID NO: 3295348 - RNA, 17 nt, Variola virus
ugaaguuaugacauuca

SEQ ID NO: 3295349 - RNA, 24 nt, Variola virus
ucuauauauacacuacaauuuagu

SEQ ID NO: 3295350 - RNA, 19 nt, Variola virus
auucagaacucaacucauc

SEQ ID NO: 3295351 - RNA, 19 nt, Variola virus
uauaugcccuauuaucaua

SEQ ID NO: 3295352 - RNA, 15 nt, Variola virus
uuuauaacgaaguag

SEQ ID NO: 3295353 - RNA, 14 nt, Variola virus
uagaaaaaauuacu

SEQ ID NO: 3295354 - RNA, 18 nt, Variola virus
gcaaaacauuauaauaau

SEQ ID NO: 3295355 - RNA, 14 nt, Variola virus
uucauugucauuaa

SEQ ID NO: 3295356 - RNA, 14 nt, Variola virus
uacuagcauauuug

SEQ ID NO: 3295357 - RNA, 23 nt, Variola virus
auuaauauuacuguuaauaacug

SEQ ID NO: 3295358 - RNA, 19 nt, Variola virus
uacaggaguucaguuuuau

SEQ ID NO: 3295359 - RNA, 23 nt, Variola virus
ucauuuuccagaugauauguaug

SEQ ID NO: 3295360 - RNA, 15 nt, Variola virus
ucuagagauuguacu

SEQ ID NO: 3295361 - RNA, 17 nt, Variola virus
cauuuuuuaaguauuug

SEQ ID NO: 3295362 - RNA, 19 nt, Variola virus
aaaaagcuccauauuacaa

SEQ ID NO: 3295363 - RNA, 18 nt, Variola virus
uuauuaaaggaacuaaag

SEQ ID NO: 3295364 - RNA, 16 nt, Variola virus
uagucaucucauuaac

SEQ ID NO: 3295365 - RNA, 21 nt, Variola virus
ucaaaugccuuccaaaguuua

SEQ ID NO: 3295366 - RNA, 21 nt, Variola virus
uuaccaucuucuuugauuaau

SEQ ID NO: 3295367 - RNA, 14 nt, Variola virus
cucauuauuuccca

SEQ ID NO: 3295368 - RNA, 18 nt, Variola virus
cgagauacccaauagaau

SEQ ID NO: 3295369 - RNA, 18 nt, Variola virus
guuaucaaaauauguaga

SEQ ID NO: 3295370 - RNA, 16 nt, Variola virus
gucauagaugaaauac

SEQ ID NO: 3295371 - RNA, 19 nt, Variola virus
gaauauuuugauaaugaac

SEQ ID NO: 3295372 - RNA, 16 nt, Variola virus
gacaaugaauugcaua

SEQ ID NO: 3295373 - RNA, 23 nt, Variola virus
aauacuugacugacuuaaaacuu

SEQ ID NO: 3295374 - RNA, 19 nt, Variola virus
aucacagucuguuuuggua

SEQ ID NO: 3295375 - RNA, 14 nt, Variola virus
aauaguaaaaucua

SEQ ID NO: 3295376 - RNA, 11 nt, Variola virus
gagguauauau

SEQ ID NO: 3295377 - RNA, 16 nt, Variola virus
auaccacuuaaugaca

SEQ ID NO: 3295378 - RNA, 19 nt, Variola virus
uccauauuuugcaauuucu

SEQ ID NO: 3295379 - RNA, 17 nt, Variola virus
ucugaauuuagauaguu

SEQ ID NO: 3295380 - RNA, 16 nt, Variola virus
acugaucccuaauuuc

SEQ ID NO: 3295381 - RNA, 22 nt, Variola virus
aaacuuucuagaacauacugag

SEQ ID NO: 3295382 - RNA, 15 nt, Variola virus
gauauauuaaacaac

SEQ ID NO: 3295383 - RNA, 24 nt, Variola virus
uacuccaaaaaacaaaauaacuag

SEQ ID NO: 3295384 - RNA, 16 nt, Variola virus
uguuuaaauuuuucua

SEQ ID NO: 3295385 - RNA, 17 nt, Variola virus
ugguuuagauauuccua

SEQ ID NO: 3295386 - RNA, 14 nt, Variola virus
uuaaucaauguaca

SEQ ID NO: 3295387 - RNA, 18 nt, Variola virus
cuaguuuucuaaguucua

SEQ ID NO: 3295388 - RNA, 14 nt, Variola virus
acucuuauuauaga

SEQ ID NO: 3295389 - RNA, 22 nt, Variola virus
auagaccgucuacaagaaacuu

SEQ ID NO: 3295390 - RNA, 12 nt, Variola virus
cagauagaaaau

SEQ ID NO: 3295391 - RNA, 17 nt, Variola virus
guucguaaauaauaacu

SEQ ID NO: 3295392 - RNA, 21 nt, Variola virus
acuagacguuuauucucaaau

SEQ ID NO: 3295393 - RNA, 23 nt, Variola virus
gauauaucaaaauuagacuggag

SEQ ID NO: 3295394 - RNA, 16 nt, Variola virus
agagauaauagaaaau

SEQ ID NO: 3295395 - RNA, 14 nt, Variola virus
uuaauccaaauaug

SEQ ID NO: 3295396 - RNA, 16 nt, Variola virus
uauaauucuccugaaa

SEQ ID NO: 3295397 - RNA, 17 nt, Variola virus
gauauugauaucuuuuu

SEQ ID NO: 3295398 - RNA, 15 nt, Variola virus
aguuuuuacacauag

SEQ ID NO: 3295399 - RNA, 23 nt, Variola virus
uauuaacuacggauaacaaaaua

SEQ ID NO: 3295400 - RNA, 17 nt, Variola virus
auacagaaggaaacuuc

SEQ ID NO: 3295401 - RNA, 15 nt, Variola virus
cuucaauaaaaugaa

SEQ ID NO: 3295402 - RNA, 21 nt, Variola virus
aauauauguaaucauuaucca

SEQ ID NO: 3295403 - RNA, 15 nt, Variola virus
gcauuggaagcaacu

SEQ ID NO: 3295404 - RNA, 20 nt, Variola virus
cacugucuggcaauaaauga

SEQ ID NO: 3295405 - RNA, 17 nt, Variola virus
auaacgagaauaucaca

SEQ ID NO: 3295406 - RNA, 14 nt, Variola virus
guaagcauuuccuu

SEQ ID NO: 3295407 - RNA, 15 nt, Variola virus
aauauuauaauacca

SEQ ID NO: 3295408 - RNA, 17 nt, Variola virus
acuucucaguucaauaa

SEQ ID NO: 3295409 - RNA, 20 nt, Variola virus
guaaagacaccgaauacaaa

SEQ ID NO: 3295410 - RNA, 15 nt, Variola virus
aguauuguuuaauaa

SEQ ID NO: 3295411 - RNA, 17 nt, Variola virus
uaaacucacauuucaaa

SEQ ID NO: 3295412 - RNA, 21 nt, Variola virus
agaguauaaaacauuaaaugu

SEQ ID NO: 3295413 - RNA, 14 nt, Variola virus
gcuugaaaauggac

SEQ ID NO: 3295414 - RNA, 22 nt, Variola virus
uaagcaucuuggaaacauaaaa

SEQ ID NO: 3295415 - RNA, 20 nt, Variola virus
cuuccacuguccaaaaugau

SEQ ID NO: 3295416 - RNA, 17 nt, Variola virus
auaucggaauaaguaga

SEQ ID NO: 3295417 - RNA, 18 nt, Variola virus
uacaugagcugaaugaca

SEQ ID NO: 3295418 - RNA, 17 nt, Variola virus
guagauaguuaccaucu

SEQ ID NO: 3295419 - RNA, 20 nt, Variola virus
auuuugggcaaaucuaaaua

SEQ ID NO: 3295420 - RNA, 18 nt, Variola virus
uguauccggcaauauuua

SEQ ID NO: 3295421 - RNA, 18 nt, Variola virus
auuauucauuuucuauuu

SEQ ID NO: 3295422 - RNA, 12 nt, Variola virus
aaccuucuuauu

SEQ ID NO: 3295423 - RNA, 22 nt, Variola virus
ucuaggcgguggauauuucuga

SEQ ID NO: 3295424 - RNA, 14 nt, Variola virus
uuuagucgagauau

SEQ ID NO: 3295425 - RNA, 17 nt, Variola virus
acauacucuaauaggug

SEQ ID NO: 3295426 - RNA, 20 nt, Variola virus
auccaauguguuuaauauau

SEQ ID NO: 3295427 - RNA, 17 nt, Variola virus
agaaugugauaagaucg

SEQ ID NO: 3295428 - RNA, 13 nt, Variola virus
auccauuucuaga

SEQ ID NO: 3295429 - RNA, 21 nt, Variola virus
auauuuuugauggguaagcca

SEQ ID NO: 3295430 - RNA, 20 nt, Variola virus
uauuaugcgauguaaucaua

SEQ ID NO: 3295431 - RNA, 21 nt, Variola virus
cgugguguuaugaaacaugua

SEQ ID NO: 3295432 - RNA, 20 nt, Variola virus
acauauuuguuugauaauua

SEQ ID NO: 3295433 - RNA, 14 nt, Variola virus
auaauagaaaauga

SEQ ID NO: 3295434 - RNA, 19 nt, Variola virus
guauggaauauaauaaucu

SEQ ID NO: 3295435 - RNA, 23 nt, Variola virus
auguuuacggcugcguuaaacau

SEQ ID NO: 3295436 - RNA, 18 nt, Variola virus
gaugcugguuauuacaca

SEQ ID NO: 3295437 - RNA, 20 nt, Variola virus
aaaaauuagaucaaagaaua

SEQ ID NO: 3295438 - RNA, 23 nt, Variola virus
cguuuauacaucgaauauaaaau

SEQ ID NO: 3295439 - RNA, 21 nt, Variola virus
uuaaucaaaugguaaauacug

SEQ ID NO: 3295440 - RNA, 19 nt, Variola virus
ccuaauacaucucuggaaa

SEQ ID NO: 3295441 - RNA, 15 nt, Variola virus
uggugcauucauagc

SEQ ID NO: 3295442 - RNA, 15 nt, Variola virus
caaauaauauucucu

SEQ ID NO: 3295443 - RNA, 13 nt, Variola virus
ggccaaaaugaua

SEQ ID NO: 3295444 - RNA, 16 nt, Variola virus
uuacuuuguggaugau

SEQ ID NO: 3295445 - RNA, 14 nt, Variola virus
uaauauuguuaauu

SEQ ID NO: 3295446 - RNA, 23 nt, Variola virus
aaugauuacuaacgcaacuauau

SEQ ID NO: 3295447 - RNA, 17 nt, Variola virus
agagguagcaagaagau

SEQ ID NO: 3295448 - RNA, 16 nt, Variola virus
uuacucgguuaccauu

SEQ ID NO: 3295449 - RNA, 16 nt, Variola virus
uuauaguuaacauuuu

SEQ ID NO: 3295450 - RNA, 14 nt, Variola virus
caaauuuuacuaca

SEQ ID NO: 3295451 - RNA, 17 nt, Variola virus
gaugagguaaaaaauaa

SEQ ID NO: 3295452 - RNA, 22 nt, Variola virus
auuuggcaguacucauuaauaa

SEQ ID NO: 3295453 - RNA, 21 nt, Variola virus
uguuuaaugaauuacuaaaau

SEQ ID NO: 3295454 - RNA, 15 nt, Variola virus
aguuuguuuuggaaa

SEQ ID NO: 3295455 - RNA, 16 nt, Variola virus
acuagauuauacaaug

SEQ ID NO: 3295456 - RNA, 18 nt, Variola virus
gcuugauaauuagauaua

SEQ ID NO: 3295457 - RNA, 22 nt, Variola virus
auucucaucuaucaucuccaca

SEQ ID NO: 3295458 - RNA, 23 nt, Variola virus
gaacucccacccaugauaaugaa

SEQ ID NO: 3295459 - RNA, 18 nt, Variola virus
auucgaaauuagaaagua

SEQ ID NO: 3295460 - RNA, 21 nt, Variola virus
acauucuuaaccauauaucca

SEQ ID NO: 3295461 - RNA, 18 nt, Variola virus
uuauuucaaaauuauuua

SEQ ID NO: 3295462 - RNA, 19 nt, Variola virus
auauuaaaauucacacauu

SEQ ID NO: 3295463 - RNA, 21 nt, Variola virus
cacuucuucaacuaccaaaaa

SEQ ID NO: 3295464 - RNA, 21 nt, Variola virus
aacuuggaaacaucucuucua

SEQ ID NO: 3295465 - RNA, 16 nt, Variola virus
caugaaucuaaaagaa

SEQ ID NO: 3295466 - RNA, 12 nt, Variola virus
uauucuucauaa

SEQ ID NO: 3295467 - RNA, 20 nt, Variola virus
guaucgacaucuuuauuauu

SEQ ID NO: 3295468 - RNA, 18 nt, Variola virus
auauaccuauuaauacau

SEQ ID NO: 3295469 - RNA, 14 nt, Variola virus
aauaagaacaaagu

SEQ ID NO: 3295470 - RNA, 17 nt, Variola virus
acuaaucgauuuugcau

SEQ ID NO: 3295471 - RNA, 16 nt, Variola virus
uuagcguacacauuuu

SEQ ID NO: 3295472 - RNA, 13 nt, Variola virus
uuuuugacauauu

SEQ ID NO: 3295473 - RNA, 21 nt, Variola virus
cuacagaaggcgaacgcuaua

SEQ ID NO: 3295474 - RNA, 16 nt, Variola virus
aagaauugcaauuuug

SEQ ID NO: 3295475 - RNA, 15 nt, Variola virus
agagacggaaauagu

SEQ ID NO: 3295476 - RNA, 16 nt, Variola virus
acaagauuccuuuucu

SEQ ID NO: 3295477 - RNA, 19 nt, Variola virus
uuauaaacggguguaaaca

SEQ ID NO: 3295478 - RNA, 20 nt, Variola virus
auugugauuuaguauaguau

SEQ ID NO: 3295479 - RNA, 17 nt, Variola virus
uuaaaucccaauucaga

SEQ ID NO: 3295480 - RNA, 14 nt, Variola virus
acagauauuaucau

SEQ ID NO: 3295481 - RNA, 17 nt, Variola virus
auaacucugauuucuug

SEQ ID NO: 3295482 - RNA, 13 nt, Variola virus
ucgcagaugauga

SEQ ID NO: 3295483 - RNA, 20 nt, Variola virus
cauacauguuauuaucacac

SEQ ID NO: 3295484 - RNA, 22 nt, Variola virus
uuaauacagaguuuaauacuaa

SEQ ID NO: 3295485 - RNA, 20 nt, Variola virus
uaaaucuaacauugauuuua

SEQ ID NO: 3295486 - RNA, 17 nt, Variola virus
aguaccgauucuagaua

SEQ ID NO: 3295487 - RNA, 20 nt, Variola virus
cuuugguaauaaaauuauuc

SEQ ID NO: 3295488 - RNA, 16 nt, Variola virus
aaguaauucagacacu

SEQ ID NO: 3295489 - RNA, 23 nt, Variola virus
uaaguuacugcugcaucauauaa

SEQ ID NO: 3295490 - RNA, 16 nt, Variola virus
guaccauuugauuuuc

SEQ ID NO: 3295491 - RNA, 18 nt, Variola virus
augaauggauaccuguau

SEQ ID NO: 3295492 - RNA, 13 nt, Variola virus
caacgaaucccua

SEQ ID NO: 3295493 - RNA, 15 nt, Variola virus
auucuccuauuacau

SEQ ID NO: 3295494 - RNA, 21 nt, Variola virus
uaugacaucaacuacaaauga

SEQ ID NO: 3295495 - RNA, 22 nt, Variola virus
ccagaaaacgacgaagagcaaa

SEQ ID NO: 3295496 - RNA, 13 nt, Variola virus
cuugaaauucucc

SEQ ID NO: 3295497 - RNA, 20 nt, Variola virus
gguauugucugagaaguuua

SEQ ID NO: 3295498 - RNA, 23 nt, Variola virus
ugucuuggaagcaauuacagauu

SEQ ID NO: 3295499 - RNA, 21 nt, Variola virus
gaacucuugaagaugauuuug

SEQ ID NO: 3295500 - RNA, 23 nt, Variola virus
agagauccacugucacuggaaag

SEQ ID NO: 3295501 - RNA, 13 nt, Variola virus
auagaauaaauua

SEQ ID NO: 3295502 - RNA, 16 nt, Variola virus
uaugaggaaaaugauu

SEQ ID NO: 3295503 - RNA, 13 nt, Variola virus
auuauacuuguau

SEQ ID NO: 3295504 - RNA, 20 nt, Variola virus
ucguuauaacucgagaauau

SEQ ID NO: 3295505 - RNA, 22 nt, Variola virus
auuuuuggaagacagccgucgc

SEQ ID NO: 3295506 - RNA, 19 nt, Variola virus
ucuauaucguccuucuuaa

SEQ ID NO: 3295507 - RNA, 21 nt, Variola virus
ucguauaucaucaucugaaau

SEQ ID NO: 3295508 - RNA, 14 nt, Variola virus
guauucaauuacua

SEQ ID NO: 3295509 - RNA, 20 nt, Variola virus
uucaguaaccaaauacauau

SEQ ID NO: 3295510 - RNA, 14 nt, Variola virus
uaaauaaagaagau

SEQ ID NO: 3295511 - RNA, 16 nt, Variola virus
uuuguauaacgucuuu

SEQ ID NO: 3295512 - RNA, 23 nt, Variola virus
guaaauaguuuuacguuauuaau

SEQ ID NO: 3295513 - RNA, 13 nt, Variola virus
uacccaucuuaau

SEQ ID NO: 3295514 - RNA, 15 nt, Variola virus
aaauuauaugaccaa

SEQ ID NO: 3295515 - RNA, 20 nt, Variola virus
auaaaucauauaaaaaauga

SEQ ID NO: 3295516 - RNA, 17 nt, Variola virus
guacauuauuacauaga

SEQ ID NO: 3295517 - RNA, 17 nt, Variola virus
ucuauuguaguguauaa

SEQ ID NO: 3295518 - RNA, 20 nt, Variola virus
uuuuauauguguuugaucua

SEQ ID NO: 3295519 - RNA, 14 nt, Variola virus
auuauacacauuau

SEQ ID NO: 3295520 - RNA, 21 nt, Variola virus
gacaauauuuaguuuauucau

SEQ ID NO: 3295521 - RNA, 14 nt, Variola virus
guuuccuguauucu

SEQ ID NO: 3295522 - RNA, 19 nt, Variola virus
caauauguaucguauucua

SEQ ID NO: 3295523 - RNA, 14 nt, Variola virus
ucuuguucaauaga

SEQ ID NO: 3295524 - RNA, 21 nt, Variola virus
uaagaguguaguaucauagau

SEQ ID NO: 3295525 - RNA, 23 nt, Variola virus
aaauauauuagacaauacuacaa

SEQ ID NO: 3295526 - RNA, 16 nt, Variola virus
agaacaaauguuguag

SEQ ID NO: 3295527 - RNA, 20 nt, Variola virus
uauucucccaccguuauaua

SEQ ID NO: 3295528 - RNA, 17 nt, Variola virus
uagaauuguauaguucu

SEQ ID NO: 3295529 - RNA, 17 nt, Variola virus
agacuguuuauacaaga

SEQ ID NO: 3295530 - RNA, 15 nt, Variola virus
agaucgauagacacu

SEQ ID NO: 3295531 - RNA, 22 nt, Variola virus
augaauaucaggaaauguauaa

SEQ ID NO: 3295532 - RNA, 14 nt, Variola virus
auuagauccaagga

SEQ ID NO: 3295533 - RNA, 22 nt, Variola virus
caaggcuuuaauaucuaaauau

SEQ ID NO: 3295534 - RNA, 14 nt, Variola virus
auagacuaguguau

SEQ ID NO: 3295535 - RNA, 17 nt, Variola virus
aguauauagauaugccu

SEQ ID NO: 3295536 - RNA, 17 nt, Variola virus
uaguauagaacacaugu

SEQ ID NO: 3295537 - RNA, 20 nt, Variola virus
uuacucauuuuuuauaaaaa

SEQ ID NO: 3295538 - RNA, 14 nt, Variola virus
ucgauggucucaca

SEQ ID NO: 3295539 - RNA, 21 nt, Variola virus
aucaugaauggauuuaucauc

SEQ ID NO: 3295540 - RNA, 15 nt, Variola virus
uuuuaauuguaugua

SEQ ID NO: 3295541 - RNA, 18 nt, Variola virus
auaauccgauauaugaug

SEQ ID NO: 3295542 - RNA, 15 nt, Variola virus
uuucuaaguucuaau

SEQ ID NO: 3295543 - RNA, 15 nt, Variola virus
agagaauuauauauu

SEQ ID NO: 3295544 - RNA, 11 nt, Variola virus
aauacuauuau

SEQ ID NO: 3295545 - RNA, 13 nt, Variola virus
uccagauuacuaa

SEQ ID NO: 3295546 - RNA, 17 nt, Variola virus
guuguuaaaaaauuaag

SEQ ID NO: 3295547 - RNA, 18 nt, Variola virus
aaauggaagguauuucca

SEQ ID NO: 3295548 - RNA, 17 nt, Variola virus
uggaugaggaagugaua

SEQ ID NO: 3295549 - RNA, 16 nt, Variola virus
agucucaguuaacuga

SEQ ID NO: 3295550 - RNA, 14 nt, Variola virus
uauaugauaucuuu

SEQ ID NO: 3295551 - RNA, 21 nt, Variola virus
acugucucauacacuacagua

SEQ ID NO: 3295552 - RNA, 19 nt, Variola virus
auuaccaucguuguugaau

SEQ ID NO: 3295553 - RNA, 16 nt, Variola virus
caggagauagauaucc

SEQ ID NO: 3295554 - RNA, 14 nt, Variola virus
ucagacaaccaucu

SEQ ID NO: 3295555 - RNA, 20 nt, Variola virus
auggaacaauaaaagagaau

SEQ ID NO: 3295556 - RNA, 15 nt, Variola virus
agauuaaaaaugguu

SEQ ID NO: 3295557 - RNA, 21 nt, Variola virus
uguuucuacuccauaauacuc

SEQ ID NO: 3295558 - RNA, 20 nt, Variola virus
agaauuuucauggauguaga

SEQ ID NO: 3295559 - RNA, 17 nt, Variola virus
ugcacuugccaugauuc

SEQ ID NO: 3295560 - RNA, 17 nt, Variola virus
agaacaaugucaaaaua

SEQ ID NO: 3295561 - RNA, 17 nt, Variola virus
aggacagaaaaauguua

SEQ ID NO: 3295562 - RNA, 16 nt, Variola virus
uauacuugucaucauu

SEQ ID NO: 3295563 - RNA, 20 nt, Variola virus
cguuauuugagagaucauuu

SEQ ID NO: 3295564 - RNA, 17 nt, Variola virus
uaaugaucuauggauua

SEQ ID NO: 3295565 - RNA, 12 nt, Variola virus
aaaguauaugua

SEQ ID NO: 3295566 - RNA, 23 nt, Variola virus
guaauugacaucuauauauccuu

SEQ ID NO: 3295567 - RNA, 18 nt, Variola virus
guuaguacuacugaagaa

SEQ ID NO: 3295568 - RNA, 14 nt, Variola virus
gcuuuucucuuuua

SEQ ID NO: 3295569 - RNA, 20 nt, Variola virus
uagucaucucauuaacuauu

SEQ ID NO: 3295570 - RNA, 16 nt, Variola virus
auuugauauaaugaau

SEQ ID NO: 3295571 - RNA, 18 nt, Variola virus
ucuauuauauuuaggaua

SEQ ID NO: 3295572 - RNA, 13 nt, Variola virus
auaauauaaucua

SEQ ID NO: 3295573 - RNA, 13 nt, Variola virus
uucacguuccaga

SEQ ID NO: 3295574 - RNA, 17 nt, Variola virus
uuuaaaaacgaaucaga

SEQ ID NO: 3295575 - RNA, 18 nt, Variola virus
gauacauuauaugaugau

SEQ ID NO: 3295576 - RNA, 15 nt, Variola virus
aaugucccuuuaaga

SEQ ID NO: 3295577 - RNA, 14 nt, Variola virus
auuacaaaaucacc

SEQ ID NO: 3295578 - RNA, 15 nt, Variola virus
auugucacuacuaaa

SEQ ID NO: 3295579 - RNA, 14 nt, Variola virus
auauaaaaaaauga

SEQ ID NO: 3295580 - RNA, 15 nt, Variola virus
aauacacauaaugaa

SEQ ID NO: 3295581 - RNA, 17 nt, Variola virus
ugaauguuugaaaacau

SEQ ID NO: 3295582 - RNA, 17 nt, Variola virus
ugaaccgggaucauuau

SEQ ID NO: 3295583 - RNA, 18 nt, Variola virus
ucugauggcgacauaauu

SEQ ID NO: 3295584 - RNA, 19 nt, Variola virus
ucaacacuacccaauaaau

SEQ ID NO: 3295585 - RNA, 17 nt, Variola virus
gaacuagacaauaaugu

SEQ ID NO: 3295586 - RNA, 15 nt, Variola virus
ucuuucguuaaauau

SEQ ID NO: 3295587 - RNA, 21 nt, Variola virus
cauaauuguuagcuguuuuca

SEQ ID NO: 3295588 - RNA, 18 nt, Variola virus
cacaucgacggacaaucu

SEQ ID NO: 3295589 - RNA, 18 nt, Variola virus
cuagugcucaaacaaaau

SEQ ID NO: 3295590 - RNA, 15 nt, Variola virus
acucugaaaagaaag

SEQ ID NO: 3295591 - RNA, 14 nt, Variola virus
auuaucaaauguug

SEQ ID NO: 3295592 - RNA, 21 nt, Variola virus
ccuuuggugaauccaucucua

SEQ ID NO: 3295593 - RNA, 15 nt, Variola virus
auauuauauaaacau

SEQ ID NO: 3295594 - RNA, 15 nt, Variola virus
augguuuucacauuu

SEQ ID NO: 3295595 - RNA, 15 nt, Variola virus
auaucuuguucuaug

SEQ ID NO: 3295596 - RNA, 20 nt, Variola virus
ccauagaguauuauugucga

SEQ ID NO: 3295597 - RNA, 22 nt, Variola virus
gucauaaaaauguuuaaaucaa

SEQ ID NO: 3295598 - RNA, 15 nt, Variola virus
cuaaggguaaaauag

SEQ ID NO: 3295599 - RNA, 15 nt, Variola virus
gucuccaauauauga

SEQ ID NO: 3295600 - RNA, 22 nt, Variola virus
cucaauuucccaaauaacacca

SEQ ID NO: 3295601 - RNA, 20 nt, Variola virus
uucuuccaacucuguuuuaa

SEQ ID NO: 3295602 - RNA, 13 nt, Variola virus
uaugauucuguaa

SEQ ID NO: 3295603 - RNA, 18 nt, Variola virus
uauaaucauuauuaacuu

SEQ ID NO: 3295604 - RNA, 22 nt, Variola virus
guuuaacaaaguuauucaucgu

SEQ ID NO: 3295605 - RNA, 18 nt, Variola virus
auucuauuuuacaaauaa

SEQ ID NO: 3295606 - RNA, 19 nt, Variola virus
uugaugccggacaauagca

SEQ ID NO: 3295607 - RNA, 13 nt, Variola virus
auuauugaugcaa

SEQ ID NO: 3295608 - RNA, 12 nt, Variola virus
auaucauauucu

SEQ ID NO: 3295609 - RNA, 14 nt, Variola virus
cauaaguguauaua

SEQ ID NO: 3295610 - RNA, 15 nt, Variola virus
caauaacauaacucu

SEQ ID NO: 3295611 - RNA, 13 nt, Variola virus
cuuauuaacauuu

SEQ ID NO: 3295612 - RNA, 13 nt, Variola virus
uucuaaauuauuc

SEQ ID NO: 3295613 - RNA, 18 nt, Variola virus
uauauucagggacacuca

SEQ ID NO: 3295614 - RNA, 12 nt, Variola virus
uuccuaccaaac

SEQ ID NO: 3295615 - RNA, 17 nt, Variola virus
auaaacaaacuaauaaa

SEQ ID NO: 3295616 - RNA, 14 nt, Variola virus
aauaauuuaacaau

SEQ ID NO: 3295617 - RNA, 12 nt, Variola virus
uauaaaauacuu

SEQ ID NO: 3295618 - RNA, 20 nt, Variola virus
gacgcauuauauaguuuuua

SEQ ID NO: 3295619 - RNA, 18 nt, Variola virus
gauccauuuauaguuaua

SEQ ID NO: 3295620 - RNA, 14 nt, Variola virus
aaauuaaaaaagau

SEQ ID NO: 3295621 - RNA, 15 nt, Variola virus
caguaagaacauaau

SEQ ID NO: 3295622 - RNA, 14 nt, Variola virus
auuaaucuuuacca

SEQ ID NO: 3295623 - RNA, 14 nt, Variola virus
guuguauauuucuu

SEQ ID NO: 3295624 - RNA, 21 nt, Variola virus
uuguacgaauccaauuuuuca

SEQ ID NO: 3295625 - RNA, 18 nt, Variola virus
cugucaugauaaaaauuu

SEQ ID NO: 3295626 - RNA, 18 nt, Variola virus
uucaauaggguagugaua

SEQ ID NO: 3295627 - RNA, 21 nt, Variola virus
agaauggaaaggaaacuaucu

SEQ ID NO: 3295628 - RNA, 17 nt, Variola virus
uguuauaagauuacuua

SEQ ID NO: 3295629 - RNA, 14 nt, Variola virus
auccaagauacuua

SEQ ID NO: 3295630 - RNA, 18 nt, Variola virus
cauugagugauaaacuug

SEQ ID NO: 3295631 - RNA, 18 nt, Variola virus
cuccagauuucauaauau

SEQ ID NO: 3295632 - RNA, 20 nt, Variola virus
gauaaagacgguacuuauga

SEQ ID NO: 3295633 - RNA, 17 nt, Variola virus
aguucugcgcaaggcau

SEQ ID NO: 3295634 - RNA, 12 nt, Variola virus
aacuuuugcaua

SEQ ID NO: 3295635 - RNA, 22 nt, Variola virus
cagcuucccucuauacucucau

SEQ ID NO: 3295636 - RNA, 16 nt, Variola virus
cauagcauuaauaauu

SEQ ID NO: 3295637 - RNA, 20 nt, Variola virus
ucuaugaauauaauagaugu

SEQ ID NO: 3295638 - RNA, 20 nt, Variola virus
uccguaacggaaauuacaga

SEQ ID NO: 3295639 - RNA, 15 nt, Variola virus
cgaaauaucuuucca

SEQ ID NO: 3295640 - RNA, 22 nt, Variola virus
guuaccucguucugauaauaga

SEQ ID NO: 3295641 - RNA, 21 nt, Variola virus
uaggaaaggagugcauagaua

SEQ ID NO: 3295642 - RNA, 15 nt, Variola virus
auuaauaauauaauu

SEQ ID NO: 3295643 - RNA, 19 nt, Variola virus
cuaauuuauuucuucucuu

SEQ ID NO: 3295644 - RNA, 15 nt, Variola virus
auuuuaucaagacau

SEQ ID NO: 3295645 - RNA, 23 nt, Variola virus
auuuauuggucguccuaugcaua

SEQ ID NO: 3295646 - RNA, 14 nt, Variola virus
ugaaugaauacaga

SEQ ID NO: 3295647 - RNA, 22 nt, Variola virus
aaaucuugucugcuuaauacac

SEQ ID NO: 3295648 - RNA, 19 nt, Variola virus
gacucauaagaaagagaau

SEQ ID NO: 3295649 - RNA, 13 nt, Variola virus
auggaucuggaaa

SEQ ID NO: 3295650 - RNA, 21 nt, Variola virus
auuaugaaaauuauaaugaau

SEQ ID NO: 3295651 - RNA, 13 nt, Variola virus
uagaacuuaacuu

SEQ ID NO: 3295652 - RNA, 22 nt, Variola virus
uuaugauuaguuacgacugaaa

SEQ ID NO: 3295653 - RNA, 12 nt, Variola virus
acuucagaaauu

SEQ ID NO: 3295654 - RNA, 10 nt, Variola virus
uaucucuuuc

SEQ ID NO: 3295655 - RNA, 21 nt, Variola virus
uugauaaauagaaucagauuu

SEQ ID NO: 3295656 - RNA, 14 nt, Variola virus
aucucgucuaaauu

SEQ ID NO: 3295657 - RNA, 22 nt, Variola virus
uucugacgucguucuacauaaa

SEQ ID NO: 3295658 - RNA, 21 nt, Variola virus
gauauacccgaagauauacac

SEQ ID NO: 3295659 - RNA, 17 nt, Variola virus
cuaauucgacuaucgaa

SEQ ID NO: 3295660 - RNA, 22 nt, Variola virus
cccaaucuuguuauaaacacac

SEQ ID NO: 3295661 - RNA, 17 nt, Variola virus
aaauaaaacuauaguau

SEQ ID NO: 3295662 - RNA, 21 nt, Variola virus
ucgcccucaauuucccaaaua

SEQ ID NO: 3295663 - RNA, 21 nt, Variola virus
uauacuuuguaauauaaugau

SEQ ID NO: 3295664 - RNA, 16 nt, Variola virus
aaagguuauaguguac

SEQ ID NO: 3295665 - RNA, 23 nt, Variola virus
uucaaaagauaguuuucaucaga

SEQ ID NO: 3295666 - RNA, 15 nt, Variola virus
auacuuaaaaaauga

SEQ ID NO: 3295667 - RNA, 14 nt, Variola virus
uaaaacauuugcau

SEQ ID NO: 3295668 - RNA, 16 nt, Variola virus
acaccuaauacucugg

SEQ ID NO: 3295669 - RNA, 23 nt, Variola virus
aacacuuauuaaguucuuuuucc

SEQ ID NO: 3295670 - RNA, 22 nt, Variola virus
auuaagacgaauggcucuuccu

SEQ ID NO: 3295671 - RNA, 23 nt, Variola virus
acuagugucuagcauuuuagagc

SEQ ID NO: 3295672 - RNA, 15 nt, Variola virus
aaauauaguagaauu

SEQ ID NO: 3295673 - RNA, 15 nt, Variola virus
aaugcucugcaauaa

SEQ ID NO: 3295674 - RNA, 18 nt, Variola virus
gaugauauucaaacuaau

SEQ ID NO: 3295675 - RNA, 21 nt, Variola virus
ucuaucccccguauuuacauu

SEQ ID NO: 3295676 - RNA, 21 nt, Variola virus
uucagaaaguaauucauuaau

SEQ ID NO: 3295677 - RNA, 17 nt, Variola virus
aaacauucaaccacucu

SEQ ID NO: 3295678 - RNA, 19 nt, Variola virus
uggaaugacgaauccuguu

SEQ ID NO: 3295679 - RNA, 14 nt, Variola virus
cgcgaguauucucu

SEQ ID NO: 3295680 - RNA, 17 nt, Variola virus
cucucaucuacaaaaac

SEQ ID NO: 3295681 - RNA, 21 nt, Variola virus
auauagagaucgaaaaaagag

SEQ ID NO: 3295682 - RNA, 13 nt, Variola virus
ugauuuugaagau

SEQ ID NO: 3295683 - RNA, 12 nt, Variola virus
cuuuaucacuau

SEQ ID NO: 3295684 - RNA, 14 nt, Variola virus
aacuuuaucaucuu

SEQ ID NO: 3295685 - RNA, 14 nt, Variola virus
acuccguagagaaa

SEQ ID NO: 3295686 - RNA, 16 nt, Variola virus
cuuuaacaucacuaau

SEQ ID NO: 3295687 - RNA, 23 nt, Variola virus
aacuacuccauuuuauuguggaa

SEQ ID NO: 3295688 - RNA, 22 nt, Variola virus
agugugagaaaaaauaucuugu

SEQ ID NO: 3295689 - RNA, 13 nt, Variola virus
uaaaaauaaaagu

SEQ ID NO: 3295690 - RNA, 16 nt, Variola virus
uuggaagcaauuacag

SEQ ID NO: 3295691 - RNA, 16 nt, Variola virus
auagaucuuucauuau

SEQ ID NO: 3295692 - RNA, 13 nt, Variola virus
gcgacuaaaucag

SEQ ID NO: 3295693 - RNA, 15 nt, Variola virus
acauuuuuuaguaga

SEQ ID NO: 3295694 - RNA, 21 nt, Variola virus
guuaucaucguauaaauuaaa

SEQ ID NO: 3295695 - RNA, 19 nt, Variola virus
aauuaacgaugguuaaaau

SEQ ID NO: 3295696 - RNA, 12 nt, Variola virus
gaaaaauaauua

SEQ ID NO: 3295697 - RNA, 14 nt, Variola virus
cauaacaaauguau

SEQ ID NO: 3295698 - RNA, 14 nt, Variola virus
aaagaaccauuaca

SEQ ID NO: 3295699 - RNA, 13 nt, Variola virus
acuaaucaaugaa

SEQ ID NO: 3295700 - RNA, 16 nt, Variola virus
caaccuguauacugua

SEQ ID NO: 3295701 - RNA, 13 nt, Variola virus
caacauuccaaag

SEQ ID NO: 3295702 - RNA, 14 nt, Variola virus
gaaaucuaguucug

SEQ ID NO: 3295703 - RNA, 20 nt, Variola virus
uccgauuuaccguuacuaau

SEQ ID NO: 3295704 - RNA, 14 nt, Variola virus
auaggugaaaagau

SEQ ID NO: 3295705 - RNA, 14 nt, Variola virus
aaaagaaaauuugu

SEQ ID NO: 3295706 - RNA, 19 nt, Variola virus
acacaaaaagaaagaauau

SEQ ID NO: 3295707 - RNA, 23 nt, Variola virus
gugacuauuucguucucugaaaa

SEQ ID NO: 3295708 - RNA, 19 nt, Variola virus
aaauacauauuuuuuguaa

SEQ ID NO: 3295709 - RNA, 14 nt, Variola virus
aauugauucuauga

SEQ ID NO: 3295710 - RNA, 13 nt, Variola virus
uuaaucuuauuca

SEQ ID NO: 3295711 - RNA, 13 nt, Variola virus
uuaaacuuauucu

SEQ ID NO: 3295712 - RNA, 16 nt, Variola virus
aacaccuauaagauua

SEQ ID NO: 3295713 - RNA, 18 nt, Variola virus
aucgauaguaaugcauuc

SEQ ID NO: 3295714 - RNA, 12 nt, Variola virus
agcacaaaauaa

SEQ ID NO: 3295715 - RNA, 23 nt, Variola virus
caaauacuugauuccuaggucua

SEQ ID NO: 3295716 - RNA, 21 nt, Variola virus
uuauugggccaguauacuguu

SEQ ID NO: 3295717 - RNA, 18 nt, Variola virus
uacaacuggucauagaaa

SEQ ID NO: 3295718 - RNA, 19 nt, Variola virus
agguguguuuuuuaccauu

SEQ ID NO: 3295719 - RNA, 17 nt, Variola virus
auuaauaaugucuauau

SEQ ID NO: 3295720 - RNA, 16 nt, Variola virus
uuccuaauuaagaaaa

SEQ ID NO: 3295721 - RNA, 21 nt, Variola virus
ugaugguagucaauugauguu

SEQ ID NO: 3295722 - RNA, 20 nt, Variola virus
gagcugauuauuuauuucuu

SEQ ID NO: 3295723 - RNA, 13 nt, Variola virus
cuaucauuuugag

SEQ ID NO: 3295724 - RNA, 21 nt, Variola virus
uaaguaugucgaaucuaaacu

SEQ ID NO: 3295725 - RNA, 16 nt, Variola virus
gaugguuaaaauuaac

SEQ ID NO: 3295726 - RNA, 21 nt, Variola virus
cuugauucuaguaucuuuugu

SEQ ID NO: 3295727 - RNA, 16 nt, Variola virus
agugucguaugaugaa

SEQ ID NO: 3295728 - RNA, 22 nt, Variola virus
uuauacgaaaaaaaucauuaaa

SEQ ID NO: 3295729 - RNA, 15 nt, Variola virus
agauuucaaagaugu

SEQ ID NO: 3295730 - RNA, 17 nt, Variola virus
uccagaugcgagagaau

SEQ ID NO: 3295731 - RNA, 18 nt, Variola virus
auuggggaagguaacaau

SEQ ID NO: 3295732 - RNA, 17 nt, Variola virus
aguaugcuaaacuuuau

SEQ ID NO: 3295733 - RNA, 21 nt, Variola virus
cuucagaauauucuuuucuaa

SEQ ID NO: 3295734 - RNA, 16 nt, Variola virus
ggacaacauguuacua

SEQ ID NO: 3295735 - RNA, 13 nt, Variola virus
aauguaacaucua

SEQ ID NO: 3295736 - RNA, 16 nt, Variola virus
ccauucuaauacuuua

SEQ ID NO: 3295737 - RNA, 18 nt, Variola virus
acaaacaauuaauuaaua

SEQ ID NO: 3295738 - RNA, 17 nt, Variola virus
caagucaaagaaauacg

SEQ ID NO: 3295739 - RNA, 21 nt, Variola virus
aucuguaguauucuugucauu

SEQ ID NO: 3295740 - RNA, 16 nt, Variola virus
auuuuuagugaaacau

SEQ ID NO: 3295741 - RNA, 17 nt, Variola virus
gcgucauuguaaaggaa

SEQ ID NO: 3295742 - RNA, 12 nt, Variola virus
uucagugaagaa

SEQ ID NO: 3295743 - RNA, 16 nt, Variola virus
uguguccggaguuaga

SEQ ID NO: 3295744 - RNA, 17 nt, Variola virus
auuaacuuuaucacaau

SEQ ID NO: 3295745 - RNA, 16 nt, Variola virus
caaacacuuguaaaau

SEQ ID NO: 3295746 - RNA, 13 nt, Variola virus
ugguugcaagauc

SEQ ID NO: 3295747 - RNA, 13 nt, Variola virus
cuuuguuaaaaac

SEQ ID NO: 3295748 - RNA, 23 nt, Variola virus
aacaaacuauuuaucagaacacu

SEQ ID NO: 3295749 - RNA, 22 nt, Variola virus
gauuuuauuuaguguagauaug

SEQ ID NO: 3295750 - RNA, 21 nt, Variola virus
ucuucacuagugggaaucaau

SEQ ID NO: 3295751 - RNA, 13 nt, Variola virus
guaaagauaucua

SEQ ID NO: 3295752 - RNA, 22 nt, Variola virus
ggaauacuaauuauacacauua

SEQ ID NO: 3295753 - RNA, 14 nt, Variola virus
ugugucuacauaaa

SEQ ID NO: 3295754 - RNA, 20 nt, Variola virus
cauauguuuuaauauuuaca

SEQ ID NO: 3295755 - RNA, 17 nt, Variola virus
auauauucgaauucaaa

SEQ ID NO: 3295756 - RNA, 13 nt, Variola virus
uuagauacauagu

SEQ ID NO: 3295757 - RNA, 22 nt, Variola virus
aucugauaaauauacaauagau

SEQ ID NO: 3295758 - RNA, 22 nt, Variola virus
auauugauacguauauuaauga

SEQ ID NO: 3295759 - RNA, 15 nt, Variola virus
gucuccaucggcuuu

SEQ ID NO: 3295760 - RNA, 14 nt, Variola virus
uuuacgcuauuaaa

SEQ ID NO: 3295761 - RNA, 15 nt, Variola virus
uagacauaauaguca

SEQ ID NO: 3295762 - RNA, 21 nt, Variola virus
aaggaaugggguauggagaca

SEQ ID NO: 3295763 - RNA, 17 nt, Variola virus
ucgaggauaucauccaa

SEQ ID NO: 3295764 - RNA, 11 nt, Variola virus
aaaaaaugauc

SEQ ID NO: 3295765 - RNA, 22 nt, Variola virus
cuuuaaguuuuucguuguuaag

SEQ ID NO: 3295766 - RNA, 21 nt, Variola virus
uagaccggauacuagacaucu

SEQ ID NO: 3295767 - RNA, 15 nt, Variola virus
uaauucucuauagaa

SEQ ID NO: 3295768 - RNA, 17 nt, Variola virus
gauaaucguauacuuca

SEQ ID NO: 3295769 - RNA, 21 nt, Variola virus
uacugcaauaauuuucaaaag

SEQ ID NO: 3295770 - RNA, 16 nt, Variola virus
augacgaauugaaaau

SEQ ID NO: 3295771 - RNA, 15 nt, Variola virus
uacucagaggauuac

SEQ ID NO: 3295772 - RNA, 18 nt, Variola virus
augccucagguucaucga

SEQ ID NO: 3295773 - RNA, 17 nt, Variola virus
aaauuugaaagaacuac

SEQ ID NO: 3295774 - RNA, 16 nt, Variola virus
ccaacuuaaacaaaau

SEQ ID NO: 3295775 - RNA, 20 nt, Variola virus
ucgagaugaacauucaucug

SEQ ID NO: 3295776 - RNA, 19 nt, Variola virus
agaauuaacgaaacaaugu

SEQ ID NO: 3295777 - RNA, 20 nt, Variola virus
aucgaagugacacucuauau

SEQ ID NO: 3295778 - RNA, 19 nt, Variola virus
auuaaugcccaauuuggau

SEQ ID NO: 3295779 - RNA, 16 nt, Variola virus
ucagaaauuacaaaca

SEQ ID NO: 3295780 - RNA, 13 nt, Variola virus
gaagaagaaauaa

SEQ ID NO: 3295781 - RNA, 21 nt, Variola virus
aaguuuauacucacaaaacau

SEQ ID NO: 3295782 - RNA, 13 nt, Variola virus
augauaauaggaa

SEQ ID NO: 3295783 - RNA, 13 nt, Variola virus
auuaaacauaaau

SEQ ID NO: 3295784 - RNA, 22 nt, Variola virus
uuacgacacgcauuugaugcac

SEQ ID NO: 3295785 - RNA, 16 nt, Variola virus
gaacuguucaaaauau

SEQ ID NO: 3295786 - RNA, 22 nt, Variola virus
uaauauuggcagcguuguuuau

SEQ ID NO: 3295787 - RNA, 19 nt, Variola virus
aauccagcuagugaauaua

SEQ ID NO: 3295788 - RNA, 13 nt, Variola virus
uaaaauaaauauu

SEQ ID NO: 3295789 - RNA, 17 nt, Variola virus
acacuauucuuaaaugu

SEQ ID NO: 3295790 - RNA, 19 nt, Variola virus
agcauaaacauaauaaaca

SEQ ID NO: 3295791 - RNA, 21 nt, Variola virus
uauuacaaacauguucaaugc

SEQ ID NO: 3295792 - RNA, 19 nt, Variola virus
caaacaaguuaaugagaua

SEQ ID NO: 3295793 - RNA, 15 nt, Variola virus
ugauuucuugaacau

SEQ ID NO: 3295794 - RNA, 18 nt, Variola virus
aauaacuaaaaauguaaa

SEQ ID NO: 3295795 - RNA, 16 nt, Variola virus
ugauauauucuuuaaa

SEQ ID NO: 3295796 - RNA, 18 nt, Variola virus
caaagagaccaaugaauu

SEQ ID NO: 3295797 - RNA, 15 nt, Variola virus
gaacacguuaaacaa

SEQ ID NO: 3295798 - RNA, 14 nt, Variola virus
auccaaucauauau

SEQ ID NO: 3295799 - RNA, 16 nt, Variola virus
ccaguguauaaacgca

SEQ ID NO: 3295800 - RNA, 13 nt, Variola virus
aauauuuaauccu

SEQ ID NO: 3295801 - RNA, 22 nt, Variola virus
aacgagccaguaaucuuaccau

SEQ ID NO: 3295802 - RNA, 23 nt, Variola virus
uguaaacagauaugguguagcau

SEQ ID NO: 3295803 - RNA, 15 nt, Variola virus
uaaugaauuaguguu

SEQ ID NO: 3295804 - RNA, 22 nt, Variola virus
uacuugcacguaaagucuacau

SEQ ID NO: 3295805 - RNA, 17 nt, Variola virus
acuaucaaccacauaau

SEQ ID NO: 3295806 - RNA, 12 nt, Variola virus
uauauucaauau

SEQ ID NO: 3295807 - RNA, 14 nt, Variola virus
uaauucuacaucca

SEQ ID NO: 3295808 - RNA, 22 nt, Variola virus
ucagucuccacacuauucuuaa

SEQ ID NO: 3295809 - RNA, 16 nt, Variola virus
uucccuugucauuaaa

SEQ ID NO: 3295810 - RNA, 15 nt, Variola virus
agaauuuuagacacu

SEQ ID NO: 3295811 - RNA, 16 nt, Variola virus
caagauuccuuuucua

SEQ ID NO: 3295812 - RNA, 17 nt, Variola virus
acauccuuccaagaaga

SEQ ID NO: 3295813 - RNA, 19 nt, Variola virus
auucucaaauccgaaauua

SEQ ID NO: 3295814 - RNA, 21 nt, Variola virus
uggaaaaaugaugaauuaaug

SEQ ID NO: 3295815 - RNA, 17 nt, Variola virus
cguauucugaugauauu

SEQ ID NO: 3295816 - RNA, 17 nt, Variola virus
auaaccuagaaaauaua

SEQ ID NO: 3295817 - RNA, 14 nt, Variola virus
auucguagaaagua

SEQ ID NO: 3295818 - RNA, 20 nt, Variola virus
cuacgaaaacgaaaucugua

SEQ ID NO: 3295819 - RNA, 23 nt, Variola virus
ucuguaguuguauccguuucaga

SEQ ID NO: 3295820 - RNA, 16 nt, Variola virus
aaccagaauuguaaaa

SEQ ID NO: 3295821 - RNA, 13 nt, Variola virus
auaaauaaugaau

SEQ ID NO: 3295822 - RNA, 21 nt, Variola virus
aacuauaaguguguuguaaac

SEQ ID NO: 3295823 - RNA, 15 nt, Variola virus
auaauguuacucaau

SEQ ID NO: 3295824 - RNA, 19 nt, Variola virus
gaaaucuaucuuauauaca

SEQ ID NO: 3295825 - RNA, 23 nt, Variola virus
acguuucauuuuuugucuauaau

SEQ ID NO: 3295826 - RNA, 12 nt, Variola virus
aauacuuaaaaa

SEQ ID NO: 3295827 - RNA, 21 nt, Variola virus
uccacugagaugacuggaaau

SEQ ID NO: 3295828 - RNA, 21 nt, Variola virus
aaugagagcauauuucauuuc

SEQ ID NO: 3295829 - RNA, 21 nt, Variola virus
uaauaaauguuucgauuucaa

SEQ ID NO: 3295830 - RNA, 18 nt, Variola virus
aucuugcaaguuaaauag

SEQ ID NO: 3295831 - RNA, 17 nt, Variola virus
aacuauauauuuguaua

SEQ ID NO: 3295832 - RNA, 21 nt, Variola virus
ccuuuaaaaguaaucaugaaa

SEQ ID NO: 3295833 - RNA, 16 nt, Variola virus
acauaccguuagauaa

SEQ ID NO: 3295834 - RNA, 15 nt, Variola virus
ccauggauaaaguua

SEQ ID NO: 3295835 - RNA, 16 nt, Variola virus
uaauuauaagaaauau

SEQ ID NO: 3295836 - RNA, 16 nt, Variola virus
agaugccgguacuuau

SEQ ID NO: 3295837 - RNA, 12 nt, Variola virus
auuaaaaaagau

SEQ ID NO: 3295838 - RNA, 22 nt, Variola virus
uaccacgcaauuauauaaugua

SEQ ID NO: 3295839 - RNA, 22 nt, Variola virus
uguauccgucaaucuaauauua

SEQ ID NO: 3295840 - RNA, 20 nt, Variola virus
uaucguauuggauucugaaa

SEQ ID NO: 3295841 - RNA, 19 nt, Variola virus
cagagcagucuuucuaaag

SEQ ID NO: 3295842 - RNA, 20 nt, Variola virus
cagaaccuguguuuauagug

SEQ ID NO: 3295843 - RNA, 16 nt, Variola virus
aucuaaaauugcauuu

SEQ ID NO: 3295844 - RNA, 20 nt, Variola virus
uguaaauauccauugucuua

SEQ ID NO: 3295845 - RNA, 16 nt, Variola virus
uucuagaguacugauu

SEQ ID NO: 3295846 - RNA, 16 nt, Variola virus
aaaguauacauguuag

SEQ ID NO: 3295847 - RNA, 12 nt, Variola virus
ugucuacauaaa

SEQ ID NO: 3295848 - RNA, 18 nt, Variola virus
aguaugcagacaaaauga

SEQ ID NO: 3295849 - RNA, 21 nt, Variola virus
auuccaacaacaucaacugaa

SEQ ID NO: 3295850 - RNA, 23 nt, Variola virus
gagaucuaaagccgguguaacau

SEQ ID NO: 3295851 - RNA, 15 nt, Variola virus
guuauuauaaacucu

SEQ ID NO: 3295852 - RNA, 20 nt, Variola virus
ucuuuaguaaacauaucaua

SEQ ID NO: 3295853 - RNA, 16 nt, Variola virus
aaccaauuuguauaug

SEQ ID NO: 3295854 - RNA, 18 nt, Variola virus
guuccguaucuguauuua

SEQ ID NO: 3295855 - RNA, 22 nt, Variola virus
uauuacaagacgucauucuaaa

SEQ ID NO: 3295856 - RNA, 21 nt, Variola virus
ucucugauguuuguuuucgau

SEQ ID NO: 3295857 - RNA, 20 nt, Variola virus
uauuaacuuuguucauuuau

SEQ ID NO: 3295858 - RNA, 19 nt, Variola virus
acaaugaaccguaauauau

SEQ ID NO: 3295859 - RNA, 20 nt, Variola virus
auauucucauggaaauauua

SEQ ID NO: 3295860 - RNA, 17 nt, Variola virus
uuaaaugucauauuaau

SEQ ID NO: 3295861 - RNA, 18 nt, Variola virus
auuauucuacuaucaaag

SEQ ID NO: 3295862 - RNA, 18 nt, Variola virus
auaaaguccaacuauugu

SEQ ID NO: 3295863 - RNA, 13 nt, Variola virus
cauuguaaagccc

SEQ ID NO: 3295864 - RNA, 23 nt, Variola virus
auaucaugaugauuugguuguau

SEQ ID NO: 3295865 - RNA, 13 nt, Variola virus
cuuuaucaagcac

SEQ ID NO: 3295866 - RNA, 16 nt, Variola virus
gauuuaucuguuuugg

SEQ ID NO: 3295867 - RNA, 20 nt, Variola virus
cauuccaagucacuaugugu

SEQ ID NO: 3295868 - RNA, 14 nt, Variola virus
gaagcuauauguaa

SEQ ID NO: 3295869 - RNA, 16 nt, Variola virus
uuaccagaauacuauu

SEQ ID NO: 3295870 - RNA, 15 nt, Variola virus
ugaacgauaauaacu

SEQ ID NO: 3295871 - RNA, 13 nt, Variola virus
ugaaauagaagau

SEQ ID NO: 3295872 - RNA, 21 nt, Variola virus
acagacgacagccuguaacug

SEQ ID NO: 3295873 - RNA, 16 nt, Variola virus
uuauaacuuauugucu

SEQ ID NO: 3295874 - RNA, 14 nt, Variola virus
agauguaaauauau

SEQ ID NO: 3295875 - RNA, 13 nt, Variola virus
aauacuggauaaa

SEQ ID NO: 3295876 - RNA, 15 nt, Variola virus
ucagagaacuucugc

SEQ ID NO: 3295877 - RNA, 15 nt, Variola virus
gaaaugguacaauca

SEQ ID NO: 3295878 - RNA, 13 nt, Variola virus
auuccuugauauc

SEQ ID NO: 3295879 - RNA, 11 nt, Variola virus
ucaaauuauua

SEQ ID NO: 3295880 - RNA, 16 nt, Variola virus
cggcugcguuaaacau

SEQ ID NO: 3295881 - RNA, 14 nt, Variola virus
acgcagauagcuau

SEQ ID NO: 3295882 - RNA, 18 nt, Variola virus
aaugcucaguaaauguau

SEQ ID NO: 3295883 - RNA, 16 nt, Variola virus
ugguuuccuuaucauu

SEQ ID NO: 3295884 - RNA, 14 nt, Variola virus
agauuuuaauguau

SEQ ID NO: 3295885 - RNA, 16 nt, Variola virus
uucugucaacaauguc

SEQ ID NO: 3295886 - RNA, 20 nt, Variola virus
ugacuguagaacucaugaau

SEQ ID NO: 3295887 - RNA, 22 nt, Variola virus
gcuugcauuacagaauaauauu

SEQ ID NO: 3295888 - RNA, 17 nt, Variola virus
ucuauuguuuguuuuaa

SEQ ID NO: 3295889 - RNA, 16 nt, Variola virus
uuuuagaaaauucuaa

SEQ ID NO: 3295890 - RNA, 21 nt, Variola virus
agucacgauaucucuuaaaug

SEQ ID NO: 3295891 - RNA, 19 nt, Variola virus
uaugucuguacaaauguua

SEQ ID NO: 3295892 - RNA, 14 nt, Variola virus
ugaggaaauugaua

SEQ ID NO: 3295893 - RNA, 22 nt, Variola virus
auugucuauaucuaaaaucaua

SEQ ID NO: 3295894 - RNA, 16 nt, Variola virus
uaguuuaucauacuua

SEQ ID NO: 3295895 - RNA, 13 nt, Variola virus
acucucgauaaau

SEQ ID NO: 3295896 - RNA, 21 nt, Variola virus
uauggaugccaacguaguauc

SEQ ID NO: 3295897 - RNA, 16 nt, Variola virus
guguguaacacuuuua

SEQ ID NO: 3295898 - RNA, 19 nt, Variola virus
guuuaaauucuuuaauauc

SEQ ID NO: 3295899 - RNA, 21 nt, Variola virus
cuaauguauagauuguuuuca

SEQ ID NO: 3295900 - RNA, 19 nt, Variola virus
auaccauggaaaaauauua

SEQ ID NO: 3295901 - RNA, 14 nt, Variola virus
aaagguaagaguua

SEQ ID NO: 3295902 - RNA, 12 nt, Variola virus
uacaacuaguga

SEQ ID NO: 3295903 - RNA, 20 nt, Variola virus
uuauaugcuugcauuacaga

SEQ ID NO: 3295904 - RNA, 15 nt, Variola virus
ucgauuuuuagauuu

SEQ ID NO: 3295905 - RNA, 13 nt, Variola virus
ccuguaacaaaaa

SEQ ID NO: 3295906 - RNA, 23 nt, Variola virus
acuuuuauuauggcgucuaagau

SEQ ID NO: 3295907 - RNA, 13 nt, Variola virus
agaaacagaacua

SEQ ID NO: 3295908 - RNA, 18 nt, Variola virus
uaugacuguauuuggauc

SEQ ID NO: 3295909 - RNA, 22 nt, Variola virus
cuuuaacgcccuuguauguuuu

SEQ ID NO: 3295910 - RNA, 22 nt, Variola virus
cuggucuaaaauuuccaucucu

SEQ ID NO: 3295911 - RNA, 21 nt, Variola virus
aauauuauuaccaucuuccgc

SEQ ID NO: 3295912 - RNA, 15 nt, Variola virus
auaacaaguaugaca

SEQ ID NO: 3295913 - RNA, 19 nt, Variola virus
cagguaaaaguacagaauu

SEQ ID NO: 3295914 - RNA, 17 nt, Variola virus
uuauacaguguauguaa

SEQ ID NO: 3295915 - RNA, 19 nt, Variola virus
uaccauuaaagaauucuua

SEQ ID NO: 3295916 - RNA, 12 nt, Variola virus
ccacuuaaauau

SEQ ID NO: 3295917 - RNA, 13 nt, Variola virus
ugguuucaaugag

SEQ ID NO: 3295918 - RNA, 15 nt, Variola virus
guucaaaaauuuaga

SEQ ID NO: 3295919 - RNA, 15 nt, Variola virus
auuagugacggaaaa

SEQ ID NO: 3295920 - RNA, 23 nt, Variola virus
cauaaaugagaugagaagauauu

SEQ ID NO: 3295921 - RNA, 13 nt, Variola virus
uugauuuuggaua

SEQ ID NO: 3295922 - RNA, 19 nt, Variola virus
guaauaaaauuucuauucc

SEQ ID NO: 3295923 - RNA, 18 nt, Variola virus
gauaauuuauacguauca

SEQ ID NO: 3295924 - RNA, 23 nt, Variola virus
aauauaucuauaauuugauccau

SEQ ID NO: 3295925 - RNA, 13 nt, Variola virus
auaugccuauaaa

SEQ ID NO: 3295926 - RNA, 19 nt, Variola virus
uuuuugcaggaaguauauc

SEQ ID NO: 3295927 - RNA, 13 nt, Variola virus
ccaaaucugguaa

SEQ ID NO: 3295928 - RNA, 12 nt, Variola virus
cgucaaacauua

SEQ ID NO: 3295929 - RNA, 15 nt, Variola virus
aaacgaaaacuauau

SEQ ID NO: 3295930 - RNA, 13 nt, Variola virus
aaugcauuuuaua

SEQ ID NO: 3295931 - RNA, 18 nt, Variola virus
uaaguucuuugaucucuu

SEQ ID NO: 3295932 - RNA, 15 nt, Variola virus
acacuuuauacuucu

SEQ ID NO: 3295933 - RNA, 22 nt, Variola virus
ucgggaccaauuacuaauaaag

SEQ ID NO: 3295934 - RNA, 16 nt, Variola virus
aauccgguaaauggaa

SEQ ID NO: 3295935 - RNA, 19 nt, Variola virus
aaauuuuuuauuucaguau

SEQ ID NO: 3295936 - RNA, 13 nt, Variola virus
cuauuauuuugaa

SEQ ID NO: 3295937 - RNA, 15 nt, Variola virus
aguuuuauaacgaag

SEQ ID NO: 3295938 - RNA, 19 nt, Variola virus
ucuucauaugauccaaauu

SEQ ID NO: 3295939 - RNA, 15 nt, Variola virus
ucuucuggaaccuca

SEQ ID NO: 3295940 - RNA, 20 nt, Variola virus
ucuaaaacaauaaaugcauu

SEQ ID NO: 3295941 - RNA, 19 nt, Variola virus
cuguaaauagaacauacuu

SEQ ID NO: 3295942 - RNA, 20 nt, Variola virus
guuauugguauuucuuacau

SEQ ID NO: 3295943 - RNA, 17 nt, Variola virus
caagaacuacaaaaguu

SEQ ID NO: 3295944 - RNA, 17 nt, Variola virus
uucuauggcguacaaag

SEQ ID NO: 3295945 - RNA, 14 nt, Variola virus
auacuccaaauaca

SEQ ID NO: 3295946 - RNA, 15 nt, Variola virus
gauaaaauuaaugag

SEQ ID NO: 3295947 - RNA, 13 nt, Variola virus
aaucaaaaaauaa

SEQ ID NO: 3295948 - RNA, 12 nt, Variola virus
cauaaacaaauu

SEQ ID NO: 3295949 - RNA, 13 nt, Variola virus
cucagaaacagaa

SEQ ID NO: 3295950 - RNA, 13 nt, Variola virus
gacaguaauacau

SEQ ID NO: 3295951 - RNA, 14 nt, Variola virus
aucuuuguuaaaua

SEQ ID NO: 3295952 - RNA, 13 nt, Variola virus
ugaauuguuucuu

SEQ ID NO: 3295953 - RNA, 20 nt, Variola virus
uuuaucauagucuaaagaug

SEQ ID NO: 3295954 - RNA, 16 nt, Variola virus
ucugucgaaaaaguag

SEQ ID NO: 3295955 - RNA, 19 nt, Variola virus
guagaucaaacuuaaauaa

SEQ ID NO: 3295956 - RNA, 19 nt, Variola virus
uaccuauuaauacaucgua

SEQ ID NO: 3295957 - RNA, 23 nt, Variola virus
ccggcauuauagauguguauaca

SEQ ID NO: 3295958 - RNA, 15 nt, Variola virus
ugcgauguuaauuua

SEQ ID NO: 3295959 - RNA, 17 nt, Variola virus
uuauacaagauugaaau

SEQ ID NO: 3295960 - RNA, 20 nt, Variola virus
uucuuacauauuuuuuucuu

SEQ ID NO: 3295961 - RNA, 17 nt, Variola virus
ugacuuucgaaccaauu

SEQ ID NO: 3295962 - RNA, 20 nt, Variola virus
auacuuaaaaaaugaaaaua

SEQ ID NO: 3295963 - RNA, 13 nt, Variola virus
aucacaaacauua

SEQ ID NO: 3295964 - RNA, 19 nt, Variola virus
agacauucccacaguguug

SEQ ID NO: 3295965 - RNA, 18 nt, Variola virus
aaauguccguuauauaau

SEQ ID NO: 3295966 - RNA, 18 nt, Variola virus
aucgauuauauucuaaga

SEQ ID NO: 3295967 - RNA, 17 nt, Variola virus
aguuucugguuuucuau

SEQ ID NO: 3295968 - RNA, 12 nt, Variola virus
aguucugugcag

SEQ ID NO: 3295969 - RNA, 14 nt, Variola virus
auuuacaaaaauuu

SEQ ID NO: 3295970 - RNA, 19 nt, Variola virus
ugucaacaaaaaugugaua

SEQ ID NO: 3295971 - RNA, 20 nt, Variola virus
ucauuauuacgucuguaguc

SEQ ID NO: 3295972 - RNA, 18 nt, Variola virus
cguggauaauauuucuag

SEQ ID NO: 3295973 - RNA, 21 nt, Variola virus
uucuuggcaaaagaauaccaa

SEQ ID NO: 3295974 - RNA, 15 nt, Variola virus
cuggaggaguaagaa

SEQ ID NO: 3295975 - RNA, 13 nt, Variola virus
auguaaaauaaua

SEQ ID NO: 3295976 - RNA, 17 nt, Variola virus
cuauaagccuuuguuua

SEQ ID NO: 3295977 - RNA, 12 nt, Variola virus
uaccgaaaauaa

SEQ ID NO: 3295978 - RNA, 20 nt, Variola virus
aauauaucaugcucaguaau

SEQ ID NO: 3295979 - RNA, 19 nt, Variola virus
ugacuagacugauuucucu

SEQ ID NO: 3295980 - RNA, 20 nt, Variola virus
uauuaucaauucuggauuau

SEQ ID NO: 3295981 - RNA, 20 nt, Variola virus
auuuggaauuuauuaauaca

SEQ ID NO: 3295982 - RNA, 16 nt, Variola virus
gucauauucucauaau

SEQ ID NO: 3295983 - RNA, 21 nt, Variola virus
uaguuuucucuauucugaaau

SEQ ID NO: 3295984 - RNA, 19 nt, Variola virus
uuacuuugaccacauccuu

SEQ ID NO: 3295985 - RNA, 19 nt, Variola virus
aguuucugccauuuaucca

SEQ ID NO: 3295986 - RNA, 20 nt, Variola virus
uguuuuugaacuguucaaaa

SEQ ID NO: 3295987 - RNA, 14 nt, Variola virus
uugacaaauuauuc

SEQ ID NO: 3295988 - RNA, 17 nt, Variola virus
uacucuauaaaauacua

SEQ ID NO: 3295989 - RNA, 16 nt, Variola virus
cauuuucuuacaauua

SEQ ID NO: 3295990 - RNA, 16 nt, Variola virus
uaugaagauaaacacu

SEQ ID NO: 3295991 - RNA, 15 nt, Variola virus
cucuauaaaaaugaa

SEQ ID NO: 3295992 - RNA, 21 nt, Variola virus
cuguacaaauguuaaacauua

SEQ ID NO: 3295993 - RNA, 13 nt, Variola virus
aggagaccaugga

SEQ ID NO: 3295994 - RNA, 19 nt, Variola virus
augauauauuaaacaacga

SEQ ID NO: 3295995 - RNA, 19 nt, Variola virus
acucuguuuuauuaaccga

SEQ ID NO: 3295996 - RNA, 18 nt, Variola virus
uauaaauauauaaugggu

SEQ ID NO: 3295997 - RNA, 19 nt, Variola virus
aagacuccuaccgguguau

SEQ ID NO: 3295998 - RNA, 18 nt, Variola virus
aaaaugaugcuauuagaa

SEQ ID NO: 3295999 - RNA, 23 nt, Variola virus
caacagguggaauaucaauuaau

SEQ ID NO: 3296000 - RNA, 14 nt, Variola virus
uauaaaauauucua

SEQ ID NO: 3296001 - RNA, 14 nt, Variola virus
uaacaaucuuauau

SEQ ID NO: 3296002 - RNA, 23 nt, Variola virus
uucuuagcuugugauuuuuucuu

SEQ ID NO: 3296003 - RNA, 19 nt, Variola virus
auucuacucccuuguguaa

SEQ ID NO: 3296004 - RNA, 16 nt, Variola virus
ucuuuggauauucuaa

SEQ ID NO: 3296005 - RNA, 23 nt, Variola virus
auuuuuuuauucaucaucuucug

SEQ ID NO: 3296006 - RNA, 16 nt, Variola virus
auucuugguaauuaau

SEQ ID NO: 3296007 - RNA, 15 nt, Variola virus
aaagcuauuaucaaa

SEQ ID NO: 3296008 - RNA, 17 nt, Variola virus
uacaguaaaaauaacua

SEQ ID NO: 3296009 - RNA, 13 nt, Variola virus
aguaaucaugaaa

SEQ ID NO: 3296010 - RNA, 20 nt, Variola virus
aacuccggauagagaaauau

SEQ ID NO: 3296011 - RNA, 21 nt, Variola virus
gaguacauuucacagaaacac

SEQ ID NO: 3296012 - RNA, 13 nt, Variola virus
acauaauaguuua

SEQ ID NO: 3296013 - RNA, 12 nt, Variola virus
gaauauugauuu

SEQ ID NO: 3296014 - RNA, 20 nt, Variola virus
agcgagaaauaaucauaaau

SEQ ID NO: 3296015 - RNA, 16 nt, Variola virus
uaggauuuuuccaaag

SEQ ID NO: 3296016 - RNA, 19 nt, Variola virus
cagcuauguuaucaugaaa

SEQ ID NO: 3296017 - RNA, 14 nt, Variola virus
gaagacuccuggua

SEQ ID NO: 3296018 - RNA, 17 nt, Variola virus
aagucgccucaaagaua

SEQ ID NO: 3296019 - RNA, 21 nt, Variola virus
agaauuuaccagauaucuucu

SEQ ID NO: 3296020 - RNA, 16 nt, Variola virus
acauuucucaaaugaa

SEQ ID NO: 3296021 - RNA, 21 nt, Variola virus
auaaacagucuccuaauauaa

SEQ ID NO: 3296022 - RNA, 19 nt, Variola virus
agugacacucuauaucuag

SEQ ID NO: 3296023 - RNA, 22 nt, Variola virus
aucacuaucuucaucauauuca

SEQ ID NO: 3296024 - RNA, 20 nt, Variola virus
aauauggauccgguuaauuu

SEQ ID NO: 3296025 - RNA, 21 nt, Variola virus
auuaaguucuggcaauguuuc

SEQ ID NO: 3296026 - RNA, 17 nt, Variola virus
guaauuguauuauuucc

SEQ ID NO: 3296027 - RNA, 18 nt, Variola virus
gaauacgaugauauuaaa

SEQ ID NO: 3296028 - RNA, 22 nt, Variola virus
uagaucuuccaaucuaucuauu

SEQ ID NO: 3296029 - RNA, 17 nt, Variola virus
cuauuacugacuuuaau

SEQ ID NO: 3296030 - RNA, 18 nt, Variola virus
accacuuauuacuccauu

SEQ ID NO: 3296031 - RNA, 16 nt, Variola virus
caaauaaauacucuau

SEQ ID NO: 3296032 - RNA, 19 nt, Variola virus
cucugacauucagaaagag

SEQ ID NO: 3296033 - RNA, 14 nt, Variola virus
aucauauauguauu

SEQ ID NO: 3296034 - RNA, 23 nt, Variola virus
uaaaguggaagaguauuguacag

SEQ ID NO: 3296035 - RNA, 22 nt, Variola virus
cugccuuuuuauacauauucca

SEQ ID NO: 3296036 - RNA, 13 nt, Variola virus
gaacucuguuucu

SEQ ID NO: 3296037 - RNA, 14 nt, Variola virus
aaucauauaugaua

SEQ ID NO: 3296038 - RNA, 20 nt, Variola virus
uaaacugcgccaaauugugg

SEQ ID NO: 3296039 - RNA, 15 nt, Variola virus
acugaguuuaucacu

SEQ ID NO: 3296040 - RNA, 14 nt, Variola virus
auuuauuaucuugu

SEQ ID NO: 3296041 - RNA, 17 nt, Variola virus
cauguguacuuguacac

SEQ ID NO: 3296042 - RNA, 20 nt, Variola virus
caucgucgucuacuauucua

SEQ ID NO: 3296043 - RNA, 18 nt, Variola virus
aaauuucuuuuucaaaga

SEQ ID NO: 3296044 - RNA, 17 nt, Variola virus
auucuugguuaaacuca

SEQ ID NO: 3296045 - RNA, 16 nt, Variola virus
uuaacuaucuuucaag

SEQ ID NO: 3296046 - RNA, 13 nt, Variola virus
ucaugaauacagu

SEQ ID NO: 3296047 - RNA, 19 nt, Variola virus
aucgcuacaaaacuacuau

SEQ ID NO: 3296048 - RNA, 20 nt, Variola virus
uuuuacuacauaguuaucua

SEQ ID NO: 3296049 - RNA, 13 nt, Variola virus
caaugcucaguaa

SEQ ID NO: 3296050 - RNA, 21 nt, Variola virus
caaauggauguuaauguauua

SEQ ID NO: 3296051 - RNA, 19 nt, Variola virus
aaacaauacucuacuauua

SEQ ID NO: 3296052 - RNA, 15 nt, Variola virus
auacgaaauaaacau

SEQ ID NO: 3296053 - RNA, 23 nt, Variola virus
aaguuucuuuacuguaucuacua

SEQ ID NO: 3296054 - RNA, 14 nt, Variola virus
aucagauucuauau

SEQ ID NO: 3296055 - RNA, 13 nt, Variola virus
auaacaaugacuu

SEQ ID NO: 3296056 - RNA, 14 nt, Variola virus
uuauaucacaugau

SEQ ID NO: 3296057 - RNA, 14 nt, Variola virus
auaauaucagaaug

SEQ ID NO: 3296058 - RNA, 14 nt, Variola virus
uucagaauuucuac

SEQ ID NO: 3296059 - RNA, 11 nt, Variola virus
uauucucuuuc

SEQ ID NO: 3296060 - RNA, 19 nt, Variola virus
agacggagucauaacuauu

SEQ ID NO: 3296061 - RNA, 16 nt, Variola virus
auuuaaauuuaucauc

SEQ ID NO: 3296062 - RNA, 15 nt, Variola virus
aauuauacaagagau

SEQ ID NO: 3296063 - RNA, 13 nt, Variola virus
auaugugaauaug

SEQ ID NO: 3296064 - RNA, 14 nt, Variola virus
uauuuaauaucaaa

SEQ ID NO: 3296065 - RNA, 13 nt, Variola virus
uauaaucuauaaa

SEQ ID NO: 3296066 - RNA, 19 nt, Variola virus
aaaucacuuuuuauacuaa

SEQ ID NO: 3296067 - RNA, 20 nt, Variola virus
uacaauaaacuccguagaga

SEQ ID NO: 3296068 - RNA, 23 nt, Variola virus
accuucuaaugauauauuuucca

SEQ ID NO: 3296069 - RNA, 22 nt, Variola virus
uaaaauagacaauggaauucau

SEQ ID NO: 3296070 - RNA, 18 nt, Variola virus
ugcugaugaugaauacau

SEQ ID NO: 3296071 - RNA, 17 nt, Variola virus
auauucuuuuuuauaga

SEQ ID NO: 3296072 - RNA, 22 nt, Variola virus
uuuguaaauaacuaucuauaaa

SEQ ID NO: 3296073 - RNA, 19 nt, Variola virus
ucacuagguaguaauuuga

SEQ ID NO: 3296074 - RNA, 18 nt, Variola virus
guaauaucgaauauuuua

SEQ ID NO: 3296075 - RNA, 15 nt, Variola virus
guauuccauauggau

SEQ ID NO: 3296076 - RNA, 15 nt, Variola virus
uaucauuuaaacauu

SEQ ID NO: 3296077 - RNA, 15 nt, Variola virus
ugaaauauaguaaua

SEQ ID NO: 3296078 - RNA, 23 nt, Variola virus
cuuccagaauuguaacaacaaug

SEQ ID NO: 3296079 - RNA, 17 nt, Variola virus
gcaaauguauaaaacaa

SEQ ID NO: 3296080 - RNA, 15 nt, Variola virus
uuaacagcuauucaa

SEQ ID NO: 3296081 - RNA, 19 nt, Variola virus
ugagaauccgcugcauauu

SEQ ID NO: 3296082 - RNA, 14 nt, Variola virus
aauucauuccuaua

SEQ ID NO: 3296083 - RNA, 19 nt, Variola virus
accaauuacugauaaugua

SEQ ID NO: 3296084 - RNA, 14 nt, Variola virus
auaugauuacuaga

SEQ ID NO: 3296085 - RNA, 14 nt, Variola virus
auaaaauuacuuaa

SEQ ID NO: 3296086 - RNA, 23 nt, Variola virus
ucuaauauccauuuuacauuauu

SEQ ID NO: 3296087 - RNA, 23 nt, Variola virus
uguuuaacauucuuuuuuggaga

SEQ ID NO: 3296088 - RNA, 14 nt, Variola virus
ucgguuaugaauga

SEQ ID NO: 3296089 - RNA, 14 nt, Variola virus
uaaucguuaucauu

SEQ ID NO: 3296090 - RNA, 21 nt, Variola virus
ugucacucucccuauaucuuc

SEQ ID NO: 3296091 - RNA, 17 nt, Variola virus
uacaaguggcugcuauu

SEQ ID NO: 3296092 - RNA, 15 nt, Variola virus
aaguaaacaauuuua

SEQ ID NO: 3296093 - RNA, 18 nt, Variola virus
uaaugauacagaaaaucu

SEQ ID NO: 3296094 - RNA, 19 nt, Variola virus
gcuucuuccaacucuguuu

SEQ ID NO: 3296095 - RNA, 13 nt, Variola virus
aaacacuguuguu

SEQ ID NO: 3296096 - RNA, 23 nt, Variola virus
auaauaaaucauggggcaaacau

SEQ ID NO: 3296097 - RNA, 21 nt, Variola virus
uuccaauuccguagguaaacg

SEQ ID NO: 3296098 - RNA, 18 nt, Variola virus
aaauaaacaaaauaaugu

SEQ ID NO: 3296099 - RNA, 18 nt, Variola virus
aacuagaaucagaaucua

SEQ ID NO: 3296100 - RNA, 14 nt, Variola virus
gaaauaagagacuu

SEQ ID NO: 3296101 - RNA, 23 nt, Variola virus
uacuuuguggaugaugaugaaau

SEQ ID NO: 3296102 - RNA, 17 nt, Variola virus
aacagaaaaaacaaugu

SEQ ID NO: 3296103 - RNA, 16 nt, Variola virus
ucguucgaucuaaaau

SEQ ID NO: 3296104 - RNA, 23 nt, Variola virus
aauguccaaaucuaguuguggaa

SEQ ID NO: 3296105 - RNA, 18 nt, Variola virus
cauuuuaggauaugcuuu

SEQ ID NO: 3296106 - RNA, 16 nt, Variola virus
aaugugauguaucuau

SEQ ID NO: 3296107 - RNA, 23 nt, Variola virus
ucuaaaacagcugugaauacagc

SEQ ID NO: 3296108 - RNA, 23 nt, Variola virus
uucucuccgguuaauaauucuag

SEQ ID NO: 3296109 - RNA, 23 nt, Variola virus
caguuuuuaauuucuuugguaau

SEQ ID NO: 3296110 - RNA, 13 nt, Variola virus
uacuauaauauua

SEQ ID NO: 3296111 - RNA, 16 nt, Variola virus
caaaaauuacgauauu

SEQ ID NO: 3296112 - RNA, 11 nt, Variola virus
gucuuuucuaa

SEQ ID NO: 3296113 - RNA, 23 nt, Variola virus
ugauucgaauuuaguuucuucga

SEQ ID NO: 3296114 - RNA, 17 nt, Variola virus
uaggugaacaagagaua

SEQ ID NO: 3296115 - RNA, 17 nt, Variola virus
ugauuauucuagccauu

SEQ ID NO: 3296116 - RNA, 14 nt, Variola virus
uuuuacuaaucaua

SEQ ID NO: 3296117 - RNA, 21 nt, Variola virus
gauagguuagaagauaaugaa

SEQ ID NO: 3296118 - RNA, 22 nt, Variola virus
cauuugaugauauguuuggaau

SEQ ID NO: 3296119 - RNA, 23 nt, Variola virus
ugcuuuccuuguugaugaaggau

SEQ ID NO: 3296120 - RNA, 20 nt, Variola virus
uguucacguccaccaaugau

SEQ ID NO: 3296121 - RNA, 19 nt, Variola virus
cauuacauauuauaucaau

SEQ ID NO: 3296122 - RNA, 17 nt, Variola virus
uaaacagaaauauauga

SEQ ID NO: 3296123 - RNA, 19 nt, Variola virus
aauguaauggauagacaau

SEQ ID NO: 3296124 - RNA, 14 nt, Variola virus
ucguauacuagaaa

SEQ ID NO: 3296125 - RNA, 15 nt, Variola virus
aucagauucuuauau

SEQ ID NO: 3296126 - RNA, 16 nt, Variola virus
cagguaggcaguuuua

SEQ ID NO: 3296127 - RNA, 20 nt, Variola virus
uuguauucugaauagaucca

SEQ ID NO: 3296128 - RNA, 20 nt, Variola virus
cauaaucaucacugucauca

SEQ ID NO: 3296129 - RNA, 21 nt, Variola virus
aauacuuuuguuacuaauauc

SEQ ID NO: 3296130 - RNA, 15 nt, Variola virus
aaacgacuuaccgaa

SEQ ID NO: 3296131 - RNA, 23 nt, Variola virus
auucugauuggucaaugugaaug

SEQ ID NO: 3296132 - RNA, 17 nt, Variola virus
agaagauuuaacuagau

SEQ ID NO: 3296133 - RNA, 16 nt, Variola virus
uuacaaacauuacuag

SEQ ID NO: 3296134 - RNA, 19 nt, Variola virus
gauaguauucaagucaaag

SEQ ID NO: 3296135 - RNA, 16 nt, Variola virus
uaaccuccugaaaaug

SEQ ID NO: 3296136 - RNA, 21 nt, Variola virus
uuuacucuucuaaauucauaa

SEQ ID NO: 3296137 - RNA, 19 nt, Variola virus
uuaccaguuccagauuuca

SEQ ID NO: 3296138 - RNA, 15 nt, Variola virus
auguuuuacacguau

SEQ ID NO: 3296139 - RNA, 18 nt, Variola virus
guuaucaugaaauguuug

SEQ ID NO: 3296140 - RNA, 16 nt, Variola virus
acaaccgcuacauaau

SEQ ID NO: 3296141 - RNA, 17 nt, Variola virus
auaugccuuagcaucau

SEQ ID NO: 3296142 - RNA, 20 nt, Variola virus
cuuauuaacuuuaacauguc

SEQ ID NO: 3296143 - RNA, 22 nt, Variola virus
ugccauauguuggaaauacuag

SEQ ID NO: 3296144 - RNA, 19 nt, Variola virus
gaaggaugacaauaaugac

SEQ ID NO: 3296145 - RNA, 19 nt, Variola virus
ccucaaucauguacuagcu

SEQ ID NO: 3296146 - RNA, 21 nt, Variola virus
uaagaaacuaguuuauuguga

SEQ ID NO: 3296147 - RNA, 19 nt, Variola virus
cuguagaauucgaaggaag

SEQ ID NO: 3296148 - RNA, 13 nt, Variola virus
uugcuuuucuaau

SEQ ID NO: 3296149 - RNA, 14 nt, Variola virus
aacuauucaguagu

SEQ ID NO: 3296150 - RNA, 18 nt, Variola virus
aaugacgaauugaaaauu

SEQ ID NO: 3296151 - RNA, 15 nt, Variola virus
uauauuuuauacauu

SEQ ID NO: 3296152 - RNA, 20 nt, Variola virus
uaucaaugauuaguuucuua

SEQ ID NO: 3296153 - RNA, 22 nt, Variola virus
uacuaauaggucuaaaaaccaa

SEQ ID NO: 3296154 - RNA, 18 nt, Variola virus
acuuaacuuuuucuuucu

SEQ ID NO: 3296155 - RNA, 16 nt, Variola virus
gauaucuauacuuacu

SEQ ID NO: 3296156 - RNA, 15 nt, Variola virus
cuguuucuacuaacu

SEQ ID NO: 3296157 - RNA, 21 nt, Variola virus
caauuguauuauugauacaau

SEQ ID NO: 3296158 - RNA, 18 nt, Variola virus
cgauuguauaguuaauaa

SEQ ID NO: 3296159 - RNA, 20 nt, Variola virus
uacaaaauuugcaucuacau

SEQ ID NO: 3296160 - RNA, 14 nt, Variola virus
agaaugaaacagua

SEQ ID NO: 3296161 - RNA, 13 nt, Variola virus
cuugugguaauga

SEQ ID NO: 3296162 - RNA, 22 nt, Variola virus
acuugaucuuuauuuuuugugu

SEQ ID NO: 3296163 - RNA, 18 nt, Variola virus
aucugguagcaaagaaau

SEQ ID NO: 3296164 - RNA, 17 nt, Variola virus
ucuaaaauuacaaacaa

SEQ ID NO: 3296165 - RNA, 15 nt, Variola virus
uaauuacuaaaucug

SEQ ID NO: 3296166 - RNA, 19 nt, Variola virus
aaggauaaaauauuaucca

SEQ ID NO: 3296167 - RNA, 18 nt, Variola virus
acuagucgcguuaauagu

SEQ ID NO: 3296168 - RNA, 21 nt, Variola virus
ugcuugcaacauuaacaucuu

SEQ ID NO: 3296169 - RNA, 20 nt, Variola virus
uauucaucgucgacuaucaa

SEQ ID NO: 3296170 - RNA, 20 nt, Variola virus
agucuuuaaugaauuaacga

SEQ ID NO: 3296171 - RNA, 22 nt, Variola virus
gaagagauuccugacuuugcau

SEQ ID NO: 3296172 - RNA, 16 nt, Variola virus
auauaaauuuaauaag

SEQ ID NO: 3296173 - RNA, 18 nt, Variola virus
agaacaucauuuccaaau

SEQ ID NO: 3296174 - RNA, 20 nt, Variola virus
uaucuacgauuuuuacaaaa

SEQ ID NO: 3296175 - RNA, 13 nt, Variola virus
caugaaagaaaga

SEQ ID NO: 3296176 - RNA, 18 nt, Variola virus
uccgauuguuguguacau

SEQ ID NO: 3296177 - RNA, 19 nt, Variola virus
aucaaagauuaauacauua

SEQ ID NO: 3296178 - RNA, 15 nt, Variola virus
auaaguguguuguaa

SEQ ID NO: 3296179 - RNA, 17 nt, Variola virus
aggagauuaaaggauaa

SEQ ID NO: 3296180 - RNA, 22 nt, Variola virus
uccaauaaauuaucaaauacuu

SEQ ID NO: 3296181 - RNA, 17 nt, Variola virus
caucuaauaauuuggau

SEQ ID NO: 3296182 - RNA, 15 nt, Variola virus
gaaaauuauaaugaa

SEQ ID NO: 3296183 - RNA, 18 nt, Variola virus
agauugguacgaaauaua

SEQ ID NO: 3296184 - RNA, 17 nt, Variola virus
guaaagcguuaaaucaa

SEQ ID NO: 3296185 - RNA, 22 nt, Variola virus
gucucccuuuagauuguuguau

SEQ ID NO: 3296186 - RNA, 22 nt, Variola virus
ggagaugaugcuaaaaaauaua

SEQ ID NO: 3296187 - RNA, 19 nt, Variola virus
aaggauauucucauggaaa

SEQ ID NO: 3296188 - RNA, 23 nt, Variola virus
ucucaucaucagaauaaaucaau

SEQ ID NO: 3296189 - RNA, 14 nt, Variola virus
cuaaucuguucaua

SEQ ID NO: 3296190 - RNA, 18 nt, Variola virus
uaaguaauaacuauguuu

SEQ ID NO: 3296191 - RNA, 18 nt, Variola virus
cggcuaucgacuuaauau

SEQ ID NO: 3296192 - RNA, 15 nt, Variola virus
auuucguuagucaua

SEQ ID NO: 3296193 - RNA, 13 nt, Variola virus
aauaucaggaaau

SEQ ID NO: 3296194 - RNA, 19 nt, Variola virus
uaacuuuuucuuucucagc

SEQ ID NO: 3296195 - RNA, 14 nt, Variola virus
ucauugucuaaaaa

SEQ ID NO: 3296196 - RNA, 16 nt, Variola virus
acuaacuaauguuucu

SEQ ID NO: 3296197 - RNA, 15 nt, Variola virus
gaacgauaauaacuu

SEQ ID NO: 3296198 - RNA, 22 nt, Variola virus
gcuauagaggacaauaauauua

SEQ ID NO: 3296199 - RNA, 17 nt, Variola virus
auuaguggaagaaagau

SEQ ID NO: 3296200 - RNA, 18 nt, Variola virus
acucuuggaauuaauagu

SEQ ID NO: 3296201 - RNA, 18 nt, Variola virus
acgauuaucuauuaaaga

SEQ ID NO: 3296202 - RNA, 15 nt, Variola virus
aacauuuugaaaauu

SEQ ID NO: 3296203 - RNA, 19 nt, Variola virus
aacucuuucgaauacuuau

SEQ ID NO: 3296204 - RNA, 22 nt, Variola virus
uaaguauuuggcuagucaagau

SEQ ID NO: 3296205 - RNA, 14 nt, Variola virus
uuagaauagucucu

SEQ ID NO: 3296206 - RNA, 17 nt, Variola virus
aaaaaugaaaauaaaua

SEQ ID NO: 3296207 - RNA, 17 nt, Variola virus
uuauuauuuuauauuca

SEQ ID NO: 3296208 - RNA, 20 nt, Variola virus
guucauacaugaaaugaucu

SEQ ID NO: 3296209 - RNA, 17 nt, Variola virus
cagugacuguaucacac

SEQ ID NO: 3296210 - RNA, 19 nt, Variola virus
uuacacuauuugucuuaau

SEQ ID NO: 3296211 - RNA, 15 nt, Variola virus
cgcuugguuggauuu

SEQ ID NO: 3296212 - RNA, 15 nt, Variola virus
uguuagcauuucuau

SEQ ID NO: 3296213 - RNA, 20 nt, Variola virus
ccuuugucuaccaucuccuc

SEQ ID NO: 3296214 - RNA, 16 nt, Variola virus
gauguuuguaucaugc

SEQ ID NO: 3296215 - RNA, 22 nt, Variola virus
uaaugacauggacguagauguu

SEQ ID NO: 3296216 - RNA, 22 nt, Variola virus
uaucuacgauuuuuacaaaagu

SEQ ID NO: 3296217 - RNA, 17 nt, Variola virus
uuuuauuuuaucuaauu

SEQ ID NO: 3296218 - RNA, 20 nt, Variola virus
guuccucuguaaauaaaucu

SEQ ID NO: 3296219 - RNA, 15 nt, Variola virus
auuccgcauuaaaug

SEQ ID NO: 3296220 - RNA, 18 nt, Variola virus
auauuugugaaaauauua

SEQ ID NO: 3296221 - RNA, 17 nt, Variola virus
uuuuaaaguuaaucaua

SEQ ID NO: 3296222 - RNA, 21 nt, Variola virus
augucgguuggcauucuauuu

SEQ ID NO: 3296223 - RNA, 17 nt, Variola virus
guauuauaauauacaua

SEQ ID NO: 3296224 - RNA, 19 nt, Variola virus
aggaauacaauacauaccu

SEQ ID NO: 3296225 - RNA, 20 nt, Variola virus
ucacuaauaucaauauacaa

SEQ ID NO: 3296226 - RNA, 21 nt, Variola virus
uaaaucuacuuagauuauucu

SEQ ID NO: 3296227 - RNA, 19 nt, Variola virus
cucauaaguguauauaucu

SEQ ID NO: 3296228 - RNA, 22 nt, Variola virus
aaaacuguccaaauagauguac

SEQ ID NO: 3296229 - RNA, 16 nt, Variola virus
ugcuuuagugaaauuu

SEQ ID NO: 3296230 - RNA, 21 nt, Variola virus
acgagaauggcguuugauaua

SEQ ID NO: 3296231 - RNA, 17 nt, Variola virus
aauucuaggcucaguau

SEQ ID NO: 3296232 - RNA, 14 nt, Variola virus
aaaucuauacugca

SEQ ID NO: 3296233 - RNA, 18 nt, Variola virus
guuccagcuauuccaccu

SEQ ID NO: 3296234 - RNA, 15 nt, Variola virus
ucgaguacgccauau

SEQ ID NO: 3296235 - RNA, 13 nt, Variola virus
agauauauauacu

SEQ ID NO: 3296236 - RNA, 13 nt, Variola virus
ucagacaacaucu

SEQ ID NO: 3296237 - RNA, 23 nt, Variola virus
uuggaggcgaugaucuuaauuuu

SEQ ID NO: 3296238 - RNA, 13 nt, Variola virus
auagaugaaaauc

SEQ ID NO: 3296239 - RNA, 11 nt, Variola virus
auuuauccauc

SEQ ID NO: 3296240 - RNA, 22 nt, Variola virus
ugguaauggguuccgucaaaau

SEQ ID NO: 3296241 - RNA, 19 nt, Variola virus
gauaauagggagaaaugac

SEQ ID NO: 3296242 - RNA, 18 nt, Variola virus
uagcguuauaacaaaauc

SEQ ID NO: 3296243 - RNA, 17 nt, Variola virus
agagaauugcugcaaua

SEQ ID NO: 3296244 - RNA, 18 nt, Variola virus
gaugucaaaggaugaaag

SEQ ID NO: 3296245 - RNA, 17 nt, Variola virus
caaugaacuaauauuua

SEQ ID NO: 3296246 - RNA, 12 nt, Variola virus
aauaaaacauuu

SEQ ID NO: 3296247 - RNA, 15 nt, Variola virus
uugaucuauguaguu

SEQ ID NO: 3296248 - RNA, 19 nt, Variola virus
guacuauugucuaaacaac

SEQ ID NO: 3296249 - RNA, 21 nt, Variola virus
gucauuaaauugugaaucauc

SEQ ID NO: 3296250 - RNA, 15 nt, Variola virus
uaaugaucaucuauu

SEQ ID NO: 3296251 - RNA, 22 nt, Variola virus
gguuucgaagaucuucuuauuu

SEQ ID NO: 3296252 - RNA, 15 nt, Variola virus
caaacauacaucuau

SEQ ID NO: 3296253 - RNA, 16 nt, Variola virus
uaauauaaaagaauau

SEQ ID NO: 3296254 - RNA, 22 nt, Variola virus
gaauaugauuucagauacuaua

SEQ ID NO: 3296255 - RNA, 21 nt, Variola virus
uuacggcugcguuaaacauuc

SEQ ID NO: 3296256 - RNA, 13 nt, Variola virus
uuaaaauauuguu

SEQ ID NO: 3296257 - RNA, 13 nt, Variola virus
uggauauaugaua

SEQ ID NO: 3296258 - RNA, 23 nt, Variola virus
caaauaucggaauaaguagacau

SEQ ID NO: 3296259 - RNA, 13 nt, Variola virus
augucuacauaaa

SEQ ID NO: 3296260 - RNA, 16 nt, Variola virus
agaauuucuacauaau

SEQ ID NO: 3296261 - RNA, 13 nt, Variola virus
aaaauuauaacua

SEQ ID NO: 3296262 - RNA, 18 nt, Variola virus
aaguuaauucagauacua

SEQ ID NO: 3296263 - RNA, 13 nt, Variola virus
cauacuccaucaa

SEQ ID NO: 3296264 - RNA, 18 nt, Variola virus
aucuacguucauauguau

SEQ ID NO: 3296265 - RNA, 19 nt, Variola virus
uauggacgcagauagcuau

SEQ ID NO: 3296266 - RNA, 19 nt, Variola virus
cuauaaaaagaguuucaaa

SEQ ID NO: 3296267 - RNA, 16 nt, Variola virus
agcuauuuaaaugggu

SEQ ID NO: 3296268 - RNA, 22 nt, Variola virus
gaaaauauuuaaaaaauaucua

SEQ ID NO: 3296269 - RNA, 17 nt, Variola virus
ggaugaguuaauguaua

SEQ ID NO: 3296270 - RNA, 20 nt, Variola virus
aagauauagaugaggugguu

SEQ ID NO: 3296271 - RNA, 14 nt, Variola virus
auauucuaugaauu

SEQ ID NO: 3296272 - RNA, 17 nt, Variola virus
aauacuagauucgaaaa

SEQ ID NO: 3296273 - RNA, 12 nt, Variola virus
auaaaauagaca

SEQ ID NO: 3296274 - RNA, 13 nt, Variola virus
cucuaguuucaga

SEQ ID NO: 3296275 - RNA, 13 nt, Variola virus
ucuuauguggauc

SEQ ID NO: 3296276 - RNA, 15 nt, Variola virus
uagcuuuaacagugg

SEQ ID NO: 3296277 - RNA, 14 nt, Variola virus
cugaauaaaacauc

SEQ ID NO: 3296278 - RNA, 17 nt, Variola virus
cuaagacgucucauuuc

SEQ ID NO: 3296279 - RNA, 19 nt, Variola virus
gauagguauugaugaagga

SEQ ID NO: 3296280 - RNA, 21 nt, Variola virus
auuacuacauuauuaaaucau

SEQ ID NO: 3296281 - RNA, 20 nt, Variola virus
uggacgaucuauuagaaaau

SEQ ID NO: 3296282 - RNA, 17 nt, Variola virus
ucauguagaaaaauucu

SEQ ID NO: 3296283 - RNA, 19 nt, Variola virus
auuaacaaauuuuaaacaa

SEQ ID NO: 3296284 - RNA, 14 nt, Variola virus
aaucuaagaaauuu

SEQ ID NO: 3296285 - RNA, 12 nt, Variola virus
gauauuauuaca

SEQ ID NO: 3296286 - RNA, 12 nt, Variola virus
gacuagauggac

SEQ ID NO: 3296287 - RNA, 23 nt, Variola virus
uauacauauuccagaugucauga

SEQ ID NO: 3296288 - RNA, 16 nt, Variola virus
cguauaucaucaucug

SEQ ID NO: 3296289 - RNA, 14 nt, Variola virus
aucaacagaaauau

SEQ ID NO: 3296290 - RNA, 15 nt, Variola virus
gaaaucuguaaucua

SEQ ID NO: 3296291 - RNA, 21 nt, Variola virus
aucugucccauuuugaauauc

SEQ ID NO: 3296292 - RNA, 21 nt, Variola virus
ggacaucaacgccuuagaaau

SEQ ID NO: 3296293 - RNA, 21 nt, Variola virus
ucaauagcaguuuauuaucca

SEQ ID NO: 3296294 - RNA, 17 nt, Variola virus
cguuaaauauaacuggu

SEQ ID NO: 3296295 - RNA, 17 nt, Variola virus
uauaacauuaauaucaa

SEQ ID NO: 3296296 - RNA, 12 nt, Variola virus
guuaauaacauc

SEQ ID NO: 3296297 - RNA, 16 nt, Variola virus
guucuugaucuuauua

SEQ ID NO: 3296298 - RNA, 14 nt, Variola virus
gauuaauaauucau

SEQ ID NO: 3296299 - RNA, 19 nt, Variola virus
gaacguauuaauacuuaau

SEQ ID NO: 3296300 - RNA, 16 nt, Variola virus
uuauacauauuccaga

SEQ ID NO: 3296301 - RNA, 21 nt, Variola virus
uguauucaucgccuaauguau

SEQ ID NO: 3296302 - RNA, 21 nt, Variola virus
gucuaaauuccauagcauauu

SEQ ID NO: 3296303 - RNA, 20 nt, Variola virus
ucaauaacuggcacaacaau

SEQ ID NO: 3296304 - RNA, 20 nt, Variola virus
aauaucgauuagauuuccua

SEQ ID NO: 3296305 - RNA, 22 nt, Variola virus
guuaauaguuggaauaaauaga

SEQ ID NO: 3296306 - RNA, 20 nt, Variola virus
uuuucaaagaaaaagguuug

SEQ ID NO: 3296307 - RNA, 21 nt, Variola virus
auauagcuuucacucauauaa

SEQ ID NO: 3296308 - RNA, 19 nt, Variola virus
gucuucuaaaaauaaaagu

SEQ ID NO: 3296309 - RNA, 20 nt, Variola virus
auuguacgguagaauugaua

SEQ ID NO: 3296310 - RNA, 20 nt, Variola virus
gcaucaacaguuacaaauga

SEQ ID NO: 3296311 - RNA, 17 nt, Variola virus
uuuagacgcuuauuauu

SEQ ID NO: 3296312 - RNA, 23 nt, Variola virus
ucuauuggauauggauuuccaga

SEQ ID NO: 3296313 - RNA, 15 nt, Variola virus
ugaagcauuggaagc

SEQ ID NO: 3296314 - RNA, 19 nt, Variola virus
cauaguggacaacauuaau

SEQ ID NO: 3296315 - RNA, 21 nt, Variola virus
uagaacguuuaacgaggauuu

SEQ ID NO: 3296316 - RNA, 15 nt, Variola virus
aagaggguugguaaa

SEQ ID NO: 3296317 - RNA, 21 nt, Variola virus
aagauuaacuccauaaugucu

SEQ ID NO: 3296318 - RNA, 22 nt, Variola virus
uaccaauaugucuguacaaaug

SEQ ID NO: 3296319 - RNA, 15 nt, Variola virus
auuuagaaaaaagau

SEQ ID NO: 3296320 - RNA, 13 nt, Variola virus
aauuuauauaaau

SEQ ID NO: 3296321 - RNA, 18 nt, Variola virus
acauuuuggcaaauugau

SEQ ID NO: 3296322 - RNA, 16 nt, Variola virus
aagguauaaaauacuu

SEQ ID NO: 3296323 - RNA, 20 nt, Variola virus
uaagaucguagaucucccau

SEQ ID NO: 3296324 - RNA, 16 nt, Variola virus
augagucuuauagcau

SEQ ID NO: 3296325 - RNA, 18 nt, Variola virus
ugacuguuuguacuuuga

SEQ ID NO: 3296326 - RNA, 21 nt, Variola virus
uagaaagcagauuagaugaca

SEQ ID NO: 3296327 - RNA, 15 nt, Variola virus
cggcauuagaugaga

SEQ ID NO: 3296328 - RNA, 19 nt, Variola virus
uagucuaguaucuaaacau

SEQ ID NO: 3296329 - RNA, 23 nt, Variola virus
aauuagaacagggaauuacuuua

SEQ ID NO: 3296330 - RNA, 20 nt, Variola virus
aucaaaugguaaauacugua

SEQ ID NO: 3296331 - RNA, 13 nt, Variola virus
uaaugauaaauuu

SEQ ID NO: 3296332 - RNA, 23 nt, Variola virus
cuauaccauauccuccuguagau

SEQ ID NO: 3296333 - RNA, 18 nt, Variola virus
auguugaacauaaaacua

SEQ ID NO: 3296334 - RNA, 19 nt, Variola virus
ucuauaguuuguuuucauu

SEQ ID NO: 3296335 - RNA, 22 nt, Variola virus
gaaaaaaaucuuuuuuuauucu

SEQ ID NO: 3296336 - RNA, 21 nt, Variola virus
aacaguuugguauuagaauca

SEQ ID NO: 3296337 - RNA, 16 nt, Variola virus
ugaagauaucauuaau

SEQ ID NO: 3296338 - RNA, 17 nt, Variola virus
gaauuaacgagauauau

SEQ ID NO: 3296339 - RNA, 12 nt, Variola virus
gaguaguuuaug

SEQ ID NO: 3296340 - RNA, 18 nt, Variola virus
uuuagagaaugcuaauau

SEQ ID NO: 3296341 - RNA, 22 nt, Variola virus
aaaaguauuaauacaugucuua

SEQ ID NO: 3296342 - RNA, 15 nt, Variola virus
aaagaaaauauggaa

SEQ ID NO: 3296343 - RNA, 17 nt, Variola virus
cacccguagaaauacua

SEQ ID NO: 3296344 - RNA, 17 nt, Variola virus
uugauaaaucuaucuuu

SEQ ID NO: 3296345 - RNA, 17 nt, Variola virus
augcacguaaacauuau

SEQ ID NO: 3296346 - RNA, 18 nt, Variola virus
ucuauaucuauaucuaca

SEQ ID NO: 3296347 - RNA, 16 nt, Variola virus
uagcagcacaaaucaa

SEQ ID NO: 3296348 - RNA, 15 nt, Variola virus
auuaauaagaaugac

SEQ ID NO: 3296349 - RNA, 16 nt, Variola virus
gcauagauguauauag

SEQ ID NO: 3296350 - RNA, 16 nt, Variola virus
guaucauaauauuaau

SEQ ID NO: 3296351 - RNA, 16 nt, Variola virus
accguuguuaaauacu

SEQ ID NO: 3296352 - RNA, 22 nt, Variola virus
uuggagaaacggcaacuggaaa

SEQ ID NO: 3296353 - RNA, 21 nt, Variola virus
agauccacugucacuggaaag

SEQ ID NO: 3296354 - RNA, 18 nt, Variola virus
gauaucauuaauacagua

SEQ ID NO: 3296355 - RNA, 16 nt, Variola virus
auucgaaauuagaaag

SEQ ID NO: 3296356 - RNA, 14 nt, Variola virus
agauacaacaaauu

SEQ ID NO: 3296357 - RNA, 19 nt, Variola virus
auaagaagaggacaaaguu

SEQ ID NO: 3296358 - RNA, 16 nt, Variola virus
aaccacggaucguaau

SEQ ID NO: 3296359 - RNA, 14 nt, Variola virus
uauuuaucuaacau

SEQ ID NO: 3296360 - RNA, 18 nt, Variola virus
caaacgccauaaucugug

SEQ ID NO: 3296361 - RNA, 21 nt, Variola virus
uagaaaaaauuacuccaugga

SEQ ID NO: 3296362 - RNA, 18 nt, Variola virus
aucagaaaggauagagca

SEQ ID NO: 3296363 - RNA, 18 nt, Variola virus
aucuuuaauaucuagauu

SEQ ID NO: 3296364 - RNA, 17 nt, Variola virus
uggucuuguauaucuua

SEQ ID NO: 3296365 - RNA, 22 nt, Variola virus
aauucuuaguuauauauacucu

SEQ ID NO: 3296366 - RNA, 18 nt, Variola virus
aaagauaauacauuuucu

SEQ ID NO: 3296367 - RNA, 19 nt, Variola virus
ccaaaugcugucugugaaa

SEQ ID NO: 3296368 - RNA, 15 nt, Variola virus
auccuaucuaagaug

SEQ ID NO: 3296369 - RNA, 16 nt, Variola virus
uauaaacucucaacau

SEQ ID NO: 3296370 - RNA, 14 nt, Variola virus
aaauauauaaugaa

SEQ ID NO: 3296371 - RNA, 18 nt, Variola virus
uuauuaacuguuucgaua

SEQ ID NO: 3296372 - RNA, 18 nt, Variola virus
auauucguucaauacaaa

SEQ ID NO: 3296373 - RNA, 16 nt, Variola virus
caggggaaugaacagc

SEQ ID NO: 3296374 - RNA, 17 nt, Variola virus
ugacugacuuaaaacuu

SEQ ID NO: 3296375 - RNA, 20 nt, Variola virus
aaccaaggacagaaaaaugu

SEQ ID NO: 3296376 - RNA, 17 nt, Variola virus
uauacugaaaaguuauu

SEQ ID NO: 3296377 - RNA, 14 nt, Variola virus
auguuguuaccaua

SEQ ID NO: 3296378 - RNA, 14 nt, Variola virus
ccagcagcuagaga

SEQ ID NO: 3296379 - RNA, 15 nt, Variola virus
aacuaguauaaaauc

SEQ ID NO: 3296380 - RNA, 15 nt, Variola virus
uauacaagauugaaa

SEQ ID NO: 3296381 - RNA, 17 nt, Variola virus
cauuaacuuuaaugugu

SEQ ID NO: 3296382 - RNA, 17 nt, Variola virus
uuaauagauauauuaau

SEQ ID NO: 3296383 - RNA, 16 nt, Variola virus
uauuaaaauucuuaaa

SEQ ID NO: 3296384 - RNA, 14 nt, Variola virus
aaacagauaaugau

SEQ ID NO: 3296385 - RNA, 13 nt, Variola virus
guuauaaauuagg

SEQ ID NO: 3296386 - RNA, 15 nt, Variola virus
auggacuuaucuaca

SEQ ID NO: 3296387 - RNA, 17 nt, Variola virus
cuaugagugaaggagac

SEQ ID NO: 3296388 - RNA, 19 nt, Variola virus
aacagagccaucuguaaaa

SEQ ID NO: 3296389 - RNA, 12 nt, Variola virus
aagguuguaaau

SEQ ID NO: 3296390 - RNA, 15 nt, Variola virus
aaaauaauaugauua

SEQ ID NO: 3296391 - RNA, 21 nt, Variola virus
auguuaucuacauauuuacca

SEQ ID NO: 3296392 - RNA, 19 nt, Variola virus
guucugauuuuaucuuuua

SEQ ID NO: 3296393 - RNA, 13 nt, Variola virus
uguuaauuuugaa

SEQ ID NO: 3296394 - RNA, 15 nt, Variola virus
uuccaacucuguuuu

SEQ ID NO: 3296395 - RNA, 15 nt, Variola virus
auaauucuucuguau

SEQ ID NO: 3296396 - RNA, 13 nt, Variola virus
auuacuauaaaug

SEQ ID NO: 3296397 - RNA, 15 nt, Variola virus
acauuauaugaugau

SEQ ID NO: 3296398 - RNA, 16 nt, Variola virus
auacucuauucgaaaa

SEQ ID NO: 3296399 - RNA, 15 nt, Variola virus
aauuaucaaauacuu

SEQ ID NO: 3296400 - RNA, 13 nt, Variola virus
aaaugcauacuug

SEQ ID NO: 3296401 - RNA, 21 nt, Variola virus
auacaguguauguaaaaaugu

SEQ ID NO: 3296402 - RNA, 15 nt, Variola virus
agagaaguauuuuau

SEQ ID NO: 3296403 - RNA, 18 nt, Variola virus
agauaguuuuaguuucca

SEQ ID NO: 3296404 - RNA, 19 nt, Variola virus
ugccaaaucuauaagaaaa

SEQ ID NO: 3296405 - RNA, 11 nt, Variola virus
uuguauuuugu

SEQ ID NO: 3296406 - RNA, 22 nt, Variola virus
ugcucggcaguaaucaacaaua

SEQ ID NO: 3296407 - RNA, 21 nt, Variola virus
auaaucccauucuaauacuuu

SEQ ID NO: 3296408 - RNA, 14 nt, Variola virus
acaugucuuaaagu

SEQ ID NO: 3296409 - RNA, 21 nt, Variola virus
ucaacaaucguuaauaaaucu

SEQ ID NO: 3296410 - RNA, 20 nt, Variola virus
cuuuuauuuccacauuagau

SEQ ID NO: 3296411 - RNA, 19 nt, Variola virus
gaaugcagaaaugauuuug

SEQ ID NO: 3296412 - RNA, 15 nt, Variola virus
auucaagucaaagaa

SEQ ID NO: 3296413 - RNA, 11 nt, Variola virus
cucacauuuca

SEQ ID NO: 3296414 - RNA, 21 nt, Variola virus
cauuaaggcguugaugcaauu

SEQ ID NO: 3296415 - RNA, 15 nt, Variola virus
ucuagauaaaaucac

SEQ ID NO: 3296416 - RNA, 16 nt, Variola virus
auacugucaacuauag

SEQ ID NO: 3296417 - RNA, 22 nt, Variola virus
auuaccaucucuaaguuucuuu

SEQ ID NO: 3296418 - RNA, 23 nt, Variola virus
uggaacuccuauuggaauuauuu

SEQ ID NO: 3296419 - RNA, 20 nt, Variola virus
aaauauuucauuagauguua

SEQ ID NO: 3296420 - RNA, 16 nt, Variola virus
ggucuuaguauuuuua

SEQ ID NO: 3296421 - RNA, 16 nt, Variola virus
aaaauauuuauuagaa

SEQ ID NO: 3296422 - RNA, 20 nt, Variola virus
uuaccccucauaguauuaau

SEQ ID NO: 3296423 - RNA, 21 nt, Variola virus
agaaaucauguuauaguguuu

SEQ ID NO: 3296424 - RNA, 22 nt, Variola virus
uguaaaaaacaucacgaaaucu

SEQ ID NO: 3296425 - RNA, 15 nt, Variola virus
agaugguaaacuguu

SEQ ID NO: 3296426 - RNA, 19 nt, Variola virus
aaaaacaucacgaaaucua

SEQ ID NO: 3296427 - RNA, 20 nt, Variola virus
cuauugugucuguuaauaga

SEQ ID NO: 3296428 - RNA, 16 nt, Variola virus
acaaaaagaaagaaua

SEQ ID NO: 3296429 - RNA, 16 nt, Variola virus
acagaaacuuagauua

SEQ ID NO: 3296430 - RNA, 16 nt, Variola virus
agauuuacucugaaaa

SEQ ID NO: 3296431 - RNA, 20 nt, Variola virus
aguguauaacggaaaugaua

SEQ ID NO: 3296432 - RNA, 15 nt, Variola virus
aagacuuugaaauau

SEQ ID NO: 3296433 - RNA, 18 nt, Variola virus
ucgcuccaaauauacauu

SEQ ID NO: 3296434 - RNA, 20 nt, Variola virus
acaggcgaugguaaaaagac

SEQ ID NO: 3296435 - RNA, 22 nt, Variola virus
ggcauacucguccgauuucaua

SEQ ID NO: 3296436 - RNA, 18 nt, Variola virus
acaauagucuguuaauaa

SEQ ID NO: 3296437 - RNA, 13 nt, Variola virus
auauauagaauga

SEQ ID NO: 3296438 - RNA, 15 nt, Variola virus
cgaucuaauaacaau

SEQ ID NO: 3296439 - RNA, 20 nt, Variola virus
aguuguaaaguuaaaauugu

SEQ ID NO: 3296440 - RNA, 23 nt, Variola virus
ucaccgaugaacgucauuucucu

SEQ ID NO: 3296441 - RNA, 21 nt, Variola virus
ccauauauguuuucaucauuu

SEQ ID NO: 3296442 - RNA, 17 nt, Variola virus
caacuuugaauccauuu

SEQ ID NO: 3296443 - RNA, 14 nt, Variola virus
auaacaaaauacaa

SEQ ID NO: 3296444 - RNA, 15 nt, Variola virus
uauuaucucaacaaa

SEQ ID NO: 3296445 - RNA, 23 nt, Variola virus
acuuccucauuaagauugucaug

SEQ ID NO: 3296446 - RNA, 19 nt, Variola virus
aaaggauacuaaacauugu

SEQ ID NO: 3296447 - RNA, 19 nt, Variola virus
acaagacuacaaagaaugu

SEQ ID NO: 3296448 - RNA, 20 nt, Variola virus
auuauaaguaguaguguuuc

SEQ ID NO: 3296449 - RNA, 21 nt, Variola virus
auauucugccguguuuaaaaa

SEQ ID NO: 3296450 - RNA, 16 nt, Variola virus
uaauuagguuguuuau

SEQ ID NO: 3296451 - RNA, 14 nt, Variola virus
cagacauacaguag

SEQ ID NO: 3296452 - RNA, 21 nt, Variola virus
cuuaaaauuuaaaaugguauu

SEQ ID NO: 3296453 - RNA, 17 nt, Variola virus
ucaucuagauaauggga

SEQ ID NO: 3296454 - RNA, 18 nt, Variola virus
cgaaauaaauaaugaauu

SEQ ID NO: 3296455 - RNA, 21 nt, Variola virus
aaacauguucaaugcaauaga

SEQ ID NO: 3296456 - RNA, 21 nt, Variola virus
uuaacuaagucaauuauuuca

SEQ ID NO: 3296457 - RNA, 19 nt, Variola virus
auaagugcgaugauuguac

SEQ ID NO: 3296458 - RNA, 19 nt, Variola virus
accaacagcagaaaaagac

SEQ ID NO: 3296459 - RNA, 19 nt, Variola virus
caaaaccaauuccuuuuug

SEQ ID NO: 3296460 - RNA, 16 nt, Variola virus
uuugauuaguagauau

SEQ ID NO: 3296461 - RNA, 15 nt, Variola virus
aucgcuacaaaacua

SEQ ID NO: 3296462 - RNA, 20 nt, Variola virus
gucucauauaacaacaaaua

SEQ ID NO: 3296463 - RNA, 23 nt, Variola virus
cucuauaaaauacuaaugcaucu

SEQ ID NO: 3296464 - RNA, 20 nt, Variola virus
cuauuucauacuauuuugug

SEQ ID NO: 3296465 - RNA, 20 nt, Variola virus
aucaagagagcagaaauaac

SEQ ID NO: 3296466 - RNA, 20 nt, Variola virus
aucaucugugggaaauggaa

SEQ ID NO: 3296467 - RNA, 14 nt, Variola virus
uguaauuuuauucu

SEQ ID NO: 3296468 - RNA, 14 nt, Variola virus
acucucaaaaugcu

SEQ ID NO: 3296469 - RNA, 23 nt, Variola virus
gauauaauucguggauaaucauu

SEQ ID NO: 3296470 - RNA, 12 nt, Variola virus
ucauugauuuua

SEQ ID NO: 3296471 - RNA, 17 nt, Variola virus
gaaauguguaauaauau

SEQ ID NO: 3296472 - RNA, 21 nt, Variola virus
guaccgauucuagauacaaga

SEQ ID NO: 3296473 - RNA, 15 nt, Variola virus
cucgugcagauaucc

SEQ ID NO: 3296474 - RNA, 21 nt, Variola virus
auuacucuccuagguuucucu

SEQ ID NO: 3296475 - RNA, 17 nt, Variola virus
aguaauaucaugucuaa

SEQ ID NO: 3296476 - RNA, 20 nt, Variola virus
acaaacaauuaauuaauaca

SEQ ID NO: 3296477 - RNA, 20 nt, Variola virus
uaucgcauagaaauacaaaa

SEQ ID NO: 3296478 - RNA, 15 nt, Variola virus
cgaaaagaaacagau

SEQ ID NO: 3296479 - RNA, 15 nt, Variola virus
auaacuauguuuuaa

SEQ ID NO: 3296480 - RNA, 23 nt, Variola virus
ugucuaaugaugaacacaaaugg

SEQ ID NO: 3296481 - RNA, 22 nt, Variola virus
aaaagcuauuaucaaauacugu

SEQ ID NO: 3296482 - RNA, 20 nt, Variola virus
uggauuugguaacuuugaua

SEQ ID NO: 3296483 - RNA, 11 nt, Variola virus
ugauagauauu

SEQ ID NO: 3296484 - RNA, 19 nt, Variola virus
ugucuacgauaaaccaaaa

SEQ ID NO: 3296485 - RNA, 17 nt, Variola virus
uagaucgucauauguca

SEQ ID NO: 3296486 - RNA, 17 nt, Variola virus
ucauuuucuucaacaaa

SEQ ID NO: 3296487 - RNA, 19 nt, Variola virus
auuauauggcacuguguau

SEQ ID NO: 3296488 - RNA, 15 nt, Variola virus
cgcucaaaauagacg

SEQ ID NO: 3296489 - RNA, 16 nt, Variola virus
uuaugccgaacuaaaa

SEQ ID NO: 3296490 - RNA, 17 nt, Variola virus
gaaaauaaaaauguuuu

SEQ ID NO: 3296491 - RNA, 19 nt, Variola virus
aaacuucguaaaauauucu

SEQ ID NO: 3296492 - RNA, 16 nt, Variola virus
caggaauaugacuauu

SEQ ID NO: 3296493 - RNA, 17 nt, Variola virus
accaacacuuaucaauu

SEQ ID NO: 3296494 - RNA, 18 nt, Variola virus
aucaucgugugauaugaa

SEQ ID NO: 3296495 - RNA, 23 nt, Variola virus
uagaaagaaacgauuauuucuaa

SEQ ID NO: 3296496 - RNA, 19 nt, Variola virus
uaagaacuccuaauauguu

SEQ ID NO: 3296497 - RNA, 18 nt, Variola virus
aaaacagaauaucccaaa

SEQ ID NO: 3296498 - RNA, 18 nt, Variola virus
cuaccgcaucaucaucgu

SEQ ID NO: 3296499 - RNA, 13 nt, Variola virus
guauaaaaauuaa

SEQ ID NO: 3296500 - RNA, 13 nt, Variola virus
gacuguauuugga

SEQ ID NO: 3296501 - RNA, 18 nt, Variola virus
guacaggacguaacuaua

SEQ ID NO: 3296502 - RNA, 13 nt, Variola virus
uugucgcacuaua

SEQ ID NO: 3296503 - RNA, 23 nt, Variola virus
acuguagaugguucuuuaauagu

SEQ ID NO: 3296504 - RNA, 16 nt, Variola virus
caucuuacaugaugau

SEQ ID NO: 3296505 - RNA, 14 nt, Variola virus
gauccaacacuauu

SEQ ID NO: 3296506 - RNA, 15 nt, Variola virus
acauaauauauacag

SEQ ID NO: 3296507 - RNA, 14 nt, Variola virus
auugguauaaaugu

SEQ ID NO: 3296508 - RNA, 13 nt, Variola virus
ucaauuaauguac

SEQ ID NO: 3296509 - RNA, 14 nt, Variola virus
aguaacuauguaaa

SEQ ID NO: 3296510 - RNA, 19 nt, Variola virus
uaguagucauugaucuauu

SEQ ID NO: 3296511 - RNA, 21 nt, Variola virus
cuuuuaucguuuaagaauaau

SEQ ID NO: 3296512 - RNA, 14 nt, Variola virus
gucauagaugaaau

SEQ ID NO: 3296513 - RNA, 17 nt, Variola virus
uguuccgaucuuaguaa

SEQ ID NO: 3296514 - RNA, 21 nt, Variola virus
auuccaagucacuauguguaa

SEQ ID NO: 3296515 - RNA, 16 nt, Variola virus
aaugccuuauucucug

SEQ ID NO: 3296516 - RNA, 19 nt, Variola virus
uuaaaaacaguuauuuucu

SEQ ID NO: 3296517 - RNA, 19 nt, Variola virus
agcggauaaugauagaauu

SEQ ID NO: 3296518 - RNA, 15 nt, Variola virus
aguacaucuaucaca

SEQ ID NO: 3296519 - RNA, 15 nt, Variola virus
auuugguaaaaugaa

SEQ ID NO: 3296520 - RNA, 19 nt, Variola virus
ucaguacauagauuaucca

SEQ ID NO: 3296521 - RNA, 12 nt, Variola virus
uaaaacauaaag

SEQ ID NO: 3296522 - RNA, 23 nt, Variola virus
cuugauuauucuauaaguauaaa

SEQ ID NO: 3296523 - RNA, 18 nt, Variola virus
augaauaucacauaucau

SEQ ID NO: 3296524 - RNA, 17 nt, Variola virus
auaaaauguuaauacau

SEQ ID NO: 3296525 - RNA, 14 nt, Variola virus
cuauauuauguuuu

SEQ ID NO: 3296526 - RNA, 22 nt, Variola virus
gauuuuuuuaucccauguuuca

SEQ ID NO: 3296527 - RNA, 24 nt, Variola virus
aguauacgaagaaaaaguaaauac

SEQ ID NO: 3296528 - RNA, 22 nt, Variola virus
auauauuuauagaagauauuac

SEQ ID NO: 3296529 - RNA, 20 nt, Variola virus
caaauggucaaugauaugau

SEQ ID NO: 3296530 - RNA, 17 nt, Variola virus
ucuaucgcauguggaug

SEQ ID NO: 3296531 - RNA, 15 nt, Variola virus
uagacauaauacuau

SEQ ID NO: 3296532 - RNA, 19 nt, Variola virus
uccaaauuuaaauacuuua

SEQ ID NO: 3296533 - RNA, 19 nt, Variola virus
aggacauguaaacuugaca

SEQ ID NO: 3296534 - RNA, 12 nt, Variola virus
cuaaauggauua

SEQ ID NO: 3296535 - RNA, 13 nt, Variola virus
aaaaagauguauu

SEQ ID NO: 3296536 - RNA, 17 nt, Variola virus
uuagacgcuuauuauua

SEQ ID NO: 3296537 - RNA, 12 nt, Variola virus
uaucaauuuauc

SEQ ID NO: 3296538 - RNA, 14 nt, Variola virus
aagcaagaaagaua

SEQ ID NO: 3296539 - RNA, 19 nt, Variola virus
aucauaauccugugcauaa

SEQ ID NO: 3296540 - RNA, 22 nt, Variola virus
ucuucuuauaagauuguagaau

SEQ ID NO: 3296541 - RNA, 13 nt, Variola virus
cgugagauaaagu

SEQ ID NO: 3296542 - RNA, 22 nt, Variola virus
gaacuauaaguguguuguaaac

SEQ ID NO: 3296543 - RNA, 15 nt, Variola virus
ucaaguucuccgcgu

SEQ ID NO: 3296544 - RNA, 18 nt, Variola virus
cauacauuuguaaaagua

SEQ ID NO: 3296545 - RNA, 14 nt, Variola virus
ugccuaguacugua

SEQ ID NO: 3296546 - RNA, 13 nt, Variola virus
caaaaacgauauu

SEQ ID NO: 3296547 - RNA, 24 nt, Variola virus
caucuaccauaauccuauucuuga

SEQ ID NO: 3296548 - RNA, 19 nt, Variola virus
uucagugaagaagugucua

SEQ ID NO: 3296549 - RNA, 13 nt, Variola virus
aacuuuucagaau

SEQ ID NO: 3296550 - RNA, 23 nt, Variola virus
uauuauggaaaucaacauaaugu

SEQ ID NO: 3296551 - RNA, 22 nt, Variola virus
guuauaaccuuaauauaauaga

SEQ ID NO: 3296552 - RNA, 15 nt, Variola virus
ucugaaauaaucaug

SEQ ID NO: 3296553 - RNA, 20 nt, Variola virus
aaacauuauaucguuaucau

SEQ ID NO: 3296554 - RNA, 19 nt, Variola virus
gauaaagauagaugaugau

SEQ ID NO: 3296555 - RNA, 17 nt, Variola virus
cauggaaauuuaacagc

SEQ ID NO: 3296556 - RNA, 14 nt, Variola virus
uguuuuuuaucaua

SEQ ID NO: 3296557 - RNA, 21 nt, Variola virus
guucuauaaucguaaauaauu

SEQ ID NO: 3296558 - RNA, 19 nt, Variola virus
uaaaaauaaacaucaacau

SEQ ID NO: 3296559 - RNA, 16 nt, Variola virus
aucgaguuuaucagag

SEQ ID NO: 3296560 - RNA, 11 nt, Variola virus
uuuucuguaaa

SEQ ID NO: 3296561 - RNA, 21 nt, Variola virus
uauggauuuuuuuaaaaagga

SEQ ID NO: 3296562 - RNA, 13 nt, Variola virus
aacauuaguucca

SEQ ID NO: 3296563 - RNA, 19 nt, Variola virus
auaaaaaguauagguguau

SEQ ID NO: 3296564 - RNA, 13 nt, Variola virus
uaaauaucauaau

SEQ ID NO: 3296565 - RNA, 17 nt, Variola virus
gucauaacuuaguucuu

SEQ ID NO: 3296566 - RNA, 16 nt, Variola virus
gauaaacgugaacagg

SEQ ID NO: 3296567 - RNA, 17 nt, Variola virus
guacuucucccauaaua

SEQ ID NO: 3296568 - RNA, 17 nt, Variola virus
cuaauacaaaaucaucu

SEQ ID NO: 3296569 - RNA, 17 nt, Variola virus
caauaugcgaaucauuu

SEQ ID NO: 3296570 - RNA, 17 nt, Variola virus
acucuguuucuguaucu

SEQ ID NO: 3296571 - RNA, 11 nt, Variola virus
uuuuauacauu

SEQ ID NO: 3296572 - RNA, 22 nt, Variola virus
gaacguaguaguaaguauuuau

SEQ ID NO: 3296573 - RNA, 14 nt, Variola virus
aauuguauauuaca

SEQ ID NO: 3296574 - RNA, 17 nt, Variola virus
uggaucagauguagaua

SEQ ID NO: 3296575 - RNA, 13 nt, Variola virus
aggacaugaugau

SEQ ID NO: 3296576 - RNA, 17 nt, Variola virus
cacacugauauuaugau

SEQ ID NO: 3296577 - RNA, 21 nt, Variola virus
acauuaaauguauauuuucca

SEQ ID NO: 3296578 - RNA, 18 nt, Variola virus
auuguuuugaagaaauga

SEQ ID NO: 3296579 - RNA, 15 nt, Variola virus
uuggauuuuguauua

SEQ ID NO: 3296580 - RNA, 19 nt, Variola virus
gaauaagaguguaguauca

SEQ ID NO: 3296581 - RNA, 20 nt, Variola virus
cucauagucuauuaaguggu

SEQ ID NO: 3296582 - RNA, 21 nt, Variola virus
aaauuuuacaaaucuauaaca

SEQ ID NO: 3296583 - RNA, 20 nt, Variola virus
ucauauaacuucuagaugua

SEQ ID NO: 3296584 - RNA, 13 nt, Variola virus
cuaaucuauuuua

SEQ ID NO: 3296585 - RNA, 16 nt, Variola virus
ucgcgcuuuacauucu

SEQ ID NO: 3296586 - RNA, 17 nt, Variola virus
auacaucuccaaaacua

SEQ ID NO: 3296587 - RNA, 14 nt, Variola virus
uacuugauaagaua

SEQ ID NO: 3296588 - RNA, 22 nt, Variola virus
acauuugggccauuauaccucu

SEQ ID NO: 3296589 - RNA, 11 nt, Variola virus
uuacaaacauu

SEQ ID NO: 3296590 - RNA, 23 nt, Variola virus
auaaucuaguaaaacuuucuagu

SEQ ID NO: 3296591 - RNA, 17 nt, Variola virus
guguauuguucaaauca

SEQ ID NO: 3296592 - RNA, 22 nt, Variola virus
cuuucauuauuacgucuguagu

SEQ ID NO: 3296593 - RNA, 14 nt, Variola virus
gacgugcguaauau

SEQ ID NO: 3296594 - RNA, 18 nt, Variola virus
uguaaaaagauaaacuuu

SEQ ID NO: 3296595 - RNA, 13 nt, Variola virus
uucaauucucgga

SEQ ID NO: 3296596 - RNA, 17 nt, Variola virus
uauaccaacaugucuga

SEQ ID NO: 3296597 - RNA, 22 nt, Variola virus
gaagagaugccucguuccaagu

SEQ ID NO: 3296598 - RNA, 15 nt, Variola virus
auaucaugaaauaua

SEQ ID NO: 3296599 - RNA, 22 nt, Variola virus
gcuaauauuuuauuacaaucau

SEQ ID NO: 3296600 - RNA, 13 nt, Variola virus
uucauuaaucuuu

SEQ ID NO: 3296601 - RNA, 19 nt, Variola virus
ucaagucaauuaucuuauu

SEQ ID NO: 3296602 - RNA, 13 nt, Variola virus
gacaaaaugugau

SEQ ID NO: 3296603 - RNA, 16 nt, Variola virus
gaagauguuagaaaaa

SEQ ID NO: 3296604 - RNA, 21 nt, Variola virus
aagaaugcuucggaauuagaa

SEQ ID NO: 3296605 - RNA, 18 nt, Variola virus
ucaacaauaugcaaauag

SEQ ID NO: 3296606 - RNA, 14 nt, Variola virus
aucaauaaauggau

SEQ ID NO: 3296607 - RNA, 14 nt, Variola virus
gcuuaauaaauguu

SEQ ID NO: 3296608 - RNA, 15 nt, Variola virus
auaaacuuaguguaa

SEQ ID NO: 3296609 - RNA, 13 nt, Variola virus
auauaaaauggau

SEQ ID NO: 3296610 - RNA, 20 nt, Variola virus
cagguaugauagcuccacca

SEQ ID NO: 3296611 - RNA, 20 nt, Variola virus
auaaaaaauacuuaaaaugu

SEQ ID NO: 3296612 - RNA, 16 nt, Variola virus
uuauauaaucuauaaa

SEQ ID NO: 3296613 - RNA, 22 nt, Variola virus
gccaucguguuaaauuuucuaa

SEQ ID NO: 3296614 - RNA, 18 nt, Variola virus
uuacaugugauacauuuu

SEQ ID NO: 3296615 - RNA, 11 nt, Variola virus
aaaaaauggaa

SEQ ID NO: 3296616 - RNA, 11 nt, Variola virus
aauaaauggau

SEQ ID NO: 3296617 - RNA, 13 nt, Variola virus
ucaacuuauucuc

SEQ ID NO: 3296618 - RNA, 20 nt, Variola virus
uaaucguuauuaucaucauu

SEQ ID NO: 3296619 - RNA, 12 nt, Variola virus
guaauuggauuc

SEQ ID NO: 3296620 - RNA, 17 nt, Variola virus
acuaauucauuuucaau

SEQ ID NO: 3296621 - RNA, 15 nt, Variola virus
uuaauaucuauauau

SEQ ID NO: 3296622 - RNA, 18 nt, Variola virus
accucuccuauaugaaua

SEQ ID NO: 3296623 - RNA, 14 nt, Variola virus
caaguauacaauuu

SEQ ID NO: 3296624 - RNA, 17 nt, Variola virus
auuauuaaacaauacuc

SEQ ID NO: 3296625 - RNA, 14 nt, Variola virus
agacuacaauauau

SEQ ID NO: 3296626 - RNA, 12 nt, Variola virus
aauuauauuguc

SEQ ID NO: 3296627 - RNA, 22 nt, Variola virus
cuuuugucguaaauacaugucu

SEQ ID NO: 3296628 - RNA, 21 nt, Variola virus
uguagagaaucgcuagaugcu

SEQ ID NO: 3296629 - RNA, 18 nt, Variola virus
ugauagagguagacuucu

SEQ ID NO: 3296630 - RNA, 14 nt, Variola virus
uacgucgucaaaau

SEQ ID NO: 3296631 - RNA, 21 nt, Variola virus
acuggauauucgauaacagca

SEQ ID NO: 3296632 - RNA, 18 nt, Variola virus
uauauuuguuaacuacau

SEQ ID NO: 3296633 - RNA, 20 nt, Variola virus
aaagauauuaccaguugugg

SEQ ID NO: 3296634 - RNA, 12 nt, Variola virus
uaacugaagaaa

SEQ ID NO: 3296635 - RNA, 16 nt, Variola virus
aagaacaguacucaau

SEQ ID NO: 3296636 - RNA, 15 nt, Variola virus
cuauugccaaauguu

SEQ ID NO: 3296637 - RNA, 14 nt, Variola virus
cgagaccuacagug

SEQ ID NO: 3296638 - RNA, 10 nt, Variola virus
guuacuaucg

SEQ ID NO: 3296639 - RNA, 15 nt, Variola virus
aauuacacauuucca

SEQ ID NO: 3296640 - RNA, 17 nt, Variola virus
uagaauaaauauccuug

SEQ ID NO: 3296641 - RNA, 23 nt, Variola virus
gccauuuucuaugaacaaaucaa

SEQ ID NO: 3296642 - RNA, 14 nt, Variola virus
agcaaaguuauuaa

SEQ ID NO: 3296643 - RNA, 16 nt, Variola virus
agcacuaucauaauua

SEQ ID NO: 3296644 - RNA, 16 nt, Variola virus
acuaugucaaaaauug

SEQ ID NO: 3296645 - RNA, 18 nt, Variola virus
uuaacgaguucaaauaug

SEQ ID NO: 3296646 - RNA, 13 nt, Variola virus
caacaaacauauu

SEQ ID NO: 3296647 - RNA, 17 nt, Variola virus
ucacauaucgcuacaaa

SEQ ID NO: 3296648 - RNA, 18 nt, Variola virus
ugagagaucuacugguga

SEQ ID NO: 3296649 - RNA, 18 nt, Variola virus
aguaugaagauaaacacu

SEQ ID NO: 3296650 - RNA, 18 nt, Variola virus
guguauaacaaucuuaua

SEQ ID NO: 3296651 - RNA, 13 nt, Variola virus
uagucaagaugau

SEQ ID NO: 3296652 - RNA, 13 nt, Variola virus
acugauauucagg

SEQ ID NO: 3296653 - RNA, 18 nt, Variola virus
gaaaacuagauacaaaau

SEQ ID NO: 3296654 - RNA, 22 nt, Variola virus
ucuccgcaauacauuucucaaa

SEQ ID NO: 3296655 - RNA, 18 nt, Variola virus
auguuagagaauauucaa

SEQ ID NO: 3296656 - RNA, 22 nt, Variola virus
aucuaucuuugcauucugaaac

SEQ ID NO: 3296657 - RNA, 22 nt, Variola virus
gacaacaaggcuuuaauaucua

SEQ ID NO: 3296658 - RNA, 17 nt, Variola virus
acugcauuaaacugaua

SEQ ID NO: 3296659 - RNA, 22 nt, Variola virus
gaugucauuccuuauacaauca

SEQ ID NO: 3296660 - RNA, 18 nt, Variola virus
uaucaacggacacaaagu

SEQ ID NO: 3296661 - RNA, 19 nt, Variola virus
cggauguugugaucaucuu

SEQ ID NO: 3296662 - RNA, 14 nt, Variola virus
ugguaucaacagau

SEQ ID NO: 3296663 - RNA, 13 nt, Variola virus
ucgauaauuauua

SEQ ID NO: 3296664 - RNA, 13 nt, Variola virus
auuuguacauuau

SEQ ID NO: 3296665 - RNA, 17 nt, Variola virus
cagaaucccuuuccaaa

SEQ ID NO: 3296666 - RNA, 18 nt, Variola virus
uaacauaaaaauaucauu

SEQ ID NO: 3296667 - RNA, 16 nt, Variola virus
auuuaagguacuagau

SEQ ID NO: 3296668 - RNA, 21 nt, Variola virus
uuucugguuuucuauaaauaa

SEQ ID NO: 3296669 - RNA, 13 nt, Variola virus
cauuuuacauuau

SEQ ID NO: 3296670 - RNA, 16 nt, Variola virus
agucuauaugaucaaa

SEQ ID NO: 3296671 - RNA, 15 nt, Variola virus
cacugucuaaaugua

SEQ ID NO: 3296672 - RNA, 15 nt, Variola virus
uucuuggauuucaua

SEQ ID NO: 3296673 - RNA, 14 nt, Variola virus
gaagacauauuaau

SEQ ID NO: 3296674 - RNA, 17 nt, Variola virus
auuagaauagucucuuu

SEQ ID NO: 3296675 - RNA, 17 nt, Variola virus
uaaaaaaguuaaaacuu

SEQ ID NO: 3296676 - RNA, 23 nt, Variola virus
gucuaucaagauccaugauucua

SEQ ID NO: 3296677 - RNA, 18 nt, Variola virus
augaaggaaagacauuau

SEQ ID NO: 3296678 - RNA, 16 nt, Variola virus
auaacguaauuccaaa

SEQ ID NO: 3296679 - RNA, 22 nt, Variola virus
ucaacgugauuauucuccacca

SEQ ID NO: 3296680 - RNA, 19 nt, Variola virus
ugacuucauugauaucuuu

SEQ ID NO: 3296681 - RNA, 18 nt, Variola virus
aacucuugcuacaaaaug

SEQ ID NO: 3296682 - RNA, 14 nt, Variola virus
aaauugauaaugag

SEQ ID NO: 3296683 - RNA, 20 nt, Variola virus
cacuuaaaucgauauaacag

SEQ ID NO: 3296684 - RNA, 21 nt, Variola virus
ucuaagacgucucauuucuau

SEQ ID NO: 3296685 - RNA, 15 nt, Variola virus
agcuaggcuggaaac

SEQ ID NO: 3296686 - RNA, 17 nt, Variola virus
agauaucuauacuuacu

SEQ ID NO: 3296687 - RNA, 18 nt, Variola virus
uguauaacagagccaucu

SEQ ID NO: 3296688 - RNA, 14 nt, Variola virus
auucaauauuguau

SEQ ID NO: 3296689 - RNA, 18 nt, Variola virus
cuuugaacuguuuaagag

SEQ ID NO: 3296690 - RNA, 21 nt, Variola virus
agugauaaguaauaacuaugu

SEQ ID NO: 3296691 - RNA, 16 nt, Variola virus
aguaucaauaacacaa

SEQ ID NO: 3296692 - RNA, 20 nt, Variola virus
ugaaugcugaugaacagguu

SEQ ID NO: 3296693 - RNA, 21 nt, Variola virus
auauuuggaaucagacacaga

SEQ ID NO: 3296694 - RNA, 22 nt, Variola virus
auauuaggcacagucaaacauu

SEQ ID NO: 3296695 - RNA, 16 nt, Variola virus
uuagauaauuguggua

SEQ ID NO: 3296696 - RNA, 16 nt, Variola virus
ucuaugaauaugauuu

SEQ ID NO: 3296697 - RNA, 14 nt, Variola virus
aggugaacaagaga

SEQ ID NO: 3296698 - RNA, 13 nt, Variola virus
aaccauaaauaca

SEQ ID NO: 3296699 - RNA, 21 nt, Variola virus
agaaauggagagagacuguuu

SEQ ID NO: 3296700 - RNA, 15 nt, Variola virus
gcaucauauaacuaa

SEQ ID NO: 3296701 - RNA, 21 nt, Variola virus
uugacucaugacuucauugau

SEQ ID NO: 3296702 - RNA, 13 nt, Variola virus
agcaaaaaaacug

SEQ ID NO: 3296703 - RNA, 18 nt, Variola virus
ucucguaggcacacaauc

SEQ ID NO: 3296704 - RNA, 16 nt, Variola virus
aacuuuuagaaauaua

SEQ ID NO: 3296705 - RNA, 13 nt, Variola virus
augaacaaagaaa

SEQ ID NO: 3296706 - RNA, 16 nt, Variola virus
auguaucgugccucau

SEQ ID NO: 3296707 - RNA, 16 nt, Variola virus
ugagaagauauucucu

SEQ ID NO: 3296708 - RNA, 22 nt, Variola virus
uauacaaauccauuaauacgga

SEQ ID NO: 3296709 - RNA, 17 nt, Variola virus
cagaaucaguauauauu

SEQ ID NO: 3296710 - RNA, 15 nt, Variola virus
aacuacgucaagacu

SEQ ID NO: 3296711 - RNA, 20 nt, Variola virus
auuugguaaauuauuaucua

SEQ ID NO: 3296712 - RNA, 21 nt, Variola virus
uuaauagugcgaaaucauuca

SEQ ID NO: 3296713 - RNA, 17 nt, Variola virus
gaaaauaaucuaguaaa

SEQ ID NO: 3296714 - RNA, 23 nt, Variola virus
uuaaauuuagagauaauauccug

SEQ ID NO: 3296715 - RNA, 17 nt, Variola virus
aaugcggauuuagaaaa

SEQ ID NO: 3296716 - RNA, 20 nt, Variola virus
uggucaaucccuaagucuuu

SEQ ID NO: 3296717 - RNA, 15 nt, Variola virus
uuaauuucuuuggua

SEQ ID NO: 3296718 - RNA, 21 nt, Variola virus
agguuaaaccuuuauaaacuu

SEQ ID NO: 3296719 - RNA, 17 nt, Variola virus
acacucuauaucuagaa

SEQ ID NO: 3296720 - RNA, 21 nt, Variola virus
gauuuauuugauaaucauguu

SEQ ID NO: 3296721 - RNA, 21 nt, Variola virus
aucuaccauaguuacagaauu

SEQ ID NO: 3296722 - RNA, 17 nt, Variola virus
uaacaaaaauuaugaaa

SEQ ID NO: 3296723 - RNA, 21 nt, Variola virus
auaaccgguaagaauaguaaa

SEQ ID NO: 3296724 - RNA, 13 nt, Variola virus
aauuaaacaaaac

SEQ ID NO: 3296725 - RNA, 17 nt, Variola virus
aaaucguguuuguguag

SEQ ID NO: 3296726 - RNA, 20 nt, Variola virus
acgaaaguauagcuaaugau

SEQ ID NO: 3296727 - RNA, 15 nt, Variola virus
uauaaauguagacuc

SEQ ID NO: 3296728 - RNA, 13 nt, Variola virus
uagaacaacucuc

SEQ ID NO: 3296729 - RNA, 18 nt, Variola virus
agaaaguaucaaaucgau

SEQ ID NO: 3296730 - RNA, 17 nt, Variola virus
gcauuaaugagaagaau

SEQ ID NO: 3296731 - RNA, 14 nt, Variola virus
ucucaaguuacauu

SEQ ID NO: 3296732 - RNA, 20 nt, Variola virus
ucuaagacgucucauuucua

SEQ ID NO: 3296733 - RNA, 18 nt, Variola virus
guaccuauucuagaaaau

SEQ ID NO: 3296734 - RNA, 17 nt, Variola virus
gucaauuauuucaucaa

SEQ ID NO: 3296735 - RNA, 20 nt, Variola virus
uauacacguuagauuauucu

SEQ ID NO: 3296736 - RNA, 13 nt, Variola virus
uuugaacaucuug

SEQ ID NO: 3296737 - RNA, 10 nt, Variola virus
guuacaaaag

SEQ ID NO: 3296738 - RNA, 17 nt, Variola virus
auacuguguaaagaaau

SEQ ID NO: 3296739 - RNA, 21 nt, Variola virus
agaaggauuggucuuaaaaga

SEQ ID NO: 3296740 - RNA, 23 nt, Variola virus
caucuaucaucuccacacaguca

SEQ ID NO: 3296741 - RNA, 14 nt, Variola virus
auuauuucuaaauu

SEQ ID NO: 3296742 - RNA, 20 nt, Variola virus
ugagauugauguaauacuuu

SEQ ID NO: 3296743 - RNA, 19 nt, Variola virus
uuucuaaauuauuccaauu

SEQ ID NO: 3296744 - RNA, 20 nt, Variola virus
uggauggaucauaauugaug

SEQ ID NO: 3296745 - RNA, 14 nt, Variola virus
auuaauuaauacaa

SEQ ID NO: 3296746 - RNA, 22 nt, Variola virus
auguucucaagaacuacaaaag

SEQ ID NO: 3296747 - RNA, 17 nt, Variola virus
acaauacauguacaaau

SEQ ID NO: 3296748 - RNA, 15 nt, Variola virus
aauagcucaauauaa

SEQ ID NO: 3296749 - RNA, 21 nt, Variola virus
guagauaaaaaagauacgcau

SEQ ID NO: 3296750 - RNA, 15 nt, Variola virus
ugauacguauauaca

SEQ ID NO: 3296751 - RNA, 18 nt, Variola virus
accgaagagcagcuauau

SEQ ID NO: 3296752 - RNA, 19 nt, Variola virus
caaauagagauaaaacaag

SEQ ID NO: 3296753 - RNA, 12 nt, Variola virus
gguguaaaagau

SEQ ID NO: 3296754 - RNA, 15 nt, Variola virus
caaaaugaugauaua

SEQ ID NO: 3296755 - RNA, 16 nt, Variola virus
ucauggaauacauaaa

SEQ ID NO: 3296756 - RNA, 15 nt, Variola virus
aauguuauuacuugu

SEQ ID NO: 3296757 - RNA, 15 nt, Variola virus
augcggaugcucagu

SEQ ID NO: 3296758 - RNA, 16 nt, Variola virus
aauaacaauuaacaau

SEQ ID NO: 3296759 - RNA, 23 nt, Variola virus
uuuacaaaaguccggaugcauaa

SEQ ID NO: 3296760 - RNA, 17 nt, Variola virus
aucgcuuaauagacaaa

SEQ ID NO: 3296761 - RNA, 20 nt, Variola virus
uaauagaucaacagaaauau

SEQ ID NO: 3296762 - RNA, 15 nt, Variola virus
cauuagguuaaauga

SEQ ID NO: 3296763 - RNA, 13 nt, Variola virus
uauaaauuuuaga

SEQ ID NO: 3296764 - RNA, 21 nt, Variola virus
aucaauguccugcuauacuuc

SEQ ID NO: 3296765 - RNA, 13 nt, Variola virus
gacgcacauaugc

SEQ ID NO: 3296766 - RNA, 16 nt, Variola virus
uuaaaacacaaauaug

SEQ ID NO: 3296767 - RNA, 14 nt, Variola virus
aacuaggaaauugg

SEQ ID NO: 3296768 - RNA, 22 nt, Variola virus
aucuucaacguauaguuguuga

SEQ ID NO: 3296769 - RNA, 22 nt, Variola virus
auugcuagccuuaucuucuaua

SEQ ID NO: 3296770 - RNA, 13 nt, Variola virus
aauauuauuacca

SEQ ID NO: 3296771 - RNA, 13 nt, Variola virus
agaugaugauaua

SEQ ID NO: 3296772 - RNA, 14 nt, Variola virus
uucuagucuagaaa

SEQ ID NO: 3296773 - RNA, 20 nt, Variola virus
aaucauucucuucuaucuuu

SEQ ID NO: 3296774 - RNA, 23 nt, Variola virus
uuuugauacuauccaauaaacag

SEQ ID NO: 3296775 - RNA, 21 nt, Variola virus
aauaagaacaaaguaaugccu

SEQ ID NO: 3296776 - RNA, 16 nt, Variola virus
auuauccguauuucca

SEQ ID NO: 3296777 - RNA, 13 nt, Variola virus
caggaacuauuaa

SEQ ID NO: 3296778 - RNA, 20 nt, Variola virus
agagcauauuucauuuccaa

SEQ ID NO: 3296779 - RNA, 18 nt, Variola virus
caguagcgagaaagcauc

SEQ ID NO: 3296780 - RNA, 12 nt, Variola virus
acucuucuuauu

SEQ ID NO: 3296781 - RNA, 12 nt, Variola virus
aaugaauguuua

SEQ ID NO: 3296782 - RNA, 16 nt, Variola virus
aauguugggauccaga

SEQ ID NO: 3296783 - RNA, 19 nt, Variola virus
uuucaagccggcuauauau

SEQ ID NO: 3296784 - RNA, 18 nt, Variola virus
aauuuucuauacauagau

SEQ ID NO: 3296785 - RNA, 14 nt, Variola virus
agaauaaaaugauu

SEQ ID NO: 3296786 - RNA, 16 nt, Variola virus
agugaucaaauuauug

SEQ ID NO: 3296787 - RNA, 19 nt, Variola virus
ucugaaaauccacuaacaa

SEQ ID NO: 3296788 - RNA, 18 nt, Variola virus
uuuagaaggaguguuuuc

SEQ ID NO: 3296789 - RNA, 13 nt, Variola virus
gcauuaauaaugu

SEQ ID NO: 3296790 - RNA, 12 nt, Variola virus
uaguagaugcua

SEQ ID NO: 3296791 - RNA, 16 nt, Variola virus
aucuuacauauacaga

SEQ ID NO: 3296792 - RNA, 20 nt, Variola virus
aguuaauggaauaucaaauc

SEQ ID NO: 3296793 - RNA, 19 nt, Variola virus
gucucuuccgcagauaaau

SEQ ID NO: 3296794 - RNA, 22 nt, Variola virus
cauaauacucccacaaauacug

SEQ ID NO: 3296795 - RNA, 15 nt, Variola virus
aaugaauuuagaaau

SEQ ID NO: 3296796 - RNA, 14 nt, Variola virus
aguugauuguaaac

SEQ ID NO: 3296797 - RNA, 15 nt, Variola virus
auucauuaaggagau

SEQ ID NO: 3296798 - RNA, 18 nt, Variola virus
augacauuguaaaagaaa

SEQ ID NO: 3296799 - RNA, 22 nt, Variola virus
uugagauuaaauguaauaacaa

SEQ ID NO: 3296800 - RNA, 15 nt, Variola virus
gucuccaaucuuuug

SEQ ID NO: 3296801 - RNA, 20 nt, Variola virus
cuauuguuuguuuuaauaua

SEQ ID NO: 3296802 - RNA, 20 nt, Variola virus
auaauaacaaguaugacauu

SEQ ID NO: 3296803 - RNA, 23 nt, Variola virus
agacgaguuuaguauucgagaca

SEQ ID NO: 3296804 - RNA, 17 nt, Variola virus
aaucgcgcguuagaaau

SEQ ID NO: 3296805 - RNA, 16 nt, Variola virus
uauauagcacaaaugu

SEQ ID NO: 3296806 - RNA, 15 nt, Variola virus
guuuccaaaaaaugu

SEQ ID NO: 3296807 - RNA, 21 nt, Variola virus
ugaucuuuauuuuuuguguau

SEQ ID NO: 3296808 - RNA, 14 nt, Variola virus
ucauguagauaguu

SEQ ID NO: 3296809 - RNA, 14 nt, Variola virus
gaacaauuuacuuu

SEQ ID NO: 3296810 - RNA, 22 nt, Variola virus
cuaaaaguauagcaucuggagu

SEQ ID NO: 3296811 - RNA, 18 nt, Variola virus
aauguuagaauuagaaaa

SEQ ID NO: 3296812 - RNA, 17 nt, Variola virus
aucuucauuaucugaua

SEQ ID NO: 3296813 - RNA, 21 nt, Variola virus
cuagauagaaagauguagcua

SEQ ID NO: 3296814 - RNA, 19 nt, Variola virus
auaauacuggagaacuuau

SEQ ID NO: 3296815 - RNA, 22 nt, Variola virus
ugucuagaggcuaaaacauauu

SEQ ID NO: 3296816 - RNA, 19 nt, Variola virus
uguuuagaugaaguauuga

SEQ ID NO: 3296817 - RNA, 17 nt, Variola virus
uacauauuauucaaaau

SEQ ID NO: 3296818 - RNA, 19 nt, Variola virus
guuaaaaaauuaaguguua

SEQ ID NO: 3296819 - RNA, 15 nt, Variola virus
acauuuccuacauau

SEQ ID NO: 3296820 - RNA, 20 nt, Variola virus
uaaauugguacucuaucaua

SEQ ID NO: 3296821 - RNA, 14 nt, Variola virus
cuauaauaaugaau

SEQ ID NO: 3296822 - RNA, 21 nt, Variola virus
uuaaguucaccaaacaacuuu

SEQ ID NO: 3296823 - RNA, 19 nt, Variola virus
aucaauucuggauuauccc

SEQ ID NO: 3296824 - RNA, 19 nt, Variola virus
aaaagacuuucguuaauuu

SEQ ID NO: 3296825 - RNA, 21 nt, Variola virus
uuaugacaaaguuuacauucu

SEQ ID NO: 3296826 - RNA, 14 nt, Variola virus
gcugguaaaguaaa

SEQ ID NO: 3296827 - RNA, 20 nt, Variola virus
uauugugcaucgauaucuuu

SEQ ID NO: 3296828 - RNA, 15 nt, Variola virus
uacgucuucuaaaaa

SEQ ID NO: 3296829 - RNA, 20 nt, Variola virus
agacuaggugcuauggaugg

SEQ ID NO: 3296830 - RNA, 12 nt, Variola virus
uggauuuggauu

SEQ ID NO: 3296831 - RNA, 17 nt, Variola virus
gaaaacuauauacuaua

SEQ ID NO: 3296832 - RNA, 18 nt, Variola virus
aaacacugauucagaaau

SEQ ID NO: 3296833 - RNA, 21 nt, Variola virus
acuaguauaaaaucuguaucg

SEQ ID NO: 3296834 - RNA, 19 nt, Variola virus
uccauuauuuauuuacaga

SEQ ID NO: 3296835 - RNA, 17 nt, Variola virus
acaaauggucaaugaua

SEQ ID NO: 3296836 - RNA, 17 nt, Variola virus
uguacauuaauaaauga

SEQ ID NO: 3296837 - RNA, 23 nt, Variola virus
gcaguuagaacgguuauagcauc

SEQ ID NO: 3296838 - RNA, 21 nt, Variola virus
aaguuugaaacgagugaaaaa

SEQ ID NO: 3296839 - RNA, 19 nt, Variola virus
gacaugcuacaaaauaugu

SEQ ID NO: 3296840 - RNA, 17 nt, Variola virus
ucccauucuaauacuuu

SEQ ID NO: 3296841 - RNA, 19 nt, Variola virus
auaacuucuagauguagaa

SEQ ID NO: 3296842 - RNA, 14 nt, Variola virus
aucgauagacacug

SEQ ID NO: 3296843 - RNA, 12 nt, Variola virus
ucccauguuuca

SEQ ID NO: 3296844 - RNA, 21 nt, Variola virus
agacauuguugaauucuguga

SEQ ID NO: 3296845 - RNA, 20 nt, Variola virus
uuauaguguuuaacaaagau

SEQ ID NO: 3296846 - RNA, 21 nt, Variola virus
auauaagacacagaaauacug

SEQ ID NO: 3296847 - RNA, 15 nt, Variola virus
cuucaauagauaccu

SEQ ID NO: 3296848 - RNA, 22 nt, Variola virus
accaauaugucuguacaaaugu

SEQ ID NO: 3296849 - RNA, 20 nt, Variola virus
auaaaaacaauacaguauau

SEQ ID NO: 3296850 - RNA, 15 nt, Variola virus
auaaugaucauauag

SEQ ID NO: 3296851 - RNA, 22 nt, Variola virus
uuaugaauggauaccuguauua

SEQ ID NO: 3296852 - RNA, 15 nt, Variola virus
uaauuccaaaagaug

SEQ ID NO: 3296853 - RNA, 19 nt, Variola virus
guguagcguuuuaaauauu

SEQ ID NO: 3296854 - RNA, 19 nt, Variola virus
augauuauaguuucuauuu

SEQ ID NO: 3296855 - RNA, 16 nt, Variola virus
aagaguuucaaaaaua

SEQ ID NO: 3296856 - RNA, 15 nt, Variola virus
aaaaauguuaauuua

SEQ ID NO: 3296857 - RNA, 20 nt, Variola virus
guuagaucgucuauauauga

SEQ ID NO: 3296858 - RNA, 17 nt, Variola virus
guaauuuaacuauuuua

SEQ ID NO: 3296859 - RNA, 22 nt, Variola virus
aauauaguauauaauaaagaua

SEQ ID NO: 3296860 - RNA, 15 nt, Variola virus
cauaauccauuucca

SEQ ID NO: 3296861 - RNA, 19 nt, Variola virus
guauaauagacauaaugac

SEQ ID NO: 3296862 - RNA, 15 nt, Variola virus
agagagcagaaauaa

SEQ ID NO: 3296863 - RNA, 17 nt, Variola virus
ucuacuauuuguguauu

SEQ ID NO: 3296864 - RNA, 15 nt, Variola virus
gcaauauauauacag

SEQ ID NO: 3296865 - RNA, 15 nt, Variola virus
uaaaaaaaauuauuu

SEQ ID NO: 3296866 - RNA, 14 nt, Variola virus
uguaaauauaucua

SEQ ID NO: 3296867 - RNA, 19 nt, Variola virus
uuuaaugugugaaaacagu

SEQ ID NO: 3296868 - RNA, 15 nt, Variola virus
guaauacuuuuaguu

SEQ ID NO: 3296869 - RNA, 20 nt, Variola virus
gaugaaaaauuuguagauuu

SEQ ID NO: 3296870 - RNA, 15 nt, Variola virus
uauaugagaugacuu

SEQ ID NO: 3296871 - RNA, 18 nt, Variola virus
ucucccauuaucuuggua

SEQ ID NO: 3296872 - RNA, 19 nt, Variola virus
aaauacguucuauugugua

SEQ ID NO: 3296873 - RNA, 20 nt, Variola virus
caacaaauucugcaauaucu

SEQ ID NO: 3296874 - RNA, 18 nt, Variola virus
caucuaguugauauucca

SEQ ID NO: 3296875 - RNA, 16 nt, Variola virus
aauaccaaugcucaag

SEQ ID NO: 3296876 - RNA, 15 nt, Variola virus
uggcaauguuucaua

SEQ ID NO: 3296877 - RNA, 14 nt, Variola virus
ucuaucauagauuu

SEQ ID NO: 3296878 - RNA, 20 nt, Variola virus
aauaugauuagaaguuauau

SEQ ID NO: 3296879 - RNA, 22 nt, Variola virus
cguauacuuuuuaauucucuau

SEQ ID NO: 3296880 - RNA, 12 nt, Variola virus
auauauuuucca

SEQ ID NO: 3296881 - RNA, 20 nt, Variola virus
aauaguagaaucaaaggaua

SEQ ID NO: 3296882 - RNA, 21 nt, Variola virus
uauuggauucguguaaucaua

SEQ ID NO: 3296883 - RNA, 23 nt, Variola virus
aauacaaaacagaaaacaaaguc

SEQ ID NO: 3296884 - RNA, 15 nt, Variola virus
gcauuaaaugaugaa

SEQ ID NO: 3296885 - RNA, 19 nt, Variola virus
cguuaaagaauuuaacaau

SEQ ID NO: 3296886 - RNA, 22 nt, Variola virus
auaacauucuaggaauguuguu

SEQ ID NO: 3296887 - RNA, 18 nt, Variola virus
uuaagaauugucuguaaa

SEQ ID NO: 3296888 - RNA, 22 nt, Variola virus
cuauacauugcgccaucguguu

SEQ ID NO: 3296889 - RNA, 14 nt, Variola virus
cuaugcuauuugcg

SEQ ID NO: 3296890 - RNA, 19 nt, Variola virus
aaguucauuaucugaaaua

SEQ ID NO: 3296891 - RNA, 14 nt, Variola virus
ucauauguaguguu

SEQ ID NO: 3296892 - RNA, 15 nt, Variola virus
auaauuccaucuacu

SEQ ID NO: 3296893 - RNA, 22 nt, Variola virus
aaucguaucggaguacggagau

SEQ ID NO: 3296894 - RNA, 21 nt, Variola virus
auugcauuuugauaguuuauc

SEQ ID NO: 3296895 - RNA, 19 nt, Variola virus
acauccuuccaagaagaag

SEQ ID NO: 3296896 - RNA, 19 nt, Variola virus
caacucucaaguauccauc

SEQ ID NO: 3296897 - RNA, 21 nt, Variola virus
agacaauugacaaaauucaca

SEQ ID NO: 3296898 - RNA, 15 nt, Variola virus
aauucuuaucaauaa

SEQ ID NO: 3296899 - RNA, 22 nt, Variola virus
uguccuauuucaaaaguuuuua

SEQ ID NO: 3296900 - RNA, 13 nt, Variola virus
gacaaauuauucu

SEQ ID NO: 3296901 - RNA, 22 nt, Variola virus
ccaucaaaagcauuaauacagu

SEQ ID NO: 3296902 - RNA, 16 nt, Variola virus
uaauauaaaaacauua

SEQ ID NO: 3296903 - RNA, 15 nt, Variola virus
cuaacuuuaaacaag

SEQ ID NO: 3296904 - RNA, 23 nt, Variola virus
ucuagcuuauugaguggaaaguu

SEQ ID NO: 3296905 - RNA, 21 nt, Variola virus
cuauuguuaaucaugccacca

SEQ ID NO: 3296906 - RNA, 15 nt, Variola virus
uaauucuuucuccac

SEQ ID NO: 3296907 - RNA, 23 nt, Variola virus
guugaucacauuuagauaagaag

SEQ ID NO: 3296908 - RNA, 15 nt, Variola virus
ucuguagucacuuaa

SEQ ID NO: 3296909 - RNA, 12 nt, Variola virus
cuuuaaaaauuu

SEQ ID NO: 3296910 - RNA, 22 nt, Variola virus
auauacucuaaucuuuaauaga

SEQ ID NO: 3296911 - RNA, 22 nt, Variola virus
auguguguccggaguuagaaag

SEQ ID NO: 3296912 - RNA, 13 nt, Variola virus
auuaauaaugacg

SEQ ID NO: 3296913 - RNA, 18 nt, Variola virus
gaguaguacaagaaauac

SEQ ID NO: 3296914 - RNA, 14 nt, Variola virus
uuugcuauuucuau

SEQ ID NO: 3296915 - RNA, 15 nt, Variola virus
cugugcaucaacagu

SEQ ID NO: 3296916 - RNA, 18 nt, Variola virus
uagaaacaugucuagaaa

SEQ ID NO: 3296917 - RNA, 16 nt, Variola virus
aucaacgaguuaaaaa

SEQ ID NO: 3296918 - RNA, 21 nt, Variola virus
cgaucuuguuguuuauuuuca

SEQ ID NO: 3296919 - RNA, 19 nt, Variola virus
caauuaauuaauacaguaa

SEQ ID NO: 3296920 - RNA, 19 nt, Variola virus
cucauuuuuugaauauacu

SEQ ID NO: 3296921 - RNA, 18 nt, Variola virus
ggauuaauauaugucaua

SEQ ID NO: 3296922 - RNA, 15 nt, Variola virus
ucuuaaaaauacuua

SEQ ID NO: 3296923 - RNA, 18 nt, Variola virus
aguuaaaacuuuaucauc

SEQ ID NO: 3296924 - RNA, 20 nt, Variola virus
ugagauguuauuaaauguug

SEQ ID NO: 3296925 - RNA, 18 nt, Variola virus
ucucagaaucaaauauag

SEQ ID NO: 3296926 - RNA, 15 nt, Variola virus
aacaucuaacuauau

SEQ ID NO: 3296927 - RNA, 19 nt, Variola virus
ccauacucgucauccucau

SEQ ID NO: 3296928 - RNA, 15 nt, Variola virus
gauguaguaguauau

SEQ ID NO: 3296929 - RNA, 13 nt, Variola virus
auucguaaaucuu

SEQ ID NO: 3296930 - RNA, 22 nt, Variola virus
gacacugccguauauaggaaaa

SEQ ID NO: 3296931 - RNA, 20 nt, Variola virus
uaaugaugaccuauaugccc

SEQ ID NO: 3296932 - RNA, 17 nt, Variola virus
caaaauccuauauugua

SEQ ID NO: 3296933 - RNA, 13 nt, Variola virus
ucaaaaauuuaga

SEQ ID NO: 3296934 - RNA, 21 nt, Variola virus
uaaaauuagaugugucauacu

SEQ ID NO: 3296935 - RNA, 18 nt, Variola virus
augugaauuuagcauaua

SEQ ID NO: 3296936 - RNA, 21 nt, Variola virus
acaccaucuucauaauaaaua

SEQ ID NO: 3296937 - RNA, 14 nt, Variola virus
agcugcaucuaaau

SEQ ID NO: 3296938 - RNA, 13 nt, Variola virus
uaggauucucauc

SEQ ID NO: 3296939 - RNA, 16 nt, Variola virus
aaguuaaauagaaugc

SEQ ID NO: 3296940 - RNA, 18 nt, Variola virus
auacauaguugugaucau

SEQ ID NO: 3296941 - RNA, 19 nt, Variola virus
aucuggaggauguauauau

SEQ ID NO: 3296942 - RNA, 18 nt, Variola virus
cucaaaugaauaaguuua

SEQ ID NO: 3296943 - RNA, 13 nt, Variola virus
uaaguucuuuaua

SEQ ID NO: 3296944 - RNA, 19 nt, Variola virus
agcgcugaaaauaaagaua

SEQ ID NO: 3296945 - RNA, 16 nt, Variola virus
uaggaguuagaauaau

SEQ ID NO: 3296946 - RNA, 16 nt, Variola virus
auuucaaucaaacaaa

SEQ ID NO: 3296947 - RNA, 23 nt, Variola virus
agaaccacuauguuaauacuuau

SEQ ID NO: 3296948 - RNA, 16 nt, Variola virus
uuaaaaaguuaucuuu

SEQ ID NO: 3296949 - RNA, 23 nt, Variola virus
caaacaauuaauuaauacaguaa

SEQ ID NO: 3296950 - RNA, 14 nt, Variola virus
uaucccccguauuu

SEQ ID NO: 3296951 - RNA, 16 nt, Variola virus
ccuauaaacaugaauu

SEQ ID NO: 3296952 - RNA, 19 nt, Variola virus
aaagauuugcuucuaaaau

SEQ ID NO: 3296953 - RNA, 12 nt, Variola virus
aucguccuaaua

SEQ ID NO: 3296954 - RNA, 18 nt, Variola virus
uagacauuagauaugcca

SEQ ID NO: 3296955 - RNA, 17 nt, Variola virus
aaucccgucucagaaag

SEQ ID NO: 3296956 - RNA, 14 nt, Variola virus
uuaauauuacuguu

SEQ ID NO: 3296957 - RNA, 14 nt, Variola virus
uagcgacaggugau

SEQ ID NO: 3296958 - RNA, 20 nt, Variola virus
cuauaaaaaaaauaauaauu

SEQ ID NO: 3296959 - RNA, 11 nt, Variola virus
auauggaugag

SEQ ID NO: 3296960 - RNA, 15 nt, Variola virus
gaacauaauaauaua

SEQ ID NO: 3296961 - RNA, 22 nt, Variola virus
aaacacgucaaagguuaacauc

SEQ ID NO: 3296962 - RNA, 17 nt, Variola virus
ugauuaguauuuucuau

SEQ ID NO: 3296963 - RNA, 15 nt, Variola virus
gauagaacaaaauac

SEQ ID NO: 3296964 - RNA, 20 nt, Variola virus
ucauuaacuagacguuuauu

SEQ ID NO: 3296965 - RNA, 13 nt, Variola virus
acgucauuucauc

SEQ ID NO: 3296966 - RNA, 17 nt, Variola virus
aaugcuugaaaauggac

SEQ ID NO: 3296967 - RNA, 15 nt, Variola virus
auccuauucuaaaug

SEQ ID NO: 3296968 - RNA, 15 nt, Variola virus
ugcaacauuaacauc

SEQ ID NO: 3296969 - RNA, 22 nt, Variola virus
uauagauggagguaauuggcau

SEQ ID NO: 3296970 - RNA, 17 nt, Variola virus
aauuaaucauauacaac

SEQ ID NO: 3296971 - RNA, 21 nt, Variola virus
caucagauguuccggaaagag

SEQ ID NO: 3296972 - RNA, 16 nt, Variola virus
cuaguacugaggauuu

SEQ ID NO: 3296973 - RNA, 15 nt, Variola virus
aucuuuguucuuaag

SEQ ID NO: 3296974 - RNA, 14 nt, Variola virus
cgauaauagauagu

SEQ ID NO: 3296975 - RNA, 22 nt, Variola virus
uuacacuacauuuuuaucauaa

SEQ ID NO: 3296976 - RNA, 15 nt, Variola virus
auucuucgguaacuu

SEQ ID NO: 3296977 - RNA, 22 nt, Variola virus
ugauaugauuuuuaaucaagau

SEQ ID NO: 3296978 - RNA, 21 nt, Variola virus
ggacagauacuacuauuuguc

SEQ ID NO: 3296979 - RNA, 18 nt, Variola virus
auuauuacauagauguau

SEQ ID NO: 3296980 - RNA, 19 nt, Variola virus
agaaaacaaagucuagauu

SEQ ID NO: 3296981 - RNA, 18 nt, Variola virus
aauaaacaucaacauugu

SEQ ID NO: 3296982 - RNA, 20 nt, Variola virus
acugcaaaacuuaaauguua

SEQ ID NO: 3296983 - RNA, 15 nt, Variola virus
uaugacuaaacauuu

SEQ ID NO: 3296984 - RNA, 14 nt, Variola virus
gugauaauuuccag

SEQ ID NO: 3296985 - RNA, 18 nt, Variola virus
uacuaauaggucuaaaaa

SEQ ID NO: 3296986 - RNA, 24 nt, Variola virus
ugaaaugauaccaguaauuuacug

SEQ ID NO: 3296987 - RNA, 22 nt, Variola virus
cuuucaaugcacgggcacugau

SEQ ID NO: 3296988 - RNA, 22 nt, Variola virus
gacauaagucgccucaaagaua

SEQ ID NO: 3296989 - RNA, 12 nt, Variola virus
uuacuauuuugg

SEQ ID NO: 3296990 - RNA, 14 nt, Variola virus
cuuccaacauaaua

SEQ ID NO: 3296991 - RNA, 18 nt, Variola virus
uaucaauccaacaaaugc

SEQ ID NO: 3296992 - RNA, 22 nt, Variola virus
aauaauguaguaaauauaaaau

SEQ ID NO: 3296993 - RNA, 15 nt, Variola virus
acugauucagaaaug

SEQ ID NO: 3296994 - RNA, 20 nt, Variola virus
agaaaugaaguuaugacauu

SEQ ID NO: 3296995 - RNA, 22 nt, Variola virus
uauccaguuaagagaauaauag

SEQ ID NO: 3296996 - RNA, 18 nt, Variola virus
augcuauaccuaauacua

SEQ ID NO: 3296997 - RNA, 17 nt, Variola virus
uucucuuugauaaaagu

SEQ ID NO: 3296998 - RNA, 13 nt, Variola virus
gauucuuauucac

SEQ ID NO: 3296999 - RNA, 20 nt, Variola virus
gaauccaucucuauguuuca

SEQ ID NO: 3297000 - RNA, 16 nt, Variola virus
uaaagaaaagauaucc

SEQ ID NO: 3297001 - RNA, 13 nt, Variola virus
guuuaauauccuu

SEQ ID NO: 3297002 - RNA, 18 nt, Variola virus
cuauaaaacuacuacaau

SEQ ID NO: 3297003 - RNA, 23 nt, Variola virus
acuaaucgauuuugcauacucua

SEQ ID NO: 3297004 - RNA, 21 nt, Variola virus
gaauauugggcaaagauauuu

SEQ ID NO: 3297005 - RNA, 17 nt, Variola virus
uaguuuaucuuuuucua

SEQ ID NO: 3297006 - RNA, 19 nt, Variola virus
cguauaaaguuauauaauu

SEQ ID NO: 3297007 - RNA, 18 nt, Variola virus
uacauacgaauaacaaaa

SEQ ID NO: 3297008 - RNA, 14 nt, Variola virus
auguguagaauuaa

SEQ ID NO: 3297009 - RNA, 21 nt, Variola virus
cagcuccccuacguaucuaua

SEQ ID NO: 3297010 - RNA, 23 nt, Variola virus
ucaucauuaacaauccaauaaua

SEQ ID NO: 3297011 - RNA, 19 nt, Variola virus
aaucaaggaacuaaauaga

SEQ ID NO: 3297012 - RNA, 13 nt, Variola virus
agucgcuauuuuu

SEQ ID NO: 3297013 - RNA, 14 nt, Variola virus
ggaucuuaccaucu

SEQ ID NO: 3297014 - RNA, 19 nt, Variola virus
aaaguagaaaauauauucu

SEQ ID NO: 3297015 - RNA, 19 nt, Variola virus
ucuauuaauuauagaugua

SEQ ID NO: 3297016 - RNA, 19 nt, Variola virus
acgacucauuuaguuuauu

SEQ ID NO: 3297017 - RNA, 21 nt, Variola virus
uaucgauuagucuuaaugaua

SEQ ID NO: 3297018 - RNA, 17 nt, Variola virus
gccuuauauagcacuuu

SEQ ID NO: 3297019 - RNA, 18 nt, Variola virus
acguaaugaaguuaauga

SEQ ID NO: 3297020 - RNA, 17 nt, Variola virus
gauauaucaaaauuaga

SEQ ID NO: 3297021 - RNA, 18 nt, Variola virus
aucuacucauagaaaggu

SEQ ID NO: 3297022 - RNA, 19 nt, Variola virus
guuaauuaugcaaauuuga

SEQ ID NO: 3297023 - RNA, 18 nt, Variola virus
agauauaccagaacuauu

SEQ ID NO: 3297024 - RNA, 21 nt, Variola virus
aucuauuaaacagaaauggug

SEQ ID NO: 3297025 - RNA, 23 nt, Variola virus
auuaaaaacaaacuuuuuauccu

SEQ ID NO: 3297026 - RNA, 22 nt, Variola virus
uggcaacgacuauuuuagaaau

SEQ ID NO: 3297027 - RNA, 20 nt, Variola virus
ugaacuauuucuugaaugag

SEQ ID NO: 3297028 - RNA, 20 nt, Variola virus
auacuuuguccguaaaacau

SEQ ID NO: 3297029 - RNA, 13 nt, Variola virus
gugauuuuccaac

SEQ ID NO: 3297030 - RNA, 17 nt, Variola virus
uaaugacaauaauuaug

SEQ ID NO: 3297031 - RNA, 20 nt, Variola virus
uauccaaggacaaggaugaa

SEQ ID NO: 3297032 - RNA, 17 nt, Variola virus
agucuacugcuagaaaa

SEQ ID NO: 3297033 - RNA, 13 nt, Variola virus
gucucuuaaagga

SEQ ID NO: 3297034 - RNA, 17 nt, Variola virus
aaaugguaaauacugua

SEQ ID NO: 3297035 - RNA, 14 nt, Variola virus
cauauucuacucuu

SEQ ID NO: 3297036 - RNA, 15 nt, Variola virus
uauaauuuuuggaca

SEQ ID NO: 3297037 - RNA, 23 nt, Variola virus
uauggucucaucguuguuuagaa

SEQ ID NO: 3297038 - RNA, 15 nt, Variola virus
aauuuaaaaugagua

SEQ ID NO: 3297039 - RNA, 14 nt, Variola virus
uaauaguguuugaa

SEQ ID NO: 3297040 - RNA, 14 nt, Variola virus
aucuuauuuagaga

SEQ ID NO: 3297041 - RNA, 20 nt, Variola virus
uugauccuagaacuagauau

SEQ ID NO: 3297042 - RNA, 21 nt, Variola virus
aucgcuauaauucauauuaau

SEQ ID NO: 3297043 - RNA, 16 nt, Variola virus
caaguaacaacaaaaa

SEQ ID NO: 3297044 - RNA, 12 nt, Variola virus
uccaauguuuaa

SEQ ID NO: 3297045 - RNA, 15 nt, Variola virus
auuauuugacuuugu

SEQ ID NO: 3297046 - RNA, 19 nt, Variola virus
auucugccguguuuaaaaa

SEQ ID NO: 3297047 - RNA, 19 nt, Variola virus
gcgauuguagauaaugaaa

SEQ ID NO: 3297048 - RNA, 21 nt, Variola virus
uuauacaucgaauauaaaaua

SEQ ID NO: 3297049 - RNA, 22 nt, Variola virus
aaacuuuagaagaauaucucaa

SEQ ID NO: 3297050 - RNA, 12 nt, Variola virus
aaucugaaaaug

SEQ ID NO: 3297051 - RNA, 16 nt, Variola virus
gaaaauuuauaaacua

SEQ ID NO: 3297052 - RNA, 20 nt, Variola virus
cgauuuauaaaaaaauaccg

SEQ ID NO: 3297053 - RNA, 18 nt, Variola virus
uaccuuucuacaugaaau

SEQ ID NO: 3297054 - RNA, 12 nt, Variola virus
auaaaaauaugg

SEQ ID NO: 3297055 - RNA, 14 nt, Variola virus
gauuauacagguua

SEQ ID NO: 3297056 - RNA, 16 nt, Variola virus
auuuauuuaaaaugau

SEQ ID NO: 3297057 - RNA, 17 nt, Variola virus
agaacuaccaauauguc

SEQ ID NO: 3297058 - RNA, 10 nt, Variola virus
guauuuccau

SEQ ID NO: 3297059 - RNA, 22 nt, Variola virus
uaaauaauucucugaugucauu

SEQ ID NO: 3297060 - RNA, 22 nt, Variola virus
aguuuucucuuggcuucuucca

SEQ ID NO: 3297061 - RNA, 22 nt, Variola virus
gcacuguguauuauuuaguuca

SEQ ID NO: 3297062 - RNA, 16 nt, Variola virus
ugguuuaguucaucua

SEQ ID NO: 3297063 - RNA, 21 nt, Variola virus
caaaauacucaggaagauauu

SEQ ID NO: 3297064 - RNA, 17 nt, Variola virus
ugugacuagacugauuu

SEQ ID NO: 3297065 - RNA, 23 nt, Variola virus
acuauuacagaaguuuuaaaaga

SEQ ID NO: 3297066 - RNA, 17 nt, Variola virus
auaauaugacucaugau

SEQ ID NO: 3297067 - RNA, 20 nt, Variola virus
uagagaccgcgucuguuaua

SEQ ID NO: 3297068 - RNA, 15 nt, Variola virus
uaugacuuaauagca

SEQ ID NO: 3297069 - RNA, 21 nt, Variola virus
accaauaaaaauaaacuagaa

SEQ ID NO: 3297070 - RNA, 14 nt, Variola virus
uuuacucuucuaaa

SEQ ID NO: 3297071 - RNA, 15 nt, Variola virus
uaucuaauaauauua

SEQ ID NO: 3297072 - RNA, 12 nt, Variola virus
aguaaauacaau

SEQ ID NO: 3297073 - RNA, 12 nt, Variola virus
acuacaauaauu

SEQ ID NO: 3297074 - RNA, 23 nt, Variola virus
agggguuguauuguuauuuuaca

SEQ ID NO: 3297075 - RNA, 19 nt, Variola virus
uaccuggaauguaaagccc

SEQ ID NO: 3297076 - RNA, 22 nt, Variola virus
acgaucgauacuuugguuuauu

SEQ ID NO: 3297077 - RNA, 14 nt, Variola virus
auucacuuaacaau

SEQ ID NO: 3297078 - RNA, 12 nt, Variola virus
ucaauuauacuc

SEQ ID NO: 3297079 - RNA, 15 nt, Variola virus
agauacauaaaacuu

SEQ ID NO: 3297080 - RNA, 21 nt, Variola virus
augucaaaggaugaaagaaag

SEQ ID NO: 3297081 - RNA, 22 nt, Variola virus
aguacucucuuauaaaguggau

SEQ ID NO: 3297082 - RNA, 13 nt, Variola virus
ggaggaauugaua

SEQ ID NO: 3297083 - RNA, 12 nt, Variola virus
gaaaaaauaacu

SEQ ID NO: 3297084 - RNA, 16 nt, Variola virus
auuucaaauauauuua

SEQ ID NO: 3297085 - RNA, 23 nt, Variola virus
gauuggucuuaaaagauauuaau

SEQ ID NO: 3297086 - RNA, 20 nt, Variola virus
cuucuaaugauauauuuucc

SEQ ID NO: 3297087 - RNA, 19 nt, Variola virus
ggaaaggaugauucaucaa

SEQ ID NO: 3297088 - RNA, 22 nt, Variola virus
agucacgaucaccacuuucaua

SEQ ID NO: 3297089 - RNA, 14 nt, Variola virus
aguaaaaagacuaa

SEQ ID NO: 3297090 - RNA, 14 nt, Variola virus
acauugauuaaaga

SEQ ID NO: 3297091 - RNA, 15 nt, Variola virus
gaagugguuaaucuu

SEQ ID NO: 3297092 - RNA, 16 nt, Variola virus
aauugauaauauaaau

SEQ ID NO: 3297093 - RNA, 19 nt, Variola virus
acaauuauuauauaauucu

SEQ ID NO: 3297094 - RNA, 12 nt, Variola virus
aauaauguucaa

SEQ ID NO: 3297095 - RNA, 13 nt, Variola virus
cuugcaaguuaaa

SEQ ID NO: 3297096 - RNA, 21 nt, Variola virus
uuuaucuuucccccuagauac

SEQ ID NO: 3297097 - RNA, 13 nt, Variola virus
augauacgugcau

SEQ ID NO: 3297098 - RNA, 22 nt, Variola virus
gaucuauucaagaugaaaucgu

SEQ ID NO: 3297099 - RNA, 21 nt, Variola virus
agaauuauaccaauagauaau

SEQ ID NO: 3297100 - RNA, 21 nt, Variola virus
auggucauguuuauuucuagc

SEQ ID NO: 3297101 - RNA, 15 nt, Variola virus
aguuauuuacuuuga

SEQ ID NO: 3297102 - RNA, 15 nt, Variola virus
agguagcaaaaaaac

SEQ ID NO: 3297103 - RNA, 16 nt, Variola virus
ucuaucuuuuauuuua

SEQ ID NO: 3297104 - RNA, 18 nt, Variola virus
uuuaaauagcauagauau

SEQ ID NO: 3297105 - RNA, 20 nt, Variola virus
aucagaugauaucaguauau

SEQ ID NO: 3297106 - RNA, 12 nt, Variola virus
acuauugccauc

SEQ ID NO: 3297107 - RNA, 16 nt, Variola virus
cgaaacuuagaagagu

SEQ ID NO: 3297108 - RNA, 19 nt, Variola virus
gaugaauuaucguuauuau

SEQ ID NO: 3297109 - RNA, 16 nt, Variola virus
auuuucuacaauaacu

SEQ ID NO: 3297110 - RNA, 23 nt, Variola virus
ugcaucuauauaaucuuuuucau

SEQ ID NO: 3297111 - RNA, 23 nt, Variola virus
auguacucacggcuacggcauua

SEQ ID NO: 3297112 - RNA, 18 nt, Variola virus
ugauauguauauuauuca

SEQ ID NO: 3297113 - RNA, 14 nt, Variola virus
aggaagaaaauauu

SEQ ID NO: 3297114 - RNA, 12 nt, Variola virus
uaauauaaacau

SEQ ID NO: 3297115 - RNA, 17 nt, Variola virus
aagucuuacaauguuug

SEQ ID NO: 3297116 - RNA, 23 nt, Variola virus
gauauuuagcaauuucugauucu

SEQ ID NO: 3297117 - RNA, 12 nt, Variola virus
uuuuccaugaua

SEQ ID NO: 3297118 - RNA, 14 nt, Variola virus
ggaugauaugaaga

SEQ ID NO: 3297119 - RNA, 14 nt, Variola virus
aauuauuauccaau

SEQ ID NO: 3297120 - RNA, 18 nt, Variola virus
uaaauuaguagaaaauac

SEQ ID NO: 3297121 - RNA, 19 nt, Variola virus
auuuguucguaugucauaa

SEQ ID NO: 3297122 - RNA, 14 nt, Variola virus
ucacguuaauaacg

SEQ ID NO: 3297123 - RNA, 16 nt, Variola virus
caucaaaaaacaacug

SEQ ID NO: 3297124 - RNA, 13 nt, Variola virus
aaaauauguauaa

SEQ ID NO: 3297125 - RNA, 21 nt, Variola virus
aaauuauuccaauuauuugaa

SEQ ID NO: 3297126 - RNA, 18 nt, Variola virus
ucaaaaaaagauuauucg

SEQ ID NO: 3297127 - RNA, 15 nt, Variola virus
aaguaaauacugaau

SEQ ID NO: 3297128 - RNA, 21 nt, Variola virus
gaucagguaaaacaauaaucg

SEQ ID NO: 3297129 - RNA, 15 nt, Variola virus
aucuuuuuaggaaug

SEQ ID NO: 3297130 - RNA, 20 nt, Variola virus
uucuaauggaugauguucua

SEQ ID NO: 3297131 - RNA, 15 nt, Variola virus
gaaagcgagaaauaa

SEQ ID NO: 3297132 - RNA, 20 nt, Variola virus
aauucuacaacauuauuaua

SEQ ID NO: 3297133 - RNA, 19 nt, Variola virus
auaagagaucuaguaacua

SEQ ID NO: 3297134 - RNA, 12 nt, Variola virus
ucugaauuauug

SEQ ID NO: 3297135 - RNA, 14 nt, Variola virus
acaauuuuaacaga

SEQ ID NO: 3297136 - RNA, 16 nt, Variola virus
ugggcucaaugucuua

SEQ ID NO: 3297137 - RNA, 16 nt, Variola virus
ccaucgauuguuuauu

SEQ ID NO: 3297138 - RNA, 14 nt, Variola virus
aaacauauucuaug

SEQ ID NO: 3297139 - RNA, 17 nt, Variola virus
cuagaauuagaauuaca

SEQ ID NO: 3297140 - RNA, 18 nt, Variola virus
cagaauagauauuaaugu

SEQ ID NO: 3297141 - RNA, 16 nt, Variola virus
aacucaucuaccauuu

SEQ ID NO: 3297142 - RNA, 20 nt, Variola virus
auuccuaccaaacaaaauuu

SEQ ID NO: 3297143 - RNA, 19 nt, Variola virus
auuucuuauguuauuaaug

SEQ ID NO: 3297144 - RNA, 20 nt, Variola virus
aaauauuuucguugugaaga

SEQ ID NO: 3297145 - RNA, 15 nt, Variola virus
acuuugguaaauguu

SEQ ID NO: 3297146 - RNA, 21 nt, Variola virus
cacguaaccauucuaaacaau

SEQ ID NO: 3297147 - RNA, 13 nt, Variola virus
agaaauauauauu

SEQ ID NO: 3297148 - RNA, 16 nt, Variola virus
aaugugaaugaaaaua

SEQ ID NO: 3297149 - RNA, 15 nt, Variola virus
caagauaagcaaacg

SEQ ID NO: 3297150 - RNA, 13 nt, Variola virus
gucguaugaugaa

SEQ ID NO: 3297151 - RNA, 13 nt, Variola virus
guauugauaaaau

SEQ ID NO: 3297152 - RNA, 22 nt, Variola virus
guaaaccgauaguguauaaaga

SEQ ID NO: 3297153 - RNA, 20 nt, Variola virus
aauaagaaauaugaaaucua

SEQ ID NO: 3297154 - RNA, 14 nt, Variola virus
cgaaccagaaagug

SEQ ID NO: 3297155 - RNA, 21 nt, Variola virus
acuaauuaagcauauucuuaa

SEQ ID NO: 3297156 - RNA, 16 nt, Variola virus
accaaaucaaaacaaa

SEQ ID NO: 3297157 - RNA, 14 nt, Variola virus
auauaguaccuaga

SEQ ID NO: 3297158 - RNA, 14 nt, Variola virus
uuguacaaauuccu

SEQ ID NO: 3297159 - RNA, 14 nt, Variola virus
caucaaaaaacaac

SEQ ID NO: 3297160 - RNA, 17 nt, Variola virus
cuacaguaauguccaaa

SEQ ID NO: 3297161 - RNA, 14 nt, Variola virus
auaauuauaagacu

SEQ ID NO: 3297162 - RNA, 22 nt, Variola virus
aacaucuaauugugauaaaugu

SEQ ID NO: 3297163 - RNA, 17 nt, Variola virus
aauaaauauaacuuauu

SEQ ID NO: 3297164 - RNA, 22 nt, Variola virus
cuccuguaucuguuaaaacuac

SEQ ID NO: 3297165 - RNA, 14 nt, Variola virus
auaacuuuuucaau

SEQ ID NO: 3297166 - RNA, 14 nt, Variola virus
uaaacuuuaacaau

SEQ ID NO: 3297167 - RNA, 19 nt, Variola virus
acagaugagagauaauaua

SEQ ID NO: 3297168 - RNA, 18 nt, Variola virus
aauuacugauaauguaga

SEQ ID NO: 3297169 - RNA, 23 nt, Variola virus
uagauucuauugugucuguuaau

SEQ ID NO: 3297170 - RNA, 14 nt, Variola virus
uaaacgcguguaau

SEQ ID NO: 3297171 - RNA, 23 nt, Variola virus
agaaauaaaggcagaaauacaau

SEQ ID NO: 3297172 - RNA, 12 nt, Variola virus
auuauucauuuu

SEQ ID NO: 3297173 - RNA, 15 nt, Variola virus
aaagucugaucuuaa

SEQ ID NO: 3297174 - RNA, 16 nt, Variola virus
caaauggauguuaaug

SEQ ID NO: 3297175 - RNA, 16 nt, Variola virus
ucauuaacuagacguu

SEQ ID NO: 3297176 - RNA, 21 nt, Variola virus
cucguaugaaagauuaauuug

SEQ ID NO: 3297177 - RNA, 21 nt, Variola virus
uauucaucgucgacuaucaac

SEQ ID NO: 3297178 - RNA, 14 nt, Variola virus
uaaaccauuuuuca

SEQ ID NO: 3297179 - RNA, 20 nt, Variola virus
aaaacauuauaauaauauaa

SEQ ID NO: 3297180 - RNA, 22 nt, Variola virus
aguacccacugaugagauguua

SEQ ID NO: 3297181 - RNA, 14 nt, Variola virus
aaauauauacuuca

SEQ ID NO: 3297182 - RNA, 16 nt, Variola virus
uuguagauuuaucaua

SEQ ID NO: 3297183 - RNA, 18 nt, Variola virus
uuuauuagcguacacauu

SEQ ID NO: 3297184 - RNA, 12 nt, Variola virus
uucaucagauau

SEQ ID NO: 3297185 - RNA, 20 nt, Variola virus
gaagaauucuagaucaagaa

SEQ ID NO: 3297186 - RNA, 12 nt, Variola virus
auuacaaacaug

SEQ ID NO: 3297187 - RNA, 17 nt, Variola virus
uaguaaucguuaucauu

SEQ ID NO: 3297188 - RNA, 14 nt, Variola virus
guacaacauuccaa

SEQ ID NO: 3297189 - RNA, 19 nt, Variola virus
ucucuauucugaaauaauu

SEQ ID NO: 3297190 - RNA, 19 nt, Variola virus
cuauuagaucauuaacaga

SEQ ID NO: 3297191 - RNA, 15 nt, Variola virus
uacccaauaaaaugu

SEQ ID NO: 3297192 - RNA, 19 nt, Variola virus
guaucgacgguaaauggaa

SEQ ID NO: 3297193 - RNA, 20 nt, Variola virus
uauuucaaaauuauuuacca

SEQ ID NO: 3297194 - RNA, 19 nt, Variola virus
uuuauaucugauuuuucuu

SEQ ID NO: 3297195 - RNA, 18 nt, Variola virus
ucaguugcuguugaagag

SEQ ID NO: 3297196 - RNA, 19 nt, Variola virus
ucuaaugugauucucugaa

SEQ ID NO: 3297197 - RNA, 13 nt, Variola virus
aaauaaugaccaa

SEQ ID NO: 3297198 - RNA, 15 nt, Variola virus
gugcagauaaucauu

SEQ ID NO: 3297199 - RNA, 15 nt, Variola virus
ucguacuauauacaa

SEQ ID NO: 3297200 - RNA, 20 nt, Variola virus
uaguuuguaauuuuaacaua

SEQ ID NO: 3297201 - RNA, 16 nt, Variola virus
aucuaauuuacuaucu

SEQ ID NO: 3297202 - RNA, 23 nt, Variola virus
uucuccaugaauuaauacauauu

SEQ ID NO: 3297203 - RNA, 13 nt, Variola virus
aggaacaaauauu

SEQ ID NO: 3297204 - RNA, 12 nt, Variola virus
ccauuuuagaga

SEQ ID NO: 3297205 - RNA, 16 nt, Variola virus
uguaauuacauacuuu

SEQ ID NO: 3297206 - RNA, 13 nt, Variola virus
uagcaauugcauu

SEQ ID NO: 3297207 - RNA, 16 nt, Variola virus
cauuagagaaauguac

SEQ ID NO: 3297208 - RNA, 17 nt, Variola virus
uccaaaaagaaugagua

SEQ ID NO: 3297209 - RNA, 20 nt, Variola virus
cgacuacucuggguaacaaa

SEQ ID NO: 3297210 - RNA, 19 nt, Variola virus
ucuauuccaaauauucaga

SEQ ID NO: 3297211 - RNA, 18 nt, Variola virus
aaucuagauuccaaucau

SEQ ID NO: 3297212 - RNA, 16 nt, Variola virus
gauccaggguauuaua

SEQ ID NO: 3297213 - RNA, 13 nt, Variola virus
ucaauuuguacau

SEQ ID NO: 3297214 - RNA, 15 nt, Variola virus
cuaaacuuauuuaga

SEQ ID NO: 3297215 - RNA, 16 nt, Variola virus
cgcuuaacaucuucua

SEQ ID NO: 3297216 - RNA, 20 nt, Variola virus
acuucucuguccuuaauaag

SEQ ID NO: 3297217 - RNA, 17 nt, Variola virus
uauaaaauagaaaauaa

SEQ ID NO: 3297218 - RNA, 21 nt, Variola virus
uccauaaacaauauuaaggag

SEQ ID NO: 3297219 - RNA, 21 nt, Variola virus
acaaauaauuacaaaaccgau

SEQ ID NO: 3297220 - RNA, 12 nt, Variola virus
cuucaucuguaa

SEQ ID NO: 3297221 - RNA, 16 nt, Variola virus
acuagacuauuaauaa

SEQ ID NO: 3297222 - RNA, 19 nt, Variola virus
uuagaucuuuuacacuguu

SEQ ID NO: 3297223 - RNA, 20 nt, Variola virus
uauaaaggaauaaaauauga

SEQ ID NO: 3297224 - RNA, 21 nt, Variola virus
uugucguaaauacaugucuaa

SEQ ID NO: 3297225 - RNA, 15 nt, Variola virus
caucuguuguaucau

SEQ ID NO: 3297226 - RNA, 17 nt, Variola virus
uauaaaucaaauacuug

SEQ ID NO: 3297227 - RNA, 19 nt, Variola virus
auuaaucuaguagaaaaga

SEQ ID NO: 3297228 - RNA, 16 nt, Variola virus
cuguauuaaagauauu

SEQ ID NO: 3297229 - RNA, 20 nt, Variola virus
uaaaccaucuuacuuaaaau

SEQ ID NO: 3297230 - RNA, 17 nt, Variola virus
acauacgucuauuucua

SEQ ID NO: 3297231 - RNA, 19 nt, Variola virus
uagaugaacuuuaauucaa

SEQ ID NO: 3297232 - RNA, 13 nt, Variola virus
uucuagaccaaaa

SEQ ID NO: 3297233 - RNA, 19 nt, Variola virus
uucuaaaaugguaaacuuu

SEQ ID NO: 3297234 - RNA, 19 nt, Variola virus
cauguaacaauauuacaau

SEQ ID NO: 3297235 - RNA, 20 nt, Variola virus
ucuucgaaaagaaacagaua

SEQ ID NO: 3297236 - RNA, 15 nt, Variola virus
aaauuauaaugaaua

SEQ ID NO: 3297237 - RNA, 16 nt, Variola virus
augaagaauggaugau

SEQ ID NO: 3297238 - RNA, 14 nt, Variola virus
uaguuuauaucuuu

SEQ ID NO: 3297239 - RNA, 13 nt, Variola virus
uucaggaacauaa

SEQ ID NO: 3297240 - RNA, 21 nt, Variola virus
aauauuuaguuuauucauaau

SEQ ID NO: 3297241 - RNA, 14 nt, Variola virus
cugucaauaagaca

SEQ ID NO: 3297242 - RNA, 24 nt, Variola virus
caacaugauuauucuacuaucaaa

SEQ ID NO: 3297243 - RNA, 20 nt, Variola virus
acaaagauaccgaagaauua

SEQ ID NO: 3297244 - RNA, 19 nt, Variola virus
acauuaaucuauuagaauu

SEQ ID NO: 3297245 - RNA, 18 nt, Variola virus
uaaagucuacauugucau

SEQ ID NO: 3297246 - RNA, 18 nt, Variola virus
aaugacaucgcauuuaua

SEQ ID NO: 3297247 - RNA, 21 nt, Variola virus
acgucuccaauauaugauaac

SEQ ID NO: 3297248 - RNA, 17 nt, Variola virus
uuaaauccuuguuugau

SEQ ID NO: 3297249 - RNA, 19 nt, Variola virus
aauuauuuuuucuuaguaa

SEQ ID NO: 3297250 - RNA, 14 nt, Variola virus
auuuucuaacguga

SEQ ID NO: 3297251 - RNA, 18 nt, Variola virus
gaauauuuugauaaugaa

SEQ ID NO: 3297252 - RNA, 19 nt, Variola virus
guuauucucggaugcuaaa

SEQ ID NO: 3297253 - RNA, 22 nt, Variola virus
uuuucuacugaugcauguauuu

SEQ ID NO: 3297254 - RNA, 15 nt, Variola virus
agugcacuuagucca

SEQ ID NO: 3297255 - RNA, 23 nt, Variola virus
accaaugaauggauuaccguguu

SEQ ID NO: 3297256 - RNA, 15 nt, Variola virus
guguuuuaguuuauc

SEQ ID NO: 3297257 - RNA, 17 nt, Variola virus
aacuagucuauuucaua

SEQ ID NO: 3297258 - RNA, 16 nt, Variola virus
ccacuuugguaaaauc

SEQ ID NO: 3297259 - RNA, 17 nt, Variola virus
ucaugauggaugugugu

SEQ ID NO: 3297260 - RNA, 18 nt, Variola virus
cauguaugagaaaaacug

SEQ ID NO: 3297261 - RNA, 19 nt, Variola virus
cgaaugccaauguuaauuu

SEQ ID NO: 3297262 - RNA, 21 nt, Variola virus
gcaguuuuauuuuaucuuuua

SEQ ID NO: 3297263 - RNA, 17 nt, Variola virus
auaaacuagaaaaacuu

SEQ ID NO: 3297264 - RNA, 22 nt, Variola virus
acuauacauuuccgaaugaaug

SEQ ID NO: 3297265 - RNA, 15 nt, Variola virus
uauccagaugagucc

SEQ ID NO: 3297266 - RNA, 18 nt, Variola virus
cacauccaucaauuguaa

SEQ ID NO: 3297267 - RNA, 18 nt, Variola virus
uaucuacgauccaucaaa

SEQ ID NO: 3297268 - RNA, 17 nt, Variola virus
auaauuuagauacuuua

SEQ ID NO: 3297269 - RNA, 18 nt, Variola virus
caacuaguaucaucucua

SEQ ID NO: 3297270 - RNA, 18 nt, Variola virus
ucuuaacaaguucucaau

SEQ ID NO: 3297271 - RNA, 15 nt, Variola virus
auggaaauauuaaag

SEQ ID NO: 3297272 - RNA, 13 nt, Variola virus
caaguauaaugau

SEQ ID NO: 3297273 - RNA, 18 nt, Variola virus
cugacgauauuagaugau

SEQ ID NO: 3297274 - RNA, 19 nt, Variola virus
uuccuggaauaucauuaac

SEQ ID NO: 3297275 - RNA, 16 nt, Variola virus
acauuuguauaaucuu

SEQ ID NO: 3297276 - RNA, 20 nt, Variola virus
acuaguggcagacugugcau

SEQ ID NO: 3297277 - RNA, 18 nt, Variola virus
uuucacaucguauuuuaa

SEQ ID NO: 3297278 - RNA, 14 nt, Variola virus
gaccuccuccacca

SEQ ID NO: 3297279 - RNA, 22 nt, Variola virus
aaaauuauacuguaacacaaug

SEQ ID NO: 3297280 - RNA, 22 nt, Variola virus
uggagaauguuccuaauguaua

SEQ ID NO: 3297281 - RNA, 12 nt, Variola virus
ccuccuccacca

SEQ ID NO: 3297282 - RNA, 15 nt, Variola virus
gauagacacauaugc

SEQ ID NO: 3297283 - RNA, 15 nt, Variola virus
uguccuaaaauacua

SEQ ID NO: 3297284 - RNA, 17 nt, Variola virus
aguuacaacuauuacaa

SEQ ID NO: 3297285 - RNA, 16 nt, Variola virus
cuacucauagaaaggu

SEQ ID NO: 3297286 - RNA, 14 nt, Variola virus
cuauggaacaaaau

SEQ ID NO: 3297287 - RNA, 23 nt, Variola virus
ugacaagauccaucuacuuuucc

SEQ ID NO: 3297288 - RNA, 14 nt, Variola virus
aucaaaacaaaauu

SEQ ID NO: 3297289 - RNA, 19 nt, Variola virus
auguucugauuuuaucuuu

SEQ ID NO: 3297290 - RNA, 15 nt, Variola virus
uuaauaauuguauug

SEQ ID NO: 3297291 - RNA, 21 nt, Variola virus
uaguugucuuagccuuaucaa

SEQ ID NO: 3297292 - RNA, 16 nt, Variola virus
aucgcauagaaauaca

SEQ ID NO: 3297293 - RNA, 14 nt, Variola virus
gguggauauuucug

SEQ ID NO: 3297294 - RNA, 15 nt, Variola virus
aacuauuuuuaacuu

SEQ ID NO: 3297295 - RNA, 18 nt, Variola virus
cauccguuguuauauacc

SEQ ID NO: 3297296 - RNA, 20 nt, Variola virus
augagacagauuaucauaua

SEQ ID NO: 3297297 - RNA, 21 nt, Variola virus
uuuuauuuuuggaauaaucuc

SEQ ID NO: 3297298 - RNA, 20 nt, Variola virus
caaagauauagaacacauaa

SEQ ID NO: 3297299 - RNA, 23 nt, Variola virus
acucuauuggauauggauuucca

SEQ ID NO: 3297300 - RNA, 13 nt, Variola virus
uugaauugcgauu

SEQ ID NO: 3297301 - RNA, 16 nt, Variola virus
caggcugucggagcca

SEQ ID NO: 3297302 - RNA, 14 nt, Variola virus
uagcaucaaaacua

SEQ ID NO: 3297303 - RNA, 13 nt, Variola virus
ucaaaagaaaucu

SEQ ID NO: 3297304 - RNA, 16 nt, Variola virus
uguauuaagaacagaa

SEQ ID NO: 3297305 - RNA, 20 nt, Variola virus
agagaucuucguuaaaaagu

SEQ ID NO: 3297306 - RNA, 16 nt, Variola virus
aacgucauaaaaaugu

SEQ ID NO: 3297307 - RNA, 14 nt, Variola virus
uaagccaaacucau

SEQ ID NO: 3297308 - RNA, 21 nt, Variola virus
ccgaaauugaccgagaaagaa

SEQ ID NO: 3297309 - RNA, 18 nt, Variola virus
caauaccaaagaaggaag

SEQ ID NO: 3297310 - RNA, 14 nt, Variola virus
auagcuacaguaaa

SEQ ID NO: 3297311 - RNA, 21 nt, Variola virus
aacuacaucgguaucuagauc

SEQ ID NO: 3297312 - RNA, 22 nt, Variola virus
guuuauaauuacaacauaauaa

SEQ ID NO: 3297313 - RNA, 21 nt, Variola virus
aucaucguuaggauuugguaa

SEQ ID NO: 3297314 - RNA, 14 nt, Variola virus
augcguacauaacu

SEQ ID NO: 3297315 - RNA, 15 nt, Variola virus
ucaauaaaugauuca

SEQ ID NO: 3297316 - RNA, 13 nt, Variola virus
gauagacuuucuc

SEQ ID NO: 3297317 - RNA, 16 nt, Variola virus
uacauaauucuucugu

SEQ ID NO: 3297318 - RNA, 12 nt, Variola virus
gcugaaaugaga

SEQ ID NO: 3297319 - RNA, 15 nt, Variola virus
cauuaccucaugaac

SEQ ID NO: 3297320 - RNA, 19 nt, Variola virus
ugacuccuuucuaauauag

SEQ ID NO: 3297321 - RNA, 14 nt, Variola virus
gcuauaaugaugau

SEQ ID NO: 3297322 - RNA, 21 nt, Variola virus
gucuaaauccaacuauagaca

SEQ ID NO: 3297323 - RNA, 22 nt, Variola virus
ucucuguuuaaugaauuacuaa

SEQ ID NO: 3297324 - RNA, 16 nt, Variola virus
guuaagccugaauuua

SEQ ID NO: 3297325 - RNA, 17 nt, Variola virus
aggagucgccaaaugua

SEQ ID NO: 3297326 - RNA, 16 nt, Variola virus
ugugauguuacggaua

SEQ ID NO: 3297327 - RNA, 14 nt, Variola virus
auuauauaauguau

SEQ ID NO: 3297328 - RNA, 17 nt, Variola virus
guacuuugaugauuuuu

SEQ ID NO: 3297329 - RNA, 20 nt, Variola virus
aucgauccucacuucgaaga

SEQ ID NO: 3297330 - RNA, 17 nt, Variola virus
gaccaagacacauaugg

SEQ ID NO: 3297331 - RNA, 18 nt, Variola virus
auaaucguauuuguguga

SEQ ID NO: 3297332 - RNA, 14 nt, Variola virus
uuaguuauugcaau

SEQ ID NO: 3297333 - RNA, 15 nt, Variola virus
cagggagccacagaa

SEQ ID NO: 3297334 - RNA, 17 nt, Variola virus
aaaaauaugggaaucua

SEQ ID NO: 3297335 - RNA, 14 nt, Variola virus
uagagaacauaaug

SEQ ID NO: 3297336 - RNA, 20 nt, Variola virus
aaucaguugcuguugaagag

SEQ ID NO: 3297337 - RNA, 14 nt, Variola virus
uuuuuauacauauu

SEQ ID NO: 3297338 - RNA, 15 nt, Variola virus
aauaaauuuuuccaa

SEQ ID NO: 3297339 - RNA, 14 nt, Variola virus
auuauuuuucacca

SEQ ID NO: 3297340 - RNA, 23 nt, Variola virus
auaauaccuucuacuaugcaauu

SEQ ID NO: 3297341 - RNA, 16 nt, Variola virus
aauaaguauagcaaau

SEQ ID NO: 3297342 - RNA, 14 nt, Variola virus
cgguuuuaacuuua

SEQ ID NO: 3297343 - RNA, 23 nt, Variola virus
aacucguuuuucuuaagaaauau

SEQ ID NO: 3297344 - RNA, 16 nt, Variola virus
auaucuauaugagaug

SEQ ID NO: 3297345 - RNA, 21 nt, Variola virus
uagcuaaagauuugucacaau

SEQ ID NO: 3297346 - RNA, 14 nt, Variola virus
uuuagauuuauuuu

SEQ ID NO: 3297347 - RNA, 21 nt, Variola virus
uugucauguugauacaucacu

SEQ ID NO: 3297348 - RNA, 14 nt, Variola virus
ucguccuuaaccaa

SEQ ID NO: 3297349 - RNA, 12 nt, Variola virus
uuaauauuauca

SEQ ID NO: 3297350 - RNA, 20 nt, Variola virus
ucuuugaugguguuagcaua

SEQ ID NO: 3297351 - RNA, 22 nt, Variola virus
gugucuuaucucguccuugguu

SEQ ID NO: 3297352 - RNA, 17 nt, Variola virus
uuaaacuacuacguucu

SEQ ID NO: 3297353 - RNA, 14 nt, Variola virus
guuaaagaaauuaa

SEQ ID NO: 3297354 - RNA, 16 nt, Variola virus
auaagaaauauauacu

SEQ ID NO: 3297355 - RNA, 16 nt, Variola virus
aauuaaucaaauggua

SEQ ID NO: 3297356 - RNA, 12 nt, Variola virus
auuuuaaauaca

SEQ ID NO: 3297357 - RNA, 13 nt, Variola virus
aauauguagaaaa

SEQ ID NO: 3297358 - RNA, 16 nt, Variola virus
cuaucagugaucuguu

SEQ ID NO: 3297359 - RNA, 20 nt, Variola virus
augagauuauuaaguauuua

SEQ ID NO: 3297360 - RNA, 14 nt, Variola virus
uaggguaucuaauu

SEQ ID NO: 3297361 - RNA, 12 nt, Variola virus
guuuaauaacuu

SEQ ID NO: 3297362 - RNA, 14 nt, Variola virus
uauaugauuaucaa

SEQ ID NO: 3297363 - RNA, 17 nt, Variola virus
gcagcgaacuugauauu

SEQ ID NO: 3297364 - RNA, 17 nt, Variola virus
uggaagguuuguauucu

SEQ ID NO: 3297365 - RNA, 14 nt, Variola virus
ccauugaaaacuau

SEQ ID NO: 3297366 - RNA, 15 nt, Variola virus
cuuuguuggaagaau

SEQ ID NO: 3297367 - RNA, 20 nt, Variola virus
uuuauaaacaugaaaccacu

SEQ ID NO: 3297368 - RNA, 20 nt, Variola virus
caaaagugacgucuuguauu

SEQ ID NO: 3297369 - RNA, 17 nt, Variola virus
auuguaaaagaaauaua

SEQ ID NO: 3297370 - RNA, 23 nt, Variola virus
auaguuaucuaucuuaaagacua

SEQ ID NO: 3297371 - RNA, 19 nt, Variola virus
aucagucaagauacagaaa

SEQ ID NO: 3297372 - RNA, 23 nt, Variola virus
guuucaaccgcguuaacauauga

SEQ ID NO: 3297373 - RNA, 22 nt, Variola virus
gacauaccugaucuacguucua

SEQ ID NO: 3297374 - RNA, 18 nt, Variola virus
ucuagccauaucuaaagc

SEQ ID NO: 3297375 - RNA, 20 nt, Variola virus
auaacguuagccaccacuuc

SEQ ID NO: 3297376 - RNA, 14 nt, Variola virus
aaaaauaauauuca

SEQ ID NO: 3297377 - RNA, 21 nt, Variola virus
uaaucuaaaauaguucuguaa

SEQ ID NO: 3297378 - RNA, 23 nt, Variola virus
aaucuguacuauguguuaaaaga

SEQ ID NO: 3297379 - RNA, 16 nt, Variola virus
acacgagccuuuauua

SEQ ID NO: 3297380 - RNA, 12 nt, Variola virus
aacaguauuauu

SEQ ID NO: 3297381 - RNA, 18 nt, Variola virus
ucaaaaugcugauuucga

SEQ ID NO: 3297382 - RNA, 12 nt, Variola virus
auucauuuccau

SEQ ID NO: 3297383 - RNA, 22 nt, Variola virus
cuaauagcgaucauucgcuuaa

SEQ ID NO: 3297384 - RNA, 14 nt, Variola virus
aauucauuagaaua

SEQ ID NO: 3297385 - RNA, 18 nt, Variola virus
uuguaaagaaauuauuuu

SEQ ID NO: 3297386 - RNA, 14 nt, Variola virus
aauauauuaccaug

SEQ ID NO: 3297387 - RNA, 19 nt, Variola virus
uaacaaaaauuaugaaaua

SEQ ID NO: 3297388 - RNA, 22 nt, Variola virus
aaugugauucucugaaaaugua

SEQ ID NO: 3297389 - RNA, 22 nt, Variola virus
auuaagaacccguuuauacagu

SEQ ID NO: 3297390 - RNA, 16 nt, Variola virus
gcaagacuaacacaca

SEQ ID NO: 3297391 - RNA, 16 nt, Variola virus
auuagagguaugggau

SEQ ID NO: 3297392 - RNA, 14 nt, Variola virus
gaauaaauuauuau

SEQ ID NO: 3297393 - RNA, 20 nt, Variola virus
aaauaacaccauuacacgaa

SEQ ID NO: 3297394 - RNA, 19 nt, Variola virus
uuuuugccaaauuuaucua

SEQ ID NO: 3297395 - RNA, 17 nt, Variola virus
aagagcaaauaucucau

SEQ ID NO: 3297396 - RNA, 18 nt, Variola virus
aacagaaacguuuagaga

SEQ ID NO: 3297397 - RNA, 17 nt, Variola virus
aacacauccgucaaaga

SEQ ID NO: 3297398 - RNA, 19 nt, Variola virus
aucccuuugauaaauagua

SEQ ID NO: 3297399 - RNA, 18 nt, Variola virus
agauuaccuauucacuua

SEQ ID NO: 3297400 - RNA, 14 nt, Variola virus
cuuacuaucuuuuu

SEQ ID NO: 3297401 - RNA, 16 nt, Variola virus
caaguaugacauugua

SEQ ID NO: 3297402 - RNA, 23 nt, Variola virus
agauuuuccauccacaauuauug

SEQ ID NO: 3297403 - RNA, 18 nt, Variola virus
aaauuuuuuauacauuau

SEQ ID NO: 3297404 - RNA, 22 nt, Variola virus
aaauugauagagaguucauuua

SEQ ID NO: 3297405 - RNA, 23 nt, Variola virus
auagauucauucuuuauagaaug

SEQ ID NO: 3297406 - RNA, 15 nt, Variola virus
uuggcgguucuaaug

SEQ ID NO: 3297407 - RNA, 11 nt, Variola virus
gagauaaaaga

SEQ ID NO: 3297408 - RNA, 16 nt, Variola virus
ucuaaaccuucuuauu

SEQ ID NO: 3297409 - RNA, 23 nt, Variola virus
aaacagauauaguuuuucuggaa

SEQ ID NO: 3297410 - RNA, 17 nt, Variola virus
uaacgaggacaaacuau

SEQ ID NO: 3297411 - RNA, 21 nt, Variola virus
uauguuuauuagcguacacau

SEQ ID NO: 3297412 - RNA, 23 nt, Variola virus
acuuuacaaacgauguacugaag

SEQ ID NO: 3297413 - RNA, 17 nt, Variola virus
ccggugagaacaugaga

SEQ ID NO: 3297414 - RNA, 13 nt, Variola virus
uacacagaaucag

SEQ ID NO: 3297415 - RNA, 16 nt, Variola virus
agaagcguguuauugu

SEQ ID NO: 3297416 - RNA, 15 nt, Variola virus
ucuauaagguuucuu

SEQ ID NO: 3297417 - RNA, 14 nt, Variola virus
acaaaucuggaaaa

SEQ ID NO: 3297418 - RNA, 16 nt, Variola virus
gcaucuaguugauauu

SEQ ID NO: 3297419 - RNA, 17 nt, Variola virus
auccaauauuauugaaa

SEQ ID NO: 3297420 - RNA, 22 nt, Variola virus
uuaagcauauucuuaauauuag

SEQ ID NO: 3297421 - RNA, 19 nt, Variola virus
uuuuccaucuauguagaau

SEQ ID NO: 3297422 - RNA, 14 nt, Variola virus
auacguaaugaagu

SEQ ID NO: 3297423 - RNA, 22 nt, Variola virus
cuaaaacuacguucgaugaauu

SEQ ID NO: 3297424 - RNA, 12 nt, Variola virus
uauuuuaaugag

SEQ ID NO: 3297425 - RNA, 18 nt, Variola virus
auguaauggauaauuucc

SEQ ID NO: 3297426 - RNA, 17 nt, Variola virus
ucuauugugucuguuaa

SEQ ID NO: 3297427 - RNA, 20 nt, Variola virus
cauuuggagaguauccucua

SEQ ID NO: 3297428 - RNA, 14 nt, Variola virus
gcuauuaaucuuua

SEQ ID NO: 3297429 - RNA, 21 nt, Variola virus
agauaaugauauauuaaacaa

SEQ ID NO: 3297430 - RNA, 22 nt, Variola virus
uguauauaggucagauacuggu

SEQ ID NO: 3297431 - RNA, 17 nt, Variola virus
ucuauuccuagaagugu

SEQ ID NO: 3297432 - RNA, 21 nt, Variola virus
agucauuccaucauuuaagaa

SEQ ID NO: 3297433 - RNA, 18 nt, Variola virus
uucguagaaaguaucuua

SEQ ID NO: 3297434 - RNA, 15 nt, Variola virus
agaauuaacuaguau

SEQ ID NO: 3297435 - RNA, 15 nt, Variola virus
uuaaucauugauuca

SEQ ID NO: 3297436 - RNA, 18 nt, Variola virus
uuccauccacaauuauug

SEQ ID NO: 3297437 - RNA, 17 nt, Variola virus
gaauauacaaguauuau

SEQ ID NO: 3297438 - RNA, 12 nt, Variola virus
aauaacaaauac

SEQ ID NO: 3297439 - RNA, 20 nt, Variola virus
uugcguacauugcucguaaa

SEQ ID NO: 3297440 - RNA, 17 nt, Variola virus
cugaauauagaacauca

SEQ ID NO: 3297441 - RNA, 14 nt, Variola virus
uacgaaaaaacuuu

SEQ ID NO: 3297442 - RNA, 18 nt, Variola virus
caaucuaagaaauuuaaa

SEQ ID NO: 3297443 - RNA, 14 nt, Variola virus
aaucaaacaaaaaa

SEQ ID NO: 3297444 - RNA, 15 nt, Variola virus
ucauuuccugcacgu

SEQ ID NO: 3297445 - RNA, 22 nt, Variola virus
caaaauucagauucuaucuuua

SEQ ID NO: 3297446 - RNA, 16 nt, Variola virus
cguuaaagguaacaau

SEQ ID NO: 3297447 - RNA, 16 nt, Variola virus
aagaugauauaaguua

SEQ ID NO: 3297448 - RNA, 16 nt, Variola virus
auauuaucguuuguaa

SEQ ID NO: 3297449 - RNA, 18 nt, Variola virus
auauucucuauuaaauac

SEQ ID NO: 3297450 - RNA, 20 nt, Variola virus
uauaauguaacguuuauaua

SEQ ID NO: 3297451 - RNA, 22 nt, Variola virus
cuuguaauugugggaacauaau

SEQ ID NO: 3297452 - RNA, 21 nt, Variola virus
aacuccacccauuacauauau

SEQ ID NO: 3297453 - RNA, 16 nt, Variola virus
aauccaugaauaaagu

SEQ ID NO: 3297454 - RNA, 18 nt, Variola virus
uaccaaucauuuauugau

SEQ ID NO: 3297455 - RNA, 19 nt, Variola virus
auucucuuaauuauaacga

SEQ ID NO: 3297456 - RNA, 21 nt, Variola virus
gaucccauacuugauaagaua

SEQ ID NO: 3297457 - RNA, 17 nt, Variola virus
uaugucaaaaauuguag

SEQ ID NO: 3297458 - RNA, 16 nt, Variola virus
gaauaaucguuauuau

SEQ ID NO: 3297459 - RNA, 23 nt, Variola virus
ugaacccguuaauguauaucuuu

SEQ ID NO: 3297460 - RNA, 19 nt, Variola virus
guauaauuuuuauguuuua

SEQ ID NO: 3297461 - RNA, 16 nt, Variola virus
auaaugaguuagauua

SEQ ID NO: 3297462 - RNA, 19 nt, Variola virus
ugcuauuaagguuaaggau

SEQ ID NO: 3297463 - RNA, 20 nt, Variola virus
uaauaugagugauaaaaucc

SEQ ID NO: 3297464 - RNA, 14 nt, Variola virus
auaucaacaaaauu

SEQ ID NO: 3297465 - RNA, 12 nt, Variola virus
aaacuuacagaa

SEQ ID NO: 3297466 - RNA, 21 nt, Variola virus
agaauugcaauuuugauguau

SEQ ID NO: 3297467 - RNA, 15 nt, Variola virus
gacacucuauaucua

SEQ ID NO: 3297468 - RNA, 13 nt, Variola virus
uauugaguggaaa

SEQ ID NO: 3297469 - RNA, 18 nt, Variola virus
auaacguuggcaauacua

SEQ ID NO: 3297470 - RNA, 18 nt, Variola virus
uaacuccagaacaucuuc

SEQ ID NO: 3297471 - RNA, 19 nt, Variola virus
auuacaagaaauauggauc

SEQ ID NO: 3297472 - RNA, 20 nt, Variola virus
cuauuuuaacaaagcaucua

SEQ ID NO: 3297473 - RNA, 18 nt, Variola virus
ccauugcuagucacuuua

SEQ ID NO: 3297474 - RNA, 18 nt, Variola virus
acagaguuuucagaagau

SEQ ID NO: 3297475 - RNA, 17 nt, Variola virus
cauccaagucaauaucu

SEQ ID NO: 3297476 - RNA, 19 nt, Variola virus
ugucuacauaaauaugcaa

SEQ ID NO: 3297477 - RNA, 24 nt, Variola virus
uaucgauguggaaauuacacugua

SEQ ID NO: 3297478 - RNA, 20 nt, Variola virus
aaugucgcaauuuguauuau

SEQ ID NO: 3297479 - RNA, 15 nt, Variola virus
caagcgauucuuuca

SEQ ID NO: 3297480 - RNA, 15 nt, Variola virus
uaaaguaauaaucuu

SEQ ID NO: 3297481 - RNA, 15 nt, Variola virus
uguuuccauagauuu

SEQ ID NO: 3297482 - RNA, 18 nt, Variola virus
ggcuaaaacauauuucuu

SEQ ID NO: 3297483 - RNA, 14 nt, Variola virus
uuuggcucuucuau

SEQ ID NO: 3297484 - RNA, 12 nt, Variola virus
aacauaaugccg

SEQ ID NO: 3297485 - RNA, 15 nt, Variola virus
auguuaggaaauauu

SEQ ID NO: 3297486 - RNA, 22 nt, Variola virus
acuuacagauggauaaaacuuc

SEQ ID NO: 3297487 - RNA, 17 nt, Variola virus
guguaucgacaucuuua

SEQ ID NO: 3297488 - RNA, 13 nt, Variola virus
gcauuugaugcac

SEQ ID NO: 3297489 - RNA, 14 nt, Variola virus
auuauuuauaccuc

SEQ ID NO: 3297490 - RNA, 15 nt, Variola virus
agauagaaaugaauu

SEQ ID NO: 3297491 - RNA, 16 nt, Variola virus
aucauguuaaugucuu

SEQ ID NO: 3297492 - RNA, 21 nt, Variola virus
uauuguuuggguaaaacagau

SEQ ID NO: 3297493 - RNA, 23 nt, Variola virus
cgucuaagauauucuuccaucaa

SEQ ID NO: 3297494 - RNA, 15 nt, Variola virus
uaacuauuaauauua

SEQ ID NO: 3297495 - RNA, 14 nt, Variola virus
uccauaauccucua

SEQ ID NO: 3297496 - RNA, 18 nt, Variola virus
aucgucuauauaugaaua

SEQ ID NO: 3297497 - RNA, 17 nt, Variola virus
acauuauuaaucagaau

SEQ ID NO: 3297498 - RNA, 22 nt, Variola virus
agauucgcauuucuauacuugu

SEQ ID NO: 3297499 - RNA, 12 nt, Variola virus
ugaaacaaagaa

SEQ ID NO: 3297500 - RNA, 16 nt, Variola virus
auuauuuuuacagcga

SEQ ID NO: 3297501 - RNA, 17 nt, Variola virus
gaaaacauuuuuaucau

SEQ ID NO: 3297502 - RNA, 23 nt, Variola virus
ugugaauguauucacuuaacaau

SEQ ID NO: 3297503 - RNA, 17 nt, Variola virus
uagucagaccauucuug

SEQ ID NO: 3297504 - RNA, 22 nt, Variola virus
uccauaggcaguccagaaauau

SEQ ID NO: 3297505 - RNA, 16 nt, Variola virus
aacaguucuaccacca

SEQ ID NO: 3297506 - RNA, 18 nt, Variola virus
gccaaaaugauagauauu

SEQ ID NO: 3297507 - RNA, 17 nt, Variola virus
aaauaugaaaucuaucu

SEQ ID NO: 3297508 - RNA, 15 nt, Variola virus
aucguuauuauauaa

SEQ ID NO: 3297509 - RNA, 22 nt, Variola virus
agggaacuaauccacauaugau

SEQ ID NO: 3297510 - RNA, 13 nt, Variola virus
uggaugaccauau

SEQ ID NO: 3297511 - RNA, 18 nt, Variola virus
auuacgcaucuguaaaag

SEQ ID NO: 3297512 - RNA, 15 nt, Variola virus
auauucucauggaaa

SEQ ID NO: 3297513 - RNA, 14 nt, Variola virus
aaugauauauuaaa

SEQ ID NO: 3297514 - RNA, 17 nt, Variola virus
acauuuuuauaaauaga

SEQ ID NO: 3297515 - RNA, 16 nt, Variola virus
gcuaauaaauaaugau

SEQ ID NO: 3297516 - RNA, 18 nt, Variola virus
aagguguugauuaccauu

SEQ ID NO: 3297517 - RNA, 18 nt, Variola virus
caaaaagggauauauauu

SEQ ID NO: 3297518 - RNA, 12 nt, Variola virus
cagcauuacuug

SEQ ID NO: 3297519 - RNA, 18 nt, Variola virus
auagaauuuauaacauga

SEQ ID NO: 3297520 - RNA, 16 nt, Variola virus
cuauaucaaugccuuu

SEQ ID NO: 3297521 - RNA, 18 nt, Variola virus
auuuuaagauuuuaaaug

SEQ ID NO: 3297522 - RNA, 16 nt, Variola virus
gcugcaucuaaauuaa

SEQ ID NO: 3297523 - RNA, 15 nt, Variola virus
aucucagugcaaaga

SEQ ID NO: 3297524 - RNA, 18 nt, Variola virus
auacagacaauugacaaa

SEQ ID NO: 3297525 - RNA, 19 nt, Variola virus
aaaucauccguuguuauau

SEQ ID NO: 3297526 - RNA, 18 nt, Variola virus
cauaaaccgaucacuaau

SEQ ID NO: 3297527 - RNA, 21 nt, Variola virus
guuaauugucuauaaauuaga

SEQ ID NO: 3297528 - RNA, 19 nt, Variola virus
auaccuuuaacuucuggaa

SEQ ID NO: 3297529 - RNA, 16 nt, Variola virus
acgacucacaauagaa

SEQ ID NO: 3297530 - RNA, 21 nt, Variola virus
augauaugauuuuuaaucaag

SEQ ID NO: 3297531 - RNA, 21 nt, Variola virus
ugcaacgaauuauuagucugu

SEQ ID NO: 3297532 - RNA, 23 nt, Variola virus
auagaacacccguagaaauacua

SEQ ID NO: 3297533 - RNA, 17 nt, Variola virus
uagaacuuuuaauuuug

SEQ ID NO: 3297534 - RNA, 22 nt, Variola virus
aaauggauaauauccauauuga

SEQ ID NO: 3297535 - RNA, 13 nt, Variola virus
cauaagcgcuaua

SEQ ID NO: 3297536 - RNA, 15 nt, Variola virus
caaaucaguaacuau

SEQ ID NO: 3297537 - RNA, 16 nt, Variola virus
guauacgcagaaaaga

SEQ ID NO: 3297538 - RNA, 23 nt, Variola virus
cuucaucaaccgaguuguuaauc

SEQ ID NO: 3297539 - RNA, 11 nt, Variola virus
uuaaaaaugau

SEQ ID NO: 3297540 - RNA, 13 nt, Variola virus
gcacauuauucua

SEQ ID NO: 3297541 - RNA, 17 nt, Variola virus
gcauuacagaauaauau

SEQ ID NO: 3297542 - RNA, 18 nt, Variola virus
uaauugcucguugguauu

SEQ ID NO: 3297543 - RNA, 15 nt, Variola virus
ucucauuuucuucaa

SEQ ID NO: 3297544 - RNA, 17 nt, Variola virus
accaccaaauaaaauuc

SEQ ID NO: 3297545 - RNA, 22 nt, Variola virus
guauaucaacaucuaccuuauu

SEQ ID NO: 3297546 - RNA, 23 nt, Variola virus
aagguggauucgguaguauuuau

SEQ ID NO: 3297547 - RNA, 14 nt, Variola virus
ggaguaauugauua

SEQ ID NO: 3297548 - RNA, 16 nt, Variola virus
guucaccuucuauaga

SEQ ID NO: 3297549 - RNA, 20 nt, Variola virus
ucacaacaauuuauuucuaa

SEQ ID NO: 3297550 - RNA, 20 nt, Variola virus
uacgucgcagaauucuaaau

SEQ ID NO: 3297551 - RNA, 18 nt, Variola virus
aucgauauugaaaaugac

SEQ ID NO: 3297552 - RNA, 16 nt, Variola virus
acggcaaaagauauau

SEQ ID NO: 3297553 - RNA, 14 nt, Variola virus
uaauucauacacca

SEQ ID NO: 3297554 - RNA, 19 nt, Variola virus
aagaccgaauacauaacag

SEQ ID NO: 3297555 - RNA, 16 nt, Variola virus
uaaacuguuuguauaa

SEQ ID NO: 3297556 - RNA, 13 nt, Variola virus
ucggaucuaaaau

SEQ ID NO: 3297557 - RNA, 21 nt, Variola virus
ccuaguacugaggauuuacua

SEQ ID NO: 3297558 - RNA, 15 nt, Variola virus
guccguuauauaauc

SEQ ID NO: 3297559 - RNA, 21 nt, Variola virus
cuccucauuacguuucauuuu

SEQ ID NO: 3297560 - RNA, 20 nt, Variola virus
uccaaacuguugacuucacu

SEQ ID NO: 3297561 - RNA, 19 nt, Variola virus
acauucauuaauaauacag

SEQ ID NO: 3297562 - RNA, 21 nt, Variola virus
auacaauaaauguuuaaacau

SEQ ID NO: 3297563 - RNA, 21 nt, Variola virus
cauauauguuuucaucauuuc

SEQ ID NO: 3297564 - RNA, 16 nt, Variola virus
cuauauaauaaaugua

SEQ ID NO: 3297565 - RNA, 15 nt, Variola virus
auaacuacauauucu

SEQ ID NO: 3297566 - RNA, 13 nt, Variola virus
guuaguaaucaug

SEQ ID NO: 3297567 - RNA, 22 nt, Variola virus
aacgaacgcggugugaauguac

SEQ ID NO: 3297568 - RNA, 16 nt, Variola virus
ccauuggcaaaguauc

SEQ ID NO: 3297569 - RNA, 17 nt, Variola virus
ucaaaucgauaguguag

SEQ ID NO: 3297570 - RNA, 13 nt, Variola virus
uacaucaaucuua

SEQ ID NO: 3297571 - RNA, 18 nt, Variola virus
uucacauuguaacuauuc

SEQ ID NO: 3297572 - RNA, 17 nt, Variola virus
aacgacuuauaauuaau

SEQ ID NO: 3297573 - RNA, 22 nt, Variola virus
ucuuuuaaaucccaauucagaa

SEQ ID NO: 3297574 - RNA, 18 nt, Variola virus
uccaaaaacacaacaaau

SEQ ID NO: 3297575 - RNA, 15 nt, Variola virus
gauaaugaacauaua

SEQ ID NO: 3297576 - RNA, 20 nt, Variola virus
acagcacuguggaugugaca

SEQ ID NO: 3297577 - RNA, 18 nt, Variola virus
uaagacguuguaucucuu

SEQ ID NO: 3297578 - RNA, 12 nt, Variola virus
cgcauuaaauga

SEQ ID NO: 3297579 - RNA, 14 nt, Variola virus
auuaacagcuuuaa

SEQ ID NO: 3297580 - RNA, 21 nt, Variola virus
cagauauuccgacaaaggauu

SEQ ID NO: 3297581 - RNA, 15 nt, Variola virus
uacuaaagaaacugu

SEQ ID NO: 3297582 - RNA, 16 nt, Variola virus
auugacuaagaauuau

SEQ ID NO: 3297583 - RNA, 22 nt, Variola virus
auguuaauaacaucagaaaaug

SEQ ID NO: 3297584 - RNA, 20 nt, Variola virus
acuugccaugauucguuaua

SEQ ID NO: 3297585 - RNA, 14 nt, Variola virus
uguugaacaucagu

SEQ ID NO: 3297586 - RNA, 13 nt, Variola virus
aacaaucuagaca

SEQ ID NO: 3297587 - RNA, 15 nt, Variola virus
aucguacuauauaca

SEQ ID NO: 3297588 - RNA, 19 nt, Variola virus
uucuccggccacuauuauu

SEQ ID NO: 3297589 - RNA, 17 nt, Variola virus
aauauaguuaguauaac

SEQ ID NO: 3297590 - RNA, 15 nt, Variola virus
cggaauaaguagaca

SEQ ID NO: 3297591 - RNA, 20 nt, Variola virus
agcgcauguacauauuugua

SEQ ID NO: 3297592 - RNA, 21 nt, Variola virus
aacggaagaugcaauaguaau

SEQ ID NO: 3297593 - RNA, 16 nt, Variola virus
ucacucuucgaaaaga

SEQ ID NO: 3297594 - RNA, 16 nt, Variola virus
gcacaaugauaaugaa

SEQ ID NO: 3297595 - RNA, 19 nt, Variola virus
ucucguauucaguuucauc

SEQ ID NO: 3297596 - RNA, 15 nt, Variola virus
uuaaaacguccucua

SEQ ID NO: 3297597 - RNA, 19 nt, Variola virus
aucuagcgucgacaucuau

SEQ ID NO: 3297598 - RNA, 22 nt, Variola virus
auuaacuacggauaacaaaaua

SEQ ID NO: 3297599 - RNA, 22 nt, Variola virus
auuucuuuuuucuggcauaacu

SEQ ID NO: 3297600 - RNA, 21 nt, Variola virus
auaaauacccuuccaaauaau

SEQ ID NO: 3297601 - RNA, 18 nt, Variola virus
cauaaaggaauauacaaa

SEQ ID NO: 3297602 - RNA, 15 nt, Variola virus
auacagaauuuguaa

SEQ ID NO: 3297603 - RNA, 17 nt, Variola virus
auacuuuucuaauucua

SEQ ID NO: 3297604 - RNA, 15 nt, Variola virus
caucuaccaauucau

SEQ ID NO: 3297605 - RNA, 14 nt, Variola virus
aaauaaaacuauag

SEQ ID NO: 3297606 - RNA, 22 nt, Variola virus
auauagucgaacguuaguucca

SEQ ID NO: 3297607 - RNA, 19 nt, Variola virus
ucacaacuuuacuguuuuu

SEQ ID NO: 3297608 - RNA, 22 nt, Variola virus
aauucauuauuaaacaguuuaa

SEQ ID NO: 3297609 - RNA, 15 nt, Variola virus
gcguucauuggaaaa

SEQ ID NO: 3297610 - RNA, 11 nt, Variola virus
ucgauacuuuu

SEQ ID NO: 3297611 - RNA, 15 nt, Variola virus
auuauaccuaaugag

SEQ ID NO: 3297612 - RNA, 16 nt, Variola virus
gacaauacuguauuau

SEQ ID NO: 3297613 - RNA, 15 nt, Variola virus
uguucaacaaacuaa

SEQ ID NO: 3297614 - RNA, 14 nt, Variola virus
agaacauaauaaua

SEQ ID NO: 3297615 - RNA, 16 nt, Variola virus
gaauuauuuacaaaau

SEQ ID NO: 3297616 - RNA, 21 nt, Variola virus
auauucauuaauuuagauaga

SEQ ID NO: 3297617 - RNA, 18 nt, Variola virus
uccaugcaacauuuccua

SEQ ID NO: 3297618 - RNA, 13 nt, Variola virus
aauugguauaaau

SEQ ID NO: 3297619 - RNA, 13 nt, Variola virus
uucgaaaauacua

SEQ ID NO: 3297620 - RNA, 21 nt, Variola virus
uugauaaagccuuccuugcaa

SEQ ID NO: 3297621 - RNA, 17 nt, Variola virus
uguaauuccaguaauug

SEQ ID NO: 3297622 - RNA, 23 nt, Variola virus
caaauuacgagccaaaucuucuu

SEQ ID NO: 3297623 - RNA, 23 nt, Variola virus
gcuauaugauaaccaacuacaga

SEQ ID NO: 3297624 - RNA, 19 nt, Variola virus
uccaauaaacagucuuuaa

SEQ ID NO: 3297625 - RNA, 21 nt, Variola virus
gaaccacuauguuaauacuua

SEQ ID NO: 3297626 - RNA, 21 nt, Variola virus
agaauaugauccguaacauau

SEQ ID NO: 3297627 - RNA, 19 nt, Variola virus
agauucuacaaguaacaac

SEQ ID NO: 3297628 - RNA, 20 nt, Variola virus
uuaauauuacauauuuuuca

SEQ ID NO: 3297629 - RNA, 10 nt, Variola virus
uucaacaaug

SEQ ID NO: 3297630 - RNA, 20 nt, Variola virus
auaaauauccuuggaauuga

SEQ ID NO: 3297631 - RNA, 15 nt, Variola virus
uguaauuuuauucuu

SEQ ID NO: 3297632 - RNA, 14 nt, Variola virus
cugacauucagaaa

SEQ ID NO: 3297633 - RNA, 17 nt, Variola virus
aucguuaucauuaauaa

SEQ ID NO: 3297634 - RNA, 18 nt, Variola virus
aacuuauuagauagagau

SEQ ID NO: 3297635 - RNA, 14 nt, Variola virus
uuccaagaaacuaa

SEQ ID NO: 3297636 - RNA, 14 nt, Variola virus
gaaacuaucuuuuu

SEQ ID NO: 3297637 - RNA, 16 nt, Variola virus
agaagauuaaacauau

SEQ ID NO: 3297638 - RNA, 22 nt, Variola virus
uagaaauaagagacuuaaacaa

SEQ ID NO: 3297639 - RNA, 21 nt, Variola virus
aauagaggagccauuaaaugu

SEQ ID NO: 3297640 - RNA, 18 nt, Variola virus
uaaaccgauaguguauaa

SEQ ID NO: 3297641 - RNA, 14 nt, Variola virus
ucuccagaaaucug

SEQ ID NO: 3297642 - RNA, 13 nt, Variola virus
aauauuuuaccuu

SEQ ID NO: 3297643 - RNA, 20 nt, Variola virus
ccuuccacauccaugagauu

SEQ ID NO: 3297644 - RNA, 18 nt, Variola virus
uucuaaaaaaauauuaac

SEQ ID NO: 3297645 - RNA, 13 nt, Variola virus
ucaucuacaaaaa

SEQ ID NO: 3297646 - RNA, 12 nt, Variola virus
uccagaauguac

SEQ ID NO: 3297647 - RNA, 16 nt, Variola virus
agggcuaaaugucuag

SEQ ID NO: 3297648 - RNA, 19 nt, Variola virus
agcugauagcaauucaugu

SEQ ID NO: 3297649 - RNA, 17 nt, Variola virus
cagaugcaccauauuua

SEQ ID NO: 3297650 - RNA, 18 nt, Variola virus
ugugaagguuuagauguc

SEQ ID NO: 3297651 - RNA, 23 nt, Variola virus
agcaauuagugccguauacuuua

SEQ ID NO: 3297652 - RNA, 17 nt, Variola virus
aggaagaauaucauauu

SEQ ID NO: 3297653 - RNA, 19 nt, Variola virus
auuaauaacauuacauauu

SEQ ID NO: 3297654 - RNA, 18 nt, Variola virus
uuagcuguuuucauuaag

SEQ ID NO: 3297655 - RNA, 20 nt, Variola virus
agucagcaucagcauuugac

SEQ ID NO: 3297656 - RNA, 16 nt, Variola virus
cagauacaaauuuuaa

SEQ ID NO: 3297657 - RNA, 19 nt, Variola virus
uagaaccacuauguuaaua

SEQ ID NO: 3297658 - RNA, 17 nt, Variola virus
gaugccaucauagauau

SEQ ID NO: 3297659 - RNA, 12 nt, Variola virus
aauuaugaugau

SEQ ID NO: 3297660 - RNA, 23 nt, Variola virus
uuaccacaauguauaauauaaga

SEQ ID NO: 3297661 - RNA, 14 nt, Variola virus
aacuauauaaugaa

SEQ ID NO: 3297662 - RNA, 19 nt, Variola virus
aagauauaugauucuaaua

SEQ ID NO: 3297663 - RNA, 19 nt, Variola virus
cugucugcagccauuuuua

SEQ ID NO: 3297664 - RNA, 21 nt, Variola virus
uguacauauuuguacauuauu

SEQ ID NO: 3297665 - RNA, 13 nt, Variola virus
aauauccucaaua

SEQ ID NO: 3297666 - RNA, 13 nt, Variola virus
uauuguagcauua

SEQ ID NO: 3297667 - RNA, 21 nt, Variola virus
acgaaccagaaagugcaaaug

SEQ ID NO: 3297668 - RNA, 20 nt, Variola virus
acaacuuucucgugguggug

SEQ ID NO: 3297669 - RNA, 21 nt, Variola virus
uaacucauugcuuucuagaau

SEQ ID NO: 3297670 - RNA, 20 nt, Variola virus
uacucaguugaacagaugau

SEQ ID NO: 3297671 - RNA, 21 nt, Variola virus
aucuauaaaacgauuaaacaa

SEQ ID NO: 3297672 - RNA, 15 nt, Variola virus
auuaagugacauuau

SEQ ID NO: 3297673 - RNA, 13 nt, Variola virus
aaguuguuaaaaa

SEQ ID NO: 3297674 - RNA, 16 nt, Variola virus
aaaccauguugugaaa

SEQ ID NO: 3297675 - RNA, 17 nt, Variola virus
auugacauauguaaaua

SEQ ID NO: 3297676 - RNA, 17 nt, Variola virus
ucuuaaaagguuucaua

SEQ ID NO: 3297677 - RNA, 19 nt, Variola virus
cacaugaagaaaaacaccu

SEQ ID NO: 3297678 - RNA, 21 nt, Variola virus
uaucaccuguuugcaugguga

SEQ ID NO: 3297679 - RNA, 19 nt, Variola virus
uuccauuggccucauuaac

SEQ ID NO: 3297680 - RNA, 13 nt, Variola virus
ugauauuuggauc

SEQ ID NO: 3297681 - RNA, 14 nt, Variola virus
uaaaacagauuucu

SEQ ID NO: 3297682 - RNA, 18 nt, Variola virus
caccaucuucauaauaaa

SEQ ID NO: 3297683 - RNA, 23 nt, Variola virus
acguaucaccaacggaaauggua

SEQ ID NO: 3297684 - RNA, 17 nt, Variola virus
aauuuuaagaaauggug

SEQ ID NO: 3297685 - RNA, 18 nt, Variola virus
gucgucuuuugaucuuua

SEQ ID NO: 3297686 - RNA, 23 nt, Variola virus
uuaugacaaaguuuacauucuuu

SEQ ID NO: 3297687 - RNA, 14 nt, Variola virus
ucuagauauuagua

SEQ ID NO: 3297688 - RNA, 19 nt, Variola virus
auuaucuagucacugacug

SEQ ID NO: 3297689 - RNA, 20 nt, Variola virus
aucaaucuagcauuucuagc

SEQ ID NO: 3297690 - RNA, 17 nt, Variola virus
ucuauuuugucauuaac

SEQ ID NO: 3297691 - RNA, 17 nt, Variola virus
ucgcaaauucuagucuu

SEQ ID NO: 3297692 - RNA, 15 nt, Variola virus
cagaaggaaacuucu

SEQ ID NO: 3297693 - RNA, 21 nt, Variola virus
aucagucaccaguuaauauau

SEQ ID NO: 3297694 - RNA, 19 nt, Variola virus
cuuuuguccuaaaauacua

SEQ ID NO: 3297695 - RNA, 23 nt, Variola virus
accaauuacugauaauguagaaa

SEQ ID NO: 3297696 - RNA, 11 nt, Variola virus
uguauuuccau

SEQ ID NO: 3297697 - RNA, 18 nt, Variola virus
ucauucacggaacuacau

SEQ ID NO: 3297698 - RNA, 19 nt, Variola virus
gaaaaauguuagaauuaga

SEQ ID NO: 3297699 - RNA, 13 nt, Variola virus
gaauaagcuauau

SEQ ID NO: 3297700 - RNA, 23 nt, Variola virus
acauuauuuacaucuaauuuacu

SEQ ID NO: 3297701 - RNA, 15 nt, Variola virus
uacuacuucauuaau

SEQ ID NO: 3297702 - RNA, 18 nt, Variola virus
uuuaauuuggucauucuu

SEQ ID NO: 3297703 - RNA, 17 nt, Variola virus
cuuuagaaauuguauuc

SEQ ID NO: 3297704 - RNA, 18 nt, Variola virus
cucuauucgaaaacucua

SEQ ID NO: 3297705 - RNA, 21 nt, Variola virus
uaaaauccaugagaucuaauu

SEQ ID NO: 3297706 - RNA, 13 nt, Variola virus
uaaaacaauaaau

SEQ ID NO: 3297707 - RNA, 21 nt, Variola virus
acgaugguuuucacauuuaac

SEQ ID NO: 3297708 - RNA, 13 nt, Variola virus
aauauuuuucuau

SEQ ID NO: 3297709 - RNA, 14 nt, Variola virus
auacauaaagaacg

SEQ ID NO: 3297710 - RNA, 17 nt, Variola virus
uauaacuucuaaucuug

SEQ ID NO: 3297711 - RNA, 18 nt, Variola virus
auaguaguacacaacaug

SEQ ID NO: 3297712 - RNA, 17 nt, Variola virus
ucaaauccgaaauuaga

SEQ ID NO: 3297713 - RNA, 20 nt, Variola virus
ggcggaguaaguguugagcu

SEQ ID NO: 3297714 - RNA, 14 nt, Variola virus
augacgcaguaaca

SEQ ID NO: 3297715 - RNA, 20 nt, Variola virus
cccaaaauguauguguugaa

SEQ ID NO: 3297716 - RNA, 14 nt, Variola virus
guuuaaaacuucua

SEQ ID NO: 3297717 - RNA, 16 nt, Variola virus
aauauuauacaugaua

SEQ ID NO: 3297718 - RNA, 14 nt, Variola virus
cugauugugucuca

SEQ ID NO: 3297719 - RNA, 15 nt, Variola virus
uuaaucuuuaaaauu

SEQ ID NO: 3297720 - RNA, 15 nt, Variola virus
ucuucugaaacacca

SEQ ID NO: 3297721 - RNA, 15 nt, Variola virus
aauuacacuauuugu

SEQ ID NO: 3297722 - RNA, 19 nt, Variola virus
aacucgcuuaauaucuucu

SEQ ID NO: 3297723 - RNA, 21 nt, Variola virus
aaauauaucauucgauaagau

SEQ ID NO: 3297724 - RNA, 14 nt, Variola virus
acuucgcaauaauu

SEQ ID NO: 3297725 - RNA, 21 nt, Variola virus
uguaaauauaucaauaagcau

SEQ ID NO: 3297726 - RNA, 23 nt, Variola virus
uaaaaaaauaggugaugaugcaa

SEQ ID NO: 3297727 - RNA, 13 nt, Variola virus
guuuccuguaaau

SEQ ID NO: 3297728 - RNA, 16 nt, Variola virus
aauuuauuauuuauga

SEQ ID NO: 3297729 - RNA, 18 nt, Variola virus
aaauguauaaaaacuaau

SEQ ID NO: 3297730 - RNA, 14 nt, Variola virus
aagaccaguucauu

SEQ ID NO: 3297731 - RNA, 22 nt, Variola virus
uuuaaacuguccuauaaccucu

SEQ ID NO: 3297732 - RNA, 19 nt, Variola virus
gaagagauuucaacagacu

SEQ ID NO: 3297733 - RNA, 13 nt, Variola virus
guucaacaaacua

SEQ ID NO: 3297734 - RNA, 15 nt, Variola virus
gauuaucguuuucau

SEQ ID NO: 3297735 - RNA, 17 nt, Variola virus
auaaaaaauaaguauau

SEQ ID NO: 3297736 - RNA, 21 nt, Variola virus
uucguuagauuuucuacagau

SEQ ID NO: 3297737 - RNA, 21 nt, Variola virus
cuauuaguuguuccaauaaau

SEQ ID NO: 3297738 - RNA, 18 nt, Variola virus
uucaccaaacaacuuuua

SEQ ID NO: 3297739 - RNA, 14 nt, Variola virus
uacuauuuugguau

SEQ ID NO: 3297740 - RNA, 11 nt, Variola virus
gacaaauguaa

SEQ ID NO: 3297741 - RNA, 14 nt, Variola virus
gaaugcuguuauau

SEQ ID NO: 3297742 - RNA, 21 nt, Variola virus
auaaaucacuuuuuauacuaa

SEQ ID NO: 3297743 - RNA, 10 nt, Variola virus
ucucuauaga

SEQ ID NO: 3297744 - RNA, 15 nt, Variola virus
uauucuuaaauguca

SEQ ID NO: 3297745 - RNA, 22 nt, Variola virus
agaggaccguugggaauuuuau

SEQ ID NO: 3297746 - RNA, 17 nt, Variola virus
aucuguggcguugcaua

SEQ ID NO: 3297747 - RNA, 23 nt, Variola virus
aaaaauacaucuguuucagcuaa

SEQ ID NO: 3297748 - RNA, 22 nt, Variola virus
agaaacgauuauuucuaaauua

SEQ ID NO: 3297749 - RNA, 17 nt, Variola virus
uauuaaccacauaucug

SEQ ID NO: 3297750 - RNA, 14 nt, Variola virus
uuauguuauuuugu

SEQ ID NO: 3297751 - RNA, 23 nt, Variola virus
acuucugcagaauaauuagaaau

SEQ ID NO: 3297752 - RNA, 14 nt, Variola virus
agucaauaaaagag

SEQ ID NO: 3297753 - RNA, 13 nt, Variola virus
aaucuaacagaua

SEQ ID NO: 3297754 - RNA, 20 nt, Variola virus
aacaguuaucaaaauaugua

SEQ ID NO: 3297755 - RNA, 21 nt, Variola virus
aaaaacaucacgaaaucuaua

SEQ ID NO: 3297756 - RNA, 22 nt, Variola virus
auacgaauaucguucucuaaau

SEQ ID NO: 3297757 - RNA, 23 nt, Variola virus
cagucuggaaacuaucacguuua

SEQ ID NO: 3297758 - RNA, 23 nt, Variola virus
ugacaucauacuagauaaaucgu

SEQ ID NO: 3297759 - RNA, 16 nt, Variola virus
uaaauuguauaaguau

SEQ ID NO: 3297760 - RNA, 13 nt, Variola virus
gauuguaaugaac

SEQ ID NO: 3297761 - RNA, 15 nt, Variola virus
guacaauaccuuugu

SEQ ID NO: 3297762 - RNA, 22 nt, Variola virus
cuauacaaaaucguucugcuaa

SEQ ID NO: 3297763 - RNA, 13 nt, Variola virus
cuaauauaaucuu

SEQ ID NO: 3297764 - RNA, 14 nt, Variola virus
uuacaaauaaaagu

SEQ ID NO: 3297765 - RNA, 14 nt, Variola virus
uaggaguaucuauu

SEQ ID NO: 3297766 - RNA, 17 nt, Variola virus
acuucauugauaucuuu

SEQ ID NO: 3297767 - RNA, 19 nt, Variola virus
cuagguacaucauuuagau

SEQ ID NO: 3297768 - RNA, 23 nt, Variola virus
cccagauguucuauaaacuuggc

SEQ ID NO: 3297769 - RNA, 23 nt, Variola virus
uucaagauaaauaaucaaaauug

SEQ ID NO: 3297770 - RNA, 15 nt, Variola virus
auuugagaaaacauu

SEQ ID NO: 3297771 - RNA, 19 nt, Variola virus
aguauaaaguccaacuauu

SEQ ID NO: 3297772 - RNA, 20 nt, Variola virus
uaguuuccuuaacaaaucua

SEQ ID NO: 3297773 - RNA, 22 nt, Variola virus
aauaauuuaggacuuuguaaua

SEQ ID NO: 3297774 - RNA, 15 nt, Variola virus
aaugacgaugauaug

SEQ ID NO: 3297775 - RNA, 14 nt, Variola virus
aguaagaauaagac

SEQ ID NO: 3297776 - RNA, 22 nt, Variola virus
aaaagauuuauaaugucuacau

SEQ ID NO: 3297777 - RNA, 16 nt, Variola virus
cagaugucagcaucug

SEQ ID NO: 3297778 - RNA, 21 nt, Variola virus
gaacuuacugacaaaguuaag

SEQ ID NO: 3297779 - RNA, 13 nt, Variola virus
accacuucucuau

SEQ ID NO: 3297780 - RNA, 21 nt, Variola virus
augcgacgaguuagaaagaua

SEQ ID NO: 3297781 - RNA, 14 nt, Variola virus
auguuaaaaaaaca

SEQ ID NO: 3297782 - RNA, 18 nt, Variola virus
gauccaucaaaaaacaac

SEQ ID NO: 3297783 - RNA, 16 nt, Variola virus
uacuuguuggugaaau

SEQ ID NO: 3297784 - RNA, 15 nt, Variola virus
uuauucucuacgagu

SEQ ID NO: 3297785 - RNA, 19 nt, Variola virus
uuaaaacuugauaauuaau

SEQ ID NO: 3297786 - RNA, 18 nt, Variola virus
acuaacucucuaauggau

SEQ ID NO: 3297787 - RNA, 17 nt, Variola virus
uuaauuaauacaauguc

SEQ ID NO: 3297788 - RNA, 19 nt, Variola virus
aggcuuuaauaucuaaaua

SEQ ID NO: 3297789 - RNA, 16 nt, Variola virus
augugcuaaaaucacu

SEQ ID NO: 3297790 - RNA, 17 nt, Variola virus
agaauuuagauacaucu

SEQ ID NO: 3297791 - RNA, 15 nt, Variola virus
uuauugcaaacgaug

SEQ ID NO: 3297792 - RNA, 16 nt, Variola virus
uauuuuucuaacguug

SEQ ID NO: 3297793 - RNA, 15 nt, Variola virus
uguaaccuuaacaau

SEQ ID NO: 3297794 - RNA, 18 nt, Variola virus
uuuguaacugacuuuaga

SEQ ID NO: 3297795 - RNA, 17 nt, Variola virus
acaaacauacucuaaua

SEQ ID NO: 3297796 - RNA, 22 nt, Variola virus
gaaaauaaugacgcguacgaua

SEQ ID NO: 3297797 - RNA, 22 nt, Variola virus
ugaucuaguuacaacuauuaca

SEQ ID NO: 3297798 - RNA, 17 nt, Variola virus
guuacauguuuaaauaa

SEQ ID NO: 3297799 - RNA, 12 nt, Variola virus
aacaaaauacuc

SEQ ID NO: 3297800 - RNA, 20 nt, Variola virus
uauugcaaaucacucaauau

SEQ ID NO: 3297801 - RNA, 12 nt, Variola virus
gauuauuuucau

SEQ ID NO: 3297802 - RNA, 15 nt, Variola virus
agcacgauaacuuau

SEQ ID NO: 3297803 - RNA, 19 nt, Variola virus
aucaguaucuucuuuaucu

SEQ ID NO: 3297804 - RNA, 17 nt, Variola virus
uguauaucuauaauguu

SEQ ID NO: 3297805 - RNA, 14 nt, Variola virus
cuacaacagauauu

SEQ ID NO: 3297806 - RNA, 14 nt, Variola virus
uaucucucuuggua

SEQ ID NO: 3297807 - RNA, 21 nt, Variola virus
aguaaguacaucaucuagaga

SEQ ID NO: 3297808 - RNA, 13 nt, Variola virus
agugcuucuucuu

SEQ ID NO: 3297809 - RNA, 21 nt, Variola virus
auguaaagcauuauucuugaa

SEQ ID NO: 3297810 - RNA, 19 nt, Variola virus
gcaucuauauaaucuuuuu

SEQ ID NO: 3297811 - RNA, 21 nt, Variola virus
uauauaguuuuuacacauaga

SEQ ID NO: 3297812 - RNA, 23 nt, Variola virus
acaugguuaaaguacauguacaa

SEQ ID NO: 3297813 - RNA, 17 nt, Variola virus
ucuagagugaguuuagg

SEQ ID NO: 3297814 - RNA, 19 nt, Variola virus
cuaccagucuacauuuugc

SEQ ID NO: 3297815 - RNA, 21 nt, Variola virus
aaacaguuuuaccguuuguau

SEQ ID NO: 3297816 - RNA, 17 nt, Variola virus
ucucacaaaaaaguuuu

SEQ ID NO: 3297817 - RNA, 16 nt, Variola virus
uagagauaaaacaagu

SEQ ID NO: 3297818 - RNA, 20 nt, Variola virus
uuuuaucgauucaucuaauu

SEQ ID NO: 3297819 - RNA, 18 nt, Variola virus
gaugucaaugguauguau

SEQ ID NO: 3297820 - RNA, 16 nt, Variola virus
uuugucauuaacuuua

SEQ ID NO: 3297821 - RNA, 21 nt, Variola virus
uuuauaucauuuguuuuaauu

SEQ ID NO: 3297822 - RNA, 19 nt, Variola virus
gauagcuuccagauuuaaa

SEQ ID NO: 3297823 - RNA, 20 nt, Variola virus
auauuacuauuggcaauugu

SEQ ID NO: 3297824 - RNA, 20 nt, Variola virus
cuucuauuaaccacauaucu

SEQ ID NO: 3297825 - RNA, 14 nt, Variola virus
aauaucauauguag

SEQ ID NO: 3297826 - RNA, 18 nt, Variola virus
uaguaugacuuacuugua

SEQ ID NO: 3297827 - RNA, 16 nt, Variola virus
uauuccuguuaucauc

SEQ ID NO: 3297828 - RNA, 14 nt, Variola virus
ugaguuaauaugca

SEQ ID NO: 3297829 - RNA, 16 nt, Variola virus
aaugcuuuagugaaau

SEQ ID NO: 3297830 - RNA, 20 nt, Variola virus
uaucaagcgauucuuucaau

SEQ ID NO: 3297831 - RNA, 12 nt, Variola virus
uugucuagauaa

SEQ ID NO: 3297832 - RNA, 15 nt, Variola virus
ccuuaagaauaucca

SEQ ID NO: 3297833 - RNA, 16 nt, Variola virus
ucgauaccuagaagau

SEQ ID NO: 3297834 - RNA, 23 nt, Variola virus
uaaaauauuguuaaauaauggau

SEQ ID NO: 3297835 - RNA, 18 nt, Variola virus
auuauuguguuuguguag

SEQ ID NO: 3297836 - RNA, 18 nt, Variola virus
augaggugguugcagaau

SEQ ID NO: 3297837 - RNA, 19 nt, Variola virus
uaaguuggucacauacuuu

SEQ ID NO: 3297838 - RNA, 14 nt, Variola virus
auuuacacacauaa

SEQ ID NO: 3297839 - RNA, 15 nt, Variola virus
gaaaauucaaauaga

SEQ ID NO: 3297840 - RNA, 20 nt, Variola virus
uuuccauggcccauucuauu

SEQ ID NO: 3297841 - RNA, 21 nt, Variola virus
uaaaaauagagcccaaagcua

SEQ ID NO: 3297842 - RNA, 14 nt, Variola virus
aggauaaauuauuu

SEQ ID NO: 3297843 - RNA, 21 nt, Variola virus
auuauucuccaccacauagac

SEQ ID NO: 3297844 - RNA, 19 nt, Variola virus
guauacauaauauuaucau

SEQ ID NO: 3297845 - RNA, 21 nt, Variola virus
acagucguucaacugucuuuc

SEQ ID NO: 3297846 - RNA, 20 nt, Variola virus
uaauuggcuaguauuuaaca

SEQ ID NO: 3297847 - RNA, 18 nt, Variola virus
augagacagauuaucaua

SEQ ID NO: 3297848 - RNA, 13 nt, Variola virus
aaauauaacuauu

SEQ ID NO: 3297849 - RNA, 15 nt, Variola virus
uggaauaaauuauua

SEQ ID NO: 3297850 - RNA, 22 nt, Variola virus
agaaaucccaccuuauuauauu

SEQ ID NO: 3297851 - RNA, 13 nt, Variola virus
auaguaaaguaac

SEQ ID NO: 3297852 - RNA, 20 nt, Variola virus
aauaaauguccacuauacau

SEQ ID NO: 3297853 - RNA, 20 nt, Variola virus
aucagcaucuugaauagaaa

SEQ ID NO: 3297854 - RNA, 20 nt, Variola virus
aacacguuaaacaaaaaucu

SEQ ID NO: 3297855 - RNA, 14 nt, Variola virus
gucugaacaucaau

SEQ ID NO: 3297856 - RNA, 16 nt, Variola virus
cauaaauuauuucauu

SEQ ID NO: 3297857 - RNA, 13 nt, Variola virus
augauagaaucug

SEQ ID NO: 3297858 - RNA, 18 nt, Variola virus
uaaauguuguaauuguau

SEQ ID NO: 3297859 - RNA, 14 nt, Variola virus
auuacaaaccuguc

SEQ ID NO: 3297860 - RNA, 19 nt, Variola virus
agcagcugcagcaacuucu

SEQ ID NO: 3297861 - RNA, 20 nt, Variola virus
aauuucuagaauaucaucuc

SEQ ID NO: 3297862 - RNA, 19 nt, Variola virus
ucacuauguguaagaagau

SEQ ID NO: 3297863 - RNA, 14 nt, Variola virus
uuacgaauaaaaga

SEQ ID NO: 3297864 - RNA, 14 nt, Variola virus
auacuuaaaaaugg

SEQ ID NO: 3297865 - RNA, 20 nt, Variola virus
uuuagcaaggucccuaauau

SEQ ID NO: 3297866 - RNA, 14 nt, Variola virus
aauguccacaaaug

SEQ ID NO: 3297867 - RNA, 15 nt, Variola virus
gauaaagauauauga

SEQ ID NO: 3297868 - RNA, 13 nt, Variola virus
agaaauauauacu

SEQ ID NO: 3297869 - RNA, 12 nt, Variola virus
aauuaaauggau

SEQ ID NO: 3297870 - RNA, 16 nt, Variola virus
uacuacuuuaccaaaa

SEQ ID NO: 3297871 - RNA, 15 nt, Variola virus
cgaauccuguuucua

SEQ ID NO: 3297872 - RNA, 22 nt, Variola virus
auuucaacaauaaugagaaugu

SEQ ID NO: 3297873 - RNA, 15 nt, Variola virus
cucucuuuuagagau

SEQ ID NO: 3297874 - RNA, 13 nt, Variola virus
auccaauaauuua

SEQ ID NO: 3297875 - RNA, 21 nt, Variola virus
ugaagaagagguaagauaucu

SEQ ID NO: 3297876 - RNA, 14 nt, Variola virus
uucaacauguuuaa

SEQ ID NO: 3297877 - RNA, 16 nt, Variola virus
aagauuguguagaaau

SEQ ID NO: 3297878 - RNA, 14 nt, Variola virus
caaacugcugaagu

SEQ ID NO: 3297879 - RNA, 17 nt, Variola virus
aaaauguauaacaaaug

SEQ ID NO: 3297880 - RNA, 20 nt, Variola virus
acuuaaaacuugauaauuaa

SEQ ID NO: 3297881 - RNA, 22 nt, Variola virus
auaaucauuauuaacuuuauca

SEQ ID NO: 3297882 - RNA, 20 nt, Variola virus
uauccaguuccuuuucuagu

SEQ ID NO: 3297883 - RNA, 17 nt, Variola virus
aucuuauaaaacuguca

SEQ ID NO: 3297884 - RNA, 21 nt, Variola virus
uuaaaaauaagaaugaaauaa

SEQ ID NO: 3297885 - RNA, 18 nt, Variola virus
cuuuguauucaguauuuu

SEQ ID NO: 3297886 - RNA, 13 nt, Variola virus
cuggaauuucagu

SEQ ID NO: 3297887 - RNA, 17 nt, Variola virus
ucuucaaaugaaguagg

SEQ ID NO: 3297888 - RNA, 18 nt, Variola virus
aaugaguuauuaagaaau

SEQ ID NO: 3297889 - RNA, 20 nt, Variola virus
uguuaguacuacugaagaac

SEQ ID NO: 3297890 - RNA, 15 nt, Variola virus
uucuauuuuuauucu

SEQ ID NO: 3297891 - RNA, 22 nt, Variola virus
acuauaggugucccgucaguau

SEQ ID NO: 3297892 - RNA, 14 nt, Variola virus
gccgaacuaaaaaa

SEQ ID NO: 3297893 - RNA, 16 nt, Variola virus
acaagaugaaaaauuu

SEQ ID NO: 3297894 - RNA, 13 nt, Variola virus
agaauuaaaagag

SEQ ID NO: 3297895 - RNA, 14 nt, Variola virus
uaauuuuacuagau

SEQ ID NO: 3297896 - RNA, 15 nt, Variola virus
cacauuuaugauaug

SEQ ID NO: 3297897 - RNA, 13 nt, Variola virus
aacauaaaaauau

SEQ ID NO: 3297898 - RNA, 17 nt, Variola virus
uuuguaccuuuguacau

SEQ ID NO: 3297899 - RNA, 13 nt, Variola virus
uuuauuaucuaca

SEQ ID NO: 3297900 - RNA, 12 nt, Variola virus
ccaauaaaugac

SEQ ID NO: 3297901 - RNA, 22 nt, Variola virus
acuuuuuuacccacuauaaaau

SEQ ID NO: 3297902 - RNA, 12 nt, Variola virus
uaucuaaagcuu

SEQ ID NO: 3297903 - RNA, 17 nt, Variola virus
aucagauaaguaugaag

SEQ ID NO: 3297904 - RNA, 21 nt, Variola virus
ugacaauauuauuaugaagac

SEQ ID NO: 3297905 - RNA, 12 nt, Variola virus
cauguauuuccu

SEQ ID NO: 3297906 - RNA, 21 nt, Variola virus
ugagauguguuuacacuaacu

SEQ ID NO: 3297907 - RNA, 16 nt, Variola virus
auuucaucuguaguau

SEQ ID NO: 3297908 - RNA, 21 nt, Variola virus
caauaugccacaccaucuuca

SEQ ID NO: 3297909 - RNA, 22 nt, Variola virus
cucagauucaguuucucaucuu

SEQ ID NO: 3297910 - RNA, 21 nt, Variola virus
auucauuaggauuaucaaauc

SEQ ID NO: 3297911 - RNA, 23 nt, Variola virus
agguggauucaguacaauguuau

SEQ ID NO: 3297912 - RNA, 24 nt, Variola virus
aucuuuguuggaucagucucuaag

SEQ ID NO: 3297913 - RNA, 17 nt, Variola virus
aucuaggaguaauuaag

SEQ ID NO: 3297914 - RNA, 14 nt, Variola virus
caucauuaucauuu

SEQ ID NO: 3297915 - RNA, 13 nt, Variola virus
caguagucauugu

SEQ ID NO: 3297916 - RNA, 18 nt, Variola virus
acauaggauuaaaaauaa

SEQ ID NO: 3297917 - RNA, 16 nt, Variola virus
aggggagguaaauaua

SEQ ID NO: 3297918 - RNA, 19 nt, Variola virus
ucgacaucuggauuucaga

SEQ ID NO: 3297919 - RNA, 21 nt, Variola virus
acaaaaccgauaaauggaaau

SEQ ID NO: 3297920 - RNA, 16 nt, Variola virus
uaucugguucuaaaag

SEQ ID NO: 3297921 - RNA, 17 nt, Variola virus
uaugcauguuugcccuu

SEQ ID NO: 3297922 - RNA, 14 nt, Variola virus
accauauacugagu

SEQ ID NO: 3297923 - RNA, 21 nt, Variola virus
uuuugaaggauuggacaaauc

SEQ ID NO: 3297924 - RNA, 21 nt, Variola virus
agaauagugggcuuacaugua

SEQ ID NO: 3297925 - RNA, 14 nt, Variola virus
gauaaaauacugaa

SEQ ID NO: 3297926 - RNA, 16 nt, Variola virus
uauaaucugaugaaca

SEQ ID NO: 3297927 - RNA, 15 nt, Variola virus
aagauuuuaaaugua

SEQ ID NO: 3297928 - RNA, 17 nt, Variola virus
guuaauaaucucaucau

SEQ ID NO: 3297929 - RNA, 16 nt, Variola virus
augaaagaaagaagac

SEQ ID NO: 3297930 - RNA, 15 nt, Variola virus
ucauucguaaaucuu

SEQ ID NO: 3297931 - RNA, 20 nt, Variola virus
aaaccaauguaggucuaaau

SEQ ID NO: 3297932 - RNA, 21 nt, Variola virus
agaauuuguaccaacaaacug

SEQ ID NO: 3297933 - RNA, 22 nt, Variola virus
auuuagaaaacucucuaucucu

SEQ ID NO: 3297934 - RNA, 16 nt, Variola virus
agaacuaccaauaugu

SEQ ID NO: 3297935 - RNA, 20 nt, Variola virus
agagguucccaauuccaaag

SEQ ID NO: 3297936 - RNA, 18 nt, Variola virus
uaucuuaaauaacucauu

SEQ ID NO: 3297937 - RNA, 14 nt, Variola virus
uauuaaccacauau

SEQ ID NO: 3297938 - RNA, 23 nt, Variola virus
auauauuuucacuuuaucucauu

SEQ ID NO: 3297939 - RNA, 14 nt, Variola virus
gaacagaugauaua

SEQ ID NO: 3297940 - RNA, 21 nt, Variola virus
aaaguacucaauaaauuaaag

SEQ ID NO: 3297941 - RNA, 19 nt, Variola virus
ucacuauaauauaaucuag

SEQ ID NO: 3297942 - RNA, 19 nt, Variola virus
ugauugugucucaaaugcc

SEQ ID NO: 3297943 - RNA, 16 nt, Variola virus
ucauccguuguuauau

SEQ ID NO: 3297944 - RNA, 12 nt, Variola virus
auuguuuaagau

SEQ ID NO: 3297945 - RNA, 16 nt, Variola virus
cuuugaucucuuuugu

SEQ ID NO: 3297946 - RNA, 17 nt, Variola virus
agacuaugggaauauau

SEQ ID NO: 3297947 - RNA, 16 nt, Variola virus
agaccauuuaauacga

SEQ ID NO: 3297948 - RNA, 17 nt, Variola virus
uauaccaauauuauucu

SEQ ID NO: 3297949 - RNA, 19 nt, Variola virus
auccagaauguacacuauu

SEQ ID NO: 3297950 - RNA, 20 nt, Variola virus
cuaguuuuagaauaacauua

SEQ ID NO: 3297951 - RNA, 14 nt, Variola virus
auucuaucucuaag

SEQ ID NO: 3297952 - RNA, 22 nt, Variola virus
aaauaggaguuagaauaauaau

SEQ ID NO: 3297953 - RNA, 13 nt, Variola virus
augucuucaauuc

SEQ ID NO: 3297954 - RNA, 21 nt, Variola virus
gucuguaacucugauaaucuc

SEQ ID NO: 3297955 - RNA, 15 nt, Variola virus
acauauaguggauua

SEQ ID NO: 3297956 - RNA, 21 nt, Variola virus
uaauccagaauguacacuauu

SEQ ID NO: 3297957 - RNA, 16 nt, Variola virus
uacuuuauuacuccau

SEQ ID NO: 3297958 - RNA, 13 nt, Variola virus
gauaguaaugcau

SEQ ID NO: 3297959 - RNA, 19 nt, Variola virus
guguauuuuugacguaaau

SEQ ID NO: 3297960 - RNA, 23 nt, Variola virus
acuuugauuucuuaucuguaguu

SEQ ID NO: 3297961 - RNA, 15 nt, Variola virus
caucauuaucauuuu

SEQ ID NO: 3297962 - RNA, 22 nt, Variola virus
uaacuccaggccguuuguuucc

SEQ ID NO: 3297963 - RNA, 17 nt, Variola virus
cagacucauuauuuccc

SEQ ID NO: 3297964 - RNA, 17 nt, Variola virus
aauauuuguuaucauga

SEQ ID NO: 3297965 - RNA, 15 nt, Variola virus
aagaaguuagaaagu

SEQ ID NO: 3297966 - RNA, 21 nt, Variola virus
aaguaaagaaaagauauccag

SEQ ID NO: 3297967 - RNA, 23 nt, Variola virus
cauaaugaugguguauacaguau

SEQ ID NO: 3297968 - RNA, 18 nt, Variola virus
aauccuuaaguucauaau

SEQ ID NO: 3297969 - RNA, 20 nt, Variola virus
auaucgucaccgaugucaaa

SEQ ID NO: 3297970 - RNA, 16 nt, Variola virus
ugucaauugauucuua

SEQ ID NO: 3297971 - RNA, 16 nt, Variola virus
uuaacacguugucuuu

SEQ ID NO: 3297972 - RNA, 12 nt, Variola virus
cuucuaucuuua

SEQ ID NO: 3297973 - RNA, 14 nt, Variola virus
auuaaaaccuaauu

SEQ ID NO: 3297974 - RNA, 16 nt, Variola virus
ugauuauucuccacca

SEQ ID NO: 3297975 - RNA, 15 nt, Variola virus
uaauuuuucauuaac

SEQ ID NO: 3297976 - RNA, 15 nt, Variola virus
cauugauuuauuuga

SEQ ID NO: 3297977 - RNA, 16 nt, Variola virus
uaacuauuuagcaaaa

SEQ ID NO: 3297978 - RNA, 23 nt, Variola virus
aauuuguaaagacgaaacaaaau

SEQ ID NO: 3297979 - RNA, 17 nt, Variola virus
acaaaguaauuggauuc

SEQ ID NO: 3297980 - RNA, 22 nt, Variola virus
ucuacuaagcccaaaaccaaac

SEQ ID NO: 3297981 - RNA, 21 nt, Variola virus
auagaugagguacuauuuuau

SEQ ID NO: 3297982 - RNA, 19 nt, Variola virus
auauugucccaauguuucg

SEQ ID NO: 3297983 - RNA, 12 nt, Variola virus
auauauuguuaa

SEQ ID NO: 3297984 - RNA, 13 nt, Variola virus
uuaucuuucuugc

SEQ ID NO: 3297985 - RNA, 19 nt, Variola virus
ucuauuugucaauauguca

SEQ ID NO: 3297986 - RNA, 19 nt, Variola virus
agcugugaguauuaaugau

SEQ ID NO: 3297987 - RNA, 13 nt, Variola virus
agaacguaaauua

SEQ ID NO: 3297988 - RNA, 17 nt, Variola virus
aucauauauauacugaa

SEQ ID NO: 3297989 - RNA, 16 nt, Variola virus
aauguauacaaaugua

SEQ ID NO: 3297990 - RNA, 15 nt, Variola virus
uucugauuuuaucuu

SEQ ID NO: 3297991 - RNA, 17 nt, Variola virus
ucaaguuuguaggaaag

SEQ ID NO: 3297992 - RNA, 19 nt, Variola virus
aguuucaucaauaaaggau

SEQ ID NO: 3297993 - RNA, 17 nt, Variola virus
acgauacuaugcauauu

SEQ ID NO: 3297994 - RNA, 21 nt, Variola virus
uggaguauauauuuaucucuu

SEQ ID NO: 3297995 - RNA, 14 nt, Variola virus
agauaucucauuaa

SEQ ID NO: 3297996 - RNA, 14 nt, Variola virus
gacacagauaucua

SEQ ID NO: 3297997 - RNA, 18 nt, Variola virus
uacaugauaggaagaaaa

SEQ ID NO: 3297998 - RNA, 19 nt, Variola virus
cuauaaaacgauuaaacaa

SEQ ID NO: 3297999 - RNA, 16 nt, Variola virus
agaaagugcaaaugag

SEQ ID NO: 3298000 - RNA, 18 nt, Variola virus
uaacacacucuaccaguu

SEQ ID NO: 3298001 - RNA, 18 nt, Variola virus
cagaaucccuuuccaaag

SEQ ID NO: 3298002 - RNA, 14 nt, Variola virus
ugccugccuguauu

SEQ ID NO: 3298003 - RNA, 11 nt, Variola virus
cauuaugaauu

SEQ ID NO: 3298004 - RNA, 19 nt, Variola virus
gacaugguaucaacagaua

SEQ ID NO: 3298005 - RNA, 20 nt, Variola virus
uacuaaaucuguauaucuuu

SEQ ID NO: 3298006 - RNA, 17 nt, Variola virus
uauauacucuauuucaa

SEQ ID NO: 3298007 - RNA, 16 nt, Variola virus
uacccaaaucugaaaa

SEQ ID NO: 3298008 - RNA, 14 nt, Variola virus
auuuuaaaaaacug

SEQ ID NO: 3298009 - RNA, 18 nt, Variola virus
acaucuaccuuauuuccc

SEQ ID NO: 3298010 - RNA, 20 nt, Variola virus
uaacacaaauuauauuauua

SEQ ID NO: 3298011 - RNA, 21 nt, Variola virus
uaguucugaccagcaacucau

SEQ ID NO: 3298012 - RNA, 18 nt, Variola virus
augauaaugauaaugacg

SEQ ID NO: 3298013 - RNA, 16 nt, Variola virus
uugauacggcuauucu

SEQ ID NO: 3298014 - RNA, 13 nt, Variola virus
uaaacauuauuga

SEQ ID NO: 3298015 - RNA, 11 nt, Variola virus
agaaaacauuu

SEQ ID NO: 3298016 - RNA, 23 nt, Variola virus
aaguuagaagagucauuaaaaua

SEQ ID NO: 3298017 - RNA, 17 nt, Variola virus
uaaaaugugguaugucu

SEQ ID NO: 3298018 - RNA, 17 nt, Variola virus
guaucgaaaaacuuuaa

SEQ ID NO: 3298019 - RNA, 14 nt, Variola virus
cuaucauguauuug

SEQ ID NO: 3298020 - RNA, 20 nt, Variola virus
caaacuuaaucuuauuagaa

SEQ ID NO: 3298021 - RNA, 20 nt, Variola virus
ugugaugcuguagcaucaaa

SEQ ID NO: 3298022 - RNA, 14 nt, Variola virus
gcagaauauuucua

SEQ ID NO: 3298023 - RNA, 20 nt, Variola virus
uccauuuaaggcuuuaaaau

SEQ ID NO: 3298024 - RNA, 18 nt, Variola virus
uucguuuuuauaugugac

SEQ ID NO: 3298025 - RNA, 18 nt, Variola virus
uauccucuauuauacauu

SEQ ID NO: 3298026 - RNA, 13 nt, Variola virus
cuauuuuaauagg

SEQ ID NO: 3298027 - RNA, 14 nt, Variola virus
agauaguaaauaga

SEQ ID NO: 3298028 - RNA, 15 nt, Variola virus
auagcaucauugcua

SEQ ID NO: 3298029 - RNA, 17 nt, Variola virus
accucuaguuucagaau

SEQ ID NO: 3298030 - RNA, 20 nt, Variola virus
uuaggcacagucaaacauuc

SEQ ID NO: 3298031 - RNA, 15 nt, Variola virus
cauuccaguauucuu

SEQ ID NO: 3298032 - RNA, 14 nt, Variola virus
uagaugaauuauua

SEQ ID NO: 3298033 - RNA, 18 nt, Variola virus
auuauuuuauauucauuu

SEQ ID NO: 3298034 - RNA, 19 nt, Variola virus
gcaugauaauauagaagau

SEQ ID NO: 3298035 - RNA, 22 nt, Variola virus
ucaucacugucaucaguuaugu

SEQ ID NO: 3298036 - RNA, 14 nt, Variola virus
uuauaacauuuucc

SEQ ID NO: 3298037 - RNA, 22 nt, Variola virus
uuucaucuuucuccaauacuaa

SEQ ID NO: 3298038 - RNA, 17 nt, Variola virus
cauggcuucuuccauag

SEQ ID NO: 3298039 - RNA, 21 nt, Variola virus
uuauacuucuccaacaucgau

SEQ ID NO: 3298040 - RNA, 17 nt, Variola virus
cauuaucgauacuaauu

SEQ ID NO: 3298041 - RNA, 13 nt, Variola virus
agaaaucauauau

SEQ ID NO: 3298042 - RNA, 16 nt, Variola virus
cagugacagauauaca

SEQ ID NO: 3298043 - RNA, 16 nt, Variola virus
ugguuaaaaccuuugc

SEQ ID NO: 3298044 - RNA, 22 nt, Variola virus
uuauuucaaagacuaacuuaua

SEQ ID NO: 3298045 - RNA, 22 nt, Variola virus
auauaaaaacuuauuacauagu

SEQ ID NO: 3298046 - RNA, 16 nt, Variola virus
agaaugcauacugucu

SEQ ID NO: 3298047 - RNA, 12 nt, Variola virus
auucuuucaaag

SEQ ID NO: 3298048 - RNA, 19 nt, Variola virus
aagucugauauucagaaag

SEQ ID NO: 3298049 - RNA, 12 nt, Variola virus
aauaaaucaugg

SEQ ID NO: 3298050 - RNA, 20 nt, Variola virus
acuuuauugccuguaauaau

SEQ ID NO: 3298051 - RNA, 16 nt, Variola virus
aauaguuauuagaaua

SEQ ID NO: 3298052 - RNA, 17 nt, Variola virus
uaagacaugacacaaag

SEQ ID NO: 3298053 - RNA, 19 nt, Variola virus
uucuaucuuuaauaucuag

SEQ ID NO: 3298054 - RNA, 13 nt, Variola virus
uuaagaauaaucc

SEQ ID NO: 3298055 - RNA, 16 nt, Variola virus
auaaagauauaaauga

SEQ ID NO: 3298056 - RNA, 16 nt, Variola virus
uagcagauagauaaag

SEQ ID NO: 3298057 - RNA, 22 nt, Variola virus
aaucauucaaaaaucuaucacu

SEQ ID NO: 3298058 - RNA, 12 nt, Variola virus
uaagcauauucu

SEQ ID NO: 3298059 - RNA, 21 nt, Variola virus
augacuucguaagaaauaaua

SEQ ID NO: 3298060 - RNA, 22 nt, Variola virus
agaccaagcuucgucguagaaa

SEQ ID NO: 3298061 - RNA, 18 nt, Variola virus
uuguaaauguaacguauu

SEQ ID NO: 3298062 - RNA, 17 nt, Variola virus
aucauguguaaaaaguu

SEQ ID NO: 3298063 - RNA, 12 nt, Variola virus
uuuuuauuccua

SEQ ID NO: 3298064 - RNA, 18 nt, Variola virus
uagaacaaugucaaaaua

SEQ ID NO: 3298065 - RNA, 19 nt, Variola virus
uaacaauuauuauaauugu

SEQ ID NO: 3298066 - RNA, 19 nt, Variola virus
ucauugaugaugugagaga

SEQ ID NO: 3298067 - RNA, 17 nt, Variola virus
uaguuauuacuuuucuc

SEQ ID NO: 3298068 - RNA, 17 nt, Variola virus
cagauaugguuaaauca

SEQ ID NO: 3298069 - RNA, 16 nt, Variola virus
uagauuuuaucuaauu

SEQ ID NO: 3298070 - RNA, 17 nt, Variola virus
agaaaugaaauuacucg

SEQ ID NO: 3298071 - RNA, 18 nt, Variola virus
ggguuguuacgaugauga

SEQ ID NO: 3298072 - RNA, 19 nt, Variola virus
uaacacuauacgacacuau

SEQ ID NO: 3298073 - RNA, 16 nt, Variola virus
uuuagaagugauucuu

SEQ ID NO: 3298074 - RNA, 23 nt, Variola virus
auuaacaagaauacgucaaggaa

SEQ ID NO: 3298075 - RNA, 17 nt, Variola virus
agaugccgguacuuaug

SEQ ID NO: 3298076 - RNA, 22 nt, Variola virus
uauggauuuggucauaauagaa

SEQ ID NO: 3298077 - RNA, 23 nt, Variola virus
uuacggauaucuaauaauauuag

SEQ ID NO: 3298078 - RNA, 15 nt, Variola virus
aaucuguauaucuuu

SEQ ID NO: 3298079 - RNA, 23 nt, Variola virus
uuaucuccucuaugcaacuguaa

SEQ ID NO: 3298080 - RNA, 13 nt, Variola virus
auaauaucuauau

SEQ ID NO: 3298081 - RNA, 19 nt, Variola virus
uagaugccauaucauacau

SEQ ID NO: 3298082 - RNA, 19 nt, Variola virus
caauuguuugauauauaau

SEQ ID NO: 3298083 - RNA, 16 nt, Variola virus
gagcguaaaaguaaac

SEQ ID NO: 3298084 - RNA, 17 nt, Variola virus
ucucucagguacagauu

SEQ ID NO: 3298085 - RNA, 14 nt, Variola virus
uaaucgauuuugca

SEQ ID NO: 3298086 - RNA, 17 nt, Variola virus
acuguauccucaaacau

SEQ ID NO: 3298087 - RNA, 16 nt, Variola virus
caaccuacacuauuau

SEQ ID NO: 3298088 - RNA, 23 nt, Variola virus
guaacuucgucguaaagcguuaa

SEQ ID NO: 3298089 - RNA, 16 nt, Variola virus
cuauaucauucucaaa

SEQ ID NO: 3298090 - RNA, 13 nt, Variola virus
uacaaaacgacuu

SEQ ID NO: 3298091 - RNA, 17 nt, Variola virus
aauaacauaggauuaaa

SEQ ID NO: 3298092 - RNA, 14 nt, Variola virus
agauaucuucucaa

SEQ ID NO: 3298093 - RNA, 19 nt, Variola virus
cuaauauuauuaccaucuu

SEQ ID NO: 3298094 - RNA, 15 nt, Variola virus
augucaaaaaaagau

SEQ ID NO: 3298095 - RNA, 21 nt, Variola virus
cagcauagacuuugccacaac

SEQ ID NO: 3298096 - RNA, 19 nt, Variola virus
auaagaaugacuccuauau

SEQ ID NO: 3298097 - RNA, 13 nt, Variola virus
auugaagaaggag

SEQ ID NO: 3298098 - RNA, 20 nt, Variola virus
auaucuuuacuaagaaaguu

SEQ ID NO: 3298099 - RNA, 13 nt, Variola virus
aaauacuuuauca

SEQ ID NO: 3298100 - RNA, 21 nt, Variola virus
caacuaucguuggaaaaugau

SEQ ID NO: 3298101 - RNA, 13 nt, Variola virus
aucguauauuaag

SEQ ID NO: 3298102 - RNA, 14 nt, Variola virus
aaaacauaaucaag

SEQ ID NO: 3298103 - RNA, 19 nt, Variola virus
agagauuuaacuguucauc

SEQ ID NO: 3298104 - RNA, 15 nt, Variola virus
uuagaugaauuauua

SEQ ID NO: 3298105 - RNA, 22 nt, Variola virus
auuuacagauuuaguuguuuaa

SEQ ID NO: 3298106 - RNA, 20 nt, Variola virus
uguaacuauucaguaguguu

SEQ ID NO: 3298107 - RNA, 16 nt, Variola virus
acuaacaauaacuaga

SEQ ID NO: 3298108 - RNA, 19 nt, Variola virus
ucugaaguaguuucuaaua

SEQ ID NO: 3298109 - RNA, 13 nt, Variola virus
aucuaguuaccuu

SEQ ID NO: 3298110 - RNA, 15 nt, Variola virus
uaccauuucauugau

SEQ ID NO: 3298111 - RNA, 12 nt, Variola virus
gucuuauccauu

SEQ ID NO: 3298112 - RNA, 14 nt, Variola virus
aucagcgauuccua

SEQ ID NO: 3298113 - RNA, 16 nt, Variola virus
gacauaacuaaucaua

SEQ ID NO: 3298114 - RNA, 15 nt, Variola virus
auggcgaaauuauug

SEQ ID NO: 3298115 - RNA, 18 nt, Variola virus
agacuaacaguaugcauu

SEQ ID NO: 3298116 - RNA, 16 nt, Variola virus
agaauugucuguaaac

SEQ ID NO: 3298117 - RNA, 17 nt, Variola virus
ucgauaacuguagucuu

SEQ ID NO: 3298118 - RNA, 15 nt, Variola virus
cauagaauaaauauc

SEQ ID NO: 3298119 - RNA, 17 nt, Variola virus
uacuguauuaagaacag

SEQ ID NO: 3298120 - RNA, 19 nt, Variola virus
ucaauuaauaaaguaguau

SEQ ID NO: 3298121 - RNA, 22 nt, Variola virus
aauauggagagguguauuucca

SEQ ID NO: 3298122 - RNA, 16 nt, Variola virus
cuaugauuaaaucguu

SEQ ID NO: 3298123 - RNA, 18 nt, Variola virus
aaauguacuguauauaau

SEQ ID NO: 3298124 - RNA, 22 nt, Variola virus
aaguuacaaacaacuaggaaau

SEQ ID NO: 3298125 - RNA, 21 nt, Variola virus
uucuggaauaggauaauaauu

SEQ ID NO: 3298126 - RNA, 13 nt, Variola virus
augugaaacagac

SEQ ID NO: 3298127 - RNA, 14 nt, Variola virus
agauagaaaugaau

SEQ ID NO: 3298128 - RNA, 19 nt, Variola virus
cuacaaaaaggacauguaa

SEQ ID NO: 3298129 - RNA, 14 nt, Variola virus
aaagaguuugugaa

SEQ ID NO: 3298130 - RNA, 17 nt, Variola virus
aacagcuuuaacagaug

SEQ ID NO: 3298131 - RNA, 14 nt, Variola virus
gaaaauguaauaaa

SEQ ID NO: 3298132 - RNA, 21 nt, Variola virus
agucaucuuauguuuuuaaga

SEQ ID NO: 3298133 - RNA, 15 nt, Variola virus
cauuccauuguacaa

SEQ ID NO: 3298134 - RNA, 22 nt, Variola virus
cucuauuggauauggauuucca

SEQ ID NO: 3298135 - RNA, 15 nt, Variola virus
auagaauuuauauau

SEQ ID NO: 3298136 - RNA, 18 nt, Variola virus
aggaaauugauaaugagu

SEQ ID NO: 3298137 - RNA, 21 nt, Variola virus
ugccauauguuggaaauacua

SEQ ID NO: 3298138 - RNA, 17 nt, Variola virus
gaaucuagguauuucuu

SEQ ID NO: 3298139 - RNA, 17 nt, Variola virus
uauaagauuaucaaaau

SEQ ID NO: 3298140 - RNA, 23 nt, Variola virus
auaauagguguaaaucuagaaau

SEQ ID NO: 3298141 - RNA, 14 nt, Variola virus
uaucaucuaucaga

SEQ ID NO: 3298142 - RNA, 19 nt, Variola virus
caaaauauguuucaaucau

SEQ ID NO: 3298143 - RNA, 23 nt, Variola virus
uuacuuuuaguuuuuuuagaaaa

SEQ ID NO: 3298144 - RNA, 16 nt, Variola virus
cuuagauaaaaaauua

SEQ ID NO: 3298145 - RNA, 19 nt, Variola virus
acuaaguauauacacagaa

SEQ ID NO: 3298146 - RNA, 18 nt, Variola virus
aguacagaauuaauuaga

SEQ ID NO: 3298147 - RNA, 14 nt, Variola virus
uagauuguuuucag

SEQ ID NO: 3298148 - RNA, 21 nt, Variola virus
auacuguagaugguucuuuaa

SEQ ID NO: 3298149 - RNA, 15 nt, Variola virus
uaaaucguauauguu

SEQ ID NO: 3298150 - RNA, 19 nt, Variola virus
cuaauucuauauuguuaua

SEQ ID NO: 3298151 - RNA, 16 nt, Variola virus
cuaguuaaaauuuuaa

SEQ ID NO: 3298152 - RNA, 20 nt, Variola virus
aauucuccagacaauacucu

SEQ ID NO: 3298153 - RNA, 18 nt, Variola virus
cuaguggaauugaaaauu

SEQ ID NO: 3298154 - RNA, 21 nt, Variola virus
gacauugauauauauauuaag

SEQ ID NO: 3298155 - RNA, 17 nt, Variola virus
caguacaucuaucacag

SEQ ID NO: 3298156 - RNA, 20 nt, Variola virus
aaaucauuaaaugauuguau

SEQ ID NO: 3298157 - RNA, 23 nt, Variola virus
uuauacuaccagacgacauagaa

SEQ ID NO: 3298158 - RNA, 16 nt, Variola virus
aucauguguaaaaagu

SEQ ID NO: 3298159 - RNA, 21 nt, Variola virus
auuuguaauaauccuaucuaa

SEQ ID NO: 3298160 - RNA, 17 nt, Variola virus
auaaaggagaaggaaaa

SEQ ID NO: 3298161 - RNA, 16 nt, Variola virus
uaccuagaacaauguc

SEQ ID NO: 3298162 - RNA, 18 nt, Variola virus
guauuuuuggugauaaau

SEQ ID NO: 3298163 - RNA, 22 nt, Variola virus
ggaaaacuuuaauaacaaagaa

SEQ ID NO: 3298164 - RNA, 15 nt, Variola virus
gauacuauaaugaaa

SEQ ID NO: 3298165 - RNA, 17 nt, Variola virus
aaauguuuauaguauua

SEQ ID NO: 3298166 - RNA, 16 nt, Variola virus
ccuauucuaaauggau

SEQ ID NO: 3298167 - RNA, 22 nt, Variola virus
cuaaucuaaacgcguuagauaa

SEQ ID NO: 3298168 - RNA, 17 nt, Variola virus
acgcaucuguaaaagaa

SEQ ID NO: 3298169 - RNA, 15 nt, Variola virus
uaacgaggauacauc

SEQ ID NO: 3298170 - RNA, 15 nt, Variola virus
aagauaaaagaauuc

SEQ ID NO: 3298171 - RNA, 16 nt, Variola virus
ucuccagauuucauaa

SEQ ID NO: 3298172 - RNA, 15 nt, Variola virus
uuaaggggaaaaagc

SEQ ID NO: 3298173 - RNA, 17 nt, Variola virus
aguuacgacugaaauaa

SEQ ID NO: 3298174 - RNA, 18 nt, Variola virus
caaacaggaaagaaguau

SEQ ID NO: 3298175 - RNA, 23 nt, Variola virus
auuauguaaauaucuuuaauaca

SEQ ID NO: 3298176 - RNA, 14 nt, Variola virus
aacuugacaaaaau

SEQ ID NO: 3298177 - RNA, 20 nt, Variola virus
ggaacuauuccguauuuauc

SEQ ID NO: 3298178 - RNA, 20 nt, Variola virus
auaagcuauauaauaaaugu

SEQ ID NO: 3298179 - RNA, 14 nt, Variola virus
acauguuuaauaua

SEQ ID NO: 3298180 - RNA, 20 nt, Variola virus
uaaucaaaauugucuaugau

SEQ ID NO: 3298181 - RNA, 16 nt, Variola virus
auucuuaagacacauu

SEQ ID NO: 3298182 - RNA, 18 nt, Variola virus
agcuuccagauuuaaaaa

SEQ ID NO: 3298183 - RNA, 16 nt, Variola virus
auuucauauaguugaa

SEQ ID NO: 3298184 - RNA, 18 nt, Variola virus
uaucgcagaugaaacgga

SEQ ID NO: 3298185 - RNA, 16 nt, Variola virus
ugucuacauaaaucua

SEQ ID NO: 3298186 - RNA, 21 nt, Variola virus
ucaauuucccaaauaacacca

SEQ ID NO: 3298187 - RNA, 21 nt, Variola virus
auacucuacagaguugauugu

SEQ ID NO: 3298188 - RNA, 12 nt, Variola virus
uguaagaaauaa

SEQ ID NO: 3298189 - RNA, 15 nt, Variola virus
ccuggaaaaauacuu

SEQ ID NO: 3298190 - RNA, 13 nt, Variola virus
uauagagaaguau

SEQ ID NO: 3298191 - RNA, 15 nt, Variola virus
cuccgcucucaaugc

SEQ ID NO: 3298192 - RNA, 15 nt, Variola virus
uagcugaauguuaua

SEQ ID NO: 3298193 - RNA, 13 nt, Variola virus
uguaauagaauuu

SEQ ID NO: 3298194 - RNA, 21 nt, Variola virus
uaugaauccgaugaucucacu

SEQ ID NO: 3298195 - RNA, 13 nt, Variola virus
uacuuuguaagau

SEQ ID NO: 3298196 - RNA, 21 nt, Variola virus
acuccucuauuuaauacuuua

SEQ ID NO: 3298197 - RNA, 15 nt, Variola virus
caaaauagagccaaa

SEQ ID NO: 3298198 - RNA, 15 nt, Variola virus
caaauggucaaugau

SEQ ID NO: 3298199 - RNA, 16 nt, Variola virus
uuaauacaucaucuaa

SEQ ID NO: 3298200 - RNA, 14 nt, Variola virus
aaaucaagacuaca

SEQ ID NO: 3298201 - RNA, 16 nt, Variola virus
aggaugacucucaaau

SEQ ID NO: 3298202 - RNA, 13 nt, Variola virus
uuuaauuuguuga

SEQ ID NO: 3298203 - RNA, 22 nt, Variola virus
guuuuuaggauugauaaucaac

SEQ ID NO: 3298204 - RNA, 22 nt, Variola virus
cggacuuauauagcuuauucca

SEQ ID NO: 3298205 - RNA, 16 nt, Variola virus
auauaucuuauaucuc

SEQ ID NO: 3298206 - RNA, 23 nt, Variola virus
aguuugacgaccucgacauuauu

SEQ ID NO: 3298207 - RNA, 12 nt, Variola virus
cgaggagacugu

SEQ ID NO: 3298208 - RNA, 21 nt, Variola virus
uuacagaauaauauucacagg

SEQ ID NO: 3298209 - RNA, 16 nt, Variola virus
aggugcaacaauuuuu

SEQ ID NO: 3298210 - RNA, 20 nt, Variola virus
cacuauaucaguaucuucuu

SEQ ID NO: 3298211 - RNA, 16 nt, Variola virus
cacguugucuuucaag

SEQ ID NO: 3298212 - RNA, 16 nt, Variola virus
uuuuagaaauauacag

SEQ ID NO: 3298213 - RNA, 12 nt, Variola virus
ggaaaaugaaaa

SEQ ID NO: 3298214 - RNA, 16 nt, Variola virus
uauugcaaaucacuca

SEQ ID NO: 3298215 - RNA, 16 nt, Variola virus
uuucuauauagcuauu

SEQ ID NO: 3298216 - RNA, 17 nt, Variola virus
aauugggguauuaauaa

SEQ ID NO: 3298217 - RNA, 19 nt, Variola virus
uucuggaacauuaaaugua

SEQ ID NO: 3298218 - RNA, 14 nt, Variola virus
uauguauacauaau

SEQ ID NO: 3298219 - RNA, 17 nt, Variola virus
aguaugaagaaaaaugu

SEQ ID NO: 3298220 - RNA, 22 nt, Variola virus
aggauguauauaucaugaugau

SEQ ID NO: 3298221 - RNA, 23 nt, Variola virus
cucguaaauugggauaaaaauua

SEQ ID NO: 3298222 - RNA, 13 nt, Variola virus
gucccaauguuuc

SEQ ID NO: 3298223 - RNA, 19 nt, Variola virus
gcauaauccuuguaaugau

SEQ ID NO: 3298224 - RNA, 21 nt, Variola virus
uauaccaaggauaaaauauca

SEQ ID NO: 3298225 - RNA, 23 nt, Variola virus
cuacaguaggcauaccauuagau

SEQ ID NO: 3298226 - RNA, 14 nt, Variola virus
uguccacuauacau

SEQ ID NO: 3298227 - RNA, 15 nt, Variola virus
ucaugaagagauguu

SEQ ID NO: 3298228 - RNA, 17 nt, Variola virus
aguauaccaaacauagu

SEQ ID NO: 3298229 - RNA, 15 nt, Variola virus
aaaaucuacagauga

SEQ ID NO: 3298230 - RNA, 14 nt, Variola virus
agauuaggaaaugu

SEQ ID NO: 3298231 - RNA, 19 nt, Variola virus
uucucucagguacagauuu

SEQ ID NO: 3298232 - RNA, 19 nt, Variola virus
gauuugucacaauaugaau

SEQ ID NO: 3298233 - RNA, 14 nt, Variola virus
uacaauuuuaucau

SEQ ID NO: 3298234 - RNA, 21 nt, Variola virus
gauagaugauucgauaaauaa

SEQ ID NO: 3298235 - RNA, 19 nt, Variola virus
ugaaaucaguggaguagua

SEQ ID NO: 3298236 - RNA, 19 nt, Variola virus
gccaaauguucaauaucua

SEQ ID NO: 3298237 - RNA, 14 nt, Variola virus
uacgauuaucuauu

SEQ ID NO: 3298238 - RNA, 20 nt, Variola virus
uaaauuuuagaaauaacauu

SEQ ID NO: 3298239 - RNA, 18 nt, Variola virus
ugauguacaccaucaaau

SEQ ID NO: 3298240 - RNA, 15 nt, Variola virus
cgggaucauuauuua

SEQ ID NO: 3298241 - RNA, 13 nt, Variola virus
acggauauggaug

SEQ ID NO: 3298242 - RNA, 23 nt, Variola virus
ugagaaaagguucuaucaacaau

SEQ ID NO: 3298243 - RNA, 14 nt, Variola virus
uauuaaucaaucau

SEQ ID NO: 3298244 - RNA, 16 nt, Variola virus
caauaguagcuauuac

SEQ ID NO: 3298245 - RNA, 17 nt, Variola virus
auccgauacuuguaaga

SEQ ID NO: 3298246 - RNA, 19 nt, Variola virus
gauaucuuuacuaagaaag

SEQ ID NO: 3298247 - RNA, 13 nt, Variola virus
uugaaauguguaa

SEQ ID NO: 3298248 - RNA, 17 nt, Variola virus
uaucuacacaaauagaa

SEQ ID NO: 3298249 - RNA, 18 nt, Variola virus
ugauaucuaguauugaua

SEQ ID NO: 3298250 - RNA, 20 nt, Variola virus
agcuggaaaaaguuguucca

SEQ ID NO: 3298251 - RNA, 23 nt, Variola virus
guuaauaacugccggauaaaagu

SEQ ID NO: 3298252 - RNA, 21 nt, Variola virus
guugauaauaucuauauauga

SEQ ID NO: 3298253 - RNA, 15 nt, Variola virus
ucauccaguugaaug

SEQ ID NO: 3298254 - RNA, 16 nt, Variola virus
aacaguaucagauaau

SEQ ID NO: 3298255 - RNA, 16 nt, Variola virus
ucuguacaaauuauug

SEQ ID NO: 3298256 - RNA, 14 nt, Variola virus
gcuauaaaugaauu

SEQ ID NO: 3298257 - RNA, 13 nt, Variola virus
ugaagauacuguu

SEQ ID NO: 3298258 - RNA, 19 nt, Variola virus
aaaauaaucauacaaucua

SEQ ID NO: 3298259 - RNA, 18 nt, Variola virus
uagccgcgguaacuuuua

SEQ ID NO: 3298260 - RNA, 13 nt, Variola virus
acucuuaauuaug

SEQ ID NO: 3298261 - RNA, 17 nt, Variola virus
ccucaaacucuauuuua

SEQ ID NO: 3298262 - RNA, 15 nt, Variola virus
gauaguguauaaaga

SEQ ID NO: 3298263 - RNA, 22 nt, Variola virus
auaacagcuuagauuuaacguu

SEQ ID NO: 3298264 - RNA, 23 nt, Variola virus
aagaugcuacagcguuuacuauu

SEQ ID NO: 3298265 - RNA, 21 nt, Variola virus
uggaauucaguuggaauauug

SEQ ID NO: 3298266 - RNA, 14 nt, Variola virus
auuauguauaccuu

SEQ ID NO: 3298267 - RNA, 19 nt, Variola virus
uguauaucuaacguauucu

SEQ ID NO: 3298268 - RNA, 16 nt, Variola virus
aauggcauacauagaa

SEQ ID NO: 3298269 - RNA, 14 nt, Variola virus
acugaagagacuga

SEQ ID NO: 3298270 - RNA, 21 nt, Variola virus
ccauccauugcguugaaugau

SEQ ID NO: 3298271 - RNA, 15 nt, Variola virus
agugcaaugaauauc

SEQ ID NO: 3298272 - RNA, 12 nt, Variola virus
gucaaucauguu

SEQ ID NO: 3298273 - RNA, 18 nt, Variola virus
aucguauaaauacugucu

SEQ ID NO: 3298274 - RNA, 18 nt, Variola virus
gacucaguauacaaaaau

SEQ ID NO: 3298275 - RNA, 18 nt, Variola virus
guauaugugaauaugaca

SEQ ID NO: 3298276 - RNA, 23 nt, Variola virus
augaaagauacaacaaauuaaau

SEQ ID NO: 3298277 - RNA, 23 nt, Variola virus
cuaaugaguuauuaagaaauaca

SEQ ID NO: 3298278 - RNA, 15 nt, Variola virus
aaauauucuacauau

SEQ ID NO: 3298279 - RNA, 22 nt, Variola virus
auaauagguuguaauacauaua

SEQ ID NO: 3298280 - RNA, 15 nt, Variola virus
uaucauuaacuguug

SEQ ID NO: 3298281 - RNA, 17 nt, Variola virus
ucuugugcuguuauaua

SEQ ID NO: 3298282 - RNA, 22 nt, Variola virus
aguuaucugguaaguucauuau

SEQ ID NO: 3298283 - RNA, 14 nt, Variola virus
guaaaauauucuuu

SEQ ID NO: 3298284 - RNA, 16 nt, Variola virus
uauugaagauaaugug

SEQ ID NO: 3298285 - RNA, 20 nt, Variola virus
aacaucuuggggaaauaugg

SEQ ID NO: 3298286 - RNA, 19 nt, Variola virus
gaguauuaaccaugaaaga

SEQ ID NO: 3298287 - RNA, 22 nt, Variola virus
gcuacacccacuagaaaccacg

SEQ ID NO: 3298288 - RNA, 16 nt, Variola virus
aguuuucuuucaaaau

SEQ ID NO: 3298289 - RNA, 14 nt, Variola virus
gaauacuaaauuga

SEQ ID NO: 3298290 - RNA, 21 nt, Variola virus
uugagaaaagguucuaucaac

SEQ ID NO: 3298291 - RNA, 18 nt, Variola virus
aucucuauaauaucuagu

SEQ ID NO: 3298292 - RNA, 23 nt, Variola virus
ggagaauacaaagcguacagaua

SEQ ID NO: 3298293 - RNA, 16 nt, Variola virus
uuaucucaguacauag

SEQ ID NO: 3298294 - RNA, 14 nt, Variola virus
uugauuaguauaac

SEQ ID NO: 3298295 - RNA, 22 nt, Variola virus
uuaccaucuuccgccaauauag

SEQ ID NO: 3298296 - RNA, 17 nt, Variola virus
auccagauaauaaccuc

SEQ ID NO: 3298297 - RNA, 22 nt, Variola virus
acauauuuuagaacagaaauac

SEQ ID NO: 3298298 - RNA, 20 nt, Variola virus
ucuaauugugacauuauguu

SEQ ID NO: 3298299 - RNA, 18 nt, Variola virus
guucaucauauaaucauc

SEQ ID NO: 3298300 - RNA, 15 nt, Variola virus
ucuuguaucauauau

SEQ ID NO: 3298301 - RNA, 23 nt, Variola virus
auuggauucguguaaucauauau

SEQ ID NO: 3298302 - RNA, 16 nt, Variola virus
gcaauuauauaaugua

SEQ ID NO: 3298303 - RNA, 21 nt, Variola virus
ucuagguagaccguuaaugaa

SEQ ID NO: 3298304 - RNA, 16 nt, Variola virus
gcaggagauagauauc

SEQ ID NO: 3298305 - RNA, 12 nt, Variola virus
ucgaauacuuau

SEQ ID NO: 3298306 - RNA, 19 nt, Variola virus
aaauuucuagugcuuguau

SEQ ID NO: 3298307 - RNA, 20 nt, Variola virus
acauccaaaauacaaaaugu

SEQ ID NO: 3298308 - RNA, 14 nt, Variola virus
auugccuuuaagac

SEQ ID NO: 3298309 - RNA, 14 nt, Variola virus
acagauuuaacaau

SEQ ID NO: 3298310 - RNA, 18 nt, Variola virus
aaguugggacugacagau

SEQ ID NO: 3298311 - RNA, 15 nt, Variola virus
aauucccaaucuugu

SEQ ID NO: 3298312 - RNA, 18 nt, Variola virus
auaccacauacaaaacua

SEQ ID NO: 3298313 - RNA, 12 nt, Variola virus
guacuacagaua

SEQ ID NO: 3298314 - RNA, 17 nt, Variola virus
ucuuccaauaaaugucc

SEQ ID NO: 3298315 - RNA, 19 nt, Variola virus
cgcggaaaaaacauaauag

SEQ ID NO: 3298316 - RNA, 17 nt, Variola virus
agagcuucguauacucu

SEQ ID NO: 3298317 - RNA, 22 nt, Variola virus
agaguccuauauauuugaaaau

SEQ ID NO: 3298318 - RNA, 16 nt, Variola virus
aaauauuacagauuuu

SEQ ID NO: 3298319 - RNA, 12 nt, Variola virus
gugauuaaacau

SEQ ID NO: 3298320 - RNA, 20 nt, Variola virus
uuaucacauaucacauuaau

SEQ ID NO: 3298321 - RNA, 17 nt, Variola virus
uuaauaaaguaugaaca

SEQ ID NO: 3298322 - RNA, 18 nt, Variola virus
uggaucuaugguuuccau

SEQ ID NO: 3298323 - RNA, 18 nt, Variola virus
gcuauauaauaaauguau

SEQ ID NO: 3298324 - RNA, 17 nt, Variola virus
ugugucuccauguacau

SEQ ID NO: 3298325 - RNA, 14 nt, Variola virus
ugauuauuagauuu

SEQ ID NO: 3298326 - RNA, 19 nt, Variola virus
gaggaaaucguauaaauac

SEQ ID NO: 3298327 - RNA, 18 nt, Variola virus
aauuaccaacuaaaaguc

SEQ ID NO: 3298328 - RNA, 20 nt, Variola virus
ugucuagcauuuuagagcau

SEQ ID NO: 3298329 - RNA, 20 nt, Variola virus
aacuauaauggugcuuguau

SEQ ID NO: 3298330 - RNA, 18 nt, Variola virus
cuacagauguaagauacu

SEQ ID NO: 3298331 - RNA, 15 nt, Variola virus
agauugaaauuauau

SEQ ID NO: 3298332 - RNA, 20 nt, Variola virus
aaaucguauaaauacugucu

SEQ ID NO: 3298333 - RNA, 21 nt, Variola virus
auuuauugcacgguaaggaag

SEQ ID NO: 3298334 - RNA, 20 nt, Variola virus
gaauagaguaggaaguuuaa

SEQ ID NO: 3298335 - RNA, 16 nt, Variola virus
aguaaugaucaucuau

SEQ ID NO: 3298336 - RNA, 19 nt, Variola virus
aucuucguuaaaaaguuuu

SEQ ID NO: 3298337 - RNA, 17 nt, Variola virus
auuugauaaagauagau

SEQ ID NO: 3298338 - RNA, 20 nt, Variola virus
augugauuuuaucaaacaug

SEQ ID NO: 3298339 - RNA, 21 nt, Variola virus
auugguuccgagucacaaaua

SEQ ID NO: 3298340 - RNA, 22 nt, Variola virus
auuuaccaucccauauauucca

SEQ ID NO: 3298341 - RNA, 14 nt, Variola virus
guaaaauaaucaua

SEQ ID NO: 3298342 - RNA, 15 nt, Variola virus
gcaacuaucauuuua

SEQ ID NO: 3298343 - RNA, 21 nt, Variola virus
ucguucaacugucuuucaaga

SEQ ID NO: 3298344 - RNA, 18 nt, Variola virus
uuauagggaaauacuguu

SEQ ID NO: 3298345 - RNA, 21 nt, Variola virus
aucaacuucuugcgugucuuu

SEQ ID NO: 3298346 - RNA, 11 nt, Variola virus
aagaagagaau

SEQ ID NO: 3298347 - RNA, 21 nt, Variola virus
auuuuacuacauaguuaucua

SEQ ID NO: 3298348 - RNA, 15 nt, Variola virus
ccuuuaaauccucua

SEQ ID NO: 3298349 - RNA, 13 nt, Variola virus
agucaauaucuuu

SEQ ID NO: 3298350 - RNA, 14 nt, Variola virus
uaguuuuuacacau

SEQ ID NO: 3298351 - RNA, 20 nt, Variola virus
agacguacauggaaaggaaa

SEQ ID NO: 3298352 - RNA, 21 nt, Variola virus
aaauccuuguuugauaaaugu

SEQ ID NO: 3298353 - RNA, 14 nt, Variola virus
aaacuuuuagaaau

SEQ ID NO: 3298354 - RNA, 13 nt, Variola virus
uauacaacuuuua

SEQ ID NO: 3298355 - RNA, 15 nt, Variola virus
uucucguuuccaaaa

SEQ ID NO: 3298356 - RNA, 15 nt, Variola virus
auauagaucaaucau

SEQ ID NO: 3298357 - RNA, 17 nt, Variola virus
gaugagaacagaagcgu

SEQ ID NO: 3298358 - RNA, 17 nt, Variola virus
uaauuuuagcagaauau

SEQ ID NO: 3298359 - RNA, 13 nt, Variola virus
aaaauaauaauua

SEQ ID NO: 3298360 - RNA, 17 nt, Variola virus
acaucuauauacuauau

SEQ ID NO: 3298361 - RNA, 12 nt, Variola virus
auauuucugaag

SEQ ID NO: 3298362 - RNA, 17 nt, Variola virus
uaauacuaauuauauca

SEQ ID NO: 3298363 - RNA, 19 nt, Variola virus
aauuccuuugcuauuucua

SEQ ID NO: 3298364 - RNA, 13 nt, Variola virus
ucuauaacaaaug

SEQ ID NO: 3298365 - RNA, 21 nt, Variola virus
aauaauuuaccucguacuaua

SEQ ID NO: 3298366 - RNA, 15 nt, Variola virus
uguugauaaaaugca

SEQ ID NO: 3298367 - RNA, 20 nt, Variola virus
uauaaucuucgucuauuaca

SEQ ID NO: 3298368 - RNA, 16 nt, Variola virus
uuuaguuuauucauaa

SEQ ID NO: 3298369 - RNA, 12 nt, Variola virus
ucauaucuguaa

SEQ ID NO: 3298370 - RNA, 19 nt, Variola virus
aucaucuagagaauccaca

SEQ ID NO: 3298371 - RNA, 16 nt, Variola virus
uaguuuuucuaccuca

SEQ ID NO: 3298372 - RNA, 12 nt, Variola virus
uauuuucuucua

SEQ ID NO: 3298373 - RNA, 15 nt, Variola virus
cccacguuuaaacau

SEQ ID NO: 3298374 - RNA, 16 nt, Variola virus
uaccagaauacuauuu

SEQ ID NO: 3298375 - RNA, 14 nt, Variola virus
aaguaaucaugaaa

SEQ ID NO: 3298376 - RNA, 23 nt, Variola virus
aauuuaguuacugcuauacagau

SEQ ID NO: 3298377 - RNA, 18 nt, Variola virus
uuacgacgagcauauuca

SEQ ID NO: 3298378 - RNA, 22 nt, Variola virus
ucaagaacuacaaaaguuuucu

SEQ ID NO: 3298379 - RNA, 22 nt, Variola virus
ccaaucugggcguauaaugaau

SEQ ID NO: 3298380 - RNA, 21 nt, Variola virus
uucuaagaaaucuauaauauc

SEQ ID NO: 3298381 - RNA, 17 nt, Variola virus
auaaaggacagaaauau

SEQ ID NO: 3298382 - RNA, 18 nt, Variola virus
auuuuaauaguauccauu

SEQ ID NO: 3298383 - RNA, 13 nt, Variola virus
agucugucaaauc

SEQ ID NO: 3298384 - RNA, 22 nt, Variola virus
accaguucauucaagauaagca

SEQ ID NO: 3298385 - RNA, 17 nt, Variola virus
aucaauuucaaaaagag

SEQ ID NO: 3298386 - RNA, 11 nt, Variola virus
uguuuaagaua

SEQ ID NO: 3298387 - RNA, 15 nt, Variola virus
acaucaucauuuacc

SEQ ID NO: 3298388 - RNA, 14 nt, Variola virus
uaauacuguuuucu

SEQ ID NO: 3298389 - RNA, 16 nt, Variola virus
auaucguucucuaaau

SEQ ID NO: 3298390 - RNA, 15 nt, Variola virus
caaaguuaguacaga

SEQ ID NO: 3298391 - RNA, 15 nt, Variola virus
cauuaauuauaacgg

SEQ ID NO: 3298392 - RNA, 17 nt, Variola virus
agacuacaauauauucu

SEQ ID NO: 3298393 - RNA, 23 nt, Variola virus
cauucgacucaguauacaaaaau

SEQ ID NO: 3298394 - RNA, 17 nt, Variola virus
uauucuuuauuaucaga

SEQ ID NO: 3298395 - RNA, 17 nt, Variola virus
aagucaacguuuacauu

SEQ ID NO: 3298396 - RNA, 18 nt, Variola virus
cuguauccucaaacaucc

SEQ ID NO: 3298397 - RNA, 15 nt, Variola virus
aaaauaguucuguaa

SEQ ID NO: 3298398 - RNA, 17 nt, Variola virus
aacaaauagcuacagua

SEQ ID NO: 3298399 - RNA, 12 nt, Variola virus
agauuuagaaau

SEQ ID NO: 3298400 - RNA, 14 nt, Variola virus
gauaaauaguauca

SEQ ID NO: 3298401 - RNA, 16 nt, Variola virus
uaaucaaaaucuuaau

SEQ ID NO: 3298402 - RNA, 24 nt, Variola virus
caucuaacuauaugauauccacua

SEQ ID NO: 3298403 - RNA, 13 nt, Variola virus
cuaguuguagaau

SEQ ID NO: 3298404 - RNA, 23 nt, Variola virus
gcuauaauccgauauaugaugaa

SEQ ID NO: 3298405 - RNA, 12 nt, Variola virus
gcagaugaugau

SEQ ID NO: 3298406 - RNA, 17 nt, Variola virus
uauuagagauaccaaag

SEQ ID NO: 3298407 - RNA, 18 nt, Variola virus
aauauuguguuagccauu

SEQ ID NO: 3298408 - RNA, 16 nt, Variola virus
guuuuauauacaucuu

SEQ ID NO: 3298409 - RNA, 18 nt, Variola virus
uacgauuuucuucuuuga

SEQ ID NO: 3298410 - RNA, 11 nt, Variola virus
guauaaucaua

SEQ ID NO: 3298411 - RNA, 13 nt, Variola virus
uacaaauagagau

SEQ ID NO: 3298412 - RNA, 16 nt, Variola virus
ucauccgaucauuaau

SEQ ID NO: 3298413 - RNA, 21 nt, Variola virus
ucagugcacucauguaaccaa

SEQ ID NO: 3298414 - RNA, 17 nt, Variola virus
gacgcguucauuggaaa

SEQ ID NO: 3298415 - RNA, 18 nt, Variola virus
guucauaagucuaauaga

SEQ ID NO: 3298416 - RNA, 20 nt, Variola virus
aucuaaagaugaugcuauuu

SEQ ID NO: 3298417 - RNA, 18 nt, Variola virus
aauagucuuguaaagaua

SEQ ID NO: 3298418 - RNA, 21 nt, Variola virus
cgaauuauuucuuuguuuaua

SEQ ID NO: 3298419 - RNA, 13 nt, Variola virus
aaaugugauguau

SEQ ID NO: 3298420 - RNA, 21 nt, Variola virus
gaaagcaguugcgaacaacaa

SEQ ID NO: 3298421 - RNA, 16 nt, Variola virus
caucgucucaucuguu

SEQ ID NO: 3298422 - RNA, 17 nt, Variola virus
agaauuaggagaacuua

SEQ ID NO: 3298423 - RNA, 23 nt, Variola virus
cuuuuuauaucuggcucucucug

SEQ ID NO: 3298424 - RNA, 14 nt, Variola virus
acuuuauauuuccu

SEQ ID NO: 3298425 - RNA, 14 nt, Variola virus
cuucuaucuuuagu

SEQ ID NO: 3298426 - RNA, 11 nt, Variola virus
auuuggagaac

SEQ ID NO: 3298427 - RNA, 23 nt, Variola virus
caauuaguagaguuuuauaacga

SEQ ID NO: 3298428 - RNA, 21 nt, Variola virus
acacauccgucaaagaaauaa

SEQ ID NO: 3298429 - RNA, 15 nt, Variola virus
auaugauagaaauga

SEQ ID NO: 3298430 - RNA, 14 nt, Variola virus
ugauucuaucuaca

SEQ ID NO: 3298431 - RNA, 21 nt, Variola virus
auguuugauaaaaauauguau

SEQ ID NO: 3298432 - RNA, 22 nt, Variola virus
acaacaaggcuuuaauaucuaa

SEQ ID NO: 3298433 - RNA, 24 nt, Variola virus
uuaauaacauuacauauuauauca

SEQ ID NO: 3298434 - RNA, 23 nt, Variola virus
gacauccaugguggaauaaacua

SEQ ID NO: 3298435 - RNA, 17 nt, Variola virus
uaacauuaaguaaaucc

SEQ ID NO: 3298436 - RNA, 14 nt, Variola virus
aucuggcucucucu

SEQ ID NO: 3298437 - RNA, 19 nt, Variola virus
cuguauaucucauuaagcu

SEQ ID NO: 3298438 - RNA, 20 nt, Variola virus
aaugaaguaguugcauagau

SEQ ID NO: 3298439 - RNA, 20 nt, Variola virus
uccgagauaauuucuccaga

SEQ ID NO: 3298440 - RNA, 19 nt, Variola virus
cuaguuucagaauuuucua

SEQ ID NO: 3298441 - RNA, 23 nt, Variola virus
uaaaagucugaucuuaacuccuc

SEQ ID NO: 3298442 - RNA, 19 nt, Variola virus
ccaaaucuaguuguggaaa

SEQ ID NO: 3298443 - RNA, 18 nt, Variola virus
agugucuacuuaaaugua

SEQ ID NO: 3298444 - RNA, 20 nt, Variola virus
auucgcaaacuauucuaaua

SEQ ID NO: 3298445 - RNA, 23 nt, Variola virus
auauucuucuacgaucucacuaa

SEQ ID NO: 3298446 - RNA, 23 nt, Variola virus
ugcauacaauacuagucuagaaa

SEQ ID NO: 3298447 - RNA, 13 nt, Variola virus
uccagauauauau

SEQ ID NO: 3298448 - RNA, 15 nt, Variola virus
aauaacaucagaaaa

SEQ ID NO: 3298449 - RNA, 13 nt, Variola virus
aucucuuucagua

SEQ ID NO: 3298450 - RNA, 13 nt, Variola virus
gaguguagaaaac

SEQ ID NO: 3298451 - RNA, 16 nt, Variola virus
agucauguuaaaaaug

SEQ ID NO: 3298452 - RNA, 20 nt, Variola virus
auuaacuuuaacaugucuac

SEQ ID NO: 3298453 - RNA, 22 nt, Variola virus
acguuuagccgccuuuaauaga

SEQ ID NO: 3298454 - RNA, 19 nt, Variola virus
uucauaaauaaaaacuugg

SEQ ID NO: 3298455 - RNA, 16 nt, Variola virus
auaauaggguaucuaa

SEQ ID NO: 3298456 - RNA, 12 nt, Variola virus
auaugacuguau

SEQ ID NO: 3298457 - RNA, 18 nt, Variola virus
acaauuucacaaauggau

SEQ ID NO: 3298458 - RNA, 21 nt, Variola virus
gaucagaaauacgguuuuucu

SEQ ID NO: 3298459 - RNA, 20 nt, Variola virus
uacacauauggaauauaucu

SEQ ID NO: 3298460 - RNA, 19 nt, Variola virus
aaucaguacuaauuuccaa

SEQ ID NO: 3298461 - RNA, 22 nt, Variola virus
uucuagaaguugauacaacaua

SEQ ID NO: 3298462 - RNA, 21 nt, Variola virus
uuucgauucuggcuauuucaa

SEQ ID NO: 3298463 - RNA, 22 nt, Variola virus
accuauggauacgguacacgua

SEQ ID NO: 3298464 - RNA, 20 nt, Variola virus
uuuuaggaauccauguauua

SEQ ID NO: 3298465 - RNA, 22 nt, Variola virus
uucauccuuugauaauuuucca

SEQ ID NO: 3298466 - RNA, 22 nt, Variola virus
cguagcgucuagucuuaaaugg

SEQ ID NO: 3298467 - RNA, 11 nt, Variola virus
uuuauuucuag

SEQ ID NO: 3298468 - RNA, 22 nt, Variola virus
aucccguacucccaauauguau

SEQ ID NO: 3298469 - RNA, 21 nt, Variola virus
gagauuuguuuuguuaaacaa

SEQ ID NO: 3298470 - RNA, 16 nt, Variola virus
uucuaguuaucaugua

SEQ ID NO: 3298471 - RNA, 14 nt, Variola virus
uuauaaaaaacuuu

SEQ ID NO: 3298472 - RNA, 19 nt, Variola virus
acgaucaaccaaaaaggau

SEQ ID NO: 3298473 - RNA, 15 nt, Variola virus
ucauucaucuagaau

SEQ ID NO: 3298474 - RNA, 13 nt, Variola virus
cuuaaucauguga

SEQ ID NO: 3298475 - RNA, 18 nt, Variola virus
uuggacaaaucuggaaaa

SEQ ID NO: 3298476 - RNA, 22 nt, Variola virus
caagagugauuugagaacaucc

SEQ ID NO: 3298477 - RNA, 22 nt, Variola virus
auuaacuuccacauuaauacag

SEQ ID NO: 3298478 - RNA, 20 nt, Variola virus
aauauagcauagauccguga

SEQ ID NO: 3298479 - RNA, 22 nt, Variola virus
aaccaguacucucuuauaaagu

SEQ ID NO: 3298480 - RNA, 15 nt, Variola virus
uaaugucucuauaaa

SEQ ID NO: 3298481 - RNA, 22 nt, Variola virus
aauaaauggagaauaauuggaa

SEQ ID NO: 3298482 - RNA, 19 nt, Variola virus
acgaucuuuuauuucugau

SEQ ID NO: 3298483 - RNA, 23 nt, Variola virus
gccaauugauaguaaauaaugag

SEQ ID NO: 3298484 - RNA, 21 nt, Variola virus
acaauagauggauaauggaag

SEQ ID NO: 3298485 - RNA, 17 nt, Variola virus
aguaauuuguucaaaau

SEQ ID NO: 3298486 - RNA, 12 nt, Variola virus
uccaaauaacuc

SEQ ID NO: 3298487 - RNA, 15 nt, Variola virus
aguccagaaauggaa

SEQ ID NO: 3298488 - RNA, 16 nt, Variola virus
uguaaaagcauauguu

SEQ ID NO: 3298489 - RNA, 15 nt, Variola virus
gacucugguauuuau

SEQ ID NO: 3298490 - RNA, 19 nt, Variola virus
auuaagccgccauugauua

SEQ ID NO: 3298491 - RNA, 23 nt, Variola virus
ugacuguagauauuauauagaua

SEQ ID NO: 3298492 - RNA, 23 nt, Variola virus
guauucucagaguugacgaauau

SEQ ID NO: 3298493 - RNA, 15 nt, Variola virus
acaauguauaauaua

SEQ ID NO: 3298494 - RNA, 15 nt, Variola virus
gauaguaaaauaaag

SEQ ID NO: 3298495 - RNA, 16 nt, Variola virus
aaaacauuaaucaaua

SEQ ID NO: 3298496 - RNA, 15 nt, Variola virus
auacuacuaaugaca

SEQ ID NO: 3298497 - RNA, 23 nt, Variola virus
agaaaaucagaucugauaauauu

SEQ ID NO: 3298498 - RNA, 20 nt, Variola virus
ugcguacuucagguuucuua

SEQ ID NO: 3298499 - RNA, 18 nt, Variola virus
acuauuccaaaugaugau

SEQ ID NO: 3298500 - RNA, 20 nt, Variola virus
ucaagccggcuauauauucu

SEQ ID NO: 3298501 - RNA, 17 nt, Variola virus
aaugcgaggaaauguau

SEQ ID NO: 3298502 - RNA, 15 nt, Variola virus
uacauuuucuuacaa

SEQ ID NO: 3298503 - RNA, 21 nt, Variola virus
ccaaucaacgaauauccacua

SEQ ID NO: 3298504 - RNA, 15 nt, Variola virus
uucugcuaaauuuuc

SEQ ID NO: 3298505 - RNA, 15 nt, Variola virus
auaauauuagauuua

SEQ ID NO: 3298506 - RNA, 11 nt, Variola virus
aaguauaacga

SEQ ID NO: 3298507 - RNA, 15 nt, Variola virus
ucguaugauuucagu

SEQ ID NO: 3298508 - RNA, 21 nt, Variola virus
guuacuaacgugauuauuauu

SEQ ID NO: 3298509 - RNA, 19 nt, Variola virus
cauuuaaaguuacaaacaa

SEQ ID NO: 3298510 - RNA, 12 nt, Variola virus
uuuucuuaaaac

SEQ ID NO: 3298511 - RNA, 14 nt, Variola virus
acaucggaaauaua

SEQ ID NO: 3298512 - RNA, 14 nt, Variola virus
auaaagucugucaa

SEQ ID NO: 3298513 - RNA, 23 nt, Variola virus
gcuauauagaugacgauccuuua

SEQ ID NO: 3298514 - RNA, 21 nt, Variola virus
auucaagcaaaaacaaaaaac

SEQ ID NO: 3298515 - RNA, 16 nt, Variola virus
aaucucuaucgucaca

SEQ ID NO: 3298516 - RNA, 16 nt, Variola virus
ucagaaagcuguggau

SEQ ID NO: 3298517 - RNA, 19 nt, Variola virus
aacgaucuaauaacaaugu

SEQ ID NO: 3298518 - RNA, 18 nt, Variola virus
uauaugucaaccauuacu

SEQ ID NO: 3298519 - RNA, 17 nt, Variola virus
aguuccgagauaauuuc

SEQ ID NO: 3298520 - RNA, 18 nt, Variola virus
uacccaacaauacauuua

SEQ ID NO: 3298521 - RNA, 20 nt, Variola virus
guagucaaugaaacauuuga

SEQ ID NO: 3298522 - RNA, 14 nt, Variola virus
acuaaauccgagaa

SEQ ID NO: 3298523 - RNA, 20 nt, Variola virus
auuaacuguugccaaugaug

SEQ ID NO: 3298524 - RNA, 18 nt, Variola virus
ucuagucgcaucucuuaa

SEQ ID NO: 3298525 - RNA, 13 nt, Variola virus
gcgucuaaaucaa

SEQ ID NO: 3298526 - RNA, 22 nt, Variola virus
agaucguuggacauuggauaau

SEQ ID NO: 3298527 - RNA, 15 nt, Variola virus
cuaaaacauauuucu

SEQ ID NO: 3298528 - RNA, 19 nt, Variola virus
auauuggagcaaaauccua

SEQ ID NO: 3298529 - RNA, 17 nt, Variola virus
cauggaaaaauauuaca

SEQ ID NO: 3298530 - RNA, 22 nt, Variola virus
caggaaacgcuguauauggaaa

SEQ ID NO: 3298531 - RNA, 13 nt, Variola virus
uaguuuuuuucau

SEQ ID NO: 3298532 - RNA, 23 nt, Variola virus
uccauuagccuuuccacuucugc

SEQ ID NO: 3298533 - RNA, 14 nt, Variola virus
cucaccucuauauu

SEQ ID NO: 3298534 - RNA, 17 nt, Variola virus
ucgauaacagcauuugu

SEQ ID NO: 3298535 - RNA, 14 nt, Variola virus
guaaguacaucauc

SEQ ID NO: 3298536 - RNA, 10 nt, Variola virus
uguagaaaag

SEQ ID NO: 3298537 - RNA, 20 nt, Variola virus
agaacccauuagguuaaaug

SEQ ID NO: 3298538 - RNA, 20 nt, Variola virus
ucguacaguagagauauuug

SEQ ID NO: 3298539 - RNA, 23 nt, Variola virus
accaauauuggaauuauaauaua

SEQ ID NO: 3298540 - RNA, 22 nt, Variola virus
guacuaauaaggaacuagaauu

SEQ ID NO: 3298541 - RNA, 15 nt, Variola virus
acguagaaaacggau

SEQ ID NO: 3298542 - RNA, 20 nt, Variola virus
aacuguagagggucaacaau

SEQ ID NO: 3298543 - RNA, 23 nt, Variola virus
acgucuagaguuuauaucaauaa

SEQ ID NO: 3298544 - RNA, 19 nt, Variola virus
aaucauaacaguaguuuaa

SEQ ID NO: 3298545 - RNA, 23 nt, Variola virus
cuuucggcgguugccauagaaua

SEQ ID NO: 3298546 - RNA, 13 nt, Variola virus
aauccugaauaua

SEQ ID NO: 3298547 - RNA, 15 nt, Variola virus
ucuuccuucgauaga

SEQ ID NO: 3298548 - RNA, 15 nt, Variola virus
uagaaacauauucua

SEQ ID NO: 3298549 - RNA, 19 nt, Variola virus
acuuaauaggcaucauuua

SEQ ID NO: 3298550 - RNA, 16 nt, Variola virus
aguauccaucacuucu

SEQ ID NO: 3298551 - RNA, 14 nt, Variola virus
agaaaucaacuuau

SEQ ID NO: 3298552 - RNA, 16 nt, Variola virus
uacguaucauaucuuc

SEQ ID NO: 3298553 - RNA, 17 nt, Variola virus
acaaacaacuaggaaau

SEQ ID NO: 3298554 - RNA, 14 nt, Variola virus
aauucgaaggaagu

SEQ ID NO: 3298555 - RNA, 14 nt, Variola virus
agaggauaacuauu

SEQ ID NO: 3298556 - RNA, 22 nt, Variola virus
ucucugaauauagaacaucauu

SEQ ID NO: 3298557 - RNA, 13 nt, Variola virus
auagacaaaauag

SEQ ID NO: 3298558 - RNA, 22 nt, Variola virus
cagugaagaagugucuauaaau

SEQ ID NO: 3298559 - RNA, 15 nt, Variola virus
agacuuugaaauaua

SEQ ID NO: 3298560 - RNA, 21 nt, Variola virus
uauccgacaacguuacucaaa

SEQ ID NO: 3298561 - RNA, 20 nt, Variola virus
aaaagaaauauauguggugu

SEQ ID NO: 3298562 - RNA, 13 nt, Variola virus
uguaaauaucuuu

SEQ ID NO: 3298563 - RNA, 21 nt, Variola virus
auacuacuacuuguaagaaug

SEQ ID NO: 3298564 - RNA, 14 nt, Variola virus
gcacacaauacaga

SEQ ID NO: 3298565 - RNA, 18 nt, Variola virus
uguuaaaaauaugugcuc

SEQ ID NO: 3298566 - RNA, 21 nt, Variola virus
uauuuugcuacaccuguugaa

SEQ ID NO: 3298567 - RNA, 18 nt, Variola virus
cgacaucuggauuucaga

SEQ ID NO: 3298568 - RNA, 14 nt, Variola virus
auggaaaucaacau

SEQ ID NO: 3298569 - RNA, 22 nt, Variola virus
gguugccgcaaauagauagaac

SEQ ID NO: 3298570 - RNA, 18 nt, Variola virus
agaugucugugaacuauu

SEQ ID NO: 3298571 - RNA, 23 nt, Variola virus
aguggaucgguucagcauuuaau

SEQ ID NO: 3298572 - RNA, 23 nt, Variola virus
auuuuuuuuaaaaaaaaauacuu

SEQ ID NO: 3298573 - RNA, 22 nt, Variola virus
cugaaaauauauugauaauauu

SEQ ID NO: 3298574 - RNA, 20 nt, Variola virus
auacgaauaucguucucuaa

SEQ ID NO: 3298575 - RNA, 22 nt, Variola virus
cuacauaguuaucuaucuuaaa

SEQ ID NO: 3298576 - RNA, 12 nt, Variola virus
agcugaaaugag

SEQ ID NO: 3298577 - RNA, 21 nt, Variola virus
aguuuucagaagauaauuauc

SEQ ID NO: 3298578 - RNA, 16 nt, Variola virus
ugauauaguaauauua

SEQ ID NO: 3298579 - RNA, 16 nt, Variola virus
uugaucuuauuauaca

SEQ ID NO: 3298580 - RNA, 21 nt, Variola virus
aguauaaugauaucuaugauu

SEQ ID NO: 3298581 - RNA, 15 nt, Variola virus
uacauacuaauauua

SEQ ID NO: 3298582 - RNA, 20 nt, Variola virus
cgauacauccuucuauguua

SEQ ID NO: 3298583 - RNA, 17 nt, Variola virus
gaagucggauuauguaa

SEQ ID NO: 3298584 - RNA, 18 nt, Variola virus
acuuuaucagaucaaaau

SEQ ID NO: 3298585 - RNA, 20 nt, Variola virus
aauguugauaaaaugcauga

SEQ ID NO: 3298586 - RNA, 16 nt, Variola virus
acaauaaaaaaaauug

SEQ ID NO: 3298587 - RNA, 14 nt, Variola virus
auuaauacauuauu

SEQ ID NO: 3298588 - RNA, 19 nt, Variola virus
auucugaugauauuagaac

SEQ ID NO: 3298589 - RNA, 20 nt, Variola virus
gagcaaaaguaguucaacau

SEQ ID NO: 3298590 - RNA, 21 nt, Variola virus
uuaccuugaaaauaaauacag

SEQ ID NO: 3298591 - RNA, 21 nt, Variola virus
caauguagaaauuagaaagau

SEQ ID NO: 3298592 - RNA, 22 nt, Variola virus
aauaccgacgcgucugaauauc

SEQ ID NO: 3298593 - RNA, 14 nt, Variola virus
agauuuuaaaugua

SEQ ID NO: 3298594 - RNA, 19 nt, Variola virus
ucaucaaaagacuuaugau

SEQ ID NO: 3298595 - RNA, 20 nt, Variola virus
caaguaggauuuuuccaaag

SEQ ID NO: 3298596 - RNA, 16 nt, Variola virus
aguucuuaauacuucg

SEQ ID NO: 3298597 - RNA, 22 nt, Variola virus
uauauccuacaccggaagagau

SEQ ID NO: 3298598 - RNA, 16 nt, Variola virus
gaaaauaaauaauggu

SEQ ID NO: 3298599 - RNA, 20 nt, Variola virus
auuuuaucaagacauaugca

SEQ ID NO: 3298600 - RNA, 21 nt, Variola virus
cgaaauagauuauuuaacagc

SEQ ID NO: 3298601 - RNA, 14 nt, Variola virus
ucacuucaauaaau

SEQ ID NO: 3298602 - RNA, 19 nt, Variola virus
cagcaggaauaccaacaaa

SEQ ID NO: 3298603 - RNA, 18 nt, Variola virus
auauuuacaguuacuaaa

SEQ ID NO: 3298604 - RNA, 18 nt, Variola virus
cuuugguucuuuaaaaga

SEQ ID NO: 3298605 - RNA, 15 nt, Variola virus
aaagaaucaucauau

SEQ ID NO: 3298606 - RNA, 20 nt, Variola virus
uaucaucacaacuuaaugaa

SEQ ID NO: 3298607 - RNA, 19 nt, Variola virus
guauccggcaauauuuauu

SEQ ID NO: 3298608 - RNA, 19 nt, Variola virus
uagaggaucuauuagaugu

SEQ ID NO: 3298609 - RNA, 10 nt, Variola virus
aaaaaacaac

SEQ ID NO: 3298610 - RNA, 21 nt, Variola virus
auacugcuccagaauuaauaa

SEQ ID NO: 3298611 - RNA, 20 nt, Variola virus
acuuuaucaucuuauauaga

SEQ ID NO: 3298612 - RNA, 23 nt, Variola virus
guucagaaucgcgauucuaaaac

SEQ ID NO: 3298613 - RNA, 17 nt, Variola virus
guccaacgcuuggcuga

SEQ ID NO: 3298614 - RNA, 19 nt, Variola virus
acauuuuccauuuauaaca

SEQ ID NO: 3298615 - RNA, 17 nt, Variola virus
aucuaauggauaaacug

SEQ ID NO: 3298616 - RNA, 14 nt, Variola virus
ccauauuuuuugca

SEQ ID NO: 3298617 - RNA, 18 nt, Variola virus
uuauacaguguauguaaa

SEQ ID NO: 3298618 - RNA, 19 nt, Variola virus
cuaaucuauuuuaucauuu

SEQ ID NO: 3298619 - RNA, 15 nt, Variola virus
gucaaaacauaauac

SEQ ID NO: 3298620 - RNA, 11 nt, Variola virus
gucuaguuuug

SEQ ID NO: 3298621 - RNA, 15 nt, Variola virus
ucauaauaucuuuaa

SEQ ID NO: 3298622 - RNA, 15 nt, Variola virus
cagcauaaacacaaa

SEQ ID NO: 3298623 - RNA, 23 nt, Variola virus
aaggauuugcuuaaaggaagaau

SEQ ID NO: 3298624 - RNA, 15 nt, Variola virus
cauccaagucaauau

SEQ ID NO: 3298625 - RNA, 16 nt, Variola virus
uguuagaguaucuaca

SEQ ID NO: 3298626 - RNA, 19 nt, Variola virus
auacauaauucuucuguua

SEQ ID NO: 3298627 - RNA, 16 nt, Variola virus
gcaucaugaauacagu

SEQ ID NO: 3298628 - RNA, 16 nt, Variola virus
uauacuguuaaaugua

SEQ ID NO: 3298629 - RNA, 13 nt, Variola virus
aagauuguagaau

SEQ ID NO: 3298630 - RNA, 18 nt, Variola virus
aagugcacguuuacauau

SEQ ID NO: 3298631 - RNA, 20 nt, Variola virus
uauugauaaagaucuaaaaa

SEQ ID NO: 3298632 - RNA, 23 nt, Variola virus
aacagucuccuaauauaacagua

SEQ ID NO: 3298633 - RNA, 16 nt, Variola virus
auuuuuuaugaauauc

SEQ ID NO: 3298634 - RNA, 18 nt, Variola virus
aaacuuauuuagaauauc

SEQ ID NO: 3298635 - RNA, 14 nt, Variola virus
uucccauucuaaug

SEQ ID NO: 3298636 - RNA, 17 nt, Variola virus
caauucgguuaugaaug

SEQ ID NO: 3298637 - RNA, 22 nt, Variola virus
aaugacuuauuaaaaaacauau

SEQ ID NO: 3298638 - RNA, 21 nt, Variola virus
uaauaaaaguggaagucauuu

SEQ ID NO: 3298639 - RNA, 16 nt, Variola virus
agauaucuauauaauu

SEQ ID NO: 3298640 - RNA, 17 nt, Variola virus
ggcaaagucaaaugauu

SEQ ID NO: 3298641 - RNA, 16 nt, Variola virus
uaaagaugaugcuauu

SEQ ID NO: 3298642 - RNA, 17 nt, Variola virus
ucccaauuccaaagauc

SEQ ID NO: 3298643 - RNA, 19 nt, Variola virus
accaugucguuaacuauaa

SEQ ID NO: 3298644 - RNA, 14 nt, Variola virus
agucuuucuccaua

SEQ ID NO: 3298645 - RNA, 22 nt, Variola virus
ucuuggaaacauaaaauaacuc

SEQ ID NO: 3298646 - RNA, 14 nt, Variola virus
ucaaucauguacua

SEQ ID NO: 3298647 - RNA, 17 nt, Variola virus
uaucuuccgucaaggau

SEQ ID NO: 3298648 - RNA, 21 nt, Variola virus
auuuuaagaaaugguguaacu

SEQ ID NO: 3298649 - RNA, 13 nt, Variola virus
acauuaaauguau

SEQ ID NO: 3298650 - RNA, 17 nt, Variola virus
auguagugacgauguau

SEQ ID NO: 3298651 - RNA, 17 nt, Variola virus
uuuauaaaaaacuuuua

SEQ ID NO: 3298652 - RNA, 19 nt, Variola virus
auacauuaaguaaaguaaa

SEQ ID NO: 3298653 - RNA, 21 nt, Variola virus
agaaguaccuggaauguaaag

SEQ ID NO: 3298654 - RNA, 12 nt, Variola virus
aauguaaagaua

SEQ ID NO: 3298655 - RNA, 19 nt, Variola virus
aucuauacugcagaauaga

SEQ ID NO: 3298656 - RNA, 14 nt, Variola virus
auacauaguuguga

SEQ ID NO: 3298657 - RNA, 12 nt, Variola virus
uaucaaaucuag

SEQ ID NO: 3298658 - RNA, 15 nt, Variola virus
aacgaggacaaacua

SEQ ID NO: 3298659 - RNA, 17 nt, Variola virus
uauuggugcauuaauaa

SEQ ID NO: 3298660 - RNA, 20 nt, Variola virus
gucacauacuuuguaaucua

SEQ ID NO: 3298661 - RNA, 16 nt, Variola virus
ucagauuauuuaacaa

SEQ ID NO: 3298662 - RNA, 21 nt, Variola virus
uaaagcgaaaaauaauuauuc

SEQ ID NO: 3298663 - RNA, 22 nt, Variola virus
auacauagaguuaagagaaauu

SEQ ID NO: 3298664 - RNA, 16 nt, Variola virus
uacugaagaacuaaaa

SEQ ID NO: 3298665 - RNA, 18 nt, Variola virus
agacguggagaucuagaa

SEQ ID NO: 3298666 - RNA, 16 nt, Variola virus
ugccgaauagaguucu

SEQ ID NO: 3298667 - RNA, 16 nt, Variola virus
cgggaauuaauguccu

SEQ ID NO: 3298668 - RNA, 14 nt, Variola virus
uaguauaauauuua

SEQ ID NO: 3298669 - RNA, 17 nt, Variola virus
aguauggcgacauugau

SEQ ID NO: 3298670 - RNA, 12 nt, Variola virus
uuaugugaaaca

SEQ ID NO: 3298671 - RNA, 22 nt, Variola virus
auuaugaucuugauuuauagau

SEQ ID NO: 3298672 - RNA, 13 nt, Variola virus
auaugugcacaua

SEQ ID NO: 3298673 - RNA, 13 nt, Variola virus
cggaaaguauuuc

SEQ ID NO: 3298674 - RNA, 19 nt, Variola virus
ugaaucauauauguauuca

SEQ ID NO: 3298675 - RNA, 22 nt, Variola virus
uuuuaacuaguguagaaaacag

SEQ ID NO: 3298676 - RNA, 17 nt, Variola virus
cucuuccaucaccaaaa

SEQ ID NO: 3298677 - RNA, 14 nt, Variola virus
cguaaaaagauucu

SEQ ID NO: 3298678 - RNA, 19 nt, Variola virus
augacgcauauucuacucu

SEQ ID NO: 3298679 - RNA, 15 nt, Variola virus
auagcauaaaugcua

SEQ ID NO: 3298680 - RNA, 22 nt, Variola virus
aaaauauggaauuguauuuucu

SEQ ID NO: 3298681 - RNA, 17 nt, Variola virus
agccuuuugauaaaucu

SEQ ID NO: 3298682 - RNA, 20 nt, Variola virus
cucuaugacuucaucaucug

SEQ ID NO: 3298683 - RNA, 14 nt, Variola virus
gaauuguaacuuga

SEQ ID NO: 3298684 - RNA, 23 nt, Variola virus
ugagaaugaauacgaauucuaug

SEQ ID NO: 3298685 - RNA, 20 nt, Variola virus
ccaaggacagaaaaauguua

SEQ ID NO: 3298686 - RNA, 17 nt, Variola virus
aacuguguuucagguau

SEQ ID NO: 3298687 - RNA, 23 nt, Variola virus
agaaaguaaguaugucgaaucua

SEQ ID NO: 3298688 - RNA, 15 nt, Variola virus
cuacguuuggagaca

SEQ ID NO: 3298689 - RNA, 20 nt, Variola virus
aucaacagauagcuugaaug

SEQ ID NO: 3298690 - RNA, 23 nt, Variola virus
agugauauagaucccaaaucuuc

SEQ ID NO: 3298691 - RNA, 16 nt, Variola virus
auggauggaugaugca

SEQ ID NO: 3298692 - RNA, 15 nt, Variola virus
ucuacgaagaaaguu

SEQ ID NO: 3298693 - RNA, 21 nt, Variola virus
acuuuuucaucuuuacauacu

SEQ ID NO: 3298694 - RNA, 20 nt, Variola virus
aucaggauauaaagaaaaau

SEQ ID NO: 3298695 - RNA, 22 nt, Variola virus
cugaaaauuggaguuagguauu

SEQ ID NO: 3298696 - RNA, 14 nt, Variola virus
acucagaagacuau

SEQ ID NO: 3298697 - RNA, 20 nt, Variola virus
uggauacggcacuagguaca

SEQ ID NO: 3298698 - RNA, 17 nt, Variola virus
ugauuauuuuuugguau

SEQ ID NO: 3298699 - RNA, 17 nt, Variola virus
uacacggcauaguuucu

SEQ ID NO: 3298700 - RNA, 22 nt, Variola virus
uauguuuauuuagauacagaug

SEQ ID NO: 3298701 - RNA, 12 nt, Variola virus
auaaaaaguaau

SEQ ID NO: 3298702 - RNA, 20 nt, Variola virus
aucuuguucugguuuaaaaa

SEQ ID NO: 3298703 - RNA, 12 nt, Variola virus
caguugaacaga

SEQ ID NO: 3298704 - RNA, 18 nt, Variola virus
uccucauuacguuucauu

SEQ ID NO: 3298705 - RNA, 11 nt, Variola virus
ggcaucuuuuu

SEQ ID NO: 3298706 - RNA, 18 nt, Variola virus
uaaauuuaauaagacuuu

SEQ ID NO: 3298707 - RNA, 22 nt, Variola virus
gaugauguucuaccuauuucau

SEQ ID NO: 3298708 - RNA, 21 nt, Variola virus
ucuuccagcauccguuucuaa

SEQ ID NO: 3298709 - RNA, 21 nt, Variola virus
guauuucucuacaauauuaau

SEQ ID NO: 3298710 - RNA, 14 nt, Variola virus
ucucagguacagau

SEQ ID NO: 3298711 - RNA, 13 nt, Variola virus
uagaauaucacau

SEQ ID NO: 3298712 - RNA, 19 nt, Variola virus
auuugucugcuuucuuuua

SEQ ID NO: 3298713 - RNA, 13 nt, Variola virus
agacacugucaca

SEQ ID NO: 3298714 - RNA, 19 nt, Variola virus
agaauaucuauacauaccu

SEQ ID NO: 3298715 - RNA, 22 nt, Variola virus
aauaguuuccaccaaaagacua

SEQ ID NO: 3298716 - RNA, 15 nt, Variola virus
aaaaguacagaauua

SEQ ID NO: 3298717 - RNA, 17 nt, Variola virus
ucacugucacugucacu

SEQ ID NO: 3298718 - RNA, 16 nt, Variola virus
cacuuacagaaaagau

SEQ ID NO: 3298719 - RNA, 18 nt, Variola virus
agcuaaaauauuuucuag

SEQ ID NO: 3298720 - RNA, 15 nt, Variola virus
aauaacuaugauauc

SEQ ID NO: 3298721 - RNA, 14 nt, Variola virus
accaugaaagaaag

SEQ ID NO: 3298722 - RNA, 17 nt, Variola virus
augucuggaauaguaaa

SEQ ID NO: 3298723 - RNA, 16 nt, Variola virus
aguuauaauauuucca

SEQ ID NO: 3298724 - RNA, 19 nt, Variola virus
aaugagauacauaaaacuu

SEQ ID NO: 3298725 - RNA, 21 nt, Variola virus
caaaacuucacagaugauaau

SEQ ID NO: 3298726 - RNA, 16 nt, Variola virus
uggaaaggaaauuaug

SEQ ID NO: 3298727 - RNA, 23 nt, Variola virus
caccgagggaaaaucuaaaguug

SEQ ID NO: 3298728 - RNA, 18 nt, Variola virus
gaauuugauccuaccaaa

SEQ ID NO: 3298729 - RNA, 13 nt, Variola virus
uauacuaauauga

SEQ ID NO: 3298730 - RNA, 14 nt, Variola virus
ccuaucauguauuu

SEQ ID NO: 3298731 - RNA, 18 nt, Variola virus
aaaucacacgaugugucu

SEQ ID NO: 3298732 - RNA, 15 nt, Variola virus
gaagacaauaaugac

SEQ ID NO: 3298733 - RNA, 18 nt, Variola virus
aaugagauguuaaaugaa

SEQ ID NO: 3298734 - RNA, 14 nt, Variola virus
auacauugaauauu

SEQ ID NO: 3298735 - RNA, 14 nt, Variola virus
gauauaaauaauau

SEQ ID NO: 3298736 - RNA, 14 nt, Variola virus
agcauaaacuauac

SEQ ID NO: 3298737 - RNA, 16 nt, Variola virus
uaagccugaauuuauu

SEQ ID NO: 3298738 - RNA, 20 nt, Variola virus
augaucugucuuauaugaag

SEQ ID NO: 3298739 - RNA, 14 nt, Variola virus
aaagaaguauacua

SEQ ID NO: 3298740 - RNA, 21 nt, Variola virus
aauuacugauaauguagaaaa

SEQ ID NO: 3298741 - RNA, 22 nt, Variola virus
guuuuaacgaauuauauagucu

SEQ ID NO: 3298742 - RNA, 18 nt, Variola virus
auuucuucucuucguaua

SEQ ID NO: 3298743 - RNA, 20 nt, Variola virus
auaacguuaucauuuucuac

SEQ ID NO: 3298744 - RNA, 21 nt, Variola virus
augauacgauacuauauguau

SEQ ID NO: 3298745 - RNA, 18 nt, Variola virus
uaugauccguaacauaua

SEQ ID NO: 3298746 - RNA, 15 nt, Variola virus
guuuuuuuagaaaau

SEQ ID NO: 3298747 - RNA, 22 nt, Variola virus
auauuuuucuauguuaggaaua

SEQ ID NO: 3298748 - RNA, 15 nt, Variola virus
acacuguuaaaguua

SEQ ID NO: 3298749 - RNA, 21 nt, Variola virus
aaaccaacgaggaggaauauc

SEQ ID NO: 3298750 - RNA, 15 nt, Variola virus
aucauacuuagaauu

SEQ ID NO: 3298751 - RNA, 13 nt, Variola virus
guauuugauuuug

SEQ ID NO: 3298752 - RNA, 12 nt, Variola virus
caacucucuuuu

SEQ ID NO: 3298753 - RNA, 13 nt, Variola virus
augucuccaauuu

SEQ ID NO: 3298754 - RNA, 13 nt, Variola virus
guaaauaauacau

SEQ ID NO: 3298755 - RNA, 14 nt, Variola virus
acauucauuaauaa

SEQ ID NO: 3298756 - RNA, 15 nt, Variola virus
cgucuagaugauaua

SEQ ID NO: 3298757 - RNA, 22 nt, Variola virus
accauaauccuauucuugaucu

SEQ ID NO: 3298758 - RNA, 14 nt, Variola virus
agaugcaauacaaa

SEQ ID NO: 3298759 - RNA, 16 nt, Variola virus
agugauucaaaaggac

SEQ ID NO: 3298760 - RNA, 17 nt, Variola virus
ggucuaaagaauaucuu

SEQ ID NO: 3298761 - RNA, 16 nt, Variola virus
aacuagaguaaaaauc

SEQ ID NO: 3298762 - RNA, 23 nt, Variola virus
cuagcuuuauacacaucucuuca

SEQ ID NO: 3298763 - RNA, 18 nt, Variola virus
auccuuguucagauacua

SEQ ID NO: 3298764 - RNA, 22 nt, Variola virus
aaauaucauuuuuugaauauau

SEQ ID NO: 3298765 - RNA, 23 nt, Variola virus
aauaagauaguucgcaacaaagu

SEQ ID NO: 3298766 - RNA, 15 nt, Variola virus
gccgauaaacaaauc

SEQ ID NO: 3298767 - RNA, 18 nt, Variola virus
gacaaaguccuaguugua

SEQ ID NO: 3298768 - RNA, 11 nt, Variola virus
uauuauacaug

SEQ ID NO: 3298769 - RNA, 13 nt, Variola virus
uaacacauuuuca

SEQ ID NO: 3298770 - RNA, 20 nt, Variola virus
uauccaacuuaacaaaucuu

SEQ ID NO: 3298771 - RNA, 13 nt, Variola virus
uaaauaaaugucc

SEQ ID NO: 3298772 - RNA, 17 nt, Variola virus
uacacaaggcauugucu

SEQ ID NO: 3298773 - RNA, 14 nt, Variola virus
aauucuuuaauauc

SEQ ID NO: 3298774 - RNA, 23 nt, Variola virus
ggacauaagucgccucaaagaua

SEQ ID NO: 3298775 - RNA, 14 nt, Variola virus
aauaaucauacaau

SEQ ID NO: 3298776 - RNA, 18 nt, Variola virus
ucccgcauuuauacauau

SEQ ID NO: 3298777 - RNA, 13 nt, Variola virus
gucaaagaaauac

SEQ ID NO: 3298778 - RNA, 21 nt, Variola virus
uucaagaucuaauauucuaga

SEQ ID NO: 3298779 - RNA, 17 nt, Variola virus
aucuggaaaaucuauau

SEQ ID NO: 3298780 - RNA, 22 nt, Variola virus
caugguaucgauuacaccucua

SEQ ID NO: 3298781 - RNA, 17 nt, Variola virus
aaaauucuaauggauga

SEQ ID NO: 3298782 - RNA, 15 nt, Variola virus
ucgaaugucauauac

SEQ ID NO: 3298783 - RNA, 19 nt, Variola virus
auucucugaaaauguaaau

SEQ ID NO: 3298784 - RNA, 20 nt, Variola virus
cacuagaagagaauacacau

SEQ ID NO: 3298785 - RNA, 23 nt, Variola virus
gugaaauacuuuauuacuccauu

SEQ ID NO: 3298786 - RNA, 18 nt, Variola virus
guaaauauucuaaaucaa

SEQ ID NO: 3298787 - RNA, 18 nt, Variola virus
ggaacgugauaguuucuc

SEQ ID NO: 3298788 - RNA, 21 nt, Variola virus
ggaagcaauuacagauuucuc

SEQ ID NO: 3298789 - RNA, 19 nt, Variola virus
caaucaaaagacuauacau

SEQ ID NO: 3298790 - RNA, 16 nt, Variola virus
uucuccaauacuaauu

SEQ ID NO: 3298791 - RNA, 20 nt, Variola virus
ggccuguucauaaauaaaaa

SEQ ID NO: 3298792 - RNA, 14 nt, Variola virus
guuaaguuacucau

SEQ ID NO: 3298793 - RNA, 13 nt, Variola virus
uuugauucgaauu

SEQ ID NO: 3298794 - RNA, 13 nt, Variola virus
aucaugaaauaua

SEQ ID NO: 3298795 - RNA, 17 nt, Variola virus
aaauaacaauuaacaau

SEQ ID NO: 3298796 - RNA, 22 nt, Variola virus
ugaauuugauuauuuugaagac

SEQ ID NO: 3298797 - RNA, 13 nt, Variola virus
gcauuuauacaua

SEQ ID NO: 3298798 - RNA, 19 nt, Variola virus
aaaaggcgguaauagaaua

SEQ ID NO: 3298799 - RNA, 17 nt, Variola virus
cgauaacggaauagacu

SEQ ID NO: 3298800 - RNA, 14 nt, Variola virus
gccauuauuagaaa

SEQ ID NO: 3298801 - RNA, 20 nt, Variola virus
cagauccucccguuaaaacc

SEQ ID NO: 3298802 - RNA, 15 nt, Variola virus
acaaaaauacauaaa

SEQ ID NO: 3298803 - RNA, 15 nt, Variola virus
guuagagacaaaaga

SEQ ID NO: 3298804 - RNA, 22 nt, Variola virus
ucuuuuugauuaccuuacucau

SEQ ID NO: 3298805 - RNA, 19 nt, Variola virus
uaacgaguuccauuuauau

SEQ ID NO: 3298806 - RNA, 21 nt, Variola virus
cuaaaacugaagagacugauu

SEQ ID NO: 3298807 - RNA, 13 nt, Variola virus
auuauuacagagu

SEQ ID NO: 3298808 - RNA, 13 nt, Variola virus
uugaaaauuauuu

SEQ ID NO: 3298809 - RNA, 15 nt, Variola virus
aucuacuagaaagau

SEQ ID NO: 3298810 - RNA, 14 nt, Variola virus
auacgagucauuau

SEQ ID NO: 3298811 - RNA, 19 nt, Variola virus
auuuuaauucuagacuauu

SEQ ID NO: 3298812 - RNA, 16 nt, Variola virus
aucacuacaauaauua

SEQ ID NO: 3298813 - RNA, 22 nt, Variola virus
ggaaaucacaaugacuuuauca

SEQ ID NO: 3298814 - RNA, 22 nt, Variola virus
acuacuaggagggaaaaugaag

SEQ ID NO: 3298815 - RNA, 16 nt, Variola virus
guaauacccauguuua

SEQ ID NO: 3298816 - RNA, 14 nt, Variola virus
acucacguuaauaa

SEQ ID NO: 3298817 - RNA, 16 nt, Variola virus
agauuuuuuaaaggau

SEQ ID NO: 3298818 - RNA, 21 nt, Variola virus
acaaaaauugugacuuuguua

SEQ ID NO: 3298819 - RNA, 22 nt, Variola virus
aauuguuuuuguacauaauaga

SEQ ID NO: 3298820 - RNA, 19 nt, Variola virus
uggaauaucauuaacuguu

SEQ ID NO: 3298821 - RNA, 13 nt, Variola virus
aaagauuuaagaa

SEQ ID NO: 3298822 - RNA, 21 nt, Variola virus
ugugucuacauaaauaugcaa

SEQ ID NO: 3298823 - RNA, 22 nt, Variola virus
auaguuuucucuauucugaaau

SEQ ID NO: 3298824 - RNA, 21 nt, Variola virus
ggaaaagucaaagucguuuaa

SEQ ID NO: 3298825 - RNA, 21 nt, Variola virus
auuccuucucguaggcacaca

SEQ ID NO: 3298826 - RNA, 18 nt, Variola virus
aacuguggauacucugua

SEQ ID NO: 3298827 - RNA, 17 nt, Variola virus
ucggcaaucuuucucaa

SEQ ID NO: 3298828 - RNA, 23 nt, Variola virus
auuguaugacuuaauagcaucau

SEQ ID NO: 3298829 - RNA, 16 nt, Variola virus
uccaggauucuccuaa

SEQ ID NO: 3298830 - RNA, 13 nt, Variola virus
uaaguuucaagau

SEQ ID NO: 3298831 - RNA, 16 nt, Variola virus
uuaguuuuuggauaga

SEQ ID NO: 3298832 - RNA, 23 nt, Variola virus
ucaagccggcuauauauucugcu

SEQ ID NO: 3298833 - RNA, 12 nt, Variola virus
auaucuauaaug

SEQ ID NO: 3298834 - RNA, 14 nt, Variola virus
auagauagaacuac

SEQ ID NO: 3298835 - RNA, 16 nt, Variola virus
gcaaaaauaauaugau

SEQ ID NO: 3298836 - RNA, 22 nt, Variola virus
uacaagaaauacuuccauccga

SEQ ID NO: 3298837 - RNA, 16 nt, Variola virus
aauugucuauaaauua

SEQ ID NO: 3298838 - RNA, 22 nt, Variola virus
uuaauauuaaaaauacaucugu

SEQ ID NO: 3298839 - RNA, 12 nt, Variola virus
uguaguaguaua

SEQ ID NO: 3298840 - RNA, 20 nt, Variola virus
aauaaauguuucgauuucaa

SEQ ID NO: 3298841 - RNA, 20 nt, Variola virus
uguaucauaauauuaaucau

SEQ ID NO: 3298842 - RNA, 13 nt, Variola virus
uccgaguaaaaug

SEQ ID NO: 3298843 - RNA, 17 nt, Variola virus
agucuaccgaucucuuu

SEQ ID NO: 3298844 - RNA, 14 nt, Variola virus
caaaucaaaaguau

SEQ ID NO: 3298845 - RNA, 19 nt, Variola virus
uucaaguccaauguuuuua

SEQ ID NO: 3298846 - RNA, 14 nt, Variola virus
cugcuauaauuaag

SEQ ID NO: 3298847 - RNA, 15 nt, Variola virus
cacuguggaugugac

SEQ ID NO: 3298848 - RNA, 23 nt, Variola virus
uuagauauagaagguaaacauca

SEQ ID NO: 3298849 - RNA, 12 nt, Variola virus
guacauauuaau

SEQ ID NO: 3298850 - RNA, 19 nt, Variola virus
auggaaaucaacauaaugu

SEQ ID NO: 3298851 - RNA, 17 nt, Variola virus
agaccgucuacaagaaa

SEQ ID NO: 3298852 - RNA, 19 nt, Variola virus
uguuuucaucauuucacaa

SEQ ID NO: 3298853 - RNA, 18 nt, Variola virus
auugacauaguuaaauaa

SEQ ID NO: 3298854 - RNA, 21 nt, Variola virus
auuuguauaaucuuuaacaaa

SEQ ID NO: 3298855 - RNA, 19 nt, Variola virus
aaaacguggaaagaaucua

SEQ ID NO: 3298856 - RNA, 22 nt, Variola virus
auaaacaacuaaaaugugguau

SEQ ID NO: 3298857 - RNA, 19 nt, Variola virus
ugugucuccauguacauac

SEQ ID NO: 3298858 - RNA, 14 nt, Variola virus
ucauauaacacuca

SEQ ID NO: 3298859 - RNA, 19 nt, Variola virus
ugauaguauggcauucauu

SEQ ID NO: 3298860 - RNA, 22 nt, Variola virus
auaguucguguacuagucauaa

SEQ ID NO: 3298861 - RNA, 19 nt, Variola virus
cuucagacaacaucucaga

SEQ ID NO: 3298862 - RNA, 18 nt, Variola virus
uguaugauaaaauucuua

SEQ ID NO: 3298863 - RNA, 18 nt, Variola virus
uuagucacacaauacuac

SEQ ID NO: 3298864 - RNA, 15 nt, Variola virus
augaaauauauuaac

SEQ ID NO: 3298865 - RNA, 22 nt, Variola virus
auaaaccauccauucauauaca

SEQ ID NO: 3298866 - RNA, 21 nt, Variola virus
uguccuugcguuuuucugaua

SEQ ID NO: 3298867 - RNA, 13 nt, Variola virus
uugguguaaaucu

SEQ ID NO: 3298868 - RNA, 12 nt, Variola virus
agauacuugaag

SEQ ID NO: 3298869 - RNA, 18 nt, Variola virus
aucuucuauaucuagauu

SEQ ID NO: 3298870 - RNA, 20 nt, Variola virus
auacaaauaugucuuuguua

SEQ ID NO: 3298871 - RNA, 23 nt, Variola virus
uaauccugaauauauugauuuuc

SEQ ID NO: 3298872 - RNA, 14 nt, Variola virus
augagggaaaagau

SEQ ID NO: 3298873 - RNA, 15 nt, Variola virus
auuauucgagugaaa

SEQ ID NO: 3298874 - RNA, 20 nt, Variola virus
aauccauucucucaaucacu

SEQ ID NO: 3298875 - RNA, 19 nt, Variola virus
guuacauuuccaugucaaa

SEQ ID NO: 3298876 - RNA, 15 nt, Variola virus
caacaaguauacaau

SEQ ID NO: 3298877 - RNA, 22 nt, Variola virus
ccagauuuaaaaagguucacau

SEQ ID NO: 3298878 - RNA, 15 nt, Variola virus
uaaucuuuguuggau

SEQ ID NO: 3298879 - RNA, 14 nt, Variola virus
ucaacucaugugua

SEQ ID NO: 3298880 - RNA, 16 nt, Variola virus
uuaaugaaacaucguu

SEQ ID NO: 3298881 - RNA, 18 nt, Variola virus
cggagauuuaaucuguaa

SEQ ID NO: 3298882 - RNA, 17 nt, Variola virus
aauaugauuagaaguua

SEQ ID NO: 3298883 - RNA, 20 nt, Variola virus
uuaaaguuucugaaauaaga

SEQ ID NO: 3298884 - RNA, 23 nt, Variola virus
acaugcgguaaagauauuucuca

SEQ ID NO: 3298885 - RNA, 16 nt, Variola virus
uacauaaaaaaaaugu

SEQ ID NO: 3298886 - RNA, 19 nt, Variola virus
acacauucuuuagaacuuc

SEQ ID NO: 3298887 - RNA, 22 nt, Variola virus
aguacuucucccauaauacuuu

SEQ ID NO: 3298888 - RNA, 19 nt, Variola virus
cauuuauggcguauacaac

SEQ ID NO: 3298889 - RNA, 13 nt, Variola virus
uucuacaauaacu

SEQ ID NO: 3298890 - RNA, 16 nt, Variola virus
uacuauccaucagaau

SEQ ID NO: 3298891 - RNA, 21 nt, Variola virus
gaaucauaaaaaaaaguuuua

SEQ ID NO: 3298892 - RNA, 15 nt, Variola virus
uuaauucucucaggu

SEQ ID NO: 3298893 - RNA, 14 nt, Variola virus
caaacuguaaaugu

SEQ ID NO: 3298894 - RNA, 15 nt, Variola virus
aacgauauuugugaa

SEQ ID NO: 3298895 - RNA, 19 nt, Variola virus
auaucgguaccguuaaaga

SEQ ID NO: 3298896 - RNA, 23 nt, Variola virus
auaucucguuuagaaaaaugcua

SEQ ID NO: 3298897 - RNA, 14 nt, Variola virus
agaaggaguguuuu

SEQ ID NO: 3298898 - RNA, 18 nt, Variola virus
auuuuccaaauacaucca

SEQ ID NO: 3298899 - RNA, 16 nt, Variola virus
auuuauguuuuaaaua

SEQ ID NO: 3298900 - RNA, 15 nt, Variola virus
ucaacaaucguuaau

SEQ ID NO: 3298901 - RNA, 18 nt, Variola virus
uaaaauuaaauaguagua

SEQ ID NO: 3298902 - RNA, 23 nt, Variola virus
auaucuaggcgguggauauuucu

SEQ ID NO: 3298903 - RNA, 22 nt, Variola virus
agagauuggguuaauaaauaca

SEQ ID NO: 3298904 - RNA, 23 nt, Variola virus
guuccguuggaugguaauaaacu

SEQ ID NO: 3298905 - RNA, 17 nt, Variola virus
auaaacaacauaauaca

SEQ ID NO: 3298906 - RNA, 15 nt, Variola virus
guauaucuauaucaa

SEQ ID NO: 3298907 - RNA, 11 nt, Variola virus
uaacugaagaa

SEQ ID NO: 3298908 - RNA, 14 nt, Variola virus
guuaaagaucuuaa

SEQ ID NO: 3298909 - RNA, 15 nt, Variola virus
uugucuuaacuauaa

SEQ ID NO: 3298910 - RNA, 16 nt, Variola virus
auuacuuuaauaguug

SEQ ID NO: 3298911 - RNA, 18 nt, Variola virus
aagccuuaugcauccaaa

SEQ ID NO: 3298912 - RNA, 23 nt, Variola virus
auuccggcguaugaauugacauu

SEQ ID NO: 3298913 - RNA, 12 nt, Variola virus
cuaccuauuuca

SEQ ID NO: 3298914 - RNA, 17 nt, Variola virus
ugaaugguaaagaaugc

SEQ ID NO: 3298915 - RNA, 17 nt, Variola virus
uuaugaugauacauuuu

SEQ ID NO: 3298916 - RNA, 13 nt, Variola virus
acauuuuaaaaua

SEQ ID NO: 3298917 - RNA, 14 nt, Variola virus
auuucaaaauguua

SEQ ID NO: 3298918 - RNA, 18 nt, Variola virus
aauguagaaauuagaaag

SEQ ID NO: 3298919 - RNA, 20 nt, Variola virus
uauuagaaauuuaucaauau

SEQ ID NO: 3298920 - RNA, 21 nt, Variola virus
uaucucguccuugguuuacau

SEQ ID NO: 3298921 - RNA, 23 nt, Variola virus
cauaaacaauauuaaggagauuc

SEQ ID NO: 3298922 - RNA, 21 nt, Variola virus
uuuuuagaaaaaacaucauuu

SEQ ID NO: 3298923 - RNA, 14 nt, Variola virus
gaaucugaaaaugu

SEQ ID NO: 3298924 - RNA, 21 nt, Variola virus
cauggcucguaccaacaguaa

SEQ ID NO: 3298925 - RNA, 20 nt, Variola virus
aucuaaagauaaucuucucu

SEQ ID NO: 3298926 - RNA, 13 nt, Variola virus
uguucaaaugccu

SEQ ID NO: 3298927 - RNA, 15 nt, Variola virus
aaucuuauaucuucu

SEQ ID NO: 3298928 - RNA, 17 nt, Variola virus
gauuucugauuauucac

SEQ ID NO: 3298929 - RNA, 16 nt, Variola virus
gaucuuaccaucuucu

SEQ ID NO: 3298930 - RNA, 22 nt, Variola virus
aaucaggguuaucaaaguguuu

SEQ ID NO: 3298931 - RNA, 15 nt, Variola virus
aguaaccaaaaugaa

SEQ ID NO: 3298932 - RNA, 20 nt, Variola virus
gauaaaaaggaaucuauuaa

SEQ ID NO: 3298933 - RNA, 22 nt, Variola virus
aaaguuuuuaagagauaaucua

SEQ ID NO: 3298934 - RNA, 15 nt, Variola virus
ugagugcagaugcug

SEQ ID NO: 3298935 - RNA, 14 nt, Variola virus
uugguaaauuccau

SEQ ID NO: 3298936 - RNA, 15 nt, Variola virus
ggauaugucuagaac

SEQ ID NO: 3298937 - RNA, 22 nt, Variola virus
auuagcggcauaggaacauuuc

SEQ ID NO: 3298938 - RNA, 22 nt, Variola virus
gcuuuugcgaucaauaaaugga

SEQ ID NO: 3298939 - RNA, 18 nt, Variola virus
cucuacucauuucauuau

SEQ ID NO: 3298940 - RNA, 17 nt, Variola virus
aguuauccgaucuaaaa

SEQ ID NO: 3298941 - RNA, 20 nt, Variola virus
aauauaaaaaaauaaauaua

SEQ ID NO: 3298942 - RNA, 13 nt, Variola virus
aguaaucauguaa

SEQ ID NO: 3298943 - RNA, 19 nt, Variola virus
ucgaucggugaaaagucuu

SEQ ID NO: 3298944 - RNA, 12 nt, Variola virus
cucuuuaauagc

SEQ ID NO: 3298945 - RNA, 15 nt, Variola virus
uuccaucuagacuau

SEQ ID NO: 3298946 - RNA, 16 nt, Variola virus
agaccaucuaacagaa

SEQ ID NO: 3298947 - RNA, 21 nt, Variola virus
aucuauaaaauuuuaauuaag

SEQ ID NO: 3298948 - RNA, 17 nt, Variola virus
uuaaauaacucauuuau

SEQ ID NO: 3298949 - RNA, 15 nt, Variola virus
auauccauaggaaag

SEQ ID NO: 3298950 - RNA, 17 nt, Variola virus
ggacacgacauagagag

SEQ ID NO: 3298951 - RNA, 14 nt, Variola virus
gugaaucuguucaa

SEQ ID NO: 3298952 - RNA, 18 nt, Variola virus
acuucagaugauggugca

SEQ ID NO: 3298953 - RNA, 15 nt, Variola virus
auuacaaauacuuua

SEQ ID NO: 3298954 - RNA, 14 nt, Variola virus
ugaacuauuucuug

SEQ ID NO: 3298955 - RNA, 15 nt, Variola virus
cauagaugaaauacu

SEQ ID NO: 3298956 - RNA, 19 nt, Variola virus
auguccucaaauaaauacu

SEQ ID NO: 3298957 - RNA, 19 nt, Variola virus
aaucauuuuuuuaaaacug

SEQ ID NO: 3298958 - RNA, 16 nt, Variola virus
aucugauuuauuuccu

SEQ ID NO: 3298959 - RNA, 21 nt, Variola virus
uuacaauguagaaauuagaaa

SEQ ID NO: 3298960 - RNA, 14 nt, Variola virus
aaugcagaaaugau

SEQ ID NO: 3298961 - RNA, 19 nt, Variola virus
uauuccuuucauuaacaau

SEQ ID NO: 3298962 - RNA, 12 nt, Variola virus
uaaaaauuauua

SEQ ID NO: 3298963 - RNA, 20 nt, Variola virus
ucuauuucaucguuuuguau

SEQ ID NO: 3298964 - RNA, 22 nt, Variola virus
uauucuaucccccguauuuaca

SEQ ID NO: 3298965 - RNA, 16 nt, Variola virus
uguguucuuguguaau

SEQ ID NO: 3298966 - RNA, 19 nt, Variola virus
auuaauacggcagcaacua

SEQ ID NO: 3298967 - RNA, 20 nt, Variola virus
caaauuuauuccauauuuua

SEQ ID NO: 3298968 - RNA, 12 nt, Variola virus
uucauuaauuuc

SEQ ID NO: 3298969 - RNA, 13 nt, Variola virus
gaaaagauucuuu

SEQ ID NO: 3298970 - RNA, 21 nt, Variola virus
auguguuucccaaacaaaaug

SEQ ID NO: 3298971 - RNA, 18 nt, Variola virus
uguuagaagucuuaaaaa

SEQ ID NO: 3298972 - RNA, 15 nt, Variola virus
uaucuauguuaucau

SEQ ID NO: 3298973 - RNA, 16 nt, Variola virus
uuguacuaaacacacu

SEQ ID NO: 3298974 - RNA, 21 nt, Variola virus
agaaauccaaauaaaauggau

SEQ ID NO: 3298975 - RNA, 15 nt, Variola virus
uaaacauaucauaau

SEQ ID NO: 3298976 - RNA, 13 nt, Variola virus
agauauaugguuu

SEQ ID NO: 3298977 - RNA, 13 nt, Variola virus
uauauguuuucau

SEQ ID NO: 3298978 - RNA, 14 nt, Variola virus
uccauuuuacauua

SEQ ID NO: 3298979 - RNA, 17 nt, Variola virus
auuaccauagaagaugu

SEQ ID NO: 3298980 - RNA, 13 nt, Variola virus
uguacuuaacaug

SEQ ID NO: 3298981 - RNA, 18 nt, Variola virus
cauaauccuuguaaugau

SEQ ID NO: 3298982 - RNA, 14 nt, Variola virus
uguaugaaaugcuu

SEQ ID NO: 3298983 - RNA, 17 nt, Variola virus
auacucuacagaguuga

SEQ ID NO: 3298984 - RNA, 16 nt, Variola virus
gaaagagauaauagaa

SEQ ID NO: 3298985 - RNA, 15 nt, Variola virus
auugugcgacacuag

SEQ ID NO: 3298986 - RNA, 13 nt, Variola virus
auguggaauuaug

SEQ ID NO: 3298987 - RNA, 20 nt, Variola virus
ugaaguuggcgcauaucuuu

SEQ ID NO: 3298988 - RNA, 21 nt, Variola virus
aguauccguauaaaaaucgau

SEQ ID NO: 3298989 - RNA, 16 nt, Variola virus
uacgaacaauaucuua

SEQ ID NO: 3298990 - RNA, 19 nt, Variola virus
acuuccaauaaaauuacuu

SEQ ID NO: 3298991 - RNA, 16 nt, Variola virus
guauuggauguaugca

SEQ ID NO: 3298992 - RNA, 21 nt, Variola virus
agaaauggaagaguuaauaaa

SEQ ID NO: 3298993 - RNA, 13 nt, Variola virus
uccuuaaaguaac

SEQ ID NO: 3298994 - RNA, 19 nt, Variola virus
aguguagcguuuuaaauau

SEQ ID NO: 3298995 - RNA, 14 nt, Variola virus
uucucugaauauag

SEQ ID NO: 3298996 - RNA, 20 nt, Variola virus
aaucagucauaacaaaugua

SEQ ID NO: 3298997 - RNA, 15 nt, Variola virus
agaacggagaauugu

SEQ ID NO: 3298998 - RNA, 23 nt, Variola virus
agauuagucagaccauucuuggu

SEQ ID NO: 3298999 - RNA, 13 nt, Variola virus
cguaccaguuuca

SEQ ID NO: 3299000 - RNA, 18 nt, Variola virus
guauuguuuaauaaaaca

SEQ ID NO: 3299001 - RNA, 21 nt, Variola virus
gcauucuauucgaauaaugag

SEQ ID NO: 3299002 - RNA, 23 nt, Variola virus
uggaucaucgugugauaugaaca

SEQ ID NO: 3299003 - RNA, 21 nt, Variola virus
cgggucaucugguuuaggaaa

SEQ ID NO: 3299004 - RNA, 23 nt, Variola virus
caaaaguaguucaacauaauauu

SEQ ID NO: 3299005 - RNA, 15 nt, Variola virus
cuaacacauuucaac

SEQ ID NO: 3299006 - RNA, 11 nt, Variola virus
aaguaaaugaa

SEQ ID NO: 3299007 - RNA, 21 nt, Variola virus
cucuaaacaauuggacaaauu

SEQ ID NO: 3299008 - RNA, 18 nt, Variola virus
gauuucuuaucuguaguu

SEQ ID NO: 3299009 - RNA, 14 nt, Variola virus
acuugauaauuaau

SEQ ID NO: 3299010 - RNA, 15 nt, Variola virus
aaaauuuaaagaaug

SEQ ID NO: 3299011 - RNA, 14 nt, Variola virus
agaaucucaugaau

SEQ ID NO: 3299012 - RNA, 16 nt, Variola virus
uuaauacggaauauag

SEQ ID NO: 3299013 - RNA, 19 nt, Variola virus
cuauuuuuuuauacuucua

SEQ ID NO: 3299014 - RNA, 21 nt, Variola virus
gaauaacuguaauuuuauucu

SEQ ID NO: 3299015 - RNA, 18 nt, Variola virus
aauuccguuaauauuaaa

SEQ ID NO: 3299016 - RNA, 15 nt, Variola virus
uuucuacuagacuau

SEQ ID NO: 3299017 - RNA, 22 nt, Variola virus
auuaguaaggcuuuagaaacuu

SEQ ID NO: 3299018 - RNA, 14 nt, Variola virus
ugacuuaguucuua

SEQ ID NO: 3299019 - RNA, 21 nt, Variola virus
caaauauucacaagaugaauu

SEQ ID NO: 3299020 - RNA, 20 nt, Variola virus
uacuuguuaguaguuagaua

SEQ ID NO: 3299021 - RNA, 21 nt, Variola virus
cacuaucaaucgauaacaagg

SEQ ID NO: 3299022 - RNA, 15 nt, Variola virus
aacuucguaaaauau

SEQ ID NO: 3299023 - RNA, 22 nt, Variola virus
acucaugaaucuaaaagaauug

SEQ ID NO: 3299024 - RNA, 21 nt, Variola virus
aaagacaucauauauagaaug

SEQ ID NO: 3299025 - RNA, 12 nt, Variola virus
aaaaauuauccu

SEQ ID NO: 3299026 - RNA, 15 nt, Variola virus
uagauauaaauucaa

SEQ ID NO: 3299027 - RNA, 14 nt, Variola virus
uugcuuuucuaauc

SEQ ID NO: 3299028 - RNA, 14 nt, Variola virus
uacuauacacaaug

SEQ ID NO: 3299029 - RNA, 14 nt, Variola virus
aacuguauaaaaug

SEQ ID NO: 3299030 - RNA, 12 nt, Variola virus
auguaaaugaua

SEQ ID NO: 3299031 - RNA, 24 nt, Variola virus
aucaacauaaugucauaguugaac

SEQ ID NO: 3299032 - RNA, 19 nt, Variola virus
guaucgcccuaauauuauu

SEQ ID NO: 3299033 - RNA, 18 nt, Variola virus
ccaagaaacagucagcug

SEQ ID NO: 3299034 - RNA, 22 nt, Variola virus
uuaaagagacuacaauauauuc

SEQ ID NO: 3299035 - RNA, 16 nt, Variola virus
aaagauuaauacauua

SEQ ID NO: 3299036 - RNA, 15 nt, Variola virus
acgaaugguuucauc

SEQ ID NO: 3299037 - RNA, 23 nt, Variola virus
aacugcguuguuucaugacaauc

SEQ ID NO: 3299038 - RNA, 15 nt, Variola virus
caucucuauguuuca

SEQ ID NO: 3299039 - RNA, 15 nt, Variola virus
acacgagccuuuauu

SEQ ID NO: 3299040 - RNA, 19 nt, Variola virus
cugcagccauuuuuaugau

SEQ ID NO: 3299041 - RNA, 19 nt, Variola virus
cagauaaucagccauaauu

SEQ ID NO: 3299042 - RNA, 14 nt, Variola virus
agaaguuuuaucca

SEQ ID NO: 3299043 - RNA, 16 nt, Variola virus
cauaaacaauauaaau

SEQ ID NO: 3299044 - RNA, 17 nt, Variola virus
auucgaaaacucuaaga

SEQ ID NO: 3299045 - RNA, 14 nt, Variola virus
ugaugauagagaua

SEQ ID NO: 3299046 - RNA, 20 nt, Variola virus
uaaacuauuuuaccagcauu

SEQ ID NO: 3299047 - RNA, 23 nt, Variola virus
guauccacuuuaauaauaucaua

SEQ ID NO: 3299048 - RNA, 18 nt, Variola virus
ucuaucuuuaguaguguu

SEQ ID NO: 3299049 - RNA, 21 nt, Variola virus
aaauuacgagccaaaucuucu

SEQ ID NO: 3299050 - RNA, 21 nt, Variola virus
agaauaugucucuuaacuauu

SEQ ID NO: 3299051 - RNA, 13 nt, Variola virus
gaaauauauuaag

SEQ ID NO: 3299052 - RNA, 23 nt, Variola virus
ucauaucuagaaugaagauauca

SEQ ID NO: 3299053 - RNA, 17 nt, Variola virus
acggcaacuggaaaguc

SEQ ID NO: 3299054 - RNA, 21 nt, Variola virus
aucuccucuaugcaacuguaa

SEQ ID NO: 3299055 - RNA, 12 nt, Variola virus
auaaucaaacac

SEQ ID NO: 3299056 - RNA, 22 nt, Variola virus
uaaguucuggaauauuaucauc

SEQ ID NO: 3299057 - RNA, 20 nt, Variola virus
auaauauuuguuaucaugau

SEQ ID NO: 3299058 - RNA, 14 nt, Variola virus
aagauguuagaaaa

SEQ ID NO: 3299059 - RNA, 22 nt, Variola virus
aacaaaugcaccaaaguuauau

SEQ ID NO: 3299060 - RNA, 17 nt, Variola virus
agcauugcuuucauuau

SEQ ID NO: 3299061 - RNA, 16 nt, Variola virus
uagauuauaauccuua

SEQ ID NO: 3299062 - RNA, 15 nt, Variola virus
agaugagaacucuau

SEQ ID NO: 3299063 - RNA, 22 nt, Variola virus
uacgcauucacucauacaugua

SEQ ID NO: 3299064 - RNA, 22 nt, Variola virus
gaaaauucuaauggaugauguu

SEQ ID NO: 3299065 - RNA, 13 nt, Variola virus
aaacaugugguau

SEQ ID NO: 3299066 - RNA, 18 nt, Variola virus
auguaacccgugcauauu

SEQ ID NO: 3299067 - RNA, 16 nt, Variola virus
uaaaauaaaagaguau

SEQ ID NO: 3299068 - RNA, 12 nt, Variola virus
ucugaagaagag

SEQ ID NO: 3299069 - RNA, 13 nt, Variola virus
aaaagauaauaca

SEQ ID NO: 3299070 - RNA, 16 nt, Variola virus
uagaauuucauuuugu

SEQ ID NO: 3299071 - RNA, 23 nt, Variola virus
ugucaauacuuuuguuacuaaua

SEQ ID NO: 3299072 - RNA, 14 nt, Variola virus
accacauaauacaa

SEQ ID NO: 3299073 - RNA, 15 nt, Variola virus
uaauauccaaucuua

SEQ ID NO: 3299074 - RNA, 19 nt, Variola virus
gauucaucaagguauauaa

SEQ ID NO: 3299075 - RNA, 15 nt, Variola virus
uuuaaacaguuuauu

SEQ ID NO: 3299076 - RNA, 20 nt, Variola virus
auaaaccauuagauaaaguu

SEQ ID NO: 3299077 - RNA, 18 nt, Variola virus
cucuauucugaaauaauu

SEQ ID NO: 3299078 - RNA, 13 nt, Variola virus
cauaauauauaca

SEQ ID NO: 3299079 - RNA, 15 nt, Variola virus
auuaugaaacuauau

SEQ ID NO: 3299080 - RNA, 19 nt, Variola virus
agcuucuccuccuauuugu

SEQ ID NO: 3299081 - RNA, 15 nt, Variola virus
uugaucagaaugaau

SEQ ID NO: 3299082 - RNA, 21 nt, Variola virus
uucuuagcgaaugaugcagac

SEQ ID NO: 3299083 - RNA, 17 nt, Variola virus
gcauggucuuguaauau

SEQ ID NO: 3299084 - RNA, 19 nt, Variola virus
cuauuaucuccguuauaga

SEQ ID NO: 3299085 - RNA, 23 nt, Variola virus
auuccaggaucuagauaauuaau

SEQ ID NO: 3299086 - RNA, 14 nt, Variola virus
aaauagggauguuu

SEQ ID NO: 3299087 - RNA, 21 nt, Variola virus
gaucuuaacuccucuauuaau

SEQ ID NO: 3299088 - RNA, 23 nt, Variola virus
auucagauaaucagccauaauua

SEQ ID NO: 3299089 - RNA, 19 nt, Variola virus
uagauuggagucuacuaau

SEQ ID NO: 3299090 - RNA, 17 nt, Variola virus
aucugccgaauacagug

SEQ ID NO: 3299091 - RNA, 14 nt, Variola virus
uauccaagaaaaag

SEQ ID NO: 3299092 - RNA, 17 nt, Variola virus
aauauccagaauguuuc

SEQ ID NO: 3299093 - RNA, 18 nt, Variola virus
cucucuucaacaucuuua

SEQ ID NO: 3299094 - RNA, 15 nt, Variola virus
uccuaguacacaaua

SEQ ID NO: 3299095 - RNA, 20 nt, Variola virus
guauuuuuuaugacaaacuu

SEQ ID NO: 3299096 - RNA, 16 nt, Variola virus
ugaagccauugaaaac

SEQ ID NO: 3299097 - RNA, 16 nt, Variola virus
aaccuuugcaaauaca

SEQ ID NO: 3299098 - RNA, 16 nt, Variola virus
auguaugcuaauagcg

SEQ ID NO: 3299099 - RNA, 17 nt, Variola virus
acauguguuuuaauaua

SEQ ID NO: 3299100 - RNA, 15 nt, Variola virus
acugacagauguguu

SEQ ID NO: 3299101 - RNA, 23 nt, Variola virus
uucccaaugguuucaucaauaga

SEQ ID NO: 3299102 - RNA, 15 nt, Variola virus
uaauuucuagaauau

SEQ ID NO: 3299103 - RNA, 18 nt, Variola virus
gaauaauguucaaaucua

SEQ ID NO: 3299104 - RNA, 15 nt, Variola virus
gaagauuauauucua

SEQ ID NO: 3299105 - RNA, 12 nt, Variola virus
acucaaacagaa

SEQ ID NO: 3299106 - RNA, 21 nt, Variola virus
aucgauguuauuaucaaaguc

SEQ ID NO: 3299107 - RNA, 13 nt, Variola virus
gauguucauauau

SEQ ID NO: 3299108 - RNA, 21 nt, Variola virus
ccauagucuucaauaauucua

SEQ ID NO: 3299109 - RNA, 16 nt, Variola virus
cagucaaauucgguaa

SEQ ID NO: 3299110 - RNA, 18 nt, Variola virus
auaaauugguaaauccua

SEQ ID NO: 3299111 - RNA, 23 nt, Variola virus
aauucuauaauaaacuuuaauga

SEQ ID NO: 3299112 - RNA, 18 nt, Variola virus
caauuauacuagaacuau

SEQ ID NO: 3299113 - RNA, 16 nt, Variola virus
aguuuaucauacuuag

SEQ ID NO: 3299114 - RNA, 19 nt, Variola virus
guuagaugauuauaaagga

SEQ ID NO: 3299115 - RNA, 21 nt, Variola virus
aucauggcggugccagaaauu

SEQ ID NO: 3299116 - RNA, 20 nt, Variola virus
uaauuguuuaccgguguaau

SEQ ID NO: 3299117 - RNA, 13 nt, Variola virus
auauuugaaaauc

SEQ ID NO: 3299118 - RNA, 20 nt, Variola virus
aauacauauuuuuuguaaaa

SEQ ID NO: 3299119 - RNA, 15 nt, Variola virus
aacagauaguuuauu

SEQ ID NO: 3299120 - RNA, 13 nt, Variola virus
aaguauaaauacc

SEQ ID NO: 3299121 - RNA, 19 nt, Variola virus
aaaucggauggauugguaa

SEQ ID NO: 3299122 - RNA, 20 nt, Variola virus
agucaauaaaggcaaagaua

SEQ ID NO: 3299123 - RNA, 15 nt, Variola virus
uuauuagauuuggua

SEQ ID NO: 3299124 - RNA, 13 nt, Variola virus
cauauucucauaa

SEQ ID NO: 3299125 - RNA, 22 nt, Variola virus
aaucaguuacaaaacguuuaua

SEQ ID NO: 3299126 - RNA, 21 nt, Variola virus
gaaauagcgcugaaaauaaag

SEQ ID NO: 3299127 - RNA, 18 nt, Variola virus
uuauuccaauuauuugaa

SEQ ID NO: 3299128 - RNA, 13 nt, Variola virus
gaggagaaguaau

SEQ ID NO: 3299129 - RNA, 17 nt, Variola virus
uacguaucaccaacgga

SEQ ID NO: 3299130 - RNA, 13 nt, Variola virus
aucuauuagaaaa

SEQ ID NO: 3299131 - RNA, 17 nt, Variola virus
auccuaacuuuaaacaa

SEQ ID NO: 3299132 - RNA, 15 nt, Variola virus
gaaauaaauaaugaa

SEQ ID NO: 3299133 - RNA, 23 nt, Variola virus
caaaauuaaccgauaaaaagacu

SEQ ID NO: 3299134 - RNA, 21 nt, Variola virus
caugauucuaucucuaagacg

SEQ ID NO: 3299135 - RNA, 18 nt, Variola virus
auguuuccgagaaauaua

SEQ ID NO: 3299136 - RNA, 14 nt, Variola virus
auccacuucuucca

SEQ ID NO: 3299137 - RNA, 20 nt, Variola virus
cuauauuuguuccuguagau

SEQ ID NO: 3299138 - RNA, 17 nt, Variola virus
aaaacgauuggaaucua

SEQ ID NO: 3299139 - RNA, 14 nt, Variola virus
auaaccauuucuau

SEQ ID NO: 3299140 - RNA, 22 nt, Variola virus
cccaauagaauaguauucucag

SEQ ID NO: 3299141 - RNA, 16 nt, Variola virus
gaauuuauuucuaauu

SEQ ID NO: 3299142 - RNA, 16 nt, Variola virus
uccacauuaauacagc

SEQ ID NO: 3299143 - RNA, 19 nt, Variola virus
aaguuuggguaaauaacua

SEQ ID NO: 3299144 - RNA, 9 nt, Variola virus
uuaccaucg

SEQ ID NO: 3299145 - RNA, 14 nt, Variola virus
auaaugaacauagu

SEQ ID NO: 3299146 - RNA, 15 nt, Variola virus
cauauaaauauaauu

SEQ ID NO: 3299147 - RNA, 19 nt, Variola virus
caaccaucucauaaaauag

SEQ ID NO: 3299148 - RNA, 23 nt, Variola virus
aacuaccaauaugucuguacaaa

SEQ ID NO: 3299149 - RNA, 14 nt, Variola virus
uauuauacuuguau

SEQ ID NO: 3299150 - RNA, 15 nt, Variola virus
auaagccaaagcauu

SEQ ID NO: 3299151 - RNA, 13 nt, Variola virus
ugacgacaaacag

SEQ ID NO: 3299152 - RNA, 15 nt, Variola virus
aaacuuuuuagaaau

SEQ ID NO: 3299153 - RNA, 18 nt, Variola virus
aagaacgauguacaacug

SEQ ID NO: 3299154 - RNA, 18 nt, Variola virus
augucuguacaaauguua

SEQ ID NO: 3299155 - RNA, 15 nt, Variola virus
uguauguuugggaga

SEQ ID NO: 3299156 - RNA, 18 nt, Variola virus
uauaccuuguaauuaaau

SEQ ID NO: 3299157 - RNA, 17 nt, Variola virus
uagaugucgaagacuua

SEQ ID NO: 3299158 - RNA, 15 nt, Variola virus
gauguauaaguuuua

SEQ ID NO: 3299159 - RNA, 12 nt, Variola virus
uuccucauuaag

SEQ ID NO: 3299160 - RNA, 17 nt, Variola virus
auagauaaguauuuacu

SEQ ID NO: 3299161 - RNA, 15 nt, Variola virus
guauuaacuauauca

SEQ ID NO: 3299162 - RNA, 22 nt, Variola virus
accauaacuguauaaaauggag

SEQ ID NO: 3299163 - RNA, 17 nt, Variola virus
aauucaaauagauguuc

SEQ ID NO: 3299164 - RNA, 22 nt, Variola virus
aaauaaaacaaggauucguuua

SEQ ID NO: 3299165 - RNA, 15 nt, Variola virus
uguuaagaauuuaga

SEQ ID NO: 3299166 - RNA, 16 nt, Variola virus
aucauaauaugagaug

SEQ ID NO: 3299167 - RNA, 22 nt, Variola virus
uagagugaguuuaggauucauu

SEQ ID NO: 3299168 - RNA, 13 nt, Variola virus
gacuaucaacaau

SEQ ID NO: 3299169 - RNA, 21 nt, Variola virus
ucguaugucauaaauucuuua

SEQ ID NO: 3299170 - RNA, 24 nt, Variola virus
uagucgguuaauguuguauuucau

SEQ ID NO: 3299171 - RNA, 22 nt, Variola virus
aaauugcgacacuauucaugua

SEQ ID NO: 3299172 - RNA, 22 nt, Variola virus
uuacauuaaauguauauuuucc

SEQ ID NO: 3299173 - RNA, 18 nt, Variola virus
guacaccaucaaauuguu

SEQ ID NO: 3299174 - RNA, 14 nt, Variola virus
cacugauauuauga

SEQ ID NO: 3299175 - RNA, 17 nt, Variola virus
uuaucucuauucaucau

SEQ ID NO: 3299176 - RNA, 18 nt, Variola virus
ucaaaaauauucauuaau

SEQ ID NO: 3299177 - RNA, 21 nt, Variola virus
cauguuacacuauauaacaau

SEQ ID NO: 3299178 - RNA, 21 nt, Variola virus
cuagugcuuguauguguuaua

SEQ ID NO: 3299179 - RNA, 16 nt, Variola virus
aguugcugaugaugaa

SEQ ID NO: 3299180 - RNA, 19 nt, Variola virus
uugauuuaaagucuagagu

SEQ ID NO: 3299181 - RNA, 14 nt, Variola virus
uccauuuucuguaa

SEQ ID NO: 3299182 - RNA, 23 nt, Variola virus
gcugcuaugauaauuagaucauu

SEQ ID NO: 3299183 - RNA, 16 nt, Variola virus
uucuagaaaaaauuac

SEQ ID NO: 3299184 - RNA, 14 nt, Variola virus
aaugacauggaaau

SEQ ID NO: 3299185 - RNA, 15 nt, Variola virus
auuuuaacauaugau

SEQ ID NO: 3299186 - RNA, 18 nt, Variola virus
guuagaaagcagauuaga

SEQ ID NO: 3299187 - RNA, 17 nt, Variola virus
aguggugugaauacaac

SEQ ID NO: 3299188 - RNA, 15 nt, Variola virus
uuuaauaucuaaaua

SEQ ID NO: 3299189 - RNA, 14 nt, Variola virus
aaguuucugaaaua

SEQ ID NO: 3299190 - RNA, 16 nt, Variola virus
uaaauauccauugucu

SEQ ID NO: 3299191 - RNA, 18 nt, Variola virus
aagucgacaaccaaacgu

SEQ ID NO: 3299192 - RNA, 19 nt, Variola virus
auauccguuaaguuuguau

SEQ ID NO: 3299193 - RNA, 14 nt, Variola virus
agaguuuaauacua

SEQ ID NO: 3299194 - RNA, 13 nt, Variola virus
uucuauguaucua

SEQ ID NO: 3299195 - RNA, 21 nt, Variola virus
gguagauuuguucuauagagc

SEQ ID NO: 3299196 - RNA, 22 nt, Variola virus
ccucuauuauacauuuaauguu

SEQ ID NO: 3299197 - RNA, 18 nt, Variola virus
gauaacacauuuucaucu

SEQ ID NO: 3299198 - RNA, 21 nt, Variola virus
uaaucuguacuucuauacaaa

SEQ ID NO: 3299199 - RNA, 13 nt, Variola virus
cauguuggaauag

SEQ ID NO: 3299200 - RNA, 18 nt, Variola virus
uuagaaacuucaaagauu

SEQ ID NO: 3299201 - RNA, 12 nt, Variola virus
cucuauaauauu

SEQ ID NO: 3299202 - RNA, 14 nt, Variola virus
ccgucuaucaucua

SEQ ID NO: 3299203 - RNA, 17 nt, Variola virus
auggaccgucggacagu

SEQ ID NO: 3299204 - RNA, 14 nt, Variola virus
auauucaucagaua

SEQ ID NO: 3299205 - RNA, 19 nt, Variola virus
auaauccggauguugugua

SEQ ID NO: 3299206 - RNA, 15 nt, Variola virus
acuggcguuguucaa

SEQ ID NO: 3299207 - RNA, 16 nt, Variola virus
accaaauuaaugaaua

SEQ ID NO: 3299208 - RNA, 18 nt, Variola virus
ucauccuuguucaucauu

SEQ ID NO: 3299209 - RNA, 22 nt, Variola virus
aaguuuuauagagauagaugaa

SEQ ID NO: 3299210 - RNA, 14 nt, Variola virus
aacuacaaaaaugc

SEQ ID NO: 3299211 - RNA, 15 nt, Variola virus
gagaaaauagauauc

SEQ ID NO: 3299212 - RNA, 15 nt, Variola virus
aacuguucaaaauau

SEQ ID NO: 3299213 - RNA, 19 nt, Variola virus
guuccguguguaauaaccu

SEQ ID NO: 3299214 - RNA, 14 nt, Variola virus
auggaguuguaaau

SEQ ID NO: 3299215 - RNA, 15 nt, Variola virus
gauggauauauuaaa

SEQ ID NO: 3299216 - RNA, 19 nt, Variola virus
auuucuuuuucaaagaaaa

SEQ ID NO: 3299217 - RNA, 22 nt, Variola virus
gaaaaguuauuaucuguagacg

SEQ ID NO: 3299218 - RNA, 15 nt, Variola virus
augaacaaaucaaua

SEQ ID NO: 3299219 - RNA, 17 nt, Variola virus
aggagcaccagaaguau

SEQ ID NO: 3299220 - RNA, 14 nt, Variola virus
ccuuaauauaauag

SEQ ID NO: 3299221 - RNA, 20 nt, Variola virus
aaccaugcuacaaucauuau

SEQ ID NO: 3299222 - RNA, 21 nt, Variola virus
aggauauacucaauagaauuu

SEQ ID NO: 3299223 - RNA, 18 nt, Variola virus
guuaaaaaaauuauccua

SEQ ID NO: 3299224 - RNA, 22 nt, Variola virus
uauuuuacauggauuuaucaua

SEQ ID NO: 3299225 - RNA, 12 nt, Variola virus
gacguagaaaac

SEQ ID NO: 3299226 - RNA, 19 nt, Variola virus
cuuuggagucucaucuuua

SEQ ID NO: 3299227 - RNA, 21 nt, Variola virus
gauaaguuucggcacauauua

SEQ ID NO: 3299228 - RNA, 11 nt, Variola virus
cuaaugauaua

SEQ ID NO: 3299229 - RNA, 15 nt, Variola virus
ucauuuuauaauugu

SEQ ID NO: 3299230 - RNA, 16 nt, Variola virus
uaacuuuaauguguga

SEQ ID NO: 3299231 - RNA, 13 nt, Variola virus
auaguacauuccc

SEQ ID NO: 3299232 - RNA, 16 nt, Variola virus
acagaugauauaucca

SEQ ID NO: 3299233 - RNA, 23 nt, Variola virus
caacaagucauuacuaauagagu

SEQ ID NO: 3299234 - RNA, 19 nt, Variola virus
guuuuggauuauaaucauc

SEQ ID NO: 3299235 - RNA, 17 nt, Variola virus
agaauauccucuagaga

SEQ ID NO: 3299236 - RNA, 18 nt, Variola virus
acuuuacuggguauucca

SEQ ID NO: 3299237 - RNA, 17 nt, Variola virus
cuaguagcgaaaacuau

SEQ ID NO: 3299238 - RNA, 13 nt, Variola virus
uugauucuaguau

SEQ ID NO: 3299239 - RNA, 19 nt, Variola virus
acuucuguauguacagcau

SEQ ID NO: 3299240 - RNA, 20 nt, Variola virus
auauauuaauacacauaaug

SEQ ID NO: 3299241 - RNA, 12 nt, Variola virus
auccaaacauua

SEQ ID NO: 3299242 - RNA, 22 nt, Variola virus
cgagugaguacggauuaaacau

SEQ ID NO: 3299243 - RNA, 21 nt, Variola virus
gcucuuuguccauuauuucua

SEQ ID NO: 3299244 - RNA, 12 nt, Variola virus
agaagaaauuga

SEQ ID NO: 3299245 - RNA, 12 nt, Variola virus
ucauuagauguu

SEQ ID NO: 3299246 - RNA, 18 nt, Variola virus
caacaaucuaauacaaaa

SEQ ID NO: 3299247 - RNA, 12 nt, Variola virus
aacuaaaaaugu

SEQ ID NO: 3299248 - RNA, 22 nt, Variola virus
agaugaaaaauuuuccacaucu

SEQ ID NO: 3299249 - RNA, 20 nt, Variola virus
agcauuauugguauucuucu

SEQ ID NO: 3299250 - RNA, 14 nt, Variola virus
agauggucugaaau

SEQ ID NO: 3299251 - RNA, 22 nt, Variola virus
auaaagaaaugucuacauaaau

SEQ ID NO: 3299252 - RNA, 21 nt, Variola virus
gauccaauaaauuaucaaaua

SEQ ID NO: 3299253 - RNA, 18 nt, Variola virus
gccaacagguuaaagaaa

SEQ ID NO: 3299254 - RNA, 16 nt, Variola virus
aacaaauauuggcaua

SEQ ID NO: 3299255 - RNA, 12 nt, Variola virus
aucucaaaauag

SEQ ID NO: 3299256 - RNA, 15 nt, Variola virus
aauugcgaauguuuu

SEQ ID NO: 3299257 - RNA, 19 nt, Variola virus
ucacagaauccgaguaaaa

SEQ ID NO: 3299258 - RNA, 15 nt, Variola virus
uaguuuuacuaucau

SEQ ID NO: 3299259 - RNA, 20 nt, Variola virus
cgucucauuucuaucuguuu

SEQ ID NO: 3299260 - RNA, 17 nt, Variola virus
accaaaaaggauaaaga

SEQ ID NO: 3299261 - RNA, 19 nt, Variola virus
gaacauggguuacauauca

SEQ ID NO: 3299262 - RNA, 17 nt, Variola virus
gucccucauaauaaauu

SEQ ID NO: 3299263 - RNA, 21 nt, Variola virus
ucuuaaagccauacauuuaga

SEQ ID NO: 3299264 - RNA, 16 nt, Variola virus
aauaucuagauuauaa

SEQ ID NO: 3299265 - RNA, 11 nt, Variola virus
ggcaaauuguc

SEQ ID NO: 3299266 - RNA, 18 nt, Variola virus
augacgauccuuuaagag

SEQ ID NO: 3299267 - RNA, 12 nt, Variola virus
auuauaccaaaa

SEQ ID NO: 3299268 - RNA, 21 nt, Variola virus
caauccguaacggaaauuaca

SEQ ID NO: 3299269 - RNA, 16 nt, Variola virus
agugucuauaaaugua

SEQ ID NO: 3299270 - RNA, 12 nt, Variola virus
ccuuaucuucua

SEQ ID NO: 3299271 - RNA, 20 nt, Variola virus
acauaagccauuaacagcuu

SEQ ID NO: 3299272 - RNA, 17 nt, Variola virus
uagauuaugaagaauac

SEQ ID NO: 3299273 - RNA, 14 nt, Variola virus
aaaccaauuuguau

SEQ ID NO: 3299274 - RNA, 20 nt, Variola virus
aacaucgaagaugaaucaaa

SEQ ID NO: 3299275 - RNA, 17 nt, Variola virus
aacuuaaacaaaauaca

SEQ ID NO: 3299276 - RNA, 16 nt, Variola virus
uuagaaggaguguuuu

SEQ ID NO: 3299277 - RNA, 15 nt, Variola virus
acuauaauuuuguga

SEQ ID NO: 3299278 - RNA, 23 nt, Variola virus
cuauuagaguauugcauuuugau

SEQ ID NO: 3299279 - RNA, 15 nt, Variola virus
auuggaacauaagau

SEQ ID NO: 3299280 - RNA, 16 nt, Variola virus
ucaaaauuuauuugau

SEQ ID NO: 3299281 - RNA, 16 nt, Variola virus
auaauuuagauacuuu

SEQ ID NO: 3299282 - RNA, 21 nt, Variola virus
aauccucuauuuauugacauu

SEQ ID NO: 3299283 - RNA, 22 nt, Variola virus
auaucacaucaaguacaaaaua

SEQ ID NO: 3299284 - RNA, 22 nt, Variola virus
aauaagcuauauaauaaaugua

SEQ ID NO: 3299285 - RNA, 16 nt, Variola virus
gauagcaaagagauga

SEQ ID NO: 3299286 - RNA, 21 nt, Variola virus
auagauauaauuaucacauau

SEQ ID NO: 3299287 - RNA, 14 nt, Variola virus
aaucguuuaucuuu

SEQ ID NO: 3299288 - RNA, 22 nt, Variola virus
uagauaauaauaucguccuuaa

SEQ ID NO: 3299289 - RNA, 18 nt, Variola virus
auaucugaguaugaugau

SEQ ID NO: 3299290 - RNA, 15 nt, Variola virus
auaaguguugucaaa

SEQ ID NO: 3299291 - RNA, 16 nt, Variola virus
auucauuuucaauaau

SEQ ID NO: 3299292 - RNA, 21 nt, Variola virus
guacuucucccauaauacuuu

SEQ ID NO: 3299293 - RNA, 20 nt, Variola virus
uugcacaauccaaacuuuuu

SEQ ID NO: 3299294 - RNA, 20 nt, Variola virus
aggguccauuuucuguaaau

SEQ ID NO: 3299295 - RNA, 15 nt, Variola virus
agucauguuaaaaau

SEQ ID NO: 3299296 - RNA, 24 nt, Variola virus
gauauaggguucuuuauaaugcau

SEQ ID NO: 3299297 - RNA, 18 nt, Variola virus
aucuuguucagaaauaua

SEQ ID NO: 3299298 - RNA, 22 nt, Variola virus
uaaguaguuggaagaaucucau

SEQ ID NO: 3299299 - RNA, 10 nt, Variola virus
caaauacuug

SEQ ID NO: 3299300 - RNA, 15 nt, Variola virus
auguuucauaaaaug

SEQ ID NO: 3299301 - RNA, 21 nt, Variola virus
auguguauacaucgguaaaua

SEQ ID NO: 3299302 - RNA, 16 nt, Variola virus
auaauuuuuauguuuu

SEQ ID NO: 3299303 - RNA, 23 nt, Variola virus
uauuugcgaggaugacucucaaa

SEQ ID NO: 3299304 - RNA, 12 nt, Variola virus
agcaaaaacaaa

SEQ ID NO: 3299305 - RNA, 17 nt, Variola virus
auacaauggaugauaug

SEQ ID NO: 3299306 - RNA, 17 nt, Variola virus
gaauacauaaagaacga

SEQ ID NO: 3299307 - RNA, 21 nt, Variola virus
uaggaccacuagcaaaagaua

SEQ ID NO: 3299308 - RNA, 19 nt, Variola virus
ucauucgcuuaacaucuuc

SEQ ID NO: 3299309 - RNA, 19 nt, Variola virus
ccaccuccgucaucaucuc

SEQ ID NO: 3299310 - RNA, 13 nt, Variola virus
auaacaauggcug

SEQ ID NO: 3299311 - RNA, 15 nt, Variola virus
aauaccaaaaugaug

SEQ ID NO: 3299312 - RNA, 16 nt, Variola virus
acaauaguuagauaca

SEQ ID NO: 3299313 - RNA, 17 nt, Variola virus
agauaauauuagacaua

SEQ ID NO: 3299314 - RNA, 18 nt, Variola virus
uuugauauaggugcaaaa

SEQ ID NO: 3299315 - RNA, 17 nt, Variola virus
gauaaauuaaugaucua

SEQ ID NO: 3299316 - RNA, 18 nt, Variola virus
uucuggaauauuaucauc

SEQ ID NO: 3299317 - RNA, 17 nt, Variola virus
aguuuuuaggaaauauu

SEQ ID NO: 3299318 - RNA, 22 nt, Variola virus
aaacucgucuccccaaacauug

SEQ ID NO: 3299319 - RNA, 22 nt, Variola virus
uauacauguuagagaauauuca

SEQ ID NO: 3299320 - RNA, 19 nt, Variola virus
aucuaaucuguucauauac

SEQ ID NO: 3299321 - RNA, 17 nt, Variola virus
auuuuguggugcaacuu

SEQ ID NO: 3299322 - RNA, 20 nt, Variola virus
uuggcacgaacaaaaauacg

SEQ ID NO: 3299323 - RNA, 15 nt, Variola virus
gcuacagaaagguag

SEQ ID NO: 3299324 - RNA, 16 nt, Variola virus
cuuaaacuuauucuua

SEQ ID NO: 3299325 - RNA, 17 nt, Variola virus
augauugauuagaaaau

SEQ ID NO: 3299326 - RNA, 16 nt, Variola virus
cucaucggaucuguaa

SEQ ID NO: 3299327 - RNA, 23 nt, Variola virus
uaacgaacgcggugugaauguac

SEQ ID NO: 3299328 - RNA, 23 nt, Variola virus
gaauagccaccggaaacuuucua

SEQ ID NO: 3299329 - RNA, 17 nt, Variola virus
aguauaaaguuuauaca

SEQ ID NO: 3299330 - RNA, 21 nt, Variola virus
guucuaucuucuaaaaaaucu

SEQ ID NO: 3299331 - RNA, 13 nt, Variola virus
aauugucuagaua

SEQ ID NO: 3299332 - RNA, 11 nt, Variola virus
cuuccacauua

SEQ ID NO: 3299333 - RNA, 16 nt, Variola virus
ucaguaacuauguuca

SEQ ID NO: 3299334 - RNA, 23 nt, Variola virus
uguuacucaguugaacagaugau

SEQ ID NO: 3299335 - RNA, 12 nt, Variola virus
aaaauauuagaa

SEQ ID NO: 3299336 - RNA, 19 nt, Variola virus
cgauauuaaccuaaaagag

SEQ ID NO: 3299337 - RNA, 14 nt, Variola virus
agcgguguuauuau

SEQ ID NO: 3299338 - RNA, 18 nt, Variola virus
uauuaaaauuauuucuaa

SEQ ID NO: 3299339 - RNA, 19 nt, Variola virus
auaggaucuauaauaaugu

SEQ ID NO: 3299340 - RNA, 22 nt, Variola virus
ggaccacauccuucuucaucaa

SEQ ID NO: 3299341 - RNA, 19 nt, Variola virus
auaaaacuauaaauaugca

SEQ ID NO: 3299342 - RNA, 15 nt, Variola virus
aauaguuuuuaacua

SEQ ID NO: 3299343 - RNA, 21 nt, Variola virus
auauagaaccugaucuggaaa

SEQ ID NO: 3299344 - RNA, 15 nt, Variola virus
cuguaaaaaacauca

SEQ ID NO: 3299345 - RNA, 17 nt, Variola virus
ugguacgaaauauauug

SEQ ID NO: 3299346 - RNA, 18 nt, Variola virus
uagacgguuccaaagauc

SEQ ID NO: 3299347 - RNA, 16 nt, Variola virus
acuaccgaguuuaaaa

SEQ ID NO: 3299348 - RNA, 22 nt, Variola virus
gauuaaacuuuaaugauugcau

SEQ ID NO: 3299349 - RNA, 19 nt, Variola virus
ugguauuagaaucaaggau

SEQ ID NO: 3299350 - RNA, 18 nt, Variola virus
cuaaugaugcagauaucg

SEQ ID NO: 3299351 - RNA, 21 nt, Variola virus
gaguauugguaauguacaaac

SEQ ID NO: 3299352 - RNA, 21 nt, Variola virus
uacaaucaaaccuauaacauu

SEQ ID NO: 3299353 - RNA, 20 nt, Variola virus
auaaacucagauaauagcaa

SEQ ID NO: 3299354 - RNA, 12 nt, Variola virus
uuaccaacaaua

SEQ ID NO: 3299355 - RNA, 15 nt, Variola virus
uaaugauauaucuug

SEQ ID NO: 3299356 - RNA, 17 nt, Variola virus
uccauaauuuucucucg

SEQ ID NO: 3299357 - RNA, 20 nt, Variola virus
auauaucaguuaaugcaucu

SEQ ID NO: 3299358 - RNA, 12 nt, Variola virus
gaguuuaaaacu

SEQ ID NO: 3299359 - RNA, 21 nt, Variola virus
aacugcauccuucuaagauua

SEQ ID NO: 3299360 - RNA, 16 nt, Variola virus
uaagagaucaaagcau

SEQ ID NO: 3299361 - RNA, 19 nt, Variola virus
gaacuaauccacauaugau

SEQ ID NO: 3299362 - RNA, 22 nt, Variola virus
ucuaccgcggagccgaaaauau

SEQ ID NO: 3299363 - RNA, 18 nt, Variola virus
cacgguaauaaaauguca

SEQ ID NO: 3299364 - RNA, 23 nt, Variola virus
uauagauucuugguaauuaauag

SEQ ID NO: 3299365 - RNA, 15 nt, Variola virus
uaacgcauuaaugag

SEQ ID NO: 3299366 - RNA, 20 nt, Variola virus
auaucuucuuuuuauaucca

SEQ ID NO: 3299367 - RNA, 15 nt, Variola virus
uaaaccauguuguga

SEQ ID NO: 3299368 - RNA, 14 nt, Variola virus
ugacauuuuggauu

SEQ ID NO: 3299369 - RNA, 15 nt, Variola virus
guuucuaaauuuuua

SEQ ID NO: 3299370 - RNA, 21 nt, Variola virus
acgauaaaaauaauauuguuu

SEQ ID NO: 3299371 - RNA, 14 nt, Variola virus
aauaauucuagacg

SEQ ID NO: 3299372 - RNA, 18 nt, Variola virus
uagucuguguuacauaau

SEQ ID NO: 3299373 - RNA, 14 nt, Variola virus
aacgccuuagaaau

SEQ ID NO: 3299374 - RNA, 12 nt, Variola virus
aaagcauauguu

SEQ ID NO: 3299375 - RNA, 13 nt, Variola virus
guacuuaaugaag

SEQ ID NO: 3299376 - RNA, 14 nt, Variola virus
uugaaguaauuuuc

SEQ ID NO: 3299377 - RNA, 15 nt, Variola virus
auucgauacaaacuc

SEQ ID NO: 3299378 - RNA, 21 nt, Variola virus
auauagucuguguuacauaau

SEQ ID NO: 3299379 - RNA, 23 nt, Variola virus
aaacaacugaagaaaauucucca

SEQ ID NO: 3299380 - RNA, 13 nt, Variola virus
aaacacgauguuu

SEQ ID NO: 3299381 - RNA, 23 nt, Variola virus
aaaccaucuuacuuaaaauaugu

SEQ ID NO: 3299382 - RNA, 16 nt, Variola virus
ugauacaccuguaauc

SEQ ID NO: 3299383 - RNA, 13 nt, Variola virus
aaucgauguguca

SEQ ID NO: 3299384 - RNA, 17 nt, Variola virus
aaugcucaguaaaugua

SEQ ID NO: 3299385 - RNA, 19 nt, Variola virus
ucagaguucagugaagaag

SEQ ID NO: 3299386 - RNA, 15 nt, Variola virus
cuacauaaaacauca

SEQ ID NO: 3299387 - RNA, 18 nt, Variola virus
gccuccacuagaagagaa

SEQ ID NO: 3299388 - RNA, 20 nt, Variola virus
aaaauaugaaauaaguacaa

SEQ ID NO: 3299389 - RNA, 13 nt, Variola virus
uuaacuugacauu

SEQ ID NO: 3299390 - RNA, 14 nt, Variola virus
uguccuaaaauacu

SEQ ID NO: 3299391 - RNA, 19 nt, Variola virus
auuaauacacauaaugaag

SEQ ID NO: 3299392 - RNA, 14 nt, Variola virus
acauugauuaaauu

SEQ ID NO: 3299393 - RNA, 20 nt, Variola virus
ugacauuuuccuuguaucca

SEQ ID NO: 3299394 - RNA, 23 nt, Variola virus
acauauggaauauaucuauaauu

SEQ ID NO: 3299395 - RNA, 16 nt, Variola virus
ucaauaguuucauaau

SEQ ID NO: 3299396 - RNA, 16 nt, Variola virus
gauaaagauauaugau

SEQ ID NO: 3299397 - RNA, 18 nt, Variola virus
uugaccacggcuuccauu

SEQ ID NO: 3299398 - RNA, 14 nt, Variola virus
gcuaugagggaaaa

SEQ ID NO: 3299399 - RNA, 18 nt, Variola virus
agagaacauauaaaugua

SEQ ID NO: 3299400 - RNA, 23 nt, Variola virus
gcaucauacgaaaauagauucua

SEQ ID NO: 3299401 - RNA, 20 nt, Variola virus
cugcagaauaauuagaaauu

SEQ ID NO: 3299402 - RNA, 14 nt, Variola virus
cauuaauacaguaa

SEQ ID NO: 3299403 - RNA, 21 nt, Variola virus
agaagcauacgccaaauaucu

SEQ ID NO: 3299404 - RNA, 23 nt, Variola virus
gaagaacguguauuaaauagaau

SEQ ID NO: 3299405 - RNA, 21 nt, Variola virus
cuuaacuuuuucuuucucagc

SEQ ID NO: 3299406 - RNA, 14 nt, Variola virus
acaguacauaguau

SEQ ID NO: 3299407 - RNA, 22 nt, Variola virus
aauaccacugaauguuugaaaa

SEQ ID NO: 3299408 - RNA, 21 nt, Variola virus
uggaagaaggauggaaagaua

SEQ ID NO: 3299409 - RNA, 13 nt, Variola virus
cuaacacauuuca

SEQ ID NO: 3299410 - RNA, 18 nt, Variola virus
uuggaaucacaaacauua

SEQ ID NO: 3299411 - RNA, 20 nt, Variola virus
gucuagcaaugaucuaaauu

SEQ ID NO: 3299412 - RNA, 13 nt, Variola virus
guucuaacaucau

SEQ ID NO: 3299413 - RNA, 21 nt, Variola virus
aauacuuugguaguauacaag

SEQ ID NO: 3299414 - RNA, 21 nt, Variola virus
uaaauauaucuacaauuauug

SEQ ID NO: 3299415 - RNA, 15 nt, Variola virus
acgaugucaauaaug

SEQ ID NO: 3299416 - RNA, 21 nt, Variola virus
caauuuuguauuauucugaau

SEQ ID NO: 3299417 - RNA, 22 nt, Variola virus
aaaaugaugcuauuagaauuua

SEQ ID NO: 3299418 - RNA, 18 nt, Variola virus
aaugcuaguuuuagaaua

SEQ ID NO: 3299419 - RNA, 17 nt, Variola virus
auagcuuuuauuuccac

SEQ ID NO: 3299420 - RNA, 18 nt, Variola virus
auauuuugggcaaaucua

SEQ ID NO: 3299421 - RNA, 13 nt, Variola virus
acaacauauaauu

SEQ ID NO: 3299422 - RNA, 21 nt, Variola virus
cauuuaguuuauuacuauuac

SEQ ID NO: 3299423 - RNA, 17 nt, Variola virus
uagaaaguaauggauua

SEQ ID NO: 3299424 - RNA, 21 nt, Variola virus
acaaacuguucucuuaugaau

SEQ ID NO: 3299425 - RNA, 18 nt, Variola virus
acuguguucaagucauaa

SEQ ID NO: 3299426 - RNA, 15 nt, Variola virus
gugucuagacgaaau

SEQ ID NO: 3299427 - RNA, 16 nt, Variola virus
uaaaaagguagauguu

SEQ ID NO: 3299428 - RNA, 19 nt, Variola virus
caguaaaaauaacuagaau

SEQ ID NO: 3299429 - RNA, 21 nt, Variola virus
aacaucuuuguaaacagauau

SEQ ID NO: 3299430 - RNA, 15 nt, Variola virus
acggguucucaauau

SEQ ID NO: 3299431 - RNA, 16 nt, Variola virus
acuauaccauauccuc

SEQ ID NO: 3299432 - RNA, 14 nt, Variola virus
auuuagaaaugaag

SEQ ID NO: 3299433 - RNA, 23 nt, Variola virus
acacuuauauucuuuguuauuau

SEQ ID NO: 3299434 - RNA, 23 nt, Variola virus
auggaagguauuuccaucuaucu

SEQ ID NO: 3299435 - RNA, 20 nt, Variola virus
gauuacuuugacaaauguag

SEQ ID NO: 3299436 - RNA, 18 nt, Variola virus
ucuagauccucucuucaa

SEQ ID NO: 3299437 - RNA, 16 nt, Variola virus
auguuacaaugucuag

SEQ ID NO: 3299438 - RNA, 12 nt, Variola virus
uauuuuaucauu

SEQ ID NO: 3299439 - RNA, 22 nt, Variola virus
ugauuucucucauaaauacaga

SEQ ID NO: 3299440 - RNA, 18 nt, Variola virus
uagaaaaaacauguggua

SEQ ID NO: 3299441 - RNA, 21 nt, Variola virus
guucuagcccucuucaagaac

SEQ ID NO: 3299442 - RNA, 14 nt, Variola virus
aaaagaucauacaa

SEQ ID NO: 3299443 - RNA, 22 nt, Variola virus
uucaaccacucucgauacauca

SEQ ID NO: 3299444 - RNA, 20 nt, Variola virus
uggaaauuacacuguaucca

SEQ ID NO: 3299445 - RNA, 17 nt, Variola virus
aaaaggucauaacaagu

SEQ ID NO: 3299446 - RNA, 15 nt, Variola virus
uggccaagaaaauag

SEQ ID NO: 3299447 - RNA, 22 nt, Variola virus
ucaauagaauaaaccauuuugu

SEQ ID NO: 3299448 - RNA, 15 nt, Variola virus
cauuguuauguauuu

SEQ ID NO: 3299449 - RNA, 18 nt, Variola virus
auuacuugauauaguaau

SEQ ID NO: 3299450 - RNA, 14 nt, Variola virus
guuauaaucaaaga

SEQ ID NO: 3299451 - RNA, 15 nt, Variola virus
ucaacaccauuauua

SEQ ID NO: 3299452 - RNA, 22 nt, Variola virus
uuauugguauuucuuacauaaa

SEQ ID NO: 3299453 - RNA, 14 nt, Variola virus
auaacauuacuagu

SEQ ID NO: 3299454 - RNA, 15 nt, Variola virus
accacaggagaaugg

SEQ ID NO: 3299455 - RNA, 18 nt, Variola virus
augaguaaaaucaaacac

SEQ ID NO: 3299456 - RNA, 19 nt, Variola virus
auauuuagcaauuucugau

SEQ ID NO: 3299457 - RNA, 16 nt, Variola virus
acuaauuauacacauu

SEQ ID NO: 3299458 - RNA, 18 nt, Variola virus
gaggacuuggauguuugu

SEQ ID NO: 3299459 - RNA, 15 nt, Variola virus
acagacuacuuuccu

SEQ ID NO: 3299460 - RNA, 13 nt, Variola virus
ggaauuuuaucga

SEQ ID NO: 3299461 - RNA, 18 nt, Variola virus
ugaauucucauuuugcau

SEQ ID NO: 3299462 - RNA, 20 nt, Variola virus
uuuguaccaacaaacuguuc

SEQ ID NO: 3299463 - RNA, 18 nt, Variola virus
auuuuuuauaaacaugaa

SEQ ID NO: 3299464 - RNA, 20 nt, Variola virus
aagauggauggaugaugcau

SEQ ID NO: 3299465 - RNA, 22 nt, Variola virus
aaucauuaaaaaaauuaacuga

SEQ ID NO: 3299466 - RNA, 14 nt, Variola virus
cuuuauuaaaucau

SEQ ID NO: 3299467 - RNA, 13 nt, Variola virus
cggauaguuuaag

SEQ ID NO: 3299468 - RNA, 18 nt, Variola virus
guuuccaguuauaaaaca

SEQ ID NO: 3299469 - RNA, 20 nt, Variola virus
aguaucuuuuguucuagaug

SEQ ID NO: 3299470 - RNA, 21 nt, Variola virus
uagacauuguacaauaugugu

SEQ ID NO: 3299471 - RNA, 22 nt, Variola virus
aggaauuggaauccaauuguuu

SEQ ID NO: 3299472 - RNA, 18 nt, Variola virus
augucaaaacuuguucaa

SEQ ID NO: 3299473 - RNA, 13 nt, Variola virus
cuaguucucucuc

SEQ ID NO: 3299474 - RNA, 17 nt, Variola virus
agauagagauucaaugg

SEQ ID NO: 3299475 - RNA, 23 nt, Variola virus
uaugacaucaacuacaaaugaua

SEQ ID NO: 3299476 - RNA, 15 nt, Variola virus
uuaaaaauaugugcu

SEQ ID NO: 3299477 - RNA, 21 nt, Variola virus
uaggcauaccauuagauaauc

SEQ ID NO: 3299478 - RNA, 19 nt, Variola virus
cauaaauaguaaauacaau

SEQ ID NO: 3299479 - RNA, 17 nt, Variola virus
uaguaucauccacauau

SEQ ID NO: 3299480 - RNA, 15 nt, Variola virus
ucacuauagaaaaug

SEQ ID NO: 3299481 - RNA, 18 nt, Variola virus
agagaaggcuauaaagua

SEQ ID NO: 3299482 - RNA, 13 nt, Variola virus
ucgaauaaaguau

SEQ ID NO: 3299483 - RNA, 22 nt, Variola virus
aacugcguugauuaaaaaagau

SEQ ID NO: 3299484 - RNA, 15 nt, Variola virus
aaauuagaucaaaga

SEQ ID NO: 3299485 - RNA, 20 nt, Variola virus
uuaagcaacaugucuuuaaa

SEQ ID NO: 3299486 - RNA, 15 nt, Variola virus
aacucaguuaacaua

SEQ ID NO: 3299487 - RNA, 22 nt, Variola virus
aacauuaaaaugucuacagaua

SEQ ID NO: 3299488 - RNA, 19 nt, Variola virus
ucaaaugauuaauaaguau

SEQ ID NO: 3299489 - RNA, 19 nt, Variola virus
uaaaaauuaaaaaaucacu

SEQ ID NO: 3299490 - RNA, 14 nt, Variola virus
guuacgaugaugaa

SEQ ID NO: 3299491 - RNA, 16 nt, Variola virus
auauucuguuguguca

SEQ ID NO: 3299492 - RNA, 17 nt, Variola virus
auauaacuucugguaaa

SEQ ID NO: 3299493 - RNA, 15 nt, Variola virus
agaaacagaacuauu

SEQ ID NO: 3299494 - RNA, 20 nt, Variola virus
agaauaccaguauuguuuaa

SEQ ID NO: 3299495 - RNA, 13 nt, Variola virus
uguuuuuguacau

SEQ ID NO: 3299496 - RNA, 16 nt, Variola virus
uacuguaacacaauga

SEQ ID NO: 3299497 - RNA, 13 nt, Variola virus
auggaaaaacaaa

SEQ ID NO: 3299498 - RNA, 20 nt, Variola virus
cugagcaaacucucaaaaga

SEQ ID NO: 3299499 - RNA, 17 nt, Variola virus
aauuuuuuuucuagaua

SEQ ID NO: 3299500 - RNA, 18 nt, Variola virus
aaagucuacauugucauu

SEQ ID NO: 3299501 - RNA, 23 nt, Variola virus
uauguaacagacgagauaguuuu

SEQ ID NO: 3299502 - RNA, 16 nt, Variola virus
gaaguggauauacaua

SEQ ID NO: 3299503 - RNA, 19 nt, Variola virus
auaugugcuaaaaaguuuu

SEQ ID NO: 3299504 - RNA, 21 nt, Variola virus
uauaaaaauacuaaaacugaa

SEQ ID NO: 3299505 - RNA, 23 nt, Variola virus
agacuccauccguaaaaaugcau

SEQ ID NO: 3299506 - RNA, 17 nt, Variola virus
uaaguauaaacuauaaa

SEQ ID NO: 3299507 - RNA, 22 nt, Variola virus
uacgaagaaaaaguaaauacug

SEQ ID NO: 3299508 - RNA, 17 nt, Variola virus
uaguacaagaaauacuu

SEQ ID NO: 3299509 - RNA, 16 nt, Variola virus
uagagauuauaucuuu

SEQ ID NO: 3299510 - RNA, 17 nt, Variola virus
aguaauaccaaaaugau

SEQ ID NO: 3299511 - RNA, 23 nt, Variola virus
auggauuuuuuuaaaaaggaaau

SEQ ID NO: 3299512 - RNA, 16 nt, Variola virus
guaguccuacguuauu

SEQ ID NO: 3299513 - RNA, 17 nt, Variola virus
caguacacgaaugauuu

SEQ ID NO: 3299514 - RNA, 22 nt, Variola virus
acugauuaauaagaucuucuau

SEQ ID NO: 3299515 - RNA, 12 nt, Variola virus
aucuauaaaagu

SEQ ID NO: 3299516 - RNA, 19 nt, Variola virus
uugccaucacucucauaau

SEQ ID NO: 3299517 - RNA, 16 nt, Variola virus
aaucuaaaagaauugg

SEQ ID NO: 3299518 - RNA, 20 nt, Variola virus
uagauaucaaauccaaugga

SEQ ID NO: 3299519 - RNA, 21 nt, Variola virus
uauaaaguccgcacuacuguu

SEQ ID NO: 3299520 - RNA, 22 nt, Variola virus
uauaaucuuuuucaucuuguga

SEQ ID NO: 3299521 - RNA, 16 nt, Variola virus
cgauggucuauacaau

SEQ ID NO: 3299522 - RNA, 14 nt, Variola virus
uuuacaaaacuggu

SEQ ID NO: 3299523 - RNA, 19 nt, Variola virus
agugaaauguugucauuau

SEQ ID NO: 3299524 - RNA, 13 nt, Variola virus
uccacauccauga

SEQ ID NO: 3299525 - RNA, 20 nt, Variola virus
ccaaaggauguuuaacauuc

SEQ ID NO: 3299526 - RNA, 20 nt, Variola virus
cuuguuugauaaauguagcu

SEQ ID NO: 3299527 - RNA, 19 nt, Variola virus
gaacuaaaaaacgaaauau

SEQ ID NO: 3299528 - RNA, 20 nt, Variola virus
auauaaauccaguaauauca

SEQ ID NO: 3299529 - RNA, 23 nt, Variola virus
guauagaguuugcggauaaugau

SEQ ID NO: 3299530 - RNA, 16 nt, Variola virus
aaacuaaacuuauuua

SEQ ID NO: 3299531 - RNA, 13 nt, Variola virus
auucaucaaugau

SEQ ID NO: 3299532 - RNA, 17 nt, Variola virus
gaugugucuacauaaau

SEQ ID NO: 3299533 - RNA, 18 nt, Variola virus
aauaucauauuacgaaau

SEQ ID NO: 3299534 - RNA, 21 nt, Variola virus
acgauuauuucuaaauuauuc

SEQ ID NO: 3299535 - RNA, 15 nt, Variola virus
aacaguuuuaccguu

SEQ ID NO: 3299536 - RNA, 19 nt, Variola virus
auuuauuuucggguuuaaa

SEQ ID NO: 3299537 - RNA, 14 nt, Variola virus
ucucauaaauacag

SEQ ID NO: 3299538 - RNA, 15 nt, Variola virus
auuaaauucuggaau

SEQ ID NO: 3299539 - RNA, 17 nt, Variola virus
uaucaucucuaucauaa

SEQ ID NO: 3299540 - RNA, 19 nt, Variola virus
auaaaauccaugagaucua

SEQ ID NO: 3299541 - RNA, 22 nt, Variola virus
uucuuaacaaagagaacguauu

SEQ ID NO: 3299542 - RNA, 14 nt, Variola virus
uuacaacauaauaa

SEQ ID NO: 3299543 - RNA, 13 nt, Variola virus
gaagauauuacau

SEQ ID NO: 3299544 - RNA, 15 nt, Variola virus
uagguaucaaagaua

SEQ ID NO: 3299545 - RNA, 15 nt, Variola virus
auagauucuugguaa

SEQ ID NO: 3299546 - RNA, 20 nt, Variola virus
aguaauggguuauuguggau

SEQ ID NO: 3299547 - RNA, 19 nt, Variola virus
uacuccuuucuuaaugcau

SEQ ID NO: 3299548 - RNA, 18 nt, Variola virus
ugacggaugaucauacau

SEQ ID NO: 3299549 - RNA, 18 nt, Variola virus
aguauugacaauacugua

SEQ ID NO: 3299550 - RNA, 19 nt, Variola virus
ugauugacaaauuauucua

SEQ ID NO: 3299551 - RNA, 23 nt, Variola virus
ucuuuaauaucgacaauuucaua

SEQ ID NO: 3299552 - RNA, 13 nt, Variola virus
uccauuuauacau

SEQ ID NO: 3299553 - RNA, 21 nt, Variola virus
aaaucagauaucgauguuaua

SEQ ID NO: 3299554 - RNA, 12 nt, Variola virus
agauaauacaaa

SEQ ID NO: 3299555 - RNA, 14 nt, Variola virus
auaaacuaacacaa

SEQ ID NO: 3299556 - RNA, 14 nt, Variola virus
cagucuuuaaugaa

SEQ ID NO: 3299557 - RNA, 18 nt, Variola virus
agaaauagcgcugaaaau

SEQ ID NO: 3299558 - RNA, 17 nt, Variola virus
cuauauggauauucaua

SEQ ID NO: 3299559 - RNA, 13 nt, Variola virus
auaaaaucuauau

SEQ ID NO: 3299560 - RNA, 21 nt, Variola virus
agacguuucauaauaauacau

SEQ ID NO: 3299561 - RNA, 15 nt, Variola virus
aauuaaaaaucgaua

SEQ ID NO: 3299562 - RNA, 17 nt, Variola virus
ugucgccaaucuuacac

SEQ ID NO: 3299563 - RNA, 13 nt, Variola virus
acauucagaaaga

SEQ ID NO: 3299564 - RNA, 16 nt, Variola virus
uauguaagacuugugg

SEQ ID NO: 3299565 - RNA, 14 nt, Variola virus
agaauaucuauaca

SEQ ID NO: 3299566 - RNA, 13 nt, Variola virus
ugauugaacgauu

SEQ ID NO: 3299567 - RNA, 21 nt, Variola virus
uaacgcaccuauaaagacuuu

SEQ ID NO: 3299568 - RNA, 16 nt, Variola virus
uccuaacuuuaaacaa

SEQ ID NO: 3299569 - RNA, 18 nt, Variola virus
gaauggcguuugauauau

SEQ ID NO: 3299570 - RNA, 14 nt, Variola virus
agaaauuaauagaa

SEQ ID NO: 3299571 - RNA, 17 nt, Variola virus
ugauaggcaauaaacau

SEQ ID NO: 3299572 - RNA, 20 nt, Variola virus
caugagaauggaaaggaaac

SEQ ID NO: 3299573 - RNA, 15 nt, Variola virus
aucuuauucaagcaa

SEQ ID NO: 3299574 - RNA, 20 nt, Variola virus
cuguaagcguugucuguauu

SEQ ID NO: 3299575 - RNA, 22 nt, Variola virus
uaccaaagacuuugaaauauag

SEQ ID NO: 3299576 - RNA, 20 nt, Variola virus
uaacaugcauuugaaaagau

SEQ ID NO: 3299577 - RNA, 16 nt, Variola virus
gaauuaauagauauau

SEQ ID NO: 3299578 - RNA, 20 nt, Variola virus
uaaucagucauaacaaaugu

SEQ ID NO: 3299579 - RNA, 23 nt, Variola virus
gcaauuuuauugcuaauaaugac

SEQ ID NO: 3299580 - RNA, 16 nt, Variola virus
auuugucgcauuccuu

SEQ ID NO: 3299581 - RNA, 16 nt, Variola virus
uaucaauaccuuuucu

SEQ ID NO: 3299582 - RNA, 21 nt, Variola virus
guucagugacgucuguggaug

SEQ ID NO: 3299583 - RNA, 19 nt, Variola virus
auaccuuuccuggaauauc

SEQ ID NO: 3299584 - RNA, 22 nt, Variola virus
ucaagccggcuauauauucugc

SEQ ID NO: 3299585 - RNA, 18 nt, Variola virus
cguauaacaguaaaagaa

SEQ ID NO: 3299586 - RNA, 16 nt, Variola virus
acuauauguaaauaau

SEQ ID NO: 3299587 - RNA, 11 nt, Variola virus
aaucuggaaaa

SEQ ID NO: 3299588 - RNA, 21 nt, Variola virus
aauauaaauuaauuuaccauc

SEQ ID NO: 3299589 - RNA, 20 nt, Variola virus
ucccuauuaaaauucuuaaa

SEQ ID NO: 3299590 - RNA, 23 nt, Variola virus
aucuaacaaaaauuaugaaauaa

SEQ ID NO: 3299591 - RNA, 16 nt, Variola virus
ugucuaucucuguaaa

SEQ ID NO: 3299592 - RNA, 22 nt, Variola virus
auccuaaagguaaauguaaauu

SEQ ID NO: 3299593 - RNA, 17 nt, Variola virus
uagaaggaguguuuucu

SEQ ID NO: 3299594 - RNA, 12 nt, Variola virus
ucauuuccaaau

SEQ ID NO: 3299595 - RNA, 17 nt, Variola virus
aucuuuuguucuagaug

SEQ ID NO: 3299596 - RNA, 17 nt, Variola virus
agugcuauuuugacaua

SEQ ID NO: 3299597 - RNA, 17 nt, Variola virus
uuuacuaaagauacaaa

SEQ ID NO: 3299598 - RNA, 12 nt, Variola virus
uagaaauuauuu

SEQ ID NO: 3299599 - RNA, 17 nt, Variola virus
auccuauaacuucuaau

SEQ ID NO: 3299600 - RNA, 16 nt, Variola virus
gucacauaguguuuua

SEQ ID NO: 3299601 - RNA, 17 nt, Variola virus
gcauaggaacauuucug

SEQ ID NO: 3299602 - RNA, 17 nt, Variola virus
uauauuagacaauacua

SEQ ID NO: 3299603 - RNA, 18 nt, Variola virus
uaaaauaggaaguaaugu

SEQ ID NO: 3299604 - RNA, 20 nt, Variola virus
ugucuacacauccuuuugua

SEQ ID NO: 3299605 - RNA, 22 nt, Variola virus
acuggugaguuaauauucaugu

SEQ ID NO: 3299606 - RNA, 16 nt, Variola virus
aaaauacuuaaaaugu

SEQ ID NO: 3299607 - RNA, 20 nt, Variola virus
aacaucuuuguaaacagaua

SEQ ID NO: 3299608 - RNA, 18 nt, Variola virus
cuguagaagcuaacauac

SEQ ID NO: 3299609 - RNA, 19 nt, Variola virus
caugucuauuguuaaucau

SEQ ID NO: 3299610 - RNA, 16 nt, Variola virus
gcgcuagucaucucau

SEQ ID NO: 3299611 - RNA, 20 nt, Variola virus
aauaacuauguuuuaaaaau

SEQ ID NO: 3299612 - RNA, 18 nt, Variola virus
agcucaauauaaaugcgu

SEQ ID NO: 3299613 - RNA, 18 nt, Variola virus
cauaguuuguaucaauaa

SEQ ID NO: 3299614 - RNA, 17 nt, Variola virus
guuaagagaauaauaga

SEQ ID NO: 3299615 - RNA, 13 nt, Variola virus
aaaguauauguag

SEQ ID NO: 3299616 - RNA, 17 nt, Variola virus
aucgauacauauaugca

SEQ ID NO: 3299617 - RNA, 22 nt, Variola virus
ugccacgaauaaaaaauacuua

SEQ ID NO: 3299618 - RNA, 14 nt, Variola virus
auaauagacauaau

SEQ ID NO: 3299619 - RNA, 23 nt, Variola virus
uaauauugugaaugguaaagaau

SEQ ID NO: 3299620 - RNA, 14 nt, Variola virus
gauuuuuccaaagu

SEQ ID NO: 3299621 - RNA, 18 nt, Variola virus
aguagacauuuuuaacau

SEQ ID NO: 3299622 - RNA, 20 nt, Variola virus
cagaauuguaacaacaaugu

SEQ ID NO: 3299623 - RNA, 13 nt, Variola virus
uaauauagaagau

SEQ ID NO: 3299624 - RNA, 19 nt, Variola virus
uggaauagaugaaggaaua

SEQ ID NO: 3299625 - RNA, 12 nt, Variola virus
cugaaaauuaaa

SEQ ID NO: 3299626 - RNA, 14 nt, Variola virus
ucguaaaaaguuuu

SEQ ID NO: 3299627 - RNA, 17 nt, Variola virus
gauaugaacauauucau

SEQ ID NO: 3299628 - RNA, 19 nt, Variola virus
auacacguauaaaaaauau

SEQ ID NO: 3299629 - RNA, 20 nt, Variola virus
caguaauauacugaucccua

SEQ ID NO: 3299630 - RNA, 21 nt, Variola virus
cauuuaucacaaaaaaaacuu

SEQ ID NO: 3299631 - RNA, 22 nt, Variola virus
agaauucuuagucaauggagaa

SEQ ID NO: 3299632 - RNA, 15 nt, Variola virus
acgaugauuucugaa

SEQ ID NO: 3299633 - RNA, 13 nt, Variola virus
augagaacauagu

SEQ ID NO: 3299634 - RNA, 20 nt, Variola virus
cauauuugaacuuaacuuca

SEQ ID NO: 3299635 - RNA, 20 nt, Variola virus
guuuuagagacuuugaagcu

SEQ ID NO: 3299636 - RNA, 20 nt, Variola virus
caauaugucuguacaaaugu

SEQ ID NO: 3299637 - RNA, 16 nt, Variola virus
aauguacuguauauaa

SEQ ID NO: 3299638 - RNA, 16 nt, Variola virus
cuaaacacgauguuua

SEQ ID NO: 3299639 - RNA, 12 nt, Variola virus
uauaauaucuug

SEQ ID NO: 3299640 - RNA, 17 nt, Variola virus
uaauauuaguacuauau

SEQ ID NO: 3299641 - RNA, 15 nt, Variola virus
uagucuguacaaaag

SEQ ID NO: 3299642 - RNA, 19 nt, Variola virus
uuuuuaaagguaucuaaug

SEQ ID NO: 3299643 - RNA, 17 nt, Variola virus
auaucagacgauccaca

SEQ ID NO: 3299644 - RNA, 20 nt, Variola virus
cuacuacacuucuagauauc

SEQ ID NO: 3299645 - RNA, 22 nt, Variola virus
uugaucucaucauuccauaauu

SEQ ID NO: 3299646 - RNA, 15 nt, Variola virus
aguggaauugaaaau

SEQ ID NO: 3299647 - RNA, 15 nt, Variola virus
aaucuguaucgaaug

SEQ ID NO: 3299648 - RNA, 22 nt, Variola virus
uacaggaucuagcaaaggaaau

SEQ ID NO: 3299649 - RNA, 12 nt, Variola virus
uauuaauacagg

SEQ ID NO: 3299650 - RNA, 16 nt, Variola virus
ugaucaaaaagagauu

SEQ ID NO: 3299651 - RNA, 19 nt, Variola virus
aaaaauuaauacaucauca

SEQ ID NO: 3299652 - RNA, 14 nt, Variola virus
uaaaacauuuccua

SEQ ID NO: 3299653 - RNA, 14 nt, Variola virus
ucuagcauuucuag

SEQ ID NO: 3299654 - RNA, 17 nt, Variola virus
uaacaacucaaacaucu

SEQ ID NO: 3299655 - RNA, 21 nt, Variola virus
aauucauacaccauuaauaga

SEQ ID NO: 3299656 - RNA, 23 nt, Variola virus
uagaugucaaugaagaguacaca

SEQ ID NO: 3299657 - RNA, 20 nt, Variola virus
uguauaauaagaugcaaaca

SEQ ID NO: 3299658 - RNA, 17 nt, Variola virus
uaguguuggauaucuuc

SEQ ID NO: 3299659 - RNA, 19 nt, Variola virus
uguaaaaagauaaacuuua

SEQ ID NO: 3299660 - RNA, 15 nt, Variola virus
auaguauucuuguau

SEQ ID NO: 3299661 - RNA, 20 nt, Variola virus
aauacgguaccgcaauuuug

SEQ ID NO: 3299662 - RNA, 23 nt, Variola virus
accaaucugggcguauaaugaau

SEQ ID NO: 3299663 - RNA, 20 nt, Variola virus
acuaccgaguuuaaaacuuc

SEQ ID NO: 3299664 - RNA, 20 nt, Variola virus
uauuuuaacgucuaaaugua

SEQ ID NO: 3299665 - RNA, 20 nt, Variola virus
cuaaagacucuaaaugguug

SEQ ID NO: 3299666 - RNA, 19 nt, Variola virus
acaauuuucgccuugaauu

SEQ ID NO: 3299667 - RNA, 18 nt, Variola virus
aauauaguaguuagauua

SEQ ID NO: 3299668 - RNA, 14 nt, Variola virus
uacucaaauagcac

SEQ ID NO: 3299669 - RNA, 16 nt, Variola virus
aguuuauuauauaccg

SEQ ID NO: 3299670 - RNA, 22 nt, Variola virus
aauuauugauaccuuuaaaagu

SEQ ID NO: 3299671 - RNA, 17 nt, Variola virus
caaauagagcaauuacu

SEQ ID NO: 3299672 - RNA, 19 nt, Variola virus
gggacgcguauauguuucu

SEQ ID NO: 3299673 - RNA, 19 nt, Variola virus
caccauauagaucaaucau

SEQ ID NO: 3299674 - RNA, 21 nt, Variola virus
uauguccauuaaaguuaaauu

SEQ ID NO: 3299675 - RNA, 13 nt, Variola virus
gaauucaaaauau

SEQ ID NO: 3299676 - RNA, 21 nt, Variola virus
aauaugguauggguucugaua

SEQ ID NO: 3299677 - RNA, 14 nt, Variola virus
auuacuaaacauuu

SEQ ID NO: 3299678 - RNA, 20 nt, Variola virus
ugggaaaaacgaaauuaucg

SEQ ID NO: 3299679 - RNA, 22 nt, Variola virus
uugaaccaguccauggaaaaga

SEQ ID NO: 3299680 - RNA, 15 nt, Variola virus
aaaucaucuuauuua

SEQ ID NO: 3299681 - RNA, 18 nt, Variola virus
auacgaagaaaaaguaaa

SEQ ID NO: 3299682 - RNA, 14 nt, Variola virus
aguaaugauugcau

SEQ ID NO: 3299683 - RNA, 15 nt, Variola virus
auaauccuuguaaug

SEQ ID NO: 3299684 - RNA, 15 nt, Variola virus
ugguugauaguuguu

SEQ ID NO: 3299685 - RNA, 20 nt, Variola virus
uauaacuucugguaaauauu

SEQ ID NO: 3299686 - RNA, 14 nt, Variola virus
acgcguauauguuu

SEQ ID NO: 3299687 - RNA, 18 nt, Variola virus
cauuacaaagaagaacug

SEQ ID NO: 3299688 - RNA, 12 nt, Variola virus
gauaucaacaag

SEQ ID NO: 3299689 - RNA, 16 nt, Variola virus
acauacuaucuuuaau

SEQ ID NO: 3299690 - RNA, 13 nt, Variola virus
cggaacaauaaac

SEQ ID NO: 3299691 - RNA, 14 nt, Variola virus
auuacgugauguga

SEQ ID NO: 3299692 - RNA, 20 nt, Variola virus
aauauacuuuguguuucaug

SEQ ID NO: 3299693 - RNA, 22 nt, Variola virus
acguuugguaauggcaauguau

SEQ ID NO: 3299694 - RNA, 13 nt, Variola virus
auauauacaguag

SEQ ID NO: 3299695 - RNA, 16 nt, Variola virus
gacuguuuauacaaga

SEQ ID NO: 3299696 - RNA, 14 nt, Variola virus
ucuacuauucuauu

SEQ ID NO: 3299697 - RNA, 19 nt, Variola virus
aucuauuaaagacagagau

SEQ ID NO: 3299698 - RNA, 13 nt, Variola virus
gcguauuuaagag

SEQ ID NO: 3299699 - RNA, 19 nt, Variola virus
aaaaucaggguuaucaaag

SEQ ID NO: 3299700 - RNA, 18 nt, Variola virus
uaauccaaugauacuuuu

SEQ ID NO: 3299701 - RNA, 12 nt, Variola virus
cagaauaucuau

SEQ ID NO: 3299702 - RNA, 16 nt, Variola virus
auuaaucguuuuugaa

SEQ ID NO: 3299703 - RNA, 15 nt, Variola virus
gaauauauguuuaua

SEQ ID NO: 3299704 - RNA, 15 nt, Variola virus
auggaucuaguauua

SEQ ID NO: 3299705 - RNA, 18 nt, Variola virus
aaacucguaaaaagauua

SEQ ID NO: 3299706 - RNA, 16 nt, Variola virus
uuacauucucauuaau

SEQ ID NO: 3299707 - RNA, 19 nt, Variola virus
uaaguuccauuacaaauau

SEQ ID NO: 3299708 - RNA, 20 nt, Variola virus
auucaagauuuuauuaucga

SEQ ID NO: 3299709 - RNA, 22 nt, Variola virus
cucuauaguuuguuuucauuau

SEQ ID NO: 3299710 - RNA, 18 nt, Variola virus
auauucgauaacagcauu

SEQ ID NO: 3299711 - RNA, 19 nt, Variola virus
uuauguaguaaagaugcua

SEQ ID NO: 3299712 - RNA, 18 nt, Variola virus
gugguuagcauauaccuc

SEQ ID NO: 3299713 - RNA, 17 nt, Variola virus
uacguauuauauaugua

SEQ ID NO: 3299714 - RNA, 20 nt, Variola virus
gcagguacuauaauauuaaa

SEQ ID NO: 3299715 - RNA, 17 nt, Variola virus
cgugauauuaucuucau

SEQ ID NO: 3299716 - RNA, 13 nt, Variola virus
augauauaagacu

SEQ ID NO: 3299717 - RNA, 14 nt, Variola virus
uaccuuguauacau

SEQ ID NO: 3299718 - RNA, 18 nt, Variola virus
uccuaaacuuuguaucug

SEQ ID NO: 3299719 - RNA, 22 nt, Variola virus
aaaaagauuaccguaugauaug

SEQ ID NO: 3299720 - RNA, 17 nt, Variola virus
uaucaauccaacaaaug

SEQ ID NO: 3299721 - RNA, 17 nt, Variola virus
aaucaaaccuuacugaa

SEQ ID NO: 3299722 - RNA, 19 nt, Variola virus
uaguuuccuuaacaaaucu

SEQ ID NO: 3299723 - RNA, 23 nt, Variola virus
uaaacuaauucauuuucaauaau

SEQ ID NO: 3299724 - RNA, 15 nt, Variola virus
caugggacuauauaa

SEQ ID NO: 3299725 - RNA, 21 nt, Variola virus
gugucaaacuguguagcuaga

SEQ ID NO: 3299726 - RNA, 12 nt, Variola virus
caaauuauucua

SEQ ID NO: 3299727 - RNA, 16 nt, Variola virus
ugcauaaucagauucu

SEQ ID NO: 3299728 - RNA, 19 nt, Variola virus
auuugaaguauuuguugua

SEQ ID NO: 3299729 - RNA, 15 nt, Variola virus
gauuguauugguaaa

SEQ ID NO: 3299730 - RNA, 23 nt, Variola virus
auaucaucacaacuuaaugaaga

SEQ ID NO: 3299731 - RNA, 17 nt, Variola virus
uacgcauuacaguuuuu

SEQ ID NO: 3299732 - RNA, 17 nt, Variola virus
guauauacauagauaua

SEQ ID NO: 3299733 - RNA, 20 nt, Variola virus
aaaauuuuuuagauguagua

SEQ ID NO: 3299734 - RNA, 14 nt, Variola virus
aaaccuaugauauc

SEQ ID NO: 3299735 - RNA, 17 nt, Variola virus
cuaccauaucagcucuc

SEQ ID NO: 3299736 - RNA, 15 nt, Variola virus
agagugauaauauau

SEQ ID NO: 3299737 - RNA, 18 nt, Variola virus
uaguucaucuaugaaugu

SEQ ID NO: 3299738 - RNA, 19 nt, Variola virus
aucaauuuugaaaauacuu

SEQ ID NO: 3299739 - RNA, 19 nt, Variola virus
ucaucuauagaucauguaa

SEQ ID NO: 3299740 - RNA, 13 nt, Variola virus
agguaaauguaaa

SEQ ID NO: 3299741 - RNA, 22 nt, Variola virus
aauacgauccaagguuagagaa

SEQ ID NO: 3299742 - RNA, 16 nt, Variola virus
gaacagauaguuuauc

SEQ ID NO: 3299743 - RNA, 16 nt, Variola virus
ucuguaaaagaaucau

SEQ ID NO: 3299744 - RNA, 20 nt, Variola virus
auaauuuuaccagaauacua

SEQ ID NO: 3299745 - RNA, 16 nt, Variola virus
aaaaugugauauagaa

SEQ ID NO: 3299746 - RNA, 17 nt, Variola virus
cucuauuuugucauuaa

SEQ ID NO: 3299747 - RNA, 12 nt, Variola virus
uaaggauucauu

SEQ ID NO: 3299748 - RNA, 14 nt, Variola virus
aauacagaucaaaa

SEQ ID NO: 3299749 - RNA, 20 nt, Variola virus
caucggaaaaaaaucuuuuu

SEQ ID NO: 3299750 - RNA, 14 nt, Variola virus
cgauugaauucucu

SEQ ID NO: 3299751 - RNA, 13 nt, Variola virus
aacgccuuagaaa

SEQ ID NO: 3299752 - RNA, 23 nt, Variola virus
gacauuaugcuaccaucaugaau

SEQ ID NO: 3299753 - RNA, 14 nt, Variola virus
gucauguuggaaua

SEQ ID NO: 3299754 - RNA, 22 nt, Variola virus
cguauguauuuguguacaguga

SEQ ID NO: 3299755 - RNA, 18 nt, Variola virus
agaugauguuaacuaugu

SEQ ID NO: 3299756 - RNA, 19 nt, Variola virus
ucgauuguuuauuguauau

SEQ ID NO: 3299757 - RNA, 14 nt, Variola virus
gagugcuguggaaa

SEQ ID NO: 3299758 - RNA, 16 nt, Variola virus
auagaggauauuucau

SEQ ID NO: 3299759 - RNA, 15 nt, Variola virus
gaauuaguuaaucuu

SEQ ID NO: 3299760 - RNA, 22 nt, Variola virus
acuguauuuggaucuuuuguac

SEQ ID NO: 3299761 - RNA, 13 nt, Variola virus
uauugauucuaga

SEQ ID NO: 3299762 - RNA, 13 nt, Variola virus
aagagcaaacauc

SEQ ID NO: 3299763 - RNA, 16 nt, Variola virus
auaacuggauauagaa

SEQ ID NO: 3299764 - RNA, 19 nt, Variola virus
aguacuguucauacaugau

SEQ ID NO: 3299765 - RNA, 17 nt, Variola virus
auguuugacugaauaua

SEQ ID NO: 3299766 - RNA, 13 nt, Variola virus
uaugcuguuuauc

SEQ ID NO: 3299767 - RNA, 12 nt, Variola virus
aaugaugauguu

SEQ ID NO: 3299768 - RNA, 16 nt, Variola virus
cgugauauuaucuuca

SEQ ID NO: 3299769 - RNA, 19 nt, Variola virus
cuuaacuugcaaaauguaa

SEQ ID NO: 3299770 - RNA, 19 nt, Variola virus
cuuuuaucgcguagauaua

SEQ ID NO: 3299771 - RNA, 15 nt, Variola virus
agaaaauauaaauua

SEQ ID NO: 3299772 - RNA, 15 nt, Variola virus
uaggaccacuagcaa

SEQ ID NO: 3299773 - RNA, 22 nt, Variola virus
gucuagagcaucaauguccugc

SEQ ID NO: 3299774 - RNA, 19 nt, Variola virus
auauucuugucauguugau

SEQ ID NO: 3299775 - RNA, 17 nt, Variola virus
ugcauucguuuaaagau

SEQ ID NO: 3299776 - RNA, 20 nt, Variola virus
uaaacuacgugaacauaugg

SEQ ID NO: 3299777 - RNA, 20 nt, Variola virus
uuacacaacgcgauauauaa

SEQ ID NO: 3299778 - RNA, 15 nt, Variola virus
uguaaaucuagaaau

SEQ ID NO: 3299779 - RNA, 14 nt, Variola virus
gauuaguaaauuca

SEQ ID NO: 3299780 - RNA, 21 nt, Variola virus
ugaagauggauucauccuuaa

SEQ ID NO: 3299781 - RNA, 18 nt, Variola virus
uuaaauuauugauauuca

SEQ ID NO: 3299782 - RNA, 14 nt, Variola virus
caaacaugcgaaau

SEQ ID NO: 3299783 - RNA, 16 nt, Variola virus
acacuuagagaacuua

SEQ ID NO: 3299784 - RNA, 19 nt, Variola virus
aggucacaucguauacuuu

SEQ ID NO: 3299785 - RNA, 15 nt, Variola virus
acaugcaaggcauuu

SEQ ID NO: 3299786 - RNA, 19 nt, Variola virus
auagacaaugcuaauauau

SEQ ID NO: 3299787 - RNA, 13 nt, Variola virus
guguuauuuuuua

SEQ ID NO: 3299788 - RNA, 17 nt, Variola virus
gauucaugauaguuuua

SEQ ID NO: 3299789 - RNA, 15 nt, Variola virus
guauuuuuuaugaca

SEQ ID NO: 3299790 - RNA, 18 nt, Variola virus
uaaaauccuccuaucaau

SEQ ID NO: 3299791 - RNA, 13 nt, Variola virus
aacuguuuguaua

SEQ ID NO: 3299792 - RNA, 19 nt, Variola virus
auaauucauaagaaucuac

SEQ ID NO: 3299793 - RNA, 22 nt, Variola virus
agaucuacuggugaaaugugac

SEQ ID NO: 3299794 - RNA, 17 nt, Variola virus
ugaguauuuuacucauu

SEQ ID NO: 3299795 - RNA, 18 nt, Variola virus
aauaaucuaguaaaacuu

SEQ ID NO: 3299796 - RNA, 21 nt, Variola virus
auucccuggcgcguuuaagau

SEQ ID NO: 3299797 - RNA, 18 nt, Variola virus
aucauucauuccuccaua

SEQ ID NO: 3299798 - RNA, 16 nt, Variola virus
auucuaugucuauuau

SEQ ID NO: 3299799 - RNA, 19 nt, Variola virus
uacuucuuuacgguaucua

SEQ ID NO: 3299800 - RNA, 18 nt, Variola virus
uaugaucguuuuaauauu

SEQ ID NO: 3299801 - RNA, 17 nt, Variola virus
uaguuacuuuaauaacc

SEQ ID NO: 3299802 - RNA, 12 nt, Variola virus
aauuuauacaaa

SEQ ID NO: 3299803 - RNA, 22 nt, Variola virus
cagauuuaguauuaaacagauc

SEQ ID NO: 3299804 - RNA, 13 nt, Variola virus
caauauauucuau

SEQ ID NO: 3299805 - RNA, 19 nt, Variola virus
guuuaacaaaguuauucau

SEQ ID NO: 3299806 - RNA, 15 nt, Variola virus
cacauacaaaacuag

SEQ ID NO: 3299807 - RNA, 22 nt, Variola virus
aauacaucaucaauuuugaaaa

SEQ ID NO: 3299808 - RNA, 20 nt, Variola virus
guauuuuaucucuauucauc

SEQ ID NO: 3299809 - RNA, 20 nt, Variola virus
ucaauacaccaauagaugau

SEQ ID NO: 3299810 - RNA, 17 nt, Variola virus
gaauauguuauaauaga

SEQ ID NO: 3299811 - RNA, 16 nt, Variola virus
ucuuuuucccagcauu

SEQ ID NO: 3299812 - RNA, 20 nt, Variola virus
agaucaaaauuaacaaaauu

SEQ ID NO: 3299813 - RNA, 16 nt, Variola virus
cucccaccaaauuaau

SEQ ID NO: 3299814 - RNA, 23 nt, Variola virus
ucugauuuuaucuuuuagagguu

SEQ ID NO: 3299815 - RNA, 15 nt, Variola virus
uucaaccauucauaa

SEQ ID NO: 3299816 - RNA, 18 nt, Variola virus
auaucagcauugcuuuca

SEQ ID NO: 3299817 - RNA, 19 nt, Variola virus
uacuugacugacuuaaaac

SEQ ID NO: 3299818 - RNA, 13 nt, Variola virus
uccuauuaugaaa

SEQ ID NO: 3299819 - RNA, 12 nt, Variola virus
uguuuucucaau

SEQ ID NO: 3299820 - RNA, 13 nt, Variola virus
ucguucucuaaau

SEQ ID NO: 3299821 - RNA, 13 nt, Variola virus
acauuuccuacau

SEQ ID NO: 3299822 - RNA, 19 nt, Variola virus
auaaacugcgccaaauugu

SEQ ID NO: 3299823 - RNA, 13 nt, Variola virus
acauuuauaucca

SEQ ID NO: 3299824 - RNA, 17 nt, Variola virus
gcaguaauauuguuaau

SEQ ID NO: 3299825 - RNA, 22 nt, Variola virus
auauggaaaaguucaacaugau

SEQ ID NO: 3299826 - RNA, 15 nt, Variola virus
aucuauaucaucuau

SEQ ID NO: 3299827 - RNA, 18 nt, Variola virus
guuuaagagauucaauuu

SEQ ID NO: 3299828 - RNA, 13 nt, Variola virus
ucgucucucuuag

SEQ ID NO: 3299829 - RNA, 19 nt, Variola virus
uccauuggaaaaacacagu

SEQ ID NO: 3299830 - RNA, 16 nt, Variola virus
agaaauaucuauaauu

SEQ ID NO: 3299831 - RNA, 14 nt, Variola virus
gacuacuuauucua

SEQ ID NO: 3299832 - RNA, 14 nt, Variola virus
cacuauucauguaa

SEQ ID NO: 3299833 - RNA, 11 nt, Variola virus
guuuucaucag

SEQ ID NO: 3299834 - RNA, 21 nt, Variola virus
agaaaaucagaucugauaaua

SEQ ID NO: 3299835 - RNA, 16 nt, Variola virus
uaccucauuuaucaug

SEQ ID NO: 3299836 - RNA, 23 nt, Variola virus
auugaugcgaauagcagauagau

SEQ ID NO: 3299837 - RNA, 13 nt, Variola virus
guauauuauucau

SEQ ID NO: 3299838 - RNA, 21 nt, Variola virus
agcaaaaaaugauagaaauau

SEQ ID NO: 3299839 - RNA, 14 nt, Variola virus
uacguuacuaaaau

SEQ ID NO: 3299840 - RNA, 13 nt, Variola virus
cgguuuuucuugg

SEQ ID NO: 3299841 - RNA, 13 nt, Variola virus
uaaagucauuaau

SEQ ID NO: 3299842 - RNA, 13 nt, Variola virus
uagagaucuaauu

SEQ ID NO: 3299843 - RNA, 16 nt, Variola virus
aauugugauuuaguau

SEQ ID NO: 3299844 - RNA, 15 nt, Variola virus
aagaaauuaauaaag

SEQ ID NO: 3299845 - RNA, 23 nt, Variola virus
uuacaccggccaaguaugcauaa

SEQ ID NO: 3299846 - RNA, 13 nt, Variola virus
acaauauauucua

SEQ ID NO: 3299847 - RNA, 15 nt, Variola virus
gaauauauaauucuu

SEQ ID NO: 3299848 - RNA, 17 nt, Variola virus
uccuccuguagauaugu

SEQ ID NO: 3299849 - RNA, 12 nt, Variola virus
auagaagauuac

SEQ ID NO: 3299850 - RNA, 12 nt, Variola virus
uuuuguaauaag

SEQ ID NO: 3299851 - RNA, 20 nt, Variola virus
caauucauguuuaaaaugau

SEQ ID NO: 3299852 - RNA, 20 nt, Variola virus
guagcaagauuuuuaaacaa

SEQ ID NO: 3299853 - RNA, 19 nt, Variola virus
guuaauuuaucacauauca

SEQ ID NO: 3299854 - RNA, 21 nt, Variola virus
aauguagugauagauaugaua

SEQ ID NO: 3299855 - RNA, 22 nt, Variola virus
uguucaagaauauacaaguauu

SEQ ID NO: 3299856 - RNA, 20 nt, Variola virus
auugauuacuuugacaaaug

SEQ ID NO: 3299857 - RNA, 21 nt, Variola virus
gccauagauuuauaauacuuu

SEQ ID NO: 3299858 - RNA, 17 nt, Variola virus
uguuguaaacacauauu

SEQ ID NO: 3299859 - RNA, 20 nt, Variola virus
acauucaaccacucucgaua

SEQ ID NO: 3299860 - RNA, 14 nt, Variola virus
ucugguugaagaaa

SEQ ID NO: 3299861 - RNA, 14 nt, Variola virus
aagaauucggaaau

SEQ ID NO: 3299862 - RNA, 14 nt, Variola virus
cuauucauguaaug

SEQ ID NO: 3299863 - RNA, 14 nt, Variola virus
ugagauauauacac

SEQ ID NO: 3299864 - RNA, 13 nt, Variola virus
acuuguuuaauga

SEQ ID NO: 3299865 - RNA, 22 nt, Variola virus
gaagagucgcgaauaacgauau

SEQ ID NO: 3299866 - RNA, 12 nt, Variola virus
gaauuagaaaag

SEQ ID NO: 3299867 - RNA, 23 nt, Variola virus
uaaguagagauucggguacugua

SEQ ID NO: 3299868 - RNA, 17 nt, Variola virus
ugcuguuccucuguaaa

SEQ ID NO: 3299869 - RNA, 17 nt, Variola virus
cauaauaaauuuuucca

SEQ ID NO: 3299870 - RNA, 24 nt, Variola virus
cugucuaucaagauccaugauucu

SEQ ID NO: 3299871 - RNA, 19 nt, Variola virus
uuaaaauaaauauucuuca

SEQ ID NO: 3299872 - RNA, 20 nt, Variola virus
uaaagcgugugcguguauag

SEQ ID NO: 3299873 - RNA, 15 nt, Variola virus
auauuccauuaauga

SEQ ID NO: 3299874 - RNA, 16 nt, Variola virus
aaagcgugauuuuaau

SEQ ID NO: 3299875 - RNA, 15 nt, Variola virus
aacacgauuuaaaau

SEQ ID NO: 3299876 - RNA, 20 nt, Variola virus
ucuguugguuuucuuauaua

SEQ ID NO: 3299877 - RNA, 12 nt, Variola virus
cuaggauacaua

SEQ ID NO: 3299878 - RNA, 22 nt, Variola virus
guauuuuuuaugacaaacuuua

SEQ ID NO: 3299879 - RNA, 22 nt, Variola virus
auguacguagcguacaaaauua

SEQ ID NO: 3299880 - RNA, 19 nt, Variola virus
aucauuuaaacauuuaacu

SEQ ID NO: 3299881 - RNA, 22 nt, Variola virus
aaauugguagcugaauguuaua

SEQ ID NO: 3299882 - RNA, 16 nt, Variola virus
agaaucuaaugaugac

SEQ ID NO: 3299883 - RNA, 18 nt, Variola virus
ucucuaucuguuuccauu

SEQ ID NO: 3299884 - RNA, 20 nt, Variola virus
auaauggucgaacacaguau

SEQ ID NO: 3299885 - RNA, 16 nt, Variola virus
ucguuuuucuuaagaa

SEQ ID NO: 3299886 - RNA, 23 nt, Variola virus
aaaugacuaauuuuguagcauua

SEQ ID NO: 3299887 - RNA, 17 nt, Variola virus
acauccggcaaaaauaa

SEQ ID NO: 3299888 - RNA, 22 nt, Variola virus
acaaugacucuaucaacuauag

SEQ ID NO: 3299889 - RNA, 20 nt, Variola virus
uugccguugucuguauucau

SEQ ID NO: 3299890 - RNA, 18 nt, Variola virus
accaauaaaaauaaacua

SEQ ID NO: 3299891 - RNA, 13 nt, Variola virus
auauaucuaauaa

SEQ ID NO: 3299892 - RNA, 20 nt, Variola virus
aauauaugcaaaauaauauc

SEQ ID NO: 3299893 - RNA, 21 nt, Variola virus
uaggguaaucuuguaucuauu

SEQ ID NO: 3299894 - RNA, 12 nt, Variola virus
auuuuucaauua

SEQ ID NO: 3299895 - RNA, 15 nt, Variola virus
agagcagucuuucua

SEQ ID NO: 3299896 - RNA, 15 nt, Variola virus
gacuaucuuuugaaa

SEQ ID NO: 3299897 - RNA, 14 nt, Variola virus
uaccacauacaaaa

SEQ ID NO: 3299898 - RNA, 19 nt, Variola virus
uugaauaggaguuugaaua

SEQ ID NO: 3299899 - RNA, 20 nt, Variola virus
cucgauacaucaacucucuc

SEQ ID NO: 3299900 - RNA, 20 nt, Variola virus
aaacacugauucagaaaugg

SEQ ID NO: 3299901 - RNA, 17 nt, Variola virus
cuuuuuauccucauuaa

SEQ ID NO: 3299902 - RNA, 18 nt, Variola virus
ugccuauuaggacagaua

SEQ ID NO: 3299903 - RNA, 21 nt, Variola virus
gagcuaaccacauuagauauu

SEQ ID NO: 3299904 - RNA, 11 nt, Variola virus
cuguagaaaaa

SEQ ID NO: 3299905 - RNA, 15 nt, Variola virus
cauuaucaaaaagaa

SEQ ID NO: 3299906 - RNA, 15 nt, Variola virus
acuuuuguuacuaau

SEQ ID NO: 3299907 - RNA, 15 nt, Variola virus
aucaggaaaaaagau

SEQ ID NO: 3299908 - RNA, 13 nt, Variola virus
acagauuucggaa

SEQ ID NO: 3299909 - RNA, 22 nt, Variola virus
gccuuauucucuggagaaaaga

SEQ ID NO: 3299910 - RNA, 19 nt, Variola virus
gaugucaaaggaugaaaga

SEQ ID NO: 3299911 - RNA, 18 nt, Variola virus
aaucugaaccaucaucug

SEQ ID NO: 3299912 - RNA, 22 nt, Variola virus
gccuucauaaggaaacuuuugu

SEQ ID NO: 3299913 - RNA, 13 nt, Variola virus
cgacaagauaucg

SEQ ID NO: 3299914 - RNA, 15 nt, Variola virus
uuuauacuucuaaug

SEQ ID NO: 3299915 - RNA, 15 nt, Variola virus
uguuuaaaucaaaau

SEQ ID NO: 3299916 - RNA, 12 nt, Variola virus
aaauaauccaac

SEQ ID NO: 3299917 - RNA, 14 nt, Variola virus
auuaacaagaauac

SEQ ID NO: 3299918 - RNA, 14 nt, Variola virus
cugauuuauguuuu

SEQ ID NO: 3299919 - RNA, 18 nt, Variola virus
ucguaguaaguuaaccaa

SEQ ID NO: 3299920 - RNA, 20 nt, Variola virus
agauccucucuuaaaugaau

SEQ ID NO: 3299921 - RNA, 18 nt, Variola virus
agaauuaggagaacuuau

SEQ ID NO: 3299922 - RNA, 21 nt, Variola virus
gguaauacgcucaucaaguac

SEQ ID NO: 3299923 - RNA, 16 nt, Variola virus
uaaauuuucuauacau

SEQ ID NO: 3299924 - RNA, 15 nt, Variola virus
ugugugugugguaua

SEQ ID NO: 3299925 - RNA, 16 nt, Variola virus
gacgaguguaaacacu

SEQ ID NO: 3299926 - RNA, 13 nt, Variola virus
aggauaucaaaua

SEQ ID NO: 3299927 - RNA, 16 nt, Variola virus
uacaaaaaauaaaaga

SEQ ID NO: 3299928 - RNA, 20 nt, Variola virus
uagcugaaacaaagaauugc

SEQ ID NO: 3299929 - RNA, 15 nt, Variola virus
augacgauaacauuc

SEQ ID NO: 3299930 - RNA, 23 nt, Variola virus
uuaaaauaguuuauaacauuaau

SEQ ID NO: 3299931 - RNA, 17 nt, Variola virus
acaagauuccuuuucua

SEQ ID NO: 3299932 - RNA, 14 nt, Variola virus
ugcagaauauuucu

SEQ ID NO: 3299933 - RNA, 21 nt, Variola virus
cuugagagcauccaguaugaa

SEQ ID NO: 3299934 - RNA, 14 nt, Variola virus
ugaagcucaucuug

SEQ ID NO: 3299935 - RNA, 16 nt, Variola virus
caaaaaguaagauauu

SEQ ID NO: 3299936 - RNA, 21 nt, Variola virus
gaguauaaauuuuagaaauaa

SEQ ID NO: 3299937 - RNA, 14 nt, Variola virus
cguguacaaaaaug

SEQ ID NO: 3299938 - RNA, 22 nt, Variola virus
uaaguauagcaaauaaaaucua

SEQ ID NO: 3299939 - RNA, 19 nt, Variola virus
guuaacuuugauuauccua

SEQ ID NO: 3299940 - RNA, 19 nt, Variola virus
acagauauuacaaccagug

SEQ ID NO: 3299941 - RNA, 13 nt, Variola virus
uucacauaaaaga

SEQ ID NO: 3299942 - RNA, 16 nt, Variola virus
cuuugaauccauuuuc

SEQ ID NO: 3299943 - RNA, 12 nt, Variola virus
aauauagaauau

SEQ ID NO: 3299944 - RNA, 22 nt, Variola virus
acagaagauagcaaagagauga

SEQ ID NO: 3299945 - RNA, 16 nt, Variola virus
aaauaauuauucuuua

SEQ ID NO: 3299946 - RNA, 19 nt, Variola virus
uaauaguuuaucauacuua

SEQ ID NO: 3299947 - RNA, 15 nt, Variola virus
uuuagacguagaaaa

SEQ ID NO: 3299948 - RNA, 15 nt, Variola virus
guauauaaauacuuu

SEQ ID NO: 3299949 - RNA, 19 nt, Variola virus
cauauuuauucuauggaug

SEQ ID NO: 3299950 - RNA, 14 nt, Variola virus
aucuccaucaaaug

SEQ ID NO: 3299951 - RNA, 23 nt, Variola virus
aguuguuauaaaggacagaaaua

SEQ ID NO: 3299952 - RNA, 23 nt, Variola virus
aaauuaaccgauaaaaagacuuu

SEQ ID NO: 3299953 - RNA, 17 nt, Variola virus
auaauugcuuuucuaau

SEQ ID NO: 3299954 - RNA, 20 nt, Variola virus
aaagucuacauugucauuau

SEQ ID NO: 3299955 - RNA, 14 nt, Variola virus
caauauaucaucua

SEQ ID NO: 3299956 - RNA, 19 nt, Variola virus
auuacgguaucuacuagau

SEQ ID NO: 3299957 - RNA, 19 nt, Variola virus
agucagacuuguauucaac

SEQ ID NO: 3299958 - RNA, 19 nt, Variola virus
acagcuaacgaaagcaaag

SEQ ID NO: 3299959 - RNA, 20 nt, Variola virus
ugaagcauuggaagcaacua

SEQ ID NO: 3299960 - RNA, 17 nt, Variola virus
ugccuguaauaauuucu

SEQ ID NO: 3299961 - RNA, 17 nt, Variola virus
uccuugguuuacaugga

SEQ ID NO: 3299962 - RNA, 19 nt, Variola virus
uaacgauaacgucauuaau

SEQ ID NO: 3299963 - RNA, 19 nt, Variola virus
cuugguuuacauggaucag

SEQ ID NO: 3299964 - RNA, 18 nt, Variola virus
aaaauaaacacauagaaa

SEQ ID NO: 3299965 - RNA, 15 nt, Variola virus
auuuucaucuagaua

SEQ ID NO: 3299966 - RNA, 18 nt, Variola virus
cauaguggacaacauuaa

SEQ ID NO: 3299967 - RNA, 16 nt, Variola virus
cagaaauauauauauu

SEQ ID NO: 3299968 - RNA, 20 nt, Variola virus
cauauacugauaauaaugaa

SEQ ID NO: 3299969 - RNA, 20 nt, Variola virus
auauuacaaacuauagaaau

SEQ ID NO: 3299970 - RNA, 21 nt, Variola virus
gaauauguuauaauagagaua

SEQ ID NO: 3299971 - RNA, 20 nt, Variola virus
ugucgaaucuaaacuagugg

SEQ ID NO: 3299972 - RNA, 18 nt, Variola virus
agaacggagaauaucuau

SEQ ID NO: 3299973 - RNA, 15 nt, Variola virus
gaucuccaacaaauu

SEQ ID NO: 3299974 - RNA, 19 nt, Variola virus
aaucugguggauacucuag

SEQ ID NO: 3299975 - RNA, 15 nt, Variola virus
aaagguagaccuaau

SEQ ID NO: 3299976 - RNA, 15 nt, Variola virus
gaaaucaacaaucua

SEQ ID NO: 3299977 - RNA, 22 nt, Variola virus
aguauuaucgacguaacuauau

SEQ ID NO: 3299978 - RNA, 23 nt, Variola virus
caagaauccgaucccacuucugu

SEQ ID NO: 3299979 - RNA, 19 nt, Variola virus
auacaugucuuagauguuc

SEQ ID NO: 3299980 - RNA, 15 nt, Variola virus
aacuaaauuaacaau

SEQ ID NO: 3299981 - RNA, 15 nt, Variola virus
ugaauguuugaaaac

SEQ ID NO: 3299982 - RNA, 17 nt, Variola virus
uauccuauauacgaaaa

SEQ ID NO: 3299983 - RNA, 18 nt, Variola virus
auaaucuaaaauaguucu

SEQ ID NO: 3299984 - RNA, 19 nt, Variola virus
aauugcgauuauaagauua

SEQ ID NO: 3299985 - RNA, 19 nt, Variola virus
uauuaagaaauacaucaaa

SEQ ID NO: 3299986 - RNA, 19 nt, Variola virus
uuccugacgucuagaguuu

SEQ ID NO: 3299987 - RNA, 21 nt, Variola virus
uucacauucaccggaaacuag

SEQ ID NO: 3299988 - RNA, 15 nt, Variola virus
aacucuuugacauau

SEQ ID NO: 3299989 - RNA, 13 nt, Variola virus
uaugcuuucauaa

SEQ ID NO: 3299990 - RNA, 17 nt, Variola virus
caaugaacuaauaugau

SEQ ID NO: 3299991 - RNA, 20 nt, Variola virus
aagucccucauagaaugaua

SEQ ID NO: 3299992 - RNA, 16 nt, Variola virus
uucaaaagauaguuuu

SEQ ID NO: 3299993 - RNA, 12 nt, Variola virus
cgccucaaaugu

SEQ ID NO: 3299994 - RNA, 19 nt, Variola virus
ccauuuuuaugaucgucuu

SEQ ID NO: 3299995 - RNA, 13 nt, Variola virus
aauuugacuacau

SEQ ID NO: 3299996 - RNA, 23 nt, Variola virus
aaaaugaaucuaaacaaaaucua

SEQ ID NO: 3299997 - RNA, 19 nt, Variola virus
acuaacgaaauuaauauga

SEQ ID NO: 3299998 - RNA, 17 nt, Variola virus
aaugauuuagaaaugaa

SEQ ID NO: 3299999 - RNA, 17 nt, Variola virus
uaagacugcuaaaugua

SEQ ID NO: 3300000 - RNA, 17 nt, Variola virus
gaauguuauaaaaaugc

SEQ ID NO: 3300001 - RNA, 16 nt, Variola virus
uugagacuaucaacag

SEQ ID NO: 3300002 - RNA, 21 nt, Variola virus
gaucuauuagaaaauucucuu

SEQ ID NO: 3300003 - RNA, 18 nt, Variola virus
ugcuucaacgaggaagau

SEQ ID NO: 3300004 - RNA, 19 nt, Variola virus
gucuaugaauaugauuuuu

SEQ ID NO: 3300005 - RNA, 18 nt, Variola virus
acuauuugucuuaauaga

SEQ ID NO: 3300006 - RNA, 21 nt, Variola virus
gauucgcaaacuauucuaaua

SEQ ID NO: 3300007 - RNA, 22 nt, Variola virus
ccaauaauguauagacaauuau

SEQ ID NO: 3300008 - RNA, 19 nt, Variola virus
ugauugauuauuucaaaga

SEQ ID NO: 3300009 - RNA, 13 nt, Variola virus
aacagucuguuca

SEQ ID NO: 3300010 - RNA, 14 nt, Variola virus
cuaguacuguaaaa

SEQ ID NO: 3300011 - RNA, 16 nt, Variola virus
uaggcuauaaauauua

SEQ ID NO: 3300012 - RNA, 14 nt, Variola virus
acguaauaaugaag

SEQ ID NO: 3300013 - RNA, 20 nt, Variola virus
ucuagauacuagaguaguau

SEQ ID NO: 3300014 - RNA, 14 nt, Variola virus
agaaauaauauuaa

SEQ ID NO: 3300015 - RNA, 17 nt, Variola virus
acuuuguggaugaugau

SEQ ID NO: 3300016 - RNA, 18 nt, Variola virus
acauuguauuaugaugaa

SEQ ID NO: 3300017 - RNA, 15 nt, Variola virus
auaaaauuaauaaua

SEQ ID NO: 3300018 - RNA, 15 nt, Variola virus
auaauauuaauauua

SEQ ID NO: 3300019 - RNA, 21 nt, Variola virus
uucaucagauuauuuaacaau

SEQ ID NO: 3300020 - RNA, 13 nt, Variola virus
aacacuuuucuau

SEQ ID NO: 3300021 - RNA, 17 nt, Variola virus
uaccguuguuacuccau

SEQ ID NO: 3300022 - RNA, 15 nt, Variola virus
gaaaaucuaauaacu

SEQ ID NO: 3300023 - RNA, 16 nt, Variola virus
guucuauaaacugaau

SEQ ID NO: 3300024 - RNA, 21 nt, Variola virus
ucguugguaggauaauacauc

SEQ ID NO: 3300025 - RNA, 19 nt, Variola virus
caaaaucuaaacaaauauu

SEQ ID NO: 3300026 - RNA, 14 nt, Variola virus
auaucaggaaaugu

SEQ ID NO: 3300027 - RNA, 22 nt, Variola virus
uuaaauaacccaaguauugaaa

SEQ ID NO: 3300028 - RNA, 16 nt, Variola virus
uauuccaaucauugau

SEQ ID NO: 3300029 - RNA, 16 nt, Variola virus
ugauguaaaauuuuug

SEQ ID NO: 3300030 - RNA, 22 nt, Variola virus
gcugcuggaucuaaauauuuua

SEQ ID NO: 3300031 - RNA, 15 nt, Variola virus
ucuuguauaucuuaa

SEQ ID NO: 3300032 - RNA, 18 nt, Variola virus
agaaucaauauuaauauu

SEQ ID NO: 3300033 - RNA, 13 nt, Variola virus
aaucuauaauauc

SEQ ID NO: 3300034 - RNA, 24 nt, Variola virus
aaagaacggagaauaucuauacau

SEQ ID NO: 3300035 - RNA, 15 nt, Variola virus
aacgaugauauguau

SEQ ID NO: 3300036 - RNA, 13 nt, Variola virus
guucuaaauggau

SEQ ID NO: 3300037 - RNA, 17 nt, Variola virus
uggaauuguauauuaca

SEQ ID NO: 3300038 - RNA, 16 nt, Variola virus
uuaaaaugauuauucc

SEQ ID NO: 3300039 - RNA, 17 nt, Variola virus
cugaaacaguaugauuu

SEQ ID NO: 3300040 - RNA, 22 nt, Variola virus
aauggcaauaacuaaaaaugua

SEQ ID NO: 3300041 - RNA, 21 nt, Variola virus
auaccuuaccgccuucauaag

SEQ ID NO: 3300042 - RNA, 14 nt, Variola virus
uuacuacauuauua

SEQ ID NO: 3300043 - RNA, 20 nt, Variola virus
uacuccucauuacguuucau

SEQ ID NO: 3300044 - RNA, 14 nt, Variola virus
aucauguaaauguu

SEQ ID NO: 3300045 - RNA, 20 nt, Variola virus
guucauccuuguucaucauu

SEQ ID NO: 3300046 - RNA, 19 nt, Variola virus
uugauucuuauucacuaua

SEQ ID NO: 3300047 - RNA, 18 nt, Variola virus
cagucccaugguuccaua

SEQ ID NO: 3300048 - RNA, 17 nt, Variola virus
gcaaucuaacauuuuua

SEQ ID NO: 3300049 - RNA, 20 nt, Variola virus
aucaaaaaggagaauacuau

SEQ ID NO: 3300050 - RNA, 15 nt, Variola virus
agauuacucauguaa

SEQ ID NO: 3300051 - RNA, 17 nt, Variola virus
uaaugagcaaauuuauu

SEQ ID NO: 3300052 - RNA, 19 nt, Variola virus
acuggucauagaaaaugau

SEQ ID NO: 3300053 - RNA, 21 nt, Variola virus
auuugacuaaaucuuaauagu

SEQ ID NO: 3300054 - RNA, 12 nt, Variola virus
gucgcacgcucc

SEQ ID NO: 3300055 - RNA, 16 nt, Variola virus
aaugcagggugcauau

SEQ ID NO: 3300056 - RNA, 23 nt, Variola virus
cacugucucauacacuacaguaa

SEQ ID NO: 3300057 - RNA, 17 nt, Variola virus
uuuacgguaucuaauau

SEQ ID NO: 3300058 - RNA, 22 nt, Variola virus
aacuuuaauucaaauuuccauu

SEQ ID NO: 3300059 - RNA, 15 nt, Variola virus
cauggucuagaugua

SEQ ID NO: 3300060 - RNA, 22 nt, Variola virus
ucucucaaucacuacaucuuua

SEQ ID NO: 3300061 - RNA, 15 nt, Variola virus
uaauccuguguuuau

SEQ ID NO: 3300062 - RNA, 18 nt, Variola virus
ucuccauaaagaaauuag

SEQ ID NO: 3300063 - RNA, 20 nt, Variola virus
agccugaagcucaucuuguu

SEQ ID NO: 3300064 - RNA, 22 nt, Variola virus
acuauugaaguacuuaaugaag

SEQ ID NO: 3300065 - RNA, 14 nt, Variola virus
gugguguaaucuua

SEQ ID NO: 3300066 - RNA, 23 nt, Variola virus
ugcaucuaaaagcgaugcuacgc

SEQ ID NO: 3300067 - RNA, 20 nt, Variola virus
auuacauuuuuauaaauaga

SEQ ID NO: 3300068 - RNA, 15 nt, Variola virus
uaauagacuaucaga

SEQ ID NO: 3300069 - RNA, 16 nt, Variola virus
uuuguaauugugacau

SEQ ID NO: 3300070 - RNA, 21 nt, Variola virus
cucuguagacgauacuugacu

SEQ ID NO: 3300071 - RNA, 18 nt, Variola virus
agcauuuguaauaauccu

SEQ ID NO: 3300072 - RNA, 17 nt, Variola virus
auuagcgauagaacguu

SEQ ID NO: 3300073 - RNA, 18 nt, Variola virus
uuuggaucuuuuguacau

SEQ ID NO: 3300074 - RNA, 22 nt, Variola virus
aaaacuauuacuaggagaauua

SEQ ID NO: 3300075 - RNA, 21 nt, Variola virus
auaauuugaccugauuacauu

SEQ ID NO: 3300076 - RNA, 12 nt, Variola virus
ugacgaagagau

SEQ ID NO: 3300077 - RNA, 14 nt, Variola virus
gauuauaugauaua

SEQ ID NO: 3300078 - RNA, 16 nt, Variola virus
uguugacgacauauau

SEQ ID NO: 3300079 - RNA, 23 nt, Variola virus
ugaauauauuaaaguuauuuaug

SEQ ID NO: 3300080 - RNA, 15 nt, Variola virus
aauagauuuuucaua

SEQ ID NO: 3300081 - RNA, 15 nt, Variola virus
auaaacaugucuauu

SEQ ID NO: 3300082 - RNA, 15 nt, Variola virus
cuggaauagguauau

SEQ ID NO: 3300083 - RNA, 16 nt, Variola virus
auaucuacuagaaaga

SEQ ID NO: 3300084 - RNA, 21 nt, Variola virus
gucguucuuccucaaguucuc

SEQ ID NO: 3300085 - RNA, 13 nt, Variola virus
ugauauuuucuau

SEQ ID NO: 3300086 - RNA, 21 nt, Variola virus
uaggugccaccaauaaacuau

SEQ ID NO: 3300087 - RNA, 13 nt, Variola virus
uaaagauauuucu

SEQ ID NO: 3300088 - RNA, 23 nt, Variola virus
auuuaguuucuucgauauuggau

SEQ ID NO: 3300089 - RNA, 16 nt, Variola virus
aacguucauagaauuu

SEQ ID NO: 3300090 - RNA, 20 nt, Variola virus
gccauugaaaacuauuucuu

SEQ ID NO: 3300091 - RNA, 20 nt, Variola virus
auaaaaccaugaaauauauu

SEQ ID NO: 3300092 - RNA, 20 nt, Variola virus
aagcguguaaacgaaaacua

SEQ ID NO: 3300093 - RNA, 22 nt, Variola virus
uuaaacuguaucgaucauucuu

SEQ ID NO: 3300094 - RNA, 17 nt, Variola virus
auuacuaggagaauuau

SEQ ID NO: 3300095 - RNA, 19 nt, Variola virus
uuuuucuucauuuauuaua

SEQ ID NO: 3300096 - RNA, 17 nt, Variola virus
aacgauaccaucuucug

SEQ ID NO: 3300097 - RNA, 22 nt, Variola virus
uauagaauguuuccaaugagua

SEQ ID NO: 3300098 - RNA, 13 nt, Variola virus
uauacccaaagag

SEQ ID NO: 3300099 - RNA, 19 nt, Variola virus
guauucauuuaucacaaaa

SEQ ID NO: 3300100 - RNA, 14 nt, Variola virus
uaggauacaagauc

SEQ ID NO: 3300101 - RNA, 22 nt, Variola virus
auacuucauuucuaaaauagua

SEQ ID NO: 3300102 - RNA, 16 nt, Variola virus
ccauuuuaaaaucauu

SEQ ID NO: 3300103 - RNA, 21 nt, Variola virus
auucaauuacuacaaaaauua

SEQ ID NO: 3300104 - RNA, 19 nt, Variola virus
uuaaacuaauucauuuuca

SEQ ID NO: 3300105 - RNA, 21 nt, Variola virus
acagucugcgaacuuuaaaca

SEQ ID NO: 3300106 - RNA, 20 nt, Variola virus
ucgacuauuuuaaauagcau

SEQ ID NO: 3300107 - RNA, 22 nt, Variola virus
guaucaucucuacauuguuuac

SEQ ID NO: 3300108 - RNA, 17 nt, Variola virus
cuuaaagacuauaccau

SEQ ID NO: 3300109 - RNA, 13 nt, Variola virus
uauaauauuuccu

SEQ ID NO: 3300110 - RNA, 19 nt, Variola virus
aacucauugcuuucuagaa

SEQ ID NO: 3300111 - RNA, 13 nt, Variola virus
uauuuuacucauu

SEQ ID NO: 3300112 - RNA, 11 nt, Variola virus
uuuaacagaug

SEQ ID NO: 3300113 - RNA, 18 nt, Variola virus
auaaucaucgaauacuuu

SEQ ID NO: 3300114 - RNA, 19 nt, Variola virus
aguaugacguugaacuaau

SEQ ID NO: 3300115 - RNA, 16 nt, Variola virus
uuuugauacuauccaa

SEQ ID NO: 3300116 - RNA, 15 nt, Variola virus
aaucaaaacaaaauu

SEQ ID NO: 3300117 - RNA, 18 nt, Variola virus
guauaaauacccuuccaa

SEQ ID NO: 3300118 - RNA, 19 nt, Variola virus
guguauacaguauaggaaa

SEQ ID NO: 3300119 - RNA, 20 nt, Variola virus
uuugaaauaucuuaugauga

SEQ ID NO: 3300120 - RNA, 16 nt, Variola virus
ugacuccuauauuucc

SEQ ID NO: 3300121 - RNA, 18 nt, Variola virus
uguauguuuaaacacucu

SEQ ID NO: 3300122 - RNA, 22 nt, Variola virus
aacaucucagacagucuggucu

SEQ ID NO: 3300123 - RNA, 18 nt, Variola virus
aguagugauuuugaagau

SEQ ID NO: 3300124 - RNA, 20 nt, Variola virus
aucuagauuguuuaauauau

SEQ ID NO: 3300125 - RNA, 18 nt, Variola virus
ccaugauuaaauauuuua

SEQ ID NO: 3300126 - RNA, 22 nt, Variola virus
uuagaaaacucucuaucucuua

SEQ ID NO: 3300127 - RNA, 13 nt, Variola virus
cucuacucuagau

SEQ ID NO: 3300128 - RNA, 14 nt, Variola virus
uuucagucauugau

SEQ ID NO: 3300129 - RNA, 13 nt, Variola virus
auaucgaugugga

SEQ ID NO: 3300130 - RNA, 17 nt, Variola virus
acaaguuuucauaucau

SEQ ID NO: 3300131 - RNA, 19 nt, Variola virus
guauccagguagacauaga

SEQ ID NO: 3300132 - RNA, 13 nt, Variola virus
gaacuaauaugau

SEQ ID NO: 3300133 - RNA, 22 nt, Variola virus
auuaagcaacaugucuuuaaau

SEQ ID NO: 3300134 - RNA, 21 nt, Variola virus
uauacuugucaucauuucuaa

SEQ ID NO: 3300135 - RNA, 19 nt, Variola virus
cgaacuaccugauuuugca

SEQ ID NO: 3300136 - RNA, 16 nt, Variola virus
aacguguauuaaauag

SEQ ID NO: 3300137 - RNA, 17 nt, Variola virus
acuuccaauaaaauuac

SEQ ID NO: 3300138 - RNA, 17 nt, Variola virus
agaaaaaaaauugaauu

SEQ ID NO: 3300139 - RNA, 18 nt, Variola virus
auaucauugucuaauaga

SEQ ID NO: 3300140 - RNA, 15 nt, Variola virus
uaucgcgacauauau

SEQ ID NO: 3300141 - RNA, 14 nt, Variola virus
aauaucagagagau

SEQ ID NO: 3300142 - RNA, 22 nt, Variola virus
uaaacguuguuuacucauauag

SEQ ID NO: 3300143 - RNA, 13 nt, Variola virus
aauacguugaaaa

SEQ ID NO: 3300144 - RNA, 13 nt, Variola virus
guuuuuuagaucu

SEQ ID NO: 3300145 - RNA, 15 nt, Variola virus
uaguauaaauaguua

SEQ ID NO: 3300146 - RNA, 16 nt, Variola virus
agguucccaauuccaa

SEQ ID NO: 3300147 - RNA, 18 nt, Variola virus
cuuaaaauauguaacaau

SEQ ID NO: 3300148 - RNA, 15 nt, Variola virus
ucacaaauacuacaa

SEQ ID NO: 3300149 - RNA, 15 nt, Variola virus
acuuccguuuaaaaa

SEQ ID NO: 3300150 - RNA, 19 nt, Variola virus
aauuccgcauuaaaugaug

SEQ ID NO: 3300151 - RNA, 13 nt, Variola virus
acucuaaguuugu

SEQ ID NO: 3300152 - RNA, 16 nt, Variola virus
ugaucuaacuaagaua

SEQ ID NO: 3300153 - RNA, 13 nt, Variola virus
uagauuaucuauu

SEQ ID NO: 3300154 - RNA, 16 nt, Variola virus
uguauccauacauaca

SEQ ID NO: 3300155 - RNA, 12 nt, Variola virus
aaaauucuccac

SEQ ID NO: 3300156 - RNA, 24 nt, Variola virus
cccaugcuauauuccuguuaucau

SEQ ID NO: 3300157 - RNA, 20 nt, Variola virus
uacaucuaaauuuuuacuau

SEQ ID NO: 3300158 - RNA, 21 nt, Variola virus
uuagucuuaaugauacacuaa

SEQ ID NO: 3300159 - RNA, 23 nt, Variola virus
gcguguuuuaaauccuuaauaua

SEQ ID NO: 3300160 - RNA, 18 nt, Variola virus
accgaguuuaaaacuucu

SEQ ID NO: 3300161 - RNA, 15 nt, Variola virus
auauucacaaauaua

SEQ ID NO: 3300162 - RNA, 15 nt, Variola virus
aguuuauaaaaauuu

SEQ ID NO: 3300163 - RNA, 23 nt, Variola virus
guacuguucauacaugaugagau

SEQ ID NO: 3300164 - RNA, 19 nt, Variola virus
uauucugaaacaguaugau

SEQ ID NO: 3300165 - RNA, 16 nt, Variola virus
gguuaacaucuuauaa

SEQ ID NO: 3300166 - RNA, 21 nt, Variola virus
ugaucuaucgaaaauugcuau

SEQ ID NO: 3300167 - RNA, 18 nt, Variola virus
gacaccuaagaagaaugu

SEQ ID NO: 3300168 - RNA, 16 nt, Variola virus
gcggagauuuaaucug

SEQ ID NO: 3300169 - RNA, 19 nt, Variola virus
guacauacgucuauuucua

SEQ ID NO: 3300170 - RNA, 21 nt, Variola virus
auuauuggguaaguuuaaaaa

SEQ ID NO: 3300171 - RNA, 22 nt, Variola virus
uaauccuauucuugaucucauc

SEQ ID NO: 3300172 - RNA, 22 nt, Variola virus
uaacagaacauuugcaaagauu

SEQ ID NO: 3300173 - RNA, 19 nt, Variola virus
guuucacuaguaccuuuau

SEQ ID NO: 3300174 - RNA, 23 nt, Variola virus
uucguaaaaaaguuaaaacuugu

SEQ ID NO: 3300175 - RNA, 15 nt, Variola virus
uuaguuccaacaauu

SEQ ID NO: 3300176 - RNA, 18 nt, Variola virus
auaacaaaugcagaaauu

SEQ ID NO: 3300177 - RNA, 22 nt, Variola virus
caaucuuacagaaguucaugau

SEQ ID NO: 3300178 - RNA, 17 nt, Variola virus
uauuuaacgauucuuca

SEQ ID NO: 3300179 - RNA, 18 nt, Variola virus
gauaauaauuaauaucua

SEQ ID NO: 3300180 - RNA, 13 nt, Variola virus
uuaauaguuuuua

SEQ ID NO: 3300181 - RNA, 22 nt, Variola virus
uaauagcaucaucuuuaucauu

SEQ ID NO: 3300182 - RNA, 14 nt, Variola virus
auauuuuuuaacua

SEQ ID NO: 3300183 - RNA, 16 nt, Variola virus
cgcuuaauaucuucug

SEQ ID NO: 3300184 - RNA, 13 nt, Variola virus
gacaucucagaau

SEQ ID NO: 3300185 - RNA, 20 nt, Variola virus
uaaacaaucugucgaaaaag

SEQ ID NO: 3300186 - RNA, 14 nt, Variola virus
guuuagaugucgaa

SEQ ID NO: 3300187 - RNA, 13 nt, Variola virus
gcuauuacuuauu

SEQ ID NO: 3300188 - RNA, 16 nt, Variola virus
ugauacagaaaaucuu

SEQ ID NO: 3300189 - RNA, 21 nt, Variola virus
gaacuauuuuuuuauacuucu

SEQ ID NO: 3300190 - RNA, 13 nt, Variola virus
ugaaauaacucuu

SEQ ID NO: 3300191 - RNA, 12 nt, Variola virus
aucauuucacaa

SEQ ID NO: 3300192 - RNA, 17 nt, Variola virus
auguuugggagaauuaa

SEQ ID NO: 3300193 - RNA, 12 nt, Variola virus
gcaaucaugaaa

SEQ ID NO: 3300194 - RNA, 15 nt, Variola virus
guuaaaguaaucauu

SEQ ID NO: 3300195 - RNA, 14 nt, Variola virus
acagcguaaaacac

SEQ ID NO: 3300196 - RNA, 19 nt, Variola virus
uguaaauuaggagaaacaa

SEQ ID NO: 3300197 - RNA, 13 nt, Variola virus
ucaagucauaaau

SEQ ID NO: 3300198 - RNA, 18 nt, Variola virus
uaaagacccaaaugucug

SEQ ID NO: 3300199 - RNA, 18 nt, Variola virus
acagagccaucuguaaaa

SEQ ID NO: 3300200 - RNA, 16 nt, Variola virus
aacaugcuuuucuaua

SEQ ID NO: 3300201 - RNA, 19 nt, Variola virus
acuuccguuuaaaaauggu

SEQ ID NO: 3300202 - RNA, 17 nt, Variola virus
auacauucgaaaaaucu

SEQ ID NO: 3300203 - RNA, 18 nt, Variola virus
uuccaaucuauugcuacu

SEQ ID NO: 3300204 - RNA, 21 nt, Variola virus
cagaacgaauuaugauagaaa

SEQ ID NO: 3300205 - RNA, 21 nt, Variola virus
uaaaguaugaacaaagaaaug

SEQ ID NO: 3300206 - RNA, 21 nt, Variola virus
auuuccaaagauacacacauu

SEQ ID NO: 3300207 - RNA, 12 nt, Variola virus
aagaauggauga

SEQ ID NO: 3300208 - RNA, 14 nt, Variola virus
uauuugucuuugaa

SEQ ID NO: 3300209 - RNA, 18 nt, Variola virus
auaaacaccaagaaagcu

SEQ ID NO: 3300210 - RNA, 19 nt, Variola virus
uaagagauaucuaucuauu

SEQ ID NO: 3300211 - RNA, 15 nt, Variola virus
cauaauauuaaacac

SEQ ID NO: 3300212 - RNA, 14 nt, Variola virus
uagaucucuagaau

SEQ ID NO: 3300213 - RNA, 18 nt, Variola virus
auaugccuccagaaguug

SEQ ID NO: 3300214 - RNA, 23 nt, Variola virus
aauaauacaauauuuuucguuua

SEQ ID NO: 3300215 - RNA, 22 nt, Variola virus
aaugugguaugucuccauuaca

SEQ ID NO: 3300216 - RNA, 20 nt, Variola virus
aaacgacauugucagaaauu

SEQ ID NO: 3300217 - RNA, 21 nt, Variola virus
uuaaguucuggaauauuauca

SEQ ID NO: 3300218 - RNA, 16 nt, Variola virus
uauucccaaacauaca

SEQ ID NO: 3300219 - RNA, 17 nt, Variola virus
ucacuaacaauaacuag

SEQ ID NO: 3300220 - RNA, 13 nt, Variola virus
uacugcaauaaaa

SEQ ID NO: 3300221 - RNA, 23 nt, Variola virus
auuaccauagaagauguuagaaa

SEQ ID NO: 3300222 - RNA, 16 nt, Variola virus
guauuuuauuuuggaa

SEQ ID NO: 3300223 - RNA, 18 nt, Variola virus
ggauuaucaaaucuuuaa

SEQ ID NO: 3300224 - RNA, 13 nt, Variola virus
uuaucauacuguc

SEQ ID NO: 3300225 - RNA, 15 nt, Variola virus
acaggaaagaaguau

SEQ ID NO: 3300226 - RNA, 15 nt, Variola virus
ccaugaaagaaagaa

SEQ ID NO: 3300227 - RNA, 22 nt, Variola virus
ucguauuccugacgucuagagu

SEQ ID NO: 3300228 - RNA, 21 nt, Variola virus
guccauuaaaguuaaauugug

SEQ ID NO: 3300229 - RNA, 22 nt, Variola virus
accauccuuuaaaaaaaaugau

SEQ ID NO: 3300230 - RNA, 12 nt, Variola virus
cauuggaagcaa

SEQ ID NO: 3300231 - RNA, 16 nt, Variola virus
ucauauggaagauguu

SEQ ID NO: 3300232 - RNA, 17 nt, Variola virus
uaaauguauauuuucca

SEQ ID NO: 3300233 - RNA, 16 nt, Variola virus
aaccaugagugugaaa

SEQ ID NO: 3300234 - RNA, 22 nt, Variola virus
uauauaagacacagaaauacug

SEQ ID NO: 3300235 - RNA, 14 nt, Variola virus
uugaaaauuauuuu

SEQ ID NO: 3300236 - RNA, 21 nt, Variola virus
uacgcuauuaaucuuuaaaau

SEQ ID NO: 3300237 - RNA, 19 nt, Variola virus
aauuuccgucuaucaucua

SEQ ID NO: 3300238 - RNA, 12 nt, Variola virus
gccaacaaauau

SEQ ID NO: 3300239 - RNA, 13 nt, Variola virus
acguuaacagaga

SEQ ID NO: 3300240 - RNA, 20 nt, Variola virus
uuucauuuguauacacauaa

SEQ ID NO: 3300241 - RNA, 20 nt, Variola virus
acauuagaccguuuaauaga

SEQ ID NO: 3300242 - RNA, 17 nt, Variola virus
auguuggcaacgacaaa

SEQ ID NO: 3300243 - RNA, 15 nt, Variola virus
uaaacuaacuacaaa

SEQ ID NO: 3300244 - RNA, 19 nt, Variola virus
uggaccauuaauaggaaaa

SEQ ID NO: 3300245 - RNA, 21 nt, Variola virus
gcuacucguuuggaaucacaa

SEQ ID NO: 3300246 - RNA, 22 nt, Variola virus
auuuuguaguuaauuuaucaca

SEQ ID NO: 3300247 - RNA, 14 nt, Variola virus
ugguuuaauuauuu

SEQ ID NO: 3300248 - RNA, 21 nt, Variola virus
uuuucacuuuuuauaauuuua

SEQ ID NO: 3300249 - RNA, 15 nt, Variola virus
caugauuaguauuuu

SEQ ID NO: 3300250 - RNA, 13 nt, Variola virus
auuaccuuaauaa

SEQ ID NO: 3300251 - RNA, 23 nt, Variola virus
uaaagaaguagcuaauguuguga

SEQ ID NO: 3300252 - RNA, 20 nt, Variola virus
acaguguaugaaaaguuaca

SEQ ID NO: 3300253 - RNA, 13 nt, Variola virus
aucacuucaauaa

SEQ ID NO: 3300254 - RNA, 14 nt, Variola virus
uaucucuuaaugag

SEQ ID NO: 3300255 - RNA, 12 nt, Variola virus
uaacuauuugca

SEQ ID NO: 3300256 - RNA, 22 nt, Variola virus
acauucaugauaaacuuaauga

SEQ ID NO: 3300257 - RNA, 16 nt, Variola virus
cauaacuguauaaaau

SEQ ID NO: 3300258 - RNA, 20 nt, Variola virus
uuaguaucuagcucuguaaa

SEQ ID NO: 3300259 - RNA, 20 nt, Variola virus
aaauaaaaagguagauguuc

SEQ ID NO: 3300260 - RNA, 14 nt, Variola virus
cuguagauaguuuu

SEQ ID NO: 3300261 - RNA, 19 nt, Variola virus
caauaaaaauaaacuagaa

SEQ ID NO: 3300262 - RNA, 21 nt, Variola virus
gaacacgauuauuauaaaaua

SEQ ID NO: 3300263 - RNA, 13 nt, Variola virus
uagugauagauuu

SEQ ID NO: 3300264 - RNA, 14 nt, Variola virus
aaagaauccuacau

SEQ ID NO: 3300265 - RNA, 16 nt, Variola virus
cgacucaguauacaaa

SEQ ID NO: 3300266 - RNA, 16 nt, Variola virus
auccucagacacagau

SEQ ID NO: 3300267 - RNA, 14 nt, Variola virus
cacagucaaacauu

SEQ ID NO: 3300268 - RNA, 16 nt, Variola virus
uguuucuuacauauuu

SEQ ID NO: 3300269 - RNA, 13 nt, Variola virus
accaaacauucuu

SEQ ID NO: 3300270 - RNA, 22 nt, Variola virus
acaauuuuuuuauaauaauucu

SEQ ID NO: 3300271 - RNA, 18 nt, Variola virus
ugaauauaauagauguau

SEQ ID NO: 3300272 - RNA, 15 nt, Variola virus
uagugacauaaacau

SEQ ID NO: 3300273 - RNA, 19 nt, Variola virus
auuauagcaauauguguaa

SEQ ID NO: 3300274 - RNA, 14 nt, Variola virus
augaaaaaaaacac

SEQ ID NO: 3300275 - RNA, 16 nt, Variola virus
caucgcauacaaaaac

SEQ ID NO: 3300276 - RNA, 17 nt, Variola virus
acguauugauaaauaga

SEQ ID NO: 3300277 - RNA, 14 nt, Variola virus
cguauauguuucua

SEQ ID NO: 3300278 - RNA, 14 nt, Variola virus
aaaagcauacguac

SEQ ID NO: 3300279 - RNA, 19 nt, Variola virus
ugccaaaguuuaaacugaa

SEQ ID NO: 3300280 - RNA, 15 nt, Variola virus
agcucaauauaaaug

SEQ ID NO: 3300281 - RNA, 22 nt, Variola virus
uauaguuaauaguguacuacaa

SEQ ID NO: 3300282 - RNA, 22 nt, Variola virus
auauagucuguguuacauaaua

SEQ ID NO: 3300283 - RNA, 20 nt, Variola virus
agucauaucuagaaugaaga

SEQ ID NO: 3300284 - RNA, 18 nt, Variola virus
cagaauauauaagacaca

SEQ ID NO: 3300285 - RNA, 17 nt, Variola virus
gucuuccuuauguagag

SEQ ID NO: 3300286 - RNA, 22 nt, Variola virus
ucuauccauuugucuuccuuaa

SEQ ID NO: 3300287 - RNA, 22 nt, Variola virus
aaugauuauguuguuaugagug

SEQ ID NO: 3300288 - RNA, 15 nt, Variola virus
auggauauauuaaag

SEQ ID NO: 3300289 - RNA, 19 nt, Variola virus
cgccucaguugucauaaac

SEQ ID NO: 3300290 - RNA, 13 nt, Variola virus
auaaauagacaaa

SEQ ID NO: 3300291 - RNA, 22 nt, Variola virus
agugggaugaaauccuauuuua

SEQ ID NO: 3300292 - RNA, 20 nt, Variola virus
uuuaauuucuuguaaucauu

SEQ ID NO: 3300293 - RNA, 22 nt, Variola virus
uaacuaugauaucucuauuaau

SEQ ID NO: 3300294 - RNA, 17 nt, Variola virus
cauucugcaauauuguu

SEQ ID NO: 3300295 - RNA, 13 nt, Variola virus
uuacauucucauu

SEQ ID NO: 3300296 - RNA, 16 nt, Variola virus
uucaaaauuauuuacc

SEQ ID NO: 3300297 - RNA, 20 nt, Variola virus
acuuauggacaacagaggau

SEQ ID NO: 3300298 - RNA, 13 nt, Variola virus
cuaacuuaucuag

SEQ ID NO: 3300299 - RNA, 13 nt, Variola virus
aagagaauuuucu

SEQ ID NO: 3300300 - RNA, 15 nt, Variola virus
auacgucaaggaaag

SEQ ID NO: 3300301 - RNA, 16 nt, Variola virus
gaaagugcaaaugagg

SEQ ID NO: 3300302 - RNA, 23 nt, Variola virus
uuaaaaaguugacagaaccuugu

SEQ ID NO: 3300303 - RNA, 19 nt, Variola virus
gaaugaagauaucauuaau

SEQ ID NO: 3300304 - RNA, 20 nt, Variola virus
uugauggaaguaaaagauuu

SEQ ID NO: 3300305 - RNA, 15 nt, Variola virus
ugaagaagaaaacaa

SEQ ID NO: 3300306 - RNA, 22 nt, Variola virus
aaaugguguaacucucuggaag

SEQ ID NO: 3300307 - RNA, 16 nt, Variola virus
acuaauacaucugaaa

SEQ ID NO: 3300308 - RNA, 19 nt, Variola virus
agaucugcguguaaaaagu

SEQ ID NO: 3300309 - RNA, 14 nt, Variola virus
aggagauauugaaa

SEQ ID NO: 3300310 - RNA, 16 nt, Variola virus
aaaagacguaaauauu

SEQ ID NO: 3300311 - RNA, 17 nt, Variola virus
ucuucuauuuuaucauu

SEQ ID NO: 3300312 - RNA, 23 nt, Variola virus
uuuacacaguaaccaaaaugaaa

SEQ ID NO: 3300313 - RNA, 17 nt, Variola virus
caaaauauaauguugua

SEQ ID NO: 3300314 - RNA, 22 nt, Variola virus
auaguauauacguuauugucaa

SEQ ID NO: 3300315 - RNA, 18 nt, Variola virus
acauauaacuuuccauca

SEQ ID NO: 3300316 - RNA, 14 nt, Variola virus
auaugcaacuauaa

SEQ ID NO: 3300317 - RNA, 13 nt, Variola virus
gcaauaauacaac

SEQ ID NO: 3300318 - RNA, 18 nt, Variola virus
uaacauguuauagaauau

SEQ ID NO: 3300319 - RNA, 12 nt, Variola virus
cgucaguauuua

SEQ ID NO: 3300320 - RNA, 22 nt, Variola virus
acucuaagaacuuauuaaugaa

SEQ ID NO: 3300321 - RNA, 18 nt, Variola virus
acaacaaaugauaaucaa

SEQ ID NO: 3300322 - RNA, 18 nt, Variola virus
uuaucaucauccauuaau

SEQ ID NO: 3300323 - RNA, 22 nt, Variola virus
auacuuuaacaucacuaauauc

SEQ ID NO: 3300324 - RNA, 22 nt, Variola virus
gcaaaaaaucugauagaaagaa

SEQ ID NO: 3300325 - RNA, 22 nt, Variola virus
uaugagggaaaagauucucauu

SEQ ID NO: 3300326 - RNA, 14 nt, Variola virus
uaucaauagcaguu

SEQ ID NO: 3300327 - RNA, 23 nt, Variola virus
auugaugugucuguuuauacaau

SEQ ID NO: 3300328 - RNA, 20 nt, Variola virus
uaacaguuuugcuaauuaau

SEQ ID NO: 3300329 - RNA, 13 nt, Variola virus
gauguacauguau

SEQ ID NO: 3300330 - RNA, 12 nt, Variola virus
ucuucuaucaaa

SEQ ID NO: 3300331 - RNA, 13 nt, Variola virus
auacuaucaaaau

SEQ ID NO: 3300332 - RNA, 14 nt, Variola virus
cuuuuguuuagaau

SEQ ID NO: 3300333 - RNA, 18 nt, Variola virus
cgaugauuaaugacgaua

SEQ ID NO: 3300334 - RNA, 22 nt, Variola virus
ugauaguauuccaauaucugag

SEQ ID NO: 3300335 - RNA, 13 nt, Variola virus
uaugaaucuggau

SEQ ID NO: 3300336 - RNA, 20 nt, Variola virus
ucauacgauaugccuccaga

SEQ ID NO: 3300337 - RNA, 23 nt, Variola virus
aauucucuuacgucgauauuucu

SEQ ID NO: 3300338 - RNA, 19 nt, Variola virus
auaugucuagaacggcaau

SEQ ID NO: 3300339 - RNA, 11 nt, Variola virus
caaagaaagag

SEQ ID NO: 3300340 - RNA, 16 nt, Variola virus
cauuaaaaugauuauu

SEQ ID NO: 3300341 - RNA, 19 nt, Variola virus
uuuaucaaccauucaaaaa

SEQ ID NO: 3300342 - RNA, 18 nt, Variola virus
uugcucaaauaauacuau

SEQ ID NO: 3300343 - RNA, 16 nt, Variola virus
gucuaguaaguagaaa

SEQ ID NO: 3300344 - RNA, 14 nt, Variola virus
acauguauuaaaga

SEQ ID NO: 3300345 - RNA, 22 nt, Variola virus
guuagauauuuagcaauugcau

SEQ ID NO: 3300346 - RNA, 19 nt, Variola virus
gacuaucagacucuucuau

SEQ ID NO: 3300347 - RNA, 18 nt, Variola virus
aauaguauacgcagaaaa

SEQ ID NO: 3300348 - RNA, 19 nt, Variola virus
acguuucugucaacaaugu

SEQ ID NO: 3300349 - RNA, 17 nt, Variola virus
ucuaaucacuuuaacuu

SEQ ID NO: 3300350 - RNA, 21 nt, Variola virus
aaugauacacuaaguauauac

SEQ ID NO: 3300351 - RNA, 16 nt, Variola virus
ucuuggauuucauaua

SEQ ID NO: 3300352 - RNA, 20 nt, Variola virus
gagaucuaaacgaucuaguu

SEQ ID NO: 3300353 - RNA, 13 nt, Variola virus
aauaaugaauauu

SEQ ID NO: 3300354 - RNA, 21 nt, Variola virus
uacagauuguaguucuauaau

SEQ ID NO: 3300355 - RNA, 17 nt, Variola virus
cucccuuguguaacguu

SEQ ID NO: 3300356 - RNA, 16 nt, Variola virus
uagauuuuccauccac

SEQ ID NO: 3300357 - RNA, 24 nt, Variola virus
ugaauuguuucuuuuagaagugau

SEQ ID NO: 3300358 - RNA, 23 nt, Variola virus
ucaauguccugcuauacuucggc

SEQ ID NO: 3300359 - RNA, 20 nt, Variola virus
agauacauuacaucuugaua

SEQ ID NO: 3300360 - RNA, 20 nt, Variola virus
acuguuuucuagauggaaau

SEQ ID NO: 3300361 - RNA, 15 nt, Variola virus
aaauuuaaaaugagu

SEQ ID NO: 3300362 - RNA, 15 nt, Variola virus
ucauugcuuucuaga

SEQ ID NO: 3300363 - RNA, 15 nt, Variola virus
cucaccaauaauuuu

SEQ ID NO: 3300364 - RNA, 14 nt, Variola virus
auuaucuacagaug

SEQ ID NO: 3300365 - RNA, 22 nt, Variola virus
uccauucucucaaucacuacau

SEQ ID NO: 3300366 - RNA, 13 nt, Variola virus
uuacaucauuaag

SEQ ID NO: 3300367 - RNA, 20 nt, Variola virus
cauuacuaguugauaacaau

SEQ ID NO: 3300368 - RNA, 14 nt, Variola virus
accuagaacaaugu

SEQ ID NO: 3300369 - RNA, 16 nt, Variola virus
aauauuuacuaauauc

SEQ ID NO: 3300370 - RNA, 21 nt, Variola virus
ugauuaaucaauuaguagaga

SEQ ID NO: 3300371 - RNA, 19 nt, Variola virus
uacuauauacaauaucacu

SEQ ID NO: 3300372 - RNA, 15 nt, Variola virus
gauaaugauaaugac

SEQ ID NO: 3300373 - RNA, 21 nt, Variola virus
aaguaauuuucuuuguuggaa

SEQ ID NO: 3300374 - RNA, 17 nt, Variola virus
auaaaauuaaugagauu

SEQ ID NO: 3300375 - RNA, 19 nt, Variola virus
cucauguaaccuacuagaa

SEQ ID NO: 3300376 - RNA, 20 nt, Variola virus
aggauuuacuaaguaauuac

SEQ ID NO: 3300377 - RNA, 17 nt, Variola virus
uaauguuguuaccauau

SEQ ID NO: 3300378 - RNA, 17 nt, Variola virus
aacaaauagacuuuuua

SEQ ID NO: 3300379 - RNA, 17 nt, Variola virus
ccauauauccaauaaag

SEQ ID NO: 3300380 - RNA, 19 nt, Variola virus
uaggauuuuggacuuauau

SEQ ID NO: 3300381 - RNA, 21 nt, Variola virus
aaguauuuuuagagcucuugg

SEQ ID NO: 3300382 - RNA, 15 nt, Variola virus
agaaucguaauggau

SEQ ID NO: 3300383 - RNA, 11 nt, Variola virus
ucauuaaacag

SEQ ID NO: 3300384 - RNA, 14 nt, Variola virus
caggaauagaugua

SEQ ID NO: 3300385 - RNA, 24 nt, Variola virus
uauacugaguuggcuaugaucuug

SEQ ID NO: 3300386 - RNA, 20 nt, Variola virus
aaugaauggcguaccaguuu

SEQ ID NO: 3300387 - RNA, 23 nt, Variola virus
uuuaacuugcgggguuaaucuca

SEQ ID NO: 3300388 - RNA, 12 nt, Variola virus
uuuuauaaacaa

SEQ ID NO: 3300389 - RNA, 15 nt, Variola virus
caauaaaaaaaauug

SEQ ID NO: 3300390 - RNA, 21 nt, Variola virus
caaacaauccaaaaaaugaaa

SEQ ID NO: 3300391 - RNA, 15 nt, Variola virus
auuuugucauuaacu

SEQ ID NO: 3300392 - RNA, 14 nt, Variola virus
caugucaacaaaaa

SEQ ID NO: 3300393 - RNA, 15 nt, Variola virus
uauuaauccuuugau

SEQ ID NO: 3300394 - RNA, 19 nt, Variola virus
uacaucuauauugcuacau

SEQ ID NO: 3300395 - RNA, 17 nt, Variola virus
auuccaauuauuugaac

SEQ ID NO: 3300396 - RNA, 15 nt, Variola virus
ccauuaaucacugau

SEQ ID NO: 3300397 - RNA, 15 nt, Variola virus
uuaaaucguuguucu

SEQ ID NO: 3300398 - RNA, 14 nt, Variola virus
aaaagacuauacau

SEQ ID NO: 3300399 - RNA, 14 nt, Variola virus
cauuuauacacaau

SEQ ID NO: 3300400 - RNA, 19 nt, Variola virus
auauagucuuguuaaacgu

SEQ ID NO: 3300401 - RNA, 14 nt, Variola virus
ucucucaaaucaga

SEQ ID NO: 3300402 - RNA, 14 nt, Variola virus
aauacuuaaaaaug

SEQ ID NO: 3300403 - RNA, 19 nt, Variola virus
uacuagugguaucaagaag

SEQ ID NO: 3300404 - RNA, 18 nt, Variola virus
uaccagugauuauccauu

SEQ ID NO: 3300405 - RNA, 14 nt, Variola virus
uucaacaguuucua

SEQ ID NO: 3300406 - RNA, 19 nt, Variola virus
aacuuuaaacagaaauaua

SEQ ID NO: 3300407 - RNA, 22 nt, Variola virus
uuaacucauugcuuucuagaau

SEQ ID NO: 3300408 - RNA, 18 nt, Variola virus
caaaaagggugcgguacu

SEQ ID NO: 3300409 - RNA, 19 nt, Variola virus
cuuaauaacaaaacuaauu

SEQ ID NO: 3300410 - RNA, 16 nt, Variola virus
uacaugauuaauacau

SEQ ID NO: 3300411 - RNA, 18 nt, Variola virus
ucuauacccauuauguaa

SEQ ID NO: 3300412 - RNA, 18 nt, Variola virus
ugaauauagaacaucauu

SEQ ID NO: 3300413 - RNA, 20 nt, Variola virus
caaaaccaacacuuaucaau

SEQ ID NO: 3300414 - RNA, 22 nt, Variola virus
acauccaggguccauuuucugu

SEQ ID NO: 3300415 - RNA, 17 nt, Variola virus
uauuccguauuuaucua

SEQ ID NO: 3300416 - RNA, 14 nt, Variola virus
uaaauguaaauuca

SEQ ID NO: 3300417 - RNA, 14 nt, Variola virus
uaaugcuacagaua

SEQ ID NO: 3300418 - RNA, 23 nt, Variola virus
auuuucagcauggauuucucaua

SEQ ID NO: 3300419 - RNA, 19 nt, Variola virus
guucuacauaaaacaucau

SEQ ID NO: 3300420 - RNA, 12 nt, Variola virus
aaauuuuucuac

SEQ ID NO: 3300421 - RNA, 17 nt, Variola virus
accguguguaaaaugac

SEQ ID NO: 3300422 - RNA, 20 nt, Variola virus
agaacaaugucaaaauauga

SEQ ID NO: 3300423 - RNA, 16 nt, Variola virus
guaaaacaaaauuaga

SEQ ID NO: 3300424 - RNA, 23 nt, Variola virus
caauauagucuguguuacauaau

SEQ ID NO: 3300425 - RNA, 14 nt, Variola virus
auguuggaaauacu

SEQ ID NO: 3300426 - RNA, 15 nt, Variola virus
uauuuccaucaugau

SEQ ID NO: 3300427 - RNA, 17 nt, Variola virus
augauguuuuuagaaaa

SEQ ID NO: 3300428 - RNA, 20 nt, Variola virus
agcauauuguaauaucuuaa

SEQ ID NO: 3300429 - RNA, 19 nt, Variola virus
augaacacaaaugguguau

SEQ ID NO: 3300430 - RNA, 18 nt, Variola virus
ucucuaagacgucucauu

SEQ ID NO: 3300431 - RNA, 20 nt, Variola virus
aaguauuugaacauguagau

SEQ ID NO: 3300432 - RNA, 16 nt, Variola virus
aacaauuccacaaauu

SEQ ID NO: 3300433 - RNA, 16 nt, Variola virus
acguuuaaacauucuu

SEQ ID NO: 3300434 - RNA, 19 nt, Variola virus
aguucauauuuauuagaua

SEQ ID NO: 3300435 - RNA, 22 nt, Variola virus
uaauuuccaacccuucagaaua

SEQ ID NO: 3300436 - RNA, 12 nt, Variola virus
aauaagaaauac

SEQ ID NO: 3300437 - RNA, 21 nt, Variola virus
accaucucauaaaauaguucu

SEQ ID NO: 3300438 - RNA, 18 nt, Variola virus
auuauaaucauuauuaac

SEQ ID NO: 3300439 - RNA, 16 nt, Variola virus
aucacacuuaaaauaa

SEQ ID NO: 3300440 - RNA, 22 nt, Variola virus
ucucaugucuaagaauuacaaa

SEQ ID NO: 3300441 - RNA, 19 nt, Variola virus
aaacauguaugagaaaaac

SEQ ID NO: 3300442 - RNA, 18 nt, Variola virus
uuuuguggacauuuucua

SEQ ID NO: 3300443 - RNA, 18 nt, Variola virus
uaguagcgaaaacuauau

SEQ ID NO: 3300444 - RNA, 15 nt, Variola virus
agacagagauacuaa

SEQ ID NO: 3300445 - RNA, 19 nt, Variola virus
acaacgagagauauuuuca

SEQ ID NO: 3300446 - RNA, 18 nt, Variola virus
aauucauagcugagaaua

SEQ ID NO: 3300447 - RNA, 22 nt, Variola virus
uauaaauaaaagacaaaucuug

SEQ ID NO: 3300448 - RNA, 22 nt, Variola virus
aucucuaacgagugaucaaauu

SEQ ID NO: 3300449 - RNA, 14 nt, Variola virus
aacgguauaugaau

SEQ ID NO: 3300450 - RNA, 20 nt, Variola virus
uccucaacgugauuauucuc

SEQ ID NO: 3300451 - RNA, 16 nt, Variola virus
uauaucuaacaucuug

SEQ ID NO: 3300452 - RNA, 23 nt, Variola virus
caugugacuuuucucuaaaugau

SEQ ID NO: 3300453 - RNA, 15 nt, Variola virus
auaagaugcaaacau

SEQ ID NO: 3300454 - RNA, 21 nt, Variola virus
uuccguuggaugguaauaaac

SEQ ID NO: 3300455 - RNA, 12 nt, Variola virus
uauagaacauca

SEQ ID NO: 3300456 - RNA, 22 nt, Variola virus
gauaauaaaauuacuaguauca

SEQ ID NO: 3300457 - RNA, 15 nt, Variola virus
uuaaaaacaaacuuu

SEQ ID NO: 3300458 - RNA, 21 nt, Variola virus
auaacaaguuuccuguaaauu

SEQ ID NO: 3300459 - RNA, 18 nt, Variola virus
augaaauaaguacaauga

SEQ ID NO: 3300460 - RNA, 21 nt, Variola virus
caaucggauuaauaucucuau

SEQ ID NO: 3300461 - RNA, 19 nt, Variola virus
cuaguggcagacugugcau

SEQ ID NO: 3300462 - RNA, 16 nt, Variola virus
auacaauaaauguuua

SEQ ID NO: 3300463 - RNA, 13 nt, Variola virus
aauaaaagaacua

SEQ ID NO: 3300464 - RNA, 20 nt, Variola virus
cguugaugaggcacauaaua

SEQ ID NO: 3300465 - RNA, 10 nt, Variola virus
gaucugaaga

SEQ ID NO: 3300466 - RNA, 17 nt, Variola virus
caugauuccguauucug

SEQ ID NO: 3300467 - RNA, 13 nt, Variola virus
aucauuucuauaa

SEQ ID NO: 3300468 - RNA, 23 nt, Variola virus
gaaacauauucuaugaauuuaua

SEQ ID NO: 3300469 - RNA, 21 nt, Variola virus
aucauuaaugauauaguuuuu

SEQ ID NO: 3300470 - RNA, 20 nt, Variola virus
uuucucuuuuuauccucauu

SEQ ID NO: 3300471 - RNA, 16 nt, Variola virus
aauauaccauuaaaaa

SEQ ID NO: 3300472 - RNA, 17 nt, Variola virus
uaauaucagaauugucu

SEQ ID NO: 3300473 - RNA, 17 nt, Variola virus
ucaaaauauauagagaa

SEQ ID NO: 3300474 - RNA, 19 nt, Variola virus
cguauaaaaaauauaacau

SEQ ID NO: 3300475 - RNA, 18 nt, Variola virus
uauuauccaauuauuaua

SEQ ID NO: 3300476 - RNA, 18 nt, Variola virus
uuuacuguggcuagauac

SEQ ID NO: 3300477 - RNA, 20 nt, Variola virus
gucaucaaguagugauuuug

SEQ ID NO: 3300478 - RNA, 23 nt, Variola virus
uugaaacugaauagaugcaucua

SEQ ID NO: 3300479 - RNA, 14 nt, Variola virus
uaugugcauuacca

SEQ ID NO: 3300480 - RNA, 18 nt, Variola virus
ugguaguugaaucaacau

SEQ ID NO: 3300481 - RNA, 16 nt, Variola virus
uguguugaacaucagu

SEQ ID NO: 3300482 - RNA, 16 nt, Variola virus
aaaucaguaacuaugu

SEQ ID NO: 3300483 - RNA, 17 nt, Variola virus
ucauaauaugagauguu

SEQ ID NO: 3300484 - RNA, 20 nt, Variola virus
ugacuaguuguagaauuuga

SEQ ID NO: 3300485 - RNA, 17 nt, Variola virus
acaacauguuauaacua

SEQ ID NO: 3300486 - RNA, 16 nt, Variola virus
aauguguuaaaaagaa

SEQ ID NO: 3300487 - RNA, 19 nt, Variola virus
agaaacauaacaaugagua

SEQ ID NO: 3300488 - RNA, 15 nt, Variola virus
auggucagugcauaa

SEQ ID NO: 3300489 - RNA, 14 nt, Variola virus
uguaaaaauauguu

SEQ ID NO: 3300490 - RNA, 18 nt, Variola virus
aggguaucuaauuuccug

SEQ ID NO: 3300491 - RNA, 16 nt, Variola virus
ucaauucgagaaagau

SEQ ID NO: 3300492 - RNA, 14 nt, Variola virus
cgauuuuaaaucau

SEQ ID NO: 3300493 - RNA, 18 nt, Variola virus
agauguuugagaauauau

SEQ ID NO: 3300494 - RNA, 15 nt, Variola virus
acggaaguaaacgaa

SEQ ID NO: 3300495 - RNA, 12 nt, Variola virus
acaauauaacau

SEQ ID NO: 3300496 - RNA, 20 nt, Variola virus
auagugacauaaacauagaa

SEQ ID NO: 3300497 - RNA, 13 nt, Variola virus
gccgcaugaugaa

SEQ ID NO: 3300498 - RNA, 22 nt, Variola virus
aaacaauuucacaaauggaugu

SEQ ID NO: 3300499 - RNA, 17 nt, Variola virus
uagauucagaaaugcua

SEQ ID NO: 3300500 - RNA, 21 nt, Variola virus
ccugguagacggaauguuuua

SEQ ID NO: 3300501 - RNA, 18 nt, Variola virus
uagugcucaaacaaaaug

SEQ ID NO: 3300502 - RNA, 21 nt, Variola virus
aaucaguacguucuucauuua

SEQ ID NO: 3300503 - RNA, 20 nt, Variola virus
acaaaacguuuauaugaagu

SEQ ID NO: 3300504 - RNA, 15 nt, Variola virus
uaaaaauaaacauug

SEQ ID NO: 3300505 - RNA, 17 nt, Variola virus
aacaugugugaaaauau

SEQ ID NO: 3300506 - RNA, 16 nt, Variola virus
uuaaaauauauuauca

SEQ ID NO: 3300507 - RNA, 20 nt, Variola virus
caucuauuguuauauaacaa

SEQ ID NO: 3300508 - RNA, 16 nt, Variola virus
cauaacauguaucaau

SEQ ID NO: 3300509 - RNA, 15 nt, Variola virus
aaauacguccaucag

SEQ ID NO: 3300510 - RNA, 19 nt, Variola virus
gguaaggucuuagaaauag

SEQ ID NO: 3300511 - RNA, 23 nt, Variola virus
uuuagaucauuaacucuagaaau

SEQ ID NO: 3300512 - RNA, 20 nt, Variola virus
uaguaaaauaaucauacaau

SEQ ID NO: 3300513 - RNA, 20 nt, Variola virus
cuaagcaauagguaauaacu

SEQ ID NO: 3300514 - RNA, 20 nt, Variola virus
gaucuauauguuuuauuaau

SEQ ID NO: 3300515 - RNA, 19 nt, Variola virus
ccaaacuccauaauuugcu

SEQ ID NO: 3300516 - RNA, 13 nt, Variola virus
aaguuaugacauu

SEQ ID NO: 3300517 - RNA, 17 nt, Variola virus
uucauuaauuucugaua

SEQ ID NO: 3300518 - RNA, 14 nt, Variola virus
aaucuguuucuaaa

SEQ ID NO: 3300519 - RNA, 22 nt, Variola virus
aacugaaucaccuaccuuagau

SEQ ID NO: 3300520 - RNA, 18 nt, Variola virus
acaauaguguucugaauu

SEQ ID NO: 3300521 - RNA, 22 nt, Variola virus
agcauucuuuccagaacuauau

SEQ ID NO: 3300522 - RNA, 19 nt, Variola virus
guaauaccaguuauguuca

SEQ ID NO: 3300523 - RNA, 13 nt, Variola virus
uuuuuagcaaggu

SEQ ID NO: 3300524 - RNA, 23 nt, Variola virus
acuauuaaaacuaacaaauccgu

SEQ ID NO: 3300525 - RNA, 20 nt, Variola virus
uguucacaaaaauacauaaa

SEQ ID NO: 3300526 - RNA, 16 nt, Variola virus
acaaacaggauaucua

SEQ ID NO: 3300527 - RNA, 17 nt, Variola virus
ugaugaacuaauaaagg

SEQ ID NO: 3300528 - RNA, 22 nt, Variola virus
uaacaggucauauucucauaau

SEQ ID NO: 3300529 - RNA, 17 nt, Variola virus
gaauguuuuacucugga

SEQ ID NO: 3300530 - RNA, 23 nt, Variola virus
gauggugccaccguaguguauau

SEQ ID NO: 3300531 - RNA, 23 nt, Variola virus
guacccuggauacgaaauaaauu

SEQ ID NO: 3300532 - RNA, 14 nt, Variola virus
uccuauuacauaua

SEQ ID NO: 3300533 - RNA, 15 nt, Variola virus
uaucucuuaaaugcu

SEQ ID NO: 3300534 - RNA, 22 nt, Variola virus
aagccacguaggaguuaucaca

SEQ ID NO: 3300535 - RNA, 20 nt, Variola virus
auaauggcgcuaucuuuuaa

SEQ ID NO: 3300536 - RNA, 18 nt, Variola virus
ucuagaucucuagaauau

SEQ ID NO: 3300537 - RNA, 12 nt, Variola virus
ugacacauauca

SEQ ID NO: 3300538 - RNA, 16 nt, Variola virus
uaaaccagacaaccac

SEQ ID NO: 3300539 - RNA, 14 nt, Variola virus
cuauaaguauaaau

SEQ ID NO: 3300540 - RNA, 13 nt, Variola virus
auaagaaauauga

SEQ ID NO: 3300541 - RNA, 21 nt, Variola virus
aucuagacuuucuguuauuau

SEQ ID NO: 3300542 - RNA, 21 nt, Variola virus
auuaaaauaaauauucuucau

SEQ ID NO: 3300543 - RNA, 13 nt, Variola virus
uaucuauacauac

SEQ ID NO: 3300544 - RNA, 21 nt, Variola virus
agauauaaaaugcguauucca

SEQ ID NO: 3300545 - RNA, 14 nt, Variola virus
auggauaauucucc

SEQ ID NO: 3300546 - RNA, 12 nt, Variola virus
auaauuucuaga

SEQ ID NO: 3300547 - RNA, 15 nt, Variola virus
cucaacgcgauaucu

SEQ ID NO: 3300548 - RNA, 16 nt, Variola virus
auaucuauucagauac

SEQ ID NO: 3300549 - RNA, 17 nt, Variola virus
aucauacauuaugaacu

SEQ ID NO: 3300550 - RNA, 22 nt, Variola virus
uguguggaugcuacuucaucua

SEQ ID NO: 3300551 - RNA, 19 nt, Variola virus
uaagacguauucucuacau

SEQ ID NO: 3300552 - RNA, 15 nt, Variola virus
caauaauaguaacau

SEQ ID NO: 3300553 - RNA, 14 nt, Variola virus
auaucaucaaacaa

SEQ ID NO: 3300554 - RNA, 17 nt, Variola virus
gacacuauucauguaau

SEQ ID NO: 3300555 - RNA, 13 nt, Variola virus
acacauuaacauc

SEQ ID NO: 3300556 - RNA, 15 nt, Variola virus
auuaagacauauauu

SEQ ID NO: 3300557 - RNA, 18 nt, Variola virus
uuauauacucuaaucuuu

SEQ ID NO: 3300558 - RNA, 17 nt, Variola virus
ggaauauauuuggauuu

SEQ ID NO: 3300559 - RNA, 19 nt, Variola virus
guaucgcauuaauacuguu

SEQ ID NO: 3300560 - RNA, 20 nt, Variola virus
acauuucagcaaucuaacau

SEQ ID NO: 3300561 - RNA, 15 nt, Variola virus
auuuuauacuagagu

SEQ ID NO: 3300562 - RNA, 20 nt, Variola virus
uagcguugcuucuacauaaa

SEQ ID NO: 3300563 - RNA, 15 nt, Variola virus
auccgauaaacauug

SEQ ID NO: 3300564 - RNA, 21 nt, Variola virus
ugacuauuguguguaaaguau

SEQ ID NO: 3300565 - RNA, 20 nt, Variola virus
uccguauuguauuagaguau

SEQ ID NO: 3300566 - RNA, 15 nt, Variola virus
uauauauuugaaaau

SEQ ID NO: 3300567 - RNA, 20 nt, Variola virus
guauacacaaaaagaaagaa

SEQ ID NO: 3300568 - RNA, 19 nt, Variola virus
ugcuaauauauucuuacag

SEQ ID NO: 3300569 - RNA, 14 nt, Variola virus
agucuuaaugauac

SEQ ID NO: 3300570 - RNA, 15 nt, Variola virus
auguuggaaauacua

SEQ ID NO: 3300571 - RNA, 22 nt, Variola virus
ggagaguauccucuaugaagaa

SEQ ID NO: 3300572 - RNA, 17 nt, Variola virus
gccgucuuuaucucuua

SEQ ID NO: 3300573 - RNA, 21 nt, Variola virus
aucauauuccggcguaugaau

SEQ ID NO: 3300574 - RNA, 18 nt, Variola virus
ugaacauaaaacuaauau

SEQ ID NO: 3300575 - RNA, 23 nt, Variola virus
uacuacaauacgguuuaccgaaa

SEQ ID NO: 3300576 - RNA, 14 nt, Variola virus
auguuauaaaaaug

SEQ ID NO: 3300577 - RNA, 18 nt, Variola virus
aguaugacuuacuuguau

SEQ ID NO: 3300578 - RNA, 12 nt, Variola virus
aaauacuaguau

SEQ ID NO: 3300579 - RNA, 16 nt, Variola virus
aaucggagaauguuuc

SEQ ID NO: 3300580 - RNA, 20 nt, Variola virus
uagcguguuuuaaauccuua

SEQ ID NO: 3300581 - RNA, 15 nt, Variola virus
aauccaaacaucacu

SEQ ID NO: 3300582 - RNA, 17 nt, Variola virus
gaauaucugaugauauu

SEQ ID NO: 3300583 - RNA, 15 nt, Variola virus
gugaagaauggaaac

SEQ ID NO: 3300584 - RNA, 13 nt, Variola virus
ucuaucucaaaau

SEQ ID NO: 3300585 - RNA, 20 nt, Variola virus
aguuuggcaauuaaaaauua

SEQ ID NO: 3300586 - RNA, 20 nt, Variola virus
augucaaaacuuguucaauu

SEQ ID NO: 3300587 - RNA, 23 nt, Variola virus
uuuaauauccaaucuuauuacuu

SEQ ID NO: 3300588 - RNA, 23 nt, Variola virus
ucugaucuuaacuccucuauuaa

SEQ ID NO: 3300589 - RNA, 20 nt, Variola virus
cuggcauuggcuagguauau

SEQ ID NO: 3300590 - RNA, 15 nt, Variola virus
auccaugucugaaac

SEQ ID NO: 3300591 - RNA, 13 nt, Variola virus
ucuaaaauguaua

SEQ ID NO: 3300592 - RNA, 15 nt, Variola virus
gugaguuuuccuuaa

SEQ ID NO: 3300593 - RNA, 15 nt, Variola virus
ccucagguagguuua

SEQ ID NO: 3300594 - RNA, 15 nt, Variola virus
agaugauaucaguau

SEQ ID NO: 3300595 - RNA, 21 nt, Variola virus
cgugagaauauacuacaauug

SEQ ID NO: 3300596 - RNA, 12 nt, Variola virus
guaaagaaggag

SEQ ID NO: 3300597 - RNA, 22 nt, Variola virus
aucacauuauaugauucuguaa

SEQ ID NO: 3300598 - RNA, 13 nt, Variola virus
cugcaauaaaaca

SEQ ID NO: 3300599 - RNA, 15 nt, Variola virus
aaauaguuauuagaa

SEQ ID NO: 3300600 - RNA, 19 nt, Variola virus
gcaaucacuacaauaauua

SEQ ID NO: 3300601 - RNA, 23 nt, Variola virus
uaacaccuauaagauuaucaaaa

SEQ ID NO: 3300602 - RNA, 15 nt, Variola virus
gauauuaauaaugau

SEQ ID NO: 3300603 - RNA, 19 nt, Variola virus
cuccacaguuuuuaauuuc

SEQ ID NO: 3300604 - RNA, 12 nt, Variola virus
cgucuguggaug

SEQ ID NO: 3300605 - RNA, 12 nt, Variola virus
aacaucaagaau

SEQ ID NO: 3300606 - RNA, 14 nt, Variola virus
aaguagaaaauaua

SEQ ID NO: 3300607 - RNA, 15 nt, Variola virus
acaaauuacaauaau

SEQ ID NO: 3300608 - RNA, 22 nt, Variola virus
ucauggaauacauaaagaacga

SEQ ID NO: 3300609 - RNA, 18 nt, Variola virus
aaauuaucaaauacuuca

SEQ ID NO: 3300610 - RNA, 15 nt, Variola virus
uccaaguucuauagu

SEQ ID NO: 3300611 - RNA, 18 nt, Variola virus
gauauccuaucuauuauu

SEQ ID NO: 3300612 - RNA, 22 nt, Variola virus
agaaaagauuaagauuaaacau

SEQ ID NO: 3300613 - RNA, 18 nt, Variola virus
gaccgguuuaucauuaau

SEQ ID NO: 3300614 - RNA, 22 nt, Variola virus
uauaucgcauauuuauaucgug

SEQ ID NO: 3300615 - RNA, 20 nt, Variola virus
aaccagguaggcaguuuuau

SEQ ID NO: 3300616 - RNA, 13 nt, Variola virus
ccagauugaacau

SEQ ID NO: 3300617 - RNA, 24 nt, Variola virus
acagcagaaaaagacgagaucuga

SEQ ID NO: 3300618 - RNA, 22 nt, Variola virus
caauuaguagaguuuuauaacg

SEQ ID NO: 3300619 - RNA, 20 nt, Variola virus
auaucggacgcagaaauugg

SEQ ID NO: 3300620 - RNA, 12 nt, Variola virus
cguuuuucugau

SEQ ID NO: 3300621 - RNA, 15 nt, Variola virus
aucucgaugaaaaua

SEQ ID NO: 3300622 - RNA, 15 nt, Variola virus
uauuagaaauacacu

SEQ ID NO: 3300623 - RNA, 21 nt, Variola virus
uaaaagaauuuuuucggguuc

SEQ ID NO: 3300624 - RNA, 21 nt, Variola virus
cauaccaucuaucaaacaaaa

SEQ ID NO: 3300625 - RNA, 15 nt, Variola virus
uauauuagagaagau

SEQ ID NO: 3300626 - RNA, 23 nt, Variola virus
caaccauuaacggaugaaaauaa

SEQ ID NO: 3300627 - RNA, 17 nt, Variola virus
uaauauccgcuauuaca

SEQ ID NO: 3300628 - RNA, 21 nt, Variola virus
auaaucagucauaacaaaugu

SEQ ID NO: 3300629 - RNA, 12 nt, Variola virus
aaauccaaauuu

SEQ ID NO: 3300630 - RNA, 13 nt, Variola virus
caaaucuggaaaa

SEQ ID NO: 3300631 - RNA, 23 nt, Variola virus
uaaacauauagggaaucauauau

SEQ ID NO: 3300632 - RNA, 13 nt, Variola virus
auucuauacuuaa

SEQ ID NO: 3300633 - RNA, 11 nt, Variola virus
gcauagauaua

SEQ ID NO: 3300634 - RNA, 15 nt, Variola virus
gaaucauacaaaaau

SEQ ID NO: 3300635 - RNA, 19 nt, Variola virus
aucauguaaggcauacauu

SEQ ID NO: 3300636 - RNA, 12 nt, Variola virus
caaaacuauuau

SEQ ID NO: 3300637 - RNA, 18 nt, Variola virus
aaucauggggcaaacauu

SEQ ID NO: 3300638 - RNA, 19 nt, Variola virus
caaaaugaugauauacgau

SEQ ID NO: 3300639 - RNA, 13 nt, Variola virus
ucgucuaaaguuu

SEQ ID NO: 3300640 - RNA, 14 nt, Variola virus
cagucacagacacu

SEQ ID NO: 3300641 - RNA, 22 nt, Variola virus
aaccaguaucucuuaacgaugu

SEQ ID NO: 3300642 - RNA, 15 nt, Variola virus
cuuuacuaagaaagu

SEQ ID NO: 3300643 - RNA, 16 nt, Variola virus
aacgugauggauauau

SEQ ID NO: 3300644 - RNA, 22 nt, Variola virus
uuggacucuauguauucagaau

SEQ ID NO: 3300645 - RNA, 19 nt, Variola virus
cucauaauguaaagauauu

SEQ ID NO: 3300646 - RNA, 13 nt, Variola virus
uuauuacuagaau

SEQ ID NO: 3300647 - RNA, 20 nt, Variola virus
ucaggaauccaaagagcuau

SEQ ID NO: 3300648 - RNA, 21 nt, Variola virus
uccuaucuauuauugaugcaa

SEQ ID NO: 3300649 - RNA, 20 nt, Variola virus
gucuaaguauagaucaaaag

SEQ ID NO: 3300650 - RNA, 19 nt, Variola virus
ugagauuaaauguaauaac

SEQ ID NO: 3300651 - RNA, 13 nt, Variola virus
gauaauaaaucaa

SEQ ID NO: 3300652 - RNA, 14 nt, Variola virus
cauagccaauggau

SEQ ID NO: 3300653 - RNA, 19 nt, Variola virus
guuuuacguuauuaaucau

SEQ ID NO: 3300654 - RNA, 18 nt, Variola virus
caugaugauuuaugguga

SEQ ID NO: 3300655 - RNA, 21 nt, Variola virus
cagaaauauaugagauguagu

SEQ ID NO: 3300656 - RNA, 21 nt, Variola virus
auuauuuuucaccauauagau

SEQ ID NO: 3300657 - RNA, 15 nt, Variola virus
uccacuauacauucu

SEQ ID NO: 3300658 - RNA, 13 nt, Variola virus
ugaacaauugucu

SEQ ID NO: 3300659 - RNA, 14 nt, Variola virus
auccggauucauga

SEQ ID NO: 3300660 - RNA, 24 nt, Variola virus
aucuaauaacaauguagguacuau

SEQ ID NO: 3300661 - RNA, 19 nt, Variola virus
uugcuagacaccuuuucaa

SEQ ID NO: 3300662 - RNA, 22 nt, Variola virus
gauacguacugucuauaaugac

SEQ ID NO: 3300663 - RNA, 20 nt, Variola virus
aagaacccguuuauacagug

SEQ ID NO: 3300664 - RNA, 17 nt, Variola virus
aucuuuaugaauuacuu

SEQ ID NO: 3300665 - RNA, 18 nt, Variola virus
uucgcaaacuauucuaau

SEQ ID NO: 3300666 - RNA, 18 nt, Variola virus
aacugccggauaaaagug

SEQ ID NO: 3300667 - RNA, 18 nt, Variola virus
gauuuguaucucuuuucu

SEQ ID NO: 3300668 - RNA, 19 nt, Variola virus
agacuuugccacaacagaa

SEQ ID NO: 3300669 - RNA, 16 nt, Variola virus
acuuggcgauucuaua

SEQ ID NO: 3300670 - RNA, 15 nt, Variola virus
uagauucacauaaag

SEQ ID NO: 3300671 - RNA, 23 nt, Variola virus
acuuccauacgacgaaaauggua

SEQ ID NO: 3300672 - RNA, 20 nt, Variola virus
uuuuaucaggauaaauacau

SEQ ID NO: 3300673 - RNA, 16 nt, Variola virus
caaauguaguaaauau

SEQ ID NO: 3300674 - RNA, 23 nt, Variola virus
ugagaguauugguaauguacaaa

SEQ ID NO: 3300675 - RNA, 20 nt, Variola virus
gcaaacacuuuccugauuua

SEQ ID NO: 3300676 - RNA, 23 nt, Variola virus
aauacgucuugcacguaaucuau

SEQ ID NO: 3300677 - RNA, 17 nt, Variola virus
auuuauacguaucauuu

SEQ ID NO: 3300678 - RNA, 15 nt, Variola virus
caaauggauaauuua

SEQ ID NO: 3300679 - RNA, 19 nt, Variola virus
ugguuguagcgguuggaua

SEQ ID NO: 3300680 - RNA, 12 nt, Variola virus
ucaguuaucauc

SEQ ID NO: 3300681 - RNA, 21 nt, Variola virus
auguuggaauagcgaauguau

SEQ ID NO: 3300682 - RNA, 18 nt, Variola virus
acacugcgaucugaauaa

SEQ ID NO: 3300683 - RNA, 18 nt, Variola virus
auucgacucaacauaaau

SEQ ID NO: 3300684 - RNA, 21 nt, Variola virus
uggcuucuuccauaguuagaa

SEQ ID NO: 3300685 - RNA, 16 nt, Variola virus
acuuuaauaacaaaga

SEQ ID NO: 3300686 - RNA, 18 nt, Variola virus
augcgauucaaaaaagaa

SEQ ID NO: 3300687 - RNA, 18 nt, Variola virus
agaacucuguuucuguau

SEQ ID NO: 3300688 - RNA, 12 nt, Variola virus
aaguaaauacug

SEQ ID NO: 3300689 - RNA, 16 nt, Variola virus
cgaacguauuacuaug

SEQ ID NO: 3300690 - RNA, 19 nt, Variola virus
caaaaagagagucaauguu

SEQ ID NO: 3300691 - RNA, 18 nt, Variola virus
aggaaaaugauuaaauua

SEQ ID NO: 3300692 - RNA, 19 nt, Variola virus
aacauaagcuuuucaaaau

SEQ ID NO: 3300693 - RNA, 20 nt, Variola virus
uaagugcgaugauuguacac

SEQ ID NO: 3300694 - RNA, 21 nt, Variola virus
aucugauaagauaucuucuca

SEQ ID NO: 3300695 - RNA, 12 nt, Variola virus
gcacgaacaaaa

SEQ ID NO: 3300696 - RNA, 15 nt, Variola virus
acccaguuaguuuua

SEQ ID NO: 3300697 - RNA, 15 nt, Variola virus
auuuuggaaaaauug

SEQ ID NO: 3300698 - RNA, 22 nt, Variola virus
uagauccuucaauaacuuauag

SEQ ID NO: 3300699 - RNA, 13 nt, Variola virus
auuuaaucuaucu

SEQ ID NO: 3300700 - RNA, 13 nt, Variola virus
caauaaguaguau

SEQ ID NO: 3300701 - RNA, 19 nt, Variola virus
gaacuaucauagaugagaa

SEQ ID NO: 3300702 - RNA, 14 nt, Variola virus
aaauuuuagaaaua

SEQ ID NO: 3300703 - RNA, 12 nt, Variola virus
caucaucaucuu

SEQ ID NO: 3300704 - RNA, 16 nt, Variola virus
aucucguccuugguuu

SEQ ID NO: 3300705 - RNA, 14 nt, Variola virus
aguuuuaacuggua

SEQ ID NO: 3300706 - RNA, 18 nt, Variola virus
uuccaucuagacuauauu

SEQ ID NO: 3300707 - RNA, 22 nt, Variola virus
uacaaugaacgauaauauucua

SEQ ID NO: 3300708 - RNA, 16 nt, Variola virus
uauacagcauuacauu

SEQ ID NO: 3300709 - RNA, 22 nt, Variola virus
ucuauacgauaguuuguuucua

SEQ ID NO: 3300710 - RNA, 16 nt, Variola virus
ucagauuuauacauau

SEQ ID NO: 3300711 - RNA, 14 nt, Variola virus
auaaagaugauaua

SEQ ID NO: 3300712 - RNA, 21 nt, Variola virus
uauaccacuauggauaccuug

SEQ ID NO: 3300713 - RNA, 13 nt, Variola virus
auucccaaaauuu

SEQ ID NO: 3300714 - RNA, 14 nt, Variola virus
aaaagaaucaucau

SEQ ID NO: 3300715 - RNA, 18 nt, Variola virus
agcauauucuuaauauua

SEQ ID NO: 3300716 - RNA, 20 nt, Variola virus
cauuagaggauuuaucacau

SEQ ID NO: 3300717 - RNA, 19 nt, Variola virus
cgaauaauucuaauaaacu

SEQ ID NO: 3300718 - RNA, 16 nt, Variola virus
aaauuuuaaaaaaugg

SEQ ID NO: 3300719 - RNA, 18 nt, Variola virus
ucuauguugauagaaguu

SEQ ID NO: 3300720 - RNA, 14 nt, Variola virus
acggugaauacaau

SEQ ID NO: 3300721 - RNA, 21 nt, Variola virus
uguaauugugggaacauaauu

SEQ ID NO: 3300722 - RNA, 19 nt, Variola virus
cagaggaacgccauauauu

SEQ ID NO: 3300723 - RNA, 13 nt, Variola virus
uugguuucuaaau

SEQ ID NO: 3300724 - RNA, 13 nt, Variola virus
uauuauugaagau

SEQ ID NO: 3300725 - RNA, 15 nt, Variola virus
aacgacuuaauuaca

SEQ ID NO: 3300726 - RNA, 19 nt, Variola virus
uaauuuguaaaccaucuua

SEQ ID NO: 3300727 - RNA, 17 nt, Variola virus
uuaagcaacaugucuuu

SEQ ID NO: 3300728 - RNA, 20 nt, Variola virus
acuauugaaguacuuaauga

SEQ ID NO: 3300729 - RNA, 19 nt, Variola virus
ucaaugauuaguuucuuaa

SEQ ID NO: 3300730 - RNA, 16 nt, Variola virus
cagauuuuaaaaacug

SEQ ID NO: 3300731 - RNA, 17 nt, Variola virus
ugacuagacugauuucu

SEQ ID NO: 3300732 - RNA, 15 nt, Variola virus
uaaaaugauaaaugc

SEQ ID NO: 3300733 - RNA, 19 nt, Variola virus
ucugccuuuuuauacauau

SEQ ID NO: 3300734 - RNA, 17 nt, Variola virus
uguugaugauaucuaca

SEQ ID NO: 3300735 - RNA, 19 nt, Variola virus
uauuaucaucauuaucauu

SEQ ID NO: 3300736 - RNA, 19 nt, Variola virus
auaauuuaguguuuaaauu

SEQ ID NO: 3300737 - RNA, 20 nt, Variola virus
auuuuucuucauuuauuaua

SEQ ID NO: 3300738 - RNA, 19 nt, Variola virus
auccugugcauaaauuaaa

SEQ ID NO: 3300739 - RNA, 23 nt, Variola virus
guaaaaagacgaagcuaauuaga

SEQ ID NO: 3300740 - RNA, 14 nt, Variola virus
aaguacagaauuaa

SEQ ID NO: 3300741 - RNA, 20 nt, Variola virus
aaaccauuuuucagaaagua

SEQ ID NO: 3300742 - RNA, 21 nt, Variola virus
cagugggugguucuguaucac

SEQ ID NO: 3300743 - RNA, 18 nt, Variola virus
augugcuaaaaaguuuuc

SEQ ID NO: 3300744 - RNA, 22 nt, Variola virus
accguauguucugauuuuaucu

SEQ ID NO: 3300745 - RNA, 12 nt, Variola virus
uaacaauaugcu

SEQ ID NO: 3300746 - RNA, 16 nt, Variola virus
agaagucgucaagcau

SEQ ID NO: 3300747 - RNA, 13 nt, Variola virus
aucaauuaaauaa

SEQ ID NO: 3300748 - RNA, 18 nt, Variola virus
auauagugaaacaaaaua

SEQ ID NO: 3300749 - RNA, 13 nt, Variola virus
aaaaauaacaauu

SEQ ID NO: 3300750 - RNA, 17 nt, Variola virus
uuauauacacauaauua

SEQ ID NO: 3300751 - RNA, 18 nt, Variola virus
acuuuuuuauccaacaau

SEQ ID NO: 3300752 - RNA, 15 nt, Variola virus
cucauuuaucauguu

SEQ ID NO: 3300753 - RNA, 13 nt, Variola virus
gaacuaccaauau

SEQ ID NO: 3300754 - RNA, 13 nt, Variola virus
uggauguagauuu

SEQ ID NO: 3300755 - RNA, 23 nt, Variola virus
uagaggaaguauaaaaauuaaac

SEQ ID NO: 3300756 - RNA, 17 nt, Variola virus
auggaguaaguaguuua

SEQ ID NO: 3300757 - RNA, 18 nt, Variola virus
auuguuaauuauuucuaa

SEQ ID NO: 3300758 - RNA, 19 nt, Variola virus
cuuauaauuaauguccaag

SEQ ID NO: 3300759 - RNA, 13 nt, Variola virus
uuuaauauuucga

SEQ ID NO: 3300760 - RNA, 14 nt, Variola virus
uuguuuuauucaaa

SEQ ID NO: 3300761 - RNA, 18 nt, Variola virus
aaggauaaccuagaaaau

SEQ ID NO: 3300762 - RNA, 22 nt, Variola virus
acgcagaaaagauaccacgagu

SEQ ID NO: 3300763 - RNA, 13 nt, Variola virus
aucaauaagcauu

SEQ ID NO: 3300764 - RNA, 18 nt, Variola virus
uuguacauucuuaaccau

SEQ ID NO: 3300765 - RNA, 23 nt, Variola virus
uacauucucauuaauuaaccauu

SEQ ID NO: 3300766 - RNA, 15 nt, Variola virus
gguuuaaagaaauac

SEQ ID NO: 3300767 - RNA, 14 nt, Variola virus
auggauuacgugau

SEQ ID NO: 3300768 - RNA, 16 nt, Variola virus
auuauuccuaauuaag

SEQ ID NO: 3300769 - RNA, 23 nt, Variola virus
aaauugcgacacuauucauguaa

SEQ ID NO: 3300770 - RNA, 22 nt, Variola virus
aguauaaacuauaaacuaaaaa

SEQ ID NO: 3300771 - RNA, 13 nt, Variola virus
aaaagcuuaaaau

SEQ ID NO: 3300772 - RNA, 14 nt, Variola virus
acuugauacagcca

SEQ ID NO: 3300773 - RNA, 18 nt, Variola virus
auagacuuguauaugcca

SEQ ID NO: 3300774 - RNA, 17 nt, Variola virus
uaacaaccucuuuaaua

SEQ ID NO: 3300775 - RNA, 18 nt, Variola virus
gauaaaacgauaaaagau

SEQ ID NO: 3300776 - RNA, 16 nt, Variola virus
acuaaagaaacgaaua

SEQ ID NO: 3300777 - RNA, 15 nt, Variola virus
gucuagccacagaaa

SEQ ID NO: 3300778 - RNA, 17 nt, Variola virus
uuacauuucuuguuuuu

SEQ ID NO: 3300779 - RNA, 16 nt, Variola virus
aauauugugaauggua

SEQ ID NO: 3300780 - RNA, 17 nt, Variola virus
agauucacauaaaggau

SEQ ID NO: 3300781 - RNA, 20 nt, Variola virus
guaccagaaggaacauacga

SEQ ID NO: 3300782 - RNA, 20 nt, Variola virus
uaaaacucugauuauugucu

SEQ ID NO: 3300783 - RNA, 15 nt, Variola virus
acagaaauaugugaa

SEQ ID NO: 3300784 - RNA, 21 nt, Variola virus
auuaucauuagucauguuaaa

SEQ ID NO: 3300785 - RNA, 15 nt, Variola virus
cuucuuguauuuccu

SEQ ID NO: 3300786 - RNA, 15 nt, Variola virus
guaacgcguggaaaa

SEQ ID NO: 3300787 - RNA, 11 nt, Variola virus
aacacaaauau

SEQ ID NO: 3300788 - RNA, 22 nt, Variola virus
acaacgacgaaccaaaaugaau

SEQ ID NO: 3300789 - RNA, 22 nt, Variola virus
auaagcuauauaauaaauguau

SEQ ID NO: 3300790 - RNA, 18 nt, Variola virus
acaacaaugucucgaaau

SEQ ID NO: 3300791 - RNA, 17 nt, Variola virus
uauuuuuuaucuaaaaa

SEQ ID NO: 3300792 - RNA, 15 nt, Variola virus
uaaaauuaacaagga

SEQ ID NO: 3300793 - RNA, 16 nt, Variola virus
agaaugcagaaaugau

SEQ ID NO: 3300794 - RNA, 17 nt, Variola virus
gaugaaggaauaaucuc

SEQ ID NO: 3300795 - RNA, 16 nt, Variola virus
aauacauuaauugcca

SEQ ID NO: 3300796 - RNA, 12 nt, Variola virus
uaaauauccauu

SEQ ID NO: 3300797 - RNA, 17 nt, Variola virus
aauuucugguuagauaa

SEQ ID NO: 3300798 - RNA, 17 nt, Variola virus
uauacggcaacagcuuc

SEQ ID NO: 3300799 - RNA, 15 nt, Variola virus
auuaccaucucuaag

SEQ ID NO: 3300800 - RNA, 14 nt, Variola virus
agaaaauauaaauu

SEQ ID NO: 3300801 - RNA, 21 nt, Variola virus
ucauauacguucgucaccaga

SEQ ID NO: 3300802 - RNA, 20 nt, Variola virus
gaaaacucucuaucucuuaa

SEQ ID NO: 3300803 - RNA, 14 nt, Variola virus
aaugguacagaaaa

SEQ ID NO: 3300804 - RNA, 15 nt, Variola virus
uuauauuuuucuuaa

SEQ ID NO: 3300805 - RNA, 17 nt, Variola virus
acuauuauguuuaaaga

SEQ ID NO: 3300806 - RNA, 22 nt, Variola virus
uaacuaucuguaaaagcauaug

SEQ ID NO: 3300807 - RNA, 13 nt, Variola virus
gaaucguauauau

SEQ ID NO: 3300808 - RNA, 23 nt, Variola virus
cacucgacugaauauuagcacau

SEQ ID NO: 3300809 - RNA, 15 nt, Variola virus
cuaaacauaaacaac

SEQ ID NO: 3300810 - RNA, 11 nt, Variola virus
uggaauuauuu

SEQ ID NO: 3300811 - RNA, 16 nt, Variola virus
aggcuguagucuuggu

SEQ ID NO: 3300812 - RNA, 14 nt, Variola virus
aauucaauaucuuu

SEQ ID NO: 3300813 - RNA, 19 nt, Variola virus
uuuaaacaagaaaguuauc

SEQ ID NO: 3300814 - RNA, 16 nt, Variola virus
aaucuaauacaaaauc

SEQ ID NO: 3300815 - RNA, 21 nt, Variola virus
acugucuggcaauaaaugaua

SEQ ID NO: 3300816 - RNA, 13 nt, Variola virus
uccguuuguacau

SEQ ID NO: 3300817 - RNA, 22 nt, Variola virus
auacuagaguuguuaaaguuaa

SEQ ID NO: 3300818 - RNA, 17 nt, Variola virus
caauaaaacauuuccua

SEQ ID NO: 3300819 - RNA, 18 nt, Variola virus
aaacugaaaauauauuga

SEQ ID NO: 3300820 - RNA, 17 nt, Variola virus
uuucguauaauuuuuaa

SEQ ID NO: 3300821 - RNA, 14 nt, Variola virus
uauuuguuaucaug

SEQ ID NO: 3300822 - RNA, 19 nt, Variola virus
uauaauuuacucucuauaa

SEQ ID NO: 3300823 - RNA, 17 nt, Variola virus
uauuacuaggagaauua

SEQ ID NO: 3300824 - RNA, 22 nt, Variola virus
aucaauuauguaaauaucuuua

SEQ ID NO: 3300825 - RNA, 16 nt, Variola virus
uuuacagaucuaguau

SEQ ID NO: 3300826 - RNA, 22 nt, Variola virus
uaacgccuauacuauguuauau

SEQ ID NO: 3300827 - RNA, 22 nt, Variola virus
aauuuauuucuucucuucguau

SEQ ID NO: 3300828 - RNA, 13 nt, Variola virus
agaaauaugugaa

SEQ ID NO: 3300829 - RNA, 14 nt, Variola virus
cuggauauuacaaa

SEQ ID NO: 3300830 - RNA, 16 nt, Variola virus
gcaaaauaguaaugau

SEQ ID NO: 3300831 - RNA, 13 nt, Variola virus
uggaaaaaugaug

SEQ ID NO: 3300832 - RNA, 13 nt, Variola virus
cuuguauuuugau

SEQ ID NO: 3300833 - RNA, 16 nt, Variola virus
uucuaaugcuguacua

SEQ ID NO: 3300834 - RNA, 17 nt, Variola virus
cauacgacgaaaauggu

SEQ ID NO: 3300835 - RNA, 17 nt, Variola virus
ucuagacgugaugugua

SEQ ID NO: 3300836 - RNA, 13 nt, Variola virus
uuauuaauucucu

SEQ ID NO: 3300837 - RNA, 17 nt, Variola virus
gccgcuauaaugaugau

SEQ ID NO: 3300838 - RNA, 15 nt, Variola virus
uaccaucuucuuuga

SEQ ID NO: 3300839 - RNA, 20 nt, Variola virus
gccuaauguaucgauaauua

SEQ ID NO: 3300840 - RNA, 16 nt, Variola virus
auaucuauaucuacau

SEQ ID NO: 3300841 - RNA, 19 nt, Variola virus
auauucuaacgauaauaga

SEQ ID NO: 3300842 - RNA, 22 nt, Variola virus
aggaccacuagcaaaagauaaa

SEQ ID NO: 3300843 - RNA, 22 nt, Variola virus
aucauauuccggcguaugaauu

SEQ ID NO: 3300844 - RNA, 18 nt, Variola virus
aaauaacaguaucauuua

SEQ ID NO: 3300845 - RNA, 21 nt, Variola virus
uuguuacccaugaucuauaaa

SEQ ID NO: 3300846 - RNA, 13 nt, Variola virus
gaauuaauaauau

SEQ ID NO: 3300847 - RNA, 18 nt, Variola virus
uacuuuuugcguauacau

SEQ ID NO: 3300848 - RNA, 12 nt, Variola virus
aauuaugauacu

SEQ ID NO: 3300849 - RNA, 15 nt, Variola virus
guacaauauguguua

SEQ ID NO: 3300850 - RNA, 17 nt, Variola virus
ccaaucuauaauaucuu

SEQ ID NO: 3300851 - RNA, 13 nt, Variola virus
augauaacuagau

SEQ ID NO: 3300852 - RNA, 12 nt, Variola virus
auaauuuuacca

SEQ ID NO: 3300853 - RNA, 17 nt, Variola virus
ccaucucuauguuucag

SEQ ID NO: 3300854 - RNA, 21 nt, Variola virus
uaaacacuaguauagcagaag

SEQ ID NO: 3300855 - RNA, 16 nt, Variola virus
aaucucaauuagaaua

SEQ ID NO: 3300856 - RNA, 13 nt, Variola virus
uaguuaguauaac

SEQ ID NO: 3300857 - RNA, 17 nt, Variola virus
gaaaugaugaaggaaag

SEQ ID NO: 3300858 - RNA, 17 nt, Variola virus
uuucaaucucuucuauu

SEQ ID NO: 3300859 - RNA, 21 nt, Variola virus
aucgcccgcgagcgagagaag

SEQ ID NO: 3300860 - RNA, 18 nt, Variola virus
cacgaaaucuauagguaa

SEQ ID NO: 3300861 - RNA, 20 nt, Variola virus
acugacuucuaacaaacauc

SEQ ID NO: 3300862 - RNA, 23 nt, Variola virus
acuuguauaugccaaaguuuaaa

SEQ ID NO: 3300863 - RNA, 13 nt, Variola virus
cguucuacauaaa

SEQ ID NO: 3300864 - RNA, 20 nt, Variola virus
uaucuauuuuaacaaagcau

SEQ ID NO: 3300865 - RNA, 17 nt, Variola virus
uaaacuauaaacuaaaa

SEQ ID NO: 3300866 - RNA, 20 nt, Variola virus
ugauguauaacaacugucaa

SEQ ID NO: 3300867 - RNA, 18 nt, Variola virus
auaacauauuuuucuaug

SEQ ID NO: 3300868 - RNA, 21 nt, Variola virus
gccaacucucaaaaugcugau

SEQ ID NO: 3300869 - RNA, 22 nt, Variola virus
uuguacacuucuauaguaucua

SEQ ID NO: 3300870 - RNA, 20 nt, Variola virus
ccagucugaacaucaaucuu

SEQ ID NO: 3300871 - RNA, 15 nt, Variola virus
uaaauuauuaucuac

SEQ ID NO: 3300872 - RNA, 12 nt, Variola virus
agcgaauuauuu

SEQ ID NO: 3300873 - RNA, 14 nt, Variola virus
aucacaagaaguua

SEQ ID NO: 3300874 - RNA, 18 nt, Variola virus
cauugcgcuauacaguau

SEQ ID NO: 3300875 - RNA, 11 nt, Variola virus
gaauaagaaca

SEQ ID NO: 3300876 - RNA, 15 nt, Variola virus
uaaacuauuguuaug

SEQ ID NO: 3300877 - RNA, 14 nt, Variola virus
aguuguaucaucua

SEQ ID NO: 3300878 - RNA, 12 nt, Variola virus
agaugucauuau

SEQ ID NO: 3300879 - RNA, 23 nt, Variola virus
ggaaaaaaaucuuuuuuuauucu

SEQ ID NO: 3300880 - RNA, 19 nt, Variola virus
auaccgaucacguucuagu

SEQ ID NO: 3300881 - RNA, 17 nt, Variola virus
uauauucauuuaauauu

SEQ ID NO: 3300882 - RNA, 15 nt, Variola virus
ccguuuaauuuccua

SEQ ID NO: 3300883 - RNA, 16 nt, Variola virus
ugaaaugcuacauaac

SEQ ID NO: 3300884 - RNA, 15 nt, Variola virus
aguuuuauaaacucg

SEQ ID NO: 3300885 - RNA, 16 nt, Variola virus
ccaauauggcaauuau

SEQ ID NO: 3300886 - RNA, 23 nt, Variola virus
caucagcaaaacaguuacuauua

SEQ ID NO: 3300887 - RNA, 22 nt, Variola virus
acggagucauaacuauuuuacc

SEQ ID NO: 3300888 - RNA, 21 nt, Variola virus
cacaaagaauuuuagacacua

SEQ ID NO: 3300889 - RNA, 19 nt, Variola virus
gaacuauaaaacuacuaca

SEQ ID NO: 3300890 - RNA, 21 nt, Variola virus
ugaugcguuccauuuguguau

SEQ ID NO: 3300891 - RNA, 19 nt, Variola virus
caccuuauccucagacaca

SEQ ID NO: 3300892 - RNA, 18 nt, Variola virus
acaugcgguucaaaauag

SEQ ID NO: 3300893 - RNA, 20 nt, Variola virus
gccaaaacuucacagaugau

SEQ ID NO: 3300894 - RNA, 15 nt, Variola virus
cuuuguaauauugua

SEQ ID NO: 3300895 - RNA, 20 nt, Variola virus
auaggauacuuuaugaaugg

SEQ ID NO: 3300896 - RNA, 13 nt, Variola virus
auauauuagaaau

SEQ ID NO: 3300897 - RNA, 13 nt, Variola virus
aguuauauauacu

SEQ ID NO: 3300898 - RNA, 16 nt, Variola virus
acaacgucucauauaa

SEQ ID NO: 3300899 - RNA, 19 nt, Variola virus
gacauuguauuaugaugaa

SEQ ID NO: 3300900 - RNA, 15 nt, Variola virus
acuuuuuauacuaau

SEQ ID NO: 3300901 - RNA, 22 nt, Variola virus
aaucuaacauugauuuuaaaau

SEQ ID NO: 3300902 - RNA, 20 nt, Variola virus
gauccugcauagaaauaucu

SEQ ID NO: 3300903 - RNA, 21 nt, Variola virus
augaaccaauacaauguaaag

SEQ ID NO: 3300904 - RNA, 15 nt, Variola virus
caaccgaaaucaugg

SEQ ID NO: 3300905 - RNA, 16 nt, Variola virus
ugaauucucauuuugc

SEQ ID NO: 3300906 - RNA, 12 nt, Variola virus
uuaaaauuauua

SEQ ID NO: 3300907 - RNA, 20 nt, Variola virus
caguauugacaauacuguau

SEQ ID NO: 3300908 - RNA, 18 nt, Variola virus
uaauuaauuucucguaaa

SEQ ID NO: 3300909 - RNA, 17 nt, Variola virus
auuauucuuaaaugccu

SEQ ID NO: 3300910 - RNA, 19 nt, Variola virus
auuuuaguuaacaacuauu

SEQ ID NO: 3300911 - RNA, 14 nt, Variola virus
gagagauagaagaa

SEQ ID NO: 3300912 - RNA, 12 nt, Variola virus
ugucuuggaagc

SEQ ID NO: 3300913 - RNA, 11 nt, Variola virus
uccucaucugu

SEQ ID NO: 3300914 - RNA, 15 nt, Variola virus
cugauuuauuuccua

SEQ ID NO: 3300915 - RNA, 15 nt, Variola virus
uauuaucauuaguca

SEQ ID NO: 3300916 - RNA, 20 nt, Variola virus
caaauauauuacuagacaau

SEQ ID NO: 3300917 - RNA, 21 nt, Variola virus
uaucuuuuagagguucccaau

SEQ ID NO: 3300918 - RNA, 22 nt, Variola virus
gaaaaacacauaacugaagaaa

SEQ ID NO: 3300919 - RNA, 14 nt, Variola virus
ucugguuuaggaaa

SEQ ID NO: 3300920 - RNA, 19 nt, Variola virus
aaaacuuuuuagaaauguu

SEQ ID NO: 3300921 - RNA, 18 nt, Variola virus
gaauaauguuucuauguu

SEQ ID NO: 3300922 - RNA, 16 nt, Variola virus
acaacauuccaaagau

SEQ ID NO: 3300923 - RNA, 21 nt, Variola virus
guugaucuucaaauuccacca

SEQ ID NO: 3300924 - RNA, 17 nt, Variola virus
acgauaacauucuagga

SEQ ID NO: 3300925 - RNA, 17 nt, Variola virus
uauaauuuaccgcuaua

SEQ ID NO: 3300926 - RNA, 14 nt, Variola virus
ccuauuuguagaag

SEQ ID NO: 3300927 - RNA, 18 nt, Variola virus
caguuuucucaucacuua

SEQ ID NO: 3300928 - RNA, 18 nt, Variola virus
ggaaauguuauagaaaau

SEQ ID NO: 3300929 - RNA, 18 nt, Variola virus
agugauauugauaucuuu

SEQ ID NO: 3300930 - RNA, 16 nt, Variola virus
agaucuuaagaaaauu

SEQ ID NO: 3300931 - RNA, 16 nt, Variola virus
guuaauaguaaaugaa

SEQ ID NO: 3300932 - RNA, 23 nt, Variola virus
gaaaauaaaucacugacgauauu

SEQ ID NO: 3300933 - RNA, 15 nt, Variola virus
auccauaucguauau

SEQ ID NO: 3300934 - RNA, 19 nt, Variola virus
auuauucagauacgucuau

SEQ ID NO: 3300935 - RNA, 21 nt, Variola virus
uuuguccauuauuucuauauu

SEQ ID NO: 3300936 - RNA, 19 nt, Variola virus
ucuguaauaguuuccacca

SEQ ID NO: 3300937 - RNA, 15 nt, Variola virus
cuuguauauauuguu

SEQ ID NO: 3300938 - RNA, 16 nt, Variola virus
acuuugauuucuuauc

SEQ ID NO: 3300939 - RNA, 16 nt, Variola virus
caacuuacuaggcagc

SEQ ID NO: 3300940 - RNA, 15 nt, Variola virus
uuaccagauaucuuc

SEQ ID NO: 3300941 - RNA, 19 nt, Variola virus
uacgcgcauuaaacuuuuc

SEQ ID NO: 3300942 - RNA, 20 nt, Variola virus
ucccaaauguuggaaaauag

SEQ ID NO: 3300943 - RNA, 19 nt, Variola virus
uuacgacgugcuaaucuag

SEQ ID NO: 3300944 - RNA, 22 nt, Variola virus
agguacauggucuagauguaaa

SEQ ID NO: 3300945 - RNA, 15 nt, Variola virus
uggaucaaauggaua

SEQ ID NO: 3300946 - RNA, 19 nt, Variola virus
ucaucuuguucagaaauau

SEQ ID NO: 3300947 - RNA, 15 nt, Variola virus
augcgauuggauaag

SEQ ID NO: 3300948 - RNA, 14 nt, Variola virus
aauauaaaaugaua

SEQ ID NO: 3300949 - RNA, 15 nt, Variola virus
gcaauaaauaugauu

SEQ ID NO: 3300950 - RNA, 15 nt, Variola virus
auuaacagaaaaaac

SEQ ID NO: 3300951 - RNA, 15 nt, Variola virus
cauucgaagacgcua

SEQ ID NO: 3300952 - RNA, 19 nt, Variola virus
caaaaaacgacgauuggaa

SEQ ID NO: 3300953 - RNA, 13 nt, Variola virus
auauguauuuccu

SEQ ID NO: 3300954 - RNA, 15 nt, Variola virus
acuaaaucuucacau

SEQ ID NO: 3300955 - RNA, 17 nt, Variola virus
uauacauaauauuauca

SEQ ID NO: 3300956 - RNA, 20 nt, Variola virus
uuauuuuaggaucauauuua

SEQ ID NO: 3300957 - RNA, 20 nt, Variola virus
uaacaaaaucaggaaaaaag

SEQ ID NO: 3300958 - RNA, 22 nt, Variola virus
aaguuuuaucucuuucucucuu

SEQ ID NO: 3300959 - RNA, 20 nt, Variola virus
cuagaugauauagugaaaca

SEQ ID NO: 3300960 - RNA, 18 nt, Variola virus
acuacgcgauuauuuuca

SEQ ID NO: 3300961 - RNA, 22 nt, Variola virus
auauccuuuagaguauuucuca

SEQ ID NO: 3300962 - RNA, 19 nt, Variola virus
acauacagcgaauggaaua

SEQ ID NO: 3300963 - RNA, 23 nt, Variola virus
ucaaacacaucuacgaacaauau

SEQ ID NO: 3300964 - RNA, 20 nt, Variola virus
gcauucuaucuuuaagggau

SEQ ID NO: 3300965 - RNA, 15 nt, Variola virus
gccuuuuuauacaua

SEQ ID NO: 3300966 - RNA, 19 nt, Variola virus
accaugaaauugagaagau

SEQ ID NO: 3300967 - RNA, 20 nt, Variola virus
aaaguaucgcccuaauauua

SEQ ID NO: 3300968 - RNA, 13 nt, Variola virus
acuaauaaagaag

SEQ ID NO: 3300969 - RNA, 23 nt, Variola virus
uuuguuuaaacguuuguaguuua

SEQ ID NO: 3300970 - RNA, 22 nt, Variola virus
uauuagaucuccagauuucaua

SEQ ID NO: 3300971 - RNA, 23 nt, Variola virus
acauuaaguaaauccuuaaguuc

SEQ ID NO: 3300972 - RNA, 15 nt, Variola virus
guaucauuuaaacau

SEQ ID NO: 3300973 - RNA, 19 nt, Variola virus
auuaccauguaugauaaaa

SEQ ID NO: 3300974 - RNA, 20 nt, Variola virus
aacacuauacuuauauuaau

SEQ ID NO: 3300975 - RNA, 21 nt, Variola virus
auugacuaauaaauuaaauau

SEQ ID NO: 3300976 - RNA, 20 nt, Variola virus
agccuuaagaaaacuagaua

SEQ ID NO: 3300977 - RNA, 15 nt, Variola virus
guaauaucugauuua

SEQ ID NO: 3300978 - RNA, 20 nt, Variola virus
uaaacuugugcuaaucucuu

SEQ ID NO: 3300979 - RNA, 15 nt, Variola virus
aauuaugauagaaau

SEQ ID NO: 3300980 - RNA, 20 nt, Variola virus
cacuaaaaugauuaaacaau

SEQ ID NO: 3300981 - RNA, 21 nt, Variola virus
agugcgguuuuaccuauuuua

SEQ ID NO: 3300982 - RNA, 21 nt, Variola virus
uacauccugccauuaagaaac

SEQ ID NO: 3300983 - RNA, 14 nt, Variola virus
aauaguuucauaau

SEQ ID NO: 3300984 - RNA, 19 nt, Variola virus
caaauugcauauuuggaag

SEQ ID NO: 3300985 - RNA, 22 nt, Variola virus
auauagcggaugaaaaauuugu

SEQ ID NO: 3300986 - RNA, 15 nt, Variola virus
aagcuuuuagaauau

SEQ ID NO: 3300987 - RNA, 11 nt, Variola virus
auaauuuuacc

SEQ ID NO: 3300988 - RNA, 16 nt, Variola virus
uaaaauggauaauggu

SEQ ID NO: 3300989 - RNA, 16 nt, Variola virus
uacugucgcuaucauu

SEQ ID NO: 3300990 - RNA, 21 nt, Variola virus
gauuuccgaaguucagcuucu

SEQ ID NO: 3300991 - RNA, 14 nt, Variola virus
aauugcuuuucuaa

SEQ ID NO: 3300992 - RNA, 19 nt, Variola virus
uguuuaacaaaguuauuca

SEQ ID NO: 3300993 - RNA, 17 nt, Variola virus
caacucucucauuuucu

SEQ ID NO: 3300994 - RNA, 15 nt, Variola virus
aauguaguaaauaua

SEQ ID NO: 3300995 - RNA, 22 nt, Variola virus
cauugacggauaaaacaaaaau

SEQ ID NO: 3300996 - RNA, 14 nt, Variola virus
acgcgaacaucuuu

SEQ ID NO: 3300997 - RNA, 23 nt, Variola virus
ucgcaaacuauucuaauacauaa

SEQ ID NO: 3300998 - RNA, 18 nt, Variola virus
ccaaguaaugaucaucua

SEQ ID NO: 3300999 - RNA, 20 nt, Variola virus
ccaaauuuguuuuguuuauu

SEQ ID NO: 3301000 - RNA, 15 nt, Variola virus
auuucacuaauuaau

SEQ ID NO: 3301001 - RNA, 14 nt, Variola virus
auacgauuaauagc

SEQ ID NO: 3301002 - RNA, 20 nt, Variola virus
acauaguguuuuauauucca

SEQ ID NO: 3301003 - RNA, 20 nt, Variola virus
aaggcaacaaagaaauuuuu

SEQ ID NO: 3301004 - RNA, 12 nt, Variola virus
cauaacauaauu

SEQ ID NO: 3301005 - RNA, 14 nt, Variola virus
aaauggaucucaua

SEQ ID NO: 3301006 - RNA, 21 nt, Variola virus
cggauaaugauagacaagaua

SEQ ID NO: 3301007 - RNA, 14 nt, Variola virus
agugcaaugaauau

SEQ ID NO: 3301008 - RNA, 15 nt, Variola virus
uaccuagaacaaugu

SEQ ID NO: 3301009 - RNA, 21 nt, Variola virus
uaaacccucgaucaugaaugg

SEQ ID NO: 3301010 - RNA, 14 nt, Variola virus
uguacauuauuaca

SEQ ID NO: 3301011 - RNA, 22 nt, Variola virus
gcucuagauauuaguauuuuua

SEQ ID NO: 3301012 - RNA, 18 nt, Variola virus
aggauuggucuuaaaaga

SEQ ID NO: 3301013 - RNA, 16 nt, Variola virus
cgaucucaaucaucuu

SEQ ID NO: 3301014 - RNA, 22 nt, Variola virus
cgagugaaaaaauaauuucuac

SEQ ID NO: 3301015 - RNA, 19 nt, Variola virus
uuuaaacagagaaaucagu

SEQ ID NO: 3301016 - RNA, 16 nt, Variola virus
uagauuuguaucucuu

SEQ ID NO: 3301017 - RNA, 13 nt, Variola virus
uauuaaauuuaga

SEQ ID NO: 3301018 - RNA, 21 nt, Variola virus
acaaauucuuggauauaugau

SEQ ID NO: 3301019 - RNA, 19 nt, Variola virus
aguauaucuacacauauau

SEQ ID NO: 3301020 - RNA, 23 nt, Variola virus
cagucauuccaucauuuaagaag

SEQ ID NO: 3301021 - RNA, 15 nt, Variola virus
agacgcucaaaauag

SEQ ID NO: 3301022 - RNA, 23 nt, Variola virus
uccggcauuauagauguguauac

SEQ ID NO: 3301023 - RNA, 18 nt, Variola virus
aggauaucaaauacgcau

SEQ ID NO: 3301024 - RNA, 12 nt, Variola virus
auacuauauaca

SEQ ID NO: 3301025 - RNA, 15 nt, Variola virus
agaauuuucauggau

SEQ ID NO: 3301026 - RNA, 19 nt, Variola virus
aauuugauccauguucaua

SEQ ID NO: 3301027 - RNA, 20 nt, Variola virus
cuacaaauuuggauauucua

SEQ ID NO: 3301028 - RNA, 14 nt, Variola virus
uguaucuauaucug

SEQ ID NO: 3301029 - RNA, 17 nt, Variola virus
aauagugccaucagaau

SEQ ID NO: 3301030 - RNA, 19 nt, Variola virus
ccaucguguuaaauuuucu

SEQ ID NO: 3301031 - RNA, 16 nt, Variola virus
guauuugaaaauggaa

SEQ ID NO: 3301032 - RNA, 20 nt, Variola virus
aauaucaggaaauguauaaa

SEQ ID NO: 3301033 - RNA, 13 nt, Variola virus
gagauuaaugcua

SEQ ID NO: 3301034 - RNA, 16 nt, Variola virus
gucaauggagaaauac

SEQ ID NO: 3301035 - RNA, 21 nt, Variola virus
cagagaggcggucuugauauu

SEQ ID NO: 3301036 - RNA, 14 nt, Variola virus
aaaucgcaucuucu

SEQ ID NO: 3301037 - RNA, 11 nt, Variola virus
aaaaaaugaua

SEQ ID NO: 3301038 - RNA, 21 nt, Variola virus
agcuccuacaggaauaucuuu

SEQ ID NO: 3301039 - RNA, 15 nt, Variola virus
auauuaaaauagcua

SEQ ID NO: 3301040 - RNA, 16 nt, Variola virus
acgacuuauaauuaau

SEQ ID NO: 3301041 - RNA, 14 nt, Variola virus
ccaggcuauguuuc

SEQ ID NO: 3301042 - RNA, 15 nt, Variola virus
aaaauggauuacuua

SEQ ID NO: 3301043 - RNA, 18 nt, Variola virus
auuaaaguuaaauugugu

SEQ ID NO: 3301044 - RNA, 13 nt, Variola virus
gaauaaaguauau

SEQ ID NO: 3301045 - RNA, 22 nt, Variola virus
aaauguuugauaaaaauaugua

SEQ ID NO: 3301046 - RNA, 15 nt, Variola virus
acuuuagaagaauau

SEQ ID NO: 3301047 - RNA, 15 nt, Variola virus
uacgucaucaaaaau

SEQ ID NO: 3301048 - RNA, 13 nt, Variola virus
aguacuuaaugaa

SEQ ID NO: 3301049 - RNA, 20 nt, Variola virus
aagaauuuguuguuucuauu

SEQ ID NO: 3301050 - RNA, 14 nt, Variola virus
uaggauaauaauua

SEQ ID NO: 3301051 - RNA, 16 nt, Variola virus
guuaaugagguaggaa

SEQ ID NO: 3301052 - RNA, 20 nt, Variola virus
acauuaguucccaaugaauc

SEQ ID NO: 3301053 - RNA, 16 nt, Variola virus
auugaacgguaucuuc

SEQ ID NO: 3301054 - RNA, 19 nt, Variola virus
auuggauaguuuuuuugaa

SEQ ID NO: 3301055 - RNA, 16 nt, Variola virus
uguaacguuagacauu

SEQ ID NO: 3301056 - RNA, 13 nt, Variola virus
aauggcaaaugua

SEQ ID NO: 3301057 - RNA, 15 nt, Variola virus
aucauuuaaacauuu

SEQ ID NO: 3301058 - RNA, 18 nt, Variola virus
aauaugcuaguuaauagu

SEQ ID NO: 3301059 - RNA, 13 nt, Variola virus
aacuauuuagaaa

SEQ ID NO: 3301060 - RNA, 12 nt, Variola virus
uucucuagauac

SEQ ID NO: 3301061 - RNA, 16 nt, Variola virus
caacuuuauuagauaa

SEQ ID NO: 3301062 - RNA, 11 nt, Variola virus
gcguacaaaag

SEQ ID NO: 3301063 - RNA, 21 nt, Variola virus
uauaauucguuuuuauaugug

SEQ ID NO: 3301064 - RNA, 19 nt, Variola virus
ucguacauaacuuguacag

SEQ ID NO: 3301065 - RNA, 12 nt, Variola virus
gcuacaguaaaa

SEQ ID NO: 3301066 - RNA, 17 nt, Variola virus
ucuagauguagaagcau

SEQ ID NO: 3301067 - RNA, 19 nt, Variola virus
uuauuacuuaaguuguaaa

SEQ ID NO: 3301068 - RNA, 14 nt, Variola virus
uuuauauuaaauau

SEQ ID NO: 3301069 - RNA, 13 nt, Variola virus
gaagauaaugaau

SEQ ID NO: 3301070 - RNA, 20 nt, Variola virus
auucucugaaaauguaaauc

SEQ ID NO: 3301071 - RNA, 15 nt, Variola virus
guuaucuauuucaaa

SEQ ID NO: 3301072 - RNA, 23 nt, Variola virus
aucuauuagaagcuaacaaaauu

SEQ ID NO: 3301073 - RNA, 18 nt, Variola virus
uggauuaucccuuugaua

SEQ ID NO: 3301074 - RNA, 13 nt, Variola virus
aggaauaugguuu

SEQ ID NO: 3301075 - RNA, 17 nt, Variola virus
aagauaugguaaaauua

SEQ ID NO: 3301076 - RNA, 21 nt, Variola virus
uccuaauauugguacaugccu

SEQ ID NO: 3301077 - RNA, 14 nt, Variola virus
cugguuuagauauu

SEQ ID NO: 3301078 - RNA, 17 nt, Variola virus
caguguauguaaaaaug

SEQ ID NO: 3301079 - RNA, 20 nt, Variola virus
acucauauaguauugaacag

SEQ ID NO: 3301080 - RNA, 18 nt, Variola virus
ucagucuggaaacuauca

SEQ ID NO: 3301081 - RNA, 22 nt, Variola virus
gauaaguuuaaggcguuugcau

SEQ ID NO: 3301082 - RNA, 14 nt, Variola virus
acaguuauauaucu

SEQ ID NO: 3301083 - RNA, 15 nt, Variola virus
gcuguggaaauuaaa

SEQ ID NO: 3301084 - RNA, 13 nt, Variola virus
uacaauacaugua

SEQ ID NO: 3301085 - RNA, 22 nt, Variola virus
ucaacgcuggaaucaauacuca

SEQ ID NO: 3301086 - RNA, 19 nt, Variola virus
auuaaaaaacauauauaau

SEQ ID NO: 3301087 - RNA, 20 nt, Variola virus
cauccuuugauaauuuucca

SEQ ID NO: 3301088 - RNA, 19 nt, Variola virus
augaucgucuuuuguggaa

SEQ ID NO: 3301089 - RNA, 20 nt, Variola virus
uaaaauuauugauauguaua

SEQ ID NO: 3301090 - RNA, 22 nt, Variola virus
cuagugccgaacauuaacauuu

SEQ ID NO: 3301091 - RNA, 18 nt, Variola virus
auaucuuaaucauauucu

SEQ ID NO: 3301092 - RNA, 17 nt, Variola virus
uuaaucguacucauuau

SEQ ID NO: 3301093 - RNA, 16 nt, Variola virus
uuauagagauagauga

SEQ ID NO: 3301094 - RNA, 12 nt, Variola virus
cuaucuuuagag

SEQ ID NO: 3301095 - RNA, 16 nt, Variola virus
uacacguaccagcauu

SEQ ID NO: 3301096 - RNA, 18 nt, Variola virus
aauuguauauuacacauu

SEQ ID NO: 3301097 - RNA, 23 nt, Variola virus
guuaaaugguucgauauaaagga

SEQ ID NO: 3301098 - RNA, 17 nt, Variola virus
aaguaugaagaaaaaug

SEQ ID NO: 3301099 - RNA, 22 nt, Variola virus
auaccuuugguucuuuaaaaga

SEQ ID NO: 3301100 - RNA, 18 nt, Variola virus
guaugucuuauguauauu

SEQ ID NO: 3301101 - RNA, 13 nt, Variola virus
auacgucuuuauu

SEQ ID NO: 3301102 - RNA, 20 nt, Variola virus
caauugcauucccaucauuu

SEQ ID NO: 3301103 - RNA, 14 nt, Variola virus
ugagcacugaaaac

SEQ ID NO: 3301104 - RNA, 19 nt, Variola virus
cgucuaaaucaaugcaugu

SEQ ID NO: 3301105 - RNA, 13 nt, Variola virus
auucugaauagau

SEQ ID NO: 3301106 - RNA, 19 nt, Variola virus
aucuuuggagaaucaucua

SEQ ID NO: 3301107 - RNA, 17 nt, Variola virus
gugauggauuuaaacau

SEQ ID NO: 3301108 - RNA, 22 nt, Variola virus
uguuuagaaauagcucuuagua

SEQ ID NO: 3301109 - RNA, 22 nt, Variola virus
uagacugacuucuaacaaacau

SEQ ID NO: 3301110 - RNA, 23 nt, Variola virus
aaaaggaauuuaccagugauuau

SEQ ID NO: 3301111 - RNA, 18 nt, Variola virus
aucauaaauuauuucauu

SEQ ID NO: 3301112 - RNA, 15 nt, Variola virus
auacacacuaauaaa

SEQ ID NO: 3301113 - RNA, 19 nt, Variola virus
cuuaaaauauaaugauaua

SEQ ID NO: 3301114 - RNA, 17 nt, Variola virus
auuuaauuguauaccuu

SEQ ID NO: 3301115 - RNA, 15 nt, Variola virus
aucugauuccauaua

SEQ ID NO: 3301116 - RNA, 13 nt, Variola virus
uuaucaucauuau

SEQ ID NO: 3301117 - RNA, 20 nt, Variola virus
gaauauacuucauaaaagaa

SEQ ID NO: 3301118 - RNA, 13 nt, Variola virus
uuugcauucuauu

SEQ ID NO: 3301119 - RNA, 22 nt, Variola virus
uuagcaugaauccauucuaaug

SEQ ID NO: 3301120 - RNA, 12 nt, Variola virus
uuuaacacuaua

SEQ ID NO: 3301121 - RNA, 13 nt, Variola virus
gauguaguaauau

SEQ ID NO: 3301122 - RNA, 17 nt, Variola virus
aaagucaucucuuguau

SEQ ID NO: 3301123 - RNA, 18 nt, Variola virus
auggaugagaacacguau

SEQ ID NO: 3301124 - RNA, 20 nt, Variola virus
uaaauuuaucaauaaaugug

SEQ ID NO: 3301125 - RNA, 16 nt, Variola virus
uaacugcuacacaaau

SEQ ID NO: 3301126 - RNA, 18 nt, Variola virus
aaaaggaguucaaauagu

SEQ ID NO: 3301127 - RNA, 17 nt, Variola virus
aaacgauuaaacaauau

SEQ ID NO: 3301128 - RNA, 22 nt, Variola virus
agaaauauauacuucaauugau

SEQ ID NO: 3301129 - RNA, 23 nt, Variola virus
cuuaauccuucuagaauuagaau

SEQ ID NO: 3301130 - RNA, 18 nt, Variola virus
auauuaaacacuaguaua

SEQ ID NO: 3301131 - RNA, 13 nt, Variola virus
auuucuuaucugu

SEQ ID NO: 3301132 - RNA, 16 nt, Variola virus
agucaaccaaauaaua

SEQ ID NO: 3301133 - RNA, 21 nt, Variola virus
ucagaagugugaauaugaucu

SEQ ID NO: 3301134 - RNA, 21 nt, Variola virus
auacuaaaggcaacaaagaaa

SEQ ID NO: 3301135 - RNA, 20 nt, Variola virus
uagaugauaauuuauacaaa

SEQ ID NO: 3301136 - RNA, 16 nt, Variola virus
aauuuguucaaaauag

SEQ ID NO: 3301137 - RNA, 12 nt, Variola virus
aaaaaucuguuu

SEQ ID NO: 3301138 - RNA, 12 nt, Variola virus
aaaaaucucacc

SEQ ID NO: 3301139 - RNA, 18 nt, Variola virus
ccaucugucauauuuaga

SEQ ID NO: 3301140 - RNA, 20 nt, Variola virus
uuaaugaagaacacauauuu

SEQ ID NO: 3301141 - RNA, 23 nt, Variola virus
aauauuguaacaauuuauuuugu

SEQ ID NO: 3301142 - RNA, 11 nt, Variola virus
aaauaucucau

SEQ ID NO: 3301143 - RNA, 13 nt, Variola virus
uucauucguaaau

SEQ ID NO: 3301144 - RNA, 16 nt, Variola virus
acgucaucaaaaauag

SEQ ID NO: 3301145 - RNA, 14 nt, Variola virus
uuccugaauacuau

SEQ ID NO: 3301146 - RNA, 18 nt, Variola virus
uccuauucccaacaaugu

SEQ ID NO: 3301147 - RNA, 22 nt, Variola virus
cagaucaaaaaauauaguucca

SEQ ID NO: 3301148 - RNA, 15 nt, Variola virus
caaugagauaaauau

SEQ ID NO: 3301149 - RNA, 15 nt, Variola virus
auauaaguaguguaa

SEQ ID NO: 3301150 - RNA, 12 nt, Variola virus
uuaaauauuaau

SEQ ID NO: 3301151 - RNA, 16 nt, Variola virus
aaucuugauuacaaaa

SEQ ID NO: 3301152 - RNA, 19 nt, Variola virus
auauuguacgguagaauug

SEQ ID NO: 3301153 - RNA, 15 nt, Variola virus
auuaaacuaauucau

SEQ ID NO: 3301154 - RNA, 21 nt, Variola virus
cagacaaucacguacaaagaa

SEQ ID NO: 3301155 - RNA, 16 nt, Variola virus
ugccaauguuaauuuc

SEQ ID NO: 3301156 - RNA, 19 nt, Variola virus
aguaaagauuucaaagaug

SEQ ID NO: 3301157 - RNA, 13 nt, Variola virus
acguuaaacauua

SEQ ID NO: 3301158 - RNA, 19 nt, Variola virus
ucuagauacuagaguagua

SEQ ID NO: 3301159 - RNA, 16 nt, Variola virus
uagacagaauaucgug

SEQ ID NO: 3301160 - RNA, 15 nt, Variola virus
uuaacuguucaucgu

SEQ ID NO: 3301161 - RNA, 17 nt, Variola virus
aucuagaaauuacauaa

SEQ ID NO: 3301162 - RNA, 15 nt, Variola virus
caguuaauauauuua

SEQ ID NO: 3301163 - RNA, 15 nt, Variola virus
caauugucuauacaa

SEQ ID NO: 3301164 - RNA, 14 nt, Variola virus
uauauuuuauacau

SEQ ID NO: 3301165 - RNA, 16 nt, Variola virus
ugucugcuuucuuuua

SEQ ID NO: 3301166 - RNA, 16 nt, Variola virus
guaauaccaaaaugau

SEQ ID NO: 3301167 - RNA, 23 nt, Variola virus
uauauucaguaaccaaauacaua

SEQ ID NO: 3301168 - RNA, 19 nt, Variola virus
uuauuuagauacagaugua

SEQ ID NO: 3301169 - RNA, 17 nt, Variola virus
auaauagggagaaauga

SEQ ID NO: 3301170 - RNA, 14 nt, Variola virus
ucaucaaaauacug

SEQ ID NO: 3301171 - RNA, 15 nt, Variola virus
uuuuauuaaaugacg

SEQ ID NO: 3301172 - RNA, 15 nt, Variola virus
aaccaagaaacaguc

SEQ ID NO: 3301173 - RNA, 15 nt, Variola virus
uugacaaauuauucu

SEQ ID NO: 3301174 - RNA, 12 nt, Variola virus
uuccuuauucuu

SEQ ID NO: 3301175 - RNA, 18 nt, Variola virus
gcugaacacguuaaacaa

SEQ ID NO: 3301176 - RNA, 21 nt, Variola virus
uacgagccaaaucuucuucua

SEQ ID NO: 3301177 - RNA, 17 nt, Variola virus
auuuccaucuaucuagu

SEQ ID NO: 3301178 - RNA, 18 nt, Variola virus
agcuguacaccauagcac

SEQ ID NO: 3301179 - RNA, 21 nt, Variola virus
aggccgcucguggauacuuau

SEQ ID NO: 3301180 - RNA, 14 nt, Variola virus
uuuauccuauauau

SEQ ID NO: 3301181 - RNA, 20 nt, Variola virus
guuucauaauaauacauaua

SEQ ID NO: 3301182 - RNA, 20 nt, Variola virus
cuuccuaggauagcuuuagu

SEQ ID NO: 3301183 - RNA, 17 nt, Variola virus
gaaguuguauacuaucg

SEQ ID NO: 3301184 - RNA, 17 nt, Variola virus
caaucuuauaucuucuu

SEQ ID NO: 3301185 - RNA, 23 nt, Variola virus
caaacugcguuaauguauucucu

SEQ ID NO: 3301186 - RNA, 18 nt, Variola virus
ugaugucguuaaauuuga

SEQ ID NO: 3301187 - RNA, 19 nt, Variola virus
auccaauuguuugauauau

SEQ ID NO: 3301188 - RNA, 17 nt, Variola virus
uaaacacgauauagaca

SEQ ID NO: 3301189 - RNA, 16 nt, Variola virus
aaauacauguaacaaa

SEQ ID NO: 3301190 - RNA, 19 nt, Variola virus
caacguguuagaucgucua

SEQ ID NO: 3301191 - RNA, 16 nt, Variola virus
agaucauacagucaca

SEQ ID NO: 3301192 - RNA, 17 nt, Variola virus
gcuaauaucuauauauu

SEQ ID NO: 3301193 - RNA, 18 nt, Variola virus
auacacuaaguauauaca

SEQ ID NO: 3301194 - RNA, 22 nt, Variola virus
auauguaggaggaauaucugau

SEQ ID NO: 3301195 - RNA, 13 nt, Variola virus
caguuaucaucua

SEQ ID NO: 3301196 - RNA, 14 nt, Variola virus
cagaguuuagauua

SEQ ID NO: 3301197 - RNA, 17 nt, Variola virus
acacuaauuaagauaua

SEQ ID NO: 3301198 - RNA, 14 nt, Variola virus
guuauauaauuauc

SEQ ID NO: 3301199 - RNA, 14 nt, Variola virus
auagauaucaaaau

SEQ ID NO: 3301200 - RNA, 13 nt, Variola virus
aguacggauuaaa

SEQ ID NO: 3301201 - RNA, 15 nt, Variola virus
gaggaagacacauua

SEQ ID NO: 3301202 - RNA, 16 nt, Variola virus
aaacaaaauuagaaag

SEQ ID NO: 3301203 - RNA, 13 nt, Variola virus
aauauucuguucu

SEQ ID NO: 3301204 - RNA, 19 nt, Variola virus
acccauuagguuaaaugau

SEQ ID NO: 3301205 - RNA, 13 nt, Variola virus
aaacaucucuucu

SEQ ID NO: 3301206 - RNA, 14 nt, Variola virus
gucacuauuaaaga

SEQ ID NO: 3301207 - RNA, 14 nt, Variola virus
acauggaggcacua

SEQ ID NO: 3301208 - RNA, 22 nt, Variola virus
auauacauuuucaaauaauaaa

SEQ ID NO: 3301209 - RNA, 16 nt, Variola virus
gaauagugguauauaa

SEQ ID NO: 3301210 - RNA, 22 nt, Variola virus
cuaaugauguaucuacacaaac

SEQ ID NO: 3301211 - RNA, 15 nt, Variola virus
auaacgucucuguau

SEQ ID NO: 3301212 - RNA, 21 nt, Variola virus
uguuauacacggucuagagca

SEQ ID NO: 3301213 - RNA, 16 nt, Variola virus
cgauagugauuuugag

SEQ ID NO: 3301214 - RNA, 17 nt, Variola virus
uuagauaauugugguaa

SEQ ID NO: 3301215 - RNA, 16 nt, Variola virus
acauaguuaucuaucu

SEQ ID NO: 3301216 - RNA, 17 nt, Variola virus
uauaaaucauauuuaga

SEQ ID NO: 3301217 - RNA, 21 nt, Variola virus
ugacggagcccaauuuuggug

SEQ ID NO: 3301218 - RNA, 16 nt, Variola virus
cauacuguaccaauaa

SEQ ID NO: 3301219 - RNA, 18 nt, Variola virus
uuuuaaacaacuaaacag

SEQ ID NO: 3301220 - RNA, 14 nt, Variola virus
acuauucauguaau

SEQ ID NO: 3301221 - RNA, 18 nt, Variola virus
auuaaugggcuuaguaaa

SEQ ID NO: 3301222 - RNA, 21 nt, Variola virus
cuaacagaauuuauuguaaca

SEQ ID NO: 3301223 - RNA, 21 nt, Variola virus
acaacuuuuaaauacaaauau

SEQ ID NO: 3301224 - RNA, 14 nt, Variola virus
ucuagauauccaga

SEQ ID NO: 3301225 - RNA, 14 nt, Variola virus
gcauuauuaagaca

SEQ ID NO: 3301226 - RNA, 14 nt, Variola virus
uuccauaacagugu

SEQ ID NO: 3301227 - RNA, 18 nt, Variola virus
cuuucuguauccagguag

SEQ ID NO: 3301228 - RNA, 21 nt, Variola virus
cauaaacaauauuaaggagau

SEQ ID NO: 3301229 - RNA, 17 nt, Variola virus
cucaaauaaauacucua

SEQ ID NO: 3301230 - RNA, 21 nt, Variola virus
uaguuguauacugagaauuaa

SEQ ID NO: 3301231 - RNA, 18 nt, Variola virus
uauuuuuuuauacuucua

SEQ ID NO: 3301232 - RNA, 21 nt, Variola virus
aauacauuucucaaaugaaua

SEQ ID NO: 3301233 - RNA, 22 nt, Variola virus
uugcaaauuccggauacaugaa

SEQ ID NO: 3301234 - RNA, 13 nt, Variola virus
agaugcuauguau

SEQ ID NO: 3301235 - RNA, 23 nt, Variola virus
ugauagauacgcguucucuggag

SEQ ID NO: 3301236 - RNA, 16 nt, Variola virus
auuuucauuuaaauga

SEQ ID NO: 3301237 - RNA, 23 nt, Variola virus
cuacguagacuagacuguuuaua

SEQ ID NO: 3301238 - RNA, 19 nt, Variola virus
agaauuaaaucuaacgaga

SEQ ID NO: 3301239 - RNA, 22 nt, Variola virus
ucaugaacaaucacaagaauag

SEQ ID NO: 3301240 - RNA, 19 nt, Variola virus
uucuauacgucuuuauuuu

SEQ ID NO: 3301241 - RNA, 14 nt, Variola virus
auaaugaucauaua

SEQ ID NO: 3301242 - RNA, 16 nt, Variola virus
ucuuaucaauuucuga

SEQ ID NO: 3301243 - RNA, 17 nt, Variola virus
agaucuaauaaauggag

SEQ ID NO: 3301244 - RNA, 17 nt, Variola virus
auugaauaggaguuuga

SEQ ID NO: 3301245 - RNA, 14 nt, Variola virus
uuuagaaaaacuuu

SEQ ID NO: 3301246 - RNA, 18 nt, Variola virus
aucauuaggaaucuaucc

SEQ ID NO: 3301247 - RNA, 18 nt, Variola virus
auauagcuuuuauuucca

SEQ ID NO: 3301248 - RNA, 14 nt, Variola virus
ccaaguuauugcuu

SEQ ID NO: 3301249 - RNA, 18 nt, Variola virus
augaauuuagaaaugauu

SEQ ID NO: 3301250 - RNA, 13 nt, Variola virus
uuuagaaacauaa

SEQ ID NO: 3301251 - RNA, 21 nt, Variola virus
auuuaucgauuagucuuaaug

SEQ ID NO: 3301252 - RNA, 20 nt, Variola virus
auuaccggucauauuaauaa

SEQ ID NO: 3301253 - RNA, 19 nt, Variola virus
uaccaguuaagucaauaau

SEQ ID NO: 3301254 - RNA, 21 nt, Variola virus
uuucaauaguaucgaaaacag

SEQ ID NO: 3301255 - RNA, 17 nt, Variola virus
uguaauugugacaucau

SEQ ID NO: 3301256 - RNA, 17 nt, Variola virus
cgauaacuugauuucaa

SEQ ID NO: 3301257 - RNA, 17 nt, Variola virus
guuagcaauuucaaaau

SEQ ID NO: 3301258 - RNA, 19 nt, Variola virus
gccuccacuagaagagaau

SEQ ID NO: 3301259 - RNA, 22 nt, Variola virus
uacugaagaagaaaacaaacau

SEQ ID NO: 3301260 - RNA, 19 nt, Variola virus
uacuuucaaugagauaaau

SEQ ID NO: 3301261 - RNA, 16 nt, Variola virus
ucauccgauauuauug

SEQ ID NO: 3301262 - RNA, 22 nt, Variola virus
uguaaaguaucuagcaaagauu

SEQ ID NO: 3301263 - RNA, 16 nt, Variola virus
cagucuaguauacaua

SEQ ID NO: 3301264 - RNA, 22 nt, Variola virus
uuaacacuauacuuauauuaau

SEQ ID NO: 3301265 - RNA, 21 nt, Variola virus
caaagcggguuauaaaguaaa

SEQ ID NO: 3301266 - RNA, 16 nt, Variola virus
auaaaaacauuauucu

SEQ ID NO: 3301267 - RNA, 20 nt, Variola virus
aauaugaaaucuaucuuaua

SEQ ID NO: 3301268 - RNA, 20 nt, Variola virus
ggacaaaauccauauuucuu

SEQ ID NO: 3301269 - RNA, 20 nt, Variola virus
ugccaaugauguuaggaaau

SEQ ID NO: 3301270 - RNA, 20 nt, Variola virus
cuuuuagaagugauucuuug

SEQ ID NO: 3301271 - RNA, 18 nt, Variola virus
ucauauaucugcucuuaa

SEQ ID NO: 3301272 - RNA, 16 nt, Variola virus
ugagauaucucauuaa

SEQ ID NO: 3301273 - RNA, 16 nt, Variola virus
aguuagaaaguauuuu

SEQ ID NO: 3301274 - RNA, 19 nt, Variola virus
auuuuaacgacgacauauu

SEQ ID NO: 3301275 - RNA, 19 nt, Variola virus
guaucgauaauuauuucug

SEQ ID NO: 3301276 - RNA, 15 nt, Variola virus
uaugauaucucuauu

SEQ ID NO: 3301277 - RNA, 20 nt, Variola virus
uagagugaguuuaggauuca

SEQ ID NO: 3301278 - RNA, 22 nt, Variola virus
ggaucacaacaauuuauuucua

SEQ ID NO: 3301279 - RNA, 21 nt, Variola virus
agaaauaacaggcuaaaaugu

SEQ ID NO: 3301280 - RNA, 13 nt, Variola virus
augaugacgguau

SEQ ID NO: 3301281 - RNA, 22 nt, Variola virus
gucaacaaguuggaugauauua

SEQ ID NO: 3301282 - RNA, 15 nt, Variola virus
uuaguauaacuaaag

SEQ ID NO: 3301283 - RNA, 15 nt, Variola virus
ucccuuguguaacgu

SEQ ID NO: 3301284 - RNA, 19 nt, Variola virus
uacgccuuuaaauccucua

SEQ ID NO: 3301285 - RNA, 14 nt, Variola virus
ggcauguguuuccc

SEQ ID NO: 3301286 - RNA, 20 nt, Variola virus
gaguuuaucacuaaguucug

SEQ ID NO: 3301287 - RNA, 15 nt, Variola virus
uaggugcaauagcau

SEQ ID NO: 3301288 - RNA, 21 nt, Variola virus
aaaaaucugauagaaagaaua

SEQ ID NO: 3301289 - RNA, 19 nt, Variola virus
auuagacguaguuuaucau

SEQ ID NO: 3301290 - RNA, 18 nt, Variola virus
uguauaugugaauaugac

SEQ ID NO: 3301291 - RNA, 17 nt, Variola virus
agaaaaguccuagaauu

SEQ ID NO: 3301292 - RNA, 17 nt, Variola virus
auuuuuaaacuguuugu

SEQ ID NO: 3301293 - RNA, 17 nt, Variola virus
aucuagauaauuaauaa

SEQ ID NO: 3301294 - RNA, 21 nt, Variola virus
caaaauguauguguugaacau

SEQ ID NO: 3301295 - RNA, 14 nt, Variola virus
uucaacuaccaaaa

SEQ ID NO: 3301296 - RNA, 15 nt, Variola virus
auuuauauaacucau

SEQ ID NO: 3301297 - RNA, 13 nt, Variola virus
aacaguaaaagaa

SEQ ID NO: 3301298 - RNA, 18 nt, Variola virus
aaucaacagaaguuaaua

SEQ ID NO: 3301299 - RNA, 22 nt, Variola virus
acuccaaugacugaauacauua

SEQ ID NO: 3301300 - RNA, 16 nt, Variola virus
cagcgaacuugauauu

SEQ ID NO: 3301301 - RNA, 22 nt, Variola virus
aagauaugggaguaguugaaau

SEQ ID NO: 3301302 - RNA, 22 nt, Variola virus
gcguucaacauuuuauggaaac

SEQ ID NO: 3301303 - RNA, 18 nt, Variola virus
gauaaaauccuccuauca

SEQ ID NO: 3301304 - RNA, 15 nt, Variola virus
caaaaaauaaaagau

SEQ ID NO: 3301305 - RNA, 18 nt, Variola virus
auccaaauggaucucaua

SEQ ID NO: 3301306 - RNA, 15 nt, Variola virus
aggaucgacuccaua

SEQ ID NO: 3301307 - RNA, 19 nt, Variola virus
aauaucuuuaauacagagu

SEQ ID NO: 3301308 - RNA, 12 nt, Variola virus
cgaauaaaagau

SEQ ID NO: 3301309 - RNA, 15 nt, Variola virus
auuucaaucaaacaa

SEQ ID NO: 3301310 - RNA, 22 nt, Variola virus
ugauuaaugauuuagaaaugaa

SEQ ID NO: 3301311 - RNA, 15 nt, Variola virus
uuaaauaucugugaa

SEQ ID NO: 3301312 - RNA, 17 nt, Variola virus
auacugaguuggcuaug

SEQ ID NO: 3301313 - RNA, 22 nt, Variola virus
aagcauauucuuaauauuagaa

SEQ ID NO: 3301314 - RNA, 19 nt, Variola virus
aaugccugccuguauuaua

SEQ ID NO: 3301315 - RNA, 16 nt, Variola virus
guuuaacaaaguuauu

SEQ ID NO: 3301316 - RNA, 21 nt, Variola virus
aguaacggacuuaacaugaga

SEQ ID NO: 3301317 - RNA, 18 nt, Variola virus
ucuuuaaaguuucugaaa

SEQ ID NO: 3301318 - RNA, 24 nt, Variola virus
cuacagucguucaacugucuuuca

SEQ ID NO: 3301319 - RNA, 16 nt, Variola virus
auggucucacaaaaaa

SEQ ID NO: 3301320 - RNA, 16 nt, Variola virus
uaccgaagaauuaaau

SEQ ID NO: 3301321 - RNA, 14 nt, Variola virus
uagauauuaaacaa

SEQ ID NO: 3301322 - RNA, 21 nt, Variola virus
aguaugcauuauccaaaauau

SEQ ID NO: 3301323 - RNA, 16 nt, Variola virus
cuuauucauauuuuag

SEQ ID NO: 3301324 - RNA, 14 nt, Variola virus
caguaguucauuau

SEQ ID NO: 3301325 - RNA, 15 nt, Variola virus
acgguaauaaaaugu

SEQ ID NO: 3301326 - RNA, 22 nt, Variola virus
ugguuccacaauucauuuccau

SEQ ID NO: 3301327 - RNA, 16 nt, Variola virus
ucaaguaaagauuuca

SEQ ID NO: 3301328 - RNA, 21 nt, Variola virus
uauaugaacgauaauaacuua

SEQ ID NO: 3301329 - RNA, 18 nt, Variola virus
gaaauugguuuauaaugu

SEQ ID NO: 3301330 - RNA, 23 nt, Variola virus
aaaaguuuuccaucuauguagaa

SEQ ID NO: 3301331 - RNA, 17 nt, Variola virus
cagauguauaaguuuua

SEQ ID NO: 3301332 - RNA, 22 nt, Variola virus
acucuaucauggcaauaauaca

SEQ ID NO: 3301333 - RNA, 17 nt, Variola virus
aagcgaauuacucuguc

SEQ ID NO: 3301334 - RNA, 21 nt, Variola virus
uggaagacgcuauaucaaaau

SEQ ID NO: 3301335 - RNA, 21 nt, Variola virus
cgaauauugggcaaagauauu

SEQ ID NO: 3301336 - RNA, 17 nt, Variola virus
aguuucuagauacuaga

SEQ ID NO: 3301337 - RNA, 21 nt, Variola virus
guaaacaauacuucugaagaa

SEQ ID NO: 3301338 - RNA, 23 nt, Variola virus
agaaauuauuuuuacuaauagaa

SEQ ID NO: 3301339 - RNA, 19 nt, Variola virus
acuagcucgagaaugaaua

SEQ ID NO: 3301340 - RNA, 16 nt, Variola virus
uuucgaagaucuucuu

SEQ ID NO: 3301341 - RNA, 19 nt, Variola virus
uuauuagucugucuguaga

SEQ ID NO: 3301342 - RNA, 18 nt, Variola virus
aacuauaucuauguugau

SEQ ID NO: 3301343 - RNA, 19 nt, Variola virus
ucaaacaucugcauuauca

SEQ ID NO: 3301344 - RNA, 18 nt, Variola virus
aaauucuaggcucaguau

SEQ ID NO: 3301345 - RNA, 12 nt, Variola virus
ccauuuaaauau

SEQ ID NO: 3301346 - RNA, 15 nt, Variola virus
guuucagcgugauuu

SEQ ID NO: 3301347 - RNA, 17 nt, Variola virus
cuucuuuuuauauccaa

SEQ ID NO: 3301348 - RNA, 22 nt, Variola virus
acuauuccuagcaucagcaaaa

SEQ ID NO: 3301349 - RNA, 16 nt, Variola virus
auaaguguagaaauua

SEQ ID NO: 3301350 - RNA, 20 nt, Variola virus
cugauuaauaagaucuucua

SEQ ID NO: 3301351 - RNA, 14 nt, Variola virus
aaguacaucaucua

SEQ ID NO: 3301352 - RNA, 20 nt, Variola virus
aucaucuauagaucauguaa

SEQ ID NO: 3301353 - RNA, 17 nt, Variola virus
cugggguaaaguaagua

SEQ ID NO: 3301354 - RNA, 19 nt, Variola virus
aucccauucuaauacuuua

SEQ ID NO: 3301355 - RNA, 22 nt, Variola virus
auuaaagauacaaaacguaauu

SEQ ID NO: 3301356 - RNA, 22 nt, Variola virus
auuuguuaaagugggacaugau

SEQ ID NO: 3301357 - RNA, 13 nt, Variola virus
uagaagagaauac

SEQ ID NO: 3301358 - RNA, 12 nt, Variola virus
gauauuaguaca

SEQ ID NO: 3301359 - RNA, 14 nt, Variola virus
guauacuucaucag

SEQ ID NO: 3301360 - RNA, 21 nt, Variola virus
uaaacaaacuaauaaacauuc

SEQ ID NO: 3301361 - RNA, 15 nt, Variola virus
auaucacaaaaauaa

SEQ ID NO: 3301362 - RNA, 19 nt, Variola virus
guagaagaacucuguuucu

SEQ ID NO: 3301363 - RNA, 19 nt, Variola virus
uaagcgcuauauaaaucau

SEQ ID NO: 3301364 - RNA, 20 nt, Variola virus
acauuaucaaaaagaacgau

SEQ ID NO: 3301365 - RNA, 15 nt, Variola virus
uauuuuuuuuaucaa

SEQ ID NO: 3301366 - RNA, 17 nt, Variola virus
uacuugaaauucuccag

SEQ ID NO: 3301367 - RNA, 21 nt, Variola virus
cagcuacuugagauaccaaag

SEQ ID NO: 3301368 - RNA, 19 nt, Variola virus
cauaacaaauguauacuau

SEQ ID NO: 3301369 - RNA, 17 nt, Variola virus
aauagcaaccaauguuu

SEQ ID NO: 3301370 - RNA, 21 nt, Variola virus
aauaugucaucuauggaauua

SEQ ID NO: 3301371 - RNA, 13 nt, Variola virus
cuguuuauacaag

SEQ ID NO: 3301372 - RNA, 21 nt, Variola virus
cauaaucgucgacaaaguacu

SEQ ID NO: 3301373 - RNA, 19 nt, Variola virus
aagaucacuaauucuaguc

SEQ ID NO: 3301374 - RNA, 21 nt, Variola virus
auuugguauaaagagauagau

SEQ ID NO: 3301375 - RNA, 17 nt, Variola virus
ucguacuuuauaucgug

SEQ ID NO: 3301376 - RNA, 15 nt, Variola virus
aagauuguagaauca

SEQ ID NO: 3301377 - RNA, 22 nt, Variola virus
uauuagauaauaaacagaauag

SEQ ID NO: 3301378 - RNA, 16 nt, Variola virus
uguucuuggauuucau

SEQ ID NO: 3301379 - RNA, 13 nt, Variola virus
ucauuaauacagu

SEQ ID NO: 3301380 - RNA, 13 nt, Variola virus
ucauaaauacaga

SEQ ID NO: 3301381 - RNA, 13 nt, Variola virus
cauaaacauuauu

SEQ ID NO: 3301382 - RNA, 19 nt, Variola virus
aauucaccuucacaaaaua

SEQ ID NO: 3301383 - RNA, 19 nt, Variola virus
aaaucauggggcaaacauu

SEQ ID NO: 3301384 - RNA, 21 nt, Variola virus
auggaauuaucaucaaaaaac

SEQ ID NO: 3301385 - RNA, 11 nt, Variola virus
acgauaaaaga

SEQ ID NO: 3301386 - RNA, 18 nt, Variola virus
aucacuaucucccaggag

SEQ ID NO: 3301387 - RNA, 22 nt, Variola virus
uaccaacaugucugauauuuug

SEQ ID NO: 3301388 - RNA, 21 nt, Variola virus
cauacguaccagcuauguuua

SEQ ID NO: 3301389 - RNA, 19 nt, Variola virus
uagcaacaguaguucuugc

SEQ ID NO: 3301390 - RNA, 21 nt, Variola virus
uauuuuuucuggcauuaucua

SEQ ID NO: 3301391 - RNA, 14 nt, Variola virus
aaaccaaaucuuga

SEQ ID NO: 3301392 - RNA, 17 nt, Variola virus
uauccagcuaacuuauu

SEQ ID NO: 3301393 - RNA, 19 nt, Variola virus
auucuaaaacuauaaaaca

SEQ ID NO: 3301394 - RNA, 21 nt, Variola virus
aaaucuucuucuacauuuuca

SEQ ID NO: 3301395 - RNA, 13 nt, Variola virus
aggacuauuagaa

SEQ ID NO: 3301396 - RNA, 18 nt, Variola virus
aagauaccgaagaauuaa

SEQ ID NO: 3301397 - RNA, 19 nt, Variola virus
gucggaguaguacaagaaa

SEQ ID NO: 3301398 - RNA, 16 nt, Variola virus
gaaagacgaauauuau

SEQ ID NO: 3301399 - RNA, 17 nt, Variola virus
auacgcauguagaaugu

SEQ ID NO: 3301400 - RNA, 20 nt, Variola virus
gacuucauugauaucuuuau

SEQ ID NO: 3301401 - RNA, 13 nt, Variola virus
auagauagaacua

SEQ ID NO: 3301402 - RNA, 19 nt, Variola virus
cuccagaugauguuacaau

SEQ ID NO: 3301403 - RNA, 23 nt, Variola virus
auuguccaucuauuacaaacaug

SEQ ID NO: 3301404 - RNA, 20 nt, Variola virus
cuauaauggaguuguaaaug

SEQ ID NO: 3301405 - RNA, 21 nt, Variola virus
aauuacagaguuuucagaaga

SEQ ID NO: 3301406 - RNA, 15 nt, Variola virus
acaaguauaaugaua

SEQ ID NO: 3301407 - RNA, 22 nt, Variola virus
aguauuucuguggauuaauaga

SEQ ID NO: 3301408 - RNA, 13 nt, Variola virus
uuacauuucuugu

SEQ ID NO: 3301409 - RNA, 15 nt, Variola virus
cacucucgaaaucac

SEQ ID NO: 3301410 - RNA, 14 nt, Variola virus
gaauagacuuucug

SEQ ID NO: 3301411 - RNA, 16 nt, Variola virus
uaguauugacaaauau

SEQ ID NO: 3301412 - RNA, 19 nt, Variola virus
augugaucuaugacaucau

SEQ ID NO: 3301413 - RNA, 18 nt, Variola virus
aucucuuuuccaugccuc

SEQ ID NO: 3301414 - RNA, 14 nt, Variola virus
ggaagaguaggaag

SEQ ID NO: 3301415 - RNA, 14 nt, Variola virus
gaauaucauauuac

SEQ ID NO: 3301416 - RNA, 22 nt, Variola virus
auguacuguauauaauaguuuc

SEQ ID NO: 3301417 - RNA, 19 nt, Variola virus
accauuagauaaaguugau

SEQ ID NO: 3301418 - RNA, 13 nt, Variola virus
auucauauagaac

SEQ ID NO: 3301419 - RNA, 12 nt, Variola virus
uaauguuguauu

SEQ ID NO: 3301420 - RNA, 21 nt, Variola virus
auacuaccaaccuacacuauu

SEQ ID NO: 3301421 - RNA, 11 nt, Variola virus
auuguauauag

SEQ ID NO: 3301422 - RNA, 20 nt, Variola virus
auacaacgugaaauacuuua

SEQ ID NO: 3301423 - RNA, 17 nt, Variola virus
acaaaaaagcucaauaa

SEQ ID NO: 3301424 - RNA, 18 nt, Variola virus
auuaaacguauaaaaacg

SEQ ID NO: 3301425 - RNA, 14 nt, Variola virus
auauaaucuagaca

SEQ ID NO: 3301426 - RNA, 17 nt, Variola virus
uccaaauugcgacacua

SEQ ID NO: 3301427 - RNA, 12 nt, Variola virus
guauaauagacc

SEQ ID NO: 3301428 - RNA, 13 nt, Variola virus
uuguauuauucug

SEQ ID NO: 3301429 - RNA, 15 nt, Variola virus
aucauguagauaguu

SEQ ID NO: 3301430 - RNA, 20 nt, Variola virus
uuuaaauauuauauaaacau

SEQ ID NO: 3301431 - RNA, 15 nt, Variola virus
ucguucuuaucccaa

SEQ ID NO: 3301432 - RNA, 20 nt, Variola virus
ugacgaacguauuacuauga

SEQ ID NO: 3301433 - RNA, 16 nt, Variola virus
cuucuaaugcuguacu

SEQ ID NO: 3301434 - RNA, 16 nt, Variola virus
aguauaccaacuauau

SEQ ID NO: 3301435 - RNA, 17 nt, Variola virus
auaaugacgauaacauu

SEQ ID NO: 3301436 - RNA, 15 nt, Variola virus
auaugcuacauguaa

SEQ ID NO: 3301437 - RNA, 18 nt, Variola virus
caauuuugauguauaaca

SEQ ID NO: 3301438 - RNA, 14 nt, Variola virus
aaauaaucauguaa

SEQ ID NO: 3301439 - RNA, 14 nt, Variola virus
aacgcaucuagacu

SEQ ID NO: 3301440 - RNA, 12 nt, Variola virus
uauugcaucaaa

SEQ ID NO: 3301441 - RNA, 19 nt, Variola virus
ucuauuaaagauuguuuaa

SEQ ID NO: 3301442 - RNA, 21 nt, Variola virus
accaauagaaguuuucccaaa

SEQ ID NO: 3301443 - RNA, 21 nt, Variola virus
uaucgcuggaagggacuauau

SEQ ID NO: 3301444 - RNA, 23 nt, Variola virus
aguuuccuuaacaaaucuaacug

SEQ ID NO: 3301445 - RNA, 17 nt, Variola virus
cgucuauauaguauuuu

SEQ ID NO: 3301446 - RNA, 19 nt, Variola virus
ucaaagggaccuaaaucua

SEQ ID NO: 3301447 - RNA, 19 nt, Variola virus
gaaucuauuacugacuuua

SEQ ID NO: 3301448 - RNA, 14 nt, Variola virus
auuucaacaggcau

SEQ ID NO: 3301449 - RNA, 15 nt, Variola virus
agauccuguuagaua

SEQ ID NO: 3301450 - RNA, 17 nt, Variola virus
aaauaucauaaauauau

SEQ ID NO: 3301451 - RNA, 13 nt, Variola virus
uauuuauacuacu

SEQ ID NO: 3301452 - RNA, 15 nt, Variola virus
uccggucgaugauga

SEQ ID NO: 3301453 - RNA, 15 nt, Variola virus
agaaaaggauguauu

SEQ ID NO: 3301454 - RNA, 16 nt, Variola virus
gaauaaauuauaucua

SEQ ID NO: 3301455 - RNA, 14 nt, Variola virus
uaaauaucauuaau

SEQ ID NO: 3301456 - RNA, 23 nt, Variola virus
augguaaggucuuagaaauagac

SEQ ID NO: 3301457 - RNA, 19 nt, Variola virus
auaucaucaaaauacugga

SEQ ID NO: 3301458 - RNA, 14 nt, Variola virus
gacaaauuauucua

SEQ ID NO: 3301459 - RNA, 13 nt, Variola virus
auagaaaaugauu

SEQ ID NO: 3301460 - RNA, 19 nt, Variola virus
acuaauucauuuucaauaa

SEQ ID NO: 3301461 - RNA, 16 nt, Variola virus
uauuaaaacuaucaau

SEQ ID NO: 3301462 - RNA, 21 nt, Variola virus
aaacucgucuccccaaacauu

SEQ ID NO: 3301463 - RNA, 19 nt, Variola virus
guuaaauuuuacaaaucua

SEQ ID NO: 3301464 - RNA, 21 nt, Variola virus
auacauugaucuauguaguuu

SEQ ID NO: 3301465 - RNA, 23 nt, Variola virus
aaacaaggauucguuuacucuca

SEQ ID NO: 3301466 - RNA, 19 nt, Variola virus
gacagaagaauaugaugau

SEQ ID NO: 3301467 - RNA, 15 nt, Variola virus
uuaaucuauuagaau

SEQ ID NO: 3301468 - RNA, 14 nt, Variola virus
guauucuaauuuua

SEQ ID NO: 3301469 - RNA, 14 nt, Variola virus
aauuuauuucuaau

SEQ ID NO: 3301470 - RNA, 17 nt, Variola virus
cgaaaauugcuauuuca

SEQ ID NO: 3301471 - RNA, 14 nt, Variola virus
acauuuaugauaug

SEQ ID NO: 3301472 - RNA, 15 nt, Variola virus
auuuuauuuuggaaa

SEQ ID NO: 3301473 - RNA, 18 nt, Variola virus
gaauauugauuuacuaaa

SEQ ID NO: 3301474 - RNA, 12 nt, Variola virus
cuauaacuucua

SEQ ID NO: 3301475 - RNA, 23 nt, Variola virus
uauagagcccacguuuaaacauu

SEQ ID NO: 3301476 - RNA, 20 nt, Variola virus
uaacuguugccaaugauguu

SEQ ID NO: 3301477 - RNA, 20 nt, Variola virus
aaaacuauaugucuguagaa

SEQ ID NO: 3301478 - RNA, 17 nt, Variola virus
ugauauuuugauguaca

SEQ ID NO: 3301479 - RNA, 17 nt, Variola virus
aucauguagaaaaauuc

SEQ ID NO: 3301480 - RNA, 14 nt, Variola virus
accaauaaacuauu

SEQ ID NO: 3301481 - RNA, 23 nt, Variola virus
uuaauaaacacggguucgucuuu

SEQ ID NO: 3301482 - RNA, 21 nt, Variola virus
cuaaguucuuugaucucuuuu

SEQ ID NO: 3301483 - RNA, 14 nt, Variola virus
gccaacuauacauc

SEQ ID NO: 3301484 - RNA, 21 nt, Variola virus
acggaugaaaauaagaaaaau

SEQ ID NO: 3301485 - RNA, 17 nt, Variola virus
uaaagaaaugucuacau

SEQ ID NO: 3301486 - RNA, 14 nt, Variola virus
ugguaauauggaua

SEQ ID NO: 3301487 - RNA, 12 nt, Variola virus
guuauuuacagc

SEQ ID NO: 3301488 - RNA, 14 nt, Variola virus
ucuugcucaaauaa

SEQ ID NO: 3301489 - RNA, 17 nt, Variola virus
aucuaucaaacaaaauu

SEQ ID NO: 3301490 - RNA, 16 nt, Variola virus
cucugaccuaaaggug

SEQ ID NO: 3301491 - RNA, 18 nt, Variola virus
gaaucaaauauagaucuu

SEQ ID NO: 3301492 - RNA, 21 nt, Variola virus
ugccacgaauaaaaaauacuu

SEQ ID NO: 3301493 - RNA, 12 nt, Variola virus
acuuuuaaauac

SEQ ID NO: 3301494 - RNA, 13 nt, Variola virus
auaacaaauacua

SEQ ID NO: 3301495 - RNA, 21 nt, Variola virus
uaguaugaagauaaacacuca

SEQ ID NO: 3301496 - RNA, 14 nt, Variola virus
ucuauagucagaau

SEQ ID NO: 3301497 - RNA, 17 nt, Variola virus
aucuuuaauagaacucu

SEQ ID NO: 3301498 - RNA, 16 nt, Variola virus
agacguacuccagaua

SEQ ID NO: 3301499 - RNA, 16 nt, Variola virus
ucaaaauauuaaacca

SEQ ID NO: 3301500 - RNA, 16 nt, Variola virus
aagucacuaacugaua

SEQ ID NO: 3301501 - RNA, 14 nt, Variola virus
cuuaauuauaacga

SEQ ID NO: 3301502 - RNA, 24 nt, Variola virus
uccucagauuuauacauauucuaa

SEQ ID NO: 3301503 - RNA, 22 nt, Variola virus
caauagugucuacuuaaaugua

SEQ ID NO: 3301504 - RNA, 14 nt, Variola virus
cuaacuccuugguu

SEQ ID NO: 3301505 - RNA, 13 nt, Variola virus
guaaaaaauguac

SEQ ID NO: 3301506 - RNA, 20 nt, Variola virus
cuucauucguaaaucuuuuc

SEQ ID NO: 3301507 - RNA, 22 nt, Variola virus
acuuaaugaagauuuauuucca

SEQ ID NO: 3301508 - RNA, 21 nt, Variola virus
uaacuuccacauuaauacagc

SEQ ID NO: 3301509 - RNA, 22 nt, Variola virus
ucaccguuacgguaauuuuuga

SEQ ID NO: 3301510 - RNA, 19 nt, Variola virus
uauuauaaacucucaacau

SEQ ID NO: 3301511 - RNA, 15 nt, Variola virus
acaauaaacaaaaua

SEQ ID NO: 3301512 - RNA, 22 nt, Variola virus
cuucuaugagauugaucaugua

SEQ ID NO: 3301513 - RNA, 12 nt, Variola virus
aauauuaaacac

SEQ ID NO: 3301514 - RNA, 14 nt, Variola virus
acauuuuauuucua

SEQ ID NO: 3301515 - RNA, 20 nt, Variola virus
cagugacgucuguggaugga

SEQ ID NO: 3301516 - RNA, 23 nt, Variola virus
cauuaaguucacuagaauaucca

SEQ ID NO: 3301517 - RNA, 24 nt, Variola virus
aacacuccggaaaaauaauuucca

SEQ ID NO: 3301518 - RNA, 18 nt, Variola virus
ccaaauuuguuuuguuua

SEQ ID NO: 3301519 - RNA, 17 nt, Variola virus
cuauauauucugcuaua

SEQ ID NO: 3301520 - RNA, 13 nt, Variola virus
guucguucuggga

SEQ ID NO: 3301521 - RNA, 15 nt, Variola virus
ugauuagaauucauc

SEQ ID NO: 3301522 - RNA, 20 nt, Variola virus
auaaugucugacaagauccg

SEQ ID NO: 3301523 - RNA, 16 nt, Variola virus
auaaaaauuauguuuu

SEQ ID NO: 3301524 - RNA, 11 nt, Variola virus
cuauagaaaau

SEQ ID NO: 3301525 - RNA, 21 nt, Variola virus
auuucaaagguguguacuuua

SEQ ID NO: 3301526 - RNA, 22 nt, Variola virus
cuaaacuaacuccuugguuuca

SEQ ID NO: 3301527 - RNA, 22 nt, Variola virus
gucaaccuuuguuguacaaauu

SEQ ID NO: 3301528 - RNA, 14 nt, Variola virus
uuaaaguuauuaau

SEQ ID NO: 3301529 - RNA, 15 nt, Variola virus
uuacuagauuaaaaa

SEQ ID NO: 3301530 - RNA, 17 nt, Variola virus
cuagauauauuaauaac

SEQ ID NO: 3301531 - RNA, 16 nt, Variola virus
auaagaaauaugaaau

SEQ ID NO: 3301532 - RNA, 22 nt, Variola virus
uacgccaaauaucucaaagaug

SEQ ID NO: 3301533 - RNA, 19 nt, Variola virus
uagaaaaacuauaucuaug

SEQ ID NO: 3301534 - RNA, 21 nt, Variola virus
agaggaugaaauagauagaau

SEQ ID NO: 3301535 - RNA, 21 nt, Variola virus
augaaugcaagacucacgcau

SEQ ID NO: 3301536 - RNA, 14 nt, Variola virus
agguaaauguaaau

SEQ ID NO: 3301537 - RNA, 12 nt, Variola virus
auguaaaaucau

SEQ ID NO: 3301538 - RNA, 19 nt, Variola virus
auguauuguuuaguuacuc

SEQ ID NO: 3301539 - RNA, 20 nt, Variola virus
acgauucuucacaagugaaa

SEQ ID NO: 3301540 - RNA, 16 nt, Variola virus
ucgacucaguauacaa

SEQ ID NO: 3301541 - RNA, 17 nt, Variola virus
aguacuccguuuacaga

SEQ ID NO: 3301542 - RNA, 17 nt, Variola virus
aguguuaaaaaauggau

SEQ ID NO: 3301543 - RNA, 16 nt, Variola virus
guucucaauacaccaa

SEQ ID NO: 3301544 - RNA, 23 nt, Variola virus
uuccuauagccguucuuguaauu

SEQ ID NO: 3301545 - RNA, 17 nt, Variola virus
ccauguuucaucuauca

SEQ ID NO: 3301546 - RNA, 12 nt, Variola virus
ucaaauguagug

SEQ ID NO: 3301547 - RNA, 15 nt, Variola virus
gacacgacauagaga

SEQ ID NO: 3301548 - RNA, 16 nt, Variola virus
cuuauuacuccauuau

SEQ ID NO: 3301549 - RNA, 11 nt, Variola virus
ggaaaaugcua

SEQ ID NO: 3301550 - RNA, 14 nt, Variola virus
auuuuauugcuaau

SEQ ID NO: 3301551 - RNA, 19 nt, Variola virus
augaauuacuuuacauaua

SEQ ID NO: 3301552 - RNA, 15 nt, Variola virus
uuaguaaucauguaa

SEQ ID NO: 3301553 - RNA, 22 nt, Variola virus
auuauuuuaauuucugaugugc

SEQ ID NO: 3301554 - RNA, 17 nt, Variola virus
gacauauccgaugaugu

SEQ ID NO: 3301555 - RNA, 14 nt, Variola virus
gcgcauaucuuuuu

SEQ ID NO: 3301556 - RNA, 13 nt, Variola virus
uuaauuaaccauu

SEQ ID NO: 3301557 - RNA, 20 nt, Variola virus
uauauauacugaaaaguuau

SEQ ID NO: 3301558 - RNA, 20 nt, Variola virus
aggauauacucaauagaauu

SEQ ID NO: 3301559 - RNA, 22 nt, Variola virus
aauacuuuuuuuauuaaaugac

SEQ ID NO: 3301560 - RNA, 17 nt, Variola virus
ucaaguuaugaaaauag

SEQ ID NO: 3301561 - RNA, 10 nt, Variola virus
aaaauacuua

SEQ ID NO: 3301562 - RNA, 20 nt, Variola virus
agugguauauaauccaucaa

SEQ ID NO: 3301563 - RNA, 15 nt, Variola virus
cuuuaaaagaaacug

SEQ ID NO: 3301564 - RNA, 20 nt, Variola virus
guaauaucaugucuaaugau

SEQ ID NO: 3301565 - RNA, 23 nt, Variola virus
uagcaaacaugauagcugugaua

SEQ ID NO: 3301566 - RNA, 18 nt, Variola virus
uuuguucuuaagacuaua

SEQ ID NO: 3301567 - RNA, 14 nt, Variola virus
auaacuuauccgaa

SEQ ID NO: 3301568 - RNA, 16 nt, Variola virus
uauauuccgauuucaa

SEQ ID NO: 3301569 - RNA, 17 nt, Variola virus
uucuguacaaauuauug

SEQ ID NO: 3301570 - RNA, 15 nt, Variola virus
caacguaauaaugaa

SEQ ID NO: 3301571 - RNA, 14 nt, Variola virus
guaaauaacaauga

SEQ ID NO: 3301572 - RNA, 14 nt, Variola virus
acaaaggagaugau

SEQ ID NO: 3301573 - RNA, 13 nt, Variola virus
gacagaaaaaugu

SEQ ID NO: 3301574 - RNA, 15 nt, Variola virus
ugacuccaucuuuua

SEQ ID NO: 3301575 - RNA, 20 nt, Variola virus
gaacaucauuuccaaaucua

SEQ ID NO: 3301576 - RNA, 16 nt, Variola virus
aaguuuuuauucucuu

SEQ ID NO: 3301577 - RNA, 17 nt, Variola virus
uuaaugauucauuauca

SEQ ID NO: 3301578 - RNA, 18 nt, Variola virus
gaaauuuauacucaucau

SEQ ID NO: 3301579 - RNA, 21 nt, Variola virus
ucucaaaugaauaaguuuauu

SEQ ID NO: 3301580 - RNA, 17 nt, Variola virus
acuugagacuugauaga

SEQ ID NO: 3301581 - RNA, 15 nt, Variola virus
uggauguacauguau

SEQ ID NO: 3301582 - RNA, 19 nt, Variola virus
aaccugaucuggaaaauaa

SEQ ID NO: 3301583 - RNA, 15 nt, Variola virus
uaaagguaacaauau

SEQ ID NO: 3301584 - RNA, 18 nt, Variola virus
guacauuuuuaaacuguu

SEQ ID NO: 3301585 - RNA, 16 nt, Variola virus
uauaaucguuaaauuu

SEQ ID NO: 3301586 - RNA, 22 nt, Variola virus
auacauuuugcauuagauuuac

SEQ ID NO: 3301587 - RNA, 17 nt, Variola virus
uacaaauuuuaagaaau

SEQ ID NO: 3301588 - RNA, 16 nt, Variola virus
aguccuauauauuuga

SEQ ID NO: 3301589 - RNA, 15 nt, Variola virus
aucuaauauaucacu

SEQ ID NO: 3301590 - RNA, 12 nt, Variola virus
agauaaauggaa

SEQ ID NO: 3301591 - RNA, 19 nt, Variola virus
gcaguggaguuauaugaau

SEQ ID NO: 3301592 - RNA, 16 nt, Variola virus
uugguauuucuuacau

SEQ ID NO: 3301593 - RNA, 13 nt, Variola virus
aaauuagaaagua

SEQ ID NO: 3301594 - RNA, 19 nt, Variola virus
uacacaucuaucaagugau

SEQ ID NO: 3301595 - RNA, 22 nt, Variola virus
ucuaucguuauaacucgagaau

SEQ ID NO: 3301596 - RNA, 22 nt, Variola virus
gaacauccuccggaguauuaau

SEQ ID NO: 3301597 - RNA, 19 nt, Variola virus
caguuaagucaauaauauu

SEQ ID NO: 3301598 - RNA, 17 nt, Variola virus
uauuauaaaaaaguuuu

SEQ ID NO: 3301599 - RNA, 22 nt, Variola virus
ucucaugguaucgauuacaccu

SEQ ID NO: 3301600 - RNA, 15 nt, Variola virus
aaucauauuuagaaa

SEQ ID NO: 3301601 - RNA, 22 nt, Variola virus
ugccguuuauaggucuagccac

SEQ ID NO: 3301602 - RNA, 22 nt, Variola virus
uguaauaucuuaaauaacucau

SEQ ID NO: 3301603 - RNA, 14 nt, Variola virus
uaauaaauguuucg

SEQ ID NO: 3301604 - RNA, 17 nt, Variola virus
cuaugucucuuauuaga

SEQ ID NO: 3301605 - RNA, 14 nt, Variola virus
caaauuaaauucug

SEQ ID NO: 3301606 - RNA, 19 nt, Variola virus
uauaaaacgauuaaacaau

SEQ ID NO: 3301607 - RNA, 16 nt, Variola virus
aagauuacuacacuug

SEQ ID NO: 3301608 - RNA, 18 nt, Variola virus
uuguuuuaauuuuaggac

SEQ ID NO: 3301609 - RNA, 23 nt, Variola virus
uugauuuggaauucuuuuucgac

SEQ ID NO: 3301610 - RNA, 19 nt, Variola virus
uuauuuuaucuuuuacuac

SEQ ID NO: 3301611 - RNA, 14 nt, Human
cugaucucucguga

SEQ ID NO: 3301612 - RNA, 18 nt, Human
cugaucucucgugauuga

SEQ ID NO: 3301613 - RNA, 17 nt, Human
cugaucucucgugauug

SEQ ID NO: 3301614 - RNA, 21 nt, Human
cugaggaauccagacccggcu

SEQ ID NO: 3301615 - RNA, 19 nt, Human
cugacccugcuucaaauau

SEQ ID NO: 3301616 - RNA, 22 nt, Human
cugagcugggaugauuggaggg

SEQ ID NO: 3301617 - RNA, 12 nt, Human
cugagcugggau

SEQ ID NO: 3301618 - RNA, 14 nt, Human
cugaggggccucuu

SEQ ID NO: 3301619 - RNA, 23 nt, Human
cugaggaauccagacccggcugc

SEQ ID NO: 3301620 - RNA, 12 nt, Human
cugaggugggag

SEQ ID NO: 3301621 - RNA, 13 nt, Human
cugaggugggagg

SEQ ID NO: 3301622 - RNA, 22 nt, Human
cugaggugggaggaucucuuga

SEQ ID NO: 3301623 - RNA, 18 nt, Human
cucugcacaagcugcacc

SEQ ID NO: 3301624 - RNA, 17 nt, Human
cucugcacaagcugcac

SEQ ID NO: 3301625 - RNA, 24 nt, Human
cucuugauucauaaugacuuaagc

SEQ ID NO: 3301626 - RNA, 14 nt, Human
cucuugagccuggg

SEQ ID NO: 3301627 - RNA, 13 nt, Human
cucuugagccugg

SEQ ID NO: 3301628 - RNA, 15 nt, Human
cucuugagccuggga

SEQ ID NO: 3301629 - RNA, 23 nt, Human
cucuugagccuugaacuuugacc

SEQ ID NO: 3301630 - RNA, 22 nt, Human
cucuugauucauaaugacuuaa

SEQ ID NO: 3301631 - RNA, 13 nt, Human
cugacacacagcu

SEQ ID NO: 3301632 - RNA, 15 nt, Human
cugacacacagcucu

SEQ ID NO: 3301633 - RNA, 16 nt, Human
cugacacacagcucug

SEQ ID NO: 3301634 - RNA, 17 nt, Human
cugacacacagcucugu

SEQ ID NO: 3301635 - RNA, 18 nt, Human
cugacacacagcucuguc

SEQ ID NO: 3301636 - RNA, 19 nt, Human
cugacacacagcucugucc

SEQ ID NO: 3301637 - RNA, 20 nt, Human
cugacacacagcucuguccu

SEQ ID NO: 3301638 - RNA, 21 nt, Human
cugacacacagcucuguccug

SEQ ID NO: 3301639 - RNA, 22 nt, Human
cugacacacagcucuguccugg

SEQ ID NO: 3301640 - RNA, 23 nt, Human
cugacacacagcucuguccuggg

SEQ ID NO: 3301641 - RNA, 24 nt, Human
cuccuuuucacaguucucuccuuc

SEQ ID NO: 3301642 - RNA, 23 nt, Human
cuccuuugugaggaagccgcugg

SEQ ID NO: 3301643 - RNA, 22 nt, Human
cuccuuuagcgcccaguugggu

SEQ ID NO: 3301644 - RNA, 16 nt, Human
cuccuuuagcgcccag

SEQ ID NO: 3301645 - RNA, 17 nt, Human
cuccuuuagcgcccagu

SEQ ID NO: 3301646 - RNA, 22 nt, Human
cuccuagccugugccucuggga

SEQ ID NO: 3301647 - RNA, 23 nt, Human
cucgguguggagaagcggcuggc

SEQ ID NO: 3301648 - RNA, 11 nt, Human
cucggugccuu

SEQ ID NO: 3301649 - RNA, 10 nt, Human
cucuccucug

SEQ ID NO: 3301650 - RNA, 16 nt, Human
cucuccgaccagacac

SEQ ID NO: 3301651 - RNA, 20 nt, Human
cucuccuccuuuucacaguu

SEQ ID NO: 3301652 - RNA, 13 nt, Human
cucuccuccuuuu

SEQ ID NO: 3301653 - RNA, 13 nt, Human
cucucccuuggau

SEQ ID NO: 3301654 - RNA, 16 nt, Human
cucugcacaagcugca

SEQ ID NO: 3301655 - RNA, 18 nt, Human
cuccaggugcacaagcuc

SEQ ID NO: 3301656 - RNA, 20 nt, Human
cuccaggugcacaagcucca

SEQ ID NO: 3301657 - RNA, 19 nt, Human
cuccaggugcacaagcucc

SEQ ID NO: 3301658 - RNA, 14 nt, Human
cucccaccucagcc

SEQ ID NO: 3301659 - RNA, 16 nt, Human
cucccaccucagccuc

SEQ ID NO: 3301660 - RNA, 17 nt, Human
cucccaccucagccucc

SEQ ID NO: 3301661 - RNA, 13 nt, Human
cucccaccucagc

SEQ ID NO: 3301662 - RNA, 23 nt, Human
cuccaggcuguaucccaugagcc

SEQ ID NO: 3301663 - RNA, 22 nt, Human
cuccaggcuguaucccaugagc

SEQ ID NO: 3301664 - RNA, 21 nt, Human
cuccagaauuucccaaagcag

SEQ ID NO: 3301665 - RNA, 16 nt, Human
cucagaaucucaaaua

SEQ ID NO: 3301666 - RNA, 17 nt, Human
cucagaaucucaaauaa

SEQ ID NO: 3301667 - RNA, 11 nt, Human
cuccagacaca

SEQ ID NO: 3301668 - RNA, 22 nt, Human
cuccagaauuucccaaagcagu

SEQ ID NO: 3301669 - RNA, 22 nt, Human
cuccgcuuucuacccagcgagc

SEQ ID NO: 3301670 - RNA, 21 nt, Human
cuccgcuuucuacccagcgag

SEQ ID NO: 3301671 - RNA, 20 nt, Human
cuccgcuuucuacccagcga

SEQ ID NO: 3301672 - RNA, 19 nt, Human
cucccucuuucccucccuu

SEQ ID NO: 3301673 - RNA, 16 nt, Human
cucccucccucuuucc

SEQ ID NO: 3301674 - RNA, 15 nt, Human
cucccucuuucccuc

SEQ ID NO: 3301675 - RNA, 13 nt, Human
cucaccucucccu

SEQ ID NO: 3301676 - RNA, 17 nt, Human
cucaccucucccuugga

SEQ ID NO: 3301677 - RNA, 16 nt, Human
cucaccucucccuugg

SEQ ID NO: 3301678 - RNA, 15 nt, Human
cucaccucucccuug

SEQ ID NO: 3301679 - RNA, 14 nt, Human
cucaccucucccuu

SEQ ID NO: 3301680 - RNA, 13 nt, Human
cucaccugccccu

SEQ ID NO: 3301681 - RNA, 16 nt, Human
cucaccugccccucaa

SEQ ID NO: 3301682 - RNA, 14 nt, Human
cucaccugccccuc

SEQ ID NO: 3301683 - RNA, 18 nt, Human
cucaccugccccucaacu

SEQ ID NO: 3301684 - RNA, 16 nt, Human
cuauguugcccaggca

SEQ ID NO: 3301685 - RNA, 17 nt, Human
cucaaaaaaagaaaaag

SEQ ID NO: 3301686 - RNA, 18 nt, Human
cucaaaaaaagaaaaaga

SEQ ID NO: 3301687 - RNA, 14 nt, Human
cuauguugcccagg

SEQ ID NO: 3301688 - RNA, 15 nt, Human
cuauguugcccaggc

SEQ ID NO: 3301689 - RNA, 22 nt, Human
cuauguguagggcgggaggaug

SEQ ID NO: 3301690 - RNA, 16 nt, Human
cuauguaucaaugagu

SEQ ID NO: 3301691 - RNA, 17 nt, Human
cuaugugagcacaaagg

SEQ ID NO: 3301692 - RNA, 18 nt, Human
cuaucucccccagcccca

SEQ ID NO: 3301693 - RNA, 19 nt, Human
cuauguaucaaugaguaac

SEQ ID NO: 3301694 - RNA, 20 nt, Human
cuaucucccccagccccauc

SEQ ID NO: 3301695 - RNA, 12 nt, Human
cucaaauaacua

SEQ ID NO: 3301696 - RNA, 14 nt, Human
cucacaaaggaugc

SEQ ID NO: 3301697 - RNA, 14 nt, Human
cucacacaugagca

SEQ ID NO: 3301698 - RNA, 19 nt, Human
cuaguuugauuaaauucuu

SEQ ID NO: 3301699 - RNA, 17 nt, Human
cuaguuugauuaaauuc

SEQ ID NO: 3301700 - RNA, 14 nt, Human
cuagggaagauaau

SEQ ID NO: 3301701 - RNA, 20 nt, Human
cuaguuugauuaaauucuug

SEQ ID NO: 3301702 - RNA, 15 nt, Human
cuaguuugauuaaau

SEQ ID NO: 3301703 - RNA, 19 nt, Human
cuagcauacguacacauuu

SEQ ID NO: 3301704 - RNA, 18 nt, Human
cuagcauacguacacauu

SEQ ID NO: 3301705 - RNA, 16 nt, Human
cuagcauacguacaca

SEQ ID NO: 3301706 - RNA, 13 nt, Human
cuaggccugggga

SEQ ID NO: 3301707 - RNA, 12 nt, Human
cuaggccugggg

SEQ ID NO: 3301708 - RNA, 14 nt, Human
cuaggccuggccag

SEQ ID NO: 3301709 - RNA, 15 nt, Human
cuaggccuggccaga

SEQ ID NO: 3301710 - RNA, 18 nt, Human
cuaggccuggccagaugc

SEQ ID NO: 3301711 - RNA, 19 nt, Human
cuaggccuggccagaugca

SEQ ID NO: 3301712 - RNA, 13 nt, Human
cuaggccuggcca

SEQ ID NO: 3301713 - RNA, 17 nt, Human
cuagccagaggagagag

SEQ ID NO: 3301714 - RNA, 19 nt, Human
cuagccagaggagagagga

SEQ ID NO: 3301715 - RNA, 23 nt, Human
cuaccugaggggccucuuauggg

SEQ ID NO: 3301716 - RNA, 19 nt, Human
cuaccugaggggccucuua

SEQ ID NO: 3301717 - RNA, 16 nt, Human
cuaccugaggggccuc

SEQ ID NO: 3301718 - RNA, 15 nt, Human
cuaccugaggggccu

SEQ ID NO: 3301719 - RNA, 13 nt, Human
cguacacauuuua

SEQ ID NO: 3301720 - RNA, 13 nt, Human
cguuaaaauacca

SEQ ID NO: 3301721 - RNA, 19 nt, Human
cuaaaguguauuuuuuuac

SEQ ID NO: 3301722 - RNA, 19 nt, Human
cuaaaggcuaccuuuguau

SEQ ID NO: 3301723 - RNA, 17 nt, Human
cuaaaggcuaccuuugu

SEQ ID NO: 3301724 - RNA, 22 nt, Human
cuaaaguguauuuuuuuacuaa

SEQ ID NO: 3301725 - RNA, 15 nt, Human
cuaaagcugccagcc

SEQ ID NO: 3301726 - RNA, 11 nt, Human
cuaaagcugcc

SEQ ID NO: 3301727 - RNA, 16 nt, Human
cuaaaggcuaccuuug

SEQ ID NO: 3301728 - RNA, 15 nt, Human
cuaaaggcuaccuuu

SEQ ID NO: 3301729 - RNA, 14 nt, Human
cuaaagcugccagc

SEQ ID NO: 3301730 - RNA, 17 nt, Human
cggagaaaggaagggcu

SEQ ID NO: 3301731 - RNA, 20 nt, Human
cgcuggggccaguugguccc

SEQ ID NO: 3301732 - RNA, 17 nt, Human
cgcuggggccaguuggu

SEQ ID NO: 3301733 - RNA, 16 nt, Human
cgccuuaaggauguuc

SEQ ID NO: 3301734 - RNA, 13 nt, Human
cgcugccccuggc

SEQ ID NO: 3301735 - RNA, 17 nt, Human
cgcugccccuggcagcc

SEQ ID NO: 3301736 - RNA, 16 nt, Human
cgcugccccuggcagc

SEQ ID NO: 3301737 - RNA, 19 nt, Human
cgcuggaccuugaacuggg

SEQ ID NO: 3301738 - RNA, 23 nt, Human
cgcuggaccuugaacuggguacu

SEQ ID NO: 3301739 - RNA, 18 nt, Human
cgcugccccuggcagccc

SEQ ID NO: 3301740 - RNA, 22 nt, Human
cccaggcuuagucacugagaca

SEQ ID NO: 3301741 - RNA, 20 nt, Human
cccaggcuuagucacugaga

SEQ ID NO: 3301742 - RNA, 18 nt, Human
cccaggaaaggcuccagg

SEQ ID NO: 3301743 - RNA, 17 nt, Human
cccaggaaaggcuccag

SEQ ID NO: 3301744 - RNA, 16 nt, Human
cccaggaaaggcucca

SEQ ID NO: 3301745 - RNA, 15 nt, Human
cccaggaaaggcucc

SEQ ID NO: 3301746 - RNA, 23 nt, Human
cccagcaagugagagcugggugu

SEQ ID NO: 3301747 - RNA, 20 nt, Human
cccauccucuguacagagcc

SEQ ID NO: 3301748 - RNA, 22 nt, Human
cccauccucuguacagagccca

SEQ ID NO: 3301749 - RNA, 21 nt, Human
cccauccucuguacagagccc

SEQ ID NO: 3301750 - RNA, 15 nt, Human
cccauuugcuccuuu

SEQ ID NO: 3301751 - RNA, 13 nt, Human
cccauucugccug

SEQ ID NO: 3301752 - RNA, 19 nt, Human
cccauucugccugcccagg

SEQ ID NO: 3301753 - RNA, 14 nt, Human
cccauucugccugc

SEQ ID NO: 3301754 - RNA, 15 nt, Human
cccauucugccugcc

SEQ ID NO: 3301755 - RNA, 15 nt, Human
ccccagauugcaaca

SEQ ID NO: 3301756 - RNA, 20 nt, Human
ccccagauugcaacaggcug

SEQ ID NO: 3301757 - RNA, 14 nt, Human
ccccgcacugggcu

SEQ ID NO: 3301758 - RNA, 23 nt, Human
ccccgaggccuucucugaaggac

SEQ ID NO: 3301759 - RNA, 16 nt, Human
cccggccccugcuggu

SEQ ID NO: 3301760 - RNA, 15 nt, Human
cccggccccugcugg

SEQ ID NO: 3301761 - RNA, 12 nt, Human
cccgggaagggg

SEQ ID NO: 3301762 - RNA, 15 nt, Human
cccgggaagggggcu

SEQ ID NO: 3301763 - RNA, 13 nt, Human
ccccuucugaccc

SEQ ID NO: 3301764 - RNA, 14 nt, Human
ccccuucugaccca

SEQ ID NO: 3301765 - RNA, 16 nt, Human
cccgaauagcugggac

SEQ ID NO: 3301766 - RNA, 17 nt, Human
cccgaauagcugggacu

SEQ ID NO: 3301767 - RNA, 18 nt, Human
cccgaauagcugggacua

SEQ ID NO: 3301768 - RNA, 17 nt, Human
cccggccaccugcggug

SEQ ID NO: 3301769 - RNA, 16 nt, Human
cccucaacucuccucc

SEQ ID NO: 3301770 - RNA, 16 nt, Human
cccucaacaccucugc

SEQ ID NO: 3301771 - RNA, 21 nt, Human
cccgggaagggggcugggaca

SEQ ID NO: 3301772 - RNA, 18 nt, Human
cccgggaagggggcuggg

SEQ ID NO: 3301773 - RNA, 15 nt, Human
ccccugacaacacuc

SEQ ID NO: 3301774 - RNA, 14 nt, Human
ccccugccacccug

SEQ ID NO: 3301775 - RNA, 16 nt, Human
ccccugccacccuggg

SEQ ID NO: 3301776 - RNA, 16 nt, Human
cccaacucaccccagc

SEQ ID NO: 3301777 - RNA, 15 nt, Human
cccaacucaccccag

SEQ ID NO: 3301778 - RNA, 20 nt, Human
cccaacucaccccagcccca

SEQ ID NO: 3301779 - RNA, 17 nt, Human
cccaacucaccccagcc

SEQ ID NO: 3301780 - RNA, 13 nt, Human
cccaagcucugcu

SEQ ID NO: 3301781 - RNA, 14 nt, Human
cccaagcucugcuc

SEQ ID NO: 3301782 - RNA, 12 nt, Human
cccaagcucugc

SEQ ID NO: 3301783 - RNA, 12 nt, Human
cccacucccugc

SEQ ID NO: 3301784 - RNA, 13 nt, Human
cccacucccugca

SEQ ID NO: 3301785 - RNA, 23 nt, Human
cccacugcuuuuggucuguguga

SEQ ID NO: 3301786 - RNA, 22 nt, Human
cccacugcuuuuggucugugug

SEQ ID NO: 3301787 - RNA, 23 nt, Human
ccaguuggguggaugccuggugg

SEQ ID NO: 3301788 - RNA, 13 nt, Human
ccaguuggucccc

SEQ ID NO: 3301789 - RNA, 20 nt, Human
ccaguuggucccccuuccau

SEQ ID NO: 3301790 - RNA, 18 nt, Human
ccaguuggucccccuucc

SEQ ID NO: 3301791 - RNA, 18 nt, Human
ccauccagguucagcuug

SEQ ID NO: 3301792 - RNA, 19 nt, Human
ccauccagguucagcuugu

SEQ ID NO: 3301793 - RNA, 20 nt, Human
ccaucccauaugccugggca

SEQ ID NO: 3301794 - RNA, 19 nt, Human
ccaucccauaugccugggc

SEQ ID NO: 3301795 - RNA, 21 nt, Human
ccaucccauaugccugggcag

SEQ ID NO: 3301796 - RNA, 22 nt, Human
ccauccccuguagagugggagc

SEQ ID NO: 3301797 - RNA, 18 nt, Human
ccaugaguccccuguuug

SEQ ID NO: 3301798 - RNA, 23 nt, Human
ccaugaggaacaaggcaaggcug

SEQ ID NO: 3301799 - RNA, 18 nt, Human
ccaugaggaacaaggcaa

SEQ ID NO: 3301800 - RNA, 20 nt, Human
ccaugaggaacaaggcaagg

SEQ ID NO: 3301801 - RNA, 17 nt, Human
ccagccccauccucugu

SEQ ID NO: 3301802 - RNA, 15 nt, Human
ccagccccauccucu

SEQ ID NO: 3301803 - RNA, 17 nt, Human
ccagccccagugcccac

SEQ ID NO: 3301804 - RNA, 14 nt, Human
ccagcagagcaccu

SEQ ID NO: 3301805 - RNA, 13 nt, Human
ccagcagagcacc

SEQ ID NO: 3301806 - RNA, 12 nt, Human
ccagcagagcac

SEQ ID NO: 3301807 - RNA, 18 nt, Human
ccagccccuucugaccca

SEQ ID NO: 3301808 - RNA, 24 nt, Human
ccagccccuucugacccaugcugc

SEQ ID NO: 3301809 - RNA, 23 nt, Human
ccagccccuucugacccaugcug

SEQ ID NO: 3301810 - RNA, 21 nt, Human
ccaggggaaaaucagccugcu

SEQ ID NO: 3301811 - RNA, 12 nt, Human
ccaggcuggcgu

SEQ ID NO: 3301812 - RNA, 23 nt, Human
ccaggcaggucuugaacuccugg

SEQ ID NO: 3301813 - RNA, 12 nt, Human
ccaggcaggucu

SEQ ID NO: 3301814 - RNA, 14 nt, Human
ccaggcaggucuug

SEQ ID NO: 3301815 - RNA, 13 nt, Human
ccuccgccucuug

SEQ ID NO: 3301816 - RNA, 14 nt, Human
ccuccgccucuugg

SEQ ID NO: 3301817 - RNA, 20 nt, Human
ccuccuuugugaggaagccg

SEQ ID NO: 3301818 - RNA, 23 nt, Human
ccuccuuugugaggaagccgcug

SEQ ID NO: 3301819 - RNA, 18 nt, Human
ccuccuuuucacaguucu

SEQ ID NO: 3301820 - RNA, 12 nt, Human
ccucccaucacc

SEQ ID NO: 3301821 - RNA, 16 nt, Human
ccuccaagaccuucuc

SEQ ID NO: 3301822 - RNA, 19 nt, Human
ccuccaagaccuucuccuu

SEQ ID NO: 3301823 - RNA, 17 nt, Human
ccuccaagaccuucucc

SEQ ID NO: 3301824 - RNA, 17 nt, Human
ccucccaucacccgcua

SEQ ID NO: 3301825 - RNA, 20 nt, Human
ccucaagugauucuccugcc

SEQ ID NO: 3301826 - RNA, 18 nt, Human
ccucaggcaggugggaug

SEQ ID NO: 3301827 - RNA, 12 nt, Human
ccucaggcaggu

SEQ ID NO: 3301828 - RNA, 18 nt, Human
ccucauuagcauuuugcu

SEQ ID NO: 3301829 - RNA, 15 nt, Human
ccucaaccuccuggg

SEQ ID NO: 3301830 - RNA, 19 nt, Human
ccucaacucuccuccagag

SEQ ID NO: 3301831 - RNA, 23 nt, Human
ccucaacucuccuccagagucag

SEQ ID NO: 3301832 - RNA, 21 nt, Human
ccucaacucuccuccagaguc

SEQ ID NO: 3301833 - RNA, 16 nt, Human
ccucaacaccucugca

SEQ ID NO: 3301834 - RNA, 18 nt, Human
ccgcagcccugcagaggg

SEQ ID NO: 3301835 - RNA, 14 nt, Human
ccgcagcccugcag

SEQ ID NO: 3301836 - RNA, 14 nt, Human
cccuccuuucacca

SEQ ID NO: 3301837 - RNA, 21 nt, Human
cccugugaguacuacaguccu

SEQ ID NO: 3301838 - RNA, 15 nt, Human
cccugugauggggcc

SEQ ID NO: 3301839 - RNA, 23 nt, Human
cccugugaguacuacaguccucc

SEQ ID NO: 3301840 - RNA, 23 nt, Human
cccuuuuuuggcugcugaaggcu

SEQ ID NO: 3301841 - RNA, 22 nt, Human
cccuuuuuuggcugcugaaggc

SEQ ID NO: 3301842 - RNA, 21 nt, Human
cccuuuuuuggcugcugaagg

SEQ ID NO: 3301843 - RNA, 14 nt, Human
cccuucucuccagc

SEQ ID NO: 3301844 - RNA, 17 nt, Human
ccggccaccugcggugc

SEQ ID NO: 3301845 - RNA, 18 nt, Human
ccggccaccugcggugcu

SEQ ID NO: 3301846 - RNA, 22 nt, Human
ccuagccuuagaagucacacag

SEQ ID NO: 3301847 - RNA, 19 nt, Human
ccuagccuuagaagucaca

SEQ ID NO: 3301848 - RNA, 23 nt, Human
ccuagccugugccucugggacug

SEQ ID NO: 3301849 - RNA, 21 nt, Human
ccuagcauacguacacauuuu

SEQ ID NO: 3301850 - RNA, 20 nt, Human
ccuagccugugccucuggga

SEQ ID NO: 3301851 - RNA, 17 nt, Human
ccugcccaccuggccuc

SEQ ID NO: 3301852 - RNA, 15 nt, Human
ccugcccaccuggcc

SEQ ID NO: 3301853 - RNA, 16 nt, Human
ccugccucagccuccc

SEQ ID NO: 3301854 - RNA, 15 nt, Human
ccugccucagccucc

SEQ ID NO: 3301855 - RNA, 21 nt, Human
ccugcccaggccccugccacc

SEQ ID NO: 3301856 - RNA, 14 nt, Human
ccugccucagccuc

SEQ ID NO: 3301857 - RNA, 18 nt, Human
ccugcccaggccccugcc

SEQ ID NO: 3301858 - RNA, 19 nt, Human
ccugcccaggccccugcca

SEQ ID NO: 3301859 - RNA, 18 nt, Human
ccugcccaccuggccucu

SEQ ID NO: 3301860 - RNA, 16 nt, Human
ccugaggggccucuua

SEQ ID NO: 3301861 - RNA, 14 nt, Human
ccugcaggcagcca

SEQ ID NO: 3301862 - RNA, 13 nt, Human
ccugcaggcagcc

SEQ ID NO: 3301863 - RNA, 12 nt, Human
ccugcaggcagc

SEQ ID NO: 3301864 - RNA, 16 nt, Human
ccucuuucccucccuu

SEQ ID NO: 3301865 - RNA, 19 nt, Human
ccucuuucccucccuuccu

SEQ ID NO: 3301866 - RNA, 15 nt, Human
ccucuuugagugaag

SEQ ID NO: 3301867 - RNA, 15 nt, Human
ccugguggcaguggg

SEQ ID NO: 3301868 - RNA, 18 nt, Human
ccugguggcagugggagc

SEQ ID NO: 3301869 - RNA, 19 nt, Human
ccugguggcagugggagcu

SEQ ID NO: 3301870 - RNA, 13 nt, Human
ccugguguggaag

SEQ ID NO: 3301871 - RNA, 15 nt, Human
ccuggggagaaagua

SEQ ID NO: 3301872 - RNA, 20 nt, Human
ccuggccugagcugggauga

SEQ ID NO: 3301873 - RNA, 22 nt, Human
ccuggccucaagugauucuccu

SEQ ID NO: 3301874 - RNA, 21 nt, Human
ccuggccccucagggucccug

SEQ ID NO: 3301875 - RNA, 20 nt, Human
ccuggccccucagggucccu

SEQ ID NO: 3301876 - RNA, 18 nt, Human
ccuggccccucagggucc

SEQ ID NO: 3301877 - RNA, 16 nt, Human
ccuggccccucagggu

SEQ ID NO: 3301878 - RNA, 18 nt, Human
ccuggauggggcugcacc

SEQ ID NO: 3301879 - RNA, 17 nt, Human
ccuggauggggcugcac

SEQ ID NO: 3301880 - RNA, 15 nt, Human
ccuggauggggcugc

SEQ ID NO: 3301881 - RNA, 21 nt, Human
cacuacauucuguuaaucauu

SEQ ID NO: 3301882 - RNA, 17 nt, Human
cacuacauucuguuaau

SEQ ID NO: 3301883 - RNA, 16 nt, Human
cacuacauucuguuaa

SEQ ID NO: 3301884 - RNA, 13 nt, Human
cacuccagccugg

SEQ ID NO: 3301885 - RNA, 14 nt, Human
cacuccagccuggg

SEQ ID NO: 3301886 - RNA, 20 nt, Human
cacucugucgcccagucugg

SEQ ID NO: 3301887 - RNA, 14 nt, Human
cacggcucacugca

SEQ ID NO: 3301888 - RNA, 17 nt, Human
cacggccaggccagagg

SEQ ID NO: 3301889 - RNA, 12 nt, Human
cacggccaggcc

SEQ ID NO: 3301890 - RNA, 19 nt, Human
cacucuuauugcccacgcu

SEQ ID NO: 3301891 - RNA, 20 nt, Human
cacucuuauugcccacgcug

SEQ ID NO: 3301892 - RNA, 21 nt, Human
cacucuuauugcccacgcugg

SEQ ID NO: 3301893 - RNA, 22 nt, Human
cacucuuauugcccacgcugga

SEQ ID NO: 3301894 - RNA, 14 nt, Human
caccuuucccaucu

SEQ ID NO: 3301895 - RNA, 17 nt, Human
caccuuuguccccaccg

SEQ ID NO: 3301896 - RNA, 14 nt, Human
caccuuggcugcag

SEQ ID NO: 3301897 - RNA, 18 nt, Human
caccuuggcugcagggag

SEQ ID NO: 3301898 - RNA, 15 nt, Human
caccuuggcugcagg

SEQ ID NO: 3301899 - RNA, 16 nt, Human
caccuuggcugcaggg

SEQ ID NO: 3301900 - RNA, 16 nt, Human
cagaaguuucugccgc

SEQ ID NO: 3301901 - RNA, 14 nt, Human
cagaaguuucugcc

SEQ ID NO: 3301902 - RNA, 16 nt, Human
cagaaauguacagcaa

SEQ ID NO: 3301903 - RNA, 17 nt, Human
cacuguugcccaggcug

SEQ ID NO: 3301904 - RNA, 23 nt, Human
cacuguugcccaggcuggcgugc

SEQ ID NO: 3301905 - RNA, 18 nt, Human
cacuguugcccaggcugg

SEQ ID NO: 3301906 - RNA, 19 nt, Human
cacuguugcccaggcuggc

SEQ ID NO: 3301907 - RNA, 17 nt, Human
cacugccaugccagcuu

SEQ ID NO: 3301908 - RNA, 20 nt, Human
cacugcagccucaaccuccu

SEQ ID NO: 3301909 - RNA, 21 nt, Human
cacugcagccucaaccuccug

SEQ ID NO: 3301910 - RNA, 22 nt, Human
cacugcagccucaaccuccugg

SEQ ID NO: 3301911 - RNA, 23 nt, Human
cacugcagccucaaccuccuggg

SEQ ID NO: 3301912 - RNA, 19 nt, Human
cacugcagccucaaccucc

SEQ ID NO: 3301913 - RNA, 14 nt, Human
cacugcagccucaa

SEQ ID NO: 3301914 - RNA, 13 nt, Human
cacuuucuagcca

SEQ ID NO: 3301915 - RNA, 17 nt, Human
cacuuucuagccagagg

SEQ ID NO: 3301916 - RNA, 16 nt, Human
cacuuucuagccagag

SEQ ID NO: 3301917 - RNA, 18 nt, Human
cacuuguguuaugaagca

SEQ ID NO: 3301918 - RNA, 16 nt, Human
caaggcaaggcuguca

SEQ ID NO: 3301919 - RNA, 17 nt, Human
caaggcaaggcugucaa

SEQ ID NO: 3301920 - RNA, 18 nt, Human
caaggcaaggcugucaau

SEQ ID NO: 3301921 - RNA, 21 nt, Human
caaggccaaaggaagcacaug

SEQ ID NO: 3301922 - RNA, 20 nt, Human
caaggccaaaggaagcacau

SEQ ID NO: 3301923 - RNA, 19 nt, Human
caaggccaaaggaagcaca

SEQ ID NO: 3301924 - RNA, 19 nt, Human
cacaagagcccaggccucc

SEQ ID NO: 3301925 - RNA, 18 nt, Human
cacaagagcccaggccuc

SEQ ID NO: 3301926 - RNA, 19 nt, Human
cacaagcuccaagcuccca

SEQ ID NO: 3301927 - RNA, 18 nt, Human
cacaagcuccaagcuccc

SEQ ID NO: 3301928 - RNA, 20 nt, Human
cacaagagcccaggccuccu

SEQ ID NO: 3301929 - RNA, 17 nt, Human
cacaagagcccaggccu

SEQ ID NO: 3301930 - RNA, 16 nt, Human
caauggcagccuuggc

SEQ ID NO: 3301931 - RNA, 12 nt, Human
caaugcuggcug

SEQ ID NO: 3301932 - RNA, 20 nt, Human
caaugcuggcuguuggcugg

SEQ ID NO: 3301933 - RNA, 21 nt, Human
caaugcuggcuguuggcuggg

SEQ ID NO: 3301934 - RNA, 13 nt, Human
caaugcuggcugu

SEQ ID NO: 3301935 - RNA, 20 nt, Human
cacaagcuccaagcucccag

SEQ ID NO: 3301936 - RNA, 16 nt, Human
cacccaggagccccga

SEQ ID NO: 3301937 - RNA, 18 nt, Human
cacccaccucagccuccc

SEQ ID NO: 3301938 - RNA, 13 nt, Human
caccagccccagu

SEQ ID NO: 3301939 - RNA, 17 nt, Human
cacccaccucagccucc

SEQ ID NO: 3301940 - RNA, 20 nt, Human
cacauuuuauuuuauuaugc

SEQ ID NO: 3301941 - RNA, 19 nt, Human
cacauuuuauuuuauuaug

SEQ ID NO: 3301942 - RNA, 17 nt, Human
cacauuuuauuuuauua

SEQ ID NO: 3301943 - RNA, 14 nt, Human
caccaacgucugug

SEQ ID NO: 3301944 - RNA, 14 nt, Human
cacagacccugccc

SEQ ID NO: 3301945 - RNA, 13 nt, Human
cacagacccugcc

SEQ ID NO: 3301946 - RNA, 17 nt, Human
cacagacccugcccugu

SEQ ID NO: 3301947 - RNA, 16 nt, Human
cacagacccugcccug

SEQ ID NO: 3301948 - RNA, 11 nt, Human
cacagcucugu

SEQ ID NO: 3301949 - RNA, 14 nt, Human
cacagcucuguccu

SEQ ID NO: 3301950 - RNA, 17 nt, Human
cacagcucuucuccagg

SEQ ID NO: 3301951 - RNA, 14 nt, Human
cacagcucuucucc

SEQ ID NO: 3301952 - RNA, 15 nt, Human
cacagcucuucucca

SEQ ID NO: 3301953 - RNA, 15 nt, Human
cacagcucuguccug

SEQ ID NO: 3301954 - RNA, 16 nt, Human
cacagcucuguccugg

SEQ ID NO: 3301955 - RNA, 18 nt, Human
cacagcucuguccuggga

SEQ ID NO: 3301956 - RNA, 10 nt, Human
cacagcucuu

SEQ ID NO: 3301957 - RNA, 11 nt, Human
cacacauuuuu

SEQ ID NO: 3301958 - RNA, 10 nt, Human
cacacauuuu

SEQ ID NO: 3301959 - RNA, 20 nt, Human
cacacauuuuuuaaaugcac

SEQ ID NO: 3301960 - RNA, 19 nt, Human
cacacauuuuuuaaaugca

SEQ ID NO: 3301961 - RNA, 16 nt, Human
cacacauuuuuuaaau

SEQ ID NO: 3301962 - RNA, 12 nt, Human
cacacauuuuuu

SEQ ID NO: 3301963 - RNA, 16 nt, Human
caagaccacguuucua

SEQ ID NO: 3301964 - RNA, 18 nt, Human
caagaccacguuucuaaa

SEQ ID NO: 3301965 - RNA, 17 nt, Human
caagaccacguuucuaa

SEQ ID NO: 3301966 - RNA, 22 nt, Human
caagaauugaagcaggacuaaa

SEQ ID NO: 3301967 - RNA, 14 nt, Human
caacucuccuccag

SEQ ID NO: 3301968 - RNA, 18 nt, Human
caacucaccccagcccca

SEQ ID NO: 3301969 - RNA, 17 nt, Human
caacucaccccagcccc

SEQ ID NO: 3301970 - RNA, 22 nt, Human
caaagcagugcaugcugucccu

SEQ ID NO: 3301971 - RNA, 21 nt, Human
caaagcagugcaugcuguccc

SEQ ID NO: 3301972 - RNA, 18 nt, Human
caaagcagugcaugcugu

SEQ ID NO: 3301973 - RNA, 16 nt, Human
caaagauauuuugcuu

SEQ ID NO: 3301974 - RNA, 14 nt, Human
caaagauauuuugc

SEQ ID NO: 3301975 - RNA, 22 nt, Human
caaaguagaagucuuagaugua

SEQ ID NO: 3301976 - RNA, 21 nt, Human
caaaguaucccuacuguaauu

SEQ ID NO: 3301977 - RNA, 19 nt, Human
caaaguaucccuacuguaa

SEQ ID NO: 3301978 - RNA, 21 nt, Human
caaaucugcuuuuuaaagaau

SEQ ID NO: 3301979 - RNA, 23 nt, Human
caaaugcuguaacuuucugaaau

SEQ ID NO: 3301980 - RNA, 14 nt, Human
auuuuuagacagag

SEQ ID NO: 3301981 - RNA, 19 nt, Human
auuuuuaagugcugcauuu

SEQ ID NO: 3301982 - RNA, 18 nt, Human
auuuuuaagugcugcauu

SEQ ID NO: 3301983 - RNA, 16 nt, Human
auuuuuaagugcugca

SEQ ID NO: 3301984 - RNA, 16 nt, Human
auuuuuuugagacaga

SEQ ID NO: 3301985 - RNA, 18 nt, Human
auuuuuuuuuccuucagu

SEQ ID NO: 3301986 - RNA, 19 nt, Human
caaaagcugggcagguugg

SEQ ID NO: 3301987 - RNA, 17 nt, Human
auuuuuuuuuccuucag

SEQ ID NO: 3301988 - RNA, 22 nt, Human
auuuuuuuuuccuucagugccu

SEQ ID NO: 3301989 - RNA, 20 nt, Human
auuuuuuuuuccuucagugc

SEQ ID NO: 3301990 - RNA, 16 nt, Human
auuuaaugaaagacug

SEQ ID NO: 3301991 - RNA, 15 nt, Human
auuuaaugaaagacu

SEQ ID NO: 3301992 - RNA, 20 nt, Human
auuuaaugaaagacuguaca

SEQ ID NO: 3301993 - RNA, 14 nt, Human
auuucacucuccuu

SEQ ID NO: 3301994 - RNA, 18 nt, Human
auugcuugagcucaggag

SEQ ID NO: 3301995 - RNA, 23 nt, Human
auuaugcaugaaguaauaugcac

SEQ ID NO: 3301996 - RNA, 19 nt, Human
auuaaaugcccagccccuu

SEQ ID NO: 3301997 - RNA, 17 nt, Human
auuaaaugcccagcccc

SEQ ID NO: 3301998 - RNA, 18 nt, Human
auucaacagguuuuccug

SEQ ID NO: 3301999 - RNA, 14 nt, Human
auucuucugcuuca

SEQ ID NO: 3302000 - RNA, 14 nt, Human
auucuugcaaagua

SEQ ID NO: 3302001 - RNA, 16 nt, Human
auucuugcaaaguauc

SEQ ID NO: 3302002 - RNA, 15 nt, Human
auucuugcaaaguau

SEQ ID NO: 3302003 - RNA, 19 nt, Human
auucuucugcuucagccuc

SEQ ID NO: 3302004 - RNA, 20 nt, Human
auucuucugcuucagccucc

SEQ ID NO: 3302005 - RNA, 22 nt, Human
auucuucuguacgucugacagg

SEQ ID NO: 3302006 - RNA, 18 nt, Human
auucucuaguuugauuaa

SEQ ID NO: 3302007 - RNA, 17 nt, Human
auucucuaguuugauua

SEQ ID NO: 3302008 - RNA, 22 nt, Human
auucuccuuguguuacuaaguu

SEQ ID NO: 3302009 - RNA, 21 nt, Human
auucuccuuguguuacuaagu

SEQ ID NO: 3302010 - RNA, 19 nt, Human
auucuccuuguguuacuaa

SEQ ID NO: 3302011 - RNA, 18 nt, Human
auucuccuuguguuacua

SEQ ID NO: 3302012 - RNA, 17 nt, Human
auucuccuuguguuacu

SEQ ID NO: 3302013 - RNA, 15 nt, Human
cagcggggacagcuc

SEQ ID NO: 3302014 - RNA, 14 nt, Human
cagcggggacagcu

SEQ ID NO: 3302015 - RNA, 16 nt, Human
cagcggggacagcucc

SEQ ID NO: 3302016 - RNA, 17 nt, Human
cagcggggacagcuccu

SEQ ID NO: 3302017 - RNA, 21 nt, Human
cagccgagauagccaaggcca

SEQ ID NO: 3302018 - RNA, 20 nt, Human
cagccgagauagccaaggcc

SEQ ID NO: 3302019 - RNA, 15 nt, Human
cagcccuuagcaggg

SEQ ID NO: 3302020 - RNA, 16 nt, Human
cagcccuuagcaggga

SEQ ID NO: 3302021 - RNA, 21 nt, Human
cagcccuuagcagggaaacag

SEQ ID NO: 3302022 - RNA, 21 nt, Human
cagccccuggaugcagccuca

SEQ ID NO: 3302023 - RNA, 19 nt, Human
cagccccuggaugcagccu

SEQ ID NO: 3302024 - RNA, 18 nt, Human
cagccccuggaugcagcc

SEQ ID NO: 3302025 - RNA, 17 nt, Human
cagccccuggaugcagc

SEQ ID NO: 3302026 - RNA, 14 nt, Human
cagccccuggaugc

SEQ ID NO: 3302027 - RNA, 13 nt, Human
cagccccuggaug

SEQ ID NO: 3302028 - RNA, 12 nt, Human
cagccccuggau

SEQ ID NO: 3302029 - RNA, 18 nt, Human
cagcuucauuuccugugu

SEQ ID NO: 3302030 - RNA, 15 nt, Human
cagcuucauuuccug

SEQ ID NO: 3302031 - RNA, 18 nt, Human
cagcugugcucuggacag

SEQ ID NO: 3302032 - RNA, 15 nt, Human
caggaaaggcuccag

SEQ ID NO: 3302033 - RNA, 14 nt, Human
caggaaaggcucca

SEQ ID NO: 3302034 - RNA, 22 nt, Human
cagcuccagcucaccagcccca

SEQ ID NO: 3302035 - RNA, 16 nt, Human
cagcuccagcucacca

SEQ ID NO: 3302036 - RNA, 17 nt, Human
cagcuccagcucaccag

SEQ ID NO: 3302037 - RNA, 18 nt, Human
cagcuccagcucaccagc

SEQ ID NO: 3302038 - RNA, 20 nt, Human
cagcuccagcucaccagccc

SEQ ID NO: 3302039 - RNA, 13 nt, Human
cagcuccagcuca

SEQ ID NO: 3302040 - RNA, 14 nt, Human
cagcuccagcucac

SEQ ID NO: 3302041 - RNA, 15 nt, Human
cagcuccagcucacc

SEQ ID NO: 3302042 - RNA, 23 nt, Human
cagcauauucaggaagcucaggg

SEQ ID NO: 3302043 - RNA, 22 nt, Human
cagcauauucaggaagcucagg

SEQ ID NO: 3302044 - RNA, 19 nt, Human
cagcauauucaggaagcuc

SEQ ID NO: 3302045 - RNA, 13 nt, Human
cagccaggccaca

SEQ ID NO: 3302046 - RNA, 12 nt, Human
cagccaggccac

SEQ ID NO: 3302047 - RNA, 20 nt, Human
cagagucagaaguuucugcc

SEQ ID NO: 3302048 - RNA, 20 nt, Human
cagaggggguggccucccaa

SEQ ID NO: 3302049 - RNA, 19 nt, Human
cagaggggguggccuccca

SEQ ID NO: 3302050 - RNA, 17 nt, Human
cagaggggguggccucc

SEQ ID NO: 3302051 - RNA, 18 nt, Human
cagaggggguggccuccc

SEQ ID NO: 3302052 - RNA, 22 nt, Human
cagagggccugcaagggaguga

SEQ ID NO: 3302053 - RNA, 19 nt, Human
cagagggccugcaagggag

SEQ ID NO: 3302054 - RNA, 22 nt, Human
cagaaguuugagaucagccugg

SEQ ID NO: 3302055 - RNA, 23 nt, Human
cagaaguuucugccgcagcccug

SEQ ID NO: 3302056 - RNA, 20 nt, Human
cagaaguuugagaucagccu

SEQ ID NO: 3302057 - RNA, 18 nt, Human
cagagcugccaccugccu

SEQ ID NO: 3302058 - RNA, 16 nt, Human
cagagcugccaccugc

SEQ ID NO: 3302059 - RNA, 17 nt, Human
caggcugggcuucagug

SEQ ID NO: 3302060 - RNA, 16 nt, Human
caggcugggcuucagu

SEQ ID NO: 3302061 - RNA, 15 nt, Human
caggcugggcuucag

SEQ ID NO: 3302062 - RNA, 22 nt, Human
cagggaguccgaaagggacuug

SEQ ID NO: 3302063 - RNA, 18 nt, Human
cagggaggugaccccagg

SEQ ID NO: 3302064 - RNA, 16 nt, Human
caggccagagggagug

SEQ ID NO: 3302065 - RNA, 19 nt, Human
caggccagagggagugaca

SEQ ID NO: 3302066 - RNA, 21 nt, Human
caggccagagggagugacaga

SEQ ID NO: 3302067 - RNA, 17 nt, Human
caggaggccagccuuga

SEQ ID NO: 3302068 - RNA, 22 nt, Human
caggcacccaccaucaugucug

SEQ ID NO: 3302069 - RNA, 23 nt, Human
caggcacccaccaucaugucugg

SEQ ID NO: 3302070 - RNA, 18 nt, Human
caggcacccaccaucaug

SEQ ID NO: 3302071 - RNA, 16 nt, Human
caggaggccagccuug

SEQ ID NO: 3302072 - RNA, 15 nt, Human
caggaggccagccuu

SEQ ID NO: 3302073 - RNA, 14 nt, Human
caggaggccagccu

SEQ ID NO: 3302074 - RNA, 15 nt, Human
cagugccaaaaacaa

SEQ ID NO: 3302075 - RNA, 11 nt, Human
cagugggagcu

SEQ ID NO: 3302076 - RNA, 12 nt, Human
cagugcccacag

SEQ ID NO: 3302077 - RNA, 19 nt, Human
cagucugauucccaagcuc

SEQ ID NO: 3302078 - RNA, 20 nt, Human
cagucugauucccaagcucu

SEQ ID NO: 3302079 - RNA, 19 nt, Human
cagugcaugcugucccuua

SEQ ID NO: 3302080 - RNA, 23 nt, Human
cagugcaugcugucccuuacgug

SEQ ID NO: 3302081 - RNA, 22 nt, Human
cagugcaugcugucccuuacgu

SEQ ID NO: 3302082 - RNA, 21 nt, Human
cagggucucacucugucgccc

SEQ ID NO: 3302083 - RNA, 17 nt, Human
cagggucucacucuguc

SEQ ID NO: 3302084 - RNA, 18 nt, Human
cagggucucacucugucg

SEQ ID NO: 3302085 - RNA, 14 nt, Human
caggugcgaaagga

SEQ ID NO: 3302086 - RNA, 20 nt, Human
caggugcuaggaacacuccu

SEQ ID NO: 3302087 - RNA, 18 nt, Human
caggugcuaggaacacuc

SEQ ID NO: 3302088 - RNA, 14 nt, Human
cagguugguggggg

SEQ ID NO: 3302089 - RNA, 12 nt, Human
caggguuggccc

SEQ ID NO: 3302090 - RNA, 16 nt, Human
caggugauccacccac

SEQ ID NO: 3302091 - RNA, 17 nt, Human
caggugauccacccacc

SEQ ID NO: 3302092 - RNA, 22 nt, Human
caggugcacaagcuccaagcuc

SEQ ID NO: 3302093 - RNA, 19 nt, Human
cagucaccccggccaccug

SEQ ID NO: 3302094 - RNA, 20 nt, Human
cagucaccccggccaccugc

SEQ ID NO: 3302095 - RNA, 22 nt, Human
cagucaccccggccaccugcgg

SEQ ID NO: 3302096 - RNA, 16 nt, Human
cagguuuaagcuguua

SEQ ID NO: 3302097 - RNA, 14 nt, Human
cagguuuaagcugu

SEQ ID NO: 3302098 - RNA, 18 nt, Human
cagguuuaagcuguuacu

SEQ ID NO: 3302099 - RNA, 17 nt, Human
caucccagccccaauga

SEQ ID NO: 3302100 - RNA, 19 nt, Human
caucaggccaggcccucug

SEQ ID NO: 3302101 - RNA, 16 nt, Human
caucaggccaggcccu

SEQ ID NO: 3302102 - RNA, 14 nt, Human
caucaggccaggcc

SEQ ID NO: 3302103 - RNA, 15 nt, Human
caucaggccaggccc

SEQ ID NO: 3302104 - RNA, 14 nt, Human
cauccccuguagag

SEQ ID NO: 3302105 - RNA, 19 nt, Human
caucccauaugccugggca

SEQ ID NO: 3302106 - RNA, 19 nt, Human
cauagcagagaaugaaagg

SEQ ID NO: 3302107 - RNA, 22 nt, Human
cauagcagagaaugaaagggcc

SEQ ID NO: 3302108 - RNA, 20 nt, Human
cauaugccugggcagaagga

SEQ ID NO: 3302109 - RNA, 15 nt, Human
cauaugccugggcag

SEQ ID NO: 3302110 - RNA, 13 nt, Human
cauaugccugggc

SEQ ID NO: 3302111 - RNA, 22 nt, Human
cauaugccugggcagaaggaag

SEQ ID NO: 3302112 - RNA, 15 nt, Human
cauauucaggaagcu

SEQ ID NO: 3302113 - RNA, 14 nt, Human
cauauucaggaagc

SEQ ID NO: 3302114 - RNA, 20 nt, Human
cauauucaggaagcucaggg

SEQ ID NO: 3302115 - RNA, 23 nt, Human
cauuaucuagauacuguaucaug

SEQ ID NO: 3302116 - RNA, 22 nt, Human
cauuaggugugacugaauuucu

SEQ ID NO: 3302117 - RNA, 12 nt, Human
cauguuggccag

SEQ ID NO: 3302118 - RNA, 16 nt, Human
cauguccaagaagccc

SEQ ID NO: 3302119 - RNA, 18 nt, Human
cauguccaagaagcccag

SEQ ID NO: 3302120 - RNA, 20 nt, Human
cauguccaagaagcccagga

SEQ ID NO: 3302121 - RNA, 19 nt, Human
cauguccaagaagcccagg

SEQ ID NO: 3302122 - RNA, 12 nt, Human
cauuccuguucc

SEQ ID NO: 3302123 - RNA, 14 nt, Human
caugcugcccugug

SEQ ID NO: 3302124 - RNA, 23 nt, Human
caugacacgaauauugcugaugg

SEQ ID NO: 3302125 - RNA, 21 nt, Human
caugacacgaauauugcugau

SEQ ID NO: 3302126 - RNA, 23 nt, Human
caugaaguaauaugcacacauuu

SEQ ID NO: 3302127 - RNA, 22 nt, Human
caugaaguaauaugcacacauu

SEQ ID NO: 3302128 - RNA, 19 nt, Human
caugaaguaauaugcacac

SEQ ID NO: 3302129 - RNA, 15 nt, Human
caugaaguaauaugc

SEQ ID NO: 3302130 - RNA, 16 nt, Human
caugcacgugugugca

SEQ ID NO: 3302131 - RNA, 13 nt, Human
caugcuccuggcc

SEQ ID NO: 3302132 - RNA, 13 nt, Human
caugcugcccugu

SEQ ID NO: 3302133 - RNA, 12 nt, Human
caugcugcccug

SEQ ID NO: 3302134 - RNA, 23 nt, Human
caugauuaaccacuucagcugac

SEQ ID NO: 3302135 - RNA, 22 nt, Human
caugauuaaccacuucagcuga

SEQ ID NO: 3302136 - RNA, 15 nt, Human
cauuuggauuggaug

SEQ ID NO: 3302137 - RNA, 17 nt, Human
cauuugucacacacuuu

SEQ ID NO: 3302138 - RNA, 14 nt, Human
cauuuauucugcuc

SEQ ID NO: 3302139 - RNA, 16 nt, Human
cauuuuuuaaaugcac

SEQ ID NO: 3302140 - RNA, 15 nt, Human
cauuuuuuaaaugca

SEQ ID NO: 3302141 - RNA, 19 nt, Human
cauuuuuuaaaugcaccug

SEQ ID NO: 3302142 - RNA, 12 nt, Human
ccaagcuggucc

SEQ ID NO: 3302143 - RNA, 19 nt, Human
ccaagcuggucccacucag

SEQ ID NO: 3302144 - RNA, 14 nt, Human
ccaagaagcccagg

SEQ ID NO: 3302145 - RNA, 15 nt, Human
ccaaggccaaaggaa

SEQ ID NO: 3302146 - RNA, 22 nt, Human
ccaaauggaaaugggcagagca

SEQ ID NO: 3302147 - RNA, 15 nt, Human
ccaacgucugugcca

SEQ ID NO: 3302148 - RNA, 13 nt, Human
ccaacgucugugc

SEQ ID NO: 3302149 - RNA, 13 nt, Human
ccaagaagcccag

SEQ ID NO: 3302150 - RNA, 22 nt, Human
ccacagagaaaguacuucucca

SEQ ID NO: 3302151 - RNA, 18 nt, Human
ccacgcuggaccuugaac

SEQ ID NO: 3302152 - RNA, 18 nt, Human
ccaccuuggcugcaggga

SEQ ID NO: 3302153 - RNA, 19 nt, Human
ccaccuuggcugcagggag

SEQ ID NO: 3302154 - RNA, 12 nt, Human
ccaccuuggcug

SEQ ID NO: 3302155 - RNA, 14 nt, Human
ccaccuuggcugca

SEQ ID NO: 3302156 - RNA, 15 nt, Human
ccaccuuggcugcag

SEQ ID NO: 3302157 - RNA, 16 nt, Human
ccaccuuggcugcagg

SEQ ID NO: 3302158 - RNA, 19 nt, Human
ccaccaucaugucuggcua

SEQ ID NO: 3302159 - RNA, 18 nt, Human
ccaccaucaccagacagg

SEQ ID NO: 3302160 - RNA, 18 nt, Human
ccaccaucaugucuggcu

SEQ ID NO: 3302161 - RNA, 17 nt, Human
gaaccaccacacccagc

SEQ ID NO: 3302162 - RNA, 23 nt, Human
gaaccaccacacccagcccacuu

SEQ ID NO: 3302163 - RNA, 22 nt, Human
gaaccauggucggaaaacaugc

SEQ ID NO: 3302164 - RNA, 13 nt, Human
gaacuccuggccu

SEQ ID NO: 3302165 - RNA, 14 nt, Human
gaacuccuggccuc

SEQ ID NO: 3302166 - RNA, 16 nt, Human
gaagacacugaugggc

SEQ ID NO: 3302167 - RNA, 21 nt, Human
gaagacacugaugggcaaccc

SEQ ID NO: 3302168 - RNA, 13 nt, Human
gaagacagcucuu

SEQ ID NO: 3302169 - RNA, 12 nt, Human
gaagacagcucu

SEQ ID NO: 3302170 - RNA, 15 nt, Human
gaagacagagcuaca

SEQ ID NO: 3302171 - RNA, 13 nt, Human
gaagacagagcua

SEQ ID NO: 3302172 - RNA, 15 nt, Human
gaagacagcucuuau

SEQ ID NO: 3302173 - RNA, 14 nt, Human
gaagacagcucuua

SEQ ID NO: 3302174 - RNA, 21 nt, Human
gaagcacaugccucucucagg

SEQ ID NO: 3302175 - RNA, 16 nt, Human
gaagcaccauaacuuu

SEQ ID NO: 3302176 - RNA, 13 nt, Human
gaagcacagcuuc

SEQ ID NO: 3302177 - RNA, 14 nt, Human
gaagcacagcuuca

SEQ ID NO: 3302178 - RNA, 22 nt, Human
gaagcacaugccucucucaggc

SEQ ID NO: 3302179 - RNA, 17 nt, Human
gaagacucauucuucug

SEQ ID NO: 3302180 - RNA, 18 nt, Human
gaagacucauucuucugu

SEQ ID NO: 3302181 - RNA, 16 nt, Human
gaagacucauucuucu

SEQ ID NO: 3302182 - RNA, 18 nt, Human
gaaccaccacacccagcc

SEQ ID NO: 3302183 - RNA, 20 nt, Human
gaaccaccacacccagccca

SEQ ID NO: 3302184 - RNA, 21 nt, Human
gaaccaccacacccagcccac

SEQ ID NO: 3302185 - RNA, 22 nt, Human
gaaccaccacacccagcccacu

SEQ ID NO: 3302186 - RNA, 23 nt, Human
gaaaagaaaaaugagccuggcaa

SEQ ID NO: 3302187 - RNA, 17 nt, Human
gaaacuggauuaaacuu

SEQ ID NO: 3302188 - RNA, 13 nt, Human
gaaacuggauuaa

SEQ ID NO: 3302189 - RNA, 21 nt, Human
gaaagaaaauaccaaggaaca

SEQ ID NO: 3302190 - RNA, 13 nt, Human
gaaaggcuccagg

SEQ ID NO: 3302191 - RNA, 15 nt, Human
gaaaggcuccaggag

SEQ ID NO: 3302192 - RNA, 14 nt, Human
gaaaggcuccagga

SEQ ID NO: 3302193 - RNA, 12 nt, Human
gaaaggcuccag

SEQ ID NO: 3302194 - RNA, 13 nt, Human
gaaagggcccaga

SEQ ID NO: 3302195 - RNA, 15 nt, Human
gaaagggcccagaga

SEQ ID NO: 3302196 - RNA, 16 nt, Human
gaaagggcccagagag

SEQ ID NO: 3302197 - RNA, 14 nt, Human
cuugguccugcugc

SEQ ID NO: 3302198 - RNA, 22 nt, Human
cuugguagaagcccuucuaccu

SEQ ID NO: 3302199 - RNA, 19 nt, Human
cuuggugucgggcaugaca

SEQ ID NO: 3302200 - RNA, 15 nt, Human
cuugucuuuggaccc

SEQ ID NO: 3302201 - RNA, 13 nt, Human
cuugucuuuggac

SEQ ID NO: 3302202 - RNA, 18 nt, Human
cuugucuuuggacccuga

SEQ ID NO: 3302203 - RNA, 23 nt, Human
cuuuaaugucacaggcaggucca

SEQ ID NO: 3302204 - RNA, 15 nt, Human
cuuucacccuuuucu

SEQ ID NO: 3302205 - RNA, 14 nt, Human
cuuucacccuuuuc

SEQ ID NO: 3302206 - RNA, 20 nt, Human
cuuucacccuuuucuguuug

SEQ ID NO: 3302207 - RNA, 15 nt, Human
cuuucuacccagcga

SEQ ID NO: 3302208 - RNA, 16 nt, Human
cuuucuacccagcgag

SEQ ID NO: 3302209 - RNA, 17 nt, Human
cuuugacgccaucccag

SEQ ID NO: 3302210 - RNA, 16 nt, Human
cuuugacgccauccca

SEQ ID NO: 3302211 - RNA, 21 nt, Human
cuuuuauaaacuuuaccuuuu

SEQ ID NO: 3302212 - RNA, 20 nt, Human
cuuuuauaaacuuuaccuuu

SEQ ID NO: 3302213 - RNA, 22 nt, Human
cuuuguauucucuccuguaccu

SEQ ID NO: 3302214 - RNA, 19 nt, Human
cuuuuauaaacuuuaccuu

SEQ ID NO: 3302215 - RNA, 17 nt, Human
cuuuguauucucuccug

SEQ ID NO: 3302216 - RNA, 13 nt, Human
cuuccuccuggug

SEQ ID NO: 3302217 - RNA, 22 nt, Human
cuuccucuuuccaucuacccuc

SEQ ID NO: 3302218 - RNA, 21 nt, Human
cuuccucuuuccaucuacccu

SEQ ID NO: 3302219 - RNA, 14 nt, Human
cuucuucagagacu

SEQ ID NO: 3302220 - RNA, 13 nt, Human
cuucuucagagac

SEQ ID NO: 3302221 - RNA, 23 nt, Human
cuucugaacuuggcgcugccccu

SEQ ID NO: 3302222 - RNA, 23 nt, Human
cuugaaugaugccaugaggaaca

SEQ ID NO: 3302223 - RNA, 20 nt, Human
cuugacagggcacaccgggc

SEQ ID NO: 3302224 - RNA, 16 nt, Human
cuugacaucaacugca

SEQ ID NO: 3302225 - RNA, 17 nt, Human
cuugauauccucuuuga

SEQ ID NO: 3302226 - RNA, 22 nt, Human
cuugauauccucuuugagugaa

SEQ ID NO: 3302227 - RNA, 18 nt, Human
cuugauguguuaucucuu

SEQ ID NO: 3302228 - RNA, 15 nt, Human
cuugauguguuaucu

SEQ ID NO: 3302229 - RNA, 22 nt, Human
cuuggauuguccccgacccuug

SEQ ID NO: 3302230 - RNA, 24 nt, Human
cuuggauuguccccgacccuugcc

SEQ ID NO: 3302231 - RNA, 23 nt, Human
cuuggauuguccccgacccuugc

SEQ ID NO: 3302232 - RNA, 12 nt, Human
cuugcaaaguau

SEQ ID NO: 3302233 - RNA, 14 nt, Human
cugcuucaaauauu

SEQ ID NO: 3302234 - RNA, 21 nt, Human
cugcuucaaggauccugagcc

SEQ ID NO: 3302235 - RNA, 12 nt, Human
cugcuucaagga

SEQ ID NO: 3302236 - RNA, 19 nt, Human
cugcuucaaauauuucccu

SEQ ID NO: 3302237 - RNA, 23 nt, Human
cugcuucaaggauccugagccag

SEQ ID NO: 3302238 - RNA, 22 nt, Human
cugcuucaaggauccugagcca

SEQ ID NO: 3302239 - RNA, 20 nt, Human
cugcuuuugucuaugggacu

SEQ ID NO: 3302240 - RNA, 20 nt, Human
cugcuucaaggauccugagc

SEQ ID NO: 3302241 - RNA, 19 nt, Human
cugcuuuugucuaugggac

SEQ ID NO: 3302242 - RNA, 21 nt, Human
cugcuuuugucuaugggacuc

SEQ ID NO: 3302243 - RNA, 15 nt, Human
cugccucucccauca

SEQ ID NO: 3302244 - RNA, 22 nt, Human
cugccucucccaucacuucccu

SEQ ID NO: 3302245 - RNA, 23 nt, Human
cugccucucccaucacuucccua

SEQ ID NO: 3302246 - RNA, 17 nt, Human
cugccuguucagcucca

SEQ ID NO: 3302247 - RNA, 18 nt, Human
cugccuguucagcuccag

SEQ ID NO: 3302248 - RNA, 19 nt, Human
cugccuguucagcuccagc

SEQ ID NO: 3302249 - RNA, 20 nt, Human
cugccuguugggccaggagc

SEQ ID NO: 3302250 - RNA, 21 nt, Human
cugcugacuguuuucucuuga

SEQ ID NO: 3302251 - RNA, 18 nt, Human
cugcugacuguuuucucu

SEQ ID NO: 3302252 - RNA, 22 nt, Human
cugccuguugggccaggagccu

SEQ ID NO: 3302253 - RNA, 21 nt, Human
cugccuguugggccaggagcc

SEQ ID NO: 3302254 - RNA, 15 nt, Human
cugccuguucagcuc

SEQ ID NO: 3302255 - RNA, 18 nt, Human
cuggcagaguugaagaca

SEQ ID NO: 3302256 - RNA, 17 nt, Human
cuggcagaguugaagac

SEQ ID NO: 3302257 - RNA, 12 nt, Human
cuggcagccccu

SEQ ID NO: 3302258 - RNA, 11 nt, Human
cuggcagccca

SEQ ID NO: 3302259 - RNA, 22 nt, Human
cuggccccucagggucccuggu

SEQ ID NO: 3302260 - RNA, 12 nt, Human
cugggcagaagg

SEQ ID NO: 3302261 - RNA, 15 nt, Human
cugggcagaaggaag

SEQ ID NO: 3302262 - RNA, 14 nt, Human
cuggggagaaagua

SEQ ID NO: 3302263 - RNA, 18 nt, Human
cuggguucacugcaaccu

SEQ ID NO: 3302264 - RNA, 20 nt, Human
cuggguucacugcaaccucc

SEQ ID NO: 3302265 - RNA, 15 nt, Human
cuggguucacugcaa

SEQ ID NO: 3302266 - RNA, 18 nt, Human
cugugccucugggacugg

SEQ ID NO: 3302267 - RNA, 14 nt, Human
cugugcugcccugc

SEQ ID NO: 3302268 - RNA, 13 nt, Human
cugugcugcccug

SEQ ID NO: 3302269 - RNA, 12 nt, Human
cugugcugcccu

SEQ ID NO: 3302270 - RNA, 19 nt, Human
cugugucagcauagaagua

SEQ ID NO: 3302271 - RNA, 17 nt, Human
cugugucagcauagaag

SEQ ID NO: 3302272 - RNA, 19 nt, Human
cugugcugcccugcccacc

SEQ ID NO: 3302273 - RNA, 18 nt, Human
cugugcugcccugcccac

SEQ ID NO: 3302274 - RNA, 17 nt, Human
cugugcugcccugccca

SEQ ID NO: 3302275 - RNA, 15 nt, Human
cugugcugcccugcc

SEQ ID NO: 3302276 - RNA, 15 nt, Human
cugucgcccagucug

SEQ ID NO: 3302277 - RNA, 16 nt, Human
cugucgcccagucugg

SEQ ID NO: 3302278 - RNA, 20 nt, Human
cugucaauuacaggaaguac

SEQ ID NO: 3302279 - RNA, 19 nt, Human
cugucaauuacaggaagua

SEQ ID NO: 3302280 - RNA, 23 nt, Human
cugucaauuacaggaaguacugg

SEQ ID NO: 3302281 - RNA, 21 nt, Human
cuguccugggagugagcuggu

SEQ ID NO: 3302282 - RNA, 13 nt, Human
cuguagaguggga

SEQ ID NO: 3302283 - RNA, 19 nt, Human
cuuagggaaggauacaaaa

SEQ ID NO: 3302284 - RNA, 21 nt, Human
cuuagggaaggauacaaaagc

SEQ ID NO: 3302285 - RNA, 21 nt, Human
cuuagcagggaaacagcuaau

SEQ ID NO: 3302286 - RNA, 16 nt, Human
cuuaccagcagagcac

SEQ ID NO: 3302287 - RNA, 22 nt, Human
cuuagcucauucuccuuguguu

SEQ ID NO: 3302288 - RNA, 23 nt, Human
cuuagcucauucuccuuguguua

SEQ ID NO: 3302289 - RNA, 15 nt, Human
cuguuggccagugug

SEQ ID NO: 3302290 - RNA, 19 nt, Human
cuguuggcugggggccuca

SEQ ID NO: 3302291 - RNA, 22 nt, Human
cuguuggcugggggccucagug

SEQ ID NO: 3302292 - RNA, 14 nt, Human
cuguuggcuggggg

SEQ ID NO: 3302293 - RNA, 15 nt, Human
cuuaccagcagagca

SEQ ID NO: 3302294 - RNA, 14 nt, Human
cuuaaaacaacacu

SEQ ID NO: 3302295 - RNA, 19 nt, Human
gauucuccugccucagccu

SEQ ID NO: 3302296 - RNA, 20 nt, Human
gauucuccugccucagccuc

SEQ ID NO: 3302297 - RNA, 21 nt, Human
gauucuccugccucagccucc

SEQ ID NO: 3302298 - RNA, 23 nt, Human
gauuuaacagaaauguacagcaa

SEQ ID NO: 3302299 - RNA, 20 nt, Human
gauuuaacagaaauguacag

SEQ ID NO: 3302300 - RNA, 23 nt, Human
gauucuuauggacaaugacccag

SEQ ID NO: 3302301 - RNA, 21 nt, Human
gauucuucugcuucagccucc

SEQ ID NO: 3302302 - RNA, 20 nt, Human
gauucuucugcuucagccuc

SEQ ID NO: 3302303 - RNA, 16 nt, Human
gauuucacucuccuug

SEQ ID NO: 3302304 - RNA, 13 nt, Human
gauuucacucucc

SEQ ID NO: 3302305 - RNA, 19 nt, Human
gauuuaacagaaauguaca

SEQ ID NO: 3302306 - RNA, 18 nt, Human
gauuucacucuccuuggu

SEQ ID NO: 3302307 - RNA, 17 nt, Human
gauuucacucuccuugg

SEQ ID NO: 3302308 - RNA, 22 nt, Human
gauuuuuuuuuccuucagugcc

SEQ ID NO: 3302309 - RNA, 23 nt, Human
gauuuuuuuuuccuucagugccu

SEQ ID NO: 3302310 - RNA, 18 nt, Human
gaucuggguucacugcaa

SEQ ID NO: 3302311 - RNA, 21 nt, Human
gaugaugaaaugaggucagag

SEQ ID NO: 3302312 - RNA, 16 nt, Human
gaugcuuguacauaau

SEQ ID NO: 3302313 - RNA, 14 nt, Human
gaugcuuguacaua

SEQ ID NO: 3302314 - RNA, 11 nt, Human
gcaauaaagca

SEQ ID NO: 3302315 - RNA, 23 nt, Human
gcaauaaggggagaguaacccug

SEQ ID NO: 3302316 - RNA, 12 nt, Human
gcacacaccaga

SEQ ID NO: 3302317 - RNA, 14 nt, Human
gcacacaccagagc

SEQ ID NO: 3302318 - RNA, 15 nt, Human
gcacacaccagagcc

SEQ ID NO: 3302319 - RNA, 16 nt, Human
gcacacaccagagccc

SEQ ID NO: 3302320 - RNA, 17 nt, Human
gcacacaccagagccca

SEQ ID NO: 3302321 - RNA, 18 nt, Human
gcacacaccagagcccac

SEQ ID NO: 3302322 - RNA, 19 nt, Human
gcacacaccagagcccacc

SEQ ID NO: 3302323 - RNA, 18 nt, Human
gcaaccuccgccucuugg

SEQ ID NO: 3302324 - RNA, 22 nt, Human
gcaacccuggugaccagcacca

SEQ ID NO: 3302325 - RNA, 17 nt, Human
gcaacccccagccugcu

SEQ ID NO: 3302326 - RNA, 16 nt, Human
gcaaaagaugcuucuc

SEQ ID NO: 3302327 - RNA, 18 nt, Human
gcaacccccagccugcua

SEQ ID NO: 3302328 - RNA, 15 nt, Human
gcaaaagaugcuucu

SEQ ID NO: 3302329 - RNA, 22 nt, Human
gcacuauaauguaagcucuacu

SEQ ID NO: 3302330 - RNA, 22 nt, Human
gcacuauagccuaggugacaga

SEQ ID NO: 3302331 - RNA, 15 nt, Human
gcacuccagccuggg

SEQ ID NO: 3302332 - RNA, 17 nt, Human
gcacuccagccugggug

SEQ ID NO: 3302333 - RNA, 12 nt, Human
gcaccuccugcc

SEQ ID NO: 3302334 - RNA, 16 nt, Human
gcaccggcuggccugg

SEQ ID NO: 3302335 - RNA, 15 nt, Human
gcaccggcuggccug

SEQ ID NO: 3302336 - RNA, 17 nt, Human
gcaccggcuggccuggc

SEQ ID NO: 3302337 - RNA, 11 nt, Human
gcacacauuuu

SEQ ID NO: 3302338 - RNA, 12 nt, Human
gcacacauuuuu

SEQ ID NO: 3302339 - RNA, 20 nt, Human
gcacacaccagagcccaccu

SEQ ID NO: 3302340 - RNA, 19 nt, Human
gcagcugcgguccacccag

SEQ ID NO: 3302341 - RNA, 22 nt, Human
gcagcugcgguccacccaggag

SEQ ID NO: 3302342 - RNA, 23 nt, Human
gcagcugcgguccacccaggagc

SEQ ID NO: 3302343 - RNA, 13 nt, Human
gcagcugcuuuug

SEQ ID NO: 3302344 - RNA, 20 nt, Human
gcagcugcuuuugucuaugg

SEQ ID NO: 3302345 - RNA, 16 nt, Human
gcagcuugaggguugg

SEQ ID NO: 3302346 - RNA, 19 nt, Human
gcagcuugaggguugggcu

SEQ ID NO: 3302347 - RNA, 21 nt, Human
gcagcuugaggguugggcugg

SEQ ID NO: 3302348 - RNA, 12 nt, Human
gcaggcucucag

SEQ ID NO: 3302349 - RNA, 22 nt, Human
gcaggcucgggcuccccagccc

SEQ ID NO: 3302350 - RNA, 16 nt, Human
gcaggcucucaggcca

SEQ ID NO: 3302351 - RNA, 15 nt, Human
gcaggcucucaggcc

SEQ ID NO: 3302352 - RNA, 14 nt, Human
gcaggcucucaggc

SEQ ID NO: 3302353 - RNA, 13 nt, Human
gcaggcucucagg

SEQ ID NO: 3302354 - RNA, 17 nt, Human
gcaggcucucaggccag

SEQ ID NO: 3302355 - RNA, 13 nt, Human
gcagggaaacagc

SEQ ID NO: 3302356 - RNA, 22 nt, Human
gcagggaaacagcuaaugggac

SEQ ID NO: 3302357 - RNA, 15 nt, Human
gcauaccacuuuugu

SEQ ID NO: 3302358 - RNA, 15 nt, Human
gcauaaaaauuagcc

SEQ ID NO: 3302359 - RNA, 23 nt, Human
gcaguugccagucaccccggcca

SEQ ID NO: 3302360 - RNA, 14 nt, Human
gcaguugccaguca

SEQ ID NO: 3302361 - RNA, 11 nt, Human
gccaaggccaa

SEQ ID NO: 3302362 - RNA, 17 nt, Human
gccaaggccaaaggaag

SEQ ID NO: 3302363 - RNA, 17 nt, Human
gcauccuggcacccggc

SEQ ID NO: 3302364 - RNA, 21 nt, Human
gcauccuggcacccggccccu

SEQ ID NO: 3302365 - RNA, 14 nt, Human
gcauccuggcaccc

SEQ ID NO: 3302366 - RNA, 22 nt, Human
gcauccuggcacccggccccug

SEQ ID NO: 3302367 - RNA, 23 nt, Human
gcauccuggcacccggccccugc

SEQ ID NO: 3302368 - RNA, 17 nt, Human
gcaugugaugagaggaa

SEQ ID NO: 3302369 - RNA, 19 nt, Human
gcaugggaaugaaugucag

SEQ ID NO: 3302370 - RNA, 16 nt, Human
gcaugggaaugaaugu

SEQ ID NO: 3302371 - RNA, 13 nt, Human
gcaugggaaugaa

SEQ ID NO: 3302372 - RNA, 12 nt, Human
gcauuuaaaaga

SEQ ID NO: 3302373 - RNA, 18 nt, Human
gcauugugggaaggggag

SEQ ID NO: 3302374 - RNA, 16 nt, Human
gcauuugaaaauuuug

SEQ ID NO: 3302375 - RNA, 14 nt, Human
gcauuugaaaauuu

SEQ ID NO: 3302376 - RNA, 18 nt, Human
gccaagaauucuuaaaua

SEQ ID NO: 3302377 - RNA, 14 nt, Human
gccaagaauucuua

SEQ ID NO: 3302378 - RNA, 13 nt, Human
gacagcuccuucu

SEQ ID NO: 3302379 - RNA, 14 nt, Human
gacagcuccuucug

SEQ ID NO: 3302380 - RNA, 15 nt, Human
gacagcuccuucugu

SEQ ID NO: 3302381 - RNA, 11 nt, Human
gacagcuccuu

SEQ ID NO: 3302382 - RNA, 15 nt, Human
gaccaucccugaagg

SEQ ID NO: 3302383 - RNA, 14 nt, Human
gaccaucccugaag

SEQ ID NO: 3302384 - RNA, 16 nt, Human
gaccauucuccaccug

SEQ ID NO: 3302385 - RNA, 17 nt, Human
gaccaucccugaaggcc

SEQ ID NO: 3302386 - RNA, 16 nt, Human
gaccaucccugaaggc

SEQ ID NO: 3302387 - RNA, 12 nt, Human
gacccggcugcg

SEQ ID NO: 3302388 - RNA, 13 nt, Human
gacccggcugcgu

SEQ ID NO: 3302389 - RNA, 16 nt, Human
gacccuauugcugcuu

SEQ ID NO: 3302390 - RNA, 13 nt, Human
gacgcugugcugc

SEQ ID NO: 3302391 - RNA, 12 nt, Human
gacgcugugcug

SEQ ID NO: 3302392 - RNA, 21 nt, Human
gacuuuucuguccgagcuuug

SEQ ID NO: 3302393 - RNA, 20 nt, Human
gacuuuuccaacccucauca

SEQ ID NO: 3302394 - RNA, 22 nt, Human
gacuuuguuaguuucuccaagc

SEQ ID NO: 3302395 - RNA, 14 nt, Human
gacuuuggaaagag

SEQ ID NO: 3302396 - RNA, 14 nt, Human
gacuuuggaaagac

SEQ ID NO: 3302397 - RNA, 18 nt, Human
gacuguuuucucuugaga

SEQ ID NO: 3302398 - RNA, 16 nt, Human
gacuguuuucucuuga

SEQ ID NO: 3302399 - RNA, 22 nt, Human
gacuguacaaaguagaagucuu

SEQ ID NO: 3302400 - RNA, 17 nt, Human
gacucaaugcacugaca

SEQ ID NO: 3302401 - RNA, 14 nt, Human
gacucaaugcacug

SEQ ID NO: 3302402 - RNA, 16 nt, Human
gagaagcggcuggcag

SEQ ID NO: 3302403 - RNA, 17 nt, Human
gagaagcggcuggcagc

SEQ ID NO: 3302404 - RNA, 19 nt, Human
gaggccagagacacaagcc

SEQ ID NO: 3302405 - RNA, 20 nt, Human
gaggccagagacacaagccu

SEQ ID NO: 3302406 - RNA, 14 nt, Human
gaggcucugcccuu

SEQ ID NO: 3302407 - RNA, 13 nt, Human
gaggcucugcccu

SEQ ID NO: 3302408 - RNA, 12 nt, Human
gaggcucugccc

SEQ ID NO: 3302409 - RNA, 17 nt, Human
gaggcucugcccuuggu

SEQ ID NO: 3302410 - RNA, 15 nt, Human
gaggcucugcccuug

SEQ ID NO: 3302411 - RNA, 12 nt, Human
gaggggaacaga

SEQ ID NO: 3302412 - RNA, 15 nt, Human
gagggcuccagacac

SEQ ID NO: 3302413 - RNA, 14 nt, Human
gagggcuccagaca

SEQ ID NO: 3302414 - RNA, 13 nt, Human
gagggcuccagac

SEQ ID NO: 3302415 - RNA, 12 nt, Human
gagggcuccaga

SEQ ID NO: 3302416 - RNA, 13 nt, Human
gaggugggauccu

SEQ ID NO: 3302417 - RNA, 16 nt, Human
gaggugggauccucca

SEQ ID NO: 3302418 - RNA, 15 nt, Human
gaggugggauccucc

SEQ ID NO: 3302419 - RNA, 17 nt, Human
gaggugggauccuccag

SEQ ID NO: 3302420 - RNA, 21 nt, Human
gagucacuggaacacuaauga

SEQ ID NO: 3302421 - RNA, 14 nt, Human
gagucacuggaaca

SEQ ID NO: 3302422 - RNA, 19 nt, Human
gaguugauacuacaguuug

SEQ ID NO: 3302423 - RNA, 21 nt, Human
gaguugauagcacagacccug

SEQ ID NO: 3302424 - RNA, 22 nt, Human
gaguugauacuacaguuuguua

SEQ ID NO: 3302425 - RNA, 13 nt, Human
gagugcagugagc

SEQ ID NO: 3302426 - RNA, 18 nt, Human
gagugcagugagccgaga

SEQ ID NO: 3302427 - RNA, 18 nt, Human
gagucagaaguuucugcc

SEQ ID NO: 3302428 - RNA, 14 nt, Human
gagugagacucugu

SEQ ID NO: 3302429 - RNA, 18 nt, Human
gagugagacucugucuca

SEQ ID NO: 3302430 - RNA, 15 nt, Human
gagcugccuguucag

SEQ ID NO: 3302431 - RNA, 16 nt, Human
gagcugccuguucagc

SEQ ID NO: 3302432 - RNA, 19 nt, Human
gagcugccuguucagcucc

SEQ ID NO: 3302433 - RNA, 13 nt, Human
gagccuuccaggg

SEQ ID NO: 3302434 - RNA, 12 nt, Human
gagccuuccagg

SEQ ID NO: 3302435 - RNA, 17 nt, Human
gagcaucaggccaggcc

SEQ ID NO: 3302436 - RNA, 22 nt, Human
gagcaucaggccaggcccucug

SEQ ID NO: 3302437 - RNA, 20 nt, Human
gagcaucaggccaggcccuc

SEQ ID NO: 3302438 - RNA, 23 nt, Human
ggccucaagugauucuccugccu

SEQ ID NO: 3302439 - RNA, 23 nt, Human
ggcccuucucuccagccccugga

SEQ ID NO: 3302440 - RNA, 22 nt, Human
ggcccuucucuccagccccugg

SEQ ID NO: 3302441 - RNA, 13 nt, Human
ggccccugcuggu

SEQ ID NO: 3302442 - RNA, 14 nt, Human
ggccccugcugguu

SEQ ID NO: 3302443 - RNA, 23 nt, Human
ggccccugcugguucaggguugg

SEQ ID NO: 3302444 - RNA, 13 nt, Human
ggcccggcuccag

SEQ ID NO: 3302445 - RNA, 15 nt, Human
ggcccggcuccaggc

SEQ ID NO: 3302446 - RNA, 21 nt, Human
ggcccuucucuccagccccug

SEQ ID NO: 3302447 - RNA, 20 nt, Human
ggcccuucucuccagccccu

SEQ ID NO: 3302448 - RNA, 19 nt, Human
ggcccuucucuccagcccc

SEQ ID NO: 3302449 - RNA, 17 nt, Human
ggccaguuggucccccu

SEQ ID NO: 3302450 - RNA, 14 nt, Human
ggccaguugguccc

SEQ ID NO: 3302451 - RNA, 20 nt, Human
ggccagugugacaaggauug

SEQ ID NO: 3302452 - RNA, 16 nt, Human
ggccagugugacaagg

SEQ ID NO: 3302453 - RNA, 22 nt, Human
ggcagccccuguucuggcagag

SEQ ID NO: 3302454 - RNA, 21 nt, Human
ggcaguggugguuuucuguuc

SEQ ID NO: 3302455 - RNA, 20 nt, Human
ggcaguggugguuuucuguu

SEQ ID NO: 3302456 - RNA, 16 nt, Human
ggagagaagagaaugc

SEQ ID NO: 3302457 - RNA, 23 nt, Human
ggcacucagaagacacugauggg

SEQ ID NO: 3302458 - RNA, 20 nt, Human
ggcacucagaagacacugau

SEQ ID NO: 3302459 - RNA, 13 nt, Human
ggcacaucagcac

SEQ ID NO: 3302460 - RNA, 19 nt, Human
ggcacagaaaauggaagac

SEQ ID NO: 3302461 - RNA, 21 nt, Human
ggcacagaaaauggaagacag

SEQ ID NO: 3302462 - RNA, 20 nt, Human
ggcacagaaaauggaagaca

SEQ ID NO: 3302463 - RNA, 23 nt, Human
ggcagccccauucugccugccca

SEQ ID NO: 3302464 - RNA, 11 nt, Human
ggcagccccug

SEQ ID NO: 3302465 - RNA, 11 nt, Human
ggcucucaggc

SEQ ID NO: 3302466 - RNA, 13 nt, Human
ggcucucaggcca

SEQ ID NO: 3302467 - RNA, 12 nt, Human
ggcucuuccagg

SEQ ID NO: 3302468 - RNA, 22 nt, Human
ggcugcaugcgggcuuccuccu

SEQ ID NO: 3302469 - RNA, 20 nt, Human
ggcugccaaugggagcucau

SEQ ID NO: 3302470 - RNA, 19 nt, Human
ggcugccaaugggagcuca

SEQ ID NO: 3302471 - RNA, 22 nt, Human
ggcugcggaaugaaccacaucu

SEQ ID NO: 3302472 - RNA, 16 nt, Human
ggcugggagagccuuc

SEQ ID NO: 3302473 - RNA, 15 nt, Human
ggcugggagagccuu

SEQ ID NO: 3302474 - RNA, 14 nt, Human
ggcugggagagccu

SEQ ID NO: 3302475 - RNA, 13 nt, Human
ggcugggagagcc

SEQ ID NO: 3302476 - RNA, 18 nt, Human
ggcucagcggggacagcu

SEQ ID NO: 3302477 - RNA, 20 nt, Human
ggcucagguggggucacucu

SEQ ID NO: 3302478 - RNA, 19 nt, Human
ggcucagguggggucacuc

SEQ ID NO: 3302479 - RNA, 19 nt, Human
ggcucagcggggacagcuc

SEQ ID NO: 3302480 - RNA, 15 nt, Human
ggcugggggccucag

SEQ ID NO: 3302481 - RNA, 16 nt, Human
ggcugggggccucagu

SEQ ID NO: 3302482 - RNA, 17 nt, Human
ggcugggggccucagug

SEQ ID NO: 3302483 - RNA, 19 nt, Human
ggcugggggccucagugcc

SEQ ID NO: 3302484 - RNA, 19 nt, Human
ggcuggguggcaccagcag

SEQ ID NO: 3302485 - RNA, 21 nt, Human
ggcuggguucuacccaggugc

SEQ ID NO: 3302486 - RNA, 19 nt, Human
ggcuggguucuacccaggu

SEQ ID NO: 3302487 - RNA, 14 nt, Human
ggcugggggccuca

SEQ ID NO: 3302488 - RNA, 18 nt, Human
ggcuucaguggcagcugc

SEQ ID NO: 3302489 - RNA, 17 nt, Human
ggcuucaguggcagcug

SEQ ID NO: 3302490 - RNA, 19 nt, Human
ggcuucaguggcagcugcu

SEQ ID NO: 3302491 - RNA, 20 nt, Human
ggcuucaguggcagcugcuu

SEQ ID NO: 3302492 - RNA, 18 nt, Human
ggcuguaucccaugagcc

SEQ ID NO: 3302493 - RNA, 16 nt, Human
ggcuuccucauaguau

SEQ ID NO: 3302494 - RNA, 22 nt, Human
ggcuucauccuccucagaucuu

SEQ ID NO: 3302495 - RNA, 18 nt, Human
ggcuucauccuccucaga

SEQ ID NO: 3302496 - RNA, 12 nt, Human
gggacagcuccu

SEQ ID NO: 3302497 - RNA, 13 nt, Human
gggacagcuccuu

SEQ ID NO: 3302498 - RNA, 15 nt, Human
gggacagcuccuucu

SEQ ID NO: 3302499 - RNA, 18 nt, Human
gggaagaagcucucuccu

SEQ ID NO: 3302500 - RNA, 21 nt, Human
ggcuuccuccugguguggaag

SEQ ID NO: 3302501 - RNA, 20 nt, Human
gggaccagagcugccaccug

SEQ ID NO: 3302502 - RNA, 14 nt, Human
gggaccagagcugc

SEQ ID NO: 3302503 - RNA, 12 nt, Human
aaaacccaagug

SEQ ID NO: 3302504 - RNA, 14 nt, Human
aaaacaugcuacac

SEQ ID NO: 3302505 - RNA, 13 nt, Human
aaaacaugcuaca

SEQ ID NO: 3302506 - RNA, 18 nt, Human
aaaacucuccucugcugc

SEQ ID NO: 3302507 - RNA, 23 nt, Human
gggagcaggcucgggcuccccag

SEQ ID NO: 3302508 - RNA, 19 nt, Human
gggagagccuuccaggggu

SEQ ID NO: 3302509 - RNA, 15 nt, Human
gggagagccuuccag

SEQ ID NO: 3302510 - RNA, 16 nt, Human
gggagggagggcucca

SEQ ID NO: 3302511 - RNA, 15 nt, Human
gggagggagggcucc

SEQ ID NO: 3302512 - RNA, 18 nt, Human
gggaggucaaggcugcag

SEQ ID NO: 3302513 - RNA, 21 nt, Human
gggagaaccaaaaagaggcua

SEQ ID NO: 3302514 - RNA, 15 nt, Human
gggacuuggaagcuc

SEQ ID NO: 3302515 - RNA, 17 nt, Human
gggacuuggaagcuccg

SEQ ID NO: 3302516 - RNA, 18 nt, Human
gggacuuggaagcuccgc

SEQ ID NO: 3302517 - RNA, 23 nt, Human
gggacuuggaagcuccgcuuucu

SEQ ID NO: 3302518 - RNA, 20 nt, Human
aaaguacacuguuucaaacu

SEQ ID NO: 3302519 - RNA, 19 nt, Human
aaaguacuucuccacccug

SEQ ID NO: 3302520 - RNA, 20 nt, Human
aaaguacuucuccacccugc

SEQ ID NO: 3302521 - RNA, 21 nt, Human
aaaguacuucuccacccugcu

SEQ ID NO: 3302522 - RNA, 22 nt, Human
guaauuugugauacaaugcugu

SEQ ID NO: 3302523 - RNA, 18 nt, Human
guaauaugcacacauuuu

SEQ ID NO: 3302524 - RNA, 17 nt, Human
guaauaugcacacauuu

SEQ ID NO: 3302525 - RNA, 16 nt, Human
guaauaugcacacauu

SEQ ID NO: 3302526 - RNA, 14 nt, Human
guaauaugcacaca

SEQ ID NO: 3302527 - RNA, 17 nt, Human
aaauacagauagauaua

SEQ ID NO: 3302528 - RNA, 14 nt, Human
aaauauaauugaca

SEQ ID NO: 3302529 - RNA, 11 nt, Human
guagagccagg

SEQ ID NO: 3302530 - RNA, 13 nt, Human
guagagacagggu

SEQ ID NO: 3302531 - RNA, 10 nt, Human
guagagccag

SEQ ID NO: 3302532 - RNA, 15 nt, Human
guagagccagggucu

SEQ ID NO: 3302533 - RNA, 11 nt, Human
guagagacagg

SEQ ID NO: 3302534 - RNA, 12 nt, Human
guagagacaggg

SEQ ID NO: 3302535 - RNA, 18 nt, Human
guagaagcccuucuaccu

SEQ ID NO: 3302536 - RNA, 21 nt, Human
guagaagucuuagauguauau

SEQ ID NO: 3302537 - RNA, 20 nt, Human
guagaaauaucugaaaaugu

SEQ ID NO: 3302538 - RNA, 21 nt, Human
guagaaauaucugaaaaugua

SEQ ID NO: 3302539 - RNA, 23 nt, Human
guagaaauaucugaaaauguaug

SEQ ID NO: 3302540 - RNA, 16 nt, Human
guacuggagaaaaugg

SEQ ID NO: 3302541 - RNA, 15 nt, Human
guacuauguaucaau

SEQ ID NO: 3302542 - RNA, 17 nt, Human
guacuauguaucaauga

SEQ ID NO: 3302543 - RNA, 17 nt, Human
guacuacaguccuccca

SEQ ID NO: 3302544 - RNA, 13 nt, Human
guacuauguauca

SEQ ID NO: 3302545 - RNA, 13 nt, Human
guacccacugcuc

SEQ ID NO: 3302546 - RNA, 14 nt, Human
guacccacugcucu

SEQ ID NO: 3302547 - RNA, 19 nt, Human
guacuacaguccucccauc

SEQ ID NO: 3302548 - RNA, 18 nt, Human
guacuacaguccucccau

SEQ ID NO: 3302549 - RNA, 19 nt, Human
aaauauuaagaaagacuau

SEQ ID NO: 3302550 - RNA, 16 nt, Human
aaaucagcugcuacua

SEQ ID NO: 3302551 - RNA, 12 nt, Human
aaaucagccugc

SEQ ID NO: 3302552 - RNA, 19 nt, Human
aaaucagccguguaaccau

SEQ ID NO: 3302553 - RNA, 12 nt, Human
guacccacugcu

SEQ ID NO: 3302554 - RNA, 16 nt, Human
guacaugaaaacacau

SEQ ID NO: 3302555 - RNA, 15 nt, Human
guacaugaaaacaca

SEQ ID NO: 3302556 - RNA, 14 nt, Human
guacaugaaaacac

SEQ ID NO: 3302557 - RNA, 19 nt, Human
guacauggaauaacaugua

SEQ ID NO: 3302558 - RNA, 20 nt, Human
guacaugaaaacacauuuuu

SEQ ID NO: 3302559 - RNA, 19 nt, Human
guacaugaaaacacauuuu

SEQ ID NO: 3302560 - RNA, 18 nt, Human
guacaugaaaacacauuu

SEQ ID NO: 3302561 - RNA, 17 nt, Human
guacaugaaaacacauu

SEQ ID NO: 3302562 - RNA, 16 nt, Human
aaacauggccuuugcu

SEQ ID NO: 3302563 - RNA, 17 nt, Human
aaacauggccuuugcuu

SEQ ID NO: 3302564 - RNA, 15 nt, Human
ggggaccagagcugc

SEQ ID NO: 3302565 - RNA, 16 nt, Human
ggggaccagagcugcc

SEQ ID NO: 3302566 - RNA, 18 nt, Human
ggggaauguuugccucug

SEQ ID NO: 3302567 - RNA, 22 nt, Human
ggggaauguuugccucugccuc

SEQ ID NO: 3302568 - RNA, 12 nt, Human
gggggccucagu

SEQ ID NO: 3302569 - RNA, 15 nt, Human
gggggccucagugcc

SEQ ID NO: 3302570 - RNA, 17 nt, Human
gggggccucagugccac

SEQ ID NO: 3302571 - RNA, 18 nt, Human
gggggccucagugccacu

SEQ ID NO: 3302572 - RNA, 11 nt, Human
aaacacauuuu

SEQ ID NO: 3302573 - RNA, 20 nt, Human
aaaauuuugauguuuuaagg

SEQ ID NO: 3302574 - RNA, 19 nt, Human
aaaauuuagaaauauaauu

SEQ ID NO: 3302575 - RNA, 13 nt, Human
gggaugagaaagg

SEQ ID NO: 3302576 - RNA, 23 nt, Human
aaaccaagucaagugaaaaagga

SEQ ID NO: 3302577 - RNA, 15 nt, Human
aaacgggcucagcaa

SEQ ID NO: 3302578 - RNA, 19 nt, Human
ggguggcaccagcagccug

SEQ ID NO: 3302579 - RNA, 14 nt, Human
aaacuuaaucuaaa

SEQ ID NO: 3302580 - RNA, 16 nt, Human
aaacuuaaucuaaaug

SEQ ID NO: 3302581 - RNA, 18 nt, Human
aaacuuaaucuaaaugga

SEQ ID NO: 3302582 - RNA, 17 nt, Human
aaacuuaaucuaaaugg

SEQ ID NO: 3302583 - RNA, 19 nt, Human
aaagaugcuucucacugcc

SEQ ID NO: 3302584 - RNA, 14 nt, Human
aaagaugcuucuca

SEQ ID NO: 3302585 - RNA, 17 nt, Human
aaagaugcuucucacug

SEQ ID NO: 3302586 - RNA, 23 nt, Human
aaagacugaguacguugugcauu

SEQ ID NO: 3302587 - RNA, 13 nt, Human
aaagacuguacaa

SEQ ID NO: 3302588 - RNA, 11 nt, Human
gguccugcugc

SEQ ID NO: 3302589 - RNA, 12 nt, Human
gguccugcugca

SEQ ID NO: 3302590 - RNA, 13 nt, Human
gguggaugccugg

SEQ ID NO: 3302591 - RNA, 13 nt, Human
ggugaacagaaca

SEQ ID NO: 3302592 - RNA, 13 nt, Human
ggucgaggcagga

SEQ ID NO: 3302593 - RNA, 18 nt, Human
ggugauccacccaccuca

SEQ ID NO: 3302594 - RNA, 23 nt, Human
ggugauccacccaccucagccuc

SEQ ID NO: 3302595 - RNA, 24 nt, Human
ggugauccacccaccucagccucc

SEQ ID NO: 3302596 - RNA, 12 nt, Human
ggugcaaugacc

SEQ ID NO: 3302597 - RNA, 13 nt, Human
ggugcaaugaccu

SEQ ID NO: 3302598 - RNA, 22 nt, Human
aaagggacuuggaagcuccgcu

SEQ ID NO: 3302599 - RNA, 22 nt, Human
aaaggaaagagggagguaagga

SEQ ID NO: 3302600 - RNA, 17 nt, Human
aaaggagauuggaagga

SEQ ID NO: 3302601 - RNA, 17 nt, Human
aaaggagagcuagcagc

SEQ ID NO: 3302602 - RNA, 21 nt, Human
aaaggagagcuagcagcaggg

SEQ ID NO: 3302603 - RNA, 22 nt, Human
aaagcugccagccgagauagcc

SEQ ID NO: 3302604 - RNA, 15 nt, Human
aaagcucacuuuacu

SEQ ID NO: 3302605 - RNA, 15 nt, Human
aaagcuuguuaagau

SEQ ID NO: 3302606 - RNA, 13 nt, Human
aaagcugcugaca

SEQ ID NO: 3302607 - RNA, 11 nt, Human
gcucugcccuu

SEQ ID NO: 3302608 - RNA, 23 nt, Human
gcucugaucauccacugugccau

SEQ ID NO: 3302609 - RNA, 17 nt, Human
gcucugaucauccacug

SEQ ID NO: 3302610 - RNA, 23 nt, Human
gcucugcaagaauugaagcagga

SEQ ID NO: 3302611 - RNA, 17 nt, Human
gcuccagcucaccagcc

SEQ ID NO: 3302612 - RNA, 18 nt, Human
gcuccagcucaccagccc

SEQ ID NO: 3302613 - RNA, 20 nt, Human
gcuccagcucaccagcccca

SEQ ID NO: 3302614 - RNA, 15 nt, Human
gcuccuggcccacug

SEQ ID NO: 3302615 - RNA, 14 nt, Human
gcuccuggcccacu

SEQ ID NO: 3302616 - RNA, 20 nt, Human
gcuccuggcccacugcaucg

SEQ ID NO: 3302617 - RNA, 19 nt, Human
gcuccuggcccacugcauc

SEQ ID NO: 3302618 - RNA, 18 nt, Human
gcuccuggcccacugcau

SEQ ID NO: 3302619 - RNA, 20 nt, Human
gcgugcacacaccagagccc

SEQ ID NO: 3302620 - RNA, 21 nt, Human
gcgggaggauguucugggaca

SEQ ID NO: 3302621 - RNA, 22 nt, Human
gcgggaggauguucugggacac

SEQ ID NO: 3302622 - RNA, 20 nt, Human
gcgggaggauguucugggac

SEQ ID NO: 3302623 - RNA, 18 nt, Human
gcguuucuaugacacaug

SEQ ID NO: 3302624 - RNA, 19 nt, Human
gcgugcacacaccagagcc

SEQ ID NO: 3302625 - RNA, 23 nt, Human
gcgugcacacaccagagcccacc

SEQ ID NO: 3302626 - RNA, 13 nt, Human
gcuaaugggacac

SEQ ID NO: 3302627 - RNA, 15 nt, Human
gcuaaugggacacua

SEQ ID NO: 3302628 - RNA, 23 nt, Human
gcuaagugauccucccaccucag

SEQ ID NO: 3302629 - RNA, 16 nt, Human
gcucaggugucccugc

SEQ ID NO: 3302630 - RNA, 14 nt, Human
gcucaggugucccu

SEQ ID NO: 3302631 - RNA, 23 nt, Human
gcucagguggggucacucuggca

SEQ ID NO: 3302632 - RNA, 14 nt, Human
gcucagagagggug

SEQ ID NO: 3302633 - RNA, 13 nt, Human
gcucagagagggu

SEQ ID NO: 3302634 - RNA, 17 nt, Human
gcucacugcagccucaa

SEQ ID NO: 3302635 - RNA, 15 nt, Human
gcucacugcagccuc

SEQ ID NO: 3302636 - RNA, 16 nt, Human
gcucacugcagccuca

SEQ ID NO: 3302637 - RNA, 11 nt, Human
gcucacugcag

SEQ ID NO: 3302638 - RNA, 12 nt, Human
gcucacugcagc

SEQ ID NO: 3302639 - RNA, 13 nt, Human
gcucacugcagcc

SEQ ID NO: 3302640 - RNA, 14 nt, Human
gcucacugcagccu

SEQ ID NO: 3302641 - RNA, 18 nt, Human
gcuauucaguaauaacuc

SEQ ID NO: 3302642 - RNA, 20 nt, Human
gcuauucaguaauaacucua

SEQ ID NO: 3302643 - RNA, 17 nt, Human
gcuaggccuggccagau

SEQ ID NO: 3302644 - RNA, 23 nt, Human
gcuaggccuggccagaugcacca

SEQ ID NO: 3302645 - RNA, 16 nt, Human
gcuaggccuggccaga

SEQ ID NO: 3302646 - RNA, 19 nt, Human
gcuauucaguaauaacucu

SEQ ID NO: 3302647 - RNA, 13 nt, Human
gcuaugcauuuga

SEQ ID NO: 3302648 - RNA, 21 nt, Human
gcuagugugguguuuccuggc

SEQ ID NO: 3302649 - RNA, 12 nt, Human
gcuaugcauuug

SEQ ID NO: 3302650 - RNA, 22 nt, Human
gcgaucuggguucacugcaacc

SEQ ID NO: 3302651 - RNA, 16 nt, Human
gccuugaccauucucc

SEQ ID NO: 3302652 - RNA, 20 nt, Human
gccuugaccauucuccaccu

SEQ ID NO: 3302653 - RNA, 19 nt, Human
gccuugaccauucuccacc

SEQ ID NO: 3302654 - RNA, 17 nt, Human
gccuugaccauucucca

SEQ ID NO: 3302655 - RNA, 17 nt, Human
gcgagcccugguggcag

SEQ ID NO: 3302656 - RNA, 15 nt, Human
gcgagcccugguggc

SEQ ID NO: 3302657 - RNA, 13 nt, Human
gccuggccugagc

SEQ ID NO: 3302658 - RNA, 18 nt, Human
gccuggccugagcuggga

SEQ ID NO: 3302659 - RNA, 14 nt, Human
gccuggccugagcu

SEQ ID NO: 3302660 - RNA, 20 nt, Human
gccuggccugagcugggaug

SEQ ID NO: 3302661 - RNA, 18 nt, Human
gccugugccucugggacu

SEQ ID NO: 3302662 - RNA, 13 nt, Human
gccuggcucaggu

SEQ ID NO: 3302663 - RNA, 16 nt, Human
gccugugccucuggga

SEQ ID NO: 3302664 - RNA, 17 nt, Human
gccugugccucugggac

SEQ ID NO: 3302665 - RNA, 14 nt, Human
gccuguugggccag

SEQ ID NO: 3302666 - RNA, 20 nt, Human
gccuguugggccaggagccu

SEQ ID NO: 3302667 - RNA, 18 nt, Human
gccuguugggccaggagc

SEQ ID NO: 3302668 - RNA, 16 nt, Human
gccuguugggccagga

SEQ ID NO: 3302669 - RNA, 15 nt, Human
gccuguugggccagg

SEQ ID NO: 3302670 - RNA, 22 nt, Human
gccugcccaggccccugccacc

SEQ ID NO: 3302671 - RNA, 12 nt, Human
gccugcccaggc

SEQ ID NO: 3302672 - RNA, 15 nt, Human
gccugcccaggcccc

SEQ ID NO: 3302673 - RNA, 20 nt, Human
gccugcccaggccccugcca

SEQ ID NO: 3302674 - RNA, 17 nt, Human
gccucgaacuggcugca

SEQ ID NO: 3302675 - RNA, 19 nt, Human
gccuccugugugugcgccu

SEQ ID NO: 3302676 - RNA, 23 nt, Human
gccuccugugugugcgccuacag

SEQ ID NO: 3302677 - RNA, 16 nt, Human
gccucccaaagugcug

SEQ ID NO: 3302678 - RNA, 13 nt, Human
gccuccugugugu

SEQ ID NO: 3302679 - RNA, 17 nt, Human
gccucccaaagugcugg

SEQ ID NO: 3302680 - RNA, 16 nt, Human
gccucuuaugggcugg

SEQ ID NO: 3302681 - RNA, 18 nt, Human
gccucuuaugggcugggu

SEQ ID NO: 3302682 - RNA, 17 nt, Human
gccucuuaugggcuggg

SEQ ID NO: 3302683 - RNA, 20 nt, Human
gccucgaacuggcugcaaag

SEQ ID NO: 3302684 - RNA, 22 nt, Human
gccucgaacuggcugcaaaggg

SEQ ID NO: 3302685 - RNA, 13 nt, Human
gccugcccaggcc

SEQ ID NO: 3302686 - RNA, 14 nt, Human
gccugcccaggccc

SEQ ID NO: 3302687 - RNA, 14 nt, Human
gccucuuggguuca

SEQ ID NO: 3302688 - RNA, 21 nt, Human
gccucuuaugggcuggguucu

SEQ ID NO: 3302689 - RNA, 21 nt, Human
gcccgggcucugccucccauc

SEQ ID NO: 3302690 - RNA, 23 nt, Human
gcccgggcucugccucccaucac

SEQ ID NO: 3302691 - RNA, 17 nt, Human
gccccugccacccuggg

SEQ ID NO: 3302692 - RNA, 16 nt, Human
gccccugccacccugg

SEQ ID NO: 3302693 - RNA, 20 nt, Human
gccuaggugacagagugaga

SEQ ID NO: 3302694 - RNA, 13 nt, Human
gccuaggugacag

SEQ ID NO: 3302695 - RNA, 14 nt, Human
gccuaggugacaga

SEQ ID NO: 3302696 - RNA, 15 nt, Human
gccuaggugacagag

SEQ ID NO: 3302697 - RNA, 20 nt, Human
gccuagcauacguacacauu

SEQ ID NO: 3302698 - RNA, 22 nt, Human
gccuagcauacguacacauuuu

SEQ ID NO: 3302699 - RNA, 21 nt, Human
gccuagcauacguacacauuu

SEQ ID NO: 3302700 - RNA, 19 nt, Human
gccuagcauacguacacau

SEQ ID NO: 3302701 - RNA, 23 nt, Human
gccuagcauacguacacauuuua

SEQ ID NO: 3302702 - RNA, 16 nt, Human
gcccugcagagggcac

SEQ ID NO: 3302703 - RNA, 18 nt, Human
gcccugcagagggcacag

SEQ ID NO: 3302704 - RNA, 22 nt, Human
gcccugcccaccuggccucugc

SEQ ID NO: 3302705 - RNA, 21 nt, Human
gcccugcccaccuggccucug

SEQ ID NO: 3302706 - RNA, 20 nt, Human
gcccugcccaccuggccucu

SEQ ID NO: 3302707 - RNA, 17 nt, Human
gcccugcccaccuggcc

SEQ ID NO: 3302708 - RNA, 11 nt, Human
gcccugccucc

SEQ ID NO: 3302709 - RNA, 15 nt, Human
gcccugcccaccugg

SEQ ID NO: 3302710 - RNA, 19 nt, Human
gccgcagcccugcagaggg

SEQ ID NO: 3302711 - RNA, 20 nt, Human
gccgcagcccugcagagggc

SEQ ID NO: 3302712 - RNA, 22 nt, Human
gcccuuagcagggaaacagcua

SEQ ID NO: 3302713 - RNA, 13 nt, Human
gcccugccuccuu

SEQ ID NO: 3302714 - RNA, 12 nt, Human
gcccugccuccu

SEQ ID NO: 3302715 - RNA, 19 nt, Human
gcccuuagcagggaaacag

SEQ ID NO: 3302716 - RNA, 20 nt, Human
gcccuuagcagggaaacagc

SEQ ID NO: 3302717 - RNA, 23 nt, Human
gcuggguggcaccagcagccugg

SEQ ID NO: 3302718 - RNA, 22 nt, Human
gcuggguggcaccagcagccug

SEQ ID NO: 3302719 - RNA, 21 nt, Human
gcuggguggcaccagcagccu

SEQ ID NO: 3302720 - RNA, 23 nt, Human
gcugggguggggaccucaggccu

SEQ ID NO: 3302721 - RNA, 15 nt, Human
gcuggcuguuggcug

SEQ ID NO: 3302722 - RNA, 16 nt, Human
gcuggcuguuggcugg

SEQ ID NO: 3302723 - RNA, 13 nt, Human
gcugcuggcuggu

SEQ ID NO: 3302724 - RNA, 15 nt, Human
gcugcugaaggcucg

SEQ ID NO: 3302725 - RNA, 14 nt, Human
gcugcugaaggcuc

SEQ ID NO: 3302726 - RNA, 13 nt, Human
gcugcugaaggcu

SEQ ID NO: 3302727 - RNA, 12 nt, Human
gcugcugaaggc

SEQ ID NO: 3302728 - RNA, 16 nt, Human
gcucugguccauagag

SEQ ID NO: 3302729 - RNA, 15 nt, Human
gcucugguccauaga

SEQ ID NO: 3302730 - RNA, 20 nt, Human
gcuggcgugcaguggugcga

SEQ ID NO: 3302731 - RNA, 18 nt, Human
gcuggagugcagugagcc

SEQ ID NO: 3302732 - RNA, 17 nt, Human
gcuggagugcagugagc

SEQ ID NO: 3302733 - RNA, 22 nt, Human
gcuggagugcagugagccgaga

SEQ ID NO: 3302734 - RNA, 20 nt, Human
gcuggccuggccccucaggg

SEQ ID NO: 3302735 - RNA, 22 nt, Human
gcuuccucauaguaugguggcu

SEQ ID NO: 3302736 - RNA, 23 nt, Human
gcuucuucagagacuccugcagg

SEQ ID NO: 3302737 - RNA, 20 nt, Human
gcuuguaaauagcucaggug

SEQ ID NO: 3302738 - RNA, 14 nt, Human
gcuugagcucagga

SEQ ID NO: 3302739 - RNA, 22 nt, Human
gcuugaccuuuaagagaaauga

SEQ ID NO: 3302740 - RNA, 18 nt, Human
gcuucaaggauccugagc

SEQ ID NO: 3302741 - RNA, 19 nt, Human
gcuucaaggauccugagcc

SEQ ID NO: 3302742 - RNA, 21 nt, Human
gcuucaaggauccugagccag

SEQ ID NO: 3302743 - RNA, 20 nt, Human
gcuucaaggauccugagcca

SEQ ID NO: 3302744 - RNA, 15 nt, Human
gcuucacggaagagc

SEQ ID NO: 3302745 - RNA, 17 nt, Human
gcuucacggaagagccu

SEQ ID NO: 3302746 - RNA, 12 nt, Human
gcuucagccucc

SEQ ID NO: 3302747 - RNA, 18 nt, Human
gcuucacggaagagccuu

SEQ ID NO: 3302748 - RNA, 19 nt, Human
ggaacacuccuucacagau

SEQ ID NO: 3302749 - RNA, 14 nt, Human
ggaacacucugaga

SEQ ID NO: 3302750 - RNA, 12 nt, Human
ggaacacucuga

SEQ ID NO: 3302751 - RNA, 16 nt, Human
ggaacacucugagacu

SEQ ID NO: 3302752 - RNA, 15 nt, Human
ggaacacucugagac

SEQ ID NO: 3302753 - RNA, 15 nt, Human
ggaagagaaaaaaua

SEQ ID NO: 3302754 - RNA, 18 nt, Human
ggaagacuuuggaaagag

SEQ ID NO: 3302755 - RNA, 13 nt, Human
ggaagagaaaaaa

SEQ ID NO: 3302756 - RNA, 22 nt, Human
ggaagacaaugugaaaagaaaa

SEQ ID NO: 3302757 - RNA, 14 nt, Human
ggaagacagcucuu

SEQ ID NO: 3302758 - RNA, 13 nt, Human
ggaagacagcucu

SEQ ID NO: 3302759 - RNA, 12 nt, Human
ggaagacuuugg

SEQ ID NO: 3302760 - RNA, 17 nt, Human
ggaagacuuuggaaaga

SEQ ID NO: 3302761 - RNA, 13 nt, Human
ggaagacuuugga

SEQ ID NO: 3302762 - RNA, 20 nt, Human
ggaaggaaacccagcucugg

SEQ ID NO: 3302763 - RNA, 19 nt, Human
ggaaggaaacccagcucug

SEQ ID NO: 3302764 - RNA, 22 nt, Human
ggaagcucagggccuggcucag

SEQ ID NO: 3302765 - RNA, 11 nt, Human
ggaagcuccgc

SEQ ID NO: 3302766 - RNA, 23 nt, Human
ggaagcucagggccuggcucagg

SEQ ID NO: 3302767 - RNA, 16 nt, Human
ggaaggaaacccagcu

SEQ ID NO: 3302768 - RNA, 17 nt, Human
ggacacuaaccacgcug

SEQ ID NO: 3302769 - RNA, 19 nt, Human
ggacagcuccuucuguccu

SEQ ID NO: 3302770 - RNA, 20 nt, Human
ggacagcuccuucuguccua

SEQ ID NO: 3302771 - RNA, 17 nt, Human
ggacagcuccuucuguc

SEQ ID NO: 3302772 - RNA, 14 nt, Human
ggacacagcucuuc

SEQ ID NO: 3302773 - RNA, 15 nt, Human
ggacacagcucuucu

SEQ ID NO: 3302774 - RNA, 18 nt, Human
ggacacagcucuucucca

SEQ ID NO: 3302775 - RNA, 16 nt, Human
ggaauccagacccggc

SEQ ID NO: 3302776 - RNA, 18 nt, Human
ggaauaacauguaauuaa

SEQ ID NO: 3302777 - RNA, 13 nt, Human
ggacaagagcagg

SEQ ID NO: 3302778 - RNA, 23 nt, Human
ggacaaggaugaucuaggaagac

SEQ ID NO: 3302779 - RNA, 22 nt, Human
ggacaaggaugaucuaggaaga

SEQ ID NO: 3302780 - RNA, 12 nt, Human
ggacccccugaa

SEQ ID NO: 3302781 - RNA, 11 nt, Human
ggacccugagg

SEQ ID NO: 3302782 - RNA, 19 nt, Human
ggacccugaggcccagagg

SEQ ID NO: 3302783 - RNA, 12 nt, Human
ggacccugaggc

SEQ ID NO: 3302784 - RNA, 12 nt, Human
ggaccucaggcc

SEQ ID NO: 3302785 - RNA, 13 nt, Human
ggaccucaggccu

SEQ ID NO: 3302786 - RNA, 20 nt, Human
ggacguguuaugacuccaga

SEQ ID NO: 3302787 - RNA, 15 nt, Human
ggaccucaggccugg

SEQ ID NO: 3302788 - RNA, 14 nt, Human
ggaccucaggccug

SEQ ID NO: 3302789 - RNA, 16 nt, Human
ggagaaaggaagggcu

SEQ ID NO: 3302790 - RNA, 14 nt, Human
ggacuuggaagcuc

SEQ ID NO: 3302791 - RNA, 16 nt, Human
ggacucaaugcacuga

SEQ ID NO: 3302792 - RNA, 20 nt, Human
ggacuaacuugucuuuggac

SEQ ID NO: 3302793 - RNA, 15 nt, Human
ggacucaaugcacug

SEQ ID NO: 3302794 - RNA, 14 nt, Human
ggacuacaggugug

SEQ ID NO: 3302795 - RNA, 24 nt, Human
ggacuaacuugucuuuggacccug

SEQ ID NO: 3302796 - RNA, 14 nt, Human
aaugaaugaaacau

SEQ ID NO: 3302797 - RNA, 14 nt, Human
aaugaaugucagug

SEQ ID NO: 3302798 - RNA, 15 nt, Human
aaugaaugucagugu

SEQ ID NO: 3302799 - RNA, 23 nt, Human
aaucuucugaacuuggcgcugcc

SEQ ID NO: 3302800 - RNA, 15 nt, Human
uaaugucacaggcag

SEQ ID NO: 3302801 - RNA, 16 nt, Human
uaaugucacaggcagg

SEQ ID NO: 3302802 - RNA, 17 nt, Human
uaaugucacaggcaggu

SEQ ID NO: 3302803 - RNA, 23 nt, Human
uaaugugaaacuggauuaaacuu

SEQ ID NO: 3302804 - RNA, 22 nt, Human
uaaugugaaacuggauuaaacu

SEQ ID NO: 3302805 - RNA, 20 nt, Human
uaaugugaaacuggauuaaa

SEQ ID NO: 3302806 - RNA, 12 nt, Human
uaaugugaaacu

SEQ ID NO: 3302807 - RNA, 16 nt, Human
uaauguaagcucuacu

SEQ ID NO: 3302808 - RNA, 17 nt, Human
uaauguaagcucuacug

SEQ ID NO: 3302809 - RNA, 21 nt, Human
uaauauugauaugcuuauaca

SEQ ID NO: 3302810 - RNA, 20 nt, Human
aauacaguaucucagggccu

SEQ ID NO: 3302811 - RNA, 23 nt, Human
uaauacaccacuacauucuguua

SEQ ID NO: 3302812 - RNA, 21 nt, Human
uaauacaccacuacauucugu

SEQ ID NO: 3302813 - RNA, 22 nt, Human
uaauacaccacuacauucuguu

SEQ ID NO: 3302814 - RNA, 16 nt, Human
uacaaaaacauggccu

SEQ ID NO: 3302815 - RNA, 16 nt, Human
uacaagcgugagccac

SEQ ID NO: 3302816 - RNA, 18 nt, Human
uacaagcgugagccacug

SEQ ID NO: 3302817 - RNA, 19 nt, Human
uacaagcgugagccacugc

SEQ ID NO: 3302818 - RNA, 20 nt, Human
uacaagcgugagccacugca

SEQ ID NO: 3302819 - RNA, 18 nt, Human
uaauuuaccugaagucuu

SEQ ID NO: 3302820 - RNA, 17 nt, Human
uaauuuaccugaagucu

SEQ ID NO: 3302821 - RNA, 23 nt, Human
aaugcaaaccaucauugaaaucu

SEQ ID NO: 3302822 - RNA, 22 nt, Human
aaugcaaaccaucauugaaauc

SEQ ID NO: 3302823 - RNA, 18 nt, Human
aaugcacaaacagaggcc

SEQ ID NO: 3302824 - RNA, 21 nt, Human
aaugaaugucagugugacuga

SEQ ID NO: 3302825 - RNA, 20 nt, Human
aaugaaugucagugugacug

SEQ ID NO: 3302826 - RNA, 16 nt, Human
aaugcaaaccaucauu

SEQ ID NO: 3302827 - RNA, 14 nt, Human
aaugcaaaccauca

SEQ ID NO: 3302828 - RNA, 14 nt, Human
aaugaccuuucaau

SEQ ID NO: 3302829 - RNA, 13 nt, Human
aaugaccuuucaa

SEQ ID NO: 3302830 - RNA, 23 nt, Human
uaauuaguuccucauuagcauuu

SEQ ID NO: 3302831 - RNA, 19 nt, Human
aaugcacuuuguucuggcu

SEQ ID NO: 3302832 - RNA, 16 nt, Human
aaugcacuuuguucug

SEQ ID NO: 3302833 - RNA, 13 nt, Human
aaugcacuuuguu

SEQ ID NO: 3302834 - RNA, 20 nt, Human
aaugcacaaacagaggccgc

SEQ ID NO: 3302835 - RNA, 19 nt, Human
aaugcacaaacagaggccg

SEQ ID NO: 3302836 - RNA, 16 nt, Human
aaugguuuucuugugu

SEQ ID NO: 3302837 - RNA, 22 nt, Human
aaugguuuucuuguguguuuau

SEQ ID NO: 3302838 - RNA, 18 nt, Human
aaugguuuucuugugugu

SEQ ID NO: 3302839 - RNA, 17 nt, Human
aaugguuuucuugugug

SEQ ID NO: 3302840 - RNA, 13 nt, Human
aauguaagcucua

SEQ ID NO: 3302841 - RNA, 15 nt, Human
aauguaagcucuacu

SEQ ID NO: 3302842 - RNA, 23 nt, Human
aauguacagcaaggagauuuaca

SEQ ID NO: 3302843 - RNA, 21 nt, Human
aauguacagcaaggagauuua

SEQ ID NO: 3302844 - RNA, 22 nt, Human
uacagcaaggagauuuacaacu

SEQ ID NO: 3302845 - RNA, 18 nt, Human
uacaguccucccaucuca

SEQ ID NO: 3302846 - RNA, 17 nt, Human
uacaguccucccaucuc

SEQ ID NO: 3302847 - RNA, 15 nt, Human
uacaguccucccauc

SEQ ID NO: 3302848 - RNA, 12 nt, Human
uacaguccuccc

SEQ ID NO: 3302849 - RNA, 18 nt, Human
uacaguaucucagggccu

SEQ ID NO: 3302850 - RNA, 15 nt, Human
uacaguaucucaggg

SEQ ID NO: 3302851 - RNA, 13 nt, Human
aaugucacaggca

SEQ ID NO: 3302852 - RNA, 14 nt, Human
aaugucacaggcag

SEQ ID NO: 3302853 - RNA, 22 nt, Human
aaugugaaacuggauuaaacuu

SEQ ID NO: 3302854 - RNA, 16 nt, Human
aauuaacuuuuauaaa

SEQ ID NO: 3302855 - RNA, 22 nt, Human
aauuaacuuuuauaaacuuuac

SEQ ID NO: 3302856 - RNA, 20 nt, Human
aauuaacuuuuauaaacuuu

SEQ ID NO: 3302857 - RNA, 18 nt, Human
aauuaacuuuuauaaacu

SEQ ID NO: 3302858 - RNA, 20 nt, Human
uacccgggaagggggcuggg

SEQ ID NO: 3302859 - RNA, 16 nt, Human
uacccucauguucuua

SEQ ID NO: 3302860 - RNA, 15 nt, Human
uacccucauguucuu

SEQ ID NO: 3302861 - RNA, 20 nt, Human
uacccuggcacuauaaugua

SEQ ID NO: 3302862 - RNA, 22 nt, Human
uacccuggcacuauaauguaag

SEQ ID NO: 3302863 - RNA, 17 nt, Human
uaccacuuuuguucuug

SEQ ID NO: 3302864 - RNA, 17 nt, Human
uaccauccccuguagag

SEQ ID NO: 3302865 - RNA, 15 nt, Human
uagaagucacacagu

SEQ ID NO: 3302866 - RNA, 21 nt, Human
uagacagagucucacuguugc

SEQ ID NO: 3302867 - RNA, 16 nt, Human
uagacaauuuauuaug

SEQ ID NO: 3302868 - RNA, 16 nt, Human
uagaagucacacagua

SEQ ID NO: 3302869 - RNA, 16 nt, Human
uagaagucuuagaugu

SEQ ID NO: 3302870 - RNA, 17 nt, Human
uagaagucuuagaugua

SEQ ID NO: 3302871 - RNA, 18 nt, Human
uagaagucuuagauguau

SEQ ID NO: 3302872 - RNA, 19 nt, Human
uagaagucuuagauguaua

SEQ ID NO: 3302873 - RNA, 17 nt, Human
aauuuuuuugagacaga

SEQ ID NO: 3302874 - RNA, 13 nt, Human
acaaaaacauggc

SEQ ID NO: 3302875 - RNA, 22 nt, Human
aauuuuuuuaucgucacugcuu

SEQ ID NO: 3302876 - RNA, 17 nt, Human
aauuuuuauuaaauuau

SEQ ID NO: 3302877 - RNA, 18 nt, Human
aauuuuuauuaaauuaug

SEQ ID NO: 3302878 - RNA, 14 nt, Human
uagacagucccugc

SEQ ID NO: 3302879 - RNA, 12 nt, Human
uagacagucccu

SEQ ID NO: 3302880 - RNA, 12 nt, Human
acaacacucaca

SEQ ID NO: 3302881 - RNA, 15 nt, Human
acaacaacaaaauga

SEQ ID NO: 3302882 - RNA, 17 nt, Human
acaagagcccaggccuc

SEQ ID NO: 3302883 - RNA, 18 nt, Human
acaagcgugagccacugc

SEQ ID NO: 3302884 - RNA, 13 nt, Human
acaagcugcaccc

SEQ ID NO: 3302885 - RNA, 20 nt, Human
acaagcgugagccacugcac

SEQ ID NO: 3302886 - RNA, 21 nt, Human
acaagcgugagccacugcacc

SEQ ID NO: 3302887 - RNA, 12 nt, Human
acaagccacccc

SEQ ID NO: 3302888 - RNA, 24 nt, Human
uagcacagacccugcccugugggc

SEQ ID NO: 3302889 - RNA, 22 nt, Human
uagauuuuagacccuauugcug

SEQ ID NO: 3302890 - RNA, 19 nt, Human
uagcacagacccugcccug

SEQ ID NO: 3302891 - RNA, 18 nt, Human
uagcacagacccugcccu

SEQ ID NO: 3302892 - RNA, 17 nt, Human
uagcacagacccugccc

SEQ ID NO: 3302893 - RNA, 16 nt, Human
uagcacagacccugcc

SEQ ID NO: 3302894 - RNA, 14 nt, Human
uacguacacauuuu

SEQ ID NO: 3302895 - RNA, 15 nt, Human
uacguacacauuuua

SEQ ID NO: 3302896 - RNA, 20 nt, Human
aauucuugcaaaguaucccu

SEQ ID NO: 3302897 - RNA, 14 nt, Human
aauucuugcaaagu

SEQ ID NO: 3302898 - RNA, 22 nt, Human
aauucuucuccacuuucuagcc

SEQ ID NO: 3302899 - RNA, 13 nt, Human
aauucuuaaauau

SEQ ID NO: 3302900 - RNA, 14 nt, Human
uacuauguaucaau

SEQ ID NO: 3302901 - RNA, 16 nt, Human
uacuauguaucaauga

SEQ ID NO: 3302902 - RNA, 16 nt, Human
uacuauaauuuaccug

SEQ ID NO: 3302903 - RNA, 13 nt, Human
uacguugugcauu

SEQ ID NO: 3302904 - RNA, 13 nt, Human
uacgugaguccug

SEQ ID NO: 3302905 - RNA, 21 nt, Human
uacucugugucagguggggca

SEQ ID NO: 3302906 - RNA, 21 nt, Human
aauuucuaaaucuccaaaaua

SEQ ID NO: 3302907 - RNA, 13 nt, Human
aauuucuaaaucu

SEQ ID NO: 3302908 - RNA, 17 nt, Human
aauuuagaaauauaauu

SEQ ID NO: 3302909 - RNA, 22 nt, Human
aauuguuuggggaugagaaagg

SEQ ID NO: 3302910 - RNA, 15 nt, Human
aauuuacauacucug

SEQ ID NO: 3302911 - RNA, 19 nt, Human
aauuuacauacucugcuua

SEQ ID NO: 3302912 - RNA, 13 nt, Human
aauuuaaaagucu

SEQ ID NO: 3302913 - RNA, 22 nt, Human
acagggcacaccgggcacucag

SEQ ID NO: 3302914 - RNA, 22 nt, Human
acagguuuuccugaagaauuga

SEQ ID NO: 3302915 - RNA, 12 nt, Human
acaggcugggcu

SEQ ID NO: 3302916 - RNA, 20 nt, Human
acagggcacaccgggcacuc

SEQ ID NO: 3302917 - RNA, 14 nt, Human
acaggcugggcuuc

SEQ ID NO: 3302918 - RNA, 17 nt, Human
acaggcugggcuucagu

SEQ ID NO: 3302919 - RNA, 17 nt, Human
acaguccucccaucuca

SEQ ID NO: 3302920 - RNA, 20 nt, Human
acaguccuuaccagcagagc

SEQ ID NO: 3302921 - RNA, 18 nt, Human
acaguccuuaccagcaga

SEQ ID NO: 3302922 - RNA, 15 nt, Human
acaguccucccaucu

SEQ ID NO: 3302923 - RNA, 14 nt, Human
acaguccucccauc

SEQ ID NO: 3302924 - RNA, 13 nt, Human
acaguccucccau

SEQ ID NO: 3302925 - RNA, 15 nt, Human
acagucccugccaau

SEQ ID NO: 3302926 - RNA, 15 nt, Human
acaguauuacuucug

SEQ ID NO: 3302927 - RNA, 16 nt, Human
acaguauuacuucugc

SEQ ID NO: 3302928 - RNA, 17 nt, Human
acaguauuacuucugcu

SEQ ID NO: 3302929 - RNA, 19 nt, Human
acaguauuacuucugcuac

SEQ ID NO: 3302930 - RNA, 13 nt, Human
acagucccugcca

SEQ ID NO: 3302931 - RNA, 12 nt, Human
acagucccugcc

SEQ ID NO: 3302932 - RNA, 15 nt, Human
acaguuaagagaaau

SEQ ID NO: 3302933 - RNA, 22 nt, Human
acaguccuuaccagcagagcac

SEQ ID NO: 3302934 - RNA, 21 nt, Human
acaguccuuaccagcagagca

SEQ ID NO: 3302935 - RNA, 22 nt, Human
uauucaggaagcucagggccug

SEQ ID NO: 3302936 - RNA, 18 nt, Human
uauucaggaagcucaggg

SEQ ID NO: 3302937 - RNA, 16 nt, Human
uauucaggaagcucag

SEQ ID NO: 3302938 - RNA, 16 nt, Human
uauuaccacagacaua

SEQ ID NO: 3302939 - RNA, 12 nt, Human
uauuagagaaga

SEQ ID NO: 3302940 - RNA, 17 nt, Human
uauguuuuaagaggcag

SEQ ID NO: 3302941 - RNA, 19 nt, Human
uauguuuuaagaggcaggg

SEQ ID NO: 3302942 - RNA, 22 nt, Human
uauuaaaaaucucaaauuucua

SEQ ID NO: 3302943 - RNA, 20 nt, Human
uauuaaaaaucucaaauuuc

SEQ ID NO: 3302944 - RNA, 18 nt, Human
uauuaaaaaucucaaauu

SEQ ID NO: 3302945 - RNA, 16 nt, Human
uauuaaaaaucucaaa

SEQ ID NO: 3302946 - RNA, 23 nt, Human
uauuaaaaaucucaaauuucuaa

SEQ ID NO: 3302947 - RNA, 16 nt, Human
acaguucucuccuucu

SEQ ID NO: 3302948 - RNA, 20 nt, Human
acaguuacucagaauucucu

SEQ ID NO: 3302949 - RNA, 13 nt, Human
acaguuacucaga

SEQ ID NO: 3302950 - RNA, 20 nt, Human
acaguucaauucucauuugu

SEQ ID NO: 3302951 - RNA, 15 nt, Human
uauucuuauuuaaug

SEQ ID NO: 3302952 - RNA, 16 nt, Human
uauucuguuggccagu

SEQ ID NO: 3302953 - RNA, 18 nt, Human
uauucucuccuguaccuc

SEQ ID NO: 3302954 - RNA, 24 nt, Human
uauucucuccuguaccucuugagc

SEQ ID NO: 3302955 - RNA, 20 nt, Human
uauucucuccuguaccucuu

SEQ ID NO: 3302956 - RNA, 17 nt, Human
acaguucucuccuucuu

SEQ ID NO: 3302957 - RNA, 23 nt, Human
uauuuaauuuuuuugagacagag

SEQ ID NO: 3302958 - RNA, 18 nt, Human
uauuuacuucuuauacau

SEQ ID NO: 3302959 - RNA, 14 nt, Human
uauuuauuuaaauu

SEQ ID NO: 3302960 - RNA, 13 nt, Human
uauuuauuuaaau

SEQ ID NO: 3302961 - RNA, 15 nt, Human
uauuuaaugaaagac

SEQ ID NO: 3302962 - RNA, 21 nt, Human
uauuuaaugaaagacuguaca

SEQ ID NO: 3302963 - RNA, 17 nt, Human
uauugucaaagugguga

SEQ ID NO: 3302964 - RNA, 13 nt, Human
uauugucaaagug

SEQ ID NO: 3302965 - RNA, 16 nt, Human
acagacccugcccugu

SEQ ID NO: 3302966 - RNA, 17 nt, Human
acagacccugcccugug

SEQ ID NO: 3302967 - RNA, 22 nt, Human
acagacacaggcccggcuccag

SEQ ID NO: 3302968 - RNA, 23 nt, Human
acagacacaggcccggcuccagg

SEQ ID NO: 3302969 - RNA, 11 nt, Human
acacuccuuca

SEQ ID NO: 3302970 - RNA, 18 nt, Human
acagacccugcccugugg

SEQ ID NO: 3302971 - RNA, 14 nt, Human
acagacuggaagca

SEQ ID NO: 3302972 - RNA, 18 nt, Human
uaucaaguauuauaccuu

SEQ ID NO: 3302973 - RNA, 21 nt, Human
uaucaaguauuauaccuuuuu

SEQ ID NO: 3302974 - RNA, 18 nt, Human
uaucacccagaagaaaau

SEQ ID NO: 3302975 - RNA, 19 nt, Human
uaucuagauacuguaucau

SEQ ID NO: 3302976 - RNA, 17 nt, Human
uaucucccccagcccca

SEQ ID NO: 3302977 - RNA, 18 nt, Human
uaucucccccagccccau

SEQ ID NO: 3302978 - RNA, 16 nt, Human
uaucucccccagcccc

SEQ ID NO: 3302979 - RNA, 16 nt, Human
uaucuagauacuguau

SEQ ID NO: 3302980 - RNA, 15 nt, Human
uaucuagauacugua

SEQ ID NO: 3302981 - RNA, 22 nt, Human
acagacuggaagcacagcuuca

SEQ ID NO: 3302982 - RNA, 20 nt, Human
acagagcccacgcccccacu

SEQ ID NO: 3302983 - RNA, 16 nt, Human
acagagcuacacaggg

SEQ ID NO: 3302984 - RNA, 21 nt, Human
acagagugagacucugucuca

SEQ ID NO: 3302985 - RNA, 10 nt, Human
uaugggagag

SEQ ID NO: 3302986 - RNA, 17 nt, Human
acagcuaacauggaagu

SEQ ID NO: 3302987 - RNA, 15 nt, Human
acagcuaacauggaa

SEQ ID NO: 3302988 - RNA, 14 nt, Human
acagcuaacaugga

SEQ ID NO: 3302989 - RNA, 19 nt, Human
uaugcucugcauguuacau

SEQ ID NO: 3302990 - RNA, 22 nt, Human
uauggcccuggccuagcauacg

SEQ ID NO: 3302991 - RNA, 18 nt, Human
uaugcucugcauguuaca

SEQ ID NO: 3302992 - RNA, 14 nt, Human
uaugcucugcaugu

SEQ ID NO: 3302993 - RNA, 13 nt, Human
uaugaggcauuug

SEQ ID NO: 3302994 - RNA, 23 nt, Human
uaugaggcauuuguuugaacuga

SEQ ID NO: 3302995 - RNA, 15 nt, Human
uaucuugaagacuuu

SEQ ID NO: 3302996 - RNA, 14 nt, Human
uaugaucacggcuc

SEQ ID NO: 3302997 - RNA, 21 nt, Human
uaugaucacggcucacugcag

SEQ ID NO: 3302998 - RNA, 23 nt, Human
uaugaucacggcucacugcagcc

SEQ ID NO: 3302999 - RNA, 20 nt, Human
acagaguuuucacucuuauu

SEQ ID NO: 3303000 - RNA, 18 nt, Human
acagaguuuucacucuua

SEQ ID NO: 3303001 - RNA, 22 nt, Human
acagaguuguuacauuuuuaag

SEQ ID NO: 3303002 - RNA, 14 nt, Human
uaucuugaagacuu

SEQ ID NO: 3303003 - RNA, 18 nt, Human
uauagccuaggugacaga

SEQ ID NO: 3303004 - RNA, 20 nt, Human
uauagccuaggugacagagu

SEQ ID NO: 3303005 - RNA, 19 nt, Human
acacucauugaccugaggc

SEQ ID NO: 3303006 - RNA, 23 nt, Human
acacucauugaccugaggcccuu

SEQ ID NO: 3303007 - RNA, 21 nt, Human
acacucauugaccugaggccc

SEQ ID NO: 3303008 - RNA, 21 nt, Human
uauaauuuaccugaagucuuu

SEQ ID NO: 3303009 - RNA, 14 nt, Human
uauacauaaacaag

SEQ ID NO: 3303010 - RNA, 13 nt, Human
uauacauaaacaa

SEQ ID NO: 3303011 - RNA, 14 nt, Human
uauacauuugauaa

SEQ ID NO: 3303012 - RNA, 20 nt, Human
uaguuccucauuagcauuuu

SEQ ID NO: 3303013 - RNA, 20 nt, Human
uagucacugagacagcccgg

SEQ ID NO: 3303014 - RNA, 21 nt, Human
uagucaggugccucaagagaa

SEQ ID NO: 3303015 - RNA, 23 nt, Human
acaagcugcacccucaggcaggu

SEQ ID NO: 3303016 - RNA, 22 nt, Human
acaagcugcacccucaggcagg

SEQ ID NO: 3303017 - RNA, 21 nt, Human
acaagcugcacccucaggcag

SEQ ID NO: 3303018 - RNA, 19 nt, Human
acaagcugcacccucaggc

SEQ ID NO: 3303019 - RNA, 20 nt, Human
acacaugcaaggucauuuuu

SEQ ID NO: 3303020 - RNA, 19 nt, Human
acacaugcaaggucauuuu

SEQ ID NO: 3303021 - RNA, 18 nt, Human
acacaugcaaggucauuu

SEQ ID NO: 3303022 - RNA, 11 nt, Human
acacccuguga

SEQ ID NO: 3303023 - RNA, 18 nt, Human
acacccugugauggggcc

SEQ ID NO: 3303024 - RNA, 12 nt, Human
acacccugugau

SEQ ID NO: 3303025 - RNA, 19 nt, Human
acacccagcccacuucugc

SEQ ID NO: 3303026 - RNA, 20 nt, Human
acacccagcccacuucugcc

SEQ ID NO: 3303027 - RNA, 21 nt, Human
acacccagcccacuucugcca

SEQ ID NO: 3303028 - RNA, 21 nt, Human
acacaugcaaggucauuuuuu

SEQ ID NO: 3303029 - RNA, 20 nt, Human
aagauauuuugcuuugugau

SEQ ID NO: 3303030 - RNA, 17 nt, Human
aagauauuuugcuuugu

SEQ ID NO: 3303031 - RNA, 19 nt, Human
aagaguaggaagacuuugg

SEQ ID NO: 3303032 - RNA, 15 nt, Human
aagauauuuugcuuu

SEQ ID NO: 3303033 - RNA, 18 nt, Human
aagaguaggaagacuuug

SEQ ID NO: 3303034 - RNA, 16 nt, Human
aagaguaggaagacuu

SEQ ID NO: 3303035 - RNA, 19 nt, Human
gugguguuuccuggcacug

SEQ ID NO: 3303036 - RNA, 18 nt, Human
gugguuauggagagggug

SEQ ID NO: 3303037 - RNA, 14 nt, Human
aagaguaggaagac

SEQ ID NO: 3303038 - RNA, 19 nt, Human
gugugguguuuccuggcac

SEQ ID NO: 3303039 - RNA, 19 nt, Human
gugucuugcaauggcagcc

SEQ ID NO: 3303040 - RNA, 21 nt, Human
gugucuugcaauggcagccuu

SEQ ID NO: 3303041 - RNA, 13 nt, Human
gugugagucacca

SEQ ID NO: 3303042 - RNA, 18 nt, Human
gugugagucaccaagccc

SEQ ID NO: 3303043 - RNA, 15 nt, Human
gugugguguuuccug

SEQ ID NO: 3303044 - RNA, 16 nt, Human
gugugguagagugugc

SEQ ID NO: 3303045 - RNA, 16 nt, Human
gugguguuuccuggca

SEQ ID NO: 3303046 - RNA, 15 nt, Human
gugguguuuccuggc

SEQ ID NO: 3303047 - RNA, 20 nt, Human
guggugguuuucuguucuuu

SEQ ID NO: 3303048 - RNA, 12 nt, Human
gugggagcugag

SEQ ID NO: 3303049 - RNA, 18 nt, Human
gugggauccuccaggugc

SEQ ID NO: 3303050 - RNA, 15 nt, Human
gugggauccuccagg

SEQ ID NO: 3303051 - RNA, 13 nt, Human
gugggauccucca

SEQ ID NO: 3303052 - RNA, 14 nt, Human
guggccucccaacu

SEQ ID NO: 3303053 - RNA, 13 nt, Human
guggccucccaac

SEQ ID NO: 3303054 - RNA, 16 nt, Human
aagagcccaggccucc

SEQ ID NO: 3303055 - RNA, 14 nt, Human
aagagcccaggccu

SEQ ID NO: 3303056 - RNA, 12 nt, Human
aagagcccaggc

SEQ ID NO: 3303057 - RNA, 16 nt, Human
aagagauugugguuuc

SEQ ID NO: 3303058 - RNA, 17 nt, Human
aagacucauucuucugu

SEQ ID NO: 3303059 - RNA, 20 nt, Human
aagacgcugugcugcccugc

SEQ ID NO: 3303060 - RNA, 23 nt, Human
aagacgcugugcugcccugccca

SEQ ID NO: 3303061 - RNA, 22 nt, Human
aagacgcugugcugcccugccc

SEQ ID NO: 3303062 - RNA, 21 nt, Human
aagacgcugugcugcccugcc

SEQ ID NO: 3303063 - RNA, 17 nt, Human
guggcagcugcggucca

SEQ ID NO: 3303064 - RNA, 20 nt, Human
guggcagcucaccucucccu

SEQ ID NO: 3303065 - RNA, 14 nt, Human
guggcaccagcagc

SEQ ID NO: 3303066 - RNA, 13 nt, Human
guggcaccagcag

SEQ ID NO: 3303067 - RNA, 14 nt, Human
guggcagcugcggu

SEQ ID NO: 3303068 - RNA, 22 nt, Human
guggcagcucaccucucccuug

SEQ ID NO: 3303069 - RNA, 23 nt, Human
guggauuuaacagaaauguacag

SEQ ID NO: 3303070 - RNA, 20 nt, Human
guggauuuaacagaaaugua

SEQ ID NO: 3303071 - RNA, 21 nt, Human
guggauuuaacagaaauguac

SEQ ID NO: 3303072 - RNA, 14 nt, Human
guggacacagcucu

SEQ ID NO: 3303073 - RNA, 15 nt, Human
guggacacagcucuu

SEQ ID NO: 3303074 - RNA, 23 nt, Human
guggacacagcucuucuccaggc

SEQ ID NO: 3303075 - RNA, 24 nt, Human
guggacacagcucuucuccaggcu

SEQ ID NO: 3303076 - RNA, 18 nt, Human
gugcugcccugcccaccu

SEQ ID NO: 3303077 - RNA, 20 nt, Human
gugcugcccugcccaccugg

SEQ ID NO: 3303078 - RNA, 19 nt, Human
gugcugcccugcccaccug

SEQ ID NO: 3303079 - RNA, 17 nt, Human
aagaagcccaggaaagg

SEQ ID NO: 3303080 - RNA, 16 nt, Human
aagaagcccaggaaag

SEQ ID NO: 3303081 - RNA, 15 nt, Human
aagaagcucucuccu

SEQ ID NO: 3303082 - RNA, 14 nt, Human
aagaagcucucucc

SEQ ID NO: 3303083 - RNA, 22 nt, Human
aagaaaaaggaugcacagaguu

SEQ ID NO: 3303084 - RNA, 20 nt, Human
aagaaaaaggaugcacagag

SEQ ID NO: 3303085 - RNA, 19 nt, Human
aagaaaaaggaugcacaga

SEQ ID NO: 3303086 - RNA, 14 nt, Human
aacuuggcgcugcc

SEQ ID NO: 3303087 - RNA, 22 nt, Human
aacuugucuuuggacccugagg

SEQ ID NO: 3303088 - RNA, 23 nt, Human
aacuugguucccauuugcuccuu

SEQ ID NO: 3303089 - RNA, 14 nt, Human
gugccucugggacu

SEQ ID NO: 3303090 - RNA, 15 nt, Human
gugccucugggacug

SEQ ID NO: 3303091 - RNA, 14 nt, Human
gugccaagcagagg

SEQ ID NO: 3303092 - RNA, 15 nt, Human
gugcauuuggugguu

SEQ ID NO: 3303093 - RNA, 22 nt, Human
gugcauuugaggucuguucuuu

SEQ ID NO: 3303094 - RNA, 21 nt, Human
gugcauuugaggucuguucuu

SEQ ID NO: 3303095 - RNA, 20 nt, Human
gugcauuugaggucuguucu

SEQ ID NO: 3303096 - RNA, 12 nt, Human
gugcacacacca

SEQ ID NO: 3303097 - RNA, 14 nt, Human
gugcacacaccaga

SEQ ID NO: 3303098 - RNA, 18 nt, Human
gugcacguacacacacau

SEQ ID NO: 3303099 - RNA, 17 nt, Human
gugcacacaccagagcc

SEQ ID NO: 3303100 - RNA, 23 nt, Human
gugcacaagcuccaagcucccag

SEQ ID NO: 3303101 - RNA, 19 nt, Human
gucccaccuuggcugcagg

SEQ ID NO: 3303102 - RNA, 17 nt, Human
gucccaccuuggcugca

SEQ ID NO: 3303103 - RNA, 18 nt, Human
gucccaccuuggcugcag

SEQ ID NO: 3303104 - RNA, 23 nt, Human
guccccuguuuguuucugaaagg

SEQ ID NO: 3303105 - RNA, 16 nt, Human
guccccgcacugggcu

SEQ ID NO: 3303106 - RNA, 15 nt, Human
guccccgcacugggc

SEQ ID NO: 3303107 - RNA, 13 nt, Human
gucccccugacaa

SEQ ID NO: 3303108 - RNA, 22 nt, Human
guccgaaagggacuuggaagcu

SEQ ID NO: 3303109 - RNA, 21 nt, Human
guccgaaagggacuuggaagc

SEQ ID NO: 3303110 - RNA, 13 nt, Human
gucccuuuuccuu

SEQ ID NO: 3303111 - RNA, 20 nt, Human
aacauacucccaucugugaa

SEQ ID NO: 3303112 - RNA, 16 nt, Human
aacauacucccaucug

SEQ ID NO: 3303113 - RNA, 18 nt, Human
aacauacucccaucugug

SEQ ID NO: 3303114 - RNA, 22 nt, Human
aacauguuuuucuucucccuca

SEQ ID NO: 3303115 - RNA, 13 nt, Human
guccuacccaccc

SEQ ID NO: 3303116 - RNA, 20 nt, Human
aacagacuggaagcacagcu

SEQ ID NO: 3303117 - RNA, 16 nt, Human
guccugcugcaguugc

SEQ ID NO: 3303118 - RNA, 13 nt, Human
guccugcugcagu

SEQ ID NO: 3303119 - RNA, 13 nt, Human
gucgcccagucug

SEQ ID NO: 3303120 - RNA, 14 nt, Human
gucgcccagucugg

SEQ ID NO: 3303121 - RNA, 14 nt, Human
gucgaggacaggga

SEQ ID NO: 3303122 - RNA, 20 nt, Human
gucuaccugaggggccucuu

SEQ ID NO: 3303123 - RNA, 23 nt, Human
gucgcccagucuggaaugcagug

SEQ ID NO: 3303124 - RNA, 23 nt, Human
aaccaucauugaaaucuuuuugc

SEQ ID NO: 3303125 - RNA, 13 nt, Human
aaccacaucuugc

SEQ ID NO: 3303126 - RNA, 19 nt, Human
gucucaaaaaaagaaaaag

SEQ ID NO: 3303127 - RNA, 22 nt, Human
gucucaaacucuugaccucagg

SEQ ID NO: 3303128 - RNA, 14 nt, Human
gucuaugggacuca

SEQ ID NO: 3303129 - RNA, 14 nt, Human
gugaagugaagaca

SEQ ID NO: 3303130 - RNA, 23 nt, Human
gugaagacaaugacuuacuguac

SEQ ID NO: 3303131 - RNA, 18 nt, Human
gugaccauguuuuguuua

SEQ ID NO: 3303132 - RNA, 21 nt, Human
gugaccagcaccaucucuccu

SEQ ID NO: 3303133 - RNA, 18 nt, Human
gugaccagcaccaucucu

SEQ ID NO: 3303134 - RNA, 17 nt, Human
gugaccaaugaugguca

SEQ ID NO: 3303135 - RNA, 16 nt, Human
gugacagaggcagccc

SEQ ID NO: 3303136 - RNA, 18 nt, Human
gugacagaggcagcccca

SEQ ID NO: 3303137 - RNA, 19 nt, Human
gugacagaggcagccccau

SEQ ID NO: 3303138 - RNA, 20 nt, Human
gugaguccuggcaugggaau

SEQ ID NO: 3303139 - RNA, 19 nt, Human
gugagucaccaagcccagu

SEQ ID NO: 3303140 - RNA, 19 nt, Human
gugaguacuacaguccucc

SEQ ID NO: 3303141 - RNA, 17 nt, Human
gugaguccuggcauggg

SEQ ID NO: 3303142 - RNA, 12 nt, Human
gugagagcuggg

SEQ ID NO: 3303143 - RNA, 12 nt, Human
gugaccccaggu

SEQ ID NO: 3303144 - RNA, 15 nt, Human
gugagcaauccugca

SEQ ID NO: 3303145 - RNA, 13 nt, Human
gugagagcugggu

SEQ ID NO: 3303146 - RNA, 16 nt, Human
gugagaggggaacaga

SEQ ID NO: 3303147 - RNA, 21 nt, Human
gugagcacuaaggugugcucu

SEQ ID NO: 3303148 - RNA, 17 nt, Human
gugaguacuacaguccu

SEQ ID NO: 3303149 - RNA, 18 nt, Human
gucuggaaugcaguggua

SEQ ID NO: 3303150 - RNA, 21 nt, Human
gucugacaggcaaugcuggcu

SEQ ID NO: 3303151 - RNA, 22 nt, Human
gucugacaggcaaugcuggcug

SEQ ID NO: 3303152 - RNA, 23 nt, Human
gucugacaggcaaugcuggcugu

SEQ ID NO: 3303153 - RNA, 18 nt, Human
gucucuuuaaugucacag

SEQ ID NO: 3303154 - RNA, 19 nt, Human
gucucuuuaaugucacagg

SEQ ID NO: 3303155 - RNA, 20 nt, Human
gucucuuuaaugucacaggc

SEQ ID NO: 3303156 - RNA, 14 nt, Human
gucugaaggcuggg

SEQ ID NO: 3303157 - RNA, 19 nt, Human
gucugaaggcuggguucug

SEQ ID NO: 3303158 - RNA, 22 nt, Human
gucucuuuaaugucacaggcag

SEQ ID NO: 3303159 - RNA, 17 nt, Human
gucucuugguccugcug

SEQ ID NO: 3303160 - RNA, 19 nt, Human
gucucuugguccugcugca

SEQ ID NO: 3303161 - RNA, 18 nt, Human
gucucuugguccugcugc

SEQ ID NO: 3303162 - RNA, 20 nt, Human
gucucuugguccugcugcag

SEQ ID NO: 3303163 - RNA, 13 nt, Human
gucucuugguccu

SEQ ID NO: 3303164 - RNA, 18 nt, Human
aaccugauugugucucuu

SEQ ID NO: 3303165 - RNA, 19 nt, Human
aaccugauugugucucuug

SEQ ID NO: 3303166 - RNA, 12 nt, Human
aaccugugucuc

SEQ ID NO: 3303167 - RNA, 16 nt, Human
gucuuuguacagacaa

SEQ ID NO: 3303168 - RNA, 15 nt, Human
gucuuuguacagaca

SEQ ID NO: 3303169 - RNA, 16 nt, Human
gucuucaguaagccgu

SEQ ID NO: 3303170 - RNA, 22 nt, Human
aacguggcugcuucaaggaucc

SEQ ID NO: 3303171 - RNA, 23 nt, Human
aacguggcugcuucaaggauccu

SEQ ID NO: 3303172 - RNA, 12 nt, Human
aaguuaaauaaa

SEQ ID NO: 3303173 - RNA, 14 nt, Human
aaguuaaauaaauc

SEQ ID NO: 3303174 - RNA, 18 nt, Human
uaaaccgccaaggcuggg

SEQ ID NO: 3303175 - RNA, 16 nt, Human
uaaaccgccaaggcug

SEQ ID NO: 3303176 - RNA, 19 nt, Human
uaaaggcuaccuuuguauu

SEQ ID NO: 3303177 - RNA, 21 nt, Human
uaaaggcuaccuuuguauucu

SEQ ID NO: 3303178 - RNA, 21 nt, Human
uaaaucuccaaaauaaaacuu

SEQ ID NO: 3303179 - RNA, 20 nt, Human
uaaaucuccaaaauaaaacu

SEQ ID NO: 3303180 - RNA, 18 nt, Human
uaaaucuccaaaauaaaa

SEQ ID NO: 3303181 - RNA, 22 nt, Human
uaaauuaacuuuuauaaacuuu

SEQ ID NO: 3303182 - RNA, 13 nt, Human
uaacaagccaccc

SEQ ID NO: 3303183 - RNA, 19 nt, Human
uaaaucuccaaaauaaaac

SEQ ID NO: 3303184 - RNA, 15 nt, Human
aauacaccacuacau

SEQ ID NO: 3303185 - RNA, 20 nt, Human
aauacaccacuacauucugu

SEQ ID NO: 3303186 - RNA, 18 nt, Human
aauacaccacuacauucu

SEQ ID NO: 3303187 - RNA, 16 nt, Human
aauacaccacuacauu

SEQ ID NO: 3303188 - RNA, 19 nt, Human
aauaacauguaauuaagua

SEQ ID NO: 3303189 - RNA, 12 nt, Human
aauaacauguaa

SEQ ID NO: 3303190 - RNA, 12 nt, Human
aauaaauuauuu

SEQ ID NO: 3303191 - RNA, 15 nt, Human
aauaacuaaaaggua

SEQ ID NO: 3303192 - RNA, 14 nt, Human
aauaaaguaauuau

SEQ ID NO: 3303193 - RNA, 19 nt, Human
uaaaguguauuuuuuuacu

SEQ ID NO: 3303194 - RNA, 15 nt, Human
uaaaguguauuuuuu

SEQ ID NO: 3303195 - RNA, 14 nt, Human
uaaaguguauuuuu

SEQ ID NO: 3303196 - RNA, 13 nt, Human
uaaagucaggggu

SEQ ID NO: 3303197 - RNA, 11 nt, Human
aagcucccagg

SEQ ID NO: 3303198 - RNA, 13 nt, Human
guguuuauuguca

SEQ ID NO: 3303199 - RNA, 21 nt, Human
aagcucuacugaggugcuaug

SEQ ID NO: 3303200 - RNA, 23 nt, Human
aagcucccaggcauuccccagga

SEQ ID NO: 3303201 - RNA, 22 nt, Human
aagcucccaggcauuccccagg

SEQ ID NO: 3303202 - RNA, 12 nt, Human
aagcucccaggc

SEQ ID NO: 3303203 - RNA, 13 nt, Human
aagcucugcuccu

SEQ ID NO: 3303204 - RNA, 18 nt, Human
aagcuguuacugucuuca

SEQ ID NO: 3303205 - RNA, 22 nt, Human
guugauagcacagacccugccc

SEQ ID NO: 3303206 - RNA, 23 nt, Human
guugauagcacagacccugcccu

SEQ ID NO: 3303207 - RNA, 14 nt, Human
guucucugaggaca

SEQ ID NO: 3303208 - RNA, 16 nt, Human
guucucugaggacacu

SEQ ID NO: 3303209 - RNA, 11 nt, Human
guucucugccc

SEQ ID NO: 3303210 - RNA, 12 nt, Human
guucucugcccu

SEQ ID NO: 3303211 - RNA, 17 nt, Human
guugggcuggugucacc

SEQ ID NO: 3303212 - RNA, 15 nt, Human
guugggcugguguca

SEQ ID NO: 3303213 - RNA, 16 nt, Human
guugcccaggcuggcg

SEQ ID NO: 3303214 - RNA, 15 nt, Human
guugcccaggcuggc

SEQ ID NO: 3303215 - RNA, 23 nt, Human
guuggcugggggccucagugcca

SEQ ID NO: 3303216 - RNA, 13 nt, Human
aaggcuaccuuug

SEQ ID NO: 3303217 - RNA, 14 nt, Human
guugcccaggcugg

SEQ ID NO: 3303218 - RNA, 19 nt, Human
aaggccccgcccaggcuua

SEQ ID NO: 3303219 - RNA, 16 nt, Human
aaggccccgcccaggc

SEQ ID NO: 3303220 - RNA, 14 nt, Human
aaggccccgcccag

SEQ ID NO: 3303221 - RNA, 22 nt, Human
aaggaugcacagaguuguuaca

SEQ ID NO: 3303222 - RNA, 24 nt, Human
aaggaugcacagaguuguuacauu

SEQ ID NO: 3303223 - RNA, 14 nt, Human
aaggaugcccaaag

SEQ ID NO: 3303224 - RNA, 15 nt, Human
aaggaaacccagcuc

SEQ ID NO: 3303225 - RNA, 17 nt, Human
aaggagauuuacaacug

SEQ ID NO: 3303226 - RNA, 18 nt, Human
aaggagauuuacaacugg

SEQ ID NO: 3303227 - RNA, 22 nt, Human
aaggauccugagccagauuuca

SEQ ID NO: 3303228 - RNA, 20 nt, Human
aaggauccugagccagauuu

SEQ ID NO: 3303229 - RNA, 12 nt, Human
aaggauccugag

SEQ ID NO: 3303230 - RNA, 11 nt, Human
aaggauccuga

SEQ ID NO: 3303231 - RNA, 18 nt, Human
aaggaggaagagaaaaaa

SEQ ID NO: 3303232 - RNA, 20 nt, Human
aaggaggaagagaaaaaaua

SEQ ID NO: 3303233 - RNA, 17 nt, Human
aaggguaucaggugcug

SEQ ID NO: 3303234 - RNA, 14 nt, Human
aaggggcaguggug

SEQ ID NO: 3303235 - RNA, 19 nt, Human
aaggguaucaggugcugcc

SEQ ID NO: 3303236 - RNA, 16 nt, Human
aaggguaucuggugac

SEQ ID NO: 3303237 - RNA, 15 nt, Human
aagggcccagagagg

SEQ ID NO: 3303238 - RNA, 13 nt, Human
aagggcccagaga

SEQ ID NO: 3303239 - RNA, 15 nt, Human
guuuuacugcagcuu

SEQ ID NO: 3303240 - RNA, 18 nt, Human
guuuuacugcagcuuugu

SEQ ID NO: 3303241 - RNA, 16 nt, Human
guuuuacugcagcuuu

SEQ ID NO: 3303242 - RNA, 14 nt, Human
guuuuaagaggcag

SEQ ID NO: 3303243 - RNA, 16 nt, Human
guuuuaagaggcaggg

SEQ ID NO: 3303244 - RNA, 16 nt, Human
guuugccucugccucu

SEQ ID NO: 3303245 - RNA, 17 nt, Human
guuugccucugccucug

SEQ ID NO: 3303246 - RNA, 13 nt, Human
guuugcuaaguga

SEQ ID NO: 3303247 - RNA, 22 nt, Human
guuucugccgcagcccugcaga

SEQ ID NO: 3303248 - RNA, 18 nt, Human
guuucugccgcagcccug

SEQ ID NO: 3303249 - RNA, 20 nt, Human
aaguacuucuccacccugcu

SEQ ID NO: 3303250 - RNA, 22 nt, Human
aaguacuucuccacccugcucu

SEQ ID NO: 3303251 - RNA, 15 nt, Human
aaguacuauguauca

SEQ ID NO: 3303252 - RNA, 21 nt, Human
aaguacuucuccacccugcuc

SEQ ID NO: 3303253 - RNA, 15 nt, Human
aaguacuggagaaaa

SEQ ID NO: 3303254 - RNA, 16 nt, Human
aaguacuauguaucaa

SEQ ID NO: 3303255 - RNA, 13 nt, Human
aagucacacagug

SEQ ID NO: 3303256 - RNA, 18 nt, Human
aaguauucuuauuuaaug

SEQ ID NO: 3303257 - RNA, 24 nt, Human
aagucacacaguauuacuucugcu

SEQ ID NO: 3303258 - RNA, 21 nt, Human
aagucaagugaaaaaggagga

SEQ ID NO: 3303259 - RNA, 16 nt, Human
guuuuugucuuaaaaa

SEQ ID NO: 3303260 - RNA, 18 nt, Human
guuuuucuaggccugggg

SEQ ID NO: 3303261 - RNA, 18 nt, Human
aagucuuagauguauaua

SEQ ID NO: 3303262 - RNA, 19 nt, Human
aagucuuagauguauauau

SEQ ID NO: 3303263 - RNA, 17 nt, Human
aagucuuagauguauau

SEQ ID NO: 3303264 - RNA, 15 nt, Human
uccucuccccagcaa

SEQ ID NO: 3303265 - RNA, 23 nt, Human
acugaguacguugugcauuuggu

SEQ ID NO: 3303266 - RNA, 22 nt, Human
acugaguacguugugcauuugg

SEQ ID NO: 3303267 - RNA, 21 nt, Human
acugaguacguugugcauuug

SEQ ID NO: 3303268 - RNA, 19 nt, Human
acugaguacguugugcauu

SEQ ID NO: 3303269 - RNA, 18 nt, Human
acugaguacguugugcau

SEQ ID NO: 3303270 - RNA, 13 nt, Human
acugcaaccuccg

SEQ ID NO: 3303271 - RNA, 14 nt, Human
acugcaaccuccgc

SEQ ID NO: 3303272 - RNA, 16 nt, Human
acugcaaccuccgccu

SEQ ID NO: 3303273 - RNA, 22 nt, Human
acugcaaccuccgccucuuggg

SEQ ID NO: 3303274 - RNA, 15 nt, Human
uccugcaggcagcca

SEQ ID NO: 3303275 - RNA, 21 nt, Human
uccugaugcuucuucagagac

SEQ ID NO: 3303276 - RNA, 17 nt, Human
uccugccucagccuccc

SEQ ID NO: 3303277 - RNA, 20 nt, Human
uccugccucgaacuggcugc

SEQ ID NO: 3303278 - RNA, 22 nt, Human
uccugcaggcagccaggccaca

SEQ ID NO: 3303279 - RNA, 19 nt, Human
uccugccucagccucccaa

SEQ ID NO: 3303280 - RNA, 20 nt, Human
uccugcaggcagccaggcca

SEQ ID NO: 3303281 - RNA, 19 nt, Human
uccugcaggcagccaggcc

SEQ ID NO: 3303282 - RNA, 17 nt, Human
uccugcaggcagccagg

SEQ ID NO: 3303283 - RNA, 16 nt, Human
uccugcaggcagccag

SEQ ID NO: 3303284 - RNA, 19 nt, Human
uccuguucccaugagauga

SEQ ID NO: 3303285 - RNA, 18 nt, Human
uccugugugugcgccuac

SEQ ID NO: 3303286 - RNA, 13 nt, Human
uccugugugugcg

SEQ ID NO: 3303287 - RNA, 14 nt, Human
uccugugugugcgc

SEQ ID NO: 3303288 - RNA, 23 nt, Human
uccugugucuugcaauggcagcc

SEQ ID NO: 3303289 - RNA, 24 nt, Human
uccugugucuugcaauggcagccu

SEQ ID NO: 3303290 - RNA, 19 nt, Human
acugcagccucaaccuccu

SEQ ID NO: 3303291 - RNA, 21 nt, Human
acugcagccucaaccuccugg

SEQ ID NO: 3303292 - RNA, 22 nt, Human
acugcagccucaaccuccuggg

SEQ ID NO: 3303293 - RNA, 13 nt, Human
acugcacuguuuu

SEQ ID NO: 3303294 - RNA, 23 nt, Human
acugcagccucaaccuccugggc

SEQ ID NO: 3303295 - RNA, 13 nt, Human
uccugcugcaguu

SEQ ID NO: 3303296 - RNA, 11 nt, Human
uccuucagugc

SEQ ID NO: 3303297 - RNA, 12 nt, Human
uccuucagugcc

SEQ ID NO: 3303298 - RNA, 22 nt, Human
uccuucagugccuuauggaaca

SEQ ID NO: 3303299 - RNA, 20 nt, Human
uccuucagugccuuauggaa

SEQ ID NO: 3303300 - RNA, 13 nt, Human
uccuucagugccu

SEQ ID NO: 3303301 - RNA, 22 nt, Human
acuggcugcaaaggguaucagg

SEQ ID NO: 3303302 - RNA, 23 nt, Human
acugcuuccagugaggcucugcc

SEQ ID NO: 3303303 - RNA, 22 nt, Human
acugcuuccagugaggcucugc

SEQ ID NO: 3303304 - RNA, 21 nt, Human
acugcuuccagugaggcucug

SEQ ID NO: 3303305 - RNA, 18 nt, Human
acugcuuccagugaggcu

SEQ ID NO: 3303306 - RNA, 17 nt, Human
acugcuuccagugaggc

SEQ ID NO: 3303307 - RNA, 22 nt, Human
acuggauuaaacuuaaucuaaa

SEQ ID NO: 3303308 - RNA, 19 nt, Human
acuggguacuuguggacac

SEQ ID NO: 3303309 - RNA, 20 nt, Human
acuggguacuuguggacaca

SEQ ID NO: 3303310 - RNA, 23 nt, Human
acuggguacuuguggacacagcu

SEQ ID NO: 3303311 - RNA, 18 nt, Human
acuggguacuuguggaca

SEQ ID NO: 3303312 - RNA, 12 nt, Human
ucgcuccugugu

SEQ ID NO: 3303313 - RNA, 13 nt, Human
ucgcuccuguguc

SEQ ID NO: 3303314 - RNA, 22 nt, Human
acugggcuuggggaccagagcu

SEQ ID NO: 3303315 - RNA, 14 nt, Human
acuguacaugaaaa

SEQ ID NO: 3303316 - RNA, 13 nt, Human
acuguacaugaaa

SEQ ID NO: 3303317 - RNA, 23 nt, Human
acuguacaugaaaacacauuuuu

SEQ ID NO: 3303318 - RNA, 13 nt, Human
acuguacaaagua

SEQ ID NO: 3303319 - RNA, 19 nt, Human
acuguaauuugugauacaa

SEQ ID NO: 3303320 - RNA, 14 nt, Human
acuguacaaaguag

SEQ ID NO: 3303321 - RNA, 15 nt, Human
acuguacaaaguaga

SEQ ID NO: 3303322 - RNA, 13 nt, Human
ucgaggacaggga

SEQ ID NO: 3303323 - RNA, 14 nt, Human
ucgagcaugccugg

SEQ ID NO: 3303324 - RNA, 14 nt, Human
ucgaggacagggag

SEQ ID NO: 3303325 - RNA, 17 nt, Human
ucgaggacagggaggug

SEQ ID NO: 3303326 - RNA, 13 nt, Human
ucgcgacaaugca

SEQ ID NO: 3303327 - RNA, 15 nt, Human
uccuuucaccacaug

SEQ ID NO: 3303328 - RNA, 23 nt, Human
uccuuuagcgcccaguugggugg

SEQ ID NO: 3303329 - RNA, 15 nt, Human
ucgaacuggcugcaa

SEQ ID NO: 3303330 - RNA, 14 nt, Human
ucgaacuggcugca

SEQ ID NO: 3303331 - RNA, 13 nt, Human
ucgaacuggcugc

SEQ ID NO: 3303332 - RNA, 14 nt, Human
acguuucuaaaggc

SEQ ID NO: 3303333 - RNA, 13 nt, Human
uccagccugggug

SEQ ID NO: 3303334 - RNA, 24 nt, Human
uccagccugggugacagagcaagu

SEQ ID NO: 3303335 - RNA, 14 nt, Human
uccagcucaccagc

SEQ ID NO: 3303336 - RNA, 12 nt, Human
acguuucuaaag

SEQ ID NO: 3303337 - RNA, 15 nt, Human
acuacaguccuccca

SEQ ID NO: 3303338 - RNA, 23 nt, Human
acuacaggugugagucaccaagc

SEQ ID NO: 3303339 - RNA, 17 nt, Human
acuaaccagcagaaaug

SEQ ID NO: 3303340 - RNA, 13 nt, Human
acuaaccacgcug

SEQ ID NO: 3303341 - RNA, 16 nt, Human
acuaaccagcagaaau

SEQ ID NO: 3303342 - RNA, 12 nt, Human
acuaaccacgcu

SEQ ID NO: 3303343 - RNA, 22 nt, Human
ucccagugccgagaaggaagcc

SEQ ID NO: 3303344 - RNA, 19 nt, Human
ucccagugccgagaaggaa

SEQ ID NO: 3303345 - RNA, 16 nt, Human
acuacaguccucccau

SEQ ID NO: 3303346 - RNA, 15 nt, Human
acuacaguuuguuag

SEQ ID NO: 3303347 - RNA, 22 nt, Human
uccccaccgcagacaggaccag

SEQ ID NO: 3303348 - RNA, 15 nt, Human
ucccauaugccuggg

SEQ ID NO: 3303349 - RNA, 13 nt, Human
ucccaucucacac

SEQ ID NO: 3303350 - RNA, 19 nt, Human
ucccaucucacacaugagc

SEQ ID NO: 3303351 - RNA, 14 nt, Human
ucccaucucacaca

SEQ ID NO: 3303352 - RNA, 16 nt, Human
ucccuauuagagaaga

SEQ ID NO: 3303353 - RNA, 18 nt, Human
ucccuauuagagaagaga

SEQ ID NO: 3303354 - RNA, 20 nt, Human
ucccgaguagcugggacuac

SEQ ID NO: 3303355 - RNA, 15 nt, Human
ucccgaauagcuggg

SEQ ID NO: 3303356 - RNA, 16 nt, Human
ucccgaauagcuggga

SEQ ID NO: 3303357 - RNA, 17 nt, Human
acuauagccuaggugac

SEQ ID NO: 3303358 - RNA, 21 nt, Human
acuauaauguaagcucuacug

SEQ ID NO: 3303359 - RNA, 23 nt, Human
acuauaauuuaccugaagucuuu

SEQ ID NO: 3303360 - RNA, 24 nt, Human
uccccaccgcagacaggaccaggg

SEQ ID NO: 3303361 - RNA, 23 nt, Human
uccccaggaggccagccuugacc

SEQ ID NO: 3303362 - RNA, 23 nt, Human
acuauguugcccaggcaggucuu

SEQ ID NO: 3303363 - RNA, 19 nt, Human
acuauguugcccaggcagg

SEQ ID NO: 3303364 - RNA, 20 nt, Human
acuauguugcccaggcaggu

SEQ ID NO: 3303365 - RNA, 17 nt, Human
acuauguugcccaggca

SEQ ID NO: 3303366 - RNA, 18 nt, Human
acuauguugcccaggcag

SEQ ID NO: 3303367 - RNA, 16 nt, Human
acucuuauugcccacg

SEQ ID NO: 3303368 - RNA, 20 nt, Human
uccucagaucuucugugggu

SEQ ID NO: 3303369 - RNA, 12 nt, Human
uccucuccccag

SEQ ID NO: 3303370 - RNA, 19 nt, Human
uccucccucccucuuuccc

SEQ ID NO: 3303371 - RNA, 17 nt, Human
uccucccucccucuuuc

SEQ ID NO: 3303372 - RNA, 15 nt, Human
uccucccucccucuu

SEQ ID NO: 3303373 - RNA, 18 nt, Human
uccucauacccaccccca

SEQ ID NO: 3303374 - RNA, 14 nt, Human
uccucauacccacc

SEQ ID NO: 3303375 - RNA, 17 nt, Human
acucgcgacaaugcaaa

SEQ ID NO: 3303376 - RNA, 23 nt, Human
acucgcgacaaugcaaaccauca

SEQ ID NO: 3303377 - RNA, 20 nt, Human
acucgcgacaaugcaaacca

SEQ ID NO: 3303378 - RNA, 19 nt, Human
uccuaggcauuugcugaau

SEQ ID NO: 3303379 - RNA, 18 nt, Human
acucgcgacaaugcaaac

SEQ ID NO: 3303380 - RNA, 17 nt, Human
acucuccucugcugcug

SEQ ID NO: 3303381 - RNA, 16 nt, Human
acucuccucugcugcu

SEQ ID NO: 3303382 - RNA, 19 nt, Human
acucuccucugcugcuggc

SEQ ID NO: 3303383 - RNA, 18 nt, Human
acucuccucugcugcugg

SEQ ID NO: 3303384 - RNA, 22 nt, Human
acucauugaccugaggcccuuc

SEQ ID NO: 3303385 - RNA, 20 nt, Human
ucccucagucuggcccuucc

SEQ ID NO: 3303386 - RNA, 21 nt, Human
ucccucagucuggcccuuccu

SEQ ID NO: 3303387 - RNA, 22 nt, Human
ucccucauccucauacccaccc

SEQ ID NO: 3303388 - RNA, 23 nt, Human
ucccugguggcagcucaccucuc

SEQ ID NO: 3303389 - RNA, 17 nt, Human
ucccuuacgugaguccu

SEQ ID NO: 3303390 - RNA, 22 nt, Human
ucccuuacgugaguccuggcau

SEQ ID NO: 3303391 - RNA, 18 nt, Human
ucccuuacgugaguccug

SEQ ID NO: 3303392 - RNA, 22 nt, Human
ucccuuuccaaaugcccagcuu

SEQ ID NO: 3303393 - RNA, 14 nt, Human
uccuaggcauuugc

SEQ ID NO: 3303394 - RNA, 21 nt, Human
ucccuuugacgccaucccagc

SEQ ID NO: 3303395 - RNA, 23 nt, Human
ucccuuugacgccaucccagccc

SEQ ID NO: 3303396 - RNA, 22 nt, Human
ucccuuugacgccaucccagcc

SEQ ID NO: 3303397 - RNA, 14 nt, Human
ucaggccagcugcu

SEQ ID NO: 3303398 - RNA, 11 nt, Human
ucaggccaggc

SEQ ID NO: 3303399 - RNA, 20 nt, Human
ucaggccagcugcuugggcu

SEQ ID NO: 3303400 - RNA, 15 nt, Human
ucaggccagcugcuu

SEQ ID NO: 3303401 - RNA, 13 nt, Human
ucagggucccugg

SEQ ID NO: 3303402 - RNA, 23 nt, Human
ucaggggugugcggccuuuggcu

SEQ ID NO: 3303403 - RNA, 14 nt, Human
ucagggucccuggu

SEQ ID NO: 3303404 - RNA, 13 nt, Human
ucagguaacaggc

SEQ ID NO: 3303405 - RNA, 15 nt, Human
ucagguaacaggcag

SEQ ID NO: 3303406 - RNA, 16 nt, Human
ucagguaacaggcaga

SEQ ID NO: 3303407 - RNA, 16 nt, Human
accccuucgcuccugu

SEQ ID NO: 3303408 - RNA, 19 nt, Human
accccuucgcuccuguguc

SEQ ID NO: 3303409 - RNA, 15 nt, Human
ucagcggggacagcu

SEQ ID NO: 3303410 - RNA, 16 nt, Human
ucagcggggacagcuc

SEQ ID NO: 3303411 - RNA, 17 nt, Human
ucagcggggacagcucc

SEQ ID NO: 3303412 - RNA, 20 nt, Human
ucaggaagcucagggccugg

SEQ ID NO: 3303413 - RNA, 19 nt, Human
ucaggaagcucagggccug

SEQ ID NO: 3303414 - RNA, 17 nt, Human
ucaggaagcucagggcc

SEQ ID NO: 3303415 - RNA, 16 nt, Human
ucaggaagcucagggc

SEQ ID NO: 3303416 - RNA, 20 nt, Human
ucaggccaaacucaccugcc

SEQ ID NO: 3303417 - RNA, 14 nt, Human
acccucuuagaaaa

SEQ ID NO: 3303418 - RNA, 13 nt, Human
acccugcccugug

SEQ ID NO: 3303419 - RNA, 12 nt, Human
acccugcccugu

SEQ ID NO: 3303420 - RNA, 11 nt, Human
acccugcccug

SEQ ID NO: 3303421 - RNA, 15 nt, Human
acccuugugguccca

SEQ ID NO: 3303422 - RNA, 19 nt, Human
acccuuguggucccacccc

SEQ ID NO: 3303423 - RNA, 17 nt, Human
acccuuguggucccacc

SEQ ID NO: 3303424 - RNA, 16 nt, Human
acccuuguggucccac

SEQ ID NO: 3303425 - RNA, 23 nt, Human
ucaggguuggccccugcccggcu

SEQ ID NO: 3303426 - RNA, 20 nt, Human
accccuucgcuccugugucu

SEQ ID NO: 3303427 - RNA, 15 nt, Human
acccagcucuggucc

SEQ ID NO: 3303428 - RNA, 13 nt, Human
acccagcucuggu

SEQ ID NO: 3303429 - RNA, 23 nt, Human
acccaggugcuaggaacacuccu

SEQ ID NO: 3303430 - RNA, 13 nt, Human
ucagaucuucugu

SEQ ID NO: 3303431 - RNA, 13 nt, Human
ucagaagacacug

SEQ ID NO: 3303432 - RNA, 15 nt, Human
acccccagccugcua

SEQ ID NO: 3303433 - RNA, 14 nt, Human
acccccagccugcu

SEQ ID NO: 3303434 - RNA, 12 nt, Human
ucagccugggca

SEQ ID NO: 3303435 - RNA, 10 nt, Human
ucagccuggg

SEQ ID NO: 3303436 - RNA, 17 nt, Human
ucacuguugcccaggcu

SEQ ID NO: 3303437 - RNA, 18 nt, Human
ucacuguugcccaggcug

SEQ ID NO: 3303438 - RNA, 21 nt, Human
accaguguuguggauuuaaca

SEQ ID NO: 3303439 - RNA, 18 nt, Human
accaguguuguggauuua

SEQ ID NO: 3303440 - RNA, 12 nt, Human
ucacugcagccu

SEQ ID NO: 3303441 - RNA, 16 nt, Human
ucacuguugcccaggc

SEQ ID NO: 3303442 - RNA, 13 nt, Human
ucacugagacagc

SEQ ID NO: 3303443 - RNA, 15 nt, Human
ucacugagacagccc

SEQ ID NO: 3303444 - RNA, 14 nt, Human
ucacugagacagcc

SEQ ID NO: 3303445 - RNA, 16 nt, Human
ucaccugccccucaac

SEQ ID NO: 3303446 - RNA, 23 nt, Human
accauuuugggguacccacugcu

SEQ ID NO: 3303447 - RNA, 22 nt, Human
accauuuugggguacccacugc

SEQ ID NO: 3303448 - RNA, 23 nt, Human
accaugauuaaccacuucagcug

SEQ ID NO: 3303449 - RNA, 22 nt, Human
accaugauuaaccacuucagcu

SEQ ID NO: 3303450 - RNA, 16 nt, Human
accauucuccaccugc

SEQ ID NO: 3303451 - RNA, 13 nt, Human
accauucuccacc

SEQ ID NO: 3303452 - RNA, 16 nt, Human
acccagaagaaaauag

SEQ ID NO: 3303453 - RNA, 16 nt, Human
acccagcccacuucug

SEQ ID NO: 3303454 - RNA, 17 nt, Human
acccagcccacuucugc

SEQ ID NO: 3303455 - RNA, 15 nt, Human
acccagcccacuucu

SEQ ID NO: 3303456 - RNA, 18 nt, Human
acccagcccacuucugcc

SEQ ID NO: 3303457 - RNA, 14 nt, Human
accacuucagcuga

SEQ ID NO: 3303458 - RNA, 13 nt, Human
accacuucagcug

SEQ ID NO: 3303459 - RNA, 20 nt, Human
accacucuaucaaguauuau

SEQ ID NO: 3303460 - RNA, 20 nt, Human
accacaucuugcucugcuga

SEQ ID NO: 3303461 - RNA, 21 nt, Human
accacaucuugcucugcugac

SEQ ID NO: 3303462 - RNA, 24 nt, Human
accacaucuugcucugcugacaga

SEQ ID NO: 3303463 - RNA, 14 nt, Human
accacaucuugcuc

SEQ ID NO: 3303464 - RNA, 22 nt, Human
accacagacauacuaaccagca

SEQ ID NO: 3303465 - RNA, 21 nt, Human
accacagacauacuaaccagc

SEQ ID NO: 3303466 - RNA, 22 nt, Human
accagacaccuugacagggcac

SEQ ID NO: 3303467 - RNA, 23 nt, Human
accagacaccuugacagggcaca

SEQ ID NO: 3303468 - RNA, 17 nt, Human
accagacaccuugacag

SEQ ID NO: 3303469 - RNA, 12 nt, Human
accacuuuuguu

SEQ ID NO: 3303470 - RNA, 19 nt, Human
accagagcccaccuuggcu

SEQ ID NO: 3303471 - RNA, 22 nt, Human
accagagcccaccuuggcucaa

SEQ ID NO: 3303472 - RNA, 17 nt, Human
accagagcccaccuugg

SEQ ID NO: 3303473 - RNA, 23 nt, Human
ucaccugaagacucauucuucug

SEQ ID NO: 3303474 - RNA, 16 nt, Human
ucaccugaagacucau

SEQ ID NO: 3303475 - RNA, 19 nt, Human
ucaccugaagacucauucu

SEQ ID NO: 3303476 - RNA, 19 nt, Human
ucaugacaaagacugagua

SEQ ID NO: 3303477 - RNA, 19 nt, Human
ucauccacugugccaugug

SEQ ID NO: 3303478 - RNA, 21 nt, Human
ucauccacugugccaugugcc

SEQ ID NO: 3303479 - RNA, 17 nt, Human
ucauguucuuaauucuu

SEQ ID NO: 3303480 - RNA, 11 nt, Human
ucauguucuua

SEQ ID NO: 3303481 - RNA, 13 nt, Human
ucaugucuggcua

SEQ ID NO: 3303482 - RNA, 19 nt, Human
ucauugaccugaggcccuu

SEQ ID NO: 3303483 - RNA, 21 nt, Human
ucauucuccuuguguuacuaa

SEQ ID NO: 3303484 - RNA, 22 nt, Human
ucauugaccugaggcccuucuc

SEQ ID NO: 3303485 - RNA, 17 nt, Human
accucggugccuuccuc

SEQ ID NO: 3303486 - RNA, 15 nt, Human
accucucccuuggau

SEQ ID NO: 3303487 - RNA, 14 nt, Human
accucucccuugga

SEQ ID NO: 3303488 - RNA, 13 nt, Human
accucucccuugg

SEQ ID NO: 3303489 - RNA, 19 nt, Human
accucucucacuccuugaa

SEQ ID NO: 3303490 - RNA, 14 nt, Human
accucucucacucc

SEQ ID NO: 3303491 - RNA, 23 nt, Human
accucucccuuggauuguccccg

SEQ ID NO: 3303492 - RNA, 12 nt, Human
accucugcacaa

SEQ ID NO: 3303493 - RNA, 10 nt, Human
acccuuuucu

SEQ ID NO: 3303494 - RNA, 20 nt, Human
ucauauuuacuucuuauaca

SEQ ID NO: 3303495 - RNA, 21 nt, Human
ucauauuuacuucuuauacau

SEQ ID NO: 3303496 - RNA, 16 nt, Human
ucauauuuacuucuua

SEQ ID NO: 3303497 - RNA, 17 nt, Human
accgcagacaggaccag

SEQ ID NO: 3303498 - RNA, 17 nt, Human
accgccaaggcuggggg

SEQ ID NO: 3303499 - RNA, 20 nt, Human
accgcagacaggaccaggga

SEQ ID NO: 3303500 - RNA, 18 nt, Human
ucauccacugugccaugu

SEQ ID NO: 3303501 - RNA, 20 nt, Human
accuccgccucuuggguuca

SEQ ID NO: 3303502 - RNA, 13 nt, Human
accuagccuuaga

SEQ ID NO: 3303503 - RNA, 22 nt, Human
uccagccccuggaugcagccuc

SEQ ID NO: 3303504 - RNA, 11 nt, Human
uccagccuggg

SEQ ID NO: 3303505 - RNA, 14 nt, Human
uccagccccuggau

SEQ ID NO: 3303506 - RNA, 15 nt, Human
uccagccccuggaug

SEQ ID NO: 3303507 - RNA, 21 nt, Human
uccagccccuggaugcagccu

SEQ ID NO: 3303508 - RNA, 19 nt, Human
uccagccccuggaugcagc

SEQ ID NO: 3303509 - RNA, 17 nt, Human
uccagccccuggaugca

SEQ ID NO: 3303510 - RNA, 16 nt, Human
uccagccccuggaugc

SEQ ID NO: 3303511 - RNA, 22 nt, Human
uccagaaguuugagaucagccu

SEQ ID NO: 3303512 - RNA, 23 nt, Human
accuuuguauucucuccuguacc

SEQ ID NO: 3303513 - RNA, 19 nt, Human
accuuuguauucucuccug

SEQ ID NO: 3303514 - RNA, 15 nt, Human
accuuuguauucucu

SEQ ID NO: 3303515 - RNA, 15 nt, Human
accuugacagggcac

SEQ ID NO: 3303516 - RNA, 14 nt, Human
accuugacagggca

SEQ ID NO: 3303517 - RNA, 15 nt, Human
accuugaaugaugcc

SEQ ID NO: 3303518 - RNA, 13 nt, Human
accuucuccuuca

SEQ ID NO: 3303519 - RNA, 12 nt, Human
accuucuccuuc

SEQ ID NO: 3303520 - RNA, 15 nt, Human
uccaccaucaagcca

SEQ ID NO: 3303521 - RNA, 18 nt, Human
accugcggugcuaucucc

SEQ ID NO: 3303522 - RNA, 22 nt, Human
accugaagucuuuguacagaca

SEQ ID NO: 3303523 - RNA, 15 nt, Human
accugaagucuuugu

SEQ ID NO: 3303524 - RNA, 23 nt, Human
accugcggugcuaucucccccag

SEQ ID NO: 3303525 - RNA, 22 nt, Human
accugcggugcuaucuccccca

SEQ ID NO: 3303526 - RNA, 19 nt, Human
accugcggugcuaucuccc

SEQ ID NO: 3303527 - RNA, 19 nt, Human
ucauuugagcagggcucag

SEQ ID NO: 3303528 - RNA, 14 nt, Human
accuggaauauaua

SEQ ID NO: 3303529 - RNA, 21 nt, Human
ucauuugagcagggcucagcg

SEQ ID NO: 3303530 - RNA, 13 nt, Human
ucauuuuuuuuaa

SEQ ID NO: 3303531 - RNA, 16 nt, Human
uccaagcucccaggca

SEQ ID NO: 3303532 - RNA, 15 nt, Human
uccaagcucccaggc

SEQ ID NO: 3303533 - RNA, 14 nt, Human
uccaagcucccagg

SEQ ID NO: 3303534 - RNA, 13 nt, Human
uccaagcucccag

SEQ ID NO: 3303535 - RNA, 12 nt, Human
uccaagcuccca

SEQ ID NO: 3303536 - RNA, 11 nt, Human
uccaagcuggu

SEQ ID NO: 3303537 - RNA, 14 nt, Human
ucucuugagagggu

SEQ ID NO: 3303538 - RNA, 15 nt, Human
ucucuccagccccug

SEQ ID NO: 3303539 - RNA, 17 nt, Human
ucucuccuguaccucuu

SEQ ID NO: 3303540 - RNA, 22 nt, Human
ucucuccuguaccucuugagcc

SEQ ID NO: 3303541 - RNA, 20 nt, Human
ucucuccuguaccucuugag

SEQ ID NO: 3303542 - RNA, 18 nt, Human
ucuccuucaccuuugucc

SEQ ID NO: 3303543 - RNA, 20 nt, Human
ucuccuucaccuuugucccc

SEQ ID NO: 3303544 - RNA, 14 nt, Human
ucucuccagccccu

SEQ ID NO: 3303545 - RNA, 13 nt, Human
ucucuccagcccc

SEQ ID NO: 3303546 - RNA, 18 nt, Human
agaaaaaggaugcacaga

SEQ ID NO: 3303547 - RNA, 21 nt, Human
ucucuuuaaugucacaggcag

SEQ ID NO: 3303548 - RNA, 15 nt, Human
ucucuugagccuggg

SEQ ID NO: 3303549 - RNA, 14 nt, Human
ucucuugagccugg

SEQ ID NO: 3303550 - RNA, 13 nt, Human
ucucuugagccug

SEQ ID NO: 3303551 - RNA, 22 nt, Human
ucucuuuaaugucacaggcagg

SEQ ID NO: 3303552 - RNA, 19 nt, Human
acuuugaccucugcagcaa

SEQ ID NO: 3303553 - RNA, 23 nt, Human
acuuugaccucugcagcaauaaa

SEQ ID NO: 3303554 - RNA, 12 nt, Human
acuuuaccuuuu

SEQ ID NO: 3303555 - RNA, 18 nt, Human
acuuuaccuuuuuuauac

SEQ ID NO: 3303556 - RNA, 22 nt, Human
acuuuaccuuuuuuauacauaa

SEQ ID NO: 3303557 - RNA, 19 nt, Human
acuuuaccuuuuuuauaca

SEQ ID NO: 3303558 - RNA, 12 nt, Human
acuuuggaaaga

SEQ ID NO: 3303559 - RNA, 14 nt, Human
acuuuggaaagacu

SEQ ID NO: 3303560 - RNA, 13 nt, Human
acuuuggaaagac

SEQ ID NO: 3303561 - RNA, 17 nt, Human
acuuuggaaagacuuuu

SEQ ID NO: 3303562 - RNA, 18 nt, Human
ucucccuuggauuguccc

SEQ ID NO: 3303563 - RNA, 11 nt, Human
ucucccuugga

SEQ ID NO: 3303564 - RNA, 14 nt, Human
ucuccucugcugcu

SEQ ID NO: 3303565 - RNA, 13 nt, Human
ucuccucugcugc

SEQ ID NO: 3303566 - RNA, 23 nt, Human
ucuccgaccagacaccuugacag

SEQ ID NO: 3303567 - RNA, 19 nt, Human
ucucccuuggauugucccc

SEQ ID NO: 3303568 - RNA, 12 nt, Human
ucuccucugcug

SEQ ID NO: 3303569 - RNA, 11 nt, Human
agaaauguguu

SEQ ID NO: 3303570 - RNA, 16 nt, Human
agaaauguacagcaag

SEQ ID NO: 3303571 - RNA, 17 nt, Human
agaaauguacagcaagg

SEQ ID NO: 3303572 - RNA, 23 nt, Human
ucugacccaugcugcccugugag

SEQ ID NO: 3303573 - RNA, 19 nt, Human
ucugacccugcuucaaaua

SEQ ID NO: 3303574 - RNA, 18 nt, Human
ucugauucccaagcucug

SEQ ID NO: 3303575 - RNA, 19 nt, Human
ucugauucccaagcucugc

SEQ ID NO: 3303576 - RNA, 20 nt, Human
ucugauucccaagcucugcu

SEQ ID NO: 3303577 - RNA, 22 nt, Human
ucugcacuccccugcugggugu

SEQ ID NO: 3303578 - RNA, 16 nt, Human
agaagcggcuggcagc

SEQ ID NO: 3303579 - RNA, 15 nt, Human
agaagcggcuggcag

SEQ ID NO: 3303580 - RNA, 18 nt, Human
ucuggagguacgaaaaga

SEQ ID NO: 3303581 - RNA, 23 nt, Human
ucugcuuuuuaaagaaugcucuu

SEQ ID NO: 3303582 - RNA, 15 nt, Human
ucuggcagcucagag

SEQ ID NO: 3303583 - RNA, 14 nt, Human
ucuggcagcucaga

SEQ ID NO: 3303584 - RNA, 23 nt, Human
ucugccgcagcccugcagagggc

SEQ ID NO: 3303585 - RNA, 14 nt, Human
ucugcccuccaaga

SEQ ID NO: 3303586 - RNA, 16 nt, Human
ucugcucacauaucug

SEQ ID NO: 3303587 - RNA, 17 nt, Human
agacuucaucccucugg

SEQ ID NO: 3303588 - RNA, 14 nt, Human
agacuucaucccuc

SEQ ID NO: 3303589 - RNA, 18 nt, Human
agagaaugaaagggccca

SEQ ID NO: 3303590 - RNA, 14 nt, Human
agacuuuggaaaga

SEQ ID NO: 3303591 - RNA, 12 nt, Human
agacuuuggaaa

SEQ ID NO: 3303592 - RNA, 14 nt, Human
agagaccaucccug

SEQ ID NO: 3303593 - RNA, 13 nt, Human
agagaccaucccu

SEQ ID NO: 3303594 - RNA, 15 nt, Human
agagaccaucccuga

SEQ ID NO: 3303595 - RNA, 15 nt, Human
ucuuuacuucaugga

SEQ ID NO: 3303596 - RNA, 17 nt, Human
agacuccugcaggcagc

SEQ ID NO: 3303597 - RNA, 16 nt, Human
agacuccugcaggcag

SEQ ID NO: 3303598 - RNA, 15 nt, Human
agacuccugcaggca

SEQ ID NO: 3303599 - RNA, 14 nt, Human
agacuccugcaggc

SEQ ID NO: 3303600 - RNA, 12 nt, Human
ucuuuccugagg

SEQ ID NO: 3303601 - RNA, 15 nt, Human
ucuuuccugaggcug

SEQ ID NO: 3303602 - RNA, 14 nt, Human
ucuuuccugaggcu

SEQ ID NO: 3303603 - RNA, 13 nt, Human
ucuuuccugaggc

SEQ ID NO: 3303604 - RNA, 20 nt, Human
agacuccugcaggcagccag

SEQ ID NO: 3303605 - RNA, 19 nt, Human
agacuccugcaggcagcca

SEQ ID NO: 3303606 - RNA, 18 nt, Human
agacuccugcaggcagcc

SEQ ID NO: 3303607 - RNA, 17 nt, Human
agacucuacagaggcca

SEQ ID NO: 3303608 - RNA, 21 nt, Human
agacucgcgacaaugcaaacc

SEQ ID NO: 3303609 - RNA, 19 nt, Human
agacucuacagaggccaug

SEQ ID NO: 3303610 - RNA, 15 nt, Human
agacucauucuucug

SEQ ID NO: 3303611 - RNA, 17 nt, Human
ucuugcaauggcagccu

SEQ ID NO: 3303612 - RNA, 13 nt, Human
ucuugcaauggca

SEQ ID NO: 3303613 - RNA, 16 nt, Human
ucuugcaauggcagcc

SEQ ID NO: 3303614 - RNA, 19 nt, Human
agacuaucuaaauguugaa

SEQ ID NO: 3303615 - RNA, 17 nt, Human
agacuaucuaaauguug

SEQ ID NO: 3303616 - RNA, 18 nt, Human
agacuaucuaaauguuga

SEQ ID NO: 3303617 - RNA, 15 nt, Human
agacuaucuaaaugu

SEQ ID NO: 3303618 - RNA, 18 nt, Human
agacucauucuucuguac

SEQ ID NO: 3303619 - RNA, 17 nt, Human
agacucauucuucugua

SEQ ID NO: 3303620 - RNA, 15 nt, Human
agacccuuguggucc

SEQ ID NO: 3303621 - RNA, 13 nt, Human
agacccuuguggu

SEQ ID NO: 3303622 - RNA, 23 nt, Human
agacccugcccugugggccccca

SEQ ID NO: 3303623 - RNA, 21 nt, Human
agacccugcccugugggcccc

SEQ ID NO: 3303624 - RNA, 19 nt, Human
agacccugcccugugggcc

SEQ ID NO: 3303625 - RNA, 16 nt, Human
agacccugcccugugg

SEQ ID NO: 3303626 - RNA, 23 nt, Human
agacccuuguggucccaccccac

SEQ ID NO: 3303627 - RNA, 22 nt, Human
agacccuuguggucccacccca

SEQ ID NO: 3303628 - RNA, 20 nt, Human
agacccuuguggucccaccc

SEQ ID NO: 3303629 - RNA, 19 nt, Human
agacccuuguggucccacc

SEQ ID NO: 3303630 - RNA, 12 nt, Human
agacccugcccu

SEQ ID NO: 3303631 - RNA, 14 nt, Human
agacccugcccugu

SEQ ID NO: 3303632 - RNA, 13 nt, Human
agacccugcccug

SEQ ID NO: 3303633 - RNA, 18 nt, Human
agaauuucccaaagcagu

SEQ ID NO: 3303634 - RNA, 17 nt, Human
agaauuucccaaagcag

SEQ ID NO: 3303635 - RNA, 23 nt, Human
agaauuucccaaagcagugcaug

SEQ ID NO: 3303636 - RNA, 21 nt, Human
ucugugaaaggaaagagggag

SEQ ID NO: 3303637 - RNA, 15 nt, Human
ucugugaaaggaaag

SEQ ID NO: 3303638 - RNA, 18 nt, Human
ucuguuggccagugugac

SEQ ID NO: 3303639 - RNA, 19 nt, Human
ucuguuggccagugugaca

SEQ ID NO: 3303640 - RNA, 20 nt, Human
ucuguuggccagugugacaa

SEQ ID NO: 3303641 - RNA, 11 nt, Human
ucuggggcugu

SEQ ID NO: 3303642 - RNA, 14 nt, Human
ucuggguucacugc

SEQ ID NO: 3303643 - RNA, 16 nt, Human
ucuggguucacugcaa

SEQ ID NO: 3303644 - RNA, 18 nt, Human
ucugguccauagagagca

SEQ ID NO: 3303645 - RNA, 20 nt, Human
ucugucauuugagcagggcu

SEQ ID NO: 3303646 - RNA, 23 nt, Human
ucugucauuugagcagggcucag

SEQ ID NO: 3303647 - RNA, 15 nt, Human
ucugucauuugagca

SEQ ID NO: 3303648 - RNA, 14 nt, Human
ucuuauugcccacg

SEQ ID NO: 3303649 - RNA, 18 nt, Human
ucuuauugcccacgcugg

SEQ ID NO: 3303650 - RNA, 22 nt, Human
ucuuauugcccacgcuggagug

SEQ ID NO: 3303651 - RNA, 14 nt, Human
ucuuaugggcuggg

SEQ ID NO: 3303652 - RNA, 13 nt, Human
ucuuaugggcugg

SEQ ID NO: 3303653 - RNA, 16 nt, Human
ucuuaugggcuggguu

SEQ ID NO: 3303654 - RNA, 15 nt, Human
ucuuaugggcugggu

SEQ ID NO: 3303655 - RNA, 22 nt, Human
ucuucccuacaguugaaaaaca

SEQ ID NO: 3303656 - RNA, 21 nt, Human
ucuuccaggcugggagagccu

SEQ ID NO: 3303657 - RNA, 22 nt, Human
ucuuccaggcugggagagccuu

SEQ ID NO: 3303658 - RNA, 16 nt, Human
agacagcugccuggga

SEQ ID NO: 3303659 - RNA, 23 nt, Human
agacaggcaagcaccuccugccu

SEQ ID NO: 3303660 - RNA, 22 nt, Human
agacaggcaagcaccuccugcc

SEQ ID NO: 3303661 - RNA, 15 nt, Human
agacaggaccaggga

SEQ ID NO: 3303662 - RNA, 21 nt, Human
agacaggguuuugccauguug

SEQ ID NO: 3303663 - RNA, 15 nt, Human
agacagucccugcca

SEQ ID NO: 3303664 - RNA, 17 nt, Human
agacagucccugccaau

SEQ ID NO: 3303665 - RNA, 16 nt, Human
agacagucccugccaa

SEQ ID NO: 3303666 - RNA, 14 nt, Human
agacagucccugcc

SEQ ID NO: 3303667 - RNA, 15 nt, Human
agagugagacucugu

SEQ ID NO: 3303668 - RNA, 16 nt, Human
agagugagacucuguc

SEQ ID NO: 3303669 - RNA, 20 nt, Human
agagucucacuguugcccag

SEQ ID NO: 3303670 - RNA, 14 nt, Human
ugaaugucagugug

SEQ ID NO: 3303671 - RNA, 15 nt, Human
ugaaugucaguguga

SEQ ID NO: 3303672 - RNA, 17 nt, Human
agauaaggguaucuggu

SEQ ID NO: 3303673 - RNA, 19 nt, Human
agauaaggguaucugguga

SEQ ID NO: 3303674 - RNA, 19 nt, Human
agagugagacucugucuca

SEQ ID NO: 3303675 - RNA, 22 nt, Human
agauauuuugcuuugugauuuu

SEQ ID NO: 3303676 - RNA, 19 nt, Human
agauacaggaaaagcugcu

SEQ ID NO: 3303677 - RNA, 14 nt, Human
agaucaaccccuuc

SEQ ID NO: 3303678 - RNA, 19 nt, Human
agaucaaccccuucgcucc

SEQ ID NO: 3303679 - RNA, 21 nt, Human
agaucaaccccuucgcuccug

SEQ ID NO: 3303680 - RNA, 20 nt, Human
agagggagggagggcuccag

SEQ ID NO: 3303681 - RNA, 21 nt, Human
agagggagggagggcuccaga

SEQ ID NO: 3303682 - RNA, 22 nt, Human
agagggagggagggcuccagac

SEQ ID NO: 3303683 - RNA, 11 nt, Human
ugaacuuugac

SEQ ID NO: 3303684 - RNA, 21 nt, Human
ucuuuggucuacacugugcug

SEQ ID NO: 3303685 - RNA, 14 nt, Human
ucuuuggucuacac

SEQ ID NO: 3303686 - RNA, 16 nt, Human
ugaacuuugaccucug

SEQ ID NO: 3303687 - RNA, 11 nt, Human
ugaagacaaug

SEQ ID NO: 3303688 - RNA, 17 nt, Human
ugaagacaaugacuuac

SEQ ID NO: 3303689 - RNA, 13 nt, Human
ugaagacaaugac

SEQ ID NO: 3303690 - RNA, 19 nt, Human
agagcugggugucaagagg

SEQ ID NO: 3303691 - RNA, 19 nt, Human
agaggaaagcaaaggagau

SEQ ID NO: 3303692 - RNA, 18 nt, Human
agaggaaagcaaaggaga

SEQ ID NO: 3303693 - RNA, 16 nt, Human
agaggaaagcaaagga

SEQ ID NO: 3303694 - RNA, 12 nt, Human
agaggaaagcaa

SEQ ID NO: 3303695 - RNA, 12 nt, Human
agaggaaaucac

SEQ ID NO: 3303696 - RNA, 11 nt, Human
agaggaaauca

SEQ ID NO: 3303697 - RNA, 18 nt, Human
agaggcaacugcauuggc

SEQ ID NO: 3303698 - RNA, 14 nt, Human
agauuucacucucc

SEQ ID NO: 3303699 - RNA, 13 nt, Human
agauuucacucuc

SEQ ID NO: 3303700 - RNA, 17 nt, Human
agauuugaacucuucaa

SEQ ID NO: 3303701 - RNA, 23 nt, Human
ugacuccagaauuucccaaagca

SEQ ID NO: 3303702 - RNA, 20 nt, Human
ugacuccagaauuucccaaa

SEQ ID NO: 3303703 - RNA, 19 nt, Human
ugacuccagaauuucccaa

SEQ ID NO: 3303704 - RNA, 17 nt, Human
ugacuccagaauuuccc

SEQ ID NO: 3303705 - RNA, 15 nt, Human
ugaccugaggcccuu

SEQ ID NO: 3303706 - RNA, 14 nt, Human
ugaccugaggcccu

SEQ ID NO: 3303707 - RNA, 16 nt, Human
agaugcuucucacugc

SEQ ID NO: 3303708 - RNA, 18 nt, Human
agaugcuucucacugcca

SEQ ID NO: 3303709 - RNA, 12 nt, Human
ugaccugaggcc

SEQ ID NO: 3303710 - RNA, 14 nt, Human
ugaccucugccuga

SEQ ID NO: 3303711 - RNA, 13 nt, Human
ugaccucugccug

SEQ ID NO: 3303712 - RNA, 19 nt, Human
ugagccuugaacuuugacc

SEQ ID NO: 3303713 - RNA, 18 nt, Human
ugagccuugaacuuugac

SEQ ID NO: 3303714 - RNA, 17 nt, Human
ugagccuugaacuuuga

SEQ ID NO: 3303715 - RNA, 15 nt, Human
ugagccuugaacuuu

SEQ ID NO: 3303716 - RNA, 14 nt, Human
ugagccugggaggu

SEQ ID NO: 3303717 - RNA, 16 nt, Human
ugagccuggcaagaau

SEQ ID NO: 3303718 - RNA, 11 nt, Human
ugagccuggca

SEQ ID NO: 3303719 - RNA, 22 nt, Human
ugagccugggaggucaaggcug

SEQ ID NO: 3303720 - RNA, 19 nt, Human
ugagccugggaggucaagg

SEQ ID NO: 3303721 - RNA, 14 nt, Human
ugagccuugaacuu

SEQ ID NO: 3303722 - RNA, 10 nt, Human
ugagccuggc

SEQ ID NO: 3303723 - RNA, 16 nt, Human
agcagagaccaucccu

SEQ ID NO: 3303724 - RNA, 15 nt, Human
agcagagaccauccc

SEQ ID NO: 3303725 - RNA, 22 nt, Human
agcagagaaugaaagggcccag

SEQ ID NO: 3303726 - RNA, 23 nt, Human
agcagagaaugaaagggcccaga

SEQ ID NO: 3303727 - RNA, 14 nt, Human
agcagagaauucuc

SEQ ID NO: 3303728 - RNA, 21 nt, Human
agcagagaauucucuuaucca

SEQ ID NO: 3303729 - RNA, 21 nt, Human
agcagagaaugaaagggccca

SEQ ID NO: 3303730 - RNA, 19 nt, Human
agcagaaaugccuuacccu

SEQ ID NO: 3303731 - RNA, 13 nt, Human
agcagaaaugccu

SEQ ID NO: 3303732 - RNA, 12 nt, Human
agcagaaaugcc

SEQ ID NO: 3303733 - RNA, 22 nt, Human
agcacuuugggaggccaaggug

SEQ ID NO: 3303734 - RNA, 23 nt, Human
agcacuuugggaggccaaggugg

SEQ ID NO: 3303735 - RNA, 22 nt, Human
agcaccuuagacagucccugcc

SEQ ID NO: 3303736 - RNA, 21 nt, Human
agcaccuuagacagucccugc

SEQ ID NO: 3303737 - RNA, 20 nt, Human
agcaccuuagacagucccug

SEQ ID NO: 3303738 - RNA, 19 nt, Human
agcaccuuagacagucccu

SEQ ID NO: 3303739 - RNA, 23 nt, Human
agcaccuuagacagucccugcca

SEQ ID NO: 3303740 - RNA, 13 nt, Human
agcacgauuucug

SEQ ID NO: 3303741 - RNA, 16 nt, Human
agcacgauuucuguuu

SEQ ID NO: 3303742 - RNA, 15 nt, Human
agcacgauuucuguu

SEQ ID NO: 3303743 - RNA, 14 nt, Human
agcacgauuucugu

SEQ ID NO: 3303744 - RNA, 22 nt, Human
agcaccaaaagcuuaccaaggg

SEQ ID NO: 3303745 - RNA, 14 nt, Human
agcacaugccucuc

SEQ ID NO: 3303746 - RNA, 13 nt, Human
agcacaugccucu

SEQ ID NO: 3303747 - RNA, 22 nt, Human
agcaagugagagcuggguguca

SEQ ID NO: 3303748 - RNA, 18 nt, Human
agcaagugagagcugggu

SEQ ID NO: 3303749 - RNA, 20 nt, Human
agcaagugagacccugucuc

SEQ ID NO: 3303750 - RNA, 16 nt, Human
agcaagugagacccug

SEQ ID NO: 3303751 - RNA, 13 nt, Human
agcaagugagagc

SEQ ID NO: 3303752 - RNA, 21 nt, Human
ugagccagauuucacucuccu

SEQ ID NO: 3303753 - RNA, 22 nt, Human
ugagccagauuucacucuccuu

SEQ ID NO: 3303754 - RNA, 17 nt, Human
ugagccagauuucacuc

SEQ ID NO: 3303755 - RNA, 24 nt, Human
ugagcaucaggccaggcccucugc

SEQ ID NO: 3303756 - RNA, 22 nt, Human
ugagcaucaggccaggcccucu

SEQ ID NO: 3303757 - RNA, 21 nt, Human
ugagcaucaggccaggcccuc

SEQ ID NO: 3303758 - RNA, 21 nt, Human
ugagccacugcaccgggccac

SEQ ID NO: 3303759 - RNA, 18 nt, Human
ugagccacugcaccgggc

SEQ ID NO: 3303760 - RNA, 23 nt, Human
ugagccacugcaccgggccacag

SEQ ID NO: 3303761 - RNA, 13 nt, Human
ugagccagauuuc

SEQ ID NO: 3303762 - RNA, 16 nt, Human
ugagccagauuucacu

SEQ ID NO: 3303763 - RNA, 14 nt, Human
ugagccagauuuca

SEQ ID NO: 3303764 - RNA, 20 nt, Human
ugagcacuaaggugugcucu

SEQ ID NO: 3303765 - RNA, 21 nt, Human
ugagcacuaaggugugcucug

SEQ ID NO: 3303766 - RNA, 22 nt, Human
ugagcacuaaggugugcucuga

SEQ ID NO: 3303767 - RNA, 23 nt, Human
ugagcacuaaggugugcucugau

SEQ ID NO: 3303768 - RNA, 15 nt, Human
ugagcaauccugcaa

SEQ ID NO: 3303769 - RNA, 21 nt, Human
ugaggaagccgcuggggccag

SEQ ID NO: 3303770 - RNA, 19 nt, Human
ugaggaagccgcuggggcc

SEQ ID NO: 3303771 - RNA, 18 nt, Human
ugaggaagccgcuggggc

SEQ ID NO: 3303772 - RNA, 17 nt, Human
ugaggaagccgcugggg

SEQ ID NO: 3303773 - RNA, 14 nt, Human
ugaggaagccgcug

SEQ ID NO: 3303774 - RNA, 22 nt, Human
ugaggaagcaaaagcaucuaug

SEQ ID NO: 3303775 - RNA, 15 nt, Human
ugaggaagcaaaagc

SEQ ID NO: 3303776 - RNA, 21 nt, Human
ugaggacacuaaccacgcugg

SEQ ID NO: 3303777 - RNA, 12 nt, Human
ugaggccagaga

SEQ ID NO: 3303778 - RNA, 23 nt, Human
ugaggcauuuguuugaacugaua

SEQ ID NO: 3303779 - RNA, 21 nt, Human
ugaggaauccagacccggcug

SEQ ID NO: 3303780 - RNA, 22 nt, Human
ugaggaauccagacccggcugc

SEQ ID NO: 3303781 - RNA, 13 nt, Human
ugaggcccagagg

SEQ ID NO: 3303782 - RNA, 12 nt, Human
ugaggcccagag

SEQ ID NO: 3303783 - RNA, 16 nt, Human
ugaggccagagacaca

SEQ ID NO: 3303784 - RNA, 14 nt, Human
ugaggccagagaca

SEQ ID NO: 3303785 - RNA, 20 nt, Human
ugaggccagagacacaagcc

SEQ ID NO: 3303786 - RNA, 20 nt, Human
ugaggcccagagggccugca

SEQ ID NO: 3303787 - RNA, 18 nt, Human
ugaggcccagagggccug

SEQ ID NO: 3303788 - RNA, 17 nt, Human
ugaggcccagagggccu

SEQ ID NO: 3303789 - RNA, 15 nt, Human
ugaggcccagagggc

SEQ ID NO: 3303790 - RNA, 22 nt, Human
ugaggcccagagggccugcaag

SEQ ID NO: 3303791 - RNA, 21 nt, Human
ugaggcccagagggccugcaa

SEQ ID NO: 3303792 - RNA, 23 nt, Human
ugaggcccagagggccugcaagg

SEQ ID NO: 3303793 - RNA, 13 nt, Human
ugaggucagagcc

SEQ ID NO: 3303794 - RNA, 14 nt, Human
ugaggucagagccu

SEQ ID NO: 3303795 - RNA, 16 nt, Human
ugaggucagagccugc

SEQ ID NO: 3303796 - RNA, 20 nt, Human
ugaggguugggcugguguca

SEQ ID NO: 3303797 - RNA, 20 nt, Human
agcagagaccaucccugaag

SEQ ID NO: 3303798 - RNA, 20 nt, Human
agcagagcaccuuagacagu

SEQ ID NO: 3303799 - RNA, 17 nt, Human
agcagagaccaucccug

SEQ ID NO: 3303800 - RNA, 19 nt, Human
agcagagaccaucccugaa

SEQ ID NO: 3303801 - RNA, 18 nt, Human
agcagagaccaucccuga

SEQ ID NO: 3303802 - RNA, 19 nt, Human
agcagauggagaccccuug

SEQ ID NO: 3303803 - RNA, 17 nt, Human
agcagaggaaggagagg

SEQ ID NO: 3303804 - RNA, 19 nt, Human
ugagggauacccaucccau

SEQ ID NO: 3303805 - RNA, 16 nt, Human
ugaggcccuucucucc

SEQ ID NO: 3303806 - RNA, 19 nt, Human
ugaggcccuucucuccagc

SEQ ID NO: 3303807 - RNA, 18 nt, Human
ugaggcccuucucuccag

SEQ ID NO: 3303808 - RNA, 24 nt, Human
ugaggcccuucucuccagccccug

SEQ ID NO: 3303809 - RNA, 23 nt, Human
ugaggcccuucucuccagccccu

SEQ ID NO: 3303810 - RNA, 22 nt, Human
ugaggcccuucucuccagcccc

SEQ ID NO: 3303811 - RNA, 20 nt, Human
ugaggcccuucucuccagcc

SEQ ID NO: 3303812 - RNA, 12 nt, Human
ugaggggccucu

SEQ ID NO: 3303813 - RNA, 13 nt, Human
ugaggggccucuu

SEQ ID NO: 3303814 - RNA, 22 nt, Human
auaagccaaaaaaugcuugcuu

SEQ ID NO: 3303815 - RNA, 21 nt, Human
auaagauucauauuuacuucu

SEQ ID NO: 3303816 - RNA, 18 nt, Human
auaauuuaccugaagucu

SEQ ID NO: 3303817 - RNA, 19 nt, Human
uuaggugugggggaagcac

SEQ ID NO: 3303818 - RNA, 21 nt, Human
uuaggugugacugaauuucuu

SEQ ID NO: 3303819 - RNA, 13 nt, Human
uuauaaacuuuac

SEQ ID NO: 3303820 - RNA, 14 nt, Human
uuaguagagacagg

SEQ ID NO: 3303821 - RNA, 13 nt, Human
uuaguagagacag

SEQ ID NO: 3303822 - RNA, 16 nt, Human
uuagaagucacacagu

SEQ ID NO: 3303823 - RNA, 14 nt, Human
auaagauucauauu

SEQ ID NO: 3303824 - RNA, 15 nt, Human
uuacugcagcuuugu

SEQ ID NO: 3303825 - RNA, 12 nt, Human
uuacuguacaug

SEQ ID NO: 3303826 - RNA, 23 nt, Human
uuacuguacaugaaaacacauuu

SEQ ID NO: 3303827 - RNA, 22 nt, Human
uuacuguacaugaaaacacauu

SEQ ID NO: 3303828 - RNA, 14 nt, Human
uuacuguacaugaa

SEQ ID NO: 3303829 - RNA, 13 nt, Human
uuacuguacauga

SEQ ID NO: 3303830 - RNA, 14 nt, Human
uuacaggugugaac

SEQ ID NO: 3303831 - RNA, 19 nt, Human
uuaccagcagagcaccuua

SEQ ID NO: 3303832 - RNA, 14 nt, Human
uuaccagcagagca

SEQ ID NO: 3303833 - RNA, 18 nt, Human
uuaacuuuuauaaacuuu

SEQ ID NO: 3303834 - RNA, 22 nt, Human
uuaacuuuuauaaacuuuaccu

SEQ ID NO: 3303835 - RNA, 23 nt, Human
uuaacuuuuauaaacuuuaccuu

SEQ ID NO: 3303836 - RNA, 15 nt, Human
uuaaucuaaauggaa

SEQ ID NO: 3303837 - RNA, 12 nt, Human
uuaacagaaaug

SEQ ID NO: 3303838 - RNA, 14 nt, Human
uuaacagaaaugua

SEQ ID NO: 3303839 - RNA, 13 nt, Human
uuaacagaaaugu

SEQ ID NO: 3303840 - RNA, 14 nt, Human
aguuucucuuuuca

SEQ ID NO: 3303841 - RNA, 21 nt, Human
aguuucuccaagcaggacaug

SEQ ID NO: 3303842 - RNA, 15 nt, Human
aguuucugccgcagc

SEQ ID NO: 3303843 - RNA, 19 nt, Human
aguuucugccgcagcccug

SEQ ID NO: 3303844 - RNA, 22 nt, Human
aguuuguuaguaugaggcauuu

SEQ ID NO: 3303845 - RNA, 19 nt, Human
uuaaaaaucucaaauuucu

SEQ ID NO: 3303846 - RNA, 20 nt, Human
uuaaaaaucucaaauuucua

SEQ ID NO: 3303847 - RNA, 17 nt, Human
uuaaaaaucucaaauuu

SEQ ID NO: 3303848 - RNA, 13 nt, Human
uuaugggcugggu

SEQ ID NO: 3303849 - RNA, 18 nt, Human
uuauggcuuuugugcauu

SEQ ID NO: 3303850 - RNA, 19 nt, Human
uuauggcuuuugugcauua

SEQ ID NO: 3303851 - RNA, 22 nt, Human
uuaugggcuggguucuacccag

SEQ ID NO: 3303852 - RNA, 11 nt, Human
uuaugacucca

SEQ ID NO: 3303853 - RNA, 21 nt, Human
uuaucacccagaagaaaauag

SEQ ID NO: 3303854 - RNA, 19 nt, Human
uuaucacccagaagaaaau

SEQ ID NO: 3303855 - RNA, 18 nt, Human
uuaucacccagaagaaaa

SEQ ID NO: 3303856 - RNA, 17 nt, Human
uuaucacccagaagaaa

SEQ ID NO: 3303857 - RNA, 13 nt, Human
auacguacacauu

SEQ ID NO: 3303858 - RNA, 16 nt, Human
auacguacacauuuua

SEQ ID NO: 3303859 - RNA, 15 nt, Human
auacguacacauuuu

SEQ ID NO: 3303860 - RNA, 14 nt, Human
auacguacacauuu

SEQ ID NO: 3303861 - RNA, 18 nt, Human
auaccacuuuuguucuug

SEQ ID NO: 3303862 - RNA, 17 nt, Human
auaccacuuuuguucuu

SEQ ID NO: 3303863 - RNA, 14 nt, Human
auaccuuuuuuaga

SEQ ID NO: 3303864 - RNA, 13 nt, Human
auacuaaccagca

SEQ ID NO: 3303865 - RNA, 20 nt, Human
auacuaaccagcagaaaugc

SEQ ID NO: 3303866 - RNA, 19 nt, Human
auacuaaccagcagaaaug

SEQ ID NO: 3303867 - RNA, 20 nt, Human
auacauaaacaagaccacgu

SEQ ID NO: 3303868 - RNA, 20 nt, Human
auacaguuacucagaauucu

SEQ ID NO: 3303869 - RNA, 23 nt, Human
auacagauagauauaugcucugc

SEQ ID NO: 3303870 - RNA, 22 nt, Human
auacaggaaaagcugcugacag

SEQ ID NO: 3303871 - RNA, 23 nt, Human
auacaggaaaagcugcugacagu

SEQ ID NO: 3303872 - RNA, 18 nt, Human
auacaguuacucagaauu

SEQ ID NO: 3303873 - RNA, 17 nt, Human
auacagaggcaacugca

SEQ ID NO: 3303874 - RNA, 16 nt, Human
auacagaggcaacugc

SEQ ID NO: 3303875 - RNA, 18 nt, Human
uuauaaacuuuaccuuuu

SEQ ID NO: 3303876 - RNA, 17 nt, Human
uuauaaacuuuaccuuu

SEQ ID NO: 3303877 - RNA, 11 nt, Human
auacucccauc

SEQ ID NO: 3303878 - RNA, 16 nt, Human
auacucugcuuagaau

SEQ ID NO: 3303879 - RNA, 14 nt, Human
auacucccaucugu

SEQ ID NO: 3303880 - RNA, 17 nt, Human
auacuccuccaagguua

SEQ ID NO: 3303881 - RNA, 12 nt, Human
uuauuaugcaug

SEQ ID NO: 3303882 - RNA, 13 nt, Human
uuauuaugcauga

SEQ ID NO: 3303883 - RNA, 23 nt, Human
auagacaauuuauuauggcacau

SEQ ID NO: 3303884 - RNA, 22 nt, Human
auagacaauuuauuauggcaca

SEQ ID NO: 3303885 - RNA, 16 nt, Human
auagacaauuuauuau

SEQ ID NO: 3303886 - RNA, 14 nt, Human
auagagagagacca

SEQ ID NO: 3303887 - RNA, 19 nt, Human
aguauucuuauuuaaugaa

SEQ ID NO: 3303888 - RNA, 14 nt, Human
agucaccaagccca

SEQ ID NO: 3303889 - RNA, 15 nt, Human
agucaccaagcccag

SEQ ID NO: 3303890 - RNA, 17 nt, Human
agucaccccggccaccu

SEQ ID NO: 3303891 - RNA, 19 nt, Human
ugucauuugagcagggcuc

SEQ ID NO: 3303892 - RNA, 16 nt, Human
ugucagguggggcagc

SEQ ID NO: 3303893 - RNA, 15 nt, Human
uguccaagaagccca

SEQ ID NO: 3303894 - RNA, 14 nt, Human
uguccaagaagccc

SEQ ID NO: 3303895 - RNA, 17 nt, Human
ugucagguggggcagcu

SEQ ID NO: 3303896 - RNA, 18 nt, Human
ugucagguggggcagcuu

SEQ ID NO: 3303897 - RNA, 20 nt, Human
ugucagguggggcagcuuga

SEQ ID NO: 3303898 - RNA, 20 nt, Human
ugucauuugagcagggcuca

SEQ ID NO: 3303899 - RNA, 21 nt, Human
ugucauuugagcagggcucag

SEQ ID NO: 3303900 - RNA, 22 nt, Human
ugucauuugagcagggcucagc

SEQ ID NO: 3303901 - RNA, 20 nt, Human
ugucccugcacuugcagacu

SEQ ID NO: 3303902 - RNA, 22 nt, Human
ugucccugcacuugcagacucu

SEQ ID NO: 3303903 - RNA, 23 nt, Human
ugucccugcacuugcagacucua

SEQ ID NO: 3303904 - RNA, 22 nt, Human
uguccaagaagcccaggaaagg

SEQ ID NO: 3303905 - RNA, 18 nt, Human
uguccaagaagcccagga

SEQ ID NO: 3303906 - RNA, 17 nt, Human
uguccaagaagcccagg

SEQ ID NO: 3303907 - RNA, 16 nt, Human
uguccaagaagcccag

SEQ ID NO: 3303908 - RNA, 21 nt, Human
agucucacuguugcccaggcu

SEQ ID NO: 3303909 - RNA, 23 nt, Human
agucucacuguugcccaggcugg

SEQ ID NO: 3303910 - RNA, 16 nt, Human
aguccucccaucucac

SEQ ID NO: 3303911 - RNA, 14 nt, Human
aguccucccaucuc

SEQ ID NO: 3303912 - RNA, 15 nt, Human
agucccaccuuggcu

SEQ ID NO: 3303913 - RNA, 16 nt, Human
agucccaccuuggcug

SEQ ID NO: 3303914 - RNA, 18 nt, Human
agucccaccuuggcugca

SEQ ID NO: 3303915 - RNA, 19 nt, Human
agucccaccuuggcugcag

SEQ ID NO: 3303916 - RNA, 14 nt, Human
ugucccugcacuug

SEQ ID NO: 3303917 - RNA, 23 nt, Human
ugucccuuacgugaguccuggca

SEQ ID NO: 3303918 - RNA, 19 nt, Human
ugucccuuacgugaguccu

SEQ ID NO: 3303919 - RNA, 14 nt, Human
agguugaagcacca

SEQ ID NO: 3303920 - RNA, 20 nt, Human
aggugugagucaccaagccc

SEQ ID NO: 3303921 - RNA, 16 nt, Human
aggugucccugcacuu

SEQ ID NO: 3303922 - RNA, 21 nt, Human
aggugugagucaccaagccca

SEQ ID NO: 3303923 - RNA, 22 nt, Human
aggugugagucaccaagcccag

SEQ ID NO: 3303924 - RNA, 12 nt, Human
aggugggaggau

SEQ ID NO: 3303925 - RNA, 20 nt, Human
agguuggcaaaaaggcagga

SEQ ID NO: 3303926 - RNA, 18 nt, Human
uguaauuaaguacuaugu

SEQ ID NO: 3303927 - RNA, 19 nt, Human
uguaauuaaguacuaugua

SEQ ID NO: 3303928 - RNA, 21 nt, Human
uguaauuaaguacuauguauc

SEQ ID NO: 3303929 - RNA, 17 nt, Human
uguaauuaaguacuaug

SEQ ID NO: 3303930 - RNA, 20 nt, Human
uguaauuuuuuuaucgucac

SEQ ID NO: 3303931 - RNA, 20 nt, Human
uguacauaaugcgugcauac

SEQ ID NO: 3303932 - RNA, 19 nt, Human
uguacauaaugcgugcaua

SEQ ID NO: 3303933 - RNA, 14 nt, Human
uguacaugaaaaca

SEQ ID NO: 3303934 - RNA, 16 nt, Human
uguacaugaaaacaca

SEQ ID NO: 3303935 - RNA, 20 nt, Human
uguacaugaaaacacauuuu

SEQ ID NO: 3303936 - RNA, 16 nt, Human
uguaggguuauaauaa

SEQ ID NO: 3303937 - RNA, 17 nt, Human
uguaggguuauaauaau

SEQ ID NO: 3303938 - RNA, 22 nt, Human
uguauauauuuccuauauuguu

SEQ ID NO: 3303939 - RNA, 18 nt, Human
uguauauauuuccuauau

SEQ ID NO: 3303940 - RNA, 20 nt, Human
aguacacuguuucaaacuuu

SEQ ID NO: 3303941 - RNA, 23 nt, Human
aguacacuguuucaaacuuuacu

SEQ ID NO: 3303942 - RNA, 21 nt, Human
aguacacuguuucaaacuuua

SEQ ID NO: 3303943 - RNA, 21 nt, Human
uguacauggaauaacauguaa

SEQ ID NO: 3303944 - RNA, 14 nt, Human
agugagcacuaagg

SEQ ID NO: 3303945 - RNA, 14 nt, Human
agugagagcugggu

SEQ ID NO: 3303946 - RNA, 18 nt, Human
ugugaugagaggaaauca

SEQ ID NO: 3303947 - RNA, 19 nt, Human
ugugaugagaggaaaucac

SEQ ID NO: 3303948 - RNA, 22 nt, Human
ugugaugaugaaaugaggucag

SEQ ID NO: 3303949 - RNA, 12 nt, Human
agugagcugguu

SEQ ID NO: 3303950 - RNA, 16 nt, Human
agugaacuugggccac

SEQ ID NO: 3303951 - RNA, 21 nt, Human
agugacugauggcuaauguac

SEQ ID NO: 3303952 - RNA, 17 nt, Human
agucucuugauucauaa

SEQ ID NO: 3303953 - RNA, 16 nt, Human
agucucuugauucaua

SEQ ID NO: 3303954 - RNA, 13 nt, Human
agucuuagaugua

SEQ ID NO: 3303955 - RNA, 14 nt, Human
agucuuagauguau

SEQ ID NO: 3303956 - RNA, 16 nt, Human
agucuuagauguauau

SEQ ID NO: 3303957 - RNA, 11 nt, Human
ugugaggaagc

SEQ ID NO: 3303958 - RNA, 16 nt, Human
ugugacugaucucucg

SEQ ID NO: 3303959 - RNA, 16 nt, Human
agugcaugcugucccu

SEQ ID NO: 3303960 - RNA, 14 nt, Human
agugcaugcugucc

SEQ ID NO: 3303961 - RNA, 17 nt, Human
agugcagugagccgaga

SEQ ID NO: 3303962 - RNA, 12 nt, Human
agugaggcucug

SEQ ID NO: 3303963 - RNA, 13 nt, Human
agugaggcucugc

SEQ ID NO: 3303964 - RNA, 16 nt, Human
agugaggaugaaaaaa

SEQ ID NO: 3303965 - RNA, 18 nt, Human
ugugcugagucugaaggc

SEQ ID NO: 3303966 - RNA, 19 nt, Human
ugugcugagucugaaggcu

SEQ ID NO: 3303967 - RNA, 19 nt, Human
ugugcucuggacaggcaug

SEQ ID NO: 3303968 - RNA, 20 nt, Human
ugugcugcccugcccaccug

SEQ ID NO: 3303969 - RNA, 19 nt, Human
ugugcugcccugcccaccu

SEQ ID NO: 3303970 - RNA, 18 nt, Human
ugugcugcccugcccacc

SEQ ID NO: 3303971 - RNA, 23 nt, Human
agugagcugguuuuuagcggaga

SEQ ID NO: 3303972 - RNA, 22 nt, Human
uguggauuuaacagaaauguac

SEQ ID NO: 3303973 - RNA, 20 nt, Human
uguggauuuaacagaaaugu

SEQ ID NO: 3303974 - RNA, 19 nt, Human
uguggauuuaacagaaaug

SEQ ID NO: 3303975 - RNA, 14 nt, Human
uguggaugauaaaa

SEQ ID NO: 3303976 - RNA, 23 nt, Human
uguugcccaggcuggcgugcagu

SEQ ID NO: 3303977 - RNA, 20 nt, Human
uguugcccaggcuggcgugc

SEQ ID NO: 3303978 - RNA, 16 nt, Human
aguguuguggauuuaa

SEQ ID NO: 3303979 - RNA, 13 nt, Human
aguuacucagaau

SEQ ID NO: 3303980 - RNA, 20 nt, Human
aguguuguggauuuaacaga

SEQ ID NO: 3303981 - RNA, 19 nt, Human
aguguuguggauuuaacag

SEQ ID NO: 3303982 - RNA, 22 nt, Human
agugugguguuuccuggcacug

SEQ ID NO: 3303983 - RNA, 13 nt, Human
uguuaugacucca

SEQ ID NO: 3303984 - RNA, 17 nt, Human
uguuaugacuccagaau

SEQ ID NO: 3303985 - RNA, 20 nt, Human
agugugacugaucucucgug

SEQ ID NO: 3303986 - RNA, 20 nt, Human
agugugccugaagucccaga

SEQ ID NO: 3303987 - RNA, 21 nt, Human
agugugccugaagucccagau

SEQ ID NO: 3303988 - RNA, 20 nt, Human
agugugguguuuccuggcac

SEQ ID NO: 3303989 - RNA, 22 nt, Human
ugugucucuugguccugcugca

SEQ ID NO: 3303990 - RNA, 12 nt, Human
ugugguuucauu

SEQ ID NO: 3303991 - RNA, 20 nt, Human
ugugucagguggggcagcuu

SEQ ID NO: 3303992 - RNA, 18 nt, Human
agugggggaucacagccu

SEQ ID NO: 3303993 - RNA, 22 nt, Human
agugggcccaaugcacuuuguu

SEQ ID NO: 3303994 - RNA, 22 nt, Human
uguguuaucacccagaagaaaa

SEQ ID NO: 3303995 - RNA, 21 nt, Human
ugggaggauugcuugagcuca

SEQ ID NO: 3303996 - RNA, 18 nt, Human
ugggaggauugcuugagc

SEQ ID NO: 3303997 - RNA, 22 nt, Human
ugggaggaucucuugagccugg

SEQ ID NO: 3303998 - RNA, 21 nt, Human
ugggagaaccaaaaagaggcu

SEQ ID NO: 3303999 - RNA, 13 nt, Human
ugggcagaaggaa

SEQ ID NO: 3304000 - RNA, 20 nt, Human
ugggcagaaggaagacuuca

SEQ ID NO: 3304001 - RNA, 16 nt, Human
ugggcagaaggaagac

SEQ ID NO: 3304002 - RNA, 21 nt, Human
ugggcaacccccagccugcua

SEQ ID NO: 3304003 - RNA, 15 nt, Human
agggacuuggaagcu

SEQ ID NO: 3304004 - RNA, 18 nt, Human
agggacuuggaagcuccg

SEQ ID NO: 3304005 - RNA, 19 nt, Human
agggacuuggaagcuccgc

SEQ ID NO: 3304006 - RNA, 20 nt, Human
agggacuuggaagcuccgcu

SEQ ID NO: 3304007 - RNA, 18 nt, Human
ugggacuacaggcaccca

SEQ ID NO: 3304008 - RNA, 16 nt, Human
ugggacuacaggcacc

SEQ ID NO: 3304009 - RNA, 16 nt, Human
ugggacuacaggugug

SEQ ID NO: 3304010 - RNA, 21 nt, Human
ugggcucccuucccaccucuc

SEQ ID NO: 3304011 - RNA, 14 nt, Human
ugggcucccuuccc

SEQ ID NO: 3304012 - RNA, 14 nt, Human
agggcccagagagg

SEQ ID NO: 3304013 - RNA, 15 nt, Human
agggcuccagacaca

SEQ ID NO: 3304014 - RNA, 20 nt, Human
agggcuccagacacaugucc

SEQ ID NO: 3304015 - RNA, 12 nt, Human
agggcccagaga

SEQ ID NO: 3304016 - RNA, 13 nt, Human
agggcccagagag

SEQ ID NO: 3304017 - RNA, 23 nt, Human
agggaguccgaaagggacuugga

SEQ ID NO: 3304018 - RNA, 20 nt, Human
agggagugacagaggcagcc

SEQ ID NO: 3304019 - RNA, 20 nt, Human
agggagugaguugauagcac

SEQ ID NO: 3304020 - RNA, 20 nt, Human
agggaguccgaaagggacuu

SEQ ID NO: 3304021 - RNA, 22 nt, Human
agggagggcuccagacacaugu

SEQ ID NO: 3304022 - RNA, 17 nt, Human
agggagggagggcucca

SEQ ID NO: 3304023 - RNA, 12 nt, Human
agggagggcucc

SEQ ID NO: 3304024 - RNA, 19 nt, Human
agggagggcuccagacaca

SEQ ID NO: 3304025 - RNA, 17 nt, Human
agggagggcuccagaca

SEQ ID NO: 3304026 - RNA, 14 nt, Human
uggcuaaauucaug

SEQ ID NO: 3304027 - RNA, 23 nt, Human
aggcuccaggagcagccacauuc

SEQ ID NO: 3304028 - RNA, 19 nt, Human
aggcuccaggagcagccac

SEQ ID NO: 3304029 - RNA, 18 nt, Human
aggcuccaggagcagcca

SEQ ID NO: 3304030 - RNA, 17 nt, Human
aggcuccaggagcagcc

SEQ ID NO: 3304031 - RNA, 17 nt, Human
uggcuaauguacugcau

SEQ ID NO: 3304032 - RNA, 19 nt, Human
uggcuaauguacugcauau

SEQ ID NO: 3304033 - RNA, 13 nt, Human
uggcucacgccug

SEQ ID NO: 3304034 - RNA, 23 nt, Human
uggcuguuggcugggggccucag

SEQ ID NO: 3304035 - RNA, 14 nt, Human
uggcuucacggaag

SEQ ID NO: 3304036 - RNA, 16 nt, Human
uggcuguuggcugggg

SEQ ID NO: 3304037 - RNA, 18 nt, Human
uggcuguuggcugggggc

SEQ ID NO: 3304038 - RNA, 23 nt, Human
uggcugcaaaggguaucaggugc

SEQ ID NO: 3304039 - RNA, 21 nt, Human
uggcuuuugugcauuaucuag

SEQ ID NO: 3304040 - RNA, 20 nt, Human
uggcuucacggaagagccuu

SEQ ID NO: 3304041 - RNA, 17 nt, Human
uggcuucacggaagagc

SEQ ID NO: 3304042 - RNA, 16 nt, Human
uggcuuuugugcauua

SEQ ID NO: 3304043 - RNA, 15 nt, Human
uggcuuuugugcauu

SEQ ID NO: 3304044 - RNA, 23 nt, Human
aggcuuagucacugagacagccc

SEQ ID NO: 3304045 - RNA, 22 nt, Human
aggcuuagucacugagacagcc

SEQ ID NO: 3304046 - RNA, 21 nt, Human
aggcuuagucacugagacagc

SEQ ID NO: 3304047 - RNA, 16 nt, Human
aggcugggagagccuu

SEQ ID NO: 3304048 - RNA, 19 nt, Human
aggcugggagagccuucca

SEQ ID NO: 3304049 - RNA, 22 nt, Human
aggcugggagagccuuccaggg

SEQ ID NO: 3304050 - RNA, 21 nt, Human
aggcugggagagccuuccagg

SEQ ID NO: 3304051 - RNA, 20 nt, Human
aggcugggagagccuuccag

SEQ ID NO: 3304052 - RNA, 13 nt, Human
aggcugggcuccc

SEQ ID NO: 3304053 - RNA, 18 nt, Human
aggcugggcucccuuccc

SEQ ID NO: 3304054 - RNA, 14 nt, Human
aggcugggcucccu

SEQ ID NO: 3304055 - RNA, 14 nt, Human
aggcugggcuucag

SEQ ID NO: 3304056 - RNA, 23 nt, Human
aggcugggcucccuucccaccuc

SEQ ID NO: 3304057 - RNA, 21 nt, Human
aggcugggcucccuucccacc

SEQ ID NO: 3304058 - RNA, 17 nt, Human
aggcugggggaagaagc

SEQ ID NO: 3304059 - RNA, 22 nt, Human
aggcugggcuucaguggcagcu

SEQ ID NO: 3304060 - RNA, 23 nt, Human
aggcugggcuucaguggcagcug

SEQ ID NO: 3304061 - RNA, 18 nt, Human
aggcugggcuucaguggc

SEQ ID NO: 3304062 - RNA, 19 nt, Human
aggcugggcuucaguggca

SEQ ID NO: 3304063 - RNA, 20 nt, Human
aggcugggcuucaguggcag

SEQ ID NO: 3304064 - RNA, 21 nt, Human
aggcugggcuucaguggcagc

SEQ ID NO: 3304065 - RNA, 14 nt, Human
aggcuggguucuga

SEQ ID NO: 3304066 - RNA, 22 nt, Human
aggcugggggaagaagcucucu

SEQ ID NO: 3304067 - RNA, 15 nt, Human
aggaggccagccuug

SEQ ID NO: 3304068 - RNA, 21 nt, Human
aggaguuugagaccaaccugg

SEQ ID NO: 3304069 - RNA, 10 nt, Human
ugcugcccug

SEQ ID NO: 3304070 - RNA, 18 nt, Human
uggaaguacuauaauuua

SEQ ID NO: 3304071 - RNA, 20 nt, Human
uggaaguacuauaauuuacc

SEQ ID NO: 3304072 - RNA, 13 nt, Human
uggaagcuccgcu

SEQ ID NO: 3304073 - RNA, 12 nt, Human
uggaacacucug

SEQ ID NO: 3304074 - RNA, 14 nt, Human
aggcaagcaccucc

SEQ ID NO: 3304075 - RNA, 19 nt, Human
aggcaacugcauuggcuuu

SEQ ID NO: 3304076 - RNA, 15 nt, Human
uggacaccggaaaca

SEQ ID NO: 3304077 - RNA, 22 nt, Human
aggauugcuacuguccuaccca

SEQ ID NO: 3304078 - RNA, 18 nt, Human
aggaugcuuguacauaau

SEQ ID NO: 3304079 - RNA, 18 nt, Human
aggauccugagccagauu

SEQ ID NO: 3304080 - RNA, 21 nt, Human
aggauccugagccagauuuca

SEQ ID NO: 3304081 - RNA, 16 nt, Human
aggaugcuuguacaua

SEQ ID NO: 3304082 - RNA, 15 nt, Human
aggaugcuuguacau

SEQ ID NO: 3304083 - RNA, 15 nt, Human
aggcaaugcuggcug

SEQ ID NO: 3304084 - RNA, 16 nt, Human
aggcaaugcuggcugu

SEQ ID NO: 3304085 - RNA, 24 nt, Human
uggacuuuguuaguuucuccaagc

SEQ ID NO: 3304086 - RNA, 22 nt, Human
uggacuuuguuaguuucuccaa

SEQ ID NO: 3304087 - RNA, 11 nt, Human
uggacuuuguu

SEQ ID NO: 3304088 - RNA, 21 nt, Human
aggcaggucuugaacuccugg

SEQ ID NO: 3304089 - RNA, 19 nt, Human
aggcagggucucacucugu

SEQ ID NO: 3304090 - RNA, 18 nt, Human
aggcagggucucacucug

SEQ ID NO: 3304091 - RNA, 20 nt, Human
aggcagggucucacucuguc

SEQ ID NO: 3304092 - RNA, 21 nt, Human
aggcagggucucacucugucg

SEQ ID NO: 3304093 - RNA, 22 nt, Human
aggcagggucucacucugucgc

SEQ ID NO: 3304094 - RNA, 14 nt, Human
aggcagguccaggg

SEQ ID NO: 3304095 - RNA, 22 nt, Human
aggcagccccauucugccugcc

SEQ ID NO: 3304096 - RNA, 19 nt, Human
aggcagccccauucugccu

SEQ ID NO: 3304097 - RNA, 20 nt, Human
aggcagccccauucugccug

SEQ ID NO: 3304098 - RNA, 21 nt, Human
aggcagccccauucugccugc

SEQ ID NO: 3304099 - RNA, 12 nt, Human
aggccuggccag

SEQ ID NO: 3304100 - RNA, 13 nt, Human
aggccuggccaga

SEQ ID NO: 3304101 - RNA, 13 nt, Human
aggccccugccac

SEQ ID NO: 3304102 - RNA, 15 nt, Human
aggccccugccaccc

SEQ ID NO: 3304103 - RNA, 20 nt, Human
aggcccagagggccugcaag

SEQ ID NO: 3304104 - RNA, 19 nt, Human
aggcccagagggccugcaa

SEQ ID NO: 3304105 - RNA, 17 nt, Human
aggccccugccacccug

SEQ ID NO: 3304106 - RNA, 18 nt, Human
aggccccugccacccugg

SEQ ID NO: 3304107 - RNA, 12 nt, Human
aggccccugcca

SEQ ID NO: 3304108 - RNA, 21 nt, Human
aggccccugccacccugggga

SEQ ID NO: 3304109 - RNA, 14 nt, Human
aggcccggcuccag

SEQ ID NO: 3304110 - RNA, 15 nt, Human
aggcccggcuccagg

SEQ ID NO: 3304111 - RNA, 16 nt, Human
aggcccggcuccaggc

SEQ ID NO: 3304112 - RNA, 16 nt, Human
aggcccagagggccug

SEQ ID NO: 3304113 - RNA, 15 nt, Human
aggcccagagggccu

SEQ ID NO: 3304114 - RNA, 17 nt, Human
aggccaugggccuccug

SEQ ID NO: 3304115 - RNA, 18 nt, Human
aggccaugggccuccugu

SEQ ID NO: 3304116 - RNA, 23 nt, Human
aggccagagacacaagccuucgg

SEQ ID NO: 3304117 - RNA, 13 nt, Human
uggcagcucagag

SEQ ID NO: 3304118 - RNA, 15 nt, Human
uggcagcucagagag

SEQ ID NO: 3304119 - RNA, 14 nt, Human
uggcagcucagaga

SEQ ID NO: 3304120 - RNA, 18 nt, Human
aggccagagacacaagcc

SEQ ID NO: 3304121 - RNA, 13 nt, Human
aggccagagacac

SEQ ID NO: 3304122 - RNA, 16 nt, Human
uggcagcucagagagg

SEQ ID NO: 3304123 - RNA, 12 nt, Human
aggccagagaca

SEQ ID NO: 3304124 - RNA, 17 nt, Human
uggcaccagcagccugg

SEQ ID NO: 3304125 - RNA, 16 nt, Human
uggcaccagcagccug

SEQ ID NO: 3304126 - RNA, 13 nt, Human
aggcuccaggagc

SEQ ID NO: 3304127 - RNA, 16 nt, Human
aggcuccaggagcagc

SEQ ID NO: 3304128 - RNA, 14 nt, Human
aggcuccaggagca

SEQ ID NO: 3304129 - RNA, 17 nt, Human
aggccuucucugaagga

SEQ ID NO: 3304130 - RNA, 18 nt, Human
aggccuucucugaaggac

SEQ ID NO: 3304131 - RNA, 18 nt, Human
uggccugagcugggauga

SEQ ID NO: 3304132 - RNA, 20 nt, Human
uggccucugcacuccccugc

SEQ ID NO: 3304133 - RNA, 18 nt, Human
uggccucugcacuccccu

SEQ ID NO: 3304134 - RNA, 19 nt, Human
uggccucugcacuccccug

SEQ ID NO: 3304135 - RNA, 22 nt, Human
uggcaugggaaugaaugucagu

SEQ ID NO: 3304136 - RNA, 19 nt, Human
uggcccacgcacuucggga

SEQ ID NO: 3304137 - RNA, 13 nt, Human
uggcccacgcacu

SEQ ID NO: 3304138 - RNA, 14 nt, Human
uggcccacugcauc

SEQ ID NO: 3304139 - RNA, 13 nt, Human
uggcccacugcau

SEQ ID NO: 3304140 - RNA, 23 nt, Human
aggaauccagacccggcugcgug

SEQ ID NO: 3304141 - RNA, 20 nt, Human
aggaauccagacccggcugc

SEQ ID NO: 3304142 - RNA, 16 nt, Human
aggaagcucagggccu

SEQ ID NO: 3304143 - RNA, 17 nt, Human
aggaagcucagggccug

SEQ ID NO: 3304144 - RNA, 22 nt, Human
aggaagcucagggccuggcuca

SEQ ID NO: 3304145 - RNA, 18 nt, Human
aggaagcucagggccugg

SEQ ID NO: 3304146 - RNA, 14 nt, Human
aggaagagaaaaaa

SEQ ID NO: 3304147 - RNA, 15 nt, Human
aggaagacuuuggaa

SEQ ID NO: 3304148 - RNA, 21 nt, Human
ugcugccauccagguucagcu

SEQ ID NO: 3304149 - RNA, 22 nt, Human
ugcugccauccagguucagcuu

SEQ ID NO: 3304150 - RNA, 12 nt, Human
ugcugccaucca

SEQ ID NO: 3304151 - RNA, 13 nt, Human
ugcugccauccag

SEQ ID NO: 3304152 - RNA, 14 nt, Human
ugcugccauccagg

SEQ ID NO: 3304153 - RNA, 15 nt, Human
ugcugccauccaggu

SEQ ID NO: 3304154 - RNA, 11 nt, Human
ugcugccaucc

SEQ ID NO: 3304155 - RNA, 22 nt, Human
aggaaaggcuccaggagcagcc

SEQ ID NO: 3304156 - RNA, 20 nt, Human
aggaaaggcuccaggagcag

SEQ ID NO: 3304157 - RNA, 18 nt, Human
aggaaaggcuccaggagc

SEQ ID NO: 3304158 - RNA, 16 nt, Human
aggaaaggcuccagga

SEQ ID NO: 3304159 - RNA, 19 nt, Human
aggaaagcaaaggagauug

SEQ ID NO: 3304160 - RNA, 16 nt, Human
ugcugacuguuuucuc

SEQ ID NO: 3304161 - RNA, 24 nt, Human
ugcugacuguuuucucuugagagg

SEQ ID NO: 3304162 - RNA, 21 nt, Human
ugcugacuguuuucucuugag

SEQ ID NO: 3304163 - RNA, 19 nt, Human
ugcucugaucauccacugu

SEQ ID NO: 3304164 - RNA, 22 nt, Human
ugcucugaucauccacugugcc

SEQ ID NO: 3304165 - RNA, 17 nt, Human
ugcucuggacaggcaug

SEQ ID NO: 3304166 - RNA, 15 nt, Human
ugcucugcauguuac

SEQ ID NO: 3304167 - RNA, 18 nt, Human
ugcucugcauguuacaua

SEQ ID NO: 3304168 - RNA, 17 nt, Human
ugcugacuguuuucucu

SEQ ID NO: 3304169 - RNA, 13 nt, Human
aggaaagaggcuc

SEQ ID NO: 3304170 - RNA, 12 nt, Human
aggaaagaggcu

SEQ ID NO: 3304171 - RNA, 17 nt, Human
aggaaagcaaaggagau

SEQ ID NO: 3304172 - RNA, 16 nt, Human
aggaaagaggcucugg

SEQ ID NO: 3304173 - RNA, 19 nt, Human
agcuuugaaaauucagugg

SEQ ID NO: 3304174 - RNA, 18 nt, Human
agcuuugaaaauucagug

SEQ ID NO: 3304175 - RNA, 16 nt, Human
agcuuugaaaauucag

SEQ ID NO: 3304176 - RNA, 12 nt, Human
agcuuugaaaau

SEQ ID NO: 3304177 - RNA, 16 nt, Human
aggaaaagcugcugac

SEQ ID NO: 3304178 - RNA, 15 nt, Human
aggaaacccagcucu

SEQ ID NO: 3304179 - RNA, 17 nt, Human
aggaaacccagcucugg

SEQ ID NO: 3304180 - RNA, 16 nt, Human
aggaaacccagcucug

SEQ ID NO: 3304181 - RNA, 20 nt, Human
aggaaacccagcucuggucc

SEQ ID NO: 3304182 - RNA, 18 nt, Human
aggaaacccagcucuggu

SEQ ID NO: 3304183 - RNA, 21 nt, Human
aggaaacccagcucuggucca

SEQ ID NO: 3304184 - RNA, 18 nt, Human
agcuuguaaauagcucag

SEQ ID NO: 3304185 - RNA, 19 nt, Human
agcuuguaaauagcucagg

SEQ ID NO: 3304186 - RNA, 20 nt, Human
agcuuguaaauagcucaggu

SEQ ID NO: 3304187 - RNA, 15 nt, Human
agcuuaucucagggg

SEQ ID NO: 3304188 - RNA, 14 nt, Human
agcuuaucucaggg

SEQ ID NO: 3304189 - RNA, 12 nt, Human
agcuuaucucag

SEQ ID NO: 3304190 - RNA, 20 nt, Human
ugcggacagccacggccagg

SEQ ID NO: 3304191 - RNA, 15 nt, Human
ugccuguucagcucc

SEQ ID NO: 3304192 - RNA, 16 nt, Human
ugccuguucagcucca

SEQ ID NO: 3304193 - RNA, 19 nt, Human
ugcgaaaggaugaaaguga

SEQ ID NO: 3304194 - RNA, 18 nt, Human
ugcggacagccacggcca

SEQ ID NO: 3304195 - RNA, 17 nt, Human
ugcggacagccacggcc

SEQ ID NO: 3304196 - RNA, 13 nt, Human
ugcgaaaggauga

SEQ ID NO: 3304197 - RNA, 19 nt, Human
agcugccugggaucccuca

SEQ ID NO: 3304198 - RNA, 13 nt, Human
agcugccugggau

SEQ ID NO: 3304199 - RNA, 21 nt, Human
agcugccugggaucccucauc

SEQ ID NO: 3304200 - RNA, 22 nt, Human
ugccucugacacacagcucugu

SEQ ID NO: 3304201 - RNA, 23 nt, Human
agcugggaugauuggagggggga

SEQ ID NO: 3304202 - RNA, 17 nt, Human
agcugggacuacaggug

SEQ ID NO: 3304203 - RNA, 19 nt, Human
agcugggacuacaggugug

SEQ ID NO: 3304204 - RNA, 14 nt, Human
agcugggcagguug

SEQ ID NO: 3304205 - RNA, 17 nt, Human
agcugcacccucaggca

SEQ ID NO: 3304206 - RNA, 13 nt, Human
agcugcacccuca

SEQ ID NO: 3304207 - RNA, 22 nt, Human
agcugcacccucaggcaggugg

SEQ ID NO: 3304208 - RNA, 20 nt, Human
agcugcacccucaggcaggu

SEQ ID NO: 3304209 - RNA, 19 nt, Human
agcugcacccucaggcagg

SEQ ID NO: 3304210 - RNA, 18 nt, Human
agcugcacccucaggcag

SEQ ID NO: 3304211 - RNA, 18 nt, Human
agcucuucuccaggcugu

SEQ ID NO: 3304212 - RNA, 17 nt, Human
agcucuucuccaggcug

SEQ ID NO: 3304213 - RNA, 12 nt, Human
agcucuguccug

SEQ ID NO: 3304214 - RNA, 12 nt, Human
agcucugcuccu

SEQ ID NO: 3304215 - RNA, 22 nt, Human
agcucugcuccucuccccagca

SEQ ID NO: 3304216 - RNA, 20 nt, Human
agcucugguccauagagagc

SEQ ID NO: 3304217 - RNA, 22 nt, Human
ugcccuccaagaccuucuccuu

SEQ ID NO: 3304218 - RNA, 20 nt, Human
ugcccuccaagaccuucucc

SEQ ID NO: 3304219 - RNA, 19 nt, Human
ugcccuccaagaccuucuc

SEQ ID NO: 3304220 - RNA, 13 nt, Human
agcugccaccugc

SEQ ID NO: 3304221 - RNA, 18 nt, Human
agcugcauacaguuugca

SEQ ID NO: 3304222 - RNA, 14 nt, Human
ugccucucucaggc

SEQ ID NO: 3304223 - RNA, 13 nt, Human
ugccucucucagg

SEQ ID NO: 3304224 - RNA, 14 nt, Human
ugccucccaucacc

SEQ ID NO: 3304225 - RNA, 13 nt, Human
ugccucccaucac

SEQ ID NO: 3304226 - RNA, 20 nt, Human
ugccucugacacacagcucu

SEQ ID NO: 3304227 - RNA, 21 nt, Human
ugccucugacacacagcucug

SEQ ID NO: 3304228 - RNA, 15 nt, Human
ugccucucucaggcc

SEQ ID NO: 3304229 - RNA, 14 nt, Human
ugcagugagccgag

SEQ ID NO: 3304230 - RNA, 17 nt, Human
ugcauaaguuaacuucc

SEQ ID NO: 3304231 - RNA, 15 nt, Human
agccucagcauccug

SEQ ID NO: 3304232 - RNA, 17 nt, Human
agccucaaccuccuggg

SEQ ID NO: 3304233 - RNA, 18 nt, Human
agccucaaccuccugggc

SEQ ID NO: 3304234 - RNA, 13 nt, Human
agccucagcaucc

SEQ ID NO: 3304235 - RNA, 14 nt, Human
agccucagcauccu

SEQ ID NO: 3304236 - RNA, 18 nt, Human
ugcagccucaaccuccug

SEQ ID NO: 3304237 - RNA, 19 nt, Human
ugcagccucaaccuccugg

SEQ ID NO: 3304238 - RNA, 23 nt, Human
agccugcaguuauuaacacuaac

SEQ ID NO: 3304239 - RNA, 19 nt, Human
agccugccucuucucuacu

SEQ ID NO: 3304240 - RNA, 16 nt, Human
agccugccucuucucu

SEQ ID NO: 3304241 - RNA, 13 nt, Human
ugcaugcuguccc

SEQ ID NO: 3304242 - RNA, 15 nt, Human
ugcaugcugucccuu

SEQ ID NO: 3304243 - RNA, 14 nt, Human
ugcaugcugucccu

SEQ ID NO: 3304244 - RNA, 21 nt, Human
ugcaugaggcuaguguggugu

SEQ ID NO: 3304245 - RNA, 22 nt, Human
ugcaugaaguaauaugcacaca

SEQ ID NO: 3304246 - RNA, 20 nt, Human
ugcaugaaguaauaugcaca

SEQ ID NO: 3304247 - RNA, 21 nt, Human
ugcauaccacuuuuguucuug

SEQ ID NO: 3304248 - RNA, 22 nt, Human
ugcauaccacuuuuguucuugg

SEQ ID NO: 3304249 - RNA, 15 nt, Human
agccucaaccuccug

SEQ ID NO: 3304250 - RNA, 15 nt, Human
agccuaggugacaga

SEQ ID NO: 3304251 - RNA, 17 nt, Human
agccuaggugacagagu

SEQ ID NO: 3304252 - RNA, 22 nt, Human
ugcagacucuacagaggccaug

SEQ ID NO: 3304253 - RNA, 19 nt, Human
ugcagacucuacagaggcc

SEQ ID NO: 3304254 - RNA, 20 nt, Human
ugcagacucuacagaggcca

SEQ ID NO: 3304255 - RNA, 18 nt, Human
ugcagacucuacagaggc

SEQ ID NO: 3304256 - RNA, 20 nt, Human
ugcacuuuguucuggcucuu

SEQ ID NO: 3304257 - RNA, 15 nt, Human
ugcacacaccagagc

SEQ ID NO: 3304258 - RNA, 16 nt, Human
ugcacaagcuccaagc

SEQ ID NO: 3304259 - RNA, 15 nt, Human
ugcacaagcuccaag

SEQ ID NO: 3304260 - RNA, 23 nt, Human
ugcacaagcuccaagcucccagg

SEQ ID NO: 3304261 - RNA, 22 nt, Human
ugcacaagcuccaagcucccag

SEQ ID NO: 3304262 - RNA, 20 nt, Human
ugcacaagcuccaagcuccc

SEQ ID NO: 3304263 - RNA, 18 nt, Human
ugcacaagcuccaagcuc

SEQ ID NO: 3304264 - RNA, 14 nt, Human
ugcaccacugcacu

SEQ ID NO: 3304265 - RNA, 19 nt, Human
ugcacguacacacacauac

SEQ ID NO: 3304266 - RNA, 13 nt, Human
ugcacuccccugc

SEQ ID NO: 3304267 - RNA, 12 nt, Human
ugcacuccccug

SEQ ID NO: 3304268 - RNA, 23 nt, Human
agcgugguggacaugcacagcua

SEQ ID NO: 3304269 - RNA, 16 nt, Human
agcgugagccacugca

SEQ ID NO: 3304270 - RNA, 15 nt, Human
agcgugcauaaguua

SEQ ID NO: 3304271 - RNA, 20 nt, Human
agcgugguggacaugcacag

SEQ ID NO: 3304272 - RNA, 13 nt, Human
agcgugagccacu

SEQ ID NO: 3304273 - RNA, 15 nt, Human
agcgugagccacugc

SEQ ID NO: 3304274 - RNA, 16 nt, Human
agcggggacagcuccu

SEQ ID NO: 3304275 - RNA, 17 nt, Human
agcggggacagcuccuu

SEQ ID NO: 3304276 - RNA, 15 nt, Human
agcggggacagcucc

SEQ ID NO: 3304277 - RNA, 20 nt, Human
ugccauauucuguuggccag

SEQ ID NO: 3304278 - RNA, 21 nt, Human
ugccauauucuguuggccagu

SEQ ID NO: 3304279 - RNA, 23 nt, Human
ugccagucaccccggccaccugc

SEQ ID NO: 3304280 - RNA, 22 nt, Human
ugccagucaccccggccaccug

SEQ ID NO: 3304281 - RNA, 16 nt, Human
ugccauauucuguugg

SEQ ID NO: 3304282 - RNA, 17 nt, Human
ugccauauucuguuggc

SEQ ID NO: 3304283 - RNA, 15 nt, Human
ugccauauucuguug

SEQ ID NO: 3304284 - RNA, 20 nt, Human
ugccagucaccccggccacc

SEQ ID NO: 3304285 - RNA, 18 nt, Human
ugccagucaccccggcca

SEQ ID NO: 3304286 - RNA, 16 nt, Human
ugccagucaccccggc

SEQ ID NO: 3304287 - RNA, 15 nt, Human
ugccagucaccccgg

SEQ ID NO: 3304288 - RNA, 14 nt, Human
agcgcccaguuggg

SEQ ID NO: 3304289 - RNA, 23 nt, Human
ugcauuugaaaauuuugauguuu

SEQ ID NO: 3304290 - RNA, 19 nt, Human
ugcauuugaaaauuuugau

SEQ ID NO: 3304291 - RNA, 16 nt, Human
ugccauguuggccagg

SEQ ID NO: 3304292 - RNA, 21 nt, Human
ugccauguuggccaggcuggu

SEQ ID NO: 3304293 - RNA, 20 nt, Human
ugccauguuggccaggcugg

SEQ ID NO: 3304294 - RNA, 17 nt, Human
ugccauguuggccaggc

SEQ ID NO: 3304295 - RNA, 17 nt, Human
agcucagggccuggcuc

SEQ ID NO: 3304296 - RNA, 18 nt, Human
ugccauguuggccaggcu

SEQ ID NO: 3304297 - RNA, 19 nt, Human
ugccauguuggccaggcug

SEQ ID NO: 3304298 - RNA, 16 nt, Human
agcucagggccuggcu

SEQ ID NO: 3304299 - RNA, 15 nt, Human
agcucagggccuggc

SEQ ID NO: 3304300 - RNA, 14 nt, Human
agcucagggccugg

SEQ ID NO: 3304301 - RNA, 12 nt, Human
ugcccaggcccc

SEQ ID NO: 3304302 - RNA, 20 nt, Human
ugcccaggccccugccaccc

SEQ ID NO: 3304303 - RNA, 22 nt, Human
ugcccaggccccugccacccug

SEQ ID NO: 3304304 - RNA, 16 nt, Human
ugcccaggcaggucuu

SEQ ID NO: 3304305 - RNA, 17 nt, Human
ugcccaggcaggucuug

SEQ ID NO: 3304306 - RNA, 20 nt, Human
ugcccaggcaggucuugaac

SEQ ID NO: 3304307 - RNA, 11 nt, Human
ugcccaggccc

SEQ ID NO: 3304308 - RNA, 14 nt, Human
ugcccacaggauca

SEQ ID NO: 3304309 - RNA, 15 nt, Human
ugcccaggcaggucu

SEQ ID NO: 3304310 - RNA, 17 nt, Human
auugaccugaggcccuu

SEQ ID NO: 3304311 - RNA, 12 nt, Human
auugaaaucuuu

SEQ ID NO: 3304312 - RNA, 20 nt, Human
auugaaaucuuuuugcuuug

SEQ ID NO: 3304313 - RNA, 18 nt, Human
auugaaaucuuuuugcuu

SEQ ID NO: 3304314 - RNA, 17 nt, Human
auugaaaucuuuuugcu

SEQ ID NO: 3304315 - RNA, 14 nt, Human
auucuuaaauaugu

SEQ ID NO: 3304316 - RNA, 17 nt, Human
auucucauuugucacac

SEQ ID NO: 3304317 - RNA, 11 nt, Human
auucugccugc

SEQ ID NO: 3304318 - RNA, 13 nt, Human
auucugccugccc

SEQ ID NO: 3304319 - RNA, 14 nt, Human
auucugccugccca

SEQ ID NO: 3304320 - RNA, 15 nt, Human
auucugccugcccag

SEQ ID NO: 3304321 - RNA, 16 nt, Human
auucugccugcccagg

SEQ ID NO: 3304322 - RNA, 17 nt, Human
auucugccugcccaggc

SEQ ID NO: 3304323 - RNA, 18 nt, Human
auucugccugcccaggcc

SEQ ID NO: 3304324 - RNA, 19 nt, Human
auucugccugcccaggccc

SEQ ID NO: 3304325 - RNA, 18 nt, Human
auucugcucacauaucug

SEQ ID NO: 3304326 - RNA, 20 nt, Human
auucugccugcccaggcccc

SEQ ID NO: 3304327 - RNA, 21 nt, Human
auucugccugcccaggccccu

SEQ ID NO: 3304328 - RNA, 19 nt, Human
auucugcucacauaucugu

SEQ ID NO: 3304329 - RNA, 20 nt, Human
auucugcucacauaucuguc

SEQ ID NO: 3304330 - RNA, 21 nt, Human
auucugcucacauaucuguca

SEQ ID NO: 3304331 - RNA, 22 nt, Human
auucugcucacauaucugucau

SEQ ID NO: 3304332 - RNA, 14 nt, Human
auucuguuggccag

SEQ ID NO: 3304333 - RNA, 19 nt, Human
auucuguuggccaguguga

SEQ ID NO: 3304334 - RNA, 13 nt, Human
auucaggaagcuc

SEQ ID NO: 3304335 - RNA, 11 nt, Human
auucagacagc

SEQ ID NO: 3304336 - RNA, 13 nt, Human
auucagacagcug

SEQ ID NO: 3304337 - RNA, 12 nt, Human
auucagacagcu

SEQ ID NO: 3304338 - RNA, 12 nt, Human
auucaggaagcu

SEQ ID NO: 3304339 - RNA, 18 nt, Human
auucagacagcugccugg

SEQ ID NO: 3304340 - RNA, 17 nt, Human
auucagacagcugccug

SEQ ID NO: 3304341 - RNA, 16 nt, Human
auucagacagcugccu

SEQ ID NO: 3304342 - RNA, 15 nt, Human
auucagacagcugcc

SEQ ID NO: 3304343 - RNA, 14 nt, Human
auucagacagcugc

SEQ ID NO: 3304344 - RNA, 18 nt, Human
auuaucuagauacuguau

SEQ ID NO: 3304345 - RNA, 14 nt, Human
auuaucuagauacu

SEQ ID NO: 3304346 - RNA, 19 nt, Human
auuuuuguagagccagggu

SEQ ID NO: 3304347 - RNA, 12 nt, Human
auuuuuguaauu

SEQ ID NO: 3304348 - RNA, 14 nt, Human
auuuuuuaaaugca

SEQ ID NO: 3304349 - RNA, 13 nt, Human
auuuuuuaaaugc

SEQ ID NO: 3304350 - RNA, 21 nt, Human
auuuuucuuagggaaggauac

SEQ ID NO: 3304351 - RNA, 22 nt, Human
auuuuucuuagggaaggauaca

SEQ ID NO: 3304352 - RNA, 19 nt, Human
auuuugugcccccauguaa

SEQ ID NO: 3304353 - RNA, 23 nt, Human
auuuugucauauaagauucauau

SEQ ID NO: 3304354 - RNA, 12 nt, Human
auuuugcuuugu

SEQ ID NO: 3304355 - RNA, 20 nt, Human
auuuugcuuugugauuuuug

SEQ ID NO: 3304356 - RNA, 18 nt, Human
auuuugcuuugugauuuu

SEQ ID NO: 3304357 - RNA, 14 nt, Human
auuuuggaaaauaa

SEQ ID NO: 3304358 - RNA, 19 nt, Human
auuuuggaaaauaaauuau

SEQ ID NO: 3304359 - RNA, 20 nt, Human
auuuuggaaaauaaauuauu

SEQ ID NO: 3304360 - RNA, 19 nt, Human
auuuucccuauuagagaag

SEQ ID NO: 3304361 - RNA, 16 nt, Human
auuuuccugccaggca

SEQ ID NO: 3304362 - RNA, 18 nt, Human
auuuugauccaagcuggu

SEQ ID NO: 3304363 - RNA, 19 nt, Human
auuuugauccaagcugguc

SEQ ID NO: 3304364 - RNA, 15 nt, Human
auuuugauguuuuaa

SEQ ID NO: 3304365 - RNA, 17 nt, Human
auuuugauguuuuaagg

SEQ ID NO: 3304366 - RNA, 20 nt, Human
auuuugcuaaaugugaauga

SEQ ID NO: 3304367 - RNA, 21 nt, Human
auuuugcugucccuuuuccuu

SEQ ID NO: 3304368 - RNA, 22 nt, Human
auuuuaaaaauacagauagaua

SEQ ID NO: 3304369 - RNA, 23 nt, Human
auuucuuccacaagagcccaggc

SEQ ID NO: 3304370 - RNA, 20 nt, Human
auuucuuccacaagagccca

SEQ ID NO: 3304371 - RNA, 16 nt, Human
auuucuuccacaagag

SEQ ID NO: 3304372 - RNA, 15 nt, Human
auuugaaaauuuuga

SEQ ID NO: 3304373 - RNA, 16 nt, Human
auuugaaaauuuugau

SEQ ID NO: 3304374 - RNA, 12 nt, Human
auuuauuuaaau

SEQ ID NO: 3304375 - RNA, 14 nt, Human
auuuauuuaaauuu

SEQ ID NO: 3304376 - RNA, 16 nt, Human
auuucccaaagcagug

SEQ ID NO: 3304377 - RNA, 19 nt, Human
auuucccaaagcagugcau

SEQ ID NO: 3304378 - RNA, 21 nt, Human
auugauuuccguuaaaauacc

SEQ ID NO: 3304379 - RNA, 16 nt, Human
auugucaaagugguga

SEQ ID NO: 3304380 - RNA, 23 nt, Human
auugucaaaguggugagaggcau

SEQ ID NO: 3304381 - RNA, 14 nt, Human
auugugggaagggg

SEQ ID NO: 3304382 - RNA, 13 nt, Human
auugugggaaggg

SEQ ID NO: 3304383 - RNA, 21 nt, Human
auuguuuggggaugagaaagg

SEQ ID NO: 3304384 - RNA, 13 nt, Human
auuuaaaagauac

SEQ ID NO: 3304385 - RNA, 16 nt, Human
auuuaaaagauacagu

SEQ ID NO: 3304386 - RNA, 14 nt, Human
auuuaaaagauaca

SEQ ID NO: 3304387 - RNA, 17 nt, Human
auuuaaaagauacaguu

SEQ ID NO: 3304388 - RNA, 18 nt, Human
aucuaauauguaacaagc

SEQ ID NO: 3304389 - RNA, 20 nt, Human
uugaguugauucagcucugc

SEQ ID NO: 3304390 - RNA, 20 nt, Human
uugagugaagcugggagaac

SEQ ID NO: 3304391 - RNA, 12 nt, Human
uugagacagagu

SEQ ID NO: 3304392 - RNA, 15 nt, Human
uugagaucagccugg

SEQ ID NO: 3304393 - RNA, 16 nt, Human
uugagaucagccuggg

SEQ ID NO: 3304394 - RNA, 17 nt, Human
auccucuguacagagcc

SEQ ID NO: 3304395 - RNA, 16 nt, Human
auccucuguacagagc

SEQ ID NO: 3304396 - RNA, 13 nt, Human
aucuaaauggaac

SEQ ID NO: 3304397 - RNA, 18 nt, Human
aucuaaauggaaccacuc

SEQ ID NO: 3304398 - RNA, 17 nt, Human
aucuaaauggaaccacu

SEQ ID NO: 3304399 - RNA, 21 nt, Human
uugauuaaauucuugcaaagu

SEQ ID NO: 3304400 - RNA, 14 nt, Human
uugauuaaauucuu

SEQ ID NO: 3304401 - RNA, 12 nt, Human
aucugaaaaugu

SEQ ID NO: 3304402 - RNA, 23 nt, Human
aucugaaaauguauguguaagua

SEQ ID NO: 3304403 - RNA, 13 nt, Human
uugauuaaauucu

SEQ ID NO: 3304404 - RNA, 23 nt, Human
uugauguuuuaaggaugcuugua

SEQ ID NO: 3304405 - RNA, 14 nt, Human
uugcaauggcagcc

SEQ ID NO: 3304406 - RNA, 16 nt, Human
uugcaauggcagccuu

SEQ ID NO: 3304407 - RNA, 17 nt, Human
uugcaauggcagccuug

SEQ ID NO: 3304408 - RNA, 19 nt, Human
uugcaauggcagccuuggc

SEQ ID NO: 3304409 - RNA, 16 nt, Human
uugcaccacugcacuc

SEQ ID NO: 3304410 - RNA, 15 nt, Human
uugcaccacugcacu

SEQ ID NO: 3304411 - RNA, 14 nt, Human
uugcaccacugcac

SEQ ID NO: 3304412 - RNA, 15 nt, Human
aucucuugagccugg

SEQ ID NO: 3304413 - RNA, 14 nt, Human
aucugaaaauguau

SEQ ID NO: 3304414 - RNA, 16 nt, Human
aucugaaaauguaugu

SEQ ID NO: 3304415 - RNA, 19 nt, Human
aucugaaaauguaugugua

SEQ ID NO: 3304416 - RNA, 20 nt, Human
aucugaaaauguauguguaa

SEQ ID NO: 3304417 - RNA, 22 nt, Human
aucugaaaauguauguguaagu

SEQ ID NO: 3304418 - RNA, 15 nt, Human
aucucccccagcccc

SEQ ID NO: 3304419 - RNA, 14 nt, Human
aucucccccagccc

SEQ ID NO: 3304420 - RNA, 17 nt, Human
aucucccccagccccau

SEQ ID NO: 3304421 - RNA, 16 nt, Human
aucucccccagcccca

SEQ ID NO: 3304422 - RNA, 13 nt, Human
aucuccaaaauaa

SEQ ID NO: 3304423 - RNA, 21 nt, Human
aucuccaaaauaaaacuuuuu

SEQ ID NO: 3304424 - RNA, 20 nt, Human
aucuccaaaauaaaacuuuu

SEQ ID NO: 3304425 - RNA, 17 nt, Human
aucuccaaaauaaaacu

SEQ ID NO: 3304426 - RNA, 14 nt, Human
aucuccaaaauaaa

SEQ ID NO: 3304427 - RNA, 16 nt, Human
aucucagggccugguc

SEQ ID NO: 3304428 - RNA, 14 nt, Human
aucucagggccugg

SEQ ID NO: 3304429 - RNA, 18 nt, Human
uuggggaccagagcugcc

SEQ ID NO: 3304430 - RNA, 14 nt, Human
augaaaugagguca

SEQ ID NO: 3304431 - RNA, 19 nt, Human
augaaagggcccagagagg

SEQ ID NO: 3304432 - RNA, 14 nt, Human
uugcuugaaagaaa

SEQ ID NO: 3304433 - RNA, 18 nt, Human
uuggccccugcccggcug

SEQ ID NO: 3304434 - RNA, 16 nt, Human
uuggagggugucccaa

SEQ ID NO: 3304435 - RNA, 23 nt, Human
uuggcuauuagagaucaaccccu

SEQ ID NO: 3304436 - RNA, 15 nt, Human
augaaagggcccaga

SEQ ID NO: 3304437 - RNA, 18 nt, Human
augaaagggcccagagag

SEQ ID NO: 3304438 - RNA, 17 nt, Human
aucuuugcagacaggca

SEQ ID NO: 3304439 - RNA, 22 nt, Human
aucuuuucauuuaggugaggaa

SEQ ID NO: 3304440 - RNA, 20 nt, Human
aucuuggucagauuugaacu

SEQ ID NO: 3304441 - RNA, 18 nt, Human
aucugugaaaggaaagag

SEQ ID NO: 3304442 - RNA, 22 nt, Human
aucugucauuugagcagggcuc

SEQ ID NO: 3304443 - RNA, 17 nt, Human
aucugugaaaggaaaga

SEQ ID NO: 3304444 - RNA, 10 nt, Human
aucuggugac

SEQ ID NO: 3304445 - RNA, 17 nt, Human
aucuggugacuuuccuc

SEQ ID NO: 3304446 - RNA, 16 nt, Human
aucuggugacuuuccu

SEQ ID NO: 3304447 - RNA, 21 nt, Human
auccaguaucuugaagacuuu

SEQ ID NO: 3304448 - RNA, 18 nt, Human
aucccauaugccugggca

SEQ ID NO: 3304449 - RNA, 12 nt, Human
aucccagcccca

SEQ ID NO: 3304450 - RNA, 20 nt, Human
aucccaaacccuucagugcc

SEQ ID NO: 3304451 - RNA, 19 nt, Human
aucccaaacccuucagugc

SEQ ID NO: 3304452 - RNA, 18 nt, Human
auccaagcuggucccacu

SEQ ID NO: 3304453 - RNA, 13 nt, Human
auccacccaccuc

SEQ ID NO: 3304454 - RNA, 15 nt, Human
auccacccaccucag

SEQ ID NO: 3304455 - RNA, 16 nt, Human
auccaguaucuugaag

SEQ ID NO: 3304456 - RNA, 15 nt, Human
auccaguaucuugaa

SEQ ID NO: 3304457 - RNA, 15 nt, Human
uucugccauauucug

SEQ ID NO: 3304458 - RNA, 22 nt, Human
uucugaacuuggcgcugccccu

SEQ ID NO: 3304459 - RNA, 19 nt, Human
uucugaacuuggcgcugcc

SEQ ID NO: 3304460 - RNA, 17 nt, Human
uucuggcucuuccaggc

SEQ ID NO: 3304461 - RNA, 16 nt, Human
uucuggcucuuccagg

SEQ ID NO: 3304462 - RNA, 21 nt, Human
uucugccugcccaggccccug

SEQ ID NO: 3304463 - RNA, 15 nt, Human
uucuggcucuuccag

SEQ ID NO: 3304464 - RNA, 17 nt, Human
uucugccugcccaggcc

SEQ ID NO: 3304465 - RNA, 18 nt, Human
uucugccugcccaggccc

SEQ ID NO: 3304466 - RNA, 17 nt, Human
uucucuaguuugauuaa

SEQ ID NO: 3304467 - RNA, 15 nt, Human
uucucuaguuugauu

SEQ ID NO: 3304468 - RNA, 19 nt, Human
aucaggugcugccauccag

SEQ ID NO: 3304469 - RNA, 21 nt, Human
uucuccuuguguuacuaaguu

SEQ ID NO: 3304470 - RNA, 14 nt, Human
auccuccucagauc

SEQ ID NO: 3304471 - RNA, 16 nt, Human
auccuccucagaucuu

SEQ ID NO: 3304472 - RNA, 16 nt, Human
auccuaggcauuugcu

SEQ ID NO: 3304473 - RNA, 12 nt, Human
auccuaagcuau

SEQ ID NO: 3304474 - RNA, 13 nt, Human
uucuucugcuuca

SEQ ID NO: 3304475 - RNA, 15 nt, Human
uucuucugcuucagc

SEQ ID NO: 3304476 - RNA, 14 nt, Human
uucuucucccucag

SEQ ID NO: 3304477 - RNA, 11 nt, Human
uucuucucccu

SEQ ID NO: 3304478 - RNA, 13 nt, Human
uucuucucccuca

SEQ ID NO: 3304479 - RNA, 17 nt, Human
aucccauaugccugggc

SEQ ID NO: 3304480 - RNA, 24 nt, Human
aucccauaugccugggcagaagga

SEQ ID NO: 3304481 - RNA, 14 nt, Human
aucccucauccuca

SEQ ID NO: 3304482 - RNA, 23 nt, Human
aucccucauccucauacccaccc

SEQ ID NO: 3304483 - RNA, 21 nt, Human
aucccucauccucauacccac

SEQ ID NO: 3304484 - RNA, 13 nt, Human
aucccucauccuc

SEQ ID NO: 3304485 - RNA, 20 nt, Human
uucuucugcuucagccuccc

SEQ ID NO: 3304486 - RNA, 21 nt, Human
aucaagaugugacauguuuua

SEQ ID NO: 3304487 - RNA, 18 nt, Human
aucacggcucacugcagc

SEQ ID NO: 3304488 - RNA, 13 nt, Human
aucacgccacugc

SEQ ID NO: 3304489 - RNA, 15 nt, Human
aucacggcucacugc

SEQ ID NO: 3304490 - RNA, 14 nt, Human
aucaaugaguaaca

SEQ ID NO: 3304491 - RNA, 16 nt, Human
uuccguuaaaauacca

SEQ ID NO: 3304492 - RNA, 14 nt, Human
uuccguuaaaauac

SEQ ID NO: 3304493 - RNA, 20 nt, Human
uucccucaccuuucccaucu

SEQ ID NO: 3304494 - RNA, 15 nt, Human
uucccuauuagagaa

SEQ ID NO: 3304495 - RNA, 17 nt, Human
uuccuaauccucuagga

SEQ ID NO: 3304496 - RNA, 14 nt, Human
uuccugaaccgaug

SEQ ID NO: 3304497 - RNA, 17 nt, Human
uuccucuuuccaucuac

SEQ ID NO: 3304498 - RNA, 22 nt, Human
uuccucuuuccaucuacccucc

SEQ ID NO: 3304499 - RNA, 11 nt, Human
uuccucuuucc

SEQ ID NO: 3304500 - RNA, 13 nt, Human
uuccucuuuccau

SEQ ID NO: 3304501 - RNA, 13 nt, Human
uucgcuccugugu

SEQ ID NO: 3304502 - RNA, 15 nt, Human
uucgcuccugugucu

SEQ ID NO: 3304503 - RNA, 19 nt, Human
uucgcuccugugucuugca

SEQ ID NO: 3304504 - RNA, 19 nt, Human
uucuaaaggcuaccuuugu

SEQ ID NO: 3304505 - RNA, 21 nt, Human
uucuaaaggcuaccuuuguau

SEQ ID NO: 3304506 - RNA, 20 nt, Human
uucuaaaggcuaccuuugua

SEQ ID NO: 3304507 - RNA, 19 nt, Human
uucuaaaucuccaaaauaa

SEQ ID NO: 3304508 - RNA, 21 nt, Human
uucuaaaucuccaaaauaaaa

SEQ ID NO: 3304509 - RNA, 16 nt, Human
uucuagcauggcugcc

SEQ ID NO: 3304510 - RNA, 14 nt, Human
aucaggccaggccc

SEQ ID NO: 3304511 - RNA, 12 nt, Human
aucagaauucuc

SEQ ID NO: 3304512 - RNA, 18 nt, Human
aucaggccaggcccucug

SEQ ID NO: 3304513 - RNA, 16 nt, Human
aucaggccaggcccuc

SEQ ID NO: 3304514 - RNA, 15 nt, Human
aucaggccaggcccu

SEQ ID NO: 3304515 - RNA, 13 nt, Human
aucagcacgauuu

SEQ ID NO: 3304516 - RNA, 11 nt, Human
aucagaauucu

SEQ ID NO: 3304517 - RNA, 16 nt, Human
uuucaaacuuuacuau

SEQ ID NO: 3304518 - RNA, 22 nt, Human
uuucaaacuuuacuauggcccu

SEQ ID NO: 3304519 - RNA, 15 nt, Human
uuucaaacuuuacua

SEQ ID NO: 3304520 - RNA, 13 nt, Human
augcuucucacug

SEQ ID NO: 3304521 - RNA, 22 nt, Human
augcugugcccuaaaguguauu

SEQ ID NO: 3304522 - RNA, 15 nt, Human
augggagagaagaga

SEQ ID NO: 3304523 - RNA, 19 nt, Human
augggagagaagagaaugc

SEQ ID NO: 3304524 - RNA, 18 nt, Human
uuuccaugaguccccugu

SEQ ID NO: 3304525 - RNA, 17 nt, Human
uuuccaugaguccccug

SEQ ID NO: 3304526 - RNA, 12 nt, Human
auggacuuuguu

SEQ ID NO: 3304527 - RNA, 11 nt, Human
auggacuuugu

SEQ ID NO: 3304528 - RNA, 19 nt, Human
auggacuaacuugucuuug

SEQ ID NO: 3304529 - RNA, 23 nt, Human
augcagugguaugaucacggcuc

SEQ ID NO: 3304530 - RNA, 13 nt, Human
augcagugcuucc

SEQ ID NO: 3304531 - RNA, 11 nt, Human
augcccagccc

SEQ ID NO: 3304532 - RNA, 14 nt, Human
augcccagccccuu

SEQ ID NO: 3304533 - RNA, 13 nt, Human
augcccagccccu

SEQ ID NO: 3304534 - RNA, 12 nt, Human
augcccagcccc

SEQ ID NO: 3304535 - RNA, 19 nt, Human
uuuaauuuuuuugagacag

SEQ ID NO: 3304536 - RNA, 18 nt, Human
augcagccucacaguccu

SEQ ID NO: 3304537 - RNA, 17 nt, Human
augcagccucacagucc

SEQ ID NO: 3304538 - RNA, 20 nt, Human
augaucuaggaagacuuugg

SEQ ID NO: 3304539 - RNA, 17 nt, Human
augaucuaggaagacuu

SEQ ID NO: 3304540 - RNA, 15 nt, Human
augaucuaggaagac

SEQ ID NO: 3304541 - RNA, 21 nt, Human
uuguuccacaaguuaaauaaa

SEQ ID NO: 3304542 - RNA, 20 nt, Human
uuguguuacuaaguuuuuau

SEQ ID NO: 3304543 - RNA, 15 nt, Human
uuguguuacuaaguu

SEQ ID NO: 3304544 - RNA, 13 nt, Human
uuguguuacuaag

SEQ ID NO: 3304545 - RNA, 20 nt, Human
uuguucuugguuuguaaauu

SEQ ID NO: 3304546 - RNA, 23 nt, Human
uuuaaaaauacagauagauauau

SEQ ID NO: 3304547 - RNA, 13 nt, Human
uuuaaagaaugcu

SEQ ID NO: 3304548 - RNA, 22 nt, Human
augcaccagcccuuagcaggga

SEQ ID NO: 3304549 - RNA, 14 nt, Human
augcaccagcccuu

SEQ ID NO: 3304550 - RNA, 13 nt, Human
augcaccuggaau

SEQ ID NO: 3304551 - RNA, 16 nt, Human
augcacuuuguucugg

SEQ ID NO: 3304552 - RNA, 17 nt, Human
augcacuuuguucuggc

SEQ ID NO: 3304553 - RNA, 20 nt, Human
augcacuuuguucuggcucu

SEQ ID NO: 3304554 - RNA, 19 nt, Human
augcacuuuguucuggcuc

SEQ ID NO: 3304555 - RNA, 20 nt, Human
augggcuggguucuacccag

SEQ ID NO: 3304556 - RNA, 17 nt, Human
augggccuccugugugu

SEQ ID NO: 3304557 - RNA, 18 nt, Human
augggccuccugugugug

SEQ ID NO: 3304558 - RNA, 15 nt, Human
augggggugcauuug

SEQ ID NO: 3304559 - RNA, 14 nt, Human
augggggugcauuu

SEQ ID NO: 3304560 - RNA, 24 nt, Human
auggggcugcaccggcuggccugg

SEQ ID NO: 3304561 - RNA, 12 nt, Human
auggggcugcac

SEQ ID NO: 3304562 - RNA, 15 nt, Human
augggauccuggagu

SEQ ID NO: 3304563 - RNA, 19 nt, Human
uuucugcagccacuauugu

SEQ ID NO: 3304564 - RNA, 19 nt, Human
uuucuggcuaugcauuuga

SEQ ID NO: 3304565 - RNA, 18 nt, Human
uuucuggcuaugcauuug

SEQ ID NO: 3304566 - RNA, 16 nt, Human
uuucuggcuaugcauu

SEQ ID NO: 3304567 - RNA, 15 nt, Human
uuucuggcuaugcau

SEQ ID NO: 3304568 - RNA, 14 nt, Human
augguuuucuugug

SEQ ID NO: 3304569 - RNA, 16 nt, Human
augguuuucaaaauaa

SEQ ID NO: 3304570 - RNA, 14 nt, Human
augguuuucaaaau

SEQ ID NO: 3304571 - RNA, 15 nt, Human
augguuuucaaaaua

SEQ ID NO: 3304572 - RNA, 20 nt, Human
auggugagggauacccaucc

SEQ ID NO: 3304573 - RNA, 15 nt, Human
augggugcuuggagg

SEQ ID NO: 3304574 - RNA, 15 nt, Human
auggugcaaugaccu

SEQ ID NO: 3304575 - RNA, 13 nt, Human
auggugcaaugac

SEQ ID NO: 3304576 - RNA, 12 nt, Human
auggugcaauga

SEQ ID NO: 3304577 - RNA, 17 nt, Human
auggugcaaugaccuuu

SEQ ID NO: 3304578 - RNA, 16 nt, Human
auggugcaaugaccuu

SEQ ID NO: 3304579 - RNA, 19 nt, Human
auggugcaaugaccuuuca

SEQ ID NO: 3304580 - RNA, 12 nt, Human
augguggcuggg

SEQ ID NO: 3304581 - RNA, 13 nt, Human
augguggcugggu

SEQ ID NO: 3304582 - RNA, 15 nt, Human
augguggcuggguug

SEQ ID NO: 3304583 - RNA, 17 nt, Human
augguggcuggguugga

SEQ ID NO: 3304584 - RNA, 12 nt, Human
uuugaccucugc

SEQ ID NO: 3304585 - RNA, 13 nt, Human
uuugccucugccu

SEQ ID NO: 3304586 - RNA, 15 nt, Human
uuugccguuauuaaa

SEQ ID NO: 3304587 - RNA, 22 nt, Human
uuugauucagacagcugccugg

SEQ ID NO: 3304588 - RNA, 22 nt, Human
uuugauguucuuucacccuuuu

SEQ ID NO: 3304589 - RNA, 13 nt, Human
uuugauuaaauuc

SEQ ID NO: 3304590 - RNA, 21 nt, Human
uuugauucagacagcugccug

SEQ ID NO: 3304591 - RNA, 18 nt, Human
uuugauucagacagcugc

SEQ ID NO: 3304592 - RNA, 21 nt, Human
uuugauuaaauucuugcaaag

SEQ ID NO: 3304593 - RNA, 18 nt, Human
uuugauuaaauucuugca

SEQ ID NO: 3304594 - RNA, 20 nt, Human
uuugacgccaucccagcccc

SEQ ID NO: 3304595 - RNA, 19 nt, Human
uuugacgccaucccagccc

SEQ ID NO: 3304596 - RNA, 16 nt, Human
uuugacgccaucccag

SEQ ID NO: 3304597 - RNA, 14 nt, Human
uuugacgccauccc

SEQ ID NO: 3304598 - RNA, 13 nt, Human
uuugacgccaucc

SEQ ID NO: 3304599 - RNA, 13 nt, Human
augucagugugac

SEQ ID NO: 3304600 - RNA, 12 nt, Human
augucaguguga

SEQ ID NO: 3304601 - RNA, 16 nt, Human
auguauguguaaguau

SEQ ID NO: 3304602 - RNA, 15 nt, Human
auguauguguaagua

SEQ ID NO: 3304603 - RNA, 15 nt, Human
augugaugagaggaa

SEQ ID NO: 3304604 - RNA, 16 nt, Human
augugaugagaggaaa

SEQ ID NO: 3304605 - RNA, 19 nt, Human
augugaugagaggaaauca

SEQ ID NO: 3304606 - RNA, 17 nt, Human
augugaugagaggaaau

SEQ ID NO: 3304607 - RNA, 23 nt, Human
augugcacaugcacgugugugca

SEQ ID NO: 3304608 - RNA, 15 nt, Human
aaaaaauauuuuccu

SEQ ID NO: 3304609 - RNA, 21 nt, Human
auagccaaggccaaaggaagc

SEQ ID NO: 3304610 - RNA, 15 nt, Human
auagccaaggccaaa

SEQ ID NO: 3304611 - RNA, 17 nt, Human
auaguaugguggcuggg

SEQ ID NO: 3304612 - RNA, 18 nt, Human
auaguaugguggcugggu

SEQ ID NO: 3304613 - RNA, 16 nt, Human
auaguaugguggcugg

SEQ ID NO: 3304614 - RNA, 19 nt, Human
auauuuacuucuuauacau

SEQ ID NO: 3304615 - RNA, 21 nt, Human
auaugcuuauacacuuacacu

SEQ ID NO: 3304616 - RNA, 22 nt, Human
auauuaccacagacauacuaac

SEQ ID NO: 3304617 - RNA, 19 nt, Human
auauuaccacagacauacu

SEQ ID NO: 3304618 - RNA, 15 nt, Human
auaauguaagcucua

SEQ ID NO: 3304619 - RNA, 18 nt, Human
auacaccacuacauucug

SEQ ID NO: 3304620 - RNA, 21 nt, Human
auacaccacuacauucuguua

SEQ ID NO: 3304621 - RNA, 20 nt, Human
auacaccacuacauucuguu

SEQ ID NO: 3304622 - RNA, 19 nt, Human
auacaccacuacauucugu

SEQ ID NO: 3304623 - RNA, 14 nt, Human
auaauguaagcucu

SEQ ID NO: 3304624 - RNA, 20 nt, Human
auaaugcgugcauaccacuu

SEQ ID NO: 3304625 - RNA, 21 nt, Human
auaaugcgugcauaccacuuu

SEQ ID NO: 3304626 - RNA, 17 nt, Human
auaccugucccccugac

SEQ ID NO: 3304627 - RNA, 18 nt, Human
auaccugucccccugaca

SEQ ID NO: 3304628 - RNA, 11 nt, Human
auacccacccc

SEQ ID NO: 3304629 - RNA, 12 nt, Human
auacccaccccc

SEQ ID NO: 3304630 - RNA, 11 nt, Human
auaaaacuuuu

SEQ ID NO: 3304631 - RNA, 15 nt, Human
auaaaacuuuuuaaa

SEQ ID NO: 3304632 - RNA, 24 nt, Human
auaaacuuuaccuuuuuuauacau

SEQ ID NO: 3304633 - RNA, 16 nt, Human
auaaacuuuaccuuuu

SEQ ID NO: 3304634 - RNA, 21 nt, Human
auaaacuuuaccuuuuuuaua

SEQ ID NO: 3304635 - RNA, 17 nt, Human
auaaaacuuuuuaaaau

SEQ ID NO: 3304636 - RNA, 13 nt, Human
auaaagcagcguu

SEQ ID NO: 3304637 - RNA, 20 nt, Human
auaaagcagcguuucuauga

SEQ ID NO: 3304638 - RNA, 19 nt, Human
auaaagcagcguuucuaug

SEQ ID NO: 3304639 - RNA, 18 nt, Human
auaaagcagcguuucuau

SEQ ID NO: 3304640 - RNA, 14 nt, Human
auaaagcagcguuu

SEQ ID NO: 3304641 - RNA, 20 nt, Human
aguucagguaacaggcagau

SEQ ID NO: 3304642 - RNA, 18 nt, Human
aguucagguaacaggcag

SEQ ID NO: 3304643 - RNA, 19 nt, Human
aguucagguaacaggcaga

SEQ ID NO: 3304644 - RNA, 22 nt, Human
aguucaucuugaauuguaagga

SEQ ID NO: 3304645 - RNA, 12 nt, Human
aguuaaauaaau

SEQ ID NO: 3304646 - RNA, 18 nt, Human
aguuacacuaaaagguga

SEQ ID NO: 3304647 - RNA, 16 nt, Human
aguuacagacaaagcg

SEQ ID NO: 3304648 - RNA, 14 nt, Human
aguuacagacaaag

SEQ ID NO: 3304649 - RNA, 14 nt, Human
aguugaagacagag

SEQ ID NO: 3304650 - RNA, 20 nt, Human
aguuguuugauucagacagc

SEQ ID NO: 3304651 - RNA, 23 nt, Human
aguggcuuaaaacaacacucaca

SEQ ID NO: 3304652 - RNA, 18 nt, Human
aguguauuuuuuuacuaa

SEQ ID NO: 3304653 - RNA, 17 nt, Human
aguguauuuuuuuacua

SEQ ID NO: 3304654 - RNA, 15 nt, Human
agugggagcugccug

SEQ ID NO: 3304655 - RNA, 14 nt, Human
agugggagcugccu

SEQ ID NO: 3304656 - RNA, 16 nt, Human
aguaugaggcauuugu

SEQ ID NO: 3304657 - RNA, 15 nt, Human
aguaugaggcauuug

SEQ ID NO: 3304658 - RNA, 15 nt, Human
aguaucucagggccu

SEQ ID NO: 3304659 - RNA, 15 nt, Human
aguaucuugaagacu

SEQ ID NO: 3304660 - RNA, 12 nt, Human
aguaucuugaag

SEQ ID NO: 3304661 - RNA, 11 nt, Human
aguaucuugaa

SEQ ID NO: 3304662 - RNA, 15 nt, Human
agucugaaggcuggg

SEQ ID NO: 3304663 - RNA, 13 nt, Human
agucugaaggcug

SEQ ID NO: 3304664 - RNA, 16 nt, Human
agucugaaggcugggu

SEQ ID NO: 3304665 - RNA, 12 nt, Human
agucugaaggcu

SEQ ID NO: 3304666 - RNA, 22 nt, Human
aguccuggcaugggaaugaaug

SEQ ID NO: 3304667 - RNA, 21 nt, Human
aguccuggcaugggaaugaau

SEQ ID NO: 3304668 - RNA, 20 nt, Human
aguccuggcaugggaaugaa

SEQ ID NO: 3304669 - RNA, 16 nt, Human
agugaagacaaugacu

SEQ ID NO: 3304670 - RNA, 14 nt, Human
agugaagacaauga

SEQ ID NO: 3304671 - RNA, 16 nt, Human
agucugauucccaagc

SEQ ID NO: 3304672 - RNA, 18 nt, Human
agucugauucccaagcuc

SEQ ID NO: 3304673 - RNA, 17 nt, Human
agucuggaaugcagugg

SEQ ID NO: 3304674 - RNA, 20 nt, Human
agugaacuugggccacugug

SEQ ID NO: 3304675 - RNA, 11 nt, Human
auguucuggga

SEQ ID NO: 3304676 - RNA, 12 nt, Human
auguucugggac

SEQ ID NO: 3304677 - RNA, 19 nt, Human
auguuugccucugccucug

SEQ ID NO: 3304678 - RNA, 22 nt, Human
auguuugccucugccucugaca

SEQ ID NO: 3304679 - RNA, 18 nt, Human
auguuugccucugccucu

SEQ ID NO: 3304680 - RNA, 15 nt, Human
auguaauuaaguacu

SEQ ID NO: 3304681 - RNA, 17 nt, Human
auguaauuaaguacuau

SEQ ID NO: 3304682 - RNA, 19 nt, Human
auggucaccaaaucagcug

SEQ ID NO: 3304683 - RNA, 14 nt, Human
augucuuuucuugc

SEQ ID NO: 3304684 - RNA, 22 nt, Human
augugaaacuggauuaaacuua

SEQ ID NO: 3304685 - RNA, 17 nt, Human
augcacagaguuguuac

SEQ ID NO: 3304686 - RNA, 17 nt, Human
augcacaaacagaggcc

SEQ ID NO: 3304687 - RNA, 16 nt, Human
augcacaaacagaggc

SEQ ID NO: 3304688 - RNA, 16 nt, Human
augcacagaguuguua

SEQ ID NO: 3304689 - RNA, 23 nt, Human
augcacacauuuuuuaaaugcac

SEQ ID NO: 3304690 - RNA, 19 nt, Human
augccucucucaggccaaa

SEQ ID NO: 3304691 - RNA, 17 nt, Human
augccucucucaggcca

SEQ ID NO: 3304692 - RNA, 16 nt, Human
augcaugaaguaauau

SEQ ID NO: 3304693 - RNA, 15 nt, Human
augcacaaacagagg

SEQ ID NO: 3304694 - RNA, 24 nt, Human
augauguuuuccaugaguccccug

SEQ ID NO: 3304695 - RNA, 17 nt, Human
augaugccaugaggaac

SEQ ID NO: 3304696 - RNA, 16 nt, Human
augaugccaugaggaa

SEQ ID NO: 3304697 - RNA, 12 nt, Human
augcuuguacau

SEQ ID NO: 3304698 - RNA, 14 nt, Human
augcuuguacauaa

SEQ ID NO: 3304699 - RNA, 13 nt, Human
augcuuguacaua

SEQ ID NO: 3304700 - RNA, 15 nt, Human
auggauuuccagcca

SEQ ID NO: 3304701 - RNA, 16 nt, Human
augcucuuuacuucau

SEQ ID NO: 3304702 - RNA, 11 nt, Human
augcugcccug

SEQ ID NO: 3304703 - RNA, 18 nt, Human
aucagccugcuccagcug

SEQ ID NO: 3304704 - RNA, 17 nt, Human
aucagccugcuccagcu

SEQ ID NO: 3304705 - RNA, 19 nt, Human
aucagccugcuccagcugu

SEQ ID NO: 3304706 - RNA, 14 nt, Human
aucaccgaaaacgu

SEQ ID NO: 3304707 - RNA, 19 nt, Human
aucaccgaaaacguggcug

SEQ ID NO: 3304708 - RNA, 20 nt, Human
aucagcacgauuucuguuua

SEQ ID NO: 3304709 - RNA, 19 nt, Human
aucagcacgauuucuguuu

SEQ ID NO: 3304710 - RNA, 23 nt, Human
aucagcacgauuucuguuuagau

SEQ ID NO: 3304711 - RNA, 13 nt, Human
aucacagccucug

SEQ ID NO: 3304712 - RNA, 21 nt, Human
aucacagccucugaaaaccaa

SEQ ID NO: 3304713 - RNA, 18 nt, Human
aucaccaacgucugugcc

SEQ ID NO: 3304714 - RNA, 23 nt, Human
aucacccgcuaagagggagggag

SEQ ID NO: 3304715 - RNA, 19 nt, Human
aucaccaacgucugugcca

SEQ ID NO: 3304716 - RNA, 20 nt, Human
auccucccaccucagccucc

SEQ ID NO: 3304717 - RNA, 18 nt, Human
auccucccaccucagccu

SEQ ID NO: 3304718 - RNA, 19 nt, Human
auccucccaccucagccuc

SEQ ID NO: 3304719 - RNA, 15 nt, Human
auccucccaccucag

SEQ ID NO: 3304720 - RNA, 23 nt, Human
auccuccaggugcacaagcucca

SEQ ID NO: 3304721 - RNA, 11 nt, Human
auccuccaggu

SEQ ID NO: 3304722 - RNA, 23 nt, Human
auccucauacccacccccaccca

SEQ ID NO: 3304723 - RNA, 15 nt, Human
auccccuguagagug

SEQ ID NO: 3304724 - RNA, 15 nt, Human
aucccauuuaaaaaa

SEQ ID NO: 3304725 - RNA, 14 nt, Human
aucccauuuaaaaa

SEQ ID NO: 3304726 - RNA, 23 nt, Human
augaccuuucaauaggaaaaacu

SEQ ID NO: 3304727 - RNA, 22 nt, Human
augaccuuucaauaggaaaaac

SEQ ID NO: 3304728 - RNA, 18 nt, Human
augaccuuucaauaggaa

SEQ ID NO: 3304729 - RNA, 21 nt, Human
augaccuuucaauaggaaaaa

SEQ ID NO: 3304730 - RNA, 13 nt, Human
augaaagacugua

SEQ ID NO: 3304731 - RNA, 16 nt, Human
augaaagacuguacaa

SEQ ID NO: 3304732 - RNA, 17 nt, Human
augaaagacuguacaaa

SEQ ID NO: 3304733 - RNA, 21 nt, Human
aucucccccagccccauccuc

SEQ ID NO: 3304734 - RNA, 22 nt, Human
aucugcuuuuuaaagaaugcuc

SEQ ID NO: 3304735 - RNA, 18 nt, Human
aucuugaagacuuuucuu

SEQ ID NO: 3304736 - RNA, 22 nt, Human
aucuucugaacuuggcgcugcc

SEQ ID NO: 3304737 - RNA, 23 nt, Human
aggcccuucucuccagccccugg

SEQ ID NO: 3304738 - RNA, 22 nt, Human
aggcccuucucuccagccccug

SEQ ID NO: 3304739 - RNA, 21 nt, Human
aggcccuucucuccagccccu

SEQ ID NO: 3304740 - RNA, 20 nt, Human
aggcccuucucuccagcccc

SEQ ID NO: 3304741 - RNA, 13 nt, Human
aggcuguauccca

SEQ ID NO: 3304742 - RNA, 18 nt, Human
aggcuguaucccaugagc

SEQ ID NO: 3304743 - RNA, 20 nt, Human
aggcugucaauuacaggaag

SEQ ID NO: 3304744 - RNA, 19 nt, Human
aggcugucaauuacaggaa

SEQ ID NO: 3304745 - RNA, 23 nt, Human
agggacagaggggguggccuccc

SEQ ID NO: 3304746 - RNA, 20 nt, Human
agggacagaggggguggccu

SEQ ID NO: 3304747 - RNA, 22 nt, Human
agggacagaggggguggccucc

SEQ ID NO: 3304748 - RNA, 21 nt, Human
aggcugucaauuacaggaagu

SEQ ID NO: 3304749 - RNA, 19 nt, Human
aggggccucuuaugggcug

SEQ ID NO: 3304750 - RNA, 20 nt, Human
aggggccucuuaugggcugg

SEQ ID NO: 3304751 - RNA, 19 nt, Human
aggguaucaggugcugcca

SEQ ID NO: 3304752 - RNA, 18 nt, Human
aggguaucaggugcugcc

SEQ ID NO: 3304753 - RNA, 21 nt, Human
aggguaucaggugcugccauc

SEQ ID NO: 3304754 - RNA, 11 nt, Human
agggucccugg

SEQ ID NO: 3304755 - RNA, 23 nt, Human
aggguuuugccauguuggccagg

SEQ ID NO: 3304756 - RNA, 23 nt, Human
aggucuguucuuuccaaaguaca

SEQ ID NO: 3304757 - RNA, 22 nt, Human
aggucuguucuuuccaaaguac

SEQ ID NO: 3304758 - RNA, 18 nt, Human
aggucuguucuuuccaaa

SEQ ID NO: 3304759 - RNA, 23 nt, Human
aggugcuaggaacacuccuucac

SEQ ID NO: 3304760 - RNA, 22 nt, Human
aggugcuaggaacacuccuuca

SEQ ID NO: 3304761 - RNA, 19 nt, Human
aggugcuaggaacacuccu

SEQ ID NO: 3304762 - RNA, 23 nt, Human
agguucccuuugacgccauccca

SEQ ID NO: 3304763 - RNA, 13 nt, Human
agguucccuuuga

SEQ ID NO: 3304764 - RNA, 22 nt, Human
agguucccuuugacgccauccc

SEQ ID NO: 3304765 - RNA, 14 nt, Human
agguucaaagauau

SEQ ID NO: 3304766 - RNA, 14 nt, Human
aggauuauuggaaa

SEQ ID NO: 3304767 - RNA, 15 nt, Human
aggauguucugggac

SEQ ID NO: 3304768 - RNA, 16 nt, Human
aggauguucugggaca

SEQ ID NO: 3304769 - RNA, 22 nt, Human
aggauguucuagcauggcugcc

SEQ ID NO: 3304770 - RNA, 23 nt, Human
aggaugcuuguacauaaugcgug

SEQ ID NO: 3304771 - RNA, 21 nt, Human
aggaugcuuguacauaaugcg

SEQ ID NO: 3304772 - RNA, 13 nt, Human
aggaccucaggug

SEQ ID NO: 3304773 - RNA, 17 nt, Human
aggaauccagacccggc

SEQ ID NO: 3304774 - RNA, 21 nt, Human
aggaaucaugugccaagcaga

SEQ ID NO: 3304775 - RNA, 21 nt, Human
agcugcgguccacccaggagc

SEQ ID NO: 3304776 - RNA, 21 nt, Human
agcugacuuuucuguccgagc

SEQ ID NO: 3304777 - RNA, 12 nt, Human
agcuccuucugu

SEQ ID NO: 3304778 - RNA, 23 nt, Human
agcuccgcuuucuacccagcgag

SEQ ID NO: 3304779 - RNA, 20 nt, Human
agcuccgcuuucuacccagc

SEQ ID NO: 3304780 - RNA, 21 nt, Human
agcuccgcuuucuacccagcg

SEQ ID NO: 3304781 - RNA, 23 nt, Human
agcugcgguccacccaggagccc

SEQ ID NO: 3304782 - RNA, 23 nt, Human
agaggacuuuucuuuguggcuuc

SEQ ID NO: 3304783 - RNA, 16 nt, Human
agaggagagaggaccc

SEQ ID NO: 3304784 - RNA, 15 nt, Human
agaggagagaggacc

SEQ ID NO: 3304785 - RNA, 16 nt, Human
agaggaaggagaggag

SEQ ID NO: 3304786 - RNA, 21 nt, Human
agaggaaaucaccgaaaacgu

SEQ ID NO: 3304787 - RNA, 11 nt, Human
agagugggagc

SEQ ID NO: 3304788 - RNA, 19 nt, Human
agaguggggauaugauuua

SEQ ID NO: 3304789 - RNA, 14 nt, Human
agagugugccugaa

SEQ ID NO: 3304790 - RNA, 19 nt, Human
agaggguggugaccucugc

SEQ ID NO: 3304791 - RNA, 20 nt, Human
agaggguggugaccucugcc

SEQ ID NO: 3304792 - RNA, 22 nt, Human
agaggguggugaccucugccug

SEQ ID NO: 3304793 - RNA, 12 nt, Human
agagggcacaga

SEQ ID NO: 3304794 - RNA, 14 nt, Human
agagcccaggccuc

SEQ ID NO: 3304795 - RNA, 13 nt, Human
agagcccaggccu

SEQ ID NO: 3304796 - RNA, 15 nt, Human
agagcccaggccucc

SEQ ID NO: 3304797 - RNA, 19 nt, Human
agauauaugcucugcaugu

SEQ ID NO: 3304798 - RNA, 14 nt, Human
agaucuucuguggg

SEQ ID NO: 3304799 - RNA, 19 nt, Human
agacuggaagcacagcuuc

SEQ ID NO: 3304800 - RNA, 17 nt, Human
agacuggaagcacagcu

SEQ ID NO: 3304801 - RNA, 16 nt, Human
agacuggaagcacagc

SEQ ID NO: 3304802 - RNA, 23 nt, Human
agagagcaagacgcugugcugcc

SEQ ID NO: 3304803 - RNA, 19 nt, Human
agagcccaccuuggcucaa

SEQ ID NO: 3304804 - RNA, 13 nt, Human
agagcccacgccc

SEQ ID NO: 3304805 - RNA, 16 nt, Human
agagcccacgccccca

SEQ ID NO: 3304806 - RNA, 13 nt, Human
agagcccaccuug

SEQ ID NO: 3304807 - RNA, 22 nt, Human
agagaggguggugaccucugcc

SEQ ID NO: 3304808 - RNA, 20 nt, Human
agagaggguggugaccucug

SEQ ID NO: 3304809 - RNA, 21 nt, Human
agagaggguggugaccucugc

SEQ ID NO: 3304810 - RNA, 23 nt, Human
agacagagucucacuguugccca

SEQ ID NO: 3304811 - RNA, 15 nt, Human
agacagcccgggcuc

SEQ ID NO: 3304812 - RNA, 14 nt, Human
agacagcccgggcu

SEQ ID NO: 3304813 - RNA, 15 nt, Human
agacagauacuccuc

SEQ ID NO: 3304814 - RNA, 21 nt, Human
agacagauacuccuccaaggu

SEQ ID NO: 3304815 - RNA, 12 nt, Human
agacagcucuua

SEQ ID NO: 3304816 - RNA, 11 nt, Human
agacagcucuu

SEQ ID NO: 3304817 - RNA, 21 nt, Human
agacgcugugcugcccugccc

SEQ ID NO: 3304818 - RNA, 22 nt, Human
agacgcugugcugcccugccca

SEQ ID NO: 3304819 - RNA, 20 nt, Human
agacgcugugcugcccugcc

SEQ ID NO: 3304820 - RNA, 18 nt, Human
agacgggggcagagaggg

SEQ ID NO: 3304821 - RNA, 13 nt, Human
agccgcuggggcc

SEQ ID NO: 3304822 - RNA, 21 nt, Human
agccgccaugcuccuggccca

SEQ ID NO: 3304823 - RNA, 22 nt, Human
agccucccacgacugcccggca

SEQ ID NO: 3304824 - RNA, 21 nt, Human
agccucccaaagugcugggau

SEQ ID NO: 3304825 - RNA, 20 nt, Human
agccucccaaagugcuggga

SEQ ID NO: 3304826 - RNA, 14 nt, Human
agccuccuccagcc

SEQ ID NO: 3304827 - RNA, 20 nt, Human
agccucccgaguagcuggga

SEQ ID NO: 3304828 - RNA, 18 nt, Human
agccucccgaguagcugg

SEQ ID NO: 3304829 - RNA, 19 nt, Human
agccucccgaguagcuggg

SEQ ID NO: 3304830 - RNA, 13 nt, Human
agccccauucugc

SEQ ID NO: 3304831 - RNA, 16 nt, Human
agccccauucugccug

SEQ ID NO: 3304832 - RNA, 21 nt, Human
agcccgggcucugccucccau

SEQ ID NO: 3304833 - RNA, 13 nt, Human
agccccagugccc

SEQ ID NO: 3304834 - RNA, 14 nt, Human
agccccagugccca

SEQ ID NO: 3304835 - RNA, 15 nt, Human
agccccagugcccac

SEQ ID NO: 3304836 - RNA, 20 nt, Human
agccagcaggcucucaggcc

SEQ ID NO: 3304837 - RNA, 17 nt, Human
agccagcaggcucucag

SEQ ID NO: 3304838 - RNA, 19 nt, Human
agccagcaggcucucaggc

SEQ ID NO: 3304839 - RNA, 18 nt, Human
agccagcaggcucucagg

SEQ ID NO: 3304840 - RNA, 19 nt, Human
agcacagacccugcccugu

SEQ ID NO: 3304841 - RNA, 18 nt, Human
agcacagacccugcccug

SEQ ID NO: 3304842 - RNA, 23 nt, Human
agcacacuugacaucaacugcau

SEQ ID NO: 3304843 - RNA, 17 nt, Human
agcacagacccugcccu

SEQ ID NO: 3304844 - RNA, 20 nt, Human
agcagugcaugcugucccuu

SEQ ID NO: 3304845 - RNA, 19 nt, Human
agcagugcaugcugucccu

SEQ ID NO: 3304846 - RNA, 18 nt, Human
agcagugcaugcuguccc

SEQ ID NO: 3304847 - RNA, 13 nt, Human
agcagcguuucua

SEQ ID NO: 3304848 - RNA, 23 nt, Human
agccaaagcuaggccuggccaga

SEQ ID NO: 3304849 - RNA, 23 nt, Human
agcaugccuggauggggcugcac

SEQ ID NO: 3304850 - RNA, 20 nt, Human
agcaugccuggauggggcug

SEQ ID NO: 3304851 - RNA, 23 nt, Human
agccaagugugguagagugugcc

SEQ ID NO: 3304852 - RNA, 18 nt, Human
agcauccuggcacccggc

SEQ ID NO: 3304853 - RNA, 22 nt, Human
agcauccuggcacccggccccu

SEQ ID NO: 3304854 - RNA, 23 nt, Human
agcauccuggcacccggccccug

SEQ ID NO: 3304855 - RNA, 15 nt, Human
acauuuauucugcuc

SEQ ID NO: 3304856 - RNA, 17 nt, Human
accagccaguaaauggg

SEQ ID NO: 3304857 - RNA, 13 nt, Human
accagcagaaaug

SEQ ID NO: 3304858 - RNA, 19 nt, Human
accagagcugccaccugcc

SEQ ID NO: 3304859 - RNA, 14 nt, Human
acauuuauucugcu

SEQ ID NO: 3304860 - RNA, 19 nt, Human
acaggguuuugccauguug

SEQ ID NO: 3304861 - RNA, 19 nt, Human
acaggcaaugcuggcuguu

SEQ ID NO: 3304862 - RNA, 23 nt, Human
acaggcaaugcuggcuguuggcu

SEQ ID NO: 3304863 - RNA, 21 nt, Human
acauaaugcgugcauaccacu

SEQ ID NO: 3304864 - RNA, 22 nt, Human
acauaaugcgugcauaccacuu

SEQ ID NO: 3304865 - RNA, 23 nt, Human
acauaaugcgugcauaccacuuu

SEQ ID NO: 3304866 - RNA, 19 nt, Human
acaugaucuucuuuauaau

SEQ ID NO: 3304867 - RNA, 17 nt, Human
acaucagcacgauuucu

SEQ ID NO: 3304868 - RNA, 15 nt, Human
acaucagcacgauuu

SEQ ID NO: 3304869 - RNA, 18 nt, Human
acaucagcacgauuucug

SEQ ID NO: 3304870 - RNA, 16 nt, Human
acaugugcacaugcac

SEQ ID NO: 3304871 - RNA, 18 nt, Human
acaugugcacaugcacgu

SEQ ID NO: 3304872 - RNA, 13 nt, Human
acccaccucagcc

SEQ ID NO: 3304873 - RNA, 14 nt, Human
acccaccucagccu

SEQ ID NO: 3304874 - RNA, 15 nt, Human
acccaccucagccuc

SEQ ID NO: 3304875 - RNA, 18 nt, Human
acccaagggccuggccug

SEQ ID NO: 3304876 - RNA, 22 nt, Human
acccaagggccuggccugagcu

SEQ ID NO: 3304877 - RNA, 19 nt, Human
acccaagggccuggccuga

SEQ ID NO: 3304878 - RNA, 20 nt, Human
accauauuaccacagacaua

SEQ ID NO: 3304879 - RNA, 11 nt, Human
acccccugaau

SEQ ID NO: 3304880 - RNA, 16 nt, Human
acccaccucagccucc

SEQ ID NO: 3304881 - RNA, 16 nt, Human
accauauuaccacaga

SEQ ID NO: 3304882 - RNA, 14 nt, Human
accauauuaccaca

SEQ ID NO: 3304883 - RNA, 20 nt, Human
accccucaacaccucugcac

SEQ ID NO: 3304884 - RNA, 16 nt, Human
accccuccaugugggc

SEQ ID NO: 3304885 - RNA, 19 nt, Human
accccuccaugugggcuag

SEQ ID NO: 3304886 - RNA, 19 nt, Human
acagagugagacucugucu

SEQ ID NO: 3304887 - RNA, 23 nt, Human
acagagucucacuguugcccagg

SEQ ID NO: 3304888 - RNA, 15 nt, Human
acagagugagacucu

SEQ ID NO: 3304889 - RNA, 19 nt, Human
acagaggcagccccauucu

SEQ ID NO: 3304890 - RNA, 23 nt, Human
acagaggccaugggccuccugug

SEQ ID NO: 3304891 - RNA, 13 nt, Human
acagacacaggcc

SEQ ID NO: 3304892 - RNA, 14 nt, Human
acagacacaggccc

SEQ ID NO: 3304893 - RNA, 14 nt, Human
acagaggcagcccc

SEQ ID NO: 3304894 - RNA, 15 nt, Human
acagaggcagcccca

SEQ ID NO: 3304895 - RNA, 15 nt, Human
acacuguacugcaau

SEQ ID NO: 3304896 - RNA, 11 nt, Human
acagacacagg

SEQ ID NO: 3304897 - RNA, 15 nt, Human
acacugcauguuugu

SEQ ID NO: 3304898 - RNA, 14 nt, Human
acacugcauguuug

SEQ ID NO: 3304899 - RNA, 18 nt, Human
acagccacggccaggcca

SEQ ID NO: 3304900 - RNA, 16 nt, Human
acagccacggccaggc

SEQ ID NO: 3304901 - RNA, 17 nt, Human
acagccacggccaggcc

SEQ ID NO: 3304902 - RNA, 15 nt, Human
acagccacggccagg

SEQ ID NO: 3304903 - RNA, 17 nt, Human
acagcucuguccuggga

SEQ ID NO: 3304904 - RNA, 16 nt, Human
acagcucuucuccagg

SEQ ID NO: 3304905 - RNA, 17 nt, Human
acagcucuucuccaggc

SEQ ID NO: 3304906 - RNA, 15 nt, Human
acaggaucagucuga

SEQ ID NO: 3304907 - RNA, 18 nt, Human
acaggcaaugcuggcugu

SEQ ID NO: 3304908 - RNA, 12 nt, Human
acaggcaagcac

SEQ ID NO: 3304909 - RNA, 14 nt, Human
acaggauuauugga

SEQ ID NO: 3304910 - RNA, 19 nt, Human
acacauuuuuuaaaugcac

SEQ ID NO: 3304911 - RNA, 15 nt, Human
acacgcgugcacaca

SEQ ID NO: 3304912 - RNA, 17 nt, Human
acacgcgugcacacacc

SEQ ID NO: 3304913 - RNA, 20 nt, Human
acacagcucuguccugggag

SEQ ID NO: 3304914 - RNA, 14 nt, Human
acacagcucugucc

SEQ ID NO: 3304915 - RNA, 19 nt, Human
acacagaggcugccucucc

SEQ ID NO: 3304916 - RNA, 11 nt, Human
acacagcucuu

SEQ ID NO: 3304917 - RNA, 22 nt, Human
acacauuuuauuuuauuaugca

SEQ ID NO: 3304918 - RNA, 21 nt, Human
acacauuuuauuuuauuaugc

SEQ ID NO: 3304919 - RNA, 22 nt, Human
acacauuuuuuaaaugcaccug

SEQ ID NO: 3304920 - RNA, 20 nt, Human
acacauuuuuuaaaugcacc

SEQ ID NO: 3304921 - RNA, 16 nt, Human
aauuuugugcccccau

SEQ ID NO: 3304922 - RNA, 20 nt, Human
acaaggcaaggcugucaauu

SEQ ID NO: 3304923 - RNA, 22 nt, Human
acaaaauguaggguuauaauaa

SEQ ID NO: 3304924 - RNA, 20 nt, Human
acaaaauguaggguuauaau

SEQ ID NO: 3304925 - RNA, 17 nt, Human
acaaggauugcuacugu

SEQ ID NO: 3304926 - RNA, 14 nt, Human
acaaggcaaggcug

SEQ ID NO: 3304927 - RNA, 12 nt, Human
acaaggcaaggc

SEQ ID NO: 3304928 - RNA, 15 nt, Human
agaaaauaccaagga

SEQ ID NO: 3304929 - RNA, 19 nt, Human
agaaaauaguggugugauu

SEQ ID NO: 3304930 - RNA, 14 nt, Human
acuuuucuuugugg

SEQ ID NO: 3304931 - RNA, 16 nt, Human
acuuuucuuucagcca

SEQ ID NO: 3304932 - RNA, 20 nt, Human
acuuuucauaaccuagccuu

SEQ ID NO: 3304933 - RNA, 17 nt, Human
acuuuguucuggcucuu

SEQ ID NO: 3304934 - RNA, 16 nt, Human
acuuuguucuggcucu

SEQ ID NO: 3304935 - RNA, 19 nt, Human
acuuuguucuggcucuucc

SEQ ID NO: 3304936 - RNA, 14 nt, Human
acuuuguucuggcu

SEQ ID NO: 3304937 - RNA, 13 nt, Human
acuuuuauaaacu

SEQ ID NO: 3304938 - RNA, 22 nt, Human
agaaaguacuucuccacccugc

SEQ ID NO: 3304939 - RNA, 23 nt, Human
agaaaguacuucuccacccugcu

SEQ ID NO: 3304940 - RNA, 16 nt, Human
acuugguuuuuaaaaa

SEQ ID NO: 3304941 - RNA, 15 nt, Human
acuugggccacugug

SEQ ID NO: 3304942 - RNA, 14 nt, Human
acuugggccacugu

SEQ ID NO: 3304943 - RNA, 18 nt, Human
acuucuuauacauuugau

SEQ ID NO: 3304944 - RNA, 23 nt, Human
acuucacauauugauuuccguua

SEQ ID NO: 3304945 - RNA, 20 nt, Human
acugugcugagucugaaggc

SEQ ID NO: 3304946 - RNA, 16 nt, Human
acugugaagagaacca

SEQ ID NO: 3304947 - RNA, 18 nt, Human
acugguuccauggccucu

SEQ ID NO: 3304948 - RNA, 16 nt, Human
acuggaagcacagcuu

SEQ ID NO: 3304949 - RNA, 19 nt, Human
acuggaagcacagcuucau

SEQ ID NO: 3304950 - RNA, 17 nt, Human
acuggaagcacagcuuc

SEQ ID NO: 3304951 - RNA, 15 nt, Human
acuggagaaaaugga

SEQ ID NO: 3304952 - RNA, 14 nt, Human
acuggagaaaaugg

SEQ ID NO: 3304953 - RNA, 21 nt, Human
acucuaucaaguauuauaccu

SEQ ID NO: 3304954 - RNA, 23 nt, Human
acucuaucaaguauuauaccuuu

SEQ ID NO: 3304955 - RNA, 19 nt, Human
acucugucgcccagucugg

SEQ ID NO: 3304956 - RNA, 17 nt, Human
acucuagggaaaaacca

SEQ ID NO: 3304957 - RNA, 15 nt, Human
acucuagggaaaaac

SEQ ID NO: 3304958 - RNA, 13 nt, Human
acucaaaagcugg

SEQ ID NO: 3304959 - RNA, 19 nt, Human
acucaguccauagcagaga

SEQ ID NO: 3304960 - RNA, 16 nt, Human
accugucccccugaca

SEQ ID NO: 3304961 - RNA, 15 nt, Human
accugucccccugac

SEQ ID NO: 3304962 - RNA, 12 nt, Human
accugucccccu

SEQ ID NO: 3304963 - RNA, 18 nt, Human
accuuggcugcagggagu

SEQ ID NO: 3304964 - RNA, 14 nt, Human
accuuggcugcagg

SEQ ID NO: 3304965 - RNA, 17 nt, Human
accuuggcugcagggag

SEQ ID NO: 3304966 - RNA, 13 nt, Human
accuuucccaucu

SEQ ID NO: 3304967 - RNA, 18 nt, Human
accuuucccaucuuccaa

SEQ ID NO: 3304968 - RNA, 15 nt, Human
accuuuaagagaaau

SEQ ID NO: 3304969 - RNA, 23 nt, Human
accucugccugaagucacacagu

SEQ ID NO: 3304970 - RNA, 21 nt, Human
accucugcagcaauaaagcag

SEQ ID NO: 3304971 - RNA, 20 nt, Human
accucugcagcaauaaagca

SEQ ID NO: 3304972 - RNA, 18 nt, Human
accucugcagcaauaaag

SEQ ID NO: 3304973 - RNA, 15 nt, Human
accucugcagcaaua

SEQ ID NO: 3304974 - RNA, 11 nt, Human
acgugaguccu

SEQ ID NO: 3304975 - RNA, 11 nt, Human
acgcugugcug

SEQ ID NO: 3304976 - RNA, 14 nt, Human
acgcugugcugccc

SEQ ID NO: 3304977 - RNA, 12 nt, Human
acgcugugcugc

SEQ ID NO: 3304978 - RNA, 13 nt, Human
acgucugacaggc

SEQ ID NO: 3304979 - RNA, 14 nt, Human
acgucugacaggca

SEQ ID NO: 3304980 - RNA, 17 nt, Human
aaaauaaaacuuuuuaa

SEQ ID NO: 3304981 - RNA, 16 nt, Human
aaaauaaaacuuuuua

SEQ ID NO: 3304982 - RNA, 22 nt, Human
aaaaucccuuaccucggugccu

SEQ ID NO: 3304983 - RNA, 15 nt, Human
aaaaagaaaggaggg

SEQ ID NO: 3304984 - RNA, 16 nt, Human
aaacacuguucucugc

SEQ ID NO: 3304985 - RNA, 22 nt, Human
aaaaucucaaauuucuaaaucu

SEQ ID NO: 3304986 - RNA, 19 nt, Human
aaaaucucaaauuucuaaa

SEQ ID NO: 3304987 - RNA, 14 nt, Human
aaagaguaggaaga

SEQ ID NO: 3304988 - RNA, 16 nt, Human
aaagauauuuugcuuu

SEQ ID NO: 3304989 - RNA, 12 nt, Human
aaagauauuuug

SEQ ID NO: 3304990 - RNA, 17 nt, Human
aaagauauuuugcuuug

SEQ ID NO: 3304991 - RNA, 18 nt, Human
aaaccaucauugaaaucu

SEQ ID NO: 3304992 - RNA, 13 nt, Human
aaacucuccucug

SEQ ID NO: 3304993 - RNA, 18 nt, Human
aaacucuccucugcugcu

SEQ ID NO: 3304994 - RNA, 16 nt, Human
aaaggcuccaggagca

SEQ ID NO: 3304995 - RNA, 15 nt, Human
aaaggcuccaggagc

SEQ ID NO: 3304996 - RNA, 19 nt, Human
aaaggcuccaggagcagcc

SEQ ID NO: 3304997 - RNA, 14 nt, Human
aaagugcugggauu

SEQ ID NO: 3304998 - RNA, 13 nt, Human
aaaguggaaaaau

SEQ ID NO: 3304999 - RNA, 16 nt, Human
aaauaaaacuuuuuaa

SEQ ID NO: 3305000 - RNA, 13 nt, Human
aaauaaaacuuuu

SEQ ID NO: 3305001 - RNA, 19 nt, Human
aaauaaaacuuuuuaaaau

SEQ ID NO: 3305002 - RNA, 18 nt, Human
aaaucugcuuuuuaaaga

SEQ ID NO: 3305003 - RNA, 19 nt, Human
aaauaguggugugauuugg

SEQ ID NO: 3305004 - RNA, 24 nt, Human
aaauagcucaggugucccugcacu

SEQ ID NO: 3305005 - RNA, 19 nt, Human
aacuuaaauaaugugaaac

SEQ ID NO: 3305006 - RNA, 14 nt, Human
aacugauaaagaug

SEQ ID NO: 3305007 - RNA, 18 nt, Human
aacuuaaucuaaauggaa

SEQ ID NO: 3305008 - RNA, 16 nt, Human
aacuuaaucuaaaugg

SEQ ID NO: 3305009 - RNA, 15 nt, Human
aacuuaaucuaaaug

SEQ ID NO: 3305010 - RNA, 21 nt, Human
aaauucuugcaaaguaucccu

SEQ ID NO: 3305011 - RNA, 18 nt, Human
aaauucuugcaaaguauc

SEQ ID NO: 3305012 - RNA, 23 nt, Human
aaaugccuuacccucauguucuu

SEQ ID NO: 3305013 - RNA, 15 nt, Human
aaccacuucagcuga

SEQ ID NO: 3305014 - RNA, 13 nt, Human
aaccacgcuggac

SEQ ID NO: 3305015 - RNA, 23 nt, Human
aaugcucuuuacuucauggacuu

SEQ ID NO: 3305016 - RNA, 15 nt, Human
aauguuugccucugc

SEQ ID NO: 3305017 - RNA, 15 nt, Human
aaugugaaaagaaaa

SEQ ID NO: 3305018 - RNA, 19 nt, Human
aaugcgugcauaccacuuu

SEQ ID NO: 3305019 - RNA, 18 nt, Human
aaugcgugcauaccacuu

SEQ ID NO: 3305020 - RNA, 23 nt, Human
aaugccuuacccucauguucuua

SEQ ID NO: 3305021 - RNA, 13 nt, Human
aauagacaauuua

SEQ ID NO: 3305022 - RNA, 14 nt, Human
aaucaccgaaaacg

SEQ ID NO: 3305023 - RNA, 22 nt, Human
aauacucuacccucuuagaaaa

SEQ ID NO: 3305024 - RNA, 20 nt, Human
aauacucuacccucuuagaa

SEQ ID NO: 3305025 - RNA, 16 nt, Human
aaugauuaauuaaaac

SEQ ID NO: 3305026 - RNA, 18 nt, Human
aaucucaaauuucuaaau

SEQ ID NO: 3305027 - RNA, 17 nt, Human
aaucucaaauuucuaaa

SEQ ID NO: 3305028 - RNA, 19 nt, Human
aauccagacccggcugcgu

SEQ ID NO: 3305029 - RNA, 17 nt, Human
aauccagacccggcugc

SEQ ID NO: 3305030 - RNA, 15 nt, Human
aaucucaaauuucua

SEQ ID NO: 3305031 - RNA, 16 nt, Human
aaucucaaauuucuaa

SEQ ID NO: 3305032 - RNA, 21 nt, Human
aaguagaagucuuagauguau

SEQ ID NO: 3305033 - RNA, 23 nt, Human
aaguaucccuacuguaauuugug

SEQ ID NO: 3305034 - RNA, 18 nt, Human
aaguaucccuacuguaau

SEQ ID NO: 3305035 - RNA, 17 nt, Human
aaguaucccuacuguaa

SEQ ID NO: 3305036 - RNA, 19 nt, Human
aaguagaagucuuagaugu

SEQ ID NO: 3305037 - RNA, 20 nt, Human
aaguagaagucuuagaugua

SEQ ID NO: 3305038 - RNA, 18 nt, Human
aaguccucuuuucugaga

SEQ ID NO: 3305039 - RNA, 22 nt, Human
aaguccucuuuucugagaggac

SEQ ID NO: 3305040 - RNA, 19 nt, Human
aaggucauuuuuuuuaaga

SEQ ID NO: 3305041 - RNA, 18 nt, Human
aaggucauuuuuuuuaag

SEQ ID NO: 3305042 - RNA, 21 nt, Human
aaguggaaaaauagccugccu

SEQ ID NO: 3305043 - RNA, 19 nt, Human
aaguggaaaaauagccugc

SEQ ID NO: 3305044 - RNA, 15 nt, Human
aaggauguucuagca

SEQ ID NO: 3305045 - RNA, 15 nt, Human
aaggauugcuacugu

SEQ ID NO: 3305046 - RNA, 13 nt, Human
aaggacacuagaa

SEQ ID NO: 3305047 - RNA, 15 nt, Human
aagcugggcagguug

SEQ ID NO: 3305048 - RNA, 18 nt, Human
aagcuggucccacucagu

SEQ ID NO: 3305049 - RNA, 21 nt, Human
aagcuggucccacucagucca

SEQ ID NO: 3305050 - RNA, 21 nt, Human
aagcgauucuucugcuucagc

SEQ ID NO: 3305051 - RNA, 17 nt, Human
aagcgauucuucugcuu

SEQ ID NO: 3305052 - RNA, 14 nt, Human
aagcagcguuucua

SEQ ID NO: 3305053 - RNA, 20 nt, Human
aagcagcguuucuaugacac

SEQ ID NO: 3305054 - RNA, 17 nt, Human
aagcagcguuucuauga

SEQ ID NO: 3305055 - RNA, 19 nt, Human
aagccagcaggcucucagg

SEQ ID NO: 3305056 - RNA, 22 nt, Human
aagcagcguuucuaugacacau

SEQ ID NO: 3305057 - RNA, 21 nt, Human
aagcagcguuucuaugacaca

SEQ ID NO: 3305058 - RNA, 23 nt, Human
aagccagcaggcucucaggccag

SEQ ID NO: 3305059 - RNA, 20 nt, Human
aagccagcaggcucucaggc

SEQ ID NO: 3305060 - RNA, 12 nt, Human
aagauaaaugug

SEQ ID NO: 3305061 - RNA, 13 nt, Human
aagauaaaugugc

SEQ ID NO: 3305062 - RNA, 23 nt, Human
aagauacaguuacucagaauucu

SEQ ID NO: 3305063 - RNA, 18 nt, Human
caaugcaaaccaucauug

SEQ ID NO: 3305064 - RNA, 17 nt, Human
caaugcaaaccaucauu

SEQ ID NO: 3305065 - RNA, 14 nt, Human
caaugcaaaccauc

SEQ ID NO: 3305066 - RNA, 23 nt, Human
caaugcacuuuguucuggcucuu

SEQ ID NO: 3305067 - RNA, 22 nt, Human
caaugcacuuuguucuggcucu

SEQ ID NO: 3305068 - RNA, 19 nt, Human
caaugcaaaccaucauuga

SEQ ID NO: 3305069 - RNA, 21 nt, Human
caauaggaaaaacugauuuuu

SEQ ID NO: 3305070 - RNA, 18 nt, Human
caauaggaaaaacugauu

SEQ ID NO: 3305071 - RNA, 20 nt, Human
caauaggaaaaacugauuuu

SEQ ID NO: 3305072 - RNA, 16 nt, Human
cacaaaaguuucucuu

SEQ ID NO: 3305073 - RNA, 18 nt, Human
cacaaaaguuucucuuuu

SEQ ID NO: 3305074 - RNA, 14 nt, Human
cacacaccagagcc

SEQ ID NO: 3305075 - RNA, 19 nt, Human
cacacagaggcugccucuc

SEQ ID NO: 3305076 - RNA, 12 nt, Human
cacacagcucug

SEQ ID NO: 3305077 - RNA, 15 nt, Human
cacaccagagcccac

SEQ ID NO: 3305078 - RNA, 12 nt, Human
cacaccagagcc

SEQ ID NO: 3305079 - RNA, 13 nt, Human
cacaccagagccc

SEQ ID NO: 3305080 - RNA, 21 nt, Human
cacagagaaaguacuucucca

SEQ ID NO: 3305081 - RNA, 17 nt, Human
cacagaguuguuacauu

SEQ ID NO: 3305082 - RNA, 16 nt, Human
cacagaguuguuacau

SEQ ID NO: 3305083 - RNA, 22 nt, Human
cacagacccugcccugugggcc

SEQ ID NO: 3305084 - RNA, 21 nt, Human
cacacuugacaucaacugcau

SEQ ID NO: 3305085 - RNA, 17 nt, Human
cacauacacacacacgc

SEQ ID NO: 3305086 - RNA, 19 nt, Human
cacagugagucgaggacag

SEQ ID NO: 3305087 - RNA, 20 nt, Human
cacagugagucgaggacagg

SEQ ID NO: 3305088 - RNA, 18 nt, Human
cacagugagucgaggaca

SEQ ID NO: 3305089 - RNA, 20 nt, Human
cacaggcccggcuccaggcu

SEQ ID NO: 3305090 - RNA, 23 nt, Human
cacaggcccggcuccaggcuccu

SEQ ID NO: 3305091 - RNA, 12 nt, Human
cacaggaucagu

SEQ ID NO: 3305092 - RNA, 15 nt, Human
cacaggaucagucug

SEQ ID NO: 3305093 - RNA, 16 nt, Human
cacaggaucagucuga

SEQ ID NO: 3305094 - RNA, 16 nt, Human
cacaggcccggcucca

SEQ ID NO: 3305095 - RNA, 17 nt, Human
cacaggcccggcuccag

SEQ ID NO: 3305096 - RNA, 18 nt, Human
cacaggcccggcuccagg

SEQ ID NO: 3305097 - RNA, 19 nt, Human
cacaggcccggcuccaggc

SEQ ID NO: 3305098 - RNA, 10 nt, Human
cacaggcagg

SEQ ID NO: 3305099 - RNA, 20 nt, Human
cacagaguuguuacauuuuu

SEQ ID NO: 3305100 - RNA, 18 nt, Human
cacagaugggugcuugga

SEQ ID NO: 3305101 - RNA, 14 nt, Human
cacagaugggugcu

SEQ ID NO: 3305102 - RNA, 20 nt, Human
cacagaugggugcuuggagg

SEQ ID NO: 3305103 - RNA, 19 nt, Human
caccacaugugcacaugca

SEQ ID NO: 3305104 - RNA, 15 nt, Human
caccacaugugcaca

SEQ ID NO: 3305105 - RNA, 18 nt, Human
caccacaugugcacaugc

SEQ ID NO: 3305106 - RNA, 16 nt, Human
caccacuacauucugu

SEQ ID NO: 3305107 - RNA, 18 nt, Human
caccacuacauucuguua

SEQ ID NO: 3305108 - RNA, 17 nt, Human
caccacuacauucuguu

SEQ ID NO: 3305109 - RNA, 20 nt, Human
caccacuacauucuguuaau

SEQ ID NO: 3305110 - RNA, 19 nt, Human
caccacuacauucuguuaa

SEQ ID NO: 3305111 - RNA, 15 nt, Human
caccaagcccaguua

SEQ ID NO: 3305112 - RNA, 13 nt, Human
caccacacccagc

SEQ ID NO: 3305113 - RNA, 15 nt, Human
caccacacccagccc

SEQ ID NO: 3305114 - RNA, 16 nt, Human
cacauuccugaugcuu

SEQ ID NO: 3305115 - RNA, 17 nt, Human
cacaugugcacaugcac

SEQ ID NO: 3305116 - RNA, 14 nt, Human
cacaugugcacaug

SEQ ID NO: 3305117 - RNA, 15 nt, Human
cacaugugcacaugc

SEQ ID NO: 3305118 - RNA, 12 nt, Human
cacauaucuguc

SEQ ID NO: 3305119 - RNA, 20 nt, Human
cacauauugauuuccguuaa

SEQ ID NO: 3305120 - RNA, 18 nt, Human
cacaucagcacgauuucu

SEQ ID NO: 3305121 - RNA, 18 nt, Human
cacaugccucucucaggc

SEQ ID NO: 3305122 - RNA, 17 nt, Human
cacaugccucucucagg

SEQ ID NO: 3305123 - RNA, 13 nt, Human
cacaugccucucu

SEQ ID NO: 3305124 - RNA, 19 nt, Human
cacaugccucucucaggcc

SEQ ID NO: 3305125 - RNA, 23 nt, Human
cacauguccaagaagcccaggaa

SEQ ID NO: 3305126 - RNA, 23 nt, Human
caacaggcugggcuucaguggca

SEQ ID NO: 3305127 - RNA, 24 nt, Human
caacaggcugggcuucaguggcag

SEQ ID NO: 3305128 - RNA, 22 nt, Human
caacaucuuggucagauuugaa

SEQ ID NO: 3305129 - RNA, 15 nt, Human
caacagguuuuccug

SEQ ID NO: 3305130 - RNA, 18 nt, Human
caacaggguuuuuuucca

SEQ ID NO: 3305131 - RNA, 19 nt, Human
caacagguuuuccugaaga

SEQ ID NO: 3305132 - RNA, 21 nt, Human
caaccccuucgcuccuguguc

SEQ ID NO: 3305133 - RNA, 18 nt, Human
caaccccuucgcuccugu

SEQ ID NO: 3305134 - RNA, 19 nt, Human
caaccccuucgcuccugug

SEQ ID NO: 3305135 - RNA, 16 nt, Human
caacugcauuggcuuu

SEQ ID NO: 3305136 - RNA, 20 nt, Human
caacucuccuccagagucag

SEQ ID NO: 3305137 - RNA, 19 nt, Human
caacucuccuccagaguca

SEQ ID NO: 3305138 - RNA, 15 nt, Human
caacccucaucacca

SEQ ID NO: 3305139 - RNA, 12 nt, Human
caacccucauca

SEQ ID NO: 3305140 - RNA, 17 nt, Human
caaccccuucgcuccug

SEQ ID NO: 3305141 - RNA, 18 nt, Human
caagcaccuccugccucg

SEQ ID NO: 3305142 - RNA, 16 nt, Human
caagcgugagccacug

SEQ ID NO: 3305143 - RNA, 21 nt, Human
caagccaccaacauacuccca

SEQ ID NO: 3305144 - RNA, 17 nt, Human
caagcgugagccacugc

SEQ ID NO: 3305145 - RNA, 22 nt, Human
caaggauccugagccagauuuc

SEQ ID NO: 3305146 - RNA, 21 nt, Human
caaggaugaucuaggaagacu

SEQ ID NO: 3305147 - RNA, 15 nt, Human
caaggauugcuacug

SEQ ID NO: 3305148 - RNA, 16 nt, Human
caagggccuggccuga

SEQ ID NO: 3305149 - RNA, 19 nt, Human
caagggccuggccugagcu

SEQ ID NO: 3305150 - RNA, 12 nt, Human
caaggugggagg

SEQ ID NO: 3305151 - RNA, 23 nt, Human
caaggugggaggauugcuugagc

SEQ ID NO: 3305152 - RNA, 22 nt, Human
caagugugguagagugugccug

SEQ ID NO: 3305153 - RNA, 22 nt, Human
caagugauucuccugccucagc

SEQ ID NO: 3305154 - RNA, 21 nt, Human
caagugauucuccugccucag

SEQ ID NO: 3305155 - RNA, 16 nt, Human
caagugauucuccugc

SEQ ID NO: 3305156 - RNA, 17 nt, Human
caagugauucuccugcc

SEQ ID NO: 3305157 - RNA, 22 nt, Human
caaauucugcuugcuugcuuuu

SEQ ID NO: 3305158 - RNA, 16 nt, Human
caaaucagcugcuacu

SEQ ID NO: 3305159 - RNA, 13 nt, Human
caaaucagcugcu

SEQ ID NO: 3305160 - RNA, 21 nt, Human
caaaggaugcccaaagaugca

SEQ ID NO: 3305161 - RNA, 18 nt, Human
auuuuuuuacuaauagac

SEQ ID NO: 3305162 - RNA, 16 nt, Human
caaagcuuguuaagau

SEQ ID NO: 3305163 - RNA, 16 nt, Human
caaagcuaggccuggc

SEQ ID NO: 3305164 - RNA, 17 nt, Human
caaagcuaggccuggcc

SEQ ID NO: 3305165 - RNA, 20 nt, Human
caaagccaaagcuaggccug

SEQ ID NO: 3305166 - RNA, 21 nt, Human
caaagccaaagcuaggccugg

SEQ ID NO: 3305167 - RNA, 15 nt, Human
caaagcuaggccugg

SEQ ID NO: 3305168 - RNA, 22 nt, Human
cacccccacccaagggccuggc

SEQ ID NO: 3305169 - RNA, 17 nt, Human
caccccggccaccugcg

SEQ ID NO: 3305170 - RNA, 16 nt, Human
caccccggccaccugc

SEQ ID NO: 3305171 - RNA, 15 nt, Human
caccccggccaccug

SEQ ID NO: 3305172 - RNA, 14 nt, Human
caccccggccaccu

SEQ ID NO: 3305173 - RNA, 13 nt, Human
caccccagcccca

SEQ ID NO: 3305174 - RNA, 12 nt, Human
caccccagcccc

SEQ ID NO: 3305175 - RNA, 12 nt, Human
cacccaccucag

SEQ ID NO: 3305176 - RNA, 13 nt, Human
cacccaccucagc

SEQ ID NO: 3305177 - RNA, 14 nt, Human
cacccaccucagcc

SEQ ID NO: 3305178 - RNA, 16 nt, Human
cacccaccucagccuc

SEQ ID NO: 3305179 - RNA, 20 nt, Human
cacccaccaucaugucuggc

SEQ ID NO: 3305180 - RNA, 22 nt, Human
cacccaccaucaugucuggcua

SEQ ID NO: 3305181 - RNA, 23 nt, Human
cacccaagggccuggccugagcu

SEQ ID NO: 3305182 - RNA, 21 nt, Human
cacccaagggccuggccugag

SEQ ID NO: 3305183 - RNA, 20 nt, Human
cacccaagggccuggccuga

SEQ ID NO: 3305184 - RNA, 19 nt, Human
cacccaagggccuggccug

SEQ ID NO: 3305185 - RNA, 18 nt, Human
cacccaagggccuggccu

SEQ ID NO: 3305186 - RNA, 17 nt, Human
cacccaagggccuggcc

SEQ ID NO: 3305187 - RNA, 16 nt, Human
cacccaagggccuggc

SEQ ID NO: 3305188 - RNA, 16 nt, Human
cuaaauucaugcugcu

SEQ ID NO: 3305189 - RNA, 12 nt, Human
cuaaccacgcug

SEQ ID NO: 3305190 - RNA, 23 nt, Human
cuaagagggagggagggcuccag

SEQ ID NO: 3305191 - RNA, 13 nt, Human
cuaagagggaggg

SEQ ID NO: 3305192 - RNA, 22 nt, Human
cuaagagggagggagggcucca

SEQ ID NO: 3305193 - RNA, 15 nt, Human
cuaagagggagggag

SEQ ID NO: 3305194 - RNA, 23 nt, Human
cgggaggauguucugggacacag

SEQ ID NO: 3305195 - RNA, 21 nt, Human
cgggaggauguucugggacac

SEQ ID NO: 3305196 - RNA, 22 nt, Human
cuaaaugaaaaucgugacaaca

SEQ ID NO: 3305197 - RNA, 20 nt, Human
cuaaaucuccaaaauaaaac

SEQ ID NO: 3305198 - RNA, 21 nt, Human
cuaaaucuccaaaauaaaacu

SEQ ID NO: 3305199 - RNA, 22 nt, Human
cuaagcuauucaguaauaacuc

SEQ ID NO: 3305200 - RNA, 17 nt, Human
cuaauagacaauuuauu

SEQ ID NO: 3305201 - RNA, 23 nt, Human
cuaauagacaauuuauuauggca

SEQ ID NO: 3305202 - RNA, 19 nt, Human
cuaauagacaauuuauuau

SEQ ID NO: 3305203 - RNA, 21 nt, Human
cuacacacugcauguuuguga

SEQ ID NO: 3305204 - RNA, 21 nt, Human
cuacacaggggaaaagaggag

SEQ ID NO: 3305205 - RNA, 12 nt, Human
cuaaugggacac

SEQ ID NO: 3305206 - RNA, 13 nt, Human
cuaaugggacacu

SEQ ID NO: 3305207 - RNA, 16 nt, Human
cuacaggugugaguca

SEQ ID NO: 3305208 - RNA, 14 nt, Human
cuacaggugugagu

SEQ ID NO: 3305209 - RNA, 18 nt, Human
cuacauggaguauauguc

SEQ ID NO: 3305210 - RNA, 20 nt, Human
cuacauggaguauaugucaa

SEQ ID NO: 3305211 - RNA, 15 nt, Human
cuacaggcacccacc

SEQ ID NO: 3305212 - RNA, 17 nt, Human
cuacaggcacccaccau

SEQ ID NO: 3305213 - RNA, 14 nt, Human
cuacaggagugagc

SEQ ID NO: 3305214 - RNA, 15 nt, Human
cuacaggagugagca

SEQ ID NO: 3305215 - RNA, 16 nt, Human
cuacaggagugagcac

SEQ ID NO: 3305216 - RNA, 23 nt, Human
cuacagcuugaccgugaggccag

SEQ ID NO: 3305217 - RNA, 22 nt, Human
cuacagcuugaccgugaggcca

SEQ ID NO: 3305218 - RNA, 19 nt, Human
cuacagcuugaccgugagg

SEQ ID NO: 3305219 - RNA, 22 nt, Human
cuacagaggccaugggccuccu

SEQ ID NO: 3305220 - RNA, 18 nt, Human
cuacagaggccaugggcc

SEQ ID NO: 3305221 - RNA, 20 nt, Human
cuacagaggccaugggccuc

SEQ ID NO: 3305222 - RNA, 17 nt, Human
cuacagaggccaugggc

SEQ ID NO: 3305223 - RNA, 17 nt, Human
cuacacugugcugaguc

SEQ ID NO: 3305224 - RNA, 14 nt, Human
cuacacugugcuga

SEQ ID NO: 3305225 - RNA, 13 nt, Human
cuacacugugcug

SEQ ID NO: 3305226 - RNA, 17 nt, Human
cuacccucuuagaaaaa

SEQ ID NO: 3305227 - RNA, 18 nt, Human
cuacccagcgagcccugg

SEQ ID NO: 3305228 - RNA, 13 nt, Human
cuacccaggugcu

SEQ ID NO: 3305229 - RNA, 12 nt, Human
cuacccaggugc

SEQ ID NO: 3305230 - RNA, 15 nt, Human
cuacccagcgagccc

SEQ ID NO: 3305231 - RNA, 17 nt, Human
cuacccagcgagcccug

SEQ ID NO: 3305232 - RNA, 18 nt, Human
cuaccauccccuguagag

SEQ ID NO: 3305233 - RNA, 14 nt, Human
cuacauucuguuaa

SEQ ID NO: 3305234 - RNA, 13 nt, Human
cuacauucuguua

SEQ ID NO: 3305235 - RNA, 22 nt, Human
cuacauuauaaaugucucuuua

SEQ ID NO: 3305236 - RNA, 17 nt, Human
cuauucaguaauaacuc

SEQ ID NO: 3305237 - RNA, 13 nt, Human
cuauguaucaaug

SEQ ID NO: 3305238 - RNA, 23 nt, Human
cuauucaguaauaacucuacccu

SEQ ID NO: 3305239 - RNA, 21 nt, Human
cuaugcauuugaaaauuuuga

SEQ ID NO: 3305240 - RNA, 17 nt, Human
cuaggaagacuuuggaa

SEQ ID NO: 3305241 - RNA, 15 nt, Human
cuaggaagacuuugg

SEQ ID NO: 3305242 - RNA, 20 nt, Human
cuaggaacacuccuucacag

SEQ ID NO: 3305243 - RNA, 19 nt, Human
cuauagccuaggugacaga

SEQ ID NO: 3305244 - RNA, 18 nt, Human
cuauagccuaggugacag

SEQ ID NO: 3305245 - RNA, 20 nt, Human
cuauagccuaggugacagag

SEQ ID NO: 3305246 - RNA, 21 nt, Human
cuauagccuaggugacagagu

SEQ ID NO: 3305247 - RNA, 16 nt, Human
cuauugcugcuugagg

SEQ ID NO: 3305248 - RNA, 18 nt, Human
cuauuguuagucucuuga

SEQ ID NO: 3305249 - RNA, 14 nt, Human
cucaacucuccucc

SEQ ID NO: 3305250 - RNA, 13 nt, Human
cucaaauuucuaa

SEQ ID NO: 3305251 - RNA, 17 nt, Human
cucaaauuucuaaaucu

SEQ ID NO: 3305252 - RNA, 15 nt, Human
cucaaauuucuaaau

SEQ ID NO: 3305253 - RNA, 14 nt, Human
cucaaauuucuaaa

SEQ ID NO: 3305254 - RNA, 18 nt, Human
cucaacucuccuccagag

SEQ ID NO: 3305255 - RNA, 16 nt, Human
cucaacucuccuccag

SEQ ID NO: 3305256 - RNA, 23 nt, Human
cucacacggacacucaaaagcug

SEQ ID NO: 3305257 - RNA, 14 nt, Human
cuacugaggugcua

SEQ ID NO: 3305258 - RNA, 12 nt, Human
cuacucuguguc

SEQ ID NO: 3305259 - RNA, 19 nt, Human
cuacuguccuacccacccu

SEQ ID NO: 3305260 - RNA, 21 nt, Human
cuacuguaauuugugauacaa

SEQ ID NO: 3305261 - RNA, 15 nt, Human
cuacucgaguuacag

SEQ ID NO: 3305262 - RNA, 19 nt, Human
cuacucgaguuacagacaa

SEQ ID NO: 3305263 - RNA, 16 nt, Human
cuacucgaguuacaga

SEQ ID NO: 3305264 - RNA, 21 nt, Human
cuagagugaacuugggccacu

SEQ ID NO: 3305265 - RNA, 15 nt, Human
cuagagguucaaaga

SEQ ID NO: 3305266 - RNA, 17 nt, Human
cuagagguucaaagaua

SEQ ID NO: 3305267 - RNA, 21 nt, Human
cuagagguucaaagauauuuu

SEQ ID NO: 3305268 - RNA, 18 nt, Human
cuagagguucaaagauau

SEQ ID NO: 3305269 - RNA, 20 nt, Human
cuacuguccuacccacccuc

SEQ ID NO: 3305270 - RNA, 22 nt, Human
cuagccuuagaagucacacagu

SEQ ID NO: 3305271 - RNA, 23 nt, Human
cuagccuuagaagucacacagua

SEQ ID NO: 3305272 - RNA, 21 nt, Human
cuagccuuagaagucacacag

SEQ ID NO: 3305273 - RNA, 22 nt, Human
cuagccugugccucugggacug

SEQ ID NO: 3305274 - RNA, 21 nt, Human
cuagccugugccucugggacu

SEQ ID NO: 3305275 - RNA, 19 nt, Human
cuagccugugccucuggga

SEQ ID NO: 3305276 - RNA, 16 nt, Human
cuagauacuguaucau

SEQ ID NO: 3305277 - RNA, 13 nt, Human
cuagauacuguau

SEQ ID NO: 3305278 - RNA, 24 nt, Human
cuagauacuguaucaugacaaaga

SEQ ID NO: 3305279 - RNA, 14 nt, Human
cuccagcucaccag

SEQ ID NO: 3305280 - RNA, 15 nt, Human
cuccagcucaccagc

SEQ ID NO: 3305281 - RNA, 16 nt, Human
cuccagcucaccagcc

SEQ ID NO: 3305282 - RNA, 18 nt, Human
cuccagcucaccagcccc

SEQ ID NO: 3305283 - RNA, 11 nt, Human
cuccagccccu

SEQ ID NO: 3305284 - RNA, 14 nt, Human
cuccagccccugga

SEQ ID NO: 3305285 - RNA, 13 nt, Human
cuccagccccugg

SEQ ID NO: 3305286 - RNA, 16 nt, Human
cuccagagucagaagu

SEQ ID NO: 3305287 - RNA, 18 nt, Human
cucauuugucacacacuu

SEQ ID NO: 3305288 - RNA, 21 nt, Human
cucauuugucacacacuuugg

SEQ ID NO: 3305289 - RNA, 17 nt, Human
cuccaagcucccaggca

SEQ ID NO: 3305290 - RNA, 18 nt, Human
cuccaaaauaaaacuuuu

SEQ ID NO: 3305291 - RNA, 21 nt, Human
cucauugaccugaggcccuuc

SEQ ID NO: 3305292 - RNA, 19 nt, Human
cucauugaccugaggcccu

SEQ ID NO: 3305293 - RNA, 17 nt, Human
cucauugaccugaggcc

SEQ ID NO: 3305294 - RNA, 22 nt, Human
cucauucuccuuguguuacuaa

SEQ ID NO: 3305295 - RNA, 18 nt, Human
cucauucuccuuguguua

SEQ ID NO: 3305296 - RNA, 23 nt, Human
cuccccugcuggguguggcgcag

SEQ ID NO: 3305297 - RNA, 21 nt, Human
cuccccugcuggguguggcgc

SEQ ID NO: 3305298 - RNA, 14 nt, Human
cuccccugcugggu

SEQ ID NO: 3305299 - RNA, 20 nt, Human
cucccgaauagcugggacua

SEQ ID NO: 3305300 - RNA, 23 nt, Human
cucccgaauagcugggacuacag

SEQ ID NO: 3305301 - RNA, 19 nt, Human
cucccgaauagcugggacu

SEQ ID NO: 3305302 - RNA, 15 nt, Human
cucccuucauccuuc

SEQ ID NO: 3305303 - RNA, 14 nt, Human
cucccaucacccgc

SEQ ID NO: 3305304 - RNA, 16 nt, Human
cucccaucacuucccu

SEQ ID NO: 3305305 - RNA, 15 nt, Human
cucccacaaaggaga

SEQ ID NO: 3305306 - RNA, 15 nt, Human
cucccaacucacccc

SEQ ID NO: 3305307 - RNA, 14 nt, Human
cucccaacucaccc

SEQ ID NO: 3305308 - RNA, 16 nt, Human
cucccaaagugcuggg

SEQ ID NO: 3305309 - RNA, 23 nt, Human
cucccaaagugcugggauuacag

SEQ ID NO: 3305310 - RNA, 18 nt, Human
cucagggucccugguggc

SEQ ID NO: 3305311 - RNA, 24 nt, Human
cucagggucccugguggcagcuca

SEQ ID NO: 3305312 - RNA, 22 nt, Human
cucagggucccugguggcagcu

SEQ ID NO: 3305313 - RNA, 21 nt, Human
cucagggucccugguggcagc

SEQ ID NO: 3305314 - RNA, 20 nt, Human
cucagggucccugguggcag

SEQ ID NO: 3305315 - RNA, 21 nt, Human
cucagguggggucacucuggc

SEQ ID NO: 3305316 - RNA, 20 nt, Human
cucagguggggucacucugg

SEQ ID NO: 3305317 - RNA, 19 nt, Human
cucagguggggucacucug

SEQ ID NO: 3305318 - RNA, 22 nt, Human
cucaggugauccacccaccuca

SEQ ID NO: 3305319 - RNA, 23 nt, Human
cucaggugauccacccaccucag

SEQ ID NO: 3305320 - RNA, 20 nt, Human
cucagggccuggcucaggug

SEQ ID NO: 3305321 - RNA, 19 nt, Human
cucagggccuggcucaggu

SEQ ID NO: 3305322 - RNA, 18 nt, Human
cucagggccuggcucagg

SEQ ID NO: 3305323 - RNA, 15 nt, Human
cucaggcagguggga

SEQ ID NO: 3305324 - RNA, 18 nt, Human
cucaggcaggugggaugg

SEQ ID NO: 3305325 - RNA, 16 nt, Human
cucagaucuucugugg

SEQ ID NO: 3305326 - RNA, 18 nt, Human
cucagagagggugggagu

SEQ ID NO: 3305327 - RNA, 19 nt, Human
cucagagagggugggagug

SEQ ID NO: 3305328 - RNA, 23 nt, Human
cucagagagggugggagugggcc

SEQ ID NO: 3305329 - RNA, 16 nt, Human
cucacuguugcccagg

SEQ ID NO: 3305330 - RNA, 17 nt, Human
cucacuguugcccaggc

SEQ ID NO: 3305331 - RNA, 18 nt, Human
cucacuguugcccaggcu

SEQ ID NO: 3305332 - RNA, 14 nt, Human
cucacuguugccca

SEQ ID NO: 3305333 - RNA, 15 nt, Human
cucacuguugcccag

SEQ ID NO: 3305334 - RNA, 15 nt, Human
cucacugcagccuca

SEQ ID NO: 3305335 - RNA, 16 nt, Human
cucacugcagccucaa

SEQ ID NO: 3305336 - RNA, 14 nt, Human
cucacugcagccuc

SEQ ID NO: 3305337 - RNA, 13 nt, Human
cucagcauccugg

SEQ ID NO: 3305338 - RNA, 21 nt, Human
cucagcauccuggcacccggc

SEQ ID NO: 3305339 - RNA, 22 nt, Human
cucagcauccuggcacccggcc

SEQ ID NO: 3305340 - RNA, 20 nt, Human
cucagcaaaagaugcuucuc

SEQ ID NO: 3305341 - RNA, 19 nt, Human
cucagcaaaagaugcuucu

SEQ ID NO: 3305342 - RNA, 16 nt, Human
cucagcaggggagggu

SEQ ID NO: 3305343 - RNA, 13 nt, Human
cucagcggggaca

SEQ ID NO: 3305344 - RNA, 23 nt, Human
cucagcggggacagcuccuucug

SEQ ID NO: 3305345 - RNA, 14 nt, Human
cucagcggggacag

SEQ ID NO: 3305346 - RNA, 15 nt, Human
cucagcggggacagc

SEQ ID NO: 3305347 - RNA, 16 nt, Human
cucagcggggacagcu

SEQ ID NO: 3305348 - RNA, 18 nt, Human
cucagcggggacagcucc

SEQ ID NO: 3305349 - RNA, 19 nt, Human
cucagcggggacagcuccu

SEQ ID NO: 3305350 - RNA, 20 nt, Human
cucagcggggacagcuccuu

SEQ ID NO: 3305351 - RNA, 21 nt, Human
cucagcggggacagcuccuuc

SEQ ID NO: 3305352 - RNA, 14 nt, Human
ccugcccggcugcg

SEQ ID NO: 3305353 - RNA, 16 nt, Human
ccugcccggcugcgga

SEQ ID NO: 3305354 - RNA, 22 nt, Human
ccugccagggacagagggggug

SEQ ID NO: 3305355 - RNA, 12 nt, Human
ccugccaggcau

SEQ ID NO: 3305356 - RNA, 22 nt, Human
ccugcccuuaccugccaggaag

SEQ ID NO: 3305357 - RNA, 21 nt, Human
ccugcccuuaccugccaggaa

SEQ ID NO: 3305358 - RNA, 19 nt, Human
ccugcccuuaccugccagg

SEQ ID NO: 3305359 - RNA, 15 nt, Human
ccugcccugugggcc

SEQ ID NO: 3305360 - RNA, 13 nt, Human
ccugccucagccu

SEQ ID NO: 3305361 - RNA, 12 nt, Human
ccugccucagcc

SEQ ID NO: 3305362 - RNA, 11 nt, Human
ccugccucagc

SEQ ID NO: 3305363 - RNA, 14 nt, Human
ccugccuguugggc

SEQ ID NO: 3305364 - RNA, 11 nt, Human
ccugcccugug

SEQ ID NO: 3305365 - RNA, 14 nt, Human
ccugcccugugggc

SEQ ID NO: 3305366 - RNA, 12 nt, Human
ccugcccugugg

SEQ ID NO: 3305367 - RNA, 22 nt, Human
ccugccuguugggccaggagcc

SEQ ID NO: 3305368 - RNA, 18 nt, Human
ccugaaagcccugagcuu

SEQ ID NO: 3305369 - RNA, 21 nt, Human
ccugaagacucauucuucugu

SEQ ID NO: 3305370 - RNA, 14 nt, Human
ccugaaagcccuga

SEQ ID NO: 3305371 - RNA, 13 nt, Human
ccugaaagcccug

SEQ ID NO: 3305372 - RNA, 14 nt, Human
ccugaaggccccgc

SEQ ID NO: 3305373 - RNA, 19 nt, Human
ccugaaggccccgcccagg

SEQ ID NO: 3305374 - RNA, 18 nt, Human
ccugaaggccccgcccag

SEQ ID NO: 3305375 - RNA, 21 nt, Human
ccugaaggccccgcccaggcu

SEQ ID NO: 3305376 - RNA, 20 nt, Human
ccugaaggccccgcccaggc

SEQ ID NO: 3305377 - RNA, 22 nt, Human
ccugaaggccccgcccaggcuu

SEQ ID NO: 3305378 - RNA, 15 nt, Human
ccugagcugggauga

SEQ ID NO: 3305379 - RNA, 14 nt, Human
ccugaggcccagag

SEQ ID NO: 3305380 - RNA, 15 nt, Human
ccugaggcugggcuc

SEQ ID NO: 3305381 - RNA, 14 nt, Human
ccugaggcugggcu

SEQ ID NO: 3305382 - RNA, 13 nt, Human
ccugaggcugggc

SEQ ID NO: 3305383 - RNA, 17 nt, Human
ccugaggcccagagggc

SEQ ID NO: 3305384 - RNA, 16 nt, Human
ccugaggcccagaggg

SEQ ID NO: 3305385 - RNA, 15 nt, Human
ccugaggcccagagg

SEQ ID NO: 3305386 - RNA, 12 nt, Human
ccugagcuggga

SEQ ID NO: 3305387 - RNA, 22 nt, Human
ccugaagucuuuguacagacaa

SEQ ID NO: 3305388 - RNA, 20 nt, Human
ccugaagucacacagugagu

SEQ ID NO: 3305389 - RNA, 19 nt, Human
ccugaagucacacagugag

SEQ ID NO: 3305390 - RNA, 18 nt, Human
ccugagccagauuucacu

SEQ ID NO: 3305391 - RNA, 16 nt, Human
ccugagccagauuuca

SEQ ID NO: 3305392 - RNA, 12 nt, Human
ccugagccagau

SEQ ID NO: 3305393 - RNA, 15 nt, Human
ccugagccagauuuc

SEQ ID NO: 3305394 - RNA, 19 nt, Human
ccugccaauggacuaacuu

SEQ ID NO: 3305395 - RNA, 16 nt, Human
ccugccacccugggga

SEQ ID NO: 3305396 - RNA, 22 nt, Human
ccugccacccuggggagaaagu

SEQ ID NO: 3305397 - RNA, 14 nt, Human
ccugccacccuggg

SEQ ID NO: 3305398 - RNA, 12 nt, Human
ccugccacccug

SEQ ID NO: 3305399 - RNA, 13 nt, Human
ccugccacccugg

SEQ ID NO: 3305400 - RNA, 17 nt, Human
ccugcuaauuccccaga

SEQ ID NO: 3305401 - RNA, 21 nt, Human
ccugcuaauuccccagauugc

SEQ ID NO: 3305402 - RNA, 20 nt, Human
ccugccuguugggccaggag

SEQ ID NO: 3305403 - RNA, 19 nt, Human
ccugccuguugggccagga

SEQ ID NO: 3305404 - RNA, 18 nt, Human
ccugccuguugggccagg

SEQ ID NO: 3305405 - RNA, 19 nt, Human
ccuggcacccggccccugc

SEQ ID NO: 3305406 - RNA, 20 nt, Human
ccuggcacccggccccugcu

SEQ ID NO: 3305407 - RNA, 18 nt, Human
ccuggcacccggccccug

SEQ ID NO: 3305408 - RNA, 22 nt, Human
ccuggcacuauaauguaagcuc

SEQ ID NO: 3305409 - RNA, 12 nt, Human
ccuggcacugcu

SEQ ID NO: 3305410 - RNA, 14 nt, Human
ccuggcccacugca

SEQ ID NO: 3305411 - RNA, 13 nt, Human
ccuggcccacugc

SEQ ID NO: 3305412 - RNA, 21 nt, Human
ccuggccagaugcaccagccc

SEQ ID NO: 3305413 - RNA, 23 nt, Human
ccuggccagaugcaccagcccuu

SEQ ID NO: 3305414 - RNA, 20 nt, Human
ccuggccagaugcaccagcc

SEQ ID NO: 3305415 - RNA, 23 nt, Human
ccuggcaugggaaugaaugucag

SEQ ID NO: 3305416 - RNA, 13 nt, Human
ccuggcaugggaa

SEQ ID NO: 3305417 - RNA, 16 nt, Human
ccuggcacugcuucca

SEQ ID NO: 3305418 - RNA, 13 nt, Human
ccuggcacugcuu

SEQ ID NO: 3305419 - RNA, 16 nt, Human
ccuggcccacugcauc

SEQ ID NO: 3305420 - RNA, 16 nt, Human
ccugggagugagcugg

SEQ ID NO: 3305421 - RNA, 22 nt, Human
ccugggaggucaaggcugcagu

SEQ ID NO: 3305422 - RNA, 16 nt, Human
ccugggcagaaggaag

SEQ ID NO: 3305423 - RNA, 18 nt, Human
ccugggagugagcugguu

SEQ ID NO: 3305424 - RNA, 15 nt, Human
ccugggcagaaggaa

SEQ ID NO: 3305425 - RNA, 18 nt, Human
ccugggggcugggcagag

SEQ ID NO: 3305426 - RNA, 21 nt, Human
ccugggggcugggcagaggaa

SEQ ID NO: 3305427 - RNA, 20 nt, Human
ccugggggcugggcagagga

SEQ ID NO: 3305428 - RNA, 19 nt, Human
ccugggggcugggcagagg

SEQ ID NO: 3305429 - RNA, 13 nt, Human
ccugguggcagug

SEQ ID NO: 3305430 - RNA, 14 nt, Human
ccugguggcagugg

SEQ ID NO: 3305431 - RNA, 10 nt, Human
ccuguaccuc

SEQ ID NO: 3305432 - RNA, 16 nt, Human
ccuguagagugggagc

SEQ ID NO: 3305433 - RNA, 15 nt, Human
ccuguagagugggag

SEQ ID NO: 3305434 - RNA, 13 nt, Human
ccuguagcccuaa

SEQ ID NO: 3305435 - RNA, 15 nt, Human
ccugucccccugaca

SEQ ID NO: 3305436 - RNA, 14 nt, Human
ccugucccccugac

SEQ ID NO: 3305437 - RNA, 13 nt, Human
ccugucccccuga

SEQ ID NO: 3305438 - RNA, 12 nt, Human
ccugucccccug

SEQ ID NO: 3305439 - RNA, 14 nt, Human
ccugguggcagcug

SEQ ID NO: 3305440 - RNA, 22 nt, Human
ccugguggcagcucaccucucc

SEQ ID NO: 3305441 - RNA, 21 nt, Human
ccugguggcagcucaccucuc

SEQ ID NO: 3305442 - RNA, 19 nt, Human
ccugguggcagcucaccuc

SEQ ID NO: 3305443 - RNA, 15 nt, Human
ccugguggcagcugc

SEQ ID NO: 3305444 - RNA, 16 nt, Human
ccugguggcagcugcg

SEQ ID NO: 3305445 - RNA, 17 nt, Human
ccugguggcagcugcgg

SEQ ID NO: 3305446 - RNA, 18 nt, Human
ccugguggcagcugcggu

SEQ ID NO: 3305447 - RNA, 13 nt, Human
ccuuccaggggug

SEQ ID NO: 3305448 - RNA, 22 nt, Human
ccuuccaggggugggacacccu

SEQ ID NO: 3305449 - RNA, 17 nt, Human
ccuuccauggacuuugu

SEQ ID NO: 3305450 - RNA, 16 nt, Human
ccuucucuccagcccc

SEQ ID NO: 3305451 - RNA, 15 nt, Human
ccuucucuccagccc

SEQ ID NO: 3305452 - RNA, 13 nt, Human
ccuucucuccagc

SEQ ID NO: 3305453 - RNA, 12 nt, Human
ccuucucuccag

SEQ ID NO: 3305454 - RNA, 19 nt, Human
ccugugccucugggacugg

SEQ ID NO: 3305455 - RNA, 20 nt, Human
ccugugccucugggacugga

SEQ ID NO: 3305456 - RNA, 20 nt, Human
ccugugggcccccaaaugga

SEQ ID NO: 3305457 - RNA, 20 nt, Human
ccuguggaugauaaaacaca

SEQ ID NO: 3305458 - RNA, 15 nt, Human
ccuuggauugucccc

SEQ ID NO: 3305459 - RNA, 22 nt, Human
ccuuggcucaaguccucuuuuc

SEQ ID NO: 3305460 - RNA, 18 nt, Human
ccuugacagggcacaccg

SEQ ID NO: 3305461 - RNA, 21 nt, Human
ccuugacagggcacaccgggc

SEQ ID NO: 3305462 - RNA, 18 nt, Human
ccuucucuccagccccug

SEQ ID NO: 3305463 - RNA, 17 nt, Human
ccuucucuccagccccu

SEQ ID NO: 3305464 - RNA, 14 nt, Human
ccuuggcugcaggg

SEQ ID NO: 3305465 - RNA, 16 nt, Human
ccuuggcugcagggag

SEQ ID NO: 3305466 - RNA, 14 nt, Human
ccuuggggagcagg

SEQ ID NO: 3305467 - RNA, 20 nt, Human
ccuuggugucgggcaugaca

SEQ ID NO: 3305468 - RNA, 19 nt, Human
ccuuggugucgggcaugac

SEQ ID NO: 3305469 - RNA, 19 nt, Human
ccuucucuccagccccugg

SEQ ID NO: 3305470 - RNA, 14 nt, Human
ccuuuguccccacc

SEQ ID NO: 3305471 - RNA, 18 nt, Human
ccuuuguccccaccgcag

SEQ ID NO: 3305472 - RNA, 16 nt, Human
ccuuuguccccaccgc

SEQ ID NO: 3305473 - RNA, 24 nt, Human
ccuuuguauucucuccuguaccuc

SEQ ID NO: 3305474 - RNA, 23 nt, Human
ccuuuguauucucuccuguaccu

SEQ ID NO: 3305475 - RNA, 22 nt, Human
ccuuuguauucucuccuguacc

SEQ ID NO: 3305476 - RNA, 14 nt, Human
ccuuugugaggaag

SEQ ID NO: 3305477 - RNA, 23 nt, Human
ccuuuguccccaccgcagacagg

SEQ ID NO: 3305478 - RNA, 22 nt, Human
ccuuuguccccaccgcagacag

SEQ ID NO: 3305479 - RNA, 23 nt, Human
ccuuugugaggaagccgcugggg

SEQ ID NO: 3305480 - RNA, 17 nt, Human
ccuuugugaggaagccg

SEQ ID NO: 3305481 - RNA, 16 nt, Human
ccuuugugaggaagcc

SEQ ID NO: 3305482 - RNA, 15 nt, Human
ccuuugugaggaagc

SEQ ID NO: 3305483 - RNA, 19 nt, Human
ccuuuuuuauacauaaaca

SEQ ID NO: 3305484 - RNA, 15 nt, Human
ccuuuuuuggcugcu

SEQ ID NO: 3305485 - RNA, 21 nt, Human
cgaacauguuuuucuucuccc

SEQ ID NO: 3305486 - RNA, 23 nt, Human
cgaaagggacuuggaagcuccgc

SEQ ID NO: 3305487 - RNA, 22 nt, Human
ccuuuuuuggcugcugaaggcu

SEQ ID NO: 3305488 - RNA, 20 nt, Human
ccuuuuuuggcugcugaagg

SEQ ID NO: 3305489 - RNA, 18 nt, Human
ccuuuuuuggcugcugaa

SEQ ID NO: 3305490 - RNA, 17 nt, Human
ccuuuuuuggcugcuga

SEQ ID NO: 3305491 - RNA, 15 nt, Human
cgaauagcugggacu

SEQ ID NO: 3305492 - RNA, 16 nt, Human
cgaauagcugggacua

SEQ ID NO: 3305493 - RNA, 11 nt, Human
cgaauauugcu

SEQ ID NO: 3305494 - RNA, 14 nt, Human
cgaauauugcugau

SEQ ID NO: 3305495 - RNA, 12 nt, Human
cgaauauugcug

SEQ ID NO: 3305496 - RNA, 17 nt, Human
cgaauauugcugauggu

SEQ ID NO: 3305497 - RNA, 15 nt, Human
cgaauauugcugaug

SEQ ID NO: 3305498 - RNA, 16 nt, Human
cgggaagggggcuggg

SEQ ID NO: 3305499 - RNA, 20 nt, Human
cgggaagggggcugggacau

SEQ ID NO: 3305500 - RNA, 19 nt, Human
cgggaagggggcugggaca

SEQ ID NO: 3305501 - RNA, 13 nt, Human
cggcuggccuggc

SEQ ID NO: 3305502 - RNA, 23 nt, Human
cggcuggcagcccaccccucaac

SEQ ID NO: 3305503 - RNA, 12 nt, Human
cggccaggccag

SEQ ID NO: 3305504 - RNA, 20 nt, Human
cggccaggccagagggagug

SEQ ID NO: 3305505 - RNA, 11 nt, Human
cggccaggcca

SEQ ID NO: 3305506 - RNA, 14 nt, Human
cggcuggcagccca

SEQ ID NO: 3305507 - RNA, 19 nt, Human
cgcgguggcucacgccugu

SEQ ID NO: 3305508 - RNA, 14 nt, Human
cgcgacaaugcaaa

SEQ ID NO: 3305509 - RNA, 24 nt, Human
cgcuacccgggaagggggcuggga

SEQ ID NO: 3305510 - RNA, 21 nt, Human
cgcuacccgggaagggggcug

SEQ ID NO: 3305511 - RNA, 18 nt, Human
cgcuacccgggaaggggg

SEQ ID NO: 3305512 - RNA, 17 nt, Human
cgcuacccgggaagggg

SEQ ID NO: 3305513 - RNA, 19 nt, Human
cgcagcccugcagagggca

SEQ ID NO: 3305514 - RNA, 18 nt, Human
cgcagcccugcagagggc

SEQ ID NO: 3305515 - RNA, 13 nt, Human
cgcccagucugga

SEQ ID NO: 3305516 - RNA, 19 nt, Human
cgcccagucuggaaugcag

SEQ ID NO: 3305517 - RNA, 21 nt, Human
cgcccagucuggaaugcagug

SEQ ID NO: 3305518 - RNA, 12 nt, Human
cgcccagucugg

SEQ ID NO: 3305519 - RNA, 18 nt, Human
cgcugugcugcccugccc

SEQ ID NO: 3305520 - RNA, 19 nt, Human
cgcugugcugcccugccca

SEQ ID NO: 3305521 - RNA, 23 nt, Human
cgcugugcugcccugcccaccug

SEQ ID NO: 3305522 - RNA, 21 nt, Human
cgcugugcugcccugcccacc

SEQ ID NO: 3305523 - RNA, 11 nt, Human
cgcugugcugc

SEQ ID NO: 3305524 - RNA, 13 nt, Human
cgcugugcugccc

SEQ ID NO: 3305525 - RNA, 15 nt, Human
cggagaaaggaaggg

SEQ ID NO: 3305526 - RNA, 21 nt, Human
cggacagccacggccaggcca

SEQ ID NO: 3305527 - RNA, 22 nt, Human
cggacagccacggccaggccag

SEQ ID NO: 3305528 - RNA, 14 nt, Human
cgcuuucuacccag

SEQ ID NO: 3305529 - RNA, 16 nt, Human
cgcuuucuacccagcg

SEQ ID NO: 3305530 - RNA, 16 nt, Human
cggaauaguuggcuag

SEQ ID NO: 3305531 - RNA, 17 nt, Human
cggaauaguuggcuagg

SEQ ID NO: 3305532 - RNA, 14 nt, Human
cggaauaguuggcu

SEQ ID NO: 3305533 - RNA, 20 nt, Human
cggacagccacggccaggcc

SEQ ID NO: 3305534 - RNA, 17 nt, Human
cgcacugggcuugggga

SEQ ID NO: 3305535 - RNA, 17 nt, Human
cgcagcccugcagaggg

SEQ ID NO: 3305536 - RNA, 15 nt, Human
cgcagcccugcagag

SEQ ID NO: 3305537 - RNA, 20 nt, Human
cgcagcauauucaggaagcu

SEQ ID NO: 3305538 - RNA, 19 nt, Human
cgcagcauauucaggaagc

SEQ ID NO: 3305539 - RNA, 13 nt, Human
cgcacugggcuug

SEQ ID NO: 3305540 - RNA, 18 nt, Human
cgagcccugguggcagug

SEQ ID NO: 3305541 - RNA, 14 nt, Human
cgaggacagggagg

SEQ ID NO: 3305542 - RNA, 19 nt, Human
cgagcccugguggcagugg

SEQ ID NO: 3305543 - RNA, 16 nt, Human
cgaggacagggaggug

SEQ ID NO: 3305544 - RNA, 22 nt, Human
ccagacacauguccaagaagcc

SEQ ID NO: 3305545 - RNA, 20 nt, Human
ccagacacauguccaagaag

SEQ ID NO: 3305546 - RNA, 17 nt, Human
ccagacacauguccaag

SEQ ID NO: 3305547 - RNA, 14 nt, Human
ccagacccggcugc

SEQ ID NO: 3305548 - RNA, 15 nt, Human
ccagacccggcugcg

SEQ ID NO: 3305549 - RNA, 23 nt, Human
ccacuggugacaugucuuuucuu

SEQ ID NO: 3305550 - RNA, 15 nt, Human
ccacugugaagagaa

SEQ ID NO: 3305551 - RNA, 14 nt, Human
ccacugugaagaga

SEQ ID NO: 3305552 - RNA, 22 nt, Human
ccacugcuuuuggucuguguga

SEQ ID NO: 3305553 - RNA, 20 nt, Human
ccacugcuuuuggucugugu

SEQ ID NO: 3305554 - RNA, 11 nt, Human
ccacugcucug

SEQ ID NO: 3305555 - RNA, 12 nt, Human
ccacugcucugg

SEQ ID NO: 3305556 - RNA, 13 nt, Human
ccacugcucuggu

SEQ ID NO: 3305557 - RNA, 15 nt, Human
ccacugcucugguua

SEQ ID NO: 3305558 - RNA, 23 nt, Human
ccacugcaucguuucaucuucca

SEQ ID NO: 3305559 - RNA, 21 nt, Human
ccacugcaucguuucaucuuc

SEQ ID NO: 3305560 - RNA, 22 nt, Human
ccacuuuuguucuugguuugua

SEQ ID NO: 3305561 - RNA, 19 nt, Human
ccacugugccaugugccag

SEQ ID NO: 3305562 - RNA, 15 nt, Human
ccacugugccaugug

SEQ ID NO: 3305563 - RNA, 16 nt, Human
ccacugugccaugugc

SEQ ID NO: 3305564 - RNA, 22 nt, Human
ccagaagaaaauagugguguga

SEQ ID NO: 3305565 - RNA, 15 nt, Human
ccaccugccagggac

SEQ ID NO: 3305566 - RNA, 12 nt, Human
ccaccugccagg

SEQ ID NO: 3305567 - RNA, 14 nt, Human
ccaccugccaggga

SEQ ID NO: 3305568 - RNA, 13 nt, Human
ccaccugccaggg

SEQ ID NO: 3305569 - RNA, 20 nt, Human
ccaccuggccucugcacucc

SEQ ID NO: 3305570 - RNA, 18 nt, Human
ccaccuggccucugcacu

SEQ ID NO: 3305571 - RNA, 13 nt, Human
ccaccuggccucu

SEQ ID NO: 3305572 - RNA, 20 nt, Human
ccaccucucucacuccuuga

SEQ ID NO: 3305573 - RNA, 19 nt, Human
ccaccucucucacuccuug

SEQ ID NO: 3305574 - RNA, 16 nt, Human
ccaccucucucacucc

SEQ ID NO: 3305575 - RNA, 14 nt, Human
ccaccucucucacu

SEQ ID NO: 3305576 - RNA, 11 nt, Human
ccacccugcuc

SEQ ID NO: 3305577 - RNA, 12 nt, Human
ccacccugcucu

SEQ ID NO: 3305578 - RNA, 14 nt, Human
ccacccuccuuuca

SEQ ID NO: 3305579 - RNA, 18 nt, Human
ccacccugaaagcccuga

SEQ ID NO: 3305580 - RNA, 19 nt, Human
ccaccccucaacaccucug

SEQ ID NO: 3305581 - RNA, 19 nt, Human
ccacccccacccaagggcc

SEQ ID NO: 3305582 - RNA, 22 nt, Human
ccagccuugaccauucuccacc

SEQ ID NO: 3305583 - RNA, 23 nt, Human
ccagccuugaccauucuccaccu

SEQ ID NO: 3305584 - RNA, 13 nt, Human
ccagccuggguga

SEQ ID NO: 3305585 - RNA, 16 nt, Human
ccagcccacuucugcc

SEQ ID NO: 3305586 - RNA, 17 nt, Human
ccagcccacuucugcca

SEQ ID NO: 3305587 - RNA, 23 nt, Human
ccagcaggcucucaggccagcug

SEQ ID NO: 3305588 - RNA, 21 nt, Human
ccagcaggcucucaggccagc

SEQ ID NO: 3305589 - RNA, 20 nt, Human
ccagcaggcucucaggccag

SEQ ID NO: 3305590 - RNA, 19 nt, Human
ccagcaggcucucaggcca

SEQ ID NO: 3305591 - RNA, 19 nt, Human
ccagccgccaugcuccugg

SEQ ID NO: 3305592 - RNA, 17 nt, Human
ccagccgagauagccaa

SEQ ID NO: 3305593 - RNA, 22 nt, Human
ccagccgagauagccaaggcca

SEQ ID NO: 3305594 - RNA, 20 nt, Human
ccagccgagauagccaaggc

SEQ ID NO: 3305595 - RNA, 17 nt, Human
ccagcaagugagagcug

SEQ ID NO: 3305596 - RNA, 18 nt, Human
ccagcaagugagagcugg

SEQ ID NO: 3305597 - RNA, 19 nt, Human
ccagcaagugagagcuggg

SEQ ID NO: 3305598 - RNA, 16 nt, Human
ccagcaagugagagcu

SEQ ID NO: 3305599 - RNA, 18 nt, Human
ccagcaccaucucuccuc

SEQ ID NO: 3305600 - RNA, 17 nt, Human
ccagcaccaucucuccu

SEQ ID NO: 3305601 - RNA, 16 nt, Human
ccagcaggcucucagg

SEQ ID NO: 3305602 - RNA, 18 nt, Human
ccagcaggcucucaggcc

SEQ ID NO: 3305603 - RNA, 17 nt, Human
ccagcaggcucucaggc

SEQ ID NO: 3305604 - RNA, 14 nt, Human
ccagauugcaacag

SEQ ID NO: 3305605 - RNA, 16 nt, Human
ccagauugcaacaggc

SEQ ID NO: 3305606 - RNA, 14 nt, Human
ccagagcccaccuu

SEQ ID NO: 3305607 - RNA, 23 nt, Human
ccagauugcaacaggcugggcuu

SEQ ID NO: 3305608 - RNA, 22 nt, Human
ccagauugcaacaggcugggcu

SEQ ID NO: 3305609 - RNA, 15 nt, Human
ccagauuucacucuc

SEQ ID NO: 3305610 - RNA, 19 nt, Human
ccagauuucacucuccuug

SEQ ID NO: 3305611 - RNA, 18 nt, Human
ccagauuucacucuccuu

SEQ ID NO: 3305612 - RNA, 16 nt, Human
ccaucauugaaaucuu

SEQ ID NO: 3305613 - RNA, 14 nt, Human
ccaucauugaaauc

SEQ ID NO: 3305614 - RNA, 13 nt, Human
ccaucuacccucc

SEQ ID NO: 3305615 - RNA, 15 nt, Human
ccaucucuccuccuu

SEQ ID NO: 3305616 - RNA, 21 nt, Human
ccaucucacacaugagcauca

SEQ ID NO: 3305617 - RNA, 20 nt, Human
ccaucucacacaugagcauc

SEQ ID NO: 3305618 - RNA, 18 nt, Human
ccaucucacacaugagca

SEQ ID NO: 3305619 - RNA, 17 nt, Human
ccaucucacacaugagc

SEQ ID NO: 3305620 - RNA, 15 nt, Human
ccaucucacacauga

SEQ ID NO: 3305621 - RNA, 14 nt, Human
ccaucucacacaug

SEQ ID NO: 3305622 - RNA, 12 nt, Human
ccaucaugucug

SEQ ID NO: 3305623 - RNA, 13 nt, Human
ccaucaugucugg

SEQ ID NO: 3305624 - RNA, 12 nt, Human
ccaucauugaaa

SEQ ID NO: 3305625 - RNA, 14 nt, Human
ccaucaagccacca

SEQ ID NO: 3305626 - RNA, 13 nt, Human
ccaucaagccacc

SEQ ID NO: 3305627 - RNA, 16 nt, Human
ccaucaagccaccaac

SEQ ID NO: 3305628 - RNA, 15 nt, Human
ccauaugccugggca

SEQ ID NO: 3305629 - RNA, 12 nt, Human
ccaucaagccac

SEQ ID NO: 3305630 - RNA, 13 nt, Human
ccauaugccuggg

SEQ ID NO: 3305631 - RNA, 14 nt, Human
ccagugugacaagg

SEQ ID NO: 3305632 - RNA, 23 nt, Human
ccagugugacaaggauugcuacu

SEQ ID NO: 3305633 - RNA, 21 nt, Human
ccaggugcuaggaacacuccu

SEQ ID NO: 3305634 - RNA, 24 nt, Human
ccaggugcacaagcuccaagcucc

SEQ ID NO: 3305635 - RNA, 16 nt, Human
ccagguuucuaugugu

SEQ ID NO: 3305636 - RNA, 13 nt, Human
ccagguuuaagcu

SEQ ID NO: 3305637 - RNA, 20 nt, Human
ccaguaaaugggggugcauu

SEQ ID NO: 3305638 - RNA, 22 nt, Human
ccaguaaaugggggugcauuug

SEQ ID NO: 3305639 - RNA, 21 nt, Human
ccaguaaaugggggugcauuu

SEQ ID NO: 3305640 - RNA, 14 nt, Human
ccaggccccugcca

SEQ ID NO: 3305641 - RNA, 13 nt, Human
ccaggccccugcc

SEQ ID NO: 3305642 - RNA, 15 nt, Human
ccaggccccugccac

SEQ ID NO: 3305643 - RNA, 16 nt, Human
ccaggccccugccacc

SEQ ID NO: 3305644 - RNA, 14 nt, Human
ccaggcccucugcc

SEQ ID NO: 3305645 - RNA, 13 nt, Human
ccaggcccucugc

SEQ ID NO: 3305646 - RNA, 14 nt, Human
ccaggaggccagcc

SEQ ID NO: 3305647 - RNA, 18 nt, Human
ccaggaggccagccuuga

SEQ ID NO: 3305648 - RNA, 15 nt, Human
ccaggaggccagccu

SEQ ID NO: 3305649 - RNA, 20 nt, Human
ccaggaggccagccuugacc

SEQ ID NO: 3305650 - RNA, 21 nt, Human
ccaggccacaagacccuugug

SEQ ID NO: 3305651 - RNA, 21 nt, Human
ccaggcuuagucacugagaca

SEQ ID NO: 3305652 - RNA, 23 nt, Human
ccaggcuuagucacugagacagc

SEQ ID NO: 3305653 - RNA, 22 nt, Human
ccaggcuuagucacugagacag

SEQ ID NO: 3305654 - RNA, 23 nt, Human
ccaggcugggagagccuuccagg

SEQ ID NO: 3305655 - RNA, 15 nt, Human
ccaggcccucugccc

SEQ ID NO: 3305656 - RNA, 21 nt, Human
cccacgcuggagugcagugag

SEQ ID NO: 3305657 - RNA, 19 nt, Human
cccacgcccccacugguga

SEQ ID NO: 3305658 - RNA, 17 nt, Human
cccacgcccccacuggu

SEQ ID NO: 3305659 - RNA, 15 nt, Human
cccacgcccccacug

SEQ ID NO: 3305660 - RNA, 15 nt, Human
cccaccuuggcucaa

SEQ ID NO: 3305661 - RNA, 22 nt, Human
cccaccuuggcucaaguccucu

SEQ ID NO: 3305662 - RNA, 14 nt, Human
cccaccuuggcugc

SEQ ID NO: 3305663 - RNA, 15 nt, Human
cccaccuuggcugca

SEQ ID NO: 3305664 - RNA, 12 nt, Human
cccaccucagcc

SEQ ID NO: 3305665 - RNA, 14 nt, Human
cccaccucagccuc

SEQ ID NO: 3305666 - RNA, 15 nt, Human
cccaccucagccucc

SEQ ID NO: 3305667 - RNA, 12 nt, Human
cccaccuuggcu

SEQ ID NO: 3305668 - RNA, 21 nt, Human
cccaccucagccucccaaagu

SEQ ID NO: 3305669 - RNA, 13 nt, Human
cccaccucucuca

SEQ ID NO: 3305670 - RNA, 17 nt, Human
cccaccucucucacucc

SEQ ID NO: 3305671 - RNA, 14 nt, Human
cccaccucucucac

SEQ ID NO: 3305672 - RNA, 21 nt, Human
ccauuuuguauuuuacuaaua

SEQ ID NO: 3305673 - RNA, 20 nt, Human
ccauuuugcugucccuuuuc

SEQ ID NO: 3305674 - RNA, 14 nt, Human
cccaagggccuggc

SEQ ID NO: 3305675 - RNA, 12 nt, Human
cccaagggccug

SEQ ID NO: 3305676 - RNA, 17 nt, Human
cccacaggaucagucug

SEQ ID NO: 3305677 - RNA, 13 nt, Human
cccacaggaucag

SEQ ID NO: 3305678 - RNA, 16 nt, Human
cccaagggccuggccu

SEQ ID NO: 3305679 - RNA, 18 nt, Human
ccauguuuuguuuacggu

SEQ ID NO: 3305680 - RNA, 15 nt, Human
ccauucugccugccc

SEQ ID NO: 3305681 - RNA, 13 nt, Human
ccauuugcuccuu

SEQ ID NO: 3305682 - RNA, 22 nt, Human
cccgaauagcugggacuacagg

SEQ ID NO: 3305683 - RNA, 20 nt, Human
ccccuuccauggacuuuguu

SEQ ID NO: 3305684 - RNA, 13 nt, Human
ccccuuccaugga

SEQ ID NO: 3305685 - RNA, 20 nt, Human
cccgcccaggcuuagucacu

SEQ ID NO: 3305686 - RNA, 23 nt, Human
cccgcuaagagggagggagggcu

SEQ ID NO: 3305687 - RNA, 22 nt, Human
cccgcuaagagggagggagggc

SEQ ID NO: 3305688 - RNA, 15 nt, Human
ccccuggaugcagcc

SEQ ID NO: 3305689 - RNA, 19 nt, Human
ccccuggaugcagccucac

SEQ ID NO: 3305690 - RNA, 18 nt, Human
ccccuggaugcagccuca

SEQ ID NO: 3305691 - RNA, 17 nt, Human
ccccugcuggguguggc

SEQ ID NO: 3305692 - RNA, 14 nt, Human
ccccugcugggugu

SEQ ID NO: 3305693 - RNA, 11 nt, Human
ccccugcuggu

SEQ ID NO: 3305694 - RNA, 13 nt, Human
ccccugcugguuc

SEQ ID NO: 3305695 - RNA, 15 nt, Human
ccccugcugguucag

SEQ ID NO: 3305696 - RNA, 20 nt, Human
ccccugcugguucaggguug

SEQ ID NO: 3305697 - RNA, 17 nt, Human
ccccugcccggcugcgg

SEQ ID NO: 3305698 - RNA, 19 nt, Human
ccccugcccggcugcggaa

SEQ ID NO: 3305699 - RNA, 12 nt, Human
ccccuccaugug

SEQ ID NO: 3305700 - RNA, 22 nt, Human
ccccucagggucccugguggca

SEQ ID NO: 3305701 - RNA, 17 nt, Human
cccccugacaacacuca

SEQ ID NO: 3305702 - RNA, 19 nt, Human
cccccugacaacacucauu

SEQ ID NO: 3305703 - RNA, 12 nt, Human
cccccagccugc

SEQ ID NO: 3305704 - RNA, 23 nt, Human
ccccucaacucuccuccagaguc

SEQ ID NO: 3305705 - RNA, 16 nt, Human
ccccucaacaccucug

SEQ ID NO: 3305706 - RNA, 15 nt, Human
ccccucaacaccucu

SEQ ID NO: 3305707 - RNA, 14 nt, Human
ccccagugcccaca

SEQ ID NO: 3305708 - RNA, 15 nt, Human
ccccagugcccacag

SEQ ID NO: 3305709 - RNA, 16 nt, Human
ccccagugcccacagg

SEQ ID NO: 3305710 - RNA, 20 nt, Human
ccccagugcccacaggauca

SEQ ID NO: 3305711 - RNA, 22 nt, Human
ccccaggugguuauggagaggg

SEQ ID NO: 3305712 - RNA, 13 nt, Human
cccccacugguga

SEQ ID NO: 3305713 - RNA, 11 nt, Human
cccccacuggu

SEQ ID NO: 3305714 - RNA, 15 nt, Human
cccccacuggugaca

SEQ ID NO: 3305715 - RNA, 24 nt, Human
cccccacccaagggccuggccuga

SEQ ID NO: 3305716 - RNA, 13 nt, Human
cccccacccaagg

SEQ ID NO: 3305717 - RNA, 14 nt, Human
ccccauccucugua

SEQ ID NO: 3305718 - RNA, 22 nt, Human
cccaugagccucagcauccugg

SEQ ID NO: 3305719 - RNA, 14 nt, Human
cccaugagccucag

SEQ ID NO: 3305720 - RNA, 18 nt, Human
cccaugcugcccugugag

SEQ ID NO: 3305721 - RNA, 14 nt, Human
cccaguugggugga

SEQ ID NO: 3305722 - RNA, 19 nt, Human
cccaucucuacaaaaagca

SEQ ID NO: 3305723 - RNA, 14 nt, Human
ccccacuggugaca

SEQ ID NO: 3305724 - RNA, 19 nt, Human
ccccaccgcagacaggacc

SEQ ID NO: 3305725 - RNA, 15 nt, Human
ccccaccgcagacag

SEQ ID NO: 3305726 - RNA, 21 nt, Human
ccccacccaagggccuggccu

SEQ ID NO: 3305727 - RNA, 13 nt, Human
ccgggcucugccu

SEQ ID NO: 3305728 - RNA, 18 nt, Human
ccgggcucugccucccau

SEQ ID NO: 3305729 - RNA, 15 nt, Human
ccgggcucugccucc

SEQ ID NO: 3305730 - RNA, 14 nt, Human
ccgggcucugccuc

SEQ ID NO: 3305731 - RNA, 18 nt, Human
ccgugaggccagagacac

SEQ ID NO: 3305732 - RNA, 15 nt, Human
ccggcuccaggcucc

SEQ ID NO: 3305733 - RNA, 16 nt, Human
ccggcuccaggcuccu

SEQ ID NO: 3305734 - RNA, 21 nt, Human
ccggcuccaggcuccuuuagc

SEQ ID NO: 3305735 - RNA, 20 nt, Human
ccgggcacucagaagacacu

SEQ ID NO: 3305736 - RNA, 22 nt, Human
ccgggcacucagaagacacuga

SEQ ID NO: 3305737 - RNA, 13 nt, Human
ccgggccacagag

SEQ ID NO: 3305738 - RNA, 11 nt, Human
ccgcuggggcc

SEQ ID NO: 3305739 - RNA, 21 nt, Human
ccgagauugcaccacugcacu

SEQ ID NO: 3305740 - RNA, 19 nt, Human
ccgagauugcaccacugca

SEQ ID NO: 3305741 - RNA, 15 nt, Human
ccgagauugcaccac

SEQ ID NO: 3305742 - RNA, 19 nt, Human
ccgagcuuugaaaauucag

SEQ ID NO: 3305743 - RNA, 14 nt, Human
ccgaguagcuggga

SEQ ID NO: 3305744 - RNA, 19 nt, Human
ccgcacugggcuuggggac

SEQ ID NO: 3305745 - RNA, 23 nt, Human
ccgcacugggcuuggggaccaga

SEQ ID NO: 3305746 - RNA, 18 nt, Human
ccuacaggagugagcacu

SEQ ID NO: 3305747 - RNA, 12 nt, Human
ccguuauuaaaa

SEQ ID NO: 3305748 - RNA, 16 nt, Human
ccgugaggccagagac

SEQ ID NO: 3305749 - RNA, 23 nt, Human
ccuaggcauuugcugaauacaga

SEQ ID NO: 3305750 - RNA, 18 nt, Human
ccuaggugacagagugag

SEQ ID NO: 3305751 - RNA, 17 nt, Human
cccucuuucccucccuu

SEQ ID NO: 3305752 - RNA, 20 nt, Human
cccucuuucccucccuuccu

SEQ ID NO: 3305753 - RNA, 12 nt, Human
cccucuuucccu

SEQ ID NO: 3305754 - RNA, 19 nt, Human
cccucugcccacucccugc

SEQ ID NO: 3305755 - RNA, 18 nt, Human
cccucugcccacucccug

SEQ ID NO: 3305756 - RNA, 15 nt, Human
cccucugcccacucc

SEQ ID NO: 3305757 - RNA, 11 nt, Human
cccucugccca

SEQ ID NO: 3305758 - RNA, 23 nt, Human
cccucccucuuucccucccuucc

SEQ ID NO: 3305759 - RNA, 14 nt, Human
cccugguggcagug

SEQ ID NO: 3305760 - RNA, 21 nt, Human
cccuguagagugggagcugag

SEQ ID NO: 3305761 - RNA, 13 nt, Human
cccugguggcagu

SEQ ID NO: 3305762 - RNA, 21 nt, Human
cccugguggcagcucaccucu

SEQ ID NO: 3305763 - RNA, 21 nt, Human
cccuggugaccagcaccaucu

SEQ ID NO: 3305764 - RNA, 20 nt, Human
cccugguggcagcucaccuc

SEQ ID NO: 3305765 - RNA, 14 nt, Human
cccuguucuggcag

SEQ ID NO: 3305766 - RNA, 13 nt, Human
cccuguucuggca

SEQ ID NO: 3305767 - RNA, 16 nt, Human
cccuguuuguuucuga

SEQ ID NO: 3305768 - RNA, 19 nt, Human
cccuguuuguuucugaaag

SEQ ID NO: 3305769 - RNA, 19 nt, Human
cccuuaccucggugccuuc

SEQ ID NO: 3305770 - RNA, 17 nt, Human
cccuuaccugccaggaa

SEQ ID NO: 3305771 - RNA, 23 nt, Human
cccuuaccugccaggaagccagc

SEQ ID NO: 3305772 - RNA, 20 nt, Human
cccuuaccugccaggaagcc

SEQ ID NO: 3305773 - RNA, 22 nt, Human
cccuugccgucuaccugagggg

SEQ ID NO: 3305774 - RNA, 23 nt, Human
cccuuagcagggaaacagcuaau

SEQ ID NO: 3305775 - RNA, 14 nt, Human
cccuuagcagggaa

SEQ ID NO: 3305776 - RNA, 17 nt, Human
cccuuacgugaguccug

SEQ ID NO: 3305777 - RNA, 15 nt, Human
cccuuacgugagucc

SEQ ID NO: 3305778 - RNA, 12 nt, Human
cccuuccaugga

SEQ ID NO: 3305779 - RNA, 20 nt, Human
cccugcagagggcacagaaa

SEQ ID NO: 3305780 - RNA, 12 nt, Human
cccugaggccca

SEQ ID NO: 3305781 - RNA, 21 nt, Human
cccugcccugugggcccccaa

SEQ ID NO: 3305782 - RNA, 11 nt, Human
cccugccuccu

SEQ ID NO: 3305783 - RNA, 22 nt, Human
cccugcucuccgaccagacacc

SEQ ID NO: 3305784 - RNA, 21 nt, Human
cccugcucuccgaccagacac

SEQ ID NO: 3305785 - RNA, 24 nt, Human
cuggccuggccccucagggucccu

SEQ ID NO: 3305786 - RNA, 19 nt, Human
cuggccuggccccucaggg

SEQ ID NO: 3305787 - RNA, 16 nt, Human
cuggccucugcacucc

SEQ ID NO: 3305788 - RNA, 21 nt, Human
cuggccucugcacuccccugc

SEQ ID NO: 3305789 - RNA, 20 nt, Human
cuggccucugcacuccccug

SEQ ID NO: 3305790 - RNA, 18 nt, Human
cuggccucugcacucccc

SEQ ID NO: 3305791 - RNA, 14 nt, Human
cuggcgugcagugg

SEQ ID NO: 3305792 - RNA, 15 nt, Human
cuggcgugcaguggu

SEQ ID NO: 3305793 - RNA, 22 nt, Human
cuggcucuuccaggcugggaga

SEQ ID NO: 3305794 - RNA, 21 nt, Human
cuggcucuuccaggcugggag

SEQ ID NO: 3305795 - RNA, 24 nt, Human
cuggcucuuccaggcugggagagc

SEQ ID NO: 3305796 - RNA, 20 nt, Human
cuggcucuuccaggcuggga

SEQ ID NO: 3305797 - RNA, 15 nt, Human
cuggcccacugcauc

SEQ ID NO: 3305798 - RNA, 14 nt, Human
cuggccagaugcac

SEQ ID NO: 3305799 - RNA, 20 nt, Human
cuggagugcagugagccgag

SEQ ID NO: 3305800 - RNA, 20 nt, Human
cuggcacccggccccugcug

SEQ ID NO: 3305801 - RNA, 21 nt, Human
cuggcacccggccccugcugg

SEQ ID NO: 3305802 - RNA, 19 nt, Human
cuggcacccggccccugcu

SEQ ID NO: 3305803 - RNA, 18 nt, Human
cuggcacugcuuccagug

SEQ ID NO: 3305804 - RNA, 23 nt, Human
cuggcacugcuuccagugaggcu

SEQ ID NO: 3305805 - RNA, 20 nt, Human
cuggcacugcuuccagugag

SEQ ID NO: 3305806 - RNA, 19 nt, Human
cuggcacugcuuccaguga

SEQ ID NO: 3305807 - RNA, 14 nt, Human
cuggagugcaguga

SEQ ID NO: 3305808 - RNA, 15 nt, Human
cuggagugcagugag

SEQ ID NO: 3305809 - RNA, 16 nt, Human
cuggagugcagugagc

SEQ ID NO: 3305810 - RNA, 17 nt, Human
cuggagugcagugagcc

SEQ ID NO: 3305811 - RNA, 22 nt, Human
cuggagguacgaaaagagggga

SEQ ID NO: 3305812 - RNA, 17 nt, Human
cuggagguacgaaaaga

SEQ ID NO: 3305813 - RNA, 23 nt, Human
cuggacaggcauguucucugagg

SEQ ID NO: 3305814 - RNA, 14 nt, Human
cuggacaggcaugu

SEQ ID NO: 3305815 - RNA, 17 nt, Human
cuggacaggcauguucu

SEQ ID NO: 3305816 - RNA, 16 nt, Human
cuggaccuugaacugg

SEQ ID NO: 3305817 - RNA, 15 nt, Human
cuggacccuguggau

SEQ ID NO: 3305818 - RNA, 21 nt, Human
cuggaccuugaacuggguacu

SEQ ID NO: 3305819 - RNA, 17 nt, Human
cuggaccuugaacuggg

SEQ ID NO: 3305820 - RNA, 20 nt, Human
cuggaccuugaacuggguac

SEQ ID NO: 3305821 - RNA, 13 nt, Human
cugcugguucagg

SEQ ID NO: 3305822 - RNA, 15 nt, Human
cugcugguucagggu

SEQ ID NO: 3305823 - RNA, 23 nt, Human
cugcugguucaggguuggccccu

SEQ ID NO: 3305824 - RNA, 15 nt, Human
cugcuuccagugagg

SEQ ID NO: 3305825 - RNA, 18 nt, Human
cugcuuccagugaggcuc

SEQ ID NO: 3305826 - RNA, 16 nt, Human
cugcuuccagugaggc

SEQ ID NO: 3305827 - RNA, 23 nt, Human
cugcuuccagugaggcucugccc

SEQ ID NO: 3305828 - RNA, 21 nt, Human
cugcuuccagugaggcucugc

SEQ ID NO: 3305829 - RNA, 20 nt, Human
cugcuuccagugaggcucug

SEQ ID NO: 3305830 - RNA, 19 nt, Human
cugcuuccagugaggcucu

SEQ ID NO: 3305831 - RNA, 15 nt, Human
cugcugcuggcuggu

SEQ ID NO: 3305832 - RNA, 14 nt, Human
cugcugcuggcugg

SEQ ID NO: 3305833 - RNA, 11 nt, Human
cugcugaaggc

SEQ ID NO: 3305834 - RNA, 15 nt, Human
cugcugcaguugcca

SEQ ID NO: 3305835 - RNA, 19 nt, Human
cugcgaccacaagaaggau

SEQ ID NO: 3305836 - RNA, 15 nt, Human
cugcuccagcuguuc

SEQ ID NO: 3305837 - RNA, 20 nt, Human
cugcuccagcuguucagcug

SEQ ID NO: 3305838 - RNA, 19 nt, Human
cugcuccagcuguucagcu

SEQ ID NO: 3305839 - RNA, 19 nt, Human
cugcucuccgaccagacac

SEQ ID NO: 3305840 - RNA, 15 nt, Human
cugccgcagcccugc

SEQ ID NO: 3305841 - RNA, 14 nt, Human
cugccgcagcccug

SEQ ID NO: 3305842 - RNA, 18 nt, Human
cugccgcagcccugcaga

SEQ ID NO: 3305843 - RNA, 17 nt, Human
cugccgcagcccugcag

SEQ ID NO: 3305844 - RNA, 17 nt, Human
cucccuucccaccucuc

SEQ ID NO: 3305845 - RNA, 16 nt, Human
cucccuucccaccucu

SEQ ID NO: 3305846 - RNA, 15 nt, Human
cucccuucccaccuc

SEQ ID NO: 3305847 - RNA, 14 nt, Human
cucccuucccaccu

SEQ ID NO: 3305848 - RNA, 12 nt, Human
cugcccuccaag

SEQ ID NO: 3305849 - RNA, 19 nt, Human
cugccucccaucacccgcu

SEQ ID NO: 3305850 - RNA, 16 nt, Human
cugccucccaucaccc

SEQ ID NO: 3305851 - RNA, 14 nt, Human
cugccucccaucac

SEQ ID NO: 3305852 - RNA, 12 nt, Human
cugccucccauc

SEQ ID NO: 3305853 - RNA, 11 nt, Human
cugccucccau

SEQ ID NO: 3305854 - RNA, 22 nt, Human
cugccucugacacacagcucug

SEQ ID NO: 3305855 - RNA, 23 nt, Human
cugccucugacacacagcucugu

SEQ ID NO: 3305856 - RNA, 20 nt, Human
cugccugcccaggccccugc

SEQ ID NO: 3305857 - RNA, 21 nt, Human
cugccugggaucccucauccu

SEQ ID NO: 3305858 - RNA, 15 nt, Human
cugccugaagucaca

SEQ ID NO: 3305859 - RNA, 15 nt, Human
cugccugcccaggcc

SEQ ID NO: 3305860 - RNA, 16 nt, Human
cugccugcccaggccc

SEQ ID NO: 3305861 - RNA, 17 nt, Human
cugccugcccaggcccc

SEQ ID NO: 3305862 - RNA, 14 nt, Human
cugccucuucucua

SEQ ID NO: 3305863 - RNA, 15 nt, Human
cugccucuucucuac

SEQ ID NO: 3305864 - RNA, 16 nt, Human
cugguuccauggccuc

SEQ ID NO: 3305865 - RNA, 19 nt, Human
cuguaauccuagcacuuug

SEQ ID NO: 3305866 - RNA, 20 nt, Human
cuguaauccuagcacuuugg

SEQ ID NO: 3305867 - RNA, 15 nt, Human
cuguacaaaguagaa

SEQ ID NO: 3305868 - RNA, 22 nt, Human
cuguaauuugugauacaaugcu

SEQ ID NO: 3305869 - RNA, 13 nt, Human
cuguacaaaguag

SEQ ID NO: 3305870 - RNA, 23 nt, Human
cugguggcagcucaccucucccu

SEQ ID NO: 3305871 - RNA, 21 nt, Human
cugguggcagcucaccucucc

SEQ ID NO: 3305872 - RNA, 13 nt, Human
cugguggcagcug

SEQ ID NO: 3305873 - RNA, 19 nt, Human
cugggggcugggcagagga

SEQ ID NO: 3305874 - RNA, 18 nt, Human
cugggggcugggcagagg

SEQ ID NO: 3305875 - RNA, 15 nt, Human
cugggggaagaagcu

SEQ ID NO: 3305876 - RNA, 13 nt, Human
cugggggaagaag

SEQ ID NO: 3305877 - RNA, 23 nt, Human
cugggcuucaguggcagcugcuu

SEQ ID NO: 3305878 - RNA, 24 nt, Human
cugggcuucaguggcagcugcuuu

SEQ ID NO: 3305879 - RNA, 17 nt, Human
cuggguucuacccaggu

SEQ ID NO: 3305880 - RNA, 16 nt, Human
cuggguucuacccagg

SEQ ID NO: 3305881 - RNA, 15 nt, Human
cuggguucuacccag

SEQ ID NO: 3305882 - RNA, 14 nt, Human
cuggguucuaccca

SEQ ID NO: 3305883 - RNA, 20 nt, Human
cuggguaacuagggaagaua

SEQ ID NO: 3305884 - RNA, 22 nt, Human
cuggguaacuagggaagauaau

SEQ ID NO: 3305885 - RNA, 14 nt, Human
cuguccuacccacc

SEQ ID NO: 3305886 - RNA, 15 nt, Human
cuguccgagcuuuga

SEQ ID NO: 3305887 - RNA, 23 nt, Human
cugucucaaaaaaacacaaaagu

SEQ ID NO: 3305888 - RNA, 16 nt, Human
cugucucaaaaaaaga

SEQ ID NO: 3305889 - RNA, 18 nt, Human
cugucucaaaaaaagaaa

SEQ ID NO: 3305890 - RNA, 20 nt, Human
cugucccuuacgugaguccu

SEQ ID NO: 3305891 - RNA, 14 nt, Human
cuguccgagcuuug

SEQ ID NO: 3305892 - RNA, 22 nt, Human
cuguccccgcacugggcuuggg

SEQ ID NO: 3305893 - RNA, 19 nt, Human
cuguccccgcacugggcuu

SEQ ID NO: 3305894 - RNA, 18 nt, Human
cuguccccgcacugggcu

SEQ ID NO: 3305895 - RNA, 17 nt, Human
cuguccccgcacugggc

SEQ ID NO: 3305896 - RNA, 23 nt, Human
cuguaucccaugagccucagcau

SEQ ID NO: 3305897 - RNA, 22 nt, Human
cuguaucccaugagccucagca

SEQ ID NO: 3305898 - RNA, 13 nt, Human
cuguacagagccc

SEQ ID NO: 3305899 - RNA, 18 nt, Human
cugucuccauguuugaug

SEQ ID NO: 3305900 - RNA, 23 nt, Human
cugugaguacuacaguccuccca

SEQ ID NO: 3305901 - RNA, 21 nt, Human
cugugaguacuacaguccucc

SEQ ID NO: 3305902 - RNA, 20 nt, Human
cugugaguacuacaguccuc

SEQ ID NO: 3305903 - RNA, 17 nt, Human
cugugauggggcccugc

SEQ ID NO: 3305904 - RNA, 18 nt, Human
cugugauggggcccugcc

SEQ ID NO: 3305905 - RNA, 19 nt, Human
cugugauggggcccugccu

SEQ ID NO: 3305906 - RNA, 14 nt, Human
cugugccauuuugu

SEQ ID NO: 3305907 - RNA, 16 nt, Human
cugugccaugugccag

SEQ ID NO: 3305908 - RNA, 18 nt, Human
cugugccaugugccaggu

SEQ ID NO: 3305909 - RNA, 22 nt, Human
cugugcugcccugcccaccugg

SEQ ID NO: 3305910 - RNA, 17 nt, Human
cugugccucugggacug

SEQ ID NO: 3305911 - RNA, 21 nt, Human
cugugcugcccugcccaccug

SEQ ID NO: 3305912 - RNA, 14 nt, Human
cugugccucuggga

SEQ ID NO: 3305913 - RNA, 16 nt, Human
cugugccucugggacu

SEQ ID NO: 3305914 - RNA, 14 nt, Human
cugugggcccccaa

SEQ ID NO: 3305915 - RNA, 17 nt, Human
cuguggaugauaaaaca

SEQ ID NO: 3305916 - RNA, 18 nt, Human
cugugugugcgccuacag

SEQ ID NO: 3305917 - RNA, 20 nt, Human
cugugugugcgccuacagga

SEQ ID NO: 3305918 - RNA, 21 nt, Human
cugugucuugcaauggcagcc

SEQ ID NO: 3305919 - RNA, 20 nt, Human
cugugucuugcaauggcagc

SEQ ID NO: 3305920 - RNA, 22 nt, Human
cugugucuugcaauggcagccu

SEQ ID NO: 3305921 - RNA, 21 nt, Human
cuguucagcugguugagguuu

SEQ ID NO: 3305922 - RNA, 19 nt, Human
cuguucagcugguugaggu

SEQ ID NO: 3305923 - RNA, 18 nt, Human
cuguucagcugguugagg

SEQ ID NO: 3305924 - RNA, 20 nt, Human
cuguucucugcccuccaaga

SEQ ID NO: 3305925 - RNA, 19 nt, Human
cuguucucugcccuccaag

SEQ ID NO: 3305926 - RNA, 18 nt, Human
cuguucucugcccuccaa

SEQ ID NO: 3305927 - RNA, 17 nt, Human
cuguucucugcccucca

SEQ ID NO: 3305928 - RNA, 16 nt, Human
cuguucucugcccucc

SEQ ID NO: 3305929 - RNA, 15 nt, Human
cuguucucugcccuc

SEQ ID NO: 3305930 - RNA, 14 nt, Human
cuguucucugcccu

SEQ ID NO: 3305931 - RNA, 13 nt, Human
cuguucucugccc

SEQ ID NO: 3305932 - RNA, 13 nt, Human
cuugaacuccugg

SEQ ID NO: 3305933 - RNA, 21 nt, Human
cuugaacuuugaccucugcag

SEQ ID NO: 3305934 - RNA, 17 nt, Human
cuugaacuuugaccucu

SEQ ID NO: 3305935 - RNA, 13 nt, Human
cuugaccucaggu

SEQ ID NO: 3305936 - RNA, 21 nt, Human
cuugaccgugaggccagagac

SEQ ID NO: 3305937 - RNA, 20 nt, Human
cuugaccgugaggccagaga

SEQ ID NO: 3305938 - RNA, 18 nt, Human
cuugaccgugaggccaga

SEQ ID NO: 3305939 - RNA, 23 nt, Human
cuugaccauucuccaccugccag

SEQ ID NO: 3305940 - RNA, 22 nt, Human
cuugaccauucuccaccugcca

SEQ ID NO: 3305941 - RNA, 17 nt, Human
cuugaccgugaggccag

SEQ ID NO: 3305942 - RNA, 21 nt, Human
cuugaccauucuccaccugcc

SEQ ID NO: 3305943 - RNA, 16 nt, Human
cuugagccugggaggu

SEQ ID NO: 3305944 - RNA, 18 nt, Human
cuugagccuugaacuuug

SEQ ID NO: 3305945 - RNA, 17 nt, Human
cuugagccuugaacuuu

SEQ ID NO: 3305946 - RNA, 15 nt, Human
cuugagccuugaacu

SEQ ID NO: 3305947 - RNA, 13 nt, Human
cuugagcucagga

SEQ ID NO: 3305948 - RNA, 21 nt, Human
cuugaggguugggcugguguc

SEQ ID NO: 3305949 - RNA, 21 nt, Human
cuugaguugauucagcucugc

SEQ ID NO: 3305950 - RNA, 17 nt, Human
cuugaggguugggcugg

SEQ ID NO: 3305951 - RNA, 19 nt, Human
cuugaggguugggcuggug

SEQ ID NO: 3305952 - RNA, 20 nt, Human
cuugaggguugggcuggugu

SEQ ID NO: 3305953 - RNA, 13 nt, Human
cuucuguggguuu

SEQ ID NO: 3305954 - RNA, 21 nt, Human
cuucuguggguuucuaaagcu

SEQ ID NO: 3305955 - RNA, 14 nt, Human
cuucuguggguuuc

SEQ ID NO: 3305956 - RNA, 23 nt, Human
cuugaaaacacuguucucugccc

SEQ ID NO: 3305957 - RNA, 14 nt, Human
cuugaaaacacugu

SEQ ID NO: 3305958 - RNA, 21 nt, Human
cuucuguccuacucuguguca

SEQ ID NO: 3305959 - RNA, 16 nt, Human
cuucuguccuacucug

SEQ ID NO: 3305960 - RNA, 17 nt, Human
cuucuguccuacucugu

SEQ ID NO: 3305961 - RNA, 18 nt, Human
cuucuguccuacucugug

SEQ ID NO: 3305962 - RNA, 19 nt, Human
cuucuguccuacucugugu

SEQ ID NO: 3305963 - RNA, 21 nt, Human
cuucuguacgucugacaggca

SEQ ID NO: 3305964 - RNA, 14 nt, Human
cuucuguacgucug

SEQ ID NO: 3305965 - RNA, 15 nt, Human
cuucuguacgucuga

SEQ ID NO: 3305966 - RNA, 18 nt, Human
cuucuguacgucugacag

SEQ ID NO: 3305967 - RNA, 20 nt, Human
cuucuguacgucugacaggc

SEQ ID NO: 3305968 - RNA, 20 nt, Human
cuucuccacuuucuagccag

SEQ ID NO: 3305969 - RNA, 11 nt, Human
cuucuccacuu

SEQ ID NO: 3305970 - RNA, 12 nt, Human
cuucuccaggcu

SEQ ID NO: 3305971 - RNA, 13 nt, Human
cuucuccaggcug

SEQ ID NO: 3305972 - RNA, 12 nt, Human
cuucucuccagc

SEQ ID NO: 3305973 - RNA, 19 nt, Human
cuucucuccagccccugga

SEQ ID NO: 3305974 - RNA, 17 nt, Human
cuucucuccagccccug

SEQ ID NO: 3305975 - RNA, 15 nt, Human
cuucucuccagcccc

SEQ ID NO: 3305976 - RNA, 13 nt, Human
cuucucuccagcc

SEQ ID NO: 3305977 - RNA, 13 nt, Human
cuucucugaagga

SEQ ID NO: 3305978 - RNA, 20 nt, Human
cuucugccauuucugagauc

SEQ ID NO: 3305979 - RNA, 13 nt, Human
cuuagauguauau

SEQ ID NO: 3305980 - RNA, 16 nt, Human
cuuagucacugagaca

SEQ ID NO: 3305981 - RNA, 16 nt, Human
cuguucuggcagaguu

SEQ ID NO: 3305982 - RNA, 14 nt, Human
cuuagucacugaga

SEQ ID NO: 3305983 - RNA, 19 nt, Human
cuuagucacugagacagcc

SEQ ID NO: 3305984 - RNA, 18 nt, Human
cuuagucacugagacagc

SEQ ID NO: 3305985 - RNA, 15 nt, Human
cuuauacauuugaua

SEQ ID NO: 3305986 - RNA, 18 nt, Human
cuuauuuaaugaaagacu

SEQ ID NO: 3305987 - RNA, 15 nt, Human
cuuauuuaaugaaag

SEQ ID NO: 3305988 - RNA, 17 nt, Human
cuuauuuaaugaaagac

SEQ ID NO: 3305989 - RNA, 10 nt, Human
cuucaaggau

SEQ ID NO: 3305990 - RNA, 15 nt, Human
cuucaaggauccuga

SEQ ID NO: 3305991 - RNA, 13 nt, Human
cuucaaggauccu

SEQ ID NO: 3305992 - RNA, 23 nt, Human
cuucacagaugggugcuuggagg

SEQ ID NO: 3305993 - RNA, 14 nt, Human
cuuccaggcuggga

SEQ ID NO: 3305994 - RNA, 12 nt, Human
cuuccaggcugg

SEQ ID NO: 3305995 - RNA, 16 nt, Human
cuuccacaagagccca

SEQ ID NO: 3305996 - RNA, 17 nt, Human
cuuccacaagagcccag

SEQ ID NO: 3305997 - RNA, 21 nt, Human
cuuccacaagagcccaggccu

SEQ ID NO: 3305998 - RNA, 19 nt, Human
cuuccacaagagcccaggc

SEQ ID NO: 3305999 - RNA, 20 nt, Human
cuucauucaacccaccugcg

SEQ ID NO: 3306000 - RNA, 15 nt, Human
cuucaguaagccgug

SEQ ID NO: 3306001 - RNA, 14 nt, Human
cuucagugccuuau

SEQ ID NO: 3306002 - RNA, 22 nt, Human
cuucagugccuuauggaacacu

SEQ ID NO: 3306003 - RNA, 18 nt, Human
cuucagugccuuauggaa

SEQ ID NO: 3306004 - RNA, 13 nt, Human
cuucaguggcagc

SEQ ID NO: 3306005 - RNA, 14 nt, Human
cuucaguggcagcu

SEQ ID NO: 3306006 - RNA, 15 nt, Human
cuucaguggcagcug

SEQ ID NO: 3306007 - RNA, 16 nt, Human
cuucaguggcagcugc

SEQ ID NO: 3306008 - RNA, 23 nt, Human
cuucaguaagccgugauuuucau

SEQ ID NO: 3306009 - RNA, 16 nt, Human
cuucaguaagccguga

SEQ ID NO: 3306010 - RNA, 17 nt, Human
cuuccaggggugggaca

SEQ ID NO: 3306011 - RNA, 15 nt, Human
cuuccagggguggga

SEQ ID NO: 3306012 - RNA, 14 nt, Human
cuuccagggguggg

SEQ ID NO: 3306013 - RNA, 19 nt, Human
cuuccaggcugggagagcc

SEQ ID NO: 3306014 - RNA, 16 nt, Human
cuuccaggcugggaga

SEQ ID NO: 3306015 - RNA, 15 nt, Human
cuuccaggcugggag

SEQ ID NO: 3306016 - RNA, 17 nt, Human
gaaagcccugagcuuuc

SEQ ID NO: 3306017 - RNA, 22 nt, Human
gaaagcccugagcuuucugcua

SEQ ID NO: 3306018 - RNA, 21 nt, Human
gaaagcccugagcuuucugcu

SEQ ID NO: 3306019 - RNA, 19 nt, Human
gaaagacuuuuccaacccu

SEQ ID NO: 3306020 - RNA, 17 nt, Human
gaaagacuguacaaagu

SEQ ID NO: 3306021 - RNA, 15 nt, Human
gaaagaguaggaaga

SEQ ID NO: 3306022 - RNA, 23 nt, Human
gaaacccagcucugguccauaga

SEQ ID NO: 3306023 - RNA, 14 nt, Human
gaaacccagcucug

SEQ ID NO: 3306024 - RNA, 13 nt, Human
gaaacccagcucu

SEQ ID NO: 3306025 - RNA, 19 nt, Human
gaaacccagcucuggucca

SEQ ID NO: 3306026 - RNA, 18 nt, Human
gaaacccagcucuggucc

SEQ ID NO: 3306027 - RNA, 16 nt, Human
gaaacccagcucuggu

SEQ ID NO: 3306028 - RNA, 15 nt, Human
gaaacccagcucugg

SEQ ID NO: 3306029 - RNA, 18 nt, Human
gaaaaucagccugcucca

SEQ ID NO: 3306030 - RNA, 22 nt, Human
gaaaaucagccugcuccagcug

SEQ ID NO: 3306031 - RNA, 20 nt, Human
gaaaaucagccugcuccagc

SEQ ID NO: 3306032 - RNA, 24 nt, Human
gaaaacacuguucucugcccucca

SEQ ID NO: 3306033 - RNA, 22 nt, Human
gaaaacacuguucucugcccuc

SEQ ID NO: 3306034 - RNA, 19 nt, Human
gaaaagcugcugacagugu

SEQ ID NO: 3306035 - RNA, 19 nt, Human
gaaaacguggcugcuucaa

SEQ ID NO: 3306036 - RNA, 22 nt, Human
gaaaacguggcugcuucaagga

SEQ ID NO: 3306037 - RNA, 20 nt, Human
gaaaacguggcugcuucaag

SEQ ID NO: 3306038 - RNA, 18 nt, Human
cuuuguuaguuucuccaa

SEQ ID NO: 3306039 - RNA, 12 nt, Human
cuuuuguucuug

SEQ ID NO: 3306040 - RNA, 11 nt, Human
cuuuuguucuu

SEQ ID NO: 3306041 - RNA, 16 nt, Human
cuuuuuuggcugcuga

SEQ ID NO: 3306042 - RNA, 15 nt, Human
gaaaaaggaggaaga

SEQ ID NO: 3306043 - RNA, 12 nt, Human
gaaaaaggagga

SEQ ID NO: 3306044 - RNA, 19 nt, Human
gaaaacacauuuuucuuag

SEQ ID NO: 3306045 - RNA, 18 nt, Human
gaaaacacauuuuucuua

SEQ ID NO: 3306046 - RNA, 14 nt, Human
gaaaacacauuuuu

SEQ ID NO: 3306047 - RNA, 17 nt, Human
cuuuuuuggcugcugaa

SEQ ID NO: 3306048 - RNA, 22 nt, Human
cuuuuuuggcugcugaaggcuc

SEQ ID NO: 3306049 - RNA, 20 nt, Human
cuuuuuuggcugcugaaggc

SEQ ID NO: 3306050 - RNA, 20 nt, Human
cuuucuggcuaugcauuuga

SEQ ID NO: 3306051 - RNA, 19 nt, Human
cuuucuggcuaugcauuug

SEQ ID NO: 3306052 - RNA, 18 nt, Human
cuuucuggcuaugcauuu

SEQ ID NO: 3306053 - RNA, 17 nt, Human
cuuucuggcuaugcauu

SEQ ID NO: 3306054 - RNA, 15 nt, Human
cuuuccugaggcugg

SEQ ID NO: 3306055 - RNA, 13 nt, Human
cuuuccugaggcu

SEQ ID NO: 3306056 - RNA, 16 nt, Human
cuuuccucuuuggucu

SEQ ID NO: 3306057 - RNA, 12 nt, Human
cuuuccugaggc

SEQ ID NO: 3306058 - RNA, 11 nt, Human
cuuucccuccc

SEQ ID NO: 3306059 - RNA, 13 nt, Human
cuuucccucccuu

SEQ ID NO: 3306060 - RNA, 14 nt, Human
cuuucccucccuuc

SEQ ID NO: 3306061 - RNA, 16 nt, Human
cuuucccucccuuccu

SEQ ID NO: 3306062 - RNA, 15 nt, Human
cuuuccaggaaggcu

SEQ ID NO: 3306063 - RNA, 15 nt, Human
cuuuccaucuacccu

SEQ ID NO: 3306064 - RNA, 20 nt, Human
cuuugcagacaggcaagcac

SEQ ID NO: 3306065 - RNA, 16 nt, Human
cuuugcagacaggcaa

SEQ ID NO: 3306066 - RNA, 13 nt, Human
cuuugaccucugc

SEQ ID NO: 3306067 - RNA, 15 nt, Human
cuuugaccucugcag

SEQ ID NO: 3306068 - RNA, 14 nt, Human
cuuugaccucugca

SEQ ID NO: 3306069 - RNA, 24 nt, Human
cuuugaccucugcagcaauaaagc

SEQ ID NO: 3306070 - RNA, 20 nt, Human
cuuugaccucugcagcaaua

SEQ ID NO: 3306071 - RNA, 18 nt, Human
cuuugaccucugcagcaa

SEQ ID NO: 3306072 - RNA, 17 nt, Human
cuuugaccucugcagca

SEQ ID NO: 3306073 - RNA, 15 nt, Human
cuuugugaggaagcc

SEQ ID NO: 3306074 - RNA, 19 nt, Human
cuuugugauuuuuguaauu

SEQ ID NO: 3306075 - RNA, 14 nt, Human
cuuuguccccaccg

SEQ ID NO: 3306076 - RNA, 19 nt, Human
cuuuggcuauuagagauca

SEQ ID NO: 3306077 - RNA, 23 nt, Human
cuuggggggcugaggugggagga

SEQ ID NO: 3306078 - RNA, 16 nt, Human
cuuguaaauagcucag

SEQ ID NO: 3306079 - RNA, 22 nt, Human
cuuggggggcugaggugggagg

SEQ ID NO: 3306080 - RNA, 17 nt, Human
cuuguaaauagcucagg

SEQ ID NO: 3306081 - RNA, 18 nt, Human
cuuguaaauagcucaggu

SEQ ID NO: 3306082 - RNA, 12 nt, Human
cuuguacauaau

SEQ ID NO: 3306083 - RNA, 15 nt, Human
cuuguacauaaugcg

SEQ ID NO: 3306084 - RNA, 21 nt, Human
cuuguacauaaugcgugcaua

SEQ ID NO: 3306085 - RNA, 19 nt, Human
cuuguacauaaugcgugca

SEQ ID NO: 3306086 - RNA, 22 nt, Human
cuuguacauaaugcgugcauac

SEQ ID NO: 3306087 - RNA, 14 nt, Human
cuuuagcgcccagu

SEQ ID NO: 3306088 - RNA, 13 nt, Human
cuuuauaauucua

SEQ ID NO: 3306089 - RNA, 19 nt, Human
cuuuauaauucuacuuuga

SEQ ID NO: 3306090 - RNA, 15 nt, Human
cuuuaugcacaaaau

SEQ ID NO: 3306091 - RNA, 13 nt, Human
cuuuacuauggcc

SEQ ID NO: 3306092 - RNA, 22 nt, Human
cuuuaccuuuuuuauacauaaa

SEQ ID NO: 3306093 - RNA, 23 nt, Human
gauguuuuccaugaguccccugu

SEQ ID NO: 3306094 - RNA, 22 nt, Human
gauuacaagcgugagccacugc

SEQ ID NO: 3306095 - RNA, 15 nt, Human
gauuaaacuuaaucu

SEQ ID NO: 3306096 - RNA, 23 nt, Human
gauuacaagcgugagccacugca

SEQ ID NO: 3306097 - RNA, 21 nt, Human
gauuacaagcgugagccacug

SEQ ID NO: 3306098 - RNA, 14 nt, Human
gauggugcaaugac

SEQ ID NO: 3306099 - RNA, 12 nt, Human
gauggugcaaug

SEQ ID NO: 3306100 - RNA, 16 nt, Human
gauggugcaaugaccu

SEQ ID NO: 3306101 - RNA, 15 nt, Human
gauggugcaaugacc

SEQ ID NO: 3306102 - RNA, 20 nt, Human
gaugcccaaagaugcagccg

SEQ ID NO: 3306103 - RNA, 19 nt, Human
gaugcccaaagaugcagcc

SEQ ID NO: 3306104 - RNA, 19 nt, Human
gaugggugcuuggaggaag

SEQ ID NO: 3306105 - RNA, 13 nt, Human
gauggggcugcac

SEQ ID NO: 3306106 - RNA, 15 nt, Human
gauggggcugcaccg

SEQ ID NO: 3306107 - RNA, 20 nt, Human
gaugggcaacccccagccug

SEQ ID NO: 3306108 - RNA, 21 nt, Human
gaugggcaacccccagccugc

SEQ ID NO: 3306109 - RNA, 24 nt, Human
gauggggcccugccuccuuuguga

SEQ ID NO: 3306110 - RNA, 18 nt, Human
gauuuccguuaaaauacc

SEQ ID NO: 3306111 - RNA, 22 nt, Human
gauuuccguuaaaauaccagcc

SEQ ID NO: 3306112 - RNA, 15 nt, Human
gauuuaacagaaaug

SEQ ID NO: 3306113 - RNA, 12 nt, Human
gauuuaaaucag

SEQ ID NO: 3306114 - RNA, 14 nt, Human
gauuuaacagaaau

SEQ ID NO: 3306115 - RNA, 13 nt, Human
gauuuaacagaaa

SEQ ID NO: 3306116 - RNA, 19 nt, Human
gauuuugauccaagcuggu

SEQ ID NO: 3306117 - RNA, 21 nt, Human
gauuuugaaauuuuuauuaaa

SEQ ID NO: 3306118 - RNA, 12 nt, Human
gcaaaccaucau

SEQ ID NO: 3306119 - RNA, 22 nt, Human
gcacugcuuccagugaggcucu

SEQ ID NO: 3306120 - RNA, 23 nt, Human
gcacugcuuccagugaggcucug

SEQ ID NO: 3306121 - RNA, 16 nt, Human
gcacgauuucuguuua

SEQ ID NO: 3306122 - RNA, 18 nt, Human
gcagaaggaagacuucau

SEQ ID NO: 3306123 - RNA, 13 nt, Human
gcagacaggcaag

SEQ ID NO: 3306124 - RNA, 12 nt, Human
gcagacaggcaa

SEQ ID NO: 3306125 - RNA, 18 nt, Human
gcagacaggaccagggau

SEQ ID NO: 3306126 - RNA, 22 nt, Human
gcacagaguuguuacauuuuua

SEQ ID NO: 3306127 - RNA, 21 nt, Human
gcacagaguuguuacauuuuu

SEQ ID NO: 3306128 - RNA, 19 nt, Human
gcacagaguuguuacauuu

SEQ ID NO: 3306129 - RNA, 18 nt, Human
gcacagaguuguuacauu

SEQ ID NO: 3306130 - RNA, 16 nt, Human
gcacagaguuguuaca

SEQ ID NO: 3306131 - RNA, 19 nt, Human
gcaccuuagacagucccug

SEQ ID NO: 3306132 - RNA, 15 nt, Human
gcacgauuucuguuu

SEQ ID NO: 3306133 - RNA, 13 nt, Human
gcacgauuucugu

SEQ ID NO: 3306134 - RNA, 21 nt, Human
gcaccuuagacagucccugcc

SEQ ID NO: 3306135 - RNA, 20 nt, Human
gcaccuuagacagucccugc

SEQ ID NO: 3306136 - RNA, 12 nt, Human
gcaccauaacuu

SEQ ID NO: 3306137 - RNA, 16 nt, Human
gcacaaacagaggccg

SEQ ID NO: 3306138 - RNA, 15 nt, Human
gcacaaacagaggcc

SEQ ID NO: 3306139 - RNA, 14 nt, Human
gcacaaacagaggc

SEQ ID NO: 3306140 - RNA, 15 nt, Human
gcaauggcagccuug

SEQ ID NO: 3306141 - RNA, 14 nt, Human
gcaacucaucuuag

SEQ ID NO: 3306142 - RNA, 14 nt, Human
gcaaugugauaaaa

SEQ ID NO: 3306143 - RNA, 23 nt, Human
gcacagaaaauggaagacagcuc

SEQ ID NO: 3306144 - RNA, 22 nt, Human
gcacagaaaauggaagacagcu

SEQ ID NO: 3306145 - RNA, 21 nt, Human
gcacagaaaauggaagacagc

SEQ ID NO: 3306146 - RNA, 17 nt, Human
gcacagacccugcccug

SEQ ID NO: 3306147 - RNA, 16 nt, Human
gcacagacccugcccu

SEQ ID NO: 3306148 - RNA, 15 nt, Human
gcacagacccugccc

SEQ ID NO: 3306149 - RNA, 14 nt, Human
gcacagacccugcc

SEQ ID NO: 3306150 - RNA, 21 nt, Human
gcacagacccugcccuguggg

SEQ ID NO: 3306151 - RNA, 20 nt, Human
gcacagacccugcccugugg

SEQ ID NO: 3306152 - RNA, 19 nt, Human
gcacagacccugcccugug

SEQ ID NO: 3306153 - RNA, 18 nt, Human
gcacagacccugcccugu

SEQ ID NO: 3306154 - RNA, 22 nt, Human
gcacagacccugcccugugggc

SEQ ID NO: 3306155 - RNA, 15 nt, Human
gcacagaguuguuac

SEQ ID NO: 3306156 - RNA, 20 nt, Human
gcacaccgggcacucagaag

SEQ ID NO: 3306157 - RNA, 20 nt, Human
gcacagaaaauggaagacag

SEQ ID NO: 3306158 - RNA, 17 nt, Human
gcacaagcuccaagcuc

SEQ ID NO: 3306159 - RNA, 15 nt, Human
gcacaagcuccaagc

SEQ ID NO: 3306160 - RNA, 18 nt, Human
gcacaagcuccaagcucc

SEQ ID NO: 3306161 - RNA, 16 nt, Human
gaggccuucucugaag

SEQ ID NO: 3306162 - RNA, 14 nt, Human
gaggccuucucuga

SEQ ID NO: 3306163 - RNA, 18 nt, Human
gaggccuucucugaagga

SEQ ID NO: 3306164 - RNA, 19 nt, Human
gaggccuucucugaaggac

SEQ ID NO: 3306165 - RNA, 14 nt, Human
gaggcugccucucc

SEQ ID NO: 3306166 - RNA, 16 nt, Human
gaggcugggcucccuu

SEQ ID NO: 3306167 - RNA, 14 nt, Human
gaggcccuucucuc

SEQ ID NO: 3306168 - RNA, 20 nt, Human
gaggcccuucucuccagccc

SEQ ID NO: 3306169 - RNA, 15 nt, Human
gaggcccuucucucc

SEQ ID NO: 3306170 - RNA, 21 nt, Human
gaggcccuucucuccagcccc

SEQ ID NO: 3306171 - RNA, 16 nt, Human
gaggcccagagggccu

SEQ ID NO: 3306172 - RNA, 15 nt, Human
gaggcccagagggcc

SEQ ID NO: 3306173 - RNA, 19 nt, Human
gaggcccagagggccugca

SEQ ID NO: 3306174 - RNA, 14 nt, Human
gaggcccagagggc

SEQ ID NO: 3306175 - RNA, 13 nt, Human
gaggcccagaggg

SEQ ID NO: 3306176 - RNA, 11 nt, Human
gaggcccagag

SEQ ID NO: 3306177 - RNA, 20 nt, Human
gaggcagccccauucugccu

SEQ ID NO: 3306178 - RNA, 9 nt, Human
gaggcaggg

SEQ ID NO: 3306179 - RNA, 19 nt, Human
gaggcagccccauucugcc

SEQ ID NO: 3306180 - RNA, 18 nt, Human
gaggcagccccauucugc

SEQ ID NO: 3306181 - RNA, 14 nt, Human
gaggccaugggccu

SEQ ID NO: 3306182 - RNA, 17 nt, Human
gaggccaugggccuccu

SEQ ID NO: 3306183 - RNA, 18 nt, Human
gaggccaugggccuccug

SEQ ID NO: 3306184 - RNA, 20 nt, Human
gaggccaugggccuccugug

SEQ ID NO: 3306185 - RNA, 21 nt, Human
gaggccaugggccuccugugu

SEQ ID NO: 3306186 - RNA, 23 nt, Human
gaggccaugggccuccugugugu

SEQ ID NO: 3306187 - RNA, 20 nt, Human
gaggauugcuugagcucagg

SEQ ID NO: 3306188 - RNA, 16 nt, Human
gaggauugcuugagcu

SEQ ID NO: 3306189 - RNA, 22 nt, Human
gaggaucucuugagccugggag

SEQ ID NO: 3306190 - RNA, 19 nt, Human
gaggaucucuugagccugg

SEQ ID NO: 3306191 - RNA, 16 nt, Human
gaggaucucuugagcc

SEQ ID NO: 3306192 - RNA, 13 nt, Human
gaggaucucuuga

SEQ ID NO: 3306193 - RNA, 14 nt, Human
gaggguugggcugg

SEQ ID NO: 3306194 - RNA, 15 nt, Human
gaggguugggcuggu

SEQ ID NO: 3306195 - RNA, 24 nt, Human
gagguaaggaauaccugucccccu

SEQ ID NO: 3306196 - RNA, 21 nt, Human
gagguaaggaauaccuguccc

SEQ ID NO: 3306197 - RNA, 12 nt, Human
gaggucagagcc

SEQ ID NO: 3306198 - RNA, 13 nt, Human
gaggucagagccu

SEQ ID NO: 3306199 - RNA, 17 nt, Human
gaggucaaggcugcagu

SEQ ID NO: 3306200 - RNA, 12 nt, Human
gaggguggaaua

SEQ ID NO: 3306201 - RNA, 21 nt, Human
gagggugaagugaagacaaug

SEQ ID NO: 3306202 - RNA, 14 nt, Human
gaggguggugaccu

SEQ ID NO: 3306203 - RNA, 15 nt, Human
gagggugggaguggg

SEQ ID NO: 3306204 - RNA, 21 nt, Human
gaggguggugaccucugccug

SEQ ID NO: 3306205 - RNA, 22 nt, Human
gagggugucccaaaaagaaagg

SEQ ID NO: 3306206 - RNA, 13 nt, Human
gagggucugagga

SEQ ID NO: 3306207 - RNA, 14 nt, Human
gagggucugaggaa

SEQ ID NO: 3306208 - RNA, 17 nt, Human
gaggggguggccuccca

SEQ ID NO: 3306209 - RNA, 15 nt, Human
gaggggguggccucc

SEQ ID NO: 3306210 - RNA, 13 nt, Human
gaggguaaggcug

SEQ ID NO: 3306211 - RNA, 21 nt, Human
gagggagugacagaggcagcc

SEQ ID NO: 3306212 - RNA, 22 nt, Human
gagggagugacagaggcagccc

SEQ ID NO: 3306213 - RNA, 18 nt, Human
gagggagugacagaggca

SEQ ID NO: 3306214 - RNA, 16 nt, Human
gagggagugacagagg

SEQ ID NO: 3306215 - RNA, 16 nt, Human
gagggagggcuccaga

SEQ ID NO: 3306216 - RNA, 20 nt, Human
gagggagggcuccagacaca

SEQ ID NO: 3306217 - RNA, 19 nt, Human
gagggagggcuccagacac

SEQ ID NO: 3306218 - RNA, 20 nt, Human
gaggcugggcucccuuccca

SEQ ID NO: 3306219 - RNA, 17 nt, Human
gagugaagcugggagaa

SEQ ID NO: 3306220 - RNA, 14 nt, Human
gagugacagaggca

SEQ ID NO: 3306221 - RNA, 15 nt, Human
gagugacagaggcag

SEQ ID NO: 3306222 - RNA, 16 nt, Human
gagugacagaggcagc

SEQ ID NO: 3306223 - RNA, 14 nt, Human
gagucugaaggcug

SEQ ID NO: 3306224 - RNA, 13 nt, Human
gagucugaaggcu

SEQ ID NO: 3306225 - RNA, 12 nt, Human
gagucugaaggc

SEQ ID NO: 3306226 - RNA, 11 nt, Human
gaguauauguc

SEQ ID NO: 3306227 - RNA, 19 nt, Human
gaguaggaagacuuuggaa

SEQ ID NO: 3306228 - RNA, 18 nt, Human
gaguaggaagacuuugga

SEQ ID NO: 3306229 - RNA, 15 nt, Human
gagucgaggacaggg

SEQ ID NO: 3306230 - RNA, 19 nt, Human
gaguccgaaagggacuugg

SEQ ID NO: 3306231 - RNA, 14 nt, Human
gagucgaggacagg

SEQ ID NO: 3306232 - RNA, 19 nt, Human
gaguagcugggacuacagg

SEQ ID NO: 3306233 - RNA, 22 nt, Human
gaguagcugggacuacaggcac

SEQ ID NO: 3306234 - RNA, 12 nt, Human
gaguaggaagac

SEQ ID NO: 3306235 - RNA, 17 nt, Human
gaguaggaagacuuugg

SEQ ID NO: 3306236 - RNA, 13 nt, Human
gaguaggaagacu

SEQ ID NO: 3306237 - RNA, 23 nt, Human
gaguacuacaguccucccaucuc

SEQ ID NO: 3306238 - RNA, 21 nt, Human
gaguacuacaguccucccauc

SEQ ID NO: 3306239 - RNA, 20 nt, Human
gaguacuacaguccucccau

SEQ ID NO: 3306240 - RNA, 17 nt, Human
gaggucagagccugcag

SEQ ID NO: 3306241 - RNA, 20 nt, Human
gaggucagagccugcaguua

SEQ ID NO: 3306242 - RNA, 16 nt, Human
gagguuucaaaccucc

SEQ ID NO: 3306243 - RNA, 17 nt, Human
gagguugggaggccauu

SEQ ID NO: 3306244 - RNA, 15 nt, Human
gagguugggaggcca

SEQ ID NO: 3306245 - RNA, 19 nt, Human
gauacaggaaaagcugcug

SEQ ID NO: 3306246 - RNA, 21 nt, Human
gauacaggaaaagcugcugac

SEQ ID NO: 3306247 - RNA, 20 nt, Human
gauacaggaaaagcugcuga

SEQ ID NO: 3306248 - RNA, 22 nt, Human
gauaagaaccuuuugagugccu

SEQ ID NO: 3306249 - RNA, 15 nt, Human
gauagcacagacccu

SEQ ID NO: 3306250 - RNA, 14 nt, Human
gauagccaaggcca

SEQ ID NO: 3306251 - RNA, 22 nt, Human
gauagccaaggccaaaggaagc

SEQ ID NO: 3306252 - RNA, 12 nt, Human
gaucacggcuca

SEQ ID NO: 3306253 - RNA, 18 nt, Human
gaucacggcucacugcag

SEQ ID NO: 3306254 - RNA, 15 nt, Human
gaucacggcucacug

SEQ ID NO: 3306255 - RNA, 16 nt, Human
gaucacggcucacugc

SEQ ID NO: 3306256 - RNA, 20 nt, Human
gagugugccugaagucccag

SEQ ID NO: 3306257 - RNA, 17 nt, Human
gagugugccugaagucc

SEQ ID NO: 3306258 - RNA, 12 nt, Human
gaguuacagaca

SEQ ID NO: 3306259 - RNA, 13 nt, Human
gagugggugaaua

SEQ ID NO: 3306260 - RNA, 23 nt, Human
gagugggggaucacagccucuga

SEQ ID NO: 3306261 - RNA, 14 nt, Human
gaguugaagacaga

SEQ ID NO: 3306262 - RNA, 21 nt, Human
gaguugaagacagagcuacac

SEQ ID NO: 3306263 - RNA, 17 nt, Human
gaguugaagacagagcu

SEQ ID NO: 3306264 - RNA, 15 nt, Human
gaguugaagacagag

SEQ ID NO: 3306265 - RNA, 20 nt, Human
gaguucauacccuguuacca

SEQ ID NO: 3306266 - RNA, 14 nt, Human
gaguucaucuugaa

SEQ ID NO: 3306267 - RNA, 19 nt, Human
gaguucaucuugaauugua

SEQ ID NO: 3306268 - RNA, 15 nt, Human
gaguuacagacaaag

SEQ ID NO: 3306269 - RNA, 13 nt, Human
gaguuacagacaa

SEQ ID NO: 3306270 - RNA, 23 nt, Human
gacauacuaaccagcagaaaugc

SEQ ID NO: 3306271 - RNA, 14 nt, Human
gacaugaucuucuu

SEQ ID NO: 3306272 - RNA, 14 nt, Human
gacaugggaaaggg

SEQ ID NO: 3306273 - RNA, 14 nt, Human
gacaggaccaggga

SEQ ID NO: 3306274 - RNA, 23 nt, Human
gacaggaccagggauuuccauga

SEQ ID NO: 3306275 - RNA, 15 nt, Human
gacaggaccagggau

SEQ ID NO: 3306276 - RNA, 16 nt, Human
gacagggaggugaccc

SEQ ID NO: 3306277 - RNA, 23 nt, Human
gacagggcacaccgggcacucag

SEQ ID NO: 3306278 - RNA, 14 nt, Human
gacaguuaagagaa

SEQ ID NO: 3306279 - RNA, 13 nt, Human
gacagccacggcc

SEQ ID NO: 3306280 - RNA, 13 nt, Human
gacagagggggug

SEQ ID NO: 3306281 - RNA, 20 nt, Human
gacagagugagacucugucu

SEQ ID NO: 3306282 - RNA, 22 nt, Human
gacagagugagacucugucuca

SEQ ID NO: 3306283 - RNA, 14 nt, Human
gacagccacggcca

SEQ ID NO: 3306284 - RNA, 17 nt, Human
gacagccacggccaggc

SEQ ID NO: 3306285 - RNA, 18 nt, Human
gacagccacggccaggcc

SEQ ID NO: 3306286 - RNA, 19 nt, Human
gacagccacggccaggcca

SEQ ID NO: 3306287 - RNA, 18 nt, Human
gacagcugccugggaucc

SEQ ID NO: 3306288 - RNA, 20 nt, Human
gacagccacggccaggccag

SEQ ID NO: 3306289 - RNA, 21 nt, Human
gacagccacggccaggccaga

SEQ ID NO: 3306290 - RNA, 17 nt, Human
gacagcugccugggauc

SEQ ID NO: 3306291 - RNA, 16 nt, Human
gacagcugccugggau

SEQ ID NO: 3306292 - RNA, 17 nt, Human
gacagaggcagccccau

SEQ ID NO: 3306293 - RNA, 15 nt, Human
gacagaggggguggc

SEQ ID NO: 3306294 - RNA, 19 nt, Human
gacagaggggguggccucc

SEQ ID NO: 3306295 - RNA, 18 nt, Human
gacagaggggguggccuc

SEQ ID NO: 3306296 - RNA, 23 nt, Human
gacagaggggguggccucccaac

SEQ ID NO: 3306297 - RNA, 19 nt, Human
gacagagugagacucuguc

SEQ ID NO: 3306298 - RNA, 22 nt, Human
gacagaggggguggccucccaa

SEQ ID NO: 3306299 - RNA, 21 nt, Human
gacagaggggguggccuccca

SEQ ID NO: 3306300 - RNA, 12 nt, Human
gacagaggcagc

SEQ ID NO: 3306301 - RNA, 14 nt, Human
gacagaggcagccc

SEQ ID NO: 3306302 - RNA, 16 nt, Human
gacagaggcagcccca

SEQ ID NO: 3306303 - RNA, 21 nt, Human
gacagagcaagugagacccug

SEQ ID NO: 3306304 - RNA, 13 nt, Human
gaccccuccaugu

SEQ ID NO: 3306305 - RNA, 23 nt, Human
gacccugaggcccagagggccug

SEQ ID NO: 3306306 - RNA, 14 nt, Human
gaccccuccaugug

SEQ ID NO: 3306307 - RNA, 18 nt, Human
gaccccuccaugugggcu

SEQ ID NO: 3306308 - RNA, 21 nt, Human
gaccccuccaugugggcuagu

SEQ ID NO: 3306309 - RNA, 22 nt, Human
gacccugaggcccagagggccu

SEQ ID NO: 3306310 - RNA, 12 nt, Human
gacccugucuca

SEQ ID NO: 3306311 - RNA, 20 nt, Human
gacccuuguggucccacccc

SEQ ID NO: 3306312 - RNA, 19 nt, Human
gacccuuguggucccaccc

SEQ ID NO: 3306313 - RNA, 21 nt, Human
gacccuuguggucccacccca

SEQ ID NO: 3306314 - RNA, 15 nt, Human
gacccuugugguccc

SEQ ID NO: 3306315 - RNA, 17 nt, Human
gaccgugaggccagaga

SEQ ID NO: 3306316 - RNA, 16 nt, Human
gaccgugaggccagag

SEQ ID NO: 3306317 - RNA, 18 nt, Human
gaccgugaggccagagac

SEQ ID NO: 3306318 - RNA, 15 nt, Human
gaccgugaggccaga

SEQ ID NO: 3306319 - RNA, 14 nt, Human
gaccacguuucuaa

SEQ ID NO: 3306320 - RNA, 24 nt, Human
gaccagacaccuugacagggcaca

SEQ ID NO: 3306321 - RNA, 11 nt, Human
gaccagagcug

SEQ ID NO: 3306322 - RNA, 18 nt, Human
gacaugggaaaggggaag

SEQ ID NO: 3306323 - RNA, 20 nt, Human
gaccauucuccaccugccag

SEQ ID NO: 3306324 - RNA, 19 nt, Human
gaccauucuccaccugcca

SEQ ID NO: 3306325 - RNA, 17 nt, Human
gaccauucuccaccugc

SEQ ID NO: 3306326 - RNA, 22 nt, Human
gaccauucuccaccugccaggg

SEQ ID NO: 3306327 - RNA, 21 nt, Human
gaccauucuccaccugccagg

SEQ ID NO: 3306328 - RNA, 18 nt, Human
gaccagagcugccaccug

SEQ ID NO: 3306329 - RNA, 17 nt, Human
gaccagagcugccaccu

SEQ ID NO: 3306330 - RNA, 15 nt, Human
gaccagagcugccac

SEQ ID NO: 3306331 - RNA, 14 nt, Human
gaccagagcugcca

SEQ ID NO: 3306332 - RNA, 13 nt, Human
gaccagagcugcc

SEQ ID NO: 3306333 - RNA, 14 nt, Human
gaauugaagcagga

SEQ ID NO: 3306334 - RNA, 18 nt, Human
gaauccagacccggcugc

SEQ ID NO: 3306335 - RNA, 20 nt, Human
gaauccagacccggcugcgu

SEQ ID NO: 3306336 - RNA, 21 nt, Human
gaaugaaagggcccagagagg

SEQ ID NO: 3306337 - RNA, 20 nt, Human
gaaugcacaaacagaggccg

SEQ ID NO: 3306338 - RNA, 21 nt, Human
gaaugcacaaacagaggccgc

SEQ ID NO: 3306339 - RNA, 19 nt, Human
gacacaggcccggcuccag

SEQ ID NO: 3306340 - RNA, 16 nt, Human
gacacaagccuucggc

SEQ ID NO: 3306341 - RNA, 14 nt, Human
gacacaugcaaggu

SEQ ID NO: 3306342 - RNA, 20 nt, Human
gacacaggcccggcuccagg

SEQ ID NO: 3306343 - RNA, 21 nt, Human
gacacaggcccggcuccaggc

SEQ ID NO: 3306344 - RNA, 23 nt, Human
gacacauguccaagaagcccagg

SEQ ID NO: 3306345 - RNA, 20 nt, Human
gacacauguccaagaagccc

SEQ ID NO: 3306346 - RNA, 15 nt, Human
gacacauguccaaga

SEQ ID NO: 3306347 - RNA, 19 nt, Human
gacacaugcaaggucauuu

SEQ ID NO: 3306348 - RNA, 18 nt, Human
gacaaggauugcuacugu

SEQ ID NO: 3306349 - RNA, 21 nt, Human
gacaaggaugaucuaggaaga

SEQ ID NO: 3306350 - RNA, 19 nt, Human
gacaaggauugcuacuguc

SEQ ID NO: 3306351 - RNA, 20 nt, Human
gacaaugugaaaagaaaaau

SEQ ID NO: 3306352 - RNA, 19 nt, Human
gacaaugugaaaagaaaaa

SEQ ID NO: 3306353 - RNA, 22 nt, Human
gacaaugcaaaccaucauugaa

SEQ ID NO: 3306354 - RNA, 18 nt, Human
gacaaugugaaaagaaaa

SEQ ID NO: 3306355 - RNA, 12 nt, Human
gacaaugugaaa

SEQ ID NO: 3306356 - RNA, 23 nt, Human
gacaacacucauugaccugaggc

SEQ ID NO: 3306357 - RNA, 22 nt, Human
gacaacacucauugaccugagg

SEQ ID NO: 3306358 - RNA, 22 nt, Human
gaauuucuuuugccguuauuaa

SEQ ID NO: 3306359 - RNA, 22 nt, Human
gagaaugcacaaacagaggccg

SEQ ID NO: 3306360 - RNA, 23 nt, Human
gagaaugcacaaacagaggccgc

SEQ ID NO: 3306361 - RNA, 22 nt, Human
gagacaggguuuugccauguug

SEQ ID NO: 3306362 - RNA, 12 nt, Human
gagaccaucccu

SEQ ID NO: 3306363 - RNA, 14 nt, Human
gagaccaucccuga

SEQ ID NO: 3306364 - RNA, 21 nt, Human
gagaccaucccugaaggcccc

SEQ ID NO: 3306365 - RNA, 18 nt, Human
gagaccaucccugaaggc

SEQ ID NO: 3306366 - RNA, 18 nt, Human
gagacuccugcaggcagc

SEQ ID NO: 3306367 - RNA, 19 nt, Human
gagacuccugcaggcagcc

SEQ ID NO: 3306368 - RNA, 21 nt, Human
gagacuccugcaggcagccag

SEQ ID NO: 3306369 - RNA, 20 nt, Human
gagacuccugcaggcagcca

SEQ ID NO: 3306370 - RNA, 18 nt, Human
gagacucgcgacaaugca

SEQ ID NO: 3306371 - RNA, 21 nt, Human
gagacucgcgacaaugcaaac

SEQ ID NO: 3306372 - RNA, 20 nt, Human
gagacucgcgacaaugcaaa

SEQ ID NO: 3306373 - RNA, 19 nt, Human
gagaggggaacagacugga

SEQ ID NO: 3306374 - RNA, 18 nt, Human
gagaggggaacagacugg

SEQ ID NO: 3306375 - RNA, 13 nt, Human
gagaggggcacag

SEQ ID NO: 3306376 - RNA, 16 nt, Human
gagagggugggagugg

SEQ ID NO: 3306377 - RNA, 14 nt, Human
gagagggugggagu

SEQ ID NO: 3306378 - RNA, 19 nt, Human
gagaucacgccacugcacu

SEQ ID NO: 3306379 - RNA, 18 nt, Human
gagaucacgccacugcac

SEQ ID NO: 3306380 - RNA, 14 nt, Human
gagauagccaaggc

SEQ ID NO: 3306381 - RNA, 23 nt, Human
gagaucaaccccuucgcuccugu

SEQ ID NO: 3306382 - RNA, 16 nt, Human
gagauagccaaggcca

SEQ ID NO: 3306383 - RNA, 23 nt, Human
gagcaagacgcugugcugcccug

SEQ ID NO: 3306384 - RNA, 20 nt, Human
gagcaccuuagacagucccu

SEQ ID NO: 3306385 - RNA, 21 nt, Human
gagcacuaaggugugcucuga

SEQ ID NO: 3306386 - RNA, 19 nt, Human
gagcaccuuagacaguccc

SEQ ID NO: 3306387 - RNA, 15 nt, Human
gagcacuaaggugug

SEQ ID NO: 3306388 - RNA, 22 nt, Human
gagcaccuuagacagucccugc

SEQ ID NO: 3306389 - RNA, 21 nt, Human
gagcaccuuagacagucccug

SEQ ID NO: 3306390 - RNA, 16 nt, Human
gagcagagaauucucu

SEQ ID NO: 3306391 - RNA, 12 nt, Human
gagcagagacca

SEQ ID NO: 3306392 - RNA, 20 nt, Human
gagccagauuucacucuccu

SEQ ID NO: 3306393 - RNA, 19 nt, Human
gagccaauuuaaagaaaac

SEQ ID NO: 3306394 - RNA, 18 nt, Human
gagcccugguggcagugg

SEQ ID NO: 3306395 - RNA, 14 nt, Human
gagccagggucuca

SEQ ID NO: 3306396 - RNA, 23 nt, Human
gagccagauuucacucuccuugg

SEQ ID NO: 3306397 - RNA, 19 nt, Human
gagccagggucucacuaug

SEQ ID NO: 3306398 - RNA, 14 nt, Human
gagaaaugagcuug

SEQ ID NO: 3306399 - RNA, 16 nt, Human
gagaaagguugaagca

SEQ ID NO: 3306400 - RNA, 14 nt, Human
gagaagagaaugca

SEQ ID NO: 3306401 - RNA, 16 nt, Human
gagaagcagaggaagg

SEQ ID NO: 3306402 - RNA, 16 nt, Human
gagaagagaaugcaca

SEQ ID NO: 3306403 - RNA, 19 nt, Human
gacuuaagcacacuugaca

SEQ ID NO: 3306404 - RNA, 23 nt, Human
gacugaguacguugugcauuugg

SEQ ID NO: 3306405 - RNA, 13 nt, Human
gacugcccggcag

SEQ ID NO: 3306406 - RNA, 15 nt, Human
gacugcccggcaggg

SEQ ID NO: 3306407 - RNA, 18 nt, Human
gacugaguacguugugca

SEQ ID NO: 3306408 - RNA, 22 nt, Human
gacugaguacguugugcauuug

SEQ ID NO: 3306409 - RNA, 21 nt, Human
gacugaguacguugugcauuu

SEQ ID NO: 3306410 - RNA, 17 nt, Human
gacucgcgacaaugcaa

SEQ ID NO: 3306411 - RNA, 14 nt, Human
gacuggaagcacag

SEQ ID NO: 3306412 - RNA, 15 nt, Human
gacuggaagcacagc

SEQ ID NO: 3306413 - RNA, 16 nt, Human
gacuggaagcacagcu

SEQ ID NO: 3306414 - RNA, 18 nt, Human
gacuggaagcacagcuuc

SEQ ID NO: 3306415 - RNA, 13 nt, Human
gacucgcgacaau

SEQ ID NO: 3306416 - RNA, 21 nt, Human
gacuccugcaggcagccaggc

SEQ ID NO: 3306417 - RNA, 13 nt, Human
gacuccugcaggc

SEQ ID NO: 3306418 - RNA, 12 nt, Human
gacuccugcagg

SEQ ID NO: 3306419 - RNA, 13 nt, Human
gacuacaggugug

SEQ ID NO: 3306420 - RNA, 18 nt, Human
gacuacaggugugaguca

SEQ ID NO: 3306421 - RNA, 21 nt, Human
gacuacaggugugagucacca

SEQ ID NO: 3306422 - RNA, 14 nt, Human
gacucauucuucug

SEQ ID NO: 3306423 - RNA, 15 nt, Human
gacucauucuucugu

SEQ ID NO: 3306424 - RNA, 19 nt, Human
gccgagauagccaaggcca

SEQ ID NO: 3306425 - RNA, 14 nt, Human
gccucaaccuccug

SEQ ID NO: 3306426 - RNA, 16 nt, Human
gccucaaccuccuggg

SEQ ID NO: 3306427 - RNA, 19 nt, Human
gccucaagugauucuccug

SEQ ID NO: 3306428 - RNA, 20 nt, Human
gccucaagugauucuccugc

SEQ ID NO: 3306429 - RNA, 21 nt, Human
gccucaagugauucuccugcc

SEQ ID NO: 3306430 - RNA, 12 nt, Human
gccucagugcca

SEQ ID NO: 3306431 - RNA, 14 nt, Human
gccucagugccacu

SEQ ID NO: 3306432 - RNA, 23 nt, Human
gccucagccucccaaagugcugg

SEQ ID NO: 3306433 - RNA, 22 nt, Human
gccucagccucccaaagugcug

SEQ ID NO: 3306434 - RNA, 21 nt, Human
gccucacaguccuuaccagca

SEQ ID NO: 3306435 - RNA, 21 nt, Human
gccucccgaauagcugggacu

SEQ ID NO: 3306436 - RNA, 14 nt, Human
gccucccacgacug

SEQ ID NO: 3306437 - RNA, 21 nt, Human
gccucccacgacugcccggca

SEQ ID NO: 3306438 - RNA, 23 nt, Human
gccucccaacucaccccagcccc

SEQ ID NO: 3306439 - RNA, 22 nt, Human
gccucccaacucaccccagccc

SEQ ID NO: 3306440 - RNA, 15 nt, Human
gccucagugccacua

SEQ ID NO: 3306441 - RNA, 21 nt, Human
gccucccaacucaccccagcc

SEQ ID NO: 3306442 - RNA, 23 nt, Human
gccucccgaauagcugggacuac

SEQ ID NO: 3306443 - RNA, 15 nt, Human
gccucccgaguagcu

SEQ ID NO: 3306444 - RNA, 15 nt, Human
gccugcuccagcugu

SEQ ID NO: 3306445 - RNA, 13 nt, Human
gccugcuccagcu

SEQ ID NO: 3306446 - RNA, 18 nt, Human
gccugcuccagcuguuca

SEQ ID NO: 3306447 - RNA, 16 nt, Human
gccugcuccagcuguu

SEQ ID NO: 3306448 - RNA, 18 nt, Human
gccugaagucacacagug

SEQ ID NO: 3306449 - RNA, 22 nt, Human
gccugaagucacacagugaguc

SEQ ID NO: 3306450 - RNA, 18 nt, Human
gccucugccucugacaca

SEQ ID NO: 3306451 - RNA, 20 nt, Human
gccugggggcugggcagagg

SEQ ID NO: 3306452 - RNA, 17 nt, Human
gccugggcagaaggaag

SEQ ID NO: 3306453 - RNA, 16 nt, Human
gccugggcagaaggaa

SEQ ID NO: 3306454 - RNA, 11 nt, Human
gccugggcaga

SEQ ID NO: 3306455 - RNA, 14 nt, Human
gccuggauggggcu

SEQ ID NO: 3306456 - RNA, 15 nt, Human
gccuggauggggcug

SEQ ID NO: 3306457 - RNA, 15 nt, Human
gccugggcagaagga

SEQ ID NO: 3306458 - RNA, 14 nt, Human
gccuggccagaugc

SEQ ID NO: 3306459 - RNA, 15 nt, Human
gccuggccagaugca

SEQ ID NO: 3306460 - RNA, 22 nt, Human
gccuggccagaugcaccagccc

SEQ ID NO: 3306461 - RNA, 14 nt, Human
gcccugguggcagu

SEQ ID NO: 3306462 - RNA, 17 nt, Human
gcccugguggcaguggg

SEQ ID NO: 3306463 - RNA, 18 nt, Human
gcccugguggcaguggga

SEQ ID NO: 3306464 - RNA, 19 nt, Human
gcccugguggcagugggag

SEQ ID NO: 3306465 - RNA, 20 nt, Human
gcccugguggcagugggagc

SEQ ID NO: 3306466 - RNA, 21 nt, Human
gcccugguggcagugggagcu

SEQ ID NO: 3306467 - RNA, 22 nt, Human
gcccugguggcagugggagcug

SEQ ID NO: 3306468 - RNA, 23 nt, Human
gcccugguggcagugggagcugc

SEQ ID NO: 3306469 - RNA, 16 nt, Human
gccgagaucacgccac

SEQ ID NO: 3306470 - RNA, 18 nt, Human
gccgagaucacgccacug

SEQ ID NO: 3306471 - RNA, 17 nt, Human
gccgagauugcaccacu

SEQ ID NO: 3306472 - RNA, 18 nt, Human
gccgagauugcaccacug

SEQ ID NO: 3306473 - RNA, 22 nt, Human
gcccuucucuccagccccugga

SEQ ID NO: 3306474 - RNA, 21 nt, Human
gcccuucucuccagccccugg

SEQ ID NO: 3306475 - RNA, 19 nt, Human
gcccuucucuccagccccu

SEQ ID NO: 3306476 - RNA, 18 nt, Human
gcccuucucuccagcccc

SEQ ID NO: 3306477 - RNA, 15 nt, Human
gcccggcuccaggcu

SEQ ID NO: 3306478 - RNA, 16 nt, Human
gcccggcuccaggcuc

SEQ ID NO: 3306479 - RNA, 13 nt, Human
gccccugccaccc

SEQ ID NO: 3306480 - RNA, 14 nt, Human
gccccugccacccu

SEQ ID NO: 3306481 - RNA, 15 nt, Human
gccccugccacccug

SEQ ID NO: 3306482 - RNA, 17 nt, Human
gccccuguucuggcaga

SEQ ID NO: 3306483 - RNA, 21 nt, Human
gccccuguucuggcagaguug

SEQ ID NO: 3306484 - RNA, 15 nt, Human
gcagacucuacagag

SEQ ID NO: 3306485 - RNA, 17 nt, Human
gcccggcuccaggcucc

SEQ ID NO: 3306486 - RNA, 18 nt, Human
gcccggcuccaggcuccu

SEQ ID NO: 3306487 - RNA, 14 nt, Human
gcccugagcuuucu

SEQ ID NO: 3306488 - RNA, 16 nt, Human
gcccugagcuuucugc

SEQ ID NO: 3306489 - RNA, 12 nt, Human
gcccucugccca

SEQ ID NO: 3306490 - RNA, 19 nt, Human
gcucuccgaccagacaccu

SEQ ID NO: 3306491 - RNA, 13 nt, Human
gcucuccgaccag

SEQ ID NO: 3306492 - RNA, 17 nt, Human
gcucuccgaccagacac

SEQ ID NO: 3306493 - RNA, 16 nt, Human
gcucgagcaugccugg

SEQ ID NO: 3306494 - RNA, 15 nt, Human
gcucccuucccaccu

SEQ ID NO: 3306495 - RNA, 18 nt, Human
gcucccuucccaccucuc

SEQ ID NO: 3306496 - RNA, 16 nt, Human
gcucccuucccaccuc

SEQ ID NO: 3306497 - RNA, 15 nt, Human
gcuccuucuguccua

SEQ ID NO: 3306498 - RNA, 21 nt, Human
gcuccuucuguccuacucugu

SEQ ID NO: 3306499 - RNA, 14 nt, Human
gcucugcccuuggu

SEQ ID NO: 3306500 - RNA, 13 nt, Human
gcucugcccuugg

SEQ ID NO: 3306501 - RNA, 11 nt, Human
gcucugccucc

SEQ ID NO: 3306502 - RNA, 23 nt, Human
gcucugcccuugguuaggcauug

SEQ ID NO: 3306503 - RNA, 13 nt, Human
gcucugcuccucu

SEQ ID NO: 3306504 - RNA, 14 nt, Human
gcucugcuccucuc

SEQ ID NO: 3306505 - RNA, 22 nt, Human
gcucugccucccaucacccgcu

SEQ ID NO: 3306506 - RNA, 15 nt, Human
gcucugccucccauc

SEQ ID NO: 3306507 - RNA, 14 nt, Human
gcucugccucccau

SEQ ID NO: 3306508 - RNA, 13 nt, Human
gcucugccuccca

SEQ ID NO: 3306509 - RNA, 14 nt, Human
gcucuggacaggca

SEQ ID NO: 3306510 - RNA, 15 nt, Human
gcucuggacaggcau

SEQ ID NO: 3306511 - RNA, 16 nt, Human
gcucuggacaggcaug

SEQ ID NO: 3306512 - RNA, 21 nt, Human
gcucuggacaggcauguucuc

SEQ ID NO: 3306513 - RNA, 22 nt, Human
gcucuggacaggcauguucucu

SEQ ID NO: 3306514 - RNA, 19 nt, Human
gcucugcuccucuccccag

SEQ ID NO: 3306515 - RNA, 21 nt, Human
gcucugcuccucuccccagca

SEQ ID NO: 3306516 - RNA, 13 nt, Human
gcucugcugacag

SEQ ID NO: 3306517 - RNA, 14 nt, Human
gcucugcugacaga

SEQ ID NO: 3306518 - RNA, 18 nt, Human
gcucugcugacagacaca

SEQ ID NO: 3306519 - RNA, 19 nt, Human
gcucugcugacagacacag

SEQ ID NO: 3306520 - RNA, 20 nt, Human
gcucugcugacagacacagg

SEQ ID NO: 3306521 - RNA, 23 nt, Human
gcucugcugacagacacaggccc

SEQ ID NO: 3306522 - RNA, 23 nt, Human
gcugagugggggaucacagccuc

SEQ ID NO: 3306523 - RNA, 22 nt, Human
gcugagugggggaucacagccu

SEQ ID NO: 3306524 - RNA, 16 nt, Human
gcugauggugcaauga

SEQ ID NO: 3306525 - RNA, 15 nt, Human
gcugauggugcaaug

SEQ ID NO: 3306526 - RNA, 15 nt, Human
gcugagucugaaggc

SEQ ID NO: 3306527 - RNA, 18 nt, Human
gcugagucugaaggcugg

SEQ ID NO: 3306528 - RNA, 16 nt, Human
gcugagucugaaggcu

SEQ ID NO: 3306529 - RNA, 19 nt, Human
gcugagucugaaggcuggg

SEQ ID NO: 3306530 - RNA, 17 nt, Human
gcugcaguugccaguca

SEQ ID NO: 3306531 - RNA, 21 nt, Human
gcugcaguugccagucacccc

SEQ ID NO: 3306532 - RNA, 20 nt, Human
gcugcaguugccagucaccc

SEQ ID NO: 3306533 - RNA, 18 nt, Human
gcugcaguugccagucac

SEQ ID NO: 3306534 - RNA, 21 nt, Human
gcugauggugcaaugaccuuu

SEQ ID NO: 3306535 - RNA, 18 nt, Human
gcugauggugcaaugacc

SEQ ID NO: 3306536 - RNA, 21 nt, Human
gcugacagacacaggcccggc

SEQ ID NO: 3306537 - RNA, 20 nt, Human
gcugacagacacaggcccgg

SEQ ID NO: 3306538 - RNA, 22 nt, Human
gcucuuccaggcugggagagcc

SEQ ID NO: 3306539 - RNA, 12 nt, Human
gcucuucuccag

SEQ ID NO: 3306540 - RNA, 18 nt, Human
gcucuuccaggcugggag

SEQ ID NO: 3306541 - RNA, 19 nt, Human
gcucuuccaggcugggaga

SEQ ID NO: 3306542 - RNA, 14 nt, Human
gcucuucuccaggc

SEQ ID NO: 3306543 - RNA, 16 nt, Human
gcucuucuccaggcug

SEQ ID NO: 3306544 - RNA, 23 nt, Human
gcuaagagggagggagggcucca

SEQ ID NO: 3306545 - RNA, 15 nt, Human
gcuacccgggaaggg

SEQ ID NO: 3306546 - RNA, 14 nt, Human
gcuacccgggaagg

SEQ ID NO: 3306547 - RNA, 20 nt, Human
gcuaccuuuguauucucucc

SEQ ID NO: 3306548 - RNA, 21 nt, Human
gcuacccgggaagggggcugg

SEQ ID NO: 3306549 - RNA, 18 nt, Human
gcuagagguucaaagaua

SEQ ID NO: 3306550 - RNA, 21 nt, Human
gcuagagguucaaagauauuu

SEQ ID NO: 3306551 - RNA, 19 nt, Human
gcuagagguucaaagauau

SEQ ID NO: 3306552 - RNA, 15 nt, Human
gcuaucucccccagc

SEQ ID NO: 3306553 - RNA, 23 nt, Human
gcuaucucccccagccccauccu

SEQ ID NO: 3306554 - RNA, 22 nt, Human
gcuaucucccccagccccaucc

SEQ ID NO: 3306555 - RNA, 21 nt, Human
gcuaucucccccagccccauc

SEQ ID NO: 3306556 - RNA, 20 nt, Human
gcuaucucccccagccccau

SEQ ID NO: 3306557 - RNA, 19 nt, Human
gcuaucucccccagcccca

SEQ ID NO: 3306558 - RNA, 22 nt, Human
gcuagcagcagggagggcuucu

SEQ ID NO: 3306559 - RNA, 18 nt, Human
gcuaucucccccagcccc

SEQ ID NO: 3306560 - RNA, 17 nt, Human
gcuaucucccccagccc

SEQ ID NO: 3306561 - RNA, 16 nt, Human
gcuaucucccccagcc

SEQ ID NO: 3306562 - RNA, 16 nt, Human
gcuaaaugugaaugau

SEQ ID NO: 3306563 - RNA, 13 nt, Human
gcuaaaugugaau

SEQ ID NO: 3306564 - RNA, 22 nt, Human
gcuaagagggagggagggcucc

SEQ ID NO: 3306565 - RNA, 21 nt, Human
gcuaagagggagggagggcuc

SEQ ID NO: 3306566 - RNA, 16 nt, Human
gcgugagccacugcac

SEQ ID NO: 3306567 - RNA, 18 nt, Human
gcgugagccacugcaccg

SEQ ID NO: 3306568 - RNA, 23 nt, Human
gcgugagccacugcaccgggcca

SEQ ID NO: 3306569 - RNA, 18 nt, Human
gcgguccacccaggagcc

SEQ ID NO: 3306570 - RNA, 19 nt, Human
gcgguccacccaggagccc

SEQ ID NO: 3306571 - RNA, 12 nt, Human
gcggggacagcu

SEQ ID NO: 3306572 - RNA, 15 nt, Human
gcgggcuuccuccug

SEQ ID NO: 3306573 - RNA, 13 nt, Human
gcggggacagcuc

SEQ ID NO: 3306574 - RNA, 16 nt, Human
gcgguccacccaggag

SEQ ID NO: 3306575 - RNA, 18 nt, Human
gcucaccagccccagugc

SEQ ID NO: 3306576 - RNA, 19 nt, Human
gcucaccagccccagugcc

SEQ ID NO: 3306577 - RNA, 20 nt, Human
gcucaccagccccagugccc

SEQ ID NO: 3306578 - RNA, 23 nt, Human
gcucaccagccccagugcccaca

SEQ ID NO: 3306579 - RNA, 23 nt, Human
gcucagcaaaagaugcuucucac

SEQ ID NO: 3306580 - RNA, 22 nt, Human
gcucagcaaaagaugcuucuca

SEQ ID NO: 3306581 - RNA, 20 nt, Human
gcucagcaaaagaugcuucu

SEQ ID NO: 3306582 - RNA, 17 nt, Human
gcucagcaaaagaugcu

SEQ ID NO: 3306583 - RNA, 20 nt, Human
gcucagcggggacagcuccu

SEQ ID NO: 3306584 - RNA, 19 nt, Human
gcucagcggggacagcucc

SEQ ID NO: 3306585 - RNA, 15 nt, Human
gcucagcggggacag

SEQ ID NO: 3306586 - RNA, 21 nt, Human
gcucagcggggacagcuccuu

SEQ ID NO: 3306587 - RNA, 18 nt, Human
gcucaggugucccugcac

SEQ ID NO: 3306588 - RNA, 17 nt, Human
gcucaggugucccugca

SEQ ID NO: 3306589 - RNA, 19 nt, Human
gcucaggugucccugcacu

SEQ ID NO: 3306590 - RNA, 13 nt, Human
gcuccaagcuccc

SEQ ID NO: 3306591 - RNA, 15 nt, Human
gcuccaagcucccag

SEQ ID NO: 3306592 - RNA, 14 nt, Human
gcuccaagcuccca

SEQ ID NO: 3306593 - RNA, 21 nt, Human
gcuccagcucaccagccccag

SEQ ID NO: 3306594 - RNA, 21 nt, Human
gcuccaagcucccaggcauuc

SEQ ID NO: 3306595 - RNA, 19 nt, Human
gcuccaagcucccaggcau

SEQ ID NO: 3306596 - RNA, 18 nt, Human
gcuccaagcucccaggca

SEQ ID NO: 3306597 - RNA, 17 nt, Human
gcuccaagcucccaggc

SEQ ID NO: 3306598 - RNA, 16 nt, Human
gcuccaagcucccagg

SEQ ID NO: 3306599 - RNA, 13 nt, Human
gcuccaggcuccu

SEQ ID NO: 3306600 - RNA, 11 nt, Human
gcuccagcugu

SEQ ID NO: 3306601 - RNA, 16 nt, Human
gcuccaggcuccuuua

SEQ ID NO: 3306602 - RNA, 23 nt, Human
gcuccaggcuccuuuagcgccca

SEQ ID NO: 3306603 - RNA, 15 nt, Human
ggcuaugcauuugaa

SEQ ID NO: 3306604 - RNA, 16 nt, Human
ggcuaguugggcuucc

SEQ ID NO: 3306605 - RNA, 14 nt, Human
ggcuaugcauuuga

SEQ ID NO: 3306606 - RNA, 15 nt, Human
ggcuaguugggcuuc

SEQ ID NO: 3306607 - RNA, 23 nt, Human
ggcuagugugguguuuccuggca

SEQ ID NO: 3306608 - RNA, 22 nt, Human
ggcuaggaccccuccauguggg

SEQ ID NO: 3306609 - RNA, 16 nt, Human
ggcuaggaccccucca

SEQ ID NO: 3306610 - RNA, 16 nt, Human
ggcuagagguucaaag

SEQ ID NO: 3306611 - RNA, 17 nt, Human
ggcuagagguucaaaga

SEQ ID NO: 3306612 - RNA, 22 nt, Human
ggcuagagguucaaagauauuu

SEQ ID NO: 3306613 - RNA, 15 nt, Human
ggcucaaguccucuu

SEQ ID NO: 3306614 - RNA, 21 nt, Human
ggcucaaguccucuuuucuga

SEQ ID NO: 3306615 - RNA, 12 nt, Human
ggcuccaggagc

SEQ ID NO: 3306616 - RNA, 19 nt, Human
ggcuccaggagcagccaca

SEQ ID NO: 3306617 - RNA, 16 nt, Human
ggcuccaggcuccuuu

SEQ ID NO: 3306618 - RNA, 11 nt, Human
ggcuccaggcu

SEQ ID NO: 3306619 - RNA, 15 nt, Human
ggcuccaggcuccuu

SEQ ID NO: 3306620 - RNA, 18 nt, Human
ggcuccaggagcagccac

SEQ ID NO: 3306621 - RNA, 19 nt, Human
ggccuggccugagcuggga

SEQ ID NO: 3306622 - RNA, 14 nt, Human
ggccugggggcugg

SEQ ID NO: 3306623 - RNA, 20 nt, Human
ggccugggggcugggcagag

SEQ ID NO: 3306624 - RNA, 23 nt, Human
ggcgcugccccuggcagccccug

SEQ ID NO: 3306625 - RNA, 21 nt, Human
ggcgcugccccuggcagcccc

SEQ ID NO: 3306626 - RNA, 19 nt, Human
ggcgcugccccuggcagcc

SEQ ID NO: 3306627 - RNA, 18 nt, Human
ggcgcugccccuggcagc

SEQ ID NO: 3306628 - RNA, 23 nt, Human
ggccuagcauacguacacauuuu

SEQ ID NO: 3306629 - RNA, 17 nt, Human
ggccucuuaugggcugg

SEQ ID NO: 3306630 - RNA, 18 nt, Human
ggccucuuaugggcuggg

SEQ ID NO: 3306631 - RNA, 15 nt, Human
ggccucugcacuccc

SEQ ID NO: 3306632 - RNA, 14 nt, Human
ggccucugcacucc

SEQ ID NO: 3306633 - RNA, 13 nt, Human
ggccucugcacuc

SEQ ID NO: 3306634 - RNA, 11 nt, Human
ggcccagagag

SEQ ID NO: 3306635 - RNA, 17 nt, Human
ggcccucugcccacucc

SEQ ID NO: 3306636 - RNA, 16 nt, Human
ggcccucugcccacuc

SEQ ID NO: 3306637 - RNA, 15 nt, Human
ggcccucugcccacu

SEQ ID NO: 3306638 - RNA, 13 nt, Human
ggcccucugccca

SEQ ID NO: 3306639 - RNA, 20 nt, Human
ggcccucugcccacucccug

SEQ ID NO: 3306640 - RNA, 19 nt, Human
ggcccucugcccacucccu

SEQ ID NO: 3306641 - RNA, 21 nt, Human
ggcccucugcccacucccugc

SEQ ID NO: 3306642 - RNA, 15 nt, Human
ggcccugccuccuuu

SEQ ID NO: 3306643 - RNA, 14 nt, Human
ggcccugccuccuu

SEQ ID NO: 3306644 - RNA, 13 nt, Human
ggcccugccuccu

SEQ ID NO: 3306645 - RNA, 19 nt, Human
ggauuacaagcgugagcca

SEQ ID NO: 3306646 - RNA, 15 nt, Human
ggaugcuuguacaua

SEQ ID NO: 3306647 - RNA, 19 nt, Human
ggaugcagccucacagucc

SEQ ID NO: 3306648 - RNA, 21 nt, Human
ggaugccugguggcagcugcg

SEQ ID NO: 3306649 - RNA, 17 nt, Human
ggaugcagccucacagu

SEQ ID NO: 3306650 - RNA, 16 nt, Human
ggaugcagccucacag

SEQ ID NO: 3306651 - RNA, 21 nt, Human
ggaugauuggaggggggaggu

SEQ ID NO: 3306652 - RNA, 23 nt, Human
ggaugcacagaguuguuacauuu

SEQ ID NO: 3306653 - RNA, 13 nt, Human
ggauccuccaggu

SEQ ID NO: 3306654 - RNA, 12 nt, Human
ggauccuccagg

SEQ ID NO: 3306655 - RNA, 18 nt, Human
ggauacaaaagcauguga

SEQ ID NO: 3306656 - RNA, 14 nt, Human
ggagugcagugagc

SEQ ID NO: 3306657 - RNA, 12 nt, Human
ggagugcaguga

SEQ ID NO: 3306658 - RNA, 23 nt, Human
ggagugaguugauagcacagacc

SEQ ID NO: 3306659 - RNA, 17 nt, Human
ggaucccucauccucau

SEQ ID NO: 3306660 - RNA, 13 nt, Human
ggaucccucaucc

SEQ ID NO: 3306661 - RNA, 22 nt, Human
ggaucccucauccucauaccca

SEQ ID NO: 3306662 - RNA, 23 nt, Human
ggauuacaagcgugagccacugc

SEQ ID NO: 3306663 - RNA, 16 nt, Human
ggauucuuauggacaa

SEQ ID NO: 3306664 - RNA, 16 nt, Human
ggcaacccccagccug

SEQ ID NO: 3306665 - RNA, 17 nt, Human
ggcaacccccagccugc

SEQ ID NO: 3306666 - RNA, 17 nt, Human
ggauugcuacuguccua

SEQ ID NO: 3306667 - RNA, 20 nt, Human
ggcacccaccaucaugucug

SEQ ID NO: 3306668 - RNA, 23 nt, Human
ggcacccaccaucaugucuggcu

SEQ ID NO: 3306669 - RNA, 20 nt, Human
ggcacccggccccugcuggu

SEQ ID NO: 3306670 - RNA, 22 nt, Human
ggcacccggccccugcugguuc

SEQ ID NO: 3306671 - RNA, 14 nt, Human
ggcaaugcuggcug

SEQ ID NO: 3306672 - RNA, 15 nt, Human
ggcaaugcuggcugu

SEQ ID NO: 3306673 - RNA, 23 nt, Human
ggcaaugcuggcuguuggcuggg

SEQ ID NO: 3306674 - RNA, 18 nt, Human
ggcaacccccagccugcu

SEQ ID NO: 3306675 - RNA, 16 nt, Human
ggccaugggccuccug

SEQ ID NO: 3306676 - RNA, 20 nt, Human
ggccagccuugaccauucuc

SEQ ID NO: 3306677 - RNA, 17 nt, Human
ggccagcugcuugggcu

SEQ ID NO: 3306678 - RNA, 22 nt, Human
ggccagccuugaccauucucca

SEQ ID NO: 3306679 - RNA, 18 nt, Human
ggccaggcccucugccca

SEQ ID NO: 3306680 - RNA, 23 nt, Human
ggccagcugcuugggcuucaucc

SEQ ID NO: 3306681 - RNA, 18 nt, Human
ggcaugggaaugaauguc

SEQ ID NO: 3306682 - RNA, 17 nt, Human
ggcauuccccaggaggc

SEQ ID NO: 3306683 - RNA, 22 nt, Human
ggcaugggaaugaaugucagug

SEQ ID NO: 3306684 - RNA, 16 nt, Human
ggcauuccccaggagg

SEQ ID NO: 3306685 - RNA, 19 nt, Human
ggcauuccccaggaggcca

SEQ ID NO: 3306686 - RNA, 18 nt, Human
ggcauuccccaggaggcc

SEQ ID NO: 3306687 - RNA, 19 nt, Human
ggcagggucucacucuguc

SEQ ID NO: 3306688 - RNA, 20 nt, Human
ggcagggucucacucugucg

SEQ ID NO: 3306689 - RNA, 13 nt, Human
ggcagugggagcu

SEQ ID NO: 3306690 - RNA, 14 nt, Human
ggcagugggagcug

SEQ ID NO: 3306691 - RNA, 16 nt, Human
ggcagugggagcugcc

SEQ ID NO: 3306692 - RNA, 18 nt, Human
ggcaugacacgaauauug

SEQ ID NO: 3306693 - RNA, 15 nt, Human
ggcaugaagacagau

SEQ ID NO: 3306694 - RNA, 14 nt, Human
ggcagcucaccucu

SEQ ID NO: 3306695 - RNA, 12 nt, Human
ggcagcucaccu

SEQ ID NO: 3306696 - RNA, 22 nt, Human
ggcagcugcuuuugucuauggg

SEQ ID NO: 3306697 - RNA, 18 nt, Human
ggcagggucucacucugu

SEQ ID NO: 3306698 - RNA, 21 nt, Human
ggcagcucagagaggguggga

SEQ ID NO: 3306699 - RNA, 13 nt, Human
ggcagcucagaga

SEQ ID NO: 3306700 - RNA, 18 nt, Human
ggagaagcggcuggcagc

SEQ ID NO: 3306701 - RNA, 17 nt, Human
ggagaagcggcuggcag

SEQ ID NO: 3306702 - RNA, 13 nt, Human
ggaccagagcugc

SEQ ID NO: 3306703 - RNA, 23 nt, Human
ggaccucaggugagaagcagagg

SEQ ID NO: 3306704 - RNA, 20 nt, Human
ggaccucaggccugggggcu

SEQ ID NO: 3306705 - RNA, 19 nt, Human
ggaccucaggugagaagca

SEQ ID NO: 3306706 - RNA, 15 nt, Human
ggaccuugaacuggg

SEQ ID NO: 3306707 - RNA, 17 nt, Human
ggaccuugaacugggua

SEQ ID NO: 3306708 - RNA, 17 nt, Human
ggacgcuacccgggaag

SEQ ID NO: 3306709 - RNA, 20 nt, Human
ggacgcuacccgggaagggg

SEQ ID NO: 3306710 - RNA, 19 nt, Human
ggacgcuacccgggaaggg

SEQ ID NO: 3306711 - RNA, 17 nt, Human
ggacacucaaaagcugg

SEQ ID NO: 3306712 - RNA, 20 nt, Human
ggacagaggggguggccucc

SEQ ID NO: 3306713 - RNA, 15 nt, Human
ggacagccacggcca

SEQ ID NO: 3306714 - RNA, 19 nt, Human
ggacagccacggccaggcc

SEQ ID NO: 3306715 - RNA, 20 nt, Human
ggacagccacggccaggcca

SEQ ID NO: 3306716 - RNA, 21 nt, Human
ggacagccacggccaggccag

SEQ ID NO: 3306717 - RNA, 14 nt, Human
ggacauggacaagg

SEQ ID NO: 3306718 - RNA, 20 nt, Human
ggacauugcggacagccacg

SEQ ID NO: 3306719 - RNA, 14 nt, Human
ggaaugauuaauua

SEQ ID NO: 3306720 - RNA, 18 nt, Human
ggaaguacuggagaaaau

SEQ ID NO: 3306721 - RNA, 16 nt, Human
ggaaguacuggagaaa

SEQ ID NO: 3306722 - RNA, 12 nt, Human
ggaaguacugga

SEQ ID NO: 3306723 - RNA, 23 nt, Human
ggaaggggagauaaggguaucug

SEQ ID NO: 3306724 - RNA, 12 nt, Human
ggaaugcagugg

SEQ ID NO: 3306725 - RNA, 24 nt, Human
ggaaugauuaauuaaaacacaaca

SEQ ID NO: 3306726 - RNA, 19 nt, Human
ggaauguuugccucugccu

SEQ ID NO: 3306727 - RNA, 22 nt, Human
ggacacuaaccacgcuggaccu

SEQ ID NO: 3306728 - RNA, 15 nt, Human
gcuuugugauuuuug

SEQ ID NO: 3306729 - RNA, 18 nt, Human
gcuugaggguugggcugg

SEQ ID NO: 3306730 - RNA, 20 nt, Human
gcuugaggguugggcuggug

SEQ ID NO: 3306731 - RNA, 21 nt, Human
gcuuuguuuguugucagcuga

SEQ ID NO: 3306732 - RNA, 18 nt, Human
ggaaaacaugcuacacac

SEQ ID NO: 3306733 - RNA, 18 nt, Human
ggaaaagcugcugacagu

SEQ ID NO: 3306734 - RNA, 20 nt, Human
ggaaaagcugcugacagugu

SEQ ID NO: 3306735 - RNA, 14 nt, Human
ggaaaagcugcuga

SEQ ID NO: 3306736 - RNA, 14 nt, Human
ggaaaucaccgaaa

SEQ ID NO: 3306737 - RNA, 21 nt, Human
ggaaaucaccgaaaacguggc

SEQ ID NO: 3306738 - RNA, 16 nt, Human
ggaacaggaaacugau

SEQ ID NO: 3306739 - RNA, 23 nt, Human
ggaaaaucagccugcuccagcug

SEQ ID NO: 3306740 - RNA, 19 nt, Human
ggaaaaucagccugcucca

SEQ ID NO: 3306741 - RNA, 14 nt, Human
ggaaaggcuccagg

SEQ ID NO: 3306742 - RNA, 13 nt, Human
ggaaaggcuccag

SEQ ID NO: 3306743 - RNA, 12 nt, Human
ggaaaggcucca

SEQ ID NO: 3306744 - RNA, 21 nt, Human
ggaaaggcuccaggagcagcc

SEQ ID NO: 3306745 - RNA, 20 nt, Human
ggaaaggcuccaggagcagc

SEQ ID NO: 3306746 - RNA, 19 nt, Human
ggaaaggcuccaggagcag

SEQ ID NO: 3306747 - RNA, 17 nt, Human
ggaaaggcuccaggagc

SEQ ID NO: 3306748 - RNA, 22 nt, Human
ggaaaggcuccaggagcagcca

SEQ ID NO: 3306749 - RNA, 19 nt, Human
gcugccaaugggagcucau

SEQ ID NO: 3306750 - RNA, 16 nt, Human
gcugccaaugggagcu

SEQ ID NO: 3306751 - RNA, 15 nt, Human
gcugccaaugggagc

SEQ ID NO: 3306752 - RNA, 13 nt, Human
gcuguucagcugg

SEQ ID NO: 3306753 - RNA, 14 nt, Human
gcuguucagcuggu

SEQ ID NO: 3306754 - RNA, 20 nt, Human
gcuuagucacugagacagcc

SEQ ID NO: 3306755 - RNA, 19 nt, Human
gcuuagucacugagacagc

SEQ ID NO: 3306756 - RNA, 21 nt, Human
gcuuagucacugagacagccc

SEQ ID NO: 3306757 - RNA, 17 nt, Human
gcuuagucacugagaca

SEQ ID NO: 3306758 - RNA, 15 nt, Human
gcuuagucacugaga

SEQ ID NO: 3306759 - RNA, 16 nt, Human
gcuugaggguugggcu

SEQ ID NO: 3306760 - RNA, 15 nt, Human
gcuuccagugaggcu

SEQ ID NO: 3306761 - RNA, 17 nt, Human
gcuucauuuccuguguc

SEQ ID NO: 3306762 - RNA, 16 nt, Human
gcuuccagugaggcuc

SEQ ID NO: 3306763 - RNA, 16 nt, Human
gcuucaguggcagcug

SEQ ID NO: 3306764 - RNA, 15 nt, Human
gcuucaguggcagcu

SEQ ID NO: 3306765 - RNA, 19 nt, Human
gcuuaucucaggggugugc

SEQ ID NO: 3306766 - RNA, 13 nt, Human
gcuuaucucaggg

SEQ ID NO: 3306767 - RNA, 12 nt, Human
gcuuauacacuu

SEQ ID NO: 3306768 - RNA, 13 nt, Human
gcuucauuuccug

SEQ ID NO: 3306769 - RNA, 16 nt, Human
gcuucauuuccugugu

SEQ ID NO: 3306770 - RNA, 15 nt, Human
gcuucauccuccuca

SEQ ID NO: 3306771 - RNA, 12 nt, Human
gcuucauccucc

SEQ ID NO: 3306772 - RNA, 17 nt, Human
gcuucaguggcagcugc

SEQ ID NO: 3306773 - RNA, 18 nt, Human
gcuucaguggcagcugcu

SEQ ID NO: 3306774 - RNA, 16 nt, Human
guacccacugcucugg

SEQ ID NO: 3306775 - RNA, 22 nt, Human
guaccucuugagccuugaacuu

SEQ ID NO: 3306776 - RNA, 21 nt, Human
guaccucuugagccuugaacu

SEQ ID NO: 3306777 - RNA, 13 nt, Human
guaccucuugagc

SEQ ID NO: 3306778 - RNA, 14 nt, Human
guacgucugacagg

SEQ ID NO: 3306779 - RNA, 15 nt, Human
guacgucugacaggc

SEQ ID NO: 3306780 - RNA, 17 nt, Human
guacgucugacaggcaa

SEQ ID NO: 3306781 - RNA, 14 nt, Human
guacguugugcauu

SEQ ID NO: 3306782 - RNA, 16 nt, Human
guacguugugcauuug

SEQ ID NO: 3306783 - RNA, 15 nt, Human
guacguugugcauuu

SEQ ID NO: 3306784 - RNA, 14 nt, Human
guacuucuccaccc

SEQ ID NO: 3306785 - RNA, 15 nt, Human
guacuucuccacccu

SEQ ID NO: 3306786 - RNA, 15 nt, Human
guacuaaggaaucuu

SEQ ID NO: 3306787 - RNA, 23 nt, Human
guacuaaggaaucuuucugcuuu

SEQ ID NO: 3306788 - RNA, 17 nt, Human
guacguugugcauuugg

SEQ ID NO: 3306789 - RNA, 16 nt, Human
guagagcggagaaagg

SEQ ID NO: 3306790 - RNA, 18 nt, Human
guagagccagggucucac

SEQ ID NO: 3306791 - RNA, 21 nt, Human
guacuuguggacacagcucuu

SEQ ID NO: 3306792 - RNA, 16 nt, Human
guacuuguggacacag

SEQ ID NO: 3306793 - RNA, 20 nt, Human
guacuuguggacacagcucu

SEQ ID NO: 3306794 - RNA, 16 nt, Human
guacuucuccacccug

SEQ ID NO: 3306795 - RNA, 17 nt, Human
guacuucuccacccugc

SEQ ID NO: 3306796 - RNA, 18 nt, Human
guacuucuccacccugcu

SEQ ID NO: 3306797 - RNA, 19 nt, Human
guacuucuccacccugcuc

SEQ ID NO: 3306798 - RNA, 20 nt, Human
guacuucuccacccugcucu

SEQ ID NO: 3306799 - RNA, 21 nt, Human
guacuucuccacccugcucuc

SEQ ID NO: 3306800 - RNA, 18 nt, Human
guacacuguuucaaacuu

SEQ ID NO: 3306801 - RNA, 14 nt, Human
guaauuaaguacua

SEQ ID NO: 3306802 - RNA, 17 nt, Human
guaauuaaguacuaugu

SEQ ID NO: 3306803 - RNA, 20 nt, Human
guaauuaaguacuauguauc

SEQ ID NO: 3306804 - RNA, 21 nt, Human
guaauuaaguacuauguauca

SEQ ID NO: 3306805 - RNA, 21 nt, Human
guacacuguuucaaacuuuac

SEQ ID NO: 3306806 - RNA, 20 nt, Human
guacacuguuucaaacuuua

SEQ ID NO: 3306807 - RNA, 19 nt, Human
guacacuguuucaaacuuu

SEQ ID NO: 3306808 - RNA, 16 nt, Human
guacagacaacaaacc

SEQ ID NO: 3306809 - RNA, 20 nt, Human
guacagcaaggagauuuaca

SEQ ID NO: 3306810 - RNA, 22 nt, Human
guacagagcccacgcccccacu

SEQ ID NO: 3306811 - RNA, 18 nt, Human
guacagagcccacgcccc

SEQ ID NO: 3306812 - RNA, 12 nt, Human
guacagagccca

SEQ ID NO: 3306813 - RNA, 15 nt, Human
guacccacugcucug

SEQ ID NO: 3306814 - RNA, 20 nt, Human
guacauaaugcgugcauacc

SEQ ID NO: 3306815 - RNA, 14 nt, Human
gguugggcuggugu

SEQ ID NO: 3306816 - RNA, 13 nt, Human
gguuggugggggc

SEQ ID NO: 3306817 - RNA, 13 nt, Human
gguuuaagcuguu

SEQ ID NO: 3306818 - RNA, 13 nt, Human
gguggccucccaa

SEQ ID NO: 3306819 - RNA, 21 nt, Human
gguucaagcgauucuucugcu

SEQ ID NO: 3306820 - RNA, 17 nt, Human
gguggccucccaacuca

SEQ ID NO: 3306821 - RNA, 20 nt, Human
gguucacugcaaccuccgcc

SEQ ID NO: 3306822 - RNA, 22 nt, Human
gguucaagcgauucuucugcuu

SEQ ID NO: 3306823 - RNA, 23 nt, Human
gguucaagcgauucuucugcuuc

SEQ ID NO: 3306824 - RNA, 14 nt, Human
gguugaagcaccaa

SEQ ID NO: 3306825 - RNA, 15 nt, Human
gguuuucuguucuuu

SEQ ID NO: 3306826 - RNA, 13 nt, Human
gguuuucuguucu

SEQ ID NO: 3306827 - RNA, 12 nt, Human
gguuuucuguuc

SEQ ID NO: 3306828 - RNA, 23 nt, Human
gguuuugccauguuggccaggcu

SEQ ID NO: 3306829 - RNA, 15 nt, Human
guaaauuaacuuuua

SEQ ID NO: 3306830 - RNA, 22 nt, Human
guaaauuaacuuuuauaaacuu

SEQ ID NO: 3306831 - RNA, 21 nt, Human
guaaauuaacuuuuauaaacu

SEQ ID NO: 3306832 - RNA, 17 nt, Human
guaaauuaacuuuuaua

SEQ ID NO: 3306833 - RNA, 16 nt, Human
guaaauuaacuuuuau

SEQ ID NO: 3306834 - RNA, 18 nt, Human
guaaaugggggugcauuu

SEQ ID NO: 3306835 - RNA, 20 nt, Human
guaaaugggggugcauuuga

SEQ ID NO: 3306836 - RNA, 19 nt, Human
guaaaugggggugcauuug

SEQ ID NO: 3306837 - RNA, 22 nt, Human
guaaguauucuuauuuaaugaa

SEQ ID NO: 3306838 - RNA, 18 nt, Human
guaaggaauaccuguccc

SEQ ID NO: 3306839 - RNA, 13 nt, Human
guaaggaaugauu

SEQ ID NO: 3306840 - RNA, 23 nt, Human
guaaggaauaccugucccccuga

SEQ ID NO: 3306841 - RNA, 21 nt, Human
guaaggaauaccugucccccu

SEQ ID NO: 3306842 - RNA, 20 nt, Human
guaaggaauaccuguccccc

SEQ ID NO: 3306843 - RNA, 23 nt, Human
guaaauuaacuuuuauaaacuuu

SEQ ID NO: 3306844 - RNA, 17 nt, Human
ggggaucacagccucug

SEQ ID NO: 3306845 - RNA, 11 nt, Human
ggggagaaagu

SEQ ID NO: 3306846 - RNA, 21 nt, Human
gggcuuggggaccagagcugc

SEQ ID NO: 3306847 - RNA, 13 nt, Human
ggggaguggccac

SEQ ID NO: 3306848 - RNA, 20 nt, Human
gggcuuggggaccagagcug

SEQ ID NO: 3306849 - RNA, 20 nt, Human
gggcuucauccuccucagau

SEQ ID NO: 3306850 - RNA, 15 nt, Human
gggcuucaguggcag

SEQ ID NO: 3306851 - RNA, 16 nt, Human
gggcuucaguggcagc

SEQ ID NO: 3306852 - RNA, 17 nt, Human
gggcuucaguggcagcu

SEQ ID NO: 3306853 - RNA, 18 nt, Human
gggcuucaguggcagcug

SEQ ID NO: 3306854 - RNA, 19 nt, Human
gggcuucaguggcagcugc

SEQ ID NO: 3306855 - RNA, 20 nt, Human
gggcuucaguggcagcugcu

SEQ ID NO: 3306856 - RNA, 19 nt, Human
gggcuucauccuccucaga

SEQ ID NO: 3306857 - RNA, 23 nt, Human
gggguucccuuuuuuggcugcug

SEQ ID NO: 3306858 - RNA, 19 nt, Human
ggguacuuguggacacagc

SEQ ID NO: 3306859 - RNA, 22 nt, Human
ggguacuuguggacacagcucu

SEQ ID NO: 3306860 - RNA, 23 nt, Human
ggguacuuguggacacagcucuu

SEQ ID NO: 3306861 - RNA, 23 nt, Human
ggguagagcggagaaaggaaggg

SEQ ID NO: 3306862 - RNA, 13 nt, Human
ggguacccacugc

SEQ ID NO: 3306863 - RNA, 15 nt, Human
ggguacccacugcuc

SEQ ID NO: 3306864 - RNA, 18 nt, Human
ggguacccacugcucugg

SEQ ID NO: 3306865 - RNA, 23 nt, Human
ggggcugcaccggcuggccuggc

SEQ ID NO: 3306866 - RNA, 17 nt, Human
ggggcugggcagaggaa

SEQ ID NO: 3306867 - RNA, 16 nt, Human
ggggcugggcagagga

SEQ ID NO: 3306868 - RNA, 13 nt, Human
ggggcugggacau

SEQ ID NO: 3306869 - RNA, 16 nt, Human
gggcgcgguggcucac

SEQ ID NO: 3306870 - RNA, 13 nt, Human
gggcucccuuccc

SEQ ID NO: 3306871 - RNA, 23 nt, Human
gggcucccuucccaccucucuca

SEQ ID NO: 3306872 - RNA, 18 nt, Human
gggcucccuucccaccuc

SEQ ID NO: 3306873 - RNA, 17 nt, Human
gggcucccuucccaccu

SEQ ID NO: 3306874 - RNA, 14 nt, Human
gggcucccuuccca

SEQ ID NO: 3306875 - RNA, 19 nt, Human
gggccuggccugagcuggg

SEQ ID NO: 3306876 - RNA, 12 nt, Human
gggccuggcuca

SEQ ID NO: 3306877 - RNA, 16 nt, Human
gggccuggcucaggug

SEQ ID NO: 3306878 - RNA, 14 nt, Human
gggccuggcucagg

SEQ ID NO: 3306879 - RNA, 18 nt, Human
gggccuggucguuuucaa

SEQ ID NO: 3306880 - RNA, 13 nt, Human
gggcucugccucc

SEQ ID NO: 3306881 - RNA, 20 nt, Human
gggcucugccucccaucacc

SEQ ID NO: 3306882 - RNA, 17 nt, Human
gggcucugccucccauc

SEQ ID NO: 3306883 - RNA, 16 nt, Human
gggcucugccucccau

SEQ ID NO: 3306884 - RNA, 15 nt, Human
gggcucugccuccca

SEQ ID NO: 3306885 - RNA, 14 nt, Human
gggcugcaccggcu

SEQ ID NO: 3306886 - RNA, 16 nt, Human
gggcugaggugggagg

SEQ ID NO: 3306887 - RNA, 14 nt, Human
gggcuucaguggca

SEQ ID NO: 3306888 - RNA, 15 nt, Human
ggugcgaucuggguu

SEQ ID NO: 3306889 - RNA, 22 nt, Human
ggugcuaucucccccagcccca

SEQ ID NO: 3306890 - RNA, 21 nt, Human
ggugcuaucucccccagcccc

SEQ ID NO: 3306891 - RNA, 23 nt, Human
ggugcuaucucccccagccccau

SEQ ID NO: 3306892 - RNA, 15 nt, Human
gguggcagcugcggu

SEQ ID NO: 3306893 - RNA, 23 nt, Human
gguggcagcugcgguccacccag

SEQ ID NO: 3306894 - RNA, 11 nt, Human
gguggcagcug

SEQ ID NO: 3306895 - RNA, 13 nt, Human
gguggcagcucac

SEQ ID NO: 3306896 - RNA, 12 nt, Human
gguggcagcugc

SEQ ID NO: 3306897 - RNA, 13 nt, Human
gguggcagcugcg

SEQ ID NO: 3306898 - RNA, 16 nt, Human
ggugaccucugccuga

SEQ ID NO: 3306899 - RNA, 14 nt, Human
ggugaccucugccu

SEQ ID NO: 3306900 - RNA, 15 nt, Human
ggucugacccacugc

SEQ ID NO: 3306901 - RNA, 16 nt, Human
ggucugacccacugcu

SEQ ID NO: 3306902 - RNA, 21 nt, Human
ggucucacuauguugcccagg

SEQ ID NO: 3306903 - RNA, 12 nt, Human
ggucucacucug

SEQ ID NO: 3306904 - RNA, 19 nt, Human
ggucugaggaauccagacc

SEQ ID NO: 3306905 - RNA, 16 nt, Human
ggugaacuugguuccc

SEQ ID NO: 3306906 - RNA, 18 nt, Human
ggugaagugaagacaaug

SEQ ID NO: 3306907 - RNA, 22 nt, Human
ggucccugguggcagcucaccu

SEQ ID NO: 3306908 - RNA, 22 nt, Human
ggucucacuauguugcccaggc

SEQ ID NO: 3306909 - RNA, 14 nt, Human
ggucccugguggca

SEQ ID NO: 3306910 - RNA, 21 nt, Human
gguacuuguggacacagcucu

SEQ ID NO: 3306911 - RNA, 20 nt, Human
gguacuuguggacacagcuc

SEQ ID NO: 3306912 - RNA, 22 nt, Human
gguacuuguggacacagcucuu

SEQ ID NO: 3306913 - RNA, 17 nt, Human
gguacccacugcucugg

SEQ ID NO: 3306914 - RNA, 16 nt, Human
gguacccacugcucug

SEQ ID NO: 3306915 - RNA, 15 nt, Human
ggguugggcuggugu

SEQ ID NO: 3306916 - RNA, 23 nt, Human
ggguucccuuuuuuggcugcuga

SEQ ID NO: 3306917 - RNA, 22 nt, Human
ggguucuacccaggugcuagga

SEQ ID NO: 3306918 - RNA, 17 nt, Human
ggguucuacccaggugc

SEQ ID NO: 3306919 - RNA, 16 nt, Human
ggguuggccccugccc

SEQ ID NO: 3306920 - RNA, 19 nt, Human
ggguuggccccugcccggc

SEQ ID NO: 3306921 - RNA, 12 nt, Human
ggucacucuggc

SEQ ID NO: 3306922 - RNA, 12 nt, Human
ggucagagccug

SEQ ID NO: 3306923 - RNA, 22 nt, Human
ggucacucuggcagcucagaga

SEQ ID NO: 3306924 - RNA, 20 nt, Human
ggucacucuggcagcucaga

SEQ ID NO: 3306925 - RNA, 16 nt, Human
ggucacucuggcagcu

SEQ ID NO: 3306926 - RNA, 13 nt, Human
ggucagagccugc

SEQ ID NO: 3306927 - RNA, 14 nt, Human
ggucagagccugca

SEQ ID NO: 3306928 - RNA, 15 nt, Human
ggucagagccugcag

SEQ ID NO: 3306929 - RNA, 16 nt, Human
ggucagagccugcagu

SEQ ID NO: 3306930 - RNA, 13 nt, Human
ggucccccuucca

SEQ ID NO: 3306931 - RNA, 23 nt, Human
ggucccccuuccauggacuuugu

SEQ ID NO: 3306932 - RNA, 18 nt, Human
ggucccccuuccauggac

SEQ ID NO: 3306933 - RNA, 22 nt, Human
ggucccacucaguccauagcag

SEQ ID NO: 3306934 - RNA, 12 nt, Human
ggucccacucag

SEQ ID NO: 3306935 - RNA, 14 nt, Human
ggucccacucaguc

SEQ ID NO: 3306936 - RNA, 11 nt, Human
ggucagagccu

SEQ ID NO: 3306937 - RNA, 22 nt, Human
ggucccaccccacacacgccag

SEQ ID NO: 3306938 - RNA, 17 nt, Human
gucccagauacuugggg

SEQ ID NO: 3306939 - RNA, 15 nt, Human
gucccacucagucca

SEQ ID NO: 3306940 - RNA, 14 nt, Human
gucccacucagucc

SEQ ID NO: 3306941 - RNA, 14 nt, Human
guccacccaggagc

SEQ ID NO: 3306942 - RNA, 13 nt, Human
guccacccaggag

SEQ ID NO: 3306943 - RNA, 15 nt, Human
guccacccaggagcc

SEQ ID NO: 3306944 - RNA, 16 nt, Human
guccacccaggagccc

SEQ ID NO: 3306945 - RNA, 21 nt, Human
gucauauaagauucauauuua

SEQ ID NO: 3306946 - RNA, 13 nt, Human
guagagugggagc

SEQ ID NO: 3306947 - RNA, 15 nt, Human
guagagugggagcug

SEQ ID NO: 3306948 - RNA, 13 nt, Human
guauuacuucugc

SEQ ID NO: 3306949 - RNA, 14 nt, Human
guauuacuucugcu

SEQ ID NO: 3306950 - RNA, 15 nt, Human
guauuacuucugcua

SEQ ID NO: 3306951 - RNA, 14 nt, Human
guauuauaccuuuu

SEQ ID NO: 3306952 - RNA, 15 nt, Human
gucaauuacaggaag

SEQ ID NO: 3306953 - RNA, 13 nt, Human
gucaauuacagga

SEQ ID NO: 3306954 - RNA, 20 nt, Human
gucaccugaagacucauucu

SEQ ID NO: 3306955 - RNA, 13 nt, Human
gucaccccggcca

SEQ ID NO: 3306956 - RNA, 18 nt, Human
gucaagagggucugagga

SEQ ID NO: 3306957 - RNA, 19 nt, Human
gucaagagggucugaggaa

SEQ ID NO: 3306958 - RNA, 18 nt, Human
gucaagugaaaaaggagg

SEQ ID NO: 3306959 - RNA, 16 nt, Human
gucaagugaaaaagga

SEQ ID NO: 3306960 - RNA, 19 nt, Human
gucaagugaaaaaggagga

SEQ ID NO: 3306961 - RNA, 12 nt, Human
gucccagugccg

SEQ ID NO: 3306962 - RNA, 13 nt, Human
guccuacucugug

SEQ ID NO: 3306963 - RNA, 17 nt, Human
gucccugguggcagcuc

SEQ ID NO: 3306964 - RNA, 16 nt, Human
gucccugguggcagcu

SEQ ID NO: 3306965 - RNA, 15 nt, Human
guccuacucuguguc

SEQ ID NO: 3306966 - RNA, 23 nt, Human
guccuacucugugucaggugggg

SEQ ID NO: 3306967 - RNA, 23 nt, Human
guccuagaaauuccccacccuga

SEQ ID NO: 3306968 - RNA, 15 nt, Human
guccugggagugagc

SEQ ID NO: 3306969 - RNA, 16 nt, Human
guccugggagugagcu

SEQ ID NO: 3306970 - RNA, 17 nt, Human
guccuggcaugggaaug

SEQ ID NO: 3306971 - RNA, 12 nt, Human
guccucccaucu

SEQ ID NO: 3306972 - RNA, 14 nt, Human
guccucccaucuca

SEQ ID NO: 3306973 - RNA, 13 nt, Human
guccucccaucuc

SEQ ID NO: 3306974 - RNA, 23 nt, Human
guccucccaucucacacaugagc

SEQ ID NO: 3306975 - RNA, 19 nt, Human
guccugggagugagcuggu

SEQ ID NO: 3306976 - RNA, 17 nt, Human
guccugggagugagcug

SEQ ID NO: 3306977 - RNA, 18 nt, Human
guccugggagugagcugg

SEQ ID NO: 3306978 - RNA, 15 nt, Human
gucuacacugugcug

SEQ ID NO: 3306979 - RNA, 15 nt, Human
guccuuaccagcaga

SEQ ID NO: 3306980 - RNA, 17 nt, Human
guccuuaccagcagagc

SEQ ID NO: 3306981 - RNA, 16 nt, Human
guccuuaccagcagag

SEQ ID NO: 3306982 - RNA, 20 nt, Human
gucucacuauguugcccagg

SEQ ID NO: 3306983 - RNA, 21 nt, Human
gucucacuauguugcccaggc

SEQ ID NO: 3306984 - RNA, 13 nt, Human
gucucacuguugc

SEQ ID NO: 3306985 - RNA, 23 nt, Human
gucucacuauguugcccaggcag

SEQ ID NO: 3306986 - RNA, 16 nt, Human
gucucacuguugccca

SEQ ID NO: 3306987 - RNA, 17 nt, Human
gucucacuguugcccag

SEQ ID NO: 3306988 - RNA, 18 nt, Human
gucucacuguugcccagg

SEQ ID NO: 3306989 - RNA, 19 nt, Human
gucucacuguugcccaggc

SEQ ID NO: 3306990 - RNA, 20 nt, Human
gucucacuguugcccaggcu

SEQ ID NO: 3306991 - RNA, 21 nt, Human
gucucacuguugcccaggcug

SEQ ID NO: 3306992 - RNA, 22 nt, Human
gucucacuguugcccaggcugg

SEQ ID NO: 3306993 - RNA, 23 nt, Human
gucucacuguugcccaggcuggc

SEQ ID NO: 3306994 - RNA, 17 nt, Human
gucugauucccaagcuc

SEQ ID NO: 3306995 - RNA, 18 nt, Human
gucugauucccaagcucu

SEQ ID NO: 3306996 - RNA, 19 nt, Human
gucugauucccaagcucug

SEQ ID NO: 3306997 - RNA, 21 nt, Human
gucugaggaauccagacccgg

SEQ ID NO: 3306998 - RNA, 20 nt, Human
gucugauucccaagcucugc

SEQ ID NO: 3306999 - RNA, 21 nt, Human
gucugauucccaagcucugcu

SEQ ID NO: 3307000 - RNA, 13 nt, Human
gucugacccacug

SEQ ID NO: 3307001 - RNA, 14 nt, Human
gucugacccacugc

SEQ ID NO: 3307002 - RNA, 15 nt, Human
gucugacccacugcu

SEQ ID NO: 3307003 - RNA, 18 nt, Human
gucugaggaauccagacc

SEQ ID NO: 3307004 - RNA, 19 nt, Human
gucugaggaauccagaccc

SEQ ID NO: 3307005 - RNA, 11 nt, Human
gugaggccaga

SEQ ID NO: 3307006 - RNA, 15 nt, Human
gugauccacccaccu

SEQ ID NO: 3307007 - RNA, 18 nt, Human
gugauccacccaccucag

SEQ ID NO: 3307008 - RNA, 20 nt, Human
gugauccacccaccucagcc

SEQ ID NO: 3307009 - RNA, 20 nt, Human
gugauccucccaccucagcc

SEQ ID NO: 3307010 - RNA, 22 nt, Human
gugauccucccaccucagccuc

SEQ ID NO: 3307011 - RNA, 14 nt, Human
gugauccucccacc

SEQ ID NO: 3307012 - RNA, 15 nt, Human
gugauccucccaccu

SEQ ID NO: 3307013 - RNA, 18 nt, Human
gugauccucccaccucag

SEQ ID NO: 3307014 - RNA, 12 nt, Human
gugauuuucauu

SEQ ID NO: 3307015 - RNA, 23 nt, Human
gugauucuccugccucagccucc

SEQ ID NO: 3307016 - RNA, 14 nt, Human
gugauucuccugcc

SEQ ID NO: 3307017 - RNA, 16 nt, Human
gugauucuccugccuc

SEQ ID NO: 3307018 - RNA, 17 nt, Human
gugauucuccugccuca

SEQ ID NO: 3307019 - RNA, 18 nt, Human
gugauucuccugccucag

SEQ ID NO: 3307020 - RNA, 19 nt, Human
gugauucuccugccucagc

SEQ ID NO: 3307021 - RNA, 20 nt, Human
gugauucuccugccucagcc

SEQ ID NO: 3307022 - RNA, 22 nt, Human
gugauucuccugccucagccuc

SEQ ID NO: 3307023 - RNA, 19 nt, Human
gugcauaaguuaacuucca

SEQ ID NO: 3307024 - RNA, 20 nt, Human
gugccagguuuuuggucuga

SEQ ID NO: 3307025 - RNA, 22 nt, Human
gugccagguuuuuggucugacc

SEQ ID NO: 3307026 - RNA, 14 nt, Human
gugcauaccacuuu

SEQ ID NO: 3307027 - RNA, 13 nt, Human
gugcauaccacuu

SEQ ID NO: 3307028 - RNA, 20 nt, Human
gugcccacaggaucagucug

SEQ ID NO: 3307029 - RNA, 15 nt, Human
gugacugaauuucuu

SEQ ID NO: 3307030 - RNA, 18 nt, Human
gugacugaauuucuuuug

SEQ ID NO: 3307031 - RNA, 16 nt, Human
gugacugaauuucuuu

SEQ ID NO: 3307032 - RNA, 15 nt, Human
gugaccucugccuga

SEQ ID NO: 3307033 - RNA, 16 nt, Human
gugacaacacuugugu

SEQ ID NO: 3307034 - RNA, 11 nt, Human
gugaggaagcc

SEQ ID NO: 3307035 - RNA, 19 nt, Human
gugaggaagccgcuggggc

SEQ ID NO: 3307036 - RNA, 16 nt, Human
gugaggaagccgcugg

SEQ ID NO: 3307037 - RNA, 17 nt, Human
gugacugaucucucgug

SEQ ID NO: 3307038 - RNA, 13 nt, Human
gugagccacugca

SEQ ID NO: 3307039 - RNA, 19 nt, Human
gugaaaggaaagagggagg

SEQ ID NO: 3307040 - RNA, 12 nt, Human
gugaaacuggau

SEQ ID NO: 3307041 - RNA, 23 nt, Human
gugaaaagaaaaaugagccuggc

SEQ ID NO: 3307042 - RNA, 14 nt, Human
gugaaaagaaaaau

SEQ ID NO: 3307043 - RNA, 15 nt, Human
gugcucuggacaggc

SEQ ID NO: 3307044 - RNA, 16 nt, Human
gugcucuggacaggca

SEQ ID NO: 3307045 - RNA, 21 nt, Human
gugccuuggggacaagagcag

SEQ ID NO: 3307046 - RNA, 19 nt, Human
gugcugaaugguuuucaaa

SEQ ID NO: 3307047 - RNA, 20 nt, Human
gugcugaaugguuuucaaaa

SEQ ID NO: 3307048 - RNA, 23 nt, Human
gugcugaaugguuuucaaaauaa

SEQ ID NO: 3307049 - RNA, 17 nt, Human
gugcucuggacaggcau

SEQ ID NO: 3307050 - RNA, 18 nt, Human
gugcucuggacaggcaug

SEQ ID NO: 3307051 - RNA, 14 nt, Human
gugcucuggacagg

SEQ ID NO: 3307052 - RNA, 15 nt, Human
gugcugccauccagg

SEQ ID NO: 3307053 - RNA, 18 nt, Human
gugcugccauccagguuc

SEQ ID NO: 3307054 - RNA, 19 nt, Human
gugcugccauccagguuca

SEQ ID NO: 3307055 - RNA, 20 nt, Human
gugcugcauuuaaaagauac

SEQ ID NO: 3307056 - RNA, 19 nt, Human
gugcugcauuuaaaagaua

SEQ ID NO: 3307057 - RNA, 12 nt, Human
gugcugcauuua

SEQ ID NO: 3307058 - RNA, 12 nt, Human
gugcugagucug

SEQ ID NO: 3307059 - RNA, 19 nt, Human
gugcugagucugaaggcug

SEQ ID NO: 3307060 - RNA, 18 nt, Human
gugcugagucugaaggcu

SEQ ID NO: 3307061 - RNA, 17 nt, Human
gugcugagucugaaggc

SEQ ID NO: 3307062 - RNA, 16 nt, Human
gugcugagucugaagg

SEQ ID NO: 3307063 - RNA, 12 nt, Human
gugcuuggagga

SEQ ID NO: 3307064 - RNA, 15 nt, Human
gugcuuggaggaagg

SEQ ID NO: 3307065 - RNA, 13 nt, Human
gugcuuggaggaa

SEQ ID NO: 3307066 - RNA, 11 nt, Human
gugcugcccug

SEQ ID NO: 3307067 - RNA, 22 nt, Human
gugcugccauccagguucagcu

SEQ ID NO: 3307068 - RNA, 18 nt, Human
guggaaaaauagccugcc

SEQ ID NO: 3307069 - RNA, 19 nt, Human
guggcagugggagcugccu

SEQ ID NO: 3307070 - RNA, 21 nt, Human
guggcagugggagcugccugu

SEQ ID NO: 3307071 - RNA, 19 nt, Human
guggcagcugcgguccacc

SEQ ID NO: 3307072 - RNA, 21 nt, Human
guggcagcugcgguccaccca

SEQ ID NO: 3307073 - RNA, 22 nt, Human
guggcagcugcgguccacccag

SEQ ID NO: 3307074 - RNA, 23 nt, Human
guggcagcugcgguccacccagg

SEQ ID NO: 3307075 - RNA, 12 nt, Human
guggcagcugcu

SEQ ID NO: 3307076 - RNA, 13 nt, Human
guggcagcugcuu

SEQ ID NO: 3307077 - RNA, 19 nt, Human
guggcagcugcuuuugucu

SEQ ID NO: 3307078 - RNA, 16 nt, Human
guggcagugggagcug

SEQ ID NO: 3307079 - RNA, 17 nt, Human
guggcagugggagcugc

SEQ ID NO: 3307080 - RNA, 15 nt, Human
guggcagugggagcu

SEQ ID NO: 3307081 - RNA, 20 nt, Human
guggagaagcggcuggcagc

SEQ ID NO: 3307082 - RNA, 16 nt, Human
guggaugccugguggc

SEQ ID NO: 3307083 - RNA, 18 nt, Human
guggaugccugguggcag

SEQ ID NO: 3307084 - RNA, 17 nt, Human
guggaguucaucuugaa

SEQ ID NO: 3307085 - RNA, 17 nt, Human
ugcugggcuugucugua

SEQ ID NO: 3307086 - RNA, 13 nt, Human
ugcuggguguggc

SEQ ID NO: 3307087 - RNA, 14 nt, Human
ugcugcauuuaaaa

SEQ ID NO: 3307088 - RNA, 23 nt, Human
ugcugcauuuaaaagauacaguu

SEQ ID NO: 3307089 - RNA, 19 nt, Human
ugcugcauuuaaaagauac

SEQ ID NO: 3307090 - RNA, 18 nt, Human
ugcugcauuuaaaagaua

SEQ ID NO: 3307091 - RNA, 17 nt, Human
ugcugcauuuaaaagau

SEQ ID NO: 3307092 - RNA, 12 nt, Human
ugcugcuugagg

SEQ ID NO: 3307093 - RNA, 20 nt, Human
ugcugggauuacagguguga

SEQ ID NO: 3307094 - RNA, 19 nt, Human
ugcugcuugaggcaacuca

SEQ ID NO: 3307095 - RNA, 22 nt, Human
ugcuaggaacacuccuucacag

SEQ ID NO: 3307096 - RNA, 20 nt, Human
ugcuaggaacacuccuucac

SEQ ID NO: 3307097 - RNA, 21 nt, Human
ugcuaggaacacuccuucaca

SEQ ID NO: 3307098 - RNA, 17 nt, Human
ugcucacauaucuguca

SEQ ID NO: 3307099 - RNA, 23 nt, Human
ugcucuccgaccagacaccuuga

SEQ ID NO: 3307100 - RNA, 21 nt, Human
ugcuacuguccuacccacccu

SEQ ID NO: 3307101 - RNA, 22 nt, Human
ugcuacuguccuacccacccuc

SEQ ID NO: 3307102 - RNA, 22 nt, Human
ugccaggaagccagcaggcucu

SEQ ID NO: 3307103 - RNA, 20 nt, Human
ugccaggaagccagcaggcu

SEQ ID NO: 3307104 - RNA, 14 nt, Human
ugccaggcauggug

SEQ ID NO: 3307105 - RNA, 10 nt, Human
ugccaggcau

SEQ ID NO: 3307106 - RNA, 19 nt, Human
ugccaggaagccagcaggc

SEQ ID NO: 3307107 - RNA, 20 nt, Human
ugccacccuggggagaaagu

SEQ ID NO: 3307108 - RNA, 21 nt, Human
ugcauuuggugguuucagaaa

SEQ ID NO: 3307109 - RNA, 23 nt, Human
ugcauuuggugguuucagaaaug

SEQ ID NO: 3307110 - RNA, 15 nt, Human
ugcaguugccaguca

SEQ ID NO: 3307111 - RNA, 16 nt, Human
ugcaguugccagucac

SEQ ID NO: 3307112 - RNA, 19 nt, Human
ugcaucaagaugugacaug

SEQ ID NO: 3307113 - RNA, 13 nt, Human
ugcagggaguccg

SEQ ID NO: 3307114 - RNA, 20 nt, Human
ugcaguggugcgaucugggu

SEQ ID NO: 3307115 - RNA, 21 nt, Human
ugcaguggugcgaucuggguu

SEQ ID NO: 3307116 - RNA, 21 nt, Human
ugcaguuacacuaaaagguga

SEQ ID NO: 3307117 - RNA, 14 nt, Human
ugcccugcccaccu

SEQ ID NO: 3307118 - RNA, 15 nt, Human
ugcccugcccaccug

SEQ ID NO: 3307119 - RNA, 20 nt, Human
ugcccugcccaccuggccuc

SEQ ID NO: 3307120 - RNA, 16 nt, Human
ugcccugcccaccugg

SEQ ID NO: 3307121 - RNA, 15 nt, Human
ugccucaagagaagg

SEQ ID NO: 3307122 - RNA, 14 nt, Human
ugccucaagagaag

SEQ ID NO: 3307123 - RNA, 16 nt, Human
ugccccuggcagcccc

SEQ ID NO: 3307124 - RNA, 12 nt, Human
ugcccggcugcg

SEQ ID NO: 3307125 - RNA, 14 nt, Human
ugcccggcugcgga

SEQ ID NO: 3307126 - RNA, 13 nt, Human
ugcccaggcuggc

SEQ ID NO: 3307127 - RNA, 20 nt, Human
ugcccaggcuggcgugcagu

SEQ ID NO: 3307128 - RNA, 18 nt, Human
ugcccaggcuggcgugca

SEQ ID NO: 3307129 - RNA, 19 nt, Human
ugcccaggcuggcgugcag

SEQ ID NO: 3307130 - RNA, 11 nt, Human
uggcugcuuca

SEQ ID NO: 3307131 - RNA, 15 nt, Human
uggcugggggccuca

SEQ ID NO: 3307132 - RNA, 15 nt, Human
uggcugcuucaagga

SEQ ID NO: 3307133 - RNA, 23 nt, Human
uggccucccaacucaccccagcc

SEQ ID NO: 3307134 - RNA, 23 nt, Human
uggcgcagcauauucaggaagcu

SEQ ID NO: 3307135 - RNA, 22 nt, Human
uggcgcagcauauucaggaagc

SEQ ID NO: 3307136 - RNA, 16 nt, Human
uggcgcugccccuggc

SEQ ID NO: 3307137 - RNA, 23 nt, Human
uggcgcugccccuggcagccccu

SEQ ID NO: 3307138 - RNA, 15 nt, Human
uggcgcugccccugg

SEQ ID NO: 3307139 - RNA, 14 nt, Human
uggccccugcccgg

SEQ ID NO: 3307140 - RNA, 15 nt, Human
uggccccugcccggc

SEQ ID NO: 3307141 - RNA, 16 nt, Human
uggccccugcccggcu

SEQ ID NO: 3307142 - RNA, 13 nt, Human
uggccaggcuggu

SEQ ID NO: 3307143 - RNA, 19 nt, Human
uggccagaugcaccagccc

SEQ ID NO: 3307144 - RNA, 15 nt, Human
uggccagaugcacca

SEQ ID NO: 3307145 - RNA, 17 nt, Human
uggccagaugcaccagc

SEQ ID NO: 3307146 - RNA, 18 nt, Human
uggccagaugcaccagcc

SEQ ID NO: 3307147 - RNA, 19 nt, Human
uggcagaguugaagacaga

SEQ ID NO: 3307148 - RNA, 17 nt, Human
uggcagaguugaagaca

SEQ ID NO: 3307149 - RNA, 21 nt, Human
uggcagaguggauucuugaac

SEQ ID NO: 3307150 - RNA, 15 nt, Human
uggcagaguugaaga

SEQ ID NO: 3307151 - RNA, 20 nt, Human
uggaggaaggaaacccagcu

SEQ ID NO: 3307152 - RNA, 23 nt, Human
uggaggaaggaaacccagcucug

SEQ ID NO: 3307153 - RNA, 21 nt, Human
uggaggaaggaaacccagcuc

SEQ ID NO: 3307154 - RNA, 12 nt, Human
uggcaaaaaggc

SEQ ID NO: 3307155 - RNA, 16 nt, Human
uggcaaaaaggcagga

SEQ ID NO: 3307156 - RNA, 15 nt, Human
uggcacuauaaugua

SEQ ID NO: 3307157 - RNA, 16 nt, Human
uggcacuauaauguaa

SEQ ID NO: 3307158 - RNA, 23 nt, Human
uggacaggcauguucucugagga

SEQ ID NO: 3307159 - RNA, 14 nt, Human
uggucccccuucca

SEQ ID NO: 3307160 - RNA, 13 nt, Human
uggucccacucag

SEQ ID NO: 3307161 - RNA, 18 nt, Human
ugguaugaucacggcuca

SEQ ID NO: 3307162 - RNA, 23 nt, Human
uggucccccuuccauggacuuug

SEQ ID NO: 3307163 - RNA, 18 nt, Human
uggucccccuuccaugga

SEQ ID NO: 3307164 - RNA, 16 nt, Human
uggucccccuuccaug

SEQ ID NO: 3307165 - RNA, 15 nt, Human
uggucccccuuccau

SEQ ID NO: 3307166 - RNA, 23 nt, Human
ugguccugcugcaguugccaguc

SEQ ID NO: 3307167 - RNA, 15 nt, Human
ugguccugcugcagu

SEQ ID NO: 3307168 - RNA, 13 nt, Human
ugguccugcugca

SEQ ID NO: 3307169 - RNA, 19 nt, Human
ugguccuaaucuucugaac

SEQ ID NO: 3307170 - RNA, 17 nt, Human
ugguccuaaucuucuga

SEQ ID NO: 3307171 - RNA, 14 nt, Human
uggucggaaaacau

SEQ ID NO: 3307172 - RNA, 17 nt, Human
uggucggaaaacaugcu

SEQ ID NO: 3307173 - RNA, 18 nt, Human
uggucuacacugugcuga

SEQ ID NO: 3307174 - RNA, 17 nt, Human
uggucuacacugugcug

SEQ ID NO: 3307175 - RNA, 16 nt, Human
uggucuacacugugcu

SEQ ID NO: 3307176 - RNA, 15 nt, Human
uggucuacacugugc

SEQ ID NO: 3307177 - RNA, 13 nt, Human
uggugaccucugc

SEQ ID NO: 3307178 - RNA, 14 nt, Human
uggugaccucugcc

SEQ ID NO: 3307179 - RNA, 20 nt, Human
uggugcaaugaccuuucaau

SEQ ID NO: 3307180 - RNA, 21 nt, Human
uggugcaaugaccuuucaaua

SEQ ID NO: 3307181 - RNA, 14 nt, Human
uggugagaggcauc

SEQ ID NO: 3307182 - RNA, 15 nt, Human
uggugaccucugccu

SEQ ID NO: 3307183 - RNA, 16 nt, Human
uggugaccucugccug

SEQ ID NO: 3307184 - RNA, 17 nt, Human
uggugaccucugccuga

SEQ ID NO: 3307185 - RNA, 22 nt, Human
uggugaccucugccugaaguca

SEQ ID NO: 3307186 - RNA, 19 nt, Human
uggugacuuuccucuuugg

SEQ ID NO: 3307187 - RNA, 16 nt, Human
ugggggaguggccaca

SEQ ID NO: 3307188 - RNA, 16 nt, Human
uggguaacuagggaag

SEQ ID NO: 3307189 - RNA, 17 nt, Human
uggguacuuguggacac

SEQ ID NO: 3307190 - RNA, 18 nt, Human
uggguacuuguggacaca

SEQ ID NO: 3307191 - RNA, 22 nt, Human
ugggcuucauccuccucagauc

SEQ ID NO: 3307192 - RNA, 15 nt, Human
uggggaugagaaagg

SEQ ID NO: 3307193 - RNA, 23 nt, Human
uggggaugagaaagguugaagca

SEQ ID NO: 3307194 - RNA, 20 nt, Human
uggggccaguuggucccccu

SEQ ID NO: 3307195 - RNA, 16 nt, Human
ugggagugggcccaau

SEQ ID NO: 3307196 - RNA, 14 nt, Human
ugggagugggccca

SEQ ID NO: 3307197 - RNA, 16 nt, Human
uggcugggggccucag

SEQ ID NO: 3307198 - RNA, 17 nt, Human
uggcugggggccucagu

SEQ ID NO: 3307199 - RNA, 13 nt, Human
ugggauccuccag

SEQ ID NO: 3307200 - RNA, 12 nt, Human
ugggauccucca

SEQ ID NO: 3307201 - RNA, 22 nt, Human
ugggauuacaagcgugagccac

SEQ ID NO: 3307202 - RNA, 18 nt, Human
ugggcagagcagagacca

SEQ ID NO: 3307203 - RNA, 22 nt, Human
ugggcagagcagagaccauccc

SEQ ID NO: 3307204 - RNA, 23 nt, Human
ugggcagagcagagaccaucccu

SEQ ID NO: 3307205 - RNA, 14 nt, Human
ugggccuggcuccc

SEQ ID NO: 3307206 - RNA, 18 nt, Human
ugaaagcccugagcuuuc

SEQ ID NO: 3307207 - RNA, 18 nt, Human
ugaaagggcccagagagg

SEQ ID NO: 3307208 - RNA, 13 nt, Human
ugaaagggcccag

SEQ ID NO: 3307209 - RNA, 23 nt, Human
ugaaagggaguauuacaaaaaca

SEQ ID NO: 3307210 - RNA, 14 nt, Human
ugaaacauuuuguc

SEQ ID NO: 3307211 - RNA, 13 nt, Human
ugaaaauuuugau

SEQ ID NO: 3307212 - RNA, 12 nt, Human
ugaaaauuuuga

SEQ ID NO: 3307213 - RNA, 21 nt, Human
ugaaaauuuugauguuuuaag

SEQ ID NO: 3307214 - RNA, 19 nt, Human
ugaaaauuuugauguuuua

SEQ ID NO: 3307215 - RNA, 22 nt, Human
ugaaccacaucuugcucugcug

SEQ ID NO: 3307216 - RNA, 22 nt, Human
ugaaccaagaacuuuccaggaa

SEQ ID NO: 3307217 - RNA, 23 nt, Human
ugaaccacaucuugcucugcuga

SEQ ID NO: 3307218 - RNA, 17 nt, Human
ugaaccaccacacccag

SEQ ID NO: 3307219 - RNA, 20 nt, Human
ugaaccaccacacccagccc

SEQ ID NO: 3307220 - RNA, 16 nt, Human
ugaacuccuggccuca

SEQ ID NO: 3307221 - RNA, 23 nt, Human
ucuuucacccuuuucuguuugcu

SEQ ID NO: 3307222 - RNA, 21 nt, Human
ucuuguguguuuauugucaaa

SEQ ID NO: 3307223 - RNA, 16 nt, Human
ucuuguguguuuauug

SEQ ID NO: 3307224 - RNA, 23 nt, Human
ucuugcaauggcagccuuggcaa

SEQ ID NO: 3307225 - RNA, 20 nt, Human
ucuccucugcugcuggcugg

SEQ ID NO: 3307226 - RNA, 16 nt, Human
ucucccuucauccuuc

SEQ ID NO: 3307227 - RNA, 17 nt, Human
ucuuuggacacucacac

SEQ ID NO: 3307228 - RNA, 21 nt, Human
ucuuucagccaagaauucuua

SEQ ID NO: 3307229 - RNA, 20 nt, Human
ucuuucagccaagaauucuu

SEQ ID NO: 3307230 - RNA, 19 nt, Human
ucuuucagccaagaauucu

SEQ ID NO: 3307231 - RNA, 16 nt, Human
ucuuucagccaagaau

SEQ ID NO: 3307232 - RNA, 14 nt, Human
ucuuuccaaaguac

SEQ ID NO: 3307233 - RNA, 13 nt, Human
ucuuuccaaagua

SEQ ID NO: 3307234 - RNA, 17 nt, Human
ugaaggccccgcccagg

SEQ ID NO: 3307235 - RNA, 17 nt, Human
ugaacuccuggccucaa

SEQ ID NO: 3307236 - RNA, 16 nt, Human
ugaaggccccgcccag

SEQ ID NO: 3307237 - RNA, 15 nt, Human
ugaaggccccgccca

SEQ ID NO: 3307238 - RNA, 22 nt, Human
ugaaggacauugcggacagcca

SEQ ID NO: 3307239 - RNA, 19 nt, Human
ugaaggacauugcggacag

SEQ ID NO: 3307240 - RNA, 20 nt, Human
ugaaggacauugcggacagc

SEQ ID NO: 3307241 - RNA, 19 nt, Human
ugaccagcaccaucucucc

SEQ ID NO: 3307242 - RNA, 15 nt, Human
ugacaugucuuuucu

SEQ ID NO: 3307243 - RNA, 13 nt, Human
ugacaugucuuuu

SEQ ID NO: 3307244 - RNA, 16 nt, Human
ugaccauucuccaccu

SEQ ID NO: 3307245 - RNA, 18 nt, Human
ugaccauucuccaccugc

SEQ ID NO: 3307246 - RNA, 17 nt, Human
ugaccauucuccaccug

SEQ ID NO: 3307247 - RNA, 20 nt, Human
ugaccgugaggccagagaca

SEQ ID NO: 3307248 - RNA, 16 nt, Human
ugaccgugaggccaga

SEQ ID NO: 3307249 - RNA, 14 nt, Human
ugaccgugaggcca

SEQ ID NO: 3307250 - RNA, 13 nt, Human
ugaccgugaggcc

SEQ ID NO: 3307251 - RNA, 14 nt, Human
ugaccauucuccac

SEQ ID NO: 3307252 - RNA, 19 nt, Human
ugacagagugagacucugu

SEQ ID NO: 3307253 - RNA, 18 nt, Human
ugacagaggcagccccau

SEQ ID NO: 3307254 - RNA, 23 nt, Human
ugacagaggcagccccauucugc

SEQ ID NO: 3307255 - RNA, 14 nt, Human
ugacagagugagac

SEQ ID NO: 3307256 - RNA, 17 nt, Human
ugacagagugagacucu

SEQ ID NO: 3307257 - RNA, 13 nt, Human
ugacagaggcagc

SEQ ID NO: 3307258 - RNA, 20 nt, Human
ugacagacacaggcccggcu

SEQ ID NO: 3307259 - RNA, 23 nt, Human
ugacagacacaggcccggcucca

SEQ ID NO: 3307260 - RNA, 14 nt, Human
ugacagaggcagcc

SEQ ID NO: 3307261 - RNA, 15 nt, Human
ugacagaggcagccc

SEQ ID NO: 3307262 - RNA, 16 nt, Human
ugacagaggcagcccc

SEQ ID NO: 3307263 - RNA, 17 nt, Human
ugacagaggcagcccca

SEQ ID NO: 3307264 - RNA, 20 nt, Human
ugauguucuuucacccuuuu

SEQ ID NO: 3307265 - RNA, 20 nt, Human
ugauucaacagguuuuccug

SEQ ID NO: 3307266 - RNA, 16 nt, Human
ugauucagacagcugc

SEQ ID NO: 3307267 - RNA, 15 nt, Human
ugauucagacagcug

SEQ ID NO: 3307268 - RNA, 14 nt, Human
ugauucagacagcu

SEQ ID NO: 3307269 - RNA, 13 nt, Human
ugauucagacagc

SEQ ID NO: 3307270 - RNA, 21 nt, Human
ugauuggaggggggagguggg

SEQ ID NO: 3307271 - RNA, 13 nt, Human
ugauuggaggggg

SEQ ID NO: 3307272 - RNA, 16 nt, Human
ugauugugucucuugg

SEQ ID NO: 3307273 - RNA, 20 nt, Human
ugauucuccugccucagccu

SEQ ID NO: 3307274 - RNA, 21 nt, Human
ugauucuccugccucagccuc

SEQ ID NO: 3307275 - RNA, 23 nt, Human
ugauucagacagcugccugggau

SEQ ID NO: 3307276 - RNA, 21 nt, Human
ugauucagacagcugccuggg

SEQ ID NO: 3307277 - RNA, 20 nt, Human
ugauucagacagcugccugg

SEQ ID NO: 3307278 - RNA, 19 nt, Human
ugauucagacagcugccug

SEQ ID NO: 3307279 - RNA, 18 nt, Human
ugauucagacagcugccu

SEQ ID NO: 3307280 - RNA, 16 nt, Human
ugauguguuaucucuu

SEQ ID NO: 3307281 - RNA, 17 nt, Human
ugaugcuucuucagaga

SEQ ID NO: 3307282 - RNA, 16 nt, Human
ugaugcuucuucagag

SEQ ID NO: 3307283 - RNA, 16 nt, Human
ugaucuuugcagacag

SEQ ID NO: 3307284 - RNA, 20 nt, Human
ugaucuucuuuauaauucua

SEQ ID NO: 3307285 - RNA, 17 nt, Human
ugauccacccaccucag

SEQ ID NO: 3307286 - RNA, 18 nt, Human
ugauccacccaccucagc

SEQ ID NO: 3307287 - RNA, 13 nt, Human
ugauagcacagac

SEQ ID NO: 3307288 - RNA, 13 nt, Human
ugauccaagcugg

SEQ ID NO: 3307289 - RNA, 14 nt, Human
ugauccaagcuggu

SEQ ID NO: 3307290 - RNA, 15 nt, Human
ugauccaagcugguc

SEQ ID NO: 3307291 - RNA, 16 nt, Human
ugauccacccaccuca

SEQ ID NO: 3307292 - RNA, 14 nt, Human
ugaggcucugcccu

SEQ ID NO: 3307293 - RNA, 13 nt, Human
ugaggcucugccc

SEQ ID NO: 3307294 - RNA, 17 nt, Human
ugagggaacagagaggu

SEQ ID NO: 3307295 - RNA, 13 nt, Human
ugaggugggagga

SEQ ID NO: 3307296 - RNA, 12 nt, Human
ugaggugggagg

SEQ ID NO: 3307297 - RNA, 13 nt, Human
ugagcugggauga

SEQ ID NO: 3307298 - RNA, 12 nt, Human
ugaggcauuugu

SEQ ID NO: 3307299 - RNA, 20 nt, Human
ugaggcauuuguuugaacug

SEQ ID NO: 3307300 - RNA, 19 nt, Human
ugaggcauuuguuugaacu

SEQ ID NO: 3307301 - RNA, 17 nt, Human
ugaggcuaguguggugu

SEQ ID NO: 3307302 - RNA, 21 nt, Human
ugaggcauuuguuugaacuga

SEQ ID NO: 3307303 - RNA, 23 nt, Human
ugaggcuagugugguguuuccug

SEQ ID NO: 3307304 - RNA, 20 nt, Human
ugaguugauagcacagaccc

SEQ ID NO: 3307305 - RNA, 16 nt, Human
ugaguugauagcacag

SEQ ID NO: 3307306 - RNA, 19 nt, Human
ugaguccagaaguuugaga

SEQ ID NO: 3307307 - RNA, 13 nt, Human
ugaguccagaagu

SEQ ID NO: 3307308 - RNA, 18 nt, Human
ugagucgaggacagggag

SEQ ID NO: 3307309 - RNA, 19 nt, Human
ugagucgaggacagggagg

SEQ ID NO: 3307310 - RNA, 18 nt, Human
ugagucugaaggcugggu

SEQ ID NO: 3307311 - RNA, 17 nt, Human
ugagucugaaggcuggg

SEQ ID NO: 3307312 - RNA, 15 nt, Human
ugagucugaaggcug

SEQ ID NO: 3307313 - RNA, 13 nt, Human
ugagucugaaggc

SEQ ID NO: 3307314 - RNA, 22 nt, Human
ugagacucgcgacaaugcaaac

SEQ ID NO: 3307315 - RNA, 21 nt, Human
ugagacucgcgacaaugcaaa

SEQ ID NO: 3307316 - RNA, 20 nt, Human
ugagacucgcgacaaugcaa

SEQ ID NO: 3307317 - RNA, 12 nt, Human
ugagcagggcuc

SEQ ID NO: 3307318 - RNA, 13 nt, Human
ugagcagggcuca

SEQ ID NO: 3307319 - RNA, 14 nt, Human
ugagcagggcucag

SEQ ID NO: 3307320 - RNA, 15 nt, Human
ugagcagggcucagc

SEQ ID NO: 3307321 - RNA, 14 nt, Human
ugagaucagccugg

SEQ ID NO: 3307322 - RNA, 15 nt, Human
ugagaucaaaacggu

SEQ ID NO: 3307323 - RNA, 19 nt, Human
ugagacucgcgacaaugca

SEQ ID NO: 3307324 - RNA, 20 nt, Human
ugaccucaggugauccaccc

SEQ ID NO: 3307325 - RNA, 21 nt, Human
ugaccucaggugauccaccca

SEQ ID NO: 3307326 - RNA, 20 nt, Human
ugagcaucaggccaggcccu

SEQ ID NO: 3307327 - RNA, 19 nt, Human
ugagcaucaggccaggccc

SEQ ID NO: 3307328 - RNA, 18 nt, Human
ugagcaucaggccaggcc

SEQ ID NO: 3307329 - RNA, 19 nt, Human
ugagcagggcucagcgggg

SEQ ID NO: 3307330 - RNA, 16 nt, Human
ugagcagggcucagcg

SEQ ID NO: 3307331 - RNA, 17 nt, Human
ugagcagggcucagcgg

SEQ ID NO: 3307332 - RNA, 16 nt, Human
ugagcaucaggccagg

SEQ ID NO: 3307333 - RNA, 15 nt, Human
ugagccucagcaucc

SEQ ID NO: 3307334 - RNA, 22 nt, Human
ugagccucagcauccuggcacc

SEQ ID NO: 3307335 - RNA, 18 nt, Human
ugagccucagcauccugg

SEQ ID NO: 3307336 - RNA, 21 nt, Human
ugagccucagcauccuggcac

SEQ ID NO: 3307337 - RNA, 19 nt, Human
ugagccgagaucacgccac

SEQ ID NO: 3307338 - RNA, 21 nt, Human
ugagccgagaucacgccacug

SEQ ID NO: 3307339 - RNA, 17 nt, Human
ugagccucagcauccug

SEQ ID NO: 3307340 - RNA, 16 nt, Human
uccaaaguacacuguu

SEQ ID NO: 3307341 - RNA, 14 nt, Human
uccaaaguacacug

SEQ ID NO: 3307342 - RNA, 19 nt, Human
uccacuuucuagccagagg

SEQ ID NO: 3307343 - RNA, 21 nt, Human
uccacuuucuagccagaggag

SEQ ID NO: 3307344 - RNA, 20 nt, Human
uccacuuucuagccagagga

SEQ ID NO: 3307345 - RNA, 20 nt, Human
uccaggggugggacacccug

SEQ ID NO: 3307346 - RNA, 19 nt, Human
uccaggggugggacacccu

SEQ ID NO: 3307347 - RNA, 15 nt, Human
uccaggagcagccac

SEQ ID NO: 3307348 - RNA, 14 nt, Human
uccaggagcagcca

SEQ ID NO: 3307349 - RNA, 13 nt, Human
uccaggagcagcc

SEQ ID NO: 3307350 - RNA, 12 nt, Human
uccaggagcagc

SEQ ID NO: 3307351 - RNA, 14 nt, Human
uccauagagagcaa

SEQ ID NO: 3307352 - RNA, 18 nt, Human
uccagguuuaagcuguua

SEQ ID NO: 3307353 - RNA, 20 nt, Human
uccagguuuaagcuguuacu

SEQ ID NO: 3307354 - RNA, 14 nt, Human
uccccaggaggcca

SEQ ID NO: 3307355 - RNA, 21 nt, Human
ucccccagccccauccucugu

SEQ ID NO: 3307356 - RNA, 20 nt, Human
ucccccagccccauccucug

SEQ ID NO: 3307357 - RNA, 16 nt, Human
uccccaggaggccagc

SEQ ID NO: 3307358 - RNA, 15 nt, Human
uccccaggaggccag

SEQ ID NO: 3307359 - RNA, 17 nt, Human
ucccccagccccauccu

SEQ ID NO: 3307360 - RNA, 13 nt, Human
uccccaggaggcc

SEQ ID NO: 3307361 - RNA, 19 nt, Human
uccccagauugcaacaggc

SEQ ID NO: 3307362 - RNA, 20 nt, Human
uccccagauugcaacaggcu

SEQ ID NO: 3307363 - RNA, 22 nt, Human
uccccagauugcaacaggcugg

SEQ ID NO: 3307364 - RNA, 23 nt, Human
uccccagauugcaacaggcuggg

SEQ ID NO: 3307365 - RNA, 20 nt, Human
uccccagcaagugagagcug

SEQ ID NO: 3307366 - RNA, 21 nt, Human
uccccagcaagugagagcugg

SEQ ID NO: 3307367 - RNA, 22 nt, Human
uccccagcaagugagagcuggg

SEQ ID NO: 3307368 - RNA, 13 nt, Human
uccccagauugca

SEQ ID NO: 3307369 - RNA, 18 nt, Human
uccccagauugcaacagg

SEQ ID NO: 3307370 - RNA, 20 nt, Human
ucccaugagccucagcaucc

SEQ ID NO: 3307371 - RNA, 17 nt, Human
ucccaugagccucagca

SEQ ID NO: 3307372 - RNA, 24 nt, Human
ucccaggcauuccccaggaggcca

SEQ ID NO: 3307373 - RNA, 23 nt, Human
ucccaggcauuccccaggaggcc

SEQ ID NO: 3307374 - RNA, 23 nt, Human
ucccagcugugcucuggacaggc

SEQ ID NO: 3307375 - RNA, 21 nt, Human
ucccagcugugcucuggacag

SEQ ID NO: 3307376 - RNA, 22 nt, Human
ucccagcugugcucuggacagg

SEQ ID NO: 3307377 - RNA, 15 nt, Human
ucccaucuuccaagg

SEQ ID NO: 3307378 - RNA, 21 nt, Human
ucccaucugugaaaggaaaga

SEQ ID NO: 3307379 - RNA, 18 nt, Human
ucccaugagccucagcau

SEQ ID NO: 3307380 - RNA, 19 nt, Human
ucccaugagccucagcauc

SEQ ID NO: 3307381 - RNA, 22 nt, Human
ucccaccucucucacuccuuga

SEQ ID NO: 3307382 - RNA, 20 nt, Human
uccaugugggcuaguugggc

SEQ ID NO: 3307383 - RNA, 16 nt, Human
ucccaccuuggcugca

SEQ ID NO: 3307384 - RNA, 17 nt, Human
ucccaccuuggcugcag

SEQ ID NO: 3307385 - RNA, 20 nt, Human
ucccagcugugcucuggaca

SEQ ID NO: 3307386 - RNA, 13 nt, Human
ucccaccuuggcu

SEQ ID NO: 3307387 - RNA, 19 nt, Human
ucagucugauucccaagcu

SEQ ID NO: 3307388 - RNA, 21 nt, Human
ucagucugauucccaagcucu

SEQ ID NO: 3307389 - RNA, 22 nt, Human
ucagucugauucccaagcucug

SEQ ID NO: 3307390 - RNA, 20 nt, Human
ucagguggggcagcuugagg

SEQ ID NO: 3307391 - RNA, 16 nt, Human
ucaggugauccaccca

SEQ ID NO: 3307392 - RNA, 23 nt, Human
ucaggugagaagcagaggaagga

SEQ ID NO: 3307393 - RNA, 23 nt, Human
ucaggugauccacccaccucagc

SEQ ID NO: 3307394 - RNA, 17 nt, Human
ucagguggggcagcuug

SEQ ID NO: 3307395 - RNA, 18 nt, Human
ucagguggggcagcuuga

SEQ ID NO: 3307396 - RNA, 19 nt, Human
ucagguggggcagcuugag

SEQ ID NO: 3307397 - RNA, 23 nt, Human
ucagcuccagcucaccagcccca

SEQ ID NO: 3307398 - RNA, 24 nt, Human
ucagcuccagcucaccagccccag

SEQ ID NO: 3307399 - RNA, 22 nt, Human
ucagcuccagcucaccagcccc

SEQ ID NO: 3307400 - RNA, 23 nt, Human
ucagcucugcaagaauugaagca

SEQ ID NO: 3307401 - RNA, 23 nt, Human
ucaggaagcucagggccuggcuc

SEQ ID NO: 3307402 - RNA, 21 nt, Human
ucaggccugggggcugggcag

SEQ ID NO: 3307403 - RNA, 20 nt, Human
ucaguguacauggaauaaca

SEQ ID NO: 3307404 - RNA, 11 nt, Human
ucaguguacau

SEQ ID NO: 3307405 - RNA, 14 nt, Human
ucaucauccuaagc

SEQ ID NO: 3307406 - RNA, 14 nt, Human
ucauccacugugcc

SEQ ID NO: 3307407 - RNA, 17 nt, Human
ucauccacugugccaug

SEQ ID NO: 3307408 - RNA, 19 nt, Human
ucaucuugaauuguaagga

SEQ ID NO: 3307409 - RNA, 13 nt, Human
uccaaaguacacu

SEQ ID NO: 3307410 - RNA, 19 nt, Human
ucuaugggacucaaugcac

SEQ ID NO: 3307411 - RNA, 12 nt, Human
ucuaugggacuc

SEQ ID NO: 3307412 - RNA, 13 nt, Human
ucuaugggacuca

SEQ ID NO: 3307413 - RNA, 16 nt, Human
ucucauacucaccuca

SEQ ID NO: 3307414 - RNA, 18 nt, Human
ucucauacucaccucacc

SEQ ID NO: 3307415 - RNA, 13 nt, Human
ucuccacccugcu

SEQ ID NO: 3307416 - RNA, 12 nt, Human
ucuccacccugc

SEQ ID NO: 3307417 - RNA, 17 nt, Human
ucuccacccugcucucc

SEQ ID NO: 3307418 - RNA, 14 nt, Human
ucuccacccugcuc

SEQ ID NO: 3307419 - RNA, 16 nt, Human
ucuccacccugcucuc

SEQ ID NO: 3307420 - RNA, 22 nt, Human
ucuccaccugccagggacagag

SEQ ID NO: 3307421 - RNA, 19 nt, Human
ucuccaccugccagggaca

SEQ ID NO: 3307422 - RNA, 17 nt, Human
ucuccaccugccaggga

SEQ ID NO: 3307423 - RNA, 16 nt, Human
ucuccaccugccaggg

SEQ ID NO: 3307424 - RNA, 15 nt, Human
ucuccaccugccagg

SEQ ID NO: 3307425 - RNA, 14 nt, Human
ucuccaccugccag

SEQ ID NO: 3307426 - RNA, 12 nt, Human
ucucccccagcc

SEQ ID NO: 3307427 - RNA, 18 nt, Human
ucucccucagucuggccc

SEQ ID NO: 3307428 - RNA, 23 nt, Human
ucucccucagucuggcccuuccu

SEQ ID NO: 3307429 - RNA, 15 nt, Human
ucuccagccccugga

SEQ ID NO: 3307430 - RNA, 14 nt, Human
ucuccagccccugg

SEQ ID NO: 3307431 - RNA, 13 nt, Human
ucuccagccccug

SEQ ID NO: 3307432 - RNA, 12 nt, Human
ucuccagccccu

SEQ ID NO: 3307433 - RNA, 18 nt, Human
ucuccagccccuggaugc

SEQ ID NO: 3307434 - RNA, 16 nt, Human
ucuccagccccuggau

SEQ ID NO: 3307435 - RNA, 22 nt, Human
ucuccagccccuggaugcagcc

SEQ ID NO: 3307436 - RNA, 14 nt, Human
ucuaugacacaugc

SEQ ID NO: 3307437 - RNA, 17 nt, Human
ucuaugacacaugcaag

SEQ ID NO: 3307438 - RNA, 16 nt, Human
ucuaggaagacuuugg

SEQ ID NO: 3307439 - RNA, 15 nt, Human
ucuaggaagacuuug

SEQ ID NO: 3307440 - RNA, 19 nt, Human
ucuaggaagacuuuggaaa

SEQ ID NO: 3307441 - RNA, 12 nt, Human
ucuaggaagacu

SEQ ID NO: 3307442 - RNA, 22 nt, Human
ucuaucaaguauuauaccuuuu

SEQ ID NO: 3307443 - RNA, 21 nt, Human
ucuacacugugcugagucuga

SEQ ID NO: 3307444 - RNA, 15 nt, Human
ucuacagaggccaug

SEQ ID NO: 3307445 - RNA, 14 nt, Human
ucuaccuuccugca

SEQ ID NO: 3307446 - RNA, 13 nt, Human
ucgugacaacacu

SEQ ID NO: 3307447 - RNA, 20 nt, Human
ucuaaaggcuaccuuuguau

SEQ ID NO: 3307448 - RNA, 19 nt, Human
ucuaaaggcuaccuuugua

SEQ ID NO: 3307449 - RNA, 17 nt, Human
ucuaaaggcuaccuuug

SEQ ID NO: 3307450 - RNA, 18 nt, Human
ucuaaaggcuaccuuugu

SEQ ID NO: 3307451 - RNA, 14 nt, Human
uccugccaggcaug

SEQ ID NO: 3307452 - RNA, 13 nt, Human
uccugccaggcau

SEQ ID NO: 3307453 - RNA, 21 nt, Human
uccugagccagauuucacucu

SEQ ID NO: 3307454 - RNA, 11 nt, Human
uccuguagccc

SEQ ID NO: 3307455 - RNA, 13 nt, Human
uccuguagcccua

SEQ ID NO: 3307456 - RNA, 22 nt, Human
uccuguaccucuugagccuuga

SEQ ID NO: 3307457 - RNA, 23 nt, Human
uccuggcacccggccccugcugg

SEQ ID NO: 3307458 - RNA, 22 nt, Human
uccuggcacccggccccugcug

SEQ ID NO: 3307459 - RNA, 16 nt, Human
uccuggcacugcuucc

SEQ ID NO: 3307460 - RNA, 13 nt, Human
uccuggcacugcu

SEQ ID NO: 3307461 - RNA, 12 nt, Human
uccuggccucaa

SEQ ID NO: 3307462 - RNA, 20 nt, Human
uccugcccuuaccugccagg

SEQ ID NO: 3307463 - RNA, 17 nt, Human
uccugcccuuaccugcc

SEQ ID NO: 3307464 - RNA, 14 nt, Human
uccuggaguucugg

SEQ ID NO: 3307465 - RNA, 23 nt, Human
uccuauauuguuuucaguguaca

SEQ ID NO: 3307466 - RNA, 21 nt, Human
uccuauauuguuuucagugua

SEQ ID NO: 3307467 - RNA, 12 nt, Human
uccucccaccuc

SEQ ID NO: 3307468 - RNA, 17 nt, Human
uccucauuagcauuuug

SEQ ID NO: 3307469 - RNA, 18 nt, Human
uccucauuagcauuuugc

SEQ ID NO: 3307470 - RNA, 15 nt, Human
ucccuuccucuuucc

SEQ ID NO: 3307471 - RNA, 16 nt, Human
ucccuuccucuuucca

SEQ ID NO: 3307472 - RNA, 15 nt, Human
ucccccuuccaugga

SEQ ID NO: 3307473 - RNA, 16 nt, Human
uccgcuuucuacccag

SEQ ID NO: 3307474 - RNA, 18 nt, Human
uccgcuuucuacccagcg

SEQ ID NO: 3307475 - RNA, 18 nt, Human
uccuaagcuauucaguaa

SEQ ID NO: 3307476 - RNA, 20 nt, Human
uccuaagcuauucaguaaua

SEQ ID NO: 3307477 - RNA, 21 nt, Human
uccuaagcuauucaguaauaa

SEQ ID NO: 3307478 - RNA, 14 nt, Human
uccgccucuugggu

SEQ ID NO: 3307479 - RNA, 23 nt, Human
uaggugacagagugagacucugu

SEQ ID NO: 3307480 - RNA, 18 nt, Human
uaggccuggccagaugca

SEQ ID NO: 3307481 - RNA, 15 nt, Human
uaggccuggccagau

SEQ ID NO: 3307482 - RNA, 11 nt, Human
uagggaaaaac

SEQ ID NO: 3307483 - RNA, 19 nt, Human
uagggaaaaaccagcgugu

SEQ ID NO: 3307484 - RNA, 21 nt, Human
uagggaaaaaccagcguguga

SEQ ID NO: 3307485 - RNA, 20 nt, Human
uagggaaaaaccagcgugug

SEQ ID NO: 3307486 - RNA, 20 nt, Human
uauaugcucugcauguuaca

SEQ ID NO: 3307487 - RNA, 21 nt, Human
uauaugcucugcauguuacau

SEQ ID NO: 3307488 - RNA, 18 nt, Human
uauaaacuuuaccuuuuu

SEQ ID NO: 3307489 - RNA, 16 nt, Human
uaucuaaauguugaaa

SEQ ID NO: 3307490 - RNA, 19 nt, Human
uauauguuuuaagaggcag

SEQ ID NO: 3307491 - RNA, 21 nt, Human
uaucuaauauguaacaagcca

SEQ ID NO: 3307492 - RNA, 12 nt, Human
uaugacacaugc

SEQ ID NO: 3307493 - RNA, 22 nt, Human
uaugacacaugcaaggucauuu

SEQ ID NO: 3307494 - RNA, 20 nt, Human
uaucugucauuugagcaggg

SEQ ID NO: 3307495 - RNA, 21 nt, Human
uaucugucauuugagcagggc

SEQ ID NO: 3307496 - RNA, 23 nt, Human
uaucugucauuugagcagggcuc

SEQ ID NO: 3307497 - RNA, 23 nt, Human
uaugacuccagaauuucccaaag

SEQ ID NO: 3307498 - RNA, 17 nt, Human
uaugacuccagaauuuc

SEQ ID NO: 3307499 - RNA, 16 nt, Human
uaugacuccagaauuu

SEQ ID NO: 3307500 - RNA, 18 nt, Human
uaugcaaucaaaucugcu

SEQ ID NO: 3307501 - RNA, 14 nt, Human
uaugcacacauuuu

SEQ ID NO: 3307502 - RNA, 13 nt, Human
uaugcacacauuu

SEQ ID NO: 3307503 - RNA, 22 nt, Human
uaugcuuauacacuuacacuuu

SEQ ID NO: 3307504 - RNA, 13 nt, Human
uaugcaugaagua

SEQ ID NO: 3307505 - RNA, 17 nt, Human
uauggacaaugacccag

SEQ ID NO: 3307506 - RNA, 19 nt, Human
uauggaacacucugagacu

SEQ ID NO: 3307507 - RNA, 18 nt, Human
uauggaacacucugagac

SEQ ID NO: 3307508 - RNA, 17 nt, Human
uauggaacacucugaga

SEQ ID NO: 3307509 - RNA, 16 nt, Human
uauggaacacucugag

SEQ ID NO: 3307510 - RNA, 13 nt, Human
uauggaacacucu

SEQ ID NO: 3307511 - RNA, 15 nt, Human
ucacacacuuuggcu

SEQ ID NO: 3307512 - RNA, 23 nt, Human
ucacacaugagcaucaggccagg

SEQ ID NO: 3307513 - RNA, 22 nt, Human
ucacacaugagcaucaggccag

SEQ ID NO: 3307514 - RNA, 14 nt, Human
ucacauuuauucug

SEQ ID NO: 3307515 - RNA, 21 nt, Human
ucaccaaaucagcugcuacua

SEQ ID NO: 3307516 - RNA, 18 nt, Human
ucaccaacgucugugcca

SEQ ID NO: 3307517 - RNA, 17 nt, Human
ucaccaacgucugugcc

SEQ ID NO: 3307518 - RNA, 18 nt, Human
ucacccgcuaagagggag

SEQ ID NO: 3307519 - RNA, 16 nt, Human
ucaccacaugugcaca

SEQ ID NO: 3307520 - RNA, 13 nt, Human
ucaccaagcccag

SEQ ID NO: 3307521 - RNA, 23 nt, Human
ucaccgaaaacguggcugcuuca

SEQ ID NO: 3307522 - RNA, 22 nt, Human
ucaccgaaaacguggcugcuuc

SEQ ID NO: 3307523 - RNA, 21 nt, Human
ucaccgaaaacguggcugcuu

SEQ ID NO: 3307524 - RNA, 20 nt, Human
ucaccgaaaacguggcugcu

SEQ ID NO: 3307525 - RNA, 19 nt, Human
ucaccgaaaacguggcugc

SEQ ID NO: 3307526 - RNA, 15 nt, Human
ucaccgaaaacgugg

SEQ ID NO: 3307527 - RNA, 19 nt, Human
ucacccgcuaagagggagg

SEQ ID NO: 3307528 - RNA, 14 nt, Human
ucaccgaaaacgug

SEQ ID NO: 3307529 - RNA, 12 nt, Human
ucacccuuuucu

SEQ ID NO: 3307530 - RNA, 23 nt, Human
ucaaagagguuuuaaaaaaaucc

SEQ ID NO: 3307531 - RNA, 12 nt, Human
ucaaagagguuu

SEQ ID NO: 3307532 - RNA, 20 nt, Human
ucaacucuccuccagaguca

SEQ ID NO: 3307533 - RNA, 16 nt, Human
ucaaccuccugggcua

SEQ ID NO: 3307534 - RNA, 14 nt, Human
ucaaccuccugggc

SEQ ID NO: 3307535 - RNA, 15 nt, Human
ucaaccuccugggcu

SEQ ID NO: 3307536 - RNA, 18 nt, Human
ucaaccccuucgcuccug

SEQ ID NO: 3307537 - RNA, 19 nt, Human
ucaaccccuucgcuccugu

SEQ ID NO: 3307538 - RNA, 17 nt, Human
ucaagcgauucuucugc

SEQ ID NO: 3307539 - RNA, 20 nt, Human
ucaagccaccaacauacucc

SEQ ID NO: 3307540 - RNA, 12 nt, Human
ucaagccaccaa

SEQ ID NO: 3307541 - RNA, 18 nt, Human
ucaagcgauucuucugcu

SEQ ID NO: 3307542 - RNA, 19 nt, Human
ucaagcgauucuucugcuu

SEQ ID NO: 3307543 - RNA, 16 nt, Human
ucaaggauccugagcc

SEQ ID NO: 3307544 - RNA, 15 nt, Human
ucaaggauccugagc

SEQ ID NO: 3307545 - RNA, 14 nt, Human
ucaaggauccugag

SEQ ID NO: 3307546 - RNA, 13 nt, Human
ucaaggauccuga

SEQ ID NO: 3307547 - RNA, 22 nt, Human
uauguucuuaguggauguucug

SEQ ID NO: 3307548 - RNA, 21 nt, Human
uauguugcccaggcaggucuu

SEQ ID NO: 3307549 - RNA, 15 nt, Human
uauuaaaugcccagc

SEQ ID NO: 3307550 - RNA, 19 nt, Human
uauuaaaugcccagccccu

SEQ ID NO: 3307551 - RNA, 17 nt, Human
uauuaaaugcccagccc

SEQ ID NO: 3307552 - RNA, 16 nt, Human
uauuaagaaagacuau

SEQ ID NO: 3307553 - RNA, 14 nt, Human
uauuauaccuuuuu

SEQ ID NO: 3307554 - RNA, 13 nt, Human
uauuauaccuuuu

SEQ ID NO: 3307555 - RNA, 12 nt, Human
uauuauaccuuu

SEQ ID NO: 3307556 - RNA, 14 nt, Human
uauuaaggaagaca

SEQ ID NO: 3307557 - RNA, 22 nt, Human
uauuuauuaaaugcccagcccc

SEQ ID NO: 3307558 - RNA, 17 nt, Human
uauuuaugggauccugg

SEQ ID NO: 3307559 - RNA, 20 nt, Human
uauugauaugcuuauacacu

SEQ ID NO: 3307560 - RNA, 22 nt, Human
uauugcugauggugcaaugacc

SEQ ID NO: 3307561 - RNA, 23 nt, Human
uauugcugauggugcaaugaccu

SEQ ID NO: 3307562 - RNA, 13 nt, Human
uauugcccacgcu

SEQ ID NO: 3307563 - RNA, 14 nt, Human
uauugcccacgcug

SEQ ID NO: 3307564 - RNA, 15 nt, Human
uauugcccacgcugg

SEQ ID NO: 3307565 - RNA, 17 nt, Human
uuaguagagacaggguu

SEQ ID NO: 3307566 - RNA, 16 nt, Human
uuaguaugaggcauuu

SEQ ID NO: 3307567 - RNA, 18 nt, Human
uuaguaugaggcauuugu

SEQ ID NO: 3307568 - RNA, 14 nt, Human
uuagcggagacgga

SEQ ID NO: 3307569 - RNA, 22 nt, Human
uuagauaauacaccacuacauu

SEQ ID NO: 3307570 - RNA, 14 nt, Human
uuagaguugauacu

SEQ ID NO: 3307571 - RNA, 16 nt, Human
uuacuaauagacaauu

SEQ ID NO: 3307572 - RNA, 14 nt, Human
uuacuaaguuuuua

SEQ ID NO: 3307573 - RNA, 13 nt, Human
uuacuaaguuuuu

SEQ ID NO: 3307574 - RNA, 18 nt, Human
uuacuuagguguggggga

SEQ ID NO: 3307575 - RNA, 11 nt, Human
uuacuucugcu

SEQ ID NO: 3307576 - RNA, 12 nt, Human
uuacuucugcua

SEQ ID NO: 3307577 - RNA, 23 nt, Human
uuacuucuuauacauuugauaaa

SEQ ID NO: 3307578 - RNA, 21 nt, Human
uuacuuaaaccgccaaggcug

SEQ ID NO: 3307579 - RNA, 17 nt, Human
uuacuuuaaaaggagcc

SEQ ID NO: 3307580 - RNA, 18 nt, Human
uuacuuuaaaaggagcca

SEQ ID NO: 3307581 - RNA, 14 nt, Human
uuacuuuguguuca

SEQ ID NO: 3307582 - RNA, 15 nt, Human
uuagacagucccugc

SEQ ID NO: 3307583 - RNA, 14 nt, Human
uuagacagucccug

SEQ ID NO: 3307584 - RNA, 18 nt, Human
uuagacagucccugccaa

SEQ ID NO: 3307585 - RNA, 17 nt, Human
uuagacagucccugcca

SEQ ID NO: 3307586 - RNA, 16 nt, Human
uuagacagucccugcc

SEQ ID NO: 3307587 - RNA, 14 nt, Human
uuaacuuuuauaaa

SEQ ID NO: 3307588 - RNA, 17 nt, Human
uuaacuuuuauaaacuu

SEQ ID NO: 3307589 - RNA, 16 nt, Human
uuaacuuuuauaaacu

SEQ ID NO: 3307590 - RNA, 16 nt, Human
uuaacuucacauauug

SEQ ID NO: 3307591 - RNA, 15 nt, Human
uuaacuuuuauaaac

SEQ ID NO: 3307592 - RNA, 17 nt, Human
uuaaccacuucagcuga

SEQ ID NO: 3307593 - RNA, 18 nt, Human
uuaauauugauaugcuua

SEQ ID NO: 3307594 - RNA, 22 nt, Human
uuaauauugauaugcuuauaca

SEQ ID NO: 3307595 - RNA, 17 nt, Human
uuaagcuguuacugucu

SEQ ID NO: 3307596 - RNA, 21 nt, Human
uuacaagcgugagccacugca

SEQ ID NO: 3307597 - RNA, 20 nt, Human
uuacaagcgugagccacugc

SEQ ID NO: 3307598 - RNA, 16 nt, Human
uguuuagauaauacac

SEQ ID NO: 3307599 - RNA, 15 nt, Human
uguuucaaacuuuac

SEQ ID NO: 3307600 - RNA, 19 nt, Human
uguuuggggaugagaaagg

SEQ ID NO: 3307601 - RNA, 23 nt, Human
uguuuccuggcacugcuuccagu

SEQ ID NO: 3307602 - RNA, 13 nt, Human
uguuugugauuga

SEQ ID NO: 3307603 - RNA, 20 nt, Human
uguuuuaagaggcagggucu

SEQ ID NO: 3307604 - RNA, 21 nt, Human
uuaaaauaccagccaguaaau

SEQ ID NO: 3307605 - RNA, 17 nt, Human
uuaaaagauacaguuac

SEQ ID NO: 3307606 - RNA, 14 nt, Human
uuaaaagauacagu

SEQ ID NO: 3307607 - RNA, 22 nt, Human
uguuuuaagaggcagggucuca

SEQ ID NO: 3307608 - RNA, 18 nt, Human
uguuuuaaggaugcuugu

SEQ ID NO: 3307609 - RNA, 20 nt, Human
uucgggaggucgaggcagga

SEQ ID NO: 3307610 - RNA, 13 nt, Human
uucuaaagcugcc

SEQ ID NO: 3307611 - RNA, 14 nt, Human
uuccuggcacugcu

SEQ ID NO: 3307612 - RNA, 17 nt, Human
uuccugccaggcauggu

SEQ ID NO: 3307613 - RNA, 15 nt, Human
uuccugaugcuucuu

SEQ ID NO: 3307614 - RNA, 19 nt, Human
uuccugaugcuucuucaga

SEQ ID NO: 3307615 - RNA, 18 nt, Human
uuccugaugcuucuucag

SEQ ID NO: 3307616 - RNA, 13 nt, Human
uuccucauuagca

SEQ ID NO: 3307617 - RNA, 22 nt, Human
uucccuuugacgccaucccagc

SEQ ID NO: 3307618 - RNA, 21 nt, Human
uucccuuugacgccaucccag

SEQ ID NO: 3307619 - RNA, 20 nt, Human
uucccuuugacgccauccca

SEQ ID NO: 3307620 - RNA, 15 nt, Human
uucauuuccuguguc

SEQ ID NO: 3307621 - RNA, 16 nt, Human
uucauuuccugugucu

SEQ ID NO: 3307622 - RNA, 21 nt, Human
uucaucuugaauuguaaggaa

SEQ ID NO: 3307623 - RNA, 17 nt, Human
uucaucuugaauuguaa

SEQ ID NO: 3307624 - RNA, 13 nt, Human
uucaggaagcuca

SEQ ID NO: 3307625 - RNA, 11 nt, Human
uucaggaagcu

SEQ ID NO: 3307626 - RNA, 15 nt, Human
uuccaaauucugcuu

SEQ ID NO: 3307627 - RNA, 16 nt, Human
uuccccaggaggccag

SEQ ID NO: 3307628 - RNA, 15 nt, Human
uuccccaggaggcca

SEQ ID NO: 3307629 - RNA, 16 nt, Human
uucccauuugcuccuu

SEQ ID NO: 3307630 - RNA, 11 nt, Human
uucccucccuu

SEQ ID NO: 3307631 - RNA, 17 nt, Human
uucccucccuuccucuu

SEQ ID NO: 3307632 - RNA, 20 nt, Human
uucccucccuuccucuuucc

SEQ ID NO: 3307633 - RNA, 21 nt, Human
uuccccaggaggccagccuug

SEQ ID NO: 3307634 - RNA, 20 nt, Human
uuccccaggaggccagccuu

SEQ ID NO: 3307635 - RNA, 19 nt, Human
uuccccaggaggccagccu

SEQ ID NO: 3307636 - RNA, 18 nt, Human
uuccccaggaggccagcc

SEQ ID NO: 3307637 - RNA, 17 nt, Human
uuccccaggaggccagc

SEQ ID NO: 3307638 - RNA, 21 nt, Human
uucagacagcugccugggauc

SEQ ID NO: 3307639 - RNA, 19 nt, Human
uucagagacuccugcaggc

SEQ ID NO: 3307640 - RNA, 13 nt, Human
uucacucuccuug

SEQ ID NO: 3307641 - RNA, 22 nt, Human
uucagcuuguaaauagcucagg

SEQ ID NO: 3307642 - RNA, 18 nt, Human
uucaauaggaaaaacuga

SEQ ID NO: 3307643 - RNA, 15 nt, Human
uucaauaggaaaaac

SEQ ID NO: 3307644 - RNA, 13 nt, Human
uucaauaggaaaa

SEQ ID NO: 3307645 - RNA, 18 nt, Human
uucacggaagagccuugc

SEQ ID NO: 3307646 - RNA, 15 nt, Human
uucacgugguccuaa

SEQ ID NO: 3307647 - RNA, 18 nt, Human
uuauugucaaagugguga

SEQ ID NO: 3307648 - RNA, 17 nt, Human
uuauugucaaaguggug

SEQ ID NO: 3307649 - RNA, 17 nt, Human
uuauuuuaauucaguug

SEQ ID NO: 3307650 - RNA, 14 nt, Human
uuauggcacaucag

SEQ ID NO: 3307651 - RNA, 22 nt, Human
uuaugcaugaaguaauaugcac

SEQ ID NO: 3307652 - RNA, 16 nt, Human
uuaugcaugaaguaau

SEQ ID NO: 3307653 - RNA, 17 nt, Human
uuaucuagauacuguau

SEQ ID NO: 3307654 - RNA, 14 nt, Human
uuaguuccuugagu

SEQ ID NO: 3307655 - RNA, 16 nt, Human
uuaguuccucauuagc

SEQ ID NO: 3307656 - RNA, 14 nt, Human
uuaucuagauacug

SEQ ID NO: 3307657 - RNA, 16 nt, Human
uuaucuagauacugua

SEQ ID NO: 3307658 - RNA, 15 nt, Human
uuauugcccacgcug

SEQ ID NO: 3307659 - RNA, 11 nt, Human
uuauucugcuc

SEQ ID NO: 3307660 - RNA, 23 nt, Human
uuauuaaaaaucucaaauuucua

SEQ ID NO: 3307661 - RNA, 13 nt, Human
uuuaacagaaaug

SEQ ID NO: 3307662 - RNA, 13 nt, Human
uuuaaaagauaca

SEQ ID NO: 3307663 - RNA, 24 nt, Human
uugucuuuggacccugaggcccag

SEQ ID NO: 3307664 - RNA, 20 nt, Human
uugucuuuggacccugaggc

SEQ ID NO: 3307665 - RNA, 15 nt, Human
uugucuuuggacccu

SEQ ID NO: 3307666 - RNA, 20 nt, Human
uuguuuggggaugagaaagg

SEQ ID NO: 3307667 - RNA, 15 nt, Human
uuuaacagaaaugua

SEQ ID NO: 3307668 - RNA, 14 nt, Human
uuuaacagaaaugu

SEQ ID NO: 3307669 - RNA, 20 nt, Human
uuuauacauaaacaagacca

SEQ ID NO: 3307670 - RNA, 12 nt, Human
uuuauacauaaa

SEQ ID NO: 3307671 - RNA, 18 nt, Human
uuuauaaacuuuaccuuu

SEQ ID NO: 3307672 - RNA, 19 nt, Human
uuuagacccuauugcugcu

SEQ ID NO: 3307673 - RNA, 22 nt, Human
uuuagacccuauugcugcuuga

SEQ ID NO: 3307674 - RNA, 16 nt, Human
uuucagccaagaauuc

SEQ ID NO: 3307675 - RNA, 17 nt, Human
uuucagccaagaauucu

SEQ ID NO: 3307676 - RNA, 22 nt, Human
uuucuacccagcgagcccuggu

SEQ ID NO: 3307677 - RNA, 15 nt, Human
uuucuacccagcgag

SEQ ID NO: 3307678 - RNA, 18 nt, Human
uuucuacccagcgagccc

SEQ ID NO: 3307679 - RNA, 14 nt, Human
uuucugaaauaaca

SEQ ID NO: 3307680 - RNA, 23 nt, Human
uuuccuggcacugcuuccaguga

SEQ ID NO: 3307681 - RNA, 19 nt, Human
uuuccuggcacugcuucca

SEQ ID NO: 3307682 - RNA, 19 nt, Human
uuucuaaaucuccaaaaua

SEQ ID NO: 3307683 - RNA, 17 nt, Human
uuugagaucagccuggg

SEQ ID NO: 3307684 - RNA, 16 nt, Human
uuugagaucagccugg

SEQ ID NO: 3307685 - RNA, 19 nt, Human
uuucuuguguguuuauugu

SEQ ID NO: 3307686 - RNA, 13 nt, Human
uuuggacccugag

SEQ ID NO: 3307687 - RNA, 19 nt, Human
uuuggacccugaggcccag

SEQ ID NO: 3307688 - RNA, 15 nt, Human
uuuggacccugaggc

SEQ ID NO: 3307689 - RNA, 14 nt, Human
uuugcuugaaagaa

SEQ ID NO: 3307690 - RNA, 16 nt, Human
uuugcuugaaagaaaa

SEQ ID NO: 3307691 - RNA, 20 nt, Human
uugucuaugggacucaaugc

SEQ ID NO: 3307692 - RNA, 22 nt, Human
uugucuuaaaaaguggaaaaau

SEQ ID NO: 3307693 - RNA, 20 nt, Human
uuguauuuuacuaauaaaau

SEQ ID NO: 3307694 - RNA, 14 nt, Human
uugucuaugggacu

SEQ ID NO: 3307695 - RNA, 22 nt, Human
uugucaaaguggugagaggcau

SEQ ID NO: 3307696 - RNA, 13 nt, Human
uugguccugcugc

SEQ ID NO: 3307697 - RNA, 20 nt, Human
uuggucugacccacugcuuu

SEQ ID NO: 3307698 - RNA, 23 nt, Human
uuggcuucacggaagagccuugc

SEQ ID NO: 3307699 - RNA, 21 nt, Human
uuggacccugaggcccagagg

SEQ ID NO: 3307700 - RNA, 19 nt, Human
uuggacccugaggcccaga

SEQ ID NO: 3307701 - RNA, 18 nt, Human
uuggacccugaggcccag

SEQ ID NO: 3307702 - RNA, 15 nt, Human
uuggacccugaggcc

SEQ ID NO: 3307703 - RNA, 15 nt, Human
uuggauuguccccga

SEQ ID NO: 3307704 - RNA, 14 nt, Human
uuggauuguccccg

SEQ ID NO: 3307705 - RNA, 19 nt, Human
uuggaagcuccgcuuucua

SEQ ID NO: 3307706 - RNA, 16 nt, Human
uugcugcuugaggcaa

SEQ ID NO: 3307707 - RNA, 14 nt, Human
uugcugcuugaggc

SEQ ID NO: 3307708 - RNA, 16 nt, Human
uugcugucccuuuucc

SEQ ID NO: 3307709 - RNA, 18 nt, Human
uugcugucccuuuuccuu

SEQ ID NO: 3307710 - RNA, 20 nt, Human
uugccauguuggccaggcug

SEQ ID NO: 3307711 - RNA, 21 nt, Human
uugccauguuggccaggcugg

SEQ ID NO: 3307712 - RNA, 16 nt, Human
uugaaugaugccauga

SEQ ID NO: 3307713 - RNA, 12 nt, Human
uugaaugaugcc

SEQ ID NO: 3307714 - RNA, 13 nt, Human
uugaacuuugacc

SEQ ID NO: 3307715 - RNA, 18 nt, Human
uugaacuuugaccucugc

SEQ ID NO: 3307716 - RNA, 17 nt, Human
uugaacuuugaccucug

SEQ ID NO: 3307717 - RNA, 21 nt, Human
uucuuuccugaggcugggcuc

SEQ ID NO: 3307718 - RNA, 15 nt, Human
uugaacuuugaccuc

SEQ ID NO: 3307719 - RNA, 17 nt, Human
uucuuagggaaggauac

SEQ ID NO: 3307720 - RNA, 13 nt, Human
uucuucagagacu

SEQ ID NO: 3307721 - RNA, 20 nt, Human
uucuggcagaguugaagaca

SEQ ID NO: 3307722 - RNA, 23 nt, Human
uugauauccucuuugagugaagc

SEQ ID NO: 3307723 - RNA, 16 nt, Human
uugauaugcuuauaca

SEQ ID NO: 3307724 - RNA, 21 nt, Human
uugauucagacagcugccugg

SEQ ID NO: 3307725 - RNA, 17 nt, Human
uugauucagacagcugc

SEQ ID NO: 3307726 - RNA, 23 nt, Human
uugauucagacagcugccuggga

SEQ ID NO: 3307727 - RNA, 16 nt, Human
uugauucagcucugca

SEQ ID NO: 3307728 - RNA, 19 nt, Human
uugagccuugaacuuugac

SEQ ID NO: 3307729 - RNA, 14 nt, Human
uugagccugggagg

SEQ ID NO: 3307730 - RNA, 14 nt, Human
uugagccuugaacu

SEQ ID NO: 3307731 - RNA, 16 nt, Human
uugagccuugaacuuu

SEQ ID NO: 3307732 - RNA, 15 nt, Human
uugagccuugaacuu

SEQ ID NO: 3307733 - RNA, 22 nt, Human
uugcagacaggcaagcaccucc

SEQ ID NO: 3307734 - RNA, 17 nt, Human
uugauucauaaugacuu

SEQ ID NO: 3307735 - RNA, 13 nt, Human
uugauucauaaug

SEQ ID NO: 3307736 - RNA, 23 nt, Human
uugcagacaggcaagcaccuccu

SEQ ID NO: 3307737 - RNA, 16 nt, Human
uugccauguuggccag

SEQ ID NO: 3307738 - RNA, 17 nt, Human
uugccauguuggccagg

SEQ ID NO: 3307739 - RNA, 18 nt, Human
uugccauguuggccaggc

SEQ ID NO: 3307740 - RNA, 19 nt, Human
uugccauguuggccaggcu

SEQ ID NO: 3307741 - RNA, 15 nt, Human
cuggaugcagccuca

SEQ ID NO: 3307742 - RNA, 18 nt, Human
cuggaugcagccucacag

SEQ ID NO: 3307743 - RNA, 17 nt, Human
cuggaugcagccucaca

SEQ ID NO: 3307744 - RNA, 16 nt, Human
cuggaugcagccucac

SEQ ID NO: 3307745 - RNA, 13 nt, Human
cugcuucaaggau

SEQ ID NO: 3307746 - RNA, 19 nt, Human
cugcuucaaggauccugag

SEQ ID NO: 3307747 - RNA, 16 nt, Human
cugcuucaaggauccu

SEQ ID NO: 3307748 - RNA, 14 nt, Human
cugcuucaaggauc

SEQ ID NO: 3307749 - RNA, 23 nt, Human
cugcuucagccucccgaguagcu

SEQ ID NO: 3307750 - RNA, 14 nt, Human
cugcuuccagugag

SEQ ID NO: 3307751 - RNA, 21 nt, Human
cuggagaaaauggacguguua

SEQ ID NO: 3307752 - RNA, 14 nt, Human
cuggagaaaaugga

SEQ ID NO: 3307753 - RNA, 13 nt, Human
cuggcagccccug

SEQ ID NO: 3307754 - RNA, 22 nt, Human
cuggcagaguugaagacagagc

SEQ ID NO: 3307755 - RNA, 23 nt, Human
cuggcagccccuguucuggcaga

SEQ ID NO: 3307756 - RNA, 19 nt, Human
cuggcagaguugaagacag

SEQ ID NO: 3307757 - RNA, 21 nt, Human
cuggcagaguugaagacagag

SEQ ID NO: 3307758 - RNA, 20 nt, Human
cuggcagaguugaagacaga

SEQ ID NO: 3307759 - RNA, 13 nt, Human
cuggcucuuccag

SEQ ID NO: 3307760 - RNA, 15 nt, Human
cuggcucuuccaggc

SEQ ID NO: 3307761 - RNA, 14 nt, Human
cuggcucuuccagg

SEQ ID NO: 3307762 - RNA, 16 nt, Human
cugggacuacaggcac

SEQ ID NO: 3307763 - RNA, 17 nt, Human
cugggacuacaggcacc

SEQ ID NO: 3307764 - RNA, 21 nt, Human
cugggacuacaggcacccacc

SEQ ID NO: 3307765 - RNA, 17 nt, Human
cugggacuacaggugug

SEQ ID NO: 3307766 - RNA, 15 nt, Human
cuggcagcucagaga

SEQ ID NO: 3307767 - RNA, 16 nt, Human
cuggcagcucagagag

SEQ ID NO: 3307768 - RNA, 19 nt, Human
cuggcagcucagagagggu

SEQ ID NO: 3307769 - RNA, 17 nt, Human
cuggcagcucagagagg

SEQ ID NO: 3307770 - RNA, 19 nt, Human
cugccucgaacuggcugca

SEQ ID NO: 3307771 - RNA, 20 nt, Human
cugccucgaacuggcugcaa

SEQ ID NO: 3307772 - RNA, 14 nt, Human
cugccucgaacugg

SEQ ID NO: 3307773 - RNA, 23 nt, Human
cugccuccuuugugaggaagccg

SEQ ID NO: 3307774 - RNA, 21 nt, Human
cugccuccuuugugaggaagc

SEQ ID NO: 3307775 - RNA, 17 nt, Human
cugccuccuuugugagg

SEQ ID NO: 3307776 - RNA, 14 nt, Human
cugccuccuuugug

SEQ ID NO: 3307777 - RNA, 17 nt, Human
cugcuaucaaagagguu

SEQ ID NO: 3307778 - RNA, 18 nt, Human
cugcugaaggcucgagca

SEQ ID NO: 3307779 - RNA, 23 nt, Human
cugcugaaggcucgagcaugccu

SEQ ID NO: 3307780 - RNA, 24 nt, Human
cugcugaaggcucgagcaugccug

SEQ ID NO: 3307781 - RNA, 20 nt, Human
cugccuguucagcuccagcu

SEQ ID NO: 3307782 - RNA, 23 nt, Human
cugccuguucagcuccagcucac

SEQ ID NO: 3307783 - RNA, 23 nt, Human
cugcccuuaccugccaggaagcc

SEQ ID NO: 3307784 - RNA, 22 nt, Human
cugcccuuaccugccaggaagc

SEQ ID NO: 3307785 - RNA, 11 nt, Human
cugcccugugg

SEQ ID NO: 3307786 - RNA, 12 nt, Human
cugcccuguggg

SEQ ID NO: 3307787 - RNA, 17 nt, Human
cugcccuuaccugccag

SEQ ID NO: 3307788 - RNA, 19 nt, Human
cugcccuuaccugccagga

SEQ ID NO: 3307789 - RNA, 13 nt, Human
cugcccugugagu

SEQ ID NO: 3307790 - RNA, 24 nt, Human
cugcccugugaguacuacaguccu

SEQ ID NO: 3307791 - RNA, 18 nt, Human
cuggucuuauuuguaaag

SEQ ID NO: 3307792 - RNA, 22 nt, Human
cuggugacaugucuuuucuugc

SEQ ID NO: 3307793 - RNA, 15 nt, Human
cuguagagugggagc

SEQ ID NO: 3307794 - RNA, 22 nt, Human
cugucuaaugaaaccugugucu

SEQ ID NO: 3307795 - RNA, 20 nt, Human
cuguccugggagugagcugg

SEQ ID NO: 3307796 - RNA, 13 nt, Human
cuguccugggagu

SEQ ID NO: 3307797 - RNA, 14 nt, Human
cuguccugggagug

SEQ ID NO: 3307798 - RNA, 14 nt, Human
cugucauuugagca

SEQ ID NO: 3307799 - RNA, 17 nt, Human
cugugcucuggacaggc

SEQ ID NO: 3307800 - RNA, 15 nt, Human
cugugcucuggacag

SEQ ID NO: 3307801 - RNA, 12 nt, Human
cuguucagcugg

SEQ ID NO: 3307802 - RNA, 16 nt, Human
cuguucagcuccagcu

SEQ ID NO: 3307803 - RNA, 18 nt, Human
cuguucagcuccagcuca

SEQ ID NO: 3307804 - RNA, 19 nt, Human
cuguucagcuccagcucac

SEQ ID NO: 3307805 - RNA, 22 nt, Human
cuguucagcuccagcucaccag

SEQ ID NO: 3307806 - RNA, 14 nt, Human
cuguucagcuccag

SEQ ID NO: 3307807 - RNA, 15 nt, Human
cuguucagcuccagc

SEQ ID NO: 3307808 - RNA, 13 nt, Human
cuguuacugucuu

SEQ ID NO: 3307809 - RNA, 17 nt, Human
cuguuacugucuucagu

SEQ ID NO: 3307810 - RNA, 18 nt, Human
cugugcucuggacaggca

SEQ ID NO: 3307811 - RNA, 22 nt, Human
cugugucagguggggcagcuug

SEQ ID NO: 3307812 - RNA, 18 nt, Human
cuguugcccaggcuggcg

SEQ ID NO: 3307813 - RNA, 12 nt, Human
cuguuggccagu

SEQ ID NO: 3307814 - RNA, 19 nt, Human
cuuaaauaaugugaaacug

SEQ ID NO: 3307815 - RNA, 16 nt, Human
cuuaaauaaugugaaa

SEQ ID NO: 3307816 - RNA, 14 nt, Human
cuuaaauaauguga

SEQ ID NO: 3307817 - RNA, 13 nt, Human
cuuaaauaaugug

SEQ ID NO: 3307818 - RNA, 14 nt, Human
cuuccucccucccu

SEQ ID NO: 3307819 - RNA, 12 nt, Human
cuuccucccucc

SEQ ID NO: 3307820 - RNA, 13 nt, Human
cuuccucccuccc

SEQ ID NO: 3307821 - RNA, 19 nt, Human
cuucugaacuuggcgcugc

SEQ ID NO: 3307822 - RNA, 22 nt, Human
cuucugaacuuggcgcugcccc

SEQ ID NO: 3307823 - RNA, 15 nt, Human
cuucugacccaugcu

SEQ ID NO: 3307824 - RNA, 13 nt, Human
cuucuuauacauu

SEQ ID NO: 3307825 - RNA, 16 nt, Human
cuucuuauacauuuga

SEQ ID NO: 3307826 - RNA, 17 nt, Human
cuucugacccaugcugc

SEQ ID NO: 3307827 - RNA, 16 nt, Human
cuucugacccaugcug

SEQ ID NO: 3307828 - RNA, 18 nt, Human
cuucugacccaugcugcc

SEQ ID NO: 3307829 - RNA, 20 nt, Human
cuuggugucgggcaugacac

SEQ ID NO: 3307830 - RNA, 22 nt, Human
cuugguccugcugcaguugcca

SEQ ID NO: 3307831 - RNA, 16 nt, Human
cuugguucccauuugc

SEQ ID NO: 3307832 - RNA, 20 nt, Human
cuugguucccauuugcuccu

SEQ ID NO: 3307833 - RNA, 13 nt, Human
cuugucuguagau

SEQ ID NO: 3307834 - RNA, 20 nt, Human
cuugucuuuggacccugagg

SEQ ID NO: 3307835 - RNA, 19 nt, Human
cuugucuuuggacccugag

SEQ ID NO: 3307836 - RNA, 15 nt, Human
cuugguccugcugca

SEQ ID NO: 3307837 - RNA, 20 nt, Human
cuugguccugcugcaguugc

SEQ ID NO: 3307838 - RNA, 18 nt, Human
cuugguccugcugcaguu

SEQ ID NO: 3307839 - RNA, 17 nt, Human
cuugguccugcugcagu

SEQ ID NO: 3307840 - RNA, 16 nt, Human
cuugguccugcugcag

SEQ ID NO: 3307841 - RNA, 17 nt, Human
cuuucaauaggaaaaac

SEQ ID NO: 3307842 - RNA, 22 nt, Human
cuugucuuuggacccugaggcc

SEQ ID NO: 3307843 - RNA, 21 nt, Human
cuugucuuuggacccugaggc

SEQ ID NO: 3307844 - RNA, 22 nt, Human
cuuuaaugucacaggcaggucc

SEQ ID NO: 3307845 - RNA, 15 nt, Human
cuuucaauaggaaaa

SEQ ID NO: 3307846 - RNA, 14 nt, Human
cuuucaauaggaaa

SEQ ID NO: 3307847 - RNA, 17 nt, Human
cuuuaaugucacaggca

SEQ ID NO: 3307848 - RNA, 18 nt, Human
cuuuaaugucacaggcag

SEQ ID NO: 3307849 - RNA, 19 nt, Human
cuuuaaugucacaggcagg

SEQ ID NO: 3307850 - RNA, 20 nt, Human
cuuuaaugucacaggcaggu

SEQ ID NO: 3307851 - RNA, 12 nt, Human
cuugauucauaa

SEQ ID NO: 3307852 - RNA, 19 nt, Human
cuugauucauaaugacuua

SEQ ID NO: 3307853 - RNA, 18 nt, Human
cuugccgucuaccugagg

SEQ ID NO: 3307854 - RNA, 15 nt, Human
cuuggauuguccccg

SEQ ID NO: 3307855 - RNA, 20 nt, Human
cuuggauuguccccgacccu

SEQ ID NO: 3307856 - RNA, 18 nt, Human
cuuggauuguccccgacc

SEQ ID NO: 3307857 - RNA, 14 nt, Human
cuuggauugucccc

SEQ ID NO: 3307858 - RNA, 22 nt, Human
cuuggcgcugccccuggcagcc

SEQ ID NO: 3307859 - RNA, 21 nt, Human
cuuggcgcugccccuggcagc

SEQ ID NO: 3307860 - RNA, 23 nt, Human
cuuggcgcugccccuggcagccc

SEQ ID NO: 3307861 - RNA, 20 nt, Human
cuuggcgcugccccuggcag

SEQ ID NO: 3307862 - RNA, 18 nt, Human
cuuuugccguuauuaaaa

SEQ ID NO: 3307863 - RNA, 16 nt, Human
cuuuugccguuauuaa

SEQ ID NO: 3307864 - RNA, 15 nt, Human
cuuuuggucugugug

SEQ ID NO: 3307865 - RNA, 16 nt, Human
cuuuuggucuguguga

SEQ ID NO: 3307866 - RNA, 18 nt, Human
cuuuugugcauuaucuag

SEQ ID NO: 3307867 - RNA, 14 nt, Human
cuuuugugcauuau

SEQ ID NO: 3307868 - RNA, 21 nt, Human
cuuuuuuuuuuuuuuugacaa

SEQ ID NO: 3307869 - RNA, 19 nt, Human
gaaaaaauauuuuccugcc

SEQ ID NO: 3307870 - RNA, 14 nt, Human
gaaaauuuuaaaaa

SEQ ID NO: 3307871 - RNA, 18 nt, Human
gaaaauuuugauguuuua

SEQ ID NO: 3307872 - RNA, 21 nt, Human
gaacaaggcaaggcugucaau

SEQ ID NO: 3307873 - RNA, 18 nt, Human
gaacaaggcaaggcuguc

SEQ ID NO: 3307874 - RNA, 17 nt, Human
gaacaaggcaaggcugu

SEQ ID NO: 3307875 - RNA, 15 nt, Human
gaacaaggcaaggcu

SEQ ID NO: 3307876 - RNA, 14 nt, Human
gaacaaggcaaggc

SEQ ID NO: 3307877 - RNA, 17 nt, Human
gaaaucaccgaaaacgu

SEQ ID NO: 3307878 - RNA, 18 nt, Human
gaaauuuuuauuaaauua

SEQ ID NO: 3307879 - RNA, 19 nt, Human
gaaauuuuuauuaaauuau

SEQ ID NO: 3307880 - RNA, 21 nt, Human
gaaaguacuucuccacccugc

SEQ ID NO: 3307881 - RNA, 18 nt, Human
gaaagacuaucuaaaugu

SEQ ID NO: 3307882 - RNA, 16 nt, Human
gaaaggcuccaggagc

SEQ ID NO: 3307883 - RNA, 19 nt, Human
gaaaggcuccaggagcagc

SEQ ID NO: 3307884 - RNA, 18 nt, Human
gaaaggcuccaggagcag

SEQ ID NO: 3307885 - RNA, 17 nt, Human
gaaaggcuccaggagca

SEQ ID NO: 3307886 - RNA, 14 nt, Human
gagauuggaaggaa

SEQ ID NO: 3307887 - RNA, 21 nt, Human
gagauugcaccacugcacucc

SEQ ID NO: 3307888 - RNA, 16 nt, Human
gagagccuuccagggg

SEQ ID NO: 3307889 - RNA, 15 nt, Human
gagagccuuccaggg

SEQ ID NO: 3307890 - RNA, 14 nt, Human
gagagccuuccagg

SEQ ID NO: 3307891 - RNA, 13 nt, Human
gagacuccugcag

SEQ ID NO: 3307892 - RNA, 13 nt, Human
gagagcugggugu

SEQ ID NO: 3307893 - RNA, 21 nt, Human
gagagcuagcagcagggaggg

SEQ ID NO: 3307894 - RNA, 15 nt, Human
gagagcuagcagcag

SEQ ID NO: 3307895 - RNA, 20 nt, Human
gagagccuuccagggguggg

SEQ ID NO: 3307896 - RNA, 18 nt, Human
gagagccuuccaggggug

SEQ ID NO: 3307897 - RNA, 12 nt, Human
gagaggaaauca

SEQ ID NO: 3307898 - RNA, 20 nt, Human
gagagcugggugucaagagg

SEQ ID NO: 3307899 - RNA, 15 nt, Human
gagaggacccccuga

SEQ ID NO: 3307900 - RNA, 15 nt, Human
gagaaugaaagggcc

SEQ ID NO: 3307901 - RNA, 23 nt, Human
gagaaugaaagggcccagagagg

SEQ ID NO: 3307902 - RNA, 21 nt, Human
gagacccugucucaaaaaaag

SEQ ID NO: 3307903 - RNA, 18 nt, Human
gagacgggggcagagagg

SEQ ID NO: 3307904 - RNA, 16 nt, Human
gagacggagucccacc

SEQ ID NO: 3307905 - RNA, 19 nt, Human
gagacggagucccaccuug

SEQ ID NO: 3307906 - RNA, 14 nt, Human
gagacggaguccca

SEQ ID NO: 3307907 - RNA, 19 nt, Human
gacuuuuccaacccucauc

SEQ ID NO: 3307908 - RNA, 14 nt, Human
gacuuuuccaaccc

SEQ ID NO: 3307909 - RNA, 14 nt, Human
gagggccugcaagg

SEQ ID NO: 3307910 - RNA, 21 nt, Human
gagggccugcaagggagugag

SEQ ID NO: 3307911 - RNA, 17 nt, Human
gagggccugcaagggag

SEQ ID NO: 3307912 - RNA, 21 nt, Human
gaggcauuuguuugaacugau

SEQ ID NO: 3307913 - RNA, 21 nt, Human
gaggcaugugaugagaggaaa

SEQ ID NO: 3307914 - RNA, 20 nt, Human
gaggcaugugaugagaggaa

SEQ ID NO: 3307915 - RNA, 22 nt, Human
gaggcaugugaugagaggaaau

SEQ ID NO: 3307916 - RNA, 19 nt, Human
gaggcauuuguuugaacug

SEQ ID NO: 3307917 - RNA, 23 nt, Human
gaggacagggaggugaccccagg

SEQ ID NO: 3307918 - RNA, 20 nt, Human
gaggacuuuucuuuguggcu

SEQ ID NO: 3307919 - RNA, 23 nt, Human
gaggacuuuucuuuguggcuucc

SEQ ID NO: 3307920 - RNA, 16 nt, Human
gaggacuuuucuuugu

SEQ ID NO: 3307921 - RNA, 12 nt, Human
gaggagagagga

SEQ ID NO: 3307922 - RNA, 15 nt, Human
gaggagagaggaccc

SEQ ID NO: 3307923 - RNA, 14 nt, Human
gaggagagaggacc

SEQ ID NO: 3307924 - RNA, 18 nt, Human
gaggcagggucucacucu

SEQ ID NO: 3307925 - RNA, 19 nt, Human
gaggcagggucucacucug

SEQ ID NO: 3307926 - RNA, 20 nt, Human
gaggcagggucucacucugu

SEQ ID NO: 3307927 - RNA, 13 nt, Human
gagcccugguggc

SEQ ID NO: 3307928 - RNA, 21 nt, Human
gagcagggcucagcggggaca

SEQ ID NO: 3307929 - RNA, 14 nt, Human
gagcaucaggccag

SEQ ID NO: 3307930 - RNA, 13 nt, Human
gagcaucaggcca

SEQ ID NO: 3307931 - RNA, 16 nt, Human
gagcaucaggccaggc

SEQ ID NO: 3307932 - RNA, 15 nt, Human
gagcaucaggccagg

SEQ ID NO: 3307933 - RNA, 13 nt, Human
gagcaugccugga

SEQ ID NO: 3307934 - RNA, 17 nt, Human
gagccccgaggccuucu

SEQ ID NO: 3307935 - RNA, 13 nt, Human
gagccccgaggcc

SEQ ID NO: 3307936 - RNA, 14 nt, Human
gagccccgaggccu

SEQ ID NO: 3307937 - RNA, 14 nt, Human
gaaugauuaauuaa

SEQ ID NO: 3307938 - RNA, 14 nt, Human
gaaugaugccauga

SEQ ID NO: 3307939 - RNA, 20 nt, Human
gaaugaugauccuaggcauu

SEQ ID NO: 3307940 - RNA, 18 nt, Human
gaaugcacaaacagaggc

SEQ ID NO: 3307941 - RNA, 15 nt, Human
gaauguuugccucug

SEQ ID NO: 3307942 - RNA, 19 nt, Human
gaaugcacaaacagaggcc

SEQ ID NO: 3307943 - RNA, 16 nt, Human
gaauguuugccucugc

SEQ ID NO: 3307944 - RNA, 17 nt, Human
gaauguuugccucugcc

SEQ ID NO: 3307945 - RNA, 18 nt, Human
gaauguuugccucugccu

SEQ ID NO: 3307946 - RNA, 19 nt, Human
gaauguuugccucugccuc

SEQ ID NO: 3307947 - RNA, 17 nt, Human
gacacagcucuucucca

SEQ ID NO: 3307948 - RNA, 21 nt, Human
gacacagcucuucuccaggcu

SEQ ID NO: 3307949 - RNA, 12 nt, Human
gacacagcucuu

SEQ ID NO: 3307950 - RNA, 19 nt, Human
gacacagcucuucuccagg

SEQ ID NO: 3307951 - RNA, 20 nt, Human
gacacagcucuucuccaggc

SEQ ID NO: 3307952 - RNA, 23 nt, Human
gaauauugcugauggugcaauga

SEQ ID NO: 3307953 - RNA, 22 nt, Human
gaauauugcugauggugcaaug

SEQ ID NO: 3307954 - RNA, 24 nt, Human
gaauauugcugauggugcaaugac

SEQ ID NO: 3307955 - RNA, 20 nt, Human
gaauauugcugauggugcaa

SEQ ID NO: 3307956 - RNA, 15 nt, Human
gaauauauaaccagu

SEQ ID NO: 3307957 - RNA, 11 nt, Human
gaauauugcug

SEQ ID NO: 3307958 - RNA, 13 nt, Human
gaauauugcugau

SEQ ID NO: 3307959 - RNA, 12 nt, Human
gaauauugcuga

SEQ ID NO: 3307960 - RNA, 23 nt, Human
gacgcuacccgggaagggggcug

SEQ ID NO: 3307961 - RNA, 19 nt, Human
gacgcuacccgggaagggg

SEQ ID NO: 3307962 - RNA, 22 nt, Human
gacgcuacccgggaagggggcu

SEQ ID NO: 3307963 - RNA, 15 nt, Human
gacgcugugcugccc

SEQ ID NO: 3307964 - RNA, 18 nt, Human
gacgcugugcugcccugc

SEQ ID NO: 3307965 - RNA, 17 nt, Human
gacgcugugcugcccug

SEQ ID NO: 3307966 - RNA, 16 nt, Human
gacgcugugcugcccu

SEQ ID NO: 3307967 - RNA, 21 nt, Human
gacgccaucccagccccaaug

SEQ ID NO: 3307968 - RNA, 19 nt, Human
gacgccaucccagccccaa

SEQ ID NO: 3307969 - RNA, 13 nt, Human
gacgccaucccag

SEQ ID NO: 3307970 - RNA, 12 nt, Human
gacgccauccca

SEQ ID NO: 3307971 - RNA, 22 nt, Human
gaccucugcagcaauaaagcag

SEQ ID NO: 3307972 - RNA, 18 nt, Human
gaccucugcagcaauaaa

SEQ ID NO: 3307973 - RNA, 16 nt, Human
gaccucugcagcaaua

SEQ ID NO: 3307974 - RNA, 13 nt, Human
gaccucaggccug

SEQ ID NO: 3307975 - RNA, 14 nt, Human
gaccucaggccugg

SEQ ID NO: 3307976 - RNA, 19 nt, Human
gaccucaggugauccaccc

SEQ ID NO: 3307977 - RNA, 21 nt, Human
gaccucaggugagaagcagag

SEQ ID NO: 3307978 - RNA, 20 nt, Human
gaccucaggugauccaccca

SEQ ID NO: 3307979 - RNA, 21 nt, Human
gaccucaggugauccacccac

SEQ ID NO: 3307980 - RNA, 19 nt, Human
gaccucaggccugggggcu

SEQ ID NO: 3307981 - RNA, 19 nt, Human
gaccucaggugagaagcag

SEQ ID NO: 3307982 - RNA, 18 nt, Human
gaccucaggugagaagca

SEQ ID NO: 3307983 - RNA, 16 nt, Human
gacagcuccuucuguc

SEQ ID NO: 3307984 - RNA, 16 nt, Human
gacagcccgggcucug

SEQ ID NO: 3307985 - RNA, 17 nt, Human
gacagcuccuucugucc

SEQ ID NO: 3307986 - RNA, 18 nt, Human
gacagcuccuucuguccu

SEQ ID NO: 3307987 - RNA, 14 nt, Human
gacagcccgggcuc

SEQ ID NO: 3307988 - RNA, 19 nt, Human
gacagcuccuucuguccua

SEQ ID NO: 3307989 - RNA, 10 nt, Human
gacagcucuu

SEQ ID NO: 3307990 - RNA, 12 nt, Human
gacagucccugc

SEQ ID NO: 3307991 - RNA, 11 nt, Human
gacagcucuua

SEQ ID NO: 3307992 - RNA, 20 nt, Human
gacagucccugccaauggac

SEQ ID NO: 3307993 - RNA, 16 nt, Human
gacagucccugccaau

SEQ ID NO: 3307994 - RNA, 15 nt, Human
gacagucccugccaa

SEQ ID NO: 3307995 - RNA, 14 nt, Human
gacagucccugcca

SEQ ID NO: 3307996 - RNA, 17 nt, Human
gacauugcggacagcca

SEQ ID NO: 3307997 - RNA, 23 nt, Human
gacauugcggacagccacggcca

SEQ ID NO: 3307998 - RNA, 14 nt, Human
gcauacguacacau

SEQ ID NO: 3307999 - RNA, 15 nt, Human
gcauacguacacauu

SEQ ID NO: 3308000 - RNA, 17 nt, Human
gcauacguacacauuuu

SEQ ID NO: 3308001 - RNA, 16 nt, Human
gcauacguacacauuu

SEQ ID NO: 3308002 - RNA, 17 nt, Human
gcauccaguaucuugaa

SEQ ID NO: 3308003 - RNA, 14 nt, Human
gcauccaguaucuu

SEQ ID NO: 3308004 - RNA, 18 nt, Human
gcauccaguaucuugaag

SEQ ID NO: 3308005 - RNA, 13 nt, Human
gcauccuggcacc

SEQ ID NO: 3308006 - RNA, 21 nt, Human
gcauggcugccaaugggagcu

SEQ ID NO: 3308007 - RNA, 19 nt, Human
gcaugugaugagaggaaau

SEQ ID NO: 3308008 - RNA, 18 nt, Human
gcaugugaugagaggaaa

SEQ ID NO: 3308009 - RNA, 21 nt, Human
gcaugugaugagaggaaauca

SEQ ID NO: 3308010 - RNA, 15 nt, Human
gcauugugggaaggg

SEQ ID NO: 3308011 - RNA, 13 nt, Human
gcauugugggaag

SEQ ID NO: 3308012 - RNA, 15 nt, Human
gcauuuacuuugugu

SEQ ID NO: 3308013 - RNA, 22 nt, Human
gcauuuaaaagauacaguuacu

SEQ ID NO: 3308014 - RNA, 18 nt, Human
gcauuuaaaagauacagu

SEQ ID NO: 3308015 - RNA, 15 nt, Human
gcauuuaaaagauac

SEQ ID NO: 3308016 - RNA, 16 nt, Human
gcauugugggaagggg

SEQ ID NO: 3308017 - RNA, 17 nt, Human
gcauuuaaaagauacag

SEQ ID NO: 3308018 - RNA, 16 nt, Human
gcauuuaaaagauaca

SEQ ID NO: 3308019 - RNA, 16 nt, Human
gcagccaggccacaag

SEQ ID NO: 3308020 - RNA, 17 nt, Human
gcacucagaagacacug

SEQ ID NO: 3308021 - RNA, 20 nt, Human
gcacucagaagacacugaug

SEQ ID NO: 3308022 - RNA, 18 nt, Human
gcaagugagagcugggug

SEQ ID NO: 3308023 - RNA, 22 nt, Human
gcacuuuguucuggcucuucca

SEQ ID NO: 3308024 - RNA, 14 nt, Human
gcacuccagccugg

SEQ ID NO: 3308025 - RNA, 14 nt, Human
gcacuccccugcug

SEQ ID NO: 3308026 - RNA, 13 nt, Human
gcacuccccugcu

SEQ ID NO: 3308027 - RNA, 19 nt, Human
gcacuuuguucuggcucuu

SEQ ID NO: 3308028 - RNA, 18 nt, Human
gcacuuuguucuggcucu

SEQ ID NO: 3308029 - RNA, 15 nt, Human
gcacuccccugcugg

SEQ ID NO: 3308030 - RNA, 12 nt, Human
gcacuccccugc

SEQ ID NO: 3308031 - RNA, 16 nt, Human
gcacuuuguucuggcu

SEQ ID NO: 3308032 - RNA, 21 nt, Human
gcagaggaaagcaaaggagau

SEQ ID NO: 3308033 - RNA, 20 nt, Human
gcagaggaaagcaaaggaga

SEQ ID NO: 3308034 - RNA, 18 nt, Human
gcagaggaaagcaaagga

SEQ ID NO: 3308035 - RNA, 14 nt, Human
gcagaggaaagcaa

SEQ ID NO: 3308036 - RNA, 13 nt, Human
gcagaggaaagca

SEQ ID NO: 3308037 - RNA, 23 nt, Human
gcagcauauucaggaagcucagg

SEQ ID NO: 3308038 - RNA, 19 nt, Human
gcagcauauucaggaagcu

SEQ ID NO: 3308039 - RNA, 18 nt, Human
gcagcauauucaggaagc

SEQ ID NO: 3308040 - RNA, 17 nt, Human
gcagcauauucaggaag

SEQ ID NO: 3308041 - RNA, 14 nt, Human
gcagagggcacaga

SEQ ID NO: 3308042 - RNA, 16 nt, Human
gauacaguuacucaga

SEQ ID NO: 3308043 - RNA, 23 nt, Human
gauacaguuacucagaauucucu

SEQ ID NO: 3308044 - RNA, 19 nt, Human
gauacaguuacucagaauu

SEQ ID NO: 3308045 - RNA, 23 nt, Human
gauacaggaaaagcugcugacag

SEQ ID NO: 3308046 - RNA, 17 nt, Human
gauacuguaucaugaca

SEQ ID NO: 3308047 - RNA, 21 nt, Human
gauacuguaucaugacaaaga

SEQ ID NO: 3308048 - RNA, 12 nt, Human
gauccaagcugg

SEQ ID NO: 3308049 - RNA, 16 nt, Human
gauccaagcugguccc

SEQ ID NO: 3308050 - RNA, 17 nt, Human
gauccaagcugguccca

SEQ ID NO: 3308051 - RNA, 19 nt, Human
gauccaagcuggucccacu

SEQ ID NO: 3308052 - RNA, 22 nt, Human
gauccacccaccucagccuccc

SEQ ID NO: 3308053 - RNA, 20 nt, Human
gauccacccaccucagccuc

SEQ ID NO: 3308054 - RNA, 21 nt, Human
gauccacccaccucagccucc

SEQ ID NO: 3308055 - RNA, 21 nt, Human
gauccaagcuggucccacuca

SEQ ID NO: 3308056 - RNA, 18 nt, Human
gauccacccaccucagcc

SEQ ID NO: 3308057 - RNA, 19 nt, Human
gauccacccaccucagccu

SEQ ID NO: 3308058 - RNA, 23 nt, Human
gaucaaaagguuaauaaaguaau

SEQ ID NO: 3308059 - RNA, 20 nt, Human
gaucaaaagguuaauaaagu

SEQ ID NO: 3308060 - RNA, 17 nt, Human
gauauuuuuuucuuuuc

SEQ ID NO: 3308061 - RNA, 13 nt, Human
gaugauccuaggc

SEQ ID NO: 3308062 - RNA, 22 nt, Human
gaugauuggaggggggaggugg

SEQ ID NO: 3308063 - RNA, 20 nt, Human
gaugcuucuucagagacucc

SEQ ID NO: 3308064 - RNA, 17 nt, Human
gaugcuucuucagagac

SEQ ID NO: 3308065 - RNA, 23 nt, Human
gaugcuucucacugccaugccag

SEQ ID NO: 3308066 - RNA, 21 nt, Human
gaugcuucuucagagacuccu

SEQ ID NO: 3308067 - RNA, 15 nt, Human
gaucucuaacuucac

SEQ ID NO: 3308068 - RNA, 19 nt, Human
gaucucuugagccugggag

SEQ ID NO: 3308069 - RNA, 18 nt, Human
gaucucuugagccuggga

SEQ ID NO: 3308070 - RNA, 12 nt, Human
gauucuucugcu

SEQ ID NO: 3308071 - RNA, 13 nt, Human
gauucuucugcuu

SEQ ID NO: 3308072 - RNA, 15 nt, Human
gauucuucugcuuca

SEQ ID NO: 3308073 - RNA, 18 nt, Human
gauuuaacagaaauguac

SEQ ID NO: 3308074 - RNA, 17 nt, Human
gauuuaacagaaaugua

SEQ ID NO: 3308075 - RNA, 16 nt, Human
gauuuaacagaaaugu

SEQ ID NO: 3308076 - RNA, 11 nt, Human
gauuucacucu

SEQ ID NO: 3308077 - RNA, 18 nt, Human
gauuuuuuuuuccuucag

SEQ ID NO: 3308078 - RNA, 17 nt, Human
gauuuuuuuuuccuuca

SEQ ID NO: 3308079 - RNA, 12 nt, Human
gauuucacucuc

SEQ ID NO: 3308080 - RNA, 16 nt, Human
gauuuuuuuuuccuuc

SEQ ID NO: 3308081 - RNA, 17 nt, Human
gcaaaagaugcuucuca

SEQ ID NO: 3308082 - RNA, 22 nt, Human
gcaaaagaugcuucucacugcc

SEQ ID NO: 3308083 - RNA, 14 nt, Human
gcaaaaaggcagga

SEQ ID NO: 3308084 - RNA, 21 nt, Human
gauuuuuuuuuccuucagugc

SEQ ID NO: 3308085 - RNA, 16 nt, Human
gcaagugagagcuggg

SEQ ID NO: 3308086 - RNA, 15 nt, Human
gcaagugagagcugg

SEQ ID NO: 3308087 - RNA, 20 nt, Human
gcaaccuccgccucuugggu

SEQ ID NO: 3308088 - RNA, 14 nt, Human
gcaacccccagccu

SEQ ID NO: 3308089 - RNA, 15 nt, Human
gcaacccccagccug

SEQ ID NO: 3308090 - RNA, 16 nt, Human
gcaacccccagccugc

SEQ ID NO: 3308091 - RNA, 19 nt, Human
gcaaccuccgccucuuggg

SEQ ID NO: 3308092 - RNA, 13 nt, Human
gcaaccaccacca

SEQ ID NO: 3308093 - RNA, 18 nt, Human
gcaaccaccaccaaccac

SEQ ID NO: 3308094 - RNA, 16 nt, Human
gcaaccaccaccaacc

SEQ ID NO: 3308095 - RNA, 16 nt, Human
gcaacaggcugggcuu

SEQ ID NO: 3308096 - RNA, 19 nt, Human
gcaacaggcugggcuucag

SEQ ID NO: 3308097 - RNA, 14 nt, Human
gcaacaggcugggc

SEQ ID NO: 3308098 - RNA, 15 nt, Human
gcaacaggcugggcu

SEQ ID NO: 3308099 - RNA, 13 nt, Human
gcaacaggcuggg

SEQ ID NO: 3308100 - RNA, 15 nt, Human
ggaguggccacagaa

SEQ ID NO: 3308101 - RNA, 22 nt, Human
ggagugggcccaaugcacuuug

SEQ ID NO: 3308102 - RNA, 12 nt, Human
ggagugggccca

SEQ ID NO: 3308103 - RNA, 16 nt, Human
ggaguggccacagaaa

SEQ ID NO: 3308104 - RNA, 12 nt, Human
ggauuuaacaga

SEQ ID NO: 3308105 - RNA, 20 nt, Human
ggauuguccccgacccuugc

SEQ ID NO: 3308106 - RNA, 16 nt, Human
ggauuguccccgaccc

SEQ ID NO: 3308107 - RNA, 17 nt, Human
ggauuuaacagaaaugu

SEQ ID NO: 3308108 - RNA, 16 nt, Human
ggauuuaacagaaaug

SEQ ID NO: 3308109 - RNA, 22 nt, Human
ggauuuaacagaaauguacagc

SEQ ID NO: 3308110 - RNA, 14 nt, Human
ggaugaaaaaauaa

SEQ ID NO: 3308111 - RNA, 13 nt, Human
ggauuguccccga

SEQ ID NO: 3308112 - RNA, 23 nt, Human
ggauccugagccagauuucacuc

SEQ ID NO: 3308113 - RNA, 20 nt, Human
ggauccugagccagauuuca

SEQ ID NO: 3308114 - RNA, 19 nt, Human
ggauccugagccagauuuc

SEQ ID NO: 3308115 - RNA, 18 nt, Human
ggauccugagccagauuu

SEQ ID NO: 3308116 - RNA, 16 nt, Human
ggauccugagccagau

SEQ ID NO: 3308117 - RNA, 15 nt, Human
ggauccugagccaga

SEQ ID NO: 3308118 - RNA, 16 nt, Human
ggaguucaucuugaau

SEQ ID NO: 3308119 - RNA, 13 nt, Human
ggaggggggaggu

SEQ ID NO: 3308120 - RNA, 23 nt, Human
ggaggugggauccuccaggugca

SEQ ID NO: 3308121 - RNA, 22 nt, Human
ggaggugggauccuccaggugc

SEQ ID NO: 3308122 - RNA, 21 nt, Human
ggagggugacgggggugaacu

SEQ ID NO: 3308123 - RNA, 15 nt, Human
ggcaaaaaggcagga

SEQ ID NO: 3308124 - RNA, 18 nt, Human
ggcacaccgggcacucag

SEQ ID NO: 3308125 - RNA, 18 nt, Human
ggcacaucagcacgauuu

SEQ ID NO: 3308126 - RNA, 16 nt, Human
ggcacugcuuccagug

SEQ ID NO: 3308127 - RNA, 18 nt, Human
ggcaggaggaucacuuga

SEQ ID NO: 3308128 - RNA, 16 nt, Human
ggcagccccauucugc

SEQ ID NO: 3308129 - RNA, 20 nt, Human
ggcagccccauucugccugc

SEQ ID NO: 3308130 - RNA, 21 nt, Human
ggcagccccauucugccugcc

SEQ ID NO: 3308131 - RNA, 22 nt, Human
ggcagccccauucugccugccc

SEQ ID NO: 3308132 - RNA, 13 nt, Human
ggcagccaggcca

SEQ ID NO: 3308133 - RNA, 20 nt, Human
ggcacugcuuccagugaggc

SEQ ID NO: 3308134 - RNA, 14 nt, Human
ggcauuugcugaau

SEQ ID NO: 3308135 - RNA, 19 nt, Human
ggccaaaggaagcacaugc

SEQ ID NO: 3308136 - RNA, 16 nt, Human
ggccaaaggaagcaca

SEQ ID NO: 3308137 - RNA, 14 nt, Human
ggccaaaggaagca

SEQ ID NO: 3308138 - RNA, 13 nt, Human
ggccaaaggaagc

SEQ ID NO: 3308139 - RNA, 17 nt, Human
ggcauuuguuugaacug

SEQ ID NO: 3308140 - RNA, 17 nt, Human
ggccagagggagugaca

SEQ ID NO: 3308141 - RNA, 19 nt, Human
ggccagagggagugacaga

SEQ ID NO: 3308142 - RNA, 18 nt, Human
ggccagagacacaagccu

SEQ ID NO: 3308143 - RNA, 17 nt, Human
ggccagagacacaagcc

SEQ ID NO: 3308144 - RNA, 15 nt, Human
ggcucacugcagccu

SEQ ID NO: 3308145 - RNA, 13 nt, Human
ggcucacugcagc

SEQ ID NO: 3308146 - RNA, 14 nt, Human
ggcucacugcagcc

SEQ ID NO: 3308147 - RNA, 13 nt, Human
ggcucccuuccca

SEQ ID NO: 3308148 - RNA, 18 nt, Human
ggcucuuccaggcuggga

SEQ ID NO: 3308149 - RNA, 17 nt, Human
ggcucuuccaggcuggg

SEQ ID NO: 3308150 - RNA, 15 nt, Human
ggcucuuccaggcug

SEQ ID NO: 3308151 - RNA, 14 nt, Human
ggcucuuccaggcu

SEQ ID NO: 3308152 - RNA, 13 nt, Human
aaaaaaacacaaa

SEQ ID NO: 3308153 - RNA, 22 nt, Human
aaaaaacugcugacuguuuucu

SEQ ID NO: 3308154 - RNA, 14 nt, Human
ggcuggguuggagg

SEQ ID NO: 3308155 - RNA, 22 nt, Human
ggcuggguucuacccaggugcu

SEQ ID NO: 3308156 - RNA, 12 nt, Human
aaaaaggcagga

SEQ ID NO: 3308157 - RNA, 21 nt, Human
aaaaaggaugcacagaguugu

SEQ ID NO: 3308158 - RNA, 14 nt, Human
aaaaaggaggaaga

SEQ ID NO: 3308159 - RNA, 13 nt, Human
ggcuggccuggcc

SEQ ID NO: 3308160 - RNA, 14 nt, Human
ggcuggccuggccc

SEQ ID NO: 3308161 - RNA, 16 nt, Human
ggccugcaagggagug

SEQ ID NO: 3308162 - RNA, 12 nt, Human
ggccuggccaga

SEQ ID NO: 3308163 - RNA, 15 nt, Human
ggccuggccagaugc

SEQ ID NO: 3308164 - RNA, 20 nt, Human
ggcuaagugauccucccacc

SEQ ID NO: 3308165 - RNA, 16 nt, Human
ggcuaauguacugcau

SEQ ID NO: 3308166 - RNA, 13 nt, Human
ggcuaccuuugua

SEQ ID NO: 3308167 - RNA, 14 nt, Human
ggcuaccuuuguau

SEQ ID NO: 3308168 - RNA, 23 nt, Human
ggccucccaacucaccccagccc

SEQ ID NO: 3308169 - RNA, 22 nt, Human
ggccucccaacucaccccagcc

SEQ ID NO: 3308170 - RNA, 20 nt, Human
ggccucccaacucaccccag

SEQ ID NO: 3308171 - RNA, 13 nt, Human
ggccucagugcca

SEQ ID NO: 3308172 - RNA, 17 nt, Human
ggccucccaacucaccc

SEQ ID NO: 3308173 - RNA, 19 nt, Human
ggccucccaacucacccca

SEQ ID NO: 3308174 - RNA, 18 nt, Human
ggccucccaacucacccc

SEQ ID NO: 3308175 - RNA, 15 nt, Human
ggccagaugcaccag

SEQ ID NO: 3308176 - RNA, 16 nt, Human
ggccagaugcaccagc

SEQ ID NO: 3308177 - RNA, 17 nt, Human
gggcuggguucuaccca

SEQ ID NO: 3308178 - RNA, 21 nt, Human
gggcugcaccggcuggccugg

SEQ ID NO: 3308179 - RNA, 20 nt, Human
gggcugcaccggcuggccug

SEQ ID NO: 3308180 - RNA, 15 nt, Human
gggcugggcagagga

SEQ ID NO: 3308181 - RNA, 12 nt, Human
gggcugggcaga

SEQ ID NO: 3308182 - RNA, 19 nt, Human
gggcugcaccggcuggccu

SEQ ID NO: 3308183 - RNA, 17 nt, Human
gggcugcaccggcuggc

SEQ ID NO: 3308184 - RNA, 13 nt, Human
gggcuccagacac

SEQ ID NO: 3308185 - RNA, 10 nt, Human
gggcuccaga

SEQ ID NO: 3308186 - RNA, 21 nt, Human
gggcucagcggggacagcucc

SEQ ID NO: 3308187 - RNA, 22 nt, Human
gggcucagcaaaagaugcuucu

SEQ ID NO: 3308188 - RNA, 18 nt, Human
gggcucagcaaaagaugc

SEQ ID NO: 3308189 - RNA, 15 nt, Human
gggcuaguugggcuu

SEQ ID NO: 3308190 - RNA, 17 nt, Human
gggcucagcggggacag

SEQ ID NO: 3308191 - RNA, 19 nt, Human
gggcucagcggggacagcu

SEQ ID NO: 3308192 - RNA, 14 nt, Human
gggccaggagccuc

SEQ ID NO: 3308193 - RNA, 13 nt, Human
gggccaggagccu

SEQ ID NO: 3308194 - RNA, 12 nt, Human
gggccaggagcc

SEQ ID NO: 3308195 - RNA, 21 nt, Human
gggcggugagaggggaacaga

SEQ ID NO: 3308196 - RNA, 18 nt, Human
gggccucuuaugggcugg

SEQ ID NO: 3308197 - RNA, 22 nt, Human
gggccucgguguggagaagcgg

SEQ ID NO: 3308198 - RNA, 13 nt, Human
gggccucagugcc

SEQ ID NO: 3308199 - RNA, 14 nt, Human
gggccucagugcca

SEQ ID NO: 3308200 - RNA, 16 nt, Human
aaaauauuuuccugcc

SEQ ID NO: 3308201 - RNA, 13 nt, Human
aaaauaccaagga

SEQ ID NO: 3308202 - RNA, 22 nt, Human
aaaaggagccaauuuaaagaaa

SEQ ID NO: 3308203 - RNA, 13 nt, Human
aaaaggaugcaca

SEQ ID NO: 3308204 - RNA, 22 nt, Human
aaaaggaugcacagaguuguua

SEQ ID NO: 3308205 - RNA, 19 nt, Human
aaaaggaugcacagaguug

SEQ ID NO: 3308206 - RNA, 15 nt, Human
aaaaggaugcacaga

SEQ ID NO: 3308207 - RNA, 14 nt, Human
aaaaggaugcacag

SEQ ID NO: 3308208 - RNA, 19 nt, Human
aaaagguaugcaaucaaau

SEQ ID NO: 3308209 - RNA, 11 nt, Human
aaaaggcagga

SEQ ID NO: 3308210 - RNA, 17 nt, Human
aaaagguuaauaaagua

SEQ ID NO: 3308211 - RNA, 16 nt, Human
aaaagguuaauaaagu

SEQ ID NO: 3308212 - RNA, 20 nt, Human
gggucacucuggcagcucag

SEQ ID NO: 3308213 - RNA, 14 nt, Human
gggucacucuggca

SEQ ID NO: 3308214 - RNA, 19 nt, Human
aaacauuuugucauauaag

SEQ ID NO: 3308215 - RNA, 22 nt, Human
aaaccugugucucugagaguag

SEQ ID NO: 3308216 - RNA, 11 nt, Human
gggggcuggga

SEQ ID NO: 3308217 - RNA, 17 nt, Human
gggggaucacagccucu

SEQ ID NO: 3308218 - RNA, 21 nt, Human
ggggucacucuggcagcucag

SEQ ID NO: 3308219 - RNA, 13 nt, Human
ggggguggccucc

SEQ ID NO: 3308220 - RNA, 15 nt, Human
gggggcugggcagag

SEQ ID NO: 3308221 - RNA, 13 nt, Human
ggggaccagagcu

SEQ ID NO: 3308222 - RNA, 12 nt, Human
ggggaccagagc

SEQ ID NO: 3308223 - RNA, 18 nt, Human
aaaauguauguguaagua

SEQ ID NO: 3308224 - RNA, 14 nt, Human
ggggaccagagcug

SEQ ID NO: 3308225 - RNA, 19 nt, Human
ggggccaguuggucccccu

SEQ ID NO: 3308226 - RNA, 20 nt, Human
gguaaggaauaccugucccc

SEQ ID NO: 3308227 - RNA, 20 nt, Human
gguaggguaagugagagagg

SEQ ID NO: 3308228 - RNA, 14 nt, Human
gguaucaggugcug

SEQ ID NO: 3308229 - RNA, 18 nt, Human
aaacuuuacuauggcccu

SEQ ID NO: 3308230 - RNA, 22 nt, Human
aaacuugauguguuaucucuua

SEQ ID NO: 3308231 - RNA, 19 nt, Human
gguaucaggugcugccauc

SEQ ID NO: 3308232 - RNA, 12 nt, Human
ggguggugaccu

SEQ ID NO: 3308233 - RNA, 20 nt, Human
ggguuuugccauguuggcca

SEQ ID NO: 3308234 - RNA, 23 nt, Human
ggguuuugccauguuggccaggc

SEQ ID NO: 3308235 - RNA, 18 nt, Human
gguaacuagggaagauaa

SEQ ID NO: 3308236 - RNA, 21 nt, Human
aaacguggcugcuucaaggau

SEQ ID NO: 3308237 - RNA, 20 nt, Human
aaacguggcugcuucaagga

SEQ ID NO: 3308238 - RNA, 19 nt, Human
aaacuguuaauaguucagg

SEQ ID NO: 3308239 - RNA, 14 nt, Human
ggguggccucccaa

SEQ ID NO: 3308240 - RNA, 18 nt, Human
gggugggacacccuguga

SEQ ID NO: 3308241 - RNA, 15 nt, Human
gggugggacacccug

SEQ ID NO: 3308242 - RNA, 19 nt, Human
aaacuuaaucuaaauggaa

SEQ ID NO: 3308243 - RNA, 21 nt, Human
ggugcugccauccagguucag

SEQ ID NO: 3308244 - RNA, 20 nt, Human
gguggcaccagcagccugga

SEQ ID NO: 3308245 - RNA, 14 nt, Human
gguggcaccagcag

SEQ ID NO: 3308246 - RNA, 14 nt, Human
aaagcuaggccugg

SEQ ID NO: 3308247 - RNA, 16 nt, Human
aaagcuaggccuggcc

SEQ ID NO: 3308248 - RNA, 13 nt, Human
aaagcagugcaug

SEQ ID NO: 3308249 - RNA, 13 nt, Human
aaagcugccagcc

SEQ ID NO: 3308250 - RNA, 12 nt, Human
aaagcugccagc

SEQ ID NO: 3308251 - RNA, 20 nt, Human
aaagggcccagagagggugg

SEQ ID NO: 3308252 - RNA, 19 nt, Human
gguggggaccucaggccug

SEQ ID NO: 3308253 - RNA, 16 nt, Human
ggugggacacccugug

SEQ ID NO: 3308254 - RNA, 13 nt, Human
ggugggacacccu

SEQ ID NO: 3308255 - RNA, 17 nt, Human
ggugggacacccuguga

SEQ ID NO: 3308256 - RNA, 18 nt, Human
gguggcuggguuggaggg

SEQ ID NO: 3308257 - RNA, 12 nt, Human
gguggcuggguu

SEQ ID NO: 3308258 - RNA, 20 nt, Human
gguuuguaaauuaacuuuua

SEQ ID NO: 3308259 - RNA, 15 nt, Human
gguuucagaaaugug

SEQ ID NO: 3308260 - RNA, 16 nt, Human
gguuucuaaagcugcc

SEQ ID NO: 3308261 - RNA, 22 nt, Human
gguuucuaaagcugccagccga

SEQ ID NO: 3308262 - RNA, 18 nt, Human
aaaguaucccuacuguaa

SEQ ID NO: 3308263 - RNA, 21 nt, Human
aaaguguauuuuuuuacuaau

SEQ ID NO: 3308264 - RNA, 14 nt, Human
aaaguguauuuuuu

SEQ ID NO: 3308265 - RNA, 21 nt, Human
aaaguaucccuacuguaauuu

SEQ ID NO: 3308266 - RNA, 20 nt, Human
aaaguagaagucuuagaugu

SEQ ID NO: 3308267 - RNA, 22 nt, Human
aaaguagaagucuuagauguau

SEQ ID NO: 3308268 - RNA, 18 nt, Human
aaaguacacuguuucaaa

SEQ ID NO: 3308269 - RNA, 23 nt, Human
aaaguacuucuccacccugcucu

SEQ ID NO: 3308270 - RNA, 19 nt, Human
aaaguacacuguuucaaac

SEQ ID NO: 3308271 - RNA, 12 nt, Human
gguguggagaag

SEQ ID NO: 3308272 - RNA, 23 nt, Human
gguguggagaagcggcuggcagc

SEQ ID NO: 3308273 - RNA, 14 nt, Human
gguguggagaagcg

SEQ ID NO: 3308274 - RNA, 13 nt, Human
ggugggggccucg

SEQ ID NO: 3308275 - RNA, 13 nt, Human
ggugugggggaag

SEQ ID NO: 3308276 - RNA, 11 nt, Human
gguguggggga

SEQ ID NO: 3308277 - RNA, 22 nt, Human
gguucccuuugacgccauccca

SEQ ID NO: 3308278 - RNA, 23 nt, Human
gguucccuuugacgccaucccag

SEQ ID NO: 3308279 - RNA, 22 nt, Human
gguucccuuuuuuggcugcuga

SEQ ID NO: 3308280 - RNA, 19 nt, Human
gguguuuccuggcacugcu

SEQ ID NO: 3308281 - RNA, 17 nt, Human
gguguuuccuggcacug

SEQ ID NO: 3308282 - RNA, 17 nt, Human
gguucccauuugcuccu

SEQ ID NO: 3308283 - RNA, 23 nt, Human
guaauccuagcacuuugggaggc

SEQ ID NO: 3308284 - RNA, 20 nt, Human
guaauuugugauacaaugcu

SEQ ID NO: 3308285 - RNA, 17 nt, Human
guaauuugugauacaau

SEQ ID NO: 3308286 - RNA, 15 nt, Human
guaauuugugauaca

SEQ ID NO: 3308287 - RNA, 21 nt, Human
guaauuuuuuuaucgucacug

SEQ ID NO: 3308288 - RNA, 19 nt, Human
guaacaggaaaauuuuaaa

SEQ ID NO: 3308289 - RNA, 16 nt, Human
guaacaagccacccca

SEQ ID NO: 3308290 - RNA, 22 nt, Human
aaauaaugugaaacuggauuaa

SEQ ID NO: 3308291 - RNA, 14 nt, Human
aaauaaugugaaac

SEQ ID NO: 3308292 - RNA, 22 nt, Human
aaaguguauuuuuuuacuaaua

SEQ ID NO: 3308293 - RNA, 18 nt, Human
aaaucagccugcuccagc

SEQ ID NO: 3308294 - RNA, 23 nt, Human
aaaucagccugcuccagcuguuc

SEQ ID NO: 3308295 - RNA, 21 nt, Human
aaaucagccugcuccagcugu

SEQ ID NO: 3308296 - RNA, 19 nt, Human
aaaucagccugcuccagcu

SEQ ID NO: 3308297 - RNA, 12 nt, Human
aaauaucugaaa

SEQ ID NO: 3308298 - RNA, 14 nt, Human
aaauaucugaaaau

SEQ ID NO: 3308299 - RNA, 17 nt, Human
aaauaucugaaaaugua

SEQ ID NO: 3308300 - RNA, 18 nt, Human
aaauaucugaaaauguau

SEQ ID NO: 3308301 - RNA, 19 nt, Human
aaauaucugaaaauguaug

SEQ ID NO: 3308302 - RNA, 21 nt, Human
aaauaucugaaaauguaugug

SEQ ID NO: 3308303 - RNA, 22 nt, Human
aaauaucugaaaauguaugugu

SEQ ID NO: 3308304 - RNA, 23 nt, Human
aaauaucugaaaauguaugugua

SEQ ID NO: 3308305 - RNA, 18 nt, Human
aaauaccagccaguaaau

SEQ ID NO: 3308306 - RNA, 21 nt, Human
aaauaccagccaguaaauggg

SEQ ID NO: 3308307 - RNA, 20 nt, Human
aaauaccagccaguaaaugg

SEQ ID NO: 3308308 - RNA, 16 nt, Human
guacacacacauacac

SEQ ID NO: 3308309 - RNA, 19 nt, Human
aaauaccagccaguaaaug

SEQ ID NO: 3308310 - RNA, 15 nt, Human
aaauauaggaacuua

SEQ ID NO: 3308311 - RNA, 20 nt, Human
gcucagggccuggcucaggu

SEQ ID NO: 3308312 - RNA, 17 nt, Human
gcucagggccuggcuca

SEQ ID NO: 3308313 - RNA, 13 nt, Human
gcucaggaguuug

SEQ ID NO: 3308314 - RNA, 19 nt, Human
gcucagggccuggcucagg

SEQ ID NO: 3308315 - RNA, 18 nt, Human
gcucagggccuggcucag

SEQ ID NO: 3308316 - RNA, 22 nt, Human
gcucagagagggugggaguggg

SEQ ID NO: 3308317 - RNA, 20 nt, Human
gcuaggaccccuccaugugg

SEQ ID NO: 3308318 - RNA, 22 nt, Human
gcuagugugguguuuccuggca

SEQ ID NO: 3308319 - RNA, 14 nt, Human
gcuaguugggcuuc

SEQ ID NO: 3308320 - RNA, 16 nt, Human
gcuaguugggcuuccu

SEQ ID NO: 3308321 - RNA, 18 nt, Human
gcuaagugauccucccac

SEQ ID NO: 3308322 - RNA, 22 nt, Human
gcuaagugauccucccaccuca

SEQ ID NO: 3308323 - RNA, 16 nt, Human
gcggccuuuggcuuca

SEQ ID NO: 3308324 - RNA, 15 nt, Human
gcggcuggcagccca

SEQ ID NO: 3308325 - RNA, 21 nt, Human
gcgcagcauauucaggaagcu

SEQ ID NO: 3308326 - RNA, 20 nt, Human
gcgcagcauauucaggaagc

SEQ ID NO: 3308327 - RNA, 23 nt, Human
gcgauucuucugcuucagccucc

SEQ ID NO: 3308328 - RNA, 23 nt, Human
gccuugaccauucuccaccugcc

SEQ ID NO: 3308329 - RNA, 22 nt, Human
gcgauucuucugcuucagccuc

SEQ ID NO: 3308330 - RNA, 17 nt, Human
gcgauucuucugcuuca

SEQ ID NO: 3308331 - RNA, 22 nt, Human
gccuugaccauucuccaccugc

SEQ ID NO: 3308332 - RNA, 21 nt, Human
gccuugaccauucuccaccug

SEQ ID NO: 3308333 - RNA, 23 nt, Human
gccuugaacuuugaccucugcag

SEQ ID NO: 3308334 - RNA, 15 nt, Human
gccuucucugaagga

SEQ ID NO: 3308335 - RNA, 16 nt, Human
gccuucucugaaggac

SEQ ID NO: 3308336 - RNA, 15 nt, Human
gccuguucagcucca

SEQ ID NO: 3308337 - RNA, 14 nt, Human
gccuguucagcucc

SEQ ID NO: 3308338 - RNA, 16 nt, Human
gccuguucagcuccag

SEQ ID NO: 3308339 - RNA, 14 nt, Human
gccuugaacuuuga

SEQ ID NO: 3308340 - RNA, 21 nt, Human
gccugggaucccucauccuca

SEQ ID NO: 3308341 - RNA, 23 nt, Human
gccugggaucccucauccucaua

SEQ ID NO: 3308342 - RNA, 19 nt, Human
gccugugccucugggacug

SEQ ID NO: 3308343 - RNA, 18 nt, Human
gcccaggccccugccacc

SEQ ID NO: 3308344 - RNA, 20 nt, Human
gcccaggccccugccacccu

SEQ ID NO: 3308345 - RNA, 21 nt, Human
gcccaggccccugccacccug

SEQ ID NO: 3308346 - RNA, 11 nt, Human
gcccaggcccc

SEQ ID NO: 3308347 - RNA, 12 nt, Human
gcccaggccccu

SEQ ID NO: 3308348 - RNA, 16 nt, Human
gcccaggcaggucuug

SEQ ID NO: 3308349 - RNA, 11 nt, Human
gcccaggcagg

SEQ ID NO: 3308350 - RNA, 18 nt, Human
gcauuuacuuuguguuca

SEQ ID NO: 3308351 - RNA, 21 nt, Human
gcccacgcccccacuggugac

SEQ ID NO: 3308352 - RNA, 17 nt, Human
gcccacgcccccacugg

SEQ ID NO: 3308353 - RNA, 16 nt, Human
gcccacgcccccacug

SEQ ID NO: 3308354 - RNA, 15 nt, Human
gcccacgcccccacu

SEQ ID NO: 3308355 - RNA, 13 nt, Human
gcccacuucugcc

SEQ ID NO: 3308356 - RNA, 23 nt, Human
gcccaggaaaggcuccaggagca

SEQ ID NO: 3308357 - RNA, 22 nt, Human
gcccaggaaaggcuccaggagc

SEQ ID NO: 3308358 - RNA, 21 nt, Human
gcccaggaaaggcuccaggag

SEQ ID NO: 3308359 - RNA, 24 nt, Human
gcccaggaaaggcuccaggagcag

SEQ ID NO: 3308360 - RNA, 23 nt, Human
gcccacgcuggagugcagugagc

SEQ ID NO: 3308361 - RNA, 19 nt, Human
gcccacgcuggagugcagu

SEQ ID NO: 3308362 - RNA, 21 nt, Human
gcccacgcuggagugcaguga

SEQ ID NO: 3308363 - RNA, 19 nt, Human
gccccaaaacucuccucug

SEQ ID NO: 3308364 - RNA, 21 nt, Human
gccccaaaacucuccucugcu

SEQ ID NO: 3308365 - RNA, 20 nt, Human
gccccaaaacucuccucugc

SEQ ID NO: 3308366 - RNA, 12 nt, Human
gcccccacuggu

SEQ ID NO: 3308367 - RNA, 12 nt, Human
gccccugcuggu

SEQ ID NO: 3308368 - RNA, 15 nt, Human
gccccugcugguuca

SEQ ID NO: 3308369 - RNA, 16 nt, Human
gccccugcugguucag

SEQ ID NO: 3308370 - RNA, 15 nt, Human
gccccuggcagcccc

SEQ ID NO: 3308371 - RNA, 12 nt, Human
gccccuggcagc

SEQ ID NO: 3308372 - RNA, 14 nt, Human
gccucugggacugg

SEQ ID NO: 3308373 - RNA, 16 nt, Human
gccucgaacuggcugc

SEQ ID NO: 3308374 - RNA, 13 nt, Human
gccucgaacuggc

SEQ ID NO: 3308375 - RNA, 22 nt, Human
gccuccuuugugaggaagccgc

SEQ ID NO: 3308376 - RNA, 12 nt, Human
gccuagcauacg

SEQ ID NO: 3308377 - RNA, 17 nt, Human
gccuacaggagugagca

SEQ ID NO: 3308378 - RNA, 16 nt, Human
gccccuggcagccccu

SEQ ID NO: 3308379 - RNA, 14 nt, Human
gcccugcccaccug

SEQ ID NO: 3308380 - RNA, 23 nt, Human
gcccuuaccugccaggaagccag

SEQ ID NO: 3308381 - RNA, 22 nt, Human
gcccuuaccugccaggaagcca

SEQ ID NO: 3308382 - RNA, 21 nt, Human
gcccuuaccugccaggaagcc

SEQ ID NO: 3308383 - RNA, 17 nt, Human
gcccugugggcccccaa

SEQ ID NO: 3308384 - RNA, 16 nt, Human
gcccugugggccccca

SEQ ID NO: 3308385 - RNA, 16 nt, Human
gccuacaggagugagc

SEQ ID NO: 3308386 - RNA, 23 nt, Human
ggaaaucaccgaaaacguggcug

SEQ ID NO: 3308387 - RNA, 21 nt, Human
ggaagccagcaggcucucagg

SEQ ID NO: 3308388 - RNA, 23 nt, Human
ggaagccagcaggcucucaggcc

SEQ ID NO: 3308389 - RNA, 22 nt, Human
ggaagccagcaggcucucaggc

SEQ ID NO: 3308390 - RNA, 15 nt, Human
ggaagccgcuggggc

SEQ ID NO: 3308391 - RNA, 18 nt, Human
ggaagccgcuggggccag

SEQ ID NO: 3308392 - RNA, 13 nt, Human
ggacauggacaag

SEQ ID NO: 3308393 - RNA, 23 nt, Human
ggacacccugugauggggcccug

SEQ ID NO: 3308394 - RNA, 13 nt, Human
ggacacccuguga

SEQ ID NO: 3308395 - RNA, 23 nt, Human
ggacaggcauguucucugaggac

SEQ ID NO: 3308396 - RNA, 17 nt, Human
ggacagggaggugaccc

SEQ ID NO: 3308397 - RNA, 12 nt, Human
ggacacccugug

SEQ ID NO: 3308398 - RNA, 13 nt, Human
ggacacagcucuu

SEQ ID NO: 3308399 - RNA, 21 nt, Human
ggacacagcucuucuccaggc

SEQ ID NO: 3308400 - RNA, 12 nt, Human
ggacacagcucu

SEQ ID NO: 3308401 - RNA, 19 nt, Human
ggaaugaaugucaguguga

SEQ ID NO: 3308402 - RNA, 16 nt, Human
ggaauauauaaccagu

SEQ ID NO: 3308403 - RNA, 19 nt, Human
ggaauaccugucccccuga

SEQ ID NO: 3308404 - RNA, 16 nt, Human
ggaauaccuguccccc

SEQ ID NO: 3308405 - RNA, 15 nt, Human
ggaagcucagggccu

SEQ ID NO: 3308406 - RNA, 15 nt, Human
ggaauaccugucccc

SEQ ID NO: 3308407 - RNA, 21 nt, Human
ggaagcucagggccuggcuca

SEQ ID NO: 3308408 - RNA, 17 nt, Human
ggaagcucagggccugg

SEQ ID NO: 3308409 - RNA, 16 nt, Human
ggaagcucagggccug

SEQ ID NO: 3308410 - RNA, 19 nt, Human
gcuugggcuucauccuccu

SEQ ID NO: 3308411 - RNA, 22 nt, Human
gcuuggggaccagagcugccac

SEQ ID NO: 3308412 - RNA, 21 nt, Human
gcuuggggaccagagcugcca

SEQ ID NO: 3308413 - RNA, 20 nt, Human
gcuuggggaccagagcugcc

SEQ ID NO: 3308414 - RNA, 18 nt, Human
gcuuggggaccagagcug

SEQ ID NO: 3308415 - RNA, 17 nt, Human
gcuuggggaccagagcu

SEQ ID NO: 3308416 - RNA, 13 nt, Human
gcuuucuacccag

SEQ ID NO: 3308417 - RNA, 19 nt, Human
gcuuucuacccagcgagcc

SEQ ID NO: 3308418 - RNA, 22 nt, Human
gcuuucuacccagcgagcccug

SEQ ID NO: 3308419 - RNA, 16 nt, Human
gcuuggggaccagagc

SEQ ID NO: 3308420 - RNA, 23 nt, Human
gcuugggcuucauccuccucaga

SEQ ID NO: 3308421 - RNA, 19 nt, Human
gcuugaccgugaggccaga

SEQ ID NO: 3308422 - RNA, 18 nt, Human
gcuugaccgugaggccag

SEQ ID NO: 3308423 - RNA, 17 nt, Human
gcuugaccgugaggcca

SEQ ID NO: 3308424 - RNA, 16 nt, Human
gcuugaccgugaggcc

SEQ ID NO: 3308425 - RNA, 21 nt, Human
gcuucuucagagacuccugca

SEQ ID NO: 3308426 - RNA, 19 nt, Human
gcuucuucagagacuccug

SEQ ID NO: 3308427 - RNA, 14 nt, Human
gcuuaacuucacau

SEQ ID NO: 3308428 - RNA, 17 nt, Human
gcuuaacuucacauauu

SEQ ID NO: 3308429 - RNA, 16 nt, Human
gcuucuucagagacuc

SEQ ID NO: 3308430 - RNA, 16 nt, Human
gcuuaacuucacauau

SEQ ID NO: 3308431 - RNA, 20 nt, Human
ggaaacagcuaaugggacac

SEQ ID NO: 3308432 - RNA, 15 nt, Human
ggaaacccagcucug

SEQ ID NO: 3308433 - RNA, 15 nt, Human
gcuuuuuaauauuga

SEQ ID NO: 3308434 - RNA, 12 nt, Human
gcuuuugugcau

SEQ ID NO: 3308435 - RNA, 19 nt, Human
gcuuuugugcauuaucuag

SEQ ID NO: 3308436 - RNA, 13 nt, Human
gcuuuugugcauu

SEQ ID NO: 3308437 - RNA, 14 nt, Human
ggaaagaggcucug

SEQ ID NO: 3308438 - RNA, 20 nt, Human
ggaaagacuuuuccaacccu

SEQ ID NO: 3308439 - RNA, 17 nt, Human
ggaaagaguaggaagac

SEQ ID NO: 3308440 - RNA, 16 nt, Human
ggaaagaguaggaaga

SEQ ID NO: 3308441 - RNA, 19 nt, Human
ggaaagcaaaggagauugg

SEQ ID NO: 3308442 - RNA, 23 nt, Human
gcugcaaaggguaucaggugcug

SEQ ID NO: 3308443 - RNA, 13 nt, Human
gcugcaccggcug

SEQ ID NO: 3308444 - RNA, 19 nt, Human
gcugcacccucaggcaggu

SEQ ID NO: 3308445 - RNA, 18 nt, Human
gcugcacccucaggcagg

SEQ ID NO: 3308446 - RNA, 16 nt, Human
gcugcacccucaggca

SEQ ID NO: 3308447 - RNA, 20 nt, Human
gcugccugggaucccucauc

SEQ ID NO: 3308448 - RNA, 16 nt, Human
gcugccucucccauca

SEQ ID NO: 3308449 - RNA, 21 nt, Human
gcugccugggaucccucaucc

SEQ ID NO: 3308450 - RNA, 12 nt, Human
gcugccuguuca

SEQ ID NO: 3308451 - RNA, 13 nt, Human
gcugccuguucag

SEQ ID NO: 3308452 - RNA, 17 nt, Human
gcugccuguucagcucc

SEQ ID NO: 3308453 - RNA, 19 nt, Human
gcugccccuggcagccccu

SEQ ID NO: 3308454 - RNA, 18 nt, Human
gcugccccuggcagcccc

SEQ ID NO: 3308455 - RNA, 20 nt, Human
gcugccccuggcagccccug

SEQ ID NO: 3308456 - RNA, 17 nt, Human
gcugccccuggcagccc

SEQ ID NO: 3308457 - RNA, 14 nt, Human
gcugaggugggagg

SEQ ID NO: 3308458 - RNA, 23 nt, Human
gcugagggugagugggugaauaa

SEQ ID NO: 3308459 - RNA, 18 nt, Human
gcugagggugagugggug

SEQ ID NO: 3308460 - RNA, 21 nt, Human
gcuggguucuacccaggugcu

SEQ ID NO: 3308461 - RNA, 20 nt, Human
gcuggguucuacccaggugc

SEQ ID NO: 3308462 - RNA, 17 nt, Human
gcuggguucuacccagg

SEQ ID NO: 3308463 - RNA, 18 nt, Human
gcuggguucuacccaggu

SEQ ID NO: 3308464 - RNA, 22 nt, Human
gcugggguggggaccucaggcc

SEQ ID NO: 3308465 - RNA, 14 nt, Human
gcugggcagguugg

SEQ ID NO: 3308466 - RNA, 17 nt, Human
gcuggcuguuggcuggg

SEQ ID NO: 3308467 - RNA, 20 nt, Human
gcuggcuguuggcugggggc

SEQ ID NO: 3308468 - RNA, 23 nt, Human
gcuggcuguuggcugggggccuc

SEQ ID NO: 3308469 - RNA, 19 nt, Human
gcugggguggggaccucag

SEQ ID NO: 3308470 - RNA, 17 nt, Human
gcugggguggggaccuc

SEQ ID NO: 3308471 - RNA, 14 nt, Human
gcuggcgugcagug

SEQ ID NO: 3308472 - RNA, 15 nt, Human
gcuggcgugcagugg

SEQ ID NO: 3308473 - RNA, 18 nt, Human
gcuggcgugcaguggugc

SEQ ID NO: 3308474 - RNA, 18 nt, Human
gcuggcuguuggcugggg

SEQ ID NO: 3308475 - RNA, 19 nt, Human
gcuggcuguuggcuggggg

SEQ ID NO: 3308476 - RNA, 17 nt, Human
gcuguaucccaugagcc

SEQ ID NO: 3308477 - RNA, 13 nt, Human
gcugugcucugga

SEQ ID NO: 3308478 - RNA, 14 nt, Human
gcugugcugcccug

SEQ ID NO: 3308479 - RNA, 15 nt, Human
gcugugcucuggaca

SEQ ID NO: 3308480 - RNA, 16 nt, Human
gcugugcucuggacag

SEQ ID NO: 3308481 - RNA, 14 nt, Human
gcuguuggcugggg

SEQ ID NO: 3308482 - RNA, 16 nt, Human
gcuguuggcugggggc

SEQ ID NO: 3308483 - RNA, 20 nt, Human
gcuguuggcugggggccuca

SEQ ID NO: 3308484 - RNA, 15 nt, Human
gcuguuggcuggggg

SEQ ID NO: 3308485 - RNA, 16 nt, Human
gcugugcugcccugcc

SEQ ID NO: 3308486 - RNA, 15 nt, Human
gcugugcugcccugc

SEQ ID NO: 3308487 - RNA, 16 nt, Human
cuccucugcugcuggc

SEQ ID NO: 3308488 - RNA, 15 nt, Human
cuccucugcugcugg

SEQ ID NO: 3308489 - RNA, 18 nt, Human
cuccucugcugcuggcug

SEQ ID NO: 3308490 - RNA, 16 nt, Human
cuccuggcccacugca

SEQ ID NO: 3308491 - RNA, 22 nt, Human
cucccccagccccauccucugu

SEQ ID NO: 3308492 - RNA, 20 nt, Human
cucccccagccccauccucu

SEQ ID NO: 3308493 - RNA, 15 nt, Human
cucccccagccccau

SEQ ID NO: 3308494 - RNA, 15 nt, Human
cucgaacuggcugca

SEQ ID NO: 3308495 - RNA, 13 nt, Human
cucgaacuggcug

SEQ ID NO: 3308496 - RNA, 14 nt, Human
cucgaacuggcugc

SEQ ID NO: 3308497 - RNA, 19 nt, Human
cuccacuuucuagccagag

SEQ ID NO: 3308498 - RNA, 16 nt, Human
cuccacuuucuagcca

SEQ ID NO: 3308499 - RNA, 16 nt, Human
cuccaagcucccaggc

SEQ ID NO: 3308500 - RNA, 15 nt, Human
cuccaagcucccagg

SEQ ID NO: 3308501 - RNA, 14 nt, Human
cuccaagcucccag

SEQ ID NO: 3308502 - RNA, 13 nt, Human
cuccaagcuccca

SEQ ID NO: 3308503 - RNA, 21 nt, Human
cuccaagaccuucuccuucac

SEQ ID NO: 3308504 - RNA, 22 nt, Human
cuccaagaccuucuccuucacc

SEQ ID NO: 3308505 - RNA, 24 nt, Human
cuccaagcaggacauggacaagga

SEQ ID NO: 3308506 - RNA, 22 nt, Human
cuccaagcaggacauggacaag

SEQ ID NO: 3308507 - RNA, 14 nt, Human
cuccaagcaggaca

SEQ ID NO: 3308508 - RNA, 13 nt, Human
cuccaagcaggac

SEQ ID NO: 3308509 - RNA, 21 nt, Human
cugagaggacuuuucuuugug

SEQ ID NO: 3308510 - RNA, 22 nt, Human
cugagaggacuuuucuuugugg

SEQ ID NO: 3308511 - RNA, 17 nt, Human
cugagaguagagucacu

SEQ ID NO: 3308512 - RNA, 22 nt, Human
cugagacucgcgacaaugcaaa

SEQ ID NO: 3308513 - RNA, 20 nt, Human
cugacccaugcugcccugug

SEQ ID NO: 3308514 - RNA, 22 nt, Human
cugacccaugcugcccugugag

SEQ ID NO: 3308515 - RNA, 21 nt, Human
cugacccaugcugcccuguga

SEQ ID NO: 3308516 - RNA, 20 nt, Human
cugagacucgcgacaaugca

SEQ ID NO: 3308517 - RNA, 21 nt, Human
cugagacucgcgacaaugcaa

SEQ ID NO: 3308518 - RNA, 22 nt, Human
cugagacagcccgggcucugcc

SEQ ID NO: 3308519 - RNA, 23 nt, Human
cugagacagcccgggcucugccu

SEQ ID NO: 3308520 - RNA, 20 nt, Human
cugaguacguugugcauuug

SEQ ID NO: 3308521 - RNA, 19 nt, Human
cugaguacguugugcauuu

SEQ ID NO: 3308522 - RNA, 17 nt, Human
cugaguacguugugcau

SEQ ID NO: 3308523 - RNA, 18 nt, Human
cugaguacguugugcauu

SEQ ID NO: 3308524 - RNA, 21 nt, Human
cugaguacguugugcauuugg

SEQ ID NO: 3308525 - RNA, 23 nt, Human
cugaggacacuaaccacgcugga

SEQ ID NO: 3308526 - RNA, 20 nt, Human
cugaggacacuaaccacgcu

SEQ ID NO: 3308527 - RNA, 17 nt, Human
cugaggaauccagaccc

SEQ ID NO: 3308528 - RNA, 20 nt, Human
cugaggaauccagacccggc

SEQ ID NO: 3308529 - RNA, 14 nt, Human
cugaggaauccaga

SEQ ID NO: 3308530 - RNA, 15 nt, Human
cugagcuuucugcua

SEQ ID NO: 3308531 - RNA, 14 nt, Human
cugagcuuucugcu

SEQ ID NO: 3308532 - RNA, 21 nt, Human
cugagaucaaaacgguuuuac

SEQ ID NO: 3308533 - RNA, 13 nt, Human
cucuuauugccca

SEQ ID NO: 3308534 - RNA, 14 nt, Human
cucuuauugcccac

SEQ ID NO: 3308535 - RNA, 15 nt, Human
cucuuauugcccacg

SEQ ID NO: 3308536 - RNA, 19 nt, Human
cucuuauugcccacgcugg

SEQ ID NO: 3308537 - RNA, 20 nt, Human
cucuuauugcccacgcugga

SEQ ID NO: 3308538 - RNA, 14 nt, Human
cucuucaaucucuu

SEQ ID NO: 3308539 - RNA, 19 nt, Human
cucuucagaucucuaacuu

SEQ ID NO: 3308540 - RNA, 18 nt, Human
cucuucagaucucuaacu

SEQ ID NO: 3308541 - RNA, 13 nt, Human
cucugcugacaga

SEQ ID NO: 3308542 - RNA, 14 nt, Human
cucugcugacagac

SEQ ID NO: 3308543 - RNA, 16 nt, Human
cucugcugacagacac

SEQ ID NO: 3308544 - RNA, 14 nt, Human
cucugguccauaga

SEQ ID NO: 3308545 - RNA, 18 nt, Human
cucugcacuccccugcug

SEQ ID NO: 3308546 - RNA, 20 nt, Human
cucugcacuccccugcuggg

SEQ ID NO: 3308547 - RNA, 21 nt, Human
cucugcacuccccugcugggu

SEQ ID NO: 3308548 - RNA, 13 nt, Human
cucugcuccucuc

SEQ ID NO: 3308549 - RNA, 18 nt, Human
cucugcuccucuccccag

SEQ ID NO: 3308550 - RNA, 23 nt, Human
cugacaacacucauugaccugag

SEQ ID NO: 3308551 - RNA, 22 nt, Human
cugacaacacucauugaccuga

SEQ ID NO: 3308552 - RNA, 21 nt, Human
cugaaggccccgcccaggcuu

SEQ ID NO: 3308553 - RNA, 19 nt, Human
cugaaggccccgcccaggc

SEQ ID NO: 3308554 - RNA, 18 nt, Human
cugaaggccccgcccagg

SEQ ID NO: 3308555 - RNA, 23 nt, Human
cugaaggacauugcggacagcca

SEQ ID NO: 3308556 - RNA, 21 nt, Human
cugaaggacauugcggacagc

SEQ ID NO: 3308557 - RNA, 16 nt, Human
cucuugagccugggag

SEQ ID NO: 3308558 - RNA, 18 nt, Human
cucuugagccuugaacuu

SEQ ID NO: 3308559 - RNA, 17 nt, Human
cucuugagccuugaacu

SEQ ID NO: 3308560 - RNA, 16 nt, Human
cucuugagccuugaac

SEQ ID NO: 3308561 - RNA, 22 nt, Human
cuagaagauuuugaaauuuuua

SEQ ID NO: 3308562 - RNA, 20 nt, Human
cuagcauacguacacauuuu

SEQ ID NO: 3308563 - RNA, 23 nt, Human
cuagcauacguacacauuuuauu

SEQ ID NO: 3308564 - RNA, 21 nt, Human
cuagcauacguacacauuuua

SEQ ID NO: 3308565 - RNA, 17 nt, Human
cuaccuuuguauucucu

SEQ ID NO: 3308566 - RNA, 18 nt, Human
cuacauacaauuccaaac

SEQ ID NO: 3308567 - RNA, 22 nt, Human
cuacaguugaaaaacagcugag

SEQ ID NO: 3308568 - RNA, 18 nt, Human
cuacaguccucccaucuc

SEQ ID NO: 3308569 - RNA, 20 nt, Human
cuacaguccucccaucucac

SEQ ID NO: 3308570 - RNA, 21 nt, Human
cuacaguugaaaaacagcuga

SEQ ID NO: 3308571 - RNA, 19 nt, Human
cuacaguugaaaaacagcu

SEQ ID NO: 3308572 - RNA, 19 nt, Human
cuacaguccucccaucuca

SEQ ID NO: 3308573 - RNA, 23 nt, Human
cuaaguuuuuauggcuuuugugc

SEQ ID NO: 3308574 - RNA, 23 nt, Human
cuaagugauccucccaccucagc

SEQ ID NO: 3308575 - RNA, 21 nt, Human
cuaagugguacuaacuuuccu

SEQ ID NO: 3308576 - RNA, 20 nt, Human
cuaaguuuuuauggcuuuug

SEQ ID NO: 3308577 - RNA, 18 nt, Human
cucaaaagcugggcaggu

SEQ ID NO: 3308578 - RNA, 17 nt, Human
cuaucucccccagcccc

SEQ ID NO: 3308579 - RNA, 16 nt, Human
cuaucucccccagccc

SEQ ID NO: 3308580 - RNA, 20 nt, Human
cucaaacucuugaccucagg

SEQ ID NO: 3308581 - RNA, 13 nt, Human
cucaaugcacuga

SEQ ID NO: 3308582 - RNA, 15 nt, Human
cucaaugcacugaca

SEQ ID NO: 3308583 - RNA, 23 nt, Human
cuaguuguuugauucagacagcu

SEQ ID NO: 3308584 - RNA, 22 nt, Human
cuaguuguuugauucagacagc

SEQ ID NO: 3308585 - RNA, 13 nt, Human
cuaguuugauuaa

SEQ ID NO: 3308586 - RNA, 15 nt, Human
cuagccagaggagag

SEQ ID NO: 3308587 - RNA, 13 nt, Human
cuagccagaggag

SEQ ID NO: 3308588 - RNA, 12 nt, Human
cuagccagagga

SEQ ID NO: 3308589 - RNA, 22 nt, Human
cuaguuugauuaaauucuugca

SEQ ID NO: 3308590 - RNA, 21 nt, Human
cuaguuugauuaaauucuugc

SEQ ID NO: 3308591 - RNA, 14 nt, Human
cuaucucccccagc

SEQ ID NO: 3308592 - RNA, 15 nt, Human
cuaucucccccagcc

SEQ ID NO: 3308593 - RNA, 14 nt, Human
cuaucuaaauguug

SEQ ID NO: 3308594 - RNA, 14 nt, Human
cgccuacaggagug

SEQ ID NO: 3308595 - RNA, 22 nt, Human
cgcaggauucuuccucccuccc

SEQ ID NO: 3308596 - RNA, 16 nt, Human
cgaguagcugggacua

SEQ ID NO: 3308597 - RNA, 14 nt, Human
cgauagugguggug

SEQ ID NO: 3308598 - RNA, 16 nt, Human
ccuugccgucuaccug

SEQ ID NO: 3308599 - RNA, 14 nt, Human
ccuuuaagagaaau

SEQ ID NO: 3308600 - RNA, 18 nt, Human
ccuuucaauaggaaaaac

SEQ ID NO: 3308601 - RNA, 21 nt, Human
ccuuucaauaggaaaaacuga

SEQ ID NO: 3308602 - RNA, 17 nt, Human
ccuuuugagugccuuac

SEQ ID NO: 3308603 - RNA, 15 nt, Human
ccuuuugagugccuu

SEQ ID NO: 3308604 - RNA, 17 nt, Human
cgacugcccggcagggu

SEQ ID NO: 3308605 - RNA, 20 nt, Human
cgacccuugccgucuaccug

SEQ ID NO: 3308606 - RNA, 19 nt, Human
cgacccuugccgucuaccu

SEQ ID NO: 3308607 - RNA, 13 nt, Human
cgacaaugcaaac

SEQ ID NO: 3308608 - RNA, 12 nt, Human
cgacaaugcaaa

SEQ ID NO: 3308609 - RNA, 12 nt, Human
cgggccacagag

SEQ ID NO: 3308610 - RNA, 14 nt, Human
cgggccacagagaa

SEQ ID NO: 3308611 - RNA, 13 nt, Human
cggcuccaggcuc

SEQ ID NO: 3308612 - RNA, 14 nt, Human
cggcuccaggcucc

SEQ ID NO: 3308613 - RNA, 15 nt, Human
cggcuccaggcuccu

SEQ ID NO: 3308614 - RNA, 16 nt, Human
cggcuccaggcuccuu

SEQ ID NO: 3308615 - RNA, 12 nt, Human
cggcuccaggcu

SEQ ID NO: 3308616 - RNA, 14 nt, Human
cggagucccaccuu

SEQ ID NO: 3308617 - RNA, 16 nt, Human
cggcucacugcagccu

SEQ ID NO: 3308618 - RNA, 18 nt, Human
cggagucccaccuuggcu

SEQ ID NO: 3308619 - RNA, 20 nt, Human
cggagucccaccuuggcugc

SEQ ID NO: 3308620 - RNA, 15 nt, Human
cggcucacugcagcc

SEQ ID NO: 3308621 - RNA, 14 nt, Human
cggcucacugcagc

SEQ ID NO: 3308622 - RNA, 15 nt, Human
cggggacagcuccuu

SEQ ID NO: 3308623 - RNA, 13 nt, Human
cgguguggagaag

SEQ ID NO: 3308624 - RNA, 18 nt, Human
cgguguggagaagcggcu

SEQ ID NO: 3308625 - RNA, 14 nt, Human
cggggacagcuccu

SEQ ID NO: 3308626 - RNA, 17 nt, Human
cgggcucugccucccau

SEQ ID NO: 3308627 - RNA, 13 nt, Human
cgggcucugccuc

SEQ ID NO: 3308628 - RNA, 15 nt, Human
cgggcucagcaaaag

SEQ ID NO: 3308629 - RNA, 16 nt, Human
cgggcucugccuccca

SEQ ID NO: 3308630 - RNA, 14 nt, Human
cgggcucugccucc

SEQ ID NO: 3308631 - RNA, 11 nt, Human
cgggcucagca

SEQ ID NO: 3308632 - RNA, 16 nt, Human
cggagucccaccuugg

SEQ ID NO: 3308633 - RNA, 16 nt, Human
cgugaggccagagaca

SEQ ID NO: 3308634 - RNA, 17 nt, Human
cgugaguccuggcaugg

SEQ ID NO: 3308635 - RNA, 16 nt, Human
cgugaguccuggcaug

SEQ ID NO: 3308636 - RNA, 17 nt, Human
cgugaggccagagacac

SEQ ID NO: 3308637 - RNA, 20 nt, Human
cguguaaccauggacccaau

SEQ ID NO: 3308638 - RNA, 16 nt, Human
cgguuuuacugcagcu

SEQ ID NO: 3308639 - RNA, 20 nt, Human
ccugguggcagugggagcug

SEQ ID NO: 3308640 - RNA, 21 nt, Human
ccugguggcagugggagcugc

SEQ ID NO: 3308641 - RNA, 22 nt, Human
ccugucuaaugaaaccuguguc

SEQ ID NO: 3308642 - RNA, 15 nt, Human
ccugucuaaugaaac

SEQ ID NO: 3308643 - RNA, 22 nt, Human
ccuggccucugcacuccccugc

SEQ ID NO: 3308644 - RNA, 21 nt, Human
ccuggccucugcacuccccug

SEQ ID NO: 3308645 - RNA, 20 nt, Human
ccuggccucugcacuccccu

SEQ ID NO: 3308646 - RNA, 16 nt, Human
ccuggccucugcacuc

SEQ ID NO: 3308647 - RNA, 22 nt, Human
ccuggccuagcauacguacaca

SEQ ID NO: 3308648 - RNA, 11 nt, Human
ccucuuucccu

SEQ ID NO: 3308649 - RNA, 18 nt, Human
ccugcacuugcagacucu

SEQ ID NO: 3308650 - RNA, 14 nt, Human
ccugcagagggcac

SEQ ID NO: 3308651 - RNA, 16 nt, Human
ccugcacuugcagacu

SEQ ID NO: 3308652 - RNA, 17 nt, Human
ccugcacuugcagacuc

SEQ ID NO: 3308653 - RNA, 13 nt, Human
ccucuuucccucc

SEQ ID NO: 3308654 - RNA, 20 nt, Human
ccugcugcaguugccaguca

SEQ ID NO: 3308655 - RNA, 16 nt, Human
ccugcugcaguugcca

SEQ ID NO: 3308656 - RNA, 19 nt, Human
ccugccucgaacuggcugc

SEQ ID NO: 3308657 - RNA, 21 nt, Human
ccugccucgaacuggcugcaa

SEQ ID NO: 3308658 - RNA, 23 nt, Human
ccugccucgaacuggcugcaaag

SEQ ID NO: 3308659 - RNA, 19 nt, Human
ccugcugcaguugccaguc

SEQ ID NO: 3308660 - RNA, 17 nt, Human
ccugcugcaguugccag

SEQ ID NO: 3308661 - RNA, 13 nt, Human
ccugcccaccugg

SEQ ID NO: 3308662 - RNA, 20 nt, Human
ccugcccaccuggccucugc

SEQ ID NO: 3308663 - RNA, 14 nt, Human
ccugcccaccuggc

SEQ ID NO: 3308664 - RNA, 12 nt, Human
ccugcccaccug

SEQ ID NO: 3308665 - RNA, 19 nt, Human
ccugcccaccuggccucug

SEQ ID NO: 3308666 - RNA, 13 nt, Human
ccugcccaggccc

SEQ ID NO: 3308667 - RNA, 16 nt, Human
ccucccaucucacaca

SEQ ID NO: 3308668 - RNA, 13 nt, Human
ccucccaucucac

SEQ ID NO: 3308669 - RNA, 15 nt, Human
ccucccaccucagcc

SEQ ID NO: 3308670 - RNA, 14 nt, Human
ccggccccugcugg

SEQ ID NO: 3308671 - RNA, 14 nt, Human
cccuucgcuccugu

SEQ ID NO: 3308672 - RNA, 15 nt, Human
cccuucgcuccugug

SEQ ID NO: 3308673 - RNA, 19 nt, Human
cccuucucuccagccccug

SEQ ID NO: 3308674 - RNA, 21 nt, Human
cccuucucuccagccccugga

SEQ ID NO: 3308675 - RNA, 23 nt, Human
ccgcagcccugcagagggcacag

SEQ ID NO: 3308676 - RNA, 22 nt, Human
cccuucucuccagccccuggau

SEQ ID NO: 3308677 - RNA, 13 nt, Human
ccggccccugcug

SEQ ID NO: 3308678 - RNA, 13 nt, Human
cccugucuaauga

SEQ ID NO: 3308679 - RNA, 16 nt, Human
cccugucuaaugaaac

SEQ ID NO: 3308680 - RNA, 23 nt, Human
cccugucucaaaaaaagaaaaag

SEQ ID NO: 3308681 - RNA, 20 nt, Human
cccugucucaaaaaaagaaa

SEQ ID NO: 3308682 - RNA, 13 nt, Human
cccuucgcuccug

SEQ ID NO: 3308683 - RNA, 19 nt, Human
cccugugauggggcccugc

SEQ ID NO: 3308684 - RNA, 18 nt, Human
cccugugauggggcccug

SEQ ID NO: 3308685 - RNA, 17 nt, Human
cccugugauggggcccu

SEQ ID NO: 3308686 - RNA, 19 nt, Human
ccccuucgcuccugugucu

SEQ ID NO: 3308687 - RNA, 14 nt, Human
ccccuucgcuccug

SEQ ID NO: 3308688 - RNA, 15 nt, Human
ccccuucgcuccugu

SEQ ID NO: 3308689 - RNA, 17 nt, Human
ccccuucgcuccugugu

SEQ ID NO: 3308690 - RNA, 15 nt, Human
ccccauucugccugc

SEQ ID NO: 3308691 - RNA, 13 nt, Human
ccccauucugccu

SEQ ID NO: 3308692 - RNA, 14 nt, Human
ccccauucugccug

SEQ ID NO: 3308693 - RNA, 20 nt, Human
cccucaacucuccuccagag

SEQ ID NO: 3308694 - RNA, 17 nt, Human
ccccuucugacccaugc

SEQ ID NO: 3308695 - RNA, 16 nt, Human
ccccuucugacccaug

SEQ ID NO: 3308696 - RNA, 12 nt, Human
cccggcugcgga

SEQ ID NO: 3308697 - RNA, 14 nt, Human
cccagcccacuucu

SEQ ID NO: 3308698 - RNA, 23 nt, Human
cccaggaaaggcuccaggagcag

SEQ ID NO: 3308699 - RNA, 22 nt, Human
cccaggaaaggcuccaggagca

SEQ ID NO: 3308700 - RNA, 21 nt, Human
cccaggaaaggcuccaggagc

SEQ ID NO: 3308701 - RNA, 21 nt, Human
cccagcugugcucuggacagg

SEQ ID NO: 3308702 - RNA, 23 nt, Human
cccagcugugcucuggacaggca

SEQ ID NO: 3308703 - RNA, 19 nt, Human
cccaggaaaggcuccagga

SEQ ID NO: 3308704 - RNA, 21 nt, Human
cccaggcuggcgugcaguggu

SEQ ID NO: 3308705 - RNA, 15 nt, Human
cccaggcuuagucac

SEQ ID NO: 3308706 - RNA, 21 nt, Human
ccccagauugcaacaggcugg

SEQ ID NO: 3308707 - RNA, 22 nt, Human
ccccagauugcaacaggcuggg

SEQ ID NO: 3308708 - RNA, 23 nt, Human
ccccagauugcaacaggcugggc

SEQ ID NO: 3308709 - RNA, 17 nt, Human
ccccagcaagugagagc

SEQ ID NO: 3308710 - RNA, 19 nt, Human
ccccagcaagugagagcug

SEQ ID NO: 3308711 - RNA, 20 nt, Human
ccccagcaagugagagcugg

SEQ ID NO: 3308712 - RNA, 17 nt, Human
ccccauccucuguacag

SEQ ID NO: 3308713 - RNA, 22 nt, Human
ccccauccucuguacagagccc

SEQ ID NO: 3308714 - RNA, 21 nt, Human
ccccauccucuguacagagcc

SEQ ID NO: 3308715 - RNA, 19 nt, Human
ccccauccucuguacagag

SEQ ID NO: 3308716 - RNA, 20 nt, Human
cccauucugccugcccaggc

SEQ ID NO: 3308717 - RNA, 21 nt, Human
cccauucugccugcccaggcc

SEQ ID NO: 3308718 - RNA, 22 nt, Human
cccauucugccugcccaggccc

SEQ ID NO: 3308719 - RNA, 14 nt, Human
ccaugggccuccug

SEQ ID NO: 3308720 - RNA, 15 nt, Human
ccaugggccuccugu

SEQ ID NO: 3308721 - RNA, 20 nt, Human
ccaucccaaacccuucagug

SEQ ID NO: 3308722 - RNA, 23 nt, Human
ccaucccaaacccuucagugcca

SEQ ID NO: 3308723 - RNA, 12 nt, Human
ccaucccagccc

SEQ ID NO: 3308724 - RNA, 14 nt, Human
ccaugagccucagc

SEQ ID NO: 3308725 - RNA, 18 nt, Human
ccaugagccucagcaucc

SEQ ID NO: 3308726 - RNA, 19 nt, Human
ccaugagccucagcauccu

SEQ ID NO: 3308727 - RNA, 13 nt, Human
ccaugaguccccu

SEQ ID NO: 3308728 - RNA, 13 nt, Human
ccaugggccuccu

SEQ ID NO: 3308729 - RNA, 16 nt, Human
ccaugaguccccuguu

SEQ ID NO: 3308730 - RNA, 15 nt, Human
ccaugaguccccugu

SEQ ID NO: 3308731 - RNA, 14 nt, Human
ccaugaguccccug

SEQ ID NO: 3308732 - RNA, 16 nt, Human
ccauccccuguagagu

SEQ ID NO: 3308733 - RNA, 20 nt, Human
ccaucccugaaggccccgcc

SEQ ID NO: 3308734 - RNA, 13 nt, Human
ccaugagccucag

SEQ ID NO: 3308735 - RNA, 19 nt, Human
ccagcagagcaccuuagac

SEQ ID NO: 3308736 - RNA, 23 nt, Human
ccagcagagcaccuuagacaguc

SEQ ID NO: 3308737 - RNA, 16 nt, Human
ccagcuuaucucaggg

SEQ ID NO: 3308738 - RNA, 20 nt, Human
ccaggaaaggcuccaggagc

SEQ ID NO: 3308739 - RNA, 21 nt, Human
ccaggaaaggcuccaggagca

SEQ ID NO: 3308740 - RNA, 23 nt, Human
ccaggaaaggcuccaggagcagc

SEQ ID NO: 3308741 - RNA, 22 nt, Human
ccaggaaaggcuccaggagcag

SEQ ID NO: 3308742 - RNA, 14 nt, Human
ccagcagccuggac

SEQ ID NO: 3308743 - RNA, 15 nt, Human
ccagcagccuggacc

SEQ ID NO: 3308744 - RNA, 18 nt, Human
ccagccccuggaugcagc

SEQ ID NO: 3308745 - RNA, 19 nt, Human
ccagcagccuggacccugu

SEQ ID NO: 3308746 - RNA, 10 nt, Human
ccagccccuu

SEQ ID NO: 3308747 - RNA, 21 nt, Human
ccagccccuggaugcagccuc

SEQ ID NO: 3308748 - RNA, 14 nt, Human
ccaggcugggagag

SEQ ID NO: 3308749 - RNA, 13 nt, Human
ccaggcugggaga

SEQ ID NO: 3308750 - RNA, 21 nt, Human
ccaggcugggagagccuucca

SEQ ID NO: 3308751 - RNA, 18 nt, Human
ccaggcugggagagccuu

SEQ ID NO: 3308752 - RNA, 17 nt, Human
ccaggcugggagagccu

SEQ ID NO: 3308753 - RNA, 15 nt, Human
ccaggcugggagagc

SEQ ID NO: 3308754 - RNA, 22 nt, Human
ccaggcugggagagccuuccag

SEQ ID NO: 3308755 - RNA, 19 nt, Human
ccaggcuggcgugcagugg

SEQ ID NO: 3308756 - RNA, 19 nt, Human
ccagucaccccggccaccu

SEQ ID NO: 3308757 - RNA, 21 nt, Human
ccagucaccccggccaccugc

SEQ ID NO: 3308758 - RNA, 20 nt, Human
ccagucaccccggccaccug

SEQ ID NO: 3308759 - RNA, 12 nt, Human
ccagucaccccg

SEQ ID NO: 3308760 - RNA, 14 nt, Human
ccaacucaccccag

SEQ ID NO: 3308761 - RNA, 23 nt, Human
ccaaauggaaaugggcagagcag

SEQ ID NO: 3308762 - RNA, 18 nt, Human
ccaacucaccccagcccc

SEQ ID NO: 3308763 - RNA, 17 nt, Human
ccaacucaccccagccc

SEQ ID NO: 3308764 - RNA, 16 nt, Human
ccaacucaccccagcc

SEQ ID NO: 3308765 - RNA, 17 nt, Human
ccaauauuuaccagacc

SEQ ID NO: 3308766 - RNA, 15 nt, Human
ccaaugauggucacc

SEQ ID NO: 3308767 - RNA, 14 nt, Human
ccaaugcacuuugu

SEQ ID NO: 3308768 - RNA, 18 nt, Human
ccaagcucugcuccucuc

SEQ ID NO: 3308769 - RNA, 12 nt, Human
ccaagcucugcu

SEQ ID NO: 3308770 - RNA, 17 nt, Human
ccaagcucugcuccucu

SEQ ID NO: 3308771 - RNA, 14 nt, Human
ccaaugggagcuca

SEQ ID NO: 3308772 - RNA, 17 nt, Human
ccaaugggagcucaugg

SEQ ID NO: 3308773 - RNA, 20 nt, Human
ccaaaacucuccucugcugc

SEQ ID NO: 3308774 - RNA, 21 nt, Human
ccaaaacucuccucugcugcu

SEQ ID NO: 3308775 - RNA, 14 nt, Human
ccaccaucaagcca

SEQ ID NO: 3308776 - RNA, 13 nt, Human
ccaccaucaagcc

SEQ ID NO: 3308777 - RNA, 17 nt, Human
ccaccacacccagccca

SEQ ID NO: 3308778 - RNA, 13 nt, Human
ccacgcccccacu

SEQ ID NO: 3308779 - RNA, 19 nt, Human
ccacgcccccacuggugac

SEQ ID NO: 3308780 - RNA, 18 nt, Human
ccacgcccccacugguga

SEQ ID NO: 3308781 - RNA, 17 nt, Human
ccacgcccccacuggug

SEQ ID NO: 3308782 - RNA, 16 nt, Human
ccacgcccccacuggu

SEQ ID NO: 3308783 - RNA, 19 nt, Human
ccaccgcagacaggaccag

SEQ ID NO: 3308784 - RNA, 22 nt, Human
ccaccgcagacaggaccaggga

SEQ ID NO: 3308785 - RNA, 21 nt, Human
ccaccuuugaagaaguaagga

SEQ ID NO: 3308786 - RNA, 17 nt, Human
ccacucccugcaaccug

SEQ ID NO: 3308787 - RNA, 21 nt, Human
caguggugguuuucuguucuu

SEQ ID NO: 3308788 - RNA, 20 nt, Human
caguggugguuuucuguucu

SEQ ID NO: 3308789 - RNA, 19 nt, Human
caguggugguuuucuguuc

SEQ ID NO: 3308790 - RNA, 22 nt, Human
cauauucaggaagcucagggcc

SEQ ID NO: 3308791 - RNA, 17 nt, Human
cauauucuguuggccag

SEQ ID NO: 3308792 - RNA, 22 nt, Human
cauccuggcacccggccccugc

SEQ ID NO: 3308793 - RNA, 21 nt, Human
cauccccuguagagugggagc

SEQ ID NO: 3308794 - RNA, 12 nt, Human
caucacuucccu

SEQ ID NO: 3308795 - RNA, 14 nt, Human
caucacuucccuac

SEQ ID NO: 3308796 - RNA, 15 nt, Human
cauccuggcacccgg

SEQ ID NO: 3308797 - RNA, 13 nt, Human
caugauguuuucc

SEQ ID NO: 3308798 - RNA, 23 nt, Human
caugcuacacacugcauguuugu

SEQ ID NO: 3308799 - RNA, 20 nt, Human
caugcuacacacugcauguu

SEQ ID NO: 3308800 - RNA, 14 nt, Human
caugcuacacacug

SEQ ID NO: 3308801 - RNA, 20 nt, Human
caugcuccuggcccacugca

SEQ ID NO: 3308802 - RNA, 16 nt, Human
caugggaaugaauguc

SEQ ID NO: 3308803 - RNA, 15 nt, Human
caugggaaugaaugu

SEQ ID NO: 3308804 - RNA, 14 nt, Human
caugggaaugaaug

SEQ ID NO: 3308805 - RNA, 13 nt, Human
cauucuccaccug

SEQ ID NO: 3308806 - RNA, 16 nt, Human
cauucuccaccugcca

SEQ ID NO: 3308807 - RNA, 14 nt, Human
cauucuccaccugc

SEQ ID NO: 3308808 - RNA, 19 nt, Human
cauguuggccaggcugguc

SEQ ID NO: 3308809 - RNA, 16 nt, Human
cauguuggccaggcug

SEQ ID NO: 3308810 - RNA, 14 nt, Human
cauguuggccaggc

SEQ ID NO: 3308811 - RNA, 15 nt, Human
cauguuggccaggcu

SEQ ID NO: 3308812 - RNA, 13 nt, Human
cauguuggccagg

SEQ ID NO: 3308813 - RNA, 23 nt, Human
cagaggggguggccucccaacuc

SEQ ID NO: 3308814 - RNA, 22 nt, Human
cagaggggguggccucccaacu

SEQ ID NO: 3308815 - RNA, 19 nt, Human
cagauucuuuccugaggcu

SEQ ID NO: 3308816 - RNA, 18 nt, Human
cagauucuuuccugaggc

SEQ ID NO: 3308817 - RNA, 17 nt, Human
cagauucuuuccugagg

SEQ ID NO: 3308818 - RNA, 15 nt, Human
cagauucuuuccuga

SEQ ID NO: 3308819 - RNA, 22 nt, Human
cagauucuuuccugaggcuggg

SEQ ID NO: 3308820 - RNA, 20 nt, Human
cagauucuuuccugaggcug

SEQ ID NO: 3308821 - RNA, 19 nt, Human
cagcacgauuucuguuuag

SEQ ID NO: 3308822 - RNA, 18 nt, Human
cagcacgauuucuguuua

SEQ ID NO: 3308823 - RNA, 16 nt, Human
cagcacgauuucuguu

SEQ ID NO: 3308824 - RNA, 20 nt, Human
cagcaucauggagguuugaa

SEQ ID NO: 3308825 - RNA, 17 nt, Human
cagccucugaaaaccaa

SEQ ID NO: 3308826 - RNA, 19 nt, Human
cagccgagauagccaaggc

SEQ ID NO: 3308827 - RNA, 18 nt, Human
cagcggggacagcuccuu

SEQ ID NO: 3308828 - RNA, 19 nt, Human
cagcggggacagcuccuuc

SEQ ID NO: 3308829 - RNA, 21 nt, Human
cagcggggacagcuccuucug

SEQ ID NO: 3308830 - RNA, 19 nt, Human
cagccugcuaauuccccag

SEQ ID NO: 3308831 - RNA, 12 nt, Human
cagccugcucca

SEQ ID NO: 3308832 - RNA, 19 nt, Human
cagcugagggugagugggu

SEQ ID NO: 3308833 - RNA, 12 nt, Human
cagcugccuggg

SEQ ID NO: 3308834 - RNA, 14 nt, Human
cagcugccugggau

SEQ ID NO: 3308835 - RNA, 13 nt, Human
cagcugccuggga

SEQ ID NO: 3308836 - RNA, 19 nt, Human
cagcugugcucuggacagg

SEQ ID NO: 3308837 - RNA, 20 nt, Human
cagcugugcucuggacaggc

SEQ ID NO: 3308838 - RNA, 24 nt, Human
cagcugugcucuggacaggcaugu

SEQ ID NO: 3308839 - RNA, 19 nt, Human
cagcuguucagcugguuga

SEQ ID NO: 3308840 - RNA, 18 nt, Human
caggaaaagcugcugaca

SEQ ID NO: 3308841 - RNA, 15 nt, Human
caggaaaagcugcug

SEQ ID NO: 3308842 - RNA, 16 nt, Human
caggaaaagcugcuga

SEQ ID NO: 3308843 - RNA, 21 nt, Human
caggugcacaagcuccaagcu

SEQ ID NO: 3308844 - RNA, 21 nt, Human
cagguuggugggggccucggu

SEQ ID NO: 3308845 - RNA, 12 nt, Human
cagguuuuccug

SEQ ID NO: 3308846 - RNA, 16 nt, Human
cagguuuuccugaaga

SEQ ID NO: 3308847 - RNA, 15 nt, Human
caggugcacaagcuc

SEQ ID NO: 3308848 - RNA, 22 nt, Human
caggugauccacccaccucagc

SEQ ID NO: 3308849 - RNA, 23 nt, Human
caggugauccacccaccucagcc

SEQ ID NO: 3308850 - RNA, 20 nt, Human
caggugcacaagcuccaagc

SEQ ID NO: 3308851 - RNA, 19 nt, Human
caggugcacaagcuccaag

SEQ ID NO: 3308852 - RNA, 18 nt, Human
caggugcacaagcuccaa

SEQ ID NO: 3308853 - RNA, 17 nt, Human
caggugcacaagcucca

SEQ ID NO: 3308854 - RNA, 21 nt, Human
caggugauccacccaccucag

SEQ ID NO: 3308855 - RNA, 20 nt, Human
caggugauccacccaccuca

SEQ ID NO: 3308856 - RNA, 14 nt, Human
cagugcaugcuguc

SEQ ID NO: 3308857 - RNA, 13 nt, Human
cagugcaugcugu

SEQ ID NO: 3308858 - RNA, 15 nt, Human
cagucuggaaugcag

SEQ ID NO: 3308859 - RNA, 17 nt, Human
cagucuggaaugcagug

SEQ ID NO: 3308860 - RNA, 13 nt, Human
cagugcccacagg

SEQ ID NO: 3308861 - RNA, 15 nt, Human
cagugcccacaggau

SEQ ID NO: 3308862 - RNA, 17 nt, Human
cagugcaugcugucccu

SEQ ID NO: 3308863 - RNA, 16 nt, Human
cagugcaugcuguccc

SEQ ID NO: 3308864 - RNA, 17 nt, Human
cagugcccacaggauca

SEQ ID NO: 3308865 - RNA, 20 nt, Human
cagugggagcugccuguuca

SEQ ID NO: 3308866 - RNA, 23 nt, Human
cagugggagcugccuguucagcu

SEQ ID NO: 3308867 - RNA, 20 nt, Human
caguggugcgaucuggguuc

SEQ ID NO: 3308868 - RNA, 21 nt, Human
caguggugcgaucuggguuca

SEQ ID NO: 3308869 - RNA, 18 nt, Human
caguggugguuuucuguu

SEQ ID NO: 3308870 - RNA, 20 nt, Human
caggggaaaaucagccugcu

SEQ ID NO: 3308871 - RNA, 17 nt, Human
caggggaaaaucagccu

SEQ ID NO: 3308872 - RNA, 19 nt, Human
caggggaaaaucagccugc

SEQ ID NO: 3308873 - RNA, 21 nt, Human
cagggcucagcggggacagcu

SEQ ID NO: 3308874 - RNA, 23 nt, Human
cagggcucagcggggacagcucc

SEQ ID NO: 3308875 - RNA, 20 nt, Human
cagggcucagcggggacagc

SEQ ID NO: 3308876 - RNA, 21 nt, Human
caggcugggcuucaguggcag

SEQ ID NO: 3308877 - RNA, 22 nt, Human
caggcugggcuucaguggcagc

SEQ ID NO: 3308878 - RNA, 19 nt, Human
caggcugggcuucaguggc

SEQ ID NO: 3308879 - RNA, 20 nt, Human
caggcugggcuucaguggca

SEQ ID NO: 3308880 - RNA, 14 nt, Human
caggcugggagagc

SEQ ID NO: 3308881 - RNA, 12 nt, Human
caggcugggaga

SEQ ID NO: 3308882 - RNA, 21 nt, Human
caggccagcugcuugggcuuc

SEQ ID NO: 3308883 - RNA, 19 nt, Human
caggccagcugcuugggcu

SEQ ID NO: 3308884 - RNA, 17 nt, Human
caggccagcugcuuggg

SEQ ID NO: 3308885 - RNA, 18 nt, Human
caggccaggcccucugcc

SEQ ID NO: 3308886 - RNA, 17 nt, Human
caggccaggcccucugc

SEQ ID NO: 3308887 - RNA, 19 nt, Human
caggccaggcccucugccc

SEQ ID NO: 3308888 - RNA, 18 nt, Human
caggcagauacaggaaaa

SEQ ID NO: 3308889 - RNA, 13 nt, Human
caggccagaggga

SEQ ID NO: 3308890 - RNA, 15 nt, Human
caggccagagggagu

SEQ ID NO: 3308891 - RNA, 16 nt, Human
cacaagacccuugugg

SEQ ID NO: 3308892 - RNA, 14 nt, Human
cacaagacccuugu

SEQ ID NO: 3308893 - RNA, 14 nt, Human
cacaagccuucggc

SEQ ID NO: 3308894 - RNA, 22 nt, Human
caaugcuggcuguuggcugggg

SEQ ID NO: 3308895 - RNA, 23 nt, Human
caaugcuggcuguuggcuggggg

SEQ ID NO: 3308896 - RNA, 22 nt, Human
caaugcugugcccuaaagugua

SEQ ID NO: 3308897 - RNA, 22 nt, Human
cacagcuaacauggaaguacua

SEQ ID NO: 3308898 - RNA, 20 nt, Human
cacagcucuguccugggagu

SEQ ID NO: 3308899 - RNA, 23 nt, Human
cacagcucuguccugggagugag

SEQ ID NO: 3308900 - RNA, 19 nt, Human
cacagcucuguccugggag

SEQ ID NO: 3308901 - RNA, 18 nt, Human
cacagacccugcccugug

SEQ ID NO: 3308902 - RNA, 16 nt, Human
cacagcuaacauggaa

SEQ ID NO: 3308903 - RNA, 15 nt, Human
cacagcuaacaugga

SEQ ID NO: 3308904 - RNA, 19 nt, Human
cacagacccugcccugugg

SEQ ID NO: 3308905 - RNA, 21 nt, Human
cacagacccugcccugugggc

SEQ ID NO: 3308906 - RNA, 20 nt, Human
cacagacccugcccuguggg

SEQ ID NO: 3308907 - RNA, 16 nt, Human
cacaguauuacuucug

SEQ ID NO: 3308908 - RNA, 18 nt, Human
cacaguauuacuucugcu

SEQ ID NO: 3308909 - RNA, 16 nt, Human
cacaucuugcucugcu

SEQ ID NO: 3308910 - RNA, 17 nt, Human
cacaucuugcucugcug

SEQ ID NO: 3308911 - RNA, 22 nt, Human
cacaucagcacgauuucuguuu

SEQ ID NO: 3308912 - RNA, 21 nt, Human
cacaucagcacgauuucuguu

SEQ ID NO: 3308913 - RNA, 20 nt, Human
cacaucagcacgauuucugu

SEQ ID NO: 3308914 - RNA, 19 nt, Human
cacaucagcacgauuucug

SEQ ID NO: 3308915 - RNA, 18 nt, Human
cacaucuugcucugcuga

SEQ ID NO: 3308916 - RNA, 21 nt, Human
cacauuuuauuuuauuaugca

SEQ ID NO: 3308917 - RNA, 15 nt, Human
cacauuuuauuuuau

SEQ ID NO: 3308918 - RNA, 17 nt, Human
caccaacauacucccau

SEQ ID NO: 3308919 - RNA, 21 nt, Human
caccaacauacucccaucugu

SEQ ID NO: 3308920 - RNA, 20 nt, Human
caccaacauacucccaucug

SEQ ID NO: 3308921 - RNA, 21 nt, Human
cacauuuuuuaaaugcaccug

SEQ ID NO: 3308922 - RNA, 17 nt, Human
cacauuuuuuaaaugca

SEQ ID NO: 3308923 - RNA, 14 nt, Human
cacauuuuucuuag

SEQ ID NO: 3308924 - RNA, 13 nt, Human
cacauuuuucuua

SEQ ID NO: 3308925 - RNA, 24 nt, Human
cacccaggagccccgaggccuucu

SEQ ID NO: 3308926 - RNA, 19 nt, Human
cacccagcccacuucugcc

SEQ ID NO: 3308927 - RNA, 20 nt, Human
cacccaggagccccgaggcc

SEQ ID NO: 3308928 - RNA, 23 nt, Human
cacccaggagccccgaggccuuc

SEQ ID NO: 3308929 - RNA, 21 nt, Human
caccagcccuuagcagggaaa

SEQ ID NO: 3308930 - RNA, 15 nt, Human
caccagcagccugga

SEQ ID NO: 3308931 - RNA, 12 nt, Human
caccagcagccu

SEQ ID NO: 3308932 - RNA, 14 nt, Human
caccagcagccugg

SEQ ID NO: 3308933 - RNA, 23 nt, Human
caccaacauacucccaucuguga

SEQ ID NO: 3308934 - RNA, 16 nt, Human
cacccagcccacuucu

SEQ ID NO: 3308935 - RNA, 17 nt, Human
cacccagcccacuucug

SEQ ID NO: 3308936 - RNA, 13 nt, Human
caccugccaggga

SEQ ID NO: 3308937 - RNA, 16 nt, Human
caccugccagggacag

SEQ ID NO: 3308938 - RNA, 14 nt, Human
caccugccagggac

SEQ ID NO: 3308939 - RNA, 14 nt, Human
caccuuugaagaag

SEQ ID NO: 3308940 - RNA, 15 nt, Human
caccuuuguccccac

SEQ ID NO: 3308941 - RNA, 14 nt, Human
caccuuugucccca

SEQ ID NO: 3308942 - RNA, 13 nt, Human
caccuuggcucaa

SEQ ID NO: 3308943 - RNA, 19 nt, Human
caccuugacagggcacacc

SEQ ID NO: 3308944 - RNA, 17 nt, Human
caccugccagggacaga

SEQ ID NO: 3308945 - RNA, 18 nt, Human
caccuugacagggcacac

SEQ ID NO: 3308946 - RNA, 20 nt, Human
cacggagggugacgggggug

SEQ ID NO: 3308947 - RNA, 14 nt, Human
cacggccaggccag

SEQ ID NO: 3308948 - RNA, 15 nt, Human
cacggccaggccaga

SEQ ID NO: 3308949 - RNA, 16 nt, Human
cacggccaggccagag

SEQ ID NO: 3308950 - RNA, 13 nt, Human
cacggccaggcca

SEQ ID NO: 3308951 - RNA, 23 nt, Human
cacuacggaauaguuggcuagga

SEQ ID NO: 3308952 - RNA, 18 nt, Human
cacucuuauugcccacgc

SEQ ID NO: 3308953 - RNA, 17 nt, Human
cacucuuauugcccacg

SEQ ID NO: 3308954 - RNA, 19 nt, Human
cacuguuucaaacuuuacu

SEQ ID NO: 3308955 - RNA, 17 nt, Human
cacuggugacaugucuu

SEQ ID NO: 3308956 - RNA, 14 nt, Human
cacuguugcccagg

SEQ ID NO: 3308957 - RNA, 15 nt, Human
cacuguugcccaggc

SEQ ID NO: 3308958 - RNA, 16 nt, Human
cacuguugcccaggcu

SEQ ID NO: 3308959 - RNA, 20 nt, Human
cacugggcuuggggaccaga

SEQ ID NO: 3308960 - RNA, 22 nt, Human
cacugggcuuggggaccagagc

SEQ ID NO: 3308961 - RNA, 23 nt, Human
cacugggcuuggggaccagagcu

SEQ ID NO: 3308962 - RNA, 21 nt, Human
cagaaguuucugccgcagccc

SEQ ID NO: 3308963 - RNA, 20 nt, Human
cagaaguuucugccgcagcc

SEQ ID NO: 3308964 - RNA, 22 nt, Human
cagaaguuucugccgcagcccu

SEQ ID NO: 3308965 - RNA, 23 nt, Human
cagaaguuugagaucagccuggg

SEQ ID NO: 3308966 - RNA, 19 nt, Human
cagaaguuucugccgcagc

SEQ ID NO: 3308967 - RNA, 17 nt, Human
cagaaauguguuaucac

SEQ ID NO: 3308968 - RNA, 14 nt, Human
caacccccagccug

SEQ ID NO: 3308969 - RNA, 15 nt, Human
caacccccagccugc

SEQ ID NO: 3308970 - RNA, 16 nt, Human
caacccccagccugcu

SEQ ID NO: 3308971 - RNA, 17 nt, Human
caacccccagccugcua

SEQ ID NO: 3308972 - RNA, 15 nt, Human
caacucaccccagcc

SEQ ID NO: 3308973 - RNA, 13 nt, Human
caacucaccccag

SEQ ID NO: 3308974 - RNA, 16 nt, Human
caacucaccccagccc

SEQ ID NO: 3308975 - RNA, 22 nt, Human
caagacccuuguggucccaccc

SEQ ID NO: 3308976 - RNA, 19 nt, Human
caagacccuugugguccca

SEQ ID NO: 3308977 - RNA, 18 nt, Human
caagacccuugugguccc

SEQ ID NO: 3308978 - RNA, 18 nt, Human
caaccacugcgaccacaa

SEQ ID NO: 3308979 - RNA, 20 nt, Human
caacaccucugcacaagcug

SEQ ID NO: 3308980 - RNA, 22 nt, Human
caacaccucugcacaagcugca

SEQ ID NO: 3308981 - RNA, 20 nt, Human
caacaccuuguuucccucuc

SEQ ID NO: 3308982 - RNA, 17 nt, Human
caaaucagcugcuacua

SEQ ID NO: 3308983 - RNA, 13 nt, Human
caaagaugcagcc

SEQ ID NO: 3308984 - RNA, 21 nt, Human
caaaguacacuguuucaaacu

SEQ ID NO: 3308985 - RNA, 20 nt, Human
caaaguacacuguuucaaac

SEQ ID NO: 3308986 - RNA, 16 nt, Human
caaaguacacuguuuc

SEQ ID NO: 3308987 - RNA, 23 nt, Human
caacaaaccuguuucugcagcca

SEQ ID NO: 3308988 - RNA, 12 nt, Human
auuuuuuuuucc

SEQ ID NO: 3308989 - RNA, 16 nt, Human
auuuuuuuuuccuuca

SEQ ID NO: 3308990 - RNA, 13 nt, Human
auuuuuuuuuccu

SEQ ID NO: 3308991 - RNA, 13 nt, Human
auuuuuaagugcu

SEQ ID NO: 3308992 - RNA, 15 nt, Human
caaaagcugggcagg

SEQ ID NO: 3308993 - RNA, 16 nt, Human
auuuguuugaacugau

SEQ ID NO: 3308994 - RNA, 14 nt, Human
auuuguuugaacug

SEQ ID NO: 3308995 - RNA, 13 nt, Human
auuuguuugaacu

SEQ ID NO: 3308996 - RNA, 20 nt, Human
auuaaauucuugcaaaguau

SEQ ID NO: 3308997 - RNA, 18 nt, Human
auuaaauucuugcaaagu

SEQ ID NO: 3308998 - RNA, 14 nt, Human
auuaaauucuugca

SEQ ID NO: 3308999 - RNA, 20 nt, Human
auucauauuuacuucuuaua

SEQ ID NO: 3309000 - RNA, 18 nt, Human
auucauauuuacuucuua

SEQ ID NO: 3309001 - RNA, 19 nt, Human
auucauauuuacuucuuau

SEQ ID NO: 3309002 - RNA, 13 nt, Human
auucuuuccugag

SEQ ID NO: 3309003 - RNA, 22 nt, Human
auucuuuccugaggcugggcuc

SEQ ID NO: 3309004 - RNA, 17 nt, Human
auucuuuccugaggcug

SEQ ID NO: 3309005 - RNA, 16 nt, Human
auucucuccuguaccu

SEQ ID NO: 3309006 - RNA, 21 nt, Human
auuccugaugcuucuucagag

SEQ ID NO: 3309007 - RNA, 21 nt, Human
auucucuccuguaccucuuga

SEQ ID NO: 3309008 - RNA, 19 nt, Human
auucucuccuguaccucuu

SEQ ID NO: 3309009 - RNA, 17 nt, Human
auugauaugcuuauaca

SEQ ID NO: 3309010 - RNA, 16 nt, Human
auuguaaggaaugauu

SEQ ID NO: 3309011 - RNA, 15 nt, Human
auuguaaggaaugau

SEQ ID NO: 3309012 - RNA, 19 nt, Human
auuguucuuaguuugcagu

SEQ ID NO: 3309013 - RNA, 21 nt, Human
auuuaaugaaagacuguacaa

SEQ ID NO: 3309014 - RNA, 14 nt, Human
auuuaaugaaagac

SEQ ID NO: 3309015 - RNA, 12 nt, Human
auuucuguuuag

SEQ ID NO: 3309016 - RNA, 16 nt, Human
auuucuguuuagauaa

SEQ ID NO: 3309017 - RNA, 14 nt, Human
auuucuguuuagau

SEQ ID NO: 3309018 - RNA, 16 nt, Human
gucaauuacaggaagu

SEQ ID NO: 3309019 - RNA, 22 nt, Human
gucaauuacaggaaguacugga

SEQ ID NO: 3309020 - RNA, 22 nt, Human
gucaccaaaucagcugcuacua

SEQ ID NO: 3309021 - RNA, 12 nt, Human
gucaccaagccc

SEQ ID NO: 3309022 - RNA, 15 nt, Human
gucaccaagcccagu

SEQ ID NO: 3309023 - RNA, 23 nt, Human
gucacucuggcagcucagagagg

SEQ ID NO: 3309024 - RNA, 16 nt, Human
gucacugagacagccc

SEQ ID NO: 3309025 - RNA, 15 nt, Human
gucacugagacagcc

SEQ ID NO: 3309026 - RNA, 14 nt, Human
gucacugagacagc

SEQ ID NO: 3309027 - RNA, 22 nt, Human
gucacucuggcagcucagagag

SEQ ID NO: 3309028 - RNA, 23 nt, Human
gucacugagacagcccgggcucu

SEQ ID NO: 3309029 - RNA, 21 nt, Human
gucacugagacagcccgggcu

SEQ ID NO: 3309030 - RNA, 18 nt, Human
gucacugagacagcccgg

SEQ ID NO: 3309031 - RNA, 17 nt, Human
gucacugagacagcccg

SEQ ID NO: 3309032 - RNA, 10 nt, Human
gucacugcuu

SEQ ID NO: 3309033 - RNA, 21 nt, Human
gucagaaguuucugccgcagc

SEQ ID NO: 3309034 - RNA, 21 nt, Human
gucacugcuuaacuucacaua

SEQ ID NO: 3309035 - RNA, 15 nt, Human
gucacugcuuaacuu

SEQ ID NO: 3309036 - RNA, 16 nt, Human
gucagguggggcagcu

SEQ ID NO: 3309037 - RNA, 17 nt, Human
gucagguggggcagcuu

SEQ ID NO: 3309038 - RNA, 18 nt, Human
gucagguggggcagcuug

SEQ ID NO: 3309039 - RNA, 22 nt, Human
gucagguggggcagcuugaggg

SEQ ID NO: 3309040 - RNA, 12 nt, Human
aaauuucuaaau

SEQ ID NO: 3309041 - RNA, 15 nt, Human
aaauuucuaaaucuc

SEQ ID NO: 3309042 - RNA, 13 nt, Human
aaauuucuaaauc

SEQ ID NO: 3309043 - RNA, 18 nt, Human
guauucucuccuguaccu

SEQ ID NO: 3309044 - RNA, 24 nt, Human
aaaugucuaguuguaacaccauga

SEQ ID NO: 3309045 - RNA, 21 nt, Human
aaaugucucuuuaaugucaca

SEQ ID NO: 3309046 - RNA, 15 nt, Human
gucccaccccacaca

SEQ ID NO: 3309047 - RNA, 17 nt, Human
guccccaccgcagacag

SEQ ID NO: 3309048 - RNA, 18 nt, Human
guccccaccgcagacagg

SEQ ID NO: 3309049 - RNA, 22 nt, Human
guccccaccgcagacaggacca

SEQ ID NO: 3309050 - RNA, 22 nt, Human
guccccuguuuguuucugaaag

SEQ ID NO: 3309051 - RNA, 18 nt, Human
guccccuguuuguuucug

SEQ ID NO: 3309052 - RNA, 19 nt, Human
gucccuuacgugaguccug

SEQ ID NO: 3309053 - RNA, 18 nt, Human
gucccuuacgugaguccu

SEQ ID NO: 3309054 - RNA, 18 nt, Human
gucccugguggcagcuca

SEQ ID NO: 3309055 - RNA, 19 nt, Human
gucccugguggcagcucac

SEQ ID NO: 3309056 - RNA, 19 nt, Human
aaauuucuaaaucuccaaa

SEQ ID NO: 3309057 - RNA, 19 nt, Human
aacacaaacgggcucagca

SEQ ID NO: 3309058 - RNA, 16 nt, Human
aacacuguucucugcc

SEQ ID NO: 3309059 - RNA, 18 nt, Human
aacacuguucucugcccu

SEQ ID NO: 3309060 - RNA, 17 nt, Human
aacacuguucucugccc

SEQ ID NO: 3309061 - RNA, 17 nt, Human
gucauuugagcagggcu

SEQ ID NO: 3309062 - RNA, 19 nt, Human
aacacuguucucugcccuc

SEQ ID NO: 3309063 - RNA, 21 nt, Human
aacacucacauuuauucugcu

SEQ ID NO: 3309064 - RNA, 18 nt, Human
aacaguccauugaaaggg

SEQ ID NO: 3309065 - RNA, 21 nt, Human
guccggucccugucccagugc

SEQ ID NO: 3309066 - RNA, 23 nt, Human
aacauguaauuaaguacuaugua

SEQ ID NO: 3309067 - RNA, 14 nt, Human
guccucuuuucuga

SEQ ID NO: 3309068 - RNA, 16 nt, Human
guccuggcaugggaau

SEQ ID NO: 3309069 - RNA, 17 nt, Human
guccugcugcaguugcc

SEQ ID NO: 3309070 - RNA, 19 nt, Human
guccugcugcaguugccag

SEQ ID NO: 3309071 - RNA, 12 nt, Human
gucgaggcagga

SEQ ID NO: 3309072 - RNA, 16 nt, Human
gucgaggacagggagg

SEQ ID NO: 3309073 - RNA, 15 nt, Human
gucuaugggacucaa

SEQ ID NO: 3309074 - RNA, 22 nt, Human
gucuaugggacucaaugcacug

SEQ ID NO: 3309075 - RNA, 16 nt, Human
gucuaccugaggggcc

SEQ ID NO: 3309076 - RNA, 15 nt, Human
gucuaccugaggggc

SEQ ID NO: 3309077 - RNA, 13 nt, Human
gucuaccugaggg

SEQ ID NO: 3309078 - RNA, 14 nt, Human
gucuaccugagggg

SEQ ID NO: 3309079 - RNA, 23 nt, Human
gugaauaauacaguaucucaggg

SEQ ID NO: 3309080 - RNA, 14 nt, Human
gugacaugucuuuu

SEQ ID NO: 3309081 - RNA, 23 nt, Human
gugacagaggcagccccauucug

SEQ ID NO: 3309082 - RNA, 20 nt, Human
gugacagagugagacucugu

SEQ ID NO: 3309083 - RNA, 22 nt, Human
gugacagagugagacucugucu

SEQ ID NO: 3309084 - RNA, 22 nt, Human
gugagacccugucucaaaaaaa

SEQ ID NO: 3309085 - RNA, 14 nt, Human
gugagacucugucu

SEQ ID NO: 3309086 - RNA, 16 nt, Human
gugagacucugucuca

SEQ ID NO: 3309087 - RNA, 19 nt, Human
gugacaugucuuuucuugc

SEQ ID NO: 3309088 - RNA, 16 nt, Human
aacugcauuggcuuug

SEQ ID NO: 3309089 - RNA, 22 nt, Human
aacugauuuuuuuuuccuucag

SEQ ID NO: 3309090 - RNA, 21 nt, Human
aacugauuuuuuuuuccuuca

SEQ ID NO: 3309091 - RNA, 20 nt, Human
aacugauuuuuuuuuccuuc

SEQ ID NO: 3309092 - RNA, 23 nt, Human
aacucuccucugcugcuggcugg

SEQ ID NO: 3309093 - RNA, 22 nt, Human
aacucuccucugcugcuggcug

SEQ ID NO: 3309094 - RNA, 18 nt, Human
gugaggcucugcccuugg

SEQ ID NO: 3309095 - RNA, 17 nt, Human
gugagucaccaagccca

SEQ ID NO: 3309096 - RNA, 23 nt, Human
gugaguacuacaguccucccauc

SEQ ID NO: 3309097 - RNA, 17 nt, Human
aacucuccucugcugcu

SEQ ID NO: 3309098 - RNA, 21 nt, Human
gugaguacuacaguccuccca

SEQ ID NO: 3309099 - RNA, 21 nt, Human
aacucuccucugcugcuggcu

SEQ ID NO: 3309100 - RNA, 19 nt, Human
aacucuccucugcugcugg

SEQ ID NO: 3309101 - RNA, 18 nt, Human
gugagacucugucucaaa

SEQ ID NO: 3309102 - RNA, 13 nt, Human
gugaggcucugcc

SEQ ID NO: 3309103 - RNA, 12 nt, Human
gugaggcucugc

SEQ ID NO: 3309104 - RNA, 17 nt, Human
gugaggcucugcccuug

SEQ ID NO: 3309105 - RNA, 16 nt, Human
gugaggcucugcccuu

SEQ ID NO: 3309106 - RNA, 15 nt, Human
gugaggcucugcccu

SEQ ID NO: 3309107 - RNA, 14 nt, Human
gugaggcucugccc

SEQ ID NO: 3309108 - RNA, 21 nt, Human
gucuuaaaaaguggaaaaaua

SEQ ID NO: 3309109 - RNA, 15 nt, Human
gucuggaaugcagug

SEQ ID NO: 3309110 - RNA, 16 nt, Human
gucuggaaugcagugg

SEQ ID NO: 3309111 - RNA, 14 nt, Human
gucucaaaaaaaca

SEQ ID NO: 3309112 - RNA, 17 nt, Human
gucucaaaaaaagaaaa

SEQ ID NO: 3309113 - RNA, 23 nt, Human
gucucuuuaaugucacaggcagg

SEQ ID NO: 3309114 - RNA, 20 nt, Human
gucugacaggcaaugcuggc

SEQ ID NO: 3309115 - RNA, 15 nt, Human
gucugacaggcaaug

SEQ ID NO: 3309116 - RNA, 18 nt, Human
gucugacaggcaaugcug

SEQ ID NO: 3309117 - RNA, 12 nt, Human
gucugacaggca

SEQ ID NO: 3309118 - RNA, 13 nt, Human
gucugacaggcaa

SEQ ID NO: 3309119 - RNA, 14 nt, Human
gucugacaggcaau

SEQ ID NO: 3309120 - RNA, 13 nt, Human
aacguggcugcuu

SEQ ID NO: 3309121 - RNA, 12 nt, Human
aacguggcugcu

SEQ ID NO: 3309122 - RNA, 17 nt, Human
aacuagggaagauaaua

SEQ ID NO: 3309123 - RNA, 13 nt, Human
aacgucugugcca

SEQ ID NO: 3309124 - RNA, 13 nt, Human
aacuucacauauu

SEQ ID NO: 3309125 - RNA, 14 nt, Human
aacuucacauauug

SEQ ID NO: 3309126 - RNA, 22 nt, Human
aacuucaccauauuaccacaga

SEQ ID NO: 3309127 - RNA, 22 nt, Human
aacuucacauauugauuuccgu

SEQ ID NO: 3309128 - RNA, 23 nt, Human
gugauccucccaccucagccucc

SEQ ID NO: 3309129 - RNA, 21 nt, Human
gugcacaugcacgugugugca

SEQ ID NO: 3309130 - RNA, 21 nt, Human
gugcacaagcuccaagcuccc

SEQ ID NO: 3309131 - RNA, 16 nt, Human
gugcacaagcuccaag

SEQ ID NO: 3309132 - RNA, 13 nt, Human
gugcacaagcucc

SEQ ID NO: 3309133 - RNA, 18 nt, Human
gugcaaugaccuuucaau

SEQ ID NO: 3309134 - RNA, 23 nt, Human
gugccaaaaacaacaacaaaaug

SEQ ID NO: 3309135 - RNA, 21 nt, Human
gugcauuuggugguuucagaa

SEQ ID NO: 3309136 - RNA, 19 nt, Human
gugcauuugaggucuguuc

SEQ ID NO: 3309137 - RNA, 17 nt, Human
gugcauuugaggucugu

SEQ ID NO: 3309138 - RNA, 16 nt, Human
aagaaaauaccaagga

SEQ ID NO: 3309139 - RNA, 15 nt, Human
aagaaaauaguggug

SEQ ID NO: 3309140 - RNA, 22 nt, Human
aagaaaauaguggugugauuug

SEQ ID NO: 3309141 - RNA, 21 nt, Human
aagaaaauaguggugugauuu

SEQ ID NO: 3309142 - RNA, 18 nt, Human
aagaaaaaugagccuggc

SEQ ID NO: 3309143 - RNA, 17 nt, Human
aagaaaaaugagccugg

SEQ ID NO: 3309144 - RNA, 19 nt, Human
aagaaaaaauauuuucccu

SEQ ID NO: 3309145 - RNA, 13 nt, Human
aagaaaaagaaaa

SEQ ID NO: 3309146 - RNA, 23 nt, Human
aacuuuaccuuuuuuauacauaa

SEQ ID NO: 3309147 - RNA, 22 nt, Human
aacuuuaccuuuuuuauacaua

SEQ ID NO: 3309148 - RNA, 21 nt, Human
aacuuuaccuuuuuuauacau

SEQ ID NO: 3309149 - RNA, 18 nt, Human
gugcuaucucccccagcc

SEQ ID NO: 3309150 - RNA, 15 nt, Human
gugcuaucuccccca

SEQ ID NO: 3309151 - RNA, 15 nt, Human
gugcugcccugccca

SEQ ID NO: 3309152 - RNA, 14 nt, Human
gugcugcccugccc

SEQ ID NO: 3309153 - RNA, 13 nt, Human
gugcugcccugcc

SEQ ID NO: 3309154 - RNA, 12 nt, Human
gugcugcccugc

SEQ ID NO: 3309155 - RNA, 13 nt, Human
gugcucuggacag

SEQ ID NO: 3309156 - RNA, 16 nt, Human
gugcucugaucaucca

SEQ ID NO: 3309157 - RNA, 17 nt, Human
guuucaaacuuuacuau

SEQ ID NO: 3309158 - RNA, 16 nt, Human
aaggaaacccagcucu

SEQ ID NO: 3309159 - RNA, 20 nt, Human
guuguuugauucagacagcu

SEQ ID NO: 3309160 - RNA, 23 nt, Human
guuguuugauucagacagcugcc

SEQ ID NO: 3309161 - RNA, 22 nt, Human
aaggaaacccagcucuggucca

SEQ ID NO: 3309162 - RNA, 17 nt, Human
aaggaaacccagcucug

SEQ ID NO: 3309163 - RNA, 21 nt, Human
guuuaagugacugauggcuaa

SEQ ID NO: 3309164 - RNA, 13 nt, Human
aaggggagaguaa

SEQ ID NO: 3309165 - RNA, 23 nt, Human
aagggggcugggacaugggaaag

SEQ ID NO: 3309166 - RNA, 12 nt, Human
aagggggcuggg

SEQ ID NO: 3309167 - RNA, 20 nt, Human
aaggcugucaauuacaggaa

SEQ ID NO: 3309168 - RNA, 22 nt, Human
aaggcugggggaagaagcucuc

SEQ ID NO: 3309169 - RNA, 19 nt, Human
aaggcugggggaagaagcu

SEQ ID NO: 3309170 - RNA, 14 nt, Human
aaggcugggggaag

SEQ ID NO: 3309171 - RNA, 16 nt, Human
aaggcugggggaagaa

SEQ ID NO: 3309172 - RNA, 13 nt, Human
guuucagaaaugu

SEQ ID NO: 3309173 - RNA, 11 nt, Human
guuucagaaau

SEQ ID NO: 3309174 - RNA, 23 nt, Human
aaguauucuuauuuaaugaaaga

SEQ ID NO: 3309175 - RNA, 21 nt, Human
aaguauucuuauuuaaugaaa

SEQ ID NO: 3309176 - RNA, 19 nt, Human
aaguauucuuauuuaauga

SEQ ID NO: 3309177 - RNA, 19 nt, Human
aaguauuauaccuuuuuua

SEQ ID NO: 3309178 - RNA, 16 nt, Human
aaguauuauaccuuuu

SEQ ID NO: 3309179 - RNA, 19 nt, Human
aaguacuucuccacccugc

SEQ ID NO: 3309180 - RNA, 18 nt, Human
aaguacuucuccacccug

SEQ ID NO: 3309181 - RNA, 15 nt, Human
aaguauuauaccuuu

SEQ ID NO: 3309182 - RNA, 14 nt, Human
aaguacuauaauuu

SEQ ID NO: 3309183 - RNA, 17 nt, Human
aaguacuauaauuuacc

SEQ ID NO: 3309184 - RNA, 13 nt, Human
aaguacuauguau

SEQ ID NO: 3309185 - RNA, 12 nt, Human
guuuucuguucu

SEQ ID NO: 3309186 - RNA, 14 nt, Human
guuuucuguucuuu

SEQ ID NO: 3309187 - RNA, 16 nt, Human
guuuucuguucuuucu

SEQ ID NO: 3309188 - RNA, 15 nt, Human
guuuucuguucuuuc

SEQ ID NO: 3309189 - RNA, 22 nt, Human
guuuuaaggaugcuuguacaua

SEQ ID NO: 3309190 - RNA, 18 nt, Human
guuuuaaggaugcuugua

SEQ ID NO: 3309191 - RNA, 17 nt, Human
aaguaauaugcacacau

SEQ ID NO: 3309192 - RNA, 20 nt, Human
aaguaauaugcacacauuuu

SEQ ID NO: 3309193 - RNA, 18 nt, Human
aaguaauaugcacacauu

SEQ ID NO: 3309194 - RNA, 23 nt, Human
uaaaaaucucaaauuucuaaauc

SEQ ID NO: 3309195 - RNA, 15 nt, Human
uaaaaaugagguacu

SEQ ID NO: 3309196 - RNA, 13 nt, Human
uaaaacccaagug

SEQ ID NO: 3309197 - RNA, 15 nt, Human
uaaaacuuuuuaaaa

SEQ ID NO: 3309198 - RNA, 12 nt, Human
uaaaacuuuuua

SEQ ID NO: 3309199 - RNA, 19 nt, Human
uaaaaggugaccaaugaug

SEQ ID NO: 3309200 - RNA, 13 nt, Human
uaaaagucuugug

SEQ ID NO: 3309201 - RNA, 23 nt, Human
aagugauccucccaccucagccu

SEQ ID NO: 3309202 - RNA, 20 nt, Human
aagugauucuccugccucag

SEQ ID NO: 3309203 - RNA, 13 nt, Human
aagugauccuccc

SEQ ID NO: 3309204 - RNA, 19 nt, Human
aagugauccucccaccuca

SEQ ID NO: 3309205 - RNA, 20 nt, Human
aagugauccucccaccucag

SEQ ID NO: 3309206 - RNA, 13 nt, Human
aagugugguagag

SEQ ID NO: 3309207 - RNA, 23 nt, Human
aaguguauuuuuuuacuaauaga

SEQ ID NO: 3309208 - RNA, 20 nt, Human
aaguuugagaucagccuggg

SEQ ID NO: 3309209 - RNA, 21 nt, Human
aaguuucugccgcagcccugc

SEQ ID NO: 3309210 - RNA, 19 nt, Human
aaguuucugccgcagcccu

SEQ ID NO: 3309211 - RNA, 23 nt, Human
aagaucaaaagguuaauaaagua

SEQ ID NO: 3309212 - RNA, 20 nt, Human
aagaucaaaagguuaauaaa

SEQ ID NO: 3309213 - RNA, 19 nt, Human
gugucagguggggcagcuu

SEQ ID NO: 3309214 - RNA, 23 nt, Human
gugugaaccaccacacccagccc

SEQ ID NO: 3309215 - RNA, 22 nt, Human
gugucaccugaagacucauucu

SEQ ID NO: 3309216 - RNA, 14 nt, Human
gugucagguggggc

SEQ ID NO: 3309217 - RNA, 18 nt, Human
gugucagguggggcagcu

SEQ ID NO: 3309218 - RNA, 14 nt, Human
gugucaccugaaga

SEQ ID NO: 3309219 - RNA, 23 nt, Human
gugcugcccugcccaccuggccu

SEQ ID NO: 3309220 - RNA, 21 nt, Human
gugcugcccugcccaccuggc

SEQ ID NO: 3309221 - RNA, 15 nt, Human
gugguuucagaaaug

SEQ ID NO: 3309222 - RNA, 22 nt, Human
aagauauuuugcuuugugauuu

SEQ ID NO: 3309223 - RNA, 22 nt, Human
aagagggucugaggaauccaga

SEQ ID NO: 3309224 - RNA, 21 nt, Human
aagagggagggagggcuccag

SEQ ID NO: 3309225 - RNA, 14 nt, Human
aagaggcagggucu

SEQ ID NO: 3309226 - RNA, 11 nt, Human
aagaggcaggg

SEQ ID NO: 3309227 - RNA, 12 nt, Human
aagcaugugaga

SEQ ID NO: 3309228 - RNA, 17 nt, Human
aagccaaagcuaggccu

SEQ ID NO: 3309229 - RNA, 18 nt, Human
aagccaaagcuaggccug

SEQ ID NO: 3309230 - RNA, 17 nt, Human
aagcaccuccugccucg

SEQ ID NO: 3309231 - RNA, 21 nt, Human
aagcacaugccucucucaggc

SEQ ID NO: 3309232 - RNA, 13 nt, Human
aagcaccuccugc

SEQ ID NO: 3309233 - RNA, 14 nt, Human
aagcaccuccugcc

SEQ ID NO: 3309234 - RNA, 15 nt, Human
aagcaccuccugccu

SEQ ID NO: 3309235 - RNA, 16 nt, Human
aagcaccuccugccuc

SEQ ID NO: 3309236 - RNA, 16 nt, Human
aagcacacuugacauc

SEQ ID NO: 3309237 - RNA, 20 nt, Human
aagcacaugccucucucagg

SEQ ID NO: 3309238 - RNA, 19 nt, Human
aagcacaugccucucucag

SEQ ID NO: 3309239 - RNA, 16 nt, Human
aagcacaugccucucu

SEQ ID NO: 3309240 - RNA, 15 nt, Human
aagcacaugccucuc

SEQ ID NO: 3309241 - RNA, 14 nt, Human
aagcacaugccucu

SEQ ID NO: 3309242 - RNA, 19 nt, Human
guuagagguucccuuugac

SEQ ID NO: 3309243 - RNA, 21 nt, Human
aagccgugauuuucauugcug

SEQ ID NO: 3309244 - RNA, 17 nt, Human
guucagguaacaggcag

SEQ ID NO: 3309245 - RNA, 18 nt, Human
guucagguaacaggcaga

SEQ ID NO: 3309246 - RNA, 20 nt, Human
guucaggguuggccccugcc

SEQ ID NO: 3309247 - RNA, 21 nt, Human
guucaggguuggccccugccc

SEQ ID NO: 3309248 - RNA, 22 nt, Human
guucaggguuggccccugcccg

SEQ ID NO: 3309249 - RNA, 18 nt, Human
guucagcuccagcucacc

SEQ ID NO: 3309250 - RNA, 23 nt, Human
guucagcuuguaaauagcucagg

SEQ ID NO: 3309251 - RNA, 22 nt, Human
aagcuaggccuggccagaugca

SEQ ID NO: 3309252 - RNA, 16 nt, Human
aagccucccacgacug

SEQ ID NO: 3309253 - RNA, 15 nt, Human
aagccuccuccagcc

SEQ ID NO: 3309254 - RNA, 22 nt, Human
guucccuuuuuuggcugcugaa

SEQ ID NO: 3309255 - RNA, 21 nt, Human
guucccuuuuuuggcugcuga

SEQ ID NO: 3309256 - RNA, 22 nt, Human
guucccuuugacgccaucccag

SEQ ID NO: 3309257 - RNA, 17 nt, Human
aagcucugcuccucucc

SEQ ID NO: 3309258 - RNA, 19 nt, Human
guugauagcacagacccug

SEQ ID NO: 3309259 - RNA, 14 nt, Human
guugauagcacaga

SEQ ID NO: 3309260 - RNA, 15 nt, Human
guucuugguuuguaa

SEQ ID NO: 3309261 - RNA, 14 nt, Human
guucuugguuugua

SEQ ID NO: 3309262 - RNA, 17 nt, Human
guucuuaauucuuagcu

SEQ ID NO: 3309263 - RNA, 14 nt, Human
guucuuaauucuua

SEQ ID NO: 3309264 - RNA, 18 nt, Human
guucucugcccuccaaga

SEQ ID NO: 3309265 - RNA, 17 nt, Human
guucucugcccuccaag

SEQ ID NO: 3309266 - RNA, 13 nt, Human
guucuuaauucuu

SEQ ID NO: 3309267 - RNA, 12 nt, Human
guucucugagga

SEQ ID NO: 3309268 - RNA, 15 nt, Human
guucucucuucucca

SEQ ID NO: 3309269 - RNA, 15 nt, Human
guucucugcccucca

SEQ ID NO: 3309270 - RNA, 13 nt, Human
guucucugcccuc

SEQ ID NO: 3309271 - RNA, 13 nt, Human
guucucuccuucu

SEQ ID NO: 3309272 - RNA, 19 nt, Human
guucuagcauggcugccaa

SEQ ID NO: 3309273 - RNA, 15 nt, Human
uaugcuuauacacuu

SEQ ID NO: 3309274 - RNA, 17 nt, Human
uauggcuuuugugcauu

SEQ ID NO: 3309275 - RNA, 16 nt, Human
uauggcuuuugugcau

SEQ ID NO: 3309276 - RNA, 21 nt, Human
uauggcuuuugugcauuaucu

SEQ ID NO: 3309277 - RNA, 18 nt, Human
uauggcuuuugugcauua

SEQ ID NO: 3309278 - RNA, 11 nt, Human
uaugcauuuga

SEQ ID NO: 3309279 - RNA, 24 nt, Human
uaugcauuugaaaauuuugauguu

SEQ ID NO: 3309280 - RNA, 23 nt, Human
uaugcauuugaaaauuuugaugu

SEQ ID NO: 3309281 - RNA, 17 nt, Human
uaugccugggcagaagg

SEQ ID NO: 3309282 - RNA, 17 nt, Human
acagcaaggagauuuac

SEQ ID NO: 3309283 - RNA, 14 nt, Human
acagagcccacgcc

SEQ ID NO: 3309284 - RNA, 15 nt, Human
acagagcccacgccc

SEQ ID NO: 3309285 - RNA, 19 nt, Human
acagagcccacgcccccac

SEQ ID NO: 3309286 - RNA, 18 nt, Human
acagagcccacgccccca

SEQ ID NO: 3309287 - RNA, 16 nt, Human
acagcccgggcucugc

SEQ ID NO: 3309288 - RNA, 17 nt, Human
acagcccgggcucugcc

SEQ ID NO: 3309289 - RNA, 21 nt, Human
acagcaaggagauuuacaacu

SEQ ID NO: 3309290 - RNA, 16 nt, Human
acagcaaggagauuua

SEQ ID NO: 3309291 - RNA, 19 nt, Human
acagcccgggcucugccuc

SEQ ID NO: 3309292 - RNA, 18 nt, Human
acagcccgggcucugccu

SEQ ID NO: 3309293 - RNA, 15 nt, Human
acagacccugcccug

SEQ ID NO: 3309294 - RNA, 14 nt, Human
acagacccugcccu

SEQ ID NO: 3309295 - RNA, 13 nt, Human
acagacccugccc

SEQ ID NO: 3309296 - RNA, 17 nt, Human
acagaaauguacagcaa

SEQ ID NO: 3309297 - RNA, 16 nt, Human
acagaaauguacagca

SEQ ID NO: 3309298 - RNA, 14 nt, Human
acagaaauguacag

SEQ ID NO: 3309299 - RNA, 17 nt, Human
acagaaaauucuucucc

SEQ ID NO: 3309300 - RNA, 13 nt, Human
acagaaauguaca

SEQ ID NO: 3309301 - RNA, 20 nt, Human
acagaaaauggaagacagcu

SEQ ID NO: 3309302 - RNA, 11 nt, Human
acagagaaagu

SEQ ID NO: 3309303 - RNA, 18 nt, Human
acagagaaaguacuucuc

SEQ ID NO: 3309304 - RNA, 15 nt, Human
uaucucagggccugg

SEQ ID NO: 3309305 - RNA, 13 nt, Human
uaucucccccagc

SEQ ID NO: 3309306 - RNA, 14 nt, Human
uaucucccccagcc

SEQ ID NO: 3309307 - RNA, 23 nt, Human
acaggcugggcuucaguggcagc

SEQ ID NO: 3309308 - RNA, 21 nt, Human
acaggcugggcuucaguggca

SEQ ID NO: 3309309 - RNA, 22 nt, Human
acaggcugggcuucaguggcag

SEQ ID NO: 3309310 - RNA, 12 nt, Human
acagggcacacc

SEQ ID NO: 3309311 - RNA, 13 nt, Human
uauuacuucugcu

SEQ ID NO: 3309312 - RNA, 14 nt, Human
uauuacuucugcua

SEQ ID NO: 3309313 - RNA, 20 nt, Human
uauucaguaauaacucuacc

SEQ ID NO: 3309314 - RNA, 14 nt, Human
uauucaggaagcuc

SEQ ID NO: 3309315 - RNA, 13 nt, Human
acaggaaguacug

SEQ ID NO: 3309316 - RNA, 17 nt, Human
acaggaaaagcugcuga

SEQ ID NO: 3309317 - RNA, 15 nt, Human
acaggaaaagcugcu

SEQ ID NO: 3309318 - RNA, 16 nt, Human
acaggaaaagcugcug

SEQ ID NO: 3309319 - RNA, 13 nt, Human
acagcuaacaugg

SEQ ID NO: 3309320 - RNA, 14 nt, Human
acaggcauguucuc

SEQ ID NO: 3309321 - RNA, 14 nt, Human
acaggcagguccag

SEQ ID NO: 3309322 - RNA, 16 nt, Human
acaggcagguccaggg

SEQ ID NO: 3309323 - RNA, 16 nt, Human
acaggagugagcacua

SEQ ID NO: 3309324 - RNA, 14 nt, Human
acaggaucagucug

SEQ ID NO: 3309325 - RNA, 13 nt, Human
acaggcaggucca

SEQ ID NO: 3309326 - RNA, 23 nt, Human
acaggaccagggauuuccaugau

SEQ ID NO: 3309327 - RNA, 20 nt, Human
uauguggaguucaucuugaa

SEQ ID NO: 3309328 - RNA, 15 nt, Human
acaggcauguucucu

SEQ ID NO: 3309329 - RNA, 18 nt, Human
acaggcauguucucugag

SEQ ID NO: 3309330 - RNA, 19 nt, Human
acaggcauguucucugagg

SEQ ID NO: 3309331 - RNA, 20 nt, Human
acaggcauguucucugagga

SEQ ID NO: 3309332 - RNA, 22 nt, Human
acaggcauguucucugaggaca

SEQ ID NO: 3309333 - RNA, 15 nt, Human
uagccagaggagaga

SEQ ID NO: 3309334 - RNA, 11 nt, Human
uagccagagga

SEQ ID NO: 3309335 - RNA, 19 nt, Human
acaagacccuugugguccc

SEQ ID NO: 3309336 - RNA, 19 nt, Human
acaagaccacguuucuaaa

SEQ ID NO: 3309337 - RNA, 21 nt, Human
acaacacucauugaccugagg

SEQ ID NO: 3309338 - RNA, 23 nt, Human
acaacacucauugaccugaggcc

SEQ ID NO: 3309339 - RNA, 19 nt, Human
uagcauggcugccaauggg

SEQ ID NO: 3309340 - RNA, 16 nt, Human
uagcauuuugcuaaau

SEQ ID NO: 3309341 - RNA, 14 nt, Human
uagccaaggccaaa

SEQ ID NO: 3309342 - RNA, 22 nt, Human
uagcauuuugcuaaaugugaau

SEQ ID NO: 3309343 - RNA, 21 nt, Human
uagccaaggccaaaggaagca

SEQ ID NO: 3309344 - RNA, 15 nt, Human
uagauauaugcucug

SEQ ID NO: 3309345 - RNA, 19 nt, Human
uagauauaugcucugcaug

SEQ ID NO: 3309346 - RNA, 22 nt, Human
acaaaggaugcccaaagaugca

SEQ ID NO: 3309347 - RNA, 22 nt, Human
acaaaagcaugugagacugguu

SEQ ID NO: 3309348 - RNA, 11 nt, Human
acaaaagcaug

SEQ ID NO: 3309349 - RNA, 14 nt, Human
uaggcauuguggga

SEQ ID NO: 3309350 - RNA, 20 nt, Human
uaggcauuugcugaauacag

SEQ ID NO: 3309351 - RNA, 16 nt, Human
uaggcauuugcugaau

SEQ ID NO: 3309352 - RNA, 21 nt, Human
uagggaaggauacaaaagcau

SEQ ID NO: 3309353 - RNA, 12 nt, Human
acaaugacuuac

SEQ ID NO: 3309354 - RNA, 18 nt, Human
acaaugacuuacuguaca

SEQ ID NO: 3309355 - RNA, 17 nt, Human
acaaugacuuacuguac

SEQ ID NO: 3309356 - RNA, 18 nt, Human
acaagaccacguuucuaa

SEQ ID NO: 3309357 - RNA, 21 nt, Human
acacaugagcaucaggccagg

SEQ ID NO: 3309358 - RNA, 20 nt, Human
acacauuuuauuuuauuaug

SEQ ID NO: 3309359 - RNA, 19 nt, Human
acacauuuuauuuuauuau

SEQ ID NO: 3309360 - RNA, 14 nt, Human
acacauuuuauuuu

SEQ ID NO: 3309361 - RNA, 13 nt, Human
acacauuuuauuu

SEQ ID NO: 3309362 - RNA, 20 nt, Human
uaguuccaccaucaagccac

SEQ ID NO: 3309363 - RNA, 18 nt, Human
uaguucagguaacaggca

SEQ ID NO: 3309364 - RNA, 21 nt, Human
acaccucugcacaagcugcac

SEQ ID NO: 3309365 - RNA, 19 nt, Human
acaccucugcacaagcugc

SEQ ID NO: 3309366 - RNA, 16 nt, Human
acaccgggcacucaga

SEQ ID NO: 3309367 - RNA, 19 nt, Human
acacccugugauggggccc

SEQ ID NO: 3309368 - RNA, 20 nt, Human
acacuaaccacgcuggaccu

SEQ ID NO: 3309369 - RNA, 20 nt, Human
acacucacauuuauucugcu

SEQ ID NO: 3309370 - RNA, 15 nt, Human
acacucaaaagcugg

SEQ ID NO: 3309371 - RNA, 21 nt, Human
acaaugcugugcccuaaagug

SEQ ID NO: 3309372 - RNA, 24 nt, Human
acaaugcugugcccuaaaguguau

SEQ ID NO: 3309373 - RNA, 23 nt, Human
acaaugcugugcccuaaagugua

SEQ ID NO: 3309374 - RNA, 22 nt, Human
acaaugcugugcccuaaagugu

SEQ ID NO: 3309375 - RNA, 17 nt, Human
acaaugugaaaagaaaa

SEQ ID NO: 3309376 - RNA, 19 nt, Human
acaaugugaaaagaaaaau

SEQ ID NO: 3309377 - RNA, 14 nt, Human
acacacacauacac

SEQ ID NO: 3309378 - RNA, 21 nt, Human
acacacugcauguuugugauu

SEQ ID NO: 3309379 - RNA, 14 nt, Human
acacaccagagccc

SEQ ID NO: 3309380 - RNA, 15 nt, Human
acacaccagagccca

SEQ ID NO: 3309381 - RNA, 20 nt, Human
acacaccagagcccaccuug

SEQ ID NO: 3309382 - RNA, 21 nt, Human
acacacgcgugcacacaccag

SEQ ID NO: 3309383 - RNA, 17 nt, Human
acacacagcucuguccu

SEQ ID NO: 3309384 - RNA, 13 nt, Human
acacacagcucug

SEQ ID NO: 3309385 - RNA, 14 nt, Human
acacacagcucugu

SEQ ID NO: 3309386 - RNA, 13 nt, Human
acacagugagucg

SEQ ID NO: 3309387 - RNA, 19 nt, Human
acacaguauuacuucugcu

SEQ ID NO: 3309388 - RNA, 18 nt, Human
acacaguauuacuucugc

SEQ ID NO: 3309389 - RNA, 16 nt, Human
acacaguauuacuucu

SEQ ID NO: 3309390 - RNA, 12 nt, Human
aauuccccagau

SEQ ID NO: 3309391 - RNA, 14 nt, Human
aauuccccacccug

SEQ ID NO: 3309392 - RNA, 16 nt, Human
uaccugccaggaagcc

SEQ ID NO: 3309393 - RNA, 23 nt, Human
uaccugccaggaagccagcaggc

SEQ ID NO: 3309394 - RNA, 20 nt, Human
uaccugccaggaagccagca

SEQ ID NO: 3309395 - RNA, 18 nt, Human
uaccugccaggaagccag

SEQ ID NO: 3309396 - RNA, 10 nt, Human
uaccuguccc

SEQ ID NO: 3309397 - RNA, 17 nt, Human
uaccugucccccugaca

SEQ ID NO: 3309398 - RNA, 16 nt, Human
uaccugucccccugac

SEQ ID NO: 3309399 - RNA, 14 nt, Human
uaccugucccccug

SEQ ID NO: 3309400 - RNA, 13 nt, Human
uaccugucccccu

SEQ ID NO: 3309401 - RNA, 11 nt, Human
aauuacaggaa

SEQ ID NO: 3309402 - RNA, 15 nt, Human
aauuagccaagugug

SEQ ID NO: 3309403 - RNA, 18 nt, Human
uacuguacaugaaaacac

SEQ ID NO: 3309404 - RNA, 22 nt, Human
uacuguacaugaaaacacauuu

SEQ ID NO: 3309405 - RNA, 21 nt, Human
uacuguacaugaaaacacauu

SEQ ID NO: 3309406 - RNA, 18 nt, Human
uacuguaauuugugauac

SEQ ID NO: 3309407 - RNA, 20 nt, Human
uacuguaauuugugauacaa

SEQ ID NO: 3309408 - RNA, 19 nt, Human
uacuguaauuugugauaca

SEQ ID NO: 3309409 - RNA, 12 nt, Human
uacucuguguca

SEQ ID NO: 3309410 - RNA, 16 nt, Human
uacuggagaaaaugga

SEQ ID NO: 3309411 - RNA, 13 nt, Human
uacuacuccugua

SEQ ID NO: 3309412 - RNA, 17 nt, Human
uacuacuccuguaggaa

SEQ ID NO: 3309413 - RNA, 23 nt, Human
uacuauggcccuggccuagcaua

SEQ ID NO: 3309414 - RNA, 12 nt, Human
uacuauguauca

SEQ ID NO: 3309415 - RNA, 13 nt, Human
uacuauguaucaa

SEQ ID NO: 3309416 - RNA, 22 nt, Human
uacucuccuggaaauauuaaga

SEQ ID NO: 3309417 - RNA, 23 nt, Human
uacucuccuggaaauauuaagaa

SEQ ID NO: 3309418 - RNA, 18 nt, Human
uacgggaggguaaggcug

SEQ ID NO: 3309419 - RNA, 12 nt, Human
uacguacacauu

SEQ ID NO: 3309420 - RNA, 16 nt, Human
uacguugugcauuugg

SEQ ID NO: 3309421 - RNA, 15 nt, Human
uacguugugcauuug

SEQ ID NO: 3309422 - RNA, 13 nt, Human
uacguacacauuu

SEQ ID NO: 3309423 - RNA, 14 nt, Human
uacguugugcauuu

SEQ ID NO: 3309424 - RNA, 22 nt, Human
uacgccaggggaaaaucagccu

SEQ ID NO: 3309425 - RNA, 12 nt, Human
aaugcccagccc

SEQ ID NO: 3309426 - RNA, 11 nt, Human
aaugcccagcc

SEQ ID NO: 3309427 - RNA, 21 nt, Human
aauggacguguuaugacucca

SEQ ID NO: 3309428 - RNA, 20 nt, Human
aauggacuaacuugucuuug

SEQ ID NO: 3309429 - RNA, 23 nt, Human
aauggacguguuaugacuccaga

SEQ ID NO: 3309430 - RNA, 21 nt, Human
aauggaaaugggcagagcaga

SEQ ID NO: 3309431 - RNA, 20 nt, Human
aauggaaaugggcagagcag

SEQ ID NO: 3309432 - RNA, 16 nt, Human
uacaaugcugugcccu

SEQ ID NO: 3309433 - RNA, 21 nt, Human
aaugcacuuuguucuggcucu

SEQ ID NO: 3309434 - RNA, 17 nt, Human
aaugaccuuucaauagg

SEQ ID NO: 3309435 - RNA, 16 nt, Human
aaugaccuuucaauag

SEQ ID NO: 3309436 - RNA, 18 nt, Human
aaugaccuuucaauagga

SEQ ID NO: 3309437 - RNA, 21 nt, Human
uacaaugcugugcccuaaagu

SEQ ID NO: 3309438 - RNA, 20 nt, Human
aaugcacuuuguucuggcuc

SEQ ID NO: 3309439 - RNA, 22 nt, Human
aaugcacuuuguucuggcucuu

SEQ ID NO: 3309440 - RNA, 15 nt, Human
uacacuaaaagguga

SEQ ID NO: 3309441 - RNA, 19 nt, Human
uacacauuuuauuuuauua

SEQ ID NO: 3309442 - RNA, 22 nt, Human
uacacauuuuauuuuauuaugc

SEQ ID NO: 3309443 - RNA, 21 nt, Human
uacacauuuuauuuuauuaug

SEQ ID NO: 3309444 - RNA, 18 nt, Human
uacagaggccaugggccu

SEQ ID NO: 3309445 - RNA, 19 nt, Human
uacagacaaagcguggugg

SEQ ID NO: 3309446 - RNA, 22 nt, Human
uacagacaacaaaccuguuucu

SEQ ID NO: 3309447 - RNA, 12 nt, Human
aauggcagccuu

SEQ ID NO: 3309448 - RNA, 16 nt, Human
aauggcagccuuggca

SEQ ID NO: 3309449 - RNA, 21 nt, Human
aauguucucucuucuccaccu

SEQ ID NO: 3309450 - RNA, 12 nt, Human
uacauucuguua

SEQ ID NO: 3309451 - RNA, 13 nt, Human
uacauucuguuaa

SEQ ID NO: 3309452 - RNA, 16 nt, Human
uacaggugugagucac

SEQ ID NO: 3309453 - RNA, 23 nt, Human
uacauaaugcgugcauaccacuu

SEQ ID NO: 3309454 - RNA, 21 nt, Human
uacauaaugcgugcauaccac

SEQ ID NO: 3309455 - RNA, 24 nt, Human
uacauaaugcgugcauaccacuuu

SEQ ID NO: 3309456 - RNA, 19 nt, Human
aaugugaaaagaaaaauga

SEQ ID NO: 3309457 - RNA, 14 nt, Human
aaugugaaacugga

SEQ ID NO: 3309458 - RNA, 15 nt, Human
aaugugaaacuggau

SEQ ID NO: 3309459 - RNA, 19 nt, Human
aauguauguguaaguauuc

SEQ ID NO: 3309460 - RNA, 17 nt, Human
aaugugaaaagaaaaau

SEQ ID NO: 3309461 - RNA, 20 nt, Human
aauguauguguaaguauucu

SEQ ID NO: 3309462 - RNA, 13 nt, Human
aaugaaugucagu

SEQ ID NO: 3309463 - RNA, 15 nt, Human
aaugaccuuucaaua

SEQ ID NO: 3309464 - RNA, 22 nt, Human
aaugaaugucagugugacugau

SEQ ID NO: 3309465 - RNA, 17 nt, Human
aaugaaacauuuuguca

SEQ ID NO: 3309466 - RNA, 16 nt, Human
aaugaaagacuguaca

SEQ ID NO: 3309467 - RNA, 17 nt, Human
aaugaaagacuguacaa

SEQ ID NO: 3309468 - RNA, 17 nt, Human
aaugaaaccugugucuc

SEQ ID NO: 3309469 - RNA, 13 nt, Human
uaauguacugcau

SEQ ID NO: 3309470 - RNA, 18 nt, Human
uaaugucacaggcagguc

SEQ ID NO: 3309471 - RNA, 22 nt, Human
uaauagacaauuuauuauggca

SEQ ID NO: 3309472 - RNA, 18 nt, Human
uaauagacaauuuauuau

SEQ ID NO: 3309473 - RNA, 14 nt, Human
uaauacaccacuac

SEQ ID NO: 3309474 - RNA, 16 nt, Human
uaauacaccacuacau

SEQ ID NO: 3309475 - RNA, 16 nt, Human
uaauagacaauuuauu

SEQ ID NO: 3309476 - RNA, 14 nt, Human
uaauagacaauuua

SEQ ID NO: 3309477 - RNA, 19 nt, Human
uaauacaccacuacauucu

SEQ ID NO: 3309478 - RNA, 18 nt, Human
uaauacaccacuacauuc

SEQ ID NO: 3309479 - RNA, 17 nt, Human
uaaugaaugaaacauuu

SEQ ID NO: 3309480 - RNA, 15 nt, Human
aaucauuagguguga

SEQ ID NO: 3309481 - RNA, 23 nt, Human
aaucauuaggugugacugaauuu

SEQ ID NO: 3309482 - RNA, 17 nt, Human
aaucauuaggugugacu

SEQ ID NO: 3309483 - RNA, 19 nt, Human
uaaguauucuuauuuaaug

SEQ ID NO: 3309484 - RNA, 20 nt, Human
uaaguauucuuauuuaauga

SEQ ID NO: 3309485 - RNA, 17 nt, Human
uaaguacuauguaucaa

SEQ ID NO: 3309486 - RNA, 13 nt, Human
uaaguacuaugua

SEQ ID NO: 3309487 - RNA, 16 nt, Human
uaaguacuauguauca

SEQ ID NO: 3309488 - RNA, 18 nt, Human
uaagcacacuugacauca

SEQ ID NO: 3309489 - RNA, 22 nt, Human
uaagcuguuacugucuucagua

SEQ ID NO: 3309490 - RNA, 15 nt, Human
aauaugcacacauuu

SEQ ID NO: 3309491 - RNA, 22 nt, Human
aauaugcacacauuuuuuaaau

SEQ ID NO: 3309492 - RNA, 17 nt, Human
aauaugcacacauuuuu

SEQ ID NO: 3309493 - RNA, 16 nt, Human
aauaugcacacauuuu

SEQ ID NO: 3309494 - RNA, 15 nt, Human
uaagagaaaugagcu

SEQ ID NO: 3309495 - RNA, 16 nt, Human
uaacuuucugaaauaa

SEQ ID NO: 3309496 - RNA, 13 nt, Human
uaacuucacauau

SEQ ID NO: 3309497 - RNA, 21 nt, Human
uaacuucacauauugauuucc

SEQ ID NO: 3309498 - RNA, 17 nt, Human
uaacuuccaauuuacau

SEQ ID NO: 3309499 - RNA, 14 nt, Human
uaacuucaccauau

SEQ ID NO: 3309500 - RNA, 16 nt, Human
aauaguggugugauuu

SEQ ID NO: 3309501 - RNA, 22 nt, Human
aauaguggugugauuuggggau

SEQ ID NO: 3309502 - RNA, 21 nt, Human
aauaguucagguaacaggcag

SEQ ID NO: 3309503 - RNA, 13 nt, Human
aauaguuggcuag

SEQ ID NO: 3309504 - RNA, 16 nt, Human
uaacauggaaguacua

SEQ ID NO: 3309505 - RNA, 18 nt, Human
uaacauggacaugaucuu

SEQ ID NO: 3309506 - RNA, 23 nt, Human
uaacauggacaugaucuucuuua

SEQ ID NO: 3309507 - RNA, 16 nt, Human
uccagugaggcucugc

SEQ ID NO: 3309508 - RNA, 15 nt, Human
uccagugaggcucug

SEQ ID NO: 3309509 - RNA, 23 nt, Human
uccagugaggcucugcccuuggu

SEQ ID NO: 3309510 - RNA, 22 nt, Human
uccagugaggcucugcccuugg

SEQ ID NO: 3309511 - RNA, 18 nt, Human
uccaguaucuugaagacu

SEQ ID NO: 3309512 - RNA, 16 nt, Human
uccaguaucuugaaga

SEQ ID NO: 3309513 - RNA, 15 nt, Human
uccaguaucuugaag

SEQ ID NO: 3309514 - RNA, 14 nt, Human
uccaguaucuugaa

SEQ ID NO: 3309515 - RNA, 18 nt, Human
acggcuuuuacuuaaacc

SEQ ID NO: 3309516 - RNA, 16 nt, Human
acggcucacugcagcc

SEQ ID NO: 3309517 - RNA, 15 nt, Human
acggcucacugcagc

SEQ ID NO: 3309518 - RNA, 17 nt, Human
acggcucacugcagccu

SEQ ID NO: 3309519 - RNA, 18 nt, Human
acggcucacugcagccuc

SEQ ID NO: 3309520 - RNA, 12 nt, Human
acggccaggcca

SEQ ID NO: 3309521 - RNA, 13 nt, Human
acgcuggaccuug

SEQ ID NO: 3309522 - RNA, 23 nt, Human
acggagucccaccuuggcugcag

SEQ ID NO: 3309523 - RNA, 21 nt, Human
acggagucccaccuuggcugc

SEQ ID NO: 3309524 - RNA, 17 nt, Human
acgcuggagugcaguga

SEQ ID NO: 3309525 - RNA, 20 nt, Human
acgcuggaccuugaacuggg

SEQ ID NO: 3309526 - RNA, 23 nt, Human
acgcuggaccuugaacuggguac

SEQ ID NO: 3309527 - RNA, 15 nt, Human
acgcuggagugcagu

SEQ ID NO: 3309528 - RNA, 16 nt, Human
acgcuggagugcagug

SEQ ID NO: 3309529 - RNA, 18 nt, Human
acgcuacccgggaagggg

SEQ ID NO: 3309530 - RNA, 21 nt, Human
acgcuacccgggaagggggcu

SEQ ID NO: 3309531 - RNA, 14 nt, Human
acgaauauugcuga

SEQ ID NO: 3309532 - RNA, 21 nt, Human
acgaauauugcugauggugca

SEQ ID NO: 3309533 - RNA, 13 nt, Human
accuuuuuuauac

SEQ ID NO: 3309534 - RNA, 20 nt, Human
accuugaacuggguacuugu

SEQ ID NO: 3309535 - RNA, 18 nt, Human
accuuuguccccaccgca

SEQ ID NO: 3309536 - RNA, 17 nt, Human
accuuuguccccaccgc

SEQ ID NO: 3309537 - RNA, 18 nt, Human
acgaauauugcugauggu

SEQ ID NO: 3309538 - RNA, 15 nt, Human
acgaauauugcugau

SEQ ID NO: 3309539 - RNA, 23 nt, Human
uccaggcugggagagccuuccag

SEQ ID NO: 3309540 - RNA, 22 nt, Human
accuuuuuuauacauaaacaag

SEQ ID NO: 3309541 - RNA, 10 nt, Human
uccaggcucc

SEQ ID NO: 3309542 - RNA, 12 nt, Human
uccaggcuccuu

SEQ ID NO: 3309543 - RNA, 21 nt, Human
uccaggcugggagagccuucc

SEQ ID NO: 3309544 - RNA, 20 nt, Human
uccaggcugggagagccuuc

SEQ ID NO: 3309545 - RNA, 22 nt, Human
uccaggagcagccacauuccug

SEQ ID NO: 3309546 - RNA, 13 nt, Human
uccagacacaugu

SEQ ID NO: 3309547 - RNA, 15 nt, Human
uccagaauuucccaa

SEQ ID NO: 3309548 - RNA, 14 nt, Human
uccagaauuuccca

SEQ ID NO: 3309549 - RNA, 17 nt, Human
acgguuuuacugcagcu

SEQ ID NO: 3309550 - RNA, 21 nt, Human
acguggcugcuucaaggaucc

SEQ ID NO: 3309551 - RNA, 19 nt, Human
acguggcugcuucaaggau

SEQ ID NO: 3309552 - RNA, 18 nt, Human
acguggcugcuucaagga

SEQ ID NO: 3309553 - RNA, 17 nt, Human
acguggcugcuucaagg

SEQ ID NO: 3309554 - RNA, 13 nt, Human
acguugugcauuu

SEQ ID NO: 3309555 - RNA, 15 nt, Human
acguugugcauuugg

SEQ ID NO: 3309556 - RNA, 14 nt, Human
acguugugcauuug

SEQ ID NO: 3309557 - RNA, 16 nt, Human
acguuucuaaaggcua

SEQ ID NO: 3309558 - RNA, 15 nt, Human
acguuucuaaaggcu

SEQ ID NO: 3309559 - RNA, 22 nt, Human
acguuucuaaaggcuaccuuug

SEQ ID NO: 3309560 - RNA, 18 nt, Human
ucccagauacuugggggg

SEQ ID NO: 3309561 - RNA, 12 nt, Human
ucccagccccaa

SEQ ID NO: 3309562 - RNA, 16 nt, Human
ucccagauacuugggg

SEQ ID NO: 3309563 - RNA, 18 nt, Human
acuauagccuaggugaca

SEQ ID NO: 3309564 - RNA, 20 nt, Human
acuauagccuaggugacaga

SEQ ID NO: 3309565 - RNA, 22 nt, Human
acuauagccuaggugacagagu

SEQ ID NO: 3309566 - RNA, 16 nt, Human
acuaucuaaauguuga

SEQ ID NO: 3309567 - RNA, 21 nt, Human
acuaucuaaauguugaaagau

SEQ ID NO: 3309568 - RNA, 14 nt, Human
acuauguugcccag

SEQ ID NO: 3309569 - RNA, 22 nt, Human
acuauggcccuggccuagcaua

SEQ ID NO: 3309570 - RNA, 15 nt, Human
acuauguugcccagg

SEQ ID NO: 3309571 - RNA, 16 nt, Human
acuauguugcccaggc

SEQ ID NO: 3309572 - RNA, 16 nt, Human
acucaaugcacugaca

SEQ ID NO: 3309573 - RNA, 16 nt, Human
ucccccagccccaucc

SEQ ID NO: 3309574 - RNA, 15 nt, Human
ucccccagccccauc

SEQ ID NO: 3309575 - RNA, 13 nt, Human
ucccccagcccca

SEQ ID NO: 3309576 - RNA, 11 nt, Human
ucccccagccc

SEQ ID NO: 3309577 - RNA, 21 nt, Human
uccccaggaggccagccuuga

SEQ ID NO: 3309578 - RNA, 20 nt, Human
uccccaggaggccagccuug

SEQ ID NO: 3309579 - RNA, 17 nt, Human
uccccaggaggccagcc

SEQ ID NO: 3309580 - RNA, 12 nt, Human
uccccacccuga

SEQ ID NO: 3309581 - RNA, 18 nt, Human
uccccaggaggccagccu

SEQ ID NO: 3309582 - RNA, 16 nt, Human
uccccaccgcagacag

SEQ ID NO: 3309583 - RNA, 15 nt, Human
uccccaccgcagaca

SEQ ID NO: 3309584 - RNA, 23 nt, Human
uccccacccugaaagcccugagc

SEQ ID NO: 3309585 - RNA, 13 nt, Human
acucaccccagcc

SEQ ID NO: 3309586 - RNA, 16 nt, Human
acucaccccagcccca

SEQ ID NO: 3309587 - RNA, 15 nt, Human
acucaccccagcccc

SEQ ID NO: 3309588 - RNA, 14 nt, Human
acucaccccagccc

SEQ ID NO: 3309589 - RNA, 14 nt, Human
acuccugcaggcag

SEQ ID NO: 3309590 - RNA, 12 nt, Human
acuccugcaggc

SEQ ID NO: 3309591 - RNA, 22 nt, Human
acuccugcaggcagccaggcca

SEQ ID NO: 3309592 - RNA, 16 nt, Human
acuccugcaggcagcc

SEQ ID NO: 3309593 - RNA, 15 nt, Human
acuccugcaggcagc

SEQ ID NO: 3309594 - RNA, 11 nt, Human
acuccuggccu

SEQ ID NO: 3309595 - RNA, 17 nt, Human
ucccugguggcagcuca

SEQ ID NO: 3309596 - RNA, 16 nt, Human
ucccugguggcagcuc

SEQ ID NO: 3309597 - RNA, 21 nt, Human
ucccugguggcagcucaccuc

SEQ ID NO: 3309598 - RNA, 20 nt, Human
ucccugguggcagcucaccu

SEQ ID NO: 3309599 - RNA, 19 nt, Human
ucccugguggcagcucacc

SEQ ID NO: 3309600 - RNA, 18 nt, Human
ucccugguggcagcucac

SEQ ID NO: 3309601 - RNA, 18 nt, Human
ucccuuugacgccauccc

SEQ ID NO: 3309602 - RNA, 16 nt, Human
ucccuuugacgccauc

SEQ ID NO: 3309603 - RNA, 20 nt, Human
ucccuuggauuguccccgac

SEQ ID NO: 3309604 - RNA, 19 nt, Human
ucccuuggauuguccccga

SEQ ID NO: 3309605 - RNA, 22 nt, Human
ucccugguggcagcucaccucu

SEQ ID NO: 3309606 - RNA, 19 nt, Human
ucccuuuuuuggcugcuga

SEQ ID NO: 3309607 - RNA, 17 nt, Human
ucccuuuuuuggcugcu

SEQ ID NO: 3309608 - RNA, 19 nt, Human
ucccuuugacgccauccca

SEQ ID NO: 3309609 - RNA, 22 nt, Human
ucccuuuuuuggcugcugaagg

SEQ ID NO: 3309610 - RNA, 20 nt, Human
ucccuuuuuuggcugcugaa

SEQ ID NO: 3309611 - RNA, 23 nt, Human
ucccuuuuuuggcugcugaaggc

SEQ ID NO: 3309612 - RNA, 12 nt, Human
acuccuggccuc

SEQ ID NO: 3309613 - RNA, 13 nt, Human
uccuaggcauuug

SEQ ID NO: 3309614 - RNA, 13 nt, Human
acuccuggccuca

SEQ ID NO: 3309615 - RNA, 14 nt, Human
acuccuggccucaa

SEQ ID NO: 3309616 - RNA, 15 nt, Human
uccuacucuguguca

SEQ ID NO: 3309617 - RNA, 12 nt, Human
uccuacucugug

SEQ ID NO: 3309618 - RNA, 13 nt, Human
uccuacucugugu

SEQ ID NO: 3309619 - RNA, 14 nt, Human
uccuacucuguguc

SEQ ID NO: 3309620 - RNA, 15 nt, Human
acucuggcagcucag

SEQ ID NO: 3309621 - RNA, 13 nt, Human
acucuggcagcuc

SEQ ID NO: 3309622 - RNA, 22 nt, Human
acucugagacucgcgacaaugc

SEQ ID NO: 3309623 - RNA, 11 nt, Human
acucugagacu

SEQ ID NO: 3309624 - RNA, 23 nt, Human
acucuccuuggugucgggcauga

SEQ ID NO: 3309625 - RNA, 16 nt, Human
acucuccuuggugucg

SEQ ID NO: 3309626 - RNA, 12 nt, Human
acucuccucugc

SEQ ID NO: 3309627 - RNA, 14 nt, Human
acucuccucugcug

SEQ ID NO: 3309628 - RNA, 13 nt, Human
acucuccucugcu

SEQ ID NO: 3309629 - RNA, 21 nt, Human
acucuccucugcugcuggcug

SEQ ID NO: 3309630 - RNA, 15 nt, Human
acucuccuugguguc

SEQ ID NO: 3309631 - RNA, 18 nt, Human
acucuccuggaaauauua

SEQ ID NO: 3309632 - RNA, 17 nt, Human
acucuccuccagaguca

SEQ ID NO: 3309633 - RNA, 14 nt, Human
acucuccuccagag

SEQ ID NO: 3309634 - RNA, 24 nt, Human
acuccuugaaaacacuguucucug

SEQ ID NO: 3309635 - RNA, 23 nt, Human
acuccuugaaaacacuguucucu

SEQ ID NO: 3309636 - RNA, 14 nt, Human
acucuugaccucag

SEQ ID NO: 3309637 - RNA, 15 nt, Human
acucuugaccucagg

SEQ ID NO: 3309638 - RNA, 16 nt, Human
acucuugaccucaggu

SEQ ID NO: 3309639 - RNA, 23 nt, Human
uccucauacccacccccacccaa

SEQ ID NO: 3309640 - RNA, 22 nt, Human
uccucauaguaugguggcuggg

SEQ ID NO: 3309641 - RNA, 22 nt, Human
uccucauacccacccccaccca

SEQ ID NO: 3309642 - RNA, 23 nt, Human
acugagacagcccgggcucugcc

SEQ ID NO: 3309643 - RNA, 22 nt, Human
acugagacagcccgggcucugc

SEQ ID NO: 3309644 - RNA, 21 nt, Human
acugagacagcccgggcucug

SEQ ID NO: 3309645 - RNA, 18 nt, Human
acugagacagcccgggcu

SEQ ID NO: 3309646 - RNA, 15 nt, Human
acugagacagcccgg

SEQ ID NO: 3309647 - RNA, 22 nt, Human
uccucuuuggucuacacugugc

SEQ ID NO: 3309648 - RNA, 19 nt, Human
uccucuuuccaucuacccu

SEQ ID NO: 3309649 - RNA, 21 nt, Human
uccucuuuggucuacacugug

SEQ ID NO: 3309650 - RNA, 19 nt, Human
uccucuuuggucuacacug

SEQ ID NO: 3309651 - RNA, 11 nt, Human
uccucccuccc

SEQ ID NO: 3309652 - RNA, 14 nt, Human
uccucccucccucu

SEQ ID NO: 3309653 - RNA, 11 nt, Human
uccucuuucca

SEQ ID NO: 3309654 - RNA, 12 nt, Human
uccucuuuccau

SEQ ID NO: 3309655 - RNA, 19 nt, Human
uccugaugcuucuucagag

SEQ ID NO: 3309656 - RNA, 20 nt, Human
uccugaugcuucuucagaga

SEQ ID NO: 3309657 - RNA, 21 nt, Human
acugcacuauagccuagguga

SEQ ID NO: 3309658 - RNA, 14 nt, Human
acugcacuccagcc

SEQ ID NO: 3309659 - RNA, 17 nt, Human
acugcacuccagccugg

SEQ ID NO: 3309660 - RNA, 18 nt, Human
acugcacuccagccuggg

SEQ ID NO: 3309661 - RNA, 20 nt, Human
acugcacuccagccugggug

SEQ ID NO: 3309662 - RNA, 19 nt, Human
acugcacuccagccugggu

SEQ ID NO: 3309663 - RNA, 21 nt, Human
acugauaaagaugagugagca

SEQ ID NO: 3309664 - RNA, 13 nt, Human
acugauaaagaug

SEQ ID NO: 3309665 - RNA, 14 nt, Human
acugcaccgggcca

SEQ ID NO: 3309666 - RNA, 16 nt, Human
acugcaccgggccaca

SEQ ID NO: 3309667 - RNA, 20 nt, Human
acugcacuauagccuaggug

SEQ ID NO: 3309668 - RNA, 15 nt, Human
uccuggaaauauuaa

SEQ ID NO: 3309669 - RNA, 12 nt, Human
uccugggaguga

SEQ ID NO: 3309670 - RNA, 14 nt, Human
uccugggagugagc

SEQ ID NO: 3309671 - RNA, 17 nt, Human
uccugggagugagcugg

SEQ ID NO: 3309672 - RNA, 21 nt, Human
uccugccucgaacuggcugca

SEQ ID NO: 3309673 - RNA, 14 nt, Human
uccugcaggcagcc

SEQ ID NO: 3309674 - RNA, 13 nt, Human
uccugcaggcagc

SEQ ID NO: 3309675 - RNA, 12 nt, Human
uccugcaggcag

SEQ ID NO: 3309676 - RNA, 21 nt, Human
uccugcugcaguugccaguca

SEQ ID NO: 3309677 - RNA, 21 nt, Human
acaugcuacacacugcauguu

SEQ ID NO: 3309678 - RNA, 15 nt, Human
acaugcuacacacug

SEQ ID NO: 3309679 - RNA, 15 nt, Human
acauguaauuaagua

SEQ ID NO: 3309680 - RNA, 17 nt, Human
acauguaauuaaguacu

SEQ ID NO: 3309681 - RNA, 19 nt, Human
acauguaauuaaguacuau

SEQ ID NO: 3309682 - RNA, 21 nt, Human
acauguaauuaaguacuaugu

SEQ ID NO: 3309683 - RNA, 22 nt, Human
acauguaauuaaguacuaugua

SEQ ID NO: 3309684 - RNA, 14 nt, Human
acauuccugaugcu

SEQ ID NO: 3309685 - RNA, 15 nt, Human
acauguccaagaagc

SEQ ID NO: 3309686 - RNA, 23 nt, Human
acauguaauuaaguacuauguau

SEQ ID NO: 3309687 - RNA, 13 nt, Human
ucaaauuucuaaa

SEQ ID NO: 3309688 - RNA, 20 nt, Human
ucaacugcaucaagauguga

SEQ ID NO: 3309689 - RNA, 14 nt, Human
ucaaccagcagaug

SEQ ID NO: 3309690 - RNA, 22 nt, Human
ucaaguccucuuuucugagagg

SEQ ID NO: 3309691 - RNA, 20 nt, Human
acauuuuauuuuauuaugca

SEQ ID NO: 3309692 - RNA, 19 nt, Human
acauuuuauuuuauuaugc

SEQ ID NO: 3309693 - RNA, 14 nt, Human
acauuuuauuuuau

SEQ ID NO: 3309694 - RNA, 18 nt, Human
acauuuuauuuuauuaug

SEQ ID NO: 3309695 - RNA, 17 nt, Human
acauuuuuuaaaugcac

SEQ ID NO: 3309696 - RNA, 16 nt, Human
acauuuuuuaaaugca

SEQ ID NO: 3309697 - RNA, 14 nt, Human
acauuuuuuaaaug

SEQ ID NO: 3309698 - RNA, 19 nt, Human
acauuuuuaagugcugcau

SEQ ID NO: 3309699 - RNA, 23 nt, Human
acauuuuuaagugcugcauuuaa

SEQ ID NO: 3309700 - RNA, 22 nt, Human
acauuuuuaagugcugcauuua

SEQ ID NO: 3309701 - RNA, 21 nt, Human
acauuuuuaagugcugcauuu

SEQ ID NO: 3309702 - RNA, 10 nt, Human
ucacuugagu

SEQ ID NO: 3309703 - RNA, 17 nt, Human
accaguguuguggauuu

SEQ ID NO: 3309704 - RNA, 15 nt, Human
accaguguuguggau

SEQ ID NO: 3309705 - RNA, 23 nt, Human
ucacuguugcccaggcuggcgug

SEQ ID NO: 3309706 - RNA, 19 nt, Human
ucacuguugcccaggcugg

SEQ ID NO: 3309707 - RNA, 15 nt, Human
ucacugcagccucaa

SEQ ID NO: 3309708 - RNA, 13 nt, Human
ucacugcagccuc

SEQ ID NO: 3309709 - RNA, 16 nt, Human
ucacugagacagcccg

SEQ ID NO: 3309710 - RNA, 14 nt, Human
ucacugcagccuca

SEQ ID NO: 3309711 - RNA, 22 nt, Human
ucacugagacagcccgggcucu

SEQ ID NO: 3309712 - RNA, 21 nt, Human
ucacugagacagcccgggcuc

SEQ ID NO: 3309713 - RNA, 17 nt, Human
ucacugagacagcccgg

SEQ ID NO: 3309714 - RNA, 22 nt, Human
accagcgugugacuacuccccc

SEQ ID NO: 3309715 - RNA, 15 nt, Human
accacuacauucugu

SEQ ID NO: 3309716 - RNA, 16 nt, Human
accacuacauucuguu

SEQ ID NO: 3309717 - RNA, 17 nt, Human
accacuacauucuguua

SEQ ID NO: 3309718 - RNA, 13 nt, Human
ucacagccucuga

SEQ ID NO: 3309719 - RNA, 20 nt, Human
ucacaguucucuccuucuuc

SEQ ID NO: 3309720 - RNA, 16 nt, Human
ucacaguucucuccuu

SEQ ID NO: 3309721 - RNA, 20 nt, Human
ucacagaugggugcuuggag

SEQ ID NO: 3309722 - RNA, 17 nt, Human
ucacaaaggaugcccaa

SEQ ID NO: 3309723 - RNA, 17 nt, Human
accacaucuugcucugc

SEQ ID NO: 3309724 - RNA, 18 nt, Human
accacaucuugcucugcu

SEQ ID NO: 3309725 - RNA, 19 nt, Human
accacaucuugcucugcug

SEQ ID NO: 3309726 - RNA, 15 nt, Human
accaccacacccagc

SEQ ID NO: 3309727 - RNA, 20 nt, Human
accaccacacccagcccacu

SEQ ID NO: 3309728 - RNA, 18 nt, Human
accacaugugcacaugca

SEQ ID NO: 3309729 - RNA, 16 nt, Human
accacaucuugcucug

SEQ ID NO: 3309730 - RNA, 23 nt, Human
ucauccacugugccaugugccag

SEQ ID NO: 3309731 - RNA, 16 nt, Human
accgcagacaggacca

SEQ ID NO: 3309732 - RNA, 12 nt, Human
accgcagacagg

SEQ ID NO: 3309733 - RNA, 20 nt, Human
accucccacaaaggagagcu

SEQ ID NO: 3309734 - RNA, 14 nt, Human
ucauaaccuagccu

SEQ ID NO: 3309735 - RNA, 15 nt, Human
ucauaguaugguggc

SEQ ID NO: 3309736 - RNA, 18 nt, Human
ucauaguaugguggcugg

SEQ ID NO: 3309737 - RNA, 19 nt, Human
ucauaguaugguggcuggg

SEQ ID NO: 3309738 - RNA, 18 nt, Human
ucauauaagauucauauu

SEQ ID NO: 3309739 - RNA, 21 nt, Human
ucauaguaugguggcuggguu

SEQ ID NO: 3309740 - RNA, 22 nt, Human
ucauauuuacuucuuauacauu

SEQ ID NO: 3309741 - RNA, 15 nt, Human
ucauauuuacuucuu

SEQ ID NO: 3309742 - RNA, 23 nt, Human
ucauauuuacuucuuauacauuu

SEQ ID NO: 3309743 - RNA, 12 nt, Human
ucagugccacua

SEQ ID NO: 3309744 - RNA, 16 nt, Human
ucagugccaaaaacaa

SEQ ID NO: 3309745 - RNA, 19 nt, Human
accgaaaacguggcugcuu

SEQ ID NO: 3309746 - RNA, 17 nt, Human
accgaaaacguggcugc

SEQ ID NO: 3309747 - RNA, 10 nt, Human
ucagugccuu

SEQ ID NO: 3309748 - RNA, 9 nt, Human
ucagugccu

SEQ ID NO: 3309749 - RNA, 15 nt, Human
ucagugccuuaugga

SEQ ID NO: 3309750 - RNA, 14 nt, Human
ucagugccuuaugg

SEQ ID NO: 3309751 - RNA, 12 nt, Human
ucagugccuuau

SEQ ID NO: 3309752 - RNA, 11 nt, Human
ucagugccuua

SEQ ID NO: 3309753 - RNA, 16 nt, Human
ucaguggcagcugcuu

SEQ ID NO: 3309754 - RNA, 12 nt, Human
ucaguggcagcu

SEQ ID NO: 3309755 - RNA, 11 nt, Human
ucaguggcagc

SEQ ID NO: 3309756 - RNA, 16 nt, Human
ucagugccuuauggaa

SEQ ID NO: 3309757 - RNA, 13 nt, Human
acccgggaagggg

SEQ ID NO: 3309758 - RNA, 12 nt, Human
acccgggaaggg

SEQ ID NO: 3309759 - RNA, 22 nt, Human
acccggccccugcugguucagg

SEQ ID NO: 3309760 - RNA, 17 nt, Human
acccggccccugcuggu

SEQ ID NO: 3309761 - RNA, 20 nt, Human
acccggccccugcugguuca

SEQ ID NO: 3309762 - RNA, 23 nt, Human
ucagguaacaggcagauacagga

SEQ ID NO: 3309763 - RNA, 21 nt, Human
ucagguaacaggcagauacag

SEQ ID NO: 3309764 - RNA, 22 nt, Human
ucagguaacaggcagauacagg

SEQ ID NO: 3309765 - RNA, 14 nt, Human
acccggccccugcu

SEQ ID NO: 3309766 - RNA, 15 nt, Human
acccggccccugcug

SEQ ID NO: 3309767 - RNA, 16 nt, Human
acccggccccugcugg

SEQ ID NO: 3309768 - RNA, 20 nt, Human
ucaggccaggcccucugccc

SEQ ID NO: 3309769 - RNA, 22 nt, Human
ucaggccaggcccucugcccac

SEQ ID NO: 3309770 - RNA, 21 nt, Human
ucaggccaggcccucugccca

SEQ ID NO: 3309771 - RNA, 20 nt, Human
ucagcuuguaaauagcucag

SEQ ID NO: 3309772 - RNA, 14 nt, Human
ucagcuccagcuca

SEQ ID NO: 3309773 - RNA, 21 nt, Human
ucagcuuguaaauagcucagg

SEQ ID NO: 3309774 - RNA, 22 nt, Human
ucagcuuguaaauagcucaggu

SEQ ID NO: 3309775 - RNA, 23 nt, Human
ucaggccaggcccucugcccacu

SEQ ID NO: 3309776 - RNA, 16 nt, Human
ucaggguuggccccug

SEQ ID NO: 3309777 - RNA, 19 nt, Human
ucagggucccugguggcag

SEQ ID NO: 3309778 - RNA, 18 nt, Human
ucagggucccugguggca

SEQ ID NO: 3309779 - RNA, 22 nt, Human
acccugcccugugggcccccaa

SEQ ID NO: 3309780 - RNA, 17 nt, Human
acccugcccugugggcc

SEQ ID NO: 3309781 - RNA, 14 nt, Human
acccugcccugugg

SEQ ID NO: 3309782 - RNA, 15 nt, Human
acccugcccuguggg

SEQ ID NO: 3309783 - RNA, 16 nt, Human
acccugaggcccagag

SEQ ID NO: 3309784 - RNA, 15 nt, Human
acccugaggcccaga

SEQ ID NO: 3309785 - RNA, 15 nt, Human
accgaaaacguggcu

SEQ ID NO: 3309786 - RNA, 17 nt, Human
acccuugccgucuaccu

SEQ ID NO: 3309787 - RNA, 23 nt, Human
acccuuguggucccaccccacac

SEQ ID NO: 3309788 - RNA, 20 nt, Human
acccuuguggucccacccca

SEQ ID NO: 3309789 - RNA, 18 nt, Human
acccugaaagcccugagc

SEQ ID NO: 3309790 - RNA, 16 nt, Human
acccugaaagcccuga

SEQ ID NO: 3309791 - RNA, 14 nt, Human
acccugaggcccag

SEQ ID NO: 3309792 - RNA, 13 nt, Human
acccugaggccca

SEQ ID NO: 3309793 - RNA, 15 nt, Human
ucagcaaaagaugcu

SEQ ID NO: 3309794 - RNA, 12 nt, Human
ucagauuugaac

SEQ ID NO: 3309795 - RNA, 21 nt, Human
ucagauuugaacucuucaauc

SEQ ID NO: 3309796 - RNA, 17 nt, Human
accccacacacgccaga

SEQ ID NO: 3309797 - RNA, 22 nt, Human
accccagccccaaaacucuccu

SEQ ID NO: 3309798 - RNA, 13 nt, Human
accccagccccaa

SEQ ID NO: 3309799 - RNA, 19 nt, Human
acccaggagccccgaggcc

SEQ ID NO: 3309800 - RNA, 23 nt, Human
acccaggagccccgaggccuucu

SEQ ID NO: 3309801 - RNA, 18 nt, Human
accccaucucuacaaaaa

SEQ ID NO: 3309802 - RNA, 18 nt, Human
ucagcggggacagcuccu

SEQ ID NO: 3309803 - RNA, 19 nt, Human
ucagcggggacagcuccuu

SEQ ID NO: 3309804 - RNA, 20 nt, Human
ucagcggggacagcuccuuc

SEQ ID NO: 3309805 - RNA, 21 nt, Human
ucagcggggacagcuccuucu

SEQ ID NO: 3309806 - RNA, 23 nt, Human
ucagcggggacagcuccuucugu

SEQ ID NO: 3309807 - RNA, 12 nt, Human
ucagcuccagcu

SEQ ID NO: 3309808 - RNA, 23 nt, Human
agaaguuucugccgcagcccugc

SEQ ID NO: 3309809 - RNA, 22 nt, Human
agaaguuucugccgcagcccug

SEQ ID NO: 3309810 - RNA, 21 nt, Human
agaaguuucugccgcagcccu

SEQ ID NO: 3309811 - RNA, 22 nt, Human
ucugugaaaggaaagagggagg

SEQ ID NO: 3309812 - RNA, 12 nt, Human
ucuguuggccag

SEQ ID NO: 3309813 - RNA, 17 nt, Human
ucuguuggccaguguga

SEQ ID NO: 3309814 - RNA, 13 nt, Human
ucuguucuuucca

SEQ ID NO: 3309815 - RNA, 22 nt, Human
ucuguucuuuccaaaguacacu

SEQ ID NO: 3309816 - RNA, 12 nt, Human
agacacaggccc

SEQ ID NO: 3309817 - RNA, 13 nt, Human
agacacaggcccg

SEQ ID NO: 3309818 - RNA, 17 nt, Human
agacaccuugacagggc

SEQ ID NO: 3309819 - RNA, 18 nt, Human
agacaccuugacagggca

SEQ ID NO: 3309820 - RNA, 16 nt, Human
agacacauguccaaga

SEQ ID NO: 3309821 - RNA, 16 nt, Human
agacaggaccagggau

SEQ ID NO: 3309822 - RNA, 15 nt, Human
ucugacacacagcuc

SEQ ID NO: 3309823 - RNA, 13 nt, Human
ucugacacacagc

SEQ ID NO: 3309824 - RNA, 14 nt, Human
ucugacacacagcu

SEQ ID NO: 3309825 - RNA, 12 nt, Human
ucugacacacag

SEQ ID NO: 3309826 - RNA, 21 nt, Human
ucugaaggacauugcggacag

SEQ ID NO: 3309827 - RNA, 13 nt, Human
ucugcacuccccu

SEQ ID NO: 3309828 - RNA, 17 nt, Human
ucugcagcaauaaagca

SEQ ID NO: 3309829 - RNA, 16 nt, Human
ucugcacuccccugcu

SEQ ID NO: 3309830 - RNA, 15 nt, Human
ucugcacuccccugc

SEQ ID NO: 3309831 - RNA, 14 nt, Human
ucugcacuccccug

SEQ ID NO: 3309832 - RNA, 15 nt, Human
agaaauguacagcaa

SEQ ID NO: 3309833 - RNA, 14 nt, Human
agaaauguacagca

SEQ ID NO: 3309834 - RNA, 21 nt, Human
ucugagacucgcgacaaugca

SEQ ID NO: 3309835 - RNA, 17 nt, Human
ucugaucauccacugug

SEQ ID NO: 3309836 - RNA, 21 nt, Human
ucugaucauccacugugccau

SEQ ID NO: 3309837 - RNA, 17 nt, Human
ucugcccacucccugca

SEQ ID NO: 3309838 - RNA, 16 nt, Human
ucugcccacucccugc

SEQ ID NO: 3309839 - RNA, 22 nt, Human
agaagcccaggaaaggcuccag

SEQ ID NO: 3309840 - RNA, 21 nt, Human
agaagcccaggaaaggcucca

SEQ ID NO: 3309841 - RNA, 20 nt, Human
agaagcccaggaaaggcucc

SEQ ID NO: 3309842 - RNA, 18 nt, Human
agaagcccaggaaaggcu

SEQ ID NO: 3309843 - RNA, 16 nt, Human
agaagcccaggaaagg

SEQ ID NO: 3309844 - RNA, 12 nt, Human
agaagcccagga

SEQ ID NO: 3309845 - RNA, 18 nt, Human
agaagauuuugaaauuuu

SEQ ID NO: 3309846 - RNA, 15 nt, Human
ucugccgcagcccug

SEQ ID NO: 3309847 - RNA, 14 nt, Human
ucugccgcagcccu

SEQ ID NO: 3309848 - RNA, 19 nt, Human
ucugcccuccaagaccuuc

SEQ ID NO: 3309849 - RNA, 18 nt, Human
ucugcccuccaagaccuu

SEQ ID NO: 3309850 - RNA, 21 nt, Human
ucugcccacucccugcaaccu

SEQ ID NO: 3309851 - RNA, 18 nt, Human
ucugcccacucccugcaa

SEQ ID NO: 3309852 - RNA, 21 nt, Human
ucugccugcccaggccccugc

SEQ ID NO: 3309853 - RNA, 22 nt, Human
ucugccugcccaggccccugcc

SEQ ID NO: 3309854 - RNA, 22 nt, Human
ucugccgcagcccugcagaggg

SEQ ID NO: 3309855 - RNA, 23 nt, Human
ucugcccuugguuaggcauugug

SEQ ID NO: 3309856 - RNA, 17 nt, Human
ucugcucacauaucugu

SEQ ID NO: 3309857 - RNA, 19 nt, Human
ucugcucacauaucuguca

SEQ ID NO: 3309858 - RNA, 20 nt, Human
ucugcucacauaucugucau

SEQ ID NO: 3309859 - RNA, 13 nt, Human
ucugcuucagccu

SEQ ID NO: 3309860 - RNA, 14 nt, Human
ucugcuucagccuc

SEQ ID NO: 3309861 - RNA, 15 nt, Human
ucugcuucagccucc

SEQ ID NO: 3309862 - RNA, 22 nt, Human
ucuaguuguuugauucagacag

SEQ ID NO: 3309863 - RNA, 23 nt, Human
ucuaguuguuugauucagacagc

SEQ ID NO: 3309864 - RNA, 21 nt, Human
ucuaguuugauuaaauucuug

SEQ ID NO: 3309865 - RNA, 18 nt, Human
ucuagcauggcugccaau

SEQ ID NO: 3309866 - RNA, 23 nt, Human
ucuaugggacucaaugcacugac

SEQ ID NO: 3309867 - RNA, 17 nt, Human
ucucacuauguugccca

SEQ ID NO: 3309868 - RNA, 19 nt, Human
ucucacuauguugcccagg

SEQ ID NO: 3309869 - RNA, 16 nt, Human
ucucacuauguugccc

SEQ ID NO: 3309870 - RNA, 20 nt, Human
acuuaaauaaugugaaacug

SEQ ID NO: 3309871 - RNA, 13 nt, Human
acuuaagcacacu

SEQ ID NO: 3309872 - RNA, 19 nt, Human
acuuaaucuaaauggaacc

SEQ ID NO: 3309873 - RNA, 17 nt, Human
acuuaaucuaaauggaa

SEQ ID NO: 3309874 - RNA, 16 nt, Human
acuuacacuuuaugca

SEQ ID NO: 3309875 - RNA, 22 nt, Human
acuuaaucuaaauggaaccacu

SEQ ID NO: 3309876 - RNA, 15 nt, Human
acuuagguguggggg

SEQ ID NO: 3309877 - RNA, 22 nt, Human
acuuacuguacaugaaaacaca

SEQ ID NO: 3309878 - RNA, 17 nt, Human
acuuacacuuuaugcac

SEQ ID NO: 3309879 - RNA, 16 nt, Human
acuuacuguacaugaa

SEQ ID NO: 3309880 - RNA, 21 nt, Human
acuuacuguacaugaaaacac

SEQ ID NO: 3309881 - RNA, 18 nt, Human
uccugggagugagcuggu

SEQ ID NO: 3309882 - RNA, 21 nt, Human
ucuacagaggccaugggccuc

SEQ ID NO: 3309883 - RNA, 19 nt, Human
ucuacccagcgagcccugg

SEQ ID NO: 3309884 - RNA, 16 nt, Human
ucuacagaggccaugg

SEQ ID NO: 3309885 - RNA, 15 nt, Human
acuguucucugcccu

SEQ ID NO: 3309886 - RNA, 18 nt, Human
acuguucucugcccucca

SEQ ID NO: 3309887 - RNA, 17 nt, Human
acuguucucugcccucc

SEQ ID NO: 3309888 - RNA, 16 nt, Human
acuguucucugcccuc

SEQ ID NO: 3309889 - RNA, 21 nt, Human
ucuacccuggcacuauaaugu

SEQ ID NO: 3309890 - RNA, 20 nt, Human
ucuacccagcgagcccuggu

SEQ ID NO: 3309891 - RNA, 19 nt, Human
ucuacccuggcacuauaau

SEQ ID NO: 3309892 - RNA, 14 nt, Human
ucuacccuggcacu

SEQ ID NO: 3309893 - RNA, 21 nt, Human
acuugucuuuggacccugagg

SEQ ID NO: 3309894 - RNA, 18 nt, Human
acuugucuuuggacccug

SEQ ID NO: 3309895 - RNA, 20 nt, Human
acuugucuuuggacccugag

SEQ ID NO: 3309896 - RNA, 19 nt, Human
acuuguggacacagcucuu

SEQ ID NO: 3309897 - RNA, 22 nt, Human
acuuguggacacagcucuucuc

SEQ ID NO: 3309898 - RNA, 18 nt, Human
acuuguggacacagcucu

SEQ ID NO: 3309899 - RNA, 20 nt, Human
ucucacuauguugcccaggc

SEQ ID NO: 3309900 - RNA, 21 nt, Human
ucucacuauguugcccaggca

SEQ ID NO: 3309901 - RNA, 22 nt, Human
ucucacuauguugcccaggcag

SEQ ID NO: 3309902 - RNA, 23 nt, Human
ucucacuauguugcccaggcagg

SEQ ID NO: 3309903 - RNA, 19 nt, Human
acuugcagacucuacagag

SEQ ID NO: 3309904 - RNA, 22 nt, Human
acuugcagacucuacagaggcc

SEQ ID NO: 3309905 - RNA, 23 nt, Human
acuugcagacucuacagaggcca

SEQ ID NO: 3309906 - RNA, 14 nt, Human
ucucauuugucaca

SEQ ID NO: 3309907 - RNA, 16 nt, Human
ucucauuugucacaca

SEQ ID NO: 3309908 - RNA, 16 nt, Human
ucuccaagcaggacau

SEQ ID NO: 3309909 - RNA, 15 nt, Human
ucuccaagcaggaca

SEQ ID NO: 3309910 - RNA, 21 nt, Human
ucucaggccagcugcuugggc

SEQ ID NO: 3309911 - RNA, 18 nt, Human
ucucaggccagcugcuug

SEQ ID NO: 3309912 - RNA, 17 nt, Human
ucucaggccagcugcuu

SEQ ID NO: 3309913 - RNA, 10 nt, Human
ucucaggcca

SEQ ID NO: 3309914 - RNA, 12 nt, Human
ucucaggccaaa

SEQ ID NO: 3309915 - RNA, 13 nt, Human
ucucaggccagcu

SEQ ID NO: 3309916 - RNA, 12 nt, Human
ucucaggccagc

SEQ ID NO: 3309917 - RNA, 13 nt, Human
acuuugaccucug

SEQ ID NO: 3309918 - RNA, 12 nt, Human
acuuugaccucu

SEQ ID NO: 3309919 - RNA, 18 nt, Human
acuuuguguucaccuugu

SEQ ID NO: 3309920 - RNA, 20 nt, Human
acuuuguuaguuucuccaag

SEQ ID NO: 3309921 - RNA, 21 nt, Human
acuuuguuaguuucuccaagc

SEQ ID NO: 3309922 - RNA, 13 nt, Human
acuuuuguucuug

SEQ ID NO: 3309923 - RNA, 12 nt, Human
acuuuuguucuu

SEQ ID NO: 3309924 - RNA, 23 nt, Human
acuuuuguucuugguuuguaaau

SEQ ID NO: 3309925 - RNA, 15 nt, Human
acuuuuguucuuggu

SEQ ID NO: 3309926 - RNA, 17 nt, Human
agaaaaaauauuuuccc

SEQ ID NO: 3309927 - RNA, 15 nt, Human
ucuccuucaccuuug

SEQ ID NO: 3309928 - RNA, 14 nt, Human
ucuccuucaccuuu

SEQ ID NO: 3309929 - RNA, 16 nt, Human
ucuccuucaccuuugu

SEQ ID NO: 3309930 - RNA, 21 nt, Human
ucuccuuguguuacuaaguuu

SEQ ID NO: 3309931 - RNA, 13 nt, Human
ucuccuuguguua

SEQ ID NO: 3309932 - RNA, 15 nt, Human
ucuccuccagaguca

SEQ ID NO: 3309933 - RNA, 16 nt, Human
ucuccucugcugcugg

SEQ ID NO: 3309934 - RNA, 15 nt, Human
ucuccucugcugcug

SEQ ID NO: 3309935 - RNA, 18 nt, Human
ucuccucugcugcuggcu

SEQ ID NO: 3309936 - RNA, 17 nt, Human
ucuccucugcugcuggc

SEQ ID NO: 3309937 - RNA, 14 nt, Human
acuuucugaaauaa

SEQ ID NO: 3309938 - RNA, 20 nt, Human
acuuucugaaauaacauggc

SEQ ID NO: 3309939 - RNA, 19 nt, Human
ucuccaagcaggacaugga

SEQ ID NO: 3309940 - RNA, 18 nt, Human
ucuccaagcaggacaugg

SEQ ID NO: 3309941 - RNA, 23 nt, Human
ucuccccagcaagugagagcugg

SEQ ID NO: 3309942 - RNA, 21 nt, Human
ucucccuuggauuguccccga

SEQ ID NO: 3309943 - RNA, 17 nt, Human
ucuccgaccagacaccu

SEQ ID NO: 3309944 - RNA, 21 nt, Human
ugaaccaccacacccagccca

SEQ ID NO: 3309945 - RNA, 22 nt, Human
ugaaccaccacacccagcccac

SEQ ID NO: 3309946 - RNA, 21 nt, Human
ugaagacaaugacuuacugua

SEQ ID NO: 3309947 - RNA, 23 nt, Human
ugaagacaaugacuuacuguaca

SEQ ID NO: 3309948 - RNA, 22 nt, Human
ugaagacaaugacuuacuguac

SEQ ID NO: 3309949 - RNA, 19 nt, Human
ugaaauuuuuauuaaauua

SEQ ID NO: 3309950 - RNA, 20 nt, Human
ugaaauuuuuauuaaauuau

SEQ ID NO: 3309951 - RNA, 16 nt, Human
ugaaauaacauggccu

SEQ ID NO: 3309952 - RNA, 17 nt, Human
ugaaauaacauggccuu

SEQ ID NO: 3309953 - RNA, 13 nt, Human
ugaagucacacag

SEQ ID NO: 3309954 - RNA, 12 nt, Human
ugaauaauacag

SEQ ID NO: 3309955 - RNA, 13 nt, Human
ugaauaauacagu

SEQ ID NO: 3309956 - RNA, 15 nt, Human
ugaaguaauaugcac

SEQ ID NO: 3309957 - RNA, 22 nt, Human
ugaaguaauaugcacacauuuu

SEQ ID NO: 3309958 - RNA, 21 nt, Human
ugaaguaauaugcacacauuu

SEQ ID NO: 3309959 - RNA, 20 nt, Human
ugaaguaauaugcacacauu

SEQ ID NO: 3309960 - RNA, 16 nt, Human
ugaaguaauaugcaca

SEQ ID NO: 3309961 - RNA, 21 nt, Human
agaggcagccccauucugccu

SEQ ID NO: 3309962 - RNA, 22 nt, Human
agaggcagccccauucugccug

SEQ ID NO: 3309963 - RNA, 21 nt, Human
agaggcagggucucacucugu

SEQ ID NO: 3309964 - RNA, 23 nt, Human
agaggcagccccauucugccugc

SEQ ID NO: 3309965 - RNA, 19 nt, Human
agagguucaaagauauuuu

SEQ ID NO: 3309966 - RNA, 16 nt, Human
agagguucaaagauau

SEQ ID NO: 3309967 - RNA, 15 nt, Human
agagggagguaagga

SEQ ID NO: 3309968 - RNA, 15 nt, Human
agagggagugacaga

SEQ ID NO: 3309969 - RNA, 20 nt, Human
agagggagugacagaggcag

SEQ ID NO: 3309970 - RNA, 13 nt, Human
agagguucaaaga

SEQ ID NO: 3309971 - RNA, 22 nt, Human
agaggcugccucucccaucacu

SEQ ID NO: 3309972 - RNA, 20 nt, Human
ucuuuguacagacaacaaac

SEQ ID NO: 3309973 - RNA, 15 nt, Human
ucuuuguacagacaa

SEQ ID NO: 3309974 - RNA, 14 nt, Human
ucuuuguacagaca

SEQ ID NO: 3309975 - RNA, 15 nt, Human
agacuuuggaaagac

SEQ ID NO: 3309976 - RNA, 15 nt, Human
agacuuuggaaagag

SEQ ID NO: 3309977 - RNA, 17 nt, Human
agacuuuggaaagacuu

SEQ ID NO: 3309978 - RNA, 20 nt, Human
agacugguuccauggccucu

SEQ ID NO: 3309979 - RNA, 15 nt, Human
agagacacaagccuu

SEQ ID NO: 3309980 - RNA, 19 nt, Human
agagacacaagccuucggc

SEQ ID NO: 3309981 - RNA, 16 nt, Human
agagacacaagccuuc

SEQ ID NO: 3309982 - RNA, 19 nt, Human
agacuuuggaaagaguagg

SEQ ID NO: 3309983 - RNA, 15 nt, Human
agacuuuuccaaccc

SEQ ID NO: 3309984 - RNA, 23 nt, Human
ucuuucccucccuuccucuuucc

SEQ ID NO: 3309985 - RNA, 18 nt, Human
ucuuuaaugucacaggca

SEQ ID NO: 3309986 - RNA, 15 nt, Human
ucuuuaaugucacag

SEQ ID NO: 3309987 - RNA, 20 nt, Human
agacaggcaagcaccuccug

SEQ ID NO: 3309988 - RNA, 13 nt, Human
agacuccugcagg

SEQ ID NO: 3309989 - RNA, 22 nt, Human
ugaaagacuguacaaaguagaa

SEQ ID NO: 3309990 - RNA, 18 nt, Human
ugaaagacuguacaaagu

SEQ ID NO: 3309991 - RNA, 19 nt, Human
ugaaagacuguacaaagua

SEQ ID NO: 3309992 - RNA, 16 nt, Human
ugaaagacuguacaaa

SEQ ID NO: 3309993 - RNA, 22 nt, Human
ugaaagaaaauaccaaggaaca

SEQ ID NO: 3309994 - RNA, 23 nt, Human
agagaccaucccugaaggccccg

SEQ ID NO: 3309995 - RNA, 22 nt, Human
agagaccaucccugaaggcccc

SEQ ID NO: 3309996 - RNA, 21 nt, Human
agagaccaucccugaaggccc

SEQ ID NO: 3309997 - RNA, 19 nt, Human
agagaccaucccugaaggc

SEQ ID NO: 3309998 - RNA, 18 nt, Human
agagaccaucccugaagg

SEQ ID NO: 3309999 - RNA, 11 nt, Human
agagacuccug

SEQ ID NO: 3310000 - RNA, 23 nt, Human
agagacuccugcaggcagccagg

SEQ ID NO: 3310001 - RNA, 12 nt, Human
agagacuccugc

SEQ ID NO: 3310002 - RNA, 14 nt, Human
agagacuccugcag

SEQ ID NO: 3310003 - RNA, 13 nt, Human
agagacuccugca

SEQ ID NO: 3310004 - RNA, 18 nt, Human
ugaaacuggauuaaacuu

SEQ ID NO: 3310005 - RNA, 17 nt, Human
ugaaacuggauuaaacu

SEQ ID NO: 3310006 - RNA, 19 nt, Human
ugaaaacacauuuuucuua

SEQ ID NO: 3310007 - RNA, 17 nt, Human
ugaaaacacauuuuucu

SEQ ID NO: 3310008 - RNA, 15 nt, Human
ugaaaacacauuuuu

SEQ ID NO: 3310009 - RNA, 13 nt, Human
ugaaaacacauuu

SEQ ID NO: 3310010 - RNA, 12 nt, Human
ugaaaacacauu

SEQ ID NO: 3310011 - RNA, 14 nt, Human
ugaaaacacauuuu

SEQ ID NO: 3310012 - RNA, 17 nt, Human
agauuucacucuccuug

SEQ ID NO: 3310013 - RNA, 19 nt, Human
agauuucacucuccuuggu

SEQ ID NO: 3310014 - RNA, 13 nt, Human
agauucauauuua

SEQ ID NO: 3310015 - RNA, 16 nt, Human
agauucauauuuacuu

SEQ ID NO: 3310016 - RNA, 19 nt, Human
ugacuuacuguacaugaaa

SEQ ID NO: 3310017 - RNA, 20 nt, Human
ugacuuacuguacaugaaaa

SEQ ID NO: 3310018 - RNA, 12 nt, Human
ugaccuuucaau

SEQ ID NO: 3310019 - RNA, 21 nt, Human
ugacuguuuucucuugagagg

SEQ ID NO: 3310020 - RNA, 15 nt, Human
ugaccuuuaagagaa

SEQ ID NO: 3310021 - RNA, 22 nt, Human
ugacagagugagacucugucuc

SEQ ID NO: 3310022 - RNA, 19 nt, Human
ugacacgaauauugcugau

SEQ ID NO: 3310023 - RNA, 16 nt, Human
ugacacgaauauugcu

SEQ ID NO: 3310024 - RNA, 13 nt, Human
ugacauguuuuau

SEQ ID NO: 3310025 - RNA, 17 nt, Human
ugacaggcaaugcuggc

SEQ ID NO: 3310026 - RNA, 19 nt, Human
ugacaggcaaugcuggcug

SEQ ID NO: 3310027 - RNA, 21 nt, Human
ugacagggcacaccgggcacu

SEQ ID NO: 3310028 - RNA, 22 nt, Human
ugacagggcacaccgggcacuc

SEQ ID NO: 3310029 - RNA, 20 nt, Human
ugagacucugucucaaaaaa

SEQ ID NO: 3310030 - RNA, 22 nt, Human
ugagacagcccgggcucugccu

SEQ ID NO: 3310031 - RNA, 20 nt, Human
ugagacagcccgggcucugc

SEQ ID NO: 3310032 - RNA, 19 nt, Human
ugagacagcccgggcucug

SEQ ID NO: 3310033 - RNA, 18 nt, Human
ugagacagcccgggcucu

SEQ ID NO: 3310034 - RNA, 17 nt, Human
ugagacagcccgggcuc

SEQ ID NO: 3310035 - RNA, 20 nt, Human
ugagaagcagaggaaggaga

SEQ ID NO: 3310036 - RNA, 11 nt, Human
ugagacagagu

SEQ ID NO: 3310037 - RNA, 21 nt, Human
ugagacagaguuuucacucuu

SEQ ID NO: 3310038 - RNA, 13 nt, Human
ugagacagcccgg

SEQ ID NO: 3310039 - RNA, 23 nt, Human
ugagaggacuuuucuuuguggcu

SEQ ID NO: 3310040 - RNA, 17 nt, Human
ugagaggaaaucaccga

SEQ ID NO: 3310041 - RNA, 14 nt, Human
ugagaggaaaucac

SEQ ID NO: 3310042 - RNA, 13 nt, Human
ugagaggaaauca

SEQ ID NO: 3310043 - RNA, 12 nt, Human
ugagaggaaauc

SEQ ID NO: 3310044 - RNA, 11 nt, Human
ugagaggaaau

SEQ ID NO: 3310045 - RNA, 14 nt, Human
ugagagcugggugu

SEQ ID NO: 3310046 - RNA, 10 nt, Human
ugagaggaaa

SEQ ID NO: 3310047 - RNA, 15 nt, Human
agcaagugagagcug

SEQ ID NO: 3310048 - RNA, 16 nt, Human
agcaagugagagcugg

SEQ ID NO: 3310049 - RNA, 14 nt, Human
agcaagugagagcu

SEQ ID NO: 3310050 - RNA, 14 nt, Human
agcaaggagauuua

SEQ ID NO: 3310051 - RNA, 19 nt, Human
agcaaggagauuuacaacu

SEQ ID NO: 3310052 - RNA, 17 nt, Human
agcaaggagauuuacaa

SEQ ID NO: 3310053 - RNA, 20 nt, Human
ugagccagauuucacucucc

SEQ ID NO: 3310054 - RNA, 14 nt, Human
ugagccacugcacc

SEQ ID NO: 3310055 - RNA, 19 nt, Human
ugagccagauuucacucuc

SEQ ID NO: 3310056 - RNA, 18 nt, Human
ugagccagauuucacucu

SEQ ID NO: 3310057 - RNA, 12 nt, Human
ugagccacugca

SEQ ID NO: 3310058 - RNA, 13 nt, Human
ugagccacugcac

SEQ ID NO: 3310059 - RNA, 17 nt, Human
agcaagugagagcuggg

SEQ ID NO: 3310060 - RNA, 16 nt, Human
agcacagcuucauuuc

SEQ ID NO: 3310061 - RNA, 21 nt, Human
agcacagcuucauuuccugug

SEQ ID NO: 3310062 - RNA, 16 nt, Human
agcacaugccucucuc

SEQ ID NO: 3310063 - RNA, 18 nt, Human
agcacaugccucucucag

SEQ ID NO: 3310064 - RNA, 22 nt, Human
agcacaugccucucucaggcca

SEQ ID NO: 3310065 - RNA, 21 nt, Human
agcacaugccucucucaggcc

SEQ ID NO: 3310066 - RNA, 20 nt, Human
agcacaugccucucucaggc

SEQ ID NO: 3310067 - RNA, 19 nt, Human
agcacaugccucucucagg

SEQ ID NO: 3310068 - RNA, 23 nt, Human
agcacaugccucucucaggccaa

SEQ ID NO: 3310069 - RNA, 16 nt, Human
agcaccaucucuccuc

SEQ ID NO: 3310070 - RNA, 13 nt, Human
agcaccuccugcc

SEQ ID NO: 3310071 - RNA, 14 nt, Human
agcaccuccugccu

SEQ ID NO: 3310072 - RNA, 16 nt, Human
agcaccuccugccucg

SEQ ID NO: 3310073 - RNA, 24 nt, Human
auguggaguucaucuugaauugua

SEQ ID NO: 3310074 - RNA, 20 nt, Human
auguggaguucaucuugaau

SEQ ID NO: 3310075 - RNA, 20 nt, Human
auggggcccugccuccuuug

SEQ ID NO: 3310076 - RNA, 22 nt, Human
augugccagguuuuuggucuga

SEQ ID NO: 3310077 - RNA, 21 nt, Human
augugccagguuuuuggucug

SEQ ID NO: 3310078 - RNA, 16 nt, Human
auguugcccaggcagg

SEQ ID NO: 3310079 - RNA, 17 nt, Human
auguugcccaggcaggu

SEQ ID NO: 3310080 - RNA, 12 nt, Human
auguugcccagg

SEQ ID NO: 3310081 - RNA, 20 nt, Human
auguugcccaggcaggucuu

SEQ ID NO: 3310082 - RNA, 20 nt, Human
uuuucauuuaggugaggaag

SEQ ID NO: 3310083 - RNA, 14 nt, Human
uuuucaguguacau

SEQ ID NO: 3310084 - RNA, 11 nt, Human
uuuuauuuuau

SEQ ID NO: 3310085 - RNA, 13 nt, Human
uuuuauuaugcau

SEQ ID NO: 3310086 - RNA, 19 nt, Human
auuaaaaaucucaaauuuc

SEQ ID NO: 3310087 - RNA, 15 nt, Human
auuaaaaaucucaaa

SEQ ID NO: 3310088 - RNA, 23 nt, Human
auuaaaacacaacaucuuuuucu

SEQ ID NO: 3310089 - RNA, 20 nt, Human
auuaaaaaucucaaauuucu

SEQ ID NO: 3310090 - RNA, 14 nt, Human
auuaaguacuaugu

SEQ ID NO: 3310091 - RNA, 19 nt, Human
uuuuuguagagccaggguc

SEQ ID NO: 3310092 - RNA, 20 nt, Human
uuuuuguagagccagggucu

SEQ ID NO: 3310093 - RNA, 22 nt, Human
uuuuuauggcuuuugugcauua

SEQ ID NO: 3310094 - RNA, 21 nt, Human
uuuuuauggcuuuugugcauu

SEQ ID NO: 3310095 - RNA, 20 nt, Human
uuuuuauggcuuuugugcau

SEQ ID NO: 3310096 - RNA, 15 nt, Human
uuuuguuccacaagu

SEQ ID NO: 3310097 - RNA, 20 nt, Human
uuuugugcauuaucuagaua

SEQ ID NO: 3310098 - RNA, 17 nt, Human
uuuugugcauuaucuag

SEQ ID NO: 3310099 - RNA, 12 nt, Human
uuuuuauggcuu

SEQ ID NO: 3310100 - RNA, 20 nt, Human
uuuuuaucgucacugcuuaa

SEQ ID NO: 3310101 - RNA, 22 nt, Human
uuuuuagacagagucucacugu

SEQ ID NO: 3310102 - RNA, 11 nt, Human
uuuuuacuaau

SEQ ID NO: 3310103 - RNA, 17 nt, Human
uuuugauccaagcuggu

SEQ ID NO: 3310104 - RNA, 17 nt, Human
uuuugagugccuuacac

SEQ ID NO: 3310105 - RNA, 23 nt, Human
uuuugccauguuggccaggcugg

SEQ ID NO: 3310106 - RNA, 20 nt, Human
auucuccaccugccagggac

SEQ ID NO: 3310107 - RNA, 19 nt, Human
auucuccaccugccaggga

SEQ ID NO: 3310108 - RNA, 20 nt, Human
auucuccugccucagccucc

SEQ ID NO: 3310109 - RNA, 19 nt, Human
auucuccugccucagccuc

SEQ ID NO: 3310110 - RNA, 15 nt, Human
auucuccugccucag

SEQ ID NO: 3310111 - RNA, 17 nt, Human
auucuccugccucagcc

SEQ ID NO: 3310112 - RNA, 16 nt, Human
auucuccuuguguuac

SEQ ID NO: 3310113 - RNA, 11 nt, Human
auucuccugcc

SEQ ID NO: 3310114 - RNA, 14 nt, Human
auucuccugccuca

SEQ ID NO: 3310115 - RNA, 13 nt, Human
auucuccugccuc

SEQ ID NO: 3310116 - RNA, 21 nt, Human
auucuccaccugccagggaca

SEQ ID NO: 3310117 - RNA, 18 nt, Human
auucuccaccugccaggg

SEQ ID NO: 3310118 - RNA, 16 nt, Human
auucccaagcucugcu

SEQ ID NO: 3310119 - RNA, 14 nt, Human
auucccaagcucug

SEQ ID NO: 3310120 - RNA, 15 nt, Human
auucccaagcucugc

SEQ ID NO: 3310121 - RNA, 15 nt, Human
auucaguaauaacuc

SEQ ID NO: 3310122 - RNA, 19 nt, Human
auucaguaauaacucuacc

SEQ ID NO: 3310123 - RNA, 19 nt, Human
auucaggaagcucagggcc

SEQ ID NO: 3310124 - RNA, 17 nt, Human
auucaggaagcucaggg

SEQ ID NO: 3310125 - RNA, 19 nt, Human
auucagacagcugccuggg

SEQ ID NO: 3310126 - RNA, 14 nt, Human
auucaggaagcuca

SEQ ID NO: 3310127 - RNA, 18 nt, Human
auugacaggauuauugga

SEQ ID NO: 3310128 - RNA, 15 nt, Human
auugaaaaaccauuu

SEQ ID NO: 3310129 - RNA, 13 nt, Human
auucuucuccacu

SEQ ID NO: 3310130 - RNA, 13 nt, Human
auucuuccucccu

SEQ ID NO: 3310131 - RNA, 22 nt, Human
auucuuccucccucccucuuuc

SEQ ID NO: 3310132 - RNA, 13 nt, Human
auucuuauuuaau

SEQ ID NO: 3310133 - RNA, 14 nt, Human
auucuuauuuaaug

SEQ ID NO: 3310134 - RNA, 18 nt, Human
auucuuauuuaaugaaag

SEQ ID NO: 3310135 - RNA, 21 nt, Human
auucuguuggccagugugaca

SEQ ID NO: 3310136 - RNA, 20 nt, Human
auuguccccgacccuugccg

SEQ ID NO: 3310137 - RNA, 19 nt, Human
auuguccccgacccuugcc

SEQ ID NO: 3310138 - RNA, 17 nt, Human
auuguccccgacccuug

SEQ ID NO: 3310139 - RNA, 14 nt, Human
auugugucucuugg

SEQ ID NO: 3310140 - RNA, 14 nt, Human
auuuaaaaaaaauc

SEQ ID NO: 3310141 - RNA, 16 nt, Human
auuuccguuaaaauac

SEQ ID NO: 3310142 - RNA, 15 nt, Human
auuuccguuaaaaua

SEQ ID NO: 3310143 - RNA, 14 nt, Human
auuugaaaauuuug

SEQ ID NO: 3310144 - RNA, 17 nt, Human
auuuccagccaaagccu

SEQ ID NO: 3310145 - RNA, 13 nt, Human
auuuauucugcuc

SEQ ID NO: 3310146 - RNA, 22 nt, Human
auuuauuaaaugcccagccccu

SEQ ID NO: 3310147 - RNA, 14 nt, Human
auuuaacagaaaug

SEQ ID NO: 3310148 - RNA, 12 nt, Human
auuuaacagaaa

SEQ ID NO: 3310149 - RNA, 14 nt, Human
auuuacuucuuaua

SEQ ID NO: 3310150 - RNA, 16 nt, Human
auuuacuucuuauaca

SEQ ID NO: 3310151 - RNA, 15 nt, Human
auuuagaaauauaau

SEQ ID NO: 3310152 - RNA, 14 nt, Human
auuuauucugcuca

SEQ ID NO: 3310153 - RNA, 14 nt, Human
auuugugauacaau

SEQ ID NO: 3310154 - RNA, 21 nt, Human
auuuuacuuuaaaaggagcca

SEQ ID NO: 3310155 - RNA, 15 nt, Human
auuuuaauucaguug

SEQ ID NO: 3310156 - RNA, 15 nt, Human
aucacgccacugcac

SEQ ID NO: 3310157 - RNA, 17 nt, Human
aucacgccacugcacua

SEQ ID NO: 3310158 - RNA, 14 nt, Human
aucacgccacugca

SEQ ID NO: 3310159 - RNA, 21 nt, Human
aucaacugcaucaagauguga

SEQ ID NO: 3310160 - RNA, 20 nt, Human
uucccuuuuuuggcugcuga

SEQ ID NO: 3310161 - RNA, 22 nt, Human
uuccuggcacugcuuccaguga

SEQ ID NO: 3310162 - RNA, 20 nt, Human
uuccuggcacugcuuccagu

SEQ ID NO: 3310163 - RNA, 19 nt, Human
uuccuggcacugcuuccag

SEQ ID NO: 3310164 - RNA, 22 nt, Human
uuccucuuuuuauuuaguuccu

SEQ ID NO: 3310165 - RNA, 16 nt, Human
uuccagugaggcucug

SEQ ID NO: 3310166 - RNA, 15 nt, Human
uuccagugaggcucu

SEQ ID NO: 3310167 - RNA, 16 nt, Human
auauuaagaaagacua

SEQ ID NO: 3310168 - RNA, 15 nt, Human
auauuaagaaagacu

SEQ ID NO: 3310169 - RNA, 17 nt, Human
auauuaagaaagacuau

SEQ ID NO: 3310170 - RNA, 17 nt, Human
auauuaccacagacaua

SEQ ID NO: 3310171 - RNA, 13 nt, Human
auauuguuuucag

SEQ ID NO: 3310172 - RNA, 21 nt, Human
auauugcugauggugcaauga

SEQ ID NO: 3310173 - RNA, 22 nt, Human
auauugcugauggugcaaugac

SEQ ID NO: 3310174 - RNA, 15 nt, Human
auauugauaugcuua

SEQ ID NO: 3310175 - RNA, 21 nt, Human
auauguggaguucaucuugaa

SEQ ID NO: 3310176 - RNA, 20 nt, Human
auauguggaguucaucuuga

SEQ ID NO: 3310177 - RNA, 22 nt, Human
uuccaauuuacauacucugcuu

SEQ ID NO: 3310178 - RNA, 17 nt, Human
uuccagguuuaagcugu

SEQ ID NO: 3310179 - RNA, 18 nt, Human
uuccagguuuaagcuguu

SEQ ID NO: 3310180 - RNA, 17 nt, Human
uuccaggcugggagagc

SEQ ID NO: 3310181 - RNA, 15 nt, Human
uuccaggcugggaga

SEQ ID NO: 3310182 - RNA, 13 nt, Human
uuccaggcuggga

SEQ ID NO: 3310183 - RNA, 21 nt, Human
uuccacaagagcccaggccuc

SEQ ID NO: 3310184 - RNA, 21 nt, Human
auauauguuuuaagaggcagg

SEQ ID NO: 3310185 - RNA, 22 nt, Human
auauauguuuuaagaggcaggg

SEQ ID NO: 3310186 - RNA, 17 nt, Human
uucagguaacaggcaga

SEQ ID NO: 3310187 - RNA, 14 nt, Human
uucaguaagccgug

SEQ ID NO: 3310188 - RNA, 13 nt, Human
uucagaaaugugu

SEQ ID NO: 3310189 - RNA, 16 nt, Human
uucagaaauguguuau

SEQ ID NO: 3310190 - RNA, 14 nt, Human
uucaggguuggccc

SEQ ID NO: 3310191 - RNA, 16 nt, Human
uucaggguuggccccu

SEQ ID NO: 3310192 - RNA, 17 nt, Human
uucaggguuggccccug

SEQ ID NO: 3310193 - RNA, 19 nt, Human
uucaggguuggccccugcc

SEQ ID NO: 3310194 - RNA, 22 nt, Human
uucaggguuggccccugcccgg

SEQ ID NO: 3310195 - RNA, 15 nt, Human
uucagguaacaggca

SEQ ID NO: 3310196 - RNA, 16 nt, Human
uucagguaacaggcag

SEQ ID NO: 3310197 - RNA, 11 nt, Human
aucccagcccc

SEQ ID NO: 3310198 - RNA, 13 nt, Human
aucccaugagccu

SEQ ID NO: 3310199 - RNA, 16 nt, Human
aucccaugagccucag

SEQ ID NO: 3310200 - RNA, 17 nt, Human
aucccaugagccucagc

SEQ ID NO: 3310201 - RNA, 22 nt, Human
aucccugaaggccccgcccagg

SEQ ID NO: 3310202 - RNA, 17 nt, Human
aucccugaaggccccgc

SEQ ID NO: 3310203 - RNA, 17 nt, Human
auccagguucagcuugu

SEQ ID NO: 3310204 - RNA, 14 nt, Human
auccaguaucuuga

SEQ ID NO: 3310205 - RNA, 15 nt, Human
uucugccugcccagg

SEQ ID NO: 3310206 - RNA, 16 nt, Human
uucugccugcccaggc

SEQ ID NO: 3310207 - RNA, 21 nt, Human
uucuguuggccagugugacaa

SEQ ID NO: 3310208 - RNA, 18 nt, Human
uucuguuuagauaauaca

SEQ ID NO: 3310209 - RNA, 13 nt, Human
uucuguuuagaua

SEQ ID NO: 3310210 - RNA, 12 nt, Human
uucuuucuggcu

SEQ ID NO: 3310211 - RNA, 20 nt, Human
uucuuucuggcuaugcauuu

SEQ ID NO: 3310212 - RNA, 17 nt, Human
uucuuucuggcuaugca

SEQ ID NO: 3310213 - RNA, 22 nt, Human
uucuucuccacuuucuagccag

SEQ ID NO: 3310214 - RNA, 13 nt, Human
uucuugcaaagua

SEQ ID NO: 3310215 - RNA, 15 nt, Human
aucaggugcugccau

SEQ ID NO: 3310216 - RNA, 17 nt, Human
aucaggugcugccaucc

SEQ ID NO: 3310217 - RNA, 14 nt, Human
aucaggugcugcca

SEQ ID NO: 3310218 - RNA, 19 nt, Human
aucagucugauucccaagc

SEQ ID NO: 3310219 - RNA, 16 nt, Human
aucauuaggugugacu

SEQ ID NO: 3310220 - RNA, 21 nt, Human
aucauccacugugccaugugc

SEQ ID NO: 3310221 - RNA, 22 nt, Human
aucauuaaagccugaguuugcu

SEQ ID NO: 3310222 - RNA, 15 nt, Human
aucauaaaacuugau

SEQ ID NO: 3310223 - RNA, 23 nt, Human
aucauaguggcuuaaaacaacac

SEQ ID NO: 3310224 - RNA, 21 nt, Human
uucucuaguuugauuaaauuc

SEQ ID NO: 3310225 - RNA, 20 nt, Human
uucucuaguuugauuaaauu

SEQ ID NO: 3310226 - RNA, 19 nt, Human
uucugcagccacuauuguu

SEQ ID NO: 3310227 - RNA, 12 nt, Human
aucauugaaauc

SEQ ID NO: 3310228 - RNA, 15 nt, Human
aucuaaauguugaaa

SEQ ID NO: 3310229 - RNA, 19 nt, Human
aucuaaauggaaccacucu

SEQ ID NO: 3310230 - RNA, 14 nt, Human
aucgugacaacacu

SEQ ID NO: 3310231 - RNA, 15 nt, Human
aucgugacaacacuu

SEQ ID NO: 3310232 - RNA, 18 nt, Human
aucgucacugcuuaacuu

SEQ ID NO: 3310233 - RNA, 14 nt, Human
aucgucacugcuua

SEQ ID NO: 3310234 - RNA, 12 nt, Human
uugauaaaguaa

SEQ ID NO: 3310235 - RNA, 16 nt, Human
uugaggucuguucuuu

SEQ ID NO: 3310236 - RNA, 15 nt, Human
uugaggucuguucuu

SEQ ID NO: 3310237 - RNA, 24 nt, Human
uugaccauucuccaccugccaggg

SEQ ID NO: 3310238 - RNA, 19 nt, Human
uugacagggcacaccgggc

SEQ ID NO: 3310239 - RNA, 19 nt, Human
uugaccauucuccaccugc

SEQ ID NO: 3310240 - RNA, 18 nt, Human
uugaccauucuccaccug

SEQ ID NO: 3310241 - RNA, 17 nt, Human
uugaccauucuccaccu

SEQ ID NO: 3310242 - RNA, 21 nt, Human
auccugagccagauuucacuc

SEQ ID NO: 3310243 - RNA, 17 nt, Human
auccugagccagauuuc

SEQ ID NO: 3310244 - RNA, 15 nt, Human
auccugagccagauu

SEQ ID NO: 3310245 - RNA, 14 nt, Human
auccugagccagau

SEQ ID NO: 3310246 - RNA, 11 nt, Human
auccugagcca

SEQ ID NO: 3310247 - RNA, 13 nt, Human
auccugagccaga

SEQ ID NO: 3310248 - RNA, 12 nt, Human
auccugagccag

SEQ ID NO: 3310249 - RNA, 17 nt, Human
auccucuuugagugaag

SEQ ID NO: 3310250 - RNA, 20 nt, Human
auccucuguacagagcccac

SEQ ID NO: 3310251 - RNA, 18 nt, Human
auccucuguacagagccc

SEQ ID NO: 3310252 - RNA, 20 nt, Human
uucuuuugccguuauuaaaa

SEQ ID NO: 3310253 - RNA, 22 nt, Human
auccuggcacccggccccugcu

SEQ ID NO: 3310254 - RNA, 23 nt, Human
auccuggcacccggccccugcug

SEQ ID NO: 3310255 - RNA, 15 nt, Human
auccuggaguucugg

SEQ ID NO: 3310256 - RNA, 17 nt, Human
auccuggcacccggccc

SEQ ID NO: 3310257 - RNA, 19 nt, Human
auccuggcacccggccccu

SEQ ID NO: 3310258 - RNA, 20 nt, Human
auccuggcacccggccccug

SEQ ID NO: 3310259 - RNA, 21 nt, Human
auccuggcacccggccccugc

SEQ ID NO: 3310260 - RNA, 14 nt, Human
uuuaccuuuuuuau

SEQ ID NO: 3310261 - RNA, 20 nt, Human
uuuaccuuuuuuauacauaa

SEQ ID NO: 3310262 - RNA, 19 nt, Human
uuuaccuuuuuuauacaua

SEQ ID NO: 3310263 - RNA, 17 nt, Human
augcuacacacugcaug

SEQ ID NO: 3310264 - RNA, 22 nt, Human
uuuaccugaagucuuuguacag

SEQ ID NO: 3310265 - RNA, 18 nt, Human
augcuacacacugcaugu

SEQ ID NO: 3310266 - RNA, 21 nt, Human
uuuaccuuuuuuauacauaaa

SEQ ID NO: 3310267 - RNA, 17 nt, Human
uuuacuaauagacaauu

SEQ ID NO: 3310268 - RNA, 14 nt, Human
uuuacuaauagaca

SEQ ID NO: 3310269 - RNA, 18 nt, Human
uuuacuaauagacaauuu

SEQ ID NO: 3310270 - RNA, 19 nt, Human
uuuauuaaaugcccagccc

SEQ ID NO: 3310271 - RNA, 13 nt, Human
uuuagauaauaca

SEQ ID NO: 3310272 - RNA, 18 nt, Human
uuuagaguugauacuaca

SEQ ID NO: 3310273 - RNA, 15 nt, Human
uuuagauaauacacc

SEQ ID NO: 3310274 - RNA, 22 nt, Human
augcuggcuguuggcugggggc

SEQ ID NO: 3310275 - RNA, 19 nt, Human
augcugugcccuaaagugu

SEQ ID NO: 3310276 - RNA, 21 nt, Human
auggaaguacuauaauuuacc

SEQ ID NO: 3310277 - RNA, 17 nt, Human
auggaacacucugagac

SEQ ID NO: 3310278 - RNA, 18 nt, Human
auggaacacucugagacu

SEQ ID NO: 3310279 - RNA, 14 nt, Human
auggaauaacaugu

SEQ ID NO: 3310280 - RNA, 15 nt, Human
auggaauaacaugua

SEQ ID NO: 3310281 - RNA, 24 nt, Human
uuucacucuuauugcccacgcugg

SEQ ID NO: 3310282 - RNA, 15 nt, Human
uuucacucuccuugg

SEQ ID NO: 3310283 - RNA, 14 nt, Human
uuucacucuccuug

SEQ ID NO: 3310284 - RNA, 19 nt, Human
uuuccagguuuaagcuguu

SEQ ID NO: 3310285 - RNA, 23 nt, Human
augggcuggguucuacccaggug

SEQ ID NO: 3310286 - RNA, 13 nt, Human
auggggcccugcc

SEQ ID NO: 3310287 - RNA, 14 nt, Human
auggggcccugccu

SEQ ID NO: 3310288 - RNA, 13 nt, Human
uuucuuuguggcu

SEQ ID NO: 3310289 - RNA, 16 nt, Human
uuucugccgcagcccu

SEQ ID NO: 3310290 - RNA, 14 nt, Human
uuucugccgcagcc

SEQ ID NO: 3310291 - RNA, 21 nt, Human
uuucugcagccacuauuguua

SEQ ID NO: 3310292 - RNA, 21 nt, Human
uuucuaugacacaugcaaggu

SEQ ID NO: 3310293 - RNA, 15 nt, Human
uuucuaugacacaug

SEQ ID NO: 3310294 - RNA, 13 nt, Human
augggagcucaug

SEQ ID NO: 3310295 - RNA, 18 nt, Human
augggcaacccccagccu

SEQ ID NO: 3310296 - RNA, 19 nt, Human
augggcaacccccagccug

SEQ ID NO: 3310297 - RNA, 21 nt, Human
augggcaacccccagccugcu

SEQ ID NO: 3310298 - RNA, 15 nt, Human
augggccuccugugu

SEQ ID NO: 3310299 - RNA, 15 nt, Human
augggcagagcagag

SEQ ID NO: 3310300 - RNA, 14 nt, Human
augggcagagcaga

SEQ ID NO: 3310301 - RNA, 13 nt, Human
augggcagagcag

SEQ ID NO: 3310302 - RNA, 19 nt, Human
auggacaugaucuucuuua

SEQ ID NO: 3310303 - RNA, 21 nt, Human
auggacccaauauuuaccaga

SEQ ID NO: 3310304 - RNA, 18 nt, Human
auggccucuucagaucuc

SEQ ID NO: 3310305 - RNA, 11 nt, Human
uuuccuucagu

SEQ ID NO: 3310306 - RNA, 15 nt, Human
uuuccuucagugccu

SEQ ID NO: 3310307 - RNA, 12 nt, Human
uuuccuucagug

SEQ ID NO: 3310308 - RNA, 12 nt, Human
uuuccugugucu

SEQ ID NO: 3310309 - RNA, 23 nt, Human
uuuccuucauucaacccaccugc

SEQ ID NO: 3310310 - RNA, 21 nt, Human
uuuccuucagugccuuaugga

SEQ ID NO: 3310311 - RNA, 18 nt, Human
uuuccuucagugccuuau

SEQ ID NO: 3310312 - RNA, 22 nt, Human
uuuccuucagugccuuauggaa

SEQ ID NO: 3310313 - RNA, 21 nt, Human
uuuccuucauucaacccaccu

SEQ ID NO: 3310314 - RNA, 22 nt, Human
uuucgcaggauucuuccucccu

SEQ ID NO: 3310315 - RNA, 18 nt, Human
uuucgcaggauucuuccu

SEQ ID NO: 3310316 - RNA, 18 nt, Human
augaucacggcucacugc

SEQ ID NO: 3310317 - RNA, 19 nt, Human
augaucacggcucacugca

SEQ ID NO: 3310318 - RNA, 15 nt, Human
augaucacggcucac

SEQ ID NO: 3310319 - RNA, 23 nt, Human
augaucacggcucacugcagccu

SEQ ID NO: 3310320 - RNA, 16 nt, Human
augauccuaggcauuu

SEQ ID NO: 3310321 - RNA, 14 nt, Human
augaucuucuuuau

SEQ ID NO: 3310322 - RNA, 19 nt, Human
augcaccuggaauauauaa

SEQ ID NO: 3310323 - RNA, 22 nt, Human
augcaaaccaucauugaaaucu

SEQ ID NO: 3310324 - RNA, 21 nt, Human
augcaaaccaucauugaaauc

SEQ ID NO: 3310325 - RNA, 20 nt, Human
augcaaaccaucauugaaau

SEQ ID NO: 3310326 - RNA, 19 nt, Human
augcaaaccaucauugaaa

SEQ ID NO: 3310327 - RNA, 18 nt, Human
augcaaaccaucauugaa

SEQ ID NO: 3310328 - RNA, 16 nt, Human
augcaaaccaucauug

SEQ ID NO: 3310329 - RNA, 15 nt, Human
augaucuucuuuaua

SEQ ID NO: 3310330 - RNA, 22 nt, Human
augcaaggucauuuuuuuuaag

SEQ ID NO: 3310331 - RNA, 14 nt, Human
augcaccuggaaua

SEQ ID NO: 3310332 - RNA, 16 nt, Human
augcaccuggaauaua

SEQ ID NO: 3310333 - RNA, 16 nt, Human
augcaaggucauuuuu

SEQ ID NO: 3310334 - RNA, 14 nt, Human
augcaaggucauuu

SEQ ID NO: 3310335 - RNA, 16 nt, Human
uuguccccgacccuug

SEQ ID NO: 3310336 - RNA, 18 nt, Human
uugucacacacuuuggcu

SEQ ID NO: 3310337 - RNA, 15 nt, Human
augauaaaacacaaa

SEQ ID NO: 3310338 - RNA, 23 nt, Human
augaguccccuguuuguuucuga

SEQ ID NO: 3310339 - RNA, 22 nt, Human
augaggucagagccugcaguua

SEQ ID NO: 3310340 - RNA, 17 nt, Human
augagccucagcauccu

SEQ ID NO: 3310341 - RNA, 18 nt, Human
augagccucagcauccug

SEQ ID NO: 3310342 - RNA, 13 nt, Human
augagaggaaauc

SEQ ID NO: 3310343 - RNA, 12 nt, Human
augagaggaaau

SEQ ID NO: 3310344 - RNA, 16 nt, Human
augagaggaaaucacc

SEQ ID NO: 3310345 - RNA, 15 nt, Human
augagaggaaaucac

SEQ ID NO: 3310346 - RNA, 14 nt, Human
augagaggaaauca

SEQ ID NO: 3310347 - RNA, 15 nt, Human
augagcaucaggcca

SEQ ID NO: 3310348 - RNA, 17 nt, Human
augagcaucaggccagg

SEQ ID NO: 3310349 - RNA, 16 nt, Human
augagcaucaggccag

SEQ ID NO: 3310350 - RNA, 21 nt, Human
augagcaucaggccaggcccu

SEQ ID NO: 3310351 - RNA, 20 nt, Human
augagcaucaggccaggccc

SEQ ID NO: 3310352 - RNA, 19 nt, Human
augagcaucaggccaggcc

SEQ ID NO: 3310353 - RNA, 18 nt, Human
augagcaucaggccaggc

SEQ ID NO: 3310354 - RNA, 22 nt, Human
augagcaucaggccaggcccuc

SEQ ID NO: 3310355 - RNA, 12 nt, Human
augagccucagc

SEQ ID NO: 3310356 - RNA, 15 nt, Human
augagccucagcauc

SEQ ID NO: 3310357 - RNA, 16 nt, Human
augagccucagcaucc

SEQ ID NO: 3310358 - RNA, 19 nt, Human
uugcugaauacagaggcaa

SEQ ID NO: 3310359 - RNA, 20 nt, Human
uugcuaagugaggaugaaaa

SEQ ID NO: 3310360 - RNA, 18 nt, Human
uugcugauggugcaauga

SEQ ID NO: 3310361 - RNA, 17 nt, Human
uugcugauggugcaaug

SEQ ID NO: 3310362 - RNA, 17 nt, Human
uuggaaagaguaggaag

SEQ ID NO: 3310363 - RNA, 20 nt, Human
augaaagacuguacaaagua

SEQ ID NO: 3310364 - RNA, 19 nt, Human
augaaagacuguacaaagu

SEQ ID NO: 3310365 - RNA, 18 nt, Human
uuggaaagaguaggaaga

SEQ ID NO: 3310366 - RNA, 21 nt, Human
uuggcuagagguucaaagaua

SEQ ID NO: 3310367 - RNA, 22 nt, Human
uuggcuaggaccccuccaugug

SEQ ID NO: 3310368 - RNA, 22 nt, Human
uuggcuagagguucaaagauau

SEQ ID NO: 3310369 - RNA, 13 nt, Human
uuggcugcaggga

SEQ ID NO: 3310370 - RNA, 14 nt, Human
uuggcugcagggag

SEQ ID NO: 3310371 - RNA, 15 nt, Human
uuggcugcugaaggc

SEQ ID NO: 3310372 - RNA, 11 nt, Human
uuggcugcuga

SEQ ID NO: 3310373 - RNA, 20 nt, Human
uuguaaggaaugauuaauua

SEQ ID NO: 3310374 - RNA, 20 nt, Human
augacacgaauauugcugau

SEQ ID NO: 3310375 - RNA, 19 nt, Human
augacacgaauauugcuga

SEQ ID NO: 3310376 - RNA, 20 nt, Human
augaaccacaucuugcucug

SEQ ID NO: 3310377 - RNA, 13 nt, Human
augaaccacaucu

SEQ ID NO: 3310378 - RNA, 17 nt, Human
uugggguacccacugcu

SEQ ID NO: 3310379 - RNA, 19 nt, Human
uuggggaagaacgaagcca

SEQ ID NO: 3310380 - RNA, 22 nt, Human
uugggguacccacugcucuggu

SEQ ID NO: 3310381 - RNA, 19 nt, Human
uugguuaggcauuguggga

SEQ ID NO: 3310382 - RNA, 14 nt, Human
uuguaaggaaugau

SEQ ID NO: 3310383 - RNA, 13 nt, Human
uggcuguuggcug

SEQ ID NO: 3310384 - RNA, 14 nt, Human
uggcugugucuccc

SEQ ID NO: 3310385 - RNA, 15 nt, Human
uggcuguuggcuggg

SEQ ID NO: 3310386 - RNA, 17 nt, Human
uggcuuaaaacaacacu

SEQ ID NO: 3310387 - RNA, 23 nt, Human
uggcuucacggaagagccuugcg

SEQ ID NO: 3310388 - RNA, 22 nt, Human
uggcuucacggaagagccuugc

SEQ ID NO: 3310389 - RNA, 16 nt, Human
ugggaaaggggaaguu

SEQ ID NO: 3310390 - RNA, 14 nt, Human
aggcugggagagcc

SEQ ID NO: 3310391 - RNA, 22 nt, Human
uggcuagagguucaaagauauu

SEQ ID NO: 3310392 - RNA, 18 nt, Human
aggcuggcgugcaguggu

SEQ ID NO: 3310393 - RNA, 20 nt, Human
aggcuggcgugcaguggugc

SEQ ID NO: 3310394 - RNA, 22 nt, Human
uggcuauuagagaucaaccccu

SEQ ID NO: 3310395 - RNA, 19 nt, Human
uggcuaugcauuugaaaau

SEQ ID NO: 3310396 - RNA, 14 nt, Human
uggcuaugcauuug

SEQ ID NO: 3310397 - RNA, 17 nt, Human
uggcuaugcauuugaaa

SEQ ID NO: 3310398 - RNA, 15 nt, Human
uggcuaugcauuuga

SEQ ID NO: 3310399 - RNA, 15 nt, Human
uggcugcagggaguc

SEQ ID NO: 3310400 - RNA, 13 nt, Human
uggcugcagggag

SEQ ID NO: 3310401 - RNA, 14 nt, Human
uggcugcagggagu

SEQ ID NO: 3310402 - RNA, 20 nt, Human
uggcugccaaugggagcuca

SEQ ID NO: 3310403 - RNA, 18 nt, Human
uggcugccaaugggagcu

SEQ ID NO: 3310404 - RNA, 18 nt, Human
uggcucaaguccucuuuu

SEQ ID NO: 3310405 - RNA, 19 nt, Human
uggcucuuccaggcuggga

SEQ ID NO: 3310406 - RNA, 21 nt, Human
uggcucuuccaggcugggaga

SEQ ID NO: 3310407 - RNA, 20 nt, Human
uggcucuuccaggcugggag

SEQ ID NO: 3310408 - RNA, 12 nt, Human
uggcugcaaagg

SEQ ID NO: 3310409 - RNA, 21 nt, Human
aggcucucaggccagcugcuu

SEQ ID NO: 3310410 - RNA, 11 nt, Human
aggcucugccc

SEQ ID NO: 3310411 - RNA, 12 nt, Human
aggcucugcccu

SEQ ID NO: 3310412 - RNA, 13 nt, Human
aggcucugcccuu

SEQ ID NO: 3310413 - RNA, 15 nt, Human
aggcucugcccuugg

SEQ ID NO: 3310414 - RNA, 14 nt, Human
aggcucugcccuug

SEQ ID NO: 3310415 - RNA, 20 nt, Human
aggcucucaggccagcugcu

SEQ ID NO: 3310416 - RNA, 19 nt, Human
aggcucucaggccagcugc

SEQ ID NO: 3310417 - RNA, 18 nt, Human
aggcucucaggccagcug

SEQ ID NO: 3310418 - RNA, 16 nt, Human
aggcucucaggccagc

SEQ ID NO: 3310419 - RNA, 15 nt, Human
aggcucucaggccag

SEQ ID NO: 3310420 - RNA, 14 nt, Human
aggcucucaggcca

SEQ ID NO: 3310421 - RNA, 12 nt, Human
aggcucucaggc

SEQ ID NO: 3310422 - RNA, 11 nt, Human
aggcucucagg

SEQ ID NO: 3310423 - RNA, 19 nt, Human
aggcuccuuuagcgcccag

SEQ ID NO: 3310424 - RNA, 12 nt, Human
aggcucgagcau

SEQ ID NO: 3310425 - RNA, 19 nt, Human
aggcucgagcaugccugga

SEQ ID NO: 3310426 - RNA, 18 nt, Human
aggcucgagcaugccugg

SEQ ID NO: 3310427 - RNA, 17 nt, Human
aggcucgagcaugccug

SEQ ID NO: 3310428 - RNA, 15 nt, Human
aggcucgagcaugcc

SEQ ID NO: 3310429 - RNA, 21 nt, Human
aggcucgagcaugccuggaug

SEQ ID NO: 3310430 - RNA, 13 nt, Human
aggcuggcgugca

SEQ ID NO: 3310431 - RNA, 17 nt, Human
aggcuggcgugcagugg

SEQ ID NO: 3310432 - RNA, 16 nt, Human
aggcucugcccuuggu

SEQ ID NO: 3310433 - RNA, 20 nt, Human
uggccccugcccggcugcgg

SEQ ID NO: 3310434 - RNA, 21 nt, Human
uggccccugcccggcugcgga

SEQ ID NO: 3310435 - RNA, 22 nt, Human
aggccuggccagaugcaccagc

SEQ ID NO: 3310436 - RNA, 23 nt, Human
aggccuggccagaugcaccagcc

SEQ ID NO: 3310437 - RNA, 23 nt, Human
aggccugggggcugggcagagga

SEQ ID NO: 3310438 - RNA, 15 nt, Human
aggccuggccagaug

SEQ ID NO: 3310439 - RNA, 16 nt, Human
aggccuggccagaugc

SEQ ID NO: 3310440 - RNA, 17 nt, Human
aggccuggccagaugca

SEQ ID NO: 3310441 - RNA, 21 nt, Human
aggccuggccagaugcaccag

SEQ ID NO: 3310442 - RNA, 13 nt, Human
uggccucugcacu

SEQ ID NO: 3310443 - RNA, 17 nt, Human
uggccucugcacucccc

SEQ ID NO: 3310444 - RNA, 15 nt, Human
uggccucugcacucc

SEQ ID NO: 3310445 - RNA, 14 nt, Human
uggccucugcacuc

SEQ ID NO: 3310446 - RNA, 14 nt, Human
aggcccucugccca

SEQ ID NO: 3310447 - RNA, 13 nt, Human
aggcccucugccc

SEQ ID NO: 3310448 - RNA, 15 nt, Human
uggccaggcuggucu

SEQ ID NO: 3310449 - RNA, 17 nt, Human
uggccaggcuggucuca

SEQ ID NO: 3310450 - RNA, 15 nt, Human
uggcaugggaaugaa

SEQ ID NO: 3310451 - RNA, 12 nt, Human
uggcaugggaau

SEQ ID NO: 3310452 - RNA, 20 nt, Human
uggaccuugaacuggguacu

SEQ ID NO: 3310453 - RNA, 18 nt, Human
aggcauuuguuugaacug

SEQ ID NO: 3310454 - RNA, 16 nt, Human
aggccaaacucaccug

SEQ ID NO: 3310455 - RNA, 18 nt, Human
aggccaaggugggaggau

SEQ ID NO: 3310456 - RNA, 20 nt, Human
aggccaaaggaagcacaugc

SEQ ID NO: 3310457 - RNA, 23 nt, Human
aggccaaaggaagcacaugccuc

SEQ ID NO: 3310458 - RNA, 20 nt, Human
aggccaaacucaccugcccc

SEQ ID NO: 3310459 - RNA, 14 nt, Human
aggccaaaggaagc

SEQ ID NO: 3310460 - RNA, 14 nt, Human
uggaguauauguca

SEQ ID NO: 3310461 - RNA, 15 nt, Human
aggccacaagacccu

SEQ ID NO: 3310462 - RNA, 15 nt, Human
uggaugccugguggc

SEQ ID NO: 3310463 - RNA, 20 nt, Human
uggaguucaucuugaauugu

SEQ ID NO: 3310464 - RNA, 17 nt, Human
uggaguucaucuugaau

SEQ ID NO: 3310465 - RNA, 16 nt, Human
uggaguucaucuugaa

SEQ ID NO: 3310466 - RNA, 18 nt, Human
uggaugccugguggcagc

SEQ ID NO: 3310467 - RNA, 19 nt, Human
uggaugccugguggcagcu

SEQ ID NO: 3310468 - RNA, 12 nt, Human
uggcagccccug

SEQ ID NO: 3310469 - RNA, 20 nt, Human
aggccacaagacccuugugg

SEQ ID NO: 3310470 - RNA, 12 nt, Human
uggauguucuga

SEQ ID NO: 3310471 - RNA, 18 nt, Human
uggcaccagcagccugga

SEQ ID NO: 3310472 - RNA, 20 nt, Human
uggcacaucagcacgauuuc

SEQ ID NO: 3310473 - RNA, 22 nt, Human
uggcagaguugaagacagagcu

SEQ ID NO: 3310474 - RNA, 15 nt, Human
uggcacccggccccu

SEQ ID NO: 3310475 - RNA, 21 nt, Human
uggcagaguugaagacagagc

SEQ ID NO: 3310476 - RNA, 15 nt, Human
ugcugcccugugagu

SEQ ID NO: 3310477 - RNA, 14 nt, Human
ugcugcccugugag

SEQ ID NO: 3310478 - RNA, 13 nt, Human
ugcugcccuguga

SEQ ID NO: 3310479 - RNA, 12 nt, Human
ugcugcccugug

SEQ ID NO: 3310480 - RNA, 16 nt, Human
ugcuggcugguuagag

SEQ ID NO: 3310481 - RNA, 18 nt, Human
ugcuguaacuuucugaaa

SEQ ID NO: 3310482 - RNA, 23 nt, Human
aggacacuaaccacgcuggaccu

SEQ ID NO: 3310483 - RNA, 19 nt, Human
aggacacuaaccacgcugg

SEQ ID NO: 3310484 - RNA, 22 nt, Human
aggacagggaggugaccccagg

SEQ ID NO: 3310485 - RNA, 13 nt, Human
ugcuuauacacuu

SEQ ID NO: 3310486 - RNA, 12 nt, Human
ugcuucaaggau

SEQ ID NO: 3310487 - RNA, 13 nt, Human
ugcuucagccucc

SEQ ID NO: 3310488 - RNA, 14 nt, Human
ugcuucagccuccc

SEQ ID NO: 3310489 - RNA, 19 nt, Human
ugcuucaaggauccugagc

SEQ ID NO: 3310490 - RNA, 18 nt, Human
ugcuucaaggauccugag

SEQ ID NO: 3310491 - RNA, 16 nt, Human
ugcuucaaggauccug

SEQ ID NO: 3310492 - RNA, 15 nt, Human
aggaaggagaggaga

SEQ ID NO: 3310493 - RNA, 19 nt, Human
aggaaggaaacccagcucu

SEQ ID NO: 3310494 - RNA, 13 nt, Human
aggaagccagcag

SEQ ID NO: 3310495 - RNA, 17 nt, Human
aggaagccagcaggcuc

SEQ ID NO: 3310496 - RNA, 18 nt, Human
aggaaggaaacccagcuc

SEQ ID NO: 3310497 - RNA, 22 nt, Human
aggaagcacaugccucucucag

SEQ ID NO: 3310498 - RNA, 15 nt, Human
aggaagccagcaggc

SEQ ID NO: 3310499 - RNA, 14 nt, Human
aggaagccagcagg

SEQ ID NO: 3310500 - RNA, 24 nt, Human
aggaagcacaugccucucucaggc

SEQ ID NO: 3310501 - RNA, 23 nt, Human
aggaagcacaugccucucucagg

SEQ ID NO: 3310502 - RNA, 14 nt, Human
aggaagacuuugga

SEQ ID NO: 3310503 - RNA, 13 nt, Human
aggaagacuuugg

SEQ ID NO: 3310504 - RNA, 19 nt, Human
aggaagacuucaucccucu

SEQ ID NO: 3310505 - RNA, 13 nt, Human
aggaagacuucau

SEQ ID NO: 3310506 - RNA, 22 nt, Human
ugcugagucugaaggcuggguu

SEQ ID NO: 3310507 - RNA, 21 nt, Human
ugcugagucugaaggcugggu

SEQ ID NO: 3310508 - RNA, 18 nt, Human
ugcugagucugaaggcug

SEQ ID NO: 3310509 - RNA, 17 nt, Human
ugcugagucugaaggcu

SEQ ID NO: 3310510 - RNA, 16 nt, Human
ugcugagucugaaggc

SEQ ID NO: 3310511 - RNA, 16 nt, Human
agcugggacuacaggc

SEQ ID NO: 3310512 - RNA, 18 nt, Human
agcugggacuacaggcac

SEQ ID NO: 3310513 - RNA, 19 nt, Human
ugcuccagcuguucagcug

SEQ ID NO: 3310514 - RNA, 16 nt, Human
ugcuccagcuguucag

SEQ ID NO: 3310515 - RNA, 21 nt, Human
ugcucugcugacagacacagg

SEQ ID NO: 3310516 - RNA, 22 nt, Human
ugcucugcugacagacacaggc

SEQ ID NO: 3310517 - RNA, 16 nt, Human
ugcucugcugacagac

SEQ ID NO: 3310518 - RNA, 14 nt, Human
ugcugagucugaag

SEQ ID NO: 3310519 - RNA, 15 nt, Human
ugcugagucugaagg

SEQ ID NO: 3310520 - RNA, 23 nt, Human
aggacuuuucuuuguggcuuccu

SEQ ID NO: 3310521 - RNA, 17 nt, Human
aggagauuggaaggaac

SEQ ID NO: 3310522 - RNA, 14 nt, Human
aggagcagccacau

SEQ ID NO: 3310523 - RNA, 22 nt, Human
aggagccccgaggccuucucug

SEQ ID NO: 3310524 - RNA, 17 nt, Human
aggagccccgaggccuu

SEQ ID NO: 3310525 - RNA, 19 nt, Human
aggacauugcggacagcca

SEQ ID NO: 3310526 - RNA, 23 nt, Human
aggacauugcggacagccacggc

SEQ ID NO: 3310527 - RNA, 15 nt, Human
aggacauugcggaca

SEQ ID NO: 3310528 - RNA, 17 nt, Human
aggacauugcggacagc

SEQ ID NO: 3310529 - RNA, 18 nt, Human
aggacauugcggacagcc

SEQ ID NO: 3310530 - RNA, 19 nt, Human
ugcuugggcuucauccucc

SEQ ID NO: 3310531 - RNA, 15 nt, Human
uggaaauauuaagaa

SEQ ID NO: 3310532 - RNA, 21 nt, Human
ugcuuggaggaaggaaaccca

SEQ ID NO: 3310533 - RNA, 16 nt, Human
ugcuugggcuucaucc

SEQ ID NO: 3310534 - RNA, 12 nt, Human
ugcuugggcuuc

SEQ ID NO: 3310535 - RNA, 16 nt, Human
ugcuuggaggaaggaa

SEQ ID NO: 3310536 - RNA, 17 nt, Human
aggagccuccugcccuu

SEQ ID NO: 3310537 - RNA, 18 nt, Human
uggacacagcucuucucc

SEQ ID NO: 3310538 - RNA, 15 nt, Human
uggacacagcucuuc

SEQ ID NO: 3310539 - RNA, 16 nt, Human
uggacacagcucuucu

SEQ ID NO: 3310540 - RNA, 13 nt, Human
uggacccugaggc

SEQ ID NO: 3310541 - RNA, 12 nt, Human
uggacccugagg

SEQ ID NO: 3310542 - RNA, 14 nt, Human
uggacccugaggcc

SEQ ID NO: 3310543 - RNA, 17 nt, Human
aggcaacucaucuuagg

SEQ ID NO: 3310544 - RNA, 19 nt, Human
aggauuuugauccaagcug

SEQ ID NO: 3310545 - RNA, 19 nt, Human
aggaugcccaaagaugcag

SEQ ID NO: 3310546 - RNA, 14 nt, Human
aggaugcccaaaga

SEQ ID NO: 3310547 - RNA, 20 nt, Human
uggaaauauuaagaaagacu

SEQ ID NO: 3310548 - RNA, 18 nt, Human
uggaaaugggcagagcag

SEQ ID NO: 3310549 - RNA, 23 nt, Human
uggaaaugggcagagcagagacc

SEQ ID NO: 3310550 - RNA, 17 nt, Human
aggaugaucuaggaaga

SEQ ID NO: 3310551 - RNA, 16 nt, Human
aggaugaucuaggaag

SEQ ID NO: 3310552 - RNA, 17 nt, Human
aggauccugagccagau

SEQ ID NO: 3310553 - RNA, 22 nt, Human
aggaucucuugagccugggagg

SEQ ID NO: 3310554 - RNA, 21 nt, Human
aggaucucuugagccugggag

SEQ ID NO: 3310555 - RNA, 16 nt, Human
aggauccugagccaga

SEQ ID NO: 3310556 - RNA, 15 nt, Human
aggauccugagccag

SEQ ID NO: 3310557 - RNA, 21 nt, Human
agcccaggccuccuacagcuu

SEQ ID NO: 3310558 - RNA, 17 nt, Human
agccccaaaacucuccu

SEQ ID NO: 3310559 - RNA, 16 nt, Human
agccccaaaacucucc

SEQ ID NO: 3310560 - RNA, 20 nt, Human
agccccauucugccugccca

SEQ ID NO: 3310561 - RNA, 18 nt, Human
agccccaaaacucuccuc

SEQ ID NO: 3310562 - RNA, 21 nt, Human
agccccauucugccugcccag

SEQ ID NO: 3310563 - RNA, 22 nt, Human
agccccauucugccugcccagg

SEQ ID NO: 3310564 - RNA, 20 nt, Human
ugcaaaccaucauugaaauc

SEQ ID NO: 3310565 - RNA, 21 nt, Human
ugcaaaccaucauugaaaucu

SEQ ID NO: 3310566 - RNA, 14 nt, Human
agcccugguggcag

SEQ ID NO: 3310567 - RNA, 15 nt, Human
agcccugguggcagu

SEQ ID NO: 3310568 - RNA, 16 nt, Human
agcccugguggcagug

SEQ ID NO: 3310569 - RNA, 21 nt, Human
ugcacacaccagagcccaccu

SEQ ID NO: 3310570 - RNA, 17 nt, Human
ugcacacaccagagccc

SEQ ID NO: 3310571 - RNA, 18 nt, Human
ugcacacaccagagccca

SEQ ID NO: 3310572 - RNA, 23 nt, Human
agccucugaaaaccaauguucuc

SEQ ID NO: 3310573 - RNA, 22 nt, Human
ugcagccucaaccuccugggcu

SEQ ID NO: 3310574 - RNA, 20 nt, Human
ugcagccucaaccuccuggg

SEQ ID NO: 3310575 - RNA, 21 nt, Human
ugcagccucaaccuccugggc

SEQ ID NO: 3310576 - RNA, 18 nt, Human
agccucacaguccuuacc

SEQ ID NO: 3310577 - RNA, 17 nt, Human
agccucacaguccuuac

SEQ ID NO: 3310578 - RNA, 20 nt, Human
agccucaaccuccugggcua

SEQ ID NO: 3310579 - RNA, 19 nt, Human
agccucaaccuccugggcu

SEQ ID NO: 3310580 - RNA, 22 nt, Human
ugcagacaggcaagcaccuccu

SEQ ID NO: 3310581 - RNA, 15 nt, Human
ugcacuccccugcug

SEQ ID NO: 3310582 - RNA, 19 nt, Human
ugcacuccccugcugggug

SEQ ID NO: 3310583 - RNA, 17 nt, Human
ugcacuccccugcuggg

SEQ ID NO: 3310584 - RNA, 16 nt, Human
ugcacuccccugcugg

SEQ ID NO: 3310585 - RNA, 15 nt, Human
ugcacacauuuuuua

SEQ ID NO: 3310586 - RNA, 13 nt, Human
ugcacacauuuuu

SEQ ID NO: 3310587 - RNA, 12 nt, Human
ugcacacauuuu

SEQ ID NO: 3310588 - RNA, 11 nt, Human
ugcacacauuu

SEQ ID NO: 3310589 - RNA, 21 nt, Human
agcccuuagcagggaaacagc

SEQ ID NO: 3310590 - RNA, 17 nt, Human
agccgagaucacgccac

SEQ ID NO: 3310591 - RNA, 21 nt, Human
agccgagauagccaaggccaa

SEQ ID NO: 3310592 - RNA, 20 nt, Human
agccgagauagccaaggcca

SEQ ID NO: 3310593 - RNA, 16 nt, Human
ugcagacucuacagag

SEQ ID NO: 3310594 - RNA, 17 nt, Human
ugcagacucuacagagg

SEQ ID NO: 3310595 - RNA, 16 nt, Human
agcccuuagcagggaa

SEQ ID NO: 3310596 - RNA, 19 nt, Human
ugauggggcccugccuccu

SEQ ID NO: 3310597 - RNA, 16 nt, Human
ugauggggcccugccu

SEQ ID NO: 3310598 - RNA, 15 nt, Human
ugauggggcccugcc

SEQ ID NO: 3310599 - RNA, 14 nt, Human
ugauggggcccugc

SEQ ID NO: 3310600 - RNA, 23 nt, Human
ugaugcuucuucagagacuccug

SEQ ID NO: 3310601 - RNA, 16 nt, Human
ugaugagaggaaauca

SEQ ID NO: 3310602 - RNA, 15 nt, Human
ugaugagaggaaauc

SEQ ID NO: 3310603 - RNA, 14 nt, Human
ugaugagaggaaau

SEQ ID NO: 3310604 - RNA, 13 nt, Human
ugaugagaggaaa

SEQ ID NO: 3310605 - RNA, 22 nt, Human
ugauccucccaccucagccucc

SEQ ID NO: 3310606 - RNA, 21 nt, Human
ugauccucccaccucagccuc

SEQ ID NO: 3310607 - RNA, 15 nt, Human
ugauccucccaccuc

SEQ ID NO: 3310608 - RNA, 16 nt, Human
ugauccuaguuccacc

SEQ ID NO: 3310609 - RNA, 16 nt, Human
agccacugcaccgggc

SEQ ID NO: 3310610 - RNA, 19 nt, Human
ugauuaaccacuucagcug

SEQ ID NO: 3310611 - RNA, 20 nt, Human
ugauuaaauucuugcaaagu

SEQ ID NO: 3310612 - RNA, 13 nt, Human
ugauggugcaaug

SEQ ID NO: 3310613 - RNA, 19 nt, Human
ugauuaaauucuugcaaag

SEQ ID NO: 3310614 - RNA, 18 nt, Human
agccacugcaccgggcca

SEQ ID NO: 3310615 - RNA, 19 nt, Human
agccacugcaccgggccac

SEQ ID NO: 3310616 - RNA, 10 nt, Human
agccagagga

SEQ ID NO: 3310617 - RNA, 22 nt, Human
ugauucccaagcucugcuccuc

SEQ ID NO: 3310618 - RNA, 23 nt, Human
ugauucccaagcucugcuccucu

SEQ ID NO: 3310619 - RNA, 21 nt, Human
ugauucauaaugacuuaagca

SEQ ID NO: 3310620 - RNA, 16 nt, Human
ugauucauaaugacuu

SEQ ID NO: 3310621 - RNA, 15 nt, Human
ugauucauaaugacu

SEQ ID NO: 3310622 - RNA, 14 nt, Human
agcccaggaaaggc

SEQ ID NO: 3310623 - RNA, 17 nt, Human
ugauuuggggauauuuu

SEQ ID NO: 3310624 - RNA, 22 nt, Human
ugauuuccguuaaaauaccagc

SEQ ID NO: 3310625 - RNA, 18 nt, Human
ugauuuccguuaaaauac

SEQ ID NO: 3310626 - RNA, 13 nt, Human
agccaguaaaugg

SEQ ID NO: 3310627 - RNA, 21 nt, Human
agccaguaaaugggggugcau

SEQ ID NO: 3310628 - RNA, 13 nt, Human
agcccacuucugc

SEQ ID NO: 3310629 - RNA, 14 nt, Human
agcccacuucugcc

SEQ ID NO: 3310630 - RNA, 15 nt, Human
agcccacuucugcca

SEQ ID NO: 3310631 - RNA, 23 nt, Human
agcucuguccugggagugagcug

SEQ ID NO: 3310632 - RNA, 22 nt, Human
agcuccuucuguccuacucugu

SEQ ID NO: 3310633 - RNA, 23 nt, Human
agcuccuucuguccuacucugug

SEQ ID NO: 3310634 - RNA, 21 nt, Human
agcuccagcucaccagcccca

SEQ ID NO: 3310635 - RNA, 18 nt, Human
agcuccagcucaccagcc

SEQ ID NO: 3310636 - RNA, 19 nt, Human
agcuccagcucaccagccc

SEQ ID NO: 3310637 - RNA, 13 nt, Human
agcuccagcucac

SEQ ID NO: 3310638 - RNA, 17 nt, Human
agcuccagcucaccagc

SEQ ID NO: 3310639 - RNA, 19 nt, Human
agcuccaagcucccaggca

SEQ ID NO: 3310640 - RNA, 18 nt, Human
agcuccaagcucccaggc

SEQ ID NO: 3310641 - RNA, 16 nt, Human
agcuccaagcucccag

SEQ ID NO: 3310642 - RNA, 17 nt, Human
agcuccaagcucccagg

SEQ ID NO: 3310643 - RNA, 19 nt, Human
ugcccuaaaguguauuuuu

SEQ ID NO: 3310644 - RNA, 19 nt, Human
ugcccuuaccugccaggaa

SEQ ID NO: 3310645 - RNA, 20 nt, Human
ugccgcagcccugcagaggg

SEQ ID NO: 3310646 - RNA, 14 nt, Human
ugccgcagcccugc

SEQ ID NO: 3310647 - RNA, 22 nt, Human
ugcccuuaccugccaggaagcc

SEQ ID NO: 3310648 - RNA, 18 nt, Human
ugcccugugggcccccaa

SEQ ID NO: 3310649 - RNA, 15 nt, Human
ugcccugugggcccc

SEQ ID NO: 3310650 - RNA, 15 nt, Human
agcucuucuccaggc

SEQ ID NO: 3310651 - RNA, 16 nt, Human
agcucuucuccaggcu

SEQ ID NO: 3310652 - RNA, 23 nt, Human
ugcccugugaguacuacaguccu

SEQ ID NO: 3310653 - RNA, 19 nt, Human
ugccucccaucacccgcua

SEQ ID NO: 3310654 - RNA, 22 nt, Human
ugccucccaucacccgcuaaga

SEQ ID NO: 3310655 - RNA, 16 nt, Human
ugccucucucaggcca

SEQ ID NO: 3310656 - RNA, 17 nt, Human
ugccucucucaggccaa

SEQ ID NO: 3310657 - RNA, 23 nt, Human
agcugcuuuugucuaugggacuc

SEQ ID NO: 3310658 - RNA, 24 nt, Human
agcugcuuuugucuaugggacuca

SEQ ID NO: 3310659 - RNA, 15 nt, Human
agcugggacuacagg

SEQ ID NO: 3310660 - RNA, 10 nt, Human
agcugccugu

SEQ ID NO: 3310661 - RNA, 13 nt, Human
agcugccuguuca

SEQ ID NO: 3310662 - RNA, 22 nt, Human
agcugcuuuugucuaugggacu

SEQ ID NO: 3310663 - RNA, 17 nt, Human
ugccugcccaggccccu

SEQ ID NO: 3310664 - RNA, 16 nt, Human
ugccugcccaggcccc

SEQ ID NO: 3310665 - RNA, 18 nt, Human
ugccugcccaggccccug

SEQ ID NO: 3310666 - RNA, 19 nt, Human
ugccugcccaggccccugc

SEQ ID NO: 3310667 - RNA, 14 nt, Human
ugccucugacacac

SEQ ID NO: 3310668 - RNA, 16 nt, Human
ugccucugacacacag

SEQ ID NO: 3310669 - RNA, 11 nt, Human
ugccucugccu

SEQ ID NO: 3310670 - RNA, 21 nt, Human
agcuaggccuggccagaugca

SEQ ID NO: 3310671 - RNA, 16 nt, Human
agcuaggccuggccag

SEQ ID NO: 3310672 - RNA, 15 nt, Human
agcuccaagcuccca

SEQ ID NO: 3310673 - RNA, 19 nt, Human
agcuauucaguaauaacuc

SEQ ID NO: 3310674 - RNA, 13 nt, Human
agcucagggccug

SEQ ID NO: 3310675 - RNA, 12 nt, Human
agcucagggccu

SEQ ID NO: 3310676 - RNA, 19 nt, Human
agcucagggccuggcucag

SEQ ID NO: 3310677 - RNA, 18 nt, Human
agcucagggccuggcuca

SEQ ID NO: 3310678 - RNA, 20 nt, Human
agcucagggccuggcucagg

SEQ ID NO: 3310679 - RNA, 23 nt, Human
ugccccgaacauguuuuucuucu

SEQ ID NO: 3310680 - RNA, 20 nt, Human
ugcccuaaaguguauuuuuu

SEQ ID NO: 3310681 - RNA, 20 nt, Human
ugcccaaagaugcagccggu

SEQ ID NO: 3310682 - RNA, 17 nt, Human
ugcccaaagaugcagcc

SEQ ID NO: 3310683 - RNA, 17 nt, Human
ugcccagccccuucuga

SEQ ID NO: 3310684 - RNA, 16 nt, Human
ugcccagccccuucug

SEQ ID NO: 3310685 - RNA, 12 nt, Human
ugcccagccccu

SEQ ID NO: 3310686 - RNA, 13 nt, Human
ugcccagccccuu

SEQ ID NO: 3310687 - RNA, 14 nt, Human
ugcccaggccccug

SEQ ID NO: 3310688 - RNA, 15 nt, Human
ugcccaggccccugc

SEQ ID NO: 3310689 - RNA, 17 nt, Human
ugcccaggccccugcca

SEQ ID NO: 3310690 - RNA, 18 nt, Human
ugcccaggccccugccac

SEQ ID NO: 3310691 - RNA, 18 nt, Human
ugcauuugaggucuguuc

SEQ ID NO: 3310692 - RNA, 19 nt, Human
ugcauuugaggucuguucu

SEQ ID NO: 3310693 - RNA, 20 nt, Human
ugcauuuaaaagauacaguu

SEQ ID NO: 3310694 - RNA, 22 nt, Human
agcgauucuucugcuucagccu

SEQ ID NO: 3310695 - RNA, 23 nt, Human
agccuugaccauucuccaccugc

SEQ ID NO: 3310696 - RNA, 22 nt, Human
agccuugaccauucuccaccug

SEQ ID NO: 3310697 - RNA, 13 nt, Human
agccuugaacuuu

SEQ ID NO: 3310698 - RNA, 22 nt, Human
agccuugaacuuugaccucugc

SEQ ID NO: 3310699 - RNA, 16 nt, Human
agccuugaacuuugac

SEQ ID NO: 3310700 - RNA, 18 nt, Human
agccuuccagggguggga

SEQ ID NO: 3310701 - RNA, 15 nt, Human
agccuugaacuuuga

SEQ ID NO: 3310702 - RNA, 21 nt, Human
ugcauuugaggucuguucuuu

SEQ ID NO: 3310703 - RNA, 20 nt, Human
ugcauuugaggucuguucuu

SEQ ID NO: 3310704 - RNA, 18 nt, Human
ugccagcuuaucucaggg

SEQ ID NO: 3310705 - RNA, 13 nt, Human
agcggcuggcagc

SEQ ID NO: 3310706 - RNA, 22 nt, Human
agcggggacagcuccuucuguc

SEQ ID NO: 3310707 - RNA, 19 nt, Human
agcggggacagcuccuucu

SEQ ID NO: 3310708 - RNA, 20 nt, Human
agcggggacagcuccuucug

SEQ ID NO: 3310709 - RNA, 23 nt, Human
agcggcuggcagcccaccccuca

SEQ ID NO: 3310710 - RNA, 17 nt, Human
uuaaaacaacacucaca

SEQ ID NO: 3310711 - RNA, 18 nt, Human
uuaaaaaguggaaaaaua

SEQ ID NO: 3310712 - RNA, 13 nt, Human
uuaaauaaaucau

SEQ ID NO: 3310713 - RNA, 15 nt, Human
uuaaauaaaucauaa

SEQ ID NO: 3310714 - RNA, 21 nt, Human
uuaaauaaugugaaacuggau

SEQ ID NO: 3310715 - RNA, 20 nt, Human
uuaaauaaugugaaacugga

SEQ ID NO: 3310716 - RNA, 22 nt, Human
uuaaauaaugugaaacuggauu

SEQ ID NO: 3310717 - RNA, 19 nt, Human
uuaaauaaugugaaacugg

SEQ ID NO: 3310718 - RNA, 17 nt, Human
uuaaaccgccaaggcug

SEQ ID NO: 3310719 - RNA, 22 nt, Human
aguuuucacucuuauugcccac

SEQ ID NO: 3310720 - RNA, 13 nt, Human
uuaaauucuugca

SEQ ID NO: 3310721 - RNA, 16 nt, Human
uuaaauucuugcaaag

SEQ ID NO: 3310722 - RNA, 15 nt, Human
aguuucuccaagcag

SEQ ID NO: 3310723 - RNA, 13 nt, Human
aguuucuccaagc

SEQ ID NO: 3310724 - RNA, 15 nt, Human
uguuuucaguguaca

SEQ ID NO: 3310725 - RNA, 21 nt, Human
uguuuuauuuuaauucaguug

SEQ ID NO: 3310726 - RNA, 12 nt, Human
aguucucuccuu

SEQ ID NO: 3310727 - RNA, 13 nt, Human
aguucucuccuuc

SEQ ID NO: 3310728 - RNA, 16 nt, Human
aguucucuccuucuuc

SEQ ID NO: 3310729 - RNA, 16 nt, Human
uguuugccucugccuc

SEQ ID NO: 3310730 - RNA, 14 nt, Human
uguuugccucugcc

SEQ ID NO: 3310731 - RNA, 14 nt, Human
uguugucagcugaa

SEQ ID NO: 3310732 - RNA, 15 nt, Human
uguuuggggaugaga

SEQ ID NO: 3310733 - RNA, 23 nt, Human
aguugauagcacagacccugccc

SEQ ID NO: 3310734 - RNA, 22 nt, Human
aguugauagcacagacccugcc

SEQ ID NO: 3310735 - RNA, 13 nt, Human
aguugauucagcu

SEQ ID NO: 3310736 - RNA, 18 nt, Human
aguugauucagcucugca

SEQ ID NO: 3310737 - RNA, 17 nt, Human
aguugauucagcucugc

SEQ ID NO: 3310738 - RNA, 15 nt, Human
aguugauucagcucu

SEQ ID NO: 3310739 - RNA, 14 nt, Human
aguugauucagcuc

SEQ ID NO: 3310740 - RNA, 23 nt, Human
aguugauucagcucugcaagaau

SEQ ID NO: 3310741 - RNA, 14 nt, Human
aguugauagcacag

SEQ ID NO: 3310742 - RNA, 21 nt, Human
aguugauagcacagacccugc

SEQ ID NO: 3310743 - RNA, 20 nt, Human
aguugauagcacagacccug

SEQ ID NO: 3310744 - RNA, 19 nt, Human
aguugauagcacagacccu

SEQ ID NO: 3310745 - RNA, 15 nt, Human
aguugauagcacaga

SEQ ID NO: 3310746 - RNA, 13 nt, Human
uguugggccagga

SEQ ID NO: 3310747 - RNA, 16 nt, Human
uguugggccaggagcc

SEQ ID NO: 3310748 - RNA, 13 nt, Human
uguugucagcuga

SEQ ID NO: 3310749 - RNA, 21 nt, Human
aguuauuuuuauuuauuuaaa

SEQ ID NO: 3310750 - RNA, 18 nt, Human
uguucuuuccaaaguaca

SEQ ID NO: 3310751 - RNA, 20 nt, Human
agugggggaguggccacaga

SEQ ID NO: 3310752 - RNA, 19 nt, Human
agugggggaguggccacag

SEQ ID NO: 3310753 - RNA, 18 nt, Human
agugggugaauaauacag

SEQ ID NO: 3310754 - RNA, 13 nt, Human
agugggugaauaa

SEQ ID NO: 3310755 - RNA, 11 nt, Human
aguggcagcug

SEQ ID NO: 3310756 - RNA, 12 nt, Human
aguggcagcugc

SEQ ID NO: 3310757 - RNA, 13 nt, Human
aguggcagcugcu

SEQ ID NO: 3310758 - RNA, 14 nt, Human
aguggcagcugcuu

SEQ ID NO: 3310759 - RNA, 20 nt, Human
aguggcagcugcuuuugucu

SEQ ID NO: 3310760 - RNA, 19 nt, Human
agugggugaauaauacagu

SEQ ID NO: 3310761 - RNA, 21 nt, Human
agugguuccuaauccucuagg

SEQ ID NO: 3310762 - RNA, 21 nt, Human
aguguacauggaauaacaugu

SEQ ID NO: 3310763 - RNA, 22 nt, Human
aguguacauggaauaacaugua

SEQ ID NO: 3310764 - RNA, 23 nt, Human
aguguacauggaauaacauguaa

SEQ ID NO: 3310765 - RNA, 19 nt, Human
uguucuuucacccuuuucu

SEQ ID NO: 3310766 - RNA, 14 nt, Human
uguucuuuccaaag

SEQ ID NO: 3310767 - RNA, 13 nt, Human
uguucuuuccaaa

SEQ ID NO: 3310768 - RNA, 18 nt, Human
uguucuugguuuguaaau

SEQ ID NO: 3310769 - RNA, 17 nt, Human
uguucuugguuuguaaa

SEQ ID NO: 3310770 - RNA, 14 nt, Human
uguucugggacaca

SEQ ID NO: 3310771 - RNA, 16 nt, Human
uguucuuaauucuuag

SEQ ID NO: 3310772 - RNA, 14 nt, Human
uguucuuaauucuu

SEQ ID NO: 3310773 - RNA, 12 nt, Human
uguucugggaca

SEQ ID NO: 3310774 - RNA, 13 nt, Human
uguucugggacac

SEQ ID NO: 3310775 - RNA, 12 nt, Human
auacaaaagcau

SEQ ID NO: 3310776 - RNA, 15 nt, Human
auacaaaagcaugug

SEQ ID NO: 3310777 - RNA, 13 nt, Human
auacaaaagcaug

SEQ ID NO: 3310778 - RNA, 13 nt, Human
uuauacauaaaca

SEQ ID NO: 3310779 - RNA, 20 nt, Human
auacuacaguuuguuaguau

SEQ ID NO: 3310780 - RNA, 16 nt, Human
auacuacaguuuguua

SEQ ID NO: 3310781 - RNA, 15 nt, Human
auacuacaguuuguu

SEQ ID NO: 3310782 - RNA, 13 nt, Human
auacuacaguuug

SEQ ID NO: 3310783 - RNA, 21 nt, Human
auacuaaccagcagaaaugcc

SEQ ID NO: 3310784 - RNA, 19 nt, Human
auaccagccaguaaauggg

SEQ ID NO: 3310785 - RNA, 17 nt, Human
auaccagccaguaaaug

SEQ ID NO: 3310786 - RNA, 16 nt, Human
auacauuugauaaagu

SEQ ID NO: 3310787 - RNA, 14 nt, Human
auacaggaaaagcu

SEQ ID NO: 3310788 - RNA, 19 nt, Human
auacaggaaaagcugcuga

SEQ ID NO: 3310789 - RNA, 20 nt, Human
auacaggaaaagcugcugac

SEQ ID NO: 3310790 - RNA, 14 nt, Human
auaauucuacuuug

SEQ ID NO: 3310791 - RNA, 19 nt, Human
auaauacaguaucucaggg

SEQ ID NO: 3310792 - RNA, 22 nt, Human
auaaguuaacuuccaauuuaca

SEQ ID NO: 3310793 - RNA, 21 nt, Human
auaauacaccacuacauucug

SEQ ID NO: 3310794 - RNA, 23 nt, Human
auaauacaccacuacauucuguu

SEQ ID NO: 3310795 - RNA, 23 nt, Human
auaagaaccuuuugagugccuua

SEQ ID NO: 3310796 - RNA, 17 nt, Human
auaaguuaacuuccaau

SEQ ID NO: 3310797 - RNA, 22 nt, Human
auaagaaccuuuugagugccuu

SEQ ID NO: 3310798 - RNA, 16 nt, Human
uuacaggaaguacugg

SEQ ID NO: 3310799 - RNA, 15 nt, Human
uuacaggaaguacug

SEQ ID NO: 3310800 - RNA, 22 nt, Human
uuacaggaaguacuggagaaaa

SEQ ID NO: 3310801 - RNA, 18 nt, Human
uuacaggaaguacuggag

SEQ ID NO: 3310802 - RNA, 23 nt, Human
uuaccauuuugggguacccacug

SEQ ID NO: 3310803 - RNA, 20 nt, Human
auaacauguaauuaaguacu

SEQ ID NO: 3310804 - RNA, 15 nt, Human
auaaacuuuaccuuu

SEQ ID NO: 3310805 - RNA, 13 nt, Human
auaaacuuuaccu

SEQ ID NO: 3310806 - RNA, 12 nt, Human
ugguggcagcug

SEQ ID NO: 3310807 - RNA, 23 nt, Human
ugguggcagcucaccucucccuu

SEQ ID NO: 3310808 - RNA, 20 nt, Human
ugguggcagcucaccucucc

SEQ ID NO: 3310809 - RNA, 19 nt, Human
ugguggcagcucaccucuc

SEQ ID NO: 3310810 - RNA, 16 nt, Human
ugguggcagcucaccu

SEQ ID NO: 3310811 - RNA, 12 nt, Human
ugguggcagcuc

SEQ ID NO: 3310812 - RNA, 15 nt, Human
ugguggcagagugga

SEQ ID NO: 3310813 - RNA, 20 nt, Human
ugguucaggguuggccccug

SEQ ID NO: 3310814 - RNA, 22 nt, Human
ugguucaggguuggccccugcc

SEQ ID NO: 3310815 - RNA, 17 nt, Human
ugguguuuccuggcacu

SEQ ID NO: 3310816 - RNA, 15 nt, Human
ugguguuuccuggca

SEQ ID NO: 3310817 - RNA, 14 nt, Human
ugguuauggagagg

SEQ ID NO: 3310818 - RNA, 13 nt, Human
ugguuuucuguuc

SEQ ID NO: 3310819 - RNA, 21 nt, Human
aggugauccacccaccucagc

SEQ ID NO: 3310820 - RNA, 23 nt, Human
aggugauccacccaccucagccu

SEQ ID NO: 3310821 - RNA, 15 nt, Human
ugguuucagaaaugu

SEQ ID NO: 3310822 - RNA, 14 nt, Human
ugguuucagaaaug

SEQ ID NO: 3310823 - RNA, 21 nt, Human
ugguuuguaaauuaacuuuua

SEQ ID NO: 3310824 - RNA, 12 nt, Human
ugguuuucuguu

SEQ ID NO: 3310825 - RNA, 18 nt, Human
uguacaugaaaacacauu

SEQ ID NO: 3310826 - RNA, 17 nt, Human
uguacaugaaaacacau

SEQ ID NO: 3310827 - RNA, 19 nt, Human
uguacaugaaaacacauuu

SEQ ID NO: 3310828 - RNA, 19 nt, Human
uguacaaaguagaagucuu

SEQ ID NO: 3310829 - RNA, 23 nt, Human
uguacaaaguagaagucuuagau

SEQ ID NO: 3310830 - RNA, 21 nt, Human
uguaauuugugauacaaugcu

SEQ ID NO: 3310831 - RNA, 17 nt, Human
uguaauuugugauacaa

SEQ ID NO: 3310832 - RNA, 18 nt, Human
uguaaggaaugauuaauu

SEQ ID NO: 3310833 - RNA, 16 nt, Human
uguaauuugugauaca

SEQ ID NO: 3310834 - RNA, 22 nt, Human
uguaagcucuacugaggugcua

SEQ ID NO: 3310835 - RNA, 13 nt, Human
uguaaggaaugau

SEQ ID NO: 3310836 - RNA, 15 nt, Human
uguaaggaaugauua

SEQ ID NO: 3310837 - RNA, 14 nt, Human
uguaaggaaugauu

SEQ ID NO: 3310838 - RNA, 14 nt, Human
agguggggcagcuu

SEQ ID NO: 3310839 - RNA, 23 nt, Human
agguggggucacucuggcagcuc

SEQ ID NO: 3310840 - RNA, 13 nt, Human
agguggggcagcu

SEQ ID NO: 3310841 - RNA, 23 nt, Human
aggugugaaccaccacacccagc

SEQ ID NO: 3310842 - RNA, 18 nt, Human
aggugugacugaauuucu

SEQ ID NO: 3310843 - RNA, 22 nt, Human
aggugugaaccaccacacccag

SEQ ID NO: 3310844 - RNA, 20 nt, Human
aggugugacugaauuucuuu

SEQ ID NO: 3310845 - RNA, 14 nt, Human
aggugugagucacc

SEQ ID NO: 3310846 - RNA, 17 nt, Human
aggguugggcugguguc

SEQ ID NO: 3310847 - RNA, 21 nt, Human
aggucaaggcugcagugagcc

SEQ ID NO: 3310848 - RNA, 23 nt, Human
aggucauuuuuuuuaagaaaaag

SEQ ID NO: 3310849 - RNA, 22 nt, Human
aggucauuuuuuuuaagaaaaa

SEQ ID NO: 3310850 - RNA, 18 nt, Human
aggucuugaacuccuggc

SEQ ID NO: 3310851 - RNA, 20 nt, Human
aggucauuuuuuuuaagaaa

SEQ ID NO: 3310852 - RNA, 20 nt, Human
aggucuugaacuccuggccu

SEQ ID NO: 3310853 - RNA, 21 nt, Human
aggucuugaacuccuggccuc

SEQ ID NO: 3310854 - RNA, 12 nt, Human
uggucuguguga

SEQ ID NO: 3310855 - RNA, 16 nt, Human
uggucuuauuuguaaa

SEQ ID NO: 3310856 - RNA, 18 nt, Human
uggucugacccacugcuu

SEQ ID NO: 3310857 - RNA, 19 nt, Human
ugguccauagagagcaaga

SEQ ID NO: 3310858 - RNA, 19 nt, Human
aggguggugaccucugccu

SEQ ID NO: 3310859 - RNA, 17 nt, Human
aggguggugaccucugc

SEQ ID NO: 3310860 - RNA, 18 nt, Human
aggguggugaccucugcc

SEQ ID NO: 3310861 - RNA, 19 nt, Human
uggugaacagaacaaaagg

SEQ ID NO: 3310862 - RNA, 13 nt, Human
aggguuggccccu

SEQ ID NO: 3310863 - RNA, 14 nt, Human
aggguuggccccug

SEQ ID NO: 3310864 - RNA, 13 nt, Human
aggguugggcugg

SEQ ID NO: 3310865 - RNA, 15 nt, Human
aggguugggcuggug

SEQ ID NO: 3310866 - RNA, 23 nt, Human
uggguggaugccugguggcagcu

SEQ ID NO: 3310867 - RNA, 14 nt, Human
uggguggaugccug

SEQ ID NO: 3310868 - RNA, 20 nt, Human
uggucaccaaaucagcugcu

SEQ ID NO: 3310869 - RNA, 23 nt, Human
uggucaccaaaucagcugcuacu

SEQ ID NO: 3310870 - RNA, 21 nt, Human
uggucaccaaaucagcugcua

SEQ ID NO: 3310871 - RNA, 16 nt, Human
ugguccauagagagca

SEQ ID NO: 3310872 - RNA, 15 nt, Human
ugguccauagagagc

SEQ ID NO: 3310873 - RNA, 13 nt, Human
agggggcugggac

SEQ ID NO: 3310874 - RNA, 19 nt, Human
aggguacuaaggaaucuuu

SEQ ID NO: 3310875 - RNA, 16 nt, Human
aggguaucaggugcug

SEQ ID NO: 3310876 - RNA, 16 nt, Human
agucacugagacagcc

SEQ ID NO: 3310877 - RNA, 15 nt, Human
agucacugagacagc

SEQ ID NO: 3310878 - RNA, 17 nt, Human
agucacugagacagccc

SEQ ID NO: 3310879 - RNA, 15 nt, Human
ugucagcauagaagu

SEQ ID NO: 3310880 - RNA, 22 nt, Human
aguagcugggacuacaggcacc

SEQ ID NO: 3310881 - RNA, 19 nt, Human
aguagcugggacuacaggc

SEQ ID NO: 3310882 - RNA, 21 nt, Human
aguagcugggacuacaggcac

SEQ ID NO: 3310883 - RNA, 14 nt, Human
aguauuauaccuuu

SEQ ID NO: 3310884 - RNA, 15 nt, Human
aguauuauaccuuuu

SEQ ID NO: 3310885 - RNA, 15 nt, Human
uguaucccaugagcc

SEQ ID NO: 3310886 - RNA, 14 nt, Human
uguauguguaagua

SEQ ID NO: 3310887 - RNA, 12 nt, Human
uguagagccagg

SEQ ID NO: 3310888 - RNA, 15 nt, Human
uguagagccaggguc

SEQ ID NO: 3310889 - RNA, 15 nt, Human
ugucaaaguggugag

SEQ ID NO: 3310890 - RNA, 14 nt, Human
ugucaaagugguga

SEQ ID NO: 3310891 - RNA, 19 nt, Human
ugucaaaguggugagaggc

SEQ ID NO: 3310892 - RNA, 16 nt, Human
ugucaaaguggugaga

SEQ ID NO: 3310893 - RNA, 13 nt, Human
aguagcugggacu

SEQ ID NO: 3310894 - RNA, 14 nt, Human
aguagcugggacua

SEQ ID NO: 3310895 - RNA, 20 nt, Human
agucccaccuuggcugcagg

SEQ ID NO: 3310896 - RNA, 21 nt, Human
agucccaccuuggcugcaggg

SEQ ID NO: 3310897 - RNA, 23 nt, Human
agucccaccuuggcugcagggag

SEQ ID NO: 3310898 - RNA, 19 nt, Human
aguccccuguuuguuucug

SEQ ID NO: 3310899 - RNA, 14 nt, Human
aguccccuguuugu

SEQ ID NO: 3310900 - RNA, 19 nt, Human
agucagggguucccuuuuu

SEQ ID NO: 3310901 - RNA, 16 nt, Human
ugucagccauuccugu

SEQ ID NO: 3310902 - RNA, 12 nt, Human
ugucccuuuucc

SEQ ID NO: 3310903 - RNA, 13 nt, Human
ugucucugagagu

SEQ ID NO: 3310904 - RNA, 12 nt, Human
agucccugccaa

SEQ ID NO: 3310905 - RNA, 16 nt, Human
agucccugccaaugga

SEQ ID NO: 3310906 - RNA, 14 nt, Human
agucccugccaaug

SEQ ID NO: 3310907 - RNA, 13 nt, Human
agucccugccaau

SEQ ID NO: 3310908 - RNA, 23 nt, Human
aguccccuguuuguuucugaaag

SEQ ID NO: 3310909 - RNA, 22 nt, Human
ugucucuuuaaugucacaggca

SEQ ID NO: 3310910 - RNA, 21 nt, Human
ugucucuuuaaugucacaggc

SEQ ID NO: 3310911 - RNA, 22 nt, Human
ugucucuugguccugcugcagu

SEQ ID NO: 3310912 - RNA, 21 nt, Human
ugucucuugguccugcugcag

SEQ ID NO: 3310913 - RNA, 20 nt, Human
ugucucuugguccugcugca

SEQ ID NO: 3310914 - RNA, 19 nt, Human
ugucucuugguccugcugc

SEQ ID NO: 3310915 - RNA, 18 nt, Human
ugucucuugguccugcug

SEQ ID NO: 3310916 - RNA, 15 nt, Human
ugucuugcaauggca

SEQ ID NO: 3310917 - RNA, 17 nt, Human
ugucuugcaauggcagc

SEQ ID NO: 3310918 - RNA, 18 nt, Human
ugucuugcaauggcagcc

SEQ ID NO: 3310919 - RNA, 20 nt, Human
ugucuugcaauggcagccuu

SEQ ID NO: 3310920 - RNA, 21 nt, Human
ugucuugcaauggcagccuug

SEQ ID NO: 3310921 - RNA, 16 nt, Human
ugugaaccaccacacc

SEQ ID NO: 3310922 - RNA, 21 nt, Human
ugugaaccaccacacccagcc

SEQ ID NO: 3310923 - RNA, 22 nt, Human
ugugaaccaccacacccagccc

SEQ ID NO: 3310924 - RNA, 23 nt, Human
ugugaaccaccacacccagccca

SEQ ID NO: 3310925 - RNA, 15 nt, Human
ugugaaccaccacac

SEQ ID NO: 3310926 - RNA, 19 nt, Human
ugugagcacaaagguagcu

SEQ ID NO: 3310927 - RNA, 14 nt, Human
ugugaagagaacca

SEQ ID NO: 3310928 - RNA, 23 nt, Human
agugaaaaaggaggaagagaaaa

SEQ ID NO: 3310929 - RNA, 20 nt, Human
agugaaaaaggaggaagaga

SEQ ID NO: 3310930 - RNA, 17 nt, Human
agugaaaaaggaggaag

SEQ ID NO: 3310931 - RNA, 11 nt, Human
agugaaaaagg

SEQ ID NO: 3310932 - RNA, 13 nt, Human
agugagacucugu

SEQ ID NO: 3310933 - RNA, 21 nt, Human
agugagacccugucucaaaaa

SEQ ID NO: 3310934 - RNA, 17 nt, Human
agugagacccugucuca

SEQ ID NO: 3310935 - RNA, 22 nt, Human
agugagacucugucucaaaaaa

SEQ ID NO: 3310936 - RNA, 16 nt, Human
agugagacucugucuc

SEQ ID NO: 3310937 - RNA, 17 nt, Human
agugagacucugucuca

SEQ ID NO: 3310938 - RNA, 17 nt, Human
ugugauggggcccugcc

SEQ ID NO: 3310939 - RNA, 16 nt, Human
ugugauggggcccugc

SEQ ID NO: 3310940 - RNA, 15 nt, Human
ugugauggggcccug

SEQ ID NO: 3310941 - RNA, 22 nt, Human
agugagcacuaaggugugcucu

SEQ ID NO: 3310942 - RNA, 14 nt, Human
aaaaacacaaaagu

SEQ ID NO: 3310943 - RNA, 12 nt, Human
aaaacacauuuu

SEQ ID NO: 3310944 - RNA, 12 nt, Human
aaaaagaggcua

SEQ ID NO: 3310945 - RNA, 13 nt, Human
aaaaacugauuuu

SEQ ID NO: 3310946 - RNA, 14 nt, Human
aaaaacauggccuu

SEQ ID NO: 3310947 - RNA, 15 nt, Human
aaaaacugauuuuuu

SEQ ID NO: 3310948 - RNA, 22 nt, Human
aaguuguaggcauaaagucagg

SEQ ID NO: 3310949 - RNA, 22 nt, Human
aagugcugggauuacaggugug

SEQ ID NO: 3310950 - RNA, 16 nt, Human
aagucuuagauguaua

SEQ ID NO: 3310951 - RNA, 20 nt, Human
aagguuaauguucaucaucc

SEQ ID NO: 3310952 - RNA, 15 nt, Human
aagguuaauaaagua

SEQ ID NO: 3310953 - RNA, 16 nt, Human
aagguuaauaaaguaa

SEQ ID NO: 3310954 - RNA, 11 nt, Human
aaggugggagg

SEQ ID NO: 3310955 - RNA, 23 nt, Human
aaguacuucuccacccugcucuc

SEQ ID NO: 3310956 - RNA, 11 nt, Human
aaguacuucuu

SEQ ID NO: 3310957 - RNA, 16 nt, Human
aaguaucccuacugua

SEQ ID NO: 3310958 - RNA, 14 nt, Human
aagcagaggaagga

SEQ ID NO: 3310959 - RNA, 18 nt, Human
aagccauaauuguucuua

SEQ ID NO: 3310960 - RNA, 16 nt, Human
aaggcaaggcugucaa

SEQ ID NO: 3310961 - RNA, 18 nt, Human
aaggcaaggcugucaauu

SEQ ID NO: 3310962 - RNA, 17 nt, Human
aaggcaaggcugucaau

SEQ ID NO: 3310963 - RNA, 11 nt, Human
aagcugggcag

SEQ ID NO: 3310964 - RNA, 13 nt, Human
aagcugggcaggu

SEQ ID NO: 3310965 - RNA, 18 nt, Human
aaggacauugcggacagc

SEQ ID NO: 3310966 - RNA, 20 nt, Human
aagcugcacccucaggcagg

SEQ ID NO: 3310967 - RNA, 21 nt, Human
aagcugcacccucaggcaggu

SEQ ID NO: 3310968 - RNA, 22 nt, Human
aagcugcacccucaggcaggug

SEQ ID NO: 3310969 - RNA, 12 nt, Human
aagcguggugga

SEQ ID NO: 3310970 - RNA, 21 nt, Human
aagcgugagccacugcaccgg

SEQ ID NO: 3310971 - RNA, 13 nt, Human
aaugucaguguga

SEQ ID NO: 3310972 - RNA, 16 nt, Human
aaugucagugugacug

SEQ ID NO: 3310973 - RNA, 15 nt, Human
aaugucagugugacu

SEQ ID NO: 3310974 - RNA, 22 nt, Human
aaugucuaguuguaacaccaug

SEQ ID NO: 3310975 - RNA, 21 nt, Human
aaugucagugugacugaucuc

SEQ ID NO: 3310976 - RNA, 17 nt, Human
aaugucagugugacuga

SEQ ID NO: 3310977 - RNA, 20 nt, Human
aaugucucuuuaaugucaca

SEQ ID NO: 3310978 - RNA, 13 nt, Human
aaugggcagagca

SEQ ID NO: 3310979 - RNA, 15 nt, Human
aaugggcagagcaga

SEQ ID NO: 3310980 - RNA, 18 nt, Human
aauuaaaacacaacaucu

SEQ ID NO: 3310981 - RNA, 19 nt, Human
aauguuugccucugccucu

SEQ ID NO: 3310982 - RNA, 16 nt, Human
aauguuugccucugcc

SEQ ID NO: 3310983 - RNA, 18 nt, Human
aauguuugccucugccuc

SEQ ID NO: 3310984 - RNA, 18 nt, Human
aauuaguggcacuugcuu

SEQ ID NO: 3310985 - RNA, 13 nt, Human
aaucuccaaaaua

SEQ ID NO: 3310986 - RNA, 14 nt, Human
aaucuccaaaauaa

SEQ ID NO: 3310987 - RNA, 21 nt, Human
aaugaugauccuaggcauuug

SEQ ID NO: 3310988 - RNA, 22 nt, Human
aaucugcuuuuuaaagaaugcu

SEQ ID NO: 3310989 - RNA, 16 nt, Human
aaugaaccacaucuug

SEQ ID NO: 3310990 - RNA, 17 nt, Human
aaugaaccacaucuugc

SEQ ID NO: 3310991 - RNA, 23 nt, Human
aaugaaccacaucuugcucugcu

SEQ ID NO: 3310992 - RNA, 18 nt, Human
aauauaggaacuuaaaua

SEQ ID NO: 3310993 - RNA, 16 nt, Human
aauauaggaacuuaaa

SEQ ID NO: 3310994 - RNA, 21 nt, Human
aauauaggaacuuaaauaaug

SEQ ID NO: 3310995 - RNA, 20 nt, Human
aauauaggaacuuaaauaau

SEQ ID NO: 3310996 - RNA, 19 nt, Human
aacaccucugcacaagcug

SEQ ID NO: 3310997 - RNA, 19 nt, Human
aacacauuuuucuuaggga

SEQ ID NO: 3310998 - RNA, 14 nt, Human
aacccuggugacca

SEQ ID NO: 3310999 - RNA, 14 nt, Human
aacauguaauuaag

SEQ ID NO: 3311000 - RNA, 21 nt, Human
aacauguaauuaaguacuaug

SEQ ID NO: 3311001 - RNA, 22 nt, Human
aaccacucuaucaaguauuaua

SEQ ID NO: 3311002 - RNA, 14 nt, Human
aacaucaacaucuu

SEQ ID NO: 3311003 - RNA, 20 nt, Human
aacuuugaccucugcagcaa

SEQ ID NO: 3311004 - RNA, 19 nt, Human
aacuuugaccucugcagca

SEQ ID NO: 3311005 - RNA, 15 nt, Human
aacuuuuauaaacuu

SEQ ID NO: 3311006 - RNA, 12 nt, Human
aacuuuuauaaa

SEQ ID NO: 3311007 - RNA, 13 nt, Human
aacuuugaccucu

SEQ ID NO: 3311008 - RNA, 17 nt, Human
aacuuugaccucugcag

SEQ ID NO: 3311009 - RNA, 14 nt, Human
aacuuugaccucug

SEQ ID NO: 3311010 - RNA, 19 nt, Human
aacuuuuauaaacuuuacc

SEQ ID NO: 3311011 - RNA, 16 nt, Human
aacuuuuauaaacuuu

SEQ ID NO: 3311012 - RNA, 16 nt, Human
aacucaccugccccuc

SEQ ID NO: 3311013 - RNA, 15 nt, Human
aacucaccugccccu

SEQ ID NO: 3311014 - RNA, 12 nt, Human
aacucaccccag

SEQ ID NO: 3311015 - RNA, 17 nt, Human
aacuuaaauaaugugaa

SEQ ID NO: 3311016 - RNA, 19 nt, Human
aacugauuuuuuuuuccuu

SEQ ID NO: 3311017 - RNA, 17 nt, Human
aacugauuuuuuuuucc

SEQ ID NO: 3311018 - RNA, 18 nt, Human
aaauggaagacagcucuu

SEQ ID NO: 3311019 - RNA, 16 nt, Human
aaauggaaaugggcag

SEQ ID NO: 3311020 - RNA, 20 nt, Human
aaauggacguguuaugacuc

SEQ ID NO: 3311021 - RNA, 22 nt, Human
aaauggacguguuaugacucca

SEQ ID NO: 3311022 - RNA, 21 nt, Human
aaauggacguguuaugacucc

SEQ ID NO: 3311023 - RNA, 11 nt, Human
aaagugcuggg

SEQ ID NO: 3311024 - RNA, 11 nt, Human
aaagagguuuu

SEQ ID NO: 3311025 - RNA, 15 nt, Human
aaaacacauuuuucu

SEQ ID NO: 3311026 - RNA, 13 nt, Human
aaaacacauuuuu

SEQ ID NO: 3311027 - RNA, 13 nt, Human
aaaauucagugga

SEQ ID NO: 3311028 - RNA, 18 nt, Human
aaacacuguucucugccc

SEQ ID NO: 3311029 - RNA, 22 nt, Human
aaacacuguucucugcccucca

SEQ ID NO: 3311030 - RNA, 19 nt, Human
aaacacuguucucugcccu

SEQ ID NO: 3311031 - RNA, 14 nt, Human
acuggaagcacagc

SEQ ID NO: 3311032 - RNA, 15 nt, Human
acuggaagcacagcu

SEQ ID NO: 3311033 - RNA, 12 nt, Human
acugucuucagu

SEQ ID NO: 3311034 - RNA, 18 nt, Human
acuucugccauauucugu

SEQ ID NO: 3311035 - RNA, 19 nt, Human
acuucacauauugauuucc

SEQ ID NO: 3311036 - RNA, 23 nt, Human
agaaaauggacguguuaugacuc

SEQ ID NO: 3311037 - RNA, 22 nt, Human
agaaaauggacguguuaugacu

SEQ ID NO: 3311038 - RNA, 20 nt, Human
agaaaauggacguguuauga

SEQ ID NO: 3311039 - RNA, 15 nt, Human
agaaaauggacgugu

SEQ ID NO: 3311040 - RNA, 23 nt, Human
agaaaauggaagacagcucuuau

SEQ ID NO: 3311041 - RNA, 22 nt, Human
acuuuuauaaacuuuaccuuuu

SEQ ID NO: 3311042 - RNA, 19 nt, Human
acuuuuauaaacuuuaccu

SEQ ID NO: 3311043 - RNA, 15 nt, Human
acuuuuauaaacuuu

SEQ ID NO: 3311044 - RNA, 23 nt, Human
acuuuguucuggcucuuccaggc

SEQ ID NO: 3311045 - RNA, 20 nt, Human
acuuuguucuggcucuucca

SEQ ID NO: 3311046 - RNA, 21 nt, Human
acuuuccucuuuggucuacac

SEQ ID NO: 3311047 - RNA, 23 nt, Human
acuuuccuucauucaacccaccu

SEQ ID NO: 3311048 - RNA, 20 nt, Human
agaaaggaggggauagagag

SEQ ID NO: 3311049 - RNA, 23 nt, Human
agaaaggaggggauagagagaga

SEQ ID NO: 3311050 - RNA, 15 nt, Human
agaaauaaaguuucu

SEQ ID NO: 3311051 - RNA, 18 nt, Human
agaaauaaaguuucuguu

SEQ ID NO: 3311052 - RNA, 14 nt, Human
acucuaucaaguau

SEQ ID NO: 3311053 - RNA, 20 nt, Human
acucuggcagcucagagagg

SEQ ID NO: 3311054 - RNA, 16 nt, Human
acucuaucaaguauua

SEQ ID NO: 3311055 - RNA, 18 nt, Human
acucuuaaaacccaagug

SEQ ID NO: 3311056 - RNA, 11 nt, Human
acucuuaaaac

SEQ ID NO: 3311057 - RNA, 16 nt, Human
acucugugucaggugg

SEQ ID NO: 3311058 - RNA, 18 nt, Human
acucuacccucuuagaaa

SEQ ID NO: 3311059 - RNA, 13 nt, Human
acucuacccucuu

SEQ ID NO: 3311060 - RNA, 21 nt, Human
acucuacccucuuagaaaaac

SEQ ID NO: 3311061 - RNA, 14 nt, Human
acucccccaggugg

SEQ ID NO: 3311062 - RNA, 17 nt, Human
acuccccugcugggugu

SEQ ID NO: 3311063 - RNA, 13 nt, Human
acuccccugcugg

SEQ ID NO: 3311064 - RNA, 18 nt, Human
acucaaaagcugggcagg

SEQ ID NO: 3311065 - RNA, 16 nt, Human
acucaaacucuuaaaa

SEQ ID NO: 3311066 - RNA, 17 nt, Human
acucaaacucuuaaaac

SEQ ID NO: 3311067 - RNA, 15 nt, Human
acgcugugcugcccu

SEQ ID NO: 3311068 - RNA, 17 nt, Human
acgcugugcugcccugc

SEQ ID NO: 3311069 - RNA, 16 nt, Human
acgcugugcugcccug

SEQ ID NO: 3311070 - RNA, 18 nt, Human
acgcugugcugcccugcc

SEQ ID NO: 3311071 - RNA, 11 nt, Human
acguggcugcu

SEQ ID NO: 3311072 - RNA, 15 nt, Human
acguggcugcuucaa

SEQ ID NO: 3311073 - RNA, 14 nt, Human
acguggcugcuuca

SEQ ID NO: 3311074 - RNA, 13 nt, Human
acguggcugcuuc

SEQ ID NO: 3311075 - RNA, 22 nt, Human
acuaaguuuuuauggcuuuugu

SEQ ID NO: 3311076 - RNA, 15 nt, Human
acuaaguuuuuaugg

SEQ ID NO: 3311077 - RNA, 13 nt, Human
acgauuucuguuu

SEQ ID NO: 3311078 - RNA, 12 nt, Human
acgauuucuguu

SEQ ID NO: 3311079 - RNA, 18 nt, Human
acgccacugcacuauagc

SEQ ID NO: 3311080 - RNA, 17 nt, Human
acgauuucuguuuagau

SEQ ID NO: 3311081 - RNA, 14 nt, Human
acgauuucuguuua

SEQ ID NO: 3311082 - RNA, 20 nt, Human
accugccccucaacucuccu

SEQ ID NO: 3311083 - RNA, 23 nt, Human
accugccccucaacucuccucca

SEQ ID NO: 3311084 - RNA, 21 nt, Human
accucugcacaagcugcaccc

SEQ ID NO: 3311085 - RNA, 18 nt, Human
accucugcacaagcugca

SEQ ID NO: 3311086 - RNA, 16 nt, Human
accucugcacaagcug

SEQ ID NO: 3311087 - RNA, 23 nt, Human
accuuucaauaggaaaaacugau

SEQ ID NO: 3311088 - RNA, 21 nt, Human
accuuucaauaggaaaaacug

SEQ ID NO: 3311089 - RNA, 17 nt, Human
accuuucaauaggaaaa

SEQ ID NO: 3311090 - RNA, 16 nt, Human
accuuucaauaggaaa

SEQ ID NO: 3311091 - RNA, 12 nt, Human
accuuggcucaa

SEQ ID NO: 3311092 - RNA, 14 nt, Human
accuuggcucaagu

SEQ ID NO: 3311093 - RNA, 12 nt, Human
accuuggcugca

SEQ ID NO: 3311094 - RNA, 23 nt, Human
acagcuccuucuguccuacucug

SEQ ID NO: 3311095 - RNA, 23 nt, Human
acagcugccugggaucccucauc

SEQ ID NO: 3311096 - RNA, 13 nt, Human
acagcugccuggg

SEQ ID NO: 3311097 - RNA, 14 nt, Human
acagcugccuggga

SEQ ID NO: 3311098 - RNA, 12 nt, Human
acagcuccuucu

SEQ ID NO: 3311099 - RNA, 13 nt, Human
acagcuccuucug

SEQ ID NO: 3311100 - RNA, 14 nt, Human
acagcuccuucugu

SEQ ID NO: 3311101 - RNA, 19 nt, Human
acaggugugaaccaccaca

SEQ ID NO: 3311102 - RNA, 20 nt, Human
acaggugugaaccaccacac

SEQ ID NO: 3311103 - RNA, 23 nt, Human
acaggugugaaccaccacaccca

SEQ ID NO: 3311104 - RNA, 18 nt, Human
acaggcaagcaccuccug

SEQ ID NO: 3311105 - RNA, 15 nt, Human
acaggcaagcaccuc

SEQ ID NO: 3311106 - RNA, 16 nt, Human
acaggcaagcaccucc

SEQ ID NO: 3311107 - RNA, 21 nt, Human
acagaggggguggccucccaa

SEQ ID NO: 3311108 - RNA, 22 nt, Human
acagaggggguggccucccaac

SEQ ID NO: 3311109 - RNA, 12 nt, Human
acagagucucac

SEQ ID NO: 3311110 - RNA, 14 nt, Human
acagagucucacug

SEQ ID NO: 3311111 - RNA, 17 nt, Human
acagagucucacuguug

SEQ ID NO: 3311112 - RNA, 19 nt, Human
acagagucucacuguugcc

SEQ ID NO: 3311113 - RNA, 19 nt, Human
acagccacggccaggccag

SEQ ID NO: 3311114 - RNA, 15 nt, Human
acagccaugauucuu

SEQ ID NO: 3311115 - RNA, 13 nt, Human
acaaagacugagu

SEQ ID NO: 3311116 - RNA, 21 nt, Human
acaaaccuguuucugcagcca

SEQ ID NO: 3311117 - RNA, 15 nt, Human
acaaacgggcucagc

SEQ ID NO: 3311118 - RNA, 15 nt, Human
acacggacacucaaa

SEQ ID NO: 3311119 - RNA, 14 nt, Human
acacuaaccacgcu

SEQ ID NO: 3311120 - RNA, 11 nt, Human
acacagcucug

SEQ ID NO: 3311121 - RNA, 12 nt, Human
acacagcucugu

SEQ ID NO: 3311122 - RNA, 12 nt, Human
acaccagagccc

SEQ ID NO: 3311123 - RNA, 21 nt, Human
acaccacuacauucuguuaau

SEQ ID NO: 3311124 - RNA, 14 nt, Human
acaauuuauuaugg

SEQ ID NO: 3311125 - RNA, 16 nt, Human
acaauuuauuauggca

SEQ ID NO: 3311126 - RNA, 15 nt, Human
acaauuuauuauggc

SEQ ID NO: 3311127 - RNA, 18 nt, Human
acacaaacgggcucagca

SEQ ID NO: 3311128 - RNA, 21 nt, Human
acauguuuuucuucucccuca

SEQ ID NO: 3311129 - RNA, 20 nt, Human
acaugcacagcuaacaugga

SEQ ID NO: 3311130 - RNA, 18 nt, Human
acaugcaaggucauuuuu

SEQ ID NO: 3311131 - RNA, 19 nt, Human
acaugcaaggucauuuuuu

SEQ ID NO: 3311132 - RNA, 19 nt, Human
acauguuuuucuucucccu

SEQ ID NO: 3311133 - RNA, 23 nt, Human
acauaaacaagaccacguuucua

SEQ ID NO: 3311134 - RNA, 19 nt, Human
acaucagcacgauuucugu

SEQ ID NO: 3311135 - RNA, 22 nt, Human
acaucagcacgauuucuguuua

SEQ ID NO: 3311136 - RNA, 21 nt, Human
acaucagcacgauuucuguuu

SEQ ID NO: 3311137 - RNA, 20 nt, Human
acaucagcacgauuucuguu

SEQ ID NO: 3311138 - RNA, 21 nt, Human
accaacgucugugccauuuug

SEQ ID NO: 3311139 - RNA, 17 nt, Human
accagcagccuggaccc

SEQ ID NO: 3311140 - RNA, 14 nt, Human
accagcagccugga

SEQ ID NO: 3311141 - RNA, 13 nt, Human
accagcagccugg

SEQ ID NO: 3311142 - RNA, 14 nt, Human
accacuacauucug

SEQ ID NO: 3311143 - RNA, 19 nt, Human
accacguuucuaaaggcua

SEQ ID NO: 3311144 - RNA, 15 nt, Human
accacguuucuaaag

SEQ ID NO: 3311145 - RNA, 15 nt, Human
accccggccaccugc

SEQ ID NO: 3311146 - RNA, 23 nt, Human
acccaagggccuggccugagcug

SEQ ID NO: 3311147 - RNA, 16 nt, Human
acccaagggccuggcc

SEQ ID NO: 3311148 - RNA, 13 nt, Human
acccaagggccug

SEQ ID NO: 3311149 - RNA, 16 nt, Human
acccaugcugcccugu

SEQ ID NO: 3311150 - RNA, 19 nt, Human
acccaugcugcccugugag

SEQ ID NO: 3311151 - RNA, 18 nt, Human
acccaugcugcccuguga

SEQ ID NO: 3311152 - RNA, 17 nt, Human
acccaugcugcccugug

SEQ ID NO: 3311153 - RNA, 22 nt, Human
accaucccugaaggccccgccc

SEQ ID NO: 3311154 - RNA, 21 nt, Human
accaucccugaaggccccgcc

SEQ ID NO: 3311155 - RNA, 16 nt, Human
accaucaugucuggcu

SEQ ID NO: 3311156 - RNA, 17 nt, Human
accaucaugucuggcua

SEQ ID NO: 3311157 - RNA, 16 nt, Human
accaucccugaaggcc

SEQ ID NO: 3311158 - RNA, 18 nt, Human
accaucccugaaggcccc

SEQ ID NO: 3311159 - RNA, 14 nt, Human
accaucaugucugg

SEQ ID NO: 3311160 - RNA, 18 nt, Human
agccucccaaagugcugg

SEQ ID NO: 3311161 - RNA, 19 nt, Human
agccucccaaagugcuggg

SEQ ID NO: 3311162 - RNA, 21 nt, Human
agccgagaucacgccacugca

SEQ ID NO: 3311163 - RNA, 19 nt, Human
agccgagauugcaccacug

SEQ ID NO: 3311164 - RNA, 20 nt, Human
agccgagauugcaccacugc

SEQ ID NO: 3311165 - RNA, 18 nt, Human
agccgagaucacgccacu

SEQ ID NO: 3311166 - RNA, 22 nt, Human
agccgcuggggccaguuggucc

SEQ ID NO: 3311167 - RNA, 14 nt, Human
agccgcuggggcca

SEQ ID NO: 3311168 - RNA, 22 nt, Human
agccucccgaguagcugggacu

SEQ ID NO: 3311169 - RNA, 17 nt, Human
agccucccaaagugcug

SEQ ID NO: 3311170 - RNA, 18 nt, Human
agccucccgaauagcugg

SEQ ID NO: 3311171 - RNA, 19 nt, Human
agccucccgaauagcuggg

SEQ ID NO: 3311172 - RNA, 20 nt, Human
agccucccgaauagcuggga

SEQ ID NO: 3311173 - RNA, 22 nt, Human
agccucccgaauagcugggacu

SEQ ID NO: 3311174 - RNA, 17 nt, Human
agccucccgaguagcug

SEQ ID NO: 3311175 - RNA, 16 nt, Human
agccccagugcccaca

SEQ ID NO: 3311176 - RNA, 20 nt, Human
agccccaucccaaacccuuc

SEQ ID NO: 3311177 - RNA, 15 nt, Human
agcccugagcuuucu

SEQ ID NO: 3311178 - RNA, 19 nt, Human
agccgagaucacgccacug

SEQ ID NO: 3311179 - RNA, 20 nt, Human
agccgagaucacgccacugc

SEQ ID NO: 3311180 - RNA, 15 nt, Human
agcagccacauuccu

SEQ ID NO: 3311181 - RNA, 21 nt, Human
agcagccacauuccugaugcu

SEQ ID NO: 3311182 - RNA, 19 nt, Human
agcacuaaggugugcucug

SEQ ID NO: 3311183 - RNA, 22 nt, Human
agccagauuucacucuccuugg

SEQ ID NO: 3311184 - RNA, 20 nt, Human
agccagaggagagaggaccc

SEQ ID NO: 3311185 - RNA, 18 nt, Human
agccagaggagagaggac

SEQ ID NO: 3311186 - RNA, 20 nt, Human
agccaaggccaaaggaagca

SEQ ID NO: 3311187 - RNA, 22 nt, Human
agccaaggccaaaggaagcaca

SEQ ID NO: 3311188 - RNA, 23 nt, Human
agccaaggccaaaggaagcacau

SEQ ID NO: 3311189 - RNA, 18 nt, Human
agccaaagcuaggccugg

SEQ ID NO: 3311190 - RNA, 19 nt, Human
agccaaagcuaggccuggc

SEQ ID NO: 3311191 - RNA, 20 nt, Human
agccaaagcuaggccuggcc

SEQ ID NO: 3311192 - RNA, 12 nt, Human
agcaugccugga

SEQ ID NO: 3311193 - RNA, 19 nt, Human
agacggagucccaccuugg

SEQ ID NO: 3311194 - RNA, 18 nt, Human
agacggagucccaccuug

SEQ ID NO: 3311195 - RNA, 16 nt, Human
agacagcccgggcucu

SEQ ID NO: 3311196 - RNA, 17 nt, Human
agacagcccgggcucug

SEQ ID NO: 3311197 - RNA, 20 nt, Human
agacagcccgggcucugccu

SEQ ID NO: 3311198 - RNA, 18 nt, Human
agacagcccgggcucugc

SEQ ID NO: 3311199 - RNA, 21 nt, Human
agaccaucccugaaggccccg

SEQ ID NO: 3311200 - RNA, 18 nt, Human
agaccaucccugaaggcc

SEQ ID NO: 3311201 - RNA, 17 nt, Human
agaccaucccugaaggc

SEQ ID NO: 3311202 - RNA, 14 nt, Human
agaccaucccugaa

SEQ ID NO: 3311203 - RNA, 13 nt, Human
agaccaucccuga

SEQ ID NO: 3311204 - RNA, 17 nt, Human
agacaaugacuuacugu

SEQ ID NO: 3311205 - RNA, 13 nt, Human
agacaaugacuua

SEQ ID NO: 3311206 - RNA, 21 nt, Human
agacaauuuauuauggcacau

SEQ ID NO: 3311207 - RNA, 15 nt, Human
agacaauuuauuaug

SEQ ID NO: 3311208 - RNA, 14 nt, Human
agacaauuuauuau

SEQ ID NO: 3311209 - RNA, 21 nt, Human
agagaagagauugugguuuca

SEQ ID NO: 3311210 - RNA, 10 nt, Human
agagaagaga

SEQ ID NO: 3311211 - RNA, 23 nt, Human
agagaggguggugaccucugccu

SEQ ID NO: 3311212 - RNA, 23 nt, Human
agacugaguacguugugcauuug

SEQ ID NO: 3311213 - RNA, 23 nt, Human
agaggguggugaccucugccuga

SEQ ID NO: 3311214 - RNA, 13 nt, Human
agauagccaaggc

SEQ ID NO: 3311215 - RNA, 22 nt, Human
agauacuuggggggcugaggug

SEQ ID NO: 3311216 - RNA, 13 nt, Human
agaggagaggggc

SEQ ID NO: 3311217 - RNA, 16 nt, Human
agaggggaagagacuu

SEQ ID NO: 3311218 - RNA, 22 nt, Human
agaggggaacagacuggaagca

SEQ ID NO: 3311219 - RNA, 16 nt, Human
agauagccaaggccaa

SEQ ID NO: 3311220 - RNA, 15 nt, Human
agauagccaaggcca

SEQ ID NO: 3311221 - RNA, 20 nt, Human
aggauguucugggacacagu

SEQ ID NO: 3311222 - RNA, 18 nt, Human
aggauguucugggacaca

SEQ ID NO: 3311223 - RNA, 17 nt, Human
aggaggggauagagaga

SEQ ID NO: 3311224 - RNA, 12 nt, Human
aggauucuuccu

SEQ ID NO: 3311225 - RNA, 20 nt, Human
aggaccccuccaugugggcu

SEQ ID NO: 3311226 - RNA, 20 nt, Human
aggaccucaggugagaagca

SEQ ID NO: 3311227 - RNA, 14 nt, Human
aggaccucagguga

SEQ ID NO: 3311228 - RNA, 15 nt, Human
aggagagcuagcagc

SEQ ID NO: 3311229 - RNA, 16 nt, Human
aggagaggggcacagg

SEQ ID NO: 3311230 - RNA, 14 nt, Human
aggagaggggcaca

SEQ ID NO: 3311231 - RNA, 18 nt, Human
aggagaggggcacagggu

SEQ ID NO: 3311232 - RNA, 15 nt, Human
aggaaaaacugauuu

SEQ ID NO: 3311233 - RNA, 13 nt, Human
aggaaaaacugau

SEQ ID NO: 3311234 - RNA, 17 nt, Human
agcugggugucaagagg

SEQ ID NO: 3311235 - RNA, 22 nt, Human
agcugggugucaagagggucug

SEQ ID NO: 3311236 - RNA, 21 nt, Human
agcuggucccacucaguccau

SEQ ID NO: 3311237 - RNA, 19 nt, Human
agcuggucccacucagucc

SEQ ID NO: 3311238 - RNA, 23 nt, Human
aggcuagugugguguuuccuggc

SEQ ID NO: 3311239 - RNA, 17 nt, Human
agggacgcuacccggga

SEQ ID NO: 3311240 - RNA, 21 nt, Human
agggacgcuacccgggaaggg

SEQ ID NO: 3311241 - RNA, 13 nt, Human
agggacagagggg

SEQ ID NO: 3311242 - RNA, 12 nt, Human
agggacagaggg

SEQ ID NO: 3311243 - RNA, 18 nt, Human
aggcugccucucccauca

SEQ ID NO: 3311244 - RNA, 17 nt, Human
agggcacaccgggcacu

SEQ ID NO: 3311245 - RNA, 20 nt, Human
agggcacaccgggcacucag

SEQ ID NO: 3311246 - RNA, 21 nt, Human
agggcacaccgggcacucaga

SEQ ID NO: 3311247 - RNA, 22 nt, Human
agggcacagaaaauggaagaca

SEQ ID NO: 3311248 - RNA, 17 nt, Human
agggccuggccugagcu

SEQ ID NO: 3311249 - RNA, 16 nt, Human
agggccuggccugagc

SEQ ID NO: 3311250 - RNA, 15 nt, Human
agggccuggccugag

SEQ ID NO: 3311251 - RNA, 14 nt, Human
agggccuggccuga

SEQ ID NO: 3311252 - RNA, 19 nt, Human
agggcgggaggauguucug

SEQ ID NO: 3311253 - RNA, 16 nt, Human
aggggauagagagaga

SEQ ID NO: 3311254 - RNA, 21 nt, Human
aggggauagagagagaccacu

SEQ ID NO: 3311255 - RNA, 15 nt, Human
aggggcacagggucu

SEQ ID NO: 3311256 - RNA, 17 nt, Human
aggugcugccauccagg

SEQ ID NO: 3311257 - RNA, 16 nt, Human
aggugcugccauccag

SEQ ID NO: 3311258 - RNA, 14 nt, Human
aggucgaggcagga

SEQ ID NO: 3311259 - RNA, 14 nt, Human
agguuaauguucau

SEQ ID NO: 3311260 - RNA, 17 nt, Human
agguucaaagauauuuu

SEQ ID NO: 3311261 - RNA, 15 nt, Human
agguucaaagauauu

SEQ ID NO: 3311262 - RNA, 15 nt, Human
agguuaauaaaguaa

SEQ ID NO: 3311263 - RNA, 13 nt, Human
agguucagcuugu

SEQ ID NO: 3311264 - RNA, 17 nt, Human
agguaaggaauaccugu

SEQ ID NO: 3311265 - RNA, 22 nt, Human
auaugccugggcagaaggaaga

SEQ ID NO: 3311266 - RNA, 19 nt, Human
auaugcuuauacacuuaca

SEQ ID NO: 3311267 - RNA, 14 nt, Human
auaugcuuauacac

SEQ ID NO: 3311268 - RNA, 16 nt, Human
auaugcuuauacacuu

SEQ ID NO: 3311269 - RNA, 13 nt, Human
auauucaggaagc

SEQ ID NO: 3311270 - RNA, 16 nt, Human
auauucaggaagcuca

SEQ ID NO: 3311271 - RNA, 14 nt, Human
auauucaggaagcu

SEQ ID NO: 3311272 - RNA, 15 nt, Human
auaguaugguggcug

SEQ ID NO: 3311273 - RNA, 12 nt, Human
auaccugucccc

SEQ ID NO: 3311274 - RNA, 21 nt, Human
auaaugugaaacuggauuaaa

SEQ ID NO: 3311275 - RNA, 19 nt, Human
auaaugugaaacuggauua

SEQ ID NO: 3311276 - RNA, 18 nt, Human
auaaugugaaacuggauu

SEQ ID NO: 3311277 - RNA, 23 nt, Human
agugugacaaggauugcuacugu

SEQ ID NO: 3311278 - RNA, 18 nt, Human
aguuacagacaaagcgug

SEQ ID NO: 3311279 - RNA, 17 nt, Human
aguuacagacaaagcgu

SEQ ID NO: 3311280 - RNA, 16 nt, Human
aguuguuacauuuuua

SEQ ID NO: 3311281 - RNA, 15 nt, Human
aguuguuacauuuuu

SEQ ID NO: 3311282 - RNA, 13 nt, Human
aguuguuacauuu

SEQ ID NO: 3311283 - RNA, 16 nt, Human
agucaagugaaaaagg

SEQ ID NO: 3311284 - RNA, 20 nt, Human
agucaagugaaaaaggagga

SEQ ID NO: 3311285 - RNA, 20 nt, Human
augugggcuaguugggcuuc

SEQ ID NO: 3311286 - RNA, 14 nt, Human
auguguaaguauuc

SEQ ID NO: 3311287 - RNA, 11 nt, Human
auuaaauuaug

SEQ ID NO: 3311288 - RNA, 16 nt, Human
auuaaaugcccagccc

SEQ ID NO: 3311289 - RNA, 13 nt, Human
auuaaauucuugc

SEQ ID NO: 3311290 - RNA, 15 nt, Human
auuaaaugcccagcc

SEQ ID NO: 3311291 - RNA, 14 nt, Human
auuaaaugcccagc

SEQ ID NO: 3311292 - RNA, 16 nt, Human
auguuuuaagaggcag

SEQ ID NO: 3311293 - RNA, 18 nt, Human
auguuuuaagaggcaggg

SEQ ID NO: 3311294 - RNA, 18 nt, Human
auguucucugaggacacu

SEQ ID NO: 3311295 - RNA, 17 nt, Human
auguucucugaggacac

SEQ ID NO: 3311296 - RNA, 20 nt, Human
auguucuuaguggauguucu

SEQ ID NO: 3311297 - RNA, 15 nt, Human
auguucuuaauucuu

SEQ ID NO: 3311298 - RNA, 22 nt, Human
auguucugacccugcuucaaau

SEQ ID NO: 3311299 - RNA, 14 nt, Human
auguucuuaauucu

SEQ ID NO: 3311300 - RNA, 17 nt, Human
auguaagcucuacugag

SEQ ID NO: 3311301 - RNA, 15 nt, Human
auggucggaaaacau

SEQ ID NO: 3311302 - RNA, 15 nt, Human
augucacaggcaggu

SEQ ID NO: 3311303 - RNA, 14 nt, Human
augucacaggcagg

SEQ ID NO: 3311304 - RNA, 16 nt, Human
augucacaggcagguc

SEQ ID NO: 3311305 - RNA, 20 nt, Human
auggaaaugggcagagcaga

SEQ ID NO: 3311306 - RNA, 19 nt, Human
auggaaaugggcagagcag

SEQ ID NO: 3311307 - RNA, 22 nt, Human
augcuucuucagagacuccugc

SEQ ID NO: 3311308 - RNA, 15 nt, Human
augggaaugaauguc

SEQ ID NO: 3311309 - RNA, 23 nt, Human
auggcugccaaugggagcucaug

SEQ ID NO: 3311310 - RNA, 21 nt, Human
augcacagcuaacauggaagu

SEQ ID NO: 3311311 - RNA, 14 nt, Human
augcacagcuaaca

SEQ ID NO: 3311312 - RNA, 23 nt, Human
augcacagaguuguuacauuuuu

SEQ ID NO: 3311313 - RNA, 22 nt, Human
augcacacauuuuuuaaaugca

SEQ ID NO: 3311314 - RNA, 19 nt, Human
augcacacauuuuuuaaau

SEQ ID NO: 3311315 - RNA, 17 nt, Human
augcacacauuuuuuaa

SEQ ID NO: 3311316 - RNA, 23 nt, Human
augcaugaaguaauaugcacaca

SEQ ID NO: 3311317 - RNA, 20 nt, Human
augcaugaaguaauaugcac

SEQ ID NO: 3311318 - RNA, 12 nt, Human
augcauuugaaa

SEQ ID NO: 3311319 - RNA, 10 nt, Human
augcauuuga

SEQ ID NO: 3311320 - RNA, 18 nt, Human
augcauuugaaaauuuug

SEQ ID NO: 3311321 - RNA, 15 nt, Human
augccugguggcagc

SEQ ID NO: 3311322 - RNA, 16 nt, Human
augccugguggcagcu

SEQ ID NO: 3311323 - RNA, 17 nt, Human
augccugguggcagcug

SEQ ID NO: 3311324 - RNA, 17 nt, Human
augccugggcagaagga

SEQ ID NO: 3311325 - RNA, 14 nt, Human
augccugguggcag

SEQ ID NO: 3311326 - RNA, 23 nt, Human
augccuggauggggcugcaccgg

SEQ ID NO: 3311327 - RNA, 21 nt, Human
augccuggauggggcugcacc

SEQ ID NO: 3311328 - RNA, 13 nt, Human
aucgaugcagugc

SEQ ID NO: 3311329 - RNA, 11 nt, Human
auccuccucag

SEQ ID NO: 3311330 - RNA, 22 nt, Human
auccuccaggugcacaagcucc

SEQ ID NO: 3311331 - RNA, 19 nt, Human
auccuccaggugcacaagc

SEQ ID NO: 3311332 - RNA, 14 nt, Human
auccuccaggugca

SEQ ID NO: 3311333 - RNA, 13 nt, Human
auccuccaggugc

SEQ ID NO: 3311334 - RNA, 15 nt, Human
aucccuacuguaauu

SEQ ID NO: 3311335 - RNA, 22 nt, Human
auccucauacccacccccaccc

SEQ ID NO: 3311336 - RNA, 19 nt, Human
auccucauacccaccccca

SEQ ID NO: 3311337 - RNA, 17 nt, Human
auccucauacccacccc

SEQ ID NO: 3311338 - RNA, 18 nt, Human
auccucauacccaccccc

SEQ ID NO: 3311339 - RNA, 18 nt, Human
auccacccaccucagccu

SEQ ID NO: 3311340 - RNA, 20 nt, Human
auccacccaccucagccucc

SEQ ID NO: 3311341 - RNA, 16 nt, Human
auccacccaccucagc

SEQ ID NO: 3311342 - RNA, 19 nt, Human
aucauggagguuugaagau

SEQ ID NO: 3311343 - RNA, 20 nt, Human
aucagccugcuccagcuguu

SEQ ID NO: 3311344 - RNA, 13 nt, Human
aucagcugcuacu

SEQ ID NO: 3311345 - RNA, 23 nt, Human
aucagcugcuacuacuccuguag

SEQ ID NO: 3311346 - RNA, 12 nt, Human
aucagcugcuac

SEQ ID NO: 3311347 - RNA, 21 nt, Human
aucagccugggcaaugugaua

SEQ ID NO: 3311348 - RNA, 20 nt, Human
aucagccugggcaaugugau

SEQ ID NO: 3311349 - RNA, 11 nt, Human
aucagccuggg

SEQ ID NO: 3311350 - RNA, 12 nt, Human
augagccuggca

SEQ ID NO: 3311351 - RNA, 17 nt, Human
augacuccagaauuucc

SEQ ID NO: 3311352 - RNA, 16 nt, Human
augacuccagaauuuc

SEQ ID NO: 3311353 - RNA, 12 nt, Human
augacuccagaa

SEQ ID NO: 3311354 - RNA, 12 nt, Human
augacccagugg

SEQ ID NO: 3311355 - RNA, 14 nt, Human
augagccuggcaag

SEQ ID NO: 3311356 - RNA, 13 nt, Human
augagccuggcaa

SEQ ID NO: 3311357 - RNA, 19 nt, Human
aucuuccaacucaaacucu

SEQ ID NO: 3311358 - RNA, 22 nt, Human
aucucucgugauugauaagaac

SEQ ID NO: 3311359 - RNA, 17 nt, Human
aucuucuuuauaauucu

SEQ ID NO: 3311360 - RNA, 14 nt, Human
aucuucuuuauaau

SEQ ID NO: 3311361 - RNA, 17 nt, Human
aucuugaagacuuuucu

SEQ ID NO: 3311362 - RNA, 17 nt, Human
caaaauaaaaaugaggu

SEQ ID NO: 3311363 - RNA, 22 nt, Human
caaaacucuccucugcugcugg

SEQ ID NO: 3311364 - RNA, 21 nt, Human
caaaacucuccucugcugcug

SEQ ID NO: 3311365 - RNA, 20 nt, Human
caaaacucuccucugcugcu

SEQ ID NO: 3311366 - RNA, 19 nt, Human
caaaacucuccucugcugc

SEQ ID NO: 3311367 - RNA, 21 nt, Human
auuuugggguacccacugcuc

SEQ ID NO: 3311368 - RNA, 22 nt, Human
auuuugggguacccacugcucu

SEQ ID NO: 3311369 - RNA, 23 nt, Human
auuuugggguacccacugcucug

SEQ ID NO: 3311370 - RNA, 16 nt, Human
caaaaaaugcuugcuu

SEQ ID NO: 3311371 - RNA, 20 nt, Human
caaaaacauggccuuugcuu

SEQ ID NO: 3311372 - RNA, 13 nt, Human
caaaaaggcagga

SEQ ID NO: 3311373 - RNA, 13 nt, Human
caaaggaagcaca

SEQ ID NO: 3311374 - RNA, 12 nt, Human
caaaggaagcac

SEQ ID NO: 3311375 - RNA, 13 nt, Human
caaagcuaggccu

SEQ ID NO: 3311376 - RNA, 14 nt, Human
caaagcuaggccug

SEQ ID NO: 3311377 - RNA, 19 nt, Human
caaagcuaggccuggccag

SEQ ID NO: 3311378 - RNA, 18 nt, Human
caaagcuaggccuggcca

SEQ ID NO: 3311379 - RNA, 14 nt, Human
caaaggaagcacau

SEQ ID NO: 3311380 - RNA, 16 nt, Human
caaaggguaucaggug

SEQ ID NO: 3311381 - RNA, 18 nt, Human
caaaggguaucaggugcu

SEQ ID NO: 3311382 - RNA, 17 nt, Human
caaacucaccugccccu

SEQ ID NO: 3311383 - RNA, 22 nt, Human
caaagccaaagcuaggccuggc

SEQ ID NO: 3311384 - RNA, 18 nt, Human
caaagccuccuccagccg

SEQ ID NO: 3311385 - RNA, 17 nt, Human
caaagccuccuccagcc

SEQ ID NO: 3311386 - RNA, 15 nt, Human
caaaauguaggguua

SEQ ID NO: 3311387 - RNA, 12 nt, Human
caaaauaaaacu

SEQ ID NO: 3311388 - RNA, 15 nt, Human
caaacacauacagga

SEQ ID NO: 3311389 - RNA, 20 nt, Human
caaacccuucagugccaaaa

SEQ ID NO: 3311390 - RNA, 14 nt, Human
caaacccuucagug

SEQ ID NO: 3311391 - RNA, 23 nt, Human
caaagugcugggauuacaggugu

SEQ ID NO: 3311392 - RNA, 19 nt, Human
caaagugcugggauuacag

SEQ ID NO: 3311393 - RNA, 11 nt, Human
caaauuucuaa

SEQ ID NO: 3311394 - RNA, 12 nt, Human
caaauuucuaaa

SEQ ID NO: 3311395 - RNA, 17 nt, Human
caaugcacuuuguucug

SEQ ID NO: 3311396 - RNA, 15 nt, Human
caaugggagcucaug

SEQ ID NO: 3311397 - RNA, 21 nt, Human
caaugcacuuuguucuggcuc

SEQ ID NO: 3311398 - RNA, 20 nt, Human
caaugcacuuuguucuggcu

SEQ ID NO: 3311399 - RNA, 23 nt, Human
caauucucauuugucacacacuu

SEQ ID NO: 3311400 - RNA, 16 nt, Human
caauuacaggaaguac

SEQ ID NO: 3311401 - RNA, 17 nt, Human
caaugugauaaaacccc

SEQ ID NO: 3311402 - RNA, 15 nt, Human
caaugugauaaaacc

SEQ ID NO: 3311403 - RNA, 13 nt, Human
caauaggaaaaac

SEQ ID NO: 3311404 - RNA, 12 nt, Human
caauaggaaaaa

SEQ ID NO: 3311405 - RNA, 23 nt, Human
caaugaccuuucaauaggaaaaa

SEQ ID NO: 3311406 - RNA, 21 nt, Human
caaugaccuuucaauaggaaa

SEQ ID NO: 3311407 - RNA, 15 nt, Human
caaugacuuacugua

SEQ ID NO: 3311408 - RNA, 18 nt, Human
caaugacuuacuguacau

SEQ ID NO: 3311409 - RNA, 17 nt, Human
caaugacuuacuguaca

SEQ ID NO: 3311410 - RNA, 17 nt, Human
caauauucgcuguguca

SEQ ID NO: 3311411 - RNA, 17 nt, Human
caagcuggucccacuca

SEQ ID NO: 3311412 - RNA, 19 nt, Human
caagcuggucccacucagu

SEQ ID NO: 3311413 - RNA, 22 nt, Human
caagccaccaacauacucccau

SEQ ID NO: 3311414 - RNA, 18 nt, Human
caagcaggacauggacaa

SEQ ID NO: 3311415 - RNA, 14 nt, Human
caagcaggacaugg

SEQ ID NO: 3311416 - RNA, 14 nt, Human
caagcaccuccugc

SEQ ID NO: 3311417 - RNA, 20 nt, Human
caagcgauucuucugcuuca

SEQ ID NO: 3311418 - RNA, 22 nt, Human
caagcgauucuucugcuucagc

SEQ ID NO: 3311419 - RNA, 19 nt, Human
caagcgauucuucugcuuc

SEQ ID NO: 3311420 - RNA, 18 nt, Human
caagugagagcugggugu

SEQ ID NO: 3311421 - RNA, 19 nt, Human
caagugagacccugucuca

SEQ ID NO: 3311422 - RNA, 21 nt, Human
caaguccucuuuucugagagg

SEQ ID NO: 3311423 - RNA, 14 nt, Human
caagugagagcugg

SEQ ID NO: 3311424 - RNA, 15 nt, Human
caagugagagcuggg

SEQ ID NO: 3311425 - RNA, 17 nt, Human
caagugagagcugggug

SEQ ID NO: 3311426 - RNA, 14 nt, Human
caaguuaaauaaau

SEQ ID NO: 3311427 - RNA, 13 nt, Human
caaggucauuuuu

SEQ ID NO: 3311428 - RNA, 20 nt, Human
caaggucauuuuuuuuaaga

SEQ ID NO: 3311429 - RNA, 14 nt, Human
caaggucauuuuuu

SEQ ID NO: 3311430 - RNA, 14 nt, Human
caaguccucuuuuc

SEQ ID NO: 3311431 - RNA, 21 nt, Human
caaggcugucaauuacaggaa

SEQ ID NO: 3311432 - RNA, 23 nt, Human
caaggcugucaauuacaggaagu

SEQ ID NO: 3311433 - RNA, 12 nt, Human
caaggcugcagu

SEQ ID NO: 3311434 - RNA, 17 nt, Human
caaggggcccaaauucu

SEQ ID NO: 3311435 - RNA, 18 nt, Human
caaggggcccaaauucuu

SEQ ID NO: 3311436 - RNA, 22 nt, Human
caaccccuucgcuccugugucu

SEQ ID NO: 3311437 - RNA, 22 nt, Human
caacacucacauuuauucugcu

SEQ ID NO: 3311438 - RNA, 18 nt, Human
caacacucauugaccuga

SEQ ID NO: 3311439 - RNA, 22 nt, Human
caacacucauugaccugaggcc

SEQ ID NO: 3311440 - RNA, 20 nt, Human
caacacucauugaccugagg

SEQ ID NO: 3311441 - RNA, 14 nt, Human
caaccuccugggcu

SEQ ID NO: 3311442 - RNA, 15 nt, Human
caaccuccugggcua

SEQ ID NO: 3311443 - RNA, 14 nt, Human
caacgucugugcca

SEQ ID NO: 3311444 - RNA, 13 nt, Human
caacgucugugcc

SEQ ID NO: 3311445 - RNA, 20 nt, Human
caagaacuuuccaggaaggc

SEQ ID NO: 3311446 - RNA, 16 nt, Human
caagaccuucuccuuc

SEQ ID NO: 3311447 - RNA, 14 nt, Human
caagaccuucuccu

SEQ ID NO: 3311448 - RNA, 17 nt, Human
caagacgcugugcugcc

SEQ ID NO: 3311449 - RNA, 16 nt, Human
caagacgcugugcugc

SEQ ID NO: 3311450 - RNA, 18 nt, Human
caagaccuucuccuucac

SEQ ID NO: 3311451 - RNA, 17 nt, Human
caagaccuucuccuuca

SEQ ID NO: 3311452 - RNA, 18 nt, Human
caagacgcugugcugccc

SEQ ID NO: 3311453 - RNA, 15 nt, Human
caagacgcugugcug

SEQ ID NO: 3311454 - RNA, 23 nt, Human
caagacgcugugcugcccugccc

SEQ ID NO: 3311455 - RNA, 15 nt, Human
caagagcccaggccu

SEQ ID NO: 3311456 - RNA, 14 nt, Human
caagagcccaggcc

SEQ ID NO: 3311457 - RNA, 13 nt, Human
caagagcccaggc

SEQ ID NO: 3311458 - RNA, 18 nt, Human
caagacucuuuggacacu

SEQ ID NO: 3311459 - RNA, 15 nt, Human
caagcaccuccugcc

SEQ ID NO: 3311460 - RNA, 16 nt, Human
caagcaccuccugccu

SEQ ID NO: 3311461 - RNA, 17 nt, Human
caagcaccuccugccuc

SEQ ID NO: 3311462 - RNA, 16 nt, Human
caagagcccaggccuc

SEQ ID NO: 3311463 - RNA, 14 nt, Human
cacauaucugucau

SEQ ID NO: 3311464 - RNA, 14 nt, Human
cacaguucucuccu

SEQ ID NO: 3311465 - RNA, 15 nt, Human
cacaguucucuccuu

SEQ ID NO: 3311466 - RNA, 22 nt, Human
cacagugagucgaggacaggga

SEQ ID NO: 3311467 - RNA, 21 nt, Human
cacagugagucgaggacaggg

SEQ ID NO: 3311468 - RNA, 21 nt, Human
cacaguccuuaccagcagagc

SEQ ID NO: 3311469 - RNA, 15 nt, Human
cacaguccuuaccag

SEQ ID NO: 3311470 - RNA, 13 nt, Human
cacaguccuuacc

SEQ ID NO: 3311471 - RNA, 11 nt, Human
cacaggcaggu

SEQ ID NO: 3311472 - RNA, 14 nt, Human
cacaggcaggucca

SEQ ID NO: 3311473 - RNA, 15 nt, Human
cacaggcagguccag

SEQ ID NO: 3311474 - RNA, 23 nt, Human
cacagcugggguggggaccucag

SEQ ID NO: 3311475 - RNA, 22 nt, Human
cacagcugggguggggaccuca

SEQ ID NO: 3311476 - RNA, 21 nt, Human
cacagcuucauuuccuguguc

SEQ ID NO: 3311477 - RNA, 22 nt, Human
cacagcuucauuuccugugucu

SEQ ID NO: 3311478 - RNA, 22 nt, Human
caggugugagucaccaagccca

SEQ ID NO: 3311479 - RNA, 23 nt, Human
caggugugagucaccaagcccag

SEQ ID NO: 3311480 - RNA, 16 nt, Human
caggugugaaccacca

SEQ ID NO: 3311481 - RNA, 19 nt, Human
caggugugaaccaccacac

SEQ ID NO: 3311482 - RNA, 22 nt, Human
caggugugaaccaccacaccca

SEQ ID NO: 3311483 - RNA, 23 nt, Human
caggugugaaccaccacacccag

SEQ ID NO: 3311484 - RNA, 20 nt, Human
caggugugagucaccaagcc

SEQ ID NO: 3311485 - RNA, 21 nt, Human
caggugugagucaccaagccc

SEQ ID NO: 3311486 - RNA, 16 nt, Human
caggugugagucacca

SEQ ID NO: 3311487 - RNA, 15 nt, Human
caggugucccugcac

SEQ ID NO: 3311488 - RNA, 16 nt, Human
caggugucccugcacu

SEQ ID NO: 3311489 - RNA, 18 nt, Human
caggugucccugcacuug

SEQ ID NO: 3311490 - RNA, 19 nt, Human
caggugucccugcacuugc

SEQ ID NO: 3311491 - RNA, 12 nt, Human
caggugugaacc

SEQ ID NO: 3311492 - RNA, 12 nt, Human
caguaauaacuc

SEQ ID NO: 3311493 - RNA, 13 nt, Human
caguaauaacucu

SEQ ID NO: 3311494 - RNA, 22 nt, Human
caguaaaugggggugcauuuga

SEQ ID NO: 3311495 - RNA, 21 nt, Human
caguaaaugggggugcauuug

SEQ ID NO: 3311496 - RNA, 20 nt, Human
caguaaaugggggugcauuu

SEQ ID NO: 3311497 - RNA, 12 nt, Human
cagguucagcuu

SEQ ID NO: 3311498 - RNA, 13 nt, Human
cagguucagcuug

SEQ ID NO: 3311499 - RNA, 18 nt, Human
caggugguuauggagagg

SEQ ID NO: 3311500 - RNA, 23 nt, Human
cagguggggucacucuggcagcu

SEQ ID NO: 3311501 - RNA, 22 nt, Human
cagguggggucacucuggcagc

SEQ ID NO: 3311502 - RNA, 21 nt, Human
cagguggggucacucuggcag

SEQ ID NO: 3311503 - RNA, 20 nt, Human
cagguggggucacucuggca

SEQ ID NO: 3311504 - RNA, 19 nt, Human
cagguggggucacucuggc

SEQ ID NO: 3311505 - RNA, 13 nt, Human
cagguggggcagc

SEQ ID NO: 3311506 - RNA, 14 nt, Human
cagguggggcagcu

SEQ ID NO: 3311507 - RNA, 15 nt, Human
cagguggggcagcuu

SEQ ID NO: 3311508 - RNA, 16 nt, Human
cagguggggcagcuug

SEQ ID NO: 3311509 - RNA, 17 nt, Human
cagguggggcagcuuga

SEQ ID NO: 3311510 - RNA, 18 nt, Human
cagguggggucacucugg

SEQ ID NO: 3311511 - RNA, 11 nt, Human
caggugucccu

SEQ ID NO: 3311512 - RNA, 14 nt, Human
caggugucccugca

SEQ ID NO: 3311513 - RNA, 20 nt, Human
caggugguuauggagagggu

SEQ ID NO: 3311514 - RNA, 20 nt, Human
cagguaacaggcagauacag

SEQ ID NO: 3311515 - RNA, 21 nt, Human
cagguaacaggcagauacagg

SEQ ID NO: 3311516 - RNA, 21 nt, Human
caggugagaagcagaggaagg

SEQ ID NO: 3311517 - RNA, 20 nt, Human
caggugagaagcagaggaag

SEQ ID NO: 3311518 - RNA, 13 nt, Human
caggugagaagca

SEQ ID NO: 3311519 - RNA, 18 nt, Human
caggucuugaacuccugg

SEQ ID NO: 3311520 - RNA, 19 nt, Human
caggucuugaacuccuggc

SEQ ID NO: 3311521 - RNA, 20 nt, Human
caggucuugaacuccuggcc

SEQ ID NO: 3311522 - RNA, 21 nt, Human
caggucuugaacuccuggccu

SEQ ID NO: 3311523 - RNA, 22 nt, Human
caggucuugaacuccuggccuc

SEQ ID NO: 3311524 - RNA, 23 nt, Human
caggucuugaacuccuggccuca

SEQ ID NO: 3311525 - RNA, 21 nt, Human
caggggugggacacccuguga

SEQ ID NO: 3311526 - RNA, 20 nt, Human
caggggugggacacccugug

SEQ ID NO: 3311527 - RNA, 15 nt, Human
caggggugggacacc

SEQ ID NO: 3311528 - RNA, 14 nt, Human
caggggugggacac

SEQ ID NO: 3311529 - RNA, 21 nt, Human
cagggucucacuauguugccc

SEQ ID NO: 3311530 - RNA, 22 nt, Human
cagggucucacuauguugccca

SEQ ID NO: 3311531 - RNA, 23 nt, Human
cagggucucacuauguugcccag

SEQ ID NO: 3311532 - RNA, 15 nt, Human
cagggucucacucug

SEQ ID NO: 3311533 - RNA, 23 nt, Human
cagggucccugguggcagcucac

SEQ ID NO: 3311534 - RNA, 18 nt, Human
caggguccuguagcccua

SEQ ID NO: 3311535 - RNA, 14 nt, Human
cagguaacaggcag

SEQ ID NO: 3311536 - RNA, 15 nt, Human
cagguaacaggcaga

SEQ ID NO: 3311537 - RNA, 16 nt, Human
cagguaacaggcagau

SEQ ID NO: 3311538 - RNA, 17 nt, Human
cagguaacaggcagaua

SEQ ID NO: 3311539 - RNA, 16 nt, Human
caggguuuugccaugu

SEQ ID NO: 3311540 - RNA, 16 nt, Human
cagggucucacucugu

SEQ ID NO: 3311541 - RNA, 21 nt, Human
caggguauuccagagugggga

SEQ ID NO: 3311542 - RNA, 20 nt, Human
caggguauuccagagugggg

SEQ ID NO: 3311543 - RNA, 22 nt, Human
cagggucccugguggcagcuca

SEQ ID NO: 3311544 - RNA, 19 nt, Human
cagggucccugguggcagc

SEQ ID NO: 3311545 - RNA, 18 nt, Human
cagggucccugguggcag

SEQ ID NO: 3311546 - RNA, 15 nt, Human
cagggucccuggugg

SEQ ID NO: 3311547 - RNA, 12 nt, Human
cagggucccugg

SEQ ID NO: 3311548 - RNA, 14 nt, Human
cagggucccuggug

SEQ ID NO: 3311549 - RNA, 21 nt, Human
caguaucuugaagacuuuucu

SEQ ID NO: 3311550 - RNA, 18 nt, Human
caguaucuugaagacuuu

SEQ ID NO: 3311551 - RNA, 12 nt, Human
caguaucuugaa

SEQ ID NO: 3311552 - RNA, 15 nt, Human
caguaucucagggcc

SEQ ID NO: 3311553 - RNA, 13 nt, Human
caguaucucaggg

SEQ ID NO: 3311554 - RNA, 14 nt, Human
caguccauugaaag

SEQ ID NO: 3311555 - RNA, 16 nt, Human
caguccauagcagaga

SEQ ID NO: 3311556 - RNA, 16 nt, Human
caguauuacuucugcu

SEQ ID NO: 3311557 - RNA, 18 nt, Human
caguauuacuucugcuac

SEQ ID NO: 3311558 - RNA, 17 nt, Human
cagucccugccaaugga

SEQ ID NO: 3311559 - RNA, 15 nt, Human
caguccucccaucuc

SEQ ID NO: 3311560 - RNA, 14 nt, Human
caguccucccaucu

SEQ ID NO: 3311561 - RNA, 13 nt, Human
caguccucccauc

SEQ ID NO: 3311562 - RNA, 12 nt, Human
caguccucccau

SEQ ID NO: 3311563 - RNA, 16 nt, Human
cagucccugccaaugg

SEQ ID NO: 3311564 - RNA, 15 nt, Human
cagucccugccaaug

SEQ ID NO: 3311565 - RNA, 14 nt, Human
cagucccugccaau

SEQ ID NO: 3311566 - RNA, 13 nt, Human
cagucccugccaa

SEQ ID NO: 3311567 - RNA, 12 nt, Human
cagucccugcca

SEQ ID NO: 3311568 - RNA, 19 nt, Human
cagugagucgaggacaggg

SEQ ID NO: 3311569 - RNA, 20 nt, Human
cagugagucgaggacaggga

SEQ ID NO: 3311570 - RNA, 22 nt, Human
cagugagucgaggacagggagg

SEQ ID NO: 3311571 - RNA, 23 nt, Human
cagugagucgaggacagggaggu

SEQ ID NO: 3311572 - RNA, 13 nt, Human
cagugccuuaugg

SEQ ID NO: 3311573 - RNA, 11 nt, Human
cagugccuuau

SEQ ID NO: 3311574 - RNA, 18 nt, Human
cagugccgagaaggaagc

SEQ ID NO: 3311575 - RNA, 15 nt, Human
cagugccgagaagga

SEQ ID NO: 3311576 - RNA, 22 nt, Human
cagugccuuauggaacacucug

SEQ ID NO: 3311577 - RNA, 21 nt, Human
cagugccuuauggaacacucu

SEQ ID NO: 3311578 - RNA, 20 nt, Human
cagugccuuauggaacacuc

SEQ ID NO: 3311579 - RNA, 19 nt, Human
cagugccuuauggaacacu

SEQ ID NO: 3311580 - RNA, 18 nt, Human
cagugccuuauggaacac

SEQ ID NO: 3311581 - RNA, 17 nt, Human
cagugccuuauggaaca

SEQ ID NO: 3311582 - RNA, 16 nt, Human
cagugccuuauggaac

SEQ ID NO: 3311583 - RNA, 15 nt, Human
cagugccuuauggaa

SEQ ID NO: 3311584 - RNA, 21 nt, Human
cagugaggcucugcccuuggu

SEQ ID NO: 3311585 - RNA, 17 nt, Human
cagugagucgaggacag

SEQ ID NO: 3311586 - RNA, 18 nt, Human
cagugagucgaggacagg

SEQ ID NO: 3311587 - RNA, 20 nt, Human
cagugaggcucugcccuugg

SEQ ID NO: 3311588 - RNA, 19 nt, Human
cagugaggcucugcccuug

SEQ ID NO: 3311589 - RNA, 18 nt, Human
cagugaggcucugcccuu

SEQ ID NO: 3311590 - RNA, 17 nt, Human
cagugaggcucugcccu

SEQ ID NO: 3311591 - RNA, 16 nt, Human
cagugaggcucugccc

SEQ ID NO: 3311592 - RNA, 15 nt, Human
cagugaggcucugcc

SEQ ID NO: 3311593 - RNA, 14 nt, Human
cagugaggcucugc

SEQ ID NO: 3311594 - RNA, 13 nt, Human
cagugaggcucug

SEQ ID NO: 3311595 - RNA, 12 nt, Human
cagugaggcucu

SEQ ID NO: 3311596 - RNA, 24 nt, Human
cagugagccgagauugcaccacug

SEQ ID NO: 3311597 - RNA, 19 nt, Human
cagucuggaaugcaguggu

SEQ ID NO: 3311598 - RNA, 17 nt, Human
caguccucccaucucac

SEQ ID NO: 3311599 - RNA, 16 nt, Human
caguccucccaucuca

SEQ ID NO: 3311600 - RNA, 18 nt, Human
cagucuggaaugcagugg

SEQ ID NO: 3311601 - RNA, 21 nt, Human
caguccuuaccagcagagcac

SEQ ID NO: 3311602 - RNA, 20 nt, Human
caguccuuaccagcagagca

SEQ ID NO: 3311603 - RNA, 19 nt, Human
caguccuuaccagcagagc

SEQ ID NO: 3311604 - RNA, 18 nt, Human
caguccuuaccagcagag

SEQ ID NO: 3311605 - RNA, 15 nt, Human
caguccuuaccagca

SEQ ID NO: 3311606 - RNA, 23 nt, Human
cagugccuuauggaacacucuga

SEQ ID NO: 3311607 - RNA, 12 nt, Human
caggagugagca

SEQ ID NO: 3311608 - RNA, 20 nt, Human
caggagccuccugcccuuac

SEQ ID NO: 3311609 - RNA, 17 nt, Human
caggagccuccugcccu

SEQ ID NO: 3311610 - RNA, 14 nt, Human
caggagccuccugc

SEQ ID NO: 3311611 - RNA, 15 nt, Human
caggagccccgaggc

SEQ ID NO: 3311612 - RNA, 16 nt, Human
caggagccccgaggcc

SEQ ID NO: 3311613 - RNA, 18 nt, Human
caggagccccgaggccuu

SEQ ID NO: 3311614 - RNA, 19 nt, Human
caggagcagccacauuccu

SEQ ID NO: 3311615 - RNA, 14 nt, Human
caggagcagccaca

SEQ ID NO: 3311616 - RNA, 13 nt, Human
caggagcagccac

SEQ ID NO: 3311617 - RNA, 12 nt, Human
caggagcagcca

SEQ ID NO: 3311618 - RNA, 20 nt, Human
caggagccccgaggccuucu

SEQ ID NO: 3311619 - RNA, 22 nt, Human
caggagccccgaggccuucucu

SEQ ID NO: 3311620 - RNA, 23 nt, Human
caggagccccgaggccuucucug

SEQ ID NO: 3311621 - RNA, 23 nt, Human
caggaguuugagaccaaccuggg

SEQ ID NO: 3311622 - RNA, 22 nt, Human
caggaguuugagaccaaccugg

SEQ ID NO: 3311623 - RNA, 21 nt, Human
caggaguuugagaccaaccug

SEQ ID NO: 3311624 - RNA, 17 nt, Human
caggcaugguggcccac

SEQ ID NO: 3311625 - RNA, 23 nt, Human
caggcaggucuugaacuccuggc

SEQ ID NO: 3311626 - RNA, 15 nt, Human
caggcaggugggaug

SEQ ID NO: 3311627 - RNA, 13 nt, Human
caggcaggucuug

SEQ ID NO: 3311628 - RNA, 22 nt, Human
caggcaggucuugaacuccugg

SEQ ID NO: 3311629 - RNA, 14 nt, Human
caggcagguccagg

SEQ ID NO: 3311630 - RNA, 15 nt, Human
caggcagguccaggg

SEQ ID NO: 3311631 - RNA, 19 nt, Human
caggcagguccaggguuug

SEQ ID NO: 3311632 - RNA, 12 nt, Human
caggcaggucuu

SEQ ID NO: 3311633 - RNA, 24 nt, Human
caggcauuccccaggaggccagcc

SEQ ID NO: 3311634 - RNA, 23 nt, Human
caggcauuccccaggaggccagc

SEQ ID NO: 3311635 - RNA, 22 nt, Human
caggcauuccccaggaggccag

SEQ ID NO: 3311636 - RNA, 21 nt, Human
caggcauuccccaggaggcca

SEQ ID NO: 3311637 - RNA, 20 nt, Human
caggcauuccccaggaggcc

SEQ ID NO: 3311638 - RNA, 19 nt, Human
caggcauuccccaggaggc

SEQ ID NO: 3311639 - RNA, 18 nt, Human
caggcauuccccaggagg

SEQ ID NO: 3311640 - RNA, 15 nt, Human
caggcauguucucug

SEQ ID NO: 3311641 - RNA, 18 nt, Human
caggcauguucucugagg

SEQ ID NO: 3311642 - RNA, 19 nt, Human
caggcauguucucugagga

SEQ ID NO: 3311643 - RNA, 20 nt, Human
caggcauguucucugaggac

SEQ ID NO: 3311644 - RNA, 17 nt, Human
caggcauuccccaggag

SEQ ID NO: 3311645 - RNA, 16 nt, Human
caggcauuccccagga

SEQ ID NO: 3311646 - RNA, 15 nt, Human
caggcauuccccagg

SEQ ID NO: 3311647 - RNA, 13 nt, Human
caggcauucccca

SEQ ID NO: 3311648 - RNA, 20 nt, Human
caggauucuuccucccuccc

SEQ ID NO: 3311649 - RNA, 14 nt, Human
caggcaagcaccuc

SEQ ID NO: 3311650 - RNA, 15 nt, Human
caggcaagcaccucc

SEQ ID NO: 3311651 - RNA, 16 nt, Human
caggcaagcaccuccu

SEQ ID NO: 3311652 - RNA, 21 nt, Human
caggcaagcaccuccugccuc

SEQ ID NO: 3311653 - RNA, 15 nt, Human
caggcagccaggcca

SEQ ID NO: 3311654 - RNA, 14 nt, Human
caggcagccaggcc

SEQ ID NO: 3311655 - RNA, 17 nt, Human
caggcagccaggccaca

SEQ ID NO: 3311656 - RNA, 16 nt, Human
caggcagccaggccac

SEQ ID NO: 3311657 - RNA, 13 nt, Human
caggcagguccag

SEQ ID NO: 3311658 - RNA, 17 nt, Human
caggauucuuccucccu

SEQ ID NO: 3311659 - RNA, 18 nt, Human
caggauucuuccucccuc

SEQ ID NO: 3311660 - RNA, 23 nt, Human
caggauggccgggcgcgguggcu

SEQ ID NO: 3311661 - RNA, 14 nt, Human
caggaucagucuga

SEQ ID NO: 3311662 - RNA, 13 nt, Human
caggaucagucug

SEQ ID NO: 3311663 - RNA, 13 nt, Human
caggccccugcca

SEQ ID NO: 3311664 - RNA, 23 nt, Human
caggccaaacucaccugccccuc

SEQ ID NO: 3311665 - RNA, 18 nt, Human
caggccaaacucaccugc

SEQ ID NO: 3311666 - RNA, 13 nt, Human
caggccacaagac

SEQ ID NO: 3311667 - RNA, 18 nt, Human
caggccacaagacccuug

SEQ ID NO: 3311668 - RNA, 17 nt, Human
caggccacaagacccuu

SEQ ID NO: 3311669 - RNA, 20 nt, Human
caggccacaagacccuugug

SEQ ID NO: 3311670 - RNA, 22 nt, Human
caggccaggcccucugcccacu

SEQ ID NO: 3311671 - RNA, 21 nt, Human
caggccaggcccucugcccac

SEQ ID NO: 3311672 - RNA, 20 nt, Human
caggccaggcccucugccca

SEQ ID NO: 3311673 - RNA, 13 nt, Human
caggcccggcucc

SEQ ID NO: 3311674 - RNA, 14 nt, Human
caggcccggcucca

SEQ ID NO: 3311675 - RNA, 15 nt, Human
caggcccggcuccag

SEQ ID NO: 3311676 - RNA, 15 nt, Human
caggccccugccacc

SEQ ID NO: 3311677 - RNA, 17 nt, Human
caggccccugccacccu

SEQ ID NO: 3311678 - RNA, 19 nt, Human
caggccccugccacccugg

SEQ ID NO: 3311679 - RNA, 20 nt, Human
caggccccugccacccuggg

SEQ ID NO: 3311680 - RNA, 13 nt, Human
cagggacagaggg

SEQ ID NO: 3311681 - RNA, 20 nt, Human
cagggacagaggggguggcc

SEQ ID NO: 3311682 - RNA, 14 nt, Human
cagggacagagggg

SEQ ID NO: 3311683 - RNA, 16 nt, Human
cagggaaacagcuaau

SEQ ID NO: 3311684 - RNA, 22 nt, Human
cagggaaacagcuaaugggaca

SEQ ID NO: 3311685 - RNA, 19 nt, Human
cagggccuggcucaggugg

SEQ ID NO: 3311686 - RNA, 16 nt, Human
cagggccuggcucagg

SEQ ID NO: 3311687 - RNA, 13 nt, Human
cagggccuggcuc

SEQ ID NO: 3311688 - RNA, 15 nt, Human
cagggccuggcucag

SEQ ID NO: 3311689 - RNA, 14 nt, Human
cagggccuggcuca

SEQ ID NO: 3311690 - RNA, 19 nt, Human
caggggaggguagagcgga

SEQ ID NO: 3311691 - RNA, 23 nt, Human
cagggacagaggggguggccucc

SEQ ID NO: 3311692 - RNA, 14 nt, Human
cagggcacaccggg

SEQ ID NO: 3311693 - RNA, 22 nt, Human
cagggcacaccgggcacucaga

SEQ ID NO: 3311694 - RNA, 23 nt, Human
cagggcacaccgggcacucagaa

SEQ ID NO: 3311695 - RNA, 15 nt, Human
cagggcacaccgggc

SEQ ID NO: 3311696 - RNA, 17 nt, Human
cagggcacaccgggcac

SEQ ID NO: 3311697 - RNA, 19 nt, Human
cagggcacaccgggcacuc

SEQ ID NO: 3311698 - RNA, 21 nt, Human
cagggcacaccgggcacucag

SEQ ID NO: 3311699 - RNA, 14 nt, Human
caggcuccuuuagc

SEQ ID NO: 3311700 - RNA, 19 nt, Human
caggcuccuuuagcgccca

SEQ ID NO: 3311701 - RNA, 20 nt, Human
caggcuccuuuagcgcccag

SEQ ID NO: 3311702 - RNA, 23 nt, Human
caggcucucaggccagcugcuug

SEQ ID NO: 3311703 - RNA, 21 nt, Human
caggcucucaggccagcugcu

SEQ ID NO: 3311704 - RNA, 20 nt, Human
caggcucucaggccagcugc

SEQ ID NO: 3311705 - RNA, 19 nt, Human
caggcucucaggccagcug

SEQ ID NO: 3311706 - RNA, 18 nt, Human
caggcucucaggccagcu

SEQ ID NO: 3311707 - RNA, 17 nt, Human
caggcucucaggccagc

SEQ ID NO: 3311708 - RNA, 21 nt, Human
caggcuccuuuagcgcccagu

SEQ ID NO: 3311709 - RNA, 12 nt, Human
caggcucucagg

SEQ ID NO: 3311710 - RNA, 20 nt, Human
caggcucgggcuccccagcc

SEQ ID NO: 3311711 - RNA, 16 nt, Human
caggcucucaggccag

SEQ ID NO: 3311712 - RNA, 15 nt, Human
caggcucucaggcca

SEQ ID NO: 3311713 - RNA, 14 nt, Human
caggcucucaggcc

SEQ ID NO: 3311714 - RNA, 13 nt, Human
caggcucucaggc

SEQ ID NO: 3311715 - RNA, 22 nt, Human
caggcccucugcccacucccug

SEQ ID NO: 3311716 - RNA, 21 nt, Human
caggcccucugcccacucccu

SEQ ID NO: 3311717 - RNA, 20 nt, Human
caggcccucugcccacuccc

SEQ ID NO: 3311718 - RNA, 19 nt, Human
caggcccucugcccacucc

SEQ ID NO: 3311719 - RNA, 17 nt, Human
caggcccucugcccacu

SEQ ID NO: 3311720 - RNA, 16 nt, Human
caggcccucugcccac

SEQ ID NO: 3311721 - RNA, 22 nt, Human
caggcccggcuccaggcuccuu

SEQ ID NO: 3311722 - RNA, 20 nt, Human
caggcccggcuccaggcucc

SEQ ID NO: 3311723 - RNA, 21 nt, Human
caggcccggcuccaggcuccu

SEQ ID NO: 3311724 - RNA, 15 nt, Human
caggcccucugccca

SEQ ID NO: 3311725 - RNA, 14 nt, Human
caggcccucugccc

SEQ ID NO: 3311726 - RNA, 13 nt, Human
caggcccucugcc

SEQ ID NO: 3311727 - RNA, 17 nt, Human
caggcccggcuccaggc

SEQ ID NO: 3311728 - RNA, 16 nt, Human
caggcccggcuccagg

SEQ ID NO: 3311729 - RNA, 18 nt, Human
caggcccggcuccaggcu

SEQ ID NO: 3311730 - RNA, 19 nt, Human
caggcccggcuccaggcuc

SEQ ID NO: 3311731 - RNA, 23 nt, Human
caggcugggcuucaguggcagcu

SEQ ID NO: 3311732 - RNA, 12 nt, Human
caggcuggucuc

SEQ ID NO: 3311733 - RNA, 19 nt, Human
caggcuggucucaaacucu

SEQ ID NO: 3311734 - RNA, 14 nt, Human
caggcuguauccca

SEQ ID NO: 3311735 - RNA, 20 nt, Human
caggcuguaucccaugagcc

SEQ ID NO: 3311736 - RNA, 21 nt, Human
caggcuguaucccaugagccu

SEQ ID NO: 3311737 - RNA, 22 nt, Human
caggcuguaucccaugagccuc

SEQ ID NO: 3311738 - RNA, 23 nt, Human
caggcuguaucccaugagccuca

SEQ ID NO: 3311739 - RNA, 21 nt, Human
caggcuuagucacugagacag

SEQ ID NO: 3311740 - RNA, 20 nt, Human
caggcuuagucacugagaca

SEQ ID NO: 3311741 - RNA, 17 nt, Human
caggcuuagucacugag

SEQ ID NO: 3311742 - RNA, 16 nt, Human
caggcuuagucacuga

SEQ ID NO: 3311743 - RNA, 23 nt, Human
caggcuuagucacugagacagcc

SEQ ID NO: 3311744 - RNA, 22 nt, Human
caggcuuagucacugagacagc

SEQ ID NO: 3311745 - RNA, 20 nt, Human
cagcuaacauggaaguacua

SEQ ID NO: 3311746 - RNA, 15 nt, Human
cagcuaaugggacac

SEQ ID NO: 3311747 - RNA, 16 nt, Human
cagcuaaugggacacu

SEQ ID NO: 3311748 - RNA, 21 nt, Human
cagcgagcccugguggcagug

SEQ ID NO: 3311749 - RNA, 18 nt, Human
cagcuaacauggaaguac

SEQ ID NO: 3311750 - RNA, 19 nt, Human
cagcuaacauggaaguacu

SEQ ID NO: 3311751 - RNA, 13 nt, Human
cagcgagcccugg

SEQ ID NO: 3311752 - RNA, 16 nt, Human
cagcgagcccuggugg

SEQ ID NO: 3311753 - RNA, 17 nt, Human
cagcgagcccugguggc

SEQ ID NO: 3311754 - RNA, 19 nt, Human
cagcgagcccugguggcag

SEQ ID NO: 3311755 - RNA, 20 nt, Human
cagcgagcccugguggcagu

SEQ ID NO: 3311756 - RNA, 12 nt, Human
cagcucagagag

SEQ ID NO: 3311757 - RNA, 20 nt, Human
cagcucaccucucccuugga

SEQ ID NO: 3311758 - RNA, 19 nt, Human
cagcucaccucucccuugg

SEQ ID NO: 3311759 - RNA, 22 nt, Human
cagcucaccagccccagugccc

SEQ ID NO: 3311760 - RNA, 14 nt, Human
cagcucaccagccc

SEQ ID NO: 3311761 - RNA, 20 nt, Human
cagcucaccagccccagugc

SEQ ID NO: 3311762 - RNA, 21 nt, Human
cagcucaccagccccagugcc

SEQ ID NO: 3311763 - RNA, 17 nt, Human
cagcucaccucucccuu

SEQ ID NO: 3311764 - RNA, 16 nt, Human
cagcucaccucucccu

SEQ ID NO: 3311765 - RNA, 15 nt, Human
cagcucaccucuccc

SEQ ID NO: 3311766 - RNA, 13 nt, Human
cagcucaccucuc

SEQ ID NO: 3311767 - RNA, 13 nt, Human
cagcucaccagcc

SEQ ID NO: 3311768 - RNA, 15 nt, Human
cagcucaccagcccc

SEQ ID NO: 3311769 - RNA, 16 nt, Human
cagcucaccagcccca

SEQ ID NO: 3311770 - RNA, 17 nt, Human
cagcucaccagccccag

SEQ ID NO: 3311771 - RNA, 19 nt, Human
cagcucaccagccccagug

SEQ ID NO: 3311772 - RNA, 19 nt, Human
cagccuggacccuguggau

SEQ ID NO: 3311773 - RNA, 15 nt, Human
cagccuggacccugu

SEQ ID NO: 3311774 - RNA, 20 nt, Human
cagccugcuccagcuguuca

SEQ ID NO: 3311775 - RNA, 23 nt, Human
cagccucccgaauagcugggacu

SEQ ID NO: 3311776 - RNA, 19 nt, Human
cagccucccgaguagcugg

SEQ ID NO: 3311777 - RNA, 20 nt, Human
cagccucccgaguagcuggg

SEQ ID NO: 3311778 - RNA, 21 nt, Human
cagccucccgaguagcuggga

SEQ ID NO: 3311779 - RNA, 22 nt, Human
cagccucccgaguagcugggac

SEQ ID NO: 3311780 - RNA, 23 nt, Human
cagccucccgaguagcugggacu

SEQ ID NO: 3311781 - RNA, 19 nt, Human
cagccugggcaaugugaua

SEQ ID NO: 3311782 - RNA, 16 nt, Human
cagccugggcaaugug

SEQ ID NO: 3311783 - RNA, 24 nt, Human
cagccuugaccauucuccaccugc

SEQ ID NO: 3311784 - RNA, 23 nt, Human
cagccuugaccauucuccaccug

SEQ ID NO: 3311785 - RNA, 22 nt, Human
cagccuugaccauucuccaccu

SEQ ID NO: 3311786 - RNA, 17 nt, Human
cagccuugaccauucuc

SEQ ID NO: 3311787 - RNA, 21 nt, Human
cagccuugaccauucuccacc

SEQ ID NO: 3311788 - RNA, 20 nt, Human
cagccuugaccauucuccac

SEQ ID NO: 3311789 - RNA, 19 nt, Human
cagccucccaaagugcugg

SEQ ID NO: 3311790 - RNA, 20 nt, Human
cagccucccaaagugcuggg

SEQ ID NO: 3311791 - RNA, 21 nt, Human
cagccucccaaagugcuggga

SEQ ID NO: 3311792 - RNA, 23 nt, Human
cagccucccaaagugcugggauu

SEQ ID NO: 3311793 - RNA, 20 nt, Human
cagccucccgaauagcuggg

SEQ ID NO: 3311794 - RNA, 21 nt, Human
cagccucccgaauagcuggga

SEQ ID NO: 3311795 - RNA, 22 nt, Human
cagccucccgaauagcugggac

SEQ ID NO: 3311796 - RNA, 17 nt, Human
cagccucaaccuccugg

SEQ ID NO: 3311797 - RNA, 18 nt, Human
cagccucaaccuccuggg

SEQ ID NO: 3311798 - RNA, 19 nt, Human
cagccucaaccuccugggc

SEQ ID NO: 3311799 - RNA, 20 nt, Human
cagccucaaccuccugggcu

SEQ ID NO: 3311800 - RNA, 21 nt, Human
cagccucaaccuccugggcua

SEQ ID NO: 3311801 - RNA, 20 nt, Human
cagccucacaguccuuacca

SEQ ID NO: 3311802 - RNA, 15 nt, Human
cagccucacaguccu

SEQ ID NO: 3311803 - RNA, 14 nt, Human
cagccucacagucc

SEQ ID NO: 3311804 - RNA, 21 nt, Human
cagccguguaaccauggaccc

SEQ ID NO: 3311805 - RNA, 16 nt, Human
cagcccugcagagggc

SEQ ID NO: 3311806 - RNA, 15 nt, Human
cagcccugcagaggg

SEQ ID NO: 3311807 - RNA, 14 nt, Human
cagcccugcagagg

SEQ ID NO: 3311808 - RNA, 13 nt, Human
cagcccugcagag

SEQ ID NO: 3311809 - RNA, 20 nt, Human
cagcccugcagagggcacag

SEQ ID NO: 3311810 - RNA, 18 nt, Human
cagcccugcagagggcac

SEQ ID NO: 3311811 - RNA, 13 nt, Human
cagccccagugcc

SEQ ID NO: 3311812 - RNA, 14 nt, Human
cagccccagugccc

SEQ ID NO: 3311813 - RNA, 15 nt, Human
cagccccagugccca

SEQ ID NO: 3311814 - RNA, 16 nt, Human
cagccccagugcccac

SEQ ID NO: 3311815 - RNA, 17 nt, Human
cagccccagugcccaca

SEQ ID NO: 3311816 - RNA, 18 nt, Human
cagccccagugcccacag

SEQ ID NO: 3311817 - RNA, 21 nt, Human
cagccccaucccaaacccuuc

SEQ ID NO: 3311818 - RNA, 11 nt, Human
cagccccaucc

SEQ ID NO: 3311819 - RNA, 21 nt, Human
cagccccuguucuggcagagu

SEQ ID NO: 3311820 - RNA, 22 nt, Human
cagccccuggaugcagccucac

SEQ ID NO: 3311821 - RNA, 20 nt, Human
cagccccuguucuggcagag

SEQ ID NO: 3311822 - RNA, 16 nt, Human
cagccccauucugccu

SEQ ID NO: 3311823 - RNA, 17 nt, Human
cagccccauucugccug

SEQ ID NO: 3311824 - RNA, 18 nt, Human
cagccccauucugccugc

SEQ ID NO: 3311825 - RNA, 23 nt, Human
cagccccuggaugcagccucaca

SEQ ID NO: 3311826 - RNA, 13 nt, Human
cagccccauucug

SEQ ID NO: 3311827 - RNA, 14 nt, Human
cagccccauucugc

SEQ ID NO: 3311828 - RNA, 22 nt, Human
cagccccauccucuguacagag

SEQ ID NO: 3311829 - RNA, 16 nt, Human
cagccccauccucugu

SEQ ID NO: 3311830 - RNA, 14 nt, Human
cagccccauccucu

SEQ ID NO: 3311831 - RNA, 13 nt, Human
cagccccauccuc

SEQ ID NO: 3311832 - RNA, 12 nt, Human
cagccccauccu

SEQ ID NO: 3311833 - RNA, 22 nt, Human
cagccccaucccaaacccuuca

SEQ ID NO: 3311834 - RNA, 24 nt, Human
cagccccuucugacccaugcugcc

SEQ ID NO: 3311835 - RNA, 23 nt, Human
cagccccuucugacccaugcugc

SEQ ID NO: 3311836 - RNA, 22 nt, Human
cagccccuucugacccaugcug

SEQ ID NO: 3311837 - RNA, 21 nt, Human
cagccccuucugacccaugcu

SEQ ID NO: 3311838 - RNA, 19 nt, Human
cagccccuucugacccaug

SEQ ID NO: 3311839 - RNA, 17 nt, Human
cagccccuucugaccca

SEQ ID NO: 3311840 - RNA, 16 nt, Human
cagccccuucugaccc

SEQ ID NO: 3311841 - RNA, 16 nt, Human
cagcccgggcucugcc

SEQ ID NO: 3311842 - RNA, 15 nt, Human
cagcccgggcucugc

SEQ ID NO: 3311843 - RNA, 14 nt, Human
cagcccgggcucug

SEQ ID NO: 3311844 - RNA, 13 nt, Human
cagcccgggcucu

SEQ ID NO: 3311845 - RNA, 22 nt, Human
cagcccgggcucugccucccau

SEQ ID NO: 3311846 - RNA, 21 nt, Human
cagcccgggcucugccuccca

SEQ ID NO: 3311847 - RNA, 20 nt, Human
cagcccgggcucugccuccc

SEQ ID NO: 3311848 - RNA, 19 nt, Human
cagcccgggcucugccucc

SEQ ID NO: 3311849 - RNA, 18 nt, Human
cagcccgggcucugccuc

SEQ ID NO: 3311850 - RNA, 17 nt, Human
cagcccgggcucugccu

SEQ ID NO: 3311851 - RNA, 21 nt, Human
cagcucugcaagaauugaagc

SEQ ID NO: 3311852 - RNA, 16 nt, Human
cagcucugcaagaauu

SEQ ID NO: 3311853 - RNA, 15 nt, Human
cagcucugcaagaau

SEQ ID NO: 3311854 - RNA, 16 nt, Human
cagcuccuucuguccu

SEQ ID NO: 3311855 - RNA, 17 nt, Human
cagcuccuucuguccua

SEQ ID NO: 3311856 - RNA, 21 nt, Human
cagcuccuucuguccuacucu

SEQ ID NO: 3311857 - RNA, 23 nt, Human
cagcuccuucuguccuacucugu

SEQ ID NO: 3311858 - RNA, 20 nt, Human
cagcucagagagggugggag

SEQ ID NO: 3311859 - RNA, 19 nt, Human
cagcucagagaggguggga

SEQ ID NO: 3311860 - RNA, 17 nt, Human
cagcucagagagggugg

SEQ ID NO: 3311861 - RNA, 13 nt, Human
cagcucagagagg

SEQ ID NO: 3311862 - RNA, 13 nt, Human
cagcucuggucca

SEQ ID NO: 3311863 - RNA, 10 nt, Human
cagcucuggu

SEQ ID NO: 3311864 - RNA, 21 nt, Human
cagcucugguccauagagagc

SEQ ID NO: 3311865 - RNA, 18 nt, Human
cagcucugguccauagag

SEQ ID NO: 3311866 - RNA, 17 nt, Human
cagcucugguccauaga

SEQ ID NO: 3311867 - RNA, 16 nt, Human
cagcucugguccauag

SEQ ID NO: 3311868 - RNA, 12 nt, Human
cagcucuguccu

SEQ ID NO: 3311869 - RNA, 13 nt, Human
cagcucuguccug

SEQ ID NO: 3311870 - RNA, 23 nt, Human
cagcucugguccauagagagcaa

SEQ ID NO: 3311871 - RNA, 22 nt, Human
cagcucugguccauagagagca

SEQ ID NO: 3311872 - RNA, 14 nt, Human
cagcucuguccugg

SEQ ID NO: 3311873 - RNA, 16 nt, Human
cagcucuguccuggga

SEQ ID NO: 3311874 - RNA, 17 nt, Human
cagcucuguccugggag

SEQ ID NO: 3311875 - RNA, 18 nt, Human
cagcucuguccugggagu

SEQ ID NO: 3311876 - RNA, 23 nt, Human
cagcucuguccugggagugagcu

SEQ ID NO: 3311877 - RNA, 21 nt, Human
cagcucuuauauugccauuuc

SEQ ID NO: 3311878 - RNA, 10 nt, Human
cagcucuuau

SEQ ID NO: 3311879 - RNA, 13 nt, Human
cagcucuucucca

SEQ ID NO: 3311880 - RNA, 14 nt, Human
cagcucuucuccag

SEQ ID NO: 3311881 - RNA, 15 nt, Human
cagcucuucuccagg

SEQ ID NO: 3311882 - RNA, 16 nt, Human
cagcucuucuccaggc

SEQ ID NO: 3311883 - RNA, 17 nt, Human
cagcucuucuccaggcu

SEQ ID NO: 3311884 - RNA, 18 nt, Human
cagcucuucuccaggcug

SEQ ID NO: 3311885 - RNA, 19 nt, Human
cagcucuucuccaggcugu

SEQ ID NO: 3311886 - RNA, 23 nt, Human
cagcucuucuccaggcuguaucc

SEQ ID NO: 3311887 - RNA, 18 nt, Human
cagcugguugagguuuca

SEQ ID NO: 3311888 - RNA, 23 nt, Human
cagcugggguggggaccucaggc

SEQ ID NO: 3311889 - RNA, 22 nt, Human
cagcugggguggggaccucagg

SEQ ID NO: 3311890 - RNA, 21 nt, Human
cagcugggguggggaccucag

SEQ ID NO: 3311891 - RNA, 23 nt, Human
cagcugcuuuugucuaugggacu

SEQ ID NO: 3311892 - RNA, 22 nt, Human
cagcugcuuuugucuaugggac

SEQ ID NO: 3311893 - RNA, 17 nt, Human
cagcugcuacuacuccu

SEQ ID NO: 3311894 - RNA, 22 nt, Human
cagcugcuugggcuucauccuc

SEQ ID NO: 3311895 - RNA, 21 nt, Human
cagcugcuugggcuucauccu

SEQ ID NO: 3311896 - RNA, 19 nt, Human
cagcugcuugggcuucauc

SEQ ID NO: 3311897 - RNA, 18 nt, Human
cagcugcuugggcuucau

SEQ ID NO: 3311898 - RNA, 16 nt, Human
cagcugcuugggcuuc

SEQ ID NO: 3311899 - RNA, 15 nt, Human
cagcugcuugggcuu

SEQ ID NO: 3311900 - RNA, 14 nt, Human
cagcugcuugggcu

SEQ ID NO: 3311901 - RNA, 13 nt, Human
cagcugcuugggc

SEQ ID NO: 3311902 - RNA, 18 nt, Human
cagcugcgguccacccag

SEQ ID NO: 3311903 - RNA, 15 nt, Human
cagcugccugggauc

SEQ ID NO: 3311904 - RNA, 19 nt, Human
cagcugcgguccacccagg

SEQ ID NO: 3311905 - RNA, 20 nt, Human
cagcugcgguccacccagga

SEQ ID NO: 3311906 - RNA, 21 nt, Human
cagcugcgguccacccaggag

SEQ ID NO: 3311907 - RNA, 22 nt, Human
cagcugcgguccacccaggagc

SEQ ID NO: 3311908 - RNA, 23 nt, Human
cagcugcgguccacccaggagcc

SEQ ID NO: 3311909 - RNA, 24 nt, Human
cagcugcgguccacccaggagccc

SEQ ID NO: 3311910 - RNA, 23 nt, Human
cagcugccugggaucccucaucc

SEQ ID NO: 3311911 - RNA, 18 nt, Human
cagcugccugggaucccu

SEQ ID NO: 3311912 - RNA, 18 nt, Human
cagcuuguaaauagcuca

SEQ ID NO: 3311913 - RNA, 19 nt, Human
cagcuuguaaauagcucag

SEQ ID NO: 3311914 - RNA, 20 nt, Human
cagcuuguaaauagcucagg

SEQ ID NO: 3311915 - RNA, 21 nt, Human
cagcuuguaaauagcucaggu

SEQ ID NO: 3311916 - RNA, 22 nt, Human
cagcuuguaaauagcucaggug

SEQ ID NO: 3311917 - RNA, 23 nt, Human
cagcuuuguuuguugucagcuga

SEQ ID NO: 3311918 - RNA, 22 nt, Human
cagcuuuguuuguugucagcug

SEQ ID NO: 3311919 - RNA, 21 nt, Human
cagcuuuguuuguugucagcu

SEQ ID NO: 3311920 - RNA, 12 nt, Human
cagcuuuguuug

SEQ ID NO: 3311921 - RNA, 19 nt, Human
cagcuucauuuccuguguc

SEQ ID NO: 3311922 - RNA, 20 nt, Human
cagcuucauuuccugugucu

SEQ ID NO: 3311923 - RNA, 21 nt, Human
cagcuucauuuccugugucuu

SEQ ID NO: 3311924 - RNA, 14 nt, Human
cagcuugaggguug

SEQ ID NO: 3311925 - RNA, 15 nt, Human
cagcuugaggguugg

SEQ ID NO: 3311926 - RNA, 21 nt, Human
cagcuugaccgugaggccaga

SEQ ID NO: 3311927 - RNA, 20 nt, Human
cagcuugaccgugaggccag

SEQ ID NO: 3311928 - RNA, 19 nt, Human
cagcuugaccgugaggcca

SEQ ID NO: 3311929 - RNA, 18 nt, Human
cagcuugaccgugaggcc

SEQ ID NO: 3311930 - RNA, 18 nt, Human
cagcuugaggguugggcu

SEQ ID NO: 3311931 - RNA, 19 nt, Human
cagcuugaggguugggcug

SEQ ID NO: 3311932 - RNA, 20 nt, Human
cagcuugaggguugggcugg

SEQ ID NO: 3311933 - RNA, 21 nt, Human
cagcuugaggguugggcuggu

SEQ ID NO: 3311934 - RNA, 20 nt, Human
caggaaguacuggagaaaau

SEQ ID NO: 3311935 - RNA, 18 nt, Human
caggaaguacuggagaaa

SEQ ID NO: 3311936 - RNA, 17 nt, Human
caggaaguacuggagaa

SEQ ID NO: 3311937 - RNA, 12 nt, Human
caggaaguacug

SEQ ID NO: 3311938 - RNA, 16 nt, Human
caggaaguacuggaga

SEQ ID NO: 3311939 - RNA, 14 nt, Human
caggaaguacugga

SEQ ID NO: 3311940 - RNA, 15 nt, Human
caggaaggcuaaagg

SEQ ID NO: 3311941 - RNA, 22 nt, Human
caggaagccagcaggcucucag

SEQ ID NO: 3311942 - RNA, 21 nt, Human
caggaagccagcaggcucuca

SEQ ID NO: 3311943 - RNA, 19 nt, Human
caggaagccagcaggcucu

SEQ ID NO: 3311944 - RNA, 18 nt, Human
caggaagccagcaggcuc

SEQ ID NO: 3311945 - RNA, 17 nt, Human
caggaagccagcaggcu

SEQ ID NO: 3311946 - RNA, 16 nt, Human
caggaagccagcaggc

SEQ ID NO: 3311947 - RNA, 14 nt, Human
caggaagccagcag

SEQ ID NO: 3311948 - RNA, 13 nt, Human
caggaagcucagg

SEQ ID NO: 3311949 - RNA, 15 nt, Human
caggaagcucagggc

SEQ ID NO: 3311950 - RNA, 14 nt, Human
caggaagcucaggg

SEQ ID NO: 3311951 - RNA, 19 nt, Human
caggaagcucagggccugg

SEQ ID NO: 3311952 - RNA, 18 nt, Human
caggaagcucagggccug

SEQ ID NO: 3311953 - RNA, 17 nt, Human
caggaagcucagggccu

SEQ ID NO: 3311954 - RNA, 16 nt, Human
caggaagcucagggcc

SEQ ID NO: 3311955 - RNA, 23 nt, Human
caggaagcucagggccuggcuca

SEQ ID NO: 3311956 - RNA, 22 nt, Human
caggaagcucagggccuggcuc

SEQ ID NO: 3311957 - RNA, 21 nt, Human
caggaagcucagggccuggcu

SEQ ID NO: 3311958 - RNA, 20 nt, Human
caggaagcucagggccuggc

SEQ ID NO: 3311959 - RNA, 16 nt, Human
cagccaaagccuccuc

SEQ ID NO: 3311960 - RNA, 15 nt, Human
cagccaaagccuccu

SEQ ID NO: 3311961 - RNA, 21 nt, Human
cagccaaagccuccuccagcc

SEQ ID NO: 3311962 - RNA, 18 nt, Human
cagccaaagccuccucca

SEQ ID NO: 3311963 - RNA, 21 nt, Human
cagcauccuggcacccggccc

SEQ ID NO: 3311964 - RNA, 19 nt, Human
cagcauccuggcacccggc

SEQ ID NO: 3311965 - RNA, 20 nt, Human
cagcauccuggcacccggcc

SEQ ID NO: 3311966 - RNA, 14 nt, Human
cagcauccuggcac

SEQ ID NO: 3311967 - RNA, 15 nt, Human
cagcauccuggcacc

SEQ ID NO: 3311968 - RNA, 16 nt, Human
cagcauccuggcaccc

SEQ ID NO: 3311969 - RNA, 17 nt, Human
cagcauccuggcacccg

SEQ ID NO: 3311970 - RNA, 20 nt, Human
cagcagggagggcuucugcc

SEQ ID NO: 3311971 - RNA, 19 nt, Human
cagcaggcucucaggccag

SEQ ID NO: 3311972 - RNA, 18 nt, Human
cagcaggcucucaggcca

SEQ ID NO: 3311973 - RNA, 17 nt, Human
cagcaggcucucaggcc

SEQ ID NO: 3311974 - RNA, 16 nt, Human
cagcaggcucucaggc

SEQ ID NO: 3311975 - RNA, 22 nt, Human
cagcaggcucucaggccagcug

SEQ ID NO: 3311976 - RNA, 20 nt, Human
cagcaggcucucaggccagc

SEQ ID NO: 3311977 - RNA, 18 nt, Human
cagcagggagggcuucug

SEQ ID NO: 3311978 - RNA, 18 nt, Human
cagcagccuggacccugu

SEQ ID NO: 3311979 - RNA, 15 nt, Human
cagcagccuggaccc

SEQ ID NO: 3311980 - RNA, 14 nt, Human
cagcagccuggacc

SEQ ID NO: 3311981 - RNA, 12 nt, Human
cagcagccugga

SEQ ID NO: 3311982 - RNA, 22 nt, Human
cagcagccuggacccuguggau

SEQ ID NO: 3311983 - RNA, 19 nt, Human
cagcagccuggacccugug

SEQ ID NO: 3311984 - RNA, 12 nt, Human
cagcaggcucuc

SEQ ID NO: 3311985 - RNA, 15 nt, Human
cagcaggcucucagg

SEQ ID NO: 3311986 - RNA, 14 nt, Human
cagcaggcucucag

SEQ ID NO: 3311987 - RNA, 23 nt, Human
cagccacggccaggccagaggga

SEQ ID NO: 3311988 - RNA, 13 nt, Human
cagccaguaaaug

SEQ ID NO: 3311989 - RNA, 22 nt, Human
cagccaguaaaugggggugcau

SEQ ID NO: 3311990 - RNA, 14 nt, Human
cagccacggccagg

SEQ ID NO: 3311991 - RNA, 15 nt, Human
cagccacggccaggc

SEQ ID NO: 3311992 - RNA, 16 nt, Human
cagccacggccaggcc

SEQ ID NO: 3311993 - RNA, 17 nt, Human
cagccacggccaggcca

SEQ ID NO: 3311994 - RNA, 18 nt, Human
cagccacggccaggccag

SEQ ID NO: 3311995 - RNA, 19 nt, Human
cagccacggccaggccaga

SEQ ID NO: 3311996 - RNA, 21 nt, Human
cagccacggccaggccagagg

SEQ ID NO: 3311997 - RNA, 22 nt, Human
cagccacggccaggccagaggg

SEQ ID NO: 3311998 - RNA, 19 nt, Human
cagccacauuccugaugcu

SEQ ID NO: 3311999 - RNA, 17 nt, Human
cagccacauuccugaug

SEQ ID NO: 3312000 - RNA, 15 nt, Human
cagccacauuccuga

SEQ ID NO: 3312001 - RNA, 14 nt, Human
cagccacauuccug

SEQ ID NO: 3312002 - RNA, 18 nt, Human
cagcccacuucugccaua

SEQ ID NO: 3312003 - RNA, 22 nt, Human
cagccccaaaacucuccucugc

SEQ ID NO: 3312004 - RNA, 21 nt, Human
cagccccaaaacucuccucug

SEQ ID NO: 3312005 - RNA, 20 nt, Human
cagccccaaaacucuccucu

SEQ ID NO: 3312006 - RNA, 15 nt, Human
cagcccaccccucaa

SEQ ID NO: 3312007 - RNA, 15 nt, Human
cagcccacuucugcc

SEQ ID NO: 3312008 - RNA, 18 nt, Human
cagaugggugcuuggagg

SEQ ID NO: 3312009 - RNA, 23 nt, Human
cagaugggugcuuggaggaagga

SEQ ID NO: 3312010 - RNA, 18 nt, Human
cagcaaaagaugcuucuc

SEQ ID NO: 3312011 - RNA, 14 nt, Human
cagauucuuuccug

SEQ ID NO: 3312012 - RNA, 17 nt, Human
cagcaaggagauuuaca

SEQ ID NO: 3312013 - RNA, 18 nt, Human
cagcaaggagauuuacaa

SEQ ID NO: 3312014 - RNA, 12 nt, Human
cagcaagugaga

SEQ ID NO: 3312015 - RNA, 14 nt, Human
cagcaagugagagc

SEQ ID NO: 3312016 - RNA, 15 nt, Human
cagcaagugagagcu

SEQ ID NO: 3312017 - RNA, 16 nt, Human
cagcaagugagagcug

SEQ ID NO: 3312018 - RNA, 17 nt, Human
cagcaagugagagcugg

SEQ ID NO: 3312019 - RNA, 22 nt, Human
cagcaauaaagcagcguuucua

SEQ ID NO: 3312020 - RNA, 19 nt, Human
cagcaagugagagcugggu

SEQ ID NO: 3312021 - RNA, 21 nt, Human
cagcaagugagagcugggugu

SEQ ID NO: 3312022 - RNA, 21 nt, Human
cagcaauaaagcagcguuucu

SEQ ID NO: 3312023 - RNA, 13 nt, Human
cagcaauaaagca

SEQ ID NO: 3312024 - RNA, 17 nt, Human
cagcagaaaugccuuac

SEQ ID NO: 3312025 - RNA, 15 nt, Human
cagcagaaaugccuu

SEQ ID NO: 3312026 - RNA, 22 nt, Human
cagcagaaaugccuuacccuca

SEQ ID NO: 3312027 - RNA, 19 nt, Human
cagcagaaaugccuuaccc

SEQ ID NO: 3312028 - RNA, 13 nt, Human
cagcagagcaccu

SEQ ID NO: 3312029 - RNA, 11 nt, Human
cagcagagcac

SEQ ID NO: 3312030 - RNA, 13 nt, Human
cagaggagagagg

SEQ ID NO: 3312031 - RNA, 19 nt, Human
cagaggagagaggaccccc

SEQ ID NO: 3312032 - RNA, 15 nt, Human
cagaggagagaggac

SEQ ID NO: 3312033 - RNA, 11 nt, Human
cagaggcagcc

SEQ ID NO: 3312034 - RNA, 20 nt, Human
cagaggagagaggacccccu

SEQ ID NO: 3312035 - RNA, 21 nt, Human
cagagcccacgcccccacugg

SEQ ID NO: 3312036 - RNA, 20 nt, Human
cagagcccacgcccccacug

SEQ ID NO: 3312037 - RNA, 19 nt, Human
cagagcccacgcccccacu

SEQ ID NO: 3312038 - RNA, 17 nt, Human
cagagcccacgccccca

SEQ ID NO: 3312039 - RNA, 23 nt, Human
cagagcccacgcccccacuggug

SEQ ID NO: 3312040 - RNA, 13 nt, Human
cagaggaaggaga

SEQ ID NO: 3312041 - RNA, 13 nt, Human
cagagccugcagu

SEQ ID NO: 3312042 - RNA, 20 nt, Human
cagaggaaagcaaaggagau

SEQ ID NO: 3312043 - RNA, 12 nt, Human
cagagccugcag

SEQ ID NO: 3312044 - RNA, 23 nt, Human
cagagcaccuuagacagucccug

SEQ ID NO: 3312045 - RNA, 12 nt, Human
cagagcagagac

SEQ ID NO: 3312046 - RNA, 11 nt, Human
cagagcagaga

SEQ ID NO: 3312047 - RNA, 22 nt, Human
cagagcaccuuagacagucccu

SEQ ID NO: 3312048 - RNA, 21 nt, Human
cagagcaccuuagacaguccc

SEQ ID NO: 3312049 - RNA, 19 nt, Human
cagagcaccuuagacaguc

SEQ ID NO: 3312050 - RNA, 18 nt, Human
cagagcaccuuagacagu

SEQ ID NO: 3312051 - RNA, 21 nt, Human
cagagcagagaccaucccuga

SEQ ID NO: 3312052 - RNA, 19 nt, Human
cagagcagagaccaucccu

SEQ ID NO: 3312053 - RNA, 18 nt, Human
cagagcagagaccauccc

SEQ ID NO: 3312054 - RNA, 17 nt, Human
cagagcagagaccaucc

SEQ ID NO: 3312055 - RNA, 15 nt, Human
cagagcagagaccau

SEQ ID NO: 3312056 - RNA, 14 nt, Human
cagagcagagacca

SEQ ID NO: 3312057 - RNA, 13 nt, Human
cagagcagagacc

SEQ ID NO: 3312058 - RNA, 15 nt, Human
cagagcccaccuugg

SEQ ID NO: 3312059 - RNA, 17 nt, Human
cagagcccaccuuggcu

SEQ ID NO: 3312060 - RNA, 19 nt, Human
cagagcccaccuuggcuca

SEQ ID NO: 3312061 - RNA, 20 nt, Human
cagagcccaccuuggcucaa

SEQ ID NO: 3312062 - RNA, 16 nt, Human
cagagcccacgccccc

SEQ ID NO: 3312063 - RNA, 19 nt, Human
cagagaaugaaagggccca

SEQ ID NO: 3312064 - RNA, 15 nt, Human
cagagaauucucuua

SEQ ID NO: 3312065 - RNA, 20 nt, Human
cagagaaugaaagggcccag

SEQ ID NO: 3312066 - RNA, 21 nt, Human
cagagaaugaaagggcccaga

SEQ ID NO: 3312067 - RNA, 13 nt, Human
cagagaccauccc

SEQ ID NO: 3312068 - RNA, 16 nt, Human
cagagaccaucccuga

SEQ ID NO: 3312069 - RNA, 14 nt, Human
cagagaccaucccu

SEQ ID NO: 3312070 - RNA, 15 nt, Human
cagagacacaagccu

SEQ ID NO: 3312071 - RNA, 14 nt, Human
cagagacacaagcc

SEQ ID NO: 3312072 - RNA, 17 nt, Human
cagagacacaagccuuc

SEQ ID NO: 3312073 - RNA, 16 nt, Human
cagagacacaagccuu

SEQ ID NO: 3312074 - RNA, 16 nt, Human
cagagcaccuuagaca

SEQ ID NO: 3312075 - RNA, 20 nt, Human
cagagcaagugagacccugu

SEQ ID NO: 3312076 - RNA, 14 nt, Human
cagagcaagugaga

SEQ ID NO: 3312077 - RNA, 18 nt, Human
cagagacuccugcaggca

SEQ ID NO: 3312078 - RNA, 17 nt, Human
cagagacuccugcaggc

SEQ ID NO: 3312079 - RNA, 16 nt, Human
cagagacuccugcagg

SEQ ID NO: 3312080 - RNA, 15 nt, Human
cagagacuccugcag

SEQ ID NO: 3312081 - RNA, 14 nt, Human
cagagacuccugca

SEQ ID NO: 3312082 - RNA, 13 nt, Human
cagagacuccugc

SEQ ID NO: 3312083 - RNA, 20 nt, Human
cagagaccaucccugaaggc

SEQ ID NO: 3312084 - RNA, 19 nt, Human
cagagaccaucccugaagg

SEQ ID NO: 3312085 - RNA, 18 nt, Human
cagagaccaucccugaag

SEQ ID NO: 3312086 - RNA, 17 nt, Human
cagagaccaucccugaa

SEQ ID NO: 3312087 - RNA, 21 nt, Human
cagagaccaucccugaaggcc

SEQ ID NO: 3312088 - RNA, 18 nt, Human
cagaguuguuacauuuuu

SEQ ID NO: 3312089 - RNA, 15 nt, Human
cagaguuguuacauu

SEQ ID NO: 3312090 - RNA, 19 nt, Human
cagaguuguuacauuuuua

SEQ ID NO: 3312091 - RNA, 22 nt, Human
cagaguugaagacagagcuaca

SEQ ID NO: 3312092 - RNA, 14 nt, Human
cagaguuguuacau

SEQ ID NO: 3312093 - RNA, 20 nt, Human
cagaguugaagacagagcua

SEQ ID NO: 3312094 - RNA, 19 nt, Human
cagaguugaagacagagcu

SEQ ID NO: 3312095 - RNA, 18 nt, Human
cagaguugaagacagagc

SEQ ID NO: 3312096 - RNA, 17 nt, Human
cagaguugaagacagag

SEQ ID NO: 3312097 - RNA, 14 nt, Human
cagaguugaagaca

SEQ ID NO: 3312098 - RNA, 16 nt, Human
cagaguugaagacaga

SEQ ID NO: 3312099 - RNA, 15 nt, Human
cagaguugaagacag

SEQ ID NO: 3312100 - RNA, 22 nt, Human
cagauacaggaaaagcugcuga

SEQ ID NO: 3312101 - RNA, 20 nt, Human
cagauacaggaaaagcugcu

SEQ ID NO: 3312102 - RNA, 21 nt, Human
cagauacaggaaaagcugcug

SEQ ID NO: 3312103 - RNA, 20 nt, Human
cagaucucuaacuucaccau

SEQ ID NO: 3312104 - RNA, 17 nt, Human
cagaugcaccagcccuu

SEQ ID NO: 3312105 - RNA, 22 nt, Human
cagaugcaccagcccuuagcag

SEQ ID NO: 3312106 - RNA, 14 nt, Human
cagaugcaccagcc

SEQ ID NO: 3312107 - RNA, 16 nt, Human
cagaugcaccagcccu

SEQ ID NO: 3312108 - RNA, 13 nt, Human
cagaugcaccagc

SEQ ID NO: 3312109 - RNA, 13 nt, Human
cagagucucacug

SEQ ID NO: 3312110 - RNA, 17 nt, Human
cagagucucacuguugc

SEQ ID NO: 3312111 - RNA, 19 nt, Human
cagagucucacuguugccc

SEQ ID NO: 3312112 - RNA, 20 nt, Human
cagagucucacuguugccca

SEQ ID NO: 3312113 - RNA, 21 nt, Human
cagagucucacuguugcccag

SEQ ID NO: 3312114 - RNA, 15 nt, Human
cagagggccugcaag

SEQ ID NO: 3312115 - RNA, 20 nt, Human
cagagggagugacagaggca

SEQ ID NO: 3312116 - RNA, 21 nt, Human
cagagggagugacagaggcag

SEQ ID NO: 3312117 - RNA, 22 nt, Human
cagagggagugacagaggcagc

SEQ ID NO: 3312118 - RNA, 23 nt, Human
cagagggagugacagaggcagcc

SEQ ID NO: 3312119 - RNA, 19 nt, Human
cagagugagacucugucuc

SEQ ID NO: 3312120 - RNA, 20 nt, Human
cagagugagacucugucuca

SEQ ID NO: 3312121 - RNA, 22 nt, Human
cagagucucacuguugcccagg

SEQ ID NO: 3312122 - RNA, 23 nt, Human
cagagucucacuguugcccaggc

SEQ ID NO: 3312123 - RNA, 16 nt, Human
cagagugagacucugu

SEQ ID NO: 3312124 - RNA, 17 nt, Human
cagagugagacucuguc

SEQ ID NO: 3312125 - RNA, 18 nt, Human
cagagugagacucugucu

SEQ ID NO: 3312126 - RNA, 20 nt, Human
cagaggccaugggccuccug

SEQ ID NO: 3312127 - RNA, 21 nt, Human
cagaggccaugggccuccugu

SEQ ID NO: 3312128 - RNA, 23 nt, Human
cagaggcagccccauucugccug

SEQ ID NO: 3312129 - RNA, 19 nt, Human
cagaggccaugggccuccu

SEQ ID NO: 3312130 - RNA, 16 nt, Human
cagaggccaugggccu

SEQ ID NO: 3312131 - RNA, 12 nt, Human
cagaggcagccc

SEQ ID NO: 3312132 - RNA, 13 nt, Human
cagaggcagcccc

SEQ ID NO: 3312133 - RNA, 14 nt, Human
cagaggcagcccca

SEQ ID NO: 3312134 - RNA, 15 nt, Human
cagaggcagccccau

SEQ ID NO: 3312135 - RNA, 18 nt, Human
cagaggcagccccauucu

SEQ ID NO: 3312136 - RNA, 19 nt, Human
cagaggcagccccauucug

SEQ ID NO: 3312137 - RNA, 20 nt, Human
cagaggcagccccauucugc

SEQ ID NO: 3312138 - RNA, 22 nt, Human
cagaggcagccccauucugccu

SEQ ID NO: 3312139 - RNA, 14 nt, Human
cagagggagugaca

SEQ ID NO: 3312140 - RNA, 16 nt, Human
cagagggagugacaga

SEQ ID NO: 3312141 - RNA, 18 nt, Human
cagagggagugacagagg

SEQ ID NO: 3312142 - RNA, 19 nt, Human
cagagggagugacagaggc

SEQ ID NO: 3312143 - RNA, 23 nt, Human
cagaggcugccucucccaucacu

SEQ ID NO: 3312144 - RNA, 13 nt, Human
cagaggcugccuc

SEQ ID NO: 3312145 - RNA, 23 nt, Human
cagaaaauggaagacagcucuua

SEQ ID NO: 3312146 - RNA, 22 nt, Human
cagaaaauggaagacagcucuu

SEQ ID NO: 3312147 - RNA, 21 nt, Human
cagaaaauggaagacagcucu

SEQ ID NO: 3312148 - RNA, 20 nt, Human
cagaaaauggaagacagcuc

SEQ ID NO: 3312149 - RNA, 16 nt, Human
cagaaaauggaagaca

SEQ ID NO: 3312150 - RNA, 22 nt, Human
cacuuuuguucuugguuuguaa

SEQ ID NO: 3312151 - RNA, 14 nt, Human
cacuuuuguucuug

SEQ ID NO: 3312152 - RNA, 16 nt, Human
cacuuugggaggccaa

SEQ ID NO: 3312153 - RNA, 13 nt, Human
cacuuugggaggc

SEQ ID NO: 3312154 - RNA, 12 nt, Human
cacuuugggagg

SEQ ID NO: 3312155 - RNA, 23 nt, Human
cacuuuguucuggcucuuccagg

SEQ ID NO: 3312156 - RNA, 16 nt, Human
cacuuuguucuggcuc

SEQ ID NO: 3312157 - RNA, 14 nt, Human
cacuuuguucuggc

SEQ ID NO: 3312158 - RNA, 13 nt, Human
cacuuuguucugg

SEQ ID NO: 3312159 - RNA, 22 nt, Human
cacuuucuagccagaggagaga

SEQ ID NO: 3312160 - RNA, 21 nt, Human
cagaagacacugaugggcaac

SEQ ID NO: 3312161 - RNA, 19 nt, Human
cagaaggaagacuucaucc

SEQ ID NO: 3312162 - RNA, 18 nt, Human
cagaaggaagacuucauc

SEQ ID NO: 3312163 - RNA, 17 nt, Human
cagaaggaagacuucau

SEQ ID NO: 3312164 - RNA, 16 nt, Human
cagaaggaagacuuca

SEQ ID NO: 3312165 - RNA, 17 nt, Human
cagaaucucaaauaacu

SEQ ID NO: 3312166 - RNA, 18 nt, Human
cagaaucucaaauaacua

SEQ ID NO: 3312167 - RNA, 19 nt, Human
cagacauacuaaccagcag

SEQ ID NO: 3312168 - RNA, 20 nt, Human
cagacaguuaagagaaauga

SEQ ID NO: 3312169 - RNA, 19 nt, Human
cagacaccuugacagggca

SEQ ID NO: 3312170 - RNA, 20 nt, Human
cagacaccuugacagggcac

SEQ ID NO: 3312171 - RNA, 22 nt, Human
cagacaccuugacagggcacac

SEQ ID NO: 3312172 - RNA, 13 nt, Human
cagacacaggccc

SEQ ID NO: 3312173 - RNA, 14 nt, Human
cagacacaggcccg

SEQ ID NO: 3312174 - RNA, 15 nt, Human
cagacacaggcccgg

SEQ ID NO: 3312175 - RNA, 17 nt, Human
cagacacaggcccggcu

SEQ ID NO: 3312176 - RNA, 18 nt, Human
cagacacaggcccggcuc

SEQ ID NO: 3312177 - RNA, 21 nt, Human
cagacacaggcccggcuccag

SEQ ID NO: 3312178 - RNA, 22 nt, Human
cagacacaggcccggcuccagg

SEQ ID NO: 3312179 - RNA, 23 nt, Human
cagacacaggcccggcuccaggc

SEQ ID NO: 3312180 - RNA, 23 nt, Human
cagacacauguccaagaagccca

SEQ ID NO: 3312181 - RNA, 22 nt, Human
cagacacauguccaagaagccc

SEQ ID NO: 3312182 - RNA, 21 nt, Human
cagacacauguccaagaagcc

SEQ ID NO: 3312183 - RNA, 17 nt, Human
cagacacauguccaaga

SEQ ID NO: 3312184 - RNA, 14 nt, Human
cagacacaugucca

SEQ ID NO: 3312185 - RNA, 22 nt, Human
cagacaaagcgugguggacaug

SEQ ID NO: 3312186 - RNA, 16 nt, Human
cagacaacaaaccugu

SEQ ID NO: 3312187 - RNA, 20 nt, Human
cagacaacaaaccuguuucu

SEQ ID NO: 3312188 - RNA, 12 nt, Human
cagacaaagcgu

SEQ ID NO: 3312189 - RNA, 24 nt, Human
cagaauuucccaaagcagugcaug

SEQ ID NO: 3312190 - RNA, 20 nt, Human
cagaauuucccaaagcagug

SEQ ID NO: 3312191 - RNA, 19 nt, Human
cagaauuucccaaagcagu

SEQ ID NO: 3312192 - RNA, 18 nt, Human
cagaauuucccaaagcag

SEQ ID NO: 3312193 - RNA, 17 nt, Human
cagaauuucccaaagca

SEQ ID NO: 3312194 - RNA, 11 nt, Human
cagaauucuca

SEQ ID NO: 3312195 - RNA, 18 nt, Human
cagaauucucuaguuuga

SEQ ID NO: 3312196 - RNA, 15 nt, Human
cagaauucucuaguu

SEQ ID NO: 3312197 - RNA, 14 nt, Human
cagaauuucccaaa

SEQ ID NO: 3312198 - RNA, 19 nt, Human
cagagaaaguacuucucca

SEQ ID NO: 3312199 - RNA, 23 nt, Human
cagagaaaguacuucuccacccu

SEQ ID NO: 3312200 - RNA, 16 nt, Human
cagacccggcugcgug

SEQ ID NO: 3312201 - RNA, 12 nt, Human
cagacccugccc

SEQ ID NO: 3312202 - RNA, 14 nt, Human
cagacccugcccug

SEQ ID NO: 3312203 - RNA, 13 nt, Human
cagacccugcccu

SEQ ID NO: 3312204 - RNA, 12 nt, Human
cagacccggcug

SEQ ID NO: 3312205 - RNA, 14 nt, Human
cagacccggcugcg

SEQ ID NO: 3312206 - RNA, 21 nt, Human
cagacccugcccugugggccc

SEQ ID NO: 3312207 - RNA, 17 nt, Human
cagacccugcccugugg

SEQ ID NO: 3312208 - RNA, 16 nt, Human
cagacccugcccugug

SEQ ID NO: 3312209 - RNA, 15 nt, Human
cagacccugcccugu

SEQ ID NO: 3312210 - RNA, 22 nt, Human
cagacccugcccugugggcccc

SEQ ID NO: 3312211 - RNA, 20 nt, Human
cagaccacaaaacuuuucua

SEQ ID NO: 3312212 - RNA, 14 nt, Human
cagaccacaaaacu

SEQ ID NO: 3312213 - RNA, 18 nt, Human
cacuuucuagccagagga

SEQ ID NO: 3312214 - RNA, 20 nt, Human
cacuuucuagccagaggaga

SEQ ID NO: 3312215 - RNA, 19 nt, Human
cacuuucuagccagaggag

SEQ ID NO: 3312216 - RNA, 14 nt, Human
cacuugcagacucu

SEQ ID NO: 3312217 - RNA, 18 nt, Human
cacuugcagacucuacag

SEQ ID NO: 3312218 - RNA, 19 nt, Human
cacuugcagacucuacaga

SEQ ID NO: 3312219 - RNA, 22 nt, Human
cacuugcagacucuacagaggc

SEQ ID NO: 3312220 - RNA, 24 nt, Human
cacuugcagacucuacagaggcca

SEQ ID NO: 3312221 - RNA, 16 nt, Human
cacuugacaucaacug

SEQ ID NO: 3312222 - RNA, 20 nt, Human
cacuugagaauuacccuuuu

SEQ ID NO: 3312223 - RNA, 19 nt, Human
cacuugacaucaacugcau

SEQ ID NO: 3312224 - RNA, 17 nt, Human
cacuugagaauuacccu

SEQ ID NO: 3312225 - RNA, 13 nt, Human
cacuugaguccag

SEQ ID NO: 3312226 - RNA, 13 nt, Human
cacuugcagacuc

SEQ ID NO: 3312227 - RNA, 23 nt, Human
cacuucgggaggucgaggcagga

SEQ ID NO: 3312228 - RNA, 21 nt, Human
cacuucgggaggucgaggcag

SEQ ID NO: 3312229 - RNA, 22 nt, Human
cacuucugccauauucuguugg

SEQ ID NO: 3312230 - RNA, 16 nt, Human
cacuucccuacaugga

SEQ ID NO: 3312231 - RNA, 21 nt, Human
cacuucagcugacuuuucugu

SEQ ID NO: 3312232 - RNA, 12 nt, Human
cacuucagcuga

SEQ ID NO: 3312233 - RNA, 13 nt, Human
cacugugaagaga

SEQ ID NO: 3312234 - RNA, 14 nt, Human
cacugugccaugug

SEQ ID NO: 3312235 - RNA, 22 nt, Human
cacuguucucugcccuccaaga

SEQ ID NO: 3312236 - RNA, 21 nt, Human
cacuguucucugcccuccaag

SEQ ID NO: 3312237 - RNA, 19 nt, Human
cacuguucucugcccucca

SEQ ID NO: 3312238 - RNA, 17 nt, Human
cacuguucucugcccuc

SEQ ID NO: 3312239 - RNA, 16 nt, Human
cacuguucucugcccu

SEQ ID NO: 3312240 - RNA, 15 nt, Human
cacuguucucugccc

SEQ ID NO: 3312241 - RNA, 14 nt, Human
cacuguucucugcc

SEQ ID NO: 3312242 - RNA, 13 nt, Human
cacuguucucugc

SEQ ID NO: 3312243 - RNA, 22 nt, Human
cacugugcugagucugaaggcu

SEQ ID NO: 3312244 - RNA, 21 nt, Human
cacugugcugagucugaaggc

SEQ ID NO: 3312245 - RNA, 20 nt, Human
cacugugcugagucugaagg

SEQ ID NO: 3312246 - RNA, 17 nt, Human
cacugugcugagucuga

SEQ ID NO: 3312247 - RNA, 15 nt, Human
cacugugcugagucu

SEQ ID NO: 3312248 - RNA, 13 nt, Human
cacugugcugagu

SEQ ID NO: 3312249 - RNA, 18 nt, Human
cacugugccaugugccag

SEQ ID NO: 3312250 - RNA, 15 nt, Human
cacugugccaugugc

SEQ ID NO: 3312251 - RNA, 16 nt, Human
cacugugccaugugcc

SEQ ID NO: 3312252 - RNA, 12 nt, Human
cacugcucuggu

SEQ ID NO: 3312253 - RNA, 14 nt, Human
cacugcaccgggcc

SEQ ID NO: 3312254 - RNA, 15 nt, Human
cacugcaccgggcca

SEQ ID NO: 3312255 - RNA, 16 nt, Human
cacugcaccgggccac

SEQ ID NO: 3312256 - RNA, 18 nt, Human
cacugcaccgggccacag

SEQ ID NO: 3312257 - RNA, 19 nt, Human
cacugcaccgggccacaga

SEQ ID NO: 3312258 - RNA, 18 nt, Human
cacugcacuauagccuag

SEQ ID NO: 3312259 - RNA, 21 nt, Human
cacugcuuuuggucuguguga

SEQ ID NO: 3312260 - RNA, 17 nt, Human
cacuggaacacuaauga

SEQ ID NO: 3312261 - RNA, 16 nt, Human
cacugcuuccagugag

SEQ ID NO: 3312262 - RNA, 15 nt, Human
cacugcuuccaguga

SEQ ID NO: 3312263 - RNA, 14 nt, Human
cacugcuuccagug

SEQ ID NO: 3312264 - RNA, 13 nt, Human
cacugcuuaacuu

SEQ ID NO: 3312265 - RNA, 20 nt, Human
cacugcuuuuggucugugug

SEQ ID NO: 3312266 - RNA, 22 nt, Human
cacugcuuccagugaggcucug

SEQ ID NO: 3312267 - RNA, 21 nt, Human
cacugcuuccagugaggcucu

SEQ ID NO: 3312268 - RNA, 20 nt, Human
cacugcuuccagugaggcuc

SEQ ID NO: 3312269 - RNA, 19 nt, Human
cacugcuuccagugaggcu

SEQ ID NO: 3312270 - RNA, 18 nt, Human
cacugcuuccagugaggc

SEQ ID NO: 3312271 - RNA, 23 nt, Human
cacugacauuguuggccaaagcc

SEQ ID NO: 3312272 - RNA, 15 nt, Human
cacucugucgcccag

SEQ ID NO: 3312273 - RNA, 16 nt, Human
cacucugucgcccagu

SEQ ID NO: 3312274 - RNA, 19 nt, Human
cacucugucgcccagucug

SEQ ID NO: 3312275 - RNA, 23 nt, Human
cacucuggcagcucagagagggu

SEQ ID NO: 3312276 - RNA, 21 nt, Human
cacucuggcagcucagagagg

SEQ ID NO: 3312277 - RNA, 20 nt, Human
cacucuggcagcucagagag

SEQ ID NO: 3312278 - RNA, 19 nt, Human
cacucuggcagcucagaga

SEQ ID NO: 3312279 - RNA, 17 nt, Human
cacucuggcagcucaga

SEQ ID NO: 3312280 - RNA, 16 nt, Human
cacucuggcagcucag

SEQ ID NO: 3312281 - RNA, 15 nt, Human
cacucuggcagcuca

SEQ ID NO: 3312282 - RNA, 13 nt, Human
cacugagacagcc

SEQ ID NO: 3312283 - RNA, 12 nt, Human
cacugagacagc

SEQ ID NO: 3312284 - RNA, 22 nt, Human
cacugagacagcccgggcucug

SEQ ID NO: 3312285 - RNA, 19 nt, Human
cacugagacagcccgggcu

SEQ ID NO: 3312286 - RNA, 17 nt, Human
cacugagacagcccggg

SEQ ID NO: 3312287 - RNA, 14 nt, Human
cacugagacagccc

SEQ ID NO: 3312288 - RNA, 14 nt, Human
cacugcaaccuccg

SEQ ID NO: 3312289 - RNA, 16 nt, Human
cacugcaaccuccgcc

SEQ ID NO: 3312290 - RNA, 23 nt, Human
cacugcaaccuccgccucuuggg

SEQ ID NO: 3312291 - RNA, 13 nt, Human
cacugcaaccucc

SEQ ID NO: 3312292 - RNA, 23 nt, Human
cacugagacagcccgggcucugc

SEQ ID NO: 3312293 - RNA, 14 nt, Human
cacugaugggcaac

SEQ ID NO: 3312294 - RNA, 18 nt, Human
cacugaugggcaaccccc

SEQ ID NO: 3312295 - RNA, 24 nt, Human
cacugaugggcaacccccagccug

SEQ ID NO: 3312296 - RNA, 14 nt, Human
cacuaaccacgcug

SEQ ID NO: 3312297 - RNA, 15 nt, Human
cacuaaccacgcugg

SEQ ID NO: 3312298 - RNA, 16 nt, Human
cacuaaccacgcugga

SEQ ID NO: 3312299 - RNA, 18 nt, Human
cacuaaccacgcuggacc

SEQ ID NO: 3312300 - RNA, 17 nt, Human
cacuaaggugugcucug

SEQ ID NO: 3312301 - RNA, 18 nt, Human
cacuaaggugugcucuga

SEQ ID NO: 3312302 - RNA, 14 nt, Human
cacuauaauguaag

SEQ ID NO: 3312303 - RNA, 14 nt, Human
cacuauagccuagg

SEQ ID NO: 3312304 - RNA, 18 nt, Human
cacuauaauguaagcucu

SEQ ID NO: 3312305 - RNA, 21 nt, Human
cacuauagccuaggugacaga

SEQ ID NO: 3312306 - RNA, 16 nt, Human
cacuauguugcccagg

SEQ ID NO: 3312307 - RNA, 17 nt, Human
cacuauguugcccaggc

SEQ ID NO: 3312308 - RNA, 18 nt, Human
cacuauguugcccaggca

SEQ ID NO: 3312309 - RNA, 19 nt, Human
cacuauguugcccaggcag

SEQ ID NO: 3312310 - RNA, 15 nt, Human
cacuauguugcccag

SEQ ID NO: 3312311 - RNA, 20 nt, Human
cacucaaaagcugggcaggu

SEQ ID NO: 3312312 - RNA, 20 nt, Human
cacuauguugcccaggcagg

SEQ ID NO: 3312313 - RNA, 21 nt, Human
cacuauguugcccaggcaggu

SEQ ID NO: 3312314 - RNA, 19 nt, Human
cacucaaaagcugggcagg

SEQ ID NO: 3312315 - RNA, 18 nt, Human
cacucaaaagcugggcag

SEQ ID NO: 3312316 - RNA, 17 nt, Human
cacucaaaagcugggca

SEQ ID NO: 3312317 - RNA, 15 nt, Human
cacucaaaagcuggg

SEQ ID NO: 3312318 - RNA, 12 nt, Human
cacucagaagac

SEQ ID NO: 3312319 - RNA, 16 nt, Human
cacucagaagacacug

SEQ ID NO: 3312320 - RNA, 17 nt, Human
cacucagaagacacuga

SEQ ID NO: 3312321 - RNA, 19 nt, Human
cacucacauuuauucugcu

SEQ ID NO: 3312322 - RNA, 20 nt, Human
cacucacauuuauucugcuc

SEQ ID NO: 3312323 - RNA, 22 nt, Human
cacucagaagacacugaugggc

SEQ ID NO: 3312324 - RNA, 18 nt, Human
cacucagaagacacugau

SEQ ID NO: 3312325 - RNA, 19 nt, Human
cacucagaagacacugaug

SEQ ID NO: 3312326 - RNA, 15 nt, Human
cacucauugaccuga

SEQ ID NO: 3312327 - RNA, 16 nt, Human
cacucaguccauagca

SEQ ID NO: 3312328 - RNA, 15 nt, Human
cacuccccugcuggg

SEQ ID NO: 3312329 - RNA, 12 nt, Human
cacucccugcaa

SEQ ID NO: 3312330 - RNA, 16 nt, Human
cacucccugcaaccug

SEQ ID NO: 3312331 - RNA, 13 nt, Human
cacucccugcaac

SEQ ID NO: 3312332 - RNA, 22 nt, Human
cacucauugaccugaggcccuu

SEQ ID NO: 3312333 - RNA, 20 nt, Human
cacucauugaccugaggccc

SEQ ID NO: 3312334 - RNA, 19 nt, Human
cacucauugaccugaggcc

SEQ ID NO: 3312335 - RNA, 18 nt, Human
cacucauugaccugaggc

SEQ ID NO: 3312336 - RNA, 17 nt, Human
cacucccugcaaccuga

SEQ ID NO: 3312337 - RNA, 21 nt, Human
cacuccuucacagaugggugc

SEQ ID NO: 3312338 - RNA, 14 nt, Human
cacuccuucacaga

SEQ ID NO: 3312339 - RNA, 14 nt, Human
cacucuggcagcuc

SEQ ID NO: 3312340 - RNA, 13 nt, Human
cacucuggcagcu

SEQ ID NO: 3312341 - RNA, 12 nt, Human
cacucuggcagc

SEQ ID NO: 3312342 - RNA, 12 nt, Human
cacucuccuugg

SEQ ID NO: 3312343 - RNA, 23 nt, Human
cacucugagacucgcgacaaugc

SEQ ID NO: 3312344 - RNA, 12 nt, Human
cacucugagacu

SEQ ID NO: 3312345 - RNA, 19 nt, Human
cacgugguccuaaucuucu

SEQ ID NO: 3312346 - RNA, 16 nt, Human
cacgugguccuaaucu

SEQ ID NO: 3312347 - RNA, 23 nt, Human
cacguuucuaaaggcuaccuuug

SEQ ID NO: 3312348 - RNA, 14 nt, Human
cacguuucuaaagg

SEQ ID NO: 3312349 - RNA, 12 nt, Human
cacguuucuaaa

SEQ ID NO: 3312350 - RNA, 18 nt, Human
cacguacacacacauaca

SEQ ID NO: 3312351 - RNA, 19 nt, Human
cacguacacacacauacac

SEQ ID NO: 3312352 - RNA, 14 nt, Human
cacguacacacaca

SEQ ID NO: 3312353 - RNA, 15 nt, Human
cacggcucacugcag

SEQ ID NO: 3312354 - RNA, 20 nt, Human
cacgcuggaccuugaacugg

SEQ ID NO: 3312355 - RNA, 17 nt, Human
cacgcuggaccuugaac

SEQ ID NO: 3312356 - RNA, 16 nt, Human
cacggcucacugcagc

SEQ ID NO: 3312357 - RNA, 17 nt, Human
cacggcucacugcagcc

SEQ ID NO: 3312358 - RNA, 19 nt, Human
cacggcucacugcagccuc

SEQ ID NO: 3312359 - RNA, 20 nt, Human
cacggcucacugcagccuca

SEQ ID NO: 3312360 - RNA, 20 nt, Human
cacgccuguaauccuagcac

SEQ ID NO: 3312361 - RNA, 19 nt, Human
cacgccuguaauccuagca

SEQ ID NO: 3312362 - RNA, 15 nt, Human
cacgcgugcacacac

SEQ ID NO: 3312363 - RNA, 16 nt, Human
cacgcgugcacacacc

SEQ ID NO: 3312364 - RNA, 21 nt, Human
cacgcgugcacacaccagagc

SEQ ID NO: 3312365 - RNA, 23 nt, Human
cacgcgugcacacaccagagccc

SEQ ID NO: 3312366 - RNA, 17 nt, Human
cacgcacuucgggaggu

SEQ ID NO: 3312367 - RNA, 14 nt, Human
cacgauuucuguuu

SEQ ID NO: 3312368 - RNA, 12 nt, Human
cacgauuucugu

SEQ ID NO: 3312369 - RNA, 16 nt, Human
cacgauuucuguuuag

SEQ ID NO: 3312370 - RNA, 18 nt, Human
cacgcccccacuggugac

SEQ ID NO: 3312371 - RNA, 17 nt, Human
cacgcccccacugguga

SEQ ID NO: 3312372 - RNA, 23 nt, Human
cacgccagauucuuuccugaggc

SEQ ID NO: 3312373 - RNA, 15 nt, Human
cacgcccccacuggu

SEQ ID NO: 3312374 - RNA, 13 nt, Human
cacgcccccacug

SEQ ID NO: 3312375 - RNA, 13 nt, Human
cacgccacugcac

SEQ ID NO: 3312376 - RNA, 15 nt, Human
cacgccacugcacua

SEQ ID NO: 3312377 - RNA, 19 nt, Human
cacgccagauucuuuccug

SEQ ID NO: 3312378 - RNA, 22 nt, Human
cacgccagauucuuuccugagg

SEQ ID NO: 3312379 - RNA, 20 nt, Human
cacgccagauucuuuccuga

SEQ ID NO: 3312380 - RNA, 15 nt, Human
caccuugacagggca

SEQ ID NO: 3312381 - RNA, 16 nt, Human
caccuugacagggcac

SEQ ID NO: 3312382 - RNA, 13 nt, Human
caccuugacaggg

SEQ ID NO: 3312383 - RNA, 17 nt, Human
cacgacugcccggcagg

SEQ ID NO: 3312384 - RNA, 16 nt, Human
cacgacugcccggcag

SEQ ID NO: 3312385 - RNA, 22 nt, Human
cacgaauauugcugauggugca

SEQ ID NO: 3312386 - RNA, 19 nt, Human
cacgaauauugcugauggu

SEQ ID NO: 3312387 - RNA, 16 nt, Human
cacgaauauugcugau

SEQ ID NO: 3312388 - RNA, 23 nt, Human
caccuuagacagucccugccaau

SEQ ID NO: 3312389 - RNA, 21 nt, Human
caccuuagacagucccugcca

SEQ ID NO: 3312390 - RNA, 19 nt, Human
caccuuagacagucccugc

SEQ ID NO: 3312391 - RNA, 18 nt, Human
caccuuagacagucccug

SEQ ID NO: 3312392 - RNA, 16 nt, Human
caccuuagacaguccc

SEQ ID NO: 3312393 - RNA, 14 nt, Human
caccuuagacaguc

SEQ ID NO: 3312394 - RNA, 15 nt, Human
caccgggcacucaga

SEQ ID NO: 3312395 - RNA, 22 nt, Human
caccgggcacucagaagacacu

SEQ ID NO: 3312396 - RNA, 15 nt, Human
caccgggccacagag

SEQ ID NO: 3312397 - RNA, 18 nt, Human
caccgggccacagagaaa

SEQ ID NO: 3312398 - RNA, 14 nt, Human
caccgggcacucag

SEQ ID NO: 3312399 - RNA, 20 nt, Human
caccggcuggccuggccccu

SEQ ID NO: 3312400 - RNA, 18 nt, Human
caccggcuggccuggccc

SEQ ID NO: 3312401 - RNA, 17 nt, Human
caccggcuggccuggcc

SEQ ID NO: 3312402 - RNA, 14 nt, Human
caccggcuggccug

SEQ ID NO: 3312403 - RNA, 16 nt, Human
caccggcuggccuggc

SEQ ID NO: 3312404 - RNA, 15 nt, Human
caccggcuggccugg

SEQ ID NO: 3312405 - RNA, 21 nt, Human
caccgcagacaggaccaggga

SEQ ID NO: 3312406 - RNA, 17 nt, Human
caccucucccuuggauu

SEQ ID NO: 3312407 - RNA, 14 nt, Human
caccucucccuugg

SEQ ID NO: 3312408 - RNA, 13 nt, Human
caccucucccuug

SEQ ID NO: 3312409 - RNA, 13 nt, Human
caccuccugccuc

SEQ ID NO: 3312410 - RNA, 11 nt, Human
caccuccugcc

SEQ ID NO: 3312411 - RNA, 14 nt, Human
caccuccugccucg

SEQ ID NO: 3312412 - RNA, 23 nt, Human
caccuggccucugcacuccccug

SEQ ID NO: 3312413 - RNA, 20 nt, Human
caccuggccucugcacuccc

SEQ ID NO: 3312414 - RNA, 19 nt, Human
caccuggccucugcacucc

SEQ ID NO: 3312415 - RNA, 18 nt, Human
caccuggccucugcacuc

SEQ ID NO: 3312416 - RNA, 17 nt, Human
caccuggccucugcacu

SEQ ID NO: 3312417 - RNA, 15 nt, Human
caccuggccucugca

SEQ ID NO: 3312418 - RNA, 14 nt, Human
caccuggccucugc

SEQ ID NO: 3312419 - RNA, 13 nt, Human
caccuggccucug

SEQ ID NO: 3312420 - RNA, 12 nt, Human
caccuggccucu

SEQ ID NO: 3312421 - RNA, 19 nt, Human
caccucugcacaagcugca

SEQ ID NO: 3312422 - RNA, 18 nt, Human
caccucugcacaagcugc

SEQ ID NO: 3312423 - RNA, 19 nt, Human
caccucucucacuccuuga

SEQ ID NO: 3312424 - RNA, 18 nt, Human
caccucucucacuccuug

SEQ ID NO: 3312425 - RNA, 17 nt, Human
caccucucucacuccuu

SEQ ID NO: 3312426 - RNA, 15 nt, Human
caccucucucacucc

SEQ ID NO: 3312427 - RNA, 14 nt, Human
caccugaagacuca

SEQ ID NO: 3312428 - RNA, 15 nt, Human
caccugaagacucau

SEQ ID NO: 3312429 - RNA, 23 nt, Human
caccugaagacucauucuucugu

SEQ ID NO: 3312430 - RNA, 20 nt, Human
caccugcggugcuaucuccc

SEQ ID NO: 3312431 - RNA, 23 nt, Human
caccugcggugcuaucuccccca

SEQ ID NO: 3312432 - RNA, 20 nt, Human
caccuggaauauauaaccag

SEQ ID NO: 3312433 - RNA, 13 nt, Human
caccgcagacagg

SEQ ID NO: 3312434 - RNA, 12 nt, Human
caccgcagacag

SEQ ID NO: 3312435 - RNA, 18 nt, Human
caccgcagacaggaccag

SEQ ID NO: 3312436 - RNA, 17 nt, Human
caccgcagacaggacca

SEQ ID NO: 3312437 - RNA, 15 nt, Human
caccgcagacaggac

SEQ ID NO: 3312438 - RNA, 14 nt, Human
caccgcagacagga

SEQ ID NO: 3312439 - RNA, 22 nt, Human
caccgaaaacguggcugcuuca

SEQ ID NO: 3312440 - RNA, 21 nt, Human
caccgaaaacguggcugcuuc

SEQ ID NO: 3312441 - RNA, 19 nt, Human
caccgaaaacguggcugcu

SEQ ID NO: 3312442 - RNA, 18 nt, Human
caccgaaaacguggcugc

SEQ ID NO: 3312443 - RNA, 15 nt, Human
caccgaaaacguggc

SEQ ID NO: 3312444 - RNA, 23 nt, Human
cacccugugauggggcccugccu

SEQ ID NO: 3312445 - RNA, 22 nt, Human
cacccugugauggggcccugcc

SEQ ID NO: 3312446 - RNA, 21 nt, Human
cacccugugauggggcccugc

SEQ ID NO: 3312447 - RNA, 20 nt, Human
cacccugugauggggcccug

SEQ ID NO: 3312448 - RNA, 18 nt, Human
cacccugugauggggccc

SEQ ID NO: 3312449 - RNA, 15 nt, Human
cacccugugaugggg

SEQ ID NO: 3312450 - RNA, 12 nt, Human
cacccugugaug

SEQ ID NO: 3312451 - RNA, 11 nt, Human
cacccugugau

SEQ ID NO: 3312452 - RNA, 20 nt, Human
caccccucaacaccucugca

SEQ ID NO: 3312453 - RNA, 13 nt, Human
cacauauugauuu

SEQ ID NO: 3312454 - RNA, 12 nt, Human
cacccggccccu

SEQ ID NO: 3312455 - RNA, 19 nt, Human
cacccgcuaagagggaggg

SEQ ID NO: 3312456 - RNA, 13 nt, Human
cacccggccccug

SEQ ID NO: 3312457 - RNA, 14 nt, Human
cacccggccccugc

SEQ ID NO: 3312458 - RNA, 16 nt, Human
cacccggccccugcug

SEQ ID NO: 3312459 - RNA, 17 nt, Human
cacccggccccugcugg

SEQ ID NO: 3312460 - RNA, 18 nt, Human
cacccggccccugcuggu

SEQ ID NO: 3312461 - RNA, 21 nt, Human
cacccggccccugcugguuca

SEQ ID NO: 3312462 - RNA, 16 nt, Human
cacgccagauucuuuc

SEQ ID NO: 3312463 - RNA, 22 nt, Human
ggcagagcagagaccaucccug

SEQ ID NO: 3312464 - RNA, 18 nt, Human
ggcacccggccccugcug

SEQ ID NO: 3312465 - RNA, 19 nt, Human
ggcacccggccccugcugg

SEQ ID NO: 3312466 - RNA, 17 nt, Human
ggcacccggccccugcu

SEQ ID NO: 3312467 - RNA, 18 nt, Human
ggcacucagaagacacug

SEQ ID NO: 3312468 - RNA, 19 nt, Human
ggcacucagaagacacuga

SEQ ID NO: 3312469 - RNA, 18 nt, Human
ggcaagcaccuccugccu

SEQ ID NO: 3312470 - RNA, 19 nt, Human
ggcaagcaccuccugccuc

SEQ ID NO: 3312471 - RNA, 16 nt, Human
ggcaccagcagccugg

SEQ ID NO: 3312472 - RNA, 17 nt, Human
ggcaccagcagccugga

SEQ ID NO: 3312473 - RNA, 21 nt, Human
ggauucuuccucccucccucu

SEQ ID NO: 3312474 - RNA, 16 nt, Human
ggauucuuccucccuc

SEQ ID NO: 3312475 - RNA, 17 nt, Human
ggcaagcaccuccugcc

SEQ ID NO: 3312476 - RNA, 18 nt, Human
ggaugccugguggcagcu

SEQ ID NO: 3312477 - RNA, 19 nt, Human
ggaugccugguggcagcug

SEQ ID NO: 3312478 - RNA, 20 nt, Human
ggaugccugguggcagcugc

SEQ ID NO: 3312479 - RNA, 16 nt, Human
ggaugaucuaggaaga

SEQ ID NO: 3312480 - RNA, 22 nt, Human
ggaugaucuaggaagacuuugg

SEQ ID NO: 3312481 - RNA, 18 nt, Human
ggaugaucuaggaagacu

SEQ ID NO: 3312482 - RNA, 23 nt, Human
ggagucccaccuuggcugcaggg

SEQ ID NO: 3312483 - RNA, 19 nt, Human
ggaugcccaaagaugcagc

SEQ ID NO: 3312484 - RNA, 13 nt, Human
ggaugccuggugg

SEQ ID NO: 3312485 - RNA, 17 nt, Human
ggaugccugguggcagc

SEQ ID NO: 3312486 - RNA, 18 nt, Human
ggaugcccaaagaugcag

SEQ ID NO: 3312487 - RNA, 20 nt, Human
ggcauguucucugaggacac

SEQ ID NO: 3312488 - RNA, 22 nt, Human
ggccacagaaaauucuucucca

SEQ ID NO: 3312489 - RNA, 20 nt, Human
ggccacugugaagagaacca

SEQ ID NO: 3312490 - RNA, 17 nt, Human
ggccaggcccucugccc

SEQ ID NO: 3312491 - RNA, 16 nt, Human
ggccaggcccucugcc

SEQ ID NO: 3312492 - RNA, 15 nt, Human
ggccaggcccucugc

SEQ ID NO: 3312493 - RNA, 14 nt, Human
ggccaggcccucug

SEQ ID NO: 3312494 - RNA, 13 nt, Human
ggccaggagccuc

SEQ ID NO: 3312495 - RNA, 11 nt, Human
ggccaggagcc

SEQ ID NO: 3312496 - RNA, 12 nt, Human
ggcccagagagg

SEQ ID NO: 3312497 - RNA, 19 nt, Human
ggcagaguugaagacagag

SEQ ID NO: 3312498 - RNA, 17 nt, Human
ggcagaguugaagacag

SEQ ID NO: 3312499 - RNA, 21 nt, Human
ggcagcugcgguccacccagg

SEQ ID NO: 3312500 - RNA, 23 nt, Human
ggcagcugcgguccacccaggag

SEQ ID NO: 3312501 - RNA, 24 nt, Human
ggcagcugcgguccacccaggagc

SEQ ID NO: 3312502 - RNA, 12 nt, Human
ggcaggguccua

SEQ ID NO: 3312503 - RNA, 17 nt, Human
ggcagggucucacucug

SEQ ID NO: 3312504 - RNA, 17 nt, Human
ggcagguuggugggggc

SEQ ID NO: 3312505 - RNA, 23 nt, Human
ggcaugugaugagaggaaaucac

SEQ ID NO: 3312506 - RNA, 18 nt, Human
ggcaugugaugagaggaa

SEQ ID NO: 3312507 - RNA, 22 nt, Human
ggcaugacacgaauauugcuga

SEQ ID NO: 3312508 - RNA, 18 nt, Human
ggaccuugaacuggguac

SEQ ID NO: 3312509 - RNA, 19 nt, Human
ggaccagagcugccaccug

SEQ ID NO: 3312510 - RNA, 14 nt, Human
ggaccagagcugcc

SEQ ID NO: 3312511 - RNA, 22 nt, Human
ggacagccacggccaggccaga

SEQ ID NO: 3312512 - RNA, 11 nt, Human
ggacagcuccu

SEQ ID NO: 3312513 - RNA, 15 nt, Human
ggacagcuccuucug

SEQ ID NO: 3312514 - RNA, 16 nt, Human
ggacagcuccuucugu

SEQ ID NO: 3312515 - RNA, 16 nt, Human
ggacagaggggguggc

SEQ ID NO: 3312516 - RNA, 22 nt, Human
ggacacucaaaagcugggcagg

SEQ ID NO: 3312517 - RNA, 21 nt, Human
ggagucccaccuuggcugcag

SEQ ID NO: 3312518 - RNA, 22 nt, Human
ggagucccaccuuggcugcagg

SEQ ID NO: 3312519 - RNA, 15 nt, Human
ggaggauguucuggg

SEQ ID NO: 3312520 - RNA, 18 nt, Human
ggaggauguucugggaca

SEQ ID NO: 3312521 - RNA, 21 nt, Human
ggaggauguucugggacacag

SEQ ID NO: 3312522 - RNA, 17 nt, Human
ggagggagggcuccaga

SEQ ID NO: 3312523 - RNA, 16 nt, Human
ggagggagggcuccag

SEQ ID NO: 3312524 - RNA, 13 nt, Human
ggagggagggcuc

SEQ ID NO: 3312525 - RNA, 12 nt, Human
ggagggagggcu

SEQ ID NO: 3312526 - RNA, 15 nt, Human
ggagccuccugcccu

SEQ ID NO: 3312527 - RNA, 14 nt, Human
ggagccuccugccc

SEQ ID NO: 3312528 - RNA, 16 nt, Human
gggacucaaugcacug

SEQ ID NO: 3312529 - RNA, 23 nt, Human
gggacucaaugcacugacauugu

SEQ ID NO: 3312530 - RNA, 17 nt, Human
gggacucaaugcacuga

SEQ ID NO: 3312531 - RNA, 19 nt, Human
gggacucaaugcacugaca

SEQ ID NO: 3312532 - RNA, 14 nt, Human
gggacacccuguga

SEQ ID NO: 3312533 - RNA, 19 nt, Human
gggaauguuugccucugcc

SEQ ID NO: 3312534 - RNA, 21 nt, Human
gggaauguuugccucugccuc

SEQ ID NO: 3312535 - RNA, 23 nt, Human
gggaggaucucuugagccuggga

SEQ ID NO: 3312536 - RNA, 22 nt, Human
gggaggauguucugggacacag

SEQ ID NO: 3312537 - RNA, 21 nt, Human
gggaggauugcuugagcucag

SEQ ID NO: 3312538 - RNA, 20 nt, Human
gggaggugggauccuccagg

SEQ ID NO: 3312539 - RNA, 23 nt, Human
gggaggauugcuugagcucagga

SEQ ID NO: 3312540 - RNA, 21 nt, Human
gggagugaguugauagcacag

SEQ ID NO: 3312541 - RNA, 13 nt, Human
gggagcugccugu

SEQ ID NO: 3312542 - RNA, 21 nt, Human
gggagcugccuguucagcucc

SEQ ID NO: 3312543 - RNA, 22 nt, Human
gggagcugccuguucagcucca

SEQ ID NO: 3312544 - RNA, 14 nt, Human
ggcuguuggcuggg

SEQ ID NO: 3312545 - RNA, 15 nt, Human
ggcuguuggcugggg

SEQ ID NO: 3312546 - RNA, 16 nt, Human
ggcuguuggcuggggg

SEQ ID NO: 3312547 - RNA, 20 nt, Human
ggcuguuggcugggggccuc

SEQ ID NO: 3312548 - RNA, 18 nt, Human
ggcuuggggaccagagcu

SEQ ID NO: 3312549 - RNA, 17 nt, Human
ggcuuggggaccagagc

SEQ ID NO: 3312550 - RNA, 21 nt, Human
ggcuucacggaagagccuugc

SEQ ID NO: 3312551 - RNA, 20 nt, Human
ggcuucacggaagagccuug

SEQ ID NO: 3312552 - RNA, 14 nt, Human
ggcuuagucacuga

SEQ ID NO: 3312553 - RNA, 18 nt, Human
ggcugggcucccuuccca

SEQ ID NO: 3312554 - RNA, 21 nt, Human
ggcugggcucccuucccaccu

SEQ ID NO: 3312555 - RNA, 20 nt, Human
ggcugggcucccuucccacc

SEQ ID NO: 3312556 - RNA, 16 nt, Human
ggcugggggaagaagc

SEQ ID NO: 3312557 - RNA, 11 nt, Human
ggcugggcuuc

SEQ ID NO: 3312558 - RNA, 21 nt, Human
ggcugggcuucaguggcagcu

SEQ ID NO: 3312559 - RNA, 22 nt, Human
ggcugggcuucaguggcagcug

SEQ ID NO: 3312560 - RNA, 18 nt, Human
ggcugggcuucaguggca

SEQ ID NO: 3312561 - RNA, 19 nt, Human
ggcugcuucaaggauccug

SEQ ID NO: 3312562 - RNA, 15 nt, Human
ggcugcuucaaggau

SEQ ID NO: 3312563 - RNA, 20 nt, Human
ggcugcuucaaggauccuga

SEQ ID NO: 3312564 - RNA, 14 nt, Human
ggcugcuucaagga

SEQ ID NO: 3312565 - RNA, 17 nt, Human
ggcgcugccccuggcag

SEQ ID NO: 3312566 - RNA, 11 nt, Human
ggcgcugcccc

SEQ ID NO: 3312567 - RNA, 15 nt, Human
ggcgcgguggcucac

SEQ ID NO: 3312568 - RNA, 9 nt, Human
ggcuccaga

SEQ ID NO: 3312569 - RNA, 13 nt, Human
ggcuaugcauuug

SEQ ID NO: 3312570 - RNA, 12 nt, Human
ggcuaugcauuu

SEQ ID NO: 3312571 - RNA, 12 nt, Human
ggcuccaggcuc

SEQ ID NO: 3312572 - RNA, 13 nt, Human
ggcuccaggcucc

SEQ ID NO: 3312573 - RNA, 13 nt, Human
ggcuccaggagca

SEQ ID NO: 3312574 - RNA, 17 nt, Human
ggcuccaggagcagcca

SEQ ID NO: 3312575 - RNA, 16 nt, Human
ggcuccaggagcagcc

SEQ ID NO: 3312576 - RNA, 14 nt, Human
ggcuccaggagcag

SEQ ID NO: 3312577 - RNA, 10 nt, Human
ggcuccagac

SEQ ID NO: 3312578 - RNA, 14 nt, Human
ggcuccaggcuccu

SEQ ID NO: 3312579 - RNA, 16 nt, Human
ggcucucaggccagcu

SEQ ID NO: 3312580 - RNA, 15 nt, Human
ggcucucaggccagc

SEQ ID NO: 3312581 - RNA, 20 nt, Human
ggcucucaggccagcugcuu

SEQ ID NO: 3312582 - RNA, 19 nt, Human
ggcucucaggccagcugcu

SEQ ID NO: 3312583 - RNA, 18 nt, Human
ggcucucaggccagcugc

SEQ ID NO: 3312584 - RNA, 17 nt, Human
ggcucucaggccagcug

SEQ ID NO: 3312585 - RNA, 14 nt, Human
ggcucucaggccag

SEQ ID NO: 3312586 - RNA, 12 nt, Human
ggcucugcccuu

SEQ ID NO: 3312587 - RNA, 15 nt, Human
ggcucugccucccau

SEQ ID NO: 3312588 - RNA, 13 nt, Human
ggcucugccuccc

SEQ ID NO: 3312589 - RNA, 15 nt, Human
ggcucugcccuuggu

SEQ ID NO: 3312590 - RNA, 14 nt, Human
ggcucugcccuugg

SEQ ID NO: 3312591 - RNA, 16 nt, Human
ggcucugccucccauc

SEQ ID NO: 3312592 - RNA, 22 nt, Human
ggccucugcacuccccugcugg

SEQ ID NO: 3312593 - RNA, 19 nt, Human
ggccucugcacuccccugc

SEQ ID NO: 3312594 - RNA, 18 nt, Human
ggccucugcacuccccug

SEQ ID NO: 3312595 - RNA, 13 nt, Human
ggccuggccccuc

SEQ ID NO: 3312596 - RNA, 14 nt, Human
ggccuggccugagc

SEQ ID NO: 3312597 - RNA, 13 nt, Human
ggccuggccugag

SEQ ID NO: 3312598 - RNA, 10 nt, Human
ggccuggccu

SEQ ID NO: 3312599 - RNA, 23 nt, Human
ggccuggccccucagggucccug

SEQ ID NO: 3312600 - RNA, 18 nt, Human
ggccuggccccucagggu

SEQ ID NO: 3312601 - RNA, 17 nt, Human
ggccuggccccucaggg

SEQ ID NO: 3312602 - RNA, 15 nt, Human
ggccuggccccucag

SEQ ID NO: 3312603 - RNA, 14 nt, Human
ggccuggccccuca

SEQ ID NO: 3312604 - RNA, 22 nt, Human
ggccugggggcugggcagagga

SEQ ID NO: 3312605 - RNA, 23 nt, Human
ggccugggggcugggcagaggaa

SEQ ID NO: 3312606 - RNA, 16 nt, Human
ggccuggccugagcug

SEQ ID NO: 3312607 - RNA, 15 nt, Human
ggccuggccugagcu

SEQ ID NO: 3312608 - RNA, 24 nt, Human
ggcgcagcauauucaggaagcuca

SEQ ID NO: 3312609 - RNA, 23 nt, Human
ggcgcagcauauucaggaagcuc

SEQ ID NO: 3312610 - RNA, 16 nt, Human
ggccucugcacucccc

SEQ ID NO: 3312611 - RNA, 20 nt, Human
ggccucgguguggagaagcg

SEQ ID NO: 3312612 - RNA, 14 nt, Human
ggccuccugugugu

SEQ ID NO: 3312613 - RNA, 20 nt, Human
ggccuagcauacguacacau

SEQ ID NO: 3312614 - RNA, 22 nt, Human
ggccuagcauacguacacauuu

SEQ ID NO: 3312615 - RNA, 14 nt, Human
ggccucaagugauu

SEQ ID NO: 3312616 - RNA, 22 nt, Human
ggccucaagugauucuccugcc

SEQ ID NO: 3312617 - RNA, 20 nt, Human
ggcccagagggccugcaagg

SEQ ID NO: 3312618 - RNA, 19 nt, Human
ggcccagagggccugcaag

SEQ ID NO: 3312619 - RNA, 17 nt, Human
ggcccagagggccugca

SEQ ID NO: 3312620 - RNA, 14 nt, Human
ggcccagagggccu

SEQ ID NO: 3312621 - RNA, 17 nt, Human
gccugaagucacacagu

SEQ ID NO: 3312622 - RNA, 19 nt, Human
gcccaguuggguggaugcc

SEQ ID NO: 3312623 - RNA, 21 nt, Human
gcccaguuggguggaugccug

SEQ ID NO: 3312624 - RNA, 15 nt, Human
gccugaagucacaca

SEQ ID NO: 3312625 - RNA, 16 nt, Human
gccugaagucacacag

SEQ ID NO: 3312626 - RNA, 12 nt, Human
gccugagcuggg

SEQ ID NO: 3312627 - RNA, 18 nt, Human
gccuggauggggcugcac

SEQ ID NO: 3312628 - RNA, 16 nt, Human
gccuggauggggcugc

SEQ ID NO: 3312629 - RNA, 20 nt, Human
gccuggauggggcugcaccg

SEQ ID NO: 3312630 - RNA, 18 nt, Human
gccugggcagaaggaaga

SEQ ID NO: 3312631 - RNA, 14 nt, Human
gccuggccccucag

SEQ ID NO: 3312632 - RNA, 13 nt, Human
gccuggccccuca

SEQ ID NO: 3312633 - RNA, 20 nt, Human
gccuggccagaugcaccagc

SEQ ID NO: 3312634 - RNA, 16 nt, Human
gccuggccagaugcac

SEQ ID NO: 3312635 - RNA, 21 nt, Human
gccuggccagaugcaccagcc

SEQ ID NO: 3312636 - RNA, 20 nt, Human
gccuguaauccuagcacuuu

SEQ ID NO: 3312637 - RNA, 15 nt, Human
gccuguaauccuagc

SEQ ID NO: 3312638 - RNA, 15 nt, Human
gccuuacacaauggu

SEQ ID NO: 3312639 - RNA, 21 nt, Human
gcgacaaugcaaaccaucauu

SEQ ID NO: 3312640 - RNA, 20 nt, Human
gcgacaaugcaaaccaucau

SEQ ID NO: 3312641 - RNA, 13 nt, Human
gcgacaaugcaaa

SEQ ID NO: 3312642 - RNA, 12 nt, Human
gcgacaaugcaa

SEQ ID NO: 3312643 - RNA, 15 nt, Human
gcggggacagcuccu

SEQ ID NO: 3312644 - RNA, 17 nt, Human
gcggggacagcuccuuc

SEQ ID NO: 3312645 - RNA, 19 nt, Human
gcggugagaggggaacaga

SEQ ID NO: 3312646 - RNA, 13 nt, Human
gcgguccacccag

SEQ ID NO: 3312647 - RNA, 14 nt, Human
gcgguccacccagg

SEQ ID NO: 3312648 - RNA, 21 nt, Human
gcgcugccccuggcagccccu

SEQ ID NO: 3312649 - RNA, 18 nt, Human
gcgcugccccuggcagcc

SEQ ID NO: 3312650 - RNA, 17 nt, Human
gcgcugccccuggcagc

SEQ ID NO: 3312651 - RNA, 16 nt, Human
gcggagaaaggaaggg

SEQ ID NO: 3312652 - RNA, 19 nt, Human
gcggagacggagucccacc

SEQ ID NO: 3312653 - RNA, 14 nt, Human
gcggggacagcucc

SEQ ID NO: 3312654 - RNA, 21 nt, Human
gcgccuuaaggauguucuagc

SEQ ID NO: 3312655 - RNA, 23 nt, Human
gcgcccaguuggguggaugccug

SEQ ID NO: 3312656 - RNA, 12 nt, Human
gcuccugugucu

SEQ ID NO: 3312657 - RNA, 13 nt, Human
gcuccugugucuu

SEQ ID NO: 3312658 - RNA, 13 nt, Human
gcuccuucugucc

SEQ ID NO: 3312659 - RNA, 17 nt, Human
gcuccuuuagcgcccag

SEQ ID NO: 3312660 - RNA, 17 nt, Human
gcucgagcaugccugga

SEQ ID NO: 3312661 - RNA, 21 nt, Human
gcucgagcaugccuggauggg

SEQ ID NO: 3312662 - RNA, 19 nt, Human
gcucgagcaugccuggaug

SEQ ID NO: 3312663 - RNA, 24 nt, Human
gcuccgcuuucuacccagcgagcc

SEQ ID NO: 3312664 - RNA, 19 nt, Human
gcucccuucccaccucucu

SEQ ID NO: 3312665 - RNA, 20 nt, Human
gcucccuucccaccucucuc

SEQ ID NO: 3312666 - RNA, 18 nt, Human
gcuccgcuuucuacccag

SEQ ID NO: 3312667 - RNA, 21 nt, Human
gcuccgcuuucuacccagcga

SEQ ID NO: 3312668 - RNA, 22 nt, Human
gcuccgcuuucuacccagcgag

SEQ ID NO: 3312669 - RNA, 23 nt, Human
gcuccgcuuucuacccagcgagc

SEQ ID NO: 3312670 - RNA, 20 nt, Human
gcuccagcuguucagcuggu

SEQ ID NO: 3312671 - RNA, 21 nt, Human
gcuccagcuguucagcugguu

SEQ ID NO: 3312672 - RNA, 11 nt, Human
gcuccaggagc

SEQ ID NO: 3312673 - RNA, 14 nt, Human
gcuccaggagcagc

SEQ ID NO: 3312674 - RNA, 12 nt, Human
gcuccaggagca

SEQ ID NO: 3312675 - RNA, 18 nt, Human
gcuccaggagcagccaca

SEQ ID NO: 3312676 - RNA, 17 nt, Human
gcuccaggagcagccac

SEQ ID NO: 3312677 - RNA, 16 nt, Human
gcuccaggagcagcca

SEQ ID NO: 3312678 - RNA, 15 nt, Human
gcuccaggagcagcc

SEQ ID NO: 3312679 - RNA, 12 nt, Human
gcuccaggcucc

SEQ ID NO: 3312680 - RNA, 24 nt, Human
gcuccaggcuccuuuagcgcccag

SEQ ID NO: 3312681 - RNA, 21 nt, Human
gcuaguugggcuuccucauag

SEQ ID NO: 3312682 - RNA, 22 nt, Human
gcggugcuaucucccccagccc

SEQ ID NO: 3312683 - RNA, 19 nt, Human
gcggugcuaucucccccag

SEQ ID NO: 3312684 - RNA, 19 nt, Human
gcucaaguccucuuuucug

SEQ ID NO: 3312685 - RNA, 22 nt, Human
gcucaaguccucuuuucugaga

SEQ ID NO: 3312686 - RNA, 14 nt, Human
gcuaucucccccag

SEQ ID NO: 3312687 - RNA, 18 nt, Human
gcucaaguccucuuuucu

SEQ ID NO: 3312688 - RNA, 13 nt, Human
gcuaucuccccca

SEQ ID NO: 3312689 - RNA, 18 nt, Human
gcucaccucucccuugga

SEQ ID NO: 3312690 - RNA, 17 nt, Human
gcucaccucucccuugg

SEQ ID NO: 3312691 - RNA, 16 nt, Human
gcucaccucucccuug

SEQ ID NO: 3312692 - RNA, 14 nt, Human
gcucaccucucccu

SEQ ID NO: 3312693 - RNA, 16 nt, Human
gcucacauaucuguca

SEQ ID NO: 3312694 - RNA, 12 nt, Human
gcucaccagccc

SEQ ID NO: 3312695 - RNA, 13 nt, Human
gcucaccagcccc

SEQ ID NO: 3312696 - RNA, 14 nt, Human
gcucaccagcccca

SEQ ID NO: 3312697 - RNA, 15 nt, Human
gcucaccagccccag

SEQ ID NO: 3312698 - RNA, 16 nt, Human
gcucagcggggacagc

SEQ ID NO: 3312699 - RNA, 17 nt, Human
gcucagcggggacagcu

SEQ ID NO: 3312700 - RNA, 18 nt, Human
gcucagcggggacagcuc

SEQ ID NO: 3312701 - RNA, 23 nt, Human
gcucagcggggacagcuccuucu

SEQ ID NO: 3312702 - RNA, 22 nt, Human
gcucagcggggacagcuccuuc

SEQ ID NO: 3312703 - RNA, 22 nt, Human
gcugcaaaggguaucaggugcu

SEQ ID NO: 3312704 - RNA, 14 nt, Human
gcugcaguugccag

SEQ ID NO: 3312705 - RNA, 13 nt, Human
gcugcaguugcca

SEQ ID NO: 3312706 - RNA, 18 nt, Human
gcugcauuuaaaagauac

SEQ ID NO: 3312707 - RNA, 17 nt, Human
gcugcauuuaaaagaua

SEQ ID NO: 3312708 - RNA, 19 nt, Human
gcugcauuuaaaagauaca

SEQ ID NO: 3312709 - RNA, 20 nt, Human
gcugccaaugggagcucaug

SEQ ID NO: 3312710 - RNA, 12 nt, Human
gcugccaccugc

SEQ ID NO: 3312711 - RNA, 17 nt, Human
gcugacagacacaggcc

SEQ ID NO: 3312712 - RNA, 18 nt, Human
gcugacagacacaggccc

SEQ ID NO: 3312713 - RNA, 19 nt, Human
gcugacagacacaggcccg

SEQ ID NO: 3312714 - RNA, 22 nt, Human
gcugacuguuuucucuugagag

SEQ ID NO: 3312715 - RNA, 21 nt, Human
gcucucaggccagcugcuugg

SEQ ID NO: 3312716 - RNA, 20 nt, Human
gcucucaggccagcugcuug

SEQ ID NO: 3312717 - RNA, 22 nt, Human
gcugcuuuugucuaugggacuc

SEQ ID NO: 3312718 - RNA, 22 nt, Human
gcugcuugggcuucauccuccu

SEQ ID NO: 3312719 - RNA, 15 nt, Human
gcuggaccuugaacu

SEQ ID NO: 3312720 - RNA, 20 nt, Human
gcugccuguucagcuccagc

SEQ ID NO: 3312721 - RNA, 22 nt, Human
gcugccuguucagcuccagcuc

SEQ ID NO: 3312722 - RNA, 18 nt, Human
gcugccuguucagcucca

SEQ ID NO: 3312723 - RNA, 19 nt, Human
gcugccuguucagcuccag

SEQ ID NO: 3312724 - RNA, 14 nt, Human
gcugcgguccaccc

SEQ ID NO: 3312725 - RNA, 15 nt, Human
gcugcgguccaccca

SEQ ID NO: 3312726 - RNA, 19 nt, Human
gcugcgguccacccaggag

SEQ ID NO: 3312727 - RNA, 21 nt, Human
gcugcgguccacccaggagcc

SEQ ID NO: 3312728 - RNA, 22 nt, Human
gcugcgguccacccaggagccc

SEQ ID NO: 3312729 - RNA, 24 nt, Human
gcugcccugcccaccuggccucug

SEQ ID NO: 3312730 - RNA, 23 nt, Human
gcugcccugcccaccuggccucu

SEQ ID NO: 3312731 - RNA, 22 nt, Human
gcugcccugcccaccuggccuc

SEQ ID NO: 3312732 - RNA, 21 nt, Human
gcugcccugcccaccuggccu

SEQ ID NO: 3312733 - RNA, 20 nt, Human
gcugcccugcccaccuggcc

SEQ ID NO: 3312734 - RNA, 18 nt, Human
gcugcccugcccaccugg

SEQ ID NO: 3312735 - RNA, 16 nt, Human
gcugcccugcccaccu

SEQ ID NO: 3312736 - RNA, 14 nt, Human
gcugcccugcccac

SEQ ID NO: 3312737 - RNA, 13 nt, Human
gcugcccugccca

SEQ ID NO: 3312738 - RNA, 12 nt, Human
gcugcccugccc

SEQ ID NO: 3312739 - RNA, 19 nt, Human
gcugggcuucaguggcagc

SEQ ID NO: 3312740 - RNA, 21 nt, Human
gcugggcuucaguggcagcug

SEQ ID NO: 3312741 - RNA, 22 nt, Human
gcugggcuucaguggcagcugc

SEQ ID NO: 3312742 - RNA, 20 nt, Human
gcugggcuucaguggcagcu

SEQ ID NO: 3312743 - RNA, 21 nt, Human
gcugggcucccuucccaccuc

SEQ ID NO: 3312744 - RNA, 19 nt, Human
gcugggaugauuggagggg

SEQ ID NO: 3312745 - RNA, 15 nt, Human
gcuggccuggccccu

SEQ ID NO: 3312746 - RNA, 14 nt, Human
gcuggccuggcccc

SEQ ID NO: 3312747 - RNA, 12 nt, Human
gcuggccuggcc

SEQ ID NO: 3312748 - RNA, 13 nt, Human
gcuggccuggccc

SEQ ID NO: 3312749 - RNA, 14 nt, Human
gcugggggccucag

SEQ ID NO: 3312750 - RNA, 15 nt, Human
gcugggggccucagu

SEQ ID NO: 3312751 - RNA, 18 nt, Human
gcugggggccucagugcc

SEQ ID NO: 3312752 - RNA, 13 nt, Human
gcugggggccuca

SEQ ID NO: 3312753 - RNA, 20 nt, Human
gcuggucccacucaguccau

SEQ ID NO: 3312754 - RNA, 15 nt, Human
gcugugucucccuuc

SEQ ID NO: 3312755 - RNA, 17 nt, Human
gcugucagccauuccug

SEQ ID NO: 3312756 - RNA, 14 nt, Human
gcuggugucaccug

SEQ ID NO: 3312757 - RNA, 15 nt, Human
gcuggugucaccuga

SEQ ID NO: 3312758 - RNA, 16 nt, Human
gcugucccuuuuccuu

SEQ ID NO: 3312759 - RNA, 22 nt, Human
gcugucccuuacgugaguccug

SEQ ID NO: 3312760 - RNA, 23 nt, Human
gcugucccuuacgugaguccugg

SEQ ID NO: 3312761 - RNA, 17 nt, Human
gcuucucacugccaugc

SEQ ID NO: 3312762 - RNA, 22 nt, Human
gcuucucacugccaugccagcu

SEQ ID NO: 3312763 - RNA, 18 nt, Human
gcuucauuuccugugucu

SEQ ID NO: 3312764 - RNA, 20 nt, Human
gcuuauacacuuacacuuua

SEQ ID NO: 3312765 - RNA, 19 nt, Human
gcuucaguggcagcugcuu

SEQ ID NO: 3312766 - RNA, 20 nt, Human
gcuucaguggcagcugcuuu

SEQ ID NO: 3312767 - RNA, 21 nt, Human
gcuucauccuccucagaucuu

SEQ ID NO: 3312768 - RNA, 18 nt, Human
gcagauggagaccccuug

SEQ ID NO: 3312769 - RNA, 22 nt, Human
gcacuucgggaggucgaggcag

SEQ ID NO: 3312770 - RNA, 14 nt, Human
gcacuugcagacuc

SEQ ID NO: 3312771 - RNA, 17 nt, Human
gcagacucuacagaggc

SEQ ID NO: 3312772 - RNA, 18 nt, Human
gcagacucuacagaggcc

SEQ ID NO: 3312773 - RNA, 19 nt, Human
gcagacucuacagaggcca

SEQ ID NO: 3312774 - RNA, 22 nt, Human
gcagacucuacagaggccaugg

SEQ ID NO: 3312775 - RNA, 19 nt, Human
gcagagaccaucccugaag

SEQ ID NO: 3312776 - RNA, 21 nt, Human
gcagagaccaucccugaaggc

SEQ ID NO: 3312777 - RNA, 20 nt, Human
gcagagaccaucccugaagg

SEQ ID NO: 3312778 - RNA, 22 nt, Human
gcagagaccaucccugaaggcc

SEQ ID NO: 3312779 - RNA, 17 nt, Human
gcagccucacaguccuu

SEQ ID NO: 3312780 - RNA, 15 nt, Human
gcagccucacagucc

SEQ ID NO: 3312781 - RNA, 19 nt, Human
gcagccucacaguccuuac

SEQ ID NO: 3312782 - RNA, 19 nt, Human
gcagcagggagggcuucug

SEQ ID NO: 3312783 - RNA, 18 nt, Human
gcagcagggagggcuucu

SEQ ID NO: 3312784 - RNA, 16 nt, Human
gcagcucaccucuccc

SEQ ID NO: 3312785 - RNA, 14 nt, Human
gcagcucagagagg

SEQ ID NO: 3312786 - RNA, 21 nt, Human
gcagcucaccucucccuugga

SEQ ID NO: 3312787 - RNA, 20 nt, Human
gcagcucaccucucccuugg

SEQ ID NO: 3312788 - RNA, 17 nt, Human
gcagcucaccucucccu

SEQ ID NO: 3312789 - RNA, 19 nt, Human
gcagcucagagaggguggg

SEQ ID NO: 3312790 - RNA, 18 nt, Human
gcagcucagagagggugg

SEQ ID NO: 3312791 - RNA, 20 nt, Human
gauugugucucuugguccug

SEQ ID NO: 3312792 - RNA, 21 nt, Human
gcacagcuucauuuccugugu

SEQ ID NO: 3312793 - RNA, 23 nt, Human
gcacagcuucauuuccugugucu

SEQ ID NO: 3312794 - RNA, 13 nt, Human
gcaccagcagccu

SEQ ID NO: 3312795 - RNA, 15 nt, Human
gcaccaucucuccuc

SEQ ID NO: 3312796 - RNA, 14 nt, Human
gcaccaucucuccu

SEQ ID NO: 3312797 - RNA, 17 nt, Human
gcaccaucucuccuccu

SEQ ID NO: 3312798 - RNA, 19 nt, Human
gcacuguuuuauuuuaauu

SEQ ID NO: 3312799 - RNA, 12 nt, Human
gcacugggcuug

SEQ ID NO: 3312800 - RNA, 20 nt, Human
gcacuauaauguaagcucua

SEQ ID NO: 3312801 - RNA, 14 nt, Human
gcacuauaauguaa

SEQ ID NO: 3312802 - RNA, 15 nt, Human
gcacuauaauguaag

SEQ ID NO: 3312803 - RNA, 14 nt, Human
gcacugcuuccagu

SEQ ID NO: 3312804 - RNA, 13 nt, Human
gcacugcuuccag

SEQ ID NO: 3312805 - RNA, 12 nt, Human
gcacugcuucca

SEQ ID NO: 3312806 - RNA, 19 nt, Human
gcacuaaggugugcucuga

SEQ ID NO: 3312807 - RNA, 20 nt, Human
gcacuaaggugugcucugau

SEQ ID NO: 3312808 - RNA, 14 nt, Human
gcacgugugugcac

SEQ ID NO: 3312809 - RNA, 19 nt, Human
gcacccucaggcagguggg

SEQ ID NO: 3312810 - RNA, 16 nt, Human
gcacccucaggcaggu

SEQ ID NO: 3312811 - RNA, 17 nt, Human
gcaggcagccaggccac

SEQ ID NO: 3312812 - RNA, 18 nt, Human
gcaggcagccaggccaca

SEQ ID NO: 3312813 - RNA, 22 nt, Human
gcagggcucagcggggacagcu

SEQ ID NO: 3312814 - RNA, 16 nt, Human
gcagggucucacucug

SEQ ID NO: 3312815 - RNA, 19 nt, Human
gcaggguccuagaaauucc

SEQ ID NO: 3312816 - RNA, 19 nt, Human
gcauacguacacauuuuau

SEQ ID NO: 3312817 - RNA, 18 nt, Human
gcauacguacacauuuua

SEQ ID NO: 3312818 - RNA, 22 nt, Human
gcaguggugcgaucuggguuca

SEQ ID NO: 3312819 - RNA, 19 nt, Human
gcaguggugguuuucuguu

SEQ ID NO: 3312820 - RNA, 20 nt, Human
gcaguggugcgaucuggguu

SEQ ID NO: 3312821 - RNA, 21 nt, Human
gcaguggugcgaucuggguuc

SEQ ID NO: 3312822 - RNA, 21 nt, Human
gcaguggugguuuucuguucu

SEQ ID NO: 3312823 - RNA, 20 nt, Human
gcaguggugguuuucuguuc

SEQ ID NO: 3312824 - RNA, 11 nt, Human
gcagugggagc

SEQ ID NO: 3312825 - RNA, 18 nt, Human
gcaguggugcgaucuggg

SEQ ID NO: 3312826 - RNA, 19 nt, Human
gcaguggugcgaucugggu

SEQ ID NO: 3312827 - RNA, 12 nt, Human
gcaucaggccag

SEQ ID NO: 3312828 - RNA, 18 nt, Human
gcaucaggccaggcccuc

SEQ ID NO: 3312829 - RNA, 23 nt, Human
gcaucaggccaggcccucugccc

SEQ ID NO: 3312830 - RNA, 20 nt, Human
gcaugaaguaauaugcacac

SEQ ID NO: 3312831 - RNA, 22 nt, Human
gcaugaaguaauaugcacacau

SEQ ID NO: 3312832 - RNA, 21 nt, Human
gcaugaaguaauaugcacaca

SEQ ID NO: 3312833 - RNA, 22 nt, Human
gcaugacacgaauauugcugau

SEQ ID NO: 3312834 - RNA, 18 nt, Human
gcaugaaguaauaugcac

SEQ ID NO: 3312835 - RNA, 21 nt, Human
gcaugacacgaauauugcuga

SEQ ID NO: 3312836 - RNA, 20 nt, Human
gcaugacacgaauauugcug

SEQ ID NO: 3312837 - RNA, 22 nt, Human
gcauuccccaggaggccagccu

SEQ ID NO: 3312838 - RNA, 18 nt, Human
gcauuugaggucuguucu

SEQ ID NO: 3312839 - RNA, 21 nt, Human
gcauuccccaggaggccagcc

SEQ ID NO: 3312840 - RNA, 20 nt, Human
gcauuccccaggaggccagc

SEQ ID NO: 3312841 - RNA, 19 nt, Human
gcauuccccaggaggccag

SEQ ID NO: 3312842 - RNA, 18 nt, Human
gcauuccccaggaggcca

SEQ ID NO: 3312843 - RNA, 17 nt, Human
gcauuccccaggaggcc

SEQ ID NO: 3312844 - RNA, 16 nt, Human
gcauuccccaggaggc

SEQ ID NO: 3312845 - RNA, 15 nt, Human
gcauuccccaggagg

SEQ ID NO: 3312846 - RNA, 14 nt, Human
gcauuccccaggag

SEQ ID NO: 3312847 - RNA, 12 nt, Human
gcauuccccagg

SEQ ID NO: 3312848 - RNA, 19 nt, Human
gcauuaucuagauacugua

SEQ ID NO: 3312849 - RNA, 24 nt, Human
gcauuaucuagauacuguaucaug

SEQ ID NO: 3312850 - RNA, 22 nt, Human
gcauuaucuagauacuguauca

SEQ ID NO: 3312851 - RNA, 14 nt, Human
gcaugccuggaugg

SEQ ID NO: 3312852 - RNA, 13 nt, Human
gcauguuacauaa

SEQ ID NO: 3312853 - RNA, 16 nt, Human
gccauuuguguuuaua

SEQ ID NO: 3312854 - RNA, 24 nt, Human
gccaugcuccuggcccacugcauc

SEQ ID NO: 3312855 - RNA, 19 nt, Human
gccaugccagcuuaucuca

SEQ ID NO: 3312856 - RNA, 18 nt, Human
gccaugccagcuuaucuc

SEQ ID NO: 3312857 - RNA, 13 nt, Human
gccaugccagcuu

SEQ ID NO: 3312858 - RNA, 18 nt, Human
gccaugaggaacaaggca

SEQ ID NO: 3312859 - RNA, 17 nt, Human
gccagguuuuuggucug

SEQ ID NO: 3312860 - RNA, 20 nt, Human
gccagucaccccggccaccu

SEQ ID NO: 3312861 - RNA, 18 nt, Human
gccagucaccccggccac

SEQ ID NO: 3312862 - RNA, 17 nt, Human
gccagucaccccggcca

SEQ ID NO: 3312863 - RNA, 13 nt, Human
gccagggacagag

SEQ ID NO: 3312864 - RNA, 18 nt, Human
gccagggacagagggggu

SEQ ID NO: 3312865 - RNA, 16 nt, Human
gccagggacagagggg

SEQ ID NO: 3312866 - RNA, 15 nt, Human
gccaggcuggucuca

SEQ ID NO: 3312867 - RNA, 23 nt, Human
gccagggacagaggggguggccu

SEQ ID NO: 3312868 - RNA, 21 nt, Human
gccagauuucacucuccuugg

SEQ ID NO: 3312869 - RNA, 18 nt, Human
gccagauuucacucuccu

SEQ ID NO: 3312870 - RNA, 16 nt, Human
gccagauuucacucuc

SEQ ID NO: 3312871 - RNA, 15 nt, Human
gccagaugcaccagc

SEQ ID NO: 3312872 - RNA, 24 nt, Human
gcccagccccuucugacccaugcu

SEQ ID NO: 3312873 - RNA, 20 nt, Human
gcccagccccuucugaccca

SEQ ID NO: 3312874 - RNA, 17 nt, Human
gcccagccccuucugac

SEQ ID NO: 3312875 - RNA, 16 nt, Human
gcccagccccuucuga

SEQ ID NO: 3312876 - RNA, 14 nt, Human
gcccagccccuucu

SEQ ID NO: 3312877 - RNA, 13 nt, Human
gcccagccccuuc

SEQ ID NO: 3312878 - RNA, 15 nt, Human
gcccaguugggugga

SEQ ID NO: 3312879 - RNA, 19 nt, Human
gcccagucuggaaugcagu

SEQ ID NO: 3312880 - RNA, 23 nt, Human
gcccaggcuuagucacugagaca

SEQ ID NO: 3312881 - RNA, 21 nt, Human
gcccaggcuuagucacugaga

SEQ ID NO: 3312882 - RNA, 19 nt, Human
gcccaggcuuagucacuga

SEQ ID NO: 3312883 - RNA, 22 nt, Human
gcccaggcuggcgugcaguggu

SEQ ID NO: 3312884 - RNA, 19 nt, Human
gcccaggcuggcgugcagu

SEQ ID NO: 3312885 - RNA, 20 nt, Human
gcccaggcuggcgugcagug

SEQ ID NO: 3312886 - RNA, 20 nt, Human
gcccaggaaaggcuccagga

SEQ ID NO: 3312887 - RNA, 19 nt, Human
gcccaggaaaggcuccagg

SEQ ID NO: 3312888 - RNA, 18 nt, Human
gcccaggaaaggcuccag

SEQ ID NO: 3312889 - RNA, 21 nt, Human
gcccaaugcacuuuguucugg

SEQ ID NO: 3312890 - RNA, 12 nt, Human
gcccagagggcc

SEQ ID NO: 3312891 - RNA, 19 nt, Human
gcccagagggccugcaagg

SEQ ID NO: 3312892 - RNA, 18 nt, Human
gcccagagggccugcaag

SEQ ID NO: 3312893 - RNA, 15 nt, Human
gcccagagggccugc

SEQ ID NO: 3312894 - RNA, 14 nt, Human
gcccagagggccug

SEQ ID NO: 3312895 - RNA, 9 nt, Human
gcccagccc

SEQ ID NO: 3312896 - RNA, 12 nt, Human
gcccagccccuu

SEQ ID NO: 3312897 - RNA, 11 nt, Human
gcccagccccu

SEQ ID NO: 3312898 - RNA, 22 nt, Human
gcccagagggccugcaagggag

SEQ ID NO: 3312899 - RNA, 21 nt, Human
gcccagagggccugcaaggga

SEQ ID NO: 3312900 - RNA, 20 nt, Human
gcccagagggccugcaaggg

SEQ ID NO: 3312901 - RNA, 22 nt, Human
gccaccugcggugcuaucuccc

SEQ ID NO: 3312902 - RNA, 20 nt, Human
gccaccugcggugcuaucuc

SEQ ID NO: 3312903 - RNA, 14 nt, Human
gccaccugcggugc

SEQ ID NO: 3312904 - RNA, 18 nt, Human
gccacggccaggccagag

SEQ ID NO: 3312905 - RNA, 17 nt, Human
gccacggccaggccaga

SEQ ID NO: 3312906 - RNA, 19 nt, Human
gccacggccaggccagagg

SEQ ID NO: 3312907 - RNA, 17 nt, Human
gccaccugccuguuggg

SEQ ID NO: 3312908 - RNA, 10 nt, Human
gccagaggag

SEQ ID NO: 3312909 - RNA, 16 nt, Human
gccagagacacaagcc

SEQ ID NO: 3312910 - RNA, 19 nt, Human
gccagagacacaagccuuc

SEQ ID NO: 3312911 - RNA, 17 nt, Human
gccagagacacaagccu

SEQ ID NO: 3312912 - RNA, 21 nt, Human
gccagagggagugacagaggc

SEQ ID NO: 3312913 - RNA, 22 nt, Human
gccagagggagugacagaggca

SEQ ID NO: 3312914 - RNA, 19 nt, Human
gccagaggagagaggaccc

SEQ ID NO: 3312915 - RNA, 17 nt, Human
gccagaggagagaggac

SEQ ID NO: 3312916 - RNA, 15 nt, Human
gccagaggagagagg

SEQ ID NO: 3312917 - RNA, 13 nt, Human
gccagaggagaga

SEQ ID NO: 3312918 - RNA, 12 nt, Human
gccagaggagag

SEQ ID NO: 3312919 - RNA, 23 nt, Human
gccagagggagugacagaggcag

SEQ ID NO: 3312920 - RNA, 16 nt, Human
gccagaugcaccagcc

SEQ ID NO: 3312921 - RNA, 17 nt, Human
gccagaugcaccagccc

SEQ ID NO: 3312922 - RNA, 18 nt, Human
gccagaugcaccagcccu

SEQ ID NO: 3312923 - RNA, 15 nt, Human
gccaaggugggagga

SEQ ID NO: 3312924 - RNA, 14 nt, Human
gccaaggugggagg

SEQ ID NO: 3312925 - RNA, 23 nt, Human
gccaaggugggaggauugcuuga

SEQ ID NO: 3312926 - RNA, 21 nt, Human
gccaaggcugggggaagaagc

SEQ ID NO: 3312927 - RNA, 23 nt, Human
gcauuuggugguuucagaaaugu

SEQ ID NO: 3312928 - RNA, 22 nt, Human
gcauuuggugguuucagaaaug

SEQ ID NO: 3312929 - RNA, 20 nt, Human
gcauuugaggucuguucuuu

SEQ ID NO: 3312930 - RNA, 19 nt, Human
gcauuugaggucuguucuu

SEQ ID NO: 3312931 - RNA, 23 nt, Human
gccacagagaaaguacuucucca

SEQ ID NO: 3312932 - RNA, 13 nt, Human
gccacagagaaag

SEQ ID NO: 3312933 - RNA, 14 nt, Human
gccacagagaaagu

SEQ ID NO: 3312934 - RNA, 20 nt, Human
gccacagagaaaguacuucu

SEQ ID NO: 3312935 - RNA, 22 nt, Human
gccacaagacccuugugguccc

SEQ ID NO: 3312936 - RNA, 16 nt, Human
gccacaagacccuugu

SEQ ID NO: 3312937 - RNA, 13 nt, Human
gaggcagccccau

SEQ ID NO: 3312938 - RNA, 12 nt, Human
gaggccagccuu

SEQ ID NO: 3312939 - RNA, 13 nt, Human
gaggccagccuug

SEQ ID NO: 3312940 - RNA, 23 nt, Human
gaggcagccccauucugccugcc

SEQ ID NO: 3312941 - RNA, 21 nt, Human
gaggcagccccauucugccug

SEQ ID NO: 3312942 - RNA, 22 nt, Human
gaggcagccccauucugccugc

SEQ ID NO: 3312943 - RNA, 12 nt, Human
gaggauguucug

SEQ ID NO: 3312944 - RNA, 17 nt, Human
gaggauguucugggaca

SEQ ID NO: 3312945 - RNA, 20 nt, Human
gaggauguucugggacacag

SEQ ID NO: 3312946 - RNA, 23 nt, Human
gaggaguuugggguaugggagag

SEQ ID NO: 3312947 - RNA, 13 nt, Human
gaggacagggagg

SEQ ID NO: 3312948 - RNA, 22 nt, Human
gaggacagggaggugaccccag

SEQ ID NO: 3312949 - RNA, 14 nt, Human
gaggaauccagacc

SEQ ID NO: 3312950 - RNA, 21 nt, Human
gaggaaggaaacccagcucug

SEQ ID NO: 3312951 - RNA, 22 nt, Human
gaggaaggaaacccagcucugg

SEQ ID NO: 3312952 - RNA, 15 nt, Human
gaggaauccagaccc

SEQ ID NO: 3312953 - RNA, 22 nt, Human
gaggcccuucucuccagccccu

SEQ ID NO: 3312954 - RNA, 24 nt, Human
gaggcccuucucuccagccccugg

SEQ ID NO: 3312955 - RNA, 23 nt, Human
gaggcccuucucuccagccccug

SEQ ID NO: 3312956 - RNA, 15 nt, Human
gaggcugggcucccu

SEQ ID NO: 3312957 - RNA, 14 nt, Human
gaggcugggcuccc

SEQ ID NO: 3312958 - RNA, 13 nt, Human
gaggcugggcucc

SEQ ID NO: 3312959 - RNA, 12 nt, Human
gaggggccucuu

SEQ ID NO: 3312960 - RNA, 22 nt, Human
gaggggccucuuaugggcuggg

SEQ ID NO: 3312961 - RNA, 23 nt, Human
gagggcacagaaaauggaagaca

SEQ ID NO: 3312962 - RNA, 22 nt, Human
gagggcacagaaaauggaagac

SEQ ID NO: 3312963 - RNA, 14 nt, Human
gagggcacagaaaa

SEQ ID NO: 3312964 - RNA, 13 nt, Human
gagggagugacag

SEQ ID NO: 3312965 - RNA, 14 nt, Human
gagggagguaagga

SEQ ID NO: 3312966 - RNA, 14 nt, Human
gagggagugacaga

SEQ ID NO: 3312967 - RNA, 14 nt, Human
gagggagggagggc

SEQ ID NO: 3312968 - RNA, 15 nt, Human
gagggagggcuccag

SEQ ID NO: 3312969 - RNA, 15 nt, Human
gagggagggagggcu

SEQ ID NO: 3312970 - RNA, 23 nt, Human
gagcuacacaggggaaaagagga

SEQ ID NO: 3312971 - RNA, 13 nt, Human
gagcugccaccug

SEQ ID NO: 3312972 - RNA, 16 nt, Human
gagcugccaccugccu

SEQ ID NO: 3312973 - RNA, 15 nt, Human
gagcugccaccugcc

SEQ ID NO: 3312974 - RNA, 15 nt, Human
gagccuggcaagaau

SEQ ID NO: 3312975 - RNA, 10 nt, Human
gagccuggca

SEQ ID NO: 3312976 - RNA, 21 nt, Human
gagccugggaggucaaggcug

SEQ ID NO: 3312977 - RNA, 13 nt, Human
gagccugggaggu

SEQ ID NO: 3312978 - RNA, 20 nt, Human
gagccucagcauccuggcac

SEQ ID NO: 3312979 - RNA, 21 nt, Human
gagccucagcauccuggcacc

SEQ ID NO: 3312980 - RNA, 14 nt, Human
gagccuccugcccu

SEQ ID NO: 3312981 - RNA, 13 nt, Human
gagccuccugccc

SEQ ID NO: 3312982 - RNA, 15 nt, Human
gagcccugguggcag

SEQ ID NO: 3312983 - RNA, 16 nt, Human
gagcccugguggcagu

SEQ ID NO: 3312984 - RNA, 19 nt, Human
gagccucagcauccuggca

SEQ ID NO: 3312985 - RNA, 17 nt, Human
gagcccugguggcagug

SEQ ID NO: 3312986 - RNA, 22 nt, Human
gagccuccugcccuuaccugcc

SEQ ID NO: 3312987 - RNA, 20 nt, Human
gagccuccugcccuuaccug

SEQ ID NO: 3312988 - RNA, 13 nt, Human
gagaucagccugg

SEQ ID NO: 3312989 - RNA, 16 nt, Human
gagaucagccugggca

SEQ ID NO: 3312990 - RNA, 14 nt, Human
gagaucagccuggg

SEQ ID NO: 3312991 - RNA, 20 nt, Human
gagaucaaccccuucgcucc

SEQ ID NO: 3312992 - RNA, 22 nt, Human
gagcaagacgcugugcugcccu

SEQ ID NO: 3312993 - RNA, 18 nt, Human
gagcaagacgcugugcug

SEQ ID NO: 3312994 - RNA, 21 nt, Human
gagcaagacgcugugcugccc

SEQ ID NO: 3312995 - RNA, 19 nt, Human
gagcaaaaucgaugcagug

SEQ ID NO: 3312996 - RNA, 17 nt, Human
gagcaccuuagacaguc

SEQ ID NO: 3312997 - RNA, 22 nt, Human
gagccacugcaccgggccacag

SEQ ID NO: 3312998 - RNA, 11 nt, Human
gagcccacgcc

SEQ ID NO: 3312999 - RNA, 14 nt, Human
gagcccaggccucc

SEQ ID NO: 3313000 - RNA, 13 nt, Human
gagcccaggccuc

SEQ ID NO: 3313001 - RNA, 14 nt, Human
gagcccugguggca

SEQ ID NO: 3313002 - RNA, 12 nt, Human
gagcccaggccu

SEQ ID NO: 3313003 - RNA, 16 nt, Human
gagcccacgcccccac

SEQ ID NO: 3313004 - RNA, 15 nt, Human
gagcccacgccccca

SEQ ID NO: 3313005 - RNA, 12 nt, Human
gagcccacgccc

SEQ ID NO: 3313006 - RNA, 18 nt, Human
gagcagccacauuccuga

SEQ ID NO: 3313007 - RNA, 20 nt, Human
gagccacugcaccgggccac

SEQ ID NO: 3313008 - RNA, 15 nt, Human
gagucugaaggcugg

SEQ ID NO: 3313009 - RNA, 12 nt, Human
gagugggcccaa

SEQ ID NO: 3313010 - RNA, 13 nt, Human
gaguucugguucc

SEQ ID NO: 3313011 - RNA, 20 nt, Human
gaguucaucuugaauuguaa

SEQ ID NO: 3313012 - RNA, 23 nt, Human
gaguucaucuugaauuguaagga

SEQ ID NO: 3313013 - RNA, 17 nt, Human
gauacaaaagcauguga

SEQ ID NO: 3313014 - RNA, 18 nt, Human
gauagcacagacccugcc

SEQ ID NO: 3313015 - RNA, 17 nt, Human
gauagcacagacccugc

SEQ ID NO: 3313016 - RNA, 18 nt, Human
gauacaaugcugugcccu

SEQ ID NO: 3313017 - RNA, 13 nt, Human
gauacaaugcugu

SEQ ID NO: 3313018 - RNA, 19 nt, Human
gauagcacagacccugccc

SEQ ID NO: 3313019 - RNA, 12 nt, Human
gauagccaaggc

SEQ ID NO: 3313020 - RNA, 16 nt, Human
gauagcacagacccug

SEQ ID NO: 3313021 - RNA, 13 nt, Human
gauagccaaggcc

SEQ ID NO: 3313022 - RNA, 23 nt, Human
gauauaugcucugcauguuacau

SEQ ID NO: 3313023 - RNA, 21 nt, Human
gaucaaccccuucgcuccugu

SEQ ID NO: 3313024 - RNA, 22 nt, Human
gaucaaccccuucgcuccugug

SEQ ID NO: 3313025 - RNA, 14 nt, Human
gagguucccuuuga

SEQ ID NO: 3313026 - RNA, 19 nt, Human
gagguucaaagauauuuug

SEQ ID NO: 3313027 - RNA, 19 nt, Human
gagguuuuaaaaaaauccc

SEQ ID NO: 3313028 - RNA, 16 nt, Human
gaguacguugugcauu

SEQ ID NO: 3313029 - RNA, 19 nt, Human
gaguacuacaguccuccca

SEQ ID NO: 3313030 - RNA, 18 nt, Human
gaguacuacaguccuccc

SEQ ID NO: 3313031 - RNA, 15 nt, Human
gaguacuacaguccu

SEQ ID NO: 3313032 - RNA, 20 nt, Human
gaguacguugugcauuuggu

SEQ ID NO: 3313033 - RNA, 18 nt, Human
gaguacguugugcauuug

SEQ ID NO: 3313034 - RNA, 17 nt, Human
gaguacguugugcauuu

SEQ ID NO: 3313035 - RNA, 22 nt, Human
gaggggggaggugggauccucc

SEQ ID NO: 3313036 - RNA, 15 nt, Human
gaggggggagguggg

SEQ ID NO: 3313037 - RNA, 18 nt, Human
gaggugggauccuccagg

SEQ ID NO: 3313038 - RNA, 22 nt, Human
gaggugggauccuccaggugca

SEQ ID NO: 3313039 - RNA, 21 nt, Human
gaggugggauccuccaggugc

SEQ ID NO: 3313040 - RNA, 23 nt, Human
gaguccccuguuuguuucugaaa

SEQ ID NO: 3313041 - RNA, 14 nt, Human
gaguccccuguuug

SEQ ID NO: 3313042 - RNA, 12 nt, Human
gaguccccuguu

SEQ ID NO: 3313043 - RNA, 21 nt, Human
gagucccaccuuggcugcagg

SEQ ID NO: 3313044 - RNA, 12 nt, Human
gaguagcuggga

SEQ ID NO: 3313045 - RNA, 14 nt, Human
gaguagcugggacu

SEQ ID NO: 3313046 - RNA, 17 nt, Human
gagucgaggacagggag

SEQ ID NO: 3313047 - RNA, 16 nt, Human
gagucgaggacaggga

SEQ ID NO: 3313048 - RNA, 19 nt, Human
gagucucacuguugcccag

SEQ ID NO: 3313049 - RNA, 20 nt, Human
gagucucacuguugcccagg

SEQ ID NO: 3313050 - RNA, 21 nt, Human
gagucucacuguugcccaggc

SEQ ID NO: 3313051 - RNA, 21 nt, Human
gagucugaaggcuggguucug

SEQ ID NO: 3313052 - RNA, 22 nt, Human
gagucucacuguugcccaggcu

SEQ ID NO: 3313053 - RNA, 23 nt, Human
gagucucacuguugcccaggcug

SEQ ID NO: 3313054 - RNA, 22 nt, Human
gaugggcaacccccagccugcu

SEQ ID NO: 3313055 - RNA, 22 nt, Human
gaugagaaagguugaagcacca

SEQ ID NO: 3313056 - RNA, 11 nt, Human
gaugagaaagg

SEQ ID NO: 3313057 - RNA, 20 nt, Human
gaugaccuugaaugaugcca

SEQ ID NO: 3313058 - RNA, 18 nt, Human
gauccucccaccucagcc

SEQ ID NO: 3313059 - RNA, 16 nt, Human
gaucuuugcagacagg

SEQ ID NO: 3313060 - RNA, 15 nt, Human
gaugaaaaaauaaca

SEQ ID NO: 3313061 - RNA, 23 nt, Human
gaucaaccccuucgcuccugugu

SEQ ID NO: 3313062 - RNA, 13 nt, Human
gaucacgccacug

SEQ ID NO: 3313063 - RNA, 14 nt, Human
gaucacgccacugc

SEQ ID NO: 3313064 - RNA, 15 nt, Human
gaucacgccacugca

SEQ ID NO: 3313065 - RNA, 18 nt, Human
gauccuaguuccaccauc

SEQ ID NO: 3313066 - RNA, 18 nt, Human
gauccuaggcauuugcug

SEQ ID NO: 3313067 - RNA, 11 nt, Human
gauccuccagg

SEQ ID NO: 3313068 - RNA, 19 nt, Human
gauccucccaccucagccu

SEQ ID NO: 3313069 - RNA, 20 nt, Human
gauccucccaccucagccuc

SEQ ID NO: 3313070 - RNA, 19 nt, Human
gauccugagccagauuuca

SEQ ID NO: 3313071 - RNA, 15 nt, Human
gauccugagccagau

SEQ ID NO: 3313072 - RNA, 14 nt, Human
gauccugagccaga

SEQ ID NO: 3313073 - RNA, 13 nt, Human
gauccugagccag

SEQ ID NO: 3313074 - RNA, 20 nt, Human
gauuguccccgacccuugcc

SEQ ID NO: 3313075 - RNA, 15 nt, Human
gauuguccccgaccc

SEQ ID NO: 3313076 - RNA, 18 nt, Human
gauugcuugagcucagga

SEQ ID NO: 3313077 - RNA, 23 nt, Human
gauugacgggacuguugguauug

SEQ ID NO: 3313078 - RNA, 21 nt, Human
gauucccaagcucugcuccuc

SEQ ID NO: 3313079 - RNA, 22 nt, Human
gauucccaagcucugcuccucu

SEQ ID NO: 3313080 - RNA, 12 nt, Human
gauucagacagc

SEQ ID NO: 3313081 - RNA, 14 nt, Human
gauguucugggaca

SEQ ID NO: 3313082 - RNA, 16 nt, Human
gauguucugggacaca

SEQ ID NO: 3313083 - RNA, 20 nt, Human
gauggugcaaugaccuuuca

SEQ ID NO: 3313084 - RNA, 23 nt, Human
gauggugcaaugaccuuucaaua

SEQ ID NO: 3313085 - RNA, 17 nt, Human
gauggugcaaugaccuu

SEQ ID NO: 3313086 - RNA, 21 nt, Human
gauguucuuucacccuuuucu

SEQ ID NO: 3313087 - RNA, 21 nt, Human
gauguuuuaaggaugcuugua

SEQ ID NO: 3313088 - RNA, 14 nt, Human
gauguuuuccauga

SEQ ID NO: 3313089 - RNA, 15 nt, Human
gauguuuuccaugag

SEQ ID NO: 3313090 - RNA, 19 nt, Human
gauuaaauucuugcaaagu

SEQ ID NO: 3313091 - RNA, 12 nt, Human
gauuaaauucuu

SEQ ID NO: 3313092 - RNA, 18 nt, Human
gauuaaccacuucagcug

SEQ ID NO: 3313093 - RNA, 21 nt, Human
gauuaaccacuucagcugacu

SEQ ID NO: 3313094 - RNA, 19 nt, Human
gauuaaccacuucagcuga

SEQ ID NO: 3313095 - RNA, 19 nt, Human
gauucaacagguuuuccug

SEQ ID NO: 3313096 - RNA, 14 nt, Human
cugagccagauuuc

SEQ ID NO: 3313097 - RNA, 13 nt, Human
cugagccagauuu

SEQ ID NO: 3313098 - RNA, 19 nt, Human
cugagacagcccgggcucu

SEQ ID NO: 3313099 - RNA, 20 nt, Human
cugagacagcccgggcucug

SEQ ID NO: 3313100 - RNA, 21 nt, Human
cugagacagcccgggcucugc

SEQ ID NO: 3313101 - RNA, 16 nt, Human
cugacagacacaggcc

SEQ ID NO: 3313102 - RNA, 14 nt, Human
cugaauuucuuuug

SEQ ID NO: 3313103 - RNA, 15 nt, Human
cugacagacacaggc

SEQ ID NO: 3313104 - RNA, 17 nt, Human
cugacagacacaggccc

SEQ ID NO: 3313105 - RNA, 18 nt, Human
cugacagacacaggcccg

SEQ ID NO: 3313106 - RNA, 16 nt, Human
cucuucuccaggcugu

SEQ ID NO: 3313107 - RNA, 21 nt, Human
cucuuuggucuacacugugcu

SEQ ID NO: 3313108 - RNA, 23 nt, Human
cucuuuggucuacacugugcuga

SEQ ID NO: 3313109 - RNA, 22 nt, Human
cucuuuggucuacacugugcug

SEQ ID NO: 3313110 - RNA, 14 nt, Human
cucuuuucaaaaca

SEQ ID NO: 3313111 - RNA, 23 nt, Human
cugaaagggacgcuacccgggaa

SEQ ID NO: 3313112 - RNA, 16 nt, Human
cugaagucacacagug

SEQ ID NO: 3313113 - RNA, 21 nt, Human
cugaagucacacagugagucg

SEQ ID NO: 3313114 - RNA, 18 nt, Human
cugaagucacacagugag

SEQ ID NO: 3313115 - RNA, 19 nt, Human
cugaagucacacagugagu

SEQ ID NO: 3313116 - RNA, 17 nt, Human
cugaagucacacaguga

SEQ ID NO: 3313117 - RNA, 20 nt, Human
cugaagucuuuguacagaca

SEQ ID NO: 3313118 - RNA, 17 nt, Human
cugaagucuuuguacag

SEQ ID NO: 3313119 - RNA, 22 nt, Human
cugaagucccagauacuugggg

SEQ ID NO: 3313120 - RNA, 17 nt, Human
cugaaguucagcugcau

SEQ ID NO: 3313121 - RNA, 19 nt, Human
cugaaugguuuucaaaaua

SEQ ID NO: 3313122 - RNA, 20 nt, Human
cugaaugguuuucaaaauaa

SEQ ID NO: 3313123 - RNA, 12 nt, Human
cugaauuucuuu

SEQ ID NO: 3313124 - RNA, 20 nt, Human
cucuggcagcucagagaggg

SEQ ID NO: 3313125 - RNA, 23 nt, Human
cucuggcagcucagagagggugg

SEQ ID NO: 3313126 - RNA, 16 nt, Human
cucugccucugacaca

SEQ ID NO: 3313127 - RNA, 21 nt, Human
cucugccucccaucacccgcu

SEQ ID NO: 3313128 - RNA, 19 nt, Human
cucugccucugacacacag

SEQ ID NO: 3313129 - RNA, 20 nt, Human
cucugccucugacacacagc

SEQ ID NO: 3313130 - RNA, 14 nt, Human
cucuguccugggag

SEQ ID NO: 3313131 - RNA, 13 nt, Human
cucuguccuggga

SEQ ID NO: 3313132 - RNA, 15 nt, Human
cucuguccugggagu

SEQ ID NO: 3313133 - RNA, 22 nt, Human
cucuguccugggagugagcugg

SEQ ID NO: 3313134 - RNA, 18 nt, Human
cucugucgcccagucugg

SEQ ID NO: 3313135 - RNA, 19 nt, Human
cucugucgcccagucugga

SEQ ID NO: 3313136 - RNA, 17 nt, Human
cucugucgcccagucug

SEQ ID NO: 3313137 - RNA, 13 nt, Human
cucugucgcccag

SEQ ID NO: 3313138 - RNA, 19 nt, Human
cucugugucagguggggca

SEQ ID NO: 3313139 - RNA, 20 nt, Human
cucugugucagguggggcag

SEQ ID NO: 3313140 - RNA, 21 nt, Human
cucugugucagguggggcagc

SEQ ID NO: 3313141 - RNA, 22 nt, Human
cucugugucagguggggcagcu

SEQ ID NO: 3313142 - RNA, 23 nt, Human
cucugugucagguggggcagcuu

SEQ ID NO: 3313143 - RNA, 15 nt, Human
cucuucuccaggcug

SEQ ID NO: 3313144 - RNA, 13 nt, Human
cucuucuccaggc

SEQ ID NO: 3313145 - RNA, 12 nt, Human
cucugcccuugg

SEQ ID NO: 3313146 - RNA, 17 nt, Human
cucugccucccaucacc

SEQ ID NO: 3313147 - RNA, 16 nt, Human
cucugccucccaucac

SEQ ID NO: 3313148 - RNA, 14 nt, Human
cucugccucccauc

SEQ ID NO: 3313149 - RNA, 13 nt, Human
cucugccucccau

SEQ ID NO: 3313150 - RNA, 20 nt, Human
cucugcccacucccugcaac

SEQ ID NO: 3313151 - RNA, 18 nt, Human
cucugcccacucccugca

SEQ ID NO: 3313152 - RNA, 17 nt, Human
cucugcccacucccugc

SEQ ID NO: 3313153 - RNA, 16 nt, Human
cucugcccacucccug

SEQ ID NO: 3313154 - RNA, 15 nt, Human
cucugcccacucccu

SEQ ID NO: 3313155 - RNA, 13 nt, Human
cucugcccacucc

SEQ ID NO: 3313156 - RNA, 13 nt, Human
cucugcacaagcu

SEQ ID NO: 3313157 - RNA, 10 nt, Human
cucugcacaa

SEQ ID NO: 3313158 - RNA, 15 nt, Human
cucugcacaagcugc

SEQ ID NO: 3313159 - RNA, 14 nt, Human
cucugcacaagcug

SEQ ID NO: 3313160 - RNA, 22 nt, Human
cucugaaggacauugcggacag

SEQ ID NO: 3313161 - RNA, 14 nt, Human
cucugacacacagc

SEQ ID NO: 3313162 - RNA, 15 nt, Human
cucugacacacagcu

SEQ ID NO: 3313163 - RNA, 16 nt, Human
cucugacacacagcuc

SEQ ID NO: 3313164 - RNA, 17 nt, Human
cucugacacacagcucu

SEQ ID NO: 3313165 - RNA, 18 nt, Human
cucugacacacagcucug

SEQ ID NO: 3313166 - RNA, 19 nt, Human
cucugacacacagcucugu

SEQ ID NO: 3313167 - RNA, 23 nt, Human
cucugacagaagaaccccagggu

SEQ ID NO: 3313168 - RNA, 21 nt, Human
cucugagacucgcgacaaugc

SEQ ID NO: 3313169 - RNA, 23 nt, Human
cucugagacucgcgacaaugcaa

SEQ ID NO: 3313170 - RNA, 20 nt, Human
cucugagacucgcgacaaug

SEQ ID NO: 3313171 - RNA, 12 nt, Human
cucugaggacac

SEQ ID NO: 3313172 - RNA, 14 nt, Human
cucugaggacacua

SEQ ID NO: 3313173 - RNA, 24 nt, Human
cugaggcccuucucuccagccccu

SEQ ID NO: 3313174 - RNA, 13 nt, Human
cugaggcugggcu

SEQ ID NO: 3313175 - RNA, 22 nt, Human
cugaggcugggcucccuuccca

SEQ ID NO: 3313176 - RNA, 17 nt, Human
cugaggcugggcucccu

SEQ ID NO: 3313177 - RNA, 16 nt, Human
cugaggcugggcuccc

SEQ ID NO: 3313178 - RNA, 15 nt, Human
cugaggcugggcucc

SEQ ID NO: 3313179 - RNA, 14 nt, Human
cugauggugcaaug

SEQ ID NO: 3313180 - RNA, 16 nt, Human
cugauggugcaaugac

SEQ ID NO: 3313181 - RNA, 15 nt, Human
cugauggugcaauga

SEQ ID NO: 3313182 - RNA, 21 nt, Human
cugauccuaguuccaccauca

SEQ ID NO: 3313183 - RNA, 20 nt, Human
cugauccuaguuccaccauc

SEQ ID NO: 3313184 - RNA, 21 nt, Human
cugauaaagaugagugagcau

SEQ ID NO: 3313185 - RNA, 17 nt, Human
cugagucugaaggcugg

SEQ ID NO: 3313186 - RNA, 19 nt, Human
cugagucugaaggcugggu

SEQ ID NO: 3313187 - RNA, 18 nt, Human
cugagucugaaggcuggg

SEQ ID NO: 3313188 - RNA, 22 nt, Human
cugagugggggaucacagccuc

SEQ ID NO: 3313189 - RNA, 17 nt, Human
cugauugugucucuugg

SEQ ID NO: 3313190 - RNA, 21 nt, Human
cugauggugcaaugaccuuuc

SEQ ID NO: 3313191 - RNA, 20 nt, Human
cugauggugcaaugaccuuu

SEQ ID NO: 3313192 - RNA, 19 nt, Human
cugauggugcaaugaccuu

SEQ ID NO: 3313193 - RNA, 17 nt, Human
cugauggugcaaugacc

SEQ ID NO: 3313194 - RNA, 21 nt, Human
cugauugugucucuugguccu

SEQ ID NO: 3313195 - RNA, 23 nt, Human
cugauuuuuuuuuccuucagugc

SEQ ID NO: 3313196 - RNA, 22 nt, Human
cugauuuuuuuuuccuucagug

SEQ ID NO: 3313197 - RNA, 21 nt, Human
cugauuuuuuuuuccuucagu

SEQ ID NO: 3313198 - RNA, 20 nt, Human
cugauuuuuuuuuccuucag

SEQ ID NO: 3313199 - RNA, 19 nt, Human
cugauuuuuuuuuccuuca

SEQ ID NO: 3313200 - RNA, 18 nt, Human
cugauuuuuuuuuccuuc

SEQ ID NO: 3313201 - RNA, 16 nt, Human
cugauuuuuuuuuccu

SEQ ID NO: 3313202 - RNA, 12 nt, Human
cugcaccgggcc

SEQ ID NO: 3313203 - RNA, 23 nt, Human
cugcaccggcuggccuggccccu

SEQ ID NO: 3313204 - RNA, 15 nt, Human
cugcacuccccugcu

SEQ ID NO: 3313205 - RNA, 14 nt, Human
cugcacuccccugc

SEQ ID NO: 3313206 - RNA, 22 nt, Human
cugcaccggcuggccuggcccc

SEQ ID NO: 3313207 - RNA, 20 nt, Human
cugcaccggcuggccuggcc

SEQ ID NO: 3313208 - RNA, 14 nt, Human
cugcacccucaggc

SEQ ID NO: 3313209 - RNA, 13 nt, Human
cugcacccucagg

SEQ ID NO: 3313210 - RNA, 18 nt, Human
cugcacuugcagacucua

SEQ ID NO: 3313211 - RNA, 17 nt, Human
cugcacuccccugcugg

SEQ ID NO: 3313212 - RNA, 16 nt, Human
cugcacuccccugcug

SEQ ID NO: 3313213 - RNA, 18 nt, Human
cugcacaagcugcacccu

SEQ ID NO: 3313214 - RNA, 22 nt, Human
cugcacaagcugcacccucagg

SEQ ID NO: 3313215 - RNA, 18 nt, Human
cugcaauaaggggagagu

SEQ ID NO: 3313216 - RNA, 21 nt, Human
cugccugcccaggccccugcc

SEQ ID NO: 3313217 - RNA, 22 nt, Human
cugccugcccaggccccugcca

SEQ ID NO: 3313218 - RNA, 17 nt, Human
cugccucugacacacag

SEQ ID NO: 3313219 - RNA, 15 nt, Human
cugccucugacacac

SEQ ID NO: 3313220 - RNA, 18 nt, Human
cugccucugacacacagc

SEQ ID NO: 3313221 - RNA, 21 nt, Human
cugccucugacacacagcucu

SEQ ID NO: 3313222 - RNA, 19 nt, Human
cugcgguccacccaggagc

SEQ ID NO: 3313223 - RNA, 17 nt, Human
cugcgguccacccagga

SEQ ID NO: 3313224 - RNA, 18 nt, Human
cugcgguccacccaggag

SEQ ID NO: 3313225 - RNA, 13 nt, Human
cugccgcagcccu

SEQ ID NO: 3313226 - RNA, 12 nt, Human
cugccgcagccc

SEQ ID NO: 3313227 - RNA, 23 nt, Human
cugccgcagcccugcagagggca

SEQ ID NO: 3313228 - RNA, 22 nt, Human
cugccgcagcccugcagagggc

SEQ ID NO: 3313229 - RNA, 21 nt, Human
cugccgcagcccugcagaggg

SEQ ID NO: 3313230 - RNA, 20 nt, Human
cugccgcagcccugcagagg

SEQ ID NO: 3313231 - RNA, 19 nt, Human
cugccgcagcccugcagag

SEQ ID NO: 3313232 - RNA, 19 nt, Human
cugccucagccucccaaag

SEQ ID NO: 3313233 - RNA, 15 nt, Human
cugccucagccuccc

SEQ ID NO: 3313234 - RNA, 14 nt, Human
cugccucagccucc

SEQ ID NO: 3313235 - RNA, 17 nt, Human
cugcaguugccagucac

SEQ ID NO: 3313236 - RNA, 22 nt, Human
cugcaguugccagucaccccgg

SEQ ID NO: 3313237 - RNA, 21 nt, Human
cugcaguugccagucaccccg

SEQ ID NO: 3313238 - RNA, 17 nt, Human
cugcacuugcagacucu

SEQ ID NO: 3313239 - RNA, 23 nt, Human
cugcacuugcagacucuacagag

SEQ ID NO: 3313240 - RNA, 19 nt, Human
cugcaguugccagucaccc

SEQ ID NO: 3313241 - RNA, 22 nt, Human
cugcaucguuucaucuuccaac

SEQ ID NO: 3313242 - RNA, 16 nt, Human
cugcaucguuucaucu

SEQ ID NO: 3313243 - RNA, 22 nt, Human
cugcaugcgggcuuccuccugg

SEQ ID NO: 3313244 - RNA, 18 nt, Human
cugcaugcgggcuuccuc

SEQ ID NO: 3313245 - RNA, 19 nt, Human
cugccaaugggagcucaug

SEQ ID NO: 3313246 - RNA, 18 nt, Human
cugccaaugggagcucau

SEQ ID NO: 3313247 - RNA, 17 nt, Human
cugccaaugggagcuca

SEQ ID NO: 3313248 - RNA, 18 nt, Human
cugcccacucccugcaac

SEQ ID NO: 3313249 - RNA, 16 nt, Human
cugcccacucccugca

SEQ ID NO: 3313250 - RNA, 15 nt, Human
cugcccacucccugc

SEQ ID NO: 3313251 - RNA, 14 nt, Human
cugcccacucccug

SEQ ID NO: 3313252 - RNA, 22 nt, Human
cugcccaccuggccucugcacu

SEQ ID NO: 3313253 - RNA, 20 nt, Human
cugcccaccuggccucugca

SEQ ID NO: 3313254 - RNA, 19 nt, Human
cugcccaccuggccucugc

SEQ ID NO: 3313255 - RNA, 18 nt, Human
cugcccaccuggccucug

SEQ ID NO: 3313256 - RNA, 17 nt, Human
cugcccaccuggccucu

SEQ ID NO: 3313257 - RNA, 14 nt, Human
cugccaugccagcu

SEQ ID NO: 3313258 - RNA, 13 nt, Human
cugcccaccuggc

SEQ ID NO: 3313259 - RNA, 15 nt, Human
cugcccaccuggccu

SEQ ID NO: 3313260 - RNA, 14 nt, Human
cugcccaccuggcc

SEQ ID NO: 3313261 - RNA, 13 nt, Human
cugccaggcaugg

SEQ ID NO: 3313262 - RNA, 11 nt, Human
cugccaggcau

SEQ ID NO: 3313263 - RNA, 23 nt, Human
cuccaggagcagccacauuccug

SEQ ID NO: 3313264 - RNA, 18 nt, Human
cuccaggagcagccacau

SEQ ID NO: 3313265 - RNA, 13 nt, Human
cuccaggagcagc

SEQ ID NO: 3313266 - RNA, 11 nt, Human
cuccaggagca

SEQ ID NO: 3313267 - RNA, 17 nt, Human
cuccaggagcagccaca

SEQ ID NO: 3313268 - RNA, 16 nt, Human
cuccaggagcagccac

SEQ ID NO: 3313269 - RNA, 15 nt, Human
cuccaggagcagcca

SEQ ID NO: 3313270 - RNA, 14 nt, Human
cuccaggagcagcc

SEQ ID NO: 3313271 - RNA, 12 nt, Human
cuccagccuggg

SEQ ID NO: 3313272 - RNA, 17 nt, Human
cuccagccccuggaugc

SEQ ID NO: 3313273 - RNA, 16 nt, Human
cuccagccccuggaug

SEQ ID NO: 3313274 - RNA, 20 nt, Human
cuccagccccuggaugcagc

SEQ ID NO: 3313275 - RNA, 14 nt, Human
cuccaccugccagg

SEQ ID NO: 3313276 - RNA, 13 nt, Human
cuccaccugccag

SEQ ID NO: 3313277 - RNA, 12 nt, Human
cuccaccugcca

SEQ ID NO: 3313278 - RNA, 15 nt, Human
cuccagccccuggau

SEQ ID NO: 3313279 - RNA, 17 nt, Human
cucauuugucacacacu

SEQ ID NO: 3313280 - RNA, 16 nt, Human
cuccaaaauaaaacuu

SEQ ID NO: 3313281 - RNA, 15 nt, Human
cuccaaaauaaaacu

SEQ ID NO: 3313282 - RNA, 15 nt, Human
cuccacccugcucuc

SEQ ID NO: 3313283 - RNA, 13 nt, Human
cuccacccugcuc

SEQ ID NO: 3313284 - RNA, 15 nt, Human
cucagcauccuggca

SEQ ID NO: 3313285 - RNA, 18 nt, Human
cucagcauccuggcaccc

SEQ ID NO: 3313286 - RNA, 23 nt, Human
cucaggaguuugagaccaaccug

SEQ ID NO: 3313287 - RNA, 18 nt, Human
cucaggaguuugagacca

SEQ ID NO: 3313288 - RNA, 13 nt, Human
cucagggccuggc

SEQ ID NO: 3313289 - RNA, 15 nt, Human
cucagggccuggcuc

SEQ ID NO: 3313290 - RNA, 14 nt, Human
cucagggccuggcu

SEQ ID NO: 3313291 - RNA, 16 nt, Human
cucagggccuggcuca

SEQ ID NO: 3313292 - RNA, 15 nt, Human
cucagggccuggucg

SEQ ID NO: 3313293 - RNA, 14 nt, Human
cucagggccugguc

SEQ ID NO: 3313294 - RNA, 17 nt, Human
cucagggucccuggugg

SEQ ID NO: 3313295 - RNA, 16 nt, Human
cucagggucccuggug

SEQ ID NO: 3313296 - RNA, 15 nt, Human
cucagggucccuggu

SEQ ID NO: 3313297 - RNA, 20 nt, Human
cucaggugagaagcagagga

SEQ ID NO: 3313298 - RNA, 19 nt, Human
cucaggugagaagcagagg

SEQ ID NO: 3313299 - RNA, 14 nt, Human
cucaggugagaagc

SEQ ID NO: 3313300 - RNA, 16 nt, Human
cucaggugagaagcag

SEQ ID NO: 3313301 - RNA, 21 nt, Human
cucauaguaugguggcugggu

SEQ ID NO: 3313302 - RNA, 15 nt, Human
cucauacccaccccc

SEQ ID NO: 3313303 - RNA, 14 nt, Human
cucauacucaccuc

SEQ ID NO: 3313304 - RNA, 22 nt, Human
cucauacucaccucaccccacu

SEQ ID NO: 3313305 - RNA, 20 nt, Human
cucaggugauccacccaccu

SEQ ID NO: 3313306 - RNA, 14 nt, Human
cucagggucccugg

SEQ ID NO: 3313307 - RNA, 18 nt, Human
cucaggugauccacccac

SEQ ID NO: 3313308 - RNA, 19 nt, Human
cucaggugauccacccacc

SEQ ID NO: 3313309 - RNA, 21 nt, Human
cucauacccacccccacccaa

SEQ ID NO: 3313310 - RNA, 19 nt, Human
cucauacccacccccaccc

SEQ ID NO: 3313311 - RNA, 18 nt, Human
cucauacccacccccacc

SEQ ID NO: 3313312 - RNA, 16 nt, Human
cucauacccaccccca

SEQ ID NO: 3313313 - RNA, 15 nt, Human
cucauccucauaccc

SEQ ID NO: 3313314 - RNA, 22 nt, Human
cucaucaccaacgucugugcca

SEQ ID NO: 3313315 - RNA, 21 nt, Human
cucaucaccaacgucugugcc

SEQ ID NO: 3313316 - RNA, 23 nt, Human
cucauaguaugguggcuggguug

SEQ ID NO: 3313317 - RNA, 20 nt, Human
cucauaguaugguggcuggg

SEQ ID NO: 3313318 - RNA, 22 nt, Human
cuccccagcaagugagagcugg

SEQ ID NO: 3313319 - RNA, 23 nt, Human
cuccccagcaagugagagcuggg

SEQ ID NO: 3313320 - RNA, 21 nt, Human
cuccccagcaagugagagcug

SEQ ID NO: 3313321 - RNA, 18 nt, Human
cucccgaguagcugggac

SEQ ID NO: 3313322 - RNA, 19 nt, Human
cucccgaguagcugggacu

SEQ ID NO: 3313323 - RNA, 20 nt, Human
cucccgaguagcugggacua

SEQ ID NO: 3313324 - RNA, 18 nt, Human
cuccucagaucuucugug

SEQ ID NO: 3313325 - RNA, 20 nt, Human
cucccuuggauuguccccga

SEQ ID NO: 3313326 - RNA, 15 nt, Human
cuccgaccagacacc

SEQ ID NO: 3313327 - RNA, 15 nt, Human
cuccuccagagucag

SEQ ID NO: 3313328 - RNA, 13 nt, Human
cuccuccagaguc

SEQ ID NO: 3313329 - RNA, 15 nt, Human
cuccuccagccgcca

SEQ ID NO: 3313330 - RNA, 19 nt, Human
cucgagcaugccuggaugg

SEQ ID NO: 3313331 - RNA, 16 nt, Human
cucgagcaugccugga

SEQ ID NO: 3313332 - RNA, 15 nt, Human
cucgagcaugccugg

SEQ ID NO: 3313333 - RNA, 13 nt, Human
cucgagcaugccu

SEQ ID NO: 3313334 - RNA, 23 nt, Human
cuccuuggugucgggcaugacac

SEQ ID NO: 3313335 - RNA, 22 nt, Human
cucgagcaugccuggauggggc

SEQ ID NO: 3313336 - RNA, 18 nt, Human
cuccugccucgaacuggc

SEQ ID NO: 3313337 - RNA, 20 nt, Human
cuccugccucgaacuggcug

SEQ ID NO: 3313338 - RNA, 21 nt, Human
cuccugccucgaacuggcugc

SEQ ID NO: 3313339 - RNA, 17 nt, Human
cuccugccucagccucc

SEQ ID NO: 3313340 - RNA, 16 nt, Human
cuccugccucagccuc

SEQ ID NO: 3313341 - RNA, 12 nt, Human
cuccugccucag

SEQ ID NO: 3313342 - RNA, 11 nt, Human
cuccugccuca

SEQ ID NO: 3313343 - RNA, 13 nt, Human
cuccucuccccag

SEQ ID NO: 3313344 - RNA, 15 nt, Human
cuccucuccccagca

SEQ ID NO: 3313345 - RNA, 14 nt, Human
cuccuggaaauauu

SEQ ID NO: 3313346 - RNA, 21 nt, Human
cuccugugugugcgccuacag

SEQ ID NO: 3313347 - RNA, 23 nt, Human
cuccugugugugcgccuacagga

SEQ ID NO: 3313348 - RNA, 24 nt, Human
cuccugugugugcgccuacaggag

SEQ ID NO: 3313349 - RNA, 20 nt, Human
cuccugugugugcgccuaca

SEQ ID NO: 3313350 - RNA, 21 nt, Human
cucaacaccucugcacaagcu

SEQ ID NO: 3313351 - RNA, 13 nt, Human
cucaaccuccugg

SEQ ID NO: 3313352 - RNA, 15 nt, Human
cucaaccuccugggc

SEQ ID NO: 3313353 - RNA, 22 nt, Human
cucacaguccuuaccagcagag

SEQ ID NO: 3313354 - RNA, 19 nt, Human
cucacaguccuuaccagca

SEQ ID NO: 3313355 - RNA, 17 nt, Human
cucacaguccuuaccag

SEQ ID NO: 3313356 - RNA, 15 nt, Human
cucacauuuauucug

SEQ ID NO: 3313357 - RNA, 19 nt, Human
cucacauuuauucugcuca

SEQ ID NO: 3313358 - RNA, 22 nt, Human
cucacauuuauucugcucacau

SEQ ID NO: 3313359 - RNA, 13 nt, Human
cucaccagcccca

SEQ ID NO: 3313360 - RNA, 14 nt, Human
cucaccagccccag

SEQ ID NO: 3313361 - RNA, 15 nt, Human
cucaccagccccagu

SEQ ID NO: 3313362 - RNA, 17 nt, Human
cucaccagccccagugc

SEQ ID NO: 3313363 - RNA, 18 nt, Human
cucaccagccccagugcc

SEQ ID NO: 3313364 - RNA, 17 nt, Human
cucaagugauucuccug

SEQ ID NO: 3313365 - RNA, 21 nt, Human
cucaaguccucuuuucugaga

SEQ ID NO: 3313366 - RNA, 14 nt, Human
cucaaguccucuuu

SEQ ID NO: 3313367 - RNA, 15 nt, Human
cucacaguccuuacc

SEQ ID NO: 3313368 - RNA, 21 nt, Human
cucacacaugagcaucaggcc

SEQ ID NO: 3313369 - RNA, 24 nt, Human
cucacacaugagcaucaggccagg

SEQ ID NO: 3313370 - RNA, 22 nt, Human
cucacacaugagcaucaggcca

SEQ ID NO: 3313371 - RNA, 11 nt, Human
cucacucuguc

SEQ ID NO: 3313372 - RNA, 12 nt, Human
cucacucugucg

SEQ ID NO: 3313373 - RNA, 13 nt, Human
cucacuccuugaa

SEQ ID NO: 3313374 - RNA, 13 nt, Human
cucacugcagccu

SEQ ID NO: 3313375 - RNA, 12 nt, Human
cucacugcagcc

SEQ ID NO: 3313376 - RNA, 22 nt, Human
cucacucugucgcccagucugg

SEQ ID NO: 3313377 - RNA, 13 nt, Human
cucacucugucgc

SEQ ID NO: 3313378 - RNA, 21 nt, Human
cucacucugucgcccagucug

SEQ ID NO: 3313379 - RNA, 14 nt, Human
cucaccccagcccc

SEQ ID NO: 3313380 - RNA, 15 nt, Human
cucaccccagcccca

SEQ ID NO: 3313381 - RNA, 19 nt, Human
cucacuauguugcccaggc

SEQ ID NO: 3313382 - RNA, 20 nt, Human
cucacuauguugcccaggca

SEQ ID NO: 3313383 - RNA, 23 nt, Human
cucacuauguugcccaggcaggu

SEQ ID NO: 3313384 - RNA, 21 nt, Human
cucacuauguugcccaggcag

SEQ ID NO: 3313385 - RNA, 22 nt, Human
cucacuauguugcccaggcagg

SEQ ID NO: 3313386 - RNA, 20 nt, Human
cucacuguugcccaggcugg

SEQ ID NO: 3313387 - RNA, 22 nt, Human
cucacugccaugccagcuuauc

SEQ ID NO: 3313388 - RNA, 19 nt, Human
cucacugccaugccagcuu

SEQ ID NO: 3313389 - RNA, 19 nt, Human
cucacuguugcccaggcug

SEQ ID NO: 3313390 - RNA, 21 nt, Human
cucacuguugcccaggcuggc

SEQ ID NO: 3313391 - RNA, 22 nt, Human
cucacuguugcccaggcuggcg

SEQ ID NO: 3313392 - RNA, 14 nt, Human
cucagagagggugg

SEQ ID NO: 3313393 - RNA, 16 nt, Human
cucagcauccuggcac

SEQ ID NO: 3313394 - RNA, 17 nt, Human
cucagcauccuggcacc

SEQ ID NO: 3313395 - RNA, 21 nt, Human
cucagcaaaagaugcuucuca

SEQ ID NO: 3313396 - RNA, 15 nt, Human
cucagaucuucugug

SEQ ID NO: 3313397 - RNA, 21 nt, Human
cuauaauguaagcucuacuga

SEQ ID NO: 3313398 - RNA, 22 nt, Human
cuauaauuuaccugaagucuuu

SEQ ID NO: 3313399 - RNA, 16 nt, Human
cuauaauguaagcucu

SEQ ID NO: 3313400 - RNA, 17 nt, Human
cuauagccuaggugaca

SEQ ID NO: 3313401 - RNA, 15 nt, Human
cuauuagagaagaga

SEQ ID NO: 3313402 - RNA, 18 nt, Human
cuaugggacucaaugcac

SEQ ID NO: 3313403 - RNA, 22 nt, Human
cuaugggacucaaugcacugac

SEQ ID NO: 3313404 - RNA, 23 nt, Human
cuaugggacucaaugcacugaca

SEQ ID NO: 3313405 - RNA, 24 nt, Human
cuaggugacagagugagacucugu

SEQ ID NO: 3313406 - RNA, 14 nt, Human
cuaggugacagagu

SEQ ID NO: 3313407 - RNA, 18 nt, Human
cuaggugacagagugaga

SEQ ID NO: 3313408 - RNA, 22 nt, Human
cgcccaguuggguggaugccug

SEQ ID NO: 3313409 - RNA, 17 nt, Human
cgccaucccagccccaa

SEQ ID NO: 3313410 - RNA, 20 nt, Human
cgccaucccagccccaauga

SEQ ID NO: 3313411 - RNA, 15 nt, Human
cgccaugcuccuggc

SEQ ID NO: 3313412 - RNA, 23 nt, Human
cgcccaguuggguggaugccugg

SEQ ID NO: 3313413 - RNA, 22 nt, Human
gaacuggguacuuguggacaca

SEQ ID NO: 3313414 - RNA, 12 nt, Human
gaacuugguucc

SEQ ID NO: 3313415 - RNA, 23 nt, Human
gaacuugguucccauuugcuccu

SEQ ID NO: 3313416 - RNA, 13 nt, Human
gaacuuggcgcug

SEQ ID NO: 3313417 - RNA, 16 nt, Human
gaacuuggcgcugccc

SEQ ID NO: 3313418 - RNA, 15 nt, Human
gaacuuggcgcugcc

SEQ ID NO: 3313419 - RNA, 16 nt, Human
gaaccaccacacccag

SEQ ID NO: 3313420 - RNA, 15 nt, Human
gaacagacuggaagc

SEQ ID NO: 3313421 - RNA, 16 nt, Human
gaacagacuggaagca

SEQ ID NO: 3313422 - RNA, 20 nt, Human
gaaccacaucuugcucugcu

SEQ ID NO: 3313423 - RNA, 21 nt, Human
gaaccacaucuugcucugcug

SEQ ID NO: 3313424 - RNA, 17 nt, Human
gaaauuuguuauaauga

SEQ ID NO: 3313425 - RNA, 14 nt, Human
gaaaugggcagagc

SEQ ID NO: 3313426 - RNA, 20 nt, Human
gaaaugggcagagcagagac

SEQ ID NO: 3313427 - RNA, 20 nt, Human
gaaauaucugaaaauguaug

SEQ ID NO: 3313428 - RNA, 13 nt, Human
gaaauauaauuga

SEQ ID NO: 3313429 - RNA, 21 nt, Human
gaaauaucugaaaauguaugu

SEQ ID NO: 3313430 - RNA, 19 nt, Human
gaaugaaagggcccagaga

SEQ ID NO: 3313431 - RNA, 14 nt, Human
gaaugaaagggccc

SEQ ID NO: 3313432 - RNA, 16 nt, Human
gaaucucaaauaacua

SEQ ID NO: 3313433 - RNA, 15 nt, Human
gaauagcugggacua

SEQ ID NO: 3313434 - RNA, 14 nt, Human
gaauagcugggacu

SEQ ID NO: 3313435 - RNA, 12 nt, Human
gaaguuucugcc

SEQ ID NO: 3313436 - RNA, 21 nt, Human
gaaggauacaaaagcauguga

SEQ ID NO: 3313437 - RNA, 19 nt, Human
gaaggauacaaaagcaugu

SEQ ID NO: 3313438 - RNA, 12 nt, Human
gaaggauacaaa

SEQ ID NO: 3313439 - RNA, 18 nt, Human
gaaggaaacccagcucug

SEQ ID NO: 3313440 - RNA, 17 nt, Human
gaaggaaacccagcucu

SEQ ID NO: 3313441 - RNA, 14 nt, Human
gaaggaaacccagc

SEQ ID NO: 3313442 - RNA, 16 nt, Human
gaaggccccgcccagg

SEQ ID NO: 3313443 - RNA, 15 nt, Human
gaaggccccgcccag

SEQ ID NO: 3313444 - RNA, 14 nt, Human
gaaggccccgccca

SEQ ID NO: 3313445 - RNA, 21 nt, Human
gaagccgcuggggccaguugg

SEQ ID NO: 3313446 - RNA, 22 nt, Human
gaagcccaggaaaggcuccagg

SEQ ID NO: 3313447 - RNA, 21 nt, Human
gaagcccaggaaaggcuccag

SEQ ID NO: 3313448 - RNA, 19 nt, Human
gaagcccaggaaaggcucc

SEQ ID NO: 3313449 - RNA, 20 nt, Human
gaagcccaggaaaggcucca

SEQ ID NO: 3313450 - RNA, 23 nt, Human
gaagccagcaggcucucaggcca

SEQ ID NO: 3313451 - RNA, 19 nt, Human
gaagacucauucuucugua

SEQ ID NO: 3313452 - RNA, 21 nt, Human
gaagacucauucuucuguacg

SEQ ID NO: 3313453 - RNA, 16 nt, Human
gaagccagcaggcucu

SEQ ID NO: 3313454 - RNA, 15 nt, Human
gaagccagcaggcuc

SEQ ID NO: 3313455 - RNA, 22 nt, Human
cuuuccaaaugcccagcuuaaa

SEQ ID NO: 3313456 - RNA, 19 nt, Human
cuuuccaaaugcccagcuu

SEQ ID NO: 3313457 - RNA, 18 nt, Human
cuuuccaaaugcccagcu

SEQ ID NO: 3313458 - RNA, 16 nt, Human
cuuuccaaaugcccag

SEQ ID NO: 3313459 - RNA, 21 nt, Human
cuuguguguuuauugucaaag

SEQ ID NO: 3313460 - RNA, 21 nt, Human
cuuguggacacagcucuucuc

SEQ ID NO: 3313461 - RNA, 20 nt, Human
cuuguguguuuauugucaaa

SEQ ID NO: 3313462 - RNA, 16 nt, Human
cuuggggggcugaggu

SEQ ID NO: 3313463 - RNA, 22 nt, Human
cuuggggaccagagcugccacc

SEQ ID NO: 3313464 - RNA, 15 nt, Human
cuuggggggcugagg

SEQ ID NO: 3313465 - RNA, 13 nt, Human
cuugggcuucauc

SEQ ID NO: 3313466 - RNA, 14 nt, Human
cuugggccacugug

SEQ ID NO: 3313467 - RNA, 21 nt, Human
cuuggggaccagagcugccac

SEQ ID NO: 3313468 - RNA, 20 nt, Human
cuuggggaccagagcugcca

SEQ ID NO: 3313469 - RNA, 22 nt, Human
cuugggcuucauccuccucaga

SEQ ID NO: 3313470 - RNA, 14 nt, Human
cuuggcugcaggga

SEQ ID NO: 3313471 - RNA, 17 nt, Human
cuuggcugcagggaguc

SEQ ID NO: 3313472 - RNA, 22 nt, Human
cuuggaggaaggaaacccagcu

SEQ ID NO: 3313473 - RNA, 12 nt, Human
cuuggagggcau

SEQ ID NO: 3313474 - RNA, 23 nt, Human
cuuggagggcaugaagacagaua

SEQ ID NO: 3313475 - RNA, 16 nt, Human
cuuggcugcagggagu

SEQ ID NO: 3313476 - RNA, 16 nt, Human
cuugcucugcugacag

SEQ ID NO: 3313477 - RNA, 13 nt, Human
cuuggaagcuccg

SEQ ID NO: 3313478 - RNA, 13 nt, Human
cuuggaggaagga

SEQ ID NO: 3313479 - RNA, 16 nt, Human
cuuggaaaugggagac

SEQ ID NO: 3313480 - RNA, 13 nt, Human
cuugcucugcuga

SEQ ID NO: 3313481 - RNA, 14 nt, Human
cuugcucugcugac

SEQ ID NO: 3313482 - RNA, 17 nt, Human
cuucuccacccugcucu

SEQ ID NO: 3313483 - RNA, 18 nt, Human
cuucuccacccugcucuc

SEQ ID NO: 3313484 - RNA, 16 nt, Human
cuucuccacccugcuc

SEQ ID NO: 3313485 - RNA, 21 nt, Human
cuucuccacccugcucuccga

SEQ ID NO: 3313486 - RNA, 14 nt, Human
gaaaaucagccugc

SEQ ID NO: 3313487 - RNA, 16 nt, Human
gaaaaucagccugcuc

SEQ ID NO: 3313488 - RNA, 13 nt, Human
gaaaagcugcuga

SEQ ID NO: 3313489 - RNA, 17 nt, Human
gaaaagcugcugacagu

SEQ ID NO: 3313490 - RNA, 18 nt, Human
gaaacagcuaaugggaca

SEQ ID NO: 3313491 - RNA, 13 nt, Human
gaaaacacauuuu

SEQ ID NO: 3313492 - RNA, 12 nt, Human
gaaaacaugcua

SEQ ID NO: 3313493 - RNA, 15 nt, Human
gaaaacaugcuacac

SEQ ID NO: 3313494 - RNA, 14 nt, Human
gaaaacaugcuaca

SEQ ID NO: 3313495 - RNA, 14 nt, Human
gaaaacguggcugc

SEQ ID NO: 3313496 - RNA, 18 nt, Human
gaaaacguggcugcuuca

SEQ ID NO: 3313497 - RNA, 16 nt, Human
gaaaacguggcugcuu

SEQ ID NO: 3313498 - RNA, 15 nt, Human
gaaaacguggcugcu

SEQ ID NO: 3313499 - RNA, 15 nt, Human
cuuuuuuggcugcug

SEQ ID NO: 3313500 - RNA, 14 nt, Human
cuuuuuuggcugcu

SEQ ID NO: 3313501 - RNA, 17 nt, Human
gaaaaaggaugcacaga

SEQ ID NO: 3313502 - RNA, 23 nt, Human
gaaaaaggaugcacagaguuguu

SEQ ID NO: 3313503 - RNA, 21 nt, Human
cuuuugagugccuuacacaau

SEQ ID NO: 3313504 - RNA, 16 nt, Human
cuuuugagcauuuaga

SEQ ID NO: 3313505 - RNA, 15 nt, Human
cuuuuuucacuacau

SEQ ID NO: 3313506 - RNA, 14 nt, Human
cuuugugauuuuug

SEQ ID NO: 3313507 - RNA, 22 nt, Human
cuuuguccccaccgcagacagg

SEQ ID NO: 3313508 - RNA, 15 nt, Human
cuuuguccccaccgc

SEQ ID NO: 3313509 - RNA, 18 nt, Human
cuuuguccccaccgcaga

SEQ ID NO: 3313510 - RNA, 13 nt, Human
cuuugggaggcca

SEQ ID NO: 3313511 - RNA, 14 nt, Human
cuuuguucuggcuc

SEQ ID NO: 3313512 - RNA, 18 nt, Human
cuuugugauuuuuguaau

SEQ ID NO: 3313513 - RNA, 17 nt, Human
cuuugugauuuuuguaa

SEQ ID NO: 3313514 - RNA, 16 nt, Human
cuuucccaucuuccaa

SEQ ID NO: 3313515 - RNA, 16 nt, Human
cuuuggacccugaggc

SEQ ID NO: 3313516 - RNA, 15 nt, Human
cuuuggacccugagg

SEQ ID NO: 3313517 - RNA, 18 nt, Human
cuuuggacccugaggccc

SEQ ID NO: 3313518 - RNA, 17 nt, Human
cuuuggacccugaggcc

SEQ ID NO: 3313519 - RNA, 19 nt, Human
cuuuggacccugaggccca

SEQ ID NO: 3313520 - RNA, 23 nt, Human
cuuuucuugcaugaggcuagugu

SEQ ID NO: 3313521 - RNA, 18 nt, Human
cuuuucuugcaugaggcu

SEQ ID NO: 3313522 - RNA, 18 nt, Human
cuuuucuguccgagcuuu

SEQ ID NO: 3313523 - RNA, 22 nt, Human
cuuuucauaaccuagccuuaga

SEQ ID NO: 3313524 - RNA, 20 nt, Human
cuuuucauaaccuagccuua

SEQ ID NO: 3313525 - RNA, 18 nt, Human
cuuuguuuguugucagcu

SEQ ID NO: 3313526 - RNA, 19 nt, Human
cuucgggaggucgaggcag

SEQ ID NO: 3313527 - RNA, 16 nt, Human
cuucucacugccaugc

SEQ ID NO: 3313528 - RNA, 21 nt, Human
cuucucacugccaugccagcu

SEQ ID NO: 3313529 - RNA, 16 nt, Human
cuucgcuccugugucu

SEQ ID NO: 3313530 - RNA, 17 nt, Human
cuucgcuccugugucuu

SEQ ID NO: 3313531 - RNA, 17 nt, Human
cuucccuacaguugaaa

SEQ ID NO: 3313532 - RNA, 16 nt, Human
cuucagccucccgagu

SEQ ID NO: 3313533 - RNA, 20 nt, Human
cuucagccucccgaguagcu

SEQ ID NO: 3313534 - RNA, 14 nt, Human
cuucagccucccga

SEQ ID NO: 3313535 - RNA, 19 nt, Human
cuucagcugacuuuucugu

SEQ ID NO: 3313536 - RNA, 15 nt, Human
cuucagcugacuuuu

SEQ ID NO: 3313537 - RNA, 14 nt, Human
cuucaguaagccgu

SEQ ID NO: 3313538 - RNA, 13 nt, Human
cuuccacaagagc

SEQ ID NO: 3313539 - RNA, 15 nt, Human
cuuccacaagagccc

SEQ ID NO: 3313540 - RNA, 14 nt, Human
cuuccacaagagcc

SEQ ID NO: 3313541 - RNA, 14 nt, Human
cuucagugccaaaa

SEQ ID NO: 3313542 - RNA, 15 nt, Human
cuucaaauauuuccc

SEQ ID NO: 3313543 - RNA, 22 nt, Human
cuuagucacugagacagcccgg

SEQ ID NO: 3313544 - RNA, 20 nt, Human
cuuagucacugagacagccc

SEQ ID NO: 3313545 - RNA, 21 nt, Human
cuuagucacugagacagcccg

SEQ ID NO: 3313546 - RNA, 16 nt, Human
cuucaaggauccugag

SEQ ID NO: 3313547 - RNA, 20 nt, Human
cuucaaggauccugagccag

SEQ ID NO: 3313548 - RNA, 19 nt, Human
cuucaaggauccugagcca

SEQ ID NO: 3313549 - RNA, 18 nt, Human
cuucaaggauccugagcc

SEQ ID NO: 3313550 - RNA, 17 nt, Human
cuucaaggauccugagc

SEQ ID NO: 3313551 - RNA, 23 nt, Human
cuucaaggauccugagccagauu

SEQ ID NO: 3313552 - RNA, 22 nt, Human
cuucaaggauccugagccagau

SEQ ID NO: 3313553 - RNA, 21 nt, Human
cuucaaggauccugagccaga

SEQ ID NO: 3313554 - RNA, 24 nt, Human
cuucagagacuccugcaggcagcc

SEQ ID NO: 3313555 - RNA, 23 nt, Human
cuucacauauugauuuccguuaa

SEQ ID NO: 3313556 - RNA, 14 nt, Human
cuucacauauugau

SEQ ID NO: 3313557 - RNA, 20 nt, Human
cuuaauucuuagcucauucu

SEQ ID NO: 3313558 - RNA, 16 nt, Human
cuuaaucuaaauggaa

SEQ ID NO: 3313559 - RNA, 20 nt, Human
cuuaccugccaggaagccag

SEQ ID NO: 3313560 - RNA, 13 nt, Human
cuuaccugccagg

SEQ ID NO: 3313561 - RNA, 20 nt, Human
cuuagaaaaaccaccaccau

SEQ ID NO: 3313562 - RNA, 17 nt, Human
cuuagaagucacacagu

SEQ ID NO: 3313563 - RNA, 20 nt, Human
cuuagaagucacacaguauu

SEQ ID NO: 3313564 - RNA, 19 nt, Human
cuuagaauuaguggcacuu

SEQ ID NO: 3313565 - RNA, 21 nt, Human
cuuagguuggcaaaaaggcag

SEQ ID NO: 3313566 - RNA, 23 nt, Human
cuuagguuggcaaaaaggcagga

SEQ ID NO: 3313567 - RNA, 21 nt, Human
cuguuuuauuuuaauucaguu

SEQ ID NO: 3313568 - RNA, 17 nt, Human
cuuaaaaaguggaaaaa

SEQ ID NO: 3313569 - RNA, 16 nt, Human
cuuaaaaaguggaaaa

SEQ ID NO: 3313570 - RNA, 17 nt, Human
cuguugcccaggcuggc

SEQ ID NO: 3313571 - RNA, 17 nt, Human
cuguuuagauaauacac

SEQ ID NO: 3313572 - RNA, 14 nt, Human
cuguuuagauaaua

SEQ ID NO: 3313573 - RNA, 18 nt, Human
cuguuuagauaauacacc

SEQ ID NO: 3313574 - RNA, 17 nt, Human
cuguuucaaacuuuacu

SEQ ID NO: 3313575 - RNA, 15 nt, Human
cuguuucaaacuuua

SEQ ID NO: 3313576 - RNA, 19 nt, Human
cuguuugcuaagugaggau

SEQ ID NO: 3313577 - RNA, 17 nt, Human
cuguuugcuaagugagg

SEQ ID NO: 3313578 - RNA, 16 nt, Human
cuguuaauaguucagg

SEQ ID NO: 3313579 - RNA, 21 nt, Human
cuguucuuucuggcuaugcau

SEQ ID NO: 3313580 - RNA, 14 nt, Human
cuguucuuucuggc

SEQ ID NO: 3313581 - RNA, 13 nt, Human
cuguucuuucugg

SEQ ID NO: 3313582 - RNA, 21 nt, Human
cuguucuuuccaaaguacacu

SEQ ID NO: 3313583 - RNA, 19 nt, Human
cuguucuuuccaaaguaca

SEQ ID NO: 3313584 - RNA, 16 nt, Human
cuguucuuuccaaagu

SEQ ID NO: 3313585 - RNA, 15 nt, Human
cuguucuuuccaaag

SEQ ID NO: 3313586 - RNA, 12 nt, Human
cuguugcccagg

SEQ ID NO: 3313587 - RNA, 13 nt, Human
cuguugcccaggc

SEQ ID NO: 3313588 - RNA, 14 nt, Human
cuguugcccaggcu

SEQ ID NO: 3313589 - RNA, 15 nt, Human
cuguugcccaggcug

SEQ ID NO: 3313590 - RNA, 16 nt, Human
cuguugcccaggcugg

SEQ ID NO: 3313591 - RNA, 23 nt, Human
cuguucuuucuggcuaugcauuu

SEQ ID NO: 3313592 - RNA, 23 nt, Human
cugugucuugcaauggcagccuu

SEQ ID NO: 3313593 - RNA, 20 nt, Human
cugugucuuuuuucacuaca

SEQ ID NO: 3313594 - RNA, 22 nt, Human
cuguggguuucuaaagcugcca

SEQ ID NO: 3313595 - RNA, 21 nt, Human
cuguggguuucuaaagcugcc

SEQ ID NO: 3313596 - RNA, 22 nt, Human
cugugaaaggaaagagggaggu

SEQ ID NO: 3313597 - RNA, 16 nt, Human
cugugaaaggaaagag

SEQ ID NO: 3313598 - RNA, 20 nt, Human
cugugauggggcccugccuc

SEQ ID NO: 3313599 - RNA, 23 nt, Human
cugugauggggcccugccuccuu

SEQ ID NO: 3313600 - RNA, 21 nt, Human
cugugauggggcccugccucc

SEQ ID NO: 3313601 - RNA, 16 nt, Human
cugugauggggcccug

SEQ ID NO: 3313602 - RNA, 15 nt, Human
cugugauggggcccu

SEQ ID NO: 3313603 - RNA, 14 nt, Human
cugugccaugugcc

SEQ ID NO: 3313604 - RNA, 19 nt, Human
cugugcccuaaaguguauu

SEQ ID NO: 3313605 - RNA, 15 nt, Human
cugugccaugugcca

SEQ ID NO: 3313606 - RNA, 22 nt, Human
cugugccauuuuguauuuuacu

SEQ ID NO: 3313607 - RNA, 18 nt, Human
cugucuucaguaagccgu

SEQ ID NO: 3313608 - RNA, 15 nt, Human
cugugaaaggaaaga

SEQ ID NO: 3313609 - RNA, 21 nt, Human
cugucauuugagcagggcuca

SEQ ID NO: 3313610 - RNA, 22 nt, Human
cugucauuugagcagggcucag

SEQ ID NO: 3313611 - RNA, 20 nt, Human
cugucauuugagcagggcuc

SEQ ID NO: 3313612 - RNA, 18 nt, Human
cugucaauuacaggaagu

SEQ ID NO: 3313613 - RNA, 14 nt, Human
cugguggcagcugc

SEQ ID NO: 3313614 - RNA, 16 nt, Human
cugguggcagcucacc

SEQ ID NO: 3313615 - RNA, 18 nt, Human
cugguggcagcucaccuc

SEQ ID NO: 3313616 - RNA, 17 nt, Human
cugguggcagcucaccu

SEQ ID NO: 3313617 - RNA, 15 nt, Human
cugguggcagcugcg

SEQ ID NO: 3313618 - RNA, 20 nt, Human
cugguggcagcucaccucuc

SEQ ID NO: 3313619 - RNA, 14 nt, Human
cugguggcaguggg

SEQ ID NO: 3313620 - RNA, 18 nt, Human
cugguggcagugggagcu

SEQ ID NO: 3313621 - RNA, 15 nt, Human
cuguaauuugugaua

SEQ ID NO: 3313622 - RNA, 14 nt, Human
cuguaauuugugau

SEQ ID NO: 3313623 - RNA, 18 nt, Human
cuguacagagcccacgcc

SEQ ID NO: 3313624 - RNA, 15 nt, Human
cuguacagagcccac

SEQ ID NO: 3313625 - RNA, 14 nt, Human
cuguacagagccca

SEQ ID NO: 3313626 - RNA, 22 nt, Human
cugguuagagguucccuuugac

SEQ ID NO: 3313627 - RNA, 21 nt, Human
cugguuagagguucccuuuga

SEQ ID NO: 3313628 - RNA, 20 nt, Human
cuguauuuuguuuuugucuu

SEQ ID NO: 3313629 - RNA, 13 nt, Human
cugucaauuacag

SEQ ID NO: 3313630 - RNA, 16 nt, Human
cugucaauuacaggaa

SEQ ID NO: 3313631 - RNA, 15 nt, Human
cugucaauuacagga

SEQ ID NO: 3313632 - RNA, 21 nt, Human
cuguaucccaugagccucagc

SEQ ID NO: 3313633 - RNA, 20 nt, Human
cuguaucccaugagccucag

SEQ ID NO: 3313634 - RNA, 19 nt, Human
cuguaucccaugagccuca

SEQ ID NO: 3313635 - RNA, 19 nt, Human
cuguacgucugacaggcaa

SEQ ID NO: 3313636 - RNA, 20 nt, Human
cuguacgucugacaggcaau

SEQ ID NO: 3313637 - RNA, 14 nt, Human
cuguacgucugaca

SEQ ID NO: 3313638 - RNA, 15 nt, Human
cuguacgucugacag

SEQ ID NO: 3313639 - RNA, 16 nt, Human
cuguacgucugacagg

SEQ ID NO: 3313640 - RNA, 18 nt, Human
cuguacgucugacaggca

SEQ ID NO: 3313641 - RNA, 21 nt, Human
cuguacaugaaaacacauuuu

SEQ ID NO: 3313642 - RNA, 20 nt, Human
cuguacaugaaaacacauuu

SEQ ID NO: 3313643 - RNA, 17 nt, Human
cuguacaugaaaacaca

SEQ ID NO: 3313644 - RNA, 15 nt, Human
cugggcuucaguggc

SEQ ID NO: 3313645 - RNA, 21 nt, Human
cugggcuuggggaccagagcu

SEQ ID NO: 3313646 - RNA, 22 nt, Human
cugggcuuggggaccagagcug

SEQ ID NO: 3313647 - RNA, 18 nt, Human
cugggcuugucuguagau

SEQ ID NO: 3313648 - RNA, 14 nt, Human
cugggggcugggca

SEQ ID NO: 3313649 - RNA, 18 nt, Human
cugggggccucagugcca

SEQ ID NO: 3313650 - RNA, 21 nt, Human
cugggauuacaagcgugagcc

SEQ ID NO: 3313651 - RNA, 21 nt, Human
cccacaaaggagagcuagcag

SEQ ID NO: 3313652 - RNA, 20 nt, Human
cccaaugcacuuuguucugg

SEQ ID NO: 3313653 - RNA, 16 nt, Human
cccaaugcacuuuguu

SEQ ID NO: 3313654 - RNA, 17 nt, Human
cccaccuggccucugca

SEQ ID NO: 3313655 - RNA, 21 nt, Human
cccaccuggccucugcacucc

SEQ ID NO: 3313656 - RNA, 19 nt, Human
cccaccuggccucugcacu

SEQ ID NO: 3313657 - RNA, 16 nt, Human
cccaccuggccucugc

SEQ ID NO: 3313658 - RNA, 20 nt, Human
cccaccuuggcugcagggag

SEQ ID NO: 3313659 - RNA, 21 nt, Human
cccacgacugcccggcagggu

SEQ ID NO: 3313660 - RNA, 20 nt, Human
cccacgacugcccggcaggg

SEQ ID NO: 3313661 - RNA, 12 nt, Human
cccacuucugcc

SEQ ID NO: 3313662 - RNA, 23 nt, Human
cccacuugagaauuacccuuuug

SEQ ID NO: 3313663 - RNA, 14 nt, Human
cccacgcuggagug

SEQ ID NO: 3313664 - RNA, 19 nt, Human
cccacgcuggagugcagug

SEQ ID NO: 3313665 - RNA, 20 nt, Human
cccacgcuggagugcaguga

SEQ ID NO: 3313666 - RNA, 17 nt, Human
cccaccucagccucccg

SEQ ID NO: 3313667 - RNA, 22 nt, Human
cccaccucucucacuccuugaa

SEQ ID NO: 3313668 - RNA, 19 nt, Human
cccaccucucucacuccuu

SEQ ID NO: 3313669 - RNA, 20 nt, Human
cccaccgcagacaggaccag

SEQ ID NO: 3313670 - RNA, 19 nt, Human
cccaccgcagacaggacca

SEQ ID NO: 3313671 - RNA, 16 nt, Human
cccgggcucugccucc

SEQ ID NO: 3313672 - RNA, 20 nt, Human
cccuacaguugaaaaacagc

SEQ ID NO: 3313673 - RNA, 14 nt, Human
cccagagggccugc

SEQ ID NO: 3313674 - RNA, 21 nt, Human
cccgaggccuucucugaagga

SEQ ID NO: 3313675 - RNA, 15 nt, Human
cccagagggccugca

SEQ ID NO: 3313676 - RNA, 13 nt, Human
cccgaguagcugg

SEQ ID NO: 3313677 - RNA, 14 nt, Human
cccgaguagcuggg

SEQ ID NO: 3313678 - RNA, 15 nt, Human
cccgaguagcuggga

SEQ ID NO: 3313679 - RNA, 16 nt, Human
cccgaguagcugggac

SEQ ID NO: 3313680 - RNA, 17 nt, Human
cccgaguagcugggacu

SEQ ID NO: 3313681 - RNA, 18 nt, Human
cccgaguagcugggacua

SEQ ID NO: 3313682 - RNA, 21 nt, Human
cccgaguagcugggacuacag

SEQ ID NO: 3313683 - RNA, 20 nt, Human
cccgcugucagccauuccug

SEQ ID NO: 3313684 - RNA, 19 nt, Human
cccgcugucagccauuccu

SEQ ID NO: 3313685 - RNA, 22 nt, Human
cccgcccaggcuuagucacuga

SEQ ID NO: 3313686 - RNA, 22 nt, Human
cccgaguagcugggacuacagg

SEQ ID NO: 3313687 - RNA, 12 nt, Human
cccgggcucugc

SEQ ID NO: 3313688 - RNA, 15 nt, Human
cccgggcucugccuc

SEQ ID NO: 3313689 - RNA, 14 nt, Human
cccgggcucugccu

SEQ ID NO: 3313690 - RNA, 15 nt, Human
cccugguggcagcuc

SEQ ID NO: 3313691 - RNA, 17 nt, Human
cccugguggcagcucac

SEQ ID NO: 3313692 - RNA, 16 nt, Human
cccugguggcagcuca

SEQ ID NO: 3313693 - RNA, 21 nt, Human
cccugcuggguguggcgcagc

SEQ ID NO: 3313694 - RNA, 16 nt, Human
cccugcuggguguggc

SEQ ID NO: 3313695 - RNA, 18 nt, Human
cccugcccaccuggccuc

SEQ ID NO: 3313696 - RNA, 17 nt, Human
cccugcccaccuggccu

SEQ ID NO: 3313697 - RNA, 14 nt, Human
cccugcccaccugg

SEQ ID NO: 3313698 - RNA, 13 nt, Human
cccugcccaccug

SEQ ID NO: 3313699 - RNA, 12 nt, Human
cccugcacuugc

SEQ ID NO: 3313700 - RNA, 19 nt, Human
cccugcacuugcagacucu

SEQ ID NO: 3313701 - RNA, 23 nt, Human
cccugaggcccagagggccugca

SEQ ID NO: 3313702 - RNA, 20 nt, Human
cccugaggcccagagggccu

SEQ ID NO: 3313703 - RNA, 19 nt, Human
cccugaggcccagagggcc

SEQ ID NO: 3313704 - RNA, 18 nt, Human
cccugaggcccagagggc

SEQ ID NO: 3313705 - RNA, 17 nt, Human
cccugaggcccagaggg

SEQ ID NO: 3313706 - RNA, 16 nt, Human
cccugaggcccagagg

SEQ ID NO: 3313707 - RNA, 15 nt, Human
cccugaggcccagag

SEQ ID NO: 3313708 - RNA, 14 nt, Human
cccugaggcccaga

SEQ ID NO: 3313709 - RNA, 15 nt, Human
cccugaaagcccuga

SEQ ID NO: 3313710 - RNA, 13 nt, Human
cccugaggcccag

SEQ ID NO: 3313711 - RNA, 16 nt, Human
cccucuggggcuguuc

SEQ ID NO: 3313712 - RNA, 12 nt, Human
cccucuggggcu

SEQ ID NO: 3313713 - RNA, 20 nt, Human
ccgggcgcgguggcucacgc

SEQ ID NO: 3313714 - RNA, 22 nt, Human
ccgggcucugccucccaucacc

SEQ ID NO: 3313715 - RNA, 20 nt, Human
ccgggaagggggcugggaca

SEQ ID NO: 3313716 - RNA, 19 nt, Human
ccgcuuucuacccagcgag

SEQ ID NO: 3313717 - RNA, 15 nt, Human
ccggcuggccuggcc

SEQ ID NO: 3313718 - RNA, 18 nt, Human
ccggcuggccuggccccu

SEQ ID NO: 3313719 - RNA, 17 nt, Human
ccggcuggccuggcccc

SEQ ID NO: 3313720 - RNA, 12 nt, Human
ccgcuuucuacc

SEQ ID NO: 3313721 - RNA, 14 nt, Human
ccgaggccuucucu

SEQ ID NO: 3313722 - RNA, 20 nt, Human
ccgaguagcugggacuacag

SEQ ID NO: 3313723 - RNA, 16 nt, Human
ccgaguagcugggacu

SEQ ID NO: 3313724 - RNA, 17 nt, Human
ccgaguagcugggacua

SEQ ID NO: 3313725 - RNA, 14 nt, Human
ccgcacugggcuug

SEQ ID NO: 3313726 - RNA, 21 nt, Human
ccgcuaagagggagggagggc

SEQ ID NO: 3313727 - RNA, 23 nt, Human
ccgcuaagagggagggagggcuc

SEQ ID NO: 3313728 - RNA, 22 nt, Human
ccuauauuguuuucaguguaca

SEQ ID NO: 3313729 - RNA, 18 nt, Human
ccuauauuguuuucagug

SEQ ID NO: 3313730 - RNA, 23 nt, Human
ccuaguuccaccaucaagccacc

SEQ ID NO: 3313731 - RNA, 21 nt, Human
ccuaguuccaccaucaagcca

SEQ ID NO: 3313732 - RNA, 13 nt, Human
ccuaguuccacca

SEQ ID NO: 3313733 - RNA, 14 nt, Human
ccuaaaguguauuu

SEQ ID NO: 3313734 - RNA, 22 nt, Human
ccuccaggugcacaagcuccaa

SEQ ID NO: 3313735 - RNA, 21 nt, Human
ccuccaggugcacaagcucca

SEQ ID NO: 3313736 - RNA, 19 nt, Human
ccuccaggugcacaagcuc

SEQ ID NO: 3313737 - RNA, 23 nt, Human
ccuccaugugggcuaguugggcu

SEQ ID NO: 3313738 - RNA, 15 nt, Human
ccucccaaagugcug

SEQ ID NO: 3313739 - RNA, 19 nt, Human
ccucagucuggcccuuccu

SEQ ID NO: 3313740 - RNA, 11 nt, Human
ccucagugcca

SEQ ID NO: 3313741 - RNA, 12 nt, Human
ccucauacccac

SEQ ID NO: 3313742 - RNA, 20 nt, Human
ccucagucuggcccuuccuu

SEQ ID NO: 3313743 - RNA, 20 nt, Human
ccucauaguaugguggcugg

SEQ ID NO: 3313744 - RNA, 13 nt, Human
ccucauacccacc

SEQ ID NO: 3313745 - RNA, 21 nt, Human
ccucauaguaugguggcuggg

SEQ ID NO: 3313746 - RNA, 22 nt, Human
ccucauaguaugguggcugggu

SEQ ID NO: 3313747 - RNA, 14 nt, Human
ccucaucaccaacg

SEQ ID NO: 3313748 - RNA, 13 nt, Human
ccucaucaccaac

SEQ ID NO: 3313749 - RNA, 20 nt, Human
ccucauccucauacccaccc

SEQ ID NO: 3313750 - RNA, 13 nt, Human
ccucauccucaua

SEQ ID NO: 3313751 - RNA, 16 nt, Human
ccucuaggaggucucu

SEQ ID NO: 3313752 - RNA, 14 nt, Human
ccucgguguggaga

SEQ ID NO: 3313753 - RNA, 16 nt, Human
ccucggugccuuccuc

SEQ ID NO: 3313754 - RNA, 13 nt, Human
ccuccugccucga

SEQ ID NO: 3313755 - RNA, 23 nt, Human
ccuccugccucgaacuggcugca

SEQ ID NO: 3313756 - RNA, 14 nt, Human
ccuccugggcuaag

SEQ ID NO: 3313757 - RNA, 19 nt, Human
ccucccgaguagcugggac

SEQ ID NO: 3313758 - RNA, 20 nt, Human
ccucccgaguagcugggacu

SEQ ID NO: 3313759 - RNA, 21 nt, Human
ccucccgaguagcugggacua

SEQ ID NO: 3313760 - RNA, 14 nt, Human
ccuccucagaucuu

SEQ ID NO: 3313761 - RNA, 10 nt, Human
ccucccuccc

SEQ ID NO: 3313762 - RNA, 17 nt, Human
ccucccgaauagcuggg

SEQ ID NO: 3313763 - RNA, 18 nt, Human
ccuucgcuccugugucuu

SEQ ID NO: 3313764 - RNA, 22 nt, Human
ccuucauuuggcauuccccacu

SEQ ID NO: 3313765 - RNA, 17 nt, Human
ccuucacagaugggugc

SEQ ID NO: 3313766 - RNA, 20 nt, Human
ccuucaccuuuguccccacc

SEQ ID NO: 3313767 - RNA, 19 nt, Human
ccuucaccuuuguccccac

SEQ ID NO: 3313768 - RNA, 21 nt, Human
ccuucaccuuuguccccaccg

SEQ ID NO: 3313769 - RNA, 10 nt, Human
ccuucagugc

SEQ ID NO: 3313770 - RNA, 11 nt, Human
ccuucagugcc

SEQ ID NO: 3313771 - RNA, 14 nt, Human
ccuucagugccaaa

SEQ ID NO: 3313772 - RNA, 19 nt, Human
ccuucauuuggcauucccc

SEQ ID NO: 3313773 - RNA, 19 nt, Human
ccuugaacuuugaccucug

SEQ ID NO: 3313774 - RNA, 23 nt, Human
ccuugaccauucuccaccugcca

SEQ ID NO: 3313775 - RNA, 22 nt, Human
ccuugaccauucuccaccugcc

SEQ ID NO: 3313776 - RNA, 13 nt, Human
ccuugacucuuuc

SEQ ID NO: 3313777 - RNA, 15 nt, Human
ccuucggcgccuuaa

SEQ ID NO: 3313778 - RNA, 19 nt, Human
ccuucuccuucaccuuugu

SEQ ID NO: 3313779 - RNA, 15 nt, Human
ccuucuccuucaccu

SEQ ID NO: 3313780 - RNA, 18 nt, Human
ccuuugacgccaucccag

SEQ ID NO: 3313781 - RNA, 17 nt, Human
ccuuugacgccauccca

SEQ ID NO: 3313782 - RNA, 16 nt, Human
ccuuugacgccauccc

SEQ ID NO: 3313783 - RNA, 21 nt, Human
ccuuggugucgggcaugacac

SEQ ID NO: 3313784 - RNA, 22 nt, Human
ccuuggugucgggcaugacacg

SEQ ID NO: 3313785 - RNA, 22 nt, Human
ccuugguuaggcauugugggaa

SEQ ID NO: 3313786 - RNA, 21 nt, Human
ccuugguuaggcauuguggga

SEQ ID NO: 3313787 - RNA, 20 nt, Human
ccuuacacaaugguuuucuu

SEQ ID NO: 3313788 - RNA, 14 nt, Human
ccuuacacaauggu

SEQ ID NO: 3313789 - RNA, 17 nt, Human
ccuuagaagucacacag

SEQ ID NO: 3313790 - RNA, 18 nt, Human
ccuuagaagucacacagu

SEQ ID NO: 3313791 - RNA, 19 nt, Human
ccuuaccugccaggaagcc

SEQ ID NO: 3313792 - RNA, 14 nt, Human
ccuuaccugccagg

SEQ ID NO: 3313793 - RNA, 20 nt, Human
ccuuaccagcagagcaccuu

SEQ ID NO: 3313794 - RNA, 17 nt, Human
ccuuaccagcagagcac

SEQ ID NO: 3313795 - RNA, 15 nt, Human
ccuuacccucauguu

SEQ ID NO: 3313796 - RNA, 23 nt, Human
ccuguugggccaggagccuccug

SEQ ID NO: 3313797 - RNA, 16 nt, Human
ccuguuucugcagcca

SEQ ID NO: 3313798 - RNA, 18 nt, Human
ccuguuuguuucugaaag

SEQ ID NO: 3313799 - RNA, 14 nt, Human
ccuguuuguuucug

SEQ ID NO: 3313800 - RNA, 17 nt, Human
ccugugucuugcaaugg

SEQ ID NO: 3313801 - RNA, 19 nt, Human
ccugugucuugcaauggca

SEQ ID NO: 3313802 - RNA, 21 nt, Human
ccugugucuugcaauggcagc

SEQ ID NO: 3313803 - RNA, 22 nt, Human
ccugugucuugcaauggcagcc

SEQ ID NO: 3313804 - RNA, 20 nt, Human
ccugugugugcgccuacagg

SEQ ID NO: 3313805 - RNA, 21 nt, Human
ccugugugugcgccuacagga

SEQ ID NO: 3313806 - RNA, 20 nt, Human
cgagauugcaccacugcacu

SEQ ID NO: 3313807 - RNA, 18 nt, Human
cgagaucacgccacugca

SEQ ID NO: 3313808 - RNA, 20 nt, Human
cgagaucacgccacugcacu

SEQ ID NO: 3313809 - RNA, 20 nt, Human
cgagcaggcuucuucccccc

SEQ ID NO: 3313810 - RNA, 17 nt, Human
cgagcaugccuggaugg

SEQ ID NO: 3313811 - RNA, 16 nt, Human
cgagcaugccuggaug

SEQ ID NO: 3313812 - RNA, 13 nt, Human
cgagcaugccugg

SEQ ID NO: 3313813 - RNA, 14 nt, Human
cgagcaugccugga

SEQ ID NO: 3313814 - RNA, 13 nt, Human
cgaauagcuggga

SEQ ID NO: 3313815 - RNA, 14 nt, Human
cgaauagcugggac

SEQ ID NO: 3313816 - RNA, 17 nt, Human
cgagaucacgccacugc

SEQ ID NO: 3313817 - RNA, 18 nt, Human
cgagauagccaaggccaa

SEQ ID NO: 3313818 - RNA, 12 nt, Human
cgaacuggcugc

SEQ ID NO: 3313819 - RNA, 14 nt, Human
cgaacuggcugcaa

SEQ ID NO: 3313820 - RNA, 19 nt, Human
cgaaagggacuuggaagcu

SEQ ID NO: 3313821 - RNA, 20 nt, Human
cgaaaggaugaaagugacca

SEQ ID NO: 3313822 - RNA, 22 nt, Human
cgaaagggacuuggaagcuccg

SEQ ID NO: 3313823 - RNA, 23 nt, Human
cgaacauguuuuucuucucccuc

SEQ ID NO: 3313824 - RNA, 12 nt, Human
cgaaagaacagu

SEQ ID NO: 3313825 - RNA, 21 nt, Human
cgaaagaacaguccauugaaa

SEQ ID NO: 3313826 - RNA, 20 nt, Human
cgaaaacguggcugcuucaa

SEQ ID NO: 3313827 - RNA, 15 nt, Human
cgaaaacguggcugc

SEQ ID NO: 3313828 - RNA, 19 nt, Human
cgaaaacguggcugcuuca

SEQ ID NO: 3313829 - RNA, 18 nt, Human
cgaaaacguggcugcuuc

SEQ ID NO: 3313830 - RNA, 22 nt, Human
ccuuugacgccaucccagcccc

SEQ ID NO: 3313831 - RNA, 21 nt, Human
ccuuugacgccaucccagccc

SEQ ID NO: 3313832 - RNA, 20 nt, Human
ccuuugacgccaucccagcc

SEQ ID NO: 3313833 - RNA, 15 nt, Human
cgagcccugguggca

SEQ ID NO: 3313834 - RNA, 16 nt, Human
cgagcccugguggcag

SEQ ID NO: 3313835 - RNA, 18 nt, Human
cgagcaugccuggauggg

SEQ ID NO: 3313836 - RNA, 20 nt, Human
cgauuucuguuuagauaaua

SEQ ID NO: 3313837 - RNA, 14 nt, Human
cgcagcccugcaga

SEQ ID NO: 3313838 - RNA, 16 nt, Human
cgcagacaggaccagg

SEQ ID NO: 3313839 - RNA, 15 nt, Human
cgcagacaggaccag

SEQ ID NO: 3313840 - RNA, 22 nt, Human
cgccaggggaaaaucagccugc

SEQ ID NO: 3313841 - RNA, 21 nt, Human
cgccagauucuuuccugaggc

SEQ ID NO: 3313842 - RNA, 20 nt, Human
cgccagauucuuuccugagg

SEQ ID NO: 3313843 - RNA, 19 nt, Human
cgccagauucuuuccugag

SEQ ID NO: 3313844 - RNA, 17 nt, Human
cgccagauucuuuccug

SEQ ID NO: 3313845 - RNA, 17 nt, Human
cgccaugcuccuggccc

SEQ ID NO: 3313846 - RNA, 14 nt, Human
ccugagcuuucugc

SEQ ID NO: 3313847 - RNA, 20 nt, Human
ccugagccagauuucacucu

SEQ ID NO: 3313848 - RNA, 16 nt, Human
ccugagcuuucugcua

SEQ ID NO: 3313849 - RNA, 18 nt, Human
ccugaggcccagagggcc

SEQ ID NO: 3313850 - RNA, 21 nt, Human
ccugaggcccagagggccugc

SEQ ID NO: 3313851 - RNA, 23 nt, Human
ccugacaacacucauugaccuga

SEQ ID NO: 3313852 - RNA, 14 nt, Human
ccugcaagaacaag

SEQ ID NO: 3313853 - RNA, 23 nt, Human
ccugcaggcagccaggccacaag

SEQ ID NO: 3313854 - RNA, 15 nt, Human
ccugauugugucucu

SEQ ID NO: 3313855 - RNA, 21 nt, Human
ccugaugcuucuucagagacu

SEQ ID NO: 3313856 - RNA, 20 nt, Human
ccugaugcuucuucagagac

SEQ ID NO: 3313857 - RNA, 19 nt, Human
ccugaugcuucuucagaga

SEQ ID NO: 3313858 - RNA, 12 nt, Human
ccugaggcccuu

SEQ ID NO: 3313859 - RNA, 11 nt, Human
ccugaggcccu

SEQ ID NO: 3313860 - RNA, 17 nt, Human
ccugauugugucucuug

SEQ ID NO: 3313861 - RNA, 21 nt, Human
ccugcaaccugauugugucuc

SEQ ID NO: 3313862 - RNA, 22 nt, Human
ccugcaaccugauugugucucu

SEQ ID NO: 3313863 - RNA, 16 nt, Human
ccugccagggacagag

SEQ ID NO: 3313864 - RNA, 15 nt, Human
ccugccagggacaga

SEQ ID NO: 3313865 - RNA, 14 nt, Human
ccugccagggacag

SEQ ID NO: 3313866 - RNA, 13 nt, Human
ccugccagggaca

SEQ ID NO: 3313867 - RNA, 12 nt, Human
ccugccagggac

SEQ ID NO: 3313868 - RNA, 22 nt, Human
ccugccaggaagccagcaggcu

SEQ ID NO: 3313869 - RNA, 21 nt, Human
ccugccaggaagccagcaggc

SEQ ID NO: 3313870 - RNA, 19 nt, Human
ccugccaggaagccagcag

SEQ ID NO: 3313871 - RNA, 18 nt, Human
ccugccaggaagccagca

SEQ ID NO: 3313872 - RNA, 11 nt, Human
ccugccaggga

SEQ ID NO: 3313873 - RNA, 16 nt, Human
ccugccaggcauggug

SEQ ID NO: 3313874 - RNA, 23 nt, Human
ccugccaggaagccagcaggcuc

SEQ ID NO: 3313875 - RNA, 15 nt, Human
ccugccaggcauggu

SEQ ID NO: 3313876 - RNA, 17 nt, Human
ccugccaggaagccagc

SEQ ID NO: 3313877 - RNA, 15 nt, Human
ccugccaggaagcca

SEQ ID NO: 3313878 - RNA, 14 nt, Human
ccugccaggaagcc

SEQ ID NO: 3313879 - RNA, 13 nt, Human
ccugccaggaagc

SEQ ID NO: 3313880 - RNA, 22 nt, Human
ccuggcacccggccccugcugg

SEQ ID NO: 3313881 - RNA, 21 nt, Human
ccuggcacccggccccugcug

SEQ ID NO: 3313882 - RNA, 23 nt, Human
ccuggcacccggccccugcuggu

SEQ ID NO: 3313883 - RNA, 13 nt, Human
ccuggcagccccu

SEQ ID NO: 3313884 - RNA, 12 nt, Human
ccuggcagcccc

SEQ ID NO: 3313885 - RNA, 18 nt, Human
ccuggaauauauaaccag

SEQ ID NO: 3313886 - RNA, 15 nt, Human
ccuggccagaugcac

SEQ ID NO: 3313887 - RNA, 14 nt, Human
ccugcuucaaauau

SEQ ID NO: 3313888 - RNA, 21 nt, Human
ccugcucuccgaccagacacc

SEQ ID NO: 3313889 - RNA, 22 nt, Human
ccugcggugcuaucucccccag

SEQ ID NO: 3313890 - RNA, 22 nt, Human
ccugcucuccgaccagacaccu

SEQ ID NO: 3313891 - RNA, 17 nt, Human
ccugcggugcuaucucc

SEQ ID NO: 3313892 - RNA, 16 nt, Human
ccugcggugcuaucuc

SEQ ID NO: 3313893 - RNA, 22 nt, Human
ccugccccucaacucuccucca

SEQ ID NO: 3313894 - RNA, 23 nt, Human
ccugccuguugggccaggagccu

SEQ ID NO: 3313895 - RNA, 17 nt, Human
ccauguuggccaggcug

SEQ ID NO: 3313896 - RNA, 16 nt, Human
ccauguuggccaggcu

SEQ ID NO: 3313897 - RNA, 18 nt, Human
ccauucuccaccugccag

SEQ ID NO: 3313898 - RNA, 19 nt, Human
ccauauucuguuggccagu

SEQ ID NO: 3313899 - RNA, 22 nt, Human
cccaaauggaaaugggcagagc

SEQ ID NO: 3313900 - RNA, 18 nt, Human
cccaaauggaaaugggca

SEQ ID NO: 3313901 - RNA, 16 nt, Human
cccaaagugcugggau

SEQ ID NO: 3313902 - RNA, 13 nt, Human
cccaaagugcugg

SEQ ID NO: 3313903 - RNA, 15 nt, Human
cccaaagugcuggga

SEQ ID NO: 3313904 - RNA, 18 nt, Human
cccaaaacucuccucugc

SEQ ID NO: 3313905 - RNA, 16 nt, Human
cccaaaacucuccucu

SEQ ID NO: 3313906 - RNA, 16 nt, Human
cccaaagcagugcaug

SEQ ID NO: 3313907 - RNA, 20 nt, Human
ccauucuccaccugccaggg

SEQ ID NO: 3313908 - RNA, 19 nt, Human
ccauucuccaccugccagg

SEQ ID NO: 3313909 - RNA, 14 nt, Human
ccauuuguguuuau

SEQ ID NO: 3313910 - RNA, 16 nt, Human
ccaggagccccgaggc

SEQ ID NO: 3313911 - RNA, 19 nt, Human
ccaggagccccgaggccuu

SEQ ID NO: 3313912 - RNA, 19 nt, Human
ccaggagccuccugcccuu

SEQ ID NO: 3313913 - RNA, 20 nt, Human
ccaggagccccgaggccuuc

SEQ ID NO: 3313914 - RNA, 21 nt, Human
ccaggcauuccccaggaggcc

SEQ ID NO: 3313915 - RNA, 19 nt, Human
ccaggcauuccccaggagg

SEQ ID NO: 3313916 - RNA, 18 nt, Human
ccaggcauuccccaggag

SEQ ID NO: 3313917 - RNA, 17 nt, Human
ccaggcauuccccagga

SEQ ID NO: 3313918 - RNA, 24 nt, Human
ccaggcuguaucccaugagccuca

SEQ ID NO: 3313919 - RNA, 17 nt, Human
ccaggcuuagucacuga

SEQ ID NO: 3313920 - RNA, 23 nt, Human
ccaggcccucugcccacucccug

SEQ ID NO: 3313921 - RNA, 22 nt, Human
ccaggcccucugcccacucccu

SEQ ID NO: 3313922 - RNA, 21 nt, Human
ccaggcccucugcccacuccc

SEQ ID NO: 3313923 - RNA, 20 nt, Human
ccaggcccucugcccacucc

SEQ ID NO: 3313924 - RNA, 15 nt, Human
ccagguucagcuugu

SEQ ID NO: 3313925 - RNA, 17 nt, Human
ccagguuuuuggucuga

SEQ ID NO: 3313926 - RNA, 19 nt, Human
ccagucuggaaugcagugg

SEQ ID NO: 3313927 - RNA, 20 nt, Human
ccagucuggaaugcaguggu

SEQ ID NO: 3313928 - RNA, 13 nt, Human
ccagugaggcucu

SEQ ID NO: 3313929 - RNA, 18 nt, Human
ccagucuggaaugcagug

SEQ ID NO: 3313930 - RNA, 18 nt, Human
ccaggugcacaagcucca

SEQ ID NO: 3313931 - RNA, 20 nt, Human
ccaggugcacaagcuccaag

SEQ ID NO: 3313932 - RNA, 19 nt, Human
ccaggugcacaagcuccaa

SEQ ID NO: 3313933 - RNA, 21 nt, Human
ccagggacagaggggguggcc

SEQ ID NO: 3313934 - RNA, 15 nt, Human
ccagggacagagggg

SEQ ID NO: 3313935 - RNA, 14 nt, Human
ccagggacagaggg

SEQ ID NO: 3313936 - RNA, 20 nt, Human
ccaggcuuagucacugagac

SEQ ID NO: 3313937 - RNA, 23 nt, Human
ccauauucuguuggccaguguga

SEQ ID NO: 3313938 - RNA, 22 nt, Human
ccaguguuguggauuuaacaga

SEQ ID NO: 3313939 - RNA, 23 nt, Human
ccagugcccacaggaucagucug

SEQ ID NO: 3313940 - RNA, 16 nt, Human
ccagugaggcucugcc

SEQ ID NO: 3313941 - RNA, 15 nt, Human
ccagugaggcucugc

SEQ ID NO: 3313942 - RNA, 14 nt, Human
ccagugaggcucug

SEQ ID NO: 3313943 - RNA, 22 nt, Human
ccagugguuccuaauccucuag

SEQ ID NO: 3313944 - RNA, 20 nt, Human
ccagugccgagaaggaagcc

SEQ ID NO: 3313945 - RNA, 15 nt, Human
ccagccaaagccucc

SEQ ID NO: 3313946 - RNA, 19 nt, Human
ccagccaaagccuccucca

SEQ ID NO: 3313947 - RNA, 18 nt, Human
ccagccaaagccuccucc

SEQ ID NO: 3313948 - RNA, 13 nt, Human
ccagccccagugc

SEQ ID NO: 3313949 - RNA, 15 nt, Human
ccagccccagugccc

SEQ ID NO: 3313950 - RNA, 19 nt, Human
ccagccccaaaacucuccu

SEQ ID NO: 3313951 - RNA, 23 nt, Human
ccagccccaaaacucuccucugc

SEQ ID NO: 3313952 - RNA, 16 nt, Human
ccagccccagugccca

SEQ ID NO: 3313953 - RNA, 16 nt, Human
ccagcccuuagcaggg

SEQ ID NO: 3313954 - RNA, 17 nt, Human
ccagcccuuagcaggga

SEQ ID NO: 3313955 - RNA, 23 nt, Human
ccagccgagauagccaaggccaa

SEQ ID NO: 3313956 - RNA, 14 nt, Human
ccagccgccaugcu

SEQ ID NO: 3313957 - RNA, 18 nt, Human
ccagccgccaugcuccug

SEQ ID NO: 3313958 - RNA, 15 nt, Human
ccagcaagugagagc

SEQ ID NO: 3313959 - RNA, 14 nt, Human
ccagauuucacucu

SEQ ID NO: 3313960 - RNA, 20 nt, Human
ccagcaagugagagcugggu

SEQ ID NO: 3313961 - RNA, 21 nt, Human
ccagcaagugagagcugggug

SEQ ID NO: 3313962 - RNA, 22 nt, Human
ccagcaagugagagcugggugu

SEQ ID NO: 3313963 - RNA, 11 nt, Human
ccagagcugcc

SEQ ID NO: 3313964 - RNA, 13 nt, Human
ccagagcugccac

SEQ ID NO: 3313965 - RNA, 12 nt, Human
ccagagcugcca

SEQ ID NO: 3313966 - RNA, 19 nt, Human
ccagagcugccaccugccu

SEQ ID NO: 3313967 - RNA, 16 nt, Human
ccagagcugccaccug

SEQ ID NO: 3313968 - RNA, 15 nt, Human
ccagagcugccaccu

SEQ ID NO: 3313969 - RNA, 14 nt, Human
ccagagcugccacc

SEQ ID NO: 3313970 - RNA, 16 nt, Human
ccagagggagugacag

SEQ ID NO: 3313971 - RNA, 17 nt, Human
ccagagggagugacaga

SEQ ID NO: 3313972 - RNA, 18 nt, Human
ccagagggagugacagag

SEQ ID NO: 3313973 - RNA, 19 nt, Human
ccagagggagugacagagg

SEQ ID NO: 3313974 - RNA, 20 nt, Human
ccagagggagugacagaggc

SEQ ID NO: 3313975 - RNA, 21 nt, Human
ccagagggagugacagaggca

SEQ ID NO: 3313976 - RNA, 21 nt, Human
ccagaggagagaggacccccu

SEQ ID NO: 3313977 - RNA, 22 nt, Human
ccagaggagagaggacccccug

SEQ ID NO: 3313978 - RNA, 17 nt, Human
ccagacaccuugacagg

SEQ ID NO: 3313979 - RNA, 19 nt, Human
ccagacaccuugacagggc

SEQ ID NO: 3313980 - RNA, 21 nt, Human
ccagagaggguggugaccucu

SEQ ID NO: 3313981 - RNA, 23 nt, Human
ccagagaggguggugaccucugc

SEQ ID NO: 3313982 - RNA, 14 nt, Human
ccagagaggguggu

SEQ ID NO: 3313983 - RNA, 13 nt, Human
ccagagagggugg

SEQ ID NO: 3313984 - RNA, 18 nt, Human
ccagauucuuuccugagg

SEQ ID NO: 3313985 - RNA, 22 nt, Human
ccagauucuuuccugaggcugg

SEQ ID NO: 3313986 - RNA, 21 nt, Human
ccagauucuuuccugaggcug

SEQ ID NO: 3313987 - RNA, 20 nt, Human
ccagauucuuuccugaggcu

SEQ ID NO: 3313988 - RNA, 19 nt, Human
ccagauucuuuccugaggc

SEQ ID NO: 3313989 - RNA, 13 nt, Human
ccagagggccugc

SEQ ID NO: 3313990 - RNA, 22 nt, Human
ccagagggagugacagaggcag

SEQ ID NO: 3313991 - RNA, 23 nt, Human
ccagagggagugacagaggcagc

SEQ ID NO: 3313992 - RNA, 23 nt, Human
ccagaugcaccagcccuuagcag

SEQ ID NO: 3313993 - RNA, 16 nt, Human
ccagagggccugcaag

SEQ ID NO: 3313994 - RNA, 15 nt, Human
ccagagggccugcaa

SEQ ID NO: 3313995 - RNA, 19 nt, Human
ccagauugcaacaggcugg

SEQ ID NO: 3313996 - RNA, 20 nt, Human
ccagauugcaacaggcuggg

SEQ ID NO: 3313997 - RNA, 23 nt, Human
ccagauucuuuccugaggcuggg

SEQ ID NO: 3313998 - RNA, 18 nt, Human
ccagauugcaacaggcug

SEQ ID NO: 3313999 - RNA, 21 nt, Human
ccagauugcaacaggcugggc

SEQ ID NO: 3314000 - RNA, 12 nt, Human
ccagauuucacu

SEQ ID NO: 3314001 - RNA, 17 nt, Human
ccaccucccacaaagga

SEQ ID NO: 3314002 - RNA, 16 nt, Human
ccaccugccagggaca

SEQ ID NO: 3314003 - RNA, 20 nt, Human
ccaccugccuguugggccag

SEQ ID NO: 3314004 - RNA, 17 nt, Human
ccaccugccuguugggc

SEQ ID NO: 3314005 - RNA, 16 nt, Human
ccaccuggccucugca

SEQ ID NO: 3314006 - RNA, 15 nt, Human
ccaccuggccucugc

SEQ ID NO: 3314007 - RNA, 22 nt, Human
ccaccugcggugcuaucucccc

SEQ ID NO: 3314008 - RNA, 19 nt, Human
ccacgcuggagugcaguga

SEQ ID NO: 3314009 - RNA, 14 nt, Human
ccaccuggccucug

SEQ ID NO: 3314010 - RNA, 17 nt, Human
ccaccuggccucugcac

SEQ ID NO: 3314011 - RNA, 12 nt, Human
ccacggccaggc

SEQ ID NO: 3314012 - RNA, 13 nt, Human
ccacggccaggcc

SEQ ID NO: 3314013 - RNA, 14 nt, Human
ccacggccaggcca

SEQ ID NO: 3314014 - RNA, 15 nt, Human
ccacggccaggccag

SEQ ID NO: 3314015 - RNA, 12 nt, Human
ccacccaggagc

SEQ ID NO: 3314016 - RNA, 14 nt, Human
ccacccaggagccc

SEQ ID NO: 3314017 - RNA, 12 nt, Human
ccaccucagccu

SEQ ID NO: 3314018 - RNA, 17 nt, Human
ccacccugaaagcccug

SEQ ID NO: 3314019 - RNA, 16 nt, Human
ccacccugaaagcccu

SEQ ID NO: 3314020 - RNA, 13 nt, Human
ccaccucagccuc

SEQ ID NO: 3314021 - RNA, 14 nt, Human
ccaccucagccucc

SEQ ID NO: 3314022 - RNA, 15 nt, Human
ccaccucagccuccc

SEQ ID NO: 3314023 - RNA, 18 nt, Human
ccacucaguccauagcag

SEQ ID NO: 3314024 - RNA, 13 nt, Human
ccacucccugcaa

SEQ ID NO: 3314025 - RNA, 12 nt, Human
ccacucccugca

SEQ ID NO: 3314026 - RNA, 23 nt, Human
ccacuacggaauaguuggcuagg

SEQ ID NO: 3314027 - RNA, 22 nt, Human
ccacuacggaauaguuggcuag

SEQ ID NO: 3314028 - RNA, 18 nt, Human
ccacuacauucuguuaau

SEQ ID NO: 3314029 - RNA, 18 nt, Human
ccacugcacuccagccug

SEQ ID NO: 3314030 - RNA, 15 nt, Human
ccacucccugcaacc

SEQ ID NO: 3314031 - RNA, 19 nt, Human
ccacugcacuccagccugg

SEQ ID NO: 3314032 - RNA, 20 nt, Human
ccacugcacuccagccuggg

SEQ ID NO: 3314033 - RNA, 16 nt, Human
ccacugcgaccacaag

SEQ ID NO: 3314034 - RNA, 13 nt, Human
ccacguuucuaaa

SEQ ID NO: 3314035 - RNA, 13 nt, Human
ccacacccagccc

SEQ ID NO: 3314036 - RNA, 14 nt, Human
ccacacccagccca

SEQ ID NO: 3314037 - RNA, 12 nt, Human
ccacacccagcc

SEQ ID NO: 3314038 - RNA, 18 nt, Human
ccaccaacauacucccau

SEQ ID NO: 3314039 - RNA, 14 nt, Human
ccaccaacauacuc

SEQ ID NO: 3314040 - RNA, 16 nt, Human
ccacaucuugcucugc

SEQ ID NO: 3314041 - RNA, 20 nt, Human
ccacaucuugcucugcugac

SEQ ID NO: 3314042 - RNA, 22 nt, Human
ccacaucuugcucugcugacag

SEQ ID NO: 3314043 - RNA, 23 nt, Human
ccacaucuugcucugcugacaga

SEQ ID NO: 3314044 - RNA, 14 nt, Human
ccacaucuugcucu

SEQ ID NO: 3314045 - RNA, 16 nt, Human
ccacccaccucagccu

SEQ ID NO: 3314046 - RNA, 14 nt, Human
ccacccaccucagc

SEQ ID NO: 3314047 - RNA, 15 nt, Human
ccacccaccucagcc

SEQ ID NO: 3314048 - RNA, 13 nt, Human
ccacccaccucag

SEQ ID NO: 3314049 - RNA, 22 nt, Human
ccacccaagggccuggccugag

SEQ ID NO: 3314050 - RNA, 21 nt, Human
ccacccaagggccuggccuga

SEQ ID NO: 3314051 - RNA, 20 nt, Human
ccacccaagggccuggccug

SEQ ID NO: 3314052 - RNA, 16 nt, Human
ccacccaagggccugg

SEQ ID NO: 3314053 - RNA, 19 nt, Human
ccacccaagggccuggccu

SEQ ID NO: 3314054 - RNA, 17 nt, Human
ccacccaagggccuggc

SEQ ID NO: 3314055 - RNA, 14 nt, Human
ccaccacacccagc

SEQ ID NO: 3314056 - RNA, 16 nt, Human
ccaccacacccagccc

SEQ ID NO: 3314057 - RNA, 20 nt, Human
ccaccaacauacucccaucu

SEQ ID NO: 3314058 - RNA, 13 nt, Human
caugagcaucagg

SEQ ID NO: 3314059 - RNA, 12 nt, Human
caugagccucag

SEQ ID NO: 3314060 - RNA, 15 nt, Human
caugagccucagcau

SEQ ID NO: 3314061 - RNA, 17 nt, Human
caugagccucagcaucc

SEQ ID NO: 3314062 - RNA, 18 nt, Human
caugagccucagcauccu

SEQ ID NO: 3314063 - RNA, 19 nt, Human
caugagccucagcauccug

SEQ ID NO: 3314064 - RNA, 20 nt, Human
caugagccucagcauccugg

SEQ ID NO: 3314065 - RNA, 21 nt, Human
caugagccucagcauccuggc

SEQ ID NO: 3314066 - RNA, 23 nt, Human
caugagcaucaggccaggcccuc

SEQ ID NO: 3314067 - RNA, 22 nt, Human
caugagcaucaggccaggcccu

SEQ ID NO: 3314068 - RNA, 21 nt, Human
caugagcaucaggccaggccc

SEQ ID NO: 3314069 - RNA, 20 nt, Human
caugagcaucaggccaggcc

SEQ ID NO: 3314070 - RNA, 18 nt, Human
caugagcaucaggccagg

SEQ ID NO: 3314071 - RNA, 17 nt, Human
caugagcaucaggccag

SEQ ID NO: 3314072 - RNA, 16 nt, Human
caugagcaucaggcca

SEQ ID NO: 3314073 - RNA, 15 nt, Human
caugagcaucaggcc

SEQ ID NO: 3314074 - RNA, 13 nt, Human
caugaguccccug

SEQ ID NO: 3314075 - RNA, 23 nt, Human
caugaguccccuguuuguuucug

SEQ ID NO: 3314076 - RNA, 15 nt, Human
caugaguccccuguu

SEQ ID NO: 3314077 - RNA, 14 nt, Human
caugaguccccugu

SEQ ID NO: 3314078 - RNA, 23 nt, Human
caugaggaacaaggcaaggcugu

SEQ ID NO: 3314079 - RNA, 22 nt, Human
caugagccucagcauccuggca

SEQ ID NO: 3314080 - RNA, 23 nt, Human
caugagccucagcauccuggcac

SEQ ID NO: 3314081 - RNA, 21 nt, Human
caugaggaacaaggcaaggcu

SEQ ID NO: 3314082 - RNA, 20 nt, Human
caugaggaacaaggcaaggc

SEQ ID NO: 3314083 - RNA, 17 nt, Human
caugaggaacaaggcaa

SEQ ID NO: 3314084 - RNA, 16 nt, Human
caugaggaacaaggca

SEQ ID NO: 3314085 - RNA, 13 nt, Human
caugaaaacacau

SEQ ID NO: 3314086 - RNA, 17 nt, Human
caugaaaacacauuuuu

SEQ ID NO: 3314087 - RNA, 16 nt, Human
caugaaaacacauuuu

SEQ ID NO: 3314088 - RNA, 15 nt, Human
caugaaaacacauuu

SEQ ID NO: 3314089 - RNA, 14 nt, Human
caugaaaacacauu

SEQ ID NO: 3314090 - RNA, 21 nt, Human
caugaaaacacauuuuucuua

SEQ ID NO: 3314091 - RNA, 19 nt, Human
caugaaaacacauuuuucu

SEQ ID NO: 3314092 - RNA, 12 nt, Human
caugaagacaga

SEQ ID NO: 3314093 - RNA, 16 nt, Human
caucucuacaaaaagc

SEQ ID NO: 3314094 - RNA, 15 nt, Human
caucucuccuccuuu

SEQ ID NO: 3314095 - RNA, 21 nt, Human
caucuugaauuguaaggaaug

SEQ ID NO: 3314096 - RNA, 16 nt, Human
caucuugaauuguaag

SEQ ID NO: 3314097 - RNA, 15 nt, Human
caucuugcucugcug

SEQ ID NO: 3314098 - RNA, 16 nt, Human
caucuugcucugcuga

SEQ ID NO: 3314099 - RNA, 17 nt, Human
caucuugcucugcugac

SEQ ID NO: 3314100 - RNA, 14 nt, Human
caucaugucuggcu

SEQ ID NO: 3314101 - RNA, 15 nt, Human
caucaugucuggcua

SEQ ID NO: 3314102 - RNA, 13 nt, Human
caucaugucuggc

SEQ ID NO: 3314103 - RNA, 16 nt, Human
caucauccuaagcuau

SEQ ID NO: 3314104 - RNA, 12 nt, Human
caucacccgcua

SEQ ID NO: 3314105 - RNA, 20 nt, Human
caucaccaacgucugugcca

SEQ ID NO: 3314106 - RNA, 17 nt, Human
cauccagguucagcuug

SEQ ID NO: 3314107 - RNA, 14 nt, Human
cauccacugugcca

SEQ ID NO: 3314108 - RNA, 17 nt, Human
cauccacugugccaugu

SEQ ID NO: 3314109 - RNA, 23 nt, Human
cauccacugugccaugugccagg

SEQ ID NO: 3314110 - RNA, 22 nt, Human
caucccugaaggccccgcccag

SEQ ID NO: 3314111 - RNA, 22 nt, Human
cauauucuguuggccaguguga

SEQ ID NO: 3314112 - RNA, 18 nt, Human
cauauucuguuggccagu

SEQ ID NO: 3314113 - RNA, 17 nt, Human
cauauugauuuccguua

SEQ ID NO: 3314114 - RNA, 21 nt, Human
cauauugauuuccguuaaaau

SEQ ID NO: 3314115 - RNA, 16 nt, Human
cauaguaugguggcug

SEQ ID NO: 3314116 - RNA, 15 nt, Human
cauaguaugguggcu

SEQ ID NO: 3314117 - RNA, 23 nt, Human
cauauaagauucauauuuacuuc

SEQ ID NO: 3314118 - RNA, 23 nt, Human
cauauauauguuuuaagaggcag

SEQ ID NO: 3314119 - RNA, 14 nt, Human
caucaacaucuugg

SEQ ID NO: 3314120 - RNA, 18 nt, Human
caugggccuccugugugu

SEQ ID NO: 3314121 - RNA, 18 nt, Human
cauggacaugaucuucuu

SEQ ID NO: 3314122 - RNA, 15 nt, Human
cauggacuuccacug

SEQ ID NO: 3314123 - RNA, 15 nt, Human
caugcugucccuuac

SEQ ID NO: 3314124 - RNA, 13 nt, Human
caugcugucccuu

SEQ ID NO: 3314125 - RNA, 12 nt, Human
caugucuggcua

SEQ ID NO: 3314126 - RNA, 15 nt, Human
caugugaugagagga

SEQ ID NO: 3314127 - RNA, 17 nt, Human
caugugaugagaggaaa

SEQ ID NO: 3314128 - RNA, 16 nt, Human
caugugaugagaggaa

SEQ ID NO: 3314129 - RNA, 20 nt, Human
caugugaugagaggaaauca

SEQ ID NO: 3314130 - RNA, 18 nt, Human
caugugaugagaggaaau

SEQ ID NO: 3314131 - RNA, 21 nt, Human
caugugaugagaggaaaucac

SEQ ID NO: 3314132 - RNA, 22 nt, Human
caugugccagguuuuuggucug

SEQ ID NO: 3314133 - RNA, 14 nt, Human
caugugcacaugca

SEQ ID NO: 3314134 - RNA, 23 nt, Human
cauggucggaaaacaugcuacac

SEQ ID NO: 3314135 - RNA, 19 nt, Human
cauggucggaaaacaugcu

SEQ ID NO: 3314136 - RNA, 17 nt, Human
cauggucggaaaacaug

SEQ ID NO: 3314137 - RNA, 18 nt, Human
cauguuuuucuucucccu

SEQ ID NO: 3314138 - RNA, 19 nt, Human
cauguuuuucuucucccuc

SEQ ID NO: 3314139 - RNA, 20 nt, Human
cauguuuuucuucucccuca

SEQ ID NO: 3314140 - RNA, 23 nt, Human
cauguuugauguaucugagcagg

SEQ ID NO: 3314141 - RNA, 14 nt, Human
cauguuugugauug

SEQ ID NO: 3314142 - RNA, 12 nt, Human
cauguuugugau

SEQ ID NO: 3314143 - RNA, 13 nt, Human
cauuccccaggag

SEQ ID NO: 3314144 - RNA, 17 nt, Human
cauuccccaggaggcca

SEQ ID NO: 3314145 - RNA, 15 nt, Human
cauuccccaggaggc

SEQ ID NO: 3314146 - RNA, 20 nt, Human
cauuccccaggaggccagcc

SEQ ID NO: 3314147 - RNA, 19 nt, Human
cauuccccaggaggccagc

SEQ ID NO: 3314148 - RNA, 18 nt, Human
cauuccccaggaggccag

SEQ ID NO: 3314149 - RNA, 23 nt, Human
cauucuucuguacgucugacagg

SEQ ID NO: 3314150 - RNA, 17 nt, Human
cauucuguuaaucauua

SEQ ID NO: 3314151 - RNA, 12 nt, Human
cauucugccugc

SEQ ID NO: 3314152 - RNA, 13 nt, Human
cauucugccugcc

SEQ ID NO: 3314153 - RNA, 15 nt, Human
cauucugccugccca

SEQ ID NO: 3314154 - RNA, 16 nt, Human
cauucugccugcccag

SEQ ID NO: 3314155 - RNA, 17 nt, Human
cauucugccugcccagg

SEQ ID NO: 3314156 - RNA, 18 nt, Human
cauucugccugcccaggc

SEQ ID NO: 3314157 - RNA, 19 nt, Human
cauucugccugcccaggcc

SEQ ID NO: 3314158 - RNA, 20 nt, Human
cauucugccugcccaggccc

SEQ ID NO: 3314159 - RNA, 23 nt, Human
cauuccugaugcuucuucagaga

SEQ ID NO: 3314160 - RNA, 22 nt, Human
cauuccugaugcuucuucagag

SEQ ID NO: 3314161 - RNA, 19 nt, Human
cauuccugaugcuucuuca

SEQ ID NO: 3314162 - RNA, 16 nt, Human
cauuccugaugcuucu

SEQ ID NO: 3314163 - RNA, 14 nt, Human
cauuccugaugcuu

SEQ ID NO: 3314164 - RNA, 13 nt, Human
cauugugggaagg

SEQ ID NO: 3314165 - RNA, 15 nt, Human
cauugugggaagggg

SEQ ID NO: 3314166 - RNA, 15 nt, Human
cauuuaaaaaaaauc

SEQ ID NO: 3314167 - RNA, 18 nt, Human
cauugaccugaggcccuu

SEQ ID NO: 3314168 - RNA, 14 nt, Human
cauugaccugaggc

SEQ ID NO: 3314169 - RNA, 17 nt, Human
cauugaccugaggcccu

SEQ ID NO: 3314170 - RNA, 15 nt, Human
cauugaccugaggcc

SEQ ID NO: 3314171 - RNA, 19 nt, Human
cauuugaaaauuuugaugu

SEQ ID NO: 3314172 - RNA, 17 nt, Human
cauuugaaaauuuugau

SEQ ID NO: 3314173 - RNA, 22 nt, Human
cauuugaggucuguucuuucca

SEQ ID NO: 3314174 - RNA, 13 nt, Human
cauuugcugaaua

SEQ ID NO: 3314175 - RNA, 22 nt, Human
cauuuuauuuuauuaugcauga

SEQ ID NO: 3314176 - RNA, 23 nt, Human
cauuuuauuuuauuaugcaugaa

SEQ ID NO: 3314177 - RNA, 21 nt, Human
cauuuuuaagugcugcauuua

SEQ ID NO: 3314178 - RNA, 17 nt, Human
cauuuuuaguagagaca

SEQ ID NO: 3314179 - RNA, 18 nt, Human
uuuuauuuuuagacagag

SEQ ID NO: 3314180 - RNA, 17 nt, Human
uuuucaaaauaaaaaug

SEQ ID NO: 3314181 - RNA, 19 nt, Human
uuuuaucgucacugcuuaa

SEQ ID NO: 3314182 - RNA, 21 nt, Human
uuuuauacauaaacaagacca

SEQ ID NO: 3314183 - RNA, 13 nt, Human
uuuuauacauaaa

SEQ ID NO: 3314184 - RNA, 15 nt, Human
uuuuacuaauagaca

SEQ ID NO: 3314185 - RNA, 22 nt, Human
uuuucccuauuagagaagagau

SEQ ID NO: 3314186 - RNA, 18 nt, Human
uuuucccuauuagagaag

SEQ ID NO: 3314187 - RNA, 22 nt, Human
uuuucuacucgaguuacagaca

SEQ ID NO: 3314188 - RNA, 20 nt, Human
uuuucuacucgaguuacaga

SEQ ID NO: 3314189 - RNA, 13 nt, Human
uuuucuacucgag

SEQ ID NO: 3314190 - RNA, 13 nt, Human
uuuucuucucccu

SEQ ID NO: 3314191 - RNA, 22 nt, Human
uuuucuuguguguuuauuguca

SEQ ID NO: 3314192 - RNA, 15 nt, Human
uuuguauucucuccu

SEQ ID NO: 3314193 - RNA, 15 nt, Human
uuuguugucagcuga

SEQ ID NO: 3314194 - RNA, 22 nt, Human
uuuguuaguaugaggcauuugu

SEQ ID NO: 3314195 - RNA, 13 nt, Human
uuugagugccuua

SEQ ID NO: 3314196 - RNA, 17 nt, Human
uuuccguuaaaauacca

SEQ ID NO: 3314197 - RNA, 15 nt, Human
uuuccguuaaaauac

SEQ ID NO: 3314198 - RNA, 21 nt, Human
uuugagugccuuacacaaugg

SEQ ID NO: 3314199 - RNA, 12 nt, Human
uuuggaaaauaa

SEQ ID NO: 3314200 - RNA, 11 nt, Human
uuuuuaaaugc

SEQ ID NO: 3314201 - RNA, 12 nt, Human
uuuuuaagaaaa

SEQ ID NO: 3314202 - RNA, 17 nt, Human
uuuuuaagugcugcauu

SEQ ID NO: 3314203 - RNA, 16 nt, Human
uuuuuaagugcugcau

SEQ ID NO: 3314204 - RNA, 23 nt, Human
uuuuuaagugcugcauuuaaaag

SEQ ID NO: 3314205 - RNA, 22 nt, Human
uuuuuaagugcugcauuuaaaa

SEQ ID NO: 3314206 - RNA, 19 nt, Human
uuuuuaagugcugcauuua

SEQ ID NO: 3314207 - RNA, 18 nt, Human
uuuuuaagugcugcauuu

SEQ ID NO: 3314208 - RNA, 11 nt, Human
uuuuuuuacua

SEQ ID NO: 3314209 - RNA, 12 nt, Human
uuuuuuuuaaga

SEQ ID NO: 3314210 - RNA, 13 nt, Human
uuuuuuuugacaa

SEQ ID NO: 3314211 - RNA, 21 nt, Human
uugaccucaggugauccaccc

SEQ ID NO: 3314212 - RNA, 15 nt, Human
uugaccucugcagca

SEQ ID NO: 3314213 - RNA, 14 nt, Human
uugaccucugcagc

SEQ ID NO: 3314214 - RNA, 15 nt, Human
uugacgccaucccag

SEQ ID NO: 3314215 - RNA, 19 nt, Human
uugacgccaucccagcccc

SEQ ID NO: 3314216 - RNA, 18 nt, Human
uugacgccaucccagccc

SEQ ID NO: 3314217 - RNA, 17 nt, Human
uugacgccaucccagcc

SEQ ID NO: 3314218 - RNA, 18 nt, Human
uugaacuggguacuugug

SEQ ID NO: 3314219 - RNA, 14 nt, Human
uugaauuguaagga

SEQ ID NO: 3314220 - RNA, 23 nt, Human
uugauagcacagacccugcccug

SEQ ID NO: 3314221 - RNA, 13 nt, Human
uugaggguugggc

SEQ ID NO: 3314222 - RNA, 16 nt, Human
uugaggguugggcugg

SEQ ID NO: 3314223 - RNA, 11 nt, Human
uugagccuggg

SEQ ID NO: 3314224 - RNA, 16 nt, Human
uugaugaucuuugcag

SEQ ID NO: 3314225 - RNA, 21 nt, Human
uugcaaaguaucccuacugua

SEQ ID NO: 3314226 - RNA, 15 nt, Human
uugaacuccuggccu

SEQ ID NO: 3314227 - RNA, 16 nt, Human
uugaacuccuggccuc

SEQ ID NO: 3314228 - RNA, 20 nt, Human
uugaaaaaccauuuugcugu

SEQ ID NO: 3314229 - RNA, 21 nt, Human
uucuuuccaaaguacacuguu

SEQ ID NO: 3314230 - RNA, 23 nt, Human
uugaaaacacuguucucugcccu

SEQ ID NO: 3314231 - RNA, 22 nt, Human
uugaaaacacuguucucugccc

SEQ ID NO: 3314232 - RNA, 21 nt, Human
uucuuauacauuugauaaagu

SEQ ID NO: 3314233 - RNA, 21 nt, Human
uucuuccacaagagcccaggc

SEQ ID NO: 3314234 - RNA, 12 nt, Human
uucuuucagcca

SEQ ID NO: 3314235 - RNA, 14 nt, Human
uucuuuccaaagua

SEQ ID NO: 3314236 - RNA, 21 nt, Human
uucuuguguguuuauugucaa

SEQ ID NO: 3314237 - RNA, 13 nt, Human
uucuuccucccuc

SEQ ID NO: 3314238 - RNA, 14 nt, Human
uucuuguguguuua

SEQ ID NO: 3314239 - RNA, 19 nt, Human
uucugcuucagccucccga

SEQ ID NO: 3314240 - RNA, 15 nt, Human
uucugcuucagccuc

SEQ ID NO: 3314241 - RNA, 16 nt, Human
uucugcuucagccucc

SEQ ID NO: 3314242 - RNA, 14 nt, Human
uucugcuucagccu

SEQ ID NO: 3314243 - RNA, 19 nt, Human
uucuguccuacucuguguc

SEQ ID NO: 3314244 - RNA, 18 nt, Human
uucuguauuuuguuuuug

SEQ ID NO: 3314245 - RNA, 20 nt, Human
uuccugaggcugggcucccu

SEQ ID NO: 3314246 - RNA, 15 nt, Human
uuccugaggcugggc

SEQ ID NO: 3314247 - RNA, 23 nt, Human
uuccugaugcuucuucagagacu

SEQ ID NO: 3314248 - RNA, 18 nt, Human
uuccugaagaauugaaaa

SEQ ID NO: 3314249 - RNA, 12 nt, Human
uuccauggccuc

SEQ ID NO: 3314250 - RNA, 16 nt, Human
uuccauggccucuuca

SEQ ID NO: 3314251 - RNA, 21 nt, Human
uuccuugaguugauucagcuc

SEQ ID NO: 3314252 - RNA, 20 nt, Human
uuccuugaguugauucagcu

SEQ ID NO: 3314253 - RNA, 12 nt, Human
uucuacccagcg

SEQ ID NO: 3314254 - RNA, 19 nt, Human
uucuacccagcgagcccug

SEQ ID NO: 3314255 - RNA, 13 nt, Human
uucuacgccaggg

SEQ ID NO: 3314256 - RNA, 20 nt, Human
uucuacccagcgagcccugg

SEQ ID NO: 3314257 - RNA, 21 nt, Human
uucuacccagcgagcccuggu

SEQ ID NO: 3314258 - RNA, 14 nt, Human
uucuacccaggugc

SEQ ID NO: 3314259 - RNA, 22 nt, Human
uucuacucgaguuacagacaaa

SEQ ID NO: 3314260 - RNA, 18 nt, Human
uucugacccugcuucaaa

SEQ ID NO: 3314261 - RNA, 22 nt, Human
uucugacccaugcugcccugug

SEQ ID NO: 3314262 - RNA, 23 nt, Human
uucugacccaugcugcccuguga

SEQ ID NO: 3314263 - RNA, 16 nt, Human
uucucugcccuccaag

SEQ ID NO: 3314264 - RNA, 19 nt, Human
uucugauccuaguuccacc

SEQ ID NO: 3314265 - RNA, 19 nt, Human
uucugcucacauaucuguc

SEQ ID NO: 3314266 - RNA, 19 nt, Human
uucucuccuguaccucuug

SEQ ID NO: 3314267 - RNA, 14 nt, Human
uucucugaggacac

SEQ ID NO: 3314268 - RNA, 12 nt, Human
uucucugcccuc

SEQ ID NO: 3314269 - RNA, 11 nt, Human
uucucugcccu

SEQ ID NO: 3314270 - RNA, 14 nt, Human
uucucuccagcccc

SEQ ID NO: 3314271 - RNA, 13 nt, Human
uucucuccagccc

SEQ ID NO: 3314272 - RNA, 15 nt, Human
uucucuccagccccu

SEQ ID NO: 3314273 - RNA, 18 nt, Human
uucucuccuguaccucuu

SEQ ID NO: 3314274 - RNA, 14 nt, Human
uucucuccuguacc

SEQ ID NO: 3314275 - RNA, 16 nt, Human
uucuccacccugcucu

SEQ ID NO: 3314276 - RNA, 20 nt, Human
uucuccaccugccagggaca

SEQ ID NO: 3314277 - RNA, 18 nt, Human
uucuccaccugccaggga

SEQ ID NO: 3314278 - RNA, 16 nt, Human
uucuccaccugccagg

SEQ ID NO: 3314279 - RNA, 15 nt, Human
uucuccaccugccag

SEQ ID NO: 3314280 - RNA, 14 nt, Human
uucuccaccugcca

SEQ ID NO: 3314281 - RNA, 12 nt, Human
uucuccaccugc

SEQ ID NO: 3314282 - RNA, 21 nt, Human
uucuccaccucccacaaagga

SEQ ID NO: 3314283 - RNA, 16 nt, Human
uuauggcuuuugugca

SEQ ID NO: 3314284 - RNA, 17 nt, Human
uuauggcuuuugugcau

SEQ ID NO: 3314285 - RNA, 17 nt, Human
uuauggaacacucugag

SEQ ID NO: 3314286 - RNA, 16 nt, Human
uuauggaacacucuga

SEQ ID NO: 3314287 - RNA, 21 nt, Human
uuauggacaaugacccagugg

SEQ ID NO: 3314288 - RNA, 20 nt, Human
uuauggaacacucugagacu

SEQ ID NO: 3314289 - RNA, 18 nt, Human
uuauggaacacucugaga

SEQ ID NO: 3314290 - RNA, 21 nt, Human
uuauuaaaugcccagccccuu

SEQ ID NO: 3314291 - RNA, 19 nt, Human
uuauuaaaugcccagcccc

SEQ ID NO: 3314292 - RNA, 11 nt, Human
uuauacauaaa

SEQ ID NO: 3314293 - RNA, 15 nt, Human
uuauaaugaaugaaa

SEQ ID NO: 3314294 - RNA, 18 nt, Human
uuauaauaauguuaacau

SEQ ID NO: 3314295 - RNA, 15 nt, Human
uuauaauaauguuaa

SEQ ID NO: 3314296 - RNA, 17 nt, Human
ugugaaaagaaaaauga

SEQ ID NO: 3314297 - RNA, 15 nt, Human
ugugaaaagaaaaau

SEQ ID NO: 3314298 - RNA, 13 nt, Human
ugugaaaagaaaa

SEQ ID NO: 3314299 - RNA, 18 nt, Human
uuauuuuauuaugcauga

SEQ ID NO: 3314300 - RNA, 21 nt, Human
uucaacagguuuuccugaaga

SEQ ID NO: 3314301 - RNA, 18 nt, Human
uucaaaugcuguaacuuu

SEQ ID NO: 3314302 - RNA, 22 nt, Human
uuauuuuggaaaauaaauuauu

SEQ ID NO: 3314303 - RNA, 17 nt, Human
uucagacagcugccugg

SEQ ID NO: 3314304 - RNA, 16 nt, Human
uucagacagcugccug

SEQ ID NO: 3314305 - RNA, 15 nt, Human
uucagacagcugccu

SEQ ID NO: 3314306 - RNA, 14 nt, Human
uucagacagcugcc

SEQ ID NO: 3314307 - RNA, 17 nt, Human
uucacggaagagccuug

SEQ ID NO: 3314308 - RNA, 22 nt, Human
uucaccuuuguccccaccgcag

SEQ ID NO: 3314309 - RNA, 13 nt, Human
uucacggaagagc

SEQ ID NO: 3314310 - RNA, 13 nt, Human
uucacccuuuucu

SEQ ID NO: 3314311 - RNA, 14 nt, Human
uucaccuuuguccc

SEQ ID NO: 3314312 - RNA, 20 nt, Human
uucaccuuuguccccaccgc

SEQ ID NO: 3314313 - RNA, 19 nt, Human
uucaccuuuguccccaccg

SEQ ID NO: 3314314 - RNA, 21 nt, Human
uucaauaggaaaaacugauuu

SEQ ID NO: 3314315 - RNA, 22 nt, Human
uucaauaggaaaaacugauuuu

SEQ ID NO: 3314316 - RNA, 20 nt, Human
uucaauaggaaaaacugauu

SEQ ID NO: 3314317 - RNA, 13 nt, Human
uuccaaaguacac

SEQ ID NO: 3314318 - RNA, 16 nt, Human
uuccaaaguacacugu

SEQ ID NO: 3314319 - RNA, 19 nt, Human
uuccaacccucaucaccaa

SEQ ID NO: 3314320 - RNA, 15 nt, Human
uuccauggacuuugu

SEQ ID NO: 3314321 - RNA, 14 nt, Human
uuccauggacuuug

SEQ ID NO: 3314322 - RNA, 15 nt, Human
uucauaaccuagccu

SEQ ID NO: 3314323 - RNA, 19 nt, Human
uucauccuccucagaucuu

SEQ ID NO: 3314324 - RNA, 15 nt, Human
uucauccuccucaga

SEQ ID NO: 3314325 - RNA, 13 nt, Human
uucaguguacaug

SEQ ID NO: 3314326 - RNA, 12 nt, Human
uucaguguacau

SEQ ID NO: 3314327 - RNA, 17 nt, Human
uucaguggcagcugcuu

SEQ ID NO: 3314328 - RNA, 15 nt, Human
uucaguggcagcugc

SEQ ID NO: 3314329 - RNA, 16 nt, Human
uucaguggcagcugcu

SEQ ID NO: 3314330 - RNA, 21 nt, Human
uucagcugguugagguuucaa

SEQ ID NO: 3314331 - RNA, 12 nt, Human
uucagcuccagc

SEQ ID NO: 3314332 - RNA, 15 nt, Human
uucagcuccagcuca

SEQ ID NO: 3314333 - RNA, 14 nt, Human
uucaguggcagcug

SEQ ID NO: 3314334 - RNA, 13 nt, Human
uucaguggcagcu

SEQ ID NO: 3314335 - RNA, 17 nt, Human
uugugcauuaucuagau

SEQ ID NO: 3314336 - RNA, 12 nt, Human
uugugcauuugg

SEQ ID NO: 3314337 - RNA, 23 nt, Human
uugugcauuaucuagauacugua

SEQ ID NO: 3314338 - RNA, 22 nt, Human
uugugcauuaucuagauacugu

SEQ ID NO: 3314339 - RNA, 21 nt, Human
uuguguuuauauauaagccaa

SEQ ID NO: 3314340 - RNA, 13 nt, Human
uuguguucaccuu

SEQ ID NO: 3314341 - RNA, 23 nt, Human
uuguggauuuaacagaaauguac

SEQ ID NO: 3314342 - RNA, 22 nt, Human
uuguggauuuaacagaaaugua

SEQ ID NO: 3314343 - RNA, 17 nt, Human
uuguggacacagcucuu

SEQ ID NO: 3314344 - RNA, 16 nt, Human
uuguggacacagcucu

SEQ ID NO: 3314345 - RNA, 21 nt, Human
uuguggauuuaacagaaaugu

SEQ ID NO: 3314346 - RNA, 20 nt, Human
uuguggauuuaacagaaaug

SEQ ID NO: 3314347 - RNA, 14 nt, Human
uuguuacauuuuua

SEQ ID NO: 3314348 - RNA, 21 nt, Human
uuguuaguaugaggcauuugu

SEQ ID NO: 3314349 - RNA, 19 nt, Human
uuguuaguaugaggcauuu

SEQ ID NO: 3314350 - RNA, 20 nt, Human
uuguuagugugucuuagugu

SEQ ID NO: 3314351 - RNA, 22 nt, Human
uuguuaguaugaggcauuuguu

SEQ ID NO: 3314352 - RNA, 13 nt, Human
uuggucuguguga

SEQ ID NO: 3314353 - RNA, 22 nt, Human
uuggguucaagcgauucuucug

SEQ ID NO: 3314354 - RNA, 17 nt, Human
uuguaaauagcucaggu

SEQ ID NO: 3314355 - RNA, 14 nt, Human
uuguacauaaugcg

SEQ ID NO: 3314356 - RNA, 18 nt, Human
uuguacauaaugcgugca

SEQ ID NO: 3314357 - RNA, 23 nt, Human
uuguaaauuaacuuuuauaaacu

SEQ ID NO: 3314358 - RNA, 18 nt, Human
uuguaaauuaacuuuuau

SEQ ID NO: 3314359 - RNA, 16 nt, Human
uuguaaauuaacuuuu

SEQ ID NO: 3314360 - RNA, 15 nt, Human
uuguaaauuaacuuu

SEQ ID NO: 3314361 - RNA, 19 nt, Human
uuguauucucuccuguacc

SEQ ID NO: 3314362 - RNA, 16 nt, Human
uuguauucucuccugu

SEQ ID NO: 3314363 - RNA, 15 nt, Human
uuguauucucuccug

SEQ ID NO: 3314364 - RNA, 20 nt, Human
uugugaaaggaaagaggcuc

SEQ ID NO: 3314365 - RNA, 12 nt, Human
uugugauuuuug

SEQ ID NO: 3314366 - RNA, 17 nt, Human
uugugauuuuuguaauu

SEQ ID NO: 3314367 - RNA, 16 nt, Human
uugugauuuuuguaau

SEQ ID NO: 3314368 - RNA, 15 nt, Human
uugucuuaaaaagug

SEQ ID NO: 3314369 - RNA, 14 nt, Human
uuucauuuagguga

SEQ ID NO: 3314370 - RNA, 18 nt, Human
uuucauuuaggugaggaa

SEQ ID NO: 3314371 - RNA, 13 nt, Human
uuucaguguacau

SEQ ID NO: 3314372 - RNA, 14 nt, Human
uuucaguguacaug

SEQ ID NO: 3314373 - RNA, 14 nt, Human
uuucaauaggaaaa

SEQ ID NO: 3314374 - RNA, 12 nt, Human
uuucaauaggaa

SEQ ID NO: 3314375 - RNA, 17 nt, Human
uuucaauaggaaaaacu

SEQ ID NO: 3314376 - RNA, 16 nt, Human
uuuauggcuuuugugc

SEQ ID NO: 3314377 - RNA, 14 nt, Human
uuuauggcuuuugu

SEQ ID NO: 3314378 - RNA, 13 nt, Human
uuuauuauggcac

SEQ ID NO: 3314379 - RNA, 13 nt, Human
uuuauuaugcaug

SEQ ID NO: 3314380 - RNA, 18 nt, Human
uuuaacagaaauguacag

SEQ ID NO: 3314381 - RNA, 19 nt, Human
uuuaagugcugcauuuaaa

SEQ ID NO: 3314382 - RNA, 22 nt, Human
uuuaagaaaaaggaugcacaga

SEQ ID NO: 3314383 - RNA, 18 nt, Human
uuuaagaaaaaggaugca

SEQ ID NO: 3314384 - RNA, 15 nt, Human
uuuacuucuuauaca

SEQ ID NO: 3314385 - RNA, 19 nt, Human
uuuacuucuuauacauuug

SEQ ID NO: 3314386 - RNA, 22 nt, Human
uuuacuucuuauacauuugaua

SEQ ID NO: 3314387 - RNA, 14 nt, Human
uuuagaaauauaau

SEQ ID NO: 3314388 - RNA, 12 nt, Human
uuuagacagagu

SEQ ID NO: 3314389 - RNA, 18 nt, Human
ugggaugauuggaggggg

SEQ ID NO: 3314390 - RNA, 16 nt, Human
ugggaggaucucuuga

SEQ ID NO: 3314391 - RNA, 15 nt, Human
ugggacacccuguga

SEQ ID NO: 3314392 - RNA, 14 nt, Human
ugggacacccugug

SEQ ID NO: 3314393 - RNA, 13 nt, Human
ugggacacccugu

SEQ ID NO: 3314394 - RNA, 16 nt, Human
ugggaaugaaugucag

SEQ ID NO: 3314395 - RNA, 14 nt, Human
ugggcagagcagag

SEQ ID NO: 3314396 - RNA, 17 nt, Human
ugggcagagcagagacc

SEQ ID NO: 3314397 - RNA, 15 nt, Human
ugggcagagcagaga

SEQ ID NO: 3314398 - RNA, 13 nt, Human
ugggcagagcaga

SEQ ID NO: 3314399 - RNA, 22 nt, Human
ugggccuccugugugugcgccu

SEQ ID NO: 3314400 - RNA, 22 nt, Human
ugggcuucaguggcagcugcuu

SEQ ID NO: 3314401 - RNA, 21 nt, Human
ugggcuucaguggcagcugcu

SEQ ID NO: 3314402 - RNA, 15 nt, Human
ugggcuucauccucc

SEQ ID NO: 3314403 - RNA, 22 nt, Human
ugggcuuggggaccagagcugc

SEQ ID NO: 3314404 - RNA, 23 nt, Human
ugggcuuggggaccagagcugcc

SEQ ID NO: 3314405 - RNA, 17 nt, Human
ugggcuugucuguagau

SEQ ID NO: 3314406 - RNA, 19 nt, Human
ugggggcugggcagaggaa

SEQ ID NO: 3314407 - RNA, 19 nt, Human
uggggggcugaggugggag

SEQ ID NO: 3314408 - RNA, 16 nt, Human
ugggggccucagugcc

SEQ ID NO: 3314409 - RNA, 16 nt, Human
uggcugcugaaggcuc

SEQ ID NO: 3314410 - RNA, 14 nt, Human
uggcugcugaaggc

SEQ ID NO: 3314411 - RNA, 13 nt, Human
uggcugcugaagg

SEQ ID NO: 3314412 - RNA, 11 nt, Human
uggcugcugaa

SEQ ID NO: 3314413 - RNA, 20 nt, Human
uggccuagcauacguacaca

SEQ ID NO: 3314414 - RNA, 22 nt, Human
uggccccucagggucccuggug

SEQ ID NO: 3314415 - RNA, 21 nt, Human
uggccccucagggucccuggu

SEQ ID NO: 3314416 - RNA, 17 nt, Human
uggcagcugcgguccac

SEQ ID NO: 3314417 - RNA, 20 nt, Human
uggccccucagggucccugg

SEQ ID NO: 3314418 - RNA, 13 nt, Human
uggccccucaggg

SEQ ID NO: 3314419 - RNA, 22 nt, Human
uggccucccaacucaccccagc

SEQ ID NO: 3314420 - RNA, 21 nt, Human
uggccucccaacucaccccag

SEQ ID NO: 3314421 - RNA, 20 nt, Human
uggccucccaacucacccca

SEQ ID NO: 3314422 - RNA, 19 nt, Human
uggccucccaacucacccc

SEQ ID NO: 3314423 - RNA, 14 nt, Human
uggccucccaacuc

SEQ ID NO: 3314424 - RNA, 11 nt, Human
uggccucccaa

SEQ ID NO: 3314425 - RNA, 18 nt, Human
uggccucaagugauucuc

SEQ ID NO: 3314426 - RNA, 23 nt, Human
uggccucaagugauucuccugcc

SEQ ID NO: 3314427 - RNA, 23 nt, Human
uggccuagcauacguacacauuu

SEQ ID NO: 3314428 - RNA, 23 nt, Human
uggacguguuaugacuccagaau

SEQ ID NO: 3314429 - RNA, 19 nt, Human
uggacguguuaugacucca

SEQ ID NO: 3314430 - RNA, 19 nt, Human
uggacuaacuugucuuugg

SEQ ID NO: 3314431 - RNA, 18 nt, Human
uggacaggcauguucucu

SEQ ID NO: 3314432 - RNA, 22 nt, Human
uggacaggcauguucucugagg

SEQ ID NO: 3314433 - RNA, 17 nt, Human
uggacaggcauguucuc

SEQ ID NO: 3314434 - RNA, 21 nt, Human
uggcacuauaauguaagcucu

SEQ ID NO: 3314435 - RNA, 15 nt, Human
uggauuuaacagaaa

SEQ ID NO: 3314436 - RNA, 22 nt, Human
uggcacuauaauguaagcucua

SEQ ID NO: 3314437 - RNA, 19 nt, Human
uggcacugcuuccagugag

SEQ ID NO: 3314438 - RNA, 22 nt, Human
uggcacugcuuccagugaggcu

SEQ ID NO: 3314439 - RNA, 18 nt, Human
uggcagcucagagagggu

SEQ ID NO: 3314440 - RNA, 23 nt, Human
uggaggggggaggugggauccuc

SEQ ID NO: 3314441 - RNA, 21 nt, Human
uggauuguccccgacccuugc

SEQ ID NO: 3314442 - RNA, 22 nt, Human
uggaugcagccucacaguccuu

SEQ ID NO: 3314443 - RNA, 21 nt, Human
uggaugcagccucacaguccu

SEQ ID NO: 3314444 - RNA, 13 nt, Human
uggaugcagccuc

SEQ ID NO: 3314445 - RNA, 18 nt, Human
ugcuugugaaaggaaaga

SEQ ID NO: 3314446 - RNA, 13 nt, Human
ugcuucuucagag

SEQ ID NO: 3314447 - RNA, 17 nt, Human
uggaacacucugagacu

SEQ ID NO: 3314448 - RNA, 15 nt, Human
uggaacacucugaga

SEQ ID NO: 3314449 - RNA, 14 nt, Human
uggaacacucugag

SEQ ID NO: 3314450 - RNA, 12 nt, Human
ugcuucucacug

SEQ ID NO: 3314451 - RNA, 21 nt, Human
ugcuuccagugaggcucugcc

SEQ ID NO: 3314452 - RNA, 23 nt, Human
ugcuuccagugaggcucugcccu

SEQ ID NO: 3314453 - RNA, 22 nt, Human
ugcuuccagugaggcucugccc

SEQ ID NO: 3314454 - RNA, 19 nt, Human
ugcuuaacuucacauauug

SEQ ID NO: 3314455 - RNA, 18 nt, Human
ugcuuaacuucacauauu

SEQ ID NO: 3314456 - RNA, 17 nt, Human
ugcuuaacuucacauau

SEQ ID NO: 3314457 - RNA, 14 nt, Human
ugcuuaacuucaca

SEQ ID NO: 3314458 - RNA, 13 nt, Human
ugcuuaacuucac

SEQ ID NO: 3314459 - RNA, 15 nt, Human
ugguuuucuguucuu

SEQ ID NO: 3314460 - RNA, 19 nt, Human
ugguuuucuuguguguuua

SEQ ID NO: 3314461 - RNA, 21 nt, Human
ugguuuuuaaaaaacugcuga

SEQ ID NO: 3314462 - RNA, 23 nt, Human
ugguuuuuaaaaaacugcugacu

SEQ ID NO: 3314463 - RNA, 16 nt, Human
ugguuuucuguucuuu

SEQ ID NO: 3314464 - RNA, 14 nt, Human
uguaacaagccacc

SEQ ID NO: 3314465 - RNA, 17 nt, Human
uguaacaagccacccca

SEQ ID NO: 3314466 - RNA, 11 nt, Human
uguacagagcc

SEQ ID NO: 3314467 - RNA, 14 nt, Human
uguacagacaacaa

SEQ ID NO: 3314468 - RNA, 18 nt, Human
ugguugaugaucuuugca

SEQ ID NO: 3314469 - RNA, 16 nt, Human
uggugucaccugaaga

SEQ ID NO: 3314470 - RNA, 15 nt, Human
uggugucgggcauga

SEQ ID NO: 3314471 - RNA, 18 nt, Human
uggugucgggcaugacac

SEQ ID NO: 3314472 - RNA, 23 nt, Human
ugguucaggguuggccccugccc

SEQ ID NO: 3314473 - RNA, 20 nt, Human
uggguacuuguggacacagc

SEQ ID NO: 3314474 - RNA, 23 nt, Human
uggguacuuguggacacagcucu

SEQ ID NO: 3314475 - RNA, 12 nt, Human
ugguggcagugg

SEQ ID NO: 3314476 - RNA, 19 nt, Human
uggugcaaugaccuuucaa

SEQ ID NO: 3314477 - RNA, 14 nt, Human
uggugcaaugaccu

SEQ ID NO: 3314478 - RNA, 20 nt, Human
ugguggcagugggagcugcc

SEQ ID NO: 3314479 - RNA, 13 nt, Human
ugguggcaguggg

SEQ ID NO: 3314480 - RNA, 18 nt, Human
ugguggcagugggagcug

SEQ ID NO: 3314481 - RNA, 18 nt, Human
uggugggggccucggugu

SEQ ID NO: 3314482 - RNA, 16 nt, Human
uggugggggccucggu

SEQ ID NO: 3314483 - RNA, 13 nt, Human
ugguggcuggguu

SEQ ID NO: 3314484 - RNA, 19 nt, Human
uggugguuuucuguucuuu

SEQ ID NO: 3314485 - RNA, 18 nt, Human
uggugguuucagaaaugu

SEQ ID NO: 3314486 - RNA, 17 nt, Human
uggugguuucagaaaug

SEQ ID NO: 3314487 - RNA, 12 nt, Human
uguccugggagu

SEQ ID NO: 3314488 - RNA, 19 nt, Human
uguccugggagugagcugg

SEQ ID NO: 3314489 - RNA, 20 nt, Human
uguccugggagugagcuggu

SEQ ID NO: 3314490 - RNA, 14 nt, Human
ugucuaaugaaacc

SEQ ID NO: 3314491 - RNA, 17 nt, Human
uguccccgacccuugcc

SEQ ID NO: 3314492 - RNA, 19 nt, Human
uguccccgcacugggcuug

SEQ ID NO: 3314493 - RNA, 17 nt, Human
uguccccgcacugggcu

SEQ ID NO: 3314494 - RNA, 16 nt, Human
ugucuuuucuugcaug

SEQ ID NO: 3314495 - RNA, 23 nt, Human
ugucuuuggacccugaggcccag

SEQ ID NO: 3314496 - RNA, 14 nt, Human
ugucuaugggacuc

SEQ ID NO: 3314497 - RNA, 15 nt, Human
ugucuaugggacuca

SEQ ID NO: 3314498 - RNA, 16 nt, Human
ugucuaugggacucaa

SEQ ID NO: 3314499 - RNA, 23 nt, Human
ugucuaguuguuugauucagaca

SEQ ID NO: 3314500 - RNA, 15 nt, Human
ugucuaguuguuuga

SEQ ID NO: 3314501 - RNA, 21 nt, Human
ugucucaaaaaaagaaaaaga

SEQ ID NO: 3314502 - RNA, 19 nt, Human
ugucaauuacaggaaguac

SEQ ID NO: 3314503 - RNA, 21 nt, Human
ugucaauuacaggaaguacug

SEQ ID NO: 3314504 - RNA, 14 nt, Human
ugucacaggcaggu

SEQ ID NO: 3314505 - RNA, 13 nt, Human
ugucacaggcagg

SEQ ID NO: 3314506 - RNA, 15 nt, Human
ugucacaggcagguc

SEQ ID NO: 3314507 - RNA, 16 nt, Human
ugucacaggcaggucc

SEQ ID NO: 3314508 - RNA, 17 nt, Human
ugucacaggcaggucca

SEQ ID NO: 3314509 - RNA, 21 nt, Human
ugucacaggcagguccagggu

SEQ ID NO: 3314510 - RNA, 14 nt, Human
ugucagugugacug

SEQ ID NO: 3314511 - RNA, 15 nt, Human
ugucagugugacuga

SEQ ID NO: 3314512 - RNA, 19 nt, Human
ugucagugugacugaucuc

SEQ ID NO: 3314513 - RNA, 16 nt, Human
ugucagugugacugau

SEQ ID NO: 3314514 - RNA, 23 nt, Human
uguacagcaaggagauuuacaac

SEQ ID NO: 3314515 - RNA, 22 nt, Human
uguacagcaaggagauuuacaa

SEQ ID NO: 3314516 - RNA, 12 nt, Human
uguacagagccc

SEQ ID NO: 3314517 - RNA, 21 nt, Human
uguacagagcccacgccccca

SEQ ID NO: 3314518 - RNA, 13 nt, Human
uguaucugagcag

SEQ ID NO: 3314519 - RNA, 13 nt, Human
ugagcaucaggcc

SEQ ID NO: 3314520 - RNA, 15 nt, Human
ugagcaucaggccag

SEQ ID NO: 3314521 - RNA, 14 nt, Human
ugagcaucaggcca

SEQ ID NO: 3314522 - RNA, 13 nt, Human
ugagccucagcau

SEQ ID NO: 3314523 - RNA, 12 nt, Human
ugagacccuguc

SEQ ID NO: 3314524 - RNA, 15 nt, Human
ugagaucagccuggg

SEQ ID NO: 3314525 - RNA, 19 nt, Human
ugagaggggaacagacugg

SEQ ID NO: 3314526 - RNA, 17 nt, Human
ugagaguagagucacug

SEQ ID NO: 3314527 - RNA, 22 nt, Human
ugagaggcauccaguaucuuga

SEQ ID NO: 3314528 - RNA, 23 nt, Human
ugagacucgcgacaaugcaaacc

SEQ ID NO: 3314529 - RNA, 23 nt, Human
ugagaggcauccaguaucuugaa

SEQ ID NO: 3314530 - RNA, 13 nt, Human
ugagacucugucu

SEQ ID NO: 3314531 - RNA, 14 nt, Human
ugagacucugucuc

SEQ ID NO: 3314532 - RNA, 12 nt, Human
ugagacucuguc

SEQ ID NO: 3314533 - RNA, 19 nt, Human
ugaccauucuccaccugcc

SEQ ID NO: 3314534 - RNA, 15 nt, Human
ucuugaacuccuggc

SEQ ID NO: 3314535 - RNA, 22 nt, Human
ugaccauucuccaccugccagg

SEQ ID NO: 3314536 - RNA, 21 nt, Human
ugaccauucuccaccugccag

SEQ ID NO: 3314537 - RNA, 20 nt, Human
ugaccauucuccaccugcca

SEQ ID NO: 3314538 - RNA, 16 nt, Human
ugaccucugcagcaau

SEQ ID NO: 3314539 - RNA, 13 nt, Human
ugaccucugcagc

SEQ ID NO: 3314540 - RNA, 22 nt, Human
ugaccucaggugauccacccac

SEQ ID NO: 3314541 - RNA, 13 nt, Human
ugaccuuucaaua

SEQ ID NO: 3314542 - RNA, 14 nt, Human
ugaccuuucaauag

SEQ ID NO: 3314543 - RNA, 16 nt, Human
ugaccuuucaauagga

SEQ ID NO: 3314544 - RNA, 15 nt, Human
ugaccuuucaauagg

SEQ ID NO: 3314545 - RNA, 12 nt, Human
ugaccucugccu

SEQ ID NO: 3314546 - RNA, 23 nt, Human
ugaccucugcagcaauaaagcag

SEQ ID NO: 3314547 - RNA, 21 nt, Human
ugaccucugcagcaauaaagc

SEQ ID NO: 3314548 - RNA, 18 nt, Human
ugaccucugcagcaauaa

SEQ ID NO: 3314549 - RNA, 13 nt, Human
ugacugaauuucu

SEQ ID NO: 3314550 - RNA, 15 nt, Human
ugacugaauuucuuu

SEQ ID NO: 3314551 - RNA, 14 nt, Human
ugacugaauuucuu

SEQ ID NO: 3314552 - RNA, 20 nt, Human
ugacgccaucccagccccaa

SEQ ID NO: 3314553 - RNA, 19 nt, Human
ugacgccaucccagcccca

SEQ ID NO: 3314554 - RNA, 18 nt, Human
ugacgccaucccagcccc

SEQ ID NO: 3314555 - RNA, 17 nt, Human
ugacgccaucccagccc

SEQ ID NO: 3314556 - RNA, 22 nt, Human
ugaccuuucaauaggaaaaacu

SEQ ID NO: 3314557 - RNA, 18 nt, Human
ugaccuuucaauaggaaa

SEQ ID NO: 3314558 - RNA, 16 nt, Human
ugacgccaucccagcc

SEQ ID NO: 3314559 - RNA, 15 nt, Human
ugacgccaucccagc

SEQ ID NO: 3314560 - RNA, 14 nt, Human
ugacgccaucccag

SEQ ID NO: 3314561 - RNA, 13 nt, Human
ugacgccauccca

SEQ ID NO: 3314562 - RNA, 21 nt, Human
ugaucacggcucacugcagcc

SEQ ID NO: 3314563 - RNA, 22 nt, Human
ugaucacggcucacugcagccu

SEQ ID NO: 3314564 - RNA, 21 nt, Human
ugauccacccaccucagccuc

SEQ ID NO: 3314565 - RNA, 22 nt, Human
ugauccacccaccucagccucc

SEQ ID NO: 3314566 - RNA, 21 nt, Human
ugaucuaggaagacuuuggaa

SEQ ID NO: 3314567 - RNA, 19 nt, Human
ugaucuaggaagacuuugg

SEQ ID NO: 3314568 - RNA, 17 nt, Human
ugaucucucgugauuga

SEQ ID NO: 3314569 - RNA, 15 nt, Human
ugaucuaggaagacu

SEQ ID NO: 3314570 - RNA, 13 nt, Human
ugaucauccacug

SEQ ID NO: 3314571 - RNA, 24 nt, Human
ugaucauccacugugccaugugcc

SEQ ID NO: 3314572 - RNA, 17 nt, Human
ugauccaagcugguccc

SEQ ID NO: 3314573 - RNA, 21 nt, Human
ugauccaagcuggucccacuc

SEQ ID NO: 3314574 - RNA, 15 nt, Human
ugauccacccaccuc

SEQ ID NO: 3314575 - RNA, 20 nt, Human
ugauccacccaccucagccu

SEQ ID NO: 3314576 - RNA, 19 nt, Human
ugauccacccaccucagcc

SEQ ID NO: 3314577 - RNA, 22 nt, Human
ugaugcuucuucagagacuccu

SEQ ID NO: 3314578 - RNA, 21 nt, Human
ugaugcuucuucagagacucc

SEQ ID NO: 3314579 - RNA, 19 nt, Human
ugaugcuucuucagagacu

SEQ ID NO: 3314580 - RNA, 18 nt, Human
ugaugcuucuucagagac

SEQ ID NO: 3314581 - RNA, 18 nt, Human
ugaucuuugcagacaggc

SEQ ID NO: 3314582 - RNA, 21 nt, Human
ugaucuuugcagacaggcaag

SEQ ID NO: 3314583 - RNA, 23 nt, Human
ugaucuuugcagacaggcaagca

SEQ ID NO: 3314584 - RNA, 19 nt, Human
ugaucuuugcagacaggca

SEQ ID NO: 3314585 - RNA, 20 nt, Human
ugaucuuugcagacaggcaa

SEQ ID NO: 3314586 - RNA, 14 nt, Human
ugaugccaugagga

SEQ ID NO: 3314587 - RNA, 23 nt, Human
ugaugaucuuugcagacaggcaa

SEQ ID NO: 3314588 - RNA, 20 nt, Human
ugaugaugaaaugaggucag

SEQ ID NO: 3314589 - RNA, 22 nt, Human
ugaugaucuuugcagacaggca

SEQ ID NO: 3314590 - RNA, 19 nt, Human
ugaguugauucagcucugc

SEQ ID NO: 3314591 - RNA, 16 nt, Human
ugaguugauucagcuc

SEQ ID NO: 3314592 - RNA, 15 nt, Human
ugagucgaggacagg

SEQ ID NO: 3314593 - RNA, 16 nt, Human
ugagucgaggacaggg

SEQ ID NO: 3314594 - RNA, 23 nt, Human
ugaguugauagcacagacccugc

SEQ ID NO: 3314595 - RNA, 21 nt, Human
ugaguugauagcacagacccu

SEQ ID NO: 3314596 - RNA, 23 nt, Human
ugauagcacagacccugcccugu

SEQ ID NO: 3314597 - RNA, 22 nt, Human
ugauagcacagacccugcccug

SEQ ID NO: 3314598 - RNA, 16 nt, Human
ugauagcacagacccu

SEQ ID NO: 3314599 - RNA, 15 nt, Human
ugauagcacagaccc

SEQ ID NO: 3314600 - RNA, 14 nt, Human
ugauagcacagacc

SEQ ID NO: 3314601 - RNA, 21 nt, Human
ugauagcacagacccugcccu

SEQ ID NO: 3314602 - RNA, 20 nt, Human
ugauagcacagacccugccc

SEQ ID NO: 3314603 - RNA, 18 nt, Human
ugauagcacagacccugc

SEQ ID NO: 3314604 - RNA, 17 nt, Human
ugauagcacagacccug

SEQ ID NO: 3314605 - RNA, 20 nt, Human
ugaguccccuguuuguuucu

SEQ ID NO: 3314606 - RNA, 18 nt, Human
ugaguccuggcaugggaa

SEQ ID NO: 3314607 - RNA, 11 nt, Human
ugaguccuggc

SEQ ID NO: 3314608 - RNA, 14 nt, Human
ugagucgaggacag

SEQ ID NO: 3314609 - RNA, 22 nt, Human
ugaguccuggcaugggaaugaa

SEQ ID NO: 3314610 - RNA, 19 nt, Human
ugaguccuggcaugggaau

SEQ ID NO: 3314611 - RNA, 21 nt, Human
ugaguccccuguuuguuucug

SEQ ID NO: 3314612 - RNA, 19 nt, Human
ugagguuucaaaccucccu

SEQ ID NO: 3314613 - RNA, 16 nt, Human
ugaggugcuauguucu

SEQ ID NO: 3314614 - RNA, 15 nt, Human
ugaggugcuauguuc

SEQ ID NO: 3314615 - RNA, 11 nt, Human
ugaggcugggc

SEQ ID NO: 3314616 - RNA, 15 nt, Human
ugaggucuguucuuu

SEQ ID NO: 3314617 - RNA, 14 nt, Human
ugaggucuguucuu

SEQ ID NO: 3314618 - RNA, 20 nt, Human
ugaggucuguucuuuccaaa

SEQ ID NO: 3314619 - RNA, 20 nt, Human
ugccaugaggaacaaggcaa

SEQ ID NO: 3314620 - RNA, 23 nt, Human
ugccaugaggaacaaggcaaggc

SEQ ID NO: 3314621 - RNA, 15 nt, Human
ugccaugugccaggu

SEQ ID NO: 3314622 - RNA, 14 nt, Human
ugccaugugccagg

SEQ ID NO: 3314623 - RNA, 15 nt, Human
ugccauguuggccag

SEQ ID NO: 3314624 - RNA, 12 nt, Human
ugccauguuggc

SEQ ID NO: 3314625 - RNA, 20 nt, Human
ugcccaccuggccucugcac

SEQ ID NO: 3314626 - RNA, 18 nt, Human
ugcccacgcuggagugca

SEQ ID NO: 3314627 - RNA, 19 nt, Human
ugcccaccuggccucugca

SEQ ID NO: 3314628 - RNA, 21 nt, Human
ugcccacucccugcaaccuga

SEQ ID NO: 3314629 - RNA, 12 nt, Human
ugccauccaggu

SEQ ID NO: 3314630 - RNA, 15 nt, Human
ugccauccagguuca

SEQ ID NO: 3314631 - RNA, 17 nt, Human
ugccagguuuuuggucu

SEQ ID NO: 3314632 - RNA, 18 nt, Human
ugccaggaagccagcagg

SEQ ID NO: 3314633 - RNA, 16 nt, Human
ugccaggaagccagca

SEQ ID NO: 3314634 - RNA, 12 nt, Human
ugccaggaagcc

SEQ ID NO: 3314635 - RNA, 19 nt, Human
ugcauguuacauaagauaa

SEQ ID NO: 3314636 - RNA, 15 nt, Human
ugcauguuugugauu

SEQ ID NO: 3314637 - RNA, 17 nt, Human
ugcauuaucuagauacu

SEQ ID NO: 3314638 - RNA, 12 nt, Human
ugcauuaucuag

SEQ ID NO: 3314639 - RNA, 21 nt, Human
ugcccugcccaccuggccucu

SEQ ID NO: 3314640 - RNA, 23 nt, Human
ugcccugcccaccuggccucugc

SEQ ID NO: 3314641 - RNA, 22 nt, Human
ugcccugcccaccuggccucug

SEQ ID NO: 3314642 - RNA, 17 nt, Human
ugcccuaaaguguauuu

SEQ ID NO: 3314643 - RNA, 19 nt, Human
ugccgucuaccugaggggc

SEQ ID NO: 3314644 - RNA, 17 nt, Human
ugccgucuaccugaggg

SEQ ID NO: 3314645 - RNA, 16 nt, Human
ugccgucuaccugagg

SEQ ID NO: 3314646 - RNA, 15 nt, Human
ugccgucuaccugag

SEQ ID NO: 3314647 - RNA, 13 nt, Human
ugccucugggacu

SEQ ID NO: 3314648 - RNA, 22 nt, Human
ugccuccuuugugaggaagccg

SEQ ID NO: 3314649 - RNA, 20 nt, Human
ugccuccuuugugaggaagc

SEQ ID NO: 3314650 - RNA, 21 nt, Human
ugccuccuuugugaggaagcc

SEQ ID NO: 3314651 - RNA, 21 nt, Human
ugccucuucucuacucuaggg

SEQ ID NO: 3314652 - RNA, 17 nt, Human
ugccugguggcagcugc

SEQ ID NO: 3314653 - RNA, 18 nt, Human
ugccugguggcagcugcg

SEQ ID NO: 3314654 - RNA, 19 nt, Human
ugccugguggcagcugcgg

SEQ ID NO: 3314655 - RNA, 16 nt, Human
ugccugguggcagcug

SEQ ID NO: 3314656 - RNA, 20 nt, Human
ugauuuuuuuuuccuucagu

SEQ ID NO: 3314657 - RNA, 19 nt, Human
ugauuuuuuuuuccuucag

SEQ ID NO: 3314658 - RNA, 17 nt, Human
ugauuuuuuuuuccuuc

SEQ ID NO: 3314659 - RNA, 16 nt, Human
ugauuuuuuuuuccuu

SEQ ID NO: 3314660 - RNA, 23 nt, Human
ugauuuuuuuuuccuucagugcc

SEQ ID NO: 3314661 - RNA, 22 nt, Human
ugauuuuuuuuuccuucagugc

SEQ ID NO: 3314662 - RNA, 15 nt, Human
ugauuuucauugcug

SEQ ID NO: 3314663 - RNA, 13 nt, Human
ugauuuucauugc

SEQ ID NO: 3314664 - RNA, 13 nt, Human
ugcaacaggcugg

SEQ ID NO: 3314665 - RNA, 14 nt, Human
ugcaacaggcuggg

SEQ ID NO: 3314666 - RNA, 15 nt, Human
ugcaacaggcugggc

SEQ ID NO: 3314667 - RNA, 16 nt, Human
ugcaacaggcugggcu

SEQ ID NO: 3314668 - RNA, 17 nt, Human
ugcaacaggcugggcuu

SEQ ID NO: 3314669 - RNA, 19 nt, Human
ugcaacaggcugggcuuca

SEQ ID NO: 3314670 - RNA, 20 nt, Human
ugcaacaggcugggcuucag

SEQ ID NO: 3314671 - RNA, 13 nt, Human
ugcaaccuccgcc

SEQ ID NO: 3314672 - RNA, 14 nt, Human
ugcaaccuccgccu

SEQ ID NO: 3314673 - RNA, 20 nt, Human
ugcaaccugauugugucucu

SEQ ID NO: 3314674 - RNA, 19 nt, Human
ugcaaccugauugugucuc

SEQ ID NO: 3314675 - RNA, 18 nt, Human
ugcaaccuccgccucuug

SEQ ID NO: 3314676 - RNA, 20 nt, Human
ugcaaccuccgccucuuggg

SEQ ID NO: 3314677 - RNA, 21 nt, Human
ugcaaccuccgccucuugggu

SEQ ID NO: 3314678 - RNA, 22 nt, Human
ugcaaccugauugugucucuug

SEQ ID NO: 3314679 - RNA, 16 nt, Human
ugcacaaacagaggcc

SEQ ID NO: 3314680 - RNA, 15 nt, Human
ugcacaaacagaggc

SEQ ID NO: 3314681 - RNA, 17 nt, Human
ugcacagaguuguuaca

SEQ ID NO: 3314682 - RNA, 19 nt, Human
ugcacagaguuguuacauu

SEQ ID NO: 3314683 - RNA, 18 nt, Human
ugcacagaguuguuacau

SEQ ID NO: 3314684 - RNA, 20 nt, Human
ugcacaaacagaggccgcca

SEQ ID NO: 3314685 - RNA, 19 nt, Human
ugcacaaacagaggccgcc

SEQ ID NO: 3314686 - RNA, 17 nt, Human
ugcacaaacagaggccg

SEQ ID NO: 3314687 - RNA, 16 nt, Human
ugcaaugaccuuucaa

SEQ ID NO: 3314688 - RNA, 13 nt, Human
ugcaaugaccuuu

SEQ ID NO: 3314689 - RNA, 23 nt, Human
ugcaaugaccuuucaauaggaaa

SEQ ID NO: 3314690 - RNA, 22 nt, Human
ugcaaugaccuuucaauaggaa

SEQ ID NO: 3314691 - RNA, 19 nt, Human
ugcaaugaccuuucaauag

SEQ ID NO: 3314692 - RNA, 17 nt, Human
ugcaaugaccuuucaau

SEQ ID NO: 3314693 - RNA, 13 nt, Human
ugcaauggcagcc

SEQ ID NO: 3314694 - RNA, 14 nt, Human
ugcaauggcagccu

SEQ ID NO: 3314695 - RNA, 15 nt, Human
ugcaauggcagccuu

SEQ ID NO: 3314696 - RNA, 16 nt, Human
ugcaauggcagccuug

SEQ ID NO: 3314697 - RNA, 18 nt, Human
ugcacugacauuguuggc

SEQ ID NO: 3314698 - RNA, 21 nt, Human
ugcacugacauuguuggccaa

SEQ ID NO: 3314699 - RNA, 18 nt, Human
ugcaccggcuggccuggc

SEQ ID NO: 3314700 - RNA, 20 nt, Human
ugcaccggcuggccuggccc

SEQ ID NO: 3314701 - RNA, 19 nt, Human
ugcaccggcuggccuggcc

SEQ ID NO: 3314702 - RNA, 17 nt, Human
ugcaccuggaauauaua

SEQ ID NO: 3314703 - RNA, 22 nt, Human
ugcaccuggaauauauaaccag

SEQ ID NO: 3314704 - RNA, 20 nt, Human
ugcaccuggaauauauaacc

SEQ ID NO: 3314705 - RNA, 14 nt, Human
uccugccucagccu

SEQ ID NO: 3314706 - RNA, 13 nt, Human
uccugagccagau

SEQ ID NO: 3314707 - RNA, 14 nt, Human
uccuggcacccggc

SEQ ID NO: 3314708 - RNA, 16 nt, Human
uccuggcacccggccc

SEQ ID NO: 3314709 - RNA, 19 nt, Human
uccuggcacccggccccug

SEQ ID NO: 3314710 - RNA, 16 nt, Human
uccugccucagccucc

SEQ ID NO: 3314711 - RNA, 13 nt, Human
uccugccucagcc

SEQ ID NO: 3314712 - RNA, 15 nt, Human
uccugccucagccuc

SEQ ID NO: 3314713 - RNA, 20 nt, Human
uccuguaccucuugagccuu

SEQ ID NO: 3314714 - RNA, 14 nt, Human
uccuuaccagcaga

SEQ ID NO: 3314715 - RNA, 20 nt, Human
uccuggcacccggccccugc

SEQ ID NO: 3314716 - RNA, 21 nt, Human
uccuggcacccggccccugcu

SEQ ID NO: 3314717 - RNA, 17 nt, Human
uccuggcacugcuucca

SEQ ID NO: 3314718 - RNA, 22 nt, Human
uccuggcacugcuuccagugag

SEQ ID NO: 3314719 - RNA, 18 nt, Human
uccuggcacugcuuccag

SEQ ID NO: 3314720 - RNA, 23 nt, Human
uccuuuucacaguucucuccuuc

SEQ ID NO: 3314721 - RNA, 19 nt, Human
uccuucacagaugggugcu

SEQ ID NO: 3314722 - RNA, 20 nt, Human
uccuucaccuuuguccccac

SEQ ID NO: 3314723 - RNA, 18 nt, Human
uccuucaccuuugucccc

SEQ ID NO: 3314724 - RNA, 18 nt, Human
uccuucacagaugggugc

SEQ ID NO: 3314725 - RNA, 18 nt, Human
uccuuaccagcagagcac

SEQ ID NO: 3314726 - RNA, 17 nt, Human
uccuuaccagcagagca

SEQ ID NO: 3314727 - RNA, 16 nt, Human
uccuuaccagcagagc

SEQ ID NO: 3314728 - RNA, 22 nt, Human
uccuucaccuuuguccccaccg

SEQ ID NO: 3314729 - RNA, 21 nt, Human
uccuucaccuuuguccccacc

SEQ ID NO: 3314730 - RNA, 16 nt, Human
ucgugauugauaagaa

SEQ ID NO: 3314731 - RNA, 21 nt, Human
ucuaaaucuccaaaauaaaac

SEQ ID NO: 3314732 - RNA, 17 nt, Human
ucucaaauaacuaaaag

SEQ ID NO: 3314733 - RNA, 15 nt, Human
ucuaucaaguauuau

SEQ ID NO: 3314734 - RNA, 21 nt, Human
ucuaucaaguauuauaccuuu

SEQ ID NO: 3314735 - RNA, 21 nt, Human
ucuaggaagacuuuggaaaga

SEQ ID NO: 3314736 - RNA, 13 nt, Human
ucccuucccaccu

SEQ ID NO: 3314737 - RNA, 14 nt, Human
ucccugcacuugca

SEQ ID NO: 3314738 - RNA, 13 nt, Human
ucccugcacuugc

SEQ ID NO: 3314739 - RNA, 21 nt, Human
uccccuguuuguuucugaaag

SEQ ID NO: 3314740 - RNA, 20 nt, Human
uccccuguuuguuucugaaa

SEQ ID NO: 3314741 - RNA, 18 nt, Human
uccccuguuuguuucuga

SEQ ID NO: 3314742 - RNA, 17 nt, Human
uccagguuuaagcuguu

SEQ ID NO: 3314743 - RNA, 19 nt, Human
uccuccuuuucacaguucu

SEQ ID NO: 3314744 - RNA, 14 nt, Human
uccucuaggagguc

SEQ ID NO: 3314745 - RNA, 15 nt, Human
uccucuguacagagc

SEQ ID NO: 3314746 - RNA, 18 nt, Human
uccucuguacagagccca

SEQ ID NO: 3314747 - RNA, 17 nt, Human
uccucuguacagagccc

SEQ ID NO: 3314748 - RNA, 16 nt, Human
uccucuguacagagcc

SEQ ID NO: 3314749 - RNA, 16 nt, Human
uccucugcugcuggcu

SEQ ID NO: 3314750 - RNA, 15 nt, Human
uccucugcugcuggc

SEQ ID NO: 3314751 - RNA, 14 nt, Human
uccucugcugcugg

SEQ ID NO: 3314752 - RNA, 12 nt, Human
uccucugcugcu

SEQ ID NO: 3314753 - RNA, 22 nt, Human
uccuaguuccaccaucaagcca

SEQ ID NO: 3314754 - RNA, 18 nt, Human
uccuauauuguuuucagu

SEQ ID NO: 3314755 - RNA, 18 nt, Human
uccuacccacccuccuuu

SEQ ID NO: 3314756 - RNA, 13 nt, Human
uccgaccagacac

SEQ ID NO: 3314757 - RNA, 16 nt, Human
uccuaaucuucugaac

SEQ ID NO: 3314758 - RNA, 15 nt, Human
ucucuaguuugauua

SEQ ID NO: 3314759 - RNA, 14 nt, Human
ucucugaggacacu

SEQ ID NO: 3314760 - RNA, 17 nt, Human
ucucugaggacacuaac

SEQ ID NO: 3314761 - RNA, 19 nt, Human
ucucuaacuucaccauauu

SEQ ID NO: 3314762 - RNA, 12 nt, Human
ucucuaacuuca

SEQ ID NO: 3314763 - RNA, 13 nt, Human
ucuccuguaccuc

SEQ ID NO: 3314764 - RNA, 17 nt, Human
ucuccuguaccucuuga

SEQ ID NO: 3314765 - RNA, 16 nt, Human
ucuccuguaccucuug

SEQ ID NO: 3314766 - RNA, 22 nt, Human
ucucgugauugauaagaaccuu

SEQ ID NO: 3314767 - RNA, 14 nt, Human
ucucgugauugaua

SEQ ID NO: 3314768 - RNA, 17 nt, Human
ucuccugccucagccuc

SEQ ID NO: 3314769 - RNA, 15 nt, Human
ucuccugccucagcc

SEQ ID NO: 3314770 - RNA, 21 nt, Human
ucuccuggaaauauuaagaaa

SEQ ID NO: 3314771 - RNA, 15 nt, Human
ucuccuguaccucuu

SEQ ID NO: 3314772 - RNA, 20 nt, Human
ucugcaagaauugaagcagg

SEQ ID NO: 3314773 - RNA, 14 nt, Human
ucugacccacugcu

SEQ ID NO: 3314774 - RNA, 23 nt, Human
ucugaggaauccagacccggcug

SEQ ID NO: 3314775 - RNA, 13 nt, Human
ucugaaaauguau

SEQ ID NO: 3314776 - RNA, 16 nt, Human
ucugacacacagcucu

SEQ ID NO: 3314777 - RNA, 17 nt, Human
ucugacacacagcucug

SEQ ID NO: 3314778 - RNA, 18 nt, Human
ucugacacacagcucugu

SEQ ID NO: 3314779 - RNA, 19 nt, Human
ucugacacacagcucuguc

SEQ ID NO: 3314780 - RNA, 12 nt, Human
ucugacaggcaa

SEQ ID NO: 3314781 - RNA, 21 nt, Human
ucugacaggcaaugcuggcug

SEQ ID NO: 3314782 - RNA, 22 nt, Human
ucugacaggcaaugcuggcugu

SEQ ID NO: 3314783 - RNA, 13 nt, Human
ucugacccacugc

SEQ ID NO: 3314784 - RNA, 17 nt, Human
ucuggcuaugcauuuga

SEQ ID NO: 3314785 - RNA, 22 nt, Human
ucuggcuaugcauuugaaaauu

SEQ ID NO: 3314786 - RNA, 19 nt, Human
ucuggcuaugcauuugaaa

SEQ ID NO: 3314787 - RNA, 14 nt, Human
ucugggacacaguu

SEQ ID NO: 3314788 - RNA, 13 nt, Human
ucugggacacagu

SEQ ID NO: 3314789 - RNA, 23 nt, Human
ucuggugacuuuccucuuugguc

SEQ ID NO: 3314790 - RNA, 23 nt, Human
ucuggcucuuccaggcugggaga

SEQ ID NO: 3314791 - RNA, 18 nt, Human
ucuggcucuuccaggcug

SEQ ID NO: 3314792 - RNA, 14 nt, Human
ucuguccuacucug

SEQ ID NO: 3314793 - RNA, 16 nt, Human
ucuggugacuuuccuc

SEQ ID NO: 3314794 - RNA, 21 nt, Human
ucuguccugggagugagcugg

SEQ ID NO: 3314795 - RNA, 15 nt, Human
ucuguccuacucugu

SEQ ID NO: 3314796 - RNA, 19 nt, Human
ucuguccuacucuguguca

SEQ ID NO: 3314797 - RNA, 14 nt, Human
ucugucgcccaguc

SEQ ID NO: 3314798 - RNA, 14 nt, Human
ucugccugcccagg

SEQ ID NO: 3314799 - RNA, 13 nt, Human
ucugccugcccag

SEQ ID NO: 3314800 - RNA, 15 nt, Human
ucugccugcccaggc

SEQ ID NO: 3314801 - RNA, 18 nt, Human
ucugcuccucuccccagc

SEQ ID NO: 3314802 - RNA, 18 nt, Human
ucugcugacagacacagg

SEQ ID NO: 3314803 - RNA, 17 nt, Human
ucugcugacagacacag

SEQ ID NO: 3314804 - RNA, 21 nt, Human
ucuggacaggcauguucucug

SEQ ID NO: 3314805 - RNA, 14 nt, Human
ucuggacaggcaug

SEQ ID NO: 3314806 - RNA, 15 nt, Human
ucuggaaugcagugg

SEQ ID NO: 3314807 - RNA, 19 nt, Human
ucuggaauaaggagaauga

SEQ ID NO: 3314808 - RNA, 19 nt, Human
ucugcugacagacacaggc

SEQ ID NO: 3314809 - RNA, 20 nt, Human
ucugcugacagacacaggcc

SEQ ID NO: 3314810 - RNA, 21 nt, Human
ucugcugacagacacaggccc

SEQ ID NO: 3314811 - RNA, 22 nt, Human
ucugcugacagacacaggcccg

SEQ ID NO: 3314812 - RNA, 22 nt, Human
ucuuaaauauguggaguucauc

SEQ ID NO: 3314813 - RNA, 23 nt, Human
ucuucagaucucuaacuucacca

SEQ ID NO: 3314814 - RNA, 18 nt, Human
ucuucagaucucuaacuu

SEQ ID NO: 3314815 - RNA, 15 nt, Human
ucuucagaucucuaa

SEQ ID NO: 3314816 - RNA, 15 nt, Human
ucuucuccaggcugu

SEQ ID NO: 3314817 - RNA, 12 nt, Human
ucuugaacuccu

SEQ ID NO: 3314818 - RNA, 23 nt, Human
uccagccaaagccuccuccagcc

SEQ ID NO: 3314819 - RNA, 16 nt, Human
uccaggagcagccaca

SEQ ID NO: 3314820 - RNA, 17 nt, Human
uccagcuguucagcugg

SEQ ID NO: 3314821 - RNA, 15 nt, Human
uccagcucaccagcc

SEQ ID NO: 3314822 - RNA, 16 nt, Human
uccagcucaccagccc

SEQ ID NO: 3314823 - RNA, 17 nt, Human
uccagcucaccagcccc

SEQ ID NO: 3314824 - RNA, 22 nt, Human
uccaggggugggacacccugug

SEQ ID NO: 3314825 - RNA, 18 nt, Human
uccaggagcagccacauu

SEQ ID NO: 3314826 - RNA, 17 nt, Human
uccaggagcagccacau

SEQ ID NO: 3314827 - RNA, 15 nt, Human
uccaggugcacaagc

SEQ ID NO: 3314828 - RNA, 23 nt, Human
uccaggggugggacacccuguga

SEQ ID NO: 3314829 - RNA, 22 nt, Human
uccaggugcacaagcuccaagc

SEQ ID NO: 3314830 - RNA, 21 nt, Human
uccaggugcacaagcuccaag

SEQ ID NO: 3314831 - RNA, 20 nt, Human
uccaggugcacaagcuccaa

SEQ ID NO: 3314832 - RNA, 18 nt, Human
uccaggugcacaagcucc

SEQ ID NO: 3314833 - RNA, 15 nt, Human
uccagguucagcuug

SEQ ID NO: 3314834 - RNA, 16 nt, Human
uccagguucagcuugu

SEQ ID NO: 3314835 - RNA, 18 nt, Human
uccaaaauaaaacuuuuu

SEQ ID NO: 3314836 - RNA, 20 nt, Human
uccaaaauaaaacuuuuuaa

SEQ ID NO: 3314837 - RNA, 17 nt, Human
uccaauuuacauacucu

SEQ ID NO: 3314838 - RNA, 18 nt, Human
uccaauuuacauacucug

SEQ ID NO: 3314839 - RNA, 17 nt, Human
uccacaaguuaaauaaa

SEQ ID NO: 3314840 - RNA, 18 nt, Human
uccacaaguuaaauaaau

SEQ ID NO: 3314841 - RNA, 15 nt, Human
uccacaagagcccag

SEQ ID NO: 3314842 - RNA, 18 nt, Human
uccacaagagcccaggcc

SEQ ID NO: 3314843 - RNA, 17 nt, Human
uccacaagagcccaggc

SEQ ID NO: 3314844 - RNA, 16 nt, Human
uccacaagagcccagg

SEQ ID NO: 3314845 - RNA, 12 nt, Human
uccacccugcuc

SEQ ID NO: 3314846 - RNA, 21 nt, Human
uccaccugccagggacagagg

SEQ ID NO: 3314847 - RNA, 18 nt, Human
uccaccugccagggacag

SEQ ID NO: 3314848 - RNA, 15 nt, Human
uccaccugccaggga

SEQ ID NO: 3314849 - RNA, 17 nt, Human
uccaccugccagggaca

SEQ ID NO: 3314850 - RNA, 21 nt, Human
ucaucaccaacgucugugcca

SEQ ID NO: 3314851 - RNA, 20 nt, Human
ucaucaccaacgucugugcc

SEQ ID NO: 3314852 - RNA, 19 nt, Human
ucaucaccaacgucugugc

SEQ ID NO: 3314853 - RNA, 21 nt, Human
ucauacccacccccacccaag

SEQ ID NO: 3314854 - RNA, 13 nt, Human
ucaggugcugcca

SEQ ID NO: 3314855 - RNA, 14 nt, Human
ucaggugcugccau

SEQ ID NO: 3314856 - RNA, 23 nt, Human
ucaggugccucaagagaaggcaa

SEQ ID NO: 3314857 - RNA, 21 nt, Human
ucaggugagaagcagaggaag

SEQ ID NO: 3314858 - RNA, 23 nt, Human
ucaucuuagguuggcaaaaaggc

SEQ ID NO: 3314859 - RNA, 21 nt, Human
ucauucaacccaccugcgucu

SEQ ID NO: 3314860 - RNA, 22 nt, Human
ucauuaggugugacugaauuuc

SEQ ID NO: 3314861 - RNA, 13 nt, Human
ucauuuccugugu

SEQ ID NO: 3314862 - RNA, 16 nt, Human
ucauuuccugugucuu

SEQ ID NO: 3314863 - RNA, 13 nt, Human
ucagacagcugcc

SEQ ID NO: 3314864 - RNA, 10 nt, Human
ucagaaaugu

SEQ ID NO: 3314865 - RNA, 16 nt, Human
ucagaauucucuaguu

SEQ ID NO: 3314866 - RNA, 15 nt, Human
ucagaaauguguuau

SEQ ID NO: 3314867 - RNA, 23 nt, Human
ucagaauucucuaguuugauuaa

SEQ ID NO: 3314868 - RNA, 14 nt, Human
ucacugcuuaacuu

SEQ ID NO: 3314869 - RNA, 20 nt, Human
ucacugcuuaacuucacaua

SEQ ID NO: 3314870 - RNA, 17 nt, Human
ucacucuuauugcccac

SEQ ID NO: 3314871 - RNA, 22 nt, Human
ucacucugucgcccagucugga

SEQ ID NO: 3314872 - RNA, 13 nt, Human
ucaccagccccag

SEQ ID NO: 3314873 - RNA, 22 nt, Human
ucaccccggccaccugcggugc

SEQ ID NO: 3314874 - RNA, 20 nt, Human
ucacucuuauugcccacgcu

SEQ ID NO: 3314875 - RNA, 18 nt, Human
ucacugccaugccagcuu

SEQ ID NO: 3314876 - RNA, 16 nt, Human
ucagggccuggcucag

SEQ ID NO: 3314877 - RNA, 14 nt, Human
ucagggccuggcuc

SEQ ID NO: 3314878 - RNA, 16 nt, Human
ucaggugagaagcaga

SEQ ID NO: 3314879 - RNA, 15 nt, Human
ucaggugagaagcag

SEQ ID NO: 3314880 - RNA, 16 nt, Human
ucagcugaaccugggu

SEQ ID NO: 3314881 - RNA, 15 nt, Human
ucagcugaaccuggg

SEQ ID NO: 3314882 - RNA, 19 nt, Human
ucagccugcuccagcuguu

SEQ ID NO: 3314883 - RNA, 18 nt, Human
ucagccugcuccagcugu

SEQ ID NO: 3314884 - RNA, 20 nt, Human
ucagccucccgaauagcugg

SEQ ID NO: 3314885 - RNA, 21 nt, Human
ucagccucccgaguagcuggg

SEQ ID NO: 3314886 - RNA, 22 nt, Human
ucagccucccgaguagcuggga

SEQ ID NO: 3314887 - RNA, 20 nt, Human
ucagccucccgaguagcugg

SEQ ID NO: 3314888 - RNA, 18 nt, Human
ucagccucccgaguagcu

SEQ ID NO: 3314889 - RNA, 21 nt, Human
ucagccucccgaauagcuggg

SEQ ID NO: 3314890 - RNA, 22 nt, Human
ucagccucccgaauagcuggga

SEQ ID NO: 3314891 - RNA, 13 nt, Human
ucagccucccaaa

SEQ ID NO: 3314892 - RNA, 14 nt, Human
ucagccucccaaag

SEQ ID NO: 3314893 - RNA, 19 nt, Human
ucagccucccaaagugcug

SEQ ID NO: 3314894 - RNA, 21 nt, Human
ucagccucccaaagugcuggg

SEQ ID NO: 3314895 - RNA, 20 nt, Human
ucaauuacaggaaguacugg

SEQ ID NO: 3314896 - RNA, 19 nt, Human
ucacaguccuuaccagcag

SEQ ID NO: 3314897 - RNA, 23 nt, Human
ucacaguccuuaccagcagagca

SEQ ID NO: 3314898 - RNA, 22 nt, Human
ucacaguccuuaccagcagagc

SEQ ID NO: 3314899 - RNA, 16 nt, Human
ucacaggcagguccag

SEQ ID NO: 3314900 - RNA, 17 nt, Human
ucacaggcagguccagg

SEQ ID NO: 3314901 - RNA, 18 nt, Human
ucacaggcagguccaggg

SEQ ID NO: 3314902 - RNA, 19 nt, Human
ucaccaaaucagcugcuac

SEQ ID NO: 3314903 - RNA, 20 nt, Human
ucaccaaaucagcugcuacu

SEQ ID NO: 3314904 - RNA, 18 nt, Human
ucacauuuauucugcuca

SEQ ID NO: 3314905 - RNA, 19 nt, Human
ucacauuuauucugcucac

SEQ ID NO: 3314906 - RNA, 17 nt, Human
ucacauuuauucugcuc

SEQ ID NO: 3314907 - RNA, 23 nt, Human
ucaauuacaggaaguacuggaga

SEQ ID NO: 3314908 - RNA, 21 nt, Human
ucaauuacaggaaguacugga

SEQ ID NO: 3314909 - RNA, 18 nt, Human
ucaagugauucuccugcc

SEQ ID NO: 3314910 - RNA, 20 nt, Human
ucaagugauucuccugccuc

SEQ ID NO: 3314911 - RNA, 20 nt, Human
ucaaccccuucgcuccugug

SEQ ID NO: 3314912 - RNA, 23 nt, Human
ucaaccccuucgcuccugugucu

SEQ ID NO: 3314913 - RNA, 22 nt, Human
uauuuucccuauuagagaagag

SEQ ID NO: 3314914 - RNA, 15 nt, Human
ucaaaaaaagaaaaa

SEQ ID NO: 3314915 - RNA, 14 nt, Human
ucaaaaaaagaaaa

SEQ ID NO: 3314916 - RNA, 17 nt, Human
uauuuuuuucuuuucuu

SEQ ID NO: 3314917 - RNA, 14 nt, Human
uauuuuuuuacuaa

SEQ ID NO: 3314918 - RNA, 17 nt, Human
uauuuuauuaugcauga

SEQ ID NO: 3314919 - RNA, 14 nt, Human
uauuuuauuaugca

SEQ ID NO: 3314920 - RNA, 22 nt, Human
uauuggaaauuuguuauaauga

SEQ ID NO: 3314921 - RNA, 17 nt, Human
uauugcugauggugcaa

SEQ ID NO: 3314922 - RNA, 17 nt, Human
uauucucuccuguaccu

SEQ ID NO: 3314923 - RNA, 21 nt, Human
uauugauaugcuuauacacuu

SEQ ID NO: 3314924 - RNA, 12 nt, Human
uauuguuuucag

SEQ ID NO: 3314925 - RNA, 18 nt, Human
uauuguuuucaguguaca

SEQ ID NO: 3314926 - RNA, 20 nt, Human
uauuguuuucaguguacaug

SEQ ID NO: 3314927 - RNA, 22 nt, Human
uauuguuuucaguguacaugga

SEQ ID NO: 3314928 - RNA, 20 nt, Human
uauguugcccaggcaggucu

SEQ ID NO: 3314929 - RNA, 16 nt, Human
uauguugcccaggcag

SEQ ID NO: 3314930 - RNA, 19 nt, Human
uauguugcccaggcagguc

SEQ ID NO: 3314931 - RNA, 13 nt, Human
uauguugcccagg

SEQ ID NO: 3314932 - RNA, 24 nt, Human
uauuaagaaagacuaucuaaaugu

SEQ ID NO: 3314933 - RNA, 12 nt, Human
uauuaaauuaug

SEQ ID NO: 3314934 - RNA, 15 nt, Human
gggaguggccacaga

SEQ ID NO: 3314935 - RNA, 13 nt, Human
gggaguggccaca

SEQ ID NO: 3314936 - RNA, 18 nt, Human
augcacaaacagaggccg

SEQ ID NO: 3314937 - RNA, 15 nt, Human
augaugauccuaggc

SEQ ID NO: 3314938 - RNA, 23 nt, Human
augaugaaaugaggucagagccu

SEQ ID NO: 3314939 - RNA, 18 nt, Human
augaugaaaugaggucag

SEQ ID NO: 3314940 - RNA, 17 nt, Human
augaucuuugcagacag

SEQ ID NO: 3314941 - RNA, 18 nt, Human
augaucuucuuuauaauu

SEQ ID NO: 3314942 - RNA, 18 nt, Human
augaucuuugcagacagg

SEQ ID NO: 3314943 - RNA, 19 nt, Human
augaucuuugcagacaggc

SEQ ID NO: 3314944 - RNA, 21 nt, Human
augaucuuugcagacaggcaa

SEQ ID NO: 3314945 - RNA, 20 nt, Human
augccuggauggggcugcac

SEQ ID NO: 3314946 - RNA, 19 nt, Human
augccuggauggggcugca

SEQ ID NO: 3314947 - RNA, 22 nt, Human
augcacagaguuguuacauuuu

SEQ ID NO: 3314948 - RNA, 21 nt, Human
augcacagaguuguuacauuu

SEQ ID NO: 3314949 - RNA, 19 nt, Human
augcacagaguuguuacau

SEQ ID NO: 3314950 - RNA, 14 nt, Human
augcacacauuuuu

SEQ ID NO: 3314951 - RNA, 13 nt, Human
augcacacauuuu

SEQ ID NO: 3314952 - RNA, 18 nt, Human
augcacagaguuguuaca

SEQ ID NO: 3314953 - RNA, 15 nt, Human
augcacacauuuuuu

SEQ ID NO: 3314954 - RNA, 16 nt, Human
augcugcccugugagu

SEQ ID NO: 3314955 - RNA, 15 nt, Human
augcugcccugugag

SEQ ID NO: 3314956 - RNA, 14 nt, Human
augcugcccuguga

SEQ ID NO: 3314957 - RNA, 12 nt, Human
augcugcccugu

SEQ ID NO: 3314958 - RNA, 13 nt, Human
augcugcccugug

SEQ ID NO: 3314959 - RNA, 15 nt, Human
augcuuguacauaau

SEQ ID NO: 3314960 - RNA, 16 nt, Human
augcuuguacauaaug

SEQ ID NO: 3314961 - RNA, 17 nt, Human
auggcuuuugugcauua

SEQ ID NO: 3314962 - RNA, 16 nt, Human
auggcuuuugugcauu

SEQ ID NO: 3314963 - RNA, 17 nt, Human
augucacaggcaggucc

SEQ ID NO: 3314964 - RNA, 19 nt, Human
augucacaggcagguccag

SEQ ID NO: 3314965 - RNA, 13 nt, Human
augucacaggcag

SEQ ID NO: 3314966 - RNA, 23 nt, Human
auguaauuaaguacuauguauca

SEQ ID NO: 3314967 - RNA, 23 nt, Human
augggugcuuggaggaaggaaac

SEQ ID NO: 3314968 - RNA, 21 nt, Human
augggugcuuggaggaaggaa

SEQ ID NO: 3314969 - RNA, 20 nt, Human
augggugcuuggaggaagga

SEQ ID NO: 3314970 - RNA, 13 nt, Human
auguguaaguauu

SEQ ID NO: 3314971 - RNA, 16 nt, Human
auguucucucuucucc

SEQ ID NO: 3314972 - RNA, 13 nt, Human
auguucucugagg

SEQ ID NO: 3314973 - RNA, 17 nt, Human
auguucucucuucucca

SEQ ID NO: 3314974 - RNA, 15 nt, Human
auguucugggacaca

SEQ ID NO: 3314975 - RNA, 13 nt, Human
auguucugggaca

SEQ ID NO: 3314976 - RNA, 14 nt, Human
auguucugggacac

SEQ ID NO: 3314977 - RNA, 14 nt, Human
auguuugccucugc

SEQ ID NO: 3314978 - RNA, 15 nt, Human
auguuugccucugcc

SEQ ID NO: 3314979 - RNA, 17 nt, Human
auguuugccucugccuc

SEQ ID NO: 3314980 - RNA, 21 nt, Human
augaggcauuuguuugaacug

SEQ ID NO: 3314981 - RNA, 14 nt, Human
augaggcauuuguu

SEQ ID NO: 3314982 - RNA, 13 nt, Human
augaggcauuugu

SEQ ID NO: 3314983 - RNA, 16 nt, Human
augaaaacacauuuuu

SEQ ID NO: 3314984 - RNA, 15 nt, Human
augaaaacacauuuu

SEQ ID NO: 3314985 - RNA, 14 nt, Human
augaaaacacauuu

SEQ ID NO: 3314986 - RNA, 19 nt, Human
aucccaugagccucagcau

SEQ ID NO: 3314987 - RNA, 18 nt, Human
aucccaugagccucagca

SEQ ID NO: 3314988 - RNA, 15 nt, Human
auccagacccggcug

SEQ ID NO: 3314989 - RNA, 19 nt, Human
auccagacccggcugcgug

SEQ ID NO: 3314990 - RNA, 14 nt, Human
aucaugucuggcua

SEQ ID NO: 3314991 - RNA, 21 nt, Human
aucaccgaaaacguggcugcu

SEQ ID NO: 3314992 - RNA, 20 nt, Human
aucaccaacgucugugccau

SEQ ID NO: 3314993 - RNA, 13 nt, Human
aucaccagacagg

SEQ ID NO: 3314994 - RNA, 24 nt, Human
aucaaaagguuaauaaaguaauua

SEQ ID NO: 3314995 - RNA, 23 nt, Human
aucaaagagguuuuaaaaaaauc

SEQ ID NO: 3314996 - RNA, 20 nt, Human
aucaaagagguuuuaaaaaa

SEQ ID NO: 3314997 - RNA, 18 nt, Human
auaaggguaucuggugac

SEQ ID NO: 3314998 - RNA, 17 nt, Human
auacccacccccaccca

SEQ ID NO: 3314999 - RNA, 13 nt, Human
auacccaccccca

SEQ ID NO: 3315000 - RNA, 16 nt, Human
auacccacccccaccc

SEQ ID NO: 3315001 - RNA, 14 nt, Human
auacccacccccac

SEQ ID NO: 3315002 - RNA, 13 nt, Human
auacacuuacacu

SEQ ID NO: 3315003 - RNA, 22 nt, Human
auacacuuacacuuuaugcaca

SEQ ID NO: 3315004 - RNA, 14 nt, Human
auacaaugcugugc

SEQ ID NO: 3315005 - RNA, 16 nt, Human
auaccugucccccuga

SEQ ID NO: 3315006 - RNA, 15 nt, Human
auaccugucccccug

SEQ ID NO: 3315007 - RNA, 14 nt, Human
auaccugucccccu

SEQ ID NO: 3315008 - RNA, 13 nt, Human
auaccuguccccc

SEQ ID NO: 3315009 - RNA, 23 nt, Human
aguuugauuaaauucuugcaaag

SEQ ID NO: 3315010 - RNA, 22 nt, Human
aguuguuacauuuuuaagugcu

SEQ ID NO: 3315011 - RNA, 20 nt, Human
aguuguuacauuuuuaagug

SEQ ID NO: 3315012 - RNA, 19 nt, Human
aguuguuacauuuuuaagu

SEQ ID NO: 3315013 - RNA, 19 nt, Human
aguuugagaucagccuggg

SEQ ID NO: 3315014 - RNA, 18 nt, Human
aguuugagaucagccugg

SEQ ID NO: 3315015 - RNA, 20 nt, Human
aguuugagaucagccugggc

SEQ ID NO: 3315016 - RNA, 16 nt, Human
aguuugauuaaauucu

SEQ ID NO: 3315017 - RNA, 22 nt, Human
aguuugauuaaauucuugcaaa

SEQ ID NO: 3315018 - RNA, 20 nt, Human
aguuugauuaaauucuugca

SEQ ID NO: 3315019 - RNA, 18 nt, Human
aguuugauuaaauucuug

SEQ ID NO: 3315020 - RNA, 17 nt, Human
aguuugauuaaauucuu

SEQ ID NO: 3315021 - RNA, 12 nt, Human
auaacauguaau

SEQ ID NO: 3315022 - RNA, 13 nt, Human
auaacauguaauu

SEQ ID NO: 3315023 - RNA, 18 nt, Human
auaacauguaauuaagua

SEQ ID NO: 3315024 - RNA, 15 nt, Human
auagcacagacccug

SEQ ID NO: 3315025 - RNA, 18 nt, Human
auagcacagacccugccc

SEQ ID NO: 3315026 - RNA, 17 nt, Human
auagcacagacccugcc

SEQ ID NO: 3315027 - RNA, 15 nt, Human
auagccuaggugaca

SEQ ID NO: 3315028 - RNA, 17 nt, Human
auagccuaggugacaga

SEQ ID NO: 3315029 - RNA, 20 nt, Human
auaugcucugcauguuacau

SEQ ID NO: 3315030 - RNA, 16 nt, Human
auaugcucugcauguu

SEQ ID NO: 3315031 - RNA, 17 nt, Human
auaugcucugcauguua

SEQ ID NO: 3315032 - RNA, 22 nt, Human
auaugcacacauuuuuuaaaug

SEQ ID NO: 3315033 - RNA, 17 nt, Human
auauucaggaagcucag

SEQ ID NO: 3315034 - RNA, 19 nt, Human
auauucaggaagcucaggg

SEQ ID NO: 3315035 - RNA, 16 nt, Human
agugggagcugccugu

SEQ ID NO: 3315036 - RNA, 13 nt, Human
agugauccuccca

SEQ ID NO: 3315037 - RNA, 14 nt, Human
agugauucuccugc

SEQ ID NO: 3315038 - RNA, 18 nt, Human
agugccuuacacaauggu

SEQ ID NO: 3315039 - RNA, 15 nt, Human
agugauucuccugcc

SEQ ID NO: 3315040 - RNA, 17 nt, Human
agugccuuacacaaugg

SEQ ID NO: 3315041 - RNA, 14 nt, Human
agugauccucccac

SEQ ID NO: 3315042 - RNA, 15 nt, Human
agugauccucccacc

SEQ ID NO: 3315043 - RNA, 18 nt, Human
agugauccucccaccuca

SEQ ID NO: 3315044 - RNA, 23 nt, Human
agugauccucccaccucagccuc

SEQ ID NO: 3315045 - RNA, 24 nt, Human
agugauccucccaccucagccucc

SEQ ID NO: 3315046 - RNA, 15 nt, Human
agugccuuauggaac

SEQ ID NO: 3315047 - RNA, 14 nt, Human
agugccuuauggaa

SEQ ID NO: 3315048 - RNA, 13 nt, Human
agugccuuaugga

SEQ ID NO: 3315049 - RNA, 10 nt, Human
agugccuuau

SEQ ID NO: 3315050 - RNA, 16 nt, Human
agugccuuauggaaca

SEQ ID NO: 3315051 - RNA, 16 nt, Human
aguugauacuacaguu

SEQ ID NO: 3315052 - RNA, 13 nt, Human
aguucaucuugaa

SEQ ID NO: 3315053 - RNA, 19 nt, Human
aguucaucuugaauuguaa

SEQ ID NO: 3315054 - RNA, 15 nt, Human
aguucaucuugaauu

SEQ ID NO: 3315055 - RNA, 17 nt, Human
agucugaaggcuggguu

SEQ ID NO: 3315056 - RNA, 19 nt, Human
aguccuuaccagcagagca

SEQ ID NO: 3315057 - RNA, 22 nt, Human
aguccucuuuucugagaggacu

SEQ ID NO: 3315058 - RNA, 20 nt, Human
aguccuuaccagcagagcac

SEQ ID NO: 3315059 - RNA, 19 nt, Human
aguccucuuuucugagagg

SEQ ID NO: 3315060 - RNA, 14 nt, Human
aguccucuuuucug

SEQ ID NO: 3315061 - RNA, 17 nt, Human
aguaugaggcauuuguu

SEQ ID NO: 3315062 - RNA, 23 nt, Human
aguaugaggcauuuguuugaacu

SEQ ID NO: 3315063 - RNA, 21 nt, Human
aguaugaggcauuuguuugaa

SEQ ID NO: 3315064 - RNA, 20 nt, Human
aguaugaggcauuuguuuga

SEQ ID NO: 3315065 - RNA, 22 nt, Human
agucacacaguauuacuucugc

SEQ ID NO: 3315066 - RNA, 16 nt, Human
aggucuguucuuucca

SEQ ID NO: 3315067 - RNA, 15 nt, Human
aggucuguucuuucc

SEQ ID NO: 3315068 - RNA, 13 nt, Human
aggucuguucuuu

SEQ ID NO: 3315069 - RNA, 14 nt, Human
aguacguugugcau

SEQ ID NO: 3315070 - RNA, 15 nt, Human
aguacguugugcauu

SEQ ID NO: 3315071 - RNA, 18 nt, Human
aguacguugugcauuugg

SEQ ID NO: 3315072 - RNA, 17 nt, Human
aguacguugugcauuug

SEQ ID NO: 3315073 - RNA, 16 nt, Human
aguacguugugcauuu

SEQ ID NO: 3315074 - RNA, 14 nt, Human
aguacuauaauuua

SEQ ID NO: 3315075 - RNA, 22 nt, Human
aguacuacaguccucccaucuc

SEQ ID NO: 3315076 - RNA, 19 nt, Human
aguacuacaguccucccau

SEQ ID NO: 3315077 - RNA, 17 nt, Human
aguacuucuccacccug

SEQ ID NO: 3315078 - RNA, 12 nt, Human
aguacuucuuuu

SEQ ID NO: 3315079 - RNA, 22 nt, Human
aguacuucuccacccugcucuc

SEQ ID NO: 3315080 - RNA, 12 nt, Human
aguacuauguau

SEQ ID NO: 3315081 - RNA, 14 nt, Human
aguacuauguauca

SEQ ID NO: 3315082 - RNA, 15 nt, Human
agggacccuccacca

SEQ ID NO: 3315083 - RNA, 18 nt, Human
aggcuuagucacugagac

SEQ ID NO: 3315084 - RNA, 17 nt, Human
aggcuggguucugaucc

SEQ ID NO: 3315085 - RNA, 20 nt, Human
aggcuguaucccaugagccu

SEQ ID NO: 3315086 - RNA, 21 nt, Human
aggcuguaucccaugagccuc

SEQ ID NO: 3315087 - RNA, 22 nt, Human
aggcuguaucccaugagccuca

SEQ ID NO: 3315088 - RNA, 17 nt, Human
aggcuuagucacugaga

SEQ ID NO: 3315089 - RNA, 15 nt, Human
aggcuaccuuuguau

SEQ ID NO: 3315090 - RNA, 14 nt, Human
aggcuaccuuugua

SEQ ID NO: 3315091 - RNA, 13 nt, Human
aggcuaccuuugu

SEQ ID NO: 3315092 - RNA, 18 nt, Human
aggcuggguucugauccu

SEQ ID NO: 3315093 - RNA, 21 nt, Human
aggcccucugcccacucccug

SEQ ID NO: 3315094 - RNA, 23 nt, Human
aggcccucugcccacucccugca

SEQ ID NO: 3315095 - RNA, 22 nt, Human
aggcccucugcccacucccugc

SEQ ID NO: 3315096 - RNA, 12 nt, Human
aggcccuucucu

SEQ ID NO: 3315097 - RNA, 19 nt, Human
aggcccuucucuccagccc

SEQ ID NO: 3315098 - RNA, 15 nt, Human
aggcccuucucucca

SEQ ID NO: 3315099 - RNA, 15 nt, Human
aggccaggcccucug

SEQ ID NO: 3315100 - RNA, 14 nt, Human
aggccaggcccucu

SEQ ID NO: 3315101 - RNA, 13 nt, Human
aggccaggcccuc

SEQ ID NO: 3315102 - RNA, 23 nt, Human
aggccagcugcuugggcuucauc

SEQ ID NO: 3315103 - RNA, 20 nt, Human
aggcauuccccaggaggcca

SEQ ID NO: 3315104 - RNA, 19 nt, Human
aggcauuccccaggaggcc

SEQ ID NO: 3315105 - RNA, 15 nt, Human
aggcaugguggccca

SEQ ID NO: 3315106 - RNA, 17 nt, Human
aggcaugugaugagagg

SEQ ID NO: 3315107 - RNA, 17 nt, Human
aggcauguucucugagg

SEQ ID NO: 3315108 - RNA, 21 nt, Human
aggcaugugaugagaggaaau

SEQ ID NO: 3315109 - RNA, 20 nt, Human
aggcaugugaugagaggaaa

SEQ ID NO: 3315110 - RNA, 19 nt, Human
aggcaugugaugagaggaa

SEQ ID NO: 3315111 - RNA, 18 nt, Human
aggcauguucucugagga

SEQ ID NO: 3315112 - RNA, 19 nt, Human
aggcauguucucugaggac

SEQ ID NO: 3315113 - RNA, 12 nt, Human
aggcauguucuc

SEQ ID NO: 3315114 - RNA, 17 nt, Human
aggcauuccccaggagg

SEQ ID NO: 3315115 - RNA, 18 nt, Human
aggcauuccccaggaggc

SEQ ID NO: 3315116 - RNA, 14 nt, Human
agggccugcaaggg

SEQ ID NO: 3315117 - RNA, 15 nt, Human
agggccugcaaggga

SEQ ID NO: 3315118 - RNA, 13 nt, Human
agggccuggccug

SEQ ID NO: 3315119 - RNA, 12 nt, Human
agggccuggccu

SEQ ID NO: 3315120 - RNA, 16 nt, Human
agggauacccauccca

SEQ ID NO: 3315121 - RNA, 15 nt, Human
aggguaucuggugac

SEQ ID NO: 3315122 - RNA, 21 nt, Human
aggguaucuggugacuuuccu

SEQ ID NO: 3315123 - RNA, 13 nt, Human
aggguauuccaga

SEQ ID NO: 3315124 - RNA, 14 nt, Human
agggucccuggugg

SEQ ID NO: 3315125 - RNA, 12 nt, Human
agggucccuggu

SEQ ID NO: 3315126 - RNA, 22 nt, Human
agggucccugguggcagcucac

SEQ ID NO: 3315127 - RNA, 20 nt, Human
agggucccugguggcagcuc

SEQ ID NO: 3315128 - RNA, 17 nt, Human
agggucccugguggcag

SEQ ID NO: 3315129 - RNA, 16 nt, Human
agggucccugguggca

SEQ ID NO: 3315130 - RNA, 22 nt, Human
aggggcccaaauucuuucagug

SEQ ID NO: 3315131 - RNA, 21 nt, Human
aggggccucuuaugggcuggg

SEQ ID NO: 3315132 - RNA, 22 nt, Human
aggguuuugccauguuggccag

SEQ ID NO: 3315133 - RNA, 22 nt, Human
agguacgaaaagaggggaagag

SEQ ID NO: 3315134 - RNA, 16 nt, Human
agguaacaggcagaua

SEQ ID NO: 3315135 - RNA, 13 nt, Human
agguaacaggcag

SEQ ID NO: 3315136 - RNA, 14 nt, Human
agguaacaggcaga

SEQ ID NO: 3315137 - RNA, 13 nt, Human
agguacucuccug

SEQ ID NO: 3315138 - RNA, 14 nt, Human
agguacucuccugg

SEQ ID NO: 3315139 - RNA, 22 nt, Human
aggaauaccugucccccugaca

SEQ ID NO: 3315140 - RNA, 18 nt, Human
aggaauaccugucccccu

SEQ ID NO: 3315141 - RNA, 15 nt, Human
aggaauaccuguccc

SEQ ID NO: 3315142 - RNA, 21 nt, Human
aggaacuuaaauaaugugaaa

SEQ ID NO: 3315143 - RNA, 20 nt, Human
aggaacaaggcaaggcuguc

SEQ ID NO: 3315144 - RNA, 19 nt, Human
aggaacaaggcaaggcugu

SEQ ID NO: 3315145 - RNA, 17 nt, Human
aggaacaaggcaaggcu

SEQ ID NO: 3315146 - RNA, 16 nt, Human
aggaacaaggcaaggc

SEQ ID NO: 3315147 - RNA, 13 nt, Human
aggaacaaggcaa

SEQ ID NO: 3315148 - RNA, 12 nt, Human
aggaacaaggca

SEQ ID NO: 3315149 - RNA, 23 nt, Human
agcuuuguuuguugucagcugaa

SEQ ID NO: 3315150 - RNA, 22 nt, Human
agcuuuguuuguugucagcuga

SEQ ID NO: 3315151 - RNA, 19 nt, Human
agcuucauuuccugugucu

SEQ ID NO: 3315152 - RNA, 18 nt, Human
agcuucauuuccuguguc

SEQ ID NO: 3315153 - RNA, 15 nt, Human
aggagaggagagggg

SEQ ID NO: 3315154 - RNA, 19 nt, Human
agcgagcccugguggcagu

SEQ ID NO: 3315155 - RNA, 13 nt, Human
agcgagcccuggu

SEQ ID NO: 3315156 - RNA, 12 nt, Human
agccugggaggu

SEQ ID NO: 3315157 - RNA, 16 nt, Human
agcucaccagccccag

SEQ ID NO: 3315158 - RNA, 15 nt, Human
agcuaaugggacacu

SEQ ID NO: 3315159 - RNA, 12 nt, Human
agcucagagagg

SEQ ID NO: 3315160 - RNA, 14 nt, Human
agcucagagagggu

SEQ ID NO: 3315161 - RNA, 18 nt, Human
agcucagagaggguggga

SEQ ID NO: 3315162 - RNA, 19 nt, Human
agcucaccagccccagugc

SEQ ID NO: 3315163 - RNA, 15 nt, Human
agcucaccagcccca

SEQ ID NO: 3315164 - RNA, 12 nt, Human
agcucaccucuc

SEQ ID NO: 3315165 - RNA, 19 nt, Human
agcucaccucucccuugga

SEQ ID NO: 3315166 - RNA, 18 nt, Human
agcucaccucucccuugg

SEQ ID NO: 3315167 - RNA, 15 nt, Human
agcucaccucucccu

SEQ ID NO: 3315168 - RNA, 15 nt, Human
agcugaaccugggua

SEQ ID NO: 3315169 - RNA, 12 nt, Human
agcugcugacag

SEQ ID NO: 3315170 - RNA, 19 nt, Human
agcugcgguccacccagga

SEQ ID NO: 3315171 - RNA, 20 nt, Human
agcugcgguccacccaggag

SEQ ID NO: 3315172 - RNA, 13 nt, Human
agcugcgguccac

SEQ ID NO: 3315173 - RNA, 16 nt, Human
agcugcgguccaccca

SEQ ID NO: 3315174 - RNA, 17 nt, Human
agcugcgguccacccag

SEQ ID NO: 3315175 - RNA, 18 nt, Human
agcugcgguccacccagg

SEQ ID NO: 3315176 - RNA, 22 nt, Human
agcugguuuuuagcggagacgg

SEQ ID NO: 3315177 - RNA, 16 nt, Human
agcugguugagguuuc

SEQ ID NO: 3315178 - RNA, 18 nt, Human
agcuggucccacucaguc

SEQ ID NO: 3315179 - RNA, 13 nt, Human
agcugcugacagu

SEQ ID NO: 3315180 - RNA, 14 nt, Human
agcugcugacagug

SEQ ID NO: 3315181 - RNA, 16 nt, Human
agcuggucccacucag

SEQ ID NO: 3315182 - RNA, 17 nt, Human
agcuggucccacucagu

SEQ ID NO: 3315183 - RNA, 14 nt, Human
agaugagugagcau

SEQ ID NO: 3315184 - RNA, 20 nt, Human
agcaaaggagauuggaagga

SEQ ID NO: 3315185 - RNA, 18 nt, Human
agcaaaagaugcuucuca

SEQ ID NO: 3315186 - RNA, 18 nt, Human
agauucuuuccugaggcu

SEQ ID NO: 3315187 - RNA, 21 nt, Human
agauucuuuccugaggcuggg

SEQ ID NO: 3315188 - RNA, 19 nt, Human
agauucuuuccugaggcug

SEQ ID NO: 3315189 - RNA, 19 nt, Human
agauugcaacaggcugggc

SEQ ID NO: 3315190 - RNA, 23 nt, Human
agauugcaacaggcugggcuuca

SEQ ID NO: 3315191 - RNA, 20 nt, Human
agauugcaacaggcugggcu

SEQ ID NO: 3315192 - RNA, 21 nt, Human
agauugcaacaggcugggcuu

SEQ ID NO: 3315193 - RNA, 12 nt, Human
agcacagacccu

SEQ ID NO: 3315194 - RNA, 15 nt, Human
agcacagacccugcc

SEQ ID NO: 3315195 - RNA, 14 nt, Human
agcacagacccugc

SEQ ID NO: 3315196 - RNA, 16 nt, Human
agcacagacccugccc

SEQ ID NO: 3315197 - RNA, 17 nt, Human
agcacgauuucuguuua

SEQ ID NO: 3315198 - RNA, 21 nt, Human
agcacgauuucuguuuagaua

SEQ ID NO: 3315199 - RNA, 19 nt, Human
agcacgauuucuguuuaga

SEQ ID NO: 3315200 - RNA, 24 nt, Human
agccccaaaacucuccucugcugc

SEQ ID NO: 3315201 - RNA, 20 nt, Human
agcccgggcucugccuccca

SEQ ID NO: 3315202 - RNA, 18 nt, Human
agcccgggcucugccucc

SEQ ID NO: 3315203 - RNA, 17 nt, Human
agcccgggcucugccuc

SEQ ID NO: 3315204 - RNA, 15 nt, Human
agccccauccucugu

SEQ ID NO: 3315205 - RNA, 23 nt, Human
agccccauccucuguacagagcc

SEQ ID NO: 3315206 - RNA, 17 nt, Human
agccccauccucuguac

SEQ ID NO: 3315207 - RNA, 11 nt, Human
agccccauccu

SEQ ID NO: 3315208 - RNA, 17 nt, Human
agccccauucugccugc

SEQ ID NO: 3315209 - RNA, 18 nt, Human
agccccauucugccugcc

SEQ ID NO: 3315210 - RNA, 19 nt, Human
agccccauucugccugccc

SEQ ID NO: 3315211 - RNA, 13 nt, Human
agcauccuggcac

SEQ ID NO: 3315212 - RNA, 23 nt, Human
agcccacgcccccacuggugaca

SEQ ID NO: 3315213 - RNA, 20 nt, Human
agcccacgcccccacuggug

SEQ ID NO: 3315214 - RNA, 14 nt, Human
agcccacgccccca

SEQ ID NO: 3315215 - RNA, 16 nt, Human
agcccaccuuggcuca

SEQ ID NO: 3315216 - RNA, 14 nt, Human
agcccaccuuggcu

SEQ ID NO: 3315217 - RNA, 15 nt, Human
agcccaccccucaac

SEQ ID NO: 3315218 - RNA, 16 nt, Human
agccagcaggcucuca

SEQ ID NO: 3315219 - RNA, 11 nt, Human
agccagaggag

SEQ ID NO: 3315220 - RNA, 15 nt, Human
agccagaggagagag

SEQ ID NO: 3315221 - RNA, 13 nt, Human
agccagaggagag

SEQ ID NO: 3315222 - RNA, 17 nt, Human
agccagaggagagagga

SEQ ID NO: 3315223 - RNA, 14 nt, Human
agccagcaggcucu

SEQ ID NO: 3315224 - RNA, 14 nt, Human
agcauccuggcacc

SEQ ID NO: 3315225 - RNA, 17 nt, Human
agcauccuggcacccgg

SEQ ID NO: 3315226 - RNA, 16 nt, Human
agccaaagcuaggccu

SEQ ID NO: 3315227 - RNA, 18 nt, Human
agaaugaaagggcccaga

SEQ ID NO: 3315228 - RNA, 16 nt, Human
agaaugaaagggccca

SEQ ID NO: 3315229 - RNA, 19 nt, Human
agaaugcacaaacagaggc

SEQ ID NO: 3315230 - RNA, 23 nt, Human
agaagagaaugcacaaacagagg

SEQ ID NO: 3315231 - RNA, 13 nt, Human
agaagacacugau

SEQ ID NO: 3315232 - RNA, 21 nt, Human
agaagacacugaugggcaacc

SEQ ID NO: 3315233 - RNA, 14 nt, Human
agaaguaacuuacu

SEQ ID NO: 3315234 - RNA, 21 nt, Human
agacagagucucacuguugcc

SEQ ID NO: 3315235 - RNA, 22 nt, Human
agacagauacuccuccaagguu

SEQ ID NO: 3315236 - RNA, 15 nt, Human
agaccacguuucuaa

SEQ ID NO: 3315237 - RNA, 20 nt, Human
agacaaugacuuacuguaca

SEQ ID NO: 3315238 - RNA, 11 nt, Human
agacagagucu

SEQ ID NO: 3315239 - RNA, 13 nt, Human
agacagagcuaca

SEQ ID NO: 3315240 - RNA, 19 nt, Human
agacagagucucacuguug

SEQ ID NO: 3315241 - RNA, 20 nt, Human
agacagagucucacuguugc

SEQ ID NO: 3315242 - RNA, 15 nt, Human
agacagagcuacaca

SEQ ID NO: 3315243 - RNA, 19 nt, Human
agacaaugacuuacuguac

SEQ ID NO: 3315244 - RNA, 22 nt, Human
agacaaugacuuacuguacaug

SEQ ID NO: 3315245 - RNA, 21 nt, Human
agacaaugacuuacuguacau

SEQ ID NO: 3315246 - RNA, 20 nt, Human
agacugaguacguugugcau

SEQ ID NO: 3315247 - RNA, 22 nt, Human
agacugaguacguugugcauuu

SEQ ID NO: 3315248 - RNA, 18 nt, Human
agacucugucucaaaaaa

SEQ ID NO: 3315249 - RNA, 13 nt, Human
agacucugucuca

SEQ ID NO: 3315250 - RNA, 16 nt, Human
agacgcugugcugccc

SEQ ID NO: 3315251 - RNA, 13 nt, Human
agagccagggucu

SEQ ID NO: 3315252 - RNA, 16 nt, Human
agagagaccacuuuuc

SEQ ID NO: 3315253 - RNA, 16 nt, Human
agagggccugcaaggg

SEQ ID NO: 3315254 - RNA, 13 nt, Human
agagggccugcaa

SEQ ID NO: 3315255 - RNA, 19 nt, Human
agaggggguggccucccaa

SEQ ID NO: 3315256 - RNA, 17 nt, Human
agaggggguggccuccc

SEQ ID NO: 3315257 - RNA, 14 nt, Human
agaggacuuuucuu

SEQ ID NO: 3315258 - RNA, 21 nt, Human
agaggacuuuucuuuguggcu

SEQ ID NO: 3315259 - RNA, 22 nt, Human
agaggacuuuucuuuguggcuu

SEQ ID NO: 3315260 - RNA, 14 nt, Human
aaaggcuccaggag

SEQ ID NO: 3315261 - RNA, 14 nt, Human
aaaggcuaccuuug

SEQ ID NO: 3315262 - RNA, 17 nt, Human
aaaggcuaccuuuguau

SEQ ID NO: 3315263 - RNA, 21 nt, Human
aaaggcuccaggagcagccac

SEQ ID NO: 3315264 - RNA, 20 nt, Human
aaaggcuccaggagcagcca

SEQ ID NO: 3315265 - RNA, 22 nt, Human
aaaggcuccaggagcagccaca

SEQ ID NO: 3315266 - RNA, 15 nt, Human
aaagccaaagcuagg

SEQ ID NO: 3315267 - RNA, 11 nt, Human
aaauaaauuau

SEQ ID NO: 3315268 - RNA, 17 nt, Human
aaaccccaucucuacaa

SEQ ID NO: 3315269 - RNA, 18 nt, Human
aaacccagcucuggucca

SEQ ID NO: 3315270 - RNA, 17 nt, Human
aaacucuugaccucagg

SEQ ID NO: 3315271 - RNA, 14 nt, Human
aaacccuucagugc

SEQ ID NO: 3315272 - RNA, 19 nt, Human
aaacugauuuuuuuuuccu

SEQ ID NO: 3315273 - RNA, 13 nt, Human
aaacugauuuuuu

SEQ ID NO: 3315274 - RNA, 20 nt, Human
aaacugauuuuuuuuuccuu

SEQ ID NO: 3315275 - RNA, 15 nt, Human
aaagauacaguuacu

SEQ ID NO: 3315276 - RNA, 15 nt, Human
aaaauuagccaagug

SEQ ID NO: 3315277 - RNA, 17 nt, Human
aaacagcuaaugggaca

SEQ ID NO: 3315278 - RNA, 14 nt, Human
aaauuaacuuuuau

SEQ ID NO: 3315279 - RNA, 13 nt, Human
aaauuaacuuuua

SEQ ID NO: 3315280 - RNA, 12 nt, Human
aaauuaacuuuu

SEQ ID NO: 3315281 - RNA, 22 nt, Human
aacaaaccuguuucugcagcca

SEQ ID NO: 3315282 - RNA, 21 nt, Human
aacacauacaggaagguagaa

SEQ ID NO: 3315283 - RNA, 19 nt, Human
aaaucuccaaaauaaaacu

SEQ ID NO: 3315284 - RNA, 22 nt, Human
aaaucuccaaaauaaaacuuuu

SEQ ID NO: 3315285 - RNA, 14 nt, Human
aaauggacguguua

SEQ ID NO: 3315286 - RNA, 17 nt, Human
aaauggacguguuauga

SEQ ID NO: 3315287 - RNA, 15 nt, Human
aaauggacguguuau

SEQ ID NO: 3315288 - RNA, 17 nt, Human
aacucaaacucuuaaaa

SEQ ID NO: 3315289 - RNA, 17 nt, Human
aacucaccccagcccca

SEQ ID NO: 3315290 - RNA, 16 nt, Human
aacucaccccagcccc

SEQ ID NO: 3315291 - RNA, 18 nt, Human
aacucaccccagccccaa

SEQ ID NO: 3315292 - RNA, 15 nt, Human
aacucaccccagccc

SEQ ID NO: 3315293 - RNA, 22 nt, Human
aacaugcuacacacugcauguu

SEQ ID NO: 3315294 - RNA, 15 nt, Human
aacauggaaguacua

SEQ ID NO: 3315295 - RNA, 13 nt, Human
aacccuucagugc

SEQ ID NO: 3315296 - RNA, 17 nt, Human
aaccaguguuguggauu

SEQ ID NO: 3315297 - RNA, 19 nt, Human
aaccaguguuguggauuua

SEQ ID NO: 3315298 - RNA, 16 nt, Human
aacagcuaaugggaca

SEQ ID NO: 3315299 - RNA, 13 nt, Human
aagugcugcauuu

SEQ ID NO: 3315300 - RNA, 19 nt, Human
aauaauguuaacauggaca

SEQ ID NO: 3315301 - RNA, 21 nt, Human
aauaccugucccccugacaac

SEQ ID NO: 3315302 - RNA, 18 nt, Human
aaucuccaaaauaaaacu

SEQ ID NO: 3315303 - RNA, 15 nt, Human
aaugauagcuacugu

SEQ ID NO: 3315304 - RNA, 13 nt, Human
aaugauuaauuaa

SEQ ID NO: 3315305 - RNA, 12 nt, Human
aaugauuaauua

SEQ ID NO: 3315306 - RNA, 23 nt, Human
aaugcgugcauaccacuuuuguu

SEQ ID NO: 3315307 - RNA, 21 nt, Human
aaugcgugcauaccacuuuug

SEQ ID NO: 3315308 - RNA, 13 nt, Human
aaugggacacuaa

SEQ ID NO: 3315309 - RNA, 14 nt, Human
aaugggagcucaug

SEQ ID NO: 3315310 - RNA, 17 nt, Human
aaugggggugcauuuga

SEQ ID NO: 3315311 - RNA, 15 nt, Human
aaugggggugcauuu

SEQ ID NO: 3315312 - RNA, 15 nt, Human
aaugucacaggcagg

SEQ ID NO: 3315313 - RNA, 20 nt, Human
aagggacuuggaagcuccgc

SEQ ID NO: 3315314 - RNA, 18 nt, Human
aagggacgcuacccggga

SEQ ID NO: 3315315 - RNA, 21 nt, Human
aagccaccaacauacucccau

SEQ ID NO: 3315316 - RNA, 18 nt, Human
aagccagcaggcucucag

SEQ ID NO: 3315317 - RNA, 15 nt, Human
aagccagcaggcucu

SEQ ID NO: 3315318 - RNA, 15 nt, Human
aagcgauucuucugc

SEQ ID NO: 3315319 - RNA, 14 nt, Human
aagcgauucuucug

SEQ ID NO: 3315320 - RNA, 16 nt, Human
aagcgugagccacugc

SEQ ID NO: 3315321 - RNA, 16 nt, Human
aagcgauucuucugcu

SEQ ID NO: 3315322 - RNA, 17 nt, Human
aagcgugagccacugca

SEQ ID NO: 3315323 - RNA, 20 nt, Human
aagcgugagccacugcaccg

SEQ ID NO: 3315324 - RNA, 14 nt, Human
aagcugcugacagu

SEQ ID NO: 3315325 - RNA, 22 nt, Human
aagcugccagccgagauagcca

SEQ ID NO: 3315326 - RNA, 12 nt, Human
aagcugccagcc

SEQ ID NO: 3315327 - RNA, 11 nt, Human
aagcugccagc

SEQ ID NO: 3315328 - RNA, 16 nt, Human
aagcugcugacagugu

SEQ ID NO: 3315329 - RNA, 23 nt, Human
aaggaaugauuaauuaaaacaca

SEQ ID NO: 3315330 - RNA, 21 nt, Human
aagcagaggaaggagaggaga

SEQ ID NO: 3315331 - RNA, 19 nt, Human
aagccaccaacauacuccc

SEQ ID NO: 3315332 - RNA, 19 nt, Human
aagauuuugaaauuuuuau

SEQ ID NO: 3315333 - RNA, 20 nt, Human
aagauucauauuuacuucuu

SEQ ID NO: 3315334 - RNA, 16 nt, Human
aagacuuuggaaagac

SEQ ID NO: 3315335 - RNA, 16 nt, Human
aagacuuuggaaagag

SEQ ID NO: 3315336 - RNA, 14 nt, Human
acuuaaauaaugug

SEQ ID NO: 3315337 - RNA, 19 nt, Human
acuucugccauauucuguu

SEQ ID NO: 3315338 - RNA, 20 nt, Human
acuucugccauauucuguug

SEQ ID NO: 3315339 - RNA, 17 nt, Human
acuucuuauacauuuga

SEQ ID NO: 3315340 - RNA, 21 nt, Human
acucugugucagguggggcag

SEQ ID NO: 3315341 - RNA, 19 nt, Human
acucugugucagguggggc

SEQ ID NO: 3315342 - RNA, 19 nt, Human
acucugucucaaaaaaaca

SEQ ID NO: 3315343 - RNA, 12 nt, Human
acugaugggcaa

SEQ ID NO: 3315344 - RNA, 22 nt, Human
acugaugggcaacccccagccu

SEQ ID NO: 3315345 - RNA, 22 nt, Human
acugauggcuaauguacugcau

SEQ ID NO: 3315346 - RNA, 13 nt, Human
acugaucucucgu

SEQ ID NO: 3315347 - RNA, 22 nt, Human
acugacauuguuggccaaagcc

SEQ ID NO: 3315348 - RNA, 23 nt, Human
acugacauuguuggccaaagcca

SEQ ID NO: 3315349 - RNA, 22 nt, Human
acugauuuuuuuuuccuucagu

SEQ ID NO: 3315350 - RNA, 21 nt, Human
acugauuuuuuuuuccuucag

SEQ ID NO: 3315351 - RNA, 20 nt, Human
acugauuuuuuuuuccuuca

SEQ ID NO: 3315352 - RNA, 23 nt, Human
acugauuuuuuuuuccuucagug

SEQ ID NO: 3315353 - RNA, 22 nt, Human
acugcccggcaggguccuagaa

SEQ ID NO: 3315354 - RNA, 14 nt, Human
acugcuuuuggucu

SEQ ID NO: 3315355 - RNA, 15 nt, Human
acugcuuuuggucug

SEQ ID NO: 3315356 - RNA, 16 nt, Human
acugcuuuuggucugu

SEQ ID NO: 3315357 - RNA, 15 nt, Human
acugcccggcagggu

SEQ ID NO: 3315358 - RNA, 19 nt, Human
acggacacucaaaagcugg

SEQ ID NO: 3315359 - RNA, 16 nt, Human
acggaagagccuugcg

SEQ ID NO: 3315360 - RNA, 15 nt, Human
acggaagagccuugc

SEQ ID NO: 3315361 - RNA, 19 nt, Human
acgcuggagugcagugagc

SEQ ID NO: 3315362 - RNA, 18 nt, Human
acgcuggagugcagugag

SEQ ID NO: 3315363 - RNA, 15 nt, Human
acgucugacaggcaa

SEQ ID NO: 3315364 - RNA, 23 nt, Human
acgucugacaggcaaugcuggcu

SEQ ID NO: 3315365 - RNA, 15 nt, Human
acuaauagacaauuu

SEQ ID NO: 3315366 - RNA, 11 nt, Human
accugugucuc

SEQ ID NO: 3315367 - RNA, 16 nt, Human
acuauuguuagucucu

SEQ ID NO: 3315368 - RNA, 17 nt, Human
acuagggaagauaauau

SEQ ID NO: 3315369 - RNA, 15 nt, Human
accgggccacagaga

SEQ ID NO: 3315370 - RNA, 19 nt, Human
accgggccacagagaaagu

SEQ ID NO: 3315371 - RNA, 14 nt, Human
accgugaggccaga

SEQ ID NO: 3315372 - RNA, 20 nt, Human
accgggcacucagaagacac

SEQ ID NO: 3315373 - RNA, 18 nt, Human
accggcuggccuggcccc

SEQ ID NO: 3315374 - RNA, 17 nt, Human
accggcuggccuggccc

SEQ ID NO: 3315375 - RNA, 15 nt, Human
accggcuggccuggc

SEQ ID NO: 3315376 - RNA, 14 nt, Human
accggcuggccugg

SEQ ID NO: 3315377 - RNA, 15 nt, Human
acccaugcugcccug

SEQ ID NO: 3315378 - RNA, 14 nt, Human
acccaugcugcccu

SEQ ID NO: 3315379 - RNA, 16 nt, Human
accccacacacgccag

SEQ ID NO: 3315380 - RNA, 21 nt, Human
acccugugauggggcccugcc

SEQ ID NO: 3315381 - RNA, 22 nt, Human
acccugugauggggcccugccu

SEQ ID NO: 3315382 - RNA, 17 nt, Human
acccuguuaccauuuug

SEQ ID NO: 3315383 - RNA, 18 nt, Human
accucaggugagaagcag

SEQ ID NO: 3315384 - RNA, 22 nt, Human
accucaggccugggggcugggc

SEQ ID NO: 3315385 - RNA, 14 nt, Human
accucaggccuggg

SEQ ID NO: 3315386 - RNA, 13 nt, Human
accucaggccugg

SEQ ID NO: 3315387 - RNA, 12 nt, Human
accucaggccug

SEQ ID NO: 3315388 - RNA, 17 nt, Human
accgugaggccagagac

SEQ ID NO: 3315389 - RNA, 16 nt, Human
accgugaggccagaga

SEQ ID NO: 3315390 - RNA, 20 nt, Human
accucuugagccuugaacuu

SEQ ID NO: 3315391 - RNA, 19 nt, Human
accucuugagccuugaacu

SEQ ID NO: 3315392 - RNA, 17 nt, Human
accucuugagccuugaa

SEQ ID NO: 3315393 - RNA, 18 nt, Human
accugccagggacagagg

SEQ ID NO: 3315394 - RNA, 16 nt, Human
accugccagggacaga

SEQ ID NO: 3315395 - RNA, 15 nt, Human
accugccagggacag

SEQ ID NO: 3315396 - RNA, 13 nt, Human
accugccagggac

SEQ ID NO: 3315397 - RNA, 12 nt, Human
accugccaggga

SEQ ID NO: 3315398 - RNA, 11 nt, Human
accugccaggg

SEQ ID NO: 3315399 - RNA, 22 nt, Human
acaaaaugaaacgcaaccacca

SEQ ID NO: 3315400 - RNA, 13 nt, Human
acaaaaugaaacg

SEQ ID NO: 3315401 - RNA, 14 nt, Human
aauuuugauguuuu

SEQ ID NO: 3315402 - RNA, 17 nt, Human
aauuuauuauggcacau

SEQ ID NO: 3315403 - RNA, 20 nt, Human
aauuuauuuaugggauccug

SEQ ID NO: 3315404 - RNA, 12 nt, Human
aauuguaaggaa

SEQ ID NO: 3315405 - RNA, 16 nt, Human
aaugucacaggcaggu

SEQ ID NO: 3315406 - RNA, 19 nt, Human
aaugucacaggcaggucca

SEQ ID NO: 3315407 - RNA, 13 nt, Human
acagaggcagccc

SEQ ID NO: 3315408 - RNA, 23 nt, Human
acagaggcagccccauucugccu

SEQ ID NO: 3315409 - RNA, 17 nt, Human
acagaggccaugggccu

SEQ ID NO: 3315410 - RNA, 14 nt, Human
acagaggggguggc

SEQ ID NO: 3315411 - RNA, 21 nt, Human
acagaggccaugggccuccug

SEQ ID NO: 3315412 - RNA, 13 nt, Human
acagacaaagcgu

SEQ ID NO: 3315413 - RNA, 14 nt, Human
acagacaaagcgug

SEQ ID NO: 3315414 - RNA, 22 nt, Human
acacugugcugagucugaaggc

SEQ ID NO: 3315415 - RNA, 17 nt, Human
acacugugcugagucug

SEQ ID NO: 3315416 - RNA, 16 nt, Human
acaaggauugcuacug

SEQ ID NO: 3315417 - RNA, 20 nt, Human
acaaggaugaucuaggaaga

SEQ ID NO: 3315418 - RNA, 13 nt, Human
acaauuuauuaug

SEQ ID NO: 3315419 - RNA, 19 nt, Human
acacagcucuucuccaggc

SEQ ID NO: 3315420 - RNA, 19 nt, Human
acacaaaaguuucucuuuu

SEQ ID NO: 3315421 - RNA, 20 nt, Human
acacagcucuucuccaggcu

SEQ ID NO: 3315422 - RNA, 21 nt, Human
acacagcucuucuccaggcug

SEQ ID NO: 3315423 - RNA, 12 nt, Human
acacauuuuucu

SEQ ID NO: 3315424 - RNA, 14 nt, Human
acacauuuuuuaaa

SEQ ID NO: 3315425 - RNA, 14 nt, Human
acacgaauauugcu

SEQ ID NO: 3315426 - RNA, 12 nt, Human
acacgaauauug

SEQ ID NO: 3315427 - RNA, 20 nt, Human
acaccacuacauucuguuaa

SEQ ID NO: 3315428 - RNA, 17 nt, Human
acaccacuacauucugu

SEQ ID NO: 3315429 - RNA, 15 nt, Human
acaccacuacauucu

SEQ ID NO: 3315430 - RNA, 14 nt, Human
acaccacuacauuc

SEQ ID NO: 3315431 - RNA, 18 nt, Human
acacauuuuuuaaaugca

SEQ ID NO: 3315432 - RNA, 16 nt, Human
acacauuuuuuaaaug

SEQ ID NO: 3315433 - RNA, 21 nt, Human
acacgaauauugcugauggug

SEQ ID NO: 3315434 - RNA, 15 nt, Human
acacgaauauugcug

SEQ ID NO: 3315435 - RNA, 22 nt, Human
acagugagucgaggacagggag

SEQ ID NO: 3315436 - RNA, 22 nt, Human
acaggugugagucaccaagccc

SEQ ID NO: 3315437 - RNA, 23 nt, Human
acaggugugagucaccaagccca

SEQ ID NO: 3315438 - RNA, 19 nt, Human
acaggcaagcaccuccugc

SEQ ID NO: 3315439 - RNA, 15 nt, Human
acagcuccuucuguc

SEQ ID NO: 3315440 - RNA, 19 nt, Human
acagaggggguggccuccc

SEQ ID NO: 3315441 - RNA, 18 nt, Human
acagaggggguggccucc

SEQ ID NO: 3315442 - RNA, 17 nt, Human
acagaggggguggccuc

SEQ ID NO: 3315443 - RNA, 16 nt, Human
acagcuccuucugucc

SEQ ID NO: 3315444 - RNA, 18 nt, Human
acagcuccuucuguccua

SEQ ID NO: 3315445 - RNA, 14 nt, Human
acagcucuguccug

SEQ ID NO: 3315446 - RNA, 20 nt, Human
acaggcaagcaccuccugcc

SEQ ID NO: 3315447 - RNA, 23 nt, Human
acaggcaagcaccuccugccucg

SEQ ID NO: 3315448 - RNA, 16 nt, Human
acagcucuguccuggg

SEQ ID NO: 3315449 - RNA, 13 nt, Human
acagcucuguccu

SEQ ID NO: 3315450 - RNA, 15 nt, Human
acauaagauaaaugu

SEQ ID NO: 3315451 - RNA, 16 nt, Human
acauaagauaaaugug

SEQ ID NO: 3315452 - RNA, 16 nt, Human
acaugcaaggucauuu

SEQ ID NO: 3315453 - RNA, 18 nt, Human
acaugccucucucaggcc

SEQ ID NO: 3315454 - RNA, 17 nt, Human
acaugccucucucaggc

SEQ ID NO: 3315455 - RNA, 16 nt, Human
acaugccucucucagg

SEQ ID NO: 3315456 - RNA, 15 nt, Human
acaugccucucucag

SEQ ID NO: 3315457 - RNA, 17 nt, Human
acaugcaaggucauuuu

SEQ ID NO: 3315458 - RNA, 20 nt, Human
accagccccagugcccacag

SEQ ID NO: 3315459 - RNA, 18 nt, Human
accagccccagugcccac

SEQ ID NO: 3315460 - RNA, 19 nt, Human
accagccccagugcccaca

SEQ ID NO: 3315461 - RNA, 16 nt, Human
accagccccagugccc

SEQ ID NO: 3315462 - RNA, 17 nt, Human
accagccccagugccca

SEQ ID NO: 3315463 - RNA, 13 nt, Human
accagcagagcac

SEQ ID NO: 3315464 - RNA, 12 nt, Human
accagcagagca

SEQ ID NO: 3315465 - RNA, 14 nt, Human
accagcagaaaugc

SEQ ID NO: 3315466 - RNA, 19 nt, Human
acaugccucucucaggcca

SEQ ID NO: 3315467 - RNA, 21 nt, Human
acaugucuuuucuugcaugag

SEQ ID NO: 3315468 - RNA, 23 nt, Human
acaugucuuuucuugcaugaggc

SEQ ID NO: 3315469 - RNA, 23 nt, Human
accaucauugaaaucuuuuugcu

SEQ ID NO: 3315470 - RNA, 15 nt, Human
accaucaagccacca

SEQ ID NO: 3315471 - RNA, 12 nt, Human
accaucauugaa

SEQ ID NO: 3315472 - RNA, 15 nt, Human
accaucauugaaauc

SEQ ID NO: 3315473 - RNA, 14 nt, Human
accaucaagccacc

SEQ ID NO: 3315474 - RNA, 13 nt, Human
acccaugcugccc

SEQ ID NO: 3315475 - RNA, 15 nt, Human
acccacccuccuuuc

SEQ ID NO: 3315476 - RNA, 17 nt, Human
acccacccccacccaag

SEQ ID NO: 3315477 - RNA, 15 nt, Human
acccacccccaccca

SEQ ID NO: 3315478 - RNA, 17 nt, Human
cugggcagaaggaagac

SEQ ID NO: 3315479 - RNA, 18 nt, Human
cugggcagaaggaagacu

SEQ ID NO: 3315480 - RNA, 16 nt, Human
cugggcagaaggaaga

SEQ ID NO: 3315481 - RNA, 16 nt, Human
cuggggccgaaagaac

SEQ ID NO: 3315482 - RNA, 23 nt, Human
cuggugacuuuccucuuuggucu

SEQ ID NO: 3315483 - RNA, 14 nt, Human
cuggguucacugca

SEQ ID NO: 3315484 - RNA, 21 nt, Human
cuggugacuuuccucuuuggu

SEQ ID NO: 3315485 - RNA, 20 nt, Human
cuggugacuuuccucuuugg

SEQ ID NO: 3315486 - RNA, 15 nt, Human
cuggugacuuuccuc

SEQ ID NO: 3315487 - RNA, 16 nt, Human
cuggguguggcgcagc

SEQ ID NO: 3315488 - RNA, 17 nt, Human
cuggguguggcgcagca

SEQ ID NO: 3315489 - RNA, 22 nt, Human
cuggguggcaccagcagccugg

SEQ ID NO: 3315490 - RNA, 23 nt, Human
cuggguggcaccagcagccugga

SEQ ID NO: 3315491 - RNA, 21 nt, Human
cuggccccucagggucccugg

SEQ ID NO: 3315492 - RNA, 20 nt, Human
cuggccccucagggucccug

SEQ ID NO: 3315493 - RNA, 18 nt, Human
cuggccccucaggguccc

SEQ ID NO: 3315494 - RNA, 17 nt, Human
cuggccccucagggucc

SEQ ID NO: 3315495 - RNA, 12 nt, Human
cugggacacagu

SEQ ID NO: 3315496 - RNA, 13 nt, Human
cugggacacaguu

SEQ ID NO: 3315497 - RNA, 11 nt, Human
cugggacacag

SEQ ID NO: 3315498 - RNA, 13 nt, Human
cuggccccucagg

SEQ ID NO: 3315499 - RNA, 14 nt, Human
cuggcagcucagag

SEQ ID NO: 3315500 - RNA, 13 nt, Human
cuggcagcucaga

SEQ ID NO: 3315501 - RNA, 12 nt, Human
cuggcagcucag

SEQ ID NO: 3315502 - RNA, 18 nt, Human
cugucagccauuccuguu

SEQ ID NO: 3315503 - RNA, 16 nt, Human
cugucauuugagcagg

SEQ ID NO: 3315504 - RNA, 17 nt, Human
cugucauuugagcaggg

SEQ ID NO: 3315505 - RNA, 18 nt, Human
cugucauuugagcagggc

SEQ ID NO: 3315506 - RNA, 18 nt, Human
cuguaggaagguuaaugu

SEQ ID NO: 3315507 - RNA, 21 nt, Human
cuguaggaagguuaauguuca

SEQ ID NO: 3315508 - RNA, 15 nt, Human
cugugaagagaacca

SEQ ID NO: 3315509 - RNA, 14 nt, Human
cugugcucuggaca

SEQ ID NO: 3315510 - RNA, 19 nt, Human
cugugcucuggacaggcau

SEQ ID NO: 3315511 - RNA, 13 nt, Human
cugucgcccaguc

SEQ ID NO: 3315512 - RNA, 21 nt, Human
cugcugacagacacaggcccg

SEQ ID NO: 3315513 - RNA, 23 nt, Human
cugcugacagacacaggcccggc

SEQ ID NO: 3315514 - RNA, 15 nt, Human
cugcugacagacaca

SEQ ID NO: 3315515 - RNA, 18 nt, Human
cugcugacagacacaggc

SEQ ID NO: 3315516 - RNA, 19 nt, Human
cugcugacagacacaggcc

SEQ ID NO: 3315517 - RNA, 20 nt, Human
cugcugacagacacaggccc

SEQ ID NO: 3315518 - RNA, 13 nt, Human
cugcuuaacuuca

SEQ ID NO: 3315519 - RNA, 13 nt, Human
cugcuucagccuc

SEQ ID NO: 3315520 - RNA, 17 nt, Human
cugcuuaacuucacaua

SEQ ID NO: 3315521 - RNA, 15 nt, Human
cugcuuaacuucaca

SEQ ID NO: 3315522 - RNA, 14 nt, Human
cugcuucagccucc

SEQ ID NO: 3315523 - RNA, 16 nt, Human
cugcuucagccucccg

SEQ ID NO: 3315524 - RNA, 22 nt, Human
cugcuuuuuaaagaaugcucuu

SEQ ID NO: 3315525 - RNA, 16 nt, Human
cuggaaauauuaagaa

SEQ ID NO: 3315526 - RNA, 19 nt, Human
cugcuuuuuaaagaaugcu

SEQ ID NO: 3315527 - RNA, 17 nt, Human
cuggaacacuaaugagg

SEQ ID NO: 3315528 - RNA, 14 nt, Human
cugcccugugggcc

SEQ ID NO: 3315529 - RNA, 15 nt, Human
cugccucgaacuggc

SEQ ID NO: 3315530 - RNA, 17 nt, Human
cugccucgaacuggcug

SEQ ID NO: 3315531 - RNA, 18 nt, Human
cugccucgaacuggcugc

SEQ ID NO: 3315532 - RNA, 22 nt, Human
cugccugggaucccucauccuc

SEQ ID NO: 3315533 - RNA, 23 nt, Human
cugccugggaucccucauccuca

SEQ ID NO: 3315534 - RNA, 14 nt, Human
cugccuguucagcu

SEQ ID NO: 3315535 - RNA, 16 nt, Human
cugcuaauuccccaga

SEQ ID NO: 3315536 - RNA, 19 nt, Human
cugccuguugggccaggag

SEQ ID NO: 3315537 - RNA, 18 nt, Human
cugccuguugggccagga

SEQ ID NO: 3315538 - RNA, 14 nt, Human
cugccuguugggcc

SEQ ID NO: 3315539 - RNA, 16 nt, Human
cugccuguugggccag

SEQ ID NO: 3315540 - RNA, 15 nt, Human
cugcuacagagcaga

SEQ ID NO: 3315541 - RNA, 19 nt, Human
cugagacucgcgacaaugc

SEQ ID NO: 3315542 - RNA, 17 nt, Human
cugagacucgcgacaau

SEQ ID NO: 3315543 - RNA, 13 nt, Human
cugcauguuacau

SEQ ID NO: 3315544 - RNA, 15 nt, Human
cugcauguuugugau

SEQ ID NO: 3315545 - RNA, 22 nt, Human
cugcauuuaaaagauacaguua

SEQ ID NO: 3315546 - RNA, 20 nt, Human
cugcauuuaaaagauacagu

SEQ ID NO: 3315547 - RNA, 18 nt, Human
cugcauuuaaaagauaca

SEQ ID NO: 3315548 - RNA, 15 nt, Human
cugccaaugggagcu

SEQ ID NO: 3315549 - RNA, 11 nt, Human
cugccagggac

SEQ ID NO: 3315550 - RNA, 15 nt, Human
cugccagggacagag

SEQ ID NO: 3315551 - RNA, 12 nt, Human
cugccagggaca

SEQ ID NO: 3315552 - RNA, 20 nt, Human
cugccauauucuguuggcca

SEQ ID NO: 3315553 - RNA, 21 nt, Human
cugccauauucuguuggccag

SEQ ID NO: 3315554 - RNA, 22 nt, Human
cugccauauucuguuggccagu

SEQ ID NO: 3315555 - RNA, 23 nt, Human
cugccauauucuguuggccagug

SEQ ID NO: 3315556 - RNA, 12 nt, Human
cugcccugugag

SEQ ID NO: 3315557 - RNA, 18 nt, Human
cugcccugugggccccca

SEQ ID NO: 3315558 - RNA, 16 nt, Human
cugcccugugggcccc

SEQ ID NO: 3315559 - RNA, 15 nt, Human
cugcccugugggccc

SEQ ID NO: 3315560 - RNA, 22 nt, Human
cugccccucaacucuccuccag

SEQ ID NO: 3315561 - RNA, 14 nt, Human
cugccccucaacuc

SEQ ID NO: 3315562 - RNA, 20 nt, Human
cuucugacccaugcugcccu

SEQ ID NO: 3315563 - RNA, 22 nt, Human
cuucugacccaugcugcccugu

SEQ ID NO: 3315564 - RNA, 21 nt, Human
cuucugacccaugcugcccug

SEQ ID NO: 3315565 - RNA, 23 nt, Human
cuucuucagagacuccugcaggc

SEQ ID NO: 3315566 - RNA, 18 nt, Human
cuuccucccucccucuuu

SEQ ID NO: 3315567 - RNA, 17 nt, Human
cuuccugcaacaccuug

SEQ ID NO: 3315568 - RNA, 16 nt, Human
cuugaagacuuuucuu

SEQ ID NO: 3315569 - RNA, 18 nt, Human
cuugaauuguaaggaaug

SEQ ID NO: 3315570 - RNA, 19 nt, Human
cuugaauuguaaggaauga

SEQ ID NO: 3315571 - RNA, 14 nt, Human
cuugacagggcaca

SEQ ID NO: 3315572 - RNA, 15 nt, Human
cuugacagggcacac

SEQ ID NO: 3315573 - RNA, 13 nt, Human
cuugacagggcac

SEQ ID NO: 3315574 - RNA, 12 nt, Human
cuuggcgcugcc

SEQ ID NO: 3315575 - RNA, 17 nt, Human
cuuggcgcugccccugg

SEQ ID NO: 3315576 - RNA, 14 nt, Human
cuuggcgcugcccc

SEQ ID NO: 3315577 - RNA, 23 nt, Human
cuucccaccucucucacuccuug

SEQ ID NO: 3315578 - RNA, 21 nt, Human
cuucccaccucucucacuccu

SEQ ID NO: 3315579 - RNA, 11 nt, Human
cuucccaccuc

SEQ ID NO: 3315580 - RNA, 21 nt, Human
cuuccagugaggcucugcccu

SEQ ID NO: 3315581 - RNA, 23 nt, Human
cuuccagugaggcucugcccuug

SEQ ID NO: 3315582 - RNA, 22 nt, Human
cuuccagugaggcucugcccuu

SEQ ID NO: 3315583 - RNA, 17 nt, Human
cuucagagacuccugca

SEQ ID NO: 3315584 - RNA, 19 nt, Human
cuucagagacuccugcagg

SEQ ID NO: 3315585 - RNA, 18 nt, Human
cuucagagacuccugcag

SEQ ID NO: 3315586 - RNA, 16 nt, Human
cuuauggaacacucug

SEQ ID NO: 3315587 - RNA, 13 nt, Human
cuuauggaacacu

SEQ ID NO: 3315588 - RNA, 20 nt, Human
cuucaccuuuguccccaccg

SEQ ID NO: 3315589 - RNA, 21 nt, Human
cuucaccuuuguccccaccgc

SEQ ID NO: 3315590 - RNA, 22 nt, Human
cuucaccuuuguccccaccgca

SEQ ID NO: 3315591 - RNA, 19 nt, Human
cuucacggaagagccuugc

SEQ ID NO: 3315592 - RNA, 15 nt, Human
cuucacggaagagcc

SEQ ID NO: 3315593 - RNA, 20 nt, Human
cuuauggaacacucugagac

SEQ ID NO: 3315594 - RNA, 19 nt, Human
cuuauggaacacucugaga

SEQ ID NO: 3315595 - RNA, 17 nt, Human
cuuauggaacacucuga

SEQ ID NO: 3315596 - RNA, 12 nt, Human
cugugcugaguc

SEQ ID NO: 3315597 - RNA, 14 nt, Human
cugugcugagucug

SEQ ID NO: 3315598 - RNA, 20 nt, Human
cuuucagccaagaauucuua

SEQ ID NO: 3315599 - RNA, 23 nt, Human
cuuucagccaagaauucuuaaau

SEQ ID NO: 3315600 - RNA, 23 nt, Human
cuuucaauaggaaaaacugauuu

SEQ ID NO: 3315601 - RNA, 22 nt, Human
cuuuccugaggcugggcucccu

SEQ ID NO: 3315602 - RNA, 21 nt, Human
cuuuccugaggcugggcuccc

SEQ ID NO: 3315603 - RNA, 13 nt, Human
cuuuuauaaacuu

SEQ ID NO: 3315604 - RNA, 17 nt, Human
cuuugggccuggcuccc

SEQ ID NO: 3315605 - RNA, 17 nt, Human
cuuucuacccagcgagc

SEQ ID NO: 3315606 - RNA, 15 nt, Human
cuuucuagccagagg

SEQ ID NO: 3315607 - RNA, 16 nt, Human
cuuucuagccagagga

SEQ ID NO: 3315608 - RNA, 14 nt, Human
gaaaaacugauuuu

SEQ ID NO: 3315609 - RNA, 18 nt, Human
gaaaagaaaaaugagccu

SEQ ID NO: 3315610 - RNA, 21 nt, Human
gaaaauggaagacagcucuua

SEQ ID NO: 3315611 - RNA, 23 nt, Human
gaaaauggacguguuaugacucc

SEQ ID NO: 3315612 - RNA, 19 nt, Human
gaaaauggacguguuauga

SEQ ID NO: 3315613 - RNA, 15 nt, Human
gaaaauguaugugua

SEQ ID NO: 3315614 - RNA, 23 nt, Human
cuuuugcccacacuugggagcaa

SEQ ID NO: 3315615 - RNA, 18 nt, Human
cuuuugucuaugggacuc

SEQ ID NO: 3315616 - RNA, 17 nt, Human
cuuuugucuaugggacu

SEQ ID NO: 3315617 - RNA, 23 nt, Human
cuuuuuuggcugcugaaggcucg

SEQ ID NO: 3315618 - RNA, 13 nt, Human
cuuuugugcauua

SEQ ID NO: 3315619 - RNA, 12 nt, Human
cuuuugugcauu

SEQ ID NO: 3315620 - RNA, 20 nt, Human
gaaagacuaucuaaauguug

SEQ ID NO: 3315621 - RNA, 22 nt, Human
gaaaggcuccaggagcagccac

SEQ ID NO: 3315622 - RNA, 20 nt, Human
gaaaggcuccaggagcagcc

SEQ ID NO: 3315623 - RNA, 21 nt, Human
gaaaggcuccaggagcagcca

SEQ ID NO: 3315624 - RNA, 19 nt, Human
gaaaucaccgaaaacgugg

SEQ ID NO: 3315625 - RNA, 19 nt, Human
gaaagggacuuggaagcuc

SEQ ID NO: 3315626 - RNA, 20 nt, Human
gaaagggacgcuacccggga

SEQ ID NO: 3315627 - RNA, 22 nt, Human
gaaagggacuuggaagcuccgc

SEQ ID NO: 3315628 - RNA, 14 nt, Human
gauacccaucccau

SEQ ID NO: 3315629 - RNA, 13 nt, Human
gauacccauccca

SEQ ID NO: 3315630 - RNA, 16 nt, Human
gauacuacaguuuguu

SEQ ID NO: 3315631 - RNA, 11 nt, Human
gauacuacagu

SEQ ID NO: 3315632 - RNA, 20 nt, Human
gaguuugggguaugggagag

SEQ ID NO: 3315633 - RNA, 20 nt, Human
gaguuguuacauuuuuaagu

SEQ ID NO: 3315634 - RNA, 16 nt, Human
gaguuguuacauuuuu

SEQ ID NO: 3315635 - RNA, 18 nt, Human
gagugccuuacacaaugg

SEQ ID NO: 3315636 - RNA, 14 nt, Human
gaggucuguucuuu

SEQ ID NO: 3315637 - RNA, 13 nt, Human
gaggucuguucuu

SEQ ID NO: 3315638 - RNA, 11 nt, Human
gaggugggagg

SEQ ID NO: 3315639 - RNA, 12 nt, Human
gaggugggaucc

SEQ ID NO: 3315640 - RNA, 11 nt, Human
gagugcaguga

SEQ ID NO: 3315641 - RNA, 12 nt, Human
gagugcagugag

SEQ ID NO: 3315642 - RNA, 24 nt, Human
gagugagcacuaaggugugcucug

SEQ ID NO: 3315643 - RNA, 13 nt, Human
gagucccaccuug

SEQ ID NO: 3315644 - RNA, 12 nt, Human
gagugagcuggu

SEQ ID NO: 3315645 - RNA, 16 nt, Human
gagucccaccuuggcu

SEQ ID NO: 3315646 - RNA, 20 nt, Human
gagucccaccuuggcugcag

SEQ ID NO: 3315647 - RNA, 13 nt, Human
gagucaccaagcc

SEQ ID NO: 3315648 - RNA, 14 nt, Human
gagucaccaagccc

SEQ ID NO: 3315649 - RNA, 20 nt, Human
gauuacaggugugaaccacc

SEQ ID NO: 3315650 - RNA, 16 nt, Human
gaugagaggaaaucac

SEQ ID NO: 3315651 - RNA, 14 nt, Human
gaugaucuuugcag

SEQ ID NO: 3315652 - RNA, 20 nt, Human
gaugaucuuugcagacaggc

SEQ ID NO: 3315653 - RNA, 21 nt, Human
gaugaucuuugcagacaggca

SEQ ID NO: 3315654 - RNA, 17 nt, Human
gaucucuugagccuggg

SEQ ID NO: 3315655 - RNA, 16 nt, Human
gaucucuugagccugg

SEQ ID NO: 3315656 - RNA, 12 nt, Human
gaucucuugagc

SEQ ID NO: 3315657 - RNA, 15 nt, Human
gauauuuugcuuugu

SEQ ID NO: 3315658 - RNA, 16 nt, Human
gauauuuugcuuugug

SEQ ID NO: 3315659 - RNA, 15 nt, Human
gauauuuuuuucuuu

SEQ ID NO: 3315660 - RNA, 12 nt, Human
gcacugacauug

SEQ ID NO: 3315661 - RNA, 19 nt, Human
gcagagcaccuuagacagu

SEQ ID NO: 3315662 - RNA, 23 nt, Human
gcagagcaccuuagacagucccu

SEQ ID NO: 3315663 - RNA, 22 nt, Human
gcagagcaccuuagacaguccc

SEQ ID NO: 3315664 - RNA, 15 nt, Human
gcagagcagagacca

SEQ ID NO: 3315665 - RNA, 14 nt, Human
gcagagcagagacc

SEQ ID NO: 3315666 - RNA, 12 nt, Human
gcagagcagaga

SEQ ID NO: 3315667 - RNA, 24 nt, Human
gcagagcaccuuagacagucccug

SEQ ID NO: 3315668 - RNA, 20 nt, Human
gcagagcagagaccaucccu

SEQ ID NO: 3315669 - RNA, 19 nt, Human
gcagagcagagaccauccc

SEQ ID NO: 3315670 - RNA, 13 nt, Human
gcaagugagagcu

SEQ ID NO: 3315671 - RNA, 22 nt, Human
gcacaagcuccaagcucccagg

SEQ ID NO: 3315672 - RNA, 21 nt, Human
gcacaagcuccaagcucccag

SEQ ID NO: 3315673 - RNA, 23 nt, Human
gcacaagcuccaagcucccaggc

SEQ ID NO: 3315674 - RNA, 14 nt, Human
gcacaagcugcacc

SEQ ID NO: 3315675 - RNA, 21 nt, Human
gcaauaaagcagcguuucuau

SEQ ID NO: 3315676 - RNA, 18 nt, Human
gcaccggcuggccuggcc

SEQ ID NO: 3315677 - RNA, 23 nt, Human
gcaccggcuggccuggccccuca

SEQ ID NO: 3315678 - RNA, 21 nt, Human
gcaccggcuggccuggccccu

SEQ ID NO: 3315679 - RNA, 19 nt, Human
gcaccggcuggccuggccc

SEQ ID NO: 3315680 - RNA, 21 nt, Human
gcacaugccucucucaggcca

SEQ ID NO: 3315681 - RNA, 20 nt, Human
gcacaugccucucucaggcc

SEQ ID NO: 3315682 - RNA, 19 nt, Human
gcacaugccucucucaggc

SEQ ID NO: 3315683 - RNA, 18 nt, Human
gcacaugccucucucagg

SEQ ID NO: 3315684 - RNA, 17 nt, Human
gcacaugccucucucag

SEQ ID NO: 3315685 - RNA, 14 nt, Human
gcacaugccucucu

SEQ ID NO: 3315686 - RNA, 13 nt, Human
gcacaugccucuc

SEQ ID NO: 3315687 - RNA, 20 nt, Human
gcacaucagcacgauuucug

SEQ ID NO: 3315688 - RNA, 19 nt, Human
gcacaucagcacgauuucu

SEQ ID NO: 3315689 - RNA, 18 nt, Human
gcagcccaccccucaaca

SEQ ID NO: 3315690 - RNA, 14 nt, Human
gcagccaggccaca

SEQ ID NO: 3315691 - RNA, 13 nt, Human
gcagccaggccac

SEQ ID NO: 3315692 - RNA, 16 nt, Human
gcagccacauuccuga

SEQ ID NO: 3315693 - RNA, 15 nt, Human
gcagccacauuccug

SEQ ID NO: 3315694 - RNA, 14 nt, Human
gcagccacuauugu

SEQ ID NO: 3315695 - RNA, 12 nt, Human
gcagccaggcca

SEQ ID NO: 3315696 - RNA, 16 nt, Human
gcauaccacuuuuguu

SEQ ID NO: 3315697 - RNA, 20 nt, Human
gcauaccacuuuuguucuug

SEQ ID NO: 3315698 - RNA, 17 nt, Human
gcauaccacuuuuguuc

SEQ ID NO: 3315699 - RNA, 18 nt, Human
gcaggcucucaggccagc

SEQ ID NO: 3315700 - RNA, 23 nt, Human
gcaggcucucaggccagcugcuu

SEQ ID NO: 3315701 - RNA, 17 nt, Human
gcagcugcgguccaccc

SEQ ID NO: 3315702 - RNA, 22 nt, Human
gcaggcucucaggccagcugcu

SEQ ID NO: 3315703 - RNA, 20 nt, Human
gcaggcucucaggccagcug

SEQ ID NO: 3315704 - RNA, 22 nt, Human
gaaugaaugucagugugacuga

SEQ ID NO: 3315705 - RNA, 18 nt, Human
gaaugaaugucaguguga

SEQ ID NO: 3315706 - RNA, 14 nt, Human
gaaugaaugucagu

SEQ ID NO: 3315707 - RNA, 11 nt, Human
gaaugaauguc

SEQ ID NO: 3315708 - RNA, 15 nt, Human
gaagcucagggccug

SEQ ID NO: 3315709 - RNA, 14 nt, Human
gaagcucagggccu

SEQ ID NO: 3315710 - RNA, 23 nt, Human
gaagcucagggccuggcucaggu

SEQ ID NO: 3315711 - RNA, 21 nt, Human
gaagcucagggccuggcucag

SEQ ID NO: 3315712 - RNA, 20 nt, Human
gaagcucagggccuggcuca

SEQ ID NO: 3315713 - RNA, 19 nt, Human
gaagcucagggccuggcuc

SEQ ID NO: 3315714 - RNA, 18 nt, Human
gaagcucagggccuggcu

SEQ ID NO: 3315715 - RNA, 17 nt, Human
gaagcucagggccuggc

SEQ ID NO: 3315716 - RNA, 16 nt, Human
gaagcucagggccugg

SEQ ID NO: 3315717 - RNA, 17 nt, Human
gaaggcucgagcaugcc

SEQ ID NO: 3315718 - RNA, 16 nt, Human
gaaggcucgagcaugc

SEQ ID NO: 3315719 - RNA, 18 nt, Human
gaagucuuuguacagaca

SEQ ID NO: 3315720 - RNA, 20 nt, Human
gaagucuuuguacagacaac

SEQ ID NO: 3315721 - RNA, 19 nt, Human
gaagucuuuguacagacaa

SEQ ID NO: 3315722 - RNA, 13 nt, Human
gacacugaugggc

SEQ ID NO: 3315723 - RNA, 15 nt, Human
gacacugaugggcaa

SEQ ID NO: 3315724 - RNA, 23 nt, Human
gacagcccgggcucugccuccca

SEQ ID NO: 3315725 - RNA, 22 nt, Human
gacagcccgggcucugccuccc

SEQ ID NO: 3315726 - RNA, 21 nt, Human
gacagcccgggcucugccucc

SEQ ID NO: 3315727 - RNA, 20 nt, Human
gacagcccgggcucugccuc

SEQ ID NO: 3315728 - RNA, 20 nt, Human
gacaggguuuugccauguug

SEQ ID NO: 3315729 - RNA, 22 nt, Human
gacaggguuuugccauguuggc

SEQ ID NO: 3315730 - RNA, 21 nt, Human
gacacacagcucuguccuggg

SEQ ID NO: 3315731 - RNA, 19 nt, Human
gaauuuuggcugugucucc

SEQ ID NO: 3315732 - RNA, 14 nt, Human
gacacacagcucug

SEQ ID NO: 3315733 - RNA, 13 nt, Human
gacacacagcucu

SEQ ID NO: 3315734 - RNA, 15 nt, Human
gacacacagcucugu

SEQ ID NO: 3315735 - RNA, 17 nt, Human
gacacacagcucugucc

SEQ ID NO: 3315736 - RNA, 18 nt, Human
gacacacagcucuguccu

SEQ ID NO: 3315737 - RNA, 19 nt, Human
gacacacagcucuguccug

SEQ ID NO: 3315738 - RNA, 23 nt, Human
gaauuuuggcugugucucccuuc

SEQ ID NO: 3315739 - RNA, 20 nt, Human
gaauuuugugcccccaugua

SEQ ID NO: 3315740 - RNA, 21 nt, Human
gaauuuugugcccccauguaa

SEQ ID NO: 3315741 - RNA, 22 nt, Human
gacuaucuaaauguugaaagau

SEQ ID NO: 3315742 - RNA, 12 nt, Human
gacucugucuca

SEQ ID NO: 3315743 - RNA, 15 nt, Human
gagaagcggcuggca

SEQ ID NO: 3315744 - RNA, 13 nt, Human
gagaagcggcugg

SEQ ID NO: 3315745 - RNA, 12 nt, Human
gagaaggaagcc

SEQ ID NO: 3315746 - RNA, 21 nt, Human
gacuuuucuuuguggcuuccu

SEQ ID NO: 3315747 - RNA, 23 nt, Human
gacuuuucuuucagccaagaauu

SEQ ID NO: 3315748 - RNA, 23 nt, Human
gacuuuucuguccgagcuuugaa

SEQ ID NO: 3315749 - RNA, 18 nt, Human
gagcugggugucaagagg

SEQ ID NO: 3315750 - RNA, 17 nt, Human
gagcggagaaaggaagg

SEQ ID NO: 3315751 - RNA, 21 nt, Human
gagcggagaaaggaagggcug

SEQ ID NO: 3315752 - RNA, 18 nt, Human
gagcggagaaaggaaggg

SEQ ID NO: 3315753 - RNA, 20 nt, Human
gagcugccuguucagcucca

SEQ ID NO: 3315754 - RNA, 21 nt, Human
gagcugccuguucagcuccag

SEQ ID NO: 3315755 - RNA, 22 nt, Human
gagcugccuguucagcuccagc

SEQ ID NO: 3315756 - RNA, 19 nt, Human
gagccuugaacuuugaccu

SEQ ID NO: 3315757 - RNA, 22 nt, Human
gagccuugaacuuugaccucug

SEQ ID NO: 3315758 - RNA, 16 nt, Human
gagccuuccaggggug

SEQ ID NO: 3315759 - RNA, 15 nt, Human
gagccuuccaggggu

SEQ ID NO: 3315760 - RNA, 14 nt, Human
gagccuuccagggg

SEQ ID NO: 3315761 - RNA, 14 nt, Human
gagcagggcucagc

SEQ ID NO: 3315762 - RNA, 12 nt, Human
gagcaucaggcc

SEQ ID NO: 3315763 - RNA, 21 nt, Human
gagcaugccuggauggggcug

SEQ ID NO: 3315764 - RNA, 22 nt, Human
gagcaugccuggauggggcugc

SEQ ID NO: 3315765 - RNA, 13 nt, Human
gagauuuacaacu

SEQ ID NO: 3315766 - RNA, 18 nt, Human
gagauugcaccacugcac

SEQ ID NO: 3315767 - RNA, 14 nt, Human
gagaggcauccagu

SEQ ID NO: 3315768 - RNA, 17 nt, Human
gagacuccugcaggcag

SEQ ID NO: 3315769 - RNA, 16 nt, Human
gagacuccugcaggca

SEQ ID NO: 3315770 - RNA, 15 nt, Human
gagacuccugcaggc

SEQ ID NO: 3315771 - RNA, 14 nt, Human
gagacuccugcagg

SEQ ID NO: 3315772 - RNA, 21 nt, Human
gagaugaugccaugggcccuc

SEQ ID NO: 3315773 - RNA, 22 nt, Human
gagaggcauccaguaucuugaa

SEQ ID NO: 3315774 - RNA, 12 nt, Human
ggccugagcugg

SEQ ID NO: 3315775 - RNA, 15 nt, Human
ggccugagcugggau

SEQ ID NO: 3315776 - RNA, 12 nt, Human
ggccuucucuga

SEQ ID NO: 3315777 - RNA, 21 nt, Human
ggccugugucuaguuguuuga

SEQ ID NO: 3315778 - RNA, 16 nt, Human
ggccuggccagaugca

SEQ ID NO: 3315779 - RNA, 21 nt, Human
ggccuggccagaugcaccagc

SEQ ID NO: 3315780 - RNA, 14 nt, Human
ggccuuuggcuuca

SEQ ID NO: 3315781 - RNA, 13 nt, Human
ggccuuuggcuuc

SEQ ID NO: 3315782 - RNA, 15 nt, Human
ggccuucucugaagg

SEQ ID NO: 3315783 - RNA, 16 nt, Human
ggccuucucugaagga

SEQ ID NO: 3315784 - RNA, 19 nt, Human
ggcgugcaguggugcgauc

SEQ ID NO: 3315785 - RNA, 14 nt, Human
ggcgugcaguggug

SEQ ID NO: 3315786 - RNA, 16 nt, Human
ggcucacugcagccuc

SEQ ID NO: 3315787 - RNA, 17 nt, Human
ggcucacugcagccuca

SEQ ID NO: 3315788 - RNA, 19 nt, Human
ggcucagcaaaagaugcuu

SEQ ID NO: 3315789 - RNA, 23 nt, Human
ggcucagcaaaagaugcuucuca

SEQ ID NO: 3315790 - RNA, 20 nt, Human
ggcucagcggggacagcucc

SEQ ID NO: 3315791 - RNA, 21 nt, Human
ggcucagcggggacagcuccu

SEQ ID NO: 3315792 - RNA, 22 nt, Human
ggcucagcggggacagcuccuu

SEQ ID NO: 3315793 - RNA, 23 nt, Human
ggcucagcggggacagcuccuuc

SEQ ID NO: 3315794 - RNA, 24 nt, Human
ggcacugcuuccagugaggcucug

SEQ ID NO: 3315795 - RNA, 22 nt, Human
ggcacugcuuccagugaggcuc

SEQ ID NO: 3315796 - RNA, 15 nt, Human
ggcaccagcagccug

SEQ ID NO: 3315797 - RNA, 17 nt, Human
ggcagugggagcugccu

SEQ ID NO: 3315798 - RNA, 18 nt, Human
ggcagugggagcugccug

SEQ ID NO: 3315799 - RNA, 19 nt, Human
ggcagugggagcugccugu

SEQ ID NO: 3315800 - RNA, 18 nt, Human
ggcauccaguaucuugaa

SEQ ID NO: 3315801 - RNA, 17 nt, Human
ggccaaacucaccugcc

SEQ ID NO: 3315802 - RNA, 16 nt, Human
ggccaggcuggucuca

SEQ ID NO: 3315803 - RNA, 18 nt, Human
ggccaggcuggucucaaa

SEQ ID NO: 3315804 - RNA, 12 nt, Human
ggccaggcuggu

SEQ ID NO: 3315805 - RNA, 14 nt, Human
ggccaggcuggucu

SEQ ID NO: 3315806 - RNA, 14 nt, Human
ggcccuuccuuuuc

SEQ ID NO: 3315807 - RNA, 17 nt, Human
ggcccuucucuccagcc

SEQ ID NO: 3315808 - RNA, 16 nt, Human
ggcccuucucuccagc

SEQ ID NO: 3315809 - RNA, 18 nt, Human
ggcccuucucuccagccc

SEQ ID NO: 3315810 - RNA, 14 nt, Human
ggaggugaccccag

SEQ ID NO: 3315811 - RNA, 20 nt, Human
ggaggucaaggcugcaguga

SEQ ID NO: 3315812 - RNA, 16 nt, Human
ggaggggggagguggg

SEQ ID NO: 3315813 - RNA, 22 nt, Human
ggagguaaggaauaccuguccc

SEQ ID NO: 3315814 - RNA, 14 nt, Human
ggaggggggaggug

SEQ ID NO: 3315815 - RNA, 21 nt, Human
ggagcugccuguucagcucca

SEQ ID NO: 3315816 - RNA, 16 nt, Human
ggagcugaguggggga

SEQ ID NO: 3315817 - RNA, 12 nt, Human
ggagcugccugu

SEQ ID NO: 3315818 - RNA, 16 nt, Human
ggagccccgaggccuu

SEQ ID NO: 3315819 - RNA, 22 nt, Human
ggagccccgaggccuucucuga

SEQ ID NO: 3315820 - RNA, 20 nt, Human
ggaggccaaggugggaggau

SEQ ID NO: 3315821 - RNA, 11 nt, Human
ggaggccagcc

SEQ ID NO: 3315822 - RNA, 23 nt, Human
ggaggaaggaaacccagcucugg

SEQ ID NO: 3315823 - RNA, 20 nt, Human
ggaggaaggaaacccagcuc

SEQ ID NO: 3315824 - RNA, 19 nt, Human
ggaggaaggaaacccagcu

SEQ ID NO: 3315825 - RNA, 14 nt, Human
ggaguggccacaga

SEQ ID NO: 3315826 - RNA, 15 nt, Human
ggaguucugguuccu

SEQ ID NO: 3315827 - RNA, 18 nt, Human
ggauggauuuccagccaa

SEQ ID NO: 3315828 - RNA, 16 nt, Human
ggauggggcugcaccg

SEQ ID NO: 3315829 - RNA, 14 nt, Human
ggauccugagccag

SEQ ID NO: 3315830 - RNA, 13 nt, Human
ggauccugagcca

SEQ ID NO: 3315831 - RNA, 14 nt, Human
ggauccuccaggug

SEQ ID NO: 3315832 - RNA, 15 nt, Human
ggauccuccaggugc

SEQ ID NO: 3315833 - RNA, 18 nt, Human
ggaucucuugagccuggg

SEQ ID NO: 3315834 - RNA, 15 nt, Human
ggagugcagugagcc

SEQ ID NO: 3315835 - RNA, 23 nt, Human
ggcacagaaaauggaagacagcu

SEQ ID NO: 3315836 - RNA, 24 nt, Human
ggcacagaaaauggaagacagcuc

SEQ ID NO: 3315837 - RNA, 13 nt, Human
ggauguucuggga

SEQ ID NO: 3315838 - RNA, 16 nt, Human
ggauguucugggacac

SEQ ID NO: 3315839 - RNA, 15 nt, Human
ggauguucugggaca

SEQ ID NO: 3315840 - RNA, 13 nt, Human
gggaagagacuug

SEQ ID NO: 3315841 - RNA, 16 nt, Human
gggacagcuccuucug

SEQ ID NO: 3315842 - RNA, 23 nt, Human
gggacagaggggguggccuccca

SEQ ID NO: 3315843 - RNA, 22 nt, Human
gggacagaggggguggccuccc

SEQ ID NO: 3315844 - RNA, 13 nt, Human
gggacagaggggg

SEQ ID NO: 3315845 - RNA, 13 nt, Human
gggaaggauacaa

SEQ ID NO: 3315846 - RNA, 21 nt, Human
gggacagcuccuucuguccua

SEQ ID NO: 3315847 - RNA, 22 nt, Human
aaaacugcugacuguuuucucu

SEQ ID NO: 3315848 - RNA, 20 nt, Human
aaaacugcugacuguuuucu

SEQ ID NO: 3315849 - RNA, 13 nt, Human
aaaagaugcuucu

SEQ ID NO: 3315850 - RNA, 23 nt, Human
aaaacugcugacuguuuucucuu

SEQ ID NO: 3315851 - RNA, 14 nt, Human
aaaaaucucaaauu

SEQ ID NO: 3315852 - RNA, 21 nt, Human
aaaaccaauguucucucuucu

SEQ ID NO: 3315853 - RNA, 15 nt, Human
aaaacaugcuacaca

SEQ ID NO: 3315854 - RNA, 15 nt, Human
gggaggucgaggcag

SEQ ID NO: 3315855 - RNA, 19 nt, Human
gggaggucgaggcaggagg

SEQ ID NO: 3315856 - RNA, 18 nt, Human
gggaggucgaggcaggag

SEQ ID NO: 3315857 - RNA, 17 nt, Human
gggaggucgaggcagga

SEQ ID NO: 3315858 - RNA, 17 nt, Human
gggagggcuccagacac

SEQ ID NO: 3315859 - RNA, 15 nt, Human
gggagggcuccagac

SEQ ID NO: 3315860 - RNA, 14 nt, Human
gggagggcuccaga

SEQ ID NO: 3315861 - RNA, 19 nt, Human
gggaggccaaggugggagg

SEQ ID NO: 3315862 - RNA, 15 nt, Human
gggauuacaggugug

SEQ ID NO: 3315863 - RNA, 16 nt, Human
gggcaacccccagccu

SEQ ID NO: 3315864 - RNA, 18 nt, Human
gggcaacccccagccugc

SEQ ID NO: 3315865 - RNA, 12 nt, Human
gggcagagcaga

SEQ ID NO: 3315866 - RNA, 16 nt, Human
gggcagagcagagacc

SEQ ID NO: 3315867 - RNA, 22 nt, Human
gggcagagcagagaccaucccu

SEQ ID NO: 3315868 - RNA, 17 nt, Human
gggcagagcagagacca

SEQ ID NO: 3315869 - RNA, 14 nt, Human
gggcagaggaaagc

SEQ ID NO: 3315870 - RNA, 18 nt, Human
gggcuaguugggcuuccu

SEQ ID NO: 3315871 - RNA, 15 nt, Human
gggcgggaggauguu

SEQ ID NO: 3315872 - RNA, 19 nt, Human
gggccucuuaugggcuggg

SEQ ID NO: 3315873 - RNA, 20 nt, Human
gggccucuuaugggcugggu

SEQ ID NO: 3315874 - RNA, 15 nt, Human
gggccuccugugugu

SEQ ID NO: 3315875 - RNA, 13 nt, Human
gggccuccugugu

SEQ ID NO: 3315876 - RNA, 15 nt, Human
gggccucagugccac

SEQ ID NO: 3315877 - RNA, 23 nt, Human
gggccaguuggucccccuuccau

SEQ ID NO: 3315878 - RNA, 22 nt, Human
gggccaguuggucccccuucca

SEQ ID NO: 3315879 - RNA, 18 nt, Human
gggccaguuggucccccu

SEQ ID NO: 3315880 - RNA, 14 nt, Human
gggccaguuggucc

SEQ ID NO: 3315881 - RNA, 21 nt, Human
aaaaugagccuggcaagaaug

SEQ ID NO: 3315882 - RNA, 14 nt, Human
aaaaugagccuggc

SEQ ID NO: 3315883 - RNA, 11 nt, Human
gggccaggagc

SEQ ID NO: 3315884 - RNA, 22 nt, Human
gggcuggguucuacccaggugc

SEQ ID NO: 3315885 - RNA, 18 nt, Human
gggcugcaugcgggcuuc

SEQ ID NO: 3315886 - RNA, 21 nt, Human
gggcugcaugcgggcuuccuc

SEQ ID NO: 3315887 - RNA, 10 nt, Human
gggcucagca

SEQ ID NO: 3315888 - RNA, 22 nt, Human
gggcugcaccggcuggccuggc

SEQ ID NO: 3315889 - RNA, 20 nt, Human
gggcuggguucuacccaggu

SEQ ID NO: 3315890 - RNA, 20 nt, Human
aaacaagaccacguuucuaa

SEQ ID NO: 3315891 - RNA, 18 nt, Human
aaacaagaccacguuucu

SEQ ID NO: 3315892 - RNA, 16 nt, Human
aaacacauuuuucuua

SEQ ID NO: 3315893 - RNA, 12 nt, Human
aaacacauuuuu

SEQ ID NO: 3315894 - RNA, 12 nt, Human
ggggacagcucc

SEQ ID NO: 3315895 - RNA, 14 nt, Human
ggggacagcuccuu

SEQ ID NO: 3315896 - RNA, 20 nt, Human
ggggacagcuccuucugucc

SEQ ID NO: 3315897 - RNA, 15 nt, Human
ggggccucagugcca

SEQ ID NO: 3315898 - RNA, 13 nt, Human
aaauaaugugaaa

SEQ ID NO: 3315899 - RNA, 12 nt, Human
aaauaaugugaa

SEQ ID NO: 3315900 - RNA, 12 nt, Human
aaaguggugaga

SEQ ID NO: 3315901 - RNA, 21 nt, Human
aaaguuucucuuuucaaaaca

SEQ ID NO: 3315902 - RNA, 23 nt, Human
aaaguuucucuuuucaaaacauu

SEQ ID NO: 3315903 - RNA, 13 nt, Human
gguuucagaaaug

SEQ ID NO: 3315904 - RNA, 12 nt, Human
gguuucagaaau

SEQ ID NO: 3315905 - RNA, 14 nt, Human
gguuucagaaaugu

SEQ ID NO: 3315906 - RNA, 21 nt, Human
gguucccuuugacgccauccc

SEQ ID NO: 3315907 - RNA, 22 nt, Human
gguucaggguuggccccugccc

SEQ ID NO: 3315908 - RNA, 18 nt, Human
gguucaggguuggccccu

SEQ ID NO: 3315909 - RNA, 21 nt, Human
gguucaggguuggccccugcc

SEQ ID NO: 3315910 - RNA, 12 nt, Human
gguucagcuugu

SEQ ID NO: 3315911 - RNA, 12 nt, Human
gguguggaagag

SEQ ID NO: 3315912 - RNA, 13 nt, Human
ggugugcucugau

SEQ ID NO: 3315913 - RNA, 21 nt, Human
ggugugcggccuuuggcuuca

SEQ ID NO: 3315914 - RNA, 16 nt, Human
ggugugacugaauuuc

SEQ ID NO: 3315915 - RNA, 18 nt, Human
ggugugagucaccaagcc

SEQ ID NO: 3315916 - RNA, 16 nt, Human
ggugucgggcaugaca

SEQ ID NO: 3315917 - RNA, 13 nt, Human
ggugucgggcaug

SEQ ID NO: 3315918 - RNA, 23 nt, Human
gguggggucacucuggcagcuca

SEQ ID NO: 3315919 - RNA, 15 nt, Human
gguggggucacucug

SEQ ID NO: 3315920 - RNA, 13 nt, Human
gguggggcagcuu

SEQ ID NO: 3315921 - RNA, 17 nt, Human
gguggggcagcuugagg

SEQ ID NO: 3315922 - RNA, 19 nt, Human
ggugggauccuccaggugc

SEQ ID NO: 3315923 - RNA, 20 nt, Human
ggugggaggaucucuugagc

SEQ ID NO: 3315924 - RNA, 20 nt, Human
ggugggaggauugcuugagc

SEQ ID NO: 3315925 - RNA, 15 nt, Human
ggugggauccuccag

SEQ ID NO: 3315926 - RNA, 14 nt, Human
ggugggauccucca

SEQ ID NO: 3315927 - RNA, 18 nt, Human
ggugcaaugaccuuucaa

SEQ ID NO: 3315928 - RNA, 20 nt, Human
ggugcaaugaccuuucaaua

SEQ ID NO: 3315929 - RNA, 19 nt, Human
ggugcaaugaccuuucaau

SEQ ID NO: 3315930 - RNA, 16 nt, Human
ggugcaaugaccuuuc

SEQ ID NO: 3315931 - RNA, 21 nt, Human
ggugcauuugaggucuguucu

SEQ ID NO: 3315932 - RNA, 14 nt, Human
gguggaugccuggu

SEQ ID NO: 3315933 - RNA, 21 nt, Human
gguggaugccugguggcagcu

SEQ ID NO: 3315934 - RNA, 22 nt, Human
aaagcagcguuucuaugacaca

SEQ ID NO: 3315935 - RNA, 18 nt, Human
aaagcagcguuucuauga

SEQ ID NO: 3315936 - RNA, 16 nt, Human
aaagcagcguuucuau

SEQ ID NO: 3315937 - RNA, 15 nt, Human
aaagcagcguuucua

SEQ ID NO: 3315938 - RNA, 17 nt, Human
ggucuacacugugcuga

SEQ ID NO: 3315939 - RNA, 14 nt, Human
ggucggaaaacaug

SEQ ID NO: 3315940 - RNA, 14 nt, Human
gguccugcugcagu

SEQ ID NO: 3315941 - RNA, 13 nt, Human
ggucggaaaacau

SEQ ID NO: 3315942 - RNA, 13 nt, Human
aaagcaaaggaga

SEQ ID NO: 3315943 - RNA, 23 nt, Human
gguccuagaaauuccccacccug

SEQ ID NO: 3315944 - RNA, 23 nt, Human
gguccugcugcaguugccaguca

SEQ ID NO: 3315945 - RNA, 21 nt, Human
gguccugcugcaguugccagu

SEQ ID NO: 3315946 - RNA, 17 nt, Human
ggguguggcgcagcaua

SEQ ID NO: 3315947 - RNA, 17 nt, Human
ggguggaugccuggugg

SEQ ID NO: 3315948 - RNA, 15 nt, Human
ggguggcaccagcag

SEQ ID NO: 3315949 - RNA, 13 nt, Human
ggguggaugccug

SEQ ID NO: 3315950 - RNA, 19 nt, Human
gggugggacacccugugau

SEQ ID NO: 3315951 - RNA, 20 nt, Human
ggguggggaccucaggccug

SEQ ID NO: 3315952 - RNA, 17 nt, Human
ggguuucuaaagcugcc

SEQ ID NO: 3315953 - RNA, 14 nt, Human
gguaacaggcagau

SEQ ID NO: 3315954 - RNA, 20 nt, Human
gguaacaggcagauacagga

SEQ ID NO: 3315955 - RNA, 13 nt, Human
gguaacaggcaga

SEQ ID NO: 3315956 - RNA, 17 nt, Human
aaagacuaucuaaaugu

SEQ ID NO: 3315957 - RNA, 12 nt, Human
aaacuuuacuau

SEQ ID NO: 3315958 - RNA, 15 nt, Human
gguccauagagagca

SEQ ID NO: 3315959 - RNA, 22 nt, Human
aaacuuuaccuuuuuuauacau

SEQ ID NO: 3315960 - RNA, 17 nt, Human
aaacuuuaccuuuuuua

SEQ ID NO: 3315961 - RNA, 17 nt, Human
gguccacccaggagccc

SEQ ID NO: 3315962 - RNA, 12 nt, Human
gguccacccagg

SEQ ID NO: 3315963 - RNA, 13 nt, Human
gguccacccagga

SEQ ID NO: 3315964 - RNA, 15 nt, Human
gguccacccaggagc

SEQ ID NO: 3315965 - RNA, 16 nt, Human
gguccacccaggagcc

SEQ ID NO: 3315966 - RNA, 22 nt, Human
gguaugaucacggcucacugca

SEQ ID NO: 3315967 - RNA, 14 nt, Human
gguaugcaaucaaa

SEQ ID NO: 3315968 - RNA, 17 nt, Human
gcuuugaucccuucuua

SEQ ID NO: 3315969 - RNA, 14 nt, Human
gcuuugaucccuuc

SEQ ID NO: 3315970 - RNA, 15 nt, Human
gcuuuuggucugugu

SEQ ID NO: 3315971 - RNA, 18 nt, Human
gcuuuugucuaugggacu

SEQ ID NO: 3315972 - RNA, 16 nt, Human
ggaaacccagcucugg

SEQ ID NO: 3315973 - RNA, 18 nt, Human
ggaaaauuuuaaaaauac

SEQ ID NO: 3315974 - RNA, 20 nt, Human
ggaagacuucaucccucugg

SEQ ID NO: 3315975 - RNA, 17 nt, Human
ggaagacuucaucccuc

SEQ ID NO: 3315976 - RNA, 16 nt, Human
ggaagacaaugugaaa

SEQ ID NO: 3315977 - RNA, 14 nt, Human
ggaagacaauguga

SEQ ID NO: 3315978 - RNA, 15 nt, Human
ggaacacuccuucac

SEQ ID NO: 3315979 - RNA, 23 nt, Human
ggaacaaggcaaggcugucaauu

SEQ ID NO: 3315980 - RNA, 13 nt, Human
ggaacaccuccuc

SEQ ID NO: 3315981 - RNA, 15 nt, Human
ggaacaaggcaaggc

SEQ ID NO: 3315982 - RNA, 21 nt, Human
ggaacaaggcaaggcugucaa

SEQ ID NO: 3315983 - RNA, 17 nt, Human
ggaacaaggcaaggcug

SEQ ID NO: 3315984 - RNA, 22 nt, Human
ggaaaugggcagagcagagacc

SEQ ID NO: 3315985 - RNA, 18 nt, Human
ggaaaugggcagagcaga

SEQ ID NO: 3315986 - RNA, 17 nt, Human
ggaaaugggcagagcag

SEQ ID NO: 3315987 - RNA, 16 nt, Human
ggaaaugggcagagca

SEQ ID NO: 3315988 - RNA, 14 nt, Human
ggaaaugggcagag

SEQ ID NO: 3315989 - RNA, 23 nt, Human
gcuuccagugaggcucugcccuu

SEQ ID NO: 3315990 - RNA, 20 nt, Human
gcuugaccgugaggccagag

SEQ ID NO: 3315991 - RNA, 12 nt, Human
gcuucuucagag

SEQ ID NO: 3315992 - RNA, 15 nt, Human
gcuucuucagagacu

SEQ ID NO: 3315993 - RNA, 23 nt, Human
gcuuucuacccagcgagcccugg

SEQ ID NO: 3315994 - RNA, 18 nt, Human
gcuuguaaauagcucagg

SEQ ID NO: 3315995 - RNA, 19 nt, Human
gcuuguaaauagcucaggu

SEQ ID NO: 3315996 - RNA, 17 nt, Human
gcuuguaaauagcucag

SEQ ID NO: 3315997 - RNA, 18 nt, Human
gcuugaccuuuaagagaa

SEQ ID NO: 3315998 - RNA, 23 nt, Human
gcuugaccgugaggccagagaca

SEQ ID NO: 3315999 - RNA, 22 nt, Human
gcuuccagugaggcucugcccu

SEQ ID NO: 3316000 - RNA, 23 nt, Human
gcugguucaggguuggccccugc

SEQ ID NO: 3316001 - RNA, 14 nt, Human
gcuucaguggcagc

SEQ ID NO: 3316002 - RNA, 14 nt, Human
gcuucaaggauccu

SEQ ID NO: 3316003 - RNA, 13 nt, Human
gcuguuggcuggg

SEQ ID NO: 3316004 - RNA, 15 nt, Human
gcugcacccucaggc

SEQ ID NO: 3316005 - RNA, 13 nt, Human
gcugcacccucag

SEQ ID NO: 3316006 - RNA, 12 nt, Human
gcugccauccag

SEQ ID NO: 3316007 - RNA, 13 nt, Human
gcugccauccagg

SEQ ID NO: 3316008 - RNA, 15 nt, Human
gcugaggugggagga

SEQ ID NO: 3316009 - RNA, 13 nt, Human
gcugccccuggca

SEQ ID NO: 3316010 - RNA, 16 nt, Human
gcugccccuggcagcc

SEQ ID NO: 3316011 - RNA, 15 nt, Human
gcugccccuggcagc

SEQ ID NO: 3316012 - RNA, 18 nt, Human
gcugcugaaggcucgagc

SEQ ID NO: 3316013 - RNA, 12 nt, Human
gcugcugacagu

SEQ ID NO: 3316014 - RNA, 20 nt, Human
gcucugaucauccacugugc

SEQ ID NO: 3316015 - RNA, 21 nt, Human
gcucugaucauccacugugcc

SEQ ID NO: 3316016 - RNA, 22 nt, Human
gcucugaucauccacugugcca

SEQ ID NO: 3316017 - RNA, 17 nt, Human
gcugaauacagaggcaa

SEQ ID NO: 3316018 - RNA, 23 nt, Human
gcugaaggcucgagcaugccugg

SEQ ID NO: 3316019 - RNA, 23 nt, Human
gcucugguccauagagagcaaga

SEQ ID NO: 3316020 - RNA, 9 nt, Human
gcuccagac

SEQ ID NO: 3316021 - RNA, 23 nt, Human
gcuccagacacauguccaagaag

SEQ ID NO: 3316022 - RNA, 21 nt, Human
gcuccagacacauguccaaga

SEQ ID NO: 3316023 - RNA, 18 nt, Human
gcuccagacacaugucca

SEQ ID NO: 3316024 - RNA, 15 nt, Human
gcuccucuccccagc

SEQ ID NO: 3316025 - RNA, 13 nt, Human
gcuccagcucacc

SEQ ID NO: 3316026 - RNA, 14 nt, Human
gcuccagcucacca

SEQ ID NO: 3316027 - RNA, 23 nt, Human
gcucccaggcauuccccaggagg

SEQ ID NO: 3316028 - RNA, 19 nt, Human
gcucucaggccagcugcuu

SEQ ID NO: 3316029 - RNA, 18 nt, Human
gcucucaggccagcugcu

SEQ ID NO: 3316030 - RNA, 17 nt, Human
gcucucaggccagcugc

SEQ ID NO: 3316031 - RNA, 19 nt, Human
gcucuacugaggugcuaug

SEQ ID NO: 3316032 - RNA, 16 nt, Human
gcuccucuccccagca

SEQ ID NO: 3316033 - RNA, 19 nt, Human
gcuccucuccccagcaagu

SEQ ID NO: 3316034 - RNA, 18 nt, Human
gcucucaaguuaucaggg

SEQ ID NO: 3316035 - RNA, 16 nt, Human
gcucucaggccagcug

SEQ ID NO: 3316036 - RNA, 17 nt, Human
gccugcuaauuccccag

SEQ ID NO: 3316037 - RNA, 23 nt, Human
gccugcuaauuccccagauugca

SEQ ID NO: 3316038 - RNA, 19 nt, Human
gccuccuuugugaggaagc

SEQ ID NO: 3316039 - RNA, 21 nt, Human
gccuccuuugugaggaagccg

SEQ ID NO: 3316040 - RNA, 20 nt, Human
gccuccuuugugaggaagcc

SEQ ID NO: 3316041 - RNA, 19 nt, Human
gcuacuguccuacccaccc

SEQ ID NO: 3316042 - RNA, 20 nt, Human
gcuacuguccuacccacccu

SEQ ID NO: 3316043 - RNA, 17 nt, Human
gcguuucuaugacacau

SEQ ID NO: 3316044 - RNA, 16 nt, Human
gcuaauuuuucauuuu

SEQ ID NO: 3316045 - RNA, 14 nt, Human
gcgugcacacacca

SEQ ID NO: 3316046 - RNA, 18 nt, Human
gcgugcacacaccagagc

SEQ ID NO: 3316047 - RNA, 20 nt, Human
gcgugguggacaugcacagc

SEQ ID NO: 3316048 - RNA, 14 nt, Human
gcgauucuucugcu

SEQ ID NO: 3316049 - RNA, 13 nt, Human
gcgauucuucugc

SEQ ID NO: 3316050 - RNA, 17 nt, Human
gcccaggccccugccac

SEQ ID NO: 3316051 - RNA, 14 nt, Human
gccaugugccaggu

SEQ ID NO: 3316052 - RNA, 14 nt, Human
gcccaggcaggucu

SEQ ID NO: 3316053 - RNA, 15 nt, Human
gcccaggccccugcc

SEQ ID NO: 3316054 - RNA, 13 nt, Human
gcccaggccccug

SEQ ID NO: 3316055 - RNA, 13 nt, Human
gcccaggcagguc

SEQ ID NO: 3316056 - RNA, 12 nt, Human
gcccaggcaggu

SEQ ID NO: 3316057 - RNA, 15 nt, Human
gccccugcccggcug

SEQ ID NO: 3316058 - RNA, 21 nt, Human
gccccugcugguucaggguug

SEQ ID NO: 3316059 - RNA, 22 nt, Human
gccccugcugguucaggguugg

SEQ ID NO: 3316060 - RNA, 13 nt, Human
gccagugugacaa

SEQ ID NO: 3316061 - RNA, 13 nt, Human
gccaguugguccc

SEQ ID NO: 3316062 - RNA, 23 nt, Human
gccaguuggucccccuuccaugg

SEQ ID NO: 3316063 - RNA, 22 nt, Human
gccaguuggucccccuuccaug

SEQ ID NO: 3316064 - RNA, 21 nt, Human
gccaguuggucccccuuccau

SEQ ID NO: 3316065 - RNA, 20 nt, Human
gccaguuggucccccuucca

SEQ ID NO: 3316066 - RNA, 18 nt, Human
gccaguuggucccccuuc

SEQ ID NO: 3316067 - RNA, 16 nt, Human
gccaguuggucccccu

SEQ ID NO: 3316068 - RNA, 23 nt, Human
gccagcaggcucucaggccagcu

SEQ ID NO: 3316069 - RNA, 14 nt, Human
gccaggcccucugc

SEQ ID NO: 3316070 - RNA, 13 nt, Human
gccaggcccucug

SEQ ID NO: 3316071 - RNA, 18 nt, Human
gccaggccacaagacccu

SEQ ID NO: 3316072 - RNA, 13 nt, Human
gccaggccacaag

SEQ ID NO: 3316073 - RNA, 22 nt, Human
gccaggccagagggagugacag

SEQ ID NO: 3316074 - RNA, 15 nt, Human
gccaggccagaggga

SEQ ID NO: 3316075 - RNA, 21 nt, Human
gccaggccacaagacccuugu

SEQ ID NO: 3316076 - RNA, 19 nt, Human
cuccgcuuucuacccagcg

SEQ ID NO: 3316077 - RNA, 12 nt, Human
cucccaccucag

SEQ ID NO: 3316078 - RNA, 11 nt, Human
cuccaggugca

SEQ ID NO: 3316079 - RNA, 20 nt, Human
cuccacuuucuagccagagg

SEQ ID NO: 3316080 - RNA, 22 nt, Human
cuccacuuucuagccagaggag

SEQ ID NO: 3316081 - RNA, 15 nt, Human
cuccaagaccuucuc

SEQ ID NO: 3316082 - RNA, 16 nt, Human
cuccaagaccuucucc

SEQ ID NO: 3316083 - RNA, 18 nt, Human
cuccaagaccuucuccuu

SEQ ID NO: 3316084 - RNA, 17 nt, Human
cuccaagaccuucuccu

SEQ ID NO: 3316085 - RNA, 18 nt, Human
cuccagaauuucccaaag

SEQ ID NO: 3316086 - RNA, 15 nt, Human
cuccagaauuuccca

SEQ ID NO: 3316087 - RNA, 19 nt, Human
cuccagacacauguccaag

SEQ ID NO: 3316088 - RNA, 17 nt, Human
cuccagacacaugucca

SEQ ID NO: 3316089 - RNA, 16 nt, Human
cuccagacacaugucc

SEQ ID NO: 3316090 - RNA, 13 nt, Human
cucagugccacua

SEQ ID NO: 3316091 - RNA, 17 nt, Human
cucagucuggcccuucc

SEQ ID NO: 3316092 - RNA, 18 nt, Human
cucagucuggcccuuccu

SEQ ID NO: 3316093 - RNA, 19 nt, Human
cucauguucuuaauucuua

SEQ ID NO: 3316094 - RNA, 18 nt, Human
cucauguucuuaauucuu

SEQ ID NO: 3316095 - RNA, 14 nt, Human
cucauguucuuaau

SEQ ID NO: 3316096 - RNA, 12 nt, Human
cucauguucuua

SEQ ID NO: 3316097 - RNA, 23 nt, Human
cucagccucccgaauagcuggga

SEQ ID NO: 3316098 - RNA, 22 nt, Human
cucagccucccaaagugcuggg

SEQ ID NO: 3316099 - RNA, 21 nt, Human
cucagccucccaaagugcugg

SEQ ID NO: 3316100 - RNA, 14 nt, Human
cucagccucccaaa

SEQ ID NO: 3316101 - RNA, 16 nt, Human
cucagccucccaaagu

SEQ ID NO: 3316102 - RNA, 13 nt, Human
cucagccucccaa

SEQ ID NO: 3316103 - RNA, 13 nt, Human
cucaggccagcug

SEQ ID NO: 3316104 - RNA, 22 nt, Human
cucaggccagcugcuugggcuu

SEQ ID NO: 3316105 - RNA, 21 nt, Human
cucaggccagcugcuugggcu

SEQ ID NO: 3316106 - RNA, 20 nt, Human
cucaggccagcugcuugggc

SEQ ID NO: 3316107 - RNA, 14 nt, Human
cucaggccagcugc

SEQ ID NO: 3316108 - RNA, 21 nt, Human
cucaggccugggggcugggca

SEQ ID NO: 3316109 - RNA, 20 nt, Human
cucaggccugggggcugggc

SEQ ID NO: 3316110 - RNA, 14 nt, Human
cucaggccuggggg

SEQ ID NO: 3316111 - RNA, 13 nt, Human
cucaggccugggg

SEQ ID NO: 3316112 - RNA, 23 nt, Human
cugacccugcuucaaauauuucc

SEQ ID NO: 3316113 - RNA, 19 nt, Human
cugacccaugcugcccugu

SEQ ID NO: 3316114 - RNA, 17 nt, Human
cugacccaugcugcccu

SEQ ID NO: 3316115 - RNA, 18 nt, Human
cugacccaugcugcccug

SEQ ID NO: 3316116 - RNA, 12 nt, Human
cugacagacaca

SEQ ID NO: 3316117 - RNA, 14 nt, Human
cugacagacacagg

SEQ ID NO: 3316118 - RNA, 14 nt, Human
cugaaaauguaugu

SEQ ID NO: 3316119 - RNA, 16 nt, Human
cugaaaauguaugugu

SEQ ID NO: 3316120 - RNA, 19 nt, Human
cugaaggacauugcggaca

SEQ ID NO: 3316121 - RNA, 20 nt, Human
cugaaggacauugcggacag

SEQ ID NO: 3316122 - RNA, 17 nt, Human
cugaaggccccgcccag

SEQ ID NO: 3316123 - RNA, 17 nt, Human
cugaaggcuggguucug

SEQ ID NO: 3316124 - RNA, 14 nt, Human
cugaaggccccgcc

SEQ ID NO: 3316125 - RNA, 13 nt, Human
cugaaggccccgc

SEQ ID NO: 3316126 - RNA, 21 nt, Human
cucuguacagagcccacgccc

SEQ ID NO: 3316127 - RNA, 17 nt, Human
cucuguacagagcccac

SEQ ID NO: 3316128 - RNA, 15 nt, Human
cucugguuaucuaau

SEQ ID NO: 3316129 - RNA, 19 nt, Human
cucugguccauagagagca

SEQ ID NO: 3316130 - RNA, 18 nt, Human
cucugguccauagagagc

SEQ ID NO: 3316131 - RNA, 16 nt, Human
cucugguccauagaga

SEQ ID NO: 3316132 - RNA, 17 nt, Human
cucugcugacagacaca

SEQ ID NO: 3316133 - RNA, 18 nt, Human
cucugcugacagacacag

SEQ ID NO: 3316134 - RNA, 19 nt, Human
cucugcugacagacacagg

SEQ ID NO: 3316135 - RNA, 15 nt, Human
cucugguccauagag

SEQ ID NO: 3316136 - RNA, 23 nt, Human
cucugcagcaauaaagcagcguu

SEQ ID NO: 3316137 - RNA, 19 nt, Human
cucugcagcaauaaagcag

SEQ ID NO: 3316138 - RNA, 18 nt, Human
cucugcagcaauaaagca

SEQ ID NO: 3316139 - RNA, 13 nt, Human
cucugcagcaaua

SEQ ID NO: 3316140 - RNA, 15 nt, Human
cucucacuccuugaa

SEQ ID NO: 3316141 - RNA, 19 nt, Human
cucucagauuguaccauug

SEQ ID NO: 3316142 - RNA, 14 nt, Human
cucucacuccuuga

SEQ ID NO: 3316143 - RNA, 12 nt, Human
cucucacuccuu

SEQ ID NO: 3316144 - RNA, 15 nt, Human
cucugaaggacauug

SEQ ID NO: 3316145 - RNA, 21 nt, Human
cucuccgaccagacaccuuga

SEQ ID NO: 3316146 - RNA, 24 nt, Human
cucuccccagcaagugagagcugg

SEQ ID NO: 3316147 - RNA, 18 nt, Human
ccuuuuuuauacauaaac

SEQ ID NO: 3316148 - RNA, 17 nt, Human
ccuuuuuuauacauaaa

SEQ ID NO: 3316149 - RNA, 23 nt, Human
cgaccagacaccuugacagggca

SEQ ID NO: 3316150 - RNA, 21 nt, Human
ccuuuuuuagaguugauacua

SEQ ID NO: 3316151 - RNA, 12 nt, Human
ccuuuuuuauac

SEQ ID NO: 3316152 - RNA, 14 nt, Human
ccuuuagcgcccag

SEQ ID NO: 3316153 - RNA, 20 nt, Human
ccuuuagcgcccaguugggu

SEQ ID NO: 3316154 - RNA, 20 nt, Human
ccuuuucgcaggauucuucc

SEQ ID NO: 3316155 - RNA, 20 nt, Human
ccuugccgucuaccugaggg

SEQ ID NO: 3316156 - RNA, 17 nt, Human
ccuugccgucuaccuga

SEQ ID NO: 3316157 - RNA, 15 nt, Human
ccuggccugagcugg

SEQ ID NO: 3316158 - RNA, 14 nt, Human
ccuggccugagcug

SEQ ID NO: 3316159 - RNA, 20 nt, Human
ccuucugacccaugcugccc

SEQ ID NO: 3316160 - RNA, 17 nt, Human
ccuucugacccaugcug

SEQ ID NO: 3316161 - RNA, 16 nt, Human
ccuucugacccaugcu

SEQ ID NO: 3316162 - RNA, 12 nt, Human
ccuucugaccca

SEQ ID NO: 3316163 - RNA, 22 nt, Human
ccuucuggaauaaggagaauga

SEQ ID NO: 3316164 - RNA, 23 nt, Human
ccuucugacccaugcugcccugu

SEQ ID NO: 3316165 - RNA, 22 nt, Human
ccuucugacccaugcugcccug

SEQ ID NO: 3316166 - RNA, 21 nt, Human
ccuucugacccaugcugcccu

SEQ ID NO: 3316167 - RNA, 17 nt, Human
cggcucacugcagccuc

SEQ ID NO: 3316168 - RNA, 19 nt, Human
cggcucacugcagccucaa

SEQ ID NO: 3316169 - RNA, 18 nt, Human
cggcucacugcagccuca

SEQ ID NO: 3316170 - RNA, 15 nt, Human
cggccuuuggcuuca

SEQ ID NO: 3316171 - RNA, 12 nt, Human
cgccaaggcugg

SEQ ID NO: 3316172 - RNA, 16 nt, Human
cgccaaggcuggggga

SEQ ID NO: 3316173 - RNA, 13 nt, Human
cgccaaggcuggg

SEQ ID NO: 3316174 - RNA, 13 nt, Human
cgaguagcuggga

SEQ ID NO: 3316175 - RNA, 14 nt, Human
cgaguagcugggac

SEQ ID NO: 3316176 - RNA, 15 nt, Human
cgaguagcugggacu

SEQ ID NO: 3316177 - RNA, 18 nt, Human
cgaguuacagacaaagcg

SEQ ID NO: 3316178 - RNA, 17 nt, Human
cgaguuacagacaaagc

SEQ ID NO: 3316179 - RNA, 12 nt, Human
cuagcagcaggg

SEQ ID NO: 3316180 - RNA, 22 nt, Human
cuagcagcagggagggcuucug

SEQ ID NO: 3316181 - RNA, 23 nt, Human
cuagcagcagggagggcuucugc

SEQ ID NO: 3316182 - RNA, 17 nt, Human
cuagcauggcugccaau

SEQ ID NO: 3316183 - RNA, 19 nt, Human
cuagaaauuccccacccug

SEQ ID NO: 3316184 - RNA, 14 nt, Human
cuaccugaggggcc

SEQ ID NO: 3316185 - RNA, 11 nt, Human
cuaccugaggg

SEQ ID NO: 3316186 - RNA, 22 nt, Human
cuaguuccaccaucaagccacc

SEQ ID NO: 3316187 - RNA, 14 nt, Human
cuaguuccaccauc

SEQ ID NO: 3316188 - RNA, 20 nt, Human
cuaguuccaccaucaagcca

SEQ ID NO: 3316189 - RNA, 18 nt, Human
cuaguuccaccaucaagc

SEQ ID NO: 3316190 - RNA, 21 nt, Human
cuagggaaaaaccagcgugug

SEQ ID NO: 3316191 - RNA, 19 nt, Human
cuagggaaaaaccagcgug

SEQ ID NO: 3316192 - RNA, 13 nt, Human
cuacaguugaaaa

SEQ ID NO: 3316193 - RNA, 17 nt, Human
cuacaguccucccaucu

SEQ ID NO: 3316194 - RNA, 16 nt, Human
cuacaguccucccauc

SEQ ID NO: 3316195 - RNA, 15 nt, Human
cuacaguccucccau

SEQ ID NO: 3316196 - RNA, 13 nt, Human
cuacaguccuccc

SEQ ID NO: 3316197 - RNA, 18 nt, Human
cuaagugaggaugaaaaa

SEQ ID NO: 3316198 - RNA, 20 nt, Human
cuaagugauccucccaccuc

SEQ ID NO: 3316199 - RNA, 22 nt, Human
cuaagugauccucccaccucag

SEQ ID NO: 3316200 - RNA, 15 nt, Human
cuaacuucaccauau

SEQ ID NO: 3316201 - RNA, 16 nt, Human
cuaacuucaccauauu

SEQ ID NO: 3316202 - RNA, 16 nt, Human
cuaacuuuccuucauu

SEQ ID NO: 3316203 - RNA, 13 nt, Human
ccucuuggguuca

SEQ ID NO: 3316204 - RNA, 19 nt, Human
ccucuugagccuugaacuu

SEQ ID NO: 3316205 - RNA, 13 nt, Human
ccucuugagccuu

SEQ ID NO: 3316206 - RNA, 19 nt, Human
ccugcacuugcagacucua

SEQ ID NO: 3316207 - RNA, 22 nt, Human
ccugcacuugcagacucuacag

SEQ ID NO: 3316208 - RNA, 14 nt, Human
ccucugcugcuggc

SEQ ID NO: 3316209 - RNA, 13 nt, Human
ccucugcugcugg

SEQ ID NO: 3316210 - RNA, 18 nt, Human
ccucugcugcuggcuggu

SEQ ID NO: 3316211 - RNA, 17 nt, Human
ccucugcugcuggcugg

SEQ ID NO: 3316212 - RNA, 16 nt, Human
ccucugcugcuggcug

SEQ ID NO: 3316213 - RNA, 15 nt, Human
ccucugcugcuggcu

SEQ ID NO: 3316214 - RNA, 22 nt, Human
ccucugccugaagucacacagu

SEQ ID NO: 3316215 - RNA, 21 nt, Human
ccucugccugaagucacacag

SEQ ID NO: 3316216 - RNA, 12 nt, Human
ccucucucaggc

SEQ ID NO: 3316217 - RNA, 17 nt, Human
ccucucucacuccuuga

SEQ ID NO: 3316218 - RNA, 15 nt, Human
ccucucucacuccuu

SEQ ID NO: 3316219 - RNA, 14 nt, Human
ccucucucacuccu

SEQ ID NO: 3316220 - RNA, 13 nt, Human
ccucucucacucc

SEQ ID NO: 3316221 - RNA, 12 nt, Human
ccucucucacuc

SEQ ID NO: 3316222 - RNA, 14 nt, Human
ccucucucaggcca

SEQ ID NO: 3316223 - RNA, 12 nt, Human
ccuggccucugc

SEQ ID NO: 3316224 - RNA, 13 nt, Human
ccuggccugagcu

SEQ ID NO: 3316225 - RNA, 15 nt, Human
ccuggccucugcacu

SEQ ID NO: 3316226 - RNA, 14 nt, Human
ccuggccucugcac

SEQ ID NO: 3316227 - RNA, 14 nt, Human
ccugcccaggcccc

SEQ ID NO: 3316228 - RNA, 15 nt, Human
ccugcccaggccccu

SEQ ID NO: 3316229 - RNA, 22 nt, Human
ccugcccaggccccugccaccc

SEQ ID NO: 3316230 - RNA, 16 nt, Human
ccugcccaggccccug

SEQ ID NO: 3316231 - RNA, 12 nt, Human
ccugcugggugu

SEQ ID NO: 3316232 - RNA, 20 nt, Human
ccugcuggguguggcgcagc

SEQ ID NO: 3316233 - RNA, 14 nt, Human
ccugcugggugugg

SEQ ID NO: 3316234 - RNA, 19 nt, Human
ccuggaugcagccucacag

SEQ ID NO: 3316235 - RNA, 17 nt, Human
ccuggaugcagccucac

SEQ ID NO: 3316236 - RNA, 14 nt, Human
ccuggaugcagccu

SEQ ID NO: 3316237 - RNA, 13 nt, Human
ccuggaugcagcc

SEQ ID NO: 3316238 - RNA, 15 nt, Human
ccuggaguucugguu

SEQ ID NO: 3316239 - RNA, 17 nt, Human
ccuggaguucugguucc

SEQ ID NO: 3316240 - RNA, 16 nt, Human
ccuggaguucugguuc

SEQ ID NO: 3316241 - RNA, 23 nt, Human
ccucagccucccaaagugcuggg

SEQ ID NO: 3316242 - RNA, 22 nt, Human
ccucagccucccgaauagcugg

SEQ ID NO: 3316243 - RNA, 13 nt, Human
ccucauguucuua

SEQ ID NO: 3316244 - RNA, 20 nt, Human
ccuccaagaccuucuccuuc

SEQ ID NO: 3316245 - RNA, 19 nt, Human
ccucauguucuuaauucuu

SEQ ID NO: 3316246 - RNA, 23 nt, Human
ccucccaacucaccccagcccca

SEQ ID NO: 3316247 - RNA, 22 nt, Human
ccucccaaggggcccaaauucu

SEQ ID NO: 3316248 - RNA, 11 nt, Human
ccucagccucc

SEQ ID NO: 3316249 - RNA, 22 nt, Human
ccucagccucccaaagugcugg

SEQ ID NO: 3316250 - RNA, 15 nt, Human
ccucaagagaaggca

SEQ ID NO: 3316251 - RNA, 15 nt, Human
ccucaacucuccucc

SEQ ID NO: 3316252 - RNA, 16 nt, Human
ccucaaccuccugggc

SEQ ID NO: 3316253 - RNA, 16 nt, Human
cccuucgcuccugugu

SEQ ID NO: 3316254 - RNA, 18 nt, Human
cccuucgcuccugugucu

SEQ ID NO: 3316255 - RNA, 16 nt, Human
cccuucuaccuuccug

SEQ ID NO: 3316256 - RNA, 23 nt, Human
cccuucugacccaugcugcccug

SEQ ID NO: 3316257 - RNA, 22 nt, Human
cccuucugacccaugcugcccu

SEQ ID NO: 3316258 - RNA, 21 nt, Human
cccuucugacccaugcugccc

SEQ ID NO: 3316259 - RNA, 16 nt, Human
ccgccaugcuccuggc

SEQ ID NO: 3316260 - RNA, 12 nt, Human
ccgcccaggcuu

SEQ ID NO: 3316261 - RNA, 20 nt, Human
ccgcccaggcuuagucacug

SEQ ID NO: 3316262 - RNA, 20 nt, Human
ccgaauagcugggacuacag

SEQ ID NO: 3316263 - RNA, 17 nt, Human
ccgaauagcugggacua

SEQ ID NO: 3316264 - RNA, 18 nt, Human
ccgaccagacaccuugac

SEQ ID NO: 3316265 - RNA, 17 nt, Human
ccgccaaggcuggggga

SEQ ID NO: 3316266 - RNA, 16 nt, Human
ccgacccuugccgucu

SEQ ID NO: 3316267 - RNA, 13 nt, Human
cccugcccugugg

SEQ ID NO: 3316268 - RNA, 12 nt, Human
cccugcccugug

SEQ ID NO: 3316269 - RNA, 11 nt, Human
cccugcccugu

SEQ ID NO: 3316270 - RNA, 14 nt, Human
cccugcccuguggg

SEQ ID NO: 3316271 - RNA, 15 nt, Human
cccugcccugugggc

SEQ ID NO: 3316272 - RNA, 20 nt, Human
cccugcccugugggccccca

SEQ ID NO: 3316273 - RNA, 16 nt, Human
cccugcccugugggcc

SEQ ID NO: 3316274 - RNA, 13 nt, Human
cccuggcagcccc

SEQ ID NO: 3316275 - RNA, 12 nt, Human
cccuggcagccc

SEQ ID NO: 3316276 - RNA, 16 nt, Human
cccuggcagccccugu

SEQ ID NO: 3316277 - RNA, 14 nt, Human
cccuggcagccccu

SEQ ID NO: 3316278 - RNA, 18 nt, Human
cccuauuagagaagagau

SEQ ID NO: 3316279 - RNA, 22 nt, Human
cccgggaagggggcugggacau

SEQ ID NO: 3316280 - RNA, 11 nt, Human
cccggcuccag

SEQ ID NO: 3316281 - RNA, 12 nt, Human
cccggcuccagg

SEQ ID NO: 3316282 - RNA, 14 nt, Human
cccggccaccugcg

SEQ ID NO: 3316283 - RNA, 13 nt, Human
cccggccaccugc

SEQ ID NO: 3316284 - RNA, 13 nt, Human
cccggcuccaggc

SEQ ID NO: 3316285 - RNA, 14 nt, Human
cccggcuccaggcu

SEQ ID NO: 3316286 - RNA, 15 nt, Human
cccggcuccaggcuc

SEQ ID NO: 3316287 - RNA, 16 nt, Human
cccggcuccaggcucc

SEQ ID NO: 3316288 - RNA, 14 nt, Human
cccgaauagcuggg

SEQ ID NO: 3316289 - RNA, 22 nt, Human
ccccaaaacucuccucugcugc

SEQ ID NO: 3316290 - RNA, 23 nt, Human
ccccaaaacucuccucugcugcu

SEQ ID NO: 3316291 - RNA, 21 nt, Human
ccccaaaacucuccucugcug

SEQ ID NO: 3316292 - RNA, 23 nt, Human
ccccgacccuugccgucuaccug

SEQ ID NO: 3316293 - RNA, 22 nt, Human
cccccaaauggaaaugggcaga

SEQ ID NO: 3316294 - RNA, 21 nt, Human
ccccagcaagugagagcuggg

SEQ ID NO: 3316295 - RNA, 22 nt, Human
ccccagcaagugagagcugggu

SEQ ID NO: 3316296 - RNA, 17 nt, Human
cccacccccacccaagg

SEQ ID NO: 3316297 - RNA, 15 nt, Human
cccacccccacccaa

SEQ ID NO: 3316298 - RNA, 12 nt, Human
cccacccccacc

SEQ ID NO: 3316299 - RNA, 18 nt, Human
cccacccaagggccuggc

SEQ ID NO: 3316300 - RNA, 18 nt, Human
cccacccugaaagcccug

SEQ ID NO: 3316301 - RNA, 22 nt, Human
cccacccaagggccuggccuga

SEQ ID NO: 3316302 - RNA, 21 nt, Human
cccacccaagggccuggccug

SEQ ID NO: 3316303 - RNA, 20 nt, Human
cccacccaagggccuggccu

SEQ ID NO: 3316304 - RNA, 19 nt, Human
cccacugcuuuuggucugu

SEQ ID NO: 3316305 - RNA, 12 nt, Human
cccacugcucug

SEQ ID NO: 3316306 - RNA, 13 nt, Human
cccacugcucugg

SEQ ID NO: 3316307 - RNA, 13 nt, Human
cccaggcuggcgu

SEQ ID NO: 3316308 - RNA, 17 nt, Human
cccaggcuggcgugcag

SEQ ID NO: 3316309 - RNA, 22 nt, Human
cccagcuuaaaggggcuagagu

SEQ ID NO: 3316310 - RNA, 23 nt, Human
cccagcucugguccauagagagc

SEQ ID NO: 3316311 - RNA, 16 nt, Human
ccaccuuggcucaagu

SEQ ID NO: 3316312 - RNA, 17 nt, Human
ccagagggccugcaagg

SEQ ID NO: 3316313 - RNA, 19 nt, Human
ccagagggccugcaaggga

SEQ ID NO: 3316314 - RNA, 18 nt, Human
ccagagggccugcaaggg

SEQ ID NO: 3316315 - RNA, 18 nt, Human
ccagaugcaccagcccuu

SEQ ID NO: 3316316 - RNA, 17 nt, Human
ccagaugcaccagcccu

SEQ ID NO: 3316317 - RNA, 15 nt, Human
ccagaugcaccagcc

SEQ ID NO: 3316318 - RNA, 16 nt, Human
ccaggaaaggcuccag

SEQ ID NO: 3316319 - RNA, 15 nt, Human
ccaggaaaggcucca

SEQ ID NO: 3316320 - RNA, 14 nt, Human
ccaggaaaggcucc

SEQ ID NO: 3316321 - RNA, 12 nt, Human
ccaggaagccag

SEQ ID NO: 3316322 - RNA, 13 nt, Human
ccaggaagccagc

SEQ ID NO: 3316323 - RNA, 19 nt, Human
ccagcuuaaaggggcuaga

SEQ ID NO: 3316324 - RNA, 17 nt, Human
ccagcuguucagcuggu

SEQ ID NO: 3316325 - RNA, 22 nt, Human
ccagcucaccagccccagugcc

SEQ ID NO: 3316326 - RNA, 16 nt, Human
ccagcuguucagcugg

SEQ ID NO: 3316327 - RNA, 15 nt, Human
ccagcucaccagccc

SEQ ID NO: 3316328 - RNA, 16 nt, Human
ccagcucaccagcccc

SEQ ID NO: 3316329 - RNA, 11 nt, Human
ccagccccugg

SEQ ID NO: 3316330 - RNA, 20 nt, Human
ccagcagccuggacccugug

SEQ ID NO: 3316331 - RNA, 15 nt, Human
ccagcaggcucucag

SEQ ID NO: 3316332 - RNA, 13 nt, Human
ccagcaggcucuc

SEQ ID NO: 3316333 - RNA, 17 nt, Human
ccaguuggguggaugcc

SEQ ID NO: 3316334 - RNA, 19 nt, Human
ccaguuggguggaugccug

SEQ ID NO: 3316335 - RNA, 20 nt, Human
ccaguuggguggaugccugg

SEQ ID NO: 3316336 - RNA, 17 nt, Human
ccaucccugaaggcccc

SEQ ID NO: 3316337 - RNA, 15 nt, Human
ccaucccugaaggcc

SEQ ID NO: 3316338 - RNA, 14 nt, Human
ccaucccugaaggc

SEQ ID NO: 3316339 - RNA, 23 nt, Human
ccaguuggucccccuuccaugga

SEQ ID NO: 3316340 - RNA, 15 nt, Human
ccaucccagccccaa

SEQ ID NO: 3316341 - RNA, 13 nt, Human
ccaucccagcccc

SEQ ID NO: 3316342 - RNA, 14 nt, Human
ccaucccagcccca

SEQ ID NO: 3316343 - RNA, 21 nt, Human
ccaugagccucagcauccugg

SEQ ID NO: 3316344 - RNA, 23 nt, Human
ccaugagccucagcauccuggca

SEQ ID NO: 3316345 - RNA, 20 nt, Human
ccauggucggaaaacaugcu

SEQ ID NO: 3316346 - RNA, 19 nt, Human
ccaggggaaaaucagccug

SEQ ID NO: 3316347 - RNA, 13 nt, Human
ccaggggugggac

SEQ ID NO: 3316348 - RNA, 20 nt, Human
ccaggggaaaaucagccugc

SEQ ID NO: 3316349 - RNA, 17 nt, Human
ccaggggugggacaccc

SEQ ID NO: 3316350 - RNA, 14 nt, Human
ccaggggugggaca

SEQ ID NO: 3316351 - RNA, 23 nt, Human
ccaggggugggacacccugugau

SEQ ID NO: 3316352 - RNA, 16 nt, Human
ccaggcuggcgugcag

SEQ ID NO: 3316353 - RNA, 20 nt, Human
ccaggcuccuuuagcgccca

SEQ ID NO: 3316354 - RNA, 21 nt, Human
ccaggcuccuuuagcgcccag

SEQ ID NO: 3316355 - RNA, 17 nt, Human
ccaggcuggcgugcagu

SEQ ID NO: 3316356 - RNA, 18 nt, Human
ccaggcuggcgugcagug

SEQ ID NO: 3316357 - RNA, 12 nt, Human
cauuaucuagau

SEQ ID NO: 3316358 - RNA, 17 nt, Human
cauuaucuagauacugu

SEQ ID NO: 3316359 - RNA, 16 nt, Human
cauuaucuagauacug

SEQ ID NO: 3316360 - RNA, 15 nt, Human
cauguucucugagga

SEQ ID NO: 3316361 - RNA, 22 nt, Human
cauggccucuucagaucucuaa

SEQ ID NO: 3316362 - RNA, 22 nt, Human
cauggcugccaaugggagcuca

SEQ ID NO: 3316363 - RNA, 17 nt, Human
cauggcugccaauggga

SEQ ID NO: 3316364 - RNA, 18 nt, Human
cauuaucuagauacugua

SEQ ID NO: 3316365 - RNA, 21 nt, Human
cauucuccaccugccagggac

SEQ ID NO: 3316366 - RNA, 16 nt, Human
cauucuccuuguguua

SEQ ID NO: 3316367 - RNA, 17 nt, Human
ccaaaacucuccucugc

SEQ ID NO: 3316368 - RNA, 17 nt, Human
ccaaaaaaugcuugcuu

SEQ ID NO: 3316369 - RNA, 23 nt, Human
cauuuuucuuagggaaggauaca

SEQ ID NO: 3316370 - RNA, 23 nt, Human
cauuuggugguuucagaaaugug

SEQ ID NO: 3316371 - RNA, 22 nt, Human
cauuuggugguuucagaaaugu

SEQ ID NO: 3316372 - RNA, 21 nt, Human
cauuuggugguuucagaaaug

SEQ ID NO: 3316373 - RNA, 16 nt, Human
cauuuauucugcucac

SEQ ID NO: 3316374 - RNA, 15 nt, Human
cauuuauucugcuca

SEQ ID NO: 3316375 - RNA, 18 nt, Human
cauugcugggcuugucug

SEQ ID NO: 3316376 - RNA, 14 nt, Human
cauugcggacagcc

SEQ ID NO: 3316377 - RNA, 15 nt, Human
cauugcggacagcca

SEQ ID NO: 3316378 - RNA, 17 nt, Human
cauugcggacagccacg

SEQ ID NO: 3316379 - RNA, 21 nt, Human
cauugcggacagccacggcca

SEQ ID NO: 3316380 - RNA, 16 nt, Human
ccaaaucauaguggcu

SEQ ID NO: 3316381 - RNA, 16 nt, Human
ccaacgucugugccau

SEQ ID NO: 3316382 - RNA, 14 nt, Human
ccaaagugcuggga

SEQ ID NO: 3316383 - RNA, 23 nt, Human
ccaaugcacuuuguucuggcucu

SEQ ID NO: 3316384 - RNA, 22 nt, Human
ccaaugcacuuuguucuggcuc

SEQ ID NO: 3316385 - RNA, 20 nt, Human
ccaaugcacuuuguucuggc

SEQ ID NO: 3316386 - RNA, 20 nt, Human
ccaagcuggucccacucagu

SEQ ID NO: 3316387 - RNA, 20 nt, Human
ccaauguucucucuucucca

SEQ ID NO: 3316388 - RNA, 13 nt, Human
ccaccuuggcuca

SEQ ID NO: 3316389 - RNA, 14 nt, Human
ccaccuuggcucaa

SEQ ID NO: 3316390 - RNA, 15 nt, Human
ccaccuuggcucaag

SEQ ID NO: 3316391 - RNA, 13 nt, Human
ccaccgcagacag

SEQ ID NO: 3316392 - RNA, 18 nt, Human
ccaccgcagacaggacca

SEQ ID NO: 3316393 - RNA, 13 nt, Human
ccacccugcucuc

SEQ ID NO: 3316394 - RNA, 15 nt, Human
ccaccaucaagccac

SEQ ID NO: 3316395 - RNA, 20 nt, Human
ccaccaucaagccaccaaca

SEQ ID NO: 3316396 - RNA, 17 nt, Human
ccaccgcagacaggacc

SEQ ID NO: 3316397 - RNA, 14 nt, Human
ccaccgcagacagg

SEQ ID NO: 3316398 - RNA, 17 nt, Human
ccaccaucaagccacca

SEQ ID NO: 3316399 - RNA, 16 nt, Human
ccaccaucaagccacc

SEQ ID NO: 3316400 - RNA, 21 nt, Human
cauaaugcgugcauaccacuu

SEQ ID NO: 3316401 - RNA, 15 nt, Human
cauacaauuccaaac

SEQ ID NO: 3316402 - RNA, 16 nt, Human
cauauuaccacagaca

SEQ ID NO: 3316403 - RNA, 17 nt, Human
cauauuaccacagacau

SEQ ID NO: 3316404 - RNA, 21 nt, Human
cauauuaccacagacauacua

SEQ ID NO: 3316405 - RNA, 20 nt, Human
cauauuaccacagacauacu

SEQ ID NO: 3316406 - RNA, 17 nt, Human
cauaaugcgugcauacc

SEQ ID NO: 3316407 - RNA, 14 nt, Human
cauaaugcgugcau

SEQ ID NO: 3316408 - RNA, 18 nt, Human
cagucaccccggccaccu

SEQ ID NO: 3316409 - RNA, 14 nt, Human
caugacacgaauau

SEQ ID NO: 3316410 - RNA, 24 nt, Human
caugauuaaccacuucagcugacu

SEQ ID NO: 3316411 - RNA, 18 nt, Human
caugacacgaauauugcu

SEQ ID NO: 3316412 - RNA, 17 nt, Human
caugacacgaauauugc

SEQ ID NO: 3316413 - RNA, 15 nt, Human
caugcaaggucauuu

SEQ ID NO: 3316414 - RNA, 22 nt, Human
caugcaaggucauuuuuuuuaa

SEQ ID NO: 3316415 - RNA, 18 nt, Human
caugcaaggucauuuuuu

SEQ ID NO: 3316416 - RNA, 17 nt, Human
caugcaaggucauuuuu

SEQ ID NO: 3316417 - RNA, 15 nt, Human
caugcugcccuguga

SEQ ID NO: 3316418 - RNA, 19 nt, Human
cauggccuuugcuugaaag

SEQ ID NO: 3316419 - RNA, 22 nt, Human
cauggccuuugcuugaaagaaa

SEQ ID NO: 3316420 - RNA, 18 nt, Human
caugcugcccugugagua

SEQ ID NO: 3316421 - RNA, 16 nt, Human
caugcugcccugugag

SEQ ID NO: 3316422 - RNA, 13 nt, Human
caucaggccaggc

SEQ ID NO: 3316423 - RNA, 18 nt, Human
caucagcacgauuucugu

SEQ ID NO: 3316424 - RNA, 17 nt, Human
caucagcacgauuucug

SEQ ID NO: 3316425 - RNA, 23 nt, Human
cauccuggcacccggccccugcu

SEQ ID NO: 3316426 - RNA, 13 nt, Human
caucccagcccca

SEQ ID NO: 3316427 - RNA, 14 nt, Human
caucccagccccaa

SEQ ID NO: 3316428 - RNA, 16 nt, Human
caucccagccccaaug

SEQ ID NO: 3316429 - RNA, 12 nt, Human
caucccagcccc

SEQ ID NO: 3316430 - RNA, 23 nt, Human
caucaggccaggcccucugccca

SEQ ID NO: 3316431 - RNA, 22 nt, Human
caucaggccaggcccucugccc

SEQ ID NO: 3316432 - RNA, 21 nt, Human
caucaggccaggcccucugcc

SEQ ID NO: 3316433 - RNA, 20 nt, Human
caucaggccaggcccucugc

SEQ ID NO: 3316434 - RNA, 22 nt, Human
caucuuagguuggcaaaaaggc

SEQ ID NO: 3316435 - RNA, 21 nt, Human
caucuuagguuggcaaaaagg

SEQ ID NO: 3316436 - RNA, 19 nt, Human
caucugugaaaggaaagag

SEQ ID NO: 3316437 - RNA, 18 nt, Human
caucugugaaaggaaaga

SEQ ID NO: 3316438 - RNA, 16 nt, Human
cagcuguucagcuggu

SEQ ID NO: 3316439 - RNA, 15 nt, Human
cagcuguucagcugg

SEQ ID NO: 3316440 - RNA, 23 nt, Human
caggaaaggcuccaggagcagcc

SEQ ID NO: 3316441 - RNA, 22 nt, Human
caggaaaggcuccaggagcagc

SEQ ID NO: 3316442 - RNA, 21 nt, Human
caggaaaggcuccaggagcag

SEQ ID NO: 3316443 - RNA, 19 nt, Human
caggaaaagcugcugacag

SEQ ID NO: 3316444 - RNA, 20 nt, Human
caggaaaagcugcugacagu

SEQ ID NO: 3316445 - RNA, 20 nt, Human
caggaaaggcuccaggagca

SEQ ID NO: 3316446 - RNA, 13 nt, Human
caggaccagggau

SEQ ID NO: 3316447 - RNA, 16 nt, Human
caggccaggcccucug

SEQ ID NO: 3316448 - RNA, 15 nt, Human
caggccaggcccucu

SEQ ID NO: 3316449 - RNA, 14 nt, Human
caggccaggcccuc

SEQ ID NO: 3316450 - RNA, 13 nt, Human
caggccaggcccu

SEQ ID NO: 3316451 - RNA, 17 nt, Human
caggcaaugcuggcugu

SEQ ID NO: 3316452 - RNA, 21 nt, Human
caggcaaugcuggcuguuggc

SEQ ID NO: 3316453 - RNA, 19 nt, Human
caggcaaugcuggcuguug

SEQ ID NO: 3316454 - RNA, 20 nt, Human
caggcaaugcuggcuguugg

SEQ ID NO: 3316455 - RNA, 13 nt, Human
caggaggccagcc

SEQ ID NO: 3316456 - RNA, 12 nt, Human
caggaggccagc

SEQ ID NO: 3316457 - RNA, 15 nt, Human
caggccagcugcuug

SEQ ID NO: 3316458 - RNA, 13 nt, Human
caggccagcugcu

SEQ ID NO: 3316459 - RNA, 23 nt, Human
caggccagagggagugacagagg

SEQ ID NO: 3316460 - RNA, 15 nt, Human
caggcugggagagcc

SEQ ID NO: 3316461 - RNA, 14 nt, Human
caggcugggcuuca

SEQ ID NO: 3316462 - RNA, 16 nt, Human
cagggagggcuucugc

SEQ ID NO: 3316463 - RNA, 12 nt, Human
cagggcucagcg

SEQ ID NO: 3316464 - RNA, 15 nt, Human
cagggcucagcgggg

SEQ ID NO: 3316465 - RNA, 15 nt, Human
caggcuggcgugcag

SEQ ID NO: 3316466 - RNA, 19 nt, Human
caggcugggagagccuucc

SEQ ID NO: 3316467 - RNA, 18 nt, Human
caggcugggagagccuuc

SEQ ID NO: 3316468 - RNA, 16 nt, Human
caggcugggagagccu

SEQ ID NO: 3316469 - RNA, 17 nt, Human
caggcuggcgugcagug

SEQ ID NO: 3316470 - RNA, 23 nt, Human
caggccugggggcugggcagagg

SEQ ID NO: 3316471 - RNA, 18 nt, Human
caggcuggcgugcagugg

SEQ ID NO: 3316472 - RNA, 19 nt, Human
caggcuggcgugcaguggu

SEQ ID NO: 3316473 - RNA, 22 nt, Human
caggccugggggcugggcagag

SEQ ID NO: 3316474 - RNA, 20 nt, Human
caggccugggggcugggcag

SEQ ID NO: 3316475 - RNA, 14 nt, Human
cagucaccccggcc

SEQ ID NO: 3316476 - RNA, 17 nt, Human
cagucaccccggccacc

SEQ ID NO: 3316477 - RNA, 16 nt, Human
cagucaccccggccac

SEQ ID NO: 3316478 - RNA, 18 nt, Human
caguaaaugggggugcau

SEQ ID NO: 3316479 - RNA, 19 nt, Human
caguauuacuucugcuaca

SEQ ID NO: 3316480 - RNA, 19 nt, Human
caguaaaugggggugcauu

SEQ ID NO: 3316481 - RNA, 13 nt, Human
caggugcugccau

SEQ ID NO: 3316482 - RNA, 14 nt, Human
caggugcugccauc

SEQ ID NO: 3316483 - RNA, 14 nt, Human
caggguuggccccu

SEQ ID NO: 3316484 - RNA, 17 nt, Human
caggguuggccccugcc

SEQ ID NO: 3316485 - RNA, 21 nt, Human
caggguuggccccugcccggc

SEQ ID NO: 3316486 - RNA, 23 nt, Human
cagguuuuuggucugacccacug

SEQ ID NO: 3316487 - RNA, 15 nt, Human
caggguuggccccug

SEQ ID NO: 3316488 - RNA, 16 nt, Human
caggguuggccccugc

SEQ ID NO: 3316489 - RNA, 21 nt, Human
cagggucucuaccauccccug

SEQ ID NO: 3316490 - RNA, 22 nt, Human
cagggucucacucugucgccca

SEQ ID NO: 3316491 - RNA, 23 nt, Human
cagggucucacucugucgcccag

SEQ ID NO: 3316492 - RNA, 23 nt, Human
cagauacaggaaaagcugcugac

SEQ ID NO: 3316493 - RNA, 20 nt, Human
cagagacuccugcaggcagc

SEQ ID NO: 3316494 - RNA, 22 nt, Human
cagagacuccugcaggcagcca

SEQ ID NO: 3316495 - RNA, 21 nt, Human
cagagacuccugcaggcagcc

SEQ ID NO: 3316496 - RNA, 19 nt, Human
cagagacuccugcaggcag

SEQ ID NO: 3316497 - RNA, 14 nt, Human
cagagccugcaguu

SEQ ID NO: 3316498 - RNA, 22 nt, Human
cagagagggugggagugggccc

SEQ ID NO: 3316499 - RNA, 20 nt, Human
cagagagggugggagugggc

SEQ ID NO: 3316500 - RNA, 13 nt, Human
cagagaggguggg

SEQ ID NO: 3316501 - RNA, 16 nt, Human
cagagagggugggagu

SEQ ID NO: 3316502 - RNA, 22 nt, Human
cagagcuacacaggggaaaaga

SEQ ID NO: 3316503 - RNA, 17 nt, Human
cagagcuacacagggga

SEQ ID NO: 3316504 - RNA, 23 nt, Human
cagccgccaugcuccuggcccac

SEQ ID NO: 3316505 - RNA, 13 nt, Human
cagcccuuagcag

SEQ ID NO: 3316506 - RNA, 14 nt, Human
cagcguuucuauga

SEQ ID NO: 3316507 - RNA, 16 nt, Human
cagcguuucuaugaca

SEQ ID NO: 3316508 - RNA, 23 nt, Human
cagccccauucugccugcccagg

SEQ ID NO: 3316509 - RNA, 24 nt, Human
cagccccauucugccugcccaggc

SEQ ID NO: 3316510 - RNA, 19 nt, Human
cagccccauucugccugcc

SEQ ID NO: 3316511 - RNA, 20 nt, Human
cagccccauucugccugccc

SEQ ID NO: 3316512 - RNA, 22 nt, Human
cagccccauucugccugcccag

SEQ ID NO: 3316513 - RNA, 18 nt, Human
cagcauauucaggaagcu

SEQ ID NO: 3316514 - RNA, 17 nt, Human
cagcauauucaggaagc

SEQ ID NO: 3316515 - RNA, 16 nt, Human
cagcauauucaggaag

SEQ ID NO: 3316516 - RNA, 17 nt, Human
cagcauagaaguaacuu

SEQ ID NO: 3316517 - RNA, 21 nt, Human
cagauugcaacaggcugggcu

SEQ ID NO: 3316518 - RNA, 13 nt, Human
cagauuucacucu

SEQ ID NO: 3316519 - RNA, 18 nt, Human
cagauuucacucuccuug

SEQ ID NO: 3316520 - RNA, 19 nt, Human
cagauuugaacucuucaau

SEQ ID NO: 3316521 - RNA, 16 nt, Human
cagauuucacucuccu

SEQ ID NO: 3316522 - RNA, 15 nt, Human
cagauuucacucucc

SEQ ID NO: 3316523 - RNA, 16 nt, Human
caaaagaugcuucuca

SEQ ID NO: 3316524 - RNA, 18 nt, Human
caaaagaugcuucucacu

SEQ ID NO: 3316525 - RNA, 23 nt, Human
auuuuuuuuuccuucagugccuu

SEQ ID NO: 3316526 - RNA, 15 nt, Human
caaacagaggccgcc

SEQ ID NO: 3316527 - RNA, 19 nt, Human
caaaccaucauugaaaucu

SEQ ID NO: 3316528 - RNA, 21 nt, Human
caaaccaucauugaaaucuuu

SEQ ID NO: 3316529 - RNA, 20 nt, Human
caaagauauuuugcuuugug

SEQ ID NO: 3316530 - RNA, 18 nt, Human
caaagauauuuugcuuug

SEQ ID NO: 3316531 - RNA, 20 nt, Human
caaauggaaaugggcagagc

SEQ ID NO: 3316532 - RNA, 21 nt, Human
caaauggaaaugggcagagca

SEQ ID NO: 3316533 - RNA, 14 nt, Human
caaagaugcagccg

SEQ ID NO: 3316534 - RNA, 23 nt, Human
caaagauauuuugcuuugugauu

SEQ ID NO: 3316535 - RNA, 22 nt, Human
caaagauauuuugcuuugugau

SEQ ID NO: 3316536 - RNA, 14 nt, Human
caaaguagaagucu

SEQ ID NO: 3316537 - RNA, 21 nt, Human
caaaguagaagucuuagaugu

SEQ ID NO: 3316538 - RNA, 22 nt, Human
caaaguacacuguuucaaacuu

SEQ ID NO: 3316539 - RNA, 17 nt, Human
caaagcagugcaugcug

SEQ ID NO: 3316540 - RNA, 15 nt, Human
caaagcagugcaugc

SEQ ID NO: 3316541 - RNA, 23 nt, Human
auuuguuugaacugauaaagaug

SEQ ID NO: 3316542 - RNA, 22 nt, Human
auuuguuugaacugauaaagau

SEQ ID NO: 3316543 - RNA, 20 nt, Human
auuuguuugaacugauaaag

SEQ ID NO: 3316544 - RNA, 13 nt, Human
auuugcuccuuuc

SEQ ID NO: 3316545 - RNA, 20 nt, Human
auuugugauacaaugcugug

SEQ ID NO: 3316546 - RNA, 17 nt, Human
auuugugauacaaugcu

SEQ ID NO: 3316547 - RNA, 15 nt, Human
auuugugauacaaug

SEQ ID NO: 3316548 - RNA, 18 nt, Human
auuaggugugacugaauu

SEQ ID NO: 3316549 - RNA, 16 nt, Human
auuaggugugacugaa

SEQ ID NO: 3316550 - RNA, 21 nt, Human
auuaggugugacugaauuucu

SEQ ID NO: 3316551 - RNA, 19 nt, Human
auucauaaugacuuaagca

SEQ ID NO: 3316552 - RNA, 15 nt, Human
auucauaaugacuua

SEQ ID NO: 3316553 - RNA, 14 nt, Human
auucauaaugacuu

SEQ ID NO: 3316554 - RNA, 17 nt, Human
auuacaggaaguacugg

SEQ ID NO: 3316555 - RNA, 16 nt, Human
auuacaggugugaacc

SEQ ID NO: 3316556 - RNA, 16 nt, Human
auuguuagucucuuga

SEQ ID NO: 3316557 - RNA, 23 nt, Human
auugugucucuugguccugcugc

SEQ ID NO: 3316558 - RNA, 21 nt, Human
auugugucucuugguccugcu

SEQ ID NO: 3316559 - RNA, 18 nt, Human
auugugucucuugguccu

SEQ ID NO: 3316560 - RNA, 12 nt, Human
auugcugcuuga

SEQ ID NO: 3316561 - RNA, 23 nt, Human
auugcugauggugcaaugaccuu

SEQ ID NO: 3316562 - RNA, 14 nt, Human
auugcuugagcuca

SEQ ID NO: 3316563 - RNA, 19 nt, Human
auugcugauggugcaauga

SEQ ID NO: 3316564 - RNA, 18 nt, Human
auugcugauggugcaaug

SEQ ID NO: 3316565 - RNA, 16 nt, Human
auugcugauggugcaa

SEQ ID NO: 3316566 - RNA, 15 nt, Human
auugcugauggugca

SEQ ID NO: 3316567 - RNA, 11 nt, Human
auucuuuccug

SEQ ID NO: 3316568 - RNA, 11 nt, Human
auucuucugcu

SEQ ID NO: 3316569 - RNA, 12 nt, Human
auucuucugcuu

SEQ ID NO: 3316570 - RNA, 21 nt, Human
auugauaagaaccuuuugagu

SEQ ID NO: 3316571 - RNA, 14 nt, Human
auugcuacuguccu

SEQ ID NO: 3316572 - RNA, 15 nt, Human
auugcuacuguccua

SEQ ID NO: 3316573 - RNA, 20 nt, Human
auugcuacuguccuacccac

SEQ ID NO: 3316574 - RNA, 22 nt, Human
auugcuacuguccuacccaccc

SEQ ID NO: 3316575 - RNA, 16 nt, Human
cacuuacacuuuaugc

SEQ ID NO: 3316576 - RNA, 18 nt, Human
cacuuacacuuuaugcac

SEQ ID NO: 3316577 - RNA, 12 nt, Human
cacugcagccuc

SEQ ID NO: 3316578 - RNA, 20 nt, Human
cacugcacuccagccugggu

SEQ ID NO: 3316579 - RNA, 16 nt, Human
cacugcacuccagccu

SEQ ID NO: 3316580 - RNA, 15 nt, Human
cacugcacuccagcc

SEQ ID NO: 3316581 - RNA, 18 nt, Human
cacugcacuccagccugg

SEQ ID NO: 3316582 - RNA, 19 nt, Human
cacugcacuccagccuggg

SEQ ID NO: 3316583 - RNA, 19 nt, Human
cacugcacuauagccuagg

SEQ ID NO: 3316584 - RNA, 13 nt, Human
cacugcagccuca

SEQ ID NO: 3316585 - RNA, 16 nt, Human
cacugcauguuuguga

SEQ ID NO: 3316586 - RNA, 16 nt, Human
cacuccagccugggug

SEQ ID NO: 3316587 - RNA, 13 nt, Human
cacuccccugcug

SEQ ID NO: 3316588 - RNA, 12 nt, Human
cacuccccugcu

SEQ ID NO: 3316589 - RNA, 14 nt, Human
cacuccccugcugg

SEQ ID NO: 3316590 - RNA, 17 nt, Human
caccugccuguugggcc

SEQ ID NO: 3316591 - RNA, 19 nt, Human
caccugccuguugggccag

SEQ ID NO: 3316592 - RNA, 14 nt, Human
caccuuggcucaag

SEQ ID NO: 3316593 - RNA, 15 nt, Human
caccuuggcucaagu

SEQ ID NO: 3316594 - RNA, 13 nt, Human
caccuuggcugca

SEQ ID NO: 3316595 - RNA, 14 nt, Human
caccucagccuccc

SEQ ID NO: 3316596 - RNA, 12 nt, Human
caccucagccuc

SEQ ID NO: 3316597 - RNA, 13 nt, Human
caccucagccucc

SEQ ID NO: 3316598 - RNA, 14 nt, Human
caccugccccucaa

SEQ ID NO: 3316599 - RNA, 15 nt, Human
caccugccccucaac

SEQ ID NO: 3316600 - RNA, 17 nt, Human
cacccugaaagcccuga

SEQ ID NO: 3316601 - RNA, 15 nt, Human
cacccuggggagaaa

SEQ ID NO: 3316602 - RNA, 16 nt, Human
cacccuggggagaaag

SEQ ID NO: 3316603 - RNA, 14 nt, Human
cacccucaggcagg

SEQ ID NO: 3316604 - RNA, 11 nt, Human
caccccagccc

SEQ ID NO: 3316605 - RNA, 11 nt, Human
caauggcagcc

SEQ ID NO: 3316606 - RNA, 12 nt, Human
caauggcagccu

SEQ ID NO: 3316607 - RNA, 14 nt, Human
cacaagagcccagg

SEQ ID NO: 3316608 - RNA, 15 nt, Human
cacaagcuccaagcu

SEQ ID NO: 3316609 - RNA, 14 nt, Human
cacaagcuccaagc

SEQ ID NO: 3316610 - RNA, 13 nt, Human
cacaagcuccaag

SEQ ID NO: 3316611 - RNA, 16 nt, Human
cacaagagcccaggcc

SEQ ID NO: 3316612 - RNA, 21 nt, Human
cacaagcuccaagcucccagg

SEQ ID NO: 3316613 - RNA, 23 nt, Human
cacaagcuccaagcucccaggca

SEQ ID NO: 3316614 - RNA, 17 nt, Human
cacaagcuccaagcucc

SEQ ID NO: 3316615 - RNA, 23 nt, Human
cacaagcugcacccucaggcagg

SEQ ID NO: 3316616 - RNA, 17 nt, Human
cacaagcugcacccuca

SEQ ID NO: 3316617 - RNA, 17 nt, Human
cacacagcucuguccug

SEQ ID NO: 3316618 - RNA, 20 nt, Human
cacacagcucuguccuggga

SEQ ID NO: 3316619 - RNA, 19 nt, Human
cacaggggaaaagaggagu

SEQ ID NO: 3316620 - RNA, 18 nt, Human
cacaggggaaaagaggag

SEQ ID NO: 3316621 - RNA, 17 nt, Human
cacaggggaaaagagga

SEQ ID NO: 3316622 - RNA, 20 nt, Human
cacaguauuacuucugcuac

SEQ ID NO: 3316623 - RNA, 21 nt, Human
cacaguauuacuucugcuaca

SEQ ID NO: 3316624 - RNA, 19 nt, Human
cacaguauuacuucugcua

SEQ ID NO: 3316625 - RNA, 20 nt, Human
cacacaugagcaucaggcca

SEQ ID NO: 3316626 - RNA, 15 nt, Human
cacacauacacacac

SEQ ID NO: 3316627 - RNA, 21 nt, Human
cacacagugagucgaggacag

SEQ ID NO: 3316628 - RNA, 23 nt, Human
cacacagugagucgaggacaggg

SEQ ID NO: 3316629 - RNA, 18 nt, Human
cacacagugagucgagga

SEQ ID NO: 3316630 - RNA, 20 nt, Human
cacacaguauuacuucugcu

SEQ ID NO: 3316631 - RNA, 23 nt, Human
cacacaguauuacuucugcuaca

SEQ ID NO: 3316632 - RNA, 16 nt, Human
cacacagcucuguccu

SEQ ID NO: 3316633 - RNA, 22 nt, Human
cacagaaaauggaagacagcuc

SEQ ID NO: 3316634 - RNA, 20 nt, Human
cacagaaaauggaagacagc

SEQ ID NO: 3316635 - RNA, 19 nt, Human
cacagaaaauggaagacag

SEQ ID NO: 3316636 - RNA, 18 nt, Human
cacagaaaauggaagaca

SEQ ID NO: 3316637 - RNA, 22 nt, Human
cacacaugagcaucaggccagg

SEQ ID NO: 3316638 - RNA, 21 nt, Human
cacacaugagcaucaggccag

SEQ ID NO: 3316639 - RNA, 11 nt, Human
cacagccucug

SEQ ID NO: 3316640 - RNA, 21 nt, Human
cacagacauacuaaccagcag

SEQ ID NO: 3316641 - RNA, 19 nt, Human
cacagacauacuaaccagc

SEQ ID NO: 3316642 - RNA, 19 nt, Human
cacagaaaauucuucucca

SEQ ID NO: 3316643 - RNA, 23 nt, Human
cacagaaaauggaagacagcucu

SEQ ID NO: 3316644 - RNA, 18 nt, Human
cacagacauacuaaccag

SEQ ID NO: 3316645 - RNA, 17 nt, Human
caagucaagugaaaaag

SEQ ID NO: 3316646 - RNA, 13 nt, Human
caagucaagugaa

SEQ ID NO: 3316647 - RNA, 18 nt, Human
caaggccaaaggaagcac

SEQ ID NO: 3316648 - RNA, 17 nt, Human
caaggccaaaggaagca

SEQ ID NO: 3316649 - RNA, 16 nt, Human
caaggccaaaggaagc

SEQ ID NO: 3316650 - RNA, 15 nt, Human
caaggccaaaggaag

SEQ ID NO: 3316651 - RNA, 13 nt, Human
caagcucugcucc

SEQ ID NO: 3316652 - RNA, 12 nt, Human
caagcuccaagc

SEQ ID NO: 3316653 - RNA, 14 nt, Human
caagcucugcuccu

SEQ ID NO: 3316654 - RNA, 13 nt, Human
caagcugcacccu

SEQ ID NO: 3316655 - RNA, 18 nt, Human
caagcugcacccucaggc

SEQ ID NO: 3316656 - RNA, 14 nt, Human
caagcugcacccuc

SEQ ID NO: 3316657 - RNA, 19 nt, Human
caauaaagcagcguuucua

SEQ ID NO: 3316658 - RNA, 18 nt, Human
caagcgugagccacugca

SEQ ID NO: 3316659 - RNA, 17 nt, Human
uaggaaaaacugauuuu

SEQ ID NO: 3316660 - RNA, 16 nt, Human
uaggaaaaacugauuu

SEQ ID NO: 3316661 - RNA, 13 nt, Human
uagggaagauaau

SEQ ID NO: 3316662 - RNA, 14 nt, Human
uaggaaaaacugau

SEQ ID NO: 3316663 - RNA, 13 nt, Human
uaggaaaaacuga

SEQ ID NO: 3316664 - RNA, 17 nt, Human
uagcgcccaguugggug

SEQ ID NO: 3316665 - RNA, 14 nt, Human
uagcgcccaguugg

SEQ ID NO: 3316666 - RNA, 20 nt, Human
uagccugugccucugggacu

SEQ ID NO: 3316667 - RNA, 21 nt, Human
uagccuuagaagucacacagu

SEQ ID NO: 3316668 - RNA, 20 nt, Human
uagccuuagaagucacacag

SEQ ID NO: 3316669 - RNA, 23 nt, Human
acaaugcaaaccaucauugaaau

SEQ ID NO: 3316670 - RNA, 21 nt, Human
acaaugcaaaccaucauugaa

SEQ ID NO: 3316671 - RNA, 19 nt, Human
acaaugcaaaccaucauug

SEQ ID NO: 3316672 - RNA, 19 nt, Human
acaaugacuuacuguacau

SEQ ID NO: 3316673 - RNA, 20 nt, Human
acaaugacuuacuguacaug

SEQ ID NO: 3316674 - RNA, 22 nt, Human
acaaugacuuacuguacaugaa

SEQ ID NO: 3316675 - RNA, 18 nt, Human
acaaugcaaaccaucauu

SEQ ID NO: 3316676 - RNA, 17 nt, Human
acaaugcaaaccaucau

SEQ ID NO: 3316677 - RNA, 16 nt, Human
acaaugcaaaccauca

SEQ ID NO: 3316678 - RNA, 11 nt, Human
acaaugcaaac

SEQ ID NO: 3316679 - RNA, 19 nt, Human
uaggguaagugagagaggg

SEQ ID NO: 3316680 - RNA, 17 nt, Human
uaggguuauaauaaugu

SEQ ID NO: 3316681 - RNA, 15 nt, Human
uaggguuauaauaau

SEQ ID NO: 3316682 - RNA, 23 nt, Human
acacaggcccggcuccaggcucc

SEQ ID NO: 3316683 - RNA, 24 nt, Human
acacaggcccggcuccaggcuccu

SEQ ID NO: 3316684 - RNA, 19 nt, Human
acacaggcccggcuccagg

SEQ ID NO: 3316685 - RNA, 20 nt, Human
acacaggcccggcuccaggc

SEQ ID NO: 3316686 - RNA, 21 nt, Human
acacaggcccggcuccaggcu

SEQ ID NO: 3316687 - RNA, 22 nt, Human
acacaggcccggcuccaggcuc

SEQ ID NO: 3316688 - RNA, 22 nt, Human
acacacacgcgugcacacacca

SEQ ID NO: 3316689 - RNA, 17 nt, Human
acacaggcccggcucca

SEQ ID NO: 3316690 - RNA, 18 nt, Human
acacaggcccggcuccag

SEQ ID NO: 3316691 - RNA, 16 nt, Human
acacaggcccggcucc

SEQ ID NO: 3316692 - RNA, 15 nt, Human
uaguagagacagggu

SEQ ID NO: 3316693 - RNA, 22 nt, Human
uaguagagacaggguuuugcca

SEQ ID NO: 3316694 - RNA, 14 nt, Human
uagucacugagaca

SEQ ID NO: 3316695 - RNA, 14 nt, Human
uaguagagacaggg

SEQ ID NO: 3316696 - RNA, 21 nt, Human
uagacagucccugccaaugga

SEQ ID NO: 3316697 - RNA, 17 nt, Human
uagacagucccugccaa

SEQ ID NO: 3316698 - RNA, 14 nt, Human
aauuugugauacaa

SEQ ID NO: 3316699 - RNA, 18 nt, Human
aauuugugauacaaugcu

SEQ ID NO: 3316700 - RNA, 17 nt, Human
aauuugugauacaaugc

SEQ ID NO: 3316701 - RNA, 18 nt, Human
uagacaauuuauuauggc

SEQ ID NO: 3316702 - RNA, 10 nt, Human
uagacagagu

SEQ ID NO: 3316703 - RNA, 16 nt, Human
uagacagucccugcca

SEQ ID NO: 3316704 - RNA, 16 nt, Human
acaaaaagcauaaaaa

SEQ ID NO: 3316705 - RNA, 14 nt, Human
uagagccagggucu

SEQ ID NO: 3316706 - RNA, 22 nt, Human
uagagcggagaaaggaagggcu

SEQ ID NO: 3316707 - RNA, 14 nt, Human
uagcacagacccug

SEQ ID NO: 3316708 - RNA, 21 nt, Human
uagcacagacccugcccugug

SEQ ID NO: 3316709 - RNA, 20 nt, Human
uagcacagacccugcccugu

SEQ ID NO: 3316710 - RNA, 15 nt, Human
uagcacagacccugc

SEQ ID NO: 3316711 - RNA, 22 nt, Human
uagcacagacccugcccugugg

SEQ ID NO: 3316712 - RNA, 12 nt, Human
uagccaaggcca

SEQ ID NO: 3316713 - RNA, 13 nt, Human
uagccaaggccaa

SEQ ID NO: 3316714 - RNA, 16 nt, Human
uaugggacucaaugca

SEQ ID NO: 3316715 - RNA, 23 nt, Human
uaugggacucaaugcacugacau

SEQ ID NO: 3316716 - RNA, 20 nt, Human
uauggcccuggccuagcaua

SEQ ID NO: 3316717 - RNA, 21 nt, Human
uauggcccuggccuagcauac

SEQ ID NO: 3316718 - RNA, 23 nt, Human
uauggcuuuugugcauuaucuag

SEQ ID NO: 3316719 - RNA, 18 nt, Human
uaugcaugaaguaauaug

SEQ ID NO: 3316720 - RNA, 22 nt, Human
uaugcaugaaguaauaugcaca

SEQ ID NO: 3316721 - RNA, 15 nt, Human
acagcccgggcucug

SEQ ID NO: 3316722 - RNA, 15 nt, Human
uaugaggcauuuguu

SEQ ID NO: 3316723 - RNA, 14 nt, Human
uaugaggcauuugu

SEQ ID NO: 3316724 - RNA, 21 nt, Human
uaugaggcauuuguuugaacu

SEQ ID NO: 3316725 - RNA, 15 nt, Human
acagcuaaugggaca

SEQ ID NO: 3316726 - RNA, 16 nt, Human
acagcuaaugggacac

SEQ ID NO: 3316727 - RNA, 17 nt, Human
acagcuaaugggacacu

SEQ ID NO: 3316728 - RNA, 19 nt, Human
acagcuaaugggacacuaa

SEQ ID NO: 3316729 - RNA, 23 nt, Human
acagcuugaccgugaggccagag

SEQ ID NO: 3316730 - RNA, 22 nt, Human
acagcuugaccgugaggccaga

SEQ ID NO: 3316731 - RNA, 18 nt, Human
acaggaaaagcugcugac

SEQ ID NO: 3316732 - RNA, 19 nt, Human
acaggaaaagcugcugaca

SEQ ID NO: 3316733 - RNA, 20 nt, Human
acaggaaaagcugcugacag

SEQ ID NO: 3316734 - RNA, 21 nt, Human
acaggaaaagcugcugacagu

SEQ ID NO: 3316735 - RNA, 17 nt, Human
acagcuugaccgugagg

SEQ ID NO: 3316736 - RNA, 21 nt, Human
acagcuugaccgugaggccag

SEQ ID NO: 3316737 - RNA, 20 nt, Human
acagcuugaccgugaggcca

SEQ ID NO: 3316738 - RNA, 17 nt, Human
acagcuucauuuccugu

SEQ ID NO: 3316739 - RNA, 19 nt, Human
acagcuucauuuccugugu

SEQ ID NO: 3316740 - RNA, 21 nt, Human
acagcuucauuuccugugucu

SEQ ID NO: 3316741 - RNA, 18 nt, Human
acaggcccggcuccaggc

SEQ ID NO: 3316742 - RNA, 20 nt, Human
acaggcccggcuccaggcuc

SEQ ID NO: 3316743 - RNA, 21 nt, Human
acaggcccggcuccaggcucc

SEQ ID NO: 3316744 - RNA, 22 nt, Human
acaggcccggcuccaggcuccu

SEQ ID NO: 3316745 - RNA, 20 nt, Human
acaggaaaauuuuaaaaaua

SEQ ID NO: 3316746 - RNA, 15 nt, Human
acaggcagauacagg

SEQ ID NO: 3316747 - RNA, 16 nt, Human
acaggcccggcuccag

SEQ ID NO: 3316748 - RNA, 17 nt, Human
acaggcccggcuccagg

SEQ ID NO: 3316749 - RNA, 23 nt, Human
uauaggaacuuaaauaaugugaa

SEQ ID NO: 3316750 - RNA, 16 nt, Human
acacucauugaccuga

SEQ ID NO: 3316751 - RNA, 21 nt, Human
uauacacuuacacuuuaugca

SEQ ID NO: 3316752 - RNA, 22 nt, Human
uauacacuuacacuuuaugcac

SEQ ID NO: 3316753 - RNA, 18 nt, Human
uauaauuuaccugaaguc

SEQ ID NO: 3316754 - RNA, 17 nt, Human
uagucacugagacagcc

SEQ ID NO: 3316755 - RNA, 21 nt, Human
acacucaaaagcugggcaggu

SEQ ID NO: 3316756 - RNA, 22 nt, Human
acacuaaugaggaaacugcacu

SEQ ID NO: 3316757 - RNA, 15 nt, Human
acacuaaugaggaaa

SEQ ID NO: 3316758 - RNA, 19 nt, Human
acagacauacuaaccagca

SEQ ID NO: 3316759 - RNA, 18 nt, Human
acagacauacuaaccagc

SEQ ID NO: 3316760 - RNA, 16 nt, Human
acacuuacacuuuaug

SEQ ID NO: 3316761 - RNA, 20 nt, Human
acacuguuucaaacuuuacu

SEQ ID NO: 3316762 - RNA, 17 nt, Human
acacucauugaccugag

SEQ ID NO: 3316763 - RNA, 16 nt, Human
acacuguuucaaacuu

SEQ ID NO: 3316764 - RNA, 18 nt, Human
acacuguuucaaacuuua

SEQ ID NO: 3316765 - RNA, 17 nt, Human
acacuguuucaaacuuu

SEQ ID NO: 3316766 - RNA, 18 nt, Human
acacuuacacuuuaugca

SEQ ID NO: 3316767 - RNA, 21 nt, Human
acacuuacacuuuaugcacaa

SEQ ID NO: 3316768 - RNA, 10 nt, Human
uaucagaauu

SEQ ID NO: 3316769 - RNA, 17 nt, Human
uaucagaauucucagaa

SEQ ID NO: 3316770 - RNA, 19 nt, Human
uauccaacaucaacaucuu

SEQ ID NO: 3316771 - RNA, 20 nt, Human
acagacccugcccugugggc

SEQ ID NO: 3316772 - RNA, 22 nt, Human
uaucacccagaagaaaauagug

SEQ ID NO: 3316773 - RNA, 19 nt, Human
uaucacccagaagaaaaua

SEQ ID NO: 3316774 - RNA, 20 nt, Human
uaacuugucuuuggacccug

SEQ ID NO: 3316775 - RNA, 16 nt, Human
uaacuugucuuuggac

SEQ ID NO: 3316776 - RNA, 17 nt, Human
uaacauguaauuaagua

SEQ ID NO: 3316777 - RNA, 19 nt, Human
uaacauguaauuaaguacu

SEQ ID NO: 3316778 - RNA, 20 nt, Human
aauagccugccucuucucua

SEQ ID NO: 3316779 - RNA, 19 nt, Human
aauaccugucccccugaca

SEQ ID NO: 3316780 - RNA, 18 nt, Human
aauaccugucccccugac

SEQ ID NO: 3316781 - RNA, 15 nt, Human
aauaccugucccccu

SEQ ID NO: 3316782 - RNA, 19 nt, Human
aauaccagccaguaaaugg

SEQ ID NO: 3316783 - RNA, 17 nt, Human
aauaccagccaguaaau

SEQ ID NO: 3316784 - RNA, 12 nt, Human
aauaccaaggaa

SEQ ID NO: 3316785 - RNA, 13 nt, Human
aauacagaggcaa

SEQ ID NO: 3316786 - RNA, 21 nt, Human
aauacaccacuacauucuguu

SEQ ID NO: 3316787 - RNA, 21 nt, Human
uaaauuaacuuuuauaaacuu

SEQ ID NO: 3316788 - RNA, 18 nt, Human
uaaauuaacuuuuauaaa

SEQ ID NO: 3316789 - RNA, 20 nt, Human
uaaauuaacuuuuauaaacu

SEQ ID NO: 3316790 - RNA, 19 nt, Human
uaaauuaacuuuuauaaac

SEQ ID NO: 3316791 - RNA, 18 nt, Human
uaaaugaaaaucgugaca

SEQ ID NO: 3316792 - RNA, 21 nt, Human
aaguguauuuuuuuacuaaua

SEQ ID NO: 3316793 - RNA, 18 nt, Human
aaguguauuuuuuuacua

SEQ ID NO: 3316794 - RNA, 14 nt, Human
uaagauucauauuu

SEQ ID NO: 3316795 - RNA, 21 nt, Human
uaagcuauucaguaauaacuc

SEQ ID NO: 3316796 - RNA, 14 nt, Human
uaagcuauucagua

SEQ ID NO: 3316797 - RNA, 9 nt, Human
uaaggaaua

SEQ ID NO: 3316798 - RNA, 13 nt, Human
uaaggaagacaau

SEQ ID NO: 3316799 - RNA, 18 nt, Human
uaaggaauaccugucccc

SEQ ID NO: 3316800 - RNA, 17 nt, Human
uaaggaauaccuguccc

SEQ ID NO: 3316801 - RNA, 11 nt, Human
aaucagccugc

SEQ ID NO: 3316802 - RNA, 19 nt, Human
aaucagccugcuccagcug

SEQ ID NO: 3316803 - RNA, 18 nt, Human
aaucagccugcuccagcu

SEQ ID NO: 3316804 - RNA, 13 nt, Human
aaucagccugcuc

SEQ ID NO: 3316805 - RNA, 21 nt, Human
uaaguauucuuauuuaaugaa

SEQ ID NO: 3316806 - RNA, 17 nt, Human
aaucccauuuaaaaaaa

SEQ ID NO: 3316807 - RNA, 22 nt, Human
uacagagcccacgcccccacug

SEQ ID NO: 3316808 - RNA, 19 nt, Human
uacagagcccacgccccca

SEQ ID NO: 3316809 - RNA, 23 nt, Human
uacagagcagacaguuaagagaa

SEQ ID NO: 3316810 - RNA, 13 nt, Human
uacagacaaagcg

SEQ ID NO: 3316811 - RNA, 15 nt, Human
uacagacaaagcgug

SEQ ID NO: 3316812 - RNA, 14 nt, Human
uacagacaaagcgu

SEQ ID NO: 3316813 - RNA, 16 nt, Human
aaugguuuucaaaaua

SEQ ID NO: 3316814 - RNA, 14 nt, Human
aaugguuuucaaaa

SEQ ID NO: 3316815 - RNA, 16 nt, Human
aauggaagacagcucu

SEQ ID NO: 3316816 - RNA, 13 nt, Human
aauggaagacagc

SEQ ID NO: 3316817 - RNA, 14 nt, Human
aauggaaccacucu

SEQ ID NO: 3316818 - RNA, 22 nt, Human
aaugcuggcuguuggcuggggg

SEQ ID NO: 3316819 - RNA, 21 nt, Human
aaugcuggcuguuggcugggg

SEQ ID NO: 3316820 - RNA, 18 nt, Human
uaauuuuuuugagacaga

SEQ ID NO: 3316821 - RNA, 14 nt, Human
uacaaugcugugcc

SEQ ID NO: 3316822 - RNA, 13 nt, Human
uacaaugcugugc

SEQ ID NO: 3316823 - RNA, 11 nt, Human
aaugcaaacca

SEQ ID NO: 3316824 - RNA, 12 nt, Human
aaugcaaaccau

SEQ ID NO: 3316825 - RNA, 13 nt, Human
aaugcaccuggaa

SEQ ID NO: 3316826 - RNA, 11 nt, Human
aaugagccugg

SEQ ID NO: 3316827 - RNA, 20 nt, Human
aaugaccuuucaauaggaaa

SEQ ID NO: 3316828 - RNA, 21 nt, Human
aaugaccuuucaauaggaaaa

SEQ ID NO: 3316829 - RNA, 13 nt, Human
aaugagccuggca

SEQ ID NO: 3316830 - RNA, 12 nt, Human
aaugagccuggc

SEQ ID NO: 3316831 - RNA, 16 nt, Human
aaugaggucagagccu

SEQ ID NO: 3316832 - RNA, 18 nt, Human
aaugaggucagagccugc

SEQ ID NO: 3316833 - RNA, 13 nt, Human
aauuaacuuuuau

SEQ ID NO: 3316834 - RNA, 12 nt, Human
aauuaacuuuua

SEQ ID NO: 3316835 - RNA, 13 nt, Human
aauuaaguacuau

SEQ ID NO: 3316836 - RNA, 15 nt, Human
aauuaacuuuuauaa

SEQ ID NO: 3316837 - RNA, 16 nt, Human
aauuaaguacuaugua

SEQ ID NO: 3316838 - RNA, 17 nt, Human
aauuaaguacuauguau

SEQ ID NO: 3316839 - RNA, 21 nt, Human
aaugugcugaaugguuuucaa

SEQ ID NO: 3316840 - RNA, 12 nt, Human
uaccagcagagc

SEQ ID NO: 3316841 - RNA, 14 nt, Human
uaccagcagagcac

SEQ ID NO: 3316842 - RNA, 13 nt, Human
uaccagcagagca

SEQ ID NO: 3316843 - RNA, 22 nt, Human
uaccagcagagcaccuuagaca

SEQ ID NO: 3316844 - RNA, 18 nt, Human
uaccagccaguaaauggg

SEQ ID NO: 3316845 - RNA, 11 nt, Human
aauuaacuuuu

SEQ ID NO: 3316846 - RNA, 23 nt, Human
uaccucuugagccuugaacuuug

SEQ ID NO: 3316847 - RNA, 21 nt, Human
uaccucuugagccuugaacuu

SEQ ID NO: 3316848 - RNA, 22 nt, Human
uaccucuugagccuugaacuuu

SEQ ID NO: 3316849 - RNA, 23 nt, Human
uacccgggaagggggcugggaca

SEQ ID NO: 3316850 - RNA, 16 nt, Human
uaccugaagucuuugu

SEQ ID NO: 3316851 - RNA, 15 nt, Human
uaccugaggggccuc

SEQ ID NO: 3316852 - RNA, 13 nt, Human
uaccugaggggcc

SEQ ID NO: 3316853 - RNA, 14 nt, Human
uaccugaagucuuu

SEQ ID NO: 3316854 - RNA, 13 nt, Human
uaccugaagucuu

SEQ ID NO: 3316855 - RNA, 20 nt, Human
aauuacaggaaguacuggag

SEQ ID NO: 3316856 - RNA, 19 nt, Human
aauuacaggaaguacugga

SEQ ID NO: 3316857 - RNA, 17 nt, Human
aauuacaggaaguacug

SEQ ID NO: 3316858 - RNA, 16 nt, Human
uaccugaggggccucu

SEQ ID NO: 3316859 - RNA, 11 nt, Human
aauucaguugu

SEQ ID NO: 3316860 - RNA, 22 nt, Human
aauucaguuguuagugugucuu

SEQ ID NO: 3316861 - RNA, 17 nt, Human
aauucaguuguuagugu

SEQ ID NO: 3316862 - RNA, 22 nt, Human
aauuauuuauuaaaugcccagc

SEQ ID NO: 3316863 - RNA, 21 nt, Human
aauuauuuauuaaaugcccag

SEQ ID NO: 3316864 - RNA, 22 nt, Human
guggggucacucuggcagcuca

SEQ ID NO: 3316865 - RNA, 21 nt, Human
guggggucacucuggcagcuc

SEQ ID NO: 3316866 - RNA, 20 nt, Human
guggggucacucuggcagcu

SEQ ID NO: 3316867 - RNA, 17 nt, Human
guggggucacucuggca

SEQ ID NO: 3316868 - RNA, 12 nt, Human
aagaguaggaag

SEQ ID NO: 3316869 - RNA, 23 nt, Human
aagagggagggagggcuccagac

SEQ ID NO: 3316870 - RNA, 22 nt, Human
aagagggagggagggcuccaga

SEQ ID NO: 3316871 - RNA, 13 nt, Human
aagaguaggaaga

SEQ ID NO: 3316872 - RNA, 16 nt, Human
aagaugcuucucacug

SEQ ID NO: 3316873 - RNA, 17 nt, Human
aagaugcuucucacugc

SEQ ID NO: 3316874 - RNA, 19 nt, Human
aagaugcuucucacugcca

SEQ ID NO: 3316875 - RNA, 16 nt, Human
gugucagcauagaagu

SEQ ID NO: 3316876 - RNA, 20 nt, Human
gugucaagagggucugagga

SEQ ID NO: 3316877 - RNA, 23 nt, Human
guguauuuuuuuacuaauagaca

SEQ ID NO: 3316878 - RNA, 17 nt, Human
guguauuuuuuuacuaa

SEQ ID NO: 3316879 - RNA, 20 nt, Human
gugucagguggggcagcuug

SEQ ID NO: 3316880 - RNA, 22 nt, Human
gugugacaaggauugcuacugu

SEQ ID NO: 3316881 - RNA, 15 nt, Human
guggccucccaacuc

SEQ ID NO: 3316882 - RNA, 22 nt, Human
guggccucccaacucaccccag

SEQ ID NO: 3316883 - RNA, 21 nt, Human
guggccucccaacucacccca

SEQ ID NO: 3316884 - RNA, 15 nt, Human
gugggagcugccugu

SEQ ID NO: 3316885 - RNA, 18 nt, Human
gugggagcugccuguuca

SEQ ID NO: 3316886 - RNA, 15 nt, Human
guggggucacucugg

SEQ ID NO: 3316887 - RNA, 14 nt, Human
gugggagcugccug

SEQ ID NO: 3316888 - RNA, 15 nt, Human
gugggacacccugug

SEQ ID NO: 3316889 - RNA, 13 nt, Human
gugggacacccug

SEQ ID NO: 3316890 - RNA, 13 nt, Human
aagacgcugugcu

SEQ ID NO: 3316891 - RNA, 19 nt, Human
aagacgcugugcugcccug

SEQ ID NO: 3316892 - RNA, 18 nt, Human
aagacgcugugcugcccu

SEQ ID NO: 3316893 - RNA, 17 nt, Human
aagacgcugugcugccc

SEQ ID NO: 3316894 - RNA, 15 nt, Human
aagacgcugugcugc

SEQ ID NO: 3316895 - RNA, 19 nt, Human
aagaccuucuccuucaccu

SEQ ID NO: 3316896 - RNA, 18 nt, Human
aagaccuucuccuucacc

SEQ ID NO: 3316897 - RNA, 15 nt, Human
aagaccuucuccuuc

SEQ ID NO: 3316898 - RNA, 22 nt, Human
aagacugaguacguugugcauu

SEQ ID NO: 3316899 - RNA, 23 nt, Human
aagacugaguacguugugcauuu

SEQ ID NO: 3316900 - RNA, 16 nt, Human
aagcauuuacuuugug

SEQ ID NO: 3316901 - RNA, 12 nt, Human
aagcagugcaug

SEQ ID NO: 3316902 - RNA, 21 nt, Human
gugugugcgccuacaggagug

SEQ ID NO: 3316903 - RNA, 15 nt, Human
aagcagugcaugcug

SEQ ID NO: 3316904 - RNA, 14 nt, Human
aagcagugcaugcu

SEQ ID NO: 3316905 - RNA, 20 nt, Human
aagcagugcaugcugucccu

SEQ ID NO: 3316906 - RNA, 19 nt, Human
aagcccugagcuuucugcu

SEQ ID NO: 3316907 - RNA, 20 nt, Human
aagccgcuggggccaguugg

SEQ ID NO: 3316908 - RNA, 20 nt, Human
aagccaaagcuaggccuggc

SEQ ID NO: 3316909 - RNA, 22 nt, Human
aagccaaagcuaggccuggcca

SEQ ID NO: 3316910 - RNA, 17 nt, Human
aagcccaggaaaggcuc

SEQ ID NO: 3316911 - RNA, 14 nt, Human
aagcccaggaaagg

SEQ ID NO: 3316912 - RNA, 22 nt, Human
aagcccaggaaaggcuccagga

SEQ ID NO: 3316913 - RNA, 19 nt, Human
aagcccaggaaaggcucca

SEQ ID NO: 3316914 - RNA, 22 nt, Human
aagcuagacgagcaggcuucuu

SEQ ID NO: 3316915 - RNA, 20 nt, Human
aagccugaguuugcuuucaa

SEQ ID NO: 3316916 - RNA, 22 nt, Human
aagcuauucaguaauaacucua

SEQ ID NO: 3316917 - RNA, 12 nt, Human
aagcuaggccug

SEQ ID NO: 3316918 - RNA, 13 nt, Human
guucagcuccagc

SEQ ID NO: 3316919 - RNA, 17 nt, Human
aagcucagggccuggcu

SEQ ID NO: 3316920 - RNA, 16 nt, Human
aagcucagggccuggc

SEQ ID NO: 3316921 - RNA, 13 nt, Human
aagcucagggccu

SEQ ID NO: 3316922 - RNA, 12 nt, Human
aagcucagggcc

SEQ ID NO: 3316923 - RNA, 18 nt, Human
aagcuccaagcucccagg

SEQ ID NO: 3316924 - RNA, 17 nt, Human
aagcuccaagcucccag

SEQ ID NO: 3316925 - RNA, 20 nt, Human
aagcucagggccuggcucag

SEQ ID NO: 3316926 - RNA, 19 nt, Human
aagcucagggccuggcuca

SEQ ID NO: 3316927 - RNA, 18 nt, Human
aagcucagggccuggcuc

SEQ ID NO: 3316928 - RNA, 23 nt, Human
guuauuuuuauuuauuuaaauuu

SEQ ID NO: 3316929 - RNA, 22 nt, Human
guucaaagauauuuugcuuugu

SEQ ID NO: 3316930 - RNA, 21 nt, Human
guucaaagauauuuugcuuug

SEQ ID NO: 3316931 - RNA, 20 nt, Human
guucaaagauauuuugcuuu

SEQ ID NO: 3316932 - RNA, 20 nt, Human
guuaggcauugugggaaggg

SEQ ID NO: 3316933 - RNA, 19 nt, Human
guuaggcauugugggaagg

SEQ ID NO: 3316934 - RNA, 12 nt, Human
guuaagagaaau

SEQ ID NO: 3316935 - RNA, 11 nt, Human
guuaagagaaa

SEQ ID NO: 3316936 - RNA, 18 nt, Human
guuaagagaaaugagcuu

SEQ ID NO: 3316937 - RNA, 17 nt, Human
aaggggcaguggugguu

SEQ ID NO: 3316938 - RNA, 22 nt, Human
aaggggcccaaauucuuucagu

SEQ ID NO: 3316939 - RNA, 20 nt, Human
aagguagaaauaucugaaaa

SEQ ID NO: 3316940 - RNA, 19 nt, Human
guuucuauguguagggcgg

SEQ ID NO: 3316941 - RNA, 18 nt, Human
guuucugaaagggacgcu

SEQ ID NO: 3316942 - RNA, 12 nt, Human
aaggucauuuuu

SEQ ID NO: 3316943 - RNA, 22 nt, Human
guuucuaugacacaugcaaggu

SEQ ID NO: 3316944 - RNA, 15 nt, Human
aaggcuccaggagca

SEQ ID NO: 3316945 - RNA, 18 nt, Human
aaggcuccaggagcagcc

SEQ ID NO: 3316946 - RNA, 16 nt, Human
aaggcuccaggagcag

SEQ ID NO: 3316947 - RNA, 13 nt, Human
guuucaaacuuua

SEQ ID NO: 3316948 - RNA, 16 nt, Human
guuucaaacuuuacua

SEQ ID NO: 3316949 - RNA, 14 nt, Human
guuucaaacuuuac

SEQ ID NO: 3316950 - RNA, 22 nt, Human
aaggcucgagcaugccuggaug

SEQ ID NO: 3316951 - RNA, 20 nt, Human
aaggcucgagcaugccugga

SEQ ID NO: 3316952 - RNA, 19 nt, Human
aaggcucgagcaugccugg

SEQ ID NO: 3316953 - RNA, 18 nt, Human
aaggcucgagcaugccug

SEQ ID NO: 3316954 - RNA, 16 nt, Human
aaggcucgagcaugcc

SEQ ID NO: 3316955 - RNA, 22 nt, Human
aaggcuccaggagcagccacau

SEQ ID NO: 3316956 - RNA, 19 nt, Human
aaggcuccaggagcagcca

SEQ ID NO: 3316957 - RNA, 13 nt, Human
guugggcuggugu

SEQ ID NO: 3316958 - RNA, 17 nt, Human
guugggccaggagccuc

SEQ ID NO: 3316959 - RNA, 15 nt, Human
guugggccaggagcc

SEQ ID NO: 3316960 - RNA, 13 nt, Human
guuuauugucaaa

SEQ ID NO: 3316961 - RNA, 21 nt, Human
aaggauacaaaagcaugugag

SEQ ID NO: 3316962 - RNA, 13 nt, Human
aaggauacaaaag

SEQ ID NO: 3316963 - RNA, 23 nt, Human
guugcccaggcaggucuugaacu

SEQ ID NO: 3316964 - RNA, 12 nt, Human
guugcccaggcu

SEQ ID NO: 3316965 - RNA, 13 nt, Human
guugcccaggcug

SEQ ID NO: 3316966 - RNA, 19 nt, Human
guugcccaggcaggucuug

SEQ ID NO: 3316967 - RNA, 18 nt, Human
aaggaauaccuguccccc

SEQ ID NO: 3316968 - RNA, 11 nt, Human
aaggagagcua

SEQ ID NO: 3316969 - RNA, 14 nt, Human
aaggagauuuacaa

SEQ ID NO: 3316970 - RNA, 20 nt, Human
aaggaggggauagagagaga

SEQ ID NO: 3316971 - RNA, 16 nt, Human
aaggaagcacaugccu

SEQ ID NO: 3316972 - RNA, 17 nt, Human
aaggaauaccugucccc

SEQ ID NO: 3316973 - RNA, 14 nt, Human
aaggaagacuucau

SEQ ID NO: 3316974 - RNA, 13 nt, Human
aaggaagcacaug

SEQ ID NO: 3316975 - RNA, 15 nt, Human
aaggaagacuucauc

SEQ ID NO: 3316976 - RNA, 15 nt, Human
aaggaaagagggagg

SEQ ID NO: 3316977 - RNA, 21 nt, Human
uaaaauaccagccaguaaaug

SEQ ID NO: 3316978 - RNA, 22 nt, Human
uaaaauaccagccaguaaaugg

SEQ ID NO: 3316979 - RNA, 15 nt, Human
aagugagagcugggu

SEQ ID NO: 3316980 - RNA, 16 nt, Human
aagugaggaugaaaaa

SEQ ID NO: 3316981 - RNA, 19 nt, Human
aagugauucuccugccuca

SEQ ID NO: 3316982 - RNA, 15 nt, Human
aagugauucuccugc

SEQ ID NO: 3316983 - RNA, 16 nt, Human
aagugauucuccugcc

SEQ ID NO: 3316984 - RNA, 17 nt, Human
aagugauucuccugccu

SEQ ID NO: 3316985 - RNA, 18 nt, Human
aagugauucuccugccuc

SEQ ID NO: 3316986 - RNA, 15 nt, Human
uaaaaaucucaaauu

SEQ ID NO: 3316987 - RNA, 17 nt, Human
uaaaaaucucaaauuuc

SEQ ID NO: 3316988 - RNA, 16 nt, Human
uaaaaaucucaaauuu

SEQ ID NO: 3316989 - RNA, 15 nt, Human
guuuuucuucucccu

SEQ ID NO: 3316990 - RNA, 15 nt, Human
uaaaaaguggaaaaa

SEQ ID NO: 3316991 - RNA, 20 nt, Human
uaaaacuugauguguuaucu

SEQ ID NO: 3316992 - RNA, 22 nt, Human
uaaaacuugauguguuaucucu

SEQ ID NO: 3316993 - RNA, 21 nt, Human
uaaaaaucucaaauuucuaaa

SEQ ID NO: 3316994 - RNA, 20 nt, Human
uaaaaaucucaaauuucuaa

SEQ ID NO: 3316995 - RNA, 19 nt, Human
uaaaaaucucaaauuucua

SEQ ID NO: 3316996 - RNA, 21 nt, Human
aagugaaaaaggaggaagaga

SEQ ID NO: 3316997 - RNA, 19 nt, Human
aagugaagacaaugacuua

SEQ ID NO: 3316998 - RNA, 17 nt, Human
aagugaagacaaugacu

SEQ ID NO: 3316999 - RNA, 14 nt, Human
aagugagagcuggg

SEQ ID NO: 3317000 - RNA, 12 nt, Human
aagugagagagg

SEQ ID NO: 3317001 - RNA, 18 nt, Human
aaguacacuguuucaaac

SEQ ID NO: 3317002 - RNA, 13 nt, Human
aaguacacuguuu

SEQ ID NO: 3317003 - RNA, 21 nt, Human
aaguaauaugcacacauuuuu

SEQ ID NO: 3317004 - RNA, 14 nt, Human
guuucugccgcagc

SEQ ID NO: 3317005 - RNA, 15 nt, Human
guuucugccgcagcc

SEQ ID NO: 3317006 - RNA, 16 nt, Human
guuuugccauguuggc

SEQ ID NO: 3317007 - RNA, 20 nt, Human
guuuugccauguuggccagg

SEQ ID NO: 3317008 - RNA, 21 nt, Human
guuuugccauguuggccaggc

SEQ ID NO: 3317009 - RNA, 22 nt, Human
guuuugccauguuggccaggcu

SEQ ID NO: 3317010 - RNA, 23 nt, Human
aaguacacuguuucaaacuuuac

SEQ ID NO: 3317011 - RNA, 20 nt, Human
aaguacacuguuucaaacuu

SEQ ID NO: 3317012 - RNA, 19 nt, Human
aaguacacuguuucaaacu

SEQ ID NO: 3317013 - RNA, 16 nt, Human
guaucaggugcugcca

SEQ ID NO: 3317014 - RNA, 18 nt, Human
guaucaggugcugccauc

SEQ ID NO: 3317015 - RNA, 22 nt, Human
guaucaggugcugccauccagg

SEQ ID NO: 3317016 - RNA, 19 nt, Human
guaucccaugagccucagc

SEQ ID NO: 3317017 - RNA, 15 nt, Human
guaugguggcugggu

SEQ ID NO: 3317018 - RNA, 16 nt, Human
guaugguggcuggguu

SEQ ID NO: 3317019 - RNA, 14 nt, Human
guaugguggcuggg

SEQ ID NO: 3317020 - RNA, 13 nt, Human
guaugguggcugg

SEQ ID NO: 3317021 - RNA, 20 nt, Human
guaacaggaaaauuuuaaaa

SEQ ID NO: 3317022 - RNA, 19 nt, Human
aaaugggggugcauuugag

SEQ ID NO: 3317023 - RNA, 12 nt, Human
guaacaggcaga

SEQ ID NO: 3317024 - RNA, 22 nt, Human
guaacaggaaaauuuuaaaaau

SEQ ID NO: 3317025 - RNA, 22 nt, Human
guauuuuguuuuugucuuaaaa

SEQ ID NO: 3317026 - RNA, 19 nt, Human
aaaugucuaguuguaacac

SEQ ID NO: 3317027 - RNA, 11 nt, Human
aacagaaaugu

SEQ ID NO: 3317028 - RNA, 18 nt, Human
gucccccugacaacacuc

SEQ ID NO: 3317029 - RNA, 14 nt, Human
gucccccuuccaug

SEQ ID NO: 3317030 - RNA, 18 nt, Human
gucccccuuccauggacu

SEQ ID NO: 3317031 - RNA, 16 nt, Human
gucccccuuccaugga

SEQ ID NO: 3317032 - RNA, 16 nt, Human
guccuacccacccucc

SEQ ID NO: 3317033 - RNA, 15 nt, Human
guccuacccacccuc

SEQ ID NO: 3317034 - RNA, 12 nt, Human
guccuacucugu

SEQ ID NO: 3317035 - RNA, 13 nt, Human
aacagaaauguac

SEQ ID NO: 3317036 - RNA, 12 nt, Human
aacagaaaugua

SEQ ID NO: 3317037 - RNA, 14 nt, Human
aacagaaauguaca

SEQ ID NO: 3317038 - RNA, 21 nt, Human
gucauuuuuuuuaagaaaaag

SEQ ID NO: 3317039 - RNA, 19 nt, Human
gucauuuuuuuuaagaaaa

SEQ ID NO: 3317040 - RNA, 18 nt, Human
guccaagaagcccaggaa

SEQ ID NO: 3317041 - RNA, 17 nt, Human
guccaagaagcccagga

SEQ ID NO: 3317042 - RNA, 20 nt, Human
guccaagaagcccaggaaag

SEQ ID NO: 3317043 - RNA, 16 nt, Human
guccaagaagcccagg

SEQ ID NO: 3317044 - RNA, 15 nt, Human
guccaagaagcccag

SEQ ID NO: 3317045 - RNA, 13 nt, Human
guccaagaagccc

SEQ ID NO: 3317046 - RNA, 14 nt, Human
guccauagagagca

SEQ ID NO: 3317047 - RNA, 13 nt, Human
guccauagagagc

SEQ ID NO: 3317048 - RNA, 21 nt, Human
gucccaccccacacacgccag

SEQ ID NO: 3317049 - RNA, 20 nt, Human
gucccaccccacacacgcca

SEQ ID NO: 3317050 - RNA, 14 nt, Human
gucccaccuuggcu

SEQ ID NO: 3317051 - RNA, 15 nt, Human
gucccaccuuggcug

SEQ ID NO: 3317052 - RNA, 16 nt, Human
gucccaccuuggcugc

SEQ ID NO: 3317053 - RNA, 15 nt, Human
gucagugugacugau

SEQ ID NO: 3317054 - RNA, 18 nt, Human
aaauuuguuauaaugaau

SEQ ID NO: 3317055 - RNA, 22 nt, Human
gucacacaguauuacuucugcu

SEQ ID NO: 3317056 - RNA, 21 nt, Human
gucacacaguauuacuucugc

SEQ ID NO: 3317057 - RNA, 23 nt, Human
gucagaaguuucugccgcagccc

SEQ ID NO: 3317058 - RNA, 16 nt, Human
aacaaggcaaggcugu

SEQ ID NO: 3317059 - RNA, 15 nt, Human
aacaaggcaaggcug

SEQ ID NO: 3317060 - RNA, 20 nt, Human
aacaagaccacguuucuaaa

SEQ ID NO: 3317061 - RNA, 23 nt, Human
aaauuuugauguuuuaaggaugc

SEQ ID NO: 3317062 - RNA, 18 nt, Human
aaauuuugauguuuuaag

SEQ ID NO: 3317063 - RNA, 21 nt, Human
aacaaggcaaggcugucaauu

SEQ ID NO: 3317064 - RNA, 18 nt, Human
aacaaggcaaggcuguca

SEQ ID NO: 3317065 - RNA, 19 nt, Human
gugaacuugggccacugug

SEQ ID NO: 3317066 - RNA, 17 nt, Human
gugaacuugggccacug

SEQ ID NO: 3317067 - RNA, 13 nt, Human
gugaggccagaga

SEQ ID NO: 3317068 - RNA, 22 nt, Human
gugaggccagagacacaagccu

SEQ ID NO: 3317069 - RNA, 17 nt, Human
gugaggccagagacaca

SEQ ID NO: 3317070 - RNA, 23 nt, Human
aacugauuuuuuuuuccuucagu

SEQ ID NO: 3317071 - RNA, 21 nt, Human
aacucuucaaucucuugcacu

SEQ ID NO: 3317072 - RNA, 15 nt, Human
gugagucgaggacag

SEQ ID NO: 3317073 - RNA, 22 nt, Human
gugagucgaggacagggaggug

SEQ ID NO: 3317074 - RNA, 16 nt, Human
aacuggguacuugugg

SEQ ID NO: 3317075 - RNA, 21 nt, Human
aacuggguacuuguggacaca

SEQ ID NO: 3317076 - RNA, 22 nt, Human
aacugggggagggugaagugaa

SEQ ID NO: 3317077 - RNA, 21 nt, Human
aacugggggagggugaaguga

SEQ ID NO: 3317078 - RNA, 15 nt, Human
aacuggauuaaacuu

SEQ ID NO: 3317079 - RNA, 11 nt, Human
aacuggcugca

SEQ ID NO: 3317080 - RNA, 16 nt, Human
aacuggauuaaacuua

SEQ ID NO: 3317081 - RNA, 15 nt, Human
aacugcugacuguuu

SEQ ID NO: 3317082 - RNA, 23 nt, Human
aacugcugacuguuuucucuuga

SEQ ID NO: 3317083 - RNA, 21 nt, Human
aacugcugacuguuuucucuu

SEQ ID NO: 3317084 - RNA, 20 nt, Human
aacugcugacuguuuucucu

SEQ ID NO: 3317085 - RNA, 13 nt, Human
aacuuccaauuua

SEQ ID NO: 3317086 - RNA, 22 nt, Human
gugaugcgcaugucacggaggg

SEQ ID NO: 3317087 - RNA, 18 nt, Human
gugauggggcccugccuc

SEQ ID NO: 3317088 - RNA, 17 nt, Human
gugauggggcccugccu

SEQ ID NO: 3317089 - RNA, 16 nt, Human
gugauggggcccugcc

SEQ ID NO: 3317090 - RNA, 14 nt, Human
gugauggggcccug

SEQ ID NO: 3317091 - RNA, 16 nt, Human
gugaugagaggaaauc

SEQ ID NO: 3317092 - RNA, 14 nt, Human
gugaugagaggaaa

SEQ ID NO: 3317093 - RNA, 23 nt, Human
gugcauuaucuagauacuguauc

SEQ ID NO: 3317094 - RNA, 19 nt, Human
gugcauguguguucaugca

SEQ ID NO: 3317095 - RNA, 19 nt, Human
gugcauuaucuagauacug

SEQ ID NO: 3317096 - RNA, 15 nt, Human
gugcauuaucuagau

SEQ ID NO: 3317097 - RNA, 22 nt, Human
gugcaugcugucccuuacguga

SEQ ID NO: 3317098 - RNA, 21 nt, Human
gugcacacaccagagcccacc

SEQ ID NO: 3317099 - RNA, 19 nt, Human
gugauggggcccugccucc

SEQ ID NO: 3317100 - RNA, 22 nt, Human
gugcaaugaccuuucaauagga

SEQ ID NO: 3317101 - RNA, 22 nt, Human
gugaaccaccacacccagccca

SEQ ID NO: 3317102 - RNA, 23 nt, Human
gugaaccaccacacccagcccac

SEQ ID NO: 3317103 - RNA, 21 nt, Human
gugaaccaccacacccagccc

SEQ ID NO: 3317104 - RNA, 16 nt, Human
aacucuccucugcugc

SEQ ID NO: 3317105 - RNA, 18 nt, Human
aacucuccuccagaguca

SEQ ID NO: 3317106 - RNA, 15 nt, Human
aacucuccuccagag

SEQ ID NO: 3317107 - RNA, 12 nt, Human
aacuccuggccu

SEQ ID NO: 3317108 - RNA, 14 nt, Human
gucuggcccuuccu

SEQ ID NO: 3317109 - RNA, 18 nt, Human
gucuuuggacccugaggc

SEQ ID NO: 3317110 - RNA, 10 nt, Human
aacccagcuc

SEQ ID NO: 3317111 - RNA, 18 nt, Human
aaccaucauugaaaucuu

SEQ ID NO: 3317112 - RNA, 17 nt, Human
aaccaucauugaaaucu

SEQ ID NO: 3317113 - RNA, 12 nt, Human
aaccaucauuga

SEQ ID NO: 3317114 - RNA, 21 nt, Human
aaccaccacacccagcccacu

SEQ ID NO: 3317115 - RNA, 15 nt, Human
aaccaagucaaguga

SEQ ID NO: 3317116 - RNA, 19 nt, Human
aaccaccacacccagccca

SEQ ID NO: 3317117 - RNA, 16 nt, Human
agaugccgcauuugga

SEQ ID NO: 3317118 - RNA, 21 nt, Human
ugacccaugcugcccugugag

SEQ ID NO: 3317119 - RNA, 16 nt, Human
ugacccaugcugcccu

SEQ ID NO: 3317120 - RNA, 12 nt, Human
ugacccaugcug

SEQ ID NO: 3317121 - RNA, 15 nt, Human
ugacccaugcugccc

SEQ ID NO: 3317122 - RNA, 14 nt, Human
ugacccaugcugcc

SEQ ID NO: 3317123 - RNA, 13 nt, Human
ugacuuacuguac

SEQ ID NO: 3317124 - RNA, 16 nt, Human
ugacuuacuguacaug

SEQ ID NO: 3317125 - RNA, 15 nt, Human
ugacuuacuguacau

SEQ ID NO: 3317126 - RNA, 17 nt, Human
ugaccugaggcccuucu

SEQ ID NO: 3317127 - RNA, 19 nt, Human
ugaccugaggcccuucucu

SEQ ID NO: 3317128 - RNA, 18 nt, Human
ugaccugaggcccuucuc

SEQ ID NO: 3317129 - RNA, 19 nt, Human
agauucauauuuacuucuu

SEQ ID NO: 3317130 - RNA, 22 nt, Human
agauucauauuuacuucuuaua

SEQ ID NO: 3317131 - RNA, 12 nt, Human
ugacuuacugua

SEQ ID NO: 3317132 - RNA, 13 nt, Human
agauuggaaggaa

SEQ ID NO: 3317133 - RNA, 21 nt, Human
agauuuugaaauuuuuauuaa

SEQ ID NO: 3317134 - RNA, 16 nt, Human
agcaagacgcugugcu

SEQ ID NO: 3317135 - RNA, 13 nt, Human
agcaagacgcugu

SEQ ID NO: 3317136 - RNA, 23 nt, Human
agcaagacgcugugcugcccugc

SEQ ID NO: 3317137 - RNA, 22 nt, Human
agcaagacgcugugcugcccug

SEQ ID NO: 3317138 - RNA, 21 nt, Human
agcaagacgcugugcugcccu

SEQ ID NO: 3317139 - RNA, 20 nt, Human
agcaagacgcugugcugccc

SEQ ID NO: 3317140 - RNA, 17 nt, Human
agcaagacgcugugcug

SEQ ID NO: 3317141 - RNA, 16 nt, Human
agagggagggagggcu

SEQ ID NO: 3317142 - RNA, 15 nt, Human
agagguuaagguggg

SEQ ID NO: 3317143 - RNA, 16 nt, Human
agagguggggagcaga

SEQ ID NO: 3317144 - RNA, 14 nt, Human
ugaagucacacagu

SEQ ID NO: 3317145 - RNA, 15 nt, Human
agagucacuggaaca

SEQ ID NO: 3317146 - RNA, 17 nt, Human
agaguuguuacauuuuu

SEQ ID NO: 3317147 - RNA, 16 nt, Human
agaguuguuacauuuu

SEQ ID NO: 3317148 - RNA, 20 nt, Human
agaguuguuacauuuuuaag

SEQ ID NO: 3317149 - RNA, 19 nt, Human
agaguuguuacauuuuuaa

SEQ ID NO: 3317150 - RNA, 18 nt, Human
agauaauacaccacuaca

SEQ ID NO: 3317151 - RNA, 18 nt, Human
agaucaaaagguuaauaa

SEQ ID NO: 3317152 - RNA, 21 nt, Human
agauauuuugcuuugugauuu

SEQ ID NO: 3317153 - RNA, 20 nt, Human
agauauuuugcuuugugauu

SEQ ID NO: 3317154 - RNA, 16 nt, Human
agauacuguaucauga

SEQ ID NO: 3317155 - RNA, 15 nt, Human
agauacuguaucaug

SEQ ID NO: 3317156 - RNA, 20 nt, Human
agauacaggaaaagcugcug

SEQ ID NO: 3317157 - RNA, 13 nt, Human
agauacaguuacu

SEQ ID NO: 3317158 - RNA, 22 nt, Human
agauaauauuaaggaagacaau

SEQ ID NO: 3317159 - RNA, 18 nt, Human
agauaauauuaaggaaga

SEQ ID NO: 3317160 - RNA, 11 nt, Human
agauacuguau

SEQ ID NO: 3317161 - RNA, 22 nt, Human
agauacaguuacucagaauucu

SEQ ID NO: 3317162 - RNA, 19 nt, Human
ugacacacagcucuguccu

SEQ ID NO: 3317163 - RNA, 19 nt, Human
ugacaaagacugaguacgu

SEQ ID NO: 3317164 - RNA, 16 nt, Human
ugacacacagcucugu

SEQ ID NO: 3317165 - RNA, 18 nt, Human
ugacacacagcucugucc

SEQ ID NO: 3317166 - RNA, 20 nt, Human
ugacacaugcaaggucauuu

SEQ ID NO: 3317167 - RNA, 12 nt, Human
ugacacaugcaa

SEQ ID NO: 3317168 - RNA, 23 nt, Human
ugaauuucuuuugccguuauuaa

SEQ ID NO: 3317169 - RNA, 15 nt, Human
ugaauuucuuuugcc

SEQ ID NO: 3317170 - RNA, 22 nt, Human
ugaaaaaggaggaagagaaaaa

SEQ ID NO: 3317171 - RNA, 20 nt, Human
ugaaaaaggaggaagagaaa

SEQ ID NO: 3317172 - RNA, 16 nt, Human
ugaaaaucgugacaac

SEQ ID NO: 3317173 - RNA, 17 nt, Human
ugaaaauguauguguaa

SEQ ID NO: 3317174 - RNA, 19 nt, Human
ugaaaaucgugacaacacu

SEQ ID NO: 3317175 - RNA, 16 nt, Human
ugaaacgcaaccacca

SEQ ID NO: 3317176 - RNA, 16 nt, Human
ugaaaaaggaggaaga

SEQ ID NO: 3317177 - RNA, 14 nt, Human
ucuuuguggcuucc

SEQ ID NO: 3317178 - RNA, 22 nt, Human
ucuuuggucuacacugugcuga

SEQ ID NO: 3317179 - RNA, 20 nt, Human
ucuuucuggcuaugcauuug

SEQ ID NO: 3317180 - RNA, 19 nt, Human
ucuuucuggcuaugcauuu

SEQ ID NO: 3317181 - RNA, 21 nt, Human
ucuuucuggcuaugcauuuga

SEQ ID NO: 3317182 - RNA, 13 nt, Human
ugaaagacuguac

SEQ ID NO: 3317183 - RNA, 15 nt, Human
ugaaagacuguacaa

SEQ ID NO: 3317184 - RNA, 22 nt, Human
agagacuccugcaggcagccag

SEQ ID NO: 3317185 - RNA, 21 nt, Human
agagacuccugcaggcagcca

SEQ ID NO: 3317186 - RNA, 20 nt, Human
agagacuccugcaggcagcc

SEQ ID NO: 3317187 - RNA, 19 nt, Human
agagacuccugcaggcagc

SEQ ID NO: 3317188 - RNA, 18 nt, Human
agagacuccugcaggcag

SEQ ID NO: 3317189 - RNA, 17 nt, Human
agagacuccugcaggca

SEQ ID NO: 3317190 - RNA, 15 nt, Human
agagacuccugcagg

SEQ ID NO: 3317191 - RNA, 23 nt, Human
agagcaagacgcugugcugcccu

SEQ ID NO: 3317192 - RNA, 19 nt, Human
agagcaagacgcugugcug

SEQ ID NO: 3317193 - RNA, 22 nt, Human
agagaucaaccccuucgcuccu

SEQ ID NO: 3317194 - RNA, 20 nt, Human
agagcuagcagcagggaggg

SEQ ID NO: 3317195 - RNA, 17 nt, Human
agagccuuccaggggug

SEQ ID NO: 3317196 - RNA, 15 nt, Human
agagccuuccagggg

SEQ ID NO: 3317197 - RNA, 13 nt, Human
agagccuuccagg

SEQ ID NO: 3317198 - RNA, 23 nt, Human
agagcaccuuagacagucccugc

SEQ ID NO: 3317199 - RNA, 21 nt, Human
agagcaccuuagacagucccu

SEQ ID NO: 3317200 - RNA, 22 nt, Human
agagcaccuuagacagucccug

SEQ ID NO: 3317201 - RNA, 12 nt, Human
ucuucagagacu

SEQ ID NO: 3317202 - RNA, 18 nt, Human
ucuucagagacuccugca

SEQ ID NO: 3317203 - RNA, 17 nt, Human
ucuucagagacuccugc

SEQ ID NO: 3317204 - RNA, 20 nt, Human
ucuuccaggcugggagagcc

SEQ ID NO: 3317205 - RNA, 17 nt, Human
ucuuccaggcugggaga

SEQ ID NO: 3317206 - RNA, 15 nt, Human
ucuuccaggcuggga

SEQ ID NO: 3317207 - RNA, 20 nt, Human
ucuucagagacuccugcagg

SEQ ID NO: 3317208 - RNA, 14 nt, Human
ucuuccucccuccc

SEQ ID NO: 3317209 - RNA, 19 nt, Human
ucuucccuacaguugaaaa

SEQ ID NO: 3317210 - RNA, 15 nt, Human
ucuuccucccucccu

SEQ ID NO: 3317211 - RNA, 19 nt, Human
agacauacuaaccagcaga

SEQ ID NO: 3317212 - RNA, 20 nt, Human
ucuucuguggguuucuaaag

SEQ ID NO: 3317213 - RNA, 15 nt, Human
ucuucuguacgucug

SEQ ID NO: 3317214 - RNA, 23 nt, Human
ucuucuguacgucugacaggcaa

SEQ ID NO: 3317215 - RNA, 12 nt, Human
ucuucugcuuca

SEQ ID NO: 3317216 - RNA, 21 nt, Human
ucuucugaacuuggcgcugcc

SEQ ID NO: 3317217 - RNA, 14 nt, Human
ucuugguccugcug

SEQ ID NO: 3317218 - RNA, 17 nt, Human
ucuuggucagauuugaa

SEQ ID NO: 3317219 - RNA, 19 nt, Human
ucuugcaauggcagccuug

SEQ ID NO: 3317220 - RNA, 18 nt, Human
ucuugcaauggcagccuu

SEQ ID NO: 3317221 - RNA, 22 nt, Human
ucuugcaauggcagccuuggca

SEQ ID NO: 3317222 - RNA, 17 nt, Human
ucuugguccugcugcag

SEQ ID NO: 3317223 - RNA, 15 nt, Human
ucuugguccugcugc

SEQ ID NO: 3317224 - RNA, 16 nt, Human
ucuuuccugaggcugg

SEQ ID NO: 3317225 - RNA, 17 nt, Human
ucuuuccugaggcuggg

SEQ ID NO: 3317226 - RNA, 23 nt, Human
agaccuucuccuucaccuuuguc

SEQ ID NO: 3317227 - RNA, 21 nt, Human
agaccuucuccuucaccuuug

SEQ ID NO: 3317228 - RNA, 11 nt, Human
agaccuucucc

SEQ ID NO: 3317229 - RNA, 18 nt, Human
agaccuucuccuucaccu

SEQ ID NO: 3317230 - RNA, 15 nt, Human
agaccuucuccuuca

SEQ ID NO: 3317231 - RNA, 16 nt, Human
ucuugagccugggagg

SEQ ID NO: 3317232 - RNA, 13 nt, Human
ucuugagccuggg

SEQ ID NO: 3317233 - RNA, 20 nt, Human
ucuugagccuugaacuuuga

SEQ ID NO: 3317234 - RNA, 13 nt, Human
ucuugauucauaa

SEQ ID NO: 3317235 - RNA, 20 nt, Human
agaaagacuaucuaaauguu

SEQ ID NO: 3317236 - RNA, 22 nt, Human
agaaagacuaucuaaauguuga

SEQ ID NO: 3317237 - RNA, 22 nt, Human
ucugaaggacauugcggacagc

SEQ ID NO: 3317238 - RNA, 18 nt, Human
ucugaaggcuggguucug

SEQ ID NO: 3317239 - RNA, 15 nt, Human
agaaaugccuuaccc

SEQ ID NO: 3317240 - RNA, 23 nt, Human
agaaaaaauauuuuccugccagg

SEQ ID NO: 3317241 - RNA, 17 nt, Human
agaaaaaauauuuuccu

SEQ ID NO: 3317242 - RNA, 19 nt, Human
agaaaaaauauuuucccua

SEQ ID NO: 3317243 - RNA, 18 nt, Human
agaaaaaugagccuggca

SEQ ID NO: 3317244 - RNA, 17 nt, Human
agaaaaaugagccuggc

SEQ ID NO: 3317245 - RNA, 18 nt, Human
ucucuugguccugcugca

SEQ ID NO: 3317246 - RNA, 17 nt, Human
ucucuugguccugcugc

SEQ ID NO: 3317247 - RNA, 16 nt, Human
ucucuugguccugcug

SEQ ID NO: 3317248 - RNA, 19 nt, Human
ucuccuguaccucuugagc

SEQ ID NO: 3317249 - RNA, 23 nt, Human
ucuccuuggugucgggcaugaca

SEQ ID NO: 3317250 - RNA, 21 nt, Human
ucuccuuggugucgggcauga

SEQ ID NO: 3317251 - RNA, 16 nt, Human
acuuuguguucaccuu

SEQ ID NO: 3317252 - RNA, 12 nt, Human
ucucucaggcca

SEQ ID NO: 3317253 - RNA, 14 nt, Human
acuuguggacacag

SEQ ID NO: 3317254 - RNA, 16 nt, Human
acuuuaaaaggagcca

SEQ ID NO: 3317255 - RNA, 23 nt, Human
acuuuaccuuuuuuauacauaaa

SEQ ID NO: 3317256 - RNA, 23 nt, Human
acuuuggaaagacuuuuccaacc

SEQ ID NO: 3317257 - RNA, 14 nt, Human
acuuuggaaagagu

SEQ ID NO: 3317258 - RNA, 13 nt, Human
acuuuggaaagag

SEQ ID NO: 3317259 - RNA, 23 nt, Human
acuuuggaaagaguaggaagacu

SEQ ID NO: 3317260 - RNA, 23 nt, Human
ucugcccacucccugcaaccuga

SEQ ID NO: 3317261 - RNA, 23 nt, Human
agaagcccaggaaaggcuccagg

SEQ ID NO: 3317262 - RNA, 12 nt, Human
ucugcccuuggu

SEQ ID NO: 3317263 - RNA, 16 nt, Human
agaagcagaggaagga

SEQ ID NO: 3317264 - RNA, 23 nt, Human
agaaccuuuugagugccuuacac

SEQ ID NO: 3317265 - RNA, 19 nt, Human
agaaccuuuugagugccuu

SEQ ID NO: 3317266 - RNA, 16 nt, Human
ucuggcagcucagaga

SEQ ID NO: 3317267 - RNA, 17 nt, Human
ucuggcagcucagagag

SEQ ID NO: 3317268 - RNA, 23 nt, Human
ucuggcagaguugaagacagagc

SEQ ID NO: 3317269 - RNA, 20 nt, Human
ucuggcagaguugaagacag

SEQ ID NO: 3317270 - RNA, 21 nt, Human
ucuggcagcucagagagggug

SEQ ID NO: 3317271 - RNA, 18 nt, Human
ucuggcagcucagagagg

SEQ ID NO: 3317272 - RNA, 22 nt, Human
ucugcuuugggguuuaucagaa

SEQ ID NO: 3317273 - RNA, 22 nt, Human
agaaguuugagaucagccuggg

SEQ ID NO: 3317274 - RNA, 14 nt, Human
acuugucuuuggac

SEQ ID NO: 3317275 - RNA, 14 nt, Human
acuuggaagcuccg

SEQ ID NO: 3317276 - RNA, 20 nt, Human
acuucgggaggucgaggcag

SEQ ID NO: 3317277 - RNA, 17 nt, Human
acuucgggaggucgagg

SEQ ID NO: 3317278 - RNA, 18 nt, Human
acuucuccacccugcucu

SEQ ID NO: 3317279 - RNA, 16 nt, Human
ucuauuguuucuuuca

SEQ ID NO: 3317280 - RNA, 16 nt, Human
ucucaaaaaaagaaaa

SEQ ID NO: 3317281 - RNA, 19 nt, Human
ucuaccugaggggccucuu

SEQ ID NO: 3317282 - RNA, 12 nt, Human
ucuaccugaggg

SEQ ID NO: 3317283 - RNA, 20 nt, Human
acuuagagguggggagcaga

SEQ ID NO: 3317284 - RNA, 15 nt, Human
acuuacuguacauga

SEQ ID NO: 3317285 - RNA, 14 nt, Human
acuuacuguacaug

SEQ ID NO: 3317286 - RNA, 13 nt, Human
acuuacuguacau

SEQ ID NO: 3317287 - RNA, 18 nt, Human
acuuccaauuuacauacu

SEQ ID NO: 3317288 - RNA, 17 nt, Human
acuuccacugccauccu

SEQ ID NO: 3317289 - RNA, 16 nt, Human
acuucaucccucuggg

SEQ ID NO: 3317290 - RNA, 23 nt, Human
ucuaguuugauuaaauucuugca

SEQ ID NO: 3317291 - RNA, 22 nt, Human
ucuaguuugauuaaauucuugc

SEQ ID NO: 3317292 - RNA, 13 nt, Human
ucuagauacugua

SEQ ID NO: 3317293 - RNA, 24 nt, Human
ucuagauacuguaucaugacaaag

SEQ ID NO: 3317294 - RNA, 13 nt, Human
ucuagccagagga

SEQ ID NO: 3317295 - RNA, 21 nt, Human
acugggcuuggggaccagagc

SEQ ID NO: 3317296 - RNA, 15 nt, Human
acuggguacuugugg

SEQ ID NO: 3317297 - RNA, 14 nt, Human
ucgcuccugugucu

SEQ ID NO: 3317298 - RNA, 23 nt, Human
acuguccuacccacccuccuuuc

SEQ ID NO: 3317299 - RNA, 20 nt, Human
acuguaucaugacaaagacu

SEQ ID NO: 3317300 - RNA, 16 nt, Human
acuguaucaugacaaa

SEQ ID NO: 3317301 - RNA, 17 nt, Human
acuggguacuuguggac

SEQ ID NO: 3317302 - RNA, 16 nt, Human
acuguacaaaguagaa

SEQ ID NO: 3317303 - RNA, 22 nt, Human
acuguacaaaguagaagucuua

SEQ ID NO: 3317304 - RNA, 16 nt, Human
acuguacaugaaaaca

SEQ ID NO: 3317305 - RNA, 19 nt, Human
acuguacaugaaaacacau

SEQ ID NO: 3317306 - RNA, 14 nt, Human
acuguaucaugaca

SEQ ID NO: 3317307 - RNA, 21 nt, Human
acuguacaugaaaacacauuu

SEQ ID NO: 3317308 - RNA, 20 nt, Human
acuguacaugaaaacacauu

SEQ ID NO: 3317309 - RNA, 21 nt, Human
acuguuaauaguucagguaac

SEQ ID NO: 3317310 - RNA, 17 nt, Human
acuguuaauaguucagg

SEQ ID NO: 3317311 - RNA, 22 nt, Human
ucuaacuucaccauauuaccac

SEQ ID NO: 3317312 - RNA, 17 nt, Human
ucuaaagcugccagccg

SEQ ID NO: 3317313 - RNA, 16 nt, Human
ucuaaagcugccagcc

SEQ ID NO: 3317314 - RNA, 16 nt, Human
ucuaaaggcuaccuuu

SEQ ID NO: 3317315 - RNA, 13 nt, Human
ucuaaaggcuacc

SEQ ID NO: 3317316 - RNA, 14 nt, Human
ucuacccaggugcu

SEQ ID NO: 3317317 - RNA, 21 nt, Human
ucuacccucuuagaaaaacca

SEQ ID NO: 3317318 - RNA, 23 nt, Human
accugaggcccuucucuccagcc

SEQ ID NO: 3317319 - RNA, 12 nt, Human
ucauaaugacuu

SEQ ID NO: 3317320 - RNA, 18 nt, Human
accugaagacucauucuu

SEQ ID NO: 3317321 - RNA, 19 nt, Human
accugaauuuuggcugugu

SEQ ID NO: 3317322 - RNA, 17 nt, Human
accugccaggaagccag

SEQ ID NO: 3317323 - RNA, 16 nt, Human
accugccaggaagcca

SEQ ID NO: 3317324 - RNA, 18 nt, Human
accugccaggaagccagc

SEQ ID NO: 3317325 - RNA, 15 nt, Human
accugccaggaagcc

SEQ ID NO: 3317326 - RNA, 14 nt, Human
accugaggggccuc

SEQ ID NO: 3317327 - RNA, 22 nt, Human
accugaggcccuucucuccagc

SEQ ID NO: 3317328 - RNA, 17 nt, Human
ucauuuuuuuuaagaaa

SEQ ID NO: 3317329 - RNA, 18 nt, Human
ucauuuuuuuuaagaaaa

SEQ ID NO: 3317330 - RNA, 19 nt, Human
ucauuuuuaguagagacag

SEQ ID NO: 3317331 - RNA, 16 nt, Human
ucauuugucacacacu

SEQ ID NO: 3317332 - RNA, 14 nt, Human
ucauuugucacaca

SEQ ID NO: 3317333 - RNA, 16 nt, Human
accugcggugcuaucu

SEQ ID NO: 3317334 - RNA, 21 nt, Human
accugcgucucauacucaccu

SEQ ID NO: 3317335 - RNA, 23 nt, Human
accugccuguugggccaggagcc

SEQ ID NO: 3317336 - RNA, 20 nt, Human
accuggaauauauaaccagu

SEQ ID NO: 3317337 - RNA, 17 nt, Human
accuggaauauauaacc

SEQ ID NO: 3317338 - RNA, 20 nt, Human
uccacccaggagccccgagg

SEQ ID NO: 3317339 - RNA, 12 nt, Human
uccacccaccuc

SEQ ID NO: 3317340 - RNA, 18 nt, Human
uccaccaucaagccacca

SEQ ID NO: 3317341 - RNA, 13 nt, Human
uccacccaccuca

SEQ ID NO: 3317342 - RNA, 17 nt, Human
uccacccaggagccccg

SEQ ID NO: 3317343 - RNA, 13 nt, Human
accuggccucugc

SEQ ID NO: 3317344 - RNA, 12 nt, Human
accuggccucug

SEQ ID NO: 3317345 - RNA, 14 nt, Human
accuucuccuucac

SEQ ID NO: 3317346 - RNA, 22 nt, Human
accuucuccuucaccuuugucc

SEQ ID NO: 3317347 - RNA, 16 nt, Human
accuugacagggcaca

SEQ ID NO: 3317348 - RNA, 13 nt, Human
accuuugucccca

SEQ ID NO: 3317349 - RNA, 16 nt, Human
accuuuguccccaccg

SEQ ID NO: 3317350 - RNA, 14 nt, Human
accuuuuuuauaca

SEQ ID NO: 3317351 - RNA, 15 nt, Human
accuuuguccccacc

SEQ ID NO: 3317352 - RNA, 14 nt, Human
accuuuguccccac

SEQ ID NO: 3317353 - RNA, 18 nt, Human
accuuuuuuauacauaaa

SEQ ID NO: 3317354 - RNA, 17 nt, Human
accuuuuuuauacauaa

SEQ ID NO: 3317355 - RNA, 16 nt, Human
accuuuuuuauacaua

SEQ ID NO: 3317356 - RNA, 17 nt, Human
acgcuacccgggaaggg

SEQ ID NO: 3317357 - RNA, 13 nt, Human
acgcuacccggga

SEQ ID NO: 3317358 - RNA, 20 nt, Human
acgcgugcacacaccagagc

SEQ ID NO: 3317359 - RNA, 23 nt, Human
acgcgugcacacaccagagccca

SEQ ID NO: 3317360 - RNA, 14 nt, Human
acgcccccacuggu

SEQ ID NO: 3317361 - RNA, 19 nt, Human
acggagucccaccuuggcu

SEQ ID NO: 3317362 - RNA, 13 nt, Human
acggccaggccag

SEQ ID NO: 3317363 - RNA, 16 nt, Human
acggccaggccagagg

SEQ ID NO: 3317364 - RNA, 22 nt, Human
uccaggcuccuuuagcgcccag

SEQ ID NO: 3317365 - RNA, 18 nt, Human
uccaggcugggagagccu

SEQ ID NO: 3317366 - RNA, 17 nt, Human
uccaggcugggagagcc

SEQ ID NO: 3317367 - RNA, 14 nt, Human
uccaggcugggaga

SEQ ID NO: 3317368 - RNA, 18 nt, Human
acgccaucccagccccaa

SEQ ID NO: 3317369 - RNA, 17 nt, Human
acgccaucccagcccca

SEQ ID NO: 3317370 - RNA, 16 nt, Human
acgccaucccagcccc

SEQ ID NO: 3317371 - RNA, 15 nt, Human
acgccaucccagccc

SEQ ID NO: 3317372 - RNA, 14 nt, Human
acgccaucccagcc

SEQ ID NO: 3317373 - RNA, 11 nt, Human
acgccauccca

SEQ ID NO: 3317374 - RNA, 23 nt, Human
acgccaggggaaaaucagccugc

SEQ ID NO: 3317375 - RNA, 15 nt, Human
acgacugcccggcag

SEQ ID NO: 3317376 - RNA, 18 nt, Human
acgccaggggaaaaucag

SEQ ID NO: 3317377 - RNA, 17 nt, Human
uccaugaguccccuguu

SEQ ID NO: 3317378 - RNA, 16 nt, Human
uccaugaguccccugu

SEQ ID NO: 3317379 - RNA, 15 nt, Human
uccaugaguccccug

SEQ ID NO: 3317380 - RNA, 20 nt, Human
uccagugaggcucugcccuu

SEQ ID NO: 3317381 - RNA, 19 nt, Human
uccagugaggcucugcccu

SEQ ID NO: 3317382 - RNA, 18 nt, Human
uccagugaggcucugccc

SEQ ID NO: 3317383 - RNA, 17 nt, Human
uccagugaggcucugcc

SEQ ID NO: 3317384 - RNA, 14 nt, Human
acggcucacugcag

SEQ ID NO: 3317385 - RNA, 14 nt, Human
ucccacaaaggaga

SEQ ID NO: 3317386 - RNA, 14 nt, Human
ucccaaagugcugg

SEQ ID NO: 3317387 - RNA, 15 nt, Human
ucccaaagugcuggg

SEQ ID NO: 3317388 - RNA, 16 nt, Human
ucccaaagugcuggga

SEQ ID NO: 3317389 - RNA, 11 nt, Human
ucccaccccac

SEQ ID NO: 3317390 - RNA, 23 nt, Human
uccucuuuggucuacacugugcu

SEQ ID NO: 3317391 - RNA, 15 nt, Human
uccugaagaauugaa

SEQ ID NO: 3317392 - RNA, 19 nt, Human
acucuuucuauuguuucuu

SEQ ID NO: 3317393 - RNA, 21 nt, Human
uccucccaccucagccucccg

SEQ ID NO: 3317394 - RNA, 15 nt, Human
uccucccaccucagc

SEQ ID NO: 3317395 - RNA, 16 nt, Human
uccucccaccucagcc

SEQ ID NO: 3317396 - RNA, 18 nt, Human
uccucccaccucagccuc

SEQ ID NO: 3317397 - RNA, 20 nt, Human
uccucccaccucagccuccc

SEQ ID NO: 3317398 - RNA, 13 nt, Human
uccucccaccuca

SEQ ID NO: 3317399 - RNA, 14 nt, Human
uccucccaccucag

SEQ ID NO: 3317400 - RNA, 16 nt, Human
acucgcgacaaugcaa

SEQ ID NO: 3317401 - RNA, 15 nt, Human
acucgcgacaaugca

SEQ ID NO: 3317402 - RNA, 17 nt, Human
acucuggcagcucagag

SEQ ID NO: 3317403 - RNA, 16 nt, Human
acucuggcagcucaga

SEQ ID NO: 3317404 - RNA, 21 nt, Human
acucuuauugcccacgcugga

SEQ ID NO: 3317405 - RNA, 19 nt, Human
acucuuauugcccacgcug

SEQ ID NO: 3317406 - RNA, 19 nt, Human
acucuggcagcucagagag

SEQ ID NO: 3317407 - RNA, 13 nt, Human
uccguuaaaauac

SEQ ID NO: 3317408 - RNA, 15 nt, Human
uccguuaaaauacca

SEQ ID NO: 3317409 - RNA, 16 nt, Human
acucgaguuacagaca

SEQ ID NO: 3317410 - RNA, 20 nt, Human
uccuagcacuuugggaggcc

SEQ ID NO: 3317411 - RNA, 21 nt, Human
uccuagccugugccucuggga

SEQ ID NO: 3317412 - RNA, 14 nt, Human
acucagaauucucu

SEQ ID NO: 3317413 - RNA, 22 nt, Human
acucagaauucucuaguuugau

SEQ ID NO: 3317414 - RNA, 21 nt, Human
acucagaauucucuaguuuga

SEQ ID NO: 3317415 - RNA, 18 nt, Human
acucagaagacacugaug

SEQ ID NO: 3317416 - RNA, 21 nt, Human
acucaccugccccucaacucu

SEQ ID NO: 3317417 - RNA, 19 nt, Human
acucaccugccccucaacu

SEQ ID NO: 3317418 - RNA, 14 nt, Human
acucaccugccccu

SEQ ID NO: 3317419 - RNA, 14 nt, Human
acucagaagacacu

SEQ ID NO: 3317420 - RNA, 15 nt, Human
acucagaagacacug

SEQ ID NO: 3317421 - RNA, 16 nt, Human
acucagaagacacuga

SEQ ID NO: 3317422 - RNA, 17 nt, Human
acucagaagacacugau

SEQ ID NO: 3317423 - RNA, 18 nt, Human
acucauugaccugaggcc

SEQ ID NO: 3317424 - RNA, 17 nt, Human
acucauugaccugaggc

SEQ ID NO: 3317425 - RNA, 16 nt, Human
acucauugaccugagg

SEQ ID NO: 3317426 - RNA, 12 nt, Human
acucaucuuagg

SEQ ID NO: 3317427 - RNA, 23 nt, Human
ucccugaaggccccgcccaggcu

SEQ ID NO: 3317428 - RNA, 17 nt, Human
acucaccccagccccaa

SEQ ID NO: 3317429 - RNA, 17 nt, Human
ucccugaaggccccgcc

SEQ ID NO: 3317430 - RNA, 18 nt, Human
ucccugaaggccccgccc

SEQ ID NO: 3317431 - RNA, 22 nt, Human
ucccugaaggccccgcccaggc

SEQ ID NO: 3317432 - RNA, 21 nt, Human
ucccugaaggccccgcccagg

SEQ ID NO: 3317433 - RNA, 21 nt, Human
ucccucuuucccucccuuccu

SEQ ID NO: 3317434 - RNA, 18 nt, Human
ucccucagucuggcccuu

SEQ ID NO: 3317435 - RNA, 11 nt, Human
ucccucuuucc

SEQ ID NO: 3317436 - RNA, 13 nt, Human
ucccucuuucccu

SEQ ID NO: 3317437 - RNA, 12 nt, Human
acuauaauguaa

SEQ ID NO: 3317438 - RNA, 11 nt, Human
acuauaaugua

SEQ ID NO: 3317439 - RNA, 13 nt, Human
acuauaauguaag

SEQ ID NO: 3317440 - RNA, 14 nt, Human
acuauaauguaagc

SEQ ID NO: 3317441 - RNA, 12 nt, Human
acuauguaucaa

SEQ ID NO: 3317442 - RNA, 19 nt, Human
acucacauuuauucugcuc

SEQ ID NO: 3317443 - RNA, 20 nt, Human
acucacauuuauucugcuca

SEQ ID NO: 3317444 - RNA, 14 nt, Human
acucaaugcacuga

SEQ ID NO: 3317445 - RNA, 18 nt, Human
acuacggaauaguuggcu

SEQ ID NO: 3317446 - RNA, 13 nt, Human
acguacacacaca

SEQ ID NO: 3317447 - RNA, 12 nt, Human
acguacacauuu

SEQ ID NO: 3317448 - RNA, 13 nt, Human
acguacacauuuu

SEQ ID NO: 3317449 - RNA, 11 nt, Human
acccacugcuu

SEQ ID NO: 3317450 - RNA, 20 nt, Human
acccacugcuuuuggucugu

SEQ ID NO: 3317451 - RNA, 21 nt, Human
accauuuugggguacccacug

SEQ ID NO: 3317452 - RNA, 23 nt, Human
accauuuugcugucccuuuuccu

SEQ ID NO: 3317453 - RNA, 22 nt, Human
accauuuugcugucccuuuucc

SEQ ID NO: 3317454 - RNA, 18 nt, Human
accauucuccaccugcca

SEQ ID NO: 3317455 - RNA, 19 nt, Human
accauucuccaccugccag

SEQ ID NO: 3317456 - RNA, 21 nt, Human
accauucuccaccugccaggg

SEQ ID NO: 3317457 - RNA, 20 nt, Human
accauucuccaccugccagg

SEQ ID NO: 3317458 - RNA, 22 nt, Human
ucaccagccccagugcccacag

SEQ ID NO: 3317459 - RNA, 20 nt, Human
ucacuauguugcccaggcag

SEQ ID NO: 3317460 - RNA, 21 nt, Human
ucacuauguugcccaggcagg

SEQ ID NO: 3317461 - RNA, 23 nt, Human
ucacugagacagcccgggcucug

SEQ ID NO: 3317462 - RNA, 18 nt, Human
ucacugcaaccuccgccu

SEQ ID NO: 3317463 - RNA, 14 nt, Human
ucacuguugcccag

SEQ ID NO: 3317464 - RNA, 15 nt, Human
ucacuguugcccagg

SEQ ID NO: 3317465 - RNA, 13 nt, Human
acccagcgagccc

SEQ ID NO: 3317466 - RNA, 16 nt, Human
acccagcgagcccugg

SEQ ID NO: 3317467 - RNA, 17 nt, Human
acccagcgagcccuggu

SEQ ID NO: 3317468 - RNA, 13 nt, Human
acccaggagcccc

SEQ ID NO: 3317469 - RNA, 15 nt, Human
acccaggagccccga

SEQ ID NO: 3317470 - RNA, 13 nt, Human
accccagguuucu

SEQ ID NO: 3317471 - RNA, 11 nt, Human
acccaggugcu

SEQ ID NO: 3317472 - RNA, 15 nt, Human
ucagaucucuaacuu

SEQ ID NO: 3317473 - RNA, 16 nt, Human
ucagaucucuaacuuc

SEQ ID NO: 3317474 - RNA, 23 nt, Human
ucagagacuccugcaggcagcca

SEQ ID NO: 3317475 - RNA, 23 nt, Human
ucagagagggugggagugggccc

SEQ ID NO: 3317476 - RNA, 20 nt, Human
ucagaauucucagaaucuca

SEQ ID NO: 3317477 - RNA, 10 nt, Human
ucagaauucu

SEQ ID NO: 3317478 - RNA, 12 nt, Human
ucagaauucuca

SEQ ID NO: 3317479 - RNA, 22 nt, Human
ucagagacuccugcaggcagcc

SEQ ID NO: 3317480 - RNA, 23 nt, Human
ucagaaguuucugccgcagcccu

SEQ ID NO: 3317481 - RNA, 23 nt, Human
ucagugccuuauggaacacucug

SEQ ID NO: 3317482 - RNA, 22 nt, Human
ucagugccuuauggaacacucu

SEQ ID NO: 3317483 - RNA, 20 nt, Human
ucagugccuuauggaacacu

SEQ ID NO: 3317484 - RNA, 19 nt, Human
ucagugccuuauggaacac

SEQ ID NO: 3317485 - RNA, 14 nt, Human
ucaguggcagcugc

SEQ ID NO: 3317486 - RNA, 15 nt, Human
ucaguggcagcugcu

SEQ ID NO: 3317487 - RNA, 17 nt, Human
ucaguuguuaguguguc

SEQ ID NO: 3317488 - RNA, 13 nt, Human
ucaguggcagcug

SEQ ID NO: 3317489 - RNA, 18 nt, Human
ucagugccuuauggaaca

SEQ ID NO: 3317490 - RNA, 19 nt, Human
ucaguuguuagugugucuu

SEQ ID NO: 3317491 - RNA, 22 nt, Human
ucaggugucccugcacuugcag

SEQ ID NO: 3317492 - RNA, 13 nt, Human
ucaguaagccgug

SEQ ID NO: 3317493 - RNA, 13 nt, Human
ucaguaauaacuc

SEQ ID NO: 3317494 - RNA, 20 nt, Human
acccuugccgucuaccugag

SEQ ID NO: 3317495 - RNA, 20 nt, Human
accgaaaacguggcugcuuc

SEQ ID NO: 3317496 - RNA, 15 nt, Human
ucaggugucccugca

SEQ ID NO: 3317497 - RNA, 23 nt, Human
ucagguggggucacucuggcagc

SEQ ID NO: 3317498 - RNA, 17 nt, Human
ucaggugucccugcacu

SEQ ID NO: 3317499 - RNA, 18 nt, Human
ucaggugucccugcacuu

SEQ ID NO: 3317500 - RNA, 22 nt, Human
accgaaaacguggcugcuucaa

SEQ ID NO: 3317501 - RNA, 21 nt, Human
accgaaaacguggcugcuuca

SEQ ID NO: 3317502 - RNA, 22 nt, Human
ucagguggggucacucuggcag

SEQ ID NO: 3317503 - RNA, 21 nt, Human
ucagguggggucacucuggca

SEQ ID NO: 3317504 - RNA, 21 nt, Human
acccuccuuucaccacaugug

SEQ ID NO: 3317505 - RNA, 22 nt, Human
acccgggaagggggcugggaca

SEQ ID NO: 3317506 - RNA, 14 nt, Human
acccucauguucuu

SEQ ID NO: 3317507 - RNA, 17 nt, Human
acccucauguucuuaau

SEQ ID NO: 3317508 - RNA, 15 nt, Human
acccucauguucuua

SEQ ID NO: 3317509 - RNA, 20 nt, Human
acccgggaagggggcuggga

SEQ ID NO: 3317510 - RNA, 19 nt, Human
acccgggaagggggcuggg

SEQ ID NO: 3317511 - RNA, 21 nt, Human
acccugaggcccagagggccu

SEQ ID NO: 3317512 - RNA, 19 nt, Human
acccugaggcccagagggc

SEQ ID NO: 3317513 - RNA, 17 nt, Human
acccugaggcccagagg

SEQ ID NO: 3317514 - RNA, 11 nt, Human
acccugaggcc

SEQ ID NO: 3317515 - RNA, 23 nt, Human
acccugaggcccagagggccugc

SEQ ID NO: 3317516 - RNA, 17 nt, Human
ucaggcaggugggaugg

SEQ ID NO: 3317517 - RNA, 18 nt, Human
ucaggcaggugggaugga

SEQ ID NO: 3317518 - RNA, 23 nt, Human
ucaggccaaacucaccugccccu

SEQ ID NO: 3317519 - RNA, 13 nt, Human
acccccagccugc

SEQ ID NO: 3317520 - RNA, 12 nt, Human
acccccagccug

SEQ ID NO: 3317521 - RNA, 16 nt, Human
ucaggccaggcccucu

SEQ ID NO: 3317522 - RNA, 15 nt, Human
ucaggccaggcccuc

SEQ ID NO: 3317523 - RNA, 14 nt, Human
ucaggccaggcccu

SEQ ID NO: 3317524 - RNA, 13 nt, Human
ucaggccaggccc

SEQ ID NO: 3317525 - RNA, 12 nt, Human
ucaggccaggcc

SEQ ID NO: 3317526 - RNA, 13 nt, Human
ucaggccagcugc

SEQ ID NO: 3317527 - RNA, 17 nt, Human
ucaggguuggccccugc

SEQ ID NO: 3317528 - RNA, 19 nt, Human
ucaggggugugcggccuuu

SEQ ID NO: 3317529 - RNA, 12 nt, Human
ucaggggugugc

SEQ ID NO: 3317530 - RNA, 18 nt, Human
ucaggccaggcccucugc

SEQ ID NO: 3317531 - RNA, 17 nt, Human
ucaggccaggcccucug

SEQ ID NO: 3317532 - RNA, 19 nt, Human
ucaggccaggcccucugcc

SEQ ID NO: 3317533 - RNA, 18 nt, Human
ucaggguuggccccugcc

SEQ ID NO: 3317534 - RNA, 19 nt, Human
ucaggguuggccccugccc

SEQ ID NO: 3317535 - RNA, 19 nt, Human
acccgcuaagagggaggga

SEQ ID NO: 3317536 - RNA, 15 nt, Human
ucacagaugggugcu

SEQ ID NO: 3317537 - RNA, 14 nt, Human
ucacagaugggugc

SEQ ID NO: 3317538 - RNA, 17 nt, Human
ucaccagccccagugcc

SEQ ID NO: 3317539 - RNA, 16 nt, Human
ucaccagccccagugc

SEQ ID NO: 3317540 - RNA, 20 nt, Human
ucacauauugauuuccguua

SEQ ID NO: 3317541 - RNA, 18 nt, Human
ucacauauugauuuccgu

SEQ ID NO: 3317542 - RNA, 16 nt, Human
ucacauauugauuucc

SEQ ID NO: 3317543 - RNA, 16 nt, Human
accaaaucagcugcua

SEQ ID NO: 3317544 - RNA, 19 nt, Human
accaaaucagcugcuacua

SEQ ID NO: 3317545 - RNA, 16 nt, Human
accaacauacucccau

SEQ ID NO: 3317546 - RNA, 20 nt, Human
accaaccacugcgaccacaa

SEQ ID NO: 3317547 - RNA, 17 nt, Human
accacacagaggcugcc

SEQ ID NO: 3317548 - RNA, 15 nt, Human
accacacccagccca

SEQ ID NO: 3317549 - RNA, 16 nt, Human
accacacccagcccac

SEQ ID NO: 3317550 - RNA, 20 nt, Human
accacacccagcccacuucu

SEQ ID NO: 3317551 - RNA, 21 nt, Human
accacacccagcccacuucug

SEQ ID NO: 3317552 - RNA, 23 nt, Human
accacacccagcccacuucugcc

SEQ ID NO: 3317553 - RNA, 21 nt, Human
acauugcggacagccacggcc

SEQ ID NO: 3317554 - RNA, 22 nt, Human
acauugcggacagccacggcca

SEQ ID NO: 3317555 - RNA, 21 nt, Human
acauuuuuuaaaugcaccugg

SEQ ID NO: 3317556 - RNA, 23 nt, Human
acauuuuucuuagggaaggauac

SEQ ID NO: 3317557 - RNA, 13 nt, Human
acauuuuucuuag

SEQ ID NO: 3317558 - RNA, 18 nt, Human
acauuuuuaagugcugca

SEQ ID NO: 3317559 - RNA, 15 nt, Human
acauuuuuaagugcu

SEQ ID NO: 3317560 - RNA, 22 nt, Human
ucaauaggaaaaacugauuuuu

SEQ ID NO: 3317561 - RNA, 16 nt, Human
ucaagugauucuccug

SEQ ID NO: 3317562 - RNA, 17 nt, Human
ucaagugauucuccugc

SEQ ID NO: 3317563 - RNA, 17 nt, Human
ucaauaggaaaaacuga

SEQ ID NO: 3317564 - RNA, 19 nt, Human
ucaauaggaaaaacugauu

SEQ ID NO: 3317565 - RNA, 18 nt, Human
ucaauaggaaaaacugau

SEQ ID NO: 3317566 - RNA, 23 nt, Human
ucaaggauccugagccagauuuc

SEQ ID NO: 3317567 - RNA, 17 nt, Human
ucaagagggucugagga

SEQ ID NO: 3317568 - RNA, 15 nt, Human
acaucuugcucugcu

SEQ ID NO: 3317569 - RNA, 16 nt, Human
acaucuugcucugcug

SEQ ID NO: 3317570 - RNA, 14 nt, Human
acaucuugcucugc

SEQ ID NO: 3317571 - RNA, 19 nt, Human
acaucuuggucagauuuga

SEQ ID NO: 3317572 - RNA, 22 nt, Human
acaucuugcucugcugacagac

SEQ ID NO: 3317573 - RNA, 15 nt, Human
acaugaaaacacauu

SEQ ID NO: 3317574 - RNA, 17 nt, Human
uauuuuuguagagccag

SEQ ID NO: 3317575 - RNA, 15 nt, Human
uauuuugcuuuguga

SEQ ID NO: 3317576 - RNA, 13 nt, Human
uauuuugcuuugu

SEQ ID NO: 3317577 - RNA, 20 nt, Human
uauuuugcuuugugauuuuu

SEQ ID NO: 3317578 - RNA, 16 nt, Human
ucaaaagcugggcagg

SEQ ID NO: 3317579 - RNA, 22 nt, Human
ucaaagauauuuugcuuuguga

SEQ ID NO: 3317580 - RNA, 20 nt, Human
ucaaagauauuuugcuuugu

SEQ ID NO: 3317581 - RNA, 13 nt, Human
ucaaagauauuuu

SEQ ID NO: 3317582 - RNA, 13 nt, Human
acaugagcaucag

SEQ ID NO: 3317583 - RNA, 22 nt, Human
acaugaaaacacauuuuucuua

SEQ ID NO: 3317584 - RNA, 23 nt, Human
acaugaaaacacauuuuucuuag

SEQ ID NO: 3317585 - RNA, 23 nt, Human
acaugagcaucaggccaggcccu

SEQ ID NO: 3317586 - RNA, 20 nt, Human
acaugagcaucaggccaggc

SEQ ID NO: 3317587 - RNA, 20 nt, Human
acauggaauaacauguaauu

SEQ ID NO: 3317588 - RNA, 14 nt, Human
acauggaaguacua

SEQ ID NO: 3317589 - RNA, 18 nt, Human
acauggaauaacauguaa

SEQ ID NO: 3317590 - RNA, 15 nt, Human
acauggaguauaugu

SEQ ID NO: 3317591 - RNA, 19 nt, Human
acauggaguauaugucaag

SEQ ID NO: 3317592 - RNA, 14 nt, Human
acauggccuuugcu

SEQ ID NO: 3317593 - RNA, 20 nt, Human
auaaccaguguuguggauuu

SEQ ID NO: 3317594 - RNA, 11 nt, Human
auaaauuauuu

SEQ ID NO: 3317595 - RNA, 13 nt, Human
uuagacagagucu

SEQ ID NO: 3317596 - RNA, 20 nt, Human
uuagacagagucucacuguu

SEQ ID NO: 3317597 - RNA, 13 nt, Human
uuagacagucccu

SEQ ID NO: 3317598 - RNA, 19 nt, Human
uuacccucauguucuuaau

SEQ ID NO: 3317599 - RNA, 18 nt, Human
uuagccaagugugguaga

SEQ ID NO: 3317600 - RNA, 18 nt, Human
uuagcaaauucuguuuuu

SEQ ID NO: 3317601 - RNA, 15 nt, Human
uuaguuucuccaagc

SEQ ID NO: 3317602 - RNA, 22 nt, Human
uuaguuugcaguuacacuaaaa

SEQ ID NO: 3317603 - RNA, 18 nt, Human
uuagguuggcaaaaaggc

SEQ ID NO: 3317604 - RNA, 16 nt, Human
uuaggugaggaagcaa

SEQ ID NO: 3317605 - RNA, 16 nt, Human
uuaggugugacugaau

SEQ ID NO: 3317606 - RNA, 20 nt, Human
uuagggaaggauacaaaagc

SEQ ID NO: 3317607 - RNA, 15 nt, Human
uuaggugaggaagca

SEQ ID NO: 3317608 - RNA, 15 nt, Human
auaaugaaugaaaca

SEQ ID NO: 3317609 - RNA, 15 nt, Human
auaaugcgugcauac

SEQ ID NO: 3317610 - RNA, 22 nt, Human
auaauugacaggauuauuggaa

SEQ ID NO: 3317611 - RNA, 12 nt, Human
auaauacaccac

SEQ ID NO: 3317612 - RNA, 20 nt, Human
auaauacaccacuacauucu

SEQ ID NO: 3317613 - RNA, 18 nt, Human
auaauacaccacuacauu

SEQ ID NO: 3317614 - RNA, 13 nt, Human
aguuggucccccu

SEQ ID NO: 3317615 - RNA, 11 nt, Human
aguuggucccc

SEQ ID NO: 3317616 - RNA, 17 nt, Human
aguuggucccccuucca

SEQ ID NO: 3317617 - RNA, 13 nt, Human
uuaaaaaaaaucc

SEQ ID NO: 3317618 - RNA, 20 nt, Human
aguugccagucaccccggcc

SEQ ID NO: 3317619 - RNA, 23 nt, Human
aguugccagucaccccggccacc

SEQ ID NO: 3317620 - RNA, 13 nt, Human
aguugggcuuccu

SEQ ID NO: 3317621 - RNA, 19 nt, Human
aguugggcuuccucauagu

SEQ ID NO: 3317622 - RNA, 15 nt, Human
uuaaaaaucucaaau

SEQ ID NO: 3317623 - RNA, 14 nt, Human
uuaaaaaucucaaa

SEQ ID NO: 3317624 - RNA, 16 nt, Human
uuaaaaaucucaaauu

SEQ ID NO: 3317625 - RNA, 15 nt, Human
uuaaauaaugugaaa

SEQ ID NO: 3317626 - RNA, 18 nt, Human
uuaaauaaugugaaacug

SEQ ID NO: 3317627 - RNA, 16 nt, Human
uuaaauaaugugaaac

SEQ ID NO: 3317628 - RNA, 13 nt, Human
uuaaauaauguga

SEQ ID NO: 3317629 - RNA, 20 nt, Human
uuaacagaaauguacagcaa

SEQ ID NO: 3317630 - RNA, 16 nt, Human
uuaacagaaauguaca

SEQ ID NO: 3317631 - RNA, 19 nt, Human
uuaacagaaauguacagca

SEQ ID NO: 3317632 - RNA, 14 nt, Human
uuaagugcugcauu

SEQ ID NO: 3317633 - RNA, 16 nt, Human
uuaagugcugcauuua

SEQ ID NO: 3317634 - RNA, 15 nt, Human
uuaagugcugcauuu

SEQ ID NO: 3317635 - RNA, 19 nt, Human
uuaagugcugcauuuaaaa

SEQ ID NO: 3317636 - RNA, 22 nt, Human
uuaagaaagacuaucuaaaugu

SEQ ID NO: 3317637 - RNA, 9 nt, Human
uuaaggugg

SEQ ID NO: 3317638 - RNA, 23 nt, Human
uuaaucauuaggugugacugaau

SEQ ID NO: 3317639 - RNA, 22 nt, Human
uuaaucauuaggugugacugaa

SEQ ID NO: 3317640 - RNA, 13 nt, Human
uuaaucauuaggu

SEQ ID NO: 3317641 - RNA, 19 nt, Human
uuaaugaaagacuguacaa

SEQ ID NO: 3317642 - RNA, 18 nt, Human
uuaaugaaagacuguaca

SEQ ID NO: 3317643 - RNA, 22 nt, Human
uuaaucugguuuauuuuuguuc

SEQ ID NO: 3317644 - RNA, 20 nt, Human
uuaagaaaaaggaugcacag

SEQ ID NO: 3317645 - RNA, 19 nt, Human
uuaagaaaaaggaugcaca

SEQ ID NO: 3317646 - RNA, 21 nt, Human
uuaagaaaaaggaugcacaga

SEQ ID NO: 3317647 - RNA, 23 nt, Human
aguuuuuauggcuuuugugcauu

SEQ ID NO: 3317648 - RNA, 18 nt, Human
uguucuuaguuugcaguu

SEQ ID NO: 3317649 - RNA, 18 nt, Human
uguucuagcauggcugcc

SEQ ID NO: 3317650 - RNA, 15 nt, Human
uguugcccaggcugg

SEQ ID NO: 3317651 - RNA, 13 nt, Human
uguugcccaggcu

SEQ ID NO: 3317652 - RNA, 22 nt, Human
uguucuugguuuguaaauuaac

SEQ ID NO: 3317653 - RNA, 20 nt, Human
uguucuugguuuguaaauua

SEQ ID NO: 3317654 - RNA, 19 nt, Human
uguucuugguuuguaaauu

SEQ ID NO: 3317655 - RNA, 20 nt, Human
uguuuagauaauacaccacu

SEQ ID NO: 3317656 - RNA, 14 nt, Human
uguuuauugucaaa

SEQ ID NO: 3317657 - RNA, 16 nt, Human
aguucaauucucauuu

SEQ ID NO: 3317658 - RNA, 23 nt, Human
aguuccucauuagcauuuugcua

SEQ ID NO: 3317659 - RNA, 15 nt, Human
agugccuuacacaau

SEQ ID NO: 3317660 - RNA, 20 nt, Human
agugcugcauuuaaaagaua

SEQ ID NO: 3317661 - RNA, 19 nt, Human
agugcugggauuacaggug

SEQ ID NO: 3317662 - RNA, 20 nt, Human
agugcugggauuacaagcgu

SEQ ID NO: 3317663 - RNA, 22 nt, Human
agugcugcauuuaaaagauaca

SEQ ID NO: 3317664 - RNA, 16 nt, Human
agugcuuccaaggaug

SEQ ID NO: 3317665 - RNA, 16 nt, Human
uguggucccaccccac

SEQ ID NO: 3317666 - RNA, 19 nt, Human
ugugucagcauagaaguaa

SEQ ID NO: 3317667 - RNA, 20 nt, Human
ugugguguuuccuggcacug

SEQ ID NO: 3317668 - RNA, 23 nt, Human
uguguuaucacccagaagaaaau

SEQ ID NO: 3317669 - RNA, 14 nt, Human
uguguuaugaagca

SEQ ID NO: 3317670 - RNA, 13 nt, Human
ugugucucuuggu

SEQ ID NO: 3317671 - RNA, 17 nt, Human
ugugucagguggggcag

SEQ ID NO: 3317672 - RNA, 19 nt, Human
ugugucagguggggcagcu

SEQ ID NO: 3317673 - RNA, 11 nt, Human
aguggaaaaau

SEQ ID NO: 3317674 - RNA, 19 nt, Human
aguggaaaaauagccugcc

SEQ ID NO: 3317675 - RNA, 18 nt, Human
aguggaaaaauagccugc

SEQ ID NO: 3317676 - RNA, 19 nt, Human
uguuaaugauagcuacugu

SEQ ID NO: 3317677 - RNA, 21 nt, Human
uguuaacauggacaugaucuu

SEQ ID NO: 3317678 - RNA, 15 nt, Human
ugugcugcccugccc

SEQ ID NO: 3317679 - RNA, 21 nt, Human
uguggagaagcggcuggcagc

SEQ ID NO: 3317680 - RNA, 14 nt, Human
ugugcugcccugcc

SEQ ID NO: 3317681 - RNA, 13 nt, Human
ugugcugcccugc

SEQ ID NO: 3317682 - RNA, 12 nt, Human
ugugcugcccug

SEQ ID NO: 3317683 - RNA, 16 nt, Human
ugugcucuggacaggc

SEQ ID NO: 3317684 - RNA, 18 nt, Human
ugugcucuggacaggcau

SEQ ID NO: 3317685 - RNA, 22 nt, Human
ugugcucugaucauccacugug

SEQ ID NO: 3317686 - RNA, 12 nt, Human
ugugcucugauc

SEQ ID NO: 3317687 - RNA, 23 nt, Human
ugugcucugaucauccacugugc

SEQ ID NO: 3317688 - RNA, 15 nt, Human
ugugcucuggacagg

SEQ ID NO: 3317689 - RNA, 20 nt, Human
agucucacuguugcccaggc

SEQ ID NO: 3317690 - RNA, 18 nt, Human
agucucacuguugcccag

SEQ ID NO: 3317691 - RNA, 19 nt, Human
agucucacuguugcccagg

SEQ ID NO: 3317692 - RNA, 21 nt, Human
ugugcccuaaaguguauuuuu

SEQ ID NO: 3317693 - RNA, 20 nt, Human
ugugcccuaaaguguauuuu

SEQ ID NO: 3317694 - RNA, 16 nt, Human
agugagucgaggacag

SEQ ID NO: 3317695 - RNA, 22 nt, Human
agugauucuccugccucagccu

SEQ ID NO: 3317696 - RNA, 24 nt, Human
agugauucuccugccucagccucc

SEQ ID NO: 3317697 - RNA, 14 nt, Human
agugcccacaggau

SEQ ID NO: 3317698 - RNA, 14 nt, Human
agugccaaaaacaa

SEQ ID NO: 3317699 - RNA, 16 nt, Human
agugccaaaaacaaca

SEQ ID NO: 3317700 - RNA, 17 nt, Human
aggugguuauggagagg

SEQ ID NO: 3317701 - RNA, 14 nt, Human
agguuggugggggc

SEQ ID NO: 3317702 - RNA, 17 nt, Human
uguaacuuucugaaaua

SEQ ID NO: 3317703 - RNA, 23 nt, Human
uguaauuaaguacuauguaucaa

SEQ ID NO: 3317704 - RNA, 21 nt, Human
aggugcacaagcuccaagcuc

SEQ ID NO: 3317705 - RNA, 20 nt, Human
aggugggauccuccaggugc

SEQ ID NO: 3317706 - RNA, 18 nt, Human
aggugggauccuccaggu

SEQ ID NO: 3317707 - RNA, 20 nt, Human
aggugcacaagcuccaagcu

SEQ ID NO: 3317708 - RNA, 18 nt, Human
aggugcacaagcuccaag

SEQ ID NO: 3317709 - RNA, 17 nt, Human
aggugcacaagcuccaa

SEQ ID NO: 3317710 - RNA, 16 nt, Human
aggugcacaagcucca

SEQ ID NO: 3317711 - RNA, 15 nt, Human
aggugcacaagcucc

SEQ ID NO: 3317712 - RNA, 23 nt, Human
aggucuugaacuccuggccucaa

SEQ ID NO: 3317713 - RNA, 22 nt, Human
aggucuugaacuccuggccuca

SEQ ID NO: 3317714 - RNA, 13 nt, Human
uguagagugggag

SEQ ID NO: 3317715 - RNA, 14 nt, Human
uguaauuugugaua

SEQ ID NO: 3317716 - RNA, 11 nt, Human
agguuuuccug

SEQ ID NO: 3317717 - RNA, 20 nt, Human
aguaagccgugauuuucauu

SEQ ID NO: 3317718 - RNA, 19 nt, Human
aguaauaugcacacauuuu

SEQ ID NO: 3317719 - RNA, 18 nt, Human
aguaauaugcacacauuu

SEQ ID NO: 3317720 - RNA, 20 nt, Human
aguaauaugcacacauuuuu

SEQ ID NO: 3317721 - RNA, 17 nt, Human
aguaauaugcacacauu

SEQ ID NO: 3317722 - RNA, 12 nt, Human
aguagagacagg

SEQ ID NO: 3317723 - RNA, 18 nt, Human
uguaggaagguuaauguu

SEQ ID NO: 3317724 - RNA, 20 nt, Human
uguaggaagguuaauguuca

SEQ ID NO: 3317725 - RNA, 14 nt, Human
aguacacuguuuca

SEQ ID NO: 3317726 - RNA, 16 nt, Human
aguacacuguuucaaa

SEQ ID NO: 3317727 - RNA, 17 nt, Human
aguaugguggcuggguu

SEQ ID NO: 3317728 - RNA, 13 nt, Human
agucaccaagccc

SEQ ID NO: 3317729 - RNA, 16 nt, Human
ugucagcugaaccugg

SEQ ID NO: 3317730 - RNA, 18 nt, Human
agucacugagacagcccg

SEQ ID NO: 3317731 - RNA, 19 nt, Human
agucacugagacagcccgg

SEQ ID NO: 3317732 - RNA, 19 nt, Human
ugucagcugaaccugggua

SEQ ID NO: 3317733 - RNA, 19 nt, Human
ugucaagagggucugagga

SEQ ID NO: 3317734 - RNA, 15 nt, Human
ugucaagccauaauu

SEQ ID NO: 3317735 - RNA, 14 nt, Human
uguauuuuuuuacu

SEQ ID NO: 3317736 - RNA, 16 nt, Human
aguaggaagacuuugg

SEQ ID NO: 3317737 - RNA, 22 nt, Human
aguaggaagacuuuggaaagac

SEQ ID NO: 3317738 - RNA, 19 nt, Human
aguaggaagacuuuggaaa

SEQ ID NO: 3317739 - RNA, 18 nt, Human
aguaggaagacuuuggaa

SEQ ID NO: 3317740 - RNA, 17 nt, Human
aguaggaagacuuugga

SEQ ID NO: 3317741 - RNA, 16 nt, Human
agucucacuguugccc

SEQ ID NO: 3317742 - RNA, 17 nt, Human
agucucacuguugccca

SEQ ID NO: 3317743 - RNA, 23 nt, Human
aguccgaaagggacuuggaagcu

SEQ ID NO: 3317744 - RNA, 22 nt, Human
agucagaaguuucugccgcagc

SEQ ID NO: 3317745 - RNA, 14 nt, Human
ugucgcccagucug

SEQ ID NO: 3317746 - RNA, 15 nt, Human
ugucgcccagucugg

SEQ ID NO: 3317747 - RNA, 12 nt, Human
ugucgggcauga

SEQ ID NO: 3317748 - RNA, 15 nt, Human
ugucgggcaugacac

SEQ ID NO: 3317749 - RNA, 14 nt, Human
ugucgggcaugaca

SEQ ID NO: 3317750 - RNA, 14 nt, Human
uguccgagcuuuga

SEQ ID NO: 3317751 - RNA, 13 nt, Human
uguccgagcuuug

SEQ ID NO: 3317752 - RNA, 17 nt, Human
ugucccuuuuccuuuuu

SEQ ID NO: 3317753 - RNA, 20 nt, Human
uggggcugcaccggcuggcc

SEQ ID NO: 3317754 - RNA, 14 nt, Human
ugggguacccacug

SEQ ID NO: 3317755 - RNA, 16 nt, Human
uggggucacucuggca

SEQ ID NO: 3317756 - RNA, 18 nt, Human
uggggucacucuggcagc

SEQ ID NO: 3317757 - RNA, 17 nt, Human
uggggucacucuggcag

SEQ ID NO: 3317758 - RNA, 15 nt, Human
ugggguacccacugc

SEQ ID NO: 3317759 - RNA, 16 nt, Human
ugggguacccacugcu

SEQ ID NO: 3317760 - RNA, 20 nt, Human
ugggguacccacugcucugg

SEQ ID NO: 3317761 - RNA, 14 nt, Human
uggggcccugccuc

SEQ ID NO: 3317762 - RNA, 23 nt, Human
uggggaccucaggccugggggcu

SEQ ID NO: 3317763 - RNA, 17 nt, Human
uggggaccucaggccug

SEQ ID NO: 3317764 - RNA, 12 nt, Human
uggggagaaagu

SEQ ID NO: 3317765 - RNA, 16 nt, Human
uggggcccugccuccu

SEQ ID NO: 3317766 - RNA, 15 nt, Human
uggggcccugccucc

SEQ ID NO: 3317767 - RNA, 18 nt, Human
uggggcggugagagggga

SEQ ID NO: 3317768 - RNA, 23 nt, Human
agggcuucugccauuucugagau

SEQ ID NO: 3317769 - RNA, 15 nt, Human
ugggcucccuuccca

SEQ ID NO: 3317770 - RNA, 19 nt, Human
ugggcucccuucccaccuc

SEQ ID NO: 3317771 - RNA, 18 nt, Human
ugggcucccuucccaccu

SEQ ID NO: 3317772 - RNA, 20 nt, Human
ugggcucccuucccaccucu

SEQ ID NO: 3317773 - RNA, 19 nt, Human
ugggcuggguucuacccag

SEQ ID NO: 3317774 - RNA, 18 nt, Human
ugggcuggguucuaccca

SEQ ID NO: 3317775 - RNA, 13 nt, Human
uggggaccucagg

SEQ ID NO: 3317776 - RNA, 18 nt, Human
uggggaccagagcugcca

SEQ ID NO: 3317777 - RNA, 17 nt, Human
uggggaccagagcugcc

SEQ ID NO: 3317778 - RNA, 15 nt, Human
uggggaccagagcug

SEQ ID NO: 3317779 - RNA, 14 nt, Human
uggggaccagagcu

SEQ ID NO: 3317780 - RNA, 23 nt, Human
agggcccagagaggguggugacc

SEQ ID NO: 3317781 - RNA, 18 nt, Human
agggcccagagagggugg

SEQ ID NO: 3317782 - RNA, 17 nt, Human
agggaggugaccccagg

SEQ ID NO: 3317783 - RNA, 17 nt, Human
agggagugacagaggca

SEQ ID NO: 3317784 - RNA, 18 nt, Human
agggagugacagaggcag

SEQ ID NO: 3317785 - RNA, 19 nt, Human
agggagugacagaggcagc

SEQ ID NO: 3317786 - RNA, 15 nt, Human
agggagggcuucugc

SEQ ID NO: 3317787 - RNA, 17 nt, Human
ugggcaacccccagccu

SEQ ID NO: 3317788 - RNA, 20 nt, Human
ugggcaacccccagccugcu

SEQ ID NO: 3317789 - RNA, 20 nt, Human
ugggcccaaugcacuuuguu

SEQ ID NO: 3317790 - RNA, 16 nt, Human
ugggccaggagccucc

SEQ ID NO: 3317791 - RNA, 14 nt, Human
ugggccaggagccu

SEQ ID NO: 3317792 - RNA, 13 nt, Human
ugggccaggagcc

SEQ ID NO: 3317793 - RNA, 17 nt, Human
ugggaggucaaggcugc

SEQ ID NO: 3317794 - RNA, 23 nt, Human
ugggaggucaaggcugcagugag

SEQ ID NO: 3317795 - RNA, 20 nt, Human
ugggaggucaaggcugcagu

SEQ ID NO: 3317796 - RNA, 19 nt, Human
ugggaggucaaggcugcag

SEQ ID NO: 3317797 - RNA, 18 nt, Human
ugggaggucaaggcugca

SEQ ID NO: 3317798 - RNA, 16 nt, Human
ugggcaacccccagcc

SEQ ID NO: 3317799 - RNA, 22 nt, Human
uggguggcaccagcagccugga

SEQ ID NO: 3317800 - RNA, 22 nt, Human
ugggugcuuggaggaaggaaac

SEQ ID NO: 3317801 - RNA, 19 nt, Human
ugggugcuuggaggaagga

SEQ ID NO: 3317802 - RNA, 15 nt, Human
ugggugcuuggagga

SEQ ID NO: 3317803 - RNA, 22 nt, Human
agggucucacucugucgcccag

SEQ ID NO: 3317804 - RNA, 21 nt, Human
agggucucacucugucgccca

SEQ ID NO: 3317805 - RNA, 16 nt, Human
ugguacuaacuuuccu

SEQ ID NO: 3317806 - RNA, 19 nt, Human
uggggucacucuggcagcu

SEQ ID NO: 3317807 - RNA, 24 nt, Human
agggguucccuuuuuuggcugcug

SEQ ID NO: 3317808 - RNA, 20 nt, Human
agggucucacuauguugccc

SEQ ID NO: 3317809 - RNA, 21 nt, Human
agggucucacuauguugccca

SEQ ID NO: 3317810 - RNA, 22 nt, Human
agggucucacuauguugcccag

SEQ ID NO: 3317811 - RNA, 15 nt, Human
aggggguggccuccc

SEQ ID NO: 3317812 - RNA, 17 nt, Human
aggggguggccucccaa

SEQ ID NO: 3317813 - RNA, 22 nt, Human
aggggugggacacccugugaug

SEQ ID NO: 3317814 - RNA, 20 nt, Human
aggggugggacacccuguga

SEQ ID NO: 3317815 - RNA, 18 nt, Human
aggggugggacacccugu

SEQ ID NO: 3317816 - RNA, 12 nt, Human
aggucagagccu

SEQ ID NO: 3317817 - RNA, 17 nt, Human
aggucauuuuuuuuaag

SEQ ID NO: 3317818 - RNA, 17 nt, Human
agguagaaauaucugaa

SEQ ID NO: 3317819 - RNA, 19 nt, Human
agguagaaauaucugaaaa

SEQ ID NO: 3317820 - RNA, 18 nt, Human
aggguuggccccugcccg

SEQ ID NO: 3317821 - RNA, 23 nt, Human
aggguuggccccugcccggcugc

SEQ ID NO: 3317822 - RNA, 17 nt, Human
aggguuggccccugccc

SEQ ID NO: 3317823 - RNA, 23 nt, Human
agguagaaauaucugaaaaugua

SEQ ID NO: 3317824 - RNA, 21 nt, Human
agguaugcaaucaaaucugcu

SEQ ID NO: 3317825 - RNA, 17 nt, Human
agguaugcaaucaaauc

SEQ ID NO: 3317826 - RNA, 16 nt, Human
uggucugacccacugc

SEQ ID NO: 3317827 - RNA, 17 nt, Human
uggucugacccacugcu

SEQ ID NO: 3317828 - RNA, 21 nt, Human
aggguggugaccucugccuga

SEQ ID NO: 3317829 - RNA, 22 nt, Human
aggguguccggucccuguccca

SEQ ID NO: 3317830 - RNA, 13 nt, Human
aggguuauaauaa

SEQ ID NO: 3317831 - RNA, 15 nt, Human
uggucccaccccaca

SEQ ID NO: 3317832 - RNA, 14 nt, Human
uggucccaccccac

SEQ ID NO: 3317833 - RNA, 18 nt, Human
uggucaccaaaucagcug

SEQ ID NO: 3317834 - RNA, 22 nt, Human
uggucagauuugaacucuucaa

SEQ ID NO: 3317835 - RNA, 13 nt, Human
uggucccacccca

SEQ ID NO: 3317836 - RNA, 16 nt, Human
uggucucaaacucuug

SEQ ID NO: 3317837 - RNA, 19 nt, Human
uggucuacacugugcugag

SEQ ID NO: 3317838 - RNA, 16 nt, Human
uggucccaccccacac

SEQ ID NO: 3317839 - RNA, 17 nt, Human
uggucucaaacucuuga

SEQ ID NO: 3317840 - RNA, 23 nt, Human
uggucucaaacucuugaccucag

SEQ ID NO: 3317841 - RNA, 21 nt, Human
ugcugggauuacaagcgugag

SEQ ID NO: 3317842 - RNA, 17 nt, Human
ugcugggauuacaggug

SEQ ID NO: 3317843 - RNA, 18 nt, Human
ugcuggcuguuggcuggg

SEQ ID NO: 3317844 - RNA, 19 nt, Human
ugcugggauuacaagcgug

SEQ ID NO: 3317845 - RNA, 19 nt, Human
ugcuggcuguuggcugggg

SEQ ID NO: 3317846 - RNA, 21 nt, Human
ugcuggcuguuggcugggggc

SEQ ID NO: 3317847 - RNA, 21 nt, Human
ugcugcccugcccaccuggcc

SEQ ID NO: 3317848 - RNA, 19 nt, Human
ugcugcccugcccaccugg

SEQ ID NO: 3317849 - RNA, 11 nt, Human
ugcugcccugu

SEQ ID NO: 3317850 - RNA, 12 nt, Human
ugcugcccugcc

SEQ ID NO: 3317851 - RNA, 18 nt, Human
ugcugcccugcccaccug

SEQ ID NO: 3317852 - RNA, 17 nt, Human
ugcugcccugcccaccu

SEQ ID NO: 3317853 - RNA, 16 nt, Human
ugcugcccugcccacc

SEQ ID NO: 3317854 - RNA, 13 nt, Human
ugcugcccugccc

SEQ ID NO: 3317855 - RNA, 18 nt, Human
aggacacuaaccacgcug

SEQ ID NO: 3317856 - RNA, 23 nt, Human
ugcuucaaggauccugagccaga

SEQ ID NO: 3317857 - RNA, 21 nt, Human
ugcuucaaggauccugagcca

SEQ ID NO: 3317858 - RNA, 20 nt, Human
ugcuucaaggauccugagcc

SEQ ID NO: 3317859 - RNA, 17 nt, Human
ugcugucccuuacguga

SEQ ID NO: 3317860 - RNA, 15 nt, Human
ugcugucccuuuucc

SEQ ID NO: 3317861 - RNA, 19 nt, Human
ugcugucccuuacgugagu

SEQ ID NO: 3317862 - RNA, 17 nt, Human
ugcugucccuuuuccuu

SEQ ID NO: 3317863 - RNA, 19 nt, Human
ugcuaucucccccagcccc

SEQ ID NO: 3317864 - RNA, 18 nt, Human
ugcuaucucccccagccc

SEQ ID NO: 3317865 - RNA, 20 nt, Human
ugcuaucucccccagcccca

SEQ ID NO: 3317866 - RNA, 15 nt, Human
ugcucuggacaggca

SEQ ID NO: 3317867 - RNA, 16 nt, Human
ugcucuggacaggcau

SEQ ID NO: 3317868 - RNA, 14 nt, Human
ugcucuggacaggc

SEQ ID NO: 3317869 - RNA, 15 nt, Human
aggaaaggcuccagg

SEQ ID NO: 3317870 - RNA, 14 nt, Human
aggaaaggcuccag

SEQ ID NO: 3317871 - RNA, 13 nt, Human
aggaaaggcucca

SEQ ID NO: 3317872 - RNA, 19 nt, Human
aggaaaucaccgaaaacgu

SEQ ID NO: 3317873 - RNA, 15 nt, Human
aggaaaucaccgaaa

SEQ ID NO: 3317874 - RNA, 11 nt, Human
aggaagcacau

SEQ ID NO: 3317875 - RNA, 17 nt, Human
aggaagcacaugccucu

SEQ ID NO: 3317876 - RNA, 16 nt, Human
aggaagcacaugccuc

SEQ ID NO: 3317877 - RNA, 21 nt, Human
aggaagccagcaggcucucag

SEQ ID NO: 3317878 - RNA, 23 nt, Human
aggaagccagcaggcucucaggc

SEQ ID NO: 3317879 - RNA, 22 nt, Human
aggaagccagcaggcucucagg

SEQ ID NO: 3317880 - RNA, 20 nt, Human
aggaagccgcuggggccagu

SEQ ID NO: 3317881 - RNA, 19 nt, Human
aggaagccgcuggggccag

SEQ ID NO: 3317882 - RNA, 18 nt, Human
aggaagccgcuggggcca

SEQ ID NO: 3317883 - RNA, 18 nt, Human
aggaagccagcaggcucu

SEQ ID NO: 3317884 - RNA, 23 nt, Human
aggaaggaaacccagcucugguc

SEQ ID NO: 3317885 - RNA, 22 nt, Human
aggaaggaaacccagcucuggu

SEQ ID NO: 3317886 - RNA, 20 nt, Human
aggaaggaaacccagcucug

SEQ ID NO: 3317887 - RNA, 19 nt, Human
agcugugcucuggacaggc

SEQ ID NO: 3317888 - RNA, 20 nt, Human
agcugugcucuggacaggca

SEQ ID NO: 3317889 - RNA, 21 nt, Human
agcugugcucuggacaggcau

SEQ ID NO: 3317890 - RNA, 17 nt, Human
ugccuguucagcuccag

SEQ ID NO: 3317891 - RNA, 13 nt, Human
agcuguucagcug

SEQ ID NO: 3317892 - RNA, 18 nt, Human
ugccuguucagcuccagc

SEQ ID NO: 3317893 - RNA, 20 nt, Human
ugccuguucagcuccagcuc

SEQ ID NO: 3317894 - RNA, 19 nt, Human
ugccuguugggccaggagc

SEQ ID NO: 3317895 - RNA, 20 nt, Human
ugccuguugggccaggagcc

SEQ ID NO: 3317896 - RNA, 16 nt, Human
ugccuuauggaacacu

SEQ ID NO: 3317897 - RNA, 15 nt, Human
ugccuuauggaacac

SEQ ID NO: 3317898 - RNA, 21 nt, Human
agcugcuuuugucuaugggac

SEQ ID NO: 3317899 - RNA, 19 nt, Human
agcugccuguucagcucca

SEQ ID NO: 3317900 - RNA, 21 nt, Human
agcugcuugggcuucauccuc

SEQ ID NO: 3317901 - RNA, 21 nt, Human
agcugccuguucagcuccagc

SEQ ID NO: 3317902 - RNA, 20 nt, Human
agcugcuugggcuucauccu

SEQ ID NO: 3317903 - RNA, 20 nt, Human
agcugccuguucagcuccag

SEQ ID NO: 3317904 - RNA, 14 nt, Human
ugccuggauggggc

SEQ ID NO: 3317905 - RNA, 15 nt, Human
ugccuggauggggcu

SEQ ID NO: 3317906 - RNA, 12 nt, Human
ugcccaggcagg

SEQ ID NO: 3317907 - RNA, 13 nt, Human
ugcccaggcaggu

SEQ ID NO: 3317908 - RNA, 14 nt, Human
ugcccaggcagguc

SEQ ID NO: 3317909 - RNA, 13 nt, Human
ugccucugccucu

SEQ ID NO: 3317910 - RNA, 14 nt, Human
ugccucugccucug

SEQ ID NO: 3317911 - RNA, 13 nt, Human
ugccugcccaggc

SEQ ID NO: 3317912 - RNA, 15 nt, Human
ugccucugccucuga

SEQ ID NO: 3317913 - RNA, 14 nt, Human
ugccugcccaggcc

SEQ ID NO: 3317914 - RNA, 15 nt, Human
ugccugcccaggccc

SEQ ID NO: 3317915 - RNA, 12 nt, Human
ugccucugccuc

SEQ ID NO: 3317916 - RNA, 24 nt, Human
ugccugcccaggccccugccaccc

SEQ ID NO: 3317917 - RNA, 18 nt, Human
agcuugaggguugggcug

SEQ ID NO: 3317918 - RNA, 14 nt, Human
agcuugaggguugg

SEQ ID NO: 3317919 - RNA, 14 nt, Human
agcuguucagcugg

SEQ ID NO: 3317920 - RNA, 19 nt, Human
ugcggccuuuggcuucacg

SEQ ID NO: 3317921 - RNA, 17 nt, Human
ugcggccuuuggcuuca

SEQ ID NO: 3317922 - RNA, 20 nt, Human
ugcgggcuuccuccuggugu

SEQ ID NO: 3317923 - RNA, 17 nt, Human
ugcgguccacccaggag

SEQ ID NO: 3317924 - RNA, 18 nt, Human
ugcgguccacccaggagc

SEQ ID NO: 3317925 - RNA, 17 nt, Human
ugcggugcuaucucccc

SEQ ID NO: 3317926 - RNA, 23 nt, Human
ugcggacagccacggccaggcca

SEQ ID NO: 3317927 - RNA, 21 nt, Human
ugcggacagccacggccaggc

SEQ ID NO: 3317928 - RNA, 22 nt, Human
ugcggacagccacggccaggcc

SEQ ID NO: 3317929 - RNA, 21 nt, Human
ugcuugaggcaacucaucuua

SEQ ID NO: 3317930 - RNA, 14 nt, Human
ugcuuggaggaagg

SEQ ID NO: 3317931 - RNA, 15 nt, Human
ugcuuggaggaagga

SEQ ID NO: 3317932 - RNA, 13 nt, Human
ugcuuguacauaa

SEQ ID NO: 3317933 - RNA, 12 nt, Human
ugcuuguacaua

SEQ ID NO: 3317934 - RNA, 14 nt, Human
ugcuuuuggucugu

SEQ ID NO: 3317935 - RNA, 12 nt, Human
ugcuuugugauu

SEQ ID NO: 3317936 - RNA, 16 nt, Human
ugcuuugugauuuuug

SEQ ID NO: 3317937 - RNA, 14 nt, Human
ugcuuugugauuuu

SEQ ID NO: 3317938 - RNA, 16 nt, Human
ugcuuguacauaaugc

SEQ ID NO: 3317939 - RNA, 14 nt, Human
ugcuuguacauaau

SEQ ID NO: 3317940 - RNA, 22 nt, Human
ugcuuguacauaaugcgugcau

SEQ ID NO: 3317941 - RNA, 14 nt, Human
aggauccugagcca

SEQ ID NO: 3317942 - RNA, 13 nt, Human
aggauccugagcc

SEQ ID NO: 3317943 - RNA, 21 nt, Human
aggauacaaaagcaugugaga

SEQ ID NO: 3317944 - RNA, 17 nt, Human
uggaaaugggcagagca

SEQ ID NO: 3317945 - RNA, 22 nt, Human
uggagaagcggcuggcagccca

SEQ ID NO: 3317946 - RNA, 13 nt, Human
uggagaagcggcu

SEQ ID NO: 3317947 - RNA, 15 nt, Human
aggcacccaccauca

SEQ ID NO: 3317948 - RNA, 14 nt, Human
aggcaaugcuggcu

SEQ ID NO: 3317949 - RNA, 20 nt, Human
aggcacccaccaucaugucu

SEQ ID NO: 3317950 - RNA, 21 nt, Human
aggcacccaccaucaugucug

SEQ ID NO: 3317951 - RNA, 22 nt, Human
aggcacccaccaucaugucugg

SEQ ID NO: 3317952 - RNA, 17 nt, Human
aggcaaggcugucaauu

SEQ ID NO: 3317953 - RNA, 15 nt, Human
uggacccugaggccc

SEQ ID NO: 3317954 - RNA, 20 nt, Human
uggacccugaggcccagagg

SEQ ID NO: 3317955 - RNA, 19 nt, Human
uggacccugaggcccagag

SEQ ID NO: 3317956 - RNA, 21 nt, Human
uggacccugaggcccagaggg

SEQ ID NO: 3317957 - RNA, 23 nt, Human
uggacccuguggaugauaaaaca

SEQ ID NO: 3317958 - RNA, 18 nt, Human
uggacccugaggcccaga

SEQ ID NO: 3317959 - RNA, 16 nt, Human
uggacccugaggccca

SEQ ID NO: 3317960 - RNA, 23 nt, Human
uggacacagcucuucuccaggcu

SEQ ID NO: 3317961 - RNA, 21 nt, Human
uggacacagcucuucuccagg

SEQ ID NO: 3317962 - RNA, 22 nt, Human
uggacacagcucuucuccaggc

SEQ ID NO: 3317963 - RNA, 13 nt, Human
uggacacagcucu

SEQ ID NO: 3317964 - RNA, 14 nt, Human
uggacacagcucuu

SEQ ID NO: 3317965 - RNA, 12 nt, Human
aggaucucuuga

SEQ ID NO: 3317966 - RNA, 19 nt, Human
aggaucucuugagccuggg

SEQ ID NO: 3317967 - RNA, 18 nt, Human
aggaucucuugagccugg

SEQ ID NO: 3317968 - RNA, 17 nt, Human
aggaucucuugagccug

SEQ ID NO: 3317969 - RNA, 21 nt, Human
uggccuggccccucagggucc

SEQ ID NO: 3317970 - RNA, 18 nt, Human
uggccuggccccucaggg

SEQ ID NO: 3317971 - RNA, 12 nt, Human
uggccuggcccc

SEQ ID NO: 3317972 - RNA, 20 nt, Human
aggccugggggcugggcaga

SEQ ID NO: 3317973 - RNA, 18 nt, Human
aggccugggggcugggca

SEQ ID NO: 3317974 - RNA, 12 nt, Human
aggccuggggac

SEQ ID NO: 3317975 - RNA, 23 nt, Human
uggccgggcgcgguggcucacgc

SEQ ID NO: 3317976 - RNA, 13 nt, Human
uggccucuucaga

SEQ ID NO: 3317977 - RNA, 23 nt, Human
uggccagugugacaaggauugcu

SEQ ID NO: 3317978 - RNA, 21 nt, Human
uggccaaagccaaagcuaggc

SEQ ID NO: 3317979 - RNA, 23 nt, Human
uggccaaagccaaagcuaggccu

SEQ ID NO: 3317980 - RNA, 17 nt, Human
aggccccgcccaggcuu

SEQ ID NO: 3317981 - RNA, 13 nt, Human
uggcagccuuggc

SEQ ID NO: 3317982 - RNA, 17 nt, Human
uggcagccuuggcaaac

SEQ ID NO: 3317983 - RNA, 15 nt, Human
uggcagcucaccucu

SEQ ID NO: 3317984 - RNA, 19 nt, Human
uggcagcucaccucucccu

SEQ ID NO: 3317985 - RNA, 16 nt, Human
aggccacaagacccuu

SEQ ID NO: 3317986 - RNA, 14 nt, Human
aggccagagggagu

SEQ ID NO: 3317987 - RNA, 19 nt, Human
aggccacaagacccuugug

SEQ ID NO: 3317988 - RNA, 18 nt, Human
aggccacaagacccuugu

SEQ ID NO: 3317989 - RNA, 17 nt, Human
aggccacaagacccuug

SEQ ID NO: 3317990 - RNA, 16 nt, Human
aggccccgcccaggcu

SEQ ID NO: 3317991 - RNA, 21 nt, Human
aggcccagagggccugcaagg

SEQ ID NO: 3317992 - RNA, 20 nt, Human
aggccagagggagugacaga

SEQ ID NO: 3317993 - RNA, 16 nt, Human
aggccaaggugggagg

SEQ ID NO: 3317994 - RNA, 18 nt, Human
aggcagccaggccacaag

SEQ ID NO: 3317995 - RNA, 16 nt, Human
aggcagccccauucug

SEQ ID NO: 3317996 - RNA, 17 nt, Human
aggcagccccauucugc

SEQ ID NO: 3317997 - RNA, 15 nt, Human
aggccaaaggaagca

SEQ ID NO: 3317998 - RNA, 19 nt, Human
aggccaaaggaagcacaug

SEQ ID NO: 3317999 - RNA, 18 nt, Human
aggccaaaggaagcacau

SEQ ID NO: 3318000 - RNA, 16 nt, Human
aggccaaaggaagcac

SEQ ID NO: 3318001 - RNA, 22 nt, Human
uggauuaaacuuaaucuaaaug

SEQ ID NO: 3318002 - RNA, 13 nt, Human
uggauuguccccg

SEQ ID NO: 3318003 - RNA, 18 nt, Human
agccccuggaugcagccu

SEQ ID NO: 3318004 - RNA, 17 nt, Human
agccccuggaugcagcc

SEQ ID NO: 3318005 - RNA, 19 nt, Human
agccccuucugacccaugc

SEQ ID NO: 3318006 - RNA, 19 nt, Human
agccccuggaugcagccuc

SEQ ID NO: 3318007 - RNA, 17 nt, Human
agccccgaggccuucuc

SEQ ID NO: 3318008 - RNA, 22 nt, Human
agccccgaggccuucucugaag

SEQ ID NO: 3318009 - RNA, 16 nt, Human
agccccgaggccuucu

SEQ ID NO: 3318010 - RNA, 23 nt, Human
agccccauucugccugcccaggc

SEQ ID NO: 3318011 - RNA, 22 nt, Human
agccccaaaacucuccucugcu

SEQ ID NO: 3318012 - RNA, 21 nt, Human
agccccaaaacucuccucugc

SEQ ID NO: 3318013 - RNA, 20 nt, Human
agccccaaaacucuccucug

SEQ ID NO: 3318014 - RNA, 19 nt, Human
ugauucuccugccucagcc

SEQ ID NO: 3318015 - RNA, 15 nt, Human
ugauucuccugccuc

SEQ ID NO: 3318016 - RNA, 13 nt, Human
ugauucuccugcc

SEQ ID NO: 3318017 - RNA, 20 nt, Human
ugcacacauuuuuuaaaugc

SEQ ID NO: 3318018 - RNA, 10 nt, Human
ugcacacauu

SEQ ID NO: 3318019 - RNA, 17 nt, Human
ugcacccucaggcaggu

SEQ ID NO: 3318020 - RNA, 16 nt, Human
ugcacccucaggcagg

SEQ ID NO: 3318021 - RNA, 14 nt, Human
ugcacgugugugca

SEQ ID NO: 3318022 - RNA, 15 nt, Human
ugcacgugugugcac

SEQ ID NO: 3318023 - RNA, 22 nt, Human
agcccugguggcagugggagcu

SEQ ID NO: 3318024 - RNA, 23 nt, Human
agcccugguggcagugggagcug

SEQ ID NO: 3318025 - RNA, 15 nt, Human
ugcacaagcugcacc

SEQ ID NO: 3318026 - RNA, 14 nt, Human
ugcacaagcugcac

SEQ ID NO: 3318027 - RNA, 22 nt, Human
ugcacacaccagagcccaccuu

SEQ ID NO: 3318028 - RNA, 21 nt, Human
ugcacaagcugcacccucagg

SEQ ID NO: 3318029 - RNA, 18 nt, Human
ugcacaagcugcacccuc

SEQ ID NO: 3318030 - RNA, 24 nt, Human
agccccuucugacccaugcugccc

SEQ ID NO: 3318031 - RNA, 20 nt, Human
agccccuucugacccaugcu

SEQ ID NO: 3318032 - RNA, 21 nt, Human
agcccugguggcagugggagc

SEQ ID NO: 3318033 - RNA, 22 nt, Human
agccucagcauccuggcacccg

SEQ ID NO: 3318034 - RNA, 23 nt, Human
agccucagcauccuggcacccgg

SEQ ID NO: 3318035 - RNA, 16 nt, Human
agccucccaaagugcu

SEQ ID NO: 3318036 - RNA, 17 nt, Human
agccucagcauccuggc

SEQ ID NO: 3318037 - RNA, 19 nt, Human
agccucagcauccuggcac

SEQ ID NO: 3318038 - RNA, 20 nt, Human
agccucagcauccuggcacc

SEQ ID NO: 3318039 - RNA, 21 nt, Human
agccucagcauccuggcaccc

SEQ ID NO: 3318040 - RNA, 16 nt, Human
agccucagcauccugg

SEQ ID NO: 3318041 - RNA, 22 nt, Human
ugcacuauagccuaggugacag

SEQ ID NO: 3318042 - RNA, 23 nt, Human
ugcacuauagccuaggugacaga

SEQ ID NO: 3318043 - RNA, 23 nt, Human
agcccuucuaccuuccugcaaca

SEQ ID NO: 3318044 - RNA, 23 nt, Human
ugcagccucaaccuccugggcua

SEQ ID NO: 3318045 - RNA, 15 nt, Human
ugcagccucacaguc

SEQ ID NO: 3318046 - RNA, 13 nt, Human
ugcagccucacag

SEQ ID NO: 3318047 - RNA, 16 nt, Human
ugcagccucacagucc

SEQ ID NO: 3318048 - RNA, 14 nt, Human
ugcauaaguuaacu

SEQ ID NO: 3318049 - RNA, 18 nt, Human
agcuagacgagcaggcuu

SEQ ID NO: 3318050 - RNA, 17 nt, Human
agcgugagccacugcac

SEQ ID NO: 3318051 - RNA, 19 nt, Human
agcgugagccacugcaccg

SEQ ID NO: 3318052 - RNA, 22 nt, Human
agcgugagccacugcaccgggc

SEQ ID NO: 3318053 - RNA, 18 nt, Human
agcucaggugucccugca

SEQ ID NO: 3318054 - RNA, 17 nt, Human
agcucaggugucccugc

SEQ ID NO: 3318055 - RNA, 22 nt, Human
agcucaggugucccugcacuug

SEQ ID NO: 3318056 - RNA, 20 nt, Human
agcucaggugucccugcacu

SEQ ID NO: 3318057 - RNA, 21 nt, Human
agcucaggugucccugcacuu

SEQ ID NO: 3318058 - RNA, 14 nt, Human
agcuaggccuggcc

SEQ ID NO: 3318059 - RNA, 15 nt, Human
agcuaggccuggcca

SEQ ID NO: 3318060 - RNA, 12 nt, Human
agcuaggccugg

SEQ ID NO: 3318061 - RNA, 21 nt, Human
agcucauucuccuuguguuac

SEQ ID NO: 3318062 - RNA, 20 nt, Human
agcucauucuccuuguguua

SEQ ID NO: 3318063 - RNA, 20 nt, Human
ugcccacaggaucagucuga

SEQ ID NO: 3318064 - RNA, 19 nt, Human
ugcccacaggaucagucug

SEQ ID NO: 3318065 - RNA, 16 nt, Human
ugcccacaggaucagu

SEQ ID NO: 3318066 - RNA, 20 nt, Human
ugcccagccccuucugaccc

SEQ ID NO: 3318067 - RNA, 21 nt, Human
ugcccagccccuucugaccca

SEQ ID NO: 3318068 - RNA, 17 nt, Human
agccuuccagggguggg

SEQ ID NO: 3318069 - RNA, 16 nt, Human
agccuuccaggggugg

SEQ ID NO: 3318070 - RNA, 14 nt, Human
agccuuccaggggu

SEQ ID NO: 3318071 - RNA, 11 nt, Human
agccuuccagg

SEQ ID NO: 3318072 - RNA, 18 nt, Human
agcggagacggaguccca

SEQ ID NO: 3318073 - RNA, 20 nt, Human
agcggagaaaggaagggcug

SEQ ID NO: 3318074 - RNA, 20 nt, Human
ugcauuaucuagauacugua

SEQ ID NO: 3318075 - RNA, 16 nt, Human
agcggagaaaggaagg

SEQ ID NO: 3318076 - RNA, 18 nt, Human
ugccaaugggagcucaug

SEQ ID NO: 3318077 - RNA, 18 nt, Human
ugcauuaucuagauacug

SEQ ID NO: 3318078 - RNA, 22 nt, Human
ugcauuaucuagauacuguauc

SEQ ID NO: 3318079 - RNA, 21 nt, Human
ugcauuaucuagauacuguau

SEQ ID NO: 3318080 - RNA, 19 nt, Human
agccugugccucugggacu

SEQ ID NO: 3318081 - RNA, 21 nt, Human
agccugugccucugggacugg

SEQ ID NO: 3318082 - RNA, 22 nt, Human
agccuuagaagucacacaguau

SEQ ID NO: 3318083 - RNA, 17 nt, Human
agccugcuccagcuguu

SEQ ID NO: 3318084 - RNA, 16 nt, Human
agccugcuccagcugu

SEQ ID NO: 3318085 - RNA, 15 nt, Human
agccugcuccagcug

SEQ ID NO: 3318086 - RNA, 14 nt, Human
agccugcuccagcu

SEQ ID NO: 3318087 - RNA, 12 nt, Human
ugcauaccacuu

SEQ ID NO: 3318088 - RNA, 22 nt, Human
agccugcuccagcuguucagcu

SEQ ID NO: 3318089 - RNA, 19 nt, Human
agccugcuccagcuguuca

SEQ ID NO: 3318090 - RNA, 22 nt, Human
agccugggugacagagcaagug

SEQ ID NO: 3318091 - RNA, 15 nt, Human
ugauuaauuaaaaca

SEQ ID NO: 3318092 - RNA, 20 nt, Human
agccacugcaccgggccaca

SEQ ID NO: 3318093 - RNA, 13 nt, Human
agccacugcaccg

SEQ ID NO: 3318094 - RNA, 21 nt, Human
agccacugcaccgggccacag

SEQ ID NO: 3318095 - RNA, 22 nt, Human
agccacugcaccgggccacaga

SEQ ID NO: 3318096 - RNA, 23 nt, Human
ugauguuuuccaugaguccccug

SEQ ID NO: 3318097 - RNA, 17 nt, Human
ugauguuuuaaggaugc

SEQ ID NO: 3318098 - RNA, 20 nt, Human
ugaugauccuaggcauuugc

SEQ ID NO: 3318099 - RNA, 14 nt, Human
ugaugauccuaggc

SEQ ID NO: 3318100 - RNA, 16 nt, Human
ugauggugcaaugacc

SEQ ID NO: 3318101 - RNA, 15 nt, Human
ugauggugcaaugac

SEQ ID NO: 3318102 - RNA, 23 nt, Human
ugauggugcaaugaccuuucaau

SEQ ID NO: 3318103 - RNA, 17 nt, Human
ugauggugcaaugaccu

SEQ ID NO: 3318104 - RNA, 15 nt, Human
agccacggccaggcc

SEQ ID NO: 3318105 - RNA, 14 nt, Human
agccacggccaggc

SEQ ID NO: 3318106 - RNA, 19 nt, Human
agccaccaacauacuccca

SEQ ID NO: 3318107 - RNA, 23 nt, Human
agccaccaacauacucccaucug

SEQ ID NO: 3318108 - RNA, 20 nt, Human
agccaccaacauacucccau

SEQ ID NO: 3318109 - RNA, 18 nt, Human
agccacauuccugaugcu

SEQ ID NO: 3318110 - RNA, 14 nt, Human
agccacauuccuga

SEQ ID NO: 3318111 - RNA, 14 nt, Human
agccaggccacaag

SEQ ID NO: 3318112 - RNA, 12 nt, Human
agccaggccaca

SEQ ID NO: 3318113 - RNA, 22 nt, Human
agccaguaaaugggggugcauu

SEQ ID NO: 3318114 - RNA, 23 nt, Human
agccaguaaaugggggugcauuu

SEQ ID NO: 3318115 - RNA, 12 nt, Human
agccagggucuc

SEQ ID NO: 3318116 - RNA, 22 nt, Human
agccaggccacaagacccuugu

SEQ ID NO: 3318117 - RNA, 21 nt, Human
agccaggccacaagacccuug

SEQ ID NO: 3318118 - RNA, 14 nt, Human
ugauucagcucugc

SEQ ID NO: 3318119 - RNA, 13 nt, Human
ugauucagcucug

SEQ ID NO: 3318120 - RNA, 18 nt, Human
agcccaggaaaggcucca

SEQ ID NO: 3318121 - RNA, 24 nt, Human
agcccaggaaaggcuccaggagca

SEQ ID NO: 3318122 - RNA, 23 nt, Human
agcccaggaaaggcuccaggagc

SEQ ID NO: 3318123 - RNA, 22 nt, Human
agcccaggaaaggcuccaggag

SEQ ID NO: 3318124 - RNA, 15 nt, Human
ugauucccaagcucu

SEQ ID NO: 3318125 - RNA, 16 nt, Human
ugauucccaagcucug

SEQ ID NO: 3318126 - RNA, 18 nt, Human
ugauucccaagcucugcu

SEQ ID NO: 3318127 - RNA, 19 nt, Human
ugauucccaagcucugcuc

SEQ ID NO: 3318128 - RNA, 21 nt, Human
ugauucccaagcucugcuccu

SEQ ID NO: 3318129 - RNA, 21 nt, Human
agcccaggaaaggcuccagga

SEQ ID NO: 3318130 - RNA, 20 nt, Human
agcccaggaaaggcuccagg

SEQ ID NO: 3318131 - RNA, 19 nt, Human
agcccaggaaaggcuccag

SEQ ID NO: 3318132 - RNA, 22 nt, Human
agcccacuucugccauauucug

SEQ ID NO: 3318133 - RNA, 22 nt, Human
agcauauucaggaagcucaggg

SEQ ID NO: 3318134 - RNA, 20 nt, Human
ugaucacggcucacugcagc

SEQ ID NO: 3318135 - RNA, 12 nt, Human
agcaucaggcca

SEQ ID NO: 3318136 - RNA, 13 nt, Human
agcaucaggccag

SEQ ID NO: 3318137 - RNA, 18 nt, Human
ugaucacggcucacugca

SEQ ID NO: 3318138 - RNA, 19 nt, Human
ugaucacggcucacugcag

SEQ ID NO: 3318139 - RNA, 20 nt, Human
agcaucaggccaggcccucu

SEQ ID NO: 3318140 - RNA, 19 nt, Human
agcaucaggccaggcccuc

SEQ ID NO: 3318141 - RNA, 18 nt, Human
agcaucaggccaggcccu

SEQ ID NO: 3318142 - RNA, 17 nt, Human
agcaucaggccaggccc

SEQ ID NO: 3318143 - RNA, 16 nt, Human
agcaucaggccaggcc

SEQ ID NO: 3318144 - RNA, 14 nt, Human
agcaucaggccagg

SEQ ID NO: 3318145 - RNA, 12 nt, Human
agcauggcugcc

SEQ ID NO: 3318146 - RNA, 16 nt, Human
ugagugccuuacacaa

SEQ ID NO: 3318147 - RNA, 21 nt, Human
ugagugggugaauaauacagu

SEQ ID NO: 3318148 - RNA, 23 nt, Human
ugagugggggaucacagccucug

SEQ ID NO: 3318149 - RNA, 14 nt, Human
ugagucaccaagcc

SEQ ID NO: 3318150 - RNA, 16 nt, Human
ugagucaccaagccca

SEQ ID NO: 3318151 - RNA, 17 nt, Human
ugagucaccaagcccag

SEQ ID NO: 3318152 - RNA, 20 nt, Human
ugagugccuuacacaauggu

SEQ ID NO: 3318153 - RNA, 17 nt, Human
ugagugccuuacacaau

SEQ ID NO: 3318154 - RNA, 17 nt, Human
ugaguucauacccuguu

SEQ ID NO: 3318155 - RNA, 20 nt, Human
ugauaagaaccuuuugagug

SEQ ID NO: 3318156 - RNA, 17 nt, Human
ugauacuacaguuuguu

SEQ ID NO: 3318157 - RNA, 14 nt, Human
ugauacuacaguuu

SEQ ID NO: 3318158 - RNA, 21 nt, Human
ugauacaaugcugugcccuaa

SEQ ID NO: 3318159 - RNA, 20 nt, Human
ugauacaaugcugugcccua

SEQ ID NO: 3318160 - RNA, 18 nt, Human
ugauacaaugcugugccc

SEQ ID NO: 3318161 - RNA, 21 nt, Human
agcauacguacacauuuuauu

SEQ ID NO: 3318162 - RNA, 20 nt, Human
agcauacguacacauuuuau

SEQ ID NO: 3318163 - RNA, 19 nt, Human
agcauacguacacauuuua

SEQ ID NO: 3318164 - RNA, 18 nt, Human
agcauacguacacauuuu

SEQ ID NO: 3318165 - RNA, 17 nt, Human
agcauacguacacauuu

SEQ ID NO: 3318166 - RNA, 16 nt, Human
agcauacguacacauu

SEQ ID NO: 3318167 - RNA, 15 nt, Human
agcauacguacacau

SEQ ID NO: 3318168 - RNA, 12 nt, Human
ugagaauuaccc

SEQ ID NO: 3318169 - RNA, 15 nt, Human
ugaguacuacagucc

SEQ ID NO: 3318170 - RNA, 14 nt, Human
agcauauucaggaa

SEQ ID NO: 3318171 - RNA, 14 nt, Human
ugaguacuacaguc

SEQ ID NO: 3318172 - RNA, 23 nt, Human
ugaguacuacaguccucccaucu

SEQ ID NO: 3318173 - RNA, 22 nt, Human
ugaguacuacaguccucccauc

SEQ ID NO: 3318174 - RNA, 21 nt, Human
ugaguacuacaguccucccau

SEQ ID NO: 3318175 - RNA, 17 nt, Human
ugaguacuacaguccuc

SEQ ID NO: 3318176 - RNA, 13 nt, Human
uucacaguucucu

SEQ ID NO: 3318177 - RNA, 20 nt, Human
uucacaguucucuccuucuu

SEQ ID NO: 3318178 - RNA, 15 nt, Human
uucacaguucucucc

SEQ ID NO: 3318179 - RNA, 20 nt, Human
uucacagaugggugcuugga

SEQ ID NO: 3318180 - RNA, 17 nt, Human
auaggaaaaacugauuu

SEQ ID NO: 3318181 - RNA, 16 nt, Human
auaggaaaaacugauu

SEQ ID NO: 3318182 - RNA, 14 nt, Human
auaggaaaaacuga

SEQ ID NO: 3318183 - RNA, 12 nt, Human
auaggaaaaacu

SEQ ID NO: 3318184 - RNA, 17 nt, Human
uuauuuuuagacagagu

SEQ ID NO: 3318185 - RNA, 18 nt, Human
uuauuuuuagacagaguc

SEQ ID NO: 3318186 - RNA, 21 nt, Human
uucaagcgauucuucugcuuc

SEQ ID NO: 3318187 - RNA, 22 nt, Human
auaguuggcuaggaccccucca

SEQ ID NO: 3318188 - RNA, 22 nt, Human
auaguuaagcgugcauaaguua

SEQ ID NO: 3318189 - RNA, 15 nt, Human
auaguggugugauuu

SEQ ID NO: 3318190 - RNA, 17 nt, Human
auaguggcuuaaaacaa

SEQ ID NO: 3318191 - RNA, 13 nt, Human
auauauaaccagu

SEQ ID NO: 3318192 - RNA, 12 nt, Human
auauauaaccag

SEQ ID NO: 3318193 - RNA, 16 nt, Human
auaucugaaaauguau

SEQ ID NO: 3318194 - RNA, 17 nt, Human
auaucugaaaauguaug

SEQ ID NO: 3318195 - RNA, 20 nt, Human
auaucugaaaauguaugugu

SEQ ID NO: 3318196 - RNA, 13 nt, Human
auaugcacacauu

SEQ ID NO: 3318197 - RNA, 16 nt, Human
auaugcacacauuuuu

SEQ ID NO: 3318198 - RNA, 15 nt, Human
auaugcacacauuuu

SEQ ID NO: 3318199 - RNA, 14 nt, Human
auaugcacacauuu

SEQ ID NO: 3318200 - RNA, 17 nt, Human
auauguaacaagccacc

SEQ ID NO: 3318201 - RNA, 16 nt, Human
auauguaacaagccac

SEQ ID NO: 3318202 - RNA, 17 nt, Human
uucaucccucuggggcu

SEQ ID NO: 3318203 - RNA, 21 nt, Human
uucaucccucuggggcuguuc

SEQ ID NO: 3318204 - RNA, 13 nt, Human
uucagugccuuau

SEQ ID NO: 3318205 - RNA, 12 nt, Human
uucagugccuua

SEQ ID NO: 3318206 - RNA, 16 nt, Human
uucagugccaaaaaca

SEQ ID NO: 3318207 - RNA, 11 nt, Human
uucagaaaugu

SEQ ID NO: 3318208 - RNA, 13 nt, Human
uucccaagcucug

SEQ ID NO: 3318209 - RNA, 14 nt, Human
uucccaagcucugc

SEQ ID NO: 3318210 - RNA, 15 nt, Human
uucccaagcucugcu

SEQ ID NO: 3318211 - RNA, 16 nt, Human
uucccaagcucugcuc

SEQ ID NO: 3318212 - RNA, 18 nt, Human
uucccaagcucugcuccu

SEQ ID NO: 3318213 - RNA, 22 nt, Human
uucccaccucucucacuccuug

SEQ ID NO: 3318214 - RNA, 12 nt, Human
uucccaccucuc

SEQ ID NO: 3318215 - RNA, 23 nt, Human
uucccaaagcagugcaugcuguc

SEQ ID NO: 3318216 - RNA, 22 nt, Human
uuccagugaggcucugcccuug

SEQ ID NO: 3318217 - RNA, 21 nt, Human
uuccagugaggcucugcccuu

SEQ ID NO: 3318218 - RNA, 20 nt, Human
uuccagugaggcucugcccu

SEQ ID NO: 3318219 - RNA, 19 nt, Human
uuccagugaggcucugccc

SEQ ID NO: 3318220 - RNA, 17 nt, Human
uuccagugaggcucugc

SEQ ID NO: 3318221 - RNA, 21 nt, Human
uuccaggggugggacacccug

SEQ ID NO: 3318222 - RNA, 17 nt, Human
uuccaggggugggacac

SEQ ID NO: 3318223 - RNA, 18 nt, Human
uuccaccaucaagccacc

SEQ ID NO: 3318224 - RNA, 22 nt, Human
uuccacaagagcccaggccucc

SEQ ID NO: 3318225 - RNA, 19 nt, Human
uuccaccaucaagccacca

SEQ ID NO: 3318226 - RNA, 16 nt, Human
auauguggaguucauc

SEQ ID NO: 3318227 - RNA, 15 nt, Human
auauguggaguucau

SEQ ID NO: 3318228 - RNA, 15 nt, Human
uuccaaggguacuaa

SEQ ID NO: 3318229 - RNA, 17 nt, Human
uuccaaggguacuaagg

SEQ ID NO: 3318230 - RNA, 21 nt, Human
uucucacugccaugccagcuu

SEQ ID NO: 3318231 - RNA, 13 nt, Human
aucaggccaggcc

SEQ ID NO: 3318232 - RNA, 21 nt, Human
uucgcaggauucuuccucccu

SEQ ID NO: 3318233 - RNA, 19 nt, Human
aucaaccccuucgcuccug

SEQ ID NO: 3318234 - RNA, 20 nt, Human
aucaaccccuucgcuccugu

SEQ ID NO: 3318235 - RNA, 22 nt, Human
aucaaccccuucgcuccugugu

SEQ ID NO: 3318236 - RNA, 18 nt, Human
uucccuuuuuuggcugcu

SEQ ID NO: 3318237 - RNA, 19 nt, Human
uucccuuuuuuggcugcug

SEQ ID NO: 3318238 - RNA, 13 nt, Human
auccuaguuccac

SEQ ID NO: 3318239 - RNA, 21 nt, Human
auccuaggcauuugcugaaua

SEQ ID NO: 3318240 - RNA, 21 nt, Human
auccuaagcuauucaguaaua

SEQ ID NO: 3318241 - RNA, 20 nt, Human
uugaaauauaggaacuuaaa

SEQ ID NO: 3318242 - RNA, 11 nt, Human
uugaaaucuuu

SEQ ID NO: 3318243 - RNA, 21 nt, Human
uugaaauuuuuauuaaauuau

SEQ ID NO: 3318244 - RNA, 20 nt, Human
uucuguuuuucuaggccugg

SEQ ID NO: 3318245 - RNA, 11 nt, Human
uucuguucuuu

SEQ ID NO: 3318246 - RNA, 18 nt, Human
uucuguucuuucuggcua

SEQ ID NO: 3318247 - RNA, 13 nt, Human
uucuuaauucuua

SEQ ID NO: 3318248 - RNA, 23 nt, Human
uucuuccucccucccucuuuccc

SEQ ID NO: 3318249 - RNA, 12 nt, Human
uucuugcaaagu

SEQ ID NO: 3318250 - RNA, 22 nt, Human
uucuuucuggcuaugcauuuga

SEQ ID NO: 3318251 - RNA, 21 nt, Human
auccaagcuggucccacucag

SEQ ID NO: 3318252 - RNA, 15 nt, Human
uucugccgcagcccu

SEQ ID NO: 3318253 - RNA, 14 nt, Human
uucugccgcagccc

SEQ ID NO: 3318254 - RNA, 20 nt, Human
uucuggcuaugcauuugaaa

SEQ ID NO: 3318255 - RNA, 18 nt, Human
uucuggcuaugcauuuga

SEQ ID NO: 3318256 - RNA, 16 nt, Human
uucuggcuaugcauuu

SEQ ID NO: 3318257 - RNA, 13 nt, Human
uucugccgcagcc

SEQ ID NO: 3318258 - RNA, 14 nt, Human
uucugacccaugcu

SEQ ID NO: 3318259 - RNA, 16 nt, Human
uucucuuuucaaaaca

SEQ ID NO: 3318260 - RNA, 17 nt, Human
uucucuacucuagggaa

SEQ ID NO: 3318261 - RNA, 20 nt, Human
aucaggccaggcccucugcc

SEQ ID NO: 3318262 - RNA, 20 nt, Human
aucauugaaaucuuuuugcu

SEQ ID NO: 3318263 - RNA, 23 nt, Human
aucaggccaggcccucugcccac

SEQ ID NO: 3318264 - RNA, 22 nt, Human
aucaggccaggcccucugccca

SEQ ID NO: 3318265 - RNA, 21 nt, Human
aucaggccaggcccucugccc

SEQ ID NO: 3318266 - RNA, 21 nt, Human
aucauugaaaucuuuuugcuu

SEQ ID NO: 3318267 - RNA, 15 nt, Human
augcagccucacagu

SEQ ID NO: 3318268 - RNA, 14 nt, Human
augcagccucacag

SEQ ID NO: 3318269 - RNA, 13 nt, Human
augcagccucaca

SEQ ID NO: 3318270 - RNA, 15 nt, Human
augcacuuuguucug

SEQ ID NO: 3318271 - RNA, 13 nt, Human
uuguuuucagugu

SEQ ID NO: 3318272 - RNA, 16 nt, Human
uuguuuucaguguaca

SEQ ID NO: 3318273 - RNA, 14 nt, Human
uuuaagaggcaggg

SEQ ID NO: 3318274 - RNA, 23 nt, Human
uuuaaugaaagacuguacaaagu

SEQ ID NO: 3318275 - RNA, 17 nt, Human
uuuaagugcugcauuua

SEQ ID NO: 3318276 - RNA, 16 nt, Human
uuuaagugcugcauuu

SEQ ID NO: 3318277 - RNA, 15 nt, Human
uuuaagugcugcauu

SEQ ID NO: 3318278 - RNA, 12 nt, Human
uuuaauucaguu

SEQ ID NO: 3318279 - RNA, 21 nt, Human
augauucaacagguuuuccug

SEQ ID NO: 3318280 - RNA, 21 nt, Human
augauuaaccacuucagcuga

SEQ ID NO: 3318281 - RNA, 20 nt, Human
augauuaaccacuucagcug

SEQ ID NO: 3318282 - RNA, 19 nt, Human
augauuaaccacuucagcu

SEQ ID NO: 3318283 - RNA, 12 nt, Human
augcacuuuguu

SEQ ID NO: 3318284 - RNA, 13 nt, Human
augcaccagcccu

SEQ ID NO: 3318285 - RNA, 21 nt, Human
uugugaggaagccgcuggggc

SEQ ID NO: 3318286 - RNA, 18 nt, Human
uugugauacaaugcugug

SEQ ID NO: 3318287 - RNA, 13 nt, Human
uugugguuaaucu

SEQ ID NO: 3318288 - RNA, 19 nt, Human
uuguucuggcucuuccagg

SEQ ID NO: 3318289 - RNA, 17 nt, Human
uuguguguuuauuguca

SEQ ID NO: 3318290 - RNA, 22 nt, Human
uuguucuggcucuuccaggcug

SEQ ID NO: 3318291 - RNA, 20 nt, Human
uuguucuggcucuuccaggc

SEQ ID NO: 3318292 - RNA, 19 nt, Human
augcuccuggcccacugca

SEQ ID NO: 3318293 - RNA, 22 nt, Human
augcuguaacuuucugaaauaa

SEQ ID NO: 3318294 - RNA, 23 nt, Human
augcugucccuuacgugaguccu

SEQ ID NO: 3318295 - RNA, 19 nt, Human
augcugucccuuacgugag

SEQ ID NO: 3318296 - RNA, 15 nt, Human
auggaagacagcucu

SEQ ID NO: 3318297 - RNA, 16 nt, Human
auggaacacucugaga

SEQ ID NO: 3318298 - RNA, 15 nt, Human
auggaacacucugag

SEQ ID NO: 3318299 - RNA, 14 nt, Human
auggaacacucuga

SEQ ID NO: 3318300 - RNA, 11 nt, Human
auggaacacuc

SEQ ID NO: 3318301 - RNA, 20 nt, Human
uuuauggcuuuugugcauua

SEQ ID NO: 3318302 - RNA, 24 nt, Human
uuuauggcuuuugugcauuaucua

SEQ ID NO: 3318303 - RNA, 15 nt, Human
uuuaguagagacagg

SEQ ID NO: 3318304 - RNA, 18 nt, Human
auggcuaauguacugcau

SEQ ID NO: 3318305 - RNA, 20 nt, Human
auggccuuugcuugaaagaa

SEQ ID NO: 3318306 - RNA, 21 nt, Human
auggccgggcgcgguggcuca

SEQ ID NO: 3318307 - RNA, 23 nt, Human
auggcacaucagcacgauuucug

SEQ ID NO: 3318308 - RNA, 17 nt, Human
auggcacaucagcacga

SEQ ID NO: 3318309 - RNA, 20 nt, Human
auggacguguuaugacucca

SEQ ID NO: 3318310 - RNA, 19 nt, Human
auggacguguuaugacucc

SEQ ID NO: 3318311 - RNA, 23 nt, Human
auggacguguuaugacuccagaa

SEQ ID NO: 3318312 - RNA, 18 nt, Human
auggauuuccagccaaag

SEQ ID NO: 3318313 - RNA, 16 nt, Human
auggaagacagcucuu

SEQ ID NO: 3318314 - RNA, 13 nt, Human
uuucagaaaugug

SEQ ID NO: 3318315 - RNA, 14 nt, Human
auggacaugaucuu

SEQ ID NO: 3318316 - RNA, 20 nt, Human
augaaugucagugugacuga

SEQ ID NO: 3318317 - RNA, 14 nt, Human
uuggggauauuuuu

SEQ ID NO: 3318318 - RNA, 22 nt, Human
uuggggggcugaggugggagga

SEQ ID NO: 3318319 - RNA, 18 nt, Human
aucuuugcagacaggcaa

SEQ ID NO: 3318320 - RNA, 18 nt, Human
uuggcuagagguucaaag

SEQ ID NO: 3318321 - RNA, 23 nt, Human
uuggcgcugccccuggcagcccc

SEQ ID NO: 3318322 - RNA, 22 nt, Human
uuggcgcugccccuggcagccc

SEQ ID NO: 3318323 - RNA, 21 nt, Human
augagaaagguugaagcacca

SEQ ID NO: 3318324 - RNA, 22 nt, Human
augagaaagguugaagcaccaa

SEQ ID NO: 3318325 - RNA, 17 nt, Human
augacuuacuguacaug

SEQ ID NO: 3318326 - RNA, 16 nt, Human
augacuuacuguacau

SEQ ID NO: 3318327 - RNA, 18 nt, Human
augacacgaauauugcug

SEQ ID NO: 3318328 - RNA, 22 nt, Human
augacuuaagcacacuugacau

SEQ ID NO: 3318329 - RNA, 14 nt, Human
augacuuacuguac

SEQ ID NO: 3318330 - RNA, 22 nt, Human
augacacaugcaaggucauuuu

SEQ ID NO: 3318331 - RNA, 14 nt, Human
augacacaugcaag

SEQ ID NO: 3318332 - RNA, 23 nt, Human
aucugugaaaggaaagagggagg

SEQ ID NO: 3318333 - RNA, 19 nt, Human
aucuggguucacugcaacc

SEQ ID NO: 3318334 - RNA, 17 nt, Human
aucuggguucacugcaa

SEQ ID NO: 3318335 - RNA, 18 nt, Human
aucuugaauuguaaggaa

SEQ ID NO: 3318336 - RNA, 17 nt, Human
aucuugaauuguaagga

SEQ ID NO: 3318337 - RNA, 17 nt, Human
aucuugcucugcugaca

SEQ ID NO: 3318338 - RNA, 19 nt, Human
aucuugcucugcugacaga

SEQ ID NO: 3318339 - RNA, 13 nt, Human
uugccgucuaccu

SEQ ID NO: 3318340 - RNA, 18 nt, Human
uugccgucuaccugaggg

SEQ ID NO: 3318341 - RNA, 15 nt, Human
uugccgucuaccuga

SEQ ID NO: 3318342 - RNA, 19 nt, Human
uugccgucuaccugagggg

SEQ ID NO: 3318343 - RNA, 14 nt, Human
uugccguuauuaaa

SEQ ID NO: 3318344 - RNA, 14 nt, Human
uugauucagacagc

SEQ ID NO: 3318345 - RNA, 16 nt, Human
uugauucagacagcug

SEQ ID NO: 3318346 - RNA, 15 nt, Human
uugauucagacagcu

SEQ ID NO: 3318347 - RNA, 13 nt, Human
aucucccccagcc

SEQ ID NO: 3318348 - RNA, 12 nt, Human
aucucccccagc

SEQ ID NO: 3318349 - RNA, 15 nt, Human
aucucacacaugagc

SEQ ID NO: 3318350 - RNA, 19 nt, Human
auccuaguuccaccaucaa

SEQ ID NO: 3318351 - RNA, 15 nt, Human
auccuaguuccacca

SEQ ID NO: 3318352 - RNA, 20 nt, Human
auuccccagauugcaacagg

SEQ ID NO: 3318353 - RNA, 22 nt, Human
auuccccacccugaaagcccug

SEQ ID NO: 3318354 - RNA, 16 nt, Human
auuccccaggaggcca

SEQ ID NO: 3318355 - RNA, 20 nt, Human
auucaggaagcucagggccu

SEQ ID NO: 3318356 - RNA, 21 nt, Human
auucaguuguuagugugucuu

SEQ ID NO: 3318357 - RNA, 16 nt, Human
auucaguuguuagugu

SEQ ID NO: 3318358 - RNA, 23 nt, Human
auucaggaagcucagggccuggc

SEQ ID NO: 3318359 - RNA, 22 nt, Human
auucaggaagcucagggccugg

SEQ ID NO: 3318360 - RNA, 21 nt, Human
auucaggaagcucagggccug

SEQ ID NO: 3318361 - RNA, 18 nt, Human
auucagcucugcaagaau

SEQ ID NO: 3318362 - RNA, 14 nt, Human
auucagcucugcaa

SEQ ID NO: 3318363 - RNA, 13 nt, Human
auuagagaagaga

SEQ ID NO: 3318364 - RNA, 23 nt, Human
auuauuuauuaaaugcccagccc

SEQ ID NO: 3318365 - RNA, 22 nt, Human
uuuuuguuccacaaguuaaaua

SEQ ID NO: 3318366 - RNA, 19 nt, Human
auuaccacagacauacuaa

SEQ ID NO: 3318367 - RNA, 22 nt, Human
auuaccugaauuuuggcugugu

SEQ ID NO: 3318368 - RNA, 13 nt, Human
uuuguagagccag

SEQ ID NO: 3318369 - RNA, 22 nt, Human
uuuguaaauuaacuuuuauaaa

SEQ ID NO: 3318370 - RNA, 12 nt, Human
uuuguuugaacu

SEQ ID NO: 3318371 - RNA, 14 nt, Human
uuuguuugaacuga

SEQ ID NO: 3318372 - RNA, 13 nt, Human
uuuguuugaacug

SEQ ID NO: 3318373 - RNA, 19 nt, Human
uuugugaggaagccgcugg

SEQ ID NO: 3318374 - RNA, 18 nt, Human
uuugugaggaagccgcug

SEQ ID NO: 3318375 - RNA, 15 nt, Human
uuuuaagaggcaggg

SEQ ID NO: 3318376 - RNA, 16 nt, Human
uuuuaagaggcagggu

SEQ ID NO: 3318377 - RNA, 15 nt, Human
uuuuaagugcugcau

SEQ ID NO: 3318378 - RNA, 18 nt, Human
uuuguuugaacugauaaa

SEQ ID NO: 3318379 - RNA, 21 nt, Human
uuuuaaaaaacugcugacugu

SEQ ID NO: 3318380 - RNA, 12 nt, Human
auguauguguaa

SEQ ID NO: 3318381 - RNA, 15 nt, Human
auguaucugagcagg

SEQ ID NO: 3318382 - RNA, 15 nt, Human
auguaucaaugagua

SEQ ID NO: 3318383 - RNA, 22 nt, Human
uuugggggaaaauuuagaaaua

SEQ ID NO: 3318384 - RNA, 21 nt, Human
augucagugugacugaucucu

SEQ ID NO: 3318385 - RNA, 16 nt, Human
augucagugugacuga

SEQ ID NO: 3318386 - RNA, 15 nt, Human
augucagugugacug

SEQ ID NO: 3318387 - RNA, 23 nt, Human
auguccaagaagcccaggaaagg

SEQ ID NO: 3318388 - RNA, 18 nt, Human
auguccaagaagcccagg

SEQ ID NO: 3318389 - RNA, 19 nt, Human
auguccaagaagcccagga

SEQ ID NO: 3318390 - RNA, 23 nt, Human
augucucuuuaaugucacaggca

SEQ ID NO: 3318391 - RNA, 22 nt, Human
uuugccauguuggccaggcugg

SEQ ID NO: 3318392 - RNA, 13 nt, Human
uuuggggaagaac

SEQ ID NO: 3318393 - RNA, 22 nt, Human
uuugggaggccaaggugggagg

SEQ ID NO: 3318394 - RNA, 14 nt, Human
uuuggggauauuuu

SEQ ID NO: 3318395 - RNA, 21 nt, Human
auguucaucauccuaagcuau

SEQ ID NO: 3318396 - RNA, 21 nt, Human
uuuuaagugcugcauuuaaaa

SEQ ID NO: 3318397 - RNA, 17 nt, Human
uuuuaagugcugcauuu

SEQ ID NO: 3318398 - RNA, 16 nt, Human
uuuuaagugcugcauu

SEQ ID NO: 3318399 - RNA, 13 nt, Human
auguuggccaggc

SEQ ID NO: 3318400 - RNA, 14 nt, Human
auguuggccaggcu

SEQ ID NO: 3318401 - RNA, 23 nt, Human
uuuuagaguugauacuacaguuu

SEQ ID NO: 3318402 - RNA, 13 nt, Human
uuuuauaaacuuu

SEQ ID NO: 3318403 - RNA, 12 nt, Human
uuuuauaaacuu

SEQ ID NO: 3318404 - RNA, 19 nt, Human
uuuuauaaacuuuaccuuu

SEQ ID NO: 3318405 - RNA, 17 nt, Human
uuuuauaaacuuuaccu

SEQ ID NO: 3318406 - RNA, 14 nt, Human
uuuuauaaacuuua

SEQ ID NO: 3318407 - RNA, 19 nt, Human
uuuuccagguuuaagcugu

SEQ ID NO: 3318408 - RNA, 14 nt, Human
auguuuuccaugag

SEQ ID NO: 3318409 - RNA, 18 nt, Human
auguuuuucuucucccuc

SEQ ID NO: 3318410 - RNA, 17 nt, Human
auguuuuucuucucccu

SEQ ID NO: 3318411 - RNA, 13 nt, Human
auuaagaaagacu

SEQ ID NO: 3318412 - RNA, 14 nt, Human
auuaagaaagacua

SEQ ID NO: 3318413 - RNA, 23 nt, Human
auuaacuuuuauaaacuuuaccu

SEQ ID NO: 3318414 - RNA, 12 nt, Human
auuaacuuuuau

SEQ ID NO: 3318415 - RNA, 20 nt, Human
auuaacuuuuauaaacuuua

SEQ ID NO: 3318416 - RNA, 19 nt, Human
auuaacuuuuauaaacuuu

SEQ ID NO: 3318417 - RNA, 17 nt, Human
auuaacuuuuauaaacu

SEQ ID NO: 3318418 - RNA, 16 nt, Human
auuaacuuuuauaaac

SEQ ID NO: 3318419 - RNA, 20 nt, Human
auuaaccacuucagcugacu

SEQ ID NO: 3318420 - RNA, 18 nt, Human
auuaaccacuucagcuga

SEQ ID NO: 3318421 - RNA, 17 nt, Human
auuaaccacuucagcug

SEQ ID NO: 3318422 - RNA, 21 nt, Human
auuaaacuuaaucuaaaugga

SEQ ID NO: 3318423 - RNA, 19 nt, Human
auuaaacuuaaucuaaaug

SEQ ID NO: 3318424 - RNA, 16 nt, Human
auuaaacuuaaucuaa

SEQ ID NO: 3318425 - RNA, 17 nt, Human
auuaaacuuaaucuaaa

SEQ ID NO: 3318426 - RNA, 23 nt, Human
auuggcuuuggguugcaggaccu

SEQ ID NO: 3318427 - RNA, 16 nt, Human
auuuaacagaaaugua

SEQ ID NO: 3318428 - RNA, 15 nt, Human
auuuaacagaaaugu

SEQ ID NO: 3318429 - RNA, 20 nt, Human
auuuaacagaaauguacagc

SEQ ID NO: 3318430 - RNA, 19 nt, Human
auuuaacagaaauguacag

SEQ ID NO: 3318431 - RNA, 17 nt, Human
auuuaacagaaauguac

SEQ ID NO: 3318432 - RNA, 19 nt, Human
auuuaauuuuuuugagaca

SEQ ID NO: 3318433 - RNA, 23 nt, Human
auuuaauuuuuuugagacagagu

SEQ ID NO: 3318434 - RNA, 17 nt, Human
auucuccaccugccagg

SEQ ID NO: 3318435 - RNA, 16 nt, Human
auucuccaccugccag

SEQ ID NO: 3318436 - RNA, 13 nt, Human
auucuccaccugc

SEQ ID NO: 3318437 - RNA, 18 nt, Human
auucucagaaucucaaau

SEQ ID NO: 3318438 - RNA, 20 nt, Human
auucucagaaucucaaauaa

SEQ ID NO: 3318439 - RNA, 14 nt, Human
auucucagaaucuc

SEQ ID NO: 3318440 - RNA, 13 nt, Human
auucuacuuugag

SEQ ID NO: 3318441 - RNA, 16 nt, Human
auucuacuuugagugc

SEQ ID NO: 3318442 - RNA, 13 nt, Human
auugaccugaggc

SEQ ID NO: 3318443 - RNA, 15 nt, Human
auugcaacaggcugg

SEQ ID NO: 3318444 - RNA, 21 nt, Human
auugcaacaggcugggcuuca

SEQ ID NO: 3318445 - RNA, 23 nt, Human
auugccauuucuuccacaagagc

SEQ ID NO: 3318446 - RNA, 17 nt, Human
auugcccacgcuggagu

SEQ ID NO: 3318447 - RNA, 21 nt, Human
auugcccacgcuggagugcag

SEQ ID NO: 3318448 - RNA, 16 nt, Human
auugcggacagccacg

SEQ ID NO: 3318449 - RNA, 18 nt, Human
auugcggacagccacggc

SEQ ID NO: 3318450 - RNA, 19 nt, Human
auugcggacagccacggcc

SEQ ID NO: 3318451 - RNA, 17 nt, Human
auuuuauuaugcaugaa

SEQ ID NO: 3318452 - RNA, 15 nt, Human
auuuuauuaugcaug

SEQ ID NO: 3318453 - RNA, 14 nt, Human
auuuuauuaugcau

SEQ ID NO: 3318454 - RNA, 13 nt, Human
auuuuauuaugca

SEQ ID NO: 3318455 - RNA, 17 nt, Human
auuuggugguuucagaa

SEQ ID NO: 3318456 - RNA, 20 nt, Human
auuuggugguuucagaaaug

SEQ ID NO: 3318457 - RNA, 18 nt, Human
auuuggugguuucagaaa

SEQ ID NO: 3318458 - RNA, 17 nt, Human
auuugagcagggcucag

SEQ ID NO: 3318459 - RNA, 23 nt, Human
auuugaggucuguucuuuccaaa

SEQ ID NO: 3318460 - RNA, 22 nt, Human
auuugaggucuguucuuuccaa

SEQ ID NO: 3318461 - RNA, 20 nt, Human
auuucuuuugccguuauuaa

SEQ ID NO: 3318462 - RNA, 16 nt, Human
auuugagcagggcuca

SEQ ID NO: 3318463 - RNA, 20 nt, Human
auuuauuaaaugcccagccc

SEQ ID NO: 3318464 - RNA, 13 nt, Human
auuuauuauggca

SEQ ID NO: 3318465 - RNA, 21 nt, Human
auuucuaaaucuccaaaauaa

SEQ ID NO: 3318466 - RNA, 13 nt, Human
auuucuaaaucuc

SEQ ID NO: 3318467 - RNA, 12 nt, Human
auuucuaaaucu

SEQ ID NO: 3318468 - RNA, 14 nt, Human
auuuccugugucuu

SEQ ID NO: 3318469 - RNA, 16 nt, Human
auuuauuauggcacau

SEQ ID NO: 3318470 - RNA, 23 nt, Human
auuucuuuugccguuauuaaaaa

SEQ ID NO: 3318471 - RNA, 13 nt, Human
caagaagcccagg

SEQ ID NO: 3318472 - RNA, 13 nt, Human
caagacgcugugc

SEQ ID NO: 3318473 - RNA, 23 nt, Human
caagaccuucuccuucaccuuug

SEQ ID NO: 3318474 - RNA, 21 nt, Human
caagaccuucuccuucaccuu

SEQ ID NO: 3318475 - RNA, 22 nt, Human
caaauggaaaugggcagagcag

SEQ ID NO: 3318476 - RNA, 23 nt, Human
caaauggaaaugggcagagcaga

SEQ ID NO: 3318477 - RNA, 13 nt, Human
caaagugcuggga

SEQ ID NO: 3318478 - RNA, 19 nt, Human
caaagugcugggauuacaa

SEQ ID NO: 3318479 - RNA, 19 nt, Human
caaaguggugagaggcauc

SEQ ID NO: 3318480 - RNA, 23 nt, Human
caaagugcugggauuacaagcgu

SEQ ID NO: 3318481 - RNA, 14 nt, Human
caaauuucuaaauc

SEQ ID NO: 3318482 - RNA, 22 nt, Human
caaauuucuaaaucuccaaaau

SEQ ID NO: 3318483 - RNA, 15 nt, Human
caaauuucuaaaucu

SEQ ID NO: 3318484 - RNA, 16 nt, Human
caacauacucccaucu

SEQ ID NO: 3318485 - RNA, 20 nt, Human
caacauacucccaucuguga

SEQ ID NO: 3318486 - RNA, 12 nt, Human
caacaggcuggg

SEQ ID NO: 3318487 - RNA, 19 nt, Human
caacauacucccaucugug

SEQ ID NO: 3318488 - RNA, 17 nt, Human
caacauacucccaucug

SEQ ID NO: 3318489 - RNA, 20 nt, Human
caaaauaaaacuuuuuaaaa

SEQ ID NO: 3318490 - RNA, 16 nt, Human
caaaauaaaacuuuuu

SEQ ID NO: 3318491 - RNA, 14 nt, Human
caaaauaaaacuuu

SEQ ID NO: 3318492 - RNA, 21 nt, Human
caaaaucgaugcagugcuucc

SEQ ID NO: 3318493 - RNA, 14 nt, Human
caaaaguuucucuu

SEQ ID NO: 3318494 - RNA, 23 nt, Human
caaaacucuccucugcugcuggc

SEQ ID NO: 3318495 - RNA, 16 nt, Human
caaaacucuccucugc

SEQ ID NO: 3318496 - RNA, 15 nt, Human
caaaacucuccucug

SEQ ID NO: 3318497 - RNA, 18 nt, Human
auuuuauuuuauuaugca

SEQ ID NO: 3318498 - RNA, 21 nt, Human
caaaacgguuuuacugcagcu

SEQ ID NO: 3318499 - RNA, 15 nt, Human
caaaacgguuuuacu

SEQ ID NO: 3318500 - RNA, 21 nt, Human
caaacucuugaccucagguga

SEQ ID NO: 3318501 - RNA, 17 nt, Human
caaacucuugaccucag

SEQ ID NO: 3318502 - RNA, 19 nt, Human
caaacucuugaccucaggu

SEQ ID NO: 3318503 - RNA, 20 nt, Human
caaacucuugaccucaggug

SEQ ID NO: 3318504 - RNA, 22 nt, Human
caaaaugaaacgcaaccaccac

SEQ ID NO: 3318505 - RNA, 11 nt, Human
caaaaugaaac

SEQ ID NO: 3318506 - RNA, 13 nt, Human
caaacagaggccg

SEQ ID NO: 3318507 - RNA, 13 nt, Human
cacaaaggagagc

SEQ ID NO: 3318508 - RNA, 17 nt, Human
cacacacgcgugcacac

SEQ ID NO: 3318509 - RNA, 13 nt, Human
cacaaacagaggc

SEQ ID NO: 3318510 - RNA, 14 nt, Human
cacaaacagaggcc

SEQ ID NO: 3318511 - RNA, 18 nt, Human
caauuacaggaaguacug

SEQ ID NO: 3318512 - RNA, 17 nt, Human
caauuacaggaaguacu

SEQ ID NO: 3318513 - RNA, 14 nt, Human
caauguucucucuu

SEQ ID NO: 3318514 - RNA, 22 nt, Human
caaugugaaaagaaaaaugagc

SEQ ID NO: 3318515 - RNA, 19 nt, Human
caaugugaaaagaaaaaug

SEQ ID NO: 3318516 - RNA, 12 nt, Human
cacagagaaagu

SEQ ID NO: 3318517 - RNA, 19 nt, Human
cacagagaaaguacuucuc

SEQ ID NO: 3318518 - RNA, 20 nt, Human
cacagagaaaguacuucucc

SEQ ID NO: 3318519 - RNA, 23 nt, Human
cacagaugggugcuuggaggaag

SEQ ID NO: 3318520 - RNA, 13 nt, Human
cacagaggcugcc

SEQ ID NO: 3318521 - RNA, 22 nt, Human
cacagaguuguuacauuuuuaa

SEQ ID NO: 3318522 - RNA, 21 nt, Human
cacagaguuguuacauuuuua

SEQ ID NO: 3318523 - RNA, 21 nt, Human
cacagcucuucuccaggcugu

SEQ ID NO: 3318524 - RNA, 18 nt, Human
caagcgauucuucugcuu

SEQ ID NO: 3318525 - RNA, 21 nt, Human
caagcugcacccucaggcagg

SEQ ID NO: 3318526 - RNA, 15 nt, Human
caagcgauucuucug

SEQ ID NO: 3318527 - RNA, 17 nt, Human
caagcgauucuucugcu

SEQ ID NO: 3318528 - RNA, 21 nt, Human
caagcuggucccacucagucc

SEQ ID NO: 3318529 - RNA, 22 nt, Human
caagcugcacccucaggcaggu

SEQ ID NO: 3318530 - RNA, 20 nt, Human
caagcugcacccucaggcag

SEQ ID NO: 3318531 - RNA, 22 nt, Human
caagcuggucccacucagucca

SEQ ID NO: 3318532 - RNA, 23 nt, Human
caagcuggucccacucaguccau

SEQ ID NO: 3318533 - RNA, 19 nt, Human
caaggauccugagccagau

SEQ ID NO: 3318534 - RNA, 18 nt, Human
caaggauccugagccaga

SEQ ID NO: 3318535 - RNA, 16 nt, Human
caaggagauuuacaac

SEQ ID NO: 3318536 - RNA, 20 nt, Human
caaggauccugagccagauu

SEQ ID NO: 3318537 - RNA, 15 nt, Human
caaggcugcagugag

SEQ ID NO: 3318538 - RNA, 17 nt, Human
caaggauccugagccag

SEQ ID NO: 3318539 - RNA, 22 nt, Human
caaggcugcagugagccgagau

SEQ ID NO: 3318540 - RNA, 17 nt, Human
caaggcugcagugagcc

SEQ ID NO: 3318541 - RNA, 14 nt, Human
caauaggaaaaacu

SEQ ID NO: 3318542 - RNA, 15 nt, Human
caauaggaaaaacug

SEQ ID NO: 3318543 - RNA, 17 nt, Human
caauaggaaaaacugau

SEQ ID NO: 3318544 - RNA, 16 nt, Human
caauaggaaaaacuga

SEQ ID NO: 3318545 - RNA, 17 nt, Human
cacaguucaauucucau

SEQ ID NO: 3318546 - RNA, 12 nt, Human
ccuccauguggg

SEQ ID NO: 3318547 - RNA, 15 nt, Human
ccuccaugugggcua

SEQ ID NO: 3318548 - RNA, 17 nt, Human
ccucccaaagugcuggg

SEQ ID NO: 3318549 - RNA, 14 nt, Human
ccucccaacucacc

SEQ ID NO: 3318550 - RNA, 12 nt, Human
ccuccaggugca

SEQ ID NO: 3318551 - RNA, 11 nt, Human
ccuccaggugc

SEQ ID NO: 3318552 - RNA, 17 nt, Human
ccuccaggugcacaagc

SEQ ID NO: 3318553 - RNA, 15 nt, Human
ccucagggucccugg

SEQ ID NO: 3318554 - RNA, 20 nt, Human
ccucaggugagaagcagagg

SEQ ID NO: 3318555 - RNA, 18 nt, Human
ccucaggugagaagcaga

SEQ ID NO: 3318556 - RNA, 17 nt, Human
ccucaggugagaagcag

SEQ ID NO: 3318557 - RNA, 11 nt, Human
ccuccucagau

SEQ ID NO: 3318558 - RNA, 12 nt, Human
ccuccuccagcc

SEQ ID NO: 3318559 - RNA, 17 nt, Human
ccucccgaguagcuggg

SEQ ID NO: 3318560 - RNA, 18 nt, Human
ccucccgaguagcuggga

SEQ ID NO: 3318561 - RNA, 21 nt, Human
ccucccgaauagcugggacua

SEQ ID NO: 3318562 - RNA, 19 nt, Human
ccucccgaauagcugggac

SEQ ID NO: 3318563 - RNA, 20 nt, Human
ccucccgaauagcugggacu

SEQ ID NO: 3318564 - RNA, 16 nt, Human
ccucccaaagugcugg

SEQ ID NO: 3318565 - RNA, 15 nt, Human
ccucccaacucaccc

SEQ ID NO: 3318566 - RNA, 18 nt, Human
ccucccgaauagcuggga

SEQ ID NO: 3318567 - RNA, 15 nt, Human
ccucugcacuccccu

SEQ ID NO: 3318568 - RNA, 17 nt, Human
ccucugcacuccccugc

SEQ ID NO: 3318569 - RNA, 16 nt, Human
ccucugcacuccccug

SEQ ID NO: 3318570 - RNA, 18 nt, Human
ccucugcacuccccugcu

SEQ ID NO: 3318571 - RNA, 23 nt, Human
ccucugcacuccccugcugggug

SEQ ID NO: 3318572 - RNA, 18 nt, Human
ccucugcagcaauaaagc

SEQ ID NO: 3318573 - RNA, 14 nt, Human
ccucugcagcaaua

SEQ ID NO: 3318574 - RNA, 16 nt, Human
ccucugcccacucccu

SEQ ID NO: 3318575 - RNA, 13 nt, Human
ccucugcccacuc

SEQ ID NO: 3318576 - RNA, 21 nt, Human
ccucugacacacagcucuguc

SEQ ID NO: 3318577 - RNA, 18 nt, Human
ccucugacacacagcucu

SEQ ID NO: 3318578 - RNA, 14 nt, Human
ccucugacacacag

SEQ ID NO: 3318579 - RNA, 19 nt, Human
ccucugacacacagcucug

SEQ ID NO: 3318580 - RNA, 20 nt, Human
ccucugacacacagcucugu

SEQ ID NO: 3318581 - RNA, 13 nt, Human
ccucugacacaca

SEQ ID NO: 3318582 - RNA, 18 nt, Human
ccucgguguggagaagcg

SEQ ID NO: 3318583 - RNA, 21 nt, Human
ccuccuccagccgccaugcuc

SEQ ID NO: 3318584 - RNA, 22 nt, Human
ccucucccuuggauuguccccg

SEQ ID NO: 3318585 - RNA, 13 nt, Human
ccucucccuugga

SEQ ID NO: 3318586 - RNA, 20 nt, Human
ccucuccccagcaagugaga

SEQ ID NO: 3318587 - RNA, 15 nt, Human
ccucuccccagcaag

SEQ ID NO: 3318588 - RNA, 17 nt, Human
ccgggaagggggcuggg

SEQ ID NO: 3318589 - RNA, 17 nt, Human
cccuuggauuguccccg

SEQ ID NO: 3318590 - RNA, 20 nt, Human
cccuuguggucccaccccac

SEQ ID NO: 3318591 - RNA, 22 nt, Human
cccuuguggucccaccccacac

SEQ ID NO: 3318592 - RNA, 23 nt, Human
cccuugguuaggcauugugggaa

SEQ ID NO: 3318593 - RNA, 22 nt, Human
cccuugguuaggcauuguggga

SEQ ID NO: 3318594 - RNA, 12 nt, Human
cccuucccaccu

SEQ ID NO: 3318595 - RNA, 13 nt, Human
cccuucccaccuc

SEQ ID NO: 3318596 - RNA, 15 nt, Human
ccuaaaauucagugg

SEQ ID NO: 3318597 - RNA, 16 nt, Human
ccuaaaauucagugga

SEQ ID NO: 3318598 - RNA, 22 nt, Human
ccuacaguugaaaaacagcuga

SEQ ID NO: 3318599 - RNA, 19 nt, Human
ccuacagcuugaccgugag

SEQ ID NO: 3318600 - RNA, 21 nt, Human
ccuacaguugaaaaacagcug

SEQ ID NO: 3318601 - RNA, 13 nt, Human
ccuacccacccuc

SEQ ID NO: 3318602 - RNA, 18 nt, Human
ccuacccacccuccuuuc

SEQ ID NO: 3318603 - RNA, 19 nt, Human
ccuacuguaauuugugaua

SEQ ID NO: 3318604 - RNA, 21 nt, Human
ccuagaaauuccccacccuga

SEQ ID NO: 3318605 - RNA, 13 nt, Human
ccuaggugacaga

SEQ ID NO: 3318606 - RNA, 16 nt, Human
ccucagaucuucugug

SEQ ID NO: 3318607 - RNA, 23 nt, Human
ccucaggccugggggcugggcag

SEQ ID NO: 3318608 - RNA, 20 nt, Human
ccucagggucccugguggca

SEQ ID NO: 3318609 - RNA, 17 nt, Human
ccucagggucccuggug

SEQ ID NO: 3318610 - RNA, 16 nt, Human
ccucagggucccuggu

SEQ ID NO: 3318611 - RNA, 15 nt, Human
ccuaggugacagagu

SEQ ID NO: 3318612 - RNA, 17 nt, Human
ccuauuagagaagagau

SEQ ID NO: 3318613 - RNA, 16 nt, Human
ccuauuagagaagaga

SEQ ID NO: 3318614 - RNA, 23 nt, Human
ccucacaguccuuaccagcagag

SEQ ID NO: 3318615 - RNA, 24 nt, Human
ccucacaguccuuaccagcagagc

SEQ ID NO: 3318616 - RNA, 14 nt, Human
cccugccuccuuug

SEQ ID NO: 3318617 - RNA, 23 nt, Human
cccugccuccuuugugaggaagc

SEQ ID NO: 3318618 - RNA, 16 nt, Human
cccugccuccuuugug

SEQ ID NO: 3318619 - RNA, 12 nt, Human
cccugccacccu

SEQ ID NO: 3318620 - RNA, 14 nt, Human
cccugccacccugg

SEQ ID NO: 3318621 - RNA, 15 nt, Human
cccugccacccuggg

SEQ ID NO: 3318622 - RNA, 17 nt, Human
cccugccacccugggga

SEQ ID NO: 3318623 - RNA, 18 nt, Human
cccugccacccuggggag

SEQ ID NO: 3318624 - RNA, 22 nt, Human
cccugcacuugcagacucuaca

SEQ ID NO: 3318625 - RNA, 12 nt, Human
cccugcagaggg

SEQ ID NO: 3318626 - RNA, 18 nt, Human
cccugcagagggcacaga

SEQ ID NO: 3318627 - RNA, 16 nt, Human
cccugcaaccugauug

SEQ ID NO: 3318628 - RNA, 22 nt, Human
cccugcaaccugauugugucuc

SEQ ID NO: 3318629 - RNA, 13 nt, Human
cccugcugguuca

SEQ ID NO: 3318630 - RNA, 22 nt, Human
cccugcuggguguggcgcagca

SEQ ID NO: 3318631 - RNA, 19 nt, Human
cccugcugguucaggguug

SEQ ID NO: 3318632 - RNA, 20 nt, Human
cccugcugguucaggguugg

SEQ ID NO: 3318633 - RNA, 22 nt, Human
cccugguggcagugggagcugc

SEQ ID NO: 3318634 - RNA, 21 nt, Human
cccugguggcagugggagcug

SEQ ID NO: 3318635 - RNA, 14 nt, Human
cccugguggcagcu

SEQ ID NO: 3318636 - RNA, 22 nt, Human
cccucauccucauacccacccc

SEQ ID NO: 3318637 - RNA, 21 nt, Human
cccuccaagaccuucuccuuc

SEQ ID NO: 3318638 - RNA, 21 nt, Human
cccucagggucccugguggca

SEQ ID NO: 3318639 - RNA, 20 nt, Human
cccucagucuggcccuuccu

SEQ ID NO: 3318640 - RNA, 22 nt, Human
cccucaucaccaacgucugugc

SEQ ID NO: 3318641 - RNA, 20 nt, Human
cccucauccucauacccacc

SEQ ID NO: 3318642 - RNA, 17 nt, Human
cccucauccucauaccc

SEQ ID NO: 3318643 - RNA, 17 nt, Human
cccuccaugugggcuag

SEQ ID NO: 3318644 - RNA, 13 nt, Human
cccucccucuuuc

SEQ ID NO: 3318645 - RNA, 16 nt, Human
cccggcaggguccuag

SEQ ID NO: 3318646 - RNA, 22 nt, Human
cccuaaaguguauuuuuuuacu

SEQ ID NO: 3318647 - RNA, 17 nt, Human
cccuaaaguguauuuuu

SEQ ID NO: 3318648 - RNA, 15 nt, Human
cccucagggucccug

SEQ ID NO: 3318649 - RNA, 19 nt, Human
cccucagggucccuggugg

SEQ ID NO: 3318650 - RNA, 18 nt, Human
cccucagggucccuggug

SEQ ID NO: 3318651 - RNA, 17 nt, Human
cccucagggucccuggu

SEQ ID NO: 3318652 - RNA, 16 nt, Human
cccucagggucccugg

SEQ ID NO: 3318653 - RNA, 15 nt, Human
ccccuggcagccccu

SEQ ID NO: 3318654 - RNA, 14 nt, Human
ccccuggcagcccc

SEQ ID NO: 3318655 - RNA, 12 nt, Human
ccccuggcagcc

SEQ ID NO: 3318656 - RNA, 12 nt, Human
ccccaggaggcc

SEQ ID NO: 3318657 - RNA, 13 nt, Human
ccccagccugcua

SEQ ID NO: 3318658 - RNA, 15 nt, Human
ccccagccccauccu

SEQ ID NO: 3318659 - RNA, 16 nt, Human
ccccagccccauccca

SEQ ID NO: 3318660 - RNA, 20 nt, Human
cccgaggccuucucugaagg

SEQ ID NO: 3318661 - RNA, 15 nt, Human
cccgaggccuucucu

SEQ ID NO: 3318662 - RNA, 20 nt, Human
ccccuguucuggcagaguug

SEQ ID NO: 3318663 - RNA, 22 nt, Human
ccccuguccccgcacugggcuu

SEQ ID NO: 3318664 - RNA, 14 nt, Human
cccagcgagcccug

SEQ ID NO: 3318665 - RNA, 18 nt, Human
cccagcucugguccauag

SEQ ID NO: 3318666 - RNA, 16 nt, Human
cccagcucugguccau

SEQ ID NO: 3318667 - RNA, 15 nt, Human
cccagcucuggucca

SEQ ID NO: 3318668 - RNA, 12 nt, Human
cccagcucuggu

SEQ ID NO: 3318669 - RNA, 14 nt, Human
cccagcucuggucc

SEQ ID NO: 3318670 - RNA, 13 nt, Human
cccagcucugguc

SEQ ID NO: 3318671 - RNA, 13 nt, Human
cccaggagccccg

SEQ ID NO: 3318672 - RNA, 14 nt, Human
cccaggagccccga

SEQ ID NO: 3318673 - RNA, 13 nt, Human
cccaggaggccag

SEQ ID NO: 3318674 - RNA, 14 nt, Human
cccaggaggccagc

SEQ ID NO: 3318675 - RNA, 15 nt, Human
cccagccccauccuc

SEQ ID NO: 3318676 - RNA, 14 nt, Human
cccagccccauccu

SEQ ID NO: 3318677 - RNA, 14 nt, Human
cccagccccauccc

SEQ ID NO: 3318678 - RNA, 13 nt, Human
cccagccccaucc

SEQ ID NO: 3318679 - RNA, 18 nt, Human
cccagccccuucugaccc

SEQ ID NO: 3318680 - RNA, 19 nt, Human
cccagccccauccucugua

SEQ ID NO: 3318681 - RNA, 18 nt, Human
cccagccccauccucugu

SEQ ID NO: 3318682 - RNA, 13 nt, Human
cccagccccaaug

SEQ ID NO: 3318683 - RNA, 12 nt, Human
cccagccccauc

SEQ ID NO: 3318684 - RNA, 11 nt, Human
cccagccccau

SEQ ID NO: 3318685 - RNA, 17 nt, Human
cccagccccaaugaaca

SEQ ID NO: 3318686 - RNA, 23 nt, Human
cccagauugcaacaggcugggcu

SEQ ID NO: 3318687 - RNA, 13 nt, Human
ccaugugccaggu

SEQ ID NO: 3318688 - RNA, 13 nt, Human
ccauguuggccag

SEQ ID NO: 3318689 - RNA, 14 nt, Human
ccauguuggccagg

SEQ ID NO: 3318690 - RNA, 15 nt, Human
ccaugcugcccugug

SEQ ID NO: 3318691 - RNA, 18 nt, Human
ccaugcuccuggcccacu

SEQ ID NO: 3318692 - RNA, 15 nt, Human
ccaugcuccuggccc

SEQ ID NO: 3318693 - RNA, 17 nt, Human
ccaugcugcccugugag

SEQ ID NO: 3318694 - RNA, 16 nt, Human
ccaugcugcccuguga

SEQ ID NO: 3318695 - RNA, 13 nt, Human
ccaugcuccuggc

SEQ ID NO: 3318696 - RNA, 14 nt, Human
cccacgcccccacu

SEQ ID NO: 3318697 - RNA, 13 nt, Human
cccacgcccccac

SEQ ID NO: 3318698 - RNA, 15 nt, Human
cccaccuggccucug

SEQ ID NO: 3318699 - RNA, 12 nt, Human
cccaccuggccu

SEQ ID NO: 3318700 - RNA, 16 nt, Human
cccaccuuggcugcag

SEQ ID NO: 3318701 - RNA, 17 nt, Human
cccaccuuggcugcagg

SEQ ID NO: 3318702 - RNA, 19 nt, Human
cccaccuuggcugcaggga

SEQ ID NO: 3318703 - RNA, 19 nt, Human
ccauguuggccaggcuggu

SEQ ID NO: 3318704 - RNA, 21 nt, Human
ccauguuggccaggcuggucu

SEQ ID NO: 3318705 - RNA, 18 nt, Human
ccauguuggccaggcugg

SEQ ID NO: 3318706 - RNA, 15 nt, Human
ccauguuggccaggc

SEQ ID NO: 3318707 - RNA, 20 nt, Human
cccaucugugaaaggaaaga

SEQ ID NO: 3318708 - RNA, 13 nt, Human
cccaucucacaca

SEQ ID NO: 3318709 - RNA, 18 nt, Human
cccaucucacacaugagc

SEQ ID NO: 3318710 - RNA, 12 nt, Human
cccaucugugaa

SEQ ID NO: 3318711 - RNA, 14 nt, Human
cccaugcugcccug

SEQ ID NO: 3318712 - RNA, 13 nt, Human
cccaugcugcccu

SEQ ID NO: 3318713 - RNA, 12 nt, Human
cccaugcugccc

SEQ ID NO: 3318714 - RNA, 20 nt, Human
cccaugagccucagcauccu

SEQ ID NO: 3318715 - RNA, 15 nt, Human
cccaugagccucagc

SEQ ID NO: 3318716 - RNA, 16 nt, Human
cccaugagccucagca

SEQ ID NO: 3318717 - RNA, 17 nt, Human
cccaggcaggucuugaa

SEQ ID NO: 3318718 - RNA, 17 nt, Human
cccaggcauuccccagg

SEQ ID NO: 3318719 - RNA, 23 nt, Human
cccaggcaggucuugaacuccug

SEQ ID NO: 3318720 - RNA, 15 nt, Human
cccaggcauucccca

SEQ ID NO: 3318721 - RNA, 16 nt, Human
cccaggaggccagccu

SEQ ID NO: 3318722 - RNA, 15 nt, Human
cccaggaggccagcc

SEQ ID NO: 3318723 - RNA, 13 nt, Human
cccagguuucuau

SEQ ID NO: 3318724 - RNA, 15 nt, Human
cccagugccgagaag

SEQ ID NO: 3318725 - RNA, 21 nt, Human
cccagugcccacaggaucagu

SEQ ID NO: 3318726 - RNA, 10 nt, Human
cccagucugg

SEQ ID NO: 3318727 - RNA, 18 nt, Human
cccagucuggaaugcagu

SEQ ID NO: 3318728 - RNA, 19 nt, Human
cccagucuggaaugcagug

SEQ ID NO: 3318729 - RNA, 20 nt, Human
cccagugguuccuaauccuc

SEQ ID NO: 3318730 - RNA, 14 nt, Human
cccaguuagcucuc

SEQ ID NO: 3318731 - RNA, 21 nt, Human
ccauccucuguacagagccca

SEQ ID NO: 3318732 - RNA, 14 nt, Human
ccaucaugucuggc

SEQ ID NO: 3318733 - RNA, 16 nt, Human
ccaucaugucuggcua

SEQ ID NO: 3318734 - RNA, 23 nt, Human
ccauagagagcaagacgcugugc

SEQ ID NO: 3318735 - RNA, 15 nt, Human
ccauauucuguuggc

SEQ ID NO: 3318736 - RNA, 19 nt, Human
ccauauuaccacagacaua

SEQ ID NO: 3318737 - RNA, 18 nt, Human
ccauauucuguuggccag

SEQ ID NO: 3318738 - RNA, 12 nt, Human
ccaucacccgcu

SEQ ID NO: 3318739 - RNA, 13 nt, Human
ccaucaccagaca

SEQ ID NO: 3318740 - RNA, 23 nt, Human
ccagggacagaggggguggccuc

SEQ ID NO: 3318741 - RNA, 22 nt, Human
ccagggacagaggggguggccu

SEQ ID NO: 3318742 - RNA, 19 nt, Human
ccaggccccugccacccug

SEQ ID NO: 3318743 - RNA, 21 nt, Human
ccaggccccugccacccuggg

SEQ ID NO: 3318744 - RNA, 23 nt, Human
ccaggccccugccacccugggga

SEQ ID NO: 3318745 - RNA, 14 nt, Human
ccaggccagaggga

SEQ ID NO: 3318746 - RNA, 21 nt, Human
ccaggccagagggagugacag

SEQ ID NO: 3318747 - RNA, 14 nt, Human
ccaggagcagccac

SEQ ID NO: 3318748 - RNA, 12 nt, Human
ccaggccagagg

SEQ ID NO: 3318749 - RNA, 19 nt, Human
ccaggccuccuacagcuug

SEQ ID NO: 3318750 - RNA, 18 nt, Human
ccaggccuccuacagcuu

SEQ ID NO: 3318751 - RNA, 13 nt, Human
ccaggccuccuac

SEQ ID NO: 3318752 - RNA, 19 nt, Human
ccaggcccucugcccacuc

SEQ ID NO: 3318753 - RNA, 18 nt, Human
ccaggcccucugcccacu

SEQ ID NO: 3318754 - RNA, 17 nt, Human
ccaggcccucugcccac

SEQ ID NO: 3318755 - RNA, 16 nt, Human
ccaggcccucugccca

SEQ ID NO: 3318756 - RNA, 22 nt, Human
ccagcugugcucuggacaggca

SEQ ID NO: 3318757 - RNA, 23 nt, Human
ccagcugugcucuggacaggcau

SEQ ID NO: 3318758 - RNA, 19 nt, Human
ccaggaagccagcaggcuc

SEQ ID NO: 3318759 - RNA, 17 nt, Human
ccaggaagccagcaggc

SEQ ID NO: 3318760 - RNA, 15 nt, Human
ccaggaagccagcag

SEQ ID NO: 3318761 - RNA, 14 nt, Human
ccaggaagccagca

SEQ ID NO: 3318762 - RNA, 13 nt, Human
ccaggagcagcca

SEQ ID NO: 3318763 - RNA, 12 nt, Human
ccaggagcagcc

SEQ ID NO: 3318764 - RNA, 18 nt, Human
ccagcugugcucuggaca

SEQ ID NO: 3318765 - RNA, 20 nt, Human
ccagcugugcucuggacagg

SEQ ID NO: 3318766 - RNA, 21 nt, Human
ccagcugugcucuggacaggc

SEQ ID NO: 3318767 - RNA, 15 nt, Human
ccagcugcuugggcu

SEQ ID NO: 3318768 - RNA, 13 nt, Human
ccagcugcuuggg

SEQ ID NO: 3318769 - RNA, 18 nt, Human
ccagcugcuugggcuuca

SEQ ID NO: 3318770 - RNA, 16 nt, Human
ccagcugcuugggcuu

SEQ ID NO: 3318771 - RNA, 13 nt, Human
ccaagcucccagg

SEQ ID NO: 3318772 - RNA, 12 nt, Human
ccaagcucccag

SEQ ID NO: 3318773 - RNA, 14 nt, Human
ccaagcaggacaug

SEQ ID NO: 3318774 - RNA, 23 nt, Human
ccaagcagagguugggaggccau

SEQ ID NO: 3318775 - RNA, 13 nt, Human
ccacaagagccca

SEQ ID NO: 3318776 - RNA, 16 nt, Human
ccacaagacccuugug

SEQ ID NO: 3318777 - RNA, 18 nt, Human
ccacaaaggagagcuagc

SEQ ID NO: 3318778 - RNA, 18 nt, Human
ccaaggugggaggauugc

SEQ ID NO: 3318779 - RNA, 14 nt, Human
ccaaggcuggggga

SEQ ID NO: 3318780 - RNA, 21 nt, Human
ccacaagagcccaggccuccu

SEQ ID NO: 3318781 - RNA, 20 nt, Human
ccacaagagcccaggccucc

SEQ ID NO: 3318782 - RNA, 19 nt, Human
ccacaagagcccaggccuc

SEQ ID NO: 3318783 - RNA, 18 nt, Human
ccacaagagcccaggccu

SEQ ID NO: 3318784 - RNA, 17 nt, Human
ccacaagagcccaggcc

SEQ ID NO: 3318785 - RNA, 16 nt, Human
ccacaagagcccaggc

SEQ ID NO: 3318786 - RNA, 15 nt, Human
ccacaaguuaaauaa

SEQ ID NO: 3318787 - RNA, 20 nt, Human
ccacaaguuaaauaaaucau

SEQ ID NO: 3318788 - RNA, 13 nt, Human
ccaacaucaacau

SEQ ID NO: 3318789 - RNA, 14 nt, Human
ccaacauacuccca

SEQ ID NO: 3318790 - RNA, 16 nt, Human
ccaacaucaacaucuu

SEQ ID NO: 3318791 - RNA, 15 nt, Human
ccaaauucuuucagu

SEQ ID NO: 3318792 - RNA, 22 nt, Human
ccaaauucuuucaguggcuacc

SEQ ID NO: 3318793 - RNA, 15 nt, Human
ccaagaccuucuccu

SEQ ID NO: 3318794 - RNA, 15 nt, Human
ccaacccucaucacc

SEQ ID NO: 3318795 - RNA, 13 nt, Human
ccaacccucauca

SEQ ID NO: 3318796 - RNA, 13 nt, Human
ccaaagaugcagc

SEQ ID NO: 3318797 - RNA, 14 nt, Human
ccaaagaugcagcc

SEQ ID NO: 3318798 - RNA, 20 nt, Human
cauuuuuaguagagacaggg

SEQ ID NO: 3318799 - RNA, 21 nt, Human
ccaaaauaaaacuuuuuaaaa

SEQ ID NO: 3318800 - RNA, 18 nt, Human
ccaaaauaaaacuuuuua

SEQ ID NO: 3318801 - RNA, 16 nt, Human
ccaaacccuucagugc

SEQ ID NO: 3318802 - RNA, 19 nt, Human
cauuuuauuuuauuaugca

SEQ ID NO: 3318803 - RNA, 21 nt, Human
cauuuuauuuuauuaugcaug

SEQ ID NO: 3318804 - RNA, 20 nt, Human
cauuuugggguacccacugc

SEQ ID NO: 3318805 - RNA, 21 nt, Human
cauuuugggguacccacugcu

SEQ ID NO: 3318806 - RNA, 22 nt, Human
cauuuugggguacccacugcuc

SEQ ID NO: 3318807 - RNA, 24 nt, Human
cauuuugcuaaaugugaaugauga

SEQ ID NO: 3318808 - RNA, 21 nt, Human
cauuuugcuaaaugugaauga

SEQ ID NO: 3318809 - RNA, 18 nt, Human
cauuuugcuaaaugugaa

SEQ ID NO: 3318810 - RNA, 19 nt, Human
cauuuuuaguagagacagg

SEQ ID NO: 3318811 - RNA, 18 nt, Human
cauuuuuaguagagacag

SEQ ID NO: 3318812 - RNA, 20 nt, Human
cauuuuuaagugcugcauuu

SEQ ID NO: 3318813 - RNA, 15 nt, Human
cauuuuuaagugcug

SEQ ID NO: 3318814 - RNA, 23 nt, Human
cauuuugggguacccacugcucu

SEQ ID NO: 3318815 - RNA, 14 nt, Human
cauuugagcagggc

SEQ ID NO: 3318816 - RNA, 19 nt, Human
cauuugaggucuguucuuu

SEQ ID NO: 3318817 - RNA, 18 nt, Human
cauuugaggucuguucuu

SEQ ID NO: 3318818 - RNA, 17 nt, Human
cauuugaggucuguucu

SEQ ID NO: 3318819 - RNA, 23 nt, Human
cauuucuuccacaagagcccagg

SEQ ID NO: 3318820 - RNA, 21 nt, Human
cauuucuuccacaagagccca

SEQ ID NO: 3318821 - RNA, 17 nt, Human
cauuuacuuuguguuca

SEQ ID NO: 3318822 - RNA, 21 nt, Human
cauuuacuuuguguucaccuu

SEQ ID NO: 3318823 - RNA, 21 nt, Human
cauuuaaaagauacaguuacu

SEQ ID NO: 3318824 - RNA, 19 nt, Human
cauugaaaucuuuuugcuu

SEQ ID NO: 3318825 - RNA, 22 nt, Human
cauugaccugaggcccuucucu

SEQ ID NO: 3318826 - RNA, 13 nt, Human
cauugaccugagg

SEQ ID NO: 3318827 - RNA, 15 nt, Human
cauguuuuguuuacg

SEQ ID NO: 3318828 - RNA, 21 nt, Human
cauuaaagccugaguuugcuu

SEQ ID NO: 3318829 - RNA, 21 nt, Human
caugugccagguuuuuggucu

SEQ ID NO: 3318830 - RNA, 15 nt, Human
caugugcacaugcac

SEQ ID NO: 3318831 - RNA, 15 nt, Human
cauguuugugauuga

SEQ ID NO: 3318832 - RNA, 16 nt, Human
cauggucggaaaacau

SEQ ID NO: 3318833 - RNA, 18 nt, Human
cauguaauuaaguacuau

SEQ ID NO: 3318834 - RNA, 21 nt, Human
cauguaauuaaguacuaugua

SEQ ID NO: 3318835 - RNA, 23 nt, Human
caugucuuuucuugcaugaggcu

SEQ ID NO: 3318836 - RNA, 21 nt, Human
caugucuuuucuugcaugagg

SEQ ID NO: 3318837 - RNA, 19 nt, Human
caugucuuuucuugcauga

SEQ ID NO: 3318838 - RNA, 14 nt, Human
caugucuuuucuug

SEQ ID NO: 3318839 - RNA, 22 nt, Human
caugggaaugaaugucagugug

SEQ ID NO: 3318840 - RNA, 15 nt, Human
caugggccuccugug

SEQ ID NO: 3318841 - RNA, 17 nt, Human
caugggaaugaauguca

SEQ ID NO: 3318842 - RNA, 16 nt, Human
caugggccuccugugu

SEQ ID NO: 3318843 - RNA, 17 nt, Human
caugggccuccugugug

SEQ ID NO: 3318844 - RNA, 18 nt, Human
caugggaaugaaugucag

SEQ ID NO: 3318845 - RNA, 16 nt, Human
cauggaguauauguca

SEQ ID NO: 3318846 - RNA, 13 nt, Human
cauggacuuuguu

SEQ ID NO: 3318847 - RNA, 11 nt, Human
cauggacuuug

SEQ ID NO: 3318848 - RNA, 17 nt, Human
cauggagguuugaagau

SEQ ID NO: 3318849 - RNA, 22 nt, Human
caugcugucccuuacgugaguc

SEQ ID NO: 3318850 - RNA, 17 nt, Human
caugcugucccuuacgu

SEQ ID NO: 3318851 - RNA, 17 nt, Human
caugcgggcuuccuccu

SEQ ID NO: 3318852 - RNA, 23 nt, Human
caugccuggauggggcugcaccg

SEQ ID NO: 3318853 - RNA, 21 nt, Human
caugccuggauggggcugcac

SEQ ID NO: 3318854 - RNA, 18 nt, Human
caugccuggauggggcug

SEQ ID NO: 3318855 - RNA, 22 nt, Human
cauggaaguacuauaauuuacc

SEQ ID NO: 3318856 - RNA, 20 nt, Human
cauggaaguacuauaauuua

SEQ ID NO: 3318857 - RNA, 16 nt, Human
cauggaauaacaugua

SEQ ID NO: 3318858 - RNA, 13 nt, Human
caugccuggaugg

SEQ ID NO: 3318859 - RNA, 19 nt, Human
caugccucucucaggccaa

SEQ ID NO: 3318860 - RNA, 18 nt, Human
caugccucucucaggcca

SEQ ID NO: 3318861 - RNA, 17 nt, Human
caugccucucucaggcc

SEQ ID NO: 3318862 - RNA, 16 nt, Human
caugccucucucaggc

SEQ ID NO: 3318863 - RNA, 15 nt, Human
caugccucucucagg

SEQ ID NO: 3318864 - RNA, 14 nt, Human
caugccucucucag

SEQ ID NO: 3318865 - RNA, 13 nt, Human
caugccccugaac

SEQ ID NO: 3318866 - RNA, 20 nt, Human
caugccagcuuaucucaggg

SEQ ID NO: 3318867 - RNA, 19 nt, Human
caugccagcuuaucucagg

SEQ ID NO: 3318868 - RNA, 21 nt, Human
cauacccacccccacccaagg

SEQ ID NO: 3318869 - RNA, 18 nt, Human
cauacccacccccaccca

SEQ ID NO: 3318870 - RNA, 17 nt, Human
cauacccacccccaccc

SEQ ID NO: 3318871 - RNA, 14 nt, Human
cauacccaccccca

SEQ ID NO: 3318872 - RNA, 13 nt, Human
cauacguacacau

SEQ ID NO: 3318873 - RNA, 16 nt, Human
cauacguacacauuuu

SEQ ID NO: 3318874 - RNA, 15 nt, Human
cauacguacacauuu

SEQ ID NO: 3318875 - RNA, 21 nt, Human
cauacuaaccagcagaaaugc

SEQ ID NO: 3318876 - RNA, 14 nt, Human
cauacuaaccagca

SEQ ID NO: 3318877 - RNA, 18 nt, Human
cauacguacacauuuuau

SEQ ID NO: 3318878 - RNA, 17 nt, Human
cauacguacacauuuua

SEQ ID NO: 3318879 - RNA, 19 nt, Human
cauaccacuuuuguucuug

SEQ ID NO: 3318880 - RNA, 12 nt, Human
cauacccacccc

SEQ ID NO: 3318881 - RNA, 11 nt, Human
cauacccaccc

SEQ ID NO: 3318882 - RNA, 18 nt, Human
cauaccacuuuuguucuu

SEQ ID NO: 3318883 - RNA, 15 nt, Human
cauaccacuuuuguu

SEQ ID NO: 3318884 - RNA, 14 nt, Human
cauaccacuuuugu

SEQ ID NO: 3318885 - RNA, 13 nt, Human
cauaccacuuuug

SEQ ID NO: 3318886 - RNA, 14 nt, Human
cauaagauaaaugu

SEQ ID NO: 3318887 - RNA, 21 nt, Human
cauaaaaauuagccaagugug

SEQ ID NO: 3318888 - RNA, 22 nt, Human
cauaaacaagaccacguuucua

SEQ ID NO: 3318889 - RNA, 21 nt, Human
cauaaacaagaccacguuucu

SEQ ID NO: 3318890 - RNA, 20 nt, Human
cauaaacaagaccacguuuc

SEQ ID NO: 3318891 - RNA, 16 nt, Human
cauaaccuagccuuag

SEQ ID NO: 3318892 - RNA, 17 nt, Human
caguuguuagugugucu

SEQ ID NO: 3318893 - RNA, 18 nt, Human
caguuggucccccuucca

SEQ ID NO: 3318894 - RNA, 18 nt, Human
caguuggguggaugccug

SEQ ID NO: 3318895 - RNA, 19 nt, Human
caguuggguggaugccugg

SEQ ID NO: 3318896 - RNA, 22 nt, Human
caguuggucccccuuccaugga

SEQ ID NO: 3318897 - RNA, 21 nt, Human
caguuggucccccuuccaugg

SEQ ID NO: 3318898 - RNA, 20 nt, Human
caguuggucccccuuccaug

SEQ ID NO: 3318899 - RNA, 19 nt, Human
caguuggucccccuuccau

SEQ ID NO: 3318900 - RNA, 16 nt, Human
caguuggguggaugcc

SEQ ID NO: 3318901 - RNA, 23 nt, Human
caguugccagucaccccggccac

SEQ ID NO: 3318902 - RNA, 16 nt, Human
caguguacauggaaua

SEQ ID NO: 3318903 - RNA, 20 nt, Human
caguguacauggaauaacau

SEQ ID NO: 3318904 - RNA, 23 nt, Human
caguguacauggaauaacaugua

SEQ ID NO: 3318905 - RNA, 14 nt, Human
cagugugacaagga

SEQ ID NO: 3318906 - RNA, 12 nt, Human
cagugugacuga

SEQ ID NO: 3318907 - RNA, 22 nt, Human
cagugguuccuaauccucuagg

SEQ ID NO: 3318908 - RNA, 22 nt, Human
caguggugguuuucuguucuuu

SEQ ID NO: 3318909 - RNA, 12 nt, Human
caguggcagcug

SEQ ID NO: 3318910 - RNA, 13 nt, Human
caguggcagcugc

SEQ ID NO: 3318911 - RNA, 14 nt, Human
caguggcagcugcu

SEQ ID NO: 3318912 - RNA, 15 nt, Human
caguggcagcugcuu

SEQ ID NO: 3318913 - RNA, 16 nt, Human
caguggcagcugcuuu

SEQ ID NO: 3318914 - RNA, 14 nt, Human
caguuaagagaaau

SEQ ID NO: 3318915 - RNA, 13 nt, Human
caguuaagagaaa

SEQ ID NO: 3318916 - RNA, 22 nt, Human
caguguuguggauuuaacagaa

SEQ ID NO: 3318917 - RNA, 20 nt, Human
caguguuguggauuuaacag

SEQ ID NO: 3318918 - RNA, 19 nt, Human
caguguuguggauuuaaca

SEQ ID NO: 3318919 - RNA, 13 nt, Human
caguucucuccuu

SEQ ID NO: 3318920 - RNA, 15 nt, Human
caguucucuccuucu

SEQ ID NO: 3318921 - RNA, 14 nt, Human
caguucucuccuuc

SEQ ID NO: 3318922 - RNA, 22 nt, Human
caguucucuccuucuucccccc

SEQ ID NO: 3318923 - RNA, 19 nt, Human
caguugaaaaacagcugag

SEQ ID NO: 3318924 - RNA, 18 nt, Human
caguugaaaaacagcuga

SEQ ID NO: 3318925 - RNA, 12 nt, Human
caguugaaaaac

SEQ ID NO: 3318926 - RNA, 14 nt, Human
caucaagaugugac

SEQ ID NO: 3318927 - RNA, 14 nt, Human
cauauuuacuucuu

SEQ ID NO: 3318928 - RNA, 16 nt, Human
cauauuuacuucuuau

SEQ ID NO: 3318929 - RNA, 17 nt, Human
cauauuuacuucuuaua

SEQ ID NO: 3318930 - RNA, 20 nt, Human
cauauuuacuucuuauacau

SEQ ID NO: 3318931 - RNA, 22 nt, Human
cauauauauguuuuaagaggca

SEQ ID NO: 3318932 - RNA, 22 nt, Human
cauaguggcuuaaaacaacacu

SEQ ID NO: 3318933 - RNA, 20 nt, Human
cauaguaugguggcuggguu

SEQ ID NO: 3318934 - RNA, 18 nt, Human
cauaguaugguggcuggg

SEQ ID NO: 3318935 - RNA, 19 nt, Human
cauaguaugguggcugggu

SEQ ID NO: 3318936 - RNA, 17 nt, Human
cauaguaugguggcugg

SEQ ID NO: 3318937 - RNA, 11 nt, Human
cauacucugcu

SEQ ID NO: 3318938 - RNA, 20 nt, Human
cauacucccaucugugaaag

SEQ ID NO: 3318939 - RNA, 18 nt, Human
cauacucccaucugugaa

SEQ ID NO: 3318940 - RNA, 15 nt, Human
cauacucccaucugu

SEQ ID NO: 3318941 - RNA, 16 nt, Human
cauacucccaucugug

SEQ ID NO: 3318942 - RNA, 21 nt, Human
cauagagagcaagacgcugug

SEQ ID NO: 3318943 - RNA, 19 nt, Human
cauagagagcaagacgcug

SEQ ID NO: 3318944 - RNA, 23 nt, Human
cauagagagcaagacgcugugcu

SEQ ID NO: 3318945 - RNA, 16 nt, Human
cauccucauacccacc

SEQ ID NO: 3318946 - RNA, 15 nt, Human
cauccucauacccac

SEQ ID NO: 3318947 - RNA, 12 nt, Human
cauccuccucag

SEQ ID NO: 3318948 - RNA, 11 nt, Human
cauccuccuca

SEQ ID NO: 3318949 - RNA, 19 nt, Human
cauccuccucagaucuucu

SEQ ID NO: 3318950 - RNA, 18 nt, Human
cauccuccucagaucuuc

SEQ ID NO: 3318951 - RNA, 16 nt, Human
cauccuccucagaucu

SEQ ID NO: 3318952 - RNA, 15 nt, Human
cauccuccucagauc

SEQ ID NO: 3318953 - RNA, 22 nt, Human
cauccucauacccacccccacc

SEQ ID NO: 3318954 - RNA, 21 nt, Human
cauccucauacccacccccac

SEQ ID NO: 3318955 - RNA, 18 nt, Human
cauccucauacccacccc

SEQ ID NO: 3318956 - RNA, 17 nt, Human
cauccucauacccaccc

SEQ ID NO: 3318957 - RNA, 13 nt, Human
cauccucccaagg

SEQ ID NO: 3318958 - RNA, 15 nt, Human
caucuacccuccgau

SEQ ID NO: 3318959 - RNA, 19 nt, Human
cauccucuguacagagccc

SEQ ID NO: 3318960 - RNA, 18 nt, Human
cauccucuguacagagcc

SEQ ID NO: 3318961 - RNA, 15 nt, Human
cauccucuguacaga

SEQ ID NO: 3318962 - RNA, 17 nt, Human
caucucacacaugagca

SEQ ID NO: 3318963 - RNA, 16 nt, Human
caucucacacaugagc

SEQ ID NO: 3318964 - RNA, 20 nt, Human
caucucacacaugagcauca

SEQ ID NO: 3318965 - RNA, 22 nt, Human
caucuuccaaggguacuaagga

SEQ ID NO: 3318966 - RNA, 13 nt, Human
caucuugcucugc

SEQ ID NO: 3318967 - RNA, 14 nt, Human
caucuugcucugcu

SEQ ID NO: 3318968 - RNA, 19 nt, Human
caucuugcucugcugacag

SEQ ID NO: 3318969 - RNA, 20 nt, Human
caucuugcucugcugacaga

SEQ ID NO: 3318970 - RNA, 13 nt, Human
caucccugaaggc

SEQ ID NO: 3318971 - RNA, 11 nt, Human
caucccugaag

SEQ ID NO: 3318972 - RNA, 19 nt, Human
caucccucuggggcuguuc

SEQ ID NO: 3318973 - RNA, 15 nt, Human
caucccucuggggcu

SEQ ID NO: 3318974 - RNA, 15 nt, Human
cauccagguucagcu

SEQ ID NO: 3318975 - RNA, 15 nt, Human
caucaccaacgucug

SEQ ID NO: 3318976 - RNA, 13 nt, Human
caucauugaaauc

SEQ ID NO: 3318977 - RNA, 21 nt, Human
caucauugaaaucuuuuugcu

SEQ ID NO: 3318978 - RNA, 20 nt, Human
caucauugaaaucuuuuugc

SEQ ID NO: 3318979 - RNA, 15 nt, Human
caucauugaaaucuu

SEQ ID NO: 3318980 - RNA, 14 nt, Human
caucauugaaaucu

SEQ ID NO: 3318981 - RNA, 21 nt, Human
caucccugaaggccccgccca

SEQ ID NO: 3318982 - RNA, 19 nt, Human
caucccugaaggccccgcc

SEQ ID NO: 3318983 - RNA, 18 nt, Human
caucccugaaggccccgc

SEQ ID NO: 3318984 - RNA, 17 nt, Human
caucccugaaggccccg

SEQ ID NO: 3318985 - RNA, 20 nt, Human
gccaugaggaacaaggcaag

SEQ ID NO: 3318986 - RNA, 14 nt, Human
gccaugcuccuggc

SEQ ID NO: 3318987 - RNA, 21 nt, Human
gccagucaccccggccaccug

SEQ ID NO: 3318988 - RNA, 12 nt, Human
gccaguaaaugg

SEQ ID NO: 3318989 - RNA, 23 nt, Human
gccaguaaaugggggugcauuug

SEQ ID NO: 3318990 - RNA, 13 nt, Human
gccaggcuggucu

SEQ ID NO: 3318991 - RNA, 15 nt, Human
gccaugggccuccug

SEQ ID NO: 3318992 - RNA, 16 nt, Human
gccaugggccuccugu

SEQ ID NO: 3318993 - RNA, 16 nt, Human
gcccaccuggccucug

SEQ ID NO: 3318994 - RNA, 15 nt, Human
gcccaccuggccucu

SEQ ID NO: 3318995 - RNA, 24 nt, Human
gcccaccuggccucugcacucccc

SEQ ID NO: 3318996 - RNA, 21 nt, Human
gcccaccuggccucugcacuc

SEQ ID NO: 3318997 - RNA, 20 nt, Human
gcccaccuggccucugcacu

SEQ ID NO: 3318998 - RNA, 17 nt, Human
gcccaccuggccucugc

SEQ ID NO: 3318999 - RNA, 13 nt, Human
gcccaccuuggcu

SEQ ID NO: 3319000 - RNA, 15 nt, Human
gcccaccuuggcuca

SEQ ID NO: 3319001 - RNA, 16 nt, Human
gcccaccuuggcucaa

SEQ ID NO: 3319002 - RNA, 14 nt, Human
gcccacuucugcca

SEQ ID NO: 3319003 - RNA, 19 nt, Human
gccagauucuuuccugagg

SEQ ID NO: 3319004 - RNA, 21 nt, Human
gccagccgagauagccaaggc

SEQ ID NO: 3319005 - RNA, 22 nt, Human
gccagccgagauagccaaggcc

SEQ ID NO: 3319006 - RNA, 20 nt, Human
gccagauucuuuccugaggc

SEQ ID NO: 3319007 - RNA, 13 nt, Human
gccagauuucacu

SEQ ID NO: 3319008 - RNA, 24 nt, Human
gccagauucuuuccugaggcuggg

SEQ ID NO: 3319009 - RNA, 14 nt, Human
gccagaugcaccag

SEQ ID NO: 3319010 - RNA, 22 nt, Human
gccagaggagagaggacccccu

SEQ ID NO: 3319011 - RNA, 20 nt, Human
gccacugcaccgggccacag

SEQ ID NO: 3319012 - RNA, 21 nt, Human
gccacugcaccgggccacaga

SEQ ID NO: 3319013 - RNA, 19 nt, Human
gccacugcaccgggccaca

SEQ ID NO: 3319014 - RNA, 22 nt, Human
gccagagacacaagccuucggc

SEQ ID NO: 3319015 - RNA, 20 nt, Human
gccagagacacaagccuucg

SEQ ID NO: 3319016 - RNA, 21 nt, Human
gccagagacacaagccuucgg

SEQ ID NO: 3319017 - RNA, 20 nt, Human
gccaaggccaaaggaagcac

SEQ ID NO: 3319018 - RNA, 19 nt, Human
gccaaggccaaaggaagca

SEQ ID NO: 3319019 - RNA, 24 nt, Human
gccaaggccaaaggaagcacaugc

SEQ ID NO: 3319020 - RNA, 16 nt, Human
gccagcugcuugggcu

SEQ ID NO: 3319021 - RNA, 18 nt, Human
gccagcugcuugggcuuc

SEQ ID NO: 3319022 - RNA, 17 nt, Human
gccagcugcuugggcuu

SEQ ID NO: 3319023 - RNA, 14 nt, Human
gccaggaagccagc

SEQ ID NO: 3319024 - RNA, 13 nt, Human
gccaggaagccag

SEQ ID NO: 3319025 - RNA, 12 nt, Human
gccaggaagcca

SEQ ID NO: 3319026 - RNA, 20 nt, Human
gccagcugcuugggcuucau

SEQ ID NO: 3319027 - RNA, 11 nt, Human
gccaggaagcc

SEQ ID NO: 3319028 - RNA, 20 nt, Human
gccaggaagccagcaggcuc

SEQ ID NO: 3319029 - RNA, 20 nt, Human
gccaggagccuccugcccuu

SEQ ID NO: 3319030 - RNA, 19 nt, Human
gccaggagccuccugcccu

SEQ ID NO: 3319031 - RNA, 16 nt, Human
gccaggagccuccugc

SEQ ID NO: 3319032 - RNA, 14 nt, Human
gccaggagccuccu

SEQ ID NO: 3319033 - RNA, 21 nt, Human
gcccuccaagaccuucuccuu

SEQ ID NO: 3319034 - RNA, 19 nt, Human
gcccuccaagaccuucucc

SEQ ID NO: 3319035 - RNA, 23 nt, Human
gcccuccaagaccuucuccuuca

SEQ ID NO: 3319036 - RNA, 22 nt, Human
gcccuccaagaccuucuccuuc

SEQ ID NO: 3319037 - RNA, 18 nt, Human
gcccucugcccacucccu

SEQ ID NO: 3319038 - RNA, 16 nt, Human
gcccucugcccacucc

SEQ ID NO: 3319039 - RNA, 13 nt, Human
gcccucugcccac

SEQ ID NO: 3319040 - RNA, 13 nt, Human
gcccugcagaggg

SEQ ID NO: 3319041 - RNA, 14 nt, Human
gcccugcagagggc

SEQ ID NO: 3319042 - RNA, 15 nt, Human
gcccugcagagggca

SEQ ID NO: 3319043 - RNA, 16 nt, Human
gccccucagggucccu

SEQ ID NO: 3319044 - RNA, 23 nt, Human
gccccucaacucuccuccagagu

SEQ ID NO: 3319045 - RNA, 18 nt, Human
gccccgaggccuucucug

SEQ ID NO: 3319046 - RNA, 14 nt, Human
gccccucagggucc

SEQ ID NO: 3319047 - RNA, 15 nt, Human
gccccgaggccuucu

SEQ ID NO: 3319048 - RNA, 20 nt, Human
gccccuucugacccaugcug

SEQ ID NO: 3319049 - RNA, 14 nt, Human
gccccauucugccu

SEQ ID NO: 3319050 - RNA, 22 nt, Human
gccccauccucuguacagagcc

SEQ ID NO: 3319051 - RNA, 14 nt, Human
gccccauccucugu

SEQ ID NO: 3319052 - RNA, 13 nt, Human
gccccauccucug

SEQ ID NO: 3319053 - RNA, 21 nt, Human
gccccagugcccacaggauca

SEQ ID NO: 3319054 - RNA, 13 nt, Human
gccccagugccca

SEQ ID NO: 3319055 - RNA, 14 nt, Human
gccccagugcccac

SEQ ID NO: 3319056 - RNA, 18 nt, Human
gccccaucccaaacccuu

SEQ ID NO: 3319057 - RNA, 12 nt, Human
gccccagugccc

SEQ ID NO: 3319058 - RNA, 22 nt, Human
gcccaguuggguggaugccugg

SEQ ID NO: 3319059 - RNA, 15 nt, Human
gcccagagagggugg

SEQ ID NO: 3319060 - RNA, 21 nt, Human
gcccagagaggguggugaccu

SEQ ID NO: 3319061 - RNA, 23 nt, Human
gcccaggccccugccacccuggg

SEQ ID NO: 3319062 - RNA, 22 nt, Human
gcccaggccccugccacccugg

SEQ ID NO: 3319063 - RNA, 12 nt, Human
gcccaggcuggc

SEQ ID NO: 3319064 - RNA, 21 nt, Human
gccgggcgcgguggcucacgc

SEQ ID NO: 3319065 - RNA, 12 nt, Human
gccgcagcccug

SEQ ID NO: 3319066 - RNA, 11 nt, Human
gccgcagcccu

SEQ ID NO: 3319067 - RNA, 20 nt, Human
gccgagaucacgccacugca

SEQ ID NO: 3319068 - RNA, 21 nt, Human
gccgagaucacgccacugcac

SEQ ID NO: 3319069 - RNA, 22 nt, Human
gccgagaucacgccacugcacu

SEQ ID NO: 3319070 - RNA, 19 nt, Human
gccgagaucacgccacugc

SEQ ID NO: 3319071 - RNA, 17 nt, Human
gcccuucucuccagccc

SEQ ID NO: 3319072 - RNA, 16 nt, Human
gcccuucucuccagcc

SEQ ID NO: 3319073 - RNA, 14 nt, Human
gcccuucucuccag

SEQ ID NO: 3319074 - RNA, 17 nt, Human
gccgucuaccugagggg

SEQ ID NO: 3319075 - RNA, 16 nt, Human
gccgucuaccugaggg

SEQ ID NO: 3319076 - RNA, 15 nt, Human
gccgucuaccugagg

SEQ ID NO: 3319077 - RNA, 20 nt, Human
gccguguaaccauggaccca

SEQ ID NO: 3319078 - RNA, 18 nt, Human
gccucaaccuccugggcu

SEQ ID NO: 3319079 - RNA, 19 nt, Human
gccucaaccuccugggcua

SEQ ID NO: 3319080 - RNA, 17 nt, Human
gccucacaguccuuacc

SEQ ID NO: 3319081 - RNA, 13 nt, Human
gccucacaguccu

SEQ ID NO: 3319082 - RNA, 17 nt, Human
gccucaaccuccugggc

SEQ ID NO: 3319083 - RNA, 14 nt, Human
gccucucucaggcc

SEQ ID NO: 3319084 - RNA, 13 nt, Human
gccucucucaggc

SEQ ID NO: 3319085 - RNA, 17 nt, Human
gccucugacacacagcu

SEQ ID NO: 3319086 - RNA, 18 nt, Human
gccucugacacacagcuc

SEQ ID NO: 3319087 - RNA, 16 nt, Human
gccucugacacacagc

SEQ ID NO: 3319088 - RNA, 16 nt, Human
gccucucucaggccaa

SEQ ID NO: 3319089 - RNA, 19 nt, Human
gccucugacacacagcucu

SEQ ID NO: 3319090 - RNA, 20 nt, Human
gccucugacacacagcucug

SEQ ID NO: 3319091 - RNA, 21 nt, Human
gccucugacacacagcucugu

SEQ ID NO: 3319092 - RNA, 14 nt, Human
gccucugcacuccc

SEQ ID NO: 3319093 - RNA, 12 nt, Human
gccucugccucu

SEQ ID NO: 3319094 - RNA, 13 nt, Human
gccucugccucug

SEQ ID NO: 3319095 - RNA, 15 nt, Human
gccugcaagggagug

SEQ ID NO: 3319096 - RNA, 13 nt, Human
gccugcaagggag

SEQ ID NO: 3319097 - RNA, 18 nt, Human
gccucccgaguagcuggg

SEQ ID NO: 3319098 - RNA, 19 nt, Human
gccucccgaguagcuggga

SEQ ID NO: 3319099 - RNA, 17 nt, Human
gccucccgaguagcugg

SEQ ID NO: 3319100 - RNA, 18 nt, Human
gccucacaguccuuacca

SEQ ID NO: 3319101 - RNA, 15 nt, Human
gccucagcauccugg

SEQ ID NO: 3319102 - RNA, 16 nt, Human
gccucagcauccuggc

SEQ ID NO: 3319103 - RNA, 18 nt, Human
gccucccaaagugcuggg

SEQ ID NO: 3319104 - RNA, 19 nt, Human
gccucccaaagugcuggga

SEQ ID NO: 3319105 - RNA, 13 nt, Human
gccucccaacuca

SEQ ID NO: 3319106 - RNA, 16 nt, Human
gccucccaucacccgc

SEQ ID NO: 3319107 - RNA, 14 nt, Human
gccucccaucaccc

SEQ ID NO: 3319108 - RNA, 19 nt, Human
gccucccaacucaccccag

SEQ ID NO: 3319109 - RNA, 18 nt, Human
gccucccaacucacccca

SEQ ID NO: 3319110 - RNA, 17 nt, Human
gccucccaacucacccc

SEQ ID NO: 3319111 - RNA, 16 nt, Human
gccucccaacucaccc

SEQ ID NO: 3319112 - RNA, 16 nt, Human
gcuaccuuuguauucu

SEQ ID NO: 3319113 - RNA, 15 nt, Human
gcuaggaacacuccu

SEQ ID NO: 3319114 - RNA, 20 nt, Human
gcuaagagggagggagggcu

SEQ ID NO: 3319115 - RNA, 20 nt, Human
gcuacacacugcauguuugu

SEQ ID NO: 3319116 - RNA, 13 nt, Human
gcuacacacugca

SEQ ID NO: 3319117 - RNA, 14 nt, Human
gcuacacaggggaa

SEQ ID NO: 3319118 - RNA, 13 nt, Human
gcuaagagggagg

SEQ ID NO: 3319119 - RNA, 15 nt, Human
gcgccuacaggagug

SEQ ID NO: 3319120 - RNA, 11 nt, Human
gcggacagcca

SEQ ID NO: 3319121 - RNA, 13 nt, Human
gcggacagccacg

SEQ ID NO: 3319122 - RNA, 19 nt, Human
gcggaaugaaccacaucuu

SEQ ID NO: 3319123 - RNA, 15 nt, Human
gcggacagccacggc

SEQ ID NO: 3319124 - RNA, 19 nt, Human
gcgucucauacucaccuca

SEQ ID NO: 3319125 - RNA, 23 nt, Human
gcgacaaugcaaaccaucauuga

SEQ ID NO: 3319126 - RNA, 16 nt, Human
gccuuccagggguggg

SEQ ID NO: 3319127 - RNA, 15 nt, Human
gccuuccaggggugg

SEQ ID NO: 3319128 - RNA, 12 nt, Human
gccuuccagggg

SEQ ID NO: 3319129 - RNA, 19 nt, Human
gccuuauggaacacucuga

SEQ ID NO: 3319130 - RNA, 18 nt, Human
gccuuauggaacacucug

SEQ ID NO: 3319131 - RNA, 16 nt, Human
gccuuauggaacacuc

SEQ ID NO: 3319132 - RNA, 14 nt, Human
gccuuauggaacac

SEQ ID NO: 3319133 - RNA, 10 nt, Human
gccuuaugga

SEQ ID NO: 3319134 - RNA, 19 nt, Human
gccuuagaagucacacagu

SEQ ID NO: 3319135 - RNA, 17 nt, Human
gccuuagaagucacaca

SEQ ID NO: 3319136 - RNA, 18 nt, Human
gccuuagaagucacacag

SEQ ID NO: 3319137 - RNA, 21 nt, Human
gccuuacacaaugguuuucuu

SEQ ID NO: 3319138 - RNA, 18 nt, Human
gccuuacccucauguucu

SEQ ID NO: 3319139 - RNA, 20 nt, Human
gccuuacacaaugguuuucu

SEQ ID NO: 3319140 - RNA, 16 nt, Human
gccuuacacaaugguu

SEQ ID NO: 3319141 - RNA, 21 nt, Human
gccuguugggccaggagccuc

SEQ ID NO: 3319142 - RNA, 22 nt, Human
gccugggggcugggcagaggaa

SEQ ID NO: 3319143 - RNA, 21 nt, Human
gccugggggcugggcagagga

SEQ ID NO: 3319144 - RNA, 18 nt, Human
gccugguggcagcugcgg

SEQ ID NO: 3319145 - RNA, 19 nt, Human
gccugguggcagcugcggu

SEQ ID NO: 3319146 - RNA, 21 nt, Human
gccugguggcagcugcggucc

SEQ ID NO: 3319147 - RNA, 13 nt, Human
gccugguggcagc

SEQ ID NO: 3319148 - RNA, 21 nt, Human
gcagccccuguucuggcagag

SEQ ID NO: 3319149 - RNA, 20 nt, Human
gcagccccuguucuggcaga

SEQ ID NO: 3319150 - RNA, 13 nt, Human
gcagcccugcaga

SEQ ID NO: 3319151 - RNA, 17 nt, Human
gcagccccauucugccu

SEQ ID NO: 3319152 - RNA, 23 nt, Human
gcagcaauaaagcagcguuucua

SEQ ID NO: 3319153 - RNA, 16 nt, Human
gcagcaauaaagcagc

SEQ ID NO: 3319154 - RNA, 18 nt, Human
gcagccccauucugccug

SEQ ID NO: 3319155 - RNA, 19 nt, Human
gcagccccauucugccugc

SEQ ID NO: 3319156 - RNA, 21 nt, Human
gcagccccauucugccugccc

SEQ ID NO: 3319157 - RNA, 24 nt, Human
gcagccccauucugccugcccagg

SEQ ID NO: 3319158 - RNA, 20 nt, Human
gcagaguugaagacagagcu

SEQ ID NO: 3319159 - RNA, 21 nt, Human
gcagaguugaagacagagcua

SEQ ID NO: 3319160 - RNA, 17 nt, Human
gcagacaguuaagagaa

SEQ ID NO: 3319161 - RNA, 22 nt, Human
gcagauacaggaaaagcugcug

SEQ ID NO: 3319162 - RNA, 12 nt, Human
gcagcaauaaag

SEQ ID NO: 3319163 - RNA, 12 nt, Human
gcaggcagccag

SEQ ID NO: 3319164 - RNA, 14 nt, Human
gcaggcagccaggc

SEQ ID NO: 3319165 - RNA, 13 nt, Human
gcaggcagccagg

SEQ ID NO: 3319166 - RNA, 20 nt, Human
gcaggaggaucacuugaguc

SEQ ID NO: 3319167 - RNA, 23 nt, Human
gcaggaggaucacuugaguccag

SEQ ID NO: 3319168 - RNA, 14 nt, Human
gcagcucaccucuc

SEQ ID NO: 3319169 - RNA, 15 nt, Human
gcagccuuggcaaac

SEQ ID NO: 3319170 - RNA, 15 nt, Human
gcagcucaccucucc

SEQ ID NO: 3319171 - RNA, 17 nt, Human
gcagcccugcagagggc

SEQ ID NO: 3319172 - RNA, 16 nt, Human
gcagcccugcagaggg

SEQ ID NO: 3319173 - RNA, 15 nt, Human
gcagcccugcagagg

SEQ ID NO: 3319174 - RNA, 14 nt, Human
gcagcccugcagag

SEQ ID NO: 3319175 - RNA, 23 nt, Human
gcagacaggcaagcaccuccugc

SEQ ID NO: 3319176 - RNA, 19 nt, Human
gcagacaggcaagcaccuc

SEQ ID NO: 3319177 - RNA, 14 nt, Human
gcagacaggcaagc

SEQ ID NO: 3319178 - RNA, 15 nt, Human
gcagacaggaccagg

SEQ ID NO: 3319179 - RNA, 13 nt, Human
gcagacaggacca

SEQ ID NO: 3319180 - RNA, 12 nt, Human
gcagacaggacc

SEQ ID NO: 3319181 - RNA, 15 nt, Human
gcacugcuuccagug

SEQ ID NO: 3319182 - RNA, 20 nt, Human
gcacugcuuccagugaggcu

SEQ ID NO: 3319183 - RNA, 18 nt, Human
gcacugcuuccagugagg

SEQ ID NO: 3319184 - RNA, 16 nt, Human
gcacugcuuccaguga

SEQ ID NO: 3319185 - RNA, 14 nt, Human
gcaauggcagccuu

SEQ ID NO: 3319186 - RNA, 20 nt, Human
gcaccacugcacuccagccu

SEQ ID NO: 3319187 - RNA, 12 nt, Human
gcaauggcagcc

SEQ ID NO: 3319188 - RNA, 13 nt, Human
gcaauggcagccu

SEQ ID NO: 3319189 - RNA, 14 nt, Human
gcaccagcagccug

SEQ ID NO: 3319190 - RNA, 15 nt, Human
gcaccagcagccugg

SEQ ID NO: 3319191 - RNA, 22 nt, Human
gcaccacugcacuccagccugg

SEQ ID NO: 3319192 - RNA, 21 nt, Human
gcaccacugcacuccagccug

SEQ ID NO: 3319193 - RNA, 16 nt, Human
gcaccagcagccugga

SEQ ID NO: 3319194 - RNA, 22 nt, Human
gcacccaccaucaugucuggcu

SEQ ID NO: 3319195 - RNA, 18 nt, Human
gcacccggccccugcugg

SEQ ID NO: 3319196 - RNA, 19 nt, Human
gcacccggccccugcuggu

SEQ ID NO: 3319197 - RNA, 17 nt, Human
gcaccuuagacaguccc

SEQ ID NO: 3319198 - RNA, 14 nt, Human
gcaccuuagacagu

SEQ ID NO: 3319199 - RNA, 22 nt, Human
gcaccuggaauauauaaccagu

SEQ ID NO: 3319200 - RNA, 15 nt, Human
gcacccucaggcagg

SEQ ID NO: 3319201 - RNA, 21 nt, Human
gcaccuggaauauauaaccag

SEQ ID NO: 3319202 - RNA, 18 nt, Human
gcaccuggaauauauaac

SEQ ID NO: 3319203 - RNA, 18 nt, Human
gcaccuuagacagucccu

SEQ ID NO: 3319204 - RNA, 12 nt, Human
gcacgauuucug

SEQ ID NO: 3319205 - RNA, 17 nt, Human
gcauuaucuagauacug

SEQ ID NO: 3319206 - RNA, 13 nt, Human
gcauuugcugaau

SEQ ID NO: 3319207 - RNA, 21 nt, Human
gcauuugaggucuguucuuuc

SEQ ID NO: 3319208 - RNA, 14 nt, Human
gcauuugcugaaua

SEQ ID NO: 3319209 - RNA, 16 nt, Human
gcauuuguuugaacug

SEQ ID NO: 3319210 - RNA, 13 nt, Human
gccaaagccaaag

SEQ ID NO: 3319211 - RNA, 20 nt, Human
gccaaagccaaagcuaggcc

SEQ ID NO: 3319212 - RNA, 19 nt, Human
gccaaagccuccuccagcc

SEQ ID NO: 3319213 - RNA, 16 nt, Human
gccaaagccuccucca

SEQ ID NO: 3319214 - RNA, 16 nt, Human
gccaaagcuaggccug

SEQ ID NO: 3319215 - RNA, 22 nt, Human
gccaaagcuaggccuggccaga

SEQ ID NO: 3319216 - RNA, 18 nt, Human
gcauuuguuugaacugau

SEQ ID NO: 3319217 - RNA, 16 nt, Human
gccaaacucaccugcc

SEQ ID NO: 3319218 - RNA, 14 nt, Human
gccaaacucaccug

SEQ ID NO: 3319219 - RNA, 15 nt, Human
gcauguucucugagg

SEQ ID NO: 3319220 - RNA, 21 nt, Human
gcauguucucugaggacacua

SEQ ID NO: 3319221 - RNA, 14 nt, Human
gcauguucucugag

SEQ ID NO: 3319222 - RNA, 18 nt, Human
gcaugcgggcuuccuccu

SEQ ID NO: 3319223 - RNA, 22 nt, Human
gcaggggaggguagagcggaga

SEQ ID NO: 3319224 - RNA, 14 nt, Human
gcagggcucagcgg

SEQ ID NO: 3319225 - RNA, 17 nt, Human
gcagggucucacucugu

SEQ ID NO: 3319226 - RNA, 18 nt, Human
gcagggucucacucuguc

SEQ ID NO: 3319227 - RNA, 19 nt, Human
gcagggcucagcggggaca

SEQ ID NO: 3319228 - RNA, 21 nt, Human
gcagggcucagcggggacagc

SEQ ID NO: 3319229 - RNA, 16 nt, Human
gcaggcagccaggcca

SEQ ID NO: 3319230 - RNA, 15 nt, Human
gcaggcagccaggcc

SEQ ID NO: 3319231 - RNA, 15 nt, Human
gcagugcaugcuguc

SEQ ID NO: 3319232 - RNA, 16 nt, Human
gcagugcaugcugucc

SEQ ID NO: 3319233 - RNA, 22 nt, Human
gcagguccaggguuugaguuca

SEQ ID NO: 3319234 - RNA, 19 nt, Human
gcaggucuugaacuccugg

SEQ ID NO: 3319235 - RNA, 20 nt, Human
gcaggucuugaacuccuggc

SEQ ID NO: 3319236 - RNA, 17 nt, Human
gcaguuauuaacacuaa

SEQ ID NO: 3319237 - RNA, 23 nt, Human
gcaguggugguuuucuguucuuu

SEQ ID NO: 3319238 - RNA, 22 nt, Human
gcaguggugguuuucuguucuu

SEQ ID NO: 3319239 - RNA, 13 nt, Human
gcagugggagcug

SEQ ID NO: 3319240 - RNA, 12 nt, Human
gcagugggagcu

SEQ ID NO: 3319241 - RNA, 14 nt, Human
gcagugggagcugc

SEQ ID NO: 3319242 - RNA, 19 nt, Human
gauuucuguuuagauaaua

SEQ ID NO: 3319243 - RNA, 11 nt, Human
gauuucuguuu

SEQ ID NO: 3319244 - RNA, 15 nt, Human
gauuuccguuaaaau

SEQ ID NO: 3319245 - RNA, 18 nt, Human
gauugcaacaggcugggc

SEQ ID NO: 3319246 - RNA, 21 nt, Human
gauugcaacaggcugggcuuc

SEQ ID NO: 3319247 - RNA, 23 nt, Human
gauugcaccacugcacuccagcc

SEQ ID NO: 3319248 - RNA, 16 nt, Human
gauugcaccacugcac

SEQ ID NO: 3319249 - RNA, 20 nt, Human
gauugcaacaggcugggcuu

SEQ ID NO: 3319250 - RNA, 18 nt, Human
gauucuuuccugaggcug

SEQ ID NO: 3319251 - RNA, 17 nt, Human
gauucuuuccugaggcu

SEQ ID NO: 3319252 - RNA, 16 nt, Human
gauucuuuccugaggc

SEQ ID NO: 3319253 - RNA, 12 nt, Human
gauucuuuccug

SEQ ID NO: 3319254 - RNA, 19 nt, Human
gauucccaagcucugcucc

SEQ ID NO: 3319255 - RNA, 20 nt, Human
gauucccaagcucugcuccu

SEQ ID NO: 3319256 - RNA, 18 nt, Human
gauucagacagcugccug

SEQ ID NO: 3319257 - RNA, 19 nt, Human
gauucagacagcugccugg

SEQ ID NO: 3319258 - RNA, 15 nt, Human
gauucagcucugcaa

SEQ ID NO: 3319259 - RNA, 13 nt, Human
gauucagcucugc

SEQ ID NO: 3319260 - RNA, 19 nt, Human
gauggggcugcaccggcug

SEQ ID NO: 3319261 - RNA, 23 nt, Human
gauggggcugcaccggcuggccu

SEQ ID NO: 3319262 - RNA, 17 nt, Human
gauucauauuuacuucu

SEQ ID NO: 3319263 - RNA, 18 nt, Human
gauucauauuuacuucuu

SEQ ID NO: 3319264 - RNA, 19 nt, Human
gauucauauuuacuucuua

SEQ ID NO: 3319265 - RNA, 18 nt, Human
gauucccaagcucugcuc

SEQ ID NO: 3319266 - RNA, 16 nt, Human
gcaaaguaucccuacu

SEQ ID NO: 3319267 - RNA, 23 nt, Human
gcaagacgcugugcugcccugcc

SEQ ID NO: 3319268 - RNA, 22 nt, Human
gcaagacgcugugcugcccugc

SEQ ID NO: 3319269 - RNA, 21 nt, Human
gcaagacgcugugcugcccug

SEQ ID NO: 3319270 - RNA, 20 nt, Human
gcaagacgcugugcugcccu

SEQ ID NO: 3319271 - RNA, 14 nt, Human
gcaagacgcugugc

SEQ ID NO: 3319272 - RNA, 17 nt, Human
gcaagaauugaagcagg

SEQ ID NO: 3319273 - RNA, 18 nt, Human
gcaaggagauuuacaacu

SEQ ID NO: 3319274 - RNA, 11 nt, Human
gcaaggcuguc

SEQ ID NO: 3319275 - RNA, 23 nt, Human
gcaaugaccuuucaauaggaaaa

SEQ ID NO: 3319276 - RNA, 13 nt, Human
gcaaugcuggcug

SEQ ID NO: 3319277 - RNA, 14 nt, Human
gcaaugcuggcugu

SEQ ID NO: 3319278 - RNA, 22 nt, Human
gcaaugcuggcuguuggcuggg

SEQ ID NO: 3319279 - RNA, 23 nt, Human
gcaaugcuggcuguuggcugggg

SEQ ID NO: 3319280 - RNA, 22 nt, Human
gcaaugaccuuucaauaggaaa

SEQ ID NO: 3319281 - RNA, 20 nt, Human
gcaaugaccuuucaauagga

SEQ ID NO: 3319282 - RNA, 17 nt, Human
gcaaugaccuuucaaua

SEQ ID NO: 3319283 - RNA, 15 nt, Human
gcaaugaccuuucaa

SEQ ID NO: 3319284 - RNA, 17 nt, Human
gcaaucaaaucugcuuu

SEQ ID NO: 3319285 - RNA, 15 nt, Human
gcaaucaaaucugcu

SEQ ID NO: 3319286 - RNA, 13 nt, Human
gauggggcccugc

SEQ ID NO: 3319287 - RNA, 22 nt, Human
gauggggcccugccuccuuugu

SEQ ID NO: 3319288 - RNA, 14 nt, Human
gauggggcccugcc

SEQ ID NO: 3319289 - RNA, 20 nt, Human
gaugccugguggcagcugcg

SEQ ID NO: 3319290 - RNA, 18 nt, Human
gaugccugguggcagcug

SEQ ID NO: 3319291 - RNA, 19 nt, Human
gaugccugguggcagcugc

SEQ ID NO: 3319292 - RNA, 22 nt, Human
gauggauuuccagccaaagccu

SEQ ID NO: 3319293 - RNA, 22 nt, Human
gauggccgggcgcgguggcuca

SEQ ID NO: 3319294 - RNA, 13 nt, Human
gaugcaccagccc

SEQ ID NO: 3319295 - RNA, 22 nt, Human
gaugcacagaguuguuacauuu

SEQ ID NO: 3319296 - RNA, 21 nt, Human
gaugcacagaguuguuacauu

SEQ ID NO: 3319297 - RNA, 17 nt, Human
gaugccugguggcagcu

SEQ ID NO: 3319298 - RNA, 12 nt, Human
gaugcagccuca

SEQ ID NO: 3319299 - RNA, 14 nt, Human
gaugcagccucaca

SEQ ID NO: 3319300 - RNA, 18 nt, Human
gaucuuugcagacaggca

SEQ ID NO: 3319301 - RNA, 17 nt, Human
gaucuuugcagacaggc

SEQ ID NO: 3319302 - RNA, 16 nt, Human
gaucccucauccucau

SEQ ID NO: 3319303 - RNA, 15 nt, Human
gaucccucauccuca

SEQ ID NO: 3319304 - RNA, 22 nt, Human
gauccugagccagauuucacuc

SEQ ID NO: 3319305 - RNA, 21 nt, Human
gauccugagccagauuucacu

SEQ ID NO: 3319306 - RNA, 20 nt, Human
gaggaaggaaacccagcucu

SEQ ID NO: 3319307 - RNA, 19 nt, Human
gaggaaggaaacccagcuc

SEQ ID NO: 3319308 - RNA, 13 nt, Human
gaggaaggaaacc

SEQ ID NO: 3319309 - RNA, 18 nt, Human
gauacaggaaaagcugcu

SEQ ID NO: 3319310 - RNA, 20 nt, Human
gauagcacagacccugcccu

SEQ ID NO: 3319311 - RNA, 22 nt, Human
gauagcacagacccugcccugu

SEQ ID NO: 3319312 - RNA, 21 nt, Human
gauagcacagacccugcccug

SEQ ID NO: 3319313 - RNA, 22 nt, Human
gauaauacaccacuacauucug

SEQ ID NO: 3319314 - RNA, 21 nt, Human
gauaauacaccacuacauucu

SEQ ID NO: 3319315 - RNA, 18 nt, Human
gauaauacaccacuacau

SEQ ID NO: 3319316 - RNA, 14 nt, Human
gauaauacaccacu

SEQ ID NO: 3319317 - RNA, 17 nt, Human
gaucauccacugugcca

SEQ ID NO: 3319318 - RNA, 19 nt, Human
gaucauccacugugccaug

SEQ ID NO: 3319319 - RNA, 16 nt, Human
gaucauccacugugcc

SEQ ID NO: 3319320 - RNA, 21 nt, Human
gaucauccacugugccaugug

SEQ ID NO: 3319321 - RNA, 16 nt, Human
gaucacgccacugcac

SEQ ID NO: 3319322 - RNA, 18 nt, Human
gaucacgccacugcacua

SEQ ID NO: 3319323 - RNA, 22 nt, Human
gaucagucugauucccaagcuc

SEQ ID NO: 3319324 - RNA, 15 nt, Human
gaucagccugggcaa

SEQ ID NO: 3319325 - RNA, 12 nt, Human
gaucagccuggg

SEQ ID NO: 3319326 - RNA, 21 nt, Human
gagaaugcacaaacagaggcc

SEQ ID NO: 3319327 - RNA, 20 nt, Human
gagaaugcacaaacagaggc

SEQ ID NO: 3319328 - RNA, 17 nt, Human
gagacacaagccuucgg

SEQ ID NO: 3319329 - RNA, 15 nt, Human
gagacacaagccuuc

SEQ ID NO: 3319330 - RNA, 19 nt, Human
gagacagaguuuucacucu

SEQ ID NO: 3319331 - RNA, 12 nt, Human
gagacagcccgg

SEQ ID NO: 3319332 - RNA, 13 nt, Human
gacuuggaagcuc

SEQ ID NO: 3319333 - RNA, 21 nt, Human
gagaaaauggacguguuauga

SEQ ID NO: 3319334 - RNA, 14 nt, Human
gacuuggaagcucc

SEQ ID NO: 3319335 - RNA, 15 nt, Human
gacuuggaagcuccg

SEQ ID NO: 3319336 - RNA, 16 nt, Human
gacuuggaagcuccgc

SEQ ID NO: 3319337 - RNA, 19 nt, Human
gacucgcgacaaugcaaac

SEQ ID NO: 3319338 - RNA, 18 nt, Human
gacucgcgacaaugcaaa

SEQ ID NO: 3319339 - RNA, 17 nt, Human
gacuccugcaggcagcc

SEQ ID NO: 3319340 - RNA, 23 nt, Human
gagaaaguacuucuccacccugc

SEQ ID NO: 3319341 - RNA, 22 nt, Human
gagaaaguacuucuccacccug

SEQ ID NO: 3319342 - RNA, 24 nt, Human
gagacagcccgggcucugccuccc

SEQ ID NO: 3319343 - RNA, 23 nt, Human
gagacagcccgggcucugccucc

SEQ ID NO: 3319344 - RNA, 22 nt, Human
gagacagcccgggcucugccuc

SEQ ID NO: 3319345 - RNA, 21 nt, Human
gagacagcccgggcucugccu

SEQ ID NO: 3319346 - RNA, 20 nt, Human
gagacagcccgggcucugcc

SEQ ID NO: 3319347 - RNA, 19 nt, Human
gagacagcccgggcucugc

SEQ ID NO: 3319348 - RNA, 18 nt, Human
gagacagcccgggcucug

SEQ ID NO: 3319349 - RNA, 17 nt, Human
gagacagcccgggcucu

SEQ ID NO: 3319350 - RNA, 14 nt, Human
gagacagcccgggc

SEQ ID NO: 3319351 - RNA, 14 nt, Human
gagacucugucuca

SEQ ID NO: 3319352 - RNA, 13 nt, Human
gagacucugucuc

SEQ ID NO: 3319353 - RNA, 16 nt, Human
gagacucgcgacaaug

SEQ ID NO: 3319354 - RNA, 22 nt, Human
gagacuccugcaggcagccagg

SEQ ID NO: 3319355 - RNA, 13 nt, Human
gagagccuuccag

SEQ ID NO: 3319356 - RNA, 13 nt, Human
gagaggggaacag

SEQ ID NO: 3319357 - RNA, 21 nt, Human
gagagggugggagugggccca

SEQ ID NO: 3319358 - RNA, 20 nt, Human
gagagggugggagugggccc

SEQ ID NO: 3319359 - RNA, 17 nt, Human
gagagaagagaaugcac

SEQ ID NO: 3319360 - RNA, 15 nt, Human
gagcugaguggggga

SEQ ID NO: 3319361 - RNA, 15 nt, Human
gagccugcaguuauu

SEQ ID NO: 3319362 - RNA, 17 nt, Human
gagcuagcagcagggag

SEQ ID NO: 3319363 - RNA, 15 nt, Human
gagcuagcagcaggg

SEQ ID NO: 3319364 - RNA, 14 nt, Human
gaggaacaaggcaa

SEQ ID NO: 3319365 - RNA, 16 nt, Human
gaggaacaaggcaagg

SEQ ID NO: 3319366 - RNA, 17 nt, Human
gaggaagagaaaaaaua

SEQ ID NO: 3319367 - RNA, 13 nt, Human
gaggaagccgcug

SEQ ID NO: 3319368 - RNA, 17 nt, Human
gaggaagccgcuggggc

SEQ ID NO: 3319369 - RNA, 14 nt, Human
gaggaagccgcugg

SEQ ID NO: 3319370 - RNA, 18 nt, Human
gaggaagccgcuggggcc

SEQ ID NO: 3319371 - RNA, 17 nt, Human
gaggaaagcaaaggaga

SEQ ID NO: 3319372 - RNA, 16 nt, Human
gaggaaagcaaaggag

SEQ ID NO: 3319373 - RNA, 22 nt, Human
gagcuuucugcuaucaaagagg

SEQ ID NO: 3319374 - RNA, 20 nt, Human
gagcuuugaaaauucagugg

SEQ ID NO: 3319375 - RNA, 12 nt, Human
gagccugcaguu

SEQ ID NO: 3319376 - RNA, 17 nt, Human
gagccucagcauccugg

SEQ ID NO: 3319377 - RNA, 14 nt, Human
gagccucagcaucc

SEQ ID NO: 3319378 - RNA, 15 nt, Human
gagccucagcauccu

SEQ ID NO: 3319379 - RNA, 13 nt, Human
gagccucagcauc

SEQ ID NO: 3319380 - RNA, 21 nt, Human
gagccgagaucacgccacugc

SEQ ID NO: 3319381 - RNA, 22 nt, Human
gagccgagaucacgccacugca

SEQ ID NO: 3319382 - RNA, 19 nt, Human
gagccgagaucacgccacu

SEQ ID NO: 3319383 - RNA, 20 nt, Human
gagccgagaucacgccacug

SEQ ID NO: 3319384 - RNA, 18 nt, Human
gagcccacgcccccacug

SEQ ID NO: 3319385 - RNA, 21 nt, Human
gagauagccaaggccaaagga

SEQ ID NO: 3319386 - RNA, 20 nt, Human
gagauagccaaggccaaagg

SEQ ID NO: 3319387 - RNA, 19 nt, Human
gagauagccaaggccaaag

SEQ ID NO: 3319388 - RNA, 16 nt, Human
gagcagagaccauccc

SEQ ID NO: 3319389 - RNA, 18 nt, Human
gagcagagaccaucccug

SEQ ID NO: 3319390 - RNA, 17 nt, Human
gagcagagaccaucccu

SEQ ID NO: 3319391 - RNA, 23 nt, Human
gagcagagaccaucccugaaggc

SEQ ID NO: 3319392 - RNA, 21 nt, Human
gagcagagaccaucccugaag

SEQ ID NO: 3319393 - RNA, 19 nt, Human
gagcagagaccaucccuga

SEQ ID NO: 3319394 - RNA, 21 nt, Human
gagcagccacauuccugaugc

SEQ ID NO: 3319395 - RNA, 22 nt, Human
gagcagccacauuccugaugcu

SEQ ID NO: 3319396 - RNA, 13 nt, Human
gagccagauuuca

SEQ ID NO: 3319397 - RNA, 13 nt, Human
gagcccaccuugg

SEQ ID NO: 3319398 - RNA, 15 nt, Human
gagcccaccuuggcu

SEQ ID NO: 3319399 - RNA, 17 nt, Human
gagcccaccuuggcuca

SEQ ID NO: 3319400 - RNA, 18 nt, Human
gagccacugcaccgggcc

SEQ ID NO: 3319401 - RNA, 19 nt, Human
gagccacugcaccgggcca

SEQ ID NO: 3319402 - RNA, 13 nt, Human
gagccacugcacc

SEQ ID NO: 3319403 - RNA, 15 nt, Human
gagccagauuucacu

SEQ ID NO: 3319404 - RNA, 19 nt, Human
gagccagauuucacucucc

SEQ ID NO: 3319405 - RNA, 18 nt, Human
gagccagauuucacucuc

SEQ ID NO: 3319406 - RNA, 11 nt, Human
gacccacugcu

SEQ ID NO: 3319407 - RNA, 13 nt, Human
gacccaugcugcc

SEQ ID NO: 3319408 - RNA, 15 nt, Human
gacccaugcugcccu

SEQ ID NO: 3319409 - RNA, 14 nt, Human
gacccaugcugccc

SEQ ID NO: 3319410 - RNA, 16 nt, Human
gacccaugcugcccug

SEQ ID NO: 3319411 - RNA, 18 nt, Human
gacccugaggcccagagg

SEQ ID NO: 3319412 - RNA, 21 nt, Human
gacccugaggcccagagggcc

SEQ ID NO: 3319413 - RNA, 12 nt, Human
gacccugcccug

SEQ ID NO: 3319414 - RNA, 20 nt, Human
gacccugaggcccagagggc

SEQ ID NO: 3319415 - RNA, 19 nt, Human
gacccugaggcccagaggg

SEQ ID NO: 3319416 - RNA, 15 nt, Human
gacccugcccugugg

SEQ ID NO: 3319417 - RNA, 13 nt, Human
gacccugcccugu

SEQ ID NO: 3319418 - RNA, 16 nt, Human
gacccugcccuguggg

SEQ ID NO: 3319419 - RNA, 23 nt, Human
gacccugucucaaaaaaagaaaa

SEQ ID NO: 3319420 - RNA, 21 nt, Human
gaccugaggcccuucucucca

SEQ ID NO: 3319421 - RNA, 18 nt, Human
gaccugaggcccuucucu

SEQ ID NO: 3319422 - RNA, 15 nt, Human
gaccugaggcccuuc

SEQ ID NO: 3319423 - RNA, 14 nt, Human
gaccugaggcccuu

SEQ ID NO: 3319424 - RNA, 12 nt, Human
gaccucaggccu

SEQ ID NO: 3319425 - RNA, 11 nt, Human
gaccucaggcc

SEQ ID NO: 3319426 - RNA, 19 nt, Human
gaccgugaggccagagaca

SEQ ID NO: 3319427 - RNA, 14 nt, Human
gaccgugaggccag

SEQ ID NO: 3319428 - RNA, 21 nt, Human
gaccuuucaauaggaaaaacu

SEQ ID NO: 3319429 - RNA, 20 nt, Human
gaccuuucaauaggaaaaac

SEQ ID NO: 3319430 - RNA, 23 nt, Human
gaccuugaacuggguacuugugg

SEQ ID NO: 3319431 - RNA, 14 nt, Human
gacggagucccacc

SEQ ID NO: 3319432 - RNA, 18 nt, Human
gacggagucccaccuugg

SEQ ID NO: 3319433 - RNA, 21 nt, Human
gacggagucccaccuuggcug

SEQ ID NO: 3319434 - RNA, 20 nt, Human
gacguguuaugacuccagaa

SEQ ID NO: 3319435 - RNA, 17 nt, Human
gacguguuaugacucca

SEQ ID NO: 3319436 - RNA, 15 nt, Human
gacguguuaugacuc

SEQ ID NO: 3319437 - RNA, 14 nt, Human
gacuccugcaggca

SEQ ID NO: 3319438 - RNA, 16 nt, Human
gacuccugcaggcagc

SEQ ID NO: 3319439 - RNA, 15 nt, Human
gacuccugcaggcag

SEQ ID NO: 3319440 - RNA, 22 nt, Human
gacguguuaugacuccagaauu

SEQ ID NO: 3319441 - RNA, 17 nt, Human
gacuacucccccaggug

SEQ ID NO: 3319442 - RNA, 23 nt, Human
gacacccugugauggggcccugc

SEQ ID NO: 3319443 - RNA, 22 nt, Human
gacacccugugauggggcccug

SEQ ID NO: 3319444 - RNA, 13 nt, Human
gacacccugugau

SEQ ID NO: 3319445 - RNA, 12 nt, Human
gacacccuguga

SEQ ID NO: 3319446 - RNA, 18 nt, Human
gacacaggcccggcucca

SEQ ID NO: 3319447 - RNA, 15 nt, Human
gacacgaauauugcu

SEQ ID NO: 3319448 - RNA, 18 nt, Human
gacaccuugacagggcac

SEQ ID NO: 3319449 - RNA, 20 nt, Human
gacaccuugacagggcacac

SEQ ID NO: 3319450 - RNA, 15 nt, Human
gacaccuugacaggg

SEQ ID NO: 3319451 - RNA, 17 nt, Human
gacaccuugacagggca

SEQ ID NO: 3319452 - RNA, 19 nt, Human
gacacgaauauugcugaug

SEQ ID NO: 3319453 - RNA, 18 nt, Human
gacacgaauauugcugau

SEQ ID NO: 3319454 - RNA, 17 nt, Human
gacacgaauauugcuga

SEQ ID NO: 3319455 - RNA, 15 nt, Human
gacacuaaccacgcu

SEQ ID NO: 3319456 - RNA, 16 nt, Human
gacacuaaccacgcug

SEQ ID NO: 3319457 - RNA, 17 nt, Human
gacacuaaccacgcugg

SEQ ID NO: 3319458 - RNA, 18 nt, Human
gacacuaaccacgcugga

SEQ ID NO: 3319459 - RNA, 14 nt, Human
gaagucuuuguaca

SEQ ID NO: 3319460 - RNA, 16 nt, Human
gaagucuuuguacaga

SEQ ID NO: 3319461 - RNA, 21 nt, Human
gacaaggauugcuacuguccu

SEQ ID NO: 3319462 - RNA, 22 nt, Human
gacaaggauugcuacuguccua

SEQ ID NO: 3319463 - RNA, 16 nt, Human
gacaaugacccagugg

SEQ ID NO: 3319464 - RNA, 12 nt, Human
gacacaggcccg

SEQ ID NO: 3319465 - RNA, 15 nt, Human
gacacaggcccggcu

SEQ ID NO: 3319466 - RNA, 17 nt, Human
gacacaggcccggcucc

SEQ ID NO: 3319467 - RNA, 22 nt, Human
gacacaagccuucggcgccuua

SEQ ID NO: 3319468 - RNA, 19 nt, Human
gacaauuuauuauggcaca

SEQ ID NO: 3319469 - RNA, 13 nt, Human
gacaauuuauuau

SEQ ID NO: 3319470 - RNA, 12 nt, Human
gacaauuuauua

SEQ ID NO: 3319471 - RNA, 18 nt, Human
gacaaugcaaaccaucau

SEQ ID NO: 3319472 - RNA, 16 nt, Human
gacaaugcaaaccauc

SEQ ID NO: 3319473 - RNA, 12 nt, Human
gacaaugcaaac

SEQ ID NO: 3319474 - RNA, 21 nt, Human
gacaaugacuuacuguacaug

SEQ ID NO: 3319475 - RNA, 20 nt, Human
gacaaugacuuacuguacau

SEQ ID NO: 3319476 - RNA, 17 nt, Human
gacaaugacuuacugua

SEQ ID NO: 3319477 - RNA, 21 nt, Human
gacaugucuuuucuugcauga

SEQ ID NO: 3319478 - RNA, 17 nt, Human
gacaugucuuuucuugc

SEQ ID NO: 3319479 - RNA, 16 nt, Human
gacauacuaaccagca

SEQ ID NO: 3319480 - RNA, 15 nt, Human
gacauacuaaccagc

SEQ ID NO: 3319481 - RNA, 21 nt, Human
gacaggcaagcaccuccugcc

SEQ ID NO: 3319482 - RNA, 14 nt, Human
gacaggcaaugcug

SEQ ID NO: 3319483 - RNA, 16 nt, Human
gacaggcaaugcuggc

SEQ ID NO: 3319484 - RNA, 24 nt, Human
gacaggcaaugcuggcuguuggcu

SEQ ID NO: 3319485 - RNA, 17 nt, Human
gacaggcaaugcuggcu

SEQ ID NO: 3319486 - RNA, 18 nt, Human
gacaggcauguucucuga

SEQ ID NO: 3319487 - RNA, 19 nt, Human
gacaggcauguucucugag

SEQ ID NO: 3319488 - RNA, 15 nt, Human
gacagcugccuggga

SEQ ID NO: 3319489 - RNA, 14 nt, Human
gacagcugccuggg

SEQ ID NO: 3319490 - RNA, 21 nt, Human
gacagcugccugggaucccuc

SEQ ID NO: 3319491 - RNA, 12 nt, Human
gacagacacagg

SEQ ID NO: 3319492 - RNA, 14 nt, Human
gacagacacaggcc

SEQ ID NO: 3319493 - RNA, 20 nt, Human
gacacuaaccacgcuggacc

SEQ ID NO: 3319494 - RNA, 15 nt, Human
gacagacacaggccc

SEQ ID NO: 3319495 - RNA, 16 nt, Human
gacagacacaggcccg

SEQ ID NO: 3319496 - RNA, 13 nt, Human
gacagcugccugg

SEQ ID NO: 3319497 - RNA, 12 nt, Human
gacagcugccug

SEQ ID NO: 3319498 - RNA, 17 nt, Human
cuugcaugaggcuagug

SEQ ID NO: 3319499 - RNA, 21 nt, Human
cuugcaugaggcuaguguggu

SEQ ID NO: 3319500 - RNA, 18 nt, Human
cuugcagacucuacagag

SEQ ID NO: 3319501 - RNA, 14 nt, Human
cuugcaauggcagc

SEQ ID NO: 3319502 - RNA, 22 nt, Human
cuugcaaaguaucccuacugua

SEQ ID NO: 3319503 - RNA, 20 nt, Human
cuugaccauucuccaccugc

SEQ ID NO: 3319504 - RNA, 17 nt, Human
cuugaccauucuccacc

SEQ ID NO: 3319505 - RNA, 14 nt, Human
cuugagagggugga

SEQ ID NO: 3319506 - RNA, 19 nt, Human
cuugagccuugaacuuuga

SEQ ID NO: 3319507 - RNA, 22 nt, Human
cuugagccuugaacuuugaccu

SEQ ID NO: 3319508 - RNA, 20 nt, Human
cuugagccuugaacuuugac

SEQ ID NO: 3319509 - RNA, 14 nt, Human
cuugaacuccuggc

SEQ ID NO: 3319510 - RNA, 15 nt, Human
cuugaacuccuggcc

SEQ ID NO: 3319511 - RNA, 17 nt, Human
cuugaacuccuggccuc

SEQ ID NO: 3319512 - RNA, 18 nt, Human
cuugaacuccuggccuca

SEQ ID NO: 3319513 - RNA, 18 nt, Human
cuugaacuggguacuugu

SEQ ID NO: 3319514 - RNA, 20 nt, Human
cuugaacuggguacuugugg

SEQ ID NO: 3319515 - RNA, 15 nt, Human
cuugaacuuugaccu

SEQ ID NO: 3319516 - RNA, 19 nt, Human
cuugaacuccuggccucaa

SEQ ID NO: 3319517 - RNA, 16 nt, Human
cuugaacuggguacuu

SEQ ID NO: 3319518 - RNA, 22 nt, Human
cuucuuuauaauucuacuuuga

SEQ ID NO: 3319519 - RNA, 19 nt, Human
cuugaaauauaggaacuua

SEQ ID NO: 3319520 - RNA, 16 nt, Human
cuuguggacacagcuc

SEQ ID NO: 3319521 - RNA, 17 nt, Human
cuuguggacacagcucu

SEQ ID NO: 3319522 - RNA, 18 nt, Human
cuuguggacacagcucuu

SEQ ID NO: 3319523 - RNA, 20 nt, Human
cuugguuuguaaauuaacuu

SEQ ID NO: 3319524 - RNA, 21 nt, Human
cuuguaaauagcucagguguc

SEQ ID NO: 3319525 - RNA, 16 nt, Human
cuuggggaccagagcu

SEQ ID NO: 3319526 - RNA, 17 nt, Human
cuuggggaccagagcug

SEQ ID NO: 3319527 - RNA, 19 nt, Human
cuuggggaccagagcugcc

SEQ ID NO: 3319528 - RNA, 18 nt, Human
cuuggggaccagagcugc

SEQ ID NO: 3319529 - RNA, 13 nt, Human
cuugcuugcuuuu

SEQ ID NO: 3319530 - RNA, 12 nt, Human
cuuggcugcagg

SEQ ID NO: 3319531 - RNA, 13 nt, Human
cuuggcugcaggg

SEQ ID NO: 3319532 - RNA, 23 nt, Human
cuuggcucaaguccucuuuucug

SEQ ID NO: 3319533 - RNA, 13 nt, Human
cuuggauuguccc

SEQ ID NO: 3319534 - RNA, 20 nt, Human
cuuuccugaggcugggcucc

SEQ ID NO: 3319535 - RNA, 16 nt, Human
cuuuccugaggcuggg

SEQ ID NO: 3319536 - RNA, 17 nt, Human
cuuuccugaggcugggc

SEQ ID NO: 3319537 - RNA, 14 nt, Human
cuuugcagacaggc

SEQ ID NO: 3319538 - RNA, 15 nt, Human
cuuugcagacaggca

SEQ ID NO: 3319539 - RNA, 23 nt, Human
cuuuggaaagaguaggaagacuu

SEQ ID NO: 3319540 - RNA, 19 nt, Human
cuuuggaaagaguaggaag

SEQ ID NO: 3319541 - RNA, 14 nt, Human
cuuuccaggaaggc

SEQ ID NO: 3319542 - RNA, 16 nt, Human
cuuuccaaaguacacu

SEQ ID NO: 3319543 - RNA, 22 nt, Human
cuuuccaaaguacacuguuuca

SEQ ID NO: 3319544 - RNA, 22 nt, Human
cuuuucauuuaggugaggaagc

SEQ ID NO: 3319545 - RNA, 23 nt, Human
cuuuuccaacccucaucaccaac

SEQ ID NO: 3319546 - RNA, 13 nt, Human
cuuuuccaacccu

SEQ ID NO: 3319547 - RNA, 20 nt, Human
cuuuucgcaggauucuuccu

SEQ ID NO: 3319548 - RNA, 21 nt, Human
cuuuucgcaggauucuuccuc

SEQ ID NO: 3319549 - RNA, 17 nt, Human
cuuuuuuauacauaaac

SEQ ID NO: 3319550 - RNA, 16 nt, Human
cuuuuuuauacauaaa

SEQ ID NO: 3319551 - RNA, 15 nt, Human
cuuuuuuauacauaa

SEQ ID NO: 3319552 - RNA, 16 nt, Human
gaaaaagaaaaaauau

SEQ ID NO: 3319553 - RNA, 11 nt, Human
gaaaaagaaaa

SEQ ID NO: 3319554 - RNA, 18 nt, Human
cuuuuuuauacauaaaca

SEQ ID NO: 3319555 - RNA, 22 nt, Human
cuuuuuaauauugauaugcuua

SEQ ID NO: 3319556 - RNA, 13 nt, Human
cuuuucuuuucuu

SEQ ID NO: 3319557 - RNA, 16 nt, Human
cuuuucuuucagccaa

SEQ ID NO: 3319558 - RNA, 17 nt, Human
cuuuucuuucagccaag

SEQ ID NO: 3319559 - RNA, 16 nt, Human
gaaaggaaagaggcuc

SEQ ID NO: 3319560 - RNA, 11 nt, Human
gaaaggaaaga

SEQ ID NO: 3319561 - RNA, 22 nt, Human
gaaaguacuucuccacccugcu

SEQ ID NO: 3319562 - RNA, 16 nt, Human
gaaagaguaggaagac

SEQ ID NO: 3319563 - RNA, 16 nt, Human
gaaagaucaaaagguu

SEQ ID NO: 3319564 - RNA, 16 nt, Human
gaaaaaugagccuggc

SEQ ID NO: 3319565 - RNA, 17 nt, Human
gaacacuccuucacaga

SEQ ID NO: 3319566 - RNA, 20 nt, Human
gaacagacuggaagcacagc

SEQ ID NO: 3319567 - RNA, 19 nt, Human
gaacagacuggaagcacag

SEQ ID NO: 3319568 - RNA, 16 nt, Human
gaacacuccuucacag

SEQ ID NO: 3319569 - RNA, 15 nt, Human
gaacacuccuucaca

SEQ ID NO: 3319570 - RNA, 22 nt, Human
gaacagacuggaagcacagcuu

SEQ ID NO: 3319571 - RNA, 18 nt, Human
gaaauaucugaaaaugua

SEQ ID NO: 3319572 - RNA, 19 nt, Human
gaaauaucugaaaauguau

SEQ ID NO: 3319573 - RNA, 17 nt, Human
gaaauauaggaacuuaa

SEQ ID NO: 3319574 - RNA, 17 nt, Human
gaaauguacagcaagga

SEQ ID NO: 3319575 - RNA, 19 nt, Human
gaaaugggcagagcagaga

SEQ ID NO: 3319576 - RNA, 17 nt, Human
gaaaugggcagagcaga

SEQ ID NO: 3319577 - RNA, 18 nt, Human
gaaaugaggucagagccu

SEQ ID NO: 3319578 - RNA, 11 nt, Human
gaaaugagcug

SEQ ID NO: 3319579 - RNA, 15 nt, Human
gaaaugggcagagca

SEQ ID NO: 3319580 - RNA, 16 nt, Human
gaaaugggcagagcag

SEQ ID NO: 3319581 - RNA, 18 nt, Human
gaaccacaucuugcucug

SEQ ID NO: 3319582 - RNA, 17 nt, Human
gaacuuaaauaauguga

SEQ ID NO: 3319583 - RNA, 14 nt, Human
gaacuuaaauaaug

SEQ ID NO: 3319584 - RNA, 17 nt, Human
gaacuuggcgcugcccc

SEQ ID NO: 3319585 - RNA, 18 nt, Human
gaacuuggcgcugccccu

SEQ ID NO: 3319586 - RNA, 17 nt, Human
gaacuugggccacugug

SEQ ID NO: 3319587 - RNA, 17 nt, Human
gaacuuuccaggaaggc

SEQ ID NO: 3319588 - RNA, 14 nt, Human
gaagaagcucucuc

SEQ ID NO: 3319589 - RNA, 22 nt, Human
gaacuuugaccucugcagcaau

SEQ ID NO: 3319590 - RNA, 16 nt, Human
gaacuuugaccucugc

SEQ ID NO: 3319591 - RNA, 16 nt, Human
gaagacuucaucccuc

SEQ ID NO: 3319592 - RNA, 15 nt, Human
gaagacuucaucccu

SEQ ID NO: 3319593 - RNA, 17 nt, Human
gaagacuucaucccucu

SEQ ID NO: 3319594 - RNA, 12 nt, Human
gaagagccuugc

SEQ ID NO: 3319595 - RNA, 18 nt, Human
gaagcauuuacuuugugu

SEQ ID NO: 3319596 - RNA, 13 nt, Human
gaagggggcuggg

SEQ ID NO: 3319597 - RNA, 18 nt, Human
gaagucuuagauguauau

SEQ ID NO: 3319598 - RNA, 13 nt, Human
gaagucacacagu

SEQ ID NO: 3319599 - RNA, 20 nt, Human
gaaguaauaugcacacauuu

SEQ ID NO: 3319600 - RNA, 19 nt, Human
gaaguaauaugcacacauu

SEQ ID NO: 3319601 - RNA, 20 nt, Human
gaaggaaacccagcucuggu

SEQ ID NO: 3319602 - RNA, 19 nt, Human
gaaggaaacccagcucugg

SEQ ID NO: 3319603 - RNA, 14 nt, Human
gaagccgcuggggc

SEQ ID NO: 3319604 - RNA, 20 nt, Human
gaagccgcuggggccaguug

SEQ ID NO: 3319605 - RNA, 18 nt, Human
gaagccgcuggggccagu

SEQ ID NO: 3319606 - RNA, 19 nt, Human
gaaggacauugcggacagc

SEQ ID NO: 3319607 - RNA, 20 nt, Human
gaaggacauugcggacagcc

SEQ ID NO: 3319608 - RNA, 21 nt, Human
gaaggacauugcggacagcca

SEQ ID NO: 3319609 - RNA, 22 nt, Human
gaaggaaacccagcucuggucc

SEQ ID NO: 3319610 - RNA, 21 nt, Human
gaaggaaacccagcucugguc

SEQ ID NO: 3319611 - RNA, 15 nt, Human
gaaggaacguccccu

SEQ ID NO: 3319612 - RNA, 19 nt, Human
gaaggaagacuucaucccu

SEQ ID NO: 3319613 - RNA, 14 nt, Human
cuggccugugucua

SEQ ID NO: 3319614 - RNA, 17 nt, Human
cuggccuggccccucag

SEQ ID NO: 3319615 - RNA, 16 nt, Human
cuggccuggccccuca

SEQ ID NO: 3319616 - RNA, 16 nt, Human
cuggccugagcuggga

SEQ ID NO: 3319617 - RNA, 14 nt, Human
cuggccucugcacu

SEQ ID NO: 3319618 - RNA, 13 nt, Human
cuggccucugcac

SEQ ID NO: 3319619 - RNA, 13 nt, Human
cuggccuggcccc

SEQ ID NO: 3319620 - RNA, 14 nt, Human
cuggccuggccccu

SEQ ID NO: 3319621 - RNA, 18 nt, Human
cuggccugagcugggaug

SEQ ID NO: 3319622 - RNA, 15 nt, Human
cuggccugagcuggg

SEQ ID NO: 3319623 - RNA, 23 nt, Human
cuggccucaagugauucuccugc

SEQ ID NO: 3319624 - RNA, 12 nt, Human
cuggccucugca

SEQ ID NO: 3319625 - RNA, 22 nt, Human
cuggccucaagugauucuccug

SEQ ID NO: 3319626 - RNA, 16 nt, Human
cuggcacccggccccu

SEQ ID NO: 3319627 - RNA, 17 nt, Human
cuggcacccggccccug

SEQ ID NO: 3319628 - RNA, 18 nt, Human
cuggcacccggccccugc

SEQ ID NO: 3319629 - RNA, 22 nt, Human
cuggcacccggccccugcuggu

SEQ ID NO: 3319630 - RNA, 14 nt, Human
cuggcaagaaugug

SEQ ID NO: 3319631 - RNA, 18 nt, Human
cuggaauauauaaccagu

SEQ ID NO: 3319632 - RNA, 15 nt, Human
cuggcacuauaaugu

SEQ ID NO: 3319633 - RNA, 16 nt, Human
cuggcacuauaaugua

SEQ ID NO: 3319634 - RNA, 22 nt, Human
cuggcaugggaaugaaugucag

SEQ ID NO: 3319635 - RNA, 19 nt, Human
cuggcaugggaaugaaugu

SEQ ID NO: 3319636 - RNA, 18 nt, Human
cuggcaugggaaugaaug

SEQ ID NO: 3319637 - RNA, 16 nt, Human
cuggcaugggaaugaa

SEQ ID NO: 3319638 - RNA, 24 nt, Human
cuggcaugggaaugaaugucagug

SEQ ID NO: 3319639 - RNA, 22 nt, Human
cuggccagaugcaccagcccuu

SEQ ID NO: 3319640 - RNA, 16 nt, Human
cuggcuguuggcuggg

SEQ ID NO: 3319641 - RNA, 17 nt, Human
cuggcuguuggcugggg

SEQ ID NO: 3319642 - RNA, 20 nt, Human
cuggcugguuagagguuccc

SEQ ID NO: 3319643 - RNA, 22 nt, Human
cuggcuggguggcaccagcagc

SEQ ID NO: 3319644 - RNA, 21 nt, Human
cugggagagccuuccaggggu

SEQ ID NO: 3319645 - RNA, 20 nt, Human
cugggagagccuuccagggg

SEQ ID NO: 3319646 - RNA, 19 nt, Human
cugggagagccuuccaggg

SEQ ID NO: 3319647 - RNA, 18 nt, Human
cugggagagccuuccagg

SEQ ID NO: 3319648 - RNA, 17 nt, Human
cugggagagccuuccag

SEQ ID NO: 3319649 - RNA, 22 nt, Human
cugggagaaccaaaaagaggcu

SEQ ID NO: 3319650 - RNA, 21 nt, Human
cugggaggucaaggcugcagu

SEQ ID NO: 3319651 - RNA, 19 nt, Human
cugggaggucaaggcugca

SEQ ID NO: 3319652 - RNA, 17 nt, Human
cugggauuacaggugug

SEQ ID NO: 3319653 - RNA, 20 nt, Human
cugggauuacaggugugaac

SEQ ID NO: 3319654 - RNA, 20 nt, Human
cugggaucccucauccucau

SEQ ID NO: 3319655 - RNA, 18 nt, Human
cugggaugauuggagggg

SEQ ID NO: 3319656 - RNA, 22 nt, Human
cugucucaaaaaaagaaaaaga

SEQ ID NO: 3319657 - RNA, 21 nt, Human
cuguccuacucugugucaggu

SEQ ID NO: 3319658 - RNA, 22 nt, Human
cugucccuuacgugaguccugg

SEQ ID NO: 3319659 - RNA, 16 nt, Human
cuguccuacucugugu

SEQ ID NO: 3319660 - RNA, 17 nt, Human
cuguccuacucuguguc

SEQ ID NO: 3319661 - RNA, 18 nt, Human
cuguccuacucuguguca

SEQ ID NO: 3319662 - RNA, 20 nt, Human
cuguccuacucugugucagg

SEQ ID NO: 3319663 - RNA, 14 nt, Human
cugucccccugaca

SEQ ID NO: 3319664 - RNA, 13 nt, Human
cugucccccugac

SEQ ID NO: 3319665 - RNA, 22 nt, Human
cuguaccucuugagccuugaac

SEQ ID NO: 3319666 - RNA, 14 nt, Human
cuguaucccaugag

SEQ ID NO: 3319667 - RNA, 15 nt, Human
cuguaucccaugagc

SEQ ID NO: 3319668 - RNA, 18 nt, Human
cuguaucccaugagccuc

SEQ ID NO: 3319669 - RNA, 23 nt, Human
cugucauuugagcagggcucagc

SEQ ID NO: 3319670 - RNA, 22 nt, Human
cugucccagugccgagaaggaa

SEQ ID NO: 3319671 - RNA, 17 nt, Human
cuguaauuugugauaca

SEQ ID NO: 3319672 - RNA, 18 nt, Human
cuguaauuugugauacaa

SEQ ID NO: 3319673 - RNA, 23 nt, Human
cuguacagagcccacgcccccac

SEQ ID NO: 3319674 - RNA, 21 nt, Human
cuguaauuugugauacaaugc

SEQ ID NO: 3319675 - RNA, 22 nt, Human
cuguacagagcccacgccccca

SEQ ID NO: 3319676 - RNA, 21 nt, Human
cuguaccucuugagccuugaa

SEQ ID NO: 3319677 - RNA, 23 nt, Human
cuguacaugaaaacacauuuuuc

SEQ ID NO: 3319678 - RNA, 22 nt, Human
cuguacaugaaaacacauuuuu

SEQ ID NO: 3319679 - RNA, 12 nt, Human
cugguggcagcu

SEQ ID NO: 3319680 - RNA, 14 nt, Human
cugguggcagcuca

SEQ ID NO: 3319681 - RNA, 13 nt, Human
cugguggcagcuc

SEQ ID NO: 3319682 - RNA, 20 nt, Human
cugguucaggguuggccccu

SEQ ID NO: 3319683 - RNA, 15 nt, Human
cuggguuggagggug

SEQ ID NO: 3319684 - RNA, 22 nt, Human
cugggcucccuucccaccucuc

SEQ ID NO: 3319685 - RNA, 21 nt, Human
cugggcucccuucccaccucu

SEQ ID NO: 3319686 - RNA, 20 nt, Human
cugggcucccuucccaccuc

SEQ ID NO: 3319687 - RNA, 19 nt, Human
cugggcucccuucccaccu

SEQ ID NO: 3319688 - RNA, 16 nt, Human
cuggguacuuguggac

SEQ ID NO: 3319689 - RNA, 14 nt, Human
cuggguacuugugg

SEQ ID NO: 3319690 - RNA, 18 nt, Human
cuggguacuuguggacac

SEQ ID NO: 3319691 - RNA, 13 nt, Human
cuggucccacuca

SEQ ID NO: 3319692 - RNA, 23 nt, Human
cuggucucaaacucuugaccuca

SEQ ID NO: 3319693 - RNA, 21 nt, Human
cugguccauagagagcaagac

SEQ ID NO: 3319694 - RNA, 13 nt, Human
cugcccggcaggg

SEQ ID NO: 3319695 - RNA, 19 nt, Human
cugccccuggcagccccug

SEQ ID NO: 3319696 - RNA, 17 nt, Human
cugccccuggcagcccc

SEQ ID NO: 3319697 - RNA, 18 nt, Human
cugccccuggcagccccu

SEQ ID NO: 3319698 - RNA, 13 nt, Human
cugcccaggcccc

SEQ ID NO: 3319699 - RNA, 12 nt, Human
cugcccaccugg

SEQ ID NO: 3319700 - RNA, 14 nt, Human
cugcccaggccccu

SEQ ID NO: 3319701 - RNA, 15 nt, Human
cugcccaggccccug

SEQ ID NO: 3319702 - RNA, 15 nt, Human
cugccauuucugaga

SEQ ID NO: 3319703 - RNA, 16 nt, Human
cugcccaggccccugc

SEQ ID NO: 3319704 - RNA, 18 nt, Human
cugcccaggccccugcca

SEQ ID NO: 3319705 - RNA, 19 nt, Human
cugcccaggccccugccac

SEQ ID NO: 3319706 - RNA, 20 nt, Human
cugcccaggccccugccacc

SEQ ID NO: 3319707 - RNA, 22 nt, Human
cugccaggaagccagcaggcuc

SEQ ID NO: 3319708 - RNA, 21 nt, Human
cugccauccagguucagcuug

SEQ ID NO: 3319709 - RNA, 15 nt, Human
cugccauccucccaa

SEQ ID NO: 3319710 - RNA, 19 nt, Human
cugccaggaagccagcagg

SEQ ID NO: 3319711 - RNA, 21 nt, Human
cugccaggaagccagcaggcu

SEQ ID NO: 3319712 - RNA, 20 nt, Human
cugccaggaagccagcaggc

SEQ ID NO: 3319713 - RNA, 14 nt, Human
cugccaggaagcca

SEQ ID NO: 3319714 - RNA, 13 nt, Human
cugccaggaagcc

SEQ ID NO: 3319715 - RNA, 15 nt, Human
cugcauaugaaagga

SEQ ID NO: 3319716 - RNA, 20 nt, Human
cugcaucaagaugugacaug

SEQ ID NO: 3319717 - RNA, 21 nt, Human
cugccacccuggggagaaagu

SEQ ID NO: 3319718 - RNA, 12 nt, Human
cugccacccugg

SEQ ID NO: 3319719 - RNA, 21 nt, Human
cugcacuccccugcugggugu

SEQ ID NO: 3319720 - RNA, 18 nt, Human
cugcacuccccugcuggg

SEQ ID NO: 3319721 - RNA, 13 nt, Human
cugcagagggcac

SEQ ID NO: 3319722 - RNA, 16 nt, Human
cugcagcaauaaagca

SEQ ID NO: 3319723 - RNA, 15 nt, Human
cugcagcaauaaagc

SEQ ID NO: 3319724 - RNA, 10 nt, Human
cugcagaggg

SEQ ID NO: 3319725 - RNA, 14 nt, Human
cugcaccgggccac

SEQ ID NO: 3319726 - RNA, 15 nt, Human
cugcaccgggccaca

SEQ ID NO: 3319727 - RNA, 15 nt, Human
cugcaccggcuggcc

SEQ ID NO: 3319728 - RNA, 14 nt, Human
cugcaccggcuggc

SEQ ID NO: 3319729 - RNA, 23 nt, Human
cugaggcccuucucuccagcccc

SEQ ID NO: 3319730 - RNA, 22 nt, Human
cugaggcccuucucuccagccc

SEQ ID NO: 3319731 - RNA, 20 nt, Human
cugcacuccccugcugggug

SEQ ID NO: 3319732 - RNA, 19 nt, Human
cugcacuccccugcugggu

SEQ ID NO: 3319733 - RNA, 13 nt, Human
cugcacuccccug

SEQ ID NO: 3319734 - RNA, 18 nt, Human
cugcaccgggccacagag

SEQ ID NO: 3319735 - RNA, 19 nt, Human
cugcacuccagccugggug

SEQ ID NO: 3319736 - RNA, 20 nt, Human
cugcacuccagccuggguga

SEQ ID NO: 3319737 - RNA, 16 nt, Human
cugcaguugccaguca

SEQ ID NO: 3319738 - RNA, 13 nt, Human
cugcaguugccag

SEQ ID NO: 3319739 - RNA, 17 nt, Human
cugcagcaauaaagcag

SEQ ID NO: 3319740 - RNA, 13 nt, Human
cugcugcuggcug

SEQ ID NO: 3319741 - RNA, 12 nt, Human
cugcugcuggcu

SEQ ID NO: 3319742 - RNA, 15 nt, Human
cugcuggguguggcg

SEQ ID NO: 3319743 - RNA, 14 nt, Human
cugcuggguguggc

SEQ ID NO: 3319744 - RNA, 17 nt, Human
cugcuggguguggcgca

SEQ ID NO: 3319745 - RNA, 21 nt, Human
cugcuugaggcaacucaucuu

SEQ ID NO: 3319746 - RNA, 20 nt, Human
cugcuugaggcaacucaucu

SEQ ID NO: 3319747 - RNA, 13 nt, Human
cugcuugaggcaa

SEQ ID NO: 3319748 - RNA, 17 nt, Human
cugcuuuuggucugugu

SEQ ID NO: 3319749 - RNA, 15 nt, Human
cugcuuuuggucugu

SEQ ID NO: 3319750 - RNA, 19 nt, Human
cugcuugugaaaggaaaga

SEQ ID NO: 3319751 - RNA, 19 nt, Human
cugcuugggcuucauccuc

SEQ ID NO: 3319752 - RNA, 18 nt, Human
cugcuugggcuucauccu

SEQ ID NO: 3319753 - RNA, 17 nt, Human
cugcuugggcuucaucc

SEQ ID NO: 3319754 - RNA, 15 nt, Human
cugcuugggcuucau

SEQ ID NO: 3319755 - RNA, 13 nt, Human
cugcuugggcuuc

SEQ ID NO: 3319756 - RNA, 20 nt, Human
cugcuugcuugcuuuuuaau

SEQ ID NO: 3319757 - RNA, 22 nt, Human
cugcuugaggcaacucaucuua

SEQ ID NO: 3319758 - RNA, 23 nt, Human
cugcggugcuaucucccccagcc

SEQ ID NO: 3319759 - RNA, 22 nt, Human
cugcggugcuaucucccccagc

SEQ ID NO: 3319760 - RNA, 21 nt, Human
cugcggugcuaucucccccag

SEQ ID NO: 3319761 - RNA, 20 nt, Human
cugcggugcuaucuccccca

SEQ ID NO: 3319762 - RNA, 20 nt, Human
cugcgguccacccaggagcc

SEQ ID NO: 3319763 - RNA, 23 nt, Human
cugcuccucuccccagcaaguga

SEQ ID NO: 3319764 - RNA, 19 nt, Human
cugcuccucuccccagcaa

SEQ ID NO: 3319765 - RNA, 20 nt, Human
cugcuccucuccccagcaag

SEQ ID NO: 3319766 - RNA, 15 nt, Human
cugcucuccgaccag

SEQ ID NO: 3319767 - RNA, 12 nt, Human
cugcucugguua

SEQ ID NO: 3319768 - RNA, 13 nt, Human
cugcugcaguugc

SEQ ID NO: 3319769 - RNA, 10 nt, Human
cugcugcagu

SEQ ID NO: 3319770 - RNA, 14 nt, Human
cugcugcaguugcc

SEQ ID NO: 3319771 - RNA, 19 nt, Human
cugccugaagucacacagu

SEQ ID NO: 3319772 - RNA, 18 nt, Human
cugccugaagucacacag

SEQ ID NO: 3319773 - RNA, 16 nt, Human
cugccugaagucacac

SEQ ID NO: 3319774 - RNA, 21 nt, Human
cugcccugcccaccuggccuc

SEQ ID NO: 3319775 - RNA, 17 nt, Human
cugcccugcccaccugg

SEQ ID NO: 3319776 - RNA, 20 nt, Human
cugcccugcccaccuggccu

SEQ ID NO: 3319777 - RNA, 23 nt, Human
cugcgguccacccaggagccccg

SEQ ID NO: 3319778 - RNA, 19 nt, Human
cugcggugcuaucuccccc

SEQ ID NO: 3319779 - RNA, 18 nt, Human
cugcggugcuaucucccc

SEQ ID NO: 3319780 - RNA, 18 nt, Human
cucacuauguugcccagg

SEQ ID NO: 3319781 - RNA, 17 nt, Human
cucccaaagugcuggga

SEQ ID NO: 3319782 - RNA, 13 nt, Human
cuccaugugggcu

SEQ ID NO: 3319783 - RNA, 22 nt, Human
cucccaacucaccccagcccca

SEQ ID NO: 3319784 - RNA, 18 nt, Human
cucccaaagugcugggau

SEQ ID NO: 3319785 - RNA, 17 nt, Human
cucccaacucaccccag

SEQ ID NO: 3319786 - RNA, 16 nt, Human
cucccaacucacccca

SEQ ID NO: 3319787 - RNA, 23 nt, Human
cucccaucugugaaaggaaagag

SEQ ID NO: 3319788 - RNA, 18 nt, Human
cucccaucugugaaagga

SEQ ID NO: 3319789 - RNA, 15 nt, Human
cucccaucugugaaa

SEQ ID NO: 3319790 - RNA, 14 nt, Human
cucccaucugugaa

SEQ ID NO: 3319791 - RNA, 11 nt, Human
cucccaucugu

SEQ ID NO: 3319792 - RNA, 21 nt, Human
cucccaucucacacaugagca

SEQ ID NO: 3319793 - RNA, 17 nt, Human
cucccgaauagcuggga

SEQ ID NO: 3319794 - RNA, 16 nt, Human
cucccgaauagcuggg

SEQ ID NO: 3319795 - RNA, 13 nt, Human
cuccccugcuggg

SEQ ID NO: 3319796 - RNA, 15 nt, Human
cucccgaguagcugg

SEQ ID NO: 3319797 - RNA, 18 nt, Human
cucccgaauagcugggac

SEQ ID NO: 3319798 - RNA, 16 nt, Human
cucccgaguagcuggg

SEQ ID NO: 3319799 - RNA, 17 nt, Human
cucccgaguagcuggga

SEQ ID NO: 3319800 - RNA, 12 nt, Human
cuccccagcaag

SEQ ID NO: 3319801 - RNA, 20 nt, Human
cuccccagcaagugagagcu

SEQ ID NO: 3319802 - RNA, 20 nt, Human
cuccccagccccaucccaaa

SEQ ID NO: 3319803 - RNA, 12 nt, Human
cuccccugcugg

SEQ ID NO: 3319804 - RNA, 22 nt, Human
cuccucuccccagcaagugaga

SEQ ID NO: 3319805 - RNA, 22 nt, Human
cuccuccagccgccaugcuccu

SEQ ID NO: 3319806 - RNA, 18 nt, Human
cucccucagucuggcccu

SEQ ID NO: 3319807 - RNA, 17 nt, Human
cucccuuucuucccuac

SEQ ID NO: 3319808 - RNA, 20 nt, Human
cuccugcaggcagccaggcc

SEQ ID NO: 3319809 - RNA, 18 nt, Human
cuccugcaggcagccagg

SEQ ID NO: 3319810 - RNA, 11 nt, Human
cuccugcccuu

SEQ ID NO: 3319811 - RNA, 13 nt, Human
cuccugccucagc

SEQ ID NO: 3319812 - RNA, 14 nt, Human
cuccugccucagcc

SEQ ID NO: 3319813 - RNA, 17 nt, Human
cuccugcaggcagccag

SEQ ID NO: 3319814 - RNA, 16 nt, Human
cuccugcaggcagcca

SEQ ID NO: 3319815 - RNA, 11 nt, Human
cuccugcaggc

SEQ ID NO: 3319816 - RNA, 16 nt, Human
cuccugugugugcgcc

SEQ ID NO: 3319817 - RNA, 19 nt, Human
cuccugugugugcgccuac

SEQ ID NO: 3319818 - RNA, 22 nt, Human
cuccugccucgaacuggcugca

SEQ ID NO: 3319819 - RNA, 15 nt, Human
cuccugccucagccu

SEQ ID NO: 3319820 - RNA, 13 nt, Human
cucucucaggcca

SEQ ID NO: 3319821 - RNA, 12 nt, Human
cucucucacucc

SEQ ID NO: 3319822 - RNA, 18 nt, Human
cucuccucugcugcuggc

SEQ ID NO: 3319823 - RNA, 15 nt, Human
cucuccucugcugcu

SEQ ID NO: 3319824 - RNA, 14 nt, Human
cucuccucugcugc

SEQ ID NO: 3319825 - RNA, 13 nt, Human
cucuccucugcug

SEQ ID NO: 3319826 - RNA, 14 nt, Human
cucuccccagcaag

SEQ ID NO: 3319827 - RNA, 22 nt, Human
cucuccccagcaagugagagcu

SEQ ID NO: 3319828 - RNA, 12 nt, Human
cucuccucugcu

SEQ ID NO: 3319829 - RNA, 19 nt, Human
cucuccagccccuggaugc

SEQ ID NO: 3319830 - RNA, 13 nt, Human
cucuccccagcaa

SEQ ID NO: 3319831 - RNA, 14 nt, Human
cucuccagccccug

SEQ ID NO: 3319832 - RNA, 18 nt, Human
cucuccagccccuggaug

SEQ ID NO: 3319833 - RNA, 17 nt, Human
cucuccagccccuggau

SEQ ID NO: 3319834 - RNA, 16 nt, Human
cucuccagccccugga

SEQ ID NO: 3319835 - RNA, 15 nt, Human
cucuccagccccugg

SEQ ID NO: 3319836 - RNA, 21 nt, Human
cucucaggccagcugcuuggg

SEQ ID NO: 3319837 - RNA, 19 nt, Human
cucucaggccagcugcuug

SEQ ID NO: 3319838 - RNA, 18 nt, Human
cucucaggccagcugcuu

SEQ ID NO: 3319839 - RNA, 17 nt, Human
cucucaggccagcugcu

SEQ ID NO: 3319840 - RNA, 15 nt, Human
cucuaguuugauuaa

SEQ ID NO: 3319841 - RNA, 21 nt, Human
cucuaguuugauuaaauucuu

SEQ ID NO: 3319842 - RNA, 20 nt, Human
cucuaguuugauuaaauucu

SEQ ID NO: 3319843 - RNA, 19 nt, Human
cucuaguuugauuaaauuc

SEQ ID NO: 3319844 - RNA, 12 nt, Human
cucucaggccaa

SEQ ID NO: 3319845 - RNA, 21 nt, Human
cucucaggccaaacucaccug

SEQ ID NO: 3319846 - RNA, 20 nt, Human
cucucaggccaaacucaccu

SEQ ID NO: 3319847 - RNA, 15 nt, Human
cucucaggccagcug

SEQ ID NO: 3319848 - RNA, 13 nt, Human
cucucaggccagc

SEQ ID NO: 3319849 - RNA, 23 nt, Human
cucucaggccaaacucaccugcc

SEQ ID NO: 3319850 - RNA, 22 nt, Human
cucucaggccaaacucaccugc

SEQ ID NO: 3319851 - RNA, 23 nt, Human
cucuagggaaaaaccagcgugug

SEQ ID NO: 3319852 - RNA, 20 nt, Human
cucuaccauccccuguagag

SEQ ID NO: 3319853 - RNA, 13 nt, Human
cucuacccuggca

SEQ ID NO: 3319854 - RNA, 19 nt, Human
cuccuucacagaugggugc

SEQ ID NO: 3319855 - RNA, 14 nt, Human
cuccugugugugcg

SEQ ID NO: 3319856 - RNA, 17 nt, Human
cuccuucacagaugggu

SEQ ID NO: 3319857 - RNA, 16 nt, Human
cuccuucacagauggg

SEQ ID NO: 3319858 - RNA, 13 nt, Human
cucuacagaggcc

SEQ ID NO: 3319859 - RNA, 19 nt, Human
cucuacagaggccaugggc

SEQ ID NO: 3319860 - RNA, 14 nt, Human
cucuacagaggcca

SEQ ID NO: 3319861 - RNA, 16 nt, Human
cucuacagaggccaug

SEQ ID NO: 3319862 - RNA, 13 nt, Human
cucuacaaaaagc

SEQ ID NO: 3319863 - RNA, 15 nt, Human
cugagccagauuuca

SEQ ID NO: 3319864 - RNA, 21 nt, Human
cugagccagauuucacucucc

SEQ ID NO: 3319865 - RNA, 20 nt, Human
cugagccagauuucacucuc

SEQ ID NO: 3319866 - RNA, 19 nt, Human
cugagccagauuucacucu

SEQ ID NO: 3319867 - RNA, 18 nt, Human
cugagccagauuucacuc

SEQ ID NO: 3319868 - RNA, 17 nt, Human
cugagccagauuucacu

SEQ ID NO: 3319869 - RNA, 18 nt, Human
cugagacagcccgggcuc

SEQ ID NO: 3319870 - RNA, 17 nt, Human
cugagacagcccgggcu

SEQ ID NO: 3319871 - RNA, 16 nt, Human
cugagacagcccgggc

SEQ ID NO: 3319872 - RNA, 20 nt, Human
cugaggcccuucucuccagc

SEQ ID NO: 3319873 - RNA, 19 nt, Human
cugaggcccuucucuccag

SEQ ID NO: 3319874 - RNA, 18 nt, Human
cugaggcccuucucucca

SEQ ID NO: 3319875 - RNA, 15 nt, Human
cugaggcccuucucu

SEQ ID NO: 3319876 - RNA, 14 nt, Human
cugaggcccuucuc

SEQ ID NO: 3319877 - RNA, 23 nt, Human
cugaggcccagagggccugcaag

SEQ ID NO: 3319878 - RNA, 21 nt, Human
cugaggcccagagggccugca

SEQ ID NO: 3319879 - RNA, 19 nt, Human
cugaggcccagagggccug

SEQ ID NO: 3319880 - RNA, 18 nt, Human
cugaggcccagagggccu

SEQ ID NO: 3319881 - RNA, 17 nt, Human
cugaggcccagagggcc

SEQ ID NO: 3319882 - RNA, 16 nt, Human
cugaggcccagagggc

SEQ ID NO: 3319883 - RNA, 15 nt, Human
cugaggcccagaggg

SEQ ID NO: 3319884 - RNA, 14 nt, Human
cugaggcccagagg

SEQ ID NO: 3319885 - RNA, 13 nt, Human
cugaggcccagag

SEQ ID NO: 3319886 - RNA, 12 nt, Human
cugaggcccaga

SEQ ID NO: 3319887 - RNA, 21 nt, Human
cugacaggcaaugcuggcugu

SEQ ID NO: 3319888 - RNA, 21 nt, Human
cugacauuguuggccaaagcc

SEQ ID NO: 3319889 - RNA, 22 nt, Human
cugacauuguuggccaaagcca

SEQ ID NO: 3319890 - RNA, 12 nt, Human
cugacccacugc

SEQ ID NO: 3319891 - RNA, 16 nt, Human
cugacccaugcugccc

SEQ ID NO: 3319892 - RNA, 15 nt, Human
cugacccaugcugcc

SEQ ID NO: 3319893 - RNA, 14 nt, Human
cugacccaugcugc

SEQ ID NO: 3319894 - RNA, 13 nt, Human
cugacccacugcu

SEQ ID NO: 3319895 - RNA, 14 nt, Human
cugacccacugcuu

SEQ ID NO: 3319896 - RNA, 13 nt, Human
cugacccaugcug

SEQ ID NO: 3319897 - RNA, 16 nt, Human
cugacuguuuucucuu

SEQ ID NO: 3319898 - RNA, 18 nt, Human
cugacuguuuucucuuga

SEQ ID NO: 3319899 - RNA, 15 nt, Human
cugagacagcccggg

SEQ ID NO: 3319900 - RNA, 14 nt, Human
cugagacagcccgg

SEQ ID NO: 3319901 - RNA, 15 nt, Human
cucuggcagcucaga

SEQ ID NO: 3319902 - RNA, 14 nt, Human
cucuggcagcucag

SEQ ID NO: 3319903 - RNA, 12 nt, Human
cucuggcagcuc

SEQ ID NO: 3319904 - RNA, 16 nt, Human
cucuggacaggcaugu

SEQ ID NO: 3319905 - RNA, 14 nt, Human
cucuggacaggcau

SEQ ID NO: 3319906 - RNA, 13 nt, Human
cucucuccucccu

SEQ ID NO: 3319907 - RNA, 22 nt, Human
cucugccugaagucacacagug

SEQ ID NO: 3319908 - RNA, 10 nt, Human
cucugccuga

SEQ ID NO: 3319909 - RNA, 21 nt, Human
cucugccugaagucacacagu

SEQ ID NO: 3319910 - RNA, 15 nt, Human
cucuggacaggcaug

SEQ ID NO: 3319911 - RNA, 13 nt, Human
cucuuccaggcug

SEQ ID NO: 3319912 - RNA, 15 nt, Human
cucuuccaggcuggg

SEQ ID NO: 3319913 - RNA, 14 nt, Human
cucuuccaggcugg

SEQ ID NO: 3319914 - RNA, 15 nt, Human
cucuuagaaaaacca

SEQ ID NO: 3319915 - RNA, 13 nt, Human
cucuuagaaaaac

SEQ ID NO: 3319916 - RNA, 15 nt, Human
cucugugucaggugg

SEQ ID NO: 3319917 - RNA, 21 nt, Human
cucuuggguucaagcgauucu

SEQ ID NO: 3319918 - RNA, 19 nt, Human
cucuuggguucaagcgauu

SEQ ID NO: 3319919 - RNA, 22 nt, Human
cucuugaaauauaggaacuuaa

SEQ ID NO: 3319920 - RNA, 18 nt, Human
cucuuuaaugucacaggc

SEQ ID NO: 3319921 - RNA, 16 nt, Human
cucuugguccugcugc

SEQ ID NO: 3319922 - RNA, 15 nt, Human
cucuugguccugcug

SEQ ID NO: 3319923 - RNA, 13 nt, Human
cucuugguccugc

SEQ ID NO: 3319924 - RNA, 20 nt, Human
cucuuuaaugucacaggcag

SEQ ID NO: 3319925 - RNA, 21 nt, Human
cucuuuaaugucacaggcagg

SEQ ID NO: 3319926 - RNA, 22 nt, Human
cucuuuaaugucacaggcaggu

SEQ ID NO: 3319927 - RNA, 23 nt, Human
cucuuuaaugucacaggcagguc

SEQ ID NO: 3319928 - RNA, 13 nt, Human
cucuuucccuccc

SEQ ID NO: 3319929 - RNA, 17 nt, Human
cucuuucccucccuucc

SEQ ID NO: 3319930 - RNA, 19 nt, Human
cugaagaauugaaaaacca

SEQ ID NO: 3319931 - RNA, 23 nt, Human
cugaaagcccugagcuuucugcu

SEQ ID NO: 3319932 - RNA, 19 nt, Human
cugaaagcccugagcuuuc

SEQ ID NO: 3319933 - RNA, 18 nt, Human
cugaaagcccugagcuuu

SEQ ID NO: 3319934 - RNA, 17 nt, Human
cugaaagcccugagcuu

SEQ ID NO: 3319935 - RNA, 16 nt, Human
cugaaagcccugagcu

SEQ ID NO: 3319936 - RNA, 15 nt, Human
cugaaagcccugagc

SEQ ID NO: 3319937 - RNA, 16 nt, Human
cgcuacccgggaaggg

SEQ ID NO: 3319938 - RNA, 21 nt, Human
cgcuaagagggagggagggcu

SEQ ID NO: 3319939 - RNA, 22 nt, Human
cgcuaagagggagggagggcuc

SEQ ID NO: 3319940 - RNA, 15 nt, Human
cgcugugcugcccug

SEQ ID NO: 3319941 - RNA, 17 nt, Human
cgcugugcugcccugcc

SEQ ID NO: 3319942 - RNA, 16 nt, Human
cgcugugcugcccugc

SEQ ID NO: 3319943 - RNA, 22 nt, Human
cgcugucagccauuccuguucc

SEQ ID NO: 3319944 - RNA, 20 nt, Human
cggaaaacaugcuacacacu

SEQ ID NO: 3319945 - RNA, 15 nt, Human
cggaaaacaugcuac

SEQ ID NO: 3319946 - RNA, 14 nt, Human
cgcugugcugcccu

SEQ ID NO: 3319947 - RNA, 22 nt, Human
cgccagauucuuuccugaggcu

SEQ ID NO: 3319948 - RNA, 20 nt, Human
ccucugcccacucccugcaa

SEQ ID NO: 3319949 - RNA, 19 nt, Human
ccucugcccacucccugca

SEQ ID NO: 3319950 - RNA, 17 nt, Human
ccucugcccacucccug

SEQ ID NO: 3319951 - RNA, 16 nt, Human
cgccaucccagcccca

SEQ ID NO: 3319952 - RNA, 14 nt, Human
cgccaucccagccc

SEQ ID NO: 3319953 - RNA, 23 nt, Human
cgccaggggaaaaucagccugcu

SEQ ID NO: 3319954 - RNA, 22 nt, Human
cgcccaggcuuagucacugaga

SEQ ID NO: 3319955 - RNA, 13 nt, Human
cggccccugcugg

SEQ ID NO: 3319956 - RNA, 18 nt, Human
cggccccugcugguucag

SEQ ID NO: 3319957 - RNA, 19 nt, Human
cggccccugcugguucagg

SEQ ID NO: 3319958 - RNA, 24 nt, Human
cggccaggccagagggagugacag

SEQ ID NO: 3319959 - RNA, 17 nt, Human
cggccaccugcggugcu

SEQ ID NO: 3319960 - RNA, 16 nt, Human
cggccaccugcggugc

SEQ ID NO: 3319961 - RNA, 15 nt, Human
cggccaccugcggug

SEQ ID NO: 3319962 - RNA, 11 nt, Human
cggccaccugc

SEQ ID NO: 3319963 - RNA, 13 nt, Human
cggaagagccuug

SEQ ID NO: 3319964 - RNA, 14 nt, Human
cgguccacccagga

SEQ ID NO: 3319965 - RNA, 15 nt, Human
cgguccacccaggag

SEQ ID NO: 3319966 - RNA, 16 nt, Human
cgguccacccaggagc

SEQ ID NO: 3319967 - RNA, 20 nt, Human
cgguccacccaggagccccg

SEQ ID NO: 3319968 - RNA, 20 nt, Human
cggugagaggggaacagacu

SEQ ID NO: 3319969 - RNA, 21 nt, Human
cggugagaggggaacagacug

SEQ ID NO: 3319970 - RNA, 23 nt, Human
cggggacagcuccuucuguccua

SEQ ID NO: 3319971 - RNA, 15 nt, Human
cgggggcagagaggg

SEQ ID NO: 3319972 - RNA, 23 nt, Human
cggcuggccuggccccucagggu

SEQ ID NO: 3319973 - RNA, 19 nt, Human
cggcuggccuggccccuca

SEQ ID NO: 3319974 - RNA, 22 nt, Human
cggcuggccuggccccucaggg

SEQ ID NO: 3319975 - RNA, 22 nt, Human
cggggacagcuccuucuguccu

SEQ ID NO: 3319976 - RNA, 14 nt, Human
cgggcacucagaag

SEQ ID NO: 3319977 - RNA, 22 nt, Human
cgggcacucagaagacacugau

SEQ ID NO: 3319978 - RNA, 20 nt, Human
cgggaggucgaggcaggagg

SEQ ID NO: 3319979 - RNA, 18 nt, Human
cgggaggucgaggcagga

SEQ ID NO: 3319980 - RNA, 16 nt, Human
cuaaauguugaaagau

SEQ ID NO: 3319981 - RNA, 17 nt, Human
cuaacauggaaguacua

SEQ ID NO: 3319982 - RNA, 15 nt, Human
cuaacauggaaguac

SEQ ID NO: 3319983 - RNA, 18 nt, Human
cuaaauggaaccacucua

SEQ ID NO: 3319984 - RNA, 17 nt, Human
cuaaauggaaccacucu

SEQ ID NO: 3319985 - RNA, 16 nt, Human
cuaaauggaaccacuc

SEQ ID NO: 3319986 - RNA, 15 nt, Human
cuaaauggaaccacu

SEQ ID NO: 3319987 - RNA, 17 nt, Human
cguggcugcuucaagga

SEQ ID NO: 3319988 - RNA, 14 nt, Human
cgucugacaggcaa

SEQ ID NO: 3319989 - RNA, 16 nt, Human
cgucuaccugaggggc

SEQ ID NO: 3319990 - RNA, 16 nt, Human
cgucucauacucaccu

SEQ ID NO: 3319991 - RNA, 21 nt, Human
cggugcuaucucccccagccc

SEQ ID NO: 3319992 - RNA, 20 nt, Human
cggugcuaucucccccagcc

SEQ ID NO: 3319993 - RNA, 18 nt, Human
cggugcuaucucccccag

SEQ ID NO: 3319994 - RNA, 16 nt, Human
cgugcacacaccagag

SEQ ID NO: 3319995 - RNA, 20 nt, Human
cgucugacaggcaaugcugg

SEQ ID NO: 3319996 - RNA, 21 nt, Human
cgucugacaggcaaugcuggc

SEQ ID NO: 3319997 - RNA, 22 nt, Human
cgucugacaggcaaugcuggcu

SEQ ID NO: 3319998 - RNA, 21 nt, Human
cgugcaguggugcgaucuggg

SEQ ID NO: 3319999 - RNA, 23 nt, Human
cgugcauaccacuuuuguucuug

SEQ ID NO: 3320000 - RNA, 18 nt, Human
cgugcacacaccagagcc

SEQ ID NO: 3320001 - RNA, 19 nt, Human
cgugcacacaccagagccc

SEQ ID NO: 3320002 - RNA, 14 nt, Human
cgugcacacaccag

SEQ ID NO: 3320003 - RNA, 21 nt, Human
cuaggcauuugcugaauacag

SEQ ID NO: 3320004 - RNA, 19 nt, Human
cuagugugguguuuccugg

SEQ ID NO: 3320005 - RNA, 23 nt, Human
cuagugugguguuuccuggcacu

SEQ ID NO: 3320006 - RNA, 22 nt, Human
cuagugugguguuuccuggcac

SEQ ID NO: 3320007 - RNA, 21 nt, Human
cuagugugguguuuccuggca

SEQ ID NO: 3320008 - RNA, 15 nt, Human
cuaggaacacuccuu

SEQ ID NO: 3320009 - RNA, 13 nt, Human
cuaggaacacucc

SEQ ID NO: 3320010 - RNA, 21 nt, Human
cuaggaagacuuuggaaagag

SEQ ID NO: 3320011 - RNA, 17 nt, Human
cuaggaggucucuaaga

SEQ ID NO: 3320012 - RNA, 22 nt, Human
cuaggaccccuccaugugggcu

SEQ ID NO: 3320013 - RNA, 23 nt, Human
cuauauuguuuucaguguacaug

SEQ ID NO: 3320014 - RNA, 22 nt, Human
cuauauuguuuucaguguacau

SEQ ID NO: 3320015 - RNA, 20 nt, Human
cuaucaaguauuauaccuuu

SEQ ID NO: 3320016 - RNA, 14 nt, Human
cuaugacacaugca

SEQ ID NO: 3320017 - RNA, 12 nt, Human
cuaugcauuuga

SEQ ID NO: 3320018 - RNA, 11 nt, Human
cuaugcauuug

SEQ ID NO: 3320019 - RNA, 23 nt, Human
cucacaguccuuaccagcagagc

SEQ ID NO: 3320020 - RNA, 18 nt, Human
cucaagugauucuccugc

SEQ ID NO: 3320021 - RNA, 19 nt, Human
cucaagugauucuccugcc

SEQ ID NO: 3320022 - RNA, 20 nt, Human
cucaagugauucuccugccu

SEQ ID NO: 3320023 - RNA, 20 nt, Human
cucaccagccccagugccca

SEQ ID NO: 3320024 - RNA, 21 nt, Human
cucaccagccccagugcccac

SEQ ID NO: 3320025 - RNA, 19 nt, Human
cucaccagccccagugccc

SEQ ID NO: 3320026 - RNA, 13 nt, Human
cucaccccagccc

SEQ ID NO: 3320027 - RNA, 12 nt, Human
cucaccccagcc

SEQ ID NO: 3320028 - RNA, 16 nt, Human
cucacuauguugccca

SEQ ID NO: 3320029 - RNA, 17 nt, Human
cucacuauguugcccag

SEQ ID NO: 3320030 - RNA, 17 nt, Human
cucaaccuccugggcua

SEQ ID NO: 3320031 - RNA, 21 nt, Human
cucaacucuccuccagaguca

SEQ ID NO: 3320032 - RNA, 20 nt, Human
cucaacucuccuccagaguc

SEQ ID NO: 3320033 - RNA, 19 nt, Human
cucaacucuccuccagagu

SEQ ID NO: 3320034 - RNA, 14 nt, Human
cuaugcauuugaaa

SEQ ID NO: 3320035 - RNA, 13 nt, Human
cuacucuguguca

SEQ ID NO: 3320036 - RNA, 16 nt, Human
cuacucugugucaggu

SEQ ID NO: 3320037 - RNA, 21 nt, Human
cuacucugugucagguggggc

SEQ ID NO: 3320038 - RNA, 21 nt, Human
cuacccgggaagggggcuggg

SEQ ID NO: 3320039 - RNA, 20 nt, Human
cuacccgggaagggggcugg

SEQ ID NO: 3320040 - RNA, 15 nt, Human
cuacccgggaagggg

SEQ ID NO: 3320041 - RNA, 14 nt, Human
cuacccgggaaggg

SEQ ID NO: 3320042 - RNA, 17 nt, Human
cuacuguaauuugugau

SEQ ID NO: 3320043 - RNA, 16 nt, Human
cuacuguaauuuguga

SEQ ID NO: 3320044 - RNA, 21 nt, Human
cuagacgagcaggcuucuucc

SEQ ID NO: 3320045 - RNA, 20 nt, Human
cuagacgagcaggcuucuuc

SEQ ID NO: 3320046 - RNA, 17 nt, Human
cuagagugaacuugggc

SEQ ID NO: 3320047 - RNA, 17 nt, Human
cuagcacuuugggaggc

SEQ ID NO: 3320048 - RNA, 17 nt, Human
cuaaccagcagaaaugc

SEQ ID NO: 3320049 - RNA, 14 nt, Human
cuaaccacgcugga

SEQ ID NO: 3320050 - RNA, 16 nt, Human
cuaaccagcagaaaug

SEQ ID NO: 3320051 - RNA, 17 nt, Human
cuaaccacgcuggaccu

SEQ ID NO: 3320052 - RNA, 19 nt, Human
cuaagcuauucaguaauaa

SEQ ID NO: 3320053 - RNA, 21 nt, Human
cuaagcuauucaguaauaacu

SEQ ID NO: 3320054 - RNA, 15 nt, Human
cuaaggugugcucug

SEQ ID NO: 3320055 - RNA, 18 nt, Human
cuacacugugcugagucu

SEQ ID NO: 3320056 - RNA, 15 nt, Human
cuacacacugcaugu

SEQ ID NO: 3320057 - RNA, 13 nt, Human
cuacacacugcau

SEQ ID NO: 3320058 - RNA, 15 nt, Human
cuacagaggccaugg

SEQ ID NO: 3320059 - RNA, 20 nt, Human
cuacccagcgagcccuggug

SEQ ID NO: 3320060 - RNA, 19 nt, Human
cuacccagcgagcccuggu

SEQ ID NO: 3320061 - RNA, 17 nt, Human
cuacccacccuccuuuc

SEQ ID NO: 3320062 - RNA, 13 nt, Human
cuacccacccucc

SEQ ID NO: 3320063 - RNA, 22 nt, Human
cuacccacccuccuuucaccac

SEQ ID NO: 3320064 - RNA, 14 nt, Human
cuaauguacugcau

SEQ ID NO: 3320065 - RNA, 16 nt, Human
cuaauguacugcauau

SEQ ID NO: 3320066 - RNA, 18 nt, Human
cuaauauguaacaagcca

SEQ ID NO: 3320067 - RNA, 20 nt, Human
cuaauaaaauuuaaaagucu

SEQ ID NO: 3320068 - RNA, 16 nt, Human
cuaaggugugcucuga

SEQ ID NO: 3320069 - RNA, 21 nt, Human
cuaauaaaauuuaaaagucuu

SEQ ID NO: 3320070 - RNA, 16 nt, Human
uuuccugaggcugggc

SEQ ID NO: 3320071 - RNA, 17 nt, Human
uuaccacagacauacua

SEQ ID NO: 3320072 - RNA, 14 nt, Human
uuaccacagacaua

SEQ ID NO: 3320073 - RNA, 23 nt, Human
uuacauuuuuaagugcugcauuu

SEQ ID NO: 3320074 - RNA, 20 nt, Human
uuucuguucuuucuggcuau

SEQ ID NO: 3320075 - RNA, 23 nt, Human
uuucuacucgaguuacagacaaa

SEQ ID NO: 3320076 - RNA, 18 nt, Human
uuucuaaaggcuaccuuu

SEQ ID NO: 3320077 - RNA, 21 nt, Human
uuucuaaaggcuaccuuugua

SEQ ID NO: 3320078 - RNA, 20 nt, Human
uuucuaaaggcuaccuuugu

SEQ ID NO: 3320079 - RNA, 22 nt, Human
uuugaagaugccgcauuuggau

SEQ ID NO: 3320080 - RNA, 19 nt, Human
uuugaacugauaaagauga

SEQ ID NO: 3320081 - RNA, 17 nt, Human
uuugaacugauaaagau

SEQ ID NO: 3320082 - RNA, 14 nt, Human
uuugaacucuucaa

SEQ ID NO: 3320083 - RNA, 15 nt, Human
uuugaacugauaaag

SEQ ID NO: 3320084 - RNA, 23 nt, Human
uuucuuagggaaggauacaaaag

SEQ ID NO: 3320085 - RNA, 18 nt, Human
uuucuuagggaaggauac

SEQ ID NO: 3320086 - RNA, 13 nt, Human
uuucuucucccuc

SEQ ID NO: 3320087 - RNA, 12 nt, Human
uuucuucucccu

SEQ ID NO: 3320088 - RNA, 17 nt, Human
uuuggucuacacugugc

SEQ ID NO: 3320089 - RNA, 21 nt, Human
uuuggaauuuugugcccccau

SEQ ID NO: 3320090 - RNA, 14 nt, Human
uuuggaauuuugug

SEQ ID NO: 3320091 - RNA, 16 nt, Human
uuugcuuugugauuuu

SEQ ID NO: 3320092 - RNA, 15 nt, Human
uuugcuuugugauuu

SEQ ID NO: 3320093 - RNA, 17 nt, Human
uuuuaaagaaugcucuu

SEQ ID NO: 3320094 - RNA, 21 nt, Human
uuuguucuggcucuuccaggc

SEQ ID NO: 3320095 - RNA, 12 nt, Human
uuuuaaaugcac

SEQ ID NO: 3320096 - RNA, 11 nt, Human
uuuuaaaugca

SEQ ID NO: 3320097 - RNA, 21 nt, Human
uuuuaaaugcaccuggaauau

SEQ ID NO: 3320098 - RNA, 20 nt, Human
uuuugacaaggggcaguggu

SEQ ID NO: 3320099 - RNA, 15 nt, Human
uuuuggucuguguga

SEQ ID NO: 3320100 - RNA, 14 nt, Human
uuuuggcugcugaa

SEQ ID NO: 3320101 - RNA, 16 nt, Human
uuuucuuucagccaag

SEQ ID NO: 3320102 - RNA, 19 nt, Human
uuuuguagagccagggucu

SEQ ID NO: 3320103 - RNA, 16 nt, Human
uuuugucauauaagau

SEQ ID NO: 3320104 - RNA, 19 nt, Human
uuuuuccuucagugccuua

SEQ ID NO: 3320105 - RNA, 23 nt, Human
uuuuuaagaaaaaggaugcacag

SEQ ID NO: 3320106 - RNA, 11 nt, Human
uuuuuccuuca

SEQ ID NO: 3320107 - RNA, 14 nt, Human
guauuuuacuaaua

SEQ ID NO: 3320108 - RNA, 15 nt, Human
gucaccccggccacc

SEQ ID NO: 3320109 - RNA, 15 nt, Human
gucaagugaaaaagg

SEQ ID NO: 3320110 - RNA, 19 nt, Human
guauuuuguuuuugucuua

SEQ ID NO: 3320111 - RNA, 14 nt, Human
gucagagccugcag

SEQ ID NO: 3320112 - RNA, 15 nt, Human
gucagagccugcagu

SEQ ID NO: 3320113 - RNA, 16 nt, Human
gucagagccugcaguu

SEQ ID NO: 3320114 - RNA, 22 nt, Human
gucaccccggccaccugcggug

SEQ ID NO: 3320115 - RNA, 18 nt, Human
gucaccccggccaccugc

SEQ ID NO: 3320116 - RNA, 17 nt, Human
gucaccccggccaccug

SEQ ID NO: 3320117 - RNA, 19 nt, Human
gucacucuggcagcucaga

SEQ ID NO: 3320118 - RNA, 17 nt, Human
gucacucuggcagcuca

SEQ ID NO: 3320119 - RNA, 16 nt, Human
gucacucuggcagcuc

SEQ ID NO: 3320120 - RNA, 14 nt, Human
gucacucuggcagc

SEQ ID NO: 3320121 - RNA, 13 nt, Human
gucacucuggcag

SEQ ID NO: 3320122 - RNA, 12 nt, Human
gucacucuggca

SEQ ID NO: 3320123 - RNA, 19 nt, Human
gucccugcacuugcagacu

SEQ ID NO: 3320124 - RNA, 21 nt, Human
gucccugcacuugcagacucu

SEQ ID NO: 3320125 - RNA, 16 nt, Human
gucccugcacuugcag

SEQ ID NO: 3320126 - RNA, 20 nt, Human
gucccaccuuggcugcaggg

SEQ ID NO: 3320127 - RNA, 23 nt, Human
gucccaccuuggcugcagggagu

SEQ ID NO: 3320128 - RNA, 23 nt, Human
guccacccaggagccccgaggcc

SEQ ID NO: 3320129 - RNA, 12 nt, Human
guccacccagga

SEQ ID NO: 3320130 - RNA, 21 nt, Human
gucccaccuuggcugcaggga

SEQ ID NO: 3320131 - RNA, 14 nt, Human
guagucaggugccu

SEQ ID NO: 3320132 - RNA, 16 nt, Human
guaggguuauaauaau

SEQ ID NO: 3320133 - RNA, 15 nt, Human
guagagugugccuga

SEQ ID NO: 3320134 - RNA, 16 nt, Human
guagggcgggaggaug

SEQ ID NO: 3320135 - RNA, 23 nt, Human
guagggcgggaggauguucuggg

SEQ ID NO: 3320136 - RNA, 21 nt, Human
guagggcgggaggauguucug

SEQ ID NO: 3320137 - RNA, 22 nt, Human
guagggcgggaggauguucugg

SEQ ID NO: 3320138 - RNA, 15 nt, Human
guaugaggcauuugu

SEQ ID NO: 3320139 - RNA, 13 nt, Human
guaugaggcauuu

SEQ ID NO: 3320140 - RNA, 19 nt, Human
guaucuggugacuuuccuc

SEQ ID NO: 3320141 - RNA, 12 nt, Human
guaucuggugac

SEQ ID NO: 3320142 - RNA, 12 nt, Human
guaucugagcag

SEQ ID NO: 3320143 - RNA, 21 nt, Human
guaugaucacggcucacugca

SEQ ID NO: 3320144 - RNA, 20 nt, Human
guaugaucacggcucacugc

SEQ ID NO: 3320145 - RNA, 20 nt, Human
guaugaggcauuuguuugaa

SEQ ID NO: 3320146 - RNA, 17 nt, Human
guaugaggcauuuguuu

SEQ ID NO: 3320147 - RNA, 22 nt, Human
guauaugucaagccauaauugu

SEQ ID NO: 3320148 - RNA, 21 nt, Human
gugcgaucuggguucacugca

SEQ ID NO: 3320149 - RNA, 14 nt, Human
gugccaugugccag

SEQ ID NO: 3320150 - RNA, 16 nt, Human
gugccaugugccaggu

SEQ ID NO: 3320151 - RNA, 14 nt, Human
gugcgccuacagga

SEQ ID NO: 3320152 - RNA, 14 nt, Human
gugcggccuuuggc

SEQ ID NO: 3320153 - RNA, 23 nt, Human
gugauccacccaccucagccucc

SEQ ID NO: 3320154 - RNA, 24 nt, Human
gugauccacccaccucagccuccc

SEQ ID NO: 3320155 - RNA, 18 nt, Human
gugauuuuuguaauuuuu

SEQ ID NO: 3320156 - RNA, 13 nt, Human
gugauuuuuguaa

SEQ ID NO: 3320157 - RNA, 21 nt, Human
gugcauaccacuuuuguucuu

SEQ ID NO: 3320158 - RNA, 22 nt, Human
gugcauaccacuuuuguucuug

SEQ ID NO: 3320159 - RNA, 20 nt, Human
gugcaguggugcgaucuggg

SEQ ID NO: 3320160 - RNA, 23 nt, Human
gugcaguggugcgaucuggguuc

SEQ ID NO: 3320161 - RNA, 21 nt, Human
gugaaugaugauccuaggcau

SEQ ID NO: 3320162 - RNA, 20 nt, Human
gugacaaggauugcuacugu

SEQ ID NO: 3320163 - RNA, 12 nt, Human
gugacagaggca

SEQ ID NO: 3320164 - RNA, 13 nt, Human
gugacagaggcag

SEQ ID NO: 3320165 - RNA, 14 nt, Human
gugacagaggcagc

SEQ ID NO: 3320166 - RNA, 12 nt, Human
gugaccucugcc

SEQ ID NO: 3320167 - RNA, 15 nt, Human
gugacagaggcagcc

SEQ ID NO: 3320168 - RNA, 13 nt, Human
gugaccucugccu

SEQ ID NO: 3320169 - RNA, 14 nt, Human
gugaccucugccug

SEQ ID NO: 3320170 - RNA, 14 nt, Human
gugagccacugcac

SEQ ID NO: 3320171 - RNA, 15 nt, Human
gugagccacugcacc

SEQ ID NO: 3320172 - RNA, 20 nt, Human
gugagccacugcaccgggcc

SEQ ID NO: 3320173 - RNA, 19 nt, Human
gugagccgagaucacgcca

SEQ ID NO: 3320174 - RNA, 17 nt, Human
gugaggaugaaaaaaua

SEQ ID NO: 3320175 - RNA, 17 nt, Human
gugauacaaugcugugc

SEQ ID NO: 3320176 - RNA, 15 nt, Human
gugauacaaugcugu

SEQ ID NO: 3320177 - RNA, 17 nt, Human
gugaguugauagcacag

SEQ ID NO: 3320178 - RNA, 22 nt, Human
gugauccacccaccucagccuc

SEQ ID NO: 3320179 - RNA, 17 nt, Human
gucuguucuuuccaaag

SEQ ID NO: 3320180 - RNA, 14 nt, Human
gucuguucuuucca

SEQ ID NO: 3320181 - RNA, 18 nt, Human
gucugugccauuuuguau

SEQ ID NO: 3320182 - RNA, 16 nt, Human
gucuugaacuccuggc

SEQ ID NO: 3320183 - RNA, 17 nt, Human
gucuugaacuccuggcc

SEQ ID NO: 3320184 - RNA, 21 nt, Human
gucuugaacuccuggccucaa

SEQ ID NO: 3320185 - RNA, 18 nt, Human
gucuugaacuccuggccu

SEQ ID NO: 3320186 - RNA, 20 nt, Human
gucuugaacuccuggccuca

SEQ ID NO: 3320187 - RNA, 16 nt, Human
gucuugcaauggcagc

SEQ ID NO: 3320188 - RNA, 17 nt, Human
gucuugcaauggcagcc

SEQ ID NO: 3320189 - RNA, 18 nt, Human
gucuugcaauggcagccu

SEQ ID NO: 3320190 - RNA, 19 nt, Human
gucuugcaauggcagccuu

SEQ ID NO: 3320191 - RNA, 20 nt, Human
gucuugcaauggcagccuug

SEQ ID NO: 3320192 - RNA, 21 nt, Human
gucuugcaauggcagccuugg

SEQ ID NO: 3320193 - RNA, 23 nt, Human
gucuugcaauggcagccuuggca

SEQ ID NO: 3320194 - RNA, 16 nt, Human
gucuuuuuucacuaca

SEQ ID NO: 3320195 - RNA, 15 nt, Human
gucccugccaaugga

SEQ ID NO: 3320196 - RNA, 14 nt, Human
gucccugccaaugg

SEQ ID NO: 3320197 - RNA, 11 nt, Human
gucccugccaa

SEQ ID NO: 3320198 - RNA, 19 nt, Human
guccuuaccagcagagcac

SEQ ID NO: 3320199 - RNA, 18 nt, Human
guccuuaccagcagagca

SEQ ID NO: 3320200 - RNA, 21 nt, Human
guccuuaccagcagagcaccu

SEQ ID NO: 3320201 - RNA, 16 nt, Human
gucgggcaugacacga

SEQ ID NO: 3320202 - RNA, 21 nt, Human
gucggaaaacaugcuacacac

SEQ ID NO: 3320203 - RNA, 18 nt, Human
gucucacuauguugccca

SEQ ID NO: 3320204 - RNA, 11 nt, Human
gucucacucug

SEQ ID NO: 3320205 - RNA, 19 nt, Human
gucucacuauguugcccag

SEQ ID NO: 3320206 - RNA, 15 nt, Human
gucucacucugucgc

SEQ ID NO: 3320207 - RNA, 16 nt, Human
gucucacucugucgcc

SEQ ID NO: 3320208 - RNA, 18 nt, Human
gucucacucugucgccca

SEQ ID NO: 3320209 - RNA, 19 nt, Human
gucucacucugucgcccag

SEQ ID NO: 3320210 - RNA, 22 nt, Human
gucucacucugucgcccagucu

SEQ ID NO: 3320211 - RNA, 17 nt, Human
guucaucauccuaagcu

SEQ ID NO: 3320212 - RNA, 18 nt, Human
guucaucuugaauuguaa

SEQ ID NO: 3320213 - RNA, 13 nt, Human
guucaucuugaau

SEQ ID NO: 3320214 - RNA, 12 nt, Human
guucaucuugaa

SEQ ID NO: 3320215 - RNA, 19 nt, Human
guucacugcaaccuccgcc

SEQ ID NO: 3320216 - RNA, 22 nt, Human
guuccucauuagcauuuugcua

SEQ ID NO: 3320217 - RNA, 14 nt, Human
guuccuaauccucu

SEQ ID NO: 3320218 - RNA, 20 nt, Human
guuccaccaucaagccacca

SEQ ID NO: 3320219 - RNA, 17 nt, Human
guuccaccaucaagcca

SEQ ID NO: 3320220 - RNA, 20 nt, Human
guucaagcgauucuucugcu

SEQ ID NO: 3320221 - RNA, 16 nt, Human
guucaauucucauuug

SEQ ID NO: 3320222 - RNA, 23 nt, Human
guucaauucucauuugucacaca

SEQ ID NO: 3320223 - RNA, 18 nt, Human
guucaagcgauucuucug

SEQ ID NO: 3320224 - RNA, 19 nt, Human
guucaagcgauucuucugc

SEQ ID NO: 3320225 - RNA, 19 nt, Human
guuauuaaaaaucucaaau

SEQ ID NO: 3320226 - RNA, 21 nt, Human
guuaugacuccagaauuuccc

SEQ ID NO: 3320227 - RNA, 23 nt, Human
guuaccauuuugggguacccacu

SEQ ID NO: 3320228 - RNA, 21 nt, Human
guuacauuuuuaagugcugca

SEQ ID NO: 3320229 - RNA, 18 nt, Human
guuacauaagauaaaugu

SEQ ID NO: 3320230 - RNA, 19 nt, Human
guuacauaagauaaaugug

SEQ ID NO: 3320231 - RNA, 17 nt, Human
guuacagacaaagcgug

SEQ ID NO: 3320232 - RNA, 15 nt, Human
guuacagacaaagcg

SEQ ID NO: 3320233 - RNA, 22 nt, Human
guuaguuucuccaagcaggaca

SEQ ID NO: 3320234 - RNA, 19 nt, Human
guuaguuucuccaagcagg

SEQ ID NO: 3320235 - RNA, 16 nt, Human
guuaguuucuccaagc

SEQ ID NO: 3320236 - RNA, 15 nt, Human
guuacucagaauucu

SEQ ID NO: 3320237 - RNA, 22 nt, Human
guuacuaaguuuuuauggcuuu

SEQ ID NO: 3320238 - RNA, 19 nt, Human
guucugauccuaguuccac

SEQ ID NO: 3320239 - RNA, 17 nt, Human
guugaaaaacagcugag

SEQ ID NO: 3320240 - RNA, 20 nt, Human
guucuuuccaaaguacacug

SEQ ID NO: 3320241 - RNA, 18 nt, Human
guucuuuccaaaguacac

SEQ ID NO: 3320242 - RNA, 14 nt, Human
guucuuuccaaagu

SEQ ID NO: 3320243 - RNA, 13 nt, Human
guucuuuccaaag

SEQ ID NO: 3320244 - RNA, 12 nt, Human
guucuggcucuu

SEQ ID NO: 3320245 - RNA, 20 nt, Human
guucuggcucuuccaggcug

SEQ ID NO: 3320246 - RNA, 16 nt, Human
guucuggcucuuccag

SEQ ID NO: 3320247 - RNA, 23 nt, Human
guucuggcagaguugaagacaga

SEQ ID NO: 3320248 - RNA, 11 nt, Human
guucugggaca

SEQ ID NO: 3320249 - RNA, 12 nt, Human
guucugggacac

SEQ ID NO: 3320250 - RNA, 14 nt, Human
guucugggacacag

SEQ ID NO: 3320251 - RNA, 15 nt, Human
guucugggacacagu

SEQ ID NO: 3320252 - RNA, 16 nt, Human
guucugggacacaguu

SEQ ID NO: 3320253 - RNA, 18 nt, Human
guucuuucacccuuuucu

SEQ ID NO: 3320254 - RNA, 16 nt, Human
guugaagacagagcua

SEQ ID NO: 3320255 - RNA, 15 nt, Human
guugcaggaccucag

SEQ ID NO: 3320256 - RNA, 14 nt, Human
guugccagucaccc

SEQ ID NO: 3320257 - RNA, 13 nt, Human
guugccagucacc

SEQ ID NO: 3320258 - RNA, 23 nt, Human
guugccagucaccccggccaccu

SEQ ID NO: 3320259 - RNA, 18 nt, Human
guugccagucaccccggc

SEQ ID NO: 3320260 - RNA, 17 nt, Human
guugccagucaccccgg

SEQ ID NO: 3320261 - RNA, 16 nt, Human
guugccagucaccccg

SEQ ID NO: 3320262 - RNA, 12 nt, Human
guugcccaggca

SEQ ID NO: 3320263 - RNA, 14 nt, Human
guugcccaggcagg

SEQ ID NO: 3320264 - RNA, 18 nt, Human
guuggcaaaaaggcagga

SEQ ID NO: 3320265 - RNA, 14 nt, Human
guuggcaaaaaggc

SEQ ID NO: 3320266 - RNA, 23 nt, Human
guuggccaaagccaaagcuaggc

SEQ ID NO: 3320267 - RNA, 17 nt, Human
guuggccaggcuggucu

SEQ ID NO: 3320268 - RNA, 19 nt, Human
guuggccaggcuggucuca

SEQ ID NO: 3320269 - RNA, 14 nt, Human
guuggccaguguga

SEQ ID NO: 3320270 - RNA, 15 nt, Human
guuggccaggcuggu

SEQ ID NO: 3320271 - RNA, 14 nt, Human
guuggccaggcugg

SEQ ID NO: 3320272 - RNA, 13 nt, Human
guuggccaggcug

SEQ ID NO: 3320273 - RNA, 21 nt, Human
guguggagaagcggcuggcag

SEQ ID NO: 3320274 - RNA, 13 nt, Human
guguggagaagcg

SEQ ID NO: 3320275 - RNA, 15 nt, Human
gugugcucugaucau

SEQ ID NO: 3320276 - RNA, 22 nt, Human
gugugcucugaucauccacugu

SEQ ID NO: 3320277 - RNA, 12 nt, Human
gugugcucugau

SEQ ID NO: 3320278 - RNA, 22 nt, Human
gugucucuugguccugcugcag

SEQ ID NO: 3320279 - RNA, 21 nt, Human
gugucucuugguccugcugca

SEQ ID NO: 3320280 - RNA, 20 nt, Human
gugucucuugguccugcugc

SEQ ID NO: 3320281 - RNA, 19 nt, Human
gugucucuugguccugcug

SEQ ID NO: 3320282 - RNA, 18 nt, Human
gugucucuugguccugcu

SEQ ID NO: 3320283 - RNA, 20 nt, Human
gugugagucaccaagcccag

SEQ ID NO: 3320284 - RNA, 15 nt, Human
gugucgggcaugaca

SEQ ID NO: 3320285 - RNA, 23 nt, Human
gugucccugcacuugcagacucu

SEQ ID NO: 3320286 - RNA, 14 nt, Human
guguccggucccug

SEQ ID NO: 3320287 - RNA, 17 nt, Human
gugucucccuucauccu

SEQ ID NO: 3320288 - RNA, 14 nt, Human
gugucucuuggucc

SEQ ID NO: 3320289 - RNA, 22 nt, Human
guuaaaauaccagccaguaaau

SEQ ID NO: 3320290 - RNA, 15 nt, Human
guuacacuaaaaggu

SEQ ID NO: 3320291 - RNA, 16 nt, Human
guuacacuaaaaggug

SEQ ID NO: 3320292 - RNA, 13 nt, Human
guuacagacaaag

SEQ ID NO: 3320293 - RNA, 18 nt, Human
guguuaugacuccagaau

SEQ ID NO: 3320294 - RNA, 12 nt, Human
guguuacuaagu

SEQ ID NO: 3320295 - RNA, 14 nt, Human
guguuacuaaguuu

SEQ ID NO: 3320296 - RNA, 23 nt, Human
guggcugcuucaaggauccugag

SEQ ID NO: 3320297 - RNA, 19 nt, Human
guggcuggguuggagggug

SEQ ID NO: 3320298 - RNA, 22 nt, Human
guggcugcuucaaggauccuga

SEQ ID NO: 3320299 - RNA, 19 nt, Human
guggcugcuucaaggaucc

SEQ ID NO: 3320300 - RNA, 16 nt, Human
guggcugcuucaagga

SEQ ID NO: 3320301 - RNA, 15 nt, Human
guggcugcuucaagg

SEQ ID NO: 3320302 - RNA, 22 nt, Human
guggcuuaaaacaacacucaca

SEQ ID NO: 3320303 - RNA, 14 nt, Human
guggcucacgccug

SEQ ID NO: 3320304 - RNA, 14 nt, Human
guggcugcuucaag

SEQ ID NO: 3320305 - RNA, 12 nt, Human
guggcugcuuca

SEQ ID NO: 3320306 - RNA, 18 nt, Human
guggggaccucaggccug

SEQ ID NO: 3320307 - RNA, 15 nt, Human
guggggaccucaggc

SEQ ID NO: 3320308 - RNA, 13 nt, Human
guggggcagcuug

SEQ ID NO: 3320309 - RNA, 17 nt, Human
guggggcagcuugaggg

SEQ ID NO: 3320310 - RNA, 23 nt, Human
guggguuucuaaagcugccagcc

SEQ ID NO: 3320311 - RNA, 15 nt, Human
gugggcuaguugggc

SEQ ID NO: 3320312 - RNA, 17 nt, Human
gugggcccaaugcacuu

SEQ ID NO: 3320313 - RNA, 17 nt, Human
guguacauggaauaaca

SEQ ID NO: 3320314 - RNA, 22 nt, Human
guguacauggaauaacauguaa

SEQ ID NO: 3320315 - RNA, 13 nt, Human
gugucccugcacu

SEQ ID NO: 3320316 - RNA, 16 nt, Human
gugucccugcacuugc

SEQ ID NO: 3320317 - RNA, 18 nt, Human
gugucccugcacuugcag

SEQ ID NO: 3320318 - RNA, 20 nt, Human
gugucccaaaaagaaaggag

SEQ ID NO: 3320319 - RNA, 21 nt, Human
guguaaguauucuuauuuaau

SEQ ID NO: 3320320 - RNA, 19 nt, Human
guggugcgaucuggguuca

SEQ ID NO: 3320321 - RNA, 14 nt, Human
guggugaccucugc

SEQ ID NO: 3320322 - RNA, 17 nt, Human
guggugaccucugccug

SEQ ID NO: 3320323 - RNA, 21 nt, Human
guggugagaggcauccaguau

SEQ ID NO: 3320324 - RNA, 17 nt, Human
gugguagagugugccug

SEQ ID NO: 3320325 - RNA, 19 nt, Human
gugguaugaucacggcuca

SEQ ID NO: 3320326 - RNA, 16 nt, Human
guggucccaccccaca

SEQ ID NO: 3320327 - RNA, 15 nt, Human
guggucccaccccac

SEQ ID NO: 3320328 - RNA, 14 nt, Human
guggucccacccca

SEQ ID NO: 3320329 - RNA, 18 nt, Human
gugguccuaaucuucuga

SEQ ID NO: 3320330 - RNA, 17 nt, Human
guggucccaccccacac

SEQ ID NO: 3320331 - RNA, 15 nt, Human
uacccacugcucugg

SEQ ID NO: 3320332 - RNA, 23 nt, Human
uacauuuuuaagugcugcauuua

SEQ ID NO: 3320333 - RNA, 15 nt, Human
uaccuacauacaauu

SEQ ID NO: 3320334 - RNA, 22 nt, Human
uaccuuuuuuagaguugauacu

SEQ ID NO: 3320335 - RNA, 19 nt, Human
uaccuuuuuuagaguugau

SEQ ID NO: 3320336 - RNA, 13 nt, Human
uaccuuuuuuaga

SEQ ID NO: 3320337 - RNA, 18 nt, Human
uaccucggugccuuccuc

SEQ ID NO: 3320338 - RNA, 22 nt, Human
uaccuuuuuuauacauaaacaa

SEQ ID NO: 3320339 - RNA, 17 nt, Human
uaccuuuuuuauacaua

SEQ ID NO: 3320340 - RNA, 16 nt, Human
uaccuuuuuuauacau

SEQ ID NO: 3320341 - RNA, 13 nt, Human
uaccuuuuuuaua

SEQ ID NO: 3320342 - RNA, 21 nt, Human
uacgaaaagaggggaagagac

SEQ ID NO: 3320343 - RNA, 18 nt, Human
uacgaaaagaggggaaga

SEQ ID NO: 3320344 - RNA, 14 nt, Human
uacuaaggaaucuu

SEQ ID NO: 3320345 - RNA, 21 nt, Human
uacuaauagacaauuuauuau

SEQ ID NO: 3320346 - RNA, 20 nt, Human
uacuaauagacaauuuauua

SEQ ID NO: 3320347 - RNA, 13 nt, Human
uacuaacuuuccu

SEQ ID NO: 3320348 - RNA, 13 nt, Human
uacuuguggacac

SEQ ID NO: 3320349 - RNA, 16 nt, Human
uacuguccuacccacc

SEQ ID NO: 3320350 - RNA, 21 nt, Human
uacugucuucaguaagccgug

SEQ ID NO: 3320351 - RNA, 14 nt, Human
uacuacaguuuguu

SEQ ID NO: 3320352 - RNA, 13 nt, Human
uacuacaguuugu

SEQ ID NO: 3320353 - RNA, 20 nt, Human
uacuacaguccucccaucuc

SEQ ID NO: 3320354 - RNA, 22 nt, Human
uacuacaguccucccaucucac

SEQ ID NO: 3320355 - RNA, 18 nt, Human
uacucgaguuacagacaa

SEQ ID NO: 3320356 - RNA, 22 nt, Human
uacucgaguuacagacaaagcg

SEQ ID NO: 3320357 - RNA, 17 nt, Human
uacugcauaugaaagga

SEQ ID NO: 3320358 - RNA, 21 nt, Human
uacacugugcugagucugaag

SEQ ID NO: 3320359 - RNA, 15 nt, Human
uacacacugcauguu

SEQ ID NO: 3320360 - RNA, 11 nt, Human
uacacacacac

SEQ ID NO: 3320361 - RNA, 23 nt, Human
uacacaaugguuuucuugugugu

SEQ ID NO: 3320362 - RNA, 14 nt, Human
uacaaaguagaagu

SEQ ID NO: 3320363 - RNA, 18 nt, Human
uacaaaguagaagucuua

SEQ ID NO: 3320364 - RNA, 15 nt, Human
uacaggagugagcac

SEQ ID NO: 3320365 - RNA, 22 nt, Human
uacaggaaguacuggagaaaau

SEQ ID NO: 3320366 - RNA, 15 nt, Human
uacaggaaguacugg

SEQ ID NO: 3320367 - RNA, 14 nt, Human
uacaggaaguacug

SEQ ID NO: 3320368 - RNA, 20 nt, Human
uacaguugaaaaacagcuga

SEQ ID NO: 3320369 - RNA, 18 nt, Human
uacaguuuguuaguauga

SEQ ID NO: 3320370 - RNA, 19 nt, Human
uacaguugaaaaacagcug

SEQ ID NO: 3320371 - RNA, 17 nt, Human
uacaguugaaaaacagc

SEQ ID NO: 3320372 - RNA, 16 nt, Human
uacacugugcugaguc

SEQ ID NO: 3320373 - RNA, 20 nt, Human
uacacuguuucaaacuuuac

SEQ ID NO: 3320374 - RNA, 23 nt, Human
uacacugugcugagucugaaggc

SEQ ID NO: 3320375 - RNA, 22 nt, Human
uacacugugcugagucugaagg

SEQ ID NO: 3320376 - RNA, 16 nt, Human
uacacuuacacuuuau

SEQ ID NO: 3320377 - RNA, 22 nt, Human
uacacuguuucaaacuuuacua

SEQ ID NO: 3320378 - RNA, 19 nt, Human
uacacuguuucaaacuuua

SEQ ID NO: 3320379 - RNA, 20 nt, Human
uacagcuugaccgugaggcc

SEQ ID NO: 3320380 - RNA, 13 nt, Human
uacaggaaguacu

SEQ ID NO: 3320381 - RNA, 18 nt, Human
uacaggaagguagaaaua

SEQ ID NO: 3320382 - RNA, 14 nt, Human
uacauggaauaaca

SEQ ID NO: 3320383 - RNA, 18 nt, Human
uacauggaauaacaugua

SEQ ID NO: 3320384 - RNA, 19 nt, Human
uacauggaauaacauguaa

SEQ ID NO: 3320385 - RNA, 22 nt, Human
uacauggaauaacauguaauua

SEQ ID NO: 3320386 - RNA, 22 nt, Human
uacauuuuuaagugcugcauuu

SEQ ID NO: 3320387 - RNA, 19 nt, Human
uacauuuuuaagugcugca

SEQ ID NO: 3320388 - RNA, 14 nt, Human
uacauuuuuaagug

SEQ ID NO: 3320389 - RNA, 16 nt, Human
uacauaagauaaaugu

SEQ ID NO: 3320390 - RNA, 16 nt, Human
uacaugaaaacacauu

SEQ ID NO: 3320391 - RNA, 23 nt, Human
uacaugaaaacacauuuuucuua

SEQ ID NO: 3320392 - RNA, 19 nt, Human
uacaugaaaacacauuuuu

SEQ ID NO: 3320393 - RNA, 18 nt, Human
uacaugaaaacacauuuu

SEQ ID NO: 3320394 - RNA, 17 nt, Human
uacaugaaaacacauuu

SEQ ID NO: 3320395 - RNA, 16 nt, Human
uacauaaacaaguccu

SEQ ID NO: 3320396 - RNA, 21 nt, Human
uacaguuuguuaguaugaggc

SEQ ID NO: 3320397 - RNA, 19 nt, Human
uacaguuuguuaguaugag

SEQ ID NO: 3320398 - RNA, 23 nt, Human
uagaauuaguggcacuugcuuuu

SEQ ID NO: 3320399 - RNA, 20 nt, Human
uagaagucuuagauguauau

SEQ ID NO: 3320400 - RNA, 15 nt, Human
uagagguucaaagau

SEQ ID NO: 3320401 - RNA, 14 nt, Human
uagagguucaaaga

SEQ ID NO: 3320402 - RNA, 12 nt, Human
uagagugggagc

SEQ ID NO: 3320403 - RNA, 17 nt, Human
uagaguugauacuacag

SEQ ID NO: 3320404 - RNA, 14 nt, Human
uagaguugauacua

SEQ ID NO: 3320405 - RNA, 17 nt, Human
uagccugccucuucucu

SEQ ID NO: 3320406 - RNA, 12 nt, Human
uagcugggacua

SEQ ID NO: 3320407 - RNA, 15 nt, Human
uagcugggacuacag

SEQ ID NO: 3320408 - RNA, 17 nt, Human
uagcugggacuacaggc

SEQ ID NO: 3320409 - RNA, 16 nt, Human
uagcucaggugucccu

SEQ ID NO: 3320410 - RNA, 18 nt, Human
uagccugugccucuggga

SEQ ID NO: 3320411 - RNA, 20 nt, Human
uagcucaggugucccugcac

SEQ ID NO: 3320412 - RNA, 21 nt, Human
uagcucaggugucccugcacu

SEQ ID NO: 3320413 - RNA, 12 nt, Human
uagcucauucuc

SEQ ID NO: 3320414 - RNA, 16 nt, Human
uagauacuguaucaug

SEQ ID NO: 3320415 - RNA, 11 nt, Human
uagcagggaaa

SEQ ID NO: 3320416 - RNA, 19 nt, Human
uagcauacguacacauuuu

SEQ ID NO: 3320417 - RNA, 18 nt, Human
uagcauacguacacauuu

SEQ ID NO: 3320418 - RNA, 17 nt, Human
uagcauacguacacauu

SEQ ID NO: 3320419 - RNA, 16 nt, Human
uagcauacguacacau

SEQ ID NO: 3320420 - RNA, 16 nt, Human
uaguuugauuaaauuc

SEQ ID NO: 3320421 - RNA, 15 nt, Human
uaguuugauuaaauu

SEQ ID NO: 3320422 - RNA, 11 nt, Human
uauaaacuuua

SEQ ID NO: 3320423 - RNA, 14 nt, Human
uauaaacuuuaccu

SEQ ID NO: 3320424 - RNA, 13 nt, Human
uauaaacuuuacc

SEQ ID NO: 3320425 - RNA, 16 nt, Human
uauaaacuuuaccuuu

SEQ ID NO: 3320426 - RNA, 15 nt, Human
uauaaacuuuaccuu

SEQ ID NO: 3320427 - RNA, 17 nt, Human
uauaaacuuuaccuuuu

SEQ ID NO: 3320428 - RNA, 16 nt, Human
uaguaugguggcuggg

SEQ ID NO: 3320429 - RNA, 15 nt, Human
uaguaugaggcauuu

SEQ ID NO: 3320430 - RNA, 20 nt, Human
uaguggcuuaaaacaacacu

SEQ ID NO: 3320431 - RNA, 22 nt, Human
uaguuguuugauucagacagcu

SEQ ID NO: 3320432 - RNA, 21 nt, Human
uaguuguuugauucagacagc

SEQ ID NO: 3320433 - RNA, 20 nt, Human
uaguuguuugauucagacag

SEQ ID NO: 3320434 - RNA, 17 nt, Human
uaggugugggggaagca

SEQ ID NO: 3320435 - RNA, 13 nt, Human
uagguguggggga

SEQ ID NO: 3320436 - RNA, 23 nt, Human
uaggugugacugaauuucuuuug

SEQ ID NO: 3320437 - RNA, 21 nt, Human
uaggugugacugaauuucuuu

SEQ ID NO: 3320438 - RNA, 19 nt, Human
uaggugugacugaauuucu

SEQ ID NO: 3320439 - RNA, 18 nt, Human
uaguaugaggcauuuguu

SEQ ID NO: 3320440 - RNA, 17 nt, Human
uaguaugaggcauuugu

SEQ ID NO: 3320441 - RNA, 11 nt, Human
uaggugacaga

SEQ ID NO: 3320442 - RNA, 16 nt, Human
uaggugacagagugag

SEQ ID NO: 3320443 - RNA, 22 nt, Human
uagcuggucuuauuuguaaagc

SEQ ID NO: 3320444 - RNA, 19 nt, Human
uaucaggugcugccaucca

SEQ ID NO: 3320445 - RNA, 17 nt, Human
uaucaggugcugccauc

SEQ ID NO: 3320446 - RNA, 20 nt, Human
uaucaggugcugccauccag

SEQ ID NO: 3320447 - RNA, 17 nt, Human
uaucaugacaaagacug

SEQ ID NO: 3320448 - RNA, 15 nt, Human
uaaaacaacacucac

SEQ ID NO: 3320449 - RNA, 17 nt, Human
uaaaacacaacaucuuu

SEQ ID NO: 3320450 - RNA, 23 nt, Human
uaaaacacaacaucuuuuucuac

SEQ ID NO: 3320451 - RNA, 22 nt, Human
uaaaacacaacaucuuuuucua

SEQ ID NO: 3320452 - RNA, 12 nt, Human
uaaaaggugacc

SEQ ID NO: 3320453 - RNA, 12 nt, Human
uaaaaggagcca

SEQ ID NO: 3320454 - RNA, 21 nt, Human
uaaaagguaugcaaucaaauc

SEQ ID NO: 3320455 - RNA, 14 nt, Human
uaaaagauacaguu

SEQ ID NO: 3320456 - RNA, 20 nt, Human
uaaaagauacaguuacucag

SEQ ID NO: 3320457 - RNA, 17 nt, Human
uaaaagauacaguuacu

SEQ ID NO: 3320458 - RNA, 21 nt, Human
uaaaagauacaguuacucaga

SEQ ID NO: 3320459 - RNA, 17 nt, Human
uaaaggcuaccuuugua

SEQ ID NO: 3320460 - RNA, 20 nt, Human
uaaagccugaguuugcuuuc

SEQ ID NO: 3320461 - RNA, 15 nt, Human
uaaaggcuaccuuug

SEQ ID NO: 3320462 - RNA, 12 nt, Human
uaaagaaaacug

SEQ ID NO: 3320463 - RNA, 19 nt, Human
uaaagcagcguuucuauga

SEQ ID NO: 3320464 - RNA, 17 nt, Human
uaaagcagcguuucuau

SEQ ID NO: 3320465 - RNA, 16 nt, Human
uaaagcagcguuucua

SEQ ID NO: 3320466 - RNA, 22 nt, Human
uaaacuugguuuuuaaaaaacu

SEQ ID NO: 3320467 - RNA, 19 nt, Human
uaaacaagaccacguuucu

SEQ ID NO: 3320468 - RNA, 20 nt, Human
uaaacaagaccacguuucua

SEQ ID NO: 3320469 - RNA, 22 nt, Human
uaaacaagaccacguuucuaaa

SEQ ID NO: 3320470 - RNA, 21 nt, Human
uaaacaagaccacguuucuaa

SEQ ID NO: 3320471 - RNA, 14 nt, Human
guuuagauaauaca

SEQ ID NO: 3320472 - RNA, 15 nt, Human
guuguuacauuuuua

SEQ ID NO: 3320473 - RNA, 14 nt, Human
guuguuacauuuuu

SEQ ID NO: 3320474 - RNA, 14 nt, Human
guugugguuaaucu

SEQ ID NO: 3320475 - RNA, 22 nt, Human
guuguggauuuaacagaaaugu

SEQ ID NO: 3320476 - RNA, 12 nt, Human
guugucagcuga

SEQ ID NO: 3320477 - RNA, 19 nt, Human
guuggcugggggccucagu

SEQ ID NO: 3320478 - RNA, 20 nt, Human
guuggccccugcccggcugc

SEQ ID NO: 3320479 - RNA, 13 nt, Human
guuggccccugcc

SEQ ID NO: 3320480 - RNA, 14 nt, Human
guuggccccugccc

SEQ ID NO: 3320481 - RNA, 12 nt, Human
guuggcuggggg

SEQ ID NO: 3320482 - RNA, 20 nt, Human
guuuguaaauuaacuuuuau

SEQ ID NO: 3320483 - RNA, 18 nt, Human
guuuggggaugagaaagg

SEQ ID NO: 3320484 - RNA, 20 nt, Human
guuugauucagacagcugcc

SEQ ID NO: 3320485 - RNA, 16 nt, Human
guuugauucagacagc

SEQ ID NO: 3320486 - RNA, 18 nt, Human
guuuguuucugaaaggga

SEQ ID NO: 3320487 - RNA, 17 nt, Human
guuugagaucagccugg

SEQ ID NO: 3320488 - RNA, 23 nt, Human
guuugauuaaauucuugcaaagu

SEQ ID NO: 3320489 - RNA, 20 nt, Human
guuuuccaugaguccccugu

SEQ ID NO: 3320490 - RNA, 19 nt, Human
guuuuccaugaguccccug

SEQ ID NO: 3320491 - RNA, 20 nt, Human
guuuuccagguuuaagcugu

SEQ ID NO: 3320492 - RNA, 11 nt, Human
guuuucacucu

SEQ ID NO: 3320493 - RNA, 12 nt, Human
guuuucacucuu

SEQ ID NO: 3320494 - RNA, 17 nt, Human
guuuucaaaauaaaaau

SEQ ID NO: 3320495 - RNA, 20 nt, Human
guuuguuucugaaagggacg

SEQ ID NO: 3320496 - RNA, 18 nt, Human
uaacaccaugauuaacca

SEQ ID NO: 3320497 - RNA, 11 nt, Human
uaaauuauuuu

SEQ ID NO: 3320498 - RNA, 22 nt, Human
uaaauucuugcaaaguaucccu

SEQ ID NO: 3320499 - RNA, 18 nt, Human
uaaauucuugcaaaguau

SEQ ID NO: 3320500 - RNA, 17 nt, Human
uaaauucuugcaaagua

SEQ ID NO: 3320501 - RNA, 16 nt, Human
uaaauucuugcaaagu

SEQ ID NO: 3320502 - RNA, 17 nt, Human
uaaaugggggugcauuu

SEQ ID NO: 3320503 - RNA, 14 nt, Human
uaaaugggggugca

SEQ ID NO: 3320504 - RNA, 19 nt, Human
uaaaugggggugcauuuga

SEQ ID NO: 3320505 - RNA, 18 nt, Human
uaaaugggggugcauuug

SEQ ID NO: 3320506 - RNA, 22 nt, Human
uaaaugucucuuuaaugucaca

SEQ ID NO: 3320507 - RNA, 20 nt, Human
uaaaugucuaguuguaacac

SEQ ID NO: 3320508 - RNA, 17 nt, Human
uaaaugcccagccccuu

SEQ ID NO: 3320509 - RNA, 16 nt, Human
uaaaugcccagccccu

SEQ ID NO: 3320510 - RNA, 15 nt, Human
uaaaugcccagcccc

SEQ ID NO: 3320511 - RNA, 14 nt, Human
uaaaugcccagccc

SEQ ID NO: 3320512 - RNA, 16 nt, Human
uaaauggaaccacucu

SEQ ID NO: 3320513 - RNA, 13 nt, Human
uaaaugcccagcc

SEQ ID NO: 3320514 - RNA, 19 nt, Human
uaagaaccuuuugagugcc

SEQ ID NO: 3320515 - RNA, 23 nt, Human
uaagaaaaaggaugcacagaguu

SEQ ID NO: 3320516 - RNA, 19 nt, Human
uaagaaaaaggaugcacag

SEQ ID NO: 3320517 - RNA, 18 nt, Human
uaagaaaaaggaugcaca

SEQ ID NO: 3320518 - RNA, 16 nt, Human
uaagaaaaaggaugca

SEQ ID NO: 3320519 - RNA, 23 nt, Human
uaaccaguguuguggauuuaaca

SEQ ID NO: 3320520 - RNA, 16 nt, Human
uaaccacuucagcuga

SEQ ID NO: 3320521 - RNA, 11 nt, Human
uaacagaaaug

SEQ ID NO: 3320522 - RNA, 14 nt, Human
uaagugcugcauuu

SEQ ID NO: 3320523 - RNA, 23 nt, Human
uaagugaggaugaaaaaauaaca

SEQ ID NO: 3320524 - RNA, 12 nt, Human
uaagugagagag

SEQ ID NO: 3320525 - RNA, 20 nt, Human
uaagugguacuaacuuuccu

SEQ ID NO: 3320526 - RNA, 22 nt, Human
uaagugcugcauuuaaaagaua

SEQ ID NO: 3320527 - RNA, 18 nt, Human
uaagugcugcauuuaaaa

SEQ ID NO: 3320528 - RNA, 16 nt, Human
uaagugcugcauuuaa

SEQ ID NO: 3320529 - RNA, 15 nt, Human
uaagugcugcauuua

SEQ ID NO: 3320530 - RNA, 12 nt, Human
uaagaggcaggg

SEQ ID NO: 3320531 - RNA, 15 nt, Human
uaagaggcagggucu

SEQ ID NO: 3320532 - RNA, 16 nt, Human
uaaggauguucuagca

SEQ ID NO: 3320533 - RNA, 20 nt, Human
uaagguggguacgggagggu

SEQ ID NO: 3320534 - RNA, 15 nt, Human
uaaggugugcucuga

SEQ ID NO: 3320535 - RNA, 17 nt, Human
uaaggguaucuggugac

SEQ ID NO: 3320536 - RNA, 15 nt, Human
uaaugcgugcauacc

SEQ ID NO: 3320537 - RNA, 23 nt, Human
uaaugcgugcauaccacuuuugu

SEQ ID NO: 3320538 - RNA, 22 nt, Human
uaaugcgugcauaccacuuuug

SEQ ID NO: 3320539 - RNA, 19 nt, Human
uaaugcgugcauaccacuu

SEQ ID NO: 3320540 - RNA, 15 nt, Human
uaauggggcggugag

SEQ ID NO: 3320541 - RNA, 14 nt, Human
uaauuaaguacuau

SEQ ID NO: 3320542 - RNA, 17 nt, Human
uaauuaaguacuaugua

SEQ ID NO: 3320543 - RNA, 20 nt, Human
uaauauuaaggaagacaaug

SEQ ID NO: 3320544 - RNA, 13 nt, Human
uaaucuaaaugga

SEQ ID NO: 3320545 - RNA, 12 nt, Human
uaaucuaaaugg

SEQ ID NO: 3320546 - RNA, 19 nt, Human
uaauaugcacacauuuuuu

SEQ ID NO: 3320547 - RNA, 18 nt, Human
uaauaugcacacauuuuu

SEQ ID NO: 3320548 - RNA, 17 nt, Human
uaauaugcacacauuuu

SEQ ID NO: 3320549 - RNA, 16 nt, Human
uaauaugcacacauuu

SEQ ID NO: 3320550 - RNA, 15 nt, Human
uaauaugcacacauu

SEQ ID NO: 3320551 - RNA, 17 nt, Human
uguuuuaagaggcaggg

SEQ ID NO: 3320552 - RNA, 19 nt, Human
uguuuuaaggaugcuugua

SEQ ID NO: 3320553 - RNA, 23 nt, Human
uguuuuaaggaugcuuguacaua

SEQ ID NO: 3320554 - RNA, 22 nt, Human
uguuuuaaggaugcuuguacau

SEQ ID NO: 3320555 - RNA, 16 nt, Human
uguuuuaagaggcagg

SEQ ID NO: 3320556 - RNA, 22 nt, Human
uuaaacuuaaucuaaauggaac

SEQ ID NO: 3320557 - RNA, 14 nt, Human
uuaaaacccaagug

SEQ ID NO: 3320558 - RNA, 14 nt, Human
uuaaaugcccagcc

SEQ ID NO: 3320559 - RNA, 16 nt, Human
uuaaaugcccagcccc

SEQ ID NO: 3320560 - RNA, 15 nt, Human
uuaaaugcccagccc

SEQ ID NO: 3320561 - RNA, 22 nt, Human
uuaauuaaaacacaacaucuuu

SEQ ID NO: 3320562 - RNA, 17 nt, Human
uuacauuuuuaagugcu

SEQ ID NO: 3320563 - RNA, 12 nt, Human
uuacauuuuuaa

SEQ ID NO: 3320564 - RNA, 13 nt, Human
uuacacuuuaugc

SEQ ID NO: 3320565 - RNA, 20 nt, Human
uuacacuuuaugcacaaaau

SEQ ID NO: 3320566 - RNA, 13 nt, Human
uuaacuuuuauaa

SEQ ID NO: 3320567 - RNA, 12 nt, Human
uuaacuuuuaua

SEQ ID NO: 3320568 - RNA, 13 nt, Human
uuaaaugcccagc

SEQ ID NO: 3320569 - RNA, 19 nt, Human
ugugugcacguacacacac

SEQ ID NO: 3320570 - RNA, 13 nt, Human
uguguuuauuguc

SEQ ID NO: 3320571 - RNA, 16 nt, Human
uguguuuauugucaaa

SEQ ID NO: 3320572 - RNA, 18 nt, Human
uguucagcuccagcucac

SEQ ID NO: 3320573 - RNA, 20 nt, Human
uguucagcuccagcucacca

SEQ ID NO: 3320574 - RNA, 21 nt, Human
uguucagcuccagcucaccag

SEQ ID NO: 3320575 - RNA, 17 nt, Human
uguuaguaugaggcauu

SEQ ID NO: 3320576 - RNA, 20 nt, Human
uguuaguaugaggcauuugu

SEQ ID NO: 3320577 - RNA, 19 nt, Human
uguuaguaugaggcauuug

SEQ ID NO: 3320578 - RNA, 14 nt, Human
uguuacuaaguuuu

SEQ ID NO: 3320579 - RNA, 23 nt, Human
uguucuuucuggcuaugcauuug

SEQ ID NO: 3320580 - RNA, 21 nt, Human
uguucuggcucuuccaggcug

SEQ ID NO: 3320581 - RNA, 20 nt, Human
uguucuggcucuuccaggcu

SEQ ID NO: 3320582 - RNA, 17 nt, Human
uguucuggcucuuccag

SEQ ID NO: 3320583 - RNA, 16 nt, Human
uguucucucuucucca

SEQ ID NO: 3320584 - RNA, 15 nt, Human
uguucucucuucucc

SEQ ID NO: 3320585 - RNA, 19 nt, Human
uguucaucauccuaagcua

SEQ ID NO: 3320586 - RNA, 12 nt, Human
uguucucugccc

SEQ ID NO: 3320587 - RNA, 12 nt, Human
uguucuggcucu

SEQ ID NO: 3320588 - RNA, 16 nt, Human
uguucuggcucuucca

SEQ ID NO: 3320589 - RNA, 13 nt, Human
uguucuggcucuu

SEQ ID NO: 3320590 - RNA, 15 nt, Human
uguucucugcccucc

SEQ ID NO: 3320591 - RNA, 14 nt, Human
uguucucugcccuc

SEQ ID NO: 3320592 - RNA, 13 nt, Human
uguucucugcccu

SEQ ID NO: 3320593 - RNA, 19 nt, Human
uguuggcugggggccucag

SEQ ID NO: 3320594 - RNA, 17 nt, Human
uguuggcugggggccuc

SEQ ID NO: 3320595 - RNA, 15 nt, Human
uguuggccaggcugg

SEQ ID NO: 3320596 - RNA, 16 nt, Human
uguuggccaggcuggu

SEQ ID NO: 3320597 - RNA, 23 nt, Human
uguggcgcagcauauucaggaag

SEQ ID NO: 3320598 - RNA, 18 nt, Human
uguggacacagcucuucu

SEQ ID NO: 3320599 - RNA, 16 nt, Human
uguggacacagcucuu

SEQ ID NO: 3320600 - RNA, 19 nt, Human
uguggacacagcucuucuc

SEQ ID NO: 3320601 - RNA, 12 nt, Human
uguguagggcgg

SEQ ID NO: 3320602 - RNA, 21 nt, Human
ugugcauuaucuagauacugu

SEQ ID NO: 3320603 - RNA, 20 nt, Human
ugugcauuaucuagauacug

SEQ ID NO: 3320604 - RNA, 23 nt, Human
ugugcauuaucuagauacuguau

SEQ ID NO: 3320605 - RNA, 14 nt, Human
ugugcacguacaca

SEQ ID NO: 3320606 - RNA, 14 nt, Human
ugugcauuaucuag

SEQ ID NO: 3320607 - RNA, 19 nt, Human
ugugcauuaucuagauacu

SEQ ID NO: 3320608 - RNA, 16 nt, Human
ugugcauuaucuagau

SEQ ID NO: 3320609 - RNA, 14 nt, Human
ugugcgccuacagg

SEQ ID NO: 3320610 - RNA, 19 nt, Human
ugugcgccuacaggaguga

SEQ ID NO: 3320611 - RNA, 21 nt, Human
ugugaaaagaaaaaugagccu

SEQ ID NO: 3320612 - RNA, 23 nt, Human
ugugaaaagaaaaaugagccugg

SEQ ID NO: 3320613 - RNA, 23 nt, Human
ugucuuuucuugcaugaggcuag

SEQ ID NO: 3320614 - RNA, 14 nt, Human
ugucuuuggacccu

SEQ ID NO: 3320615 - RNA, 21 nt, Human
ugucuuuucuugcaugaggcu

SEQ ID NO: 3320616 - RNA, 16 nt, Human
ugucuuuggacccuga

SEQ ID NO: 3320617 - RNA, 15 nt, Human
ugugacauguuuuau

SEQ ID NO: 3320618 - RNA, 12 nt, Human
ugugaggaagcc

SEQ ID NO: 3320619 - RNA, 20 nt, Human
ugugaggaagccgcuggggc

SEQ ID NO: 3320620 - RNA, 18 nt, Human
ugugaggaagccgcuggg

SEQ ID NO: 3320621 - RNA, 13 nt, Human
ugugaggaagccg

SEQ ID NO: 3320622 - RNA, 19 nt, Human
ugugagucaccaagcccag

SEQ ID NO: 3320623 - RNA, 21 nt, Human
ugugagucaccaagcccaguu

SEQ ID NO: 3320624 - RNA, 15 nt, Human
ugugagucaccaagc

SEQ ID NO: 3320625 - RNA, 17 nt, Human
ugugagucaccaagccc

SEQ ID NO: 3320626 - RNA, 13 nt, Human
ugucacacacuuu

SEQ ID NO: 3320627 - RNA, 17 nt, Human
ugucacacacuuuggcu

SEQ ID NO: 3320628 - RNA, 12 nt, Human
ugucacaggcag

SEQ ID NO: 3320629 - RNA, 19 nt, Human
uguauuuuacuaauaaaau

SEQ ID NO: 3320630 - RNA, 20 nt, Human
uguauucucuccuguaccuc

SEQ ID NO: 3320631 - RNA, 22 nt, Human
uguauucucuccuguaccucuu

SEQ ID NO: 3320632 - RNA, 16 nt, Human
uguccuacccacccuc

SEQ ID NO: 3320633 - RNA, 12 nt, Human
uguccuacucug

SEQ ID NO: 3320634 - RNA, 17 nt, Human
uguccuacucuguguca

SEQ ID NO: 3320635 - RNA, 20 nt, Human
uguccuacccacccuccuuu

SEQ ID NO: 3320636 - RNA, 16 nt, Human
uguccccgacccuugc

SEQ ID NO: 3320637 - RNA, 13 nt, Human
uguccccaccgca

SEQ ID NO: 3320638 - RNA, 22 nt, Human
uguccccaccgcagacaggacc

SEQ ID NO: 3320639 - RNA, 19 nt, Human
uguccccaccgcagacagg

SEQ ID NO: 3320640 - RNA, 18 nt, Human
uguccccaccgcagacag

SEQ ID NO: 3320641 - RNA, 13 nt, Human
ugucaccugaaga

SEQ ID NO: 3320642 - RNA, 23 nt, Human
ugucccaaaaagaaaggagggga

SEQ ID NO: 3320643 - RNA, 16 nt, Human
ugucauuugagcaggg

SEQ ID NO: 3320644 - RNA, 18 nt, Human
uguacagagcccacgccc

SEQ ID NO: 3320645 - RNA, 13 nt, Human
uguacagagccca

SEQ ID NO: 3320646 - RNA, 17 nt, Human
uguacagagcccacgcc

SEQ ID NO: 3320647 - RNA, 16 nt, Human
uguacagagcccacgc

SEQ ID NO: 3320648 - RNA, 15 nt, Human
uguacgucugacagg

SEQ ID NO: 3320649 - RNA, 19 nt, Human
uguacugcauaugaaagga

SEQ ID NO: 3320650 - RNA, 14 nt, Human
ugccugguggcagc

SEQ ID NO: 3320651 - RNA, 15 nt, Human
ugccugguggcagcu

SEQ ID NO: 3320652 - RNA, 18 nt, Human
ugccugggcagaaggaag

SEQ ID NO: 3320653 - RNA, 21 nt, Human
ugccugggaucccucauccuc

SEQ ID NO: 3320654 - RNA, 18 nt, Human
ugccccuggcagccccug

SEQ ID NO: 3320655 - RNA, 20 nt, Human
ugccucgaacuggcugcaaa

SEQ ID NO: 3320656 - RNA, 18 nt, Human
ugccucgaacuggcugca

SEQ ID NO: 3320657 - RNA, 19 nt, Human
ugccucgaacuggcugcaa

SEQ ID NO: 3320658 - RNA, 14 nt, Human
ugcgaucuggguuc

SEQ ID NO: 3320659 - RNA, 15 nt, Human
ugcgaucuggguuca

SEQ ID NO: 3320660 - RNA, 19 nt, Human
ugcgaucuggguucacugc

SEQ ID NO: 3320661 - RNA, 20 nt, Human
ugcgaucuggguucacugca

SEQ ID NO: 3320662 - RNA, 21 nt, Human
ugcgaucuggguucacugcaa

SEQ ID NO: 3320663 - RNA, 15 nt, Human
ugcuaaaugugaaug

SEQ ID NO: 3320664 - RNA, 13 nt, Human
ugcgccuacagga

SEQ ID NO: 3320665 - RNA, 22 nt, Human
ugcgccuacaggagugagcacu

SEQ ID NO: 3320666 - RNA, 14 nt, Human
ugcgccuacaggag

SEQ ID NO: 3320667 - RNA, 16 nt, Human
ugcgccuacaggagug

SEQ ID NO: 3320668 - RNA, 15 nt, Human
ugcucacauaucugu

SEQ ID NO: 3320669 - RNA, 16 nt, Human
ugcucacauaucuguc

SEQ ID NO: 3320670 - RNA, 14 nt, Human
ugcuccucucccca

SEQ ID NO: 3320671 - RNA, 18 nt, Human
ugcuccuuucuuguuuua

SEQ ID NO: 3320672 - RNA, 17 nt, Human
ugcuccucuccccagca

SEQ ID NO: 3320673 - RNA, 13 nt, Human
ugcugcuggcugg

SEQ ID NO: 3320674 - RNA, 23 nt, Human
ugcugcaguugccagucaccccg

SEQ ID NO: 3320675 - RNA, 18 nt, Human
ugcugcaguugccaguca

SEQ ID NO: 3320676 - RNA, 16 nt, Human
ugcugcaguugccagu

SEQ ID NO: 3320677 - RNA, 22 nt, Human
ugcugacagacacaggcccggc

SEQ ID NO: 3320678 - RNA, 23 nt, Human
ugcugacagacacaggcccggcu

SEQ ID NO: 3320679 - RNA, 19 nt, Human
ugcugacagacacaggccc

SEQ ID NO: 3320680 - RNA, 13 nt, Human
ugcugaaggcucg

SEQ ID NO: 3320681 - RNA, 12 nt, Human
ugcugaaggcuc

SEQ ID NO: 3320682 - RNA, 13 nt, Human
ugcugauggugca

SEQ ID NO: 3320683 - RNA, 17 nt, Human
ugcugauggugcaauga

SEQ ID NO: 3320684 - RNA, 15 nt, Human
ugcugauggugcaau

SEQ ID NO: 3320685 - RNA, 16 nt, Human
ugcagugcuuccaagg

SEQ ID NO: 3320686 - RNA, 19 nt, Human
ugcaggcagccaggccaca

SEQ ID NO: 3320687 - RNA, 14 nt, Human
ugcaggcagccagg

SEQ ID NO: 3320688 - RNA, 13 nt, Human
ugcaggcagccag

SEQ ID NO: 3320689 - RNA, 14 nt, Human
ugcaguugccaguc

SEQ ID NO: 3320690 - RNA, 13 nt, Human
ugcaguugccagu

SEQ ID NO: 3320691 - RNA, 22 nt, Human
ugcagugguaugaucacggcuc

SEQ ID NO: 3320692 - RNA, 21 nt, Human
ugcaccggcuggccuggcccc

SEQ ID NO: 3320693 - RNA, 17 nt, Human
ugcaccgggccacagag

SEQ ID NO: 3320694 - RNA, 22 nt, Human
ugcaccgggccacagagaaagu

SEQ ID NO: 3320695 - RNA, 14 nt, Human
ugcaccgggccaca

SEQ ID NO: 3320696 - RNA, 15 nt, Human
ugcaccgggccacag

SEQ ID NO: 3320697 - RNA, 23 nt, Human
ugcaccggcuggccuggccccuc

SEQ ID NO: 3320698 - RNA, 19 nt, Human
ugaguccccuguuuguuuc

SEQ ID NO: 3320699 - RNA, 14 nt, Human
ugcacuuuguucug

SEQ ID NO: 3320700 - RNA, 12 nt, Human
ugcacuuuguuc

SEQ ID NO: 3320701 - RNA, 23 nt, Human
ugcagcaauaaagcagcguuucu

SEQ ID NO: 3320702 - RNA, 20 nt, Human
ugcagcaauaaagcagcguu

SEQ ID NO: 3320703 - RNA, 19 nt, Human
ugccacccuggggagaaag

SEQ ID NO: 3320704 - RNA, 22 nt, Human
ugccacuacggaauaguuggcu

SEQ ID NO: 3320705 - RNA, 18 nt, Human
ugccagguuuuuggucug

SEQ ID NO: 3320706 - RNA, 19 nt, Human
ugccagguuuuuggucuga

SEQ ID NO: 3320707 - RNA, 22 nt, Human
ugccagguuuuuggucugaccc

SEQ ID NO: 3320708 - RNA, 14 nt, Human
ugcaucaagaugug

SEQ ID NO: 3320709 - RNA, 19 nt, Human
ugccccucaacucuccucc

SEQ ID NO: 3320710 - RNA, 17 nt, Human
ugccccuggcagccccu

SEQ ID NO: 3320711 - RNA, 23 nt, Human
ugccccucaacucuccuccagag

SEQ ID NO: 3320712 - RNA, 11 nt, Human
ugcccaggcug

SEQ ID NO: 3320713 - RNA, 16 nt, Human
ugcccacucccugcaa

SEQ ID NO: 3320714 - RNA, 15 nt, Human
ugcccacucccugca

SEQ ID NO: 3320715 - RNA, 14 nt, Human
ugcccacucccugc

SEQ ID NO: 3320716 - RNA, 13 nt, Human
ugcccaccuggcc

SEQ ID NO: 3320717 - RNA, 13 nt, Human
ugcccacucccug

SEQ ID NO: 3320718 - RNA, 21 nt, Human
ugccauccagguucagcuugu

SEQ ID NO: 3320719 - RNA, 20 nt, Human
ugccauccagguucagcuug

SEQ ID NO: 3320720 - RNA, 14 nt, Human
ugggauccuccagg

SEQ ID NO: 3320721 - RNA, 15 nt, Human
ugggauccuccaggu

SEQ ID NO: 3320722 - RNA, 15 nt, Human
ugggagugagcuggu

SEQ ID NO: 3320723 - RNA, 22 nt, Human
ugggagcugccuguucagcucc

SEQ ID NO: 3320724 - RNA, 17 nt, Human
ugggagcugccuguuca

SEQ ID NO: 3320725 - RNA, 21 nt, Human
ugggagcugccuguucagcuc

SEQ ID NO: 3320726 - RNA, 15 nt, Human
ugggcagaggaaagc

SEQ ID NO: 3320727 - RNA, 13 nt, Human
ugggauccuggag

SEQ ID NO: 3320728 - RNA, 18 nt, Human
ugggauccuccaggugca

SEQ ID NO: 3320729 - RNA, 16 nt, Human
ugggauuacaggugug

SEQ ID NO: 3320730 - RNA, 12 nt, Human
ugggacacccug

SEQ ID NO: 3320731 - RNA, 12 nt, Human
ugggagcugccu

SEQ ID NO: 3320732 - RNA, 13 nt, Human
ugggagcugccug

SEQ ID NO: 3320733 - RNA, 14 nt, Human
ugggagcugccugu

SEQ ID NO: 3320734 - RNA, 13 nt, Human
ugggagcaaaaga

SEQ ID NO: 3320735 - RNA, 22 nt, Human
uggcuuccuaaaauucagugga

SEQ ID NO: 3320736 - RNA, 14 nt, Human
uggcuuuugugcau

SEQ ID NO: 3320737 - RNA, 21 nt, Human
uggcugcuucaaggauccuga

SEQ ID NO: 3320738 - RNA, 16 nt, Human
uggcugcuucaaggau

SEQ ID NO: 3320739 - RNA, 21 nt, Human
uggcugggggccucagugcca

SEQ ID NO: 3320740 - RNA, 20 nt, Human
uggcugggggccucagugcc

SEQ ID NO: 3320741 - RNA, 15 nt, Human
ugggggugcauuuga

SEQ ID NO: 3320742 - RNA, 12 nt, Human
ugggggugcauu

SEQ ID NO: 3320743 - RNA, 18 nt, Human
ugggggcugggcagagga

SEQ ID NO: 3320744 - RNA, 17 nt, Human
ugggggcugggcagagg

SEQ ID NO: 3320745 - RNA, 20 nt, Human
ugggggaucacagccucuga

SEQ ID NO: 3320746 - RNA, 21 nt, Human
ugggggaucacagccucugaa

SEQ ID NO: 3320747 - RNA, 16 nt, Human
ugggcuaguugggcuu

SEQ ID NO: 3320748 - RNA, 17 nt, Human
ugggcuggugucaccug

SEQ ID NO: 3320749 - RNA, 23 nt, Human
ugggcuggguucuacccaggugc

SEQ ID NO: 3320750 - RNA, 22 nt, Human
ugggcuaagugauccucccacc

SEQ ID NO: 3320751 - RNA, 16 nt, Human
ugggcagaggaaagca

SEQ ID NO: 3320752 - RNA, 21 nt, Human
ugggcuugucuguagauuuua

SEQ ID NO: 3320753 - RNA, 15 nt, Human
ugggcuucaguggca

SEQ ID NO: 3320754 - RNA, 23 nt, Human
ugguauuggcuagagguucaaag

SEQ ID NO: 3320755 - RNA, 18 nt, Human
uggguuucuaaagcugcc

SEQ ID NO: 3320756 - RNA, 17 nt, Human
uggguuucuaaagcugc

SEQ ID NO: 3320757 - RNA, 21 nt, Human
uggguuucuaaagcugccagc

SEQ ID NO: 3320758 - RNA, 14 nt, Human
uggguguggcgcag

SEQ ID NO: 3320759 - RNA, 22 nt, Human
uggguucuacccaggugcuagg

SEQ ID NO: 3320760 - RNA, 16 nt, Human
uggguucuacccaggu

SEQ ID NO: 3320761 - RNA, 15 nt, Human
uggguucuacccagg

SEQ ID NO: 3320762 - RNA, 19 nt, Human
ugggguuuaucagaauucu

SEQ ID NO: 3320763 - RNA, 20 nt, Human
uggacuaacuugucuuugga

SEQ ID NO: 3320764 - RNA, 19 nt, Human
uggacaugcacagcuaaca

SEQ ID NO: 3320765 - RNA, 13 nt, Human
uggacaugcacag

SEQ ID NO: 3320766 - RNA, 14 nt, Human
uggaauaacaugua

SEQ ID NO: 3320767 - RNA, 15 nt, Human
uggaauaacauguaa

SEQ ID NO: 3320768 - RNA, 19 nt, Human
uggaauaacauguaauuaa

SEQ ID NO: 3320769 - RNA, 17 nt, Human
uggaauaaggagaauga

SEQ ID NO: 3320770 - RNA, 16 nt, Human
uggaauauauaaccag

SEQ ID NO: 3320771 - RNA, 15 nt, Human
uggaauauauaacca

SEQ ID NO: 3320772 - RNA, 20 nt, Human
uggaaagaguaggaagacuu

SEQ ID NO: 3320773 - RNA, 21 nt, Human
uggaaagacuuuuccaacccu

SEQ ID NO: 3320774 - RNA, 20 nt, Human
uggaaaaauagccugccucu

SEQ ID NO: 3320775 - RNA, 17 nt, Human
uggaaaaauagccugcc

SEQ ID NO: 3320776 - RNA, 18 nt, Human
uggaggaaggaaacccag

SEQ ID NO: 3320777 - RNA, 12 nt, Human
uggaggaaggaa

SEQ ID NO: 3320778 - RNA, 17 nt, Human
uggauuuaacagaaaug

SEQ ID NO: 3320779 - RNA, 24 nt, Human
uggauuuaacagaaauguacagca

SEQ ID NO: 3320780 - RNA, 20 nt, Human
uggauuuaacagaaauguac

SEQ ID NO: 3320781 - RNA, 21 nt, Human
uggcacccggccccugcuggu

SEQ ID NO: 3320782 - RNA, 13 nt, Human
uggcagcugcuuu

SEQ ID NO: 3320783 - RNA, 23 nt, Human
uggcagcugcgguccacccagga

SEQ ID NO: 3320784 - RNA, 20 nt, Human
uggccagaugcaccagcccu

SEQ ID NO: 3320785 - RNA, 21 nt, Human
uggccagaugcaccagcccuu

SEQ ID NO: 3320786 - RNA, 12 nt, Human
uccugaggcugg

SEQ ID NO: 3320787 - RNA, 19 nt, Human
uccugaggcugggcucccu

SEQ ID NO: 3320788 - RNA, 17 nt, Human
uccugaggcugggcucc

SEQ ID NO: 3320789 - RNA, 16 nt, Human
uccugaggcugggcuc

SEQ ID NO: 3320790 - RNA, 15 nt, Human
uccugaggcugggcu

SEQ ID NO: 3320791 - RNA, 14 nt, Human
uccugagccagauu

SEQ ID NO: 3320792 - RNA, 19 nt, Human
uccugagccagauuucacu

SEQ ID NO: 3320793 - RNA, 18 nt, Human
uccugagccagauuucac

SEQ ID NO: 3320794 - RNA, 19 nt, Human
uccucuguacagagcccac

SEQ ID NO: 3320795 - RNA, 23 nt, Human
uccucuguacagagcccacgccc

SEQ ID NO: 3320796 - RNA, 17 nt, Human
uccugagccagauuuca

SEQ ID NO: 3320797 - RNA, 17 nt, Human
uccucuaggaggucucu

SEQ ID NO: 3320798 - RNA, 21 nt, Human
uccucuaggaggucucuaaga

SEQ ID NO: 3320799 - RNA, 21 nt, Human
uccuccuuuucacaguucucu

SEQ ID NO: 3320800 - RNA, 15 nt, Human
uccucuggccugugu

SEQ ID NO: 3320801 - RNA, 13 nt, Human
uccucuguacaga

SEQ ID NO: 3320802 - RNA, 17 nt, Human
uccucugcugcuggcug

SEQ ID NO: 3320803 - RNA, 12 nt, Human
uccuccucagau

SEQ ID NO: 3320804 - RNA, 10 nt, Human
uccuccaggu

SEQ ID NO: 3320805 - RNA, 13 nt, Human
uccuccaggugca

SEQ ID NO: 3320806 - RNA, 12 nt, Human
uccuccaggugc

SEQ ID NO: 3320807 - RNA, 22 nt, Human
uccuccaggugcacaagcucca

SEQ ID NO: 3320808 - RNA, 20 nt, Human
uccuccaggugcacaagcuc

SEQ ID NO: 3320809 - RNA, 18 nt, Human
uccuccaggugcacaagc

SEQ ID NO: 3320810 - RNA, 14 nt, Human
uccuccaggugcac

SEQ ID NO: 3320811 - RNA, 21 nt, Human
uccuaguuccaccaucaagcc

SEQ ID NO: 3320812 - RNA, 12 nt, Human
uccuaguuccac

SEQ ID NO: 3320813 - RNA, 17 nt, Human
uccuaguuccaccauca

SEQ ID NO: 3320814 - RNA, 14 nt, Human
uccuaguuccacca

SEQ ID NO: 3320815 - RNA, 16 nt, Human
uccuaagcuauucagu

SEQ ID NO: 3320816 - RNA, 22 nt, Human
ucccaugagccucagcauccug

SEQ ID NO: 3320817 - RNA, 18 nt, Human
ucccucccuuccucuuuc

SEQ ID NO: 3320818 - RNA, 20 nt, Human
ucccugcacuugcagacucu

SEQ ID NO: 3320819 - RNA, 17 nt, Human
ucccucuggggcuguuc

SEQ ID NO: 3320820 - RNA, 13 nt, Human
ucccucuggggcu

SEQ ID NO: 3320821 - RNA, 16 nt, Human
ucccugccaauggacu

SEQ ID NO: 3320822 - RNA, 14 nt, Human
ucccugccaaugga

SEQ ID NO: 3320823 - RNA, 16 nt, Human
ucccuucccaccucuc

SEQ ID NO: 3320824 - RNA, 14 nt, Human
ucccuucccaccuc

SEQ ID NO: 3320825 - RNA, 21 nt, Human
ucccuucccacuggaggcaug

SEQ ID NO: 3320826 - RNA, 17 nt, Human
ucccuucccaccucucu

SEQ ID NO: 3320827 - RNA, 21 nt, Human
uccgaaagggacuuggaagcu

SEQ ID NO: 3320828 - RNA, 17 nt, Human
uccgaccagacaccuug

SEQ ID NO: 3320829 - RNA, 22 nt, Human
uccgaaagggacuuggaagcuc

SEQ ID NO: 3320830 - RNA, 20 nt, Human
uccgcuuucuacccagcgag

SEQ ID NO: 3320831 - RNA, 21 nt, Human
uccgcuuucuacccagcgagc

SEQ ID NO: 3320832 - RNA, 14 nt, Human
ucuaauauguaaca

SEQ ID NO: 3320833 - RNA, 12 nt, Human
ucuagggaaaaa

SEQ ID NO: 3320834 - RNA, 21 nt, Human
ucuacucgaguuacagacaaa

SEQ ID NO: 3320835 - RNA, 20 nt, Human
ucuacucgaguuacagacaa

SEQ ID NO: 3320836 - RNA, 18 nt, Human
ucuaggaggucucuaaga

SEQ ID NO: 3320837 - RNA, 18 nt, Human
ucuacucuagggaaaaac

SEQ ID NO: 3320838 - RNA, 14 nt, Human
ucucacuguugccc

SEQ ID NO: 3320839 - RNA, 15 nt, Human
ucucacuguugccca

SEQ ID NO: 3320840 - RNA, 23 nt, Human
ucucacucugucgcccagucugg

SEQ ID NO: 3320841 - RNA, 21 nt, Human
ucucacacaugagcaucaggc

SEQ ID NO: 3320842 - RNA, 22 nt, Human
ucucacucugucgcccagucug

SEQ ID NO: 3320843 - RNA, 20 nt, Human
ucucacugccaugccagcuu

SEQ ID NO: 3320844 - RNA, 16 nt, Human
ucucacacaugagcau

SEQ ID NO: 3320845 - RNA, 13 nt, Human
ucucaaauuucua

SEQ ID NO: 3320846 - RNA, 16 nt, Human
ucucaaauuucuaaau

SEQ ID NO: 3320847 - RNA, 14 nt, Human
ucucaaauuucuaa

SEQ ID NO: 3320848 - RNA, 23 nt, Human
ucgucacugcuuaacuucacaua

SEQ ID NO: 3320849 - RNA, 14 nt, Human
ucgcccagucugga

SEQ ID NO: 3320850 - RNA, 19 nt, Human
ucgcccagucuggaaugca

SEQ ID NO: 3320851 - RNA, 23 nt, Human
ucgcccagucuggaaugcagugg

SEQ ID NO: 3320852 - RNA, 18 nt, Human
ucggaaaacaugcuacac

SEQ ID NO: 3320853 - RNA, 15 nt, Human
ucggaaaacaugcua

SEQ ID NO: 3320854 - RNA, 17 nt, Human
ucgcaggauucuuccuc

SEQ ID NO: 3320855 - RNA, 21 nt, Human
ucgcaggauucuuccucccuc

SEQ ID NO: 3320856 - RNA, 23 nt, Human
ucgcaggauucuuccucccuccc

SEQ ID NO: 3320857 - RNA, 22 nt, Human
uccuuuucgcaggauucuuccu

SEQ ID NO: 3320858 - RNA, 18 nt, Human
uccuuuucgcaggauucu

SEQ ID NO: 3320859 - RNA, 21 nt, Human
uccuuaccagcagagcaccuu

SEQ ID NO: 3320860 - RNA, 20 nt, Human
uccuuaccagcagagcaccu

SEQ ID NO: 3320861 - RNA, 23 nt, Human
uccuugaaaacacuguucucugc

SEQ ID NO: 3320862 - RNA, 22 nt, Human
uccuugaaaacacuguucucug

SEQ ID NO: 3320863 - RNA, 21 nt, Human
uccuuggugucgggcaugaca

SEQ ID NO: 3320864 - RNA, 18 nt, Human
uccuuggugucgggcaug

SEQ ID NO: 3320865 - RNA, 17 nt, Human
uccuuugugaggaagcc

SEQ ID NO: 3320866 - RNA, 22 nt, Human
uccuuugugaggaagccgcugg

SEQ ID NO: 3320867 - RNA, 18 nt, Human
uccuuugugaggaagccg

SEQ ID NO: 3320868 - RNA, 17 nt, Human
ucagcacgauuucuguu

SEQ ID NO: 3320869 - RNA, 16 nt, Human
ucagcacgauuucugu

SEQ ID NO: 3320870 - RNA, 15 nt, Human
ucagcacgauuucug

SEQ ID NO: 3320871 - RNA, 15 nt, Human
ucagcauccuggcac

SEQ ID NO: 3320872 - RNA, 16 nt, Human
ucagcauccuggcacc

SEQ ID NO: 3320873 - RNA, 17 nt, Human
ucagcauccuggcaccc

SEQ ID NO: 3320874 - RNA, 18 nt, Human
ucagcauccuggcacccg

SEQ ID NO: 3320875 - RNA, 12 nt, Human
ucagccucccaa

SEQ ID NO: 3320876 - RNA, 22 nt, Human
ucagccucccaaagugcuggga

SEQ ID NO: 3320877 - RNA, 12 nt, Human
ucagccucccga

SEQ ID NO: 3320878 - RNA, 16 nt, Human
ucagccugcuccagcu

SEQ ID NO: 3320879 - RNA, 15 nt, Human
ucagcuccagcucac

SEQ ID NO: 3320880 - RNA, 18 nt, Human
ucagcuccagcucaccag

SEQ ID NO: 3320881 - RNA, 21 nt, Human
ucagcuccagcucaccagccc

SEQ ID NO: 3320882 - RNA, 15 nt, Human
ucagcugcuacuacu

SEQ ID NO: 3320883 - RNA, 15 nt, Human
ucaguccauagcaga

SEQ ID NO: 3320884 - RNA, 15 nt, Human
ucaggugcugccauc

SEQ ID NO: 3320885 - RNA, 20 nt, Human
ucagguggggucacucuggc

SEQ ID NO: 3320886 - RNA, 17 nt, Human
ucagguggggucacucu

SEQ ID NO: 3320887 - RNA, 14 nt, Human
ucagguggggcagc

SEQ ID NO: 3320888 - RNA, 18 nt, Human
ucaggugcugccauccag

SEQ ID NO: 3320889 - RNA, 20 nt, Human
ucaggugcugccauccaggu

SEQ ID NO: 3320890 - RNA, 15 nt, Human
ucagguggggcagcu

SEQ ID NO: 3320891 - RNA, 16 nt, Human
ucagguggggcagcuu

SEQ ID NO: 3320892 - RNA, 21 nt, Human
ucagguggggcagcuugaggg

SEQ ID NO: 3320893 - RNA, 18 nt, Human
ucagugugacugaucucu

SEQ ID NO: 3320894 - RNA, 17 nt, Human
ucagucugauucccaag

SEQ ID NO: 3320895 - RNA, 15 nt, Human
ucauacucaccucac

SEQ ID NO: 3320896 - RNA, 18 nt, Human
ucccaacucaccccagcc

SEQ ID NO: 3320897 - RNA, 17 nt, Human
ucccaacucaccccagc

SEQ ID NO: 3320898 - RNA, 21 nt, Human
ucccaacucaccccagcccca

SEQ ID NO: 3320899 - RNA, 19 nt, Human
ucccaacucaccccagccc

SEQ ID NO: 3320900 - RNA, 20 nt, Human
uccauagagagcaagacgcu

SEQ ID NO: 3320901 - RNA, 17 nt, Human
uccauagagagcaagac

SEQ ID NO: 3320902 - RNA, 15 nt, Human
uccauagagagcaag

SEQ ID NO: 3320903 - RNA, 18 nt, Human
ucccaccucagccucccg

SEQ ID NO: 3320904 - RNA, 16 nt, Human
ucccaccucagccucc

SEQ ID NO: 3320905 - RNA, 14 nt, Human
ucccaccucucuca

SEQ ID NO: 3320906 - RNA, 18 nt, Human
ucccaccucucucacucc

SEQ ID NO: 3320907 - RNA, 17 nt, Human
ucccaccucucucacuc

SEQ ID NO: 3320908 - RNA, 19 nt, Human
ucccaccuuggcugcaggg

SEQ ID NO: 3320909 - RNA, 21 nt, Human
ucccaccuuggcugcagggag

SEQ ID NO: 3320910 - RNA, 18 nt, Human
ucccaccuuggcugcagg

SEQ ID NO: 3320911 - RNA, 20 nt, Human
ucccaccucucucacuccuu

SEQ ID NO: 3320912 - RNA, 14 nt, Human
ucccacucagucca

SEQ ID NO: 3320913 - RNA, 15 nt, Human
ucccaugagccucag

SEQ ID NO: 3320914 - RNA, 16 nt, Human
ucccaugagccucagc

SEQ ID NO: 3320915 - RNA, 18 nt, Human
ucccaggcauuccccagg

SEQ ID NO: 3320916 - RNA, 17 nt, Human
ucccaggcauuccccag

SEQ ID NO: 3320917 - RNA, 14 nt, Human
uccaagcaggacau

SEQ ID NO: 3320918 - RNA, 20 nt, Human
uccaagaccuucuccuucac

SEQ ID NO: 3320919 - RNA, 19 nt, Human
uccaagaccuucuccuuca

SEQ ID NO: 3320920 - RNA, 12 nt, Human
uccaagaagccc

SEQ ID NO: 3320921 - RNA, 14 nt, Human
uccaagaagcccag

SEQ ID NO: 3320922 - RNA, 16 nt, Human
uccaagaagcccagga

SEQ ID NO: 3320923 - RNA, 15 nt, Human
uccaagaagcccagg

SEQ ID NO: 3320924 - RNA, 21 nt, Human
uccacaagagcccaggccucc

SEQ ID NO: 3320925 - RNA, 19 nt, Human
uccacaagagcccaggccu

SEQ ID NO: 3320926 - RNA, 20 nt, Human
uccacaagagcccaggccuc

SEQ ID NO: 3320927 - RNA, 14 nt, Human
uccacuuucuagcc

SEQ ID NO: 3320928 - RNA, 21 nt, Human
uccacccugcucuccgaccag

SEQ ID NO: 3320929 - RNA, 13 nt, Human
uccacccugcucu

SEQ ID NO: 3320930 - RNA, 14 nt, Human
uccacccugcucuc

SEQ ID NO: 3320931 - RNA, 21 nt, Human
uccacugugccaugugccagg

SEQ ID NO: 3320932 - RNA, 22 nt, Human
uccacugugccaugugccaggu

SEQ ID NO: 3320933 - RNA, 16 nt, Human
ucugucgcccagucug

SEQ ID NO: 3320934 - RNA, 13 nt, Human
ucugucuaggaau

SEQ ID NO: 3320935 - RNA, 20 nt, Human
ucuguccuacucugugucag

SEQ ID NO: 3320936 - RNA, 15 nt, Human
ucuguacagagccca

SEQ ID NO: 3320937 - RNA, 14 nt, Human
ucuguacagagccc

SEQ ID NO: 3320938 - RNA, 12 nt, Human
ucuguccuggga

SEQ ID NO: 3320939 - RNA, 17 nt, Human
ucugucgcccagucugg

SEQ ID NO: 3320940 - RNA, 13 nt, Human
ucugcugcuggcu

SEQ ID NO: 3320941 - RNA, 11 nt, Human
ucugcugcugg

SEQ ID NO: 3320942 - RNA, 21 nt, Human
ucugcuccucuccccagcaag

SEQ ID NO: 3320943 - RNA, 16 nt, Human
ucugccugcccaggcc

SEQ ID NO: 3320944 - RNA, 17 nt, Human
ucugccugcccaggccc

SEQ ID NO: 3320945 - RNA, 18 nt, Human
ucugccugcccaggcccc

SEQ ID NO: 3320946 - RNA, 20 nt, Human
ucugccugcccaggccccug

SEQ ID NO: 3320947 - RNA, 17 nt, Human
ucugcugcuggcugguu

SEQ ID NO: 3320948 - RNA, 15 nt, Human
ucugcugcuggcugg

SEQ ID NO: 3320949 - RNA, 14 nt, Human
ucugcugcuggcug

SEQ ID NO: 3320950 - RNA, 16 nt, Human
ucuggaaugcaguggu

SEQ ID NO: 3320951 - RNA, 15 nt, Human
ucugccucugacaca

SEQ ID NO: 3320952 - RNA, 18 nt, Human
ucugccucugacacacag

SEQ ID NO: 3320953 - RNA, 21 nt, Human
ucugccucccaucacccgcua

SEQ ID NO: 3320954 - RNA, 20 nt, Human
ucugccucccaucacccgcu

SEQ ID NO: 3320955 - RNA, 17 nt, Human
ucugccucccaucaccc

SEQ ID NO: 3320956 - RNA, 16 nt, Human
ucugccucccaucacc

SEQ ID NO: 3320957 - RNA, 23 nt, Human
ucugccucugacacacagcucug

SEQ ID NO: 3320958 - RNA, 21 nt, Human
ucugccucugacacacagcuc

SEQ ID NO: 3320959 - RNA, 22 nt, Human
ucugccucugacacacagcucu

SEQ ID NO: 3320960 - RNA, 19 nt, Human
ucugccugaagucacacag

SEQ ID NO: 3320961 - RNA, 20 nt, Human
ucugccugaagucacacagu

SEQ ID NO: 3320962 - RNA, 18 nt, Human
ucugccauauucuguugg

SEQ ID NO: 3320963 - RNA, 12 nt, Human
ucugcccacucc

SEQ ID NO: 3320964 - RNA, 22 nt, Human
ucugccauauucuguuggccag

SEQ ID NO: 3320965 - RNA, 23 nt, Human
ucugccauauucuguuggccagu

SEQ ID NO: 3320966 - RNA, 15 nt, Human
ucugccucccaucac

SEQ ID NO: 3320967 - RNA, 13 nt, Human
ucugccucccauc

SEQ ID NO: 3320968 - RNA, 12 nt, Human
ucugccucccau

SEQ ID NO: 3320969 - RNA, 14 nt, Human
ucugcccacucccu

SEQ ID NO: 3320970 - RNA, 13 nt, Human
ucugcccacuccc

SEQ ID NO: 3320971 - RNA, 22 nt, Human
ucugaggaauccagacccggcu

SEQ ID NO: 3320972 - RNA, 18 nt, Human
ucugaggaauccagaccc

SEQ ID NO: 3320973 - RNA, 21 nt, Human
ucugaggaauccagacccggc

SEQ ID NO: 3320974 - RNA, 21 nt, Human
ucugcaagaauugaagcagga

SEQ ID NO: 3320975 - RNA, 22 nt, Human
ucugacccaugcugcccuguga

SEQ ID NO: 3320976 - RNA, 20 nt, Human
ucugacccaugcugcccugu

SEQ ID NO: 3320977 - RNA, 19 nt, Human
ucugacccaugcugcccug

SEQ ID NO: 3320978 - RNA, 18 nt, Human
ucugagaggacuuuucuu

SEQ ID NO: 3320979 - RNA, 21 nt, Human
ucuugaaauauaggaacuuaa

SEQ ID NO: 3320980 - RNA, 20 nt, Human
ucuugaaauauaggaacuua

SEQ ID NO: 3320981 - RNA, 22 nt, Human
ucuugaagacuuuucuuucagc

SEQ ID NO: 3320982 - RNA, 13 nt, Human
ucuugaagacuuu

SEQ ID NO: 3320983 - RNA, 15 nt, Human
ucuugcaugaggcua

SEQ ID NO: 3320984 - RNA, 15 nt, Human
ucuugcucugcugac

SEQ ID NO: 3320985 - RNA, 23 nt, Human
ucuugcucugcugacagacacag

SEQ ID NO: 3320986 - RNA, 14 nt, Human
ucuugcucugcuga

SEQ ID NO: 3320987 - RNA, 21 nt, Human
ucuucagagacuccugcaggc

SEQ ID NO: 3320988 - RNA, 14 nt, Human
ucuucagaucucua

SEQ ID NO: 3320989 - RNA, 22 nt, Human
ucuuauccaacaucaacaucuu

SEQ ID NO: 3320990 - RNA, 14 nt, Human
ucuuagauguauau

SEQ ID NO: 3320991 - RNA, 15 nt, Human
ucuuagauguauaua

SEQ ID NO: 3320992 - RNA, 17 nt, Human
ucugugucagguggggc

SEQ ID NO: 3320993 - RNA, 20 nt, Human
ucugugucagguggggcagc

SEQ ID NO: 3320994 - RNA, 23 nt, Human
ucuuagguuggcaaaaaggcagg

SEQ ID NO: 3320995 - RNA, 20 nt, Human
ucuuagguuggcaaaaaggc

SEQ ID NO: 3320996 - RNA, 12 nt, Human
ucuuucccuccc

SEQ ID NO: 3320997 - RNA, 17 nt, Human
ucuuuccaaaguacacu

SEQ ID NO: 3320998 - RNA, 13 nt, Human
ucuuucccucccu

SEQ ID NO: 3320999 - RNA, 13 nt, Human
ucuuguguguuua

SEQ ID NO: 3321000 - RNA, 23 nt, Human
ucuuuccaaaguacacuguuuca

SEQ ID NO: 3321001 - RNA, 13 nt, Human
ucuuugcagacag

SEQ ID NO: 3321002 - RNA, 23 nt, Human
ucuuugagugaagcugggagaac

SEQ ID NO: 3321003 - RNA, 14 nt, Human
ucuuugcagacagg

SEQ ID NO: 3321004 - RNA, 17 nt, Human
ucuuugcagacaggcaa

SEQ ID NO: 3321005 - RNA, 13 nt, Human
ucuuuggacccug

SEQ ID NO: 3321006 - RNA, 15 nt, Human
ucuuuggacccugag

SEQ ID NO: 3321007 - RNA, 14 nt, Human
ucuuuggacccuga

SEQ ID NO: 3321008 - RNA, 14 nt, Human
ugaaaauucagugg

SEQ ID NO: 3321009 - RNA, 20 nt, Human
ugaaaagaaaaaugagccug

SEQ ID NO: 3321010 - RNA, 15 nt, Human
ugaaaagaaaaauga

SEQ ID NO: 3321011 - RNA, 19 nt, Human
ugaaaagaaaaaugagccu

SEQ ID NO: 3321012 - RNA, 21 nt, Human
ugaaaacacauuuuucuuagg

SEQ ID NO: 3321013 - RNA, 21 nt, Human
ugaaaacacuguucucugccc

SEQ ID NO: 3321014 - RNA, 20 nt, Human
ugaaaacacuguucucugcc

SEQ ID NO: 3321015 - RNA, 17 nt, Human
ugaaaacacuguucucu

SEQ ID NO: 3321016 - RNA, 20 nt, Human
ugaaaacacauuuuucuuag

SEQ ID NO: 3321017 - RNA, 23 nt, Human
ugaaaacacuguucucugcccuc

SEQ ID NO: 3321018 - RNA, 22 nt, Human
ugaaaacacuguucucugcccu

SEQ ID NO: 3321019 - RNA, 20 nt, Human
ugaccagcaccaucucuccu

SEQ ID NO: 3321020 - RNA, 17 nt, Human
ugacagacacaggcccg

SEQ ID NO: 3321021 - RNA, 18 nt, Human
ugacagacacaggcccgg

SEQ ID NO: 3321022 - RNA, 23 nt, Human
ugacaucaacugcaucaagaugu

SEQ ID NO: 3321023 - RNA, 22 nt, Human
ugacagagcaagugagacccug

SEQ ID NO: 3321024 - RNA, 15 nt, Human
ugacacacagcucug

SEQ ID NO: 3321025 - RNA, 14 nt, Human
ugacacacagcucu

SEQ ID NO: 3321026 - RNA, 13 nt, Human
ugacagacacagg

SEQ ID NO: 3321027 - RNA, 14 nt, Human
ugacagacacaggc

SEQ ID NO: 3321028 - RNA, 16 nt, Human
ugacagacacaggccc

SEQ ID NO: 3321029 - RNA, 18 nt, Human
ugacaaggauugcuacug

SEQ ID NO: 3321030 - RNA, 23 nt, Human
ugacaaggauugcuacuguccua

SEQ ID NO: 3321031 - RNA, 21 nt, Human
ugaauuguaaggaaugauuaa

SEQ ID NO: 3321032 - RNA, 13 nt, Human
ugaauuguaagga

SEQ ID NO: 3321033 - RNA, 23 nt, Human
ugacaacacucauugaccugagg

SEQ ID NO: 3321034 - RNA, 13 nt, Human
ugacaacacucau

SEQ ID NO: 3321035 - RNA, 23 nt, Human
ugaaugaugauccuaggcauuug

SEQ ID NO: 3321036 - RNA, 21 nt, Human
ugaaggcuggguucugauccu

SEQ ID NO: 3321037 - RNA, 20 nt, Human
ugaaggcuggguucugaucc

SEQ ID NO: 3321038 - RNA, 18 nt, Human
ugaaggccccgcccaggc

SEQ ID NO: 3321039 - RNA, 20 nt, Human
ugaaggccccgcccaggcuu

SEQ ID NO: 3321040 - RNA, 19 nt, Human
ugaaggccccgcccaggcu

SEQ ID NO: 3321041 - RNA, 16 nt, Human
ugaaggcuggguucug

SEQ ID NO: 3321042 - RNA, 19 nt, Human
ugaagacucauucuucugu

SEQ ID NO: 3321043 - RNA, 20 nt, Human
ugaagacucauucuucugua

SEQ ID NO: 3321044 - RNA, 23 nt, Human
ugaacuggguacuuguggacaca

SEQ ID NO: 3321045 - RNA, 21 nt, Human
ugacucuuucuauuguuucuu

SEQ ID NO: 3321046 - RNA, 16 nt, Human
ugacuuuccucuuugg

SEQ ID NO: 3321047 - RNA, 13 nt, Human
ugaccauucucca

SEQ ID NO: 3321048 - RNA, 14 nt, Human
ugagaccaaccugg

SEQ ID NO: 3321049 - RNA, 18 nt, Human
ugagaggggaacagacug

SEQ ID NO: 3321050 - RNA, 14 nt, Human
ugagaggggaacag

SEQ ID NO: 3321051 - RNA, 15 nt, Human
ugagaaauaaaguuu

SEQ ID NO: 3321052 - RNA, 22 nt, Human
ugacuuuucuguccgagcuuug

SEQ ID NO: 3321053 - RNA, 21 nt, Human
ugaggugggaggaucucuuga

SEQ ID NO: 3321054 - RNA, 17 nt, Human
ugaggucagagccugca

SEQ ID NO: 3321055 - RNA, 21 nt, Human
ugaggcugggcucccuuccca

SEQ ID NO: 3321056 - RNA, 18 nt, Human
ugaggucagagccugcag

SEQ ID NO: 3321057 - RNA, 19 nt, Human
ugaggucagagccugcagu

SEQ ID NO: 3321058 - RNA, 15 nt, Human
ugaggcucugcccuu

SEQ ID NO: 3321059 - RNA, 16 nt, Human
ugaggcucugcccuug

SEQ ID NO: 3321060 - RNA, 16 nt, Human
ugaggcugggcucccu

SEQ ID NO: 3321061 - RNA, 15 nt, Human
ugaggcugggcuccc

SEQ ID NO: 3321062 - RNA, 18 nt, Human
ugaggcucugcccuuggu

SEQ ID NO: 3321063 - RNA, 19 nt, Human
ugagcucaggaguuugaga

SEQ ID NO: 3321064 - RNA, 11 nt, Human
ugagcucagga

SEQ ID NO: 3321065 - RNA, 23 nt, Human
ugagccgagaucacgccacugca

SEQ ID NO: 3321066 - RNA, 20 nt, Human
ugagcagggcucagcgggga

SEQ ID NO: 3321067 - RNA, 22 nt, Human
ugagcagggcucagcggggaca

SEQ ID NO: 3321068 - RNA, 23 nt, Human
ugagcagggcucagcggggacag

SEQ ID NO: 3321069 - RNA, 22 nt, Human
ugagccgagaucacgccacugc

SEQ ID NO: 3321070 - RNA, 22 nt, Human
ugaggaugaaaaaauaacacug

SEQ ID NO: 3321071 - RNA, 14 nt, Human
gcuggguuggaggg

SEQ ID NO: 3321072 - RNA, 21 nt, Human
gcuggguuggaggguguccca

SEQ ID NO: 3321073 - RNA, 15 nt, Human
gcuggguucugaucc

SEQ ID NO: 3321074 - RNA, 15 nt, Human
gcuggguucuaccca

SEQ ID NO: 3321075 - RNA, 20 nt, Human
gcuguaucccaugagccuca

SEQ ID NO: 3321076 - RNA, 23 nt, Human
gcuguaucccaugagccucagca

SEQ ID NO: 3321077 - RNA, 19 nt, Human
gcuguaucccaugagccuc

SEQ ID NO: 3321078 - RNA, 20 nt, Human
gcuucacggaagagccuugc

SEQ ID NO: 3321079 - RNA, 19 nt, Human
gcuucacggaagagccuug

SEQ ID NO: 3321080 - RNA, 22 nt, Human
gcuucaaggauccugagccaga

SEQ ID NO: 3321081 - RNA, 17 nt, Human
gcugugcugcccugccc

SEQ ID NO: 3321082 - RNA, 18 nt, Human
gcugugcucuggacaggc

SEQ ID NO: 3321083 - RNA, 13 nt, Human
gcugugcugcccu

SEQ ID NO: 3321084 - RNA, 21 nt, Human
gcugugcucuggacaggcaug

SEQ ID NO: 3321085 - RNA, 12 nt, Human
gcugugcugccc

SEQ ID NO: 3321086 - RNA, 21 nt, Human
gcuguuggcugggggccucag

SEQ ID NO: 3321087 - RNA, 22 nt, Human
gcuguuggcugggggccucagu

SEQ ID NO: 3321088 - RNA, 22 nt, Human
gcugugcugcccugcccaccug

SEQ ID NO: 3321089 - RNA, 19 nt, Human
gcugugcugcccugcccac

SEQ ID NO: 3321090 - RNA, 16 nt, Human
gcuuguacauaaugcg

SEQ ID NO: 3321091 - RNA, 14 nt, Human
gcuuguacauaaug

SEQ ID NO: 3321092 - RNA, 22 nt, Human
gcuggaccuugaacuggguacu

SEQ ID NO: 3321093 - RNA, 12 nt, Human
gcuggagugcag

SEQ ID NO: 3321094 - RNA, 19 nt, Human
gcugggauuacagguguga

SEQ ID NO: 3321095 - RNA, 18 nt, Human
gcugggauuacaggugug

SEQ ID NO: 3321096 - RNA, 13 nt, Human
gcugggcagagga

SEQ ID NO: 3321097 - RNA, 15 nt, Human
gcugggcagaggaaa

SEQ ID NO: 3321098 - RNA, 14 nt, Human
gcugggcagaggaa

SEQ ID NO: 3321099 - RNA, 14 nt, Human
gcuggagugcagug

SEQ ID NO: 3321100 - RNA, 15 nt, Human
gcuggagugcaguga

SEQ ID NO: 3321101 - RNA, 17 nt, Human
gcuggccuggccccuca

SEQ ID NO: 3321102 - RNA, 16 nt, Human
gcuggccuggccccuc

SEQ ID NO: 3321103 - RNA, 16 nt, Human
gcugggauuacaggug

SEQ ID NO: 3321104 - RNA, 19 nt, Human
gcuggccuggccccucagg

SEQ ID NO: 3321105 - RNA, 18 nt, Human
gcuggccuggccccucag

SEQ ID NO: 3321106 - RNA, 20 nt, Human
gcugggcucccuucccaccu

SEQ ID NO: 3321107 - RNA, 17 nt, Human
gcugggcucccuuccca

SEQ ID NO: 3321108 - RNA, 16 nt, Human
gcugggcucccuuccc

SEQ ID NO: 3321109 - RNA, 12 nt, Human
gcugggcucccu

SEQ ID NO: 3321110 - RNA, 17 nt, Human
gcugggcagaggaaagc

SEQ ID NO: 3321111 - RNA, 16 nt, Human
gcugggcagaggaaag

SEQ ID NO: 3321112 - RNA, 19 nt, Human
gcugggcagaggaaagcaa

SEQ ID NO: 3321113 - RNA, 15 nt, Human
gcuggguguggcgca

SEQ ID NO: 3321114 - RNA, 14 nt, Human
gcugcaccggcugg

SEQ ID NO: 3321115 - RNA, 17 nt, Human
gcugcaccggcuggccu

SEQ ID NO: 3321116 - RNA, 16 nt, Human
gcugcaccggcuggcc

SEQ ID NO: 3321117 - RNA, 22 nt, Human
gcugcaccggcuggccuggccc

SEQ ID NO: 3321118 - RNA, 19 nt, Human
gcugcaccggcuggccugg

SEQ ID NO: 3321119 - RNA, 18 nt, Human
gcugcaccggcuggccug

SEQ ID NO: 3321120 - RNA, 21 nt, Human
gcugccauccagguucagcuu

SEQ ID NO: 3321121 - RNA, 23 nt, Human
gcugccauccagguucagcuugu

SEQ ID NO: 3321122 - RNA, 21 nt, Human
gcugccagccgagauagccaa

SEQ ID NO: 3321123 - RNA, 19 nt, Human
gcugccagccgagauagcc

SEQ ID NO: 3321124 - RNA, 13 nt, Human
gcugccaccugcc

SEQ ID NO: 3321125 - RNA, 18 nt, Human
gcugccugggaucccuca

SEQ ID NO: 3321126 - RNA, 16 nt, Human
gcugccugggaucccu

SEQ ID NO: 3321127 - RNA, 19 nt, Human
gcugccugggaucccucau

SEQ ID NO: 3321128 - RNA, 17 nt, Human
gcugccauccagguuca

SEQ ID NO: 3321129 - RNA, 13 nt, Human
gcugccugggauc

SEQ ID NO: 3321130 - RNA, 14 nt, Human
gcugacagacacag

SEQ ID NO: 3321131 - RNA, 15 nt, Human
gcugacagacacagg

SEQ ID NO: 3321132 - RNA, 13 nt, Human
gcugacagacaca

SEQ ID NO: 3321133 - RNA, 16 nt, Human
gcugacagacacaggc

SEQ ID NO: 3321134 - RNA, 20 nt, Human
gcugaaggcucgagcaugcc

SEQ ID NO: 3321135 - RNA, 12 nt, Human
gcugaaggcucg

SEQ ID NO: 3321136 - RNA, 17 nt, Human
gcugaaugguuuucaaa

SEQ ID NO: 3321137 - RNA, 22 nt, Human
gcugaauacagaggcaacugca

SEQ ID NO: 3321138 - RNA, 12 nt, Human
gcucuuccaggc

SEQ ID NO: 3321139 - RNA, 16 nt, Human
gcucuuccaggcuggg

SEQ ID NO: 3321140 - RNA, 15 nt, Human
gcucuuccaggcugg

SEQ ID NO: 3321141 - RNA, 15 nt, Human
gcucuguccugggag

SEQ ID NO: 3321142 - RNA, 14 nt, Human
gcucuguccuggga

SEQ ID NO: 3321143 - RNA, 16 nt, Human
gcucuguccugggagu

SEQ ID NO: 3321144 - RNA, 15 nt, Human
gcucucaggccagcu

SEQ ID NO: 3321145 - RNA, 14 nt, Human
gcucucaggccagc

SEQ ID NO: 3321146 - RNA, 13 nt, Human
gcucucaggccag

SEQ ID NO: 3321147 - RNA, 22 nt, Human
gcucccaggcauuccccaggag

SEQ ID NO: 3321148 - RNA, 17 nt, Human
gcucccaggcauucccc

SEQ ID NO: 3321149 - RNA, 14 nt, Human
gcuccccagcccca

SEQ ID NO: 3321150 - RNA, 21 nt, Human
gcucccaggcauuccccagga

SEQ ID NO: 3321151 - RNA, 20 nt, Human
gcucccaggcauuccccagg

SEQ ID NO: 3321152 - RNA, 16 nt, Human
gcuaggaacacuccuu

SEQ ID NO: 3321153 - RNA, 18 nt, Human
gcuaggaacacuccuuca

SEQ ID NO: 3321154 - RNA, 21 nt, Human
gcuaggaacacuccuucacag

SEQ ID NO: 3321155 - RNA, 19 nt, Human
gcuaggaacacuccuucac

SEQ ID NO: 3321156 - RNA, 22 nt, Human
gcuaggaccccuccaugugggc

SEQ ID NO: 3321157 - RNA, 14 nt, Human
gcuaggccuggcca

SEQ ID NO: 3321158 - RNA, 15 nt, Human
gcuaggccuggccag

SEQ ID NO: 3321159 - RNA, 20 nt, Human
gccuguucagcuccagcuca

SEQ ID NO: 3321160 - RNA, 17 nt, Human
gccuguucagcuccagc

SEQ ID NO: 3321161 - RNA, 19 nt, Human
gccuguucagcuccagcuc

SEQ ID NO: 3321162 - RNA, 22 nt, Human
gcucagguggggucacucuggc

SEQ ID NO: 3321163 - RNA, 21 nt, Human
gcucagguggggucacucugg

SEQ ID NO: 3321164 - RNA, 16 nt, Human
gcucagggccuggcuc

SEQ ID NO: 3321165 - RNA, 13 nt, Human
gcucagggccugg

SEQ ID NO: 3321166 - RNA, 12 nt, Human
gcucagggccug

SEQ ID NO: 3321167 - RNA, 15 nt, Human
gcucagagagggugg

SEQ ID NO: 3321168 - RNA, 20 nt, Human
gcucagagagggugggagug

SEQ ID NO: 3321169 - RNA, 18 nt, Human
gcucagagagggugggag

SEQ ID NO: 3321170 - RNA, 19 nt, Human
gccauauucuguuggccag

SEQ ID NO: 3321171 - RNA, 20 nt, Human
gccauauucuguuggccagu

SEQ ID NO: 3321172 - RNA, 15 nt, Human
gccauguuggccagg

SEQ ID NO: 3321173 - RNA, 16 nt, Human
gccauguuggccaggc

SEQ ID NO: 3321174 - RNA, 17 nt, Human
gccauguuggccaggcu

SEQ ID NO: 3321175 - RNA, 18 nt, Human
gccauguuggccaggcug

SEQ ID NO: 3321176 - RNA, 14 nt, Human
gccauguuggccag

SEQ ID NO: 3321177 - RNA, 15 nt, Human
gcccacgcuggagug

SEQ ID NO: 3321178 - RNA, 16 nt, Human
gcccacgcuggagugc

SEQ ID NO: 3321179 - RNA, 17 nt, Human
gcccacgcuggagugca

SEQ ID NO: 3321180 - RNA, 17 nt, Human
gcccaccuuggcucaag

SEQ ID NO: 3321181 - RNA, 18 nt, Human
gcccaccuuggcucaagu

SEQ ID NO: 3321182 - RNA, 14 nt, Human
gcccacgcccccac

SEQ ID NO: 3321183 - RNA, 13 nt, Human
gcccacgccccca

SEQ ID NO: 3321184 - RNA, 19 nt, Human
gccauguuggccaggcugg

SEQ ID NO: 3321185 - RNA, 20 nt, Human
gccauguuggccaggcuggu

SEQ ID NO: 3321186 - RNA, 22 nt, Human
gccauguuggccaggcuggucu

SEQ ID NO: 3321187 - RNA, 24 nt, Human
gccauguuggccaggcuggucuca

SEQ ID NO: 3321188 - RNA, 23 nt, Human
gccaggccacaagacccuugugg

SEQ ID NO: 3321189 - RNA, 12 nt, Human
gccaggccagag

SEQ ID NO: 3321190 - RNA, 21 nt, Human
gccaggcccucugcccacucc

SEQ ID NO: 3321191 - RNA, 20 nt, Human
gccaggcccucugcccacuc

SEQ ID NO: 3321192 - RNA, 19 nt, Human
gccaggcccucugcccacu

SEQ ID NO: 3321193 - RNA, 17 nt, Human
gccaggcccucugccca

SEQ ID NO: 3321194 - RNA, 16 nt, Human
gccaggcccucugccc

SEQ ID NO: 3321195 - RNA, 13 nt, Human
gccaggccagagg

SEQ ID NO: 3321196 - RNA, 15 nt, Human
gccaggcccucugcc

SEQ ID NO: 3321197 - RNA, 20 nt, Human
gccagcaggcucucaggcca

SEQ ID NO: 3321198 - RNA, 19 nt, Human
gccagcaggcucucaggcc

SEQ ID NO: 3321199 - RNA, 18 nt, Human
gccagcaggcucucaggc

SEQ ID NO: 3321200 - RNA, 17 nt, Human
gccagcaggcucucagg

SEQ ID NO: 3321201 - RNA, 21 nt, Human
gccagcaggcucucaggccag

SEQ ID NO: 3321202 - RNA, 16 nt, Human
gccagcaggcucucag

SEQ ID NO: 3321203 - RNA, 13 nt, Human
gccagcaggcucu

SEQ ID NO: 3321204 - RNA, 20 nt, Human
gccacauuccugaugcuucu

SEQ ID NO: 3321205 - RNA, 16 nt, Human
gccacauuccugaugc

SEQ ID NO: 3321206 - RNA, 22 nt, Human
gccaccaacauacucccaucug

SEQ ID NO: 3321207 - RNA, 19 nt, Human
gccaccaacauacucccau

SEQ ID NO: 3321208 - RNA, 21 nt, Human
gccaccaacauacucccaucu

SEQ ID NO: 3321209 - RNA, 20 nt, Human
gccaccaacauacucccauc

SEQ ID NO: 3321210 - RNA, 19 nt, Human
gccacugugaagagaacca

SEQ ID NO: 3321211 - RNA, 18 nt, Human
gccacugugaagagaacc

SEQ ID NO: 3321212 - RNA, 22 nt, Human
gccacugcaccgggccacagag

SEQ ID NO: 3321213 - RNA, 21 nt, Human
gccacugcacuauagccuagg

SEQ ID NO: 3321214 - RNA, 13 nt, Human
gccacccugggga

SEQ ID NO: 3321215 - RNA, 19 nt, Human
gccacccuggggagaaagu

SEQ ID NO: 3321216 - RNA, 23 nt, Human
gccacugcaccgggccacagaga

SEQ ID NO: 3321217 - RNA, 16 nt, Human
gccugccucuucucua

SEQ ID NO: 3321218 - RNA, 15 nt, Human
gccuggccccucagg

SEQ ID NO: 3321219 - RNA, 17 nt, Human
gccuggccccucagggu

SEQ ID NO: 3321220 - RNA, 16 nt, Human
gccuggccccucaggg

SEQ ID NO: 3321221 - RNA, 22 nt, Human
gccuggccccucagggucccug

SEQ ID NO: 3321222 - RNA, 20 nt, Human
gccuggccccucaggguccc

SEQ ID NO: 3321223 - RNA, 10 nt, Human
gccuggccug

SEQ ID NO: 3321224 - RNA, 21 nt, Human
gccugggaggucaaggcugca

SEQ ID NO: 3321225 - RNA, 14 nt, Human
gccugggaucccuc

SEQ ID NO: 3321226 - RNA, 22 nt, Human
gccugggaggucaaggcugcag

SEQ ID NO: 3321227 - RNA, 18 nt, Human
gccugggaucccucaucc

SEQ ID NO: 3321228 - RNA, 13 nt, Human
gccuccuccagcc

SEQ ID NO: 3321229 - RNA, 18 nt, Human
gccuccugcccuuaccug

SEQ ID NO: 3321230 - RNA, 12 nt, Human
gccucugggacu

SEQ ID NO: 3321231 - RNA, 17 nt, Human
gccugcccaggccccug

SEQ ID NO: 3321232 - RNA, 18 nt, Human
gccugcccaggccccugc

SEQ ID NO: 3321233 - RNA, 19 nt, Human
gccugcccaggccccugcc

SEQ ID NO: 3321234 - RNA, 23 nt, Human
gccucuucucuacucuagggaaa

SEQ ID NO: 3321235 - RNA, 12 nt, Human
gccucuucucua

SEQ ID NO: 3321236 - RNA, 13 nt, Human
gcccacucccugc

SEQ ID NO: 3321237 - RNA, 19 nt, Human
gcccacucccugcaaccug

SEQ ID NO: 3321238 - RNA, 15 nt, Human
gcccacucccugcaa

SEQ ID NO: 3321239 - RNA, 14 nt, Human
gcccacucccugca

SEQ ID NO: 3321240 - RNA, 22 nt, Human
gcccuaaaguguauuuuuuuac

SEQ ID NO: 3321241 - RNA, 22 nt, Human
gccccuggaugcagccucacag

SEQ ID NO: 3321242 - RNA, 18 nt, Human
gccccuggaugcagccuc

SEQ ID NO: 3321243 - RNA, 16 nt, Human
gccccuggaugcagcc

SEQ ID NO: 3321244 - RNA, 15 nt, Human
gccccuggaugcagc

SEQ ID NO: 3321245 - RNA, 18 nt, Human
gccccaaaacucuccucu

SEQ ID NO: 3321246 - RNA, 13 nt, Human
gccccugcccggc

SEQ ID NO: 3321247 - RNA, 14 nt, Human
gccccugcccggcu

SEQ ID NO: 3321248 - RNA, 14 nt, Human
gcccugccuccuuu

SEQ ID NO: 3321249 - RNA, 22 nt, Human
gcccugccuccuuugugaggaa

SEQ ID NO: 3321250 - RNA, 16 nt, Human
gcccugccuccuuugu

SEQ ID NO: 3321251 - RNA, 21 nt, Human
gcccugugggcccccaaaugg

SEQ ID NO: 3321252 - RNA, 16 nt, Human
gccgccaugcuccugg

SEQ ID NO: 3321253 - RNA, 20 nt, Human
gcccuuaccugccaggaagc

SEQ ID NO: 3321254 - RNA, 16 nt, Human
gcccuuaccugccagg

SEQ ID NO: 3321255 - RNA, 15 nt, Human
gccgccaugcuccug

SEQ ID NO: 3321256 - RNA, 14 nt, Human
ggccucccaacuca

SEQ ID NO: 3321257 - RNA, 13 nt, Human
ggccucccaacuc

SEQ ID NO: 3321258 - RNA, 21 nt, Human
ggccaaaggaagcacaugccu

SEQ ID NO: 3321259 - RNA, 15 nt, Human
ggccaaagccaaagc

SEQ ID NO: 3321260 - RNA, 12 nt, Human
ggccaaaggaag

SEQ ID NO: 3321261 - RNA, 21 nt, Human
ggccaaacucaccugccccuc

SEQ ID NO: 3321262 - RNA, 12 nt, Human
ggcauuguggga

SEQ ID NO: 3321263 - RNA, 17 nt, Human
ggccagaugcaccagcc

SEQ ID NO: 3321264 - RNA, 19 nt, Human
ggccagaugcaccagcccu

SEQ ID NO: 3321265 - RNA, 20 nt, Human
ggccagaugcaccagcccuu

SEQ ID NO: 3321266 - RNA, 13 nt, Human
ggccaagguggga

SEQ ID NO: 3321267 - RNA, 22 nt, Human
ggccagagggagugacagaggc

SEQ ID NO: 3321268 - RNA, 23 nt, Human
ggccagagggagugacagaggca

SEQ ID NO: 3321269 - RNA, 21 nt, Human
ggaugaauuccaaauucugcu

SEQ ID NO: 3321270 - RNA, 12 nt, Human
ggaugagaaagg

SEQ ID NO: 3321271 - RNA, 22 nt, Human
ggaugagaaagguugaagcacc

SEQ ID NO: 3321272 - RNA, 21 nt, Human
ggauuuugauccaagcugguc

SEQ ID NO: 3321273 - RNA, 23 nt, Human
ggauuaaacuuaaucuaaaugga

SEQ ID NO: 3321274 - RNA, 12 nt, Human
ggcagaaggaag

SEQ ID NO: 3321275 - RNA, 17 nt, Human
ggcagccaggccacaag

SEQ ID NO: 3321276 - RNA, 15 nt, Human
ggcagccaggccaca

SEQ ID NO: 3321277 - RNA, 10 nt, Human
ggcagagcag

SEQ ID NO: 3321278 - RNA, 14 nt, Human
ggcagccaggccac

SEQ ID NO: 3321279 - RNA, 21 nt, Human
ggagcagccacauuccugaug

SEQ ID NO: 3321280 - RNA, 13 nt, Human
ggagcagccacau

SEQ ID NO: 3321281 - RNA, 18 nt, Human
ggaggucgaggcaggagg

SEQ ID NO: 3321282 - RNA, 14 nt, Human
ggaggucgaggcag

SEQ ID NO: 3321283 - RNA, 16 nt, Human
ggaggucgaggcagga

SEQ ID NO: 3321284 - RNA, 15 nt, Human
ggaggucgaggcagg

SEQ ID NO: 3321285 - RNA, 12 nt, Human
ggaggaagagaa

SEQ ID NO: 3321286 - RNA, 21 nt, Human
ggaggcaugugaugagaggaa

SEQ ID NO: 3321287 - RNA, 13 nt, Human
ggaggccagccuu

SEQ ID NO: 3321288 - RNA, 18 nt, Human
ggaggccaaggugggagg

SEQ ID NO: 3321289 - RNA, 12 nt, Human
ggaggccagccu

SEQ ID NO: 3321290 - RNA, 22 nt, Human
ggagcugccuguucagcuccag

SEQ ID NO: 3321291 - RNA, 19 nt, Human
gcuuguacauaaugcgugc

SEQ ID NO: 3321292 - RNA, 12 nt, Human
gcuuguacauaa

SEQ ID NO: 3321293 - RNA, 13 nt, Human
ggacccugaggcc

SEQ ID NO: 3321294 - RNA, 14 nt, Human
ggacccugaggccc

SEQ ID NO: 3321295 - RNA, 18 nt, Human
ggacccugaggcccagag

SEQ ID NO: 3321296 - RNA, 15 nt, Human
ggacccugaggccca

SEQ ID NO: 3321297 - RNA, 15 nt, Human
ggagagcuagcagca

SEQ ID NO: 3321298 - RNA, 16 nt, Human
ggagagccuuccaggg

SEQ ID NO: 3321299 - RNA, 13 nt, Human
ggagagccuucca

SEQ ID NO: 3321300 - RNA, 18 nt, Human
ggagagccuuccaggggu

SEQ ID NO: 3321301 - RNA, 17 nt, Human
ggagagccuuccagggg

SEQ ID NO: 3321302 - RNA, 22 nt, Human
ggagagccuuccagggguggga

SEQ ID NO: 3321303 - RNA, 18 nt, Human
ggacucaaugcacugaca

SEQ ID NO: 3321304 - RNA, 22 nt, Human
ggacucaaugcacugacauugu

SEQ ID NO: 3321305 - RNA, 20 nt, Human
ggacuacaggugugagucac

SEQ ID NO: 3321306 - RNA, 22 nt, Human
ggagaaccaaaaagaggcuaug

SEQ ID NO: 3321307 - RNA, 9 nt, Human
ggacuuugu

SEQ ID NO: 3321308 - RNA, 19 nt, Human
ggagaaaauggacguguua

SEQ ID NO: 3321309 - RNA, 15 nt, Human
ggacuuggaagcucc

SEQ ID NO: 3321310 - RNA, 17 nt, Human
ggacuuggaagcuccgc

SEQ ID NO: 3321311 - RNA, 15 nt, Human
ggcuucaguggcagc

SEQ ID NO: 3321312 - RNA, 20 nt, Human
ggcuguaucccaugagccuc

SEQ ID NO: 3321313 - RNA, 22 nt, Human
ggcuguaucccaugagccucag

SEQ ID NO: 3321314 - RNA, 23 nt, Human
ggcuguaucccaugagccucagc

SEQ ID NO: 3321315 - RNA, 15 nt, Human
ggcugucaauuacag

SEQ ID NO: 3321316 - RNA, 19 nt, Human
ggcuguaucccaugagccu

SEQ ID NO: 3321317 - RNA, 16 nt, Human
ggcuggugucaccuga

SEQ ID NO: 3321318 - RNA, 16 nt, Human
ggcuucaguggcagcu

SEQ ID NO: 3321319 - RNA, 14 nt, Human
ggcuuuugugcauu

SEQ ID NO: 3321320 - RNA, 13 nt, Human
gggaaaaucagcc

SEQ ID NO: 3321321 - RNA, 23 nt, Human
gggaaaaucagccugcuccagcu

SEQ ID NO: 3321322 - RNA, 15 nt, Human
ggcuggccuggcccc

SEQ ID NO: 3321323 - RNA, 14 nt, Human
ggcuggcgugcagu

SEQ ID NO: 3321324 - RNA, 16 nt, Human
ggcuggcgugcagugg

SEQ ID NO: 3321325 - RNA, 20 nt, Human
ggcuggcgugcaguggugcg

SEQ ID NO: 3321326 - RNA, 22 nt, Human
ggcuggccuggccccucagggu

SEQ ID NO: 3321327 - RNA, 17 nt, Human
ggcuggccuggccccuc

SEQ ID NO: 3321328 - RNA, 16 nt, Human
ggcucccuucccaccu

SEQ ID NO: 3321329 - RNA, 18 nt, Human
ggcucccuucccaccucu

SEQ ID NO: 3321330 - RNA, 17 nt, Human
ggcucccuucccaccuc

SEQ ID NO: 3321331 - RNA, 22 nt, Human
ggcucccuucccaccucucuca

SEQ ID NO: 3321332 - RNA, 20 nt, Human
ggcucccuucccaccucucu

SEQ ID NO: 3321333 - RNA, 21 nt, Human
ggcugccaaugggagcucaug

SEQ ID NO: 3321334 - RNA, 20 nt, Human
ggcugcaugcgggcuuccuc

SEQ ID NO: 3321335 - RNA, 17 nt, Human
ggcugcagggaguccga

SEQ ID NO: 3321336 - RNA, 18 nt, Human
ggcucgagcaugccugga

SEQ ID NO: 3321337 - RNA, 24 nt, Human
ggcucuuccaggcugggagagccu

SEQ ID NO: 3321338 - RNA, 23 nt, Human
ggcucuuccaggcugggagagcc

SEQ ID NO: 3321339 - RNA, 20 nt, Human
ggcucuuccaggcugggaga

SEQ ID NO: 3321340 - RNA, 13 nt, Human
gggagggcuccag

SEQ ID NO: 3321341 - RNA, 11 nt, Human
gggagggcucc

SEQ ID NO: 3321342 - RNA, 22 nt, Human
aaaacuugauguguuaucucuu

SEQ ID NO: 3321343 - RNA, 14 nt, Human
aaaagcugggcagg

SEQ ID NO: 3321344 - RNA, 14 nt, Human
gggaacagacugga

SEQ ID NO: 3321345 - RNA, 22 nt, Human
gggaacagacuggaagcacagc

SEQ ID NO: 3321346 - RNA, 17 nt, Human
aaaaaucucaaauuucu

SEQ ID NO: 3321347 - RNA, 20 nt, Human
aaaaaucucaaauuucuaaa

SEQ ID NO: 3321348 - RNA, 19 nt, Human
aaaaaucucaaauuucuaa

SEQ ID NO: 3321349 - RNA, 15 nt, Human
aaaaccaauguucuc

SEQ ID NO: 3321350 - RNA, 18 nt, Human
aaaacguggcugcuucaa

SEQ ID NO: 3321351 - RNA, 17 nt, Human
aaaacguggcugcuuca

SEQ ID NO: 3321352 - RNA, 16 nt, Human
aaaacguggcugcuuc

SEQ ID NO: 3321353 - RNA, 14 nt, Human
aaaacguggcugcu

SEQ ID NO: 3321354 - RNA, 21 nt, Human
aaaacguggcugcuucaagga

SEQ ID NO: 3321355 - RNA, 22 nt, Human
aaaacugauuuuuuuuuccuuc

SEQ ID NO: 3321356 - RNA, 18 nt, Human
aaaacugauuuuuuuuuc

SEQ ID NO: 3321357 - RNA, 18 nt, Human
gggagggcuccagacaca

SEQ ID NO: 3321358 - RNA, 15 nt, Human
gggauuuccaugaug

SEQ ID NO: 3321359 - RNA, 23 nt, Human
gggcagagcagagaccaucccug

SEQ ID NO: 3321360 - RNA, 18 nt, Human
aaaauaguggugugauuu

SEQ ID NO: 3321361 - RNA, 12 nt, Human
aaaauagccugc

SEQ ID NO: 3321362 - RNA, 12 nt, Human
aaaauaaauuau

SEQ ID NO: 3321363 - RNA, 14 nt, Human
aaaauaccagccag

SEQ ID NO: 3321364 - RNA, 14 nt, Human
aaaauaccaaggaa

SEQ ID NO: 3321365 - RNA, 15 nt, Human
aaaauaccagccagu

SEQ ID NO: 3321366 - RNA, 12 nt, Human
ggucuguucuuu

SEQ ID NO: 3321367 - RNA, 21 nt, Human
ggucuugaacuccuggccuca

SEQ ID NO: 3321368 - RNA, 22 nt, Human
ggucuugaacuccuggccucaa

SEQ ID NO: 3321369 - RNA, 19 nt, Human
ggucuguucuuuccaaagu

SEQ ID NO: 3321370 - RNA, 17 nt, Human
ggucuguucuuuccaaa

SEQ ID NO: 3321371 - RNA, 22 nt, Human
ggugcacaagcuccaagcuccc

SEQ ID NO: 3321372 - RNA, 16 nt, Human
ggugcacaagcuccaa

SEQ ID NO: 3321373 - RNA, 11 nt, Human
aaaggaaagag

SEQ ID NO: 3321374 - RNA, 17 nt, Human
aaagcagugcaugcugu

SEQ ID NO: 3321375 - RNA, 17 nt, Human
aaagcuaggccuggcca

SEQ ID NO: 3321376 - RNA, 18 nt, Human
aaagcuaggccuggccag

SEQ ID NO: 3321377 - RNA, 22 nt, Human
aaagcagugcaugcugucccuu

SEQ ID NO: 3321378 - RNA, 21 nt, Human
aaagcagugcaugcugucccu

SEQ ID NO: 3321379 - RNA, 16 nt, Human
aaagcagugcaugcug

SEQ ID NO: 3321380 - RNA, 23 nt, Human
gguauuggcuagagguucaaaga

SEQ ID NO: 3321381 - RNA, 19 nt, Human
gguccacccaggagccccg

SEQ ID NO: 3321382 - RNA, 14 nt, Human
aaacuuuaccuuuu

SEQ ID NO: 3321383 - RNA, 20 nt, Human
gguccacccaggagccccga

SEQ ID NO: 3321384 - RNA, 22 nt, Human
gguccacccaggagccccgagg

SEQ ID NO: 3321385 - RNA, 12 nt, Human
ggucccacccca

SEQ ID NO: 3321386 - RNA, 15 nt, Human
aaagaugagugagca

SEQ ID NO: 3321387 - RNA, 18 nt, Human
aaagaggcuaugugagca

SEQ ID NO: 3321388 - RNA, 13 nt, Human
aaagaggcuaugu

SEQ ID NO: 3321389 - RNA, 14 nt, Human
aaagacuguacaaa

SEQ ID NO: 3321390 - RNA, 15 nt, Human
aaagacuguacaaag

SEQ ID NO: 3321391 - RNA, 19 nt, Human
aaagacuuuuccaacccuc

SEQ ID NO: 3321392 - RNA, 20 nt, Human
aaaauggaagacagcucuua

SEQ ID NO: 3321393 - RNA, 21 nt, Human
aaaauggacguguuaugacuc

SEQ ID NO: 3321394 - RNA, 21 nt, Human
aaaauguaggguuauaauaau

SEQ ID NO: 3321395 - RNA, 19 nt, Human
aaacacaaacgggcucagc

SEQ ID NO: 3321396 - RNA, 16 nt, Human
aaacaugcuacacacu

SEQ ID NO: 3321397 - RNA, 22 nt, Human
aaacaugcuacacacugcaugu

SEQ ID NO: 3321398 - RNA, 24 nt, Human
ggggaaaaucagccugcuccagcu

SEQ ID NO: 3321399 - RNA, 17 nt, Human
ggggaccucaggccugg

SEQ ID NO: 3321400 - RNA, 16 nt, Human
ggggaccucaggccug

SEQ ID NO: 3321401 - RNA, 15 nt, Human
ggggaccucaggccu

SEQ ID NO: 3321402 - RNA, 13 nt, Human
ggggaccucaggc

SEQ ID NO: 3321403 - RNA, 23 nt, Human
ggggcccugccuccuuugugagg

SEQ ID NO: 3321404 - RNA, 19 nt, Human
ggggcccugccuccuuugu

SEQ ID NO: 3321405 - RNA, 15 nt, Human
ggggcccugccuccu

SEQ ID NO: 3321406 - RNA, 16 nt, Human
ggggcccugccuccuu

SEQ ID NO: 3321407 - RNA, 17 nt, Human
ggggccaguuggucccc

SEQ ID NO: 3321408 - RNA, 20 nt, Human
ggguaucaggugcugccauc

SEQ ID NO: 3321409 - RNA, 22 nt, Human
gggucacucuggcagcucagag

SEQ ID NO: 3321410 - RNA, 22 nt, Human
gggucucacuauguugcccagg

SEQ ID NO: 3321411 - RNA, 23 nt, Human
gggucucacuauguugcccaggc

SEQ ID NO: 3321412 - RNA, 17 nt, Human
aaacguggcugcuucaa

SEQ ID NO: 3321413 - RNA, 16 nt, Human
aaacguggcugcuuca

SEQ ID NO: 3321414 - RNA, 16 nt, Human
aaacuggauuaaacuu

SEQ ID NO: 3321415 - RNA, 15 nt, Human
gaagcagaggaagga

SEQ ID NO: 3321416 - RNA, 14 nt, Human
gaagcacaugccuc

SEQ ID NO: 3321417 - RNA, 15 nt, Human
gaagcacaugccucu

SEQ ID NO: 3321418 - RNA, 20 nt, Human
gaagcacaugccucucucag

SEQ ID NO: 3321419 - RNA, 17 nt, Human
gaagcacaugccucucu

SEQ ID NO: 3321420 - RNA, 23 nt, Human
gaagauuuugaaauuuuuauuaa

SEQ ID NO: 3321421 - RNA, 23 nt, Human
gaagacaaugugaaaagaaaaau

SEQ ID NO: 3321422 - RNA, 22 nt, Human
gaagacaaugacuuacuguaca

SEQ ID NO: 3321423 - RNA, 16 nt, Human
gaagacaaugacuuac

SEQ ID NO: 3321424 - RNA, 15 nt, Human
gaacuccuggccuca

SEQ ID NO: 3321425 - RNA, 11 nt, Human
gaacuggcugc

SEQ ID NO: 3321426 - RNA, 12 nt, Human
gaacuggcugca

SEQ ID NO: 3321427 - RNA, 19 nt, Human
gaagcuccgcuuucuaccc

SEQ ID NO: 3321428 - RNA, 22 nt, Human
gaagcuccgcuuucuacccagc

SEQ ID NO: 3321429 - RNA, 17 nt, Human
gaaggccccgcccaggc

SEQ ID NO: 3321430 - RNA, 22 nt, Human
gaaggcuggguucugauccuag

SEQ ID NO: 3321431 - RNA, 20 nt, Human
gaaggcuggguucugauccu

SEQ ID NO: 3321432 - RNA, 21 nt, Human
gaaggcucgagcaugccugga

SEQ ID NO: 3321433 - RNA, 19 nt, Human
gaaggccccgcccaggcuu

SEQ ID NO: 3321434 - RNA, 18 nt, Human
gaaggccccgcccaggcu

SEQ ID NO: 3321435 - RNA, 19 nt, Human
gaaggcucgagcaugccug

SEQ ID NO: 3321436 - RNA, 19 nt, Human
gaaggcuggguucugaucc

SEQ ID NO: 3321437 - RNA, 15 nt, Human
gaaggcuggguucug

SEQ ID NO: 3321438 - RNA, 19 nt, Human
gaauauugcugauggugca

SEQ ID NO: 3321439 - RNA, 15 nt, Human
gaauauugcugaugg

SEQ ID NO: 3321440 - RNA, 14 nt, Human
gaauauugcugaug

SEQ ID NO: 3321441 - RNA, 22 nt, Human
gaaggggagauaaggguaucug

SEQ ID NO: 3321442 - RNA, 19 nt, Human
gacucugucucaaaaaaac

SEQ ID NO: 3321443 - RNA, 14 nt, Human
gacugaauuucuuu

SEQ ID NO: 3321444 - RNA, 18 nt, Human
gacgcuacccgggaaggg

SEQ ID NO: 3321445 - RNA, 16 nt, Human
gacgcuacccgggaag

SEQ ID NO: 3321446 - RNA, 15 nt, Human
gacgccaucccagcc

SEQ ID NO: 3321447 - RNA, 18 nt, Human
gacgccaucccagcccca

SEQ ID NO: 3321448 - RNA, 17 nt, Human
gacgccaucccagcccc

SEQ ID NO: 3321449 - RNA, 20 nt, Human
gaccaucccugaaggccccg

SEQ ID NO: 3321450 - RNA, 13 nt, Human
gaccucugccuga

SEQ ID NO: 3321451 - RNA, 14 nt, Human
gaccucugcagcaa

SEQ ID NO: 3321452 - RNA, 16 nt, Human
gacgccaucccagccc

SEQ ID NO: 3321453 - RNA, 13 nt, Human
gaccugaggcccu

SEQ ID NO: 3321454 - RNA, 11 nt, Human
gaccugaggcc

SEQ ID NO: 3321455 - RNA, 18 nt, Human
gaccagggauuuccauga

SEQ ID NO: 3321456 - RNA, 20 nt, Human
gaccagggauuuccaugaug

SEQ ID NO: 3321457 - RNA, 19 nt, Human
gaccaucccugaaggcccc

SEQ ID NO: 3321458 - RNA, 18 nt, Human
gaccaucccugaaggccc

SEQ ID NO: 3321459 - RNA, 13 nt, Human
gaccaucccugaa

SEQ ID NO: 3321460 - RNA, 12 nt, Human
gaccaucccuga

SEQ ID NO: 3321461 - RNA, 19 nt, Human
gacauuguuggccaaagcc

SEQ ID NO: 3321462 - RNA, 19 nt, Human
gacagcccgggcucugccu

SEQ ID NO: 3321463 - RNA, 18 nt, Human
gacagcccgggcucugcc

SEQ ID NO: 3321464 - RNA, 14 nt, Human
gacauugcggacag

SEQ ID NO: 3321465 - RNA, 15 nt, Human
gacauugcggacagc

SEQ ID NO: 3321466 - RNA, 17 nt, Human
gacagcccgggcucugc

SEQ ID NO: 3321467 - RNA, 13 nt, Human
gacacagcucuuc

SEQ ID NO: 3321468 - RNA, 14 nt, Human
gacacagcucuucu

SEQ ID NO: 3321469 - RNA, 16 nt, Human
gacacagcucuucucc

SEQ ID NO: 3321470 - RNA, 23 nt, Human
gacacagcucuucuccaggcugu

SEQ ID NO: 3321471 - RNA, 22 nt, Human
gacacagcucuucuccaggcug

SEQ ID NO: 3321472 - RNA, 20 nt, Human
gagccuuccaggggugggac

SEQ ID NO: 3321473 - RNA, 23 nt, Human
gagccuuccaggggugggacacc

SEQ ID NO: 3321474 - RNA, 13 nt, Human
gagccuugaacuu

SEQ ID NO: 3321475 - RNA, 17 nt, Human
gagccuuccaggggugg

SEQ ID NO: 3321476 - RNA, 14 nt, Human
gaggcagggucuca

SEQ ID NO: 3321477 - RNA, 22 nt, Human
gaggccaaggugggaggauugc

SEQ ID NO: 3321478 - RNA, 17 nt, Human
gaggccaaggugggagg

SEQ ID NO: 3321479 - RNA, 15 nt, Human
gaggcagggucucac

SEQ ID NO: 3321480 - RNA, 22 nt, Human
gaggcagggucucacucugucg

SEQ ID NO: 3321481 - RNA, 22 nt, Human
gaggcuagugugguguuuccug

SEQ ID NO: 3321482 - RNA, 14 nt, Human
gaggccagagacac

SEQ ID NO: 3321483 - RNA, 13 nt, Human
gaggccagagaca

SEQ ID NO: 3321484 - RNA, 15 nt, Human
gaggucgaggcagga

SEQ ID NO: 3321485 - RNA, 23 nt, Human
gaggugaccccagguuucuaugu

SEQ ID NO: 3321486 - RNA, 22 nt, Human
gagucagaaguuucugccgcag

SEQ ID NO: 3321487 - RNA, 12 nt, Human
gagucccaccuu

SEQ ID NO: 3321488 - RNA, 17 nt, Human
gagugacagaggcagcc

SEQ ID NO: 3321489 - RNA, 18 nt, Human
gagugacagaggcagccc

SEQ ID NO: 3321490 - RNA, 15 nt, Human
gagucaccaagccca

SEQ ID NO: 3321491 - RNA, 16 nt, Human
gagucaccaagcccag

SEQ ID NO: 3321492 - RNA, 17 nt, Human
gagucaccaagcccagu

SEQ ID NO: 3321493 - RNA, 22 nt, Human
gaguugauagcacagacccugc

SEQ ID NO: 3321494 - RNA, 17 nt, Human
gaguugauucagcucug

SEQ ID NO: 3321495 - RNA, 16 nt, Human
gaguugauucagcucu

SEQ ID NO: 3321496 - RNA, 15 nt, Human
gaguugauucagcuc

SEQ ID NO: 3321497 - RNA, 20 nt, Human
gagugacagaggcagcccca

SEQ ID NO: 3321498 - RNA, 18 nt, Human
gaguugauucagcucugc

SEQ ID NO: 3321499 - RNA, 22 nt, Human
gaguuguuacauuuuuaagugc

SEQ ID NO: 3321500 - RNA, 19 nt, Human
gcaagugagagcugggugu

SEQ ID NO: 3321501 - RNA, 21 nt, Human
gcacaucagcacgauuucugu

SEQ ID NO: 3321502 - RNA, 14 nt, Human
gcacacauuuuuua

SEQ ID NO: 3321503 - RNA, 14 nt, Human
gcacaccgggcacu

SEQ ID NO: 3321504 - RNA, 22 nt, Human
gcacaagcugcacccucaggca

SEQ ID NO: 3321505 - RNA, 23 nt, Human
gcaccgggccacagagaaaguac

SEQ ID NO: 3321506 - RNA, 14 nt, Human
gcaccgggccacag

SEQ ID NO: 3321507 - RNA, 23 nt, Human
gcacaucagcacgauuucuguuu

SEQ ID NO: 3321508 - RNA, 22 nt, Human
gcacaucagcacgauuucuguu

SEQ ID NO: 3321509 - RNA, 16 nt, Human
gcacuugcagacucua

SEQ ID NO: 3321510 - RNA, 16 nt, Human
gcacuccccugcuggg

SEQ ID NO: 3321511 - RNA, 22 nt, Human
gcacuccccugcuggguguggc

SEQ ID NO: 3321512 - RNA, 13 nt, Human
gcacucagaagac

SEQ ID NO: 3321513 - RNA, 16 nt, Human
gcacucagaagacacu

SEQ ID NO: 3321514 - RNA, 17 nt, Human
gcacuccccugcugggu

SEQ ID NO: 3321515 - RNA, 16 nt, Human
gaugagugagcaugcc

SEQ ID NO: 3321516 - RNA, 21 nt, Human
gaugaucuaggaagacuuugg

SEQ ID NO: 3321517 - RNA, 15 nt, Human
gaugaucuaggaaga

SEQ ID NO: 3321518 - RNA, 14 nt, Human
gaugauccuaggca

SEQ ID NO: 3321519 - RNA, 12 nt, Human
gauuauuggaaa

SEQ ID NO: 3321520 - RNA, 15 nt, Human
gauucuccugccuca

SEQ ID NO: 3321521 - RNA, 17 nt, Human
gauucuccugccucagc

SEQ ID NO: 3321522 - RNA, 18 nt, Human
gauucuccugccucagcc

SEQ ID NO: 3321523 - RNA, 14 nt, Human
gauucuccugccuc

SEQ ID NO: 3321524 - RNA, 17 nt, Human
gauucuuccucccuccc

SEQ ID NO: 3321525 - RNA, 18 nt, Human
gauucuuccucccucccu

SEQ ID NO: 3321526 - RNA, 22 nt, Human
cuggaugcagccucacaguccu

SEQ ID NO: 3321527 - RNA, 17 nt, Human
cuggaguucugguuccu

SEQ ID NO: 3321528 - RNA, 16 nt, Human
cuggaguucugguucc

SEQ ID NO: 3321529 - RNA, 15 nt, Human
cuggaguucugguuc

SEQ ID NO: 3321530 - RNA, 12 nt, Human
cugcugaaggcu

SEQ ID NO: 3321531 - RNA, 16 nt, Human
cugcucacauaucugu

SEQ ID NO: 3321532 - RNA, 19 nt, Human
cugcucacauaucugucau

SEQ ID NO: 3321533 - RNA, 14 nt, Human
cugcucacauaucu

SEQ ID NO: 3321534 - RNA, 13 nt, Human
cugcugacagugu

SEQ ID NO: 3321535 - RNA, 15 nt, Human
cugcugacaguguug

SEQ ID NO: 3321536 - RNA, 11 nt, Human
cugcugacagu

SEQ ID NO: 3321537 - RNA, 12 nt, Human
cugcugacagug

SEQ ID NO: 3321538 - RNA, 15 nt, Human
cugcugaaggcucga

SEQ ID NO: 3321539 - RNA, 14 nt, Human
cugcugaaggcucg

SEQ ID NO: 3321540 - RNA, 13 nt, Human
cugcugaaggcuc

SEQ ID NO: 3321541 - RNA, 20 nt, Human
cugcuuaacuucacauauug

SEQ ID NO: 3321542 - RNA, 21 nt, Human
cuggguggcaccagcagccug

SEQ ID NO: 3321543 - RNA, 14 nt, Human
cuggguguggcgca

SEQ ID NO: 3321544 - RNA, 15 nt, Human
cuggguguggcgcag

SEQ ID NO: 3321545 - RNA, 20 nt, Human
cugggcagaggaaagcaaag

SEQ ID NO: 3321546 - RNA, 12 nt, Human
cugggcagagga

SEQ ID NO: 3321547 - RNA, 16 nt, Human
cugggcagaggaaagc

SEQ ID NO: 3321548 - RNA, 13 nt, Human
cugggcagaggaa

SEQ ID NO: 3321549 - RNA, 20 nt, Human
cugggcagguuggugggggc

SEQ ID NO: 3321550 - RNA, 20 nt, Human
cuggguggcaccagcagccu

SEQ ID NO: 3321551 - RNA, 18 nt, Human
cuggguggcaccagcagc

SEQ ID NO: 3321552 - RNA, 13 nt, Human
cuggggagaaagu

SEQ ID NO: 3321553 - RNA, 12 nt, Human
cuggcccuuccu

SEQ ID NO: 3321554 - RNA, 22 nt, Human
cuggcuaugcauuugaaaauuu

SEQ ID NO: 3321555 - RNA, 16 nt, Human
cuggcuaugcauuuga

SEQ ID NO: 3321556 - RNA, 15 nt, Human
cuggcuaugcauuug

SEQ ID NO: 3321557 - RNA, 14 nt, Human
cuggcuaugcauuu

SEQ ID NO: 3321558 - RNA, 13 nt, Human
cuggcuaugcauu

SEQ ID NO: 3321559 - RNA, 14 nt, Human
cugggacaugggaa

SEQ ID NO: 3321560 - RNA, 22 nt, Human
cugggacaugggaaaggggaag

SEQ ID NO: 3321561 - RNA, 18 nt, Human
cugggacaugggaaaggg

SEQ ID NO: 3321562 - RNA, 13 nt, Human
cugggacuacagg

SEQ ID NO: 3321563 - RNA, 15 nt, Human
cugggacuacaggca

SEQ ID NO: 3321564 - RNA, 13 nt, Human
cugcauuggcuuu

SEQ ID NO: 3321565 - RNA, 14 nt, Human
cugcauuuaaaaga

SEQ ID NO: 3321566 - RNA, 19 nt, Human
cugcccugugggcccccaa

SEQ ID NO: 3321567 - RNA, 12 nt, Human
cugcccuuaccu

SEQ ID NO: 3321568 - RNA, 16 nt, Human
cugcccuuaccugcca

SEQ ID NO: 3321569 - RNA, 12 nt, Human
cugccauccagg

SEQ ID NO: 3321570 - RNA, 16 nt, Human
cugccauauucuguug

SEQ ID NO: 3321571 - RNA, 16 nt, Human
cugccauccagguuca

SEQ ID NO: 3321572 - RNA, 18 nt, Human
cugccauccagguucagc

SEQ ID NO: 3321573 - RNA, 19 nt, Human
cugccauccagguucagcu

SEQ ID NO: 3321574 - RNA, 23 nt, Human
cugccagggacagaggggguggc

SEQ ID NO: 3321575 - RNA, 22 nt, Human
cugccagggacagagggggugg

SEQ ID NO: 3321576 - RNA, 20 nt, Human
cugccagggacagagggggu

SEQ ID NO: 3321577 - RNA, 17 nt, Human
cugcauuuaaaagauac

SEQ ID NO: 3321578 - RNA, 15 nt, Human
cugcacuccagccug

SEQ ID NO: 3321579 - RNA, 22 nt, Human
cugcacuauagccuaggugaca

SEQ ID NO: 3321580 - RNA, 23 nt, Human
cugcacuauagccuaggugacag

SEQ ID NO: 3321581 - RNA, 13 nt, Human
cugcacuccagcc

SEQ ID NO: 3321582 - RNA, 16 nt, Human
cugcacuauagccuag

SEQ ID NO: 3321583 - RNA, 17 nt, Human
cugcacuauagccuagg

SEQ ID NO: 3321584 - RNA, 18 nt, Human
cugcacuauagccuaggu

SEQ ID NO: 3321585 - RNA, 20 nt, Human
cugcacuauagccuagguga

SEQ ID NO: 3321586 - RNA, 23 nt, Human
cugcagccucaaccuccugggcu

SEQ ID NO: 3321587 - RNA, 24 nt, Human
cugcagccucaaccuccugggcua

SEQ ID NO: 3321588 - RNA, 18 nt, Human
cugcacuccagccugggu

SEQ ID NO: 3321589 - RNA, 16 nt, Human
cugcacuccagccugg

SEQ ID NO: 3321590 - RNA, 17 nt, Human
cugcacuccagccuggg

SEQ ID NO: 3321591 - RNA, 20 nt, Human
cugcaggcagccaggccaca

SEQ ID NO: 3321592 - RNA, 19 nt, Human
cugcaggcagccaggccac

SEQ ID NO: 3321593 - RNA, 18 nt, Human
cugcaggcagccaggcca

SEQ ID NO: 3321594 - RNA, 17 nt, Human
cugcaggcagccaggcc

SEQ ID NO: 3321595 - RNA, 16 nt, Human
cugcaggcagccaggc

SEQ ID NO: 3321596 - RNA, 15 nt, Human
cugcaggcagccagg

SEQ ID NO: 3321597 - RNA, 14 nt, Human
cugcaggcagccag

SEQ ID NO: 3321598 - RNA, 13 nt, Human
cugcaggcagcca

SEQ ID NO: 3321599 - RNA, 12 nt, Human
cugcagcuuugu

SEQ ID NO: 3321600 - RNA, 23 nt, Human
cugcaccgggccacagagaaagu

SEQ ID NO: 3321601 - RNA, 20 nt, Human
cugcaccgggccacagagaa

SEQ ID NO: 3321602 - RNA, 20 nt, Human
cugcaagaauugaagcagga

SEQ ID NO: 3321603 - RNA, 12 nt, Human
cugcaagggagu

SEQ ID NO: 3321604 - RNA, 22 nt, Human
cugcaaccugauugugucucuu

SEQ ID NO: 3321605 - RNA, 18 nt, Human
cugcaagaauugaagcag

SEQ ID NO: 3321606 - RNA, 22 nt, Human
cugcaaccuccgccucuugggu

SEQ ID NO: 3321607 - RNA, 14 nt, Human
cugcaaccugauug

SEQ ID NO: 3321608 - RNA, 21 nt, Human
cugcaaccugauugugucucu

SEQ ID NO: 3321609 - RNA, 19 nt, Human
cugcaaccugauugugucu

SEQ ID NO: 3321610 - RNA, 20 nt, Human
cugcaaccuccgccucuugg

SEQ ID NO: 3321611 - RNA, 24 nt, Human
cugaugggcaacccccagccugcu

SEQ ID NO: 3321612 - RNA, 22 nt, Human
cugaugggcaacccccagccug

SEQ ID NO: 3321613 - RNA, 23 nt, Human
cugaugggcaacccccagccugc

SEQ ID NO: 3321614 - RNA, 21 nt, Human
cugcaaaggguaucaggugcu

SEQ ID NO: 3321615 - RNA, 22 nt, Human
cugcaaaggguaucaggugcug

SEQ ID NO: 3321616 - RNA, 20 nt, Human
cugaugcuucuucagagacu

SEQ ID NO: 3321617 - RNA, 19 nt, Human
cugaugcuucuucagagac

SEQ ID NO: 3321618 - RNA, 18 nt, Human
cugaugcuucuucagaga

SEQ ID NO: 3321619 - RNA, 18 nt, Human
cugaugggcaacccccag

SEQ ID NO: 3321620 - RNA, 21 nt, Human
cugaugggcaacccccagccu

SEQ ID NO: 3321621 - RNA, 15 nt, Human
cucuuaugggcuggg

SEQ ID NO: 3321622 - RNA, 14 nt, Human
cucuuaugggcugg

SEQ ID NO: 3321623 - RNA, 17 nt, Human
cugaugcuucuucagag

SEQ ID NO: 3321624 - RNA, 16 nt, Human
cugaugcuucuucaga

SEQ ID NO: 3321625 - RNA, 17 nt, Human
cuuccauggacuuuguu

SEQ ID NO: 3321626 - RNA, 16 nt, Human
cuuccauggacuuugu

SEQ ID NO: 3321627 - RNA, 20 nt, Human
cuuccagugaggcucugccc

SEQ ID NO: 3321628 - RNA, 19 nt, Human
cuuccagugaggcucugcc

SEQ ID NO: 3321629 - RNA, 17 nt, Human
cuuccagugaggcucug

SEQ ID NO: 3321630 - RNA, 18 nt, Human
cuuccagugaggcucugc

SEQ ID NO: 3321631 - RNA, 22 nt, Human
cuucagagacuccugcaggcag

SEQ ID NO: 3321632 - RNA, 21 nt, Human
cuucagagacuccugcaggca

SEQ ID NO: 3321633 - RNA, 16 nt, Human
cuucagagacuccugc

SEQ ID NO: 3321634 - RNA, 20 nt, Human
cuucagagacuccugcaggc

SEQ ID NO: 3321635 - RNA, 14 nt, Human
cuucaccuuugucc

SEQ ID NO: 3321636 - RNA, 18 nt, Human
cuuauugcccacgcugga

SEQ ID NO: 3321637 - RNA, 17 nt, Human
cuucaccuuugucccca

SEQ ID NO: 3321638 - RNA, 16 nt, Human
cuucauccuccucaga

SEQ ID NO: 3321639 - RNA, 15 nt, Human
cuucauccuccucag

SEQ ID NO: 3321640 - RNA, 13 nt, Human
cuucaucccucug

SEQ ID NO: 3321641 - RNA, 18 nt, Human
cuucaguggcagcugcuu

SEQ ID NO: 3321642 - RNA, 17 nt, Human
cuucaguggcagcugcu

SEQ ID NO: 3321643 - RNA, 23 nt, Human
cuucagagacuccugcaggcagc

SEQ ID NO: 3321644 - RNA, 21 nt, Human
cuuauggaacacucugagacu

SEQ ID NO: 3321645 - RNA, 21 nt, Human
cuuaugggcuggguucuaccc

SEQ ID NO: 3321646 - RNA, 14 nt, Human
cuuaugggcugggu

SEQ ID NO: 3321647 - RNA, 23 nt, Human
cuuaugggcuggguucuacccag

SEQ ID NO: 3321648 - RNA, 22 nt, Human
cuuaugggcuggguucuaccca

SEQ ID NO: 3321649 - RNA, 12 nt, Human
cuuauugcccac

SEQ ID NO: 3321650 - RNA, 13 nt, Human
cuuauugcccacg

SEQ ID NO: 3321651 - RNA, 18 nt, Human
cuuagcagggaaacagcu

SEQ ID NO: 3321652 - RNA, 19 nt, Human
cuuagauguauauauuucc

SEQ ID NO: 3321653 - RNA, 21 nt, Human
cuuaccucggugccuuccucu

SEQ ID NO: 3321654 - RNA, 19 nt, Human
cuuaccucggugccuuccu

SEQ ID NO: 3321655 - RNA, 13 nt, Human
cuuaccucggugc

SEQ ID NO: 3321656 - RNA, 19 nt, Human
cuuacccucauguucuuaa

SEQ ID NO: 3321657 - RNA, 18 nt, Human
cuuacccucauguucuua

SEQ ID NO: 3321658 - RNA, 17 nt, Human
cuuacccucauguucuu

SEQ ID NO: 3321659 - RNA, 16 nt, Human
cuguugggccaggagc

SEQ ID NO: 3321660 - RNA, 20 nt, Human
cuguugggccaggagccucc

SEQ ID NO: 3321661 - RNA, 17 nt, Human
cuguugggccaggagcc

SEQ ID NO: 3321662 - RNA, 13 nt, Human
cuuacacaauggu

SEQ ID NO: 3321663 - RNA, 13 nt, Human
cuguucagcucca

SEQ ID NO: 3321664 - RNA, 16 nt, Human
cugugucuugcaaugg

SEQ ID NO: 3321665 - RNA, 19 nt, Human
cugugucuugcaauggcag

SEQ ID NO: 3321666 - RNA, 19 nt, Human
cugugucagguggggcagc

SEQ ID NO: 3321667 - RNA, 20 nt, Human
cugugucagcauagaaguaa

SEQ ID NO: 3321668 - RNA, 21 nt, Human
cugugucagguggggcagcuu

SEQ ID NO: 3321669 - RNA, 14 nt, Human
cugugucuugcaau

SEQ ID NO: 3321670 - RNA, 19 nt, Human
cugugucucccuucauccu

SEQ ID NO: 3321671 - RNA, 14 nt, Human
cugugucucccuuc

SEQ ID NO: 3321672 - RNA, 22 nt, Human
cugugcugagucugaaggcugg

SEQ ID NO: 3321673 - RNA, 20 nt, Human
cugugcugagucugaaggcu

SEQ ID NO: 3321674 - RNA, 11 nt, Human
cugugcugccc

SEQ ID NO: 3321675 - RNA, 19 nt, Human
cugugcugagucugaaggc

SEQ ID NO: 3321676 - RNA, 18 nt, Human
cuucuucagagacuccug

SEQ ID NO: 3321677 - RNA, 22 nt, Human
cuucuucagagacuccugcagg

SEQ ID NO: 3321678 - RNA, 23 nt, Human
cuucugacccaugcugcccugug

SEQ ID NO: 3321679 - RNA, 21 nt, Human
cuucuucagagacuccugcag

SEQ ID NO: 3321680 - RNA, 20 nt, Human
cuucuucagagacuccugca

SEQ ID NO: 3321681 - RNA, 20 nt, Human
cuugaaugaugccaugagga

SEQ ID NO: 3321682 - RNA, 12 nt, Human
cuugcucugcug

SEQ ID NO: 3321683 - RNA, 23 nt, Human
cuugccgucuaccugaggggccu

SEQ ID NO: 3321684 - RNA, 19 nt, Human
cuugccgucuaccugaggg

SEQ ID NO: 3321685 - RNA, 12 nt, Human
cuugacagggca

SEQ ID NO: 3321686 - RNA, 20 nt, Human
cuugccgucuaccugagggg

SEQ ID NO: 3321687 - RNA, 13 nt, Human
cuuguggacacag

SEQ ID NO: 3321688 - RNA, 14 nt, Human
cuuguggacacagc

SEQ ID NO: 3321689 - RNA, 15 nt, Human
cuuguggacacagcu

SEQ ID NO: 3321690 - RNA, 22 nt, Human
cuuucaauaggaaaaacugauu

SEQ ID NO: 3321691 - RNA, 21 nt, Human
cuuucaauaggaaaaacugau

SEQ ID NO: 3321692 - RNA, 20 nt, Human
cuuucaauaggaaaaacuga

SEQ ID NO: 3321693 - RNA, 18 nt, Human
cuuucaauaggaaaaacu

SEQ ID NO: 3321694 - RNA, 22 nt, Human
cuuugacgccaucccagcccca

SEQ ID NO: 3321695 - RNA, 21 nt, Human
cuuugacgccaucccagcccc

SEQ ID NO: 3321696 - RNA, 19 nt, Human
cuuugacgccaucccagcc

SEQ ID NO: 3321697 - RNA, 18 nt, Human
cuuugacgccaucccagc

SEQ ID NO: 3321698 - RNA, 15 nt, Human
cuuuucaaaacauuu

SEQ ID NO: 3321699 - RNA, 14 nt, Human
cuuuuauaaacuuu

SEQ ID NO: 3321700 - RNA, 18 nt, Human
cuuuuauaaacuuuaccu

SEQ ID NO: 3321701 - RNA, 16 nt, Human
cuuuuauaaacuuuac

SEQ ID NO: 3321702 - RNA, 15 nt, Human
cuuuuauaaacuuua

SEQ ID NO: 3321703 - RNA, 16 nt, Human
cuuuggucuacacugu

SEQ ID NO: 3321704 - RNA, 20 nt, Human
cuuuggucuacacugugcug

SEQ ID NO: 3321705 - RNA, 23 nt, Human
cuccgcuuucuacccagcgagcc

SEQ ID NO: 3321706 - RNA, 14 nt, Human
cuccuuguguuacu

SEQ ID NO: 3321707 - RNA, 15 nt, Human
cuccuuucaccacau

SEQ ID NO: 3321708 - RNA, 16 nt, Human
cuccuguaccucuuga

SEQ ID NO: 3321709 - RNA, 19 nt, Human
cuccuggccucaagugauu

SEQ ID NO: 3321710 - RNA, 18 nt, Human
cuccugggcuaagugauc

SEQ ID NO: 3321711 - RNA, 19 nt, Human
cuccuggcccacugcaucg

SEQ ID NO: 3321712 - RNA, 18 nt, Human
cuccuggcccacugcauc

SEQ ID NO: 3321713 - RNA, 14 nt, Human
cuccucugcugcug

SEQ ID NO: 3321714 - RNA, 13 nt, Human
cuccucugcugcu

SEQ ID NO: 3321715 - RNA, 23 nt, Human
cuccaggugcacaagcuccaagc

SEQ ID NO: 3321716 - RNA, 15 nt, Human
cuccaggcuccuuua

SEQ ID NO: 3321717 - RNA, 23 nt, Human
cuccaggcuccuuuagcgcccag

SEQ ID NO: 3321718 - RNA, 20 nt, Human
cuccaggcuguaucccauga

SEQ ID NO: 3321719 - RNA, 22 nt, Human
cuccaggugcacaagcuccaag

SEQ ID NO: 3321720 - RNA, 20 nt, Human
cucccucuuucccucccuuc

SEQ ID NO: 3321721 - RNA, 19 nt, Human
cucugcacaagcugcaccc

SEQ ID NO: 3321722 - RNA, 21 nt, Human
cucugcacaagcugcacccuc

SEQ ID NO: 3321723 - RNA, 20 nt, Human
cucugcacaagcugcacccu

SEQ ID NO: 3321724 - RNA, 14 nt, Human
cucugcacuccccu

SEQ ID NO: 3321725 - RNA, 16 nt, Human
cucugcacuccccugc

SEQ ID NO: 3321726 - RNA, 15 nt, Human
cucugcacuccccug

SEQ ID NO: 3321727 - RNA, 13 nt, Human
cucuguacagagc

SEQ ID NO: 3321728 - RNA, 15 nt, Human
cucuguacagagccc

SEQ ID NO: 3321729 - RNA, 14 nt, Human
cucuguacagagcc

SEQ ID NO: 3321730 - RNA, 16 nt, Human
cucugcugcuggcugg

SEQ ID NO: 3321731 - RNA, 15 nt, Human
cucugcugcuggcug

SEQ ID NO: 3321732 - RNA, 14 nt, Human
cucugcugcuggcu

SEQ ID NO: 3321733 - RNA, 16 nt, Human
cucuguacagagccca

SEQ ID NO: 3321734 - RNA, 21 nt, Human
cucugcugacagacacaggcc

SEQ ID NO: 3321735 - RNA, 22 nt, Human
cucugcugacagacacaggccc

SEQ ID NO: 3321736 - RNA, 20 nt, Human
cucugcugacagacacaggc

SEQ ID NO: 3321737 - RNA, 13 nt, Human
cucugcugcuggc

SEQ ID NO: 3321738 - RNA, 23 nt, Human
cucugcugacagacacaggcccg

SEQ ID NO: 3321739 - RNA, 20 nt, Human
cucugcuccucuccccagca

SEQ ID NO: 3321740 - RNA, 21 nt, Human
cucugcuccucuccccagcaa

SEQ ID NO: 3321741 - RNA, 17 nt, Human
cucugcacuccccugcu

SEQ ID NO: 3321742 - RNA, 16 nt, Human
cucgguguggagaagc

SEQ ID NO: 3321743 - RNA, 17 nt, Human
cucgguguggagaagcg

SEQ ID NO: 3321744 - RNA, 18 nt, Human
cuccuuugugaggaagcc

SEQ ID NO: 3321745 - RNA, 17 nt, Human
cuccuuugugaggaagc

SEQ ID NO: 3321746 - RNA, 16 nt, Human
cucuccuccagaguca

SEQ ID NO: 3321747 - RNA, 12 nt, Human
cucuccuccaga

SEQ ID NO: 3321748 - RNA, 15 nt, Human
cucuccuccagaguc

SEQ ID NO: 3321749 - RNA, 13 nt, Human
cucuccuccagag

SEQ ID NO: 3321750 - RNA, 14 nt, Human
cuaugugagaccau

SEQ ID NO: 3321751 - RNA, 13 nt, Human
cuaucucccccag

SEQ ID NO: 3321752 - RNA, 17 nt, Human
cuauguugcccaggcag

SEQ ID NO: 3321753 - RNA, 18 nt, Human
cuauguugcccaggcagg

SEQ ID NO: 3321754 - RNA, 19 nt, Human
cuauguugcccaggcaggu

SEQ ID NO: 3321755 - RNA, 21 nt, Human
cuauguugcccaggcaggucu

SEQ ID NO: 3321756 - RNA, 22 nt, Human
cuauguugcccaggcaggucuu

SEQ ID NO: 3321757 - RNA, 21 nt, Human
cucaagugauucuccugccuc

SEQ ID NO: 3321758 - RNA, 23 nt, Human
cucaauuauuuugcauuuuuucu

SEQ ID NO: 3321759 - RNA, 11 nt, Human
cucaggccugg

SEQ ID NO: 3321760 - RNA, 22 nt, Human
cucaggccugggggcugggcag

SEQ ID NO: 3321761 - RNA, 18 nt, Human
cucaggccagcugcuugg

SEQ ID NO: 3321762 - RNA, 17 nt, Human
cucaggccagcugcuug

SEQ ID NO: 3321763 - RNA, 16 nt, Human
cucaggccagcugcuu

SEQ ID NO: 3321764 - RNA, 15 nt, Human
cucaggccagcugcu

SEQ ID NO: 3321765 - RNA, 21 nt, Human
cucaggccaaacucaccugcc

SEQ ID NO: 3321766 - RNA, 20 nt, Human
cucaggccaaacucaccugc

SEQ ID NO: 3321767 - RNA, 19 nt, Human
cucaggccaaacucaccug

SEQ ID NO: 3321768 - RNA, 13 nt, Human
cucagaagacacu

SEQ ID NO: 3321769 - RNA, 15 nt, Human
cucagaagacacuga

SEQ ID NO: 3321770 - RNA, 17 nt, Human
cucagaagacacugaug

SEQ ID NO: 3321771 - RNA, 20 nt, Human
cucagaagacacugaugggc

SEQ ID NO: 3321772 - RNA, 22 nt, Human
cucagaagacacugaugggcaa

SEQ ID NO: 3321773 - RNA, 17 nt, Human
cucaccuuucccaucuu

SEQ ID NO: 3321774 - RNA, 23 nt, Human
cucagaagacacugaugggcaac

SEQ ID NO: 3321775 - RNA, 19 nt, Human
cucagccucccgaauagcu

SEQ ID NO: 3321776 - RNA, 21 nt, Human
cucagccucccgaauagcugg

SEQ ID NO: 3321777 - RNA, 22 nt, Human
cucagccucccgaauagcuggg

SEQ ID NO: 3321778 - RNA, 13 nt, Human
cucagccucccga

SEQ ID NO: 3321779 - RNA, 20 nt, Human
cucagucuggcccuuccuuu

SEQ ID NO: 3321780 - RNA, 15 nt, Human
cucaguccauagcag

SEQ ID NO: 3321781 - RNA, 17 nt, Human
cucaguccauagcagag

SEQ ID NO: 3321782 - RNA, 22 nt, Human
cucagucuggcccuuccuuuuc

SEQ ID NO: 3321783 - RNA, 23 nt, Human
cucaggugucccugcacuugcag

SEQ ID NO: 3321784 - RNA, 20 nt, Human
ccuucuguccuacucugugu

SEQ ID NO: 3321785 - RNA, 21 nt, Human
ccuucuguccuacucuguguc

SEQ ID NO: 3321786 - RNA, 22 nt, Human
ccuucuguccuacucuguguca

SEQ ID NO: 3321787 - RNA, 23 nt, Human
ccuucucuccagccccuggaugc

SEQ ID NO: 3321788 - RNA, 21 nt, Human
ccuucucuccagccccuggau

SEQ ID NO: 3321789 - RNA, 14 nt, Human
ccuucucugaagga

SEQ ID NO: 3321790 - RNA, 16 nt, Human
ccuucucugaaggaca

SEQ ID NO: 3321791 - RNA, 20 nt, Human
ccuucucuccagccccugga

SEQ ID NO: 3321792 - RNA, 17 nt, Human
ccuuucaauaggaaaaa

SEQ ID NO: 3321793 - RNA, 15 nt, Human
ccuuucaauaggaaa

SEQ ID NO: 3321794 - RNA, 13 nt, Human
ccuguucagcucc

SEQ ID NO: 3321795 - RNA, 23 nt, Human
ccuguucagcuccagcucaccag

SEQ ID NO: 3321796 - RNA, 20 nt, Human
ccuguucagcuccagcucac

SEQ ID NO: 3321797 - RNA, 21 nt, Human
ccuguucagcuccagcucacc

SEQ ID NO: 3321798 - RNA, 14 nt, Human
ccuguucagcucca

SEQ ID NO: 3321799 - RNA, 15 nt, Human
ccuguucagcuccag

SEQ ID NO: 3321800 - RNA, 16 nt, Human
ccuguucagcuccagc

SEQ ID NO: 3321801 - RNA, 19 nt, Human
ccuguucagcuccagcuca

SEQ ID NO: 3321802 - RNA, 17 nt, Human
ccuguucuggcagaguu

SEQ ID NO: 3321803 - RNA, 12 nt, Human
ccuguucuggca

SEQ ID NO: 3321804 - RNA, 18 nt, Human
ccuguucccaugagauga

SEQ ID NO: 3321805 - RNA, 16 nt, Human
ccuguugggccaggag

SEQ ID NO: 3321806 - RNA, 20 nt, Human
ccuguugggccaggagccuc

SEQ ID NO: 3321807 - RNA, 19 nt, Human
ccuguugggccaggagccu

SEQ ID NO: 3321808 - RNA, 18 nt, Human
ccuguugggccaggagcc

SEQ ID NO: 3321809 - RNA, 17 nt, Human
ccuguugggccaggagc

SEQ ID NO: 3321810 - RNA, 16 nt, Human
ccuuagcaaauucugu

SEQ ID NO: 3321811 - RNA, 19 nt, Human
ccuuagcagggaaacagcu

SEQ ID NO: 3321812 - RNA, 20 nt, Human
ccuuagcagggaaacagcua

SEQ ID NO: 3321813 - RNA, 12 nt, Human
ccuucccaccuc

SEQ ID NO: 3321814 - RNA, 19 nt, Human
ccuucccaccucucucacu

SEQ ID NO: 3321815 - RNA, 14 nt, Human
ccuucccaccucuc

SEQ ID NO: 3321816 - RNA, 18 nt, Human
ccuuauggaacacucuga

SEQ ID NO: 3321817 - RNA, 17 nt, Human
ccuuauggaacacucug

SEQ ID NO: 3321818 - RNA, 16 nt, Human
ccuuauggaacacucu

SEQ ID NO: 3321819 - RNA, 14 nt, Human
ccuuauggaacacu

SEQ ID NO: 3321820 - RNA, 20 nt, Human
ccuuauggaacacucugaga

SEQ ID NO: 3321821 - RNA, 19 nt, Human
ccuuauggaacacucugag

SEQ ID NO: 3321822 - RNA, 22 nt, Human
ccuuauggaacacucugagacu

SEQ ID NO: 3321823 - RNA, 12 nt, Human
ccuuauggaaca

SEQ ID NO: 3321824 - RNA, 20 nt, Human
cgcugccccuggcagccccu

SEQ ID NO: 3321825 - RNA, 19 nt, Human
cgcugccccuggcagcccc

SEQ ID NO: 3321826 - RNA, 17 nt, Human
cgcuggagugcagugag

SEQ ID NO: 3321827 - RNA, 18 nt, Human
cgcuggagugcagugagc

SEQ ID NO: 3321828 - RNA, 23 nt, Human
cgccaaggcugggggaagaagcu

SEQ ID NO: 3321829 - RNA, 23 nt, Human
cggagucccaccuuggcugcagg

SEQ ID NO: 3321830 - RNA, 21 nt, Human
cggagucccaccuuggcugca

SEQ ID NO: 3321831 - RNA, 22 nt, Human
cggagucccaccuuggcugcag

SEQ ID NO: 3321832 - RNA, 15 nt, Human
cggagacggaguccc

SEQ ID NO: 3321833 - RNA, 20 nt, Human
cggagacggagucccaccuu

SEQ ID NO: 3321834 - RNA, 17 nt, Human
cggagacggagucccac

SEQ ID NO: 3321835 - RNA, 16 nt, Human
cguacacauuuuauuu

SEQ ID NO: 3321836 - RNA, 22 nt, Human
cguacacauuuuauuuuauuau

SEQ ID NO: 3321837 - RNA, 20 nt, Human
cgguggcucacgccuguaau

SEQ ID NO: 3321838 - RNA, 19 nt, Human
cgggcucagcaaaagaugc

SEQ ID NO: 3321839 - RNA, 12 nt, Human
cgggcucugccu

SEQ ID NO: 3321840 - RNA, 17 nt, Human
cgggccacagagaaagu

SEQ ID NO: 3321841 - RNA, 22 nt, Human
cuaacuugucuuuggacccuga

SEQ ID NO: 3321842 - RNA, 14 nt, Human
cuaacuugucuuug

SEQ ID NO: 3321843 - RNA, 18 nt, Human
cgugaguccuggcauggg

SEQ ID NO: 3321844 - RNA, 19 nt, Human
cgugaguccuggcauggga

SEQ ID NO: 3321845 - RNA, 15 nt, Human
cguguuaugacucca

SEQ ID NO: 3321846 - RNA, 19 nt, Human
cguguuaugacuccagaau

SEQ ID NO: 3321847 - RNA, 22 nt, Human
cgugagccacugcaccgggcca

SEQ ID NO: 3321848 - RNA, 14 nt, Human
cgugaggccagaga

SEQ ID NO: 3321849 - RNA, 14 nt, Human
cgugagccacugca

SEQ ID NO: 3321850 - RNA, 15 nt, Human
cgugagccacugcac

SEQ ID NO: 3321851 - RNA, 20 nt, Human
cgugagccacugcaccgggc

SEQ ID NO: 3321852 - RNA, 14 nt, Human
cgugacaacacuug

SEQ ID NO: 3321853 - RNA, 15 nt, Human
cgugacaacacuugu

SEQ ID NO: 3321854 - RNA, 12 nt, Human
cgugacaacacu

SEQ ID NO: 3321855 - RNA, 19 nt, Human
cuacaaaaagcauaaaaau

SEQ ID NO: 3321856 - RNA, 14 nt, Human
cuaaguuuuuaugg

SEQ ID NO: 3321857 - RNA, 14 nt, Human
ccgugaggccagag

SEQ ID NO: 3321858 - RNA, 13 nt, Human
ccgugaggccaga

SEQ ID NO: 3321859 - RNA, 12 nt, Human
ccgugaggccag

SEQ ID NO: 3321860 - RNA, 17 nt, Human
ccgucuaccugaggggc

SEQ ID NO: 3321861 - RNA, 12 nt, Human
ccggcuccaggc

SEQ ID NO: 3321862 - RNA, 13 nt, Human
ccggcuccaggcu

SEQ ID NO: 3321863 - RNA, 14 nt, Human
ccggcuccaggcuc

SEQ ID NO: 3321864 - RNA, 15 nt, Human
ccgucuaccugaggg

SEQ ID NO: 3321865 - RNA, 14 nt, Human
ccgucuaccugagg

SEQ ID NO: 3321866 - RNA, 14 nt, Human
ccuaaucuucugaa

SEQ ID NO: 3321867 - RNA, 17 nt, Human
ccuagcacuuugggagg

SEQ ID NO: 3321868 - RNA, 19 nt, Human
ccuagcauacguacacauu

SEQ ID NO: 3321869 - RNA, 18 nt, Human
ccggcaggguccuagaaa

SEQ ID NO: 3321870 - RNA, 15 nt, Human
ccggccccugcuggu

SEQ ID NO: 3321871 - RNA, 16 nt, Human
ccggccaccugcggug

SEQ ID NO: 3321872 - RNA, 20 nt, Human
cccugugauggggcccugcc

SEQ ID NO: 3321873 - RNA, 23 nt, Human
cccugugauggggcccugccucc

SEQ ID NO: 3321874 - RNA, 22 nt, Human
cccugugauggggcccugccuc

SEQ ID NO: 3321875 - RNA, 21 nt, Human
cccugugauggggcccugccu

SEQ ID NO: 3321876 - RNA, 17 nt, Human
ccgcagacaggaccagg

SEQ ID NO: 3321877 - RNA, 16 nt, Human
ccgcagacaggaccag

SEQ ID NO: 3321878 - RNA, 15 nt, Human
cccuuccucuuucca

SEQ ID NO: 3321879 - RNA, 19 nt, Human
ccgaaagggacuuggaagc

SEQ ID NO: 3321880 - RNA, 17 nt, Human
ccgaaaacguggcugcu

SEQ ID NO: 3321881 - RNA, 16 nt, Human
ccgaaaacguggcugc

SEQ ID NO: 3321882 - RNA, 15 nt, Human
ccgcagacaggacca

SEQ ID NO: 3321883 - RNA, 13 nt, Human
ccgaccagacacc

SEQ ID NO: 3321884 - RNA, 17 nt, Human
ccgaccagacaccuuga

SEQ ID NO: 3321885 - RNA, 16 nt, Human
ccgaauagcugggacu

SEQ ID NO: 3321886 - RNA, 20 nt, Human
cccugcccaccuggccucug

SEQ ID NO: 3321887 - RNA, 16 nt, Human
cccugagcuuucugcu

SEQ ID NO: 3321888 - RNA, 14 nt, Human
cccugcccggcugc

SEQ ID NO: 3321889 - RNA, 17 nt, Human
cccugcccggcugcgga

SEQ ID NO: 3321890 - RNA, 22 nt, Human
cccugcccaccuggccucugca

SEQ ID NO: 3321891 - RNA, 13 nt, Human
cccuggaugcagc

SEQ ID NO: 3321892 - RNA, 21 nt, Human
cccuggaugcagccucacagu

SEQ ID NO: 3321893 - RNA, 17 nt, Human
cccuggaugcagccuca

SEQ ID NO: 3321894 - RNA, 18 nt, Human
cccugaaagcccugagcu

SEQ ID NO: 3321895 - RNA, 14 nt, Human
cccugacaacacuc

SEQ ID NO: 3321896 - RNA, 22 nt, Human
cccugaaggccccgcccaggcu

SEQ ID NO: 3321897 - RNA, 20 nt, Human
cccugaaggccccgcccagg

SEQ ID NO: 3321898 - RNA, 22 nt, Human
cccugacaacacucauugaccu

SEQ ID NO: 3321899 - RNA, 16 nt, Human
cccugacaacacucau

SEQ ID NO: 3321900 - RNA, 19 nt, Human
cccugaaggccccgcccag

SEQ ID NO: 3321901 - RNA, 16 nt, Human
cccugaaggccccgcc

SEQ ID NO: 3321902 - RNA, 14 nt, Human
cccugaaggccccg

SEQ ID NO: 3321903 - RNA, 13 nt, Human
cccugaaggcccc

SEQ ID NO: 3321904 - RNA, 16 nt, Human
cccugaaagcccugag

SEQ ID NO: 3321905 - RNA, 12 nt, Human
cccugaaggccc

SEQ ID NO: 3321906 - RNA, 16 nt, Human
ccucuuugagugaagc

SEQ ID NO: 3321907 - RNA, 12 nt, Human
ccugaggggccu

SEQ ID NO: 3321908 - RNA, 21 nt, Human
ccugaggcugggcucccuucc

SEQ ID NO: 3321909 - RNA, 19 nt, Human
ccugaggcugggcucccuu

SEQ ID NO: 3321910 - RNA, 17 nt, Human
ccugaggcugggcuccc

SEQ ID NO: 3321911 - RNA, 16 nt, Human
ccugaggcugggcucc

SEQ ID NO: 3321912 - RNA, 21 nt, Human
ccugcaggcagccaggccaca

SEQ ID NO: 3321913 - RNA, 20 nt, Human
ccugcaggcagccaggccac

SEQ ID NO: 3321914 - RNA, 19 nt, Human
ccugcaggcagccaggcca

SEQ ID NO: 3321915 - RNA, 18 nt, Human
ccugcaggcagccaggcc

SEQ ID NO: 3321916 - RNA, 17 nt, Human
ccugcaggcagccaggc

SEQ ID NO: 3321917 - RNA, 16 nt, Human
ccugcaggcagccagg

SEQ ID NO: 3321918 - RNA, 12 nt, Human
ccugcagagggc

SEQ ID NO: 3321919 - RNA, 15 nt, Human
ccugcaggcagccag

SEQ ID NO: 3321920 - RNA, 15 nt, Human
ccugccucuucucua

SEQ ID NO: 3321921 - RNA, 21 nt, Human
ccugcugcaguugccagucac

SEQ ID NO: 3321922 - RNA, 22 nt, Human
ccugcugcaguugccagucacc

SEQ ID NO: 3321923 - RNA, 11 nt, Human
ccugcugcagu

SEQ ID NO: 3321924 - RNA, 12 nt, Human
ccugcugcaguu

SEQ ID NO: 3321925 - RNA, 20 nt, Human
ccugccuccuuugugaggaa

SEQ ID NO: 3321926 - RNA, 19 nt, Human
ccugccuccuuugugagga

SEQ ID NO: 3321927 - RNA, 15 nt, Human
ccugccuccuuugug

SEQ ID NO: 3321928 - RNA, 13 nt, Human
ccugccuccuuug

SEQ ID NO: 3321929 - RNA, 22 nt, Human
ccugccuccuuugugaggaagc

SEQ ID NO: 3321930 - RNA, 21 nt, Human
ccugccuccuuugugaggaag

SEQ ID NO: 3321931 - RNA, 23 nt, Human
ccugccuccuuugugaggaagcc

SEQ ID NO: 3321932 - RNA, 20 nt, Human
ccucugccucugacacacag

SEQ ID NO: 3321933 - RNA, 21 nt, Human
ccucugccucugacacacagc

SEQ ID NO: 3321934 - RNA, 23 nt, Human
ccucugccucugacacacagcuc

SEQ ID NO: 3321935 - RNA, 11 nt, Human
ccucugccuga

SEQ ID NO: 3321936 - RNA, 20 nt, Human
ccucugccugaagucacaca

SEQ ID NO: 3321937 - RNA, 16 nt, Human
ccucgaacuggcugca

SEQ ID NO: 3321938 - RNA, 15 nt, Human
ccucgaacuggcugc

SEQ ID NO: 3321939 - RNA, 18 nt, Human
ccuccuuugugaggaagc

SEQ ID NO: 3321940 - RNA, 19 nt, Human
ccuccuuugugaggaagcc

SEQ ID NO: 3321941 - RNA, 17 nt, Human
ccucccaccucagccuc

SEQ ID NO: 3321942 - RNA, 21 nt, Human
ccucccaacucaccccagccc

SEQ ID NO: 3321943 - RNA, 20 nt, Human
ccucccaacucaccccagcc

SEQ ID NO: 3321944 - RNA, 17 nt, Human
ccucccaacucacccca

SEQ ID NO: 3321945 - RNA, 11 nt, Human
ccucaggcagg

SEQ ID NO: 3321946 - RNA, 18 nt, Human
cccaccaucaugucuggc

SEQ ID NO: 3321947 - RNA, 15 nt, Human
cccacccaagggccu

SEQ ID NO: 3321948 - RNA, 15 nt, Human
cccaagcucugcucc

SEQ ID NO: 3321949 - RNA, 17 nt, Human
cccaagcucugcuccuc

SEQ ID NO: 3321950 - RNA, 18 nt, Human
cccaccgcagacaggacc

SEQ ID NO: 3321951 - RNA, 15 nt, Human
cccaccgcagacagg

SEQ ID NO: 3321952 - RNA, 16 nt, Human
ccaugaggaacaaggc

SEQ ID NO: 3321953 - RNA, 17 nt, Human
ccaugaggaacaaggca

SEQ ID NO: 3321954 - RNA, 17 nt, Human
ccaugggccuccugugu

SEQ ID NO: 3321955 - RNA, 14 nt, Human
cccccuuccaugga

SEQ ID NO: 3321956 - RNA, 12 nt, Human
ccccgcccaggc

SEQ ID NO: 3321957 - RNA, 13 nt, Human
ccccggccaccug

SEQ ID NO: 3321958 - RNA, 18 nt, Human
ccccggccaccugcggug

SEQ ID NO: 3321959 - RNA, 14 nt, Human
ccccggccaccugc

SEQ ID NO: 3321960 - RNA, 14 nt, Human
ccccgcccaggcuu

SEQ ID NO: 3321961 - RNA, 12 nt, Human
ccccagccccaa

SEQ ID NO: 3321962 - RNA, 10 nt, Human
ccccagcccc

SEQ ID NO: 3321963 - RNA, 21 nt, Human
ccccauucugccugcccaggc

SEQ ID NO: 3321964 - RNA, 14 nt, Human
ccccagccccaaaa

SEQ ID NO: 3321965 - RNA, 14 nt, Human
ccccagccccaucc

SEQ ID NO: 3321966 - RNA, 20 nt, Human
ccccaaaacucuccucugcu

SEQ ID NO: 3321967 - RNA, 18 nt, Human
ccccaaaacucuccucug

SEQ ID NO: 3321968 - RNA, 23 nt, Human
cccauucugccugcccaggcccc

SEQ ID NO: 3321969 - RNA, 17 nt, Human
cccagcccacuucugcc

SEQ ID NO: 3321970 - RNA, 19 nt, Human
cccagcccacuucugccau

SEQ ID NO: 3321971 - RNA, 21 nt, Human
cccagccccaaaacucuccuc

SEQ ID NO: 3321972 - RNA, 23 nt, Human
cccagccccaaaacucuccucug

SEQ ID NO: 3321973 - RNA, 19 nt, Human
cccauccucuguacagagc

SEQ ID NO: 3321974 - RNA, 15 nt, Human
cccauccucuguaca

SEQ ID NO: 3321975 - RNA, 13 nt, Human
cccauccucugua

SEQ ID NO: 3321976 - RNA, 14 nt, Human
cccauccucuguac

SEQ ID NO: 3321977 - RNA, 19 nt, Human
cccaggcuggcgugcagug

SEQ ID NO: 3321978 - RNA, 20 nt, Human
cccaggcuggcgugcagugg

SEQ ID NO: 3321979 - RNA, 18 nt, Human
cccaggcuggcgugcagu

SEQ ID NO: 3321980 - RNA, 19 nt, Human
ccacugcacuauagccuag

SEQ ID NO: 3321981 - RNA, 20 nt, Human
ccacugcacuauagccuagg

SEQ ID NO: 3321982 - RNA, 13 nt, Human
ccacugcaccggg

SEQ ID NO: 3321983 - RNA, 14 nt, Human
ccacugcaccgggc

SEQ ID NO: 3321984 - RNA, 17 nt, Human
ccacugcaccgggccac

SEQ ID NO: 3321985 - RNA, 19 nt, Human
ccacugcaccgggccacag

SEQ ID NO: 3321986 - RNA, 13 nt, Human
ccacuuucuagcc

SEQ ID NO: 3321987 - RNA, 19 nt, Human
ccacuuucuagccagagga

SEQ ID NO: 3321988 - RNA, 18 nt, Human
ccacuuucuagccagagg

SEQ ID NO: 3321989 - RNA, 20 nt, Human
ccacuuucuagccagaggag

SEQ ID NO: 3321990 - RNA, 17 nt, Human
ccagacccggcugcgug

SEQ ID NO: 3321991 - RNA, 16 nt, Human
ccagacccggcugcgu

SEQ ID NO: 3321992 - RNA, 21 nt, Human
ccacuuuuguucuugguuugu

SEQ ID NO: 3321993 - RNA, 15 nt, Human
ccacuuuuguucuug

SEQ ID NO: 3321994 - RNA, 14 nt, Human
ccacuuuuguucuu

SEQ ID NO: 3321995 - RNA, 18 nt, Human
ccagagacacaagccuuc

SEQ ID NO: 3321996 - RNA, 16 nt, Human
ccagagacacaagccu

SEQ ID NO: 3321997 - RNA, 20 nt, Human
ccagagggccugcaagggag

SEQ ID NO: 3321998 - RNA, 13 nt, Human
ccagaugcaccag

SEQ ID NO: 3321999 - RNA, 14 nt, Human
ccagaugcaccagc

SEQ ID NO: 3322000 - RNA, 19 nt, Human
ccaggggugggacacccug

SEQ ID NO: 3322001 - RNA, 13 nt, Human
ccaguaucuugaa

SEQ ID NO: 3322002 - RNA, 22 nt, Human
ccaggggugggacacccuguga

SEQ ID NO: 3322003 - RNA, 21 nt, Human
ccaggggugggacacccugug

SEQ ID NO: 3322004 - RNA, 20 nt, Human
ccaggggugggacacccugu

SEQ ID NO: 3322005 - RNA, 22 nt, Human
ccaguaucuugaagacuuuucu

SEQ ID NO: 3322006 - RNA, 19 nt, Human
ccaguaucuugaagacuuu

SEQ ID NO: 3322007 - RNA, 16 nt, Human
ccagucaccccggcca

SEQ ID NO: 3322008 - RNA, 13 nt, Human
ccagucaccccgg

SEQ ID NO: 3322009 - RNA, 18 nt, Human
ccagucaccccggccacc

SEQ ID NO: 3322010 - RNA, 17 nt, Human
ccagucaccccggccac

SEQ ID NO: 3322011 - RNA, 17 nt, Human
ccaggaaaggcuccagg

SEQ ID NO: 3322012 - RNA, 19 nt, Human
ccaggaaaggcuccaggag

SEQ ID NO: 3322013 - RNA, 18 nt, Human
ccaggaaaggcuccagga

SEQ ID NO: 3322014 - RNA, 12 nt, Human
ccagccccugga

SEQ ID NO: 3322015 - RNA, 21 nt, Human
ccagcgagcccugguggcagu

SEQ ID NO: 3322016 - RNA, 17 nt, Human
ccagccccuucugaccc

SEQ ID NO: 3322017 - RNA, 16 nt, Human
ccagccccuucugacc

SEQ ID NO: 3322018 - RNA, 15 nt, Human
ccagccccuucugac

SEQ ID NO: 3322019 - RNA, 18 nt, Human
ccagccccauccucugua

SEQ ID NO: 3322020 - RNA, 23 nt, Human
ccagccccauccucuguacagag

SEQ ID NO: 3322021 - RNA, 13 nt, Human
ccagcagccugga

SEQ ID NO: 3322022 - RNA, 15 nt, Human
ccagccccuggaugc

SEQ ID NO: 3322023 - RNA, 14 nt, Human
ccagccccuggaug

SEQ ID NO: 3322024 - RNA, 13 nt, Human
ccagccccuggau

SEQ ID NO: 3322025 - RNA, 12 nt, Human
ccagcagccugg

SEQ ID NO: 3322026 - RNA, 11 nt, Human
ccagcagccug

SEQ ID NO: 3322027 - RNA, 12 nt, Human
ccagcagaaaug

SEQ ID NO: 3322028 - RNA, 22 nt, Human
ccagcagaaaugccuuacccuc

SEQ ID NO: 3322029 - RNA, 17 nt, Human
ccagcagaaaugccuua

SEQ ID NO: 3322030 - RNA, 16 nt, Human
ccagcagaaaugccuu

SEQ ID NO: 3322031 - RNA, 17 nt, Human
caggaaaggcuccagga

SEQ ID NO: 3322032 - RNA, 16 nt, Human
caggaaaggcuccagg

SEQ ID NO: 3322033 - RNA, 19 nt, Human
caggaaaggcuccaggagc

SEQ ID NO: 3322034 - RNA, 21 nt, Human
cagcugacuuuucuguccgag

SEQ ID NO: 3322035 - RNA, 15 nt, Human
cagccugcuccagcu

SEQ ID NO: 3322036 - RNA, 19 nt, Human
cagccugcuccagcuguuc

SEQ ID NO: 3322037 - RNA, 17 nt, Human
cagccugcuccagcugu

SEQ ID NO: 3322038 - RNA, 16 nt, Human
cagccugcuccagcug

SEQ ID NO: 3322039 - RNA, 19 nt, Human
cagcguuucuaugacacau

SEQ ID NO: 3322040 - RNA, 15 nt, Human
cagcuaacauggaag

SEQ ID NO: 3322041 - RNA, 23 nt, Human
caggccagcugcuugggcuucau

SEQ ID NO: 3322042 - RNA, 12 nt, Human
caggccaggccc

SEQ ID NO: 3322043 - RNA, 11 nt, Human
caggccaggcc

SEQ ID NO: 3322044 - RNA, 19 nt, Human
caggaggaucacuugaguc

SEQ ID NO: 3322045 - RNA, 22 nt, Human
caggaggccagccuugaccauu

SEQ ID NO: 3322046 - RNA, 19 nt, Human
caggaggccagccuugacc

SEQ ID NO: 3322047 - RNA, 18 nt, Human
caggaggccagccuugac

SEQ ID NO: 3322048 - RNA, 14 nt, Human
caggcaaugcuggc

SEQ ID NO: 3322049 - RNA, 15 nt, Human
caggcaaugcuggcu

SEQ ID NO: 3322050 - RNA, 16 nt, Human
caggcaaugcuggcug

SEQ ID NO: 3322051 - RNA, 13 nt, Human
caggaccucaggu

SEQ ID NO: 3322052 - RNA, 23 nt, Human
caggaccucaggugagaagcaga

SEQ ID NO: 3322053 - RNA, 16 nt, Human
caggaccucaggugag

SEQ ID NO: 3322054 - RNA, 21 nt, Human
caggaccagggauuuccauga

SEQ ID NO: 3322055 - RNA, 14 nt, Human
caggccuccuacag

SEQ ID NO: 3322056 - RNA, 12 nt, Human
caggccuccuac

SEQ ID NO: 3322057 - RNA, 20 nt, Human
caggcugggagagccuucca

SEQ ID NO: 3322058 - RNA, 21 nt, Human
caggcugggagagccuuccag

SEQ ID NO: 3322059 - RNA, 16 nt, Human
caggggaaaagaggag

SEQ ID NO: 3322060 - RNA, 14 nt, Human
caggggaaaagagg

SEQ ID NO: 3322061 - RNA, 23 nt, Human
caggcugggagagccuuccaggg

SEQ ID NO: 3322062 - RNA, 22 nt, Human
caggcugggagagccuuccagg

SEQ ID NO: 3322063 - RNA, 20 nt, Human
cagcacgauuucuguuuaga

SEQ ID NO: 3322064 - RNA, 15 nt, Human
cagcacgauuucugu

SEQ ID NO: 3322065 - RNA, 14 nt, Human
cagcacgauuucug

SEQ ID NO: 3322066 - RNA, 22 nt, Human
cagccaggccacaagacccuug

SEQ ID NO: 3322067 - RNA, 18 nt, Human
cagauugcaacaggcugg

SEQ ID NO: 3322068 - RNA, 19 nt, Human
cagauuucacucuccuugg

SEQ ID NO: 3322069 - RNA, 17 nt, Human
cagcaccaucucuccuc

SEQ ID NO: 3322070 - RNA, 19 nt, Human
cagcaccaucucuccuccu

SEQ ID NO: 3322071 - RNA, 17 nt, Human
cagauugcaacaggcug

SEQ ID NO: 3322072 - RNA, 19 nt, Human
cagauugcaacaggcuggg

SEQ ID NO: 3322073 - RNA, 20 nt, Human
cagauugcaacaggcugggc

SEQ ID NO: 3322074 - RNA, 20 nt, Human
cagauuucacucuccuuggu

SEQ ID NO: 3322075 - RNA, 16 nt, Human
cagaggggguggccuc

SEQ ID NO: 3322076 - RNA, 14 nt, Human
cagaggggguggcc

SEQ ID NO: 3322077 - RNA, 19 nt, Human
cagauacuuggggggcuga

SEQ ID NO: 3322078 - RNA, 19 nt, Human
cagauagauauaugcucug

SEQ ID NO: 3322079 - RNA, 23 nt, Human
cagagacuccugcaggcagccag

SEQ ID NO: 3322080 - RNA, 20 nt, Human
cagagaggguggugaccucu

SEQ ID NO: 3322081 - RNA, 22 nt, Human
cagagaggguggugaccucugc

SEQ ID NO: 3322082 - RNA, 17 nt, Human
cagagaggguggugacc

SEQ ID NO: 3322083 - RNA, 12 nt, Human
cagagagggugg

SEQ ID NO: 3322084 - RNA, 13 nt, Human
cagaggggguggc

SEQ ID NO: 3322085 - RNA, 19 nt, Human
cagaggaaagcaaaggaga

SEQ ID NO: 3322086 - RNA, 17 nt, Human
cagaggaaagcaaagga

SEQ ID NO: 3322087 - RNA, 23 nt, Human
cagagagggugggagugggccca

SEQ ID NO: 3322088 - RNA, 23 nt, Human
cagagaggguggugaccucugcc

SEQ ID NO: 3322089 - RNA, 20 nt, Human
cagagagguuaaggugggua

SEQ ID NO: 3322090 - RNA, 13 nt, Human
cagagcugccacc

SEQ ID NO: 3322091 - RNA, 20 nt, Human
cagacuggaagcacagcuuc

SEQ ID NO: 3322092 - RNA, 21 nt, Human
cagacuggaagcacagcuuca

SEQ ID NO: 3322093 - RNA, 13 nt, Human
cagacuggaagca

SEQ ID NO: 3322094 - RNA, 14 nt, Human
cagacuggaagcac

SEQ ID NO: 3322095 - RNA, 16 nt, Human
cagacuggaagcacag

SEQ ID NO: 3322096 - RNA, 17 nt, Human
cagacuggaagcacagc

SEQ ID NO: 3322097 - RNA, 18 nt, Human
cagacuggaagcacagcu

SEQ ID NO: 3322098 - RNA, 23 nt, Human
cagacucuacagaggccaugggc

SEQ ID NO: 3322099 - RNA, 18 nt, Human
cagacucuacagaggcca

SEQ ID NO: 3322100 - RNA, 19 nt, Human
cagacucuacagaggccau

SEQ ID NO: 3322101 - RNA, 20 nt, Human
cagacucuacagaggccaug

SEQ ID NO: 3322102 - RNA, 21 nt, Human
cagacucuacagaggccaugg

SEQ ID NO: 3322103 - RNA, 17 nt, Human
cagacucuacagaggcc

SEQ ID NO: 3322104 - RNA, 22 nt, Human
cagacaggcaagcaccuccugc

SEQ ID NO: 3322105 - RNA, 23 nt, Human
cagacaggcaagcaccuccugcc

SEQ ID NO: 3322106 - RNA, 11 nt, Human
cagacaggcaa

SEQ ID NO: 3322107 - RNA, 24 nt, Human
cagacaggaccagggauuuccaug

SEQ ID NO: 3322108 - RNA, 17 nt, Human
cagacaggaccagggau

SEQ ID NO: 3322109 - RNA, 13 nt, Human
cagacaggcaagc

SEQ ID NO: 3322110 - RNA, 18 nt, Human
cagacaggcaagcaccuc

SEQ ID NO: 3322111 - RNA, 20 nt, Human
cagacaggcaagcaccuccu

SEQ ID NO: 3322112 - RNA, 21 nt, Human
cagacaggcaagcaccuccug

SEQ ID NO: 3322113 - RNA, 18 nt, Human
cagacagcugccugggau

SEQ ID NO: 3322114 - RNA, 17 nt, Human
cagacagcugccuggga

SEQ ID NO: 3322115 - RNA, 16 nt, Human
cagacagcugccuggg

SEQ ID NO: 3322116 - RNA, 15 nt, Human
cagacagcugccugg

SEQ ID NO: 3322117 - RNA, 16 nt, Human
cagacaggaccaggga

SEQ ID NO: 3322118 - RNA, 15 nt, Human
cagacaggaccaggg

SEQ ID NO: 3322119 - RNA, 13 nt, Human
cagacaggaccag

SEQ ID NO: 3322120 - RNA, 14 nt, Human
cagacagcugccug

SEQ ID NO: 3322121 - RNA, 13 nt, Human
cagacagcugccu

SEQ ID NO: 3322122 - RNA, 22 nt, Human
cauuuuuuuuaagaaaaaggau

SEQ ID NO: 3322123 - RNA, 23 nt, Human
cauuuuuuuuaagaaaaaggaug

SEQ ID NO: 3322124 - RNA, 18 nt, Human
cauuuaggugaggaagca

SEQ ID NO: 3322125 - RNA, 16 nt, Human
cauuuaggugaggaag

SEQ ID NO: 3322126 - RNA, 23 nt, Human
ccaauggacuaacuugucuuugg

SEQ ID NO: 3322127 - RNA, 21 nt, Human
ccaacucaccccagccccaaa

SEQ ID NO: 3322128 - RNA, 13 nt, Human
ccaagcucugcuc

SEQ ID NO: 3322129 - RNA, 16 nt, Human
ccaagcucugcuccuc

SEQ ID NO: 3322130 - RNA, 14 nt, Human
ccaagcucugcucc

SEQ ID NO: 3322131 - RNA, 15 nt, Human
ccaagcucugcuccu

SEQ ID NO: 3322132 - RNA, 15 nt, Human
ccaaaucagcugcua

SEQ ID NO: 3322133 - RNA, 23 nt, Human
ccaaaucagcugcuacuacuccu

SEQ ID NO: 3322134 - RNA, 13 nt, Human
ccaacucacccca

SEQ ID NO: 3322135 - RNA, 20 nt, Human
ccaaaguacacuguuucaaa

SEQ ID NO: 3322136 - RNA, 22 nt, Human
ccaaaguacacuguuucaaacu

SEQ ID NO: 3322137 - RNA, 18 nt, Human
cauguuggccaggcuggu

SEQ ID NO: 3322138 - RNA, 17 nt, Human
cauguuggccaggcugg

SEQ ID NO: 3322139 - RNA, 18 nt, Human
cauguucuuaauucuuag

SEQ ID NO: 3322140 - RNA, 21 nt, Human
cauguuacauaagauaaaugu

SEQ ID NO: 3322141 - RNA, 16 nt, Human
cauguucuuaauucuu

SEQ ID NO: 3322142 - RNA, 13 nt, Human
cauguucuuaauu

SEQ ID NO: 3322143 - RNA, 15 nt, Human
cauguccaagaagcc

SEQ ID NO: 3322144 - RNA, 16 nt, Human
cauguuacauaagaua

SEQ ID NO: 3322145 - RNA, 17 nt, Human
cauguuacauaagauaa

SEQ ID NO: 3322146 - RNA, 20 nt, Human
cauucuccuuguguuacuaa

SEQ ID NO: 3322147 - RNA, 19 nt, Human
cauucuccaccugccaggg

SEQ ID NO: 3322148 - RNA, 18 nt, Human
cauucuccaccugccagg

SEQ ID NO: 3322149 - RNA, 17 nt, Human
cauucuccaccugccag

SEQ ID NO: 3322150 - RNA, 17 nt, Human
caugcuccuggcccacu

SEQ ID NO: 3322151 - RNA, 16 nt, Human
caugcuccuggcccac

SEQ ID NO: 3322152 - RNA, 14 nt, Human
caugcuccuggccc

SEQ ID NO: 3322153 - RNA, 18 nt, Human
caugggaaaggggaaguu

SEQ ID NO: 3322154 - RNA, 21 nt, Human
cauggccucuucagaucucua

SEQ ID NO: 3322155 - RNA, 12 nt, Human
caugcaagguca

SEQ ID NO: 3322156 - RNA, 13 nt, Human
caugacaaagacu

SEQ ID NO: 3322157 - RNA, 23 nt, Human
cagucugauucccaagcucugcu

SEQ ID NO: 3322158 - RNA, 21 nt, Human
cagugcccacaggaucagucu

SEQ ID NO: 3322159 - RNA, 18 nt, Human
cagugcccacaggaucag

SEQ ID NO: 3322160 - RNA, 22 nt, Human
cagugcccacaggaucagucug

SEQ ID NO: 3322161 - RNA, 16 nt, Human
cagugggagcugccug

SEQ ID NO: 3322162 - RNA, 15 nt, Human
cagugggagcugccu

SEQ ID NO: 3322163 - RNA, 17 nt, Human
cagugggagcugccugu

SEQ ID NO: 3322164 - RNA, 18 nt, Human
cagugggagcugccuguu

SEQ ID NO: 3322165 - RNA, 20 nt, Human
cagugguaugaucacggcuc

SEQ ID NO: 3322166 - RNA, 20 nt, Human
caguuacucagaauucucua

SEQ ID NO: 3322167 - RNA, 21 nt, Human
cagugguaugaucacggcuca

SEQ ID NO: 3322168 - RNA, 19 nt, Human
caguggugcgaucuggguu

SEQ ID NO: 3322169 - RNA, 14 nt, Human
caguuacucagaau

SEQ ID NO: 3322170 - RNA, 21 nt, Human
cagucugauucccaagcucug

SEQ ID NO: 3322171 - RNA, 22 nt, Human
cagucugauucccaagcucugc

SEQ ID NO: 3322172 - RNA, 23 nt, Human
cauagcagagaaugaaagggccc

SEQ ID NO: 3322173 - RNA, 22 nt, Human
cauauuaccacagacauacuaa

SEQ ID NO: 3322174 - RNA, 23 nt, Human
cauaaugcgugcauaccacuuuu

SEQ ID NO: 3322175 - RNA, 16 nt, Human
cauacaguuugcacuu

SEQ ID NO: 3322176 - RNA, 23 nt, Human
cauacaggaagguagaaauaucu

SEQ ID NO: 3322177 - RNA, 22 nt, Human
caguuguuagugugucuuagug

SEQ ID NO: 3322178 - RNA, 18 nt, Human
caguuguuagugugucuu

SEQ ID NO: 3322179 - RNA, 21 nt, Human
caguuuguuaguaugaggcau

SEQ ID NO: 3322180 - RNA, 23 nt, Human
caguuuguuaguaugaggcauuu

SEQ ID NO: 3322181 - RNA, 21 nt, Human
caucagcacgauuucuguuua

SEQ ID NO: 3322182 - RNA, 19 nt, Human
caucagcacgauuucuguu

SEQ ID NO: 3322183 - RNA, 19 nt, Human
caucccaaacccuucagug

SEQ ID NO: 3322184 - RNA, 22 nt, Human
cauccucuguacagagcccacg

SEQ ID NO: 3322185 - RNA, 21 nt, Human
cauccucuguacagagcccac

SEQ ID NO: 3322186 - RNA, 20 nt, Human
caucccaaacccuucagugc

SEQ ID NO: 3322187 - RNA, 11 nt, Human
caucccagccc

SEQ ID NO: 3322188 - RNA, 14 nt, Human
auucauauuuacuu

SEQ ID NO: 3322189 - RNA, 19 nt, Human
auucucuaguuugauuaaa

SEQ ID NO: 3322190 - RNA, 20 nt, Human
auucucuaguuugauuaaau

SEQ ID NO: 3322191 - RNA, 23 nt, Human
auucucuaguuugauuaaauucu

SEQ ID NO: 3322192 - RNA, 12 nt, Human
auucucuuaucc

SEQ ID NO: 3322193 - RNA, 14 nt, Human
auucucuuauccaa

SEQ ID NO: 3322194 - RNA, 15 nt, Human
auucucuuauccaac

SEQ ID NO: 3322195 - RNA, 22 nt, Human
auuacaagcgugagccacugca

SEQ ID NO: 3322196 - RNA, 19 nt, Human
caaaagcaucuaugugaga

SEQ ID NO: 3322197 - RNA, 13 nt, Human
caaaagcauguga

SEQ ID NO: 3322198 - RNA, 20 nt, Human
caaaagguuaauaaaguaau

SEQ ID NO: 3322199 - RNA, 21 nt, Human
auuuuguuuuugucuuaaaaa

SEQ ID NO: 3322200 - RNA, 22 nt, Human
auuuuguuuuugucuuaaaaag

SEQ ID NO: 3322201 - RNA, 16 nt, Human
auuuuuauuaaauuau

SEQ ID NO: 3322202 - RNA, 16 nt, Human
caaaccaucauugaaa

SEQ ID NO: 3322203 - RNA, 14 nt, Human
caaaccaucauuga

SEQ ID NO: 3322204 - RNA, 17 nt, Human
caaaccaucauugaaau

SEQ ID NO: 3322205 - RNA, 14 nt, Human
auuuguuauaauga

SEQ ID NO: 3322206 - RNA, 12 nt, Human
auuucacucucc

SEQ ID NO: 3322207 - RNA, 19 nt, Human
auuucuguuuagauaauac

SEQ ID NO: 3322208 - RNA, 20 nt, Human
auuucuguuuagauaauaca

SEQ ID NO: 3322209 - RNA, 21 nt, Human
auuucuguuuagauaauacac

SEQ ID NO: 3322210 - RNA, 15 nt, Human
cacuacauucuguua

SEQ ID NO: 3322211 - RNA, 22 nt, Human
cacggaagagccuugcggaagg

SEQ ID NO: 3322212 - RNA, 16 nt, Human
cacggaagagccuugc

SEQ ID NO: 3322213 - RNA, 21 nt, Human
cacuacauuauaaaugucucu

SEQ ID NO: 3322214 - RNA, 14 nt, Human
cacuacauucuguu

SEQ ID NO: 3322215 - RNA, 13 nt, Human
cacuacauucugu

SEQ ID NO: 3322216 - RNA, 21 nt, Human
cacgcuggagugcagugagcc

SEQ ID NO: 3322217 - RNA, 16 nt, Human
cacgcuggagugcagu

SEQ ID NO: 3322218 - RNA, 17 nt, Human
cacgcuggagugcagug

SEQ ID NO: 3322219 - RNA, 18 nt, Human
cacgcuggagugcaguga

SEQ ID NO: 3322220 - RNA, 20 nt, Human
cacgcuggagugcagugagc

SEQ ID NO: 3322221 - RNA, 15 nt, Human
cacgcuggagugcag

SEQ ID NO: 3322222 - RNA, 17 nt, Human
cacccuggggagaaagu

SEQ ID NO: 3322223 - RNA, 12 nt, Human
caccugccaggg

SEQ ID NO: 3322224 - RNA, 11 nt, Human
caccugccagg

SEQ ID NO: 3322225 - RNA, 21 nt, Human
caccugccccucaacucuccu

SEQ ID NO: 3322226 - RNA, 18 nt, Human
caccugccccucaacucu

SEQ ID NO: 3322227 - RNA, 16 nt, Human
caccugccccucaacu

SEQ ID NO: 3322228 - RNA, 12 nt, Human
cacccugcucuc

SEQ ID NO: 3322229 - RNA, 12 nt, Human
cacccuccuuuc

SEQ ID NO: 3322230 - RNA, 24 nt, Human
caccugccuguugggccaggagcc

SEQ ID NO: 3322231 - RNA, 16 nt, Human
caccugcggugcuauc

SEQ ID NO: 3322232 - RNA, 19 nt, Human
caccugcggugcuaucucc

SEQ ID NO: 3322233 - RNA, 17 nt, Human
caccugcggugcuaucu

SEQ ID NO: 3322234 - RNA, 13 nt, Human
cacaucuugcucu

SEQ ID NO: 3322235 - RNA, 14 nt, Human
cacaucuugcucug

SEQ ID NO: 3322236 - RNA, 15 nt, Human
cacaucuugcucugc

SEQ ID NO: 3322237 - RNA, 20 nt, Human
cacaucuugcucugcugaca

SEQ ID NO: 3322238 - RNA, 21 nt, Human
cacaucuugcucugcugacag

SEQ ID NO: 3322239 - RNA, 22 nt, Human
cacaucuugcucugcugacaga

SEQ ID NO: 3322240 - RNA, 12 nt, Human
cacccagcccac

SEQ ID NO: 3322241 - RNA, 23 nt, Human
cacaucuugcucugcugacagac

SEQ ID NO: 3322242 - RNA, 19 nt, Human
cacaucuugcucugcugac

SEQ ID NO: 3322243 - RNA, 17 nt, Human
cacauuuauucugcuca

SEQ ID NO: 3322244 - RNA, 18 nt, Human
cacauuuauucugcucac

SEQ ID NO: 3322245 - RNA, 17 nt, Human
caccagccccagugccc

SEQ ID NO: 3322246 - RNA, 18 nt, Human
caccagccccagugccca

SEQ ID NO: 3322247 - RNA, 21 nt, Human
caccagccccagugcccacag

SEQ ID NO: 3322248 - RNA, 22 nt, Human
caccagccccagugcccacagg

SEQ ID NO: 3322249 - RNA, 16 nt, Human
caccagccccagugcc

SEQ ID NO: 3322250 - RNA, 19 nt, Human
caccagcccuuagcaggga

SEQ ID NO: 3322251 - RNA, 15 nt, Human
caagaagcccaggaa

SEQ ID NO: 3322252 - RNA, 14 nt, Human
caagaagcccagga

SEQ ID NO: 3322253 - RNA, 17 nt, Human
caagaaggaugauucaa

SEQ ID NO: 3322254 - RNA, 18 nt, Human
caagaagcccaggaaagg

SEQ ID NO: 3322255 - RNA, 14 nt, Human
caaccccuucgcuc

SEQ ID NO: 3322256 - RNA, 16 nt, Human
caaccccuucgcuccu

SEQ ID NO: 3322257 - RNA, 14 nt, Human
caagaccacguuuc

SEQ ID NO: 3322258 - RNA, 13 nt, Human
caagcaccuccug

SEQ ID NO: 3322259 - RNA, 14 nt, Human
caaucaaaucugcu

SEQ ID NO: 3322260 - RNA, 13 nt, Human
caauggcagccuu

SEQ ID NO: 3322261 - RNA, 14 nt, Human
caauggcagccuug

SEQ ID NO: 3322262 - RNA, 15 nt, Human
caauggcagccuugg

SEQ ID NO: 3322263 - RNA, 13 nt, Human
caauuuauuaugg

SEQ ID NO: 3322264 - RNA, 20 nt, Human
caauuuauuauggcacauca

SEQ ID NO: 3322265 - RNA, 15 nt, Human
caagcucugcuccuc

SEQ ID NO: 3322266 - RNA, 16 nt, Human
caagcucugcuccucu

SEQ ID NO: 3322267 - RNA, 17 nt, Human
caagcucccaggcauuc

SEQ ID NO: 3322268 - RNA, 15 nt, Human
caagcucccaggcau

SEQ ID NO: 3322269 - RNA, 14 nt, Human
caagcucccaggca

SEQ ID NO: 3322270 - RNA, 12 nt, Human
caagcucccagg

SEQ ID NO: 3322271 - RNA, 21 nt, Human
caagcuccaagcucccaggca

SEQ ID NO: 3322272 - RNA, 19 nt, Human
caagcuccaagcucccagg

SEQ ID NO: 3322273 - RNA, 18 nt, Human
caagcuccaagcucccag

SEQ ID NO: 3322274 - RNA, 17 nt, Human
caagcuccaagcuccca

SEQ ID NO: 3322275 - RNA, 14 nt, Human
caaggcaaggcugu

SEQ ID NO: 3322276 - RNA, 19 nt, Human
caaggauugcuacuguccu

SEQ ID NO: 3322277 - RNA, 20 nt, Human
caaggauugcuacuguccua

SEQ ID NO: 3322278 - RNA, 22 nt, Human
caaguauuauaccuuuuuuaga

SEQ ID NO: 3322279 - RNA, 17 nt, Human
caaguauuauaccuuuu

SEQ ID NO: 3322280 - RNA, 13 nt, Human
caaguauuauacc

SEQ ID NO: 3322281 - RNA, 20 nt, Human
aauaucugaaaauguaugug

SEQ ID NO: 3322282 - RNA, 16 nt, Human
aauaucugaaaaugua

SEQ ID NO: 3322283 - RNA, 17 nt, Human
aauaucugaaaauguau

SEQ ID NO: 3322284 - RNA, 18 nt, Human
aauaucugaaaauguaug

SEQ ID NO: 3322285 - RNA, 19 nt, Human
aauaucugaaaauguaugu

SEQ ID NO: 3322286 - RNA, 18 nt, Human
uaacuuuuauaaacuuua

SEQ ID NO: 3322287 - RNA, 17 nt, Human
uaacuuuuauaaacuuu

SEQ ID NO: 3322288 - RNA, 15 nt, Human
uaacuuuuauaaacu

SEQ ID NO: 3322289 - RNA, 17 nt, Human
aauauugauaugcuuau

SEQ ID NO: 3322290 - RNA, 18 nt, Human
aauauugauaugcuuaua

SEQ ID NO: 3322291 - RNA, 22 nt, Human
aauauugcugauggugcaauga

SEQ ID NO: 3322292 - RNA, 21 nt, Human
aauauugcugauggugcaaug

SEQ ID NO: 3322293 - RNA, 18 nt, Human
aauauugcugauggugca

SEQ ID NO: 3322294 - RNA, 15 nt, Human
aauauugcugauggu

SEQ ID NO: 3322295 - RNA, 13 nt, Human
aauauugcugaug

SEQ ID NO: 3322296 - RNA, 12 nt, Human
aauauugcugau

SEQ ID NO: 3322297 - RNA, 11 nt, Human
aauauugcuga

SEQ ID NO: 3322298 - RNA, 15 nt, Human
uaacauggaaguacu

SEQ ID NO: 3322299 - RNA, 14 nt, Human
uaacuaaaagguau

SEQ ID NO: 3322300 - RNA, 15 nt, Human
uaacuaaaagguaug

SEQ ID NO: 3322301 - RNA, 14 nt, Human
uaacauggaaguac

SEQ ID NO: 3322302 - RNA, 18 nt, Human
aauagacaauuuauuaug

SEQ ID NO: 3322303 - RNA, 23 nt, Human
aauagacaauuuauuauggcaca

SEQ ID NO: 3322304 - RNA, 13 nt, Human
aauagcugggacu

SEQ ID NO: 3322305 - RNA, 14 nt, Human
aauagcugggacua

SEQ ID NO: 3322306 - RNA, 19 nt, Human
aauaggaaaaacugauuuu

SEQ ID NO: 3322307 - RNA, 18 nt, Human
aauaggaaaaacugauuu

SEQ ID NO: 3322308 - RNA, 17 nt, Human
aauaggaaaaacugauu

SEQ ID NO: 3322309 - RNA, 16 nt, Human
aauaggaaaaacugau

SEQ ID NO: 3322310 - RNA, 15 nt, Human
aauaggaaaaacuga

SEQ ID NO: 3322311 - RNA, 17 nt, Human
uaaauuaacuuuuauaa

SEQ ID NO: 3322312 - RNA, 16 nt, Human
uaaauuaacuuuuaua

SEQ ID NO: 3322313 - RNA, 15 nt, Human
uaaauuaacuuuuau

SEQ ID NO: 3322314 - RNA, 14 nt, Human
uaaauuaacuuuua

SEQ ID NO: 3322315 - RNA, 12 nt, Human
uaaauuaacuuu

SEQ ID NO: 3322316 - RNA, 23 nt, Human
uaaaugcaccuggaauauauaac

SEQ ID NO: 3322317 - RNA, 15 nt, Human
uaaauguugaaagau

SEQ ID NO: 3322318 - RNA, 20 nt, Human
uaaauguugaaagaucaaaa

SEQ ID NO: 3322319 - RNA, 22 nt, Human
uaaaucuccaaaauaaaacuuu

SEQ ID NO: 3322320 - RNA, 15 nt, Human
uaaaucuccaaaaua

SEQ ID NO: 3322321 - RNA, 14 nt, Human
uaaaucuccaaaau

SEQ ID NO: 3322322 - RNA, 19 nt, Human
uaaauaaugugaaacugga

SEQ ID NO: 3322323 - RNA, 22 nt, Human
aauaacauguaauuaaguacua

SEQ ID NO: 3322324 - RNA, 18 nt, Human
aauaaaacuuuuuaaaau

SEQ ID NO: 3322325 - RNA, 15 nt, Human
aauaaaacuuuuuaa

SEQ ID NO: 3322326 - RNA, 14 nt, Human
aauaaaacuuuuua

SEQ ID NO: 3322327 - RNA, 12 nt, Human
aauaaaacuuuu

SEQ ID NO: 3322328 - RNA, 16 nt, Human
aauaaaucauaaaacu

SEQ ID NO: 3322329 - RNA, 20 nt, Human
aaguuuuuauggcuuuugug

SEQ ID NO: 3322330 - RNA, 12 nt, Human
aauguaugugua

SEQ ID NO: 3322331 - RNA, 14 nt, Human
aauguauguguaag

SEQ ID NO: 3322332 - RNA, 14 nt, Human
aauguacugcauau

SEQ ID NO: 3322333 - RNA, 18 nt, Human
aauguacugcauaugaaa

SEQ ID NO: 3322334 - RNA, 12 nt, Human
aauguacugcau

SEQ ID NO: 3322335 - RNA, 15 nt, Human
uacauaaugcgugca

SEQ ID NO: 3322336 - RNA, 20 nt, Human
uacauaaugcgugcauacca

SEQ ID NO: 3322337 - RNA, 19 nt, Human
uacauaaugcgugcauacc

SEQ ID NO: 3322338 - RNA, 17 nt, Human
uacauaaugcgugcaua

SEQ ID NO: 3322339 - RNA, 23 nt, Human
uacagagcccacgcccccacugg

SEQ ID NO: 3322340 - RNA, 23 nt, Human
uacacauuuuauuuuauuaugca

SEQ ID NO: 3322341 - RNA, 18 nt, Human
uacaccacuacauucugu

SEQ ID NO: 3322342 - RNA, 17 nt, Human
uacaccacuacauucug

SEQ ID NO: 3322343 - RNA, 16 nt, Human
uacaccacuacauucu

SEQ ID NO: 3322344 - RNA, 15 nt, Human
uacaccacuacauuc

SEQ ID NO: 3322345 - RNA, 20 nt, Human
uacaccacuacauucuguua

SEQ ID NO: 3322346 - RNA, 19 nt, Human
uacaccacuacauucuguu

SEQ ID NO: 3322347 - RNA, 15 nt, Human
uacaaaaagcauaaa

SEQ ID NO: 3322348 - RNA, 20 nt, Human
uacaaaaagcauaaaaauua

SEQ ID NO: 3322349 - RNA, 15 nt, Human
uacaaaagcauguga

SEQ ID NO: 3322350 - RNA, 14 nt, Human
aaugagccuggcaa

SEQ ID NO: 3322351 - RNA, 21 nt, Human
uacaagcgugagccacugcac

SEQ ID NO: 3322352 - RNA, 13 nt, Human
aaugcccagcccc

SEQ ID NO: 3322353 - RNA, 15 nt, Human
aaugcccagccccuu

SEQ ID NO: 3322354 - RNA, 14 nt, Human
aaugcccagccccu

SEQ ID NO: 3322355 - RNA, 18 nt, Human
aauggaagacagcucuua

SEQ ID NO: 3322356 - RNA, 16 nt, Human
aauggacguguuauga

SEQ ID NO: 3322357 - RNA, 24 nt, Human
aaugcccagccccuucugacccau

SEQ ID NO: 3322358 - RNA, 23 nt, Human
aaugcccagccccuucugaccca

SEQ ID NO: 3322359 - RNA, 22 nt, Human
aaugcccagccccuucugaccc

SEQ ID NO: 3322360 - RNA, 20 nt, Human
aaugcccagccccuucugac

SEQ ID NO: 3322361 - RNA, 21 nt, Human
aaugcugugcccuaaagugua

SEQ ID NO: 3322362 - RNA, 20 nt, Human
aaugcugugcccuaaagugu

SEQ ID NO: 3322363 - RNA, 13 nt, Human
aaugcugugcccu

SEQ ID NO: 3322364 - RNA, 20 nt, Human
aaucuucugaacuuggcgcu

SEQ ID NO: 3322365 - RNA, 13 nt, Human
aaucuucugaacu

SEQ ID NO: 3322366 - RNA, 21 nt, Human
uaaugacuuaagcacacuuga

SEQ ID NO: 3322367 - RNA, 15 nt, Human
uaaugacuuaagcac

SEQ ID NO: 3322368 - RNA, 22 nt, Human
uaaugaaagacuguacaaagua

SEQ ID NO: 3322369 - RNA, 23 nt, Human
uaaugaaagacuguacaaaguag

SEQ ID NO: 3322370 - RNA, 14 nt, Human
uaaugaaagacugu

SEQ ID NO: 3322371 - RNA, 17 nt, Human
uaaugaaagacuguaca

SEQ ID NO: 3322372 - RNA, 18 nt, Human
uaaugaaagacuguacaa

SEQ ID NO: 3322373 - RNA, 19 nt, Human
uaaugaaagacuguacaaa

SEQ ID NO: 3322374 - RNA, 13 nt, Human
uaaugaggaaacu

SEQ ID NO: 3322375 - RNA, 18 nt, Human
aaugacuuacuguacaug

SEQ ID NO: 3322376 - RNA, 17 nt, Human
aaugacuuacuguacau

SEQ ID NO: 3322377 - RNA, 14 nt, Human
aaugacuuacugua

SEQ ID NO: 3322378 - RNA, 15 nt, Human
aaugagccuggcaag

SEQ ID NO: 3322379 - RNA, 13 nt, Human
aaucucaaauaac

SEQ ID NO: 3322380 - RNA, 14 nt, Human
aaucucaaauuucu

SEQ ID NO: 3322381 - RNA, 15 nt, Human
aaucucaaauaacua

SEQ ID NO: 3322382 - RNA, 12 nt, Human
aaucucaaauuu

SEQ ID NO: 3322383 - RNA, 12 nt, Human
aaucuaaaugga

SEQ ID NO: 3322384 - RNA, 18 nt, Human
aaucuaaauggaaccacu

SEQ ID NO: 3322385 - RNA, 15 nt, Human
aaucuaaauggaacc

SEQ ID NO: 3322386 - RNA, 13 nt, Human
aaucuaaauggaa

SEQ ID NO: 3322387 - RNA, 20 nt, Human
uaaguuuuuauggcuuuugu

SEQ ID NO: 3322388 - RNA, 19 nt, Human
uaaguacuauguaucaaug

SEQ ID NO: 3322389 - RNA, 17 nt, Human
acaacaucuuuuucuac

SEQ ID NO: 3322390 - RNA, 22 nt, Human
acaagagcccaggccuccuaca

SEQ ID NO: 3322391 - RNA, 16 nt, Human
acaagaccacguuucu

SEQ ID NO: 3322392 - RNA, 18 nt, Human
acaagagcccaggccucc

SEQ ID NO: 3322393 - RNA, 17 nt, Human
acaagaccacguuucua

SEQ ID NO: 3322394 - RNA, 13 nt, Human
acaagcuccaagc

SEQ ID NO: 3322395 - RNA, 17 nt, Human
acaagcgugagccacug

SEQ ID NO: 3322396 - RNA, 22 nt, Human
acaagcuccaagcucccaggca

SEQ ID NO: 3322397 - RNA, 19 nt, Human
acaagcuccaagcucccag

SEQ ID NO: 3322398 - RNA, 17 nt, Human
acaagcuccaagcuccc

SEQ ID NO: 3322399 - RNA, 16 nt, Human
acaagcuccaagcucc

SEQ ID NO: 3322400 - RNA, 15 nt, Human
acaagcuccaagcuc

SEQ ID NO: 3322401 - RNA, 21 nt, Human
acaaagcgugguggacaugca

SEQ ID NO: 3322402 - RNA, 14 nt, Human
acaaaacuuuucua

SEQ ID NO: 3322403 - RNA, 18 nt, Human
aauuugggggaaaauuua

SEQ ID NO: 3322404 - RNA, 16 nt, Human
aauuuguuauaaugaa

SEQ ID NO: 3322405 - RNA, 20 nt, Human
aauuugugauacaaugcugu

SEQ ID NO: 3322406 - RNA, 14 nt, Human
uacgucugacaggc

SEQ ID NO: 3322407 - RNA, 16 nt, Human
uacgucugacaggcaa

SEQ ID NO: 3322408 - RNA, 22 nt, Human
uacucuacccucuuagaaaaac

SEQ ID NO: 3322409 - RNA, 16 nt, Human
uacucuacccucuuag

SEQ ID NO: 3322410 - RNA, 15 nt, Human
uacgucugacaggca

SEQ ID NO: 3322411 - RNA, 17 nt, Human
uacuguaauuugugaua

SEQ ID NO: 3322412 - RNA, 16 nt, Human
uacuguaauuugugau

SEQ ID NO: 3322413 - RNA, 15 nt, Human
uacuguaauuuguga

SEQ ID NO: 3322414 - RNA, 23 nt, Human
uacuguaauuugugauacaaugc

SEQ ID NO: 3322415 - RNA, 17 nt, Human
aauuuaccugaagucuu

SEQ ID NO: 3322416 - RNA, 15 nt, Human
aauuuaccugaaguc

SEQ ID NO: 3322417 - RNA, 14 nt, Human
aauuuauuauggca

SEQ ID NO: 3322418 - RNA, 13 nt, Human
aauuuauuauggc

SEQ ID NO: 3322419 - RNA, 15 nt, Human
uacuucugcuacaua

SEQ ID NO: 3322420 - RNA, 20 nt, Human
uacuucuccacccugcucuc

SEQ ID NO: 3322421 - RNA, 14 nt, Human
uacuucuuauacau

SEQ ID NO: 3322422 - RNA, 15 nt, Human
uacuucuuauacauu

SEQ ID NO: 3322423 - RNA, 16 nt, Human
uacuucuuauacauuu

SEQ ID NO: 3322424 - RNA, 13 nt, Human
uacuucuccaccc

SEQ ID NO: 3322425 - RNA, 18 nt, Human
uacuucuccacccugcuc

SEQ ID NO: 3322426 - RNA, 13 nt, Human
acacuccuucaca

SEQ ID NO: 3322427 - RNA, 13 nt, Human
acacucugagacu

SEQ ID NO: 3322428 - RNA, 11 nt, Human
acacucugaga

SEQ ID NO: 3322429 - RNA, 22 nt, Human
acacucacauuuauucugcuca

SEQ ID NO: 3322430 - RNA, 15 nt, Human
acacuguucucugcc

SEQ ID NO: 3322431 - RNA, 14 nt, Human
acacuguucucugc

SEQ ID NO: 3322432 - RNA, 20 nt, Human
acacuguucucugcccucca

SEQ ID NO: 3322433 - RNA, 18 nt, Human
acacuguucucugcccuc

SEQ ID NO: 3322434 - RNA, 17 nt, Human
acacuguucucugcccu

SEQ ID NO: 3322435 - RNA, 16 nt, Human
acacuguucucugccc

SEQ ID NO: 3322436 - RNA, 23 nt, Human
acacuguucucugcccuccaaga

SEQ ID NO: 3322437 - RNA, 22 nt, Human
acacuguucucugcccuccaag

SEQ ID NO: 3322438 - RNA, 15 nt, Human
acacuguuucaaacu

SEQ ID NO: 3322439 - RNA, 23 nt, Human
acacuguuucaaacuuuacuaug

SEQ ID NO: 3322440 - RNA, 18 nt, Human
acagaaaauucuucucca

SEQ ID NO: 3322441 - RNA, 21 nt, Human
acagacuggaagcacagcuuc

SEQ ID NO: 3322442 - RNA, 17 nt, Human
acagacuggaagcacag

SEQ ID NO: 3322443 - RNA, 19 nt, Human
acagacuggaagcacagcu

SEQ ID NO: 3322444 - RNA, 18 nt, Human
acagacacaggcccggcu

SEQ ID NO: 3322445 - RNA, 17 nt, Human
acagacacaggcccggc

SEQ ID NO: 3322446 - RNA, 15 nt, Human
acagacacaggcccg

SEQ ID NO: 3322447 - RNA, 15 nt, Human
acagaguuguuacau

SEQ ID NO: 3322448 - RNA, 21 nt, Human
acagaguuguuacauuuuuaa

SEQ ID NO: 3322449 - RNA, 20 nt, Human
acagauagauauaugcucug

SEQ ID NO: 3322450 - RNA, 20 nt, Human
acagauacuccuccaagguu

SEQ ID NO: 3322451 - RNA, 23 nt, Human
acagaugggugcuuggaggaagg

SEQ ID NO: 3322452 - RNA, 23 nt, Human
acagcccgggcucugccucccau

SEQ ID NO: 3322453 - RNA, 20 nt, Human
acagcccgggcucugccucc

SEQ ID NO: 3322454 - RNA, 22 nt, Human
acagcccgggcucugccuccca

SEQ ID NO: 3322455 - RNA, 21 nt, Human
acagcccgggcucugccuccc

SEQ ID NO: 3322456 - RNA, 13 nt, Human
uaucucagggccu

SEQ ID NO: 3322457 - RNA, 20 nt, Human
uaucccuacuguaauuugug

SEQ ID NO: 3322458 - RNA, 19 nt, Human
uaucccuacuguaauuugu

SEQ ID NO: 3322459 - RNA, 18 nt, Human
acagagcuacacagggga

SEQ ID NO: 3322460 - RNA, 21 nt, Human
acagagcaagugagacccugu

SEQ ID NO: 3322461 - RNA, 20 nt, Human
acagaguuguuacauuuuua

SEQ ID NO: 3322462 - RNA, 19 nt, Human
acagaguuguuacauuuuu

SEQ ID NO: 3322463 - RNA, 18 nt, Human
acagaguuguuacauuuu

SEQ ID NO: 3322464 - RNA, 17 nt, Human
acagaguuguuacauuu

SEQ ID NO: 3322465 - RNA, 16 nt, Human
acagaguuguuacauu

SEQ ID NO: 3322466 - RNA, 18 nt, Human
acaccucugcacaagcug

SEQ ID NO: 3322467 - RNA, 14 nt, Human
acaccuugacaggg

SEQ ID NO: 3322468 - RNA, 15 nt, Human
acaccuugacagggc

SEQ ID NO: 3322469 - RNA, 16 nt, Human
acaccuugacagggca

SEQ ID NO: 3322470 - RNA, 15 nt, Human
acacuaaccacgcug

SEQ ID NO: 3322471 - RNA, 19 nt, Human
acacuaaccacgcuggacc

SEQ ID NO: 3322472 - RNA, 16 nt, Human
acacuaaccacgcugg

SEQ ID NO: 3322473 - RNA, 17 nt, Human
acacuaaccacgcugga

SEQ ID NO: 3322474 - RNA, 20 nt, Human
uauaaccaguguuguggauu

SEQ ID NO: 3322475 - RNA, 22 nt, Human
uauaaccaguguuguggauuua

SEQ ID NO: 3322476 - RNA, 12 nt, Human
acacccagccca

SEQ ID NO: 3322477 - RNA, 13 nt, Human
acacccagcccac

SEQ ID NO: 3322478 - RNA, 22 nt, Human
acacauguccaagaagcccagg

SEQ ID NO: 3322479 - RNA, 21 nt, Human
acacauguccaagaagcccag

SEQ ID NO: 3322480 - RNA, 13 nt, Human
acacauguccaag

SEQ ID NO: 3322481 - RNA, 19 nt, Human
acacauguccaagaagccc

SEQ ID NO: 3322482 - RNA, 18 nt, Human
acacauguccaagaagcc

SEQ ID NO: 3322483 - RNA, 13 nt, Human
uaguagagacagg

SEQ ID NO: 3322484 - RNA, 21 nt, Human
uagguuggcaaaaaggcagga

SEQ ID NO: 3322485 - RNA, 22 nt, Human
acacagcucuucuccaggcugu

SEQ ID NO: 3322486 - RNA, 11 nt, Human
acacagugagu

SEQ ID NO: 3322487 - RNA, 22 nt, Human
acacaguauuacuucugcuaca

SEQ ID NO: 3322488 - RNA, 21 nt, Human
acaaugguuuucuuguguguu

SEQ ID NO: 3322489 - RNA, 15 nt, Human
acaaugguuuucuug

SEQ ID NO: 3322490 - RNA, 11 nt, Human
acacacagcuc

SEQ ID NO: 3322491 - RNA, 12 nt, Human
acacacagcucu

SEQ ID NO: 3322492 - RNA, 19 nt, Human
acacacagcucuguccugg

SEQ ID NO: 3322493 - RNA, 19 nt, Human
guuuucuguucuuucuggc

SEQ ID NO: 3322494 - RNA, 11 nt, Human
guuuucuguuc

SEQ ID NO: 3322495 - RNA, 22 nt, Human
guuugauucagacagcugccug

SEQ ID NO: 3322496 - RNA, 21 nt, Human
guuugauucagacagcugccu

SEQ ID NO: 3322497 - RNA, 23 nt, Human
guuucuaaaggcuaccuuuguau

SEQ ID NO: 3322498 - RNA, 22 nt, Human
guuucuaaaggcuaccuuugua

SEQ ID NO: 3322499 - RNA, 13 nt, Human
guuugccucugcc

SEQ ID NO: 3322500 - RNA, 13 nt, Human
aagggccuggccu

SEQ ID NO: 3322501 - RNA, 17 nt, Human
aagggccuggccugagc

SEQ ID NO: 3322502 - RNA, 14 nt, Human
aagggccuggccug

SEQ ID NO: 3322503 - RNA, 19 nt, Human
aagggccuggccugagcug

SEQ ID NO: 3322504 - RNA, 22 nt, Human
aaggggaauguuugccucugcc

SEQ ID NO: 3322505 - RNA, 23 nt, Human
aaggggaauguuugccucugccu

SEQ ID NO: 3322506 - RNA, 16 nt, Human
aaggguaucaggugcu

SEQ ID NO: 3322507 - RNA, 20 nt, Human
guuucuaaagcugccagccg

SEQ ID NO: 3322508 - RNA, 19 nt, Human
guuucuaaaggcuaccuuu

SEQ ID NO: 3322509 - RNA, 16 nt, Human
aaguaauaugcacaca

SEQ ID NO: 3322510 - RNA, 15 nt, Human
aaguaauaugcacac

SEQ ID NO: 3322511 - RNA, 12 nt, Human
aaguaauaugca

SEQ ID NO: 3322512 - RNA, 15 nt, Human
aaggcuaccuuugua

SEQ ID NO: 3322513 - RNA, 19 nt, Human
aaggcuaccuuuguauucu

SEQ ID NO: 3322514 - RNA, 18 nt, Human
aaggccaaaggaagcaca

SEQ ID NO: 3322515 - RNA, 16 nt, Human
aaggccaaaggaagca

SEQ ID NO: 3322516 - RNA, 17 nt, Human
guugcccaggcaggucu

SEQ ID NO: 3322517 - RNA, 14 nt, Human
aaggcuccaggagc

SEQ ID NO: 3322518 - RNA, 18 nt, Human
guugcccaggcaggucuu

SEQ ID NO: 3322519 - RNA, 21 nt, Human
guugcccaggcuggcgugcag

SEQ ID NO: 3322520 - RNA, 15 nt, Human
guugcccaggcaggu

SEQ ID NO: 3322521 - RNA, 17 nt, Human
guugcccaggcuggcgu

SEQ ID NO: 3322522 - RNA, 19 nt, Human
aaggaugcuuguacauaau

SEQ ID NO: 3322523 - RNA, 17 nt, Human
aaggaugcuuguacaua

SEQ ID NO: 3322524 - RNA, 19 nt, Human
aaggaugcccaaagaugca

SEQ ID NO: 3322525 - RNA, 18 nt, Human
aaggaugcacagaguugu

SEQ ID NO: 3322526 - RNA, 16 nt, Human
aaggaugcuuguacau

SEQ ID NO: 3322527 - RNA, 15 nt, Human
aaggaugcuuguaca

SEQ ID NO: 3322528 - RNA, 23 nt, Human
guugaugaucuuugcagacaggc

SEQ ID NO: 3322529 - RNA, 13 nt, Human
aaggauccugagc

SEQ ID NO: 3322530 - RNA, 14 nt, Human
aaggauccugagcc

SEQ ID NO: 3322531 - RNA, 23 nt, Human
aaggaugaucuaggaagacuuug

SEQ ID NO: 3322532 - RNA, 18 nt, Human
aaggaugaucuaggaaga

SEQ ID NO: 3322533 - RNA, 17 nt, Human
aaggauccugagccaga

SEQ ID NO: 3322534 - RNA, 15 nt, Human
aaggauccugagcca

SEQ ID NO: 3322535 - RNA, 13 nt, Human
guuggguggaugc

SEQ ID NO: 3322536 - RNA, 18 nt, Human
guuggucccccuuccaug

SEQ ID NO: 3322537 - RNA, 18 nt, Human
guuaaugauagcuacugu

SEQ ID NO: 3322538 - RNA, 18 nt, Human
guuaaucauuagguguga

SEQ ID NO: 3322539 - RNA, 17 nt, Human
guuaguaugaggcauuu

SEQ ID NO: 3322540 - RNA, 20 nt, Human
guuaguaugaggcauuuguu

SEQ ID NO: 3322541 - RNA, 19 nt, Human
aagccuccuccagccgcca

SEQ ID NO: 3322542 - RNA, 17 nt, Human
aagcuaggccuggccag

SEQ ID NO: 3322543 - RNA, 18 nt, Human
aagcuaggccuggccaga

SEQ ID NO: 3322544 - RNA, 16 nt, Human
aagcuaggccuggcca

SEQ ID NO: 3322545 - RNA, 17 nt, Human
guucaggguuggccccu

SEQ ID NO: 3322546 - RNA, 18 nt, Human
guucaggguuggccccug

SEQ ID NO: 3322547 - RNA, 19 nt, Human
guucaggguuggccccugc

SEQ ID NO: 3322548 - RNA, 15 nt, Human
guucagcuccagcuc

SEQ ID NO: 3322549 - RNA, 16 nt, Human
guucagcuccagcuca

SEQ ID NO: 3322550 - RNA, 17 nt, Human
guucagcuccagcucac

SEQ ID NO: 3322551 - RNA, 16 nt, Human
guucuacccaggugcu

SEQ ID NO: 3322552 - RNA, 21 nt, Human
guucccuuugacgccauccca

SEQ ID NO: 3322553 - RNA, 20 nt, Human
guucccuuugacgccauccc

SEQ ID NO: 3322554 - RNA, 23 nt, Human
guucugggacacaguucaauucu

SEQ ID NO: 3322555 - RNA, 18 nt, Human
guucuugguuuguaaauu

SEQ ID NO: 3322556 - RNA, 21 nt, Human
guucuugguuuguaaauuaac

SEQ ID NO: 3322557 - RNA, 17 nt, Human
guucuuaguuugcaguu

SEQ ID NO: 3322558 - RNA, 22 nt, Human
guugaugaucuuugcagacagg

SEQ ID NO: 3322559 - RNA, 20 nt, Human
guuccauggccucuucagau

SEQ ID NO: 3322560 - RNA, 16 nt, Human
guucccauuugcuccu

SEQ ID NO: 3322561 - RNA, 20 nt, Human
guucccauuugcuccuuucu

SEQ ID NO: 3322562 - RNA, 18 nt, Human
gugcuaggaacacuccuu

SEQ ID NO: 3322563 - RNA, 17 nt, Human
gugcuaggaacacuccu

SEQ ID NO: 3322564 - RNA, 22 nt, Human
gugcuaggaacacuccuucaca

SEQ ID NO: 3322565 - RNA, 21 nt, Human
gugcuaucucccccagcccca

SEQ ID NO: 3322566 - RNA, 18 nt, Human
aagaaaaagaaaaagaaa

SEQ ID NO: 3322567 - RNA, 17 nt, Human
aagaaaaaggaugcaca

SEQ ID NO: 3322568 - RNA, 15 nt, Human
aagaaaaaggaugca

SEQ ID NO: 3322569 - RNA, 18 nt, Human
aagaaaaaggaugcacag

SEQ ID NO: 3322570 - RNA, 20 nt, Human
aagaaagacuaucuaaaugu

SEQ ID NO: 3322571 - RNA, 22 nt, Human
aagaaagacuaucuaaauguug

SEQ ID NO: 3322572 - RNA, 15 nt, Human
gugccucaagagaag

SEQ ID NO: 3322573 - RNA, 22 nt, Human
gugccgagaaggaagccuccca

SEQ ID NO: 3322574 - RNA, 12 nt, Human
gugccucuggga

SEQ ID NO: 3322575 - RNA, 13 nt, Human
gugccucugggac

SEQ ID NO: 3322576 - RNA, 14 nt, Human
gugccuuauggaac

SEQ ID NO: 3322577 - RNA, 23 nt, Human
gugccuuauggaacacucugaga

SEQ ID NO: 3322578 - RNA, 21 nt, Human
gugccuuauggaacacucuga

SEQ ID NO: 3322579 - RNA, 13 nt, Human
aacuuuaccuuuu

SEQ ID NO: 3322580 - RNA, 17 nt, Human
aacuuggcgcugccccu

SEQ ID NO: 3322581 - RNA, 11 nt, Human
gugccuuaugg

SEQ ID NO: 3322582 - RNA, 18 nt, Human
aacuugucuuuggacccu

SEQ ID NO: 3322583 - RNA, 12 nt, Human
gugcuauguucu

SEQ ID NO: 3322584 - RNA, 22 nt, Human
gugcuaucucccccagccccau

SEQ ID NO: 3322585 - RNA, 19 nt, Human
gugcuaucucccccagccc

SEQ ID NO: 3322586 - RNA, 20 nt, Human
gugcugggauuacaggugug

SEQ ID NO: 3322587 - RNA, 21 nt, Human
gugcugggauuacaagcguga

SEQ ID NO: 3322588 - RNA, 22 nt, Human
gugcugggauuacaagcgugag

SEQ ID NO: 3322589 - RNA, 18 nt, Human
guggacacagcucuucuc

SEQ ID NO: 3322590 - RNA, 22 nt, Human
guggacacagcucuucuccagg

SEQ ID NO: 3322591 - RNA, 17 nt, Human
guggacacagcucuucu

SEQ ID NO: 3322592 - RNA, 21 nt, Human
guggaugccugguggcagcug

SEQ ID NO: 3322593 - RNA, 20 nt, Human
guggaugccugguggcagcu

SEQ ID NO: 3322594 - RNA, 18 nt, Human
guggcaccagcagccugg

SEQ ID NO: 3322595 - RNA, 19 nt, Human
guggcaccagcagccugga

SEQ ID NO: 3322596 - RNA, 19 nt, Human
guggauuuaacagaaaugu

SEQ ID NO: 3322597 - RNA, 18 nt, Human
guggauuuaacagaaaug

SEQ ID NO: 3322598 - RNA, 16 nt, Human
guggcagcucaccucu

SEQ ID NO: 3322599 - RNA, 14 nt, Human
guggcagcucaccu

SEQ ID NO: 3322600 - RNA, 16 nt, Human
aagaauugaagcagga

SEQ ID NO: 3322601 - RNA, 14 nt, Human
guggugguuuucug

SEQ ID NO: 3322602 - RNA, 16 nt, Human
gugguuucagaaaugu

SEQ ID NO: 3322603 - RNA, 20 nt, Human
gugggggaucacagccucug

SEQ ID NO: 3322604 - RNA, 14 nt, Human
guggguacgggagg

SEQ ID NO: 3322605 - RNA, 14 nt, Human
gugggagugggccc

SEQ ID NO: 3322606 - RNA, 13 nt, Human
gugggagugggcc

SEQ ID NO: 3322607 - RNA, 23 nt, Human
gugggaggaucucuugagccugg

SEQ ID NO: 3322608 - RNA, 22 nt, Human
gugggacacccugugauggggc

SEQ ID NO: 3322609 - RNA, 23 nt, Human
guggcgcagcauauucaggaagc

SEQ ID NO: 3322610 - RNA, 22 nt, Human
guggcgcagcauauucaggaag

SEQ ID NO: 3322611 - RNA, 19 nt, Human
aagagauugugguuucauu

SEQ ID NO: 3322612 - RNA, 22 nt, Human
aagacccuuguggucccacccc

SEQ ID NO: 3322613 - RNA, 21 nt, Human
aagacccuuguggucccaccc

SEQ ID NO: 3322614 - RNA, 18 nt, Human
aagacccuugugguccca

SEQ ID NO: 3322615 - RNA, 16 nt, Human
aagacuaucuaaaugu

SEQ ID NO: 3322616 - RNA, 17 nt, Human
aagacuaucuaaauguu

SEQ ID NO: 3322617 - RNA, 18 nt, Human
aagacuaucuaaauguug

SEQ ID NO: 3322618 - RNA, 17 nt, Human
aagacugaguacguugu

SEQ ID NO: 3322619 - RNA, 16 nt, Human
aagacuguacaaagua

SEQ ID NO: 3322620 - RNA, 21 nt, Human
aagacugaguacguugugcau

SEQ ID NO: 3322621 - RNA, 17 nt, Human
aagacuguacaaaguag

SEQ ID NO: 3322622 - RNA, 17 nt, Human
gugugacuacuccccca

SEQ ID NO: 3322623 - RNA, 18 nt, Human
gugucuuuuuucacuaca

SEQ ID NO: 3322624 - RNA, 17 nt, Human
gugucuugcaauggcag

SEQ ID NO: 3322625 - RNA, 18 nt, Human
gugucuugcaauggcagc

SEQ ID NO: 3322626 - RNA, 23 nt, Human
guguuuccuggcacugcuuccag

SEQ ID NO: 3322627 - RNA, 18 nt, Human
aagaugugacauguuuua

SEQ ID NO: 3322628 - RNA, 14 nt, Human
aagaugugacaugu

SEQ ID NO: 3322629 - RNA, 13 nt, Human
aagcaaaggagau

SEQ ID NO: 3322630 - RNA, 12 nt, Human
aagcaaaggaga

SEQ ID NO: 3322631 - RNA, 12 nt, Human
aagaugcagccg

SEQ ID NO: 3322632 - RNA, 18 nt, Human
aagagguuuuaaaaaaau

SEQ ID NO: 3322633 - RNA, 17 nt, Human
gugguuuucuguucuuu

SEQ ID NO: 3322634 - RNA, 17 nt, Human
aaaugaggucagagccu

SEQ ID NO: 3322635 - RNA, 19 nt, Human
aaaugaggucagagccugc

SEQ ID NO: 3322636 - RNA, 16 nt, Human
aaaugagguacucucc

SEQ ID NO: 3322637 - RNA, 23 nt, Human
aaaugagguacucuccuggaaau

SEQ ID NO: 3322638 - RNA, 19 nt, Human
aaaugagccuggcaagaau

SEQ ID NO: 3322639 - RNA, 13 nt, Human
aaaugagccuggc

SEQ ID NO: 3322640 - RNA, 13 nt, Human
aaaugcccagccc

SEQ ID NO: 3322641 - RNA, 15 nt, Human
aaaugcccagccccu

SEQ ID NO: 3322642 - RNA, 14 nt, Human
aaaugcccagcccc

SEQ ID NO: 3322643 - RNA, 18 nt, Human
aaaugcccagccccuucu

SEQ ID NO: 3322644 - RNA, 13 nt, Human
aaaugcccagcuu

SEQ ID NO: 3322645 - RNA, 15 nt, Human
aaaugggcagagcag

SEQ ID NO: 3322646 - RNA, 20 nt, Human
aaaugggcagagcagagacc

SEQ ID NO: 3322647 - RNA, 18 nt, Human
aaaugggcagagcagaga

SEQ ID NO: 3322648 - RNA, 14 nt, Human
aaaugcaccuggaa

SEQ ID NO: 3322649 - RNA, 22 nt, Human
aaaugcaccuggaauauauaac

SEQ ID NO: 3322650 - RNA, 18 nt, Human
aaaugcaccuggaauaua

SEQ ID NO: 3322651 - RNA, 17 nt, Human
aaaugaaaaucgugaca

SEQ ID NO: 3322652 - RNA, 17 nt, Human
aaaucucaaauuucuaa

SEQ ID NO: 3322653 - RNA, 16 nt, Human
aaaucucaaauuucua

SEQ ID NO: 3322654 - RNA, 15 nt, Human
aaaucucaaauuucu

SEQ ID NO: 3322655 - RNA, 13 nt, Human
aaaucgaugcagu

SEQ ID NO: 3322656 - RNA, 18 nt, Human
aaaucccuuaccucggug

SEQ ID NO: 3322657 - RNA, 15 nt, Human
aaaucccauuuaaaa

SEQ ID NO: 3322658 - RNA, 15 nt, Human
guaggaagacuuugg

SEQ ID NO: 3322659 - RNA, 18 nt, Human
guaggaagguuaauguuc

SEQ ID NO: 3322660 - RNA, 22 nt, Human
guagcucuaggagggcuggcaa

SEQ ID NO: 3322661 - RNA, 12 nt, Human
guagcugggacu

SEQ ID NO: 3322662 - RNA, 18 nt, Human
guagcugggacuacaggc

SEQ ID NO: 3322663 - RNA, 19 nt, Human
guagcugggacuacaggca

SEQ ID NO: 3322664 - RNA, 21 nt, Human
guagcugggacuacaggcacc

SEQ ID NO: 3322665 - RNA, 15 nt, Human
guaugggagagaaga

SEQ ID NO: 3322666 - RNA, 15 nt, Human
guauucuuauuuaau

SEQ ID NO: 3322667 - RNA, 21 nt, Human
guauucucuccuguaccucuu

SEQ ID NO: 3322668 - RNA, 14 nt, Human
guaugggagagaag

SEQ ID NO: 3322669 - RNA, 22 nt, Human
guaugaucacggcucacugcag

SEQ ID NO: 3322670 - RNA, 15 nt, Human
guaucccuacuguaa

SEQ ID NO: 3322671 - RNA, 21 nt, Human
guaucccaugagccucagcau

SEQ ID NO: 3322672 - RNA, 18 nt, Human
aaaugggggugcauuuga

SEQ ID NO: 3322673 - RNA, 17 nt, Human
aaaugggggugcauuug

SEQ ID NO: 3322674 - RNA, 16 nt, Human
aaaugggggugcauuu

SEQ ID NO: 3322675 - RNA, 15 nt, Human
aaaugggggugcauu

SEQ ID NO: 3322676 - RNA, 14 nt, Human
aaauucaugcugcu

SEQ ID NO: 3322677 - RNA, 16 nt, Human
aaauuccccacccuga

SEQ ID NO: 3322678 - RNA, 21 nt, Human
aaauuaacuuuuauaaacuuu

SEQ ID NO: 3322679 - RNA, 19 nt, Human
aaauuaacuuuuauaaacu

SEQ ID NO: 3322680 - RNA, 23 nt, Human
aaauuaacuuuuauaaacuuuac

SEQ ID NO: 3322681 - RNA, 22 nt, Human
aaauuaacuuuuauaaacuuua

SEQ ID NO: 3322682 - RNA, 22 nt, Human
guauuggcuagagguucaaaga

SEQ ID NO: 3322683 - RNA, 15 nt, Human
guauuuuuuuacuaa

SEQ ID NO: 3322684 - RNA, 14 nt, Human
guauuuuuuuacua

SEQ ID NO: 3322685 - RNA, 16 nt, Human
gucacacacuuuggcu

SEQ ID NO: 3322686 - RNA, 20 nt, Human
gucacacaguauuacuucug

SEQ ID NO: 3322687 - RNA, 21 nt, Human
guauuuuuuuacuaauagaca

SEQ ID NO: 3322688 - RNA, 17 nt, Human
guauuuuuuuacuaaua

SEQ ID NO: 3322689 - RNA, 18 nt, Human
gucaaaguggugagaggc

SEQ ID NO: 3322690 - RNA, 19 nt, Human
gucaaaguggugagaggca

SEQ ID NO: 3322691 - RNA, 19 nt, Human
gugaaccaccacacccagc

SEQ ID NO: 3322692 - RNA, 15 nt, Human
aacguggcugcuuca

SEQ ID NO: 3322693 - RNA, 19 nt, Human
aacguggcugcuucaagga

SEQ ID NO: 3322694 - RNA, 16 nt, Human
aacguggcugcuucaa

SEQ ID NO: 3322695 - RNA, 24 nt, Human
gucuuuucuugcaugaggcuagug

SEQ ID NO: 3322696 - RNA, 19 nt, Human
gucuuuucuugcaugaggc

SEQ ID NO: 3322697 - RNA, 14 nt, Human
gucuuuucuugcau

SEQ ID NO: 3322698 - RNA, 17 nt, Human
gucuuuggacccugagg

SEQ ID NO: 3322699 - RNA, 15 nt, Human
gucuuuggacccuga

SEQ ID NO: 3322700 - RNA, 14 nt, Human
gucuuuggacccug

SEQ ID NO: 3322701 - RNA, 15 nt, Human
gucuuagauguauau

SEQ ID NO: 3322702 - RNA, 23 nt, Human
aaccauuuugcugucccuuuucc

SEQ ID NO: 3322703 - RNA, 11 nt, Human
aacccagcucu

SEQ ID NO: 3322704 - RNA, 14 nt, Human
aacccagcucuggu

SEQ ID NO: 3322705 - RNA, 13 nt, Human
aacccagcucugg

SEQ ID NO: 3322706 - RNA, 17 nt, Human
aacccagcucuggucca

SEQ ID NO: 3322707 - RNA, 13 nt, Human
aacccccagccug

SEQ ID NO: 3322708 - RNA, 14 nt, Human
aacccccagccugc

SEQ ID NO: 3322709 - RNA, 15 nt, Human
aacccccagccugcu

SEQ ID NO: 3322710 - RNA, 17 nt, Human
aaccuccgccucuuggg

SEQ ID NO: 3322711 - RNA, 14 nt, Human
aaccuccugggcua

SEQ ID NO: 3322712 - RNA, 13 nt, Human
gucuccauguuug

SEQ ID NO: 3322713 - RNA, 16 nt, Human
aacauuuugucauaua

SEQ ID NO: 3322714 - RNA, 20 nt, Human
aaccacaucuugcucugcug

SEQ ID NO: 3322715 - RNA, 22 nt, Human
aaccacaucuugcucugcugac

SEQ ID NO: 3322716 - RNA, 20 nt, Human
aaccaucauugaaaucuuuu

SEQ ID NO: 3322717 - RNA, 19 nt, Human
aaccaucauugaaaucuuu

SEQ ID NO: 3322718 - RNA, 21 nt, Human
aaccaucauugaaaucuuuuu

SEQ ID NO: 3322719 - RNA, 18 nt, Human
aaccacaucuugcucugc

SEQ ID NO: 3322720 - RNA, 19 nt, Human
aacagguuuuccugaagaa

SEQ ID NO: 3322721 - RNA, 23 nt, Human
aacaggcugggcuucaguggcag

SEQ ID NO: 3322722 - RNA, 19 nt, Human
aacagacuggaagcacagc

SEQ ID NO: 3322723 - RNA, 22 nt, Human
aacaggcugggcuucaguggca

SEQ ID NO: 3322724 - RNA, 13 nt, Human
aacaggcugggcu

SEQ ID NO: 3322725 - RNA, 13 nt, Human
guccgagcuuuga

SEQ ID NO: 3322726 - RNA, 21 nt, Human
aacagaaauguacagcaagga

SEQ ID NO: 3322727 - RNA, 15 nt, Human
aacagaaauguacag

SEQ ID NO: 3322728 - RNA, 10 nt, Human
aacagaaaug

SEQ ID NO: 3322729 - RNA, 15 nt, Human
aacauacucccaucu

SEQ ID NO: 3322730 - RNA, 14 nt, Human
aacauacucccauc

SEQ ID NO: 3322731 - RNA, 20 nt, Human
aacacuguucucugcccucc

SEQ ID NO: 3322732 - RNA, 15 nt, Human
aacacuguucucugc

SEQ ID NO: 3322733 - RNA, 14 nt, Human
aacacucugagacu

SEQ ID NO: 3322734 - RNA, 13 nt, Human
aacacucugagac

SEQ ID NO: 3322735 - RNA, 12 nt, Human
aacacucugaga

SEQ ID NO: 3322736 - RNA, 11 nt, Human
aacacucugag

SEQ ID NO: 3322737 - RNA, 12 nt, Human
aacacuccuuca

SEQ ID NO: 3322738 - RNA, 21 nt, Human
aacacucauugaccugaggcc

SEQ ID NO: 3322739 - RNA, 17 nt, Human
aacacucauugaccuga

SEQ ID NO: 3322740 - RNA, 22 nt, Human
gucauuugagcagggcucagcg

SEQ ID NO: 3322741 - RNA, 19 nt, Human
gucauuugagcagggcuca

SEQ ID NO: 3322742 - RNA, 21 nt, Human
aacacuguucucugcccucca

SEQ ID NO: 3322743 - RNA, 21 nt, Human
gucauuugagcagggcucagc

SEQ ID NO: 3322744 - RNA, 23 nt, Human
aacaaggcaaggcugucaauuac

SEQ ID NO: 3322745 - RNA, 17 nt, Human
aacaagaccacguuucu

SEQ ID NO: 3322746 - RNA, 16 nt, Human
aacaagaccacguuuc

SEQ ID NO: 3322747 - RNA, 19 nt, Human
aacaagaccacguuucuaa

SEQ ID NO: 3322748 - RNA, 12 nt, Human
gucacaggcagg

SEQ ID NO: 3322749 - RNA, 16 nt, Human
gucacaggcaggucca

SEQ ID NO: 3322750 - RNA, 13 nt, Human
gucacaggcaggu

SEQ ID NO: 3322751 - RNA, 15 nt, Human
gucacaggcaggucc

SEQ ID NO: 3322752 - RNA, 22 nt, Human
agagaaaaaauauuuuccugcc

SEQ ID NO: 3322753 - RNA, 19 nt, Human
agacuuuucuuucagccaa

SEQ ID NO: 3322754 - RNA, 15 nt, Human
agacuguacaaagua

SEQ ID NO: 3322755 - RNA, 16 nt, Human
agacuguacaaaguag

SEQ ID NO: 3322756 - RNA, 14 nt, Human
agacuguacaaagu

SEQ ID NO: 3322757 - RNA, 20 nt, Human
agacucgcgacaaugcaaac

SEQ ID NO: 3322758 - RNA, 18 nt, Human
ucuuucuggcuaugcauu

SEQ ID NO: 3322759 - RNA, 13 nt, Human
ucuuucugcuuug

SEQ ID NO: 3322760 - RNA, 20 nt, Human
ucuuuauaauucuacuuuga

SEQ ID NO: 3322761 - RNA, 23 nt, Human
agacuccugcaggcagccaggcc

SEQ ID NO: 3322762 - RNA, 19 nt, Human
agacucgcgacaaugcaaa

SEQ ID NO: 3322763 - RNA, 18 nt, Human
agacucgcgacaaugcaa

SEQ ID NO: 3322764 - RNA, 17 nt, Human
agacucgcgacaaugca

SEQ ID NO: 3322765 - RNA, 15 nt, Human
agacucgcgacaaug

SEQ ID NO: 3322766 - RNA, 14 nt, Human
ucuugguuuguaaa

SEQ ID NO: 3322767 - RNA, 19 nt, Human
ucuugguccugcugcaguu

SEQ ID NO: 3322768 - RNA, 20 nt, Human
ucuuuaaugucacaggcagg

SEQ ID NO: 3322769 - RNA, 16 nt, Human
ucuugguuuguaaauu

SEQ ID NO: 3322770 - RNA, 19 nt, Human
ucuuuaaugucacaggcag

SEQ ID NO: 3322771 - RNA, 22 nt, Human
ucuuuaaugucacaggcagguc

SEQ ID NO: 3322772 - RNA, 20 nt, Human
ucuucuguacgucugacagg

SEQ ID NO: 3322773 - RNA, 23 nt, Human
agacauacuaaccagcagaaaug

SEQ ID NO: 3322774 - RNA, 17 nt, Human
ucuuauuuaaugaaaga

SEQ ID NO: 3322775 - RNA, 22 nt, Human
ucuucugcuucagccucccgag

SEQ ID NO: 3322776 - RNA, 19 nt, Human
ucuucugcuucagccuccc

SEQ ID NO: 3322777 - RNA, 21 nt, Human
ucuucuguacgucugacaggc

SEQ ID NO: 3322778 - RNA, 22 nt, Human
ucuucuguacgucugacaggca

SEQ ID NO: 3322779 - RNA, 16 nt, Human
ucuugagccuugaacu

SEQ ID NO: 3322780 - RNA, 17 nt, Human
ucuugagccuugaacuu

SEQ ID NO: 3322781 - RNA, 19 nt, Human
ucuugagccuugaacuuug

SEQ ID NO: 3322782 - RNA, 18 nt, Human
ucuugagccuugaacuuu

SEQ ID NO: 3322783 - RNA, 14 nt, Human
agacccggcugcgu

SEQ ID NO: 3322784 - RNA, 23 nt, Human
agaaccccaggguccuguagccc

SEQ ID NO: 3322785 - RNA, 19 nt, Human
agaauuaguggcacuugcu

SEQ ID NO: 3322786 - RNA, 21 nt, Human
agaauguguuuaaacuugguu

SEQ ID NO: 3322787 - RNA, 20 nt, Human
agaauucucagaaucucaaa

SEQ ID NO: 3322788 - RNA, 20 nt, Human
agaauuauaauuaguuccuc

SEQ ID NO: 3322789 - RNA, 14 nt, Human
agaauucucuaguu

SEQ ID NO: 3322790 - RNA, 19 nt, Human
ucuguuuagauaauacacc

SEQ ID NO: 3322791 - RNA, 16 nt, Human
ucuguuuagauaauac

SEQ ID NO: 3322792 - RNA, 23 nt, Human
ucuguuuagauaauacaccacua

SEQ ID NO: 3322793 - RNA, 13 nt, Human
ucuguuuagauaa

SEQ ID NO: 3322794 - RNA, 18 nt, Human
ucuguacgucugacaggc

SEQ ID NO: 3322795 - RNA, 13 nt, Human
agacacaagccuu

SEQ ID NO: 3322796 - RNA, 14 nt, Human
agacacaagccuuc

SEQ ID NO: 3322797 - RNA, 17 nt, Human
agaauucucuuauccaa

SEQ ID NO: 3322798 - RNA, 19 nt, Human
agaauucucuaguuugauu

SEQ ID NO: 3322799 - RNA, 18 nt, Human
agaauucucuaguuugau

SEQ ID NO: 3322800 - RNA, 17 nt, Human
agacacaggcccggcuc

SEQ ID NO: 3322801 - RNA, 19 nt, Human
agacacaggcccggcucca

SEQ ID NO: 3322802 - RNA, 20 nt, Human
agacacaggcccggcuccag

SEQ ID NO: 3322803 - RNA, 21 nt, Human
agacacaggcccggcuccagg

SEQ ID NO: 3322804 - RNA, 22 nt, Human
agacacaggcccggcuccaggc

SEQ ID NO: 3322805 - RNA, 20 nt, Human
agacacauguccaagaagcc

SEQ ID NO: 3322806 - RNA, 22 nt, Human
agacaccuugacagggcacacc

SEQ ID NO: 3322807 - RNA, 19 nt, Human
agacaccuugacagggcac

SEQ ID NO: 3322808 - RNA, 24 nt, Human
agacacauguccaagaagcccagg

SEQ ID NO: 3322809 - RNA, 23 nt, Human
agacacaggcccggcuccaggcu

SEQ ID NO: 3322810 - RNA, 16 nt, Human
agacacaggcccggcu

SEQ ID NO: 3322811 - RNA, 22 nt, Human
agacacauguccaagaagccca

SEQ ID NO: 3322812 - RNA, 21 nt, Human
agacacauguccaagaagccc

SEQ ID NO: 3322813 - RNA, 14 nt, Human
agacagcugccugg

SEQ ID NO: 3322814 - RNA, 13 nt, Human
agacagcugccug

SEQ ID NO: 3322815 - RNA, 12 nt, Human
ucuuagauguau

SEQ ID NO: 3322816 - RNA, 18 nt, Human
ucuuaugggcuggguucu

SEQ ID NO: 3322817 - RNA, 19 nt, Human
agacagucccugccaaugg

SEQ ID NO: 3322818 - RNA, 13 nt, Human
agacagucccugc

SEQ ID NO: 3322819 - RNA, 15 nt, Human
agacagcugccuggg

SEQ ID NO: 3322820 - RNA, 12 nt, Human
agacagcugccu

SEQ ID NO: 3322821 - RNA, 12 nt, Human
agacagucccug

SEQ ID NO: 3322822 - RNA, 23 nt, Human
ugaccauucuccaccugccaggg

SEQ ID NO: 3322823 - RNA, 12 nt, Human
ugacccacugcu

SEQ ID NO: 3322824 - RNA, 13 nt, Human
ugacccacugcuu

SEQ ID NO: 3322825 - RNA, 15 nt, Human
agaugcuucucacug

SEQ ID NO: 3322826 - RNA, 14 nt, Human
agaugcaccagccc

SEQ ID NO: 3322827 - RNA, 15 nt, Human
agaugcaccagcccu

SEQ ID NO: 3322828 - RNA, 20 nt, Human
ugacauuguuggccaaagcc

SEQ ID NO: 3322829 - RNA, 21 nt, Human
ugacauuguuggccaaagcca

SEQ ID NO: 3322830 - RNA, 18 nt, Human
ugaccaaugauggucacc

SEQ ID NO: 3322831 - RNA, 15 nt, Human
agaucagccugggca

SEQ ID NO: 3322832 - RNA, 13 nt, Human
agaucagccuggg

SEQ ID NO: 3322833 - RNA, 20 nt, Human
ugacagggcacaccgggcac

SEQ ID NO: 3322834 - RNA, 11 nt, Human
ugacagggcac

SEQ ID NO: 3322835 - RNA, 16 nt, Human
ugacagggcacaccgg

SEQ ID NO: 3322836 - RNA, 20 nt, Human
ugacaggcaaugcuggcugu

SEQ ID NO: 3322837 - RNA, 21 nt, Human
ugacacacagcucuguccugg

SEQ ID NO: 3322838 - RNA, 22 nt, Human
agagucagaaguuucugccgca

SEQ ID NO: 3322839 - RNA, 19 nt, Human
ugaaugucagugugacuga

SEQ ID NO: 3322840 - RNA, 18 nt, Human
ugaaugucagugugacug

SEQ ID NO: 3322841 - RNA, 20 nt, Human
ugaaugguuuucaaaauaaa

SEQ ID NO: 3322842 - RNA, 21 nt, Human
agaguuguuacauuuuuaagu

SEQ ID NO: 3322843 - RNA, 12 nt, Human
agaguuguuaca

SEQ ID NO: 3322844 - RNA, 22 nt, Human
agagucucacuguugcccaggc

SEQ ID NO: 3322845 - RNA, 22 nt, Human
agaguugauacuacaguuuguu

SEQ ID NO: 3322846 - RNA, 20 nt, Human
agaguugauacuacaguuug

SEQ ID NO: 3322847 - RNA, 17 nt, Human
agaguugauacuacagu

SEQ ID NO: 3322848 - RNA, 20 nt, Human
ugacacacagcucuguccug

SEQ ID NO: 3322849 - RNA, 17 nt, Human
agaucacgccacugcac

SEQ ID NO: 3322850 - RNA, 18 nt, Human
agaucacgccacugcacu

SEQ ID NO: 3322851 - RNA, 14 nt, Human
agaucacgccacug

SEQ ID NO: 3322852 - RNA, 15 nt, Human
agaucacgccacugc

SEQ ID NO: 3322853 - RNA, 16 nt, Human
agaucacgccacugca

SEQ ID NO: 3322854 - RNA, 12 nt, Human
agauaaaugugc

SEQ ID NO: 3322855 - RNA, 14 nt, Human
agagcugccaccug

SEQ ID NO: 3322856 - RNA, 18 nt, Human
agagcugccaccugccug

SEQ ID NO: 3322857 - RNA, 12 nt, Human
agagcagagacc

SEQ ID NO: 3322858 - RNA, 16 nt, Human
ucuuuggacccugagg

SEQ ID NO: 3322859 - RNA, 21 nt, Human
ucuuuggacccugaggcccag

SEQ ID NO: 3322860 - RNA, 17 nt, Human
ucuuuggacccugaggc

SEQ ID NO: 3322861 - RNA, 16 nt, Human
agagauugugguuuca

SEQ ID NO: 3322862 - RNA, 20 nt, Human
agagcagagaccaucccuga

SEQ ID NO: 3322863 - RNA, 18 nt, Human
agagcagagaccaucccu

SEQ ID NO: 3322864 - RNA, 17 nt, Human
agagcagagaccauccc

SEQ ID NO: 3322865 - RNA, 11 nt, Human
agagccuugcg

SEQ ID NO: 3322866 - RNA, 22 nt, Human
agagccuuccaggggugggaca

SEQ ID NO: 3322867 - RNA, 21 nt, Human
agagccuugcggaagguucua

SEQ ID NO: 3322868 - RNA, 15 nt, Human
ugaaauuuuuauuaa

SEQ ID NO: 3322869 - RNA, 22 nt, Human
ugaaccgaugagaaauaaaguu

SEQ ID NO: 3322870 - RNA, 14 nt, Human
ugaacuccuggccu

SEQ ID NO: 3322871 - RNA, 15 nt, Human
ugaacuccuggccuc

SEQ ID NO: 3322872 - RNA, 11 nt, Human
ugaacuccugg

SEQ ID NO: 3322873 - RNA, 12 nt, Human
ugaacuccuggc

SEQ ID NO: 3322874 - RNA, 22 nt, Human
ugaacuuugaccucugcagcaa

SEQ ID NO: 3322875 - RNA, 17 nt, Human
ugaacuuugaccucugc

SEQ ID NO: 3322876 - RNA, 20 nt, Human
ugaacuuugaccucugcagc

SEQ ID NO: 3322877 - RNA, 19 nt, Human
ugaacuuugaccucugcag

SEQ ID NO: 3322878 - RNA, 20 nt, Human
agagguucaaagauauuuug

SEQ ID NO: 3322879 - RNA, 19 nt, Human
agaggccaugggccuccug

SEQ ID NO: 3322880 - RNA, 17 nt, Human
agaggcuaugugagcac

SEQ ID NO: 3322881 - RNA, 10 nt, Human
agaggcaggg

SEQ ID NO: 3322882 - RNA, 13 nt, Human
agaggcagggucu

SEQ ID NO: 3322883 - RNA, 24 nt, Human
agaggcagccccauucugccugcc

SEQ ID NO: 3322884 - RNA, 13 nt, Human
agaggcagcccca

SEQ ID NO: 3322885 - RNA, 19 nt, Human
agaggcagccccauucugc

SEQ ID NO: 3322886 - RNA, 15 nt, Human
uccuucagugccuua

SEQ ID NO: 3322887 - RNA, 14 nt, Human
uccuucagugccuu

SEQ ID NO: 3322888 - RNA, 17 nt, Human
uccuucagugccuuaug

SEQ ID NO: 3322889 - RNA, 16 nt, Human
uccuucagugccuuau

SEQ ID NO: 3322890 - RNA, 15 nt, Human
uccuuuagcgcccag

SEQ ID NO: 3322891 - RNA, 19 nt, Human
uccuuuagcgcccaguugg

SEQ ID NO: 3322892 - RNA, 23 nt, Human
uccuuguguuacuaaguuuuuau

SEQ ID NO: 3322893 - RNA, 14 nt, Human
uccuuguguuacua

SEQ ID NO: 3322894 - RNA, 22 nt, Human
uccuuggugucgggcaugacac

SEQ ID NO: 3322895 - RNA, 22 nt, Human
uccuuuagcgcccaguugggug

SEQ ID NO: 3322896 - RNA, 16 nt, Human
ucgagcaugccuggau

SEQ ID NO: 3322897 - RNA, 15 nt, Human
ucgagcaugccugga

SEQ ID NO: 3322898 - RNA, 18 nt, Human
ucgagcaugccuggaugg

SEQ ID NO: 3322899 - RNA, 19 nt, Human
ucgcgacaaugcaaaccau

SEQ ID NO: 3322900 - RNA, 14 nt, Human
ucgcgacaaugcaa

SEQ ID NO: 3322901 - RNA, 16 nt, Human
ucgcgacaaugcaaac

SEQ ID NO: 3322902 - RNA, 22 nt, Human
acugcaucaagaugugacaugu

SEQ ID NO: 3322903 - RNA, 20 nt, Human
acugcaucaagaugugacau

SEQ ID NO: 3322904 - RNA, 16 nt, Human
acugcauguuugugau

SEQ ID NO: 3322905 - RNA, 15 nt, Human
acugcauguuuguga

SEQ ID NO: 3322906 - RNA, 22 nt, Human
uccuagaaauuccccacccuga

SEQ ID NO: 3322907 - RNA, 21 nt, Human
uccuagaaauuccccacccug

SEQ ID NO: 3322908 - RNA, 16 nt, Human
acugcauaugaaagga

SEQ ID NO: 3322909 - RNA, 18 nt, Human
acugcuuaacuucacaua

SEQ ID NO: 3322910 - RNA, 15 nt, Human
acuggauuaaacuua

SEQ ID NO: 3322911 - RNA, 20 nt, Human
acugcuuaacuucacauauu

SEQ ID NO: 3322912 - RNA, 21 nt, Human
acugcuugugaaaggaaagag

SEQ ID NO: 3322913 - RNA, 12 nt, Human
ucgggcaugaca

SEQ ID NO: 3322914 - RNA, 11 nt, Human
ucgggcaugac

SEQ ID NO: 3322915 - RNA, 17 nt, Human
ucgggaggucgaggcag

SEQ ID NO: 3322916 - RNA, 21 nt, Human
ucgggaggucgaggcaggagg

SEQ ID NO: 3322917 - RNA, 19 nt, Human
ucgggaggucgaggcagga

SEQ ID NO: 3322918 - RNA, 22 nt, Human
acugugcugagucugaaggcug

SEQ ID NO: 3322919 - RNA, 18 nt, Human
acuguccuacccacccuc

SEQ ID NO: 3322920 - RNA, 17 nt, Human
acuguccuacccacccu

SEQ ID NO: 3322921 - RNA, 14 nt, Human
ucuaaagcugccag

SEQ ID NO: 3322922 - RNA, 13 nt, Human
ucuaaagcugcca

SEQ ID NO: 3322923 - RNA, 15 nt, Human
ucuaaagcugccagc

SEQ ID NO: 3322924 - RNA, 19 nt, Human
acuguucucugcccuccaa

SEQ ID NO: 3322925 - RNA, 21 nt, Human
acuguucucugcccuccaaga

SEQ ID NO: 3322926 - RNA, 20 nt, Human
acuguucucugcccuccaag

SEQ ID NO: 3322927 - RNA, 14 nt, Human
acuguucucugccc

SEQ ID NO: 3322928 - RNA, 13 nt, Human
acuuaaucuaaau

SEQ ID NO: 3322929 - RNA, 16 nt, Human
acuuaaucuaaaugga

SEQ ID NO: 3322930 - RNA, 15 nt, Human
acuuaaucuaaaugg

SEQ ID NO: 3322931 - RNA, 17 nt, Human
acuguugcccaggcugg

SEQ ID NO: 3322932 - RNA, 18 nt, Human
acuguugcccaggcuggc

SEQ ID NO: 3322933 - RNA, 12 nt, Human
acuguugcccag

SEQ ID NO: 3322934 - RNA, 13 nt, Human
acuguugcccagg

SEQ ID NO: 3322935 - RNA, 14 nt, Human
acuguugcccaggc

SEQ ID NO: 3322936 - RNA, 15 nt, Human
acuuaaauaauguga

SEQ ID NO: 3322937 - RNA, 16 nt, Human
acuuaaauaaugugaa

SEQ ID NO: 3322938 - RNA, 18 nt, Human
acuuaaauaaugugaaac

SEQ ID NO: 3322939 - RNA, 17 nt, Human
acuuaaauaaugugaaa

SEQ ID NO: 3322940 - RNA, 15 nt, Human
acuucuccacccugc

SEQ ID NO: 3322941 - RNA, 16 nt, Human
acuucuccacccugcu

SEQ ID NO: 3322942 - RNA, 19 nt, Human
acuugagaauuacccuuuu

SEQ ID NO: 3322943 - RNA, 19 nt, Human
acuugagcccagagugaac

SEQ ID NO: 3322944 - RNA, 17 nt, Human
acuuguggacacagcuc

SEQ ID NO: 3322945 - RNA, 16 nt, Human
acuuguggacacagcu

SEQ ID NO: 3322946 - RNA, 14 nt, Human
acuucuccacccug

SEQ ID NO: 3322947 - RNA, 22 nt, Human
acuucgggaggucgaggcagga

SEQ ID NO: 3322948 - RNA, 13 nt, Human
ucucacuccuuga

SEQ ID NO: 3322949 - RNA, 12 nt, Human
ucucacucuguc

SEQ ID NO: 3322950 - RNA, 23 nt, Human
ucucacacaugagcaucaggcca

SEQ ID NO: 3322951 - RNA, 16 nt, Human
acuucagcugacuuuu

SEQ ID NO: 3322952 - RNA, 11 nt, Human
acuucagcuga

SEQ ID NO: 3322953 - RNA, 11 nt, Human
ucucacuccuu

SEQ ID NO: 3322954 - RNA, 19 nt, Human
ucucagggccuggucguuu

SEQ ID NO: 3322955 - RNA, 15 nt, Human
ucucagggccugguc

SEQ ID NO: 3322956 - RNA, 14 nt, Human
ucucagggccuggu

SEQ ID NO: 3322957 - RNA, 13 nt, Human
ucucagggccugg

SEQ ID NO: 3322958 - RNA, 12 nt, Human
ucucagggccug

SEQ ID NO: 3322959 - RNA, 15 nt, Human
acuuguggacacagc

SEQ ID NO: 3322960 - RNA, 11 nt, Human
ucuccaggcug

SEQ ID NO: 3322961 - RNA, 13 nt, Human
ucuccaaaauaaa

SEQ ID NO: 3322962 - RNA, 22 nt, Human
ucuccaaaauaaaacuuuuuaa

SEQ ID NO: 3322963 - RNA, 19 nt, Human
ucuccaaaauaaaacuuuu

SEQ ID NO: 3322964 - RNA, 17 nt, Human
ucuccaaaauaaaacuu

SEQ ID NO: 3322965 - RNA, 16 nt, Human
ucuccaggcuguaucc

SEQ ID NO: 3322966 - RNA, 21 nt, Human
ucuccuccuuuucacaguucu

SEQ ID NO: 3322967 - RNA, 17 nt, Human
acuuucuagccagagga

SEQ ID NO: 3322968 - RNA, 16 nt, Human
acuuucuagccagagg

SEQ ID NO: 3322969 - RNA, 14 nt, Human
acuuugaccucugc

SEQ ID NO: 3322970 - RNA, 16 nt, Human
ucuccauguuugaugu

SEQ ID NO: 3322971 - RNA, 17 nt, Human
ucucugcccuccaagac

SEQ ID NO: 3322972 - RNA, 16 nt, Human
ucucugcccuccaaga

SEQ ID NO: 3322973 - RNA, 15 nt, Human
ucucugcccuccaag

SEQ ID NO: 3322974 - RNA, 11 nt, Human
ucucugcccuc

SEQ ID NO: 3322975 - RNA, 14 nt, Human
ucucuccuguaccu

SEQ ID NO: 3322976 - RNA, 16 nt, Human
ucucuccuguaccucu

SEQ ID NO: 3322977 - RNA, 19 nt, Human
ucucuccagccccuggaug

SEQ ID NO: 3322978 - RNA, 18 nt, Human
ucucuccagccccuggau

SEQ ID NO: 3322979 - RNA, 16 nt, Human
ucucuccagccccugg

SEQ ID NO: 3322980 - RNA, 17 nt, Human
ucucuccagccccugga

SEQ ID NO: 3322981 - RNA, 21 nt, Human
ucucucaggccaaacucaccu

SEQ ID NO: 3322982 - RNA, 15 nt, Human
ucucucacuccuuga

SEQ ID NO: 3322983 - RNA, 13 nt, Human
ucucucacuccuu

SEQ ID NO: 3322984 - RNA, 16 nt, Human
acuuugaccucugcag

SEQ ID NO: 3322985 - RNA, 15 nt, Human
acuuugaccucugca

SEQ ID NO: 3322986 - RNA, 18 nt, Human
acuuugaccucugcagca

SEQ ID NO: 3322987 - RNA, 17 nt, Human
ucucuugagccugggag

SEQ ID NO: 3322988 - RNA, 18 nt, Human
ucucuugagccugggagg

SEQ ID NO: 3322989 - RNA, 16 nt, Human
ucucuugauucauaau

SEQ ID NO: 3322990 - RNA, 14 nt, Human
ucucuugauucaua

SEQ ID NO: 3322991 - RNA, 13 nt, Human
agaaaaagaaaaa

SEQ ID NO: 3322992 - RNA, 20 nt, Human
ucucuuuaaugucacaggca

SEQ ID NO: 3322993 - RNA, 17 nt, Human
agaaaaaggaugcacag

SEQ ID NO: 3322994 - RNA, 22 nt, Human
ucugagacucgcgacaaugcaa

SEQ ID NO: 3322995 - RNA, 23 nt, Human
ucugagacucgcgacaaugcaaa

SEQ ID NO: 3322996 - RNA, 17 nt, Human
ucugcacuccccugcug

SEQ ID NO: 3322997 - RNA, 19 nt, Human
ucugcacuccccugcuggg

SEQ ID NO: 3322998 - RNA, 18 nt, Human
ucugcacuccccugcugg

SEQ ID NO: 3322999 - RNA, 20 nt, Human
ucugcacuccccugcugggu

SEQ ID NO: 3323000 - RNA, 18 nt, Human
ucugcagcaauaaagcag

SEQ ID NO: 3323001 - RNA, 20 nt, Human
agaaauaucugaaaauguau

SEQ ID NO: 3323002 - RNA, 14 nt, Human
agaaauauaauuga

SEQ ID NO: 3323003 - RNA, 19 nt, Human
agaaauaucugaaaaugua

SEQ ID NO: 3323004 - RNA, 21 nt, Human
ucugaacuuggcgcugccccu

SEQ ID NO: 3323005 - RNA, 23 nt, Human
acgccagauucuuuccugaggcu

SEQ ID NO: 3323006 - RNA, 22 nt, Human
acgccagauucuuuccugaggc

SEQ ID NO: 3323007 - RNA, 16 nt, Human
ucccaaagcagugcau

SEQ ID NO: 3323008 - RNA, 18 nt, Human
ucccaaacccuucagugc

SEQ ID NO: 3323009 - RNA, 13 nt, Human
ucccaaagugcug

SEQ ID NO: 3323010 - RNA, 18 nt, Human
ucccaaagcagugcaugc

SEQ ID NO: 3323011 - RNA, 17 nt, Human
ucccaaagcagugcaug

SEQ ID NO: 3323012 - RNA, 21 nt, Human
ucccaaagcagugcaugcugu

SEQ ID NO: 3323013 - RNA, 14 nt, Human
ucccaccccacaca

SEQ ID NO: 3323014 - RNA, 20 nt, Human
acgggaggguaaggcugugg

SEQ ID NO: 3323015 - RNA, 16 nt, Human
ucccacaaaggagagc

SEQ ID NO: 3323016 - RNA, 20 nt, Human
ucccaccccacacacgccag

SEQ ID NO: 3323017 - RNA, 15 nt, Human
ucccaccccacacac

SEQ ID NO: 3323018 - RNA, 23 nt, Human
acguggcugcuucaaggauccug

SEQ ID NO: 3323019 - RNA, 15 nt, Human
acgguuuuacugcag

SEQ ID NO: 3323020 - RNA, 14 nt, Human
acguacacauuuua

SEQ ID NO: 3323021 - RNA, 22 nt, Human
ucccauaugccugggcagaagg

SEQ ID NO: 3323022 - RNA, 16 nt, Human
ucccauaugccugggc

SEQ ID NO: 3323023 - RNA, 15 nt, Human
ucccaucacccgcua

SEQ ID NO: 3323024 - RNA, 15 nt, Human
acuacauucuguuaa

SEQ ID NO: 3323025 - RNA, 17 nt, Human
uccccaccgcagacagg

SEQ ID NO: 3323026 - RNA, 21 nt, Human
uccccaccgcagacaggacca

SEQ ID NO: 3323027 - RNA, 18 nt, Human
uccccaccgcagacagga

SEQ ID NO: 3323028 - RNA, 17 nt, Human
ucccagcugugcucugg

SEQ ID NO: 3323029 - RNA, 13 nt, Human
acuacauucuguu

SEQ ID NO: 3323030 - RNA, 12 nt, Human
acuacauucugu

SEQ ID NO: 3323031 - RNA, 11 nt, Human
acuacauucug

SEQ ID NO: 3323032 - RNA, 14 nt, Human
acuacauucuguua

SEQ ID NO: 3323033 - RNA, 11 nt, Human
acuacaggcac

SEQ ID NO: 3323034 - RNA, 15 nt, Human
acuacaggcacccac

SEQ ID NO: 3323035 - RNA, 17 nt, Human
acuacaguccucccauc

SEQ ID NO: 3323036 - RNA, 14 nt, Human
acuacaguuuguua

SEQ ID NO: 3323037 - RNA, 13 nt, Human
acuacaguuuguu

SEQ ID NO: 3323038 - RNA, 15 nt, Human
acucauucuucugua

SEQ ID NO: 3323039 - RNA, 14 nt, Human
acucauugaccuga

SEQ ID NO: 3323040 - RNA, 17 nt, Human
acuccagaauuucccaa

SEQ ID NO: 3323041 - RNA, 15 nt, Human
acuccagaauuuccc

SEQ ID NO: 3323042 - RNA, 15 nt, Human
acucauugaccugag

SEQ ID NO: 3323043 - RNA, 17 nt, Human
acuccugcaggcagcca

SEQ ID NO: 3323044 - RNA, 19 nt, Human
acuccugcaggcagccagg

SEQ ID NO: 3323045 - RNA, 18 nt, Human
acuccugcaggcagccag

SEQ ID NO: 3323046 - RNA, 13 nt, Human
acuccagccuggg

SEQ ID NO: 3323047 - RNA, 23 nt, Human
acuccagaauuucccaaagcagu

SEQ ID NO: 3323048 - RNA, 12 nt, Human
acuccagccugg

SEQ ID NO: 3323049 - RNA, 12 nt, Human
ucccuuuuccuu

SEQ ID NO: 3323050 - RNA, 16 nt, Human
uccuagaaauucccca

SEQ ID NO: 3323051 - RNA, 17 nt, Human
uccggucccugucccag

SEQ ID NO: 3323052 - RNA, 21 nt, Human
acuccugcaggcagccaggcc

SEQ ID NO: 3323053 - RNA, 15 nt, Human
ucccugguggcagcu

SEQ ID NO: 3323054 - RNA, 12 nt, Human
ucccugucccag

SEQ ID NO: 3323055 - RNA, 16 nt, Human
ucccugaaggccccgc

SEQ ID NO: 3323056 - RNA, 18 nt, Human
ucccucuuucccucccuu

SEQ ID NO: 3323057 - RNA, 20 nt, Human
ucccucuuucccucccuucc

SEQ ID NO: 3323058 - RNA, 14 nt, Human
ucccucuuucccuc

SEQ ID NO: 3323059 - RNA, 15 nt, Human
ucccugaaggccccg

SEQ ID NO: 3323060 - RNA, 11 nt, Human
ucccugaaggc

SEQ ID NO: 3323061 - RNA, 20 nt, Human
ucccgaauagcugggacuac

SEQ ID NO: 3323062 - RNA, 18 nt, Human
ucccgaauagcugggacu

SEQ ID NO: 3323063 - RNA, 15 nt, Human
ucccgaguagcuggg

SEQ ID NO: 3323064 - RNA, 18 nt, Human
ucccgaguagcugggacu

SEQ ID NO: 3323065 - RNA, 16 nt, Human
ucccgaguagcuggga

SEQ ID NO: 3323066 - RNA, 17 nt, Human
ucccgaguagcugggac

SEQ ID NO: 3323067 - RNA, 12 nt, Human
acucaccccagc

SEQ ID NO: 3323068 - RNA, 21 nt, Human
acucacauuuauucugcucac

SEQ ID NO: 3323069 - RNA, 17 nt, Human
acuacucccccaggugg

SEQ ID NO: 3323070 - RNA, 17 nt, Human
accuuagacagucccug

SEQ ID NO: 3323071 - RNA, 14 nt, Human
accuuuugagugcc

SEQ ID NO: 3323072 - RNA, 20 nt, Human
accuuuugagugccuuacac

SEQ ID NO: 3323073 - RNA, 17 nt, Human
accuuuugagugccuua

SEQ ID NO: 3323074 - RNA, 19 nt, Human
uccagacccggcugcgugg

SEQ ID NO: 3323075 - RNA, 15 nt, Human
uccagacccggcugc

SEQ ID NO: 3323076 - RNA, 18 nt, Human
uccagacccggcugcgug

SEQ ID NO: 3323077 - RNA, 16 nt, Human
uccagaauuucccaaa

SEQ ID NO: 3323078 - RNA, 22 nt, Human
uccagaauuucccaaagcagug

SEQ ID NO: 3323079 - RNA, 20 nt, Human
uccagaauuucccaaagcag

SEQ ID NO: 3323080 - RNA, 14 nt, Human
uccagacccggcug

SEQ ID NO: 3323081 - RNA, 21 nt, Human
accuuuuuuauacauaaacaa

SEQ ID NO: 3323082 - RNA, 21 nt, Human
uccaggcuguaucccaugagc

SEQ ID NO: 3323083 - RNA, 20 nt, Human
accuuuuuuauacauaaaca

SEQ ID NO: 3323084 - RNA, 19 nt, Human
accuuuuuuauacauaaac

SEQ ID NO: 3323085 - RNA, 16 nt, Human
acgagcaggcuucuuc

SEQ ID NO: 3323086 - RNA, 17 nt, Human
acgccagauucuuuccu

SEQ ID NO: 3323087 - RNA, 19 nt, Human
acgccagauucuuuccuga

SEQ ID NO: 3323088 - RNA, 13 nt, Human
uccagccccugga

SEQ ID NO: 3323089 - RNA, 12 nt, Human
uccagccccugg

SEQ ID NO: 3323090 - RNA, 14 nt, Human
uccaggcuguaucc

SEQ ID NO: 3323091 - RNA, 23 nt, Human
uccaacccucaucaccaacgucu

SEQ ID NO: 3323092 - RNA, 17 nt, Human
uccaacccucaucacca

SEQ ID NO: 3323093 - RNA, 16 nt, Human
uccaacccucaucacc

SEQ ID NO: 3323094 - RNA, 14 nt, Human
uccaacccucauca

SEQ ID NO: 3323095 - RNA, 14 nt, Human
accugccaggaagc

SEQ ID NO: 3323096 - RNA, 12 nt, Human
accugccaggaa

SEQ ID NO: 3323097 - RNA, 16 nt, Human
uccaagcuggucccac

SEQ ID NO: 3323098 - RNA, 20 nt, Human
uccaagcuggucccacucag

SEQ ID NO: 3323099 - RNA, 21 nt, Human
uccaagcuggucccacucagu

SEQ ID NO: 3323100 - RNA, 18 nt, Human
uccaaggguacuaaggaa

SEQ ID NO: 3323101 - RNA, 21 nt, Human
accuggguaacuagggaagau

SEQ ID NO: 3323102 - RNA, 20 nt, Human
accuggccucugcacucccc

SEQ ID NO: 3323103 - RNA, 18 nt, Human
accuggccucugcacucc

SEQ ID NO: 3323104 - RNA, 23 nt, Human
accuggccucugcacuccccugc

SEQ ID NO: 3323105 - RNA, 19 nt, Human
accuguuucugcagccacu

SEQ ID NO: 3323106 - RNA, 18 nt, Human
accuuagacagucccugc

SEQ ID NO: 3323107 - RNA, 20 nt, Human
accuuagacagucccugcca

SEQ ID NO: 3323108 - RNA, 19 nt, Human
accuuagacagucccugcc

SEQ ID NO: 3323109 - RNA, 17 nt, Human
uccacccaccucagccu

SEQ ID NO: 3323110 - RNA, 18 nt, Human
uccacccaccucagccuc

SEQ ID NO: 3323111 - RNA, 19 nt, Human
uccacccaccucagccucc

SEQ ID NO: 3323112 - RNA, 12 nt, Human
uccacccaggag

SEQ ID NO: 3323113 - RNA, 14 nt, Human
uccacccaggagcc

SEQ ID NO: 3323114 - RNA, 15 nt, Human
uccacccaggagccc

SEQ ID NO: 3323115 - RNA, 14 nt, Human
accuggccucugca

SEQ ID NO: 3323116 - RNA, 17 nt, Human
accuggccucugcacuc

SEQ ID NO: 3323117 - RNA, 16 nt, Human
accuggccucugcacu

SEQ ID NO: 3323118 - RNA, 12 nt, Human
ucaggaagcuca

SEQ ID NO: 3323119 - RNA, 15 nt, Human
ucaggaagcucaggg

SEQ ID NO: 3323120 - RNA, 14 nt, Human
ucaggaagcucagg

SEQ ID NO: 3323121 - RNA, 13 nt, Human
ucaggaagcucag

SEQ ID NO: 3323122 - RNA, 22 nt, Human
ucauccuucuggaauaaggaga

SEQ ID NO: 3323123 - RNA, 19 nt, Human
ucauccuccucagaucuuc

SEQ ID NO: 3323124 - RNA, 13 nt, Human
ucauccuccucag

SEQ ID NO: 3323125 - RNA, 18 nt, Human
ucauccucauacccaccc

SEQ ID NO: 3323126 - RNA, 14 nt, Human
ucauccuucuggaa

SEQ ID NO: 3323127 - RNA, 13 nt, Human
accuccugccucg

SEQ ID NO: 3323128 - RNA, 12 nt, Human
accuccugccuc

SEQ ID NO: 3323129 - RNA, 23 nt, Human
accuccugccucgaacuggcugc

SEQ ID NO: 3323130 - RNA, 15 nt, Human
ucauccuaagcuauu

SEQ ID NO: 3323131 - RNA, 12 nt, Human
ucauucuucugu

SEQ ID NO: 3323132 - RNA, 13 nt, Human
ucauugaaaucuu

SEQ ID NO: 3323133 - RNA, 12 nt, Human
ucauugaaaucu

SEQ ID NO: 3323134 - RNA, 15 nt, Human
ucauugaccugaggc

SEQ ID NO: 3323135 - RNA, 14 nt, Human
ucauugaccugagg

SEQ ID NO: 3323136 - RNA, 12 nt, Human
ucauugaccuga

SEQ ID NO: 3323137 - RNA, 22 nt, Human
ucauugaaaucuuuuugcuuug

SEQ ID NO: 3323138 - RNA, 13 nt, Human
accuccugggcua

SEQ ID NO: 3323139 - RNA, 19 nt, Human
accucggugccuuccucuu

SEQ ID NO: 3323140 - RNA, 14 nt, Human
accugauugugucu

SEQ ID NO: 3323141 - RNA, 18 nt, Human
accugauugugucucuug

SEQ ID NO: 3323142 - RNA, 17 nt, Human
accugauugugucucuu

SEQ ID NO: 3323143 - RNA, 15 nt, Human
accugauugugucuc

SEQ ID NO: 3323144 - RNA, 16 nt, Human
accugaggggccucuu

SEQ ID NO: 3323145 - RNA, 21 nt, Human
accugaggcccuucucuccag

SEQ ID NO: 3323146 - RNA, 20 nt, Human
accugaggcccuucucucca

SEQ ID NO: 3323147 - RNA, 16 nt, Human
accugaggcccuucuc

SEQ ID NO: 3323148 - RNA, 15 nt, Human
accugaggcccuucu

SEQ ID NO: 3323149 - RNA, 21 nt, Human
accucuugagccuugaacuuu

SEQ ID NO: 3323150 - RNA, 14 nt, Human
accugaggcccuuc

SEQ ID NO: 3323151 - RNA, 16 nt, Human
acaucaacaucuuggu

SEQ ID NO: 3323152 - RNA, 18 nt, Human
acaucaacaucuugguca

SEQ ID NO: 3323153 - RNA, 13 nt, Human
acaucuugcucug

SEQ ID NO: 3323154 - RNA, 17 nt, Human
acaucuugcucugcuga

SEQ ID NO: 3323155 - RNA, 21 nt, Human
acaucuugcucugcugacaga

SEQ ID NO: 3323156 - RNA, 17 nt, Human
acaugaaaacacauuuu

SEQ ID NO: 3323157 - RNA, 18 nt, Human
acaucuugcucugcugac

SEQ ID NO: 3323158 - RNA, 19 nt, Human
acaucuugcucugcugaca

SEQ ID NO: 3323159 - RNA, 19 nt, Human
acaugaaaacacauuuuuc

SEQ ID NO: 3323160 - RNA, 18 nt, Human
acaugaaaacacauuuuu

SEQ ID NO: 3323161 - RNA, 16 nt, Human
acaugaaaacacauuu

SEQ ID NO: 3323162 - RNA, 16 nt, Human
acauauugauuuccgu

SEQ ID NO: 3323163 - RNA, 14 nt, Human
acauauugauuucc

SEQ ID NO: 3323164 - RNA, 23 nt, Human
acauauugauuuccguuaaaaua

SEQ ID NO: 3323165 - RNA, 22 nt, Human
acauauugauuuccguuaaaau

SEQ ID NO: 3323166 - RNA, 18 nt, Human
acauauugauuuccguua

SEQ ID NO: 3323167 - RNA, 23 nt, Human
uauuuccuauauuguuuucagug

SEQ ID NO: 3323168 - RNA, 22 nt, Human
uauuucccucaccuuucccauc

SEQ ID NO: 3323169 - RNA, 20 nt, Human
acaguugaaaaacagcugag

SEQ ID NO: 3323170 - RNA, 16 nt, Human
acaguugaaaaacagc

SEQ ID NO: 3323171 - RNA, 15 nt, Human
acaguugaaaaacag

SEQ ID NO: 3323172 - RNA, 20 nt, Human
acaguuuguuaguaugaggc

SEQ ID NO: 3323173 - RNA, 16 nt, Human
acaguuuguuaguaug

SEQ ID NO: 3323174 - RNA, 17 nt, Human
acauacucccaucugug

SEQ ID NO: 3323175 - RNA, 14 nt, Human
acauacucugcuua

SEQ ID NO: 3323176 - RNA, 13 nt, Human
acauacucccauc

SEQ ID NO: 3323177 - RNA, 22 nt, Human
acauacuaaccagcagaaaugc

SEQ ID NO: 3323178 - RNA, 21 nt, Human
acauacuaaccagcagaaaug

SEQ ID NO: 3323179 - RNA, 13 nt, Human
acauacuaaccag

SEQ ID NO: 3323180 - RNA, 19 nt, Human
acaugagcaucaggccagg

SEQ ID NO: 3323181 - RNA, 18 nt, Human
acaugagcaucaggccag

SEQ ID NO: 3323182 - RNA, 17 nt, Human
acaugagcaucaggcca

SEQ ID NO: 3323183 - RNA, 15 nt, Human
acaugaucuucuuua

SEQ ID NO: 3323184 - RNA, 17 nt, Human
acaugaucuucuuuaua

SEQ ID NO: 3323185 - RNA, 22 nt, Human
acaugcuacacacugcauguuu

SEQ ID NO: 3323186 - RNA, 18 nt, Human
ucaaauaacuaaaaggua

SEQ ID NO: 3323187 - RNA, 11 nt, Human
ucaaguauuau

SEQ ID NO: 3323188 - RNA, 15 nt, Human
ucaaguauuauaccu

SEQ ID NO: 3323189 - RNA, 23 nt, Human
ucaaguauuauaccuuuuuuaga

SEQ ID NO: 3323190 - RNA, 21 nt, Human
ucaaguauuauaccuuuuuua

SEQ ID NO: 3323191 - RNA, 16 nt, Human
ucaaguauuauaccuu

SEQ ID NO: 3323192 - RNA, 16 nt, Human
ucaacagguuuuccug

SEQ ID NO: 3323193 - RNA, 17 nt, Human
ucaaauuucuaaaucuc

SEQ ID NO: 3323194 - RNA, 12 nt, Human
acauucuguuaa

SEQ ID NO: 3323195 - RNA, 14 nt, Human
ucaaauuucuaaau

SEQ ID NO: 3323196 - RNA, 15 nt, Human
acauucuguuaauca

SEQ ID NO: 3323197 - RNA, 16 nt, Human
ucaaauuucuaaaucu

SEQ ID NO: 3323198 - RNA, 15 nt, Human
ucaaauuucuaaauc

SEQ ID NO: 3323199 - RNA, 19 nt, Human
acauguccaagaagcccag

SEQ ID NO: 3323200 - RNA, 21 nt, Human
acauguccaagaagcccagga

SEQ ID NO: 3323201 - RNA, 10 nt, Human
acccacugcu

SEQ ID NO: 3323202 - RNA, 11 nt, Human
acccacugcuc

SEQ ID NO: 3323203 - RNA, 13 nt, Human
acccacugcucug

SEQ ID NO: 3323204 - RNA, 14 nt, Human
acccacugcucugg

SEQ ID NO: 3323205 - RNA, 15 nt, Human
acccacugcucuggu

SEQ ID NO: 3323206 - RNA, 21 nt, Human
ucacucuuauugcccacgcug

SEQ ID NO: 3323207 - RNA, 23 nt, Human
ucacucuuauugcccacgcugga

SEQ ID NO: 3323208 - RNA, 22 nt, Human
accauggucggaaaacaugcua

SEQ ID NO: 3323209 - RNA, 18 nt, Human
ucagaaucucaaauaacu

SEQ ID NO: 3323210 - RNA, 19 nt, Human
ucagaaucucaaauaacua

SEQ ID NO: 3323211 - RNA, 16 nt, Human
ucagagacuccugcag

SEQ ID NO: 3323212 - RNA, 21 nt, Human
ucagagacuccugcaggcagc

SEQ ID NO: 3323213 - RNA, 20 nt, Human
ucagagacuccugcaggcag

SEQ ID NO: 3323214 - RNA, 17 nt, Human
ucagagacuccugcagg

SEQ ID NO: 3323215 - RNA, 12 nt, Human
ucagagccugca

SEQ ID NO: 3323216 - RNA, 21 nt, Human
ucagagagggugggagugggc

SEQ ID NO: 3323217 - RNA, 16 nt, Human
ucagagagggugggag

SEQ ID NO: 3323218 - RNA, 13 nt, Human
ucagagccugcag

SEQ ID NO: 3323219 - RNA, 14 nt, Human
ucagagccugcagu

SEQ ID NO: 3323220 - RNA, 15 nt, Human
ucagagccugcaguu

SEQ ID NO: 3323221 - RNA, 18 nt, Human
ucagagccugcaguuauu

SEQ ID NO: 3323222 - RNA, 14 nt, Human
ucagaagacacuga

SEQ ID NO: 3323223 - RNA, 22 nt, Human
ucagaaguuucugccgcagccc

SEQ ID NO: 3323224 - RNA, 19 nt, Human
ucagaaguuucugccgcag

SEQ ID NO: 3323225 - RNA, 14 nt, Human
ucagcggggacagc

SEQ ID NO: 3323226 - RNA, 14 nt, Human
accccuucgcuccu

SEQ ID NO: 3323227 - RNA, 15 nt, Human
accccuucgcuccug

SEQ ID NO: 3323228 - RNA, 12 nt, Human
acccccacccaa

SEQ ID NO: 3323229 - RNA, 22 nt, Human
ucagccaagaauucuuaaauau

SEQ ID NO: 3323230 - RNA, 19 nt, Human
acccagcgagcccuggugg

SEQ ID NO: 3323231 - RNA, 23 nt, Human
acccagcgagcccugguggcagu

SEQ ID NO: 3323232 - RNA, 23 nt, Human
ucagccguguaaccauggaccca

SEQ ID NO: 3323233 - RNA, 24 nt, Human
acccagcgagcccugguggcagug

SEQ ID NO: 3323234 - RNA, 15 nt, Human
ucacaguucucuccu

SEQ ID NO: 3323235 - RNA, 12 nt, Human
ucacauaucugu

SEQ ID NO: 3323236 - RNA, 15 nt, Human
ucacauaucugucau

SEQ ID NO: 3323237 - RNA, 13 nt, Human
ucaccccagcccc

SEQ ID NO: 3323238 - RNA, 20 nt, Human
ucaccccagccccaaaacuc

SEQ ID NO: 3323239 - RNA, 14 nt, Human
ucaccccagcccca

SEQ ID NO: 3323240 - RNA, 15 nt, Human
ucaccccggccaccu

SEQ ID NO: 3323241 - RNA, 15 nt, Human
accaauguucucucu

SEQ ID NO: 3323242 - RNA, 15 nt, Human
ucaagugaaaaagga

SEQ ID NO: 3323243 - RNA, 23 nt, Human
ucaagugaaaaaggaggaagaga

SEQ ID NO: 3323244 - RNA, 22 nt, Human
accaacauacucccaucuguga

SEQ ID NO: 3323245 - RNA, 21 nt, Human
accaacauacucccaucugug

SEQ ID NO: 3323246 - RNA, 19 nt, Human
accaacauacucccaucug

SEQ ID NO: 3323247 - RNA, 17 nt, Human
accaacauacucccauc

SEQ ID NO: 3323248 - RNA, 18 nt, Human
ucacuauguugcccaggc

SEQ ID NO: 3323249 - RNA, 17 nt, Human
ucacuauguugcccagg

SEQ ID NO: 3323250 - RNA, 19 nt, Human
ucacuauguugcccaggca

SEQ ID NO: 3323251 - RNA, 15 nt, Human
ucaccugccccucaa

SEQ ID NO: 3323252 - RNA, 13 nt, Human
ucaccugccccuc

SEQ ID NO: 3323253 - RNA, 15 nt, Human
ucaccucucccuugg

SEQ ID NO: 3323254 - RNA, 21 nt, Human
accacugcacuccagccuggg

SEQ ID NO: 3323255 - RNA, 18 nt, Human
ucaccccggccaccugcg

SEQ ID NO: 3323256 - RNA, 17 nt, Human
ucaccccggccaccugc

SEQ ID NO: 3323257 - RNA, 20 nt, Human
accacugcacuccagccugg

SEQ ID NO: 3323258 - RNA, 17 nt, Human
accacugcacuccagcc

SEQ ID NO: 3323259 - RNA, 15 nt, Human
accacuucagcugac

SEQ ID NO: 3323260 - RNA, 21 nt, Human
accacuuuuguucuugguuug

SEQ ID NO: 3323261 - RNA, 16 nt, Human
accacuuuuguucuug

SEQ ID NO: 3323262 - RNA, 15 nt, Human
accacuuuuguucuu

SEQ ID NO: 3323263 - RNA, 14 nt, Human
accagacaccuuga

SEQ ID NO: 3323264 - RNA, 11 nt, Human
accagacaggu

SEQ ID NO: 3323265 - RNA, 12 nt, Human
accagagcccac

SEQ ID NO: 3323266 - RNA, 14 nt, Human
accagagcccaccu

SEQ ID NO: 3323267 - RNA, 16 nt, Human
accagagcccaccuug

SEQ ID NO: 3323268 - RNA, 22 nt, Human
accacuuuuguucuugguuugu

SEQ ID NO: 3323269 - RNA, 23 nt, Human
uguggguuucuaaagcugccagc

SEQ ID NO: 3323270 - RNA, 21 nt, Human
uguggguuucuaaagcugcca

SEQ ID NO: 3323271 - RNA, 15 nt, Human
uguggucccacccca

SEQ ID NO: 3323272 - RNA, 13 nt, Human
uguggucccaccc

SEQ ID NO: 3323273 - RNA, 16 nt, Human
ugugguguuuccuggc

SEQ ID NO: 3323274 - RNA, 14 nt, Human
ugugguguuuccug

SEQ ID NO: 3323275 - RNA, 20 nt, Human
agugcugggauuacaggugu

SEQ ID NO: 3323276 - RNA, 19 nt, Human
agugcugcauuuaaaagau

SEQ ID NO: 3323277 - RNA, 17 nt, Human
agugcugcauuuaaaag

SEQ ID NO: 3323278 - RNA, 16 nt, Human
agugcugcauuuaaaa

SEQ ID NO: 3323279 - RNA, 21 nt, Human
agugcugggauuacaggugug

SEQ ID NO: 3323280 - RNA, 13 nt, Human
agugcugcauuua

SEQ ID NO: 3323281 - RNA, 12 nt, Human
agugcugcauuu

SEQ ID NO: 3323282 - RNA, 23 nt, Human
agugaguugauagcacagacccu

SEQ ID NO: 3323283 - RNA, 22 nt, Human
agugaguugauagcacagaccc

SEQ ID NO: 3323284 - RNA, 11 nt, Human
uguguguuuau

SEQ ID NO: 3323285 - RNA, 23 nt, Human
uguguguuuauugucaaaguggu

SEQ ID NO: 3323286 - RNA, 19 nt, Human
uguguguuuauugucaaag

SEQ ID NO: 3323287 - RNA, 20 nt, Human
ugugucucuugguccugcug

SEQ ID NO: 3323288 - RNA, 17 nt, Human
ugugucucuugguccug

SEQ ID NO: 3323289 - RNA, 16 nt, Human
ugugucucuugguccu

SEQ ID NO: 3323290 - RNA, 21 nt, Human
ugugucuugcaauggcagccu

SEQ ID NO: 3323291 - RNA, 20 nt, Human
ugugucuugcaauggcagcc

SEQ ID NO: 3323292 - RNA, 21 nt, Human
ugugucucuugguccugcugc

SEQ ID NO: 3323293 - RNA, 17 nt, Human
agugugguguuuccugg

SEQ ID NO: 3323294 - RNA, 19 nt, Human
agugugguguuuccuggca

SEQ ID NO: 3323295 - RNA, 16 nt, Human
agugugguguuuccug

SEQ ID NO: 3323296 - RNA, 21 nt, Human
agugguggugaacagaacaaa

SEQ ID NO: 3323297 - RNA, 18 nt, Human
aguggugguuuucuguuc

SEQ ID NO: 3323298 - RNA, 17 nt, Human
aguggugguuuucuguu

SEQ ID NO: 3323299 - RNA, 23 nt, Human
aguggugguuuucuguucuuucu

SEQ ID NO: 3323300 - RNA, 21 nt, Human
aguggugguuuucuguucuuu

SEQ ID NO: 3323301 - RNA, 20 nt, Human
aguggugguuuucuguucuu

SEQ ID NO: 3323302 - RNA, 19 nt, Human
aguggugguuuucuguucu

SEQ ID NO: 3323303 - RNA, 16 nt, Human
aguggugcgaucuggg

SEQ ID NO: 3323304 - RNA, 17 nt, Human
aguggugcgaucugggu

SEQ ID NO: 3323305 - RNA, 20 nt, Human
agugugucuuagugugugca

SEQ ID NO: 3323306 - RNA, 19 nt, Human
uguuccacaaguuaaauaa

SEQ ID NO: 3323307 - RNA, 20 nt, Human
uguuccacaaguuaaauaaa

SEQ ID NO: 3323308 - RNA, 15 nt, Human
uguucugggacacag

SEQ ID NO: 3323309 - RNA, 16 nt, Human
uguucugggacacagu

SEQ ID NO: 3323310 - RNA, 13 nt, Human
uguugcccaggca

SEQ ID NO: 3323311 - RNA, 12 nt, Human
uguugcccaggc

SEQ ID NO: 3323312 - RNA, 15 nt, Human
uguugcccaggcagg

SEQ ID NO: 3323313 - RNA, 16 nt, Human
uguugcccaggcaggu

SEQ ID NO: 3323314 - RNA, 17 nt, Human
uguugcccaggcagguc

SEQ ID NO: 3323315 - RNA, 18 nt, Human
uguugcccaggcaggucu

SEQ ID NO: 3323316 - RNA, 18 nt, Human
ugugauggggcccugccu

SEQ ID NO: 3323317 - RNA, 20 nt, Human
ugugauggggcccugccucc

SEQ ID NO: 3323318 - RNA, 19 nt, Human
ugugauggggcccugccuc

SEQ ID NO: 3323319 - RNA, 23 nt, Human
ugugcauuuggugguuucagaaa

SEQ ID NO: 3323320 - RNA, 20 nt, Human
ugugccagguuuuuggucug

SEQ ID NO: 3323321 - RNA, 12 nt, Human
ugugccaugugc

SEQ ID NO: 3323322 - RNA, 16 nt, Human
ugugccaugugccagg

SEQ ID NO: 3323323 - RNA, 21 nt, Human
uguggaguucaucuugaauug

SEQ ID NO: 3323324 - RNA, 17 nt, Human
uguggaguucaucuuga

SEQ ID NO: 3323325 - RNA, 21 nt, Human
ugugcugcccugcccaccugg

SEQ ID NO: 3323326 - RNA, 21 nt, Human
ugugcccccauguaagcaccc

SEQ ID NO: 3323327 - RNA, 17 nt, Human
agugaggcucugcccuu

SEQ ID NO: 3323328 - RNA, 16 nt, Human
agugaggcucugcccu

SEQ ID NO: 3323329 - RNA, 14 nt, Human
agugaggcucugcc

SEQ ID NO: 3323330 - RNA, 15 nt, Human
agugaggcucugccc

SEQ ID NO: 3323331 - RNA, 15 nt, Human
agugagucgaggaca

SEQ ID NO: 3323332 - RNA, 21 nt, Human
agugaguugauagcacagacc

SEQ ID NO: 3323333 - RNA, 21 nt, Human
agugaggcucugcccuugguu

SEQ ID NO: 3323334 - RNA, 20 nt, Human
agugaggcucugcccuuggu

SEQ ID NO: 3323335 - RNA, 19 nt, Human
agugaggcucugcccuugg

SEQ ID NO: 3323336 - RNA, 15 nt, Human
ugugacugaauuucu

SEQ ID NO: 3323337 - RNA, 16 nt, Human
ugugacugaauuucuu

SEQ ID NO: 3323338 - RNA, 14 nt, Human
agucuuuguacaga

SEQ ID NO: 3323339 - RNA, 23 nt, Human
agucuuagauguauauauuuccu

SEQ ID NO: 3323340 - RNA, 17 nt, Human
ugugaaccaccacaccc

SEQ ID NO: 3323341 - RNA, 20 nt, Human
ugugaaccaccacacccagc

SEQ ID NO: 3323342 - RNA, 19 nt, Human
ugugaaccaccacacccag

SEQ ID NO: 3323343 - RNA, 15 nt, Human
ugugaaaggaaagag

SEQ ID NO: 3323344 - RNA, 21 nt, Human
ugugaaaggaaagagggaggu

SEQ ID NO: 3323345 - RNA, 18 nt, Human
ugugaaaggaaagaggcu

SEQ ID NO: 3323346 - RNA, 11 nt, Human
uuagacagagu

SEQ ID NO: 3323347 - RNA, 11 nt, Human
uuagaaauaua

SEQ ID NO: 3323348 - RNA, 12 nt, Human
uuagaaauauaa

SEQ ID NO: 3323349 - RNA, 14 nt, Human
uuagaaauauaauu

SEQ ID NO: 3323350 - RNA, 20 nt, Human
uuacauaagauaaaugugcu

SEQ ID NO: 3323351 - RNA, 19 nt, Human
uuacuauggcccuggccua

SEQ ID NO: 3323352 - RNA, 23 nt, Human
uuacucagaauucucuaguuuga

SEQ ID NO: 3323353 - RNA, 18 nt, Human
uuacucagaauucucuag

SEQ ID NO: 3323354 - RNA, 14 nt, Human
uuacaggaaguacu

SEQ ID NO: 3323355 - RNA, 16 nt, Human
auaacuaaaagguaug

SEQ ID NO: 3323356 - RNA, 15 nt, Human
uuaauucuuagcuca

SEQ ID NO: 3323357 - RNA, 23 nt, Human
uuaaugaaagacuguacaaagua

SEQ ID NO: 3323358 - RNA, 20 nt, Human
uuaaugaaagacuguacaaa

SEQ ID NO: 3323359 - RNA, 19 nt, Human
uuaauuuuuuugagacaga

SEQ ID NO: 3323360 - RNA, 23 nt, Human
auaaacaagaccacguuucuaaa

SEQ ID NO: 3323361 - RNA, 22 nt, Human
auaaacaagaccacguuucuaa

SEQ ID NO: 3323362 - RNA, 15 nt, Human
auaaacaagaccacg

SEQ ID NO: 3323363 - RNA, 13 nt, Human
uuaagaggcaggg

SEQ ID NO: 3323364 - RNA, 15 nt, Human
uuaagaggcaggguc

SEQ ID NO: 3323365 - RNA, 16 nt, Human
uuaagaggcagggucu

SEQ ID NO: 3323366 - RNA, 17 nt, Human
uuaaguacuauguauca

SEQ ID NO: 3323367 - RNA, 22 nt, Human
uuaagugcugcauuuaaaagau

SEQ ID NO: 3323368 - RNA, 20 nt, Human
uuaaauucuugcaaaguauc

SEQ ID NO: 3323369 - RNA, 23 nt, Human
aguuguuugauucagacagcugc

SEQ ID NO: 3323370 - RNA, 21 nt, Human
aguuguuugauucagacagcu

SEQ ID NO: 3323371 - RNA, 18 nt, Human
aguuggucccccuuccau

SEQ ID NO: 3323372 - RNA, 16 nt, Human
aguuggcuaggacccc

SEQ ID NO: 3323373 - RNA, 17 nt, Human
aguuggguggaugccug

SEQ ID NO: 3323374 - RNA, 21 nt, Human
aguuggguggaugccuggugg

SEQ ID NO: 3323375 - RNA, 19 nt, Human
uguuuauugucaaaguggu

SEQ ID NO: 3323376 - RNA, 17 nt, Human
uguuuauugucaaagug

SEQ ID NO: 3323377 - RNA, 19 nt, Human
uguugcccaggcaggucuu

SEQ ID NO: 3323378 - RNA, 22 nt, Human
uguuugauucagacagcugccu

SEQ ID NO: 3323379 - RNA, 17 nt, Human
uguuugauucagacagc

SEQ ID NO: 3323380 - RNA, 14 nt, Human
aguucugguuccua

SEQ ID NO: 3323381 - RNA, 15 nt, Human
uguuuucucuugaga

SEQ ID NO: 3323382 - RNA, 20 nt, Human
uguuuuccaugaguccccug

SEQ ID NO: 3323383 - RNA, 17 nt, Human
uguuuucaguguacaug

SEQ ID NO: 3323384 - RNA, 14 nt, Human
ugggacuacaggca

SEQ ID NO: 3323385 - RNA, 15 nt, Human
ugggacuacaggcac

SEQ ID NO: 3323386 - RNA, 22 nt, Human
ugggagaaccaaaaagaggcua

SEQ ID NO: 3323387 - RNA, 20 nt, Human
ugggacucaaugcacugaca

SEQ ID NO: 3323388 - RNA, 18 nt, Human
ugggacucaaugcacuga

SEQ ID NO: 3323389 - RNA, 16 nt, Human
ugggagagccuuccag

SEQ ID NO: 3323390 - RNA, 18 nt, Human
ugggaggaucucuugagc

SEQ ID NO: 3323391 - RNA, 21 nt, Human
ugggagagaagagaaugcaca

SEQ ID NO: 3323392 - RNA, 19 nt, Human
ugggagagaagagaaugca

SEQ ID NO: 3323393 - RNA, 22 nt, Human
agggaaggauacaaaagcaugu

SEQ ID NO: 3323394 - RNA, 21 nt, Human
aggcccggcuccaggcuccuu

SEQ ID NO: 3323395 - RNA, 18 nt, Human
aggcccggcuccaggcuc

SEQ ID NO: 3323396 - RNA, 20 nt, Human
aggcccggcuccaggcuccu

SEQ ID NO: 3323397 - RNA, 16 nt, Human
agggagggcuccagac

SEQ ID NO: 3323398 - RNA, 15 nt, Human
agggagggcuccaga

SEQ ID NO: 3323399 - RNA, 14 nt, Human
agggagggcuccag

SEQ ID NO: 3323400 - RNA, 19 nt, Human
agggcucagcggggacagc

SEQ ID NO: 3323401 - RNA, 20 nt, Human
agggcucagcggggacagcu

SEQ ID NO: 3323402 - RNA, 22 nt, Human
agggcucagcggggacagcucc

SEQ ID NO: 3323403 - RNA, 23 nt, Human
agggcucagcggggacagcuccu

SEQ ID NO: 3323404 - RNA, 20 nt, Human
ugggaggccaaggugggagg

SEQ ID NO: 3323405 - RNA, 22 nt, Human
ugggaggauugcuugagcucag

SEQ ID NO: 3323406 - RNA, 19 nt, Human
ugggaggccaaggugggag

SEQ ID NO: 3323407 - RNA, 21 nt, Human
ugggaggaucucuugagccug

SEQ ID NO: 3323408 - RNA, 20 nt, Human
ugggaggaucucuugagccu

SEQ ID NO: 3323409 - RNA, 23 nt, Human
ugggcagaaggaagacuucaucc

SEQ ID NO: 3323410 - RNA, 12 nt, Human
ugggcagaagga

SEQ ID NO: 3323411 - RNA, 18 nt, Human
ugggccaggagccuccug

SEQ ID NO: 3323412 - RNA, 12 nt, Human
ugggcagagcag

SEQ ID NO: 3323413 - RNA, 11 nt, Human
ugggcagagca

SEQ ID NO: 3323414 - RNA, 16 nt, Human
ugggcccccaaaugga

SEQ ID NO: 3323415 - RNA, 21 nt, Human
ugggcccccaaauggaaaugg

SEQ ID NO: 3323416 - RNA, 13 nt, Human
agggagggcucca

SEQ ID NO: 3323417 - RNA, 15 nt, Human
agggagggagggcuc

SEQ ID NO: 3323418 - RNA, 23 nt, Human
uggggcugcaccggcuggccugg

SEQ ID NO: 3323419 - RNA, 22 nt, Human
uggggcugcaccggcuggccug

SEQ ID NO: 3323420 - RNA, 21 nt, Human
uggggccaguuggucccccuu

SEQ ID NO: 3323421 - RNA, 12 nt, Human
uggggcccugcc

SEQ ID NO: 3323422 - RNA, 16 nt, Human
uggggaccucaggccu

SEQ ID NO: 3323423 - RNA, 15 nt, Human
uggggaccucaggcc

SEQ ID NO: 3323424 - RNA, 14 nt, Human
uggggaccucaggc

SEQ ID NO: 3323425 - RNA, 12 nt, Human
agggcuccagac

SEQ ID NO: 3323426 - RNA, 13 nt, Human
aggggaaaagagg

SEQ ID NO: 3323427 - RNA, 14 nt, Human
aggggaacagacug

SEQ ID NO: 3323428 - RNA, 22 nt, Human
aggggaaaaucagccugcucca

SEQ ID NO: 3323429 - RNA, 18 nt, Human
aggggaaaaucagccugc

SEQ ID NO: 3323430 - RNA, 13 nt, Human
aggggaauguuug

SEQ ID NO: 3323431 - RNA, 17 nt, Human
ugggguacccacugcuc

SEQ ID NO: 3323432 - RNA, 18 nt, Human
ugggguacccacugcucu

SEQ ID NO: 3323433 - RNA, 19 nt, Human
ugggguacccacugcucug

SEQ ID NO: 3323434 - RNA, 15 nt, Human
ugggguaugggagag

SEQ ID NO: 3323435 - RNA, 14 nt, Human
uggggucacucugg

SEQ ID NO: 3323436 - RNA, 13 nt, Human
uggggucacucug

SEQ ID NO: 3323437 - RNA, 20 nt, Human
uggggucacucuggcagcuc

SEQ ID NO: 3323438 - RNA, 22 nt, Human
uggggucacucuggcagcucag

SEQ ID NO: 3323439 - RNA, 21 nt, Human
aggggaauguuugccucugcc

SEQ ID NO: 3323440 - RNA, 23 nt, Human
aggggagcaaaaucgaugcagug

SEQ ID NO: 3323441 - RNA, 19 nt, Human
aggggaauguuugccucug

SEQ ID NO: 3323442 - RNA, 20 nt, Human
aggggaauguuugccucugc

SEQ ID NO: 3323443 - RNA, 15 nt, Human
aggguaaggcugugg

SEQ ID NO: 3323444 - RNA, 14 nt, Human
agggucucacucug

SEQ ID NO: 3323445 - RNA, 15 nt, Human
agggucucacucugu

SEQ ID NO: 3323446 - RNA, 16 nt, Human
agggucucacucuguc

SEQ ID NO: 3323447 - RNA, 23 nt, Human
agggucucacuauguugcccagg

SEQ ID NO: 3323448 - RNA, 18 nt, Human
aggggguggccucccaac

SEQ ID NO: 3323449 - RNA, 20 nt, Human
aggggguggccucccaacuc

SEQ ID NO: 3323450 - RNA, 15 nt, Human
agggugggagugggc

SEQ ID NO: 3323451 - RNA, 16 nt, Human
aggguggugaccucug

SEQ ID NO: 3323452 - RNA, 20 nt, Human
ugguagagugugccugaagu

SEQ ID NO: 3323453 - RNA, 21 nt, Human
uggguggcaccagcagccugg

SEQ ID NO: 3323454 - RNA, 20 nt, Human
uggguggcaccagcagccug

SEQ ID NO: 3323455 - RNA, 17 nt, Human
uggguggcaccagcagc

SEQ ID NO: 3323456 - RNA, 17 nt, Human
uguaucaaugaguaaca

SEQ ID NO: 3323457 - RNA, 16 nt, Human
uguauuuuuuuacuaa

SEQ ID NO: 3323458 - RNA, 19 nt, Human
uguauucucuccuguaccu

SEQ ID NO: 3323459 - RNA, 17 nt, Human
ugucaauuacaggaagu

SEQ ID NO: 3323460 - RNA, 15 nt, Human
ugucaauuacaggaa

SEQ ID NO: 3323461 - RNA, 14 nt, Human
ugucaauuacagga

SEQ ID NO: 3323462 - RNA, 18 nt, Human
aguauuacuucugcuaca

SEQ ID NO: 3323463 - RNA, 15 nt, Human
aguauuacuucugcu

SEQ ID NO: 3323464 - RNA, 15 nt, Human
aguaugguggcuggg

SEQ ID NO: 3323465 - RNA, 16 nt, Human
aguaugguggcugggu

SEQ ID NO: 3323466 - RNA, 23 nt, Human
agucacacaguauuacuucugcu

SEQ ID NO: 3323467 - RNA, 14 nt, Human
aguaugguggcugg

SEQ ID NO: 3323468 - RNA, 19 nt, Human
agucaccccggccaccugc

SEQ ID NO: 3323469 - RNA, 15 nt, Human
agucacacagugagu

SEQ ID NO: 3323470 - RNA, 23 nt, Human
agucacacagugagucgaggaca

SEQ ID NO: 3323471 - RNA, 16 nt, Human
uguagagccagggucu

SEQ ID NO: 3323472 - RNA, 18 nt, Human
uguagagccagggucuca

SEQ ID NO: 3323473 - RNA, 15 nt, Human
aguaauaugcacaca

SEQ ID NO: 3323474 - RNA, 14 nt, Human
aguaauaugcacac

SEQ ID NO: 3323475 - RNA, 20 nt, Human
uguaggcauaaagucagggg

SEQ ID NO: 3323476 - RNA, 17 nt, Human
uguaggcauaaagucag

SEQ ID NO: 3323477 - RNA, 11 nt, Human
aguagagacag

SEQ ID NO: 3323478 - RNA, 17 nt, Human
aguagaagucuuagaug

SEQ ID NO: 3323479 - RNA, 21 nt, Human
aguagaagucuuagauguaua

SEQ ID NO: 3323480 - RNA, 19 nt, Human
aguagaagucuuagaugua

SEQ ID NO: 3323481 - RNA, 20 nt, Human
aguagaagucuuagauguau

SEQ ID NO: 3323482 - RNA, 15 nt, Human
uguaaauagcucagg

SEQ ID NO: 3323483 - RNA, 16 nt, Human
uguaaauagcucaggu

SEQ ID NO: 3323484 - RNA, 14 nt, Human
ugguuuucaaaaua

SEQ ID NO: 3323485 - RNA, 15 nt, Human
ugguuuguaaauuaa

SEQ ID NO: 3323486 - RNA, 15 nt, Human
ugguuuucaaaauaa

SEQ ID NO: 3323487 - RNA, 17 nt, Human
ugguuuucaaaauaaaa

SEQ ID NO: 3323488 - RNA, 12 nt, Human
aggugugcucug

SEQ ID NO: 3323489 - RNA, 14 nt, Human
agguuuaagcuguu

SEQ ID NO: 3323490 - RNA, 20 nt, Human
aggugucccugcacuugcag

SEQ ID NO: 3323491 - RNA, 19 nt, Human
agguggggucacucuggca

SEQ ID NO: 3323492 - RNA, 17 nt, Human
aggugugaaccaccaca

SEQ ID NO: 3323493 - RNA, 15 nt, Human
aggugugcucugauc

SEQ ID NO: 3323494 - RNA, 20 nt, Human
aggugugcucugaucaucca

SEQ ID NO: 3323495 - RNA, 15 nt, Human
aggugggauccucca

SEQ ID NO: 3323496 - RNA, 18 nt, Human
aggugccucaagagaagg

SEQ ID NO: 3323497 - RNA, 16 nt, Human
agguggggcagcuuga

SEQ ID NO: 3323498 - RNA, 23 nt, Human
agguggggcagcuugaggguugg

SEQ ID NO: 3323499 - RNA, 17 nt, Human
aggugggauccuccagg

SEQ ID NO: 3323500 - RNA, 16 nt, Human
aggugggauccuccag

SEQ ID NO: 3323501 - RNA, 14 nt, Human
aggugauccaccca

SEQ ID NO: 3323502 - RNA, 20 nt, Human
aggugauccacccaccucag

SEQ ID NO: 3323503 - RNA, 22 nt, Human
aggugacagagugagacucugu

SEQ ID NO: 3323504 - RNA, 13 nt, Human
aggugaccccagg

SEQ ID NO: 3323505 - RNA, 17 nt, Human
aggucuugaacuccugg

SEQ ID NO: 3323506 - RNA, 13 nt, Human
aggugacagagug

SEQ ID NO: 3323507 - RNA, 15 nt, Human
aggugacagagugag

SEQ ID NO: 3323508 - RNA, 23 nt, Human
aggugagaagcagaggaaggaga

SEQ ID NO: 3323509 - RNA, 21 nt, Human
aggugagaagcagaggaagga

SEQ ID NO: 3323510 - RNA, 16 nt, Human
aggugagaagcagagg

SEQ ID NO: 3323511 - RNA, 16 nt, Human
aggucuugaacuccug

SEQ ID NO: 3323512 - RNA, 14 nt, Human
aggucagagccugc

SEQ ID NO: 3323513 - RNA, 15 nt, Human
aggucagagccugca

SEQ ID NO: 3323514 - RNA, 17 nt, Human
aggucagagccugcagu

SEQ ID NO: 3323515 - RNA, 18 nt, Human
aggucagagccugcaguu

SEQ ID NO: 3323516 - RNA, 13 nt, Human
aggucagagccug

SEQ ID NO: 3323517 - RNA, 16 nt, Human
uggucagauuugaacu

SEQ ID NO: 3323518 - RNA, 15 nt, Human
uggucagauuugaac

SEQ ID NO: 3323519 - RNA, 20 nt, Human
ugguuaggcauugugggaag

SEQ ID NO: 3323520 - RNA, 18 nt, Human
ugguuaggcauuguggga

SEQ ID NO: 3323521 - RNA, 14 nt, Human
ugguggcagcugcg

SEQ ID NO: 3323522 - RNA, 13 nt, Human
ugguggcagcugc

SEQ ID NO: 3323523 - RNA, 15 nt, Human
ugguggcagcugcgg

SEQ ID NO: 3323524 - RNA, 19 nt, Human
uggugucgggcaugacacg

SEQ ID NO: 3323525 - RNA, 16 nt, Human
uggugcgaucuggguu

SEQ ID NO: 3323526 - RNA, 17 nt, Human
uggugcgaucuggguuc

SEQ ID NO: 3323527 - RNA, 18 nt, Human
aggcauugugggaagggg

SEQ ID NO: 3323528 - RNA, 22 nt, Human
aggcauaaagucagggguuccc

SEQ ID NO: 3323529 - RNA, 17 nt, Human
aggcaggugggauggau

SEQ ID NO: 3323530 - RNA, 15 nt, Human
aggcauaaagucagg

SEQ ID NO: 3323531 - RNA, 12 nt, Human
aggcagggucuc

SEQ ID NO: 3323532 - RNA, 22 nt, Human
aggcaggucuugaacuccuggc

SEQ ID NO: 3323533 - RNA, 12 nt, Human
aggcaggauggc

SEQ ID NO: 3323534 - RNA, 14 nt, Human
uggagaaaauggac

SEQ ID NO: 3323535 - RNA, 15 nt, Human
aggauugcuacuguc

SEQ ID NO: 3323536 - RNA, 17 nt, Human
aggauugcuacuguccu

SEQ ID NO: 3323537 - RNA, 18 nt, Human
aggauugcuacuguccua

SEQ ID NO: 3323538 - RNA, 17 nt, Human
aggcaagcaccuccugc

SEQ ID NO: 3323539 - RNA, 20 nt, Human
aggcaagcaccuccugccuc

SEQ ID NO: 3323540 - RNA, 18 nt, Human
aggcaagcaccuccugcc

SEQ ID NO: 3323541 - RNA, 19 nt, Human
aggcaagcaccuccugccu

SEQ ID NO: 3323542 - RNA, 16 nt, Human
aggcaaggcugucaau

SEQ ID NO: 3323543 - RNA, 20 nt, Human
uggagguacgaaaagagggg

SEQ ID NO: 3323544 - RNA, 20 nt, Human
aggcauuugcugaauacaga

SEQ ID NO: 3323545 - RNA, 16 nt, Human
aggcauuugcugaaua

SEQ ID NO: 3323546 - RNA, 14 nt, Human
uggagugcagugag

SEQ ID NO: 3323547 - RNA, 20 nt, Human
uggaugccugguggcagcug

SEQ ID NO: 3323548 - RNA, 21 nt, Human
uggaugccugguggcagcugc

SEQ ID NO: 3323549 - RNA, 23 nt, Human
uggaugccugguggcagcugcgg

SEQ ID NO: 3323550 - RNA, 21 nt, Human
uggcacaucagcacgauuucu

SEQ ID NO: 3323551 - RNA, 23 nt, Human
uggcacaucagcacgauuucugu

SEQ ID NO: 3323552 - RNA, 14 nt, Human
aggccccgcccagg

SEQ ID NO: 3323553 - RNA, 13 nt, Human
aggcccggcucca

SEQ ID NO: 3323554 - RNA, 17 nt, Human
aggcccggcuccaggcu

SEQ ID NO: 3323555 - RNA, 13 nt, Human
aggcccagagggc

SEQ ID NO: 3323556 - RNA, 16 nt, Human
uggcacccggccccug

SEQ ID NO: 3323557 - RNA, 18 nt, Human
uggcacccggccccugcu

SEQ ID NO: 3323558 - RNA, 19 nt, Human
uggcacccggccccugcug

SEQ ID NO: 3323559 - RNA, 20 nt, Human
uggcacccggccccugcugg

SEQ ID NO: 3323560 - RNA, 22 nt, Human
uggcagcucaccucucccuugg

SEQ ID NO: 3323561 - RNA, 21 nt, Human
uggcagcucaccucucccuug

SEQ ID NO: 3323562 - RNA, 23 nt, Human
uggcagcucaccucucccuugga

SEQ ID NO: 3323563 - RNA, 15 nt, Human
aggccagccuugacc

SEQ ID NO: 3323564 - RNA, 13 nt, Human
aggccagccuuga

SEQ ID NO: 3323565 - RNA, 22 nt, Human
aggacuuuucuuuguggcuucc

SEQ ID NO: 3323566 - RNA, 17 nt, Human
aggacuuuucuuugugg

SEQ ID NO: 3323567 - RNA, 19 nt, Human
aggacuuuucuuuguggcu

SEQ ID NO: 3323568 - RNA, 13 nt, Human
aggagcagccaca

SEQ ID NO: 3323569 - RNA, 12 nt, Human
aggagcagccac

SEQ ID NO: 3323570 - RNA, 16 nt, Human
aggagccuccugcccu

SEQ ID NO: 3323571 - RNA, 16 nt, Human
uggaagcacagcuuca

SEQ ID NO: 3323572 - RNA, 20 nt, Human
aggaugaucuaggaagacuu

SEQ ID NO: 3323573 - RNA, 16 nt, Human
aggauucuuccucccu

SEQ ID NO: 3323574 - RNA, 22 nt, Human
aggaugcacagaguuguuacau

SEQ ID NO: 3323575 - RNA, 23 nt, Human
aggaugaucuaggaagacuuugg

SEQ ID NO: 3323576 - RNA, 22 nt, Human
aggaugaucuaggaagacuuug

SEQ ID NO: 3323577 - RNA, 17 nt, Human
aggauucuuccucccuc

SEQ ID NO: 3323578 - RNA, 19 nt, Human
aggauucuuccucccuccc

SEQ ID NO: 3323579 - RNA, 13 nt, Human
aggaucagucuga

SEQ ID NO: 3323580 - RNA, 12 nt, Human
aggaucagucug

SEQ ID NO: 3323581 - RNA, 15 nt, Human
ugcuugagcucagga

SEQ ID NO: 3323582 - RNA, 17 nt, Human
ugcuuugugauuuuugu

SEQ ID NO: 3323583 - RNA, 22 nt, Human
ugcuuugugauuuuuguaauuu

SEQ ID NO: 3323584 - RNA, 20 nt, Human
ugcuuuugucuaugggacuc

SEQ ID NO: 3323585 - RNA, 23 nt, Human
ugcuuuuuaauauugauaugcuu

SEQ ID NO: 3323586 - RNA, 17 nt, Human
ugcuuuuggucugugug

SEQ ID NO: 3323587 - RNA, 18 nt, Human
ugcuuuuggucuguguga

SEQ ID NO: 3323588 - RNA, 21 nt, Human
uggaaauuuguuauaaugaau

SEQ ID NO: 3323589 - RNA, 23 nt, Human
uggaaauuuguuauaaugaauga

SEQ ID NO: 3323590 - RNA, 15 nt, Human
uggaagacagcucuu

SEQ ID NO: 3323591 - RNA, 16 nt, Human
uggaagacagcucuua

SEQ ID NO: 3323592 - RNA, 22 nt, Human
agcuugaggguugggcuggugu

SEQ ID NO: 3323593 - RNA, 23 nt, Human
agcuugaccgugaggccagagac

SEQ ID NO: 3323594 - RNA, 19 nt, Human
agcuugaccgugaggccag

SEQ ID NO: 3323595 - RNA, 22 nt, Human
agcuugaccgugaggccagaga

SEQ ID NO: 3323596 - RNA, 20 nt, Human
agcuugaccgugaggccaga

SEQ ID NO: 3323597 - RNA, 21 nt, Human
agcuuguaaauagcucaggug

SEQ ID NO: 3323598 - RNA, 14 nt, Human
aggaaaagcugcug

SEQ ID NO: 3323599 - RNA, 14 nt, Human
ugcgguccacccag

SEQ ID NO: 3323600 - RNA, 15 nt, Human
ugcgguccacccagg

SEQ ID NO: 3323601 - RNA, 11 nt, Human
ugcuacacacu

SEQ ID NO: 3323602 - RNA, 20 nt, Human
agcuuaaaggggcuagagug

SEQ ID NO: 3323603 - RNA, 13 nt, Human
ugcuaucuccccc

SEQ ID NO: 3323604 - RNA, 17 nt, Human
ugcuaucucccccagcc

SEQ ID NO: 3323605 - RNA, 14 nt, Human
ugcuaucuccccca

SEQ ID NO: 3323606 - RNA, 14 nt, Human
ugcucugcugacag

SEQ ID NO: 3323607 - RNA, 15 nt, Human
ugcucugcugacaga

SEQ ID NO: 3323608 - RNA, 20 nt, Human
ugcuccagcuguucagcugg

SEQ ID NO: 3323609 - RNA, 21 nt, Human
ugcuccagcuguucagcuggu

SEQ ID NO: 3323610 - RNA, 23 nt, Human
aggaaaggcuccaggagcagcca

SEQ ID NO: 3323611 - RNA, 15 nt, Human
aggaagcucagggcc

SEQ ID NO: 3323612 - RNA, 12 nt, Human
aggaagcucagg

SEQ ID NO: 3323613 - RNA, 14 nt, Human
aggaagcucagggc

SEQ ID NO: 3323614 - RNA, 13 nt, Human
aggaagcucaggg

SEQ ID NO: 3323615 - RNA, 12 nt, Human
ugccucagccuc

SEQ ID NO: 3323616 - RNA, 13 nt, Human
ugccucagccucc

SEQ ID NO: 3323617 - RNA, 12 nt, Human
ugccgcagcccu

SEQ ID NO: 3323618 - RNA, 18 nt, Human
ugcccuuaccugccagga

SEQ ID NO: 3323619 - RNA, 14 nt, Human
agcugccagccgag

SEQ ID NO: 3323620 - RNA, 20 nt, Human
agcugccagccgagauagcc

SEQ ID NO: 3323621 - RNA, 16 nt, Human
agcucuguccugggag

SEQ ID NO: 3323622 - RNA, 21 nt, Human
agcucuguccugggagugagc

SEQ ID NO: 3323623 - RNA, 13 nt, Human
agcucccaggcau

SEQ ID NO: 3323624 - RNA, 13 nt, Human
agcuccuucuguc

SEQ ID NO: 3323625 - RNA, 15 nt, Human
agcuccuucuguccu

SEQ ID NO: 3323626 - RNA, 23 nt, Human
agcucccaggcauuccccaggag

SEQ ID NO: 3323627 - RNA, 14 nt, Human
agcucuguccuggg

SEQ ID NO: 3323628 - RNA, 17 nt, Human
agcucugguccauagag

SEQ ID NO: 3323629 - RNA, 12 nt, Human
agcucuggucca

SEQ ID NO: 3323630 - RNA, 16 nt, Human
agcuccuucuguccua

SEQ ID NO: 3323631 - RNA, 21 nt, Human
agcuccuucuguccuacucug

SEQ ID NO: 3323632 - RNA, 16 nt, Human
agcucucuccucccuu

SEQ ID NO: 3323633 - RNA, 21 nt, Human
ugccuuacccucauguucuua

SEQ ID NO: 3323634 - RNA, 16 nt, Human
ugccuuggggacaaga

SEQ ID NO: 3323635 - RNA, 20 nt, Human
ugccuuacccucauguucuu

SEQ ID NO: 3323636 - RNA, 17 nt, Human
ugccuguugggccagga

SEQ ID NO: 3323637 - RNA, 16 nt, Human
ugccuguugggccagg

SEQ ID NO: 3323638 - RNA, 21 nt, Human
ugccuguucagcuccagcuca

SEQ ID NO: 3323639 - RNA, 19 nt, Human
agcuguuacugucuucagu

SEQ ID NO: 3323640 - RNA, 20 nt, Human
agcugggacuacaggcaccc

SEQ ID NO: 3323641 - RNA, 23 nt, Human
agcugggacuacaggcacccacc

SEQ ID NO: 3323642 - RNA, 16 nt, Human
agcugggacuacaggu

SEQ ID NO: 3323643 - RNA, 20 nt, Human
agcugggguggggaccucag

SEQ ID NO: 3323644 - RNA, 23 nt, Human
agcugggguggggaccucaggcc

SEQ ID NO: 3323645 - RNA, 22 nt, Human
agcugggguggggaccucaggc

SEQ ID NO: 3323646 - RNA, 19 nt, Human
agcugggacuacaggcacc

SEQ ID NO: 3323647 - RNA, 14 nt, Human
agcuguuacugucu

SEQ ID NO: 3323648 - RNA, 18 nt, Human
agcuguuacugucuucag

SEQ ID NO: 3323649 - RNA, 17 nt, Human
agcugugcucuggacag

SEQ ID NO: 3323650 - RNA, 18 nt, Human
agcugugcucuggacagg

SEQ ID NO: 3323651 - RNA, 23 nt, Human
agcugugcucuggacaggcaugu

SEQ ID NO: 3323652 - RNA, 16 nt, Human
agcugcuugggcuuca

SEQ ID NO: 3323653 - RNA, 18 nt, Human
agcugccuguucagcucc

SEQ ID NO: 3323654 - RNA, 14 nt, Human
agcugccuguucag

SEQ ID NO: 3323655 - RNA, 16 nt, Human
agcugccuguucagcu

SEQ ID NO: 3323656 - RNA, 20 nt, Human
ugccuggauggggcugcacc

SEQ ID NO: 3323657 - RNA, 17 nt, Human
ugccuggauggggcugc

SEQ ID NO: 3323658 - RNA, 16 nt, Human
ugccuggauggggcug

SEQ ID NO: 3323659 - RNA, 14 nt, Human
ugccucagccuccc

SEQ ID NO: 3323660 - RNA, 18 nt, Human
ugccucugccucugacac

SEQ ID NO: 3323661 - RNA, 20 nt, Human
ugccucugccucugacacac

SEQ ID NO: 3323662 - RNA, 17 nt, Human
ugccucugccucugaca

SEQ ID NO: 3323663 - RNA, 20 nt, Human
ugccugcccaggccccugcc

SEQ ID NO: 3323664 - RNA, 22 nt, Human
ugccugcccaggccccugccac

SEQ ID NO: 3323665 - RNA, 23 nt, Human
ugccugcccaggccccugccacc

SEQ ID NO: 3323666 - RNA, 17 nt, Human
agccacggccaggccag

SEQ ID NO: 3323667 - RNA, 18 nt, Human
agccacggccaggccaga

SEQ ID NO: 3323668 - RNA, 13 nt, Human
ugcaaaccaucau

SEQ ID NO: 3323669 - RNA, 12 nt, Human
ugcaaaccauca

SEQ ID NO: 3323670 - RNA, 18 nt, Human
ugcaaaccaucauugaaa

SEQ ID NO: 3323671 - RNA, 21 nt, Human
ugcaaaggguaucaggugcug

SEQ ID NO: 3323672 - RNA, 20 nt, Human
ugcaaaguaucccuacugua

SEQ ID NO: 3323673 - RNA, 15 nt, Human
ugcaaggucauuuuu

SEQ ID NO: 3323674 - RNA, 12 nt, Human
agcccaggccuc

SEQ ID NO: 3323675 - RNA, 15 nt, Human
ugcacuccagccugg

SEQ ID NO: 3323676 - RNA, 16 nt, Human
ugcacuccagccuggg

SEQ ID NO: 3323677 - RNA, 14 nt, Human
ugcacuccagccug

SEQ ID NO: 3323678 - RNA, 16 nt, Human
ugcaccggcuggccug

SEQ ID NO: 3323679 - RNA, 15 nt, Human
ugcaccggcuggccu

SEQ ID NO: 3323680 - RNA, 14 nt, Human
ugcaccggcuggcc

SEQ ID NO: 3323681 - RNA, 15 nt, Human
ugcaccacugcacuc

SEQ ID NO: 3323682 - RNA, 13 nt, Human
ugcaccagcccuu

SEQ ID NO: 3323683 - RNA, 21 nt, Human
ugcaccacugcacuccagccu

SEQ ID NO: 3323684 - RNA, 14 nt, Human
agccccgaggccuu

SEQ ID NO: 3323685 - RNA, 19 nt, Human
agcccaggccuccuacagc

SEQ ID NO: 3323686 - RNA, 14 nt, Human
agcccaggccuccu

SEQ ID NO: 3323687 - RNA, 22 nt, Human
agccccuggaugcagccucaca

SEQ ID NO: 3323688 - RNA, 14 nt, Human
agccccuucugacc

SEQ ID NO: 3323689 - RNA, 16 nt, Human
agccccuucugaccca

SEQ ID NO: 3323690 - RNA, 15 nt, Human
agccccuucugaccc

SEQ ID NO: 3323691 - RNA, 15 nt, Human
agcccgggcucugcc

SEQ ID NO: 3323692 - RNA, 14 nt, Human
agcccgggcucugc

SEQ ID NO: 3323693 - RNA, 13 nt, Human
agcccgggcucug

SEQ ID NO: 3323694 - RNA, 19 nt, Human
agcccugcagagggcacag

SEQ ID NO: 3323695 - RNA, 16 nt, Human
agcccugcagagggca

SEQ ID NO: 3323696 - RNA, 15 nt, Human
agcccugcagagggc

SEQ ID NO: 3323697 - RNA, 14 nt, Human
agcccugcagaggg

SEQ ID NO: 3323698 - RNA, 16 nt, Human
agcccgggcucugccu

SEQ ID NO: 3323699 - RNA, 22 nt, Human
ugccagccgagauagccaaggc

SEQ ID NO: 3323700 - RNA, 17 nt, Human
ugccagccgagauagcc

SEQ ID NO: 3323701 - RNA, 14 nt, Human
ugccaaugggagcu

SEQ ID NO: 3323702 - RNA, 13 nt, Human
ugccaauggacua

SEQ ID NO: 3323703 - RNA, 16 nt, Human
ugcauuuaaaagauac

SEQ ID NO: 3323704 - RNA, 17 nt, Human
agccugugccucuggga

SEQ ID NO: 3323705 - RNA, 18 nt, Human
agccugugccucugggac

SEQ ID NO: 3323706 - RNA, 22 nt, Human
agcgcccaguuggguggaugcc

SEQ ID NO: 3323707 - RNA, 19 nt, Human
agccuugaccauucuccac

SEQ ID NO: 3323708 - RNA, 18 nt, Human
agccuugaccauucucca

SEQ ID NO: 3323709 - RNA, 21 nt, Human
agccuugaccauucuccaccu

SEQ ID NO: 3323710 - RNA, 19 nt, Human
agccuugcggaagguucua

SEQ ID NO: 3323711 - RNA, 23 nt, Human
agccuugaacuuugaccucugca

SEQ ID NO: 3323712 - RNA, 20 nt, Human
agccuuagaagucacacagu

SEQ ID NO: 3323713 - RNA, 14 nt, Human
ugcauaccacuuuu

SEQ ID NO: 3323714 - RNA, 16 nt, Human
ugcauaccacuuuugu

SEQ ID NO: 3323715 - RNA, 20 nt, Human
ugcauaccacuuuuguucuu

SEQ ID NO: 3323716 - RNA, 18 nt, Human
ugcauaccacuuuuguuc

SEQ ID NO: 3323717 - RNA, 17 nt, Human
ugcaucguuucaucuuc

SEQ ID NO: 3323718 - RNA, 18 nt, Human
ugcaugcugucccuuacg

SEQ ID NO: 3323719 - RNA, 16 nt, Human
ugcaugcugucccuua

SEQ ID NO: 3323720 - RNA, 21 nt, Human
ugcaugcugucccuuacguga

SEQ ID NO: 3323721 - RNA, 19 nt, Human
ugcaugcugucccuuacgu

SEQ ID NO: 3323722 - RNA, 13 nt, Human
agccuccugcccu

SEQ ID NO: 3323723 - RNA, 18 nt, Human
agccuccugcccuuaccu

SEQ ID NO: 3323724 - RNA, 14 nt, Human
agccuccugcccuu

SEQ ID NO: 3323725 - RNA, 12 nt, Human
ugcagacaggca

SEQ ID NO: 3323726 - RNA, 13 nt, Human
ugcagacaggcaa

SEQ ID NO: 3323727 - RNA, 21 nt, Human
ugcagacaggcaagcaccucc

SEQ ID NO: 3323728 - RNA, 18 nt, Human
ugcagccucacaguccuu

SEQ ID NO: 3323729 - RNA, 21 nt, Human
ugcagccucacaguccuuacc

SEQ ID NO: 3323730 - RNA, 17 nt, Human
ugcagccucacaguccu

SEQ ID NO: 3323731 - RNA, 22 nt, Human
ugauggggcccugccuccuuug

SEQ ID NO: 3323732 - RNA, 19 nt, Human
ugauguuuuccaugagucc

SEQ ID NO: 3323733 - RNA, 18 nt, Human
ugauguuuuaaggaugcu

SEQ ID NO: 3323734 - RNA, 17 nt, Human
ugauguuuuccaugagu

SEQ ID NO: 3323735 - RNA, 21 nt, Human
ugauguuuuaaggaugcuugu

SEQ ID NO: 3323736 - RNA, 16 nt, Human
agccacggccaggcca

SEQ ID NO: 3323737 - RNA, 20 nt, Human
ugauuaaccacuucagcuga

SEQ ID NO: 3323738 - RNA, 17 nt, Human
ugauuaaauucuugcaa

SEQ ID NO: 3323739 - RNA, 16 nt, Human
ugauuaaauucuugca

SEQ ID NO: 3323740 - RNA, 13 nt, Human
ugauuaaauucuu

SEQ ID NO: 3323741 - RNA, 23 nt, Human
ugaugaaaugaggucagagccug

SEQ ID NO: 3323742 - RNA, 19 nt, Human
ugaugaucuuugcagacag

SEQ ID NO: 3323743 - RNA, 20 nt, Human
ugaugaucuuugcagacagg

SEQ ID NO: 3323744 - RNA, 14 nt, Human
ugaucuaggaagac

SEQ ID NO: 3323745 - RNA, 22 nt, Human
ugaugaaaugaggucagagccu

SEQ ID NO: 3323746 - RNA, 21 nt, Human
ugaugggcaacccccagccug

SEQ ID NO: 3323747 - RNA, 22 nt, Human
ugaugggcaacccccagccugc

SEQ ID NO: 3323748 - RNA, 13 nt, Human
ugauggggcccug

SEQ ID NO: 3323749 - RNA, 21 nt, Human
ugaugaucuuugcagacaggc

SEQ ID NO: 3323750 - RNA, 16 nt, Human
ugauccucccaccuca

SEQ ID NO: 3323751 - RNA, 13 nt, Human
ugaucuaggaaga

SEQ ID NO: 3323752 - RNA, 19 nt, Human
ugauccucccaccucagcc

SEQ ID NO: 3323753 - RNA, 20 nt, Human
ugauccucccaccucagccu

SEQ ID NO: 3323754 - RNA, 18 nt, Human
ugauccucccaccucagc

SEQ ID NO: 3323755 - RNA, 21 nt, Human
agcauauucaggaagcucagg

SEQ ID NO: 3323756 - RNA, 19 nt, Human
agcauauucaggaagcuca

SEQ ID NO: 3323757 - RNA, 17 nt, Human
agcauauucaggaagcu

SEQ ID NO: 3323758 - RNA, 15 nt, Human
ugaucacggcucacu

SEQ ID NO: 3323759 - RNA, 13 nt, Human
ugaucacggcuca

SEQ ID NO: 3323760 - RNA, 14 nt, Human
ugaucacggcucac

SEQ ID NO: 3323761 - RNA, 23 nt, Human
agcaucaggccaggcccucugcc

SEQ ID NO: 3323762 - RNA, 21 nt, Human
agcaucaggccaggcccucug

SEQ ID NO: 3323763 - RNA, 22 nt, Human
agcaucaggccaggcccucugc

SEQ ID NO: 3323764 - RNA, 16 nt, Human
agcauauucaggaagc

SEQ ID NO: 3323765 - RNA, 13 nt, Human
agcauggcugcca

SEQ ID NO: 3323766 - RNA, 19 nt, Human
agcauggcugccaauggga

SEQ ID NO: 3323767 - RNA, 22 nt, Human
agcauuuugcuaaaugugaaug

SEQ ID NO: 3323768 - RNA, 15 nt, Human
agcauuuugcuaaau

SEQ ID NO: 3323769 - RNA, 20 nt, Human
agcagggagggcuucugcca

SEQ ID NO: 3323770 - RNA, 13 nt, Human
agcagggcucagc

SEQ ID NO: 3323771 - RNA, 14 nt, Human
agcagggcucagcg

SEQ ID NO: 3323772 - RNA, 15 nt, Human
agcagggcucagcgg

SEQ ID NO: 3323773 - RNA, 22 nt, Human
agcagggcucagcggggacagc

SEQ ID NO: 3323774 - RNA, 13 nt, Human
agcagggaaacag

SEQ ID NO: 3323775 - RNA, 14 nt, Human
agcagggaaacagc

SEQ ID NO: 3323776 - RNA, 15 nt, Human
agcagggaaacagcu

SEQ ID NO: 3323777 - RNA, 23 nt, Human
agcaggcucucaggccagcugcu

SEQ ID NO: 3323778 - RNA, 22 nt, Human
agcaggcucucaggccagcugc

SEQ ID NO: 3323779 - RNA, 21 nt, Human
agcaggcucucaggccagcug

SEQ ID NO: 3323780 - RNA, 19 nt, Human
agcaggcucucaggccagc

SEQ ID NO: 3323781 - RNA, 18 nt, Human
agcaggcucucaggccag

SEQ ID NO: 3323782 - RNA, 17 nt, Human
agcaggcucucaggcca

SEQ ID NO: 3323783 - RNA, 16 nt, Human
agcaggcucucaggcc

SEQ ID NO: 3323784 - RNA, 15 nt, Human
agcaggcucucaggc

SEQ ID NO: 3323785 - RNA, 14 nt, Human
agcaggcucucagg

SEQ ID NO: 3323786 - RNA, 13 nt, Human
agcaggcucucag

SEQ ID NO: 3323787 - RNA, 17 nt, Human
agcaggcucgggcuccc

SEQ ID NO: 3323788 - RNA, 17 nt, Human
ugacccaugcugcccug

SEQ ID NO: 3323789 - RNA, 19 nt, Human
ugacccaugcugcccugug

SEQ ID NO: 3323790 - RNA, 18 nt, Human
ugacccaugcugcccugu

SEQ ID NO: 3323791 - RNA, 20 nt, Human
ugacccaugcugcccuguga

SEQ ID NO: 3323792 - RNA, 16 nt, Human
agcagcagggagggcu

SEQ ID NO: 3323793 - RNA, 11 nt, Human
agcagccacau

SEQ ID NO: 3323794 - RNA, 13 nt, Human
agcaggacaugga

SEQ ID NO: 3323795 - RNA, 15 nt, Human
ugauacaaugcugug

SEQ ID NO: 3323796 - RNA, 14 nt, Human
ugauacaaugcugu

SEQ ID NO: 3323797 - RNA, 21 nt, Human
ugagugggggaucacagccuc

SEQ ID NO: 3323798 - RNA, 18 nt, Human
ugaguucauacccuguua

SEQ ID NO: 3323799 - RNA, 18 nt, Human
ugagucaccaagcccagu

SEQ ID NO: 3323800 - RNA, 20 nt, Human
ugaguacguugugcauuugg

SEQ ID NO: 3323801 - RNA, 14 nt, Human
ugagugagcaugcc

SEQ ID NO: 3323802 - RNA, 14 nt, Human
ugagugccuuacac

SEQ ID NO: 3323803 - RNA, 13 nt, Human
ugagugccuuaca

SEQ ID NO: 3323804 - RNA, 17 nt, Human
ugagugcagcucuggag

SEQ ID NO: 3323805 - RNA, 19 nt, Human
agcauaaaaauuagccaag

SEQ ID NO: 3323806 - RNA, 23 nt, Human
agcauaaaaauuagccaagugug

SEQ ID NO: 3323807 - RNA, 19 nt, Human
ugaguacguugugcauuug

SEQ ID NO: 3323808 - RNA, 18 nt, Human
ugaguacguugugcauuu

SEQ ID NO: 3323809 - RNA, 17 nt, Human
ugaguacguugugcauu

SEQ ID NO: 3323810 - RNA, 16 nt, Human
ugaguacguugugcau

SEQ ID NO: 3323811 - RNA, 18 nt, Human
auuguuuucaguguacau

SEQ ID NO: 3323812 - RNA, 19 nt, Human
auuguuuucaguguacaug

SEQ ID NO: 3323813 - RNA, 17 nt, Human
auuguuuucaguguaca

SEQ ID NO: 3323814 - RNA, 22 nt, Human
auuuacaacugggggaggguga

SEQ ID NO: 3323815 - RNA, 17 nt, Human
auuuacuucuuauacau

SEQ ID NO: 3323816 - RNA, 19 nt, Human
auuuacuucuuauacauuu

SEQ ID NO: 3323817 - RNA, 20 nt, Human
auuuacuucuuauacauuug

SEQ ID NO: 3323818 - RNA, 14 nt, Human
auuucccaaagcag

SEQ ID NO: 3323819 - RNA, 17 nt, Human
auuuccguuaaaauacc

SEQ ID NO: 3323820 - RNA, 21 nt, Human
auuugaggucuguucuuucca

SEQ ID NO: 3323821 - RNA, 21 nt, Human
auuuggugguuucagaaaugu

SEQ ID NO: 3323822 - RNA, 15 nt, Human
auuugagcagggcuc

SEQ ID NO: 3323823 - RNA, 15 nt, Human
auuugaggucuguuc

SEQ ID NO: 3323824 - RNA, 18 nt, Human
auuugaggucuguucuuu

SEQ ID NO: 3323825 - RNA, 17 nt, Human
auuugaggucuguucuu

SEQ ID NO: 3323826 - RNA, 22 nt, Human
auuggcuagagguucaaagaua

SEQ ID NO: 3323827 - RNA, 20 nt, Human
auuggcuagagguucaaaga

SEQ ID NO: 3323828 - RNA, 19 nt, Human
auuggcuagagguucaaag

SEQ ID NO: 3323829 - RNA, 23 nt, Human
auuggcuagagguucaaagauau

SEQ ID NO: 3323830 - RNA, 16 nt, Human
auugcaacaggcuggg

SEQ ID NO: 3323831 - RNA, 19 nt, Human
auugcaacaggcugggcuu

SEQ ID NO: 3323832 - RNA, 12 nt, Human
auugcaccacug

SEQ ID NO: 3323833 - RNA, 17 nt, Human
auugcaacaggcugggc

SEQ ID NO: 3323834 - RNA, 18 nt, Human
auugcaacaggcugggcu

SEQ ID NO: 3323835 - RNA, 18 nt, Human
uuuuaaaaaacugcugac

SEQ ID NO: 3323836 - RNA, 19 nt, Human
auguuacauaagauaaaug

SEQ ID NO: 3323837 - RNA, 20 nt, Human
auguuacauaagauaaaugu

SEQ ID NO: 3323838 - RNA, 21 nt, Human
uuuuagacccuauugcugcuu

SEQ ID NO: 3323839 - RNA, 17 nt, Human
uuuuagaguugauacua

SEQ ID NO: 3323840 - RNA, 12 nt, Human
auguugaaagau

SEQ ID NO: 3323841 - RNA, 20 nt, Human
auguucuuucacccuuuucu

SEQ ID NO: 3323842 - RNA, 13 nt, Human
auguugcccaggc

SEQ ID NO: 3323843 - RNA, 18 nt, Human
auguugaaagaucaaaag

SEQ ID NO: 3323844 - RNA, 14 nt, Human
auguugcccaggca

SEQ ID NO: 3323845 - RNA, 15 nt, Human
auguugcccaggcag

SEQ ID NO: 3323846 - RNA, 19 nt, Human
uuuuauggcuuuugugcau

SEQ ID NO: 3323847 - RNA, 18 nt, Human
uuuuauggcuuuugugca

SEQ ID NO: 3323848 - RNA, 15 nt, Human
uuuuaguagagacag

SEQ ID NO: 3323849 - RNA, 12 nt, Human
uuuuauuaaauu

SEQ ID NO: 3323850 - RNA, 21 nt, Human
uuuuauggcuuuugugcauua

SEQ ID NO: 3323851 - RNA, 23 nt, Human
uuuucuacucgaguuacagacaa

SEQ ID NO: 3323852 - RNA, 16 nt, Human
auguuggccaggcugg

SEQ ID NO: 3323853 - RNA, 13 nt, Human
uuuucuguucuuu

SEQ ID NO: 3323854 - RNA, 17 nt, Human
auguuggccaggcuggu

SEQ ID NO: 3323855 - RNA, 19 nt, Human
auuaaaacacaacaucuuu

SEQ ID NO: 3323856 - RNA, 23 nt, Human
auuaaaaaucucaaauuucuaaa

SEQ ID NO: 3323857 - RNA, 22 nt, Human
auuaaaaaucucaaauuucuaa

SEQ ID NO: 3323858 - RNA, 19 nt, Human
uuugcuggggccgaaagaa

SEQ ID NO: 3323859 - RNA, 22 nt, Human
uuugcuggggccgaaagaacag

SEQ ID NO: 3323860 - RNA, 22 nt, Human
uuuggauuggaugaauuccaaa

SEQ ID NO: 3323861 - RNA, 22 nt, Human
uuugggguacccacugcucugg

SEQ ID NO: 3323862 - RNA, 21 nt, Human
uuugggguacccacugcucug

SEQ ID NO: 3323863 - RNA, 13 nt, Human
uuuggcugcugaa

SEQ ID NO: 3323864 - RNA, 12 nt, Human
uuuggcugcuga

SEQ ID NO: 3323865 - RNA, 18 nt, Human
uuugaccucugcagcaau

SEQ ID NO: 3323866 - RNA, 13 nt, Human
uuugagacagagu

SEQ ID NO: 3323867 - RNA, 14 nt, Human
uuugauccaagcug

SEQ ID NO: 3323868 - RNA, 15 nt, Human
uuugauccaagcugg

SEQ ID NO: 3323869 - RNA, 15 nt, Human
uuugauucagacagc

SEQ ID NO: 3323870 - RNA, 23 nt, Human
uuugauuaaauucuugcaaagua

SEQ ID NO: 3323871 - RNA, 23 nt, Human
uuucccucccuuccucuuuccau

SEQ ID NO: 3323872 - RNA, 21 nt, Human
uuugaccucugcagcaauaaa

SEQ ID NO: 3323873 - RNA, 19 nt, Human
uuugaccucugcagcaaua

SEQ ID NO: 3323874 - RNA, 14 nt, Human
uuugacaaggggca

SEQ ID NO: 3323875 - RNA, 12 nt, Human
auguaucaauga

SEQ ID NO: 3323876 - RNA, 17 nt, Human
auguccaagaagcccag

SEQ ID NO: 3323877 - RNA, 16 nt, Human
auguccaagaagccca

SEQ ID NO: 3323878 - RNA, 14 nt, Human
augugagacugguu

SEQ ID NO: 3323879 - RNA, 13 nt, Human
augugagaccauu

SEQ ID NO: 3323880 - RNA, 16 nt, Human
uuuguaauuuuuuuau

SEQ ID NO: 3323881 - RNA, 14 nt, Human
uuuguacagacaac

SEQ ID NO: 3323882 - RNA, 16 nt, Human
uuuguuucugaaaggg

SEQ ID NO: 3323883 - RNA, 14 nt, Human
uuuguuucugaaag

SEQ ID NO: 3323884 - RNA, 22 nt, Human
uuugugcauuaucuagauacug

SEQ ID NO: 3323885 - RNA, 19 nt, Human
uuugugcauuaucuagaua

SEQ ID NO: 3323886 - RNA, 22 nt, Human
uuugugauacaaugcugugccc

SEQ ID NO: 3323887 - RNA, 15 nt, Human
uuugugauacaaugc

SEQ ID NO: 3323888 - RNA, 14 nt, Human
uuugucuuaaaaag

SEQ ID NO: 3323889 - RNA, 13 nt, Human
uuugucuuaaaaa

SEQ ID NO: 3323890 - RNA, 23 nt, Human
uuugucuuaaaaaguggaaaaau

SEQ ID NO: 3323891 - RNA, 16 nt, Human
uuugugauacaaugcu

SEQ ID NO: 3323892 - RNA, 17 nt, Human
auucccaagcucugcuc

SEQ ID NO: 3323893 - RNA, 22 nt, Human
auuccccaggaggccagccuug

SEQ ID NO: 3323894 - RNA, 20 nt, Human
auuccccaggaggccagccu

SEQ ID NO: 3323895 - RNA, 19 nt, Human
auuccccaggaggccagcc

SEQ ID NO: 3323896 - RNA, 18 nt, Human
auucccaagcucugcucc

SEQ ID NO: 3323897 - RNA, 19 nt, Human
auucccaagcucugcuccu

SEQ ID NO: 3323898 - RNA, 18 nt, Human
auuaaguacuauguauca

SEQ ID NO: 3323899 - RNA, 16 nt, Human
auuaaguacuauguau

SEQ ID NO: 3323900 - RNA, 19 nt, Human
auuaaguacuauguaucaa

SEQ ID NO: 3323901 - RNA, 13 nt, Human
auuaaggaagaca

SEQ ID NO: 3323902 - RNA, 16 nt, Human
uuuuguuuuugucuua

SEQ ID NO: 3323903 - RNA, 21 nt, Human
uuuuguuccacaaguuaaaua

SEQ ID NO: 3323904 - RNA, 23 nt, Human
uuuuuauacauaaacaagaccac

SEQ ID NO: 3323905 - RNA, 23 nt, Human
uuuugugcauuaucuagauacug

SEQ ID NO: 3323906 - RNA, 14 nt, Human
auuacuucugcuac

SEQ ID NO: 3323907 - RNA, 12 nt, Human
auuacuucugcu

SEQ ID NO: 3323908 - RNA, 13 nt, Human
auuacuucugcua

SEQ ID NO: 3323909 - RNA, 19 nt, Human
auaggaacuuaaauaaugu

SEQ ID NO: 3323910 - RNA, 17 nt, Human
uucacauauugauuucc

SEQ ID NO: 3323911 - RNA, 22 nt, Human
uucaccacaugugcacaugcac

SEQ ID NO: 3323912 - RNA, 15 nt, Human
uucaaggauccugag

SEQ ID NO: 3323913 - RNA, 21 nt, Human
uucaaggauccugagccagau

SEQ ID NO: 3323914 - RNA, 19 nt, Human
uucaaggauccugagccag

SEQ ID NO: 3323915 - RNA, 18 nt, Human
uucaaggauccugagcca

SEQ ID NO: 3323916 - RNA, 16 nt, Human
uucaaggauccugagc

SEQ ID NO: 3323917 - RNA, 17 nt, Human
uucaaaauaaaaaugag

SEQ ID NO: 3323918 - RNA, 19 nt, Human
auagcucaggugucccugc

SEQ ID NO: 3323919 - RNA, 22 nt, Human
auagcucaggugucccugcacu

SEQ ID NO: 3323920 - RNA, 20 nt, Human
auagcucaggugucccugca

SEQ ID NO: 3323921 - RNA, 21 nt, Human
auagcucaggugucccugcac

SEQ ID NO: 3323922 - RNA, 12 nt, Human
auagcugggacu

SEQ ID NO: 3323923 - RNA, 13 nt, Human
auaagauaaaugu

SEQ ID NO: 3323924 - RNA, 17 nt, Human
auaagauaaaugugcug

SEQ ID NO: 3323925 - RNA, 18 nt, Human
auagccugccucuucucu

SEQ ID NO: 3323926 - RNA, 17 nt, Human
auagcugggacuacagg

SEQ ID NO: 3323927 - RNA, 22 nt, Human
auagcuggucuuauuuguaaag

SEQ ID NO: 3323928 - RNA, 23 nt, Human
auagcuggucuuauuuguaaagc

SEQ ID NO: 3323929 - RNA, 14 nt, Human
uuauuuaaauuuua

SEQ ID NO: 3323930 - RNA, 18 nt, Human
uuauuuaaugaaagacug

SEQ ID NO: 3323931 - RNA, 22 nt, Human
uuauuuaaugaaagacuguaca

SEQ ID NO: 3323932 - RNA, 16 nt, Human
uuauuuaguuccuuga

SEQ ID NO: 3323933 - RNA, 14 nt, Human
auaugucaagccau

SEQ ID NO: 3323934 - RNA, 20 nt, Human
auaugauuuaaaucagccgu

SEQ ID NO: 3323935 - RNA, 22 nt, Human
auaucugaaaauguauguguaa

SEQ ID NO: 3323936 - RNA, 16 nt, Human
uucauauuuacuucuu

SEQ ID NO: 3323937 - RNA, 21 nt, Human
uucauauuuacuucuuauaca

SEQ ID NO: 3323938 - RNA, 14 nt, Human
uucaguaauaacuc

SEQ ID NO: 3323939 - RNA, 18 nt, Human
uucaucauccuaagcuau

SEQ ID NO: 3323940 - RNA, 21 nt, Human
uucaucauccuaagcuauuca

SEQ ID NO: 3323941 - RNA, 17 nt, Human
uucagaucucuaacuuc

SEQ ID NO: 3323942 - RNA, 19 nt, Human
uucagccaagaauucuuaa

SEQ ID NO: 3323943 - RNA, 14 nt, Human
uucagccaagaauu

SEQ ID NO: 3323944 - RNA, 16 nt, Human
auauaggaacuuaaau

SEQ ID NO: 3323945 - RNA, 17 nt, Human
auauugcugauggugca

SEQ ID NO: 3323946 - RNA, 17 nt, Human
auauuguuuucagugua

SEQ ID NO: 3323947 - RNA, 20 nt, Human
auauuguuuucaguguacau

SEQ ID NO: 3323948 - RNA, 18 nt, Human
auauguuuuaagaggcag

SEQ ID NO: 3323949 - RNA, 20 nt, Human
auauguuuuaagaggcaggg

SEQ ID NO: 3323950 - RNA, 22 nt, Human
auauuaagaaagacuaucuaaa

SEQ ID NO: 3323951 - RNA, 24 nt, Human
auauuaagaaagacuaucuaaaug

SEQ ID NO: 3323952 - RNA, 22 nt, Human
auauuaaggaagacaaugugaa

SEQ ID NO: 3323953 - RNA, 16 nt, Human
auauucuguuggccag

SEQ ID NO: 3323954 - RNA, 22 nt, Human
auauugauuuccguuaaaauac

SEQ ID NO: 3323955 - RNA, 21 nt, Human
auauugauuuccguuaaaaua

SEQ ID NO: 3323956 - RNA, 19 nt, Human
auauugauuuccguuaaaa

SEQ ID NO: 3323957 - RNA, 22 nt, Human
aucacggcucacugcagccuca

SEQ ID NO: 3323958 - RNA, 19 nt, Human
aucacggcucacugcagcc

SEQ ID NO: 3323959 - RNA, 18 nt, Human
aucaaguauuauaccuuu

SEQ ID NO: 3323960 - RNA, 14 nt, Human
aucaaguauuauac

SEQ ID NO: 3323961 - RNA, 13 nt, Human
aucaaguauuaua

SEQ ID NO: 3323962 - RNA, 14 nt, Human
uuccuucagugccu

SEQ ID NO: 3323963 - RNA, 11 nt, Human
uuccuucagug

SEQ ID NO: 3323964 - RNA, 17 nt, Human
uuccuguucccaugaga

SEQ ID NO: 3323965 - RNA, 11 nt, Human
uuccugugucu

SEQ ID NO: 3323966 - RNA, 15 nt, Human
uuccuaauccucuag

SEQ ID NO: 3323967 - RNA, 13 nt, Human
uuccuaauccucu

SEQ ID NO: 3323968 - RNA, 13 nt, Human
aucauugaaaucu

SEQ ID NO: 3323969 - RNA, 15 nt, Human
aucauugaaaucuuu

SEQ ID NO: 3323970 - RNA, 14 nt, Human
aucauugaaaucuu

SEQ ID NO: 3323971 - RNA, 16 nt, Human
aucagcacgauuucug

SEQ ID NO: 3323972 - RNA, 15 nt, Human
aucagcacgauuucu

SEQ ID NO: 3323973 - RNA, 18 nt, Human
aucagcacgauuucuguu

SEQ ID NO: 3323974 - RNA, 17 nt, Human
aucagcacgauuucugu

SEQ ID NO: 3323975 - RNA, 13 nt, Human
uucuaggccuggg

SEQ ID NO: 3323976 - RNA, 23 nt, Human
uucucagaaucucaaauaacuaa

SEQ ID NO: 3323977 - RNA, 13 nt, Human
uucucagaaucuc

SEQ ID NO: 3323978 - RNA, 19 nt, Human
uucucagaaucucaaauaa

SEQ ID NO: 3323979 - RNA, 22 nt, Human
uucucagaaucucaaauaacua

SEQ ID NO: 3323980 - RNA, 15 nt, Human
auccagguucagcuu

SEQ ID NO: 3323981 - RNA, 16 nt, Human
auccagguucagcuug

SEQ ID NO: 3323982 - RNA, 16 nt, Human
aucccauaugccuggg

SEQ ID NO: 3323983 - RNA, 23 nt, Human
uucugccgcagcccugcagaggg

SEQ ID NO: 3323984 - RNA, 16 nt, Human
uucugccgcagcccug

SEQ ID NO: 3323985 - RNA, 10 nt, Human
uucugggaca

SEQ ID NO: 3323986 - RNA, 11 nt, Human
uucugggacac

SEQ ID NO: 3323987 - RNA, 22 nt, Human
uucugggacacaguucaauucu

SEQ ID NO: 3323988 - RNA, 23 nt, Human
uucugaacuuggcgcugccccug

SEQ ID NO: 3323989 - RNA, 19 nt, Human
aucauugaaaucuuuuugc

SEQ ID NO: 3323990 - RNA, 15 nt, Human
uucugaaagggacgc

SEQ ID NO: 3323991 - RNA, 17 nt, Human
uuggugucgggcaugac

SEQ ID NO: 3323992 - RNA, 19 nt, Human
uuggugucgggcaugacac

SEQ ID NO: 3323993 - RNA, 18 nt, Human
uuggugucgggcaugaca

SEQ ID NO: 3323994 - RNA, 14 nt, Human
uugguuuguaaauu

SEQ ID NO: 3323995 - RNA, 19 nt, Human
uuggugguuucagaaaugu

SEQ ID NO: 3323996 - RNA, 18 nt, Human
uuggugguuucagaaaug

SEQ ID NO: 3323997 - RNA, 18 nt, Human
augaaugucagugugacu

SEQ ID NO: 3323998 - RNA, 16 nt, Human
augaaugucaguguga

SEQ ID NO: 3323999 - RNA, 17 nt, Human
augaaugaaacauuuug

SEQ ID NO: 3324000 - RNA, 23 nt, Human
augaaccacaucuugcucugcug

SEQ ID NO: 3324001 - RNA, 22 nt, Human
augaaccacaucuugcucugcu

SEQ ID NO: 3324002 - RNA, 12 nt, Human
aucugucauuug

SEQ ID NO: 3324003 - RNA, 17 nt, Human
aucugucauuugagcag

SEQ ID NO: 3324004 - RNA, 15 nt, Human
aucuugcucugcuga

SEQ ID NO: 3324005 - RNA, 16 nt, Human
aucuugcucugcugac

SEQ ID NO: 3324006 - RNA, 13 nt, Human
aucuugcucugcu

SEQ ID NO: 3324007 - RNA, 14 nt, Human
aucuugcucugcug

SEQ ID NO: 3324008 - RNA, 20 nt, Human
uugcuuugugauuuuuguaa

SEQ ID NO: 3324009 - RNA, 17 nt, Human
uuggaaaauaaauuauu

SEQ ID NO: 3324010 - RNA, 15 nt, Human
uugcuuugugauuuu

SEQ ID NO: 3324011 - RNA, 23 nt, Human
uugauguucuuucacccuuuucu

SEQ ID NO: 3324012 - RNA, 20 nt, Human
uugauuaaauucuugcaaag

SEQ ID NO: 3324013 - RNA, 16 nt, Human
uugauuaaauucuugc

SEQ ID NO: 3324014 - RNA, 15 nt, Human
uugauuaaauucuug

SEQ ID NO: 3324015 - RNA, 16 nt, Human
aucucacacaugagca

SEQ ID NO: 3324016 - RNA, 18 nt, Human
aucucuugagccugggag

SEQ ID NO: 3324017 - RNA, 23 nt, Human
aucucacacaugagcaucaggcc

SEQ ID NO: 3324018 - RNA, 17 nt, Human
aucucaaauuucuaaau

SEQ ID NO: 3324019 - RNA, 16 nt, Human
aucucaaauuucuaaa

SEQ ID NO: 3324020 - RNA, 21 nt, Human
uugcaccacugcacuccagcc

SEQ ID NO: 3324021 - RNA, 18 nt, Human
uugcaccacugcacucca

SEQ ID NO: 3324022 - RNA, 12 nt, Human
uugcaugaggcu

SEQ ID NO: 3324023 - RNA, 14 nt, Human
uugcaugaggcuag

SEQ ID NO: 3324024 - RNA, 13 nt, Human
uugcccaggcagg

SEQ ID NO: 3324025 - RNA, 14 nt, Human
uugcccaggcaggu

SEQ ID NO: 3324026 - RNA, 16 nt, Human
uugcccaggcaggucu

SEQ ID NO: 3324027 - RNA, 18 nt, Human
uugcccaggcaggucuug

SEQ ID NO: 3324028 - RNA, 11 nt, Human
uugcccaggcu

SEQ ID NO: 3324029 - RNA, 12 nt, Human
uugcccaggcug

SEQ ID NO: 3324030 - RNA, 14 nt, Human
uugcccaggcuggc

SEQ ID NO: 3324031 - RNA, 23 nt, Human
uugcccaggcuggcgugcagugg

SEQ ID NO: 3324032 - RNA, 11 nt, Human
uugcccaggca

SEQ ID NO: 3324033 - RNA, 16 nt, Human
uugacaucaacugcau

SEQ ID NO: 3324034 - RNA, 13 nt, Human
uugacaucaacug

SEQ ID NO: 3324035 - RNA, 19 nt, Human
uugacaggauuauuggaaa

SEQ ID NO: 3324036 - RNA, 10 nt, Human
uugacagggc

SEQ ID NO: 3324037 - RNA, 12 nt, Human
uugacagggcac

SEQ ID NO: 3324038 - RNA, 11 nt, Human
uugagacagag

SEQ ID NO: 3324039 - RNA, 12 nt, Human
uugagcagggcu

SEQ ID NO: 3324040 - RNA, 16 nt, Human
uugagcagggcucagc

SEQ ID NO: 3324041 - RNA, 23 nt, Human
aucucaaauaacuaaaagguaug

SEQ ID NO: 3324042 - RNA, 14 nt, Human
aucucaaauuucua

SEQ ID NO: 3324043 - RNA, 14 nt, Human
aucucaaauaacua

SEQ ID NO: 3324044 - RNA, 21 nt, Human
aucucaaauaacuaaaaggua

SEQ ID NO: 3324045 - RNA, 19 nt, Human
aucuagauacuguaucaug

SEQ ID NO: 3324046 - RNA, 19 nt, Human
aucuaggaagacuuuggaa

SEQ ID NO: 3324047 - RNA, 18 nt, Human
aucuaggaagacuuugga

SEQ ID NO: 3324048 - RNA, 17 nt, Human
aucuaggaagacuuugg

SEQ ID NO: 3324049 - RNA, 11 nt, Human
uugagugccuu

SEQ ID NO: 3324050 - RNA, 21 nt, Human
uugagugcugucuccauguuu

SEQ ID NO: 3324051 - RNA, 17 nt, Human
uugauacuacaguuugu

SEQ ID NO: 3324052 - RNA, 15 nt, Human
uugauacuacaguuu

SEQ ID NO: 3324053 - RNA, 20 nt, Human
aucuaauauguaacaagcca

SEQ ID NO: 3324054 - RNA, 23 nt, Human
aucuaauauguaacaagccaccc

SEQ ID NO: 3324055 - RNA, 18 nt, Human
aucuagauacuguaucau

SEQ ID NO: 3324056 - RNA, 19 nt, Human
uuguucuugguuuguaaau

SEQ ID NO: 3324057 - RNA, 17 nt, Human
uuguucuugguuuguaa

SEQ ID NO: 3324058 - RNA, 23 nt, Human
augcacuuuguucuggcucuucc

SEQ ID NO: 3324059 - RNA, 21 nt, Human
augcacuuuguucuggcucuu

SEQ ID NO: 3324060 - RNA, 11 nt, Human
uuuaaaugcac

SEQ ID NO: 3324061 - RNA, 16 nt, Human
uuuaaugaaagacugu

SEQ ID NO: 3324062 - RNA, 22 nt, Human
uuuaaggaugcuuguacauaau

SEQ ID NO: 3324063 - RNA, 21 nt, Human
uuuaaggaugcuuguacauaa

SEQ ID NO: 3324064 - RNA, 20 nt, Human
uuuaaggaugcuuguacaua

SEQ ID NO: 3324065 - RNA, 19 nt, Human
uuuaaggaugcuuguacau

SEQ ID NO: 3324066 - RNA, 21 nt, Human
uuuaagcuguuacugucuuca

SEQ ID NO: 3324067 - RNA, 12 nt, Human
uuuaagagaaau

SEQ ID NO: 3324068 - RNA, 19 nt, Human
augaggucagagccugcag

SEQ ID NO: 3324069 - RNA, 20 nt, Human
augaggucagagccugcagu

SEQ ID NO: 3324070 - RNA, 16 nt, Human
augaggucagagccug

SEQ ID NO: 3324071 - RNA, 18 nt, Human
augaggucagagccugca

SEQ ID NO: 3324072 - RNA, 15 nt, Human
augaggucagagccu

SEQ ID NO: 3324073 - RNA, 13 nt, Human
augaguccccugu

SEQ ID NO: 3324074 - RNA, 21 nt, Human
uugucauauaagauucauauu

SEQ ID NO: 3324075 - RNA, 17 nt, Human
uugucacacacuuuggc

SEQ ID NO: 3324076 - RNA, 15 nt, Human
uuguccccgacccuu

SEQ ID NO: 3324077 - RNA, 20 nt, Human
uuguccccaccgcagacagg

SEQ ID NO: 3324078 - RNA, 18 nt, Human
uuguccccaccgcagaca

SEQ ID NO: 3324079 - RNA, 18 nt, Human
uugugaggaagccgcugg

SEQ ID NO: 3324080 - RNA, 17 nt, Human
uugugaggaagccgcug

SEQ ID NO: 3324081 - RNA, 20 nt, Human
uugugauacaaugcugugcc

SEQ ID NO: 3324082 - RNA, 19 nt, Human
uugugauacaaugcugugc

SEQ ID NO: 3324083 - RNA, 13 nt, Human
uugugaggaagcc

SEQ ID NO: 3324084 - RNA, 20 nt, Human
augcgugcauaccacuuuug

SEQ ID NO: 3324085 - RNA, 22 nt, Human
augcgugcauaccacuuuuguu

SEQ ID NO: 3324086 - RNA, 15 nt, Human
augccucucucaggc

SEQ ID NO: 3324087 - RNA, 14 nt, Human
augccucucucagg

SEQ ID NO: 3324088 - RNA, 13 nt, Human
augccucucucag

SEQ ID NO: 3324089 - RNA, 17 nt, Human
augcccagccccuucug

SEQ ID NO: 3324090 - RNA, 15 nt, Human
augcccagccccuuc

SEQ ID NO: 3324091 - RNA, 16 nt, Human
augcccagccccuucu

SEQ ID NO: 3324092 - RNA, 21 nt, Human
augccaugaggaacaaggcaa

SEQ ID NO: 3324093 - RNA, 21 nt, Human
uuuaaugaaagacuguacaaa

SEQ ID NO: 3324094 - RNA, 14 nt, Human
uuuacuucuuauac

SEQ ID NO: 3324095 - RNA, 13 nt, Human
uuuacuucuuaua

SEQ ID NO: 3324096 - RNA, 11 nt, Human
uuuacuuaaac

SEQ ID NO: 3324097 - RNA, 16 nt, Human
uuuacugcagcuuugu

SEQ ID NO: 3324098 - RNA, 18 nt, Human
uuuaccugaagucuuugu

SEQ ID NO: 3324099 - RNA, 12 nt, Human
uuucaaacuuua

SEQ ID NO: 3324100 - RNA, 16 nt, Human
uuucccuauuagagaa

SEQ ID NO: 3324101 - RNA, 12 nt, Human
uuucagaaaugu

SEQ ID NO: 3324102 - RNA, 11 nt, Human
uuucagaaaug

SEQ ID NO: 3324103 - RNA, 19 nt, Human
augcuggcuguuggcuggg

SEQ ID NO: 3324104 - RNA, 20 nt, Human
augcuggcuguuggcugggg

SEQ ID NO: 3324105 - RNA, 18 nt, Human
auggaagacagcucuuau

SEQ ID NO: 3324106 - RNA, 17 nt, Human
auggaagacagcucuua

SEQ ID NO: 3324107 - RNA, 20 nt, Human
augcuucucacugccaugcc

SEQ ID NO: 3324108 - RNA, 16 nt, Human
augcuucucacugcca

SEQ ID NO: 3324109 - RNA, 14 nt, Human
uuuaucagaauucu

SEQ ID NO: 3324110 - RNA, 14 nt, Human
augcuccuggccca

SEQ ID NO: 3324111 - RNA, 18 nt, Human
augcuggcuguuggcugg

SEQ ID NO: 3324112 - RNA, 17 nt, Human
aaaacacauuuuucuua

SEQ ID NO: 3324113 - RNA, 19 nt, Human
aaaacacuguucucugccc

SEQ ID NO: 3324114 - RNA, 11 nt, Human
aaaagaaaaag

SEQ ID NO: 3324115 - RNA, 21 nt, Human
aaaaucagccugcuccagcug

SEQ ID NO: 3324116 - RNA, 17 nt, Human
aaaaucagccugcucca

SEQ ID NO: 3324117 - RNA, 13 nt, Human
aaaaucagccugc

SEQ ID NO: 3324118 - RNA, 14 nt, Human
aaaauaaaacuuuu

SEQ ID NO: 3324119 - RNA, 16 nt, Human
aaagccuccuccagcc

SEQ ID NO: 3324120 - RNA, 20 nt, Human
aaagauauuuugcuuuguga

SEQ ID NO: 3324121 - RNA, 23 nt, Human
aaacugauuuuuuuuuccuucag

SEQ ID NO: 3324122 - RNA, 22 nt, Human
aaacugauuuuuuuuuccuuca

SEQ ID NO: 3324123 - RNA, 23 nt, Human
aaacucuuaaaacccaagugccu

SEQ ID NO: 3324124 - RNA, 12 nt, Human
aaacucuuaaaa

SEQ ID NO: 3324125 - RNA, 16 nt, Human
aaacccagcucugguc

SEQ ID NO: 3324126 - RNA, 12 nt, Human
aaacccagcucu

SEQ ID NO: 3324127 - RNA, 16 nt, Human
aaaccgccaaggcugg

SEQ ID NO: 3324128 - RNA, 15 nt, Human
aaaccgccaaggcug

SEQ ID NO: 3324129 - RNA, 16 nt, Human
aaaaucucaaauuucu

SEQ ID NO: 3324130 - RNA, 15 nt, Human
aaaaucucaaauuuc

SEQ ID NO: 3324131 - RNA, 18 nt, Human
aaaaucucaaauuucuaa

SEQ ID NO: 3324132 - RNA, 19 nt, Human
aaaucucaaauuucuaaau

SEQ ID NO: 3324133 - RNA, 14 nt, Human
aaaucuuuuugcuu

SEQ ID NO: 3324134 - RNA, 13 nt, Human
aaaucuuuuugcu

SEQ ID NO: 3324135 - RNA, 19 nt, Human
aaaugcuguaacuuucuga

SEQ ID NO: 3324136 - RNA, 20 nt, Human
aaaggaugcccaaagaugca

SEQ ID NO: 3324137 - RNA, 14 nt, Human
aaaggaugcacaga

SEQ ID NO: 3324138 - RNA, 22 nt, Human
aacauggccuuugcuugaaaga

SEQ ID NO: 3324139 - RNA, 11 nt, Human
aacaggcagau

SEQ ID NO: 3324140 - RNA, 23 nt, Human
aaauucuucuccacuuucuagcc

SEQ ID NO: 3324141 - RNA, 15 nt, Human
aaauucuugcaaagu

SEQ ID NO: 3324142 - RNA, 23 nt, Human
aacauggccuuugcuugaaagaa

SEQ ID NO: 3324143 - RNA, 23 nt, Human
aaccuuuugagugccuuacacaa

SEQ ID NO: 3324144 - RNA, 16 nt, Human
aaccuuuugagugccu

SEQ ID NO: 3324145 - RNA, 19 nt, Human
aaugaugccaugaggaaca

SEQ ID NO: 3324146 - RNA, 20 nt, Human
aaugaugccaugaggaacaa

SEQ ID NO: 3324147 - RNA, 21 nt, Human
aaugaaagacuguacaaagua

SEQ ID NO: 3324148 - RNA, 18 nt, Human
aaugaaagacuguacaaa

SEQ ID NO: 3324149 - RNA, 20 nt, Human
aaugaaagacuguacaaagu

SEQ ID NO: 3324150 - RNA, 21 nt, Human
aaucaccgaaaacguggcugc

SEQ ID NO: 3324151 - RNA, 23 nt, Human
aaucaccgaaaacguggcugcuu

SEQ ID NO: 3324152 - RNA, 15 nt, Human
aaucaccgaaaacgu

SEQ ID NO: 3324153 - RNA, 23 nt, Human
aauauguggaguucaucuugaau

SEQ ID NO: 3324154 - RNA, 13 nt, Human
aauauuaagaaag

SEQ ID NO: 3324155 - RNA, 14 nt, Human
aauaaagcagcguu

SEQ ID NO: 3324156 - RNA, 22 nt, Human
aauaaugugaaacuggauuaaa

SEQ ID NO: 3324157 - RNA, 17 nt, Human
aauaaugugaaacugga

SEQ ID NO: 3324158 - RNA, 16 nt, Human
aauaaugugaaacugg

SEQ ID NO: 3324159 - RNA, 12 nt, Human
aagugcugggau

SEQ ID NO: 3324160 - RNA, 22 nt, Human
aagugcugcauuuaaaagauac

SEQ ID NO: 3324161 - RNA, 14 nt, Human
aagugcugcauuua

SEQ ID NO: 3324162 - RNA, 20 nt, Human
aagaguaggaagacuuugga

SEQ ID NO: 3324163 - RNA, 17 nt, Human
aagacuuuuccaacccu

SEQ ID NO: 3324164 - RNA, 12 nt, Human
aagacuuuucuu

SEQ ID NO: 3324165 - RNA, 21 nt, Human
aagacuuuuccaacccucauc

SEQ ID NO: 3324166 - RNA, 19 nt, Human
aagacuuuucuuucagcca

SEQ ID NO: 3324167 - RNA, 13 nt, Human
aagagaaaaaaua

SEQ ID NO: 3324168 - RNA, 17 nt, Human
aagaccacguuucuaaa

SEQ ID NO: 3324169 - RNA, 15 nt, Human
aagaccacguuucua

SEQ ID NO: 3324170 - RNA, 23 nt, Human
aagacagauacuccuccaagguu

SEQ ID NO: 3324171 - RNA, 19 nt, Human
aagacaaugugaaaagaaa

SEQ ID NO: 3324172 - RNA, 22 nt, Human
aagacaaugacuuacuguacau

SEQ ID NO: 3324173 - RNA, 20 nt, Human
aagacaaugugaaaagaaaa

SEQ ID NO: 3324174 - RNA, 14 nt, Human
aagcggcuggcagc

SEQ ID NO: 3324175 - RNA, 15 nt, Human
aagcgugagccacug

SEQ ID NO: 3324176 - RNA, 14 nt, Human
aagauaaaugugcu

SEQ ID NO: 3324177 - RNA, 21 nt, Human
aagauaauauuaaggaagaca

SEQ ID NO: 3324178 - RNA, 19 nt, Human
aagauaauauuaaggaaga

SEQ ID NO: 3324179 - RNA, 17 nt, Human
aagauacaguuacucag

SEQ ID NO: 3324180 - RNA, 19 nt, Human
aagcugcacccucaggcag

SEQ ID NO: 3324181 - RNA, 13 nt, Human
aagcugcacccuc

SEQ ID NO: 3324182 - RNA, 15 nt, Human
aaggcaaggcuguca

SEQ ID NO: 3324183 - RNA, 13 nt, Human
aaggcaaggcugu

SEQ ID NO: 3324184 - RNA, 23 nt, Human
acaggcacccaccaucaugucug

SEQ ID NO: 3324185 - RNA, 23 nt, Human
acagugagucgaggacagggagg

SEQ ID NO: 3324186 - RNA, 14 nt, Human
acaggcaaugcugg

SEQ ID NO: 3324187 - RNA, 15 nt, Human
acaggcaaugcuggc

SEQ ID NO: 3324188 - RNA, 16 nt, Human
acaggcaaugcuggcu

SEQ ID NO: 3324189 - RNA, 14 nt, Human
acaggcacccacca

SEQ ID NO: 3324190 - RNA, 17 nt, Human
acaggcaaugcuggcug

SEQ ID NO: 3324191 - RNA, 19 nt, Human
acagcucuucuccaggcug

SEQ ID NO: 3324192 - RNA, 20 nt, Human
acagcucuucuccaggcugu

SEQ ID NO: 3324193 - RNA, 18 nt, Human
acagcucuucuccaggcu

SEQ ID NO: 3324194 - RNA, 20 nt, Human
acauacaggaagguagaaau

SEQ ID NO: 3324195 - RNA, 16 nt, Human
acauacaauuccaaac

SEQ ID NO: 3324196 - RNA, 23 nt, Human
acaugcacagcuaacauggaagu

SEQ ID NO: 3324197 - RNA, 13 nt, Human
acaugcacgugug

SEQ ID NO: 3324198 - RNA, 20 nt, Human
acaugccucucucaggccaa

SEQ ID NO: 3324199 - RNA, 17 nt, Human
accaacgucugugccau

SEQ ID NO: 3324200 - RNA, 14 nt, Human
accaacgucugugc

SEQ ID NO: 3324201 - RNA, 18 nt, Human
accacgcuggaccuugaa

SEQ ID NO: 3324202 - RNA, 14 nt, Human
accacgcuggaccu

SEQ ID NO: 3324203 - RNA, 16 nt, Human
accacgcuggaccuug

SEQ ID NO: 3324204 - RNA, 14 nt, Human
accacguuucuaaa

SEQ ID NO: 3324205 - RNA, 13 nt, Human
accacguuucuaa

SEQ ID NO: 3324206 - RNA, 12 nt, Human
accaagcccagu

SEQ ID NO: 3324207 - RNA, 12 nt, Human
accagagcugcc

SEQ ID NO: 3324208 - RNA, 13 nt, Human
accagagcugcca

SEQ ID NO: 3324209 - RNA, 16 nt, Human
accagagcugccaccu

SEQ ID NO: 3324210 - RNA, 14 nt, Human
accagagcugccac

SEQ ID NO: 3324211 - RNA, 13 nt, Human
acaccagagccca

SEQ ID NO: 3324212 - RNA, 18 nt, Human
acaccagagcccaccuug

SEQ ID NO: 3324213 - RNA, 23 nt, Human
acaccagagcccaccuuggcuca

SEQ ID NO: 3324214 - RNA, 13 nt, Human
acacagcucuucu

SEQ ID NO: 3324215 - RNA, 18 nt, Human
acacagcucuucuccagg

SEQ ID NO: 3324216 - RNA, 14 nt, Human
acacagcucuucuc

SEQ ID NO: 3324217 - RNA, 16 nt, Human
acacagcucuucucca

SEQ ID NO: 3324218 - RNA, 15 nt, Human
acaaggcaaggcugu

SEQ ID NO: 3324219 - RNA, 19 nt, Human
acaaggcaaggcugucaau

SEQ ID NO: 3324220 - RNA, 17 nt, Human
acaaggcaaggcuguca

SEQ ID NO: 3324221 - RNA, 16 nt, Human
acaaggcaaggcuguc

SEQ ID NO: 3324222 - RNA, 15 nt, Human
acaaguuaaauaaau

SEQ ID NO: 3324223 - RNA, 19 nt, Human
aauuaugaguuauuuuuau

SEQ ID NO: 3324224 - RNA, 18 nt, Human
aauucuguuuuucuaggc

SEQ ID NO: 3324225 - RNA, 14 nt, Human
aauucuguuuuucu

SEQ ID NO: 3324226 - RNA, 22 nt, Human
aauuguaaggaaugauuaauua

SEQ ID NO: 3324227 - RNA, 16 nt, Human
aauuguaaggaaugau

SEQ ID NO: 3324228 - RNA, 21 nt, Human
aauucucauuugucacacacu

SEQ ID NO: 3324229 - RNA, 15 nt, Human
aauucucuuauccaa

SEQ ID NO: 3324230 - RNA, 17 nt, Human
aauucucuaguuugauu

SEQ ID NO: 3324231 - RNA, 15 nt, Human
aauucucuaguuuga

SEQ ID NO: 3324232 - RNA, 14 nt, Human
aauucuacuuugag

SEQ ID NO: 3324233 - RNA, 19 nt, Human
aauucucagaaucucaaau

SEQ ID NO: 3324234 - RNA, 17 nt, Human
aauuucccaaagcagug

SEQ ID NO: 3324235 - RNA, 15 nt, Human
aauuucccaaagcag

SEQ ID NO: 3324236 - RNA, 22 nt, Human
acucccaucugugaaaggaaag

SEQ ID NO: 3324237 - RNA, 15 nt, Human
acucuacagaggcca

SEQ ID NO: 3324238 - RNA, 23 nt, Human
acugaugggcaacccccagccug

SEQ ID NO: 3324239 - RNA, 19 nt, Human
acugauuuuuuuuuccuuc

SEQ ID NO: 3324240 - RNA, 18 nt, Human
acugauuuuuuuuuccuu

SEQ ID NO: 3324241 - RNA, 17 nt, Human
acugauuuuuuuuuccu

SEQ ID NO: 3324242 - RNA, 16 nt, Human
acugauuuuuuuuucc

SEQ ID NO: 3324243 - RNA, 17 nt, Human
acugacauuguuggcca

SEQ ID NO: 3324244 - RNA, 18 nt, Human
acugacauuguuggccaa

SEQ ID NO: 3324245 - RNA, 23 nt, Human
acugaauuucuuuugccguuauu

SEQ ID NO: 3324246 - RNA, 12 nt, Human
acugaauuucuu

SEQ ID NO: 3324247 - RNA, 19 nt, Human
acuguuucaaacuuuacua

SEQ ID NO: 3324248 - RNA, 18 nt, Human
acuguuucaaacuuuacu

SEQ ID NO: 3324249 - RNA, 15 nt, Human
acuguuucaaacuuu

SEQ ID NO: 3324250 - RNA, 13 nt, Human
acuguuucaaacu

SEQ ID NO: 3324251 - RNA, 23 nt, Human
acuuggggggcugaggugggagg

SEQ ID NO: 3324252 - RNA, 20 nt, Human
acugcuuuuggucuguguga

SEQ ID NO: 3324253 - RNA, 14 nt, Human
acugccaugccagc

SEQ ID NO: 3324254 - RNA, 17 nt, Human
acugugccaugugccag

SEQ ID NO: 3324255 - RNA, 18 nt, Human
acugugccaugugccagg

SEQ ID NO: 3324256 - RNA, 16 nt, Human
acugugccaugugcca

SEQ ID NO: 3324257 - RNA, 16 nt, Human
acccugugauggggcc

SEQ ID NO: 3324258 - RNA, 16 nt, Human
acccuggggagaaagu

SEQ ID NO: 3324259 - RNA, 23 nt, Human
acccucaucaccaacgucugugc

SEQ ID NO: 3324260 - RNA, 23 nt, Human
acccuggcacuauaauguaagcu

SEQ ID NO: 3324261 - RNA, 13 nt, Human
acccucaucacca

SEQ ID NO: 3324262 - RNA, 16 nt, Human
acccucaggcaggugg

SEQ ID NO: 3324263 - RNA, 15 nt, Human
acccucaggcaggug

SEQ ID NO: 3324264 - RNA, 14 nt, Human
acccucaggcaggu

SEQ ID NO: 3324265 - RNA, 13 nt, Human
acccucaggcagg

SEQ ID NO: 3324266 - RNA, 13 nt, Human
acccuauugcugc

SEQ ID NO: 3324267 - RNA, 19 nt, Human
acccuauugcugcuugagg

SEQ ID NO: 3324268 - RNA, 14 nt, Human
acccuauugcugcu

SEQ ID NO: 3324269 - RNA, 18 nt, Human
accgugaggccagagaca

SEQ ID NO: 3324270 - RNA, 19 nt, Human
accggcuggccuggccccu

SEQ ID NO: 3324271 - RNA, 23 nt, Human
accgugaggccagagacacaagc

SEQ ID NO: 3324272 - RNA, 12 nt, Human
accucagccucc

SEQ ID NO: 3324273 - RNA, 11 nt, Human
accucagccuc

SEQ ID NO: 3324274 - RNA, 12 nt, Human
accgggcacuca

SEQ ID NO: 3324275 - RNA, 14 nt, Human
accgggcacucaga

SEQ ID NO: 3324276 - RNA, 20 nt, Human
accgggccacagagaaagua

SEQ ID NO: 3324277 - RNA, 16 nt, Human
accgggcacucagaag

SEQ ID NO: 3324278 - RNA, 20 nt, Human
acccugugauggggcccugc

SEQ ID NO: 3324279 - RNA, 19 nt, Human
acccugugauggggcccug

SEQ ID NO: 3324280 - RNA, 17 nt, Human
acccugugauggggccc

SEQ ID NO: 3324281 - RNA, 11 nt, Human
accucaggccu

SEQ ID NO: 3324282 - RNA, 20 nt, Human
accucaggugauccacccac

SEQ ID NO: 3324283 - RNA, 21 nt, Human
accucaggugauccacccacc

SEQ ID NO: 3324284 - RNA, 12 nt, Human
accucugccuga

SEQ ID NO: 3324285 - RNA, 20 nt, Human
accucugccugaagucacac

SEQ ID NO: 3324286 - RNA, 19 nt, Human
accugccaggaagccagca

SEQ ID NO: 3324287 - RNA, 15 nt, Human
accugccccucaacu

SEQ ID NO: 3324288 - RNA, 12 nt, Human
accugccccuca

SEQ ID NO: 3324289 - RNA, 22 nt, Human
accugccaggaagccagcaggc

SEQ ID NO: 3324290 - RNA, 21 nt, Human
accugccaggaagccagcagg

SEQ ID NO: 3324291 - RNA, 23 nt, Human
accugccaggaagccagcaggcu

SEQ ID NO: 3324292 - RNA, 18 nt, Human
acuaauggggcggugaga

SEQ ID NO: 3324293 - RNA, 17 nt, Human
acggacacucaaaagcu

SEQ ID NO: 3324294 - RNA, 19 nt, Human
acggaauaguuggcuagga

SEQ ID NO: 3324295 - RNA, 15 nt, Human
acggaauaguuggcu

SEQ ID NO: 3324296 - RNA, 13 nt, Human
acgucugugccau

SEQ ID NO: 3324297 - RNA, 12 nt, Human
acgucugugcca

SEQ ID NO: 3324298 - RNA, 19 nt, Human
acgcugugcugcccugccc

SEQ ID NO: 3324299 - RNA, 22 nt, Human
acgcugugcugcccugcccacc

SEQ ID NO: 3324300 - RNA, 19 nt, Human
acgauuucuguuuagauaa

SEQ ID NO: 3324301 - RNA, 23 nt, Human
acgauuucuguuuagauaauaca

SEQ ID NO: 3324302 - RNA, 20 nt, Human
acgauuucuguuuagauaau

SEQ ID NO: 3324303 - RNA, 18 nt, Human
auauuuuuuucuuuucuu

SEQ ID NO: 3324304 - RNA, 19 nt, Human
aucaaagagguuuuaaaaa

SEQ ID NO: 3324305 - RNA, 20 nt, Human
aucaaaagguuaauaaagua

SEQ ID NO: 3324306 - RNA, 14 nt, Human
auagcacagacccu

SEQ ID NO: 3324307 - RNA, 20 nt, Human
aucaugacaaagacugagua

SEQ ID NO: 3324308 - RNA, 23 nt, Human
aucauccacugugccaugugcca

SEQ ID NO: 3324309 - RNA, 15 nt, Human
aucauccuaagcuau

SEQ ID NO: 3324310 - RNA, 21 nt, Human
auccacugugccaugugccag

SEQ ID NO: 3324311 - RNA, 22 nt, Human
aucuaggaagacuuuggaaaga

SEQ ID NO: 3324312 - RNA, 21 nt, Human
augggaaugaaugucagugug

SEQ ID NO: 3324313 - RNA, 18 nt, Human
auggcuuuugugcauuau

SEQ ID NO: 3324314 - RNA, 20 nt, Human
augcuucuucagagacuccu

SEQ ID NO: 3324315 - RNA, 17 nt, Human
augcuucuucagagacu

SEQ ID NO: 3324316 - RNA, 14 nt, Human
augcuucuucagag

SEQ ID NO: 3324317 - RNA, 15 nt, Human
augcucugcauguua

SEQ ID NO: 3324318 - RNA, 18 nt, Human
augcucugcauguuacau

SEQ ID NO: 3324319 - RNA, 19 nt, Human
augcucugcauguuacaua

SEQ ID NO: 3324320 - RNA, 16 nt, Human
augcuuugaucccuuc

SEQ ID NO: 3324321 - RNA, 21 nt, Human
augccugguggcagcugcggu

SEQ ID NO: 3324322 - RNA, 11 nt, Human
augccuggugg

SEQ ID NO: 3324323 - RNA, 12 nt, Human
augccugguggc

SEQ ID NO: 3324324 - RNA, 13 nt, Human
augccugguggca

SEQ ID NO: 3324325 - RNA, 19 nt, Human
augccugguggcagcugcg

SEQ ID NO: 3324326 - RNA, 18 nt, Human
augccugguggcagcugc

SEQ ID NO: 3324327 - RNA, 23 nt, Human
aucuaggaagacuuuggaaagag

SEQ ID NO: 3324328 - RNA, 23 nt, Human
augaagcauuuacuuuguguuca

SEQ ID NO: 3324329 - RNA, 12 nt, Human
augaaagacugu

SEQ ID NO: 3324330 - RNA, 21 nt, Human
augaaguaauaugcacacauu

SEQ ID NO: 3324331 - RNA, 14 nt, Human
augaaguaauaugc

SEQ ID NO: 3324332 - RNA, 23 nt, Human
augaaguaauaugcacacauuuu

SEQ ID NO: 3324333 - RNA, 21 nt, Human
augagccucagcauccuggca

SEQ ID NO: 3324334 - RNA, 19 nt, Human
augagccucagcauccugg

SEQ ID NO: 3324335 - RNA, 11 nt, Human
augagccuggc

SEQ ID NO: 3324336 - RNA, 13 nt, Human
augaccuuucaau

SEQ ID NO: 3324337 - RNA, 15 nt, Human
augaccuuucaauag

SEQ ID NO: 3324338 - RNA, 22 nt, Human
augaggcauuuguuugaacuga

SEQ ID NO: 3324339 - RNA, 15 nt, Human
aguacuggagaaaau

SEQ ID NO: 3324340 - RNA, 20 nt, Human
aguacuucuccacccugcuc

SEQ ID NO: 3324341 - RNA, 19 nt, Human
aguacuucuccacccugcu

SEQ ID NO: 3324342 - RNA, 21 nt, Human
aguacuucuccacccugcucu

SEQ ID NO: 3324343 - RNA, 17 nt, Human
aguaacuuacuuaggug

SEQ ID NO: 3324344 - RNA, 21 nt, Human
aguaaaugggggugcauuuga

SEQ ID NO: 3324345 - RNA, 20 nt, Human
aguaaaugggggugcauuug

SEQ ID NO: 3324346 - RNA, 19 nt, Human
aguaaaugggggugcauuu

SEQ ID NO: 3324347 - RNA, 18 nt, Human
aguaaaugggggugcauu

SEQ ID NO: 3324348 - RNA, 19 nt, Human
agugauccucccaccucag

SEQ ID NO: 3324349 - RNA, 20 nt, Human
agugauccucccaccucagc

SEQ ID NO: 3324350 - RNA, 22 nt, Human
agugauccucccaccucagccu

SEQ ID NO: 3324351 - RNA, 19 nt, Human
agugauucuccugccucag

SEQ ID NO: 3324352 - RNA, 18 nt, Human
agugauucuccugccuca

SEQ ID NO: 3324353 - RNA, 20 nt, Human
agugauucuccugccucagc

SEQ ID NO: 3324354 - RNA, 17 nt, Human
agugauucuccugccuc

SEQ ID NO: 3324355 - RNA, 18 nt, Human
agugccuuauggaacacu

SEQ ID NO: 3324356 - RNA, 22 nt, Human
agugccuuauggaacacucuga

SEQ ID NO: 3324357 - RNA, 21 nt, Human
agugccuuauggaacacucug

SEQ ID NO: 3324358 - RNA, 20 nt, Human
agugccuuauggaacacucu

SEQ ID NO: 3324359 - RNA, 19 nt, Human
agugccuuauggaacacuc

SEQ ID NO: 3324360 - RNA, 14 nt, Human
agugacagaggcag

SEQ ID NO: 3324361 - RNA, 16 nt, Human
agugacagaggcagcc

SEQ ID NO: 3324362 - RNA, 19 nt, Human
agugacagaggcagcccca

SEQ ID NO: 3324363 - RNA, 18 nt, Human
aguccuuaccagcagagc

SEQ ID NO: 3324364 - RNA, 16 nt, Human
aguccuuaccagcaga

SEQ ID NO: 3324365 - RNA, 21 nt, Human
agucugauucccaagcucugc

SEQ ID NO: 3324366 - RNA, 22 nt, Human
agucugauucccaagcucugcu

SEQ ID NO: 3324367 - RNA, 20 nt, Human
agucugauucccaagcucug

SEQ ID NO: 3324368 - RNA, 18 nt, Human
agucuggaaugcaguggu

SEQ ID NO: 3324369 - RNA, 16 nt, Human
agucgaggacagggag

SEQ ID NO: 3324370 - RNA, 18 nt, Human
agucuggcccuuccuuuu

SEQ ID NO: 3324371 - RNA, 15 nt, Human
auacaccacuacauu

SEQ ID NO: 3324372 - RNA, 12 nt, Human
auaauguuaaca

SEQ ID NO: 3324373 - RNA, 17 nt, Human
auacaaugcugugcccu

SEQ ID NO: 3324374 - RNA, 23 nt, Human
auacaaugcugugcccuaaagug

SEQ ID NO: 3324375 - RNA, 21 nt, Human
auaaagaugagugagcaugcc

SEQ ID NO: 3324376 - RNA, 17 nt, Human
auacaccacuacauucu

SEQ ID NO: 3324377 - RNA, 11 nt, Human
aguuugcaguu

SEQ ID NO: 3324378 - RNA, 14 nt, Human
aguuugauuaaauu

SEQ ID NO: 3324379 - RNA, 22 nt, Human
aguuguuagugugucuuagugu

SEQ ID NO: 3324380 - RNA, 17 nt, Human
aguuguuagugugucuu

SEQ ID NO: 3324381 - RNA, 17 nt, Human
aguugaaaaacagcuga

SEQ ID NO: 3324382 - RNA, 17 nt, Human
aguugaagacagagcua

SEQ ID NO: 3324383 - RNA, 16 nt, Human
aguugaagacagagcu

SEQ ID NO: 3324384 - RNA, 18 nt, Human
aguugaaaaacagcugag

SEQ ID NO: 3324385 - RNA, 21 nt, Human
aguuccaccaucaagccacca

SEQ ID NO: 3324386 - RNA, 18 nt, Human
aguuccaccaucaagcca

SEQ ID NO: 3324387 - RNA, 14 nt, Human
aguucauacccugu

SEQ ID NO: 3324388 - RNA, 17 nt, Human
agcgauucuucugcuuc

SEQ ID NO: 3324389 - RNA, 19 nt, Human
agcgauucuucugcuucag

SEQ ID NO: 3324390 - RNA, 15 nt, Human
agcgauucuucugcu

SEQ ID NO: 3324391 - RNA, 20 nt, Human
agcuaacauggaaguacuau

SEQ ID NO: 3324392 - RNA, 19 nt, Human
agcuaacauggaaguacua

SEQ ID NO: 3324393 - RNA, 13 nt, Human
agcuaaugggaca

SEQ ID NO: 3324394 - RNA, 14 nt, Human
agcuaaugggacac

SEQ ID NO: 3324395 - RNA, 13 nt, Human
agcucaccagccc

SEQ ID NO: 3324396 - RNA, 14 nt, Human
agcucaccagcccc

SEQ ID NO: 3324397 - RNA, 20 nt, Human
agcucaccagccccagugcc

SEQ ID NO: 3324398 - RNA, 21 nt, Human
agcucaccagccccagugccc

SEQ ID NO: 3324399 - RNA, 20 nt, Human
agccugggaggucaaggcug

SEQ ID NO: 3324400 - RNA, 18 nt, Human
agccugggcaaugugaua

SEQ ID NO: 3324401 - RNA, 14 nt, Human
agccuggacccugu

SEQ ID NO: 3324402 - RNA, 21 nt, Human
agcuuuguuuguugucagcug

SEQ ID NO: 3324403 - RNA, 15 nt, Human
aggaaguacuggaga

SEQ ID NO: 3324404 - RNA, 11 nt, Human
aggaaguacug

SEQ ID NO: 3324405 - RNA, 14 nt, Human
aggaagguagaaau

SEQ ID NO: 3324406 - RNA, 23 nt, Human
aggaacaaggcaaggcugucaau

SEQ ID NO: 3324407 - RNA, 12 nt, Human
aggaacacuccu

SEQ ID NO: 3324408 - RNA, 23 nt, Human
aggaacuuaaauaaugugaaacu

SEQ ID NO: 3324409 - RNA, 15 nt, Human
aggaacacuccuuca

SEQ ID NO: 3324410 - RNA, 22 nt, Human
agcugccuguucagcuccagcu

SEQ ID NO: 3324411 - RNA, 15 nt, Human
agcuggucccacuca

SEQ ID NO: 3324412 - RNA, 15 nt, Human
agcugacuuuucugu

SEQ ID NO: 3324413 - RNA, 22 nt, Human
agcucaccagccccagugccca

SEQ ID NO: 3324414 - RNA, 23 nt, Human
agcucaccagccccagugcccac

SEQ ID NO: 3324415 - RNA, 14 nt, Human
aggaggucucuaag

SEQ ID NO: 3324416 - RNA, 19 nt, Human
aggaaguacuggagaaaau

SEQ ID NO: 3324417 - RNA, 15 nt, Human
aggaggucucuaaga

SEQ ID NO: 3324418 - RNA, 12 nt, Human
aggagugagcac

SEQ ID NO: 3324419 - RNA, 14 nt, Human
aggagugagcacua

SEQ ID NO: 3324420 - RNA, 13 nt, Human
aggcagauacagg

SEQ ID NO: 3324421 - RNA, 14 nt, Human
aggcagccaggcca

SEQ ID NO: 3324422 - RNA, 16 nt, Human
aggcagccaggccaca

SEQ ID NO: 3324423 - RNA, 15 nt, Human
aggcagccaggccac

SEQ ID NO: 3324424 - RNA, 24 nt, Human
aggcaugugaugagaggaaaucac

SEQ ID NO: 3324425 - RNA, 23 nt, Human
aggcaugugaugagaggaaauca

SEQ ID NO: 3324426 - RNA, 12 nt, Human
aggccagcugcu

SEQ ID NO: 3324427 - RNA, 23 nt, Human
aggcauuccccaggaggccagcc

SEQ ID NO: 3324428 - RNA, 22 nt, Human
aggcauuccccaggaggccagc

SEQ ID NO: 3324429 - RNA, 21 nt, Human
aggcauuccccaggaggccag

SEQ ID NO: 3324430 - RNA, 20 nt, Human
aggcauguucucugaggaca

SEQ ID NO: 3324431 - RNA, 22 nt, Human
aggcauguucucugaggacacu

SEQ ID NO: 3324432 - RNA, 14 nt, Human
aggccaugggccuc

SEQ ID NO: 3324433 - RNA, 16 nt, Human
aggccaugggccuccu

SEQ ID NO: 3324434 - RNA, 15 nt, Human
aggcccucugcccac

SEQ ID NO: 3324435 - RNA, 17 nt, Human
aggcccucugcccacuc

SEQ ID NO: 3324436 - RNA, 23 nt, Human
aggccaggcccucugcccacucc

SEQ ID NO: 3324437 - RNA, 19 nt, Human
aggccaggcccucugccca

SEQ ID NO: 3324438 - RNA, 18 nt, Human
aggccaggcccucugccc

SEQ ID NO: 3324439 - RNA, 17 nt, Human
aggccaggcccucugcc

SEQ ID NO: 3324440 - RNA, 16 nt, Human
aggccaggcccucugc

SEQ ID NO: 3324441 - RNA, 16 nt, Human
aggccagcugcuuggg

SEQ ID NO: 3324442 - RNA, 14 nt, Human
aggccagcugcuug

SEQ ID NO: 3324443 - RNA, 13 nt, Human
aggccagcugcuu

SEQ ID NO: 3324444 - RNA, 18 nt, Human
agggccuggccugagcug

SEQ ID NO: 3324445 - RNA, 14 nt, Human
agggccuggcucag

SEQ ID NO: 3324446 - RNA, 13 nt, Human
agggccuggcuca

SEQ ID NO: 3324447 - RNA, 18 nt, Human
agggccuggcucaggugg

SEQ ID NO: 3324448 - RNA, 23 nt, Human
aggcuguaucccaugagccucag

SEQ ID NO: 3324449 - RNA, 19 nt, Human
aggcugcagugagccgaga

SEQ ID NO: 3324450 - RNA, 17 nt, Human
aggcugcagugagccga

SEQ ID NO: 3324451 - RNA, 12 nt, Human
aggcugucaauu

SEQ ID NO: 3324452 - RNA, 24 nt, Human
aggcuguaucccaugagccucagc

SEQ ID NO: 3324453 - RNA, 20 nt, Human
aggcccucugcccacucccu

SEQ ID NO: 3324454 - RNA, 19 nt, Human
aggcccucugcccacuccc

SEQ ID NO: 3324455 - RNA, 20 nt, Human
agagggucugaggaauccag

SEQ ID NO: 3324456 - RNA, 23 nt, Human
agaggggguggccucccaacuca

SEQ ID NO: 3324457 - RNA, 20 nt, Human
agauagccaaggccaaagga

SEQ ID NO: 3324458 - RNA, 15 nt, Human
agaguugaagacaga

SEQ ID NO: 3324459 - RNA, 14 nt, Human
agaguugaagacag

SEQ ID NO: 3324460 - RNA, 13 nt, Human
agaguugaagaca

SEQ ID NO: 3324461 - RNA, 19 nt, Human
agcaaauucuguuuuucua

SEQ ID NO: 3324462 - RNA, 17 nt, Human
agauugcaacaggcugg

SEQ ID NO: 3324463 - RNA, 16 nt, Human
agauugcaccacugca

SEQ ID NO: 3324464 - RNA, 16 nt, Human
agauucuuuccugagg

SEQ ID NO: 3324465 - RNA, 15 nt, Human
agauucuuuccugag

SEQ ID NO: 3324466 - RNA, 16 nt, Human
agauugcaacaggcug

SEQ ID NO: 3324467 - RNA, 18 nt, Human
agaucucuaacuucacca

SEQ ID NO: 3324468 - RNA, 18 nt, Human
agaugacaucugucuagg

SEQ ID NO: 3324469 - RNA, 22 nt, Human
agaugggugcuuggaggaagga

SEQ ID NO: 3324470 - RNA, 20 nt, Human
agaugggugcuuggaggaag

SEQ ID NO: 3324471 - RNA, 14 nt, Human
agauucuuuccuga

SEQ ID NO: 3324472 - RNA, 20 nt, Human
agccagauuucacucuccuu

SEQ ID NO: 3324473 - RNA, 17 nt, Human
agccagauuucacucuc

SEQ ID NO: 3324474 - RNA, 14 nt, Human
agccagauuucacu

SEQ ID NO: 3324475 - RNA, 13 nt, Human
agcccaccuuggc

SEQ ID NO: 3324476 - RNA, 23 nt, Human
agcccaccccucaacaccucugc

SEQ ID NO: 3324477 - RNA, 19 nt, Human
agcccacgcccccacuggu

SEQ ID NO: 3324478 - RNA, 15 nt, Human
agcccacgcccccac

SEQ ID NO: 3324479 - RNA, 18 nt, Human
agcccacgcccccacugg

SEQ ID NO: 3324480 - RNA, 17 nt, Human
agcccacgcccccacug

SEQ ID NO: 3324481 - RNA, 21 nt, Human
agccagcaggcucucaggcca

SEQ ID NO: 3324482 - RNA, 22 nt, Human
agccagcaggcucucaggccag

SEQ ID NO: 3324483 - RNA, 23 nt, Human
agccagcaggcucucaggccagc

SEQ ID NO: 3324484 - RNA, 16 nt, Human
agcaucuaugugagac

SEQ ID NO: 3324485 - RNA, 16 nt, Human
agcagccuggacccug

SEQ ID NO: 3324486 - RNA, 20 nt, Human
agcagccuggacccugugga

SEQ ID NO: 3324487 - RNA, 19 nt, Human
agcagcguuucuaugacac

SEQ ID NO: 3324488 - RNA, 18 nt, Human
agcagcguuucuaugaca

SEQ ID NO: 3324489 - RNA, 16 nt, Human
agcagugcaugcuguc

SEQ ID NO: 3324490 - RNA, 13 nt, Human
agcagugcaugcu

SEQ ID NO: 3324491 - RNA, 17 nt, Human
agcagugcaugcugucc

SEQ ID NO: 3324492 - RNA, 20 nt, Human
agcacagacccugcccugug

SEQ ID NO: 3324493 - RNA, 21 nt, Human
agcacagacccugcccugugg

SEQ ID NO: 3324494 - RNA, 20 nt, Human
agcacuaaggugugcucuga

SEQ ID NO: 3324495 - RNA, 18 nt, Human
agaaccaaaaagaggcua

SEQ ID NO: 3324496 - RNA, 17 nt, Human
agaaccaaaaagaggcu

SEQ ID NO: 3324497 - RNA, 21 nt, Human
agaagagauugugguuucauu

SEQ ID NO: 3324498 - RNA, 15 nt, Human
agaagagaaugcaca

SEQ ID NO: 3324499 - RNA, 21 nt, Human
agaaccaaaaagaggcuaugu

SEQ ID NO: 3324500 - RNA, 17 nt, Human
agaagucuuagauguau

SEQ ID NO: 3324501 - RNA, 19 nt, Human
agaagucuuagauguauau

SEQ ID NO: 3324502 - RNA, 14 nt, Human
agaagucacacagu

SEQ ID NO: 3324503 - RNA, 17 nt, Human
agaaucucaaauaacua

SEQ ID NO: 3324504 - RNA, 18 nt, Human
agaaugcucuuuacuuca

SEQ ID NO: 3324505 - RNA, 22 nt, Human
agaaugcacaaacagaggccgc

SEQ ID NO: 3324506 - RNA, 23 nt, Human
agaaugcacaaacagaggccgcc

SEQ ID NO: 3324507 - RNA, 18 nt, Human
agagcccacgcccccacu

SEQ ID NO: 3324508 - RNA, 19 nt, Human
agagagcaagacgcugugc

SEQ ID NO: 3324509 - RNA, 11 nt, Human
agagagcaaga

SEQ ID NO: 3324510 - RNA, 17 nt, Human
agagcccacgcccccac

SEQ ID NO: 3324511 - RNA, 18 nt, Human
agagaaaguacuucucca

SEQ ID NO: 3324512 - RNA, 16 nt, Human
agacucuuuggacacu

SEQ ID NO: 3324513 - RNA, 20 nt, Human
agacaaugugaaaagaaaaa

SEQ ID NO: 3324514 - RNA, 23 nt, Human
agacaaugacuuacuguacauga

SEQ ID NO: 3324515 - RNA, 17 nt, Human
agacgcugugcugcccu

SEQ ID NO: 3324516 - RNA, 19 nt, Human
agacgcugugcugcccugc

SEQ ID NO: 3324517 - RNA, 18 nt, Human
agacgcugugcugcccug

SEQ ID NO: 3324518 - RNA, 23 nt, Human
agacagcccgggcucugccuccc

SEQ ID NO: 3324519 - RNA, 22 nt, Human
agacagcccgggcucugccucc

SEQ ID NO: 3324520 - RNA, 21 nt, Human
agacagcccgggcucugccuc

SEQ ID NO: 3324521 - RNA, 23 nt, Human
agaccaucccugaaggccccgcc

SEQ ID NO: 3324522 - RNA, 14 nt, Human
agaccacguuucua

SEQ ID NO: 3324523 - RNA, 19 nt, Human
cacagcucuucuccaggcu

SEQ ID NO: 3324524 - RNA, 20 nt, Human
cacagcucuucuccaggcug

SEQ ID NO: 3324525 - RNA, 17 nt, Human
cacaggaucagucugau

SEQ ID NO: 3324526 - RNA, 14 nt, Human
cacaggcccggcuc

SEQ ID NO: 3324527 - RNA, 22 nt, Human
cacaguccuuaccagcagagca

SEQ ID NO: 3324528 - RNA, 23 nt, Human
cacaguccuuaccagcagagcac

SEQ ID NO: 3324529 - RNA, 19 nt, Human
cacaggcagguccaggguu

SEQ ID NO: 3324530 - RNA, 18 nt, Human
cacagcucuucuccaggc

SEQ ID NO: 3324531 - RNA, 22 nt, Human
cacacggacacucaaaagcugg

SEQ ID NO: 3324532 - RNA, 21 nt, Human
cacaugagcaucaggccaggc

SEQ ID NO: 3324533 - RNA, 20 nt, Human
cacaugagcaucaggccagg

SEQ ID NO: 3324534 - RNA, 19 nt, Human
cacaugagcaucaggccag

SEQ ID NO: 3324535 - RNA, 18 nt, Human
cacaugagcaucaggcca

SEQ ID NO: 3324536 - RNA, 17 nt, Human
cacaugagcaucaggcc

SEQ ID NO: 3324537 - RNA, 13 nt, Human
cacaugagcauca

SEQ ID NO: 3324538 - RNA, 21 nt, Human
cacaugccucucucaggccaa

SEQ ID NO: 3324539 - RNA, 20 nt, Human
cacaugccucucucaggcca

SEQ ID NO: 3324540 - RNA, 17 nt, Human
cacauguccaagaagcc

SEQ ID NO: 3324541 - RNA, 16 nt, Human
cacauguccaagaagc

SEQ ID NO: 3324542 - RNA, 18 nt, Human
cacaugcacgugugugca

SEQ ID NO: 3324543 - RNA, 20 nt, Human
cacaugcaaggucauuuuuu

SEQ ID NO: 3324544 - RNA, 19 nt, Human
cacaugcaaggucauuuuu

SEQ ID NO: 3324545 - RNA, 17 nt, Human
cacaugcaaggucauuu

SEQ ID NO: 3324546 - RNA, 18 nt, Human
caccaucaugucuggcua

SEQ ID NO: 3324547 - RNA, 15 nt, Human
caccaucaugucugg

SEQ ID NO: 3324548 - RNA, 17 nt, Human
caccaucaugucuggcu

SEQ ID NO: 3324549 - RNA, 24 nt, Human
caccaucaagccaccaacauacuc

SEQ ID NO: 3324550 - RNA, 19 nt, Human
caccaucaagccaccaaca

SEQ ID NO: 3324551 - RNA, 17 nt, Human
caccaucaagccaccaa

SEQ ID NO: 3324552 - RNA, 16 nt, Human
caccaucaagccacca

SEQ ID NO: 3324553 - RNA, 13 nt, Human
caccaucaagcca

SEQ ID NO: 3324554 - RNA, 15 nt, Human
caccaucaagccacc

SEQ ID NO: 3324555 - RNA, 14 nt, Human
caccaucaagccac

SEQ ID NO: 3324556 - RNA, 21 nt, Human
caccauauuaccacagacaua

SEQ ID NO: 3324557 - RNA, 12 nt, Human
caccaagcccag

SEQ ID NO: 3324558 - RNA, 13 nt, Human
caccaagcccagu

SEQ ID NO: 3324559 - RNA, 17 nt, Human
caccaacgucugugcca

SEQ ID NO: 3324560 - RNA, 16 nt, Human
caccaacgucugugcc

SEQ ID NO: 3324561 - RNA, 22 nt, Human
cacauguccaagaagcccagga

SEQ ID NO: 3324562 - RNA, 21 nt, Human
cacauguccaagaagcccagg

SEQ ID NO: 3324563 - RNA, 19 nt, Human
cacauguccaagaagccca

SEQ ID NO: 3324564 - RNA, 18 nt, Human
cacauguccaagaagccc

SEQ ID NO: 3324565 - RNA, 17 nt, Human
caccagagcccaccuug

SEQ ID NO: 3324566 - RNA, 18 nt, Human
caccagagcccaccuugg

SEQ ID NO: 3324567 - RNA, 20 nt, Human
caccagagcccaccuuggcu

SEQ ID NO: 3324568 - RNA, 22 nt, Human
caccagagcccaccuuggcuca

SEQ ID NO: 3324569 - RNA, 15 nt, Human
caccagagcccaccu

SEQ ID NO: 3324570 - RNA, 19 nt, Human
caccacacccagcccacuu

SEQ ID NO: 3324571 - RNA, 17 nt, Human
caccacacccagcccac

SEQ ID NO: 3324572 - RNA, 14 nt, Human
caccaccucuuugg

SEQ ID NO: 3324573 - RNA, 17 nt, Human
cacaaagguagcuuuuc

SEQ ID NO: 3324574 - RNA, 14 nt, Human
caaugcacuuuguu

SEQ ID NO: 3324575 - RNA, 18 nt, Human
caaugguuuucuugugug

SEQ ID NO: 3324576 - RNA, 17 nt, Human
cacaaacgggcucagca

SEQ ID NO: 3324577 - RNA, 15 nt, Human
cacaaacagaggccg

SEQ ID NO: 3324578 - RNA, 21 nt, Human
cacacagaggcugccucuccc

SEQ ID NO: 3324579 - RNA, 14 nt, Human
cacacacuuuggcu

SEQ ID NO: 3324580 - RNA, 15 nt, Human
cacacaccagagccc

SEQ ID NO: 3324581 - RNA, 16 nt, Human
cacacaccagagccca

SEQ ID NO: 3324582 - RNA, 20 nt, Human
cacacaccagagcccaccuu

SEQ ID NO: 3324583 - RNA, 17 nt, Human
cacaccgggcacucaga

SEQ ID NO: 3324584 - RNA, 14 nt, Human
cacacccagcccac

SEQ ID NO: 3324585 - RNA, 20 nt, Human
cacacccagcccacuucugc

SEQ ID NO: 3324586 - RNA, 13 nt, Human
cacacagcucugu

SEQ ID NO: 3324587 - RNA, 14 nt, Human
cacacagcucuguc

SEQ ID NO: 3324588 - RNA, 15 nt, Human
cacacagcucugucc

SEQ ID NO: 3324589 - RNA, 21 nt, Human
cacaccagagcccaccuuggc

SEQ ID NO: 3324590 - RNA, 22 nt, Human
cacaccagagcccaccuuggcu

SEQ ID NO: 3324591 - RNA, 13 nt, Human
cacacccagccca

SEQ ID NO: 3324592 - RNA, 20 nt, Human
caaugcaaaccaucauugaa

SEQ ID NO: 3324593 - RNA, 23 nt, Human
caaugcaaaccaucauugaaauc

SEQ ID NO: 3324594 - RNA, 14 nt, Human
caaugcacugacau

SEQ ID NO: 3324595 - RNA, 13 nt, Human
caaugcacuuugu

SEQ ID NO: 3324596 - RNA, 14 nt, Human
caaugauggucacc

SEQ ID NO: 3324597 - RNA, 22 nt, Human
caaugcaaaccaucauugaaau

SEQ ID NO: 3324598 - RNA, 21 nt, Human
caaugcaaaccaucauugaaa

SEQ ID NO: 3324599 - RNA, 13 nt, Human
caaugaccuuuca

SEQ ID NO: 3324600 - RNA, 14 nt, Human
caaugaccuuucaa

SEQ ID NO: 3324601 - RNA, 13 nt, Human
caaugauggucac

SEQ ID NO: 3324602 - RNA, 16 nt, Human
caaugaccuuucaaua

SEQ ID NO: 3324603 - RNA, 15 nt, Human
caaugaccuuucaau

SEQ ID NO: 3324604 - RNA, 14 nt, Human
caacaggcugggcu

SEQ ID NO: 3324605 - RNA, 13 nt, Human
caacaggcugggc

SEQ ID NO: 3324606 - RNA, 17 nt, Human
caacaggcugggcuuca

SEQ ID NO: 3324607 - RNA, 15 nt, Human
caacauacucccauc

SEQ ID NO: 3324608 - RNA, 14 nt, Human
caacauacucccau

SEQ ID NO: 3324609 - RNA, 17 nt, Human
caaccugauugugucuc

SEQ ID NO: 3324610 - RNA, 16 nt, Human
caaccugauugugucu

SEQ ID NO: 3324611 - RNA, 21 nt, Human
caaccugauugugucucuugg

SEQ ID NO: 3324612 - RNA, 19 nt, Human
caaccugauugugucucuu

SEQ ID NO: 3324613 - RNA, 17 nt, Human
caacugcaucaagaugu

SEQ ID NO: 3324614 - RNA, 23 nt, Human
caacugcaucaagaugugacaug

SEQ ID NO: 3324615 - RNA, 20 nt, Human
caacugcaucaagaugugac

SEQ ID NO: 3324616 - RNA, 23 nt, Human
caagacccuuguggucccacccc

SEQ ID NO: 3324617 - RNA, 22 nt, Human
caagacgcugugcugcccugcc

SEQ ID NO: 3324618 - RNA, 21 nt, Human
caagacgcugugcugcccugc

SEQ ID NO: 3324619 - RNA, 20 nt, Human
caagacgcugugcugcccug

SEQ ID NO: 3324620 - RNA, 19 nt, Human
caagacgcugugcugcccu

SEQ ID NO: 3324621 - RNA, 13 nt, Human
caagaccuucucc

SEQ ID NO: 3324622 - RNA, 12 nt, Human
caagagggucug

SEQ ID NO: 3324623 - RNA, 16 nt, Human
caagagggucugagga

SEQ ID NO: 3324624 - RNA, 17 nt, Human
caagagggucugaggaa

SEQ ID NO: 3324625 - RNA, 17 nt, Human
caagagcccaggccucc

SEQ ID NO: 3324626 - RNA, 14 nt, Human
caaggcugucaauu

SEQ ID NO: 3324627 - RNA, 13 nt, Human
caaggcugucaau

SEQ ID NO: 3324628 - RNA, 21 nt, Human
caaggcugggggaagaagcuc

SEQ ID NO: 3324629 - RNA, 18 nt, Human
caaggcugggggaagaag

SEQ ID NO: 3324630 - RNA, 13 nt, Human
caaggauccugag

SEQ ID NO: 3324631 - RNA, 16 nt, Human
caaggauccugagcca

SEQ ID NO: 3324632 - RNA, 15 nt, Human
caaggauccugagcc

SEQ ID NO: 3324633 - RNA, 14 nt, Human
caaggauccugagc

SEQ ID NO: 3324634 - RNA, 14 nt, Human
caagugagacccug

SEQ ID NO: 3324635 - RNA, 23 nt, Human
caagugaaaaaggaggaagagaa

SEQ ID NO: 3324636 - RNA, 22 nt, Human
caagugaaaaaggaggaagaga

SEQ ID NO: 3324637 - RNA, 19 nt, Human
caagugaaaaaggaggaag

SEQ ID NO: 3324638 - RNA, 19 nt, Human
caagugauucuccugccuc

SEQ ID NO: 3324639 - RNA, 18 nt, Human
caagugauucuccugccu

SEQ ID NO: 3324640 - RNA, 15 nt, Human
caagugagacccugu

SEQ ID NO: 3324641 - RNA, 20 nt, Human
caagugauucuccugccuca

SEQ ID NO: 3324642 - RNA, 21 nt, Human
caaggggaauguuugccucug

SEQ ID NO: 3324643 - RNA, 15 nt, Human
caagggccuggccug

SEQ ID NO: 3324644 - RNA, 14 nt, Human
caagggccuggccu

SEQ ID NO: 3324645 - RNA, 13 nt, Human
caagggccuggcc

SEQ ID NO: 3324646 - RNA, 23 nt, Human
caaggggaauguuugccucugcc

SEQ ID NO: 3324647 - RNA, 21 nt, Human
caaagagguuuuaaaaaaauc

SEQ ID NO: 3324648 - RNA, 14 nt, Human
caaagagguuuuaa

SEQ ID NO: 3324649 - RNA, 20 nt, Human
caaaggguaucaggugcugc

SEQ ID NO: 3324650 - RNA, 21 nt, Human
caaaggguaucaggugcugcc

SEQ ID NO: 3324651 - RNA, 19 nt, Human
caaaggguaucaggugcug

SEQ ID NO: 3324652 - RNA, 23 nt, Human
caaaggguaucaggugcugccau

SEQ ID NO: 3324653 - RNA, 17 nt, Human
caaaguggugagaggca

SEQ ID NO: 3324654 - RNA, 16 nt, Human
caaaguggugagaggc

SEQ ID NO: 3324655 - RNA, 20 nt, Human
caaaggagauuggaaggaac

SEQ ID NO: 3324656 - RNA, 14 nt, Human
caaaggagauugga

SEQ ID NO: 3324657 - RNA, 20 nt, Human
caacaggcugggcuucagug

SEQ ID NO: 3324658 - RNA, 13 nt, Human
gggauagagagag

SEQ ID NO: 3324659 - RNA, 21 nt, Human
gggauaugauuuaaaucagcc

SEQ ID NO: 3324660 - RNA, 16 nt, Human
gggauccuccaggugc

SEQ ID NO: 3324661 - RNA, 15 nt, Human
gggauccuccaggug

SEQ ID NO: 3324662 - RNA, 20 nt, Human
gggcaacccccagccugcua

SEQ ID NO: 3324663 - RNA, 18 nt, Human
gggcaacccuggugacca

SEQ ID NO: 3324664 - RNA, 23 nt, Human
gggauccuggaguucugguuccu

SEQ ID NO: 3324665 - RNA, 17 nt, Human
gggagugacagaggcag

SEQ ID NO: 3324666 - RNA, 18 nt, Human
gggagugacagaggcagc

SEQ ID NO: 3324667 - RNA, 11 nt, Human
gggagugagcu

SEQ ID NO: 3324668 - RNA, 14 nt, Human
gggagugagcuggu

SEQ ID NO: 3324669 - RNA, 17 nt, Human
gggaggugggauccucc

SEQ ID NO: 3324670 - RNA, 16 nt, Human
gggaggugaccccagg

SEQ ID NO: 3324671 - RNA, 17 nt, Human
gggcagguugguggggg

SEQ ID NO: 3324672 - RNA, 11 nt, Human
gggcagagcag

SEQ ID NO: 3324673 - RNA, 20 nt, Human
gggcacucagaagacacuga

SEQ ID NO: 3324674 - RNA, 14 nt, Human
gggcagaaggaaga

SEQ ID NO: 3324675 - RNA, 18 nt, Human
gggcagaaggaagacuuc

SEQ ID NO: 3324676 - RNA, 16 nt, Human
gggcacagggucucua

SEQ ID NO: 3324677 - RNA, 13 nt, Human
gggcacagggucu

SEQ ID NO: 3324678 - RNA, 16 nt, Human
gggcacucagaagaca

SEQ ID NO: 3324679 - RNA, 19 nt, Human
gggcacucagaagacacug

SEQ ID NO: 3324680 - RNA, 21 nt, Human
gggcacagaaaauggaagaca

SEQ ID NO: 3324681 - RNA, 20 nt, Human
gggcacagaaaauggaagac

SEQ ID NO: 3324682 - RNA, 18 nt, Human
gggcacagaaaauggaag

SEQ ID NO: 3324683 - RNA, 23 nt, Human
gggcacaccgggcacucagaaga

SEQ ID NO: 3324684 - RNA, 13 nt, Human
gggccuggcuccc

SEQ ID NO: 3324685 - RNA, 17 nt, Human
gggccuggcucaggugg

SEQ ID NO: 3324686 - RNA, 18 nt, Human
gggccuggccugagcugg

SEQ ID NO: 3324687 - RNA, 14 nt, Human
gggccuggccugag

SEQ ID NO: 3324688 - RNA, 12 nt, Human
gggccuggccug

SEQ ID NO: 3324689 - RNA, 13 nt, Human
gggccuggccuga

SEQ ID NO: 3324690 - RNA, 13 nt, Human
gggcccugccucc

SEQ ID NO: 3324691 - RNA, 12 nt, Human
gggcaugacacg

SEQ ID NO: 3324692 - RNA, 17 nt, Human
gggcccagagagggugg

SEQ ID NO: 3324693 - RNA, 16 nt, Human
gggccacagagaaagu

SEQ ID NO: 3324694 - RNA, 23 nt, Human
gggccacagagaaaguacuucuc

SEQ ID NO: 3324695 - RNA, 16 nt, Human
gggaaggauacaaaag

SEQ ID NO: 3324696 - RNA, 23 nt, Human
gggaaggauacaaaagcauguga

SEQ ID NO: 3324697 - RNA, 21 nt, Human
gggaaggauacaaaagcaugu

SEQ ID NO: 3324698 - RNA, 17 nt, Human
gggaagggggcugggac

SEQ ID NO: 3324699 - RNA, 16 nt, Human
gggaagggggcuggga

SEQ ID NO: 3324700 - RNA, 14 nt, Human
gggaagggggcugg

SEQ ID NO: 3324701 - RNA, 17 nt, Human
gggacuacaggcaccca

SEQ ID NO: 3324702 - RNA, 15 nt, Human
gggaccucaggccug

SEQ ID NO: 3324703 - RNA, 13 nt, Human
gggaccucaggcc

SEQ ID NO: 3324704 - RNA, 12 nt, Human
gggaccucaggc

SEQ ID NO: 3324705 - RNA, 21 nt, Human
ggcuuggggaccagagcugcc

SEQ ID NO: 3324706 - RNA, 19 nt, Human
ggcuuggggaccagagcug

SEQ ID NO: 3324707 - RNA, 10 nt, Human
ggcuuuugug

SEQ ID NO: 3324708 - RNA, 17 nt, Human
ggcugggcucccuuccc

SEQ ID NO: 3324709 - RNA, 12 nt, Human
ggcugggcuuca

SEQ ID NO: 3324710 - RNA, 15 nt, Human
ggcuuaaaacaacac

SEQ ID NO: 3324711 - RNA, 13 nt, Human
ggcugggcuucag

SEQ ID NO: 3324712 - RNA, 17 nt, Human
ggcugggcuucaguggc

SEQ ID NO: 3324713 - RNA, 21 nt, Human
ggcuuagucacugagacagcc

SEQ ID NO: 3324714 - RNA, 15 nt, Human
ggcuuagucacugag

SEQ ID NO: 3324715 - RNA, 15 nt, Human
ggcugaggugggagg

SEQ ID NO: 3324716 - RNA, 13 nt, Human
ggcugagguggga

SEQ ID NO: 3324717 - RNA, 20 nt, Human
ggccccugcccggcugcgga

SEQ ID NO: 3324718 - RNA, 17 nt, Human
ggcucugccucccauca

SEQ ID NO: 3324719 - RNA, 16 nt, Human
ggccccugcccggcug

SEQ ID NO: 3324720 - RNA, 17 nt, Human
ggccccugcccggcugc

SEQ ID NO: 3324721 - RNA, 18 nt, Human
ggcugcaaaggguaucag

SEQ ID NO: 3324722 - RNA, 22 nt, Human
ggcugcaaaggguaucaggugc

SEQ ID NO: 3324723 - RNA, 23 nt, Human
ggcugcaaaggguaucaggugcu

SEQ ID NO: 3324724 - RNA, 24 nt, Human
ggcugcaaaggguaucaggugcug

SEQ ID NO: 3324725 - RNA, 17 nt, Human
ggcugcaccggcuggcc

SEQ ID NO: 3324726 - RNA, 19 nt, Human
ggcugcaccggcuggccug

SEQ ID NO: 3324727 - RNA, 18 nt, Human
ggcugcaccggcuggccu

SEQ ID NO: 3324728 - RNA, 22 nt, Human
ggcugcuucaaggauccugagc

SEQ ID NO: 3324729 - RNA, 12 nt, Human
ggcugcuucaag

SEQ ID NO: 3324730 - RNA, 11 nt, Human
ggcugcuucaa

SEQ ID NO: 3324731 - RNA, 12 nt, Human
ggcugcagggag

SEQ ID NO: 3324732 - RNA, 13 nt, Human
ggcugcagggagu

SEQ ID NO: 3324733 - RNA, 14 nt, Human
ggcugcugaaggcu

SEQ ID NO: 3324734 - RNA, 17 nt, Human
ggcugcugaaggcucga

SEQ ID NO: 3324735 - RNA, 15 nt, Human
ggcugcugaaggcuc

SEQ ID NO: 3324736 - RNA, 18 nt, Human
ggcugcugaaggcucgag

SEQ ID NO: 3324737 - RNA, 13 nt, Human
ggcugcugaaggc

SEQ ID NO: 3324738 - RNA, 23 nt, Human
ggcugggagagccuuccaggggu

SEQ ID NO: 3324739 - RNA, 20 nt, Human
ggcugggagagccuuccagg

SEQ ID NO: 3324740 - RNA, 14 nt, Human
ggcugggcagagga

SEQ ID NO: 3324741 - RNA, 13 nt, Human
ggcugggcagagg

SEQ ID NO: 3324742 - RNA, 19 nt, Human
ggcugggcagaggaaagca

SEQ ID NO: 3324743 - RNA, 15 nt, Human
ggcugggcagaggaa

SEQ ID NO: 3324744 - RNA, 18 nt, Human
ggcugggagagccuucca

SEQ ID NO: 3324745 - RNA, 19 nt, Human
ggcugggagagccuuccag

SEQ ID NO: 3324746 - RNA, 21 nt, Human
ggcugcuucaaggauccugag

SEQ ID NO: 3324747 - RNA, 23 nt, Human
ggcugcuucaaggauccugagcc

SEQ ID NO: 3324748 - RNA, 21 nt, Human
gguuacccaguuagcucucaa

SEQ ID NO: 3324749 - RNA, 13 nt, Human
gguuauggagagg

SEQ ID NO: 3324750 - RNA, 17 nt, Human
gguuaggcauuguggga

SEQ ID NO: 3324751 - RNA, 13 nt, Human
gguucaaagauau

SEQ ID NO: 3324752 - RNA, 21 nt, Human
gguucaaagauauuuugcuuu

SEQ ID NO: 3324753 - RNA, 13 nt, Human
gguugagguuuca

SEQ ID NO: 3324754 - RNA, 16 nt, Human
gguggugaccucugcc

SEQ ID NO: 3324755 - RNA, 14 nt, Human
gguggugaccucug

SEQ ID NO: 3324756 - RNA, 15 nt, Human
gguggugaccucugc

SEQ ID NO: 3324757 - RNA, 19 nt, Human
ggugucaccugaagacuca

SEQ ID NO: 3324758 - RNA, 19 nt, Human
ggugucaagagggucugag

SEQ ID NO: 3324759 - RNA, 17 nt, Human
ggugucaagagggucug

SEQ ID NO: 3324760 - RNA, 18 nt, Human
ggugguuuucuguucuuu

SEQ ID NO: 3324761 - RNA, 15 nt, Human
ggugguuuucuguuc

SEQ ID NO: 3324762 - RNA, 21 nt, Human
ggugguuauggagaggguguc

SEQ ID NO: 3324763 - RNA, 18 nt, Human
ggugguuucagaaaugug

SEQ ID NO: 3324764 - RNA, 17 nt, Human
ggugguuucagaaaugu

SEQ ID NO: 3324765 - RNA, 20 nt, Human
ggugcuaucucccccagccc

SEQ ID NO: 3324766 - RNA, 19 nt, Human
ggugcuaucucccccagcc

SEQ ID NO: 3324767 - RNA, 17 nt, Human
ggugcuaucucccccag

SEQ ID NO: 3324768 - RNA, 16 nt, Human
ggugcuaucuccccca

SEQ ID NO: 3324769 - RNA, 15 nt, Human
ggugagaagcagagg

SEQ ID NO: 3324770 - RNA, 16 nt, Human
ggugagaggggaacag

SEQ ID NO: 3324771 - RNA, 15 nt, Human
ggugcugccauccag

SEQ ID NO: 3324772 - RNA, 19 nt, Human
gguggcagugggagcugcc

SEQ ID NO: 3324773 - RNA, 22 nt, Human
gguggcagugggagcugccugu

SEQ ID NO: 3324774 - RNA, 16 nt, Human
gguggcagugggagcu

SEQ ID NO: 3324775 - RNA, 22 nt, Human
gguggccucccaacucacccca

SEQ ID NO: 3324776 - RNA, 23 nt, Human
gguggccucccaacucaccccag

SEQ ID NO: 3324777 - RNA, 16 nt, Human
ggucucacucugucgc

SEQ ID NO: 3324778 - RNA, 22 nt, Human
ggucucacucugucgcccaguc

SEQ ID NO: 3324779 - RNA, 23 nt, Human
ggucucacucugucgcccagucu

SEQ ID NO: 3324780 - RNA, 14 nt, Human
ggucccaccccaca

SEQ ID NO: 3324781 - RNA, 17 nt, Human
ggucccaccccacacac

SEQ ID NO: 3324782 - RNA, 21 nt, Human
ggugacagagugagacucugu

SEQ ID NO: 3324783 - RNA, 14 nt, Human
ggucugacccacug

SEQ ID NO: 3324784 - RNA, 22 nt, Human
ggugaccagcaccaucucuccu

SEQ ID NO: 3324785 - RNA, 21 nt, Human
ggugaccucugccugaaguca

SEQ ID NO: 3324786 - RNA, 16 nt, Human
ggggcaacccugguga

SEQ ID NO: 3324787 - RNA, 17 nt, Human
ggggcugaggugggagg

SEQ ID NO: 3324788 - RNA, 22 nt, Human
gggcuuggggaccagagcugcc

SEQ ID NO: 3324789 - RNA, 16 nt, Human
ggggaaaaucagccug

SEQ ID NO: 3324790 - RNA, 19 nt, Human
ggggaaaaucagccugcuc

SEQ ID NO: 3324791 - RNA, 17 nt, Human
ggggaaaaucagccugc

SEQ ID NO: 3324792 - RNA, 21 nt, Human
ggggaaaaucagccugcucca

SEQ ID NO: 3324793 - RNA, 22 nt, Human
gggggaggugggauccuccagg

SEQ ID NO: 3324794 - RNA, 22 nt, Human
ggggcugcaccggcuggccugg

SEQ ID NO: 3324795 - RNA, 21 nt, Human
ggggcugcaccggcuggccug

SEQ ID NO: 3324796 - RNA, 12 nt, Human
ggggcugcaccg

SEQ ID NO: 3324797 - RNA, 19 nt, Human
ggggcugaggugggaggau

SEQ ID NO: 3324798 - RNA, 12 nt, Human
gggguggccucc

SEQ ID NO: 3324799 - RNA, 17 nt, Human
gggguggggaccucagg

SEQ ID NO: 3324800 - RNA, 12 nt, Human
gggucugaggaa

SEQ ID NO: 3324801 - RNA, 21 nt, Human
gggucugaggaauccagaccc

SEQ ID NO: 3324802 - RNA, 12 nt, Human
gggucucacucu

SEQ ID NO: 3324803 - RNA, 14 nt, Human
gggucucacucugu

SEQ ID NO: 3324804 - RNA, 17 nt, Human
ggguaagugagagaggg

SEQ ID NO: 3324805 - RNA, 16 nt, Human
ggucccaccccacaca

SEQ ID NO: 3324806 - RNA, 15 nt, Human
ggucccaccccacac

SEQ ID NO: 3324807 - RNA, 16 nt, Human
gguacuuguggacaca

SEQ ID NO: 3324808 - RNA, 17 nt, Human
gguacuuguggacacag

SEQ ID NO: 3324809 - RNA, 22 nt, Human
gguagaaauaucugaaaaugua

SEQ ID NO: 3324810 - RNA, 11 nt, Human
gguacccacug

SEQ ID NO: 3324811 - RNA, 13 nt, Human
gguacccacugcu

SEQ ID NO: 3324812 - RNA, 22 nt, Human
gguagaagcccuucuaccuucc

SEQ ID NO: 3324813 - RNA, 23 nt, Human
gguagaaauaucugaaaauguau

SEQ ID NO: 3324814 - RNA, 12 nt, Human
ggguucuaccca

SEQ ID NO: 3324815 - RNA, 23 nt, Human
ggguucaagcgauucuucugcuu

SEQ ID NO: 3324816 - RNA, 22 nt, Human
ggguucaagcgauucuucugcu

SEQ ID NO: 3324817 - RNA, 19 nt, Human
gggugacagagcaagugag

SEQ ID NO: 3324818 - RNA, 17 nt, Human
gggugaagugaagacaa

SEQ ID NO: 3324819 - RNA, 16 nt, Human
ggaucacagccucuga

SEQ ID NO: 3324820 - RNA, 12 nt, Human
ggagugagcugg

SEQ ID NO: 3324821 - RNA, 14 nt, Human
ggagugagcugguu

SEQ ID NO: 3324822 - RNA, 21 nt, Human
ggagugaguugauagcacaga

SEQ ID NO: 3324823 - RNA, 17 nt, Human
ggagugacagaggcagc

SEQ ID NO: 3324824 - RNA, 18 nt, Human
ggagugacagaggcagcc

SEQ ID NO: 3324825 - RNA, 19 nt, Human
ggagugacagaggcagccc

SEQ ID NO: 3324826 - RNA, 21 nt, Human
ggagugacagaggcagcccca

SEQ ID NO: 3324827 - RNA, 15 nt, Human
ggagggcuccagaca

SEQ ID NO: 3324828 - RNA, 14 nt, Human
ggagggcuccagac

SEQ ID NO: 3324829 - RNA, 17 nt, Human
ggagggcuccagacaca

SEQ ID NO: 3324830 - RNA, 20 nt, Human
ggagucccaccuuggcugca

SEQ ID NO: 3324831 - RNA, 11 nt, Human
ggagugacaga

SEQ ID NO: 3324832 - RNA, 16 nt, Human
ggagugacagaggcag

SEQ ID NO: 3324833 - RNA, 13 nt, Human
ggagggcuccaga

SEQ ID NO: 3324834 - RNA, 12 nt, Human
ggagggcuccag

SEQ ID NO: 3324835 - RNA, 21 nt, Human
ggaggaucucuugagccuggg

SEQ ID NO: 3324836 - RNA, 17 nt, Human
ggaggaucucuugagcc

SEQ ID NO: 3324837 - RNA, 23 nt, Human
ggaggaucacuugaguccagaag

SEQ ID NO: 3324838 - RNA, 20 nt, Human
ggaagccagcaggcucucag

SEQ ID NO: 3324839 - RNA, 21 nt, Human
ggagaccccuuggggagcagg

SEQ ID NO: 3324840 - RNA, 21 nt, Human
ggagagcuagcagcagggagg

SEQ ID NO: 3324841 - RNA, 17 nt, Human
ggagagcuagcagcagg

SEQ ID NO: 3324842 - RNA, 15 nt, Human
ggagaggggcacagg

SEQ ID NO: 3324843 - RNA, 20 nt, Human
ggagauuuacaacuggggga

SEQ ID NO: 3324844 - RNA, 20 nt, Human
ggagcaaaaucgaugcagug

SEQ ID NO: 3324845 - RNA, 13 nt, Human
ggccaugggccuc

SEQ ID NO: 3324846 - RNA, 21 nt, Human
ggccccucagggucccuggug

SEQ ID NO: 3324847 - RNA, 20 nt, Human
ggccccucagggucccuggu

SEQ ID NO: 3324848 - RNA, 19 nt, Human
ggccccucagggucccugg

SEQ ID NO: 3324849 - RNA, 16 nt, Human
ggccccucaggguccc

SEQ ID NO: 3324850 - RNA, 17 nt, Human
ggccccugccacccugg

SEQ ID NO: 3324851 - RNA, 18 nt, Human
ggccccugccacccuggg

SEQ ID NO: 3324852 - RNA, 13 nt, Human
ggccccugcccgg

SEQ ID NO: 3324853 - RNA, 13 nt, Human
ggccccugccacc

SEQ ID NO: 3324854 - RNA, 16 nt, Human
ggccccugccacccug

SEQ ID NO: 3324855 - RNA, 12 nt, Human
ggccccugccac

SEQ ID NO: 3324856 - RNA, 15 nt, Human
ggcagguuggugggg

SEQ ID NO: 3324857 - RNA, 23 nt, Human
ggcauguucucugaggacacuaa

SEQ ID NO: 3324858 - RNA, 22 nt, Human
ggccaccugcggugcuaucucc

SEQ ID NO: 3324859 - RNA, 16 nt, Human
ggccaccugcggugcu

SEQ ID NO: 3324860 - RNA, 17 nt, Human
ggccacaagacccuugu

SEQ ID NO: 3324861 - RNA, 16 nt, Human
ggccacaagacccuug

SEQ ID NO: 3324862 - RNA, 15 nt, Human
ggcauuccccaggag

SEQ ID NO: 3324863 - RNA, 11 nt, Human
ggccacuguga

SEQ ID NO: 3324864 - RNA, 16 nt, Human
ggccaggagccuccug

SEQ ID NO: 3324865 - RNA, 14 nt, Human
ggccaggagccucc

SEQ ID NO: 3324866 - RNA, 16 nt, Human
ggccacugugaagaga

SEQ ID NO: 3324867 - RNA, 14 nt, Human
ggccaggccagagg

SEQ ID NO: 3324868 - RNA, 16 nt, Human
ggccaggccagaggga

SEQ ID NO: 3324869 - RNA, 11 nt, Human
ggccaggcugg

SEQ ID NO: 3324870 - RNA, 18 nt, Human
ggcaacugcauuggcuuu

SEQ ID NO: 3324871 - RNA, 15 nt, Human
ggcaaggcugucaau

SEQ ID NO: 3324872 - RNA, 19 nt, Human
ggcaacugcauuggcuuug

SEQ ID NO: 3324873 - RNA, 19 nt, Human
ggcaacccccagccugcua

SEQ ID NO: 3324874 - RNA, 21 nt, Human
ggaucagucugauucccaagc

SEQ ID NO: 3324875 - RNA, 16 nt, Human
ggcaaggcugucaauu

SEQ ID NO: 3324876 - RNA, 15 nt, Human
ggcacccggccccug

SEQ ID NO: 3324877 - RNA, 16 nt, Human
ggcacccggccccugc

SEQ ID NO: 3324878 - RNA, 12 nt, Human
ggcagagcagag

SEQ ID NO: 3324879 - RNA, 16 nt, Human
ggcagagcagagacca

SEQ ID NO: 3324880 - RNA, 15 nt, Human
ggcagagcagagacc

SEQ ID NO: 3324881 - RNA, 20 nt, Human
ggcagagcagagaccauccc

SEQ ID NO: 3324882 - RNA, 17 nt, Human
ggcagaggaaagcaaag

SEQ ID NO: 3324883 - RNA, 21 nt, Human
ggcagaguugaagacagagcu

SEQ ID NO: 3324884 - RNA, 23 nt, Human
ggcagauacaggaaaagcugcug

SEQ ID NO: 3324885 - RNA, 23 nt, Human
ggcagaguugaagacagagcuac

SEQ ID NO: 3324886 - RNA, 21 nt, Human
ggcagcucaccucucccuugg

SEQ ID NO: 3324887 - RNA, 18 nt, Human
ggcagcucaccucucccu

SEQ ID NO: 3324888 - RNA, 22 nt, Human
ggcagcucaccucucccuugga

SEQ ID NO: 3324889 - RNA, 16 nt, Human
ggcagcucaccucucc

SEQ ID NO: 3324890 - RNA, 21 nt, Human
ggcagcuugaggguugggcug

SEQ ID NO: 3324891 - RNA, 17 nt, Human
ggcagcuugaggguugg

SEQ ID NO: 3324892 - RNA, 19 nt, Human
ggcagcugcgguccaccca

SEQ ID NO: 3324893 - RNA, 13 nt, Human
ggcagguccaggg

SEQ ID NO: 3324894 - RNA, 23 nt, Human
ggcaggucuugaacuccuggccu

SEQ ID NO: 3324895 - RNA, 21 nt, Human
gcuggaccuugaacuggguac

SEQ ID NO: 3324896 - RNA, 16 nt, Human
gcuggaccuugaacug

SEQ ID NO: 3324897 - RNA, 18 nt, Human
gcuggaccuugaacuggg

SEQ ID NO: 3324898 - RNA, 17 nt, Human
gcugcuugggcuucauc

SEQ ID NO: 3324899 - RNA, 20 nt, Human
gcugggacaugggaaagggg

SEQ ID NO: 3324900 - RNA, 19 nt, Human
gcugggacuacagguguga

SEQ ID NO: 3324901 - RNA, 13 nt, Human
gcugggacuacag

SEQ ID NO: 3324902 - RNA, 18 nt, Human
gcugggacuacaggcacc

SEQ ID NO: 3324903 - RNA, 19 nt, Human
gcugggacuacaggcaccc

SEQ ID NO: 3324904 - RNA, 20 nt, Human
gcugggacuacaggcaccca

SEQ ID NO: 3324905 - RNA, 16 nt, Human
gcugcgguccacccag

SEQ ID NO: 3324906 - RNA, 14 nt, Human
gcugcccugugagu

SEQ ID NO: 3324907 - RNA, 12 nt, Human
gcugcccuguga

SEQ ID NO: 3324908 - RNA, 11 nt, Human
gcugcccugug

SEQ ID NO: 3324909 - RNA, 23 nt, Human
gcugcuucaaggauccugagcca

SEQ ID NO: 3324910 - RNA, 22 nt, Human
gcugcuucaaggauccugagcc

SEQ ID NO: 3324911 - RNA, 21 nt, Human
gcugcuucaaggauccugagc

SEQ ID NO: 3324912 - RNA, 16 nt, Human
gcugcuugggcuucau

SEQ ID NO: 3324913 - RNA, 13 nt, Human
gcugcuucaagga

SEQ ID NO: 3324914 - RNA, 17 nt, Human
gcugcgguccacccagg

SEQ ID NO: 3324915 - RNA, 18 nt, Human
gcugcgguccacccagga

SEQ ID NO: 3324916 - RNA, 21 nt, Human
gcugggaugauuggagggggg

SEQ ID NO: 3324917 - RNA, 17 nt, Human
gcugggcuucaguggca

SEQ ID NO: 3324918 - RNA, 22 nt, Human
gcugggagagccuuccaggggu

SEQ ID NO: 3324919 - RNA, 19 nt, Human
gcugggagagccuuccagg

SEQ ID NO: 3324920 - RNA, 18 nt, Human
gcugggagagccuuccag

SEQ ID NO: 3324921 - RNA, 17 nt, Human
gcugggagagccuucca

SEQ ID NO: 3324922 - RNA, 13 nt, Human
gcugggagagccu

SEQ ID NO: 3324923 - RNA, 12 nt, Human
gcugggagagcc

SEQ ID NO: 3324924 - RNA, 19 nt, Human
gcugggggccucagugcca

SEQ ID NO: 3324925 - RNA, 20 nt, Human
gcugggggccucagugccac

SEQ ID NO: 3324926 - RNA, 15 nt, Human
gcuggucccacucag

SEQ ID NO: 3324927 - RNA, 19 nt, Human
gcuggucccacucagucca

SEQ ID NO: 3324928 - RNA, 12 nt, Human
gcuggggccagu

SEQ ID NO: 3324929 - RNA, 23 nt, Human
gcugggggaagaagcucucuccu

SEQ ID NO: 3324930 - RNA, 18 nt, Human
gcugggcuucaguggcag

SEQ ID NO: 3324931 - RNA, 22 nt, Human
gcugguucaggguuggccccug

SEQ ID NO: 3324932 - RNA, 16 nt, Human
gcugucaauuacagga

SEQ ID NO: 3324933 - RNA, 15 nt, Human
gcugguucaggguug

SEQ ID NO: 3324934 - RNA, 21 nt, Human
gcugguuagagguucccuuug

SEQ ID NO: 3324935 - RNA, 16 nt, Human
gcuggugucaccugaa

SEQ ID NO: 3324936 - RNA, 18 nt, Human
gcuggugucaccugaaga

SEQ ID NO: 3324937 - RNA, 14 nt, Human
gcuggucccacuca

SEQ ID NO: 3324938 - RNA, 17 nt, Human
gcugucuccauguuuga

SEQ ID NO: 3324939 - RNA, 19 nt, Human
gcugucccuuacgugaguc

SEQ ID NO: 3324940 - RNA, 21 nt, Human
gcugucccuuacgugaguccu

SEQ ID NO: 3324941 - RNA, 23 nt, Human
gcugucaauuacaggaaguacug

SEQ ID NO: 3324942 - RNA, 22 nt, Human
gcugucaauuacaggaaguacu

SEQ ID NO: 3324943 - RNA, 19 nt, Human
gcugucaauuacaggaagu

SEQ ID NO: 3324944 - RNA, 17 nt, Human
gcugucaauuacaggaa

SEQ ID NO: 3324945 - RNA, 15 nt, Human
gcuuggaggaaggaa

SEQ ID NO: 3324946 - RNA, 14 nt, Human
gcuuggaggaagga

SEQ ID NO: 3324947 - RNA, 13 nt, Human
gcuuggaggaagg

SEQ ID NO: 3324948 - RNA, 22 nt, Human
gcuugaggguugggcugguguc

SEQ ID NO: 3324949 - RNA, 21 nt, Human
gcuuccagugaggcucugccc

SEQ ID NO: 3324950 - RNA, 20 nt, Human
gcuuccagugaggcucugcc

SEQ ID NO: 3324951 - RNA, 19 nt, Human
gcuuccagugaggcucugc

SEQ ID NO: 3324952 - RNA, 18 nt, Human
gcuuccagugaggcucug

SEQ ID NO: 3324953 - RNA, 14 nt, Human
gcuuuuacuuaaac

SEQ ID NO: 3324954 - RNA, 13 nt, Human
ggaaaaauagccu

SEQ ID NO: 3324955 - RNA, 14 nt, Human
ggaaaaacugauuu

SEQ ID NO: 3324956 - RNA, 15 nt, Human
ggaaaaauagccugc

SEQ ID NO: 3324957 - RNA, 19 nt, Human
ggaacagacuggaagcaca

SEQ ID NO: 3324958 - RNA, 20 nt, Human
ggaacagacuggaagcacag

SEQ ID NO: 3324959 - RNA, 17 nt, Human
ggaacagacuggaagca

SEQ ID NO: 3324960 - RNA, 15 nt, Human
ggaaaaucagccugc

SEQ ID NO: 3324961 - RNA, 14 nt, Human
ggaaaauaaauuau

SEQ ID NO: 3324962 - RNA, 13 nt, Human
ggaagagccuugc

SEQ ID NO: 3324963 - RNA, 17 nt, Human
ggaagcacagcuucauu

SEQ ID NO: 3324964 - RNA, 17 nt, Human
ggaagcacaugccucuc

SEQ ID NO: 3324965 - RNA, 15 nt, Human
ggaagcacaugccuc

SEQ ID NO: 3324966 - RNA, 14 nt, Human
ggaagcacaugccu

SEQ ID NO: 3324967 - RNA, 13 nt, Human
ggaagcacaugcc

SEQ ID NO: 3324968 - RNA, 14 nt, Human
ggaagccagcaggc

SEQ ID NO: 3324969 - RNA, 13 nt, Human
ggaagccagcagg

SEQ ID NO: 3324970 - RNA, 18 nt, Human
ggaagccagcaggcucuc

SEQ ID NO: 3324971 - RNA, 17 nt, Human
ggaagccagcaggcucu

SEQ ID NO: 3324972 - RNA, 16 nt, Human
ggaagccagcaggcuc

SEQ ID NO: 3324973 - RNA, 15 nt, Human
ggaagccagcaggcu

SEQ ID NO: 3324974 - RNA, 23 nt, Human
ggaagcacaugccucucucaggc

SEQ ID NO: 3324975 - RNA, 22 nt, Human
ggaagcacaugccucucucagg

SEQ ID NO: 3324976 - RNA, 21 nt, Human
ggaagcacaugccucucucag

SEQ ID NO: 3324977 - RNA, 23 nt, Human
gccccuggcagccccuguucugg

SEQ ID NO: 3324978 - RNA, 17 nt, Human
gccccuggcagccccug

SEQ ID NO: 3324979 - RNA, 18 nt, Human
gccccucagggucccugg

SEQ ID NO: 3324980 - RNA, 21 nt, Human
gccccucagggucccuggugg

SEQ ID NO: 3324981 - RNA, 19 nt, Human
gccccucagggucccuggu

SEQ ID NO: 3324982 - RNA, 22 nt, Human
gccccgaggccuucucugaagg

SEQ ID NO: 3324983 - RNA, 14 nt, Human
gccccgcccaggcu

SEQ ID NO: 3324984 - RNA, 15 nt, Human
gccccauucugccug

SEQ ID NO: 3324985 - RNA, 23 nt, Human
gccccgaggccuucucugaagga

SEQ ID NO: 3324986 - RNA, 22 nt, Human
gccccauucugccugcccaggc

SEQ ID NO: 3324987 - RNA, 23 nt, Human
gccccauucugccugcccaggcc

SEQ ID NO: 3324988 - RNA, 19 nt, Human
gccccuucugacccaugcu

SEQ ID NO: 3324989 - RNA, 12 nt, Human
gcccggcuccag

SEQ ID NO: 3324990 - RNA, 13 nt, Human
gcccggcuccagg

SEQ ID NO: 3324991 - RNA, 14 nt, Human
gcccggcuccaggc

SEQ ID NO: 3324992 - RNA, 12 nt, Human
gcccgggcucug

SEQ ID NO: 3324993 - RNA, 18 nt, Human
gcccgggcucugccuccc

SEQ ID NO: 3324994 - RNA, 15 nt, Human
gcccgggcucugccu

SEQ ID NO: 3324995 - RNA, 14 nt, Human
gcccgggcucugcc

SEQ ID NO: 3324996 - RNA, 13 nt, Human
gcccgggcucugc

SEQ ID NO: 3324997 - RNA, 20 nt, Human
gcccgggcucugccucccau

SEQ ID NO: 3324998 - RNA, 19 nt, Human
gcccgggcucugccuccca

SEQ ID NO: 3324999 - RNA, 22 nt, Human
gcccucugcccacucccugcaa

SEQ ID NO: 3325000 - RNA, 19 nt, Human
gcccucugcccacucccug

SEQ ID NO: 3325001 - RNA, 13 nt, Human
gcccaggccuccu

SEQ ID NO: 3325002 - RNA, 11 nt, Human
gcccaggcugg

SEQ ID NO: 3325003 - RNA, 18 nt, Human
gcccaggccuccuacagc

SEQ ID NO: 3325004 - RNA, 16 nt, Human
gcccaggaaaggcucc

SEQ ID NO: 3325005 - RNA, 15 nt, Human
gcccaggaaaggcuc

SEQ ID NO: 3325006 - RNA, 12 nt, Human
gcccaggaaagg

SEQ ID NO: 3325007 - RNA, 22 nt, Human
gcccagucuggaaugcaguggu

SEQ ID NO: 3325008 - RNA, 20 nt, Human
gcccagucuggaaugcagug

SEQ ID NO: 3325009 - RNA, 16 nt, Human
gcccaggcuggcgugc

SEQ ID NO: 3325010 - RNA, 14 nt, Human
gcccaggcuggcgu

SEQ ID NO: 3325011 - RNA, 15 nt, Human
gcccaggcuggcgug

SEQ ID NO: 3325012 - RNA, 23 nt, Human
gccccauccucuguacagagccc

SEQ ID NO: 3325013 - RNA, 17 nt, Human
gccccauucugccugcc

SEQ ID NO: 3325014 - RNA, 18 nt, Human
gccccauucugccugccc

SEQ ID NO: 3325015 - RNA, 20 nt, Human
gccccauucugccugcccag

SEQ ID NO: 3325016 - RNA, 21 nt, Human
gccccauucugccugcccagg

SEQ ID NO: 3325017 - RNA, 15 nt, Human
gccccagugcccaca

SEQ ID NO: 3325018 - RNA, 16 nt, Human
gccccagugcccacag

SEQ ID NO: 3325019 - RNA, 17 nt, Human
gccccagugcccacagg

SEQ ID NO: 3325020 - RNA, 17 nt, Human
gccauuucuuccacaag

SEQ ID NO: 3325021 - RNA, 22 nt, Human
gccauuucuuccacaagagccc

SEQ ID NO: 3325022 - RNA, 20 nt, Human
gccauuucuuccacaagagc

SEQ ID NO: 3325023 - RNA, 16 nt, Human
gcccaaagaugcagcc

SEQ ID NO: 3325024 - RNA, 15 nt, Human
gcccaaagaugcagc

SEQ ID NO: 3325025 - RNA, 15 nt, Human
gcccaccccucaaca

SEQ ID NO: 3325026 - RNA, 19 nt, Human
gcccacaggaucagucuga

SEQ ID NO: 3325027 - RNA, 13 nt, Human
gcccacaggauca

SEQ ID NO: 3325028 - RNA, 18 nt, Human
gcccacaggaucagucug

SEQ ID NO: 3325029 - RNA, 15 nt, Human
gccaggaagccagca

SEQ ID NO: 3325030 - RNA, 18 nt, Human
gccaggaagccagcaggc

SEQ ID NO: 3325031 - RNA, 17 nt, Human
gccaggaagccagcagg

SEQ ID NO: 3325032 - RNA, 19 nt, Human
gccaggaagccagcaggcu

SEQ ID NO: 3325033 - RNA, 17 nt, Human
gccaggggaaaaucagc

SEQ ID NO: 3325034 - RNA, 22 nt, Human
gccaggggaaaaucagccugcu

SEQ ID NO: 3325035 - RNA, 21 nt, Human
gccaggggaaaaucagccugc

SEQ ID NO: 3325036 - RNA, 23 nt, Human
gccaggggaaaaucagccugcuc

SEQ ID NO: 3325037 - RNA, 19 nt, Human
gccauccagguucagcuug

SEQ ID NO: 3325038 - RNA, 20 nt, Human
gccauccagguucagcuugu

SEQ ID NO: 3325039 - RNA, 16 nt, Human
gccaucccagccccaa

SEQ ID NO: 3325040 - RNA, 15 nt, Human
gccaucccagcccca

SEQ ID NO: 3325041 - RNA, 14 nt, Human
gccaucccagcccc

SEQ ID NO: 3325042 - RNA, 13 nt, Human
gccaucccagccc

SEQ ID NO: 3325043 - RNA, 14 nt, Human
gccauccagguuca

SEQ ID NO: 3325044 - RNA, 17 nt, Human
gccaucccagccccaau

SEQ ID NO: 3325045 - RNA, 16 nt, Human
gccacggccaggccag

SEQ ID NO: 3325046 - RNA, 20 nt, Human
gccacuauuguuagucucuu

SEQ ID NO: 3325047 - RNA, 21 nt, Human
gccacuauuguuagucucuug

SEQ ID NO: 3325048 - RNA, 12 nt, Human
gccaaaggaagc

SEQ ID NO: 3325049 - RNA, 14 nt, Human
gccacggccaggcc

SEQ ID NO: 3325050 - RNA, 15 nt, Human
gccacggccaggcca

SEQ ID NO: 3325051 - RNA, 17 nt, Human
gccacugcaccgggcca

SEQ ID NO: 3325052 - RNA, 18 nt, Human
gccacugcaccgggccac

SEQ ID NO: 3325053 - RNA, 15 nt, Human
gccagagacacaagc

SEQ ID NO: 3325054 - RNA, 12 nt, Human
gccagagacaca

SEQ ID NO: 3325055 - RNA, 17 nt, Human
gccagagggagugacag

SEQ ID NO: 3325056 - RNA, 18 nt, Human
gccagagggagugacaga

SEQ ID NO: 3325057 - RNA, 17 nt, Human
gccagauucuuuccuga

SEQ ID NO: 3325058 - RNA, 19 nt, Human
gccagagggagugacagag

SEQ ID NO: 3325059 - RNA, 20 nt, Human
gccagagggagugacagagg

SEQ ID NO: 3325060 - RNA, 16 nt, Human
gccagauucuuuccug

SEQ ID NO: 3325061 - RNA, 12 nt, Human
gccagccuugac

SEQ ID NO: 3325062 - RNA, 20 nt, Human
gccagccgagauagccaagg

SEQ ID NO: 3325063 - RNA, 22 nt, Human
gccagccuugaccauucuccac

SEQ ID NO: 3325064 - RNA, 21 nt, Human
gccagccuugaccauucucca

SEQ ID NO: 3325065 - RNA, 20 nt, Human
gccagccuugaccauucucc

SEQ ID NO: 3325066 - RNA, 14 nt, Human
gccagccuugacca

SEQ ID NO: 3325067 - RNA, 15 nt, Human
gccagcugcuugggc

SEQ ID NO: 3325068 - RNA, 14 nt, Human
gccagcugcuuggg

SEQ ID NO: 3325069 - RNA, 13 nt, Human
gccuuuggcuuca

SEQ ID NO: 3325070 - RNA, 21 nt, Human
gccuuccaggggugggacacc

SEQ ID NO: 3325071 - RNA, 16 nt, Human
gccugguggcagcugc

SEQ ID NO: 3325072 - RNA, 17 nt, Human
gccugguggcagcugcg

SEQ ID NO: 3325073 - RNA, 14 nt, Human
gccugguggcagcu

SEQ ID NO: 3325074 - RNA, 15 nt, Human
gccugguggcagcug

SEQ ID NO: 3325075 - RNA, 20 nt, Human
gccuuauggaacacucugag

SEQ ID NO: 3325076 - RNA, 23 nt, Human
gccuuauggaacacucugagacu

SEQ ID NO: 3325077 - RNA, 22 nt, Human
gccuuauggaacacucugagac

SEQ ID NO: 3325078 - RNA, 21 nt, Human
gccuuauggaacacucugaga

SEQ ID NO: 3325079 - RNA, 20 nt, Human
gccuuagaagucacacagua

SEQ ID NO: 3325080 - RNA, 19 nt, Human
gccuuacccucauguucuu

SEQ ID NO: 3325081 - RNA, 14 nt, Human
gcgcugccccuggc

SEQ ID NO: 3325082 - RNA, 20 nt, Human
gcgccuacaggagugagcac

SEQ ID NO: 3325083 - RNA, 21 nt, Human
gcgccuacaggagugagcacu

SEQ ID NO: 3325084 - RNA, 18 nt, Human
gcgccuacaggagugagc

SEQ ID NO: 3325085 - RNA, 18 nt, Human
gcggggacagcuccuucu

SEQ ID NO: 3325086 - RNA, 19 nt, Human
gcggggacagcuccuucug

SEQ ID NO: 3325087 - RNA, 23 nt, Human
gcggacagccacggccaggccag

SEQ ID NO: 3325088 - RNA, 16 nt, Human
gcggacagccacggcc

SEQ ID NO: 3325089 - RNA, 19 nt, Human
gcggacagccacggccagg

SEQ ID NO: 3325090 - RNA, 23 nt, Human
gcggggacagcuccuucuguccu

SEQ ID NO: 3325091 - RNA, 20 nt, Human
gcgguccacccaggagcccc

SEQ ID NO: 3325092 - RNA, 23 nt, Human
gcgguccacccaggagccccgag

SEQ ID NO: 3325093 - RNA, 22 nt, Human
gcuagacgagcaggcuucuucc

SEQ ID NO: 3325094 - RNA, 21 nt, Human
gcuagacgagcaggcuucuuc

SEQ ID NO: 3325095 - RNA, 14 nt, Human
gcuaacauggaagu

SEQ ID NO: 3325096 - RNA, 18 nt, Human
gcuaacauggaaguacua

SEQ ID NO: 3325097 - RNA, 17 nt, Human
gcuaacauggaaguacu

SEQ ID NO: 3325098 - RNA, 15 nt, Human
gcgugagccacugca

SEQ ID NO: 3325099 - RNA, 14 nt, Human
gcgugagccacugc

SEQ ID NO: 3325100 - RNA, 22 nt, Human
gcuacacaggggaaaagaggag

SEQ ID NO: 3325101 - RNA, 16 nt, Human
gccgagauagccaagg

SEQ ID NO: 3325102 - RNA, 23 nt, Human
gcccuucucuccagccccuggau

SEQ ID NO: 3325103 - RNA, 13 nt, Human
gcccuucucucca

SEQ ID NO: 3325104 - RNA, 13 nt, Human
gccgcagcccugc

SEQ ID NO: 3325105 - RNA, 17 nt, Human
gccgagauagccaaggc

SEQ ID NO: 3325106 - RNA, 15 nt, Human
gccgcagcccugcag

SEQ ID NO: 3325107 - RNA, 17 nt, Human
gccgcagcccugcagag

SEQ ID NO: 3325108 - RNA, 16 nt, Human
gccgcagcccugcaga

SEQ ID NO: 3325109 - RNA, 23 nt, Human
gccgucuaccugaggggccucuu

SEQ ID NO: 3325110 - RNA, 22 nt, Human
gccgucuaccugaggggccucu

SEQ ID NO: 3325111 - RNA, 20 nt, Human
gccgucuaccugaggggccu

SEQ ID NO: 3325112 - RNA, 18 nt, Human
gccgucuaccugaggggc

SEQ ID NO: 3325113 - RNA, 22 nt, Human
gccucaagugauucuccugccu

SEQ ID NO: 3325114 - RNA, 24 nt, Human
gccucaagugauucuccugccuca

SEQ ID NO: 3325115 - RNA, 18 nt, Human
gccucagcauccuggcac

SEQ ID NO: 3325116 - RNA, 17 nt, Human
gccucagcauccuggca

SEQ ID NO: 3325117 - RNA, 21 nt, Human
gccucagcauccuggcacccg

SEQ ID NO: 3325118 - RNA, 17 nt, Human
gccucccaucacccgcu

SEQ ID NO: 3325119 - RNA, 12 nt, Human
gccucagccucc

SEQ ID NO: 3325120 - RNA, 14 nt, Human
gccucagccuccca

SEQ ID NO: 3325121 - RNA, 20 nt, Human
gccucccgaguagcugggac

SEQ ID NO: 3325122 - RNA, 20 nt, Human
gccucccgaauagcugggac

SEQ ID NO: 3325123 - RNA, 21 nt, Human
gccucccgaguagcugggacu

SEQ ID NO: 3325124 - RNA, 23 nt, Human
gccucccgaguagcugggacuac

SEQ ID NO: 3325125 - RNA, 18 nt, Human
gccucccgaauagcuggg

SEQ ID NO: 3325126 - RNA, 19 nt, Human
gccucccgaauagcuggga

SEQ ID NO: 3325127 - RNA, 15 nt, Human
gccucucccaucacu

SEQ ID NO: 3325128 - RNA, 15 nt, Human
gccucugacacacag

SEQ ID NO: 3325129 - RNA, 16 nt, Human
gccucugcacuccccu

SEQ ID NO: 3325130 - RNA, 20 nt, Human
gccucugcacuccccugcug

SEQ ID NO: 3325131 - RNA, 19 nt, Human
gccucugcacuccccugcu

SEQ ID NO: 3325132 - RNA, 18 nt, Human
gccucugcacuccccugc

SEQ ID NO: 3325133 - RNA, 17 nt, Human
gccucugcacuccccug

SEQ ID NO: 3325134 - RNA, 15 nt, Human
gccucugcacucccc

SEQ ID NO: 3325135 - RNA, 21 nt, Human
gccucugcacuccccugcugg

SEQ ID NO: 3325136 - RNA, 11 nt, Human
gccugcccagg

SEQ ID NO: 3325137 - RNA, 14 nt, Human
gccuggacccugug

SEQ ID NO: 3325138 - RNA, 12 nt, Human
gcagaaggaaga

SEQ ID NO: 3325139 - RNA, 14 nt, Human
gcagaaggaagacu

SEQ ID NO: 3325140 - RNA, 13 nt, Human
gcagaaggaagac

SEQ ID NO: 3325141 - RNA, 14 nt, Human
gcacugggcuuggg

SEQ ID NO: 3325142 - RNA, 23 nt, Human
gcacugggcuuggggaccagagc

SEQ ID NO: 3325143 - RNA, 22 nt, Human
gcacugggcuuggggaccagag

SEQ ID NO: 3325144 - RNA, 17 nt, Human
gcacuaaggugugcucu

SEQ ID NO: 3325145 - RNA, 18 nt, Human
gcacuaaggugugcucug

SEQ ID NO: 3325146 - RNA, 19 nt, Human
gcacagcuaacauggaagu

SEQ ID NO: 3325147 - RNA, 14 nt, Human
gcaaugaccuuuca

SEQ ID NO: 3325148 - RNA, 13 nt, Human
gcaaugaccuuuc

SEQ ID NO: 3325149 - RNA, 16 nt, Human
gcacagcuucauuucc

SEQ ID NO: 3325150 - RNA, 22 nt, Human
gcacaugccucucucaggccaa

SEQ ID NO: 3325151 - RNA, 14 nt, Human
gcacccggccccug

SEQ ID NO: 3325152 - RNA, 15 nt, Human
gcacccggccccugc

SEQ ID NO: 3325153 - RNA, 17 nt, Human
gcacccggccccugcug

SEQ ID NO: 3325154 - RNA, 14 nt, Human
gcaccuccugccuc

SEQ ID NO: 3325155 - RNA, 15 nt, Human
gcaccuccugccucg

SEQ ID NO: 3325156 - RNA, 19 nt, Human
gcaccacugcacuccagcc

SEQ ID NO: 3325157 - RNA, 20 nt, Human
gcagcagggagggcuucugc

SEQ ID NO: 3325158 - RNA, 19 nt, Human
gcagccucaaccuccuggg

SEQ ID NO: 3325159 - RNA, 20 nt, Human
gcagccucaaccuccugggc

SEQ ID NO: 3325160 - RNA, 21 nt, Human
gcagccucaaccuccugggcu

SEQ ID NO: 3325161 - RNA, 22 nt, Human
gcagccucaaccuccugggcua

SEQ ID NO: 3325162 - RNA, 14 nt, Human
gcagccuggacccu

SEQ ID NO: 3325163 - RNA, 17 nt, Human
gcagaguugaagacaga

SEQ ID NO: 3325164 - RNA, 16 nt, Human
gcagaguugaagacag

SEQ ID NO: 3325165 - RNA, 19 nt, Human
gcagaguugaagacagagc

SEQ ID NO: 3325166 - RNA, 19 nt, Human
gcagagaaugaaagggccc

SEQ ID NO: 3325167 - RNA, 20 nt, Human
gcagagaaugaaagggccca

SEQ ID NO: 3325168 - RNA, 21 nt, Human
gcagagaaugaaagggcccag

SEQ ID NO: 3325169 - RNA, 21 nt, Human
gcagagaauucucuuauccaa

SEQ ID NO: 3325170 - RNA, 22 nt, Human
gcagagaaugaaagggcccaga

SEQ ID NO: 3325171 - RNA, 23 nt, Human
gcagagaaugaaagggcccagag

SEQ ID NO: 3325172 - RNA, 15 nt, Human
gcagagaccaucccu

SEQ ID NO: 3325173 - RNA, 14 nt, Human
gcagagaccauccc

SEQ ID NO: 3325174 - RNA, 17 nt, Human
gcagagaccaucccuga

SEQ ID NO: 3325175 - RNA, 15 nt, Human
gcagaguugaagaca

SEQ ID NO: 3325176 - RNA, 17 nt, Human
gcagugggagcugccug

SEQ ID NO: 3325177 - RNA, 18 nt, Human
gcagugggagcugccugu

SEQ ID NO: 3325178 - RNA, 21 nt, Human
gcaucaagaugugacauguuu

SEQ ID NO: 3325179 - RNA, 20 nt, Human
gcauauucaggaagcucagg

SEQ ID NO: 3325180 - RNA, 18 nt, Human
gcauauucaggaagcuca

SEQ ID NO: 3325181 - RNA, 17 nt, Human
gcauauucaggaagcuc

SEQ ID NO: 3325182 - RNA, 15 nt, Human
gcauauucaggaagc

SEQ ID NO: 3325183 - RNA, 20 nt, Human
gcaggauucuuccucccucc

SEQ ID NO: 3325184 - RNA, 16 nt, Human
gcagggagggcuucug

SEQ ID NO: 3325185 - RNA, 12 nt, Human
gcagggcucagc

SEQ ID NO: 3325186 - RNA, 23 nt, Human
gcagugcuuccaaggauggacca

SEQ ID NO: 3325187 - RNA, 16 nt, Human
gcagugggagcugccu

SEQ ID NO: 3325188 - RNA, 15 nt, Human
gcagugggagcugcc

SEQ ID NO: 3325189 - RNA, 19 nt, Human
gccaaacucaccugccccu

SEQ ID NO: 3325190 - RNA, 21 nt, Human
gccaaacucaccugccccuca

SEQ ID NO: 3325191 - RNA, 14 nt, Human
gccaaaggaagcac

SEQ ID NO: 3325192 - RNA, 20 nt, Human
gccaaaggaagcacaugccu

SEQ ID NO: 3325193 - RNA, 16 nt, Human
gccaaaggaagcacau

SEQ ID NO: 3325194 - RNA, 22 nt, Human
gcauuuugcuaaaugugaauga

SEQ ID NO: 3325195 - RNA, 12 nt, Human
gcauuccccacu

SEQ ID NO: 3325196 - RNA, 23 nt, Human
gcauuugcugaauacagaggcaa

SEQ ID NO: 3325197 - RNA, 17 nt, Human
gcauuugcugaauacag

SEQ ID NO: 3325198 - RNA, 21 nt, Human
gcauuuggugguuucagaaau

SEQ ID NO: 3325199 - RNA, 22 nt, Human
gcauguucucugaggacacuaa

SEQ ID NO: 3325200 - RNA, 17 nt, Human
gcauguuugugauugac

SEQ ID NO: 3325201 - RNA, 15 nt, Human
gcaugccuggauggg

SEQ ID NO: 3325202 - RNA, 15 nt, Human
gcaugcugucccuua

SEQ ID NO: 3325203 - RNA, 22 nt, Human
gcaugccuggauggggcugcac

SEQ ID NO: 3325204 - RNA, 17 nt, Human
gcaugccuggauggggc

SEQ ID NO: 3325205 - RNA, 15 nt, Human
gcaucaggccaggcc

SEQ ID NO: 3325206 - RNA, 13 nt, Human
gcaucaggccagg

SEQ ID NO: 3325207 - RNA, 17 nt, Human
gcaucaggccaggcccu

SEQ ID NO: 3325208 - RNA, 16 nt, Human
gcaucaggccaggccc

SEQ ID NO: 3325209 - RNA, 23 nt, Human
gcaugaaguaauaugcacacauu

SEQ ID NO: 3325210 - RNA, 18 nt, Human
gauguucuagcauggcug

SEQ ID NO: 3325211 - RNA, 15 nt, Human
gauucccaagcucug

SEQ ID NO: 3325212 - RNA, 17 nt, Human
gauucagacagcugccu

SEQ ID NO: 3325213 - RNA, 14 nt, Human
gauucagacagcug

SEQ ID NO: 3325214 - RNA, 13 nt, Human
gauucagacagcu

SEQ ID NO: 3325215 - RNA, 13 nt, Human
gauuacaagcgug

SEQ ID NO: 3325216 - RNA, 15 nt, Human
gauugcaacaggcug

SEQ ID NO: 3325217 - RNA, 17 nt, Human
gauugcaacaggcuggg

SEQ ID NO: 3325218 - RNA, 16 nt, Human
gauugcaacaggcugg

SEQ ID NO: 3325219 - RNA, 22 nt, Human
gauucuuuccugaggcugggcu

SEQ ID NO: 3325220 - RNA, 20 nt, Human
gauucuuuccugaggcuggg

SEQ ID NO: 3325221 - RNA, 16 nt, Human
gauucccaagcucugc

SEQ ID NO: 3325222 - RNA, 17 nt, Human
gauucccaagcucugcu

SEQ ID NO: 3325223 - RNA, 19 nt, Human
gauucuuuccugaggcugg

SEQ ID NO: 3325224 - RNA, 19 nt, Human
gauuuguuaaugauagcua

SEQ ID NO: 3325225 - RNA, 21 nt, Human
gauuucuguuuagauaauaca

SEQ ID NO: 3325226 - RNA, 22 nt, Human
gauuucuguuuagauaauacac

SEQ ID NO: 3325227 - RNA, 18 nt, Human
gcaagcaccuccugccuc

SEQ ID NO: 3325228 - RNA, 20 nt, Human
gcaagcaccuccugccucga

SEQ ID NO: 3325229 - RNA, 15 nt, Human
gcaagcaccuccugc

SEQ ID NO: 3325230 - RNA, 16 nt, Human
gcaagcaccuccugcc

SEQ ID NO: 3325231 - RNA, 17 nt, Human
gcaauccugcaagaaca

SEQ ID NO: 3325232 - RNA, 13 nt, Human
gcaaggcugucaa

SEQ ID NO: 3325233 - RNA, 14 nt, Human
gcaaggucauuuuu

SEQ ID NO: 3325234 - RNA, 18 nt, Human
gcaaggcugucaauuaca

SEQ ID NO: 3325235 - RNA, 14 nt, Human
gcaaggcugucaau

SEQ ID NO: 3325236 - RNA, 18 nt, Human
gcaacugcauuggcuuug

SEQ ID NO: 3325237 - RNA, 16 nt, Human
gcaaaccaucauugaa

SEQ ID NO: 3325238 - RNA, 21 nt, Human
gcaaaccaucauugaaaucuu

SEQ ID NO: 3325239 - RNA, 20 nt, Human
gcaaaccaucauugaaaucu

SEQ ID NO: 3325240 - RNA, 19 nt, Human
gcaaaccaucauugaaauc

SEQ ID NO: 3325241 - RNA, 17 nt, Human
gcaaaccaucauugaaa

SEQ ID NO: 3325242 - RNA, 15 nt, Human
gcaaaccaucauuga

SEQ ID NO: 3325243 - RNA, 12 nt, Human
gauaauacacca

SEQ ID NO: 3325244 - RNA, 24 nt, Human
gauaauacaccacuacauucuguu

SEQ ID NO: 3325245 - RNA, 23 nt, Human
gauaauacaccacuacauucugu

SEQ ID NO: 3325246 - RNA, 23 nt, Human
gaucacggcucacugcagccuca

SEQ ID NO: 3325247 - RNA, 20 nt, Human
gaucacggcucacugcagcc

SEQ ID NO: 3325248 - RNA, 14 nt, Human
gaucacagccucug

SEQ ID NO: 3325249 - RNA, 20 nt, Human
gauagugucccacggugccu

SEQ ID NO: 3325250 - RNA, 18 nt, Human
gauauaugcucugcaugu

SEQ ID NO: 3325251 - RNA, 16 nt, Human
gauacaaaagcaugug

SEQ ID NO: 3325252 - RNA, 12 nt, Human
gauccugagcca

SEQ ID NO: 3325253 - RNA, 20 nt, Human
gaucuaggaagacuuuggaa

SEQ ID NO: 3325254 - RNA, 20 nt, Human
gaucuggguucacugcaacc

SEQ ID NO: 3325255 - RNA, 18 nt, Human
gaucuaggaagacuuugg

SEQ ID NO: 3325256 - RNA, 14 nt, Human
gaucuaggaagacu

SEQ ID NO: 3325257 - RNA, 13 nt, Human
gaucuaggaagac

SEQ ID NO: 3325258 - RNA, 13 nt, Human
gaucauccacugu

SEQ ID NO: 3325259 - RNA, 12 nt, Human
gauccuccaggu

SEQ ID NO: 3325260 - RNA, 16 nt, Human
gauccucccaccucag

SEQ ID NO: 3325261 - RNA, 14 nt, Human
gauccuccaggugc

SEQ ID NO: 3325262 - RNA, 21 nt, Human
gauccucccaccucagccucc

SEQ ID NO: 3325263 - RNA, 17 nt, Human
gauccucccaccucagc

SEQ ID NO: 3325264 - RNA, 19 nt, Human
gaugcagccucacaguccu

SEQ ID NO: 3325265 - RNA, 14 nt, Human
gaugccugguggca

SEQ ID NO: 3325266 - RNA, 14 nt, Human
gaugcagugcuucc

SEQ ID NO: 3325267 - RNA, 15 nt, Human
gaugccugguggcag

SEQ ID NO: 3325268 - RNA, 16 nt, Human
gaugccugguggcagc

SEQ ID NO: 3325269 - RNA, 18 nt, Human
gaugaccuugaaugaugc

SEQ ID NO: 3325270 - RNA, 23 nt, Human
gaugagaaauaaaguuucuguug

SEQ ID NO: 3325271 - RNA, 14 nt, Human
gaugcaccagcccu

SEQ ID NO: 3325272 - RNA, 14 nt, Human
gaugagaggaaauc

SEQ ID NO: 3325273 - RNA, 15 nt, Human
gaugcaccagcccuu

SEQ ID NO: 3325274 - RNA, 23 nt, Human
gaugcaccagcccuuagcaggga

SEQ ID NO: 3325275 - RNA, 22 nt, Human
gaucuucuguggguuucuaaag

SEQ ID NO: 3325276 - RNA, 19 nt, Human
gaucuucuuuauaauucua

SEQ ID NO: 3325277 - RNA, 15 nt, Human
gaugaaaugagguca

SEQ ID NO: 3325278 - RNA, 21 nt, Human
gaugaaaugaggucagagccu

SEQ ID NO: 3325279 - RNA, 22 nt, Human
gaccagacaccuugacagggca

SEQ ID NO: 3325280 - RNA, 21 nt, Human
gaccagacaccuugacagggc

SEQ ID NO: 3325281 - RNA, 16 nt, Human
gaccacguuucuaaag

SEQ ID NO: 3325282 - RNA, 21 nt, Human
gaccagagcugccaccugccu

SEQ ID NO: 3325283 - RNA, 23 nt, Human
gaccagacaccuugacagggcac

SEQ ID NO: 3325284 - RNA, 19 nt, Human
gaccagagcugccaccugc

SEQ ID NO: 3325285 - RNA, 21 nt, Human
gaccagcaccaucucuccucc

SEQ ID NO: 3325286 - RNA, 20 nt, Human
gaccagcaccaucucuccuc

SEQ ID NO: 3325287 - RNA, 18 nt, Human
gaccacaaaacuuuucua

SEQ ID NO: 3325288 - RNA, 12 nt, Human
gacccacugcuu

SEQ ID NO: 3325289 - RNA, 18 nt, Human
gacccaugcugcccugug

SEQ ID NO: 3325290 - RNA, 20 nt, Human
gacccaugcugcccugugag

SEQ ID NO: 3325291 - RNA, 19 nt, Human
gacccaugcugcccuguga

SEQ ID NO: 3325292 - RNA, 17 nt, Human
gacccaugcugcccugu

SEQ ID NO: 3325293 - RNA, 22 nt, Human
gacccugcccugugggccccca

SEQ ID NO: 3325294 - RNA, 20 nt, Human
gacccugcccugugggcccc

SEQ ID NO: 3325295 - RNA, 17 nt, Human
gacccugcccugugggc

SEQ ID NO: 3325296 - RNA, 16 nt, Human
gacccugaggcccaga

SEQ ID NO: 3325297 - RNA, 12 nt, Human
gacccugaggcc

SEQ ID NO: 3325298 - RNA, 11 nt, Human
gacccugaggc

SEQ ID NO: 3325299 - RNA, 10 nt, Human
gacccugagg

SEQ ID NO: 3325300 - RNA, 16 nt, Human
gacaucaacugcauca

SEQ ID NO: 3325301 - RNA, 23 nt, Human
gacaucaacugcaucaagaugug

SEQ ID NO: 3325302 - RNA, 22 nt, Human
gacaguuaagagaaaugagcuu

SEQ ID NO: 3325303 - RNA, 24 nt, Human
gacagggcacaccgggcacucaga

SEQ ID NO: 3325304 - RNA, 22 nt, Human
gacaggcauguucucugaggac

SEQ ID NO: 3325305 - RNA, 13 nt, Human
gacaggcaagcac

SEQ ID NO: 3325306 - RNA, 17 nt, Human
gacaggcaagcaccucc

SEQ ID NO: 3325307 - RNA, 18 nt, Human
gacaggcaagcaccuccu

SEQ ID NO: 3325308 - RNA, 23 nt, Human
gacaggcaaugcuggcuguuggc

SEQ ID NO: 3325309 - RNA, 20 nt, Human
gacaggcauguucucugagg

SEQ ID NO: 3325310 - RNA, 21 nt, Human
gacaggcauguucucugagga

SEQ ID NO: 3325311 - RNA, 20 nt, Human
gacaggcaagcaccuccugc

SEQ ID NO: 3325312 - RNA, 18 nt, Human
gacaggcaaugcuggcug

SEQ ID NO: 3325313 - RNA, 19 nt, Human
gacaggcaaugcuggcugu

SEQ ID NO: 3325314 - RNA, 17 nt, Human
gacagacacaggcccgg

SEQ ID NO: 3325315 - RNA, 16 nt, Human
gacacuagaagauuuu

SEQ ID NO: 3325316 - RNA, 20 nt, Human
gacagacacaggcccggcuc

SEQ ID NO: 3325317 - RNA, 22 nt, Human
gacagacacaggcccggcucca

SEQ ID NO: 3325318 - RNA, 21 nt, Human
gacacuaaccacgcuggaccu

SEQ ID NO: 3325319 - RNA, 22 nt, Human
gacacgaauauugcugauggug

SEQ ID NO: 3325320 - RNA, 18 nt, Human
gaauuucccaaagcagug

SEQ ID NO: 3325321 - RNA, 16 nt, Human
gaauuucccaaagcag

SEQ ID NO: 3325322 - RNA, 22 nt, Human
gaauuucccaaagcagugcaug

SEQ ID NO: 3325323 - RNA, 14 nt, Human
gacagagucucacu

SEQ ID NO: 3325324 - RNA, 23 nt, Human
gacagaggcagccccauucugcc

SEQ ID NO: 3325325 - RNA, 21 nt, Human
gacagagucucacuguugccc

SEQ ID NO: 3325326 - RNA, 16 nt, Human
gacagagugagacucu

SEQ ID NO: 3325327 - RNA, 20 nt, Human
gacagagcuacacaggggaa

SEQ ID NO: 3325328 - RNA, 12 nt, Human
gacuacaggcac

SEQ ID NO: 3325329 - RNA, 18 nt, Human
gacuacaggcacccacca

SEQ ID NO: 3325330 - RNA, 13 nt, Human
gacuacaggcacc

SEQ ID NO: 3325331 - RNA, 15 nt, Human
gacuacaggcaccca

SEQ ID NO: 3325332 - RNA, 20 nt, Human
gacuccugcaggcagccagg

SEQ ID NO: 3325333 - RNA, 19 nt, Human
gacuccugcaggcagccag

SEQ ID NO: 3325334 - RNA, 18 nt, Human
gacuccugcaggcagcca

SEQ ID NO: 3325335 - RNA, 15 nt, Human
gacucuacagaggcc

SEQ ID NO: 3325336 - RNA, 21 nt, Human
gacucuacagaggccaugggc

SEQ ID NO: 3325337 - RNA, 16 nt, Human
gacugaauuucuuuug

SEQ ID NO: 3325338 - RNA, 23 nt, Human
gacuggccaagguuuggggaaga

SEQ ID NO: 3325339 - RNA, 23 nt, Human
gacuuacuguacaugaaaacaca

SEQ ID NO: 3325340 - RNA, 18 nt, Human
gacuuacuguacaugaaa

SEQ ID NO: 3325341 - RNA, 12 nt, Human
gacuuacuguac

SEQ ID NO: 3325342 - RNA, 16 nt, Human
gacuuacuguacauga

SEQ ID NO: 3325343 - RNA, 15 nt, Human
gacuuacuguacaug

SEQ ID NO: 3325344 - RNA, 20 nt, Human
gacuucaucccucuggggcu

SEQ ID NO: 3325345 - RNA, 12 nt, Human
gacuucaucccu

SEQ ID NO: 3325346 - RNA, 23 nt, Human
gacggagucccaccuuggcugca

SEQ ID NO: 3325347 - RNA, 13 nt, Human
gacggagucccac

SEQ ID NO: 3325348 - RNA, 21 nt, Human
gacgcugugcugcccugccca

SEQ ID NO: 3325349 - RNA, 22 nt, Human
gacgcugugcugcccugcccac

SEQ ID NO: 3325350 - RNA, 19 nt, Human
gaccuuucaauaggaaaaa

SEQ ID NO: 3325351 - RNA, 11 nt, Human
gaccuuucaau

SEQ ID NO: 3325352 - RNA, 22 nt, Human
gaccuuuaagagaaaugagcug

SEQ ID NO: 3325353 - RNA, 14 nt, Human
gacguguuaugacu

SEQ ID NO: 3325354 - RNA, 11 nt, Human
gacguguuaug

SEQ ID NO: 3325355 - RNA, 23 nt, Human
gacuaacuugucuuuggacccug

SEQ ID NO: 3325356 - RNA, 16 nt, Human
gacuaacuugucuuug

SEQ ID NO: 3325357 - RNA, 19 nt, Human
gacccuugccgucuaccug

SEQ ID NO: 3325358 - RNA, 23 nt, Human
gacccuugccgucuaccugaggg

SEQ ID NO: 3325359 - RNA, 20 nt, Human
gacccuugccgucuaccuga

SEQ ID NO: 3325360 - RNA, 14 nt, Human
gaccuucuccuuca

SEQ ID NO: 3325361 - RNA, 16 nt, Human
gaccuucuccuucacc

SEQ ID NO: 3325362 - RNA, 15 nt, Human
gaccuucuccuucac

SEQ ID NO: 3325363 - RNA, 14 nt, Human
gaccuugaacuggg

SEQ ID NO: 3325364 - RNA, 21 nt, Human
gaccuucuccuucaccuuugu

SEQ ID NO: 3325365 - RNA, 20 nt, Human
gaccuucuccuucaccuuug

SEQ ID NO: 3325366 - RNA, 15 nt, Human
gaacacucugagacu

SEQ ID NO: 3325367 - RNA, 14 nt, Human
gaacacucugagac

SEQ ID NO: 3325368 - RNA, 13 nt, Human
gaacacucugaga

SEQ ID NO: 3325369 - RNA, 18 nt, Human
gaaccuuuugagugccuu

SEQ ID NO: 3325370 - RNA, 21 nt, Human
gaaccuuuugagugccuuaca

SEQ ID NO: 3325371 - RNA, 19 nt, Human
gaaccuuuugagugccuua

SEQ ID NO: 3325372 - RNA, 22 nt, Human
gaaccuuuugagugccuuacac

SEQ ID NO: 3325373 - RNA, 20 nt, Human
gaagauaauauuaaggaaga

SEQ ID NO: 3325374 - RNA, 17 nt, Human
gaagcauuuacuuugug

SEQ ID NO: 3325375 - RNA, 23 nt, Human
gaagcccaggaaaggcuccagga

SEQ ID NO: 3325376 - RNA, 23 nt, Human
gaagcccuucuaccuuccugcaa

SEQ ID NO: 3325377 - RNA, 16 nt, Human
gaagcccaggaaaggc

SEQ ID NO: 3325378 - RNA, 15 nt, Human
gaagcccaggaaagg

SEQ ID NO: 3325379 - RNA, 13 nt, Human
gaagcccaggaaa

SEQ ID NO: 3325380 - RNA, 22 nt, Human
gaagccagcaggcucucaggcc

SEQ ID NO: 3325381 - RNA, 21 nt, Human
gaagccagcaggcucucaggc

SEQ ID NO: 3325382 - RNA, 19 nt, Human
gaagccagcaggcucucag

SEQ ID NO: 3325383 - RNA, 20 nt, Human
gaagccagcaggcucucagg

SEQ ID NO: 3325384 - RNA, 19 nt, Human
gaagagaaugcacaaacag

SEQ ID NO: 3325385 - RNA, 17 nt, Human
gaagacuuuggaaagag

SEQ ID NO: 3325386 - RNA, 14 nt, Human
gaagacuuuggaaa

SEQ ID NO: 3325387 - RNA, 20 nt, Human
gaagacuuuucuuucagcca

SEQ ID NO: 3325388 - RNA, 19 nt, Human
gaagacuucaucccucugg

SEQ ID NO: 3325389 - RNA, 13 nt, Human
gaagacuuuggaa

SEQ ID NO: 3325390 - RNA, 11 nt, Human
gaagacuuugg

SEQ ID NO: 3325391 - RNA, 23 nt, Human
gaacuuugaccucugcagcaaua

SEQ ID NO: 3325392 - RNA, 20 nt, Human
gaaguuucugccgcagcccu

SEQ ID NO: 3325393 - RNA, 15 nt, Human
gaagucuuagaugua

SEQ ID NO: 3325394 - RNA, 21 nt, Human
gaaguuucugccgcagcccug

SEQ ID NO: 3325395 - RNA, 15 nt, Human
gaagggggcugggac

SEQ ID NO: 3325396 - RNA, 14 nt, Human
gaagcggcuggcag

SEQ ID NO: 3325397 - RNA, 19 nt, Human
gaagggggcugggacaugg

SEQ ID NO: 3325398 - RNA, 16 nt, Human
gaagggggcugggaca

SEQ ID NO: 3325399 - RNA, 18 nt, Human
gaaguacuauaauuuacc

SEQ ID NO: 3325400 - RNA, 15 nt, Human
gaaguacuggagaaa

SEQ ID NO: 3325401 - RNA, 21 nt, Human
gaaguaauaugcacacauuuu

SEQ ID NO: 3325402 - RNA, 22 nt, Human
gaaguaauaugcacacauuuuu

SEQ ID NO: 3325403 - RNA, 13 nt, Human
gaauaccuguccc

SEQ ID NO: 3325404 - RNA, 15 nt, Human
gaauaccuguccccc

SEQ ID NO: 3325405 - RNA, 23 nt, Human
gaauagcugggacuacaggugug

SEQ ID NO: 3325406 - RNA, 22 nt, Human
gaauagcugggacuacaggugu

SEQ ID NO: 3325407 - RNA, 20 nt, Human
gaaguuugagaucagccugg

SEQ ID NO: 3325408 - RNA, 14 nt, Human
gaauaacauguaau

SEQ ID NO: 3325409 - RNA, 18 nt, Human
gaauaacauguaauuaag

SEQ ID NO: 3325410 - RNA, 19 nt, Human
gaauaacauguaauuaagu

SEQ ID NO: 3325411 - RNA, 21 nt, Human
gaauacagaggcaacugcauu

SEQ ID NO: 3325412 - RNA, 17 nt, Human
gaauaauacaguaucuc

SEQ ID NO: 3325413 - RNA, 19 nt, Human
gaauucucuaguuugauua

SEQ ID NO: 3325414 - RNA, 14 nt, Human
gaauugaaaaacca

SEQ ID NO: 3325415 - RNA, 21 nt, Human
gaaugucagugugacugaucu

SEQ ID NO: 3325416 - RNA, 20 nt, Human
gaaugucagugugacugauc

SEQ ID NO: 3325417 - RNA, 17 nt, Human
gaauucucagaaucuca

SEQ ID NO: 3325418 - RNA, 17 nt, Human
gaauucucuaguuugau

SEQ ID NO: 3325419 - RNA, 15 nt, Human
gaauuucccaaagca

SEQ ID NO: 3325420 - RNA, 22 nt, Human
gaauuguaaggaaugauuaauu

SEQ ID NO: 3325421 - RNA, 15 nt, Human
gaauuguaaggaaug

SEQ ID NO: 3325422 - RNA, 11 nt, Human
gaaugcagugg

SEQ ID NO: 3325423 - RNA, 22 nt, Human
gaaugaaccacaucuugcucug

SEQ ID NO: 3325424 - RNA, 18 nt, Human
gaaugaaccacaucuugc

SEQ ID NO: 3325425 - RNA, 23 nt, Human
gaaugaaccacaucuugcucugc

SEQ ID NO: 3325426 - RNA, 14 nt, Human
gaaugucaguguga

SEQ ID NO: 3325427 - RNA, 13 nt, Human
gaaugucagugug

SEQ ID NO: 3325428 - RNA, 22 nt, Human
gaaugguuuucaaaauaaaaau

SEQ ID NO: 3325429 - RNA, 14 nt, Human
cuugcaugaggcua

SEQ ID NO: 3325430 - RNA, 13 nt, Human
cuugcaugaggcu

SEQ ID NO: 3325431 - RNA, 20 nt, Human
cuuggaagcuccgcuuucua

SEQ ID NO: 3325432 - RNA, 14 nt, Human
cuuggaagcuccgc

SEQ ID NO: 3325433 - RNA, 20 nt, Human
cuugcuucaaccccaugaga

SEQ ID NO: 3325434 - RNA, 17 nt, Human
cuugcucugcugacaga

SEQ ID NO: 3325435 - RNA, 22 nt, Human
cuugcucugcugacagacacag

SEQ ID NO: 3325436 - RNA, 21 nt, Human
cuugcagacucuacagaggcc

SEQ ID NO: 3325437 - RNA, 20 nt, Human
cuugcagacucuacagaggc

SEQ ID NO: 3325438 - RNA, 15 nt, Human
cuugcaauggcagcc

SEQ ID NO: 3325439 - RNA, 16 nt, Human
cuugcaauggcagccu

SEQ ID NO: 3325440 - RNA, 17 nt, Human
cuugcaauggcagccuu

SEQ ID NO: 3325441 - RNA, 18 nt, Human
cuugcaauggcagccuug

SEQ ID NO: 3325442 - RNA, 19 nt, Human
cuugaguugauucagcucu

SEQ ID NO: 3325443 - RNA, 18 nt, Human
cuugaguugauucagcuc

SEQ ID NO: 3325444 - RNA, 20 nt, Human
cuugaguugauucagcucug

SEQ ID NO: 3325445 - RNA, 15 nt, Human
cuugaggguugggcu

SEQ ID NO: 3325446 - RNA, 15 nt, Human
cuugagccugggagg

SEQ ID NO: 3325447 - RNA, 12 nt, Human
cuugagccuggg

SEQ ID NO: 3325448 - RNA, 15 nt, Human
cuugguuuguaaauu

SEQ ID NO: 3325449 - RNA, 14 nt, Human
cuugguuuguaaau

SEQ ID NO: 3325450 - RNA, 20 nt, Human
cuugggccacugugaagaga

SEQ ID NO: 3325451 - RNA, 18 nt, Human
cuugggccacugugaaga

SEQ ID NO: 3325452 - RNA, 15 nt, Human
cuuguggucccaccc

SEQ ID NO: 3325453 - RNA, 19 nt, Human
cuuguggucccaccccaca

SEQ ID NO: 3325454 - RNA, 16 nt, Human
cuuguggucccacccc

SEQ ID NO: 3325455 - RNA, 16 nt, Human
cuuguuaagauaguua

SEQ ID NO: 3325456 - RNA, 17 nt, Human
cuuuaccuuuuuuauac

SEQ ID NO: 3325457 - RNA, 20 nt, Human
cuuuaccuuuuuuauacaua

SEQ ID NO: 3325458 - RNA, 19 nt, Human
cuuuaccuuuuuuauacau

SEQ ID NO: 3325459 - RNA, 15 nt, Human
cuuuagcgcccaguu

SEQ ID NO: 3325460 - RNA, 13 nt, Human
cuuucugaaauaa

SEQ ID NO: 3325461 - RNA, 23 nt, Human
cuuugggaggccaaggugggagg

SEQ ID NO: 3325462 - RNA, 23 nt, Human
cuuugugaggaagccgcuggggc

SEQ ID NO: 3325463 - RNA, 13 nt, Human
cuuuguggcuucc

SEQ ID NO: 3325464 - RNA, 19 nt, Human
cuuugugaggaagccgcug

SEQ ID NO: 3325465 - RNA, 12 nt, Human
cuuugugauuuu

SEQ ID NO: 3325466 - RNA, 21 nt, Human
cuuuguucuggcucuuccagg

SEQ ID NO: 3325467 - RNA, 16 nt, Human
cuuuguucuggcucuu

SEQ ID NO: 3325468 - RNA, 15 nt, Human
cuuuguucuggcucu

SEQ ID NO: 3325469 - RNA, 12 nt, Human
cuuuggaaagac

SEQ ID NO: 3325470 - RNA, 23 nt, Human
cuuuggaaagacuuuuccaaccc

SEQ ID NO: 3325471 - RNA, 14 nt, Human
cuuugcuugaaaga

SEQ ID NO: 3325472 - RNA, 19 nt, Human
gaaaacaugcuacacacug

SEQ ID NO: 3325473 - RNA, 16 nt, Human
cuuuuuuagaguugau

SEQ ID NO: 3325474 - RNA, 19 nt, Human
gaaaacacuguucucugcc

SEQ ID NO: 3325475 - RNA, 18 nt, Human
gaaaacacuguucucugc

SEQ ID NO: 3325476 - RNA, 21 nt, Human
gaaaacacuguucucugcccu

SEQ ID NO: 3325477 - RNA, 20 nt, Human
gaaaacacuguucucugccc

SEQ ID NO: 3325478 - RNA, 18 nt, Human
gaaaacaugcuacacacu

SEQ ID NO: 3325479 - RNA, 16 nt, Human
gaaaacaugcuacaca

SEQ ID NO: 3325480 - RNA, 20 nt, Human
cuuuguuuguugucagcuga

SEQ ID NO: 3325481 - RNA, 21 nt, Human
cuuuguuuguugucagcugaa

SEQ ID NO: 3325482 - RNA, 23 nt, Human
cuuuucuguccgagcuuugaaaa

SEQ ID NO: 3325483 - RNA, 15 nt, Human
cuuuucuguuugcua

SEQ ID NO: 3325484 - RNA, 20 nt, Human
cuuuuguucuugguuuguaa

SEQ ID NO: 3325485 - RNA, 22 nt, Human
cuuuuguucuugguuuguaaau

SEQ ID NO: 3325486 - RNA, 15 nt, Human
cuuacgugaguccug

SEQ ID NO: 3325487 - RNA, 13 nt, Human
cuuacuguacaug

SEQ ID NO: 3325488 - RNA, 16 nt, Human
cuuacuguacaugaaa

SEQ ID NO: 3325489 - RNA, 11 nt, Human
cuuagacaguc

SEQ ID NO: 3325490 - RNA, 19 nt, Human
cuuagacagucccugccaa

SEQ ID NO: 3325491 - RNA, 18 nt, Human
cuuagacagucccugcca

SEQ ID NO: 3325492 - RNA, 17 nt, Human
cuuagacagucccugcc

SEQ ID NO: 3325493 - RNA, 15 nt, Human
cuuagaagucacaca

SEQ ID NO: 3325494 - RNA, 14 nt, Human
cuuagacagucccu

SEQ ID NO: 3325495 - RNA, 16 nt, Human
cuuagacagucccugc

SEQ ID NO: 3325496 - RNA, 15 nt, Human
cuuagacagucccug

SEQ ID NO: 3325497 - RNA, 17 nt, Human
cuuagguuggcaaaaag

SEQ ID NO: 3325498 - RNA, 14 nt, Human
cuuaaucuaaaugg

SEQ ID NO: 3325499 - RNA, 14 nt, Human
cuuaacuucacaua

SEQ ID NO: 3325500 - RNA, 12 nt, Human
cuuaacuucaca

SEQ ID NO: 3325501 - RNA, 22 nt, Human
cuuaacuucacauauugauuuc

SEQ ID NO: 3325502 - RNA, 17 nt, Human
cuuaacuucacauauug

SEQ ID NO: 3325503 - RNA, 16 nt, Human
cuuaacuucacauauu

SEQ ID NO: 3325504 - RNA, 15 nt, Human
cuuaacuucacauau

SEQ ID NO: 3325505 - RNA, 17 nt, Human
cuguuuucucuugagag

SEQ ID NO: 3325506 - RNA, 23 nt, Human
cuguuuguuucugaaagggacgc

SEQ ID NO: 3325507 - RNA, 21 nt, Human
cuguuuguuucugaaagggac

SEQ ID NO: 3325508 - RNA, 14 nt, Human
cuguuuucucuuga

SEQ ID NO: 3325509 - RNA, 13 nt, Human
cuguuuucucuug

SEQ ID NO: 3325510 - RNA, 18 nt, Human
cuguuuguuucugaaagg

SEQ ID NO: 3325511 - RNA, 12 nt, Human
cuguuuagauaa

SEQ ID NO: 3325512 - RNA, 21 nt, Human
cuucgggaggucgaggcagga

SEQ ID NO: 3325513 - RNA, 20 nt, Human
cuucgggaggucgaggcagg

SEQ ID NO: 3325514 - RNA, 13 nt, Human
cuucgcuccugug

SEQ ID NO: 3325515 - RNA, 14 nt, Human
cuucgcuccugugu

SEQ ID NO: 3325516 - RNA, 15 nt, Human
cuucgcuccuguguc

SEQ ID NO: 3325517 - RNA, 17 nt, Human
cuucuccaggcuguauc

SEQ ID NO: 3325518 - RNA, 14 nt, Human
cuucuccaggcugu

SEQ ID NO: 3325519 - RNA, 14 nt, Human
cuucuccacccugc

SEQ ID NO: 3325520 - RNA, 15 nt, Human
cuucuccacccugcu

SEQ ID NO: 3325521 - RNA, 19 nt, Human
cuucuccuucaccuuuguc

SEQ ID NO: 3325522 - RNA, 22 nt, Human
cuucuccuucaccuuugucccc

SEQ ID NO: 3325523 - RNA, 18 nt, Human
cuucugcuucagccuccc

SEQ ID NO: 3325524 - RNA, 13 nt, Human
cuucugcuucagc

SEQ ID NO: 3325525 - RNA, 16 nt, Human
cuucugcuucagccuc

SEQ ID NO: 3325526 - RNA, 17 nt, Human
cuucugcuucagccucc

SEQ ID NO: 3325527 - RNA, 21 nt, Human
cuucugccauauucuguuggc

SEQ ID NO: 3325528 - RNA, 15 nt, Human
cuucugccauauucu

SEQ ID NO: 3325529 - RNA, 17 nt, Human
cuucugccauauucugu

SEQ ID NO: 3325530 - RNA, 11 nt, Human
cuucagcugac

SEQ ID NO: 3325531 - RNA, 18 nt, Human
cuucauuuccugugucuu

SEQ ID NO: 3325532 - RNA, 13 nt, Human
cuucagugccuua

SEQ ID NO: 3325533 - RNA, 12 nt, Human
cuucagugccuu

SEQ ID NO: 3325534 - RNA, 11 nt, Human
cuucagugccu

SEQ ID NO: 3325535 - RNA, 23 nt, Human
cuuccacaagagcccaggccucc

SEQ ID NO: 3325536 - RNA, 22 nt, Human
cuuccacaagagcccaggccuc

SEQ ID NO: 3325537 - RNA, 24 nt, Human
cuuccaggggugggacacccugug

SEQ ID NO: 3325538 - RNA, 22 nt, Human
cuuccaggggugggacacccug

SEQ ID NO: 3325539 - RNA, 21 nt, Human
cuuccaggggugggacacccu

SEQ ID NO: 3325540 - RNA, 14 nt, Human
cuuccagugaggcu

SEQ ID NO: 3325541 - RNA, 15 nt, Human
cuuccagugaggcuc

SEQ ID NO: 3325542 - RNA, 22 nt, Human
cucugcaagaauugaagcagga

SEQ ID NO: 3325543 - RNA, 16 nt, Human
cucugaggacacuaac

SEQ ID NO: 3325544 - RNA, 23 nt, Human
cucugcccuccaagaccuucucc

SEQ ID NO: 3325545 - RNA, 16 nt, Human
cucugcccuccaagac

SEQ ID NO: 3325546 - RNA, 15 nt, Human
cucugcccuccaaga

SEQ ID NO: 3325547 - RNA, 14 nt, Human
cucugcccuccaag

SEQ ID NO: 3325548 - RNA, 14 nt, Human
cucugccucugaca

SEQ ID NO: 3325549 - RNA, 22 nt, Human
cucuggacaggcauguucucug

SEQ ID NO: 3325550 - RNA, 22 nt, Human
cucucaggccagcugcuugggc

SEQ ID NO: 3325551 - RNA, 23 nt, Human
cucucaggccagcugcuugggcu

SEQ ID NO: 3325552 - RNA, 13 nt, Human
cucucccaucacu

SEQ ID NO: 3325553 - RNA, 20 nt, Human
cucucccaucacuucccuac

SEQ ID NO: 3325554 - RNA, 14 nt, Human
cucucccaucacuu

SEQ ID NO: 3325555 - RNA, 18 nt, Human
cucucccaucacuucccu

SEQ ID NO: 3325556 - RNA, 12 nt, Human
cucuccagcccc

SEQ ID NO: 3325557 - RNA, 13 nt, Human
cucuccagccccu

SEQ ID NO: 3325558 - RNA, 18 nt, Human
cucuccuguaccucuuga

SEQ ID NO: 3325559 - RNA, 17 nt, Human
cucuccuguaccucuug

SEQ ID NO: 3325560 - RNA, 22 nt, Human
cucuccuguaccucuugagccu

SEQ ID NO: 3325561 - RNA, 13 nt, Human
cucuccuguaccu

SEQ ID NO: 3325562 - RNA, 15 nt, Human
cucuccuguaccucu

SEQ ID NO: 3325563 - RNA, 14 nt, Human
cucuccuguaccuc

SEQ ID NO: 3325564 - RNA, 14 nt, Human
cucucucacuccuu

SEQ ID NO: 3325565 - RNA, 12 nt, Human
cucucucaggcc

SEQ ID NO: 3325566 - RNA, 16 nt, Human
cucucucacuccuuga

SEQ ID NO: 3325567 - RNA, 15 nt, Human
cucucucacuccuug

SEQ ID NO: 3325568 - RNA, 19 nt, Human
cugaagacucauucuucug

SEQ ID NO: 3325569 - RNA, 21 nt, Human
cugaagacucauucuucugua

SEQ ID NO: 3325570 - RNA, 15 nt, Human
cugaacuuggcgcug

SEQ ID NO: 3325571 - RNA, 21 nt, Human
cugaacuuggcgcugccccug

SEQ ID NO: 3325572 - RNA, 16 nt, Human
cugaacuuggcgcugc

SEQ ID NO: 3325573 - RNA, 21 nt, Human
cugaaccuggguaacuaggga

SEQ ID NO: 3325574 - RNA, 18 nt, Human
cucuuugggccuggcucc

SEQ ID NO: 3325575 - RNA, 19 nt, Human
cucuuuggucuacacugug

SEQ ID NO: 3325576 - RNA, 16 nt, Human
cugaauacagaggcaa

SEQ ID NO: 3325577 - RNA, 14 nt, Human
cugaagucacacag

SEQ ID NO: 3325578 - RNA, 15 nt, Human
cugaagucacacagu

SEQ ID NO: 3325579 - RNA, 24 nt, Human
cugaagucuuuguacagacaacaa

SEQ ID NO: 3325580 - RNA, 11 nt, Human
cugacccacug

SEQ ID NO: 3325581 - RNA, 17 nt, Human
cugacauuguuggccaa

SEQ ID NO: 3325582 - RNA, 20 nt, Human
cugacaggcaaugcuggcug

SEQ ID NO: 3325583 - RNA, 16 nt, Human
cugacaggcaaugcug

SEQ ID NO: 3325584 - RNA, 17 nt, Human
cugacaggcaaugcugg

SEQ ID NO: 3325585 - RNA, 18 nt, Human
cugacaggcaaugcuggc

SEQ ID NO: 3325586 - RNA, 19 nt, Human
cugacaggcaaugcuggcu

SEQ ID NO: 3325587 - RNA, 11 nt, Human
cugacaggcaa

SEQ ID NO: 3325588 - RNA, 21 nt, Human
cugacagacacaggcccggcu

SEQ ID NO: 3325589 - RNA, 19 nt, Human
cugacagacacaggcccgg

SEQ ID NO: 3325590 - RNA, 12 nt, Human
cucuucuccagg

SEQ ID NO: 3325591 - RNA, 23 nt, Human
cucuuccaggcugggagagccuu

SEQ ID NO: 3325592 - RNA, 21 nt, Human
cucuuccaggcugggagagcc

SEQ ID NO: 3325593 - RNA, 22 nt, Human
cucuuccaggcugggagagccu

SEQ ID NO: 3325594 - RNA, 13 nt, Human
cucuuaaaaccca

SEQ ID NO: 3325595 - RNA, 24 nt, Human
cucuuaaaacccaagugccuuagc

SEQ ID NO: 3325596 - RNA, 19 nt, Human
cucuggcagcucagagagg

SEQ ID NO: 3325597 - RNA, 18 nt, Human
cucuggcagcucagagag

SEQ ID NO: 3325598 - RNA, 17 nt, Human
cucuggcagcucagaga

SEQ ID NO: 3325599 - RNA, 16 nt, Human
cucuggcagcucagag

SEQ ID NO: 3325600 - RNA, 17 nt, Human
cucuuucuauuguuucu

SEQ ID NO: 3325601 - RNA, 18 nt, Human
cucuuuggacacucacac

SEQ ID NO: 3325602 - RNA, 15 nt, Human
cucuuuggacacuca

SEQ ID NO: 3325603 - RNA, 17 nt, Human
cucuuuccaucuacccu

SEQ ID NO: 3325604 - RNA, 17 nt, Human
cucuugguccugcugca

SEQ ID NO: 3325605 - RNA, 19 nt, Human
cucuugguccugcugcagu

SEQ ID NO: 3325606 - RNA, 18 nt, Human
cucuugguccugcugcag

SEQ ID NO: 3325607 - RNA, 16 nt, Human
cucuugaccucaggug

SEQ ID NO: 3325608 - RNA, 13 nt, Human
cucuugaccucag

SEQ ID NO: 3325609 - RNA, 15 nt, Human
cucuugaccucaggu

SEQ ID NO: 3325610 - RNA, 14 nt, Human
cucccuuccucuuu

SEQ ID NO: 3325611 - RNA, 13 nt, Human
cucccuuccucuu

SEQ ID NO: 3325612 - RNA, 17 nt, Human
cucccuuggauuguccc

SEQ ID NO: 3325613 - RNA, 23 nt, Human
cucccuucccaccucucucacuc

SEQ ID NO: 3325614 - RNA, 10 nt, Human
cucccuuccu

SEQ ID NO: 3325615 - RNA, 18 nt, Human
cucccaucucacacauga

SEQ ID NO: 3325616 - RNA, 15 nt, Human
cucccaucucacaca

SEQ ID NO: 3325617 - RNA, 14 nt, Human
cucccaucucacac

SEQ ID NO: 3325618 - RNA, 12 nt, Human
cuccugcaggca

SEQ ID NO: 3325619 - RNA, 14 nt, Human
cuccugcaggcagc

SEQ ID NO: 3325620 - RNA, 13 nt, Human
cuccugcaggcag

SEQ ID NO: 3325621 - RNA, 14 nt, Human
cuccucagaucuuc

SEQ ID NO: 3325622 - RNA, 12 nt, Human
cuccucagaucu

SEQ ID NO: 3325623 - RNA, 21 nt, Human
cuccuucaccuuuguccccac

SEQ ID NO: 3325624 - RNA, 19 nt, Human
cuccuucaccuuugucccc

SEQ ID NO: 3325625 - RNA, 16 nt, Human
cuccuucaccuuuguc

SEQ ID NO: 3325626 - RNA, 14 nt, Human
cuccuucaccuuug

SEQ ID NO: 3325627 - RNA, 15 nt, Human
cuccugugucuugca

SEQ ID NO: 3325628 - RNA, 23 nt, Human
cuccugugucuugcaauggcagc

SEQ ID NO: 3325629 - RNA, 11 nt, Human
cuccugugugu

SEQ ID NO: 3325630 - RNA, 22 nt, Human
cuccugcaggcagccaggccac

SEQ ID NO: 3325631 - RNA, 21 nt, Human
cuccugcaggcagccaggcca

SEQ ID NO: 3325632 - RNA, 15 nt, Human
cuccugcaggcagcc

SEQ ID NO: 3325633 - RNA, 21 nt, Human
cuccuugaaaacacuguucuc

SEQ ID NO: 3325634 - RNA, 11 nt, Human
cuccuucuucc

SEQ ID NO: 3325635 - RNA, 16 nt, Human
cucgaacuggcugcaa

SEQ ID NO: 3325636 - RNA, 13 nt, Human
cuccuucaccuuu

SEQ ID NO: 3325637 - RNA, 14 nt, Human
cuccuucuguccua

SEQ ID NO: 3325638 - RNA, 15 nt, Human
cuccuucuguccuac

SEQ ID NO: 3325639 - RNA, 20 nt, Human
cuccuucuguccuacucugu

SEQ ID NO: 3325640 - RNA, 20 nt, Human
cucgaguuacagacaaagcg

SEQ ID NO: 3325641 - RNA, 16 nt, Human
cucgaguuacagacaa

SEQ ID NO: 3325642 - RNA, 15 nt, Human
cucgcgacaaugcaa

SEQ ID NO: 3325643 - RNA, 13 nt, Human
cucgcgacaaugc

SEQ ID NO: 3325644 - RNA, 21 nt, Human
cucauuagcauuuugcuaaau

SEQ ID NO: 3325645 - RNA, 13 nt, Human
cucauucuucugu

SEQ ID NO: 3325646 - RNA, 14 nt, Human
cucauucuucugua

SEQ ID NO: 3325647 - RNA, 12 nt, Human
cucauucuucug

SEQ ID NO: 3325648 - RNA, 16 nt, Human
cucauugaccugaggc

SEQ ID NO: 3325649 - RNA, 23 nt, Human
cucauucuucuguacgucugaca

SEQ ID NO: 3325650 - RNA, 15 nt, Human
cucauugaccugagg

SEQ ID NO: 3325651 - RNA, 13 nt, Human
cucauugaccuga

SEQ ID NO: 3325652 - RNA, 17 nt, Human
cucaggugucccugcac

SEQ ID NO: 3325653 - RNA, 18 nt, Human
cucaggugucccugcacu

SEQ ID NO: 3325654 - RNA, 19 nt, Human
cucaggugucccugcacuu

SEQ ID NO: 3325655 - RNA, 18 nt, Human
cucauaguaugguggcug

SEQ ID NO: 3325656 - RNA, 19 nt, Human
cucauaguaugguggcugg

SEQ ID NO: 3325657 - RNA, 23 nt, Human
cuaaaagguaugcaaucaaaucu

SEQ ID NO: 3325658 - RNA, 12 nt, Human
cucagggucccu

SEQ ID NO: 3325659 - RNA, 15 nt, Human
cucaggugucccugc

SEQ ID NO: 3325660 - RNA, 16 nt, Human
cucaggugucccugca

SEQ ID NO: 3325661 - RNA, 23 nt, Human
cucagguggggucacucuggcag

SEQ ID NO: 3325662 - RNA, 22 nt, Human
cucagguggggucacucuggca

SEQ ID NO: 3325663 - RNA, 11 nt, Human
cuccaggcucc

SEQ ID NO: 3325664 - RNA, 19 nt, Human
cuccagcuguucagcuggu

SEQ ID NO: 3325665 - RNA, 18 nt, Human
cuccagcuguucagcugg

SEQ ID NO: 3325666 - RNA, 13 nt, Human
cuccagcuguuca

SEQ ID NO: 3325667 - RNA, 14 nt, Human
cuccaugugggcua

SEQ ID NO: 3325668 - RNA, 15 nt, Human
cucccaggcauuccc

SEQ ID NO: 3325669 - RNA, 21 nt, Human
cucccaaggggcccaaauucu

SEQ ID NO: 3325670 - RNA, 22 nt, Human
cucccaaggggcccaaauucuu

SEQ ID NO: 3325671 - RNA, 22 nt, Human
cucccaggcauuccccaggagg

SEQ ID NO: 3325672 - RNA, 21 nt, Human
cucccaggcauuccccaggag

SEQ ID NO: 3325673 - RNA, 20 nt, Human
cucccaggcauuccccagga

SEQ ID NO: 3325674 - RNA, 19 nt, Human
cucccaggcauuccccagg

SEQ ID NO: 3325675 - RNA, 17 nt, Human
cucccaggcauucccca

SEQ ID NO: 3325676 - RNA, 11 nt, Human
cuccacccugc

SEQ ID NO: 3325677 - RNA, 21 nt, Human
cuccaccugccagggacagag

SEQ ID NO: 3325678 - RNA, 18 nt, Human
cuccaccugccagggaca

SEQ ID NO: 3325679 - RNA, 17 nt, Human
cuccaccugccagggac

SEQ ID NO: 3325680 - RNA, 15 nt, Human
cuccaccugccaggg

SEQ ID NO: 3325681 - RNA, 12 nt, Human
cuccacccugcu

SEQ ID NO: 3325682 - RNA, 19 nt, Human
cuccagcucaccagcccca

SEQ ID NO: 3325683 - RNA, 20 nt, Human
cuccagcucaccagccccag

SEQ ID NO: 3325684 - RNA, 16 nt, Human
cuggccagaugcacca

SEQ ID NO: 3325685 - RNA, 17 nt, Human
cuggcacugcuuccagu

SEQ ID NO: 3325686 - RNA, 16 nt, Human
cuggcacugcuuccag

SEQ ID NO: 3325687 - RNA, 15 nt, Human
cuggcacugcuucca

SEQ ID NO: 3325688 - RNA, 21 nt, Human
cuggccagaugcaccagcccu

SEQ ID NO: 3325689 - RNA, 17 nt, Human
cuggccagaugcaccag

SEQ ID NO: 3325690 - RNA, 18 nt, Human
cuggccagaugcaccagc

SEQ ID NO: 3325691 - RNA, 19 nt, Human
cuggccagaugcaccagcc

SEQ ID NO: 3325692 - RNA, 20 nt, Human
cuggccagaugcaccagccc

SEQ ID NO: 3325693 - RNA, 13 nt, Human
cuggcccacugca

SEQ ID NO: 3325694 - RNA, 12 nt, Human
cuggcccacugc

SEQ ID NO: 3325695 - RNA, 17 nt, Human
cuggccuagcauacgua

SEQ ID NO: 3325696 - RNA, 23 nt, Human
cuggccuagcauacguacacauu

SEQ ID NO: 3325697 - RNA, 14 nt, Human
cuggccuagcauac

SEQ ID NO: 3325698 - RNA, 14 nt, Human
cuggcacugcuucc

SEQ ID NO: 3325699 - RNA, 13 nt, Human
cuggcacugcuuc

SEQ ID NO: 3325700 - RNA, 23 nt, Human
cuggcacuauaauguaagcucua

SEQ ID NO: 3325701 - RNA, 22 nt, Human
cuggcacuauaauguaagcucu

SEQ ID NO: 3325702 - RNA, 15 nt, Human
cuggauggggcugca

SEQ ID NO: 3325703 - RNA, 16 nt, Human
cuggauggggcugcac

SEQ ID NO: 3325704 - RNA, 23 nt, Human
cuggauuaaacuuaaucuaaaug

SEQ ID NO: 3325705 - RNA, 13 nt, Human
cuggauuaaacuu

SEQ ID NO: 3325706 - RNA, 14 nt, Human
cuggaagcacagcu

SEQ ID NO: 3325707 - RNA, 18 nt, Human
cuggaagcacagcuucau

SEQ ID NO: 3325708 - RNA, 15 nt, Human
cuggaagcacagcuu

SEQ ID NO: 3325709 - RNA, 14 nt, Human
cuggaaugcagugg

SEQ ID NO: 3325710 - RNA, 15 nt, Human
cuggaaugcaguggu

SEQ ID NO: 3325711 - RNA, 18 nt, Human
cugggaggucaaggcugc

SEQ ID NO: 3325712 - RNA, 16 nt, Human
cugggagugagcuggu

SEQ ID NO: 3325713 - RNA, 13 nt, Human
cugggagugagcu

SEQ ID NO: 3325714 - RNA, 12 nt, Human
cugggagugagc

SEQ ID NO: 3325715 - RNA, 20 nt, Human
cugggcaaugugauaaaacc

SEQ ID NO: 3325716 - RNA, 13 nt, Human
cuggccugagcug

SEQ ID NO: 3325717 - RNA, 17 nt, Human
cuggcucuuccaggcug

SEQ ID NO: 3325718 - RNA, 19 nt, Human
cuggcucuuccaggcuggg

SEQ ID NO: 3325719 - RNA, 18 nt, Human
cuggcucuuccaggcugg

SEQ ID NO: 3325720 - RNA, 19 nt, Human
cuggcuguuggcugggggc

SEQ ID NO: 3325721 - RNA, 21 nt, Human
cuggcuggguggcaccagcag

SEQ ID NO: 3325722 - RNA, 18 nt, Human
cuggcuguuggcuggggg

SEQ ID NO: 3325723 - RNA, 20 nt, Human
cuggcuguuggcugggggcc

SEQ ID NO: 3325724 - RNA, 19 nt, Human
cugguggcagugggagcug

SEQ ID NO: 3325725 - RNA, 23 nt, Human
cugguggcagugggagcugccug

SEQ ID NO: 3325726 - RNA, 19 nt, Human
cuggguucuacccaggugc

SEQ ID NO: 3325727 - RNA, 13 nt, Human
cuggguuggaggg

SEQ ID NO: 3325728 - RNA, 17 nt, Human
cugguccauagagagca

SEQ ID NO: 3325729 - RNA, 15 nt, Human
cugguccauagagag

SEQ ID NO: 3325730 - RNA, 15 nt, Human
cuggucccacucagu

SEQ ID NO: 3325731 - RNA, 18 nt, Human
cuggucccacucagucca

SEQ ID NO: 3325732 - RNA, 14 nt, Human
cuggucccacucag

SEQ ID NO: 3325733 - RNA, 18 nt, Human
cugguccauagagagcaa

SEQ ID NO: 3325734 - RNA, 21 nt, Human
cugggcuucaguggcagcugc

SEQ ID NO: 3325735 - RNA, 22 nt, Human
cugggcuucaguggcagcugcu

SEQ ID NO: 3325736 - RNA, 13 nt, Human
cugggcuugggga

SEQ ID NO: 3325737 - RNA, 20 nt, Human
cugggcuuggggaccagagc

SEQ ID NO: 3325738 - RNA, 17 nt, Human
cugggcuuggggaccag

SEQ ID NO: 3325739 - RNA, 18 nt, Human
cugggcuucaguggcagc

SEQ ID NO: 3325740 - RNA, 17 nt, Human
cugggcuucaguggcag

SEQ ID NO: 3325741 - RNA, 19 nt, Human
cugggcuucaguggcagcu

SEQ ID NO: 3325742 - RNA, 20 nt, Human
cugggcuucaguggcagcug

SEQ ID NO: 3325743 - RNA, 19 nt, Human
cuggguacuuguggacaca

SEQ ID NO: 3325744 - RNA, 21 nt, Human
cuggguacuuguggacacagc

SEQ ID NO: 3325745 - RNA, 23 nt, Human
cuggguacuuguggacacagcuc

SEQ ID NO: 3325746 - RNA, 20 nt, Human
cuggguacuuguggacacag

SEQ ID NO: 3325747 - RNA, 23 nt, Human
cugggguggggaccucaggccug

SEQ ID NO: 3325748 - RNA, 22 nt, Human
cugggguggggaccucaggccu

SEQ ID NO: 3325749 - RNA, 21 nt, Human
cugggguggggaccucaggcc

SEQ ID NO: 3325750 - RNA, 13 nt, Human
cugggggccucag

SEQ ID NO: 3325751 - RNA, 17 nt, Human
cugggggccucagugcc

SEQ ID NO: 3325752 - RNA, 19 nt, Human
cugggguggggaccucagg

SEQ ID NO: 3325753 - RNA, 18 nt, Human
cugggguggggaccucag

SEQ ID NO: 3325754 - RNA, 17 nt, Human
cugggguggggaccuca

SEQ ID NO: 3325755 - RNA, 16 nt, Human
cugcaccggcuggccu

SEQ ID NO: 3325756 - RNA, 14 nt, Human
cugcacuugcagac

SEQ ID NO: 3325757 - RNA, 16 nt, Human
cugcacuugcagacuc

SEQ ID NO: 3325758 - RNA, 19 nt, Human
cugcaccggcuggccuggc

SEQ ID NO: 3325759 - RNA, 18 nt, Human
cugcaccggcuggccugg

SEQ ID NO: 3325760 - RNA, 17 nt, Human
cugcaccggcuggccug

SEQ ID NO: 3325761 - RNA, 22 nt, Human
cugcagggaguccgaaagggac

SEQ ID NO: 3325762 - RNA, 22 nt, Human
cugcagccucaaccuccugggc

SEQ ID NO: 3325763 - RNA, 19 nt, Human
cugcagccucaaccuccug

SEQ ID NO: 3325764 - RNA, 20 nt, Human
cugcagccucaaccuccugg

SEQ ID NO: 3325765 - RNA, 11 nt, Human
cugcagccuca

SEQ ID NO: 3325766 - RNA, 16 nt, Human
cugcacaagcugcacc

SEQ ID NO: 3325767 - RNA, 15 nt, Human
cugcacaagcugcac

SEQ ID NO: 3325768 - RNA, 14 nt, Human
cugcacaagcugca

SEQ ID NO: 3325769 - RNA, 13 nt, Human
cugcacaagcugc

SEQ ID NO: 3325770 - RNA, 18 nt, Human
cugcacccucaggcaggu

SEQ ID NO: 3325771 - RNA, 16 nt, Human
cugcacccucaggcag

SEQ ID NO: 3325772 - RNA, 17 nt, Human
cugcacccucaggcagg

SEQ ID NO: 3325773 - RNA, 22 nt, Human
cugauucccaagcucugcuccu

SEQ ID NO: 3325774 - RNA, 19 nt, Human
cugauucccaagcucugcu

SEQ ID NO: 3325775 - RNA, 20 nt, Human
cugauucccaagcucugcuc

SEQ ID NO: 3325776 - RNA, 17 nt, Human
cugauucccaagcucug

SEQ ID NO: 3325777 - RNA, 18 nt, Human
cugauucccaagcucugc

SEQ ID NO: 3325778 - RNA, 15 nt, Human
cugauucccaagcuc

SEQ ID NO: 3325779 - RNA, 13 nt, Human
cugauaaagauga

SEQ ID NO: 3325780 - RNA, 16 nt, Human
cugagucugaaggcug

SEQ ID NO: 3325781 - RNA, 15 nt, Human
cugagucugaaggcu

SEQ ID NO: 3325782 - RNA, 14 nt, Human
cugagucugaaggc

SEQ ID NO: 3325783 - RNA, 13 nt, Human
cugagucugaagg

SEQ ID NO: 3325784 - RNA, 13 nt, Human
cugccucagccuc

SEQ ID NO: 3325785 - RNA, 13 nt, Human
cugccugcccagg

SEQ ID NO: 3325786 - RNA, 14 nt, Human
cugccugcccaggc

SEQ ID NO: 3325787 - RNA, 23 nt, Human
cugccuguugggccaggagccuc

SEQ ID NO: 3325788 - RNA, 23 nt, Human
cugccugaagucacacagugagu

SEQ ID NO: 3325789 - RNA, 13 nt, Human
cugccucuucucu

SEQ ID NO: 3325790 - RNA, 14 nt, Human
cugcuccagcuguu

SEQ ID NO: 3325791 - RNA, 16 nt, Human
cugcgguccacccagg

SEQ ID NO: 3325792 - RNA, 21 nt, Human
cugcggaaugaaccacaucuu

SEQ ID NO: 3325793 - RNA, 15 nt, Human
cugcgguccacccag

SEQ ID NO: 3325794 - RNA, 20 nt, Human
cugcggaaugaaccacaucu

SEQ ID NO: 3325795 - RNA, 18 nt, Human
cugcuccucuccccagca

SEQ ID NO: 3325796 - RNA, 16 nt, Human
cugcuccucuccccag

SEQ ID NO: 3325797 - RNA, 17 nt, Human
cugcuccucuccccagc

SEQ ID NO: 3325798 - RNA, 14 nt, Human
cugccacccugggg

SEQ ID NO: 3325799 - RNA, 15 nt, Human
cugccacccugggga

SEQ ID NO: 3325800 - RNA, 16 nt, Human
cugccacccuggggag

SEQ ID NO: 3325801 - RNA, 20 nt, Human
cugccacccuggggagaaag

SEQ ID NO: 3325802 - RNA, 19 nt, Human
cugccaugccagcuuaucu

SEQ ID NO: 3325803 - RNA, 17 nt, Human
cugccaugccagcuuau

SEQ ID NO: 3325804 - RNA, 15 nt, Human
cugccaugccagcuu

SEQ ID NO: 3325805 - RNA, 18 nt, Human
cugccaggaagccagcag

SEQ ID NO: 3325806 - RNA, 16 nt, Human
cugccaggaagccagc

SEQ ID NO: 3325807 - RNA, 15 nt, Human
cugccaggaagccag

SEQ ID NO: 3325808 - RNA, 19 nt, Human
cugccagccgagauagcca

SEQ ID NO: 3325809 - RNA, 20 nt, Human
cugcccggcaggguccuaga

SEQ ID NO: 3325810 - RNA, 16 nt, Human
cugccccuggcagccc

SEQ ID NO: 3325811 - RNA, 15 nt, Human
cugccccuggcagcc

SEQ ID NO: 3325812 - RNA, 14 nt, Human
cugccccuggcagc

SEQ ID NO: 3325813 - RNA, 16 nt, Human
cugccauuucugagau

SEQ ID NO: 3325814 - RNA, 16 nt, Human
cugcccugcccaccug

SEQ ID NO: 3325815 - RNA, 15 nt, Human
cugcccugcccaccu

SEQ ID NO: 3325816 - RNA, 14 nt, Human
cugcccugcccacc

SEQ ID NO: 3325817 - RNA, 13 nt, Human
cugcccugcccac

SEQ ID NO: 3325818 - RNA, 11 nt, Human
cugcccggcug

SEQ ID NO: 3325819 - RNA, 15 nt, Human
cugcccggcugcgga

SEQ ID NO: 3325820 - RNA, 19 nt, Human
cugcccuccaagaccuucu

SEQ ID NO: 3325821 - RNA, 12 nt, Human
ccuucagugccu

SEQ ID NO: 3325822 - RNA, 14 nt, Human
ccuucagugccuua

SEQ ID NO: 3325823 - RNA, 13 nt, Human
ccuucagugccuu

SEQ ID NO: 3325824 - RNA, 19 nt, Human
ccuucagugccuuauggaa

SEQ ID NO: 3325825 - RNA, 15 nt, Human
ccuucagugccuuau

SEQ ID NO: 3325826 - RNA, 20 nt, Human
ccuucagugccuuauggaac

SEQ ID NO: 3325827 - RNA, 14 nt, Human
ccuuccucuuucca

SEQ ID NO: 3325828 - RNA, 18 nt, Human
ccuuccaggggugggaca

SEQ ID NO: 3325829 - RNA, 16 nt, Human
ccuuccagggguggga

SEQ ID NO: 3325830 - RNA, 15 nt, Human
ccuuccagggguggg

SEQ ID NO: 3325831 - RNA, 17 nt, Human
ccuuagacagucccugc

SEQ ID NO: 3325832 - RNA, 16 nt, Human
ccuuagacagucccug

SEQ ID NO: 3325833 - RNA, 19 nt, Human
ccuuagacagucccugcca

SEQ ID NO: 3325834 - RNA, 18 nt, Human
ccuuagacagucccugcc

SEQ ID NO: 3325835 - RNA, 21 nt, Human
ccuuagacagucccugccaau

SEQ ID NO: 3325836 - RNA, 14 nt, Human
ccuuagacaguccc

SEQ ID NO: 3325837 - RNA, 20 nt, Human
ccuuaccucggugccuuccu

SEQ ID NO: 3325838 - RNA, 13 nt, Human
ccuuaccagcaga

SEQ ID NO: 3325839 - RNA, 19 nt, Human
ccuuacccucauguucuua

SEQ ID NO: 3325840 - RNA, 16 nt, Human
ccuuaccagcagagca

SEQ ID NO: 3325841 - RNA, 15 nt, Human
ccuuaccagcagagc

SEQ ID NO: 3325842 - RNA, 14 nt, Human
ccuuaccagcagag

SEQ ID NO: 3325843 - RNA, 11 nt, Human
ccuuuggcuuc

SEQ ID NO: 3325844 - RNA, 15 nt, Human
ccuugaaaacacugu

SEQ ID NO: 3325845 - RNA, 13 nt, Human
ccuucgcuccugu

SEQ ID NO: 3325846 - RNA, 14 nt, Human
ccuucgcuccugug

SEQ ID NO: 3325847 - RNA, 15 nt, Human
ccuucgcuccugugu

SEQ ID NO: 3325848 - RNA, 14 nt, Human
ccuugaacugggua

SEQ ID NO: 3325849 - RNA, 22 nt, Human
ccuugaaaacacuguucucugc

SEQ ID NO: 3325850 - RNA, 21 nt, Human
ccuugaaaacacuguucucug

SEQ ID NO: 3325851 - RNA, 19 nt, Human
ccuugaaaacacuguucuc

SEQ ID NO: 3325852 - RNA, 16 nt, Human
ccuugaacuggguacu

SEQ ID NO: 3325853 - RNA, 17 nt, Human
ccuugaacuuugaccuc

SEQ ID NO: 3325854 - RNA, 17 nt, Human
ccuugaaugaugccaug

SEQ ID NO: 3325855 - RNA, 20 nt, Human
ccuugaguugauucagcucu

SEQ ID NO: 3325856 - RNA, 21 nt, Human
ccuugaccauucuccaccugc

SEQ ID NO: 3325857 - RNA, 23 nt, Human
ccuugaguugauucagcucugca

SEQ ID NO: 3325858 - RNA, 22 nt, Human
ccuugaguugauucagcucugc

SEQ ID NO: 3325859 - RNA, 19 nt, Human
ccuuggauuguccccgacc

SEQ ID NO: 3325860 - RNA, 15 nt, Human
ccuugacagggcaca

SEQ ID NO: 3325861 - RNA, 17 nt, Human
ccuugacagggcacacc

SEQ ID NO: 3325862 - RNA, 20 nt, Human
ccuugaccauucuccaccug

SEQ ID NO: 3325863 - RNA, 19 nt, Human
ccuugaccauucuccaccu

SEQ ID NO: 3325864 - RNA, 14 nt, Human
ccuugacagggcac

SEQ ID NO: 3325865 - RNA, 13 nt, Human
ccuugacagggca

SEQ ID NO: 3325866 - RNA, 14 nt, Human
ccuggacccugugg

SEQ ID NO: 3325867 - RNA, 13 nt, Human
ccuggacccugug

SEQ ID NO: 3325868 - RNA, 14 nt, Human
ccuggcaugggaau

SEQ ID NO: 3325869 - RNA, 17 nt, Human
ccuggcaugggaaugaa

SEQ ID NO: 3325870 - RNA, 16 nt, Human
ccuggcaugggaauga

SEQ ID NO: 3325871 - RNA, 16 nt, Human
ccuggcagccccuguu

SEQ ID NO: 3325872 - RNA, 14 nt, Human
ccuggcagccccug

SEQ ID NO: 3325873 - RNA, 21 nt, Human
ccuggcacugcuuccagugag

SEQ ID NO: 3325874 - RNA, 17 nt, Human
ccuggcacugcuuccag

SEQ ID NO: 3325875 - RNA, 20 nt, Human
ccuggcacugcuuccaguga

SEQ ID NO: 3325876 - RNA, 12 nt, Human
ccugggcagaag

SEQ ID NO: 3325877 - RNA, 14 nt, Human
ccugggcagaagga

SEQ ID NO: 3325878 - RNA, 20 nt, Human
ccugggaggucaaggcugca

SEQ ID NO: 3325879 - RNA, 20 nt, Human
ccugggaucccucauccuca

SEQ ID NO: 3325880 - RNA, 16 nt, Human
ccugggaucccucauc

SEQ ID NO: 3325881 - RNA, 18 nt, Human
ccuggcaugggaaugaau

SEQ ID NO: 3325882 - RNA, 14 nt, Human
ccuggccccucagg

SEQ ID NO: 3325883 - RNA, 12 nt, Human
ccugcuccagcu

SEQ ID NO: 3325884 - RNA, 22 nt, Human
ccugcuccagcuguucagcugg

SEQ ID NO: 3325885 - RNA, 14 nt, Human
ccugcuccagcugu

SEQ ID NO: 3325886 - RNA, 13 nt, Human
ccugcuccagcug

SEQ ID NO: 3325887 - RNA, 18 nt, Human
ccugcaacaccuuguuuc

SEQ ID NO: 3325888 - RNA, 16 nt, Human
ccugcaaccugauugu

SEQ ID NO: 3325889 - RNA, 19 nt, Human
ccugcaacaccuuguuucc

SEQ ID NO: 3325890 - RNA, 23 nt, Human
ccugcgucucauacucaccucac

SEQ ID NO: 3325891 - RNA, 19 nt, Human
ccugcugguucaggguugg

SEQ ID NO: 3325892 - RNA, 13 nt, Human
ccugcugguucag

SEQ ID NO: 3325893 - RNA, 21 nt, Human
ccugcuggguguggcgcagca

SEQ ID NO: 3325894 - RNA, 23 nt, Human
ccuguagagugggagcugagugg

SEQ ID NO: 3325895 - RNA, 19 nt, Human
ccuguagagugggagcuga

SEQ ID NO: 3325896 - RNA, 21 nt, Human
ccuguagagugggagcugagu

SEQ ID NO: 3325897 - RNA, 20 nt, Human
ccuguaauccuagcacuuug

SEQ ID NO: 3325898 - RNA, 12 nt, Human
ccuguaccucuu

SEQ ID NO: 3325899 - RNA, 18 nt, Human
ccugguggcagcucaccu

SEQ ID NO: 3325900 - RNA, 17 nt, Human
ccugguggcagcucacc

SEQ ID NO: 3325901 - RNA, 16 nt, Human
ccugguggcagcucac

SEQ ID NO: 3325902 - RNA, 14 nt, Human
ccugguggcagcuc

SEQ ID NO: 3325903 - RNA, 12 nt, Human
ccugguggcagc

SEQ ID NO: 3325904 - RNA, 13 nt, Human
ccugguggcagcu

SEQ ID NO: 3325905 - RNA, 17 nt, Human
ccugugauggggcccug

SEQ ID NO: 3325906 - RNA, 19 nt, Human
ccugugauggggcccugcc

SEQ ID NO: 3325907 - RNA, 18 nt, Human
ccugugauggggcccugc

SEQ ID NO: 3325908 - RNA, 22 nt, Human
ccugugauggggcccugccucc

SEQ ID NO: 3325909 - RNA, 21 nt, Human
ccugugauggggcccugccuc

SEQ ID NO: 3325910 - RNA, 20 nt, Human
ccugugauggggcccugccu

SEQ ID NO: 3325911 - RNA, 15 nt, Human
ccugugccucuggga

SEQ ID NO: 3325912 - RNA, 17 nt, Human
ccugugccucugggacu

SEQ ID NO: 3325913 - RNA, 18 nt, Human
ccuguccccgcacugggc

SEQ ID NO: 3325914 - RNA, 16 nt, Human
ccugucccccugacaa

SEQ ID NO: 3325915 - RNA, 17 nt, Human
ccugucccccugacaac

SEQ ID NO: 3325916 - RNA, 20 nt, Human
ccugugaguacuacaguccu

SEQ ID NO: 3325917 - RNA, 18 nt, Human
cggcuggccuggccccuc

SEQ ID NO: 3325918 - RNA, 14 nt, Human
cggcuggccuggcc

SEQ ID NO: 3325919 - RNA, 16 nt, Human
cggcuggccuggcccc

SEQ ID NO: 3325920 - RNA, 15 nt, Human
cggcuggccuggccc

SEQ ID NO: 3325921 - RNA, 20 nt, Human
cgggaggauguucugggaca

SEQ ID NO: 3325922 - RNA, 16 nt, Human
cgggaggucgaggcag

SEQ ID NO: 3325923 - RNA, 17 nt, Human
cgggaggucgaggcagg

SEQ ID NO: 3325924 - RNA, 15 nt, Human
cgggcaugacacgaa

SEQ ID NO: 3325925 - RNA, 12 nt, Human
cgggcaugacac

SEQ ID NO: 3325926 - RNA, 15 nt, Human
cggacagccacggcc

SEQ ID NO: 3325927 - RNA, 16 nt, Human
cggacagccacggcca

SEQ ID NO: 3325928 - RNA, 18 nt, Human
cggacagccacggccagg

SEQ ID NO: 3325929 - RNA, 20 nt, Human
cggaaugaaccacaucuugc

SEQ ID NO: 3325930 - RNA, 13 nt, Human
cgcuccugugucu

SEQ ID NO: 3325931 - RNA, 21 nt, Human
cgauucuucugcuucagccuc

SEQ ID NO: 3325932 - RNA, 13 nt, Human
cgauucuucugcu

SEQ ID NO: 3325933 - RNA, 19 nt, Human
cgauucuucugcuucagcc

SEQ ID NO: 3325934 - RNA, 19 nt, Human
cgaucuggguucacugcaa

SEQ ID NO: 3325935 - RNA, 23 nt, Human
cgcacuucgggaggucgaggcag

SEQ ID NO: 3325936 - RNA, 12 nt, Human
cgauuucuguuu

SEQ ID NO: 3325937 - RNA, 15 nt, Human
ccuuuguauucucuc

SEQ ID NO: 3325938 - RNA, 20 nt, Human
ccuuuguauucucuccugua

SEQ ID NO: 3325939 - RNA, 18 nt, Human
ccuuuguauucucuccug

SEQ ID NO: 3325940 - RNA, 18 nt, Human
cgaggccuucucugaagg

SEQ ID NO: 3325941 - RNA, 19 nt, Human
cgaggccuucucugaagga

SEQ ID NO: 3325942 - RNA, 13 nt, Human
cgaggacagggag

SEQ ID NO: 3325943 - RNA, 12 nt, Human
cgaggacaggga

SEQ ID NO: 3325944 - RNA, 13 nt, Human
ccuuuaagagaaa

SEQ ID NO: 3325945 - RNA, 20 nt, Human
ccuuguggucccaccccaca

SEQ ID NO: 3325946 - RNA, 19 nt, Human
ccuuguggucccaccccac

SEQ ID NO: 3325947 - RNA, 16 nt, Human
ccuuguggucccaccc

SEQ ID NO: 3325948 - RNA, 12 nt, Human
ccuuggcugcag

SEQ ID NO: 3325949 - RNA, 13 nt, Human
ccuuggcugcagg

SEQ ID NO: 3325950 - RNA, 16 nt, Human
ccuuugcuugaaagaa

SEQ ID NO: 3325951 - RNA, 23 nt, Human
ccuuugacgccaucccagcccca

SEQ ID NO: 3325952 - RNA, 16 nt, Human
cgcgugcacacaccag

SEQ ID NO: 3325953 - RNA, 19 nt, Human
cgcgugcacacaccagagc

SEQ ID NO: 3325954 - RNA, 20 nt, Human
cgcgugcacacaccagagcc

SEQ ID NO: 3325955 - RNA, 16 nt, Human
cgcuaagagggaggga

SEQ ID NO: 3325956 - RNA, 15 nt, Human
cgcuaagagggaggg

SEQ ID NO: 3325957 - RNA, 14 nt, Human
cgcuaagagggagg

SEQ ID NO: 3325958 - RNA, 14 nt, Human
cgcagacaggacca

SEQ ID NO: 3325959 - RNA, 13 nt, Human
cgcagacaggacc

SEQ ID NO: 3325960 - RNA, 15 nt, Human
cgcccccacugguga

SEQ ID NO: 3325961 - RNA, 15 nt, Human
cgcgacaaugcaaac

SEQ ID NO: 3325962 - RNA, 17 nt, Human
cgcgacaaugcaaacca

SEQ ID NO: 3325963 - RNA, 16 nt, Human
cgcgacaaugcaaacc

SEQ ID NO: 3325964 - RNA, 23 nt, Human
cggugcuaucucccccagcccca

SEQ ID NO: 3325965 - RNA, 22 nt, Human
cggugcuaucucccccagcccc

SEQ ID NO: 3325966 - RNA, 20 nt, Human
cgugcacacaccagagccca

SEQ ID NO: 3325967 - RNA, 21 nt, Human
cgugcacacaccagagcccac

SEQ ID NO: 3325968 - RNA, 22 nt, Human
cgugcaguggugcgaucugggu

SEQ ID NO: 3325969 - RNA, 22 nt, Human
cgugcacacaccagagcccacc

SEQ ID NO: 3325970 - RNA, 18 nt, Human
cgugcauaccacuuuugu

SEQ ID NO: 3325971 - RNA, 14 nt, Human
cgugcauaccacuu

SEQ ID NO: 3325972 - RNA, 19 nt, Human
cgugcauaccacuuuuguu

SEQ ID NO: 3325973 - RNA, 14 nt, Human
cguccccugucccc

SEQ ID NO: 3325974 - RNA, 11 nt, Human
cguccccuguc

SEQ ID NO: 3325975 - RNA, 14 nt, Human
cgucuaccugaggg

SEQ ID NO: 3325976 - RNA, 13 nt, Human
cgucugacaggca

SEQ ID NO: 3325977 - RNA, 15 nt, Human
cguggcugcuucaag

SEQ ID NO: 3325978 - RNA, 14 nt, Human
cguggcugcuucaa

SEQ ID NO: 3325979 - RNA, 12 nt, Human
cguggcugcuuc

SEQ ID NO: 3325980 - RNA, 21 nt, Human
cguuucuaaaggcuaccuuug

SEQ ID NO: 3325981 - RNA, 19 nt, Human
cguuucuaaaggcuaccuu

SEQ ID NO: 3325982 - RNA, 20 nt, Human
cguuucuaugacacaugcaa

SEQ ID NO: 3325983 - RNA, 17 nt, Human
ccucuuaugggcugggu

SEQ ID NO: 3325984 - RNA, 19 nt, Human
ccucuuuggucuacacugu

SEQ ID NO: 3325985 - RNA, 22 nt, Human
ccucuuuggucuacacugugcu

SEQ ID NO: 3325986 - RNA, 15 nt, Human
ccugaagucacacag

SEQ ID NO: 3325987 - RNA, 13 nt, Human
ccugaaggccccg

SEQ ID NO: 3325988 - RNA, 16 nt, Human
ccugaagucacacagu

SEQ ID NO: 3325989 - RNA, 17 nt, Human
ccugaagucacacagug

SEQ ID NO: 3325990 - RNA, 14 nt, Human
ccucuuaugggcug

SEQ ID NO: 3325991 - RNA, 16 nt, Human
ccucuuaugggcuggg

SEQ ID NO: 3325992 - RNA, 15 nt, Human
ccucuuaugggcugg

SEQ ID NO: 3325993 - RNA, 14 nt, Human
ccucuuagaaaaac

SEQ ID NO: 3325994 - RNA, 23 nt, Human
ccucuguacagagcccacgcccc

SEQ ID NO: 3325995 - RNA, 18 nt, Human
ccucuguacagagcccac

SEQ ID NO: 3325996 - RNA, 17 nt, Human
ccucuguacagagccca

SEQ ID NO: 3325997 - RNA, 16 nt, Human
ccucuguacagagccc

SEQ ID NO: 3325998 - RNA, 15 nt, Human
ccucuguacagagcc

SEQ ID NO: 3325999 - RNA, 14 nt, Human
ccucuguacagagc

SEQ ID NO: 3326000 - RNA, 14 nt, Human
ccugaggcccuucu

SEQ ID NO: 3326001 - RNA, 14 nt, Human
ccugaugcuucuuc

SEQ ID NO: 3326002 - RNA, 22 nt, Human
ccugaugcuucuucagagacuc

SEQ ID NO: 3326003 - RNA, 18 nt, Human
ccugaugcuucuucagag

SEQ ID NO: 3326004 - RNA, 17 nt, Human
ccugaugcuucuucaga

SEQ ID NO: 3326005 - RNA, 23 nt, Human
ccugauugugucucuugguccug

SEQ ID NO: 3326006 - RNA, 19 nt, Human
ccugauugugucucuuggu

SEQ ID NO: 3326007 - RNA, 23 nt, Human
ccugaggcccuucucuccagccc

SEQ ID NO: 3326008 - RNA, 22 nt, Human
ccugaggcccuucucuccagcc

SEQ ID NO: 3326009 - RNA, 21 nt, Human
ccugaggcccuucucuccagc

SEQ ID NO: 3326010 - RNA, 20 nt, Human
ccugaggcccuucucuccag

SEQ ID NO: 3326011 - RNA, 19 nt, Human
ccugaggcccuucucucca

SEQ ID NO: 3326012 - RNA, 17 nt, Human
ccugaggcccuucucuc

SEQ ID NO: 3326013 - RNA, 16 nt, Human
ccugaggcccuucucu

SEQ ID NO: 3326014 - RNA, 16 nt, Human
ccugacaacacucauu

SEQ ID NO: 3326015 - RNA, 15 nt, Human
ccugacaacacucau

SEQ ID NO: 3326016 - RNA, 14 nt, Human
ccugacaacacuca

SEQ ID NO: 3326017 - RNA, 12 nt, Human
ccugacaacacu

SEQ ID NO: 3326018 - RNA, 13 nt, Human
ccugaggcccaga

SEQ ID NO: 3326019 - RNA, 12 nt, Human
ccugaggcccag

SEQ ID NO: 3326020 - RNA, 13 nt, Human
ccuccugugugug

SEQ ID NO: 3326021 - RNA, 15 nt, Human
ccuccugugugugcg

SEQ ID NO: 3326022 - RNA, 22 nt, Human
ccuccugugugugcgccuacag

SEQ ID NO: 3326023 - RNA, 13 nt, Human
ccuccugggcuaa

SEQ ID NO: 3326024 - RNA, 16 nt, Human
ccucccucccucuuuc

SEQ ID NO: 3326025 - RNA, 13 nt, Human
ccucccucuuucc

SEQ ID NO: 3326026 - RNA, 13 nt, Human
ccucccucccucu

SEQ ID NO: 3326027 - RNA, 15 nt, Human
ccucccucccucuuu

SEQ ID NO: 3326028 - RNA, 16 nt, Human
ccucagcauccuggca

SEQ ID NO: 3326029 - RNA, 17 nt, Human
ccucagcauccuggcac

SEQ ID NO: 3326030 - RNA, 14 nt, Human
ccucagcauccugg

SEQ ID NO: 3326031 - RNA, 14 nt, Human
ccucagggucccug

SEQ ID NO: 3326032 - RNA, 11 nt, Human
ccucaggccug

SEQ ID NO: 3326033 - RNA, 10 nt, Human
ccucaggccu

SEQ ID NO: 3326034 - RNA, 21 nt, Human
ccucaggccugggggcugggc

SEQ ID NO: 3326035 - RNA, 14 nt, Human
ccucaggccugggg

SEQ ID NO: 3326036 - RNA, 16 nt, Human
ccucaggugagaagca

SEQ ID NO: 3326037 - RNA, 22 nt, Human
ccucagggucccugguggcagc

SEQ ID NO: 3326038 - RNA, 22 nt, Human
ccucaggugauccacccaccuc

SEQ ID NO: 3326039 - RNA, 22 nt, Human
ccucaggugagaagcagaggaa

SEQ ID NO: 3326040 - RNA, 17 nt, Human
ccucaggugauccaccc

SEQ ID NO: 3326041 - RNA, 19 nt, Human
ccucaggugauccacccac

SEQ ID NO: 3326042 - RNA, 15 nt, Human
ccucagucuggcccu

SEQ ID NO: 3326043 - RNA, 23 nt, Human
ccuccugugugugcgccuacagg

SEQ ID NO: 3326044 - RNA, 12 nt, Human
ccucucccauca

SEQ ID NO: 3326045 - RNA, 16 nt, Human
ccucugacacacagcu

SEQ ID NO: 3326046 - RNA, 15 nt, Human
ccucugacacacagc

SEQ ID NO: 3326047 - RNA, 23 nt, Human
ccucugaaaaccaauguucucuc

SEQ ID NO: 3326048 - RNA, 12 nt, Human
ccucugggacug

SEQ ID NO: 3326049 - RNA, 17 nt, Human
ccucugacacacagcuc

SEQ ID NO: 3326050 - RNA, 15 nt, Human
ccucugcacaagcug

SEQ ID NO: 3326051 - RNA, 11 nt, Human
ccucugcacaa

SEQ ID NO: 3326052 - RNA, 19 nt, Human
ccucugcacaagcugcacc

SEQ ID NO: 3326053 - RNA, 17 nt, Human
ccucugcacaagcugca

SEQ ID NO: 3326054 - RNA, 20 nt, Human
ccucugcacaagcugcaccc

SEQ ID NO: 3326055 - RNA, 21 nt, Human
ccucugcacuccccugcuggg

SEQ ID NO: 3326056 - RNA, 20 nt, Human
ccucugcacuccccugcugg

SEQ ID NO: 3326057 - RNA, 19 nt, Human
ccucugcacuccccugcug

SEQ ID NO: 3326058 - RNA, 14 nt, Human
ccucugcacucccc

SEQ ID NO: 3326059 - RNA, 22 nt, Human
ccucugcacuccccugcugggu

SEQ ID NO: 3326060 - RNA, 19 nt, Human
ccucugcagcaauaaagca

SEQ ID NO: 3326061 - RNA, 13 nt, Human
ccggcuggccugg

SEQ ID NO: 3326062 - RNA, 15 nt, Human
ccgggcacucagaag

SEQ ID NO: 3326063 - RNA, 12 nt, Human
ccggcuggccug

SEQ ID NO: 3326064 - RNA, 14 nt, Human
ccgcuggggccagu

SEQ ID NO: 3326065 - RNA, 23 nt, Human
ccgcuuucuacccagcgagcccu

SEQ ID NO: 3326066 - RNA, 17 nt, Human
ccucaccuuucccaucu

SEQ ID NO: 3326067 - RNA, 15 nt, Human
ccucaccccacugug

SEQ ID NO: 3326068 - RNA, 22 nt, Human
ccucacaguccuuaccagcaga

SEQ ID NO: 3326069 - RNA, 20 nt, Human
ccucacaguccuuaccagca

SEQ ID NO: 3326070 - RNA, 12 nt, Human
ccucaccccacu

SEQ ID NO: 3326071 - RNA, 23 nt, Human
ccucaagugauucuccugccuca

SEQ ID NO: 3326072 - RNA, 17 nt, Human
ccucacaguccuuacca

SEQ ID NO: 3326073 - RNA, 19 nt, Human
cccuuuuuuggcugcugaa

SEQ ID NO: 3326074 - RNA, 22 nt, Human
ccgagauagccaaggccaaagg

SEQ ID NO: 3326075 - RNA, 19 nt, Human
ccgagauagccaaggccaa

SEQ ID NO: 3326076 - RNA, 18 nt, Human
ccgagauagccaaggcca

SEQ ID NO: 3326077 - RNA, 17 nt, Human
ccgagaaggaagccucc

SEQ ID NO: 3326078 - RNA, 18 nt, Human
cccuuuuuuggcugcuga

SEQ ID NO: 3326079 - RNA, 17 nt, Human
cccuuuuuuggcugcug

SEQ ID NO: 3326080 - RNA, 13 nt, Human
cccuuuucuguuu

SEQ ID NO: 3326081 - RNA, 11 nt, Human
cccuuuuccuu

SEQ ID NO: 3326082 - RNA, 18 nt, Human
ccgagaucacgccacugc

SEQ ID NO: 3326083 - RNA, 17 nt, Human
ccgaggccuucucugaa

SEQ ID NO: 3326084 - RNA, 18 nt, Human
cccuugccgucuaccuga

SEQ ID NO: 3326085 - RNA, 17 nt, Human
cccuugccgucuaccug

SEQ ID NO: 3326086 - RNA, 20 nt, Human
cccuuugacgccaucccagc

SEQ ID NO: 3326087 - RNA, 18 nt, Human
cccuuguggucccacccc

SEQ ID NO: 3326088 - RNA, 16 nt, Human
cccuuguggucccacc

SEQ ID NO: 3326089 - RNA, 14 nt, Human
cccuugugguccca

SEQ ID NO: 3326090 - RNA, 18 nt, Human
cccuuggggagcaggcuc

SEQ ID NO: 3326091 - RNA, 18 nt, Human
cccugugggcccccaaau

SEQ ID NO: 3326092 - RNA, 15 nt, Human
cccuguuuguuucug

SEQ ID NO: 3326093 - RNA, 15 nt, Human
cccugugggccccca

SEQ ID NO: 3326094 - RNA, 16 nt, Human
cccugugggcccccaa

SEQ ID NO: 3326095 - RNA, 17 nt, Human
ccccucagggucccugg

SEQ ID NO: 3326096 - RNA, 20 nt, Human
ccccucagggucccuggugg
